United States Patent Application Publication US 2005/0244851 A1 - sequence listing, part 88

SEQ ID NO: 3428048 - DNA, 25 bp, Homo sapien
catttcttttagcatgacgagtttc

SEQ ID NO: 3428049 - DNA, 25 bp, Homo sapien
cactgagttaagatctttgtccatt

SEQ ID NO: 3428050 - DNA, 25 bp, Homo sapien
ttagcatgacgagtttcttcagggt

SEQ ID NO: 3428051 - DNA, 25 bp, Homo sapien
tgaccactgagttaagatctttgtc

SEQ ID NO: 3428052 - DNA, 25 bp, Homo sapien
tatcaatagtcaccatattatgaat

SEQ ID NO: 3428053 - DNA, 25 bp, Homo sapien
tcaatagtcaccatattatgaatta

SEQ ID NO: 3428054 - DNA, 25 bp, Homo sapien
tagcttttgtgtatgtaggtatatc

SEQ ID NO: 3428055 - DNA, 25 bp, Homo sapien
aaatagcttttgtgtatgtaggtat

SEQ ID NO: 3428056 - DNA, 25 bp, Homo sapien
cacccagccatttggcatcaattga

SEQ ID NO: 3428057 - DNA, 25 bp, Homo sapien
cgcgtctggccaaggtgtgataatg

SEQ ID NO: 3428058 - DNA, 25 bp, Homo sapien
cgtctggccaaggtgtgataatggt

SEQ ID NO: 3428059 - DNA, 25 bp, Homo sapien
accgcgtctggccaaggtgtgataa

SEQ ID NO: 3428060 - DNA, 25 bp, Homo sapien
gatctcaagttatccgctccccttg

SEQ ID NO: 3428061 - DNA, 25 bp, Homo sapien
cgttggagcgaagaattctttttga

SEQ ID NO: 3428062 - DNA, 25 bp, Homo sapien
cactagctggaaggacgatctcgtt

SEQ ID NO: 3428063 - DNA, 25 bp, Homo sapien
cagtccactagctggaaggacgatc

SEQ ID NO: 3428064 - DNA, 25 bp, Homo sapien
aaggacgatctcgttggagcgaaga

SEQ ID NO: 3428065 - DNA, 25 bp, Homo sapien
gcttgttggcatctcgcttaaggaa

SEQ ID NO: 3428066 - DNA, 25 bp, Homo sapien
cacggccaaggtcttatagcccaag

SEQ ID NO: 3428067 - DNA, 25 bp, Homo sapien
atgttgatgagtcccacggccaagg

SEQ ID NO: 3428068 - DNA, 25 bp, Homo sapien
caagatggtccgattcttgtaacgt

SEQ ID NO: 3428069 - DNA, 25 bp, Homo sapien
ccttcacgttgctgtgtaggccaag

SEQ ID NO: 3428070 - DNA, 25 bp, Homo sapien
tggctggacagggagtagatcttta

SEQ ID NO: 3428071 - DNA, 25 bp, Homo sapien
accagtgcgccttcattaggatgct

SEQ ID NO: 3428072 - DNA, 25 bp, Homo sapien
tccttcatggtcaatgggttggctg

SEQ ID NO: 3428073 - DNA, 25 bp, Homo sapien
aggatgggctccctcttcgtagggt

SEQ ID NO: 3428074 - DNA, 25 bp, Homo sapien
tccctcttcgtagggtctccagatg

SEQ ID NO: 3428075 - DNA, 25 bp, Homo sapien
caggaacatctcaggcactgtcttg

SEQ ID NO: 3428076 - DNA, 25 bp, Homo sapien
caggggtctctaaaggtctcttgcc

SEQ ID NO: 3428077 - DNA, 25 bp, Homo sapien
catgcaatggatcatcactgccttc

SEQ ID NO: 3428078 - DNA, 25 bp, Homo sapien
aatggatcatcactgccttcctgtt

SEQ ID NO: 3428079 - DNA, 25 bp, Homo sapien
ctgcccatgcaatggatcatcactg

SEQ ID NO: 3428080 - DNA, 25 bp, Homo sapien
cctcttcctcagaataattgtcaat

SEQ ID NO: 3428081 - DNA, 25 bp, Homo sapien
gatcttcgtcttcgtagaacaagtc

SEQ ID NO: 3428082 - DNA, 25 bp, Homo sapien
cttcactttccggagatcttcgtct

SEQ ID NO: 3428083 - DNA, 25 bp, Homo sapien
cagaggttgaggttagtttcctccg

SEQ ID NO: 3428084 - DNA, 25 bp, Homo sapien
ggcagaggttgaggttagtttcctc

SEQ ID NO: 3428085 - DNA, 25 bp, Homo sapien
taaagcttagcaagcccagggtcat

SEQ ID NO: 3428086 - DNA, 25 bp, Homo sapien
ttttaagaagtctccactaggcctg

SEQ ID NO: 3428087 - DNA, 25 bp, Homo sapien
tgtggttcccaacaacagtgagtct

SEQ ID NO: 3428088 - DNA, 25 bp, Homo sapien
gaaaagtatcaaaaggcacctggtc

SEQ ID NO: 3428089 - DNA, 25 bp, Homo sapien
tcttatggcacctgtcctactgggc

SEQ ID NO: 3428090 - DNA, 25 bp, Homo sapien
actgaactccagtcatgtgccaggg

SEQ ID NO: 3428091 - DNA, 25 bp, Homo sapien
cgcttgatggcatggactgggccct

SEQ ID NO: 3428092 - DNA, 25 bp, Homo sapien
gagtatacattagcaggagcactga

SEQ ID NO: 3428093 - DNA, 25 bp, Homo sapien
gggaaaaactgcatgctgttgtact

SEQ ID NO: 3428094 - DNA, 25 bp, Homo sapien
acaccccatagtcaagtggaaactc

SEQ ID NO: 3428095 - DNA, 25 bp, Homo sapien
caccccatagtcaagtggaaactca

SEQ ID NO: 3428096 - DNA, 25 bp, Homo sapien
gcatgctgttgtactgggccttttt

SEQ ID NO: 3428097 - DNA, 25 bp, Homo sapien
ttaaaccgcttcaggagggccacaa

SEQ ID NO: 3428098 - DNA, 25 bp, Homo sapien
atctgaaactttaaaccgcttcagg

SEQ ID NO: 3428099 - DNA, 25 bp, Homo sapien
tttaaaccgcttcaggagggccaca

SEQ ID NO: 3428100 - DNA, 25 bp, Homo sapien
ctgaaactttaaaccgcttcaggag

SEQ ID NO: 3428101 - DNA, 25 bp, Homo sapien
tagtcctgcttaagggacatgccag

SEQ ID NO: 3428102 - DNA, 25 bp, Homo sapien
gagtaaccttcacgtcatttccatg

SEQ ID NO: 3428103 - DNA, 25 bp, Homo sapien
cctgggctgcccttatagtcctgct

SEQ ID NO: 3428104 - DNA, 25 bp, Homo sapien
catttccatgatccagcctgagggc

SEQ ID NO: 3428105 - DNA, 25 bp, Homo sapien
ggccactgtcgctggggttgtacat

SEQ ID NO: 3428106 - DNA, 25 bp, Homo sapien
tctgctcgcgggacacatgctccag

SEQ ID NO: 3428107 - DNA, 25 bp, Homo sapien
tggggttgtacatctccagactgtc

SEQ ID NO: 3428108 - DNA, 25 bp, Homo sapien
tcccggatctgctcgcgggacacat

SEQ ID NO: 3428109 - DNA, 25 bp, Homo sapien
ctgcgacatcccctcaaagaaaggc

SEQ ID NO: 3428110 - DNA, 25 bp, Homo sapien
gcctttgctgttgaggctgccaatc

SEQ ID NO: 3428111 - DNA, 25 bp, Homo sapien
ctgccaatctccgtctgggagctgg

SEQ ID NO: 3428112 - DNA, 25 bp, Homo sapien
ggtggtgtcttttccgaggctgcct

SEQ ID NO: 3428113 - DNA, 25 bp, Homo sapien
cctgacatgccacggtcccaccccg

SEQ ID NO: 3428114 - DNA, 25 bp, Homo sapien
tctaaggtcacaacatgagccctga

SEQ ID NO: 3428115 - DNA, 25 bp, Homo sapien
agggccagagcgtcgagccctgaca

SEQ ID NO: 3428116 - DNA, 25 bp, Homo sapien
ccgccccgcagtcgcggttgcgctc

SEQ ID NO: 3428117 - DNA, 25 bp, Homo sapien
ataaagcctactagggcctcctgag

SEQ ID NO: 3428118 - DNA, 25 bp, Homo sapien
tcccctctatggattcttggcccaa

SEQ ID NO: 3428119 - DNA, 25 bp, Homo sapien
tcagctaccacagaacagacacgaa

SEQ ID NO: 3428120 - DNA, 25 bp, Homo sapien
gcagggccactcactactggccaaa

SEQ ID NO: 3428121 - DNA, 25 bp, Homo sapien
gcttttcagcggtagaggcctctcc

SEQ ID NO: 3428122 - DNA, 25 bp, Homo sapien
tactaccgatctgcagggcgagttt

SEQ ID NO: 3428123 - DNA, 25 bp, Homo sapien
cctaagcaggaagaacggtgagctg

SEQ ID NO: 3428124 - DNA, 25 bp, Homo sapien
cattgcctcactaacgtcacgtggg

SEQ ID NO: 3428125 - DNA, 25 bp, Homo sapien
caaagtgagtctgaaacgtggccaa

SEQ ID NO: 3428126 - DNA, 25 bp, Homo sapien
taccttgggaggcacgagctttaac

SEQ ID NO: 3428127 - DNA, 25 bp, Homo sapien
caatagtagtcggtgagcaatgagc

SEQ ID NO: 3428128 - DNA, 25 bp, Homo sapien
gaagcaaaggcgtggtaacatgccc

SEQ ID NO: 3428129 - DNA, 25 bp, Homo sapien
cacgaggtgtcactaggcaagagaa

SEQ ID NO: 3428130 - DNA, 25 bp, Homo sapien
aataacacggagattcagaacccag

SEQ ID NO: 3428131 - DNA, 25 bp, Homo sapien
tgaagtctttgaccctggatccagt

SEQ ID NO: 3428132 - DNA, 25 bp, Homo sapien
tggtgggaacatccagaaaaccctc

SEQ ID NO: 3428133 - DNA, 25 bp, Homo sapien
cagagtgtctgtttcagtcaagctg

SEQ ID NO: 3428134 - DNA, 25 bp, Homo sapien
gagtgtctgtttcagtcaagctgtc

SEQ ID NO: 3428135 - DNA, 25 bp, Homo sapien
ttttttctagagcagccaattccat

SEQ ID NO: 3428136 - DNA, 25 bp, Homo sapien
catcttggtttttaatccaagtaga

SEQ ID NO: 3428137 - DNA, 25 bp, Homo sapien
ccaggtgaccattaaccagatcaag

SEQ ID NO: 3428138 - DNA, 25 bp, Homo sapien
gacagaacgttccagcattcctgag

SEQ ID NO: 3428139 - DNA, 25 bp, Homo sapien
gactctgctaccaatacaggccgca

SEQ ID NO: 3428140 - DNA, 25 bp, Homo sapien
taacaggtatgctgacgtcaccctc

SEQ ID NO: 3428141 - DNA, 25 bp, Homo sapien
accctctctatcccaccttctgagc

SEQ ID NO: 3428142 - DNA, 25 bp, Homo sapien
aaagccacctgcatctccgttgaga

SEQ ID NO: 3428143 - DNA, 25 bp, Homo sapien
ccacctgcatctccgttgagattct

SEQ ID NO: 3428144 - DNA, 25 bp, Homo sapien
gcatctccgttgagattctcccttc

SEQ ID NO: 3428145 - DNA, 25 bp, Homo sapien
gagttttgactttctccggcacaac

SEQ ID NO: 3428146 - DNA, 25 bp, Homo sapien
ccctggagatccgttttactggact

SEQ ID NO: 3428147 - DNA, 25 bp, Homo sapien
cacaaccagactcgtgctggcatct

SEQ ID NO: 3428148 - DNA, 25 bp, Homo sapien
tggcatctccaaacatgtcctggtc

SEQ ID NO: 3428149 - DNA, 25 bp, Homo sapien
tgaagcccatgctaagcacagctgc

SEQ ID NO: 3428150 - DNA, 25 bp, Homo sapien
gctggtgaaatagcccctccaaccc

SEQ ID NO: 3428151 - DNA, 25 bp, Homo sapien
aaaggctggtgaaatagcccctcca

SEQ ID NO: 3428152 - DNA, 25 bp, Homo sapien
aaggctggtgaaatagcccctccaa

SEQ ID NO: 3428153 - DNA, 25 bp, Homo sapien
ggtcctctcacttaggggcttggag

SEQ ID NO: 3428154 - DNA, 25 bp, Homo sapien
tgctcctcttctgccggggtgtgtg

SEQ ID NO: 3428155 - DNA, 25 bp, Homo sapien
ccagatctggggagcgctcgctgtc

SEQ ID NO: 3428156 - DNA, 25 bp, Homo sapien
gctgtcggaactgttggtcctctca

SEQ ID NO: 3428157 - DNA, 25 bp, Homo sapien
tgttcagagcatttccaagtattcc

SEQ ID NO: 3428158 - DNA, 25 bp, Homo sapien
gaggtcagcgtggaagccagttcca

SEQ ID NO: 3428159 - DNA, 25 bp, Homo sapien
cacactggcagtaagcaaggaatat

SEQ ID NO: 3428160 - DNA, 25 bp, Homo sapien
aagttcagggaatctcagagggtcc

SEQ ID NO: 3428161 - DNA, 25 bp, Homo sapien
ggccttcaaaaggagaacacgattc

SEQ ID NO: 3428162 - DNA, 25 bp, Homo sapien
gctgtttaaccctagcagaactgga

SEQ ID NO: 3428163 - DNA, 25 bp, Homo sapien
caggcactgggctattctagtctca

SEQ ID NO: 3428164 - DNA, 25 bp, Homo sapien
tgtgtaaggtgtgccgggaaaatcc

SEQ ID NO: 3428165 - DNA, 25 bp, Homo sapien
tgacaccaggatctgattgagctgg

SEQ ID NO: 3428166 - DNA, 25 bp, Homo sapien
tggtgttcaccagaatgacattttc

SEQ ID NO: 3428167 - DNA, 25 bp, Homo sapien
agtcagtggtgttcaccagaatgac

SEQ ID NO: 3428168 - DNA, 25 bp, Homo sapien
ccaggatctgattgagctggtcata

SEQ ID NO: 3428169 - DNA, 25 bp, Homo sapien
acaccacaggcttccgctggtcctg

SEQ ID NO: 3428170 - DNA, 25 bp, Homo sapien
tggatccgggtgagcagggcggaca

SEQ ID NO: 3428171 - DNA, 25 bp, Homo sapien
cctggacctccacggtggagcaggt

SEQ ID NO: 3428172 - DNA, 25 bp, Homo sapien
tagcgctggatccgggtgagcaggg

SEQ ID NO: 3428173 - DNA, 25 bp, Homo sapien
agccaccttcactggcctcggcatg

SEQ ID NO: 3428174 - DNA, 25 bp, Homo sapien
cgcatgtagccaagccagtcggagg

SEQ ID NO: 3428175 - DNA, 25 bp, Homo sapien
cagatgaggcatctgtctatggaac

SEQ ID NO: 3428176 - DNA, 25 bp, Homo sapien
cctgttccagatgaggcatctgtct

SEQ ID NO: 3428177 - DNA, 25 bp, Homo sapien
cgtcctgttccagatgaggcatctg

SEQ ID NO: 3428178 - DNA, 25 bp, Homo sapien
ggcatctgtctatggaaccctcatg

SEQ ID NO: 3428179 - DNA, 25 bp, Homo sapien
aagtatttggccacagggtgagaac

SEQ ID NO: 3428180 - DNA, 25 bp, Homo sapien
ccaagtatttggccacagggtgaga

SEQ ID NO: 3428181 - DNA, 25 bp, Homo sapien
cccaagtatttggccacagggtgag

SEQ ID NO: 3428182 - DNA, 25 bp, Homo sapien
caagtatttggccacagggtgagaa

SEQ ID NO: 3428183 - DNA, 25 bp, Homo sapien
acactggtggctccgagcgactgaa

SEQ ID NO: 3428184 - DNA, 25 bp, Homo sapien
gctccgagcgactgaacagatctct

SEQ ID NO: 3428185 - DNA, 25 bp, Homo sapien
tggtggctccgagcgactgaacaga

SEQ ID NO: 3428186 - DNA, 25 bp, Homo sapien
gaacagatctctccaaccagaatcc

SEQ ID NO: 3428187 - DNA, 25 bp, Homo sapien
aacttatgccggcaagtcagcatgg

SEQ ID NO: 3428188 - DNA, 25 bp, Homo sapien
gtcagcatggcttcggccacgggaa

SEQ ID NO: 3428189 - DNA, 25 bp, Homo sapien
tgtgtcgtggctgccccgttgacgt

SEQ ID NO: 3428190 - DNA, 25 bp, Homo sapien
gctgccccgttgacgtactgcatca

SEQ ID NO: 3428191 - DNA, 25 bp, Homo sapien
aagactcaagattcctctaacccac

SEQ ID NO: 3428192 - DNA, 25 bp, Homo sapien
gtgagaaagcaaggaagactcaaga

SEQ ID NO: 3428193 - DNA, 25 bp, Homo sapien
gaaagcaaggaagactcaagattcc

SEQ ID NO: 3428194 - DNA, 25 bp, Homo sapien
gcaaggaagactcaagattcctcta

SEQ ID NO: 3428195 - DNA, 25 bp, Homo sapien
aacttctgataggagtcttcatcag

SEQ ID NO: 3428196 - DNA, 25 bp, Homo sapien
taaacttctgataggagtcttcatc

SEQ ID NO: 3428197 - DNA, 25 bp, Homo sapien
tgaagggaataaacttctgatagga

SEQ ID NO: 3428198 - DNA, 25 bp, Homo sapien
gggaataaacttctgataggagtct

SEQ ID NO: 3428199 - DNA, 25 bp, Homo sapien
tgtctagaagctacgagggagcctc

SEQ ID NO: 3428200 - DNA, 25 bp, Homo sapien
taatgtggctatgggagcagcccag

SEQ ID NO: 3428201 - DNA, 25 bp, Homo sapien
tctgcaaggcacgagaaagggctgc

SEQ ID NO: 3428202 - DNA, 25 bp, Homo sapien
cacatcttggatgcgcagaaagcag

SEQ ID NO: 3428203 - DNA, 25 bp, Homo sapien
tggagggagagtcttcaaccagacc

SEQ ID NO: 3428204 - DNA, 25 bp, Homo sapien
gctgtggagggagagtcttcaacca

SEQ ID NO: 3428205 - DNA, 25 bp, Homo sapien
gagagtcttcaaccagacccacctt

SEQ ID NO: 3428206 - DNA, 25 bp, Homo sapien
gagggagagtcttcaaccagaccca

SEQ ID NO: 3428207 - DNA, 25 bp, Homo sapien
gatgtggagggcacagtaaggctga

SEQ ID NO: 3428208 - DNA, 25 bp, Homo sapien
ggtggccgtggcgtctcggctcagg

SEQ ID NO: 3428209 - DNA, 25 bp, Homo sapien
ccagggcgctgctcatagatgggga

SEQ ID NO: 3428210 - DNA, 25 bp, Homo sapien
ggcacagtaaggctgaccacaggag

SEQ ID NO: 3428211 - DNA, 25 bp, Homo sapien
gccaaactgagcctcgagctggaga

SEQ ID NO: 3428212 - DNA, 25 bp, Homo sapien
tgagcccggcagaagcccctgcggg

SEQ ID NO: 3428213 - DNA, 25 bp, Homo sapien
aactgagcctcgagctggagagaag

SEQ ID NO: 3428214 - DNA, 25 bp, Homo sapien
caaactgagcctcgagctggagaga

SEQ ID NO: 3428215 - DNA, 25 bp, Homo sapien
tcttgagggtgttcttcgagctggc

SEQ ID NO: 3428216 - DNA, 25 bp, Homo sapien
tggaggccaatcacgtccccatatg

SEQ ID NO: 3428217 - DNA, 25 bp, Homo sapien
tgcactgagcggaagacactcttga

SEQ ID NO: 3428218 - DNA, 25 bp, Homo sapien
tctttggtgaccacagtcatggcca

SEQ ID NO: 3428219 - DNA, 25 bp, Homo sapien
gatgccttcaatgacctggctctta

SEQ ID NO: 3428220 - DNA, 25 bp, Homo sapien
tgaggcggctgatgccttcaatgac

SEQ ID NO: 3428221 - DNA, 25 bp, Homo sapien
caatgacctggctcttagaatccac

SEQ ID NO: 3428222 - DNA, 25 bp, Homo sapien
ggctcttagaatccacctccttttc

SEQ ID NO: 3428223 - DNA, 25 bp, Homo sapien
catagtctgctgctgcttggctgag

SEQ ID NO: 3428224 - DNA, 25 bp, Homo sapien
tcagcatagtctgctgctgcttggc

SEQ ID NO: 3428225 - DNA, 25 bp, Homo sapien
ctctcagcatagtctgctgctgctt

SEQ ID NO: 3428226 - DNA, 25 bp, Homo sapien
gcatagtctgctgctgcttggctga

SEQ ID NO: 3428227 - DNA, 25 bp, Homo sapien
actgaagagtcccactggaaagtgc

SEQ ID NO: 3428228 - DNA, 25 bp, Homo sapien
aaagtgcttgacatgggtgggccac

SEQ ID NO: 3428229 - DNA, 25 bp, Homo sapien
gaacttgatgtcactccactcgacc

SEQ ID NO: 3428230 - DNA, 25 bp, Homo sapien
agaacttgatgtcactccactcgac

SEQ ID NO: 3428231 - DNA, 25 bp, Homo sapien
tagaaacgctgtgtcaccatagcaa

SEQ ID NO: 3428232 - DNA, 25 bp, Homo sapien
tcattaacaagggtggaagccacga

SEQ ID NO: 3428233 - DNA, 25 bp, Homo sapien
ggacacacacgacatctgcagggaa

SEQ ID NO: 3428234 - DNA, 25 bp, Homo sapien
tgcatcctagaggacaccctggtgg

SEQ ID NO: 3428235 - DNA, 25 bp, Homo sapien
agaacacggacggtcaggaatgagg

SEQ ID NO: 3428236 - DNA, 25 bp, Homo sapien
tgtgtcctcaaccactcctgagaac

SEQ ID NO: 3428237 - DNA, 25 bp, Homo sapien
tcagaccccgggttggtgagaggga

SEQ ID NO: 3428238 - DNA, 25 bp, Homo sapien
tctctctggcccaggagacgctcag

SEQ ID NO: 3428239 - DNA, 25 bp, Homo sapien
ggtgagacaccttcatgcctgtttc

SEQ ID NO: 3428240 - DNA, 25 bp, Homo sapien
tgcctgcctcatgccaggtgagaca

SEQ ID NO: 3428241 - DNA, 25 bp, Homo sapien
gaacatgggagtacgcttctttcca

SEQ ID NO: 3428242 - DNA, 25 bp, Homo sapien
acatctttcctgtttccgacctctg

SEQ ID NO: 3428243 - DNA, 25 bp, Homo sapien
gatattgagctatacccacttggga

SEQ ID NO: 3428244 - DNA, 25 bp, Homo sapien
tgcagacgggctgagagttcaccct

SEQ ID NO: 3428245 - DNA, 25 bp, Homo sapien
tgctactgataggactgggcaaccc

SEQ ID NO: 3428246 - DNA, 25 bp, Homo sapien
tctctatgtgaggtcgtctgggcac

SEQ ID NO: 3428247 - DNA, 25 bp, Homo sapien
gcttcagcttacacacctaggtagg

SEQ ID NO: 3428248 - DNA, 25 bp, Homo sapien
tgggtgccaaggatacaacagggaa

SEQ ID NO: 3428249 - DNA, 25 bp, Homo sapien
gcatttactaggagggaagtctccc

SEQ ID NO: 3428250 - DNA, 25 bp, Homo sapien
tgggagatcagaccatgtgggcccc

SEQ ID NO: 3428251 - DNA, 25 bp, Homo sapien
ctgtgcgccctggattgaaagtgct

SEQ ID NO: 3428252 - DNA, 25 bp, Homo sapien
ggctttaaagcttaagtggtgcctg

SEQ ID NO: 3428253 - DNA, 25 bp, Homo sapien
aaaggcggctgcaccgggctcaatg

SEQ ID NO: 3428254 - DNA, 25 bp, Homo sapien
ggagcccggccgcctcttgtggctt

SEQ ID NO: 3428255 - DNA, 25 bp, Homo sapien
gggcgaaacacgcttctcttggccc

SEQ ID NO: 3428256 - DNA, 25 bp, Homo sapien
aaacacgcttctcttggcccgttcg

SEQ ID NO: 3428257 - DNA, 25 bp, Homo sapien
gagggggcgaaacacgcttctcttg

SEQ ID NO: 3428258 - DNA, 25 bp, Homo sapien
gcgaaacacgcttctcttggcccgt

SEQ ID NO: 3428259 - DNA, 25 bp, Homo sapien
ggctgcctcccgcttcacccggacc

SEQ ID NO: 3428260 - DNA, 25 bp, Homo sapien
gcctcccgcttcacccggacccgca

SEQ ID NO: 3428261 - DNA, 25 bp, Homo sapien
ctctggctgcctcccgcttcacccg

SEQ ID NO: 3428262 - DNA, 25 bp, Homo sapien
cgcttcacccggacccgcacccgcg

SEQ ID NO: 3428263 - DNA, 25 bp, Homo sapien
tctcccggcccaatcggcccgcgcc

SEQ ID NO: 3428264 - DNA, 25 bp, Homo sapien
gtctcccggcccaatcggcccgcgc

SEQ ID NO: 3428265 - DNA, 25 bp, Homo sapien
tctcctcccccgctttagggcctga

SEQ ID NO: 3428266 - DNA, 25 bp, Homo sapien
cgtctcccggcccaatcggcccgcg

SEQ ID NO: 3428267 - DNA, 25 bp, Homo sapien
gcttgtctaggcctgggagacgcaa

SEQ ID NO: 3428268 - DNA, 25 bp, Homo sapien
ggctcaggccgacttaggcggctca

SEQ ID NO: 3428269 - DNA, 25 bp, Homo sapien
cagagggcgcgcctagcttgtctag

SEQ ID NO: 3428270 - DNA, 25 bp, Homo sapien
agacgcaatgcggtgcagccggatc

SEQ ID NO: 3428271 - DNA, 25 bp, Homo sapien
ctgtgaggacgagggtgcgggcagg

SEQ ID NO: 3428272 - DNA, 25 bp, Homo sapien
gtgaggacgagggtgcgggcaggcg

SEQ ID NO: 3428273 - DNA, 25 bp, Homo sapien
ctcaggtgcaaccagaggagccagc

SEQ ID NO: 3428274 - DNA, 25 bp, Homo sapien
ctccagtccctggatgacagccttg

SEQ ID NO: 3428275 - DNA, 25 bp, Homo sapien
tcaatggcttccagggagcgacgca

SEQ ID NO: 3428276 - DNA, 25 bp, Homo sapien
cgacgcaggaggatgcagcgctcct

SEQ ID NO: 3428277 - DNA, 25 bp, Homo sapien
atccagaactggtcccttttctcca

SEQ ID NO: 3428278 - DNA, 25 bp, Homo sapien
ggagagtgattccatcctcgaccca

SEQ ID NO: 3428279 - DNA, 25 bp, Homo sapien
ggcttcctaaccactcattggagag

SEQ ID NO: 3428280 - DNA, 25 bp, Homo sapien
gcaccagctctcatttgaattccag

SEQ ID NO: 3428281 - DNA, 25 bp, Homo sapien
gccaggctgtctgagaccctgtact

SEQ ID NO: 3428282 - DNA, 25 bp, Homo sapien
ctaagtgacaggtgtttccataacc

SEQ ID NO: 3428283 - DNA, 25 bp, Homo sapien
actttgttgttggttagcaaatgcc

SEQ ID NO: 3428284 - DNA, 25 bp, Homo sapien
tgtctgagaccctgtactttgttgt

SEQ ID NO: 3428285 - DNA, 25 bp, Homo sapien
tgcccatgccctccgtgcagattgt

SEQ ID NO: 3428286 - DNA, 25 bp, Homo sapien
tctgtgagagtgcacgtgctccacc

SEQ ID NO: 3428287 - DNA, 25 bp, Homo sapien
gagtggtcctctctacctctgacgg

SEQ ID NO: 3428288 - DNA, 25 bp, Homo sapien
gtgcagattgttccccctctgtgag

SEQ ID NO: 3428289 - DNA, 25 bp, Homo sapien
tgaagtccgggatttaagcagtctt

SEQ ID NO: 3428290 - DNA, 25 bp, Homo sapien
tttctgcagttgtgtctccagctag

SEQ ID NO: 3428291 - DNA, 25 bp, Homo sapien
cagtccttcccggttcaggatcatt

SEQ ID NO: 3428292 - DNA, 25 bp, Homo sapien
gtccgggatttaagcagtcttccca

SEQ ID NO: 3428293 - DNA, 25 bp, Homo sapien
aactgggactacgggtgcacaccac

SEQ ID NO: 3428294 - DNA, 25 bp, Homo sapien
ttccaggctcaagtggtccttcccc

SEQ ID NO: 3428295 - DNA, 25 bp, Homo sapien
gtaactgggactacgggtgcacacc

SEQ ID NO: 3428296 - DNA, 25 bp, Homo sapien
ccctcagcctcctgagtaactggga

SEQ ID NO: 3428297 - DNA, 25 bp, Homo sapien
agtaggttactgctccctgcctcag

SEQ ID NO: 3428298 - DNA, 25 bp, Homo sapien
aactctgctagatggctgaaggacc

SEQ ID NO: 3428299 - DNA, 25 bp, Homo sapien
tgcttgtcaagggagaatctcctca

SEQ ID NO: 3428300 - DNA, 25 bp, Homo sapien
tgcaaccagcccaggtaagggtcgg

SEQ ID NO: 3428301 - DNA, 25 bp, Homo sapien
gcggatctggctcatgaacagcaag

SEQ ID NO: 3428302 - DNA, 25 bp, Homo sapien
ccccaggtggctcgacaatgccaag

SEQ ID NO: 3428303 - DNA, 25 bp, Homo sapien
ggtggctcgacaatgccaagatcac

SEQ ID NO: 3428304 - DNA, 25 bp, Homo sapien
gaggcgtcttcatccaacttgcgga

SEQ ID NO: 3428305 - DNA, 25 bp, Homo sapien
atcctcattggggaacaggtcatcc

SEQ ID NO: 3428306 - DNA, 25 bp, Homo sapien
tccagtgtgtctttggggacgtccc

SEQ ID NO: 3428307 - DNA, 25 bp, Homo sapien
ctgctcatcctcattggggaacagg

SEQ ID NO: 3428308 - DNA, 25 bp, Homo sapien
gggaacaggtcatccagtgtgtctt

SEQ ID NO: 3428309 - DNA, 25 bp, Homo sapien
accaggttgtgcagggtgcggagcc

SEQ ID NO: 3428310 - DNA, 25 bp, Homo sapien
gccctgtgaggcgtattggatcacc

SEQ ID NO: 3428311 - DNA, 25 bp, Homo sapien
ggcaacgtcagggtggtcgtggcct

SEQ ID NO: 3428312 - DNA, 25 bp, Homo sapien
tagaccagtgccaggatgttcagca

SEQ ID NO: 3428313 - DNA, 25 bp, Homo sapien
gctgggtggtccttgcccagtgttt

SEQ ID NO: 3428314 - DNA, 25 bp, Homo sapien
tgcccagtgttttctcccggatggc

SEQ ID NO: 3428315 - DNA, 25 bp, Homo sapien
ccagagcatcattgagcaggtgggc

SEQ ID NO: 3428316 - DNA, 25 bp, Homo sapien
gtgggcagcctccttgtacttgttc

SEQ ID NO: 3428317 - DNA, 25 bp, Homo sapien
cctcttgccatacaggactgccagg

SEQ ID NO: 3428318 - DNA, 25 bp, Homo sapien
gccaggttgtttagtgtcgcagcca

SEQ ID NO: 3428319 - DNA, 25 bp, Homo sapien
cagtgcccgcttgcacaatggctca

SEQ ID NO: 3428320 - DNA, 25 bp, Homo sapien
tccagtgcccgcttgcacaatggct

SEQ ID NO: 3428321 - DNA, 25 bp, Homo sapien
gtagcatagatctccagtgcccgcc

SEQ ID NO: 3428322 - DNA, 25 bp, Homo sapien
gcccgccgatagtaatattccacct

SEQ ID NO: 3428323 - DNA, 25 bp, Homo sapien
ccgaggcgtgtagcatagatctcca

SEQ ID NO: 3428324 - DNA, 25 bp, Homo sapien
tcatcgggcccgaggcgtgtagcat

SEQ ID NO: 3428325 - DNA, 25 bp, Homo sapien
tctcatgagcgcgggtgaggatctc

SEQ ID NO: 3428326 - DNA, 25 bp, Homo sapien
ccttgtacaaggtctccgcatcctg

SEQ ID NO: 3428327 - DNA, 25 bp, Homo sapien
actctttctcatgagcgcgggtgag

SEQ ID NO: 3428328 - DNA, 25 bp, Homo sapien
gggtgaggatctccttgtacaaggt

SEQ ID NO: 3428329 - DNA, 25 bp, Homo sapien
tctgcgtgcatccagatgggcttgt

SEQ ID NO: 3428330 - DNA, 25 bp, Homo sapien
tcctctgcgtgcatccagatgggct

SEQ ID NO: 3428331 - DNA, 25 bp, Homo sapien
cgctcctctgcgtgcatccagatgg

SEQ ID NO: 3428332 - DNA, 25 bp, Homo sapien
gtgcatccagatgggcttgttgtcc

SEQ ID NO: 3428333 - DNA, 25 bp, Homo sapien
ctgtctactttacaggccttgtacc

SEQ ID NO: 3428334 - DNA, 25 bp, Homo sapien
cttgtaccagctgccgtattcccca

SEQ ID NO: 3428335 - DNA, 25 bp, Homo sapien
gtctactttacaggccttgtaccag

SEQ ID NO: 3428336 - DNA, 25 bp, Homo sapien
gtattccccatagggggcgctgtcc

SEQ ID NO: 3428337 - DNA, 25 bp, Homo sapien
tggcgccggtatagggcccccaagc

SEQ ID NO: 3428338 - DNA, 25 bp, Homo sapien
cagcttgccctggcgccggtatagg

SEQ ID NO: 3428339 - DNA, 25 bp, Homo sapien
acagtcctctagtgtgtgcgcggct

SEQ ID NO: 3428340 - DNA, 25 bp, Homo sapien
cccaagctgcgcagggtggtgttga

SEQ ID NO: 3428341 - DNA, 25 bp, Homo sapien
tttcagcagttctaccaccttggtc

SEQ ID NO: 3428342 - DNA, 25 bp, Homo sapien
tcgaggtcagactcagaccgaggcc

SEQ ID NO: 3428343 - DNA, 25 bp, Homo sapien
ccagccatgtctcggctgctgcggc

SEQ ID NO: 3428344 - DNA, 25 bp, Homo sapien
agctgtaggtcccacgtcctcgagg

SEQ ID NO: 3428345 - DNA, 25 bp, Homo sapien
cagggcatcccggagtttcccaaag

SEQ ID NO: 3428346 - DNA, 25 bp, Homo sapien
agcatctcactgctgcgcctcaggg

SEQ ID NO: 3428347 - DNA, 25 bp, Homo sapien
caaaggaaccgctgcgcctcaagga

SEQ ID NO: 3428348 - DNA, 25 bp, Homo sapien
tttcccaaaggaaccgctgcgcctc

SEQ ID NO: 3428349 - DNA, 25 bp, Homo sapien
ctcctggggggtgcccccctgcagc

SEQ ID NO: 3428350 - DNA, 25 bp, Homo sapien
ggctcctggggggtgcccccctgca

SEQ ID NO: 3428351 - DNA, 25 bp, Homo sapien
gggtgcccccctgcagcttctttac

SEQ ID NO: 3428352 - DNA, 25 bp, Homo sapien
tggggggtgcccccctgcagcttct

SEQ ID NO: 3428353 - DNA, 25 bp, Homo sapien
tgggtcggctcttccacgctcttgt

SEQ ID NO: 3428354 - DNA, 25 bp, Homo sapien
gggtcggctcttccacgctcttgtt

SEQ ID NO: 3428355 - DNA, 25 bp, Homo sapien
ctgggtcggctcttccacgctcttg

SEQ ID NO: 3428356 - DNA, 25 bp, Homo sapien
ggtcggctcttccacgctcttgttg

SEQ ID NO: 3428357 - DNA, 25 bp, Homo sapien
agggaagcttggcagcacgcatgca

SEQ ID NO: 3428358 - DNA, 25 bp, Homo sapien
catctccacagtgacggtgttagca

SEQ ID NO: 3428359 - DNA, 25 bp, Homo sapien
tgacggtgttagcactggccgttta

SEQ ID NO: 3428360 - DNA, 25 bp, Homo sapien
cagaggcagccggaatccctgagct

SEQ ID NO: 3428361 - DNA, 25 bp, Homo sapien
tgcggctgtcagagagacctgtgcc

SEQ ID NO: 3428362 - DNA, 25 bp, Homo sapien
ctgagagtgcggctgtcagagagac

SEQ ID NO: 3428363 - DNA, 25 bp, Homo sapien
tggagctgagagtgcggctgtcaga

SEQ ID NO: 3428364 - DNA, 25 bp, Homo sapien
cagggagcttcgtcgggagaggtcc

SEQ ID NO: 3428365 - DNA, 25 bp, Homo sapien
tgattaaggcctgggcggtaccact

SEQ ID NO: 3428366 - DNA, 25 bp, Homo sapien
ctgctggcccgaacctagggaagag

SEQ ID NO: 3428367 - DNA, 25 bp, Homo sapien
cgctcccgagaatgtagagcctggg

SEQ ID NO: 3428368 - DNA, 25 bp, Homo sapien
tgggagataccaccgcacggaatgg

SEQ ID NO: 3428369 - DNA, 25 bp, Homo sapien
aaccgtctttatttctacagcaaca

SEQ ID NO: 3428370 - DNA, 25 bp, Homo sapien
taaaccgtctttatttctacagcaa

SEQ ID NO: 3428371 - DNA, 25 bp, Homo sapien
accgtctttatttctacagcaacat

SEQ ID NO: 3428372 - DNA, 25 bp, Homo sapien
ttaaaccgtctttatttctacagca

SEQ ID NO: 3428373 - DNA, 25 bp, Homo sapien
gacgcgcaggcgcaaacgtcttctt

SEQ ID NO: 3428374 - DNA, 25 bp, Homo sapien
gctcccagtcgactctgctccgcct

SEQ ID NO: 3428375 - DNA, 25 bp, Homo sapien
aggcgcaaacgtcttcttctcaggc

SEQ ID NO: 3428376 - DNA, 25 bp, Homo sapien
tccgcctcccgttccaagatggtgg

SEQ ID NO: 3428377 - DNA, 25 bp, Homo sapien
cgataaggcctggtaggaccgatgt

SEQ ID NO: 3428378 - DNA, 25 bp, Homo sapien
ccgatgtctcgagctccaagagctg

SEQ ID NO: 3428379 - DNA, 25 bp, Homo sapien
ggaccgatgtctcgagctccaagag

SEQ ID NO: 3428380 - DNA, 25 bp, Homo sapien
cctggtaggaccgatgtctcgagct

SEQ ID NO: 3428381 - DNA, 25 bp, Homo sapien
tagttggctagcttctgggccggcc

SEQ ID NO: 3428382 - DNA, 25 bp, Homo sapien
gagtttgaggaccagagaatcccac

SEQ ID NO: 3428383 - DNA, 25 bp, Homo sapien
ttcatctaaacttcacaggcagtgt

SEQ ID NO: 3428384 - DNA, 25 bp, Homo sapien
gagggattcactgcccgacctaaag

SEQ ID NO: 3428385 - DNA, 25 bp, Homo sapien
tatcgctttaagactcaaaccaggt

SEQ ID NO: 3428386 - DNA, 25 bp, Homo sapien
tcagactccaaagtcccttcgagag

SEQ ID NO: 3428387 - DNA, 25 bp, Homo sapien
ttccccaaggaaatctgagacctgg

SEQ ID NO: 3428388 - DNA, 25 bp, Homo sapien
aacctgtggacggaccctgtgtgaa

SEQ ID NO: 3428389 - DNA, 25 bp, Homo sapien
gaaaacccacgtagagagactgatg

SEQ ID NO: 3428390 - DNA, 25 bp, Homo sapien
ggcaacagagctgggtatcctaacc

SEQ ID NO: 3428391 - DNA, 25 bp, Homo sapien
taggagctatttagggaatccccag

SEQ ID NO: 3428392 - DNA, 25 bp, Homo sapien
cagtacatgccctgcgtgtgcctag

SEQ ID NO: 3428393 - DNA, 25 bp, Homo sapien
accgcaggagcaggcatgacttgcc

SEQ ID NO: 3428394 - DNA, 25 bp, Homo sapien
caaaccgcaggagcaggcatgactt

SEQ ID NO: 3428395 - DNA, 25 bp, Homo sapien
aaaccgcaggagcaggcatgacttg

SEQ ID NO: 3428396 - DNA, 25 bp, Homo sapien
agcaaaccgcaggagcaggcatgac

SEQ ID NO: 3428397 - DNA, 25 bp, Homo sapien
ccgatggtgctgatgtagctctctg

SEQ ID NO: 3428398 - DNA, 25 bp, Homo sapien
gtttgatagttttgccatccagctc

SEQ ID NO: 3428399 - DNA, 25 bp, Homo sapien
gatagttttgccatccagctcgatg

SEQ ID NO: 3428400 - DNA, 25 bp, Homo sapien
tggtgctgatgtagctctctgtgta

SEQ ID NO: 3428401 - DNA, 25 bp, Homo sapien
acgtcatacaccacgatgatgccat

SEQ ID NO: 3428402 - DNA, 25 bp, Homo sapien
cagtgacgtcatacaccacgatgat

SEQ ID NO: 3428403 - DNA, 25 bp, Homo sapien
gtgacgtcatacaccacgatgatgc

SEQ ID NO: 3428404 - DNA, 25 bp, Homo sapien
tgacgtcatacaccacgatgatgcc

SEQ ID NO: 3428405 - DNA, 25 bp, Homo sapien
taggaacagagagtaacgggtccgc

SEQ ID NO: 3428406 - DNA, 25 bp, Homo sapien
ttaaggtttgaagccttggagcaca

SEQ ID NO: 3428407 - DNA, 25 bp, Homo sapien
tgggaacagcctaaaattcatccta

SEQ ID NO: 3428408 - DNA, 25 bp, Homo sapien
gcctcattacttggcttcagactct

SEQ ID NO: 3428409 - DNA, 25 bp, Homo sapien
gccaggggccaaagttattttgctc

SEQ ID NO: 3428410 - DNA, 25 bp, Homo sapien
gagcttattgacgttctcgctggca

SEQ ID NO: 3428411 - DNA, 25 bp, Homo sapien
caccaggagcttattgacgttctcg

SEQ ID NO: 3428412 - DNA, 25 bp, Homo sapien
cccaccaggagcttattgacgttct

SEQ ID NO: 3428413 - DNA, 25 bp, Homo sapien
caggagcttattgacgttctcgctg

SEQ ID NO: 3428414 - DNA, 25 bp, Homo sapien
ccaggccccatccgctttttgattt

SEQ ID NO: 3428415 - DNA, 25 bp, Homo sapien
tccaggccccatccgctttttgatt

SEQ ID NO: 3428416 - DNA, 25 bp, Homo sapien
caggccccatccgctttttgatttc

SEQ ID NO: 3428417 - DNA, 25 bp, Homo sapien
aggccccatccgctttttgatttca

SEQ ID NO: 3428418 - DNA, 25 bp, Homo sapien
aaagccacagactcaaatgccccag

SEQ ID NO: 3428419 - DNA, 25 bp, Homo sapien
tggggagcccaggacaccccaaagc

SEQ ID NO: 3428420 - DNA, 25 bp, Homo sapien
gagggagagggaggtacctcctgcc

SEQ ID NO: 3428421 - DNA, 25 bp, Homo sapien
gggacatcatctggagaaggtgccc

SEQ ID NO: 3428422 - DNA, 25 bp, Homo sapien
gtgtcctcccttagggaccctgaca

SEQ ID NO: 3428423 - DNA, 25 bp, Homo sapien
tcttggaaagtcacctagaggcaac

SEQ ID NO: 3428424 - DNA, 25 bp, Homo sapien
tcctcccttagggaccctgacagaa

SEQ ID NO: 3428425 - DNA, 25 bp, Homo sapien
gtcacctagaggcaacagcacagca

SEQ ID NO: 3428426 - DNA, 25 bp, Homo sapien
ggagagaacccagtgcagcatacat

SEQ ID NO: 3428427 - DNA, 25 bp, Homo sapien
aggctcaagacacaggcccagcact

SEQ ID NO: 3428428 - DNA, 25 bp, Homo sapien
atactcagatcccaccgcagctgga

SEQ ID NO: 3428429 - DNA, 25 bp, Homo sapien
ggagaccctcagttcttgggcagga

SEQ ID NO: 3428430 - DNA, 25 bp, Homo sapien
gggagtgagccagatgtgctacctt

SEQ ID NO: 3428431 - DNA, 25 bp, Homo sapien
agtgagccagatgtgctaccttggg

SEQ ID NO: 3428432 - DNA, 25 bp, Homo sapien
tggggagtgagccagatgtgctacc

SEQ ID NO: 3428433 - DNA, 25 bp, Homo sapien
ccagatgtgctaccttggggaaagg

SEQ ID NO: 3428434 - DNA, 25 bp, Homo sapien
ctcagggagaccaaagacttgcttt

SEQ ID NO: 3428435 - DNA, 25 bp, Homo sapien
tgacaccagaggggaacctgggagc

SEQ ID NO: 3428436 - DNA, 25 bp, Homo sapien
cagcccagggacttaaatacaagct

SEQ ID NO: 3428437 - DNA, 25 bp, Homo sapien
gggacttaaatacaagctggagggc

SEQ ID NO: 3428438 - DNA, 25 bp, Homo sapien
cagggacttaaatacaagctggagg

SEQ ID NO: 3428439 - DNA, 25 bp, Homo sapien
ggcttttccttgcaaaatgcctgac

SEQ ID NO: 3428440 - DNA, 25 bp, Homo sapien
cccaagtggcttttccttgcaaaat

SEQ ID NO: 3428441 - DNA, 25 bp, Homo sapien
catctttccccaagtggcttttcct

SEQ ID NO: 3428442 - DNA, 25 bp, Homo sapien
ttccccaagtggcttttccttgcaa

SEQ ID NO: 3428443 - DNA, 25 bp, Homo sapien
tggggctcgggggacgtgggtgatg

SEQ ID NO: 3428444 - DNA, 25 bp, Homo sapien
gggccccgatcgctcatcctgcgat

SEQ ID NO: 3428445 - DNA, 25 bp, Homo sapien
tcggggggcgcgtccgctgccggct

SEQ ID NO: 3428446 - DNA, 25 bp, Homo sapien
ggctgcccgggccccgatcgctcat

SEQ ID NO: 3428447 - DNA, 25 bp, Homo sapien
agaacgcggcgaaggtgaacgccat

SEQ ID NO: 3428448 - DNA, 25 bp, Homo sapien
tagcagaacgcggcgaaggtgaacg

SEQ ID NO: 3428449 - DNA, 25 bp, Homo sapien
gcagaacgcggcgaaggtgaacgcc

SEQ ID NO: 3428450 - DNA, 25 bp, Homo sapien
gtagcagaacgcggcgaaggtgaac

SEQ ID NO: 3428451 - DNA, 25 bp, Homo sapien
ttggtccatgtctcaggattggtgg

SEQ ID NO: 3428452 - DNA, 25 bp, Homo sapien
caggaaatccgagctcactgacagt

SEQ ID NO: 3428453 - DNA, 25 bp, Homo sapien
gtggtcaggtccatgtcttaggatt

SEQ ID NO: 3428454 - DNA, 25 bp, Homo sapien
ggaggcattgaagagtacacagcag

SEQ ID NO: 3428455 - DNA, 25 bp, Homo sapien
cctggtcgatggggttcttgaagtc

SEQ ID NO: 3428456 - DNA, 25 bp, Homo sapien
aagtcggtccgcagctcatcaaagg

SEQ ID NO: 3428457 - DNA, 25 bp, Homo sapien
ttcttgaagtcggtccgcagctcat

SEQ ID NO: 3428458 - DNA, 25 bp, Homo sapien
cttgaagtcggtccgcagctcatca

SEQ ID NO: 3428459 - DNA, 25 bp, Homo sapien
ctgcggcactgtcggcacggccggg

SEQ ID NO: 3428460 - DNA, 25 bp, Homo sapien
atggcgaccgtcaccatggaagggc

SEQ ID NO: 3428461 - DNA, 25 bp, Homo sapien
gccctgagcccgcgccaggtgtttg

SEQ ID NO: 3428462 - DNA, 25 bp, Homo sapien
gcgccagagcgatctctgcggcact

SEQ ID NO: 3428463 - DNA, 25 bp, Homo sapien
aaaggccgcgatggggtggcggaga

SEQ ID NO: 3428464 - DNA, 25 bp, Homo sapien
gccgcgatggggtggcggagaagca

SEQ ID NO: 3428465 - DNA, 25 bp, Homo sapien
cgcgatggggtggcggagaagcagg

SEQ ID NO: 3428466 - DNA, 25 bp, Homo sapien
aggccgcgatggggtggcggagaag

SEQ ID NO: 3428467 - DNA, 25 bp, Homo sapien
ggaggcagcagatgcgttcgatgtt

SEQ ID NO: 3428468 - DNA, 25 bp, Homo sapien
agcagatgcgttcgatgttttttaa

SEQ ID NO: 3428469 - DNA, 25 bp, Homo sapien
ggcagcagatgcgttcgatgttttt

SEQ ID NO: 3428470 - DNA, 25 bp, Homo sapien
gaggcagcagatgcgttcgatgttt

SEQ ID NO: 3428471 - DNA, 25 bp, Homo sapien
gacagaagaggccgtggatggagta

SEQ ID NO: 3428472 - DNA, 25 bp, Homo sapien
tcagacagaagaggccgtggatgga

SEQ ID NO: 3428473 - DNA, 25 bp, Homo sapien
tgcacacagaaacatcagacagaag

SEQ ID NO: 3428474 - DNA, 25 bp, Homo sapien
gatggagaccgcatcatacatgacc

SEQ ID NO: 3428475 - DNA, 25 bp, Homo sapien
gccatctgcaggacggtggaagtac

SEQ ID NO: 3428476 - DNA, 25 bp, Homo sapien
gaaggcaagtttgcaccaggactcc

SEQ ID NO: 3428477 - DNA, 25 bp, Homo sapien
aatgtcagcattcatgatggagacc

SEQ ID NO: 3428478 - DNA, 25 bp, Homo sapien
aaggcaggaacttgggattggaagc

SEQ ID NO: 3428479 - DNA, 25 bp, Homo sapien
cctgagttctgactgctgtgggcaa

SEQ ID NO: 3428480 - DNA, 25 bp, Homo sapien
aacttgggattggaagcgtgatgct

SEQ ID NO: 3428481 - DNA, 25 bp, Homo sapien
agatgagccagtgagcctagccctg

SEQ ID NO: 3428482 - DNA, 25 bp, Homo sapien
tgcccctgtttagagctctgcccag

SEQ ID NO: 3428483 - DNA, 25 bp, Homo sapien
tctgccccttggcagggcccaagtt

SEQ ID NO: 3428484 - DNA, 25 bp, Homo sapien
ccagccgctctagtccaagggggag

SEQ ID NO: 3428485 - DNA, 25 bp, Homo sapien
gcgtccggtccgttctgggctcgct

SEQ ID NO: 3428486 - DNA, 25 bp, Homo sapien
gagggggtgccggactcctccaggc

SEQ ID NO: 3428487 - DNA, 25 bp, Homo sapien
tgctcattcccggtgcgggtacccc

SEQ ID NO: 3428488 - DNA, 25 bp, Homo sapien
tccaggcgacatagaaaataggtcc

SEQ ID NO: 3428489 - DNA, 25 bp, Homo sapien
aataggtccaagagacaaggtgggc

SEQ ID NO: 3428490 - DNA, 25 bp, Homo sapien
cacctgctggcctacagtggctaca

SEQ ID NO: 3428491 - DNA, 25 bp, Homo sapien
gccttcattacttacgtgctcctgg

SEQ ID NO: 3428492 - DNA, 25 bp, Homo sapien
tagggcatatgtggtggtccccagc

SEQ ID NO: 3428493 - DNA, 25 bp, Homo sapien
tctagcactgctctgttaagaggga

SEQ ID NO: 3428494 - DNA, 25 bp, Homo sapien
gccttggcccatgatacagtttctg

SEQ ID NO: 3428495 - DNA, 25 bp, Homo sapien
cagtttggtccctgtataggcggaa

SEQ ID NO: 3428496 - DNA, 25 bp, Homo sapien
gacttagaattgctgactgcggtga

SEQ ID NO: 3428497 - DNA, 25 bp, Homo sapien
gacagcatgggtgtccactgaacct

SEQ ID NO: 3428498 - DNA, 25 bp, Homo sapien
tcccctcttcgatgacacaagcggt

SEQ ID NO: 3428499 - DNA, 25 bp, Homo sapien
ggacccaatggccaatgtggctatg

SEQ ID NO: 3428500 - DNA, 25 bp, Homo sapien
cagacgtggccttcagtgtcaacca

SEQ ID NO: 3428501 - DNA, 25 bp, Homo sapien
cacaagcggtggttattccagccag

SEQ ID NO: 3428502 - DNA, 25 bp, Homo sapien
tctgtcactgataggtccggcctcc

SEQ ID NO: 3428503 - DNA, 25 bp, Homo sapien
tgggccccagttttgcagtatgcgt

SEQ ID NO: 3428504 - DNA, 25 bp, Homo sapien
caaatctgctggactacgggagagt

SEQ ID NO: 3428505 - DNA, 25 bp, Homo sapien
gaggacattttcagcaccggacgac

SEQ ID NO: 3428506 - DNA, 25 bp, Homo sapien
gtccctctgagaggcacgagatgaa

SEQ ID NO: 3428507 - DNA, 25 bp, Homo sapien
catgcagggcaaattgggtgcaccc

SEQ ID NO: 3428508 - DNA, 25 bp, Homo sapien
gataactaggcttatggacaagtgg

SEQ ID NO: 3428509 - DNA, 25 bp, Homo sapien
gaagtggagaatgacaacagggcct

SEQ ID NO: 3428510 - DNA, 25 bp, Homo sapien
gctcggctcagcggccgcggaggga

SEQ ID NO: 3428511 - DNA, 25 bp, Homo sapien
cgcggagggagtgcgcggagctcga

SEQ ID NO: 3428512 - DNA, 25 bp, Homo sapien
gcaccgggcatgataggggggagca

SEQ ID NO: 3428513 - DNA, 25 bp, Homo sapien
agcacggagggctgcgacgcggccc

SEQ ID NO: 3428514 - DNA, 25 bp, Homo sapien
tcgccgtccgggatgagcgcgggca

SEQ ID NO: 3428515 - DNA, 25 bp, Homo sapien
gcggctcgccgtccgggatgagcgc

SEQ ID NO: 3428516 - DNA, 25 bp, Homo sapien
cgtccgggatgagcgcgggcacctc

SEQ ID NO: 3428517 - DNA, 25 bp, Homo sapien
ccgccgtcgccagcgccgtcctcgg

SEQ ID NO: 3428518 - DNA, 25 bp, Homo sapien
tgtgcgccgcacgtagtgatagctg

SEQ ID NO: 3428519 - DNA, 25 bp, Homo sapien
caggccctcgttggcgctgaagaag

SEQ ID NO: 3428520 - DNA, 25 bp, Homo sapien
gccagcgggatgtacaggtagccat

SEQ ID NO: 3428521 - DNA, 25 bp, Homo sapien
cggaagtctacgtccttcaggtgca

SEQ ID NO: 3428522 - DNA, 25 bp, Homo sapien
cgagctggcgccaaagagcttctcc

SEQ ID NO: 3428523 - DNA, 25 bp, Homo sapien
agctggcgccaaagagcttctccac

SEQ ID NO: 3428524 - DNA, 25 bp, Homo sapien
ggcgagctggcgccaaagagcttct

SEQ ID NO: 3428525 - DNA, 25 bp, Homo sapien
cgggggcgagctggcgccaaagagc

SEQ ID NO: 3428526 - DNA, 25 bp, Homo sapien
tgccactcgagctcagtgaagtcca

SEQ ID NO: 3428527 - DNA, 25 bp, Homo sapien
gtgccactcgagctcagtgaagtcc

SEQ ID NO: 3428528 - DNA, 25 bp, Homo sapien
agcctctgaggtaggcgcccgagcc

SEQ ID NO: 3428529 - DNA, 25 bp, Homo sapien
gcccgcgcccatgaccacggcctcc

SEQ ID NO: 3428530 - DNA, 25 bp, Homo sapien
agggcaggcggggcccgctgggccg

SEQ ID NO: 3428531 - DNA, 25 bp, Homo sapien
cgagcccgcgcccatgaccacggcc

SEQ ID NO: 3428532 - DNA, 25 bp, Homo sapien
gcagccgctgtctccgtggacaatg

SEQ ID NO: 3428533 - DNA, 25 bp, Homo sapien
aagtagagggcgtcctcatagcagg

SEQ ID NO: 3428534 - DNA, 25 bp, Homo sapien
gggttccgtgtcctctccacggcgc

SEQ ID NO: 3428535 - DNA, 25 bp, Homo sapien
tcaggctgcggaagacccctggcgt

SEQ ID NO: 3428536 - DNA, 25 bp, Homo sapien
tttggacaacaatcactcgggcatc

SEQ ID NO: 3428537 - DNA, 25 bp, Homo sapien
cccggtagggaagtgtccacaggca

SEQ ID NO: 3428538 - DNA, 25 bp, Homo sapien
ccaagactcgttgatgggagaagca

SEQ ID NO: 3428539 - DNA, 25 bp, Homo sapien
tcgggcatctaagcccatggtggaa

SEQ ID NO: 3428540 - DNA, 25 bp, Homo sapien
tgaacaccctttactgctgcacatg

SEQ ID NO: 3428541 - DNA, 25 bp, Homo sapien
tagcccttaagccacctttgcgtga

SEQ ID NO: 3428542 - DNA, 25 bp, Homo sapien
tggcctgtaggctggattccatgca

SEQ ID NO: 3428543 - DNA, 25 bp, Homo sapien
caagtggatgtagctccatgccaga

SEQ ID NO: 3428544 - DNA, 25 bp, Homo sapien
ccttgaaactgagtggaccttcata

SEQ ID NO: 3428545 - DNA, 25 bp, Homo sapien
gagatgagatcctatattccctccc

SEQ ID NO: 3428546 - DNA, 25 bp, Homo sapien
tagtagccttgaccgatggaaaggg

SEQ ID NO: 3428547 - DNA, 25 bp, Homo sapien
acattgacaagcctccacagagaga

SEQ ID NO: 3428548 - DNA, 25 bp, Homo sapien
cattctataggacagcagtctgggc

SEQ ID NO: 3428549 - DNA, 25 bp, Homo sapien
caaaggtggaagctgcgagagtcct

SEQ ID NO: 3428550 - DNA, 25 bp, Homo sapien
tagcctcagaagtgggccaacatct

SEQ ID NO: 3428551 - DNA, 25 bp, Homo sapien
gatttaaagggcgaacagattccac

SEQ ID NO: 3428552 - DNA, 25 bp, Homo sapien
taatgagcaccagatgcggagctgc

SEQ ID NO: 3428553 - DNA, 25 bp, Homo sapien
gggctcagcccacttactcgcaggc

SEQ ID NO: 3428554 - DNA, 25 bp, Homo sapien
cgtgcgggcctaaacagacggcctc

SEQ ID NO: 3428555 - DNA, 25 bp, Homo sapien
tcatctggtaatgagcaccagatgc

SEQ ID NO: 3428556 - DNA, 25 bp, Homo sapien
tggcccagcgctcgtgaccaaggat

SEQ ID NO: 3428557 - DNA, 25 bp, Homo sapien
gacctgcagaaccagcgtgtgatgg

SEQ ID NO: 3428558 - DNA, 25 bp, Homo sapien
tcgtgaccaaggatacaccaaagcc

SEQ ID NO: 3428559 - DNA, 25 bp, Homo sapien
caccaaagcccttaagacctcaggg

SEQ ID NO: 3428560 - DNA, 25 bp, Homo sapien
taccaacccggtattctctctgtct

SEQ ID NO: 3428561 - DNA, 25 bp, Homo sapien
tgtttccagacacccgggtcgctgg

SEQ ID NO: 3428562 - DNA, 25 bp, Homo sapien
tatgatctcaaccaaatatccggag

SEQ ID NO: 3428563 - DNA, 25 bp, Homo sapien
agatccccgtgatcgcagccaacta

SEQ ID NO: 3428564 - DNA, 25 bp, Homo sapien
cagatgagtgccagattgccggtgt

SEQ ID NO: 3428565 - DNA, 25 bp, Homo sapien
aggatgatccgcaccgctgtgtgga

SEQ ID NO: 3428566 - DNA, 25 bp, Homo sapien
tgccagtttggcttcgagggcgcct

SEQ ID NO: 3428567 - DNA, 25 bp, Homo sapien
aggacacggctttcaccaactgggc

SEQ ID NO: 3428568 - DNA, 25 bp, Homo sapien
tgcggcagcactgatgcaggaccga

SEQ ID NO: 3428569 - DNA, 25 bp, Homo sapien
acctactgacccaggtgcgggctgg

SEQ ID NO: 3428570 - DNA, 25 bp, Homo sapien
agctgcagggcatccgtcaggcgct

SEQ ID NO: 3428571 - DNA, 25 bp, Homo sapien
gacgacctctgcttcggtccatgag

SEQ ID NO: 3428572 - DNA, 25 bp, Homo sapien
cctggagagtcaggcgcgggctctc

SEQ ID NO: 3428573 - DNA, 25 bp, Homo sapien
ggaaagccctggagagtcaggcgcg

SEQ ID NO: 3428574 - DNA, 25 bp, Homo sapien
tggggatgtgcgtgccttgccttgg

SEQ ID NO: 3428575 - DNA, 25 bp, Homo sapien
cagcccgtccagcttcactactggg

SEQ ID NO: 3428576 - DNA, 25 bp, Homo sapien
tcgggcccaggagttcttttcgaga

SEQ ID NO: 3428577 - DNA, 25 bp, Homo sapien
gctcgggcccaggagttcttttcga

SEQ ID NO: 3428578 - DNA, 25 bp, Homo sapien
ggcgggtagattgctcgggcccagg

SEQ ID NO: 3428579 - DNA, 25 bp, Homo sapien
ttgctcgggcccaggagttcttttc

SEQ ID NO: 3428580 - DNA, 25 bp, Homo sapien
tgagcaaatgggtgcacggctgcct

SEQ ID NO: 3428581 - DNA, 25 bp, Homo sapien
gatgatgaggactatgagcgacgcc

SEQ ID NO: 3428582 - DNA, 25 bp, Homo sapien
taacaccgggcttgctgtggaatgg

SEQ ID NO: 3428583 - DNA, 25 bp, Homo sapien
ctcaagattcgcattcaggtggcag

SEQ ID NO: 3428584 - DNA, 25 bp, Homo sapien
gggcttcgccttcaagggttctgga

SEQ ID NO: 3428585 - DNA, 25 bp, Homo sapien
gaatacctacctcacggaactgttg

SEQ ID NO: 3428586 - DNA, 25 bp, Homo sapien
tatgtgcctaccgatgacaatgtgt

SEQ ID NO: 3428587 - DNA, 25 bp, Homo sapien
gagatctgtcccttcaacgggctgg

SEQ ID NO: 3428588 - DNA, 25 bp, Homo sapien
tcagcacaataagatcctatatcgc

SEQ ID NO: 3428589 - DNA, 25 bp, Homo sapien
agcgttgaagttccatccccaaaag

SEQ ID NO: 3428590 - DNA, 25 bp, Homo sapien
cctatatcgccagttcaaacaggag

SEQ ID NO: 3428591 - DNA, 25 bp, Homo sapien
tgaggtcctgaacgaaggtttcttg

SEQ ID NO: 3428592 - DNA, 25 bp, Homo sapien
gcatgcccatgaacaaaaacgagct

SEQ ID NO: 3428593 - DNA, 25 bp, Homo sapien
gtggtgcctgccttcgaaatccgaa

SEQ ID NO: 3428594 - DNA, 25 bp, Homo sapien
aacctgccggaagagagcttgctgc

SEQ ID NO: 3428595 - DNA, 25 bp, Homo sapien
cgaggtgcggcccttctattatggg

SEQ ID NO: 3428596 - DNA, 25 bp, Homo sapien
ggcccagcccgggattaattatgcg

SEQ ID NO: 3428597 - DNA, 25 bp, Homo sapien
gagccatgcagatgtcctacgccat

SEQ ID NO: 3428598 - DNA, 25 bp, Homo sapien
ggacaacctgctgcacctgtcgggt

SEQ ID NO: 3428599 - DNA, 25 bp, Homo sapien
tatgcgctgggcaccaatgtctcct

SEQ ID NO: 3428600 - DNA, 25 bp, Homo sapien
aagtcgcaacgcagacctcttcgga

SEQ ID NO: 3428601 - DNA, 25 bp, Homo sapien
cagacctcttcggacacagggaaag

SEQ ID NO: 3428602 - DNA, 25 bp, Homo sapien
cactaccacgtaagtcgcaacgcag

SEQ ID NO: 3428603 - DNA, 25 bp, Homo sapien
cttccaagcactaccacgtaagtcg

SEQ ID NO: 3428604 - DNA, 25 bp, Homo sapien
cacaatggattagcagtccatcgcc

SEQ ID NO: 3428605 - DNA, 25 bp, Homo sapien
agcacaatggattagcagtccatcg

SEQ ID NO: 3428606 - DNA, 25 bp, Homo sapien
gcacaatggattagcagtccatcgc

SEQ ID NO: 3428607 - DNA, 25 bp, Homo sapien
atggattagcagtccatcgccttaa

SEQ ID NO: 3428608 - DNA, 25 bp, Homo sapien
cctgtaatcccagcactttgggagg

SEQ ID NO: 3428609 - DNA, 25 bp, Homo sapien
cactggctgagcttggtagctcact

SEQ ID NO: 3428610 - DNA, 25 bp, Homo sapien
aaacactggctgagcttggtagctc

SEQ ID NO: 3428611 - DNA, 25 bp, Homo sapien
ccgaggtgggcagatcacctgaggt

SEQ ID NO: 3428612 - DNA, 25 bp, Homo sapien
cttgaaatggaattgactcaactct

SEQ ID NO: 3428613 - DNA, 25 bp, Homo sapien
gaaatggaattgactcaactctcca

SEQ ID NO: 3428614 - DNA, 25 bp, Homo sapien
ggaattgactcaactctccaattaa

SEQ ID NO: 3428615 - DNA, 25 bp, Homo sapien
taattacttgaaatggaattgactc

SEQ ID NO: 3428616 - DNA, 25 bp, Homo sapien
gacattcgcttttgttttgcctgac

SEQ ID NO: 3428617 - DNA, 25 bp, Homo sapien
ggaaaagcttctacttaagaggaca

SEQ ID NO: 3428618 - DNA, 25 bp, Homo sapien
tttacatgaacaacagacaagctga

SEQ ID NO: 3428619 - DNA, 25 bp, Homo sapien
gaggacagttctccaaaacactgaa

SEQ ID NO: 3428620 - DNA, 25 bp, Homo sapien
caaactactgttgactgaggtcacc

SEQ ID NO: 3428621 - DNA, 25 bp, Homo sapien
cattgcagccccagagtttgtgaag

SEQ ID NO: 3428622 - DNA, 25 bp, Homo sapien
gtttgtgaagtagaagccctgcgca

SEQ ID NO: 3428623 - DNA, 25 bp, Homo sapien
tcacaggcagggtcaacaacataat

SEQ ID NO: 3428624 - DNA, 25 bp, Homo sapien
cagcctcaagcagtgttttcattgc

SEQ ID NO: 3428625 - DNA, 25 bp, Homo sapien
aaagtgactggtccgtggtagagcc

SEQ ID NO: 3428626 - DNA, 25 bp, Homo sapien
gctagcctgcatgtgtgtactgcac

SEQ ID NO: 3428627 - DNA, 25 bp, Homo sapien
tctctcaccgaagcctaattgaggc

SEQ ID NO: 3428628 - DNA, 25 bp, Homo sapien
tgagagacatccttatccagcagcc

SEQ ID NO: 3428629 - DNA, 25 bp, Homo sapien
ttcccgggtgttctaggcaggtgct

SEQ ID NO: 3428630 - DNA, 25 bp, Homo sapien
tcaaggcgctgctctgaagtggccc

SEQ ID NO: 3428631 - DNA, 25 bp, Homo sapien
gaatggcgagcttggctcaggcctc

SEQ ID NO: 3428632 - DNA, 25 bp, Homo sapien
cagggaccatgctgacttcagcttc

SEQ ID NO: 3428633 - DNA, 25 bp, Homo sapien
agcttctaccacagccagacgagga

SEQ ID NO: 3428634 - DNA, 25 bp, Homo sapien
aaaagtactctatgggtgtcctgag

SEQ ID NO: 3428635 - DNA, 25 bp, Homo sapien
tatgggtgtcctgagatgccctgga

SEQ ID NO: 3428636 - DNA, 25 bp, Homo sapien
gacaggagctgatctacagcttcca

SEQ ID NO: 3428637 - DNA, 25 bp, Homo sapien
gaaagaggagctggtctcatccaag

SEQ ID NO: 3428638 - DNA, 25 bp, Homo sapien
aagagacaatacataacgcaggtga

SEQ ID NO: 3428639 - DNA, 25 bp, Homo sapien
aaaaatcatgtccagctgacctctg

SEQ ID NO: 3428640 - DNA, 25 bp, Homo sapien
aatggcctggtaatgcaaccactgg

SEQ ID NO: 3428641 - DNA, 25 bp, Homo sapien
ttttctggtagtccaaatggcctgg

SEQ ID NO: 3428642 - DNA, 25 bp, Homo sapien
gcttgaaagagcatggaggtgattt

SEQ ID NO: 3428643 - DNA, 25 bp, Homo sapien
tggctgggacggagcctgacctctt

SEQ ID NO: 3428644 - DNA, 25 bp, Homo sapien
ctggctgtcgggaaacctgggtcac

SEQ ID NO: 3428645 - DNA, 25 bp, Homo sapien
agccggaatcagagccagatgagcc

SEQ ID NO: 3428646 - DNA, 25 bp, Homo sapien
tcaccccagatgagaacgggattcc

SEQ ID NO: 3428647 - DNA, 25 bp, Homo sapien
gaatctcccttcgttgggcctggct

SEQ ID NO: 3428648 - DNA, 25 bp, Homo sapien
cactgcagtgctatcacaactcaac

SEQ ID NO: 3428649 - DNA, 25 bp, Homo sapien
cagtgctatcacaactcaactgcag

SEQ ID NO: 3428650 - DNA, 25 bp, Homo sapien
tgcagtgctatcacaactcaactgc

SEQ ID NO: 3428651 - DNA, 25 bp, Homo sapien
actgcagtgctatcacaactcaact

SEQ ID NO: 3428652 - DNA, 25 bp, Homo sapien
aacttcaacaattgggtgacgctgc

SEQ ID NO: 3428653 - DNA, 25 bp, Homo sapien
aacaattgggtgacgctgctgtccc

SEQ ID NO: 3428654 - DNA, 25 bp, Homo sapien
aattgggtgacgctgctgtcccagc

SEQ ID NO: 3428655 - DNA, 25 bp, Homo sapien
tcaacaattgggtgacgctgctgtc

SEQ ID NO: 3428656 - DNA, 25 bp, Homo sapien
taacatgatgcgtgacattccaggc

SEQ ID NO: 3428657 - DNA, 25 bp, Homo sapien
acccagagatgaatcagcccctggg

SEQ ID NO: 3428658 - DNA, 25 bp, Homo sapien
tgcattgtctttgggaccgggttat

SEQ ID NO: 3428659 - DNA, 25 bp, Homo sapien
tcactgcaacaactttgcaaatgct

SEQ ID NO: 3428660 - DNA, 25 bp, Homo sapien
tcaaaaaaaatgctagggaacatat

SEQ ID NO: 3428661 - DNA, 25 bp, Homo sapien
gctagggaacatataaaaacatctt

SEQ ID NO: 3428662 - DNA, 25 bp, Homo sapien
caaaaaaaatgctagggaacatata

SEQ ID NO: 3428663 - DNA, 25 bp, Homo sapien
aaatgctagggaacatataaaaaca

SEQ ID NO: 3428664 - DNA, 25 bp, Homo sapien
acaggccccagtcaccacgccctgc

SEQ ID NO: 3428665 - DNA, 25 bp, Homo sapien
ctcagcctctcagccttttttcttt

SEQ ID NO: 3428666 - DNA, 25 bp, Homo sapien
tacaggccccagtcaccacgccctg

SEQ ID NO: 3428667 - DNA, 25 bp, Homo sapien
gcctcagcctctcagccttttttct

SEQ ID NO: 3428668 - DNA, 25 bp, Homo sapien
aattcatgagcatgcagtgaccagc

SEQ ID NO: 3428669 - DNA, 25 bp, Homo sapien
catagcctcccgcagctttgcagtg

SEQ ID NO: 3428670 - DNA, 25 bp, Homo sapien
gcccgaggcacttcagatgtctcat

SEQ ID NO: 3428671 - DNA, 25 bp, Homo sapien
tctccagctcccaattcatgagcat

SEQ ID NO: 3428672 - DNA, 25 bp, Homo sapien
ccactgccacaaacaacgcagttga

SEQ ID NO: 3428673 - DNA, 25 bp, Homo sapien
ctgccacaaacaacgcagttgagtt

SEQ ID NO: 3428674 - DNA, 25 bp, Homo sapien
cactgccacaaacaacgcagttgag

SEQ ID NO: 3428675 - DNA, 25 bp, Homo sapien
gccacaaacaacgcagttgagtttc

SEQ ID NO: 3428676 - DNA, 25 bp, Homo sapien
gctattgagagcgttgattccagga

SEQ ID NO: 3428677 - DNA, 25 bp, Homo sapien
ggagaatcctctgtcctaaccgctg

SEQ ID NO: 3428678 - DNA, 25 bp, Homo sapien
caatgtcaggactgttggctccaaa

SEQ ID NO: 3428679 - DNA, 25 bp, Homo sapien
tgaactctgccgcaatctgaggctg

SEQ ID NO: 3428680 - DNA, 25 bp, Homo sapien
gcgggcgtgcttggcggctggagtc

SEQ ID NO: 3428681 - DNA, 25 bp, Homo sapien
caaagcctgcggcaaaccaagcatt

SEQ ID NO: 3428682 - DNA, 25 bp, Homo sapien
gctggagtcccgccgtctatgtcgc

SEQ ID NO: 3428683 - DNA, 25 bp, Homo sapien
aaaccaagcattgtgtggcttagcg

SEQ ID NO: 3428684 - DNA, 25 bp, Homo sapien
cccttctccctggttgaaatgtctc

SEQ ID NO: 3428685 - DNA, 25 bp, Homo sapien
aagggcaggacttcccttctccctg

SEQ ID NO: 3428686 - DNA, 25 bp, Homo sapien
ccctggttgaaatgtctccatagag

SEQ ID NO: 3428687 - DNA, 25 bp, Homo sapien
ttgaaatgtctccatagagggtggg

SEQ ID NO: 3428688 - DNA, 25 bp, Homo sapien
cagagaggatccccgaaggcgctag

SEQ ID NO: 3428689 - DNA, 25 bp, Homo sapien
aaggcgctaggcctggcatctcgtt

SEQ ID NO: 3428690 - DNA, 25 bp, Homo sapien
gctaggcctggcatctcgtttcttt

SEQ ID NO: 3428691 - DNA, 25 bp, Homo sapien
aggatccccgaaggcgctaggcctg

SEQ ID NO: 3428692 - DNA, 25 bp, Homo sapien
tgccttgacctctggccaggaggtc

SEQ ID NO: 3428693 - DNA, 25 bp, Homo sapien
tgctcaaccataaggaatgccttga

SEQ ID NO: 3428694 - DNA, 25 bp, Homo sapien
cttcctctaggaacgtgccatgtgg

SEQ ID NO: 3428695 - DNA, 25 bp, Homo sapien
tctgtgggttctggcccatgctctt

SEQ ID NO: 3428696 - DNA, 25 bp, Homo sapien
tccagaggccaattggtccttgtag

SEQ ID NO: 3428697 - DNA, 25 bp, Homo sapien
aatggaggcgatgtttgcaagcagc

SEQ ID NO: 3428698 - DNA, 25 bp, Homo sapien
caacctagttggttggtcgtggagt

SEQ ID NO: 3428699 - DNA, 25 bp, Homo sapien
aatccttcaatggaggcgatgtttg

SEQ ID NO: 3428700 - DNA, 25 bp, Homo sapien
gcagaggtcaataggaccgggcagg

SEQ ID NO: 3428701 - DNA, 25 bp, Homo sapien
gagcagaggtcaataggaccgggca

SEQ ID NO: 3428702 - DNA, 25 bp, Homo sapien
agagcagaggtcaataggaccgggc

SEQ ID NO: 3428703 - DNA, 25 bp, Homo sapien
agaggtcaataggaccgggcagggg

SEQ ID NO: 3428704 - DNA, 25 bp, Homo sapien
tgtgtgttcggctccacctctgggt

SEQ ID NO: 3428705 - DNA, 25 bp, Homo sapien
tgagaatggtcaggcacttctcagc

SEQ ID NO: 3428706 - DNA, 25 bp, Homo sapien
tccacgcagctccttgagaatggtc

SEQ ID NO: 3428707 - DNA, 25 bp, Homo sapien
acttctctccttgccaccctcggag

SEQ ID NO: 3428708 - DNA, 25 bp, Homo sapien
gatgactgagacctaatgcagagag

SEQ ID NO: 3428709 - DNA, 25 bp, Homo sapien
tacaggcagtcatagagggacccca

SEQ ID NO: 3428710 - DNA, 25 bp, Homo sapien
gagtgacggcccttgaaagatggtc

SEQ ID NO: 3428711 - DNA, 25 bp, Homo sapien
gaaagtccccttggcagtgtcttac

SEQ ID NO: 3428712 - DNA, 25 bp, Homo sapien
cattggagggatccgatgggttcca

SEQ ID NO: 3428713 - DNA, 25 bp, Homo sapien
gcctgtggctaaagcaactgctgtc

SEQ ID NO: 3428714 - DNA, 25 bp, Homo sapien
ccaggtcatcctcaggtggtctaca

SEQ ID NO: 3428715 - DNA, 25 bp, Homo sapien
tgggttccaaggtgcacaaaacaga

SEQ ID NO: 3428716 - DNA, 25 bp, Homo sapien
ggattacctcctgggaaggagttga

SEQ ID NO: 3428717 - DNA, 25 bp, Homo sapien
agtctggagatttggagcaaggatc

SEQ ID NO: 3428718 - DNA, 25 bp, Homo sapien
tgctcctgtcttgcatagctttatt

SEQ ID NO: 3428719 - DNA, 25 bp, Homo sapien
gtagcaaaaacaggccgtgagatcc

SEQ ID NO: 3428720 - DNA, 25 bp, Homo sapien
aatgcgttcagttgagggaagcgac

SEQ ID NO: 3428721 - DNA, 25 bp, Homo sapien
agggaagcgacagggccaggtttag

SEQ ID NO: 3428722 - DNA, 25 bp, Homo sapien
cgtctgaatgcgttcagttgaggga

SEQ ID NO: 3428723 - DNA, 25 bp, Homo sapien
gggaccctggcgtctgaatgcgttc

SEQ ID NO: 3428724 - DNA, 25 bp, Homo sapien
ccttatatagctcctgccaggcgtg

SEQ ID NO: 3428725 - DNA, 25 bp, Homo sapien
cggcttccgacgtcatctcatgacg

SEQ ID NO: 3428726 - DNA, 25 bp, Homo sapien
ctgggctaagcaagctgcagcggga

SEQ ID NO: 3428727 - DNA, 25 bp, Homo sapien
ctcatgacgtagaatgagagaggga

SEQ ID NO: 3428728 - DNA, 25 bp, Homo sapien
cgctcccgtcccgacgcaccggcgg

SEQ ID NO: 3428729 - DNA, 25 bp, Homo sapien
cgtcccgacgcaccggcggcttcct

SEQ ID NO: 3428730 - DNA, 25 bp, Homo sapien
ggtgcccgagcacctgcgctcccgt

SEQ ID NO: 3428731 - DNA, 25 bp, Homo sapien
gcggagctccagctcgggtgcccga

SEQ ID NO: 3428732 - DNA, 25 bp, Homo sapien
tgcaggtaggacagccggaccttgt

SEQ ID NO: 3428733 - DNA, 25 bp, Homo sapien
tctcggcgttgatctggtcccggcg

SEQ ID NO: 3428734 - DNA, 25 bp, Homo sapien
ggaccttgtccgcttcggccagcgg

SEQ ID NO: 3428735 - DNA, 25 bp, Homo sapien
cccttgcgagtgtagatgcaggcga

SEQ ID NO: 3428736 - DNA, 25 bp, Homo sapien
cacactctcagacaggtagagcaat

SEQ ID NO: 3428737 - DNA, 25 bp, Homo sapien
atggagtggcccagatgctcgctca

SEQ ID NO: 3428738 - DNA, 25 bp, Homo sapien
gtagagcaatttcccctcggctgtg

SEQ ID NO: 3428739 - DNA, 25 bp, Homo sapien
cacaagcagaaagccgggtagtgcc

SEQ ID NO: 3428740 - DNA, 25 bp, Homo sapien
ctgggtcaatgatgtcgtagatgct

SEQ ID NO: 3428741 - DNA, 25 bp, Homo sapien
caatgatgtcgtagatgctgtcacc

SEQ ID NO: 3428742 - DNA, 25 bp, Homo sapien
agggtgagttgctggcgcacagtga

SEQ ID NO: 3428743 - DNA, 25 bp, Homo sapien
tggtcagctgggtcaatgatgtcgt

SEQ ID NO: 3428744 - DNA, 25 bp, Homo sapien
gaacacgggatttcctgcccagtag

SEQ ID NO: 3428745 - DNA, 25 bp, Homo sapien
taagcacgagtttgttgcctgcact

SEQ ID NO: 3428746 - DNA, 25 bp, Homo sapien
tggaatcggcctcgaataagcacga

SEQ ID NO: 3428747 - DNA, 25 bp, Homo sapien
tcggagatgtccagtagagccaggt

SEQ ID NO: 3428748 - DNA, 25 bp, Homo sapien
ctcaaagcccaggtagattaggaca

SEQ ID NO: 3428749 - DNA, 25 bp, Homo sapien
gggtgcagcagtccataccatgatt

SEQ ID NO: 3428750 - DNA, 25 bp, Homo sapien
gtccataccatgatttacaaagcag

SEQ ID NO: 3428751 - DNA, 25 bp, Homo sapien
tacaaagcagttcactgcgctcaaa

SEQ ID NO: 3428752 - DNA, 25 bp, Homo sapien
taacaggcagtaaatccatgcccag

SEQ ID NO: 3428753 - DNA, 25 bp, Homo sapien
ctggaccttctgagtataacaggca

SEQ ID NO: 3428754 - DNA, 25 bp, Homo sapien
tattggcagtaatgggtccctctgg

SEQ ID NO: 3428755 - DNA, 25 bp, Homo sapien
ctgattgggtagttattggcagtaa

SEQ ID NO: 3428756 - DNA, 25 bp, Homo sapien
tccagagcagttccctgatttgtgt

SEQ ID NO: 3428757 - DNA, 25 bp, Homo sapien
tccatatccagagcagttccctgat

SEQ ID NO: 3428758 - DNA, 25 bp, Homo sapien
aagggtccgacgtccatatccagag

SEQ ID NO: 3428759 - DNA, 25 bp, Homo sapien
agctggtaagggtccgacgtccata

SEQ ID NO: 3428760 - DNA, 25 bp, Homo sapien
taagctgcctgggtgtcttcagagt

SEQ ID NO: 3428761 - DNA, 25 bp, Homo sapien
catggtcggagtgcccaggacataa

SEQ ID NO: 3428762 - DNA, 25 bp, Homo sapien
cactgctgggcgtcaactgatcaga

SEQ ID NO: 3428763 - DNA, 25 bp, Homo sapien
cagagttcaactgctggcggaggct

SEQ ID NO: 3428764 - DNA, 25 bp, Homo sapien
ctcctgggcaaagtaagtcttggta

SEQ ID NO: 3428765 - DNA, 25 bp, Homo sapien
cttcatagcttctgaccgaggtttc

SEQ ID NO: 3428766 - DNA, 25 bp, Homo sapien
catagagaaaactgcatccctcctg

SEQ ID NO: 3428767 - DNA, 25 bp, Homo sapien
cagggagtcaactggtcttcatagc

SEQ ID NO: 3428768 - DNA, 25 bp, Homo sapien
gaaactctgcttgactggagaggcc

SEQ ID NO: 3428769 - DNA, 25 bp, Homo sapien
gccaattggctaatctgctggatga

SEQ ID NO: 3428770 - DNA, 25 bp, Homo sapien
tcaaaggcggtttcatatgtggcca

SEQ ID NO: 3428771 - DNA, 25 bp, Homo sapien
tccaagtggctctagtccgccagtg

SEQ ID NO: 3428772 - DNA, 25 bp, Homo sapien
gagtccatcggaattgaaatcccgt

SEQ ID NO: 3428773 - DNA, 25 bp, Homo sapien
aattctacgtgggtgtcaagagccc

SEQ ID NO: 3428774 - DNA, 25 bp, Homo sapien
gcttggcccctaggagtggagaact

SEQ ID NO: 3428775 - DNA, 25 bp, Homo sapien
gaaatggaaactgggatcgctcgaa

SEQ ID NO: 3428776 - DNA, 25 bp, Homo sapien
gcaccaggtacacgcactcgtgcaa

SEQ ID NO: 3428777 - DNA, 25 bp, Homo sapien
cactcgtgcaagcacacgtgtgacg

SEQ ID NO: 3428778 - DNA, 25 bp, Homo sapien
cacgtgtgacggcaggtctgccttc

SEQ ID NO: 3428779 - DNA, 25 bp, Homo sapien
gggtgagtcccgcaccaggtacacg

SEQ ID NO: 3428780 - DNA, 25 bp, Homo sapien
acaaagtcaccgcagcaccacgagg

SEQ ID NO: 3428781 - DNA, 25 bp, Homo sapien
agcaccacgaggtggccatctgggc

SEQ ID NO: 3428782 - DNA, 25 bp, Homo sapien
aaagttggctacaaagtcaccgcag

SEQ ID NO: 3428783 - DNA, 25 bp, Homo sapien
gcaccacgaggtggccatctgggca

SEQ ID NO: 3428784 - DNA, 25 bp, Homo sapien
gcatcttcagggtagtcacccacac

SEQ ID NO: 3428785 - DNA, 25 bp, Homo sapien
ggcatcttcagggtagtcacccaca

SEQ ID NO: 3428786 - DNA, 25 bp, Homo sapien
cagcatctgcggtgctggcatgttc

SEQ ID NO: 3428787 - DNA, 25 bp, Homo sapien
tttgcccaatatcacgggcacagca

SEQ ID NO: 3428788 - DNA, 25 bp, Homo sapien
tcctctttgcccaatatcacgggca

SEQ ID NO: 3428789 - DNA, 25 bp, Homo sapien
acagcagactgccagcatctgcggt

SEQ ID NO: 3428790 - DNA, 25 bp, Homo sapien
cagaggtaggaatagaacccaggcc

SEQ ID NO: 3428791 - DNA, 25 bp, Homo sapien
cccaggttctgaattggtgccagag

SEQ ID NO: 3428792 - DNA, 25 bp, Homo sapien
cagtaggttcctgcctgatggagaa

SEQ ID NO: 3428793 - DNA, 25 bp, Homo sapien
catgaactattgtagggctgacagc

SEQ ID NO: 3428794 - DNA, 25 bp, Homo sapien
acctgttactataaggcttgagtac

SEQ ID NO: 3428795 - DNA, 25 bp, Homo sapien
gttgtcttagagacagagcagttta

SEQ ID NO: 3428796 - DNA, 25 bp, Homo sapien
gtttatcaagaagagtccaagggag

SEQ ID NO: 3428797 - DNA, 25 bp, Homo sapien
taaacctgttactataaggcttgag

SEQ ID NO: 3428798 - DNA, 25 bp, Homo sapien
tctggggacgccacgcaattagagg

SEQ ID NO: 3428799 - DNA, 25 bp, Homo sapien
aagcagctgcagttgaccagagtcg

SEQ ID NO: 3428800 - DNA, 25 bp, Homo sapien
ccacgcaattagaggagaggaggaa

SEQ ID NO: 3428801 - DNA, 25 bp, Homo sapien
aatgctaaaggcaaagggggtgtgc

SEQ ID NO: 3428802 - DNA, 25 bp, Homo sapien
ggggatgagcgcgaacagccacgct

SEQ ID NO: 3428803 - DNA, 25 bp, Homo sapien
gggagggggatgagcgcgaacagcc

SEQ ID NO: 3428804 - DNA, 25 bp, Homo sapien
ggagggggatgagcgcgaacagcca

SEQ ID NO: 3428805 - DNA, 25 bp, Homo sapien
gatgagcgcgaacagccacgctccg

SEQ ID NO: 3428806 - DNA, 25 bp, Homo sapien
ggccgctgcggcgggatgggcccgg

SEQ ID NO: 3428807 - DNA, 25 bp, Homo sapien
gggccgctgcggcgggatgggcccg

SEQ ID NO: 3428808 - DNA, 25 bp, Homo sapien
ctccccgcctagcccctgctcggcc

SEQ ID NO: 3428809 - DNA, 25 bp, Homo sapien
gctccctccccgcctagcccctgct

SEQ ID NO: 3428810 - DNA, 25 bp, Homo sapien
tcaccatacttgatgggctcctcgc

SEQ ID NO: 3428811 - DNA, 25 bp, Homo sapien
catcttcaccgggagaggagagaac

SEQ ID NO: 3428812 - DNA, 25 bp, Homo sapien
ccccggtgctggaggtctgaggttc

SEQ ID NO: 3428813 - DNA, 25 bp, Homo sapien
gaggagagaacgcaagagcccttgt

SEQ ID NO: 3428814 - DNA, 25 bp, Homo sapien
gtgcccttgggccagtcacttcccc

SEQ ID NO: 3428815 - DNA, 25 bp, Homo sapien
tcggtttcctcacctccttcctcac

SEQ ID NO: 3428816 - DNA, 25 bp, Homo sapien
cccttgggccagtcacttcccctct

SEQ ID NO: 3428817 - DNA, 25 bp, Homo sapien
tgtgtgcccttgggccagtcacttc

SEQ ID NO: 3428818 - DNA, 25 bp, Homo sapien
agtgccaggcggcttcgccggcggc

SEQ ID NO: 3428819 - DNA, 25 bp, Homo sapien
gtgcgaccggcggctcagtgccagg

SEQ ID NO: 3428820 - DNA, 25 bp, Homo sapien
cttgtccccacttgccagacaacca

SEQ ID NO: 3428821 - DNA, 25 bp, Homo sapien
cccacttgccagacaaccattgtag

SEQ ID NO: 3428822 - DNA, 25 bp, Homo sapien
ctggaacatgtctgtgtcgctatca

SEQ ID NO: 3428823 - DNA, 25 bp, Homo sapien
tgtcgctatcatgtgtatactccac

SEQ ID NO: 3428824 - DNA, 25 bp, Homo sapien
ggacagtgtatacgagatgctgtgc

SEQ ID NO: 3428825 - DNA, 25 bp, Homo sapien
actatgaccgagtggctccgggaca

SEQ ID NO: 3428826 - DNA, 25 bp, Homo sapien
gacgtgtctgttaccacgaagtcaa

SEQ ID NO: 3428827 - DNA, 25 bp, Homo sapien
ggcatcgaagccagcggcatagatg

SEQ ID NO: 3428828 - DNA, 25 bp, Homo sapien
tccaaggaagatgttgctagaggca

SEQ ID NO: 3428829 - DNA, 25 bp, Homo sapien
tagatgcgggcagtatagggtggcc

SEQ ID NO: 3428830 - DNA, 25 bp, Homo sapien
ggctgtcccgcaatgtgtacacatt

SEQ ID NO: 3428831 - DNA, 25 bp, Homo sapien
tggggtccgccatttggccgctcgc

SEQ ID NO: 3428832 - DNA, 25 bp, Homo sapien
acacattcccacagaccgagatctc

SEQ ID NO: 3428833 - DNA, 25 bp, Homo sapien
ttggtggtcagtccatccatcaggc

SEQ ID NO: 3428834 - DNA, 25 bp, Homo sapien
tgggattccctgatatggagcctgt

SEQ ID NO: 3428835 - DNA, 25 bp, Homo sapien
gattccctgatatggagcctgttgg

SEQ ID NO: 3428836 - DNA, 25 bp, Homo sapien
gtggggaatggagcgggccacctac

SEQ ID NO: 3428837 - DNA, 25 bp, Homo sapien
gcctgggattccctgatatggagcc

SEQ ID NO: 3428838 - DNA, 25 bp, Homo sapien
gatctgtaccacaaggagctgccac

SEQ ID NO: 3428839 - DNA, 25 bp, Homo sapien
cctgcgagaggagaacagtgctaaa

SEQ ID NO: 3428840 - DNA, 25 bp, Homo sapien
ccagtttgaggagcacggccatgtg

SEQ ID NO: 3428841 - DNA, 25 bp, Homo sapien
taaggaccctttcctcctgcgagag

SEQ ID NO: 3428842 - DNA, 25 bp, Homo sapien
cagaggcagtagaagggccttactg

SEQ ID NO: 3428843 - DNA, 25 bp, Homo sapien
tgagccgcgggtccatcccacagag

SEQ ID NO: 3428844 - DNA, 25 bp, Homo sapien
aggcccctgctgagccgcgggtcca

SEQ ID NO: 3428845 - DNA, 25 bp, Homo sapien
ctgccagaggcagtagaagggcctt

SEQ ID NO: 3428846 - DNA, 25 bp, Homo sapien
gcagcacgttggactcgttttccac

SEQ ID NO: 3428847 - DNA, 25 bp, Homo sapien
tgcatttgcctcctgccgctgggcc

SEQ ID NO: 3428848 - DNA, 25 bp, Homo sapien
ggcctccagttgcttcagtgtggga

SEQ ID NO: 3428849 - DNA, 25 bp, Homo sapien
gccggtgtgcgccacagcagtgtgg

SEQ ID NO: 3428850 - DNA, 25 bp, Homo sapien
cccagtagcgggcagtcttctcaga

SEQ ID NO: 3428851 - DNA, 25 bp, Homo sapien
agccgtggtagccatggacgtgccc

SEQ ID NO: 3428852 - DNA, 25 bp, Homo sapien
tggccaagccatagaggcacataag

SEQ ID NO: 3428853 - DNA, 25 bp, Homo sapien
cagagaggacattcgcgctcctggg

SEQ ID NO: 3428854 - DNA, 25 bp, Homo sapien
gatttctggcttactgacacctgag

SEQ ID NO: 3428855 - DNA, 25 bp, Homo sapien
ccatcttgtggactcggagggttcc

SEQ ID NO: 3428856 - DNA, 25 bp, Homo sapien
tagcacagagtcgagcccatagtgg

SEQ ID NO: 3428857 - DNA, 25 bp, Homo sapien
tctgatcctggcacgcatgaagccg

SEQ ID NO: 3428858 - DNA, 25 bp, Homo sapien
tgtatattcacaaccacctggcgag

SEQ ID NO: 3428859 - DNA, 25 bp, Homo sapien
aactgaggctctaacagctggcaaa

SEQ ID NO: 3428860 - DNA, 25 bp, Homo sapien
aactgaggctaagaggttcgccgac

SEQ ID NO: 3428861 - DNA, 25 bp, Homo sapien
catggagcagtctatcactggagtc

SEQ ID NO: 3428862 - DNA, 25 bp, Homo sapien
gtccggatgggcgtcagtaccagcc

SEQ ID NO: 3428863 - DNA, 25 bp, Homo sapien
agcagctgctccgttcgcaaactca

SEQ ID NO: 3428864 - DNA, 25 bp, Homo sapien
agtaccagccaatagacgcgccaag

SEQ ID NO: 3428865 - DNA, 25 bp, Homo sapien
gcgccaagacgagcttctcggctcg

SEQ ID NO: 3428866 - DNA, 25 bp, Homo sapien
gggatgacacgctttgaccccaaaa

SEQ ID NO: 3428867 - DNA, 25 bp, Homo sapien
gatgacacgctttgaccccaaaagc

SEQ ID NO: 3428868 - DNA, 25 bp, Homo sapien
ggtcccccgggatgacacgctttga

SEQ ID NO: 3428869 - DNA, 25 bp, Homo sapien
ccgggatgacacgctttgaccccaa

SEQ ID NO: 3428870 - DNA, 25 bp, Homo sapien
ttctcatccctctaaatgccttttc

SEQ ID NO: 3428871 - DNA, 25 bp, Homo sapien
ccaatattaccaggtgggtgcgcta

SEQ ID NO: 3428872 - DNA, 25 bp, Homo sapien
ggacggaaagtatccacagcaataa

SEQ ID NO: 3428873 - DNA, 25 bp, Homo sapien
gctaatcagatgaagtcgccctgga

SEQ ID NO: 3428874 - DNA, 25 bp, Homo sapien
gcatagaggcgctctgtgggtgaca

SEQ ID NO: 3428875 - DNA, 25 bp, Homo sapien
gccgatgtcattgggcaggatgtac

SEQ ID NO: 3428876 - DNA, 25 bp, Homo sapien
gtccaggctagacacgccgatgtca

SEQ ID NO: 3428877 - DNA, 25 bp, Homo sapien
gcacgggacaggtggtaggcataga

SEQ ID NO: 3428878 - DNA, 25 bp, Homo sapien
gccagggcatgttggcgcagctggt

SEQ ID NO: 3428879 - DNA, 25 bp, Homo sapien
cctcctcggtaaggccttcagccag

SEQ ID NO: 3428880 - DNA, 25 bp, Homo sapien
ccagggcatgttggcgcagctggtc

SEQ ID NO: 3428881 - DNA, 25 bp, Homo sapien
ctgatactcctcctcggtaaggcct

SEQ ID NO: 3428882 - DNA, 25 bp, Homo sapien
catgcatattttacgggtgagaaga

SEQ ID NO: 3428883 - DNA, 25 bp, Homo sapien
gcactgttctaagtgggtcatcaca

SEQ ID NO: 3428884 - DNA, 25 bp, Homo sapien
gacctcctgatacctactctggact

SEQ ID NO: 3428885 - DNA, 25 bp, Homo sapien
aggtacagacatcccacatgcatat

SEQ ID NO: 3428886 - DNA, 25 bp, Homo sapien
tgctgcaatgcactaagaatttgtg

SEQ ID NO: 3428887 - DNA, 25 bp, Homo sapien
gaaatagatcctcctcacatgtgtg

SEQ ID NO: 3428888 - DNA, 25 bp, Homo sapien
tttgcagtgggccaacattacgcca

SEQ ID NO: 3428889 - DNA, 25 bp, Homo sapien
tgtgcacaagtatgctcaccatggc

SEQ ID NO: 3428890 - DNA, 25 bp, Homo sapien
tgcccatgttggagtaaacacccgc

SEQ ID NO: 3428891 - DNA, 25 bp, Homo sapien
acacccgcggcatagaccaggaacg

SEQ ID NO: 3428892 - DNA, 25 bp, Homo sapien
caccaaaggacttgtagttgcccat

SEQ ID NO: 3428893 - DNA, 25 bp, Homo sapien
caagttgggaacaaacttggtgtca

SEQ ID NO: 3428894 - DNA, 25 bp, Homo sapien
tcactccctaggatcacccgttcca

SEQ ID NO: 3428895 - DNA, 25 bp, Homo sapien
actccctaggatcacccgttccagc

SEQ ID NO: 3428896 - DNA, 25 bp, Homo sapien
tccctaggatcacccgttccagctt

SEQ ID NO: 3428897 - DNA, 25 bp, Homo sapien
ctaggatcacccgttccagcttttc

SEQ ID NO: 3428898 - DNA, 25 bp, Homo sapien
tccgaggtgtcgaagccttggctcc

SEQ ID NO: 3428899 - DNA, 25 bp, Homo sapien
cgaggtgtcgaagccttggctccag

SEQ ID NO: 3428900 - DNA, 25 bp, Homo sapien
ccagtccgaggtgtcgaagccttgg

SEQ ID NO: 3428901 - DNA, 25 bp, Homo sapien
cagtccgaggtgtcgaagccttggc

SEQ ID NO: 3428902 - DNA, 25 bp, Homo sapien
cttccatggtacaattcccagagaa

SEQ ID NO: 3428903 - DNA, 25 bp, Homo sapien
ccatggtacaattcccagagaaata

SEQ ID NO: 3428904 - DNA, 25 bp, Homo sapien
tcccagagaaataggtggtgattcc

SEQ ID NO: 3428905 - DNA, 25 bp, Homo sapien
caattcccagagaaataggtggtga

SEQ ID NO: 3428906 - DNA, 25 bp, Homo sapien
tccagaaagtcctgggccaatttgg

SEQ ID NO: 3428907 - DNA, 25 bp, Homo sapien
tgagtccagaaagtcctgggccaat

SEQ ID NO: 3428908 - DNA, 25 bp, Homo sapien
tgtgagtccagaaagtcctgggcca

SEQ ID NO: 3428909 - DNA, 25 bp, Homo sapien
agaaagtcctgggccaatttggcat

SEQ ID NO: 3428910 - DNA, 25 bp, Homo sapien
ttctccatcgacctctttgaagagc

SEQ ID NO: 3428911 - DNA, 25 bp, Homo sapien
ctcgtagtagggcttcccttctcca

SEQ ID NO: 3428912 - DNA, 25 bp, Homo sapien
tcgtagtagggcttcccttctccat

SEQ ID NO: 3428913 - DNA, 25 bp, Homo sapien
tttgaagagccgggtgttgtaggca

SEQ ID NO: 3428914 - DNA, 25 bp, Homo sapien
ctgagccaagcacagaagccagccg

SEQ ID NO: 3428915 - DNA, 25 bp, Homo sapien
agccaagcacagaagccagccgcac

SEQ ID NO: 3428916 - DNA, 25 bp, Homo sapien
tgagccaagcacagaagccagccgc

SEQ ID NO: 3428917 - DNA, 25 bp, Homo sapien
gagccaagcacagaagccagccgca

SEQ ID NO: 3428918 - DNA, 25 bp, Homo sapien
ttggaagtcacctcagagtccaggg

SEQ ID NO: 3428919 - DNA, 25 bp, Homo sapien
cttctggaggatgggcgcgtagtcc

SEQ ID NO: 3428920 - DNA, 25 bp, Homo sapien
gcttggaagtcacctcagagtccag

SEQ ID NO: 3428921 - DNA, 25 bp, Homo sapien
tcagcttggaagtcacctcagagtc

SEQ ID NO: 3428922 - DNA, 25 bp, Homo sapien
cctggatccagaagcgggagcccct

SEQ ID NO: 3428923 - DNA, 25 bp, Homo sapien
tcctggatccagaagcgggagcccc

SEQ ID NO: 3428924 - DNA, 25 bp, Homo sapien
accaaaggggtcgcggtagctctcg

SEQ ID NO: 3428925 - DNA, 25 bp, Homo sapien
gggtcgcggtagctctcgatgaacc

SEQ ID NO: 3428926 - DNA, 25 bp, Homo sapien
gtagctctcgatgaacccgatgtaa

SEQ ID NO: 3428927 - DNA, 25 bp, Homo sapien
gcggtagctctcgatgaacccgatg

SEQ ID NO: 3428928 - DNA, 25 bp, Homo sapien
gggcctgggtcatccctgagcccca

SEQ ID NO: 3428929 - DNA, 25 bp, Homo sapien
ctgggcctgggtcatccctgagccc

SEQ ID NO: 3428930 - DNA, 25 bp, Homo sapien
tgggcctgggtcatccctgagcccc

SEQ ID NO: 3428931 - DNA, 25 bp, Homo sapien
tggacaggaaagatgcagctgcaca

SEQ ID NO: 3428932 - DNA, 25 bp, Homo sapien
gcctgggccctactgggtcaggacc

SEQ ID NO: 3428933 - DNA, 25 bp, Homo sapien
tcaggacctggacaggaaagatgca

SEQ ID NO: 3428934 - DNA, 25 bp, Homo sapien
gccctactgggtcaggacctggaca

SEQ ID NO: 3428935 - DNA, 25 bp, Homo sapien
ggatgccggagccagcgaaggtgag

SEQ ID NO: 3428936 - DNA, 25 bp, Homo sapien
ccgctgcgtggcgtaggccacagcc

SEQ ID NO: 3428937 - DNA, 25 bp, Homo sapien
ctcccgctgcgtggcgtaggccaca

SEQ ID NO: 3428938 - DNA, 25 bp, Homo sapien
ccttccgtctgcctcagatcatcgt

SEQ ID NO: 3428939 - DNA, 25 bp, Homo sapien
gcacattccccagcgacacgttctt

SEQ ID NO: 3428940 - DNA, 25 bp, Homo sapien
tgcacatcgaaggagggccccttcc

SEQ ID NO: 3428941 - DNA, 25 bp, Homo sapien
tgtacgaagagcttgccactgccat

SEQ ID NO: 3428942 - DNA, 25 bp, Homo sapien
ggccccttccagaggatgtacaggt

SEQ ID NO: 3428943 - DNA, 25 bp, Homo sapien
gcaggcccacctgcacatcgaagga

SEQ ID NO: 3428944 - DNA, 25 bp, Homo sapien
tcctggtcaaagttgaatgctcctt

SEQ ID NO: 3428945 - DNA, 25 bp, Homo sapien
ctgtcgggcttaaggtggccactgc

SEQ ID NO: 3428946 - DNA, 25 bp, Homo sapien
aaggagctccactgtcgggcttaag

SEQ ID NO: 3428947 - DNA, 25 bp, Homo sapien
ctggaaaaggagctccactgtcggg

SEQ ID NO: 3428948 - DNA, 25 bp, Homo sapien
tccactgtcgggcttaaggtggcca

SEQ ID NO: 3428949 - DNA, 25 bp, Homo sapien
tccagcacttgcgggtggagacaga

SEQ ID NO: 3428950 - DNA, 25 bp, Homo sapien
ttcacgtagatcacgtcctccgcat

SEQ ID NO: 3428951 - DNA, 25 bp, Homo sapien
acgtagatcacgtcctccgcatcag

SEQ ID NO: 3428952 - DNA, 25 bp, Homo sapien
agttcacgtagatcacgtcctccgc

SEQ ID NO: 3428953 - DNA, 25 bp, Homo sapien
ccagttcacgtagatcacgtcctcc

SEQ ID NO: 3428954 - DNA, 25 bp, Homo sapien
caggatcacaaaccgggcctgcata

SEQ ID NO: 3428955 - DNA, 25 bp, Homo sapien
tctcaggatcacaaaccgggcctgc

SEQ ID NO: 3428956 - DNA, 25 bp, Homo sapien
gatcacaaaccgggcctgcatatgg

SEQ ID NO: 3428957 - DNA, 25 bp, Homo sapien
tcaggatcacaaaccgggcctgcat

SEQ ID NO: 3428958 - DNA, 25 bp, Homo sapien
agcaggcttgcccacagaccggatc

SEQ ID NO: 3428959 - DNA, 25 bp, Homo sapien
ccgcaggaagcgctctagagcaggc

SEQ ID NO: 3428960 - DNA, 25 bp, Homo sapien
ctagagcaggcttgcccacagaccg

SEQ ID NO: 3428961 - DNA, 25 bp, Homo sapien
atcttgctgcggtcgaggcggaccc

SEQ ID NO: 3428962 - DNA, 25 bp, Homo sapien
atcagtgactgttgcatacccctcg

SEQ ID NO: 3428963 - DNA, 25 bp, Homo sapien
tgactgttgcatacccctcgtacag

SEQ ID NO: 3428964 - DNA, 25 bp, Homo sapien
gcgcatcagtgactgttgcataccc

SEQ ID NO: 3428965 - DNA, 25 bp, Homo sapien
tgttgcatacccctcgtacagggcc

SEQ ID NO: 3428966 - DNA, 25 bp, Homo sapien
taattctttggtatgaacgcctggc

SEQ ID NO: 3428967 - DNA, 25 bp, Homo sapien
cgaaagatacaagcaccgtgtggcc

SEQ ID NO: 3428968 - DNA, 25 bp, Homo sapien
tttcactaggcttgctggatcccag

SEQ ID NO: 3428969 - DNA, 25 bp, Homo sapien
cagataccaagataagggcctgagg

SEQ ID NO: 3428970 - DNA, 25 bp, Homo sapien
tggctcctccactaaaaagccataa

SEQ ID NO: 3428971 - DNA, 25 bp, Homo sapien
ataacaacaatacctaccttattgg

SEQ ID NO: 3428972 - DNA, 25 bp, Homo sapien
tcctccactaaaaagccataagcct

SEQ ID NO: 3428973 - DNA, 25 bp, Homo sapien
cctgactcaaccactcttaatttga

SEQ ID NO: 3428974 - DNA, 25 bp, Homo sapien
gaaacgctcagagaaggatcggatg

SEQ ID NO: 3428975 - DNA, 25 bp, Homo sapien
atcggatgaggccagcagctgacgc

SEQ ID NO: 3428976 - DNA, 25 bp, Homo sapien
ctgtggccagctgtgtgaggatctc

SEQ ID NO: 3428977 - DNA, 25 bp, Homo sapien
ccagaatcgggcatcggctgtggcc

SEQ ID NO: 3428978 - DNA, 25 bp, Homo sapien
tcaagcttggccagatggggcctca

SEQ ID NO: 3428979 - DNA, 25 bp, Homo sapien
cagatggggcctcactggggccctt

SEQ ID NO: 3428980 - DNA, 25 bp, Homo sapien
tctgatggaattgggggcaaggcca

SEQ ID NO: 3428981 - DNA, 25 bp, Homo sapien
gaattgggggcaaggccacacatct

SEQ ID NO: 3428982 - DNA, 25 bp, Homo sapien
tgcagccttggtctgatggaattgg

SEQ ID NO: 3428983 - DNA, 25 bp, Homo sapien
cgaatggagggccacttgcagcctt

SEQ ID NO: 3428984 - DNA, 25 bp, Homo sapien
gaggtagtaccaaggtccaagctcc

SEQ ID NO: 3428985 - DNA, 25 bp, Homo sapien
cagctgaggtagtaccaaggtccaa

SEQ ID NO: 3428986 - DNA, 25 bp, Homo sapien
gtagtaccaaggtccaagctcctgc

SEQ ID NO: 3428987 - DNA, 25 bp, Homo sapien
ccctcagctgaggtagtaccaaggt

SEQ ID NO: 3428988 - DNA, 25 bp, Homo sapien
tcttgctcactccacgtatggcagt

SEQ ID NO: 3428989 - DNA, 25 bp, Homo sapien
gaagcaattggcaggctggaaagtg

SEQ ID NO: 3428990 - DNA, 25 bp, Homo sapien
cactccacgtatggcagtgcagatg

SEQ ID NO: 3428991 - DNA, 25 bp, Homo sapien
atcacagaggggaagcaattggcag

SEQ ID NO: 3428992 - DNA, 25 bp, Homo sapien
catctggtagacaggatggtaagcc

SEQ ID NO: 3428993 - DNA, 25 bp, Homo sapien
tctggtagacaggatggtaagccct

SEQ ID NO: 3428994 - DNA, 25 bp, Homo sapien
tgcgggatctagaccagtgacttct

SEQ ID NO: 3428995 - DNA, 25 bp, Homo sapien
gctgtcacgtgccacctgcgggatc

SEQ ID NO: 3428996 - DNA, 25 bp, Homo sapien
tcgcaggcgtcgtcctggcaaccgg

SEQ ID NO: 3428997 - DNA, 25 bp, Homo sapien
cttcgcaggcgtcgtcctggcaacc

SEQ ID NO: 3428998 - DNA, 25 bp, Homo sapien
caggcgtcgtcctggcaaccggccc

SEQ ID NO: 3428999 - DNA, 25 bp, Homo sapien
gcgtcgtcctggcaaccggccccgc

SEQ ID NO: 3429000 - DNA, 25 bp, Homo sapien
aatccgatgaggacgcagcggccat

SEQ ID NO: 3429001 - DNA, 25 bp, Homo sapien
cgtcggaatccgatgaggacgcagc

SEQ ID NO: 3429002 - DNA, 25 bp, Homo sapien
ctccgcaggcgtcggaatccgatga

SEQ ID NO: 3429003 - DNA, 25 bp, Homo sapien
tcagctccgcaggcgtcggaatccg

SEQ ID NO: 3429004 - DNA, 25 bp, Homo sapien
ggaagctggtacaggtcactctgaa

SEQ ID NO: 3429005 - DNA, 25 bp, Homo sapien
tcttaagagtccttccagactgccc

SEQ ID NO: 3429006 - DNA, 25 bp, Homo sapien
cacatatgcacatcttaggcctcgg

SEQ ID NO: 3429007 - DNA, 25 bp, Homo sapien
cataaggtacagaacgtctgggtac

SEQ ID NO: 3429008 - DNA, 25 bp, Homo sapien
gatattggccattgggtcgtagtgc

SEQ ID NO: 3429009 - DNA, 25 bp, Homo sapien
ggtcgtagtgcgcatccaaccactt

SEQ ID NO: 3429010 - DNA, 25 bp, Homo sapien
cagaaaaggtgtggatattggccat

SEQ ID NO: 3429011 - DNA, 25 bp, Homo sapien
caaccacttcgaattggcctcattg

SEQ ID NO: 3429012 - DNA, 25 bp, Homo sapien
ccccatccccatgtaaatctgccag

SEQ ID NO: 3429013 - DNA, 25 bp, Homo sapien
tccccatccccatgtaaatctgcca

SEQ ID NO: 3429014 - DNA, 25 bp, Homo sapien
ccatccccatgtaaatctgccagcg

SEQ ID NO: 3429015 - DNA, 25 bp, Homo sapien
cccatccccatgtaaatctgccagc

SEQ ID NO: 3429016 - DNA, 25 bp, Homo sapien
gggctttcggtcatcaccagtggtc

SEQ ID NO: 3429017 - DNA, 25 bp, Homo sapien
ctggcagagcaggtagcgggctttc

SEQ ID NO: 3429018 - DNA, 25 bp, Homo sapien
gcaggtagcgggctttcggtcatca

SEQ ID NO: 3429019 - DNA, 25 bp, Homo sapien
tcaccagtggtcctttgagcacctt

SEQ ID NO: 3429020 - DNA, 25 bp, Homo sapien
gcaggctgaacttgaagtagggtct

SEQ ID NO: 3429021 - DNA, 25 bp, Homo sapien
tggttccaaaggtcttgttccagag

SEQ ID NO: 3429022 - DNA, 25 bp, Homo sapien
ggggctcatgttgctccatgaggaa

SEQ ID NO: 3429023 - DNA, 25 bp, Homo sapien
gggtctgagattcttatacacatag

SEQ ID NO: 3429024 - DNA, 25 bp, Homo sapien
gcatctccttcagggttaaggggtc

SEQ ID NO: 3429025 - DNA, 25 bp, Homo sapien
agcatctccttcagggttaaggggt

SEQ ID NO: 3429026 - DNA, 25 bp, Homo sapien
catctccttcagggttaaggggtcg

SEQ ID NO: 3429027 - DNA, 25 bp, Homo sapien
tgaggggggtatgaaggggaaggca

SEQ ID NO: 3429028 - DNA, 25 bp, Homo sapien
agccgaatggaagaatggggccctg

SEQ ID NO: 3429029 - DNA, 25 bp, Homo sapien
ccgaatggaagaatggggccctggg

SEQ ID NO: 3429030 - DNA, 25 bp, Homo sapien
cagccgaatggaagaatggggccct

SEQ ID NO: 3429031 - DNA, 25 bp, Homo sapien
ggacaaaggctcctctgccgtctcc

SEQ ID NO: 3429032 - DNA, 25 bp, Homo sapien
atggacaaaggctcctctgccgtct

SEQ ID NO: 3429033 - DNA, 25 bp, Homo sapien
ctgagtgactggatggacaaaggct

SEQ ID NO: 3429034 - DNA, 25 bp, Homo sapien
gagtgactggatggacaaaggctcc

SEQ ID NO: 3429035 - DNA, 25 bp, Homo sapien
gacacacagagaactggcatctgca

SEQ ID NO: 3429036 - DNA, 25 bp, Homo sapien
tcctccatcattctggcacattctg

SEQ ID NO: 3429037 - DNA, 25 bp, Homo sapien
tccctggagcctcccaaaccctggc

SEQ ID NO: 3429038 - DNA, 25 bp, Homo sapien
tctggcacattctggcggctgcttc

SEQ ID NO: 3429039 - DNA, 25 bp, Homo sapien
ttgtgttggtttacaaatgcctcca

SEQ ID NO: 3429040 - DNA, 25 bp, Homo sapien
ctccatttcacttagctccagctgc

SEQ ID NO: 3429041 - DNA, 25 bp, Homo sapien
tgccgcttgatggagttggacttgt

SEQ ID NO: 3429042 - DNA, 25 bp, Homo sapien
gtgttggtttacaaatgcctccatt

SEQ ID NO: 3429043 - DNA, 25 bp, Homo sapien
gggaccaaggcaggtggactgcatg

SEQ ID NO: 3429044 - DNA, 25 bp, Homo sapien
ggaccaaggcaggtggactgcatga

SEQ ID NO: 3429045 - DNA, 25 bp, Homo sapien
tggggaccaaggcaggtggactgca

SEQ ID NO: 3429046 - DNA, 25 bp, Homo sapien
accaaggcaggtggactgcatgagc

SEQ ID NO: 3429047 - DNA, 25 bp, Homo sapien
tatgagccatccatatgatcaaaaa

SEQ ID NO: 3429048 - DNA, 25 bp, Homo sapien
aaggtgtttattgcaacaaatctaa

SEQ ID NO: 3429049 - DNA, 25 bp, Homo sapien
aggattgtctaagtcaattatgagc

SEQ ID NO: 3429050 - DNA, 25 bp, Homo sapien
tgtctaagtcaattatgagccatcc

SEQ ID NO: 3429051 - DNA, 25 bp, Homo sapien
agcatcctcgtcagccaggttcttc

SEQ ID NO: 3429052 - DNA, 25 bp, Homo sapien
gcatcctcgtcagccaggttcttct

SEQ ID NO: 3429053 - DNA, 25 bp, Homo sapien
tcctcgtcagccaggttcttcttca

SEQ ID NO: 3429054 - DNA, 25 bp, Homo sapien
tcgtcagccaggttcttcttcaagg

SEQ ID NO: 3429055 - DNA, 25 bp, Homo sapien
cagaactaactgtggagcatgggga

SEQ ID NO: 3429056 - DNA, 25 bp, Homo sapien
tatatattacccagaactaactgtg

SEQ ID NO: 3429057 - DNA, 25 bp, Homo sapien
ttctacaaggaacatatatattacc

SEQ ID NO: 3429058 - DNA, 25 bp, Homo sapien
ggaacatatatattacccagaacta

SEQ ID NO: 3429059 - DNA, 25 bp, Homo sapien
tggccagaaacctctaggaagacgg

SEQ ID NO: 3429060 - DNA, 25 bp, Homo sapien
aagccggaactcaacatcaaactgg

SEQ ID NO: 3429061 - DNA, 25 bp, Homo sapien
tttccattgcggcaggccgcggcaa

SEQ ID NO: 3429062 - DNA, 25 bp, Homo sapien
cttctcagaatatagatgtttccat

SEQ ID NO: 3429063 - DNA, 25 bp, Homo sapien
ctgaagccaccagttttctgagatg

SEQ ID NO: 3429064 - DNA, 25 bp, Homo sapien
gccccggagaccacggatgtggcta

SEQ ID NO: 3429065 - DNA, 25 bp, Homo sapien
tatctcacaagcctccaggtatcct

SEQ ID NO: 3429066 - DNA, 25 bp, Homo sapien
tgatcactcctgtactatagccacc

SEQ ID NO: 3429067 - DNA, 25 bp, Homo sapien
cagtttttagtttactggcctctca

SEQ ID NO: 3429068 - DNA, 25 bp, Homo sapien
gccaggacaagtggacttaggcact

SEQ ID NO: 3429069 - DNA, 25 bp, Homo sapien
agttcctctctattcgaggagcaca

SEQ ID NO: 3429070 - DNA, 25 bp, Homo sapien
gccaatgtctttcccactttgagtt

SEQ ID NO: 3429071 - DNA, 25 bp, Homo sapien
gatgaccctgggattatttccactt

SEQ ID NO: 3429072 - DNA, 25 bp, Homo sapien
tgtggccttggaaaacatcaagtgt

SEQ ID NO: 3429073 - DNA, 25 bp, Homo sapien
accttcactatggtggcttgtatga

SEQ ID NO: 3429074 - DNA, 25 bp, Homo sapien
cactatggtgtcttgtcttccgccc

SEQ ID NO: 3429075 - DNA, 25 bp, Homo sapien
cctcctctgtctaaacctcatggac

SEQ ID NO: 3429076 - DNA, 25 bp, Homo sapien
ctctgtctaaacctcatggactcac

SEQ ID NO: 3429077 - DNA, 25 bp, Homo sapien
tgtctggccccagagaaatcctctc

SEQ ID NO: 3429078 - DNA, 25 bp, Homo sapien
tctccacttctatggctgaccctcc

SEQ ID NO: 3429079 - DNA, 25 bp, Homo sapien
gctcagctcgatgcagtacttgggg

SEQ ID NO: 3429080 - DNA, 25 bp, Homo sapien
tgtgggtgaagccatgcaggctgtc

SEQ ID NO: 3429081 - DNA, 25 bp, Homo sapien
cactaggaccttgtgtacccggata

SEQ ID NO: 3429082 - DNA, 25 bp, Homo sapien
ggctgtcttgggtgctgcccaccac

SEQ ID NO: 3429083 - DNA, 25 bp, Homo sapien
actctcttgccaagtgggggctagg

SEQ ID NO: 3429084 - DNA, 25 bp, Homo sapien
ctcttgccaagtgggggctagggac

SEQ ID NO: 3429085 - DNA, 25 bp, Homo sapien
gaggactctcttgccaagtgggggc

SEQ ID NO: 3429086 - DNA, 25 bp, Homo sapien
gggctagggacataggcgtggaggg

SEQ ID NO: 3429087 - DNA, 25 bp, Homo sapien
gctgctccaggaggttcatggtcag

SEQ ID NO: 3429088 - DNA, 25 bp, Homo sapien
tgtggatgacattgagcagggcctt

SEQ ID NO: 3429089 - DNA, 25 bp, Homo sapien
cagggccttgtcacgataaatgcgg

SEQ ID NO: 3429090 - DNA, 25 bp, Homo sapien
tcatggtcaggatggctgcgggcat

SEQ ID NO: 3429091 - DNA, 25 bp, Homo sapien
tctgtgaagtgtcccatggagtcca

SEQ ID NO: 3429092 - DNA, 25 bp, Homo sapien
tcagtcggcccttttaaatttgcta

SEQ ID NO: 3429093 - DNA, 25 bp, Homo sapien
ggctggctgttaccttagactgtaa

SEQ ID NO: 3429094 - DNA, 25 bp, Homo sapien
gcactttgctctgcttcagtcggcc

SEQ ID NO: 3429095 - DNA, 25 bp, Homo sapien
tgagggtgttgtcctcccgcccgta

SEQ ID NO: 3429096 - DNA, 25 bp, Homo sapien
catgatgagggtgttgtcctcccgc

SEQ ID NO: 3429097 - DNA, 25 bp, Homo sapien
cccgtaccggccaaagcaaaggctg

SEQ ID NO: 3429098 - DNA, 25 bp, Homo sapien
taccggccaaagcaaaggctggtca

SEQ ID NO: 3429099 - DNA, 25 bp, Homo sapien
tgatccacgtaaagccgggtctttc

SEQ ID NO: 3429100 - DNA, 25 bp, Homo sapien
ggcacattgagtttcatggcctggg

SEQ ID NO: 3429101 - DNA, 25 bp, Homo sapien
gctctcgcagtgtctgatccacgta

SEQ ID NO: 3429102 - DNA, 25 bp, Homo sapien
caaacactgctgtacgcttcaggat

SEQ ID NO: 3429103 - DNA, 25 bp, Homo sapien
aattctaagggctcttgctgtcacc

SEQ ID NO: 3429104 - DNA, 25 bp, Homo sapien
gagtgacctacctagttggccgaga

SEQ ID NO: 3429105 - DNA, 25 bp, Homo sapien
tttgcaggcaacgtgtacctcctag

SEQ ID NO: 3429106 - DNA, 25 bp, Homo sapien
tcctcatgagaattcctgcgtttgg

SEQ ID NO: 3429107 - DNA, 25 bp, Homo sapien
cacggcgtgcagcttgagtggctct

SEQ ID NO: 3429108 - DNA, 25 bp, Homo sapien
ctcaggctggactcgagggcctgca

SEQ ID NO: 3429109 - DNA, 25 bp, Homo sapien
cacgtaggcgcagcaggtataggtc

SEQ ID NO: 3429110 - DNA, 25 bp, Homo sapien
tataggtctgtctggaaggcccggt

SEQ ID NO: 3429111 - DNA, 25 bp, Homo sapien
agagcgcctcgttgtacaggaagca

SEQ ID NO: 3429112 - DNA, 25 bp, Homo sapien
ggtgaagtgtgagcttaaaggtggg

SEQ ID NO: 3429113 - DNA, 25 bp, Homo sapien
aggacaggacgggttgttgaggtgt

SEQ ID NO: 3429114 - DNA, 25 bp, Homo sapien
ccaggacaggacgggttgttgaggt

SEQ ID NO: 3429115 - DNA, 25 bp, Homo sapien
tgtgggcatctcatcaggcccctgc

SEQ ID NO: 3429116 - DNA, 25 bp, Homo sapien
tccatatctaagtgaggagcatcca

SEQ ID NO: 3429117 - DNA, 25 bp, Homo sapien
ggctctgtgggcatctcatcaggcc

SEQ ID NO: 3429118 - DNA, 25 bp, Homo sapien
gcctttcccactccatatctaagtg

SEQ ID NO: 3429119 - DNA, 25 bp, Homo sapien
tgcccttgttactgagactctccac

SEQ ID NO: 3429120 - DNA, 25 bp, Homo sapien
ctgagactctccacaaaggtctcca

SEQ ID NO: 3429121 - DNA, 25 bp, Homo sapien
tgagactctccacaaaggtctccag

SEQ ID NO: 3429122 - DNA, 25 bp, Homo sapien
gagatgcccttgttactgagactct

SEQ ID NO: 3429123 - DNA, 25 bp, Homo sapien
gccacagggctccactgtgcagata

SEQ ID NO: 3429124 - DNA, 25 bp, Homo sapien
accttccacgtggtacaagtgcggg

SEQ ID NO: 3429125 - DNA, 25 bp, Homo sapien
tctgcgctggccctaatgacaggcc

SEQ ID NO: 3429126 - DNA, 25 bp, Homo sapien
cctaaggtctttgttggcactcacc

SEQ ID NO: 3429127 - DNA, 25 bp, Homo sapien
ggtgcactttggccttctcgaagca

SEQ ID NO: 3429128 - DNA, 25 bp, Homo sapien
gctcccaggcatgttgacgtgggca

SEQ ID NO: 3429129 - DNA, 25 bp, Homo sapien
gcaggggtgcactttggccttctcg

SEQ ID NO: 3429130 - DNA, 25 bp, Homo sapien
ccctcgctcccaggcatgttgacgt

SEQ ID NO: 3429131 - DNA, 25 bp, Homo sapien
ggctgattgtgcaggggctttcaca

SEQ ID NO: 3429132 - DNA, 25 bp, Homo sapien
actgctgcatgaggagtgggcctgg

SEQ ID NO: 3429133 - DNA, 25 bp, Homo sapien
tgaggaagcgggtgcttaagagagg

SEQ ID NO: 3429134 - DNA, 25 bp, Homo sapien
ctgctactataggcccaacagtggg

SEQ ID NO: 3429135 - DNA, 25 bp, Homo sapien
agtgggaccatgctgggttggtgct

SEQ ID NO: 3429136 - DNA, 25 bp, Homo sapien
ggagggcgtagtaggacttcagtgg

SEQ ID NO: 3429137 - DNA, 25 bp, Homo sapien
tgagccgccctaggtactcactaac

SEQ ID NO: 3429138 - DNA, 25 bp, Homo sapien
agttgagccgccctaggtactcact

SEQ ID NO: 3429139 - DNA, 25 bp, Homo sapien
gaacacttactgtcctcatggcacg

SEQ ID NO: 3429140 - DNA, 25 bp, Homo sapien
aatagctatgacaagaaaggccccg

SEQ ID NO: 3429141 - DNA, 25 bp, Homo sapien
caacctttgtgtggcatcgtaggcc

SEQ ID NO: 3429142 - DNA, 25 bp, Homo sapien
gagagcacgtattttgcccgcaagc

SEQ ID NO: 3429143 - DNA, 25 bp, Homo sapien
tggtctccagcttatgggttcaagc

SEQ ID NO: 3429144 - DNA, 25 bp, Homo sapien
ctatacccggcctctagtgactttt

SEQ ID NO: 3429145 - DNA, 25 bp, Homo sapien
aaccactatacccggcctctagtga

SEQ ID NO: 3429146 - DNA, 25 bp, Homo sapien
gctggtctccagcttatgggttcaa

SEQ ID NO: 3429147 - DNA, 25 bp, Homo sapien
aaccccttgagatgtagaatggaac

SEQ ID NO: 3429148 - DNA, 25 bp, Homo sapien
gatcagtctggataaaatcagcacc

SEQ ID NO: 3429149 - DNA, 25 bp, Homo sapien
ggaaacagccccactgcatttgaga

SEQ ID NO: 3429150 - DNA, 25 bp, Homo sapien
gctgcctagtgatccattgaaaata

SEQ ID NO: 3429151 - DNA, 25 bp, Homo sapien
agcccacaatatcttattttcatgt

SEQ ID NO: 3429152 - DNA, 25 bp, Homo sapien
gcccagcccacaatatcttattttc

SEQ ID NO: 3429153 - DNA, 25 bp, Homo sapien
ctgcgcccagcccacaatatcttat

SEQ ID NO: 3429154 - DNA, 25 bp, Homo sapien
tgcgcccagcccacaatatcttatt

SEQ ID NO: 3429155 - DNA, 25 bp, Homo sapien
aagatggaaagtggatggagaatta

SEQ ID NO: 3429156 - DNA, 25 bp, Homo sapien
tggaaagtggatggagaattaagag

SEQ ID NO: 3429157 - DNA, 25 bp, Homo sapien
gcaacagcagtttcatggaacctct

SEQ ID NO: 3429158 - DNA, 25 bp, Homo sapien
cactcctacgtgtccagggcttggg

SEQ ID NO: 3429159 - DNA, 25 bp, Homo sapien
catgtggtaagatcatggtgcggca

SEQ ID NO: 3429160 - DNA, 25 bp, Homo sapien
gaagacagtagaacacagagcctga

SEQ ID NO: 3429161 - DNA, 25 bp, Homo sapien
tatcgacacagggtttgctgagcgg

SEQ ID NO: 3429162 - DNA, 25 bp, Homo sapien
acgggctggccagcgagtatcgaca

SEQ ID NO: 3429163 - DNA, 25 bp, Homo sapien
gcgtctgcccagtttaccagtgcgt

SEQ ID NO: 3429164 - DNA, 25 bp, Homo sapien
gaatgaagccgtatcccaagtaggg

SEQ ID NO: 3429165 - DNA, 25 bp, Homo sapien
catcaccgatggctgggaccttggt

SEQ ID NO: 3429166 - DNA, 25 bp, Homo sapien
cgcagaactgtttgtccagcctggg

SEQ ID NO: 3429167 - DNA, 25 bp, Homo sapien
gtgaagcgttctccgcctggcatca

SEQ ID NO: 3429168 - DNA, 25 bp, Homo sapien
tttggcaggtctagctgcgcccaca

SEQ ID NO: 3429169 - DNA, 25 bp, Homo sapien
gctgcggcagggctattaatatcgg

SEQ ID NO: 3429170 - DNA, 25 bp, Homo sapien
gagaatgtgctgagccgggaaaccc

SEQ ID NO: 3429171 - DNA, 25 bp, Homo sapien
gaaatccacgggacctctctgagtc

SEQ ID NO: 3429172 - DNA, 25 bp, Homo sapien
gataataatagtggccgcgggccgc

SEQ ID NO: 3429173 - DNA, 25 bp, Homo sapien
gaccctcgggctgcataaccatcat

SEQ ID NO: 3429174 - DNA, 25 bp, Homo sapien
cccccagaccctcgggctgcataac

SEQ ID NO: 3429175 - DNA, 25 bp, Homo sapien
cctcctgttccatgtactcgccgcc

SEQ ID NO: 3429176 - DNA, 25 bp, Homo sapien
tcctgttccatgtactcgccgcccc

SEQ ID NO: 3429177 - DNA, 25 bp, Homo sapien
tttgaggccattgcggaaatcttcc

SEQ ID NO: 3429178 - DNA, 25 bp, Homo sapien
ggccattgcggaaatcttcctcgat

SEQ ID NO: 3429179 - DNA, 25 bp, Homo sapien
tgagtttgaggccattgcggaaatc

SEQ ID NO: 3429180 - DNA, 25 bp, Homo sapien
ggtgcctgccttgcgcaggtgtgag

SEQ ID NO: 3429181 - DNA, 25 bp, Homo sapien
gaagcgcatcttgcctttatctggc

SEQ ID NO: 3429182 - DNA, 25 bp, Homo sapien
tttatctggcctaggcagcctctca

SEQ ID NO: 3429183 - DNA, 25 bp, Homo sapien
taacgttggcgattttgtggaagcg

SEQ ID NO: 3429184 - DNA, 25 bp, Homo sapien
cagggccttgttaacgttggcgatt

SEQ ID NO: 3429185 - DNA, 25 bp, Homo sapien
ggtcatcttcaggttcccgtcaaca

SEQ ID NO: 3429186 - DNA, 25 bp, Homo sapien
acagagatgtcctggatggcgaagc

SEQ ID NO: 3429187 - DNA, 25 bp, Homo sapien
cagggtcatcttcaggttcccgtca

SEQ ID NO: 3429188 - DNA, 25 bp, Homo sapien
tcatcttcaggttcccgtcaacaat

SEQ ID NO: 3429189 - DNA, 25 bp, Homo sapien
aagttctgcacgttgacgttgcggt

SEQ ID NO: 3429190 - DNA, 25 bp, Homo sapien
ggcaccacagaagcaagccttcctt

SEQ ID NO: 3429191 - DNA, 25 bp, Homo sapien
cgttgcggtacggtgctgtcttcct

SEQ ID NO: 3429192 - DNA, 25 bp, Homo sapien
cacgttgacgttgcggtacggtgct

SEQ ID NO: 3429193 - DNA, 25 bp, Homo sapien
gggcacagagggccaggccatcctt

SEQ ID NO: 3429194 - DNA, 25 bp, Homo sapien
tcggtggatgagggcacagagggcc

SEQ ID NO: 3429195 - DNA, 25 bp, Homo sapien
gatgagggcacagagggccaggcca

SEQ ID NO: 3429196 - DNA, 25 bp, Homo sapien
cacagagggccaggccatccttcca

SEQ ID NO: 3429197 - DNA, 25 bp, Homo sapien
gcgtagtcgatgaggtcagggcggt

SEQ ID NO: 3429198 - DNA, 25 bp, Homo sapien
tggcgtagtcgatgaggtcagggcg

SEQ ID NO: 3429199 - DNA, 25 bp, Homo sapien
ctttcgcagtttggcgtagtcgatg

SEQ ID NO: 3429200 - DNA, 25 bp, Homo sapien
cagtttggcgtagtcgatgaggtca

SEQ ID NO: 3429201 - DNA, 25 bp, Homo sapien
tgttcaggtttccgatggggtcatc

SEQ ID NO: 3429202 - DNA, 25 bp, Homo sapien
aaaggcagtgttcaggtttccgatg

SEQ ID NO: 3429203 - DNA, 25 bp, Homo sapien
aggcagtgttcaggtttccgatggg

SEQ ID NO: 3429204 - DNA, 25 bp, Homo sapien
tcaaaggcagtgttcaggtttccga

SEQ ID NO: 3429205 - DNA, 25 bp, Homo sapien
ccccggcaaaggcatggtagaagca

SEQ ID NO: 3429206 - DNA, 25 bp, Homo sapien
acataggtcatgatggccttctcat

SEQ ID NO: 3429207 - DNA, 25 bp, Homo sapien
ggtagaagcaggacacataggtcat

SEQ ID NO: 3429208 - DNA, 25 bp, Homo sapien
tccggctttggggtgttcacaatgt

SEQ ID NO: 3429209 - DNA, 25 bp, Homo sapien
tgccagcaccttgcagatcctgttg

SEQ ID NO: 3429210 - DNA, 25 bp, Homo sapien
gaaagtcctctagtttgcgctgcat

SEQ ID NO: 3429211 - DNA, 25 bp, Homo sapien
ccatgggacagtgcggcggatccac

SEQ ID NO: 3429212 - DNA, 25 bp, Homo sapien
cacttttcctgaatgcggggcggct

SEQ ID NO: 3429213 - DNA, 25 bp, Homo sapien
tctccagccatgggacagtgcggcg

SEQ ID NO: 3429214 - DNA, 25 bp, Homo sapien
tccaggcttcgtgcagggaggcctt

SEQ ID NO: 3429215 - DNA, 25 bp, Homo sapien
cccgggtccaggcttcgtgcaggga

SEQ ID NO: 3429216 - DNA, 25 bp, Homo sapien
ggtccaggcttcgtgcagggaggcc

SEQ ID NO: 3429217 - DNA, 25 bp, Homo sapien
tggagtcgctgcaggcgccggatct

SEQ ID NO: 3429218 - DNA, 25 bp, Homo sapien
agcgcggcaatgtgctccacgcggt

SEQ ID NO: 3429219 - DNA, 25 bp, Homo sapien
gccgaatcgtagtcgcgctggctca

SEQ ID NO: 3429220 - DNA, 25 bp, Homo sapien
agctcctgggccagcgcggcaatgt

SEQ ID NO: 3429221 - DNA, 25 bp, Homo sapien
cacctcctgtagcaaagccgaatcg

SEQ ID NO: 3429222 - DNA, 25 bp, Homo sapien
ctgaggctgcctcgtggtagtccag

SEQ ID NO: 3429223 - DNA, 25 bp, Homo sapien
agcgcatcccgcctcttctgggtca

SEQ ID NO: 3429224 - DNA, 25 bp, Homo sapien
tgtcccactgatcgcagatggcctg

SEQ ID NO: 3429225 - DNA, 25 bp, Homo sapien
tggcagcggctattcactgaggctg

SEQ ID NO: 3429226 - DNA, 25 bp, Homo sapien
gggcaaactccagttgcagccggtc

SEQ ID NO: 3429227 - DNA, 25 bp, Homo sapien
agttgcagccggtcaatggtctcca

SEQ ID NO: 3429228 - DNA, 25 bp, Homo sapien
cagttgttgaagggcgcggcccgcc

SEQ ID NO: 3429229 - DNA, 25 bp, Homo sapien
tccacagagtgtaccagccacacgt

SEQ ID NO: 3429230 - DNA, 25 bp, Homo sapien
gccttgaactgatcgtgcgctgtca

SEQ ID NO: 3429231 - DNA, 25 bp, Homo sapien
gttgccttgaactgatcgtgcgctg

SEQ ID NO: 3429232 - DNA, 25 bp, Homo sapien
ccttgaactgatcgtgcgctgtcag

SEQ ID NO: 3429233 - DNA, 25 bp, Homo sapien
gaactgatcgtgcgctgtcagcagg

SEQ ID NO: 3429234 - DNA, 25 bp, Homo sapien
tggatgcccatgatggcacctcgct

SEQ ID NO: 3429235 - DNA, 25 bp, Homo sapien
ctggatgcccatgatggcacctcgc

SEQ ID NO: 3429236 - DNA, 25 bp, Homo sapien
cctgcgggctgagggtgatgtaggg

SEQ ID NO: 3429237 - DNA, 25 bp, Homo sapien
catatcccacttggtgttgatgtcc

SEQ ID NO: 3429238 - DNA, 25 bp, Homo sapien
tagggattggtggagcagggccgca

SEQ ID NO: 3429239 - DNA, 25 bp, Homo sapien
ggccgcagcccatacgtctggcaga

SEQ ID NO: 3429240 - DNA, 25 bp, Homo sapien
gccggagcctctcgtttacctgctg

SEQ ID NO: 3429241 - DNA, 25 bp, Homo sapien
ggtccaatggcattggcctgggccg

SEQ ID NO: 3429242 - DNA, 25 bp, Homo sapien
gggccgcaaactgtcgccggagcct

SEQ ID NO: 3429243 - DNA, 25 bp, Homo sapien
tccaccttcgcctggatccagggtc

SEQ ID NO: 3429244 - DNA, 25 bp, Homo sapien
ccctccagccggtcaatgttagtct

SEQ ID NO: 3429245 - DNA, 25 bp, Homo sapien
cggtgtgcttattgtcgaacaccag

SEQ ID NO: 3429246 - DNA, 25 bp, Homo sapien
agtcttgtagttgataatgttctgc

SEQ ID NO: 3429247 - DNA, 25 bp, Homo sapien
tgctgtagacggtgtgcttattgtc

SEQ ID NO: 3429248 - DNA, 25 bp, Homo sapien
tggttgaaggatgctcggaactcgt

SEQ ID NO: 3429249 - DNA, 25 bp, Homo sapien
gatgctcggaactcgttgagctgct

SEQ ID NO: 3429250 - DNA, 25 bp, Homo sapien
ttggcgtctcgggtcagtacctggt

SEQ ID NO: 3429251 - DNA, 25 bp, Homo sapien
gaaggatgctcggaactcgttgagc

SEQ ID NO: 3429252 - DNA, 25 bp, Homo sapien
tggagatgaggcaagctcggaagtc

SEQ ID NO: 3429253 - DNA, 25 bp, Homo sapien
atggagatgaggcaagctcggaagt

SEQ ID NO: 3429254 - DNA, 25 bp, Homo sapien
agatgaggcaagctcggaagtcatc

SEQ ID NO: 3429255 - DNA, 25 bp, Homo sapien
gagatgaggcaagctcggaagtcat

SEQ ID NO: 3429256 - DNA, 25 bp, Homo sapien
cctgccaagatcttgaaggaagcta

SEQ ID NO: 3429257 - DNA, 25 bp, Homo sapien
caccatggtcatgatgcgagcaaac

SEQ ID NO: 3429258 - DNA, 25 bp, Homo sapien
tctcggctgtctctcgggtcatgaa

SEQ ID NO: 3429259 - DNA, 25 bp, Homo sapien
tgctcagtcgtgtcagtctcggctg

SEQ ID NO: 3429260 - DNA, 25 bp, Homo sapien
ttggcagggagctcgcgccgcagct

SEQ ID NO: 3429261 - DNA, 25 bp, Homo sapien
cttgtagggcaccatacggcggatg

SEQ ID NO: 3429262 - DNA, 25 bp, Homo sapien
tctccccatagagggcactggagaa

SEQ ID NO: 3429263 - DNA, 25 bp, Homo sapien
gcagtactcggcctgcttggcaggg

SEQ ID NO: 3429264 - DNA, 25 bp, Homo sapien
ggctggcttttctcttaggcccttg

SEQ ID NO: 3429265 - DNA, 25 bp, Homo sapien
taggcccttgctccgagggacggat

SEQ ID NO: 3429266 - DNA, 25 bp, Homo sapien
tccatcttgcatagagaacctcagt

SEQ ID NO: 3429267 - DNA, 25 bp, Homo sapien
gagggatctttattcagaagcactt

SEQ ID NO: 3429268 - DNA, 25 bp, Homo sapien
ctttctgttcctggacggtggcggc

SEQ ID NO: 3429269 - DNA, 25 bp, Homo sapien
caggagggccggattctgcagtcct

SEQ ID NO: 3429270 - DNA, 25 bp, Homo sapien
ttccctctggcgaagctgacggtgg

SEQ ID NO: 3429271 - DNA, 25 bp, Homo sapien
tgagctccagcggttttaccaccgg

SEQ ID NO: 3429272 - DNA, 25 bp, Homo sapien
cctggttccccgaatccgaagccat

SEQ ID NO: 3429273 - DNA, 25 bp, Homo sapien
tctgacaggtcatctgcaccgcgaa

SEQ ID NO: 3429274 - DNA, 25 bp, Homo sapien
acagctctgacaggtcatctgcacc

SEQ ID NO: 3429275 - DNA, 25 bp, Homo sapien
cagggatttgcgcaccgcgtccaca

SEQ ID NO: 3429276 - DNA, 25 bp, Homo sapien
gctctgacaggtcatctgcaccgcg

SEQ ID NO: 3429277 - DNA, 25 bp, Homo sapien
tgctccgggtccaagagaaaggcca

SEQ ID NO: 3429278 - DNA, 25 bp, Homo sapien
ctctcctcgcaagcaagtagtacag

SEQ ID NO: 3429279 - DNA, 25 bp, Homo sapien
ctgagggctgaaaactgctccgggt

SEQ ID NO: 3429280 - DNA, 25 bp, Homo sapien
cacccaaaacgcgtagtctaagcaa

SEQ ID NO: 3429281 - DNA, 25 bp, Homo sapien
tccttgagttaagactggtagaccc

SEQ ID NO: 3429282 - DNA, 25 bp, Homo sapien
tgaggttcttacacaggctagggag

SEQ ID NO: 3429283 - DNA, 25 bp, Homo sapien
caagaccctggcttttatgtgcaaa

SEQ ID NO: 3429284 - DNA, 25 bp, Homo sapien
gataagatgtcctgatgacaggcct

SEQ ID NO: 3429285 - DNA, 25 bp, Homo sapien
cctgtaggagatagcttaaaaaata

SEQ ID NO: 3429286 - DNA, 25 bp, Homo sapien
tattcttcctgtaggagatagctta

SEQ ID NO: 3429287 - DNA, 25 bp, Homo sapien
attcaggaacgaagtgctgatacat

SEQ ID NO: 3429288 - DNA, 25 bp, Homo sapien
gaaaatattcttcctgtaggagata

SEQ ID NO: 3429289 - DNA, 25 bp, Homo sapien
atgcccttgagtaccgcctgccgcc

SEQ ID NO: 3429290 - DNA, 25 bp, Homo sapien
ggtagagtggtgtgtaccaagacca

SEQ ID NO: 3429291 - DNA, 25 bp, Homo sapien
cgccccgtgccttccaggagagcct

SEQ ID NO: 3429292 - DNA, 25 bp, Homo sapien
cacctcctggctgggtagagtggtg

SEQ ID NO: 3429293 - DNA, 25 bp, Homo sapien
cctatgattagatttgtaccagctc

SEQ ID NO: 3429294 - DNA, 25 bp, Homo sapien
agcctgagaatcctatgattagatt

SEQ ID NO: 3429295 - DNA, 25 bp, Homo sapien
gcagggagtctcacataattttcac

SEQ ID NO: 3429296 - DNA, 25 bp, Homo sapien
ggaagggcagggagtctcacataat

SEQ ID NO: 3429297 - DNA, 25 bp, Homo sapien
aatagttccctcgatgaggcagcgc

SEQ ID NO: 3429298 - DNA, 25 bp, Homo sapien
aggctccaggccgtcaatagttccc

SEQ ID NO: 3429299 - DNA, 25 bp, Homo sapien
taaggtccccgtactgatggacgtg

SEQ ID NO: 3429300 - DNA, 25 bp, Homo sapien
tgttgcagttgtttgtaaggtcccc

SEQ ID NO: 3429301 - DNA, 25 bp, Homo sapien
cagtaaggtggttataagcaggacc

SEQ ID NO: 3429302 - DNA, 25 bp, Homo sapien
ggtcctgtcctgaataagcttctgg

SEQ ID NO: 3429303 - DNA, 25 bp, Homo sapien
tgcctcaggagattacgggcctccc

SEQ ID NO: 3429304 - DNA, 25 bp, Homo sapien
cacagagtattggtgagggcccagt

SEQ ID NO: 3429305 - DNA, 25 bp, Homo sapien
atcagggttaaagtgattcccacag

SEQ ID NO: 3429306 - DNA, 25 bp, Homo sapien
ccatcagggttaaagtgattcccac

SEQ ID NO: 3429307 - DNA, 25 bp, Homo sapien
gctaggcccagcttgtactctcagg

SEQ ID NO: 3429308 - DNA, 25 bp, Homo sapien
taatcactgagcataagcatggcac

SEQ ID NO: 3429309 - DNA, 25 bp, Homo sapien
tctgagagaagccaactgccgtgtt

SEQ ID NO: 3429310 - DNA, 25 bp, Homo sapien
gatgtgcaagggacaaccaggcttg

SEQ ID NO: 3429311 - DNA, 25 bp, Homo sapien
ccagtctcgtaggatctgagctccc

SEQ ID NO: 3429312 - DNA, 25 bp, Homo sapien
tgatttcctgattccgacgcctctt

SEQ ID NO: 3429313 - DNA, 25 bp, Homo sapien
gatgtgtgccacgtggtgccaagct

SEQ ID NO: 3429314 - DNA, 25 bp, Homo sapien
tccccaaggactgggcaggcaaggt

SEQ ID NO: 3429315 - DNA, 25 bp, Homo sapien
cattctgaagatggcgcggccgtca

SEQ ID NO: 3429316 - DNA, 25 bp, Homo sapien
atcagcacggacattgcccaggtct

SEQ ID NO: 3429317 - DNA, 25 bp, Homo sapien
tcagcatcagcacggacattgccca

SEQ ID NO: 3429318 - DNA, 25 bp, Homo sapien
gccgtcagcatcagcacggacattg

SEQ ID NO: 3429319 - DNA, 25 bp, Homo sapien
acgacagcttcagatgatggaccct

SEQ ID NO: 3429320 - DNA, 25 bp, Homo sapien
gggagacgacagcttcagatgatgg

SEQ ID NO: 3429321 - DNA, 25 bp, Homo sapien
gacgacagcttcagatgatggaccc

SEQ ID NO: 3429322 - DNA, 25 bp, Homo sapien
gagacgacagcttcagatgatggac

SEQ ID NO: 3429323 - DNA, 25 bp, Homo sapien
ctccccggcccaggtcatcttctcc

SEQ ID NO: 3429324 - DNA, 25 bp, Homo sapien
tccccggcccaggtcatcttctccc

SEQ ID NO: 3429325 - DNA, 25 bp, Homo sapien
cctgtgatcttggataagggatggc

SEQ ID NO: 3429326 - DNA, 25 bp, Homo sapien
ctctccccggagttccctgtgatct

SEQ ID NO: 3429327 - DNA, 25 bp, Homo sapien
ctccccggagttccctgtgatcttg

SEQ ID NO: 3429328 - DNA, 25 bp, Homo sapien
tccctgtgatcttggataagggatg

SEQ ID NO: 3429329 - DNA, 25 bp, Homo sapien
gaggccatcgcaagagcagatctgc

SEQ ID NO: 3429330 - DNA, 25 bp, Homo sapien
ctttcggcccttgccagcgatgggc

SEQ ID NO: 3429331 - DNA, 25 bp, Homo sapien
cagcggagcgtgcaatgatgccaca

SEQ ID NO: 3429332 - DNA, 25 bp, Homo sapien
gggttctggaaaaggccagcggagc

SEQ ID NO: 3429333 - DNA, 25 bp, Homo sapien
aaaggtgggcagggggctgcgctga

SEQ ID NO: 3429334 - DNA, 25 bp, Homo sapien
caaaggtgggcagggggctgcgctg

SEQ ID NO: 3429335 - DNA, 25 bp, Homo sapien
tcaaaggtgggcagggggctgcgct

SEQ ID NO: 3429336 - DNA, 25 bp, Homo sapien
aaggtgggcagggggctgcgctgac

SEQ ID NO: 3429337 - DNA, 25 bp, Homo sapien
gatgctcagtcaataaggcagggag

SEQ ID NO: 3429338 - DNA, 25 bp, Homo sapien
ttcatttgccaagggaacaccacag

SEQ ID NO: 3429339 - DNA, 25 bp, Homo sapien
ccatgttatgggtccaaccacagga

SEQ ID NO: 3429340 - DNA, 25 bp, Homo sapien
gagcatctcttcaatcccaggcagg

SEQ ID NO: 3429341 - DNA, 25 bp, Homo sapien
gtgagccaccacgtctggccgatct

SEQ ID NO: 3429342 - DNA, 25 bp, Homo sapien
ctcctcaggaatggctggcgaccga

SEQ ID NO: 3429343 - DNA, 25 bp, Homo sapien
ctggagagcccggacctctcctcca

SEQ ID NO: 3429344 - DNA, 25 bp, Homo sapien
agacgtccgaacgaccggcagtcct

SEQ ID NO: 3429345 - DNA, 25 bp, Homo sapien
tccagcgacaggcaagacgtccgaa

SEQ ID NO: 3429346 - DNA, 25 bp, Homo sapien
gcatgtgcacgaaggcgaactgttt

SEQ ID NO: 3429347 - DNA, 25 bp, Homo sapien
tattaagaggccttgggcgcgacat

SEQ ID NO: 3429348 - DNA, 25 bp, Homo sapien
cgaactgtttcatgacggcgcagct

SEQ ID NO: 3429349 - DNA, 25 bp, Homo sapien
atgaccgtgccgtagggcgcaaaga

SEQ ID NO: 3429350 - DNA, 25 bp, Homo sapien
cttgagcacattcatcgggagggaa

SEQ ID NO: 3429351 - DNA, 25 bp, Homo sapien
gagccgcttcctcctacttggtgga

SEQ ID NO: 3429352 - DNA, 25 bp, Homo sapien
ggaacactcgcaaggctctcaggcg

SEQ ID NO: 3429353 - DNA, 25 bp, Homo sapien
tctgaccgacgtctggagaggaagt

SEQ ID NO: 3429354 - DNA, 25 bp, Homo sapien
taaccaaattgtatcaggaagtttc

SEQ ID NO: 3429355 - DNA, 25 bp, Homo sapien
tttctaagcctgacactggagggga

SEQ ID NO: 3429356 - DNA, 25 bp, Homo sapien
taggttgcccagctaactcaactgc

SEQ ID NO: 3429357 - DNA, 25 bp, Homo sapien
gtgtgaataggttgcccagctaact

SEQ ID NO: 3429358 - DNA, 25 bp, Homo sapien
tcttagatagcatccaagtaccagg

SEQ ID NO: 3429359 - DNA, 25 bp, Homo sapien
ttagaaactttcgtactgggatgcc

SEQ ID NO: 3429360 - DNA, 25 bp, Homo sapien
gcttagctccattctcgacctgtgg

SEQ ID NO: 3429361 - DNA, 25 bp, Homo sapien
tgcccctaggaaataaggctctaag

SEQ ID NO: 3429362 - DNA, 25 bp, Homo sapien
gatggaccctgtgtaagccaatgag

SEQ ID NO: 3429363 - DNA, 25 bp, Homo sapien
tgcaattactgcagctaacaggctc

SEQ ID NO: 3429364 - DNA, 25 bp, Homo sapien
caggatgccggtctcaaagctatac

SEQ ID NO: 3429365 - DNA, 25 bp, Homo sapien
gaatagaaactaagcccactggctg

SEQ ID NO: 3429366 - DNA, 25 bp, Homo sapien
cactcttaggtacaggaggacctca

SEQ ID NO: 3429367 - DNA, 25 bp, Homo sapien
taacaggtggacatacatgctcaag

SEQ ID NO: 3429368 - DNA, 25 bp, Homo sapien
caagagagatagactgcaacaagca

SEQ ID NO: 3429369 - DNA, 25 bp, Homo sapien
ccatgtccaattaaggcaagagaga

SEQ ID NO: 3429370 - DNA, 25 bp, Homo sapien
gagcaaagatgaactgcaacacagg

SEQ ID NO: 3429371 - DNA, 25 bp, Homo sapien
gatgaactgcaacacaggataaaaa

SEQ ID NO: 3429372 - DNA, 25 bp, Homo sapien
agatgaactgcaacacaggataaaa

SEQ ID NO: 3429373 - DNA, 25 bp, Homo sapien
agcaaagatgaactgcaacacagga

SEQ ID NO: 3429374 - DNA, 25 bp, Homo sapien
gatgcgcttgcccttcacttctttg

SEQ ID NO: 3429375 - DNA, 25 bp, Homo sapien
ggagagttccacgttgatgcgcttg

SEQ ID NO: 3429376 - DNA, 25 bp, Homo sapien
gattgcggctttggcatctgcttcc

SEQ ID NO: 3429377 - DNA, 25 bp, Homo sapien
ttctccatgtgaacaaacgcgtagt

SEQ ID NO: 3429378 - DNA, 25 bp, Homo sapien
caaaagcctgctggtagtcgaaggt

SEQ ID NO: 3429379 - DNA, 25 bp, Homo sapien
tgtcatgggctgagtccgatagcca

SEQ ID NO: 3429380 - DNA, 25 bp, Homo sapien
aagccaccagtgctgttgccaaaag

SEQ ID NO: 3429381 - DNA, 25 bp, Homo sapien
tgtatggtgccccaagggagacaga

SEQ ID NO: 3429382 - DNA, 25 bp, Homo sapien
ggctgggctccaccatatgggccga

SEQ ID NO: 3429383 - DNA, 25 bp, Homo sapien
gctccaccatatgggccgagtgaag

SEQ ID NO: 3429384 - DNA, 25 bp, Homo sapien
atatgggccgagtgaagaagctgca

SEQ ID NO: 3429385 - DNA, 25 bp, Homo sapien
accatatgggccgagtgaagaagct

SEQ ID NO: 3429386 - DNA, 25 bp, Homo sapien
tgagccccataggagttgagcgaag

SEQ ID NO: 3429387 - DNA, 25 bp, Homo sapien
accctgagccccataggagttgagc

SEQ ID NO: 3429388 - DNA, 25 bp, Homo sapien
gccccataggagttgagcgaagaag

SEQ ID NO: 3429389 - DNA, 25 bp, Homo sapien
cataggagttgagcgaagaagctgc

SEQ ID NO: 3429390 - DNA, 25 bp, Homo sapien
cagcctgggcgccgtaagaggatgg

SEQ ID NO: 3429391 - DNA, 25 bp, Homo sapien
gcagcctgggcgccgtaagaggatg

SEQ ID NO: 3429392 - DNA, 25 bp, Homo sapien
tgcctgggctccataagctagtgag

SEQ ID NO: 3429393 - DNA, 25 bp, Homo sapien
cttgggccccgtaactattcagctg

SEQ ID NO: 3429394 - DNA, 25 bp, Homo sapien
cagactgggcattgtaagaggccga

SEQ ID NO: 3429395 - DNA, 25 bp, Homo sapien
ccgagggctgggcattatatgaagc

SEQ ID NO: 3429396 - DNA, 25 bp, Homo sapien
ctgcggcaccataggagccagtggc

SEQ ID NO: 3429397 - DNA, 25 bp, Homo sapien
tgatgactgagtgcggtaaggagct

SEQ ID NO: 3429398 - DNA, 25 bp, Homo sapien
tgccccatcgtaggcattgcctggc

SEQ ID NO: 3429399 - DNA, 25 bp, Homo sapien
tggccgcggtaggaggcagcagcct

SEQ ID NO: 3429400 - DNA, 25 bp, Homo sapien
catggacaggtaggctgcagacggc

SEQ ID NO: 3429401 - DNA, 25 bp, Homo sapien
ctgggacatggacaggtaggctgca

SEQ ID NO: 3429402 - DNA, 25 bp, Homo sapien
ggacatggacaggtaggctgcagac

SEQ ID NO: 3429403 - DNA, 25 bp, Homo sapien
gacatggacaggtaggctgcagacg

SEQ ID NO: 3429404 - DNA, 25 bp, Homo sapien
tgctgttggcgttggcaacggcccc

SEQ ID NO: 3429405 - DNA, 25 bp, Homo sapien
tttgtagggatcgtcgtagctggcc

SEQ ID NO: 3429406 - DNA, 25 bp, Homo sapien
aggcgggtacgctcatagggcggcg

SEQ ID NO: 3429407 - DNA, 25 bp, Homo sapien
tttcgacatggcgacagcctttttg

SEQ ID NO: 3429408 - DNA, 25 bp, Homo sapien
gagggtgtgatcacagtggtctcca

SEQ ID NO: 3429409 - DNA, 25 bp, Homo sapien
gagtggacgcacctcgtaaacttgc

SEQ ID NO: 3429410 - DNA, 25 bp, Homo sapien
aacttgcctttagccagtgaatgcc

SEQ ID NO: 3429411 - DNA, 25 bp, Homo sapien
gtttatcaacagaacggcggatgaa

SEQ ID NO: 3429412 - DNA, 25 bp, Homo sapien
gagccgcccgcaggtaatcattata

SEQ ID NO: 3429413 - DNA, 25 bp, Homo sapien
taatccagcgaggactttgtcggcg

SEQ ID NO: 3429414 - DNA, 25 bp, Homo sapien
taaacggcggtaatcagagagctcg

SEQ ID NO: 3429415 - DNA, 25 bp, Homo sapien
tataggagcccgaatagcgtgcgta

SEQ ID NO: 3429416 - DNA, 25 bp, Homo sapien
caagatttgctgctgaggcgaagga

SEQ ID NO: 3429417 - DNA, 25 bp, Homo sapien
tcagcagggacttggatacatacca

SEQ ID NO: 3429418 - DNA, 25 bp, Homo sapien
tctcaacagtctacagagggacagt

SEQ ID NO: 3429419 - DNA, 25 bp, Homo sapien
cataggaaatggttaagctgaccct

SEQ ID NO: 3429420 - DNA, 25 bp, Homo sapien
tacgagctctatggccagaatgccc

SEQ ID NO: 3429421 - DNA, 25 bp, Homo sapien
tgaaaatggtcaagcacaggcagag

SEQ ID NO: 3429422 - DNA, 25 bp, Homo sapien
gatgctccatggtacagctcaacag

SEQ ID NO: 3429423 - DNA, 25 bp, Homo sapien
caaccatagggcagtatcaggcaac

SEQ ID NO: 3429424 - DNA, 25 bp, Homo sapien
tcgaatgcttttgcacgatggcaag

SEQ ID NO: 3429425 - DNA, 25 bp, Homo sapien
caggcaagttcacatgaagccagtg

SEQ ID NO: 3429426 - DNA, 25 bp, Homo sapien
caaaagagcatcagtaagttctccc

SEQ ID NO: 3429427 - DNA, 25 bp, Homo sapien
ggcagaagataacccacctgacctc

SEQ ID NO: 3429428 - DNA, 25 bp, Homo sapien
tccctgagattaccccagttagcat

SEQ ID NO: 3429429 - DNA, 25 bp, Homo sapien
gggaaagagccatggccccagtact

SEQ ID NO: 3429430 - DNA, 25 bp, Homo sapien
aaaggagcagctaagcacctgaaag

SEQ ID NO: 3429431 - DNA, 25 bp, Homo sapien
cagtactccctgagattaccccagt

SEQ ID NO: 3429432 - DNA, 25 bp, Homo sapien
acaagaaacttatcaaaatcctcct

SEQ ID NO: 3429433 - DNA, 25 bp, Homo sapien
cttggccctcagaccaccccatcac

SEQ ID NO: 3429434 - DNA, 25 bp, Homo sapien
ggtaggcttattaacttggccctca

SEQ ID NO: 3429435 - DNA, 25 bp, Homo sapien
gagaacaagaaacttatcaaaatcc

SEQ ID NO: 3429436 - DNA, 25 bp, Homo sapien
gatgggtatgactagaacggtagcc

SEQ ID NO: 3429437 - DNA, 25 bp, Homo sapien
aataggacaatatgcctggaggacc

SEQ ID NO: 3429438 - DNA, 25 bp, Homo sapien
cctctaggtggtcttgttccaggaa

SEQ ID NO: 3429439 - DNA, 25 bp, Homo sapien
ctgggccaggtcactttcaagagct

SEQ ID NO: 3429440 - DNA, 25 bp, Homo sapien
tgcctcagctagctgagcaaggcat

SEQ ID NO: 3429441 - DNA, 25 bp, Homo sapien
gctaatgttggcagggcatggtggc

SEQ ID NO: 3429442 - DNA, 25 bp, Homo sapien
tttgggaggccgaggcaagtggatc

SEQ ID NO: 3429443 - DNA, 25 bp, Homo sapien
ctgaaattgcgccactgtactcctg

SEQ ID NO: 3429444 - DNA, 25 bp, Homo sapien
tcacacctgcaatcccagcactttg

SEQ ID NO: 3429445 - DNA, 25 bp, Homo sapien
taaacaaagccctagatggttccaa

SEQ ID NO: 3429446 - DNA, 25 bp, Homo sapien
attctccagggatgttcaatgggca

SEQ ID NO: 3429447 - DNA, 25 bp, Homo sapien
gctcctggtccagaaatgagttaca

SEQ ID NO: 3429448 - DNA, 25 bp, Homo sapien
ttacagttctgctaagggtgcaaac

SEQ ID NO: 3429449 - DNA, 25 bp, Homo sapien
aaaccaccttgttggtcgggcacag

SEQ ID NO: 3429450 - DNA, 25 bp, Homo sapien
caaatcctctgccttaccagctcaa

SEQ ID NO: 3429451 - DNA, 25 bp, Homo sapien
taccagctcaactacagagaatgac

SEQ ID NO: 3429452 - DNA, 25 bp, Homo sapien
aaggccaattaaagagatctgatcc

SEQ ID NO: 3429453 - DNA, 25 bp, Homo sapien
gccaattaaagagatctgatccaaa

SEQ ID NO: 3429454 - DNA, 25 bp, Homo sapien
tcatcacctagtacatgttccagtc

SEQ ID NO: 3429455 - DNA, 25 bp, Homo sapien
ccagaggtaacccaagctaacagat

SEQ ID NO: 3429456 - DNA, 25 bp, Homo sapien
tactaaaagaacttaatgcttgccc

SEQ ID NO: 3429457 - DNA, 25 bp, Homo sapien
aaaggccaattaatccgggcgcagt

SEQ ID NO: 3429458 - DNA, 25 bp, Homo sapien
tgtttctaacaaccaccgcccttga

SEQ ID NO: 3429459 - DNA, 25 bp, Homo sapien
ggttcttacaccagccaccgatcta

SEQ ID NO: 3429460 - DNA, 25 bp, Homo sapien
gaccttaccccaatctggttcttgc

SEQ ID NO: 3429461 - DNA, 25 bp, Homo sapien
ggaactctatcctatgactccatgt

SEQ ID NO: 3429462 - DNA, 25 bp, Homo sapien
attgaaataaattcaagcggccagg

SEQ ID NO: 3429463 - DNA, 25 bp, Homo sapien
aattgaaataaattcaagcggccag

SEQ ID NO: 3429464 - DNA, 25 bp, Homo sapien
agtctcctctgtcgccaagactgga

SEQ ID NO: 3429465 - DNA, 25 bp, Homo sapien
gagtctcctctgtcgccaagactgg

SEQ ID NO: 3429466 - DNA, 25 bp, Homo sapien
cagagtctcctctgtcgccaagact

SEQ ID NO: 3429467 - DNA, 25 bp, Homo sapien
gtgcagtggtgcaatctcggcctcc

SEQ ID NO: 3429468 - DNA, 25 bp, Homo sapien
tagtcaagaccctttgcgaagcagc

SEQ ID NO: 3429469 - DNA, 25 bp, Homo sapien
tagaaccgactttagaggacagagc

SEQ ID NO: 3429470 - DNA, 25 bp, Homo sapien
tctcaggatcacagttcaagcccag

SEQ ID NO: 3429471 - DNA, 25 bp, Homo sapien
tcaagcccagtgtgcggacatcaaa

SEQ ID NO: 3429472 - DNA, 25 bp, Homo sapien
caggagacgctgaggacaagttccc

SEQ ID NO: 3429473 - DNA, 25 bp, Homo sapien
aaacctttctgagaccatggagatt

SEQ ID NO: 3429474 - DNA, 25 bp, Homo sapien
cccagggtccgcgatgaagaaacct

SEQ ID NO: 3429475 - DNA, 25 bp, Homo sapien
ggacaagttccctctgggaaccagc

SEQ ID NO: 3429476 - DNA, 25 bp, Homo sapien
ggacctctgtaatggccttccagaa

SEQ ID NO: 3429477 - DNA, 25 bp, Homo sapien
tgtagccttgagagtcccggagctc

SEQ ID NO: 3429478 - DNA, 25 bp, Homo sapien
caaacctctcacaggtggtgaaagg

SEQ ID NO: 3429479 - DNA, 25 bp, Homo sapien
cttccagaagtaggcccggcaggag

SEQ ID NO: 3429480 - DNA, 25 bp, Homo sapien
cgaagccgaactcgctgattgggca

SEQ ID NO: 3429481 - DNA, 25 bp, Homo sapien
tggaaacgtctgtaacctcggagct

SEQ ID NO: 3429482 - DNA, 25 bp, Homo sapien
ttttatgcgaaagccaatgggcacc

SEQ ID NO: 3429483 - DNA, 25 bp, Homo sapien
cagtctttagcttcatggcgccaac

SEQ ID NO: 3429484 - DNA, 25 bp, Homo sapien
taaaaggccggcgttccctcagatc

SEQ ID NO: 3429485 - DNA, 25 bp, Homo sapien
tacaaccggattggccactcaagaa

SEQ ID NO: 3429486 - DNA, 25 bp, Homo sapien
gaggtgagcctacaaccggattggc

SEQ ID NO: 3429487 - DNA, 25 bp, Homo sapien
gattggttaccacggacgccaatta

SEQ ID NO: 3429488 - DNA, 25 bp, Homo sapien
aaaatggcggcggccgcagcagtgc

SEQ ID NO: 3429489 - DNA, 25 bp, Homo sapien
aaatggcggcggccgcagcagtgct

SEQ ID NO: 3429490 - DNA, 25 bp, Homo sapien
taaaatggcggcggccgcagcagtg

SEQ ID NO: 3429491 - DNA, 25 bp, Homo sapien
ctaaaatggcggcggccgcagcagt

SEQ ID NO: 3429492 - DNA, 25 bp, Homo sapien
ctcctcgcggcgcggacgcttctga

SEQ ID NO: 3429493 - DNA, 25 bp, Homo sapien
ctcctcctcgcggcgcggacgcttc

SEQ ID NO: 3429494 - DNA, 25 bp, Homo sapien
cctcgcggcgcggacgcttctgaca

SEQ ID NO: 3429495 - DNA, 25 bp, Homo sapien
tcctcctcgcggcgcggacgcttct

SEQ ID NO: 3429496 - DNA, 25 bp, Homo sapien
cccccgaagcccaagggagtgagag

SEQ ID NO: 3429497 - DNA, 25 bp, Homo sapien
cccgaagcccaagggagtgagagaa

SEQ ID NO: 3429498 - DNA, 25 bp, Homo sapien
gcagtggaaaggctcggagtctcac

SEQ ID NO: 3429499 - DNA, 25 bp, Homo sapien
agaaaggcagtggaaaggctcggag

SEQ ID NO: 3429500 - DNA, 25 bp, Homo sapien
acgggtgtggagactgcggacctac

SEQ ID NO: 3429501 - DNA, 25 bp, Homo sapien
caatgccgaggaccgaggtcggctc

SEQ ID NO: 3429502 - DNA, 25 bp, Homo sapien
ccgaggaccgaggtcggctctcagt

SEQ ID NO: 3429503 - DNA, 25 bp, Homo sapien
tcggctctcagtgacgggtgtggag

SEQ ID NO: 3429504 - DNA, 25 bp, Homo sapien
caaagcagccatcatttccgggaaa

SEQ ID NO: 3429505 - DNA, 25 bp, Homo sapien
gaaatactggagtggtgaacgcctc

SEQ ID NO: 3429506 - DNA, 25 bp, Homo sapien
cctttggaagtaatgaacgcgcgac

SEQ ID NO: 3429507 - DNA, 25 bp, Homo sapien
gcggccgcggaaaagagcttcagat

SEQ ID NO: 3429508 - DNA, 25 bp, Homo sapien
gaaaaacaagacatctgacaaaaga

SEQ ID NO: 3429509 - DNA, 25 bp, Homo sapien
aaaaacaagacatctgacaaaagac

SEQ ID NO: 3429510 - DNA, 25 bp, Homo sapien
gagagaaaaacaagacatctgacaa

SEQ ID NO: 3429511 - DNA, 25 bp, Homo sapien
tgggagagaaaaacaagacatctga

SEQ ID NO: 3429512 - DNA, 25 bp, Homo sapien
tgcgtatggcatcctcagctgccgt

SEQ ID NO: 3429513 - DNA, 25 bp, Homo sapien
gagtgagcgaatctcctgctctgta

SEQ ID NO: 3429514 - DNA, 25 bp, Homo sapien
ttcccatactgctcgaagagtgagc

SEQ ID NO: 3429515 - DNA, 25 bp, Homo sapien
tctgcccgctccatgtgtacgaagg

SEQ ID NO: 3429516 - DNA, 25 bp, Homo sapien
tgcacacagccttgtgttcagccct

SEQ ID NO: 3429517 - DNA, 25 bp, Homo sapien
cagccctctacccaaagagggtggt

SEQ ID NO: 3429518 - DNA, 25 bp, Homo sapien
ccttgtaattctagagtggccttaa

SEQ ID NO: 3429519 - DNA, 25 bp, Homo sapien
taggacagcttaacaaggattctgg

SEQ ID NO: 3429520 - DNA, 25 bp, Homo sapien
tgaaaagacagtcattaccgcccct

SEQ ID NO: 3429521 - DNA, 25 bp, Homo sapien
gattctggtcctataagtgtcgctt

SEQ ID NO: 3429522 - DNA, 25 bp, Homo sapien
caaactagacctgagagacctgtgt

SEQ ID NO: 3429523 - DNA, 25 bp, Homo sapien
gctgaagtgtgggaaacagtccaaa

SEQ ID NO: 3429524 - DNA, 25 bp, Homo sapien
ccttaaacctaactgctacaagcag

SEQ ID NO: 3429525 - DNA, 25 bp, Homo sapien
gggacctagggttcagacacccaga

SEQ ID NO: 3429526 - DNA, 25 bp, Homo sapien
cacaacaagttgaaggacagacttc

SEQ ID NO: 3429527 - DNA, 25 bp, Homo sapien
cttaactgggccctttaaactgctg

SEQ ID NO: 3429528 - DNA, 25 bp, Homo sapien
gcaaatctcaaggtacatctctgga

SEQ ID NO: 3429529 - DNA, 25 bp, Homo sapien
aatataagtaaaggccagttctcca

SEQ ID NO: 3429530 - DNA, 25 bp, Homo sapien
tatcactcttagtcatagccccagc

SEQ ID NO: 3429531 - DNA, 25 bp, Homo sapien
caatggctttatctagacaattcta

SEQ ID NO: 3429532 - DNA, 25 bp, Homo sapien
aaataaactactcttgctccaatca

SEQ ID NO: 3429533 - DNA, 25 bp, Homo sapien
cagtataatgacctgatttcaggaa

SEQ ID NO: 3429534 - DNA, 25 bp, Homo sapien
tgaagaaacagacgcaagaagggtt

SEQ ID NO: 3429535 - DNA, 25 bp, Homo sapien
gaagaaacagacgcaagaagggttg

SEQ ID NO: 3429536 - DNA, 25 bp, Homo sapien
ttgaagaaacagacgcaagaagggt

SEQ ID NO: 3429537 - DNA, 25 bp, Homo sapien
cttgaagaaacagacgcaagaaggg

SEQ ID NO: 3429538 - DNA, 25 bp, Homo sapien
ggtggacaactgcacgtgcattcgt

SEQ ID NO: 3429539 - DNA, 25 bp, Homo sapien
agccgctctggtctcccatcccggg

SEQ ID NO: 3429540 - DNA, 25 bp, Homo sapien
ccatcccgggcgcagtcctaagccg

SEQ ID NO: 3429541 - DNA, 25 bp, Homo sapien
gcgcagtcctaagccggctggtgga

SEQ ID NO: 3429542 - DNA, 25 bp, Homo sapien
cacggcagcgcttgtagtaggcatc

SEQ ID NO: 3429543 - DNA, 25 bp, Homo sapien
tatattgctcggtcaagtctgccac

SEQ ID NO: 3429544 - DNA, 25 bp, Homo sapien
taattatacacggaggcagctgcag

SEQ ID NO: 3429545 - DNA, 25 bp, Homo sapien
gatctatcggacactctttggacca

SEQ ID NO: 3429546 - DNA, 25 bp, Homo sapien
tatcgtagggatcgagagaggtgga

SEQ ID NO: 3429547 - DNA, 25 bp, Homo sapien
ctatcgtagggatcgagagaggtgg

SEQ ID NO: 3429548 - DNA, 25 bp, Homo sapien
cccgtaatatgaagtggaagctgca

SEQ ID NO: 3429549 - DNA, 25 bp, Homo sapien
gggctccgatcccgcccgtaatatg

SEQ ID NO: 3429550 - DNA, 25 bp, Homo sapien
tcccgcccgtaatatgaagtggaag

SEQ ID NO: 3429551 - DNA, 25 bp, Homo sapien
ccgatcccgcccgtaatatgaagtg

SEQ ID NO: 3429552 - DNA, 25 bp, Homo sapien
catgtcgtacagagaattccgcgcg

SEQ ID NO: 3429553 - DNA, 25 bp, Homo sapien
aaaggctgagtaccgcgcccgatcg

SEQ ID NO: 3429554 - DNA, 25 bp, Homo sapien
ggacaactcactctcatgcccgtaa

SEQ ID NO: 3429555 - DNA, 25 bp, Homo sapien
gatcggcatactgctcccgctcata

SEQ ID NO: 3429556 - DNA, 25 bp, Homo sapien
gtcgcacacgtaggaaacttaacaa

SEQ ID NO: 3429557 - DNA, 25 bp, Homo sapien
tagtatagtacataggtgacccaag

SEQ ID NO: 3429558 - DNA, 25 bp, Homo sapien
tgagcagtgatgaccagttaactac

SEQ ID NO: 3429559 - DNA, 25 bp, Homo sapien
gaagaccttaggaatgtcgcacacg

SEQ ID NO: 3429560 - DNA, 25 bp, Homo sapien
ttcaggaatgtcagaaatacgcttc

SEQ ID NO: 3429561 - DNA, 25 bp, Homo sapien
actcataagggttgaacggttcagg

SEQ ID NO: 3429562 - DNA, 25 bp, Homo sapien
ttggtagtcttcttagtaactggga

SEQ ID NO: 3429563 - DNA, 25 bp, Homo sapien
gaaatacgcttcaagattaagatga

SEQ ID NO: 3429564 - DNA, 25 bp, Homo sapien
gaggacatccaattccaactaggga

SEQ ID NO: 3429565 - DNA, 25 bp, Homo sapien
gaaagagagcacaatacagcggctt

SEQ ID NO: 3429566 - DNA, 25 bp, Homo sapien
tctaggagttactgccaaggtccga

SEQ ID NO: 3429567 - DNA, 25 bp, Homo sapien
tggaaaaagccagcggactcagggt

SEQ ID NO: 3429568 - DNA, 25 bp, Homo sapien
gtgagactctcaccaaggtcattcc

SEQ ID NO: 3429569 - DNA, 25 bp, Homo sapien
cggttcctgagggactgaacgcaca

SEQ ID NO: 3429570 - DNA, 25 bp, Homo sapien
agaccctggagcagtgagactctca

SEQ ID NO: 3429571 - DNA, 25 bp, Homo sapien
cagagccgagaacgtcccggagatg

SEQ ID NO: 3429572 - DNA, 25 bp, Homo sapien
agcaagaagtctcgcaaagcacaca

SEQ ID NO: 3429573 - DNA, 25 bp, Homo sapien
cccaagcaagaagtctcgcaaagca

SEQ ID NO: 3429574 - DNA, 25 bp, Homo sapien
caagcaagaagtctcgcaaagcaca

SEQ ID NO: 3429575 - DNA, 25 bp, Homo sapien
aagcccaagcaagaagtctcgcaaa

SEQ ID NO: 3429576 - DNA, 25 bp, Homo sapien
gcataaccttgtcaattacacagag

SEQ ID NO: 3429577 - DNA, 25 bp, Homo sapien
tacacagagccaactatgtggcttc

SEQ ID NO: 3429578 - DNA, 25 bp, Homo sapien
tttattattcctaaggagtggcagc

SEQ ID NO: 3429579 - DNA, 25 bp, Homo sapien
ggagtggcagcataaccttgtcaat

SEQ ID NO: 3429580 - DNA, 25 bp, Homo sapien
tacattttgaccagacgcagtggct

SEQ ID NO: 3429581 - DNA, 25 bp, Homo sapien
ggctcacatatagtccctgcaaaaa

SEQ ID NO: 3429582 - DNA, 25 bp, Homo sapien
gaaaaactacattttgaccagacgc

SEQ ID NO: 3429583 - DNA, 25 bp, Homo sapien
catatagtccctgcaaaaactctgg

SEQ ID NO: 3429584 - DNA, 25 bp, Homo sapien
tacagcacctcaaacggactaaaaa

SEQ ID NO: 3429585 - DNA, 25 bp, Homo sapien
acggccttgatctcagctttcccag

SEQ ID NO: 3429586 - DNA, 25 bp, Homo sapien
ccagtcttacggtcttttgttacag

SEQ ID NO: 3429587 - DNA, 25 bp, Homo sapien
tcaagacagaatccagacaccacgt

SEQ ID NO: 3429588 - DNA, 25 bp, Homo sapien
gcgcccggcctaatcttagtagtct

SEQ ID NO: 3429589 - DNA, 25 bp, Homo sapien
tgcgcaccacgacaactggctaata

SEQ ID NO: 3429590 - DNA, 25 bp, Homo sapien
ggtgcaatggtgcatacctctgtag

SEQ ID NO: 3429591 - DNA, 25 bp, Homo sapien
tgagatgggaagaccgcttcagctc

SEQ ID NO: 3429592 - DNA, 25 bp, Homo sapien
aatttgcaggttttgctggcctcag

SEQ ID NO: 3429593 - DNA, 25 bp, Homo sapien
taacatataccaggtgcgtgactca

SEQ ID NO: 3429594 - DNA, 25 bp, Homo sapien
gcacacattccaaccagtggtgatg

SEQ ID NO: 3429595 - DNA, 25 bp, Homo sapien
gttagcgtcagtattccccaaggaa

SEQ ID NO: 3429596 - DNA, 25 bp, Homo sapien
tatatgagaacttgctccgcgcggt

SEQ ID NO: 3429597 - DNA, 25 bp, Homo sapien
cctcgggctgcggtcatatatgaga

SEQ ID NO: 3429598 - DNA, 25 bp, Homo sapien
aatgaccatgtagtggcaagcagcc

SEQ ID NO: 3429599 - DNA, 25 bp, Homo sapien
ataattgcggactgaaccctcgggc

SEQ ID NO: 3429600 - DNA, 25 bp, Homo sapien
gatatgagttagatccagtctgact

SEQ ID NO: 3429601 - DNA, 25 bp, Homo sapien
tagctattgatagactcctaggtaa

SEQ ID NO: 3429602 - DNA, 25 bp, Homo sapien
aggacaggacccagggcgcttgtac

SEQ ID NO: 3429603 - DNA, 25 bp, Homo sapien
cattcttcagctagattgcatcttg

SEQ ID NO: 3429604 - DNA, 25 bp, Homo sapien
gctccttgatatcctaccccttgtg

SEQ ID NO: 3429605 - DNA, 25 bp, Homo sapien
tggagttcccatcatcaatagaagg

SEQ ID NO: 3429606 - DNA, 25 bp, Homo sapien
catttagaatagtgcaattcgccat

SEQ ID NO: 3429607 - DNA, 25 bp, Homo sapien
caacttttgaagtcgattggcacag

SEQ ID NO: 3429608 - DNA, 25 bp, Homo sapien
ccaggatgaaatactccagaactgt

SEQ ID NO: 3429609 - DNA, 25 bp, Homo sapien
cttccaggtgtgaacctcaaatgga

SEQ ID NO: 3429610 - DNA, 25 bp, Homo sapien
agaactgttggggatccaaattcgg

SEQ ID NO: 3429611 - DNA, 25 bp, Homo sapien
actgaataaccctgagttggttgca

SEQ ID NO: 3429612 - DNA, 25 bp, Homo sapien
gcatcacttgaattggagccccaga

SEQ ID NO: 3429613 - DNA, 25 bp, Homo sapien
aaaattgcataggtggtgaaagcca

SEQ ID NO: 3429614 - DNA, 25 bp, Homo sapien
tacctacatgccagaggaagtccta

SEQ ID NO: 3429615 - DNA, 25 bp, Homo sapien
gatctcttgagaccaccatgcagct

SEQ ID NO: 3429616 - DNA, 25 bp, Homo sapien
caaagagtgcccagtagatcgtacg

SEQ ID NO: 3429617 - DNA, 25 bp, Homo sapien
actactataagcgataccgggtccg

SEQ ID NO: 3429618 - DNA, 25 bp, Homo sapien
tacaacgatgcatatggagcactcg

SEQ ID NO: 3429619 - DNA, 25 bp, Homo sapien
gaacaccttacaccatgggctacgg

SEQ ID NO: 3429620 - DNA, 25 bp, Homo sapien
caagccaggtatggtttgtgtaccc

SEQ ID NO: 3429621 - DNA, 25 bp, Homo sapien
caagatgccgtccaaatctggctta

SEQ ID NO: 3429622 - DNA, 25 bp, Homo sapien
tacccatcattggagccttctggtg

SEQ ID NO: 3429623 - DNA, 25 bp, Homo sapien
taatccttagtcagtcagtgagaga

SEQ ID NO: 3429624 - DNA, 25 bp, Homo sapien
tacacagaggtagattttaccacag

SEQ ID NO: 3429625 - DNA, 25 bp, Homo sapien
tttagactgtcatggtcactctgac

SEQ ID NO: 3429626 - DNA, 25 bp, Homo sapien
acttttaggtctctggattggctcc

SEQ ID NO: 3429627 - DNA, 25 bp, Homo sapien
tctgttcaaagcacagttagcattg

SEQ ID NO: 3429628 - DNA, 25 bp, Homo sapien
ttaaactcgtcacccctattataga

SEQ ID NO: 3429629 - DNA, 25 bp, Homo sapien
aactcgtcacccctattatagattt

SEQ ID NO: 3429630 - DNA, 25 bp, Homo sapien
ctcgtcacccctattatagattttt

SEQ ID NO: 3429631 - DNA, 25 bp, Homo sapien
taaactcgtcacccctattatagat

SEQ ID NO: 3429632 - DNA, 25 bp, Homo sapien
tcctgacaggtaatgagcaaaatgt

SEQ ID NO: 3429633 - DNA, 25 bp, Homo sapien
tcatcatgatggacagtggagactg

SEQ ID NO: 3429634 - DNA, 25 bp, Homo sapien
tagtaatgtcatacagaatgccctt

SEQ ID NO: 3429635 - DNA, 25 bp, Homo sapien
taaagttgggtacaaactgcagagg

SEQ ID NO: 3429636 - DNA, 25 bp, Homo sapien
tagactgggctatgcatgctgaccc

SEQ ID NO: 3429637 - DNA, 25 bp, Homo sapien
cgcgcaggagaggtacacagatttc

SEQ ID NO: 3429638 - DNA, 25 bp, Homo sapien
tgctgcagtgcaccgaaatttccca

SEQ ID NO: 3429639 - DNA, 25 bp, Homo sapien
aaaccttgttaccaggcgcactgcg

SEQ ID NO: 3429640 - DNA, 25 bp, Homo sapien
ttctctctgacgtgggagccgccgt

SEQ ID NO: 3429641 - DNA, 25 bp, Homo sapien
gtcgcgtccaggctcgagcggccgt

SEQ ID NO: 3429642 - DNA, 25 bp, Homo sapien
cgtgcgtgagctggcgcgcgagaaa

SEQ ID NO: 3429643 - DNA, 25 bp, Homo sapien
gccgtcgccattttgtaaggttctc

SEQ ID NO: 3429644 - DNA, 25 bp, Homo sapien
cagcttggtgtgtacgaggagaccc

SEQ ID NO: 3429645 - DNA, 25 bp, Homo sapien
taagcgtagcctgggtagcaatgcc

SEQ ID NO: 3429646 - DNA, 25 bp, Homo sapien
ctaagcttgtttttaccgccaggag

SEQ ID NO: 3429647 - DNA, 25 bp, Homo sapien
tagacagtcgggaaactcagttgcc

SEQ ID NO: 3429648 - DNA, 25 bp, Homo sapien
gctagttagacatcatgcggcgaca

SEQ ID NO: 3429649 - DNA, 25 bp, Homo sapien
tgagtgccctatgcccagagatgaa

SEQ ID NO: 3429650 - DNA, 25 bp, Homo sapien
gcagcacatataagccgggtgcagt

SEQ ID NO: 3429651 - DNA, 25 bp, Homo sapien
actgtggtggaaacatcttgagccc

SEQ ID NO: 3429652 - DNA, 25 bp, Homo sapien
gggcagaagtgccagatgacagtca

SEQ ID NO: 3429653 - DNA, 25 bp, Homo sapien
cgcaccctcaacataggccatgtgg

SEQ ID NO: 3429654 - DNA, 25 bp, Homo sapien
ggtcattctcctgccatgcgagggc

SEQ ID NO: 3429655 - DNA, 25 bp, Homo sapien
agggaccgccctcttgtcaggacaa

SEQ ID NO: 3429656 - DNA, 25 bp, Homo sapien
ccttggattcttgtgcatataaagt

SEQ ID NO: 3429657 - DNA, 25 bp, Homo sapien
gcggaaatgcagagctaacatgtcc

SEQ ID NO: 3429658 - DNA, 25 bp, Homo sapien
agatccactgatccagcccatgagg

SEQ ID NO: 3429659 - DNA, 25 bp, Homo sapien
aaatgcagagctaacatgtccttcc

SEQ ID NO: 3429660 - DNA, 25 bp, Homo sapien
ggtgttccggctccggtgccacagt

SEQ ID NO: 3429661 - DNA, 25 bp, Homo sapien
cattgaccccaggacattgcatgct

SEQ ID NO: 3429662 - DNA, 25 bp, Homo sapien
gtgatttaccttccactcgcttgga

SEQ ID NO: 3429663 - DNA, 25 bp, Homo sapien
taacctgctacatgtcgtctgccct

SEQ ID NO: 3429664 - DNA, 25 bp, Homo sapien
gtgcccacgcccgagtccacgccca

SEQ ID NO: 3429665 - DNA, 25 bp, Homo sapien
agggaacagcggcaacgcccagtcg

SEQ ID NO: 3429666 - DNA, 25 bp, Homo sapien
gcggcaacgcccagtcgaagggtac

SEQ ID NO: 3429667 - DNA, 25 bp, Homo sapien
gggcttggaactccgccagtgccca

SEQ ID NO: 3429668 - DNA, 25 bp, Homo sapien
acacggccacggccgtcccctccat

SEQ ID NO: 3429669 - DNA, 25 bp, Homo sapien
aaagcccgtctcctcagaaagtgtc

SEQ ID NO: 3429670 - DNA, 25 bp, Homo sapien
ccgtctcctcagaaagtgtcctccg

SEQ ID NO: 3429671 - DNA, 25 bp, Homo sapien
agaaagtgtcctccgctttctctcc

SEQ ID NO: 3429672 - DNA, 25 bp, Homo sapien
cagaaagtgtcctccgctttctctc

SEQ ID NO: 3429673 - DNA, 25 bp, Homo sapien
tctgcccaaacttcgcggtctcctc

SEQ ID NO: 3429674 - DNA, 25 bp, Homo sapien
ctgcccaaacttcgcggtctcctca

SEQ ID NO: 3429675 - DNA, 25 bp, Homo sapien
cctctgcccaaacttcgcggtctcc

SEQ ID NO: 3429676 - DNA, 25 bp, Homo sapien
tgcccaaacttcgcggtctcctcac

SEQ ID NO: 3429677 - DNA, 25 bp, Homo sapien
aaacagcagctcaacgtcccattgg

SEQ ID NO: 3429678 - DNA, 25 bp, Homo sapien
ggtgtggcctctgaacctcgccctt

SEQ ID NO: 3429679 - DNA, 25 bp, Homo sapien
caccggccgtgaaagtgggtaatga

SEQ ID NO: 3429680 - DNA, 25 bp, Homo sapien
acgtccagctgcttcgaacccagaa

SEQ ID NO: 3429681 - DNA, 25 bp, Homo sapien
cagattctcacttttacagggaggc

SEQ ID NO: 3429682 - DNA, 25 bp, Homo sapien
gattctcacttttacagggaggcaa

SEQ ID NO: 3429683 - DNA, 25 bp, Homo sapien
acagattctcacttttacagggagg

SEQ ID NO: 3429684 - DNA, 25 bp, Homo sapien
attctcacttttacagggaggcaac

SEQ ID NO: 3429685 - DNA, 25 bp, Homo sapien
caatattttaagttgaacaggactc

SEQ ID NO: 3429686 - DNA, 25 bp, Homo sapien
taaacaaataaggtacgtgcaacgc

SEQ ID NO: 3429687 - DNA, 25 bp, Homo sapien
acatttaatcgaccgggtgtggtag

SEQ ID NO: 3429688 - DNA, 25 bp, Homo sapien
gttctaatgcagtaaagactacaca

SEQ ID NO: 3429689 - DNA, 25 bp, Homo sapien
cttctttagaaatcacagtaataat

SEQ ID NO: 3429690 - DNA, 25 bp, Homo sapien
ttctttagaaatcacagtaataata

SEQ ID NO: 3429691 - DNA, 25 bp, Homo sapien
gatacatctatgtcacacttccagt

SEQ ID NO: 3429692 - DNA, 25 bp, Homo sapien
tggaaatcactagctgcccttctag

SEQ ID NO: 3429693 - DNA, 25 bp, Homo sapien
gcaatgctccctttgatacatctat

SEQ ID NO: 3429694 - DNA, 25 bp, Homo sapien
tgcctggtgcttagaatttaatcct

SEQ ID NO: 3429695 - DNA, 25 bp, Homo sapien
taaataagctacgacataaaccatg

SEQ ID NO: 3429696 - DNA, 25 bp, Homo sapien
taatctatggtaagagtcattcaac

SEQ ID NO: 3429697 - DNA, 25 bp, Homo sapien
tatggaacaatcctggaataacatg

SEQ ID NO: 3429698 - DNA, 25 bp, Homo sapien
gctgtgacaaagtagattaaaatca

SEQ ID NO: 3429699 - DNA, 25 bp, Homo sapien
gctgaggtgggtggatcgcttgagg

SEQ ID NO: 3429700 - DNA, 25 bp, Homo sapien
gcttgtaatcgcagcactttgggag

SEQ ID NO: 3429701 - DNA, 25 bp, Homo sapien
agagaggccgggaacggtggctcat

SEQ ID NO: 3429702 - DNA, 25 bp, Homo sapien
tcaggagttcgagaccagccgagcc

SEQ ID NO: 3429703 - DNA, 25 bp, Homo sapien
aaatattagaaattttagagcaata

SEQ ID NO: 3429704 - DNA, 25 bp, Homo sapien
ctagagttctaactataaatattag

SEQ ID NO: 3429705 - DNA, 25 bp, Homo sapien
taaatattagaaattttagagcaat

SEQ ID NO: 3429706 - DNA, 25 bp, Homo sapien
ctataaatattagaaattttagagc

SEQ ID NO: 3429707 - DNA, 25 bp, Homo sapien
accatgccaccaaaaaggcttcctg

SEQ ID NO: 3429708 - DNA, 25 bp, Homo sapien
aggaccatgccaccaaaaaggcttc

SEQ ID NO: 3429709 - DNA, 25 bp, Homo sapien
gaggaccatgccaccaaaaaggctt

SEQ ID NO: 3429710 - DNA, 25 bp, Homo sapien
gaccatgccaccaaaaaggcttcct

SEQ ID NO: 3429711 - DNA, 25 bp, Homo sapien
gatattcagtctcatggaagttagg

SEQ ID NO: 3429712 - DNA, 25 bp, Homo sapien
tcatggaagttaggtaattctttac

SEQ ID NO: 3429713 - DNA, 25 bp, Homo sapien
cgggaagatattcagtctcatggaa

SEQ ID NO: 3429714 - DNA, 25 bp, Homo sapien
ttaattgtcgggaagatattcagtc

SEQ ID NO: 3429715 - DNA, 25 bp, Homo sapien
aaaacccttcctaagatgtctggag

SEQ ID NO: 3429716 - DNA, 25 bp, Homo sapien
tgctgcgctgagtgccccatatgct

SEQ ID NO: 3429717 - DNA, 25 bp, Homo sapien
tttgcatccgcacatgttcgcagtc

SEQ ID NO: 3429718 - DNA, 25 bp, Homo sapien
cagtttgcgcgcgtgttctgcggcc

SEQ ID NO: 3429719 - DNA, 25 bp, Homo sapien
cttcttccacaaattggctgagaag

SEQ ID NO: 3429720 - DNA, 25 bp, Homo sapien
tattttgaccacaatgatgtggcac

SEQ ID NO: 3429721 - DNA, 25 bp, Homo sapien
ctcattctgggcttctattttgacc

SEQ ID NO: 3429722 - DNA, 25 bp, Homo sapien
aagtgtaagggtgcagaggatctct

SEQ ID NO: 3429723 - DNA, 25 bp, Homo sapien
tatttcatcgagttggaggcagctg

SEQ ID NO: 3429724 - DNA, 25 bp, Homo sapien
ccttcttgccaactagactcatcag

SEQ ID NO: 3429725 - DNA, 25 bp, Homo sapien
gctgtcaatcgcctggtcaatttgt

SEQ ID NO: 3429726 - DNA, 25 bp, Homo sapien
gccaactagactcatcagaattatt

SEQ ID NO: 3429727 - DNA, 25 bp, Homo sapien
gatgttctggcagtgcatttgacag

SEQ ID NO: 3429728 - DNA, 25 bp, Homo sapien
ataccacttactggccgggccacat

SEQ ID NO: 3429729 - DNA, 25 bp, Homo sapien
cccaggctagtttagcaagcttgaa

SEQ ID NO: 3429730 - DNA, 25 bp, Homo sapien
tcctcctatgaatgacgaatgctct

SEQ ID NO: 3429731 - DNA, 25 bp, Homo sapien
tatgactttagcgtagaactgtctc

SEQ ID NO: 3429732 - DNA, 25 bp, Homo sapien
gaactgtctctaatcaatgattgca

SEQ ID NO: 3429733 - DNA, 25 bp, Homo sapien
gaagagcaagtaagaccccaaacga

SEQ ID NO: 3429734 - DNA, 25 bp, Homo sapien
gaagaacctggttctagccagactg

SEQ ID NO: 3429735 - DNA, 25 bp, Homo sapien
ccttgtaaaagtatgctgagaatga

SEQ ID NO: 3429736 - DNA, 25 bp, Homo sapien
tttttgtccttgtaaaagtatgctg

SEQ ID NO: 3429737 - DNA, 25 bp, Homo sapien
tgtaaaagtatgctgagaatgatgg

SEQ ID NO: 3429738 - DNA, 25 bp, Homo sapien
tttgtccttgtaaaagtatgctgag

SEQ ID NO: 3429739 - DNA, 25 bp, Homo sapien
agaaacagaacctgatatggtacag

SEQ ID NO: 3429740 - DNA, 25 bp, Homo sapien
tatgttcaaaggcttaaaaggcggc

SEQ ID NO: 3429741 - DNA, 25 bp, Homo sapien
aaaaggcggccttaatgagtgaact

SEQ ID NO: 3429742 - DNA, 25 bp, Homo sapien
cagataacactatacaaaaagaacc

SEQ ID NO: 3429743 - DNA, 25 bp, Homo sapien
agttacctcttcacataggtcttca

SEQ ID NO: 3429744 - DNA, 25 bp, Homo sapien
gttacctcttcacataggtcttcaa

SEQ ID NO: 3429745 - DNA, 25 bp, Homo sapien
caagttacctcttcacataggtctt

SEQ ID NO: 3429746 - DNA, 25 bp, Homo sapien
tcaagttacctcttcacataggtct

SEQ ID NO: 3429747 - DNA, 25 bp, Homo sapien
taatgccagatagcttcagaactga

SEQ ID NO: 3429748 - DNA, 25 bp, Homo sapien
tccacaaggtcatgtttaatgccag

SEQ ID NO: 3429749 - DNA, 25 bp, Homo sapien
tgtttattaaactggtgagccaaga

SEQ ID NO: 3429750 - DNA, 25 bp, Homo sapien
caagaatgactctcaggcatgtacc

SEQ ID NO: 3429751 - DNA, 25 bp, Homo sapien
tccaagtcagctttgcagagattcc

SEQ ID NO: 3429752 - DNA, 25 bp, Homo sapien
gattccgggcagtatggactgtatt

SEQ ID NO: 3429753 - DNA, 25 bp, Homo sapien
ggaagggtgttacccctgtcatatc

SEQ ID NO: 3429754 - DNA, 25 bp, Homo sapien
ccctgtcatatcctgagaatagctg

SEQ ID NO: 3429755 - DNA, 25 bp, Homo sapien
tgaaatgtcccactctattgtgaaa

SEQ ID NO: 3429756 - DNA, 25 bp, Homo sapien
ccttgaaaggccaaattatgtgtat

SEQ ID NO: 3429757 - DNA, 25 bp, Homo sapien
caccaaggtgttaataacggctgcc

SEQ ID NO: 3429758 - DNA, 25 bp, Homo sapien
acctatttccatggccacggcttgg

SEQ ID NO: 3429759 - DNA, 25 bp, Homo sapien
cctcaattgaggcatccatgatgaa

SEQ ID NO: 3429760 - DNA, 25 bp, Homo sapien
tttctcctcaattgaggcatccatg

SEQ ID NO: 3429761 - DNA, 25 bp, Homo sapien
ctcctcaattgaggcatccatgatg

SEQ ID NO: 3429762 - DNA, 25 bp, Homo sapien
caattgaggcatccatgatgaaatc

SEQ ID NO: 3429763 - DNA, 25 bp, Homo sapien
cttggaacactttcaaagctttgta

SEQ ID NO: 3429764 - DNA, 25 bp, Homo sapien
tttgtaaccttggtgattatagggc

SEQ ID NO: 3429765 - DNA, 25 bp, Homo sapien
acactttcaaagctttgtaaccttg

SEQ ID NO: 3429766 - DNA, 25 bp, Homo sapien
tgattatagggcgtatcatagagag

SEQ ID NO: 3429767 - DNA, 25 bp, Homo sapien
gtcaaaaactgtggcaataggttgg

SEQ ID NO: 3429768 - DNA, 25 bp, Homo sapien
tagtatagccagaacttgactgtaa

SEQ ID NO: 3429769 - DNA, 25 bp, Homo sapien
caaggttagccaggtcaacttggct

SEQ ID NO: 3429770 - DNA, 25 bp, Homo sapien
cacttagctgttcagtagtatagcc

SEQ ID NO: 3429771 - DNA, 25 bp, Homo sapien
gttaagcaacatgcctaaggtcact

SEQ ID NO: 3429772 - DNA, 25 bp, Homo sapien
tgaagttggtaagaataactccacc

SEQ ID NO: 3429773 - DNA, 25 bp, Homo sapien
gagtatctattacacggaacttcag

SEQ ID NO: 3429774 - DNA, 25 bp, Homo sapien
caccatcctaatgtgctttggaaca

SEQ ID NO: 3429775 - DNA, 25 bp, Homo sapien
tggagtcggaaggagcaaacactaa

SEQ ID NO: 3429776 - DNA, 25 bp, Homo sapien
tctgtcatcaaggttctgggctttt

SEQ ID NO: 3429777 - DNA, 25 bp, Homo sapien
atgctttataaccagacaatctgtc

SEQ ID NO: 3429778 - DNA, 25 bp, Homo sapien
aaaaatgctttataaccagacaatc

SEQ ID NO: 3429779 - DNA, 25 bp, Homo sapien
tttataaccagacaatctgtcatca

SEQ ID NO: 3429780 - DNA, 25 bp, Homo sapien
aagaaccaatcacatctgtccatgt

SEQ ID NO: 3429781 - DNA, 25 bp, Homo sapien
ccatgacctcaaatattaaacgttt

SEQ ID NO: 3429782 - DNA, 25 bp, Homo sapien
ccatgtcctacacagtaaaggtctc

SEQ ID NO: 3429783 - DNA, 25 bp, Homo sapien
ggaaaacaatgacttaaataagaga

SEQ ID NO: 3429784 - DNA, 25 bp, Homo sapien
ggttgtcacaaattatcagaaatca

SEQ ID NO: 3429785 - DNA, 25 bp, Homo sapien
tatcacagctccaggttgtcacaaa

SEQ ID NO: 3429786 - DNA, 25 bp, Homo sapien
taaacatacttaatgcttgcctgtg

SEQ ID NO: 3429787 - DNA, 25 bp, Homo sapien
tcttaaatatattgagccctatatc

SEQ ID NO: 3429788 - DNA, 25 bp, Homo sapien
tctctgtggagaggattccatttac

SEQ ID NO: 3429789 - DNA, 25 bp, Homo sapien
ccaaagatctctgtggagaggattc

SEQ ID NO: 3429790 - DNA, 25 bp, Homo sapien
gatctctgtggagaggattccattt

SEQ ID NO: 3429791 - DNA, 25 bp, Homo sapien
aagatctctgtggagaggattccat

SEQ ID NO: 3429792 - DNA, 25 bp, Homo sapien
tgggagtcgaccaaaagagcaattc

SEQ ID NO: 3429793 - DNA, 25 bp, Homo sapien
gagtcgaccaaaagagcaattccat

SEQ ID NO: 3429794 - DNA, 25 bp, Homo sapien
acataatgctgggagtcgaccaaaa

SEQ ID NO: 3429795 - DNA, 25 bp, Homo sapien
taatgctgggagtcgaccaaaagag

SEQ ID NO: 3429796 - DNA, 25 bp, Homo sapien
gtaaaacatgcagagggacaacaag

SEQ ID NO: 3429797 - DNA, 25 bp, Homo sapien
ttcgtactcgagaggagagtaaaac

SEQ ID NO: 3429798 - DNA, 25 bp, Homo sapien
tactcgagaggagagtaaaacatgc

SEQ ID NO: 3429799 - DNA, 25 bp, Homo sapien
gggacaacaaggctttacgccttca

SEQ ID NO: 3429800 - DNA, 25 bp, Homo sapien
cattactggatgtcctagcacaggg

SEQ ID NO: 3429801 - DNA, 25 bp, Homo sapien
tcttcagggatgaaaagcattactg

SEQ ID NO: 3429802 - DNA, 25 bp, Homo sapien
agttctcccaacaagtccatgccag

SEQ ID NO: 3429803 - DNA, 25 bp, Homo sapien
gaagaaatcctgttaagctggttgg

SEQ ID NO: 3429804 - DNA, 25 bp, Homo sapien
cagctaattagtagtgaatccaaca

SEQ ID NO: 3429805 - DNA, 25 bp, Homo sapien
gctaggagcttcacatggattatta

SEQ ID NO: 3429806 - DNA, 25 bp, Homo sapien
gcactacacgactcttacctatgga

SEQ ID NO: 3429807 - DNA, 25 bp, Homo sapien
gttaagtgagttgcctacagtcaca

SEQ ID NO: 3429808 - DNA, 25 bp, Homo sapien
gcacaggtaacttgtatagagatgg

SEQ ID NO: 3429809 - DNA, 25 bp, Homo sapien
atcaccagtatctggagtcccagtg

SEQ ID NO: 3429810 - DNA, 25 bp, Homo sapien
acacatgcacaggtaacttgtatag

SEQ ID NO: 3429811 - DNA, 25 bp, Homo sapien
gatatcaccagtatctggagtccca

SEQ ID NO: 3429812 - DNA, 25 bp, Homo sapien
tagagtatatcctgctaagaacgta

SEQ ID NO: 3429813 - DNA, 25 bp, Homo sapien
tctgatgctaaaaactttggttcct

SEQ ID NO: 3429814 - DNA, 25 bp, Homo sapien
tcatatttcttacacttagggttca

SEQ ID NO: 3429815 - DNA, 25 bp, Homo sapien
tagggttcattgatcatgaatctgc

SEQ ID NO: 3429816 - DNA, 25 bp, Homo sapien
ttcaataatgtgatcatcccctcca

SEQ ID NO: 3429817 - DNA, 25 bp, Homo sapien
tctattatataaagggccactttac

SEQ ID NO: 3429818 - DNA, 25 bp, Homo sapien
gaagacctcaaaaccatctttagag

SEQ ID NO: 3429819 - DNA, 25 bp, Homo sapien
gtagctactgtaatgttcaccttct

SEQ ID NO: 3429820 - DNA, 25 bp, Homo sapien
gaaggtcacacgagcttaggagttc

SEQ ID NO: 3429821 - DNA, 25 bp, Homo sapien
tgggaaggtcacacgagcttaggag

SEQ ID NO: 3429822 - DNA, 25 bp, Homo sapien
atatgaagaacatagaaaatgatag

SEQ ID NO: 3429823 - DNA, 25 bp, Homo sapien
aagtgggaaggtcacacgagcttag

SEQ ID NO: 3429824 - DNA, 25 bp, Homo sapien
agaaatatgaagagtataggctggg

SEQ ID NO: 3429825 - DNA, 25 bp, Homo sapien
gatccatgatcaatgaaccctaagc

SEQ ID NO: 3429826 - DNA, 25 bp, Homo sapien
tgctattgtcacaggttttatttcc

SEQ ID NO: 3429827 - DNA, 25 bp, Homo sapien
ttgccaggctttattagtatacaac

SEQ ID NO: 3429828 - DNA, 25 bp, Homo sapien
agatgtgaggcaccagagatagatc

SEQ ID NO: 3429829 - DNA, 25 bp, Homo sapien
tctatccaaattgagatccaaattg

SEQ ID NO: 3429830 - DNA, 25 bp, Homo sapien
aggcagacccaaaggtccatataga

SEQ ID NO: 3429831 - DNA, 25 bp, Homo sapien
tcatcggctgctcccaagttgacaa

SEQ ID NO: 3429832 - DNA, 25 bp, Homo sapien
caaattgggtatcatacacaaatgg

SEQ ID NO: 3429833 - DNA, 25 bp, Homo sapien
gagttgacagattaggtacattaga

SEQ ID NO: 3429834 - DNA, 25 bp, Homo sapien
taggtacattagaaatcctctgaac

SEQ ID NO: 3429835 - DNA, 25 bp, Homo sapien
ttaggtacattagaaatcctctgaa

SEQ ID NO: 3429836 - DNA, 25 bp, Homo sapien
ctcctgaacctgtttctctatccac

SEQ ID NO: 3429837 - DNA, 25 bp, Homo sapien
cctcctgaacctgtttctctatcca

SEQ ID NO: 3429838 - DNA, 25 bp, Homo sapien
cctgaacctgtttctctatccacat

SEQ ID NO: 3429839 - DNA, 25 bp, Homo sapien
tcctgaacctgtttctctatccaca

SEQ ID NO: 3429840 - DNA, 25 bp, Homo sapien
ggacaagatattacacgaatttcta

SEQ ID NO: 3429841 - DNA, 25 bp, Homo sapien
caagatattacacgaatttctaaga

SEQ ID NO: 3429842 - DNA, 25 bp, Homo sapien
tattacacgaatttctaagataagt

SEQ ID NO: 3429843 - DNA, 25 bp, Homo sapien
agaggacaagatattacacgaattt

SEQ ID NO: 3429844 - DNA, 25 bp, Homo sapien
gatccatagtctgagactgatcctc

SEQ ID NO: 3429845 - DNA, 25 bp, Homo sapien
tcactggattccacctgataactca

SEQ ID NO: 3429846 - DNA, 25 bp, Homo sapien
cttgaggatccatagtctgagactg

SEQ ID NO: 3429847 - DNA, 25 bp, Homo sapien
actggattccacctgataactcaca

SEQ ID NO: 3429848 - DNA, 25 bp, Homo sapien
ataagaacaggtgtgcattttttaa

SEQ ID NO: 3429849 - DNA, 25 bp, Homo sapien
tgagttgtgagcaaagtatagactc

SEQ ID NO: 3429850 - DNA, 25 bp, Homo sapien
gtggctctccacaaggatggcattg

SEQ ID NO: 3429851 - DNA, 25 bp, Homo sapien
tggaaccttgcactacactgtggct

SEQ ID NO: 3429852 - DNA, 25 bp, Homo sapien
acagtgaattggatggaaccttgca

SEQ ID NO: 3429853 - DNA, 25 bp, Homo sapien
acttactgacacagacacatcagag

SEQ ID NO: 3429854 - DNA, 25 bp, Homo sapien
taggacaatgatcaagaaaacagac

SEQ ID NO: 3429855 - DNA, 25 bp, Homo sapien
gagaagacaagcaataggacaatga

SEQ ID NO: 3429856 - DNA, 25 bp, Homo sapien
gaaaacagacacactatttgggaaa

SEQ ID NO: 3429857 - DNA, 25 bp, Homo sapien
ttcggaagctgctcctagtgcttcc

SEQ ID NO: 3429858 - DNA, 25 bp, Homo sapien
tcggaagctgctcctagtgcttcca

SEQ ID NO: 3429859 - DNA, 25 bp, Homo sapien
gtcagaatactcatgatggagttca

SEQ ID NO: 3429860 - DNA, 25 bp, Homo sapien
ccagtcagaatactcatgatggagt

SEQ ID NO: 3429861 - DNA, 25 bp, Homo sapien
tgatctcacgaaatactttgtgcag

SEQ ID NO: 3429862 - DNA, 25 bp, Homo sapien
aattggtgttgggtgatctcacgaa

SEQ ID NO: 3429863 - DNA, 25 bp, Homo sapien
gcttcacctcacatgagcagtggtg

SEQ ID NO: 3429864 - DNA, 25 bp, Homo sapien
gcagtggtgaagaaattggtgttgg

SEQ ID NO: 3429865 - DNA, 25 bp, Homo sapien
ctgttatcaggtgcgtcctcagtgc

SEQ ID NO: 3429866 - DNA, 25 bp, Homo sapien
ctgctgttatcaggtgcgtcctcag

SEQ ID NO: 3429867 - DNA, 25 bp, Homo sapien
atcaggtgcgtcctcagtgccctgg

SEQ ID NO: 3429868 - DNA, 25 bp, Homo sapien
gttatcaggtgcgtcctcagtgccc

SEQ ID NO: 3429869 - DNA, 25 bp, Homo sapien
gctgcagtccagggctcacttgaaa

SEQ ID NO: 3429870 - DNA, 25 bp, Homo sapien
cagtccagggctcacttgaaaagct

SEQ ID NO: 3429871 - DNA, 25 bp, Homo sapien
cagggctcacttgaaaagctaaaac

SEQ ID NO: 3429872 - DNA, 25 bp, Homo sapien
tctgctgcagtccagggctcacttg

SEQ ID NO: 3429873 - DNA, 25 bp, Homo sapien
ctggcatctctgctagtgactgaat

SEQ ID NO: 3429874 - DNA, 25 bp, Homo sapien
tctgctagtgactgaatgtgagagc

SEQ ID NO: 3429875 - DNA, 25 bp, Homo sapien
tagtgactgaatgtgagagctgctg

SEQ ID NO: 3429876 - DNA, 25 bp, Homo sapien
tgactgaatgtgagagctgctgtac

SEQ ID NO: 3429877 - DNA, 25 bp, Homo sapien
acgcgtatgtgttgtggttgtgacc

SEQ ID NO: 3429878 - DNA, 25 bp, Homo sapien
aagcataaacgcgtatgtgttgtgg

SEQ ID NO: 3429879 - DNA, 25 bp, Homo sapien
gcataaacgcgtatgtgttgtggtt

SEQ ID NO: 3429880 - DNA, 25 bp, Homo sapien
taaacgcgtatgtgttgtggttgtg

SEQ ID NO: 3429881 - DNA, 25 bp, Homo sapien
gtgagcctcgcggtgctcccttcct

SEQ ID NO: 3429882 - DNA, 25 bp, Homo sapien
tgctcccttcctctaggagtgaggg

SEQ ID NO: 3429883 - DNA, 25 bp, Homo sapien
agagcgcagagctcgcatctcctct

SEQ ID NO: 3429884 - DNA, 25 bp, Homo sapien
agagctcgcatctcctctatgcggg

SEQ ID NO: 3429885 - DNA, 25 bp, Homo sapien
ggacctctcagcagcggcccgtggc

SEQ ID NO: 3429886 - DNA, 25 bp, Homo sapien
ccctgcgcggccctcgcccagttac

SEQ ID NO: 3429887 - DNA, 25 bp, Homo sapien
tccctgcgcggccctcgcccagtta

SEQ ID NO: 3429888 - DNA, 25 bp, Homo sapien
ctcagccactctgacaggttggaga

SEQ ID NO: 3429889 - DNA, 25 bp, Homo sapien
cagggctgggactcagccactctga

SEQ ID NO: 3429890 - DNA, 25 bp, Homo sapien
acaggttggagacctcctgcagcca

SEQ ID NO: 3429891 - DNA, 25 bp, Homo sapien
tctgacaggttggagacctcctgca

SEQ ID NO: 3429892 - DNA, 25 bp, Homo sapien
tgcccgcagcctccggatcggtggg

SEQ ID NO: 3429893 - DNA, 25 bp, Homo sapien
accacgggataacggctgcccgcag

SEQ ID NO: 3429894 - DNA, 25 bp, Homo sapien
gcctccggatcggtgggcgcttgcg

SEQ ID NO: 3429895 - DNA, 25 bp, Homo sapien
gcgcggcagctttattaaaccacgg

SEQ ID NO: 3429896 - DNA, 25 bp, Homo sapien
gtgtgggtgacgtcaggccgcggcg

SEQ ID NO: 3429897 - DNA, 25 bp, Homo sapien
ccagggaggtgtgggtgacgtcagg

SEQ ID NO: 3429898 - DNA, 25 bp, Homo sapien
ccgcggcgcgcaccagtgacgcagt

SEQ ID NO: 3429899 - DNA, 25 bp, Homo sapien
accagtgacgcagtcccagggaggt

SEQ ID NO: 3429900 - DNA, 25 bp, Homo sapien
tgggcagttcgctcttccagacgta

SEQ ID NO: 3429901 - DNA, 25 bp, Homo sapien
gacaccgacagcagtcgcagcccat

SEQ ID NO: 3429902 - DNA, 25 bp, Homo sapien
ctcttccagacgtagaggctgccca

SEQ ID NO: 3429903 - DNA, 25 bp, Homo sapien
aggctgcccacgtaggagcaggcga

SEQ ID NO: 3429904 - DNA, 25 bp, Homo sapien
gctcgcccaagctccgcccgcaggg

SEQ ID NO: 3429905 - DNA, 25 bp, Homo sapien
agggcgcggattccggtcgcgcgca

SEQ ID NO: 3429906 - DNA, 25 bp, Homo sapien
cagtaagttcagggggcccgcggct

SEQ ID NO: 3429907 - DNA, 25 bp, Homo sapien
gctgcccatgagcacggacccgccc

SEQ ID NO: 3429908 - DNA, 25 bp, Homo sapien
agagactggacaccaccaggacgct

SEQ ID NO: 3429909 - DNA, 25 bp, Homo sapien
ctgtgagttccctccagagcagcac

SEQ ID NO: 3429910 - DNA, 25 bp, Homo sapien
aagcgtcgcttgatgaccgcgggat

SEQ ID NO: 3429911 - DNA, 25 bp, Homo sapien
cgctggtgaagcgtcgcttgatgac

SEQ ID NO: 3429912 - DNA, 25 bp, Homo sapien
ccctgagctctcaccgccgttgccc

SEQ ID NO: 3429913 - DNA, 25 bp, Homo sapien
ctcaccgccgttgccctttgccccg

SEQ ID NO: 3429914 - DNA, 25 bp, Homo sapien
gctctcaccgccgttgccctttgcc

SEQ ID NO: 3429915 - DNA, 25 bp, Homo sapien
gagctctcaccgccgttgccctttg

SEQ ID NO: 3429916 - DNA, 25 bp, Homo sapien
gcctgaagcccatcagggtgagcag

SEQ ID NO: 3429917 - DNA, 25 bp, Homo sapien
gcgccgctgggaaaatgccctccag

SEQ ID NO: 3429918 - DNA, 25 bp, Homo sapien
agcctgaagcccatcagggtgagca

SEQ ID NO: 3429919 - DNA, 25 bp, Homo sapien
gcagcagcgccgctgggaaaatgcc

SEQ ID NO: 3429920 - DNA, 25 bp, Homo sapien
aaaacaagagtccacggcactgccc

SEQ ID NO: 3429921 - DNA, 25 bp, Homo sapien
caagagtccacggcactgcccatca

SEQ ID NO: 3429922 - DNA, 25 bp, Homo sapien
aacaagagtccacggcactgcccat

SEQ ID NO: 3429923 - DNA, 25 bp, Homo sapien
agagtccacggcactgcccatcagg

SEQ ID NO: 3429924 - DNA, 25 bp, Homo sapien
gctgcatcagtgggcccaggaaaag

SEQ ID NO: 3429925 - DNA, 25 bp, Homo sapien
tgcatcagtgggcccaggaaaagaa

SEQ ID NO: 3429926 - DNA, 25 bp, Homo sapien
gggcaatccatagagagctgcatca

SEQ ID NO: 3429927 - DNA, 25 bp, Homo sapien
atccatagagagctgcatcagtggg

SEQ ID NO: 3429928 - DNA, 25 bp, Homo sapien
tttcccttcagcctttaagactcac

SEQ ID NO: 3429929 - DNA, 25 bp, Homo sapien
ttttcccttcagcctttaagactca

SEQ ID NO: 3429930 - DNA, 25 bp, Homo sapien
acataaacccaatgtcttgagatga

SEQ ID NO: 3429931 - DNA, 25 bp, Homo sapien
cataaacccaatgtcttgagatgac

SEQ ID NO: 3429932 - DNA, 25 bp, Homo sapien
aacataaacccaatgtcttgagatg

SEQ ID NO: 3429933 - DNA, 25 bp, Homo sapien
ccaacataaacccaatgtcttgaga

SEQ ID NO: 3429934 - DNA, 25 bp, Homo sapien
tgtgaggcagcgggcccaggagcgg

SEQ ID NO: 3429935 - DNA, 25 bp, Homo sapien
ctgtgaggcagcgggcccaggagcg

SEQ ID NO: 3429936 - DNA, 25 bp, Homo sapien
tgaggcagcgggcccaggagcgggg

SEQ ID NO: 3429937 - DNA, 25 bp, Homo sapien
aggcagcgggcccaggagcgggggg

SEQ ID NO: 3429938 - DNA, 25 bp, Homo sapien
caggcccatgcacggtgctaacatg

SEQ ID NO: 3429939 - DNA, 25 bp, Homo sapien
taacatgggcagcatacaggcccgg

SEQ ID NO: 3429940 - DNA, 25 bp, Homo sapien
gggcgatcacttggttccgcagcca

SEQ ID NO: 3429941 - DNA, 25 bp, Homo sapien
caactccaaaaaagagcgggcaggt

SEQ ID NO: 3429942 - DNA, 25 bp, Homo sapien
acaagaagatgttccccacgctgct

SEQ ID NO: 3429943 - DNA, 25 bp, Homo sapien
gctgctctggcggaaacgcagctgc

SEQ ID NO: 3429944 - DNA, 25 bp, Homo sapien
cagctgctcaataatatggtgaaaa

SEQ ID NO: 3429945 - DNA, 25 bp, Homo sapien
cagacaagaagatgttccccacgct

SEQ ID NO: 3429946 - DNA, 25 bp, Homo sapien
ctaacccaggccagctagccaggac

SEQ ID NO: 3429947 - DNA, 25 bp, Homo sapien
tagcgacatcatcatacaccctaac

SEQ ID NO: 3429948 - DNA, 25 bp, Homo sapien
gggaggccacgagtgaccacacctg

SEQ ID NO: 3429949 - DNA, 25 bp, Homo sapien
caacttcccacggtcagtggcctct

SEQ ID NO: 3429950 - DNA, 25 bp, Homo sapien
gaggaaagcagtgtaggcaccgaag

SEQ ID NO: 3429951 - DNA, 25 bp, Homo sapien
aaagcagtgtaggcaccgaagacag

SEQ ID NO: 3429952 - DNA, 25 bp, Homo sapien
ggaaagcagtgtaggcaccgaagac

SEQ ID NO: 3429953 - DNA, 25 bp, Homo sapien
gaaagcagtgtaggcaccgaagaca

SEQ ID NO: 3429954 - DNA, 25 bp, Homo sapien
tgaccctcatcccctgaaacaggag

SEQ ID NO: 3429955 - DNA, 25 bp, Homo sapien
ggagatcaagatcccactaccccag

SEQ ID NO: 3429956 - DNA, 25 bp, Homo sapien
gcctgtctcaaggactggagtagaa

SEQ ID NO: 3429957 - DNA, 25 bp, Homo sapien
agggagcagccctaccacctcctct

SEQ ID NO: 3429958 - DNA, 25 bp, Homo sapien
aaggccgcgcaaacagctgggaaac

SEQ ID NO: 3429959 - DNA, 25 bp, Homo sapien
gcacacaaaggggaaggctgccgta

SEQ ID NO: 3429960 - DNA, 25 bp, Homo sapien
gaaacccatgtaattgcagaaggaa

SEQ ID NO: 3429961 - DNA, 25 bp, Homo sapien
aggaatggcagagaaccggcccaat

SEQ ID NO: 3429962 - DNA, 25 bp, Homo sapien
ttcatagcgtatccaggagcatagg

SEQ ID NO: 3429963 - DNA, 25 bp, Homo sapien
tagctctggcttcaatcccctacaa

SEQ ID NO: 3429964 - DNA, 25 bp, Homo sapien
cctacaaaaattcctgagatctcgg

SEQ ID NO: 3429965 - DNA, 25 bp, Homo sapien
ttggtccctgggacgcaactagctc

SEQ ID NO: 3429966 - DNA, 25 bp, Homo sapien
atagaccgattcccaaaggcccaag

SEQ ID NO: 3429967 - DNA, 25 bp, Homo sapien
ggccgagcgcaaacccgcactgttg

SEQ ID NO: 3429968 - DNA, 25 bp, Homo sapien
tctttgtcacatgtcgctgggcacc

SEQ ID NO: 3429969 - DNA, 25 bp, Homo sapien
ctgcagacagccagacaaagcgcct

SEQ ID NO: 3429970 - DNA, 25 bp, Homo sapien
ccatctcccggagacgggcgtcttt

SEQ ID NO: 3429971 - DNA, 25 bp, Homo sapien
gggacaaggtgaggcatgaggcagg

SEQ ID NO: 3429972 - DNA, 25 bp, Homo sapien
ctcacctggtgtccgtcgctcaggg

SEQ ID NO: 3429973 - DNA, 25 bp, Homo sapien
caagagggccgccagagatgaggga

SEQ ID NO: 3429974 - DNA, 25 bp, Homo sapien
gcaaaggtcacatttcccaagcagt

SEQ ID NO: 3429975 - DNA, 25 bp, Homo sapien
tctaggaagtcgtcgaaggctcccg

SEQ ID NO: 3429976 - DNA, 25 bp, Homo sapien
tcacgcccacgagagaaaagcgggt

SEQ ID NO: 3429977 - DNA, 25 bp, Homo sapien
actcggacaggttctggcagacgca

SEQ ID NO: 3429978 - DNA, 25 bp, Homo sapien
cagtcccgtcatgttgcggaagtca

SEQ ID NO: 3429979 - DNA, 25 bp, Homo sapien
caaccggtcgtcaggaccgacccag

SEQ ID NO: 3429980 - DNA, 25 bp, Homo sapien
ccggtcgtcaggaccgacccagtgc

SEQ ID NO: 3429981 - DNA, 25 bp, Homo sapien
accggtcgtcaggaccgacccagtg

SEQ ID NO: 3429982 - DNA, 25 bp, Homo sapien
cggtcgtcaggaccgacccagtgca

SEQ ID NO: 3429983 - DNA, 25 bp, Homo sapien
agcccgggctcgggaggagttgcca

SEQ ID NO: 3429984 - DNA, 25 bp, Homo sapien
gcccgggctcgggaggagttgccaa

SEQ ID NO: 3429985 - DNA, 25 bp, Homo sapien
tcaccctcggcagcagtgcgagcgg

SEQ ID NO: 3429986 - DNA, 25 bp, Homo sapien
tgaggtggcggtcacctccgtcacc

SEQ ID NO: 3429987 - DNA, 25 bp, Homo sapien
ggaacatccacactgggtcggctgg

SEQ ID NO: 3429988 - DNA, 25 bp, Homo sapien
cgcagttctactcgggctgtggcct

SEQ ID NO: 3429989 - DNA, 25 bp, Homo sapien
gggtctcatcttcgctgctgttgta

SEQ ID NO: 3429990 - DNA, 25 bp, Homo sapien
gagggtctcatcttcgctgctgttg

SEQ ID NO: 3429991 - DNA, 25 bp, Homo sapien
cggtagatgagggtctcatcttcgc

SEQ ID NO: 3429992 - DNA, 25 bp, Homo sapien
gatgagggtctcatcttcgctgctg

SEQ ID NO: 3429993 - DNA, 25 bp, Homo sapien
aggcagaaataacacgcgggcgcgg

SEQ ID NO: 3429994 - DNA, 25 bp, Homo sapien
gcgggcgcgggccatgtgcttcaga

SEQ ID NO: 3429995 - DNA, 25 bp, Homo sapien
tcagtgacacctgggacatctcggg

SEQ ID NO: 3429996 - DNA, 25 bp, Homo sapien
ggcacaggacgcaggcaagcgaggg

SEQ ID NO: 3429997 - DNA, 25 bp, Homo sapien
gcaggtggtcagagcccggggctgg

SEQ ID NO: 3429998 - DNA, 25 bp, Homo sapien
cctggtggccgtgaggtcagagggc

SEQ ID NO: 3429999 - DNA, 25 bp, Homo sapien
ccggcagcgtggagaaatgggcaca

SEQ ID NO: 3430000 - DNA, 25 bp, Homo sapien
ggacgaggtgcttcagcaggaagtg

SEQ ID NO: 3430001 - DNA, 25 bp, Homo sapien
ggcagaggtcatagtcagcgccggg

SEQ ID NO: 3430002 - DNA, 25 bp, Homo sapien
cacagtgaagaccagtaaggcagcc

SEQ ID NO: 3430003 - DNA, 25 bp, Homo sapien
gtgaagaccagtaaggcagccacca

SEQ ID NO: 3430004 - DNA, 25 bp, Homo sapien
gaagaccagtaaggcagccaccagc

SEQ ID NO: 3430005 - DNA, 25 bp, Homo sapien
cagtgaagaccagtaaggcagccac

SEQ ID NO: 3430006 - DNA, 25 bp, Homo sapien
gagcttgagggggaggcggccattt

SEQ ID NO: 3430007 - DNA, 25 bp, Homo sapien
cttgagggggaggcggccatttccg

SEQ ID NO: 3430008 - DNA, 25 bp, Homo sapien
tgagggggaggcggccatttccggc

SEQ ID NO: 3430009 - DNA, 25 bp, Homo sapien
gtggctgagcttgagggggaggcgg

SEQ ID NO: 3430010 - DNA, 25 bp, Homo sapien
ggcctccattggtctgggactggac

SEQ ID NO: 3430011 - DNA, 25 bp, Homo sapien
gctggggcctccattggtctgggac

SEQ ID NO: 3430012 - DNA, 25 bp, Homo sapien
tggggcctccattggtctgggactg

SEQ ID NO: 3430013 - DNA, 25 bp, Homo sapien
gggcctccattggtctgggactgga

SEQ ID NO: 3430014 - DNA, 25 bp, Homo sapien
agccgctcggcgctgcctcctaccc

SEQ ID NO: 3430015 - DNA, 25 bp, Homo sapien
aggcgcctggcataaccgtagcacc

SEQ ID NO: 3430016 - DNA, 25 bp, Homo sapien
tcccaggcgcctggcataaccgtag

SEQ ID NO: 3430017 - DNA, 25 bp, Homo sapien
ggcataaccgtagcacccggcatct

SEQ ID NO: 3430018 - DNA, 25 bp, Homo sapien
tgccccacgaggctcatcccttgga

SEQ ID NO: 3430019 - DNA, 25 bp, Homo sapien
gagcacacaggaagctgcccgtcca

SEQ ID NO: 3430020 - DNA, 25 bp, Homo sapien
atcccttggagcacacaggaagctg

SEQ ID NO: 3430021 - DNA, 25 bp, Homo sapien
cttggagcacacaggaagctgcccg

SEQ ID NO: 3430022 - DNA, 25 bp, Homo sapien
gggagcctgaggtactgagaataaa

SEQ ID NO: 3430023 - DNA, 25 bp, Homo sapien
tgcccttaccctggtctggaggcca

SEQ ID NO: 3430024 - DNA, 25 bp, Homo sapien
ccagaaccgaggaaagggctccctg

SEQ ID NO: 3430025 - DNA, 25 bp, Homo sapien
tcggtggctgtgagcacctgttgga

SEQ ID NO: 3430026 - DNA, 25 bp, Homo sapien
gcccatgctcttgcaggtcagaaga

SEQ ID NO: 3430027 - DNA, 25 bp, Homo sapien
ccatgctcttgcaggtcagaagaca

SEQ ID NO: 3430028 - DNA, 25 bp, Homo sapien
caagcccatgctcttgcaggtcaga

SEQ ID NO: 3430029 - DNA, 25 bp, Homo sapien
gggtaggccgcctgcccaagcccat

SEQ ID NO: 3430030 - DNA, 25 bp, Homo sapien
gtgctccccaggctttacactggat

SEQ ID NO: 3430031 - DNA, 25 bp, Homo sapien
actggatacggcgtcctgtcgccac

SEQ ID NO: 3430032 - DNA, 25 bp, Homo sapien
aggctttacactggatacggcgtcc

SEQ ID NO: 3430033 - DNA, 25 bp, Homo sapien
acgtgctccccaggctttacactgg

SEQ ID NO: 3430034 - DNA, 25 bp, Homo sapien
gtctgtgcagcgtgtttgccgtggc

SEQ ID NO: 3430035 - DNA, 25 bp, Homo sapien
caccagggagtctgtgcagcgtgtt

SEQ ID NO: 3430036 - DNA, 25 bp, Homo sapien
gctgcccggtggcagcgccttggcc

SEQ ID NO: 3430037 - DNA, 25 bp, Homo sapien
gagttttcatacagcacctggggga

SEQ ID NO: 3430038 - DNA, 25 bp, Homo sapien
taaaccaggctctcgaagcccacct

SEQ ID NO: 3430039 - DNA, 25 bp, Homo sapien
tctctgtcgaggaccttgctcccat

SEQ ID NO: 3430040 - DNA, 25 bp, Homo sapien
gcccacctctagctgcatgttctgg

SEQ ID NO: 3430041 - DNA, 25 bp, Homo sapien
tgctcccattcatctaaaccaggct

SEQ ID NO: 3430042 - DNA, 25 bp, Homo sapien
tagtgggcagcatccgataactcgc

SEQ ID NO: 3430043 - DNA, 25 bp, Homo sapien
gatagcagggtgataacgtctgacg

SEQ ID NO: 3430044 - DNA, 25 bp, Homo sapien
tctgagcagggtgtctccacacctg

SEQ ID NO: 3430045 - DNA, 25 bp, Homo sapien
tggtgctcccggcacctcttgagca

SEQ ID NO: 3430046 - DNA, 25 bp, Homo sapien
ggttctgttagtaaagccctctgca

SEQ ID NO: 3430047 - DNA, 25 bp, Homo sapien
ccttgaagagttgcggctcagctcg

SEQ ID NO: 3430048 - DNA, 25 bp, Homo sapien
caaacttgacaaccttgagaacttc

SEQ ID NO: 3430049 - DNA, 25 bp, Homo sapien
tgattgccatccaccaaccaaatac

SEQ ID NO: 3430050 - DNA, 25 bp, Homo sapien
gggaatgctgagttattgatctgaa

SEQ ID NO: 3430051 - DNA, 25 bp, Homo sapien
tcagcctgcaggtcgtcgtaggtgc

SEQ ID NO: 3430052 - DNA, 25 bp, Homo sapien
ggccgggcaccaggtggagctcagt

SEQ ID NO: 3430053 - DNA, 25 bp, Homo sapien
ttgtgtgctatggaagcggcagctc

SEQ ID NO: 3430054 - DNA, 25 bp, Homo sapien
agcagctcttaggtggcgccctgcc

SEQ ID NO: 3430055 - DNA, 25 bp, Homo sapien
ggttgcaagaggcatcctgggagat

SEQ ID NO: 3430056 - DNA, 25 bp, Homo sapien
tgatggcctgacagcaggattctgt

SEQ ID NO: 3430057 - DNA, 25 bp, Homo sapien
tgcagcagctcttaggtggcgccct

SEQ ID NO: 3430058 - DNA, 25 bp, Homo sapien
tggtgtagcgggtaggcgcctgaca

SEQ ID NO: 3430059 - DNA, 25 bp, Homo sapien
gcagaaaagtaaggcctggcgagtc

SEQ ID NO: 3430060 - DNA, 25 bp, Homo sapien
aactgttatattcggatgaacaccc

SEQ ID NO: 3430061 - DNA, 25 bp, Homo sapien
gaacacccccctgctaatgtggagc

SEQ ID NO: 3430062 - DNA, 25 bp, Homo sapien
ttttcccattatccttccaaagctc

SEQ ID NO: 3430063 - DNA, 25 bp, Homo sapien
ttagaatgcttgtctcttgagggca

SEQ ID NO: 3430064 - DNA, 25 bp, Homo sapien
tagaatgcttgtctcttgagggcag

SEQ ID NO: 3430065 - DNA, 25 bp, Homo sapien
ttcccattatccttccaaagctcca

SEQ ID NO: 3430066 - DNA, 25 bp, Homo sapien
ggaagggaagcagaaagctgcttat

SEQ ID NO: 3430067 - DNA, 25 bp, Homo sapien
gggaagcagaaagctgcttattgtc

SEQ ID NO: 3430068 - DNA, 25 bp, Homo sapien
gaagcagaaagctgcttattgtcat

SEQ ID NO: 3430069 - DNA, 25 bp, Homo sapien
aagggaagcagaaagctgcttattg

SEQ ID NO: 3430070 - DNA, 25 bp, Homo sapien
gggacacctgttccgaagatcatgt

SEQ ID NO: 3430071 - DNA, 25 bp, Homo sapien
gcagggacacctgttccgaagatca

SEQ ID NO: 3430072 - DNA, 25 bp, Homo sapien
aggcagcttctcttcgggggggagc

SEQ ID NO: 3430073 - DNA, 25 bp, Homo sapien
acctgttccgaagatcatgtcctgc

SEQ ID NO: 3430074 - DNA, 25 bp, Homo sapien
ctcctggaccatcccaggctctagg

SEQ ID NO: 3430075 - DNA, 25 bp, Homo sapien
aggaggtcctcctggaccatcccag

SEQ ID NO: 3430076 - DNA, 25 bp, Homo sapien
cagcttccagtttgtccccttcctg

SEQ ID NO: 3430077 - DNA, 25 bp, Homo sapien
tggaccatcccaggctctaggctgc

SEQ ID NO: 3430078 - DNA, 25 bp, Homo sapien
ccctgtctgagacccctgttttagc

SEQ ID NO: 3430079 - DNA, 25 bp, Homo sapien
caagcttggacaagatggtttatca

SEQ ID NO: 3430080 - DNA, 25 bp, Homo sapien
tggtttatcagagtcagggttaaag

SEQ ID NO: 3430081 - DNA, 25 bp, Homo sapien
acagcaagcttggacaagatggttt

SEQ ID NO: 3430082 - DNA, 25 bp, Homo sapien
caatcctgctatcttagcctcacaa

SEQ ID NO: 3430083 - DNA, 25 bp, Homo sapien
aatcctgctatcttagcctcacaaa

SEQ ID NO: 3430084 - DNA, 25 bp, Homo sapien
ttttctttccccgatggctagcttc

SEQ ID NO: 3430085 - DNA, 25 bp, Homo sapien
cagttttctttccccgatggctagc

SEQ ID NO: 3430086 - DNA, 25 bp, Homo sapien
ttccaagaaaagatctgtgtctggt

SEQ ID NO: 3430087 - DNA, 25 bp, Homo sapien
tttccccgatggctagcttctccag

SEQ ID NO: 3430088 - DNA, 25 bp, Homo sapien
tgcgctgcaagagtttttcgtcccc

SEQ ID NO: 3430089 - DNA, 25 bp, Homo sapien
gacttaggtttttgcgctgcaagag

SEQ ID NO: 3430090 - DNA, 25 bp, Homo sapien
acatgtggcccaatgtgagtaagag

SEQ ID NO: 3430091 - DNA, 25 bp, Homo sapien
ccaatgtgagtaagagcagaggttt

SEQ ID NO: 3430092 - DNA, 25 bp, Homo sapien
ataactagatgcagaattgcattcc

SEQ ID NO: 3430093 - DNA, 25 bp, Homo sapien
tagaaatctgcgtcttggatgataa

SEQ ID NO: 3430094 - DNA, 25 bp, Homo sapien
tgagtggacctggttgagaattatt

SEQ ID NO: 3430095 - DNA, 25 bp, Homo sapien
gtcctggtcactgggtatggcccca

SEQ ID NO: 3430096 - DNA, 25 bp, Homo sapien
tccttgtcctgatatgcctcgaggc

SEQ ID NO: 3430097 - DNA, 25 bp, Homo sapien
cacgggacagctgggagtacatttc

SEQ ID NO: 3430098 - DNA, 25 bp, Homo sapien
tgtggaagggcctgactgcttctgt

SEQ ID NO: 3430099 - DNA, 25 bp, Homo sapien
catgacatcacaacgaggctttggg

SEQ ID NO: 3430100 - DNA, 25 bp, Homo sapien
ctaagggtaagtcctgtgcctgaat

SEQ ID NO: 3430101 - DNA, 25 bp, Homo sapien
cactaagggtaagtcctgtgcctga

SEQ ID NO: 3430102 - DNA, 25 bp, Homo sapien
ggcgggatgcatgggggtcttcacc

SEQ ID NO: 3430103 - DNA, 25 bp, Homo sapien
caaacactaagggtaagtcctgtgc

SEQ ID NO: 3430104 - DNA, 25 bp, Homo sapien
ttcagataaaacgaactgtttctag

SEQ ID NO: 3430105 - DNA, 25 bp, Homo sapien
gcctgaggctggacggagtgggcag

SEQ ID NO: 3430106 - DNA, 25 bp, Homo sapien
gagatgcagagaaagcgggcctgag

SEQ ID NO: 3430107 - DNA, 25 bp, Homo sapien
aaagcacttcagataaaacgaactg

SEQ ID NO: 3430108 - DNA, 25 bp, Homo sapien
caagttgtggagtgagagaagaacc

SEQ ID NO: 3430109 - DNA, 25 bp, Homo sapien
ccagtattcagagggagctcctgaa

SEQ ID NO: 3430110 - DNA, 25 bp, Homo sapien
gtcacgtaagacagctccttattag

SEQ ID NO: 3430111 - DNA, 25 bp, Homo sapien
gctccttattagtttcaagttgtgg

SEQ ID NO: 3430112 - DNA, 25 bp, Homo sapien
gaacagggatttgagcttgctggcc

SEQ ID NO: 3430113 - DNA, 25 bp, Homo sapien
ggctcccatgggcataaacacgagg

SEQ ID NO: 3430114 - DNA, 25 bp, Homo sapien
cgaggtgggctcttacttatggcag

SEQ ID NO: 3430115 - DNA, 25 bp, Homo sapien
gattacacaataccaactgtgggct

SEQ ID NO: 3430116 - DNA, 25 bp, Homo sapien
ggcgccaaggcttaaacgtgacgga

SEQ ID NO: 3430117 - DNA, 25 bp, Homo sapien
acgcttatgtaagggtcgcgcgcgc

SEQ ID NO: 3430118 - DNA, 25 bp, Homo sapien
acggagaacactgcccaataacggg

SEQ ID NO: 3430119 - DNA, 25 bp, Homo sapien
ggttgcacggagaccgcagctgttc

SEQ ID NO: 3430120 - DNA, 25 bp, Homo sapien
acagcataccagcaagttcagacag

SEQ ID NO: 3430121 - DNA, 25 bp, Homo sapien
catgagagtggccttggagagcttc

SEQ ID NO: 3430122 - DNA, 25 bp, Homo sapien
tggccttggagagcttcatgaagga

SEQ ID NO: 3430123 - DNA, 25 bp, Homo sapien
cttcatgaaggagacaatggctggg

SEQ ID NO: 3430124 - DNA, 25 bp, Homo sapien
gcttcatgaaggagacaatggctgg

SEQ ID NO: 3430125 - DNA, 25 bp, Homo sapien
ctttgtgagtgcacttcacccttgc

SEQ ID NO: 3430126 - DNA, 25 bp, Homo sapien
cttgcatccctctggaacttatcct

SEQ ID NO: 3430127 - DNA, 25 bp, Homo sapien
acccttgcatccctctggaacttat

SEQ ID NO: 3430128 - DNA, 25 bp, Homo sapien
gcatccctctggaacttatcctcat

SEQ ID NO: 3430129 - DNA, 25 bp, Homo sapien
ctaggcaggcctctcggagaagatg

SEQ ID NO: 3430130 - DNA, 25 bp, Homo sapien
caggcctctcggagaagatgatgtt

SEQ ID NO: 3430131 - DNA, 25 bp, Homo sapien
gatgttggagcccagtcccgagagc

SEQ ID NO: 3430132 - DNA, 25 bp, Homo sapien
tcgccagaaccttgagaattagaca

SEQ ID NO: 3430133 - DNA, 25 bp, Homo sapien
ggcatccattgacactgagcaccat

SEQ ID NO: 3430134 - DNA, 25 bp, Homo sapien
ggccccggcatccattgacactgag

SEQ ID NO: 3430135 - DNA, 25 bp, Homo sapien
ctctgaatctctatggccccggcat

SEQ ID NO: 3430136 - DNA, 25 bp, Homo sapien
gaagagtttgttctcctctgaatct

SEQ ID NO: 3430137 - DNA, 25 bp, Homo sapien
gcaggcacaggactgctccggcccc

SEQ ID NO: 3430138 - DNA, 25 bp, Homo sapien
aggcacaggactgctccggcccctc

SEQ ID NO: 3430139 - DNA, 25 bp, Homo sapien
gcacaggactgctccggcccctcag

SEQ ID NO: 3430140 - DNA, 25 bp, Homo sapien
ctgctccggcccctcagcaagacac

SEQ ID NO: 3430141 - DNA, 25 bp, Homo sapien
tggacttctcttgcccctgtctgag

SEQ ID NO: 3430142 - DNA, 25 bp, Homo sapien
gggctctcgcaaggactgacttcgc

SEQ ID NO: 3430143 - DNA, 25 bp, Homo sapien
tcttcgctgggcttggatcagctgc

SEQ ID NO: 3430144 - DNA, 25 bp, Homo sapien
tgtctgaggcttagcgccctgcgga

SEQ ID NO: 3430145 - DNA, 25 bp, Homo sapien
ccctccatccttcagcccacagcca

SEQ ID NO: 3430146 - DNA, 25 bp, Homo sapien
tgctgtggtaccctccatccttcag

SEQ ID NO: 3430147 - DNA, 25 bp, Homo sapien
ctgctgtggtaccctccatccttca

SEQ ID NO: 3430148 - DNA, 25 bp, Homo sapien
tccatccttcagcccacagccatac

SEQ ID NO: 3430149 - DNA, 25 bp, Homo sapien
ccggctgactcagagtcacgctggg

SEQ ID NO: 3430150 - DNA, 25 bp, Homo sapien
gaggccggctgactcagagtcacgc

SEQ ID NO: 3430151 - DNA, 25 bp, Homo sapien
ggccggctgactcagagtcacgctg

SEQ ID NO: 3430152 - DNA, 25 bp, Homo sapien
ggctgactcagagtcacgctgggga

SEQ ID NO: 3430153 - DNA, 25 bp, Homo sapien
caggacaccgtgaggttcaaaggtt

SEQ ID NO: 3430154 - DNA, 25 bp, Homo sapien
tactgtgttcgactccagtgctgga

SEQ ID NO: 3430155 - DNA, 25 bp, Homo sapien
tcatcaagctccgtcctggaagttg

SEQ ID NO: 3430156 - DNA, 25 bp, Homo sapien
catagaatcatagtccaaggcccct

SEQ ID NO: 3430157 - DNA, 25 bp, Homo sapien
agtatgtgcaagcagtatgtgcaag

SEQ ID NO: 3430158 - DNA, 25 bp, Homo sapien
cctccacacccgatgtctaagtgcc

SEQ ID NO: 3430159 - DNA, 25 bp, Homo sapien
tgcaagcagtatgtgcaaggccgag

SEQ ID NO: 3430160 - DNA, 25 bp, Homo sapien
catccctgaggatgagatacttgag

SEQ ID NO: 3430161 - DNA, 25 bp, Homo sapien
gaccgtgaagttcgtatgtgcagac

SEQ ID NO: 3430162 - DNA, 25 bp, Homo sapien
cgtgaagttcgtatgtgcagacaaa

SEQ ID NO: 3430163 - DNA, 25 bp, Homo sapien
accgtgaagttcgtatgtgcagaca

SEQ ID NO: 3430164 - DNA, 25 bp, Homo sapien
ccgtgaagttcgtatgtgcagacaa

SEQ ID NO: 3430165 - DNA, 25 bp, Homo sapien
tcaaagcctggtaagtagtgagctc

SEQ ID NO: 3430166 - DNA, 25 bp, Homo sapien
gcctggtaagtagtgagctccccag

SEQ ID NO: 3430167 - DNA, 25 bp, Homo sapien
cagatcaaagcctggtaagtagtga

SEQ ID NO: 3430168 - DNA, 25 bp, Homo sapien
ctggtaagtagtgagctccccagcc

SEQ ID NO: 3430169 - DNA, 25 bp, Homo sapien
cctccagcttgtgtccttcggctgc

SEQ ID NO: 3430170 - DNA, 25 bp, Homo sapien
tccagcttgtgtccttcggctgcca

SEQ ID NO: 3430171 - DNA, 25 bp, Homo sapien
tcctccagcttgtgtccttcggctg

SEQ ID NO: 3430172 - DNA, 25 bp, Homo sapien
ctcctccagcttgtgtccttcggct

SEQ ID NO: 3430173 - DNA, 25 bp, Homo sapien
tgctggccagggtctgacgagacct

SEQ ID NO: 3430174 - DNA, 25 bp, Homo sapien
tcagctcctggacattggcctttgt

SEQ ID NO: 3430175 - DNA, 25 bp, Homo sapien
tcccctgagggcctcttgcctctca

SEQ ID NO: 3430176 - DNA, 25 bp, Homo sapien
ttctctgtccttcccctgagggcct

SEQ ID NO: 3430177 - DNA, 25 bp, Homo sapien
gcagcgctgccaaatgtccataaag

SEQ ID NO: 3430178 - DNA, 25 bp, Homo sapien
attgcaaggcacctcaaggcagcag

SEQ ID NO: 3430179 - DNA, 25 bp, Homo sapien
agtaacagaaaaccgctcaagctgg

SEQ ID NO: 3430180 - DNA, 25 bp, Homo sapien
cagggttggagagaccattatgagc

SEQ ID NO: 3430181 - DNA, 25 bp, Homo sapien
ggcccactcccgtaacttgctcatc

SEQ ID NO: 3430182 - DNA, 25 bp, Homo sapien
atgcggcccactcccgtaacttgct

SEQ ID NO: 3430183 - DNA, 25 bp, Homo sapien
catgcggcccactcccgtaacttgc

SEQ ID NO: 3430184 - DNA, 25 bp, Homo sapien
ccactcccgtaacttgctcatcctt

SEQ ID NO: 3430185 - DNA, 25 bp, Homo sapien
cttagggatgagtgtcttctgggct

SEQ ID NO: 3430186 - DNA, 25 bp, Homo sapien
tcagtctcaggctccccttagggat

SEQ ID NO: 3430187 - DNA, 25 bp, Homo sapien
cgacgcagggcatgagagttcctca

SEQ ID NO: 3430188 - DNA, 25 bp, Homo sapien
aagtgttcagtggagcaccccacac

SEQ ID NO: 3430189 - DNA, 25 bp, Homo sapien
gcctccatgcttttactcgatgcag

SEQ ID NO: 3430190 - DNA, 25 bp, Homo sapien
cttcttgtccggctgtcactgtcca

SEQ ID NO: 3430191 - DNA, 25 bp, Homo sapien
gcttctttccagaggatgtaaactc

SEQ ID NO: 3430192 - DNA, 25 bp, Homo sapien
tgtccacgggccatacactttaagc

SEQ ID NO: 3430193 - DNA, 25 bp, Homo sapien
ctgggcagccagttaagatggagct

SEQ ID NO: 3430194 - DNA, 25 bp, Homo sapien
ggtgtcaccagcagggtactgggca

SEQ ID NO: 3430195 - DNA, 25 bp, Homo sapien
cagccagttaagatggagctggaac

SEQ ID NO: 3430196 - DNA, 25 bp, Homo sapien
cagggtactgggcagccagttaaga

SEQ ID NO: 3430197 - DNA, 25 bp, Homo sapien
tccactttcccaggtctggaattcc

SEQ ID NO: 3430198 - DNA, 25 bp, Homo sapien
ctccactttcccaggtctggaattc

SEQ ID NO: 3430199 - DNA, 25 bp, Homo sapien
ttgaggcctttaggagaaagaagac

SEQ ID NO: 3430200 - DNA, 25 bp, Homo sapien
tgacatatttgtgtggcgtgctgtg

SEQ ID NO: 3430201 - DNA, 25 bp, Homo sapien
gaaagaagacccaggccctaggcaa

SEQ ID NO: 3430202 - DNA, 25 bp, Homo sapien
tgtgtgttatgtgacatatttgtgt

SEQ ID NO: 3430203 - DNA, 25 bp, Homo sapien
tccatagcacagatcattggagagc

SEQ ID NO: 3430204 - DNA, 25 bp, Homo sapien
ccatagcacagatcattggagagca

SEQ ID NO: 3430205 - DNA, 25 bp, Homo sapien
cacccacagggggcgcttttgtctt

SEQ ID NO: 3430206 - DNA, 25 bp, Homo sapien
acagggggcgcttttgtcttcattt

SEQ ID NO: 3430207 - DNA, 25 bp, Homo sapien
ttcacccacagggggcgcttttgtc

SEQ ID NO: 3430208 - DNA, 25 bp, Homo sapien
ccacagggggcgcttttgtcttcat

SEQ ID NO: 3430209 - DNA, 25 bp, Homo sapien
ctccgcgccctgggttatcctgttc

SEQ ID NO: 3430210 - DNA, 25 bp, Homo sapien
tccgcgccctgggttatcctgttct

SEQ ID NO: 3430211 - DNA, 25 bp, Homo sapien
cgcgccctgggttatcctgttctct

SEQ ID NO: 3430212 - DNA, 25 bp, Homo sapien
ccgcgccctgggttatcctgttctc

SEQ ID NO: 3430213 - DNA, 25 bp, Homo sapien
gaatttaaagtgacaagctcgagcg

SEQ ID NO: 3430214 - DNA, 25 bp, Homo sapien
gggtccgagccggagatccccaagc

SEQ ID NO: 3430215 - DNA, 25 bp, Homo sapien
ggagatccccaagcgcgtccgggat

SEQ ID NO: 3430216 - DNA, 25 bp, Homo sapien
cgcccgctccctcttgaatttaaag

SEQ ID NO: 3430217 - DNA, 25 bp, Homo sapien
gctcccgctggcagcctggaggtct

SEQ ID NO: 3430218 - DNA, 25 bp, Homo sapien
ccaggcagaaggactgtgtctttgg

SEQ ID NO: 3430219 - DNA, 25 bp, Homo sapien
tgggaccacctcagtgggctcccgc

SEQ ID NO: 3430220 - DNA, 25 bp, Homo sapien
cagcctggaggtctgccaggcagaa

SEQ ID NO: 3430221 - DNA, 25 bp, Homo sapien
actgatctcaggtcaagggcaccga

SEQ ID NO: 3430222 - DNA, 25 bp, Homo sapien
taatagagaaccttgtcgagccctt

SEQ ID NO: 3430223 - DNA, 25 bp, Homo sapien
ccttgccgggaatcagataagccat

SEQ ID NO: 3430224 - DNA, 25 bp, Homo sapien
aaggtggtcctagctcctggcggaa

SEQ ID NO: 3430225 - DNA, 25 bp, Homo sapien
cgctcagatggtattctgccacatc

SEQ ID NO: 3430226 - DNA, 25 bp, Homo sapien
agatggtattctgccacatccacag

SEQ ID NO: 3430227 - DNA, 25 bp, Homo sapien
gctcagatggtattctgccacatcc

SEQ ID NO: 3430228 - DNA, 25 bp, Homo sapien
tcagatggtattctgccacatccac

SEQ ID NO: 3430229 - DNA, 25 bp, Homo sapien
ctttcaagtgaaagagagaaagtca

SEQ ID NO: 3430230 - DNA, 25 bp, Homo sapien
tcacaggctcatccccagggtgcag

SEQ ID NO: 3430231 - DNA, 25 bp, Homo sapien
gcctcggtgagtggattccgagtca

SEQ ID NO: 3430232 - DNA, 25 bp, Homo sapien
gtggattccgagtcacaggctcatc

SEQ ID NO: 3430233 - DNA, 25 bp, Homo sapien
gacagtctccacagaaggcctcggt

SEQ ID NO: 3430234 - DNA, 25 bp, Homo sapien
aagtcacgcagcacatagtcacggg

SEQ ID NO: 3430235 - DNA, 25 bp, Homo sapien
tgtgcaaagcgctgccactggaaga

SEQ ID NO: 3430236 - DNA, 25 bp, Homo sapien
tctaggcgaagaccagaaacgagtg

SEQ ID NO: 3430237 - DNA, 25 bp, Homo sapien
cctgagggtgaaaagtgcggctccc

SEQ ID NO: 3430238 - DNA, 25 bp, Homo sapien
ctgcaaggcaagggcagcctctcat

SEQ ID NO: 3430239 - DNA, 25 bp, Homo sapien
agctctcgccgtacttctgctgaag

SEQ ID NO: 3430240 - DNA, 25 bp, Homo sapien
ggaagctccccgacgtccagagctt

SEQ ID NO: 3430241 - DNA, 25 bp, Homo sapien
tctgctgaaggtacctgtagtcgta

SEQ ID NO: 3430242 - DNA, 25 bp, Homo sapien
acaggctcacagctgcgattcccag

SEQ ID NO: 3430243 - DNA, 25 bp, Homo sapien
tgacgcgcatgaagcaggactcgaa

SEQ ID NO: 3430244 - DNA, 25 bp, Homo sapien
tcaatgctgagactgcctttgcggc

SEQ ID NO: 3430245 - DNA, 25 bp, Homo sapien
tgcccaaaggtgttgctcacggagg

SEQ ID NO: 3430246 - DNA, 25 bp, Homo sapien
gaggcagtgtcgtactccatgctca

SEQ ID NO: 3430247 - DNA, 25 bp, Homo sapien
ctgcagcgggaggtcaagcacagaa

SEQ ID NO: 3430248 - DNA, 25 bp, Homo sapien
tgacgttgcgctcatcctcatcgat

SEQ ID NO: 3430249 - DNA, 25 bp, Homo sapien
tacagaaaaccgcaggctcttctcc

SEQ ID NO: 3430250 - DNA, 25 bp, Homo sapien
ggtcctgtaaatagagccagccact

SEQ ID NO: 3430251 - DNA, 25 bp, Homo sapien
gagagcaggatctcccccacagcat

SEQ ID NO: 3430252 - DNA, 25 bp, Homo sapien
cacgaccacggtgaggcgctcggct

SEQ ID NO: 3430253 - DNA, 25 bp, Homo sapien
cttggccttaaccacgaccacggtg

SEQ ID NO: 3430254 - DNA, 25 bp, Homo sapien
tgaggttcttggccttaaccacgac

SEQ ID NO: 3430255 - DNA, 25 bp, Homo sapien
gctggcaccgagaagatcatggctt

SEQ ID NO: 3430256 - DNA, 25 bp, Homo sapien
catggcttcgttgaacaccgggttg

SEQ ID NO: 3430257 - DNA, 25 bp, Homo sapien
ccgagaagatcatggcttcgttgaa

SEQ ID NO: 3430258 - DNA, 25 bp, Homo sapien
tgcagcaggtacaccttgacgaagg

SEQ ID NO: 3430259 - DNA, 25 bp, Homo sapien
cgcagcgtggccaacatctggttcc

SEQ ID NO: 3430260 - DNA, 25 bp, Homo sapien
tggctgacggcccaatgatgacatg

SEQ ID NO: 3430261 - DNA, 25 bp, Homo sapien
gatgacatggcccacgttgtcccca

SEQ ID NO: 3430262 - DNA, 25 bp, Homo sapien
ctagtttcgccggacagcgtgccac

SEQ ID NO: 3430263 - DNA, 25 bp, Homo sapien
ggaactcaagctaggagacccggtg

SEQ ID NO: 3430264 - DNA, 25 bp, Homo sapien
tgatgccagtagaggtgcaacagcc

SEQ ID NO: 3430265 - DNA, 25 bp, Homo sapien
caaggcgatggatcttgaagccaca

SEQ ID NO: 3430266 - DNA, 25 bp, Homo sapien
tgcgcaggactgagcacaaggacct

SEQ ID NO: 3430267 - DNA, 25 bp, Homo sapien
ctgcggcgcagagacccagactgcg

SEQ ID NO: 3430268 - DNA, 25 bp, Homo sapien
gcagagacccagactgcgcggggca

SEQ ID NO: 3430269 - DNA, 25 bp, Homo sapien
ggcgcagagacccagactgcgcggg

SEQ ID NO: 3430270 - DNA, 25 bp, Homo sapien
gcggcgcagagacccagactgcgcg

SEQ ID NO: 3430271 - DNA, 25 bp, Homo sapien
accaggaccaccttgacggaccgca

SEQ ID NO: 3430272 - DNA, 25 bp, Homo sapien
ggaaggccccatcggcgaagaccat

SEQ ID NO: 3430273 - DNA, 25 bp, Homo sapien
gggaaggccccatcggcgaagacca

SEQ ID NO: 3430274 - DNA, 25 bp, Homo sapien
cttgacggaccgcacgcctggtggc

SEQ ID NO: 3430275 - DNA, 25 bp, Homo sapien
ccatgtaccgctcaaacaccgtggg

SEQ ID NO: 3430276 - DNA, 25 bp, Homo sapien
ctttcacttgcaggttgaccatgta

SEQ ID NO: 3430277 - DNA, 25 bp, Homo sapien
atgtggaggtgcacaggtttgcctt

SEQ ID NO: 3430278 - DNA, 25 bp, Homo sapien
gcaggttgaccatgtaccgctcaaa

SEQ ID NO: 3430279 - DNA, 25 bp, Homo sapien
ggtgacatcgaagcaaagcagcagg

SEQ ID NO: 3430280 - DNA, 25 bp, Homo sapien
gacgctggcgtcagggtagaacagg

SEQ ID NO: 3430281 - DNA, 25 bp, Homo sapien
tcgggctggtgacatcgaagcaaag

SEQ ID NO: 3430282 - DNA, 25 bp, Homo sapien
ttgtcaaagctgttcgggctggtga

SEQ ID NO: 3430283 - DNA, 25 bp, Homo sapien
ctgatatggataatcagcaaagcca

SEQ ID NO: 3430284 - DNA, 25 bp, Homo sapien
gagctctgatatggataatcagcaa

SEQ ID NO: 3430285 - DNA, 25 bp, Homo sapien
ccagcctgagctctgatatggataa

SEQ ID NO: 3430286 - DNA, 25 bp, Homo sapien
tatggataatcagcaaagccagcac

SEQ ID NO: 3430287 - DNA, 25 bp, Homo sapien
agaaatgattcacttctgggtacca

SEQ ID NO: 3430288 - DNA, 25 bp, Homo sapien
cacaggctccaatccgtttcttcgg

SEQ ID NO: 3430289 - DNA, 25 bp, Homo sapien
gacgatgatgggtaccttcttgcag

SEQ ID NO: 3430290 - DNA, 25 bp, Homo sapien
agtcttgcagcccacgacgatgatg

SEQ ID NO: 3430291 - DNA, 25 bp, Homo sapien
gagccgagcactcgaggtaggccac

SEQ ID NO: 3430292 - DNA, 25 bp, Homo sapien
cctcctggaagacggcgtggacgtt

SEQ ID NO: 3430293 - DNA, 25 bp, Homo sapien
aggtcaccacgcaaaagccctgggt

SEQ ID NO: 3430294 - DNA, 25 bp, Homo sapien
gtaatccgccgccagaagttgcgac

SEQ ID NO: 3430295 - DNA, 25 bp, Homo sapien
ggccagagggacctaagaacattag

SEQ ID NO: 3430296 - DNA, 25 bp, Homo sapien
agttcggcggtcacagcctagggac

SEQ ID NO: 3430297 - DNA, 25 bp, Homo sapien
ttagcgagtgattctcgggcaccgc

SEQ ID NO: 3430298 - DNA, 25 bp, Homo sapien
aggacgagccctacacagagcaggt

SEQ ID NO: 3430299 - DNA, 25 bp, Homo sapien
cgaaagttccatggcttagtctgtg

SEQ ID NO: 3430300 - DNA, 25 bp, Homo sapien
tggatccaagcagtcccatcccagt

SEQ ID NO: 3430301 - DNA, 25 bp, Homo sapien
tgaccctcttactcatccgaaagtt

SEQ ID NO: 3430302 - DNA, 25 bp, Homo sapien
gcccaaggtcgtggaagcaataaag

SEQ ID NO: 3430303 - DNA, 25 bp, Homo sapien
ggcatctcatcaatcaagcgtctgg

SEQ ID NO: 3430304 - DNA, 25 bp, Homo sapien
gtgtctgggtcaaaccacgtggtct

SEQ ID NO: 3430305 - DNA, 25 bp, Homo sapien
tcccagcacgtgtcctcagtgaagt

SEQ ID NO: 3430306 - DNA, 25 bp, Homo sapien
gagctcggttcctcactgaccttga

SEQ ID NO: 3430307 - DNA, 25 bp, Homo sapien
tgtgagtggttatcctccaaaggac

SEQ ID NO: 3430308 - DNA, 25 bp, Homo sapien
tggtttcctaaccagcggctgagcg

SEQ ID NO: 3430309 - DNA, 25 bp, Homo sapien
ggagattacgcccttgaatgcatgg

SEQ ID NO: 3430310 - DNA, 25 bp, Homo sapien
taatcagcagcattaccgtggagat

SEQ ID NO: 3430311 - DNA, 25 bp, Homo sapien
tgctggattccccaatgcctagaac

SEQ ID NO: 3430312 - DNA, 25 bp, Homo sapien
ggcatagttggcactcattccttca

SEQ ID NO: 3430313 - DNA, 25 bp, Homo sapien
tactgagtacactgtgcccaatgct

SEQ ID NO: 3430314 - DNA, 25 bp, Homo sapien
tgcacttggatataagccccgtggg

SEQ ID NO: 3430315 - DNA, 25 bp, Homo sapien
cccagtcgcagaagagggattccgg

SEQ ID NO: 3430316 - DNA, 25 bp, Homo sapien
ggaggggtgttgtttccctcacaca

SEQ ID NO: 3430317 - DNA, 25 bp, Homo sapien
gccgccattttgaacccgtcagact

SEQ ID NO: 3430318 - DNA, 25 bp, Homo sapien
cgctgggaaggtgctccgagagccg

SEQ ID NO: 3430319 - DNA, 25 bp, Homo sapien
agcagcggccgatcagctgagaccg

SEQ ID NO: 3430320 - DNA, 25 bp, Homo sapien
tgctgaatcaaaccttctcttctgg

SEQ ID NO: 3430321 - DNA, 25 bp, Homo sapien
gaagtaaaagattccaaagctgaga

SEQ ID NO: 3430322 - DNA, 25 bp, Homo sapien
tccgtggatcaacccagtatccaga

SEQ ID NO: 3430323 - DNA, 25 bp, Homo sapien
tactgtaaagaaaccactccagggc

SEQ ID NO: 3430324 - DNA, 25 bp, Homo sapien
tctctggctgtaacgaatcctttct

SEQ ID NO: 3430325 - DNA, 25 bp, Homo sapien
ctgtaacgaatcctttcttcttcgg

SEQ ID NO: 3430326 - DNA, 25 bp, Homo sapien
tctggctgtaacgaatcctttcttc

SEQ ID NO: 3430327 - DNA, 25 bp, Homo sapien
caatctctggctgtaacgaatcctt

SEQ ID NO: 3430328 - DNA, 25 bp, Homo sapien
caaaaaatgacttgttgggaggcca

SEQ ID NO: 3430329 - DNA, 25 bp, Homo sapien
agtccttaactagttatttctgatt

SEQ ID NO: 3430330 - DNA, 25 bp, Homo sapien
aaaaaacaatctgtgtgtgagaaac

SEQ ID NO: 3430331 - DNA, 25 bp, Homo sapien
aaacaatctgtgtgtgagaaacggg

SEQ ID NO: 3430332 - DNA, 25 bp, Homo sapien
ccggccaaaaaacaatctgtgtgtg

SEQ ID NO: 3430333 - DNA, 25 bp, Homo sapien
ctgtgtgtgagaaacgggggtctat

SEQ ID NO: 3430334 - DNA, 25 bp, Homo sapien
cctgagcagcccgaacagggatagc

SEQ ID NO: 3430335 - DNA, 25 bp, Homo sapien
cagggatagcctgcctttacagaaa

SEQ ID NO: 3430336 - DNA, 25 bp, Homo sapien
gattgacaagcacaccaggcatagt

SEQ ID NO: 3430337 - DNA, 25 bp, Homo sapien
tcaagattgacaagcacaccaggca

SEQ ID NO: 3430338 - DNA, 25 bp, Homo sapien
tacactgcaagacccaatatccaga

SEQ ID NO: 3430339 - DNA, 25 bp, Homo sapien
tctgacatgtgtgctacacatacgt

SEQ ID NO: 3430340 - DNA, 25 bp, Homo sapien
ccactctagtggcttaatcctagca

SEQ ID NO: 3430341 - DNA, 25 bp, Homo sapien
catcaatgtggtagtctgacatgtg

SEQ ID NO: 3430342 - DNA, 25 bp, Homo sapien
tagaaagctttggtgcaagaaaaaa

SEQ ID NO: 3430343 - DNA, 25 bp, Homo sapien
gaataggagagcttaaaattcagac

SEQ ID NO: 3430344 - DNA, 25 bp, Homo sapien
cctgagtgaccacagtgaaactgtc

SEQ ID NO: 3430345 - DNA, 25 bp, Homo sapien
ggagagcttaaaattcagactaaac

SEQ ID NO: 3430346 - DNA, 25 bp, Homo sapien
gaaggaggccttcaccaatgtattt

SEQ ID NO: 3430347 - DNA, 25 bp, Homo sapien
ctgaaggaggccttcaccaatgtat

SEQ ID NO: 3430348 - DNA, 25 bp, Homo sapien
tgaaggaggccttcaccaatgtatt

SEQ ID NO: 3430349 - DNA, 25 bp, Homo sapien
tacattccagcctcggcaacagatt

SEQ ID NO: 3430350 - DNA, 25 bp, Homo sapien
cactacattccagcctcggcaacag

SEQ ID NO: 3430351 - DNA, 25 bp, Homo sapien
ccgagatcgcaccactacattccag

SEQ ID NO: 3430352 - DNA, 25 bp, Homo sapien
cccaagaggcagaggtttaagtgag

SEQ ID NO: 3430353 - DNA, 25 bp, Homo sapien
ttcagtacgtttggggtaggatcca

SEQ ID NO: 3430354 - DNA, 25 bp, Homo sapien
gtaggatccaagaatgtagtggcac

SEQ ID NO: 3430355 - DNA, 25 bp, Homo sapien
aaacacaggctgttgagtccccact

SEQ ID NO: 3430356 - DNA, 25 bp, Homo sapien
tagttgaaacacaggctgttgagtc

SEQ ID NO: 3430357 - DNA, 25 bp, Homo sapien
gtcctgtagcaaagaccctctcaga

SEQ ID NO: 3430358 - DNA, 25 bp, Homo sapien
atgctagtgctcctgaagtcctgta

SEQ ID NO: 3430359 - DNA, 25 bp, Homo sapien
tcctgtagcaaagaccctctcagat

SEQ ID NO: 3430360 - DNA, 25 bp, Homo sapien
cgatgctagtgctcctgaagtcctg

SEQ ID NO: 3430361 - DNA, 25 bp, Homo sapien
aaatctgctttttcatctgccacca

SEQ ID NO: 3430362 - DNA, 25 bp, Homo sapien
ttaacttttgccattattaaagagc

SEQ ID NO: 3430363 - DNA, 25 bp, Homo sapien
aattcaggactacagagaaaacact

SEQ ID NO: 3430364 - DNA, 25 bp, Homo sapien
ccattattaaagagcttcaggggaa

SEQ ID NO: 3430365 - DNA, 25 bp, Homo sapien
gactaacaaataatacctgtggccc

SEQ ID NO: 3430366 - DNA, 25 bp, Homo sapien
tttatcggctagaaaaacaaatgca

SEQ ID NO: 3430367 - DNA, 25 bp, Homo sapien
tatttccgggctaaacagctgtagc

SEQ ID NO: 3430368 - DNA, 25 bp, Homo sapien
taaaatttgaggtaaactgagaggc

SEQ ID NO: 3430369 - DNA, 25 bp, Homo sapien
cagccaattagccagcttttaatga

SEQ ID NO: 3430370 - DNA, 25 bp, Homo sapien
cagcctctaccacaacatgttaaat

SEQ ID NO: 3430371 - DNA, 25 bp, Homo sapien
cccagccaattagccagcttttaat

SEQ ID NO: 3430372 - DNA, 25 bp, Homo sapien
ttgtgggccatacagcctctaccac

SEQ ID NO: 3430373 - DNA, 25 bp, Homo sapien
ttgctggagttacagacatgaccca

SEQ ID NO: 3430374 - DNA, 25 bp, Homo sapien
gtacagatacctgatctgtatactg

SEQ ID NO: 3430375 - DNA, 25 bp, Homo sapien
cagtgtactcccttcttggtcccca

SEQ ID NO: 3430376 - DNA, 25 bp, Homo sapien
tcagtttccaacctgaaccagtgta

SEQ ID NO: 3430377 - DNA, 25 bp, Homo sapien
gttccaaagaccatagatacagact

SEQ ID NO: 3430378 - DNA, 25 bp, Homo sapien
tataaaaagagtcggaatcactgcc

SEQ ID NO: 3430379 - DNA, 25 bp, Homo sapien
gtgttgctcctctatagcagtgatc

SEQ ID NO: 3430380 - DNA, 25 bp, Homo sapien
caatgactaagccttaggcccaagt

SEQ ID NO: 3430381 - DNA, 25 bp, Homo sapien
tgtctcacactgtgatacgatttaa

SEQ ID NO: 3430382 - DNA, 25 bp, Homo sapien
aagaaagaaaccaatcttgtcacta

SEQ ID NO: 3430383 - DNA, 25 bp, Homo sapien
gattttcatgtctcacactgtgata

SEQ ID NO: 3430384 - DNA, 25 bp, Homo sapien
tcttgtcactattagattttcatgt

SEQ ID NO: 3430385 - DNA, 25 bp, Homo sapien
agaaacatatagattgatggaacag

SEQ ID NO: 3430386 - DNA, 25 bp, Homo sapien
ggtgtttaaggagaaacatatagat

SEQ ID NO: 3430387 - DNA, 25 bp, Homo sapien
gaaacatatagattgatggaacaga

SEQ ID NO: 3430388 - DNA, 25 bp, Homo sapien
tgggtggtactggtgtttaaggaga

SEQ ID NO: 3430389 - DNA, 25 bp, Homo sapien
tcacagtaagtaacaagtataaact

SEQ ID NO: 3430390 - DNA, 25 bp, Homo sapien
gtaagtaacaagtataaactgaaca

SEQ ID NO: 3430391 - DNA, 25 bp, Homo sapien
gtaacaagtataaactgaacaatga

SEQ ID NO: 3430392 - DNA, 25 bp, Homo sapien
gtataaactgaacaatgacatcatt

SEQ ID NO: 3430393 - DNA, 25 bp, Homo sapien
tcactatacccagctgacttgtaca

SEQ ID NO: 3430394 - DNA, 25 bp, Homo sapien
tagtgacactgttgccatcaggaca

SEQ ID NO: 3430395 - DNA, 25 bp, Homo sapien
agtgttcccatgagattacagtaga

SEQ ID NO: 3430396 - DNA, 25 bp, Homo sapien
gaattctatctaataagcagtcact

SEQ ID NO: 3430397 - DNA, 25 bp, Homo sapien
acaagtggtcatagatttccctaca

SEQ ID NO: 3430398 - DNA, 25 bp, Homo sapien
gaacatactgatgaaatcatgcact

SEQ ID NO: 3430399 - DNA, 25 bp, Homo sapien
tttccctacatgtgcaaagtgctac

SEQ ID NO: 3430400 - DNA, 25 bp, Homo sapien
ttttcatgcctacctacaagtggtc

SEQ ID NO: 3430401 - DNA, 25 bp, Homo sapien
tcatagcgtcgtcgcatggtaccac

SEQ ID NO: 3430402 - DNA, 25 bp, Homo sapien
caaaattggcattatatttgttggt

SEQ ID NO: 3430403 - DNA, 25 bp, Homo sapien
atcatcttcatagcgtcgtcgcatg

SEQ ID NO: 3430404 - DNA, 25 bp, Homo sapien
ggcattatatttgttggtgtgcagt

SEQ ID NO: 3430405 - DNA, 25 bp, Homo sapien
taaacccccaatgctcagagtctat

SEQ ID NO: 3430406 - DNA, 25 bp, Homo sapien
ctgtaagctggaaccaaaacaatac

SEQ ID NO: 3430407 - DNA, 25 bp, Homo sapien
catcaaaggactgtaagctggaacc

SEQ ID NO: 3430408 - DNA, 25 bp, Homo sapien
caaaggactgtaagctggaaccaaa

SEQ ID NO: 3430409 - DNA, 25 bp, Homo sapien
gaaattatcatcaccctgtctctga

SEQ ID NO: 3430410 - DNA, 25 bp, Homo sapien
tgacatccttgtcagtttgccaagg

SEQ ID NO: 3430411 - DNA, 25 bp, Homo sapien
tattccaagtctaaatttccacagg

SEQ ID NO: 3430412 - DNA, 25 bp, Homo sapien
gagcacattgagaagcaacgcttga

SEQ ID NO: 3430413 - DNA, 25 bp, Homo sapien
ccgagtccatcagaattcttgaaaa

SEQ ID NO: 3430414 - DNA, 25 bp, Homo sapien
tttattccgagtccatcagaattct

SEQ ID NO: 3430415 - DNA, 25 bp, Homo sapien
aggatctctcaagccaccccgctga

SEQ ID NO: 3430416 - DNA, 25 bp, Homo sapien
cccgctgaatatactctacattaaa

SEQ ID NO: 3430417 - DNA, 25 bp, Homo sapien
atttacctctaatatgaaacacttg

SEQ ID NO: 3430418 - DNA, 25 bp, Homo sapien
ccactgtttattgccctgggtgtaa

SEQ ID NO: 3430419 - DNA, 25 bp, Homo sapien
gtgtaacgaggccattttgcaacta

SEQ ID NO: 3430420 - DNA, 25 bp, Homo sapien
ttttgggttatcaataccaccactg

SEQ ID NO: 3430421 - DNA, 25 bp, Homo sapien
gaaaacacaattgctctagtaaatg

SEQ ID NO: 3430422 - DNA, 25 bp, Homo sapien
tggaaaacacaattgctctagtaaa

SEQ ID NO: 3430423 - DNA, 25 bp, Homo sapien
tatatggaaaacacaattgctctag

SEQ ID NO: 3430424 - DNA, 25 bp, Homo sapien
tatggaaaacacaattgctctagta

SEQ ID NO: 3430425 - DNA, 25 bp, Homo sapien
tcacagtgaagtctggatccggcat

SEQ ID NO: 3430426 - DNA, 25 bp, Homo sapien
cacagtgaagtctggatccggcatt

SEQ ID NO: 3430427 - DNA, 25 bp, Homo sapien
cttcaatgttcctaggccttaaatc

SEQ ID NO: 3430428 - DNA, 25 bp, Homo sapien
aaatctttgccttaaagacagaggc

SEQ ID NO: 3430429 - DNA, 25 bp, Homo sapien
cagagatttaattcagtcctaagtc

SEQ ID NO: 3430430 - DNA, 25 bp, Homo sapien
gcaacttctgtaactctctttgata

SEQ ID NO: 3430431 - DNA, 25 bp, Homo sapien
tggctaagagatgtaagttttcggt

SEQ ID NO: 3430432 - DNA, 25 bp, Homo sapien
gaatcacggatattaatgaaacttc

SEQ ID NO: 3430433 - DNA, 25 bp, Homo sapien
aaacttctttcttggctaagagatg

SEQ ID NO: 3430434 - DNA, 25 bp, Homo sapien
aaggaagggaatcacggatattaat

SEQ ID NO: 3430435 - DNA, 25 bp, Homo sapien
ccaaatgcagcactggcgagcattt

SEQ ID NO: 3430436 - DNA, 25 bp, Homo sapien
tccaaatgcagcactggcgagcatt

SEQ ID NO: 3430437 - DNA, 25 bp, Homo sapien
ttccaaatgcagcactggcgagcat

SEQ ID NO: 3430438 - DNA, 25 bp, Homo sapien
taaaagactcaattttaatgtatct

SEQ ID NO: 3430439 - DNA, 25 bp, Homo sapien
acaccactgtctgcagaaaactagg

SEQ ID NO: 3430440 - DNA, 25 bp, Homo sapien
caccactgtctgcagaaaactaggc

SEQ ID NO: 3430441 - DNA, 25 bp, Homo sapien
taatgtatctacttctcagcctata

SEQ ID NO: 3430442 - DNA, 25 bp, Homo sapien
caagtggccaggagatagtactgca

SEQ ID NO: 3430443 - DNA, 25 bp, Homo sapien
aaagactttattccagccgggtgca

SEQ ID NO: 3430444 - DNA, 25 bp, Homo sapien
tgaacagaagagtcggtagtctaac

SEQ ID NO: 3430445 - DNA, 25 bp, Homo sapien
tagtctaacaaggacccacaagtgg

SEQ ID NO: 3430446 - DNA, 25 bp, Homo sapien
cagggaattactgtcctggaggctc

SEQ ID NO: 3430447 - DNA, 25 bp, Homo sapien
ttactgtgctaaggcctgaaactga

SEQ ID NO: 3430448 - DNA, 25 bp, Homo sapien
tctgatgcaggtcatctgtggacca

SEQ ID NO: 3430449 - DNA, 25 bp, Homo sapien
tgtaagaatgtctcatcaagaggga

SEQ ID NO: 3430450 - DNA, 25 bp, Homo sapien
aatctccattgtcctatctttgctg

SEQ ID NO: 3430451 - DNA, 25 bp, Homo sapien
tagcaagctatgttcacttttcttc

SEQ ID NO: 3430452 - DNA, 25 bp, Homo sapien
cctggcagggataacatttaaccta

SEQ ID NO: 3430453 - DNA, 25 bp, Homo sapien
ttagacttaataatctccattgtcc

SEQ ID NO: 3430454 - DNA, 25 bp, Homo sapien
caggtccagtggtaacaagtttcct

SEQ ID NO: 3430455 - DNA, 25 bp, Homo sapien
tgagaaattcgttcataattttact

SEQ ID NO: 3430456 - DNA, 25 bp, Homo sapien
gtcttaatctctcgccccttttgaa

SEQ ID NO: 3430457 - DNA, 25 bp, Homo sapien
tctataatgtgtatgttggtctgct

SEQ ID NO: 3430458 - DNA, 25 bp, Homo sapien
accccttttggttactgatgtcaca

SEQ ID NO: 3430459 - DNA, 25 bp, Homo sapien
tcttgtctttatggttatcataggg

SEQ ID NO: 3430460 - DNA, 25 bp, Homo sapien
gggattacatctaatatcctgaagt

SEQ ID NO: 3430461 - DNA, 25 bp, Homo sapien
tccttatatactgtgcccctattag

SEQ ID NO: 3430462 - DNA, 25 bp, Homo sapien
tctttagtgagtctcttgtggacag

SEQ ID NO: 3430463 - DNA, 25 bp, Homo sapien
tttagtgagtctcttgtggacagca

SEQ ID NO: 3430464 - DNA, 25 bp, Homo sapien
ctttagtgagtctcttgtggacagc

SEQ ID NO: 3430465 - DNA, 25 bp, Homo sapien
tctttcaagacacagggtcttggct

SEQ ID NO: 3430466 - DNA, 25 bp, Homo sapien
tctttctttcaagacacagggtctt

SEQ ID NO: 3430467 - DNA, 25 bp, Homo sapien
cagcctctttctttcaagacacagg

SEQ ID NO: 3430468 - DNA, 25 bp, Homo sapien
tttcaagacacagggtcttggctct

SEQ ID NO: 3430469 - DNA, 25 bp, Homo sapien
cgcctttacgctgttcctgatctta

SEQ ID NO: 3430470 - DNA, 25 bp, Homo sapien
ggcagtaaaagcaggcgcctttacg

SEQ ID NO: 3430471 - DNA, 25 bp, Homo sapien
cacatgtcaaatcatctattccagg

SEQ ID NO: 3430472 - DNA, 25 bp, Homo sapien
tactgagggtttttcatataaagct

SEQ ID NO: 3430473 - DNA, 25 bp, Homo sapien
tcatacccatcagattgttgaaagt

SEQ ID NO: 3430474 - DNA, 25 bp, Homo sapien
aagtttaagtctcggccaggtgcgg

SEQ ID NO: 3430475 - DNA, 25 bp, Homo sapien
ctgagaacatgattatccttacagg

SEQ ID NO: 3430476 - DNA, 25 bp, Homo sapien
aaatagatggcccaaatagtcaata

SEQ ID NO: 3430477 - DNA, 25 bp, Homo sapien
gatctgggaatctggctgagcagct

SEQ ID NO: 3430478 - DNA, 25 bp, Homo sapien
gaccagcttcttcaacacagcgaga

SEQ ID NO: 3430479 - DNA, 25 bp, Homo sapien
tttgggaaaggatgtactactcagc

SEQ ID NO: 3430480 - DNA, 25 bp, Homo sapien
tgccattgacacaggaggacctacg

SEQ ID NO: 3430481 - DNA, 25 bp, Homo sapien
cagatgaataggctggcaattctaa

SEQ ID NO: 3430482 - DNA, 25 bp, Homo sapien
tccagctccaagagctaagaggcaa

SEQ ID NO: 3430483 - DNA, 25 bp, Homo sapien
tagatggctcaagtcatggataaac

SEQ ID NO: 3430484 - DNA, 25 bp, Homo sapien
aatcgtgccttgcaggaagtcatcc

SEQ ID NO: 3430485 - DNA, 25 bp, Homo sapien
tttgaatactatatccaggagtcta

SEQ ID NO: 3430486 - DNA, 25 bp, Homo sapien
tattagcagtaagaagattaccgag

SEQ ID NO: 3430487 - DNA, 25 bp, Homo sapien
aagggcttccaaagatcattattag

SEQ ID NO: 3430488 - DNA, 25 bp, Homo sapien
gaagaaaaccgaagactgatgactg

SEQ ID NO: 3430489 - DNA, 25 bp, Homo sapien
gtgccacaatggctggctaatcctt

SEQ ID NO: 3430490 - DNA, 25 bp, Homo sapien
cacaatggctggctaatcctttaat

SEQ ID NO: 3430491 - DNA, 25 bp, Homo sapien
taatttttgccgatacaagatctcg

SEQ ID NO: 3430492 - DNA, 25 bp, Homo sapien
gctgtttctcgggtcgacaatttct

SEQ ID NO: 3430493 - DNA, 25 bp, Homo sapien
tcttccttgtaagacgaacaaacac

SEQ ID NO: 3430494 - DNA, 25 bp, Homo sapien
ctgccataaaagatgcatcgatcat

SEQ ID NO: 3430495 - DNA, 25 bp, Homo sapien
cgaggctgatgacattatagagttt

SEQ ID NO: 3430496 - DNA, 25 bp, Homo sapien
gggtctcatagtagcgtgtccactg

SEQ ID NO: 3430497 - DNA, 25 bp, Homo sapien
tggtgtggctaaactcgaggctgat

SEQ ID NO: 3430498 - DNA, 25 bp, Homo sapien
tgtccactgagccatggtcatttca

SEQ ID NO: 3430499 - DNA, 25 bp, Homo sapien
aaaaagcactagtgaaatatactgg

SEQ ID NO: 3430500 - DNA, 25 bp, Homo sapien
tctatattttgactatggtggttac

SEQ ID NO: 3430501 - DNA, 25 bp, Homo sapien
cctagataaatgaagggatatacta

SEQ ID NO: 3430502 - DNA, 25 bp, Homo sapien
gactatggtggttacttacatgaat

SEQ ID NO: 3430503 - DNA, 25 bp, Homo sapien
tatgctagctcctataacaggcatg

SEQ ID NO: 3430504 - DNA, 25 bp, Homo sapien
tagggccaaactggtaagaagtcca

SEQ ID NO: 3430505 - DNA, 25 bp, Homo sapien
tatgtcaacattaggcaccacttcc

SEQ ID NO: 3430506 - DNA, 25 bp, Homo sapien
tgttctgcaacaaaactagggccaa

SEQ ID NO: 3430507 - DNA, 25 bp, Homo sapien
tattaggtatcttcagactacagag

SEQ ID NO: 3430508 - DNA, 25 bp, Homo sapien
tacgctgtaagctcccatgtctgaa

SEQ ID NO: 3430509 - DNA, 25 bp, Homo sapien
tctgaatagggagaggaacggttca

SEQ ID NO: 3430510 - DNA, 25 bp, Homo sapien
tttagccttgggatagatcctttgc

SEQ ID NO: 3430511 - DNA, 25 bp, Homo sapien
gaaagcaatacgcaacattttacac

SEQ ID NO: 3430512 - DNA, 25 bp, Homo sapien
tttcctgtgccttcaagtgtctaca

SEQ ID NO: 3430513 - DNA, 25 bp, Homo sapien
agcaatacgcaacattttacactaa

SEQ ID NO: 3430514 - DNA, 25 bp, Homo sapien
gaagtgaaagcaatacgcaacattt

SEQ ID NO: 3430515 - DNA, 25 bp, Homo sapien
gaaggaggaaacacttgggctccaa

SEQ ID NO: 3430516 - DNA, 25 bp, Homo sapien
tagaaggaggaaacacttgggctcc

SEQ ID NO: 3430517 - DNA, 25 bp, Homo sapien
atagaaggaggaaacacttgggctc

SEQ ID NO: 3430518 - DNA, 25 bp, Homo sapien
aggaggaaacacttgggctccaagg

SEQ ID NO: 3430519 - DNA, 25 bp, Homo sapien
ttctgcactttagggtactgcatct

SEQ ID NO: 3430520 - DNA, 25 bp, Homo sapien
cacatgttgtctacccagtcaatga

SEQ ID NO: 3430521 - DNA, 25 bp, Homo sapien
gcatctccaagatggcatttgttga

SEQ ID NO: 3430522 - DNA, 25 bp, Homo sapien
tccttcaagtgccttggccacatgt

SEQ ID NO: 3430523 - DNA, 25 bp, Homo sapien
gctcgtaagggagaagccaatcctt

SEQ ID NO: 3430524 - DNA, 25 bp, Homo sapien
tgctattgctttggtctcccacagc

SEQ ID NO: 3430525 - DNA, 25 bp, Homo sapien
tcccacagcacacggaggaagatgc

SEQ ID NO: 3430526 - DNA, 25 bp, Homo sapien
tgtgtgctatggtatgctcacatac

SEQ ID NO: 3430527 - DNA, 25 bp, Homo sapien
gcagcctcgaacactcattagacag

SEQ ID NO: 3430528 - DNA, 25 bp, Homo sapien
ccccttgatggatgtgataccaaac

SEQ ID NO: 3430529 - DNA, 25 bp, Homo sapien
tgtgataccaaacagaggtaccacc

SEQ ID NO: 3430530 - DNA, 25 bp, Homo sapien
cacatggaagtcagtatagcagcct

SEQ ID NO: 3430531 - DNA, 25 bp, Homo sapien
gatttactaagtgctgtgccaatgg

SEQ ID NO: 3430532 - DNA, 25 bp, Homo sapien
tgaacactagccaagaaggtgaact

SEQ ID NO: 3430533 - DNA, 25 bp, Homo sapien
tgccaatggtgtaatgacagtgaac

SEQ ID NO: 3430534 - DNA, 25 bp, Homo sapien
tcagaccaatggctacatagaggga

SEQ ID NO: 3430535 - DNA, 25 bp, Homo sapien
caaaattaagaccaccaggtagaag

SEQ ID NO: 3430536 - DNA, 25 bp, Homo sapien
attttcccagcctatagaacttgac

SEQ ID NO: 3430537 - DNA, 25 bp, Homo sapien
tgactatgtggtaaaccctagaagg

SEQ ID NO: 3430538 - DNA, 25 bp, Homo sapien
gtagaagaaaggcaagcaattttcc

SEQ ID NO: 3430539 - DNA, 25 bp, Homo sapien
ctgtgagttaaaaaactttagtctg

SEQ ID NO: 3430540 - DNA, 25 bp, Homo sapien
tctgttaacagccattgacatgacc

SEQ ID NO: 3430541 - DNA, 25 bp, Homo sapien
gccattgacatgacccagtcgtctc

SEQ ID NO: 3430542 - DNA, 25 bp, Homo sapien
aaaactttagtctgttaacagccat

SEQ ID NO: 3430543 - DNA, 25 bp, Homo sapien
ctgtaggggggatgagccagaagac

SEQ ID NO: 3430544 - DNA, 25 bp, Homo sapien
cagcagccaattctcgtacagctcc

SEQ ID NO: 3430545 - DNA, 25 bp, Homo sapien
ctgatacccggtcacccagaaagat

SEQ ID NO: 3430546 - DNA, 25 bp, Homo sapien
ctgagggaatgacgaaggtatagcc

SEQ ID NO: 3430547 - DNA, 25 bp, Homo sapien
cctgcttgagctcaatgcgctgaca

SEQ ID NO: 3430548 - DNA, 25 bp, Homo sapien
aggagtatacacagcatgaatccag

SEQ ID NO: 3430549 - DNA, 25 bp, Homo sapien
tttaactgcatagggatgttgaagc

SEQ ID NO: 3430550 - DNA, 25 bp, Homo sapien
cactaatgtgtctgtaggagtatac

SEQ ID NO: 3430551 - DNA, 25 bp, Homo sapien
ccgtgtccgatcttcaatgttgtat

SEQ ID NO: 3430552 - DNA, 25 bp, Homo sapien
cataactggagtaaacctcttcaca

SEQ ID NO: 3430553 - DNA, 25 bp, Homo sapien
gagtaaacctcttcacatgcaactg

SEQ ID NO: 3430554 - DNA, 25 bp, Homo sapien
gatgtggtgtgcacccacggtccca

SEQ ID NO: 3430555 - DNA, 25 bp, Homo sapien
tttgataaaccatcagtgaatctct

SEQ ID NO: 3430556 - DNA, 25 bp, Homo sapien
ccaagatactgtgggatgcagtagc

SEQ ID NO: 3430557 - DNA, 25 bp, Homo sapien
catggctcaagagattaccagaggt

SEQ ID NO: 3430558 - DNA, 25 bp, Homo sapien
tctgaaatttgggttgataagcccc

SEQ ID NO: 3430559 - DNA, 25 bp, Homo sapien
taccagaggtaaatgtctggcctta

SEQ ID NO: 3430560 - DNA, 25 bp, Homo sapien
gaagggtattagctgtgtatcatcc

SEQ ID NO: 3430561 - DNA, 25 bp, Homo sapien
tagacactttatgacccacgaagcc

SEQ ID NO: 3430562 - DNA, 25 bp, Homo sapien
gggtggcatctttcacatacgtgca

SEQ ID NO: 3430563 - DNA, 25 bp, Homo sapien
taagtatttcatgctacaaggtagg

SEQ ID NO: 3430564 - DNA, 25 bp, Homo sapien
ggatgacttcacctacccgtttaca

SEQ ID NO: 3430565 - DNA, 25 bp, Homo sapien
tatcgggtagtgttcctgaatcacg

SEQ ID NO: 3430566 - DNA, 25 bp, Homo sapien
cgtttacaaactctatatcgggtag

SEQ ID NO: 3430567 - DNA, 25 bp, Homo sapien
taagtgatccttcgcttcaaactcc

SEQ ID NO: 3430568 - DNA, 25 bp, Homo sapien
tgcagtacacatagcgctccaacac

SEQ ID NO: 3430569 - DNA, 25 bp, Homo sapien
ccatgctgagggactctttctgaaa

SEQ ID NO: 3430570 - DNA, 25 bp, Homo sapien
ggaacggttggttatgcagtacaca

SEQ ID NO: 3430571 - DNA, 25 bp, Homo sapien
catctcatagtagaatggatagcga

SEQ ID NO: 3430572 - DNA, 25 bp, Homo sapien
taactcacatctgggtaggtaactg

SEQ ID NO: 3430573 - DNA, 25 bp, Homo sapien
ggtgtcttcaaagctcctataggca

SEQ ID NO: 3430574 - DNA, 25 bp, Homo sapien
ccaagaacatattgagtgacagcct

SEQ ID NO: 3430575 - DNA, 25 bp, Homo sapien
cgtgaaccagcgtgtccggcttgat

SEQ ID NO: 3430576 - DNA, 25 bp, Homo sapien
taaagagcataaactgcagagtctg

SEQ ID NO: 3430577 - DNA, 25 bp, Homo sapien
gatattatggtgttgagtcctcacc

SEQ ID NO: 3430578 - DNA, 25 bp, Homo sapien
tgaagctgaaccaagctggtcagac

SEQ ID NO: 3430579 - DNA, 25 bp, Homo sapien
cataagaacatgtgatcccaggata

SEQ ID NO: 3430580 - DNA, 25 bp, Homo sapien
ggttgactccattcgctacagggct

SEQ ID NO: 3430581 - DNA, 25 bp, Homo sapien
tagtgaggacagaacgcctgctgct

SEQ ID NO: 3430582 - DNA, 25 bp, Homo sapien
agccccggctacagtcagaagatga

SEQ ID NO: 3430583 - DNA, 25 bp, Homo sapien
acttatctacaaggcagcgaaggcc

SEQ ID NO: 3430584 - DNA, 25 bp, Homo sapien
tcaatctgcttaggatgagactcct

SEQ ID NO: 3430585 - DNA, 25 bp, Homo sapien
taaagaggctaaagctactcaacgt

SEQ ID NO: 3430586 - DNA, 25 bp, Homo sapien
cctctgaatctggaagctgactgcc

SEQ ID NO: 3430587 - DNA, 25 bp, Homo sapien
tactcaacgttaacccagcatagaa

SEQ ID NO: 3430588 - DNA, 25 bp, Homo sapien
gctgggatgaagctcagactgaaca

SEQ ID NO: 3430589 - DNA, 25 bp, Homo sapien
cacagccactcggactgacaagtat

SEQ ID NO: 3430590 - DNA, 25 bp, Homo sapien
gagtttctagtgatccacagtgtac

SEQ ID NO: 3430591 - DNA, 25 bp, Homo sapien
cagtgtaccaaacatcagcatggga

SEQ ID NO: 3430592 - DNA, 25 bp, Homo sapien
gcagcgtgcagcgctctgggctcct

SEQ ID NO: 3430593 - DNA, 25 bp, Homo sapien
ttcagctcagccgcggcttcctgtg

SEQ ID NO: 3430594 - DNA, 25 bp, Homo sapien
acccttcagactacccagagggagc

SEQ ID NO: 3430595 - DNA, 25 bp, Homo sapien
tgcgaacaatgctgctgcgtcaccc

SEQ ID NO: 3430596 - DNA, 25 bp, Homo sapien
tggtgaagtttccccagcgtctttg

SEQ ID NO: 3430597 - DNA, 25 bp, Homo sapien
ttcgtttcccgtcgctctggagctg

SEQ ID NO: 3430598 - DNA, 25 bp, Homo sapien
ctctgggaaaatccggatttacttg

SEQ ID NO: 3430599 - DNA, 25 bp, Homo sapien
tgaaggagttagatattctgcctct

SEQ ID NO: 3430600 - DNA, 25 bp, Homo sapien
gacaaggctctggtatgggctccta

SEQ ID NO: 3430601 - DNA, 25 bp, Homo sapien
tgtgcagattcaacccagggctctt

SEQ ID NO: 3430602 - DNA, 25 bp, Homo sapien
tcgcactgacgaagagtaggactct

SEQ ID NO: 3430603 - DNA, 25 bp, Homo sapien
tcaaaagcacatcccaccaggtgag

SEQ ID NO: 3430604 - DNA, 25 bp, Homo sapien
ggaactccagtgagggctaacttgg

SEQ ID NO: 3430605 - DNA, 25 bp, Homo sapien
tgggatcgctgttggcaagctcctc

SEQ ID NO: 3430606 - DNA, 25 bp, Homo sapien
ttggccactgtactataggaactcc

SEQ ID NO: 3430607 - DNA, 25 bp, Homo sapien
ggccactgtactataggaactccag

SEQ ID NO: 3430608 - DNA, 25 bp, Homo sapien
cctttcttctcttttccattccaca

SEQ ID NO: 3430609 - DNA, 25 bp, Homo sapien
ccaccatgcccggcccctttcttct

SEQ ID NO: 3430610 - DNA, 25 bp, Homo sapien
catgcccggcccctttcttctcttt

SEQ ID NO: 3430611 - DNA, 25 bp, Homo sapien
accatgcccggcccctttcttctct

SEQ ID NO: 3430612 - DNA, 25 bp, Homo sapien
gtgccatgtaccgaagtcactccag

SEQ ID NO: 3430613 - DNA, 25 bp, Homo sapien
gagctttctgtatcaagtgccatgt

SEQ ID NO: 3430614 - DNA, 25 bp, Homo sapien
ttgcagagctgttaagattcacccc

SEQ ID NO: 3430615 - DNA, 25 bp, Homo sapien
tcaagcatacgaactggtagatagc

SEQ ID NO: 3430616 - DNA, 25 bp, Homo sapien
gacacaggactgcttcatgcgtcca

SEQ ID NO: 3430617 - DNA, 25 bp, Homo sapien
aggaacccgcacctttggccgagtg

SEQ ID NO: 3430618 - DNA, 25 bp, Homo sapien
ccgtctggctcctgacacaatcggg

SEQ ID NO: 3430619 - DNA, 25 bp, Homo sapien
tcacaggtgttaaccgtggagctgg

SEQ ID NO: 3430620 - DNA, 25 bp, Homo sapien
ctacaagaggacaaagatagaatcc

SEQ ID NO: 3430621 - DNA, 25 bp, Homo sapien
taaacacctggaagcatggaggcag

SEQ ID NO: 3430622 - DNA, 25 bp, Homo sapien
agttggcctatacttggcctccccg

SEQ ID NO: 3430623 - DNA, 25 bp, Homo sapien
tgggcaccagagactagtttatttt

SEQ ID NO: 3430624 - DNA, 25 bp, Homo sapien
cagcattccatgagtttcttctcaa

SEQ ID NO: 3430625 - DNA, 25 bp, Homo sapien
aggcagccaggatgaacaatctcat

SEQ ID NO: 3430626 - DNA, 25 bp, Homo sapien
ccaggatgaacaatctcattgcaga

SEQ ID NO: 3430627 - DNA, 25 bp, Homo sapien
cagccaggatgaacaatctcattgc

SEQ ID NO: 3430628 - DNA, 25 bp, Homo sapien
gaccactgcattatgtgaccacaga

SEQ ID NO: 3430629 - DNA, 25 bp, Homo sapien
ggaactaatatccagaggtacactg

SEQ ID NO: 3430630 - DNA, 25 bp, Homo sapien
tctatcctcagggtctaacgcagtg

SEQ ID NO: 3430631 - DNA, 25 bp, Homo sapien
caagggctgatgttagaccactgca

SEQ ID NO: 3430632 - DNA, 25 bp, Homo sapien
tggacattcccagcaatttggcaat

SEQ ID NO: 3430633 - DNA, 25 bp, Homo sapien
ggctttctccgagctgtcctcctgg

SEQ ID NO: 3430634 - DNA, 25 bp, Homo sapien
tggcaattcttcgttaagcaacccc

SEQ ID NO: 3430635 - DNA, 25 bp, Homo sapien
agcactttggacattcccagcaatt

SEQ ID NO: 3430636 - DNA, 25 bp, Homo sapien
caactgccgccgtttgaagcgctca

SEQ ID NO: 3430637 - DNA, 25 bp, Homo sapien
gaaaccgggtcatggatgagctgca

SEQ ID NO: 3430638 - DNA, 25 bp, Homo sapien
cgctcatcgcggctggcactgtggt

SEQ ID NO: 3430639 - DNA, 25 bp, Homo sapien
tgagaggctcatcgcagctccgcag

SEQ ID NO: 3430640 - DNA, 25 bp, Homo sapien
gacagctcctttttgccgctgggat

SEQ ID NO: 3430641 - DNA, 25 bp, Homo sapien
cacaatggatgtcccgtggagctct

SEQ ID NO: 3430642 - DNA, 25 bp, Homo sapien
acagtgaggtacgatccccggatct

SEQ ID NO: 3430643 - DNA, 25 bp, Homo sapien
ctttggtgggcctctgtagcgtgac

SEQ ID NO: 3430644 - DNA, 25 bp, Homo sapien
ctcatccccacgctggggggttcgg

SEQ ID NO: 3430645 - DNA, 25 bp, Homo sapien
tggggggttcgggctgggcagtgct

SEQ ID NO: 3430646 - DNA, 25 bp, Homo sapien
ctcctcatccccacgctggggggtt

SEQ ID NO: 3430647 - DNA, 25 bp, Homo sapien
gggttcgggctgggcagtgctgcac

SEQ ID NO: 3430648 - DNA, 25 bp, Homo sapien
ccccggccattcagcctggctgcac

SEQ ID NO: 3430649 - DNA, 25 bp, Homo sapien
cggccattcagcctggctgcacccc

SEQ ID NO: 3430650 - DNA, 25 bp, Homo sapien
aactgccccggccattcagcctggc

SEQ ID NO: 3430651 - DNA, 25 bp, Homo sapien
ctgagcccaactgccccggccattc

SEQ ID NO: 3430652 - DNA, 25 bp, Homo sapien
ctgaggtagcggaagacagacatcc

SEQ ID NO: 3430653 - DNA, 25 bp, Homo sapien
acaaagttctctgcggctgaggtag

SEQ ID NO: 3430654 - DNA, 25 bp, Homo sapien
tttataccacgtcttgcacactcgc

SEQ ID NO: 3430655 - DNA, 25 bp, Homo sapien
ttgcacactcgcatacattcacaaa

SEQ ID NO: 3430656 - DNA, 25 bp, Homo sapien
taacgggaatctgatgtgccttgcc

SEQ ID NO: 3430657 - DNA, 25 bp, Homo sapien
gagccaagcagtcctattagcccta

SEQ ID NO: 3430658 - DNA, 25 bp, Homo sapien
ttagggacccatagcaagcaacagt

SEQ ID NO: 3430659 - DNA, 25 bp, Homo sapien
cattaacttgatcagtggagctccc

SEQ ID NO: 3430660 - DNA, 25 bp, Homo sapien
tttttgtccaaagtctcttgtcgca

SEQ ID NO: 3430661 - DNA, 25 bp, Homo sapien
ccatgtcagttgctttttagagatg

SEQ ID NO: 3430662 - DNA, 25 bp, Homo sapien
tggcagcctattgacgagccatgtc

SEQ ID NO: 3430663 - DNA, 25 bp, Homo sapien
ggcacaatggccttacacctactca

SEQ ID NO: 3430664 - DNA, 25 bp, Homo sapien
gcagcctgctaggaggaggtctttc

SEQ ID NO: 3430665 - DNA, 25 bp, Homo sapien
accaggagcagcctgctaggaggag

SEQ ID NO: 3430666 - DNA, 25 bp, Homo sapien
ggagcagcctgctaggaggaggtct

SEQ ID NO: 3430667 - DNA, 25 bp, Homo sapien
gcagaccaggagcagcctgctagga

SEQ ID NO: 3430668 - DNA, 25 bp, Homo sapien
tgcccaccgaagatcaagggtcctg

SEQ ID NO: 3430669 - DNA, 25 bp, Homo sapien
gtttatcagccggtggagtaagcaa

SEQ ID NO: 3430670 - DNA, 25 bp, Homo sapien
ccgaatttgagggtccttgattcct

SEQ ID NO: 3430671 - DNA, 25 bp, Homo sapien
taagcaagtcccgaatttgagggtc

SEQ ID NO: 3430672 - DNA, 25 bp, Homo sapien
gaagacccgacagcagtgagtagat

SEQ ID NO: 3430673 - DNA, 25 bp, Homo sapien
aggactgatctgtaaggtggctgca

SEQ ID NO: 3430674 - DNA, 25 bp, Homo sapien
gaattatgaggcgaagcgtggcatc

SEQ ID NO: 3430675 - DNA, 25 bp, Homo sapien
cagtgactgaggtcgagtcgagaca

SEQ ID NO: 3430676 - DNA, 25 bp, Homo sapien
tcagagaccagaagtgccatcagca

SEQ ID NO: 3430677 - DNA, 25 bp, Homo sapien
gggcaccgctgattatgaacaactg

SEQ ID NO: 3430678 - DNA, 25 bp, Homo sapien
ccatatgacaacaagcacaagggct

SEQ ID NO: 3430679 - DNA, 25 bp, Homo sapien
tgcgcagacaggcaaccgacttaac

SEQ ID NO: 3430680 - DNA, 25 bp, Homo sapien
tatcagcttctcgtcagacaggcag

SEQ ID NO: 3430681 - DNA, 25 bp, Homo sapien
tctgagatgaagtgctcgcaggctt

SEQ ID NO: 3430682 - DNA, 25 bp, Homo sapien
tcctcgaaggtcgatcaaggtgacg

SEQ ID NO: 3430683 - DNA, 25 bp, Homo sapien
agtgatctgcttgcatcctcgaagg

SEQ ID NO: 3430684 - DNA, 25 bp, Homo sapien
ctcctggcaggcgagtaagcgagca

SEQ ID NO: 3430685 - DNA, 25 bp, Homo sapien
ggagtttgctcagaaccaggcactg

SEQ ID NO: 3430686 - DNA, 25 bp, Homo sapien
tgtgctttcccctcagatcaatctg

SEQ ID NO: 3430687 - DNA, 25 bp, Homo sapien
gcagatgaaggttgcacaaacaccc

SEQ ID NO: 3430688 - DNA, 25 bp, Homo sapien
ggcactctggaataagtcactggca

SEQ ID NO: 3430689 - DNA, 25 bp, Homo sapien
cctggcaaggccgtgtctaagagca

SEQ ID NO: 3430690 - DNA, 25 bp, Homo sapien
cagggtcaaaactggcctaggtggc

SEQ ID NO: 3430691 - DNA, 25 bp, Homo sapien
tagagagaggatctttggacaggcc

SEQ ID NO: 3430692 - DNA, 25 bp, Homo sapien
tgtgtcaactgagatagcataagac

SEQ ID NO: 3430693 - DNA, 25 bp, Homo sapien
ggagattgactctaaatcagcaaca

SEQ ID NO: 3430694 - DNA, 25 bp, Homo sapien
gcataagacttatccccttaatgct

SEQ ID NO: 3430695 - DNA, 25 bp, Homo sapien
taaactttttagcacaacattggag

SEQ ID NO: 3430696 - DNA, 25 bp, Homo sapien
aatatttcccattggaggctatttc

SEQ ID NO: 3430697 - DNA, 25 bp, Homo sapien
atatttcccattggaggctatttct

SEQ ID NO: 3430698 - DNA, 25 bp, Homo sapien
atttcccattggaggctatttcttt

SEQ ID NO: 3430699 - DNA, 25 bp, Homo sapien
tatttcccattggaggctatttctt

SEQ ID NO: 3430700 - DNA, 25 bp, Homo sapien
ttttccattttcagttgcaagatgc

SEQ ID NO: 3430701 - DNA, 25 bp, Homo sapien
ctgttttccattttcagttgcaaga

SEQ ID NO: 3430702 - DNA, 25 bp, Homo sapien
tttccattttcagttgcaagatgca

SEQ ID NO: 3430703 - DNA, 25 bp, Homo sapien
caccttctaggccctgttttccatt

SEQ ID NO: 3430704 - DNA, 25 bp, Homo sapien
tcggcctcgggcgccgacgcctccc

SEQ ID NO: 3430705 - DNA, 25 bp, Homo sapien
cggcctcgggcgccgacgcctcccg

SEQ ID NO: 3430706 - DNA, 25 bp, Homo sapien
ctcggcctcgggcgccgacgcctcc

SEQ ID NO: 3430707 - DNA, 25 bp, Homo sapien
tggccatcaggtagctcacgtcggc

SEQ ID NO: 3430708 - DNA, 25 bp, Homo sapien
gcgcggccggcgtggccttgctctt

SEQ ID NO: 3430709 - DNA, 25 bp, Homo sapien
atcaggtagctcacgtcggccagca

SEQ ID NO: 3430710 - DNA, 25 bp, Homo sapien
aggtagctcacgtcggccagcaccg

SEQ ID NO: 3430711 - DNA, 25 bp, Homo sapien
agaaggatgaaggggcgcgccgggc

SEQ ID NO: 3430712 - DNA, 25 bp, Homo sapien
cggggggccggtggagcacgataag

SEQ ID NO: 3430713 - DNA, 25 bp, Homo sapien
ccaggggctgacagcgacttcgggg

SEQ ID NO: 3430714 - DNA, 25 bp, Homo sapien
gctgacagcgacttcggggggccgg

SEQ ID NO: 3430715 - DNA, 25 bp, Homo sapien
agaagagtccggaagactggctgtc

SEQ ID NO: 3430716 - DNA, 25 bp, Homo sapien
gacagcgaccccaccagagggtggg

SEQ ID NO: 3430717 - DNA, 25 bp, Homo sapien
ccccaacacctcacacaagtgtaga

SEQ ID NO: 3430718 - DNA, 25 bp, Homo sapien
cctgaaagcactctcgagcccaact

SEQ ID NO: 3430719 - DNA, 25 bp, Homo sapien
gaacagtctaaactttgataccagg

SEQ ID NO: 3430720 - DNA, 25 bp, Homo sapien
gcggcagctaaggtccagccattgc

SEQ ID NO: 3430721 - DNA, 25 bp, Homo sapien
tcctgaacagtctaaactttgatac

SEQ ID NO: 3430722 - DNA, 25 bp, Homo sapien
tgatgtcagttgtcttacagaggcg

SEQ ID NO: 3430723 - DNA, 25 bp, Homo sapien
cagtttccccatctgttccacaggg

SEQ ID NO: 3430724 - DNA, 25 bp, Homo sapien
ttcagtttccccatctgttccacag

SEQ ID NO: 3430725 - DNA, 25 bp, Homo sapien
gcttcagtttccccatctgttccac

SEQ ID NO: 3430726 - DNA, 25 bp, Homo sapien
ctctggagcttcagtttccccatct

SEQ ID NO: 3430727 - DNA, 25 bp, Homo sapien
aatccatttacccaggtaacggcag

SEQ ID NO: 3430728 - DNA, 25 bp, Homo sapien
gcaggcgggcgacttaatggcaaat

SEQ ID NO: 3430729 - DNA, 25 bp, Homo sapien
catttacccaggtaacggcaggcgg

SEQ ID NO: 3430730 - DNA, 25 bp, Homo sapien
atggcaaataagtgaaacgcatgct

SEQ ID NO: 3430731 - DNA, 25 bp, Homo sapien
gggaggaaacactggctgcggagcg

SEQ ID NO: 3430732 - DNA, 25 bp, Homo sapien
tgcaacctaggcacggggaggaaac

SEQ ID NO: 3430733 - DNA, 25 bp, Homo sapien
ctgggtgcaacctaggcacggggag

SEQ ID NO: 3430734 - DNA, 25 bp, Homo sapien
gaaacactggctgcggagcgctcct

SEQ ID NO: 3430735 - DNA, 25 bp, Homo sapien
accgtcccctgggagatgagcgagc

SEQ ID NO: 3430736 - DNA, 25 bp, Homo sapien
tggccgaggtgctccctgtggcatt

SEQ ID NO: 3430737 - DNA, 25 bp, Homo sapien
gaggtgctccctgtggcatttccag

SEQ ID NO: 3430738 - DNA, 25 bp, Homo sapien
gagcattcaccaaccagtgcagcag

SEQ ID NO: 3430739 - DNA, 25 bp, Homo sapien
aaatgcaaagtccaggccatcctct

SEQ ID NO: 3430740 - DNA, 25 bp, Homo sapien
gctctcttaggtgtctcctgctcgg

SEQ ID NO: 3430741 - DNA, 25 bp, Homo sapien
aatgcaaagtccaggccatcctctg

SEQ ID NO: 3430742 - DNA, 25 bp, Homo sapien
tggcctgggctctcttaggtgtctc

SEQ ID NO: 3430743 - DNA, 25 bp, Homo sapien
aatcacacagtaactggtcttgctc

SEQ ID NO: 3430744 - DNA, 25 bp, Homo sapien
atttgccgtgtcctcggagaggatg

SEQ ID NO: 3430745 - DNA, 25 bp, Homo sapien
ttgccgtgtcctcggagaggatggg

SEQ ID NO: 3430746 - DNA, 25 bp, Homo sapien
cacacagtaactggtcttgctcaag

SEQ ID NO: 3430747 - DNA, 25 bp, Homo sapien
gggggccaccgggcttcagcagtaa

SEQ ID NO: 3430748 - DNA, 25 bp, Homo sapien
ggaatgggggccaccgggcttcagc

SEQ ID NO: 3430749 - DNA, 25 bp, Homo sapien
ggccaccgggcttcagcagtaagcc

SEQ ID NO: 3430750 - DNA, 25 bp, Homo sapien
gaatgggggccaccgggcttcagca

SEQ ID NO: 3430751 - DNA, 25 bp, Homo sapien
cagaggcaacacttgggcaggaaga

SEQ ID NO: 3430752 - DNA, 25 bp, Homo sapien
cttcacagccaaggagtgggcagga

SEQ ID NO: 3430753 - DNA, 25 bp, Homo sapien
aaaggccatggtgaggcggagggca

SEQ ID NO: 3430754 - DNA, 25 bp, Homo sapien
agcaggactcaggaggcttggtcca

SEQ ID NO: 3430755 - DNA, 25 bp, Homo sapien
ccagtgatgccaccggctggctttg

SEQ ID NO: 3430756 - DNA, 25 bp, Homo sapien
ggaacttggccaagtcacaaaagcc

SEQ ID NO: 3430757 - DNA, 25 bp, Homo sapien
caagcctggtttgtgagcggatgaa

SEQ ID NO: 3430758 - DNA, 25 bp, Homo sapien
ttcaaggaagcctttgcctgcaccg

SEQ ID NO: 3430759 - DNA, 25 bp, Homo sapien
caggcccagaaacgcgagctgaggg

SEQ ID NO: 3430760 - DNA, 25 bp, Homo sapien
tgcaggcccagaaacgcgagctgag

SEQ ID NO: 3430761 - DNA, 25 bp, Homo sapien
gcaggcccagaaacgcgagctgagg

SEQ ID NO: 3430762 - DNA, 25 bp, Homo sapien
ctgcaggcccagaaacgcgagctga

SEQ ID NO: 3430763 - DNA, 25 bp, Homo sapien
tcaggggggcgcagtaagcagaagc

SEQ ID NO: 3430764 - DNA, 25 bp, Homo sapien
ggtcaggggggcgcagtaagcagaa

SEQ ID NO: 3430765 - DNA, 25 bp, Homo sapien
ctgtgggtcaggggggcgcagtaag

SEQ ID NO: 3430766 - DNA, 25 bp, Homo sapien
tgggtcaggggggcgcagtaagcag

SEQ ID NO: 3430767 - DNA, 25 bp, Homo sapien
ccaggtacttctgcatgacactgcg

SEQ ID NO: 3430768 - DNA, 25 bp, Homo sapien
gtacttctgcatgacactgcggatg

SEQ ID NO: 3430769 - DNA, 25 bp, Homo sapien
agatcttctcaaaggtcacctcgcc

SEQ ID NO: 3430770 - DNA, 25 bp, Homo sapien
ccagcttctgggaaaagatcttctc

SEQ ID NO: 3430771 - DNA, 25 bp, Homo sapien
ctgctccaccctgagtggatgggag

SEQ ID NO: 3430772 - DNA, 25 bp, Homo sapien
aggcacgcagggtcgcagcgacttg

SEQ ID NO: 3430773 - DNA, 25 bp, Homo sapien
gggctccctgggccgacagccaggg

SEQ ID NO: 3430774 - DNA, 25 bp, Homo sapien
tcgcagcgacttggagcaagccctg

SEQ ID NO: 3430775 - DNA, 25 bp, Homo sapien
tcaggcagaagtctcggaagagcag

SEQ ID NO: 3430776 - DNA, 25 bp, Homo sapien
tcctcatagaattccaccaagggcc

SEQ ID NO: 3430777 - DNA, 25 bp, Homo sapien
ctcctccaggtggttcaggcagaag

SEQ ID NO: 3430778 - DNA, 25 bp, Homo sapien
ctcatagaattccaccaagggcctg

SEQ ID NO: 3430779 - DNA, 25 bp, Homo sapien
ggaggacaggattcctgcaggtcat

SEQ ID NO: 3430780 - DNA, 25 bp, Homo sapien
ctggaggacaggattcctgcaggtc

SEQ ID NO: 3430781 - DNA, 25 bp, Homo sapien
tggaggacaggattcctgcaggtca

SEQ ID NO: 3430782 - DNA, 25 bp, Homo sapien
agatctcccggctgcgggccacacg

SEQ ID NO: 3430783 - DNA, 25 bp, Homo sapien
tgatgtatgagtcgaagatctcccg

SEQ ID NO: 3430784 - DNA, 25 bp, Homo sapien
ccgtctccagcttctcgtacttctt

SEQ ID NO: 3430785 - DNA, 25 bp, Homo sapien
agctccttcatgatgtatgagtcga

SEQ ID NO: 3430786 - DNA, 25 bp, Homo sapien
ctggaagagatccggaggcacctgc

SEQ ID NO: 3430787 - DNA, 25 bp, Homo sapien
caggtggccttggacatgctcagtg

SEQ ID NO: 3430788 - DNA, 25 bp, Homo sapien
aagagatccggaggcacctgcttct

SEQ ID NO: 3430789 - DNA, 25 bp, Homo sapien
gctcagtggcactcttcgagaaggg

SEQ ID NO: 3430790 - DNA, 25 bp, Homo sapien
tgaatttctggaacacgtcccctcg

SEQ ID NO: 3430791 - DNA, 25 bp, Homo sapien
atgaatttctggaacacgtcccctc

SEQ ID NO: 3430792 - DNA, 25 bp, Homo sapien
ttccactggcaaaaccgtgtgaact

SEQ ID NO: 3430793 - DNA, 25 bp, Homo sapien
ctggcaaaaccgtgtgaacttatcg

SEQ ID NO: 3430794 - DNA, 25 bp, Homo sapien
ccactggcaaaaccgtgtgaactta

SEQ ID NO: 3430795 - DNA, 25 bp, Homo sapien
tcttccactggcaaaaccgtgtgaa

SEQ ID NO: 3430796 - DNA, 25 bp, Homo sapien
ctgacccccatagccacggccctgg

SEQ ID NO: 3430797 - DNA, 25 bp, Homo sapien
ggccccatgccagggtccccatacc

SEQ ID NO: 3430798 - DNA, 25 bp, Homo sapien
ctgggatcccggccctgacccccat

SEQ ID NO: 3430799 - DNA, 25 bp, Homo sapien
gctaaaggacagacatcccctgacc

SEQ ID NO: 3430800 - DNA, 25 bp, Homo sapien
ggcacccatagacctcgccaaagcc

SEQ ID NO: 3430801 - DNA, 25 bp, Homo sapien
cgcgcccaatgatgcgatgcacgct

SEQ ID NO: 3430802 - DNA, 25 bp, Homo sapien
tgatgcgatgcacgctgaagtcatt

SEQ ID NO: 3430803 - DNA, 25 bp, Homo sapien
tgtgtcagccttccggcacccatag

SEQ ID NO: 3430804 - DNA, 25 bp, Homo sapien
cccagtgctgacgagcgagagcatg

SEQ ID NO: 3430805 - DNA, 25 bp, Homo sapien
ctgacgagcgagagcatgatgcgct

SEQ ID NO: 3430806 - DNA, 25 bp, Homo sapien
catcttgatgcgctttttgtccagg

SEQ ID NO: 3430807 - DNA, 25 bp, Homo sapien
agggtctccccctgcttcatcttga

SEQ ID NO: 3430808 - DNA, 25 bp, Homo sapien
aagctgagcttgtctggcgtgtgga

SEQ ID NO: 3430809 - DNA, 25 bp, Homo sapien
gacatgcagacaatgaatgggcagt

SEQ ID NO: 3430810 - DNA, 25 bp, Homo sapien
cttgtctggcgtgtggaacgcgtat

SEQ ID NO: 3430811 - DNA, 25 bp, Homo sapien
tggaacgcgtatgacatgcagacaa

SEQ ID NO: 3430812 - DNA, 25 bp, Homo sapien
ccaggatgatctcggccgcatagaa

SEQ ID NO: 3430813 - DNA, 25 bp, Homo sapien
caggtcccggtagaccacgaagcgg

SEQ ID NO: 3430814 - DNA, 25 bp, Homo sapien
tagaagcgcatgtcagcctctgaga

SEQ ID NO: 3430815 - DNA, 25 bp, Homo sapien
acgaagcggttgtgcatgtgctcca

SEQ ID NO: 3430816 - DNA, 25 bp, Homo sapien
agaggacagccacggaggtccagcc

SEQ ID NO: 3430817 - DNA, 25 bp, Homo sapien
ggtggccgggatgtcgagaggaagg

SEQ ID NO: 3430818 - DNA, 25 bp, Homo sapien
ctggtggccgggatgtcgagaggaa

SEQ ID NO: 3430819 - DNA, 25 bp, Homo sapien
gccgggatgtcgagaggaaggagag

SEQ ID NO: 3430820 - DNA, 25 bp, Homo sapien
caggtccgagatccgcacgtggcca

SEQ ID NO: 3430821 - DNA, 25 bp, Homo sapien
aggcccaggtccgagatccgcacgt

SEQ ID NO: 3430822 - DNA, 25 bp, Homo sapien
tccgagatccgcacgtggccatgct

SEQ ID NO: 3430823 - DNA, 25 bp, Homo sapien
gcccaggtccgagatccgcacgtgg

SEQ ID NO: 3430824 - DNA, 25 bp, Homo sapien
aacttgaagagcatgcaccccagag

SEQ ID NO: 3430825 - DNA, 25 bp, Homo sapien
tgtcgtaggccacgcccttctgcag

SEQ ID NO: 3430826 - DNA, 25 bp, Homo sapien
actgctgtcgtaggccacgcccttc

SEQ ID NO: 3430827 - DNA, 25 bp, Homo sapien
cagcaacttgaagagcatgcacccc

SEQ ID NO: 3430828 - DNA, 25 bp, Homo sapien
tcatgcggtcgatctcatgcttgtc

SEQ ID NO: 3430829 - DNA, 25 bp, Homo sapien
catcgtcagcgtcatgcggtcgatc

SEQ ID NO: 3430830 - DNA, 25 bp, Homo sapien
tgcggtcgatctcatgcttgtcttt

SEQ ID NO: 3430831 - DNA, 25 bp, Homo sapien
cagcgtcatgcggtcgatctcatgc

SEQ ID NO: 3430832 - DNA, 25 bp, Homo sapien
caacccctccagcagggagcgtagt

SEQ ID NO: 3430833 - DNA, 25 bp, Homo sapien
aggcagcccaatctccggttgacat

SEQ ID NO: 3430834 - DNA, 25 bp, Homo sapien
aacccctccagcagggagcgtagtt

SEQ ID NO: 3430835 - DNA, 25 bp, Homo sapien
tccggttgacatccctctgcagcaa

SEQ ID NO: 3430836 - DNA, 25 bp, Homo sapien
gccagttactagctggttccagcag

SEQ ID NO: 3430837 - DNA, 25 bp, Homo sapien
atcatctgtgacaagggcccctctg

SEQ ID NO: 3430838 - DNA, 25 bp, Homo sapien
gaacagaagttcctacatcgtaggg

SEQ ID NO: 3430839 - DNA, 25 bp, Homo sapien
ctgagaacattggacagggctggcc

SEQ ID NO: 3430840 - DNA, 25 bp, Homo sapien
tgcaagaagaccatctgccagtcca

SEQ ID NO: 3430841 - DNA, 25 bp, Homo sapien
gcaagaagaccatctgccagtccag

SEQ ID NO: 3430842 - DNA, 25 bp, Homo sapien
cagggagcggaaaaaggggctctct

SEQ ID NO: 3430843 - DNA, 25 bp, Homo sapien
ccccagtccctgccgcagactgtta

SEQ ID NO: 3430844 - DNA, 25 bp, Homo sapien
agcagaacaggggtcatgggcatta

SEQ ID NO: 3430845 - DNA, 25 bp, Homo sapien
aacaggggtcatgggcattagctcg

SEQ ID NO: 3430846 - DNA, 25 bp, Homo sapien
cagaacaggggtcatgggcattagc

SEQ ID NO: 3430847 - DNA, 25 bp, Homo sapien
acctcccctcgtggggggatcagcg

SEQ ID NO: 3430848 - DNA, 25 bp, Homo sapien
atgtcgaaggcgtcggccgcgttca

SEQ ID NO: 3430849 - DNA, 25 bp, Homo sapien
tcgaaggagccaatgtcgaaggcgt

SEQ ID NO: 3430850 - DNA, 25 bp, Homo sapien
tcctcctcatcgaaggagccaatgt

SEQ ID NO: 3430851 - DNA, 25 bp, Homo sapien
gaactgaggcctacaagctggcagg

SEQ ID NO: 3430852 - DNA, 25 bp, Homo sapien
tagggatggtcagtgcaactgccac

SEQ ID NO: 3430853 - DNA, 25 bp, Homo sapien
gatgccggaataccatcagccacag

SEQ ID NO: 3430854 - DNA, 25 bp, Homo sapien
tcacagcctaggtacaagaggccag

SEQ ID NO: 3430855 - DNA, 25 bp, Homo sapien
taccaggtggatggggcaggggcac

SEQ ID NO: 3430856 - DNA, 25 bp, Homo sapien
tttaccaggtggatggggcaggggc

SEQ ID NO: 3430857 - DNA, 25 bp, Homo sapien
ccaggtggatggggcaggggcacat

SEQ ID NO: 3430858 - DNA, 25 bp, Homo sapien
ctttaccaggtggatggggcagggg

SEQ ID NO: 3430859 - DNA, 25 bp, Homo sapien
gttgcggtagagctcctgatcactg

SEQ ID NO: 3430860 - DNA, 25 bp, Homo sapien
tcagcgttgatggtgtcgaagacag

SEQ ID NO: 3430861 - DNA, 25 bp, Homo sapien
tgctgccaccgctccgagatggtga

SEQ ID NO: 3430862 - DNA, 25 bp, Homo sapien
tccagccggtctgtctcagcgttga

SEQ ID NO: 3430863 - DNA, 25 bp, Homo sapien
agccagctgctcacttctaagcagg

SEQ ID NO: 3430864 - DNA, 25 bp, Homo sapien
gagttccttaaacccgagccagctg

SEQ ID NO: 3430865 - DNA, 25 bp, Homo sapien
gttccttaaacccgagccagctgct

SEQ ID NO: 3430866 - DNA, 25 bp, Homo sapien
ccttaaacccgagccagctgctcac

SEQ ID NO: 3430867 - DNA, 25 bp, Homo sapien
gaggcgagagacagaggagactcag

SEQ ID NO: 3430868 - DNA, 25 bp, Homo sapien
gcgagagacagaggagactcagccg

SEQ ID NO: 3430869 - DNA, 25 bp, Homo sapien
ctgaggcgagagacagaggagactc

SEQ ID NO: 3430870 - DNA, 25 bp, Homo sapien
agagacagaggagactcagccggcc

SEQ ID NO: 3430871 - DNA, 25 bp, Homo sapien
gacatgtagccatgcatgatgcagt

SEQ ID NO: 3430872 - DNA, 25 bp, Homo sapien
ggaacaggtagaagtaccgccgctg

SEQ ID NO: 3430873 - DNA, 25 bp, Homo sapien
acaggtagaagtaccgccgctgcca

SEQ ID NO: 3430874 - DNA, 25 bp, Homo sapien
tcgccccgccactcgaggcggttgg

SEQ ID NO: 3430875 - DNA, 25 bp, Homo sapien
gtgcaggtaagagccgggccggcca

SEQ ID NO: 3430876 - DNA, 25 bp, Homo sapien
ccagggatgggtggtgcaggtaaga

SEQ ID NO: 3430877 - DNA, 25 bp, Homo sapien
gtggtgcaggtaagagccgggccgg

SEQ ID NO: 3430878 - DNA, 25 bp, Homo sapien
gatgggtggtgcaggtaagagccgg

SEQ ID NO: 3430879 - DNA, 25 bp, Homo sapien
tgcgtctcctccaccgactggatct

SEQ ID NO: 3430880 - DNA, 25 bp, Homo sapien
gagcaggcacttgcgctccttgatc

SEQ ID NO: 3430881 - DNA, 25 bp, Homo sapien
tcccaccgcggatcttgaggagcag

SEQ ID NO: 3430882 - DNA, 25 bp, Homo sapien
aaatgaactgtttcccaccgcggat

SEQ ID NO: 3430883 - DNA, 25 bp, Homo sapien
agcccagctctgtcagctggggctc

SEQ ID NO: 3430884 - DNA, 25 bp, Homo sapien
catccctggctcagcccccactcac

SEQ ID NO: 3430885 - DNA, 25 bp, Homo sapien
ccatccctggctcagcccccactca

SEQ ID NO: 3430886 - DNA, 25 bp, Homo sapien
tcagaggccgttggcactgccgcgc

SEQ ID NO: 3430887 - DNA, 25 bp, Homo sapien
tgttcttcatcttgggcacccgctg

SEQ ID NO: 3430888 - DNA, 25 bp, Homo sapien
gggcgagcgcggcttgttcttcatc

SEQ ID NO: 3430889 - DNA, 25 bp, Homo sapien
tggaccagcggcaccttgctcagct

SEQ ID NO: 3430890 - DNA, 25 bp, Homo sapien
tctcgccaacactgtggagcaggac

SEQ ID NO: 3430891 - DNA, 25 bp, Homo sapien
gaaaattcaagtcggatccctgtgc

SEQ ID NO: 3430892 - DNA, 25 bp, Homo sapien
aggcttttcctgaataagggcacag

SEQ ID NO: 3430893 - DNA, 25 bp, Homo sapien
agcttggtgtggcatcatccctcgg

SEQ ID NO: 3430894 - DNA, 25 bp, Homo sapien
tcagcgagacctcaggccaggcgag

SEQ ID NO: 3430895 - DNA, 25 bp, Homo sapien
cagcatcagcgagacctcaggccag

SEQ ID NO: 3430896 - DNA, 25 bp, Homo sapien
ccaggcgaggccagtatggcccaac

SEQ ID NO: 3430897 - DNA, 25 bp, Homo sapien
gcgaggccagtatggcccaacctgc

SEQ ID NO: 3430898 - DNA, 25 bp, Homo sapien
gatggggggcacactgataggcccc

SEQ ID NO: 3430899 - DNA, 25 bp, Homo sapien
gggcacactgataggccccagccag

SEQ ID NO: 3430900 - DNA, 25 bp, Homo sapien
ggggcacactgataggccccagcca

SEQ ID NO: 3430901 - DNA, 25 bp, Homo sapien
ggggggcacactgataggccccagc

SEQ ID NO: 3430902 - DNA, 25 bp, Homo sapien
tggaggagacctggtaccaccgaga

SEQ ID NO: 3430903 - DNA, 25 bp, Homo sapien
gagcagaccaccttggaagccatgg

SEQ ID NO: 3430904 - DNA, 25 bp, Homo sapien
gagtctgagacagccgaatcaggca

SEQ ID NO: 3430905 - DNA, 25 bp, Homo sapien
tcaccaggtacaaaaagagtctgag

SEQ ID NO: 3430906 - DNA, 25 bp, Homo sapien
gaagtgggacccactgcctcacccc

SEQ ID NO: 3430907 - DNA, 25 bp, Homo sapien
ggaatgggcactggacagccactag

SEQ ID NO: 3430908 - DNA, 25 bp, Homo sapien
gaaaaggtgaggaatgggcactgga

SEQ ID NO: 3430909 - DNA, 25 bp, Homo sapien
cgggaaaaggtgaggaatgggcact

SEQ ID NO: 3430910 - DNA, 25 bp, Homo sapien
aatgggcactggacagccactaggt

SEQ ID NO: 3430911 - DNA, 25 bp, Homo sapien
caggcctaacactgttggcacctcc

SEQ ID NO: 3430912 - DNA, 25 bp, Homo sapien
tgccaggcctaacactgttggcacc

SEQ ID NO: 3430913 - DNA, 25 bp, Homo sapien
gtgccaggcctaacactgttggcac

SEQ ID NO: 3430914 - DNA, 25 bp, Homo sapien
gccaggcctaacactgttggcacct

SEQ ID NO: 3430915 - DNA, 25 bp, Homo sapien
cagagccgtcccggcggaggaccgc

SEQ ID NO: 3430916 - DNA, 25 bp, Homo sapien
tcagggataggagttcggggagaga

SEQ ID NO: 3430917 - DNA, 25 bp, Homo sapien
gaagtcagggataggagttcgggga

SEQ ID NO: 3430918 - DNA, 25 bp, Homo sapien
taggagttcggggagagaggggcgc

SEQ ID NO: 3430919 - DNA, 25 bp, Homo sapien
agcaacgagcagacgccactaagtg

SEQ ID NO: 3430920 - DNA, 25 bp, Homo sapien
gggacctggccggtgtctgcaggcc

SEQ ID NO: 3430921 - DNA, 25 bp, Homo sapien
gcctggagacgagcaacgagcagac

SEQ ID NO: 3430922 - DNA, 25 bp, Homo sapien
cttgccggctgagcgggaagcacct

SEQ ID NO: 3430923 - DNA, 25 bp, Homo sapien
tgtgcgggtgaagtggggcgccccg

SEQ ID NO: 3430924 - DNA, 25 bp, Homo sapien
gggtgtgcgggtgaagtggggcgcc

SEQ ID NO: 3430925 - DNA, 25 bp, Homo sapien
tgcgggtgaagtggggcgccccggc

SEQ ID NO: 3430926 - DNA, 25 bp, Homo sapien
gtgtgcgggtgaagtggggcgcccc

SEQ ID NO: 3430927 - DNA, 25 bp, Homo sapien
gggcggtgcccggttacagctccgc

SEQ ID NO: 3430928 - DNA, 25 bp, Homo sapien
tgcagccgtgatgcctgcgtttccc

SEQ ID NO: 3430929 - DNA, 25 bp, Homo sapien
cagagcaaccgcgagcgcccgagga

SEQ ID NO: 3430930 - DNA, 25 bp, Homo sapien
gcactgggcccctcggtagtgcacg

SEQ ID NO: 3430931 - DNA, 25 bp, Homo sapien
cgagccggtgcagcgggaaggtggg

SEQ ID NO: 3430932 - DNA, 25 bp, Homo sapien
tgccggttcgcccagacgagccggt

SEQ ID NO: 3430933 - DNA, 25 bp, Homo sapien
ttcgcgatgccggttcgcccagacg

SEQ ID NO: 3430934 - DNA, 25 bp, Homo sapien
cagtgcggcctccagttcgcgatgc

SEQ ID NO: 3430935 - DNA, 25 bp, Homo sapien
gcggggcctggtcaggcagagctgc

SEQ ID NO: 3430936 - DNA, 25 bp, Homo sapien
agagggtggcctgcgtgtcctggca

SEQ ID NO: 3430937 - DNA, 25 bp, Homo sapien
caggttgtcaggagtttggcggaac

SEQ ID NO: 3430938 - DNA, 25 bp, Homo sapien
gctgcaggttgtcaggagtttggcg

SEQ ID NO: 3430939 - DNA, 25 bp, Homo sapien
aatcgctgtgggaaataaggacggc

SEQ ID NO: 3430940 - DNA, 25 bp, Homo sapien
ggttgggaatcgctgtgggaaataa

SEQ ID NO: 3430941 - DNA, 25 bp, Homo sapien
tgggaatcgctgtgggaaataagga

SEQ ID NO: 3430942 - DNA, 25 bp, Homo sapien
tgggaaataaggacggcggactgac

SEQ ID NO: 3430943 - DNA, 25 bp, Homo sapien
gttctctttgcccacgttggcattg

SEQ ID NO: 3430944 - DNA, 25 bp, Homo sapien
cagccctggcggttctctttgccca

SEQ ID NO: 3430945 - DNA, 25 bp, Homo sapien
aggtttcccagagacacggccagct

SEQ ID NO: 3430946 - DNA, 25 bp, Homo sapien
cattgtgtcgaaggagcactctcac

SEQ ID NO: 3430947 - DNA, 25 bp, Homo sapien
gggagccccttgtcctctgcagtac

SEQ ID NO: 3430948 - DNA, 25 bp, Homo sapien
ctggctgctcactgccccccgcctg

SEQ ID NO: 3430949 - DNA, 25 bp, Homo sapien
tgaggggagccctccagatgacccc

SEQ ID NO: 3430950 - DNA, 25 bp, Homo sapien
agcctcagggggagccccttgtcct

SEQ ID NO: 3430951 - DNA, 25 bp, Homo sapien
ctcggggtctccagtgctgactgcc

SEQ ID NO: 3430952 - DNA, 25 bp, Homo sapien
ggtctccagtgctgactgcctcctg

SEQ ID NO: 3430953 - DNA, 25 bp, Homo sapien
tcggggtctccagtgctgactgcct

SEQ ID NO: 3430954 - DNA, 25 bp, Homo sapien
tccagtgctgactgcctcctgcagg

SEQ ID NO: 3430955 - DNA, 25 bp, Homo sapien
tgttgagcagttccggaatgcccgc

SEQ ID NO: 3430956 - DNA, 25 bp, Homo sapien
tagtcccgatactggagcaccagct

SEQ ID NO: 3430957 - DNA, 25 bp, Homo sapien
ccctctggtagtcccgatactggag

SEQ ID NO: 3430958 - DNA, 25 bp, Homo sapien
ttgttgagcagttccggaatgcccg

SEQ ID NO: 3430959 - DNA, 25 bp, Homo sapien
caggcctggcacagtaaccagggtg

SEQ ID NO: 3430960 - DNA, 25 bp, Homo sapien
cacaaactgggtgcctttccaaggc

SEQ ID NO: 3430961 - DNA, 25 bp, Homo sapien
gggtcaagatagacagacctccttg

SEQ ID NO: 3430962 - DNA, 25 bp, Homo sapien
gcaggaggcacactgcacaaactgg

SEQ ID NO: 3430963 - DNA, 25 bp, Homo sapien
gacgcactgctatggctcagctacg

SEQ ID NO: 3430964 - DNA, 25 bp, Homo sapien
gggtttcaggccataatccaccgag

SEQ ID NO: 3430965 - DNA, 25 bp, Homo sapien
tgagatagtatgctctgccagccag

SEQ ID NO: 3430966 - DNA, 25 bp, Homo sapien
ggcactacagtggtcttcagacaat

SEQ ID NO: 3430967 - DNA, 25 bp, Homo sapien
tcatctcaacgtagaaatcgggggc

SEQ ID NO: 3430968 - DNA, 25 bp, Homo sapien
tcccacttcatctcaacgtagaaat

SEQ ID NO: 3430969 - DNA, 25 bp, Homo sapien
ccacttcatctcaacgtagaaatcg

SEQ ID NO: 3430970 - DNA, 25 bp, Homo sapien
acttcatctcaacgtagaaatcggg

SEQ ID NO: 3430971 - DNA, 25 bp, Homo sapien
ccaccccaaatccctgggagcccag

SEQ ID NO: 3430972 - DNA, 25 bp, Homo sapien
tgggagcccagaggtccccactcac

SEQ ID NO: 3430973 - DNA, 25 bp, Homo sapien
ctgcagggtgcacaggggtcactgg

SEQ ID NO: 3430974 - DNA, 25 bp, Homo sapien
gcacaggggtcactgggggtctttc

SEQ ID NO: 3430975 - DNA, 25 bp, Homo sapien
ccttgaagatgaagctcctccggcc

SEQ ID NO: 3430976 - DNA, 25 bp, Homo sapien
ggtcatgtgctcgaagcccaggaga

SEQ ID NO: 3430977 - DNA, 25 bp, Homo sapien
actggtgtctactcgcaggctctca

SEQ ID NO: 3430978 - DNA, 25 bp, Homo sapien
cgcggtacacatcgcttgggcacat

SEQ ID NO: 3430979 - DNA, 25 bp, Homo sapien
cacctgctgccaagtgggtcagtct

SEQ ID NO: 3430980 - DNA, 25 bp, Homo sapien
ccagcagtgcagagagggcgatcat

SEQ ID NO: 3430981 - DNA, 25 bp, Homo sapien
tgcaatgagtttgtccagagctcac

SEQ ID NO: 3430982 - DNA, 25 bp, Homo sapien
gagggcgatcatgtaccctcagcca

SEQ ID NO: 3430983 - DNA, 25 bp, Homo sapien
tggacagagggggcgcaaatcagtg

SEQ ID NO: 3430984 - DNA, 25 bp, Homo sapien
gtaggggtggacagagggggcgcaa

SEQ ID NO: 3430985 - DNA, 25 bp, Homo sapien
ggtaggggtggacagagggggcgca

SEQ ID NO: 3430986 - DNA, 25 bp, Homo sapien
ggggtggacagagggggcgcaaatc

SEQ ID NO: 3430987 - DNA, 25 bp, Homo sapien
tgtttcgggctcctgcagagtgagc

SEQ ID NO: 3430988 - DNA, 25 bp, Homo sapien
gaggcgactggccacatgctcctcg

SEQ ID NO: 3430989 - DNA, 25 bp, Homo sapien
cacattacgagtgtccaggtgggtg

SEQ ID NO: 3430990 - DNA, 25 bp, Homo sapien
tctcaaaggccacattacgagtgtc

SEQ ID NO: 3430991 - DNA, 25 bp, Homo sapien
cagtctgagtgagacacgggctgca

SEQ ID NO: 3430992 - DNA, 25 bp, Homo sapien
tccactgactgttaaggcaagaggg

SEQ ID NO: 3430993 - DNA, 25 bp, Homo sapien
taatggtggctcttgctatccgtcc

SEQ ID NO: 3430994 - DNA, 25 bp, Homo sapien
caacattggtgcaaagagctgccgt

SEQ ID NO: 3430995 - DNA, 25 bp, Homo sapien
ttcatataaaatgcgagggtcccaa

SEQ ID NO: 3430996 - DNA, 25 bp, Homo sapien
cattgttaacatggtactattcccc

SEQ ID NO: 3430997 - DNA, 25 bp, Homo sapien
tcccacctgactgtagaaattgaca

SEQ ID NO: 3430998 - DNA, 25 bp, Homo sapien
attcatatattctgcctacactggg

SEQ ID NO: 3430999 - DNA, 25 bp, Homo sapien
aatggcttcaccactgaatcctacc

SEQ ID NO: 3431000 - DNA, 25 bp, Homo sapien
caaaatacgaaccaaccaaatctag

SEQ ID NO: 3431001 - DNA, 25 bp, Homo sapien
gaatcctaccaatcttttgaagaca

SEQ ID NO: 3431002 - DNA, 25 bp, Homo sapien
cttcagttatgaggcatcacccaga

SEQ ID NO: 3431003 - DNA, 25 bp, Homo sapien
gataagaacaacactacagctggac

SEQ ID NO: 3431004 - DNA, 25 bp, Homo sapien
cagggccccttctcgctatgaaaca

SEQ ID NO: 3431005 - DNA, 25 bp, Homo sapien
tagctaggttgaccacggtgggcaa

SEQ ID NO: 3431006 - DNA, 25 bp, Homo sapien
aacatatcaaaacttatggccgggc

SEQ ID NO: 3431007 - DNA, 25 bp, Homo sapien
tttccatcttctcagaccgccagcc

SEQ ID NO: 3431008 - DNA, 25 bp, Homo sapien
tagccgctaacagtttccatcttct

SEQ ID NO: 3431009 - DNA, 25 bp, Homo sapien
cttggcctcgtagccgctaacagtt

SEQ ID NO: 3431010 - DNA, 25 bp, Homo sapien
gccagccccagataccacatttgtt

SEQ ID NO: 3431011 - DNA, 25 bp, Homo sapien
caggaagtcaccaacgaggagatgc

SEQ ID NO: 3431012 - DNA, 25 bp, Homo sapien
catgatgtgggtgagccctgtgtac

SEQ ID NO: 3431013 - DNA, 25 bp, Homo sapien
cttttgatctcggtaccctgggtag

SEQ ID NO: 3431014 - DNA, 25 bp, Homo sapien
tcaggcccgctgagttcccacaaat

SEQ ID NO: 3431015 - DNA, 25 bp, Homo sapien
atgagatcttgctccccaaaatgga

SEQ ID NO: 3431016 - DNA, 25 bp, Homo sapien
tgagatcttgctccccaaaatggag

SEQ ID NO: 3431017 - DNA, 25 bp, Homo sapien
gatgagatcttgctccccaaaatgg

SEQ ID NO: 3431018 - DNA, 25 bp, Homo sapien
agctgggggctcagagcctgctccc

SEQ ID NO: 3431019 - DNA, 25 bp, Homo sapien
gggctcagagcctgctccccacact

SEQ ID NO: 3431020 - DNA, 25 bp, Homo sapien
agcctcaccagtgcagaacccaggt

SEQ ID NO: 3431021 - DNA, 25 bp, Homo sapien
ggagcaggggacacggggagctggg

SEQ ID NO: 3431022 - DNA, 25 bp, Homo sapien
ctccgtgcgtgtgcgtgtcaccagc

SEQ ID NO: 3431023 - DNA, 25 bp, Homo sapien
ctttgctcctcgacttgtcctgatc

SEQ ID NO: 3431024 - DNA, 25 bp, Homo sapien
tcctgatcagagaggtgctccgtgc

SEQ ID NO: 3431025 - DNA, 25 bp, Homo sapien
gctccacgttggtggcactgtacac

SEQ ID NO: 3431026 - DNA, 25 bp, Homo sapien
gaaggactggaatggagtcttcccc

SEQ ID NO: 3431027 - DNA, 25 bp, Homo sapien
aggaaggactggaatggagtcttcc

SEQ ID NO: 3431028 - DNA, 25 bp, Homo sapien
aaggactggaatggagtcttccccg

SEQ ID NO: 3431029 - DNA, 25 bp, Homo sapien
ggaaggactggaatggagtcttccc

SEQ ID NO: 3431030 - DNA, 25 bp, Homo sapien
cagggcggactcagccatcaaggtg

SEQ ID NO: 3431031 - DNA, 25 bp, Homo sapien
ggtcccagggcggactcagccatca

SEQ ID NO: 3431032 - DNA, 25 bp, Homo sapien
atcaaggtgacagagggtgccctcc

SEQ ID NO: 3431033 - DNA, 25 bp, Homo sapien
gactcagccatcaaggtgacagagg

SEQ ID NO: 3431034 - DNA, 25 bp, Homo sapien
ctgtggggttggtggggctggctgc

SEQ ID NO: 3431035 - DNA, 25 bp, Homo sapien
gtggggttggtggggctggctgcct

SEQ ID NO: 3431036 - DNA, 25 bp, Homo sapien
tggggctggctgcctgctgcacggg

SEQ ID NO: 3431037 - DNA, 25 bp, Homo sapien
gggctggctgcctgctgcacggggg

SEQ ID NO: 3431038 - DNA, 25 bp, Homo sapien
tctcgatggggcggccaatgttccg

SEQ ID NO: 3431039 - DNA, 25 bp, Homo sapien
agttggggtcgaagtactcctcagg

SEQ ID NO: 3431040 - DNA, 25 bp, Homo sapien
aagttggggtcgaagtactcctcag

SEQ ID NO: 3431041 - DNA, 25 bp, Homo sapien
tgtactttgctggacatctcgatgg

SEQ ID NO: 3431042 - DNA, 25 bp, Homo sapien
tcacgaggcaagagcgtaactgttc

SEQ ID NO: 3431043 - DNA, 25 bp, Homo sapien
caaactaccggttttctgtgccaag

SEQ ID NO: 3431044 - DNA, 25 bp, Homo sapien
gagtgggtccctaactatgacaggc

SEQ ID NO: 3431045 - DNA, 25 bp, Homo sapien
taactgttctgttccaccaaggcag

SEQ ID NO: 3431046 - DNA, 25 bp, Homo sapien
taagagaatcctcctgagatggtgg

SEQ ID NO: 3431047 - DNA, 25 bp, Homo sapien
ggttcgaatcccagcgactgttggg

SEQ ID NO: 3431048 - DNA, 25 bp, Homo sapien
cagctcacgtgttgccaaactttta

SEQ ID NO: 3431049 - DNA, 25 bp, Homo sapien
aacttttatgtccagcacaccccag

SEQ ID NO: 3431050 - DNA, 25 bp, Homo sapien
cggctggtggcccttccattgagga

SEQ ID NO: 3431051 - DNA, 25 bp, Homo sapien
tggtggcccttccattgaggactgc

SEQ ID NO: 3431052 - DNA, 25 bp, Homo sapien
gctctgctcagatgccgctgcccgc

SEQ ID NO: 3431053 - DNA, 25 bp, Homo sapien
cctctggttcgtgggcagctgcctt

SEQ ID NO: 3431054 - DNA, 25 bp, Homo sapien
agggagagcgggtgctcttcactca

SEQ ID NO: 3431055 - DNA, 25 bp, Homo sapien
cttggcaaagtgagcgttgctgatg

SEQ ID NO: 3431056 - DNA, 25 bp, Homo sapien
gcagagtgatgaagtcgcgcagctt

SEQ ID NO: 3431057 - DNA, 25 bp, Homo sapien
gctgatggccattaggtcgatgatg

SEQ ID NO: 3431058 - DNA, 25 bp, Homo sapien
ctgagccctggcggagagccacctg

SEQ ID NO: 3431059 - DNA, 25 bp, Homo sapien
acgcctgagccctggcggagagcca

SEQ ID NO: 3431060 - DNA, 25 bp, Homo sapien
agccctggcggagagccacctgtgc

SEQ ID NO: 3431061 - DNA, 25 bp, Homo sapien
ccacgcctgagccctggcggagagc

SEQ ID NO: 3431062 - DNA, 25 bp, Homo sapien
ggtgatgcgggcattgagcacgtgg

SEQ ID NO: 3431063 - DNA, 25 bp, Homo sapien
acccacacggagctcaggggctcat

SEQ ID NO: 3431064 - DNA, 25 bp, Homo sapien
ggccggcacccacacggagctcagg

SEQ ID NO: 3431065 - DNA, 25 bp, Homo sapien
ttgagcacgtggaaaaggggaatct

SEQ ID NO: 3431066 - DNA, 25 bp, Homo sapien
ctcaacccgcggggcttggtgacca

SEQ ID NO: 3431067 - DNA, 25 bp, Homo sapien
ggcttggtgaccagaaagctgtgca

SEQ ID NO: 3431068 - DNA, 25 bp, Homo sapien
gggcttggtgaccagaaagctgtgc

SEQ ID NO: 3431069 - DNA, 25 bp, Homo sapien
ggccacgctcaacccgcggggcttg

SEQ ID NO: 3431070 - DNA, 25 bp, Homo sapien
gctgtacccgttgggcacttcaaac

SEQ ID NO: 3431071 - DNA, 25 bp, Homo sapien
ctgtacccgttgggcacttcaaaca

SEQ ID NO: 3431072 - DNA, 25 bp, Homo sapien
ggctcgttgcgctccatgcccagca

SEQ ID NO: 3431073 - DNA, 25 bp, Homo sapien
cctcagtgcccgcttcaagcaggct

SEQ ID NO: 3431074 - DNA, 25 bp, Homo sapien
gcgaactgcaggaggtcatcgtcct

SEQ ID NO: 3431075 - DNA, 25 bp, Homo sapien
tcccggaggggctcgttgcgctcca

SEQ ID NO: 3431076 - DNA, 25 bp, Homo sapien
gcagaggccagagcccaccccctgg

SEQ ID NO: 3431077 - DNA, 25 bp, Homo sapien
agaggccagagcccaccccctgggc

SEQ ID NO: 3431078 - DNA, 25 bp, Homo sapien
aggccagagcccaccccctgggcaa

SEQ ID NO: 3431079 - DNA, 25 bp, Homo sapien
gagcccaccccctgggcaagtccca

SEQ ID NO: 3431080 - DNA, 25 bp, Homo sapien
ccacagctgtcacttctgccgtgtg

SEQ ID NO: 3431081 - DNA, 25 bp, Homo sapien
ccagagcccacagctgtcacttctg

SEQ ID NO: 3431082 - DNA, 25 bp, Homo sapien
agcccacagctgtcacttctgccgt

SEQ ID NO: 3431083 - DNA, 25 bp, Homo sapien
cacagctgtcacttctgccgtgtgg

SEQ ID NO: 3431084 - DNA, 25 bp, Homo sapien
gccgggtgttggtcagggcttccca

SEQ ID NO: 3431085 - DNA, 25 bp, Homo sapien
ctgaagctgttcctcataaaccgtg

SEQ ID NO: 3431086 - DNA, 25 bp, Homo sapien
gctgaagctgttcctcataaaccgt

SEQ ID NO: 3431087 - DNA, 25 bp, Homo sapien
ctgggaggggatcctgggcccctgg

SEQ ID NO: 3431088 - DNA, 25 bp, Homo sapien
gggctctgtggacagctgcaggctt

SEQ ID NO: 3431089 - DNA, 25 bp, Homo sapien
gctctgtggacagctgcaggctttc

SEQ ID NO: 3431090 - DNA, 25 bp, Homo sapien
ggcccctgggctctgtggacagctg

SEQ ID NO: 3431091 - DNA, 25 bp, Homo sapien
ctgcaggatccgctgtaagtcctcc

SEQ ID NO: 3431092 - DNA, 25 bp, Homo sapien
aattacaaaagcgggcagggagtgg

SEQ ID NO: 3431093 - DNA, 25 bp, Homo sapien
aaattacaaaagcgggcagggagtg

SEQ ID NO: 3431094 - DNA, 25 bp, Homo sapien
ataaattacaaaagcgggcagggag

SEQ ID NO: 3431095 - DNA, 25 bp, Homo sapien
ctcaaccccgcggacagtcctggac

SEQ ID NO: 3431096 - DNA, 25 bp, Homo sapien
cccgcggacagtcctggacccgcag

SEQ ID NO: 3431097 - DNA, 25 bp, Homo sapien
gagccaggccgcgagcacctgggct

SEQ ID NO: 3431098 - DNA, 25 bp, Homo sapien
gaccaggaaggacggacggcgccac

SEQ ID NO: 3431099 - DNA, 25 bp, Homo sapien
gcgaacggctcactgtgaccagggc

SEQ ID NO: 3431100 - DNA, 25 bp, Homo sapien
cgaacggctcactgtgaccagggcc

SEQ ID NO: 3431101 - DNA, 25 bp, Homo sapien
gggggcgaacggctcactgtgacca

SEQ ID NO: 3431102 - DNA, 25 bp, Homo sapien
gggcgaacggctcactgtgaccagg

SEQ ID NO: 3431103 - DNA, 25 bp, Homo sapien
cccccagcgccctccagcccgagcc

SEQ ID NO: 3431104 - DNA, 25 bp, Homo sapien
agcgccctccagcccgagccccggg

SEQ ID NO: 3431105 - DNA, 25 bp, Homo sapien
cccagcgccctccagcccgagcccc

SEQ ID NO: 3431106 - DNA, 25 bp, Homo sapien
cagagaccctcgaggcccccagcgc

SEQ ID NO: 3431107 - DNA, 25 bp, Homo sapien
gtcggctgggtgggcgccgagtgtg

SEQ ID NO: 3431108 - DNA, 25 bp, Homo sapien
gctgggtgggcgccgagtgtggcgg

SEQ ID NO: 3431109 - DNA, 25 bp, Homo sapien
ggggggcgcgctcagatcggggcct

SEQ ID NO: 3431110 - DNA, 25 bp, Homo sapien
gggcgcgctcagatcggggcctccg

SEQ ID NO: 3431111 - DNA, 25 bp, Homo sapien
cccagggcagggtgagggcggggag

SEQ ID NO: 3431112 - DNA, 25 bp, Homo sapien
tgagggcggggagggctgtcccctc

SEQ ID NO: 3431113 - DNA, 25 bp, Homo sapien
tgtcccctcccctctctcaggaatt

SEQ ID NO: 3431114 - DNA, 25 bp, Homo sapien
ctgcggagagagcagccccagggca

SEQ ID NO: 3431115 - DNA, 25 bp, Homo sapien
gctggagtcgactccttcgctggac

SEQ ID NO: 3431116 - DNA, 25 bp, Homo sapien
ggagtcgactccttcgctggaccgc

SEQ ID NO: 3431117 - DNA, 25 bp, Homo sapien
cttcgctggagtcgactccttcgct

SEQ ID NO: 3431118 - DNA, 25 bp, Homo sapien
tcgctggagtcgactccttcgctgg

SEQ ID NO: 3431119 - DNA, 25 bp, Homo sapien
ctgccccacaaatttggcagtgggc

SEQ ID NO: 3431120 - DNA, 25 bp, Homo sapien
agtgggcttcgctgcgcgtcctccg

SEQ ID NO: 3431121 - DNA, 25 bp, Homo sapien
cacaaatttggcagtgggcttcgct

SEQ ID NO: 3431122 - DNA, 25 bp, Homo sapien
aaatttggcagtgggcttcgctgcg

SEQ ID NO: 3431123 - DNA, 25 bp, Homo sapien
cctcctgccgttcggcccgtggcca

SEQ ID NO: 3431124 - DNA, 25 bp, Homo sapien
gctgggaacatggtcggggacccag

SEQ ID NO: 3431125 - DNA, 25 bp, Homo sapien
catgccctcctgccgttcggcccgt

SEQ ID NO: 3431126 - DNA, 25 bp, Homo sapien
tgggaacatggtcggggacccagga

SEQ ID NO: 3431127 - DNA, 25 bp, Homo sapien
gcggcctcagcagctgtaccatgag

SEQ ID NO: 3431128 - DNA, 25 bp, Homo sapien
ggactctgggatccttgcccgaagt

SEQ ID NO: 3431129 - DNA, 25 bp, Homo sapien
ggcggatgtcatcctgcggcctcag

SEQ ID NO: 3431130 - DNA, 25 bp, Homo sapien
ccgaagtctgtctggtccccgtgga

SEQ ID NO: 3431131 - DNA, 25 bp, Homo sapien
cccggagctccacatgggccctcac

SEQ ID NO: 3431132 - DNA, 25 bp, Homo sapien
cccccggagctccacatgggccctc

SEQ ID NO: 3431133 - DNA, 25 bp, Homo sapien
ccccggagctccacatgggccctca

SEQ ID NO: 3431134 - DNA, 25 bp, Homo sapien
ctaccagcaggtagcggagccgggg

SEQ ID NO: 3431135 - DNA, 25 bp, Homo sapien
agaccttctccttctcgtgtagaaa

SEQ ID NO: 3431136 - DNA, 25 bp, Homo sapien
tcagaccttctccttctcgtgtaga

SEQ ID NO: 3431137 - DNA, 25 bp, Homo sapien
gaaatccacgcccaggaggaccgtc

SEQ ID NO: 3431138 - DNA, 25 bp, Homo sapien
aggaggaccgtctcatcctggctca

SEQ ID NO: 3431139 - DNA, 25 bp, Homo sapien
tgtccctcacctctttgcccctcct

SEQ ID NO: 3431140 - DNA, 25 bp, Homo sapien
aagtacacctgggtgtcactccaga

SEQ ID NO: 3431141 - DNA, 25 bp, Homo sapien
tccatctaagtacacctgggtgtca

SEQ ID NO: 3431142 - DNA, 25 bp, Homo sapien
tctaagtacacctgggtgtcactcc

SEQ ID NO: 3431143 - DNA, 25 bp, Homo sapien
tacacctgggtgtcactccagaggg

SEQ ID NO: 3431144 - DNA, 25 bp, Homo sapien
aagttctactgtaccctggtgccca

SEQ ID NO: 3431145 - DNA, 25 bp, Homo sapien
gctctgcgacagagaacccatcctt

SEQ ID NO: 3431146 - DNA, 25 bp, Homo sapien
ggagtcaggtgccttgctcaggatc

SEQ ID NO: 3431147 - DNA, 25 bp, Homo sapien
cccatccttttgctggatacgggaa

SEQ ID NO: 3431148 - DNA, 25 bp, Homo sapien
gatgggcttgaagatccggctttgc

SEQ ID NO: 3431149 - DNA, 25 bp, Homo sapien
ttgcccaccagacgtcacgctgaag

SEQ ID NO: 3431150 - DNA, 25 bp, Homo sapien
agatccggctttgcccaccagacgt

SEQ ID NO: 3431151 - DNA, 25 bp, Homo sapien
gatggagatgggcttgaagatccgg

SEQ ID NO: 3431152 - DNA, 25 bp, Homo sapien
gctggcctgagtccaggcagtctct

SEQ ID NO: 3431153 - DNA, 25 bp, Homo sapien
tggcctgagtccaggcagtctctgt

SEQ ID NO: 3431154 - DNA, 25 bp, Homo sapien
cctgagtccaggcagtctctgtcct

SEQ ID NO: 3431155 - DNA, 25 bp, Homo sapien
gagtccaggcagtctctgtccttac

SEQ ID NO: 3431156 - DNA, 25 bp, Homo sapien
ggtacaaggccgctgcctagagctg

SEQ ID NO: 3431157 - DNA, 25 bp, Homo sapien
gagttcagtctctcctggtagtggc

SEQ ID NO: 3431158 - DNA, 25 bp, Homo sapien
tcattgaggcagctctgttcggagt

SEQ ID NO: 3431159 - DNA, 25 bp, Homo sapien
cacatgcttggtgcaatacctggag

SEQ ID NO: 3431160 - DNA, 25 bp, Homo sapien
ctgggagcagagcccctcagtcaag

SEQ ID NO: 3431161 - DNA, 25 bp, Homo sapien
agcagagcccctcagtcaaggggcc

SEQ ID NO: 3431162 - DNA, 25 bp, Homo sapien
gggagcagagcccctcagtcaaggg

SEQ ID NO: 3431163 - DNA, 25 bp, Homo sapien
agagcccctcagtcaaggggccctt

SEQ ID NO: 3431164 - DNA, 25 bp, Homo sapien
ccacagctcagcacggatcgcctgc

SEQ ID NO: 3431165 - DNA, 25 bp, Homo sapien
gctcagcacggatcgcctgctccat

SEQ ID NO: 3431166 - DNA, 25 bp, Homo sapien
cagctcagcacggatcgcctgctcc

SEQ ID NO: 3431167 - DNA, 25 bp, Homo sapien
cacagctcagcacggatcgcctgct

SEQ ID NO: 3431168 - DNA, 25 bp, Homo sapien
agtgacactctccaggtcactgaca

SEQ ID NO: 3431169 - DNA, 25 bp, Homo sapien
ctttggaagtgacactctccaggtc

SEQ ID NO: 3431170 - DNA, 25 bp, Homo sapien
ctctttggaagtgacactctccagg

SEQ ID NO: 3431171 - DNA, 25 bp, Homo sapien
tgacactctccaggtcactgacatc

SEQ ID NO: 3431172 - DNA, 25 bp, Homo sapien
tcgatgaagtcacggtactgctgga

SEQ ID NO: 3431173 - DNA, 25 bp, Homo sapien
gtcgatgaagtcacggtactgctgg

SEQ ID NO: 3431174 - DNA, 25 bp, Homo sapien
aagtcacggtactgctggaggggga

SEQ ID NO: 3431175 - DNA, 25 bp, Homo sapien
atgaagtcacggtactgctggaggg

SEQ ID NO: 3431176 - DNA, 25 bp, Homo sapien
gatgcgggaggctcggtcccgctgt

SEQ ID NO: 3431177 - DNA, 25 bp, Homo sapien
gcgggaggctcggtcccgctgtgcc

SEQ ID NO: 3431178 - DNA, 25 bp, Homo sapien
gggaagatgcgggaggctcggtccc

SEQ ID NO: 3431179 - DNA, 25 bp, Homo sapien
gaagatgcgggaggctcggtcccgc

SEQ ID NO: 3431180 - DNA, 25 bp, Homo sapien
tcacagctgccagcggtccccatgg

SEQ ID NO: 3431181 - DNA, 25 bp, Homo sapien
gagagagggaacagcacatttctcc

SEQ ID NO: 3431182 - DNA, 25 bp, Homo sapien
tggcctgccgccctcacagctgcca

SEQ ID NO: 3431183 - DNA, 25 bp, Homo sapien
gagggaacagcacatttctcctctc

SEQ ID NO: 3431184 - DNA, 25 bp, Homo sapien
tcctccaggtttgctgcgttccact

SEQ ID NO: 3431185 - DNA, 25 bp, Homo sapien
tccaggtttgctgcgttccactctg

SEQ ID NO: 3431186 - DNA, 25 bp, Homo sapien
gctcctccaggtttgctgcgttcca

SEQ ID NO: 3431187 - DNA, 25 bp, Homo sapien
ggtttgctgcgttccactctgagcc

SEQ ID NO: 3431188 - DNA, 25 bp, Homo sapien
ggcccacaggcgcattcaagaggag

SEQ ID NO: 3431189 - DNA, 25 bp, Homo sapien
tcgtcttggcgtggctgaggccctt

SEQ ID NO: 3431190 - DNA, 25 bp, Homo sapien
caaggcagttacagcagtatgcgct

SEQ ID NO: 3431191 - DNA, 25 bp, Homo sapien
gcgctgctgcttctcgtcttggcgt

SEQ ID NO: 3431192 - DNA, 25 bp, Homo sapien
aggcagccaggtccccacggggaga

SEQ ID NO: 3431193 - DNA, 25 bp, Homo sapien
cagccaggtccccacggggagaagg

SEQ ID NO: 3431194 - DNA, 25 bp, Homo sapien
agagcaggcagccaggtccccacgg

SEQ ID NO: 3431195 - DNA, 25 bp, Homo sapien
cacggggagaagggcagttccttct

SEQ ID NO: 3431196 - DNA, 25 bp, Homo sapien
cctgggcctcgctttagctctgagt

SEQ ID NO: 3431197 - DNA, 25 bp, Homo sapien
aggcccactggcaatcggacctggc

SEQ ID NO: 3431198 - DNA, 25 bp, Homo sapien
tagagaacagcttttgagctaagct

SEQ ID NO: 3431199 - DNA, 25 bp, Homo sapien
cctggctgcgaccttagaccaatca

SEQ ID NO: 3431200 - DNA, 25 bp, Homo sapien
tctcccgggccatgttcaagatgtg

SEQ ID NO: 3431201 - DNA, 25 bp, Homo sapien
cagcctcaatgaagcggtgcgtctc

SEQ ID NO: 3431202 - DNA, 25 bp, Homo sapien
cacattgtggtaggtgaagcgctca

SEQ ID NO: 3431203 - DNA, 25 bp, Homo sapien
tctccttccagtgcggcagcagctg

SEQ ID NO: 3431204 - DNA, 25 bp, Homo sapien
cagtggaccagcacgtgggtgccct

SEQ ID NO: 3431205 - DNA, 25 bp, Homo sapien
cattcgtactgcttcatggcatagg

SEQ ID NO: 3431206 - DNA, 25 bp, Homo sapien
ccctggtagatctgcagctggcgca

SEQ ID NO: 3431207 - DNA, 25 bp, Homo sapien
gctgacgcccatcttgcagtggacc

SEQ ID NO: 3431208 - DNA, 25 bp, Homo sapien
cccctgccactcgctcccatcccat

SEQ ID NO: 3431209 - DNA, 25 bp, Homo sapien
ccctgccactcgctcccatcccata

SEQ ID NO: 3431210 - DNA, 25 bp, Homo sapien
cctgccactcgctcccatcccatac

SEQ ID NO: 3431211 - DNA, 25 bp, Homo sapien
ggtgggaatggtgtagagacttcag

SEQ ID NO: 3431212 - DNA, 25 bp, Homo sapien
aggtgggaatggtgtagagacttca

SEQ ID NO: 3431213 - DNA, 25 bp, Homo sapien
tgggaatggtgtagagacttcaggg

SEQ ID NO: 3431214 - DNA, 25 bp, Homo sapien
ggaatggtgtagagacttcaggggc

SEQ ID NO: 3431215 - DNA, 25 bp, Homo sapien
aggtttatacgtggccgtggcccag

SEQ ID NO: 3431216 - DNA, 25 bp, Homo sapien
ctgatggacctcatgacccctcgga

SEQ ID NO: 3431217 - DNA, 25 bp, Homo sapien
ttccatgcctacaaccttctcctcc

SEQ ID NO: 3431218 - DNA, 25 bp, Homo sapien
catgacccctcggaggtttatacgt

SEQ ID NO: 3431219 - DNA, 25 bp, Homo sapien
tgtcactggtctctgaggtgctctc

SEQ ID NO: 3431220 - DNA, 25 bp, Homo sapien
gtcactggtctctgaggtgctctcc

SEQ ID NO: 3431221 - DNA, 25 bp, Homo sapien
catgtgaagactcgtgggaagagaa

SEQ ID NO: 3431222 - DNA, 25 bp, Homo sapien
cagaggctcttcatgtgaagactcg

SEQ ID NO: 3431223 - DNA, 25 bp, Homo sapien
cttggtccttgcaagctgtgggaag

SEQ ID NO: 3431224 - DNA, 25 bp, Homo sapien
ctcccttggtccttgcaagctgtgg

SEQ ID NO: 3431225 - DNA, 25 bp, Homo sapien
ggtccggttggccaccacggcactg

SEQ ID NO: 3431226 - DNA, 25 bp, Homo sapien
ggagggtaaccactgactggcggga

SEQ ID NO: 3431227 - DNA, 25 bp, Homo sapien
ctgggtccggttggccaccacggca

SEQ ID NO: 3431228 - DNA, 25 bp, Homo sapien
taaccactgactggcgggacttcag

SEQ ID NO: 3431229 - DNA, 25 bp, Homo sapien
gaacctgggcgtagaggaaatgcag

SEQ ID NO: 3431230 - DNA, 25 bp, Homo sapien
ccactgtcatgcacgctggcctgtc

SEQ ID NO: 3431231 - DNA, 25 bp, Homo sapien
cactgtcatgcacgctggcctgtct

SEQ ID NO: 3431232 - DNA, 25 bp, Homo sapien
catgggcctgggacttaaggctgta

SEQ ID NO: 3431233 - DNA, 25 bp, Homo sapien
taccacatcccagttagaaagtctt

SEQ ID NO: 3431234 - DNA, 25 bp, Homo sapien
gctgagaggaatgtgtgcggcaaca

SEQ ID NO: 3431235 - DNA, 25 bp, Homo sapien
aagtcttgagcccttggacaggcag

SEQ ID NO: 3431236 - DNA, 25 bp, Homo sapien
tgggaggcgtgaccctttttgcacg

SEQ ID NO: 3431237 - DNA, 25 bp, Homo sapien
ctctgttttcattccgtgccacagg

SEQ ID NO: 3431238 - DNA, 25 bp, Homo sapien
ttccgtgccacaggtgagtgtgcag

SEQ ID NO: 3431239 - DNA, 25 bp, Homo sapien
ctttttgcacgggaagctctgtttt

SEQ ID NO: 3431240 - DNA, 25 bp, Homo sapien
ctggttccaggaatgaactgggaga

SEQ ID NO: 3431241 - DNA, 25 bp, Homo sapien
ggaatgaactgggagaggacaggag

SEQ ID NO: 3431242 - DNA, 25 bp, Homo sapien
gggcctgaggatcctgcctgccttt

SEQ ID NO: 3431243 - DNA, 25 bp, Homo sapien
tttgggggccactggttgcctggcc

SEQ ID NO: 3431244 - DNA, 25 bp, Homo sapien
gccctgtgatctggcgtggtgtcac

SEQ ID NO: 3431245 - DNA, 25 bp, Homo sapien
gccagaggccagaaaggacaaaaag

SEQ ID NO: 3431246 - DNA, 25 bp, Homo sapien
aagaagactatctctggcctggtgc

SEQ ID NO: 3431247 - DNA, 25 bp, Homo sapien
tatgaaaaactgactagccagaggc

SEQ ID NO: 3431248 - DNA, 25 bp, Homo sapien
atcaaaggcagctggtaacaagtca

SEQ ID NO: 3431249 - DNA, 25 bp, Homo sapien
tcattgcctgagtagatgtgaagga

SEQ ID NO: 3431250 - DNA, 25 bp, Homo sapien
aagtcattgcctgagtagatgtgaa

SEQ ID NO: 3431251 - DNA, 25 bp, Homo sapien
cagctggtaacaagtcattgcctga

SEQ ID NO: 3431252 - DNA, 25 bp, Homo sapien
atttgattacataagcatggggtac

SEQ ID NO: 3431253 - DNA, 25 bp, Homo sapien
atatatttgattacataagcatggg

SEQ ID NO: 3431254 - DNA, 25 bp, Homo sapien
tatatttgattacataagcatgggg

SEQ ID NO: 3431255 - DNA, 25 bp, Homo sapien
tatttgattacataagcatggggta

SEQ ID NO: 3431256 - DNA, 25 bp, Homo sapien
cttagctgagtcaagcggccaggac

SEQ ID NO: 3431257 - DNA, 25 bp, Homo sapien
ggaccttctgcagaccgggtcccag

SEQ ID NO: 3431258 - DNA, 25 bp, Homo sapien
aggaagaaacaacaccttcgcgctt

SEQ ID NO: 3431259 - DNA, 25 bp, Homo sapien
tggtcccggaggcaaggccggcttg

SEQ ID NO: 3431260 - DNA, 25 bp, Homo sapien
ggacgccccagagaatttggaagcg

SEQ ID NO: 3431261 - DNA, 25 bp, Homo sapien
cgggacgccccagagaatttggaag

SEQ ID NO: 3431262 - DNA, 25 bp, Homo sapien
gccgaggcctcaggagcgtgtgcgc

SEQ ID NO: 3431263 - DNA, 25 bp, Homo sapien
tcaggagcgtgtgcgcgccgggacg

SEQ ID NO: 3431264 - DNA, 25 bp, Homo sapien
cctcggctcggggtgacaagacgct

SEQ ID NO: 3431265 - DNA, 25 bp, Homo sapien
gcaagcggggcttcgcgggccacag

SEQ ID NO: 3431266 - DNA, 25 bp, Homo sapien
atctcggcctcgaggacccgggtcg

SEQ ID NO: 3431267 - DNA, 25 bp, Homo sapien
ggtgacaagacgctggcgcgggcaa

SEQ ID NO: 3431268 - DNA, 25 bp, Homo sapien
cccgtgggctgccagcgcccgggag

SEQ ID NO: 3431269 - DNA, 25 bp, Homo sapien
ctgcgccgcgaaccctccccgtggg

SEQ ID NO: 3431270 - DNA, 25 bp, Homo sapien
tgcgccgcgaaccctccccgtgggc

SEQ ID NO: 3431271 - DNA, 25 bp, Homo sapien
ggagtgtccatcactggcctgagga

SEQ ID NO: 3431272 - DNA, 25 bp, Homo sapien
gactgctgcatggtcctatgcttcc

SEQ ID NO: 3431273 - DNA, 25 bp, Homo sapien
caatctgctggcatggtggacacag

SEQ ID NO: 3431274 - DNA, 25 bp, Homo sapien
gccaagaatggacacaagagtcaag

SEQ ID NO: 3431275 - DNA, 25 bp, Homo sapien
caggagaaggagcatttgtggcccc

SEQ ID NO: 3431276 - DNA, 25 bp, Homo sapien
atttgtggcccccagatgtcctcca

SEQ ID NO: 3431277 - DNA, 25 bp, Homo sapien
aaggagcatttgtggcccccagatg

SEQ ID NO: 3431278 - DNA, 25 bp, Homo sapien
cttgagttgcgtctccaggagaagg

SEQ ID NO: 3431279 - DNA, 25 bp, Homo sapien
ctgccagaaggatggtgtaaaggct

SEQ ID NO: 3431280 - DNA, 25 bp, Homo sapien
ggagagggagcacgggctgccagaa

SEQ ID NO: 3431281 - DNA, 25 bp, Homo sapien
ccagaaggatggtgtaaaggctcac

SEQ ID NO: 3431282 - DNA, 25 bp, Homo sapien
tctctggagagggagcacgggctgc

SEQ ID NO: 3431283 - DNA, 25 bp, Homo sapien
tatctgcccagaagcgcaagtcctg

SEQ ID NO: 3431284 - DNA, 25 bp, Homo sapien
tgggcacccgtaggaagctcaagtg

SEQ ID NO: 3431285 - DNA, 25 bp, Homo sapien
tcaagtgcagataggccaggcaagc

SEQ ID NO: 3431286 - DNA, 25 bp, Homo sapien
tatgtgcccctagggtcaacagctg

SEQ ID NO: 3431287 - DNA, 25 bp, Homo sapien
tattcttgcaaaaaggcttaccctg

SEQ ID NO: 3431288 - DNA, 25 bp, Homo sapien
tattaatgctaaggccaatggctga

SEQ ID NO: 3431289 - DNA, 25 bp, Homo sapien
gtaaataaactcagtatcggctggg

SEQ ID NO: 3431290 - DNA, 25 bp, Homo sapien
tccttgtcaatagagagatctagca

SEQ ID NO: 3431291 - DNA, 25 bp, Homo sapien
taggcaagttactagatagacaaac

SEQ ID NO: 3431292 - DNA, 25 bp, Homo sapien
tggatactcgaaacaactgaactca

SEQ ID NO: 3431293 - DNA, 25 bp, Homo sapien
taggactatacgcacgtgcctcaag

SEQ ID NO: 3431294 - DNA, 25 bp, Homo sapien
ctgcaagagatcacctttttactgc

SEQ ID NO: 3431295 - DNA, 25 bp, Homo sapien
tgcacgagacaatgaaaactccatg

SEQ ID NO: 3431296 - DNA, 25 bp, Homo sapien
tgaaattcaaggtcgatggcattgc

SEQ ID NO: 3431297 - DNA, 25 bp, Homo sapien
tagtgggcaaccataggtacagacc

SEQ ID NO: 3431298 - DNA, 25 bp, Homo sapien
ggagtgctcccagcattaacagtgg

SEQ ID NO: 3431299 - DNA, 25 bp, Homo sapien
accgcgctgggcctcagttattttc

SEQ ID NO: 3431300 - DNA, 25 bp, Homo sapien
tttgatggcattaagctctctagcg

SEQ ID NO: 3431301 - DNA, 25 bp, Homo sapien
tctagcgttagatcctcaccttcct

SEQ ID NO: 3431302 - DNA, 25 bp, Homo sapien
tcttattggcatctcagaactcatc

SEQ ID NO: 3431303 - DNA, 25 bp, Homo sapien
atttttctatttttcgtagacatgg

SEQ ID NO: 3431304 - DNA, 25 bp, Homo sapien
cccctaggctggagtacgatggcat

SEQ ID NO: 3431305 - DNA, 25 bp, Homo sapien
ctgcctcggcccccccgagtagctg

SEQ ID NO: 3431306 - DNA, 25 bp, Homo sapien
cgatggcatgatcttggctcactgc

SEQ ID NO: 3431307 - DNA, 25 bp, Homo sapien
gaaagaaacctgtgcttaatggcag

SEQ ID NO: 3431308 - DNA, 25 bp, Homo sapien
cattaccatatctaattctgtaaca

SEQ ID NO: 3431309 - DNA, 25 bp, Homo sapien
acctgtgcttaatggcagtcagttc

SEQ ID NO: 3431310 - DNA, 25 bp, Homo sapien
aaccattaccatatctaattctgta

SEQ ID NO: 3431311 - DNA, 25 bp, Homo sapien
gaatgctgatgccatgggaagaaaa

SEQ ID NO: 3431312 - DNA, 25 bp, Homo sapien
tgttctagactaagggaatgagctg

SEQ ID NO: 3431313 - DNA, 25 bp, Homo sapien
cagtgatgcagtaaccaagatcgcg

SEQ ID NO: 3431314 - DNA, 25 bp, Homo sapien
aaaaactagcatttggctgggagcg

SEQ ID NO: 3431315 - DNA, 25 bp, Homo sapien
cggaggaacccttggcaggcagaac

SEQ ID NO: 3431316 - DNA, 25 bp, Homo sapien
gaagagcctgcgcagctgaagcaga

SEQ ID NO: 3431317 - DNA, 25 bp, Homo sapien
cacagtcagacatggacagttgatc

SEQ ID NO: 3431318 - DNA, 25 bp, Homo sapien
aacctcaggacagaagcgagagccc

SEQ ID NO: 3431319 - DNA, 25 bp, Homo sapien
atcttgtctgcccgccgctggcctg

SEQ ID NO: 3431320 - DNA, 25 bp, Homo sapien
ctggcctggccccgtctgtctctct

SEQ ID NO: 3431321 - DNA, 25 bp, Homo sapien
tactcggactaagagtgggcagcat

SEQ ID NO: 3431322 - DNA, 25 bp, Homo sapien
tcaaaacggcaaacacttactcgga

SEQ ID NO: 3431323 - DNA, 25 bp, Homo sapien
gccaaaggaccgagtgaaggctcca

SEQ ID NO: 3431324 - DNA, 25 bp, Homo sapien
gactctagggagttacaaactggcc

SEQ ID NO: 3431325 - DNA, 25 bp, Homo sapien
gacactgtctccctgaatgtgggcc

SEQ ID NO: 3431326 - DNA, 25 bp, Homo sapien
cactaactccgcagggacactgtct

SEQ ID NO: 3431327 - DNA, 25 bp, Homo sapien
gggccccacggctatcagctttcag

SEQ ID NO: 3431328 - DNA, 25 bp, Homo sapien
ccacttagtccgcaaggcagatggg

SEQ ID NO: 3431329 - DNA, 25 bp, Homo sapien
tctagcatgggagcgaggctactca

SEQ ID NO: 3431330 - DNA, 25 bp, Homo sapien
catgggagcgaggctactcatatac

SEQ ID NO: 3431331 - DNA, 25 bp, Homo sapien
tagcatgggagcgaggctactcata

SEQ ID NO: 3431332 - DNA, 25 bp, Homo sapien
gcatgggagcgaggctactcatata

SEQ ID NO: 3431333 - DNA, 25 bp, Homo sapien
gacactcatgcgtgccaagtcctca

SEQ ID NO: 3431334 - DNA, 25 bp, Homo sapien
tctctcccgtcttgccaggagtgtt

SEQ ID NO: 3431335 - DNA, 25 bp, Homo sapien
catgccaaagactctctcagctgac

SEQ ID NO: 3431336 - DNA, 25 bp, Homo sapien
aggtcgacctgcagtccctaggcct

SEQ ID NO: 3431337 - DNA, 25 bp, Homo sapien
actgggcacgctgctctactgggtc

SEQ ID NO: 3431338 - DNA, 25 bp, Homo sapien
caccggacaggatgcgagtacatat

SEQ ID NO: 3431339 - DNA, 25 bp, Homo sapien
ctgtgctttcactgaccccgactga

SEQ ID NO: 3431340 - DNA, 25 bp, Homo sapien
cactgctgatgggtgcaatggctcc

SEQ ID NO: 3431341 - DNA, 25 bp, Homo sapien
tctgtcactggccagggagcggcgg

SEQ ID NO: 3431342 - DNA, 25 bp, Homo sapien
cgggcaggaggggagttgacgcgcg

SEQ ID NO: 3431343 - DNA, 25 bp, Homo sapien
gggagttgacgcgcgggaaagggca

SEQ ID NO: 3431344 - DNA, 25 bp, Homo sapien
cgcgggaaagggcagcgccgggcag

SEQ ID NO: 3431345 - DNA, 25 bp, Homo sapien
cagcgcctcgcttagctctagcttt

SEQ ID NO: 3431346 - DNA, 25 bp, Homo sapien
agccccagcgcctcgcttagctcta

SEQ ID NO: 3431347 - DNA, 25 bp, Homo sapien
acaagcggcgggacaataggcaggg

SEQ ID NO: 3431348 - DNA, 25 bp, Homo sapien
cctcgcttagctctagcttttggaa

SEQ ID NO: 3431349 - DNA, 25 bp, Homo sapien
gaatcggagcattcccgctgagtca

SEQ ID NO: 3431350 - DNA, 25 bp, Homo sapien
gctgagtcacccaagaagcctgtgg

SEQ ID NO: 3431351 - DNA, 25 bp, Homo sapien
aagcctgtggtgttgaaactggtcc

SEQ ID NO: 3431352 - DNA, 25 bp, Homo sapien
aaactggtccgttgcctcgtgctga

SEQ ID NO: 3431353 - DNA, 25 bp, Homo sapien
tgtttcagagctgcagccctcagtt

SEQ ID NO: 3431354 - DNA, 25 bp, Homo sapien
gagctgcagccctcagttcctgcaa

SEQ ID NO: 3431355 - DNA, 25 bp, Homo sapien
tggcctgggtccctgtttcagagct

SEQ ID NO: 3431356 - DNA, 25 bp, Homo sapien
tgggtccctgtttcagagctgcagc

SEQ ID NO: 3431357 - DNA, 25 bp, Homo sapien
cctccccccttggagggcagctcag

SEQ ID NO: 3431358 - DNA, 25 bp, Homo sapien
ctccccccttggagggcagctcagt

SEQ ID NO: 3431359 - DNA, 25 bp, Homo sapien
tccccccttggagggcagctcagtc

SEQ ID NO: 3431360 - DNA, 25 bp, Homo sapien
cccccttggagggcagctcagtcat

SEQ ID NO: 3431361 - DNA, 25 bp, Homo sapien
acttctctgccaggggagacggagt

SEQ ID NO: 3431362 - DNA, 25 bp, Homo sapien
acggagtcacagagcccgcggcatg

SEQ ID NO: 3431363 - DNA, 25 bp, Homo sapien
ggataaagatcttccagcccaggga

SEQ ID NO: 3431364 - DNA, 25 bp, Homo sapien
tggccagggcaatggaacatcctgg

SEQ ID NO: 3431365 - DNA, 25 bp, Homo sapien
gtgccagcaatttgacctatactca

SEQ ID NO: 3431366 - DNA, 25 bp, Homo sapien
attgattgcttctaagtgccagcaa

SEQ ID NO: 3431367 - DNA, 25 bp, Homo sapien
ggacatcccatcactgggatggccc

SEQ ID NO: 3431368 - DNA, 25 bp, Homo sapien
caggcccgtgagatgggacatccca

SEQ ID NO: 3431369 - DNA, 25 bp, Homo sapien
aataagggtagatgccgaagctccg

SEQ ID NO: 3431370 - DNA, 25 bp, Homo sapien
tctgcccctgacacctaatggggtt

SEQ ID NO: 3431371 - DNA, 25 bp, Homo sapien
gggttatggggttctatgaccttga

SEQ ID NO: 3431372 - DNA, 25 bp, Homo sapien
ctgagcagccgcctggaataagggt

SEQ ID NO: 3431373 - DNA, 25 bp, Homo sapien
tacagggtgcaagcaagaccatcgc

SEQ ID NO: 3431374 - DNA, 25 bp, Homo sapien
cacttagtagagttcccgggcgtct

SEQ ID NO: 3431375 - DNA, 25 bp, Homo sapien
tccctgtgcagtggaccgagtgctg

SEQ ID NO: 3431376 - DNA, 25 bp, Homo sapien
gcagcaatccccaactctagaaaga

SEQ ID NO: 3431377 - DNA, 25 bp, Homo sapien
gccgtcacgtgacggcgcacgttgt

SEQ ID NO: 3431378 - DNA, 25 bp, Homo sapien
ggctctgccgtcacgtgacggcgca

SEQ ID NO: 3431379 - DNA, 25 bp, Homo sapien
cgcgcaccggattgcgaaggtcaga

SEQ ID NO: 3431380 - DNA, 25 bp, Homo sapien
tcggccttccgtgcccctggagatc

SEQ ID NO: 3431381 - DNA, 25 bp, Homo sapien
caggcgcctccgtcacgtgagaaaa

SEQ ID NO: 3431382 - DNA, 25 bp, Homo sapien
acgtgcaggcgcctccgtcacgtga

SEQ ID NO: 3431383 - DNA, 25 bp, Homo sapien
gcctccccattggtccacgtgcagg

SEQ ID NO: 3431384 - DNA, 25 bp, Homo sapien
attggtccacgtgcaggcgcctccg

SEQ ID NO: 3431385 - DNA, 25 bp, Homo sapien
cgccagcggccaacactgcccagct

SEQ ID NO: 3431386 - DNA, 25 bp, Homo sapien
tccgccagcggccaacactgcccag

SEQ ID NO: 3431387 - DNA, 25 bp, Homo sapien
ccagcggccaacactgcccagctct

SEQ ID NO: 3431388 - DNA, 25 bp, Homo sapien
agcggccaacactgcccagctctcc

SEQ ID NO: 3431389 - DNA, 25 bp, Homo sapien
ttgccgcccgtgaccaggcacttca

SEQ ID NO: 3431390 - DNA, 25 bp, Homo sapien
cgttgccgcccgtgaccaggcactt

SEQ ID NO: 3431391 - DNA, 25 bp, Homo sapien
tgccgcccgtgaccaggcacttcat

SEQ ID NO: 3431392 - DNA, 25 bp, Homo sapien
cacgttgccgcccgtgaccaggcac

SEQ ID NO: 3431393 - DNA, 25 bp, Homo sapien
agagcggaagggggttaggctggcg

SEQ ID NO: 3431394 - DNA, 25 bp, Homo sapien
agaagagcggaagggggttaggctg

SEQ ID NO: 3431395 - DNA, 25 bp, Homo sapien
tccaggtagagctcgtccccgatgc

SEQ ID NO: 3431396 - DNA, 25 bp, Homo sapien
gacagggagtggacggccttgccga

SEQ ID NO: 3431397 - DNA, 25 bp, Homo sapien
caggtagagctcgtccccgatgcgg

SEQ ID NO: 3431398 - DNA, 25 bp, Homo sapien
ggttccaggtagagctcgtccccga

SEQ ID NO: 3431399 - DNA, 25 bp, Homo sapien
ctcaattcacacaccggcctgggaa

SEQ ID NO: 3431400 - DNA, 25 bp, Homo sapien
ttccccgagtttctctaagtgcacg

SEQ ID NO: 3431401 - DNA, 25 bp, Homo sapien
gaaactttgccgacaaatctgccag

SEQ ID NO: 3431402 - DNA, 25 bp, Homo sapien
atggaagccttcagagtcggccccg

SEQ ID NO: 3431403 - DNA, 25 bp, Homo sapien
gaggagttcaccgtccggagggaga

SEQ ID NO: 3431404 - DNA, 25 bp, Homo sapien
agaaagcaggcataggcagagcggg

SEQ ID NO: 3431405 - DNA, 25 bp, Homo sapien
gctgcctggtattgctggaagaaga

SEQ ID NO: 3431406 - DNA, 25 bp, Homo sapien
catcaggatcttacagcgcagcagg

SEQ ID NO: 3431407 - DNA, 25 bp, Homo sapien
cttggaatgccttgaaagacctgct

SEQ ID NO: 3431408 - DNA, 25 bp, Homo sapien
tgtgatgcttttaccatggccctcc

SEQ ID NO: 3431409 - DNA, 25 bp, Homo sapien
gcatgtaactctgggaaaagggctc

SEQ ID NO: 3431410 - DNA, 25 bp, Homo sapien
gacgtgcttacctttcttgacgaac

SEQ ID NO: 3431411 - DNA, 25 bp, Homo sapien
cttctccagcatcgccagtgagcgg

SEQ ID NO: 3431412 - DNA, 25 bp, Homo sapien
catcgccagtgagcggaagacagac

SEQ ID NO: 3431413 - DNA, 25 bp, Homo sapien
cagcatcgccagtgagcggaagaca

SEQ ID NO: 3431414 - DNA, 25 bp, Homo sapien
cagtgagcggaagacagacaggaaa

SEQ ID NO: 3431415 - DNA, 25 bp, Homo sapien
aggcggctgctccggccattcaggg

SEQ ID NO: 3431416 - DNA, 25 bp, Homo sapien
gcggctgctccggccattcagggag

SEQ ID NO: 3431417 - DNA, 25 bp, Homo sapien
caggcggctgctccggccattcagg

SEQ ID NO: 3431418 - DNA, 25 bp, Homo sapien
ggctgctccggccattcagggagat

SEQ ID NO: 3431419 - DNA, 25 bp, Homo sapien
ctggatgggcgatagggtctcagtg

SEQ ID NO: 3431420 - DNA, 25 bp, Homo sapien
gcctcgccgacctccctgctgaggc

SEQ ID NO: 3431421 - DNA, 25 bp, Homo sapien
gctgaggcaccccttggctggccgg

SEQ ID NO: 3431422 - DNA, 25 bp, Homo sapien
atagggtctcagtgggcctcgccga

SEQ ID NO: 3431423 - DNA, 25 bp, Homo sapien
aggacaggttgtgagtcttccgcac

SEQ ID NO: 3431424 - DNA, 25 bp, Homo sapien
ggacaggttgtgagtcttccgcacc

SEQ ID NO: 3431425 - DNA, 25 bp, Homo sapien
tgtgggggcacgaggctgggtcgaa

SEQ ID NO: 3431426 - DNA, 25 bp, Homo sapien
ggctgggtcgaagacggcctgcagg

SEQ ID NO: 3431427 - DNA, 25 bp, Homo sapien
cacgaggctgggtcgaagacggcct

SEQ ID NO: 3431428 - DNA, 25 bp, Homo sapien
gggcgcggagcatgtgggggcacga

SEQ ID NO: 3431429 - DNA, 25 bp, Homo sapien
gccacggccaatgcccagcgtcact

SEQ ID NO: 3431430 - DNA, 25 bp, Homo sapien
cggccacggccaatgcccagcgtca

SEQ ID NO: 3431431 - DNA, 25 bp, Homo sapien
ctgcggccacggccaatgcccagcg

SEQ ID NO: 3431432 - DNA, 25 bp, Homo sapien
tgcggccacggccaatgcccagcgt

SEQ ID NO: 3431433 - DNA, 25 bp, Homo sapien
tcctcgtggtagctgcgcaggatga

SEQ ID NO: 3431434 - DNA, 25 bp, Homo sapien
ctcgtggtagctgcgcaggatgacc

SEQ ID NO: 3431435 - DNA, 25 bp, Homo sapien
cctcgtggtagctgcgcaggatgac

SEQ ID NO: 3431436 - DNA, 25 bp, Homo sapien
cctcctcgtggtagctgcgcaggat

SEQ ID NO: 3431437 - DNA, 25 bp, Homo sapien
ccaaggcacatctcagtcaccatgg

SEQ ID NO: 3431438 - DNA, 25 bp, Homo sapien
tccaaggcacatctcagtcaccatg

SEQ ID NO: 3431439 - DNA, 25 bp, Homo sapien
caaggcacatctcagtcaccatggc

SEQ ID NO: 3431440 - DNA, 25 bp, Homo sapien
aatgaatgctaagattcaagtttgc

SEQ ID NO: 3431441 - DNA, 25 bp, Homo sapien
aatgctaagattcaagtttgctgac

SEQ ID NO: 3431442 - DNA, 25 bp, Homo sapien
tgaatgctaagattcaagtttgctg

SEQ ID NO: 3431443 - DNA, 25 bp, Homo sapien
caaaatgaatgctaagattcaagtt

SEQ ID NO: 3431444 - DNA, 25 bp, Homo sapien
gggcccaagctaggtcatcccattc

SEQ ID NO: 3431445 - DNA, 25 bp, Homo sapien
caagctaggtcatcccattcagctc

SEQ ID NO: 3431446 - DNA, 25 bp, Homo sapien
gagggggcccaagctaggtcatccc

SEQ ID NO: 3431447 - DNA, 25 bp, Homo sapien
gctaggtcatcccattcagctcctg

SEQ ID NO: 3431448 - DNA, 25 bp, Homo sapien
ggtcctgggagtgcgagtcggtgtc

SEQ ID NO: 3431449 - DNA, 25 bp, Homo sapien
cccaggtcctgggagtgcgagtcgg

SEQ ID NO: 3431450 - DNA, 25 bp, Homo sapien
gccaagacaaagtggccgtccagca

SEQ ID NO: 3431451 - DNA, 25 bp, Homo sapien
tcctgggagtgcgagtcggtgtctg

SEQ ID NO: 3431452 - DNA, 25 bp, Homo sapien
tcattggcaaagtcgtccgggtggg

SEQ ID NO: 3431453 - DNA, 25 bp, Homo sapien
gccctcattgcctatagtggtttcc

SEQ ID NO: 3431454 - DNA, 25 bp, Homo sapien
ggtttccatggcgatcatgtaagag

SEQ ID NO: 3431455 - DNA, 25 bp, Homo sapien
gatcatgtaagagtcaatgtcgtca

SEQ ID NO: 3431456 - DNA, 25 bp, Homo sapien
gggtgggggagtcccaggcactgta

SEQ ID NO: 3431457 - DNA, 25 bp, Homo sapien
cttgggtgggggagtcccaggcact

SEQ ID NO: 3431458 - DNA, 25 bp, Homo sapien
tgggtgggggagtcccaggcactgt

SEQ ID NO: 3431459 - DNA, 25 bp, Homo sapien
ttcttgggtgggggagtcccaggca

SEQ ID NO: 3431460 - DNA, 25 bp, Homo sapien
ccacccctgcctccacctccagtcc

SEQ ID NO: 3431461 - DNA, 25 bp, Homo sapien
ccctgcctccacctccagtccctac

SEQ ID NO: 3431462 - DNA, 25 bp, Homo sapien
ctacctcccacccctgcctccacct

SEQ ID NO: 3431463 - DNA, 25 bp, Homo sapien
acccctgcctccacctccagtccct

SEQ ID NO: 3431464 - DNA, 25 bp, Homo sapien
ctggggggagcgtacaggggccagg

SEQ ID NO: 3431465 - DNA, 25 bp, Homo sapien
tggagccgaagaacagtgagcggaa

SEQ ID NO: 3431466 - DNA, 25 bp, Homo sapien
cctggggggagcgtacaggggccag

SEQ ID NO: 3431467 - DNA, 25 bp, Homo sapien
cacactcgggtccaaggctcttaga

SEQ ID NO: 3431468 - DNA, 25 bp, Homo sapien
agaattccaagtcagcgccaaagag

SEQ ID NO: 3431469 - DNA, 25 bp, Homo sapien
tcacatctaagacactgcctggcag

SEQ ID NO: 3431470 - DNA, 25 bp, Homo sapien
aaggaaaacttgtcagctccacggg

SEQ ID NO: 3431471 - DNA, 25 bp, Homo sapien
ccatcgcggccatagtggacgaaaa

SEQ ID NO: 3431472 - DNA, 25 bp, Homo sapien
gagacgctacaacatcaaactgtgg

SEQ ID NO: 3431473 - DNA, 25 bp, Homo sapien
cgaaaagatcttctgctgccacgga

SEQ ID NO: 3431474 - DNA, 25 bp, Homo sapien
tcctacatggagtgggcttgtctcc

SEQ ID NO: 3431475 - DNA, 25 bp, Homo sapien
caagtaccccgagaacttcttcctg

SEQ ID NO: 3431476 - DNA, 25 bp, Homo sapien
ctctttctgggggactatgtggaca

SEQ ID NO: 3431477 - DNA, 25 bp, Homo sapien
cctgctgctggcctataagatcaag

SEQ ID NO: 3431478 - DNA, 25 bp, Homo sapien
acaggggcaagcagtccttggagac

SEQ ID NO: 3431479 - DNA, 25 bp, Homo sapien
gccaggcctctgtccggagacccag

SEQ ID NO: 3431480 - DNA, 25 bp, Homo sapien
ggaggtttcagggtatctcaccaag

SEQ ID NO: 3431481 - DNA, 25 bp, Homo sapien
gtttcagggtatctcaccaagcccc

SEQ ID NO: 3431482 - DNA, 25 bp, Homo sapien
tgtctcctcttttatgggggcaggg

SEQ ID NO: 3431483 - DNA, 25 bp, Homo sapien
cagtgtgaggggccactcccggcca

SEQ ID NO: 3431484 - DNA, 25 bp, Homo sapien
gaaagtggggagaaccagtgtgagg

SEQ ID NO: 3431485 - DNA, 25 bp, Homo sapien
gtgtgaggggccactcccggccagc

SEQ ID NO: 3431486 - DNA, 25 bp, Homo sapien
gagaaagtggggagaaccagtgtga

SEQ ID NO: 3431487 - DNA, 25 bp, Homo sapien
tgagctgcccccaatgaatccatag

SEQ ID NO: 3431488 - DNA, 25 bp, Homo sapien
atccatagcggtcggcctggcgata

SEQ ID NO: 3431489 - DNA, 25 bp, Homo sapien
cgatatgggccaggcccgctgagct

SEQ ID NO: 3431490 - DNA, 25 bp, Homo sapien
agctctgagtcggaccccaaggagc

SEQ ID NO: 3431491 - DNA, 25 bp, Homo sapien
tggccctagggatctctgggagccc

SEQ ID NO: 3431492 - DNA, 25 bp, Homo sapien
ggtaagagacgtacagaggcctccc

SEQ ID NO: 3431493 - DNA, 25 bp, Homo sapien
gggcaagtttctgtctatatctgga

SEQ ID NO: 3431494 - DNA, 25 bp, Homo sapien
cacaggtatccagacgctgggcagc

SEQ ID NO: 3431495 - DNA, 25 bp, Homo sapien
agtgcgaggtcatctccacccactt

SEQ ID NO: 3431496 - DNA, 25 bp, Homo sapien
ttcatctcccgttggcggatgaggt

SEQ ID NO: 3431497 - DNA, 25 bp, Homo sapien
tgtaccgccgggacatggttttctc

SEQ ID NO: 3431498 - DNA, 25 bp, Homo sapien
ggttttctcccagtgcgaggtcatc

SEQ ID NO: 3431499 - DNA, 25 bp, Homo sapien
gccaagggctccactaggcagcctc

SEQ ID NO: 3431500 - DNA, 25 bp, Homo sapien
gggtgggtacattttgccaagatgt

SEQ ID NO: 3431501 - DNA, 25 bp, Homo sapien
caaaggccggaggtgctgggacaca

SEQ ID NO: 3431502 - DNA, 25 bp, Homo sapien
gggctccactaggcagcctccatag

SEQ ID NO: 3431503 - DNA, 25 bp, Homo sapien
gcatcgggcgcgcagggcagacggg

SEQ ID NO: 3431504 - DNA, 25 bp, Homo sapien
tgcctttccggcactgcatctttac

SEQ ID NO: 3431505 - DNA, 25 bp, Homo sapien
cgggatgcctttccggcactgcatc

SEQ ID NO: 3431506 - DNA, 25 bp, Homo sapien
ggcagacgggatgcctttccggcac

SEQ ID NO: 3431507 - DNA, 25 bp, Homo sapien
ggtgtgagggttcagtgtggtgagg

SEQ ID NO: 3431508 - DNA, 25 bp, Homo sapien
gacggtgcaggtccctgccaatggt

SEQ ID NO: 3431509 - DNA, 25 bp, Homo sapien
cacaaacatctcgtgcagagggaat

SEQ ID NO: 3431510 - DNA, 25 bp, Homo sapien
ccgtggccctgaggcgacacaaaca

SEQ ID NO: 3431511 - DNA, 25 bp, Homo sapien
gaattgacggtgcaggtccctgcca

SEQ ID NO: 3431512 - DNA, 25 bp, Homo sapien
tccctgggcatcaccggcctcgtac

SEQ ID NO: 3431513 - DNA, 25 bp, Homo sapien
ggtccctgggcatcaccggcctcgt

SEQ ID NO: 3431514 - DNA, 25 bp, Homo sapien
ggggtccctgggcatcaccggcctc

SEQ ID NO: 3431515 - DNA, 25 bp, Homo sapien
tgggggtccctgggcatcaccggcc

SEQ ID NO: 3431516 - DNA, 25 bp, Homo sapien
ctgggtcccctgagatgcaagactg

SEQ ID NO: 3431517 - DNA, 25 bp, Homo sapien
tcctgggtcccctgagatgcaagac

SEQ ID NO: 3431518 - DNA, 25 bp, Homo sapien
cctgggtcccctgagatgcaagact

SEQ ID NO: 3431519 - DNA, 25 bp, Homo sapien
ttcctgggtcccctgagatgcaaga

SEQ ID NO: 3431520 - DNA, 25 bp, Homo sapien
tgtgccggaagaccccataaggggc

SEQ ID NO: 3431521 - DNA, 25 bp, Homo sapien
tgccggaagaccccataaggggcca

SEQ ID NO: 3431522 - DNA, 25 bp, Homo sapien
ctgtgccggaagaccccataagggg

SEQ ID NO: 3431523 - DNA, 25 bp, Homo sapien
ctggcagtagccctgctccggtcga

SEQ ID NO: 3431524 - DNA, 25 bp, Homo sapien
ccggtcgatacagggtgtaggcctt

SEQ ID NO: 3431525 - DNA, 25 bp, Homo sapien
cctgctccggtcgatacagggtgta

SEQ ID NO: 3431526 - DNA, 25 bp, Homo sapien
agtagccctgctccggtcgatacag

SEQ ID NO: 3431527 - DNA, 25 bp, Homo sapien
ggcacaggcctgtaagtgctcacca

SEQ ID NO: 3431528 - DNA, 25 bp, Homo sapien
tcctaacctgcgcagttcctggaag

SEQ ID NO: 3431529 - DNA, 25 bp, Homo sapien
tgggagtgtcccaaagttcaagtcc

SEQ ID NO: 3431530 - DNA, 25 bp, Homo sapien
caagttcagaatcaggagtcgtggg

SEQ ID NO: 3431531 - DNA, 25 bp, Homo sapien
gtagacctcacagatctgcaccagg

SEQ ID NO: 3431532 - DNA, 25 bp, Homo sapien
gtagtacccagggaggtagacctca

SEQ ID NO: 3431533 - DNA, 25 bp, Homo sapien
gtacccagggaggtagacctcacag

SEQ ID NO: 3431534 - DNA, 25 bp, Homo sapien
catgtggggcccgtagtacccaggg

SEQ ID NO: 3431535 - DNA, 25 bp, Homo sapien
atcagcaggccagcaccgccacccc

SEQ ID NO: 3431536 - DNA, 25 bp, Homo sapien
ggctcaacctccctcagtccccaga

SEQ ID NO: 3431537 - DNA, 25 bp, Homo sapien
tcctccagcccccatgtcagcctct

SEQ ID NO: 3431538 - DNA, 25 bp, Homo sapien
ctgtggccacgtccatcagcaggcc

SEQ ID NO: 3431539 - DNA, 25 bp, Homo sapien
aggcacaggaaccactcgggcaggt

SEQ ID NO: 3431540 - DNA, 25 bp, Homo sapien
gcagggccatgaacacctcggcgtc

SEQ ID NO: 3431541 - DNA, 25 bp, Homo sapien
ggcgaagaggcacaggaaccactcg

SEQ ID NO: 3431542 - DNA, 25 bp, Homo sapien
aaccactcgggcaggtacagcaggg

SEQ ID NO: 3431543 - DNA, 25 bp, Homo sapien
taagccaggagcatagcactcagtg

SEQ ID NO: 3431544 - DNA, 25 bp, Homo sapien
tgactcgaggctccaaaagggaacc

SEQ ID NO: 3431545 - DNA, 25 bp, Homo sapien
tgcatttcgggtaacacaggccgct

SEQ ID NO: 3431546 - DNA, 25 bp, Homo sapien
gatggcagtatcaaggcagagtccc

SEQ ID NO: 3431547 - DNA, 25 bp, Homo sapien
cagtgtcagccccacacggaacagt

SEQ ID NO: 3431548 - DNA, 25 bp, Homo sapien
gtgcccagcgccaggcgcaccagtg

SEQ ID NO: 3431549 - DNA, 25 bp, Homo sapien
agccccacacggaacagtactctgg

SEQ ID NO: 3431550 - DNA, 25 bp, Homo sapien
ggatggctcgaagggctcccagtgt

SEQ ID NO: 3431551 - DNA, 25 bp, Homo sapien
tgcgtttgcccggcctcaaggcagg

SEQ ID NO: 3431552 - DNA, 25 bp, Homo sapien
ctgcgtttgcccggcctcaaggcag

SEQ ID NO: 3431553 - DNA, 25 bp, Homo sapien
gcgtttgcccggcctcaaggcagga

SEQ ID NO: 3431554 - DNA, 25 bp, Homo sapien
tgcaggtcccgctctgacagcacca

SEQ ID NO: 3431555 - DNA, 25 bp, Homo sapien
tttccgccgcggtggtctgggctcc

SEQ ID NO: 3431556 - DNA, 25 bp, Homo sapien
cacaatccgaggcacctcaggcttg

SEQ ID NO: 3431557 - DNA, 25 bp, Homo sapien
atggaaagtcttgccgcgggtctgg

SEQ ID NO: 3431558 - DNA, 25 bp, Homo sapien
aggcttggcgcctcgtcgcactcct

SEQ ID NO: 3431559 - DNA, 25 bp, Homo sapien
ccgagtcccaagagtaaagtgcggt

SEQ ID NO: 3431560 - DNA, 25 bp, Homo sapien
gccggcatcagccatcaggcaattg

SEQ ID NO: 3431561 - DNA, 25 bp, Homo sapien
cggtgcctatttgccgggccggcat

SEQ ID NO: 3431562 - DNA, 25 bp, Homo sapien
cagccatcaggcaattgagactggg

SEQ ID NO: 3431563 - DNA, 25 bp, Homo sapien
gctagtgcctgacccagtatgtacc

SEQ ID NO: 3431564 - DNA, 25 bp, Homo sapien
ctccatgctagtgcctgacccagta

SEQ ID NO: 3431565 - DNA, 25 bp, Homo sapien
gttccatgggtcctcacgtgcccca

SEQ ID NO: 3431566 - DNA, 25 bp, Homo sapien
ctggctttggtacttgtgagggcct

SEQ ID NO: 3431567 - DNA, 25 bp, Homo sapien
cggactcggaccgggcgggatgcag

SEQ ID NO: 3431568 - DNA, 25 bp, Homo sapien
ggcggactcggaccgggcgggatgc

SEQ ID NO: 3431569 - DNA, 25 bp, Homo sapien
actcggaccgggcgggatgcagcgg

SEQ ID NO: 3431570 - DNA, 25 bp, Homo sapien
ctcggaccgggcgggatgcagcggc

SEQ ID NO: 3431571 - DNA, 25 bp, Homo sapien
aactgttctgtgtggtgcccctggg

SEQ ID NO: 3431572 - DNA, 25 bp, Homo sapien
gagtagatgaatgaacgaacccagc

SEQ ID NO: 3431573 - DNA, 25 bp, Homo sapien
tgtcatccccacgtaggtcttgaag

SEQ ID NO: 3431574 - DNA, 25 bp, Homo sapien
tctgtgccgtctcctagaaggtgag

SEQ ID NO: 3431575 - DNA, 25 bp, Homo sapien
cccagcctgggctatgttcagggct

SEQ ID NO: 3431576 - DNA, 25 bp, Homo sapien
tcagggctgacaccgtcccggggac

SEQ ID NO: 3431577 - DNA, 25 bp, Homo sapien
agggcagaagtggtaggtcttgggc

SEQ ID NO: 3431578 - DNA, 25 bp, Homo sapien
cagaagtggtaggtcttgggcaggg

SEQ ID NO: 3431579 - DNA, 25 bp, Homo sapien
actcgggacccgatggatccaggga

SEQ ID NO: 3431580 - DNA, 25 bp, Homo sapien
cttggagcccagtgggcaatcccac

SEQ ID NO: 3431581 - DNA, 25 bp, Homo sapien
tagtagtagacagtccaagcccggg

SEQ ID NO: 3431582 - DNA, 25 bp, Homo sapien
gcggtcctgagtctccggaaggcca

SEQ ID NO: 3431583 - DNA, 25 bp, Homo sapien
acaaggtcacctccgccccaggaca

SEQ ID NO: 3431584 - DNA, 25 bp, Homo sapien
gggggagcccagaacgcacaaggtc

SEQ ID NO: 3431585 - DNA, 25 bp, Homo sapien
gagcccagaacgcacaaggtcacct

SEQ ID NO: 3431586 - DNA, 25 bp, Homo sapien
gcacaaggtcacctccgccccagga

SEQ ID NO: 3431587 - DNA, 25 bp, Homo sapien
ttggagactagcagggctgcctcac

SEQ ID NO: 3431588 - DNA, 25 bp, Homo sapien
cttggagactagcagggctgcctca

SEQ ID NO: 3431589 - DNA, 25 bp, Homo sapien
tggcaccttcatcagccaagcaggg

SEQ ID NO: 3431590 - DNA, 25 bp, Homo sapien
gcaccttcatcagccaagcagggga

SEQ ID NO: 3431591 - DNA, 25 bp, Homo sapien
cagccccggcggcttgtaggtgaaa

SEQ ID NO: 3431592 - DNA, 25 bp, Homo sapien
gcccaggcctgccaaaaagtaggtg

SEQ ID NO: 3431593 - DNA, 25 bp, Homo sapien
caggtcacgggcgagttctgctgcc

SEQ ID NO: 3431594 - DNA, 25 bp, Homo sapien
gggccagcaactgccttgtcagcag

SEQ ID NO: 3431595 - DNA, 25 bp, Homo sapien
ggtgcagacgccatgcctgccgccc

SEQ ID NO: 3431596 - DNA, 25 bp, Homo sapien
cccgccagcgccagccactgagctt

SEQ ID NO: 3431597 - DNA, 25 bp, Homo sapien
gccagccactgagcttcacagctac

SEQ ID NO: 3431598 - DNA, 25 bp, Homo sapien
ctctgcccgcgggtgcagacgccat

SEQ ID NO: 3431599 - DNA, 25 bp, Homo sapien
cagcagcgccagcactgtgtccacc

SEQ ID NO: 3431600 - DNA, 25 bp, Homo sapien
ggcaggtgggtacacagcctccacc

SEQ ID NO: 3431601 - DNA, 25 bp, Homo sapien
tgggcaggtgggtacacagcctcca

SEQ ID NO: 3431602 - DNA, 25 bp, Homo sapien
agctgggcaggtgggtacacagcct

SEQ ID NO: 3431603 - DNA, 25 bp, Homo sapien
acaccacagcacagattcgcacggc

SEQ ID NO: 3431604 - DNA, 25 bp, Homo sapien
ccctgtgtccgacacaccacagcac

SEQ ID NO: 3431605 - DNA, 25 bp, Homo sapien
cacagattcgcacggccaggccggg

SEQ ID NO: 3431606 - DNA, 25 bp, Homo sapien
agcagtggcctatcaccctgtgtcc

SEQ ID NO: 3431607 - DNA, 25 bp, Homo sapien
cagcgtcctcggcagggagttgtgg

SEQ ID NO: 3431608 - DNA, 25 bp, Homo sapien
cagggagttgtggtgccgtagaggg

SEQ ID NO: 3431609 - DNA, 25 bp, Homo sapien
gttgtggtgccgtagagggcggtcc

SEQ ID NO: 3431610 - DNA, 25 bp, Homo sapien
tcctcggcagggagttgtggtgccg

SEQ ID NO: 3431611 - DNA, 25 bp, Homo sapien
gctcggcactcaggccggcctccag

SEQ ID NO: 3431612 - DNA, 25 bp, Homo sapien
cgctgctcggcactcaggccggcct

SEQ ID NO: 3431613 - DNA, 25 bp, Homo sapien
tcggccgccgccttgacgcgctgcc

SEQ ID NO: 3431614 - DNA, 25 bp, Homo sapien
cgccttgacgcgctgccgcacagcc

SEQ ID NO: 3431615 - DNA, 25 bp, Homo sapien
tgcgccgggcgggaggcgcgagctc

SEQ ID NO: 3431616 - DNA, 25 bp, Homo sapien
ctgcgccgggcgggaggcgcgagct

SEQ ID NO: 3431617 - DNA, 25 bp, Homo sapien
cgccgggcgggaggcgcgagctcag

SEQ ID NO: 3431618 - DNA, 25 bp, Homo sapien
gcgccgggcgggaggcgcgagctca

SEQ ID NO: 3431619 - DNA, 25 bp, Homo sapien
gccgccggccgctgtcagcgcgaaa

SEQ ID NO: 3431620 - DNA, 25 bp, Homo sapien
gccggccgctgtcagcgcgaaatcc

SEQ ID NO: 3431621 - DNA, 25 bp, Homo sapien
ggccgctgtcagcgcgaaatccacg

SEQ ID NO: 3431622 - DNA, 25 bp, Homo sapien
ccggccgctgtcagcgcgaaatcca

SEQ ID NO: 3431623 - DNA, 25 bp, Homo sapien
ccagacacaggccgccgttcagctc

SEQ ID NO: 3431624 - DNA, 25 bp, Homo sapien
gacacaggccgccgttcagctccag

SEQ ID NO: 3431625 - DNA, 25 bp, Homo sapien
ctccagacacaggccgccgttcagc

SEQ ID NO: 3431626 - DNA, 25 bp, Homo sapien
agacacaggccgccgttcagctcca

SEQ ID NO: 3431627 - DNA, 25 bp, Homo sapien
cggcccacagcccctccagcgcgcc

SEQ ID NO: 3431628 - DNA, 25 bp, Homo sapien
ccacagcccctccagcgcgccgcac

SEQ ID NO: 3431629 - DNA, 25 bp, Homo sapien
ctcgtcggccgccggccccagccgc

SEQ ID NO: 3431630 - DNA, 25 bp, Homo sapien
ggcccacagcccctccagcgcgccg

SEQ ID NO: 3431631 - DNA, 25 bp, Homo sapien
gaccgccgaagcatggtctccacca

SEQ ID NO: 3431632 - DNA, 25 bp, Homo sapien
acgaacttcttgctgacgccgccag

SEQ ID NO: 3431633 - DNA, 25 bp, Homo sapien
tggagcccgtagtcgcgcgccgcct

SEQ ID NO: 3431634 - DNA, 25 bp, Homo sapien
gttttccctccatgaggcagcgcgc

SEQ ID NO: 3431635 - DNA, 25 bp, Homo sapien
gggcatatccaggtcagctagtact

SEQ ID NO: 3431636 - DNA, 25 bp, Homo sapien
caggtcagctagtactgggtgctag

SEQ ID NO: 3431637 - DNA, 25 bp, Homo sapien
taggatggccccttcaggggatacg

SEQ ID NO: 3431638 - DNA, 25 bp, Homo sapien
catatccaggtcagctagtactggg

SEQ ID NO: 3431639 - DNA, 25 bp, Homo sapien
aagtggttggggtctgactccacga

SEQ ID NO: 3431640 - DNA, 25 bp, Homo sapien
gcaaagtggttggggtctgactcca

SEQ ID NO: 3431641 - DNA, 25 bp, Homo sapien
gtggttggggtctgactccacgagg

SEQ ID NO: 3431642 - DNA, 25 bp, Homo sapien
aaagtggttggggtctgactccacg

SEQ ID NO: 3431643 - DNA, 25 bp, Homo sapien
gctcttctgcttagccaggcgcatg

SEQ ID NO: 3431644 - DNA, 25 bp, Homo sapien
accaggcagtcatcccagtaggaga

SEQ ID NO: 3431645 - DNA, 25 bp, Homo sapien
tgcagggcagacctagctcctggca

SEQ ID NO: 3431646 - DNA, 25 bp, Homo sapien
cagccatctagcttgaggccgcgag

SEQ ID NO: 3431647 - DNA, 25 bp, Homo sapien
aaaagtgctcatggcactgtggcgc

SEQ ID NO: 3431648 - DNA, 25 bp, Homo sapien
tgcaagtctcgggtaatccgggaaa

SEQ ID NO: 3431649 - DNA, 25 bp, Homo sapien
taatccgggaaaagtgctcatggca

SEQ ID NO: 3431650 - DNA, 25 bp, Homo sapien
tcatggcactgtggcgcatcctcta

SEQ ID NO: 3431651 - DNA, 25 bp, Homo sapien
tgatctcgataagccgaggcccagc

SEQ ID NO: 3431652 - DNA, 25 bp, Homo sapien
tccacgttgaagactccatcgagca

SEQ ID NO: 3431653 - DNA, 25 bp, Homo sapien
tccagcagattgaggcgtagcagtc

SEQ ID NO: 3431654 - DNA, 25 bp, Homo sapien
tccaggatccaatcacgcaggtaga

SEQ ID NO: 3431655 - DNA, 25 bp, Homo sapien
tggaacagacctaggcattgcagcg

SEQ ID NO: 3431656 - DNA, 25 bp, Homo sapien
gaggtgttcacgtgtctcagggcca

SEQ ID NO: 3431657 - DNA, 25 bp, Homo sapien
gagtgtagactctcctctgccaatg

SEQ ID NO: 3431658 - DNA, 25 bp, Homo sapien
aatgctagttaggtgtgccagaggc

SEQ ID NO: 3431659 - DNA, 25 bp, Homo sapien
accagtacataagcctttatttggg

SEQ ID NO: 3431660 - DNA, 25 bp, Homo sapien
cagtacataagcctttatttgggga

SEQ ID NO: 3431661 - DNA, 25 bp, Homo sapien
ccagtacataagcctttatttgggg

SEQ ID NO: 3431662 - DNA, 25 bp, Homo sapien
ctgacagtcccggacctaaacatca

SEQ ID NO: 3431663 - DNA, 25 bp, Homo sapien
tgacagtcccggacctaaacatcat

SEQ ID NO: 3431664 - DNA, 25 bp, Homo sapien
aatccaaatcaaacacggccgccat

SEQ ID NO: 3431665 - DNA, 25 bp, Homo sapien
ccaaatccaaatcaaacacggccgc

SEQ ID NO: 3431666 - DNA, 25 bp, Homo sapien
aaatccaaatcaaacacggccgcca

SEQ ID NO: 3431667 - DNA, 25 bp, Homo sapien
ctccaaatccaaatcaaacacggcc

SEQ ID NO: 3431668 - DNA, 25 bp, Homo sapien
ccaggatccagtcgcgccagggcag

SEQ ID NO: 3431669 - DNA, 25 bp, Homo sapien
aggatcggctccaggatccagtcgc

SEQ ID NO: 3431670 - DNA, 25 bp, Homo sapien
gatcggctccaggatccagtcgcgc

SEQ ID NO: 3431671 - DNA, 25 bp, Homo sapien
ggctccaggatccagtcgcgccagg

SEQ ID NO: 3431672 - DNA, 25 bp, Homo sapien
gaaggtgccaggatacctccccgct

SEQ ID NO: 3431673 - DNA, 25 bp, Homo sapien
tgagaaaccgaggggtaagagccaa

SEQ ID NO: 3431674 - DNA, 25 bp, Homo sapien
aggaaggtgccaggatacctccccg

SEQ ID NO: 3431675 - DNA, 25 bp, Homo sapien
ctgtgagaaaccgaggggtaagagc

SEQ ID NO: 3431676 - DNA, 25 bp, Homo sapien
aggccagctgccctcaactcggcaa

SEQ ID NO: 3431677 - DNA, 25 bp, Homo sapien
ccctcaactcggcaaggggacatgc

SEQ ID NO: 3431678 - DNA, 25 bp, Homo sapien
agctgccctcaactcggcaagggga

SEQ ID NO: 3431679 - DNA, 25 bp, Homo sapien
tctaggccagctgccctcaactcgg

SEQ ID NO: 3431680 - DNA, 25 bp, Homo sapien
gcccgatgcgctctgggccaacgtt

SEQ ID NO: 3431681 - DNA, 25 bp, Homo sapien
gcagctcaaagcagtggggcccgat

SEQ ID NO: 3431682 - DNA, 25 bp, Homo sapien
cacctcttcatagtgtcccacaggc

SEQ ID NO: 3431683 - DNA, 25 bp, Homo sapien
tctgggccaacgttcacgctggtct

SEQ ID NO: 3431684 - DNA, 25 bp, Homo sapien
ccttgcacctttcgcacctggaaca

SEQ ID NO: 3431685 - DNA, 25 bp, Homo sapien
gcccaagttggtgccttgcaccttt

SEQ ID NO: 3431686 - DNA, 25 bp, Homo sapien
tttgcccaagttggtgccttgcacc

SEQ ID NO: 3431687 - DNA, 25 bp, Homo sapien
cttgcacctttcgcacctggaacac

SEQ ID NO: 3431688 - DNA, 25 bp, Homo sapien
ctgggtatgatggtacacgcctgta

SEQ ID NO: 3431689 - DNA, 25 bp, Homo sapien
ttagctgggtatgatggtacacgcc

SEQ ID NO: 3431690 - DNA, 25 bp, Homo sapien
ttagaaactgaggcatccaggctgg

SEQ ID NO: 3431691 - DNA, 25 bp, Homo sapien
tagaaactgaggcatccaggctggg

SEQ ID NO: 3431692 - DNA, 25 bp, Homo sapien
tccgctcagcccgtgtgtgtgctgt

SEQ ID NO: 3431693 - DNA, 25 bp, Homo sapien
cataggccagttccacaataaaggg

SEQ ID NO: 3431694 - DNA, 25 bp, Homo sapien
gggtgcttcactgactctagaatgt

SEQ ID NO: 3431695 - DNA, 25 bp, Homo sapien
gtccttggcattgcgcacaattttg

SEQ ID NO: 3431696 - DNA, 25 bp, Homo sapien
tgaatgaatgatgggacggatgcac

SEQ ID NO: 3431697 - DNA, 25 bp, Homo sapien
cacacgtgagggacacagtaggtgc

SEQ ID NO: 3431698 - DNA, 25 bp, Homo sapien
ggtgctggacagacgtttgctgaat

SEQ ID NO: 3431699 - DNA, 25 bp, Homo sapien
cccacagactcatctctcaagagct

SEQ ID NO: 3431700 - DNA, 25 bp, Homo sapien
agatctcgcagagaagacagggaag

SEQ ID NO: 3431701 - DNA, 25 bp, Homo sapien
tccaagagcttagcccaaaagatct

SEQ ID NO: 3431702 - DNA, 25 bp, Homo sapien
acagacatgtacacaacggctctaa

SEQ ID NO: 3431703 - DNA, 25 bp, Homo sapien
aacggctctaatacgccaggcccag

SEQ ID NO: 3431704 - DNA, 25 bp, Homo sapien
tcagcaaacatctaccgacgcctac

SEQ ID NO: 3431705 - DNA, 25 bp, Homo sapien
ccgtggggattcaattcaattcagc

SEQ ID NO: 3431706 - DNA, 25 bp, Homo sapien
gacgcctactcggtgcctggccctg

SEQ ID NO: 3431707 - DNA, 25 bp, Homo sapien
agctgccgtggggattcaattcaat

SEQ ID NO: 3431708 - DNA, 25 bp, Homo sapien
acaaacacgtcagcagccacgtgct

SEQ ID NO: 3431709 - DNA, 25 bp, Homo sapien
aaacacgtcagcagccacgtgctgg

SEQ ID NO: 3431710 - DNA, 25 bp, Homo sapien
ggaaagaggggctcataattcccgc

SEQ ID NO: 3431711 - DNA, 25 bp, Homo sapien
gaggggctcataattcccgccctac

SEQ ID NO: 3431712 - DNA, 25 bp, Homo sapien
gatgccctctcgctccagatgcgtg

SEQ ID NO: 3431713 - DNA, 25 bp, Homo sapien
ggaagatgccctctcgctccagatg

SEQ ID NO: 3431714 - DNA, 25 bp, Homo sapien
ccctctcgctccagatgcgtgaaga

SEQ ID NO: 3431715 - DNA, 25 bp, Homo sapien
ctcgctccagatgcgtgaagagctc

SEQ ID NO: 3431716 - DNA, 25 bp, Homo sapien
ggccagcgtgatctcagccaggtag

SEQ ID NO: 3431717 - DNA, 25 bp, Homo sapien
ccagggccagcgtgatctcagccag

SEQ ID NO: 3431718 - DNA, 25 bp, Homo sapien
cctggctgctgagcatgatgttctc

SEQ ID NO: 3431719 - DNA, 25 bp, Homo sapien
gctgctgagcatgatgttctcgggc

SEQ ID NO: 3431720 - DNA, 25 bp, Homo sapien
cgggcttgaggtcccggtagatgat

SEQ ID NO: 3431721 - DNA, 25 bp, Homo sapien
ctgagcatgatgttctcgggcttga

SEQ ID NO: 3431722 - DNA, 25 bp, Homo sapien
cagagtccaaagtcggtcagtttga

SEQ ID NO: 3431723 - DNA, 25 bp, Homo sapien
cgccctcatggatagactccttgca

SEQ ID NO: 3431724 - DNA, 25 bp, Homo sapien
agtgacggcgccctcatggatagac

SEQ ID NO: 3431725 - DNA, 25 bp, Homo sapien
ccgcagaaggtgtgagtgacggcgc

SEQ ID NO: 3431726 - DNA, 25 bp, Homo sapien
gttgtggccactgcgcaccagaatc

SEQ ID NO: 3431727 - DNA, 25 bp, Homo sapien
actgcgcaccagaatctcaggggcc

SEQ ID NO: 3431728 - DNA, 25 bp, Homo sapien
cggttgtggccactgcgcaccagaa

SEQ ID NO: 3431729 - DNA, 25 bp, Homo sapien
cccggttgtggccactgcgcaccag

SEQ ID NO: 3431730 - DNA, 25 bp, Homo sapien
tctgcccctgcccctcctcctcccc

SEQ ID NO: 3431731 - DNA, 25 bp, Homo sapien
ctctgcccctgcccctcctcctccc

SEQ ID NO: 3431732 - DNA, 25 bp, Homo sapien
ctgcccctgcccctcctcctccccg

SEQ ID NO: 3431733 - DNA, 25 bp, Homo sapien
tgcccttgccccaggaggggggcta

SEQ ID NO: 3431734 - DNA, 25 bp, Homo sapien
tgccccaggaggggggctactccca

SEQ ID NO: 3431735 - DNA, 25 bp, Homo sapien
ctgcccttgccccaggaggggggct

SEQ ID NO: 3431736 - DNA, 25 bp, Homo sapien
gaggagccttgtgggcctcccacca

SEQ ID NO: 3431737 - DNA, 25 bp, Homo sapien
tgagaggagccttgtgggcctccca

SEQ ID NO: 3431738 - DNA, 25 bp, Homo sapien
aggaaggtgagaggagccttgtggg

SEQ ID NO: 3431739 - DNA, 25 bp, Homo sapien
ggtgagaggagccttgtgggcctcc

SEQ ID NO: 3431740 - DNA, 25 bp, Homo sapien
gcccctgatgatcttatccatggtt

SEQ ID NO: 3431741 - DNA, 25 bp, Homo sapien
ttttgacaaggtcccgggcatctgg

SEQ ID NO: 3431742 - DNA, 25 bp, Homo sapien
ctttttgacaaggtcccgggcatct

SEQ ID NO: 3431743 - DNA, 25 bp, Homo sapien
cctgatgatcttatccatggttttc

SEQ ID NO: 3431744 - DNA, 25 bp, Homo sapien
gaggcgccaactccccatgtggctg

SEQ ID NO: 3431745 - DNA, 25 bp, Homo sapien
gcgcgttggtgaggcgccaactccc

SEQ ID NO: 3431746 - DNA, 25 bp, Homo sapien
cccagggcgcgttggtgaggcgcca

SEQ ID NO: 3431747 - DNA, 25 bp, Homo sapien
aactccccatgtggctgtccggcct

SEQ ID NO: 3431748 - DNA, 25 bp, Homo sapien
ctgggccacccccaatccgctggct

SEQ ID NO: 3431749 - DNA, 25 bp, Homo sapien
acccccaatccgctggctgggattc

SEQ ID NO: 3431750 - DNA, 25 bp, Homo sapien
ccaatccgctggctgggattccgtt

SEQ ID NO: 3431751 - DNA, 25 bp, Homo sapien
gccacccccaatccgctggctggga

SEQ ID NO: 3431752 - DNA, 25 bp, Homo sapien
ggccagaaggtcgtcccaattcatg

SEQ ID NO: 3431753 - DNA, 25 bp, Homo sapien
acgccaggccagaaggtcgtcccaa

SEQ ID NO: 3431754 - DNA, 25 bp, Homo sapien
aaggtcgtcccaattcatgtgccgg

SEQ ID NO: 3431755 - DNA, 25 bp, Homo sapien
cgtcccaattcatgtgccggaaaaa

SEQ ID NO: 3431756 - DNA, 25 bp, Homo sapien
ctggttggcactctcgctgagggct

SEQ ID NO: 3431757 - DNA, 25 bp, Homo sapien
tccaccggcgtctgccgtgtgaagc

SEQ ID NO: 3431758 - DNA, 25 bp, Homo sapien
tgtgaagcgggtatcaaactggctc

SEQ ID NO: 3431759 - DNA, 25 bp, Homo sapien
catcaggactgtccaccggcgtctg

SEQ ID NO: 3431760 - DNA, 25 bp, Homo sapien
gggccatgcgacactcagtgcctgc

SEQ ID NO: 3431761 - DNA, 25 bp, Homo sapien
tgccatccttagtcacgatccgtgc

SEQ ID NO: 3431762 - DNA, 25 bp, Homo sapien
tcagtgcctgccatccttagtcacg

SEQ ID NO: 3431763 - DNA, 25 bp, Homo sapien
cttagtcacgatccgtgccctggtc

SEQ ID NO: 3431764 - DNA, 25 bp, Homo sapien
gaggcgcctgggtgagcgcagcttg

SEQ ID NO: 3431765 - DNA, 25 bp, Homo sapien
cagacggcgccacgtatgtgaagcc

SEQ ID NO: 3431766 - DNA, 25 bp, Homo sapien
ggctactgttgaggcgcctgggtga

SEQ ID NO: 3431767 - DNA, 25 bp, Homo sapien
gtccaggacagacggcgccacgtat

SEQ ID NO: 3431768 - DNA, 25 bp, Homo sapien
ggtgtaggaactgaggtccccatga

SEQ ID NO: 3431769 - DNA, 25 bp, Homo sapien
tgatagacacagcaaccgaagccaa

SEQ ID NO: 3431770 - DNA, 25 bp, Homo sapien
caacactggccgacagacgtggcca

SEQ ID NO: 3431771 - DNA, 25 bp, Homo sapien
aaggcagaataagagcctcctaggc

SEQ ID NO: 3431772 - DNA, 25 bp, Homo sapien
cctggacgcccacggcccctcttgg

SEQ ID NO: 3431773 - DNA, 25 bp, Homo sapien
gaggtagaggtagctccgtgggctc

SEQ ID NO: 3431774 - DNA, 25 bp, Homo sapien
ctagcgccctggacgcccacggccc

SEQ ID NO: 3431775 - DNA, 25 bp, Homo sapien
cttggtccctgaggggggacggatg

SEQ ID NO: 3431776 - DNA, 25 bp, Homo sapien
agggacagggctcaagggctaccct

SEQ ID NO: 3431777 - DNA, 25 bp, Homo sapien
ggccctccgtgcccatgattcaggg

SEQ ID NO: 3431778 - DNA, 25 bp, Homo sapien
gacagggctcaagggctaccctcac

SEQ ID NO: 3431779 - DNA, 25 bp, Homo sapien
actttcatacgcactcacaccccac

SEQ ID NO: 3431780 - DNA, 25 bp, Homo sapien
tcagccctttaatcttccacgggag

SEQ ID NO: 3431781 - DNA, 25 bp, Homo sapien
atgattcagccctttaatcttccac

SEQ ID NO: 3431782 - DNA, 25 bp, Homo sapien
gattcagccctttaatcttccacgg

SEQ ID NO: 3431783 - DNA, 25 bp, Homo sapien
agccctttaatcttccacgggagca

SEQ ID NO: 3431784 - DNA, 25 bp, Homo sapien
ctgcccctaggcatgcagcacaaag

SEQ ID NO: 3431785 - DNA, 25 bp, Homo sapien
cctaggcatgcagcacaaagagcca

SEQ ID NO: 3431786 - DNA, 25 bp, Homo sapien
accctgcccctaggcatgcagcaca

SEQ ID NO: 3431787 - DNA, 25 bp, Homo sapien
gcccctaggcatgcagcacaaagag

SEQ ID NO: 3431788 - DNA, 25 bp, Homo sapien
gccctgtggtcctacagagacccct

SEQ ID NO: 3431789 - DNA, 25 bp, Homo sapien
tgagggaccatctccccgaccactg

SEQ ID NO: 3431790 - DNA, 25 bp, Homo sapien
ggtcgcaccgggctagctggctgcc

SEQ ID NO: 3431791 - DNA, 25 bp, Homo sapien
gatgtctacgcccaggcgagctcct

SEQ ID NO: 3431792 - DNA, 25 bp, Homo sapien
gaagccagcgcccagctttcctcac

SEQ ID NO: 3431793 - DNA, 25 bp, Homo sapien
cctccgcgcgtgacctcggccccgc

SEQ ID NO: 3431794 - DNA, 25 bp, Homo sapien
ttcccagaggccgggatccggagcc

SEQ ID NO: 3431795 - DNA, 25 bp, Homo sapien
ggtcctaggaaaggggctctctctg

SEQ ID NO: 3431796 - DNA, 25 bp, Homo sapien
ggagccgcccgaagccggtgccgca

SEQ ID NO: 3431797 - DNA, 25 bp, Homo sapien
gagccagcggtgctgattggtcaag

SEQ ID NO: 3431798 - DNA, 25 bp, Homo sapien
gcggtgctgattggtcaaggatgaa

SEQ ID NO: 3431799 - DNA, 25 bp, Homo sapien
gccagcggtgctgattggtcaagga

SEQ ID NO: 3431800 - DNA, 25 bp, Homo sapien
ccagcggtgctgattggtcaaggat

SEQ ID NO: 3431801 - DNA, 25 bp, Homo sapien
atcagactccctgagcattctcagg

SEQ ID NO: 3431802 - DNA, 25 bp, Homo sapien
tgtgcaggagactgcagttttattc

SEQ ID NO: 3431803 - DNA, 25 bp, Homo sapien
tgcaggagactgcagttttattctt

SEQ ID NO: 3431804 - DNA, 25 bp, Homo sapien
aaatcagactccctgagcattctca

SEQ ID NO: 3431805 - DNA, 25 bp, Homo sapien
ccagatcctagagatccggcatggg

SEQ ID NO: 3431806 - DNA, 25 bp, Homo sapien
cagcggccttccagatcctagagat

SEQ ID NO: 3431807 - DNA, 25 bp, Homo sapien
ctgccagccaatgggttgatggcgt

SEQ ID NO: 3431808 - DNA, 25 bp, Homo sapien
agctggcacgcgtctggcgctgctc

SEQ ID NO: 3431809 - DNA, 25 bp, Homo sapien
aatggacactaccatggaagctgac

SEQ ID NO: 3431810 - DNA, 25 bp, Homo sapien
tggacactaccatggaagctgacct

SEQ ID NO: 3431811 - DNA, 25 bp, Homo sapien
aaatggacactaccatggaagctga

SEQ ID NO: 3431812 - DNA, 25 bp, Homo sapien
gacactaccatggaagctgacctgg

SEQ ID NO: 3431813 - DNA, 25 bp, Homo sapien
caggcacccactccgtgtccagcag

SEQ ID NO: 3431814 - DNA, 25 bp, Homo sapien
caccgtctctcccatactcggtcat

SEQ ID NO: 3431815 - DNA, 25 bp, Homo sapien
caccatcattgattcaccaggcacc

SEQ ID NO: 3431816 - DNA, 25 bp, Homo sapien
catactcggtcattcacaccatcat

SEQ ID NO: 3431817 - DNA, 25 bp, Homo sapien
tagattgtatgaggactccatgagg

SEQ ID NO: 3431818 - DNA, 25 bp, Homo sapien
cacttcaagtccttggcataggata

SEQ ID NO: 3431819 - DNA, 25 bp, Homo sapien
gtcctcgcctgtaaagtagattgta

SEQ ID NO: 3431820 - DNA, 25 bp, Homo sapien
taattactcaaaaggtgatgacaat

SEQ ID NO: 3431821 - DNA, 25 bp, Homo sapien
aaagaaaagtctgggttgagccctg

SEQ ID NO: 3431822 - DNA, 25 bp, Homo sapien
aagaaaagtctgggttgagccctgg

SEQ ID NO: 3431823 - DNA, 25 bp, Homo sapien
ctttcaggacccataaagctgctta

SEQ ID NO: 3431824 - DNA, 25 bp, Homo sapien
gctttcaggacccataaagctgctt

SEQ ID NO: 3431825 - DNA, 25 bp, Homo sapien
ggagggataacagggctcagagaca

SEQ ID NO: 3431826 - DNA, 25 bp, Homo sapien
ataacagggctcagagacaccacac

SEQ ID NO: 3431827 - DNA, 25 bp, Homo sapien
tcctcttcctggtcaacgggggctc

SEQ ID NO: 3431828 - DNA, 25 bp, Homo sapien
cagagctgccagtgcgctttcgaga

SEQ ID NO: 3431829 - DNA, 25 bp, Homo sapien
tctgacggccaatggccagatttgg

SEQ ID NO: 3431830 - DNA, 25 bp, Homo sapien
tgcatcactcttgggagtcacaacc

SEQ ID NO: 3431831 - DNA, 25 bp, Homo sapien
tggcgagaagaggccggcccagggg

SEQ ID NO: 3431832 - DNA, 25 bp, Homo sapien
ctggcgagaagaggccggcccaggg

SEQ ID NO: 3431833 - DNA, 25 bp, Homo sapien
ttcccgaagactcgattgagcaggg

SEQ ID NO: 3431834 - DNA, 25 bp, Homo sapien
gagcaggggcccgtatgtcctctga

SEQ ID NO: 3431835 - DNA, 25 bp, Homo sapien
tgtcctctgagcagcgtcgtgcagg

SEQ ID NO: 3431836 - DNA, 25 bp, Homo sapien
tgcagggagtcaggacgatgtcggt

SEQ ID NO: 3431837 - DNA, 25 bp, Homo sapien
ccagggccagccacggctctgtcat

SEQ ID NO: 3431838 - DNA, 25 bp, Homo sapien
ctgcagggggagagtccaggatgtc

SEQ ID NO: 3431839 - DNA, 25 bp, Homo sapien
gcagggggagagtccaggatgtccc

SEQ ID NO: 3431840 - DNA, 25 bp, Homo sapien
gtccccagggccagccacggctctg

SEQ ID NO: 3431841 - DNA, 25 bp, Homo sapien
gctcctcggggcccagttcgcggtc

SEQ ID NO: 3431842 - DNA, 25 bp, Homo sapien
agctcctcggggcccagttcgcggt

SEQ ID NO: 3431843 - DNA, 25 bp, Homo sapien
acccagctcccggtggctgatgtag

SEQ ID NO: 3431844 - DNA, 25 bp, Homo sapien
cagtgtcaaactcctcgaaggcggc

SEQ ID NO: 3431845 - DNA, 25 bp, Homo sapien
tgatgtagccgtcacggtcagtgtc

SEQ ID NO: 3431846 - DNA, 25 bp, Homo sapien
gctcccggtggctgatgtagccgtc

SEQ ID NO: 3431847 - DNA, 25 bp, Homo sapien
tgcgcatcttgatgtgctgcgagac

SEQ ID NO: 3431848 - DNA, 25 bp, Homo sapien
gctttgggcctatcagttctacaaa

SEQ ID NO: 3431849 - DNA, 25 bp, Homo sapien
gaaggcgatgcgcagctctcgcacc

SEQ ID NO: 3431850 - DNA, 25 bp, Homo sapien
tcagctttgggcctatcagttctac

SEQ ID NO: 3431851 - DNA, 25 bp, Homo sapien
agcatgtgcgccgtctcctccctca

SEQ ID NO: 3431852 - DNA, 25 bp, Homo sapien
aggtccacttctcggagcatctcgt

SEQ ID NO: 3431853 - DNA, 25 bp, Homo sapien
tccccgagcagagccggtaccgcct

SEQ ID NO: 3431854 - DNA, 25 bp, Homo sapien
tccagctcaggacccgccagcggct

SEQ ID NO: 3431855 - DNA, 25 bp, Homo sapien
aaagtctacggtgccatccccattg

SEQ ID NO: 3431856 - DNA, 25 bp, Homo sapien
ctaggccctggaagcacgggagggt

SEQ ID NO: 3431857 - DNA, 25 bp, Homo sapien
agcctaggccctggaagcacgggag

SEQ ID NO: 3431858 - DNA, 25 bp, Homo sapien
gtcagtccacgtcagggatcccagg

SEQ ID NO: 3431859 - DNA, 25 bp, Homo sapien
gggcagggcttgggtcagtccacgt

SEQ ID NO: 3431860 - DNA, 25 bp, Homo sapien
tcagtggcgggagagcatcatcaca

SEQ ID NO: 3431861 - DNA, 25 bp, Homo sapien
cagtggcgggagagcatcatcacaa

SEQ ID NO: 3431862 - DNA, 25 bp, Homo sapien
agtggcgggagagcatcatcacaaa

SEQ ID NO: 3431863 - DNA, 25 bp, Homo sapien
cacactgaggaacggtgggcagctg

SEQ ID NO: 3431864 - DNA, 25 bp, Homo sapien
gagacccaaatcttgctcacactga

SEQ ID NO: 3431865 - DNA, 25 bp, Homo sapien
tgagggtgggcaggtaacataacaa

SEQ ID NO: 3431866 - DNA, 25 bp, Homo sapien
ggcaacagatattccctcctggagc

SEQ ID NO: 3431867 - DNA, 25 bp, Homo sapien
tctcgtctccttcatggtggtttct

SEQ ID NO: 3431868 - DNA, 25 bp, Homo sapien
tctcttaggcggctgtattatgtac

SEQ ID NO: 3431869 - DNA, 25 bp, Homo sapien
ttactgcatgttgatctctcttccc

SEQ ID NO: 3431870 - DNA, 25 bp, Homo sapien
ttatgtacactgagatgccagtcct

SEQ ID NO: 3431871 - DNA, 25 bp, Homo sapien
tctgagactcccaaggacttatctg

SEQ ID NO: 3431872 - DNA, 25 bp, Homo sapien
tctatgtatgtcctccgtctgagac

SEQ ID NO: 3431873 - DNA, 25 bp, Homo sapien
cagagttgcgtgagcagctgcaaca

SEQ ID NO: 3431874 - DNA, 25 bp, Homo sapien
tacaaacttcaacagcagagttgcg

SEQ ID NO: 3431875 - DNA, 25 bp, Homo sapien
gacacccctgtcttgtgtccacggg

SEQ ID NO: 3431876 - DNA, 25 bp, Homo sapien
ggcagcccggaaggcctcgaagcct

SEQ ID NO: 3431877 - DNA, 25 bp, Homo sapien
tgcctagggcaccttcagctcaggt

SEQ ID NO: 3431878 - DNA, 25 bp, Homo sapien
tctgtgtgcagtgctgatcctggtc

SEQ ID NO: 3431879 - DNA, 25 bp, Homo sapien
tagtctgggcaatgcacaaagcagt

SEQ ID NO: 3431880 - DNA, 25 bp, Homo sapien
tttttgaagtagtctgggcaatgca

SEQ ID NO: 3431881 - DNA, 25 bp, Homo sapien
tgcacaaagcagtccatggtggccc

SEQ ID NO: 3431882 - DNA, 25 bp, Homo sapien
ggcaatgcacaaagcagtccatggt

SEQ ID NO: 3431883 - DNA, 25 bp, Homo sapien
tctgtgtctactctgggcaaggtgc

SEQ ID NO: 3431884 - DNA, 25 bp, Homo sapien
cacgagtgatccataagaagggact

SEQ ID NO: 3431885 - DNA, 25 bp, Homo sapien
caccaggtgttctttggctcccagg

SEQ ID NO: 3431886 - DNA, 25 bp, Homo sapien
agtcctacaagtgaggtggtgccca

SEQ ID NO: 3431887 - DNA, 25 bp, Homo sapien
actgagtggcgtcacggggcgggcg

SEQ ID NO: 3431888 - DNA, 25 bp, Homo sapien
tggcggccactgagtggcgtcacgg

SEQ ID NO: 3431889 - DNA, 25 bp, Homo sapien
gggatgtgtccgagcccggcacggg

SEQ ID NO: 3431890 - DNA, 25 bp, Homo sapien
ggctgtcgcttgccatggcggccac

SEQ ID NO: 3431891 - DNA, 25 bp, Homo sapien
aggccagtttgagtgtacaacactg

SEQ ID NO: 3431892 - DNA, 25 bp, Homo sapien
agtttgagtgtacaacactgtggag

SEQ ID NO: 3431893 - DNA, 25 bp, Homo sapien
gatgttaactgcagtgatgcctgtg

SEQ ID NO: 3431894 - DNA, 25 bp, Homo sapien
ccagtttgagtgtacaacactgtgg

SEQ ID NO: 3431895 - DNA, 25 bp, Homo sapien
tagcacctcggcagcttccgagcta

SEQ ID NO: 3431896 - DNA, 25 bp, Homo sapien
tcggcagcttccgagctagcgccat

SEQ ID NO: 3431897 - DNA, 25 bp, Homo sapien
agcacctcggcagcttccgagctag

SEQ ID NO: 3431898 - DNA, 25 bp, Homo sapien
agcttccgagctagcgccattttgg

SEQ ID NO: 3431899 - DNA, 25 bp, Homo sapien
ttccccgctgctccctttcggcaac

SEQ ID NO: 3431900 - DNA, 25 bp, Homo sapien
tttcggcaacttccggactcgctcg

SEQ ID NO: 3431901 - DNA, 25 bp, Homo sapien
gcttccggacttgcttcggcaactc

SEQ ID NO: 3431902 - DNA, 25 bp, Homo sapien
ggactcgctcggtagcttccggact

SEQ ID NO: 3431903 - DNA, 25 bp, Homo sapien
tatcacacgtttttggatcccgtcc

SEQ ID NO: 3431904 - DNA, 25 bp, Homo sapien
ggagtcttgcgatgatatccgccat

SEQ ID NO: 3431905 - DNA, 25 bp, Homo sapien
gccttcctgtatcacacgtttttgg

SEQ ID NO: 3431906 - DNA, 25 bp, Homo sapien
tcccatcttgaaagtccgggagctc

SEQ ID NO: 3431907 - DNA, 25 bp, Homo sapien
cgccgcagagggggagaagggtagg

SEQ ID NO: 3431908 - DNA, 25 bp, Homo sapien
cacgccgcagagggggagaagggta

SEQ ID NO: 3431909 - DNA, 25 bp, Homo sapien
acgccgcagagggggagaagggtag

SEQ ID NO: 3431910 - DNA, 25 bp, Homo sapien
ttgaaacccagatacccgaggacca

SEQ ID NO: 3431911 - DNA, 25 bp, Homo sapien
tggtctaagtgttttcagaaggccc

SEQ ID NO: 3431912 - DNA, 25 bp, Homo sapien
ggttttccactctaaacagcggcag

SEQ ID NO: 3431913 - DNA, 25 bp, Homo sapien
gaaggcccttccatctacaaaggat

SEQ ID NO: 3431914 - DNA, 25 bp, Homo sapien
atgggcttgccacgagcccggctgt

SEQ ID NO: 3431915 - DNA, 25 bp, Homo sapien
cttgatgtcacagaggaactgggca

SEQ ID NO: 3431916 - DNA, 25 bp, Homo sapien
actgtgcagcgtccggtagtggaac

SEQ ID NO: 3431917 - DNA, 25 bp, Homo sapien
tctcgcatggtgcacacgatggtct

SEQ ID NO: 3431918 - DNA, 25 bp, Homo sapien
ccgtgggctggctggtcaccgggtc

SEQ ID NO: 3431919 - DNA, 25 bp, Homo sapien
tcaccgtgggctggctggtcaccgg

SEQ ID NO: 3431920 - DNA, 25 bp, Homo sapien
gaaggcaagggcgccgggggctctg

SEQ ID NO: 3431921 - DNA, 25 bp, Homo sapien
tgtcaccgtgggctggctggtcacc

SEQ ID NO: 3431922 - DNA, 25 bp, Homo sapien
gagactcttggccaccagcgggtac

SEQ ID NO: 3431923 - DNA, 25 bp, Homo sapien
tgcaacaccgcagcagtgccgctgg

SEQ ID NO: 3431924 - DNA, 25 bp, Homo sapien
tgcccaccgcgatgttgcggagact

SEQ ID NO: 3431925 - DNA, 25 bp, Homo sapien
ggagctgtgttcacgcatctgtgca

SEQ ID NO: 3431926 - DNA, 25 bp, Homo sapien
ttccaagggacttcaaggtgcggca

SEQ ID NO: 3431927 - DNA, 25 bp, Homo sapien
tgctgcatggcaggttccctaaatg

SEQ ID NO: 3431928 - DNA, 25 bp, Homo sapien
tgaacaagacggtgaaaagccctgc

SEQ ID NO: 3431929 - DNA, 25 bp, Homo sapien
taaaggaaatgagctgctgcgagac

SEQ ID NO: 3431930 - DNA, 25 bp, Homo sapien
atgcccctcgcggtacaaccggttg

SEQ ID NO: 3431931 - DNA, 25 bp, Homo sapien
tctcttcgtctgtcatggcccatgg

SEQ ID NO: 3431932 - DNA, 25 bp, Homo sapien
caaccggttgccctcctggtggata

SEQ ID NO: 3431933 - DNA, 25 bp, Homo sapien
gtggataagtggcactgcctttgcc

SEQ ID NO: 3431934 - DNA, 25 bp, Homo sapien
gaggatggaagagcagtggtccagc

SEQ ID NO: 3431935 - DNA, 25 bp, Homo sapien
ggtccagctggatccattcagggga

SEQ ID NO: 3431936 - DNA, 25 bp, Homo sapien
cagcacctcgtagtactcctcgacc

SEQ ID NO: 3431937 - DNA, 25 bp, Homo sapien
gtagtactcctcgaccaccagcttg

SEQ ID NO: 3431938 - DNA, 25 bp, Homo sapien
cactcgcagcccccggcagcccagg

SEQ ID NO: 3431939 - DNA, 25 bp, Homo sapien
ccccggcagcccagggcccggtgct

SEQ ID NO: 3431940 - DNA, 25 bp, Homo sapien
cagcccccggcagcccagggcccgg

SEQ ID NO: 3431941 - DNA, 25 bp, Homo sapien
cggcagcccagggcccggtgctcac

SEQ ID NO: 3431942 - DNA, 25 bp, Homo sapien
cccgcttgaagtaggccttgacgtt

SEQ ID NO: 3431943 - DNA, 25 bp, Homo sapien
attccacacggccgcgtgggccttg

SEQ ID NO: 3431944 - DNA, 25 bp, Homo sapien
tcttcgtccttctgccggatccgtg

SEQ ID NO: 3431945 - DNA, 25 bp, Homo sapien
tcaatgggagaagatcccccggaac

SEQ ID NO: 3431946 - DNA, 25 bp, Homo sapien
tcagagagagataaataaaggcctt

SEQ ID NO: 3431947 - DNA, 25 bp, Homo sapien
taaaggcctttatatacacagaagc

SEQ ID NO: 3431948 - DNA, 25 bp, Homo sapien
tgggcttggcaggtaaggcagggcc

SEQ ID NO: 3431949 - DNA, 25 bp, Homo sapien
acagaagcatgacgcagcacgggca

SEQ ID NO: 3431950 - DNA, 25 bp, Homo sapien
gacttagagacactcaggaaggtca

SEQ ID NO: 3431951 - DNA, 25 bp, Homo sapien
ggtcaccggctctaactggcagcat

SEQ ID NO: 3431952 - DNA, 25 bp, Homo sapien
tctgcacacagagggatggtcccta

SEQ ID NO: 3431953 - DNA, 25 bp, Homo sapien
gtccctagttggagagaccagcggc

SEQ ID NO: 3431954 - DNA, 25 bp, Homo sapien
ggcccagctctacatgatccaggtg

SEQ ID NO: 3431955 - DNA, 25 bp, Homo sapien
tggtgcttcccatccgctaagtgcc

SEQ ID NO: 3431956 - DNA, 25 bp, Homo sapien
ccatgagcctggacgagtaccaggt

SEQ ID NO: 3431957 - DNA, 25 bp, Homo sapien
gaatctcataaagcaagagggcccg

SEQ ID NO: 3431958 - DNA, 25 bp, Homo sapien
gttctagattcaacttgtggggaaa

SEQ ID NO: 3431959 - DNA, 25 bp, Homo sapien
aagttctagattcaacttgtgggga

SEQ ID NO: 3431960 - DNA, 25 bp, Homo sapien
agttctagattcaacttgtggggaa

SEQ ID NO: 3431961 - DNA, 25 bp, Homo sapien
gttgcccacaatgaaggcctgtcat

SEQ ID NO: 3431962 - DNA, 25 bp, Homo sapien
cttgttgcccacaatgaaggcctgt

SEQ ID NO: 3431963 - DNA, 25 bp, Homo sapien
tgttgcccacaatgaaggcctgtca

SEQ ID NO: 3431964 - DNA, 25 bp, Homo sapien
ttgttgcccacaatgaaggcctgtc

SEQ ID NO: 3431965 - DNA, 25 bp, Homo sapien
ctgcagtgaactggcccaccctggg

SEQ ID NO: 3431966 - DNA, 25 bp, Homo sapien
tctctgctgcagtgaactggcccac

SEQ ID NO: 3431967 - DNA, 25 bp, Homo sapien
tttgcccttctaagaaatggaccta

SEQ ID NO: 3431968 - DNA, 25 bp, Homo sapien
tctaagaaatggacctacaatgatc

SEQ ID NO: 3431969 - DNA, 25 bp, Homo sapien
agtccagcaggttgtggtcggtgaa

SEQ ID NO: 3431970 - DNA, 25 bp, Homo sapien
tccagcaggttgtggtcggtgaagg

SEQ ID NO: 3431971 - DNA, 25 bp, Homo sapien
gcaggttgtggtcggtgaaggagac

SEQ ID NO: 3431972 - DNA, 25 bp, Homo sapien
agcagcaagtccagcaggttgtggt

SEQ ID NO: 3431973 - DNA, 25 bp, Homo sapien
ttctaggaagttggcatgaaacagc

SEQ ID NO: 3431974 - DNA, 25 bp, Homo sapien
tggcatgaaacagccttaggttccc

SEQ ID NO: 3431975 - DNA, 25 bp, Homo sapien
tagttctaggaagttggcatgaaac

SEQ ID NO: 3431976 - DNA, 25 bp, Homo sapien
ggaagttggcatgaaacagccttag

SEQ ID NO: 3431977 - DNA, 25 bp, Homo sapien
agggcacccagatagccgggcacca

SEQ ID NO: 3431978 - DNA, 25 bp, Homo sapien
ggcacccagatagccgggcaccagt

SEQ ID NO: 3431979 - DNA, 25 bp, Homo sapien
gaggagggcacccagatagccgggc

SEQ ID NO: 3431980 - DNA, 25 bp, Homo sapien
gagggcacccagatagccgggcacc

SEQ ID NO: 3431981 - DNA, 25 bp, Homo sapien
cagggaggcctcgagcttaggctgg

SEQ ID NO: 3431982 - DNA, 25 bp, Homo sapien
tcgttcccatactcaggggaagcca

SEQ ID NO: 3431983 - DNA, 25 bp, Homo sapien
gctgggcgctgaggcgtgccacgta

SEQ ID NO: 3431984 - DNA, 25 bp, Homo sapien
cttgtagcctccaaagatggggtcg

SEQ ID NO: 3431985 - DNA, 25 bp, Homo sapien
cctcttggcctgaatagaagctccc

SEQ ID NO: 3431986 - DNA, 25 bp, Homo sapien
gcctcttggcctgaatagaagctcc

SEQ ID NO: 3431987 - DNA, 25 bp, Homo sapien
tcttggcctgaatagaagctcccat

SEQ ID NO: 3431988 - DNA, 25 bp, Homo sapien
ctcttggcctgaatagaagctccca

SEQ ID NO: 3431989 - DNA, 25 bp, Homo sapien
ccaggctaagccccaggcatcatcc

SEQ ID NO: 3431990 - DNA, 25 bp, Homo sapien
tccaggctaagccccaggcatcatc

SEQ ID NO: 3431991 - DNA, 25 bp, Homo sapien
gtcctctcccggatatttccaaatg

SEQ ID NO: 3431992 - DNA, 25 bp, Homo sapien
acatgctctgggttcaatcccaaag

SEQ ID NO: 3431993 - DNA, 25 bp, Homo sapien
agggcgctgacatgctctgggttca

SEQ ID NO: 3431994 - DNA, 25 bp, Homo sapien
agttctgctgccaggatctccgccc

SEQ ID NO: 3431995 - DNA, 25 bp, Homo sapien
gggctggcggccagtgtcctgcctg

SEQ ID NO: 3431996 - DNA, 25 bp, Homo sapien
cagggctggcggccagtgtcctgcc

SEQ ID NO: 3431997 - DNA, 25 bp, Homo sapien
gcactgactctccagggctggcggc

SEQ ID NO: 3431998 - DNA, 25 bp, Homo sapien
ggcggccagtgtcctgcctgctttc

SEQ ID NO: 3431999 - DNA, 25 bp, Homo sapien
agcccaggcgcagggatgggtgggc

SEQ ID NO: 3432000 - DNA, 25 bp, Homo sapien
ccaggcgcagggatgggtgggccac

SEQ ID NO: 3432001 - DNA, 25 bp, Homo sapien
tgagcccaggcgcagggatgggtgg

SEQ ID NO: 3432002 - DNA, 25 bp, Homo sapien
cccaggcgcagggatgggtgggcca

SEQ ID NO: 3432003 - DNA, 25 bp, Homo sapien
ggcagaaggtcacggcgaaactaga

SEQ ID NO: 3432004 - DNA, 25 bp, Homo sapien
gagactagggcgtgtttcatccctt

SEQ ID NO: 3432005 - DNA, 25 bp, Homo sapien
caaagaggagggagtgcacgaacag

SEQ ID NO: 3432006 - DNA, 25 bp, Homo sapien
cacgcactgtcagggttcaagagca

SEQ ID NO: 3432007 - DNA, 25 bp, Homo sapien
tggagtccccggagtcgccgcgcag

SEQ ID NO: 3432008 - DNA, 25 bp, Homo sapien
tcgcggcctccgagccttataaggg

SEQ ID NO: 3432009 - DNA, 25 bp, Homo sapien
agtgctgagtcacggcgccggccgc

SEQ ID NO: 3432010 - DNA, 25 bp, Homo sapien
gcgccggccgctcttctggagggtc

SEQ ID NO: 3432011 - DNA, 25 bp, Homo sapien
gactgcggcggcgaaactccagcga

SEQ ID NO: 3432012 - DNA, 25 bp, Homo sapien
gaagactgcggcggcgaaactccag

SEQ ID NO: 3432013 - DNA, 25 bp, Homo sapien
ggtggcgaagactgcggcggcgaaa

SEQ ID NO: 3432014 - DNA, 25 bp, Homo sapien
gcgaagactgcggcggcgaaactcc

SEQ ID NO: 3432015 - DNA, 25 bp, Homo sapien
tgatgctgcgggttggccccatgct

SEQ ID NO: 3432016 - DNA, 25 bp, Homo sapien
cctgaaagccgctaacggcactggg

SEQ ID NO: 3432017 - DNA, 25 bp, Homo sapien
gggaggatgccaaggcgcggtgagc

SEQ ID NO: 3432018 - DNA, 25 bp, Homo sapien
cgtcccgggtctcgaggtgggcgag

SEQ ID NO: 3432019 - DNA, 25 bp, Homo sapien
gaaatagaccacggtgtagggcggc

SEQ ID NO: 3432020 - DNA, 25 bp, Homo sapien
tgggaaatagaccacggtgtagggc

SEQ ID NO: 3432021 - DNA, 25 bp, Homo sapien
ctgggaaatagaccacggtgtaggg

SEQ ID NO: 3432022 - DNA, 25 bp, Homo sapien
aaatagaccacggtgtagggcggca

SEQ ID NO: 3432023 - DNA, 25 bp, Homo sapien
ctccgaagatttcacacaacactgg

SEQ ID NO: 3432024 - DNA, 25 bp, Homo sapien
ggttcggatctctccgggtgggcga

SEQ ID NO: 3432025 - DNA, 25 bp, Homo sapien
gtaaaagccacacgacggagggata

SEQ ID NO: 3432026 - DNA, 25 bp, Homo sapien
cagggaaacaggttcctccgaagat

SEQ ID NO: 3432027 - DNA, 25 bp, Homo sapien
caggaggctttgagtgagccctcct

SEQ ID NO: 3432028 - DNA, 25 bp, Homo sapien
acgtctccacggtcaccacctcctc

SEQ ID NO: 3432029 - DNA, 25 bp, Homo sapien
agctctggccctgatctgccagcag

SEQ ID NO: 3432030 - DNA, 25 bp, Homo sapien
agccctcctgccacgtctccacggt

SEQ ID NO: 3432031 - DNA, 25 bp, Homo sapien
cgatcctagtcacagccccctaagg

SEQ ID NO: 3432032 - DNA, 25 bp, Homo sapien
cccgatcctagtcacagccccctaa

SEQ ID NO: 3432033 - DNA, 25 bp, Homo sapien
gagcttgggcgtcccccgatcctag

SEQ ID NO: 3432034 - DNA, 25 bp, Homo sapien
atcctagtcacagccccctaaggcc

SEQ ID NO: 3432035 - DNA, 25 bp, Homo sapien
ggaacttggggagctgcccgtatag

SEQ ID NO: 3432036 - DNA, 25 bp, Homo sapien
aagggtgcggcccaggtgacgcagg

SEQ ID NO: 3432037 - DNA, 25 bp, Homo sapien
actggtacagggtgaggtctccgtc

SEQ ID NO: 3432038 - DNA, 25 bp, Homo sapien
cgcaggatggtattggactggtaca

SEQ ID NO: 3432039 - DNA, 25 bp, Homo sapien
tcagagctcacctgacacctgggag

SEQ ID NO: 3432040 - DNA, 25 bp, Homo sapien
ggcacccaggcttgaccttgggcaa

SEQ ID NO: 3432041 - DNA, 25 bp, Homo sapien
ccttgggcaaactacgtaacctcag

SEQ ID NO: 3432042 - DNA, 25 bp, Homo sapien
tgcgtggaaggatgagagactgcca

SEQ ID NO: 3432043 - DNA, 25 bp, Homo sapien
tgggcgcctgatcaacacacagtca

SEQ ID NO: 3432044 - DNA, 25 bp, Homo sapien
gactgggcgcctgatcaacacacag

SEQ ID NO: 3432045 - DNA, 25 bp, Homo sapien
agcaggccgcgtgactgggcgcctg

SEQ ID NO: 3432046 - DNA, 25 bp, Homo sapien
ccaaccagggggctgtctgtgagcc

SEQ ID NO: 3432047 - DNA, 25 bp, Homo sapien
ctccacgccgtcattcaccatgtcc

SEQ ID NO: 3432048 - DNA, 25 bp, Homo sapien
ttgcagcggaggtcctccacgccgt

SEQ ID NO: 3432049 - DNA, 25 bp, Homo sapien
gagatgtatttgcagcggaggtcct

SEQ ID NO: 3432050 - DNA, 25 bp, Homo sapien
gtatttgcagcggaggtcctccacg

SEQ ID NO: 3432051 - DNA, 25 bp, Homo sapien
tgcttgctccccacaaccaggctag

SEQ ID NO: 3432052 - DNA, 25 bp, Homo sapien
ccacaaccaggctagtaccaaatcc

SEQ ID NO: 3432053 - DNA, 25 bp, Homo sapien
ttgctccccacaaccaggctagtac

SEQ ID NO: 3432054 - DNA, 25 bp, Homo sapien
tccccacaaccaggctagtaccaaa

SEQ ID NO: 3432055 - DNA, 25 bp, Homo sapien
caaaaggcttcagttgcccgggcag

SEQ ID NO: 3432056 - DNA, 25 bp, Homo sapien
ccttcacatagtcatccttgcccgc

SEQ ID NO: 3432057 - DNA, 25 bp, Homo sapien
agcagggtctcaaaaggcttcagtt

SEQ ID NO: 3432058 - DNA, 25 bp, Homo sapien
tgcccgggcagtgccttcacatagt

SEQ ID NO: 3432059 - DNA, 25 bp, Homo sapien
aatgaaggtcttgcctccctggttc

SEQ ID NO: 3432060 - DNA, 25 bp, Homo sapien
ctggtctcccacaatgaaggtcttg

SEQ ID NO: 3432061 - DNA, 25 bp, Homo sapien
caatgaaggtcttgcctccctggtt

SEQ ID NO: 3432062 - DNA, 25 bp, Homo sapien
tctcccacaatgaaggtcttgcctc

SEQ ID NO: 3432063 - DNA, 25 bp, Homo sapien
ggaacagcatggggccagatgctca

SEQ ID NO: 3432064 - DNA, 25 bp, Homo sapien
gaaggaacagcatggggccagatgc

SEQ ID NO: 3432065 - DNA, 25 bp, Homo sapien
ggaaggaacagcatggggccagatg

SEQ ID NO: 3432066 - DNA, 25 bp, Homo sapien
aaggaacagcatggggccagatgct

SEQ ID NO: 3432067 - DNA, 25 bp, Homo sapien
ctgctttgctaaacaaatggctcac

SEQ ID NO: 3432068 - DNA, 25 bp, Homo sapien
gctctgctttgctaaacaaatggct

SEQ ID NO: 3432069 - DNA, 25 bp, Homo sapien
ggaggaattgggggcagagggccta

SEQ ID NO: 3432070 - DNA, 25 bp, Homo sapien
agcaggctggaggaattgggggcag

SEQ ID NO: 3432071 - DNA, 25 bp, Homo sapien
gtccagcaggttgtagtcagcgaag

SEQ ID NO: 3432072 - DNA, 25 bp, Homo sapien
cagcaggttgtagtcagcgaaggag

SEQ ID NO: 3432073 - DNA, 25 bp, Homo sapien
cagcaagtccagcaggttgtagtca

SEQ ID NO: 3432074 - DNA, 25 bp, Homo sapien
gcaggttgtagtcagcgaaggagat

SEQ ID NO: 3432075 - DNA, 25 bp, Homo sapien
aggttcacgtactcaggggaggcca

SEQ ID NO: 3432076 - DNA, 25 bp, Homo sapien
gcgccccacatatgctgagagcagg

SEQ ID NO: 3432077 - DNA, 25 bp, Homo sapien
actgaggcgccccacatatgctgag

SEQ ID NO: 3432078 - DNA, 25 bp, Homo sapien
cgggcactgaggcgccccacatatg

SEQ ID NO: 3432079 - DNA, 25 bp, Homo sapien
aaactctgcctcccgctcagagtcc

SEQ ID NO: 3432080 - DNA, 25 bp, Homo sapien
gctatgcaaaacgtatcaggccagg

SEQ ID NO: 3432081 - DNA, 25 bp, Homo sapien
ctctctgaagtaggacagatggcct

SEQ ID NO: 3432082 - DNA, 25 bp, Homo sapien
cagtgtgaagaatgcgagctatgca

SEQ ID NO: 3432083 - DNA, 25 bp, Homo sapien
tcctgaatcttacgtgacagtgaac

SEQ ID NO: 3432084 - DNA, 25 bp, Homo sapien
ctaggtggcgcgcaggaaagacgtc

SEQ ID NO: 3432085 - DNA, 25 bp, Homo sapien
aggaaagacgtcacgcgcccgacgc

SEQ ID NO: 3432086 - DNA, 25 bp, Homo sapien
aggaactggcgcgatagagacgcta

SEQ ID NO: 3432087 - DNA, 25 bp, Homo sapien
cagatgggtcacctcacgctgtcac

SEQ ID NO: 3432088 - DNA, 25 bp, Homo sapien
accagccgagcagccgccgtgttgc

SEQ ID NO: 3432089 - DNA, 25 bp, Homo sapien
ccgcgcgggaagcgaccagccgagc

SEQ ID NO: 3432090 - DNA, 25 bp, Homo sapien
cgagcagccgccgtgttgccagcat

SEQ ID NO: 3432091 - DNA, 25 bp, Homo sapien
agccgagcagccgccgtgttgccag

SEQ ID NO: 3432092 - DNA, 25 bp, Homo sapien
accccagggactgctcgtgcacggg

SEQ ID NO: 3432093 - DNA, 25 bp, Homo sapien
gtcagagggtcaagggagtcggccc

SEQ ID NO: 3432094 - DNA, 25 bp, Homo sapien
ccctacttcaaccaggccggagcgg

SEQ ID NO: 3432095 - DNA, 25 bp, Homo sapien
gccagcaagtcagagggtcaaggga

SEQ ID NO: 3432096 - DNA, 25 bp, Homo sapien
ctgcaaaacttccgccaggccgagg

SEQ ID NO: 3432097 - DNA, 25 bp, Homo sapien
ttatattcctacctcggccgaagag

SEQ ID NO: 3432098 - DNA, 25 bp, Homo sapien
gaaatcaggaggtgcgcatccctaa

SEQ ID NO: 3432099 - DNA, 25 bp, Homo sapien
gaaggtctcacagtcaaaagcagca

SEQ ID NO: 3432100 - DNA, 25 bp, Homo sapien
aaagcagcaggtccaatttgagccc

SEQ ID NO: 3432101 - DNA, 25 bp, Homo sapien
gcggccgtacaggttggtgaaaatc

SEQ ID NO: 3432102 - DNA, 25 bp, Homo sapien
tccagtcatggcggccgtacaggtt

SEQ ID NO: 3432103 - DNA, 25 bp, Homo sapien
tgaaaatccggtcttcatccttcag

SEQ ID NO: 3432104 - DNA, 25 bp, Homo sapien
caggttggtgaaaatccggtcttca

SEQ ID NO: 3432105 - DNA, 25 bp, Homo sapien
tggacagaatagggaaggcaatgaa

SEQ ID NO: 3432106 - DNA, 25 bp, Homo sapien
cgggacccaacacactaagggcact

SEQ ID NO: 3432107 - DNA, 25 bp, Homo sapien
tccgggacccaacacactaagggca

SEQ ID NO: 3432108 - DNA, 25 bp, Homo sapien
ctggacagaatagggaaggcaatga

SEQ ID NO: 3432109 - DNA, 25 bp, Homo sapien
ttgtaccagtcacctcgactcaggg

SEQ ID NO: 3432110 - DNA, 25 bp, Homo sapien
gatgtcttgatctcgcccaggatcc

SEQ ID NO: 3432111 - DNA, 25 bp, Homo sapien
tattcatgaagctccacttgaggcc

SEQ ID NO: 3432112 - DNA, 25 bp, Homo sapien
tgccatctgagggcttattcatgaa

SEQ ID NO: 3432113 - DNA, 25 bp, Homo sapien
ggcccacaggtcagacaggctacag

SEQ ID NO: 3432114 - DNA, 25 bp, Homo sapien
gtcagacaggctacagggccatcag

SEQ ID NO: 3432115 - DNA, 25 bp, Homo sapien
acaggtcagacaggctacagggcca

SEQ ID NO: 3432116 - DNA, 25 bp, Homo sapien
agacaggctacagggccatcaggac

SEQ ID NO: 3432117 - DNA, 25 bp, Homo sapien
taagatctcccggtccttgcaggtg

SEQ ID NO: 3432118 - DNA, 25 bp, Homo sapien
ctcggatgtagatataggcagcgcg

SEQ ID NO: 3432119 - DNA, 25 bp, Homo sapien
cagattggaggcctcattgtagaat

SEQ ID NO: 3432120 - DNA, 25 bp, Homo sapien
ccagcagcttgtgaggatcatggcg

SEQ ID NO: 3432121 - DNA, 25 bp, Homo sapien
tcatctgtctacatctctccctacc

SEQ ID NO: 3432122 - DNA, 25 bp, Homo sapien
ttgggatgcatgcaggactggccac

SEQ ID NO: 3432123 - DNA, 25 bp, Homo sapien
tttgggagccaagtcccatttggga

SEQ ID NO: 3432124 - DNA, 25 bp, Homo sapien
ccagttcaaccactgacagaccagg

SEQ ID NO: 3432125 - DNA, 25 bp, Homo sapien
gcctatatccttattgccttaacct

SEQ ID NO: 3432126 - DNA, 25 bp, Homo sapien
ccaagcaatgaacataatgtatttt

SEQ ID NO: 3432127 - DNA, 25 bp, Homo sapien
aaacgaagtagctactatcaggtct

SEQ ID NO: 3432128 - DNA, 25 bp, Homo sapien
aataaaaacgaagtagctactatca

SEQ ID NO: 3432129 - DNA, 25 bp, Homo sapien
tggactcgatgagcgctgtctcctc

SEQ ID NO: 3432130 - DNA, 25 bp, Homo sapien
ggcttgccctgcttgccctcaatgg

SEQ ID NO: 3432131 - DNA, 25 bp, Homo sapien
tagccagagccacaagcattcttgc

SEQ ID NO: 3432132 - DNA, 25 bp, Homo sapien
caaacacgtcaaaatcatagccaga

SEQ ID NO: 3432133 - DNA, 25 bp, Homo sapien
cagagatgcccattgccttgttcac

SEQ ID NO: 3432134 - DNA, 25 bp, Homo sapien
cctgtgtgttgttgccagcctactc

SEQ ID NO: 3432135 - DNA, 25 bp, Homo sapien
gaacaatccaaagggagcctagcca

SEQ ID NO: 3432136 - DNA, 25 bp, Homo sapien
gtctgacccagggttacgccaggcc

SEQ ID NO: 3432137 - DNA, 25 bp, Homo sapien
gccacagttgtggggcagccaaaca

SEQ ID NO: 3432138 - DNA, 25 bp, Homo sapien
tgtctccacgttggccacagttgtg

SEQ ID NO: 3432139 - DNA, 25 bp, Homo sapien
acagttgtggggcagccaaacactc

SEQ ID NO: 3432140 - DNA, 25 bp, Homo sapien
ggccacagttgtggggcagccaaac

SEQ ID NO: 3432141 - DNA, 25 bp, Homo sapien
ggtgcctgagttgcgttctctgcca

SEQ ID NO: 3432142 - DNA, 25 bp, Homo sapien
catggccagagatgttgaatagttt

SEQ ID NO: 3432143 - DNA, 25 bp, Homo sapien
tccacagtgcaagggtggttgacat

SEQ ID NO: 3432144 - DNA, 25 bp, Homo sapien
caatcagttctttcaagggcacaga

SEQ ID NO: 3432145 - DNA, 25 bp, Homo sapien
ccacctggctggccccaggccttac

SEQ ID NO: 3432146 - DNA, 25 bp, Homo sapien
caccacctggctggccccaggcctt

SEQ ID NO: 3432147 - DNA, 25 bp, Homo sapien
tgcgcacccccccaccacctggctg

SEQ ID NO: 3432148 - DNA, 25 bp, Homo sapien
cccaccacctggctggccccaggcc

SEQ ID NO: 3432149 - DNA, 25 bp, Homo sapien
acctgcctagtcctgagcccaggcc

SEQ ID NO: 3432150 - DNA, 25 bp, Homo sapien
cagcccctagacccagccccgtctc

SEQ ID NO: 3432151 - DNA, 25 bp, Homo sapien
cacacctgcctagtcctgagcccag

SEQ ID NO: 3432152 - DNA, 25 bp, Homo sapien
cccctagacccagccccgtctcctg

SEQ ID NO: 3432153 - DNA, 25 bp, Homo sapien
aagtcggtccccaaagggatgcatg

SEQ ID NO: 3432154 - DNA, 25 bp, Homo sapien
tcggtccccaaagggatgcatggtc

SEQ ID NO: 3432155 - DNA, 25 bp, Homo sapien
ccaagtcggtccccaaagggatgca

SEQ ID NO: 3432156 - DNA, 25 bp, Homo sapien
ggtccccaaagggatgcatggtcag

SEQ ID NO: 3432157 - DNA, 25 bp, Homo sapien
ggatcacagcaaggaggttgtccca

SEQ ID NO: 3432158 - DNA, 25 bp, Homo sapien
gaggttgtcccagccgcccgtgaca

SEQ ID NO: 3432159 - DNA, 25 bp, Homo sapien
tagacgagccgccagggatcacagc

SEQ ID NO: 3432160 - DNA, 25 bp, Homo sapien
accagcgcatcgaagtccatcagca

SEQ ID NO: 3432161 - DNA, 25 bp, Homo sapien
gtccatgacgatcaccgcagctgtg

SEQ ID NO: 3432162 - DNA, 25 bp, Homo sapien
tgacgatcaccgcagctgtgcccag

SEQ ID NO: 3432163 - DNA, 25 bp, Homo sapien
cgagcggtccatgacgatcaccgca

SEQ ID NO: 3432164 - DNA, 25 bp, Homo sapien
cggtccatgacgatcaccgcagctg

SEQ ID NO: 3432165 - DNA, 25 bp, Homo sapien
gctgcaggaactgagacctgagtgc

SEQ ID NO: 3432166 - DNA, 25 bp, Homo sapien
cctgagtgctggcaagagggttttc

SEQ ID NO: 3432167 - DNA, 25 bp, Homo sapien
tccggggtattctcctcagagcagc

SEQ ID NO: 3432168 - DNA, 25 bp, Homo sapien
aattagcaggcacccacggccagac

SEQ ID NO: 3432169 - DNA, 25 bp, Homo sapien
gcgggcgatggctttcacgatgtcc

SEQ ID NO: 3432170 - DNA, 25 bp, Homo sapien
tggccacagctctcgtgcttataga

SEQ ID NO: 3432171 - DNA, 25 bp, Homo sapien
tatagaactcaatgaggcgggcgat

SEQ ID NO: 3432172 - DNA, 25 bp, Homo sapien
gggcgatggctttcacgatgtccgt

SEQ ID NO: 3432173 - DNA, 25 bp, Homo sapien
cacgtggtggggaggaggttaaatg

SEQ ID NO: 3432174 - DNA, 25 bp, Homo sapien
aaatgaagccacagcaagcaagccc

SEQ ID NO: 3432175 - DNA, 25 bp, Homo sapien
ctgcaggccacgtggtggggaggag

SEQ ID NO: 3432176 - DNA, 25 bp, Homo sapien
gaggaggttaaatgaagccacagca

SEQ ID NO: 3432177 - DNA, 25 bp, Homo sapien
agccacaagagagggcctgatgatc

SEQ ID NO: 3432178 - DNA, 25 bp, Homo sapien
aagagagggcctgatgatctcccca

SEQ ID NO: 3432179 - DNA, 25 bp, Homo sapien
cagccacaagagagggcctgatgat

SEQ ID NO: 3432180 - DNA, 25 bp, Homo sapien
cacaagagagggcctgatgatctcc

SEQ ID NO: 3432181 - DNA, 25 bp, Homo sapien
agggagtcgatctcggccggccggg

SEQ ID NO: 3432182 - DNA, 25 bp, Homo sapien
acccagagcacaaatcgtatggcct

SEQ ID NO: 3432183 - DNA, 25 bp, Homo sapien
cgtgccatcaccttgttcatccagt

SEQ ID NO: 3432184 - DNA, 25 bp, Homo sapien
gtatggccttctatctgcttgctga

SEQ ID NO: 3432185 - DNA, 25 bp, Homo sapien
cgagctccggccgaaagtggcggat

SEQ ID NO: 3432186 - DNA, 25 bp, Homo sapien
gctgctgggcaaaccgctgcatccg

SEQ ID NO: 3432187 - DNA, 25 bp, Homo sapien
ccggccgaaagtggcggatcagacc

SEQ ID NO: 3432188 - DNA, 25 bp, Homo sapien
gctgcatccgctcctcgagctccgg

SEQ ID NO: 3432189 - DNA, 25 bp, Homo sapien
gtccagcattccacatggatagacg

SEQ ID NO: 3432190 - DNA, 25 bp, Homo sapien
agcactcgctttattgtccagcatt

SEQ ID NO: 3432191 - DNA, 25 bp, Homo sapien
gctttattgtccagcattccacatg

SEQ ID NO: 3432192 - DNA, 25 bp, Homo sapien
ccacatggatagacgcaggacagca

SEQ ID NO: 3432193 - DNA, 25 bp, Homo sapien
cgcctggagttgttcattgcgcgcc

SEQ ID NO: 3432194 - DNA, 25 bp, Homo sapien
tgcttggcgataggcaatggtctca

SEQ ID NO: 3432195 - DNA, 25 bp, Homo sapien
gagttgttcattgcgcgcctggagt

SEQ ID NO: 3432196 - DNA, 25 bp, Homo sapien
ttggcaataggcgaaagtcccttca

SEQ ID NO: 3432197 - DNA, 25 bp, Homo sapien
caaagctgggccttcgacatagaca

SEQ ID NO: 3432198 - DNA, 25 bp, Homo sapien
tctgatgctaagacggccactgctg

SEQ ID NO: 3432199 - DNA, 25 bp, Homo sapien
tagggcctgaccaaacagatgaggg

SEQ ID NO: 3432200 - DNA, 25 bp, Homo sapien
tagttccgctaactgggcactggtc

SEQ ID NO: 3432201 - DNA, 25 bp, Homo sapien
tgtgctttgcgctgtgctggcctca

SEQ ID NO: 3432202 - DNA, 25 bp, Homo sapien
cacatggccggttgtgtgtccggaa

SEQ ID NO: 3432203 - DNA, 25 bp, Homo sapien
taagacatcaactaggtagaccagg

SEQ ID NO: 3432204 - DNA, 25 bp, Homo sapien
ccccaaggaggttgtctgtagtgca

SEQ ID NO: 3432205 - DNA, 25 bp, Homo sapien
tgaggtgtttgcactgccgctggcc

SEQ ID NO: 3432206 - DNA, 25 bp, Homo sapien
cagggctatacccacttctgccggg

SEQ ID NO: 3432207 - DNA, 25 bp, Homo sapien
tcatcactgagtttgccctgcagct

SEQ ID NO: 3432208 - DNA, 25 bp, Homo sapien
ctgcatggaccacaccgggtctggg

SEQ ID NO: 3432209 - DNA, 25 bp, Homo sapien
caccgtggtgccagtgcttgctggt

SEQ ID NO: 3432210 - DNA, 25 bp, Homo sapien
agagcctcaggcccaactcggagga

SEQ ID NO: 3432211 - DNA, 25 bp, Homo sapien
gagcctcaggcccaactcggaggag

SEQ ID NO: 3432212 - DNA, 25 bp, Homo sapien
ggccaccgtggtgccagtgcttgct

SEQ ID NO: 3432213 - DNA, 25 bp, Homo sapien
tttagtttcccaggcggcaagtgcg

SEQ ID NO: 3432214 - DNA, 25 bp, Homo sapien
cgacccggctgaccaagatgtggtg

SEQ ID NO: 3432215 - DNA, 25 bp, Homo sapien
gcctgctgcggcctgtgtatgatcc

SEQ ID NO: 3432216 - DNA, 25 bp, Homo sapien
tccgtggccccaagagtccaaggac

SEQ ID NO: 3432217 - DNA, 25 bp, Homo sapien
ccaccataggccgaatttgggtatc

SEQ ID NO: 3432218 - DNA, 25 bp, Homo sapien
cattgctcagggaggtaaactggcc

SEQ ID NO: 3432219 - DNA, 25 bp, Homo sapien
ccctgccggcgactacggagaggtt

SEQ ID NO: 3432220 - DNA, 25 bp, Homo sapien
tgtttcccgcttagagggcggacgc

SEQ ID NO: 3432221 - DNA, 25 bp, Homo sapien
gggtcccggcgctgctgtacacgct

SEQ ID NO: 3432222 - DNA, 25 bp, Homo sapien
tgctgtacacgctgcggtccagccg

SEQ ID NO: 3432223 - DNA, 25 bp, Homo sapien
aggcacaagggcgacgtcaggtaca

SEQ ID NO: 3432224 - DNA, 25 bp, Homo sapien
tcgtgccgctctgctcagtgcgtgg

SEQ ID NO: 3432225 - DNA, 25 bp, Homo sapien
tgcagatgcccagccgtcctcaaga

SEQ ID NO: 3432226 - DNA, 25 bp, Homo sapien
gggctctgcaacgtcagaaccttcc

SEQ ID NO: 3432227 - DNA, 25 bp, Homo sapien
acagccttggacagcacagcccgag

SEQ ID NO: 3432228 - DNA, 25 bp, Homo sapien
tgggcccatcgatcaggaatggctg

SEQ ID NO: 3432229 - DNA, 25 bp, Homo sapien
tatggaaagcacgtcctcaagactg

SEQ ID NO: 3432230 - DNA, 25 bp, Homo sapien
ggatttatcacaagacacgcctgca

SEQ ID NO: 3432231 - DNA, 25 bp, Homo sapien
gagctgcagatgcttacctaccacg

SEQ ID NO: 3432232 - DNA, 25 bp, Homo sapien
tgcatgtagaccagacacagggcgt

SEQ ID NO: 3432233 - DNA, 25 bp, Homo sapien
ttgtttccggtgtcattgttccgtg

SEQ ID NO: 3432234 - DNA, 25 bp, Homo sapien
gtttgtaatgatattgtttccggtg

SEQ ID NO: 3432235 - DNA, 25 bp, Homo sapien
ccggtgtcattgttccgtgtgtaga

SEQ ID NO: 3432236 - DNA, 25 bp, Homo sapien
ttccgtgtgtagactgtgagctcca

SEQ ID NO: 3432237 - DNA, 25 bp, Homo sapien
gccacagttgctcatcttgacctgt

SEQ ID NO: 3432238 - DNA, 25 bp, Homo sapien
cacactgagagtggaaatagagcca

SEQ ID NO: 3432239 - DNA, 25 bp, Homo sapien
cagctgggcacactgagagtggaaa

SEQ ID NO: 3432240 - DNA, 25 bp, Homo sapien
gagtggaaatagagccacagttgct

SEQ ID NO: 3432241 - DNA, 25 bp, Homo sapien
gacacacacgttgtgccgctgctgt

SEQ ID NO: 3432242 - DNA, 25 bp, Homo sapien
caggcatggattccgtgaaggaaca

SEQ ID NO: 3432243 - DNA, 25 bp, Homo sapien
tgtataacacagattcaggcatgga

SEQ ID NO: 3432244 - DNA, 25 bp, Homo sapien
gttgcagcatccagttcatcttaag

SEQ ID NO: 3432245 - DNA, 25 bp, Homo sapien
gcatgactcatagttaccccggaca

SEQ ID NO: 3432246 - DNA, 25 bp, Homo sapien
tgtcagggagccgaacaagggtttc

SEQ ID NO: 3432247 - DNA, 25 bp, Homo sapien
tatggtctcgggctgtccaagtcgg

SEQ ID NO: 3432248 - DNA, 25 bp, Homo sapien
gagggtcccctccacgacattgtta

SEQ ID NO: 3432249 - DNA, 25 bp, Homo sapien
aacaaagcggaatgtttgaatctat

SEQ ID NO: 3432250 - DNA, 25 bp, Homo sapien
ggaatgtttgaatctatgttgatac

SEQ ID NO: 3432251 - DNA, 25 bp, Homo sapien
caaagcggaatgtttgaatctatgt

SEQ ID NO: 3432252 - DNA, 25 bp, Homo sapien
agcggaatgtttgaatctatgttga

SEQ ID NO: 3432253 - DNA, 25 bp, Homo sapien
atgtacttcatcctttccaacctgc

SEQ ID NO: 3432254 - DNA, 25 bp, Homo sapien
atcctttccaacctgcccttgcctg

SEQ ID NO: 3432255 - DNA, 25 bp, Homo sapien
ttcatcctttccaacctgcccttgc

SEQ ID NO: 3432256 - DNA, 25 bp, Homo sapien
gtacttcatcctttccaacctgccc

SEQ ID NO: 3432257 - DNA, 25 bp, Homo sapien
tcgctgtctgggtggccactctaga

SEQ ID NO: 3432258 - DNA, 25 bp, Homo sapien
ccgcagaggtgcatgcggacatcag

SEQ ID NO: 3432259 - DNA, 25 bp, Homo sapien
gccctagtagaacgggcacctctgg

SEQ ID NO: 3432260 - DNA, 25 bp, Homo sapien
tggtatgtctgtatcgctgtctggg

SEQ ID NO: 3432261 - DNA, 25 bp, Homo sapien
tctgctgatgtctgtcggtgtgctc

SEQ ID NO: 3432262 - DNA, 25 bp, Homo sapien
gacccagacattgaaacagtagcca

SEQ ID NO: 3432263 - DNA, 25 bp, Homo sapien
ctcactaaggtccaagggcacaagc

SEQ ID NO: 3432264 - DNA, 25 bp, Homo sapien
tgggccatcccagaccaaggtttct

SEQ ID NO: 3432265 - DNA, 25 bp, Homo sapien
tcaggatagctgggttctgggccat

SEQ ID NO: 3432266 - DNA, 25 bp, Homo sapien
actcttggtgccaatgtccgttttg

SEQ ID NO: 3432267 - DNA, 25 bp, Homo sapien
cttggtgccaatgtccgttttgcca

SEQ ID NO: 3432268 - DNA, 25 bp, Homo sapien
tgccaatgtccgttttgccactcat

SEQ ID NO: 3432269 - DNA, 25 bp, Homo sapien
tggtgccaatgtccgttttgccact

SEQ ID NO: 3432270 - DNA, 25 bp, Homo sapien
tacttcaaggcgcactagtgcctgt

SEQ ID NO: 3432271 - DNA, 25 bp, Homo sapien
cactagtgcctgtcagcttgaaggc

SEQ ID NO: 3432272 - DNA, 25 bp, Homo sapien
tcaaggcgcactagtgcctgtcagc

SEQ ID NO: 3432273 - DNA, 25 bp, Homo sapien
gcttcctacttcaaggcgcactagt

SEQ ID NO: 3432274 - DNA, 25 bp, Homo sapien
aacggagagtgcgtgccgcccagct

SEQ ID NO: 3432275 - DNA, 25 bp, Homo sapien
cggagagtgcgtgccgcccagcttc

SEQ ID NO: 3432276 - DNA, 25 bp, Homo sapien
gaaagatgccggcttgtcatagatg

SEQ ID NO: 3432277 - DNA, 25 bp, Homo sapien
cctgaacggagagtgcgtgccgccc

SEQ ID NO: 3432278 - DNA, 25 bp, Homo sapien
agggctggctgctcgcggagaagca

SEQ ID NO: 3432279 - DNA, 25 bp, Homo sapien
ctgctcgcggagaagcatcaccagc

SEQ ID NO: 3432280 - DNA, 25 bp, Homo sapien
tggctgctcgcggagaagcatcacc

SEQ ID NO: 3432281 - DNA, 25 bp, Homo sapien
ctggctgctcgcggagaagcatcac

SEQ ID NO: 3432282 - DNA, 25 bp, Homo sapien
tgccagcaggatggagaagtcttca

SEQ ID NO: 3432283 - DNA, 25 bp, Homo sapien
tttctaaagctgccagcaggatgga

SEQ ID NO: 3432284 - DNA, 25 bp, Homo sapien
ttctaaagctgccagcaggatggag

SEQ ID NO: 3432285 - DNA, 25 bp, Homo sapien
agcaggatggagaagtcttcatcct

SEQ ID NO: 3432286 - DNA, 25 bp, Homo sapien
agaaggaaggttgtgtccatcaaca

SEQ ID NO: 3432287 - DNA, 25 bp, Homo sapien
aaggaaggttgtgtccatcaacagt

SEQ ID NO: 3432288 - DNA, 25 bp, Homo sapien
ggaaggttgtgtccatcaacagtca

SEQ ID NO: 3432289 - DNA, 25 bp, Homo sapien
gttgtgtccatcaacagtcagttgc

SEQ ID NO: 3432290 - DNA, 25 bp, Homo sapien
cagccagctggcctcgggctgcaaa

SEQ ID NO: 3432291 - DNA, 25 bp, Homo sapien
cacagccctgctcttgcagccagct

SEQ ID NO: 3432292 - DNA, 25 bp, Homo sapien
gccagctggcctcgggctgcaaaca

SEQ ID NO: 3432293 - DNA, 25 bp, Homo sapien
tgacgcacagccctgctcttgcagc

SEQ ID NO: 3432294 - DNA, 25 bp, Homo sapien
ttcacagagaagagcagatactgcc

SEQ ID NO: 3432295 - DNA, 25 bp, Homo sapien
tcacagagaagagcagatactgcca

SEQ ID NO: 3432296 - DNA, 25 bp, Homo sapien
cttcacagagaagagcagatactgc

SEQ ID NO: 3432297 - DNA, 25 bp, Homo sapien
cacagagaagagcagatactgccat

SEQ ID NO: 3432298 - DNA, 25 bp, Homo sapien
gatggggcggctgtaatactccgtc

SEQ ID NO: 3432299 - DNA, 25 bp, Homo sapien
gtaatactccgtcagaggcccttgg

SEQ ID NO: 3432300 - DNA, 25 bp, Homo sapien
ctcggcctccagccaagggttgcag

SEQ ID NO: 3432301 - DNA, 25 bp, Homo sapien
cggcctccagccaagggttgcagac

SEQ ID NO: 3432302 - DNA, 25 bp, Homo sapien
gaagttcacagcacacgcaggcaaa

SEQ ID NO: 3432303 - DNA, 25 bp, Homo sapien
tcacagcacacgcaggcaaacagca

SEQ ID NO: 3432304 - DNA, 25 bp, Homo sapien
agttcacagcacacgcaggcaaaca

SEQ ID NO: 3432305 - DNA, 25 bp, Homo sapien
cacttgaagttcacagcacacgcag

SEQ ID NO: 3432306 - DNA, 25 bp, Homo sapien
cagagagaaccaagggagcctgaga

SEQ ID NO: 3432307 - DNA, 25 bp, Homo sapien
ctgcagagagaaccaagggagcctg

SEQ ID NO: 3432308 - DNA, 25 bp, Homo sapien
agagaaccaagggagcctgagagct

SEQ ID NO: 3432309 - DNA, 25 bp, Homo sapien
agaaccaagggagcctgagagctgc

SEQ ID NO: 3432310 - DNA, 25 bp, Homo sapien
aagaccaggccattttcttcatgtt

SEQ ID NO: 3432311 - DNA, 25 bp, Homo sapien
tctgagtcctcaaagaccaggccat

SEQ ID NO: 3432312 - DNA, 25 bp, Homo sapien
cctcaaagaccaggccattttcttc

SEQ ID NO: 3432313 - DNA, 25 bp, Homo sapien
caaagaccaggccattttcttcatg

SEQ ID NO: 3432314 - DNA, 25 bp, Homo sapien
atcccatcggagctgctgcgattcc

SEQ ID NO: 3432315 - DNA, 25 bp, Homo sapien
catcggagctgctgcgattcccgca

SEQ ID NO: 3432316 - DNA, 25 bp, Homo sapien
ctcatcccatcggagctgctgcgat

SEQ ID NO: 3432317 - DNA, 25 bp, Homo sapien
tgcgattcccgcaggttcttccaga

SEQ ID NO: 3432318 - DNA, 25 bp, Homo sapien
ttatgtgtccataaccaaatggagc

SEQ ID NO: 3432319 - DNA, 25 bp, Homo sapien
tgtccataaccaaatggagcacact

SEQ ID NO: 3432320 - DNA, 25 bp, Homo sapien
ccataaccaaatggagcacactctg

SEQ ID NO: 3432321 - DNA, 25 bp, Homo sapien
taaccaaatggagcacactctgcac

SEQ ID NO: 3432322 - DNA, 25 bp, Homo sapien
agggcctctccatgctcttgctgtg

SEQ ID NO: 3432323 - DNA, 25 bp, Homo sapien
gcctctccatgctcttgctgtggtg

SEQ ID NO: 3432324 - DNA, 25 bp, Homo sapien
gctgtggtggccgttcactggcagg

SEQ ID NO: 3432325 - DNA, 25 bp, Homo sapien
tgtggtggccgttcactggcaggag

SEQ ID NO: 3432326 - DNA, 25 bp, Homo sapien
aaagttgaccatttcatgcaccttc

SEQ ID NO: 3432327 - DNA, 25 bp, Homo sapien
agttgaccatttcatgcaccttcag

SEQ ID NO: 3432328 - DNA, 25 bp, Homo sapien
gttgaccatttcatgcaccttcaga

SEQ ID NO: 3432329 - DNA, 25 bp, Homo sapien
aagttgaccatttcatgcaccttca

SEQ ID NO: 3432330 - DNA, 25 bp, Homo sapien
gagctatccgtcctcacttcaaaca

SEQ ID NO: 3432331 - DNA, 25 bp, Homo sapien
tccgattggtacacggagctatccg

SEQ ID NO: 3432332 - DNA, 25 bp, Homo sapien
acacttctggttgttctgggttcag

SEQ ID NO: 3432333 - DNA, 25 bp, Homo sapien
agaagcctcatttctatagcaggaa

SEQ ID NO: 3432334 - DNA, 25 bp, Homo sapien
cagctcactgccacttcctcctctt

SEQ ID NO: 3432335 - DNA, 25 bp, Homo sapien
caagcaactctcttgcctcagcctc

SEQ ID NO: 3432336 - DNA, 25 bp, Homo sapien
ctcactgccacttcctcctcttggg

SEQ ID NO: 3432337 - DNA, 25 bp, Homo sapien
cactgccacttcctcctcttgggtt

SEQ ID NO: 3432338 - DNA, 25 bp, Homo sapien
tggagctctgggacccacaagcctg

SEQ ID NO: 3432339 - DNA, 25 bp, Homo sapien
ctggagctctgggacccacaagcct

SEQ ID NO: 3432340 - DNA, 25 bp, Homo sapien
tctggagctctgggacccacaagcc

SEQ ID NO: 3432341 - DNA, 25 bp, Homo sapien
caggtcgcagcgcaactttcagtca

SEQ ID NO: 3432342 - DNA, 25 bp, Homo sapien
agattaagccgctctccagtgcaca

SEQ ID NO: 3432343 - DNA, 25 bp, Homo sapien
tagtactagtagacaccttctccag

SEQ ID NO: 3432344 - DNA, 25 bp, Homo sapien
cacggctttgcccatagtaactaga

SEQ ID NO: 3432345 - DNA, 25 bp, Homo sapien
aggcacaagtccctccaggtgacga

SEQ ID NO: 3432346 - DNA, 25 bp, Homo sapien
agaggcacaagtccctccaggtgac

SEQ ID NO: 3432347 - DNA, 25 bp, Homo sapien
aggtgacgagcgctcagcacccttc

SEQ ID NO: 3432348 - DNA, 25 bp, Homo sapien
cagcacccttcttagtttgtgtccc

SEQ ID NO: 3432349 - DNA, 25 bp, Homo sapien
cctcataaggcttaaggcagcatca

SEQ ID NO: 3432350 - DNA, 25 bp, Homo sapien
cataaggcttaaggcagcatcaggc

SEQ ID NO: 3432351 - DNA, 25 bp, Homo sapien
tcataaggcttaaggcagcatcagg

SEQ ID NO: 3432352 - DNA, 25 bp, Homo sapien
acctcataaggcttaaggcagcatc

SEQ ID NO: 3432353 - DNA, 25 bp, Homo sapien
tgaagagaatactccagagcagagg

SEQ ID NO: 3432354 - DNA, 25 bp, Homo sapien
gactgtatggcccacgaattcgaaa

SEQ ID NO: 3432355 - DNA, 25 bp, Homo sapien
tcaagtacaacattcggaggcccca

SEQ ID NO: 3432356 - DNA, 25 bp, Homo sapien
cgactaccgtgtgggtgtccataaa

SEQ ID NO: 3432357 - DNA, 25 bp, Homo sapien
atttctcattattcatgcctggcag

SEQ ID NO: 3432358 - DNA, 25 bp, Homo sapien
ttctgcatggctaattccatcaaag

SEQ ID NO: 3432359 - DNA, 25 bp, Homo sapien
cctctaagagcacagttgtagcctt

SEQ ID NO: 3432360 - DNA, 25 bp, Homo sapien
tatctgttctgcatggctaattcca

SEQ ID NO: 3432361 - DNA, 25 bp, Homo sapien
gacagtacatatcagtaagtctgtg

SEQ ID NO: 3432362 - DNA, 25 bp, Homo sapien
taagaactattgatggaacctgccc

SEQ ID NO: 3432363 - DNA, 25 bp, Homo sapien
aaataagtaaatccatgtaagaact

SEQ ID NO: 3432364 - DNA, 25 bp, Homo sapien
taaatccatgtaagaactattgatg

SEQ ID NO: 3432365 - DNA, 25 bp, Homo sapien
atgcttaattgcacatgtttgacta

SEQ ID NO: 3432366 - DNA, 25 bp, Homo sapien
tgcttaattgcacatgtttgactaa

SEQ ID NO: 3432367 - DNA, 25 bp, Homo sapien
catgcttaattgcacatgtttgact

SEQ ID NO: 3432368 - DNA, 25 bp, Homo sapien
acatgcttaattgcacatgtttgac

SEQ ID NO: 3432369 - DNA, 25 bp, Homo sapien
tatatgtgcagccgaagcaagcact

SEQ ID NO: 3432370 - DNA, 25 bp, Homo sapien
cacctgtgggctgcgctcatctgtg

SEQ ID NO: 3432371 - DNA, 25 bp, Homo sapien
ctgtgggctgcgctcatctgtgatc

SEQ ID NO: 3432372 - DNA, 25 bp, Homo sapien
acctgtgggctgcgctcatctgtga

SEQ ID NO: 3432373 - DNA, 25 bp, Homo sapien
gtgggctgcgctcatctgtgatcat

SEQ ID NO: 3432374 - DNA, 25 bp, Homo sapien
tgcttgacatgcctattgaaagctt

SEQ ID NO: 3432375 - DNA, 25 bp, Homo sapien
cacatgcttgacatgcctattgaaa

SEQ ID NO: 3432376 - DNA, 25 bp, Homo sapien
catgcttgacatgcctattgaaagc

SEQ ID NO: 3432377 - DNA, 25 bp, Homo sapien
tcacatgcttgacatgcctattgaa

SEQ ID NO: 3432378 - DNA, 25 bp, Homo sapien
tctttcttacacagtctggcacttc

SEQ ID NO: 3432379 - DNA, 25 bp, Homo sapien
tatatgtccgtgcagaaacttgtac

SEQ ID NO: 3432380 - DNA, 25 bp, Homo sapien
ctcacagggtgaagaaaggctttct

SEQ ID NO: 3432381 - DNA, 25 bp, Homo sapien
gcaaagggcataaagagaacgtata

SEQ ID NO: 3432382 - DNA, 25 bp, Homo sapien
atgagccttaagttgagggtgaccc

SEQ ID NO: 3432383 - DNA, 25 bp, Homo sapien
gagccttaagttgagggtgacccag

SEQ ID NO: 3432384 - DNA, 25 bp, Homo sapien
tgagccttaagttgagggtgaccca

SEQ ID NO: 3432385 - DNA, 25 bp, Homo sapien
gagatggcaggaggtctcatcattg

SEQ ID NO: 3432386 - DNA, 25 bp, Homo sapien
gcccatcattgacatcatgggaggg

SEQ ID NO: 3432387 - DNA, 25 bp, Homo sapien
gcacccaggcatcatgggcacgtgg

SEQ ID NO: 3432388 - DNA, 25 bp, Homo sapien
tcattgacatcatgggagggccccc

SEQ ID NO: 3432389 - DNA, 25 bp, Homo sapien
gagtagaacatccttttaatgcacg

SEQ ID NO: 3432390 - DNA, 25 bp, Homo sapien
gcacgatattgcgtgcggcggcccc

SEQ ID NO: 3432391 - DNA, 25 bp, Homo sapien
catccttttaatgcacgatattgcg

SEQ ID NO: 3432392 - DNA, 25 bp, Homo sapien
attttcctccagagtagaacatcct

SEQ ID NO: 3432393 - DNA, 25 bp, Homo sapien
gtgtttggttctttgttatgctgtc

SEQ ID NO: 3432394 - DNA, 25 bp, Homo sapien
tttggcttggtagtattatgctgag

SEQ ID NO: 3432395 - DNA, 25 bp, Homo sapien
ttttcattcatcattagatttggct

SEQ ID NO: 3432396 - DNA, 25 bp, Homo sapien
catcattagatttggcttggtagta

SEQ ID NO: 3432397 - DNA, 25 bp, Homo sapien
tgccttttcttatgttgaagtgttc

SEQ ID NO: 3432398 - DNA, 25 bp, Homo sapien
ctggacgtgcgcgtaagccagattg

SEQ ID NO: 3432399 - DNA, 25 bp, Homo sapien
acgtgcgcgtaagccagattgatgt

SEQ ID NO: 3432400 - DNA, 25 bp, Homo sapien
tatgactggacgtgcgcgtaagcca

SEQ ID NO: 3432401 - DNA, 25 bp, Homo sapien
ggacgtgcgcgtaagccagattgat

SEQ ID NO: 3432402 - DNA, 25 bp, Homo sapien
aactatatcattggctgtcctgggt

SEQ ID NO: 3432403 - DNA, 25 bp, Homo sapien
ttggagggtagttgaggccatatct

SEQ ID NO: 3432404 - DNA, 25 bp, Homo sapien
aacaccaggagtatgtgaaaagaaa

SEQ ID NO: 3432405 - DNA, 25 bp, Homo sapien
tgtggactcgagttggaactatatc

SEQ ID NO: 3432406 - DNA, 25 bp, Homo sapien
acctctcataattagccttttgtca

SEQ ID NO: 3432407 - DNA, 25 bp, Homo sapien
cctctcataattagccttttgtcat

SEQ ID NO: 3432408 - DNA, 25 bp, Homo sapien
cacctctcataattagccttttgtc

SEQ ID NO: 3432409 - DNA, 25 bp, Homo sapien
ctctcataattagccttttgtcatg

SEQ ID NO: 3432410 - DNA, 25 bp, Homo sapien
gtgtttcccctggagtggtcgattg

SEQ ID NO: 3432411 - DNA, 25 bp, Homo sapien
tccagatagttactgtgtcgttcat

SEQ ID NO: 3432412 - DNA, 25 bp, Homo sapien
catgtgtttcccctggagtggtcga

SEQ ID NO: 3432413 - DNA, 25 bp, Homo sapien
ctggtccagatagttactgtgtcgt

SEQ ID NO: 3432414 - DNA, 25 bp, Homo sapien
caaagctcattgtttaaccaccacc

SEQ ID NO: 3432415 - DNA, 25 bp, Homo sapien
catgggttctgagtccaacgattaa

SEQ ID NO: 3432416 - DNA, 25 bp, Homo sapien
caccaacatgggttctgagtccaac

SEQ ID NO: 3432417 - DNA, 25 bp, Homo sapien
ttaaccaccaccaacatgggttctg

SEQ ID NO: 3432418 - DNA, 25 bp, Homo sapien
actagtgattgtcctctatatgaac

SEQ ID NO: 3432419 - DNA, 25 bp, Homo sapien
gttcatatagaggacaatcactagt

SEQ ID NO: 3432420 - DNA, 25 bp, Homo sapien
ccagatgagagggtccatgtggtct

SEQ ID NO: 3432421 - DNA, 25 bp, Homo sapien
ggactcttgcaattgggccagatga

SEQ ID NO: 3432422 - DNA, 25 bp, Homo sapien
ttgtcctgatggaggggtaagcccc

SEQ ID NO: 3432423 - DNA, 25 bp, Homo sapien
caaggtaggcaggccaggatttcga

SEQ ID NO: 3432424 - DNA, 25 bp, Homo sapien
ctgaggatcagagccccggggcagg

SEQ ID NO: 3432425 - DNA, 25 bp, Homo sapien
atcagagccccggggcaggagccag

SEQ ID NO: 3432426 - DNA, 25 bp, Homo sapien
cagctgaggatcagagccccggggc

SEQ ID NO: 3432427 - DNA, 25 bp, Homo sapien
gatcagagccccggggcaggagcca

SEQ ID NO: 3432428 - DNA, 25 bp, Homo sapien
cgtctgcgcactgggggctgcttgc

SEQ ID NO: 3432429 - DNA, 25 bp, Homo sapien
tcacgtctgcgcactgggggctgct

SEQ ID NO: 3432430 - DNA, 25 bp, Homo sapien
tccttcaagtatctgagcagctcct

SEQ ID NO: 3432431 - DNA, 25 bp, Homo sapien
cttcaagtatctgagcagctcctgt

SEQ ID NO: 3432432 - DNA, 25 bp, Homo sapien
gtcacgtctcatgcgggctgtctga

SEQ ID NO: 3432433 - DNA, 25 bp, Homo sapien
gaggacccagaactgcagcctatcc

SEQ ID NO: 3432434 - DNA, 25 bp, Homo sapien
ctgtctgacgcagatgtctttcttg

SEQ ID NO: 3432435 - DNA, 25 bp, Homo sapien
agagtcacgtctcatgcgggctgtc

SEQ ID NO: 3432436 - DNA, 25 bp, Homo sapien
ccgccgagagccacgattttttaca

SEQ ID NO: 3432437 - DNA, 25 bp, Homo sapien
gcgtgtgagcgcactttgcacctcc

SEQ ID NO: 3432438 - DNA, 25 bp, Homo sapien
gccggcctcagtttaccacgtctga

SEQ ID NO: 3432439 - DNA, 25 bp, Homo sapien
gcgctgtcttcaaaggcccctgtct

SEQ ID NO: 3432440 - DNA, 25 bp, Homo sapien
cctcaagtctcagtggaaagcagca

SEQ ID NO: 3432441 - DNA, 25 bp, Homo sapien
tcagctctgggtgagccctttgcca

SEQ ID NO: 3432442 - DNA, 25 bp, Homo sapien
tcccagacattattgaccatgcttt

SEQ ID NO: 3432443 - DNA, 25 bp, Homo sapien
ctggagccctcgcacaggaatgggc

SEQ ID NO: 3432444 - DNA, 25 bp, Homo sapien
gaggctctgccaagctgcccttcct

SEQ ID NO: 3432445 - DNA, 25 bp, Homo sapien
cttcctcctggctgtcccgctctgc

SEQ ID NO: 3432446 - DNA, 25 bp, Homo sapien
tggctgtcccgctctgcctggtggc

SEQ ID NO: 3432447 - DNA, 25 bp, Homo sapien
cctcctggctgtcccgctctgcctg

SEQ ID NO: 3432448 - DNA, 25 bp, Homo sapien
tctcccacagggcaaccagccctgg

SEQ ID NO: 3432449 - DNA, 25 bp, Homo sapien
cccacagggcaaccagccctggcat

SEQ ID NO: 3432450 - DNA, 25 bp, Homo sapien
agggccacaggacacatctctccca

SEQ ID NO: 3432451 - DNA, 25 bp, Homo sapien
gccacaggacacatctctcccacag

SEQ ID NO: 3432452 - DNA, 25 bp, Homo sapien
acctggaggcggctgcaggactggg

SEQ ID NO: 3432453 - DNA, 25 bp, Homo sapien
ctgcaggactgggtgtgggcttggg

SEQ ID NO: 3432454 - DNA, 25 bp, Homo sapien
agctgctccaccacagcccccgagg

SEQ ID NO: 3432455 - DNA, 25 bp, Homo sapien
tgccatggacctggaggcggctgca

SEQ ID NO: 3432456 - DNA, 25 bp, Homo sapien
atgggcaccacccagccgccccagg

SEQ ID NO: 3432457 - DNA, 25 bp, Homo sapien
tgcccctccttcatgggcaccaccc

SEQ ID NO: 3432458 - DNA, 25 bp, Homo sapien
atggggtggcatgaactgggtggcc

SEQ ID NO: 3432459 - DNA, 25 bp, Homo sapien
ccagggtctgggcacccctgacctg

SEQ ID NO: 3432460 - DNA, 25 bp, Homo sapien
gccagtgcgtcgtgcagaagctgct

SEQ ID NO: 3432461 - DNA, 25 bp, Homo sapien
ccccgcgtggaaggcctcccgcagt

SEQ ID NO: 3432462 - DNA, 25 bp, Homo sapien
cgcagtcgccgcagcgtgtccccaa

SEQ ID NO: 3432463 - DNA, 25 bp, Homo sapien
cgtgcgccccgcgtggaaggcctcc

SEQ ID NO: 3432464 - DNA, 25 bp, Homo sapien
ccagcgaagcccagagaaggagatg

SEQ ID NO: 3432465 - DNA, 25 bp, Homo sapien
tgaggagacccgaatcaatagggac

SEQ ID NO: 3432466 - DNA, 25 bp, Homo sapien
ggtcaagtctcatgaaggccggcag

SEQ ID NO: 3432467 - DNA, 25 bp, Homo sapien
caaagggttaactgagagggtgcac

SEQ ID NO: 3432468 - DNA, 25 bp, Homo sapien
gacggctccattaggacgtggctgt

SEQ ID NO: 3432469 - DNA, 25 bp, Homo sapien
tgagaacgctgacggctccattagg

SEQ ID NO: 3432470 - DNA, 25 bp, Homo sapien
atgtgaaagtgagaacgctgacggc

SEQ ID NO: 3432471 - DNA, 25 bp, Homo sapien
aacgctgacggctccattaggacgt

SEQ ID NO: 3432472 - DNA, 25 bp, Homo sapien
cctggctgatggcaacctcagacac

SEQ ID NO: 3432473 - DNA, 25 bp, Homo sapien
ggttcttgggcacacgctcgtcctt

SEQ ID NO: 3432474 - DNA, 25 bp, Homo sapien
tcttgggcacacgctcgtccttcat

SEQ ID NO: 3432475 - DNA, 25 bp, Homo sapien
gttcttgggcacacgctcgtccttc

SEQ ID NO: 3432476 - DNA, 25 bp, Homo sapien
cggatagttccagggcgcaatgatg

SEQ ID NO: 3432477 - DNA, 25 bp, Homo sapien
caggttcagcggatagttccagggc

SEQ ID NO: 3432478 - DNA, 25 bp, Homo sapien
accagcgtcaggttcagcggatagt

SEQ ID NO: 3432479 - DNA, 25 bp, Homo sapien
gatgaaggcggagtccagctgcgtg

SEQ ID NO: 3432480 - DNA, 25 bp, Homo sapien
caggatcttctcgacgttcttgcta

SEQ ID NO: 3432481 - DNA, 25 bp, Homo sapien
ttctcgacgttcttgctaatctccg

SEQ ID NO: 3432482 - DNA, 25 bp, Homo sapien
tcttgctaatctccgatggcttcag

SEQ ID NO: 3432483 - DNA, 25 bp, Homo sapien
acctcggccaggatcttctcgacgt

SEQ ID NO: 3432484 - DNA, 25 bp, Homo sapien
tgtgctctagcagctgccccgtctc

SEQ ID NO: 3432485 - DNA, 25 bp, Homo sapien
ctgtgctctagcagctgccccgtct

SEQ ID NO: 3432486 - DNA, 25 bp, Homo sapien
cgcccagcaccacagcaaagcagct

SEQ ID NO: 3432487 - DNA, 25 bp, Homo sapien
cgtctcctggggcccgcccagcacc

SEQ ID NO: 3432488 - DNA, 25 bp, Homo sapien
gattaaagccggcaggagccactgt

SEQ ID NO: 3432489 - DNA, 25 bp, Homo sapien
aaggaaaccagagtggccgttcagt

SEQ ID NO: 3432490 - DNA, 25 bp, Homo sapien
ggaaggaaaccagagtggccgttca

SEQ ID NO: 3432491 - DNA, 25 bp, Homo sapien
ggaaaccagagtggccgttcagtga

SEQ ID NO: 3432492 - DNA, 25 bp, Homo sapien
ctgggcatggaaggaaaccagagtg

SEQ ID NO: 3432493 - DNA, 25 bp, Homo sapien
gaaccaggccacgcggttggccacg

SEQ ID NO: 3432494 - DNA, 25 bp, Homo sapien
cacggtctgggggtcgcagttgtcg

SEQ ID NO: 3432495 - DNA, 25 bp, Homo sapien
caggccacgcggttggccacggtct

SEQ ID NO: 3432496 - DNA, 25 bp, Homo sapien
ggtcgcagttgtcgtccacgtagca

SEQ ID NO: 3432497 - DNA, 25 bp, Homo sapien
agcaatgcccgcagccgctggaact

SEQ ID NO: 3432498 - DNA, 25 bp, Homo sapien
gtttctggttgatgatgcggcccag

SEQ ID NO: 3432499 - DNA, 25 bp, Homo sapien
cgcagccgctggaactgtttctggt

SEQ ID NO: 3432500 - DNA, 25 bp, Homo sapien
tctggttgatgatgcggcccaggtt

SEQ ID NO: 3432501 - DNA, 25 bp, Homo sapien
cgatgtagcgatcgctctcatcgct

SEQ ID NO: 3432502 - DNA, 25 bp, Homo sapien
cccttggagttcatgaggcaacagc

SEQ ID NO: 3432503 - DNA, 25 bp, Homo sapien
tgttggcgccgcagtgtcccatgag

SEQ ID NO: 3432504 - DNA, 25 bp, Homo sapien
tgggatcttagaacccttggagttc

SEQ ID NO: 3432505 - DNA, 25 bp, Homo sapien
aacagcgtcccagaatgttggcgcc

SEQ ID NO: 3432506 - DNA, 25 bp, Homo sapien
tgcaggcaccagagacagctcagcc

SEQ ID NO: 3432507 - DNA, 25 bp, Homo sapien
ctgcaggcaccagagacagctcagc

SEQ ID NO: 3432508 - DNA, 25 bp, Homo sapien
tgcacatccaccagcaccgtggggg

SEQ ID NO: 3432509 - DNA, 25 bp, Homo sapien
ctgcacatccaccagcaccgtgggg

SEQ ID NO: 3432510 - DNA, 25 bp, Homo sapien
gctctgcacgttcacgatgggcagg

SEQ ID NO: 3432511 - DNA, 25 bp, Homo sapien
ctgttggagaaggcgtacagggcca

SEQ ID NO: 3432512 - DNA, 25 bp, Homo sapien
ctctgcacgttcacgatgggcagga

SEQ ID NO: 3432513 - DNA, 25 bp, Homo sapien
tctgcacgttcacgatgggcaggat

SEQ ID NO: 3432514 - DNA, 25 bp, Homo sapien
gggtaggcttagagacttgcttcca

SEQ ID NO: 3432515 - DNA, 25 bp, Homo sapien
ggaaaccctggcagataccgtcctg

SEQ ID NO: 3432516 - DNA, 25 bp, Homo sapien
tcctgacccggtagtgaaggttcca

SEQ ID NO: 3432517 - DNA, 25 bp, Homo sapien
aaggttccactcactagccacgtgt

SEQ ID NO: 3432518 - DNA, 25 bp, Homo sapien
tggccagggtcatgtgcatgaagcc

SEQ ID NO: 3432519 - DNA, 25 bp, Homo sapien
aagcccccgctgctggtctgggtca

SEQ ID NO: 3432520 - DNA, 25 bp, Homo sapien
catgtgcatgaagccgtcgttccca

SEQ ID NO: 3432521 - DNA, 25 bp, Homo sapien
ggtcatgtgcatgaagccgtcgttc

SEQ ID NO: 3432522 - DNA, 25 bp, Homo sapien
tggagtaaaggacaccggcggcatt

SEQ ID NO: 3432523 - DNA, 25 bp, Homo sapien
gtaaaggacaccggcggcattgctg

SEQ ID NO: 3432524 - DNA, 25 bp, Homo sapien
agtaaaggacaccggcggcattgct

SEQ ID NO: 3432525 - DNA, 25 bp, Homo sapien
gagtaaaggacaccggcggcattgc

SEQ ID NO: 3432526 - DNA, 25 bp, Homo sapien
gccatcgttcactgtggtgctgagt

SEQ ID NO: 3432527 - DNA, 25 bp, Homo sapien
ctggccctgccatcgttcactgtgg

SEQ ID NO: 3432528 - DNA, 25 bp, Homo sapien
ttcactgtggtgctgagtgtggaca

SEQ ID NO: 3432529 - DNA, 25 bp, Homo sapien
gtgtggacaggtggcgggactgcct

SEQ ID NO: 3432530 - DNA, 25 bp, Homo sapien
tagcggagggcgttgagcttctcca

SEQ ID NO: 3432531 - DNA, 25 bp, Homo sapien
gttgagcttctccatccccgggctg

SEQ ID NO: 3432532 - DNA, 25 bp, Homo sapien
tgcgcaggaggcaggcgcgatggtg

SEQ ID NO: 3432533 - DNA, 25 bp, Homo sapien
cggcgcggcgattgcggcgggtagc

SEQ ID NO: 3432534 - DNA, 25 bp, Homo sapien
ggaagggctcagagcagtgtgcagc

SEQ ID NO: 3432535 - DNA, 25 bp, Homo sapien
gggctcagagcagtgtgcagctgca

SEQ ID NO: 3432536 - DNA, 25 bp, Homo sapien
ggggaagggctcagagcagtgtgca

SEQ ID NO: 3432537 - DNA, 25 bp, Homo sapien
aagggctcagagcagtgtgcagctg

SEQ ID NO: 3432538 - DNA, 25 bp, Homo sapien
cagccgcaggcgacagctgtcatgg

SEQ ID NO: 3432539 - DNA, 25 bp, Homo sapien
tccaccagccgcaggcgacagctgt

SEQ ID NO: 3432540 - DNA, 25 bp, Homo sapien
accagccgcaggcgacagctgtcat

SEQ ID NO: 3432541 - DNA, 25 bp, Homo sapien
agccgcaggcgacagctgtcatggt

SEQ ID NO: 3432542 - DNA, 25 bp, Homo sapien
aggcaggcgctgctttgaggggtgc

SEQ ID NO: 3432543 - DNA, 25 bp, Homo sapien
aatgtaggtttctcaagcatccggc

SEQ ID NO: 3432544 - DNA, 25 bp, Homo sapien
tcacccagccaggaggtatcaatgg

SEQ ID NO: 3432545 - DNA, 25 bp, Homo sapien
catccggcttgttaggaaattgggc

SEQ ID NO: 3432546 - DNA, 25 bp, Homo sapien
tatgactcgtagtgggcaccatgag

SEQ ID NO: 3432547 - DNA, 25 bp, Homo sapien
gaggctacactgtaggacgctgcca

SEQ ID NO: 3432548 - DNA, 25 bp, Homo sapien
actgtaggacgctgccattgggcca

SEQ ID NO: 3432549 - DNA, 25 bp, Homo sapien
tgccaagcaggccagtcaatcggga

SEQ ID NO: 3432550 - DNA, 25 bp, Homo sapien
ttgaagcgccgccgctacttgcctt

SEQ ID NO: 3432551 - DNA, 25 bp, Homo sapien
gacacggaggccgcggatcctgagt

SEQ ID NO: 3432552 - DNA, 25 bp, Homo sapien
gatcctgagtgagccgaggggaagc

SEQ ID NO: 3432553 - DNA, 25 bp, Homo sapien
gactttcacggccaaaacgtgaaca

SEQ ID NO: 3432554 - DNA, 25 bp, Homo sapien
gggaagcccaggcgcagagctggcg

SEQ ID NO: 3432555 - DNA, 25 bp, Homo sapien
ccagtgatctccgaccctaactagg

SEQ ID NO: 3432556 - DNA, 25 bp, Homo sapien
cgaccctaactaggccggtggcgca

SEQ ID NO: 3432557 - DNA, 25 bp, Homo sapien
ggcgcatgcgccctgagagccggct

SEQ ID NO: 3432558 - DNA, 25 bp, Homo sapien
atctccgaccctaactaggccggtg

SEQ ID NO: 3432559 - DNA, 25 bp, Homo sapien
gggagcccgtacatgccaagggcac

SEQ ID NO: 3432560 - DNA, 25 bp, Homo sapien
acttagccggcgctcataagagctc

SEQ ID NO: 3432561 - DNA, 25 bp, Homo sapien
agagctcatcccacgacctgtgaac

SEQ ID NO: 3432562 - DNA, 25 bp, Homo sapien
gcccactcctttggatcactgactg

SEQ ID NO: 3432563 - DNA, 25 bp, Homo sapien
gaacagtcctcggtaccacattcct

SEQ ID NO: 3432564 - DNA, 25 bp, Homo sapien
aagtcacacgataaggaggtgggcc

SEQ ID NO: 3432565 - DNA, 25 bp, Homo sapien
taaaaaagtgacttgtcggaagtca

SEQ ID NO: 3432566 - DNA, 25 bp, Homo sapien
cagcctgccgcgtgaccttgggcag

SEQ ID NO: 3432567 - DNA, 25 bp, Homo sapien
tactcgcaccccattgctgtcagag

SEQ ID NO: 3432568 - DNA, 25 bp, Homo sapien
catgtgtcactttgccctctactcg

SEQ ID NO: 3432569 - DNA, 25 bp, Homo sapien
tctgagactggcaccgcaaggatcc

SEQ ID NO: 3432570 - DNA, 25 bp, Homo sapien
gggtgtgcccaagaaccatcctctt

SEQ ID NO: 3432571 - DNA, 25 bp, Homo sapien
cagcataggcgtggtcaggcagcgc

SEQ ID NO: 3432572 - DNA, 25 bp, Homo sapien
gcataggcgtggtcaggcagcgcat

SEQ ID NO: 3432573 - DNA, 25 bp, Homo sapien
cccgcagcagcataggcgtggtcag

SEQ ID NO: 3432574 - DNA, 25 bp, Homo sapien
gggcccgcagcagcataggcgtggt

SEQ ID NO: 3432575 - DNA, 25 bp, Homo sapien
cccagcaaaggcttctttggtccta

SEQ ID NO: 3432576 - DNA, 25 bp, Homo sapien
ccagcaaaggcttctttggtcctac

SEQ ID NO: 3432577 - DNA, 25 bp, Homo sapien
ccccagcaaaggcttctttggtcct

SEQ ID NO: 3432578 - DNA, 25 bp, Homo sapien
tcataccaggagactggactcccct

SEQ ID NO: 3432579 - DNA, 25 bp, Homo sapien
tgcaaaaagaagggcgtgacgtcat

SEQ ID NO: 3432580 - DNA, 25 bp, Homo sapien
aagggcgtgacgtcataccaggaga

SEQ ID NO: 3432581 - DNA, 25 bp, Homo sapien
cgtgacgtcataccaggagactgga

SEQ ID NO: 3432582 - DNA, 25 bp, Homo sapien
tgtggaggctccggccaccaggagg

SEQ ID NO: 3432583 - DNA, 25 bp, Homo sapien
ctgtggaggctccggccaccaggag

SEQ ID NO: 3432584 - DNA, 25 bp, Homo sapien
tggaggctccggccaccaggaggtc

SEQ ID NO: 3432585 - DNA, 25 bp, Homo sapien
gtggaggctccggccaccaggaggt

SEQ ID NO: 3432586 - DNA, 25 bp, Homo sapien
ctcagagaagaacgcccctgacaaa

SEQ ID NO: 3432587 - DNA, 25 bp, Homo sapien
ctcggcaatgatggaccctgcccct

SEQ ID NO: 3432588 - DNA, 25 bp, Homo sapien
aagaacgcccctgacaaagccagga

SEQ ID NO: 3432589 - DNA, 25 bp, Homo sapien
ggctcagagaagaacgcccctgaca

SEQ ID NO: 3432590 - DNA, 25 bp, Homo sapien
tggcaataggcacaggtacccatgg

SEQ ID NO: 3432591 - DNA, 25 bp, Homo sapien
ggactggcaataggcacaggtaccc

SEQ ID NO: 3432592 - DNA, 25 bp, Homo sapien
aataggcacaggtacccatggctca

SEQ ID NO: 3432593 - DNA, 25 bp, Homo sapien
tcaccagggactggcaataggcaca

SEQ ID NO: 3432594 - DNA, 25 bp, Homo sapien
tgcttgggtggccattggagcccag

SEQ ID NO: 3432595 - DNA, 25 bp, Homo sapien
gtggccattggagcccagacgcact

SEQ ID NO: 3432596 - DNA, 25 bp, Homo sapien
cttgggtggccattggagcccagac

SEQ ID NO: 3432597 - DNA, 25 bp, Homo sapien
cctgtgcttgggtggccattggagc

SEQ ID NO: 3432598 - DNA, 25 bp, Homo sapien
aggtgcaactgctgggctacaaagg

SEQ ID NO: 3432599 - DNA, 25 bp, Homo sapien
tcagcaaggaccctggaggccgcct

SEQ ID NO: 3432600 - DNA, 25 bp, Homo sapien
caggtgcaactgctgggctacaaag

SEQ ID NO: 3432601 - DNA, 25 bp, Homo sapien
cagcctcagcaaggaccctggaggc

SEQ ID NO: 3432602 - DNA, 25 bp, Homo sapien
gctgcccggtcagtcactgacttca

SEQ ID NO: 3432603 - DNA, 25 bp, Homo sapien
ggctgcccggtcagtcactgacttc

SEQ ID NO: 3432604 - DNA, 25 bp, Homo sapien
tcccccatgcatccgtgcccacccg

SEQ ID NO: 3432605 - DNA, 25 bp, Homo sapien
ccccatgcatccgtgcccacccggc

SEQ ID NO: 3432606 - DNA, 25 bp, Homo sapien
cctcccccatgcatccgtgcccacc

SEQ ID NO: 3432607 - DNA, 25 bp, Homo sapien
cccatgcatccgtgcccacccggca

SEQ ID NO: 3432608 - DNA, 25 bp, Homo sapien
gcttgcaggcaatgcaacgctcctc

SEQ ID NO: 3432609 - DNA, 25 bp, Homo sapien
tgggtaccggcgcagcgcatgctcc

SEQ ID NO: 3432610 - DNA, 25 bp, Homo sapien
gctccccacggaagcgagggctcag

SEQ ID NO: 3432611 - DNA, 25 bp, Homo sapien
tcagcgggcccttctcgaacgggta

SEQ ID NO: 3432612 - DNA, 25 bp, Homo sapien
agtcatattgttcccgtgctggcag

SEQ ID NO: 3432613 - DNA, 25 bp, Homo sapien
taactctcagttcctgggtagcccg

SEQ ID NO: 3432614 - DNA, 25 bp, Homo sapien
aaacggtggctacatccagggaggc

SEQ ID NO: 3432615 - DNA, 25 bp, Homo sapien
agtttaccccgatggtctggagccg

SEQ ID NO: 3432616 - DNA, 25 bp, Homo sapien
gggcaaccctgcataaagcaagctc

SEQ ID NO: 3432617 - DNA, 25 bp, Homo sapien
tctgggtcagcactttttaggaata

SEQ ID NO: 3432618 - DNA, 25 bp, Homo sapien
agtgctgagttacagtcccgcctcg

SEQ ID NO: 3432619 - DNA, 25 bp, Homo sapien
tgcttgcttcttatctctgggtcag

SEQ ID NO: 3432620 - DNA, 25 bp, Homo sapien
caccgctttgttcagtgtagcaccc

SEQ ID NO: 3432621 - DNA, 25 bp, Homo sapien
tgttcagtgtagcacccgctgccct

SEQ ID NO: 3432622 - DNA, 25 bp, Homo sapien
ctttgttcagtgtagcacccgctgc

SEQ ID NO: 3432623 - DNA, 25 bp, Homo sapien
cacgagggggctgttcaccgctttg

SEQ ID NO: 3432624 - DNA, 25 bp, Homo sapien
gactacaagtgtgcatcaccacgcc

SEQ ID NO: 3432625 - DNA, 25 bp, Homo sapien
actacaagtgtgcatcaccacgccc

SEQ ID NO: 3432626 - DNA, 25 bp, Homo sapien
tctcttgaccttgtgatccgcttac

SEQ ID NO: 3432627 - DNA, 25 bp, Homo sapien
ggcctcctggactccggctaagagg

SEQ ID NO: 3432628 - DNA, 25 bp, Homo sapien
accagacactgccacgctgccctgt

SEQ ID NO: 3432629 - DNA, 25 bp, Homo sapien
ggcccctgtcactgctcatccccac

SEQ ID NO: 3432630 - DNA, 25 bp, Homo sapien
gcacctctggtgctcgcgcctgtct

SEQ ID NO: 3432631 - DNA, 25 bp, Homo sapien
aagccgcagtagatgcacttggtca

SEQ ID NO: 3432632 - DNA, 25 bp, Homo sapien
ttggctcagcctcgatggtgatggc

SEQ ID NO: 3432633 - DNA, 25 bp, Homo sapien
gtggtccggcggctgccatcagctc

SEQ ID NO: 3432634 - DNA, 25 bp, Homo sapien
atgtcgatgtcatagcgggtggtcc

SEQ ID NO: 3432635 - DNA, 25 bp, Homo sapien
gttaggccctgctgaggagcctcag

SEQ ID NO: 3432636 - DNA, 25 bp, Homo sapien
ggtggttaggccctgctgaggagcc

SEQ ID NO: 3432637 - DNA, 25 bp, Homo sapien
taggccctgctgaggagcctcaggc

SEQ ID NO: 3432638 - DNA, 25 bp, Homo sapien
cagggacggtggttaggccctgctg

SEQ ID NO: 3432639 - DNA, 25 bp, Homo sapien
gttgttgagcaacttctccttgttg

SEQ ID NO: 3432640 - DNA, 25 bp, Homo sapien
gatgttggcggcgatctcggcctcc

SEQ ID NO: 3432641 - DNA, 25 bp, Homo sapien
cgatacaagtagtcagcctggatgt

SEQ ID NO: 3432642 - DNA, 25 bp, Homo sapien
ctccgtggagaactcaaagttgggg

SEQ ID NO: 3432643 - DNA, 25 bp, Homo sapien
ggtcggagtggttttattgggcagc

SEQ ID NO: 3432644 - DNA, 25 bp, Homo sapien
ccatgggcgtcatcaggtcctagtg

SEQ ID NO: 3432645 - DNA, 25 bp, Homo sapien
tcaggtcctagtgcctggaagctgg

SEQ ID NO: 3432646 - DNA, 25 bp, Homo sapien
aggtcagcaccatgggcgtcatcag

SEQ ID NO: 3432647 - DNA, 25 bp, Homo sapien
gctgggactcacgaccgtccagctg

SEQ ID NO: 3432648 - DNA, 25 bp, Homo sapien
ccttcctgctcttgaccaccctgga

SEQ ID NO: 3432649 - DNA, 25 bp, Homo sapien
actcccgccagcccgggactaggcg

SEQ ID NO: 3432650 - DNA, 25 bp, Homo sapien
taggcgccgctcactcctttccggg

SEQ ID NO: 3432651 - DNA, 25 bp, Homo sapien
gggactcagaactgcactcccgcca

SEQ ID NO: 3432652 - DNA, 25 bp, Homo sapien
ctccgcgcacgccgggcgggactca

SEQ ID NO: 3432653 - DNA, 25 bp, Homo sapien
ccactatgccgagggctcgagggcc

SEQ ID NO: 3432654 - DNA, 25 bp, Homo sapien
ctcgagggccgggctccttccagca

SEQ ID NO: 3432655 - DNA, 25 bp, Homo sapien
cccacagccactatgccgagggctc

SEQ ID NO: 3432656 - DNA, 25 bp, Homo sapien
cctggctcagggccatcagggctcc

SEQ ID NO: 3432657 - DNA, 25 bp, Homo sapien
tgctggccaaataaggaggtgtggg

SEQ ID NO: 3432658 - DNA, 25 bp, Homo sapien
tgtgctggccaaataaggaggtgtg

SEQ ID NO: 3432659 - DNA, 25 bp, Homo sapien
ccaaataaggaggtgtggggaatca

SEQ ID NO: 3432660 - DNA, 25 bp, Homo sapien
ggggaatcagctctggggatctggg

SEQ ID NO: 3432661 - DNA, 25 bp, Homo sapien
tctcgggctgccgtcaccctagaca

SEQ ID NO: 3432662 - DNA, 25 bp, Homo sapien
agcgtctcccagtgacaccggctcc

SEQ ID NO: 3432663 - DNA, 25 bp, Homo sapien
cgcccctacctccagcgtctcccag

SEQ ID NO: 3432664 - DNA, 25 bp, Homo sapien
gtcaccctagacaggaccccactgg

SEQ ID NO: 3432665 - DNA, 25 bp, Homo sapien
tcgcccagccgactcacgcaggtgt

SEQ ID NO: 3432666 - DNA, 25 bp, Homo sapien
acgcaggtgtaggcagccgctgtgg

SEQ ID NO: 3432667 - DNA, 25 bp, Homo sapien
ccagccgactcacgcaggtgtaggc

SEQ ID NO: 3432668 - DNA, 25 bp, Homo sapien
tcctcgctccggaacatggagccca

SEQ ID NO: 3432669 - DNA, 25 bp, Homo sapien
tctggaaggcgctcaccgaggcgtt

SEQ ID NO: 3432670 - DNA, 25 bp, Homo sapien
ctcacagcgccgaacatcaaccaca

SEQ ID NO: 3432671 - DNA, 25 bp, Homo sapien
acagcgccgaacatcaaccacaaag

SEQ ID NO: 3432672 - DNA, 25 bp, Homo sapien
gccgaacatcaaccacaaagcgtct

SEQ ID NO: 3432673 - DNA, 25 bp, Homo sapien
cctggcgtagcacggcggcgtggag

SEQ ID NO: 3432674 - DNA, 25 bp, Homo sapien
gcagggcctgctggttgccccgcac

SEQ ID NO: 3432675 - DNA, 25 bp, Homo sapien
ctgaggttcatggccctggcgtagc

SEQ ID NO: 3432676 - DNA, 25 bp, Homo sapien
agggcctgctggttgccccgcacat

SEQ ID NO: 3432677 - DNA, 25 bp, Homo sapien
gccccatctgtgtgggcggctgcca

SEQ ID NO: 3432678 - DNA, 25 bp, Homo sapien
gaggccccatctgtgtgggcggctg

SEQ ID NO: 3432679 - DNA, 25 bp, Homo sapien
ggagcaggggcgtcctctctgaggc

SEQ ID NO: 3432680 - DNA, 25 bp, Homo sapien
ctcaggtcctggtgcggccccccgg

SEQ ID NO: 3432681 - DNA, 25 bp, Homo sapien
ctagggctagggcttgggactgtgg

SEQ ID NO: 3432682 - DNA, 25 bp, Homo sapien
cagaagaggagaaccccctagggct

SEQ ID NO: 3432683 - DNA, 25 bp, Homo sapien
tggacaaggagtcggagctcagcct

SEQ ID NO: 3432684 - DNA, 25 bp, Homo sapien
gactgtgggaagttccgggcctgaa

SEQ ID NO: 3432685 - DNA, 25 bp, Homo sapien
aatcgggcaattgggcacactggcc

SEQ ID NO: 3432686 - DNA, 25 bp, Homo sapien
accctgcccagcacgggcaatcggg

SEQ ID NO: 3432687 - DNA, 25 bp, Homo sapien
cgggcaatcgggcaattgggcacac

SEQ ID NO: 3432688 - DNA, 25 bp, Homo sapien
ccagcacgggcaatcgggcaattgg

SEQ ID NO: 3432689 - DNA, 25 bp, Homo sapien
tcacggggtgctccagcggctgctc

SEQ ID NO: 3432690 - DNA, 25 bp, Homo sapien
cctgaagctggcaatgaggaagccg

SEQ ID NO: 3432691 - DNA, 25 bp, Homo sapien
ggccttgtggggctccacggcacct

SEQ ID NO: 3432692 - DNA, 25 bp, Homo sapien
ccagagcaggcgctctagggcaggg

SEQ ID NO: 3432693 - DNA, 25 bp, Homo sapien
aggctcagctgactctggggtcccg

SEQ ID NO: 3432694 - DNA, 25 bp, Homo sapien
gctcagctgactctggggtcccgct

SEQ ID NO: 3432695 - DNA, 25 bp, Homo sapien
gagcaggctcagctgactctggggt

SEQ ID NO: 3432696 - DNA, 25 bp, Homo sapien
ctgcagagcaggctcagctgactct

SEQ ID NO: 3432697 - DNA, 25 bp, Homo sapien
cttgcggatcttctgtccgatctgc

SEQ ID NO: 3432698 - DNA, 25 bp, Homo sapien
tgcggatcttctgtccgatctgctc

SEQ ID NO: 3432699 - DNA, 25 bp, Homo sapien
cggatcttctgtccgatctgctcac

SEQ ID NO: 3432700 - DNA, 25 bp, Homo sapien
cttctgtccgatctgctcaccccag

SEQ ID NO: 3432701 - DNA, 25 bp, Homo sapien
ctggagggaggatgcgctgcgtgag

SEQ ID NO: 3432702 - DNA, 25 bp, Homo sapien
tggagggaggatgcgctgcgtgagg

SEQ ID NO: 3432703 - DNA, 25 bp, Homo sapien
aggatgcgctgcgtgaggggccaga

SEQ ID NO: 3432704 - DNA, 25 bp, Homo sapien
atgcgctgcgtgaggggccagaagg

SEQ ID NO: 3432705 - DNA, 25 bp, Homo sapien
ctgcagaaacgggaagacgtggcag

SEQ ID NO: 3432706 - DNA, 25 bp, Homo sapien
tgcagaaacgggaagacgtggcagt

SEQ ID NO: 3432707 - DNA, 25 bp, Homo sapien
caatgaggcacttgtgcgtggtgct

SEQ ID NO: 3432708 - DNA, 25 bp, Homo sapien
tggtgctcacgctgcactggttcag

SEQ ID NO: 3432709 - DNA, 25 bp, Homo sapien
agagcaccaggcctcggcaatgagg

SEQ ID NO: 3432710 - DNA, 25 bp, Homo sapien
actggttcagggccaggtacacggc

SEQ ID NO: 3432711 - DNA, 25 bp, Homo sapien
ggcggagagggggcgaggcctcagg

SEQ ID NO: 3432712 - DNA, 25 bp, Homo sapien
gagagggggcgaggcctcaggctgc

SEQ ID NO: 3432713 - DNA, 25 bp, Homo sapien
gggggcgaggcctcaggctgctcac

SEQ ID NO: 3432714 - DNA, 25 bp, Homo sapien
cggagagggggcgaggcctcaggct

SEQ ID NO: 3432715 - DNA, 25 bp, Homo sapien
aggtgcagggagccagaggctggaa

SEQ ID NO: 3432716 - DNA, 25 bp, Homo sapien
gcccctaggcaaagcccaggtgcag

SEQ ID NO: 3432717 - DNA, 25 bp, Homo sapien
tgcagggagccagaggctggaagtg

SEQ ID NO: 3432718 - DNA, 25 bp, Homo sapien
agcccctaggcaaagcccaggtgca

SEQ ID NO: 3432719 - DNA, 25 bp, Homo sapien
caagcacctgctgtgcgcggcgggt

SEQ ID NO: 3432720 - DNA, 25 bp, Homo sapien
cacatggattggcaattgcttggga

SEQ ID NO: 3432721 - DNA, 25 bp, Homo sapien
gtgggggcccaaagacaccacatgg

SEQ ID NO: 3432722 - DNA, 25 bp, Homo sapien
cttgggaaaggcaagcatgctgcct

SEQ ID NO: 3432723 - DNA, 25 bp, Homo sapien
gagacagaccagaacggtggcgggg

SEQ ID NO: 3432724 - DNA, 25 bp, Homo sapien
ggcagagacagaccagaacggtggc

SEQ ID NO: 3432725 - DNA, 25 bp, Homo sapien
cagaccagaacggtggcgggggcct

SEQ ID NO: 3432726 - DNA, 25 bp, Homo sapien
cagagacagaccagaacggtggcgg

SEQ ID NO: 3432727 - DNA, 25 bp, Homo sapien
cgtgaagcggttggtgcggatgagt

SEQ ID NO: 3432728 - DNA, 25 bp, Homo sapien
gggttgacctcctggtagcggccca

SEQ ID NO: 3432729 - DNA, 25 bp, Homo sapien
ggccgtgaagcggttggtgcggatg

SEQ ID NO: 3432730 - DNA, 25 bp, Homo sapien
catgtcccggcaggggatgcggtga

SEQ ID NO: 3432731 - DNA, 25 bp, Homo sapien
cccaggacacgggtaaggatgccgt

SEQ ID NO: 3432732 - DNA, 25 bp, Homo sapien
gcctcccaggacacgggtaaggatg

SEQ ID NO: 3432733 - DNA, 25 bp, Homo sapien
cctcccaggacacgggtaaggatgc

SEQ ID NO: 3432734 - DNA, 25 bp, Homo sapien
aggacacgggtaaggatgccgtggc

SEQ ID NO: 3432735 - DNA, 25 bp, Homo sapien
ggcccaagacgccacggaggccctg

SEQ ID NO: 3432736 - DNA, 25 bp, Homo sapien
tgcagtcaagaacccatcacttagc

SEQ ID NO: 3432737 - DNA, 25 bp, Homo sapien
tgggtgagctgggaacccccgaaca

SEQ ID NO: 3432738 - DNA, 25 bp, Homo sapien
tgcctcccggcccaagacgccacgg

SEQ ID NO: 3432739 - DNA, 25 bp, Homo sapien
accatggccagggcgaacaggaaca

SEQ ID NO: 3432740 - DNA, 25 bp, Homo sapien
gtcggttctccgcaaggaccatggc

SEQ ID NO: 3432741 - DNA, 25 bp, Homo sapien
gttctgcgcggccttcacagccggt

SEQ ID NO: 3432742 - DNA, 25 bp, Homo sapien
aacatgagcagcccgtggcccacat

SEQ ID NO: 3432743 - DNA, 25 bp, Homo sapien
tgctaccctcatcaggaccccagcc

SEQ ID NO: 3432744 - DNA, 25 bp, Homo sapien
gctaccctcatcaggaccccagccc

SEQ ID NO: 3432745 - DNA, 25 bp, Homo sapien
agactggttggccatggcggccaca

SEQ ID NO: 3432746 - DNA, 25 bp, Homo sapien
aagcactcgttgtagatgaagccgg

SEQ ID NO: 3432747 - DNA, 25 bp, Homo sapien
tgctggtggcgcgactgaagcactc

SEQ ID NO: 3432748 - DNA, 25 bp, Homo sapien
atgaagccggtgtagatggagaaca

SEQ ID NO: 3432749 - DNA, 25 bp, Homo sapien
tgcggcaacgcaggggagggcggtc

SEQ ID NO: 3432750 - DNA, 25 bp, Homo sapien
gcggtcagggctgcgggtgctgcgg

SEQ ID NO: 3432751 - DNA, 25 bp, Homo sapien
caacgcaggggagggcggtcagggc

SEQ ID NO: 3432752 - DNA, 25 bp, Homo sapien
ctgcggggcccccagccgggctggg

SEQ ID NO: 3432753 - DNA, 25 bp, Homo sapien
cccaggaagacaccggtgacgttgg

SEQ ID NO: 3432754 - DNA, 25 bp, Homo sapien
gatccagggtaagcatcgtgtgctg

SEQ ID NO: 3432755 - DNA, 25 bp, Homo sapien
tgacgttgggatccagggtaagcat

SEQ ID NO: 3432756 - DNA, 25 bp, Homo sapien
aagacaccggtgacgttgggatcca

SEQ ID NO: 3432757 - DNA, 25 bp, Homo sapien
tcaggagactggttcctggctggtc

SEQ ID NO: 3432758 - DNA, 25 bp, Homo sapien
tccacagagggttgggaacagtgct

SEQ ID NO: 3432759 - DNA, 25 bp, Homo sapien
tggtctcgctttgcctccgcacact

SEQ ID NO: 3432760 - DNA, 25 bp, Homo sapien
gacagcgctgcaggacggctgaacc

SEQ ID NO: 3432761 - DNA, 25 bp, Homo sapien
tgggctggactcaggggctccctcg

SEQ ID NO: 3432762 - DNA, 25 bp, Homo sapien
ggtgggctggactcaggggctccct

SEQ ID NO: 3432763 - DNA, 25 bp, Homo sapien
ggactcaggggctccctcgccatca

SEQ ID NO: 3432764 - DNA, 25 bp, Homo sapien
gctggactcaggggctccctcgcca

SEQ ID NO: 3432765 - DNA, 25 bp, Homo sapien
gtgcacgacgcccaggatgacggac

SEQ ID NO: 3432766 - DNA, 25 bp, Homo sapien
atgacggacatcttcatcttgaagg

SEQ ID NO: 3432767 - DNA, 25 bp, Homo sapien
accccaaaggccatgtgcacgacgc

SEQ ID NO: 3432768 - DNA, 25 bp, Homo sapien
tggttgaagactccgaggaccaccc

SEQ ID NO: 3432769 - DNA, 25 bp, Homo sapien
agatgactaggaacacgaggtaacc

SEQ ID NO: 3432770 - DNA, 25 bp, Homo sapien
ctaggaacacgaggtaaccgaagag

SEQ ID NO: 3432771 - DNA, 25 bp, Homo sapien
acgaggtaaccgaagagtcccagca

SEQ ID NO: 3432772 - DNA, 25 bp, Homo sapien
cacgaggtaaccgaagagtcccagc

SEQ ID NO: 3432773 - DNA, 25 bp, Homo sapien
tgcatccccgtttctcggacgagga

SEQ ID NO: 3432774 - DNA, 25 bp, Homo sapien
gtttctcggacgaggatcttgcagc

SEQ ID NO: 3432775 - DNA, 25 bp, Homo sapien
cccatgaggccgtgtgagcccggcc

SEQ ID NO: 3432776 - DNA, 25 bp, Homo sapien
tgacggccctgtctgcacggcccgg

SEQ ID NO: 3432777 - DNA, 25 bp, Homo sapien
gagtcagggcgtccctgctgtgcac

SEQ ID NO: 3432778 - DNA, 25 bp, Homo sapien
tgagtcacagcagtcacggggccca

SEQ ID NO: 3432779 - DNA, 25 bp, Homo sapien
gttgtgccacctgctaaagatgcac

SEQ ID NO: 3432780 - DNA, 25 bp, Homo sapien
gcctccataaggactcctgagggaa

SEQ ID NO: 3432781 - DNA, 25 bp, Homo sapien
caagcagcaggatgggcaccatggc

SEQ ID NO: 3432782 - DNA, 25 bp, Homo sapien
ctgtcggtcagcgggcctcctccgc

SEQ ID NO: 3432783 - DNA, 25 bp, Homo sapien
tggccaaggccaggaccaccagcgt

SEQ ID NO: 3432784 - DNA, 25 bp, Homo sapien
aggatgggcaccatggccaaggcca

SEQ ID NO: 3432785 - DNA, 25 bp, Homo sapien
tgccttttcctcatcggagctccag

SEQ ID NO: 3432786 - DNA, 25 bp, Homo sapien
caggtccagcaacccggccttgttt

SEQ ID NO: 3432787 - DNA, 25 bp, Homo sapien
ctccagccattcacagatgcgtcag

SEQ ID NO: 3432788 - DNA, 25 bp, Homo sapien
agatgcgtcaggcaggtccagcaac

SEQ ID NO: 3432789 - DNA, 25 bp, Homo sapien
ggtaggaggcggtgttggagacgca

SEQ ID NO: 3432790 - DNA, 25 bp, Homo sapien
tggcctggtgcatgagcacctcgga

SEQ ID NO: 3432791 - DNA, 25 bp, Homo sapien
ccaggcagaactcgatggtgtggat

SEQ ID NO: 3432792 - DNA, 25 bp, Homo sapien
tcagggcccacaggcgcaggtagga

SEQ ID NO: 3432793 - DNA, 25 bp, Homo sapien
ccagcagcggtatgtgagaagccag

SEQ ID NO: 3432794 - DNA, 25 bp, Homo sapien
gccaacggcaagtgggtgcctgcca

SEQ ID NO: 3432795 - DNA, 25 bp, Homo sapien
acctacctgccgcagcctgaagccc

SEQ ID NO: 3432796 - DNA, 25 bp, Homo sapien
agagagaagcaacccgcccagccag

SEQ ID NO: 3432797 - DNA, 25 bp, Homo sapien
tagccacggtcatcacggcaaaggc

SEQ ID NO: 3432798 - DNA, 25 bp, Homo sapien
tcatcacggcaaaggcggcaaagat

SEQ ID NO: 3432799 - DNA, 25 bp, Homo sapien
agcaggatagccacggtcatcacgg

SEQ ID NO: 3432800 - DNA, 25 bp, Homo sapien
gcccaggcctatgcgcatcaccatg

SEQ ID NO: 3432801 - DNA, 25 bp, Homo sapien
gaactcacgccttgagcagcccagg

SEQ ID NO: 3432802 - DNA, 25 bp, Homo sapien
ttggtgaggggaactcacgccttga

SEQ ID NO: 3432803 - DNA, 25 bp, Homo sapien
gcccaggccagtgggtggtcgctca

SEQ ID NO: 3432804 - DNA, 25 bp, Homo sapien
tgaggggaactcacgccttgagcag

SEQ ID NO: 3432805 - DNA, 25 bp, Homo sapien
agcttgtagcccgtgcctgagtaga

SEQ ID NO: 3432806 - DNA, 25 bp, Homo sapien
tagcccgtgcctgagtagaacttgt

SEQ ID NO: 3432807 - DNA, 25 bp, Homo sapien
aagggactcagcttgtagcccgtgc

SEQ ID NO: 3432808 - DNA, 25 bp, Homo sapien
gactcagcttgtagcccgtgcctga

SEQ ID NO: 3432809 - DNA, 25 bp, Homo sapien
gtcaggaaggaggtctggcaggacc

SEQ ID NO: 3432810 - DNA, 25 bp, Homo sapien
gaccgtctttattcctctcctgcct

SEQ ID NO: 3432811 - DNA, 25 bp, Homo sapien
aggtcaggaaggaggtctggcagga

SEQ ID NO: 3432812 - DNA, 25 bp, Homo sapien
ctcctgcctcagaggtcaggaagga

SEQ ID NO: 3432813 - DNA, 25 bp, Homo sapien
agctaaaaaggagggaagagagacg

SEQ ID NO: 3432814 - DNA, 25 bp, Homo sapien
taaaaaggagggaagagagacgaga

SEQ ID NO: 3432815 - DNA, 25 bp, Homo sapien
aaaaggagggaagagagacgagaca

SEQ ID NO: 3432816 - DNA, 25 bp, Homo sapien
ctcagctaaaaaggagggaagagag

SEQ ID NO: 3432817 - DNA, 25 bp, Homo sapien
accatgccttctaccctgccacctg

SEQ ID NO: 3432818 - DNA, 25 bp, Homo sapien
aagagtctgacattattgcagatct

SEQ ID NO: 3432819 - DNA, 25 bp, Homo sapien
ggtcccagatcctacaccatgcctt

SEQ ID NO: 3432820 - DNA, 25 bp, Homo sapien
tgacattattgcagatctgctcagg

SEQ ID NO: 3432821 - DNA, 25 bp, Homo sapien
gacaccatggccctgcatggagcac

SEQ ID NO: 3432822 - DNA, 25 bp, Homo sapien
ggcaccactcccaacagagagtaac

SEQ ID NO: 3432823 - DNA, 25 bp, Homo sapien
cactccaagttagaatgtgctggaa

SEQ ID NO: 3432824 - DNA, 25 bp, Homo sapien
caccagggcatggatattggcacca

SEQ ID NO: 3432825 - DNA, 25 bp, Homo sapien
gctgggcatgtggaattaccttaga

SEQ ID NO: 3432826 - DNA, 25 bp, Homo sapien
gcagctctccggagtccttcattta

SEQ ID NO: 3432827 - DNA, 25 bp, Homo sapien
gatttggtccagatccacctgcagc

SEQ ID NO: 3432828 - DNA, 25 bp, Homo sapien
gtgagcaccgtttctctaagctgaa

SEQ ID NO: 3432829 - DNA, 25 bp, Homo sapien
gccataagctcacgtggacaaggat

SEQ ID NO: 3432830 - DNA, 25 bp, Homo sapien
tggtccacacgagctcgcttgcagt

SEQ ID NO: 3432831 - DNA, 25 bp, Homo sapien
tgtggagccgatcttccaatactgg

SEQ ID NO: 3432832 - DNA, 25 bp, Homo sapien
tcctcgcagagatacatgtggagcc

SEQ ID NO: 3432833 - DNA, 25 bp, Homo sapien
gctgtcacccttggatgtgtcctga

SEQ ID NO: 3432834 - DNA, 25 bp, Homo sapien
ttctagcccagaagcgaagagccct

SEQ ID NO: 3432835 - DNA, 25 bp, Homo sapien
caggtgaagccaaactgaatgaagc

SEQ ID NO: 3432836 - DNA, 25 bp, Homo sapien
aaaggtgttgcgctcctgcacagga

SEQ ID NO: 3432837 - DNA, 25 bp, Homo sapien
gcgtggatcgagtgtagctgtgaaa

SEQ ID NO: 3432838 - DNA, 25 bp, Homo sapien
gggcgtggatcgagtgtagctgtga

SEQ ID NO: 3432839 - DNA, 25 bp, Homo sapien
acatcatcattcttgtgggagacag

SEQ ID NO: 3432840 - DNA, 25 bp, Homo sapien
tgggagacagcagcctgtatgtggt

SEQ ID NO: 3432841 - DNA, 25 bp, Homo sapien
tcctgatggagtgtgcagacagcca

SEQ ID NO: 3432842 - DNA, 25 bp, Homo sapien
gcttgacctagctctttgggcctct

SEQ ID NO: 3432843 - DNA, 25 bp, Homo sapien
gctctgcctggagtgtcggatcctg

SEQ ID NO: 3432844 - DNA, 25 bp, Homo sapien
actgtactgcatgtgacttctcccc

SEQ ID NO: 3432845 - DNA, 25 bp, Homo sapien
ccagtcagatgaggcaaacagcaag

SEQ ID NO: 3432846 - DNA, 25 bp, Homo sapien
tcatgaatgtgctggtgaacactgt

SEQ ID NO: 3432847 - DNA, 25 bp, Homo sapien
aaagtcgccagtcactgctgcaagg

SEQ ID NO: 3432848 - DNA, 25 bp, Homo sapien
gcgatgtgttatagacggtgctcac

SEQ ID NO: 3432849 - DNA, 25 bp, Homo sapien
aatggagcgacgtttatttcatctc

SEQ ID NO: 3432850 - DNA, 25 bp, Homo sapien
aaacgagatcgggaagcagaaatat

SEQ ID NO: 3432851 - DNA, 25 bp, Homo sapien
tcactaggactcagaaacgagatcg

SEQ ID NO: 3432852 - DNA, 25 bp, Homo sapien
tctcttgtttacgatttcactagga

SEQ ID NO: 3432853 - DNA, 25 bp, Homo sapien
ttcccatcaggaagcgggtcactgc

SEQ ID NO: 3432854 - DNA, 25 bp, Homo sapien
ggagcattcgtgtgtggtacctgat

SEQ ID NO: 3432855 - DNA, 25 bp, Homo sapien
ttggtgtctttatggcaatcgaaac

SEQ ID NO: 3432856 - DNA, 25 bp, Homo sapien
cagcattcggatgttggcagatggc

SEQ ID NO: 3432857 - DNA, 25 bp, Homo sapien
ggagactgagtgagcggtgggtatt

SEQ ID NO: 3432858 - DNA, 25 bp, Homo sapien
agactgagtgagcggtgggtattcc

SEQ ID NO: 3432859 - DNA, 25 bp, Homo sapien
gagactgagtgagcggtgggtattc

SEQ ID NO: 3432860 - DNA, 25 bp, Homo sapien
gaggggctcttggtatatctatcag

SEQ ID NO: 3432861 - DNA, 25 bp, Homo sapien
gggctcttggtatatctatcagaag

SEQ ID NO: 3432862 - DNA, 25 bp, Homo sapien
tcttggtatatctatcagaagccac

SEQ ID NO: 3432863 - DNA, 25 bp, Homo sapien
ggtatatctatcagaagccacctta

SEQ ID NO: 3432864 - DNA, 25 bp, Homo sapien
gagaaaagttggatgtcatactaaa

SEQ ID NO: 3432865 - DNA, 25 bp, Homo sapien
catttactccaccagggttattttg

SEQ ID NO: 3432866 - DNA, 25 bp, Homo sapien
cagatataccctaaagtagaagagt

SEQ ID NO: 3432867 - DNA, 25 bp, Homo sapien
gtcactgaagtaaaatcccacggat

SEQ ID NO: 3432868 - DNA, 25 bp, Homo sapien
tactgatgtaaggtagaaaccatac

SEQ ID NO: 3432869 - DNA, 25 bp, Homo sapien
ggtagaaaccatacttgaaagcacc

SEQ ID NO: 3432870 - DNA, 25 bp, Homo sapien
ttgaaagcaccttggatagaaaggg

SEQ ID NO: 3432871 - DNA, 25 bp, Homo sapien
tccattcctgaagctatatctactg

SEQ ID NO: 3432872 - DNA, 25 bp, Homo sapien
gaaagtgctcctgcggctgtatgga

SEQ ID NO: 3432873 - DNA, 25 bp, Homo sapien
cagatggtgagttggtaggctactt

SEQ ID NO: 3432874 - DNA, 25 bp, Homo sapien
cacccttggtgatgagcctcggaaa

SEQ ID NO: 3432875 - DNA, 25 bp, Homo sapien
ctttgctgagataccttggaaagag

SEQ ID NO: 3432876 - DNA, 25 bp, Homo sapien
caagctcctagtcaaaatcagttga

SEQ ID NO: 3432877 - DNA, 25 bp, Homo sapien
catctgaaggccgtggtaaccagtt

SEQ ID NO: 3432878 - DNA, 25 bp, Homo sapien
cactagcgtagaagatcttggaact

SEQ ID NO: 3432879 - DNA, 25 bp, Homo sapien
tagagtattgaggtctcctgtttca

SEQ ID NO: 3432880 - DNA, 25 bp, Homo sapien
ggaggtgccttaggatcttcttgca

SEQ ID NO: 3432881 - DNA, 25 bp, Homo sapien
tgctgtccttgcttagacactagaa

SEQ ID NO: 3432882 - DNA, 25 bp, Homo sapien
tagaacaggaggtgccttaggatct

SEQ ID NO: 3432883 - DNA, 25 bp, Homo sapien
tagacactagaacaggaggtgcctt

SEQ ID NO: 3432884 - DNA, 25 bp, Homo sapien
gcaaaattaactctttgagcttcac

SEQ ID NO: 3432885 - DNA, 25 bp, Homo sapien
ttcagcccctctgactgcttatgag

SEQ ID NO: 3432886 - DNA, 25 bp, Homo sapien
cagcaaaattaactctttgagcttc

SEQ ID NO: 3432887 - DNA, 25 bp, Homo sapien
tgcttcagcccctctgactgcttat

SEQ ID NO: 3432888 - DNA, 25 bp, Homo sapien
ttctgcaccgggggcgaggcggagc

SEQ ID NO: 3432889 - DNA, 25 bp, Homo sapien
gcgtggggcagcagcgcgacgccgc

SEQ ID NO: 3432890 - DNA, 25 bp, Homo sapien
tgctgctgagctgcggtagcggcag

SEQ ID NO: 3432891 - DNA, 25 bp, Homo sapien
cgccgccagcgacctcgagtccaag

SEQ ID NO: 3432892 - DNA, 25 bp, Homo sapien
gagcatcctcagtaccacggacagg

SEQ ID NO: 3432893 - DNA, 25 bp, Homo sapien
gcatcctcagtaccacggacaggga

SEQ ID NO: 3432894 - DNA, 25 bp, Homo sapien
ccgagcatcctcagtaccacggaca

SEQ ID NO: 3432895 - DNA, 25 bp, Homo sapien
ggcccgagcatcctcagtaccacgg

SEQ ID NO: 3432896 - DNA, 25 bp, Homo sapien
gatgcccctccctcgacggtccctg

SEQ ID NO: 3432897 - DNA, 25 bp, Homo sapien
ggcggggatgatgcccctccctcga

SEQ ID NO: 3432898 - DNA, 25 bp, Homo sapien
tccctcgacggtccctgggcctcca

SEQ ID NO: 3432899 - DNA, 25 bp, Homo sapien
gggatgatgcccctccctcgacggt

SEQ ID NO: 3432900 - DNA, 25 bp, Homo sapien
gctctgggcagttgcggcggcccca

SEQ ID NO: 3432901 - DNA, 25 bp, Homo sapien
tgctctgggcagttgcggcggcccc

SEQ ID NO: 3432902 - DNA, 25 bp, Homo sapien
ctctgggcagttgcggcggccccat

SEQ ID NO: 3432903 - DNA, 25 bp, Homo sapien
tgtgctctgggcagttgcggcggcc

SEQ ID NO: 3432904 - DNA, 25 bp, Homo sapien
cggcaaaggtgcgttagtcacggtc

SEQ ID NO: 3432905 - DNA, 25 bp, Homo sapien
taccccggcaaaggtgcgttagtca

SEQ ID NO: 3432906 - DNA, 25 bp, Homo sapien
ggtgcgttagtcacggtcacaaggc

SEQ ID NO: 3432907 - DNA, 25 bp, Homo sapien
cgttagtcacggtcacaaggctgtt

SEQ ID NO: 3432908 - DNA, 25 bp, Homo sapien
ttgcgacgtgcatgctctgaaggag

SEQ ID NO: 3432909 - DNA, 25 bp, Homo sapien
tcattcctccaaacagtcattgaga

SEQ ID NO: 3432910 - DNA, 25 bp, Homo sapien
agtcattgagaatttgcgacgtgca

SEQ ID NO: 3432911 - DNA, 25 bp, Homo sapien
gaatttgcgacgtgcatgctctgaa

SEQ ID NO: 3432912 - DNA, 25 bp, Homo sapien
cactagttagacttagagagggcag

SEQ ID NO: 3432913 - DNA, 25 bp, Homo sapien
ctggtgtgcctaggaagaagaaatg

SEQ ID NO: 3432914 - DNA, 25 bp, Homo sapien
gcttcttgggactagtaactctgcc

SEQ ID NO: 3432915 - DNA, 25 bp, Homo sapien
gaagtgacctaattaaggagtcaca

SEQ ID NO: 3432916 - DNA, 25 bp, Homo sapien
tgaggaaggcataccagctgtttca

SEQ ID NO: 3432917 - DNA, 25 bp, Homo sapien
gaaggcataccagctgtttcacctc

SEQ ID NO: 3432918 - DNA, 25 bp, Homo sapien
gaggaaggcataccagctgtttcac

SEQ ID NO: 3432919 - DNA, 25 bp, Homo sapien
ggcataccagctgtttcacctcctt

SEQ ID NO: 3432920 - DNA, 25 bp, Homo sapien
gacggtcttggttaggcatctctcc

SEQ ID NO: 3432921 - DNA, 25 bp, Homo sapien
cacaaaatccttgcagacggtcttg

SEQ ID NO: 3432922 - DNA, 25 bp, Homo sapien
gaatgatgtgatgtgtcagtcagga

SEQ ID NO: 3432923 - DNA, 25 bp, Homo sapien
tcaggataggtcaactgctgtaaca

SEQ ID NO: 3432924 - DNA, 25 bp, Homo sapien
gaaatggaaagagcgcctcatcggc

SEQ ID NO: 3432925 - DNA, 25 bp, Homo sapien
atggaaagagcgcctcatcggccat

SEQ ID NO: 3432926 - DNA, 25 bp, Homo sapien
aggaaatggaaagagcgcctcatcg

SEQ ID NO: 3432927 - DNA, 25 bp, Homo sapien
aaatggaaagagcgcctcatcggcc

SEQ ID NO: 3432928 - DNA, 25 bp, Homo sapien
aaaacaatttggccggtgttcactg

SEQ ID NO: 3432929 - DNA, 25 bp, Homo sapien
aatattttgtacatgcacttgcagt

SEQ ID NO: 3432930 - DNA, 25 bp, Homo sapien
acaatttggccggtgttcactgtat

SEQ ID NO: 3432931 - DNA, 25 bp, Homo sapien
gcacttgcagtattgaggttaatca

SEQ ID NO: 3432932 - DNA, 25 bp, Homo sapien
tctcaggagtcggtatgcacaagca

SEQ ID NO: 3432933 - DNA, 25 bp, Homo sapien
ggtagtaaatcactgcctctcagga

SEQ ID NO: 3432934 - DNA, 25 bp, Homo sapien
tggaggccaaccttcccatgggtct

SEQ ID NO: 3432935 - DNA, 25 bp, Homo sapien
cacaccgttgaccagtttagaagag

SEQ ID NO: 3432936 - DNA, 25 bp, Homo sapien
ttcaacagtgaagtagggcagccca

SEQ ID NO: 3432937 - DNA, 25 bp, Homo sapien
tcactgcgtctggaggtcttcaaca

SEQ ID NO: 3432938 - DNA, 25 bp, Homo sapien
gttgtggtgcagtcgaactcctcag

SEQ ID NO: 3432939 - DNA, 25 bp, Homo sapien
aactcctcaggcgtttggaaagcat

SEQ ID NO: 3432940 - DNA, 25 bp, Homo sapien
atacaaaaattagctgggcatggtg

SEQ ID NO: 3432941 - DNA, 25 bp, Homo sapien
cctggccaacatggtctctactaaa

SEQ ID NO: 3432942 - DNA, 25 bp, Homo sapien
cgcacgcctgtcatcccagctacat

SEQ ID NO: 3432943 - DNA, 25 bp, Homo sapien
gggaggctgaggcaagagaatcact

SEQ ID NO: 3432944 - DNA, 25 bp, Homo sapien
aacttgatacccaggtaggtggtca

SEQ ID NO: 3432945 - DNA, 25 bp, Homo sapien
ttctgattttagtggcaaccctggg

SEQ ID NO: 3432946 - DNA, 25 bp, Homo sapien
taggtggtcactgatcagtagttgg

SEQ ID NO: 3432947 - DNA, 25 bp, Homo sapien
tatatgcctcacttatcaattacag

SEQ ID NO: 3432948 - DNA, 25 bp, Homo sapien
cattaccacctgagggtacttggga

SEQ ID NO: 3432949 - DNA, 25 bp, Homo sapien
tggtggtaggtaaactgctcagctt

SEQ ID NO: 3432950 - DNA, 25 bp, Homo sapien
gaattgggtgaagcaaaatgcatcc

SEQ ID NO: 3432951 - DNA, 25 bp, Homo sapien
ttcagacgctattctcttggtggcc

SEQ ID NO: 3432952 - DNA, 25 bp, Homo sapien
tccctgtcggccgtgccctgcccgg

SEQ ID NO: 3432953 - DNA, 25 bp, Homo sapien
ctggtccctgtcggccgtgccctgc

SEQ ID NO: 3432954 - DNA, 25 bp, Homo sapien
cctgtcggccgtgccctgcccggca

SEQ ID NO: 3432955 - DNA, 25 bp, Homo sapien
tggtccctgtcggccgtgccctgcc

SEQ ID NO: 3432956 - DNA, 25 bp, Homo sapien
tgatgtggacctttttcgatttaaa

SEQ ID NO: 3432957 - DNA, 25 bp, Homo sapien
tataaagtgtagttgaggatggcca

SEQ ID NO: 3432958 - DNA, 25 bp, Homo sapien
tagagggcaggtgaattaatttgat

SEQ ID NO: 3432959 - DNA, 25 bp, Homo sapien
tggttctttgtgatgtggacctttt

SEQ ID NO: 3432960 - DNA, 25 bp, Homo sapien
atgatgtgcaccgttgtcacctccg

SEQ ID NO: 3432961 - DNA, 25 bp, Homo sapien
tctgtccttccacgtattcgcggat

SEQ ID NO: 3432962 - DNA, 25 bp, Homo sapien
gaggaacaatgacaactcgatgcaa

SEQ ID NO: 3432963 - DNA, 25 bp, Homo sapien
tcacctccgccttggaaggaggaac

SEQ ID NO: 3432964 - DNA, 25 bp, Homo sapien
ggcagcagctgggaggtgactggag

SEQ ID NO: 3432965 - DNA, 25 bp, Homo sapien
cagcagctgggaggtgactggaggg

SEQ ID NO: 3432966 - DNA, 25 bp, Homo sapien
tgggaggtgactggaggggcctgca

SEQ ID NO: 3432967 - DNA, 25 bp, Homo sapien
agctgggaggtgactggaggggcct

SEQ ID NO: 3432968 - DNA, 25 bp, Homo sapien
tgggaaaggtgcacgggcctgagct

SEQ ID NO: 3432969 - DNA, 25 bp, Homo sapien
gaggcaacagtagccaccaggatgg

SEQ ID NO: 3432970 - DNA, 25 bp, Homo sapien
caacagtagccaccaggatggtgga

SEQ ID NO: 3432971 - DNA, 25 bp, Homo sapien
gtggcatggaggcaacagtagccac

SEQ ID NO: 3432972 - DNA, 25 bp, Homo sapien
gagcaaagtggcgatcgctgcagcc

SEQ ID NO: 3432973 - DNA, 25 bp, Homo sapien
acagctggtatcagaggtgggccta

SEQ ID NO: 3432974 - DNA, 25 bp, Homo sapien
aataaaggactcattgtcaaatcat

SEQ ID NO: 3432975 - DNA, 25 bp, Homo sapien
gaagcagtcccttaagaagggctca

SEQ ID NO: 3432976 - DNA, 25 bp, Homo sapien
gctcgacagggcatggcctcgagcc

SEQ ID NO: 3432977 - DNA, 25 bp, Homo sapien
tcgagctcgacagggcatggcctcg

SEQ ID NO: 3432978 - DNA, 25 bp, Homo sapien
gcctcgagctcgacagggcatggcc

SEQ ID NO: 3432979 - DNA, 25 bp, Homo sapien
acagggcatggcctcgagccagcca

SEQ ID NO: 3432980 - DNA, 25 bp, Homo sapien
gcagaggctcctccaaagccttgag

SEQ ID NO: 3432981 - DNA, 25 bp, Homo sapien
agaggctcctccaaagccttgagag

SEQ ID NO: 3432982 - DNA, 25 bp, Homo sapien
ccaaagccttgagagccccggcagg

SEQ ID NO: 3432983 - DNA, 25 bp, Homo sapien
cacggccgtagggagcagaggctcc

SEQ ID NO: 3432984 - DNA, 25 bp, Homo sapien
cattcacaccggatctgtctgcaaa

SEQ ID NO: 3432985 - DNA, 25 bp, Homo sapien
agctgagcattcacaccggatctgt

SEQ ID NO: 3432986 - DNA, 25 bp, Homo sapien
gaggctcctccaaagccgtgagagc

SEQ ID NO: 3432987 - DNA, 25 bp, Homo sapien
gcagaggctcctccaaagccgtgag

SEQ ID NO: 3432988 - DNA, 25 bp, Homo sapien
agcaagagctgatgggccacacgtg

SEQ ID NO: 3432989 - DNA, 25 bp, Homo sapien
aaggcagcaagagctgatgggccac

SEQ ID NO: 3432990 - DNA, 25 bp, Homo sapien
ggcagcaagagctgatgggccacac

SEQ ID NO: 3432991 - DNA, 25 bp, Homo sapien
cagcaagagctgatgggccacacgt

SEQ ID NO: 3432992 - DNA, 25 bp, Homo sapien
cactgacttgggtttctccctggta

SEQ ID NO: 3432993 - DNA, 25 bp, Homo sapien
gactgtgtcgttgccactgacttgg

SEQ ID NO: 3432994 - DNA, 25 bp, Homo sapien
tgttcgatgaacctcctggagccag

SEQ ID NO: 3432995 - DNA, 25 bp, Homo sapien
cgcaccctggaggttgactgtgtcg

SEQ ID NO: 3432996 - DNA, 25 bp, Homo sapien
gaagaaggactacacccaggtggac

SEQ ID NO: 3432997 - DNA, 25 bp, Homo sapien
caggccgtggtagacaaaactctcc

SEQ ID NO: 3432998 - DNA, 25 bp, Homo sapien
caggtggactacttaatcaacggga

SEQ ID NO: 3432999 - DNA, 25 bp, Homo sapien
caacgggatgtatgcggactcagaa

SEQ ID NO: 3433000 - DNA, 25 bp, Homo sapien
ttggccacacgtgctcagactgtag

SEQ ID NO: 3433001 - DNA, 25 bp, Homo sapien
tgcagcctccagtacaactgtggcc

SEQ ID NO: 3433002 - DNA, 25 bp, Homo sapien
cagatgtgagtgaaccagcaacttc

SEQ ID NO: 3433003 - DNA, 25 bp, Homo sapien
aaagagcagcgcgttgccaagaaca

SEQ ID NO: 3433004 - DNA, 25 bp, Homo sapien
cgatccacgtaagtgagaaagctgt

SEQ ID NO: 3433005 - DNA, 25 bp, Homo sapien
tgcggcatccaacgatccacgtaag

SEQ ID NO: 3433006 - DNA, 25 bp, Homo sapien
gtggccacaaagcatgctgagccct

SEQ ID NO: 3433007 - DNA, 25 bp, Homo sapien
tctgaaagccatgcggcatccaacg

SEQ ID NO: 3433008 - DNA, 25 bp, Homo sapien
cttagcagaagatgatgaaaggctg

SEQ ID NO: 3433009 - DNA, 25 bp, Homo sapien
gaggggcgcctcttagcagaagatg

SEQ ID NO: 3433010 - DNA, 25 bp, Homo sapien
agcagaagatgatgaaaggctgtcc

SEQ ID NO: 3433011 - DNA, 25 bp, Homo sapien
gtggaggggcgcctcttagcagaag

SEQ ID NO: 3433012 - DNA, 25 bp, Homo sapien
gaattgactatgatgaaacggaggc

SEQ ID NO: 3433013 - DNA, 25 bp, Homo sapien
gagtttcccggtatgttggaccatc

SEQ ID NO: 3433014 - DNA, 25 bp, Homo sapien
caggtgaccaaagatgctatcagag

SEQ ID NO: 3433015 - DNA, 25 bp, Homo sapien
caatggacactaggtttcaggtgac

SEQ ID NO: 3433016 - DNA, 25 bp, Homo sapien
gttcataatatccaaattctagaag

SEQ ID NO: 3433017 - DNA, 25 bp, Homo sapien
aaccatataagtgtacaagaatgtt

SEQ ID NO: 3433018 - DNA, 25 bp, Homo sapien
caaattctagaagcaatccacatgt

SEQ ID NO: 3433019 - DNA, 25 bp, Homo sapien
attcactatcataaggacagcaggg

SEQ ID NO: 3433020 - DNA, 25 bp, Homo sapien
ccacttctctcctccttctgacagt

SEQ ID NO: 3433021 - DNA, 25 bp, Homo sapien
cttctctcctccttctgacagtcat

SEQ ID NO: 3433022 - DNA, 25 bp, Homo sapien
ctcggctgtcaccctccacttctct

SEQ ID NO: 3433023 - DNA, 25 bp, Homo sapien
tcggctgtcaccctccacttctctc

SEQ ID NO: 3433024 - DNA, 25 bp, Homo sapien
tgaggatgtcgtttcagcccggtga

SEQ ID NO: 3433025 - DNA, 25 bp, Homo sapien
tcagttcgttccttagatgcaagtc

SEQ ID NO: 3433026 - DNA, 25 bp, Homo sapien
gatgcaagtccatcccaatgaagta

SEQ ID NO: 3433027 - DNA, 25 bp, Homo sapien
tgaagttacgctgggcacaagagcc

SEQ ID NO: 3433028 - DNA, 25 bp, Homo sapien
gctcactcgggctccatggcgcggc

SEQ ID NO: 3433029 - DNA, 25 bp, Homo sapien
cgcgccgcgctcactcgggctccat

SEQ ID NO: 3433030 - DNA, 25 bp, Homo sapien
cgccgcgctcactcgggctccatgg

SEQ ID NO: 3433031 - DNA, 25 bp, Homo sapien
cggacgggcccgcgccgcgctcact

SEQ ID NO: 3433032 - DNA, 25 bp, Homo sapien
gccgggcagccgcacagcgccagca

SEQ ID NO: 3433033 - DNA, 25 bp, Homo sapien
gcgggggccgggcagccgcacagcg

SEQ ID NO: 3433034 - DNA, 25 bp, Homo sapien
gcggcccgggcggcgctgcctccat

SEQ ID NO: 3433035 - DNA, 25 bp, Homo sapien
gggccgggcagccgcacagcgccag

SEQ ID NO: 3433036 - DNA, 25 bp, Homo sapien
ggtccgaggcatgtatttcacacag

SEQ ID NO: 3433037 - DNA, 25 bp, Homo sapien
catcaaaaccgttctgcagaaagat

SEQ ID NO: 3433038 - DNA, 25 bp, Homo sapien
taaaaccagggatataacatcaaaa

SEQ ID NO: 3433039 - DNA, 25 bp, Homo sapien
gcttcgctgaggtccgaggcatgta

SEQ ID NO: 3433040 - DNA, 25 bp, Homo sapien
tccaaaactatctcgtacagtgagg

SEQ ID NO: 3433041 - DNA, 25 bp, Homo sapien
cagtgaggacgttaagcttcaggtc

SEQ ID NO: 3433042 - DNA, 25 bp, Homo sapien
gaagcaagccccagaacatatcttg

SEQ ID NO: 3433043 - DNA, 25 bp, Homo sapien
gccccagaacatatcttgctccaaa

SEQ ID NO: 3433044 - DNA, 25 bp, Homo sapien
ctgcggcaggactagagctccagca

SEQ ID NO: 3433045 - DNA, 25 bp, Homo sapien
aggcaacgccgcacttgggggctgc

SEQ ID NO: 3433046 - DNA, 25 bp, Homo sapien
ctctgcggcaggactagagctccag

SEQ ID NO: 3433047 - DNA, 25 bp, Homo sapien
gcaacgccgcacttgggggctgctc

SEQ ID NO: 3433048 - DNA, 25 bp, Homo sapien
tgagccctcggccagccatggctct

SEQ ID NO: 3433049 - DNA, 25 bp, Homo sapien
tcaagctgttcgctgcccaggtgtc

SEQ ID NO: 3433050 - DNA, 25 bp, Homo sapien
ggcgggtgagaatccgtgagccctc

SEQ ID NO: 3433051 - DNA, 25 bp, Homo sapien
ggccatcagggcacacgccgggcac

SEQ ID NO: 3433052 - DNA, 25 bp, Homo sapien
gtggagcaggcggaatcccaccagc

SEQ ID NO: 3433053 - DNA, 25 bp, Homo sapien
gggctgttgcttaataaacgtcatt

SEQ ID NO: 3433054 - DNA, 25 bp, Homo sapien
ctcctggtgtggagcaggcggaatc

SEQ ID NO: 3433055 - DNA, 25 bp, Homo sapien
agtgggcacagctggacgatgagca

SEQ ID NO: 3433056 - DNA, 25 bp, Homo sapien
tgtgctgagtccaagaaggccttcg

SEQ ID NO: 3433057 - DNA, 25 bp, Homo sapien
tgctgagtccaagaaggccttcgac

SEQ ID NO: 3433058 - DNA, 25 bp, Homo sapien
gtgtgctgagtccaagaaggccttc

SEQ ID NO: 3433059 - DNA, 25 bp, Homo sapien
gctgagtccaagaaggccttcgaca

SEQ ID NO: 3433060 - DNA, 25 bp, Homo sapien
cggggcaaaggcactgaccgtcacg

SEQ ID NO: 3433061 - DNA, 25 bp, Homo sapien
aaggcactgaccgtcacggccaggg

SEQ ID NO: 3433062 - DNA, 25 bp, Homo sapien
cactgaccgtcacggccagggcgag

SEQ ID NO: 3433063 - DNA, 25 bp, Homo sapien
gcaaaggcactgaccgtcacggcca

SEQ ID NO: 3433064 - DNA, 25 bp, Homo sapien
ctgcacaacactgggcaaagtccac

SEQ ID NO: 3433065 - DNA, 25 bp, Homo sapien
cctgcacaacactgggcaaagtcca

SEQ ID NO: 3433066 - DNA, 25 bp, Homo sapien
caacactgggcaaagtccacgttct

SEQ ID NO: 3433067 - DNA, 25 bp, Homo sapien
cacaacactgggcaaagtccacgtt

SEQ ID NO: 3433068 - DNA, 25 bp, Homo sapien
ccaggacctcagcacaatcccggtc

SEQ ID NO: 3433069 - DNA, 25 bp, Homo sapien
caggacaagccctccgtccccgaga

SEQ ID NO: 3433070 - DNA, 25 bp, Homo sapien
cacaatcccggtcctgtgctccagg

SEQ ID NO: 3433071 - DNA, 25 bp, Homo sapien
acctcagcacaatcccggtcctgtg

SEQ ID NO: 3433072 - DNA, 25 bp, Homo sapien
tcttccaccaagcattcattgtgga

SEQ ID NO: 3433073 - DNA, 25 bp, Homo sapien
gcactatggtgttgcaggccctggg

SEQ ID NO: 3433074 - DNA, 25 bp, Homo sapien
attgtggactgacagcgtgcgaggg

SEQ ID NO: 3433075 - DNA, 25 bp, Homo sapien
tggagaagctgagcactatggtgtt

SEQ ID NO: 3433076 - DNA, 25 bp, Homo sapien
tcttagttgtaaatatgcatgtggg

SEQ ID NO: 3433077 - DNA, 25 bp, Homo sapien
gttgtaaatatgcatgtgggtttgg

SEQ ID NO: 3433078 - DNA, 25 bp, Homo sapien
aagtccagtgttgacgatcagcttt

SEQ ID NO: 3433079 - DNA, 25 bp, Homo sapien
gtgttgacgatcagctttgatttcc

SEQ ID NO: 3433080 - DNA, 25 bp, Homo sapien
tggagactgctcttaattcaggcca

SEQ ID NO: 3433081 - DNA, 25 bp, Homo sapien
gaaccaccgtctgccaattcctagt

SEQ ID NO: 3433082 - DNA, 25 bp, Homo sapien
agtaccaattaaaaggcaggcactg

SEQ ID NO: 3433083 - DNA, 25 bp, Homo sapien
attaaacacgtaccccacagacagc

SEQ ID NO: 3433084 - DNA, 25 bp, Homo sapien
tagtgagagaaacagttccagggtg

SEQ ID NO: 3433085 - DNA, 25 bp, Homo sapien
gagactgactcaggggtgtcagtca

SEQ ID NO: 3433086 - DNA, 25 bp, Homo sapien
tcagtggggcgctgatggccggtgg

SEQ ID NO: 3433087 - DNA, 25 bp, Homo sapien
actgactcaggggtgtcagtcagtg

SEQ ID NO: 3433088 - DNA, 25 bp, Homo sapien
caaaatatagcattctgattacata

SEQ ID NO: 3433089 - DNA, 25 bp, Homo sapien
tttcaacaaaatatagcattctgat

SEQ ID NO: 3433090 - DNA, 25 bp, Homo sapien
caacaaaatatagcattctgattac

SEQ ID NO: 3433091 - DNA, 25 bp, Homo sapien
aaaatatagcattctgattacatac

SEQ ID NO: 3433092 - DNA, 25 bp, Homo sapien
tggccgtggacccatccctcccatt

SEQ ID NO: 3433093 - DNA, 25 bp, Homo sapien
agcacctccaatgctggccgtggac

SEQ ID NO: 3433094 - DNA, 25 bp, Homo sapien
cgagcacctccaatgctggccgtgg

SEQ ID NO: 3433095 - DNA, 25 bp, Homo sapien
ggccgagcacctccaatgctggccg

SEQ ID NO: 3433096 - DNA, 25 bp, Homo sapien
gcccgcacttcacctcctcagggca

SEQ ID NO: 3433097 - DNA, 25 bp, Homo sapien
gatgccacccagtggaacctggtgc

SEQ ID NO: 3433098 - DNA, 25 bp, Homo sapien
gctgatgccacccagtggaacctgg

SEQ ID NO: 3433099 - DNA, 25 bp, Homo sapien
ggagagagcccgcacttcacctcct

SEQ ID NO: 3433100 - DNA, 25 bp, Homo sapien
cagtgagcacccctctaagctggct

SEQ ID NO: 3433101 - DNA, 25 bp, Homo sapien
aaagaatgacttgggactacagtta

SEQ ID NO: 3433102 - DNA, 25 bp, Homo sapien
taaatgtgggttggtcgctaaggca

SEQ ID NO: 3433103 - DNA, 25 bp, Homo sapien
aatattatgggctattatgagctac

SEQ ID NO: 3433104 - DNA, 25 bp, Homo sapien
agccccttctgcctgtgcaagaagc

SEQ ID NO: 3433105 - DNA, 25 bp, Homo sapien
ccccttctgcctgtgcaagaagcct

SEQ ID NO: 3433106 - DNA, 25 bp, Homo sapien
gccccttctgcctgtgcaagaagcc

SEQ ID NO: 3433107 - DNA, 25 bp, Homo sapien
cactgtccaagctcaggcccgtttc

SEQ ID NO: 3433108 - DNA, 25 bp, Homo sapien
caggcccgtttccttggccgtggca

SEQ ID NO: 3433109 - DNA, 25 bp, Homo sapien
aagctcaggcccgtttccttggccg

SEQ ID NO: 3433110 - DNA, 25 bp, Homo sapien
gcttcccatccacccctgtattcca

SEQ ID NO: 3433111 - DNA, 25 bp, Homo sapien
ctgtggggcagaagcaaaccgtgag

SEQ ID NO: 3433112 - DNA, 25 bp, Homo sapien
tgagtccgtccagtacagcttcttg

SEQ ID NO: 3433113 - DNA, 25 bp, Homo sapien
aggccggagatgaccacgttctgca

SEQ ID NO: 3433114 - DNA, 25 bp, Homo sapien
cacggctcccttggaaaactggaag

SEQ ID NO: 3433115 - DNA, 25 bp, Homo sapien
acgtcccggcggttggcaaatagca

SEQ ID NO: 3433116 - DNA, 25 bp, Homo sapien
agcgcaggtcctggcgacacgatgg

SEQ ID NO: 3433117 - DNA, 25 bp, Homo sapien
ggagcgcaggtcctggcgacacgat

SEQ ID NO: 3433118 - DNA, 25 bp, Homo sapien
cgcaggtcctggcgacacgatggcc

SEQ ID NO: 3433119 - DNA, 25 bp, Homo sapien
gaggagcgcaggtcctggcgacacg

SEQ ID NO: 3433120 - DNA, 25 bp, Homo sapien
atgcagtggatgcctggttgggagg

SEQ ID NO: 3433121 - DNA, 25 bp, Homo sapien
aggcgcaagggctcacaaatgcagt

SEQ ID NO: 3433122 - DNA, 25 bp, Homo sapien
caggcgcaagggctcacaaatgcag

SEQ ID NO: 3433123 - DNA, 25 bp, Homo sapien
gcagtggatgcctggttgggaggtg

SEQ ID NO: 3433124 - DNA, 25 bp, Homo sapien
tgaaagggccagagactgggctata

SEQ ID NO: 3433125 - DNA, 25 bp, Homo sapien
gaaagggccagagactgggctatac

SEQ ID NO: 3433126 - DNA, 25 bp, Homo sapien
tcagcatcactggatctgatgagtg

SEQ ID NO: 3433127 - DNA, 25 bp, Homo sapien
gccggcatctcactgttttcactct

SEQ ID NO: 3433128 - DNA, 25 bp, Homo sapien
tctgatgagtgggagccggcatctc

SEQ ID NO: 3433129 - DNA, 25 bp, Homo sapien
gtaggaccatggctggcgtcatcag

SEQ ID NO: 3433130 - DNA, 25 bp, Homo sapien
tcttgatccttttggccacgtgcac

SEQ ID NO: 3433131 - DNA, 25 bp, Homo sapien
tcctctgaggaaggaccctggtggg

SEQ ID NO: 3433132 - DNA, 25 bp, Homo sapien
tgcaacgaagtcgagtctcaggagg

SEQ ID NO: 3433133 - DNA, 25 bp, Homo sapien
acactgaggtggacgctcggaccca

SEQ ID NO: 3433134 - DNA, 25 bp, Homo sapien
ctcctgagaaggtatcaggggcatc

SEQ ID NO: 3433135 - DNA, 25 bp, Homo sapien
tatcaggggcatcagtctggacttg

SEQ ID NO: 3433136 - DNA, 25 bp, Homo sapien
aaatgctccaccgtggcccatggaa

SEQ ID NO: 3433137 - DNA, 25 bp, Homo sapien
tctggacttgggggggaatccacac

SEQ ID NO: 3433138 - DNA, 25 bp, Homo sapien
tgcctgcggcagacgccttgcttta

SEQ ID NO: 3433139 - DNA, 25 bp, Homo sapien
gtgtgggtgaacttttcctggcagc

SEQ ID NO: 3433140 - DNA, 25 bp, Homo sapien
cttcgccagcaaagcccgggtgtgg

SEQ ID NO: 3433141 - DNA, 25 bp, Homo sapien
gcgtgcctgcggcagacgccttgct

SEQ ID NO: 3433142 - DNA, 25 bp, Homo sapien
ctcaggagcctcaggtgcaccaagg

SEQ ID NO: 3433143 - DNA, 25 bp, Homo sapien
gcttccttgagtggtatcgttcctg

SEQ ID NO: 3433144 - DNA, 25 bp, Homo sapien
aggagcctcaggtgcaccaagggcc

SEQ ID NO: 3433145 - DNA, 25 bp, Homo sapien
cgttcctgagcgagtaccatctcca

SEQ ID NO: 3433146 - DNA, 25 bp, Homo sapien
tgagcttggcgtcagcccagtagag

SEQ ID NO: 3433147 - DNA, 25 bp, Homo sapien
tcaatccggggcgtctcaccccagt

SEQ ID NO: 3433148 - DNA, 25 bp, Homo sapien
aagctgagcttggcgtcagcccagt

SEQ ID NO: 3433149 - DNA, 25 bp, Homo sapien
atgatcttccgggtgctgccatcca

SEQ ID NO: 3433150 - DNA, 25 bp, Homo sapien
ggatggagcgggtctgccagtctgt

SEQ ID NO: 3433151 - DNA, 25 bp, Homo sapien
acctggatgtccatgggtgagtaga

SEQ ID NO: 3433152 - DNA, 25 bp, Homo sapien
ccccagtgcgcttgttgcaggcatg

SEQ ID NO: 3433153 - DNA, 25 bp, Homo sapien
aggcatggatggagcgggtctgcca

SEQ ID NO: 3433154 - DNA, 25 bp, Homo sapien
tgccttacacgtcctgccgttgtcc

SEQ ID NO: 3433155 - DNA, 25 bp, Homo sapien
cgcatgtgtagaaaggctcgcttgg

SEQ ID NO: 3433156 - DNA, 25 bp, Homo sapien
gggcaggcgcatgtgtagaaaggct

SEQ ID NO: 3433157 - DNA, 25 bp, Homo sapien
caggcgcatgtgtagaaaggctcgc

SEQ ID NO: 3433158 - DNA, 25 bp, Homo sapien
cgagctgcatcctgaacgtgtgtga

SEQ ID NO: 3433159 - DNA, 25 bp, Homo sapien
cccgaaggcgagctgcatcctgaac

SEQ ID NO: 3433160 - DNA, 25 bp, Homo sapien
tggctatcccaggcccgggagcatc

SEQ ID NO: 3433161 - DNA, 25 bp, Homo sapien
cgtgtgtgatttcccgaagggcccg

SEQ ID NO: 3433162 - DNA, 25 bp, Homo sapien
gatcctgtgccaagtgaccataggg

SEQ ID NO: 3433163 - DNA, 25 bp, Homo sapien
gagagtgaccaagtcagtgccggcc

SEQ ID NO: 3433164 - DNA, 25 bp, Homo sapien
gaaagctgagaatcggcctctgctg

SEQ ID NO: 3433165 - DNA, 25 bp, Homo sapien
catagggtcacaaagcacaagggaa

SEQ ID NO: 3433166 - DNA, 25 bp, Homo sapien
ctcatcacccagccgcagggccccg

SEQ ID NO: 3433167 - DNA, 25 bp, Homo sapien
tcatcacccagccgcagggccccgg

SEQ ID NO: 3433168 - DNA, 25 bp, Homo sapien
cacccagccgcagggccccggccat

SEQ ID NO: 3433169 - DNA, 25 bp, Homo sapien
atcacccagccgcagggccccggcc

SEQ ID NO: 3433170 - DNA, 25 bp, Homo sapien
aatgttttccttgctacagcgaacg

SEQ ID NO: 3433171 - DNA, 25 bp, Homo sapien
tgaatgggtttatccttagaggctc

SEQ ID NO: 3433172 - DNA, 25 bp, Homo sapien
cgcgcctgaccctaaaagtcgattt

SEQ ID NO: 3433173 - DNA, 25 bp, Homo sapien
tagaggctctcggtctctaagggag

SEQ ID NO: 3433174 - DNA, 25 bp, Homo sapien
atctgcaaatagaagggagccgctc

SEQ ID NO: 3433175 - DNA, 25 bp, Homo sapien
tgacacttaagtgggggcatctccc

SEQ ID NO: 3433176 - DNA, 25 bp, Homo sapien
tgccagtgaggtggaaaggcctgtc

SEQ ID NO: 3433177 - DNA, 25 bp, Homo sapien
aagggccgtaaagcaccgcaggctt

SEQ ID NO: 3433178 - DNA, 25 bp, Homo sapien
ggcacagcgcaagacgaatcacgct

SEQ ID NO: 3433179 - DNA, 25 bp, Homo sapien
gaatcacgcttgacctcagcagtgt

SEQ ID NO: 3433180 - DNA, 25 bp, Homo sapien
agaactttccaatgagactgccagg

SEQ ID NO: 3433181 - DNA, 25 bp, Homo sapien
cagagactccacttcacgaaaggtc

SEQ ID NO: 3433182 - DNA, 25 bp, Homo sapien
cccactccacaggacgcacggagac

SEQ ID NO: 3433183 - DNA, 25 bp, Homo sapien
ccacaggacgcacggagacccccca

SEQ ID NO: 3433184 - DNA, 25 bp, Homo sapien
cactccacaggacgcacggagaccc

SEQ ID NO: 3433185 - DNA, 25 bp, Homo sapien
cacccactccacaggacgcacggag

SEQ ID NO: 3433186 - DNA, 25 bp, Homo sapien
catctgagcaacagggcccagggat

SEQ ID NO: 3433187 - DNA, 25 bp, Homo sapien
ctgagcaacagggcccagggatccg

SEQ ID NO: 3433188 - DNA, 25 bp, Homo sapien
tgagagcatctgagcaacagggccc

SEQ ID NO: 3433189 - DNA, 25 bp, Homo sapien
ctgagagcatctgagcaacagggcc

SEQ ID NO: 3433190 - DNA, 25 bp, Homo sapien
aagagaagcttaactcaggctccct

SEQ ID NO: 3433191 - DNA, 25 bp, Homo sapien
caaccggcacaagagaagcttaact

SEQ ID NO: 3433192 - DNA, 25 bp, Homo sapien
ggcacaagagaagcttaactcaggc

SEQ ID NO: 3433193 - DNA, 25 bp, Homo sapien
gcgtacaaccggcacaagagaagct

SEQ ID NO: 3433194 - DNA, 25 bp, Homo sapien
tggagacaggtgcaatggggtcagg

SEQ ID NO: 3433195 - DNA, 25 bp, Homo sapien
acaggtgcaatggggtcaggggtca

SEQ ID NO: 3433196 - DNA, 25 bp, Homo sapien
tgtggagacaggtgcaatggggtca

SEQ ID NO: 3433197 - DNA, 25 bp, Homo sapien
gagacaggtgcaatggggtcagggg

SEQ ID NO: 3433198 - DNA, 25 bp, Homo sapien
ccagtagacatagccctctagcggg

SEQ ID NO: 3433199 - DNA, 25 bp, Homo sapien
tcggtccagtagaggtttcgggcca

SEQ ID NO: 3433200 - DNA, 25 bp, Homo sapien
gtgtccagcgagatcctccgtaggt

SEQ ID NO: 3433201 - DNA, 25 bp, Homo sapien
ctctagcgggtcgtagtcgatggca

SEQ ID NO: 3433202 - DNA, 25 bp, Homo sapien
gggacttcccatcggcacccacagc

SEQ ID NO: 3433203 - DNA, 25 bp, Homo sapien
gctcctctgggacttcccatcggca

SEQ ID NO: 3433204 - DNA, 25 bp, Homo sapien
tgggacttcccatcggcacccacag

SEQ ID NO: 3433205 - DNA, 25 bp, Homo sapien
cctctgggacttcccatcggcaccc

SEQ ID NO: 3433206 - DNA, 25 bp, Homo sapien
gtagatgctggcgtcggtaaacgtc

SEQ ID NO: 3433207 - DNA, 25 bp, Homo sapien
aacatcggtgttggtaaatgctggt

SEQ ID NO: 3433208 - DNA, 25 bp, Homo sapien
tagatgctggcgtcggtaaacgtcg

SEQ ID NO: 3433209 - DNA, 25 bp, Homo sapien
acgtcggcgttggtaaacatcggtg

SEQ ID NO: 3433210 - DNA, 25 bp, Homo sapien
cagtagatgtcagtgtcagtaaatg

SEQ ID NO: 3433211 - DNA, 25 bp, Homo sapien
tcagtagatgtcagtgtcagtaaat

SEQ ID NO: 3433212 - DNA, 25 bp, Homo sapien
tccaagttggcacactcgattttag

SEQ ID NO: 3433213 - DNA, 25 bp, Homo sapien
cacactcgattttagggttctctcc

SEQ ID NO: 3433214 - DNA, 25 bp, Homo sapien
gttggcacactcgattttagggttc

SEQ ID NO: 3433215 - DNA, 25 bp, Homo sapien
tgcccatccaagttggcacactcga

SEQ ID NO: 3433216 - DNA, 25 bp, Homo sapien
tcggtgcctcgccaatacgtacatc

SEQ ID NO: 3433217 - DNA, 25 bp, Homo sapien
tggcctcctggatcaaacatgtcca

SEQ ID NO: 3433218 - DNA, 25 bp, Homo sapien
gccaaatagcagagcacaggcaccc

SEQ ID NO: 3433219 - DNA, 25 bp, Homo sapien
gccaatacgtacatctggctgcagg

SEQ ID NO: 3433220 - DNA, 25 bp, Homo sapien
ccgagccaagcctctgggcgtcagg

SEQ ID NO: 3433221 - DNA, 25 bp, Homo sapien
gatgcagagaacgtgcctgtcctgg

SEQ ID NO: 3433222 - DNA, 25 bp, Homo sapien
cccaggaacgccagtgccggaagag

SEQ ID NO: 3433223 - DNA, 25 bp, Homo sapien
agttcagaaataacaggggccaaat

SEQ ID NO: 3433224 - DNA, 25 bp, Homo sapien
ttccactcacaataacagggctggg

SEQ ID NO: 3433225 - DNA, 25 bp, Homo sapien
cccagccctggcgtacaatgaagaa

SEQ ID NO: 3433226 - DNA, 25 bp, Homo sapien
gcagcacagaaccactccagggagg

SEQ ID NO: 3433227 - DNA, 25 bp, Homo sapien
gggctcacagtagcgggcgaaccct

SEQ ID NO: 3433228 - DNA, 25 bp, Homo sapien
tgtgtgacactcagaaaacatctga

SEQ ID NO: 3433229 - DNA, 25 bp, Homo sapien
ctgtgtgtgacactcagaaaacatc

SEQ ID NO: 3433230 - DNA, 25 bp, Homo sapien
tgtgacactcagaaaacatctgagg

SEQ ID NO: 3433231 - DNA, 25 bp, Homo sapien
tgacactcagaaaacatctgagggg

SEQ ID NO: 3433232 - DNA, 25 bp, Homo sapien
cacgcaaaggccatgaatgcacaca

SEQ ID NO: 3433233 - DNA, 25 bp, Homo sapien
cccatgcctggatgctccggtgtgc

SEQ ID NO: 3433234 - DNA, 25 bp, Homo sapien
tgcctggatgctccggtgtgcaatg

SEQ ID NO: 3433235 - DNA, 25 bp, Homo sapien
tccacaacaggaagacacgcaaagg

SEQ ID NO: 3433236 - DNA, 25 bp, Homo sapien
cagaaaagcgacaagtcctctgttt

SEQ ID NO: 3433237 - DNA, 25 bp, Homo sapien
gaaaagcgacaagtcctctgttttg

SEQ ID NO: 3433238 - DNA, 25 bp, Homo sapien
aagcgacaagtcctctgttttgcag

SEQ ID NO: 3433239 - DNA, 25 bp, Homo sapien
gcgacaagtcctctgttttgcaggt

SEQ ID NO: 3433240 - DNA, 25 bp, Homo sapien
cctggagcaaatataaggacctggg

SEQ ID NO: 3433241 - DNA, 25 bp, Homo sapien
cacacagagcaactgcaggacctgg

SEQ ID NO: 3433242 - DNA, 25 bp, Homo sapien
cctggggcagttatgagcaactgca

SEQ ID NO: 3433243 - DNA, 25 bp, Homo sapien
agttatgagcaactgcagggcctgg

SEQ ID NO: 3433244 - DNA, 25 bp, Homo sapien
aacaagacgggttcaatgcccaaga

SEQ ID NO: 3433245 - DNA, 25 bp, Homo sapien
gagccgcaactttacctgcaccttg

SEQ ID NO: 3433246 - DNA, 25 bp, Homo sapien
ggtaccataaaacaccaggtagcat

SEQ ID NO: 3433247 - DNA, 25 bp, Homo sapien
ctgagctgccccaaacaagacgggt

SEQ ID NO: 3433248 - DNA, 25 bp, Homo sapien
acccaaaaatgtgcgggagcttgtc

SEQ ID NO: 3433249 - DNA, 25 bp, Homo sapien
agggtccgcctcttcgtcccatcaa

SEQ ID NO: 3433250 - DNA, 25 bp, Homo sapien
ttgtgcacccgctcgatgctgcggc

SEQ ID NO: 3433251 - DNA, 25 bp, Homo sapien
atgctgcggcgctgccagtcagtcc

SEQ ID NO: 3433252 - DNA, 25 bp, Homo sapien
cttttcaggaagagacaaatcattg

SEQ ID NO: 3433253 - DNA, 25 bp, Homo sapien
tgctctctccagtgtaactctgtca

SEQ ID NO: 3433254 - DNA, 25 bp, Homo sapien
cctcggggagcgtcctgaagatcct

SEQ ID NO: 3433255 - DNA, 25 bp, Homo sapien
attgtgccagacaacgacctcctcg

SEQ ID NO: 3433256 - DNA, 25 bp, Homo sapien
cctcaggcacgatgcaggtcttcat

SEQ ID NO: 3433257 - DNA, 25 bp, Homo sapien
ccgttcctgtccgcacacgggttgg

SEQ ID NO: 3433258 - DNA, 25 bp, Homo sapien
ccgtgagcgggatggccacgtcgtt

SEQ ID NO: 3433259 - DNA, 25 bp, Homo sapien
caccgggttgcgtggggtgtgaaga

SEQ ID NO: 3433260 - DNA, 25 bp, Homo sapien
tgtgtgcacgttctggcccacgcta

SEQ ID NO: 3433261 - DNA, 25 bp, Homo sapien
aggttttcccataaaggctgcctgt

SEQ ID NO: 3433262 - DNA, 25 bp, Homo sapien
tgaactgcgttacaataaatacgat

SEQ ID NO: 3433263 - DNA, 25 bp, Homo sapien
gattagcttgaactgcgttacaata

SEQ ID NO: 3433264 - DNA, 25 bp, Homo sapien
cagcgacctcgggttgtccaagtcc

SEQ ID NO: 3433265 - DNA, 25 bp, Homo sapien
cccgttcatgaaggcgcggctgatg

SEQ ID NO: 3433266 - DNA, 25 bp, Homo sapien
ccagtgtcggcccagtagaggttct

SEQ ID NO: 3433267 - DNA, 25 bp, Homo sapien
tccacacgaggacttgccggaactg

SEQ ID NO: 3433268 - DNA, 25 bp, Homo sapien
ttgtccaccagcgtcatgcagttgg

SEQ ID NO: 3433269 - DNA, 25 bp, Homo sapien
tagtcaatggtgaggtcgttggccc

SEQ ID NO: 3433270 - DNA, 25 bp, Homo sapien
gcagttggtcccgtccatgaaggcc

SEQ ID NO: 3433271 - DNA, 25 bp, Homo sapien
ccagcatgttggacgactcgatcat

SEQ ID NO: 3433272 - DNA, 25 bp, Homo sapien
cggtgactggtttctcgcctggcaa

SEQ ID NO: 3433273 - DNA, 25 bp, Homo sapien
caacaggtttgcatgcggcctggat

SEQ ID NO: 3433274 - DNA, 25 bp, Homo sapien
tgctactggcctcacaagtcagggt

SEQ ID NO: 3433275 - DNA, 25 bp, Homo sapien
cgaagtcacgtgcaaaccttgctac

SEQ ID NO: 3433276 - DNA, 25 bp, Homo sapien
tgtactgcgtcagaccgaacgggtg

SEQ ID NO: 3433277 - DNA, 25 bp, Homo sapien
gatgtccatcacgaagtccaggtgg

SEQ ID NO: 3433278 - DNA, 25 bp, Homo sapien
tgcgggagatcgtcggcaatcacga

SEQ ID NO: 3433279 - DNA, 25 bp, Homo sapien
tgttgtgcatacagtcattgaggcc

SEQ ID NO: 3433280 - DNA, 25 bp, Homo sapien
gctcgcttgatgttctggcgcccat

SEQ ID NO: 3433281 - DNA, 25 bp, Homo sapien
gctgtgctggtcgtccgggatcatc

SEQ ID NO: 3433282 - DNA, 25 bp, Homo sapien
tagtcgatggctttgacgttcctca

SEQ ID NO: 3433283 - DNA, 25 bp, Homo sapien
cacccagtagatgaacttgtccagt

SEQ ID NO: 3433284 - DNA, 25 bp, Homo sapien
cgcatctcagggtcataccctgtga

SEQ ID NO: 3433285 - DNA, 25 bp, Homo sapien
cacagtctcggggttccacgcatct

SEQ ID NO: 3433286 - DNA, 25 bp, Homo sapien
tgtgactacataatcgaagcccaag

SEQ ID NO: 3433287 - DNA, 25 bp, Homo sapien
taatcgaagcccaagtcatcattca

SEQ ID NO: 3433288 - DNA, 25 bp, Homo sapien
agaggcaatgatcacagctgcccag

SEQ ID NO: 3433289 - DNA, 25 bp, Homo sapien
cccaggagagaagctccagggagcc

SEQ ID NO: 3433290 - DNA, 25 bp, Homo sapien
caggagagaagctccagggagccag

SEQ ID NO: 3433291 - DNA, 25 bp, Homo sapien
cacagcagaggcaatgatcacagct

SEQ ID NO: 3433292 - DNA, 25 bp, Homo sapien
gcagaggccacacttctcaagttta

SEQ ID NO: 3433293 - DNA, 25 bp, Homo sapien
acagcagaggccacacttctcaagt

SEQ ID NO: 3433294 - DNA, 25 bp, Homo sapien
agaggccacacttctcaagtttagc

SEQ ID NO: 3433295 - DNA, 25 bp, Homo sapien
cagcagaggccacacttctcaagtt

SEQ ID NO: 3433296 - DNA, 25 bp, Homo sapien
gcactggcggagacccccgggcact

SEQ ID NO: 3433297 - DNA, 25 bp, Homo sapien
gcactggcggagacccctggcactg

SEQ ID NO: 3433298 - DNA, 25 bp, Homo sapien
gacccctgggcactggcggagaccc

SEQ ID NO: 3433299 - DNA, 25 bp, Homo sapien
tgggcactggcggagacccctggca

SEQ ID NO: 3433300 - DNA, 25 bp, Homo sapien
taagacaaagaaaccaagactcctg

SEQ ID NO: 3433301 - DNA, 25 bp, Homo sapien
agacaaagaaaccaagactcctgag

SEQ ID NO: 3433302 - DNA, 25 bp, Homo sapien
ctgtaagacaaagaaaccaagactc

SEQ ID NO: 3433303 - DNA, 25 bp, Homo sapien
acaaagaaaccaagactcctgagca

SEQ ID NO: 3433304 - DNA, 25 bp, Homo sapien
aacagtgtccggctgtagatgtcga

SEQ ID NO: 3433305 - DNA, 25 bp, Homo sapien
tattggtggcctcgcacgtccagaa

SEQ ID NO: 3433306 - DNA, 25 bp, Homo sapien
cgttgacgacgatggccctgggctt

SEQ ID NO: 3433307 - DNA, 25 bp, Homo sapien
gctcagcctgtggacgttgatggta

SEQ ID NO: 3433308 - DNA, 25 bp, Homo sapien
tctcaatgcgcttcaggtccgcgtc

SEQ ID NO: 3433309 - DNA, 25 bp, Homo sapien
ccagggctgcgcgttcgatcttggc

SEQ ID NO: 3433310 - DNA, 25 bp, Homo sapien
acccagaacagcttgcccagtgtgt

SEQ ID NO: 3433311 - DNA, 25 bp, Homo sapien
tggctgcccggtcctgcatgttggt

SEQ ID NO: 3433312 - DNA, 25 bp, Homo sapien
ccagtagagatgcttgccaaggatg

SEQ ID NO: 3433313 - DNA, 25 bp, Homo sapien
tcatctgctgctggcggtcgatcca

SEQ ID NO: 3433314 - DNA, 25 bp, Homo sapien
tggtcttctccacacgctcgatcat

SEQ ID NO: 3433315 - DNA, 25 bp, Homo sapien
cagaggctgcacgatgttggcgtcc

SEQ ID NO: 3433316 - DNA, 25 bp, Homo sapien
aacaagacaaacagaggtcaggctc

SEQ ID NO: 3433317 - DNA, 25 bp, Homo sapien
gacaaacagaggtcaggctctgtct

SEQ ID NO: 3433318 - DNA, 25 bp, Homo sapien
aaaacaagacaaacagaggtcaggc

SEQ ID NO: 3433319 - DNA, 25 bp, Homo sapien
aagacaaaacaagacaaacagaggt

SEQ ID NO: 3433320 - DNA, 25 bp, Homo sapien
ccttggcaatacagatgtgggagca

SEQ ID NO: 3433321 - DNA, 25 bp, Homo sapien
atgagcaccgtggtgtcccatcacc

SEQ ID NO: 3433322 - DNA, 25 bp, Homo sapien
agcacgaggtggactgggcatgagc

SEQ ID NO: 3433323 - DNA, 25 bp, Homo sapien
cagccaccattgtcacgggcacatg

SEQ ID NO: 3433324 - DNA, 25 bp, Homo sapien
gcaggagggctgaggacacccccgg

SEQ ID NO: 3433325 - DNA, 25 bp, Homo sapien
ctgcagaagacgggacaaagcacag

SEQ ID NO: 3433326 - DNA, 25 bp, Homo sapien
agaagacgggacaaagcacaggcag

SEQ ID NO: 3433327 - DNA, 25 bp, Homo sapien
gcagaagacgggacaaagcacaggc

SEQ ID NO: 3433328 - DNA, 25 bp, Homo sapien
ctgttgcgggtgtgggactgctaca

SEQ ID NO: 3433329 - DNA, 25 bp, Homo sapien
gaccagcgtgcgcatagcaaggcag

SEQ ID NO: 3433330 - DNA, 25 bp, Homo sapien
cgggtgtgggactgctacagaagaa

SEQ ID NO: 3433331 - DNA, 25 bp, Homo sapien
agaggacctgtcagcacgtcccagg

SEQ ID NO: 3433332 - DNA, 25 bp, Homo sapien
tgtggcacatgcaaactggtccggg

SEQ ID NO: 3433333 - DNA, 25 bp, Homo sapien
tctgagcggtcctgacagtctgcct

SEQ ID NO: 3433334 - DNA, 25 bp, Homo sapien
gatacagtcgatctcccctgtggca

SEQ ID NO: 3433335 - DNA, 25 bp, Homo sapien
atcgcactcgggaaagccgtcacag

SEQ ID NO: 3433336 - DNA, 25 bp, Homo sapien
aaggaagatcctgctggtcagagag

SEQ ID NO: 3433337 - DNA, 25 bp, Homo sapien
gagcaaatctctttatacctcctga

SEQ ID NO: 3433338 - DNA, 25 bp, Homo sapien
caggatgcctgagcaaatctcttta

SEQ ID NO: 3433339 - DNA, 25 bp, Homo sapien
taaaggaagatcctgctggtcagag

SEQ ID NO: 3433340 - DNA, 25 bp, Homo sapien
tctttgtgaatgaggacgtaggaca

SEQ ID NO: 3433341 - DNA, 25 bp, Homo sapien
gaaaaacatgcagggaggttactcc

SEQ ID NO: 3433342 - DNA, 25 bp, Homo sapien
caatggtcaatgagctggaaggact

SEQ ID NO: 3433343 - DNA, 25 bp, Homo sapien
gaattatctaacagagccggtggct

SEQ ID NO: 3433344 - DNA, 25 bp, Homo sapien
atgaggacacactggccgctcgcac

SEQ ID NO: 3433345 - DNA, 25 bp, Homo sapien
gccgctcgcacaccggaactggttg

SEQ ID NO: 3433346 - DNA, 25 bp, Homo sapien
cacacatgagctcgtcggagccgtc

SEQ ID NO: 3433347 - DNA, 25 bp, Homo sapien
ggaaggagtcgcactgctgtttgat

SEQ ID NO: 3433348 - DNA, 25 bp, Homo sapien
cacgcgctggcacacaaaatagaca

SEQ ID NO: 3433349 - DNA, 25 bp, Homo sapien
gatgatgccaatgacgggcccgatg

SEQ ID NO: 3433350 - DNA, 25 bp, Homo sapien
aaaatagacaccacccatgacgaag

SEQ ID NO: 3433351 - DNA, 25 bp, Homo sapien
ctgacatactcgtgcgggaagggcc

SEQ ID NO: 3433352 - DNA, 25 bp, Homo sapien
ggctcacggagctcatcatggactt

SEQ ID NO: 3433353 - DNA, 25 bp, Homo sapien
atcatggactttccgcatgcgatgc

SEQ ID NO: 3433354 - DNA, 25 bp, Homo sapien
tacagcgtggccttcgtgctggacg

SEQ ID NO: 3433355 - DNA, 25 bp, Homo sapien
cctgtgacgtggttccggtcgtaga

SEQ ID NO: 3433356 - DNA, 25 bp, Homo sapien
atgcacaaaaccatccagctgtttt

SEQ ID NO: 3433357 - DNA, 25 bp, Homo sapien
tgtgtttgtctgtcatgcacaaaac

SEQ ID NO: 3433358 - DNA, 25 bp, Homo sapien
gtttgtctgtcatgcacaaaaccat

SEQ ID NO: 3433359 - DNA, 25 bp, Homo sapien
tgcacaaaaccatccagctgttttc

SEQ ID NO: 3433360 - DNA, 25 bp, Homo sapien
ggaagcagaagggggctggactcac

SEQ ID NO: 3433361 - DNA, 25 bp, Homo sapien
gcgaggccccagaggaagcagaagg

SEQ ID NO: 3433362 - DNA, 25 bp, Homo sapien
tggcgaggccccagaggaagcagaa

SEQ ID NO: 3433363 - DNA, 25 bp, Homo sapien
gaggaagcagaagggggctggactc

SEQ ID NO: 3433364 - DNA, 25 bp, Homo sapien
tcccaaagggtgtagggcttatgtg

SEQ ID NO: 3433365 - DNA, 25 bp, Homo sapien
ggcaccccaacccaacatgcagctt

SEQ ID NO: 3433366 - DNA, 25 bp, Homo sapien
tgtagggcttatgtgggtctccaag

SEQ ID NO: 3433367 - DNA, 25 bp, Homo sapien
ttccacaagtgccactgacggcacc

SEQ ID NO: 3433368 - DNA, 25 bp, Homo sapien
aggacttcggccagttccctttgtg

SEQ ID NO: 3433369 - DNA, 25 bp, Homo sapien
ccccagcagtaggagatgtccccac

SEQ ID NO: 3433370 - DNA, 25 bp, Homo sapien
caggacttcggccagttccctttgt

SEQ ID NO: 3433371 - DNA, 25 bp, Homo sapien
acaggacttcggccagttccctttg

SEQ ID NO: 3433372 - DNA, 25 bp, Homo sapien
caagccagggtgacttagagcctcg

SEQ ID NO: 3433373 - DNA, 25 bp, Homo sapien
tgacttagagcctcgccagcctggg

SEQ ID NO: 3433374 - DNA, 25 bp, Homo sapien
gagagccaagccagggtgacttaga

SEQ ID NO: 3433375 - DNA, 25 bp, Homo sapien
gccagttggcaaaacctggggacag

SEQ ID NO: 3433376 - DNA, 25 bp, Homo sapien
tgtacggtctcgcagtggccggaat

SEQ ID NO: 3433377 - DNA, 25 bp, Homo sapien
tcgcagtggccggaatgtttgaaga

SEQ ID NO: 3433378 - DNA, 25 bp, Homo sapien
ttgaagagtagaacatgtccatgtt

SEQ ID NO: 3433379 - DNA, 25 bp, Homo sapien
gccggaatgtttgaagagtagaaca

SEQ ID NO: 3433380 - DNA, 25 bp, Homo sapien
tgagcagccccgttggcttcccggg

SEQ ID NO: 3433381 - DNA, 25 bp, Homo sapien
gggtgggccacgttgcctgacacca

SEQ ID NO: 3433382 - DNA, 25 bp, Homo sapien
tgacaccactgggttaaaggtcagg

SEQ ID NO: 3433383 - DNA, 25 bp, Homo sapien
tgtggcaagtgagcagcccggacca

SEQ ID NO: 3433384 - DNA, 25 bp, Homo sapien
tccagaagatgcaggccggactctg

SEQ ID NO: 3433385 - DNA, 25 bp, Homo sapien
taaggagaacgaggcctctagagcc

SEQ ID NO: 3433386 - DNA, 25 bp, Homo sapien
tggtcccacctctaccatgggcatg

SEQ ID NO: 3433387 - DNA, 25 bp, Homo sapien
ggaacttacttgacctcttcgagct

SEQ ID NO: 3433388 - DNA, 25 bp, Homo sapien
ggctggcgctgtagtcgctgtcaca

SEQ ID NO: 3433389 - DNA, 25 bp, Homo sapien
tgtcacacacgtcggtgctgcaggg

SEQ ID NO: 3433390 - DNA, 25 bp, Homo sapien
tgtcctccgccgacaggtactggct

SEQ ID NO: 3433391 - DNA, 25 bp, Homo sapien
gatggaagtagctcctctcggtggc

SEQ ID NO: 3433392 - DNA, 25 bp, Homo sapien
taaaactatttacaggggcacagag

SEQ ID NO: 3433393 - DNA, 25 bp, Homo sapien
aaaactatttacaggggcacagaga

SEQ ID NO: 3433394 - DNA, 25 bp, Homo sapien
ctgcccaccccatcacagttcacat

SEQ ID NO: 3433395 - DNA, 25 bp, Homo sapien
taagtttataaatatttctccactg

SEQ ID NO: 3433396 - DNA, 25 bp, Homo sapien
tttctccactgtacaaagttctccc

SEQ ID NO: 3433397 - DNA, 25 bp, Homo sapien
tgtacaaagttctcccagccctgcc

SEQ ID NO: 3433398 - DNA, 25 bp, Homo sapien
cctccaccatgctgagggaagtcag

SEQ ID NO: 3433399 - DNA, 25 bp, Homo sapien
ccctccaccatgctgagggaagtca

SEQ ID NO: 3433400 - DNA, 25 bp, Homo sapien
ttctcgggaacaagacctcccacag

SEQ ID NO: 3433401 - DNA, 25 bp, Homo sapien
agtggaaatagccaaactggcaaca

SEQ ID NO: 3433402 - DNA, 25 bp, Homo sapien
tggcaacatggactttcttcaactg

SEQ ID NO: 3433403 - DNA, 25 bp, Homo sapien
actttcttcaactgcccgggcgatg

SEQ ID NO: 3433404 - DNA, 25 bp, Homo sapien
ttcactgcattaagattcaataccg

SEQ ID NO: 3433405 - DNA, 25 bp, Homo sapien
gatatgaggggtcggcccatttcaa

SEQ ID NO: 3433406 - DNA, 25 bp, Homo sapien
gattcaataccgcttgggaagcagg

SEQ ID NO: 3433407 - DNA, 25 bp, Homo sapien
catttcaacgtggaaactgagctct

SEQ ID NO: 3433408 - DNA, 25 bp, Homo sapien
cgggaaacgcgctcaccgacaccat

SEQ ID NO: 3433409 - DNA, 25 bp, Homo sapien
accatcagcgaagcgcccaaaatgg

SEQ ID NO: 3433410 - DNA, 25 bp, Homo sapien
cgctagttgcgctcaggcgggaaac

SEQ ID NO: 3433411 - DNA, 25 bp, Homo sapien
aggtgcccacgacccgccgctagtt

SEQ ID NO: 3433412 - DNA, 25 bp, Homo sapien
ctcagctatggtctgattctcaaat

SEQ ID NO: 3433413 - DNA, 25 bp, Homo sapien
tctcaaattctcaattagttcattg

SEQ ID NO: 3433414 - DNA, 25 bp, Homo sapien
taaaaagctaggcaacctcatcctg

SEQ ID NO: 3433415 - DNA, 25 bp, Homo sapien
catcctgtcaatgttacttctattc

SEQ ID NO: 3433416 - DNA, 25 bp, Homo sapien
cctaagctggttagtgggtacacaa

SEQ ID NO: 3433417 - DNA, 25 bp, Homo sapien
gacacagggagccaaaggtatggca

SEQ ID NO: 3433418 - DNA, 25 bp, Homo sapien
tgggcacatgctgatatatactctt

SEQ ID NO: 3433419 - DNA, 25 bp, Homo sapien
tttgcaacaccataaagtaaagcag

SEQ ID NO: 3433420 - DNA, 25 bp, Homo sapien
gcacccaccactaagccggctaatt

SEQ ID NO: 3433421 - DNA, 25 bp, Homo sapien
acaggcacccaccactaagccggct

SEQ ID NO: 3433422 - DNA, 25 bp, Homo sapien
actacaggcacccaccactaagccg

SEQ ID NO: 3433423 - DNA, 25 bp, Homo sapien
caggcacccaccactaagccggcta

SEQ ID NO: 3433424 - DNA, 25 bp, Homo sapien
cgcctctgcccgtccgcgatcccat

SEQ ID NO: 3433425 - DNA, 25 bp, Homo sapien
gcgcctctgcccgtccgcgatccca

SEQ ID NO: 3433426 - DNA, 25 bp, Homo sapien
cctctgcccgtccgcgatcccatct

SEQ ID NO: 3433427 - DNA, 25 bp, Homo sapien
gcctctgcccgtccgcgatcccatc

SEQ ID NO: 3433428 - DNA, 25 bp, Homo sapien
tcacaccagccctattaacacaatt

SEQ ID NO: 3433429 - DNA, 25 bp, Homo sapien
caccagccctattaacacaatttaa

SEQ ID NO: 3433430 - DNA, 25 bp, Homo sapien
gccatcacaccagccctattaacac

SEQ ID NO: 3433431 - DNA, 25 bp, Homo sapien
cagccctattaacacaatttaagtt

SEQ ID NO: 3433432 - DNA, 25 bp, Homo sapien
gaatttaataccctgataaactcat

SEQ ID NO: 3433433 - DNA, 25 bp, Homo sapien
aaaagcataaattgagccatcatga

SEQ ID NO: 3433434 - DNA, 25 bp, Homo sapien
acacgctgccataccaacctaattt

SEQ ID NO: 3433435 - DNA, 25 bp, Homo sapien
tcatgaagtccagatgctcctcaac

SEQ ID NO: 3433436 - DNA, 25 bp, Homo sapien
ttgaagaaatataccaggccaggcg

SEQ ID NO: 3433437 - DNA, 25 bp, Homo sapien
tagagatgacctgcagagaaacgac

SEQ ID NO: 3433438 - DNA, 25 bp, Homo sapien
tataaaagtataggttgagcgtccc

SEQ ID NO: 3433439 - DNA, 25 bp, Homo sapien
aaacaatcatcgagccagaactggg

SEQ ID NO: 3433440 - DNA, 25 bp, Homo sapien
ttccttcctcgagacagatttggct

SEQ ID NO: 3433441 - DNA, 25 bp, Homo sapien
tgtgtcattatgtccctccacggct

SEQ ID NO: 3433442 - DNA, 25 bp, Homo sapien
taaccctcctcaatgaaggccatgg

SEQ ID NO: 3433443 - DNA, 25 bp, Homo sapien
aaatgaactccagtactagccccag

SEQ ID NO: 3433444 - DNA, 25 bp, Homo sapien
ccggccgggataattttagtatgat

SEQ ID NO: 3433445 - DNA, 25 bp, Homo sapien
aaaccaaggttctatcccacttctg

SEQ ID NO: 3433446 - DNA, 25 bp, Homo sapien
ttctgaccaccttaatgaccctctt

SEQ ID NO: 3433447 - DNA, 25 bp, Homo sapien
cttcctaaccgctatggccagactg

SEQ ID NO: 3433448 - DNA, 25 bp, Homo sapien
aatgtgttggtgtaggttcatcaac

SEQ ID NO: 3433449 - DNA, 25 bp, Homo sapien
ggtgtaggttcatcaactctaacaa

SEQ ID NO: 3433450 - DNA, 25 bp, Homo sapien
ctcctccatattttttgctcaattt

SEQ ID NO: 3433451 - DNA, 25 bp, Homo sapien
tgtaacaccaagagtacaccctaaa

SEQ ID NO: 3433452 - DNA, 25 bp, Homo sapien
taatcatactccttggtatctgccg

SEQ ID NO: 3433453 - DNA, 25 bp, Homo sapien
acctgcacacggatatttacagcat

SEQ ID NO: 3433454 - DNA, 25 bp, Homo sapien
aattgggaagcaaccaagctatctt

SEQ ID NO: 3433455 - DNA, 25 bp, Homo sapien
cattacagacagcaagtaagcattt

SEQ ID NO: 3433456 - DNA, 25 bp, Homo sapien
cagaaaactaggaacagtaagaagc

SEQ ID NO: 3433457 - DNA, 25 bp, Homo sapien
cactaagatcaggaagcgggcaaag

SEQ ID NO: 3433458 - DNA, 25 bp, Homo sapien
tggtcagaaattaaagctttcccac

SEQ ID NO: 3433459 - DNA, 25 bp, Homo sapien
tatcaaaaacctacaactatcatca

SEQ ID NO: 3433460 - DNA, 25 bp, Homo sapien
atcacatcagtaggttcaagaagac

SEQ ID NO: 3433461 - DNA, 25 bp, Homo sapien
tgacccatcacatcagtaggttcaa

SEQ ID NO: 3433462 - DNA, 25 bp, Homo sapien
tttaataatcaaaaatctgtcgccg

SEQ ID NO: 3433463 - DNA, 25 bp, Homo sapien
tgctttaataatcaaaaatctgtcg

SEQ ID NO: 3433464 - DNA, 25 bp, Homo sapien
ttcggacacatcctacaacatgagt

SEQ ID NO: 3433465 - DNA, 25 bp, Homo sapien
tagtgtttaatgcaagctggtccaa

SEQ ID NO: 3433466 - DNA, 25 bp, Homo sapien
tgtaacttatgtttggcccaaggca

SEQ ID NO: 3433467 - DNA, 25 bp, Homo sapien
gagacagtagaacggcagttgccag

SEQ ID NO: 3433468 - DNA, 25 bp, Homo sapien
gaataatagtgataatggctagaca

SEQ ID NO: 3433469 - DNA, 25 bp, Homo sapien
tagacatgttaactaccaccaatgt

SEQ ID NO: 3433470 - DNA, 25 bp, Homo sapien
tggcagcaccttttgattacataat

SEQ ID NO: 3433471 - DNA, 25 bp, Homo sapien
acccagggctgaaaattgcaacaag

SEQ ID NO: 3433472 - DNA, 25 bp, Homo sapien
aaaacgggatgctctcttgacaggg

SEQ ID NO: 3433473 - DNA, 25 bp, Homo sapien
caaaaagttctatacagtcaggtgc

SEQ ID NO: 3433474 - DNA, 25 bp, Homo sapien
gaggctgatttggtctactggcacg

SEQ ID NO: 3433475 - DNA, 25 bp, Homo sapien
tgaagtaaattgaaaccagacccca

SEQ ID NO: 3433476 - DNA, 25 bp, Homo sapien
gccgaggaagttctgtcactatttg

SEQ ID NO: 3433477 - DNA, 25 bp, Homo sapien
cacaagggtattatatgacccctcc

SEQ ID NO: 3433478 - DNA, 25 bp, Homo sapien
tatatgacccctccatatggccgag

SEQ ID NO: 3433479 - DNA, 25 bp, Homo sapien
tttgagcaagtcaccacatctctct

SEQ ID NO: 3433480 - DNA, 25 bp, Homo sapien
tagtaatgtaattaaagccacatac

SEQ ID NO: 3433481 - DNA, 25 bp, Homo sapien
cattcaaacagtagtaatgtaatta

SEQ ID NO: 3433482 - DNA, 25 bp, Homo sapien
ttcttcattcaaacagtagtaatgt

SEQ ID NO: 3433483 - DNA, 25 bp, Homo sapien
acagtagtaatgtaattaaagccac

SEQ ID NO: 3433484 - DNA, 25 bp, Homo sapien
gcactatcccaagctccaagagtta

SEQ ID NO: 3433485 - DNA, 25 bp, Homo sapien
caaaacaagatacctacaacgcggg

SEQ ID NO: 3433486 - DNA, 25 bp, Homo sapien
gaaagggaaacactctacggctgag

SEQ ID NO: 3433487 - DNA, 25 bp, Homo sapien
taaaccttctaatgtgtagctggca

SEQ ID NO: 3433488 - DNA, 25 bp, Homo sapien
agcacaggagaactcaagcctaagg

SEQ ID NO: 3433489 - DNA, 25 bp, Homo sapien
gcacaggagaactcaagcctaaggg

SEQ ID NO: 3433490 - DNA, 25 bp, Homo sapien
tggcatcaggaagtcccaggacagg

SEQ ID NO: 3433491 - DNA, 25 bp, Homo sapien
caatgcctagcacaccgtaaattta

SEQ ID NO: 3433492 - DNA, 25 bp, Homo sapien
ttgctgcaagtaccctcacacgttt

SEQ ID NO: 3433493 - DNA, 25 bp, Homo sapien
cattagacagacaggtggtatatca

SEQ ID NO: 3433494 - DNA, 25 bp, Homo sapien
agcctgggtgatggatcaagactcc

SEQ ID NO: 3433495 - DNA, 25 bp, Homo sapien
gcctgggtgatggatcaagactcca

SEQ ID NO: 3433496 - DNA, 25 bp, Homo sapien
cctgggtgatggatcaagactccat

SEQ ID NO: 3433497 - DNA, 25 bp, Homo sapien
cagcctgggtgatggatcaagactc

SEQ ID NO: 3433498 - DNA, 25 bp, Homo sapien
catccctgttttatagtctaggaaa

SEQ ID NO: 3433499 - DNA, 25 bp, Homo sapien
taaacagcatctaagtgaacttgct

SEQ ID NO: 3433500 - DNA, 25 bp, Homo sapien
gcagcaggaatgaaaactatcctta

SEQ ID NO: 3433501 - DNA, 25 bp, Homo sapien
tacaaaccttttgcgctggcactgt

SEQ ID NO: 3433502 - DNA, 25 bp, Homo sapien
ggctcaggcttgagatcccagagct

SEQ ID NO: 3433503 - DNA, 25 bp, Homo sapien
tctgacgggtggaatgcttaaggcc

SEQ ID NO: 3433504 - DNA, 25 bp, Homo sapien
tagactaacagtcatgagcagacaa

SEQ ID NO: 3433505 - DNA, 25 bp, Homo sapien
cattagctggactttggagcaagca

SEQ ID NO: 3433506 - DNA, 25 bp, Homo sapien
tggtcctgggagatgttttctttcc

SEQ ID NO: 3433507 - DNA, 25 bp, Homo sapien
tcagcttctctccaactcccatcta

SEQ ID NO: 3433508 - DNA, 25 bp, Homo sapien
caactcccatctactccacatctgg

SEQ ID NO: 3433509 - DNA, 25 bp, Homo sapien
ccagcctgttgctgggcctgggctt

SEQ ID NO: 3433510 - DNA, 25 bp, Homo sapien
gtgggatatggatatgaaacaagct

SEQ ID NO: 3433511 - DNA, 25 bp, Homo sapien
ttagcagattagcaggaatacagtg

SEQ ID NO: 3433512 - DNA, 25 bp, Homo sapien
gcaggaatacagtgggatatggata

SEQ ID NO: 3433513 - DNA, 25 bp, Homo sapien
ttcctccaatttactgcattagcag

SEQ ID NO: 3433514 - DNA, 25 bp, Homo sapien
caaatatcaggtgcctactagagtc

SEQ ID NO: 3433515 - DNA, 25 bp, Homo sapien
taacaggaaaaagcagagtcactcc

SEQ ID NO: 3433516 - DNA, 25 bp, Homo sapien
cacaaaggagtaaaagcagctggtc

SEQ ID NO: 3433517 - DNA, 25 bp, Homo sapien
tgactgcttccaggcatgctgaaag

SEQ ID NO: 3433518 - DNA, 25 bp, Homo sapien
ttacaaagttcaactggccagagcc

SEQ ID NO: 3433519 - DNA, 25 bp, Homo sapien
agagccctgaggtaaaatggagtcc

SEQ ID NO: 3433520 - DNA, 25 bp, Homo sapien
tgggccttcgcttctatgtgtactc

SEQ ID NO: 3433521 - DNA, 25 bp, Homo sapien
tgctccccactattcggagttagaa

SEQ ID NO: 3433522 - DNA, 25 bp, Homo sapien
ttgtgccaggaaccatcaaacctcc

SEQ ID NO: 3433523 - DNA, 25 bp, Homo sapien
attgtgccaggaaccatcaaacctc

SEQ ID NO: 3433524 - DNA, 25 bp, Homo sapien
tgtggccacatgacagagtttcctc

SEQ ID NO: 3433525 - DNA, 25 bp, Homo sapien
cagagtttcctccattgtgccagga

SEQ ID NO: 3433526 - DNA, 25 bp, Homo sapien
gaaataagaaggtgttggcaaacca

SEQ ID NO: 3433527 - DNA, 25 bp, Homo sapien
cagggtatacgttcaccaatcaggt

SEQ ID NO: 3433528 - DNA, 25 bp, Homo sapien
cacagcctgccagttatgaatgatt

SEQ ID NO: 3433529 - DNA, 25 bp, Homo sapien
gagaagctatgcctaaaacctagat

SEQ ID NO: 3433530 - DNA, 25 bp, Homo sapien
tgtcttgttcctctattcgattagt

SEQ ID NO: 3433531 - DNA, 25 bp, Homo sapien
tgtgggatgacacaaagcgggggcc

SEQ ID NO: 3433532 - DNA, 25 bp, Homo sapien
gggctgtcttgttcctctattcgat

SEQ ID NO: 3433533 - DNA, 25 bp, Homo sapien
ggatgacacaaagcgggggcccaca

SEQ ID NO: 3433534 - DNA, 25 bp, Homo sapien
gaggactgatgttcagcacaaagct

SEQ ID NO: 3433535 - DNA, 25 bp, Homo sapien
ggagtcgatgtggaggactgatgtt

SEQ ID NO: 3433536 - DNA, 25 bp, Homo sapien
ggaggactgatgttcagcacaaagc

SEQ ID NO: 3433537 - DNA, 25 bp, Homo sapien
aagaggagtcgatgtggaggactga

SEQ ID NO: 3433538 - DNA, 25 bp, Homo sapien
agacatatttaaggatggcagccac

SEQ ID NO: 3433539 - DNA, 25 bp, Homo sapien
gatggcagccactgtgatgatccac

SEQ ID NO: 3433540 - DNA, 25 bp, Homo sapien
ggatggcagccactgtgatgatcca

SEQ ID NO: 3433541 - DNA, 25 bp, Homo sapien
aaaggacacatggcgacaagctcac

SEQ ID NO: 3433542 - DNA, 25 bp, Homo sapien
ttaaaggacacatggcgacaagctc

SEQ ID NO: 3433543 - DNA, 25 bp, Homo sapien
caaaagctccttaaggagcaagttt

SEQ ID NO: 3433544 - DNA, 25 bp, Homo sapien
gcagagttttaaagaagcttccaaa

SEQ ID NO: 3433545 - DNA, 25 bp, Homo sapien
cttttcatccatgtcttgaggtggt

SEQ ID NO: 3433546 - DNA, 25 bp, Homo sapien
gatgagtgaagatcaaatttccaaa

SEQ ID NO: 3433547 - DNA, 25 bp, Homo sapien
gagactaaatcttcgagacattctg

SEQ ID NO: 3433548 - DNA, 25 bp, Homo sapien
gcggttctgagctttacattcctgt

SEQ ID NO: 3433549 - DNA, 25 bp, Homo sapien
gtctcctccctcaatttacgtagca

SEQ ID NO: 3433550 - DNA, 25 bp, Homo sapien
caatttacgtagcatgggcttcaag

SEQ ID NO: 3433551 - DNA, 25 bp, Homo sapien
gcatgggcttcaagatgccagaata

SEQ ID NO: 3433552 - DNA, 25 bp, Homo sapien
tgggcttcaagatgccagaatataa

SEQ ID NO: 3433553 - DNA, 25 bp, Homo sapien
gggcatccaaggcaagcaagtgctg

SEQ ID NO: 3433554 - DNA, 25 bp, Homo sapien
catccaaggcaagcaagtgctgcct

SEQ ID NO: 3433555 - DNA, 25 bp, Homo sapien
caaaaagaccactggtgacgaacca

SEQ ID NO: 3433556 - DNA, 25 bp, Homo sapien
agaaagccacggcacttgacaggct

SEQ ID NO: 3433557 - DNA, 25 bp, Homo sapien
cagcgccccaacaagtcatcaggag

SEQ ID NO: 3433558 - DNA, 25 bp, Homo sapien
caacaagtcatcaggagtggcaagc

SEQ ID NO: 3433559 - DNA, 25 bp, Homo sapien
gagatggcaaaatagccaaacgtgg

SEQ ID NO: 3433560 - DNA, 25 bp, Homo sapien
agtcatcaggagtggcaagctcaaa

SEQ ID NO: 3433561 - DNA, 25 bp, Homo sapien
gcaacaacagagacgttgagcctat

SEQ ID NO: 3433562 - DNA, 25 bp, Homo sapien
gacgatactctagctgacccagaat

SEQ ID NO: 3433563 - DNA, 25 bp, Homo sapien
tcctactatgacaatctcgtgtctg

SEQ ID NO: 3433564 - DNA, 25 bp, Homo sapien
cagagacgttgagcctatccagacg

SEQ ID NO: 3433565 - DNA, 25 bp, Homo sapien
tctccacgatcagcgaggaaagcgg

SEQ ID NO: 3433566 - DNA, 25 bp, Homo sapien
gaagcccagagaggtcatgctgcag

SEQ ID NO: 3433567 - DNA, 25 bp, Homo sapien
cgggccttctccacgatcagcgagg

SEQ ID NO: 3433568 - DNA, 25 bp, Homo sapien
agaagcccagagaggtcatgctgca

SEQ ID NO: 3433569 - DNA, 25 bp, Homo sapien
gaaactggcaagtagtggattcaaa

SEQ ID NO: 3433570 - DNA, 25 bp, Homo sapien
cagtctatcattcatctgggagaca

SEQ ID NO: 3433571 - DNA, 25 bp, Homo sapien
gggaatcgtttaggaggaagctata

SEQ ID NO: 3433572 - DNA, 25 bp, Homo sapien
gagacatcagaagtgagcaactcac

SEQ ID NO: 3433573 - DNA, 25 bp, Homo sapien
gaataaatcccagctagtgtggtgg

SEQ ID NO: 3433574 - DNA, 25 bp, Homo sapien
cagtacagcactgtcaacagggacc

SEQ ID NO: 3433575 - DNA, 25 bp, Homo sapien
tattccgtaattcagtgccagaaac

SEQ ID NO: 3433576 - DNA, 25 bp, Homo sapien
cacatgtgtcccaagtattccgtaa

SEQ ID NO: 3433577 - DNA, 25 bp, Homo sapien
aagttcctatgtgctttataataag

SEQ ID NO: 3433578 - DNA, 25 bp, Homo sapien
atagcagaagttcctatgtgcttta

SEQ ID NO: 3433579 - DNA, 25 bp, Homo sapien
gttcctatgtgctttataataaggt

SEQ ID NO: 3433580 - DNA, 25 bp, Homo sapien
gatagcagaagttcctatgtgcttt

SEQ ID NO: 3433581 - DNA, 25 bp, Homo sapien
ctgtggaggttcgatacacgtcagg

SEQ ID NO: 3433582 - DNA, 25 bp, Homo sapien
ggttcgatacacgtcaggagcctga

SEQ ID NO: 3433583 - DNA, 25 bp, Homo sapien
attcagcacatcttgcctgggctgt

SEQ ID NO: 3433584 - DNA, 25 bp, Homo sapien
tcgatacacgtcaggagcctgagca

SEQ ID NO: 3433585 - DNA, 25 bp, Homo sapien
cataggccctcctagtccttgaggt

SEQ ID NO: 3433586 - DNA, 25 bp, Homo sapien
gatacacccagctgtttactcacag

SEQ ID NO: 3433587 - DNA, 25 bp, Homo sapien
tgggtcaccaacaaatccagccctg

SEQ ID NO: 3433588 - DNA, 25 bp, Homo sapien
aagtcccaggacacccactagatac

SEQ ID NO: 3433589 - DNA, 25 bp, Homo sapien
tatatatcagcttcttagccatgag

SEQ ID NO: 3433590 - DNA, 25 bp, Homo sapien
acctccagacatttaggactaaaag

SEQ ID NO: 3433591 - DNA, 25 bp, Homo sapien
caatggccaacagtaccaacaactc

SEQ ID NO: 3433592 - DNA, 25 bp, Homo sapien
taagagcacgttcattccaagcttc

SEQ ID NO: 3433593 - DNA, 25 bp, Homo sapien
gccccaatgtagattaacatacttg

SEQ ID NO: 3433594 - DNA, 25 bp, Homo sapien
tgtaaaacacattgtagaagtaatc

SEQ ID NO: 3433595 - DNA, 25 bp, Homo sapien
caatgagtggctcttgttcaagccc

SEQ ID NO: 3433596 - DNA, 25 bp, Homo sapien
taagtagaatgttacaggtttctct

SEQ ID NO: 3433597 - DNA, 25 bp, Homo sapien
tcttcttcttgcgatggatgaacta

SEQ ID NO: 3433598 - DNA, 25 bp, Homo sapien
tgcgatggatgaactatttccacaa

SEQ ID NO: 3433599 - DNA, 25 bp, Homo sapien
aagcctctggataattttctcctca

SEQ ID NO: 3433600 - DNA, 25 bp, Homo sapien
tggataattttctcctcatttaacc

SEQ ID NO: 3433601 - DNA, 25 bp, Homo sapien
aactttaagaacactagatcgctgc

SEQ ID NO: 3433602 - DNA, 25 bp, Homo sapien
tggttcagcatgaaataccggctct

SEQ ID NO: 3433603 - DNA, 25 bp, Homo sapien
taatataagtatgctctgtgcccaa

SEQ ID NO: 3433604 - DNA, 25 bp, Homo sapien
gatggtgctataacaagggcctgct

SEQ ID NO: 3433605 - DNA, 25 bp, Homo sapien
aggccacactgtcatcacagggaaa

SEQ ID NO: 3433606 - DNA, 25 bp, Homo sapien
tgtcatggctctccacggcctgcac

SEQ ID NO: 3433607 - DNA, 25 bp, Homo sapien
ggcaggccacactcctgtcatggct

SEQ ID NO: 3433608 - DNA, 25 bp, Homo sapien
atggaaactcctccctgtcaacggg

SEQ ID NO: 3433609 - DNA, 25 bp, Homo sapien
gaaatccaaaatacctctggttcca

SEQ ID NO: 3433610 - DNA, 25 bp, Homo sapien
tgaaatccaaaatacctctggttcc

SEQ ID NO: 3433611 - DNA, 25 bp, Homo sapien
taatgcaaatacaggtattccaaaa

SEQ ID NO: 3433612 - DNA, 25 bp, Homo sapien
tataatgcaaatacaggtattccaa

SEQ ID NO: 3433613 - DNA, 25 bp, Homo sapien
gggtcgggctctgtactgttctgaa

SEQ ID NO: 3433614 - DNA, 25 bp, Homo sapien
taacatctggtctctgctcaggcga

SEQ ID NO: 3433615 - DNA, 25 bp, Homo sapien
actgttctgaatttgtaacatctgg

SEQ ID NO: 3433616 - DNA, 25 bp, Homo sapien
caggcgaacaatttcacaaagtgat

SEQ ID NO: 3433617 - DNA, 25 bp, Homo sapien
aacaagaacagagttttacacatac

SEQ ID NO: 3433618 - DNA, 25 bp, Homo sapien
agaagaacaagaacagagttttaca

SEQ ID NO: 3433619 - DNA, 25 bp, Homo sapien
gaacaagaacagagttttacacata

SEQ ID NO: 3433620 - DNA, 25 bp, Homo sapien
aagaacaagaacagagttttacaca

SEQ ID NO: 3433621 - DNA, 25 bp, Homo sapien
tccacttcgcaaagacagggttgaa

SEQ ID NO: 3433622 - DNA, 25 bp, Homo sapien
gataactgtccctaatcggctgcaa

SEQ ID NO: 3433623 - DNA, 25 bp, Homo sapien
gaagtaaaccgaagcaagattgcca

SEQ ID NO: 3433624 - DNA, 25 bp, Homo sapien
tctcccatagtgaggagtggcctga

SEQ ID NO: 3433625 - DNA, 25 bp, Homo sapien
gatgccattttactcagaagccggc

SEQ ID NO: 3433626 - DNA, 25 bp, Homo sapien
ctaaaatgggacaggtaagatgcca

SEQ ID NO: 3433627 - DNA, 25 bp, Homo sapien
tgccatagtgcaagaattactaaaa

SEQ ID NO: 3433628 - DNA, 25 bp, Homo sapien
aaaggactatatatgccatagtgca

SEQ ID NO: 3433629 - DNA, 25 bp, Homo sapien
tatgggagccattcactacatgtgg

SEQ ID NO: 3433630 - DNA, 25 bp, Homo sapien
gcaacagggccattgattcatcagg

SEQ ID NO: 3433631 - DNA, 25 bp, Homo sapien
caaaatttaactcgtctgaccggca

SEQ ID NO: 3433632 - DNA, 25 bp, Homo sapien
tataaaagctagtgcgcacatgggc

SEQ ID NO: 3433633 - DNA, 25 bp, Homo sapien
cagctgggttgtccttggttgctca

SEQ ID NO: 3433634 - DNA, 25 bp, Homo sapien
cagcatgtgactgtggaggtccaca

SEQ ID NO: 3433635 - DNA, 25 bp, Homo sapien
aatggaatctcccttacagtgtgac

SEQ ID NO: 3433636 - DNA, 25 bp, Homo sapien
catcccaaggtatagctgtgttcag

SEQ ID NO: 3433637 - DNA, 25 bp, Homo sapien
tcagcaatatctggattgcactgac

SEQ ID NO: 3433638 - DNA, 25 bp, Homo sapien
cgtcgtgtctcaagtaaagtcagca

SEQ ID NO: 3433639 - DNA, 25 bp, Homo sapien
aaatatttgatagaagctgctctat

SEQ ID NO: 3433640 - DNA, 25 bp, Homo sapien
ctggattgcactgactatggctgac

SEQ ID NO: 3433641 - DNA, 25 bp, Homo sapien
cctggggtaggaagatggtactgat

SEQ ID NO: 3433642 - DNA, 25 bp, Homo sapien
tggggtaggaagatggtactgattt

SEQ ID NO: 3433643 - DNA, 25 bp, Homo sapien
ctggggtaggaagatggtactgatt

SEQ ID NO: 3433644 - DNA, 25 bp, Homo sapien
ccctggggtaggaagatggtactga

SEQ ID NO: 3433645 - DNA, 25 bp, Homo sapien
gagatcaagtcaatagtaagctatg

SEQ ID NO: 3433646 - DNA, 25 bp, Homo sapien
acttaggcccaggagatcaagtcaa

SEQ ID NO: 3433647 - DNA, 25 bp, Homo sapien
tccagtctgaatggcaggccttatc

SEQ ID NO: 3433648 - DNA, 25 bp, Homo sapien
tctgaatgtagcaacacagactcca

SEQ ID NO: 3433649 - DNA, 25 bp, Homo sapien
gatgtaagtcttttctcacacgtta

SEQ ID NO: 3433650 - DNA, 25 bp, Homo sapien
tattttctggcagtctgtgacctat

SEQ ID NO: 3433651 - DNA, 25 bp, Homo sapien
caatctgtacatgactctgagacaa

SEQ ID NO: 3433652 - DNA, 25 bp, Homo sapien
aattttcttaacagagtctcggagc

SEQ ID NO: 3433653 - DNA, 25 bp, Homo sapien
tgtttactgaacaagctgaatggct

SEQ ID NO: 3433654 - DNA, 25 bp, Homo sapien
gatccaagtcttcctctgatggctt

SEQ ID NO: 3433655 - DNA, 25 bp, Homo sapien
actgaacaagctgaatggctcatgc

SEQ ID NO: 3433656 - DNA, 25 bp, Homo sapien
ctagaacactcttgtttactgaaca

SEQ ID NO: 3433657 - DNA, 25 bp, Homo sapien
tcattgtcaaacaccaacagaggca

SEQ ID NO: 3433658 - DNA, 25 bp, Homo sapien
gcagagtaacgcaaactgtgagcac

SEQ ID NO: 3433659 - DNA, 25 bp, Homo sapien
taagggcaagcaccaacactatggt

SEQ ID NO: 3433660 - DNA, 25 bp, Homo sapien
cagaggcactttccctaagggcaag

SEQ ID NO: 3433661 - DNA, 25 bp, Homo sapien
tccccatttatactgctggtattgg

SEQ ID NO: 3433662 - DNA, 25 bp, Homo sapien
cattcaaccgggtattccccacagg

SEQ ID NO: 3433663 - DNA, 25 bp, Homo sapien
tgaagcaggctggatatcaacctaa

SEQ ID NO: 3433664 - DNA, 25 bp, Homo sapien
caatatgactccaatgctattcagc

SEQ ID NO: 3433665 - DNA, 25 bp, Homo sapien
cttgatcggtaattgtggcattttc

SEQ ID NO: 3433666 - DNA, 25 bp, Homo sapien
ccagtggagtcttgatcggtaattg

SEQ ID NO: 3433667 - DNA, 25 bp, Homo sapien
gagtcttgatcggtaattgtggcat

SEQ ID NO: 3433668 - DNA, 25 bp, Homo sapien
attatcaccagtggagtcttgatcg

SEQ ID NO: 3433669 - DNA, 25 bp, Homo sapien
aggcttcaagtattcgttctattaa

SEQ ID NO: 3433670 - DNA, 25 bp, Homo sapien
caagtattcgttctattaattgaca

SEQ ID NO: 3433671 - DNA, 25 bp, Homo sapien
ccaggcttcaagtattcgttctatt

SEQ ID NO: 3433672 - DNA, 25 bp, Homo sapien
tcccaggcttcaagtattcgttcta

SEQ ID NO: 3433673 - DNA, 25 bp, Homo sapien
catattaccaaccaaactgaattcc

SEQ ID NO: 3433674 - DNA, 25 bp, Homo sapien
tgactagggcaaggaggtattattt

SEQ ID NO: 3433675 - DNA, 25 bp, Homo sapien
cctcatattaccaaccaaactgaat

SEQ ID NO: 3433676 - DNA, 25 bp, Homo sapien
tttttctgactagggcaaggaggta

SEQ ID NO: 3433677 - DNA, 25 bp, Homo sapien
ggccagatgaggaggcagcaagaag

SEQ ID NO: 3433678 - DNA, 25 bp, Homo sapien
gccagatgaggaggcagcaagaaga

SEQ ID NO: 3433679 - DNA, 25 bp, Homo sapien
tggccagatgaggaggcagcaagaa

SEQ ID NO: 3433680 - DNA, 25 bp, Homo sapien
ctggccagatgaggaggcagcaaga

SEQ ID NO: 3433681 - DNA, 25 bp, Homo sapien
aggagagcagggcacaaaggatatc

SEQ ID NO: 3433682 - DNA, 25 bp, Homo sapien
caggagagcagggcacaaaggatat

SEQ ID NO: 3433683 - DNA, 25 bp, Homo sapien
gcagggcacaaaggatatctgagcc

SEQ ID NO: 3433684 - DNA, 25 bp, Homo sapien
agagcagggcacaaaggatatctga

SEQ ID NO: 3433685 - DNA, 25 bp, Homo sapien
gtaaccatgccgtcttcctccctca

SEQ ID NO: 3433686 - DNA, 25 bp, Homo sapien
accatgccgtcttcctccctcagcc

SEQ ID NO: 3433687 - DNA, 25 bp, Homo sapien
taaccatgccgtcttcctccctcag

SEQ ID NO: 3433688 - DNA, 25 bp, Homo sapien
aaccatgccgtcttcctccctcagc

SEQ ID NO: 3433689 - DNA, 25 bp, Homo sapien
gggcccttgtcagtgctgtgcacga

SEQ ID NO: 3433690 - DNA, 25 bp, Homo sapien
tagctatcctcgttaggtgtcccat

SEQ ID NO: 3433691 - DNA, 25 bp, Homo sapien
gctgtgcacgatacagttagctatc

SEQ ID NO: 3433692 - DNA, 25 bp, Homo sapien
gataagctgctgcactaatgcactg

SEQ ID NO: 3433693 - DNA, 25 bp, Homo sapien
gcttgtgaacttaacaagtttctga

SEQ ID NO: 3433694 - DNA, 25 bp, Homo sapien
ctacccaatggtataggcttgatga

SEQ ID NO: 3433695 - DNA, 25 bp, Homo sapien
tataggcttgatgaggccaagagcc

SEQ ID NO: 3433696 - DNA, 25 bp, Homo sapien
ggccaagagccctaaggtagcttgt

SEQ ID NO: 3433697 - DNA, 25 bp, Homo sapien
ccctatcagctgagaaactgggtga

SEQ ID NO: 3433698 - DNA, 25 bp, Homo sapien
catggactttcaggaaccagaatcc

SEQ ID NO: 3433699 - DNA, 25 bp, Homo sapien
cagcccagtgctcttagagaaatgg

SEQ ID NO: 3433700 - DNA, 25 bp, Homo sapien
ccataggcccaaatcccatggactt

SEQ ID NO: 3433701 - DNA, 25 bp, Homo sapien
ggagcttgtgcagaacgtctcccat

SEQ ID NO: 3433702 - DNA, 25 bp, Homo sapien
ctcctaaggagcttgtgcagaacgt

SEQ ID NO: 3433703 - DNA, 25 bp, Homo sapien
tcccatcgttccctgacttcgtcgg

SEQ ID NO: 3433704 - DNA, 25 bp, Homo sapien
agatctaccgtgttcctcttgttag

SEQ ID NO: 3433705 - DNA, 25 bp, Homo sapien
taagcaaaggccacccctcgactat

SEQ ID NO: 3433706 - DNA, 25 bp, Homo sapien
cctcgactatcagctggcatgtact

SEQ ID NO: 3433707 - DNA, 25 bp, Homo sapien
acccctcgactatcagctggcatgt

SEQ ID NO: 3433708 - DNA, 25 bp, Homo sapien
cgactatcagctggcatgtacttgt

SEQ ID NO: 3433709 - DNA, 25 bp, Homo sapien
tcaagttaaacgatagtccgagtat

SEQ ID NO: 3433710 - DNA, 25 bp, Homo sapien
aagttaaacgatagtccgagtatct

SEQ ID NO: 3433711 - DNA, 25 bp, Homo sapien
gttaaacgatagtccgagtatctat

SEQ ID NO: 3433712 - DNA, 25 bp, Homo sapien
caagttaaacgatagtccgagtatc

SEQ ID NO: 3433713 - DNA, 25 bp, Homo sapien
gaacggcacctgcttgagtcaagag

SEQ ID NO: 3433714 - DNA, 25 bp, Homo sapien
tagattccgtgatcaaggaacggca

SEQ ID NO: 3433715 - DNA, 25 bp, Homo sapien
tcaaaggtatagataaagcactccc

SEQ ID NO: 3433716 - DNA, 25 bp, Homo sapien
cacagaagtgttttgggcagggaat

SEQ ID NO: 3433717 - DNA, 25 bp, Homo sapien
aagttttggacatttgtatcagcat

SEQ ID NO: 3433718 - DNA, 25 bp, Homo sapien
ggacatttgtatcagcatttttatg

SEQ ID NO: 3433719 - DNA, 25 bp, Homo sapien
tgtaaaagactatttaacatagaaa

SEQ ID NO: 3433720 - DNA, 25 bp, Homo sapien
aacatagaaaagttttggacatttg

SEQ ID NO: 3433721 - DNA, 25 bp, Homo sapien
caaagaagaatcctgtgagaaaccc

SEQ ID NO: 3433722 - DNA, 25 bp, Homo sapien
gctgcaaagaagaatcctgtgagaa

SEQ ID NO: 3433723 - DNA, 25 bp, Homo sapien
tgcaaagaagaatcctgtgagaaac

SEQ ID NO: 3433724 - DNA, 25 bp, Homo sapien
tgctgcaaagaagaatcctgtgaga

SEQ ID NO: 3433725 - DNA, 25 bp, Homo sapien
aaagcaaagctttaggcgtgactca

SEQ ID NO: 3433726 - DNA, 25 bp, Homo sapien
tggaacaatcccttgaaacataacc

SEQ ID NO: 3433727 - DNA, 25 bp, Homo sapien
catcactgttatcagggatggaaca

SEQ ID NO: 3433728 - DNA, 25 bp, Homo sapien
taatacataatctgactctgaagct

SEQ ID NO: 3433729 - DNA, 25 bp, Homo sapien
tgtgaagcttcatctaagacgaagc

SEQ ID NO: 3433730 - DNA, 25 bp, Homo sapien
gaagcttcatctaagacgaagctta

SEQ ID NO: 3433731 - DNA, 25 bp, Homo sapien
agcatgtgaagcttcatctaagacg

SEQ ID NO: 3433732 - DNA, 25 bp, Homo sapien
gcttcatctaagacgaagcttagag

SEQ ID NO: 3433733 - DNA, 25 bp, Homo sapien
tgaactctgagaaacctatatctgg

SEQ ID NO: 3433734 - DNA, 25 bp, Homo sapien
tgttcaagtcactgagaagtgagcc

SEQ ID NO: 3433735 - DNA, 25 bp, Homo sapien
cctagtactgtcatcctggccaaag

SEQ ID NO: 3433736 - DNA, 25 bp, Homo sapien
tctggagagatacatagcaactgac

SEQ ID NO: 3433737 - DNA, 25 bp, Homo sapien
caatgacagccagcattaatattaa

SEQ ID NO: 3433738 - DNA, 25 bp, Homo sapien
agcagaagggtagggacaagtcctg

SEQ ID NO: 3433739 - DNA, 25 bp, Homo sapien
cagaagggtagggacaagtcctggg

SEQ ID NO: 3433740 - DNA, 25 bp, Homo sapien
gcagaagggtagggacaagtcctgg

SEQ ID NO: 3433741 - DNA, 25 bp, Homo sapien
cagaggtgatattagatgagcacat

SEQ ID NO: 3433742 - DNA, 25 bp, Homo sapien
ttgcccccagaggtgatattagatg

SEQ ID NO: 3433743 - DNA, 25 bp, Homo sapien
taaggcatggagtgtaaaccaaggc

SEQ ID NO: 3433744 - DNA, 25 bp, Homo sapien
tggctgtggaatggccacttggtaa

SEQ ID NO: 3433745 - DNA, 25 bp, Homo sapien
taatggaccccaggaaaatgttgat

SEQ ID NO: 3433746 - DNA, 25 bp, Homo sapien
tggttccacatatgggcagagcctc

SEQ ID NO: 3433747 - DNA, 25 bp, Homo sapien
taagatccaacaagtggtgaccacc

SEQ ID NO: 3433748 - DNA, 25 bp, Homo sapien
ggaaaaccgactgatgaacacaagc

SEQ ID NO: 3433749 - DNA, 25 bp, Homo sapien
tattctacatactatttgcccattt

SEQ ID NO: 3433750 - DNA, 25 bp, Homo sapien
ttacatagccatagggctataaaag

SEQ ID NO: 3433751 - DNA, 25 bp, Homo sapien
catagggctataaaagttggtgtgt

SEQ ID NO: 3433752 - DNA, 25 bp, Homo sapien
tctacatactatttgcccatttgtg

SEQ ID NO: 3433753 - DNA, 25 bp, Homo sapien
atctgcaaacttctcatcgttgaag

SEQ ID NO: 3433754 - DNA, 25 bp, Homo sapien
ttgtattgagagtaaagttgatgtc

SEQ ID NO: 3433755 - DNA, 25 bp, Homo sapien
taaagttgatgtctgatactcgatc

SEQ ID NO: 3433756 - DNA, 25 bp, Homo sapien
tgagagtaaagttgatgtctgatac

SEQ ID NO: 3433757 - DNA, 25 bp, Homo sapien
tgtctgatactcgatcaaaagaaac

SEQ ID NO: 3433758 - DNA, 25 bp, Homo sapien
ggattctggtgtgaatgcgatgtgc

SEQ ID NO: 3433759 - DNA, 25 bp, Homo sapien
accatcatcaaactgttgtattctt

SEQ ID NO: 3433760 - DNA, 25 bp, Homo sapien
ttgggattctggtgtgaatgcgatg

SEQ ID NO: 3433761 - DNA, 25 bp, Homo sapien
atcatcaaactgttgtattctttcc

SEQ ID NO: 3433762 - DNA, 25 bp, Homo sapien
tccgtgttggcactgctgggttcaa

SEQ ID NO: 3433763 - DNA, 25 bp, Homo sapien
ccgtgttggcactgctgggttcaaa

SEQ ID NO: 3433764 - DNA, 25 bp, Homo sapien
ttcctcactgtctgtactccccgag

SEQ ID NO: 3433765 - DNA, 25 bp, Homo sapien
cgtgttggcactgctgggttcaaac

SEQ ID NO: 3433766 - DNA, 25 bp, Homo sapien
cactgttgccatgaatgtcttgaaa

SEQ ID NO: 3433767 - DNA, 25 bp, Homo sapien
cagagccaacagatcagggcatctg

SEQ ID NO: 3433768 - DNA, 25 bp, Homo sapien
tcagaatacaactcctgatctggcc

SEQ ID NO: 3433769 - DNA, 25 bp, Homo sapien
ggagcccatcttgcagttctcatta

SEQ ID NO: 3433770 - DNA, 25 bp, Homo sapien
gcctgctggccaagtttgggtctaa

SEQ ID NO: 3433771 - DNA, 25 bp, Homo sapien
gcacaccatgcttttccttcacaga

SEQ ID NO: 3433772 - DNA, 25 bp, Homo sapien
ttcaaagctacatgcacaaagaggg

SEQ ID NO: 3433773 - DNA, 25 bp, Homo sapien
cttgcttgagcacacttacggtctg

SEQ ID NO: 3433774 - DNA, 25 bp, Homo sapien
tttagttggcatcggctcctctgtg

SEQ ID NO: 3433775 - DNA, 25 bp, Homo sapien
catcaaagttagctgaccagttggg

SEQ ID NO: 3433776 - DNA, 25 bp, Homo sapien
gaatccaatggagcaccgtgggttg

SEQ ID NO: 3433777 - DNA, 25 bp, Homo sapien
ccgtgggttgtttccattgggacat

SEQ ID NO: 3433778 - DNA, 25 bp, Homo sapien
gccagaaaagctcacggagatgcat

SEQ ID NO: 3433779 - DNA, 25 bp, Homo sapien
tgtcctgacagctctatgaagccag

SEQ ID NO: 3433780 - DNA, 25 bp, Homo sapien
tcagagacgtgcacacagagggtaa

SEQ ID NO: 3433781 - DNA, 25 bp, Homo sapien
gattgggagcccttaattgacagca

SEQ ID NO: 3433782 - DNA, 25 bp, Homo sapien
tcagagggtccatgggttcagtgct

SEQ ID NO: 3433783 - DNA, 25 bp, Homo sapien
ggtccatgggttcagtgctggtttc

SEQ ID NO: 3433784 - DNA, 25 bp, Homo sapien
gagggtccatgggttcagtgctggt

SEQ ID NO: 3433785 - DNA, 25 bp, Homo sapien
gtccatgggttcagtgctggtttcc

SEQ ID NO: 3433786 - DNA, 25 bp, Homo sapien
ccagagtcagcatgctgtggttcta

SEQ ID NO: 3433787 - DNA, 25 bp, Homo sapien
tgtggacatcagacccaccatctca

SEQ ID NO: 3433788 - DNA, 25 bp, Homo sapien
cacgtgaccctggcgtgtacccagg

SEQ ID NO: 3433789 - DNA, 25 bp, Homo sapien
gcctgagaatcaggtctggtttgac

SEQ ID NO: 3433790 - DNA, 25 bp, Homo sapien
tactagagactagcaagtcgcctac

SEQ ID NO: 3433791 - DNA, 25 bp, Homo sapien
gaagccaacataggtgatgagcctg

SEQ ID NO: 3433792 - DNA, 25 bp, Homo sapien
aaagagtgagatggcttctgcctgc

SEQ ID NO: 3433793 - DNA, 25 bp, Homo sapien
cagcaagcccgaaaaggaactggca

SEQ ID NO: 3433794 - DNA, 25 bp, Homo sapien
tgccgccattcatcactgtctcagt

SEQ ID NO: 3433795 - DNA, 25 bp, Homo sapien
gaggctgagcgtttccttcatgccg

SEQ ID NO: 3433796 - DNA, 25 bp, Homo sapien
tgtcttggcatctacagtgaggctg

SEQ ID NO: 3433797 - DNA, 25 bp, Homo sapien
cagttaccttgtctgtactttctgc

SEQ ID NO: 3433798 - DNA, 25 bp, Homo sapien
cactaacttcaggatggcagatgtc

SEQ ID NO: 3433799 - DNA, 25 bp, Homo sapien
gaaaccggttttcatgggccatgct

SEQ ID NO: 3433800 - DNA, 25 bp, Homo sapien
taatgtttgaggtttctgccccacc

SEQ ID NO: 3433801 - DNA, 25 bp, Homo sapien
tcgcaataagcagggaggcattcct

SEQ ID NO: 3433802 - DNA, 25 bp, Homo sapien
tctgcctattcagtctgggattccc

SEQ ID NO: 3433803 - DNA, 25 bp, Homo sapien
cactaataagagtgaaaggtccatc

SEQ ID NO: 3433804 - DNA, 25 bp, Homo sapien
tgggattcccctttttacataatca

SEQ ID NO: 3433805 - DNA, 25 bp, Homo sapien
ctaaggacacagaggatttgggtaa

SEQ ID NO: 3433806 - DNA, 25 bp, Homo sapien
catgaggtcaccgtgttgactgcat

SEQ ID NO: 3433807 - DNA, 25 bp, Homo sapien
gctggaagcctcagtcacatgaggt

SEQ ID NO: 3433808 - DNA, 25 bp, Homo sapien
gatttcacggctcctcgagttgccc

SEQ ID NO: 3433809 - DNA, 25 bp, Homo sapien
aagacagaccccatcagcttgctgg

SEQ ID NO: 3433810 - DNA, 25 bp, Homo sapien
cagactcggtgaaggtgtcaaagaa

SEQ ID NO: 3433811 - DNA, 25 bp, Homo sapien
cgtaagcaaaactgcagactcggtg

SEQ ID NO: 3433812 - DNA, 25 bp, Homo sapien
cacgactgcacgtaagcaaaactgc

SEQ ID NO: 3433813 - DNA, 25 bp, Homo sapien
gggaataatatgtccacgactgcac

SEQ ID NO: 3433814 - DNA, 25 bp, Homo sapien
gcagtctcgggacactcctctgcgt

SEQ ID NO: 3433815 - DNA, 25 bp, Homo sapien
tgcagtctcgggacactcctctgcg

SEQ ID NO: 3433816 - DNA, 25 bp, Homo sapien
cactcctctgcgtctttacaagcag

SEQ ID NO: 3433817 - DNA, 25 bp, Homo sapien
gcgtctttacaagcagcatcttgag

SEQ ID NO: 3433818 - DNA, 25 bp, Homo sapien
ctctgctcgggactgctgctgggag

SEQ ID NO: 3433819 - DNA, 25 bp, Homo sapien
gctgctgggaggcctgggcgccgcg

SEQ ID NO: 3433820 - DNA, 25 bp, Homo sapien
gctgggaggcctgggcgccgcgcac

SEQ ID NO: 3433821 - DNA, 25 bp, Homo sapien
tctgctcgggactgctgctgggagg

SEQ ID NO: 3433822 - DNA, 25 bp, Homo sapien
gaatattcccctgaagcaactgccc

SEQ ID NO: 3433823 - DNA, 25 bp, Homo sapien
caaactgggatagacctggacgatc

SEQ ID NO: 3433824 - DNA, 25 bp, Homo sapien
gacttgcccaatccgtagaagcaga

SEQ ID NO: 3433825 - DNA, 25 bp, Homo sapien
ttggaccaacaaagagtgctccctg

SEQ ID NO: 3433826 - DNA, 25 bp, Homo sapien
gaatgtgcctctagtatgccccgag

SEQ ID NO: 3433827 - DNA, 25 bp, Homo sapien
gagcaaatgctctgggagaaccgcc

SEQ ID NO: 3433828 - DNA, 25 bp, Homo sapien
ttaagtgtgacaggaaacagcgcgc

SEQ ID NO: 3433829 - DNA, 25 bp, Homo sapien
catctaagcttcatcaccgggtgag

SEQ ID NO: 3433830 - DNA, 25 bp, Homo sapien
tcatacagggccattcactgaagtg

SEQ ID NO: 3433831 - DNA, 25 bp, Homo sapien
acagggccattcactgaagtgtcac

SEQ ID NO: 3433832 - DNA, 25 bp, Homo sapien
catacagggccattcactgaagtgt

SEQ ID NO: 3433833 - DNA, 25 bp, Homo sapien
tacagggccattcactgaagtgtca

SEQ ID NO: 3433834 - DNA, 25 bp, Homo sapien
cacgctgcttgggatgctacttcta

SEQ ID NO: 3433835 - DNA, 25 bp, Homo sapien
aacaattagcatgcttcggtgccag

SEQ ID NO: 3433836 - DNA, 25 bp, Homo sapien
caatgtaatgtttaggcacgctgct

SEQ ID NO: 3433837 - DNA, 25 bp, Homo sapien
tataaaggttgctggtcctgatccc

SEQ ID NO: 3433838 - DNA, 25 bp, Homo sapien
aatgaaaaaggaaatcagaaataat

SEQ ID NO: 3433839 - DNA, 25 bp, Homo sapien
aaaggaaatcagaaataataaggca

SEQ ID NO: 3433840 - DNA, 25 bp, Homo sapien
tgaaaaaggaaatcagaaataataa

SEQ ID NO: 3433841 - DNA, 25 bp, Homo sapien
atgaaaaaggaaatcagaaataata

SEQ ID NO: 3433842 - DNA, 25 bp, Homo sapien
tgggagtgctggaatctccacacca

SEQ ID NO: 3433843 - DNA, 25 bp, Homo sapien
caccaggcgagaccagagcatatta

SEQ ID NO: 3433844 - DNA, 25 bp, Homo sapien
gctggcaaaactcaccaccaggcga

SEQ ID NO: 3433845 - DNA, 25 bp, Homo sapien
tcctgaggaggcgtgcaaaggtcaa

SEQ ID NO: 3433846 - DNA, 25 bp, Homo sapien
ggcgtgcaaaggtcaagggacccac

SEQ ID NO: 3433847 - DNA, 25 bp, Homo sapien
acgtgtgccaccagtggagccaaac

SEQ ID NO: 3433848 - DNA, 25 bp, Homo sapien
tgccaccagtggagccaaaccctgg

SEQ ID NO: 3433849 - DNA, 25 bp, Homo sapien
gaggccacgtgtgccaccagtggag

SEQ ID NO: 3433850 - DNA, 25 bp, Homo sapien
ccacgtgtgccaccagtggagccaa

SEQ ID NO: 3433851 - DNA, 25 bp, Homo sapien
gaaacaaaatgagggcacacttgct

SEQ ID NO: 3433852 - DNA, 25 bp, Homo sapien
tcctttccctgctacgaaagacaaa

SEQ ID NO: 3433853 - DNA, 25 bp, Homo sapien
aaaagaactgtcctccccattgtca

SEQ ID NO: 3433854 - DNA, 25 bp, Homo sapien
cagtcagtgggatgaagcaagacac

SEQ ID NO: 3433855 - DNA, 25 bp, Homo sapien
tggatctttctcacggagcaaagaa

SEQ ID NO: 3433856 - DNA, 25 bp, Homo sapien
tctttctcacggagcaaagaacagg

SEQ ID NO: 3433857 - DNA, 25 bp, Homo sapien
ttggtctgaggacctgaggtcatag

SEQ ID NO: 3433858 - DNA, 25 bp, Homo sapien
ggatctttctcacggagcaaagaac

SEQ ID NO: 3433859 - DNA, 25 bp, Homo sapien
caatcttcagtcactaagccgagca

SEQ ID NO: 3433860 - DNA, 25 bp, Homo sapien
atcttcagtcactaagccgagcaga

SEQ ID NO: 3433861 - DNA, 25 bp, Homo sapien
aatcttcagtcactaagccgagcag

SEQ ID NO: 3433862 - DNA, 25 bp, Homo sapien
tcttcagtcactaagccgagcagat

SEQ ID NO: 3433863 - DNA, 25 bp, Homo sapien
gtccagggggcttctgaggcgatca

SEQ ID NO: 3433864 - DNA, 25 bp, Homo sapien
tgtgagagttacctgaagcttggca

SEQ ID NO: 3433865 - DNA, 25 bp, Homo sapien
cagggggcttctgaggcgatcaggc

SEQ ID NO: 3433866 - DNA, 25 bp, Homo sapien
gagttacctgaagcttggcatccgt

SEQ ID NO: 3433867 - DNA, 25 bp, Homo sapien
acttcaggccacctgagcgtatgcg

SEQ ID NO: 3433868 - DNA, 25 bp, Homo sapien
caggccacctgagcgtatgcgtgca

SEQ ID NO: 3433869 - DNA, 25 bp, Homo sapien
ggccacctgagcgtatgcgtgcaag

SEQ ID NO: 3433870 - DNA, 25 bp, Homo sapien
acctgagcgtatgcgtgcaagtcac

SEQ ID NO: 3433871 - DNA, 25 bp, Homo sapien
gaagtgtgaatgcacagcgccacct

SEQ ID NO: 3433872 - DNA, 25 bp, Homo sapien
ttttttgcccgatgaataacgctgc

SEQ ID NO: 3433873 - DNA, 25 bp, Homo sapien
gcgccaccttaaccagacgttcaaa

SEQ ID NO: 3433874 - DNA, 25 bp, Homo sapien
taaaagctgcataaaactccgcggc

SEQ ID NO: 3433875 - DNA, 25 bp, Homo sapien
agttttctctttgtcgaggccatgg

SEQ ID NO: 3433876 - DNA, 25 bp, Homo sapien
ccatgtcgaatgtgctgtgtttatc

SEQ ID NO: 3433877 - DNA, 25 bp, Homo sapien
tctctttgtcgaggccatggatcat

SEQ ID NO: 3433878 - DNA, 25 bp, Homo sapien
catggatcattcctccgggccatgt

SEQ ID NO: 3433879 - DNA, 25 bp, Homo sapien
gggtcagaactcagagggggggctc

SEQ ID NO: 3433880 - DNA, 25 bp, Homo sapien
tggggtcagaactcagagggggggc

SEQ ID NO: 3433881 - DNA, 25 bp, Homo sapien
ctggggtcagaactcagaggggggg

SEQ ID NO: 3433882 - DNA, 25 bp, Homo sapien
ggtcagaactcagagggggggctcc

SEQ ID NO: 3433883 - DNA, 25 bp, Homo sapien
tagtcgggtgctcttttcaaaggtg

SEQ ID NO: 3433884 - DNA, 25 bp, Homo sapien
ggtagaacattttaggtgggctgat

SEQ ID NO: 3433885 - DNA, 25 bp, Homo sapien
taaaggatgtggcagcttatcaaca

SEQ ID NO: 3433886 - DNA, 25 bp, Homo sapien
caaaaggatgcgctttttcctggca

SEQ ID NO: 3433887 - DNA, 25 bp, Homo sapien
aggcagtgccggcaaacgtgatgtc

SEQ ID NO: 3433888 - DNA, 25 bp, Homo sapien
ccggcaaacgtgatgtcctgtgggc

SEQ ID NO: 3433889 - DNA, 25 bp, Homo sapien
cagcgcagggcaagatacagatgat

SEQ ID NO: 3433890 - DNA, 25 bp, Homo sapien
tcctgtgggccaagttccagcgcag

SEQ ID NO: 3433891 - DNA, 25 bp, Homo sapien
gacatgaagggtgctccatggacac

SEQ ID NO: 3433892 - DNA, 25 bp, Homo sapien
gagaattcgggctgatttgtgtcca

SEQ ID NO: 3433893 - DNA, 25 bp, Homo sapien
ttcatttcatgctcccttggcacct

SEQ ID NO: 3433894 - DNA, 25 bp, Homo sapien
ttgtgtccagctctgaacagtcagg

SEQ ID NO: 3433895 - DNA, 25 bp, Homo sapien
tgaatccaagtcctcggtggcccag

SEQ ID NO: 3433896 - DNA, 25 bp, Homo sapien
gtgatgcccaggcacgtgttgcgcc

SEQ ID NO: 3433897 - DNA, 25 bp, Homo sapien
caggtcgtgccgttcagcgtgatgc

SEQ ID NO: 3433898 - DNA, 25 bp, Homo sapien
tccattacaggactttcatctgctg

SEQ ID NO: 3433899 - DNA, 25 bp, Homo sapien
ggacccgtgacgctccccacgttca

SEQ ID NO: 3433900 - DNA, 25 bp, Homo sapien
gaagtcctcagcacaagcagaacgg

SEQ ID NO: 3433901 - DNA, 25 bp, Homo sapien
ggcttccaaggacccgtgacgctcc

SEQ ID NO: 3433902 - DNA, 25 bp, Homo sapien
gcacaagcagaacggccactgtcct

SEQ ID NO: 3433903 - DNA, 25 bp, Homo sapien
tgttcacgcgtgtccacaatttggt

SEQ ID NO: 3433904 - DNA, 25 bp, Homo sapien
gaggacgctcgccttccactgtcca

SEQ ID NO: 3433905 - DNA, 25 bp, Homo sapien
caatttggtcccccttgtgcctgaa

SEQ ID NO: 3433906 - DNA, 25 bp, Homo sapien
tgaaaaccttccaggaggacgctcg

SEQ ID NO: 3433907 - DNA, 25 bp, Homo sapien
agggccctccatttccgggagcaca

SEQ ID NO: 3433908 - DNA, 25 bp, Homo sapien
aagctgtccgaacggcagccccgtg

SEQ ID NO: 3433909 - DNA, 25 bp, Homo sapien
caccgagtggggctgcatcaccagg

SEQ ID NO: 3433910 - DNA, 25 bp, Homo sapien
cacagctgtcttgcaagctgtccga

SEQ ID NO: 3433911 - DNA, 25 bp, Homo sapien
ggaagaggggctgctaatggccttg

SEQ ID NO: 3433912 - DNA, 25 bp, Homo sapien
gaggaagaggggctgctaatggcct

SEQ ID NO: 3433913 - DNA, 25 bp, Homo sapien
agaggggctgctaatggccttgcca

SEQ ID NO: 3433914 - DNA, 25 bp, Homo sapien
aagaggggctgctaatggccttgcc

SEQ ID NO: 3433915 - DNA, 25 bp, Homo sapien
ggtcacagccgggagtccgtgaatc

SEQ ID NO: 3433916 - DNA, 25 bp, Homo sapien
gagtccgtgaatccacctgtgccct

SEQ ID NO: 3433917 - DNA, 25 bp, Homo sapien
gtcagaggcagggtcacagccggga

SEQ ID NO: 3433918 - DNA, 25 bp, Homo sapien
tgccctgggtgactcatccagctgg

SEQ ID NO: 3433919 - DNA, 25 bp, Homo sapien
tagaagcgctgtccaccaccaggaa

SEQ ID NO: 3433920 - DNA, 25 bp, Homo sapien
aagcgctgtccaccaccaggaaaaa

SEQ ID NO: 3433921 - DNA, 25 bp, Homo sapien
agcgctgtccaccaccaggaaaaac

SEQ ID NO: 3433922 - DNA, 25 bp, Homo sapien
cttccttagaagcgctgtccaccac

SEQ ID NO: 3433923 - DNA, 25 bp, Homo sapien
atcaagcagaaagcctgatgtcccc

SEQ ID NO: 3433924 - DNA, 25 bp, Homo sapien
tagagtaatcgaaatcaagcagaaa

SEQ ID NO: 3433925 - DNA, 25 bp, Homo sapien
cattagagtaatcgaaatcaagcag

SEQ ID NO: 3433926 - DNA, 25 bp, Homo sapien
gagtaatcgaaatcaagcagaaagc

SEQ ID NO: 3433927 - DNA, 25 bp, Homo sapien
tgctcagtaatgacccaatggcagt

SEQ ID NO: 3433928 - DNA, 25 bp, Homo sapien
gaaccacagccagtgtgctaatggc

SEQ ID NO: 3433929 - DNA, 25 bp, Homo sapien
tgcctcccggcacagactgtgctgg

SEQ ID NO: 3433930 - DNA, 25 bp, Homo sapien
caatggcagtcattgtcaacctgtc

SEQ ID NO: 3433931 - DNA, 25 bp, Homo sapien
tggagcgaaggttcaggcctcggga

SEQ ID NO: 3433932 - DNA, 25 bp, Homo sapien
tgacgggcagggacgactcctcagt

SEQ ID NO: 3433933 - DNA, 25 bp, Homo sapien
tccgcagcactggagaccccagagg

SEQ ID NO: 3433934 - DNA, 25 bp, Homo sapien
agggcaggcgttcccggctccctgt

SEQ ID NO: 3433935 - DNA, 25 bp, Homo sapien
gctgctatatatgcggcgcacccgg

SEQ ID NO: 3433936 - DNA, 25 bp, Homo sapien
agggcgacgggagtgacccgagctc

SEQ ID NO: 3433937 - DNA, 25 bp, Homo sapien
ctgcgcccgggttcggagcgtcggg

SEQ ID NO: 3433938 - DNA, 25 bp, Homo sapien
tcctctgggccatcataggcgggtg

SEQ ID NO: 3433939 - DNA, 25 bp, Homo sapien
cagaggcagaaagggccgcggcgag

SEQ ID NO: 3433940 - DNA, 25 bp, Homo sapien
cgagcaggagggcgctgcctcgggc

SEQ ID NO: 3433941 - DNA, 25 bp, Homo sapien
cccgcagaggcagaaagggccgcgg

SEQ ID NO: 3433942 - DNA, 25 bp, Homo sapien
gagccccgcagaggcagaaagggcc

SEQ ID NO: 3433943 - DNA, 25 bp, Homo sapien
gggcccagcaggtagcccgcgctgt

SEQ ID NO: 3433944 - DNA, 25 bp, Homo sapien
tgttcagggtccagcctcgtttttc

SEQ ID NO: 3433945 - DNA, 25 bp, Homo sapien
gtagcccgcgctgttcagggtccag

SEQ ID NO: 3433946 - DNA, 25 bp, Homo sapien
aggtagcccgcgctgttcagggtcc

SEQ ID NO: 3433947 - DNA, 25 bp, Homo sapien
attcttgtcgctgaatgacctgtgg

SEQ ID NO: 3433948 - DNA, 25 bp, Homo sapien
tttcatgtcatcttcgggccgcagc

SEQ ID NO: 3433949 - DNA, 25 bp, Homo sapien
gaggccattcttgtcgctgaatgac

SEQ ID NO: 3433950 - DNA, 25 bp, Homo sapien
tcatgtcatcttcgggccgcagctc

SEQ ID NO: 3433951 - DNA, 25 bp, Homo sapien
gctggtggaagtgaggtgccccggg

SEQ ID NO: 3433952 - DNA, 25 bp, Homo sapien
ctgggagctggtggaagtgaggtgc

SEQ ID NO: 3433953 - DNA, 25 bp, Homo sapien
ggggcccgggataggagtcctctca

SEQ ID NO: 3433954 - DNA, 25 bp, Homo sapien
gggcccgggataggagtcctctcac

SEQ ID NO: 3433955 - DNA, 25 bp, Homo sapien
catgatattgttttcaggtatggac

SEQ ID NO: 3433956 - DNA, 25 bp, Homo sapien
aaagacagaaactcaatgattgtgc

SEQ ID NO: 3433957 - DNA, 25 bp, Homo sapien
gattgtgcgcatgatattgttttca

SEQ ID NO: 3433958 - DNA, 25 bp, Homo sapien
tcaggtatggacctgtcaaagcttc

SEQ ID NO: 3433959 - DNA, 25 bp, Homo sapien
ggcgtgtggtcgtcctctgtaaaga

SEQ ID NO: 3433960 - DNA, 25 bp, Homo sapien
actgggctccaacagagggaacttg

SEQ ID NO: 3433961 - DNA, 25 bp, Homo sapien
ccttgtaggaaaagtcaccccagct

SEQ ID NO: 3433962 - DNA, 25 bp, Homo sapien
gagagaattacaaccacgacacatg

SEQ ID NO: 3433963 - DNA, 25 bp, Homo sapien
atccaggaggcggtcgagggcaccg

SEQ ID NO: 3433964 - DNA, 25 bp, Homo sapien
cggcggggagatccaggaggcggtc

SEQ ID NO: 3433965 - DNA, 25 bp, Homo sapien
gggagatccaggaggcggtcgaggg

SEQ ID NO: 3433966 - DNA, 25 bp, Homo sapien
caggaggcggtcgagggcaccggcc

SEQ ID NO: 3433967 - DNA, 25 bp, Homo sapien
tcaggaccgctcgatgtcttctgag

SEQ ID NO: 3433968 - DNA, 25 bp, Homo sapien
aggaccgctcgatgtcttctgagga

SEQ ID NO: 3433969 - DNA, 25 bp, Homo sapien
caggaccgctcgatgtcttctgagg

SEQ ID NO: 3433970 - DNA, 25 bp, Homo sapien
ctgactctgcataaattggccgaag

SEQ ID NO: 3433971 - DNA, 25 bp, Homo sapien
atccattatcttaaggtttgacttc

SEQ ID NO: 3433972 - DNA, 25 bp, Homo sapien
tctgcataaattggccgaagattat

SEQ ID NO: 3433973 - DNA, 25 bp, Homo sapien
tgacttcaggttacagcacacagac

SEQ ID NO: 3433974 - DNA, 25 bp, Homo sapien
ctgggagtggtctgaagcgccggcg

SEQ ID NO: 3433975 - DNA, 25 bp, Homo sapien
caaggccaccaagcgtgagcgtgga

SEQ ID NO: 3433976 - DNA, 25 bp, Homo sapien
acgtcactacctccgggctgggagt

SEQ ID NO: 3433977 - DNA, 25 bp, Homo sapien
gtggatgacgtcactacctccgggc

SEQ ID NO: 3433978 - DNA, 25 bp, Homo sapien
gaagtcccacacctgcacggaggct

SEQ ID NO: 3433979 - DNA, 25 bp, Homo sapien
gagtccgacacctttgtgctgctga

SEQ ID NO: 3433980 - DNA, 25 bp, Homo sapien
atgccacagggggagagtccgacac

SEQ ID NO: 3433981 - DNA, 25 bp, Homo sapien
aagtcccacacctgcacggaggctg

SEQ ID NO: 3433982 - DNA, 25 bp, Homo sapien
ctgccacctgccacactccgtttat

SEQ ID NO: 3433983 - DNA, 25 bp, Homo sapien
ggctgccacctgccacactccgttt

SEQ ID NO: 3433984 - DNA, 25 bp, Homo sapien
tgccacctgccacactccgtttata

SEQ ID NO: 3433985 - DNA, 25 bp, Homo sapien
gccacctgccacactccgtttatac

SEQ ID NO: 3433986 - DNA, 25 bp, Homo sapien
cactgagtaggtgccacttgcaggg

SEQ ID NO: 3433987 - DNA, 25 bp, Homo sapien
gaagaattcactgagtaggtgccac

SEQ ID NO: 3433988 - DNA, 25 bp, Homo sapien
gggtcttccggcagagaagaattca

SEQ ID NO: 3433989 - DNA, 25 bp, Homo sapien
tgcagggtcttccggcagagaagaa

SEQ ID NO: 3433990 - DNA, 25 bp, Homo sapien
acagcaggaccccaaggtttgacag

SEQ ID NO: 3433991 - DNA, 25 bp, Homo sapien
tctttcacagctccaagcggcattg

SEQ ID NO: 3433992 - DNA, 25 bp, Homo sapien
tcacagctccaagcggcattgatgg

SEQ ID NO: 3433993 - DNA, 25 bp, Homo sapien
gacaggcgagtcctcagaaccttgg

SEQ ID NO: 3433994 - DNA, 25 bp, Homo sapien
gactgatggggaagctaaagacgca

SEQ ID NO: 3433995 - DNA, 25 bp, Homo sapien
ggaaacgccatgacatgactgatgg

SEQ ID NO: 3433996 - DNA, 25 bp, Homo sapien
tacttctctgaacattggaaacgcc

SEQ ID NO: 3433997 - DNA, 25 bp, Homo sapien
agtctacgaggccatatacttctct

SEQ ID NO: 3433998 - DNA, 25 bp, Homo sapien
tctctattgtaaacggtgtgccagg

SEQ ID NO: 3433999 - DNA, 25 bp, Homo sapien
agtgtgcgagctgacccgatggtca

SEQ ID NO: 3434000 - DNA, 25 bp, Homo sapien
tgagttcccaaccaagactgtcagc

SEQ ID NO: 3434001 - DNA, 25 bp, Homo sapien
tatagaggccatagaagcagttcag

SEQ ID NO: 3434002 - DNA, 25 bp, Homo sapien
aaatgacttcagctacttccagatt

SEQ ID NO: 3434003 - DNA, 25 bp, Homo sapien
ctacttccagattctgctgatacat

SEQ ID NO: 3434004 - DNA, 25 bp, Homo sapien
aaaatgacttcagctacttccagat

SEQ ID NO: 3434005 - DNA, 25 bp, Homo sapien
gaataagactgtgggccatgctgct

SEQ ID NO: 3434006 - DNA, 25 bp, Homo sapien
gacaacttttgctgagttggacaga

SEQ ID NO: 3434007 - DNA, 25 bp, Homo sapien
tcgctgaagggcgttggttgctcct

SEQ ID NO: 3434008 - DNA, 25 bp, Homo sapien
tgttgtaattctgtgcctaggctgt

SEQ ID NO: 3434009 - DNA, 25 bp, Homo sapien
cgatggtgacggagctcttaagccc

SEQ ID NO: 3434010 - DNA, 25 bp, Homo sapien
gtcttcaaagaagcgtacctgggcc

SEQ ID NO: 3434011 - DNA, 25 bp, Homo sapien
ggtccgttcgcttcggagaacatcg

SEQ ID NO: 3434012 - DNA, 25 bp, Homo sapien
gaagtacgaggaggacgagttccac

SEQ ID NO: 3434013 - DNA, 25 bp, Homo sapien
tatcagagccagctagatcatgcac

SEQ ID NO: 3434014 - DNA, 25 bp, Homo sapien
gaatttgttatcttgggctgaccgg

SEQ ID NO: 3434015 - DNA, 25 bp, Homo sapien
tcatgcactgttgaccactgagcaa

SEQ ID NO: 3434016 - DNA, 25 bp, Homo sapien
ggctgaccggtgcatgtaaatacag

SEQ ID NO: 3434017 - DNA, 25 bp, Homo sapien
aggtgccttcagagtagtatggcag

SEQ ID NO: 3434018 - DNA, 25 bp, Homo sapien
tgccttcagagtagtatggcagtag

SEQ ID NO: 3434019 - DNA, 25 bp, Homo sapien
ccttcagagtagtatggcagtagtc

SEQ ID NO: 3434020 - DNA, 25 bp, Homo sapien
cttcagagtagtatggcagtagtct

SEQ ID NO: 3434021 - DNA, 25 bp, Homo sapien
ctgcggtgggtagctgcctccgagc

SEQ ID NO: 3434022 - DNA, 25 bp, Homo sapien
ggagctgttcctacgtacttttcat

SEQ ID NO: 3434023 - DNA, 25 bp, Homo sapien
ccttgtctgcctgggtactgctgtc

SEQ ID NO: 3434024 - DNA, 25 bp, Homo sapien
cttgtgtctggagctgttcctacgt

SEQ ID NO: 3434025 - DNA, 25 bp, Homo sapien
ttgcttgcaaccttgaggtagctca

SEQ ID NO: 3434026 - DNA, 25 bp, Homo sapien
caggcctctataagagtctgcaaga

SEQ ID NO: 3434027 - DNA, 25 bp, Homo sapien
ggaacgctggctcaggcctctataa

SEQ ID NO: 3434028 - DNA, 25 bp, Homo sapien
cttgaggtagctcaggaacgctggc

SEQ ID NO: 3434029 - DNA, 25 bp, Homo sapien
cacacattttactttcgggtctgaa

SEQ ID NO: 3434030 - DNA, 25 bp, Homo sapien
taccaccatttgaacgtccagacag

SEQ ID NO: 3434031 - DNA, 25 bp, Homo sapien
caaatgcgagtgaacaccgctgctt

SEQ ID NO: 3434032 - DNA, 25 bp, Homo sapien
gaagcttctgtgagacaaatgcgag

SEQ ID NO: 3434033 - DNA, 25 bp, Homo sapien
cactgcagtgacctctcattagggt

SEQ ID NO: 3434034 - DNA, 25 bp, Homo sapien
aggtgtctgcccaagtcacaggaag

SEQ ID NO: 3434035 - DNA, 25 bp, Homo sapien
tcttgctaccaagagataagcccag

SEQ ID NO: 3434036 - DNA, 25 bp, Homo sapien
tctaggaaggtcagagcctgcactg

SEQ ID NO: 3434037 - DNA, 25 bp, Homo sapien
gacaaatctatctctctggacttca

SEQ ID NO: 3434038 - DNA, 25 bp, Homo sapien
cttagacaaatctatctctctggac

SEQ ID NO: 3434039 - DNA, 25 bp, Homo sapien
gctcttagacaaatctatctctctg

SEQ ID NO: 3434040 - DNA, 25 bp, Homo sapien
gaagctcttagacaaatctatctct

SEQ ID NO: 3434041 - DNA, 25 bp, Homo sapien
ttcagttcacggtcactccggacgg

SEQ ID NO: 3434042 - DNA, 25 bp, Homo sapien
ttcacggtcactccggacgggattg

SEQ ID NO: 3434043 - DNA, 25 bp, Homo sapien
ctgtggcctttcagttcacggtcac

SEQ ID NO: 3434044 - DNA, 25 bp, Homo sapien
actccggacgggattgacctgcggc

SEQ ID NO: 3434045 - DNA, 25 bp, Homo sapien
gctctaagcagaggtggcgactgtc

SEQ ID NO: 3434046 - DNA, 25 bp, Homo sapien
cttggaggcgtggttcccgggaatg

SEQ ID NO: 3434047 - DNA, 25 bp, Homo sapien
gatgatcatcttggggctctaagca

SEQ ID NO: 3434048 - DNA, 25 bp, Homo sapien
gcgactgtctttgtagcggtggaca

SEQ ID NO: 3434049 - DNA, 25 bp, Homo sapien
ggtgggttggcctctgtgaagccat

SEQ ID NO: 3434050 - DNA, 25 bp, Homo sapien
gggtgggttggcctctgtgaagcca

SEQ ID NO: 3434051 - DNA, 25 bp, Homo sapien
ggggtgggttggcctctgtgaagcc

SEQ ID NO: 3434052 - DNA, 25 bp, Homo sapien
tggggtgggttggcctctgtgaagc

SEQ ID NO: 3434053 - DNA, 25 bp, Homo sapien
gtctgtttccaggaaggtgaggtta

SEQ ID NO: 3434054 - DNA, 25 bp, Homo sapien
tccaggaaggtgaggttagccacct

SEQ ID NO: 3434055 - DNA, 25 bp, Homo sapien
tgtttccaggaaggtgaggttagcc

SEQ ID NO: 3434056 - DNA, 25 bp, Homo sapien
tttccaggaaggtgaggttagccac

SEQ ID NO: 3434057 - DNA, 25 bp, Homo sapien
cattctggacacacagaagcggaag

SEQ ID NO: 3434058 - DNA, 25 bp, Homo sapien
cagggcactcagacgccttgggaaa

SEQ ID NO: 3434059 - DNA, 25 bp, Homo sapien
ctgtagcggacaggtggcccattct

SEQ ID NO: 3434060 - DNA, 25 bp, Homo sapien
cacaggctgcaaagtggtggagtat

SEQ ID NO: 3434061 - DNA, 25 bp, Homo sapien
tgtgcagcttggatcccaatggtca

SEQ ID NO: 3434062 - DNA, 25 bp, Homo sapien
ggtcacgctgtgtaaactttgtccc

SEQ ID NO: 3434063 - DNA, 25 bp, Homo sapien
ggcacaggtgcacgccctgctgtgc

SEQ ID NO: 3434064 - DNA, 25 bp, Homo sapien
caccagggctgtgatatgtctccga

SEQ ID NO: 3434065 - DNA, 25 bp, Homo sapien
tccacgagtccattcccagggctag

SEQ ID NO: 3434066 - DNA, 25 bp, Homo sapien
ggattcccgtccgagggctccgcga

SEQ ID NO: 3434067 - DNA, 25 bp, Homo sapien
cattcccagggctagttcgggattc

SEQ ID NO: 3434068 - DNA, 25 bp, Homo sapien
tccgcgatgatttgtgggaacgagt

SEQ ID NO: 3434069 - DNA, 25 bp, Homo sapien
cttgtagaatttcttggggagtttg

SEQ ID NO: 3434070 - DNA, 25 bp, Homo sapien
tcttggggagtttggattcgtgggc

SEQ ID NO: 3434071 - DNA, 25 bp, Homo sapien
tgctaaatgtctcttgtagaatttc

SEQ ID NO: 3434072 - DNA, 25 bp, Homo sapien
gattcgtgggctgccccctaaagtg

SEQ ID NO: 3434073 - DNA, 25 bp, Homo sapien
gcatccaagaatgtgttgtagatga

SEQ ID NO: 3434074 - DNA, 25 bp, Homo sapien
ccttcgccagagacactgcttctga

SEQ ID NO: 3434075 - DNA, 25 bp, Homo sapien
aggcattggtcacccgggcatccaa

SEQ ID NO: 3434076 - DNA, 25 bp, Homo sapien
gctttctagcgaagcagaatcttcc

SEQ ID NO: 3434077 - DNA, 25 bp, Homo sapien
gcgcgaagccgcagttgctggcggt

SEQ ID NO: 3434078 - DNA, 25 bp, Homo sapien
aagccgcagttgctggcggtgccct

SEQ ID NO: 3434079 - DNA, 25 bp, Homo sapien
cttccgaggacgctttccaagcgag

SEQ ID NO: 3434080 - DNA, 25 bp, Homo sapien
ttccaagcgagcaattaaacttgct

SEQ ID NO: 3434081 - DNA, 25 bp, Homo sapien
tcatcagaagcactgagcaccgagc

SEQ ID NO: 3434082 - DNA, 25 bp, Homo sapien
agggctcgaccttcccacggagagg

SEQ ID NO: 3434083 - DNA, 25 bp, Homo sapien
tagacgcgccctgggctcttgagcg

SEQ ID NO: 3434084 - DNA, 25 bp, Homo sapien
cgtttctggctcgttggatgcagca

SEQ ID NO: 3434085 - DNA, 25 bp, Homo sapien
ggggtgtcacgtggccgtgccctgg

SEQ ID NO: 3434086 - DNA, 25 bp, Homo sapien
gggggtgtcacgtggccgtgccctg

SEQ ID NO: 3434087 - DNA, 25 bp, Homo sapien
ccaaggtcgtgccgggctgggagcg

SEQ ID NO: 3434088 - DNA, 25 bp, Homo sapien
tccggacttggctggacgcctccgg

SEQ ID NO: 3434089 - DNA, 25 bp, Homo sapien
tgcagccgtcgggacacgcccttgg

SEQ ID NO: 3434090 - DNA, 25 bp, Homo sapien
ggccagtagggcctccggctcctgt

SEQ ID NO: 3434091 - DNA, 25 bp, Homo sapien
gatgctggacgctctggatgctttc

SEQ ID NO: 3434092 - DNA, 25 bp, Homo sapien
ccagctttttggttcttggctggca

SEQ ID NO: 3434093 - DNA, 25 bp, Homo sapien
tgtatagatcaaaatgcccagcttt

SEQ ID NO: 3434094 - DNA, 25 bp, Homo sapien
ctgtatagatcaaaatgcccagctt

SEQ ID NO: 3434095 - DNA, 25 bp, Homo sapien
cttggctggcagtacacggtgtcct

SEQ ID NO: 3434096 - DNA, 25 bp, Homo sapien
gaatgtccacatttcggcaggcact

SEQ ID NO: 3434097 - DNA, 25 bp, Homo sapien
tacagagggcaactcggtgaaggac

SEQ ID NO: 3434098 - DNA, 25 bp, Homo sapien
gaacattgaaatccacagactgagg

SEQ ID NO: 3434099 - DNA, 25 bp, Homo sapien
aaataatgcgcgtgcaaactgcccc

SEQ ID NO: 3434100 - DNA, 25 bp, Homo sapien
tagcatgaaccaataacctccggca

SEQ ID NO: 3434101 - DNA, 25 bp, Homo sapien
tgaaaaggtgcaaacaagcactagc

SEQ ID NO: 3434102 - DNA, 25 bp, Homo sapien
tgtaactccatctagtggcttagcc

SEQ ID NO: 3434103 - DNA, 25 bp, Homo sapien
gtctataagcaagttttcaccaggc

SEQ ID NO: 3434104 - DNA, 25 bp, Homo sapien
tccctagggagcaacacagtatctg

SEQ ID NO: 3434105 - DNA, 25 bp, Homo sapien
agcaagctatcgctagggcctcgga

SEQ ID NO: 3434106 - DNA, 25 bp, Homo sapien
gcagcaactcggtctcatctaagga

SEQ ID NO: 3434107 - DNA, 25 bp, Homo sapien
tagcctacagatccaataaagacgg

SEQ ID NO: 3434108 - DNA, 25 bp, Homo sapien
ggtgctctccgacccacttcctgca

SEQ ID NO: 3434109 - DNA, 25 bp, Homo sapien
tcttcccgtgactgggctctgcaga

SEQ ID NO: 3434110 - DNA, 25 bp, Homo sapien
tggctcccggggcatagaccaggaa

SEQ ID NO: 3434111 - DNA, 25 bp, Homo sapien
gaccaggaatggtgcagaaaccctg

SEQ ID NO: 3434112 - DNA, 25 bp, Homo sapien
gtactgcaatgcgtgcggggggctt

SEQ ID NO: 3434113 - DNA, 25 bp, Homo sapien
tactgcaatgcgtgcggggggcttg

SEQ ID NO: 3434114 - DNA, 25 bp, Homo sapien
tcattgtactgcaatgcgtgcgggg

SEQ ID NO: 3434115 - DNA, 25 bp, Homo sapien
ttgtactgcaatgcgtgcggggggc

SEQ ID NO: 3434116 - DNA, 25 bp, Homo sapien
tgtcctccggataaacagcattgag

SEQ ID NO: 3434117 - DNA, 25 bp, Homo sapien
tccgcaagcaggtgtagggctgtcc

SEQ ID NO: 3434118 - DNA, 25 bp, Homo sapien
tgaacgaacaagctagcgaggcagt

SEQ ID NO: 3434119 - DNA, 25 bp, Homo sapien
tgcacacctggagataaacacggcc

SEQ ID NO: 3434120 - DNA, 25 bp, Homo sapien
cgcgcgtgaccccacctcgctcccc

SEQ ID NO: 3434121 - DNA, 25 bp, Homo sapien
cgcgcgtgaccccacctcgctcccc

SEQ ID NO: 3434122 - DNA, 25 bp, Homo sapien
gctgccttttcaggtgcttgtgaca

SEQ ID NO: 3434123 - DNA, 25 bp, Homo sapien
gggatcccttcctaacatttgtgtg

SEQ ID NO: 3434124 - DNA, 25 bp, Homo sapien
tattgaatgatgagccattgttccc

SEQ ID NO: 3434125 - DNA, 25 bp, Homo sapien
aaagagcgagccttttgttgccggg

SEQ ID NO: 3434126 - DNA, 25 bp, Homo sapien
ctgagaccttcggggcccggagcag

SEQ ID NO: 3434127 - DNA, 25 bp, Homo sapien
cctgagaccttcggggcccggagca

SEQ ID NO: 3434128 - DNA, 25 bp, Homo sapien
tacgcacgcggttcgcgtcgtttcc

SEQ ID NO: 3434129 - DNA, 25 bp, Homo sapien
gcatcttccctgacggtcaccttag

SEQ ID NO: 3434130 - DNA, 25 bp, Homo sapien
ggcccgtgcgttacgcacgcggttc

SEQ ID NO: 3434131 - DNA, 25 bp, Homo sapien
tggcgtccgcgtgcagccacagcat

SEQ ID NO: 3434132 - DNA, 25 bp, Homo sapien
gcttctgcgccgggccggtgttaca

SEQ ID NO: 3434133 - DNA, 25 bp, Homo sapien
tcccgcttctgcgccgggccggtgt

SEQ ID NO: 3434134 - DNA, 25 bp, Homo sapien
gcgccgggccggtgttacagcggac

SEQ ID NO: 3434135 - DNA, 25 bp, Homo sapien
ttctgcgccgggccggtgttacagc

SEQ ID NO: 3434136 - DNA, 25 bp, Homo sapien
tccacctccgcgtctctctcaagct

SEQ ID NO: 3434137 - DNA, 25 bp, Homo sapien
ctccacctccgcgtctctctcaagc

SEQ ID NO: 3434138 - DNA, 25 bp, Homo sapien
cttggtcacgaagctctccacagct

SEQ ID NO: 3434139 - DNA, 25 bp, Homo sapien
ttggtcacgaagctctccacagctg

SEQ ID NO: 3434140 - DNA, 25 bp, Homo sapien
cttgaagccaccatgaccctcccca

SEQ ID NO: 3434141 - DNA, 25 bp, Homo sapien
ctctttccccgcgacacgcacgcag

SEQ ID NO: 3434142 - DNA, 25 bp, Homo sapien
gaagccaccatgaccctccccaggg

SEQ ID NO: 3434143 - DNA, 25 bp, Homo sapien
tttccccgcgacacgcacgcagccg

SEQ ID NO: 3434144 - DNA, 25 bp, Homo sapien
gtccgtacagcccagtgcgctggct

SEQ ID NO: 3434145 - DNA, 25 bp, Homo sapien
tatcgcctgggctcaaaggtgacca

SEQ ID NO: 3434146 - DNA, 25 bp, Homo sapien
gctggctggatacctgcagcttcag

SEQ ID NO: 3434147 - DNA, 25 bp, Homo sapien
cagaagtaaagctgttactgggaag

SEQ ID NO: 3434148 - DNA, 25 bp, Homo sapien
caagctcaactggaaatcgtgggac

SEQ ID NO: 3434149 - DNA, 25 bp, Homo sapien
tcattagcagcatcgtacaggccca

SEQ ID NO: 3434150 - DNA, 25 bp, Homo sapien
tgggactcatcaaaggccaccgtga

SEQ ID NO: 3434151 - DNA, 25 bp, Homo sapien
ggtgacccgggtcaagatcccagtg

SEQ ID NO: 3434152 - DNA, 25 bp, Homo sapien
caaagagcacttctatgagtgagga

SEQ ID NO: 3434153 - DNA, 25 bp, Homo sapien
agcacttctatgagtgaggaggctg

SEQ ID NO: 3434154 - DNA, 25 bp, Homo sapien
gatctgccaaagagcacttctatga

SEQ ID NO: 3434155 - DNA, 25 bp, Homo sapien
gagcagatctgccaaagagcacttc

SEQ ID NO: 3434156 - DNA, 25 bp, Homo sapien
caggaggtccatggatgatggcaag

SEQ ID NO: 3434157 - DNA, 25 bp, Homo sapien
tctgagacagcgcaaataaaaccgc

SEQ ID NO: 3434158 - DNA, 25 bp, Homo sapien
gaatgatctcaaccacagtcgtggt

SEQ ID NO: 3434159 - DNA, 25 bp, Homo sapien
gtttcacagcttgaagaatgatctc

SEQ ID NO: 3434160 - DNA, 25 bp, Homo sapien
ccgcaagttaggatctggtcattta

SEQ ID NO: 3434161 - DNA, 25 bp, Homo sapien
ctgggaaccgcaagttaggatctgg

SEQ ID NO: 3434162 - DNA, 25 bp, Homo sapien
ttactttgtaatcaaaccactgaag

SEQ ID NO: 3434163 - DNA, 25 bp, Homo sapien
tgtaatcaaaccactgaagttgaca

SEQ ID NO: 3434164 - DNA, 25 bp, Homo sapien
cgcagaatccgctgcttacacagag

SEQ ID NO: 3434165 - DNA, 25 bp, Homo sapien
gacctggtcgatgtccttcctgata

SEQ ID NO: 3434166 - DNA, 25 bp, Homo sapien
tccgcgctaaaaccgcatccaggga

SEQ ID NO: 3434167 - DNA, 25 bp, Homo sapien
agagccaggcgctccaccagattgt

SEQ ID NO: 3434168 - DNA, 25 bp, Homo sapien
cacgtttgccgaagtgaggctctcg

SEQ ID NO: 3434169 - DNA, 25 bp, Homo sapien
tctcgagcatagctgcttcttccct

SEQ ID NO: 3434170 - DNA, 25 bp, Homo sapien
ccgaagtgaggctctcgagcatagc

SEQ ID NO: 3434171 - DNA, 25 bp, Homo sapien
caaggaccacgtttgccgaagtgag

SEQ ID NO: 3434172 - DNA, 25 bp, Homo sapien
tcaatgaccaccacgtcgaagtagc

SEQ ID NO: 3434173 - DNA, 25 bp, Homo sapien
gtgatcgcccgccaggatgcacttt

SEQ ID NO: 3434174 - DNA, 25 bp, Homo sapien
cttcagggggccatcggcagacgca

SEQ ID NO: 3434175 - DNA, 25 bp, Homo sapien
gtagctctcgggcagcaacttcagg

SEQ ID NO: 3434176 - DNA, 25 bp, Homo sapien
gcagggacggaacaccagaaacgtg

SEQ ID NO: 3434177 - DNA, 25 bp, Homo sapien
aagatgaaggtgatgcgaccccacc

SEQ ID NO: 3434178 - DNA, 25 bp, Homo sapien
tctccgcacggcagaaccatggttt

SEQ ID NO: 3434179 - DNA, 25 bp, Homo sapien
tattcaactcaacaagcagggacgg

SEQ ID NO: 3434180 - DNA, 25 bp, Homo sapien
gataccatgcagagggttcatctgg

SEQ ID NO: 3434181 - DNA, 25 bp, Homo sapien
ttcacaggcctcgtgtaagggcagt

SEQ ID NO: 3434182 - DNA, 25 bp, Homo sapien
taagggcagtcaagggataccatgc

SEQ ID NO: 3434183 - DNA, 25 bp, Homo sapien
gcccctgtgatgagattctactcga

SEQ ID NO: 3434184 - DNA, 25 bp, Homo sapien
ttcctcccaaagctcactctcaatt

SEQ ID NO: 3434185 - DNA, 25 bp, Homo sapien
caaagctcactctcaattactattt

SEQ ID NO: 3434186 - DNA, 25 bp, Homo sapien
tcccaaagctcactctcaattacta

SEQ ID NO: 3434187 - DNA, 25 bp, Homo sapien
tcctcccaaagctcactctcaatta

SEQ ID NO: 3434188 - DNA, 25 bp, Homo sapien
ccttacaggacaacagggacgctgc

SEQ ID NO: 3434189 - DNA, 25 bp, Homo sapien
caagtcaagcagtggcctctaggag

SEQ ID NO: 3434190 - DNA, 25 bp, Homo sapien
gatttgaagacgtaacacggctggc

SEQ ID NO: 3434191 - DNA, 25 bp, Homo sapien
tctaggagccggaaaagaccaggag

SEQ ID NO: 3434192 - DNA, 25 bp, Homo sapien
ggtactgcaccgtcagtgtccgcac

SEQ ID NO: 3434193 - DNA, 25 bp, Homo sapien
tgtctgaggcccagcgcatgatagc

SEQ ID NO: 3434194 - DNA, 25 bp, Homo sapien
catgatagcctggtgcatgcggtac

SEQ ID NO: 3434195 - DNA, 25 bp, Homo sapien
ccaggcgttccatcaggctgagtga

SEQ ID NO: 3434196 - DNA, 25 bp, Homo sapien
tccctttcgactgttcgtcctcctc

SEQ ID NO: 3434197 - DNA, 25 bp, Homo sapien
tgtggcagccacacctgggaggtcc

SEQ ID NO: 3434198 - DNA, 25 bp, Homo sapien
tcaaacagcccgcagccggcggtgt

SEQ ID NO: 3434199 - DNA, 25 bp, Homo sapien
agcaggggcacacccgtctcttctg

SEQ ID NO: 3434200 - DNA, 25 bp, Homo sapien
aggagcggtctgctcaccctggaga

SEQ ID NO: 3434201 - DNA, 25 bp, Homo sapien
ggagaaggccgtaaaatgctgccag

SEQ ID NO: 3434202 - DNA, 25 bp, Homo sapien
gccttttgactcctatggccgtgca

SEQ ID NO: 3434203 - DNA, 25 bp, Homo sapien
gcatcctgttcaacgtggaactggg

SEQ ID NO: 3434204 - DNA, 25 bp, Homo sapien
ggctggaacaccagcgtccaccaga

SEQ ID NO: 3434205 - DNA, 25 bp, Homo sapien
tgcaaactgacgaggcggacttcgc

SEQ ID NO: 3434206 - DNA, 25 bp, Homo sapien
cacagcaatgtcacgggctggaaca

SEQ ID NO: 3434207 - DNA, 25 bp, Homo sapien
ctggaggttgtatggcgagaccaca

SEQ ID NO: 3434208 - DNA, 25 bp, Homo sapien
tgacgaaggacagtatcacggcctc

SEQ ID NO: 3434209 - DNA, 25 bp, Homo sapien
ccttggaagccatcgacagacttga

SEQ ID NO: 3434210 - DNA, 25 bp, Homo sapien
tgatttcaagctcagggtgcctgtg

SEQ ID NO: 3434211 - DNA, 25 bp, Homo sapien
tcctgttggatctgacgaaggacag

SEQ ID NO: 3434212 - DNA, 25 bp, Homo sapien
gaatgtctcacaaagcccgttcact

SEQ ID NO: 3434213 - DNA, 25 bp, Homo sapien
tgggaacaatgctcatcccaaatgg

SEQ ID NO: 3434214 - DNA, 25 bp, Homo sapien
cgcggctccgtgcatggaggctaaa

SEQ ID NO: 3434215 - DNA, 25 bp, Homo sapien
accaaaagtgtagtcccctgcgcgt

SEQ ID NO: 3434216 - DNA, 25 bp, Homo sapien
gacagtacgggagtcacagatgacc

SEQ ID NO: 3434217 - DNA, 25 bp, Homo sapien
tatcgtcaagatactcaaaggccgt

SEQ ID NO: 3434218 - DNA, 25 bp, Homo sapien
gttgatcctccggtcctcagcaaga

SEQ ID NO: 3434219 - DNA, 25 bp, Homo sapien
tgtgtgaaatactccaccagggtct

SEQ ID NO: 3434220 - DNA, 25 bp, Homo sapien
gagttctcatgggaatagttttctg

SEQ ID NO: 3434221 - DNA, 25 bp, Homo sapien
cctgggagttctcatgggaatagtt

SEQ ID NO: 3434222 - DNA, 25 bp, Homo sapien
gggagttctcatgggaatagttttc

SEQ ID NO: 3434223 - DNA, 25 bp, Homo sapien
agttctcatgggaatagttttctgg

SEQ ID NO: 3434224 - DNA, 25 bp, Homo sapien
ctggcttccggtcctggtggacgta

SEQ ID NO: 3434225 - DNA, 25 bp, Homo sapien
agcttcagaggccagagacttccca

SEQ ID NO: 3434226 - DNA, 25 bp, Homo sapien
agccggcttcttccggccctgtctg

SEQ ID NO: 3434227 - DNA, 25 bp, Homo sapien
gtcctggtggacgtagcaggtccct

SEQ ID NO: 3434228 - DNA, 25 bp, Homo sapien
tcctcggctatttggtggacccgca

SEQ ID NO: 3434229 - DNA, 25 bp, Homo sapien
tggacccgcagcctgtcgtgggaat

SEQ ID NO: 3434230 - DNA, 25 bp, Homo sapien
actccactatcatggcccggaagtg

SEQ ID NO: 3434231 - DNA, 25 bp, Homo sapien
ttccccggaactgtcgtgcctcagc

SEQ ID NO: 3434232 - DNA, 25 bp, Homo sapien
gcagcgtcctcagatcaggctggtc

SEQ ID NO: 3434233 - DNA, 25 bp, Homo sapien
tgcccctgcgcgctcctgaccctct

SEQ ID NO: 3434234 - DNA, 25 bp, Homo sapien
gctgctctgtctgcgcaggggtagg

SEQ ID NO: 3434235 - DNA, 25 bp, Homo sapien
gtgcagcgtcctcagatcaggctgg

SEQ ID NO: 3434236 - DNA, 25 bp, Homo sapien
gcaaacggaaagacaacacctggcc

SEQ ID NO: 3434237 - DNA, 25 bp, Homo sapien
gctggtgtagcttcgcttcaggaat

SEQ ID NO: 3434238 - DNA, 25 bp, Homo sapien
tcctgtcctctagcacaaagcgtgg

SEQ ID NO: 3434239 - DNA, 25 bp, Homo sapien
agtagctgctcaacaaaggtttggg

SEQ ID NO: 3434240 - DNA, 25 bp, Homo sapien
tccgtgggcagatctgtggccggat

SEQ ID NO: 3434241 - DNA, 25 bp, Homo sapien
ctccgtgggcagatctgtggccgga

SEQ ID NO: 3434242 - DNA, 25 bp, Homo sapien
ccgtgggcagatctgtggccggatg

SEQ ID NO: 3434243 - DNA, 25 bp, Homo sapien
gtgggcagatctgtggccggatgtc

SEQ ID NO: 3434244 - DNA, 25 bp, Homo sapien
cagaaaccagggcctcaaagtcctc

SEQ ID NO: 3434245 - DNA, 25 bp, Homo sapien
ggcggcagaaaccagggcctcaaag

SEQ ID NO: 3434246 - DNA, 25 bp, Homo sapien
cggcagaaaccagggcctcaaagtc

SEQ ID NO: 3434247 - DNA, 25 bp, Homo sapien
taacggcggcagaaaccagggcctc

SEQ ID NO: 3434248 - DNA, 25 bp, Homo sapien
tggcccagggttgtgacgccggctg

SEQ ID NO: 3434249 - DNA, 25 bp, Homo sapien
acttggcaaagccgcaggtgttatc

SEQ ID NO: 3434250 - DNA, 25 bp, Homo sapien
tggcaaagccgcaggtgttatcagc

SEQ ID NO: 3434251 - DNA, 25 bp, Homo sapien
aactggcccagggttgtgacgccgg

SEQ ID NO: 3434252 - DNA, 25 bp, Homo sapien
gagacaaggctggttcagacctcgg

SEQ ID NO: 3434253 - DNA, 25 bp, Homo sapien
agggtagagacaaggctggttcaga

SEQ ID NO: 3434254 - DNA, 25 bp, Homo sapien
gtagagacaaggctggttcagacct

SEQ ID NO: 3434255 - DNA, 25 bp, Homo sapien
aaggctggttcagacctcggctttc

SEQ ID NO: 3434256 - DNA, 25 bp, Homo sapien
gggcatgggcgcgagccctctcacc

SEQ ID NO: 3434257 - DNA, 25 bp, Homo sapien
cttggtcccgctgccggcatagagg

SEQ ID NO: 3434258 - DNA, 25 bp, Homo sapien
tgggtccagggatccgttcttggtc

SEQ ID NO: 3434259 - DNA, 25 bp, Homo sapien
agaggaccccttcccggctgattct

SEQ ID NO: 3434260 - DNA, 25 bp, Homo sapien
catctggccacatgggaacgtgcaa

SEQ ID NO: 3434261 - DNA, 25 bp, Homo sapien
ttggtacaggacaccggagaaggcc

SEQ ID NO: 3434262 - DNA, 25 bp, Homo sapien
ccctgggctaccatggagagagctc

SEQ ID NO: 3434263 - DNA, 25 bp, Homo sapien
tgacatcggaaaagcttatccctgg

SEQ ID NO: 3434264 - DNA, 25 bp, Homo sapien
tgtgctgtgtcaaccgggagatgct

SEQ ID NO: 3434265 - DNA, 25 bp, Homo sapien
ccagggcaggactcttatcagctgt

SEQ ID NO: 3434266 - DNA, 25 bp, Homo sapien
tgcagacaggctacctaggaggcag

SEQ ID NO: 3434267 - DNA, 25 bp, Homo sapien
gagccaacatctttcagcatccgtg

SEQ ID NO: 3434268 - DNA, 25 bp, Homo sapien
ggagctattattctaccacactggg

SEQ ID NO: 3434269 - DNA, 25 bp, Homo sapien
taacaaattcacagatcctagggat

SEQ ID NO: 3434270 - DNA, 25 bp, Homo sapien
tatgacatggacagacaacgctggg

SEQ ID NO: 3434271 - DNA, 25 bp, Homo sapien
tgcccaagaggcaagaactccagac

SEQ ID NO: 3434272 - DNA, 25 bp, Homo sapien
ggtctctgccagccctgttcaccca

SEQ ID NO: 3434273 - DNA, 25 bp, Homo sapien
ctgccagccctgttcacccagaggc

SEQ ID NO: 3434274 - DNA, 25 bp, Homo sapien
ggaccacaggtctctgccagccctg

SEQ ID NO: 3434275 - DNA, 25 bp, Homo sapien
cgggaccacaggtctctgccagccc

SEQ ID NO: 3434276 - DNA, 25 bp, Homo sapien
tctcccggccttgaatggcagccgg

SEQ ID NO: 3434277 - DNA, 25 bp, Homo sapien
cgagatctaggagacccggtcagga

SEQ ID NO: 3434278 - DNA, 25 bp, Homo sapien
ggcaggttgatagcggaggggcact

SEQ ID NO: 3434279 - DNA, 25 bp, Homo sapien
ccggggagacaggtcgagatctagg

SEQ ID NO: 3434280 - DNA, 25 bp, Homo sapien
tgcagggccttcctgtacgtgtagc

SEQ ID NO: 3434281 - DNA, 25 bp, Homo sapien
tacagacatggtccctattctaatg

SEQ ID NO: 3434282 - DNA, 25 bp, Homo sapien
cagtgtgggtgaagcgtccagagct

SEQ ID NO: 3434283 - DNA, 25 bp, Homo sapien
tgtacgtgtagccactgaatagcag

SEQ ID NO: 3434284 - DNA, 25 bp, Homo sapien
cctcggcgtctccaggtttgtcctc

SEQ ID NO: 3434285 - DNA, 25 bp, Homo sapien
tgcaggatgcgggagacagaggccg

SEQ ID NO: 3434286 - DNA, 25 bp, Homo sapien
gaggtgtcttcactctctgaccaca

SEQ ID NO: 3434287 - DNA, 25 bp, Homo sapien
acacaaggctgtgcccgagcccttc

SEQ ID NO: 3434288 - DNA, 25 bp, Homo sapien
acttggccaccaggcacttggacac

SEQ ID NO: 3434289 - DNA, 25 bp, Homo sapien
ttggccaccaggcacttggacaccc

SEQ ID NO: 3434290 - DNA, 25 bp, Homo sapien
ggcacttggccaccaggcacttgga

SEQ ID NO: 3434291 - DNA, 25 bp, Homo sapien
tggcacttggccaccaggcacttgg

SEQ ID NO: 3434292 - DNA, 25 bp, Homo sapien
ggagagggatatttgggaagtgcat

SEQ ID NO: 3434293 - DNA, 25 bp, Homo sapien
agagggatatttgggaagtgcatgc

SEQ ID NO: 3434294 - DNA, 25 bp, Homo sapien
gagggatatttgggaagtgcatgca

SEQ ID NO: 3434295 - DNA, 25 bp, Homo sapien
ggggagagggatatttgggaagtgc

SEQ ID NO: 3434296 - DNA, 25 bp, Homo sapien
acatatgtggcgaaggatgcgccag

SEQ ID NO: 3434297 - DNA, 25 bp, Homo sapien
ccaggacattctcggatgctctggc

SEQ ID NO: 3434298 - DNA, 25 bp, Homo sapien
cgccaggacattctcggatgctctg

SEQ ID NO: 3434299 - DNA, 25 bp, Homo sapien
gactggggacatatgtggcgaagga

SEQ ID NO: 3434300 - DNA, 25 bp, Homo sapien
ttggatcagatccctgcgtgaccca

SEQ ID NO: 3434301 - DNA, 25 bp, Homo sapien
tggatcagatccctgcgtgacccag

SEQ ID NO: 3434302 - DNA, 25 bp, Homo sapien
cttggatcagatccctgcgtgaccc

SEQ ID NO: 3434303 - DNA, 25 bp, Homo sapien
tgcctctctgtacatcggctccatc

SEQ ID NO: 3434304 - DNA, 25 bp, Homo sapien
atccttctgtcttgcacacgggcca

SEQ ID NO: 3434305 - DNA, 25 bp, Homo sapien
tgcctcggatccagtcccacagaag

SEQ ID NO: 3434306 - DNA, 25 bp, Homo sapien
agttccaaagcccaagttctcctgc

SEQ ID NO: 3434307 - DNA, 25 bp, Homo sapien
ctcagggagcttgccgatgaaatca

SEQ ID NO: 3434308 - DNA, 25 bp, Homo sapien
tggcctacgagactgggcaccagtg

SEQ ID NO: 3434309 - DNA, 25 bp, Homo sapien
tcctgatcatgctgcgggtccctct

SEQ ID NO: 3434310 - DNA, 25 bp, Homo sapien
tcaaagacctgtatctgatctggcc

SEQ ID NO: 3434311 - DNA, 25 bp, Homo sapien
tggcctcccacggactggacattgt

SEQ ID NO: 3434312 - DNA, 25 bp, Homo sapien
ctccatccttgtcgttatctacttc

SEQ ID NO: 3434313 - DNA, 25 bp, Homo sapien
tcccacggactggacattgtctcct

SEQ ID NO: 3434314 - DNA, 25 bp, Homo sapien
gtcgtggcctcccacggactggaca

SEQ ID NO: 3434315 - DNA, 25 bp, Homo sapien
ttagcactcagtggctaccacaggg

SEQ ID NO: 3434316 - DNA, 25 bp, Homo sapien
ggaatggctcccagaaacgttgcca

SEQ ID NO: 3434317 - DNA, 25 bp, Homo sapien
ttaggcaattgctagcaccccaggg

SEQ ID NO: 3434318 - DNA, 25 bp, Homo sapien
cgaggtggcccagtctaaagccgac

SEQ ID NO: 3434319 - DNA, 25 bp, Homo sapien
agtgctttcccacctagggctcagg

SEQ ID NO: 3434320 - DNA, 25 bp, Homo sapien
tctcagtcgttccagcatttagcgg

SEQ ID NO: 3434321 - DNA, 25 bp, Homo sapien
gggactcgaagactgtgccctggac

SEQ ID NO: 3434322 - DNA, 25 bp, Homo sapien
catttagcggagcacttggtaccag

SEQ ID NO: 3434323 - DNA, 25 bp, Homo sapien
tcacgtcactgcagagaagccaggc

SEQ ID NO: 3434324 - DNA, 25 bp, Homo sapien
ttcacgtatgtgttggcttttacta

SEQ ID NO: 3434325 - DNA, 25 bp, Homo sapien
ctgcatcctgaagctcacgtcactg

SEQ ID NO: 3434326 - DNA, 25 bp, Homo sapien
cactgatgtggccagttttcacgta

SEQ ID NO: 3434327 - DNA, 25 bp, Homo sapien
gacatgctggctgaactcactccat

SEQ ID NO: 3434328 - DNA, 25 bp, Homo sapien
agccgacatgctggctgaactcact

SEQ ID NO: 3434329 - DNA, 25 bp, Homo sapien
cgacatgctggctgaactcactcca

SEQ ID NO: 3434330 - DNA, 25 bp, Homo sapien
gccgacatgctggctgaactcactc

SEQ ID NO: 3434331 - DNA, 25 bp, Homo sapien
ttcaagctcagaacctctaacagag

SEQ ID NO: 3434332 - DNA, 25 bp, Homo sapien
tccatcaggcactcagccaataaac

SEQ ID NO: 3434333 - DNA, 25 bp, Homo sapien
tctgagtgctcatgatgtgctgggc

SEQ ID NO: 3434334 - DNA, 25 bp, Homo sapien
caggagttggcataaatcggggctt

SEQ ID NO: 3434335 - DNA, 25 bp, Homo sapien
gcaaacacattgcagagatcctccc

SEQ ID NO: 3434336 - DNA, 25 bp, Homo sapien
agggtccacatgtggtccggcccct

SEQ ID NO: 3434337 - DNA, 25 bp, Homo sapien
cggcccctcggcatacagggagatg

SEQ ID NO: 3434338 - DNA, 25 bp, Homo sapien
aatgtgcccttcgacgggctggtga

SEQ ID NO: 3434339 - DNA, 25 bp, Homo sapien
ctgtgccggcgtatcccagtgcccc

SEQ ID NO: 3434340 - DNA, 25 bp, Homo sapien
cacacccgtgttcccgctcctgtgg

SEQ ID NO: 3434341 - DNA, 25 bp, Homo sapien
tgccagagggagccgtggtcagcca

SEQ ID NO: 3434342 - DNA, 25 bp, Homo sapien
aggctgtcctgtgccggcgtatccc

SEQ ID NO: 3434343 - DNA, 25 bp, Homo sapien
ttctcccaggcctgcggcctgatga

SEQ ID NO: 3434344 - DNA, 25 bp, Homo sapien
caggcctgcggcctgatgaagctgt

SEQ ID NO: 3434345 - DNA, 25 bp, Homo sapien
atggaggcggctcctggaatgatct

SEQ ID NO: 3434346 - DNA, 25 bp, Homo sapien
aatgatctgcaaggtctcagtcccc

SEQ ID NO: 3434347 - DNA, 25 bp, Homo sapien
aatttccagcttgcttgccgagcgc

SEQ ID NO: 3434348 - DNA, 25 bp, Homo sapien
ttgcgccatctgattgctattaggg

SEQ ID NO: 3434349 - DNA, 25 bp, Homo sapien
gccgagcgccgtgattttccacttg

SEQ ID NO: 3434350 - DNA, 25 bp, Homo sapien
agcccgccaatttccagcttgcttg

SEQ ID NO: 3434351 - DNA, 25 bp, Homo sapien
acagaggcacatctctcccagtctg

SEQ ID NO: 3434352 - DNA, 25 bp, Homo sapien
tctctcccagtctgggcactacact

SEQ ID NO: 3434353 - DNA, 25 bp, Homo sapien
tcccttcaagatgcccacagaggca

SEQ ID NO: 3434354 - DNA, 25 bp, Homo sapien
ttcccttcaagatgcccacagaggc

SEQ ID NO: 3434355 - DNA, 25 bp, Homo sapien
aggaggccagctgagccgcgcaggg

SEQ ID NO: 3434356 - DNA, 25 bp, Homo sapien
cgctgaggttcgcacatggccagga

SEQ ID NO: 3434357 - DNA, 25 bp, Homo sapien
cgagagtccctcttccacgctgagg

SEQ ID NO: 3434358 - DNA, 25 bp, Homo sapien
agggagcagtgcgagagtccctctt

SEQ ID NO: 3434359 - DNA, 25 bp, Homo sapien
caaataaggcggtggacttcagagc

SEQ ID NO: 3434360 - DNA, 25 bp, Homo sapien
tgtaaacaagcgttccagctgggcc

SEQ ID NO: 3434361 - DNA, 25 bp, Homo sapien
gcaattacacttggaactcgccggg

SEQ ID NO: 3434362 - DNA, 25 bp, Homo sapien
ttttaagtgtccaaacgcaattaca

SEQ ID NO: 3434363 - DNA, 25 bp, Homo sapien
ggagcagcagggcaaccataggcca

SEQ ID NO: 3434364 - DNA, 25 bp, Homo sapien
gcagcagggcaaccataggccacag

SEQ ID NO: 3434365 - DNA, 25 bp, Homo sapien
agggcaaccataggccacagaagca

SEQ ID NO: 3434366 - DNA, 25 bp, Homo sapien
gggccacgagggctggtccacaccc

SEQ ID NO: 3434367 - DNA, 25 bp, Homo sapien
ttcctgtgggttgcgtgagcagcca

SEQ ID NO: 3434368 - DNA, 25 bp, Homo sapien
ggtctcagtgtaagcatcatctctg

SEQ ID NO: 3434369 - DNA, 25 bp, Homo sapien
ggcagagagtcccacattggaaaga

SEQ ID NO: 3434370 - DNA, 25 bp, Homo sapien
gagatggacacagtcaggcagtatc

SEQ ID NO: 3434371 - DNA, 25 bp, Homo sapien
taatgacgggacatcacggatccgc

SEQ ID NO: 3434372 - DNA, 25 bp, Homo sapien
tgtggacgaggtagaccaaacctgg

SEQ ID NO: 3434373 - DNA, 25 bp, Homo sapien
tcacggatccgcttaaggcgggaca

SEQ ID NO: 3434374 - DNA, 25 bp, Homo sapien
cagtcctgtgctgaaattgaaggtc

SEQ ID NO: 3434375 - DNA, 25 bp, Homo sapien
gacaaggctactgcaaactttttga

SEQ ID NO: 3434376 - DNA, 25 bp, Homo sapien
ttttaggagtgacaaggctactgca

SEQ ID NO: 3434377 - DNA, 25 bp, Homo sapien
gagtgacaaggctactgcaaacttt

SEQ ID NO: 3434378 - DNA, 25 bp, Homo sapien
gctactgcaaactttttgaaggtta

SEQ ID NO: 3434379 - DNA, 25 bp, Homo sapien
tcagtgcaacttcaactcctgtttc

SEQ ID NO: 3434380 - DNA, 25 bp, Homo sapien
tcagtgttcagtgcaacttcaactc

SEQ ID NO: 3434381 - DNA, 25 bp, Homo sapien
aaggaaagcccgcacgtgacctcag

SEQ ID NO: 3434382 - DNA, 25 bp, Homo sapien
ccgcacgtgacctcagtgttcagtg

SEQ ID NO: 3434383 - DNA, 25 bp, Homo sapien
cagtaaggcagacggtgccggagcc

SEQ ID NO: 3434384 - DNA, 25 bp, Homo sapien
taaggcagacggtgccggagccatc

SEQ ID NO: 3434385 - DNA, 25 bp, Homo sapien
gtaaggcagacggtgccggagccat

SEQ ID NO: 3434386 - DNA, 25 bp, Homo sapien
agcagtaaggcagacggtgccggag

SEQ ID NO: 3434387 - DNA, 25 bp, Homo sapien
ggccaagccagcatgattcatccag

SEQ ID NO: 3434388 - DNA, 25 bp, Homo sapien
actgggccaagccagcatgattcat

SEQ ID NO: 3434389 - DNA, 25 bp, Homo sapien
tgctcctgttcccggaagcctcttt

SEQ ID NO: 3434390 - DNA, 25 bp, Homo sapien
tgggccaagccagcatgattcatcc

SEQ ID NO: 3434391 - DNA, 25 bp, Homo sapien
tatgttgtgaaccaaatggcttgtg

SEQ ID NO: 3434392 - DNA, 25 bp, Homo sapien
aaagtgagggctgaagtccgagccc

SEQ ID NO: 3434393 - DNA, 25 bp, Homo sapien
gggacgagagtcactagggtggcgt

SEQ ID NO: 3434394 - DNA, 25 bp, Homo sapien
cactagggtggcgtcgggaaagtga

SEQ ID NO: 3434395 - DNA, 25 bp, Homo sapien
caggcgcggagaccccgtccctggc

SEQ ID NO: 3434396 - DNA, 25 bp, Homo sapien
tggacccgaccctcagaagctcaag

SEQ ID NO: 3434397 - DNA, 25 bp, Homo sapien
tgcgcaggcgcggagaccccgtccc

SEQ ID NO: 3434398 - DNA, 25 bp, Homo sapien
ccacgcgctggacccgaccctcaga

SEQ ID NO: 3434399 - DNA, 25 bp, Homo sapien
ccgactccgcctggggttccgccat

SEQ ID NO: 3434400 - DNA, 25 bp, Homo sapien
agcaggggctccgactccgcctggg

SEQ ID NO: 3434401 - DNA, 25 bp, Homo sapien
gcgggccccgcccagcaggggctcc

SEQ ID NO: 3434402 - DNA, 25 bp, Homo sapien
ccagcaggggctccgactccgcctg

SEQ ID NO: 3434403 - DNA, 25 bp, Homo sapien
atgctgcggtaagtggtcagccccg

SEQ ID NO: 3434404 - DNA, 25 bp, Homo sapien
agggccgacttggatgctgcggtaa

SEQ ID NO: 3434405 - DNA, 25 bp, Homo sapien
acttggatgctgcggtaagtggtca

SEQ ID NO: 3434406 - DNA, 25 bp, Homo sapien
ggccgacttggatgctgcggtaagt

SEQ ID NO: 3434407 - DNA, 25 bp, Homo sapien
tagggtaacgcctctctgtgagcct

SEQ ID NO: 3434408 - DNA, 25 bp, Homo sapien
ccttgggtagggtaacgcctctctg

SEQ ID NO: 3434409 - DNA, 25 bp, Homo sapien
tgggtagggtaacgcctctctgtga

SEQ ID NO: 3434410 - DNA, 25 bp, Homo sapien
gtagggtaacgcctctctgtgagcc

SEQ ID NO: 3434411 - DNA, 25 bp, Homo sapien
aaagagatgactccacccggcagtg

SEQ ID NO: 3434412 - DNA, 25 bp, Homo sapien
cgtgatcaaggaaagatgccggctg

SEQ ID NO: 3434413 - DNA, 25 bp, Homo sapien
tccaggatacccgtgatcaaggaaa

SEQ ID NO: 3434414 - DNA, 25 bp, Homo sapien
ggccgtttgtaaagagatgactcca

SEQ ID NO: 3434415 - DNA, 25 bp, Homo sapien
ctgaatagcatcttcgatgaagacc

SEQ ID NO: 3434416 - DNA, 25 bp, Homo sapien
tcttcgatgaagaccacagcctgat

SEQ ID NO: 3434417 - DNA, 25 bp, Homo sapien
tgatcaatgcagaggtcccacctgg

SEQ ID NO: 3434418 - DNA, 25 bp, Homo sapien
gaccacagcctgatcaatgcagagg

SEQ ID NO: 3434419 - DNA, 25 bp, Homo sapien
caaagcagcaaatgcgtccaggatg

SEQ ID NO: 3434420 - DNA, 25 bp, Homo sapien
ggactgacgaagagccgtgcccaga

SEQ ID NO: 3434421 - DNA, 25 bp, Homo sapien
cagaacacggtgcatcaaagcagca

SEQ ID NO: 3434422 - DNA, 25 bp, Homo sapien
ggatgcagaagacaagtcctccggg

SEQ ID NO: 3434423 - DNA, 25 bp, Homo sapien
catccacccggtggttgatggagcg

SEQ ID NO: 3434424 - DNA, 25 bp, Homo sapien
taataccgtcggtaaagccacatcg

SEQ ID NO: 3434425 - DNA, 25 bp, Homo sapien
taaagccacatcgagctggcatcca

SEQ ID NO: 3434426 - DNA, 25 bp, Homo sapien
cgttggcatacgttcgagtaatacc

SEQ ID NO: 3434427 - DNA, 25 bp, Homo sapien
agagcacctcgacactctcggtcag

SEQ ID NO: 3434428 - DNA, 25 bp, Homo sapien
cttcacagagaggtcggccgcaaag

SEQ ID NO: 3434429 - DNA, 25 bp, Homo sapien
caaaaacaggatcaagaagatggtg

SEQ ID NO: 3434430 - DNA, 25 bp, Homo sapien
cacgtccgccgtgctggtgagtgag

SEQ ID NO: 3434431 - DNA, 25 bp, Homo sapien
ctcatgacacacgagactcagggac

SEQ ID NO: 3434432 - DNA, 25 bp, Homo sapien
tagcccagcagccaaaggtttttct

SEQ ID NO: 3434433 - DNA, 25 bp, Homo sapien
agactcagggacacggtccagtcca

SEQ ID NO: 3434434 - DNA, 25 bp, Homo sapien
cagcagccaaaggtttttctggaaa

SEQ ID NO: 3434435 - DNA, 25 bp, Homo sapien
cagctctattctcgcaaagcccagg

SEQ ID NO: 3434436 - DNA, 25 bp, Homo sapien
tctcccagctctattctcgcaaagc

SEQ ID NO: 3434437 - DNA, 25 bp, Homo sapien
ccagctctattctcgcaaagcccag

SEQ ID NO: 3434438 - DNA, 25 bp, Homo sapien
tcccagctctattctcgcaaagccc

SEQ ID NO: 3434439 - DNA, 25 bp, Homo sapien
gctggaccatagcttgttcatggaa

SEQ ID NO: 3434440 - DNA, 25 bp, Homo sapien
tctgggtccccgctctggaaatatc

SEQ ID NO: 3434441 - DNA, 25 bp, Homo sapien
tctggaaatatccactcccaaggtg

SEQ ID NO: 3434442 - DNA, 25 bp, Homo sapien
gggatgcttccaccgggacacacgc

SEQ ID NO: 3434443 - DNA, 25 bp, Homo sapien
cccagacacaagagcccaacctgag

SEQ ID NO: 3434444 - DNA, 25 bp, Homo sapien
tccccagacacaagagcccaacctg

SEQ ID NO: 3434445 - DNA, 25 bp, Homo sapien
cttccccagacacaagagcccaacc

SEQ ID NO: 3434446 - DNA, 25 bp, Homo sapien
ccagacacaagagcccaacctgagg

SEQ ID NO: 3434447 - DNA, 25 bp, Homo sapien
ggccctccagaacatctgcaagtga

SEQ ID NO: 3434448 - DNA, 25 bp, Homo sapien
tctgcaagtgactgatccccagcgc

SEQ ID NO: 3434449 - DNA, 25 bp, Homo sapien
gcaagtgactgatccccagcgctca

SEQ ID NO: 3434450 - DNA, 25 bp, Homo sapien
aggccctccagaacatctgcaagtg

SEQ ID NO: 3434451 - DNA, 25 bp, Homo sapien
gacggagaagccggcggatccgcag

SEQ ID NO: 3434452 - DNA, 25 bp, Homo sapien
acggagaagccggcggatccgcagg

SEQ ID NO: 3434453 - DNA, 25 bp, Homo sapien
ggagaagccggcggatccgcagggg

SEQ ID NO: 3434454 - DNA, 25 bp, Homo sapien
ggacggagaagccggcggatccgca

SEQ ID NO: 3434455 - DNA, 25 bp, Homo sapien
accagcggatgcatttcaaggtctt

SEQ ID NO: 3434456 - DNA, 25 bp, Homo sapien
cagcgaccagcggatgcatttcaag

SEQ ID NO: 3434457 - DNA, 25 bp, Homo sapien
gcgaccagcggatgcatttcaaggt

SEQ ID NO: 3434458 - DNA, 25 bp, Homo sapien
ggcagcgaccagcggatgcatttca

SEQ ID NO: 3434459 - DNA, 25 bp, Homo sapien
caagatgagactccggtgggcccca

SEQ ID NO: 3434460 - DNA, 25 bp, Homo sapien
tgcggagcacgcagtccaagatgag

SEQ ID NO: 3434461 - DNA, 25 bp, Homo sapien
ccagggatgcggagcacgcagtcca

SEQ ID NO: 3434462 - DNA, 25 bp, Homo sapien
ccaaccctgcgagcccagagcacca

SEQ ID NO: 3434463 - DNA, 25 bp, Homo sapien
cgaacagcagcattccgaacatggt

SEQ ID NO: 3434464 - DNA, 25 bp, Homo sapien
cagaccctgaccacgggtgccctac

SEQ ID NO: 3434465 - DNA, 25 bp, Homo sapien
ccagaccctgaccacgggtgcccta

SEQ ID NO: 3434466 - DNA, 25 bp, Homo sapien
gcccagccccctctgttagtcacag

SEQ ID NO: 3434467 - DNA, 25 bp, Homo sapien
gaagacgcctccacacagcaacgag

SEQ ID NO: 3434468 - DNA, 25 bp, Homo sapien
ctccacacagcaacgagctgctggg

SEQ ID NO: 3434469 - DNA, 25 bp, Homo sapien
aggaagacgcctccacacagcaacg

SEQ ID NO: 3434470 - DNA, 25 bp, Homo sapien
cgcctccacacagcaacgagctgct

SEQ ID NO: 3434471 - DNA, 25 bp, Homo sapien
agcagcagagatgcagcgtggcccc

SEQ ID NO: 3434472 - DNA, 25 bp, Homo sapien
agccccaagaaggatggtgccctcg

SEQ ID NO: 3434473 - DNA, 25 bp, Homo sapien
aaggatggtgccctcggccaggaca

SEQ ID NO: 3434474 - DNA, 25 bp, Homo sapien
gaacagcagcgcaggctgagcactg

SEQ ID NO: 3434475 - DNA, 25 bp, Homo sapien
tcagccttccccttctggacaacac

SEQ ID NO: 3434476 - DNA, 25 bp, Homo sapien
ccttccccttctggacaacacacac

SEQ ID NO: 3434477 - DNA, 25 bp, Homo sapien
gccttccccttctggacaacacaca

SEQ ID NO: 3434478 - DNA, 25 bp, Homo sapien
cagccttccccttctggacaacaca

SEQ ID NO: 3434479 - DNA, 25 bp, Homo sapien
gatcgtttcaaagccacaatcccag

SEQ ID NO: 3434480 - DNA, 25 bp, Homo sapien
gacttggcacacaaagcaacctcct

SEQ ID NO: 3434481 - DNA, 25 bp, Homo sapien
agatgggtggttcccgcaaaccaga

SEQ ID NO: 3434482 - DNA, 25 bp, Homo sapien
tctgctcggaaagcaactctgcttg

SEQ ID NO: 3434483 - DNA, 25 bp, Homo sapien
ttggtaagggggcatccacaccgga

SEQ ID NO: 3434484 - DNA, 25 bp, Homo sapien
tggcgaatcacagccattggtaagg

SEQ ID NO: 3434485 - DNA, 25 bp, Homo sapien
actcagtggcactgtgctcgtggct

SEQ ID NO: 3434486 - DNA, 25 bp, Homo sapien
atccacaccggagtccctatcctct

SEQ ID NO: 3434487 - DNA, 25 bp, Homo sapien
ccacctcgcctgctcgcagccgact

SEQ ID NO: 3434488 - DNA, 25 bp, Homo sapien
ctgctcgcagccgactctgccatgc

SEQ ID NO: 3434489 - DNA, 25 bp, Homo sapien
ctcgcctgctcgcagccgactctgc

SEQ ID NO: 3434490 - DNA, 25 bp, Homo sapien
cgcctgctcgcagccgactctgcca

SEQ ID NO: 3434491 - DNA, 25 bp, Homo sapien
taagagcagaagcggcagctccagg

SEQ ID NO: 3434492 - DNA, 25 bp, Homo sapien
ctaagagcagaagcggcagctccag

SEQ ID NO: 3434493 - DNA, 25 bp, Homo sapien
gcaggttctggaagtaggtcagcct

SEQ ID NO: 3434494 - DNA, 25 bp, Homo sapien
caggttctggaagtaggtcagcctc

SEQ ID NO: 3434495 - DNA, 25 bp, Homo sapien
catcggggttgttggccgtggtcag

SEQ ID NO: 3434496 - DNA, 25 bp, Homo sapien
cggggttgttggccgtggtcagcag

SEQ ID NO: 3434497 - DNA, 25 bp, Homo sapien
aaggaggtctccattgctgagcgtg

SEQ ID NO: 3434498 - DNA, 25 bp, Homo sapien
tgacgctacactatttgcttttgca

SEQ ID NO: 3434499 - DNA, 25 bp, Homo sapien
gaaaggaggtctccattgctgagcg

SEQ ID NO: 3434500 - DNA, 25 bp, Homo sapien
cctgacgctacactatttgcttttg

SEQ ID NO: 3434501 - DNA, 25 bp, Homo sapien
aagaaataacagaaactgacaacct

SEQ ID NO: 3434502 - DNA, 25 bp, Homo sapien
aataacagaaactgacaacctcagt

SEQ ID NO: 3434503 - DNA, 25 bp, Homo sapien
taacagaaactgacaacctcagtac

SEQ ID NO: 3434504 - DNA, 25 bp, Homo sapien
aaataacagaaactgacaacctcag

SEQ ID NO: 3434505 - DNA, 25 bp, Homo sapien
tgaagaagatggcataggcccggtt

SEQ ID NO: 3434506 - DNA, 25 bp, Homo sapien
gcccggttcttggaatacgcaggaa

SEQ ID NO: 3434507 - DNA, 25 bp, Homo sapien
ggttcttggaatacgcaggaatcat

SEQ ID NO: 3434508 - DNA, 25 bp, Homo sapien
ggcataggcccggttcttggaatac

SEQ ID NO: 3434509 - DNA, 25 bp, Homo sapien
tgctggccacgttacctgcactcac

SEQ ID NO: 3434510 - DNA, 25 bp, Homo sapien
aatgctggccacgttacctgcactc

SEQ ID NO: 3434511 - DNA, 25 bp, Homo sapien
atgctggccacgttacctgcactca

SEQ ID NO: 3434512 - DNA, 25 bp, Homo sapien
gtgaacctgttggcgggagatccct

SEQ ID NO: 3434513 - DNA, 25 bp, Homo sapien
ggggtgaacctgttggcgggagatc

SEQ ID NO: 3434514 - DNA, 25 bp, Homo sapien
ggtgaacctgttggcgggagatccc

SEQ ID NO: 3434515 - DNA, 25 bp, Homo sapien
cctggggtgaacctgttggcgggag

SEQ ID NO: 3434516 - DNA, 25 bp, Homo sapien
gggcgtcccctatcaaatggaaaca

SEQ ID NO: 3434517 - DNA, 25 bp, Homo sapien
cgccgggggcgtcccctatcaaatg

SEQ ID NO: 3434518 - DNA, 25 bp, Homo sapien
gtcccctatcaaatggaaacatggc

SEQ ID NO: 3434519 - DNA, 25 bp, Homo sapien
ggcgtcccctatcaaatggaaacat

SEQ ID NO: 3434520 - DNA, 25 bp, Homo sapien
gaactgactgtagatgatggctgtc

SEQ ID NO: 3434521 - DNA, 25 bp, Homo sapien
gatggctgtcagcaggttcatcaga

SEQ ID NO: 3434522 - DNA, 25 bp, Homo sapien
caggtagccccggaactgactgtag

SEQ ID NO: 3434523 - DNA, 25 bp, Homo sapien
gctgtcagcaggttcatcagaaaca

SEQ ID NO: 3434524 - DNA, 25 bp, Homo sapien
cttggcctcccggcagctccaggca

SEQ ID NO: 3434525 - DNA, 25 bp, Homo sapien
ttggcctcccggcagctccaggcac

SEQ ID NO: 3434526 - DNA, 25 bp, Homo sapien
ctgcttggcctcccggcagctccag

SEQ ID NO: 3434527 - DNA, 25 bp, Homo sapien
tgcttggcctcccggcagctccagg

SEQ ID NO: 3434528 - DNA, 25 bp, Homo sapien
cgcctccgaaacagcgaggtctgga

SEQ ID NO: 3434529 - DNA, 25 bp, Homo sapien
gccgcctccgaaacagcgaggtctg

SEQ ID NO: 3434530 - DNA, 25 bp, Homo sapien
cagccgcctccgaaacagcgaggtc

SEQ ID NO: 3434531 - DNA, 25 bp, Homo sapien
gcctccgaaacagcgaggtctggag

SEQ ID NO: 3434532 - DNA, 25 bp, Homo sapien
gcctgagggaaggctcctccctccc

SEQ ID NO: 3434533 - DNA, 25 bp, Homo sapien
tgagggaaggctcctccctccccca

SEQ ID NO: 3434534 - DNA, 25 bp, Homo sapien
catggcctgtttgtgggagctgtcc

SEQ ID NO: 3434535 - DNA, 25 bp, Homo sapien
ctccatcatggcctgtttgtgggag

SEQ ID NO: 3434536 - DNA, 25 bp, Homo sapien
ccatcatggcctgtttgtgggagct

SEQ ID NO: 3434537 - DNA, 25 bp, Homo sapien
atcatggcctgtttgtgggagctgt

SEQ ID NO: 3434538 - DNA, 25 bp, Homo sapien
cagaacactgccataggaacgcacc

SEQ ID NO: 3434539 - DNA, 25 bp, Homo sapien
cagctgagagcagaacactgccata

SEQ ID NO: 3434540 - DNA, 25 bp, Homo sapien
gaaactcctcagctgagagcagaac

SEQ ID NO: 3434541 - DNA, 25 bp, Homo sapien
tgagagcagaacactgccataggaa

SEQ ID NO: 3434542 - DNA, 25 bp, Homo sapien
ttctgtcaagctcgttgaagagctt

SEQ ID NO: 3434543 - DNA, 25 bp, Homo sapien
acttctgtcaagctcgttgaagagc

SEQ ID NO: 3434544 - DNA, 25 bp, Homo sapien
cttctgtcaagctcgttgaagagct

SEQ ID NO: 3434545 - DNA, 25 bp, Homo sapien
ccctgggcggctgtggccccagtta

SEQ ID NO: 3434546 - DNA, 25 bp, Homo sapien
ccaccctgggcggctgtggccccag

SEQ ID NO: 3434547 - DNA, 25 bp, Homo sapien
tatccaccctgggcggctgtggccc

SEQ ID NO: 3434548 - DNA, 25 bp, Homo sapien
ctatccaccctgggcggctgtggcc

SEQ ID NO: 3434549 - DNA, 25 bp, Homo sapien
tggagaggaccagtgtgtggacctc

SEQ ID NO: 3434550 - DNA, 25 bp, Homo sapien
ggccttggagaggaccagtgtgtgg

SEQ ID NO: 3434551 - DNA, 25 bp, Homo sapien
ccttggagaggaccagtgtgtggac

SEQ ID NO: 3434552 - DNA, 25 bp, Homo sapien
cttggagaggaccagtgtgtggacc

SEQ ID NO: 3434553 - DNA, 25 bp, Homo sapien
gtctgaaccccagcttcggagggtc

SEQ ID NO: 3434554 - DNA, 25 bp, Homo sapien
tctgaaccccagcttcggagggtcc

SEQ ID NO: 3434555 - DNA, 25 bp, Homo sapien
cggggaagccagtgaacgtctctgc

SEQ ID NO: 3434556 - DNA, 25 bp, Homo sapien
ggaagccagtgaacgtctctgcatt

SEQ ID NO: 3434557 - DNA, 25 bp, Homo sapien
cagcccggggaagccagtgaacgtc

SEQ ID NO: 3434558 - DNA, 25 bp, Homo sapien
cccggggaagccagtgaacgtctct

SEQ ID NO: 3434559 - DNA, 25 bp, Homo sapien
tagtcaaagtagtagtggccgaaga

SEQ ID NO: 3434560 - DNA, 25 bp, Homo sapien
tggccgaagaggaactgggcgctct

SEQ ID NO: 3434561 - DNA, 25 bp, Homo sapien
tgggcgctctgcagaaacggagact

SEQ ID NO: 3434562 - DNA, 25 bp, Homo sapien
aacggagactggtactcgggcctcg

SEQ ID NO: 3434563 - DNA, 25 bp, Homo sapien
ctgcaacgccagaacagagggctcg

SEQ ID NO: 3434564 - DNA, 25 bp, Homo sapien
gcaacgccagaacagagggctcgcc

SEQ ID NO: 3434565 - DNA, 25 bp, Homo sapien
tgcaacgccagaacagagggctcgc

SEQ ID NO: 3434566 - DNA, 25 bp, Homo sapien
caggatgaagtcatcacgctcagca

SEQ ID NO: 3434567 - DNA, 25 bp, Homo sapien
acatctgcatccagcaccaggaaca

SEQ ID NO: 3434568 - DNA, 25 bp, Homo sapien
gcaggcagcacatctgcatccagca

SEQ ID NO: 3434569 - DNA, 25 bp, Homo sapien
aagtcatcacgctcagcaggcagca

SEQ ID NO: 3434570 - DNA, 25 bp, Homo sapien
ggtaggacaggtaccctcgcaggcc

SEQ ID NO: 3434571 - DNA, 25 bp, Homo sapien
tacacaatgaagacgcagttgagaa

SEQ ID NO: 3434572 - DNA, 25 bp, Homo sapien
gaggagcccgtcaaacacgttgctg

SEQ ID NO: 3434573 - DNA, 25 bp, Homo sapien
ggcccagggcaaagaccttgagcag

SEQ ID NO: 3434574 - DNA, 25 bp, Homo sapien
ttcagctggaaagacaccctggcct

SEQ ID NO: 3434575 - DNA, 25 bp, Homo sapien
tacagcaacactaatctgggcggcc

SEQ ID NO: 3434576 - DNA, 25 bp, Homo sapien
gacactcggatgcagtagaaaccca

SEQ ID NO: 3434577 - DNA, 25 bp, Homo sapien
tggccagggctacaagtccttcagg

SEQ ID NO: 3434578 - DNA, 25 bp, Homo sapien
tgggtgtggcaatcggtacacagcc

SEQ ID NO: 3434579 - DNA, 25 bp, Homo sapien
gcctgggtgtggcaatcggtacaca

SEQ ID NO: 3434580 - DNA, 25 bp, Homo sapien
cagcctgggtgtggcaatcggtaca

SEQ ID NO: 3434581 - DNA, 25 bp, Homo sapien
tgtggcaatcggtacacagccagag

SEQ ID NO: 3434582 - DNA, 25 bp, Homo sapien
gcagaactgcgtgagcccatgtctc

SEQ ID NO: 3434583 - DNA, 25 bp, Homo sapien
tcaggccccagcagaactgcgtgag

SEQ ID NO: 3434584 - DNA, 25 bp, Homo sapien
accctctgtccacacgggagggcat

SEQ ID NO: 3434585 - DNA, 25 bp, Homo sapien
cctctgtccacacgggagggcatgg

SEQ ID NO: 3434586 - DNA, 25 bp, Homo sapien
ccacctgcagccccggagcgacccc

SEQ ID NO: 3434587 - DNA, 25 bp, Homo sapien
tgctccgcttccacctgcagccccg

SEQ ID NO: 3434588 - DNA, 25 bp, Homo sapien
tccacctgcagccccggagcgaccc

SEQ ID NO: 3434589 - DNA, 25 bp, Homo sapien
cctgcagccccggagcgacccccat

SEQ ID NO: 3434590 - DNA, 25 bp, Homo sapien
gccaacaccgagcagaaaagcctct

SEQ ID NO: 3434591 - DNA, 25 bp, Homo sapien
caacagggcatgacgggagtgcacc

SEQ ID NO: 3434592 - DNA, 25 bp, Homo sapien
gttcctggacggaggcgcagggagg

SEQ ID NO: 3434593 - DNA, 25 bp, Homo sapien
agagacacgggaggcgggttgggag

SEQ ID NO: 3434594 - DNA, 25 bp, Homo sapien
gggatgatacgcaggaagcggaaca

SEQ ID NO: 3434595 - DNA, 25 bp, Homo sapien
gtcatgtcccacagcgacagcaggc

SEQ ID NO: 3434596 - DNA, 25 bp, Homo sapien
atgcgggtcatgtcccacagcgaca

SEQ ID NO: 3434597 - DNA, 25 bp, Homo sapien
gagcatgttcagcatgcgggtcatg

SEQ ID NO: 3434598 - DNA, 25 bp, Homo sapien
caccctggagcaacgcagcagcatg

SEQ ID NO: 3434599 - DNA, 25 bp, Homo sapien
acgcagcagcatgacccaggagggt

SEQ ID NO: 3434600 - DNA, 25 bp, Homo sapien
agcaacgcagcagcatgacccagga

SEQ ID NO: 3434601 - DNA, 25 bp, Homo sapien
tggagcaacgcagcagcatgaccca

SEQ ID NO: 3434602 - DNA, 25 bp, Homo sapien
tgaggacaggaagagagcacagccc

SEQ ID NO: 3434603 - DNA, 25 bp, Homo sapien
accatcccggcccaccacgctgacc

SEQ ID NO: 3434604 - DNA, 25 bp, Homo sapien
agagcacagcccttactcctcctgg

SEQ ID NO: 3434605 - DNA, 25 bp, Homo sapien
tcctggccccactgaggggacacca

SEQ ID NO: 3434606 - DNA, 25 bp, Homo sapien
caaacgcacgcatgttctgcaccag

SEQ ID NO: 3434607 - DNA, 25 bp, Homo sapien
aggcccaggacggtactggccacca

SEQ ID NO: 3434608 - DNA, 25 bp, Homo sapien
aacgcacgcatgttctgcaccaggc

SEQ ID NO: 3434609 - DNA, 25 bp, Homo sapien
aggatcccgccaaacgcacgcatgt

SEQ ID NO: 3434610 - DNA, 25 bp, Homo sapien
taaacaagttgatcccaatgatggc

SEQ ID NO: 3434611 - DNA, 25 bp, Homo sapien
caatgacgcctctaaacaagttgat

SEQ ID NO: 3434612 - DNA, 25 bp, Homo sapien
tgatggcaaatacgtagtagaccac

SEQ ID NO: 3434613 - DNA, 25 bp, Homo sapien
gctgtttccaggaagagccacaatg

SEQ ID NO: 3434614 - DNA, 25 bp, Homo sapien
tgtttagcagactccaggcaagggc

SEQ ID NO: 3434615 - DNA, 25 bp, Homo sapien
tctgagcaggccacgagaaatgtgt

SEQ ID NO: 3434616 - DNA, 25 bp, Homo sapien
gtacaaattgggatacagaggctca

SEQ ID NO: 3434617 - DNA, 25 bp, Homo sapien
gcaggccacgagaaatgtgtttagc

SEQ ID NO: 3434618 - DNA, 25 bp, Homo sapien
aaagtcatcgaagttgttggcccag

SEQ ID NO: 3434619 - DNA, 25 bp, Homo sapien
gctcgaagctcccacagggcgccga

SEQ ID NO: 3434620 - DNA, 25 bp, Homo sapien
acagggcgccgagccattggcaggg

SEQ ID NO: 3434621 - DNA, 25 bp, Homo sapien
aagttgttggcccagtactccagct

SEQ ID NO: 3434622 - DNA, 25 bp, Homo sapien
ctgagtagcgccgatatgcatccag

SEQ ID NO: 3434623 - DNA, 25 bp, Homo sapien
gggcctgagtagcgccgatatgcat

SEQ ID NO: 3434624 - DNA, 25 bp, Homo sapien
agcgccgatatgcatccagaaacac

SEQ ID NO: 3434625 - DNA, 25 bp, Homo sapien
gagtagcgccgatatgcatccagaa

SEQ ID NO: 3434626 - DNA, 25 bp, Homo sapien
cgacctccaggaggtgtaaacccag

SEQ ID NO: 3434627 - DNA, 25 bp, Homo sapien
caggaggtgtaaacccagagtcact

SEQ ID NO: 3434628 - DNA, 25 bp, Homo sapien
cctccaggaggtgtaaacccagagt

SEQ ID NO: 3434629 - DNA, 25 bp, Homo sapien
caccatcctgagagtcacgatgtgg

SEQ ID NO: 3434630 - DNA, 25 bp, Homo sapien
gttgacccagatgacagacgacacc

SEQ ID NO: 3434631 - DNA, 25 bp, Homo sapien
acgacaccagccaccacaatacaaa

SEQ ID NO: 3434632 - DNA, 25 bp, Homo sapien
acaggttgacccagatgacagacga

SEQ ID NO: 3434633 - DNA, 25 bp, Homo sapien
caggttgacccagatgacagacgac

SEQ ID NO: 3434634 - DNA, 25 bp, Homo sapien
aggagctccacagtcatctggtagg

SEQ ID NO: 3434635 - DNA, 25 bp, Homo sapien
ggagctccacagtcatctggtaggt

SEQ ID NO: 3434636 - DNA, 25 bp, Homo sapien
ccacaggtgcgggtgctggctcagc

SEQ ID NO: 3434637 - DNA, 25 bp, Homo sapien
gtgcgggtgctggctcagcctctct

SEQ ID NO: 3434638 - DNA, 25 bp, Homo sapien
ctgcacagccacaggtgcgggtgct

SEQ ID NO: 3434639 - DNA, 25 bp, Homo sapien
acaggtgcgggtgctggctcagcct

SEQ ID NO: 3434640 - DNA, 25 bp, Homo sapien
tgggccacacgcaaaggacttggtt

SEQ ID NO: 3434641 - DNA, 25 bp, Homo sapien
cctcttccatgacgggcacctgtgt

SEQ ID NO: 3434642 - DNA, 25 bp, Homo sapien
tgtccccagcttagtggtccgtcag

SEQ ID NO: 3434643 - DNA, 25 bp, Homo sapien
ggcacctgtgtaggccagcctctct

SEQ ID NO: 3434644 - DNA, 25 bp, Homo sapien
agggcacggcgcctccctgaagcac

SEQ ID NO: 3434645 - DNA, 25 bp, Homo sapien
agaaagcggagggcacggcgcctcc

SEQ ID NO: 3434646 - DNA, 25 bp, Homo sapien
aaagcggagggcacggcgcctccct

SEQ ID NO: 3434647 - DNA, 25 bp, Homo sapien
ggagggcacggcgcctccctgaagc

SEQ ID NO: 3434648 - DNA, 25 bp, Homo sapien
ctgtggagtcgacgagggaattctc

SEQ ID NO: 3434649 - DNA, 25 bp, Homo sapien
tcgacgagggaattctcactgaagc

SEQ ID NO: 3434650 - DNA, 25 bp, Homo sapien
gacgagggaattctcactgaagcag

SEQ ID NO: 3434651 - DNA, 25 bp, Homo sapien
tggagtcgacgagggaattctcact

SEQ ID NO: 3434652 - DNA, 25 bp, Homo sapien
ggccctggtcaggcctgtggtcccc

SEQ ID NO: 3434653 - DNA, 25 bp, Homo sapien
ctgaatgccccggaagtctgacggt

SEQ ID NO: 3434654 - DNA, 25 bp, Homo sapien
gaatgccccggaagtctgacggtta

SEQ ID NO: 3434655 - DNA, 25 bp, Homo sapien
ccctggtcaggcctgtggtccccaa

SEQ ID NO: 3434656 - DNA, 25 bp, Homo sapien
caggatacacctcacagccatgtgc

SEQ ID NO: 3434657 - DNA, 25 bp, Homo sapien
tgaagaatgacaatcccattctttg

SEQ ID NO: 3434658 - DNA, 25 bp, Homo sapien
cagtcacactcatacaagccatgaa

SEQ ID NO: 3434659 - DNA, 25 bp, Homo sapien
cacagtcaaggttctctccatgtca

SEQ ID NO: 3434660 - DNA, 25 bp, Homo sapien
tgaatacaagaagggaccaggatcc

SEQ ID NO: 3434661 - DNA, 25 bp, Homo sapien
tctgtccactaagagctcccgggtg

SEQ ID NO: 3434662 - DNA, 25 bp, Homo sapien
gaaacgtcacatgaacacaacctgg

SEQ ID NO: 3434663 - DNA, 25 bp, Homo sapien
tgtgacactcctagacgaaacgcag

SEQ ID NO: 3434664 - DNA, 25 bp, Homo sapien
tagtatcattcccagctgtgaatag

SEQ ID NO: 3434665 - DNA, 25 bp, Homo sapien
tcattcccagctgtgaatagatgag

SEQ ID NO: 3434666 - DNA, 25 bp, Homo sapien
gtattagtatcattcccagctgtga

SEQ ID NO: 3434667 - DNA, 25 bp, Homo sapien
atcattcccagctgtgaatagatga

SEQ ID NO: 3434668 - DNA, 25 bp, Homo sapien
taatagattaaggagaatgagaacc

SEQ ID NO: 3434669 - DNA, 25 bp, Homo sapien
aaactggaacgtaccctgtggtgct

SEQ ID NO: 3434670 - DNA, 25 bp, Homo sapien
ggaaaactgacccaataatagatta

SEQ ID NO: 3434671 - DNA, 25 bp, Homo sapien
agaatgagaaccattcccagaaagg

SEQ ID NO: 3434672 - DNA, 25 bp, Homo sapien
ctgttgctgattgtaaaggccctga

SEQ ID NO: 3434673 - DNA, 25 bp, Homo sapien
ccccagtcggatgagcagggcatct

SEQ ID NO: 3434674 - DNA, 25 bp, Homo sapien
ggcgtccacacaagaggggtacaca

SEQ ID NO: 3434675 - DNA, 25 bp, Homo sapien
aaggttttggcagcagggcgtccac

SEQ ID NO: 3434676 - DNA, 25 bp, Homo sapien
ttattgcatcttaatgaggcaggac

SEQ ID NO: 3434677 - DNA, 25 bp, Homo sapien
atttattgcatcttaatgaggcagg

SEQ ID NO: 3434678 - DNA, 25 bp, Homo sapien
tttattgcatcttaatgaggcagga

SEQ ID NO: 3434679 - DNA, 25 bp, Homo sapien
tatttattgcatcttaatgaggcag

SEQ ID NO: 3434680 - DNA, 25 bp, Homo sapien
agtgctgggtgaattcttactattc

SEQ ID NO: 3434681 - DNA, 25 bp, Homo sapien
agaataaagcattacgtttcttcta

SEQ ID NO: 3434682 - DNA, 25 bp, Homo sapien
gagaataaagcattacgtttcttct

SEQ ID NO: 3434683 - DNA, 25 bp, Homo sapien
aactgtggtggccagaattccaaga

SEQ ID NO: 3434684 - DNA, 25 bp, Homo sapien
cacacaggacttttaaggatgggca

SEQ ID NO: 3434685 - DNA, 25 bp, Homo sapien
tacataatctcctcccgtgaataag

SEQ ID NO: 3434686 - DNA, 25 bp, Homo sapien
tgaataagtcactcccggaattggg

SEQ ID NO: 3434687 - DNA, 25 bp, Homo sapien
cttgctgatacccgtgcccctgagt

SEQ ID NO: 3434688 - DNA, 25 bp, Homo sapien
tgggaggcatcagccgggaacttcc

SEQ ID NO: 3434689 - DNA, 25 bp, Homo sapien
ggctctccacatccagtcgtgcacc

SEQ ID NO: 3434690 - DNA, 25 bp, Homo sapien
caggggctcttgctgatacccgtgc

SEQ ID NO: 3434691 - DNA, 25 bp, Homo sapien
gatggcatgcatatctacaaatttc

SEQ ID NO: 3434692 - DNA, 25 bp, Homo sapien
cacaaggcctcacagggtgagtgga

SEQ ID NO: 3434693 - DNA, 25 bp, Homo sapien
gcatgcatatctacaaatttctcca

SEQ ID NO: 3434694 - DNA, 25 bp, Homo sapien
ggcattcgatggcatgcatatctac

SEQ ID NO: 3434695 - DNA, 25 bp, Homo sapien
acactgactgcatgctacagcacca

SEQ ID NO: 3434696 - DNA, 25 bp, Homo sapien
taaacactgactgcatgctacagca

SEQ ID NO: 3434697 - DNA, 25 bp, Homo sapien
gataaacactgactgcatgctacag

SEQ ID NO: 3434698 - DNA, 25 bp, Homo sapien
tcagataaacactgactgcatgcta

SEQ ID NO: 3434699 - DNA, 25 bp, Homo sapien
caacaagacccgtgcctcttcaggt

SEQ ID NO: 3434700 - DNA, 25 bp, Homo sapien
tggcctggagtaacagtgggtcttc

SEQ ID NO: 3434701 - DNA, 25 bp, Homo sapien
agacccgtgcctcttcaggtagaaa

SEQ ID NO: 3434702 - DNA, 25 bp, Homo sapien
ttcgggcttcatatccagcctcttc

SEQ ID NO: 3434703 - DNA, 25 bp, Homo sapien
gcctctgatctctcccgccagcgcc

SEQ ID NO: 3434704 - DNA, 25 bp, Homo sapien
cccgccagcgcctcgatcagcaagt

SEQ ID NO: 3434705 - DNA, 25 bp, Homo sapien
ggaaagaaaggcctctcgcctctga

SEQ ID NO: 3434706 - DNA, 25 bp, Homo sapien
aaagaaaggcctctcgcctctgatc

SEQ ID NO: 3434707 - DNA, 25 bp, Homo sapien
gcaaacacacctgtaacgggattta

SEQ ID NO: 3434708 - DNA, 25 bp, Homo sapien
cacacctgtaacgggatttaaaatg

SEQ ID NO: 3434709 - DNA, 25 bp, Homo sapien
tgcaaacacacctgtaacgggattt

SEQ ID NO: 3434710 - DNA, 25 bp, Homo sapien
ctgcatggaccaacagaaggcgcgg

SEQ ID NO: 3434711 - DNA, 25 bp, Homo sapien
tcacaggtgccttcaaatcacgcgg

SEQ ID NO: 3434712 - DNA, 25 bp, Homo sapien
gctaagccactaaactacaccagag

SEQ ID NO: 3434713 - DNA, 25 bp, Homo sapien
ccacagtcgtgttcatgaggcctct

SEQ ID NO: 3434714 - DNA, 25 bp, Homo sapien
ggctcatttattgggaccgacggca

SEQ ID NO: 3434715 - DNA, 25 bp, Homo sapien
tattgggaccgacggcatctgggac

SEQ ID NO: 3434716 - DNA, 25 bp, Homo sapien
tgctacgggctcatttattgggacc

SEQ ID NO: 3434717 - DNA, 25 bp, Homo sapien
gacggcatctgggacattccatcca

SEQ ID NO: 3434718 - DNA, 25 bp, Homo sapien
aataaatgccagaactcgccacccc

SEQ ID NO: 3434719 - DNA, 25 bp, Homo sapien
ggccttcagagggtgcccagtcctg

SEQ ID NO: 3434720 - DNA, 25 bp, Homo sapien
cacctgttcctaccacattattggc

SEQ ID NO: 3434721 - DNA, 25 bp, Homo sapien
gccaactgaggatgggagttgaatt

SEQ ID NO: 3434722 - DNA, 25 bp, Homo sapien
tgctgggattcaaaggtaaaccaga

SEQ ID NO: 3434723 - DNA, 25 bp, Homo sapien
ccagacatagttcgcattttcaata

SEQ ID NO: 3434724 - DNA, 25 bp, Homo sapien
caataataatagcaggagccggctc

SEQ ID NO: 3434725 - DNA, 25 bp, Homo sapien
gtcaacaaatgtgtaattagccaat

SEQ ID NO: 3434726 - DNA, 25 bp, Homo sapien
tcaagtggctattaatgcatggatt

SEQ ID NO: 3434727 - DNA, 25 bp, Homo sapien
gggcttttgaaatctcagccataaa

SEQ ID NO: 3434728 - DNA, 25 bp, Homo sapien
gtatcgtgtaaggtatgggtccaac

SEQ ID NO: 3434729 - DNA, 25 bp, Homo sapien
tgcatctggaccctctattgtggtc

SEQ ID NO: 3434730 - DNA, 25 bp, Homo sapien
ggatcggatagcacttcctccccga

SEQ ID NO: 3434731 - DNA, 25 bp, Homo sapien
tgggatcggatagcacttcctcccc

SEQ ID NO: 3434732 - DNA, 25 bp, Homo sapien
cctgggatcggatagcacttcctcc

SEQ ID NO: 3434733 - DNA, 25 bp, Homo sapien
tcggatagcacttcctccccgactc

SEQ ID NO: 3434734 - DNA, 25 bp, Homo sapien
tccctgagcaggcagtagaaccggc

SEQ ID NO: 3434735 - DNA, 25 bp, Homo sapien
ttatgaggtgccccgatccctgagc

SEQ ID NO: 3434736 - DNA, 25 bp, Homo sapien
gcaggcagtagaaccggccagccct

SEQ ID NO: 3434737 - DNA, 25 bp, Homo sapien
agtagaaccggccagccctcgaggc

SEQ ID NO: 3434738 - DNA, 25 bp, Homo sapien
catcgtgaggagttgatgctgttct

SEQ ID NO: 3434739 - DNA, 25 bp, Homo sapien
tgttctggggactccacgtgagagc

SEQ ID NO: 3434740 - DNA, 25 bp, Homo sapien
tctggggactccacgtgagagcctc

SEQ ID NO: 3434741 - DNA, 25 bp, Homo sapien
ccaccaccgtcaggagcatcgtgag

SEQ ID NO: 3434742 - DNA, 25 bp, Homo sapien
gtcctcgctcctgccgcacctcccc

SEQ ID NO: 3434743 - DNA, 25 bp, Homo sapien
agtcctcgctcctgccgcacctccc

SEQ ID NO: 3434744 - DNA, 25 bp, Homo sapien
agaagccagggtcaagcccacctcc

SEQ ID NO: 3434745 - DNA, 25 bp, Homo sapien
tcagaagccagggtcaagcccacct

SEQ ID NO: 3434746 - DNA, 25 bp, Homo sapien
cagaagccagggtcaagcccacctc

SEQ ID NO: 3434747 - DNA, 25 bp, Homo sapien
caagcattactttgaatggcatctg

SEQ ID NO: 3434748 - DNA, 25 bp, Homo sapien
ctgttgtgatgtatgcaagcattac

SEQ ID NO: 3434749 - DNA, 25 bp, Homo sapien
ggtcattactggcaaatcaagagtc

SEQ ID NO: 3434750 - DNA, 25 bp, Homo sapien
gcatctgacagagtttggtggtcca

SEQ ID NO: 3434751 - DNA, 25 bp, Homo sapien
gcatctggcttcatggacgcttcca

SEQ ID NO: 3434752 - DNA, 25 bp, Homo sapien
caacagcaatggatgagcggaagac

SEQ ID NO: 3434753 - DNA, 25 bp, Homo sapien
cagtggagtgtagcttagaagcagc

SEQ ID NO: 3434754 - DNA, 25 bp, Homo sapien
gaacatggctatgcaacttgagtca

SEQ ID NO: 3434755 - DNA, 25 bp, Homo sapien
cctgccgtcgcctcaaatgaagtgt

SEQ ID NO: 3434756 - DNA, 25 bp, Homo sapien
aatgaacccagacgactttcgcagc

SEQ ID NO: 3434757 - DNA, 25 bp, Homo sapien
cacaatcgcgtagggaaggcaagct

SEQ ID NO: 3434758 - DNA, 25 bp, Homo sapien
gagacaaagtgaaccccactcggga

SEQ ID NO: 3434759 - DNA, 25 bp, Homo sapien
taaaatcacgaacagtgggacgagt

SEQ ID NO: 3434760 - DNA, 25 bp, Homo sapien
acttgagaaaaaggacgccgctgcc

SEQ ID NO: 3434761 - DNA, 25 bp, Homo sapien
gcgcaggctgccgaaatcaacagaa

SEQ ID NO: 3434762 - DNA, 25 bp, Homo sapien
caagggatggcctcagccgtttgaa

SEQ ID NO: 3434763 - DNA, 25 bp, Homo sapien
aaagggccacctctccaggtgacat

SEQ ID NO: 3434764 - DNA, 25 bp, Homo sapien
agggccacctctccaggtgacatgt

SEQ ID NO: 3434765 - DNA, 25 bp, Homo sapien
aagggccacctctccaggtgacatg

SEQ ID NO: 3434766 - DNA, 25 bp, Homo sapien
ggccagaggcgctcagctcaggcca

SEQ ID NO: 3434767 - DNA, 25 bp, Homo sapien
agggggcagaggctgctgccaatgg

SEQ ID NO: 3434768 - DNA, 25 bp, Homo sapien
ctgtgtatgcagggagggggcagag

SEQ ID NO: 3434769 - DNA, 25 bp, Homo sapien
ggggcagaggctgctgccaatgggc

SEQ ID NO: 3434770 - DNA, 25 bp, Homo sapien
ggcagaggctgctgccaatgggcat

SEQ ID NO: 3434771 - DNA, 25 bp, Homo sapien
gggagttagctctctggaccccgtc

SEQ ID NO: 3434772 - DNA, 25 bp, Homo sapien
ttagggaacgttgagctctgggctt

SEQ ID NO: 3434773 - DNA, 25 bp, Homo sapien
tgaagatcacttcgaacgtgggtgg

SEQ ID NO: 3434774 - DNA, 25 bp, Homo sapien
gggcttgttttccacgcgcagcggt

SEQ ID NO: 3434775 - DNA, 25 bp, Homo sapien
ctgcctggcactgctgtcaaaggcc

SEQ ID NO: 3434776 - DNA, 25 bp, Homo sapien
cctggcactgctgtcaaaggccact

SEQ ID NO: 3434777 - DNA, 25 bp, Homo sapien
ggcactgctgtcaaaggccactcac

SEQ ID NO: 3434778 - DNA, 25 bp, Homo sapien
gctgcctggcactgctgtcaaaggc

SEQ ID NO: 3434779 - DNA, 25 bp, Homo sapien
ctgtaaagcaaaggggccccagttg

SEQ ID NO: 3434780 - DNA, 25 bp, Homo sapien
gtccggccagttctcaccagcaaat

SEQ ID NO: 3434781 - DNA, 25 bp, Homo sapien
tctcaccagcaaatgtccagcctga

SEQ ID NO: 3434782 - DNA, 25 bp, Homo sapien
ggtcctgggagtccggccagttctc

SEQ ID NO: 3434783 - DNA, 25 bp, Homo sapien
gccccctctaactccaagcctacat

SEQ ID NO: 3434784 - DNA, 25 bp, Homo sapien
agccgagtttctgtgagtgagagat

SEQ ID NO: 3434785 - DNA, 25 bp, Homo sapien
ttctgtgagtgagagataaaccgcc

SEQ ID NO: 3434786 - DNA, 25 bp, Homo sapien
gtgagagataaaccgccagaactgc

SEQ ID NO: 3434787 - DNA, 25 bp, Homo sapien
gacctcgggcaagttgtgcaacctc

SEQ ID NO: 3434788 - DNA, 25 bp, Homo sapien
gaaagtgaagcaaatacctcctgct

SEQ ID NO: 3434789 - DNA, 25 bp, Homo sapien
caagttgtgcaacctctcagagccg

SEQ ID NO: 3434790 - DNA, 25 bp, Homo sapien
ttgtgcaacctctcagagccgcaga

SEQ ID NO: 3434791 - DNA, 25 bp, Homo sapien
tctccgtgctgacaatgacagcatt

SEQ ID NO: 3434792 - DNA, 25 bp, Homo sapien
tgctcgccagcgctgacgtaatctg

SEQ ID NO: 3434793 - DNA, 25 bp, Homo sapien
aatctgcaaacatccccggcggcag

SEQ ID NO: 3434794 - DNA, 25 bp, Homo sapien
ccccaattagctatcacttctggag

SEQ ID NO: 3434795 - DNA, 25 bp, Homo sapien
gggacgacgagcagcctccttggtc

SEQ ID NO: 3434796 - DNA, 25 bp, Homo sapien
tccttggtcaagaggcccgtgtacc

SEQ ID NO: 3434797 - DNA, 25 bp, Homo sapien
aagcaggccagatctgcccgccaga

SEQ ID NO: 3434798 - DNA, 25 bp, Homo sapien
ggcccgtgtaccattcatccagaat

SEQ ID NO: 3434799 - DNA, 25 bp, Homo sapien
agcctctgccctggaaccgagatgc

SEQ ID NO: 3434800 - DNA, 25 bp, Homo sapien
tctgccctggaaccgagatgcagtg

SEQ ID NO: 3434801 - DNA, 25 bp, Homo sapien
tgccctggaaccgagatgcagtggg

SEQ ID NO: 3434802 - DNA, 25 bp, Homo sapien
ctgaagtcagccccaaagggcagca

SEQ ID NO: 3434803 - DNA, 25 bp, Homo sapien
tgtaggtcccgaggcaggaccacag

SEQ ID NO: 3434804 - DNA, 25 bp, Homo sapien
accacaggatgaggcgtgctagcag

SEQ ID NO: 3434805 - DNA, 25 bp, Homo sapien
gccgctgggccagtctgtagtcgat

SEQ ID NO: 3434806 - DNA, 25 bp, Homo sapien
gatgaggcgtgctagcaggatcacc

SEQ ID NO: 3434807 - DNA, 25 bp, Homo sapien
tgcctggaactcgtgtaagatgcct

SEQ ID NO: 3434808 - DNA, 25 bp, Homo sapien
tacgatcaggcgagaatattcaggc

SEQ ID NO: 3434809 - DNA, 25 bp, Homo sapien
cagagcgtgaatgagaagggaccct

SEQ ID NO: 3434810 - DNA, 25 bp, Homo sapien
tacaactggcaagacatcggcacat

SEQ ID NO: 3434811 - DNA, 25 bp, Homo sapien
tgcccaggtgtgttgcacctgcctg

SEQ ID NO: 3434812 - DNA, 25 bp, Homo sapien
ctccacatgcagaccggccatggcc

SEQ ID NO: 3434813 - DNA, 25 bp, Homo sapien
ccacatgcagaccggccatggccat

SEQ ID NO: 3434814 - DNA, 25 bp, Homo sapien
tccacatgcagaccggccatggcca

SEQ ID NO: 3434815 - DNA, 25 bp, Homo sapien
cctccacatgcagaccggccatggc

SEQ ID NO: 3434816 - DNA, 25 bp, Homo sapien
gcagagggtgcatccatctcgtccc

SEQ ID NO: 3434817 - DNA, 25 bp, Homo sapien
agagggtgcatccatctcgtcccgc

SEQ ID NO: 3434818 - DNA, 25 bp, Homo sapien
cagagggtgcatccatctcgtcccg

SEQ ID NO: 3434819 - DNA, 25 bp, Homo sapien
ctgcccctccaaaatagcaagtctg

SEQ ID NO: 3434820 - DNA, 25 bp, Homo sapien
aatagcaagtctggagaagccgggc

SEQ ID NO: 3434821 - DNA, 25 bp, Homo sapien
tagcaagtctggagaagccgggcac

SEQ ID NO: 3434822 - DNA, 25 bp, Homo sapien
aaatagcaagtctggagaagccggg

SEQ ID NO: 3434823 - DNA, 25 bp, Homo sapien
cttctttccacgctcccattggccg

SEQ ID NO: 3434824 - DNA, 25 bp, Homo sapien
caatggccacgagaaccttaaacct

SEQ ID NO: 3434825 - DNA, 25 bp, Homo sapien
tattttctccaatggccacgagaac

SEQ ID NO: 3434826 - DNA, 25 bp, Homo sapien
cctgagcagctaaagtattttctcc

SEQ ID NO: 3434827 - DNA, 25 bp, Homo sapien
gaggattctcggttgttgatctgat

SEQ ID NO: 3434828 - DNA, 25 bp, Homo sapien
cccgagctagaggattctcggttgt

SEQ ID NO: 3434829 - DNA, 25 bp, Homo sapien
agccacggggtctcgcccgagctag

SEQ ID NO: 3434830 - DNA, 25 bp, Homo sapien
ttgtgaacggctagtgtgtacggct

SEQ ID NO: 3434831 - DNA, 25 bp, Homo sapien
gccctgggctgagtattcccgctcc

SEQ ID NO: 3434832 - DNA, 25 bp, Homo sapien
cctgggctgagtattcccgctccat

SEQ ID NO: 3434833 - DNA, 25 bp, Homo sapien
ccctgggctgagtattcccgctcca

SEQ ID NO: 3434834 - DNA, 25 bp, Homo sapien
tccggactccatgggcaaacagatg

SEQ ID NO: 3434835 - DNA, 25 bp, Homo sapien
gcaggctagacaaggctgggctggc

SEQ ID NO: 3434836 - DNA, 25 bp, Homo sapien
cagatggggacagtcaaatgggcca

SEQ ID NO: 3434837 - DNA, 25 bp, Homo sapien
ggacagtcaaatgggccacttggca

SEQ ID NO: 3434838 - DNA, 25 bp, Homo sapien
taagagcagcccgatttctggtggt

SEQ ID NO: 3434839 - DNA, 25 bp, Homo sapien
agcagcccgatttctggtggtcaga

SEQ ID NO: 3434840 - DNA, 25 bp, Homo sapien
cccctgcataagagcagcccgattt

SEQ ID NO: 3434841 - DNA, 25 bp, Homo sapien
tgcataagagcagcccgatttctgg

SEQ ID NO: 3434842 - DNA, 25 bp, Homo sapien
gggctgcctttttcagccgtgaagc

SEQ ID NO: 3434843 - DNA, 25 bp, Homo sapien
cgtgaagcgtgttttgaactacagt

SEQ ID NO: 3434844 - DNA, 25 bp, Homo sapien
tacagtgtttaccaacgtgtacatc

SEQ ID NO: 3434845 - DNA, 25 bp, Homo sapien
gtacatcctagtctggccgaccggg

SEQ ID NO: 3434846 - DNA, 25 bp, Homo sapien
ctcagcgtcagctgcgtgcggaccg

SEQ ID NO: 3434847 - DNA, 25 bp, Homo sapien
agcctcagcgtcagctgcgtgcgga

SEQ ID NO: 3434848 - DNA, 25 bp, Homo sapien
ctgagcctcagcgtcagctgcgtgc

SEQ ID NO: 3434849 - DNA, 25 bp, Homo sapien
agcgtcagctgcgtgcggaccgacc

SEQ ID NO: 3434850 - DNA, 25 bp, Homo sapien
ttagataccagaaagccagcttgca

SEQ ID NO: 3434851 - DNA, 25 bp, Homo sapien
gtgcaggcagatgtgaacaggtgtg

SEQ ID NO: 3434852 - DNA, 25 bp, Homo sapien
ttagataccagaaagccagcttgcc

SEQ ID NO: 3434853 - DNA, 25 bp, Homo sapien
acaacaggccccttatcccaggcag

SEQ ID NO: 3434854 - DNA, 25 bp, Homo sapien
cacactgaggccttagtcgaaggtg

SEQ ID NO: 3434855 - DNA, 25 bp, Homo sapien
catttttgatgaccccacactgagg

SEQ ID NO: 3434856 - DNA, 25 bp, Homo sapien
agaagtcggctggccaaatcccagc

SEQ ID NO: 3434857 - DNA, 25 bp, Homo sapien
atggagagataaacaatgagttcca

SEQ ID NO: 3434858 - DNA, 25 bp, Homo sapien
ctgtgctcaggaacaatggccacac

SEQ ID NO: 3434859 - DNA, 25 bp, Homo sapien
tgaggttcctttggccgaggctcca

SEQ ID NO: 3434860 - DNA, 25 bp, Homo sapien
caggttttggaaaatcgtgggtgag

SEQ ID NO: 3434861 - DNA, 25 bp, Homo sapien
acagacacagccacggcaatcaggt

SEQ ID NO: 3434862 - DNA, 25 bp, Homo sapien
ggagagtcttggcaggcccggcccc

SEQ ID NO: 3434863 - DNA, 25 bp, Homo sapien
cagcctctttgggcaccagatccat

SEQ ID NO: 3434864 - DNA, 25 bp, Homo sapien
ccagcattgggtttgcacccccagg

SEQ ID NO: 3434865 - DNA, 25 bp, Homo sapien
ctgggaccagcaggttttggtcctc

SEQ ID NO: 3434866 - DNA, 25 bp, Homo sapien
gcattgggtttgcacccccaggccc

SEQ ID NO: 3434867 - DNA, 25 bp, Homo sapien
tgggaccagcaggttttggtcctct

SEQ ID NO: 3434868 - DNA, 25 bp, Homo sapien
aaatacccctcatacctcttcaagt

SEQ ID NO: 3434869 - DNA, 25 bp, Homo sapien
cccagccaatgctgttgtcatttgg

SEQ ID NO: 3434870 - DNA, 25 bp, Homo sapien
caggagactggcctgtagacataat

SEQ ID NO: 3434871 - DNA, 25 bp, Homo sapien
cacaggagttctagacaggctacca

SEQ ID NO: 3434872 - DNA, 25 bp, Homo sapien
ccaaagcagatacacgctggagggg

SEQ ID NO: 3434873 - DNA, 25 bp, Homo sapien
caaagcagatacacgctggagggga

SEQ ID NO: 3434874 - DNA, 25 bp, Homo sapien
gatacacgctggaggggagcagcgg

SEQ ID NO: 3434875 - DNA, 25 bp, Homo sapien
gcagatacacgctggaggggagcag

SEQ ID NO: 3434876 - DNA, 25 bp, Homo sapien
accagatggtcccatcttagggtga

SEQ ID NO: 3434877 - DNA, 25 bp, Homo sapien
ctcacatacgcagttcacagtaagg

SEQ ID NO: 3434878 - DNA, 25 bp, Homo sapien
tgtaaccagatggtcccatcttagg

SEQ ID NO: 3434879 - DNA, 25 bp, Homo sapien
tcctgtaaccagatggtcccatctt

SEQ ID NO: 3434880 - DNA, 25 bp, Homo sapien
ctccggtaccctaactcagaggcct

SEQ ID NO: 3434881 - DNA, 25 bp, Homo sapien
ccaccatggggtccctgtgggactc

SEQ ID NO: 3434882 - DNA, 25 bp, Homo sapien
caccatggggtccctgtgggactcc

SEQ ID NO: 3434883 - DNA, 25 bp, Homo sapien
ccatggggtccctgtgggactccct

SEQ ID NO: 3434884 - DNA, 25 bp, Homo sapien
tctctccacagtagtggacctgcat

SEQ ID NO: 3434885 - DNA, 25 bp, Homo sapien
tccacagtagtggacctgcatcaag

SEQ ID NO: 3434886 - DNA, 25 bp, Homo sapien
tgcatcaagaaagggaccaaaggga

SEQ ID NO: 3434887 - DNA, 25 bp, Homo sapien
gctttctgacaaggacgggtgatgt

SEQ ID NO: 3434888 - DNA, 25 bp, Homo sapien
taagggcagcctcggatcacagagg

SEQ ID NO: 3434889 - DNA, 25 bp, Homo sapien
cagggtgtaaccttctggcaactgt

SEQ ID NO: 3434890 - DNA, 25 bp, Homo sapien
tgccctgcatcaaccggctggcagc

SEQ ID NO: 3434891 - DNA, 25 bp, Homo sapien
ccagaagttgccgattattaatgat

SEQ ID NO: 3434892 - DNA, 25 bp, Homo sapien
ggcatccttctcagacacatgccag

SEQ ID NO: 3434893 - DNA, 25 bp, Homo sapien
cattatgggtgtgcgggcatgggag

SEQ ID NO: 3434894 - DNA, 25 bp, Homo sapien
tctcagacacatgccagctcagaaa

SEQ ID NO: 3434895 - DNA, 25 bp, Homo sapien
tgggaggcatccttctcagacacat

SEQ ID NO: 3434896 - DNA, 25 bp, Homo sapien
atcaaaagcctccagagactgggat

SEQ ID NO: 3434897 - DNA, 25 bp, Homo sapien
tcacacagagttgttggcatcaaaa

SEQ ID NO: 3434898 - DNA, 25 bp, Homo sapien
cctccagagactgggatttggttgc

SEQ ID NO: 3434899 - DNA, 25 bp, Homo sapien
gttgttggcatcaaaagcctccaga

SEQ ID NO: 3434900 - DNA, 25 bp, Homo sapien
tccatggtctcgaggagactgggaa

SEQ ID NO: 3434901 - DNA, 25 bp, Homo sapien
caggctgggcgcgatgtacaggcat

SEQ ID NO: 3434902 - DNA, 25 bp, Homo sapien
agccgccgcaggctgggcgcgatgt

SEQ ID NO: 3434903 - DNA, 25 bp, Homo sapien
gatgtacaggcatcgagttccatgg

SEQ ID NO: 3434904 - DNA, 25 bp, Homo sapien
cacagaggccatccttgatgggtgt

SEQ ID NO: 3434905 - DNA, 25 bp, Homo sapien
ccgcctccagccgtgggaaggaatg

SEQ ID NO: 3434906 - DNA, 25 bp, Homo sapien
cagcattggctcgaggatctgggcc

SEQ ID NO: 3434907 - DNA, 25 bp, Homo sapien
cctcagcattggctcgaggatctgg

SEQ ID NO: 3434908 - DNA, 25 bp, Homo sapien
cagactcttcactgagcccaaaggc

SEQ ID NO: 3434909 - DNA, 25 bp, Homo sapien
tcgcgggacagtaacaggagaatca

SEQ ID NO: 3434910 - DNA, 25 bp, Homo sapien
tgtccagaaatcacacagagctcag

SEQ ID NO: 3434911 - DNA, 25 bp, Homo sapien
gaccctggacgcctggctttgggct

SEQ ID NO: 3434912 - DNA, 25 bp, Homo sapien
ctgcactggtcatgcccagctctca

SEQ ID NO: 3434913 - DNA, 25 bp, Homo sapien
tgcccagctctcacaggatgatggc

SEQ ID NO: 3434914 - DNA, 25 bp, Homo sapien
agccttgtaatgagtcacctgctgc

SEQ ID NO: 3434915 - DNA, 25 bp, Homo sapien
tggccccagccttgtaatgagtcac

SEQ ID NO: 3434916 - DNA, 25 bp, Homo sapien
ggtctgagatgaactttcctgctcc

SEQ ID NO: 3434917 - DNA, 25 bp, Homo sapien
ttagaggtgttaagcgtggcatgac

SEQ ID NO: 3434918 - DNA, 25 bp, Homo sapien
catgacgtggctggatttagggtct

SEQ ID NO: 3434919 - DNA, 25 bp, Homo sapien
gaactttcctgctcctgaatggact

SEQ ID NO: 3434920 - DNA, 25 bp, Homo sapien
gccgagggaaggagccagacgctgt

SEQ ID NO: 3434921 - DNA, 25 bp, Homo sapien
ccgagggaaggagccagacgctgtc

SEQ ID NO: 3434922 - DNA, 25 bp, Homo sapien
gagccgagggaaggagccagacgct

SEQ ID NO: 3434923 - DNA, 25 bp, Homo sapien
agccgagggaaggagccagacgctg

SEQ ID NO: 3434924 - DNA, 25 bp, Homo sapien
ctggggtgtatgtgacgcagattct

SEQ ID NO: 3434925 - DNA, 25 bp, Homo sapien
gggtgtatgtgacgcagattctgag

SEQ ID NO: 3434926 - DNA, 25 bp, Homo sapien
tgtatgtgacgcagattctgagggc

SEQ ID NO: 3434927 - DNA, 25 bp, Homo sapien
tatgtgacgcagattctgagggcca

SEQ ID NO: 3434928 - DNA, 25 bp, Homo sapien
ggacacaccacggagacaatgacac

SEQ ID NO: 3434929 - DNA, 25 bp, Homo sapien
gacacaccacggagacaatgacacc

SEQ ID NO: 3434930 - DNA, 25 bp, Homo sapien
aggacacaccacggagacaatgaca

SEQ ID NO: 3434931 - DNA, 25 bp, Homo sapien
gaaaaccgatgaataaatcagacat

SEQ ID NO: 3434932 - DNA, 25 bp, Homo sapien
gacaagaaaaccgatgaataaatca

SEQ ID NO: 3434933 - DNA, 25 bp, Homo sapien
cccacccaagagaagaggttactgg

SEQ ID NO: 3434934 - DNA, 25 bp, Homo sapien
ggcattcacccacccaagagaagag

SEQ ID NO: 3434935 - DNA, 25 bp, Homo sapien
aacatgagcaacgagtccctgtccc

SEQ ID NO: 3434936 - DNA, 25 bp, Homo sapien
tgagcaacgagtccctgtccccaag

SEQ ID NO: 3434937 - DNA, 25 bp, Homo sapien
tgaacatgagcaacgagtccctgtc

SEQ ID NO: 3434938 - DNA, 25 bp, Homo sapien
catgagcaacgagtccctgtcccca

SEQ ID NO: 3434939 - DNA, 25 bp, Homo sapien
agagacacaaatgctcctctcaccg

SEQ ID NO: 3434940 - DNA, 25 bp, Homo sapien
ctctcaccgcaacacgcagggcctg

SEQ ID NO: 3434941 - DNA, 25 bp, Homo sapien
tcccttgtttctctcccggtcacca

SEQ ID NO: 3434942 - DNA, 25 bp, Homo sapien
ttggagccctccacgaagtgtccag

SEQ ID NO: 3434943 - DNA, 25 bp, Homo sapien
gtggtgcatctgtgaccctcctggc

SEQ ID NO: 3434944 - DNA, 25 bp, Homo sapien
cagagtgccttgtggtgcatctgtg

SEQ ID NO: 3434945 - DNA, 25 bp, Homo sapien
ttcccagtgccacacagagtgcctt

SEQ ID NO: 3434946 - DNA, 25 bp, Homo sapien
gcccgggacacgtccacgtcttctg

SEQ ID NO: 3434947 - DNA, 25 bp, Homo sapien
cactctaaaggcttctcccaggtga

SEQ ID NO: 3434948 - DNA, 25 bp, Homo sapien
tcctcagggcacgagctaatggcct

SEQ ID NO: 3434949 - DNA, 25 bp, Homo sapien
cctttcatagtcagggcagctcgat

SEQ ID NO: 3434950 - DNA, 25 bp, Homo sapien
taatttccatggagagcccatgccg

SEQ ID NO: 3434951 - DNA, 25 bp, Homo sapien
gaaccttacattctgacgccttaga

SEQ ID NO: 3434952 - DNA, 25 bp, Homo sapien
ggctgggcatataaaccacttggca

SEQ ID NO: 3434953 - DNA, 25 bp, Homo sapien
tacagaaagacagtacaggcgcctc

SEQ ID NO: 3434954 - DNA, 25 bp, Homo sapien
caccagtctagggtctacagaaaga

SEQ ID NO: 3434955 - DNA, 25 bp, Homo sapien
ggagtatcccctcccttgattaaga

SEQ ID NO: 3434956 - DNA, 25 bp, Homo sapien
gagtatcccctcccttgattaagaa

SEQ ID NO: 3434957 - DNA, 25 bp, Homo sapien
cagggatgtccacctgcagcctcgg

SEQ ID NO: 3434958 - DNA, 25 bp, Homo sapien
tccagtcccagggatgtccacctgc

SEQ ID NO: 3434959 - DNA, 25 bp, Homo sapien
agctccagtcccagggatgtccacc

SEQ ID NO: 3434960 - DNA, 25 bp, Homo sapien
cagtcccagggatgtccacctgcag

SEQ ID NO: 3434961 - DNA, 25 bp, Homo sapien
gagaacatcagagtcactgatgtgc

SEQ ID NO: 3434962 - DNA, 25 bp, Homo sapien
agagtcactgatgtgcgcagagggc

SEQ ID NO: 3434963 - DNA, 25 bp, Homo sapien
gcggtgggggagaacatcagagtca

SEQ ID NO: 3434964 - DNA, 25 bp, Homo sapien
agtcactgatgtgcgcagagggcca

SEQ ID NO: 3434965 - DNA, 25 bp, Homo sapien
aggacccgagctccccattctcgca

SEQ ID NO: 3434966 - DNA, 25 bp, Homo sapien
tccccattctcgcaccagctggctt

SEQ ID NO: 3434967 - DNA, 25 bp, Homo sapien
ggatggggaggacccgagctcccca

SEQ ID NO: 3434968 - DNA, 25 bp, Homo sapien
ccccattctcgcaccagctggcttg

SEQ ID NO: 3434969 - DNA, 25 bp, Homo sapien
cgttcctgctgctgctggtctttgt

SEQ ID NO: 3434970 - DNA, 25 bp, Homo sapien
ccgttcctgctgctgctggtctttg

SEQ ID NO: 3434971 - DNA, 25 bp, Homo sapien
ttagtcccgttcctgctgctgctgg

SEQ ID NO: 3434972 - DNA, 25 bp, Homo sapien
tcctgctgctgctggtctttgttcc

SEQ ID NO: 3434973 - DNA, 25 bp, Homo sapien
aatcaggcccaaggcactcatcacc

SEQ ID NO: 3434974 - DNA, 25 bp, Homo sapien
atcaccaaatctgccccaacctgca

SEQ ID NO: 3434975 - DNA, 25 bp, Homo sapien
tccaatcaggcccaaggcactcatc

SEQ ID NO: 3434976 - DNA, 25 bp, Homo sapien
ctcatcaccaaatctgccccaacct

SEQ ID NO: 3434977 - DNA, 25 bp, Homo sapien
ctccgcctgcttcaggccctgcctg

SEQ ID NO: 3434978 - DNA, 25 bp, Homo sapien
gcctgggggccccacagccacccac

SEQ ID NO: 3434979 - DNA, 25 bp, Homo sapien
tgcctgggggccccacagccaccca

SEQ ID NO: 3434980 - DNA, 25 bp, Homo sapien
cccctccgcctgcttcaggccctgc

SEQ ID NO: 3434981 - DNA, 25 bp, Homo sapien
ctcgtaccgtgcagagccaaaggca

SEQ ID NO: 3434982 - DNA, 25 bp, Homo sapien
ccgaactgagagctggaacgagact

SEQ ID NO: 3434983 - DNA, 25 bp, Homo sapien
cctgattcaagagatacaagggaca

SEQ ID NO: 3434984 - DNA, 25 bp, Homo sapien
gaagcagaagaatctaagagcctga

SEQ ID NO: 3434985 - DNA, 25 bp, Homo sapien
ggagtgcagggacaatggacttatc

SEQ ID NO: 3434986 - DNA, 25 bp, Homo sapien
tgcagggacaatggacttatctttg

SEQ ID NO: 3434987 - DNA, 25 bp, Homo sapien
aatggacttatctttgtggccccag

SEQ ID NO: 3434988 - DNA, 25 bp, Homo sapien
gacaatggacttatctttgtggccc

SEQ ID NO: 3434989 - DNA, 25 bp, Homo sapien
cttcttgggacttagatttagacct

SEQ ID NO: 3434990 - DNA, 25 bp, Homo sapien
tttcttctgtgccctggtcactgtt

SEQ ID NO: 3434991 - DNA, 25 bp, Homo sapien
tgtgccctggtcactgttggctgtc

SEQ ID NO: 3434992 - DNA, 25 bp, Homo sapien
ggacttagatttagaccttcacctc

SEQ ID NO: 3434993 - DNA, 25 bp, Homo sapien
tatcatcataacatcccgaggaggt

SEQ ID NO: 3434994 - DNA, 25 bp, Homo sapien
catctatcatcataacatcccgagg

SEQ ID NO: 3434995 - DNA, 25 bp, Homo sapien
cataacatcccgaggaggtggaaag

SEQ ID NO: 3434996 - DNA, 25 bp, Homo sapien
gagcttgttacatctatcatcataa

SEQ ID NO: 3434997 - DNA, 25 bp, Homo sapien
gcccagagtcgttgccagtggtcag

SEQ ID NO: 3434998 - DNA, 25 bp, Homo sapien
ccagtggtcagcctgtagagcaccc

SEQ ID NO: 3434999 - DNA, 25 bp, Homo sapien
gcagaacgcccagagtcgttgccag

SEQ ID NO: 3435000 - DNA, 25 bp, Homo sapien
gtggtcagcctgtagagcacccctt

SEQ ID NO: 3435001 - DNA, 25 bp, Homo sapien
tgccttcttgcaaggagcagaactc

SEQ ID NO: 3435002 - DNA, 25 bp, Homo sapien
gccttcttgcaaggagcagaactca

SEQ ID NO: 3435003 - DNA, 25 bp, Homo sapien
ccttcttgcaaggagcagaactcac

SEQ ID NO: 3435004 - DNA, 25 bp, Homo sapien
ggacttccatcaggcaacagctcag

SEQ ID NO: 3435005 - DNA, 25 bp, Homo sapien
cttccatcaggcaacagctcagaga

SEQ ID NO: 3435006 - DNA, 25 bp, Homo sapien
aagcctgttgagttggacttccatc

SEQ ID NO: 3435007 - DNA, 25 bp, Homo sapien
tcaagcctgttgagttggacttcca

SEQ ID NO: 3435008 - DNA, 25 bp, Homo sapien
gcaggtggtactccccagcagcaca

SEQ ID NO: 3435009 - DNA, 25 bp, Homo sapien
gcaagcaggtggtactccccagcag

SEQ ID NO: 3435010 - DNA, 25 bp, Homo sapien
gacaggaatggaggcgctttctgca

SEQ ID NO: 3435011 - DNA, 25 bp, Homo sapien
acagggacaggaatggaggcgcttt

SEQ ID NO: 3435012 - DNA, 25 bp, Homo sapien
ctgctcatcactgtgtgagtggata

SEQ ID NO: 3435013 - DNA, 25 bp, Homo sapien
gctcatcactgtgtgagtggataaa

SEQ ID NO: 3435014 - DNA, 25 bp, Homo sapien
tcatcactgtgtgagtggataaaca

SEQ ID NO: 3435015 - DNA, 25 bp, Homo sapien
catcactgtgtgagtggataaacac

SEQ ID NO: 3435016 - DNA, 25 bp, Homo sapien
tcttgactgtcattcccactggtgc

SEQ ID NO: 3435017 - DNA, 25 bp, Homo sapien
tgtcattcccactggtgcttcacgg

SEQ ID NO: 3435018 - DNA, 25 bp, Homo sapien
ggcatctccgtggttctcttgactg

SEQ ID NO: 3435019 - DNA, 25 bp, Homo sapien
cactggtgcttcacggctgcaaggt

SEQ ID NO: 3435020 - DNA, 25 bp, Homo sapien
tgtagccacgcctactaaggaggct

SEQ ID NO: 3435021 - DNA, 25 bp, Homo sapien
tacatgtacatctaccataccaata

SEQ ID NO: 3435022 - DNA, 25 bp, Homo sapien
atacatgtacatctaccataccaat

SEQ ID NO: 3435023 - DNA, 25 bp, Homo sapien
aaatgctttaaaccaggaatctcca

SEQ ID NO: 3435024 - DNA, 25 bp, Homo sapien
taaatgctttaaaccaggaatctcc

SEQ ID NO: 3435025 - DNA, 25 bp, Homo sapien
ttaaatgctttaaaccaggaatctc

SEQ ID NO: 3435026 - DNA, 25 bp, Homo sapien
cagcttagagctgcacttcgtggca

SEQ ID NO: 3435027 - DNA, 25 bp, Homo sapien
cgagggctacgaagcttagctggcc

SEQ ID NO: 3435028 - DNA, 25 bp, Homo sapien
tgcaagtgacagttggtagacgtcc

SEQ ID NO: 3435029 - DNA, 25 bp, Homo sapien
tggaagtcagctttctccccgtgcc

SEQ ID NO: 3435030 - DNA, 25 bp, Homo sapien
gatgaatagaagttcaccaaggaaa

SEQ ID NO: 3435031 - DNA, 25 bp, Homo sapien
agaagactttctaaaggatgattac

SEQ ID NO: 3435032 - DNA, 25 bp, Homo sapien
gatgattactgctgggctttgaagg

SEQ ID NO: 3435033 - DNA, 25 bp, Homo sapien
aggaaaatggtgcaaagcgcaaagg

SEQ ID NO: 3435034 - DNA, 25 bp, Homo sapien
gttaccatccccattacagctgagg

SEQ ID NO: 3435035 - DNA, 25 bp, Homo sapien
gatgcgagttacctgctggtcccag

SEQ ID NO: 3435036 - DNA, 25 bp, Homo sapien
agcttctaggagagacgccaagtcc

SEQ ID NO: 3435037 - DNA, 25 bp, Homo sapien
cacaacaggcattcaggcagcatct

SEQ ID NO: 3435038 - DNA, 25 bp, Homo sapien
tccataaacttccaaggccaccagg

SEQ ID NO: 3435039 - DNA, 25 bp, Homo sapien
gcagctcttggttctttgggcccct

SEQ ID NO: 3435040 - DNA, 25 bp, Homo sapien
caggctcctggttcatctaatgagt

SEQ ID NO: 3435041 - DNA, 25 bp, Homo sapien
taatgagtcagcgactgatccccac

SEQ ID NO: 3435042 - DNA, 25 bp, Homo sapien
tgagttcccacccaagacttaaagc

SEQ ID NO: 3435043 - DNA, 25 bp, Homo sapien
ggttcagcagctatccacctcaggt

SEQ ID NO: 3435044 - DNA, 25 bp, Homo sapien
ggcgtctggccctaccgagtttaca

SEQ ID NO: 3435045 - DNA, 25 bp, Homo sapien
catcactgagcgaagctgtggttca

SEQ ID NO: 3435046 - DNA, 25 bp, Homo sapien
tcaacctcaaggtgagacgaccgcg

SEQ ID NO: 3435047 - DNA, 25 bp, Homo sapien
tgatatgtgcagcagatccccgtgg

SEQ ID NO: 3435048 - DNA, 25 bp, Homo sapien
tcagtaagccaaaaggatggtgccg

SEQ ID NO: 3435049 - DNA, 25 bp, Homo sapien
acaaggtgagacgactgcagatgcc

SEQ ID NO: 3435050 - DNA, 25 bp, Homo sapien
gaccactgttgagtggcccagatga

SEQ ID NO: 3435051 - DNA, 25 bp, Homo sapien
cccagtttaggtgagtgtgccataa

SEQ ID NO: 3435052 - DNA, 25 bp, Homo sapien
ttcaactgggctcagcataaactgt

SEQ ID NO: 3435053 - DNA, 25 bp, Homo sapien
gaatctccctcacgaatccatgcag

SEQ ID NO: 3435054 - DNA, 25 bp, Homo sapien
cagggcatctacacaccattgcaaa

SEQ ID NO: 3435055 - DNA, 25 bp, Homo sapien
aagcactgggagaacctgagccggc

SEQ ID NO: 3435056 - DNA, 25 bp, Homo sapien
aacctcgagccctggcaatgctgct

SEQ ID NO: 3435057 - DNA, 25 bp, Homo sapien
ggagtgcccggttcagaacctcgag

SEQ ID NO: 3435058 - DNA, 25 bp, Homo sapien
caggctgcccacaggatagatagaa

SEQ ID NO: 3435059 - DNA, 25 bp, Homo sapien
tccttctgaccgagcagagggagga

SEQ ID NO: 3435060 - DNA, 25 bp, Homo sapien
tgctgagtgaatgtgcacccaggcc

SEQ ID NO: 3435061 - DNA, 25 bp, Homo sapien
tacatgccaagggttcatggaggcc

SEQ ID NO: 3435062 - DNA, 25 bp, Homo sapien
tggatagccagggagaattcttaac

SEQ ID NO: 3435063 - DNA, 25 bp, Homo sapien
aactagccagtcttaagtgcacaga

SEQ ID NO: 3435064 - DNA, 25 bp, Homo sapien
tccatacgttggctacagatacaga

SEQ ID NO: 3435065 - DNA, 25 bp, Homo sapien
ggtaggatccattacattgctgcag

SEQ ID NO: 3435066 - DNA, 25 bp, Homo sapien
ccgcagtcatgaccgtgggaattgc

SEQ ID NO: 3435067 - DNA, 25 bp, Homo sapien
tcatgaccgtgggaattgccggcat

SEQ ID NO: 3435068 - DNA, 25 bp, Homo sapien
cttgtgtggaaatgcagcatgggaa

SEQ ID NO: 3435069 - DNA, 25 bp, Homo sapien
tgggaaggaccgcagtcatgaccgt

SEQ ID NO: 3435070 - DNA, 25 bp, Homo sapien
caggaagcacagactaagtggaggt

SEQ ID NO: 3435071 - DNA, 25 bp, Homo sapien
taagtggaggtcattgcacctgggc

SEQ ID NO: 3435072 - DNA, 25 bp, Homo sapien
tggaggtcattgcacctgggcttgt

SEQ ID NO: 3435073 - DNA, 25 bp, Homo sapien
cagactaagtggaggtcattgcacc

SEQ ID NO: 3435074 - DNA, 25 bp, Homo sapien
tcaagtcgcattcagagcaaatcag

SEQ ID NO: 3435075 - DNA, 25 bp, Homo sapien
tctggaatccgcaaggccagctggt

SEQ ID NO: 3435076 - DNA, 25 bp, Homo sapien
caaacacaggcagtgggcttgaggc

SEQ ID NO: 3435077 - DNA, 25 bp, Homo sapien
tcctcggatgacctgggatgcagca

SEQ ID NO: 3435078 - DNA, 25 bp, Homo sapien
tggcaatctgccatccctagaggac

SEQ ID NO: 3435079 - DNA, 25 bp, Homo sapien
aacttcgcaaggtcggctgagcaca

SEQ ID NO: 3435080 - DNA, 25 bp, Homo sapien
gagaaactgagttgacccttaggga

SEQ ID NO: 3435081 - DNA, 25 bp, Homo sapien
tcagactccaaagagaagggccctc

SEQ ID NO: 3435082 - DNA, 25 bp, Homo sapien
tcggattggttcttctatctagcaa

SEQ ID NO: 3435083 - DNA, 25 bp, Homo sapien
agagaaagtagccttttcggattgg

SEQ ID NO: 3435084 - DNA, 25 bp, Homo sapien
tccagaaagtcacgtagttggaatc

SEQ ID NO: 3435085 - DNA, 25 bp, Homo sapien
agttggaatcatagagaaagtagcc

SEQ ID NO: 3435086 - DNA, 25 bp, Homo sapien
tgaaatctcacacccaaaccttggg

SEQ ID NO: 3435087 - DNA, 25 bp, Homo sapien
tataaagtaacctcaccacgggagc

SEQ ID NO: 3435088 - DNA, 25 bp, Homo sapien
tctgaaatcgccatgccaactagtg

SEQ ID NO: 3435089 - DNA, 25 bp, Homo sapien
tccagactgaagaggatgcggccct

SEQ ID NO: 3435090 - DNA, 25 bp, Homo sapien
tgcccctgtcggctgtgagcaatgc

SEQ ID NO: 3435091 - DNA, 25 bp, Homo sapien
gcccctgtcggctgtgagcaatgca

SEQ ID NO: 3435092 - DNA, 25 bp, Homo sapien
tgtctgcccctgtcggctgtgagca

SEQ ID NO: 3435093 - DNA, 25 bp, Homo sapien
gagcaggatccctggttggtgcagg

SEQ ID NO: 3435094 - DNA, 25 bp, Homo sapien
ccacagtgcttgtcaggcacggctg

SEQ ID NO: 3435095 - DNA, 25 bp, Homo sapien
gccacagtgcttgtcaggcacggct

SEQ ID NO: 3435096 - DNA, 25 bp, Homo sapien
caggagcctcgaggaagtgaaagcc

SEQ ID NO: 3435097 - DNA, 25 bp, Homo sapien
gaaacagacgttttcctgcagggcc

SEQ ID NO: 3435098 - DNA, 25 bp, Homo sapien
gcctgagcataagcgcgtggctgct

SEQ ID NO: 3435099 - DNA, 25 bp, Homo sapien
tgctccgtccgccttggaaacagac

SEQ ID NO: 3435100 - DNA, 25 bp, Homo sapien
cattcggtgcgggtgaactcagaga

SEQ ID NO: 3435101 - DNA, 25 bp, Homo sapien
ctggcattcggtgcgggtgaactca

SEQ ID NO: 3435102 - DNA, 25 bp, Homo sapien
cagccccaccggctggcattcggtg

SEQ ID NO: 3435103 - DNA, 25 bp, Homo sapien
ccaccggctggcattcggtgcgggt

SEQ ID NO: 3435104 - DNA, 25 bp, Homo sapien
atgagaggagatttagtgccctctt

SEQ ID NO: 3435105 - DNA, 25 bp, Homo sapien
gatgagaggagatttagtgccctct

SEQ ID NO: 3435106 - DNA, 25 bp, Homo sapien
ttgtgcgcggttgaaggttttttga

SEQ ID NO: 3435107 - DNA, 25 bp, Homo sapien
cattccgtttccctcggcgaggaca

SEQ ID NO: 3435108 - DNA, 25 bp, Homo sapien
actttgttgtcgtcgagggcattgg

SEQ ID NO: 3435109 - DNA, 25 bp, Homo sapien
tgatagatcacaatagagcactttg

SEQ ID NO: 3435110 - DNA, 25 bp, Homo sapien
cgggcagctttcatcccgggccggg

SEQ ID NO: 3435111 - DNA, 25 bp, Homo sapien
cccgtggaccaggtggcgcggtggc

SEQ ID NO: 3435112 - DNA, 25 bp, Homo sapien
tttatcccggccgagccagcggctc

SEQ ID NO: 3435113 - DNA, 25 bp, Homo sapien
aaagcgtgggggctgctttatcccg

SEQ ID NO: 3435114 - DNA, 25 bp, Homo sapien
cagggtcctgcagcagatgcagcag

SEQ ID NO: 3435115 - DNA, 25 bp, Homo sapien
ttggcacagggtcctgcagcagatg

SEQ ID NO: 3435116 - DNA, 25 bp, Homo sapien
ggtcctgcagcagatgcagcaggtc

SEQ ID NO: 3435117 - DNA, 25 bp, Homo sapien
acagggtcctgcagcagatgcagca

SEQ ID NO: 3435118 - DNA, 25 bp, Homo sapien
gtttgtctatactcaggcttatggg

SEQ ID NO: 3435119 - DNA, 25 bp, Homo sapien
cacagtgagtgacagccgcagaggt

SEQ ID NO: 3435120 - DNA, 25 bp, Homo sapien
gctatctggaagactggccttgttc

SEQ ID NO: 3435121 - DNA, 25 bp, Homo sapien
tgtgagaatattgggtcctggtgcc

SEQ ID NO: 3435122 - DNA, 25 bp, Homo sapien
ctgccacagtgtctctgccctctca

SEQ ID NO: 3435123 - DNA, 25 bp, Homo sapien
tgccacagtgtctctgccctctcac

SEQ ID NO: 3435124 - DNA, 25 bp, Homo sapien
ggcagggggtacttgagctgagctt

SEQ ID NO: 3435125 - DNA, 25 bp, Homo sapien
tcagggcagggggtacttgagctga

SEQ ID NO: 3435126 - DNA, 25 bp, Homo sapien
cagggcagggggtacttgagctgag

SEQ ID NO: 3435127 - DNA, 25 bp, Homo sapien
gggcagggggtacttgagctgagct

SEQ ID NO: 3435128 - DNA, 25 bp, Homo sapien
tctggcctaatttggagggacaggt

SEQ ID NO: 3435129 - DNA, 25 bp, Homo sapien
tgattcgggtgacccaatctgacag

SEQ ID NO: 3435130 - DNA, 25 bp, Homo sapien
ggaccctttgtcctcggtgcacagg

SEQ ID NO: 3435131 - DNA, 25 bp, Homo sapien
cacaggctgtaatcagcggggctcc

SEQ ID NO: 3435132 - DNA, 25 bp, Homo sapien
ttgaacgcgggcagtgagtcccacg

SEQ ID NO: 3435133 - DNA, 25 bp, Homo sapien
cgtgtgcatgcgatgtatctgggcc

SEQ ID NO: 3435134 - DNA, 25 bp, Homo sapien
ccttgttcttgaacgcgggcagtga

SEQ ID NO: 3435135 - DNA, 25 bp, Homo sapien
agcccatggctgtcgtcacggtgac

SEQ ID NO: 3435136 - DNA, 25 bp, Homo sapien
tgagtccggatgatgatgtctgcag

SEQ ID NO: 3435137 - DNA, 25 bp, Homo sapien
ttgtttcacgattcatagcagggaa

SEQ ID NO: 3435138 - DNA, 25 bp, Homo sapien
tgtcctcctcacacggcgttgtctg

SEQ ID NO: 3435139 - DNA, 25 bp, Homo sapien
gccggcattccatccaagctactga

SEQ ID NO: 3435140 - DNA, 25 bp, Homo sapien
agcttccttgccagaaatatgctcc

SEQ ID NO: 3435141 - DNA, 25 bp, Homo sapien
cttccttgccagaaatatgctccaa

SEQ ID NO: 3435142 - DNA, 25 bp, Homo sapien
gcttccttgccagaaatatgctcca

SEQ ID NO: 3435143 - DNA, 25 bp, Homo sapien
ttccttgccagaaatatgctccaac

SEQ ID NO: 3435144 - DNA, 25 bp, Homo sapien
tcccaagcctgggcgtcttggtggt

SEQ ID NO: 3435145 - DNA, 25 bp, Homo sapien
gcgtcttggtggtgcccccggcact

SEQ ID NO: 3435146 - DNA, 25 bp, Homo sapien
cggcactcaaatcggccctttgctg

SEQ ID NO: 3435147 - DNA, 25 bp, Homo sapien
caaatcggccctttgctgccggttc

SEQ ID NO: 3435148 - DNA, 25 bp, Homo sapien
ctgaagccttatctacacactttct

SEQ ID NO: 3435149 - DNA, 25 bp, Homo sapien
tttctgaagccttatctacacactt

SEQ ID NO: 3435150 - DNA, 25 bp, Homo sapien
tcatctctcccacagtttggcaggt

SEQ ID NO: 3435151 - DNA, 25 bp, Homo sapien
tttctttcccatgagccttttcttc

SEQ ID NO: 3435152 - DNA, 25 bp, Homo sapien
tgcgctcgggatctctctgctctca

SEQ ID NO: 3435153 - DNA, 25 bp, Homo sapien
tgttttaatgcttccagatgagttt

SEQ ID NO: 3435154 - DNA, 25 bp, Homo sapien
ctcacctgcttccattgttttaatg

SEQ ID NO: 3435155 - DNA, 25 bp, Homo sapien
tctgctctcacctgcttccattgtt

SEQ ID NO: 3435156 - DNA, 25 bp, Homo sapien
cagacacaaaactagggtaggctcc

SEQ ID NO: 3435157 - DNA, 25 bp, Homo sapien
cctgagattgcgatgccagtgggcc

SEQ ID NO: 3435158 - DNA, 25 bp, Homo sapien
caaaagcaaggcgatgcctgtggac

SEQ ID NO: 3435159 - DNA, 25 bp, Homo sapien
gtgagtgacatcttgctgggtccaa

SEQ ID NO: 3435160 - DNA, 25 bp, Homo sapien
aagcccaggttgtggttgagggtct

SEQ ID NO: 3435161 - DNA, 25 bp, Homo sapien
ccaggttgtggttgagggtctttct

SEQ ID NO: 3435162 - DNA, 25 bp, Homo sapien
ctgaaagcccaggttgtggttgagg

SEQ ID NO: 3435163 - DNA, 25 bp, Homo sapien
gtggttgagggtctttctgtgcatc

SEQ ID NO: 3435164 - DNA, 25 bp, Homo sapien
gcatagtcacgaaaagccccttggg

SEQ ID NO: 3435165 - DNA, 25 bp, Homo sapien
tcccctgttgccgcaagtgctgcat

SEQ ID NO: 3435166 - DNA, 25 bp, Homo sapien
tgagagggccctcactgtccgggac

SEQ ID NO: 3435167 - DNA, 25 bp, Homo sapien
tcactgtccgggaccacctgccatg

SEQ ID NO: 3435168 - DNA, 25 bp, Homo sapien
gctgagcttgctgcatattgttaaa

SEQ ID NO: 3435169 - DNA, 25 bp, Homo sapien
tgagcttgctgcatattgttaaagc

SEQ ID NO: 3435170 - DNA, 25 bp, Homo sapien
gagcttgctgcatattgttaaagcc

SEQ ID NO: 3435171 - DNA, 25 bp, Homo sapien
ctgagcttgctgcatattgttaaag

SEQ ID NO: 3435172 - DNA, 25 bp, Homo sapien
tggccacccgggacaaggatggctc

SEQ ID NO: 3435173 - DNA, 25 bp, Homo sapien
ctcaggaaagcacggataatgctgc

SEQ ID NO: 3435174 - DNA, 25 bp, Homo sapien
taatgctgccggaagttggttctgc

SEQ ID NO: 3435175 - DNA, 25 bp, Homo sapien
gctctggcgccatgcccgtcttgga

SEQ ID NO: 3435176 - DNA, 25 bp, Homo sapien
ggctcctcggaaagcagtgcataat

SEQ ID NO: 3435177 - DNA, 25 bp, Homo sapien
taaccactgtggatgtagggacaca

SEQ ID NO: 3435178 - DNA, 25 bp, Homo sapien
gacacattctaatagcctgcgcagc

SEQ ID NO: 3435179 - DNA, 25 bp, Homo sapien
tatcctaatcgagggtaagttccga

SEQ ID NO: 3435180 - DNA, 25 bp, Homo sapien
tgacagccgagtttgtagccacctc

SEQ ID NO: 3435181 - DNA, 25 bp, Homo sapien
cgagtttgtagccacctcccaaatg

SEQ ID NO: 3435182 - DNA, 25 bp, Homo sapien
cgtgcttcgtgacagccgagtttgt

SEQ ID NO: 3435183 - DNA, 25 bp, Homo sapien
tcgtgacagccgagtttgtagccac

SEQ ID NO: 3435184 - DNA, 25 bp, Homo sapien
tctgcgtgggatgagattaaactgc

SEQ ID NO: 3435185 - DNA, 25 bp, Homo sapien
cgtcttcttcgtggtttgaacgcaa

SEQ ID NO: 3435186 - DNA, 25 bp, Homo sapien
tttgaacgcaagagctccctgaaca

SEQ ID NO: 3435187 - DNA, 25 bp, Homo sapien
gattaaactgcgtcttcttcgtggt

SEQ ID NO: 3435188 - DNA, 25 bp, Homo sapien
ctccggagcagccggaaggggctga

SEQ ID NO: 3435189 - DNA, 25 bp, Homo sapien
tggaccagacatcggctggcgcctg

SEQ ID NO: 3435190 - DNA, 25 bp, Homo sapien
tcctggaccagacatcggctggcgc

SEQ ID NO: 3435191 - DNA, 25 bp, Homo sapien
ccagggactcctggaccagacatcg

SEQ ID NO: 3435192 - DNA, 25 bp, Homo sapien
gactcctggaccagacatcggctgg

SEQ ID NO: 3435193 - DNA, 25 bp, Homo sapien
tgtctgaacaagtggggcctgttcc

SEQ ID NO: 3435194 - DNA, 25 bp, Homo sapien
agccgctgaaactgttgaccccact

SEQ ID NO: 3435195 - DNA, 25 bp, Homo sapien
gagtatttcgtgacgtgaccaggtg

SEQ ID NO: 3435196 - DNA, 25 bp, Homo sapien
tttgtgtggagtatttcgtgacgtg

SEQ ID NO: 3435197 - DNA, 25 bp, Homo sapien
tttgcacacaggactggatttcagt

SEQ ID NO: 3435198 - DNA, 25 bp, Homo sapien
gtacagcatgagcaggcaccttggg

SEQ ID NO: 3435199 - DNA, 25 bp, Homo sapien
ggatttcagtacagcatgagcaggc

SEQ ID NO: 3435200 - DNA, 25 bp, Homo sapien
ccttcacttctgtgtttgcacacag

SEQ ID NO: 3435201 - DNA, 25 bp, Homo sapien
gggggtgacacaggacagccggacc

SEQ ID NO: 3435202 - DNA, 25 bp, Homo sapien
tgggggtgacacaggacagccggac

SEQ ID NO: 3435203 - DNA, 25 bp, Homo sapien
ctgggggtgacacaggacagccgga

SEQ ID NO: 3435204 - DNA, 25 bp, Homo sapien
aagccgtaggctcaagccgggtgaa

SEQ ID NO: 3435205 - DNA, 25 bp, Homo sapien
cctgggcctcggtggtcttgatgat

SEQ ID NO: 3435206 - DNA, 25 bp, Homo sapien
caaaagcaggtgatgggatagtggg

SEQ ID NO: 3435207 - DNA, 25 bp, Homo sapien
ttgatgatgagacatgaggctgttg

SEQ ID NO: 3435208 - DNA, 25 bp, Homo sapien
gggcccgatgttcagcaataacaaa

SEQ ID NO: 3435209 - DNA, 25 bp, Homo sapien
cgacatgggcccgatgttcagcaat

SEQ ID NO: 3435210 - DNA, 25 bp, Homo sapien
ctgaacacggcgacatgggcccgat

SEQ ID NO: 3435211 - DNA, 25 bp, Homo sapien
aacacggcgacatgggcccgatgtt

SEQ ID NO: 3435212 - DNA, 25 bp, Homo sapien
tgttgcaacggatgtcaacgtgcag

SEQ ID NO: 3435213 - DNA, 25 bp, Homo sapien
attgtcatggttcacatcccagcga

SEQ ID NO: 3435214 - DNA, 25 bp, Homo sapien
cctaggcgaagtacagtcattggtt

SEQ ID NO: 3435215 - DNA, 25 bp, Homo sapien
atcccagcgaatcccagtggagtgg

SEQ ID NO: 3435216 - DNA, 25 bp, Homo sapien
ccacaatagtttcagacccatcttt

SEQ ID NO: 3435217 - DNA, 25 bp, Homo sapien
aatagtttcagacccatctttttgg

SEQ ID NO: 3435218 - DNA, 25 bp, Homo sapien
acaatagtttcagacccatcttttt

SEQ ID NO: 3435219 - DNA, 25 bp, Homo sapien
cacaatagtttcagacccatctttt

SEQ ID NO: 3435220 - DNA, 25 bp, Homo sapien
agagctggccttcaaggccaaaacc

SEQ ID NO: 3435221 - DNA, 25 bp, Homo sapien
ggcctctgccttcagcggtttacac

SEQ ID NO: 3435222 - DNA, 25 bp, Homo sapien
gctggccttcaaggccaaaacctca

SEQ ID NO: 3435223 - DNA, 25 bp, Homo sapien
ccctggggagggcaacagcttggag

SEQ ID NO: 3435224 - DNA, 25 bp, Homo sapien
tagagggaccctcgtggtcctgcag

SEQ ID NO: 3435225 - DNA, 25 bp, Homo sapien
ctggatgctgagtccaaggactaga

SEQ ID NO: 3435226 - DNA, 25 bp, Homo sapien
aaagccaaggcgctcgcatggtgct

SEQ ID NO: 3435227 - DNA, 25 bp, Homo sapien
ccaaggcgctcgcatggtgctggat

SEQ ID NO: 3435228 - DNA, 25 bp, Homo sapien
gtggccaaaatgtctgcgtgtagcc

SEQ ID NO: 3435229 - DNA, 25 bp, Homo sapien
aatgtctgcgtgtagccatgtccct

SEQ ID NO: 3435230 - DNA, 25 bp, Homo sapien
gaggtccaggagtggccaaaatgtc

SEQ ID NO: 3435231 - DNA, 25 bp, Homo sapien
ctagaggtccaggagtggccaaaat

SEQ ID NO: 3435232 - DNA, 25 bp, Homo sapien
ctggccctcaaagctgggcgtgaag

SEQ ID NO: 3435233 - DNA, 25 bp, Homo sapien
tggccctcaaagctgggcgtgaagc

SEQ ID NO: 3435234 - DNA, 25 bp, Homo sapien
ctcaaagctgggcgtgaagcagctg

SEQ ID NO: 3435235 - DNA, 25 bp, Homo sapien
gccctcaaagctgggcgtgaagcag

SEQ ID NO: 3435236 - DNA, 25 bp, Homo sapien
ggcatttacgtataagtggcccgta

SEQ ID NO: 3435237 - DNA, 25 bp, Homo sapien
taagtggcccgtagctgtcaaaggg

SEQ ID NO: 3435238 - DNA, 25 bp, Homo sapien
caggtgtagtggacagaggcacatc

SEQ ID NO: 3435239 - DNA, 25 bp, Homo sapien
gaggcacatctcagaaatccccatt

SEQ ID NO: 3435240 - DNA, 25 bp, Homo sapien
ctgcccatcatagagctgtgggctc

SEQ ID NO: 3435241 - DNA, 25 bp, Homo sapien
taggggtagccctggcttctcatca

SEQ ID NO: 3435242 - DNA, 25 bp, Homo sapien
tgtgggccgctgcagttttactgga

SEQ ID NO: 3435243 - DNA, 25 bp, Homo sapien
tggcttctcatcagagaagatctgc

SEQ ID NO: 3435244 - DNA, 25 bp, Homo sapien
cagcaccagttcacccagtctaagg

SEQ ID NO: 3435245 - DNA, 25 bp, Homo sapien
tgagcagcaccagttcacccagtct

SEQ ID NO: 3435246 - DNA, 25 bp, Homo sapien
cctgagcagcaccagttcacccagt

SEQ ID NO: 3435247 - DNA, 25 bp, Homo sapien
caccagttcacccagtctaagggaa

SEQ ID NO: 3435248 - DNA, 25 bp, Homo sapien
tccagctgtggtgccgaacatactc

SEQ ID NO: 3435249 - DNA, 25 bp, Homo sapien
tactccttccctgcgggtagatagg

SEQ ID NO: 3435250 - DNA, 25 bp, Homo sapien
taataaggcgggttgtactgctgga

SEQ ID NO: 3435251 - DNA, 25 bp, Homo sapien
taactcgagcaccagtccagctgtg

SEQ ID NO: 3435252 - DNA, 25 bp, Homo sapien
agaaaaagcgcgcattacggttccg

SEQ ID NO: 3435253 - DNA, 25 bp, Homo sapien
cgcattacggttccggagcgcatgc

SEQ ID NO: 3435254 - DNA, 25 bp, Homo sapien
aaagcgcgcattacggttccggagc

SEQ ID NO: 3435255 - DNA, 25 bp, Homo sapien
ttacggttccggagcgcatgcggac

SEQ ID NO: 3435256 - DNA, 25 bp, Homo sapien
aggccgcgccgcgcattccgcgcat

SEQ ID NO: 3435257 - DNA, 25 bp, Homo sapien
tgggccgtggctcgggaaccgcgcg

SEQ ID NO: 3435258 - DNA, 25 bp, Homo sapien
ccagcgagttctgggcggcagggcc

SEQ ID NO: 3435259 - DNA, 25 bp, Homo sapien
acgcggggcacgacttgcccagcga

SEQ ID NO: 3435260 - DNA, 25 bp, Homo sapien
tggcagctctgcttcgcttacgtag

SEQ ID NO: 3435261 - DNA, 25 bp, Homo sapien
cattgttaagcccttaagtcgcccg

SEQ ID NO: 3435262 - DNA, 25 bp, Homo sapien
ggctccgcgagttttccattgttaa

SEQ ID NO: 3435263 - DNA, 25 bp, Homo sapien
gcggcccacgtgctatggcagctct

SEQ ID NO: 3435264 - DNA, 25 bp, Homo sapien
gaggctccaggactttgcaacttca

SEQ ID NO: 3435265 - DNA, 25 bp, Homo sapien
gagcgtgcggactctgctgctcgct

SEQ ID NO: 3435266 - DNA, 25 bp, Homo sapien
ctgctcgctgctactgcgccgacag

SEQ ID NO: 3435267 - DNA, 25 bp, Homo sapien
ctactgcgccgacagccctctggag

SEQ ID NO: 3435268 - DNA, 25 bp, Homo sapien
gtacgcgcggcggatggtttccact

SEQ ID NO: 3435269 - DNA, 25 bp, Homo sapien
ttgaagtaggacaccgagggcgcgc

SEQ ID NO: 3435270 - DNA, 25 bp, Homo sapien
cttctgcacacatttgaagtaggac

SEQ ID NO: 3435271 - DNA, 25 bp, Homo sapien
cgcagcacccggtcgttgaggaggt

SEQ ID NO: 3435272 - DNA, 25 bp, Homo sapien
tccaggtggcgacgatcttccgcat

SEQ ID NO: 3435273 - DNA, 25 bp, Homo sapien
tggcgacgatcttccgcatggacgg

SEQ ID NO: 3435274 - DNA, 25 bp, Homo sapien
cgatcttccgcatggacggcaggac

SEQ ID NO: 3435275 - DNA, 25 bp, Homo sapien
cagcatccaggtggcgacgatcttc

SEQ ID NO: 3435276 - DNA, 25 bp, Homo sapien
aagagagccgcccgaagccccgcac

SEQ ID NO: 3435277 - DNA, 25 bp, Homo sapien
ttaagagagccgcccgaagccccgc

SEQ ID NO: 3435278 - DNA, 25 bp, Homo sapien
taagagagccgcccgaagccccgca

SEQ ID NO: 3435279 - DNA, 25 bp, Homo sapien
agcaaagaaacgtgggtctgggcaa

SEQ ID NO: 3435280 - DNA, 25 bp, Homo sapien
ggtgagtagcaaagaaacgtgggtc

SEQ ID NO: 3435281 - DNA, 25 bp, Homo sapien
tgagtagcaaagaaacgtgggtctg

SEQ ID NO: 3435282 - DNA, 25 bp, Homo sapien
ggtctgggcaacaagttgcagggaa

SEQ ID NO: 3435283 - DNA, 25 bp, Homo sapien
tattttgaaaatacggatccctaga

SEQ ID NO: 3435284 - DNA, 25 bp, Homo sapien
cctccttcagaaaatacccgcaatt

SEQ ID NO: 3435285 - DNA, 25 bp, Homo sapien
atacggatccctagaaacaccacgg

SEQ ID NO: 3435286 - DNA, 25 bp, Homo sapien
ctagaaacaccacggcaaacttcaa

SEQ ID NO: 3435287 - DNA, 25 bp, Homo sapien
taaaaatcaaatctatgccccctcc

SEQ ID NO: 3435288 - DNA, 25 bp, Homo sapien
cataatactggcacgagcggccctt

SEQ ID NO: 3435289 - DNA, 25 bp, Homo sapien
taaaagagcaaagatggcgcataat

SEQ ID NO: 3435290 - DNA, 25 bp, Homo sapien
tacgtgtccatggatattaatttaa

SEQ ID NO: 3435291 - DNA, 25 bp, Homo sapien
tcgctgcttgaacaaaggccccccc

SEQ ID NO: 3435292 - DNA, 25 bp, Homo sapien
ggggatcaagccctggcgtcttggg

SEQ ID NO: 3435293 - DNA, 25 bp, Homo sapien
gtcttgggggccacgcgaccttgca

SEQ ID NO: 3435294 - DNA, 25 bp, Homo sapien
gccacgcgaccttgcagctcgccgt

SEQ ID NO: 3435295 - DNA, 25 bp, Homo sapien
cggagaaggtcctccaagccgatat

SEQ ID NO: 3435296 - DNA, 25 bp, Homo sapien
gagaaggtcctccaagccgatatcc

SEQ ID NO: 3435297 - DNA, 25 bp, Homo sapien
aggcccccggctcgctcggagaagg

SEQ ID NO: 3435298 - DNA, 25 bp, Homo sapien
ccccggctcgctcggagaaggtcct

SEQ ID NO: 3435299 - DNA, 25 bp, Homo sapien
agacacaaaggtggcgtcccaggcc

SEQ ID NO: 3435300 - DNA, 25 bp, Homo sapien
tgcgagacacaaaggtggcgtccca

SEQ ID NO: 3435301 - DNA, 25 bp, Homo sapien
gcctgcgagacacaaaggtggcgtc

SEQ ID NO: 3435302 - DNA, 25 bp, Homo sapien
gggcgccgcgcctgcgagacacaaa

SEQ ID NO: 3435303 - DNA, 25 bp, Homo sapien
cgacaggaagcggtccaggtagttc

SEQ ID NO: 3435304 - DNA, 25 bp, Homo sapien
gtagatgcacagcttctcggccgtc

SEQ ID NO: 3435305 - DNA, 25 bp, Homo sapien
tcttagaggccacgaacatgcaagt

SEQ ID NO: 3435306 - DNA, 25 bp, Homo sapien
ctgcaggcggctctttttcacgggc

SEQ ID NO: 3435307 - DNA, 25 bp, Homo sapien
cttgagcttgttcaccaggagcagc

SEQ ID NO: 3435308 - DNA, 25 bp, Homo sapien
cacagagggcaacgaaggtctgcgc

SEQ ID NO: 3435309 - DNA, 25 bp, Homo sapien
gatgatctgtttgttctcctccgcc

SEQ ID NO: 3435310 - DNA, 25 bp, Homo sapien
ggtcattgcggccaggttccacttg

SEQ ID NO: 3435311 - DNA, 25 bp, Homo sapien
ccaggtggagagcaagaagccggcc

SEQ ID NO: 3435312 - DNA, 25 bp, Homo sapien
gtcacctaaggagccggctctcaag

SEQ ID NO: 3435313 - DNA, 25 bp, Homo sapien
agggtcacctaaggagccggctctc

SEQ ID NO: 3435314 - DNA, 25 bp, Homo sapien
gccagggtcacctaaggagccggct

SEQ ID NO: 3435315 - DNA, 25 bp, Homo sapien
aggttcaggccttgcactgcggcca

SEQ ID NO: 3435316 - DNA, 25 bp, Homo sapien
cggtagtaggacaggaagttgttgg

SEQ ID NO: 3435317 - DNA, 25 bp, Homo sapien
ccaccatggagggcggattggaaat

SEQ ID NO: 3435318 - DNA, 25 bp, Homo sapien
tctggagaggaagcgtgtgaggcgg

SEQ ID NO: 3435319 - DNA, 25 bp, Homo sapien
ggacctcccagccagtcagtaagtt

SEQ ID NO: 3435320 - DNA, 25 bp, Homo sapien
ccaggggacgtgagaaggctgtgag

SEQ ID NO: 3435321 - DNA, 25 bp, Homo sapien
ggctgtgaggacctcccagccagtc

SEQ ID NO: 3435322 - DNA, 25 bp, Homo sapien
gtgagaaggctgtgaggacctccca

SEQ ID NO: 3435323 - DNA, 25 bp, Homo sapien
gcctccgtcccggacgcttcgccca

SEQ ID NO: 3435324 - DNA, 25 bp, Homo sapien
ctccgtcccggacgcttcgcccaga

SEQ ID NO: 3435325 - DNA, 25 bp, Homo sapien
cacacagaccattggctggggccgc

SEQ ID NO: 3435326 - DNA, 25 bp, Homo sapien
caccacacagaccattggctggggc

SEQ ID NO: 3435327 - DNA, 25 bp, Homo sapien
tccggtgtctcggacctcacaggag

SEQ ID NO: 3435328 - DNA, 25 bp, Homo sapien
gaaagacacagtcatcccagggttt

SEQ ID NO: 3435329 - DNA, 25 bp, Homo sapien
gcatctatttattggccacgcacat

SEQ ID NO: 3435330 - DNA, 25 bp, Homo sapien
ctcaaagaggccgtaaacaacaagg

SEQ ID NO: 3435331 - DNA, 25 bp, Homo sapien
agggcttcgatctgctcctggcagg

SEQ ID NO: 3435332 - DNA, 25 bp, Homo sapien
tgggcctggcgcaggcttgactcca

SEQ ID NO: 3435333 - DNA, 25 bp, Homo sapien
gcttgactccagcagggcttcgatc

SEQ ID NO: 3435334 - DNA, 25 bp, Homo sapien
ctgggcctggcgcaggcttgactcc

SEQ ID NO: 3435335 - DNA, 25 bp, Homo sapien
tcctcctcggcggccttggggtcca

SEQ ID NO: 3435336 - DNA, 25 bp, Homo sapien
cttcctcctcctcggcggccttggg

SEQ ID NO: 3435337 - DNA, 25 bp, Homo sapien
cctcctcggcggccttggggtccat

SEQ ID NO: 3435338 - DNA, 25 bp, Homo sapien
ccgcacgtcggtgggtgtgcaagcc

SEQ ID NO: 3435339 - DNA, 25 bp, Homo sapien
cgtcccgcacgtcggtgggtgtgca

SEQ ID NO: 3435340 - DNA, 25 bp, Homo sapien
tcccgcacgtcggtgggtgtgcaag

SEQ ID NO: 3435341 - DNA, 25 bp, Homo sapien
cacgtcccgcacgtcggtgggtgtg

SEQ ID NO: 3435342 - DNA, 25 bp, Homo sapien
tggaagtcaacggtagcagcgcaat

SEQ ID NO: 3435343 - DNA, 25 bp, Homo sapien
tctgggaaacgccaaacaggctgaa

SEQ ID NO: 3435344 - DNA, 25 bp, Homo sapien
tgagagtcctacaggtacaacgccg

SEQ ID NO: 3435345 - DNA, 25 bp, Homo sapien
taagaaaatggagctgcggcctgtc

SEQ ID NO: 3435346 - DNA, 25 bp, Homo sapien
ttgccccatcacgacagacaaagcg

SEQ ID NO: 3435347 - DNA, 25 bp, Homo sapien
gcgtggttcagacagacgccgcagc

SEQ ID NO: 3435348 - DNA, 25 bp, Homo sapien
ttgaggtaagcgtgagccgtgttct

SEQ ID NO: 3435349 - DNA, 25 bp, Homo sapien
tggttcggcagcttgctaggtgacc

SEQ ID NO: 3435350 - DNA, 25 bp, Homo sapien
catgccggttacatgttggtgctgg

SEQ ID NO: 3435351 - DNA, 25 bp, Homo sapien
agaccctcagacttgcgcgtcacag

SEQ ID NO: 3435352 - DNA, 25 bp, Homo sapien
gcgtcacaggacagactccgctgtg

SEQ ID NO: 3435353 - DNA, 25 bp, Homo sapien
gccgcggtgcaaccagaaatgcaca

SEQ ID NO: 3435354 - DNA, 25 bp, Homo sapien
tttgtagcgtcacctcaggtctggg

SEQ ID NO: 3435355 - DNA, 25 bp, Homo sapien
aactctaaacctgcgtgtgtggctg

SEQ ID NO: 3435356 - DNA, 25 bp, Homo sapien
gctgtgcaccgctcgtttgtagcgt

SEQ ID NO: 3435357 - DNA, 25 bp, Homo sapien
agctggtgccttcgggccagaaaga

SEQ ID NO: 3435358 - DNA, 25 bp, Homo sapien
ggattctgagaacgtcttaggtgac

SEQ ID NO: 3435359 - DNA, 25 bp, Homo sapien
tacttgctgcgattatggattctga

SEQ ID NO: 3435360 - DNA, 25 bp, Homo sapien
tcctcaatcatggtagagctgtagt

SEQ ID NO: 3435361 - DNA, 25 bp, Homo sapien
tccacgtgggccatcatatctgcaa

SEQ ID NO: 3435362 - DNA, 25 bp, Homo sapien
gcaaggtgccttcggtgccccttta

SEQ ID NO: 3435363 - DNA, 25 bp, Homo sapien
tcctcatgtcgatcctgaaaacggg

SEQ ID NO: 3435364 - DNA, 25 bp, Homo sapien
gcctggacctcagcaaagggcaagg

SEQ ID NO: 3435365 - DNA, 25 bp, Homo sapien
gatctgatggttgactagctgccct

SEQ ID NO: 3435366 - DNA, 25 bp, Homo sapien
gatccgcccagatggctacaatgtg

SEQ ID NO: 3435367 - DNA, 25 bp, Homo sapien
gactgtgctttcgaggaggagatcc

SEQ ID NO: 3435368 - DNA, 25 bp, Homo sapien
tctgcagcttcagtactcggaggaa

SEQ ID NO: 3435369 - DNA, 25 bp, Homo sapien
cagtctgtagcacaaacgtccatgt

SEQ ID NO: 3435370 - DNA, 25 bp, Homo sapien
aggctgcggcgccacctacagtccg

SEQ ID NO: 3435371 - DNA, 25 bp, Homo sapien
ccaggagcgcaaagcccaggcggac

SEQ ID NO: 3435372 - DNA, 25 bp, Homo sapien
gttgcatctcgcgcacagccgcggg

SEQ ID NO: 3435373 - DNA, 25 bp, Homo sapien
aaagcccaggcggacgccgaggctg

SEQ ID NO: 3435374 - DNA, 25 bp, Homo sapien
agcttcctgaattccaccctttaca

SEQ ID NO: 3435375 - DNA, 25 bp, Homo sapien
tcctgaattccaccctttacacagg

SEQ ID NO: 3435376 - DNA, 25 bp, Homo sapien
ggcagcttcctgaattccacccttt

SEQ ID NO: 3435377 - DNA, 25 bp, Homo sapien
cttcctgaattccaccctttacaca

SEQ ID NO: 3435378 - DNA, 25 bp, Homo sapien
gctccgactccagctttgctatgcc

SEQ ID NO: 3435379 - DNA, 25 bp, Homo sapien
gcagtaaagggagggctccgactcc

SEQ ID NO: 3435380 - DNA, 25 bp, Homo sapien
ctgggccttctgaaccggcagtaaa

SEQ ID NO: 3435381 - DNA, 25 bp, Homo sapien
cttctgaaccggcagtaaagggagg

SEQ ID NO: 3435382 - DNA, 25 bp, Homo sapien
cagcccagggtctccagtgaccact

SEQ ID NO: 3435383 - DNA, 25 bp, Homo sapien
tcagcccagggtctccagtgaccac

SEQ ID NO: 3435384 - DNA, 25 bp, Homo sapien
tccaatatttcttggcagcgtcaag

SEQ ID NO: 3435385 - DNA, 25 bp, Homo sapien
aatatttcttggcagcgtcaagtgc

SEQ ID NO: 3435386 - DNA, 25 bp, Homo sapien
aggacaccagggtcatgcccgcaaa

SEQ ID NO: 3435387 - DNA, 25 bp, Homo sapien
gcaaactgcgcacttgtatcctcac

SEQ ID NO: 3435388 - DNA, 25 bp, Homo sapien
ggtcggcgtgtagcctcttgagcct

SEQ ID NO: 3435389 - DNA, 25 bp, Homo sapien
agtgccgagtgcctgcgcagagtgt

SEQ ID NO: 3435390 - DNA, 25 bp, Homo sapien
tgcgcagagtgttgcaggcttccac

SEQ ID NO: 3435391 - DNA, 25 bp, Homo sapien
cagtgacggtcacccgagtgccgag

SEQ ID NO: 3435392 - DNA, 25 bp, Homo sapien
cccagaatagctcgacttttctcct

SEQ ID NO: 3435393 - DNA, 25 bp, Homo sapien
agaatagctcgacttttctcctctg

SEQ ID NO: 3435394 - DNA, 25 bp, Homo sapien
gacccagaatagctcgacttttctc

SEQ ID NO: 3435395 - DNA, 25 bp, Homo sapien
gggacccagaatagctcgacttttc

SEQ ID NO: 3435396 - DNA, 25 bp, Homo sapien
ctgaagaagacccaacaaccaagtt

SEQ ID NO: 3435397 - DNA, 25 bp, Homo sapien
tcagcttcgtacttgagagtgactt

SEQ ID NO: 3435398 - DNA, 25 bp, Homo sapien
caccggatgcgggagctggccttct

SEQ ID NO: 3435399 - DNA, 25 bp, Homo sapien
tcagatgggacgctgactcctccat

SEQ ID NO: 3435400 - DNA, 25 bp, Homo sapien
tctcaagatctctagtcctaaaggg

SEQ ID NO: 3435401 - DNA, 25 bp, Homo sapien
gctacctttttatggtctctccttg

SEQ ID NO: 3435402 - DNA, 25 bp, Homo sapien
tctctccttgcatactttttccttc

SEQ ID NO: 3435403 - DNA, 25 bp, Homo sapien
tttttatggtctctccttgcatact

SEQ ID NO: 3435404 - DNA, 25 bp, Homo sapien
cttctgtcctggaaaatctcaggca

SEQ ID NO: 3435405 - DNA, 25 bp, Homo sapien
tgtagcaccgagaaagggaaccagc

SEQ ID NO: 3435406 - DNA, 25 bp, Homo sapien
cccgccatttggcacccagggccat

SEQ ID NO: 3435407 - DNA, 25 bp, Homo sapien
caaagtgctttacaacctgcttgta

SEQ ID NO: 3435408 - DNA, 25 bp, Homo sapien
tggatggccccgaaaccatggtggc

SEQ ID NO: 3435409 - DNA, 25 bp, Homo sapien
ggtcttgtctgcgtccacttttcct

SEQ ID NO: 3435410 - DNA, 25 bp, Homo sapien
cgagggccatcaccccgtggaatgc

SEQ ID NO: 3435411 - DNA, 25 bp, Homo sapien
ttgtctgcgtccacttttcctccag

SEQ ID NO: 3435412 - DNA, 25 bp, Homo sapien
ggcccgagggccatcaccccgtgga

SEQ ID NO: 3435413 - DNA, 25 bp, Homo sapien
ctgcttatctgcggtgccctccatg

SEQ ID NO: 3435414 - DNA, 25 bp, Homo sapien
tggtctccacgtccctgggcctggc

SEQ ID NO: 3435415 - DNA, 25 bp, Homo sapien
tgcagcagttggacaggtgaaactc

SEQ ID NO: 3435416 - DNA, 25 bp, Homo sapien
gaaactcttgccctggtctccacgt

SEQ ID NO: 3435417 - DNA, 25 bp, Homo sapien
ctctgcctccgtggatggcgaggat

SEQ ID NO: 3435418 - DNA, 25 bp, Homo sapien
ccttccacccctaagctggggtctg

SEQ ID NO: 3435419 - DNA, 25 bp, Homo sapien
gagctatttgccccatctctgcctc

SEQ ID NO: 3435420 - DNA, 25 bp, Homo sapien
gaacaccaacaccagagctatttgc

SEQ ID NO: 3435421 - DNA, 25 bp, Homo sapien
cttcctctcaatgtagagatagacg

SEQ ID NO: 3435422 - DNA, 25 bp, Homo sapien
gtatacagatgcattgagggtcttc

SEQ ID NO: 3435423 - DNA, 25 bp, Homo sapien
tcccaagggaatcataagcacagtc

SEQ ID NO: 3435424 - DNA, 25 bp, Homo sapien
gtagagatagacgtttcccaaggga

SEQ ID NO: 3435425 - DNA, 25 bp, Homo sapien
ggaagtggttcacagggaatccctg

SEQ ID NO: 3435426 - DNA, 25 bp, Homo sapien
cataatgaactctccttttggtggg

SEQ ID NO: 3435427 - DNA, 25 bp, Homo sapien
ctaggtctggacctgccaggaggaa

SEQ ID NO: 3435428 - DNA, 25 bp, Homo sapien
gaagacctgagagggtccctggcac

SEQ ID NO: 3435429 - DNA, 25 bp, Homo sapien
gacggtggcccctagcactgggcta

SEQ ID NO: 3435430 - DNA, 25 bp, Homo sapien
tggccctgtgctggttccaccagac

SEQ ID NO: 3435431 - DNA, 25 bp, Homo sapien
gactgggacattaagaccataatta

SEQ ID NO: 3435432 - DNA, 25 bp, Homo sapien
cattaacgggaagatagaaaagact

SEQ ID NO: 3435433 - DNA, 25 bp, Homo sapien
ggtggaaatgtacccatcgttggca

SEQ ID NO: 3435434 - DNA, 25 bp, Homo sapien
cgttggcaaaatcgatcagctgaac

SEQ ID NO: 3435435 - DNA, 25 bp, Homo sapien
cagctgaactgagctttcgtcttgg

SEQ ID NO: 3435436 - DNA, 25 bp, Homo sapien
actgagctttcgtcttggctttcca

SEQ ID NO: 3435437 - DNA, 25 bp, Homo sapien
ttcggcgtggccagccggttcttcg

SEQ ID NO: 3435438 - DNA, 25 bp, Homo sapien
ccggttcttcgtggccatgagcagc

SEQ ID NO: 3435439 - DNA, 25 bp, Homo sapien
gagtgggccagggatcacctgcccc

SEQ ID NO: 3435440 - DNA, 25 bp, Homo sapien
gcaagggcaagctctatggctcggt

SEQ ID NO: 3435441 - DNA, 25 bp, Homo sapien
ctggccttgctggcgccctgggcgg

SEQ ID NO: 3435442 - DNA, 25 bp, Homo sapien
cgggacggccgcggtagcgctgctc

SEQ ID NO: 3435443 - DNA, 25 bp, Homo sapien
acccactgcacccaacggcacgctg

SEQ ID NO: 3435444 - DNA, 25 bp, Homo sapien
ccaacggcacgctggaggccgagct

SEQ ID NO: 3435445 - DNA, 25 bp, Homo sapien
gtgacccacatcctttgtaagagga

SEQ ID NO: 3435446 - DNA, 25 bp, Homo sapien
cgtgacccacatcctttgtaagagg

SEQ ID NO: 3435447 - DNA, 25 bp, Homo sapien
gggcagggtccaggtgaggaggctc

SEQ ID NO: 3435448 - DNA, 25 bp, Homo sapien
ggcacttggcaggatgggcagggtc

SEQ ID NO: 3435449 - DNA, 25 bp, Homo sapien
cctgagcctgggactgtgaggacca

SEQ ID NO: 3435450 - DNA, 25 bp, Homo sapien
tccaggtgaggaggctctcctgagc

SEQ ID NO: 3435451 - DNA, 25 bp, Homo sapien
cattcccagaaatcgggctaaaggt

SEQ ID NO: 3435452 - DNA, 25 bp, Homo sapien
tccagcacagcagaatccgcgctgg

SEQ ID NO: 3435453 - DNA, 25 bp, Homo sapien
aatccgcgctggcatcagcctgcgt

SEQ ID NO: 3435454 - DNA, 25 bp, Homo sapien
ctgctttaagaggaagacggcattc

SEQ ID NO: 3435455 - DNA, 25 bp, Homo sapien
caggcgcgggatcccgctccgagca

SEQ ID NO: 3435456 - DNA, 25 bp, Homo sapien
ctttcccgcgaagccggagtcagca

SEQ ID NO: 3435457 - DNA, 25 bp, Homo sapien
gagcacctcgcagctgtccggctgc

SEQ ID NO: 3435458 - DNA, 25 bp, Homo sapien
ggatcccgctccgagcacctcgcag

SEQ ID NO: 3435459 - DNA, 25 bp, Homo sapien
agtcatcggcggcggccccattgtg

SEQ ID NO: 3435460 - DNA, 25 bp, Homo sapien
caaggcctcggtctataattttcgg

SEQ ID NO: 3435461 - DNA, 25 bp, Homo sapien
tataattttcggaggcataattggt

SEQ ID NO: 3435462 - DNA, 25 bp, Homo sapien
cctcctcaaggcctcggtctataat

SEQ ID NO: 3435463 - DNA, 25 bp, Homo sapien
gctggctcctgtgattgtatttgta

SEQ ID NO: 3435464 - DNA, 25 bp, Homo sapien
ttgtaggcggctgaatgaaggcccc

SEQ ID NO: 3435465 - DNA, 25 bp, Homo sapien
gcccatcagtccatcgatgctggct

SEQ ID NO: 3435466 - DNA, 25 bp, Homo sapien
tgtatttgtagcactcctcagcctc

SEQ ID NO: 3435467 - DNA, 25 bp, Homo sapien
gccaccagtctctgacgggagggtt

SEQ ID NO: 3435468 - DNA, 25 bp, Homo sapien
gaaagcttcacagcgcacccttgta

SEQ ID NO: 3435469 - DNA, 25 bp, Homo sapien
tcacgactccggctgtctgctgtct

SEQ ID NO: 3435470 - DNA, 25 bp, Homo sapien
gagggcactctggttgctaccgtgt

SEQ ID NO: 3435471 - DNA, 25 bp, Homo sapien
gacggcaaaacatgatgatgacggc

SEQ ID NO: 3435472 - DNA, 25 bp, Homo sapien
ttcagccttcacatccgttcctggg

SEQ ID NO: 3435473 - DNA, 25 bp, Homo sapien
ccttcacatccgttcctgggtagag

SEQ ID NO: 3435474 - DNA, 25 bp, Homo sapien
tctggcatttctgctcagaggtctg

SEQ ID NO: 3435475 - DNA, 25 bp, Homo sapien
atctgctggtgcgatgaggccctct

SEQ ID NO: 3435476 - DNA, 25 bp, Homo sapien
ccccagaagatccaaagtccaagag

SEQ ID NO: 3435477 - DNA, 25 bp, Homo sapien
accggaggcctgagccaactggcat

SEQ ID NO: 3435478 - DNA, 25 bp, Homo sapien
ccactactctaaatgggatgagagg

SEQ ID NO: 3435479 - DNA, 25 bp, Homo sapien
gagaacatccaaggccaggctcttg

SEQ ID NO: 3435480 - DNA, 25 bp, Homo sapien
caggctcttgtaggcactaccgctt

SEQ ID NO: 3435481 - DNA, 25 bp, Homo sapien
ttgtaggcactaccgctttttacaa

SEQ ID NO: 3435482 - DNA, 25 bp, Homo sapien
aatgagaacatccaaggccaggctc

SEQ ID NO: 3435483 - DNA, 25 bp, Homo sapien
agggcccagtgatgaacacgagatg

SEQ ID NO: 3435484 - DNA, 25 bp, Homo sapien
cttggactagggacctcggaccacg

SEQ ID NO: 3435485 - DNA, 25 bp, Homo sapien
tgttcattggtgtgggacgagggcc

SEQ ID NO: 3435486 - DNA, 25 bp, Homo sapien
acacgagatgcaggctcaggcagtc

SEQ ID NO: 3435487 - DNA, 25 bp, Homo sapien
actattccatttcggcgggaggact

SEQ ID NO: 3435488 - DNA, 25 bp, Homo sapien
agtggcaaggcgatgctgcccgcga

SEQ ID NO: 3435489 - DNA, 25 bp, Homo sapien
ggactattccatttcggcgggagga

SEQ ID NO: 3435490 - DNA, 25 bp, Homo sapien
aggaggactattccatttcggcggg

SEQ ID NO: 3435491 - DNA, 25 bp, Homo sapien
ccccgccgatgcaggcatctgcaaa

SEQ ID NO: 3435492 - DNA, 25 bp, Homo sapien
ggtgcacgagccacacgctggtgct

SEQ ID NO: 3435493 - DNA, 25 bp, Homo sapien
caaacaccagggtgcacgagccaca

SEQ ID NO: 3435494 - DNA, 25 bp, Homo sapien
atctgcaaacaccagggtgcacgag

SEQ ID NO: 3435495 - DNA, 25 bp, Homo sapien
tgaacttgggccctgttgggaacca

SEQ ID NO: 3435496 - DNA, 25 bp, Homo sapien
tggaaaagcggtcttccctggtggc

SEQ ID NO: 3435497 - DNA, 25 bp, Homo sapien
ccctggacagagctcattacgtaga

SEQ ID NO: 3435498 - DNA, 25 bp, Homo sapien
ttccccaccaggagtagctatctgc

SEQ ID NO: 3435499 - DNA, 25 bp, Homo sapien
tggtttgcttgctgatggtcagcac

SEQ ID NO: 3435500 - DNA, 25 bp, Homo sapien
tgatggtcagcacgtggccggtact

SEQ ID NO: 3435501 - DNA, 25 bp, Homo sapien
cacgtggccggtactgggtgaattt

SEQ ID NO: 3435502 - DNA, 25 bp, Homo sapien
gccggtactgggtgaatttctgttg

SEQ ID NO: 3435503 - DNA, 25 bp, Homo sapien
cgctgtctcctccatcgccagctct

SEQ ID NO: 3435504 - DNA, 25 bp, Homo sapien
tgccagcagagggtccagcgctgtc

SEQ ID NO: 3435505 - DNA, 25 bp, Homo sapien
ctgtctcctccatcgccagctcttc

SEQ ID NO: 3435506 - DNA, 25 bp, Homo sapien
cagcagagggtccagcgctgtctcc

SEQ ID NO: 3435507 - DNA, 25 bp, Homo sapien
tccgcgggctgtgtagttggcataa

SEQ ID NO: 3435508 - DNA, 25 bp, Homo sapien
gaaatcctgtccacgaaagagaggt

SEQ ID NO: 3435509 - DNA, 25 bp, Homo sapien
cctgaggaatgacagagcgatgcca

SEQ ID NO: 3435510 - DNA, 25 bp, Homo sapien
cagcacatactgaaggctaggtcca

SEQ ID NO: 3435511 - DNA, 25 bp, Homo sapien
tcctccgacagccccagtccatggt

SEQ ID NO: 3435512 - DNA, 25 bp, Homo sapien
tcccccactggtgtcagattgatgg

SEQ ID NO: 3435513 - DNA, 25 bp, Homo sapien
cactggtgtcagattgatgggtaca

SEQ ID NO: 3435514 - DNA, 25 bp, Homo sapien
gggatcccccactggtgtcagattg

SEQ ID NO: 3435515 - DNA, 25 bp, Homo sapien
ccccactggtgtcagattgatgggt

SEQ ID NO: 3435516 - DNA, 25 bp, Homo sapien
ggagggcgtagtaggcatttgccat

SEQ ID NO: 3435517 - DNA, 25 bp, Homo sapien
agggagggcgtagtaggcatttgcc

SEQ ID NO: 3435518 - DNA, 25 bp, Homo sapien
gggagggcgtagtaggcatttgcca

SEQ ID NO: 3435519 - DNA, 25 bp, Homo sapien
caaatcacccctgaagggggctcca

SEQ ID NO: 3435520 - DNA, 25 bp, Homo sapien
ttgtacagataggtgccagctccct

SEQ ID NO: 3435521 - DNA, 25 bp, Homo sapien
ggctgttagtgggtccacgggcagc

SEQ ID NO: 3435522 - DNA, 25 bp, Homo sapien
gctccctcagtttagaatcctcctt

SEQ ID NO: 3435523 - DNA, 25 bp, Homo sapien
gctgctttgtggaagtttgtcctgg

SEQ ID NO: 3435524 - DNA, 25 bp, Homo sapien
tctggtttcaagaccagggggctgc

SEQ ID NO: 3435525 - DNA, 25 bp, Homo sapien
tttgtcctggagagcggatcccgga

SEQ ID NO: 3435526 - DNA, 25 bp, Homo sapien
caggtggtgacaggtttcgctggct

SEQ ID NO: 3435527 - DNA, 25 bp, Homo sapien
ggggccaaggtccgagcctagctcg

SEQ ID NO: 3435528 - DNA, 25 bp, Homo sapien
gggggccaaggtccgagcctagctc

SEQ ID NO: 3435529 - DNA, 25 bp, Homo sapien
cgctgcgcgactccggtgcacccgg

SEQ ID NO: 3435530 - DNA, 25 bp, Homo sapien
tgcgcgactccggtgcacccgggac

SEQ ID NO: 3435531 - DNA, 25 bp, Homo sapien
ggcgcgttcgctgcgcgactccggt

SEQ ID NO: 3435532 - DNA, 25 bp, Homo sapien
gcgttcgctgcgcgactccggtgca

SEQ ID NO: 3435533 - DNA, 25 bp, Homo sapien
cccctccaggccgatgtcgccctcc

SEQ ID NO: 3435534 - DNA, 25 bp, Homo sapien
cagcccctccaggccgatgtcgccc

SEQ ID NO: 3435535 - DNA, 25 bp, Homo sapien
ctccaggccgatgtcgccctcctgc

SEQ ID NO: 3435536 - DNA, 25 bp, Homo sapien
cctccaggccgatgtcgccctcctg

SEQ ID NO: 3435537 - DNA, 25 bp, Homo sapien
tcccagatccactgcggccgcgctc

SEQ ID NO: 3435538 - DNA, 25 bp, Homo sapien
tcctgctcctcgtgcgcccctgagt

SEQ ID NO: 3435539 - DNA, 25 bp, Homo sapien
tgctcctcgtgcgcccctgagtcct

SEQ ID NO: 3435540 - DNA, 25 bp, Homo sapien
cctgctcctcgtgcgcccctgagtc

SEQ ID NO: 3435541 - DNA, 25 bp, Homo sapien
ctcctgctcctcgtgcgcccctgag

SEQ ID NO: 3435542 - DNA, 25 bp, Homo sapien
ctagaagcattgctgggtgattctg

SEQ ID NO: 3435543 - DNA, 25 bp, Homo sapien
tagaagcattgctgggtgattctgc

SEQ ID NO: 3435544 - DNA, 25 bp, Homo sapien
tgtttctgtttaatttcttctgata

SEQ ID NO: 3435545 - DNA, 25 bp, Homo sapien
tattttccattctgtttctgtttaa

SEQ ID NO: 3435546 - DNA, 25 bp, Homo sapien
ttccattctgtttctgtttaatttc

SEQ ID NO: 3435547 - DNA, 25 bp, Homo sapien
ttctgtttaatttcttctgatagag

SEQ ID NO: 3435548 - DNA, 25 bp, Homo sapien
cagagtcgtgaagaggccataccaa

SEQ ID NO: 3435549 - DNA, 25 bp, Homo sapien
tccaagttgaataagtcccagaggg

SEQ ID NO: 3435550 - DNA, 25 bp, Homo sapien
gtgtgccagaaccttgatgtgtgct

SEQ ID NO: 3435551 - DNA, 25 bp, Homo sapien
cataccaagaccctaccttcatggg

SEQ ID NO: 3435552 - DNA, 25 bp, Homo sapien
ctgatcaggctacagtgactggtgg

SEQ ID NO: 3435553 - DNA, 25 bp, Homo sapien
ctttgaccctgatcaggctacagtg

SEQ ID NO: 3435554 - DNA, 25 bp, Homo sapien
accctgatcaggctacagtgactgg

SEQ ID NO: 3435555 - DNA, 25 bp, Homo sapien
ggctttgaccctgatcaggctacag

SEQ ID NO: 3435556 - DNA, 25 bp, Homo sapien
tcagaggcctgtgccgtggccgtga

SEQ ID NO: 3435557 - DNA, 25 bp, Homo sapien
agaggcctgtgccgtggccgtgacc

SEQ ID NO: 3435558 - DNA, 25 bp, Homo sapien
ggcctgtgccgtggccgtgaccttc

SEQ ID NO: 3435559 - DNA, 25 bp, Homo sapien
aggcctgtgccgtggccgtgacctt

SEQ ID NO: 3435560 - DNA, 25 bp, Homo sapien
gtttttggagactgagcaactttcg

SEQ ID NO: 3435561 - DNA, 25 bp, Homo sapien
tttttggagactgagcaactttcgc

SEQ ID NO: 3435562 - DNA, 25 bp, Homo sapien
tggagactgagcaactttcgcttcc

SEQ ID NO: 3435563 - DNA, 25 bp, Homo sapien
tttggagactgagcaactttcgctt

SEQ ID NO: 3435564 - DNA, 25 bp, Homo sapien
tccaaagcaataagcctgggctgca

SEQ ID NO: 3435565 - DNA, 25 bp, Homo sapien
aatttcccacagccggtgacttcca

SEQ ID NO: 3435566 - DNA, 25 bp, Homo sapien
cctggctggctctcggctccagatg

SEQ ID NO: 3435567 - DNA, 25 bp, Homo sapien
ggctctcggctccagatgccaattt

SEQ ID NO: 3435568 - DNA, 25 bp, Homo sapien
ggcctgcagtccgtccacaatgaga

SEQ ID NO: 3435569 - DNA, 25 bp, Homo sapien
cctctccccgacgaccatcactggg

SEQ ID NO: 3435570 - DNA, 25 bp, Homo sapien
cctgcagtccgtccacaatgagact

SEQ ID NO: 3435571 - DNA, 25 bp, Homo sapien
gacgaccatcactggggtctctttt

SEQ ID NO: 3435572 - DNA, 25 bp, Homo sapien
gccctgggcctttgaggtagattcc

SEQ ID NO: 3435573 - DNA, 25 bp, Homo sapien
cctgggcctttgaggtagattccca

SEQ ID NO: 3435574 - DNA, 25 bp, Homo sapien
gtgtctaacagcaccgagtcccatg

SEQ ID NO: 3435575 - DNA, 25 bp, Homo sapien
gaaggtgtggcccactagatcctgt

SEQ ID NO: 3435576 - DNA, 25 bp, Homo sapien
ctagatcctgttgttctgccccttc

SEQ ID NO: 3435577 - DNA, 25 bp, Homo sapien
ccctggtccttggagtgtctaacag

SEQ ID NO: 3435578 - DNA, 25 bp, Homo sapien
gctggacctgacactagccctggtc

SEQ ID NO: 3435579 - DNA, 25 bp, Homo sapien
gctggccatcggcagctgatgtctg

SEQ ID NO: 3435580 - DNA, 25 bp, Homo sapien
gcagctccacgggtcatagctctcg

SEQ ID NO: 3435581 - DNA, 25 bp, Homo sapien
cacgggtcatagctctcggctggct

SEQ ID NO: 3435582 - DNA, 25 bp, Homo sapien
gattttacttctagggcatcatggc

SEQ ID NO: 3435583 - DNA, 25 bp, Homo sapien
catagaattttagggccgagtggaa

SEQ ID NO: 3435584 - DNA, 25 bp, Homo sapien
agacaagctagaccctccatcgatg

SEQ ID NO: 3435585 - DNA, 25 bp, Homo sapien
taagcagagcttcttaacatcctgg

SEQ ID NO: 3435586 - DNA, 25 bp, Homo sapien
tgtctcaggtaaaaaaggcaggacc

SEQ ID NO: 3435587 - DNA, 25 bp, Homo sapien
agtgtcatgagaaggctgaatggca

SEQ ID NO: 3435588 - DNA, 25 bp, Homo sapien
catagtttatgagagctttggcctc

SEQ ID NO: 3435589 - DNA, 25 bp, Homo sapien
caaaaagtgtcctaccagccagaaa

SEQ ID NO: 3435590 - DNA, 25 bp, Homo sapien
gcgtttggaaattaagtgatactct

SEQ ID NO: 3435591 - DNA, 25 bp, Homo sapien
ccatgttaagccataaagccagcct

SEQ ID NO: 3435592 - DNA, 25 bp, Homo sapien
aatcttgtcctctgataacaacaga

SEQ ID NO: 3435593 - DNA, 25 bp, Homo sapien
aggacaactataaaaaaactcagcg

SEQ ID NO: 3435594 - DNA, 25 bp, Homo sapien
cactgctaaaaaaggaggactctgt

SEQ ID NO: 3435595 - DNA, 25 bp, Homo sapien
caaggccttgacttactcactgcta

SEQ ID NO: 3435596 - DNA, 25 bp, Homo sapien
gctagcatcgcagacatatcacaaa

SEQ ID NO: 3435597 - DNA, 25 bp, Homo sapien
tagctgcggttgtcctccaaaaccg

SEQ ID NO: 3435598 - DNA, 25 bp, Homo sapien
tcccaggggcaatattaaagtttgc

SEQ ID NO: 3435599 - DNA, 25 bp, Homo sapien
gcaatattaaagtttgcctcagtcc

SEQ ID NO: 3435600 - DNA, 25 bp, Homo sapien
ttaaagtttgcctcagtccagggcg

SEQ ID NO: 3435601 - DNA, 25 bp, Homo sapien
gagggggccagcgtgtgtctgatcc

SEQ ID NO: 3435602 - DNA, 25 bp, Homo sapien
tgctgccccaaacagggaggccagc

SEQ ID NO: 3435603 - DNA, 25 bp, Homo sapien
gctgccccaaacagggaggccagca

SEQ ID NO: 3435604 - DNA, 25 bp, Homo sapien
ctgctgccccaaacagggaggccag

SEQ ID NO: 3435605 - DNA, 25 bp, Homo sapien
ctgccccaaacagggaggccagcat

SEQ ID NO: 3435606 - DNA, 25 bp, Homo sapien
gctgggtcacggaataaacaatgca

SEQ ID NO: 3435607 - DNA, 25 bp, Homo sapien
cattcagcgacacttctatgtgcca

SEQ ID NO: 3435608 - DNA, 25 bp, Homo sapien
atgcaaacaagtccctgctctactc

SEQ ID NO: 3435609 - DNA, 25 bp, Homo sapien
gccagaaaggcaaaccgatgcatac

SEQ ID NO: 3435610 - DNA, 25 bp, Homo sapien
caggtgtgaggctgatagtctgcca

SEQ ID NO: 3435611 - DNA, 25 bp, Homo sapien
agaaatctgacagccacagaaaaat

SEQ ID NO: 3435612 - DNA, 25 bp, Homo sapien
ccagggcacagacccgcaggtgtga

SEQ ID NO: 3435613 - DNA, 25 bp, Homo sapien
gatagtctgccaggaagtcagaaat

SEQ ID NO: 3435614 - DNA, 25 bp, Homo sapien
caatgaagagtttacccacaggtca

SEQ ID NO: 3435615 - DNA, 25 bp, Homo sapien
cacacagtaggtatgcaaagtatcc

SEQ ID NO: 3435616 - DNA, 25 bp, Homo sapien
taatgtcctttgtcggtgtccacag

SEQ ID NO: 3435617 - DNA, 25 bp, Homo sapien
tagcacccgcctagtggaggacaat

SEQ ID NO: 3435618 - DNA, 25 bp, Homo sapien
tttgatcgctcattttcatgctgaa

SEQ ID NO: 3435619 - DNA, 25 bp, Homo sapien
ctccaggtgattttgtcataatttg

SEQ ID NO: 3435620 - DNA, 25 bp, Homo sapien
gattttgtcataatttgatcgctca

SEQ ID NO: 3435621 - DNA, 25 bp, Homo sapien
ctgaaaatgacgtgagccacagaga

SEQ ID NO: 3435622 - DNA, 25 bp, Homo sapien
ctgtgtgtgacaaccattggctgta

SEQ ID NO: 3435623 - DNA, 25 bp, Homo sapien
gtctctgtactgcagccgagctgct

SEQ ID NO: 3435624 - DNA, 25 bp, Homo sapien
tggctgtacactccgggcctcacgt

SEQ ID NO: 3435625 - DNA, 25 bp, Homo sapien
tcattgtgccttcacgtatgcatca

SEQ ID NO: 3435626 - DNA, 25 bp, Homo sapien
gtgtcatctttgcgcaggggccata

SEQ ID NO: 3435627 - DNA, 25 bp, Homo sapien
tttagtatacgtgctgccgaagcga

SEQ ID NO: 3435628 - DNA, 25 bp, Homo sapien
ctaatcttctctgtatcattccaat

SEQ ID NO: 3435629 - DNA, 25 bp, Homo sapien
tatacgtgctgccgaagcgagcact

SEQ ID NO: 3435630 - DNA, 25 bp, Homo sapien
ccgcgctcctgggggagtctctccc

SEQ ID NO: 3435631 - DNA, 25 bp, Homo sapien
tcctccggggagcttgcctggttcc

SEQ ID NO: 3435632 - DNA, 25 bp, Homo sapien
tgcctggttcctgccgacccgcccc

SEQ ID NO: 3435633 - DNA, 25 bp, Homo sapien
gcgctcctgggggagtctctcccgg

SEQ ID NO: 3435634 - DNA, 25 bp, Homo sapien
gccggcccgcgcctggtcaggaact

SEQ ID NO: 3435635 - DNA, 25 bp, Homo sapien
ctgcgggcggagaccgcagcgttcg

SEQ ID NO: 3435636 - DNA, 25 bp, Homo sapien
cgccacccggctgctggtcccgcgg

SEQ ID NO: 3435637 - DNA, 25 bp, Homo sapien
gggcgcctgagcctctcggggccga

SEQ ID NO: 3435638 - DNA, 25 bp, Homo sapien
ctgggaccgccgggcggcgcgccct

SEQ ID NO: 3435639 - DNA, 25 bp, Homo sapien
gcggcgcgccctccccatccacggc

SEQ ID NO: 3435640 - DNA, 25 bp, Homo sapien
gcgcgccctccccatccacggcccc

SEQ ID NO: 3435641 - DNA, 25 bp, Homo sapien
gggcggcgcgccctccccatccacg

SEQ ID NO: 3435642 - DNA, 25 bp, Homo sapien
ccctcggacggcaggtagccgatgt

SEQ ID NO: 3435643 - DNA, 25 bp, Homo sapien
cggccgggagcgtcgagtacttctc

SEQ ID NO: 3435644 - DNA, 25 bp, Homo sapien
gtcgagtacttctcgttgaccctca

SEQ ID NO: 3435645 - DNA, 25 bp, Homo sapien
cctcgatggcgcagatgttgatgat

SEQ ID NO: 3435646 - DNA, 25 bp, Homo sapien
agggccccgctgtgctggtgacctt

SEQ ID NO: 3435647 - DNA, 25 bp, Homo sapien
gctgaaactaagcaactgacttctc

SEQ ID NO: 3435648 - DNA, 25 bp, Homo sapien
gccggcaggaggctgaaactaagca

SEQ ID NO: 3435649 - DNA, 25 bp, Homo sapien
gacttctctctacagtaacacaggg

SEQ ID NO: 3435650 - DNA, 25 bp, Homo sapien
tgatgtcaagggtctagactcctct

SEQ ID NO: 3435651 - DNA, 25 bp, Homo sapien
tgtcaagggtctagactcctctacc

SEQ ID NO: 3435652 - DNA, 25 bp, Homo sapien
gatgtcaagggtctagactcctcta

SEQ ID NO: 3435653 - DNA, 25 bp, Homo sapien
caagggtctagactcctctacccct

SEQ ID NO: 3435654 - DNA, 25 bp, Homo sapien
cccgagggcctcttgtgatggtaca

SEQ ID NO: 3435655 - DNA, 25 bp, Homo sapien
tcagggtccacagataaggagttca

SEQ ID NO: 3435656 - DNA, 25 bp, Homo sapien
catacttgcactcggcatcagggtc

SEQ ID NO: 3435657 - DNA, 25 bp, Homo sapien
tacaccaggatgtagtccaccttgc

SEQ ID NO: 3435658 - DNA, 25 bp, Homo sapien
gtactcctccctgcggaagcgcttg

SEQ ID NO: 3435659 - DNA, 25 bp, Homo sapien
gaggttgccctcgtactcctccctg

SEQ ID NO: 3435660 - DNA, 25 bp, Homo sapien
gcttgtcatcctcgtggtagtccat

SEQ ID NO: 3435661 - DNA, 25 bp, Homo sapien
tgcggaagcgcttgtcatcctcgtg

SEQ ID NO: 3435662 - DNA, 25 bp, Homo sapien
caaacagcgcgcagtgagatagtta

SEQ ID NO: 3435663 - DNA, 25 bp, Homo sapien
ccccacaaacagcgcgcagtgagat

SEQ ID NO: 3435664 - DNA, 25 bp, Homo sapien
aaacagcgcgcagtgagatagttac

SEQ ID NO: 3435665 - DNA, 25 bp, Homo sapien
cacaaacagcgcgcagtgagatagt

SEQ ID NO: 3435666 - DNA, 25 bp, Homo sapien
catgaagatggcgaacagatgctgc

SEQ ID NO: 3435667 - DNA, 25 bp, Homo sapien
tgaagatggcgaacagatgctgctg

SEQ ID NO: 3435668 - DNA, 25 bp, Homo sapien
aaagcagcatccatgaagatggcga

SEQ ID NO: 3435669 - DNA, 25 bp, Homo sapien
ttcaaaagcagcatccatgaagatg

SEQ ID NO: 3435670 - DNA, 25 bp, Homo sapien
tatgcatccagccgtgggctttgtc

SEQ ID NO: 3435671 - DNA, 25 bp, Homo sapien
ctatgcatccagccgtgggctttgt

SEQ ID NO: 3435672 - DNA, 25 bp, Homo sapien
tggtgaggagtgggctctgccccag

SEQ ID NO: 3435673 - DNA, 25 bp, Homo sapien
agtggtgaggagtgggctctgcccc

SEQ ID NO: 3435674 - DNA, 25 bp, Homo sapien
gggagtggtgaggagtgggctctgc

SEQ ID NO: 3435675 - DNA, 25 bp, Homo sapien
ctgggagtggtgaggagtgggctct

SEQ ID NO: 3435676 - DNA, 25 bp, Homo sapien
gggtctccacatgcagggagaccct

SEQ ID NO: 3435677 - DNA, 25 bp, Homo sapien
ggcggggtctccacatgcagggaga

SEQ ID NO: 3435678 - DNA, 25 bp, Homo sapien
cggggtctccacatgcagggagacc

SEQ ID NO: 3435679 - DNA, 25 bp, Homo sapien
tctccacatgcagggagacccttct

SEQ ID NO: 3435680 - DNA, 25 bp, Homo sapien
aaagtcatccaatctgtttcgcgcc

SEQ ID NO: 3435681 - DNA, 25 bp, Homo sapien
gcttcatgaatagactagaggttcc

SEQ ID NO: 3435682 - DNA, 25 bp, Homo sapien
tcagctcaggatcgaaattctgccc

SEQ ID NO: 3435683 - DNA, 25 bp, Homo sapien
gaggttcctaacatcccatcgtgca

SEQ ID NO: 3435684 - DNA, 25 bp, Homo sapien
ggccgcttcataccctggagggcat

SEQ ID NO: 3435685 - DNA, 25 bp, Homo sapien
tctggccctcaatcatggcgtcggg

SEQ ID NO: 3435686 - DNA, 25 bp, Homo sapien
tcacaggccgcttcataccctggag

SEQ ID NO: 3435687 - DNA, 25 bp, Homo sapien
ctatggatgtctggccctcaatcat

SEQ ID NO: 3435688 - DNA, 25 bp, Homo sapien
cgagagccacggccgtgggggtggt

SEQ ID NO: 3435689 - DNA, 25 bp, Homo sapien
tgtcgagagccacggccgtgggggt

SEQ ID NO: 3435690 - DNA, 25 bp, Homo sapien
tttgtcgagagccacggccgtgggg

SEQ ID NO: 3435691 - DNA, 25 bp, Homo sapien
tcgagagccacggccgtgggggtgg

SEQ ID NO: 3435692 - DNA, 25 bp, Homo sapien
cgttccagggggcatggattttcac

SEQ ID NO: 3435693 - DNA, 25 bp, Homo sapien
ccagggggcatggattttcacaaac

SEQ ID NO: 3435694 - DNA, 25 bp, Homo sapien
cacagcacgttccagggggcatgga

SEQ ID NO: 3435695 - DNA, 25 bp, Homo sapien
cagcacgttccagggggcatggatt

SEQ ID NO: 3435696 - DNA, 25 bp, Homo sapien
cccgggagaagggataggagagtct

SEQ ID NO: 3435697 - DNA, 25 bp, Homo sapien
ttcaggaggccacgggtctcattaa

SEQ ID NO: 3435698 - DNA, 25 bp, Homo sapien
cgggagaagggataggagagtctct

SEQ ID NO: 3435699 - DNA, 25 bp, Homo sapien
ggagaagggataggagagtctcttc

SEQ ID NO: 3435700 - DNA, 25 bp, Homo sapien
tggaaatatcgggaaggaaacaaga

SEQ ID NO: 3435701 - DNA, 25 bp, Homo sapien
aacaagacacagttcaccagagctg

SEQ ID NO: 3435702 - DNA, 25 bp, Homo sapien
gaaacaagacacagttcaccagagc

SEQ ID NO: 3435703 - DNA, 25 bp, Homo sapien
tgtggaaatatcgggaaggaaacaa

SEQ ID NO: 3435704 - DNA, 25 bp, Homo sapien
tttgctgtcgaaaaaggaatcctta

SEQ ID NO: 3435705 - DNA, 25 bp, Homo sapien
atcgtgctccgggttttgctgtcga

SEQ ID NO: 3435706 - DNA, 25 bp, Homo sapien
ggaatccttatcagacaagtcaaat

SEQ ID NO: 3435707 - DNA, 25 bp, Homo sapien
aaaggaatccttatcagacaagtca

SEQ ID NO: 3435708 - DNA, 25 bp, Homo sapien
gacctccttggtgctatcttccaag

SEQ ID NO: 3435709 - DNA, 25 bp, Homo sapien
tgagcagttacttaaggcaccttcc

SEQ ID NO: 3435710 - DNA, 25 bp, Homo sapien
cgagcagaaacagtctgctgtggct

SEQ ID NO: 3435711 - DNA, 25 bp, Homo sapien
gaggacctggtcacacgttacgcat

SEQ ID NO: 3435712 - DNA, 25 bp, Homo sapien
tacacgtcgttctcttcaagatctc

SEQ ID NO: 3435713 - DNA, 25 bp, Homo sapien
gcctttgtacacgtcgttctcttca

SEQ ID NO: 3435714 - DNA, 25 bp, Homo sapien
gctgtacttggcctttgtacacgtc

SEQ ID NO: 3435715 - DNA, 25 bp, Homo sapien
tcgttctcttcaagatctcatagac

SEQ ID NO: 3435716 - DNA, 25 bp, Homo sapien
gctgtgcttttaagggtccggaaca

SEQ ID NO: 3435717 - DNA, 25 bp, Homo sapien
atggagatgccgccccggctggaac

SEQ ID NO: 3435718 - DNA, 25 bp, Homo sapien
ccactggaccgtgagggtcaagaga

SEQ ID NO: 3435719 - DNA, 25 bp, Homo sapien
attacttcccactggaccgtgaggg

SEQ ID NO: 3435720 - DNA, 25 bp, Homo sapien
cacatttccgccttttacttagaag

SEQ ID NO: 3435721 - DNA, 25 bp, Homo sapien
catacttcccacatttccgcctttt

SEQ ID NO: 3435722 - DNA, 25 bp, Homo sapien
gtatgcagccgcgtacacaccattg

SEQ ID NO: 3435723 - DNA, 25 bp, Homo sapien
tgcagtgggtatgcagccgcgtaca

SEQ ID NO: 3435724 - DNA, 25 bp, Homo sapien
atgcagccgcgtacacaccattggc

SEQ ID NO: 3435725 - DNA, 25 bp, Homo sapien
agtgggtatgcagccgcgtacacac

SEQ ID NO: 3435726 - DNA, 25 bp, Homo sapien
taaatcgtgtgtcaaggttacttac

SEQ ID NO: 3435727 - DNA, 25 bp, Homo sapien
caaatgacgcagagataaatcgtgt

SEQ ID NO: 3435728 - DNA, 25 bp, Homo sapien
agggaaggcctgtgtacagttgaca

SEQ ID NO: 3435729 - DNA, 25 bp, Homo sapien
catttacagcgagagccaagcagga

SEQ ID NO: 3435730 - DNA, 25 bp, Homo sapien
gacccgctggctacgaggttcagag

SEQ ID NO: 3435731 - DNA, 25 bp, Homo sapien
gatggccctgtgtgtaacttcttgg

SEQ ID NO: 3435732 - DNA, 25 bp, Homo sapien
gaaagacattctgtggacccgctgg

SEQ ID NO: 3435733 - DNA, 25 bp, Homo sapien
gaaatagacacgtacagagccctgg

SEQ ID NO: 3435734 - DNA, 25 bp, Homo sapien
tcgacgttttcaccgttgtagtctc

SEQ ID NO: 3435735 - DNA, 25 bp, Homo sapien
ttctgtcgttgaactcgacgttttc

SEQ ID NO: 3435736 - DNA, 25 bp, Homo sapien
tgtcgttgaactcgacgttttcacc

SEQ ID NO: 3435737 - DNA, 25 bp, Homo sapien
tgaactcgacgttttcaccgttgta

SEQ ID NO: 3435738 - DNA, 25 bp, Homo sapien
caaactcagagtcaaggtcatggct

SEQ ID NO: 3435739 - DNA, 25 bp, Homo sapien
tggagcctccataactcctccagtg

SEQ ID NO: 3435740 - DNA, 25 bp, Homo sapien
ttggagcctccataactcctccagt

SEQ ID NO: 3435741 - DNA, 25 bp, Homo sapien
ctcccaaactcagagtcaaggtcat

SEQ ID NO: 3435742 - DNA, 25 bp, Homo sapien
atagaaaactccatagcgtgcccac

SEQ ID NO: 3435743 - DNA, 25 bp, Homo sapien
tgggctggtacttatagaaaactcc

SEQ ID NO: 3435744 - DNA, 25 bp, Homo sapien
tagcgtgcccactcttcgtacagga

SEQ ID NO: 3435745 - DNA, 25 bp, Homo sapien
caggtcgatgggctggtacttatag

SEQ ID NO: 3435746 - DNA, 25 bp, Homo sapien
gttttcatccatggtggcgcatccg

SEQ ID NO: 3435747 - DNA, 25 bp, Homo sapien
ggatgagcatctgggtgtacacgcc

SEQ ID NO: 3435748 - DNA, 25 bp, Homo sapien
gacaatgattcccacgatggaggca

SEQ ID NO: 3435749 - DNA, 25 bp, Homo sapien
gccaggcgaagtacaggccgatctt

SEQ ID NO: 3435750 - DNA, 25 bp, Homo sapien
gcattttgtgatccgtgtggcctta

SEQ ID NO: 3435751 - DNA, 25 bp, Homo sapien
gaagaattcattgcagccacagcct

SEQ ID NO: 3435752 - DNA, 25 bp, Homo sapien
taggcacacacagccgttgggagaa

SEQ ID NO: 3435753 - DNA, 25 bp, Homo sapien
gaacctgcactctacggtcagctag

SEQ ID NO: 3435754 - DNA, 25 bp, Homo sapien
agggatgatgggtcccgctcagtgc

SEQ ID NO: 3435755 - DNA, 25 bp, Homo sapien
cctgtaggctcactcgggaagccgg

SEQ ID NO: 3435756 - DNA, 25 bp, Homo sapien
tgtaggctcactcgggaagccgggg

SEQ ID NO: 3435757 - DNA, 25 bp, Homo sapien
ctgtaggctcactcgggaagccggg

SEQ ID NO: 3435758 - DNA, 25 bp, Homo sapien
ctgcaggtcttgtcgcaaagcgggc

SEQ ID NO: 3435759 - DNA, 25 bp, Homo sapien
ttgtcgaagaggtggctggcgcggg

SEQ ID NO: 3435760 - DNA, 25 bp, Homo sapien
tcgcaaagcgggcacatggtgatat

SEQ ID NO: 3435761 - DNA, 25 bp, Homo sapien
atggtgatattgtgtctctggtcac

SEQ ID NO: 3435762 - DNA, 25 bp, Homo sapien
cactgcccaaaaacccagtgctctg

SEQ ID NO: 3435763 - DNA, 25 bp, Homo sapien
tgcccaaaaacccagtgctctggag

SEQ ID NO: 3435764 - DNA, 25 bp, Homo sapien
aaaaacccagtgctctggagccctg

SEQ ID NO: 3435765 - DNA, 25 bp, Homo sapien
caaaaacccagtgctctggagccct

SEQ ID NO: 3435766 - DNA, 25 bp, Homo sapien
ctcccaagccccgaaagctggagtt

SEQ ID NO: 3435767 - DNA, 25 bp, Homo sapien
aagccccgaaagctggagttgggag

SEQ ID NO: 3435768 - DNA, 25 bp, Homo sapien
ccaagccccgaaagctggagttggg

SEQ ID NO: 3435769 - DNA, 25 bp, Homo sapien
gctggagttgggagtcgggtaggac

SEQ ID NO: 3435770 - DNA, 25 bp, Homo sapien
gcggcctctgtcccgggtctccgga

SEQ ID NO: 3435771 - DNA, 25 bp, Homo sapien
taggaatgagatacagtgttggtga

SEQ ID NO: 3435772 - DNA, 25 bp, Homo sapien
agccgaggcaagaggacccggccca

SEQ ID NO: 3435773 - DNA, 25 bp, Homo sapien
atgctcagagctggcggcctctgtc

SEQ ID NO: 3435774 - DNA, 25 bp, Homo sapien
tgttgttgcaggcacctgtccgtgg

SEQ ID NO: 3435775 - DNA, 25 bp, Homo sapien
caatgtttgcttagtgcagactcca

SEQ ID NO: 3435776 - DNA, 25 bp, Homo sapien
tctggtcctgcacgagagtgctcgg

SEQ ID NO: 3435777 - DNA, 25 bp, Homo sapien
agttcccgagaagtgcaatgtttgc

SEQ ID NO: 3435778 - DNA, 25 bp, Homo sapien
aggggtcgcgtcttccaagcctctg

SEQ ID NO: 3435779 - DNA, 25 bp, Homo sapien
ggggtcgcgtcttccaagcctctgc

SEQ ID NO: 3435780 - DNA, 25 bp, Homo sapien
gcattgtgagcagtgtgaagaacca

SEQ ID NO: 3435781 - DNA, 25 bp, Homo sapien
gactggagcctagaatgtaacctgg

SEQ ID NO: 3435782 - DNA, 25 bp, Homo sapien
gaatgtgaaggctcgtgctgcgcct

SEQ ID NO: 3435783 - DNA, 25 bp, Homo sapien
gaagcaaaggccctgtcctggaggt

SEQ ID NO: 3435784 - DNA, 25 bp, Homo sapien
gatactggaccaactctctgtgcag

SEQ ID NO: 3435785 - DNA, 25 bp, Homo sapien
gaggattcccgttcatagatttaca

SEQ ID NO: 3435786 - DNA, 25 bp, Homo sapien
caacagtcaccagttcacgaggagg

SEQ ID NO: 3435787 - DNA, 25 bp, Homo sapien
gaggaggtatccgtgcactagcatt

SEQ ID NO: 3435788 - DNA, 25 bp, Homo sapien
ctccacccactgcaatctcgcctcc

SEQ ID NO: 3435789 - DNA, 25 bp, Homo sapien
tgcgggcaggggcaaaaccagagtc

SEQ ID NO: 3435790 - DNA, 25 bp, Homo sapien
ctgcgggcaggggcaaaaccagagt

SEQ ID NO: 3435791 - DNA, 25 bp, Homo sapien
gcgggcaggggcaaaaccagagtct

SEQ ID NO: 3435792 - DNA, 25 bp, Homo sapien
agcccgtgaggtcccagcggtagtt

SEQ ID NO: 3435793 - DNA, 25 bp, Homo sapien
gtttccgcttccagtgctccatgaa

SEQ ID NO: 3435794 - DNA, 25 bp, Homo sapien
cagcggtagttgagtcgcatctgtt

SEQ ID NO: 3435795 - DNA, 25 bp, Homo sapien
caaagcccgtgaggtcccagcggta

SEQ ID NO: 3435796 - DNA, 25 bp, Homo sapien
ctcgggcctccgtgtaagtcccaag

SEQ ID NO: 3435797 - DNA, 25 bp, Homo sapien
tttggccatggagggtgttcggaac

SEQ ID NO: 3435798 - DNA, 25 bp, Homo sapien
tgttcggaacgccagggtgttgagt

SEQ ID NO: 3435799 - DNA, 25 bp, Homo sapien
gtgttgagtggcgaggcaggcaggg

SEQ ID NO: 3435800 - DNA, 25 bp, Homo sapien
acacttcagcagacagggagtggtc

SEQ ID NO: 3435801 - DNA, 25 bp, Homo sapien
cacggccacttttggagacccatgg

SEQ ID NO: 3435802 - DNA, 25 bp, Homo sapien
tgtgcctgagaccacgctggtggct

SEQ ID NO: 3435803 - DNA, 25 bp, Homo sapien
ccccagacgcgatgaggtcagtgtg

SEQ ID NO: 3435804 - DNA, 25 bp, Homo sapien
ttgaaacggcaagggaagagaccac

SEQ ID NO: 3435805 - DNA, 25 bp, Homo sapien
gctgtggacaggttgcattgatctc

SEQ ID NO: 3435806 - DNA, 25 bp, Homo sapien
tgtgtgtgcccagtgacttcggtta

SEQ ID NO: 3435807 - DNA, 25 bp, Homo sapien
gcagataaaggtgtcgcccagtggc

SEQ ID NO: 3435808 - DNA, 25 bp, Homo sapien
tcctttaaggtttactgctgcttga

SEQ ID NO: 3435809 - DNA, 25 bp, Homo sapien
gactgtggcctttgtagctgtggcc

SEQ ID NO: 3435810 - DNA, 25 bp, Homo sapien
tgaaggtaaatggatacaggtgagc

SEQ ID NO: 3435811 - DNA, 25 bp, Homo sapien
acaactttcttaagaattaggatga

SEQ ID NO: 3435812 - DNA, 25 bp, Homo sapien
cttcgtattcagctctaggatgatc

SEQ ID NO: 3435813 - DNA, 25 bp, Homo sapien
caagactctggcttcgtattcagct

SEQ ID NO: 3435814 - DNA, 25 bp, Homo sapien
gactctggcttcgtattcagctcta

SEQ ID NO: 3435815 - DNA, 25 bp, Homo sapien
tctggcttcgtattcagctctagga

SEQ ID NO: 3435816 - DNA, 25 bp, Homo sapien
tgactcctctggaatatgccggcgc

SEQ ID NO: 3435817 - DNA, 25 bp, Homo sapien
catggctgtcttaaccctctgcttc

SEQ ID NO: 3435818 - DNA, 25 bp, Homo sapien
cccgccatggctgtcttaaccctct

SEQ ID NO: 3435819 - DNA, 25 bp, Homo sapien
actcctctggaatatgccggcgctt

SEQ ID NO: 3435820 - DNA, 25 bp, Homo sapien
cctgcaaacagtcaagacgcgcgct

SEQ ID NO: 3435821 - DNA, 25 bp, Homo sapien
acgcgcgctgcccgcaaaatagaaa

SEQ ID NO: 3435822 - DNA, 25 bp, Homo sapien
tgcaaacagtcaagacgcgcgctgc

SEQ ID NO: 3435823 - DNA, 25 bp, Homo sapien
cgcgctgcccgcaaaatagaaaagt

SEQ ID NO: 3435824 - DNA, 25 bp, Homo sapien
agtgaggtaggctgggaaccgatct

SEQ ID NO: 3435825 - DNA, 25 bp, Homo sapien
caagttagtgaggtaggctgggaac

SEQ ID NO: 3435826 - DNA, 25 bp, Homo sapien
ggtaggctgggaaccgatctctcca

SEQ ID NO: 3435827 - DNA, 25 bp, Homo sapien
gagaccaagttagtgaggtaggctg

SEQ ID NO: 3435828 - DNA, 25 bp, Homo sapien
tgatatctttgaatcccaggcttga

SEQ ID NO: 3435829 - DNA, 25 bp, Homo sapien
ccaggcttgaattactagatactca

SEQ ID NO: 3435830 - DNA, 25 bp, Homo sapien
tgaatcccaggcttgaattactaga

SEQ ID NO: 3435831 - DNA, 25 bp, Homo sapien
taattgtgtctctcaaaatgaaagc

SEQ ID NO: 3435832 - DNA, 25 bp, Homo sapien
agaacattccataaaacttgggttg

SEQ ID NO: 3435833 - DNA, 25 bp, Homo sapien
gaccagaacattccataaaacttgg

SEQ ID NO: 3435834 - DNA, 25 bp, Homo sapien
cgtgggaccagaacattccataaaa

SEQ ID NO: 3435835 - DNA, 25 bp, Homo sapien
cattccataaaacttgggttggtgg

SEQ ID NO: 3435836 - DNA, 25 bp, Homo sapien
cagccatacacctcgtccaggagga

SEQ ID NO: 3435837 - DNA, 25 bp, Homo sapien
tcttggtgagccatcgggctatgca

SEQ ID NO: 3435838 - DNA, 25 bp, Homo sapien
tctgtagatgatgacgccgaggacg

SEQ ID NO: 3435839 - DNA, 25 bp, Homo sapien
actgtgacccggatgttggaccgca

SEQ ID NO: 3435840 - DNA, 25 bp, Homo sapien
aagatgggggtgtaggaattcacaa

SEQ ID NO: 3435841 - DNA, 25 bp, Homo sapien
ggtgtaggaattcacaaacttcagc

SEQ ID NO: 3435842 - DNA, 25 bp, Homo sapien
tgaagaacgccacgtaaaagatggg

SEQ ID NO: 3435843 - DNA, 25 bp, Homo sapien
tcaaagcttttctccgtctttggga

SEQ ID NO: 3435844 - DNA, 25 bp, Homo sapien
ctgcgggtgccacggtgtctgccct

SEQ ID NO: 3435845 - DNA, 25 bp, Homo sapien
tccctgaccctctttggctgcgggt

SEQ ID NO: 3435846 - DNA, 25 bp, Homo sapien
ctgaccctctttggctgcgggtgcc

SEQ ID NO: 3435847 - DNA, 25 bp, Homo sapien
actgcctgggttccctgccacctgg

SEQ ID NO: 3435848 - DNA, 25 bp, Homo sapien
aaatgtacacgtagtcgcccgggcg

SEQ ID NO: 3435849 - DNA, 25 bp, Homo sapien
cggaaaatgtacacgtagtcgcccg

SEQ ID NO: 3435850 - DNA, 25 bp, Homo sapien
gaacggaaaatgtacacgtagtcgc

SEQ ID NO: 3435851 - DNA, 25 bp, Homo sapien
tgtacacgtagtcgcccgggcgtcc

SEQ ID NO: 3435852 - DNA, 25 bp, Homo sapien
tagacaaatcgtaagcaagacagaa

SEQ ID NO: 3435853 - DNA, 25 bp, Homo sapien
catggtgtagacaaatcgtaagcaa

SEQ ID NO: 3435854 - DNA, 25 bp, Homo sapien
tgcatggtgtagacaaatcgtaagc

SEQ ID NO: 3435855 - DNA, 25 bp, Homo sapien
ggtgtagacaaatcgtaagcaagac

SEQ ID NO: 3435856 - DNA, 25 bp, Homo sapien
ccttctaggtgattctatatgaaca

SEQ ID NO: 3435857 - DNA, 25 bp, Homo sapien
gaacacaccagataagattaaagcc

SEQ ID NO: 3435858 - DNA, 25 bp, Homo sapien
ctttcattaactctacagcgacttt

SEQ ID NO: 3435859 - DNA, 25 bp, Homo sapien
tacagcgactttatccttctaggtg

SEQ ID NO: 3435860 - DNA, 25 bp, Homo sapien
gatgccgatctcgaacaggttgttc

SEQ ID NO: 3435861 - DNA, 25 bp, Homo sapien
ctgagctggatgcatagctccatca

SEQ ID NO: 3435862 - DNA, 25 bp, Homo sapien
gatgcatagctccatcaggcagccc

SEQ ID NO: 3435863 - DNA, 25 bp, Homo sapien
aggttgttctggatcagctgtttcc

SEQ ID NO: 3435864 - DNA, 25 bp, Homo sapien
cagggggcaagtgtcatggctttgc

SEQ ID NO: 3435865 - DNA, 25 bp, Homo sapien
ttgtcgatgatctcttctgcccttt

SEQ ID NO: 3435866 - DNA, 25 bp, Homo sapien
tgccatcatttctttgtcgatgatc

SEQ ID NO: 3435867 - DNA, 25 bp, Homo sapien
catttctttgtcgatgatctcttct

SEQ ID NO: 3435868 - DNA, 25 bp, Homo sapien
tgtaatccacctcgtaccgctgttt

SEQ ID NO: 3435869 - DNA, 25 bp, Homo sapien
tcacacactcctcgtggtcaggggg

SEQ ID NO: 3435870 - DNA, 25 bp, Homo sapien
ttccatgtactctggggtgaggccc

SEQ ID NO: 3435871 - DNA, 25 bp, Homo sapien
cccgcgaagggctccaggttgtaat

SEQ ID NO: 3435872 - DNA, 25 bp, Homo sapien
caaacagggtgacgaagccaaactg

SEQ ID NO: 3435873 - DNA, 25 bp, Homo sapien
taccggccttcggagctcagtgaca

SEQ ID NO: 3435874 - DNA, 25 bp, Homo sapien
tgttgttcagcagcgcaaacagtgg

SEQ ID NO: 3435875 - DNA, 25 bp, Homo sapien
tgacaaactttttggcgtccaggcg

SEQ ID NO: 3435876 - DNA, 25 bp, Homo sapien
cagtgcaaatgtgaagctgccgggt

SEQ ID NO: 3435877 - DNA, 25 bp, Homo sapien
cctttcaaagccagggccttacgca

SEQ ID NO: 3435878 - DNA, 25 bp, Homo sapien
tgggatgtccctccctacaaagcac

SEQ ID NO: 3435879 - DNA, 25 bp, Homo sapien
tcactgctatctgatggtctttgac

SEQ ID NO: 3435880 - DNA, 25 bp, Homo sapien
tccagaatttccgaggactgcaggg

SEQ ID NO: 3435881 - DNA, 25 bp, Homo sapien
caaagcagcgctatgctgaggcaca

SEQ ID NO: 3435882 - DNA, 25 bp, Homo sapien
ggcaaaccctctacgcatgcaggag

SEQ ID NO: 3435883 - DNA, 25 bp, Homo sapien
tatacagggtgaggttttcagaggc

SEQ ID NO: 3435884 - DNA, 25 bp, Homo sapien
gatggagcaagtggacatcctacct

SEQ ID NO: 3435885 - DNA, 25 bp, Homo sapien
ctacctgtgcaggaggctacaggga

SEQ ID NO: 3435886 - DNA, 25 bp, Homo sapien
agcgcttctgccctagtagctgagg

SEQ ID NO: 3435887 - DNA, 25 bp, Homo sapien
ggagagctgtacatagcgcttctgc

SEQ ID NO: 3435888 - DNA, 25 bp, Homo sapien
atgatgacagcaagcttcccaatgc

SEQ ID NO: 3435889 - DNA, 25 bp, Homo sapien
gatgacagcaagcttcccaatgcct

SEQ ID NO: 3435890 - DNA, 25 bp, Homo sapien
atgacagcaagcttcccaatgcctc

SEQ ID NO: 3435891 - DNA, 25 bp, Homo sapien
tgatgacagcaagcttcccaatgcc

SEQ ID NO: 3435892 - DNA, 25 bp, Homo sapien
tgccaaggtccctgatgtcacttac

SEQ ID NO: 3435893 - DNA, 25 bp, Homo sapien
gttcagccgggacttccattctgcc

SEQ ID NO: 3435894 - DNA, 25 bp, Homo sapien
gacttccattctgccaaggtccctg

SEQ ID NO: 3435895 - DNA, 25 bp, Homo sapien
cggccacctggcagttcagccggga

SEQ ID NO: 3435896 - DNA, 25 bp, Homo sapien
gaatccgggcagcctggggctgcac

SEQ ID NO: 3435897 - DNA, 25 bp, Homo sapien
gagaatccgggcagcctggggctgc

SEQ ID NO: 3435898 - DNA, 25 bp, Homo sapien
agagaatccgggcagcctggggctg

SEQ ID NO: 3435899 - DNA, 25 bp, Homo sapien
ctagagaatccgggcagcctggggc

SEQ ID NO: 3435900 - DNA, 25 bp, Homo sapien
gtaagatggggccatggcagtcctc

SEQ ID NO: 3435901 - DNA, 25 bp, Homo sapien
agtcctcgccttcaagggctgtctg

SEQ ID NO: 3435902 - DNA, 25 bp, Homo sapien
tctgcagaccagtgggctagtgtgt

SEQ ID NO: 3435903 - DNA, 25 bp, Homo sapien
tgtgcctctggtgtcttacctgtaa

SEQ ID NO: 3435904 - DNA, 25 bp, Homo sapien
acatgtagaggtacaccaggcgcgg

SEQ ID NO: 3435905 - DNA, 25 bp, Homo sapien
ggtcccgttcttactgtacatgtag

SEQ ID NO: 3435906 - DNA, 25 bp, Homo sapien
tgaagtcagacgtgaaggagatcac

SEQ ID NO: 3435907 - DNA, 25 bp, Homo sapien
ttgacgaagccgtgcatggtcccgt

SEQ ID NO: 3435908 - DNA, 25 bp, Homo sapien
cgatgacaaacgccagccgggctgc

SEQ ID NO: 3435909 - DNA, 25 bp, Homo sapien
tgccaggacggcccagaagtccttg

SEQ ID NO: 3435910 - DNA, 25 bp, Homo sapien
cggcggctctcggtagtctttatac

SEQ ID NO: 3435911 - DNA, 25 bp, Homo sapien
ggagatgtcgtacttgttttccgac

SEQ ID NO: 3435912 - DNA, 25 bp, Homo sapien
tcatccggcccctctattggccttc

SEQ ID NO: 3435913 - DNA, 25 bp, Homo sapien
ggtgctcatccggcccctctattgg

SEQ ID NO: 3435914 - DNA, 25 bp, Homo sapien
cttctgccggtgctcatccggcccc

SEQ ID NO: 3435915 - DNA, 25 bp, Homo sapien
ccctctattggccttcctctctcat

SEQ ID NO: 3435916 - DNA, 25 bp, Homo sapien
gggatgacccagtccacaaagtcgc

SEQ ID NO: 3435917 - DNA, 25 bp, Homo sapien
gctgggctgccgaggctgtctgggc

SEQ ID NO: 3435918 - DNA, 25 bp, Homo sapien
ctcccgcatgaacagctccaccatg

SEQ ID NO: 3435919 - DNA, 25 bp, Homo sapien
ctccttgtggatctgctggctgatg

SEQ ID NO: 3435920 - DNA, 25 bp, Homo sapien
atcggtcaggatgcccggctggcct

SEQ ID NO: 3435921 - DNA, 25 bp, Homo sapien
gtgcccatcggtcaggatgcccggc

SEQ ID NO: 3435922 - DNA, 25 bp, Homo sapien
cctgggagagggtgcccatcggtca

SEQ ID NO: 3435923 - DNA, 25 bp, Homo sapien
gagggtgcccatcggtcaggatgcc

SEQ ID NO: 3435924 - DNA, 25 bp, Homo sapien
cattttccctgaagcatcgcaccag

SEQ ID NO: 3435925 - DNA, 25 bp, Homo sapien
ttttctgaaacaggtaggtgacacc

SEQ ID NO: 3435926 - DNA, 25 bp, Homo sapien
cagcttttgcgcgatgcctcggctt

SEQ ID NO: 3435927 - DNA, 25 bp, Homo sapien
gtgacaccttttggaaccggaatca

SEQ ID NO: 3435928 - DNA, 25 bp, Homo sapien
ctgtgagtaaaaatatagagaagtg

SEQ ID NO: 3435929 - DNA, 25 bp, Homo sapien
aatttagatcactcatatcatttat

SEQ ID NO: 3435930 - DNA, 25 bp, Homo sapien
taaaataattgtccaacagtgacat

SEQ ID NO: 3435931 - DNA, 25 bp, Homo sapien
atcatttatgagacttggttttata

SEQ ID NO: 3435932 - DNA, 25 bp, Homo sapien
ttctcttggtgcttgagaaatttca

SEQ ID NO: 3435933 - DNA, 25 bp, Homo sapien
tacgacacctatgaactttgaccac

SEQ ID NO: 3435934 - DNA, 25 bp, Homo sapien
acagtcctctgtggatttgtgtaca

SEQ ID NO: 3435935 - DNA, 25 bp, Homo sapien
ttgaccacagttggcagattaaagg

SEQ ID NO: 3435936 - DNA, 25 bp, Homo sapien
cagattaaagggaatgtaacatcac

SEQ ID NO: 3435937 - DNA, 25 bp, Homo sapien
tcactacaggaaatcgacaagagcg

SEQ ID NO: 3435938 - DNA, 25 bp, Homo sapien
gacaagagcgcgttttcgaccgtta

SEQ ID NO: 3435939 - DNA, 25 bp, Homo sapien
cgaccgttatctcgcgaaaactaag

SEQ ID NO: 3435940 - DNA, 25 bp, Homo sapien
aaaactaagggacccgcgcatgcgt

SEQ ID NO: 3435941 - DNA, 25 bp, Homo sapien
tgagctcggtcagctcgctgctcga

SEQ ID NO: 3435942 - DNA, 25 bp, Homo sapien
tggacgacaccgagtgcagcagcac

SEQ ID NO: 3435943 - DNA, 25 bp, Homo sapien
agctcgctgctcgacaggctggacg

SEQ ID NO: 3435944 - DNA, 25 bp, Homo sapien
aggcataggaacttgagctcggtca

SEQ ID NO: 3435945 - DNA, 25 bp, Homo sapien
agcaggtcgtggcgccgcagggagg

SEQ ID NO: 3435946 - DNA, 25 bp, Homo sapien
tcgcgcaggagctcggtgtgcccgg

SEQ ID NO: 3435947 - DNA, 25 bp, Homo sapien
gaggcgagcagctcgcgcaggagct

SEQ ID NO: 3435948 - DNA, 25 bp, Homo sapien
gagcagctcgcgcaggagctcggtg

SEQ ID NO: 3435949 - DNA, 25 bp, Homo sapien
gccgcccccgcctcgaagtcgtcga

SEQ ID NO: 3435950 - DNA, 25 bp, Homo sapien
cgccgcccccgcctcgaagtcgtcg

SEQ ID NO: 3435951 - DNA, 25 bp, Homo sapien
tctggtgtacttttcccagcacaca

SEQ ID NO: 3435952 - DNA, 25 bp, Homo sapien
cttctggtgtacttttcccagcaca

SEQ ID NO: 3435953 - DNA, 25 bp, Homo sapien
gtgtacttttcccagcacacagtaa

SEQ ID NO: 3435954 - DNA, 25 bp, Homo sapien
tggtgtacttttcccagcacacagt

SEQ ID NO: 3435955 - DNA, 25 bp, Homo sapien
atctgctgacgtcaccactgagatc

SEQ ID NO: 3435956 - DNA, 25 bp, Homo sapien
ctgctgacgtcaccactgagatcag

SEQ ID NO: 3435957 - DNA, 25 bp, Homo sapien
tgctgacgtcaccactgagatcagg

SEQ ID NO: 3435958 - DNA, 25 bp, Homo sapien
tctgctgacgtcaccactgagatca

SEQ ID NO: 3435959 - DNA, 25 bp, Homo sapien
catatgacgttaaatgctgcacaca

SEQ ID NO: 3435960 - DNA, 25 bp, Homo sapien
ctgagactttgagctgacgagccag

SEQ ID NO: 3435961 - DNA, 25 bp, Homo sapien
gggtatctgtcctcgatgctgtcga

SEQ ID NO: 3435962 - DNA, 25 bp, Homo sapien
ccaggtgggccactgttgcgttctc

SEQ ID NO: 3435963 - DNA, 25 bp, Homo sapien
catgacatcggggacatggccccac

SEQ ID NO: 3435964 - DNA, 25 bp, Homo sapien
caggacgcttcggaggtagatgcgt

SEQ ID NO: 3435965 - DNA, 25 bp, Homo sapien
tgcgtctgagttccatgacatcggg

SEQ ID NO: 3435966 - DNA, 25 bp, Homo sapien
ttctggaggtcacgggcctgctgaa

SEQ ID NO: 3435967 - DNA, 25 bp, Homo sapien
cgcaggagctcatttagtggagaca

SEQ ID NO: 3435968 - DNA, 25 bp, Homo sapien
caaagtccaggctgtgtagatgcct

SEQ ID NO: 3435969 - DNA, 25 bp, Homo sapien
cgggagaggcattaataaacgcagc

SEQ ID NO: 3435970 - DNA, 25 bp, Homo sapien
agtgctgggctaccttcctggagag

SEQ ID NO: 3435971 - DNA, 25 bp, Homo sapien
gcaccccgcctgaccctagtgtcca

SEQ ID NO: 3435972 - DNA, 25 bp, Homo sapien
agcaccccgcctgaccctagtgtcc

SEQ ID NO: 3435973 - DNA, 25 bp, Homo sapien
ccccgcctgaccctagtgtccaggt

SEQ ID NO: 3435974 - DNA, 25 bp, Homo sapien
caccccgcctgaccctagtgtccag

SEQ ID NO: 3435975 - DNA, 25 bp, Homo sapien
tttaaagatacgagatcccgctgcc

SEQ ID NO: 3435976 - DNA, 25 bp, Homo sapien
gtgctgtgtgtcaatcactcatcag

SEQ ID NO: 3435977 - DNA, 25 bp, Homo sapien
gatattatctcaattcgtcctggca

SEQ ID NO: 3435978 - DNA, 25 bp, Homo sapien
tcctcacaaggaagatttagagagt

SEQ ID NO: 3435979 - DNA, 25 bp, Homo sapien
cttgggctactgactagatggtggt

SEQ ID NO: 3435980 - DNA, 25 bp, Homo sapien
gaatatgttcccctacctggcaaag

SEQ ID NO: 3435981 - DNA, 25 bp, Homo sapien
ccaggtggcccagtgtagtcactag

SEQ ID NO: 3435982 - DNA, 25 bp, Homo sapien
ccatgtgctaatccctgggatctgt

SEQ ID NO: 3435983 - DNA, 25 bp, Homo sapien
gatgaattgcgaggtcactcactgt

SEQ ID NO: 3435984 - DNA, 25 bp, Homo sapien
ggtggcggcaggtagcagaagaggt

SEQ ID NO: 3435985 - DNA, 25 bp, Homo sapien
tgtgagttacaaagtataggacctg

SEQ ID NO: 3435986 - DNA, 25 bp, Homo sapien
gatgggagagacacttgtgagttac

SEQ ID NO: 3435987 - DNA, 25 bp, Homo sapien
gacagccaggttctaaacctcttaa

SEQ ID NO: 3435988 - DNA, 25 bp, Homo sapien
ccatcacagacactctaagtaactc

SEQ ID NO: 3435989 - DNA, 25 bp, Homo sapien
cttggaagcctacaggaccatcaca

SEQ ID NO: 3435990 - DNA, 25 bp, Homo sapien
tgaagactggcactgccgatcgcct

SEQ ID NO: 3435991 - DNA, 25 bp, Homo sapien
tgccttagccttcttagtagagaag

SEQ ID NO: 3435992 - DNA, 25 bp, Homo sapien
acttccccgggaaacacactgtgtg

SEQ ID NO: 3435993 - DNA, 25 bp, Homo sapien
cactgtgtgccctcggggatccaag

SEQ ID NO: 3435994 - DNA, 25 bp, Homo sapien
accagcagaccacccacttccccgg

SEQ ID NO: 3435995 - DNA, 25 bp, Homo sapien
gggcattcagttcaccagcagacca

SEQ ID NO: 3435996 - DNA, 25 bp, Homo sapien
tccagcgaaatctcacaggacaacg

SEQ ID NO: 3435997 - DNA, 25 bp, Homo sapien
gcgaaatctcacaggacaacggcag

SEQ ID NO: 3435998 - DNA, 25 bp, Homo sapien
tgagcatcgtccagcgaaatctcac

SEQ ID NO: 3435999 - DNA, 25 bp, Homo sapien
catcgtccagcgaaatctcacagga

SEQ ID NO: 3436000 - DNA, 25 bp, Homo sapien
ctggtaaatgtcgactgaacggtga

SEQ ID NO: 3436001 - DNA, 25 bp, Homo sapien
agggagtgcctggtaaatgtcgact

SEQ ID NO: 3436002 - DNA, 25 bp, Homo sapien
tgcctggtaaatgtcgactgaacgg

SEQ ID NO: 3436003 - DNA, 25 bp, Homo sapien
aatgtcgactgaacggtgatccgct

SEQ ID NO: 3436004 - DNA, 25 bp, Homo sapien
tggagaagcatccggttaaataaag

SEQ ID NO: 3436005 - DNA, 25 bp, Homo sapien
gagaagcatccggttaaataaaggc

SEQ ID NO: 3436006 - DNA, 25 bp, Homo sapien
gaccacaggacaagtttgcagctct

SEQ ID NO: 3436007 - DNA, 25 bp, Homo sapien
aataaaggccccttctgtccagatg

SEQ ID NO: 3436008 - DNA, 25 bp, Homo sapien
tcactctaatatgaacaccaggaac

SEQ ID NO: 3436009 - DNA, 25 bp, Homo sapien
cactctaatatgaacaccaggaact

SEQ ID NO: 3436010 - DNA, 25 bp, Homo sapien
aacaccaggaactgataggtgagaa

SEQ ID NO: 3436011 - DNA, 25 bp, Homo sapien
ccaggaactgataggtgagaagtgc

SEQ ID NO: 3436012 - DNA, 25 bp, Homo sapien
ggagagcttgggagccgacgaaagc

SEQ ID NO: 3436013 - DNA, 25 bp, Homo sapien
cggccggacactggcggagcggagg

SEQ ID NO: 3436014 - DNA, 25 bp, Homo sapien
agtcactaaggccggcccgcggccg

SEQ ID NO: 3436015 - DNA, 25 bp, Homo sapien
ttgggagccgacgaaagcagcccgc

SEQ ID NO: 3436016 - DNA, 25 bp, Homo sapien
tcctgtatcaggtgcggcggaagcc

SEQ ID NO: 3436017 - DNA, 25 bp, Homo sapien
gagacatctaatcggctgcgtggcc

SEQ ID NO: 3436018 - DNA, 25 bp, Homo sapien
tgaggaccgttgacaacggagcccg

SEQ ID NO: 3436019 - DNA, 25 bp, Homo sapien
aagtcgcttctgagcctttcgggca

SEQ ID NO: 3436020 - DNA, 25 bp, Homo sapien
gtgcagtcagctcccgggaagaact

SEQ ID NO: 3436021 - DNA, 25 bp, Homo sapien
aatatagcaggtcgatacagccggg

SEQ ID NO: 3436022 - DNA, 25 bp, Homo sapien
gaactgacggctccctgaattcttg

SEQ ID NO: 3436023 - DNA, 25 bp, Homo sapien
caaaatccatcaggcatcttgcagg

SEQ ID NO: 3436024 - DNA, 25 bp, Homo sapien
aggcggtccctttcttctagcatgg

SEQ ID NO: 3436025 - DNA, 25 bp, Homo sapien
gagtctctctcagtgtatcaagaag

SEQ ID NO: 3436026 - DNA, 25 bp, Homo sapien
taaggccagcgtttcttgagtctct

SEQ ID NO: 3436027 - DNA, 25 bp, Homo sapien
tctttcatgaccaacctcgtgtaac

SEQ ID NO: 3436028 - DNA, 25 bp, Homo sapien
aatccatgggaagtacaagtttagc

SEQ ID NO: 3436029 - DNA, 25 bp, Homo sapien
gagtacaacgatttgttctccctaa

SEQ ID NO: 3436030 - DNA, 25 bp, Homo sapien
gaacctaggcagttcccaaagatag

SEQ ID NO: 3436031 - DNA, 25 bp, Homo sapien
tcgttacggaaaatactcatctgaa

SEQ ID NO: 3436032 - DNA, 25 bp, Homo sapien
gaactaggcattcccaggctgctac

SEQ ID NO: 3436033 - DNA, 25 bp, Homo sapien
ggcatcatcatgttatccactgaac

SEQ ID NO: 3436034 - DNA, 25 bp, Homo sapien
tgttatccactgaactaggcattcc

SEQ ID NO: 3436035 - DNA, 25 bp, Homo sapien
caggtggtaacgtgaaccgttggca

SEQ ID NO: 3436036 - DNA, 25 bp, Homo sapien
tgcaacttgccattcgtggagataa

SEQ ID NO: 3436037 - DNA, 25 bp, Homo sapien
ggagataaagaattgggctctctct

SEQ ID NO: 3436038 - DNA, 25 bp, Homo sapien
tgggctctctcttcaagtctacaat

SEQ ID NO: 3436039 - DNA, 25 bp, Homo sapien
tctacaattgctggtaaaggtgtca

SEQ ID NO: 3436040 - DNA, 25 bp, Homo sapien
tgggccgtattcactgacacctgaa

SEQ ID NO: 3436041 - DNA, 25 bp, Homo sapien
gcgactgccgctgtgaatagcacag

SEQ ID NO: 3436042 - DNA, 25 bp, Homo sapien
acaatcagtcctggacgtgtgggcg

SEQ ID NO: 3436043 - DNA, 25 bp, Homo sapien
gcagttcctggtgggccgtattcac

SEQ ID NO: 3436044 - DNA, 25 bp, Homo sapien
gactccagaaaggccaacaaaggca

SEQ ID NO: 3436045 - DNA, 25 bp, Homo sapien
aaatgggctgtcttgcaccctctcg

SEQ ID NO: 3436046 - DNA, 25 bp, Homo sapien
gaagctcacccatcactttgacagg

SEQ ID NO: 3436047 - DNA, 25 bp, Homo sapien
tgcaggaactgcctcctaaatgggc

SEQ ID NO: 3436048 - DNA, 25 bp, Homo sapien
tctagtcctacacaattccgccagg

SEQ ID NO: 3436049 - DNA, 25 bp, Homo sapien
gattctttatacctaaacctggaca

SEQ ID NO: 3436050 - DNA, 25 bp, Homo sapien
taagcttagcaagtaccttgtttgc

SEQ ID NO: 3436051 - DNA, 25 bp, Homo sapien
gaaacagtcagtaaagcagatgagg

SEQ ID NO: 3436052 - DNA, 25 bp, Homo sapien
caaagacgatgaaaacaagtatggt

SEQ ID NO: 3436053 - DNA, 25 bp, Homo sapien
gctggtgacaacctcggagcacaga

SEQ ID NO: 3436054 - DNA, 25 bp, Homo sapien
ccatgtaagcgaatgcgaaactgct

SEQ ID NO: 3436055 - DNA, 25 bp, Homo sapien
ggcacagctgtcaagggttttatca

SEQ ID NO: 3436056 - DNA, 25 bp, Homo sapien
aatggtccactcttgaggaaaagca

SEQ ID NO: 3436057 - DNA, 25 bp, Homo sapien
tgaaagaatgcaaggtacgccaact

SEQ ID NO: 3436058 - DNA, 25 bp, Homo sapien
ctgaaagaatgcaaggtacgccaac

SEQ ID NO: 3436059 - DNA, 25 bp, Homo sapien
gcagacaggactcggtatattctgc

SEQ ID NO: 3436060 - DNA, 25 bp, Homo sapien
gctagaccaagtgctaccgaagagc

SEQ ID NO: 3436061 - DNA, 25 bp, Homo sapien
tcgaacacgcggtagggctgcccga

SEQ ID NO: 3436062 - DNA, 25 bp, Homo sapien
agagcagcactcgaacacgcggtag

SEQ ID NO: 3436063 - DNA, 25 bp, Homo sapien
aatatcacacttggcaccgctcagg

SEQ ID NO: 3436064 - DNA, 25 bp, Homo sapien
gatcagcacataaggacactctcag

SEQ ID NO: 3436065 - DNA, 25 bp, Homo sapien
accttagggtatgcacaagctttcc

SEQ ID NO: 3436066 - DNA, 25 bp, Homo sapien
gtgtgagtaagcattctgagaccgc

SEQ ID NO: 3436067 - DNA, 25 bp, Homo sapien
caaacagaagctagggcatggagct

SEQ ID NO: 3436068 - DNA, 25 bp, Homo sapien
ccaggtgaacagcagaaggagagat

SEQ ID NO: 3436069 - DNA, 25 bp, Homo sapien
gcatggagctcaaagtcctaaccct

SEQ ID NO: 3436070 - DNA, 25 bp, Homo sapien
cagaaactgctacatgttcaggaac

SEQ ID NO: 3436071 - DNA, 25 bp, Homo sapien
tactattaaaaggagacaccagatt

SEQ ID NO: 3436072 - DNA, 25 bp, Homo sapien
gacaccagattgctctaagctatcc

SEQ ID NO: 3436073 - DNA, 25 bp, Homo sapien
acttagaaatgaacctgctgcgtca

SEQ ID NO: 3436074 - DNA, 25 bp, Homo sapien
aatgttttactgcttgtcactcccc

SEQ ID NO: 3436075 - DNA, 25 bp, Homo sapien
tttcagccctgttcactcttccaca

SEQ ID NO: 3436076 - DNA, 25 bp, Homo sapien
gttaaggatatttccatatcggtgc

SEQ ID NO: 3436077 - DNA, 25 bp, Homo sapien
tatatgagcaaatctattctttcgc

SEQ ID NO: 3436078 - DNA, 25 bp, Homo sapien
taaagttgtgcctttcctgtttatc

SEQ ID NO: 3436079 - DNA, 25 bp, Homo sapien
tcctaagaaccagtgtgtcctcggc

SEQ ID NO: 3436080 - DNA, 25 bp, Homo sapien
gggtgaacaaccttgagcgctccta

SEQ ID NO: 3436081 - DNA, 25 bp, Homo sapien
tcacaaactgctcccaagggtgaac

SEQ ID NO: 3436082 - DNA, 25 bp, Homo sapien
cggcctcccgaagcctttatctttg

SEQ ID NO: 3436083 - DNA, 25 bp, Homo sapien
aacagacagacgagctggcaggaac

SEQ ID NO: 3436084 - DNA, 25 bp, Homo sapien
atatctcgtctatgctggccgctgc

SEQ ID NO: 3436085 - DNA, 25 bp, Homo sapien
tggcaggaacctcagagcagtacgt

SEQ ID NO: 3436086 - DNA, 25 bp, Homo sapien
agtgagtgcttccacctcgatcgga

SEQ ID NO: 3436087 - DNA, 25 bp, Homo sapien
ctccctgtctagtggctcagtccat

SEQ ID NO: 3436088 - DNA, 25 bp, Homo sapien
cctgtctagtggctcagtccattca

SEQ ID NO: 3436089 - DNA, 25 bp, Homo sapien
ctcatcgcgacagaaggttttctgt

SEQ ID NO: 3436090 - DNA, 25 bp, Homo sapien
tgtctagtggctcagtccattcagg

SEQ ID NO: 3436091 - DNA, 25 bp, Homo sapien
tttcaaggagctgttccctgcatac

SEQ ID NO: 3436092 - DNA, 25 bp, Homo sapien
gttctttagtaagtgctgcgaactc

SEQ ID NO: 3436093 - DNA, 25 bp, Homo sapien
ggagctgttccctgcatacattgag

SEQ ID NO: 3436094 - DNA, 25 bp, Homo sapien
gctgttccctgcatacattgagttc

SEQ ID NO: 3436095 - DNA, 25 bp, Homo sapien
taagagaccgctcatgcctggagac

SEQ ID NO: 3436096 - DNA, 25 bp, Homo sapien
cctaagagaccgctcatgcctggag

SEQ ID NO: 3436097 - DNA, 25 bp, Homo sapien
gcctggagacaaggcattccaaatg

SEQ ID NO: 3436098 - DNA, 25 bp, Homo sapien
aggcattccaaatgctctaacagca

SEQ ID NO: 3436099 - DNA, 25 bp, Homo sapien
gcacttccacttcgctggacacgcc

SEQ ID NO: 3436100 - DNA, 25 bp, Homo sapien
ggagactgcgcttgtctcttcacca

SEQ ID NO: 3436101 - DNA, 25 bp, Homo sapien
ttccacttcgctggacacgcctgct

SEQ ID NO: 3436102 - DNA, 25 bp, Homo sapien
actgcgcttgtctcttcaccacggt

SEQ ID NO: 3436103 - DNA, 25 bp, Homo sapien
tcctcttctaacaaactacatcttt

SEQ ID NO: 3436104 - DNA, 25 bp, Homo sapien
ctttgtgtgtggcacctaattcctc

SEQ ID NO: 3436105 - DNA, 25 bp, Homo sapien
agtgctactcgtaatcgctctctca

SEQ ID NO: 3436106 - DNA, 25 bp, Homo sapien
catctttcaagtgctactcgtaatc

SEQ ID NO: 3436107 - DNA, 25 bp, Homo sapien
cagcactccatctgttagagttttt

SEQ ID NO: 3436108 - DNA, 25 bp, Homo sapien
catggtttatgtccagcactccatc

SEQ ID NO: 3436109 - DNA, 25 bp, Homo sapien
ctttccactcgtgcttggtgtattt

SEQ ID NO: 3436110 - DNA, 25 bp, Homo sapien
ccagcactccatctgttagagtttt

SEQ ID NO: 3436111 - DNA, 25 bp, Homo sapien
gatgagatcttttctagccgtgtcc

SEQ ID NO: 3436112 - DNA, 25 bp, Homo sapien
ggagctcaattactttagcaaggtc

SEQ ID NO: 3436113 - DNA, 25 bp, Homo sapien
gcaaggtcttcctcgtggcttaaag

SEQ ID NO: 3436114 - DNA, 25 bp, Homo sapien
gccgtgtccagatcctcttccagtt

SEQ ID NO: 3436115 - DNA, 25 bp, Homo sapien
acaacttcatgacaagactgtagtt

SEQ ID NO: 3436116 - DNA, 25 bp, Homo sapien
caacttcatgacaagactgtagttt

SEQ ID NO: 3436117 - DNA, 25 bp, Homo sapien
cttcatgacaagactgtagtttttg

SEQ ID NO: 3436118 - DNA, 25 bp, Homo sapien
catgacaagactgtagtttttgtta

SEQ ID NO: 3436119 - DNA, 25 bp, Homo sapien
tttcaagagtagtgattctctcttc

SEQ ID NO: 3436120 - DNA, 25 bp, Homo sapien
tcattgaggtcatgcacagatgtgg

SEQ ID NO: 3436121 - DNA, 25 bp, Homo sapien
tcacgctgtgcagcgaggtagcgtt

SEQ ID NO: 3436122 - DNA, 25 bp, Homo sapien
cagcgaggtagcgtttttcaagagt

SEQ ID NO: 3436123 - DNA, 25 bp, Homo sapien
tgaaggaactcccacatgtcttgaa

SEQ ID NO: 3436124 - DNA, 25 bp, Homo sapien
catgtatcatagtgctcccacttag

SEQ ID NO: 3436125 - DNA, 25 bp, Homo sapien
ggttaaatcaaatcctacgtaatca

SEQ ID NO: 3436126 - DNA, 25 bp, Homo sapien
cacttagttacaaatagccaattgc

SEQ ID NO: 3436127 - DNA, 25 bp, Homo sapien
tcagtgtctgttgcagcttttgctc

SEQ ID NO: 3436128 - DNA, 25 bp, Homo sapien
tccaagcgctcctgtaactggcggt

SEQ ID NO: 3436129 - DNA, 25 bp, Homo sapien
tgtaactggcggtttttatcttcag

SEQ ID NO: 3436130 - DNA, 25 bp, Homo sapien
ttttgctctgccaattccaagcgct

SEQ ID NO: 3436131 - DNA, 25 bp, Homo sapien
tcctaagcttggaagtaagttccaa

SEQ ID NO: 3436132 - DNA, 25 bp, Homo sapien
ttcctaagcttggaagtaagttcca

SEQ ID NO: 3436133 - DNA, 25 bp, Homo sapien
gacgtcatccttacacttcattaac

SEQ ID NO: 3436134 - DNA, 25 bp, Homo sapien
catccttacacttcattaacgacat

SEQ ID NO: 3436135 - DNA, 25 bp, Homo sapien
gctgacgtcatccttacacttcatt

SEQ ID NO: 3436136 - DNA, 25 bp, Homo sapien
cgtcatccttacacttcattaacga

SEQ ID NO: 3436137 - DNA, 25 bp, Homo sapien
gcttccatctgtcgtaacctttctt

SEQ ID NO: 3436138 - DNA, 25 bp, Homo sapien
aacctttcttcaatgttgccgtgtc

SEQ ID NO: 3436139 - DNA, 25 bp, Homo sapien
caatgttgccgtgtctctcttcagc

SEQ ID NO: 3436140 - DNA, 25 bp, Homo sapien
actgtgcttccatctgtcgtaacct

SEQ ID NO: 3436141 - DNA, 25 bp, Homo sapien
tgataaacgtttattatgttcttcg

SEQ ID NO: 3436142 - DNA, 25 bp, Homo sapien
gaagttgaagcctctcattagattc

SEQ ID NO: 3436143 - DNA, 25 bp, Homo sapien
gcagcttgtcaacagtgtctgataa

SEQ ID NO: 3436144 - DNA, 25 bp, Homo sapien
gaaagcagcttgtcaacagtgtctg

SEQ ID NO: 3436145 - DNA, 25 bp, Homo sapien
gaaattaacttccaatgcatgaata

SEQ ID NO: 3436146 - DNA, 25 bp, Homo sapien
gggctggcaaactagaacctgacgg

SEQ ID NO: 3436147 - DNA, 25 bp, Homo sapien
acgcccagccagaaattaacttcca

SEQ ID NO: 3436148 - DNA, 25 bp, Homo sapien
ttgggcccaaaaaatgatcctagtg

SEQ ID NO: 3436149 - DNA, 25 bp, Homo sapien
tatcgtgttgtgtttcttctaactg

SEQ ID NO: 3436150 - DNA, 25 bp, Homo sapien
actttcaacttctcttaaaagagag

SEQ ID NO: 3436151 - DNA, 25 bp, Homo sapien
ctttcaacttctcttaaaagagagt

SEQ ID NO: 3436152 - DNA, 25 bp, Homo sapien
cttatcgtgttgtgtttcttctaac

SEQ ID NO: 3436153 - DNA, 25 bp, Homo sapien
tgaagcacctcttagtctcatgtgg

SEQ ID NO: 3436154 - DNA, 25 bp, Homo sapien
gccctcagtgcttcaatgtttagga

SEQ ID NO: 3436155 - DNA, 25 bp, Homo sapien
cttcaatgtttaggacaagctgatc

SEQ ID NO: 3436156 - DNA, 25 bp, Homo sapien
tgtggtctagttcagccctcagtgc

SEQ ID NO: 3436157 - DNA, 25 bp, Homo sapien
ttggaaggctcatctcgcagggctg

SEQ ID NO: 3436158 - DNA, 25 bp, Homo sapien
cctgaaatctgggacactgcccaag

SEQ ID NO: 3436159 - DNA, 25 bp, Homo sapien
tgccagccggcctttctgtgggcgc

SEQ ID NO: 3436160 - DNA, 25 bp, Homo sapien
taggagtctgtgtggccgtctgcca

SEQ ID NO: 3436161 - DNA, 25 bp, Homo sapien
gattatcattgtatttaaaagtgac

SEQ ID NO: 3436162 - DNA, 25 bp, Homo sapien
ccatgattatcattgtatttaaaag

SEQ ID NO: 3436163 - DNA, 25 bp, Homo sapien
tttaaatccatgattatcattgtat

SEQ ID NO: 3436164 - DNA, 25 bp, Homo sapien
tatcattgtatttaaaagtgactgt

SEQ ID NO: 3436165 - DNA, 25 bp, Homo sapien
tgggcaggactcagcacctcactca

SEQ ID NO: 3436166 - DNA, 25 bp, Homo sapien
gcaggactcagcacctcactcaaat

SEQ ID NO: 3436167 - DNA, 25 bp, Homo sapien
aggactcagcacctcactcaaatga

SEQ ID NO: 3436168 - DNA, 25 bp, Homo sapien
ggactcagcacctcactcaaatgaa

SEQ ID NO: 3436169 - DNA, 25 bp, Homo sapien
catcatggctagtgtgtgcgcgtcg

SEQ ID NO: 3436170 - DNA, 25 bp, Homo sapien
tttgccaagacactagcttgctggg

SEQ ID NO: 3436171 - DNA, 25 bp, Homo sapien
gttcccaatcctgctcattaagagt

SEQ ID NO: 3436172 - DNA, 25 bp, Homo sapien
tgcccgctgggcgatagcaggtcaa

SEQ ID NO: 3436173 - DNA, 25 bp, Homo sapien
cactctggatcaggaaggtaggccg

SEQ ID NO: 3436174 - DNA, 25 bp, Homo sapien
cagcaccctccagctatgtggcgag

SEQ ID NO: 3436175 - DNA, 25 bp, Homo sapien
cacatgcggcaggtgatagcaacgc

SEQ ID NO: 3436176 - DNA, 25 bp, Homo sapien
tgctgcaggcctaggactctacagg

SEQ ID NO: 3436177 - DNA, 25 bp, Homo sapien
catggatcactagacagcagtttta

SEQ ID NO: 3436178 - DNA, 25 bp, Homo sapien
tcaaggtggcacatgaaatgggagt

SEQ ID NO: 3436179 - DNA, 25 bp, Homo sapien
tgaaccagagcgttatctgatggga

SEQ ID NO: 3436180 - DNA, 25 bp, Homo sapien
tctctcctagagtgtcatggatcac

SEQ ID NO: 3436181 - DNA, 25 bp, Homo sapien
gaatggagctcattgatctaaaacg

SEQ ID NO: 3436182 - DNA, 25 bp, Homo sapien
aggagctagcaagcgaggaagcagg

SEQ ID NO: 3436183 - DNA, 25 bp, Homo sapien
taaaacgaccaagattgtctagact

SEQ ID NO: 3436184 - DNA, 25 bp, Homo sapien
agtctgtccacttcccgagctgggc

SEQ ID NO: 3436185 - DNA, 25 bp, Homo sapien
aggtatgctgagggcagccacagca

SEQ ID NO: 3436186 - DNA, 25 bp, Homo sapien
gccacagcagggaaagggcggatac

SEQ ID NO: 3436187 - DNA, 25 bp, Homo sapien
cacagcagggaaagggcggatacgt

SEQ ID NO: 3436188 - DNA, 25 bp, Homo sapien
cagcagggaaagggcggatacgtac

SEQ ID NO: 3436189 - DNA, 25 bp, Homo sapien
aacaaatggtgtaatgctagcctgg

SEQ ID NO: 3436190 - DNA, 25 bp, Homo sapien
gctggttgggcactccgaaaggaaa

SEQ ID NO: 3436191 - DNA, 25 bp, Homo sapien
ttggtagtagatgcccaggaagctg

SEQ ID NO: 3436192 - DNA, 25 bp, Homo sapien
gcacagatgtcatgcctaatgtcac

SEQ ID NO: 3436193 - DNA, 25 bp, Homo sapien
gaaataagcacaagcccacaaataa

SEQ ID NO: 3436194 - DNA, 25 bp, Homo sapien
aatcaaaaccaatgacggaagcata

SEQ ID NO: 3436195 - DNA, 25 bp, Homo sapien
tacgaattctctggacagaaataag

SEQ ID NO: 3436196 - DNA, 25 bp, Homo sapien
gactgtcagccagcatacagaatta

SEQ ID NO: 3436197 - DNA, 25 bp, Homo sapien
gatgagtaaactactgactgatggg

SEQ ID NO: 3436198 - DNA, 25 bp, Homo sapien
atcgctatagcatggggtggaactg

SEQ ID NO: 3436199 - DNA, 25 bp, Homo sapien
ggatgagtaaactactgactgatgg

SEQ ID NO: 3436200 - DNA, 25 bp, Homo sapien
agcatgctgtgaagaatcgctatag

SEQ ID NO: 3436201 - DNA, 25 bp, Homo sapien
tgatcgaacacacacagttgcgtgg

SEQ ID NO: 3436202 - DNA, 25 bp, Homo sapien
taaacacctatgtcttgcctgtatc

SEQ ID NO: 3436203 - DNA, 25 bp, Homo sapien
tgcttaaagcaaggtatcctgtgaa

SEQ ID NO: 3436204 - DNA, 25 bp, Homo sapien
tgatgagactcaacaggctgatgag

SEQ ID NO: 3436205 - DNA, 25 bp, Homo sapien
ctttctacgatgtttccttaaatca

SEQ ID NO: 3436206 - DNA, 25 bp, Homo sapien
ttttgcagtggaacgtgaatacgcc

SEQ ID NO: 3436207 - DNA, 25 bp, Homo sapien
gatgatctttgtcagactcccaggg

SEQ ID NO: 3436208 - DNA, 25 bp, Homo sapien
gctcagggaggaccaagtgcattca

SEQ ID NO: 3436209 - DNA, 25 bp, Homo sapien
gaaacactagagagggcaagaaacc

SEQ ID NO: 3436210 - DNA, 25 bp, Homo sapien
ctgtgaaaaactcaggccttaaatt

SEQ ID NO: 3436211 - DNA, 25 bp, Homo sapien
caaagttagttaacagcagactgtg

SEQ ID NO: 3436212 - DNA, 25 bp, Homo sapien
gttagttaacagcagactgtgaaaa

SEQ ID NO: 3436213 - DNA, 25 bp, Homo sapien
actcaggccttaaattatagccata

SEQ ID NO: 3436214 - DNA, 25 bp, Homo sapien
cttatgtccctgatgtcctcgtggc

SEQ ID NO: 3436215 - DNA, 25 bp, Homo sapien
tgtgcagccggtctaaccgaagggc

SEQ ID NO: 3436216 - DNA, 25 bp, Homo sapien
ggaggtttcacactttatggttgtc

SEQ ID NO: 3436217 - DNA, 25 bp, Homo sapien
tgacggtgtgcagcgcccctttgtg

SEQ ID NO: 3436218 - DNA, 25 bp, Homo sapien
tgccagtttgtccaggtcggccctt

SEQ ID NO: 3436219 - DNA, 25 bp, Homo sapien
ctttgtggagcgagtcctggctact

SEQ ID NO: 3436220 - DNA, 25 bp, Homo sapien
cttgccaaacaagcggccaatggag

SEQ ID NO: 3436221 - DNA, 25 bp, Homo sapien
actgctggggttgctcacgggacca

SEQ ID NO: 3436222 - DNA, 25 bp, Homo sapien
tgctctctagctcccatgccttcac

SEQ ID NO: 3436223 - DNA, 25 bp, Homo sapien
gagtggcaagtgagcataaactgct

SEQ ID NO: 3436224 - DNA, 25 bp, Homo sapien
gtggcaagtgagcataaactgctgc

SEQ ID NO: 3436225 - DNA, 25 bp, Homo sapien
ctgagtggcaagtgagcataaactg

SEQ ID NO: 3436226 - DNA, 25 bp, Homo sapien
ccccaatttgctaagtcccaaggca

SEQ ID NO: 3436227 - DNA, 25 bp, Homo sapien
tcccaaggcatcctgagatgagtta

SEQ ID NO: 3436228 - DNA, 25 bp, Homo sapien
gagttatccgtctcggaaacaccag

SEQ ID NO: 3436229 - DNA, 25 bp, Homo sapien
agcctgtccccccaatttgctaagt

SEQ ID NO: 3436230 - DNA, 25 bp, Homo sapien
caccctggggcatcacaatgcctgt

SEQ ID NO: 3436231 - DNA, 25 bp, Homo sapien
gttcaaagccatcccaaatattaga

SEQ ID NO: 3436232 - DNA, 25 bp, Homo sapien
cagggacagaaacccgattcctcca

SEQ ID NO: 3436233 - DNA, 25 bp, Homo sapien
atattagagcttattgtcagaagca

SEQ ID NO: 3436234 - DNA, 25 bp, Homo sapien
ttcctagcatgtttccaggaggcag

SEQ ID NO: 3436235 - DNA, 25 bp, Homo sapien
tctaacattaagtttcacagggcca

SEQ ID NO: 3436236 - DNA, 25 bp, Homo sapien
ggaggcagaaagtttagctctaaca

SEQ ID NO: 3436237 - DNA, 25 bp, Homo sapien
tcccaagcacaacataaaggacaga

SEQ ID NO: 3436238 - DNA, 25 bp, Homo sapien
ggacagatcgcttcaggtcaggaat

SEQ ID NO: 3436239 - DNA, 25 bp, Homo sapien
gccgaggtggacagatcgcttcagg

SEQ ID NO: 3436240 - DNA, 25 bp, Homo sapien
acgcttgtaattccagctgctggga

SEQ ID NO: 3436241 - DNA, 25 bp, Homo sapien
cgaggtggacagatcgcttcaggtc

SEQ ID NO: 3436242 - DNA, 25 bp, Homo sapien
cacaaccgttggcccgtcccattgg

SEQ ID NO: 3436243 - DNA, 25 bp, Homo sapien
tctagccagaccacaaccgttggcc

SEQ ID NO: 3436244 - DNA, 25 bp, Homo sapien
agccagaccacaaccgttggcccgt

SEQ ID NO: 3436245 - DNA, 25 bp, Homo sapien
ctctagccagaccacaaccgttggc

SEQ ID NO: 3436246 - DNA, 25 bp, Homo sapien
gaacagtaagttcacatactgtaac

SEQ ID NO: 3436247 - DNA, 25 bp, Homo sapien
ggtacagcctacaaagtagaacagt

SEQ ID NO: 3436248 - DNA, 25 bp, Homo sapien
cacgcaactgcatgttaaatgaagg

SEQ ID NO: 3436249 - DNA, 25 bp, Homo sapien
gtgaggtacagcctacaaagtagaa

SEQ ID NO: 3436250 - DNA, 25 bp, Homo sapien
tcggacagggccgacatgatggccc

SEQ ID NO: 3436251 - DNA, 25 bp, Homo sapien
tggtcagcgacatgatctcctggat

SEQ ID NO: 3436252 - DNA, 25 bp, Homo sapien
tttcacgtttgctcggcaggcagcc

SEQ ID NO: 3436253 - DNA, 25 bp, Homo sapien
tgatggccccgcttttcacgtttgc

SEQ ID NO: 3436254 - DNA, 25 bp, Homo sapien
ttcagagaggcattccctgtttcca

SEQ ID NO: 3436255 - DNA, 25 bp, Homo sapien
cttcagagaggcattccctgtttcc

SEQ ID NO: 3436256 - DNA, 25 bp, Homo sapien
gaagcaatgtaaacagggcagtgat

SEQ ID NO: 3436257 - DNA, 25 bp, Homo sapien
aaaagttctaatgtatgtgatgcta

SEQ ID NO: 3436258 - DNA, 25 bp, Homo sapien
tatgctgttaaggaactggagaagc

SEQ ID NO: 3436259 - DNA, 25 bp, Homo sapien
gaactatacttcatatgctgttaag

SEQ ID NO: 3436260 - DNA, 25 bp, Homo sapien
atttttcaatgtaggtgtggaccac

SEQ ID NO: 3436261 - DNA, 25 bp, Homo sapien
catgaagaacgaaactaacagagca

SEQ ID NO: 3436262 - DNA, 25 bp, Homo sapien
gagccctggtcagatcccatttttc

SEQ ID NO: 3436263 - DNA, 25 bp, Homo sapien
atttaactgttcactcatacgtgca

SEQ ID NO: 3436264 - DNA, 25 bp, Homo sapien
tctcgcagatgttccgtgacggcct

SEQ ID NO: 3436265 - DNA, 25 bp, Homo sapien
tataaatctggagttggcctgccct

SEQ ID NO: 3436266 - DNA, 25 bp, Homo sapien
tttagatgccatgcttacccgaggt

SEQ ID NO: 3436267 - DNA, 25 bp, Homo sapien
cacgatgacgagagctttagatgcc

SEQ ID NO: 3436268 - DNA, 25 bp, Homo sapien
ttccatctcttcgtgtgttaaccag

SEQ ID NO: 3436269 - DNA, 25 bp, Homo sapien
gctgcgagcgtttccatctcttcgt

SEQ ID NO: 3436270 - DNA, 25 bp, Homo sapien
cgtttgcggcgtggctgcgagcgtt

SEQ ID NO: 3436271 - DNA, 25 bp, Homo sapien
ctcttcgtgtgttaaccagacattt

SEQ ID NO: 3436272 - DNA, 25 bp, Homo sapien
ggcaacgcaactctgcagggaagat

SEQ ID NO: 3436273 - DNA, 25 bp, Homo sapien
tattggtgagctcggtaatgcaggc

SEQ ID NO: 3436274 - DNA, 25 bp, Homo sapien
acagtcagtcacatggaggctcaac

SEQ ID NO: 3436275 - DNA, 25 bp, Homo sapien
tatctggaacgactgaatggaaaac

SEQ ID NO: 3436276 - DNA, 25 bp, Homo sapien
ctgagcccagcttccctcctcatct

SEQ ID NO: 3436277 - DNA, 25 bp, Homo sapien
tgagcccagcttccctcctcatctt

SEQ ID NO: 3436278 - DNA, 25 bp, Homo sapien
gagcccagcttccctcctcatcttc

SEQ ID NO: 3436279 - DNA, 25 bp, Homo sapien
ttcctcccctagtctctcggcgcag

SEQ ID NO: 3436280 - DNA, 25 bp, Homo sapien
aaatggttttgaccacgccttgatg

SEQ ID NO: 3436281 - DNA, 25 bp, Homo sapien
ccactgtgtactgcccttggcagca

SEQ ID NO: 3436282 - DNA, 25 bp, Homo sapien
tctctcggcgcagctcaaagttctc

SEQ ID NO: 3436283 - DNA, 25 bp, Homo sapien
atctgaactagaagagacacccact

SEQ ID NO: 3436284 - DNA, 25 bp, Homo sapien
aactagaagagacacccactgcaca

SEQ ID NO: 3436285 - DNA, 25 bp, Homo sapien
gtgatgtcagtccagagaacatctg

SEQ ID NO: 3436286 - DNA, 25 bp, Homo sapien
tgaactagaagagacacccactgca

SEQ ID NO: 3436287 - DNA, 25 bp, Homo sapien
gggagccactcgttgccgatccact

SEQ ID NO: 3436288 - DNA, 25 bp, Homo sapien
tggcgtctacaaggcactccatgaa

SEQ ID NO: 3436289 - DNA, 25 bp, Homo sapien
gctgccctcgaaggtctttcttggt

SEQ ID NO: 3436290 - DNA, 25 bp, Homo sapien
tcgttgccgatccactcgtggttca

SEQ ID NO: 3436291 - DNA, 25 bp, Homo sapien
ccggtcataatttaaccttctcagg

SEQ ID NO: 3436292 - DNA, 25 bp, Homo sapien
tccagttctttccggtcataattta

SEQ ID NO: 3436293 - DNA, 25 bp, Homo sapien
tctttccagttctttccggtcataa

SEQ ID NO: 3436294 - DNA, 25 bp, Homo sapien
tttaaccttctcaggcacataattc

SEQ ID NO: 3436295 - DNA, 25 bp, Homo sapien
gaatcactcgatcattgctccaaac

SEQ ID NO: 3436296 - DNA, 25 bp, Homo sapien
tctttaaggccaattgacaggatcc

SEQ ID NO: 3436297 - DNA, 25 bp, Homo sapien
ttctgcgtcgggatctgtaacagca

SEQ ID NO: 3436298 - DNA, 25 bp, Homo sapien
aagtcgaaggtttcatctaaggcca

SEQ ID NO: 3436299 - DNA, 25 bp, Homo sapien
ctagctgtctataatcagggtgcca

SEQ ID NO: 3436300 - DNA, 25 bp, Homo sapien
aactgaacaatgagtgcagacacag

SEQ ID NO: 3436301 - DNA, 25 bp, Homo sapien
gaataactagctgtctataatcagg

SEQ ID NO: 3436302 - DNA, 25 bp, Homo sapien
taatcagggtgccaactgaacaatg

SEQ ID NO: 3436303 - DNA, 25 bp, Homo sapien
tcactcttctgatcaggcacatggg

SEQ ID NO: 3436304 - DNA, 25 bp, Homo sapien
catgggctggaatgaaagatcgtcc

SEQ ID NO: 3436305 - DNA, 25 bp, Homo sapien
tatctggtttattgcaggactctca

SEQ ID NO: 3436306 - DNA, 25 bp, Homo sapien
aagaatggcataaggcaattaccca

SEQ ID NO: 3436307 - DNA, 25 bp, Homo sapien
ccttctatcagtccccatgaccaaa

SEQ ID NO: 3436308 - DNA, 25 bp, Homo sapien
tatcagtccccatgaccaaaaggtt

SEQ ID NO: 3436309 - DNA, 25 bp, Homo sapien
tctatcagtccccatgaccaaaagg

SEQ ID NO: 3436310 - DNA, 25 bp, Homo sapien
atcagtccccatgaccaaaaggttg

SEQ ID NO: 3436311 - DNA, 25 bp, Homo sapien
tgtataagagcaaagcctgacttct

SEQ ID NO: 3436312 - DNA, 25 bp, Homo sapien
ccaaaacccaacttacagactctgt

SEQ ID NO: 3436313 - DNA, 25 bp, Homo sapien
gactgcctagctacatgatgtccca

SEQ ID NO: 3436314 - DNA, 25 bp, Homo sapien
gttcctaagctgcaaccaatgtttt

SEQ ID NO: 3436315 - DNA, 25 bp, Homo sapien
gaagtcacccggaagtttgcaggga

SEQ ID NO: 3436316 - DNA, 25 bp, Homo sapien
cagcagctaagccacgaatgtcctt

SEQ ID NO: 3436317 - DNA, 25 bp, Homo sapien
cacgaatgtcctttggtctaaactt

SEQ ID NO: 3436318 - DNA, 25 bp, Homo sapien
catgaaggtgctctcctaaagcttt

SEQ ID NO: 3436319 - DNA, 25 bp, Homo sapien
tggacatgcaaccatactcaagtgc

SEQ ID NO: 3436320 - DNA, 25 bp, Homo sapien
aacaagtgacaggttagtgtgaccc

SEQ ID NO: 3436321 - DNA, 25 bp, Homo sapien
gattcaaccagacaagcgtgtttta

SEQ ID NO: 3436322 - DNA, 25 bp, Homo sapien
gaaagctgctcatgctcccaacaag

SEQ ID NO: 3436323 - DNA, 25 bp, Homo sapien
ctactacactactatttcctgaaag

SEQ ID NO: 3436324 - DNA, 25 bp, Homo sapien
ggaagctactactacactactattt

SEQ ID NO: 3436325 - DNA, 25 bp, Homo sapien
ctagcacggcctgtcacagacacaa

SEQ ID NO: 3436326 - DNA, 25 bp, Homo sapien
tgaaagagctttctagcacggcctg

SEQ ID NO: 3436327 - DNA, 25 bp, Homo sapien
ctggcctcaaggattagcacagttt

SEQ ID NO: 3436328 - DNA, 25 bp, Homo sapien
ggcctcaaggattagcacagttttt

SEQ ID NO: 3436329 - DNA, 25 bp, Homo sapien
tggcctcaaggattagcacagtttt

SEQ ID NO: 3436330 - DNA, 25 bp, Homo sapien
gcctcaaggattagcacagttttta

SEQ ID NO: 3436331 - DNA, 25 bp, Homo sapien
catttaacaagggagatgtgattta

SEQ ID NO: 3436332 - DNA, 25 bp, Homo sapien
taaaacaagaaagcactcgtggact

SEQ ID NO: 3436333 - DNA, 25 bp, Homo sapien
gaattatatgcatgactcttggaag

SEQ ID NO: 3436334 - DNA, 25 bp, Homo sapien
cggcctaggtttacttttcatccat

SEQ ID NO: 3436335 - DNA, 25 bp, Homo sapien
caaatcggaagcaggtactggctgc

SEQ ID NO: 3436336 - DNA, 25 bp, Homo sapien
tgactcttaagaacctgggagacct

SEQ ID NO: 3436337 - DNA, 25 bp, Homo sapien
attagcaaggcatgggaccacacct

SEQ ID NO: 3436338 - DNA, 25 bp, Homo sapien
gagacctgctggagtttaccccaca

SEQ ID NO: 3436339 - DNA, 25 bp, Homo sapien
tgtagcagaatccaacctctgtgtt

SEQ ID NO: 3436340 - DNA, 25 bp, Homo sapien
aacctctgtgttcctgatacattgc

SEQ ID NO: 3436341 - DNA, 25 bp, Homo sapien
agaatccaacctctgtgttcctgat

SEQ ID NO: 3436342 - DNA, 25 bp, Homo sapien
ccaacctctgtgttcctgatacatt

SEQ ID NO: 3436343 - DNA, 25 bp, Homo sapien
gactaggctaggaaagcgttaacca

SEQ ID NO: 3436344 - DNA, 25 bp, Homo sapien
ctgtgtgcgccgacttgcaggatga

SEQ ID NO: 3436345 - DNA, 25 bp, Homo sapien
gctaggctgcgtccgtaaaggataa

SEQ ID NO: 3436346 - DNA, 25 bp, Homo sapien
caggatgattgctgtagagctaggc

SEQ ID NO: 3436347 - DNA, 25 bp, Homo sapien
ccaactgaaaagacaggctgcctct

SEQ ID NO: 3436348 - DNA, 25 bp, Homo sapien
ccacgccatggtctgacacactttg

SEQ ID NO: 3436349 - DNA, 25 bp, Homo sapien
gctgcacaataaataccacgccatg

SEQ ID NO: 3436350 - DNA, 25 bp, Homo sapien
ccaaaatggctagagcatcaaagtc

SEQ ID NO: 3436351 - DNA, 25 bp, Homo sapien
gcttcagtactttattgaaagaaag

SEQ ID NO: 3436352 - DNA, 25 bp, Homo sapien
tgaaagaaagcaataaataatactg

SEQ ID NO: 3436353 - DNA, 25 bp, Homo sapien
tcagtactttattgaaagaaagcaa

SEQ ID NO: 3436354 - DNA, 25 bp, Homo sapien
gaaagaaagcaataaataatactgt

SEQ ID NO: 3436355 - DNA, 25 bp, Homo sapien
tagagcttattctcagtattcttca

SEQ ID NO: 3436356 - DNA, 25 bp, Homo sapien
taatacaatttccatatggtgacac

SEQ ID NO: 3436357 - DNA, 25 bp, Homo sapien
tgccttccaaaacagttagagctta

SEQ ID NO: 3436358 - DNA, 25 bp, Homo sapien
tttccatatggtgacactgccttcc

SEQ ID NO: 3436359 - DNA, 25 bp, Homo sapien
aacggagaccaaggtgacgtcggca

SEQ ID NO: 3436360 - DNA, 25 bp, Homo sapien
acagcacgtgccactcagacgaggt

SEQ ID NO: 3436361 - DNA, 25 bp, Homo sapien
tctgcgaatcccaggctcaatggca

SEQ ID NO: 3436362 - DNA, 25 bp, Homo sapien
cagacgaggtgtcagcaacggagac

SEQ ID NO: 3436363 - DNA, 25 bp, Homo sapien
ggttcgaaacaggaaagcactgaac

SEQ ID NO: 3436364 - DNA, 25 bp, Homo sapien
cagcaaacacaggttcgaaacagga

SEQ ID NO: 3436365 - DNA, 25 bp, Homo sapien
cgatggctgcctgagagaaacgtcc

SEQ ID NO: 3436366 - DNA, 25 bp, Homo sapien
gcctgagagaaacgtcccaggacac

SEQ ID NO: 3436367 - DNA, 25 bp, Homo sapien
ttggctttgttcagccaaaagggac

SEQ ID NO: 3436368 - DNA, 25 bp, Homo sapien
tctggaagttttaagatactcgacg

SEQ ID NO: 3436369 - DNA, 25 bp, Homo sapien
tgttcagccaaaagggactattaaa

SEQ ID NO: 3436370 - DNA, 25 bp, Homo sapien
taagatactcgacgcatgcctttgg

SEQ ID NO: 3436371 - DNA, 25 bp, Homo sapien
ccctccaagaaagggccacatgcgt

SEQ ID NO: 3436372 - DNA, 25 bp, Homo sapien
acatgcgtgccagggacgcgagccc

SEQ ID NO: 3436373 - DNA, 25 bp, Homo sapien
aaagggccacatgcgtgccagggac

SEQ ID NO: 3436374 - DNA, 25 bp, Homo sapien
ccaagaaagggccacatgcgtgcca

SEQ ID NO: 3436375 - DNA, 25 bp, Homo sapien
ggtcggccctggattccgccgcgcc

SEQ ID NO: 3436376 - DNA, 25 bp, Homo sapien
gtcggccctggattccgccgcgcca

SEQ ID NO: 3436377 - DNA, 25 bp, Homo sapien
cggccctggattccgccgcgccagc

SEQ ID NO: 3436378 - DNA, 25 bp, Homo sapien
cgggtcggccctggattccgccgcg

SEQ ID NO: 3436379 - DNA, 25 bp, Homo sapien
tttagagcctcacgactagctgcag

SEQ ID NO: 3436380 - DNA, 25 bp, Homo sapien
tgatggaaacgtaacagaaagcccc

SEQ ID NO: 3436381 - DNA, 25 bp, Homo sapien
tgattgcaaaacctccgctcaggtg

SEQ ID NO: 3436382 - DNA, 25 bp, Homo sapien
ccaagtcaacactgagcccaaaggg

SEQ ID NO: 3436383 - DNA, 25 bp, Homo sapien
gcttgagggctggatcatgcctgaa

SEQ ID NO: 3436384 - DNA, 25 bp, Homo sapien
tgaaggacctagtgggtgaagtccc

SEQ ID NO: 3436385 - DNA, 25 bp, Homo sapien
cacacggtcaaacacgtgaatggag

SEQ ID NO: 3436386 - DNA, 25 bp, Homo sapien
ggtcaaacacgtgaatggagacagg

SEQ ID NO: 3436387 - DNA, 25 bp, Homo sapien
tagcagaaggttagcttctagttct

SEQ ID NO: 3436388 - DNA, 25 bp, Homo sapien
ctgccccaggtcaaaagaaatttct

SEQ ID NO: 3436389 - DNA, 25 bp, Homo sapien
tcttttcagtaagatatagcagaag

SEQ ID NO: 3436390 - DNA, 25 bp, Homo sapien
gagtatctggcgaatacttctctaa

SEQ ID NO: 3436391 - DNA, 25 bp, Homo sapien
ctacaggcacctgtcactacaccca

SEQ ID NO: 3436392 - DNA, 25 bp, Homo sapien
ccaccacaccaagctgatttttctc

SEQ ID NO: 3436393 - DNA, 25 bp, Homo sapien
ccacaccaagctgatttttctctct

SEQ ID NO: 3436394 - DNA, 25 bp, Homo sapien
actacaggcacctgtcactacaccc

SEQ ID NO: 3436395 - DNA, 25 bp, Homo sapien
ggctgttcacgaaattctgtttaaa

SEQ ID NO: 3436396 - DNA, 25 bp, Homo sapien
ctttctttccgcttggagataaaag

SEQ ID NO: 3436397 - DNA, 25 bp, Homo sapien
gagataaaaggctgttcacgaaatt

SEQ ID NO: 3436398 - DNA, 25 bp, Homo sapien
ctttccgcttggagataaaaggctg

SEQ ID NO: 3436399 - DNA, 25 bp, Homo sapien
ggacaaaaccccttcgcagcttgag

SEQ ID NO: 3436400 - DNA, 25 bp, Homo sapien
gggtctcaagtccaaatccaatgtg

SEQ ID NO: 3436401 - DNA, 25 bp, Homo sapien
gaaacgggatgcttggtctccggcc

SEQ ID NO: 3436402 - DNA, 25 bp, Homo sapien
gtgtagcaggactaacagtgcccct

SEQ ID NO: 3436403 - DNA, 25 bp, Homo sapien
cggcccccgcgtcatcctgggcgat

SEQ ID NO: 3436404 - DNA, 25 bp, Homo sapien
catcctgggcgatggacacagcgtg

SEQ ID NO: 3436405 - DNA, 25 bp, Homo sapien
gtctcccagtcatcggcccccgcgt

SEQ ID NO: 3436406 - DNA, 25 bp, Homo sapien
cgtggcctgctgaagctttccacat

SEQ ID NO: 3436407 - DNA, 25 bp, Homo sapien
accgtcttggcaccccatctttgct

SEQ ID NO: 3436408 - DNA, 25 bp, Homo sapien
atctttgctccttctcactcacatc

SEQ ID NO: 3436409 - DNA, 25 bp, Homo sapien
cttggcaccccatctttgctccttc

SEQ ID NO: 3436410 - DNA, 25 bp, Homo sapien
tctttgctccttctcactcacatca

SEQ ID NO: 3436411 - DNA, 25 bp, Homo sapien
tcttcccgggatactgaggcggtca

SEQ ID NO: 3436412 - DNA, 25 bp, Homo sapien
tctgaacccagcgtggcctaaaata

SEQ ID NO: 3436413 - DNA, 25 bp, Homo sapien
caactctgggctttcgataagaaca

SEQ ID NO: 3436414 - DNA, 25 bp, Homo sapien
aatgcagtttccacacgggctgtcc

SEQ ID NO: 3436415 - DNA, 25 bp, Homo sapien
cacagctgtcattgagagaccccag

SEQ ID NO: 3436416 - DNA, 25 bp, Homo sapien
gaccccagagtgataagaaggccac

SEQ ID NO: 3436417 - DNA, 25 bp, Homo sapien
gcattcggactttctgcccaggaga

SEQ ID NO: 3436418 - DNA, 25 bp, Homo sapien
ggtttgctcaaatctggtaggccag

SEQ ID NO: 3436419 - DNA, 25 bp, Homo sapien
ggtctgatgctcttgaaagacattc

SEQ ID NO: 3436420 - DNA, 25 bp, Homo sapien
catagccatgggaagcttttggtcc

SEQ ID NO: 3436421 - DNA, 25 bp, Homo sapien
tatccattcggtcttgttccacacc

SEQ ID NO: 3436422 - DNA, 25 bp, Homo sapien
tccttctccttaagggtctgatgct

SEQ ID NO: 3436423 - DNA, 25 bp, Homo sapien
ggctggaatccgacactggctaaca

SEQ ID NO: 3436424 - DNA, 25 bp, Homo sapien
tcagactcaaaagttcacctccagg

SEQ ID NO: 3436425 - DNA, 25 bp, Homo sapien
gggtatggaattaccggctggaatc

SEQ ID NO: 3436426 - DNA, 25 bp, Homo sapien
gtaaaggcaagcatctgtcaggtca

SEQ ID NO: 3436427 - DNA, 25 bp, Homo sapien
gaacacatggattccgtctgtccgt

SEQ ID NO: 3436428 - DNA, 25 bp, Homo sapien
aacacatggattccgtctgtccgtg

SEQ ID NO: 3436429 - DNA, 25 bp, Homo sapien
actgaacacatggattccgtctgtc

SEQ ID NO: 3436430 - DNA, 25 bp, Homo sapien
tgaacacatggattccgtctgtccg

SEQ ID NO: 3436431 - DNA, 25 bp, Homo sapien
gctcgctgcactgaacacggattcc

SEQ ID NO: 3436432 - DNA, 25 bp, Homo sapien
tcgctcgctgcactgaacacggatt

SEQ ID NO: 3436433 - DNA, 25 bp, Homo sapien
cgcttcgctcgctgcactgaacacg

SEQ ID NO: 3436434 - DNA, 25 bp, Homo sapien
cttcgctcgctgcactgaacacgga

SEQ ID NO: 3436435 - DNA, 25 bp, Homo sapien
taaatgtctctctgcgctaactccc

SEQ ID NO: 3436436 - DNA, 25 bp, Homo sapien
ctgaaaaaaggtgcaggccgagcag

SEQ ID NO: 3436437 - DNA, 25 bp, Homo sapien
tgtaattttcccaacccacagcagg

SEQ ID NO: 3436438 - DNA, 25 bp, Homo sapien
gctctcctgacacgttgcctttctt

SEQ ID NO: 3436439 - DNA, 25 bp, Homo sapien
gctggactcgccctgctaggacagc

SEQ ID NO: 3436440 - DNA, 25 bp, Homo sapien
cctgctaggacagctctccaacttg

SEQ ID NO: 3436441 - DNA, 25 bp, Homo sapien
ccaacttgccggctgagaggtgaga

SEQ ID NO: 3436442 - DNA, 25 bp, Homo sapien
gagcaaggctccataagcctccttg

SEQ ID NO: 3436443 - DNA, 25 bp, Homo sapien
tctgtcccatggtgctgacctgagc

SEQ ID NO: 3436444 - DNA, 25 bp, Homo sapien
ctggagtgggcaagttacaaataac

SEQ ID NO: 3436445 - DNA, 25 bp, Homo sapien
ggctgataagatcatcctgcctcgg

SEQ ID NO: 3436446 - DNA, 25 bp, Homo sapien
tggaatctgagtttaatctatttat

SEQ ID NO: 3436447 - DNA, 25 bp, Homo sapien
actggatttccgctgagcagcaccc

SEQ ID NO: 3436448 - DNA, 25 bp, Homo sapien
ctggatttccgctgagcagcaccct

SEQ ID NO: 3436449 - DNA, 25 bp, Homo sapien
tggatttccgctgagcagcaccctg

SEQ ID NO: 3436450 - DNA, 25 bp, Homo sapien
cgagcagtgcttggaaagtttcgac

SEQ ID NO: 3436451 - DNA, 25 bp, Homo sapien
aagtttcgactgatattcgtggccg

SEQ ID NO: 3436452 - DNA, 25 bp, Homo sapien
tggacaccaaacttgcctccgaagc

SEQ ID NO: 3436453 - DNA, 25 bp, Homo sapien
acggaccgagtccacctgcgagcag

SEQ ID NO: 3436454 - DNA, 25 bp, Homo sapien
caagagctctggcatcctaaacgga

SEQ ID NO: 3436455 - DNA, 25 bp, Homo sapien
ttccacgggcttcacaaaaactcgc

SEQ ID NO: 3436456 - DNA, 25 bp, Homo sapien
tagtaatgagaatagcagtggccac

SEQ ID NO: 3436457 - DNA, 25 bp, Homo sapien
caggtggcagtgacgcaagagctct

SEQ ID NO: 3436458 - DNA, 25 bp, Homo sapien
ctttctgggaggcatgcttctcagt

SEQ ID NO: 3436459 - DNA, 25 bp, Homo sapien
ttctgggaggcatgcttctcagtct

SEQ ID NO: 3436460 - DNA, 25 bp, Homo sapien
tctgggaggcatgcttctcagtctt

SEQ ID NO: 3436461 - DNA, 25 bp, Homo sapien
tttctgggaggcatgcttctcagtc

SEQ ID NO: 3436462 - DNA, 25 bp, Homo sapien
gagcgggctctttctgcacctttcg

SEQ ID NO: 3436463 - DNA, 25 bp, Homo sapien
tgcagctgaacatgggagacaagac

SEQ ID NO: 3436464 - DNA, 25 bp, Homo sapien
taaggactgagagcttgttccgcgg

SEQ ID NO: 3436465 - DNA, 25 bp, Homo sapien
gggaagttagctttctgccgatcaa

SEQ ID NO: 3436466 - DNA, 25 bp, Homo sapien
gggcctgaggacgaactacactgtt

SEQ ID NO: 3436467 - DNA, 25 bp, Homo sapien
tcctttgtgtagtcagaaatgacgc

SEQ ID NO: 3436468 - DNA, 25 bp, Homo sapien
tgctccatacaggtgacgctggacc

SEQ ID NO: 3436469 - DNA, 25 bp, Homo sapien
aaaatgtacaacaagccacccactg

SEQ ID NO: 3436470 - DNA, 25 bp, Homo sapien
gctcttgtctactcggtcggcctgc

SEQ ID NO: 3436471 - DNA, 25 bp, Homo sapien
ttgccgccaaaaccactggagtagt

SEQ ID NO: 3436472 - DNA, 25 bp, Homo sapien
tccgtcttgccctggtagtcgaagc

SEQ ID NO: 3436473 - DNA, 25 bp, Homo sapien
tagtcgaagcccaccgcgctcttgt

SEQ ID NO: 3436474 - DNA, 25 bp, Homo sapien
gaaaatgccctcgtgggtgtttctg

SEQ ID NO: 3436475 - DNA, 25 bp, Homo sapien
caaacgcgtgattacagaccgtggg

SEQ ID NO: 3436476 - DNA, 25 bp, Homo sapien
tggagcaaacgcgtgattacagacc

SEQ ID NO: 3436477 - DNA, 25 bp, Homo sapien
tgcagagagaaaatgccctcgtggg

SEQ ID NO: 3436478 - DNA, 25 bp, Homo sapien
actgtgcagccattcgaattaggaa

SEQ ID NO: 3436479 - DNA, 25 bp, Homo sapien
aagcccacatacactggtacgaaaa

SEQ ID NO: 3436480 - DNA, 25 bp, Homo sapien
ccattcgaattaggaaaagcccaca

SEQ ID NO: 3436481 - DNA, 25 bp, Homo sapien
tacactggtacgaaaagaacaccaa

SEQ ID NO: 3436482 - DNA, 25 bp, Homo sapien
ccctgggaaacgctctgagtgatgg

SEQ ID NO: 3436483 - DNA, 25 bp, Homo sapien
tcagggaaatgccaagccagcatgg

SEQ ID NO: 3436484 - DNA, 25 bp, Homo sapien
tgcagtcaagtttcagctgggcgca

SEQ ID NO: 3436485 - DNA, 25 bp, Homo sapien
gccaccggcactttcctcagggaaa

SEQ ID NO: 3436486 - DNA, 25 bp, Homo sapien
tttatgataaggctctaagctcagg

SEQ ID NO: 3436487 - DNA, 25 bp, Homo sapien
cagaagctagcaggagatgagagtt

SEQ ID NO: 3436488 - DNA, 25 bp, Homo sapien
gtcacacactcatgcagcttcgcgg

SEQ ID NO: 3436489 - DNA, 25 bp, Homo sapien
tgtgacaccaaaacatgactctctc

SEQ ID NO: 3436490 - DNA, 25 bp, Homo sapien
cacagtggctcacacctgtaatccc

SEQ ID NO: 3436491 - DNA, 25 bp, Homo sapien
tttttaaagtacagcagaggctgga

SEQ ID NO: 3436492 - DNA, 25 bp, Homo sapien
tgtaatcccagcactttgggaggcc

SEQ ID NO: 3436493 - DNA, 25 bp, Homo sapien
aaggtgggcggatcatgaggtcaag

SEQ ID NO: 3436494 - DNA, 25 bp, Homo sapien
tcgataccgtatttgccgccgaaac

SEQ ID NO: 3436495 - DNA, 25 bp, Homo sapien
ggactcgtgcttctccgttttgcct

SEQ ID NO: 3436496 - DNA, 25 bp, Homo sapien
cgttttgccttgatactcaaagcca

SEQ ID NO: 3436497 - DNA, 25 bp, Homo sapien
gccaacggcgctcttatccactttg

SEQ ID NO: 3436498 - DNA, 25 bp, Homo sapien
tcacattactagctgctggctggag

SEQ ID NO: 3436499 - DNA, 25 bp, Homo sapien
tggctggagggtaagataaaacgga

SEQ ID NO: 3436500 - DNA, 25 bp, Homo sapien
acattactagctgctggctggaggg

SEQ ID NO: 3436501 - DNA, 25 bp, Homo sapien
gctggctggagggtaagataaaacg

SEQ ID NO: 3436502 - DNA, 25 bp, Homo sapien
ggagcgccataacactcaagctgcg

SEQ ID NO: 3436503 - DNA, 25 bp, Homo sapien
gcatcgtgactaagccagacaggac

SEQ ID NO: 3436504 - DNA, 25 bp, Homo sapien
tgtggccaccacgataagcaacgcc

SEQ ID NO: 3436505 - DNA, 25 bp, Homo sapien
tagtctatgacctcagcatcgtgac

SEQ ID NO: 3436506 - DNA, 25 bp, Homo sapien
cagttaaacgcatatgattcactca

SEQ ID NO: 3436507 - DNA, 25 bp, Homo sapien
tactttagataacatccatgaagag

SEQ ID NO: 3436508 - DNA, 25 bp, Homo sapien
gtcacaggtggaaagtatgttttca

SEQ ID NO: 3436509 - DNA, 25 bp, Homo sapien
tcattaacaggtagtgcaggtcaca

SEQ ID NO: 3436510 - DNA, 25 bp, Homo sapien
tgatcccagccaagggcacatttgt

SEQ ID NO: 3436511 - DNA, 25 bp, Homo sapien
gtctgtctgtctgcacaccaaattt

SEQ ID NO: 3436512 - DNA, 25 bp, Homo sapien
ctttttgggattcatgcagctgcaa

SEQ ID NO: 3436513 - DNA, 25 bp, Homo sapien
ctggtgatcccagccaagggcacat

SEQ ID NO: 3436514 - DNA, 25 bp, Homo sapien
taagtatctcctgccaaaaaccgtg

SEQ ID NO: 3436515 - DNA, 25 bp, Homo sapien
cgtggcccactttatagacaagaag

SEQ ID NO: 3436516 - DNA, 25 bp, Homo sapien
ggtttgtgactacactagctggagg

SEQ ID NO: 3436517 - DNA, 25 bp, Homo sapien
agaagcctggatgaggagcactgca

SEQ ID NO: 3436518 - DNA, 25 bp, Homo sapien
gactgaacaccgaatttgcctccaa

SEQ ID NO: 3436519 - DNA, 25 bp, Homo sapien
cttgtaatcaaaccccacagcagcg

SEQ ID NO: 3436520 - DNA, 25 bp, Homo sapien
tccttgtaatcaaaccccacagcag

SEQ ID NO: 3436521 - DNA, 25 bp, Homo sapien
tgcctctccgactgaacaccgaatt

SEQ ID NO: 3436522 - DNA, 25 bp, Homo sapien
gggggagggtaggaggctggtggca

SEQ ID NO: 3436523 - DNA, 25 bp, Homo sapien
gggagggtaggaggctggtggcaac

SEQ ID NO: 3436524 - DNA, 25 bp, Homo sapien
ggggagggtaggaggctggtggcaa

SEQ ID NO: 3436525 - DNA, 25 bp, Homo sapien
tgggtttaaagtgccgaacagcctg

SEQ ID NO: 3436526 - DNA, 25 bp, Homo sapien
gaagtctgtgctagaagtggccgca

SEQ ID NO: 3436527 - DNA, 25 bp, Homo sapien
gaaagcctagagtcttccctgcaag

SEQ ID NO: 3436528 - DNA, 25 bp, Homo sapien
aatgctgctggagaccggagatgcc

SEQ ID NO: 3436529 - DNA, 25 bp, Homo sapien
gcaacgcgccacttcaatagcacag

SEQ ID NO: 3436530 - DNA, 25 bp, Homo sapien
gtcttccgcaccagcacgggcttat

SEQ ID NO: 3436531 - DNA, 25 bp, Homo sapien
cctgctctactgagcgctaaaaaga

SEQ ID NO: 3436532 - DNA, 25 bp, Homo sapien
gctaaaaagaggctcaatcgcagtt

SEQ ID NO: 3436533 - DNA, 25 bp, Homo sapien
caggcaggagctaagcgaggaaaga

SEQ ID NO: 3436534 - DNA, 25 bp, Homo sapien
gagctaagcgaggaaagagggcacg

SEQ ID NO: 3436535 - DNA, 25 bp, Homo sapien
gcaggcaggagctaagcgaggaaag

SEQ ID NO: 3436536 - DNA, 25 bp, Homo sapien
aggagctaagcgaggaaagagggca

SEQ ID NO: 3436537 - DNA, 25 bp, Homo sapien
caccacagcgggaagaaacgagaat

SEQ ID NO: 3436538 - DNA, 25 bp, Homo sapien
cacccatggtcgtgagacacaggca

SEQ ID NO: 3436539 - DNA, 25 bp, Homo sapien
aacgagaatggccaagcgaggcttc

SEQ ID NO: 3436540 - DNA, 25 bp, Homo sapien
gccgtgggtgcatgcagacagatcc

SEQ ID NO: 3436541 - DNA, 25 bp, Homo sapien
gaaacgtggcaaaacacaacactta

SEQ ID NO: 3436542 - DNA, 25 bp, Homo sapien
ctgaaacgtggcaaaacacaacact

SEQ ID NO: 3436543 - DNA, 25 bp, Homo sapien
tgaaacgtggcaaaacacaacactt

SEQ ID NO: 3436544 - DNA, 25 bp, Homo sapien
caccccatacttcccgccgaatcct

SEQ ID NO: 3436545 - DNA, 25 bp, Homo sapien
tccgatccttctgcaccccatactt

SEQ ID NO: 3436546 - DNA, 25 bp, Homo sapien
catacttcccgccgaatcctttgga

SEQ ID NO: 3436547 - DNA, 25 bp, Homo sapien
cttatccatccgatccttctgcacc

SEQ ID NO: 3436548 - DNA, 25 bp, Homo sapien
tgcaggcagaagacactaagctccg

SEQ ID NO: 3436549 - DNA, 25 bp, Homo sapien
caggcagaagacactaagctccggg

SEQ ID NO: 3436550 - DNA, 25 bp, Homo sapien
gcaggcagaagacactaagctccgg

SEQ ID NO: 3436551 - DNA, 25 bp, Homo sapien
gacatgggcgtcaggagagcacttt

SEQ ID NO: 3436552 - DNA, 25 bp, Homo sapien
gagacaggacatgggcgtcaggaga

SEQ ID NO: 3436553 - DNA, 25 bp, Homo sapien
gggcgtcaggagagcacttttctct

SEQ ID NO: 3436554 - DNA, 25 bp, Homo sapien
catgggcgtcaggagagcacttttc

SEQ ID NO: 3436555 - DNA, 25 bp, Homo sapien
cagcttcgacaggtactgtcttctg

SEQ ID NO: 3436556 - DNA, 25 bp, Homo sapien
cacctgggtgacatcctcaaaggtt

SEQ ID NO: 3436557 - DNA, 25 bp, Homo sapien
acctgggtgacatcctcaaaggttg

SEQ ID NO: 3436558 - DNA, 25 bp, Homo sapien
tgctctttctccttagcgaggtttt

SEQ ID NO: 3436559 - DNA, 25 bp, Homo sapien
aaagttagctctgatgttacttgtt

SEQ ID NO: 3436560 - DNA, 25 bp, Homo sapien
atccgctgggctctctccgcctccg

SEQ ID NO: 3436561 - DNA, 25 bp, Homo sapien
tctttctccttagcgaggttttcaa

SEQ ID NO: 3436562 - DNA, 25 bp, Homo sapien
cacagggggcgtttgcgttttggct

SEQ ID NO: 3436563 - DNA, 25 bp, Homo sapien
tcatagacggggctcgagggcagcc

SEQ ID NO: 3436564 - DNA, 25 bp, Homo sapien
tgcgggcgacacagggggcgtttgc

SEQ ID NO: 3436565 - DNA, 25 bp, Homo sapien
ggcagcctctcctcggttggctgag

SEQ ID NO: 3436566 - DNA, 25 bp, Homo sapien
gggctcctgaactaccatggtctgg

SEQ ID NO: 3436567 - DNA, 25 bp, Homo sapien
taactgactggctcctgggcgagca

SEQ ID NO: 3436568 - DNA, 25 bp, Homo sapien
gcaggcggctccgtaactcagggat

SEQ ID NO: 3436569 - DNA, 25 bp, Homo sapien
cagagatgaatgcatagaccaggat

SEQ ID NO: 3436570 - DNA, 25 bp, Homo sapien
aaacagacgcggtataggaaggcca

SEQ ID NO: 3436571 - DNA, 25 bp, Homo sapien
caactacaaaggtgcgcagtggaac

SEQ ID NO: 3436572 - DNA, 25 bp, Homo sapien
ggtccacctgatgtcaccggcagtg

SEQ ID NO: 3436573 - DNA, 25 bp, Homo sapien
tatctataaccactgccgcttcgga

SEQ ID NO: 3436574 - DNA, 25 bp, Homo sapien
ctttcatagacagcctctgtggcat

SEQ ID NO: 3436575 - DNA, 25 bp, Homo sapien
gcgctttcatagacagcctctgtgg

SEQ ID NO: 3436576 - DNA, 25 bp, Homo sapien
gctgctggcctctcggtagtcagcg

SEQ ID NO: 3436577 - DNA, 25 bp, Homo sapien
tagtcagcggcctccatgctgtaca

SEQ ID NO: 3436578 - DNA, 25 bp, Homo sapien
tcgcaacgacgccacaggtcgagca

SEQ ID NO: 3436579 - DNA, 25 bp, Homo sapien
aacgacgccacaggtcgagcaggat

SEQ ID NO: 3436580 - DNA, 25 bp, Homo sapien
cgacgccacaggtcgagcaggatgt

SEQ ID NO: 3436581 - DNA, 25 bp, Homo sapien
gctcctcgcaacgacgccacaggtc

SEQ ID NO: 3436582 - DNA, 25 bp, Homo sapien
ccagccttctcaagttttagacgac

SEQ ID NO: 3436583 - DNA, 25 bp, Homo sapien
ctaaaagaaagccatgacagagctg

SEQ ID NO: 3436584 - DNA, 25 bp, Homo sapien
aacaatacaaagtcccacacaggtt

SEQ ID NO: 3436585 - DNA, 25 bp, Homo sapien
atacaaagtcccacacaggttccca

SEQ ID NO: 3436586 - DNA, 25 bp, Homo sapien
gatccccagatcgttctcgtactca

SEQ ID NO: 3436587 - DNA, 25 bp, Homo sapien
gcgacggctgtgatccccagatcgt

SEQ ID NO: 3436588 - DNA, 25 bp, Homo sapien
tcgtacagggcgacggctgtgatcc

SEQ ID NO: 3436589 - DNA, 25 bp, Homo sapien
tcgtactcatcgtaggtgctgtcct

SEQ ID NO: 3436590 - DNA, 25 bp, Homo sapien
taaaactaacaacgctagagaagtg

SEQ ID NO: 3436591 - DNA, 25 bp, Homo sapien
ggagttcttggcactatacctgcaa

SEQ ID NO: 3436592 - DNA, 25 bp, Homo sapien
ttaaactgccaaggccgcaaaggga

SEQ ID NO: 3436593 - DNA, 25 bp, Homo sapien
gggtctcgaacatcaaggcatctgt

SEQ ID NO: 3436594 - DNA, 25 bp, Homo sapien
accagccgtcgtcaatcatctcgat

SEQ ID NO: 3436595 - DNA, 25 bp, Homo sapien
tcaaatgagatctcatcatcgcccg

SEQ ID NO: 3436596 - DNA, 25 bp, Homo sapien
atcagggtcaaatgagatctcatca

SEQ ID NO: 3436597 - DNA, 25 bp, Homo sapien
caatcatctcgatgttggtgatgat

SEQ ID NO: 3436598 - DNA, 25 bp, Homo sapien
agctccacatagttggctgggaaga

SEQ ID NO: 3436599 - DNA, 25 bp, Homo sapien
ccacatagttggctgggaagagccc

SEQ ID NO: 3436600 - DNA, 25 bp, Homo sapien
atagttggctgggaagagcccgtac

SEQ ID NO: 3436601 - DNA, 25 bp, Homo sapien
acatagttggctgggaagagcccgt

SEQ ID NO: 3436602 - DNA, 25 bp, Homo sapien
taccaaagtcctcctaaggaatgtg

SEQ ID NO: 3436603 - DNA, 25 bp, Homo sapien
aattctgtggcataaacattttcaa

SEQ ID NO: 3436604 - DNA, 25 bp, Homo sapien
cctgatctgtagtgtgaggatccag

SEQ ID NO: 3436605 - DNA, 25 bp, Homo sapien
aagaaccaaagaaggcctgatctgt

SEQ ID NO: 3436606 - DNA, 25 bp, Homo sapien
gccgcgtgacagtcaatttggcaaa

SEQ ID NO: 3436607 - DNA, 25 bp, Homo sapien
tgccgcgtgacagtcaatttggcaa

SEQ ID NO: 3436608 - DNA, 25 bp, Homo sapien
ctgccgcgtgacagtcaatttggca

SEQ ID NO: 3436609 - DNA, 25 bp, Homo sapien
ccgcgtgacagtcaatttggcaaaa

SEQ ID NO: 3436610 - DNA, 25 bp, Homo sapien
tctgggtgacttagctccgggttaa

SEQ ID NO: 3436611 - DNA, 25 bp, Homo sapien
gaacacaagagaatgcgagctccct

SEQ ID NO: 3436612 - DNA, 25 bp, Homo sapien
tagaggaagcccctcgtctgggaca

SEQ ID NO: 3436613 - DNA, 25 bp, Homo sapien
actgcacttgatgggcacgagggca

SEQ ID NO: 3436614 - DNA, 25 bp, Homo sapien
gaggacaagccggagtgggcacagg

SEQ ID NO: 3436615 - DNA, 25 bp, Homo sapien
agatgaggacaagccggagtgggca

SEQ ID NO: 3436616 - DNA, 25 bp, Homo sapien
gtagagatgaggacaagccggagtg

SEQ ID NO: 3436617 - DNA, 25 bp, Homo sapien
acaagccggagtgggcacaggaaaa

SEQ ID NO: 3436618 - DNA, 25 bp, Homo sapien
actcagtgacactgcccggcgggga

SEQ ID NO: 3436619 - DNA, 25 bp, Homo sapien
ctcagtgacactgcccggcggggac

SEQ ID NO: 3436620 - DNA, 25 bp, Homo sapien
tcagtgacactgcccggcggggaca

SEQ ID NO: 3436621 - DNA, 25 bp, Homo sapien
gactcagtgacactgcccggcgggg

SEQ ID NO: 3436622 - DNA, 25 bp, Homo sapien
gggaagaacacacactcatctgcac

SEQ ID NO: 3436623 - DNA, 25 bp, Homo sapien
ccatatgggtgacagttaagacatc

SEQ ID NO: 3436624 - DNA, 25 bp, Homo sapien
cacaaatgccaggacagcggtgtcc

SEQ ID NO: 3436625 - DNA, 25 bp, Homo sapien
tacaaagtgagtggccacaaatgcc

SEQ ID NO: 3436626 - DNA, 25 bp, Homo sapien
ccacctgactgcacgacgggactgg

SEQ ID NO: 3436627 - DNA, 25 bp, Homo sapien
ccgagacatttccacgtgaccttct

SEQ ID NO: 3436628 - DNA, 25 bp, Homo sapien
ctccgggacccaagtcccgagacat

SEQ ID NO: 3436629 - DNA, 25 bp, Homo sapien
ctgcacgacgggactggtccagcct

SEQ ID NO: 3436630 - DNA, 25 bp, Homo sapien
tggtaaagcaaggatgatgagaaaa

SEQ ID NO: 3436631 - DNA, 25 bp, Homo sapien
cctcattgctcattgtggtaaagca

SEQ ID NO: 3436632 - DNA, 25 bp, Homo sapien
tcatacctatgaggtgtgctacagg

SEQ ID NO: 3436633 - DNA, 25 bp, Homo sapien
taagttgcatataaaacccgacctc

SEQ ID NO: 3436634 - DNA, 25 bp, Homo sapien
ctgctgaaggagtgaaggacacacc

SEQ ID NO: 3436635 - DNA, 25 bp, Homo sapien
ccccagtatgccagattggtatatc

SEQ ID NO: 3436636 - DNA, 25 bp, Homo sapien
taaactgagagctgagtcgtgcaag

SEQ ID NO: 3436637 - DNA, 25 bp, Homo sapien
tatcgattacgtgaaaggaaaagaa

SEQ ID NO: 3436638 - DNA, 25 bp, Homo sapien
ggctttctgcaggtgtacccaacag

SEQ ID NO: 3436639 - DNA, 25 bp, Homo sapien
gacaggctttctgcaggtgtaccca

SEQ ID NO: 3436640 - DNA, 25 bp, Homo sapien
gtgacaggctttctgcaggtgtacc

SEQ ID NO: 3436641 - DNA, 25 bp, Homo sapien
caggctttctgcaggtgtacccaac

SEQ ID NO: 3436642 - DNA, 25 bp, Homo sapien
tatcagggcaactctcgggtgctcg

SEQ ID NO: 3436643 - DNA, 25 bp, Homo sapien
gcaaatgctgtgatgaacgcccaag

SEQ ID NO: 3436644 - DNA, 25 bp, Homo sapien
tagtcaacagtgtagcctggcgatg

SEQ ID NO: 3436645 - DNA, 25 bp, Homo sapien
gggcccgtggctttgttagtcaaca

SEQ ID NO: 3436646 - DNA, 25 bp, Homo sapien
gcaggatgcagccacccacggccgc

SEQ ID NO: 3436647 - DNA, 25 bp, Homo sapien
aagcaggatgcagccacccacggcc

SEQ ID NO: 3436648 - DNA, 25 bp, Homo sapien
aggatgcagccacccacggccgcca

SEQ ID NO: 3436649 - DNA, 25 bp, Homo sapien
ccaggtcccaagcaggatgcagcca

SEQ ID NO: 3436650 - DNA, 25 bp, Homo sapien
ggcccaggcgcgttccttggagcct

SEQ ID NO: 3436651 - DNA, 25 bp, Homo sapien
ctcaaaggcccaactcgaggaaggg

SEQ ID NO: 3436652 - DNA, 25 bp, Homo sapien
aacactaatggctcaaggccgccgc

SEQ ID NO: 3436653 - DNA, 25 bp, Homo sapien
tctcgcctgtcattaagacttcagc

SEQ ID NO: 3436654 - DNA, 25 bp, Homo sapien
tagccccccacgatgatgatgtgtt

SEQ ID NO: 3436655 - DNA, 25 bp, Homo sapien
gccccccacgatgatgatgtgtttt

SEQ ID NO: 3436656 - DNA, 25 bp, Homo sapien
agccccccacgatgatgatgtgttt

SEQ ID NO: 3436657 - DNA, 25 bp, Homo sapien
ctagccccccacgatgatgatgtgt

SEQ ID NO: 3436658 - DNA, 25 bp, Homo sapien
tctctcatcgagtaaacaggctcct

SEQ ID NO: 3436659 - DNA, 25 bp, Homo sapien
taaacaaaaagctgcccgacttgca

SEQ ID NO: 3436660 - DNA, 25 bp, Homo sapien
tgtcactgagctaatctgccttggt

SEQ ID NO: 3436661 - DNA, 25 bp, Homo sapien
gtagattatctcaggcattgtggcc

SEQ ID NO: 3436662 - DNA, 25 bp, Homo sapien
cccctctttaatggtggaacaaatg

SEQ ID NO: 3436663 - DNA, 25 bp, Homo sapien
tccagggtgtctgcgcacattttaa

SEQ ID NO: 3436664 - DNA, 25 bp, Homo sapien
ctttgggacatgttaggacgaggcc

SEQ ID NO: 3436665 - DNA, 25 bp, Homo sapien
gtaaattatgtatacctgccaagat

SEQ ID NO: 3436666 - DNA, 25 bp, Homo sapien
gccacttcagtgctagaaagttaaa

SEQ ID NO: 3436667 - DNA, 25 bp, Homo sapien
actaggcagcctttgtgccacttca

SEQ ID NO: 3436668 - DNA, 25 bp, Homo sapien
tgtacagatagtttataagcacaat

SEQ ID NO: 3436669 - DNA, 25 bp, Homo sapien
aaaagtggctggtctactaggcagc

SEQ ID NO: 3436670 - DNA, 25 bp, Homo sapien
gatatgcgtacagcacagtgtggct

SEQ ID NO: 3436671 - DNA, 25 bp, Homo sapien
tttttgaagaatctatagcaggagg

SEQ ID NO: 3436672 - DNA, 25 bp, Homo sapien
gcacacaggctttaagttttctgtt

SEQ ID NO: 3436673 - DNA, 25 bp, Homo sapien
gtttgtgggtataccagatgtttag

SEQ ID NO: 3436674 - DNA, 25 bp, Homo sapien
cctctgcagccgtctcgtaggtgac

SEQ ID NO: 3436675 - DNA, 25 bp, Homo sapien
tgagtacatgggaatgagccggtcc

SEQ ID NO: 3436676 - DNA, 25 bp, Homo sapien
ctgaaaccgggtgggtctgagtaca

SEQ ID NO: 3436677 - DNA, 25 bp, Homo sapien
gtgaccaaaactggcacatcctggg

SEQ ID NO: 3436678 - DNA, 25 bp, Homo sapien
tctgagctctcctgagcaggtcctg

SEQ ID NO: 3436679 - DNA, 25 bp, Homo sapien
gccatttgctgcagtctgctgaggg

SEQ ID NO: 3436680 - DNA, 25 bp, Homo sapien
gcaggtcctgccatttgctgcagtc

SEQ ID NO: 3436681 - DNA, 25 bp, Homo sapien
ctctgagctctcctgagcaggtcct

SEQ ID NO: 3436682 - DNA, 25 bp, Homo sapien
ctgtggcacactgtcacggcctgtg

SEQ ID NO: 3436683 - DNA, 25 bp, Homo sapien
gtgccctctcggcagaatctaaacc

SEQ ID NO: 3436684 - DNA, 25 bp, Homo sapien
ctgtcctgggcctgtatgatagagg

SEQ ID NO: 3436685 - DNA, 25 bp, Homo sapien
cctgtatgatagaggttcctgtggc

SEQ ID NO: 3436686 - DNA, 25 bp, Homo sapien
ggcctttgcatgccagagctgcctc

SEQ ID NO: 3436687 - DNA, 25 bp, Homo sapien
ggctgtggcctttgcatgccagagc

SEQ ID NO: 3436688 - DNA, 25 bp, Homo sapien
gctgtggcctttgcatgccagagct

SEQ ID NO: 3436689 - DNA, 25 bp, Homo sapien
agccatgtgcctttgccccactctt

SEQ ID NO: 3436690 - DNA, 25 bp, Homo sapien
ccttgagccttgttgtcaaagtgct

SEQ ID NO: 3436691 - DNA, 25 bp, Homo sapien
gcgctggggcacactccgttggcat

SEQ ID NO: 3436692 - DNA, 25 bp, Homo sapien
tcccatagaagtgttgatgggcgct

SEQ ID NO: 3436693 - DNA, 25 bp, Homo sapien
ccacacagttgagaagccaatattg

SEQ ID NO: 3436694 - DNA, 25 bp, Homo sapien
aatgagtgaaaagtaccgacttgcc

SEQ ID NO: 3436695 - DNA, 25 bp, Homo sapien
aaaaacttgtagaaatgagcctctt

SEQ ID NO: 3436696 - DNA, 25 bp, Homo sapien
ggcttgtcaattgtagcaaatgtcc

SEQ ID NO: 3436697 - DNA, 25 bp, Homo sapien
gggtaccaccagagagctttctagt

SEQ ID NO: 3436698 - DNA, 25 bp, Homo sapien
agaggttaagccgtgcattcagcca

SEQ ID NO: 3436699 - DNA, 25 bp, Homo sapien
tacagtcagaatcacgtggcggaac

SEQ ID NO: 3436700 - DNA, 25 bp, Homo sapien
gaattaatgagaaccctgcacgtgc

SEQ ID NO: 3436701 - DNA, 25 bp, Homo sapien
tggtcgtgtaggaagcgttgaggac

SEQ ID NO: 3436702 - DNA, 25 bp, Homo sapien
ggcggttggcatacctctgagacga

SEQ ID NO: 3436703 - DNA, 25 bp, Homo sapien
ggagggtctgggatgtggtcgtgta

SEQ ID NO: 3436704 - DNA, 25 bp, Homo sapien
gaagcgttgaggactgggagcgtct

SEQ ID NO: 3436705 - DNA, 25 bp, Homo sapien
ggcaaggtctgggtcgcccggtgaa

SEQ ID NO: 3436706 - DNA, 25 bp, Homo sapien
ctgggtcgcccggtgaaggagcatg

SEQ ID NO: 3436707 - DNA, 25 bp, Homo sapien
tcgcccggtgaaggagcatgggcgg

SEQ ID NO: 3436708 - DNA, 25 bp, Homo sapien
ccggtgaaggagcatgggcgggagt

SEQ ID NO: 3436709 - DNA, 25 bp, Homo sapien
cttctgccttgtcgtctgggtccgg

SEQ ID NO: 3436710 - DNA, 25 bp, Homo sapien
tctgccttgtcgtctgggtccggat

SEQ ID NO: 3436711 - DNA, 25 bp, Homo sapien
gccttgtcgtctgggtccggatcat

SEQ ID NO: 3436712 - DNA, 25 bp, Homo sapien
tgccttgtcgtctgggtccggatca

SEQ ID NO: 3436713 - DNA, 25 bp, Homo sapien
gatgctcggttggtttctgcgccgc

SEQ ID NO: 3436714 - DNA, 25 bp, Homo sapien
gctcggttggtttctgcgccgccat

SEQ ID NO: 3436715 - DNA, 25 bp, Homo sapien
ctgatgctcggttggtttctgcgcc

SEQ ID NO: 3436716 - DNA, 25 bp, Homo sapien
cggttggtttctgcgccgccatcct

SEQ ID NO: 3436717 - DNA, 25 bp, Homo sapien
gggctggcagcatcacgccgaggtg

SEQ ID NO: 3436718 - DNA, 25 bp, Homo sapien
ctggcagcatcacgccgaggtgcac

SEQ ID NO: 3436719 - DNA, 25 bp, Homo sapien
tggggctggcagcatcacgccgagg

SEQ ID NO: 3436720 - DNA, 25 bp, Homo sapien
gctggcagcatcacgccgaggtgca

SEQ ID NO: 3436721 - DNA, 25 bp, Homo sapien
cggggtctcggcctctcggcctgcc

SEQ ID NO: 3436722 - DNA, 25 bp, Homo sapien
ctggggacggggtctcggcctctcg

SEQ ID NO: 3436723 - DNA, 25 bp, Homo sapien
gggtctcggcctctcggcctgccag

SEQ ID NO: 3436724 - DNA, 25 bp, Homo sapien
gtctcggcctctcggcctgccagat

SEQ ID NO: 3436725 - DNA, 25 bp, Homo sapien
tgatctcccccacggatgccgagga

SEQ ID NO: 3436726 - DNA, 25 bp, Homo sapien
gcgtaggtgatctcccccacggatg

SEQ ID NO: 3436727 - DNA, 25 bp, Homo sapien
ggatgccgaggacgcttccttcctt

SEQ ID NO: 3436728 - DNA, 25 bp, Homo sapien
cccacttggcgtaggtgatctcccc

SEQ ID NO: 3436729 - DNA, 25 bp, Homo sapien
ggctattcctactgttcccgccagg

SEQ ID NO: 3436730 - DNA, 25 bp, Homo sapien
cgtgtcctagctggctcgtgcctgc

SEQ ID NO: 3436731 - DNA, 25 bp, Homo sapien
cctgctacctgcagaggtgactggc

SEQ ID NO: 3436732 - DNA, 25 bp, Homo sapien
cagccagctgtccattttcttgatg

SEQ ID NO: 3436733 - DNA, 25 bp, Homo sapien
cacccggatgctggcaacccctgcc

SEQ ID NO: 3436734 - DNA, 25 bp, Homo sapien
caggggtggccagtgtctgggcaca

SEQ ID NO: 3436735 - DNA, 25 bp, Homo sapien
ggatgctggcaacccctgccggcca

SEQ ID NO: 3436736 - DNA, 25 bp, Homo sapien
ggtggccagtgtctgggcacagccc

SEQ ID NO: 3436737 - DNA, 25 bp, Homo sapien
cctccgtcctgagacacgtgtgtaa

SEQ ID NO: 3436738 - DNA, 25 bp, Homo sapien
gacgactagaggcttccggaactgg

SEQ ID NO: 3436739 - DNA, 25 bp, Homo sapien
gagccacaggtttaatgacgcccag

SEQ ID NO: 3436740 - DNA, 25 bp, Homo sapien
taaggaaaacgtcccgatgcagctg

SEQ ID NO: 3436741 - DNA, 25 bp, Homo sapien
gcaagaccgacatcaagctctggaa

SEQ ID NO: 3436742 - DNA, 25 bp, Homo sapien
cagactgtgggaatcttggaggaca

SEQ ID NO: 3436743 - DNA, 25 bp, Homo sapien
tgtccgttggaaacgtgcaggccca

SEQ ID NO: 3436744 - DNA, 25 bp, Homo sapien
tgtgcatgaagaaagccgcttgtcc

SEQ ID NO: 3436745 - DNA, 25 bp, Homo sapien
tatccctgtcctgcgagggtgcagt

SEQ ID NO: 3436746 - DNA, 25 bp, Homo sapien
gcagaagcttcagggtagaccatgg

SEQ ID NO: 3436747 - DNA, 25 bp, Homo sapien
actcagagtggaaagtcttggcaac

SEQ ID NO: 3436748 - DNA, 25 bp, Homo sapien
gactgtggtcccagccctggatttg

SEQ ID NO: 3436749 - DNA, 25 bp, Homo sapien
tttgttgcccgtctcctcgctgagt

SEQ ID NO: 3436750 - DNA, 25 bp, Homo sapien
gaatagctcagtccatttgacgtgt

SEQ ID NO: 3436751 - DNA, 25 bp, Homo sapien
tttcactggatccattgcaggcagg

SEQ ID NO: 3436752 - DNA, 25 bp, Homo sapien
aatacatagggtgtctgcagcttcc

SEQ ID NO: 3436753 - DNA, 25 bp, Homo sapien
caggagtggggcctgcatgctgcat

SEQ ID NO: 3436754 - DNA, 25 bp, Homo sapien
taagtccagcggcaggagtggggcc

SEQ ID NO: 3436755 - DNA, 25 bp, Homo sapien
tcactgtaagtccagcggcaggagt

SEQ ID NO: 3436756 - DNA, 25 bp, Homo sapien
ggagtggggcctgcatgctgcatgc

SEQ ID NO: 3436757 - DNA, 25 bp, Homo sapien
taagtgtgccttgaagtcttcggtg

SEQ ID NO: 3436758 - DNA, 25 bp, Homo sapien
gagaaactggcatagcgccatccgc

SEQ ID NO: 3436759 - DNA, 25 bp, Homo sapien
gaacataaaagtggccgttggctga

SEQ ID NO: 3436760 - DNA, 25 bp, Homo sapien
ccatgtttggagaaggacccgggct

SEQ ID NO: 3436761 - DNA, 25 bp, Homo sapien
ttgatggctgcgtagaatgccccag

SEQ ID NO: 3436762 - DNA, 25 bp, Homo sapien
tgcctttgatggctgcgtagaatgc

SEQ ID NO: 3436763 - DNA, 25 bp, Homo sapien
atattttttcctgtcggtaagcact

SEQ ID NO: 3436764 - DNA, 25 bp, Homo sapien
tattttttcctgtcggtaagcactg

SEQ ID NO: 3436765 - DNA, 25 bp, Homo sapien
ggtagagtgaggaggccggcggtca

SEQ ID NO: 3436766 - DNA, 25 bp, Homo sapien
gaagacggagcaggtagagtgagga

SEQ ID NO: 3436767 - DNA, 25 bp, Homo sapien
ggcggtcagcacacatcaattcaca

SEQ ID NO: 3436768 - DNA, 25 bp, Homo sapien
aggaggccggcggtcagcacacatc

SEQ ID NO: 3436769 - DNA, 25 bp, Homo sapien
ggaccagcgacagctgcctctgtct

SEQ ID NO: 3436770 - DNA, 25 bp, Homo sapien
agctgcctctgtctttcccctgtcc

SEQ ID NO: 3436771 - DNA, 25 bp, Homo sapien
tgtcccctgggggaccagcgacagc

SEQ ID NO: 3436772 - DNA, 25 bp, Homo sapien
ggggaccagcgacagctgcctctgt

SEQ ID NO: 3436773 - DNA, 25 bp, Homo sapien
ttcgtgagtccctcctttcggcgag

SEQ ID NO: 3436774 - DNA, 25 bp, Homo sapien
tagctgcaggctcccttcgtgagtc

SEQ ID NO: 3436775 - DNA, 25 bp, Homo sapien
gggttgcatcacgtaggtgacaggc

SEQ ID NO: 3436776 - DNA, 25 bp, Homo sapien
tcggcgagggtttgctggacatctt

SEQ ID NO: 3436777 - DNA, 25 bp, Homo sapien
gtgagcctcataggcctcaggagcc

SEQ ID NO: 3436778 - DNA, 25 bp, Homo sapien
cagagggttgtctgggccagcgtgt

SEQ ID NO: 3436779 - DNA, 25 bp, Homo sapien
ccagcgtgtggttttcagagagagt

SEQ ID NO: 3436780 - DNA, 25 bp, Homo sapien
acagttcaccgtcgccttcgcagag

SEQ ID NO: 3436781 - DNA, 25 bp, Homo sapien
caaatccatggtgtggcaaagaggc

SEQ ID NO: 3436782 - DNA, 25 bp, Homo sapien
tggtgtggcaaagaggcaacccctt

SEQ ID NO: 3436783 - DNA, 25 bp, Homo sapien
ggcatctccacagttattatggggt

SEQ ID NO: 3436784 - DNA, 25 bp, Homo sapien
ccaggtttcctgtgtctactaagta

SEQ ID NO: 3436785 - DNA, 25 bp, Homo sapien
tgatttgtgtgcctactgagcaaag

SEQ ID NO: 3436786 - DNA, 25 bp, Homo sapien
gggacactggggatatgcctttctc

SEQ ID NO: 3436787 - DNA, 25 bp, Homo sapien
cagctgctggacagggtcagggtca

SEQ ID NO: 3436788 - DNA, 25 bp, Homo sapien
tctgggtttactgcagctgtggacc

SEQ ID NO: 3436789 - DNA, 25 bp, Homo sapien
gttctggagggtcctccacgtagct

SEQ ID NO: 3436790 - DNA, 25 bp, Homo sapien
catctgccatgtgcagatctgccag

SEQ ID NO: 3436791 - DNA, 25 bp, Homo sapien
tgccatgtgcagatctgccagagag

SEQ ID NO: 3436792 - DNA, 25 bp, Homo sapien
gagggtcctccacgtagctgtgtgc

SEQ ID NO: 3436793 - DNA, 25 bp, Homo sapien
ctgcagacacagacgacatgactgg

SEQ ID NO: 3436794 - DNA, 25 bp, Homo sapien
agctgcagacacagacgacatgact

SEQ ID NO: 3436795 - DNA, 25 bp, Homo sapien
gctgcagacacagacgacatgactg

SEQ ID NO: 3436796 - DNA, 25 bp, Homo sapien
atctgcagtacccagaccccggagc

SEQ ID NO: 3436797 - DNA, 25 bp, Homo sapien
cctgggcaatctgcagtacccagac

SEQ ID NO: 3436798 - DNA, 25 bp, Homo sapien
ggaggaaggcggatgtttccaggaa

SEQ ID NO: 3436799 - DNA, 25 bp, Homo sapien
cattcttcccagacctgaaaaggca

SEQ ID NO: 3436800 - DNA, 25 bp, Homo sapien
caaacaggccctagagccagtgtgt

SEQ ID NO: 3436801 - DNA, 25 bp, Homo sapien
cttgttctccttggacaagccaggg

SEQ ID NO: 3436802 - DNA, 25 bp, Homo sapien
ttcttccaagctgatctgctctgtt

SEQ ID NO: 3436803 - DNA, 25 bp, Homo sapien
cccagggagtaaatgctggcaaaca

SEQ ID NO: 3436804 - DNA, 25 bp, Homo sapien
acacagagcagagctggccactgcc

SEQ ID NO: 3436805 - DNA, 25 bp, Homo sapien
aacacagagcagagctggccactgc

SEQ ID NO: 3436806 - DNA, 25 bp, Homo sapien
acagagcagagctggccactgcctg

SEQ ID NO: 3436807 - DNA, 25 bp, Homo sapien
tcaacacagagcagagctggccact

SEQ ID NO: 3436808 - DNA, 25 bp, Homo sapien
ctgcttggaaaaccatcatccttgg

SEQ ID NO: 3436809 - DNA, 25 bp, Homo sapien
attcagggagagaagaacaaaggcc

SEQ ID NO: 3436810 - DNA, 25 bp, Homo sapien
tggaaaaccatcatccttggattca

SEQ ID NO: 3436811 - DNA, 25 bp, Homo sapien
agaacaaaggccagcagcctgtttc

SEQ ID NO: 3436812 - DNA, 25 bp, Homo sapien
tataaaacggagagtcgaggattac

SEQ ID NO: 3436813 - DNA, 25 bp, Homo sapien
tccgctggagccgatcagcagctct

SEQ ID NO: 3436814 - DNA, 25 bp, Homo sapien
agccccatgccgtgttctgtgctct

SEQ ID NO: 3436815 - DNA, 25 bp, Homo sapien
ggctggcattgtgccggctgcccca

SEQ ID NO: 3436816 - DNA, 25 bp, Homo sapien
tgggggcgcagccttcggggtgcat

SEQ ID NO: 3436817 - DNA, 25 bp, Homo sapien
ctgccatgggccgtgtcctcatcaa

SEQ ID NO: 3436818 - DNA, 25 bp, Homo sapien
cgtgtcctcatcaagggtgctgtgg

SEQ ID NO: 3436819 - DNA, 25 bp, Homo sapien
cgcagccttcggggtgcatctggct

SEQ ID NO: 3436820 - DNA, 25 bp, Homo sapien
cagatttcctaaggtctgggcctca

SEQ ID NO: 3436821 - DNA, 25 bp, Homo sapien
tctgggtagtgaagcaccaacttga

SEQ ID NO: 3436822 - DNA, 25 bp, Homo sapien
actgctggacagtctgacagtgtga

SEQ ID NO: 3436823 - DNA, 25 bp, Homo sapien
cttgatccaaagagagagctaacct

SEQ ID NO: 3436824 - DNA, 25 bp, Homo sapien
tccactacagcaacagaggccagct

SEQ ID NO: 3436825 - DNA, 25 bp, Homo sapien
gctacaaggattggcctttcagagg

SEQ ID NO: 3436826 - DNA, 25 bp, Homo sapien
ctgaagagtgtcatgatgtggcttg

SEQ ID NO: 3436827 - DNA, 25 bp, Homo sapien
gacctttcagggctgctacaaggat

SEQ ID NO: 3436828 - DNA, 25 bp, Homo sapien
gtcctctgaagggctctcgctgctg

SEQ ID NO: 3436829 - DNA, 25 bp, Homo sapien
ttagaaaagtcagctctcctgttcc

SEQ ID NO: 3436830 - DNA, 25 bp, Homo sapien
ctgttcctaaggcctcctggatggg

SEQ ID NO: 3436831 - DNA, 25 bp, Homo sapien
tgggagttcgcgtttcgcggtcctc

SEQ ID NO: 3436832 - DNA, 25 bp, Homo sapien
atttcagacgcccagacttggagct

SEQ ID NO: 3436833 - DNA, 25 bp, Homo sapien
tgttttccaagacgggcgcagatgg

SEQ ID NO: 3436834 - DNA, 25 bp, Homo sapien
caattacacagcagatttcagacgc

SEQ ID NO: 3436835 - DNA, 25 bp, Homo sapien
gggccgggcgtgatccaattacaca

SEQ ID NO: 3436836 - DNA, 25 bp, Homo sapien
ctcatgcgcccttttctggttggct

SEQ ID NO: 3436837 - DNA, 25 bp, Homo sapien
cctcatgcgcccttttctggttggc

SEQ ID NO: 3436838 - DNA, 25 bp, Homo sapien
catccaccgagtgctcagggcgggt

SEQ ID NO: 3436839 - DNA, 25 bp, Homo sapien
agtcccagcatccaccgagtgctca

SEQ ID NO: 3436840 - DNA, 25 bp, Homo sapien
tgcagcgctgttaatgttgggccca

SEQ ID NO: 3436841 - DNA, 25 bp, Homo sapien
taccatgaatagtgctgccaccgtg

SEQ ID NO: 3436842 - DNA, 25 bp, Homo sapien
cacggtggtgactttgacccaggac

SEQ ID NO: 3436843 - DNA, 25 bp, Homo sapien
aaatggaggtgagctcttgcagcgc

SEQ ID NO: 3436844 - DNA, 25 bp, Homo sapien
tgaattgatggacagagcggaagcc

SEQ ID NO: 3436845 - DNA, 25 bp, Homo sapien
ctgaattgatggacagagcggaagc

SEQ ID NO: 3436846 - DNA, 25 bp, Homo sapien
aattgatggacagagcggaagccgg

SEQ ID NO: 3436847 - DNA, 25 bp, Homo sapien
ttgatggacagagcggaagccggct

SEQ ID NO: 3436848 - DNA, 25 bp, Homo sapien
gggctcttgagcattccccgagaac

SEQ ID NO: 3436849 - DNA, 25 bp, Homo sapien
tggcatggggctcttgagcattccc

SEQ ID NO: 3436850 - DNA, 25 bp, Homo sapien
tccccgagaacctgtgctcagtggg

SEQ ID NO: 3436851 - DNA, 25 bp, Homo sapien
tgagcattccccgagaacctgtgct

SEQ ID NO: 3436852 - DNA, 25 bp, Homo sapien
tttgggtttcatatcctggcagcac

SEQ ID NO: 3436853 - DNA, 25 bp, Homo sapien
cagtccgtggtctcattctatgccg

SEQ ID NO: 3436854 - DNA, 25 bp, Homo sapien
tgcagggttccgtgacaatagaagc

SEQ ID NO: 3436855 - DNA, 25 bp, Homo sapien
gctctgagcagtgcagtgacgatta

SEQ ID NO: 3436856 - DNA, 25 bp, Homo sapien
gcagggcgccgagcacatcctgcag

SEQ ID NO: 3436857 - DNA, 25 bp, Homo sapien
cggattttccggtgcatctgttgac

SEQ ID NO: 3436858 - DNA, 25 bp, Homo sapien
gcagactaaagaaaatagggcttcc

SEQ ID NO: 3436859 - DNA, 25 bp, Homo sapien
tttattattgtacaagaaatgctga

SEQ ID NO: 3436860 - DNA, 25 bp, Homo sapien
tgctccttggtcctcggctgttaca

SEQ ID NO: 3436861 - DNA, 25 bp, Homo sapien
tccttatgtctgagacctagcccct

SEQ ID NO: 3436862 - DNA, 25 bp, Homo sapien
cctgggtccactgatgtcccaatcc

SEQ ID NO: 3436863 - DNA, 25 bp, Homo sapien
cttatgtctgagacctagccccttc

SEQ ID NO: 3436864 - DNA, 25 bp, Homo sapien
gggtccactgatgtcccaatcccag

SEQ ID NO: 3436865 - DNA, 25 bp, Homo sapien
cattggcgacacatcccagctgcac

SEQ ID NO: 3436866 - DNA, 25 bp, Homo sapien
aatgaccagaaactgagtggcctga

SEQ ID NO: 3436867 - DNA, 25 bp, Homo sapien
tggcctgagacaacagcgatgcgtt

SEQ ID NO: 3436868 - DNA, 25 bp, Homo sapien
tagctgtattcatgtcctgaggccg

SEQ ID NO: 3436869 - DNA, 25 bp, Homo sapien
gaggccgctgtcacaaatgaccaga

SEQ ID NO: 3436870 - DNA, 25 bp, Homo sapien
ggcacaggtgtcggtcttggcaaaa

SEQ ID NO: 3436871 - DNA, 25 bp, Homo sapien
ttctccacgtgtttgtctgaggcac

SEQ ID NO: 3436872 - DNA, 25 bp, Homo sapien
tctccacgtgtttgtctgaggcaca

SEQ ID NO: 3436873 - DNA, 25 bp, Homo sapien
cacaggtgtcggtcttggcaaaagg

SEQ ID NO: 3436874 - DNA, 25 bp, Homo sapien
accaagcacaggagatccaaacgct

SEQ ID NO: 3436875 - DNA, 25 bp, Homo sapien
aggagatccaaacgctgcccttgcc

SEQ ID NO: 3436876 - DNA, 25 bp, Homo sapien
tacactgaatgtcctgggtttgagg

SEQ ID NO: 3436877 - DNA, 25 bp, Homo sapien
caggctaccagcatgcgagttctgg

SEQ ID NO: 3436878 - DNA, 25 bp, Homo sapien
gaaacgatctttccagcctgaggct

SEQ ID NO: 3436879 - DNA, 25 bp, Homo sapien
gaagggaaacgatctttccagcctg

SEQ ID NO: 3436880 - DNA, 25 bp, Homo sapien
agggaaacgatctttccagcctgag

SEQ ID NO: 3436881 - DNA, 25 bp, Homo sapien
ctgggaagggaaacgatctttccag

SEQ ID NO: 3436882 - DNA, 25 bp, Homo sapien
gctcaggtgcgtctgacacagcctg

SEQ ID NO: 3436883 - DNA, 25 bp, Homo sapien
gagggctcaggtgcgtctgacacag

SEQ ID NO: 3436884 - DNA, 25 bp, Homo sapien
gcgtctgacacagcctgatggatga

SEQ ID NO: 3436885 - DNA, 25 bp, Homo sapien
ggtgcgtctgacacagcctgatgga

SEQ ID NO: 3436886 - DNA, 25 bp, Homo sapien
aggcggggtcttgcccaactggata

SEQ ID NO: 3436887 - DNA, 25 bp, Homo sapien
gagtggggactcacatacccacaga

SEQ ID NO: 3436888 - DNA, 25 bp, Homo sapien
tacccacagacacacggcgagtggt

SEQ ID NO: 3436889 - DNA, 25 bp, Homo sapien
ttccaagatccacgtatcacttccc

SEQ ID NO: 3436890 - DNA, 25 bp, Homo sapien
gcatcgtgtgctttaggttcatccg

SEQ ID NO: 3436891 - DNA, 25 bp, Homo sapien
ggcaaatactcatcccctctgggtc

SEQ ID NO: 3436892 - DNA, 25 bp, Homo sapien
gaatcatgctctaggcaaccttttg

SEQ ID NO: 3436893 - DNA, 25 bp, Homo sapien
catccgtatggtagcatgtgtccgt

SEQ ID NO: 3436894 - DNA, 25 bp, Homo sapien
ttggatcccttttctgcatgtggcc

SEQ ID NO: 3436895 - DNA, 25 bp, Homo sapien
cagctcggcaactgcaaatctgaag

SEQ ID NO: 3436896 - DNA, 25 bp, Homo sapien
gctctctgaggcttaatgcactgtg

SEQ ID NO: 3436897 - DNA, 25 bp, Homo sapien
ggcccaggaatcttgctgagaaggt

SEQ ID NO: 3436898 - DNA, 25 bp, Homo sapien
ctggtcttcggctgtgaagctatca

SEQ ID NO: 3436899 - DNA, 25 bp, Homo sapien
ggtcttcggctgtgaagctatcatt

SEQ ID NO: 3436900 - DNA, 25 bp, Homo sapien
tcttcggctgtgaagctatcattca

SEQ ID NO: 3436901 - DNA, 25 bp, Homo sapien
cttcggctgtgaagctatcattcat

SEQ ID NO: 3436902 - DNA, 25 bp, Homo sapien
agggaggcggtcaccctcagcagct

SEQ ID NO: 3436903 - DNA, 25 bp, Homo sapien
gggttcggcatcatccttccagggt

SEQ ID NO: 3436904 - DNA, 25 bp, Homo sapien
tcggcatcatccttccagggtttca

SEQ ID NO: 3436905 - DNA, 25 bp, Homo sapien
cagggaggcggtcaccctcagcagc

SEQ ID NO: 3436906 - DNA, 25 bp, Homo sapien
gtggccaagggtccggtcacaaaga

SEQ ID NO: 3436907 - DNA, 25 bp, Homo sapien
ctgtggccaagggtccggtcacaaa

SEQ ID NO: 3436908 - DNA, 25 bp, Homo sapien
gccaagggtccggtcacaaagacag

SEQ ID NO: 3436909 - DNA, 25 bp, Homo sapien
agggtccggtcacaaagacagggca

SEQ ID NO: 3436910 - DNA, 25 bp, Homo sapien
cattgggagacgcttcagcccccat

SEQ ID NO: 3436911 - DNA, 25 bp, Homo sapien
acctcattgggagacgcttcagccc

SEQ ID NO: 3436912 - DNA, 25 bp, Homo sapien
tcattgggagacgcttcagccccca

SEQ ID NO: 3436913 - DNA, 25 bp, Homo sapien
tttacctcattgggagacgcttcag

SEQ ID NO: 3436914 - DNA, 25 bp, Homo sapien
cagggaaagagagagaggctggggt

SEQ ID NO: 3436915 - DNA, 25 bp, Homo sapien
ggaaagagagagaggctggggtggc

SEQ ID NO: 3436916 - DNA, 25 bp, Homo sapien
aaagagagagaggctggggtggcat

SEQ ID NO: 3436917 - DNA, 25 bp, Homo sapien
agggaaagagagagaggctggggtg

SEQ ID NO: 3436918 - DNA, 25 bp, Homo sapien
ctgtgcaggagctgtttattcaggg

SEQ ID NO: 3436919 - DNA, 25 bp, Homo sapien
gaattctcctccagtgcgaatcctg

SEQ ID NO: 3436920 - DNA, 25 bp, Homo sapien
tcctgagccgcggagaaacatctct

SEQ ID NO: 3436921 - DNA, 25 bp, Homo sapien
ccagagaaggttaccgctgaggctg

SEQ ID NO: 3436922 - DNA, 25 bp, Homo sapien
tcctcacctttgcatttgagccaag

SEQ ID NO: 3436923 - DNA, 25 bp, Homo sapien
tttcccaaattatcctcacctttgc

SEQ ID NO: 3436924 - DNA, 25 bp, Homo sapien
agcattcccactgccaaaatgcaca

SEQ ID NO: 3436925 - DNA, 25 bp, Homo sapien
agccaagagggatctctggagtccc

SEQ ID NO: 3436926 - DNA, 25 bp, Homo sapien
cctccaagatgagtgaaggggagga

SEQ ID NO: 3436927 - DNA, 25 bp, Homo sapien
tctaatgcctggtataacagctggc

SEQ ID NO: 3436928 - DNA, 25 bp, Homo sapien
aggctggctcggtggtctaatgcct

SEQ ID NO: 3436929 - DNA, 25 bp, Homo sapien
ggagttggccccgtggagctctgag

SEQ ID NO: 3436930 - DNA, 25 bp, Homo sapien
ccagctgtctctgccacggccacac

SEQ ID NO: 3436931 - DNA, 25 bp, Homo sapien
tttgccagctgtctctgccacggcc

SEQ ID NO: 3436932 - DNA, 25 bp, Homo sapien
tgccagctgtctctgccacggccac

SEQ ID NO: 3436933 - DNA, 25 bp, Homo sapien
ctttgccagctgtctctgccacggc

SEQ ID NO: 3436934 - DNA, 25 bp, Homo sapien
ttcccacggccactgaggaggcgct

SEQ ID NO: 3436935 - DNA, 25 bp, Homo sapien
cggcagctcttaggccgttgtgaag

SEQ ID NO: 3436936 - DNA, 25 bp, Homo sapien
cagtaggggtcaaggccctgtcttc

SEQ ID NO: 3436937 - DNA, 25 bp, Homo sapien
tggtcacttgtcgtgcggcagctct

SEQ ID NO: 3436938 - DNA, 25 bp, Homo sapien
gcctgagcggcgtctgatttaaaac

SEQ ID NO: 3436939 - DNA, 25 bp, Homo sapien
ttcatccccatcagtaatttcttcc

SEQ ID NO: 3436940 - DNA, 25 bp, Homo sapien
ttatttcggtctttcatccccatca

SEQ ID NO: 3436941 - DNA, 25 bp, Homo sapien
tgatcccgcttttggctcagcagcc

SEQ ID NO: 3436942 - DNA, 25 bp, Homo sapien
atcacatcagaccacgggcagaagg

SEQ ID NO: 3436943 - DNA, 25 bp, Homo sapien
ggttaggttcagcatctgccaggcc

SEQ ID NO: 3436944 - DNA, 25 bp, Homo sapien
aaccaggatcccacgtaggtcaggg

SEQ ID NO: 3436945 - DNA, 25 bp, Homo sapien
tatgaccctccgatttgcccataga

SEQ ID NO: 3436946 - DNA, 25 bp, Homo sapien
tgtgagttcacgcataccctcctgg

SEQ ID NO: 3436947 - DNA, 25 bp, Homo sapien
tctgagaaactcagctgagcatgga

SEQ ID NO: 3436948 - DNA, 25 bp, Homo sapien
agaagcttacatggaggagagagct

SEQ ID NO: 3436949 - DNA, 25 bp, Homo sapien
agagctggtgctccgagttgagctc

SEQ ID NO: 3436950 - DNA, 25 bp, Homo sapien
tttgttgatgtaaatgtttgtgcac

SEQ ID NO: 3436951 - DNA, 25 bp, Homo sapien
ttgtgcacagaaactgaggacagcc

SEQ ID NO: 3436952 - DNA, 25 bp, Homo sapien
tgatgtaaatgtttgtgcacagaaa

SEQ ID NO: 3436953 - DNA, 25 bp, Homo sapien
agaaactgaggacagcccatggccc

SEQ ID NO: 3436954 - DNA, 25 bp, Homo sapien
ctaggtgttcgttgaaccaatgtac

SEQ ID NO: 3436955 - DNA, 25 bp, Homo sapien
gagctcggggaactccacagaagga

SEQ ID NO: 3436956 - DNA, 25 bp, Homo sapien
tgcttcaaagagctcggggaactcc

SEQ ID NO: 3436957 - DNA, 25 bp, Homo sapien
gaaggagattcacctgtgccagctc

SEQ ID NO: 3436958 - DNA, 25 bp, Homo sapien
ctgagcccagacacgggactggcct

SEQ ID NO: 3436959 - DNA, 25 bp, Homo sapien
gcttcatgggccttgtactctgttc

SEQ ID NO: 3436960 - DNA, 25 bp, Homo sapien
agcacagatgtgctacagccgccga

SEQ ID NO: 3436961 - DNA, 25 bp, Homo sapien
tatcctgccattcccagcttcatgg

SEQ ID NO: 3436962 - DNA, 25 bp, Homo sapien
agaagccacttcacccccagggaga

SEQ ID NO: 3436963 - DNA, 25 bp, Homo sapien
tgacaaaccgtttggttctggagaa

SEQ ID NO: 3436964 - DNA, 25 bp, Homo sapien
tcttgacaaaccgtttggttctgga

SEQ ID NO: 3436965 - DNA, 25 bp, Homo sapien
gaagccacttcacccccagggagat

SEQ ID NO: 3436966 - DNA, 25 bp, Homo sapien
cacggtactgctcggagccttgggc

SEQ ID NO: 3436967 - DNA, 25 bp, Homo sapien
gagccttgggcgtccaacttgtgac

SEQ ID NO: 3436968 - DNA, 25 bp, Homo sapien
actgctcggagccttgggcgtccaa

SEQ ID NO: 3436969 - DNA, 25 bp, Homo sapien
tcagccacggtactgctcggagcct

SEQ ID NO: 3436970 - DNA, 25 bp, Homo sapien
cagctttgtagattccggggacttc

SEQ ID NO: 3436971 - DNA, 25 bp, Homo sapien
tgggaatgcacttgctccccgcaca

SEQ ID NO: 3436972 - DNA, 25 bp, Homo sapien
catggggcagctttgtagattccgg

SEQ ID NO: 3436973 - DNA, 25 bp, Homo sapien
tccccgcacacgaggggcagtgatg

SEQ ID NO: 3436974 - DNA, 25 bp, Homo sapien
tccacacgattgtcttcattgtcca

SEQ ID NO: 3436975 - DNA, 25 bp, Homo sapien
ctgctccacacgattgtcttcattg

SEQ ID NO: 3436976 - DNA, 25 bp, Homo sapien
cacgattgtcttcattgtccacctc

SEQ ID NO: 3436977 - DNA, 25 bp, Homo sapien
gcagctgctccacacgattgtcttc

SEQ ID NO: 3436978 - DNA, 25 bp, Homo sapien
gaattggtggacagggaatgtagga

SEQ ID NO: 3436979 - DNA, 25 bp, Homo sapien
cagcagccgggtaggaaaggaggga

SEQ ID NO: 3436980 - DNA, 25 bp, Homo sapien
ctgagaaagaaagacgttttggagc

SEQ ID NO: 3436981 - DNA, 25 bp, Homo sapien
gaaagacgttttggagcctgaatcc

SEQ ID NO: 3436982 - DNA, 25 bp, Homo sapien
cactgcctaggcagggacaggtgtg

SEQ ID NO: 3436983 - DNA, 25 bp, Homo sapien
ttccagcactgcagtcctcatgcag

SEQ ID NO: 3436984 - DNA, 25 bp, Homo sapien
actgcagtcctcatgcaggaagatg

SEQ ID NO: 3436985 - DNA, 25 bp, Homo sapien
gcactgcagtcctcatgcaggaaga

SEQ ID NO: 3436986 - DNA, 25 bp, Homo sapien
cagcactgcagtcctcatgcaggaa

SEQ ID NO: 3436987 - DNA, 25 bp, Homo sapien
aaccggaagggatgatagttactgc

SEQ ID NO: 3436988 - DNA, 25 bp, Homo sapien
tctctctgacttagtaacgtgtagg

SEQ ID NO: 3436989 - DNA, 25 bp, Homo sapien
agtaacgtgtaggtcactgttaaga

SEQ ID NO: 3436990 - DNA, 25 bp, Homo sapien
gagggaaatctcctgcgttaaaaca

SEQ ID NO: 3436991 - DNA, 25 bp, Homo sapien
gggagcttcagaggtttgcaccagg

SEQ ID NO: 3436992 - DNA, 25 bp, Homo sapien
tgagggtcctgacaataatcctgac

SEQ ID NO: 3436993 - DNA, 25 bp, Homo sapien
ctctgagggtcctgacaataatcct

SEQ ID NO: 3436994 - DNA, 25 bp, Homo sapien
gagggtcctgacaataatcctgacc

SEQ ID NO: 3436995 - DNA, 25 bp, Homo sapien
aagtaagtaaattgcaagctgcttt

SEQ ID NO: 3436996 - DNA, 25 bp, Homo sapien
taagtaagtaaattgcaagctgctt

SEQ ID NO: 3436997 - DNA, 25 bp, Homo sapien
cgtgtggcatccatttctccccgaa

SEQ ID NO: 3436998 - DNA, 25 bp, Homo sapien
ctgtctgctccggtccagccttgag

SEQ ID NO: 3436999 - DNA, 25 bp, Homo sapien
accactgcgccgtgtggcatccatt

SEQ ID NO: 3437000 - DNA, 25 bp, Homo sapien
tgagctggtgctcgttcactggcac

SEQ ID NO: 3437001 - DNA, 25 bp, Homo sapien
gtgatggtgtaacaggaagggggct

SEQ ID NO: 3437002 - DNA, 25 bp, Homo sapien
tgtgagggggccgatctgtggatgg

SEQ ID NO: 3437003 - DNA, 25 bp, Homo sapien
tgagggggccgatctgtggatggtg

SEQ ID NO: 3437004 - DNA, 25 bp, Homo sapien
gagggggccgatctgtggatggtga

SEQ ID NO: 3437005 - DNA, 25 bp, Homo sapien
catagacagtcttcggttctgcaga

SEQ ID NO: 3437006 - DNA, 25 bp, Homo sapien
tggacagtgtagaaagaccccgctg

SEQ ID NO: 3437007 - DNA, 25 bp, Homo sapien
gttctgcagaaacgtcggccactct

SEQ ID NO: 3437008 - DNA, 25 bp, Homo sapien
caggtgttattgtcccggtggcaga

SEQ ID NO: 3437009 - DNA, 25 bp, Homo sapien
cagaattttcagtcgaggaagagac

SEQ ID NO: 3437010 - DNA, 25 bp, Homo sapien
gatcagctcattgtcggggccccag

SEQ ID NO: 3437011 - DNA, 25 bp, Homo sapien
cattctcatgggtacagctgctcca

SEQ ID NO: 3437012 - DNA, 25 bp, Homo sapien
tagggttggtgtcggttccagccac

SEQ ID NO: 3437013 - DNA, 25 bp, Homo sapien
cctgctggcacggtctccccttggg

SEQ ID NO: 3437014 - DNA, 25 bp, Homo sapien
ttcccgagcctcatggaggcacacg

SEQ ID NO: 3437015 - DNA, 25 bp, Homo sapien
catggaggcacacgatgaaagctcg

SEQ ID NO: 3437016 - DNA, 25 bp, Homo sapien
gatactgctggcctctcgggtcctg

SEQ ID NO: 3437017 - DNA, 25 bp, Homo sapien
tctgtacctgtgagctctgctagtg

SEQ ID NO: 3437018 - DNA, 25 bp, Homo sapien
aaggtgcgccgggtcacaactgtct

SEQ ID NO: 3437019 - DNA, 25 bp, Homo sapien
tagtgccacctttgtcctcagtgaa

SEQ ID NO: 3437020 - DNA, 25 bp, Homo sapien
tttgtcttcaatgaaacctgccagc

SEQ ID NO: 3437021 - DNA, 25 bp, Homo sapien
aaatataggtcgtgttcagaaattc

SEQ ID NO: 3437022 - DNA, 25 bp, Homo sapien
agtcatgggcacttgtgtctgattc

SEQ ID NO: 3437023 - DNA, 25 bp, Homo sapien
ttttgaacagaaatataggtcgtgt

SEQ ID NO: 3437024 - DNA, 25 bp, Homo sapien
gagccagagaagtcatgggcacttg

SEQ ID NO: 3437025 - DNA, 25 bp, Homo sapien
agcctcccagcgctcgccagccagg

SEQ ID NO: 3437026 - DNA, 25 bp, Homo sapien
ggacacggtggcatccccgtctcag

SEQ ID NO: 3437027 - DNA, 25 bp, Homo sapien
tacggacacggtggcatccccgtct

SEQ ID NO: 3437028 - DNA, 25 bp, Homo sapien
caatacggacacggtggcatccccg

SEQ ID NO: 3437029 - DNA, 25 bp, Homo sapien
tgagcacacgaccagccgggtcccc

SEQ ID NO: 3437030 - DNA, 25 bp, Homo sapien
ggctgagcacacgaccagccgggtc

SEQ ID NO: 3437031 - DNA, 25 bp, Homo sapien
ccttggaggagctccctgtacacac

SEQ ID NO: 3437032 - DNA, 25 bp, Homo sapien
gtggctgagcacacgaccagccggg

SEQ ID NO: 3437033 - DNA, 25 bp, Homo sapien
ctttgacatatttgacattggaggc

SEQ ID NO: 3437034 - DNA, 25 bp, Homo sapien
catatttgacattggaggcccccgt

SEQ ID NO: 3437035 - DNA, 25 bp, Homo sapien
atttgacattggaggcccccgtgag

SEQ ID NO: 3437036 - DNA, 25 bp, Homo sapien
gacatatttgacattggaggccccc

SEQ ID NO: 3437037 - DNA, 25 bp, Homo sapien
tgcgtggctcccgtccagaggttct

SEQ ID NO: 3437038 - DNA, 25 bp, Homo sapien
tgctgcgtggctcccgtccagaggt

SEQ ID NO: 3437039 - DNA, 25 bp, Homo sapien
tggctcccgtccagaggttctgggt

SEQ ID NO: 3437040 - DNA, 25 bp, Homo sapien
ttttctctggtttagatggggcagg

SEQ ID NO: 3437041 - DNA, 25 bp, Homo sapien
ccaggagcagctgctgcacacgcac

SEQ ID NO: 3437042 - DNA, 25 bp, Homo sapien
tccaggagcagctgctgcacacgca

SEQ ID NO: 3437043 - DNA, 25 bp, Homo sapien
ctccaggagcagctgctgcacacgc

SEQ ID NO: 3437044 - DNA, 25 bp, Homo sapien
ggagaatgcgaaccatctacctggg

SEQ ID NO: 3437045 - DNA, 25 bp, Homo sapien
ggtgagctcgtctcctgcaataacc

SEQ ID NO: 3437046 - DNA, 25 bp, Homo sapien
tgcagatggcaggagaatgcgaacc

SEQ ID NO: 3437047 - DNA, 25 bp, Homo sapien
tctgggtctccgtggcttggagggt

SEQ ID NO: 3437048 - DNA, 25 bp, Homo sapien
cacaagcctccagggtcgttgtagg

SEQ ID NO: 3437049 - DNA, 25 bp, Homo sapien
taaaacctcatctgcattcagtagg

SEQ ID NO: 3437050 - DNA, 25 bp, Homo sapien
tcagtaggaatgtggccggcacaag

SEQ ID NO: 3437051 - DNA, 25 bp, Homo sapien
tcgttgtaggccctccacgcaggac

SEQ ID NO: 3437052 - DNA, 25 bp, Homo sapien
cacactcgccggcttctgtgagttg

SEQ ID NO: 3437053 - DNA, 25 bp, Homo sapien
ggcccatgtgtctgatgggctcgaa

SEQ ID NO: 3437054 - DNA, 25 bp, Homo sapien
cgctggcaggagcttgacattgtgc

SEQ ID NO: 3437055 - DNA, 25 bp, Homo sapien
ttgacattgtgctggagccccgtgc

SEQ ID NO: 3437056 - DNA, 25 bp, Homo sapien
tcagggtcagaaaaccggtgagtag

SEQ ID NO: 3437057 - DNA, 25 bp, Homo sapien
aaccggtgagtagtatctcttggag

SEQ ID NO: 3437058 - DNA, 25 bp, Homo sapien
cctgtgggaggttccgacgcccgct

SEQ ID NO: 3437059 - DNA, 25 bp, Homo sapien
gttcttggccctaaagctcaattca

SEQ ID NO: 3437060 - DNA, 25 bp, Homo sapien
ctagtgcttgaatgtgtcctgagac

SEQ ID NO: 3437061 - DNA, 25 bp, Homo sapien
agtgcttgaatgtgtcctgagacac

SEQ ID NO: 3437062 - DNA, 25 bp, Homo sapien
cttgaatgtgtcctgagacacccag

SEQ ID NO: 3437063 - DNA, 25 bp, Homo sapien
tgcttgaatgtgtcctgagacaccc

SEQ ID NO: 3437064 - DNA, 25 bp, Homo sapien
ctctctcctttgacgtacccgccct

SEQ ID NO: 3437065 - DNA, 25 bp, Homo sapien
tgcgctggctgccggataccacggg

SEQ ID NO: 3437066 - DNA, 25 bp, Homo sapien
gtcccagcacatcctgttcccctct

SEQ ID NO: 3437067 - DNA, 25 bp, Homo sapien
ccctctctaccaggggggtgtgtgt

SEQ ID NO: 3437068 - DNA, 25 bp, Homo sapien
attctgcagtagctggctctagtgc

SEQ ID NO: 3437069 - DNA, 25 bp, Homo sapien
gattctgcagtagctggctctagtg

SEQ ID NO: 3437070 - DNA, 25 bp, Homo sapien
cccgattctgcagtagctggctcta

SEQ ID NO: 3437071 - DNA, 25 bp, Homo sapien
ccgattctgcagtagctggctctag

SEQ ID NO: 3437072 - DNA, 25 bp, Homo sapien
agaagtggcactgcatgcttgggtc

SEQ ID NO: 3437073 - DNA, 25 bp, Homo sapien
cagaagtggcactgcatgcttgggt

SEQ ID NO: 3437074 - DNA, 25 bp, Homo sapien
tggagaatcgtccacgaaggccgtg

SEQ ID NO: 3437075 - DNA, 25 bp, Homo sapien
atcgtccacgaaggccgtgtcccca

SEQ ID NO: 3437076 - DNA, 25 bp, Homo sapien
gaatcgtccacgaaggccgtgtccc

SEQ ID NO: 3437077 - DNA, 25 bp, Homo sapien
gagaatcgtccacgaaggccgtgtc

SEQ ID NO: 3437078 - DNA, 25 bp, Homo sapien
gtgaagggcagtgcccggcgtggag

SEQ ID NO: 3437079 - DNA, 25 bp, Homo sapien
tgtgtttccaactcctccactgcgg

SEQ ID NO: 3437080 - DNA, 25 bp, Homo sapien
cactgcggccccaaaccccatggtt

SEQ ID NO: 3437081 - DNA, 25 bp, Homo sapien
aaccccatggttccagtgagtttgt

SEQ ID NO: 3437082 - DNA, 25 bp, Homo sapien
tcatcaagtacagagtgggcaggag

SEQ ID NO: 3437083 - DNA, 25 bp, Homo sapien
gagtgggcaggagggacggcctccc

SEQ ID NO: 3437084 - DNA, 25 bp, Homo sapien
ctcatcaagtacagagtgggcagga

SEQ ID NO: 3437085 - DNA, 25 bp, Homo sapien
tgggcaggagggacggcctcccgcg

SEQ ID NO: 3437086 - DNA, 25 bp, Homo sapien
gcttgtcagctttggcgggaccttt

SEQ ID NO: 3437087 - DNA, 25 bp, Homo sapien
cgggacctttcactgtgtgggcctg

SEQ ID NO: 3437088 - DNA, 25 bp, Homo sapien
tttgccccctgtggtgcctgcttcc

SEQ ID NO: 3437089 - DNA, 25 bp, Homo sapien
gacctttcactgtgtgggcctgcat

SEQ ID NO: 3437090 - DNA, 25 bp, Homo sapien
ggctgccagcttggactgacagtgc

SEQ ID NO: 3437091 - DNA, 25 bp, Homo sapien
gtggctgccagcttggactgacagt

SEQ ID NO: 3437092 - DNA, 25 bp, Homo sapien
tggctgccagcttggactgacagtg

SEQ ID NO: 3437093 - DNA, 25 bp, Homo sapien
ctgcccagttgactactcccgtggg

SEQ ID NO: 3437094 - DNA, 25 bp, Homo sapien
tgactactcccgtgggggaatccca

SEQ ID NO: 3437095 - DNA, 25 bp, Homo sapien
ctccagtttactagactctagactg

SEQ ID NO: 3437096 - DNA, 25 bp, Homo sapien
ctgctgcccagttgactactcccgt

SEQ ID NO: 3437097 - DNA, 25 bp, Homo sapien
actgggcagttgtgccatcagctca

SEQ ID NO: 3437098 - DNA, 25 bp, Homo sapien
tgggcactgggcagttgtgccatca

SEQ ID NO: 3437099 - DNA, 25 bp, Homo sapien
ttgtgccatcagctcaggttctggt

SEQ ID NO: 3437100 - DNA, 25 bp, Homo sapien
gttgtgccatcagctcaggttctgg

SEQ ID NO: 3437101 - DNA, 25 bp, Homo sapien
cttggggctcgtccagacagggcca

SEQ ID NO: 3437102 - DNA, 25 bp, Homo sapien
atagccgtggccaggagttcacagg

SEQ ID NO: 3437103 - DNA, 25 bp, Homo sapien
cagggcaccgagcagaggatgcttg

SEQ ID NO: 3437104 - DNA, 25 bp, Homo sapien
aggatgaggtcgggctgtgttcggg

SEQ ID NO: 3437105 - DNA, 25 bp, Homo sapien
gcgagtcctagagataaggaaaacc

SEQ ID NO: 3437106 - DNA, 25 bp, Homo sapien
tgaggatttgcatgggagcaggtgg

SEQ ID NO: 3437107 - DNA, 25 bp, Homo sapien
gcaggtgggcgagtcctagagataa

SEQ ID NO: 3437108 - DNA, 25 bp, Homo sapien
ccccccacagaatccgtgtcttcca

SEQ ID NO: 3437109 - DNA, 25 bp, Homo sapien
ggctgtcgtcatcctcactcggttt

SEQ ID NO: 3437110 - DNA, 25 bp, Homo sapien
aggtggctgtcgtcatcctcactcg

SEQ ID NO: 3437111 - DNA, 25 bp, Homo sapien
tgtcgtcatcctcactcggtttctt

SEQ ID NO: 3437112 - DNA, 25 bp, Homo sapien
tggctgtcgtcatcctcactcggtt

SEQ ID NO: 3437113 - DNA, 25 bp, Homo sapien
gaggtcattaagcactgtcagggtc

SEQ ID NO: 3437114 - DNA, 25 bp, Homo sapien
tgaaaccagggtaccagagaactct

SEQ ID NO: 3437115 - DNA, 25 bp, Homo sapien
agaaacattctctcaccgttgtggg

SEQ ID NO: 3437116 - DNA, 25 bp, Homo sapien
gagaatcctccaagtcacaaggtga

SEQ ID NO: 3437117 - DNA, 25 bp, Homo sapien
agaaagtggagaccaccctaggcct

SEQ ID NO: 3437118 - DNA, 25 bp, Homo sapien
cctttccgacagaggcatctgcgcg

SEQ ID NO: 3437119 - DNA, 25 bp, Homo sapien
ggtgagagtctaatccagaaagtgg

SEQ ID NO: 3437120 - DNA, 25 bp, Homo sapien
catctgcgcgcggaattggtgacca

SEQ ID NO: 3437121 - DNA, 25 bp, Homo sapien
taattccacccaattatttgcccag

SEQ ID NO: 3437122 - DNA, 25 bp, Homo sapien
gacggcgtacattatttgcataatc

SEQ ID NO: 3437123 - DNA, 25 bp, Homo sapien
cagcgccgggcccttggtgacggcg

SEQ ID NO: 3437124 - DNA, 25 bp, Homo sapien
tgcataatcagcacgggtggacccg

SEQ ID NO: 3437125 - DNA, 25 bp, Homo sapien
ctggatgtggcttctaactgcagga

SEQ ID NO: 3437126 - DNA, 25 bp, Homo sapien
gatgtggcttctaactgcaggacgc

SEQ ID NO: 3437127 - DNA, 25 bp, Homo sapien
tggatgtggcttctaactgcaggac

SEQ ID NO: 3437128 - DNA, 25 bp, Homo sapien
gtggcttctaactgcaggacgccct

SEQ ID NO: 3437129 - DNA, 25 bp, Homo sapien
ctttgccgtgaaatatgaaagcctc

SEQ ID NO: 3437130 - DNA, 25 bp, Homo sapien
ccataggcagcaaggtgggacagac

SEQ ID NO: 3437131 - DNA, 25 bp, Homo sapien
ccgagcctggcttggtggagaggcc

SEQ ID NO: 3437132 - DNA, 25 bp, Homo sapien
gacagcctgccatgaaccaactggt

SEQ ID NO: 3437133 - DNA, 25 bp, Homo sapien
acatgccaagatgacacggtggtca

SEQ ID NO: 3437134 - DNA, 25 bp, Homo sapien
aggaagtatctgctggttatcaggt

SEQ ID NO: 3437135 - DNA, 25 bp, Homo sapien
ggaagtatctgctggttatcaggtt

SEQ ID NO: 3437136 - DNA, 25 bp, Homo sapien
agatgacacggtggtcaccgagccc

SEQ ID NO: 3437137 - DNA, 25 bp, Homo sapien
gactgagcacccagtgcggcagtaa

SEQ ID NO: 3437138 - DNA, 25 bp, Homo sapien
cacccagtgcggcagtaagtgacca

SEQ ID NO: 3437139 - DNA, 25 bp, Homo sapien
catcttccaacaacaccaccatgga

SEQ ID NO: 3437140 - DNA, 25 bp, Homo sapien
cagcggcgactgagcacccagtgcg

SEQ ID NO: 3437141 - DNA, 25 bp, Homo sapien
ctgtttggtattctaatcccatgag

SEQ ID NO: 3437142 - DNA, 25 bp, Homo sapien
tcccatgagatcgttgtaaacaata

SEQ ID NO: 3437143 - DNA, 25 bp, Homo sapien
tctaatcccatgagatcgttgtaaa

SEQ ID NO: 3437144 - DNA, 25 bp, Homo sapien
gtattctaatcccatgagatcgttg

SEQ ID NO: 3437145 - DNA, 25 bp, Homo sapien
agagatggtaaaggagaagtcacat

SEQ ID NO: 3437146 - DNA, 25 bp, Homo sapien
cagcttcaggaagatacgtagcctc

SEQ ID NO: 3437147 - DNA, 25 bp, Homo sapien
ggaagatacgtagcctcaggaaaca

SEQ ID NO: 3437148 - DNA, 25 bp, Homo sapien
tcgtccttaggaccaccgggcacat

SEQ ID NO: 3437149 - DNA, 25 bp, Homo sapien
tgggctgccctgaccaaggagtcca

SEQ ID NO: 3437150 - DNA, 25 bp, Homo sapien
ttcacatttagagttatggctggct

SEQ ID NO: 3437151 - DNA, 25 bp, Homo sapien
ccaactttcttcgtagactcttcca

SEQ ID NO: 3437152 - DNA, 25 bp, Homo sapien
accaggatgcccgattagtgcacct

SEQ ID NO: 3437153 - DNA, 25 bp, Homo sapien
cacagcccttctttcgaccaggatg

SEQ ID NO: 3437154 - DNA, 25 bp, Homo sapien
tcaggatgcctatccacaggtggca

SEQ ID NO: 3437155 - DNA, 25 bp, Homo sapien
ctgggagctctatcctctcaggatg

SEQ ID NO: 3437156 - DNA, 25 bp, Homo sapien
caaatgtggctgatggccctgggag

SEQ ID NO: 3437157 - DNA, 25 bp, Homo sapien
ccagcgagaaatcccccttggagat

SEQ ID NO: 3437158 - DNA, 25 bp, Homo sapien
tttcatccggacataaccagctctg

SEQ ID NO: 3437159 - DNA, 25 bp, Homo sapien
cctcttcgcgggaccgagtgagctg

SEQ ID NO: 3437160 - DNA, 25 bp, Homo sapien
caagtctgcgtgtggtttccggtct

SEQ ID NO: 3437161 - DNA, 25 bp, Homo sapien
tctgttgttcgtctgccactctgga

SEQ ID NO: 3437162 - DNA, 25 bp, Homo sapien
tttcatacatcttgtccttccgcag

SEQ ID NO: 3437163 - DNA, 25 bp, Homo sapien
gatgcactgtcagatggattaaatg

SEQ ID NO: 3437164 - DNA, 25 bp, Homo sapien
cttttgcccggctttgtggggagat

SEQ ID NO: 3437165 - DNA, 25 bp, Homo sapien
taaatgacatgggttgttcttcctc

SEQ ID NO: 3437166 - DNA, 25 bp, Homo sapien
ggtcacccaggagaccttcagaggg

SEQ ID NO: 3437167 - DNA, 25 bp, Homo sapien
tcacccaggagaccttcagagggga

SEQ ID NO: 3437168 - DNA, 25 bp, Homo sapien
cacccaggagaccttcagaggggag

SEQ ID NO: 3437169 - DNA, 25 bp, Homo sapien
aggagaccttcagaggggaggtgca

SEQ ID NO: 3437170 - DNA, 25 bp, Homo sapien
aaattttcaattgtcactgggatgc

SEQ ID NO: 3437171 - DNA, 25 bp, Homo sapien
ccaccatgaaattttcaattgtcac

SEQ ID NO: 3437172 - DNA, 25 bp, Homo sapien
aatgctcttagcagtgtcagggtga

SEQ ID NO: 3437173 - DNA, 25 bp, Homo sapien
tcccagaatgctcttagcagtgtca

SEQ ID NO: 3437174 - DNA, 25 bp, Homo sapien
tggggaggcttcatagaggctggac

SEQ ID NO: 3437175 - DNA, 25 bp, Homo sapien
ctggggaggcttcatagaggctgga

SEQ ID NO: 3437176 - DNA, 25 bp, Homo sapien
gctggggaggcttcatagaggctgg

SEQ ID NO: 3437177 - DNA, 25 bp, Homo sapien
aggctggggaggcttcatagaggct

SEQ ID NO: 3437178 - DNA, 25 bp, Homo sapien
agaaaaaccttccaccatacaagag

SEQ ID NO: 3437179 - DNA, 25 bp, Homo sapien
gcctccttgttgaagctgagaaaaa

SEQ ID NO: 3437180 - DNA, 25 bp, Homo sapien
tccaccatacaagagctgcaggcat

SEQ ID NO: 3437181 - DNA, 25 bp, Homo sapien
tgcctccttgttgaagctgagaaaa

SEQ ID NO: 3437182 - DNA, 25 bp, Homo sapien
caagtactacaggccagcacttcac

SEQ ID NO: 3437183 - DNA, 25 bp, Homo sapien
acctccacgtccagatgcagttgtg

SEQ ID NO: 3437184 - DNA, 25 bp, Homo sapien
tcacgtacagcatcacagccatgca

SEQ ID NO: 3437185 - DNA, 25 bp, Homo sapien
atgcaaacctccacgtccagatgca

SEQ ID NO: 3437186 - DNA, 25 bp, Homo sapien
gcttttacaatcagcttacgcaggg

SEQ ID NO: 3437187 - DNA, 25 bp, Homo sapien
atattttgaagtgccaggatcgagg

SEQ ID NO: 3437188 - DNA, 25 bp, Homo sapien
gaaaatctatacttgcccatgcggt

SEQ ID NO: 3437189 - DNA, 25 bp, Homo sapien
tgagtctctcatgtccgtatgtttg

SEQ ID NO: 3437190 - DNA, 25 bp, Homo sapien
aggggggcacccaccacaggctcac

SEQ ID NO: 3437191 - DNA, 25 bp, Homo sapien
gaggggggcacccaccacaggctca

SEQ ID NO: 3437192 - DNA, 25 bp, Homo sapien
ctgtaaacagcaccccccattgaga

SEQ ID NO: 3437193 - DNA, 25 bp, Homo sapien
agaggggggcacccaccacaggctc

SEQ ID NO: 3437194 - DNA, 25 bp, Homo sapien
catcaccccatcaaaggggtcaggg

SEQ ID NO: 3437195 - DNA, 25 bp, Homo sapien
ccggcagtggtgagctttcgaagat

SEQ ID NO: 3437196 - DNA, 25 bp, Homo sapien
attggaccggcagtggtgagctttc

SEQ ID NO: 3437197 - DNA, 25 bp, Homo sapien
gagcagtcccattggaccggcagtg

SEQ ID NO: 3437198 - DNA, 25 bp, Homo sapien
tggaaggtgccgtagcatccacgct

SEQ ID NO: 3437199 - DNA, 25 bp, Homo sapien
tcaagcaatggatgtagggcacggc

SEQ ID NO: 3437200 - DNA, 25 bp, Homo sapien
cagtcttgcaacttggacgagccca

SEQ ID NO: 3437201 - DNA, 25 bp, Homo sapien
ttgtgccaaccaggaggagagtctt

SEQ ID NO: 3437202 - DNA, 25 bp, Homo sapien
agggaggcgacaggaagtctctcta

SEQ ID NO: 3437203 - DNA, 25 bp, Homo sapien
gccacattcaccacgtctgacatcc

SEQ ID NO: 3437204 - DNA, 25 bp, Homo sapien
tccttctccgggtactccaaagctg

SEQ ID NO: 3437205 - DNA, 25 bp, Homo sapien
tactccaaagctggcgatggcttgc

SEQ ID NO: 3437206 - DNA, 25 bp, Homo sapien
cctgtggtgccctcatcacacaaaa

SEQ ID NO: 3437207 - DNA, 25 bp, Homo sapien
gctccagaaagtgatgctagctctg

SEQ ID NO: 3437208 - DNA, 25 bp, Homo sapien
tgtagatcacacttcaaatgcagga

SEQ ID NO: 3437209 - DNA, 25 bp, Homo sapien
ggatgtcaatcataaggtcacagca

SEQ ID NO: 3437210 - DNA, 25 bp, Homo sapien
tgcacctcctgaacacgctcgggcc

SEQ ID NO: 3437211 - DNA, 25 bp, Homo sapien
tgcctgcacctcctgaacacgctcg

SEQ ID NO: 3437212 - DNA, 25 bp, Homo sapien
cctgcctgcacctcctgaacacgct

SEQ ID NO: 3437213 - DNA, 25 bp, Homo sapien
cctgcacctcctgaacacgctcggg

SEQ ID NO: 3437214 - DNA, 25 bp, Homo sapien
aaaggcgacagtcccgctccatggc

SEQ ID NO: 3437215 - DNA, 25 bp, Homo sapien
ctgtgaagagcattcgcatgtgctg

SEQ ID NO: 3437216 - DNA, 25 bp, Homo sapien
gagccacactcaaaggcgacagtcc

SEQ ID NO: 3437217 - DNA, 25 bp, Homo sapien
gaagagcattcgcatgtgctgccca

SEQ ID NO: 3437218 - DNA, 25 bp, Homo sapien
tgtgggcactgcagcaagtccacag

SEQ ID NO: 3437219 - DNA, 25 bp, Homo sapien
cacactgtgggcactgcagcaagtc

SEQ ID NO: 3437220 - DNA, 25 bp, Homo sapien
gaacaggtcacactgtgggcactgc

SEQ ID NO: 3437221 - DNA, 25 bp, Homo sapien
ctcttggcgtcagggaacaggtcac

SEQ ID NO: 3437222 - DNA, 25 bp, Homo sapien
cagtggcttcctgagttgccacagg

SEQ ID NO: 3437223 - DNA, 25 bp, Homo sapien
cctggggtctttgggcatcagtggc

SEQ ID NO: 3437224 - DNA, 25 bp, Homo sapien
gggtctttgggcatcagtggcttcc

SEQ ID NO: 3437225 - DNA, 25 bp, Homo sapien
tggcttcctgagttgccacaggagt

SEQ ID NO: 3437226 - DNA, 25 bp, Homo sapien
tctggaacgacataggcctcaactg

SEQ ID NO: 3437227 - DNA, 25 bp, Homo sapien
tgcctctccagattctgggttttag

SEQ ID NO: 3437228 - DNA, 25 bp, Homo sapien
ttagatgtaaagtcccggagcaacc

SEQ ID NO: 3437229 - DNA, 25 bp, Homo sapien
aatacacatcgatttgcaaaggccc

SEQ ID NO: 3437230 - DNA, 25 bp, Homo sapien
gccggtgaatcatgctccattagaa

SEQ ID NO: 3437231 - DNA, 25 bp, Homo sapien
ccagcctcgcatttcagaagtgcca

SEQ ID NO: 3437232 - DNA, 25 bp, Homo sapien
ggtactgttctatgctgcctcccac

SEQ ID NO: 3437233 - DNA, 25 bp, Homo sapien
cactctgctgcaactaggccatttc

SEQ ID NO: 3437234 - DNA, 25 bp, Homo sapien
tttcatatgattattagctgcatgt

SEQ ID NO: 3437235 - DNA, 25 bp, Homo sapien
ttaggatgactccatgtcattgcta

SEQ ID NO: 3437236 - DNA, 25 bp, Homo sapien
atagtactgcagtgaacacgtgtgc

SEQ ID NO: 3437237 - DNA, 25 bp, Homo sapien
tatgattattagctgcatgtatgtc

SEQ ID NO: 3437238 - DNA, 25 bp, Homo sapien
aatttatgatgtcacggcacagcaa

SEQ ID NO: 3437239 - DNA, 25 bp, Homo sapien
tttatgatgtcacggcacagcaacc

SEQ ID NO: 3437240 - DNA, 25 bp, Homo sapien
aatttatgatgtcacggcacagcag

SEQ ID NO: 3437241 - DNA, 25 bp, Homo sapien
tttatgatgtcacggcacagcagcc

SEQ ID NO: 3437242 - DNA, 25 bp, Homo sapien
tcttttcgtgcccttcgaggatcag

SEQ ID NO: 3437243 - DNA, 25 bp, Homo sapien
ttgccccgaacgagtgtcacacgct

SEQ ID NO: 3437244 - DNA, 25 bp, Homo sapien
cacgctcattaagtcgctgtaagat

SEQ ID NO: 3437245 - DNA, 25 bp, Homo sapien
cagcgtcgatattggtggctcccga

SEQ ID NO: 3437246 - DNA, 25 bp, Homo sapien
gcttgttgaggttccagtctatttt

SEQ ID NO: 3437247 - DNA, 25 bp, Homo sapien
cactctgaggttatgcttgttgagg

SEQ ID NO: 3437248 - DNA, 25 bp, Homo sapien
ctcccacccgttgttcacgttgagg

SEQ ID NO: 3437249 - DNA, 25 bp, Homo sapien
ccgttgttcacgttgagggagactg

SEQ ID NO: 3437250 - DNA, 25 bp, Homo sapien
gactcagtaggcagaaactcccgtc

SEQ ID NO: 3437251 - DNA, 25 bp, Homo sapien
gctgtgaagtccagacctttcttga

SEQ ID NO: 3437252 - DNA, 25 bp, Homo sapien
ggtctgcacagtccactgagtacaa

SEQ ID NO: 3437253 - DNA, 25 bp, Homo sapien
tcttgactgttggatgatactaccc

SEQ ID NO: 3437254 - DNA, 25 bp, Homo sapien
atctgtgtaatccaagcctcatgtt

SEQ ID NO: 3437255 - DNA, 25 bp, Homo sapien
gcagatgccgtagaggtggaggtcc

SEQ ID NO: 3437256 - DNA, 25 bp, Homo sapien
tgccgtagaggtggaggtccctgaa

SEQ ID NO: 3437257 - DNA, 25 bp, Homo sapien
gatgccgtagaggtggaggtccctg

SEQ ID NO: 3437258 - DNA, 25 bp, Homo sapien
tccttgggtagaagtcaagaggaag

SEQ ID NO: 3437259 - DNA, 25 bp, Homo sapien
aatagggaatatccctgtggggcca

SEQ ID NO: 3437260 - DNA, 25 bp, Homo sapien
gtggggccacgacctgagatgctct

SEQ ID NO: 3437261 - DNA, 25 bp, Homo sapien
cctgggctccttgggtagaagtcaa

SEQ ID NO: 3437262 - DNA, 25 bp, Homo sapien
gacagaaaccgtagctgcagaggaa

SEQ ID NO: 3437263 - DNA, 25 bp, Homo sapien
gcttacatgcgtttgcagagctggc

SEQ ID NO: 3437264 - DNA, 25 bp, Homo sapien
tgtaatgaatgacgtgctcagaaac

SEQ ID NO: 3437265 - DNA, 25 bp, Homo sapien
agctggcatcttgatcgtccccggg

SEQ ID NO: 3437266 - DNA, 25 bp, Homo sapien
ggcagcgctgcgtgggaagcagccc

SEQ ID NO: 3437267 - DNA, 25 bp, Homo sapien
aggcagcgctgcgtgggaagcagcc

SEQ ID NO: 3437268 - DNA, 25 bp, Homo sapien
cagccccggccccagtcgtcctggc

SEQ ID NO: 3437269 - DNA, 25 bp, Homo sapien
gcagcgctgcgtgggaagcagcccc

SEQ ID NO: 3437270 - DNA, 25 bp, Homo sapien
cctgtctcgtctaggttggctgtca

SEQ ID NO: 3437271 - DNA, 25 bp, Homo sapien
tgaattccgtttggctccatcatga

SEQ ID NO: 3437272 - DNA, 25 bp, Homo sapien
accgttggaggtttgcatgccgtct

SEQ ID NO: 3437273 - DNA, 25 bp, Homo sapien
tcgcatagtgcatgggtgaattccg

SEQ ID NO: 3437274 - DNA, 25 bp, Homo sapien
gatttggggaccacattctgccagc

SEQ ID NO: 3437275 - DNA, 25 bp, Homo sapien
agagtgggaatgctgctgcctggct

SEQ ID NO: 3437276 - DNA, 25 bp, Homo sapien
ggccagagtgggaatgctgctgcct

SEQ ID NO: 3437277 - DNA, 25 bp, Homo sapien
ggctgatttggggaccacattctgc

SEQ ID NO: 3437278 - DNA, 25 bp, Homo sapien
cagagccggtaccaaggggacacag

SEQ ID NO: 3437279 - DNA, 25 bp, Homo sapien
agagccggtaccaaggggacacagg

SEQ ID NO: 3437280 - DNA, 25 bp, Homo sapien
ccagagccggtaccaaggggacaca

SEQ ID NO: 3437281 - DNA, 25 bp, Homo sapien
cagcactggagcccttctgcaccat

SEQ ID NO: 3437282 - DNA, 25 bp, Homo sapien
agcagatgtgcctgtttgtgaccat

SEQ ID NO: 3437283 - DNA, 25 bp, Homo sapien
cacgaaatcccggttcctcttcaga

SEQ ID NO: 3437284 - DNA, 25 bp, Homo sapien
ctgcttctgcacgaaatcccggttc

SEQ ID NO: 3437285 - DNA, 25 bp, Homo sapien
ggctctcccatggtgttgccagata

SEQ ID NO: 3437286 - DNA, 25 bp, Homo sapien
cctcacggggttagagaactcagcc

SEQ ID NO: 3437287 - DNA, 25 bp, Homo sapien
ggaagccaggatttcagattgcgtc

SEQ ID NO: 3437288 - DNA, 25 bp, Homo sapien
aacgcagcgcatccagttctgcctg

SEQ ID NO: 3437289 - DNA, 25 bp, Homo sapien
aagtctgtctaccttttcatcagag

SEQ ID NO: 3437290 - DNA, 25 bp, Homo sapien
ttggagcaagttagcagcaaaatgc

SEQ ID NO: 3437291 - DNA, 25 bp, Homo sapien
ttttcttggagcaagttagcagcaa

SEQ ID NO: 3437292 - DNA, 25 bp, Homo sapien
aaagtctgtctaccttttcatcaga

SEQ ID NO: 3437293 - DNA, 25 bp, Homo sapien
gcaggatcccgtttcttgagttcat

SEQ ID NO: 3437294 - DNA, 25 bp, Homo sapien
acaccagtggagggcggaaactcag

SEQ ID NO: 3437295 - DNA, 25 bp, Homo sapien
agtggagggcggaaactcagaggca

SEQ ID NO: 3437296 - DNA, 25 bp, Homo sapien
aactcaggacaggagacggtgacac

SEQ ID NO: 3437297 - DNA, 25 bp, Homo sapien
aagtcgctcccttcctggtcacggt

SEQ ID NO: 3437298 - DNA, 25 bp, Homo sapien
ctcccttcctggtcacggtgaatgg

SEQ ID NO: 3437299 - DNA, 25 bp, Homo sapien
gtcacggtgaatggtttcggcagaa

SEQ ID NO: 3437300 - DNA, 25 bp, Homo sapien
ttgggcaagtcgctcccttcctggt

SEQ ID NO: 3437301 - DNA, 25 bp, Homo sapien
aggtcaccaccaacatgcgagaaag

SEQ ID NO: 3437302 - DNA, 25 bp, Homo sapien
catgagtgtcagagtacaggtcacc

SEQ ID NO: 3437303 - DNA, 25 bp, Homo sapien
catgtgaatacctgctagtgtcagc

SEQ ID NO: 3437304 - DNA, 25 bp, Homo sapien
caaggaagtggattgttccccagaa

SEQ ID NO: 3437305 - DNA, 25 bp, Homo sapien
tcattgctggagctgaaataaccca

SEQ ID NO: 3437306 - DNA, 25 bp, Homo sapien
aaataacccagcagggattttcctg

SEQ ID NO: 3437307 - DNA, 25 bp, Homo sapien
caacgtggactgtcatttaaggtgt

SEQ ID NO: 3437308 - DNA, 25 bp, Homo sapien
gatgaaggctgccaacgtggactgt

SEQ ID NO: 3437309 - DNA, 25 bp, Homo sapien
tgcagcacgcgggaggttggagagt

SEQ ID NO: 3437310 - DNA, 25 bp, Homo sapien
tctgtctgtgcagcacgcgggaggt

SEQ ID NO: 3437311 - DNA, 25 bp, Homo sapien
gagttgtcctccactcacgctcagc

SEQ ID NO: 3437312 - DNA, 25 bp, Homo sapien
gtctgtgcagcacgcgggaggttgg

SEQ ID NO: 3437313 - DNA, 25 bp, Homo sapien
agcactggcgaagacgatgggtttt

SEQ ID NO: 3437314 - DNA, 25 bp, Homo sapien
ctgctcatttattggttcttcgtac

SEQ ID NO: 3437315 - DNA, 25 bp, Homo sapien
actaggtgccgaggaagcactggcg

SEQ ID NO: 3437316 - DNA, 25 bp, Homo sapien
gttcttcgtacttgtgctgagttgg

SEQ ID NO: 3437317 - DNA, 25 bp, Homo sapien
tcagctgtgttgttcccatgcccat

SEQ ID NO: 3437318 - DNA, 25 bp, Homo sapien
cagctgtgttgttcccatgcccatc

SEQ ID NO: 3437319 - DNA, 25 bp, Homo sapien
agctgtgttgttcccatgcccatcc

SEQ ID NO: 3437320 - DNA, 25 bp, Homo sapien
gccccgtggtttgttctgataaata

SEQ ID NO: 3437321 - DNA, 25 bp, Homo sapien
tacacctggaataaggatgcccaga

SEQ ID NO: 3437322 - DNA, 25 bp, Homo sapien
taaataacaaggtgttggtcggcac

SEQ ID NO: 3437323 - DNA, 25 bp, Homo sapien
tcttgataaagaatgccagcaggta

SEQ ID NO: 3437324 - DNA, 25 bp, Homo sapien
tgagtttcacccacagcatgagtcg

SEQ ID NO: 3437325 - DNA, 25 bp, Homo sapien
ttcacccacagcatgagtcgggcag

SEQ ID NO: 3437326 - DNA, 25 bp, Homo sapien
gggagagtgagtttcacccacagca

SEQ ID NO: 3437327 - DNA, 25 bp, Homo sapien
cacagcatgagtcgggcagcctgtt

SEQ ID NO: 3437328 - DNA, 25 bp, Homo sapien
gccggggtggccaggaggagcctca

SEQ ID NO: 3437329 - DNA, 25 bp, Homo sapien
gaagccggggtggccaggaggagcc

SEQ ID NO: 3437330 - DNA, 25 bp, Homo sapien
caggaggagcctcaggaatgagaac

SEQ ID NO: 3437331 - DNA, 25 bp, Homo sapien
ctgctggtggatggcgggaagccgg

SEQ ID NO: 3437332 - DNA, 25 bp, Homo sapien
gcaaggccatcttctagtccaaggc

SEQ ID NO: 3437333 - DNA, 25 bp, Homo sapien
gagcgaggactgaataatggcagct

SEQ ID NO: 3437334 - DNA, 25 bp, Homo sapien
cagctgtagccactgggcagtttgg

SEQ ID NO: 3437335 - DNA, 25 bp, Homo sapien
caaggccagcttggataagagcgag

SEQ ID NO: 3437336 - DNA, 25 bp, Homo sapien
actgcttagttgtccccgtgagtaa

SEQ ID NO: 3437337 - DNA, 25 bp, Homo sapien
gcttagttgtccccgtgagtaactg

SEQ ID NO: 3437338 - DNA, 25 bp, Homo sapien
gacatcaactccatcgggcacccac

SEQ ID NO: 3437339 - DNA, 25 bp, Homo sapien
tcacacgcggcactgatgctggggt

SEQ ID NO: 3437340 - DNA, 25 bp, Homo sapien
actggggtggatgtagcgctgggac

SEQ ID NO: 3437341 - DNA, 25 bp, Homo sapien
tgcagctgtagcaggtcttctgtga

SEQ ID NO: 3437342 - DNA, 25 bp, Homo sapien
ctttgactggggtggatgtagcgct

SEQ ID NO: 3437343 - DNA, 25 bp, Homo sapien
cagctgtagcaggtcttctgtgatt

SEQ ID NO: 3437344 - DNA, 25 bp, Homo sapien
gggctccgggccacatcattgaata

SEQ ID NO: 3437345 - DNA, 25 bp, Homo sapien
ggccacatcattgaatacgcctccg

SEQ ID NO: 3437346 - DNA, 25 bp, Homo sapien
ctccgccccgtgtccattgcggcat

SEQ ID NO: 3437347 - DNA, 25 bp, Homo sapien
ccgggccacatcattgaatacgcct

SEQ ID NO: 3437348 - DNA, 25 bp, Homo sapien
tggtgatcaccctttgtggcacacg

SEQ ID NO: 3437349 - DNA, 25 bp, Homo sapien
tggcacacgccagctcggcgcaatc

SEQ ID NO: 3437350 - DNA, 25 bp, Homo sapien
ctcggcgcaatctccgggcgggcag

SEQ ID NO: 3437351 - DNA, 25 bp, Homo sapien
gcagctccgaccatcatggcattgg

SEQ ID NO: 3437352 - DNA, 25 bp, Homo sapien
gctgtgcaggtgaccgccatcagtg

SEQ ID NO: 3437353 - DNA, 25 bp, Homo sapien
ctgtgcaggtgaccgccatcagtga

SEQ ID NO: 3437354 - DNA, 25 bp, Homo sapien
ggtgaccgccatcagtgaccgccgt

SEQ ID NO: 3437355 - DNA, 25 bp, Homo sapien
gcaggtgaccgccatcagtgaccgc

SEQ ID NO: 3437356 - DNA, 25 bp, Homo sapien
ccgggtgtgcggatgctgttgatca

SEQ ID NO: 3437357 - DNA, 25 bp, Homo sapien
cgtgcaggcgttgttccagcccttc

SEQ ID NO: 3437358 - DNA, 25 bp, Homo sapien
gatgctgttgatcacgtgcaggcgt

SEQ ID NO: 3437359 - DNA, 25 bp, Homo sapien
ctaaacgcacagaggagatccgggt

SEQ ID NO: 3437360 - DNA, 25 bp, Homo sapien
cttcttagcaattgcacgagaggac

SEQ ID NO: 3437361 - DNA, 25 bp, Homo sapien
caattgcacgagaggacagctgcat

SEQ ID NO: 3437362 - DNA, 25 bp, Homo sapien
tagcaattgcacgagaggacagctg

SEQ ID NO: 3437363 - DNA, 25 bp, Homo sapien
ttcaccttcttagcaattgcacgag

SEQ ID NO: 3437364 - DNA, 25 bp, Homo sapien
gaggaggatgtgtggaaggcgggat

SEQ ID NO: 3437365 - DNA, 25 bp, Homo sapien
gtggaaggcgggatgcttggtggcc

SEQ ID NO: 3437366 - DNA, 25 bp, Homo sapien
ggaaggcgggatgcttggtggcctt

SEQ ID NO: 3437367 - DNA, 25 bp, Homo sapien
tggaaggcgggatgcttggtggcct

SEQ ID NO: 3437368 - DNA, 25 bp, Homo sapien
tgtatgtgggatccaggaggaaacc

SEQ ID NO: 3437369 - DNA, 25 bp, Homo sapien
gaggaaaccgccacgcagccctatt

SEQ ID NO: 3437370 - DNA, 25 bp, Homo sapien
atccaggaggaaaccgccacgcagc

SEQ ID NO: 3437371 - DNA, 25 bp, Homo sapien
tgggatccaggaggaaaccgccacg

SEQ ID NO: 3437372 - DNA, 25 bp, Homo sapien
gggaggcctcaaaagtacagacgca

SEQ ID NO: 3437373 - DNA, 25 bp, Homo sapien
agtggcgtgttcagacagggtgagg

SEQ ID NO: 3437374 - DNA, 25 bp, Homo sapien
cagatgttacttggtgctgcccctg

SEQ ID NO: 3437375 - DNA, 25 bp, Homo sapien
ttgagatgacagagtggcgtgttca

SEQ ID NO: 3437376 - DNA, 25 bp, Homo sapien
ctgggaagatcagtcccctcggctg

SEQ ID NO: 3437377 - DNA, 25 bp, Homo sapien
tcctcttggggatgtcgatgatctg

SEQ ID NO: 3437378 - DNA, 25 bp, Homo sapien
ttttcctcttggggatgtcgatgat

SEQ ID NO: 3437379 - DNA, 25 bp, Homo sapien
tctgggaagatcagtcccctcggct

SEQ ID NO: 3437380 - DNA, 25 bp, Homo sapien
gttcctcctcgaaaggtgtcacaag

SEQ ID NO: 3437381 - DNA, 25 bp, Homo sapien
gagggctgggtctgtatcctccaca

SEQ ID NO: 3437382 - DNA, 25 bp, Homo sapien
tcgtctgtggccgatgctgcatact

SEQ ID NO: 3437383 - DNA, 25 bp, Homo sapien
gcatatgagaacgtgtgaccctgct

SEQ ID NO: 3437384 - DNA, 25 bp, Homo sapien
tggtgcaggcgcttccagttcctct

SEQ ID NO: 3437385 - DNA, 25 bp, Homo sapien
gtgtacctggtggtgccccgtgcag

SEQ ID NO: 3437386 - DNA, 25 bp, Homo sapien
tgcagacagatgagtggtgcaggcg

SEQ ID NO: 3437387 - DNA, 25 bp, Homo sapien
tctccgtcattttcacgtggatggg

SEQ ID NO: 3437388 - DNA, 25 bp, Homo sapien
cactggcctgttgagacctcaggtt

SEQ ID NO: 3437389 - DNA, 25 bp, Homo sapien
actgtcattagtggtgatgtttgca

SEQ ID NO: 3437390 - DNA, 25 bp, Homo sapien
tctgtgttggattgttgggtctata

SEQ ID NO: 3437391 - DNA, 25 bp, Homo sapien
tataaagtgcctgtcttgtcagggc

SEQ ID NO: 3437392 - DNA, 25 bp, Homo sapien
tgatgtgcttcctttgagttagcag

SEQ ID NO: 3437393 - DNA, 25 bp, Homo sapien
cctttgagttagcagcaaagactct

SEQ ID NO: 3437394 - DNA, 25 bp, Homo sapien
tgcttcctttgagttagcagcaaag

SEQ ID NO: 3437395 - DNA, 25 bp, Homo sapien
cagcaaagactctgtttggaggaac

SEQ ID NO: 3437396 - DNA, 25 bp, Homo sapien
tcttgtcgttcaggatatgtctgtg

SEQ ID NO: 3437397 - DNA, 25 bp, Homo sapien
cgttcaggatatgtctgtggagttt

SEQ ID NO: 3437398 - DNA, 25 bp, Homo sapien
atatgtctgtggagtttagtcaggg

SEQ ID NO: 3437399 - DNA, 25 bp, Homo sapien
cttttcttgtcgttcaggatatgtc

SEQ ID NO: 3437400 - DNA, 25 bp, Homo sapien
tttgcagggcgggggacaatgggcc

SEQ ID NO: 3437401 - DNA, 25 bp, Homo sapien
ctttgcagggcgggggacaatgggc

SEQ ID NO: 3437402 - DNA, 25 bp, Homo sapien
tgcagggcgggggacaatgggccca

SEQ ID NO: 3437403 - DNA, 25 bp, Homo sapien
gcagggcgggggacaatgggcccat

SEQ ID NO: 3437404 - DNA, 25 bp, Homo sapien
tgccgctgatggacggctgtctcct

SEQ ID NO: 3437405 - DNA, 25 bp, Homo sapien
tgttgaaggcagattcaaggactgg

SEQ ID NO: 3437406 - DNA, 25 bp, Homo sapien
ggccatggcgccagtactgatgctg

SEQ ID NO: 3437407 - DNA, 25 bp, Homo sapien
tcttgatgtgccccacgttttccat

SEQ ID NO: 3437408 - DNA, 25 bp, Homo sapien
cagccccgggccgattgcttttgga

SEQ ID NO: 3437409 - DNA, 25 bp, Homo sapien
tgtgcactaggaaccgagcctggtg

SEQ ID NO: 3437410 - DNA, 25 bp, Homo sapien
ttcagcaggtccagaacagccccgg

SEQ ID NO: 3437411 - DNA, 25 bp, Homo sapien
acatagttagtgacgcccttctgtg

SEQ ID NO: 3437412 - DNA, 25 bp, Homo sapien
tggtgcaggtgaccgtgggttttcg

SEQ ID NO: 3437413 - DNA, 25 bp, Homo sapien
gtgaccgtgggttttcgcagccgat

SEQ ID NO: 3437414 - DNA, 25 bp, Homo sapien
accgtgggttttcgcagccgatctt

SEQ ID NO: 3437415 - DNA, 25 bp, Homo sapien
tgggttttcgcagccgatcttttaa

SEQ ID NO: 3437416 - DNA, 25 bp, Homo sapien
tgggcgaggcttgcctttccgtggg

SEQ ID NO: 3437417 - DNA, 25 bp, Homo sapien
agagacgccgacagcgcactcgtca

SEQ ID NO: 3437418 - DNA, 25 bp, Homo sapien
tcacttgggctggagccgccggact

SEQ ID NO: 3437419 - DNA, 25 bp, Homo sapien
ccctgctcgaggtgggtgggcgcgt

SEQ ID NO: 3437420 - DNA, 25 bp, Homo sapien
ttcccgcggccgatccaggtgtgcg

SEQ ID NO: 3437421 - DNA, 25 bp, Homo sapien
gtggcccttgggcacccgatcctgc

SEQ ID NO: 3437422 - DNA, 25 bp, Homo sapien
cgatcctgctcactgacggcatttt

SEQ ID NO: 3437423 - DNA, 25 bp, Homo sapien
ggcatctcgattccgggagcaccaa

SEQ ID NO: 3437424 - DNA, 25 bp, Homo sapien
caaaaatcagggactttctcgtccg

SEQ ID NO: 3437425 - DNA, 25 bp, Homo sapien
aatcagggactttctcgtccgccgg

SEQ ID NO: 3437426 - DNA, 25 bp, Homo sapien
tacaaaaatcagggactttctcgtc

SEQ ID NO: 3437427 - DNA, 25 bp, Homo sapien
aaatcagggactttctcgtccgccg

SEQ ID NO: 3437428 - DNA, 25 bp, Homo sapien
ggagccagctgcgttcgggataacc

SEQ ID NO: 3437429 - DNA, 25 bp, Homo sapien
gccagctgcgttcgggataaccgtg

SEQ ID NO: 3437430 - DNA, 25 bp, Homo sapien
ctgcgttcgggataaccgtgcagac

SEQ ID NO: 3437431 - DNA, 25 bp, Homo sapien
tctgtggcgggagccagctgcgttc

SEQ ID NO: 3437432 - DNA, 25 bp, Homo sapien
ctgggcggaaggcgccccagaactg

SEQ ID NO: 3437433 - DNA, 25 bp, Homo sapien
cggaaggcgccccagaactggtggc

SEQ ID NO: 3437434 - DNA, 25 bp, Homo sapien
tgggcggaaggcgccccagaactgg

SEQ ID NO: 3437435 - DNA, 25 bp, Homo sapien
ggcggaaggcgccccagaactggtg

SEQ ID NO: 3437436 - DNA, 25 bp, Homo sapien
ttcctggagtctccggagggtgcct

SEQ ID NO: 3437437 - DNA, 25 bp, Homo sapien
tgggattcacccgagccgttggctt

SEQ ID NO: 3437438 - DNA, 25 bp, Homo sapien
cctctgggattcacccgagccgttg

SEQ ID NO: 3437439 - DNA, 25 bp, Homo sapien
cagctggcggagataccgttgtgca

SEQ ID NO: 3437440 - DNA, 25 bp, Homo sapien
tccgcaaacctagcaatccggagtc

SEQ ID NO: 3437441 - DNA, 25 bp, Homo sapien
ggcttccgcaaacctagcaatccgg

SEQ ID NO: 3437442 - DNA, 25 bp, Homo sapien
tgggcttccgcaaacctagcaatcc

SEQ ID NO: 3437443 - DNA, 25 bp, Homo sapien
cctttgggcttccgcaaacctagca

SEQ ID NO: 3437444 - DNA, 25 bp, Homo sapien
gaaaccaggaagccaggagggtcat

SEQ ID NO: 3437445 - DNA, 25 bp, Homo sapien
tgaaaccaggaagccaggagggtca

SEQ ID NO: 3437446 - DNA, 25 bp, Homo sapien
ctgaaaccaggaagccaggagggtc

SEQ ID NO: 3437447 - DNA, 25 bp, Homo sapien
aaaacctggtgaatcctggaaggca

SEQ ID NO: 3437448 - DNA, 25 bp, Homo sapien
ctgcaaaacctggtgaatcctggaa

SEQ ID NO: 3437449 - DNA, 25 bp, Homo sapien
ttctgcaaaacctggtgaatcctgg

SEQ ID NO: 3437450 - DNA, 25 bp, Homo sapien
gcaaaacctggtgaatcctggaagg

SEQ ID NO: 3437451 - DNA, 25 bp, Homo sapien
cgttcaaactattctcctgacacag

SEQ ID NO: 3437452 - DNA, 25 bp, Homo sapien
cccacgttcaaactattctcctgac

SEQ ID NO: 3437453 - DNA, 25 bp, Homo sapien
caaactattctcctgacacagcctc

SEQ ID NO: 3437454 - DNA, 25 bp, Homo sapien
cacgttcaaactattctcctgacac

SEQ ID NO: 3437455 - DNA, 25 bp, Homo sapien
acacaaggacagcacgatgttctgt

SEQ ID NO: 3437456 - DNA, 25 bp, Homo sapien
cacaaggacagcacgatgttctgtt

SEQ ID NO: 3437457 - DNA, 25 bp, Homo sapien
aaatgaattcttccgctggcctgtc

SEQ ID NO: 3437458 - DNA, 25 bp, Homo sapien
ccaaagtgtgaaatgaattcttccg

SEQ ID NO: 3437459 - DNA, 25 bp, Homo sapien
ctctcagaccagtggggtctttctc

SEQ ID NO: 3437460 - DNA, 25 bp, Homo sapien
gaccagtggggtctttctcatggct

SEQ ID NO: 3437461 - DNA, 25 bp, Homo sapien
tctcagaccagtggggtctttctca

SEQ ID NO: 3437462 - DNA, 25 bp, Homo sapien
cagaccagtggggtctttctcatgg

SEQ ID NO: 3437463 - DNA, 25 bp, Homo sapien
ttcccaggctccgtgcattcctgca

SEQ ID NO: 3437464 - DNA, 25 bp, Homo sapien
cccaggctccgtgcattcctgcaca

SEQ ID NO: 3437465 - DNA, 25 bp, Homo sapien
tttcccaggctccgtgcattcctgc

SEQ ID NO: 3437466 - DNA, 25 bp, Homo sapien
tcccaggctccgtgcattcctgcac

SEQ ID NO: 3437467 - DNA, 25 bp, Homo sapien
tatggttccaccttgaagacaggca

SEQ ID NO: 3437468 - DNA, 25 bp, Homo sapien
gaagccctgcacttcctagccagtg

SEQ ID NO: 3437469 - DNA, 25 bp, Homo sapien
tgcagcagaagtaggcaagtagccc

SEQ ID NO: 3437470 - DNA, 25 bp, Homo sapien
aatgactcaaggacgggatggaccc

SEQ ID NO: 3437471 - DNA, 25 bp, Homo sapien
gaaaatgaacacgtcgtcccctgca

SEQ ID NO: 3437472 - DNA, 25 bp, Homo sapien
gctgagcataggagaggaaaatgaa

SEQ ID NO: 3437473 - DNA, 25 bp, Homo sapien
cttgtcccccacgatgaaggaagaa

SEQ ID NO: 3437474 - DNA, 25 bp, Homo sapien
gggccgtgagctgagcataggagag

SEQ ID NO: 3437475 - DNA, 25 bp, Homo sapien
ccccacacggtgttctgcaaggagg

SEQ ID NO: 3437476 - DNA, 25 bp, Homo sapien
cactggaagccccacacggtgttct

SEQ ID NO: 3437477 - DNA, 25 bp, Homo sapien
gttctgcaaggaggcgcgtgcatcc

SEQ ID NO: 3437478 - DNA, 25 bp, Homo sapien
ggaagccccacacggtgttctgcaa

SEQ ID NO: 3437479 - DNA, 25 bp, Homo sapien
gaaagaacatgtggagactcaggct

SEQ ID NO: 3437480 - DNA, 25 bp, Homo sapien
gaagggcttgcatcggtatccatca

SEQ ID NO: 3437481 - DNA, 25 bp, Homo sapien
tcccagaagggaaagtgcaaatgac

SEQ ID NO: 3437482 - DNA, 25 bp, Homo sapien
taacaagtgtcagcgaggccatgga

SEQ ID NO: 3437483 - DNA, 25 bp, Homo sapien
caaatgcctgaacagcagccaacat

SEQ ID NO: 3437484 - DNA, 25 bp, Homo sapien
cctcttgcttgtcaatgattaaaag

SEQ ID NO: 3437485 - DNA, 25 bp, Homo sapien
cagtccccaaatgcctgaacagcag

SEQ ID NO: 3437486 - DNA, 25 bp, Homo sapien
cttgtggcatcctccgtcgtggaca

SEQ ID NO: 3437487 - DNA, 25 bp, Homo sapien
aataacaaatgcttgagttgatgga

SEQ ID NO: 3437488 - DNA, 25 bp, Homo sapien
tcacaaacttggtagcacgttgctg

SEQ ID NO: 3437489 - DNA, 25 bp, Homo sapien
gttcacaggtgtctccatggccgcc

SEQ ID NO: 3437490 - DNA, 25 bp, Homo sapien
gtgcaatgccccctttgtttctgta

SEQ ID NO: 3437491 - DNA, 25 bp, Homo sapien
cacgttgctgttgtgcttgataatc

SEQ ID NO: 3437492 - DNA, 25 bp, Homo sapien
tatagacagtagctttatgttgcac

SEQ ID NO: 3437493 - DNA, 25 bp, Homo sapien
catgtgcagtaggtgattgagtcta

SEQ ID NO: 3437494 - DNA, 25 bp, Homo sapien
caggcaggttctcggtactcgtgtg

SEQ ID NO: 3437495 - DNA, 25 bp, Homo sapien
tctcggtactcgtgtgcatgtgcag

SEQ ID NO: 3437496 - DNA, 25 bp, Homo sapien
cctctaagcgaggtgtgactgggtc

SEQ ID NO: 3437497 - DNA, 25 bp, Homo sapien
tcagtgtcccggagaacatcggcag

SEQ ID NO: 3437498 - DNA, 25 bp, Homo sapien
tacagccgtgcctgtggtgcccaca

SEQ ID NO: 3437499 - DNA, 25 bp, Homo sapien
agctcgtccatgaagcctggcctgt

SEQ ID NO: 3437500 - DNA, 25 bp, Homo sapien
gctgcagtgagttgcgaaagcacca

SEQ ID NO: 3437501 - DNA, 25 bp, Homo sapien
gaggtagtgctaggaccagctgcca

SEQ ID NO: 3437502 - DNA, 25 bp, Homo sapien
gacacaatgactgatggcttctaca

SEQ ID NO: 3437503 - DNA, 25 bp, Homo sapien
gagggtcactagagcctagccaggc

SEQ ID NO: 3437504 - DNA, 25 bp, Homo sapien
aagaaagactgggtacatctgcatt

SEQ ID NO: 3437505 - DNA, 25 bp, Homo sapien
aaagactgggtacatctgcatttag

SEQ ID NO: 3437506 - DNA, 25 bp, Homo sapien
aagactgggtacatctgcatttaga

SEQ ID NO: 3437507 - DNA, 25 bp, Homo sapien
gaaagactgggtacatctgcattta

SEQ ID NO: 3437508 - DNA, 25 bp, Homo sapien
agggtggttctctggatgcttagga

SEQ ID NO: 3437509 - DNA, 25 bp, Homo sapien
cagggtggttctctggatgcttagg

SEQ ID NO: 3437510 - DNA, 25 bp, Homo sapien
acagggtggttctctggatgcttag

SEQ ID NO: 3437511 - DNA, 25 bp, Homo sapien
ggtggttctctggatgcttaggatg

SEQ ID NO: 3437512 - DNA, 25 bp, Homo sapien
caggtggaggcacatacacaaaggc

SEQ ID NO: 3437513 - DNA, 25 bp, Homo sapien
gggcaggtggaggcacatacacaaa

SEQ ID NO: 3437514 - DNA, 25 bp, Homo sapien
acatacacaaaggctgtattgtcat

SEQ ID NO: 3437515 - DNA, 25 bp, Homo sapien
gcaggtggaggcacatacacaaagg

SEQ ID NO: 3437516 - DNA, 25 bp, Homo sapien
caatcacagcagtgatccccatcag

SEQ ID NO: 3437517 - DNA, 25 bp, Homo sapien
aatcacagcagtgatccccatcaga

SEQ ID NO: 3437518 - DNA, 25 bp, Homo sapien
gaagggggatcgatgttcaacatca

SEQ ID NO: 3437519 - DNA, 25 bp, Homo sapien
ctccaggtgcaccaagaagggggat

SEQ ID NO: 3437520 - DNA, 25 bp, Homo sapien
ttctggcagtatgagtgcagcagct

SEQ ID NO: 3437521 - DNA, 25 bp, Homo sapien
cagctggaagaaattaggggtctcc

SEQ ID NO: 3437522 - DNA, 25 bp, Homo sapien
tttgaatttgctggagacagcagcg

SEQ ID NO: 3437523 - DNA, 25 bp, Homo sapien
tgcacatttgccaagccggcaacca

SEQ ID NO: 3437524 - DNA, 25 bp, Homo sapien
gacagcagcgatgacataaaactcc

SEQ ID NO: 3437525 - DNA, 25 bp, Homo sapien
agttacactgagacacccagctagt

SEQ ID NO: 3437526 - DNA, 25 bp, Homo sapien
ggtccccttggtgggcactaacagc

SEQ ID NO: 3437527 - DNA, 25 bp, Homo sapien
gacgaggtccccttggtgggcacta

SEQ ID NO: 3437528 - DNA, 25 bp, Homo sapien
tgtgctcacaaatgatccactcctt

SEQ ID NO: 3437529 - DNA, 25 bp, Homo sapien
ttctcttcgtggatgacgacgaggt

SEQ ID NO: 3437530 - DNA, 25 bp, Homo sapien
gctggccccggtgtggcgcattggt

SEQ ID NO: 3437531 - DNA, 25 bp, Homo sapien
gagactgatgctggccccggtgtgg

SEQ ID NO: 3437532 - DNA, 25 bp, Homo sapien
ggagactgatgctggccccggtgtg

SEQ ID NO: 3437533 - DNA, 25 bp, Homo sapien
gatgctggccccggtgtggcgcatt

SEQ ID NO: 3437534 - DNA, 25 bp, Homo sapien
gagtgttggcatcgccctggggagc

SEQ ID NO: 3437535 - DNA, 25 bp, Homo sapien
gggagtgttggcatcgccctgggga

SEQ ID NO: 3437536 - DNA, 25 bp, Homo sapien
gtgtgggagtgttggcatcgccctg

SEQ ID NO: 3437537 - DNA, 25 bp, Homo sapien
catggtggtgctcatgaattctggt

SEQ ID NO: 3437538 - DNA, 25 bp, Homo sapien
gggacacttttcggtcagtgcagcc

SEQ ID NO: 3437539 - DNA, 25 bp, Homo sapien
tggggacacttttcggtcagtgcag

SEQ ID NO: 3437540 - DNA, 25 bp, Homo sapien
ccgtggggacacttttcggtcagtg

SEQ ID NO: 3437541 - DNA, 25 bp, Homo sapien
cgtggggacacttttcggtcagtgc

SEQ ID NO: 3437542 - DNA, 25 bp, Homo sapien
cctgctcgagcaaggacgctgagga

SEQ ID NO: 3437543 - DNA, 25 bp, Homo sapien
cacttttacagttgggccctcctgc

SEQ ID NO: 3437544 - DNA, 25 bp, Homo sapien
tgggccctcctgctcgagcaaggac

SEQ ID NO: 3437545 - DNA, 25 bp, Homo sapien
gacgctgaggagtgtggttgtgaat

SEQ ID NO: 3437546 - DNA, 25 bp, Homo sapien
gagtactgagccaagaagtactgca

SEQ ID NO: 3437547 - DNA, 25 bp, Homo sapien
actgtgccaaacagtactgcaccaa

SEQ ID NO: 3437548 - DNA, 25 bp, Homo sapien
tccctttcgcaggaggctgattcga

SEQ ID NO: 3437549 - DNA, 25 bp, Homo sapien
cctgaaagagggtgaagcggcctcc

SEQ ID NO: 3437550 - DNA, 25 bp, Homo sapien
aaagttcaggtgcatcatatcaagg

SEQ ID NO: 3437551 - DNA, 25 bp, Homo sapien
agcggcctcccagggaagctgatgc

SEQ ID NO: 3437552 - DNA, 25 bp, Homo sapien
ttctcatctcgtctgagaatgtggc

SEQ ID NO: 3437553 - DNA, 25 bp, Homo sapien
aaaacacaagttctcgaggtcatgt

SEQ ID NO: 3437554 - DNA, 25 bp, Homo sapien
caggctcgcccctgctgcgtggttg

SEQ ID NO: 3437555 - DNA, 25 bp, Homo sapien
tcatgttttcggaggcctgcaattg

SEQ ID NO: 3437556 - DNA, 25 bp, Homo sapien
tatgtgggtcaccagcaaggagtac

SEQ ID NO: 3437557 - DNA, 25 bp, Homo sapien
ttgcctgtgccttcgacaccaactg

SEQ ID NO: 3437558 - DNA, 25 bp, Homo sapien
gcttgggtaggtggctccatcttgt

SEQ ID NO: 3437559 - DNA, 25 bp, Homo sapien
ccatcatcagtagaaaaagcttctg

SEQ ID NO: 3437560 - DNA, 25 bp, Homo sapien
gaattttctgcttgccctatgactg

SEQ ID NO: 3437561 - DNA, 25 bp, Homo sapien
tccctagggtgttgtgtagaactct

SEQ ID NO: 3437562 - DNA, 25 bp, Homo sapien
gcctggagtctgcagacctcagaga

SEQ ID NO: 3437563 - DNA, 25 bp, Homo sapien
tctccagcgaggaggtctcagtccc

SEQ ID NO: 3437564 - DNA, 25 bp, Homo sapien
tcgccccgggacgtgagccctagga

SEQ ID NO: 3437565 - DNA, 25 bp, Homo sapien
tgttttgctccttgcggtgcaccgg

SEQ ID NO: 3437566 - DNA, 25 bp, Homo sapien
gtgcaccggcgcctggacatacgct

SEQ ID NO: 3437567 - DNA, 25 bp, Homo sapien
ttatggaggatcctcttcgccccgg

SEQ ID NO: 3437568 - DNA, 25 bp, Homo sapien
gttaagtcctagaaactgggtcaca

SEQ ID NO: 3437569 - DNA, 25 bp, Homo sapien
tatttcaggttgacagccttctaac

SEQ ID NO: 3437570 - DNA, 25 bp, Homo sapien
tgtggctccctgattagatcctggg

SEQ ID NO: 3437571 - DNA, 25 bp, Homo sapien
tattatcccgtacttagaccagact

SEQ ID NO: 3437572 - DNA, 25 bp, Homo sapien
catggtcagctggtcggtggtctct

SEQ ID NO: 3437573 - DNA, 25 bp, Homo sapien
gacacatgccctcttattgagcaaa

SEQ ID NO: 3437574 - DNA, 25 bp, Homo sapien
taaacggtcgtagcctgcaaggtgg

SEQ ID NO: 3437575 - DNA, 25 bp, Homo sapien
tctattaacgggtcagctggtcggc

SEQ ID NO: 3437576 - DNA, 25 bp, Homo sapien
cagggtcccagcgaggtaggcggct

SEQ ID NO: 3437577 - DNA, 25 bp, Homo sapien
cctggccgcagtcgcttgggcagga

SEQ ID NO: 3437578 - DNA, 25 bp, Homo sapien
taggcggctgggacgccggaccttc

SEQ ID NO: 3437579 - DNA, 25 bp, Homo sapien
ccgcagtcgcttgggcaggaggcca

SEQ ID NO: 3437580 - DNA, 25 bp, Homo sapien
agggcccactggttgagtgcgcagg

SEQ ID NO: 3437581 - DNA, 25 bp, Homo sapien
cccactggttgagtgcgcaggtggc

SEQ ID NO: 3437582 - DNA, 25 bp, Homo sapien
ttctttgcaaattgccctcgaagtc

SEQ ID NO: 3437583 - DNA, 25 bp, Homo sapien
tctttgcaaattgccctcgaagtcc

SEQ ID NO: 3437584 - DNA, 25 bp, Homo sapien
ggtcttgggcagcagcttccaacaa

SEQ ID NO: 3437585 - DNA, 25 bp, Homo sapien
tggtcttgggcagcagcttccaaca

SEQ ID NO: 3437586 - DNA, 25 bp, Homo sapien
ttgggcagcagcttccaacaagcac

SEQ ID NO: 3437587 - DNA, 25 bp, Homo sapien
tcttgggcagcagcttccaacaagc

SEQ ID NO: 3437588 - DNA, 25 bp, Homo sapien
gctctggtccaagcctgtatcttgc

SEQ ID NO: 3437589 - DNA, 25 bp, Homo sapien
ggtccaagcctgtatcttgctcctc

SEQ ID NO: 3437590 - DNA, 25 bp, Homo sapien
tctggtccaagcctgtatcttgctc

SEQ ID NO: 3437591 - DNA, 25 bp, Homo sapien
ccaagcctgtatcttgctcctctgt

SEQ ID NO: 3437592 - DNA, 25 bp, Homo sapien
gaaactggccttcatctggtaaaag

SEQ ID NO: 3437593 - DNA, 25 bp, Homo sapien
taattactcaacatgggaatctaga

SEQ ID NO: 3437594 - DNA, 25 bp, Homo sapien
ggaaaactgatgctggtatcgctag

SEQ ID NO: 3437595 - DNA, 25 bp, Homo sapien
aatctagacttattcagcctccctg

SEQ ID NO: 3437596 - DNA, 25 bp, Homo sapien
ataatgatcccaacatccgtagccg

SEQ ID NO: 3437597 - DNA, 25 bp, Homo sapien
tccccacgtcgcagatgatgtcctg

SEQ ID NO: 3437598 - DNA, 25 bp, Homo sapien
ccacaagggccgctaggacttgaaa

SEQ ID NO: 3437599 - DNA, 25 bp, Homo sapien
aaacgagtgcaagagggtgtccgac

SEQ ID NO: 3437600 - DNA, 25 bp, Homo sapien
tatgcagcctaggacatgggaaccg

SEQ ID NO: 3437601 - DNA, 25 bp, Homo sapien
aacatgtggacatggaatgagcccc

SEQ ID NO: 3437602 - DNA, 25 bp, Homo sapien
gcataaggcctttcgtatccctgga

SEQ ID NO: 3437603 - DNA, 25 bp, Homo sapien
cattcccctttgtgcagagtctgct

SEQ ID NO: 3437604 - DNA, 25 bp, Homo sapien
tgccaaggaagaagcgagccaaggt

SEQ ID NO: 3437605 - DNA, 25 bp, Homo sapien
tagcatcatccgtgtgaacagggca

SEQ ID NO: 3437606 - DNA, 25 bp, Homo sapien
gaaactaagagagtccacaggacca

SEQ ID NO: 3437607 - DNA, 25 bp, Homo sapien
ggaaattcatcagagcggcaaaagg

SEQ ID NO: 3437608 - DNA, 25 bp, Homo sapien
agggtcagaggaggactgcgacaac

SEQ ID NO: 3437609 - DNA, 25 bp, Homo sapien
ggtcggggtgacatcacagctggga

SEQ ID NO: 3437610 - DNA, 25 bp, Homo sapien
gtcagaggaggactgcgacaacaga

SEQ ID NO: 3437611 - DNA, 25 bp, Homo sapien
cagaggaggactgcgacaacagacg

SEQ ID NO: 3437612 - DNA, 25 bp, Homo sapien
tcaaagtcagcaggggaaaagtttg

SEQ ID NO: 3437613 - DNA, 25 bp, Homo sapien
aagtttgagcaaaaatgaaccaaca

SEQ ID NO: 3437614 - DNA, 25 bp, Homo sapien
attcaaagtcagcaggggaaaagtt

SEQ ID NO: 3437615 - DNA, 25 bp, Homo sapien
gaaaagtttgagcaaaaatgaacca

SEQ ID NO: 3437616 - DNA, 25 bp, Homo sapien
tcttgttttgttcaatggagcctcc

SEQ ID NO: 3437617 - DNA, 25 bp, Homo sapien
cctcttccttgaggaccgtttgaag

SEQ ID NO: 3437618 - DNA, 25 bp, Homo sapien
ccgtttgaagaaacgatgcaggatg

SEQ ID NO: 3437619 - DNA, 25 bp, Homo sapien
aaacccttgtggagcagaactaagg

SEQ ID NO: 3437620 - DNA, 25 bp, Homo sapien
ctgcagttgtagcggacgtttcggt

SEQ ID NO: 3437621 - DNA, 25 bp, Homo sapien
cagttgtagcggacgtttcggtgca

SEQ ID NO: 3437622 - DNA, 25 bp, Homo sapien
gcggacgtttcggtgcattacaggc

SEQ ID NO: 3437623 - DNA, 25 bp, Homo sapien
tgtagcggacgtttcggtgcattac

SEQ ID NO: 3437624 - DNA, 25 bp, Homo sapien
ctcgcggtagttgccttcattggcc

SEQ ID NO: 3437625 - DNA, 25 bp, Homo sapien
gactcctcgaccacggggtgaacca

SEQ ID NO: 3437626 - DNA, 25 bp, Homo sapien
ccatcttgggtctgatgagcaggat

SEQ ID NO: 3437627 - DNA, 25 bp, Homo sapien
tagttgccttcattggccaaggcca

SEQ ID NO: 3437628 - DNA, 25 bp, Homo sapien
cgcacatcccaggagtggtcaggca

SEQ ID NO: 3437629 - DNA, 25 bp, Homo sapien
taaccgatgggaagcctctagagga

SEQ ID NO: 3437630 - DNA, 25 bp, Homo sapien
gggacattgtgtaaccgcgccctga

SEQ ID NO: 3437631 - DNA, 25 bp, Homo sapien
tacacacagcggaggtgcttaacgc

SEQ ID NO: 3437632 - DNA, 25 bp, Homo sapien
cagtatcattcaagatggaagtggc

SEQ ID NO: 3437633 - DNA, 25 bp, Homo sapien
ggagaccagctatgccagtaaatgc

SEQ ID NO: 3437634 - DNA, 25 bp, Homo sapien
gaagtggcacttcacctaacatgac

SEQ ID NO: 3437635 - DNA, 25 bp, Homo sapien
gaatgacccaaatgtcaaccgggtg

SEQ ID NO: 3437636 - DNA, 25 bp, Homo sapien
agagtgcaccagacagaccctgggc

SEQ ID NO: 3437637 - DNA, 25 bp, Homo sapien
cactgggaaccagagtgcaccagac

SEQ ID NO: 3437638 - DNA, 25 bp, Homo sapien
gaccctgggcaccagaacactaggc

SEQ ID NO: 3437639 - DNA, 25 bp, Homo sapien
aggcccagcacatcatcccactggg

SEQ ID NO: 3437640 - DNA, 25 bp, Homo sapien
gctgctgcaccgaaatgcattttaa

SEQ ID NO: 3437641 - DNA, 25 bp, Homo sapien
tttccctcgactcatgcaaagacac

SEQ ID NO: 3437642 - DNA, 25 bp, Homo sapien
tgcaggaaccgtccaaacatctctc

SEQ ID NO: 3437643 - DNA, 25 bp, Homo sapien
cctctgtagcctgttgacggcgatg

SEQ ID NO: 3437644 - DNA, 25 bp, Homo sapien
tgtcaggtcctgtatcatccgaggc

SEQ ID NO: 3437645 - DNA, 25 bp, Homo sapien
tatcatccgaggcagaaagtactcc

SEQ ID NO: 3437646 - DNA, 25 bp, Homo sapien
tccgaggcagaaagtactcctctgt

SEQ ID NO: 3437647 - DNA, 25 bp, Homo sapien
ggtcctgtatcatccgaggcagaaa

SEQ ID NO: 3437648 - DNA, 25 bp, Homo sapien
acagatctcacttccaatgcaggtg

SEQ ID NO: 3437649 - DNA, 25 bp, Homo sapien
caccgcatctccgaagggtacggtt

SEQ ID NO: 3437650 - DNA, 25 bp, Homo sapien
ctcacagatctcacttccaatgcag

SEQ ID NO: 3437651 - DNA, 25 bp, Homo sapien
accagcaccgcatctccgaagggta

SEQ ID NO: 3437652 - DNA, 25 bp, Homo sapien
ccgaggcgttggtgatgatctccac

SEQ ID NO: 3437653 - DNA, 25 bp, Homo sapien
tggctttgcgcagcacttggtggct

SEQ ID NO: 3437654 - DNA, 25 bp, Homo sapien
cttgctggtgaccatagtcacgaga

SEQ ID NO: 3437655 - DNA, 25 bp, Homo sapien
tagtcacgagatccaccctggtgtt

SEQ ID NO: 3437656 - DNA, 25 bp, Homo sapien
gacgcttccgttcatggcaatcatg

SEQ ID NO: 3437657 - DNA, 25 bp, Homo sapien
ttctggttggccagcaagtaaatcc

SEQ ID NO: 3437658 - DNA, 25 bp, Homo sapien
acagccgtcgtagtacaggcggtcc

SEQ ID NO: 3437659 - DNA, 25 bp, Homo sapien
gaaaactgggatccttgagcaaaga

SEQ ID NO: 3437660 - DNA, 25 bp, Homo sapien
caggagctcggtctctgcacagaga

SEQ ID NO: 3437661 - DNA, 25 bp, Homo sapien
cccaggcatgtccaggcccgctcat

SEQ ID NO: 3437662 - DNA, 25 bp, Homo sapien
caggcatgtccaggcccgctcatta

SEQ ID NO: 3437663 - DNA, 25 bp, Homo sapien
gagccaggagctcggtctctgcaca

SEQ ID NO: 3437664 - DNA, 25 bp, Homo sapien
gctaatgcgcatctttagccgcaga

SEQ ID NO: 3437665 - DNA, 25 bp, Homo sapien
tctttagccgcagaatgtgcagagc

SEQ ID NO: 3437666 - DNA, 25 bp, Homo sapien
ccctgtgctaatgcgcatctttagc

SEQ ID NO: 3437667 - DNA, 25 bp, Homo sapien
tgcgcatctttagccgcagaatgtg

SEQ ID NO: 3437668 - DNA, 25 bp, Homo sapien
acactgtcatgtggaaagcagggcc

SEQ ID NO: 3437669 - DNA, 25 bp, Homo sapien
tccaaagacgagtcaggcaatgctg

SEQ ID NO: 3437670 - DNA, 25 bp, Homo sapien
ggtgaatccgctgctttaatgccca

SEQ ID NO: 3437671 - DNA, 25 bp, Homo sapien
aatgatgaagcgcaaggaggcctct

SEQ ID NO: 3437672 - DNA, 25 bp, Homo sapien
ggcaacatcaggaactctagagacg

SEQ ID NO: 3437673 - DNA, 25 bp, Homo sapien
cgtgtaaggcaacggctcccggatt

SEQ ID NO: 3437674 - DNA, 25 bp, Homo sapien
aacaactgcctggtgctcactaaat

SEQ ID NO: 3437675 - DNA, 25 bp, Homo sapien
cgaggactccgatttggtggcttga

SEQ ID NO: 3437676 - DNA, 25 bp, Homo sapien
aggacagcgcggccactctgaatac

SEQ ID NO: 3437677 - DNA, 25 bp, Homo sapien
agcctgaggacagcgcggccactct

SEQ ID NO: 3437678 - DNA, 25 bp, Homo sapien
tgaggacagcgcggccactctgaat

SEQ ID NO: 3437679 - DNA, 25 bp, Homo sapien
acagcgcggccactctgaatacagc

SEQ ID NO: 3437680 - DNA, 25 bp, Homo sapien
ggagaccgattcacgcatcctgtgg

SEQ ID NO: 3437681 - DNA, 25 bp, Homo sapien
tgaccatttcaggtgcaccacggag

SEQ ID NO: 3437682 - DNA, 25 bp, Homo sapien
gatcgttccatgagaaggtggctcc

SEQ ID NO: 3437683 - DNA, 25 bp, Homo sapien
gccacggtccgtgtgaagccataaa

SEQ ID NO: 3437684 - DNA, 25 bp, Homo sapien
tccagatccagcgtggccgtcagga

SEQ ID NO: 3437685 - DNA, 25 bp, Homo sapien
gaaatctccgccctgtagctccgga

SEQ ID NO: 3437686 - DNA, 25 bp, Homo sapien
ctgtagctccggacgtcctccagat

SEQ ID NO: 3437687 - DNA, 25 bp, Homo sapien
cgccaggtttcgagatgaaatctcc

SEQ ID NO: 3437688 - DNA, 25 bp, Homo sapien
gagcatcccacacaggtgtctactg

SEQ ID NO: 3437689 - DNA, 25 bp, Homo sapien
ccacgtctttgatgagcatcccaca

SEQ ID NO: 3437690 - DNA, 25 bp, Homo sapien
gggccactttccacgtctttgatga

SEQ ID NO: 3437691 - DNA, 25 bp, Homo sapien
cacaggtgtctactggagcactcac

SEQ ID NO: 3437692 - DNA, 25 bp, Homo sapien
tcttccttgtgtggcagcccctagc

SEQ ID NO: 3437693 - DNA, 25 bp, Homo sapien
cctatttgtgacgatgtcctgcaga

SEQ ID NO: 3437694 - DNA, 25 bp, Homo sapien
gaagagtccgctctgttatgagcat

SEQ ID NO: 3437695 - DNA, 25 bp, Homo sapien
accttgcctccaactgccgaagtgg

SEQ ID NO: 3437696 - DNA, 25 bp, Homo sapien
ggtggctgcacccaacacatagata

SEQ ID NO: 3437697 - DNA, 25 bp, Homo sapien
gaacactctctgaccatacaaaggg

SEQ ID NO: 3437698 - DNA, 25 bp, Homo sapien
tcccaatgaaacgtcgagaataggc

SEQ ID NO: 3437699 - DNA, 25 bp, Homo sapien
gaaagtggaaacattcccgatgccc

SEQ ID NO: 3437700 - DNA, 25 bp, Homo sapien
tggtatttccactcgatgggctcag

SEQ ID NO: 3437701 - DNA, 25 bp, Homo sapien
gagggcaaagtccaccttcactctg

SEQ ID NO: 3437702 - DNA, 25 bp, Homo sapien
gccagcaagtcctcgtggcacgaga

SEQ ID NO: 3437703 - DNA, 25 bp, Homo sapien
gtatttccactcgatgggctcagag

SEQ ID NO: 3437704 - DNA, 25 bp, Homo sapien
ctttaggcacctcgtgagaagggac

SEQ ID NO: 3437705 - DNA, 25 bp, Homo sapien
gaaccacagaatggacggacagcac

SEQ ID NO: 3437706 - DNA, 25 bp, Homo sapien
ggcaatcagaacatggagcccggag

SEQ ID NO: 3437707 - DNA, 25 bp, Homo sapien
ttctgaagacagacccaggacgtgg

SEQ ID NO: 3437708 - DNA, 25 bp, Homo sapien
ccagagccagcaggcaggtccaagg

SEQ ID NO: 3437709 - DNA, 25 bp, Homo sapien
tgacttcgtcttaaaaaatcccaga

SEQ ID NO: 3437710 - DNA, 25 bp, Homo sapien
atcccagagccagcaggcaggtcca

SEQ ID NO: 3437711 - DNA, 25 bp, Homo sapien
aaatcccagagccagcaggcaggtc

SEQ ID NO: 3437712 - DNA, 25 bp, Homo sapien
ggtcaggacaaatacccgcacgtgg

SEQ ID NO: 3437713 - DNA, 25 bp, Homo sapien
gcaagatggtgagcgtgaccctgaa

SEQ ID NO: 3437714 - DNA, 25 bp, Homo sapien
tcaaggaggcgtccacagaaatgca

SEQ ID NO: 3437715 - DNA, 25 bp, Homo sapien
caatcagacagcgtgagcagagcct

SEQ ID NO: 3437716 - DNA, 25 bp, Homo sapien
cacatggagtagatgaggcaggcgg

SEQ ID NO: 3437717 - DNA, 25 bp, Homo sapien
ctggcagcacatggagtagatgagg

SEQ ID NO: 3437718 - DNA, 25 bp, Homo sapien
caggcggtggctgcgctgtccaccc

SEQ ID NO: 3437719 - DNA, 25 bp, Homo sapien
tggctgcgctgtccaccccgccact

SEQ ID NO: 3437720 - DNA, 25 bp, Homo sapien
ttccactcctcacggcctcgcagac

SEQ ID NO: 3437721 - DNA, 25 bp, Homo sapien
tgggatgtttacatagttccacccc

SEQ ID NO: 3437722 - DNA, 25 bp, Homo sapien
gtgtgtgggatgtttacatagttcc

SEQ ID NO: 3437723 - DNA, 25 bp, Homo sapien
ttacatagttccaccccggtctaca

SEQ ID NO: 3437724 - DNA, 25 bp, Homo sapien
aaaccaccaggacagaatgggtgga

SEQ ID NO: 3437725 - DNA, 25 bp, Homo sapien
tcctgggaggagttcttgctggcca

SEQ ID NO: 3437726 - DNA, 25 bp, Homo sapien
tcagtatgcgtccacagaggtctcg

SEQ ID NO: 3437727 - DNA, 25 bp, Homo sapien
acgatggtgcggacatcagccagca

SEQ ID NO: 3437728 - DNA, 25 bp, Homo sapien
tagctgatctggttcacgatggtgc

SEQ ID NO: 3437729 - DNA, 25 bp, Homo sapien
cggctggatcgatgttgagactgat

SEQ ID NO: 3437730 - DNA, 25 bp, Homo sapien
gcccatgacggccttcacggctgga

SEQ ID NO: 3437731 - DNA, 25 bp, Homo sapien
cctccatgagctgcaaacagagggc

SEQ ID NO: 3437732 - DNA, 25 bp, Homo sapien
gccttcacggctggatcgatgttga

SEQ ID NO: 3437733 - DNA, 25 bp, Homo sapien
gaccgacgtcttcagtgaggcatac

SEQ ID NO: 3437734 - DNA, 25 bp, Homo sapien
tccctgaggattaaagagacacaca

SEQ ID NO: 3437735 - DNA, 25 bp, Homo sapien
ttaacaaggctgcatgaccgacgtc

SEQ ID NO: 3437736 - DNA, 25 bp, Homo sapien
taggtaaccggtgccatgagcttca

SEQ ID NO: 3437737 - DNA, 25 bp, Homo sapien
agaggctcaactgagcaaacagata

SEQ ID NO: 3437738 - DNA, 25 bp, Homo sapien
taggcgaggaccatccgtattcgag

SEQ ID NO: 3437739 - DNA, 25 bp, Homo sapien
acgttggcggatcccagcacgagga

SEQ ID NO: 3437740 - DNA, 25 bp, Homo sapien
tctcatccacgttggcggatcccag

SEQ ID NO: 3437741 - DNA, 25 bp, Homo sapien
ggatgcagaactggacgaaggccct

SEQ ID NO: 3437742 - DNA, 25 bp, Homo sapien
tggagcagtcgtacttggtcaggta

SEQ ID NO: 3437743 - DNA, 25 bp, Homo sapien
aaggccctgaggtccgtcttgctga

SEQ ID NO: 3437744 - DNA, 25 bp, Homo sapien
ggttgatgtccgcactggagcagtc

SEQ ID NO: 3437745 - DNA, 25 bp, Homo sapien
agccaagggctccagctctgcggtg

SEQ ID NO: 3437746 - DNA, 25 bp, Homo sapien
tgcggtggccggcgccaacaggatg

SEQ ID NO: 3437747 - DNA, 25 bp, Homo sapien
tcgtcggtctgggacacctgtccat

SEQ ID NO: 3437748 - DNA, 25 bp, Homo sapien
tgtccatcagccaagggctccagct

SEQ ID NO: 3437749 - DNA, 25 bp, Homo sapien
tgtcaaaggccagggatgtgactga

SEQ ID NO: 3437750 - DNA, 25 bp, Homo sapien
tttctggggcgccaaccatgaggaa

SEQ ID NO: 3437751 - DNA, 25 bp, Homo sapien
gaattgaagtgtcaaaggccaggga

SEQ ID NO: 3437752 - DNA, 25 bp, Homo sapien
ccatgaggaagtgaattgaagtgtc

SEQ ID NO: 3437753 - DNA, 25 bp, Homo sapien
tgaacggtggctcaccaaggagcgc

SEQ ID NO: 3437754 - DNA, 25 bp, Homo sapien
caaggagcgctcatgtctgaaggcc

SEQ ID NO: 3437755 - DNA, 25 bp, Homo sapien
catggataggtactggtccctggcc

SEQ ID NO: 3437756 - DNA, 25 bp, Homo sapien
tgacatctcttacgagggccaggag

SEQ ID NO: 3437757 - DNA, 25 bp, Homo sapien
agtttcccatagaccgagagctccg

SEQ ID NO: 3437758 - DNA, 25 bp, Homo sapien
cacatgccgaggagtttgcagaaca

SEQ ID NO: 3437759 - DNA, 25 bp, Homo sapien
gaacatgctgtagggccccatcttg

SEQ ID NO: 3437760 - DNA, 25 bp, Homo sapien
gagctccgcatatgtcatccccata

SEQ ID NO: 3437761 - DNA, 25 bp, Homo sapien
cacgagcttcatgttaccaaaactg

SEQ ID NO: 3437762 - DNA, 25 bp, Homo sapien
ctggtgggcgtgcaacacacgagct

SEQ ID NO: 3437763 - DNA, 25 bp, Homo sapien
gaattcccatgctggatcatacaag

SEQ ID NO: 3437764 - DNA, 25 bp, Homo sapien
gcaacacacgagcttcatgttacca

SEQ ID NO: 3437765 - DNA, 25 bp, Homo sapien
tacagaaatggtcgcagatcaaacc

SEQ ID NO: 3437766 - DNA, 25 bp, Homo sapien
gattttctatgcaccgaaactgcca

SEQ ID NO: 3437767 - DNA, 25 bp, Homo sapien
gaaaaaccgcttcactttgtcagcg

SEQ ID NO: 3437768 - DNA, 25 bp, Homo sapien
cctcagggctgtagttctcggcgtg

SEQ ID NO: 3437769 - DNA, 25 bp, Homo sapien
agagaaacatttctgctggatttac

SEQ ID NO: 3437770 - DNA, 25 bp, Homo sapien
cagacatgaaacatggagagagaaa

SEQ ID NO: 3437771 - DNA, 25 bp, Homo sapien
gacatgaaacatggagagagaaaca

SEQ ID NO: 3437772 - DNA, 25 bp, Homo sapien
ctacagacatgaaacatggagagag

SEQ ID NO: 3437773 - DNA, 25 bp, Homo sapien
ttcatggaaataacctcacgtttct

SEQ ID NO: 3437774 - DNA, 25 bp, Homo sapien
tcaatccttcatggaaataacctca

SEQ ID NO: 3437775 - DNA, 25 bp, Homo sapien
tcatggaaataacctcacgtttctt

SEQ ID NO: 3437776 - DNA, 25 bp, Homo sapien
cttcatggaaataacctcacgtttc

SEQ ID NO: 3437777 - DNA, 25 bp, Homo sapien
agttactgtgtatataagaaagttt

SEQ ID NO: 3437778 - DNA, 25 bp, Homo sapien
aaagttactgtgtatataagaaagt

SEQ ID NO: 3437779 - DNA, 25 bp, Homo sapien
aagttactgtgtatataagaaagtt

SEQ ID NO: 3437780 - DNA, 25 bp, Homo sapien
tagccaaaaggagtgcatgccagac

SEQ ID NO: 3437781 - DNA, 25 bp, Homo sapien
gttggaagccatgacgccatctgga

SEQ ID NO: 3437782 - DNA, 25 bp, Homo sapien
taatgccagcaaatagagcctagcc

SEQ ID NO: 3437783 - DNA, 25 bp, Homo sapien
tggataccctggctacttagaaacg

SEQ ID NO: 3437784 - DNA, 25 bp, Homo sapien
caaaagcgggtcacaagtcccagag

SEQ ID NO: 3437785 - DNA, 25 bp, Homo sapien
agcccgcccctgagtacatcttggt

SEQ ID NO: 3437786 - DNA, 25 bp, Homo sapien
tgttgaaacactggcacgcaccaaa

SEQ ID NO: 3437787 - DNA, 25 bp, Homo sapien
gggtccagatcacgcatagctgtca

SEQ ID NO: 3437788 - DNA, 25 bp, Homo sapien
tggctctgccctctcgagctgtagc

SEQ ID NO: 3437789 - DNA, 25 bp, Homo sapien
tccccgaggacaggaggcctccagg

SEQ ID NO: 3437790 - DNA, 25 bp, Homo sapien
ccagcaatgctgatgatgaggtgct

SEQ ID NO: 3437791 - DNA, 25 bp, Homo sapien
tggctccagcaatgctgatgatgag

SEQ ID NO: 3437792 - DNA, 25 bp, Homo sapien
gtccccgaggacaggaggcctccag

SEQ ID NO: 3437793 - DNA, 25 bp, Homo sapien
cctgggctcctagtgtagggctcct

SEQ ID NO: 3437794 - DNA, 25 bp, Homo sapien
aagcccaggctttattccagcctct

SEQ ID NO: 3437795 - DNA, 25 bp, Homo sapien
ctctcggctgatgcgccgtcccatc

SEQ ID NO: 3437796 - DNA, 25 bp, Homo sapien
aaagttccctccctctcggctgatg

SEQ ID NO: 3437797 - DNA, 25 bp, Homo sapien
cacgatgtgacgtgggtaacagact

SEQ ID NO: 3437798 - DNA, 25 bp, Homo sapien
gtgcactcagacctatccgggcagg

SEQ ID NO: 3437799 - DNA, 25 bp, Homo sapien
ggcatccacgatgtgacgtgggtaa

SEQ ID NO: 3437800 - DNA, 25 bp, Homo sapien
agtgcactcagacctatccgggcag

SEQ ID NO: 3437801 - DNA, 25 bp, Homo sapien
ccaaggcctaaggagaatctcaggt

SEQ ID NO: 3437802 - DNA, 25 bp, Homo sapien
ctgatcatctttcgggtgacacact

SEQ ID NO: 3437803 - DNA, 25 bp, Homo sapien
atcatctttcgggtgacacactccc

SEQ ID NO: 3437804 - DNA, 25 bp, Homo sapien
cagctcccatccaaggcctaaggag

SEQ ID NO: 3437805 - DNA, 25 bp, Homo sapien
tcagctcgactcatgccaggaggac

SEQ ID NO: 3437806 - DNA, 25 bp, Homo sapien
cacccacgaggagaacaggaggaaa

SEQ ID NO: 3437807 - DNA, 25 bp, Homo sapien
gatgagaatgagcaaaggcacccac

SEQ ID NO: 3437808 - DNA, 25 bp, Homo sapien
gtccccgagaactgcacaagctgtg

SEQ ID NO: 3437809 - DNA, 25 bp, Homo sapien
gtgtacgtgcaggttacagaggaca

SEQ ID NO: 3437810 - DNA, 25 bp, Homo sapien
tgtacgtgcaggttacagaggacat

SEQ ID NO: 3437811 - DNA, 25 bp, Homo sapien
gtacgtgcaggttacagaggacatg

SEQ ID NO: 3437812 - DNA, 25 bp, Homo sapien
tgtgtacgtgcaggttacagaggac

SEQ ID NO: 3437813 - DNA, 25 bp, Homo sapien
ttctctggcagacaggagtggaggt

SEQ ID NO: 3437814 - DNA, 25 bp, Homo sapien
ggcagacaggagtggaggtcacaag

SEQ ID NO: 3437815 - DNA, 25 bp, Homo sapien
ctctggcagacaggagtggaggtca

SEQ ID NO: 3437816 - DNA, 25 bp, Homo sapien
tgttctctggcagacaggagtggag

SEQ ID NO: 3437817 - DNA, 25 bp, Homo sapien
caatacctacaatgccaaggttgca

SEQ ID NO: 3437818 - DNA, 25 bp, Homo sapien
aagagggctgcatacaatacctaca

SEQ ID NO: 3437819 - DNA, 25 bp, Homo sapien
tgtgagctatatgcacaggagggct

SEQ ID NO: 3437820 - DNA, 25 bp, Homo sapien
ggaagtacattgcaagaaggcaatg

SEQ ID NO: 3437821 - DNA, 25 bp, Homo sapien
atgtgaagtcatagaatgctgaggt

SEQ ID NO: 3437822 - DNA, 25 bp, Homo sapien
gcgatgtgaagtcatagaatgctga

SEQ ID NO: 3437823 - DNA, 25 bp, Homo sapien
tgaagggatggttcatggatacgac

SEQ ID NO: 3437824 - DNA, 25 bp, Homo sapien
cgatgtgaagtcatagaatgctgag

SEQ ID NO: 3437825 - DNA, 25 bp, Homo sapien
caacatatcctgttgaaataacagg

SEQ ID NO: 3437826 - DNA, 25 bp, Homo sapien
gtcatttaaacgctatattccccag

SEQ ID NO: 3437827 - DNA, 25 bp, Homo sapien
gtatgaagcttacctggaatgtgtc

SEQ ID NO: 3437828 - DNA, 25 bp, Homo sapien
ccagtgcccaactgtaatacagtta

SEQ ID NO: 3437829 - DNA, 25 bp, Homo sapien
caagaggtgactgaactctgttgaa

SEQ ID NO: 3437830 - DNA, 25 bp, Homo sapien
aaaacagcgggtgtgttgtgcagtt

SEQ ID NO: 3437831 - DNA, 25 bp, Homo sapien
tcagaagagccctcaagaggtgact

SEQ ID NO: 3437832 - DNA, 25 bp, Homo sapien
tgttgtgcagtttccaagtaattca

SEQ ID NO: 3437833 - DNA, 25 bp, Homo sapien
gggcattgtttcaccagtgtactca

SEQ ID NO: 3437834 - DNA, 25 bp, Homo sapien
tcctcaaatctcttggccgtgcgat

SEQ ID NO: 3437835 - DNA, 25 bp, Homo sapien
tcttggccgtgcgattgggcattgt

SEQ ID NO: 3437836 - DNA, 25 bp, Homo sapien
gattgggcattgtttcaccagtgta

SEQ ID NO: 3437837 - DNA, 25 bp, Homo sapien
agccggagccacagccttcggaaca

SEQ ID NO: 3437838 - DNA, 25 bp, Homo sapien
ccggagccacagccttcggaacagc

SEQ ID NO: 3437839 - DNA, 25 bp, Homo sapien
acagccggagccacagccttcggaa

SEQ ID NO: 3437840 - DNA, 25 bp, Homo sapien
cccacagccggagccacagccttcg

SEQ ID NO: 3437841 - DNA, 25 bp, Homo sapien
acagcccccacagccggagccacag

SEQ ID NO: 3437842 - DNA, 25 bp, Homo sapien
agccacagcccccacagccggagcc

SEQ ID NO: 3437843 - DNA, 25 bp, Homo sapien
acagccagagccacagcccccacag

SEQ ID NO: 3437844 - DNA, 25 bp, Homo sapien
cacagccagagccacagcccccaca

SEQ ID NO: 3437845 - DNA, 25 bp, Homo sapien
acgggcacacagcagctggagccac

SEQ ID NO: 3437846 - DNA, 25 bp, Homo sapien
gggcttgcagcagcagacgggcaca

SEQ ID NO: 3437847 - DNA, 25 bp, Homo sapien
agacgggcacacagcagctggagcc

SEQ ID NO: 3437848 - DNA, 25 bp, Homo sapien
gggcacacagcagctggagccacat

SEQ ID NO: 3437849 - DNA, 25 bp, Homo sapien
tggagcaggaacaggctggcacaca

SEQ ID NO: 3437850 - DNA, 25 bp, Homo sapien
aggaacaggctggcacacagcagca

SEQ ID NO: 3437851 - DNA, 25 bp, Homo sapien
ccacagctggagcaggaacaggctg

SEQ ID NO: 3437852 - DNA, 25 bp, Homo sapien
agccacagctggagcaggaacaggc

SEQ ID NO: 3437853 - DNA, 25 bp, Homo sapien
agcagcagggcttatagcagctgca

SEQ ID NO: 3437854 - DNA, 25 bp, Homo sapien
cacaagaaccacagccccccttaga

SEQ ID NO: 3437855 - DNA, 25 bp, Homo sapien
ccttagaacccccacaagagccaca

SEQ ID NO: 3437856 - DNA, 25 bp, Homo sapien
gcagggcttatagcagctgcactgg

SEQ ID NO: 3437857 - DNA, 25 bp, Homo sapien
cagcagcagggcttacagcagctgg

SEQ ID NO: 3437858 - DNA, 25 bp, Homo sapien
ggaacagcagcagggcttacagcag

SEQ ID NO: 3437859 - DNA, 25 bp, Homo sapien
gaggaacagcagcagggcttacagc

SEQ ID NO: 3437860 - DNA, 25 bp, Homo sapien
ttacagcagctggactggcagcagc

SEQ ID NO: 3437861 - DNA, 25 bp, Homo sapien
agatcttacactggcagcacacggg

SEQ ID NO: 3437862 - DNA, 25 bp, Homo sapien
acacggggacacagcagctagactg

SEQ ID NO: 3437863 - DNA, 25 bp, Homo sapien
tagactgggagcagcagggattgca

SEQ ID NO: 3437864 - DNA, 25 bp, Homo sapien
gcagcagggattgcagcaactggac

SEQ ID NO: 3437865 - DNA, 25 bp, Homo sapien
tcaggcctctgaatacacaagcaaa

SEQ ID NO: 3437866 - DNA, 25 bp, Homo sapien
catcttatagtgaggaatggaccct

SEQ ID NO: 3437867 - DNA, 25 bp, Homo sapien
gacaggtcacagcttcggaaaatgg

SEQ ID NO: 3437868 - DNA, 25 bp, Homo sapien
tcagtttgtcggcatggtattttta

SEQ ID NO: 3437869 - DNA, 25 bp, Homo sapien
cacaatgacccacgcgggagtggca

SEQ ID NO: 3437870 - DNA, 25 bp, Homo sapien
cagggatacacgatctaggacagtc

SEQ ID NO: 3437871 - DNA, 25 bp, Homo sapien
taggacagtcttaccaaacacataa

SEQ ID NO: 3437872 - DNA, 25 bp, Homo sapien
taataactacctttctcgcctccga

SEQ ID NO: 3437873 - DNA, 25 bp, Homo sapien
tctgtaacgtcattctgtaatgtct

SEQ ID NO: 3437874 - DNA, 25 bp, Homo sapien
tcagttggttttgcaacgtgattct

SEQ ID NO: 3437875 - DNA, 25 bp, Homo sapien
tcttcagcgtcattctgtaacggcc

SEQ ID NO: 3437876 - DNA, 25 bp, Homo sapien
ttcagcgtcattctgtaacggccaa

SEQ ID NO: 3437877 - DNA, 25 bp, Homo sapien
cgtcggatgggtgtaaaattgcctc

SEQ ID NO: 3437878 - DNA, 25 bp, Homo sapien
gaggactggccttgctagaccatag

SEQ ID NO: 3437879 - DNA, 25 bp, Homo sapien
tcagcaatgcctgagagcgtccgct

SEQ ID NO: 3437880 - DNA, 25 bp, Homo sapien
tgtaaaaatactctccacggcgttc

SEQ ID NO: 3437881 - DNA, 25 bp, Homo sapien
ctccagagcagccacagcagcccat

SEQ ID NO: 3437882 - DNA, 25 bp, Homo sapien
gccgcagcccccacagccggagcca

SEQ ID NO: 3437883 - DNA, 25 bp, Homo sapien
acatcccccacagccagagccgcag

SEQ ID NO: 3437884 - DNA, 25 bp, Homo sapien
agcagatgggcacacagcagctaga

SEQ ID NO: 3437885 - DNA, 25 bp, Homo sapien
gggcacacagcagctagagccacat

SEQ ID NO: 3437886 - DNA, 25 bp, Homo sapien
tgcagggcttacaacagctggactg

SEQ ID NO: 3437887 - DNA, 25 bp, Homo sapien
cttacaacagctggactgggaacag

SEQ ID NO: 3437888 - DNA, 25 bp, Homo sapien
ggagcaacagcagggcttatagcag

SEQ ID NO: 3437889 - DNA, 25 bp, Homo sapien
gcagctgcagggcttacaacagctg

SEQ ID NO: 3437890 - DNA, 25 bp, Homo sapien
tgcactggcagcaaattgggacaca

SEQ ID NO: 3437891 - DNA, 25 bp, Homo sapien
cagatcttgcactggcagcaaattg

SEQ ID NO: 3437892 - DNA, 25 bp, Homo sapien
cactggcagcaaattgggacacagc

SEQ ID NO: 3437893 - DNA, 25 bp, Homo sapien
tcttgcactggcagcaaattgggac

SEQ ID NO: 3437894 - DNA, 25 bp, Homo sapien
taggcacttacaaggcgaagccctg

SEQ ID NO: 3437895 - DNA, 25 bp, Homo sapien
gctgagtactgagccctggacgcta

SEQ ID NO: 3437896 - DNA, 25 bp, Homo sapien
tatttagaagattcagcctaggcac

SEQ ID NO: 3437897 - DNA, 25 bp, Homo sapien
ccagctgagatttgtaggcagagcc

SEQ ID NO: 3437898 - DNA, 25 bp, Homo sapien
gattctgaaagtagccaatcgcagg

SEQ ID NO: 3437899 - DNA, 25 bp, Homo sapien
ttacttctcataaagtgctgcgggc

SEQ ID NO: 3437900 - DNA, 25 bp, Homo sapien
cgaaggtccgtgaaagtccatgggt

SEQ ID NO: 3437901 - DNA, 25 bp, Homo sapien
caggcatatgcgcaatccagcttca

SEQ ID NO: 3437902 - DNA, 25 bp, Homo sapien
ggatccaagtatgagcccttcctcc

SEQ ID NO: 3437903 - DNA, 25 bp, Homo sapien
ggaacacaccattgtttctctttcc

SEQ ID NO: 3437904 - DNA, 25 bp, Homo sapien
gatattttctggatccaagtatgag

SEQ ID NO: 3437905 - DNA, 25 bp, Homo sapien
cccggctctttatatcccacatagg

SEQ ID NO: 3437906 - DNA, 25 bp, Homo sapien
gagtcacagcctccacagctggagc

SEQ ID NO: 3437907 - DNA, 25 bp, Homo sapien
acagctggagtcacagcctccacag

SEQ ID NO: 3437908 - DNA, 25 bp, Homo sapien
acagctcccacagctggagtcacag

SEQ ID NO: 3437909 - DNA, 25 bp, Homo sapien
gctggagtcacagcctccacagctg

SEQ ID NO: 3437910 - DNA, 25 bp, Homo sapien
cgggcttgcagcagtagacgggtgc

SEQ ID NO: 3437911 - DNA, 25 bp, Homo sapien
ttgcagcagtagacgggtgcacagc

SEQ ID NO: 3437912 - DNA, 25 bp, Homo sapien
tgcagcagtagacgggtgcacagca

SEQ ID NO: 3437913 - DNA, 25 bp, Homo sapien
gcttgcagcagtagacgggtgcaca

SEQ ID NO: 3437914 - DNA, 25 bp, Homo sapien
ccacgacccgaggaggagcaacagg

SEQ ID NO: 3437915 - DNA, 25 bp, Homo sapien
tgacccacagcctgaagagcaacag

SEQ ID NO: 3437916 - DNA, 25 bp, Homo sapien
gagcaacagggcttacagcagctgc

SEQ ID NO: 3437917 - DNA, 25 bp, Homo sapien
cactgggagcagtagggcttgcagc

SEQ ID NO: 3437918 - DNA, 25 bp, Homo sapien
gcagcaggatgacccacagcctgag

SEQ ID NO: 3437919 - DNA, 25 bp, Homo sapien
gcaggatgacccacagcctgaggat

SEQ ID NO: 3437920 - DNA, 25 bp, Homo sapien
cagcctgaggatgagcagcagggct

SEQ ID NO: 3437921 - DNA, 25 bp, Homo sapien
ctgaggatgagcagcagggcttgca

SEQ ID NO: 3437922 - DNA, 25 bp, Homo sapien
tcttgcactggtagcacacagggac

SEQ ID NO: 3437923 - DNA, 25 bp, Homo sapien
ttgcactggtagcacacagggacac

SEQ ID NO: 3437924 - DNA, 25 bp, Homo sapien
agatcttgcactggtagcacacagg

SEQ ID NO: 3437925 - DNA, 25 bp, Homo sapien
gatcttgcactggtagcacacaggg

SEQ ID NO: 3437926 - DNA, 25 bp, Homo sapien
cccagtgcagtttggctcagacata

SEQ ID NO: 3437927 - DNA, 25 bp, Homo sapien
gcaaaattgcctgggtcttgggata

SEQ ID NO: 3437928 - DNA, 25 bp, Homo sapien
ggagctacctgaggtttcccactag

SEQ ID NO: 3437929 - DNA, 25 bp, Homo sapien
gctggaaaaagacgccctgagccaa

SEQ ID NO: 3437930 - DNA, 25 bp, Homo sapien
gaacaaaattctgccctatgtgaca

SEQ ID NO: 3437931 - DNA, 25 bp, Homo sapien
aatggaattctatttaaccctagag

SEQ ID NO: 3437932 - DNA, 25 bp, Homo sapien
cgatagccatgatatgaaagcacct

SEQ ID NO: 3437933 - DNA, 25 bp, Homo sapien
tcacagcactgctcacgatagccat

SEQ ID NO: 3437934 - DNA, 25 bp, Homo sapien
gcccccacagccggagccacaaccc

SEQ ID NO: 3437935 - DNA, 25 bp, Homo sapien
catagcccccacagccggagccaca

SEQ ID NO: 3437936 - DNA, 25 bp, Homo sapien
cacaacccccacagccggagccaca

SEQ ID NO: 3437937 - DNA, 25 bp, Homo sapien
cttgcagcagcagacgggcacacag

SEQ ID NO: 3437938 - DNA, 25 bp, Homo sapien
ccctttggagcccccacaagagcca

SEQ ID NO: 3437939 - DNA, 25 bp, Homo sapien
agagccacagtcccccttggagccc

SEQ ID NO: 3437940 - DNA, 25 bp, Homo sapien
acaagagccacagtcccccttggag

SEQ ID NO: 3437941 - DNA, 25 bp, Homo sapien
acaggaaccacagccccctttggag

SEQ ID NO: 3437942 - DNA, 25 bp, Homo sapien
aggaaccacagccacctttggagcc

SEQ ID NO: 3437943 - DNA, 25 bp, Homo sapien
acaggaaccacagccacctttggag

SEQ ID NO: 3437944 - DNA, 25 bp, Homo sapien
cacaggaaccacagccacctttgga

SEQ ID NO: 3437945 - DNA, 25 bp, Homo sapien
cccacaggaaccacagccacctttg

SEQ ID NO: 3437946 - DNA, 25 bp, Homo sapien
gcagcaggatccacagcctgaggag

SEQ ID NO: 3437947 - DNA, 25 bp, Homo sapien
tggcagcaggatccacagcctgagg

SEQ ID NO: 3437948 - DNA, 25 bp, Homo sapien
ctggcagcaggatccacagcctgag

SEQ ID NO: 3437949 - DNA, 25 bp, Homo sapien
gcaggatccacagcctgaggagcag

SEQ ID NO: 3437950 - DNA, 25 bp, Homo sapien
ggacacagcagctggactgacagca

SEQ ID NO: 3437951 - DNA, 25 bp, Homo sapien
cagcagctagactggcagcacacgg

SEQ ID NO: 3437952 - DNA, 25 bp, Homo sapien
cagatcttacactggcagcacacgg

SEQ ID NO: 3437953 - DNA, 25 bp, Homo sapien
ttgcagcagctagactggcagcaca

SEQ ID NO: 3437954 - DNA, 25 bp, Homo sapien
tttacagacatgagaggctttattg

SEQ ID NO: 3437955 - DNA, 25 bp, Homo sapien
agggaacaccatggcagttggctgg

SEQ ID NO: 3437956 - DNA, 25 bp, Homo sapien
gaggatgcgtgggatgaattaattc

SEQ ID NO: 3437957 - DNA, 25 bp, Homo sapien
gaaacatgcatttccggagtgagga

SEQ ID NO: 3437958 - DNA, 25 bp, Homo sapien
cctgaaaagtccacgcgcatgtgcc

SEQ ID NO: 3437959 - DNA, 25 bp, Homo sapien
aaaagtccacgcgcatgtgcccgtg

SEQ ID NO: 3437960 - DNA, 25 bp, Homo sapien
tgaaaagtccacgcgcatgtgcccg

SEQ ID NO: 3437961 - DNA, 25 bp, Homo sapien
aaagtccacgcgcatgtgcccgtgc

SEQ ID NO: 3437962 - DNA, 25 bp, Homo sapien
ctgtggctcttgtgggagctccaag

SEQ ID NO: 3437963 - DNA, 25 bp, Homo sapien
ggttcttgtggctgctcccagtcca

SEQ ID NO: 3437964 - DNA, 25 bp, Homo sapien
tcaatccgccagaatcatgggctgc

SEQ ID NO: 3437965 - DNA, 25 bp, Homo sapien
tgcccatttgctgctgcaagcctgt

SEQ ID NO: 3437966 - DNA, 25 bp, Homo sapien
catattacttccaatgtcgcagggt

SEQ ID NO: 3437967 - DNA, 25 bp, Homo sapien
tattacttccaatgtcgcagggtgt

SEQ ID NO: 3437968 - DNA, 25 bp, Homo sapien
tacttccaatgtcgcagggtgtgta

SEQ ID NO: 3437969 - DNA, 25 bp, Homo sapien
aggatcatattacttccaatgtcgc

SEQ ID NO: 3437970 - DNA, 25 bp, Homo sapien
agggagagcaaagcgagaaccggct

SEQ ID NO: 3437971 - DNA, 25 bp, Homo sapien
ggacagggagagcaaagcgagaacc

SEQ ID NO: 3437972 - DNA, 25 bp, Homo sapien
agagcaaagcgagaaccggctgcag

SEQ ID NO: 3437973 - DNA, 25 bp, Homo sapien
gacagggagagcaaagcgagaaccg

SEQ ID NO: 3437974 - DNA, 25 bp, Homo sapien
gaacaagaaagacatctgcgtcaga

SEQ ID NO: 3437975 - DNA, 25 bp, Homo sapien
aaggaacaagaaagacatctgcgtc

SEQ ID NO: 3437976 - DNA, 25 bp, Homo sapien
acaagaaagacatctgcgtcagaca

SEQ ID NO: 3437977 - DNA, 25 bp, Homo sapien
ggaacaagaaagacatctgcgtcag

SEQ ID NO: 3437978 - DNA, 25 bp, Homo sapien
gacgattttatagtaagaccatagg

SEQ ID NO: 3437979 - DNA, 25 bp, Homo sapien
gattttatagtaagaccataggatc

SEQ ID NO: 3437980 - DNA, 25 bp, Homo sapien
cgattttatagtaagaccataggat

SEQ ID NO: 3437981 - DNA, 25 bp, Homo sapien
gggacgattttatagtaagaccata

SEQ ID NO: 3437982 - DNA, 25 bp, Homo sapien
cagcaaacaactgcctggtgagagc

SEQ ID NO: 3437983 - DNA, 25 bp, Homo sapien
gccacaggtggagaaggctttatac

SEQ ID NO: 3437984 - DNA, 25 bp, Homo sapien
tcagcaaacaactgcctggtgagag

SEQ ID NO: 3437985 - DNA, 25 bp, Homo sapien
tggtgagagccacaggtggagaagg

SEQ ID NO: 3437986 - DNA, 25 bp, Homo sapien
tgaagtcaggtacatgccaatgcct

SEQ ID NO: 3437987 - DNA, 25 bp, Homo sapien
tggggggtggtgacacagctgaagt

SEQ ID NO: 3437988 - DNA, 25 bp, Homo sapien
agtcaggtacatgccaatgcctgtt

SEQ ID NO: 3437989 - DNA, 25 bp, Homo sapien
gacacagctgaagtcaggtacatgc

SEQ ID NO: 3437990 - DNA, 25 bp, Homo sapien
ggagtgacaacagcgtatatcaatg

SEQ ID NO: 3437991 - DNA, 25 bp, Homo sapien
cagcatgggagtgacaacagcgtat

SEQ ID NO: 3437992 - DNA, 25 bp, Homo sapien
gacaacagcgtatatcaatgatgcc

SEQ ID NO: 3437993 - DNA, 25 bp, Homo sapien
aacagcgtatatcaatgatgccacc

SEQ ID NO: 3437994 - DNA, 25 bp, Homo sapien
gatggaacagatcatgagattcgac

SEQ ID NO: 3437995 - DNA, 25 bp, Homo sapien
aaaggatggaacagatcatgagatt

SEQ ID NO: 3437996 - DNA, 25 bp, Homo sapien
aggatggaacagatcatgagattcg

SEQ ID NO: 3437997 - DNA, 25 bp, Homo sapien
ccaccaagaaaaaggatggaacaga

SEQ ID NO: 3437998 - DNA, 25 bp, Homo sapien
tgaggaggtaagcaagccgctccag

SEQ ID NO: 3437999 - DNA, 25 bp, Homo sapien
gccatgaggaggtaagcaagccgct

SEQ ID NO: 3438000 - DNA, 25 bp, Homo sapien
aagccatgaggaggtaagcaagccg

SEQ ID NO: 3438001 - DNA, 25 bp, Homo sapien
catgaggaggtaagcaagccgctcc

SEQ ID NO: 3438002 - DNA, 25 bp, Homo sapien
tcagccgggactagagagatcgaac

SEQ ID NO: 3438003 - DNA, 25 bp, Homo sapien
cctagaaagtgctgtgaggcggtcc

SEQ ID NO: 3438004 - DNA, 25 bp, Homo sapien
tgtacagtgccaagcttgcaggcgc

SEQ ID NO: 3438005 - DNA, 25 bp, Homo sapien
cacacgctaagcagaagtaggagca

SEQ ID NO: 3438006 - DNA, 25 bp, Homo sapien
ccacagcctgccaccagtggtagat

SEQ ID NO: 3438007 - DNA, 25 bp, Homo sapien
tccgcgtcgctctcgtccgagttgt

SEQ ID NO: 3438008 - DNA, 25 bp, Homo sapien
tcgccctccgcgtcgctctcgtccg

SEQ ID NO: 3438009 - DNA, 25 bp, Homo sapien
ccctccgcgtcgctctcgtccgagt

SEQ ID NO: 3438010 - DNA, 25 bp, Homo sapien
gcgtcgctctcgtccgagttgtcct

SEQ ID NO: 3438011 - DNA, 25 bp, Homo sapien
cggccgagtccagcctgctcgggac

SEQ ID NO: 3438012 - DNA, 25 bp, Homo sapien
ccggcggccgagtccagcctgctcg

SEQ ID NO: 3438013 - DNA, 25 bp, Homo sapien
agggccggcggccgagtccagcctg

SEQ ID NO: 3438014 - DNA, 25 bp, Homo sapien
gggcagggccggcggccgagtccag

SEQ ID NO: 3438015 - DNA, 25 bp, Homo sapien
gccgggtcgcaagaagaccctgacc

SEQ ID NO: 3438016 - DNA, 25 bp, Homo sapien
ggatggtcgctggagggccgagggc

SEQ ID NO: 3438017 - DNA, 25 bp, Homo sapien
ccctgtccgactcggggatggtcgc

SEQ ID NO: 3438018 - DNA, 25 bp, Homo sapien
tcgggagtctgtctcgccctctgga

SEQ ID NO: 3438019 - DNA, 25 bp, Homo sapien
cctggagggtgtgcctcgggagtct

SEQ ID NO: 3438020 - DNA, 25 bp, Homo sapien
ttcagagctcttcatggcgggggtg

SEQ ID NO: 3438021 - DNA, 25 bp, Homo sapien
cgggtggaggaacggcaccttcagg

SEQ ID NO: 3438022 - DNA, 25 bp, Homo sapien
agagctcttcatggcgggggtgtcc

SEQ ID NO: 3438023 - DNA, 25 bp, Homo sapien
aagaggagcgggtggaggaacggca

SEQ ID NO: 3438024 - DNA, 25 bp, Homo sapien
accagccaggatgggctgcagttct

SEQ ID NO: 3438025 - DNA, 25 bp, Homo sapien
gaccagccaggatgggctgcagttc

SEQ ID NO: 3438026 - DNA, 25 bp, Homo sapien
cagggacagaccagccaggatgggc

SEQ ID NO: 3438027 - DNA, 25 bp, Homo sapien
ggacagggacagaccagccaggatg

SEQ ID NO: 3438028 - DNA, 25 bp, Homo sapien
atatccgtgtcaggcagccctcata

SEQ ID NO: 3438029 - DNA, 25 bp, Homo sapien
aaagatatccgtgtcaggcagccct

SEQ ID NO: 3438030 - DNA, 25 bp, Homo sapien
ccctcataagagatgactctggtat

SEQ ID NO: 3438031 - DNA, 25 bp, Homo sapien
agatatccgtgtcaggcagccctca

SEQ ID NO: 3438032 - DNA, 25 bp, Homo sapien
tccaacaagctaaggaaaaagtata

SEQ ID NO: 3438033 - DNA, 25 bp, Homo sapien
tcagcaaacaactgccaagtgagag

SEQ ID NO: 3438034 - DNA, 25 bp, Homo sapien
agaaaaccaaacatagtactatgga

SEQ ID NO: 3438035 - DNA, 25 bp, Homo sapien
accaaacatagtactatggaaatac

SEQ ID NO: 3438036 - DNA, 25 bp, Homo sapien
caactgccaagtgagagccacaggt

SEQ ID NO: 3438037 - DNA, 25 bp, Homo sapien
tgagcagcctccgcagggcactttg

SEQ ID NO: 3438038 - DNA, 25 bp, Homo sapien
tctgctgagcagcctccgcagggca

SEQ ID NO: 3438039 - DNA, 25 bp, Homo sapien
gcgtacatcactgacgctaccacac

SEQ ID NO: 3438040 - DNA, 25 bp, Homo sapien
acagcgtacatcactgacgctacca

SEQ ID NO: 3438041 - DNA, 25 bp, Homo sapien
ggatggaacagatcatgagattcga

SEQ ID NO: 3438042 - DNA, 25 bp, Homo sapien
gtctcagccacacaagaaaaaggat

SEQ ID NO: 3438043 - DNA, 25 bp, Homo sapien
taatgtggttgccctgtctcagcca

SEQ ID NO: 3438044 - DNA, 25 bp, Homo sapien
aaggatggaacagatcatgagattc

SEQ ID NO: 3438045 - DNA, 25 bp, Homo sapien
tcccgctcctgcccttctggggagt

SEQ ID NO: 3438046 - DNA, 25 bp, Homo sapien
caacgcctccccttccgagaggcct

SEQ ID NO: 3438047 - DNA, 25 bp, Homo sapien
tccacatcctgggctaggcccagtg

SEQ ID NO: 3438048 - DNA, 25 bp, Homo sapien
gccccgcagggagtcccaacgcctc

SEQ ID NO: 3438049 - DNA, 25 bp, Homo sapien
cctgtgtcttgcatgatttggaggt

SEQ ID NO: 3438050 - DNA, 25 bp, Homo sapien
cttgcatgatttggaggtggtggga

SEQ ID NO: 3438051 - DNA, 25 bp, Homo sapien
gctcaaaactcgtggagaattcctc

SEQ ID NO: 3438052 - DNA, 25 bp, Homo sapien
aaaaccgaggctgctcaaaactcgt

SEQ ID NO: 3438053 - DNA, 25 bp, Homo sapien
cagctccggccaggctctgcacctc

SEQ ID NO: 3438054 - DNA, 25 bp, Homo sapien
tgccctggcctaggcggtcgctgtc

SEQ ID NO: 3438055 - DNA, 25 bp, Homo sapien
ctgctcttggccaggccagctccgg

SEQ ID NO: 3438056 - DNA, 25 bp, Homo sapien
cgctcacctgccctggcctaggcgg

SEQ ID NO: 3438057 - DNA, 25 bp, Homo sapien
tgcgcttccccgctccagcaaccag

SEQ ID NO: 3438058 - DNA, 25 bp, Homo sapien
gcgcttccccgctccagcaaccagc

SEQ ID NO: 3438059 - DNA, 25 bp, Homo sapien
gcttccccgctccagcaaccagccg

SEQ ID NO: 3438060 - DNA, 25 bp, Homo sapien
cttccccgctccagcaaccagccgc

SEQ ID NO: 3438061 - DNA, 25 bp, Homo sapien
tgcctggccgcggagcgtcctcccc

SEQ ID NO: 3438062 - DNA, 25 bp, Homo sapien
tgggtgcaggtctcctccctgcctg

SEQ ID NO: 3438063 - DNA, 25 bp, Homo sapien
cctggccgcggagcgtcctccccgt

SEQ ID NO: 3438064 - DNA, 25 bp, Homo sapien
ccctgcctggccgcggagcgtcctc

SEQ ID NO: 3438065 - DNA, 25 bp, Homo sapien
agcgccccgggggatgcaaggaact

SEQ ID NO: 3438066 - DNA, 25 bp, Homo sapien
gacagcgccccgggggatgcaagga

SEQ ID NO: 3438067 - DNA, 25 bp, Homo sapien
ggggatgcaaggaactttccctctc

SEQ ID NO: 3438068 - DNA, 25 bp, Homo sapien
tgcaaggaactttccctctctgtcc

SEQ ID NO: 3438069 - DNA, 25 bp, Homo sapien
tgatcggccctggaaaaccttccag

SEQ ID NO: 3438070 - DNA, 25 bp, Homo sapien
tttcccttctcatcctttccgtgat

SEQ ID NO: 3438071 - DNA, 25 bp, Homo sapien
tcccgggatctcagagaaaattcat

SEQ ID NO: 3438072 - DNA, 25 bp, Homo sapien
aaccttccagagaactgtcctcctt

SEQ ID NO: 3438073 - DNA, 25 bp, Homo sapien
ccttcaggtcatgcgattcccattt

SEQ ID NO: 3438074 - DNA, 25 bp, Homo sapien
atccttcaggtcatgcgattcccat

SEQ ID NO: 3438075 - DNA, 25 bp, Homo sapien
tcaggtcatgcgattcccatttccc

SEQ ID NO: 3438076 - DNA, 25 bp, Homo sapien
caggtcatgcgattcccatttccct

SEQ ID NO: 3438077 - DNA, 25 bp, Homo sapien
cctcctcaaagaaattgctgctgat

SEQ ID NO: 3438078 - DNA, 25 bp, Homo sapien
gaaattgctgctgatcctcacacca

SEQ ID NO: 3438079 - DNA, 25 bp, Homo sapien
aagaaattgctgctgatcctcacac

SEQ ID NO: 3438080 - DNA, 25 bp, Homo sapien
tcctcaaagaaattgctgctgatcc

SEQ ID NO: 3438081 - DNA, 25 bp, Homo sapien
cagacaaaatctcataaaagtgcac

SEQ ID NO: 3438082 - DNA, 25 bp, Homo sapien
ctacgcagacaaaatctcataaaag

SEQ ID NO: 3438083 - DNA, 25 bp, Homo sapien
tacgcagacaaaatctcataaaagt

SEQ ID NO: 3438084 - DNA, 25 bp, Homo sapien
cgcagacaaaatctcataaaagtgc

SEQ ID NO: 3438085 - DNA, 25 bp, Homo sapien
atatccatgggacaacatggtacct

SEQ ID NO: 3438086 - DNA, 25 bp, Homo sapien
catacacttggaaatcactaagaga

SEQ ID NO: 3438087 - DNA, 25 bp, Homo sapien
catgggacaacatggtacctatagt

SEQ ID NO: 3438088 - DNA, 25 bp, Homo sapien
gggacaacatggtacctatagttaa

SEQ ID NO: 3438089 - DNA, 25 bp, Homo sapien
tcttgtctggctgggcagccgagct

SEQ ID NO: 3438090 - DNA, 25 bp, Homo sapien
tctaaagcagcattcagaggtggct

SEQ ID NO: 3438091 - DNA, 25 bp, Homo sapien
ggatgagggcttccatttcatctgc

SEQ ID NO: 3438092 - DNA, 25 bp, Homo sapien
caggagggagaagcttctaaagcag

SEQ ID NO: 3438093 - DNA, 25 bp, Homo sapien
cactaaacgctggaactcttgttga

SEQ ID NO: 3438094 - DNA, 25 bp, Homo sapien
agccctcactaaacgctggaactct

SEQ ID NO: 3438095 - DNA, 25 bp, Homo sapien
cctcactaaacgctggaactcttgt

SEQ ID NO: 3438096 - DNA, 25 bp, Homo sapien
ttccaaggctttccttcagtccagc

SEQ ID NO: 3438097 - DNA, 25 bp, Homo sapien
atgaccaatcaaccgctccagagga

SEQ ID NO: 3438098 - DNA, 25 bp, Homo sapien
accaatcaaccgctccagaggaaac

SEQ ID NO: 3438099 - DNA, 25 bp, Homo sapien
caatcaaccgctccagaggaaacaa

SEQ ID NO: 3438100 - DNA, 25 bp, Homo sapien
ttcatgaccaatcaaccgctccaga

SEQ ID NO: 3438101 - DNA, 25 bp, Homo sapien
aatcaagtgttgaataaaattgcaa

SEQ ID NO: 3438102 - DNA, 25 bp, Homo sapien
caatcaagtgttgaataaaattgca

SEQ ID NO: 3438103 - DNA, 25 bp, Homo sapien
atcaagtgttgaataaaattgcaac

SEQ ID NO: 3438104 - DNA, 25 bp, Homo sapien
taaggcacttgttcttaacaaccgc

SEQ ID NO: 3438105 - DNA, 25 bp, Homo sapien
ggcacttgttcttaacaaccgccat

SEQ ID NO: 3438106 - DNA, 25 bp, Homo sapien
ttcataaggcacttgttcttaacaa

SEQ ID NO: 3438107 - DNA, 25 bp, Homo sapien
cataaggcacttgttcttaacaacc

SEQ ID NO: 3438108 - DNA, 25 bp, Homo sapien
ctttcttagagaatggaccaactac

SEQ ID NO: 3438109 - DNA, 25 bp, Homo sapien
tctttcttagagaatggaccaacta

SEQ ID NO: 3438110 - DNA, 25 bp, Homo sapien
gatctttcttagagaatggaccaac

SEQ ID NO: 3438111 - DNA, 25 bp, Homo sapien
tgatctttcttagagaatggaccaa

SEQ ID NO: 3438112 - DNA, 25 bp, Homo sapien
tattgaacataacaggtgctttcac

SEQ ID NO: 3438113 - DNA, 25 bp, Homo sapien
tatattgaacataacaggtgctttc

SEQ ID NO: 3438114 - DNA, 25 bp, Homo sapien
atattgaacataacaggtgctttca

SEQ ID NO: 3438115 - DNA, 25 bp, Homo sapien
cttatattgaacataacaggtgctt

SEQ ID NO: 3438116 - DNA, 25 bp, Homo sapien
tcctggtgaccaagtctttccaata

SEQ ID NO: 3438117 - DNA, 25 bp, Homo sapien
tggtgaccaagtctttccaatattt

SEQ ID NO: 3438118 - DNA, 25 bp, Homo sapien
ttgggtcctggtgaccaagtctttc

SEQ ID NO: 3438119 - DNA, 25 bp, Homo sapien
cttgggtcctggtgaccaagtcttt

SEQ ID NO: 3438120 - DNA, 25 bp, Homo sapien
tgcaaatccgtaagactcatttcaa

SEQ ID NO: 3438121 - DNA, 25 bp, Homo sapien
atttcaaacacaagacccttgagac

SEQ ID NO: 3438122 - DNA, 25 bp, Homo sapien
ctgcaaatccgtaagactcatttca

SEQ ID NO: 3438123 - DNA, 25 bp, Homo sapien
ctcatttcaaacacaagacccttga

SEQ ID NO: 3438124 - DNA, 25 bp, Homo sapien
gaacatttttcaaccttggaacata

SEQ ID NO: 3438125 - DNA, 25 bp, Homo sapien
ccatcattgttgaacatttttcaac

SEQ ID NO: 3438126 - DNA, 25 bp, Homo sapien
acatgagcttccatcattgttgaac

SEQ ID NO: 3438127 - DNA, 25 bp, Homo sapien
ttccatcattgttgaacatttttca

SEQ ID NO: 3438128 - DNA, 25 bp, Homo sapien
attggcaagagttttctacatcttt

SEQ ID NO: 3438129 - DNA, 25 bp, Homo sapien
gataaattggcaagagttttctaca

SEQ ID NO: 3438130 - DNA, 25 bp, Homo sapien
aggataaattggcaagagttttcta

SEQ ID NO: 3438131 - DNA, 25 bp, Homo sapien
taaattggcaagagttttctacatc

SEQ ID NO: 3438132 - DNA, 25 bp, Homo sapien
cacatttcaggtcagcaggttcggg

SEQ ID NO: 3438133 - DNA, 25 bp, Homo sapien
tatgctcccggaaatgaaagcaggg

SEQ ID NO: 3438134 - DNA, 25 bp, Homo sapien
caataaaacccatcaatgcttggtg

SEQ ID NO: 3438135 - DNA, 25 bp, Homo sapien
ttcgggggtagaggcaaaggtcatg

SEQ ID NO: 3438136 - DNA, 25 bp, Homo sapien
gtcacatgaggacttgacatgcgga

SEQ ID NO: 3438137 - DNA, 25 bp, Homo sapien
aggacttgacatgcggattgtggca

SEQ ID NO: 3438138 - DNA, 25 bp, Homo sapien
cttgacatgcggattgtggcagcct

SEQ ID NO: 3438139 - DNA, 25 bp, Homo sapien
ctggatattgtcacatgaggacttg

SEQ ID NO: 3438140 - DNA, 25 bp, Homo sapien
atgctttagactacgatggcaccac

SEQ ID NO: 3438141 - DNA, 25 bp, Homo sapien
tacatatgctttagactacgatggc

SEQ ID NO: 3438142 - DNA, 25 bp, Homo sapien
catatgctttagactacgatggcac

SEQ ID NO: 3438143 - DNA, 25 bp, Homo sapien
tatgctttagactacgatggcacca

SEQ ID NO: 3438144 - DNA, 25 bp, Homo sapien
agcacgtctttagcaactccttggc

SEQ ID NO: 3438145 - DNA, 25 bp, Homo sapien
gccactgggcgtctttagggtctta

SEQ ID NO: 3438146 - DNA, 25 bp, Homo sapien
tcttagagtctgagtaagcacgtct

SEQ ID NO: 3438147 - DNA, 25 bp, Homo sapien
ttaacttatcatcttcttgggccag

SEQ ID NO: 3438148 - DNA, 25 bp, Homo sapien
tttccagtaacaagaagcggcaaga

SEQ ID NO: 3438149 - DNA, 25 bp, Homo sapien
aagcggcaagacatgacggtgtgtc

SEQ ID NO: 3438150 - DNA, 25 bp, Homo sapien
tggatttccagtaacaagaagcggc

SEQ ID NO: 3438151 - DNA, 25 bp, Homo sapien
acaagaagcggcaagacatgacggt

SEQ ID NO: 3438152 - DNA, 25 bp, Homo sapien
gaggtacttggccttgacgccctcc

SEQ ID NO: 3438153 - DNA, 25 bp, Homo sapien
aggttgggggtgtccacatcctgat

SEQ ID NO: 3438154 - DNA, 25 bp, Homo sapien
tgtgacaaggggcggcatgaggtac

SEQ ID NO: 3438155 - DNA, 25 bp, Homo sapien
ctccccggccagacggtccaggttg

SEQ ID NO: 3438156 - DNA, 25 bp, Homo sapien
tgggatggcagtgaggtgggacggg

SEQ ID NO: 3438157 - DNA, 25 bp, Homo sapien
cagtgaggtgggacggggaggtcat

SEQ ID NO: 3438158 - DNA, 25 bp, Homo sapien
tggcagtgaggtgggacggggaggt

SEQ ID NO: 3438159 - DNA, 25 bp, Homo sapien
ctgggatggcagtgaggtgggacgg

SEQ ID NO: 3438160 - DNA, 25 bp, Homo sapien
tcctcaatcactttgcaataaaacc

SEQ ID NO: 3438161 - DNA, 25 bp, Homo sapien
aaacctgagattgtgaagatgttca

SEQ ID NO: 3438162 - DNA, 25 bp, Homo sapien
ttgtcatttccagtgacggagcagt

SEQ ID NO: 3438163 - DNA, 25 bp, Homo sapien
gtcatttccagtgacggagcagtaa

SEQ ID NO: 3438164 - DNA, 25 bp, Homo sapien
ctataggtacccagcaccatgtccg

SEQ ID NO: 3438165 - DNA, 25 bp, Homo sapien
tataggtacccagcaccatgtccgg

SEQ ID NO: 3438166 - DNA, 25 bp, Homo sapien
ctctcccatccggttaccgaattca

SEQ ID NO: 3438167 - DNA, 25 bp, Homo sapien
tcccatccggttaccgaattcatcc

SEQ ID NO: 3438168 - DNA, 25 bp, Homo sapien
tctcccatccggttaccgaattcat

SEQ ID NO: 3438169 - DNA, 25 bp, Homo sapien
catccggttaccgaattcatccttc

SEQ ID NO: 3438170 - DNA, 25 bp, Homo sapien
tttgattaatttgctccacctttcc

SEQ ID NO: 3438171 - DNA, 25 bp, Homo sapien
tgattaatttgctccacctttccgg

SEQ ID NO: 3438172 - DNA, 25 bp, Homo sapien
taaggcctgtagctgtcgctgtaac

SEQ ID NO: 3438173 - DNA, 25 bp, Homo sapien
taatttttcctaaggcctgtagctg

SEQ ID NO: 3438174 - DNA, 25 bp, Homo sapien
cagtggacacaaagaggctacgttc

SEQ ID NO: 3438175 - DNA, 25 bp, Homo sapien
agaggctacgttccagttcttgatc

SEQ ID NO: 3438176 - DNA, 25 bp, Homo sapien
gaggctacgttccagttcttgatcc

SEQ ID NO: 3438177 - DNA, 25 bp, Homo sapien
acacaaagaggctacgttccagttc

SEQ ID NO: 3438178 - DNA, 25 bp, Homo sapien
tttattgtttccatacattcataat

SEQ ID NO: 3438179 - DNA, 25 bp, Homo sapien
tgaatctcatgatgagcttcctcag

SEQ ID NO: 3438180 - DNA, 25 bp, Homo sapien
aatctcatgatgagcttcctcaggc

SEQ ID NO: 3438181 - DNA, 25 bp, Homo sapien
attgtttccatacattcataataac

SEQ ID NO: 3438182 - DNA, 25 bp, Homo sapien
tggtgcagggggctcagatgggtta

SEQ ID NO: 3438183 - DNA, 25 bp, Homo sapien
ttcttatttcaaaaacggtggtgca

SEQ ID NO: 3438184 - DNA, 25 bp, Homo sapien
cttatttcaaaaacggtggtgcagg

SEQ ID NO: 3438185 - DNA, 25 bp, Homo sapien
caaaaacggtggtgcagggggctca

SEQ ID NO: 3438186 - DNA, 25 bp, Homo sapien
gtctttttcagaagttctgctgctg

SEQ ID NO: 3438187 - DNA, 25 bp, Homo sapien
tttcagaagttctgctgctggcaga

SEQ ID NO: 3438188 - DNA, 25 bp, Homo sapien
taagtaagaaaattacattttctgc

SEQ ID NO: 3438189 - DNA, 25 bp, Homo sapien
tccgatagtggttcctccacgtaca

SEQ ID NO: 3438190 - DNA, 25 bp, Homo sapien
tagaggttgctagcttcggccttct

SEQ ID NO: 3438191 - DNA, 25 bp, Homo sapien
taggacctagaggttgctagcttcg

SEQ ID NO: 3438192 - DNA, 25 bp, Homo sapien
ttaggacctagaggttgctagcttc

SEQ ID NO: 3438193 - DNA, 25 bp, Homo sapien
gacctagaggttgctagcttcggcc

SEQ ID NO: 3438194 - DNA, 25 bp, Homo sapien
tgaaccaaagtagctacaaaacctc

SEQ ID NO: 3438195 - DNA, 25 bp, Homo sapien
tactagcaagtagtctaagaccagt

SEQ ID NO: 3438196 - DNA, 25 bp, Homo sapien
gctacaaaacctcttatcatttgaa

SEQ ID NO: 3438197 - DNA, 25 bp, Homo sapien
gatggcctgcaactgcatgatccaa

SEQ ID NO: 3438198 - DNA, 25 bp, Homo sapien
atacctttctcacaatcagcaaagc

SEQ ID NO: 3438199 - DNA, 25 bp, Homo sapien
catgtgatgatgacgctgaggtgct

SEQ ID NO: 3438200 - DNA, 25 bp, Homo sapien
tgatgatgacgctgaggtgctctgc

SEQ ID NO: 3438201 - DNA, 25 bp, Homo sapien
atgacgctgaggtgctctgcaggct

SEQ ID NO: 3438202 - DNA, 25 bp, Homo sapien
tcatgtgatgatgacgctgaggtgc

SEQ ID NO: 3438203 - DNA, 25 bp, Homo sapien
acattgggtctcttcttcacggtgg

SEQ ID NO: 3438204 - DNA, 25 bp, Homo sapien
caagggatcttgttgacattgggtc

SEQ ID NO: 3438205 - DNA, 25 bp, Homo sapien
agggatcttgttgacattgggtctc

SEQ ID NO: 3438206 - DNA, 25 bp, Homo sapien
cttgatgtagttggacaagggatct

SEQ ID NO: 3438207 - DNA, 25 bp, Homo sapien
tgaacttatcccattgatactgaaa

SEQ ID NO: 3438208 - DNA, 25 bp, Homo sapien
atgaacttatcccattgatactgaa

SEQ ID NO: 3438209 - DNA, 25 bp, Homo sapien
cttatcccattgatactgaaactag

SEQ ID NO: 3438210 - DNA, 25 bp, Homo sapien
aacttatcccattgatactgaaact

SEQ ID NO: 3438211 - DNA, 25 bp, Homo sapien
cgaaagctctgaatgtcttcatatc

SEQ ID NO: 3438212 - DNA, 25 bp, Homo sapien
ccgaaagctctgaatgtcttcatat

SEQ ID NO: 3438213 - DNA, 25 bp, Homo sapien
ctgccagggagccgttgtgggtttg

SEQ ID NO: 3438214 - DNA, 25 bp, Homo sapien
tgccagggagccgttgtgggtttgg

SEQ ID NO: 3438215 - DNA, 25 bp, Homo sapien
tgctggtcgtaagagttcacgagca

SEQ ID NO: 3438216 - DNA, 25 bp, Homo sapien
ctggtcgtaagagttcacgagcatt

SEQ ID NO: 3438217 - DNA, 25 bp, Homo sapien
ctggctgctggtcgtaagagttcac

SEQ ID NO: 3438218 - DNA, 25 bp, Homo sapien
ggctgctggtcgtaagagttcacga

SEQ ID NO: 3438219 - DNA, 25 bp, Homo sapien
tttctatctcaggacagagcagact

SEQ ID NO: 3438220 - DNA, 25 bp, Homo sapien
ttttctatctcaggacagagcagac

SEQ ID NO: 3438221 - DNA, 25 bp, Homo sapien
cttttctatctcaggacagagcaga

SEQ ID NO: 3438222 - DNA, 25 bp, Homo sapien
gctgttgacatcttgttcctagggc

SEQ ID NO: 3438223 - DNA, 25 bp, Homo sapien
acatcttgttcctagggctccaaag

SEQ ID NO: 3438224 - DNA, 25 bp, Homo sapien
tgttgacatcttgttcctagggctc

SEQ ID NO: 3438225 - DNA, 25 bp, Homo sapien
ttgacatcttgttcctagggctcca

SEQ ID NO: 3438226 - DNA, 25 bp, Homo sapien
ccgacgaatggctgtgtatgtcaca

SEQ ID NO: 3438227 - DNA, 25 bp, Homo sapien
gagcagatgccctgtgtacctccct

SEQ ID NO: 3438228 - DNA, 25 bp, Homo sapien
tagcagcaaacagatccgcaagagc

SEQ ID NO: 3438229 - DNA, 25 bp, Homo sapien
caatgctgagcccaatcactgtgcc

SEQ ID NO: 3438230 - DNA, 25 bp, Homo sapien
caagcattgccagcggccaccagaa

SEQ ID NO: 3438231 - DNA, 25 bp, Homo sapien
gtggaagaatcaccggaacctagga

SEQ ID NO: 3438232 - DNA, 25 bp, Homo sapien
tagaggagaatgtcaggtgaagaca

SEQ ID NO: 3438233 - DNA, 25 bp, Homo sapien
tcagaggaagtgaagtccggccgac

SEQ ID NO: 3438234 - DNA, 25 bp, Homo sapien
ggagcgagtccacggtctgccgact

SEQ ID NO: 3438235 - DNA, 25 bp, Homo sapien
agcgagtccacggtctgccgactcg

SEQ ID NO: 3438236 - DNA, 25 bp, Homo sapien
ccaggagcgagtccacggtctgccg

SEQ ID NO: 3438237 - DNA, 25 bp, Homo sapien
cgagtccacggtctgccgactcggg

SEQ ID NO: 3438238 - DNA, 25 bp, Homo sapien
aaggagcgcagggcgcgcgctgcca

SEQ ID NO: 3438239 - DNA, 25 bp, Homo sapien
gcgcagggcgcgcgctgccaggaag

SEQ ID NO: 3438240 - DNA, 25 bp, Homo sapien
agggcgcgcgctgccaggaagcggc

SEQ ID NO: 3438241 - DNA, 25 bp, Homo sapien
ggcgcgcgctgccaggaagcggcgc

SEQ ID NO: 3438242 - DNA, 25 bp, Homo sapien
gcgagccccgcggacctctccgcta

SEQ ID NO: 3438243 - DNA, 25 bp, Homo sapien
agccccgcggacctctccgctagcc

SEQ ID NO: 3438244 - DNA, 25 bp, Homo sapien
cgggggcttcagcacggagacccat

SEQ ID NO: 3438245 - DNA, 25 bp, Homo sapien
ccgcggacctctccgctagccccgc

SEQ ID NO: 3438246 - DNA, 25 bp, Homo sapien
agacctatgatgcttttatgaaggt

SEQ ID NO: 3438247 - DNA, 25 bp, Homo sapien
gagacctatgatgcttttatgaagg

SEQ ID NO: 3438248 - DNA, 25 bp, Homo sapien
gacctatgatgcttttatgaaggtt

SEQ ID NO: 3438249 - DNA, 25 bp, Homo sapien
ggcaaagggctgtgtgatctctccc

SEQ ID NO: 3438250 - DNA, 25 bp, Homo sapien
ggctgtgtgatctctccctggggat

SEQ ID NO: 3438251 - DNA, 25 bp, Homo sapien
aatagaatgagttggcaaagggctg

SEQ ID NO: 3438252 - DNA, 25 bp, Homo sapien
gagttggcaaagggctgtgtgatct

SEQ ID NO: 3438253 - DNA, 25 bp, Homo sapien
ttctgcaaaatatcccgcagcagct

SEQ ID NO: 3438254 - DNA, 25 bp, Homo sapien
cgcagcagctcagaatctgatgagt

SEQ ID NO: 3438255 - DNA, 25 bp, Homo sapien
atctgatgagtctcttaactttgct

SEQ ID NO: 3438256 - DNA, 25 bp, Homo sapien
gagtctcttaactttgcttctaagc

SEQ ID NO: 3438257 - DNA, 25 bp, Homo sapien
tgaaccagcgtttgcagtaaagaca

SEQ ID NO: 3438258 - DNA, 25 bp, Homo sapien
ggcaactgctctctttcagcgtgtg

SEQ ID NO: 3438259 - DNA, 25 bp, Homo sapien
gcgtttgcagtaaagacagtcgcca

SEQ ID NO: 3438260 - DNA, 25 bp, Homo sapien
caactgctctctttcagcgtgtgtc

SEQ ID NO: 3438261 - DNA, 25 bp, Homo sapien
gcaccgggcatacttgactgacggc

SEQ ID NO: 3438262 - DNA, 25 bp, Homo sapien
tctgagagaaagcaccgggcatact

SEQ ID NO: 3438263 - DNA, 25 bp, Homo sapien
accgggcatacttgactgacggcgg

SEQ ID NO: 3438264 - DNA, 25 bp, Homo sapien
aaagcaccgggcatacttgactgac

SEQ ID NO: 3438265 - DNA, 25 bp, Homo sapien
tctccaccagcacctcgtacagctc

SEQ ID NO: 3438266 - DNA, 25 bp, Homo sapien
accagcacctcgtacagctcatcca

SEQ ID NO: 3438267 - DNA, 25 bp, Homo sapien
tccaccagcacctcgtacagctcat

SEQ ID NO: 3438268 - DNA, 25 bp, Homo sapien
agggtctccaccagcacctcgtaca

SEQ ID NO: 3438269 - DNA, 25 bp, Homo sapien
agggcggcatcccatgtgaccagga

SEQ ID NO: 3438270 - DNA, 25 bp, Homo sapien
accaggactgtgatgccgtgggaga

SEQ ID NO: 3438271 - DNA, 25 bp, Homo sapien
ggactgtgatgccgtgggagatgat

SEQ ID NO: 3438272 - DNA, 25 bp, Homo sapien
gggcggcatcccatgtgaccaggac

SEQ ID NO: 3438273 - DNA, 25 bp, Homo sapien
ctatcagtgaaggctgctgggttct

SEQ ID NO: 3438274 - DNA, 25 bp, Homo sapien
cagtgaaggctgctgggttctcgat

SEQ ID NO: 3438275 - DNA, 25 bp, Homo sapien
tatcagtgaaggctgctgggttctc

SEQ ID NO: 3438276 - DNA, 25 bp, Homo sapien
gctgctgggttctcgatggcccatt

SEQ ID NO: 3438277 - DNA, 25 bp, Homo sapien
tgacagtccctgaagatgtatgccc

SEQ ID NO: 3438278 - DNA, 25 bp, Homo sapien
ctagaggacccagctgtgacagtcc

SEQ ID NO: 3438279 - DNA, 25 bp, Homo sapien
tagaggacccagctgtgacagtccc

SEQ ID NO: 3438280 - DNA, 25 bp, Homo sapien
tatgcccgggggtggcacatcttgc

SEQ ID NO: 3438281 - DNA, 25 bp, Homo sapien
ggctggatggcagagagctgacaga

SEQ ID NO: 3438282 - DNA, 25 bp, Homo sapien
agagctgacagaccgtcgcgacgtc

SEQ ID NO: 3438283 - DNA, 25 bp, Homo sapien
agagagctgacagaccgtcgcgacg

SEQ ID NO: 3438284 - DNA, 25 bp, Homo sapien
gatggcagagagctgacagaccgtc

SEQ ID NO: 3438285 - DNA, 25 bp, Homo sapien
acggtaagggccatgtagaattgag

SEQ ID NO: 3438286 - DNA, 25 bp, Homo sapien
cagacggtaagggccatgtagaatt

SEQ ID NO: 3438287 - DNA, 25 bp, Homo sapien
tgcagacggtaagggccatgtagaa

SEQ ID NO: 3438288 - DNA, 25 bp, Homo sapien
gacggtaagggccatgtagaattga

SEQ ID NO: 3438289 - DNA, 25 bp, Homo sapien
cactggagtcctgtagggacagctt

SEQ ID NO: 3438290 - DNA, 25 bp, Homo sapien
tctgccctagttccccgcatggtgt

SEQ ID NO: 3438291 - DNA, 25 bp, Homo sapien
tggggcatcctagcttttccccggc

SEQ ID NO: 3438292 - DNA, 25 bp, Homo sapien
acagcttggggaccatgcaggcccg

SEQ ID NO: 3438293 - DNA, 25 bp, Homo sapien
tggacaggcactggcttgtccgtgt

SEQ ID NO: 3438294 - DNA, 25 bp, Homo sapien
gcgggtacatctgtgcacatggctg

SEQ ID NO: 3438295 - DNA, 25 bp, Homo sapien
tggcttgtccgtgtctctgtgtgca

SEQ ID NO: 3438296 - DNA, 25 bp, Homo sapien
aggcactggcttgtccgtgtctctg

SEQ ID NO: 3438297 - DNA, 25 bp, Homo sapien
gaacccagtatgtcttcgtgtcctg

SEQ ID NO: 3438298 - DNA, 25 bp, Homo sapien
gtatgtcttcgtgtcctggcttgtt

SEQ ID NO: 3438299 - DNA, 25 bp, Homo sapien
tcgtggaacccagtatgtcttcgtg

SEQ ID NO: 3438300 - DNA, 25 bp, Homo sapien
tctgtcgtggaacccagtatgtctt

SEQ ID NO: 3438301 - DNA, 25 bp, Homo sapien
atgagcttccgcttcccatctgatc

SEQ ID NO: 3438302 - DNA, 25 bp, Homo sapien
gtcatgatgagcttccgcttcccat

SEQ ID NO: 3438303 - DNA, 25 bp, Homo sapien
agtttctggtcatgatgagcttccg

SEQ ID NO: 3438304 - DNA, 25 bp, Homo sapien
catgatgagcttccgcttcccatct

SEQ ID NO: 3438305 - DNA, 25 bp, Homo sapien
cagctttgccatctccaagtgctct

SEQ ID NO: 3438306 - DNA, 25 bp, Homo sapien
tcagctttgccatctccaagtgctc

SEQ ID NO: 3438307 - DNA, 25 bp, Homo sapien
cacgagagtgacttaattctcacaa

SEQ ID NO: 3438308 - DNA, 25 bp, Homo sapien
ggaacccacatgcttagatagccga

SEQ ID NO: 3438309 - DNA, 25 bp, Homo sapien
ttcccacgagagtgacttaattctc

SEQ ID NO: 3438310 - DNA, 25 bp, Homo sapien
cccacgagagtgacttaattctcac

SEQ ID NO: 3438311 - DNA, 25 bp, Homo sapien
ccaagtgtgtccacgttgggggaat

SEQ ID NO: 3438312 - DNA, 25 bp, Homo sapien
tgtgaggaaccaagtgtgtccacgt

SEQ ID NO: 3438313 - DNA, 25 bp, Homo sapien
cacgttgggggaatgtcatacttga

SEQ ID NO: 3438314 - DNA, 25 bp, Homo sapien
tgtccacgttgggggaatgtcatac

SEQ ID NO: 3438315 - DNA, 25 bp, Homo sapien
gcacctgctgcatcataaacccagg

SEQ ID NO: 3438316 - DNA, 25 bp, Homo sapien
gctgcatcataaacccagggatgtg

SEQ ID NO: 3438317 - DNA, 25 bp, Homo sapien
ctgctgcatcataaacccagggatg

SEQ ID NO: 3438318 - DNA, 25 bp, Homo sapien
gcatcataaacccagggatgtggca

SEQ ID NO: 3438319 - DNA, 25 bp, Homo sapien
ggctgtagtttgtgatccttgattc

SEQ ID NO: 3438320 - DNA, 25 bp, Homo sapien
tgtagtttgtgatccttgattcaga

SEQ ID NO: 3438321 - DNA, 25 bp, Homo sapien
gcaggctgtagtttgtgatccttga

SEQ ID NO: 3438322 - DNA, 25 bp, Homo sapien
caggctgtagtttgtgatccttgat

SEQ ID NO: 3438323 - DNA, 25 bp, Homo sapien
gagtagccacagatcatctgtagat

SEQ ID NO: 3438324 - DNA, 25 bp, Homo sapien
tgtggtgtgagagtagccacagatc

SEQ ID NO: 3438325 - DNA, 25 bp, Homo sapien
catggtactctgttgtggtgtgaga

SEQ ID NO: 3438326 - DNA, 25 bp, Homo sapien
tgtgagagtagccacagatcatctg

SEQ ID NO: 3438327 - DNA, 25 bp, Homo sapien
tggttctctctgcagcttacatgag

SEQ ID NO: 3438328 - DNA, 25 bp, Homo sapien
gagacaagctggacaccccaggggt

SEQ ID NO: 3438329 - DNA, 25 bp, Homo sapien
gaagaaaatggcctggtctttgagg

SEQ ID NO: 3438330 - DNA, 25 bp, Homo sapien
cccaggcctttatacccttcagatg

SEQ ID NO: 3438331 - DNA, 25 bp, Homo sapien
cccatgaaggtggtggacatgttca

SEQ ID NO: 3438332 - DNA, 25 bp, Homo sapien
tggggatagcttcacagatccaccg

SEQ ID NO: 3438333 - DNA, 25 bp, Homo sapien
ccgaatctttctggggatagcttca

SEQ ID NO: 3438334 - DNA, 25 bp, Homo sapien
acttcaagtggtaggagcagaaccc

SEQ ID NO: 3438335 - DNA, 25 bp, Homo sapien
cacttggcggctgagggtcttttcc

SEQ ID NO: 3438336 - DNA, 25 bp, Homo sapien
ttccagcttcgagtgagcagagcac

SEQ ID NO: 3438337 - DNA, 25 bp, Homo sapien
gattacaggattatgggagcccgcc

SEQ ID NO: 3438338 - DNA, 25 bp, Homo sapien
tggtcctgatgcgtctctagagccg

SEQ ID NO: 3438339 - DNA, 25 bp, Homo sapien
tgaggtccagacactccattaagcg

SEQ ID NO: 3438340 - DNA, 25 bp, Homo sapien
aatcaggtgctcagttccagggaca

SEQ ID NO: 3438341 - DNA, 25 bp, Homo sapien
cattaagcgatgatcccagccattc

SEQ ID NO: 3438342 - DNA, 25 bp, Homo sapien
catcacaggactaggacatgtgcag

SEQ ID NO: 3438343 - DNA, 25 bp, Homo sapien
cttcctttgagtccctgtgagtgtg

SEQ ID NO: 3438344 - DNA, 25 bp, Homo sapien
ccagcggatcctgagtctcttcctt

SEQ ID NO: 3438345 - DNA, 25 bp, Homo sapien
tccactgcacgttaaatgtttccaa

SEQ ID NO: 3438346 - DNA, 25 bp, Homo sapien
ctttccggccaaagcttagagttgt

SEQ ID NO: 3438347 - DNA, 25 bp, Homo sapien
gacacacgtcgtacaaaagccttca

SEQ ID NO: 3438348 - DNA, 25 bp, Homo sapien
caagaaatagcgtgtccaggctgta

SEQ ID NO: 3438349 - DNA, 25 bp, Homo sapien
tcagaagtctggtgtgcatcgaaca

SEQ ID NO: 3438350 - DNA, 25 bp, Homo sapien
ttctgagccacatgagagcataggc

SEQ ID NO: 3438351 - DNA, 25 bp, Homo sapien
ttcaagtcccaaaaagcaaggatga

SEQ ID NO: 3438352 - DNA, 25 bp, Homo sapien
tttcaagtcccaaaaagcaaggatg

SEQ ID NO: 3438353 - DNA, 25 bp, Homo sapien
caagtcccaaaaagcaaggatgaac

SEQ ID NO: 3438354 - DNA, 25 bp, Homo sapien
tatttcaagtcccaaaaagcaagga

SEQ ID NO: 3438355 - DNA, 25 bp, Homo sapien
taaagaagaaaatggcgaagaggag

SEQ ID NO: 3438356 - DNA, 25 bp, Homo sapien
gaaaatggcgaagaggaggacagca

SEQ ID NO: 3438357 - DNA, 25 bp, Homo sapien
aatggcgaagaggaggacagcaatc

SEQ ID NO: 3438358 - DNA, 25 bp, Homo sapien
atggcgaagaggaggacagcaatcc

SEQ ID NO: 3438359 - DNA, 25 bp, Homo sapien
acacttctccaaagcatgtctgtgc

SEQ ID NO: 3438360 - DNA, 25 bp, Homo sapien
acacacttctccaaagcatgtctgt

SEQ ID NO: 3438361 - DNA, 25 bp, Homo sapien
cacacttctccaaagcatgtctgtg

SEQ ID NO: 3438362 - DNA, 25 bp, Homo sapien
tgatggagtgagacagatgataggg

SEQ ID NO: 3438363 - DNA, 25 bp, Homo sapien
atagggatggcactaaggcttggta

SEQ ID NO: 3438364 - DNA, 25 bp, Homo sapien
ggatggcactaaggcttggtattct

SEQ ID NO: 3438365 - DNA, 25 bp, Homo sapien
gagtgagacagatgatagggatggc

SEQ ID NO: 3438366 - DNA, 25 bp, Homo sapien
acaaaaggctggaggtgagtagccc

SEQ ID NO: 3438367 - DNA, 25 bp, Homo sapien
aaaatttaatgtcttgcactatgga

SEQ ID NO: 3438368 - DNA, 25 bp, Homo sapien
ccctttacaagttctagagcatgca

SEQ ID NO: 3438369 - DNA, 25 bp, Homo sapien
taacactgatgggagatttcagcct

SEQ ID NO: 3438370 - DNA, 25 bp, Homo sapien
caattcttggttgatgccccagagg

SEQ ID NO: 3438371 - DNA, 25 bp, Homo sapien
tcagtcctttttgggtgtagtgctc

SEQ ID NO: 3438372 - DNA, 25 bp, Homo sapien
tgggtgtagtgctctcaattcttgg

SEQ ID NO: 3438373 - DNA, 25 bp, Homo sapien
tgctctcaattcttggttgatgccc

SEQ ID NO: 3438374 - DNA, 25 bp, Homo sapien
caataaaaatccctgtgagaaaaat

SEQ ID NO: 3438375 - DNA, 25 bp, Homo sapien
ttgaggattcaataaaaatccctgt

SEQ ID NO: 3438376 - DNA, 25 bp, Homo sapien
ggattcaataaaaatccctgtgaga

SEQ ID NO: 3438377 - DNA, 25 bp, Homo sapien
aaaatccctgtgagaaaaatggaga

SEQ ID NO: 3438378 - DNA, 25 bp, Homo sapien
agaacagaaataagggaatggagtt

SEQ ID NO: 3438379 - DNA, 25 bp, Homo sapien
cagaaataagggaatggagtttcat

SEQ ID NO: 3438380 - DNA, 25 bp, Homo sapien
gagaacagaaataagggaatggagt

SEQ ID NO: 3438381 - DNA, 25 bp, Homo sapien
acagaaataagggaatggagtttca

SEQ ID NO: 3438382 - DNA, 25 bp, Homo sapien
taattatcgagctcttgaaccccca

SEQ ID NO: 3438383 - DNA, 25 bp, Homo sapien
gcctcattagtaccaaagaagataa

SEQ ID NO: 3438384 - DNA, 25 bp, Homo sapien
tcttgaacccccattttctgttgaa

SEQ ID NO: 3438385 - DNA, 25 bp, Homo sapien
gcttctcaattgtggcctcattagt

SEQ ID NO: 3438386 - DNA, 25 bp, Homo sapien
cattcactaccgagtttgaaccaag

SEQ ID NO: 3438387 - DNA, 25 bp, Homo sapien
ccattcactaccgagtttgaaccaa

SEQ ID NO: 3438388 - DNA, 25 bp, Homo sapien
cttccattcactaccgagtttgaac

SEQ ID NO: 3438389 - DNA, 25 bp, Homo sapien
ttcactaccgagtttgaaccaagaa

SEQ ID NO: 3438390 - DNA, 25 bp, Homo sapien
aatggtatcatctagtgtgctgcat

SEQ ID NO: 3438391 - DNA, 25 bp, Homo sapien
tcatctagtgtgctgcatagtttgt

SEQ ID NO: 3438392 - DNA, 25 bp, Homo sapien
ccttcattacatataccaatggtat

SEQ ID NO: 3438393 - DNA, 25 bp, Homo sapien
agcaatacactgtttttgtcctgga

SEQ ID NO: 3438394 - DNA, 25 bp, Homo sapien
tcagagtaatatgccgttcatgagg

SEQ ID NO: 3438395 - DNA, 25 bp, Homo sapien
cagagtaatatgccgttcatgaggg

SEQ ID NO: 3438396 - DNA, 25 bp, Homo sapien
gagtaatatgccgttcatgagggat

SEQ ID NO: 3438397 - DNA, 25 bp, Homo sapien
agtaatatgccgttcatgagggatt

SEQ ID NO: 3438398 - DNA, 25 bp, Homo sapien
tattttttgctcacaggtgggagaa

SEQ ID NO: 3438399 - DNA, 25 bp, Homo sapien
tctctacttgagtgaattttctaac

SEQ ID NO: 3438400 - DNA, 25 bp, Homo sapien
tcaactagggacaatgttgccctca

SEQ ID NO: 3438401 - DNA, 25 bp, Homo sapien
ttgacagtgctggagatcagacaca

SEQ ID NO: 3438402 - DNA, 25 bp, Homo sapien
actgtggacatcaaggaaaggactc

SEQ ID NO: 3438403 - DNA, 25 bp, Homo sapien
gaactgtggacatcaaggaaaggac

SEQ ID NO: 3438404 - DNA, 25 bp, Homo sapien
aggaactgtggacatcaaggaaagg

SEQ ID NO: 3438405 - DNA, 25 bp, Homo sapien
ctgtggacatcaaggaaaggactcc

SEQ ID NO: 3438406 - DNA, 25 bp, Homo sapien
catgttcatcagcattgcacttcag

SEQ ID NO: 3438407 - DNA, 25 bp, Homo sapien
ttctgaaggacattcatcattagaa

SEQ ID NO: 3438408 - DNA, 25 bp, Homo sapien
tattctgaaggacattcatcattag

SEQ ID NO: 3438409 - DNA, 25 bp, Homo sapien
ttcagtctgcaatgataatattctg

SEQ ID NO: 3438410 - DNA, 25 bp, Homo sapien
aaggaaatctgtgtcaggcagtccg

SEQ ID NO: 3438411 - DNA, 25 bp, Homo sapien
tattatggaaatgcatgaatatgct

SEQ ID NO: 3438412 - DNA, 25 bp, Homo sapien
caaacatagtattatggaaatgcat

SEQ ID NO: 3438413 - DNA, 25 bp, Homo sapien
tgcaaaaaggagcaagaaggaaatc

SEQ ID NO: 3438414 - DNA, 25 bp, Homo sapien
aacaactgctaggtgagagccacag

SEQ ID NO: 3438415 - DNA, 25 bp, Homo sapien
cagcaaacaactgctaggtgagagc

SEQ ID NO: 3438416 - DNA, 25 bp, Homo sapien
caactgctaggtgagagccacaggt

SEQ ID NO: 3438417 - DNA, 25 bp, Homo sapien
caaacaactgctaggtgagagccac

SEQ ID NO: 3438418 - DNA, 25 bp, Homo sapien
tcaagtacacgccaatgcctgttcc

SEQ ID NO: 3438419 - DNA, 25 bp, Homo sapien
ggggtggtgacagagctgaagtcaa

SEQ ID NO: 3438420 - DNA, 25 bp, Homo sapien
gtggtgacagagctgaagtcaagta

SEQ ID NO: 3438421 - DNA, 25 bp, Homo sapien
gtgacagagctgaagtcaagtacac

SEQ ID NO: 3438422 - DNA, 25 bp, Homo sapien
gcctccacagggcactttgtatgtc

SEQ ID NO: 3438423 - DNA, 25 bp, Homo sapien
gcgtacatcactgacgccatcacac

SEQ ID NO: 3438424 - DNA, 25 bp, Homo sapien
ccacagcgtacatcactgacgccat

SEQ ID NO: 3438425 - DNA, 25 bp, Homo sapien
ctccacagggcactttgtatgtccc

SEQ ID NO: 3438426 - DNA, 25 bp, Homo sapien
ttgcagaagtagagatttaatgtgg

SEQ ID NO: 3438427 - DNA, 25 bp, Homo sapien
gaagtagagatttaatgtggttgcc

SEQ ID NO: 3438428 - DNA, 25 bp, Homo sapien
cagaagtagagatttaatgtggttg

SEQ ID NO: 3438429 - DNA, 25 bp, Homo sapien
tgcagaagtagagatttaatgtggt

SEQ ID NO: 3438430 - DNA, 25 bp, Homo sapien
tcgtttggatacaaccctcttttgc

SEQ ID NO: 3438431 - DNA, 25 bp, Homo sapien
tgtatcgtttggatacaaccctctt

SEQ ID NO: 3438432 - DNA, 25 bp, Homo sapien
ggtctgtatcgtttggatacaaccc

SEQ ID NO: 3438433 - DNA, 25 bp, Homo sapien
tgtgggtctgtatcgtttggataca

SEQ ID NO: 3438434 - DNA, 25 bp, Homo sapien
gaaggtgtcacagaaggttcccaga

SEQ ID NO: 3438435 - DNA, 25 bp, Homo sapien
tgaaggtgtcacagaaggttcccag

SEQ ID NO: 3438436 - DNA, 25 bp, Homo sapien
aaggtgtcacagaaggttcccagaa

SEQ ID NO: 3438437 - DNA, 25 bp, Homo sapien
actgaggccactgcacgctttctcg

SEQ ID NO: 3438438 - DNA, 25 bp, Homo sapien
ggccactgcacgctttctcggggaa

SEQ ID NO: 3438439 - DNA, 25 bp, Homo sapien
ttagactgcgctgctgtgcggccgc

SEQ ID NO: 3438440 - DNA, 25 bp, Homo sapien
acatctgaaccgaggtaccctccaa

SEQ ID NO: 3438441 - DNA, 25 bp, Homo sapien
tggaccttgcctcgcatcatgctgg

SEQ ID NO: 3438442 - DNA, 25 bp, Homo sapien
aacggctggaccttgcctcgcatca

SEQ ID NO: 3438443 - DNA, 25 bp, Homo sapien
gaccttgcctcgcatcatgctggcg

SEQ ID NO: 3438444 - DNA, 25 bp, Homo sapien
ataagctcgtatgccgggcggaacg

SEQ ID NO: 3438445 - DNA, 25 bp, Homo sapien
ggtgtacacccctcctataatattg

SEQ ID NO: 3438446 - DNA, 25 bp, Homo sapien
ctcaatatcgcagagggtgtacacc

SEQ ID NO: 3438447 - DNA, 25 bp, Homo sapien
tgttcctaatatccagagcgaaaga

SEQ ID NO: 3438448 - DNA, 25 bp, Homo sapien
tgatattactcccaggaccgcaggg

SEQ ID NO: 3438449 - DNA, 25 bp, Homo sapien
cagcagcaccacctccaacctccac

SEQ ID NO: 3438450 - DNA, 25 bp, Homo sapien
cctccacctccaccactgccgccat

SEQ ID NO: 3438451 - DNA, 25 bp, Homo sapien
ccagctcccgttccccagcagcacc

SEQ ID NO: 3438452 - DNA, 25 bp, Homo sapien
gcagcaccacctccaacctccacct

SEQ ID NO: 3438453 - DNA, 25 bp, Homo sapien
taaatgtctatagggagagaaccac

SEQ ID NO: 3438454 - DNA, 25 bp, Homo sapien
tggaacacttggcacaggactaggc

SEQ ID NO: 3438455 - DNA, 25 bp, Homo sapien
gaggagacgtaacactgactgccac

SEQ ID NO: 3438456 - DNA, 25 bp, Homo sapien
ccaacctagtgggaagaggagacgt

SEQ ID NO: 3438457 - DNA, 25 bp, Homo sapien
tcctttcgaggagaacacagtctgg

SEQ ID NO: 3438458 - DNA, 25 bp, Homo sapien
tattgcccgttgtggttaacagcac

SEQ ID NO: 3438459 - DNA, 25 bp, Homo sapien
tacctggctgtataacattgggcaa

SEQ ID NO: 3438460 - DNA, 25 bp, Homo sapien
tcaaagctgcaagagatctcaaagg

SEQ ID NO: 3438461 - DNA, 25 bp, Homo sapien
ccaccagaaaaatccgttactgtct

SEQ ID NO: 3438462 - DNA, 25 bp, Homo sapien
caccagaaaaatccgttactgtctt

SEQ ID NO: 3438463 - DNA, 25 bp, Homo sapien
ctggagagagatctgacatatcaac

SEQ ID NO: 3438464 - DNA, 25 bp, Homo sapien
tgaggatgaggaccatttcagcatg

SEQ ID NO: 3438465 - DNA, 25 bp, Homo sapien
ccaccaccaaggttgcgatgaggat

SEQ ID NO: 3438466 - DNA, 25 bp, Homo sapien
tggcatgcatgcgtgcgtgctcgac

SEQ ID NO: 3438467 - DNA, 25 bp, Homo sapien
atgcatagcttcatggccacggtgc

SEQ ID NO: 3438468 - DNA, 25 bp, Homo sapien
ttcttcagaataggttgtaaaaatc

SEQ ID NO: 3438469 - DNA, 25 bp, Homo sapien
attcgagaccagcctgaccaacgtg

SEQ ID NO: 3438470 - DNA, 25 bp, Homo sapien
gccaggcacggcggctcacacttgt

SEQ ID NO: 3438471 - DNA, 25 bp, Homo sapien
aatcccagcattttgggaggccaag

SEQ ID NO: 3438472 - DNA, 25 bp, Homo sapien
gtgagcggatcacctgaggtcaggc

SEQ ID NO: 3438473 - DNA, 25 bp, Homo sapien
tgacgtgatcatagtttactgaagc

SEQ ID NO: 3438474 - DNA, 25 bp, Homo sapien
tctttggttaatgaacattctcatc

SEQ ID NO: 3438475 - DNA, 25 bp, Homo sapien
catcattagtccatgcatggaccac

SEQ ID NO: 3438476 - DNA, 25 bp, Homo sapien
catagtttactgaagcgttaaactc

SEQ ID NO: 3438477 - DNA, 25 bp, Homo sapien
tattcttatagtgtgtcttaaggca

SEQ ID NO: 3438478 - DNA, 25 bp, Homo sapien
ctgatctgtttgtctattcttatag

SEQ ID NO: 3438479 - DNA, 25 bp, Homo sapien
caaggtaagtccctgtcttggtagt

SEQ ID NO: 3438480 - DNA, 25 bp, Homo sapien
ttcttattgattggtggttacacct

SEQ ID NO: 3438481 - DNA, 25 bp, Homo sapien
tctcagtgggctggcatactgctca

SEQ ID NO: 3438482 - DNA, 25 bp, Homo sapien
cagtctcatagcttgcaatatccat

SEQ ID NO: 3438483 - DNA, 25 bp, Homo sapien
ttctcagtgggctggcatactgctc

SEQ ID NO: 3438484 - DNA, 25 bp, Homo sapien
catcatcagtctcatagcttgcaat

SEQ ID NO: 3438485 - DNA, 25 bp, Homo sapien
ggagtgaaagccaacttctgcttgg

SEQ ID NO: 3438486 - DNA, 25 bp, Homo sapien
ggatttgaggccattttcaggtccc

SEQ ID NO: 3438487 - DNA, 25 bp, Homo sapien
tgaggccattttcaggtccccaggc

SEQ ID NO: 3438488 - DNA, 25 bp, Homo sapien
ccaggccatctccattagggagtga

SEQ ID NO: 3438489 - DNA, 25 bp, Homo sapien
gaaacacaaacacaagcacttcagc

SEQ ID NO: 3438490 - DNA, 25 bp, Homo sapien
tgaaacacaaacacaagcacttcag

SEQ ID NO: 3438491 - DNA, 25 bp, Homo sapien
ctgaaacacaaacacaagcacttca

SEQ ID NO: 3438492 - DNA, 25 bp, Homo sapien
aaacacaaacacaagcacttcagct

SEQ ID NO: 3438493 - DNA, 25 bp, Homo sapien
actaggaacctccaccagtgcagct

SEQ ID NO: 3438494 - DNA, 25 bp, Homo sapien
tggctcggaaggtaacaaaggctgt

SEQ ID NO: 3438495 - DNA, 25 bp, Homo sapien
tctgtactagaggttttcgggtggc

SEQ ID NO: 3438496 - DNA, 25 bp, Homo sapien
cagcagagaacaagatccagatcac

SEQ ID NO: 3438497 - DNA, 25 bp, Homo sapien
cattagcttcggaaaacctgggctc

SEQ ID NO: 3438498 - DNA, 25 bp, Homo sapien
agtctaaacctatgctcctcccatg

SEQ ID NO: 3438499 - DNA, 25 bp, Homo sapien
ttgttttagagaggccccatgccaa

SEQ ID NO: 3438500 - DNA, 25 bp, Homo sapien
gggttctaccaatcagcttgtttta

SEQ ID NO: 3438501 - DNA, 25 bp, Homo sapien
tttatagattagcaggaaccactta

SEQ ID NO: 3438502 - DNA, 25 bp, Homo sapien
ggcatagctgattttatagattagc

SEQ ID NO: 3438503 - DNA, 25 bp, Homo sapien
tgaataataagttaagaccaaagag

SEQ ID NO: 3438504 - DNA, 25 bp, Homo sapien
gattagcaggaaccacttataaacc

SEQ ID NO: 3438505 - DNA, 25 bp, Homo sapien
cacatctggactgcgacattcttga

SEQ ID NO: 3438506 - DNA, 25 bp, Homo sapien
taagtgcccaacaatgaagcaggac

SEQ ID NO: 3438507 - DNA, 25 bp, Homo sapien
taggaatgcacccttaggaagcaac

SEQ ID NO: 3438508 - DNA, 25 bp, Homo sapien
tgcactgtcgtaggcttagggctcc

SEQ ID NO: 3438509 - DNA, 25 bp, Homo sapien
aaagtccatggcatcttctggtttg

SEQ ID NO: 3438510 - DNA, 25 bp, Homo sapien
gaagggagatgccaaagtccatggc

SEQ ID NO: 3438511 - DNA, 25 bp, Homo sapien
tatggtagatgccatgtagtctgca

SEQ ID NO: 3438512 - DNA, 25 bp, Homo sapien
ccgttccagaactccatagtagagg

SEQ ID NO: 3438513 - DNA, 25 bp, Homo sapien
ccatgtaatgagcacagttacctaa

SEQ ID NO: 3438514 - DNA, 25 bp, Homo sapien
aatgagcacagttacctaacagata

SEQ ID NO: 3438515 - DNA, 25 bp, Homo sapien
tctggggtgcgaatgatcctgttgc

SEQ ID NO: 3438516 - DNA, 25 bp, Homo sapien
gagcacagttacctaacagatagtt

SEQ ID NO: 3438517 - DNA, 25 bp, Homo sapien
cgcaatggtcttagttcctcaaaaa

SEQ ID NO: 3438518 - DNA, 25 bp, Homo sapien
tttctcccgtgacaggactcttatg

SEQ ID NO: 3438519 - DNA, 25 bp, Homo sapien
tagtctagtcactacttctccaggc

SEQ ID NO: 3438520 - DNA, 25 bp, Homo sapien
tcttggccatacaaccgcaatggtc

SEQ ID NO: 3438521 - DNA, 25 bp, Homo sapien
taggcatgcccgactcgctgtagaa

SEQ ID NO: 3438522 - DNA, 25 bp, Homo sapien
gtttggtaggcatgcccgactcgct

SEQ ID NO: 3438523 - DNA, 25 bp, Homo sapien
gtgttctcaatgatcccctcttcac

SEQ ID NO: 3438524 - DNA, 25 bp, Homo sapien
cttcactgacgtccacaaagatctg

SEQ ID NO: 3438525 - DNA, 25 bp, Homo sapien
cagattgcaggagagatgtggccca

SEQ ID NO: 3438526 - DNA, 25 bp, Homo sapien
agattgcaggagagatgtggcccag

SEQ ID NO: 3438527 - DNA, 25 bp, Homo sapien
agtgtgcagattgcaggagagatgt

SEQ ID NO: 3438528 - DNA, 25 bp, Homo sapien
cctcacatgtgaagtaaggataatg

SEQ ID NO: 3438529 - DNA, 25 bp, Homo sapien
aatggtgagagccagggcggcactc

SEQ ID NO: 3438530 - DNA, 25 bp, Homo sapien
aagtccctgtgtctgaacctgtttc

SEQ ID NO: 3438531 - DNA, 25 bp, Homo sapien
taatgatccctatctcacaagactg

SEQ ID NO: 3438532 - DNA, 25 bp, Homo sapien
cacgatgcaccagccacggatgcag

SEQ ID NO: 3438533 - DNA, 25 bp, Homo sapien
ctttgcagtagggacacgtttgctt

SEQ ID NO: 3438534 - DNA, 25 bp, Homo sapien
cttctctttgcagtagggacacgtt

SEQ ID NO: 3438535 - DNA, 25 bp, Homo sapien
accagccacggatgcagaactcgtg

SEQ ID NO: 3438536 - DNA, 25 bp, Homo sapien
attgctgaacatcctcttgaggtct

SEQ ID NO: 3438537 - DNA, 25 bp, Homo sapien
gattgctgaacatcctcttgaggtc

SEQ ID NO: 3438538 - DNA, 25 bp, Homo sapien
tgctgaacatcctcttgaggtctac

SEQ ID NO: 3438539 - DNA, 25 bp, Homo sapien
ggattgctgaacatcctcttgaggt

SEQ ID NO: 3438540 - DNA, 25 bp, Homo sapien
tttcttcccacagcccactcccaac

SEQ ID NO: 3438541 - DNA, 25 bp, Homo sapien
tcttcccacagcccactcccaacaa

SEQ ID NO: 3438542 - DNA, 25 bp, Homo sapien
cccacagcccactcccaacaacgac

SEQ ID NO: 3438543 - DNA, 25 bp, Homo sapien
ttcccacagcccactcccaacaacg

SEQ ID NO: 3438544 - DNA, 25 bp, Homo sapien
gccccaggaggacccaaatgcaggt

SEQ ID NO: 3438545 - DNA, 25 bp, Homo sapien
catggtttgacatgttctggttggg

SEQ ID NO: 3438546 - DNA, 25 bp, Homo sapien
gacccaaatgcaggtcacactggcc

SEQ ID NO: 3438547 - DNA, 25 bp, Homo sapien
aggaggacccaaatgcaggtcacac

SEQ ID NO: 3438548 - DNA, 25 bp, Homo sapien
gctgccaggctaccaagtatcgaag

SEQ ID NO: 3438549 - DNA, 25 bp, Homo sapien
tccaggcccaggatgtagttgatgc

SEQ ID NO: 3438550 - DNA, 25 bp, Homo sapien
gatgccttggactacaccaatgatg

SEQ ID NO: 3438551 - DNA, 25 bp, Homo sapien
cagcagttgcccatacatgacgtga

SEQ ID NO: 3438552 - DNA, 25 bp, Homo sapien
gtggcccaagcacccctttgagtct

SEQ ID NO: 3438553 - DNA, 25 bp, Homo sapien
ccacccaggaggtctttgtgggcag

SEQ ID NO: 3438554 - DNA, 25 bp, Homo sapien
tccccagtccgacacagccagaggg

SEQ ID NO: 3438555 - DNA, 25 bp, Homo sapien
gaggagagtgccctgaggtccatgg

SEQ ID NO: 3438556 - DNA, 25 bp, Homo sapien
tatactaagtgcaccaggcttgagc

SEQ ID NO: 3438557 - DNA, 25 bp, Homo sapien
ggacatatcatctgacacagggaga

SEQ ID NO: 3438558 - DNA, 25 bp, Homo sapien
tcatggagctttattcagacgggag

SEQ ID NO: 3438559 - DNA, 25 bp, Homo sapien
tattcaagtcgcctaggactagggc

SEQ ID NO: 3438560 - DNA, 25 bp, Homo sapien
tcactgatgggacaaatggcgctgg

SEQ ID NO: 3438561 - DNA, 25 bp, Homo sapien
gaaaagagctttggacagcctggcc

SEQ ID NO: 3438562 - DNA, 25 bp, Homo sapien
cttagtggaaccgagaccagagtca

SEQ ID NO: 3438563 - DNA, 25 bp, Homo sapien
gggtgatccctaggtcctctgacca

SEQ ID NO: 3438564 - DNA, 25 bp, Homo sapien
aggaactggcacacaagctcgagag

SEQ ID NO: 3438565 - DNA, 25 bp, Homo sapien
tccaagactcaagttagctgtgtct

SEQ ID NO: 3438566 - DNA, 25 bp, Homo sapien
gaaatacaccgagagcacttcctcc

SEQ ID NO: 3438567 - DNA, 25 bp, Homo sapien
tgtctgtagaactctcacggccaac

SEQ ID NO: 3438568 - DNA, 25 bp, Homo sapien
ccagagccacaggtctaggttcact

SEQ ID NO: 3438569 - DNA, 25 bp, Homo sapien
accagccccaaggtcggctacatct

SEQ ID NO: 3438570 - DNA, 25 bp, Homo sapien
cccaagttggaccacttcaggctca

SEQ ID NO: 3438571 - DNA, 25 bp, Homo sapien
aatgccataccagtccgtccacatc

SEQ ID NO: 3438572 - DNA, 25 bp, Homo sapien
acattcaaggggacaactttcctag

SEQ ID NO: 3438573 - DNA, 25 bp, Homo sapien
cattcaaggggacaactttcctagg

SEQ ID NO: 3438574 - DNA, 25 bp, Homo sapien
cccaagtgtcaggactttggtgtcc

SEQ ID NO: 3438575 - DNA, 25 bp, Homo sapien
gtcaggactttggtgtccgcctccc

SEQ ID NO: 3438576 - DNA, 25 bp, Homo sapien
ctgtcccgcccaagtgtcaggactt

SEQ ID NO: 3438577 - DNA, 25 bp, Homo sapien
agatcaattctgtcccgcccaagtg

SEQ ID NO: 3438578 - DNA, 25 bp, Homo sapien
tactctccagaggataccagactgg

SEQ ID NO: 3438579 - DNA, 25 bp, Homo sapien
tgtgacacctctgctttagccaaag

SEQ ID NO: 3438580 - DNA, 25 bp, Homo sapien
gagcaatccttctgggaaagcactg

SEQ ID NO: 3438581 - DNA, 25 bp, Homo sapien
tttaaccagggaatcttgagcagct

SEQ ID NO: 3438582 - DNA, 25 bp, Homo sapien
agggaggcagtgctctcttcagcac

SEQ ID NO: 3438583 - DNA, 25 bp, Homo sapien
agtcacacagggaggcagtgctctc

SEQ ID NO: 3438584 - DNA, 25 bp, Homo sapien
cacagggaggcagtgctctcttcag

SEQ ID NO: 3438585 - DNA, 25 bp, Homo sapien
gtcacacagggaggcagtgctctct

SEQ ID NO: 3438586 - DNA, 25 bp, Homo sapien
tcccgtagcatagcctggagctctt

SEQ ID NO: 3438587 - DNA, 25 bp, Homo sapien
cattagggaaggcaaaattgagacc

SEQ ID NO: 3438588 - DNA, 25 bp, Homo sapien
gacccaaagagagaatatggactca

SEQ ID NO: 3438589 - DNA, 25 bp, Homo sapien
tgtaagatgcttacctagtccaatc

SEQ ID NO: 3438590 - DNA, 25 bp, Homo sapien
tgcatgcgtcaggagctggtgagcc

SEQ ID NO: 3438591 - DNA, 25 bp, Homo sapien
gatgcatgcgtcaggagctggtgag

SEQ ID NO: 3438592 - DNA, 25 bp, Homo sapien
tttatctgtgacaacgtcctcttct

SEQ ID NO: 3438593 - DNA, 25 bp, Homo sapien
atgcatgcgtcaggagctggtgagc

SEQ ID NO: 3438594 - DNA, 25 bp, Homo sapien
gcacacaggagcaggacccacaaag

SEQ ID NO: 3438595 - DNA, 25 bp, Homo sapien
gctctgaccaggagagtgacgacgt

SEQ ID NO: 3438596 - DNA, 25 bp, Homo sapien
tggtggtctgcgagacaggtgtggc

SEQ ID NO: 3438597 - DNA, 25 bp, Homo sapien
actgcttagctgctgggaacactgg

SEQ ID NO: 3438598 - DNA, 25 bp, Homo sapien
tcccctcccacagtcggcctgggag

SEQ ID NO: 3438599 - DNA, 25 bp, Homo sapien
cctgggaggtgctcaatgaaggaac

SEQ ID NO: 3438600 - DNA, 25 bp, Homo sapien
cacacaggataagctcagcgttcca

SEQ ID NO: 3438601 - DNA, 25 bp, Homo sapien
tgcaggccacacaggataagctcag

SEQ ID NO: 3438602 - DNA, 25 bp, Homo sapien
acgacgtgacgctggacaacctgtt

SEQ ID NO: 3438603 - DNA, 25 bp, Homo sapien
acgagcacacaggagaagttggtgc

SEQ ID NO: 3438604 - DNA, 25 bp, Homo sapien
acgtgacgctggacaacctgttcag

SEQ ID NO: 3438605 - DNA, 25 bp, Homo sapien
agcacacaggagaagttggtgctgt

SEQ ID NO: 3438606 - DNA, 25 bp, Homo sapien
cacatatggaagcagagctcctcct

SEQ ID NO: 3438607 - DNA, 25 bp, Homo sapien
tcctccccacatatggaagcagagc

SEQ ID NO: 3438608 - DNA, 25 bp, Homo sapien
tccccacatatggaagcagagctcc

SEQ ID NO: 3438609 - DNA, 25 bp, Homo sapien
ctttcctccccacatatggaagcag

SEQ ID NO: 3438610 - DNA, 25 bp, Homo sapien
ggaaaggagggacatctcatcactt

SEQ ID NO: 3438611 - DNA, 25 bp, Homo sapien
agacaaggatcaggccaaggaaagg

SEQ ID NO: 3438612 - DNA, 25 bp, Homo sapien
aggcagacaaggatcaggccaagga

SEQ ID NO: 3438613 - DNA, 25 bp, Homo sapien
ttgccccaggctacacctcctctgc

SEQ ID NO: 3438614 - DNA, 25 bp, Homo sapien
tggagggcagggcttcttgggtggg

SEQ ID NO: 3438615 - DNA, 25 bp, Homo sapien
taaccctgctgctgtggactgctgt

SEQ ID NO: 3438616 - DNA, 25 bp, Homo sapien
ttaaccctgctgctgtggactgctg

SEQ ID NO: 3438617 - DNA, 25 bp, Homo sapien
tggggggcaaggttgccctcagccc

SEQ ID NO: 3438618 - DNA, 25 bp, Homo sapien
tcaaggttgtgctgctgctggccct

SEQ ID NO: 3438619 - DNA, 25 bp, Homo sapien
ttgtgctgctgctggccctgtgctg

SEQ ID NO: 3438620 - DNA, 25 bp, Homo sapien
tgtgctgctgctggccctgtgctga

SEQ ID NO: 3438621 - DNA, 25 bp, Homo sapien
gctgctgctggccctgtgctgagtc

SEQ ID NO: 3438622 - DNA, 25 bp, Homo sapien
taggacgttaggaaggctaatggat

SEQ ID NO: 3438623 - DNA, 25 bp, Homo sapien
ggtgtgttgcgcatccacgcagcct

SEQ ID NO: 3438624 - DNA, 25 bp, Homo sapien
cagggactgttcactccaggtagac

SEQ ID NO: 3438625 - DNA, 25 bp, Homo sapien
gaggcattataaggaggctgtgatt

SEQ ID NO: 3438626 - DNA, 25 bp, Homo sapien
gccctggagtgcaaggctaaggcat

SEQ ID NO: 3438627 - DNA, 25 bp, Homo sapien
ggcttccagaaagtcatgtgggaaa

SEQ ID NO: 3438628 - DNA, 25 bp, Homo sapien
aggtagggccctggagtgcaaggct

SEQ ID NO: 3438629 - DNA, 25 bp, Homo sapien
gtgcaaggctaaggcatcaacagtc

SEQ ID NO: 3438630 - DNA, 25 bp, Homo sapien
catactccctcgtgggacaggcaaa

SEQ ID NO: 3438631 - DNA, 25 bp, Homo sapien
gatacagtgtggatccgaagcagct

SEQ ID NO: 3438632 - DNA, 25 bp, Homo sapien
tacagcacgaagataggaagtctgc

SEQ ID NO: 3438633 - DNA, 25 bp, Homo sapien
aatgaacagatgtcaggatgcctcc

SEQ ID NO: 3438634 - DNA, 25 bp, Homo sapien
tgaagtccaggactgggtctgacct

SEQ ID NO: 3438635 - DNA, 25 bp, Homo sapien
tttctcccgtgagtactgagttgac

SEQ ID NO: 3438636 - DNA, 25 bp, Homo sapien
agttgacttgatcggtgtgggaaaa

SEQ ID NO: 3438637 - DNA, 25 bp, Homo sapien
gatgctctttcccaggacggatggg

SEQ ID NO: 3438638 - DNA, 25 bp, Homo sapien
agcatggacagtgtgggcgctctcc

SEQ ID NO: 3438639 - DNA, 25 bp, Homo sapien
ctaaagggccagtaccagtgagtgg

SEQ ID NO: 3438640 - DNA, 25 bp, Homo sapien
tgggcctggccagtcttcctcttag

SEQ ID NO: 3438641 - DNA, 25 bp, Homo sapien
ccctagagacagtgatgcctgcccg

SEQ ID NO: 3438642 - DNA, 25 bp, Homo sapien
cagcaactgataaccctggggctca

SEQ ID NO: 3438643 - DNA, 25 bp, Homo sapien
tcgcaagttctcatctggccatgtg

SEQ ID NO: 3438644 - DNA, 25 bp, Homo sapien
gagaagacagatggccccattctca

SEQ ID NO: 3438645 - DNA, 25 bp, Homo sapien
cagtgggtgcaggctagtatcgcaa

SEQ ID NO: 3438646 - DNA, 25 bp, Homo sapien
atgggggagggaaacccgatgagag

SEQ ID NO: 3438647 - DNA, 25 bp, Homo sapien
tgggggagggaaacccgatgagagc

SEQ ID NO: 3438648 - DNA, 25 bp, Homo sapien
gagggaaacccgatgagagcatggg

SEQ ID NO: 3438649 - DNA, 25 bp, Homo sapien
ggaaacccgatgagagcatgggcac

SEQ ID NO: 3438650 - DNA, 25 bp, Homo sapien
gcttcccccaacactcgcagtggaa

SEQ ID NO: 3438651 - DNA, 25 bp, Homo sapien
ttggtgccacccctcgagccaaggg

SEQ ID NO: 3438652 - DNA, 25 bp, Homo sapien
gttctccgcgcattgccaccaccac

SEQ ID NO: 3438653 - DNA, 25 bp, Homo sapien
ggaacccgccgttctccgcgcattg

SEQ ID NO: 3438654 - DNA, 25 bp, Homo sapien
agatgtagtagcagtctctgcgtgt

SEQ ID NO: 3438655 - DNA, 25 bp, Homo sapien
agtagcagtctctgcgtgtgacctc

SEQ ID NO: 3438656 - DNA, 25 bp, Homo sapien
caagccttggcaggtgagtaagatg

SEQ ID NO: 3438657 - DNA, 25 bp, Homo sapien
ctgggtgttggccaccaagccttgg

SEQ ID NO: 3438658 - DNA, 25 bp, Homo sapien
ttaagggcccgggattcccagcaca

SEQ ID NO: 3438659 - DNA, 25 bp, Homo sapien
cgggattcccagcacaattgtgaca

SEQ ID NO: 3438660 - DNA, 25 bp, Homo sapien
cacaattgtgacacttagctgtggg

SEQ ID NO: 3438661 - DNA, 25 bp, Homo sapien
ctcttagccagagttaagggcccgg

SEQ ID NO: 3438662 - DNA, 25 bp, Homo sapien
tcatcgttctacagcacgcggtctg

SEQ ID NO: 3438663 - DNA, 25 bp, Homo sapien
gaagcttctgtacagtgccagggac

SEQ ID NO: 3438664 - DNA, 25 bp, Homo sapien
tgtgagggcttctgtcgacaaggcc

SEQ ID NO: 3438665 - DNA, 25 bp, Homo sapien
tactcagtctctagctcgcctgggt

SEQ ID NO: 3438666 - DNA, 25 bp, Homo sapien
cctattcactgaaatgggagatgca

SEQ ID NO: 3438667 - DNA, 25 bp, Homo sapien
ttctggaacatggtaagggccctgg

SEQ ID NO: 3438668 - DNA, 25 bp, Homo sapien
aaaggcagggctaggattagatccc

SEQ ID NO: 3438669 - DNA, 25 bp, Homo sapien
tgagcagccagtccatgttacagtg

SEQ ID NO: 3438670 - DNA, 25 bp, Homo sapien
caggacgacattggattatgcccac

SEQ ID NO: 3438671 - DNA, 25 bp, Homo sapien
ccctctgaggtaggtttattctgtc

SEQ ID NO: 3438672 - DNA, 25 bp, Homo sapien
cagtgccatgatgagtctaggtgag

SEQ ID NO: 3438673 - DNA, 25 bp, Homo sapien
gaagcttggtgattgggctcgccaa

SEQ ID NO: 3438674 - DNA, 25 bp, Homo sapien
tggctggtgcagataagcggacttg

SEQ ID NO: 3438675 - DNA, 25 bp, Homo sapien
actataagctgcaggtaaggagccc

SEQ ID NO: 3438676 - DNA, 25 bp, Homo sapien
actgcaagcccagttgagccagaag

SEQ ID NO: 3438677 - DNA, 25 bp, Homo sapien
gggtagagcggccagaccagctttc

SEQ ID NO: 3438678 - DNA, 25 bp, Homo sapien
cacttgttggccttgcagatggaca

SEQ ID NO: 3438679 - DNA, 25 bp, Homo sapien
taggtggaccaaatcttactctgcc

SEQ ID NO: 3438680 - DNA, 25 bp, Homo sapien
ttgggactcactaaagccctggtgg

SEQ ID NO: 3438681 - DNA, 25 bp, Homo sapien
agttcccctgtcctaagagagctca

SEQ ID NO: 3438682 - DNA, 25 bp, Homo sapien
tcttggtaacaagatgatgggcccc

SEQ ID NO: 3438683 - DNA, 25 bp, Homo sapien
cccgggagttagtcaaggagcctgc

SEQ ID NO: 3438684 - DNA, 25 bp, Homo sapien
ggaagaacacttgtcccagctgcag

SEQ ID NO: 3438685 - DNA, 25 bp, Homo sapien
gtgtggagttcgctaccctgcaaga

SEQ ID NO: 3438686 - DNA, 25 bp, Homo sapien
caaaatcaaccagctttcggaggag

SEQ ID NO: 3438687 - DNA, 25 bp, Homo sapien
ccacatgtgcaaagctgagtccagt

SEQ ID NO: 3438688 - DNA, 25 bp, Homo sapien
cataattggcggcttcccgggtact

SEQ ID NO: 3438689 - DNA, 25 bp, Homo sapien
tgagaagaatgtcccagcacctgtc

SEQ ID NO: 3438690 - DNA, 25 bp, Homo sapien
tcagctttctctcaggttctccagc

SEQ ID NO: 3438691 - DNA, 25 bp, Homo sapien
agaccccacagttccagatgagacg

SEQ ID NO: 3438692 - DNA, 25 bp, Homo sapien
tctcccatgggtgatatcctgcaga

SEQ ID NO: 3438693 - DNA, 25 bp, Homo sapien
gatgagacggctgaagaagcagctt

SEQ ID NO: 3438694 - DNA, 25 bp, Homo sapien
gaaagagtgatcgttctgctggtct

SEQ ID NO: 3438695 - DNA, 25 bp, Homo sapien
gaaaggcagatacataaaccaggaa

SEQ ID NO: 3438696 - DNA, 25 bp, Homo sapien
tctagccgttgagtttgatgttcct

SEQ ID NO: 3438697 - DNA, 25 bp, Homo sapien
ggcctcggctggtactacagtagaa

SEQ ID NO: 3438698 - DNA, 25 bp, Homo sapien
gggattaggttctggcagcacagct

SEQ ID NO: 3438699 - DNA, 25 bp, Homo sapien
gacaatagcacgcagcacaggacag

SEQ ID NO: 3438700 - DNA, 25 bp, Homo sapien
cacaggacagcgcaggcctgtactc

SEQ ID NO: 3438701 - DNA, 25 bp, Homo sapien
cagctgggattttggcggccattcc

SEQ ID NO: 3438702 - DNA, 25 bp, Homo sapien
ttcccttctgaaacatagccctgat

SEQ ID NO: 3438703 - DNA, 25 bp, Homo sapien
taatctccctatttctcttctttcc

SEQ ID NO: 3438704 - DNA, 25 bp, Homo sapien
gtagaatccacacctcttaatctcc

SEQ ID NO: 3438705 - DNA, 25 bp, Homo sapien
ctgtagaatccacacctcttaatct

SEQ ID NO: 3438706 - DNA, 25 bp, Homo sapien
cttaatctccctatttctcttcttt

SEQ ID NO: 3438707 - DNA, 25 bp, Homo sapien
tagcgagtgggcatttgttcagtgc

SEQ ID NO: 3438708 - DNA, 25 bp, Homo sapien
gtacttctgtgatggcctcaatgag

SEQ ID NO: 3438709 - DNA, 25 bp, Homo sapien
cctgtacttctgtgatggcctcaat

SEQ ID NO: 3438710 - DNA, 25 bp, Homo sapien
gctgcattctgcctagcgagtgggc

SEQ ID NO: 3438711 - DNA, 25 bp, Homo sapien
ataccagtgattcagccttgcagat

SEQ ID NO: 3438712 - DNA, 25 bp, Homo sapien
aataccagtgattcagccttgcaga

SEQ ID NO: 3438713 - DNA, 25 bp, Homo sapien
ttctgccttattgcagctgaggact

SEQ ID NO: 3438714 - DNA, 25 bp, Homo sapien
ctatgggggtaaggtttgtgaggag

SEQ ID NO: 3438715 - DNA, 25 bp, Homo sapien
tatgggggtaaggtttgtgaggaga

SEQ ID NO: 3438716 - DNA, 25 bp, Homo sapien
atgggggtaaggtttgtgaggagag

SEQ ID NO: 3438717 - DNA, 25 bp, Homo sapien
gggtaaggtttgtgaggagaggcgc

SEQ ID NO: 3438718 - DNA, 25 bp, Homo sapien
ctaaaaggggtgctggagaggccgc

SEQ ID NO: 3438719 - DNA, 25 bp, Homo sapien
ctccataaccgagtccgaaagggca

SEQ ID NO: 3438720 - DNA, 25 bp, Homo sapien
ataaccgagtccgaaagggcagaat

SEQ ID NO: 3438721 - DNA, 25 bp, Homo sapien
gcctcctccataaccgagtccgaaa

SEQ ID NO: 3438722 - DNA, 25 bp, Homo sapien
tccggaagcggtgataccccttctc

SEQ ID NO: 3438723 - DNA, 25 bp, Homo sapien
taattgtgcgctcacagcgctggcg

SEQ ID NO: 3438724 - DNA, 25 bp, Homo sapien
attccggagaatcgcgaggcagagc

SEQ ID NO: 3438725 - DNA, 25 bp, Homo sapien
cgcgagcccacgaagaggtacgatt

SEQ ID NO: 3438726 - DNA, 25 bp, Homo sapien
gcaactccatggcaactgctttcgt

SEQ ID NO: 3438727 - DNA, 25 bp, Homo sapien
cacaacccggcaggcgccataagta

SEQ ID NO: 3438728 - DNA, 25 bp, Homo sapien
actgcctcagggttactcagagcaa

SEQ ID NO: 3438729 - DNA, 25 bp, Homo sapien
ccataagtactgacgcgatgcttac

SEQ ID NO: 3438730 - DNA, 25 bp, Homo sapien
catgtgagtgttgtatcttgttcgc

SEQ ID NO: 3438731 - DNA, 25 bp, Homo sapien
gagatggaggtatcgctctatagcc

SEQ ID NO: 3438732 - DNA, 25 bp, Homo sapien
tcgcccagtctgtcccatgtgagtg

SEQ ID NO: 3438733 - DNA, 25 bp, Homo sapien
gaaatctcagatccccgagcaggaa

SEQ ID NO: 3438734 - DNA, 25 bp, Homo sapien
tatgtccataaacaccagcagggca

SEQ ID NO: 3438735 - DNA, 25 bp, Homo sapien
tcagggctcagatcaggtttcaact

SEQ ID NO: 3438736 - DNA, 25 bp, Homo sapien
tgataggagattcaacagcctggcc

SEQ ID NO: 3438737 - DNA, 25 bp, Homo sapien
tatgaccaggaggtaatcagatgcc

SEQ ID NO: 3438738 - DNA, 25 bp, Homo sapien
ctgtgggttcagggattgtttccgg

SEQ ID NO: 3438739 - DNA, 25 bp, Homo sapien
aaactccaccattaggcattcattc

SEQ ID NO: 3438740 - DNA, 25 bp, Homo sapien
gctgaaactccaccattaggcattc

SEQ ID NO: 3438741 - DNA, 25 bp, Homo sapien
tgaaactccaccattaggcattcat

SEQ ID NO: 3438742 - DNA, 25 bp, Homo sapien
tgtcactgatggctgaaactccacc

SEQ ID NO: 3438743 - DNA, 25 bp, Homo sapien
catcattcaaaggtgcaagcaggtg

SEQ ID NO: 3438744 - DNA, 25 bp, Homo sapien
agttcaggccatcattcaaaggtgc

SEQ ID NO: 3438745 - DNA, 25 bp, Homo sapien
tcaggccatcattcaaaggtgcaag

SEQ ID NO: 3438746 - DNA, 25 bp, Homo sapien
cattcaaaggtgcaagcaggtgccc

SEQ ID NO: 3438747 - DNA, 25 bp, Homo sapien
cgtggatgcttctgaaggagtagtc

SEQ ID NO: 3438748 - DNA, 25 bp, Homo sapien
aatgacgtggatgcttctgaaggag

SEQ ID NO: 3438749 - DNA, 25 bp, Homo sapien
cgaagtgttcatatagtcccgtttg

SEQ ID NO: 3438750 - DNA, 25 bp, Homo sapien
ggctcctgtaccgaagtgttcatat

SEQ ID NO: 3438751 - DNA, 25 bp, Homo sapien
ccttagtgagtggagtactgtgctc

SEQ ID NO: 3438752 - DNA, 25 bp, Homo sapien
taagtagattatggtttcttcctag

SEQ ID NO: 3438753 - DNA, 25 bp, Homo sapien
tatggtttcttcctagggaccacac

SEQ ID NO: 3438754 - DNA, 25 bp, Homo sapien
tgctgccttagtgagtggagtactg

SEQ ID NO: 3438755 - DNA, 25 bp, Homo sapien
ttttaaagatgatcaactactgtga

SEQ ID NO: 3438756 - DNA, 25 bp, Homo sapien
aaaactattggctgatagactggct

SEQ ID NO: 3438757 - DNA, 25 bp, Homo sapien
actactgtgatagccccctgtttcc

SEQ ID NO: 3438758 - DNA, 25 bp, Homo sapien
gatgatcaactactgtgatagcccc

SEQ ID NO: 3438759 - DNA, 25 bp, Homo sapien
ctgtggggacaaagtgagacttggg

SEQ ID NO: 3438760 - DNA, 25 bp, Homo sapien
gtggggacaaagtgagacttgggta

SEQ ID NO: 3438761 - DNA, 25 bp, Homo sapien
ggacaaagtgagacttgggtatcat

SEQ ID NO: 3438762 - DNA, 25 bp, Homo sapien
ggggacaaagtgagacttgggtatc

SEQ ID NO: 3438763 - DNA, 25 bp, Homo sapien
ttaaaggacaggtcgatccaggcca

SEQ ID NO: 3438764 - DNA, 25 bp, Homo sapien
gactttgaacgcttcagtggtcgta

SEQ ID NO: 3438765 - DNA, 25 bp, Homo sapien
gccacctggttgaagtctctcagat

SEQ ID NO: 3438766 - DNA, 25 bp, Homo sapien
ggactgggtcagtgatttccccgac

SEQ ID NO: 3438767 - DNA, 25 bp, Homo sapien
cccaggcgctggatgctgttgccgt

SEQ ID NO: 3438768 - DNA, 25 bp, Homo sapien
ttgccgtgaagatagaggacactca

SEQ ID NO: 3438769 - DNA, 25 bp, Homo sapien
ctcccccaggcgctggatgctgttg

SEQ ID NO: 3438770 - DNA, 25 bp, Homo sapien
tgttgccgtgaagatagaggacact

SEQ ID NO: 3438771 - DNA, 25 bp, Homo sapien
ccatggagtgtcaggctacggagcc

SEQ ID NO: 3438772 - DNA, 25 bp, Homo sapien
gttcccatggagtgtcaggctacgg

SEQ ID NO: 3438773 - DNA, 25 bp, Homo sapien
ctacggagccgaggaaggacagcca

SEQ ID NO: 3438774 - DNA, 25 bp, Homo sapien
gggttcccatggagtgtcaggctac

SEQ ID NO: 3438775 - DNA, 25 bp, Homo sapien
gtgaccccactgaagtcgaacgtgg

SEQ ID NO: 3438776 - DNA, 25 bp, Homo sapien
gctgtggtgcggtctgctttggtga

SEQ ID NO: 3438777 - DNA, 25 bp, Homo sapien
tgcgtttccagacttcagctgtggt

SEQ ID NO: 3438778 - DNA, 25 bp, Homo sapien
tgtattctgcttggtccaggccttc

SEQ ID NO: 3438779 - DNA, 25 bp, Homo sapien
tgcttaggcctttaggactactagg

SEQ ID NO: 3438780 - DNA, 25 bp, Homo sapien
aaaccatgctgtctatgcttaggcc

SEQ ID NO: 3438781 - DNA, 25 bp, Homo sapien
ttatttattgtcaaaccatgctgtc

SEQ ID NO: 3438782 - DNA, 25 bp, Homo sapien
ttaggactactagggtcgtgggagc

SEQ ID NO: 3438783 - DNA, 25 bp, Homo sapien
aaagaaaaggctagagctacttgca

SEQ ID NO: 3438784 - DNA, 25 bp, Homo sapien
cagttgcctgagttagagaacatct

SEQ ID NO: 3438785 - DNA, 25 bp, Homo sapien
agaacatctctacaaggtgtaagtg

SEQ ID NO: 3438786 - DNA, 25 bp, Homo sapien
catctctacaaggtgtaagtgactt

SEQ ID NO: 3438787 - DNA, 25 bp, Homo sapien
gagagttagataaatttcccaaggc

SEQ ID NO: 3438788 - DNA, 25 bp, Homo sapien
ccaaatctctaagctgaaaagtaca

SEQ ID NO: 3438789 - DNA, 25 bp, Homo sapien
agcaaaataagactagagctggcca

SEQ ID NO: 3438790 - DNA, 25 bp, Homo sapien
gctgtgtggtaaacccacgtctcca

SEQ ID NO: 3438791 - DNA, 25 bp, Homo sapien
ggctggtttcagagatcataggcca

SEQ ID NO: 3438792 - DNA, 25 bp, Homo sapien
aaacagaatggaattactttgatct

SEQ ID NO: 3438793 - DNA, 25 bp, Homo sapien
agcagaagattctttttatcaaatg

SEQ ID NO: 3438794 - DNA, 25 bp, Homo sapien
gtttcagagatcataggccatcttc

SEQ ID NO: 3438795 - DNA, 25 bp, Homo sapien
tgacttggtgctcacatgcacctca

SEQ ID NO: 3438796 - DNA, 25 bp, Homo sapien
cctcactagggtttgtgaccagggt

SEQ ID NO: 3438797 - DNA, 25 bp, Homo sapien
tgttggcctcagagtcactcctgcc

SEQ ID NO: 3438798 - DNA, 25 bp, Homo sapien
cacatgcacctcactagggtttgtg

SEQ ID NO: 3438799 - DNA, 25 bp, Homo sapien
gactgcagggctcactgaatacgga

SEQ ID NO: 3438800 - DNA, 25 bp, Homo sapien
gggacagattacagaggagacgcca

SEQ ID NO: 3438801 - DNA, 25 bp, Homo sapien
ggccctgagttagtctgtcctgaga

SEQ ID NO: 3438802 - DNA, 25 bp, Homo sapien
aaggatcctcagtctaggtccccgg

SEQ ID NO: 3438803 - DNA, 25 bp, Homo sapien
catgctggtgaacacccaatcacac

SEQ ID NO: 3438804 - DNA, 25 bp, Homo sapien
ccaatcacacgctcatgaacaacaa

SEQ ID NO: 3438805 - DNA, 25 bp, Homo sapien
cacaggacaggtcggggagtccagg

SEQ ID NO: 3438806 - DNA, 25 bp, Homo sapien
accagagcacaggacaggtcgggga

SEQ ID NO: 3438807 - DNA, 25 bp, Homo sapien
gcacaggacaggtcggggagtccag

SEQ ID NO: 3438808 - DNA, 25 bp, Homo sapien
ggaccagagcacaggacaggtcggg

SEQ ID NO: 3438809 - DNA, 25 bp, Homo sapien
ccagcaatgttaccaccagtggcag

SEQ ID NO: 3438810 - DNA, 25 bp, Homo sapien
ttcgcagcaagaccgtgcgcaccag

SEQ ID NO: 3438811 - DNA, 25 bp, Homo sapien
cggtaccgcaccagcaatgttacca

SEQ ID NO: 3438812 - DNA, 25 bp, Homo sapien
aatcggaagtagtgccggtaccgca

SEQ ID NO: 3438813 - DNA, 25 bp, Homo sapien
tcgcagcggctgctccagtggtcca

SEQ ID NO: 3438814 - DNA, 25 bp, Homo sapien
gtggctcaagtactcgcagcggctg

SEQ ID NO: 3438815 - DNA, 25 bp, Homo sapien
gcagggcatgggtgagcacgtagct

SEQ ID NO: 3438816 - DNA, 25 bp, Homo sapien
agggtcaccgggcagggcatgggtg

SEQ ID NO: 3438817 - DNA, 25 bp, Homo sapien
cagggtagagtatccacagtaggtt

SEQ ID NO: 3438818 - DNA, 25 bp, Homo sapien
gccaggcggatgagtttttcagcca

SEQ ID NO: 3438819 - DNA, 25 bp, Homo sapien
acagtaggttcccaattccagcaca

SEQ ID NO: 3438820 - DNA, 25 bp, Homo sapien
tgggtcccgctccacagtaagaagg

SEQ ID NO: 3438821 - DNA, 25 bp, Homo sapien
tcagctgatactgggtgcgtaggca

SEQ ID NO: 3438822 - DNA, 25 bp, Homo sapien
ggtagcggccacagctcttagcata

SEQ ID NO: 3438823 - DNA, 25 bp, Homo sapien
tcaggtaacatcgtggccggtgtgc

SEQ ID NO: 3438824 - DNA, 25 bp, Homo sapien
gagctgagctattccatccttgatg

SEQ ID NO: 3438825 - DNA, 25 bp, Homo sapien
gggattcccttggagtcactcagca

SEQ ID NO: 3438826 - DNA, 25 bp, Homo sapien
gcctagtgagaccaagcagcctgat

SEQ ID NO: 3438827 - DNA, 25 bp, Homo sapien
ccagctattcctgcagggcgtctaa

SEQ ID NO: 3438828 - DNA, 25 bp, Homo sapien
ggaagagggcactcaagggacatca

SEQ ID NO: 3438829 - DNA, 25 bp, Homo sapien
ttcttgaactggtccatgcaggcct

SEQ ID NO: 3438830 - DNA, 25 bp, Homo sapien
tacaatgagtcaccggatgatggag

SEQ ID NO: 3438831 - DNA, 25 bp, Homo sapien
gaaggcaacgaacaggatcaggacc

SEQ ID NO: 3438832 - DNA, 25 bp, Homo sapien
caccagcactatgatgacgaggaag

SEQ ID NO: 3438833 - DNA, 25 bp, Homo sapien
tcctattggcaagccagcctcagag

SEQ ID NO: 3438834 - DNA, 25 bp, Homo sapien
tcgcggagaaagacaacaacctggt

SEQ ID NO: 3438835 - DNA, 25 bp, Homo sapien
tcttctgggcagaatgggccagtcc

SEQ ID NO: 3438836 - DNA, 25 bp, Homo sapien
cacagctccaaagcatcgcggagaa

SEQ ID NO: 3438837 - DNA, 25 bp, Homo sapien
ttaaacgagaccgtagtgctggcgc

SEQ ID NO: 3438838 - DNA, 25 bp, Homo sapien
gaaatgcggataactgctgtccctg

SEQ ID NO: 3438839 - DNA, 25 bp, Homo sapien
gatttatccccagtttctagcaagg

SEQ ID NO: 3438840 - DNA, 25 bp, Homo sapien
gaatggccctcgcactaaaaggttg

SEQ ID NO: 3438841 - DNA, 25 bp, Homo sapien
ccagctttctacttatctttttggc

SEQ ID NO: 3438842 - DNA, 25 bp, Homo sapien
agctttctacttatctttttggcct

SEQ ID NO: 3438843 - DNA, 25 bp, Homo sapien
ttatctttttggccttccttctcca

SEQ ID NO: 3438844 - DNA, 25 bp, Homo sapien
cagctttctacttatctttttggcc

SEQ ID NO: 3438845 - DNA, 25 bp, Homo sapien
ctgaggtaagaatcctgtaagaaaa

SEQ ID NO: 3438846 - DNA, 25 bp, Homo sapien
aaagatgccggaggagaaactgatg

SEQ ID NO: 3438847 - DNA, 25 bp, Homo sapien
ggccctggggacatagtaaccattc

SEQ ID NO: 3438848 - DNA, 25 bp, Homo sapien
cctggggacatagtaaccattcagt

SEQ ID NO: 3438849 - DNA, 25 bp, Homo sapien
ccaccaacagcgctgtaggtccagg

SEQ ID NO: 3438850 - DNA, 25 bp, Homo sapien
ggcaggacctccaccaacagcgctg

SEQ ID NO: 3438851 - DNA, 25 bp, Homo sapien
gacctccaccaacagcgctgtaggt

SEQ ID NO: 3438852 - DNA, 25 bp, Homo sapien
caccaacagcgctgtaggtccaggc

SEQ ID NO: 3438853 - DNA, 25 bp, Homo sapien
aggggcaacagccatgtgattgtgt

SEQ ID NO: 3438854 - DNA, 25 bp, Homo sapien
gacaaggcctgagacaggggcaaca

SEQ ID NO: 3438855 - DNA, 25 bp, Homo sapien
tagacaaggcctgagacaggggcaa

SEQ ID NO: 3438856 - DNA, 25 bp, Homo sapien
atgtgattgtgtactctctccctcc

SEQ ID NO: 3438857 - DNA, 25 bp, Homo sapien
tcctggcccgcgcactcctgggctg

SEQ ID NO: 3438858 - DNA, 25 bp, Homo sapien
catttcctggcaaggaggatgtgct

SEQ ID NO: 3438859 - DNA, 25 bp, Homo sapien
atttcctggcaaggaggatgtgctc

SEQ ID NO: 3438860 - DNA, 25 bp, Homo sapien
ctggcaaggaggatgtgctctagaa

SEQ ID NO: 3438861 - DNA, 25 bp, Homo sapien
caaggaggatgtgctctagaaggtt

SEQ ID NO: 3438862 - DNA, 25 bp, Homo sapien
acacagaacatgcttccctgccagc

SEQ ID NO: 3438863 - DNA, 25 bp, Homo sapien
ccctgccagcccgacttcacacttg

SEQ ID NO: 3438864 - DNA, 25 bp, Homo sapien
ctggcccacgcccagtgccggctga

SEQ ID NO: 3438865 - DNA, 25 bp, Homo sapien
tgccagcccgacttcacacttgctt

SEQ ID NO: 3438866 - DNA, 25 bp, Homo sapien
ccatctcctccatattctggctcct

SEQ ID NO: 3438867 - DNA, 25 bp, Homo sapien
gtcatccagaggaacacttcctggg

SEQ ID NO: 3438868 - DNA, 25 bp, Homo sapien
ctctgccccaggtaggtcatccaga

SEQ ID NO: 3438869 - DNA, 25 bp, Homo sapien
gggagggcccttgaggagctcccac

SEQ ID NO: 3438870 - DNA, 25 bp, Homo sapien
agacacaggactaagtctctcccca

SEQ ID NO: 3438871 - DNA, 25 bp, Homo sapien
gacacaggactaagtctctccccac

SEQ ID NO: 3438872 - DNA, 25 bp, Homo sapien
tgtacaggcgggaggtgtccttgtg

SEQ ID NO: 3438873 - DNA, 25 bp, Homo sapien
ccgtgcagcaggcattcttcttcca

SEQ ID NO: 3438874 - DNA, 25 bp, Homo sapien
gtgctggccgtgcagcaggcattct

SEQ ID NO: 3438875 - DNA, 25 bp, Homo sapien
gatcccagttaaagttgtacaggcg

SEQ ID NO: 3438876 - DNA, 25 bp, Homo sapien
cgcttgcaggtgggttccatcttac

SEQ ID NO: 3438877 - DNA, 25 bp, Homo sapien
gcgcttgcaggtgggttccatctta

SEQ ID NO: 3438878 - DNA, 25 bp, Homo sapien
ctgccggatccagggccccaggttg

SEQ ID NO: 3438879 - DNA, 25 bp, Homo sapien
tccagggccccaggttgggtgagca

SEQ ID NO: 3438880 - DNA, 25 bp, Homo sapien
ccagggccccaggttgggtgagcac

SEQ ID NO: 3438881 - DNA, 25 bp, Homo sapien
ggatccagggccccaggttgggtga

SEQ ID NO: 3438882 - DNA, 25 bp, Homo sapien
tatctcagcagctttacccttgaag

SEQ ID NO: 3438883 - DNA, 25 bp, Homo sapien
cagctttacccttgaaggggaccag

SEQ ID NO: 3438884 - DNA, 25 bp, Homo sapien
tgtcagccacgtatctcagcagctt

SEQ ID NO: 3438885 - DNA, 25 bp, Homo sapien
ctgtcagccacgtatctcagcagct

SEQ ID NO: 3438886 - DNA, 25 bp, Homo sapien
ctgagtggggaggagacagaatact

SEQ ID NO: 3438887 - DNA, 25 bp, Homo sapien
tgagtggggaggagacagaatactc

SEQ ID NO: 3438888 - DNA, 25 bp, Homo sapien
aggggcacgttcagaatgcgctctt

SEQ ID NO: 3438889 - DNA, 25 bp, Homo sapien
gttcagaatgcgctctttgcgccag

SEQ ID NO: 3438890 - DNA, 25 bp, Homo sapien
ggcacgttcagaatgcgctctttgc

SEQ ID NO: 3438891 - DNA, 25 bp, Homo sapien
gcacgttcagaatgcgctctttgcg

SEQ ID NO: 3438892 - DNA, 25 bp, Homo sapien
tcatcttatctcctcaggtcctcac

SEQ ID NO: 3438893 - DNA, 25 bp, Homo sapien
ccactcccactcctcatcttatctc

SEQ ID NO: 3438894 - DNA, 25 bp, Homo sapien
ctgagggaggagaacgtaagaccct

SEQ ID NO: 3438895 - DNA, 25 bp, Homo sapien
cttctgggccagaccgcacccctcc

SEQ ID NO: 3438896 - DNA, 25 bp, Homo sapien
ctcaaaggtgctgcagagggccccg

SEQ ID NO: 3438897 - DNA, 25 bp, Homo sapien
ggaatcaataatcccacgagacggg

SEQ ID NO: 3438898 - DNA, 25 bp, Homo sapien
ataatcccacgagacggggccccag

SEQ ID NO: 3438899 - DNA, 25 bp, Homo sapien
tcaataatcccacgagacggggccc

SEQ ID NO: 3438900 - DNA, 25 bp, Homo sapien
tcaggaatcaataatcccacgagac

SEQ ID NO: 3438901 - DNA, 25 bp, Homo sapien
ggatttgtctattagaataggttgt

SEQ ID NO: 3438902 - DNA, 25 bp, Homo sapien
tggatttgtctattagaataggttg

SEQ ID NO: 3438903 - DNA, 25 bp, Homo sapien
gatttgtctattagaataggttgtt

SEQ ID NO: 3438904 - DNA, 25 bp, Homo sapien
ataggttgttggaagaaccccagag

SEQ ID NO: 3438905 - DNA, 25 bp, Homo sapien
tactgatctcagtccgattctaagc

SEQ ID NO: 3438906 - DNA, 25 bp, Homo sapien
accgtcctaaggaatgcagatccag

SEQ ID NO: 3438907 - DNA, 25 bp, Homo sapien
tacctagcagttgcaggagagaagc

SEQ ID NO: 3438908 - DNA, 25 bp, Homo sapien
gattctaagcctgccttcttatacc

SEQ ID NO: 3438909 - DNA, 25 bp, Homo sapien
taataccacaaggttaaccattggc

SEQ ID NO: 3438910 - DNA, 25 bp, Homo sapien
ttggctcacagaggtggagactctg

SEQ ID NO: 3438911 - DNA, 25 bp, Homo sapien
cgaaggctaccctaggaccaggcag

SEQ ID NO: 3438912 - DNA, 25 bp, Homo sapien
cattggcattccttctaaccccaac

SEQ ID NO: 3438913 - DNA, 25 bp, Homo sapien
gatgggttgcaacctacaagctagg

SEQ ID NO: 3438914 - DNA, 25 bp, Homo sapien
tgagctgtcaatggctccacctggc

SEQ ID NO: 3438915 - DNA, 25 bp, Homo sapien
aaatatgtcccatattcacttcggg

SEQ ID NO: 3438916 - DNA, 25 bp, Homo sapien
gctgctccatggatcctactcttgt

SEQ ID NO: 3438917 - DNA, 25 bp, Homo sapien
gctggtaaagctcaggcattctttc

SEQ ID NO: 3438918 - DNA, 25 bp, Homo sapien
aggaacccagccctgaatagaactg

SEQ ID NO: 3438919 - DNA, 25 bp, Homo sapien
gaagccatgcgtacctgctggatcc

SEQ ID NO: 3438920 - DNA, 25 bp, Homo sapien
ttgctgcctgcagagacgcctggaa

SEQ ID NO: 3438921 - DNA, 25 bp, Homo sapien
tcctctgctagctcttggatgccag

SEQ ID NO: 3438922 - DNA, 25 bp, Homo sapien
tgcacaggggcacattcagcaccca

SEQ ID NO: 3438923 - DNA, 25 bp, Homo sapien
cattcagcacccactctttgcgcca

SEQ ID NO: 3438924 - DNA, 25 bp, Homo sapien
attcagcacccactctttgcgccag

SEQ ID NO: 3438925 - DNA, 25 bp, Homo sapien
tgtaggaggtgcgacaatcttccca

SEQ ID NO: 3438926 - DNA, 25 bp, Homo sapien
gcccttgtgcccattgctcttgcag

SEQ ID NO: 3438927 - DNA, 25 bp, Homo sapien
agttccagcccttgtgcccattgct

SEQ ID NO: 3438928 - DNA, 25 bp, Homo sapien
tgcccattgctcttgcaggtgtagg

SEQ ID NO: 3438929 - DNA, 25 bp, Homo sapien
cacaccttcacttccaaatccctcc

SEQ ID NO: 3438930 - DNA, 25 bp, Homo sapien
caccttcacttccaaatccctcctt

SEQ ID NO: 3438931 - DNA, 25 bp, Homo sapien
tcacttccaaatccctcctttcctg

SEQ ID NO: 3438932 - DNA, 25 bp, Homo sapien
ccacacaccttcacttccaaatccc

SEQ ID NO: 3438933 - DNA, 25 bp, Homo sapien
gatgcagcggctgctccctcggttg

SEQ ID NO: 3438934 - DNA, 25 bp, Homo sapien
ggccaggtcgaaccacatctggatg

SEQ ID NO: 3438935 - DNA, 25 bp, Homo sapien
gttgccctgggccaggtcgaaccac

SEQ ID NO: 3438936 - DNA, 25 bp, Homo sapien
gcggctgctccctcggttgtagttg

SEQ ID NO: 3438937 - DNA, 25 bp, Homo sapien
gccaggttgagcaggagaggccagg

SEQ ID NO: 3438938 - DNA, 25 bp, Homo sapien
cccactcagagctgcagcatagaac

SEQ ID NO: 3438939 - DNA, 25 bp, Homo sapien
agccccactcagagctgcagcatag

SEQ ID NO: 3438940 - DNA, 25 bp, Homo sapien
gccacagcagcattagggccaggtt

SEQ ID NO: 3438941 - DNA, 25 bp, Homo sapien
cttatgtggatgacagcaggcaaag

SEQ ID NO: 3438942 - DNA, 25 bp, Homo sapien
gtcacatcttatgtggatgacagca

SEQ ID NO: 3438943 - DNA, 25 bp, Homo sapien
atcttatgtggatgacagcaggcaa

SEQ ID NO: 3438944 - DNA, 25 bp, Homo sapien
tatgtggatgacagcaggcaaagag

SEQ ID NO: 3438945 - DNA, 25 bp, Homo sapien
ggtacttggcgttcatgcagacatt

SEQ ID NO: 3438946 - DNA, 25 bp, Homo sapien
gagcaggtctgtcctggcccgcgca

SEQ ID NO: 3438947 - DNA, 25 bp, Homo sapien
gggctgggctgtgtcttgtggtact

SEQ ID NO: 3438948 - DNA, 25 bp, Homo sapien
catgcagacattgagcaggtctgtc

SEQ ID NO: 3438949 - DNA, 25 bp, Homo sapien
ccacgcccagtgccggccgacacag

SEQ ID NO: 3438950 - DNA, 25 bp, Homo sapien
cgccagcacaacttcacacttgctt

SEQ ID NO: 3438951 - DNA, 25 bp, Homo sapien
ttccccgccagcacaacttcacact

SEQ ID NO: 3438952 - DNA, 25 bp, Homo sapien
acatgcttccccgccagcacaactt

SEQ ID NO: 3438953 - DNA, 25 bp, Homo sapien
ctggtgttggtcatgcagcaggcat

SEQ ID NO: 3438954 - DNA, 25 bp, Homo sapien
tgttggtcatgcagcaggcattctt

SEQ ID NO: 3438955 - DNA, 25 bp, Homo sapien
tggtcatgcagcaggcattcttctt

SEQ ID NO: 3438956 - DNA, 25 bp, Homo sapien
tggtgttggtcatgcagcaggcatt

SEQ ID NO: 3438957 - DNA, 25 bp, Homo sapien
tccatcttaccacagtgatcccagt

SEQ ID NO: 3438958 - DNA, 25 bp, Homo sapien
catcttaccacagtgatcccagtta

SEQ ID NO: 3438959 - DNA, 25 bp, Homo sapien
taccacagtgatcccagttaaagtt

SEQ ID NO: 3438960 - DNA, 25 bp, Homo sapien
tcttaccacagtgatcccagttaaa

SEQ ID NO: 3438961 - DNA, 25 bp, Homo sapien
aggggcacgttcagaatgcgctctt

SEQ ID NO: 3438962 - DNA, 25 bp, Homo sapien
gttcagaatgcgctctttgcgccag

SEQ ID NO: 3438963 - DNA, 25 bp, Homo sapien
ggcacgttcagaatgcgctctttgc

SEQ ID NO: 3438964 - DNA, 25 bp, Homo sapien
gcacgttcagaatgcgctctttgcg

SEQ ID NO: 3438965 - DNA, 25 bp, Homo sapien
gtagggctcaaaggtgtggcagagg

SEQ ID NO: 3438966 - DNA, 25 bp, Homo sapien
cttgaaggaatggctccagaggcct

SEQ ID NO: 3438967 - DNA, 25 bp, Homo sapien
gaggccttcacaaagggcagctgga

SEQ ID NO: 3438968 - DNA, 25 bp, Homo sapien
gcagagggcccaggccggacactca

SEQ ID NO: 3438969 - DNA, 25 bp, Homo sapien
attcatggccgcagcatagaacttg

SEQ ID NO: 3438970 - DNA, 25 bp, Homo sapien
catggccgcagcatagaacttggcc

SEQ ID NO: 3438971 - DNA, 25 bp, Homo sapien
tggccgcagcatagaacttggccac

SEQ ID NO: 3438972 - DNA, 25 bp, Homo sapien
tcatggccgcagcatagaacttggc

SEQ ID NO: 3438973 - DNA, 25 bp, Homo sapien
tctttataccccagtgctgatggga

SEQ ID NO: 3438974 - DNA, 25 bp, Homo sapien
gagtcctcttaagacctcagcaggt

SEQ ID NO: 3438975 - DNA, 25 bp, Homo sapien
ccagagggttgagtcctcttaagac

SEQ ID NO: 3438976 - DNA, 25 bp, Homo sapien
aggcaggtgtctaggaacgcctgaa

SEQ ID NO: 3438977 - DNA, 25 bp, Homo sapien
cttgtgacaacctgagaagtgtcaa

SEQ ID NO: 3438978 - DNA, 25 bp, Homo sapien
ttgtgacaacctgagaagtgtcaac

SEQ ID NO: 3438979 - DNA, 25 bp, Homo sapien
atcttgtgacaacctgagaagtgtc

SEQ ID NO: 3438980 - DNA, 25 bp, Homo sapien
tcttgtgacaacctgagaagtgtca

SEQ ID NO: 3438981 - DNA, 25 bp, Homo sapien
gagcctgggattgggcgaaggccac

SEQ ID NO: 3438982 - DNA, 25 bp, Homo sapien
tattgtatgtgagcaccagccaggc

SEQ ID NO: 3438983 - DNA, 25 bp, Homo sapien
ggccactcagcagttaattattgta

SEQ ID NO: 3438984 - DNA, 25 bp, Homo sapien
attattgtatgtgagcaccagccag

SEQ ID NO: 3438985 - DNA, 25 bp, Homo sapien
tgtgtggcctctgaagggggatggg

SEQ ID NO: 3438986 - DNA, 25 bp, Homo sapien
catagggtgtgtggcctctgaaggg

SEQ ID NO: 3438987 - DNA, 25 bp, Homo sapien
tgtggcctctgaagggggatgggga

SEQ ID NO: 3438988 - DNA, 25 bp, Homo sapien
ggtgtgtggcctctgaagggggatg

SEQ ID NO: 3438989 - DNA, 25 bp, Homo sapien
atgggtgcggccaacacacagtgct

SEQ ID NO: 3438990 - DNA, 25 bp, Homo sapien
tgcaccttcagagtgctgaggctct

SEQ ID NO: 3438991 - DNA, 25 bp, Homo sapien
tgtttagagcacagggttcccgttc

SEQ ID NO: 3438992 - DNA, 25 bp, Homo sapien
gaagcaaactatcttgaggcttagc

SEQ ID NO: 3438993 - DNA, 25 bp, Homo sapien
cgccggagaaatctgtactctcagg

SEQ ID NO: 3438994 - DNA, 25 bp, Homo sapien
cttgagggccacgccggagaaatct

SEQ ID NO: 3438995 - DNA, 25 bp, Homo sapien
cagggaataccaggtgatcctttgg

SEQ ID NO: 3438996 - DNA, 25 bp, Homo sapien
aataccaggtgatcctttgggttca

SEQ ID NO: 3438997 - DNA, 25 bp, Homo sapien
tgaagaaagagctgtggtcagtggc

SEQ ID NO: 3438998 - DNA, 25 bp, Homo sapien
gaagaaagagctgtggtcagtggca

SEQ ID NO: 3438999 - DNA, 25 bp, Homo sapien
ctgaagaaagagctgtggtcagtgg

SEQ ID NO: 3439000 - DNA, 25 bp, Homo sapien
cagacattgagaagctcagtcctgg

SEQ ID NO: 3439001 - DNA, 25 bp, Homo sapien
agccacccacactagaaggagcagc

SEQ ID NO: 3439002 - DNA, 25 bp, Homo sapien
agctgtgttgtcatccgctgagcca

SEQ ID NO: 3439003 - DNA, 25 bp, Homo sapien
catgcaacttgtcctcggggcctgg

SEQ ID NO: 3439004 - DNA, 25 bp, Homo sapien
ggttccagttgaatctatataggta

SEQ ID NO: 3439005 - DNA, 25 bp, Homo sapien
gggagcactcgtagaggcaggtgtc

SEQ ID NO: 3439006 - DNA, 25 bp, Homo sapien
tggtagaacagcaggcattcttcct

SEQ ID NO: 3439007 - DNA, 25 bp, Homo sapien
ggtaggaaacatccttatgggcttc

SEQ ID NO: 3439008 - DNA, 25 bp, Homo sapien
caggggcacgttcagtacccgctct

SEQ ID NO: 3439009 - DNA, 25 bp, Homo sapien
gcacgttcagtacccgctctttgcg

SEQ ID NO: 3439010 - DNA, 25 bp, Homo sapien
ggcacgttcagtacccgctctttgc

SEQ ID NO: 3439011 - DNA, 25 bp, Homo sapien
gttcagtacccgctctttgcgccag

SEQ ID NO: 3439012 - DNA, 25 bp, Homo sapien
gcagctcccactgcgcacttgttaa

SEQ ID NO: 3439013 - DNA, 25 bp, Homo sapien
gtccagatttcattgcacagaacag

SEQ ID NO: 3439014 - DNA, 25 bp, Homo sapien
cagatttcattgcacagaacagtgg

SEQ ID NO: 3439015 - DNA, 25 bp, Homo sapien
ggaaaggttggcaggcagctcccac

SEQ ID NO: 3439016 - DNA, 25 bp, Homo sapien
tcatggctgcagcatagaacctcgc

SEQ ID NO: 3439017 - DNA, 25 bp, Homo sapien
catggctgcagcatagaacctcgcc

SEQ ID NO: 3439018 - DNA, 25 bp, Homo sapien
tggctgcagcatagaacctcgccac

SEQ ID NO: 3439019 - DNA, 25 bp, Homo sapien
atggctgcagcatagaacctcgcca

SEQ ID NO: 3439020 - DNA, 25 bp, Homo sapien
ccaggctaagcaggaaaggccaggc

SEQ ID NO: 3439021 - DNA, 25 bp, Homo sapien
attagggccaggctaagcaggaaag

SEQ ID NO: 3439022 - DNA, 25 bp, Homo sapien
tagggccaggctaagcaggaaaggc

SEQ ID NO: 3439023 - DNA, 25 bp, Homo sapien
agccacagcagcattagggccaggc

SEQ ID NO: 3439024 - DNA, 25 bp, Homo sapien
aagtggctgtcagaggcccgaccat

SEQ ID NO: 3439025 - DNA, 25 bp, Homo sapien
gagcaggaaccaaatagttgggagc

SEQ ID NO: 3439026 - DNA, 25 bp, Homo sapien
tgtcagaggcccgaccatggagcag

SEQ ID NO: 3439027 - DNA, 25 bp, Homo sapien
aggcccgaccatggagcaggaacca

SEQ ID NO: 3439028 - DNA, 25 bp, Homo sapien
cagagtcctcagactagggatttct

SEQ ID NO: 3439029 - DNA, 25 bp, Homo sapien
gggaagatgctagcccaagaacatg

SEQ ID NO: 3439030 - DNA, 25 bp, Homo sapien
ctagcaaaatttcagccctcaggca

SEQ ID NO: 3439031 - DNA, 25 bp, Homo sapien
cctcagactagggatttctagcaaa

SEQ ID NO: 3439032 - DNA, 25 bp, Homo sapien
gcctctctctaagtaggcaatagat

SEQ ID NO: 3439033 - DNA, 25 bp, Homo sapien
taggcaatagatccaggcccctagg

SEQ ID NO: 3439034 - DNA, 25 bp, Homo sapien
cagggtagacaacgcgctctggtaa

SEQ ID NO: 3439035 - DNA, 25 bp, Homo sapien
cacagcctctgtcttcggtacaggg

SEQ ID NO: 3439036 - DNA, 25 bp, Homo sapien
tgtctctgggctaatgcagcagacc

SEQ ID NO: 3439037 - DNA, 25 bp, Homo sapien
agaactggcgttagtgagtgagccc

SEQ ID NO: 3439038 - DNA, 25 bp, Homo sapien
ctttaaaggctcaggagaactggcg

SEQ ID NO: 3439039 - DNA, 25 bp, Homo sapien
gaggagatactttgcgccctcacct

SEQ ID NO: 3439040 - DNA, 25 bp, Homo sapien
agcagaagtggcatccatttccaga

SEQ ID NO: 3439041 - DNA, 25 bp, Homo sapien
ggcatccatacagacattgaggaga

SEQ ID NO: 3439042 - DNA, 25 bp, Homo sapien
gcagaagtggcatccatttccagac

SEQ ID NO: 3439043 - DNA, 25 bp, Homo sapien
cattgaggagatcagtcctgtcctg

SEQ ID NO: 3439044 - DNA, 25 bp, Homo sapien
actttctcctccctgttagaacaag

SEQ ID NO: 3439045 - DNA, 25 bp, Homo sapien
tttctcctccctgttagaacaagcc

SEQ ID NO: 3439046 - DNA, 25 bp, Homo sapien
tctcctccctgttagaacaagcccc

SEQ ID NO: 3439047 - DNA, 25 bp, Homo sapien
tgactttctcctccctgttagaaca

SEQ ID NO: 3439048 - DNA, 25 bp, Homo sapien
cttgcaggcgggctccatcttgccg

SEQ ID NO: 3439049 - DNA, 25 bp, Homo sapien
gcgggctccatcttgccgcagtggt

SEQ ID NO: 3439050 - DNA, 25 bp, Homo sapien
tgcaggcgggctccatcttgccgca

SEQ ID NO: 3439051 - DNA, 25 bp, Homo sapien
aggcgggctccatcttgccgcagtg

SEQ ID NO: 3439052 - DNA, 25 bp, Homo sapien
cacatccaggaagcgttctttgcgc

SEQ ID NO: 3439053 - DNA, 25 bp, Homo sapien
gcgctgacagtcctctttgcataag

SEQ ID NO: 3439054 - DNA, 25 bp, Homo sapien
ctctttgcataagggcacatccagg

SEQ ID NO: 3439055 - DNA, 25 bp, Homo sapien
cacgtgtgggaggtgtgacaatcct

SEQ ID NO: 3439056 - DNA, 25 bp, Homo sapien
tcaaaggtgcggcagagagccccag

SEQ ID NO: 3439057 - DNA, 25 bp, Homo sapien
caaaggtgcggcagagagccccagc

SEQ ID NO: 3439058 - DNA, 25 bp, Homo sapien
tgaccttgtatgagtgactccagag

SEQ ID NO: 3439059 - DNA, 25 bp, Homo sapien
gaccttgtatgagtgactccagagg

SEQ ID NO: 3439060 - DNA, 25 bp, Homo sapien
cacatgcatggctgcagcatagaac

SEQ ID NO: 3439061 - DNA, 25 bp, Homo sapien
tcacatgcatggctgcagcatagaa

SEQ ID NO: 3439062 - DNA, 25 bp, Homo sapien
ggagacccccagtcccatgaagcat

SEQ ID NO: 3439063 - DNA, 25 bp, Homo sapien
gagccagagttgcagcatcagggcc

SEQ ID NO: 3439064 - DNA, 25 bp, Homo sapien
gcaggagacccccagtcccatgaag

SEQ ID NO: 3439065 - DNA, 25 bp, Homo sapien
aaggagccagagttgcagcatcagg

SEQ ID NO: 3439066 - DNA, 25 bp, Homo sapien
ggtgactaatagaagcatgcttaag

SEQ ID NO: 3439067 - DNA, 25 bp, Homo sapien
gcctggttatccaagctgagggcag

SEQ ID NO: 3439068 - DNA, 25 bp, Homo sapien
tgacagagggttaggtgactaatag

SEQ ID NO: 3439069 - DNA, 25 bp, Homo sapien
tttattagaagtgactcttggcccc

SEQ ID NO: 3439070 - DNA, 25 bp, Homo sapien
caccaaagcgctgaaccagttccag

SEQ ID NO: 3439071 - DNA, 25 bp, Homo sapien
tttcctgttacagagccgagcacag

SEQ ID NO: 3439072 - DNA, 25 bp, Homo sapien
ggctcttgagtattccactccagaa

SEQ ID NO: 3439073 - DNA, 25 bp, Homo sapien
tctgctccttcaatgtgcatcacgt

SEQ ID NO: 3439074 - DNA, 25 bp, Homo sapien
gtctccggggagtcgtcttcctgcc

SEQ ID NO: 3439075 - DNA, 25 bp, Homo sapien
gcgtctccggggagtcgtcttcctg

SEQ ID NO: 3439076 - DNA, 25 bp, Homo sapien
tctccggggagtcgtcttcctgccc

SEQ ID NO: 3439077 - DNA, 25 bp, Homo sapien
cgtctccggggagtcgtcttcctgc

SEQ ID NO: 3439078 - DNA, 25 bp, Homo sapien
cccgcgctcccgaacggcggctatt

SEQ ID NO: 3439079 - DNA, 25 bp, Homo sapien
ccgcgctcccgaacggcggctattt

SEQ ID NO: 3439080 - DNA, 25 bp, Homo sapien
cgcgctcccgaacggcggctatttt

SEQ ID NO: 3439081 - DNA, 25 bp, Homo sapien
gcccgcgctcccgaacggcggctat

SEQ ID NO: 3439082 - DNA, 25 bp, Homo sapien
gagccgctggcccactgggtgacct

SEQ ID NO: 3439083 - DNA, 25 bp, Homo sapien
tggcccactgggtgacctcgggcaa

SEQ ID NO: 3439084 - DNA, 25 bp, Homo sapien
ggcgcggggttgagcgtcggcttcc

SEQ ID NO: 3439085 - DNA, 25 bp, Homo sapien
tggggatcctgtggcgagggccggc

SEQ ID NO: 3439086 - DNA, 25 bp, Homo sapien
ggctccaggcggccacttaagatgg

SEQ ID NO: 3439087 - DNA, 25 bp, Homo sapien
gctccaggcggccacttaagatggc

SEQ ID NO: 3439088 - DNA, 25 bp, Homo sapien
ctccaggcggccacttaagatggcc

SEQ ID NO: 3439089 - DNA, 25 bp, Homo sapien
gcttggctgcatcgagttccccaaa

SEQ ID NO: 3439090 - DNA, 25 bp, Homo sapien
ttccccaaacctgcgaaggatccag

SEQ ID NO: 3439091 - DNA, 25 bp, Homo sapien
tcattcacccgaggagatccagtcc

SEQ ID NO: 3439092 - DNA, 25 bp, Homo sapien
gatatgacccctaagccccataaag

SEQ ID NO: 3439093 - DNA, 25 bp, Homo sapien
gggatcgggactcagcactccgccg

SEQ ID NO: 3439094 - DNA, 25 bp, Homo sapien
tgaggatccgtgggccggacagagc

SEQ ID NO: 3439095 - DNA, 25 bp, Homo sapien
tccgccccgagacgctcagggctga

SEQ ID NO: 3439096 - DNA, 25 bp, Homo sapien
gcaggccgcctcgttcaccgcgcag

SEQ ID NO: 3439097 - DNA, 25 bp, Homo sapien
cccggcgccccgcaggccgaggcca

SEQ ID NO: 3439098 - DNA, 25 bp, Homo sapien
ccggcgccccgcaggccgaggccat

SEQ ID NO: 3439099 - DNA, 25 bp, Homo sapien
cgggcccggcgccccgcaggccgag

SEQ ID NO: 3439100 - DNA, 25 bp, Homo sapien
ggcccggcgccccgcaggccgaggc

SEQ ID NO: 3439101 - DNA, 25 bp, Homo sapien
acgctctcgctgtctcggaccagga

SEQ ID NO: 3439102 - DNA, 25 bp, Homo sapien
cccggctcaggtcgcggtggtacca

SEQ ID NO: 3439103 - DNA, 25 bp, Homo sapien
ctcgctgtctcggaccaggaagctg

SEQ ID NO: 3439104 - DNA, 25 bp, Homo sapien
cccgccacgctctcgctgtctcgga

SEQ ID NO: 3439105 - DNA, 25 bp, Homo sapien
cggtccacgccagcccgcaaggagc

SEQ ID NO: 3439106 - DNA, 25 bp, Homo sapien
gccgtgcccgcgctcccggtccacg

SEQ ID NO: 3439107 - DNA, 25 bp, Homo sapien
cccggtccacgccagcccgcaagga

SEQ ID NO: 3439108 - DNA, 25 bp, Homo sapien
ctttccacacccggccgtgcccgcg

SEQ ID NO: 3439109 - DNA, 25 bp, Homo sapien
gaatttttcgtcatcacagtcacac

SEQ ID NO: 3439110 - DNA, 25 bp, Homo sapien
gggaatgcccgaatttttcgtcatc

SEQ ID NO: 3439111 - DNA, 25 bp, Homo sapien
tgggccacagaaccccatattctct

SEQ ID NO: 3439112 - DNA, 25 bp, Homo sapien
cccatattctctaccctcaaggctc

SEQ ID NO: 3439113 - DNA, 25 bp, Homo sapien
cagggttaatgatgtggccggtcca

SEQ ID NO: 3439114 - DNA, 25 bp, Homo sapien
tccccgccagagtaagagtcttcag

SEQ ID NO: 3439115 - DNA, 25 bp, Homo sapien
tggttagcccatttgcacacacggg

SEQ ID NO: 3439116 - DNA, 25 bp, Homo sapien
tcgggtatgtctagggcacttgtgc

SEQ ID NO: 3439117 - DNA, 25 bp, Homo sapien
tccatcaggcagaatgcgatacgtg

SEQ ID NO: 3439118 - DNA, 25 bp, Homo sapien
ttctccatcaggcagaatgcgatac

SEQ ID NO: 3439119 - DNA, 25 bp, Homo sapien
caggcagaatgcgatacgtgtgcac

SEQ ID NO: 3439120 - DNA, 25 bp, Homo sapien
ggcagaatgcgatacgtgtgcacat

SEQ ID NO: 3439121 - DNA, 25 bp, Homo sapien
gggtctggaagcggcgcacaggcac

SEQ ID NO: 3439122 - DNA, 25 bp, Homo sapien
cgtacaggccgatgagctcacccag

SEQ ID NO: 3439123 - DNA, 25 bp, Homo sapien
gcgtacaggccgatgagctcaccca

SEQ ID NO: 3439124 - DNA, 25 bp, Homo sapien
tgaggcatcccggtcatccggtggg

SEQ ID NO: 3439125 - DNA, 25 bp, Homo sapien
ctgaggcatcccggtcatccggtgg

SEQ ID NO: 3439126 - DNA, 25 bp, Homo sapien
gaggcatcccggtcatccggtgggt

SEQ ID NO: 3439127 - DNA, 25 bp, Homo sapien
cactcagtggagtaggaggcacgat

SEQ ID NO: 3439128 - DNA, 25 bp, Homo sapien
ctcccacactcagtggagtaggagg

SEQ ID NO: 3439129 - DNA, 25 bp, Homo sapien
aggcacgatgcagctgtaaagtgac

SEQ ID NO: 3439130 - DNA, 25 bp, Homo sapien
ttaaagggccccggcatcatggcca

SEQ ID NO: 3439131 - DNA, 25 bp, Homo sapien
ggcaggggactgctgggcccagtgg

SEQ ID NO: 3439132 - DNA, 25 bp, Homo sapien
gaaatgctggtggagccagagcgcg

SEQ ID NO: 3439133 - DNA, 25 bp, Homo sapien
gggcagcgggggcttctcatcctcc

SEQ ID NO: 3439134 - DNA, 25 bp, Homo sapien
ctggagctgtgggagtctcaggagc

SEQ ID NO: 3439135 - DNA, 25 bp, Homo sapien
catgaggtagcgagggtacgggtga

SEQ ID NO: 3439136 - DNA, 25 bp, Homo sapien
tgtgcagcctccggcatgaggtagc

SEQ ID NO: 3439137 - DNA, 25 bp, Homo sapien
agacggtgctcagcccattgggagc

SEQ ID NO: 3439138 - DNA, 25 bp, Homo sapien
tgcctttcaggtagtcgtgcgagac

SEQ ID NO: 3439139 - DNA, 25 bp, Homo sapien
caccatgggcgagctctgctggtca

SEQ ID NO: 3439140 - DNA, 25 bp, Homo sapien
ggtcaaacaccttggacaggatctc

SEQ ID NO: 3439141 - DNA, 25 bp, Homo sapien
ctgcaaaaggcgggtcaccatgggc

SEQ ID NO: 3439142 - DNA, 25 bp, Homo sapien
gagctctgctggtcaaacaccttgg

SEQ ID NO: 3439143 - DNA, 25 bp, Homo sapien
gaagtcctttagcactgacagcttc

SEQ ID NO: 3439144 - DNA, 25 bp, Homo sapien
tcttctggatgcctgacaggaagtc

SEQ ID NO: 3439145 - DNA, 25 bp, Homo sapien
acaggaagtcctttagcactgacag

SEQ ID NO: 3439146 - DNA, 25 bp, Homo sapien
ttctggatgcctgacaggaagtcct

SEQ ID NO: 3439147 - DNA, 25 bp, Homo sapien
gatggtcttggccttacgtgtggat

SEQ ID NO: 3439148 - DNA, 25 bp, Homo sapien
ggtgctgtggagctcatgtcctgta

SEQ ID NO: 3439149 - DNA, 25 bp, Homo sapien
ccttacgtgtggatggctgcggagc

SEQ ID NO: 3439150 - DNA, 25 bp, Homo sapien
tgcacggggatggtcttggccttac

SEQ ID NO: 3439151 - DNA, 25 bp, Homo sapien
cccaatcttggtcaggtcacccagg

SEQ ID NO: 3439152 - DNA, 25 bp, Homo sapien
tgcggtcgtgcgtgaaggtggtcca

SEQ ID NO: 3439153 - DNA, 25 bp, Homo sapien
cacgctcagcgtgaacttctgtgac

SEQ ID NO: 3439154 - DNA, 25 bp, Homo sapien
tgggagtcccgctgtctccgcagca

SEQ ID NO: 3439155 - DNA, 25 bp, Homo sapien
tccttgcgctgagtccggtccttct

SEQ ID NO: 3439156 - DNA, 25 bp, Homo sapien
gttctggacacgctgggacttaatg

SEQ ID NO: 3439157 - DNA, 25 bp, Homo sapien
cacgctgggacttaatgagctggcg

SEQ ID NO: 3439158 - DNA, 25 bp, Homo sapien
tggacacgctgggacttaatgagct

SEQ ID NO: 3439159 - DNA, 25 bp, Homo sapien
caggggcgggtaggcatccaggaag

SEQ ID NO: 3439160 - DNA, 25 bp, Homo sapien
ctcaggggcgggtaggcatccagga

SEQ ID NO: 3439161 - DNA, 25 bp, Homo sapien
gcatccaggaagccccccgtccaca

SEQ ID NO: 3439162 - DNA, 25 bp, Homo sapien
aggcatccaggaagccccccgtcca

SEQ ID NO: 3439163 - DNA, 25 bp, Homo sapien
acagctggcagaaggcctcccgctt

SEQ ID NO: 3439164 - DNA, 25 bp, Homo sapien
aacagctggcagaaggcctcccgct

SEQ ID NO: 3439165 - DNA, 25 bp, Homo sapien
gcaacagctggcagaaggcctcccg

SEQ ID NO: 3439166 - DNA, 25 bp, Homo sapien
ctgcaacagctggcagaaggcctcc

SEQ ID NO: 3439167 - DNA, 25 bp, Homo sapien
tcgggctcgtcctgcttggagtgct

SEQ ID NO: 3439168 - DNA, 25 bp, Homo sapien
gactgagatcatgtcgggctcgtcc

SEQ ID NO: 3439169 - DNA, 25 bp, Homo sapien
gatcatgtcgggctcgtcctgcttg

SEQ ID NO: 3439170 - DNA, 25 bp, Homo sapien
ggtgcctatgaagactgagatcatg

SEQ ID NO: 3439171 - DNA, 25 bp, Homo sapien
gggccatccctctctcccgccccag

SEQ ID NO: 3439172 - DNA, 25 bp, Homo sapien
ggccatccctctctcccgccccagc

SEQ ID NO: 3439173 - DNA, 25 bp, Homo sapien
tggggccatccctctctcccgcccc

SEQ ID NO: 3439174 - DNA, 25 bp, Homo sapien
ctggggccatccctctctcccgccc

SEQ ID NO: 3439175 - DNA, 25 bp, Homo sapien
cagacccttcgatgtgaaccaggat

SEQ ID NO: 3439176 - DNA, 25 bp, Homo sapien
tggtcactgtgacctcgtccagggt

SEQ ID NO: 3439177 - DNA, 25 bp, Homo sapien
gaaccaggatgtcacgttttttgga

SEQ ID NO: 3439178 - DNA, 25 bp, Homo sapien
cagatccgtaagctccttgaggccc

SEQ ID NO: 3439179 - DNA, 25 bp, Homo sapien
ggacagggtcctggacaagatgacc

SEQ ID NO: 3439180 - DNA, 25 bp, Homo sapien
acagggtcctggacaagatgacccc

SEQ ID NO: 3439181 - DNA, 25 bp, Homo sapien
cccatgaagtcaagtaggctagttt

SEQ ID NO: 3439182 - DNA, 25 bp, Homo sapien
aagtcaagtaggctagtttggaggt

SEQ ID NO: 3439183 - DNA, 25 bp, Homo sapien
gatgccagtcttcacactggacgta

SEQ ID NO: 3439184 - DNA, 25 bp, Homo sapien
tgacatggctgatacggttctcgtg

SEQ ID NO: 3439185 - DNA, 25 bp, Homo sapien
cagggtgttggcgatgccagtcttc

SEQ ID NO: 3439186 - DNA, 25 bp, Homo sapien
cactggacgtactgacatggctgat

SEQ ID NO: 3439187 - DNA, 25 bp, Homo sapien
cgagccgtcttctcatttcccgagg

SEQ ID NO: 3439188 - DNA, 25 bp, Homo sapien
cccgaggtgaggtgacaattcacaa

SEQ ID NO: 3439189 - DNA, 25 bp, Homo sapien
ggtgccattaaacatgaaggagacg

SEQ ID NO: 3439190 - DNA, 25 bp, Homo sapien
tcacaaagccaaatgaggtgccatt

SEQ ID NO: 3439191 - DNA, 25 bp, Homo sapien
gccagaagtcagggataggcataaa

SEQ ID NO: 3439192 - DNA, 25 bp, Homo sapien
tcagggataggcataaagggaagaa

SEQ ID NO: 3439193 - DNA, 25 bp, Homo sapien
cagaagtcagggataggcataaagg

SEQ ID NO: 3439194 - DNA, 25 bp, Homo sapien
aagtcagggataggcataaagggaa

SEQ ID NO: 3439195 - DNA, 25 bp, Homo sapien
gaggtgtgtgaaacgcagagagatg

SEQ ID NO: 3439196 - DNA, 25 bp, Homo sapien
cccagcgagagcagccgcaggatgt

SEQ ID NO: 3439197 - DNA, 25 bp, Homo sapien
ccgcaggatgtccaagtagttttgg

SEQ ID NO: 3439198 - DNA, 25 bp, Homo sapien
tcaaaggcattgagctgccggtcgc

SEQ ID NO: 3439199 - DNA, 25 bp, Homo sapien
tccaggttgagctggtccaccctga

SEQ ID NO: 3439200 - DNA, 25 bp, Homo sapien
gaatcgaaggaagaccttgtgcttc

SEQ ID NO: 3439201 - DNA, 25 bp, Homo sapien
aggttgagctggtccaccctgagga

SEQ ID NO: 3439202 - DNA, 25 bp, Homo sapien
tcctgctgatgtagttcaggatctc

SEQ ID NO: 3439203 - DNA, 25 bp, Homo sapien
ccaggcatatgtgtcccgggaaccc

SEQ ID NO: 3439204 - DNA, 25 bp, Homo sapien
cgggaaccccgctcatagcggtagg

SEQ ID NO: 3439205 - DNA, 25 bp, Homo sapien
gtgggtgggaaggagatctcctcct

SEQ ID NO: 3439206 - DNA, 25 bp, Homo sapien
aaccccgctcatagcggtaggtggg

SEQ ID NO: 3439207 - DNA, 25 bp, Homo sapien
attcttgattcatcgcaggcctgcg

SEQ ID NO: 3439208 - DNA, 25 bp, Homo sapien
aaggcccatgccgttttcttggctc

SEQ ID NO: 3439209 - DNA, 25 bp, Homo sapien
tgattcatcgcaggcctgcggtccc

SEQ ID NO: 3439210 - DNA, 25 bp, Homo sapien
aggcccatgccgttttcttggctca

SEQ ID NO: 3439211 - DNA, 25 bp, Homo sapien
gatgtgagtttcagggtaggatttc

SEQ ID NO: 3439212 - DNA, 25 bp, Homo sapien
gtgagtttcagggtaggatttccac

SEQ ID NO: 3439213 - DNA, 25 bp, Homo sapien
atttccacagaatccggtcacacca

SEQ ID NO: 3439214 - DNA, 25 bp, Homo sapien
gtcacaccatgagggcacattggtc

SEQ ID NO: 3439215 - DNA, 25 bp, Homo sapien
tcccaaggttagggcagagtccaga

SEQ ID NO: 3439216 - DNA, 25 bp, Homo sapien
cacctcccaaggttagggcagagtc

SEQ ID NO: 3439217 - DNA, 25 bp, Homo sapien
ctcagggggaatattcccaccctcg

SEQ ID NO: 3439218 - DNA, 25 bp, Homo sapien
aggggataggaatggggactcaggg

SEQ ID NO: 3439219 - DNA, 25 bp, Homo sapien
caaatgtcccaaacacgggggaatg

SEQ ID NO: 3439220 - DNA, 25 bp, Homo sapien
gggaatggtcgctggtgacgatgtc

SEQ ID NO: 3439221 - DNA, 25 bp, Homo sapien
ggaatggtcgctggtgacgatgtca

SEQ ID NO: 3439222 - DNA, 25 bp, Homo sapien
tgctctcaaactcaatgtaggcctg

SEQ ID NO: 3439223 - DNA, 25 bp, Homo sapien
ggcctcgatgctctcaaactcaatg

SEQ ID NO: 3439224 - DNA, 25 bp, Homo sapien
caaactcaatgtaggcctggtctga

SEQ ID NO: 3439225 - DNA, 25 bp, Homo sapien
tcacaatggcctcgatgctctcaaa

SEQ ID NO: 3439226 - DNA, 25 bp, Homo sapien
tagagtagaactcgatgaagaactt

SEQ ID NO: 3439227 - DNA, 25 bp, Homo sapien
ggcaggtagagtagaactcgatgaa

SEQ ID NO: 3439228 - DNA, 25 bp, Homo sapien
tgaagaacttggtgcggctggctgt

SEQ ID NO: 3439229 - DNA, 25 bp, Homo sapien
caggtagagtagaactcgatgaaga

SEQ ID NO: 3439230 - DNA, 25 bp, Homo sapien
gtgaagaccactgcactttgaggaa

SEQ ID NO: 3439231 - DNA, 25 bp, Homo sapien
gctctgggcatcattctcaaagctc

SEQ ID NO: 3439232 - DNA, 25 bp, Homo sapien
tctgggcatcattctcaaagctctt

SEQ ID NO: 3439233 - DNA, 25 bp, Homo sapien
ggcagctggcgtgaagaccactgca

SEQ ID NO: 3439234 - DNA, 25 bp, Homo sapien
gccatccatggacttgactgtgagc

SEQ ID NO: 3439235 - DNA, 25 bp, Homo sapien
gctggtcctgcaggtactcgatatc

SEQ ID NO: 3439236 - DNA, 25 bp, Homo sapien
tactcgatatcagccagaattggtt

SEQ ID NO: 3439237 - DNA, 25 bp, Homo sapien
catccatggacttgactgtgagcag

SEQ ID NO: 3439238 - DNA, 25 bp, Homo sapien
ctcctcgccacggtgggataggaag

SEQ ID NO: 3439239 - DNA, 25 bp, Homo sapien
catggatttgagtgcaaccacacac

SEQ ID NO: 3439240 - DNA, 25 bp, Homo sapien
tcaggaactgttgggccgtgctgcc

SEQ ID NO: 3439241 - DNA, 25 bp, Homo sapien
catggagcctctgatattgcctgtc

SEQ ID NO: 3439242 - DNA, 25 bp, Homo sapien
gtatcccagagattccaacatgccc

SEQ ID NO: 3439243 - DNA, 25 bp, Homo sapien
tgccctccttgatctgttcacacca

SEQ ID NO: 3439244 - DNA, 25 bp, Homo sapien
tgccttggggcaggactattcccag

SEQ ID NO: 3439245 - DNA, 25 bp, Homo sapien
tatctcatgtcccagtggagtcccc

SEQ ID NO: 3439246 - DNA, 25 bp, Homo sapien
tggctccctcgggacacagaggggg

SEQ ID NO: 3439247 - DNA, 25 bp, Homo sapien
cctcatccttatcaatgctgatcca

SEQ ID NO: 3439248 - DNA, 25 bp, Homo sapien
tcatccttatcaatgctgatccact

SEQ ID NO: 3439249 - DNA, 25 bp, Homo sapien
ggctccctcgggacacagagggggc

SEQ ID NO: 3439250 - DNA, 25 bp, Homo sapien
gacattcaacacagccctagctcac

SEQ ID NO: 3439251 - DNA, 25 bp, Homo sapien
ataacctggagagcgggcaggaggc

SEQ ID NO: 3439252 - DNA, 25 bp, Homo sapien
ctccccgttggtggcggtttctctg

SEQ ID NO: 3439253 - DNA, 25 bp, Homo sapien
ctgtgaaggctggcttgcggctccc

SEQ ID NO: 3439254 - DNA, 25 bp, Homo sapien
gaaggctggcttgcggctccctgac

SEQ ID NO: 3439255 - DNA, 25 bp, Homo sapien
tctggttcaggagctccctctggct

SEQ ID NO: 3439256 - DNA, 25 bp, Homo sapien
cagggttattgaagctgttcttggg

SEQ ID NO: 3439257 - DNA, 25 bp, Homo sapien
gtggagcaggcactgtaatggccac

SEQ ID NO: 3439258 - DNA, 25 bp, Homo sapien
gaccccttcaaggacgtagtaggca

SEQ ID NO: 3439259 - DNA, 25 bp, Homo sapien
aggtggtgggccacgggcctcagcc

SEQ ID NO: 3439260 - DNA, 25 bp, Homo sapien
tggtaaaggatccaggctggggggc

SEQ ID NO: 3439261 - DNA, 25 bp, Homo sapien
aagatggctgagtccggcagtggtg

SEQ ID NO: 3439262 - DNA, 25 bp, Homo sapien
tcatctgaagaactcccctctccca

SEQ ID NO: 3439263 - DNA, 25 bp, Homo sapien
tgcagcaccgagcaggaccggtcat

SEQ ID NO: 3439264 - DNA, 25 bp, Homo sapien
agtccacctcgctcagcgtcttggc

SEQ ID NO: 3439265 - DNA, 25 bp, Homo sapien
atctgcagcaccgagcaggaccggt

SEQ ID NO: 3439266 - DNA, 25 bp, Homo sapien
gctcagcgtcttggccatctgcagc

SEQ ID NO: 3439267 - DNA, 25 bp, Homo sapien
gggccggccatagtccgagggcagt

SEQ ID NO: 3439268 - DNA, 25 bp, Homo sapien
tgctctcccggatgcggggtggagg

SEQ ID NO: 3439269 - DNA, 25 bp, Homo sapien
gccatagtccgagggcagtccccgg

SEQ ID NO: 3439270 - DNA, 25 bp, Homo sapien
ggagcgctgagcgtgcaggcccagc

SEQ ID NO: 3439271 - DNA, 25 bp, Homo sapien
ctgtgggcaagcacactcaggcaca

SEQ ID NO: 3439272 - DNA, 25 bp, Homo sapien
tgaaagggtaccagtctgtgggcaa

SEQ ID NO: 3439273 - DNA, 25 bp, Homo sapien
aagggctgggctgatacatgtgtct

SEQ ID NO: 3439274 - DNA, 25 bp, Homo sapien
cccagtgatcagttcagggtagcag

SEQ ID NO: 3439275 - DNA, 25 bp, Homo sapien
gcgctccaagccgatggcccgcagc

SEQ ID NO: 3439276 - DNA, 25 bp, Homo sapien
ctccaagccgatggcccgcagccag

SEQ ID NO: 3439277 - DNA, 25 bp, Homo sapien
tcatagcgctccaagccgatggccc

SEQ ID NO: 3439278 - DNA, 25 bp, Homo sapien
ctgcctcgcccagcccgctggcccg

SEQ ID NO: 3439279 - DNA, 25 bp, Homo sapien
ctgagaaactccaggtcgtcccagc

SEQ ID NO: 3439280 - DNA, 25 bp, Homo sapien
tccaggtcgtcccagccattatgca

SEQ ID NO: 3439281 - DNA, 25 bp, Homo sapien
gtcgtcccagccattatgcaccagg

SEQ ID NO: 3439282 - DNA, 25 bp, Homo sapien
gaaactccaggtcgtcccagccatt

SEQ ID NO: 3439283 - DNA, 25 bp, Homo sapien
acaggctgggaagtgagatgggcaa

SEQ ID NO: 3439284 - DNA, 25 bp, Homo sapien
aacaggctgggaagtgagatgggca

SEQ ID NO: 3439285 - DNA, 25 bp, Homo sapien
aaacaggctgggaagtgagatgggc

SEQ ID NO: 3439286 - DNA, 25 bp, Homo sapien
ttgtgagccgggtcctgcaccccag

SEQ ID NO: 3439287 - DNA, 25 bp, Homo sapien
tgtgagccgggtcctgcaccccagc

SEQ ID NO: 3439288 - DNA, 25 bp, Homo sapien
gtgagccgggtcctgcaccccagcc

SEQ ID NO: 3439289 - DNA, 25 bp, Homo sapien
ccagggtcctcggtaaccatggcaa

SEQ ID NO: 3439290 - DNA, 25 bp, Homo sapien
taatattaaggtgctctccctcccc

SEQ ID NO: 3439291 - DNA, 25 bp, Homo sapien
agttcacagcttcgtggtgcctccg

SEQ ID NO: 3439292 - DNA, 25 bp, Homo sapien
ataggcaccccaataaataggcaga

SEQ ID NO: 3439293 - DNA, 25 bp, Homo sapien
aggctgcttgcaagaccctgtcccg

SEQ ID NO: 3439294 - DNA, 25 bp, Homo sapien
ttgaagacatcacgccgcaaccctt

SEQ ID NO: 3439295 - DNA, 25 bp, Homo sapien
tattgaagacatcacgccgcaaccc

SEQ ID NO: 3439296 - DNA, 25 bp, Homo sapien
cgcaacccttacgactgcccaggag

SEQ ID NO: 3439297 - DNA, 25 bp, Homo sapien
ttcccagtgccgaagatggaagcca

SEQ ID NO: 3439298 - DNA, 25 bp, Homo sapien
tcccagtgccgaagatggaagccag

SEQ ID NO: 3439299 - DNA, 25 bp, Homo sapien
ccagtgccgaagatggaagccagat

SEQ ID NO: 3439300 - DNA, 25 bp, Homo sapien
cccagtgccgaagatggaagccaga

SEQ ID NO: 3439301 - DNA, 25 bp, Homo sapien
cgtttattgtgcaaccgagagcacc

SEQ ID NO: 3439302 - DNA, 25 bp, Homo sapien
catgacaacatgctccaattctgaa

SEQ ID NO: 3439303 - DNA, 25 bp, Homo sapien
tctgtctaaacgtccgtttattgtg

SEQ ID NO: 3439304 - DNA, 25 bp, Homo sapien
gagggcaatggtctgtctaaacgtc

SEQ ID NO: 3439305 - DNA, 25 bp, Homo sapien
catggcacagcgcaaaccatcagca

SEQ ID NO: 3439306 - DNA, 25 bp, Homo sapien
atggcacagcgcaaaccatcagcag

SEQ ID NO: 3439307 - DNA, 25 bp, Homo sapien
tcatggcacagcgcaaaccatcagc

SEQ ID NO: 3439308 - DNA, 25 bp, Homo sapien
cctggttgtcacagacgttcatctc

SEQ ID NO: 3439309 - DNA, 25 bp, Homo sapien
tggtctccctggttgtcacagacgt

SEQ ID NO: 3439310 - DNA, 25 bp, Homo sapien
tgtcacagacgttcatctcttcaac

SEQ ID NO: 3439311 - DNA, 25 bp, Homo sapien
caggtggtctccctggttgtcacag

SEQ ID NO: 3439312 - DNA, 25 bp, Homo sapien
gcgaaaggacgtacacgttctacac

SEQ ID NO: 3439313 - DNA, 25 bp, Homo sapien
ggcgaaaggacgtacacgttctaca

SEQ ID NO: 3439314 - DNA, 25 bp, Homo sapien
cgaaaggacgtacacgttctacacg

SEQ ID NO: 3439315 - DNA, 25 bp, Homo sapien
caagtcaatcacagccttttccgca

SEQ ID NO: 3439316 - DNA, 25 bp, Homo sapien
aagtcaatcacagccttttccgcat

SEQ ID NO: 3439317 - DNA, 25 bp, Homo sapien
tctgaagtcggtcacaggcgacagc

SEQ ID NO: 3439318 - DNA, 25 bp, Homo sapien
tgatctatgcttcttcggatggcac

SEQ ID NO: 3439319 - DNA, 25 bp, Homo sapien
ttcttcggatggcacccatacagct

SEQ ID NO: 3439320 - DNA, 25 bp, Homo sapien
ggcttctctgaagtcggtcacaggc

SEQ ID NO: 3439321 - DNA, 25 bp, Homo sapien
tcatgatccctcaaccacctcctgt

SEQ ID NO: 3439322 - DNA, 25 bp, Homo sapien
cctgatctttcatgatccctcaacc

SEQ ID NO: 3439323 - DNA, 25 bp, Homo sapien
ccaccgccatggtctctagaccgag

SEQ ID NO: 3439324 - DNA, 25 bp, Homo sapien
tgatctttcatgatccctcaaccac

SEQ ID NO: 3439325 - DNA, 25 bp, Homo sapien
ccttgggatttgtcgttgggagcac

SEQ ID NO: 3439326 - DNA, 25 bp, Homo sapien
gtttccacacagggcttcatcaggc

SEQ ID NO: 3439327 - DNA, 25 bp, Homo sapien
gagtgatgacagtccttgattgaag

SEQ ID NO: 3439328 - DNA, 25 bp, Homo sapien
tgtccgagttccaggagcgacacga

SEQ ID NO: 3439329 - DNA, 25 bp, Homo sapien
cctgttgtaactccggtgtccagca

SEQ ID NO: 3439330 - DNA, 25 bp, Homo sapien
gaccaagacttgttccctgttgtaa

SEQ ID NO: 3439331 - DNA, 25 bp, Homo sapien
taaatcaaagggacacgggcatcac

SEQ ID NO: 3439332 - DNA, 25 bp, Homo sapien
aggatgccctcaggaaacgtggaat

SEQ ID NO: 3439333 - DNA, 25 bp, Homo sapien
ggcatagacaggttgctggtggtgc

SEQ ID NO: 3439334 - DNA, 25 bp, Homo sapien
agtggcatagacaggttgctggtgg

SEQ ID NO: 3439335 - DNA, 25 bp, Homo sapien
tggcatagacaggttgctggtggtg

SEQ ID NO: 3439336 - DNA, 25 bp, Homo sapien
agagtggcatagacaggttgctggt

SEQ ID NO: 3439337 - DNA, 25 bp, Homo sapien
gaccagctgcttggcccgaaggggc

SEQ ID NO: 3439338 - DNA, 25 bp, Homo sapien
accagctgcttggcccgaaggggcc

SEQ ID NO: 3439339 - DNA, 25 bp, Homo sapien
ctagaccagctgcttggcccgaagg

SEQ ID NO: 3439340 - DNA, 25 bp, Homo sapien
tagaccagctgcttggcccgaaggg

SEQ ID NO: 3439341 - DNA, 25 bp, Homo sapien
tatttccccaatgagtgaccttcca

SEQ ID NO: 3439342 - DNA, 25 bp, Homo sapien
aacatatttccccaatgagtgacct

SEQ ID NO: 3439343 - DNA, 25 bp, Homo sapien
ttccacagctgtagcgggcaggcgc

SEQ ID NO: 3439344 - DNA, 25 bp, Homo sapien
tccacagctgtagcgggcaggcgca

SEQ ID NO: 3439345 - DNA, 25 bp, Homo sapien
gaggagccactgcatagttgagctg

SEQ ID NO: 3439346 - DNA, 25 bp, Homo sapien
tggctcctgtggacatcgaggagcc

SEQ ID NO: 3439347 - DNA, 25 bp, Homo sapien
tcctggctcctgtggacatcgagga

SEQ ID NO: 3439348 - DNA, 25 bp, Homo sapien
gctcctgtggacatcgaggagccac

SEQ ID NO: 3439349 - DNA, 25 bp, Homo sapien
agaagcctttcttcgtcgtctggtc

SEQ ID NO: 3439350 - DNA, 25 bp, Homo sapien
ctttcttcgtcgtctggtctactcc

SEQ ID NO: 3439351 - DNA, 25 bp, Homo sapien
agcctttcttcgtcgtctggtctac

SEQ ID NO: 3439352 - DNA, 25 bp, Homo sapien
taagaagcctttcttcgtcgtctgg

SEQ ID NO: 3439353 - DNA, 25 bp, Homo sapien
gcttccatccacattaggttatctg

SEQ ID NO: 3439354 - DNA, 25 bp, Homo sapien
tgctagctacaaacctcaggccatt

SEQ ID NO: 3439355 - DNA, 25 bp, Homo sapien
ggacatctgggctctacttctttct

SEQ ID NO: 3439356 - DNA, 25 bp, Homo sapien
aacaggatggaataagagccaaggc

SEQ ID NO: 3439357 - DNA, 25 bp, Homo sapien
tctttaaaggcaagggcactgctag

SEQ ID NO: 3439358 - DNA, 25 bp, Homo sapien
cattagatggcaccggcttctggga

SEQ ID NO: 3439359 - DNA, 25 bp, Homo sapien
aaagctagggttgtcttcacctgca

SEQ ID NO: 3439360 - DNA, 25 bp, Homo sapien
tagaggccgagagggactcaaagct

SEQ ID NO: 3439361 - DNA, 25 bp, Homo sapien
caagtttgaccaaccaagtagcata

SEQ ID NO: 3439362 - DNA, 25 bp, Homo sapien
cttggaattggctattaattacagc

SEQ ID NO: 3439363 - DNA, 25 bp, Homo sapien
tagctgccgagaggcaaagagctgc

SEQ ID NO: 3439364 - DNA, 25 bp, Homo sapien
attgttctttttgcaagtgttgagg

SEQ ID NO: 3439365 - DNA, 25 bp, Homo sapien
cctgacgctttattgagtttccgat

SEQ ID NO: 3439366 - DNA, 25 bp, Homo sapien
cgctttattgagtttccgatgatta

SEQ ID NO: 3439367 - DNA, 25 bp, Homo sapien
tattgagtttccgatgattatctct

SEQ ID NO: 3439368 - DNA, 25 bp, Homo sapien
tgagtttccgatgattatctctcac

SEQ ID NO: 3439369 - DNA, 25 bp, Homo sapien
tttctgggtgctctttttcataccc

SEQ ID NO: 3439370 - DNA, 25 bp, Homo sapien
ctttctgggtgctctttttcatacc

SEQ ID NO: 3439371 - DNA, 25 bp, Homo sapien
atgggcaatgcaaggcttgtagaaa

SEQ ID NO: 3439372 - DNA, 25 bp, Homo sapien
tgggcaatgcaaggcttgtagaaac

SEQ ID NO: 3439373 - DNA, 25 bp, Homo sapien
ttcatcctctttggtccaatgcact

SEQ ID NO: 3439374 - DNA, 25 bp, Homo sapien
ctttggtccaatgcacttaaaattc

SEQ ID NO: 3439375 - DNA, 25 bp, Homo sapien
ttggtccaatgcacttaaaattcat

SEQ ID NO: 3439376 - DNA, 25 bp, Homo sapien
tcctctttggtccaatgcacttaaa

SEQ ID NO: 3439377 - DNA, 25 bp, Homo sapien
tggagcacggcagaacctgagaatg

SEQ ID NO: 3439378 - DNA, 25 bp, Homo sapien
ggccagcaggataagagtgagtatc

SEQ ID NO: 3439379 - DNA, 25 bp, Homo sapien
ctgagaatggtcgacagggccagca

SEQ ID NO: 3439380 - DNA, 25 bp, Homo sapien
taattctgccagaatctggagcacg

SEQ ID NO: 3439381 - DNA, 25 bp, Homo sapien
tgcccaacagatccttctggccttt

SEQ ID NO: 3439382 - DNA, 25 bp, Homo sapien
agccttctgcccggaaccaggtctg

SEQ ID NO: 3439383 - DNA, 25 bp, Homo sapien
tctcctggccctctgatgtgtcccc

SEQ ID NO: 3439384 - DNA, 25 bp, Homo sapien
tcataactcgttctgcctggtgccc

SEQ ID NO: 3439385 - DNA, 25 bp, Homo sapien
tcaccccaaccctcagatcgtctcc

SEQ ID NO: 3439386 - DNA, 25 bp, Homo sapien
cccaaccctcagatcgtctcccagc

SEQ ID NO: 3439387 - DNA, 25 bp, Homo sapien
accccaaccctcagatcgtctccca

SEQ ID NO: 3439388 - DNA, 25 bp, Homo sapien
caaccctcagatcgtctcccagccc

SEQ ID NO: 3439389 - DNA, 25 bp, Homo sapien
gggcactggtattaaaacaatccat

SEQ ID NO: 3439390 - DNA, 25 bp, Homo sapien
ctaggctcctatgtacactgcttcc

SEQ ID NO: 3439391 - DNA, 25 bp, Homo sapien
gaacagttaaccaggagtccttgta

SEQ ID NO: 3439392 - DNA, 25 bp, Homo sapien
ctgacatctggctccgggtagggca

SEQ ID NO: 3439393 - DNA, 25 bp, Homo sapien
ccaccaaattaacatgaagaagtga

SEQ ID NO: 3439394 - DNA, 25 bp, Homo sapien
tatggctggaagatatgccatcttc

SEQ ID NO: 3439395 - DNA, 25 bp, Homo sapien
ctgttgtgttagccaccaaattaac

SEQ ID NO: 3439396 - DNA, 25 bp, Homo sapien
gaactgctatggctggaagatatgc

SEQ ID NO: 3439397 - DNA, 25 bp, Homo sapien
tcaacacaacccacgcactggtcat

SEQ ID NO: 3439398 - DNA, 25 bp, Homo sapien
acacaacccacgcactggtcatcaa

SEQ ID NO: 3439399 - DNA, 25 bp, Homo sapien
tcttcaacacaacccacgcactggt

SEQ ID NO: 3439400 - DNA, 25 bp, Homo sapien
acaacccacgcactggtcatcaaac

SEQ ID NO: 3439401 - DNA, 25 bp, Homo sapien
ctagtcaatgtttaaatttgtattc

SEQ ID NO: 3439402 - DNA, 25 bp, Homo sapien
tagtcaatgtttaaatttgtattca

SEQ ID NO: 3439403 - DNA, 25 bp, Homo sapien
agtcaatgtttaaatttgtattcac

SEQ ID NO: 3439404 - DNA, 25 bp, Homo sapien
catttgcagtgttcccagtataggc

SEQ ID NO: 3439405 - DNA, 25 bp, Homo sapien
tgtgatgataaatagtgtcccctct

SEQ ID NO: 3439406 - DNA, 25 bp, Homo sapien
gattttaacacccaggcaggttgtg

SEQ ID NO: 3439407 - DNA, 25 bp, Homo sapien
ggtggtgacacagatacatttcgag

SEQ ID NO: 3439408 - DNA, 25 bp, Homo sapien
gagtactagcctctcctgatgccct

SEQ ID NO: 3439409 - DNA, 25 bp, Homo sapien
ggaggagtactagcctctcctgatg

SEQ ID NO: 3439410 - DNA, 25 bp, Homo sapien
tctgggaggagtactagcctctcct

SEQ ID NO: 3439411 - DNA, 25 bp, Homo sapien
agggtctgggaggagtactagcctc

SEQ ID NO: 3439412 - DNA, 25 bp, Homo sapien
gcaggatgaggagatctggcagctg

SEQ ID NO: 3439413 - DNA, 25 bp, Homo sapien
tgcagaaggaacatggggcctgctc

SEQ ID NO: 3439414 - DNA, 25 bp, Homo sapien
cagcaggatgaggagatctggcagc

SEQ ID NO: 3439415 - DNA, 25 bp, Homo sapien
gcagcaggatgaggagatctggcag

SEQ ID NO: 3439416 - DNA, 25 bp, Homo sapien
cagtgccagagagccaatcaaggcc

SEQ ID NO: 3439417 - DNA, 25 bp, Homo sapien
tctgtgggtactgtgagcactaatg

SEQ ID NO: 3439418 - DNA, 25 bp, Homo sapien
aagaaagtgctcacttttgcagcca

SEQ ID NO: 3439419 - DNA, 25 bp, Homo sapien
tttgcagccagactcactagtttcc

SEQ ID NO: 3439420 - DNA, 25 bp, Homo sapien
ggatgcttcttgtgcatcacctcac

SEQ ID NO: 3439421 - DNA, 25 bp, Homo sapien
agttttgaacctagccattgctgca

SEQ ID NO: 3439422 - DNA, 25 bp, Homo sapien
ccagatttatgtaggcgtaacccaa

SEQ ID NO: 3439423 - DNA, 25 bp, Homo sapien
tcttgtgcatcacctcacaccttgt

SEQ ID NO: 3439424 - DNA, 25 bp, Homo sapien
gaaatccaaaatggagatggttatg

SEQ ID NO: 3439425 - DNA, 25 bp, Homo sapien
atgaaatccaaaatggagatggtta

SEQ ID NO: 3439426 - DNA, 25 bp, Homo sapien
aatccaaaatggagatggttatgtc

SEQ ID NO: 3439427 - DNA, 25 bp, Homo sapien
atccaaaatggagatggttatgtca

SEQ ID NO: 3439428 - DNA, 25 bp, Homo sapien
ggttccctgtcctgaaacacaaagc

SEQ ID NO: 3439429 - DNA, 25 bp, Homo sapien
gggctttcctttctatcctggcagg

SEQ ID NO: 3439430 - DNA, 25 bp, Homo sapien
ccattaacttgaaggatgaacccac

SEQ ID NO: 3439431 - DNA, 25 bp, Homo sapien
caaagcaagagttgtccccatacag

SEQ ID NO: 3439432 - DNA, 25 bp, Homo sapien
gacttgaggacattgcagatagacc

SEQ ID NO: 3439433 - DNA, 25 bp, Homo sapien
cagagccagccttgcgtgtgaacag

SEQ ID NO: 3439434 - DNA, 25 bp, Homo sapien
taactactagagagcattgcaaggc

SEQ ID NO: 3439435 - DNA, 25 bp, Homo sapien
gagttgaaggtctcctccgagcagg

SEQ ID NO: 3439436 - DNA, 25 bp, Homo sapien
cctaagatttctggaggcaccgaat

SEQ ID NO: 3439437 - DNA, 25 bp, Homo sapien
tctggtttcaagcatctaaggagga

SEQ ID NO: 3439438 - DNA, 25 bp, Homo sapien
tgggtaaatcccaaatcagagacgg

SEQ ID NO: 3439439 - DNA, 25 bp, Homo sapien
ccagattgaatgacgtgagcaggat

SEQ ID NO: 3439440 - DNA, 25 bp, Homo sapien
cagtgcccttcctgtctgagtcaca

SEQ ID NO: 3439441 - DNA, 25 bp, Homo sapien
cactgatggtttgctctgacagccc

SEQ ID NO: 3439442 - DNA, 25 bp, Homo sapien
gactgacatatgaagggtcctccca

SEQ ID NO: 3439443 - DNA, 25 bp, Homo sapien
cctaattgctgccttaggactgaca

SEQ ID NO: 3439444 - DNA, 25 bp, Homo sapien
ttgtctctggctggaattatcttca

SEQ ID NO: 3439445 - DNA, 25 bp, Homo sapien
catcatcttttaggcagttatttcc

SEQ ID NO: 3439446 - DNA, 25 bp, Homo sapien
cattgtcgttgacattgtcatcttc

SEQ ID NO: 3439447 - DNA, 25 bp, Homo sapien
gcagttatttccaaattccagggtc

SEQ ID NO: 3439448 - DNA, 25 bp, Homo sapien
tacaccacttcgtgctccgcagagg

SEQ ID NO: 3439449 - DNA, 25 bp, Homo sapien
caaggtcactgtgtttactacacca

SEQ ID NO: 3439450 - DNA, 25 bp, Homo sapien
caggcaatgtcgtggtctgagaacc

SEQ ID NO: 3439451 - DNA, 25 bp, Homo sapien
ggatgcacgtggcagcaaggtcact

SEQ ID NO: 3439452 - DNA, 25 bp, Homo sapien
gtggaggaggcagtatccaggcagg

SEQ ID NO: 3439453 - DNA, 25 bp, Homo sapien
ctgaggtggaggaggcagtatccag

SEQ ID NO: 3439454 - DNA, 25 bp, Homo sapien
ggaggaggcagtatccaggcaggca

SEQ ID NO: 3439455 - DNA, 25 bp, Homo sapien
aggtggaggaggcagtatccaggca

SEQ ID NO: 3439456 - DNA, 25 bp, Homo sapien
acccccacatctggagccatagcca

SEQ ID NO: 3439457 - DNA, 25 bp, Homo sapien
tctctgtgagggctacccccacatc

SEQ ID NO: 3439458 - DNA, 25 bp, Homo sapien
ctctctctgtgagggctacccccac

SEQ ID NO: 3439459 - DNA, 25 bp, Homo sapien
gagccatagccagcggacacagagc

SEQ ID NO: 3439460 - DNA, 25 bp, Homo sapien
ggctgtggcactggctggctgggga

SEQ ID NO: 3439461 - DNA, 25 bp, Homo sapien
gggaggctgggagacagtcgatcga

SEQ ID NO: 3439462 - DNA, 25 bp, Homo sapien
gaggctgggagacagtcgatcgatc

SEQ ID NO: 3439463 - DNA, 25 bp, Homo sapien
ggctgggagacagtcgatcgatcat

SEQ ID NO: 3439464 - DNA, 25 bp, Homo sapien
tcttgaggagtgaggagaatgctgg

SEQ ID NO: 3439465 - DNA, 25 bp, Homo sapien
cttgaggagtgaggagaatgctggg

SEQ ID NO: 3439466 - DNA, 25 bp, Homo sapien
aggttcttgaggagtgaggagaatg

SEQ ID NO: 3439467 - DNA, 25 bp, Homo sapien
gttcttgaggagtgaggagaatgct

SEQ ID NO: 3439468 - DNA, 25 bp, Homo sapien
accattttggctcttgtaccatcca

SEQ ID NO: 3439469 - DNA, 25 bp, Homo sapien
tttggctcttgtaccatccatctac

SEQ ID NO: 3439470 - DNA, 25 bp, Homo sapien
ttgcatgcatgagcacgagccacca

SEQ ID NO: 3439471 - DNA, 25 bp, Homo sapien
gcatgagcacgagccaccattttgg

SEQ ID NO: 3439472 - DNA, 25 bp, Homo sapien
aatttgcatcagcaagggctatgcc

SEQ ID NO: 3439473 - DNA, 25 bp, Homo sapien
gatagtcctttctgctcgtgtctgg

SEQ ID NO: 3439474 - DNA, 25 bp, Homo sapien
gtttgaatgaaatttgcatcagcaa

SEQ ID NO: 3439475 - DNA, 25 bp, Homo sapien
tcagcaagggctatgccgatagtcc

SEQ ID NO: 3439476 - DNA, 25 bp, Homo sapien
caggattttcccaggtaatcactac

SEQ ID NO: 3439477 - DNA, 25 bp, Homo sapien
ccaggattttcccaggtaatcacta

SEQ ID NO: 3439478 - DNA, 25 bp, Homo sapien
ctcttgccccagacttgctggccag

SEQ ID NO: 3439479 - DNA, 25 bp, Homo sapien
ttgccccagacttgctggccaggat

SEQ ID NO: 3439480 - DNA, 25 bp, Homo sapien
ctgggagggatcagaaccacagctc

SEQ ID NO: 3439481 - DNA, 25 bp, Homo sapien
tggtgacttccagggaaagtcctgg

SEQ ID NO: 3439482 - DNA, 25 bp, Homo sapien
tggctgccaggagggtagctaggtg

SEQ ID NO: 3439483 - DNA, 25 bp, Homo sapien
ccaggagggtagctaggtgggaaga

SEQ ID NO: 3439484 - DNA, 25 bp, Homo sapien
tgagcttccagttgtgcatatgtgt

SEQ ID NO: 3439485 - DNA, 25 bp, Homo sapien
gagcttccagttgtgcatatgtgta

SEQ ID NO: 3439486 - DNA, 25 bp, Homo sapien
tgtgagcttccagttgtgcatatgt

SEQ ID NO: 3439487 - DNA, 25 bp, Homo sapien
gaatgtgagcttccagttgtgcata

SEQ ID NO: 3439488 - DNA, 25 bp, Homo sapien
tttctgagacacaggattgtggcct

SEQ ID NO: 3439489 - DNA, 25 bp, Homo sapien
ggaacagccttgtctgctccttgga

SEQ ID NO: 3439490 - DNA, 25 bp, Homo sapien
tctgagacacaggattgtggcctcc

SEQ ID NO: 3439491 - DNA, 25 bp, Homo sapien
caggacagccggaacagccttgtct

SEQ ID NO: 3439492 - DNA, 25 bp, Homo sapien
ttgtaagtttgcaacttcttggtct

SEQ ID NO: 3439493 - DNA, 25 bp, Homo sapien
cctggtgctcgtgaccagagcttgc

SEQ ID NO: 3439494 - DNA, 25 bp, Homo sapien
gagaaaggggtgttcagtgaacaaa

SEQ ID NO: 3439495 - DNA, 25 bp, Homo sapien
ggacccagccttgcttgagaaaggg

SEQ ID NO: 3439496 - DNA, 25 bp, Homo sapien
caggaggaaccctcctttgaactct

SEQ ID NO: 3439497 - DNA, 25 bp, Homo sapien
ttcctccgaccagtgagcaggttcc

SEQ ID NO: 3439498 - DNA, 25 bp, Homo sapien
ttgctgccaggttcctccgaccagt

SEQ ID NO: 3439499 - DNA, 25 bp, Homo sapien
ccaggttcctccgaccagtgagcag

SEQ ID NO: 3439500 - DNA, 25 bp, Homo sapien
tgcttgagtgtattcccaggagatt

SEQ ID NO: 3439501 - DNA, 25 bp, Homo sapien
ttctgaagatgaggccaccaccatt

SEQ ID NO: 3439502 - DNA, 25 bp, Homo sapien
gaagatgaggccaccaccattgttt

SEQ ID NO: 3439503 - DNA, 25 bp, Homo sapien
ctgcttgcttgagtgtattcccagg

SEQ ID NO: 3439504 - DNA, 25 bp, Homo sapien
ctggggccgaggtacataggacttt

SEQ ID NO: 3439505 - DNA, 25 bp, Homo sapien
tggggccgaggtacataggactttg

SEQ ID NO: 3439506 - DNA, 25 bp, Homo sapien
gactggggccgaggtacataggact

SEQ ID NO: 3439507 - DNA, 25 bp, Homo sapien
gggccgaggtacataggactttggc

SEQ ID NO: 3439508 - DNA, 25 bp, Homo sapien
tctgttgtgcaccacccgatttccg

SEQ ID NO: 3439509 - DNA, 25 bp, Homo sapien
atttccgtcggcctcctttctgact

SEQ ID NO: 3439510 - DNA, 25 bp, Homo sapien
atcttgtctgcaagacacgtgtgcc

SEQ ID NO: 3439511 - DNA, 25 bp, Homo sapien
caagacacgtgtgcccctgagctga

SEQ ID NO: 3439512 - DNA, 25 bp, Homo sapien
gtttagtgtgcgtccctggccagtg

SEQ ID NO: 3439513 - DNA, 25 bp, Homo sapien
cactgccattgtgaagatgcgcgtg

SEQ ID NO: 3439514 - DNA, 25 bp, Homo sapien
gacagatgggcaggactacaaggct

SEQ ID NO: 3439515 - DNA, 25 bp, Homo sapien
ccgtgtggtggaagacctcattaac

SEQ ID NO: 3439516 - DNA, 25 bp, Homo sapien
ctgcagaatgaaggatgactcaggc

SEQ ID NO: 3439517 - DNA, 25 bp, Homo sapien
cagaatgaaggatgactcaggcaga

SEQ ID NO: 3439518 - DNA, 25 bp, Homo sapien
aatgaaggatgactcaggcagagct

SEQ ID NO: 3439519 - DNA, 25 bp, Homo sapien
gaatgaaggatgactcaggcagagc

SEQ ID NO: 3439520 - DNA, 25 bp, Homo sapien
tatagattctctgtaccccactggg

SEQ ID NO: 3439521 - DNA, 25 bp, Homo sapien
tgtttcagtatcactcctgcagaga

SEQ ID NO: 3439522 - DNA, 25 bp, Homo sapien
gactaccttatgcaaaatagcaccc

SEQ ID NO: 3439523 - DNA, 25 bp, Homo sapien
gcctggctaccctgcattttcttca

SEQ ID NO: 3439524 - DNA, 25 bp, Homo sapien
gaaactcccaggtacccatatgtgg

SEQ ID NO: 3439525 - DNA, 25 bp, Homo sapien
cattggctgacaggttaggcaccca

SEQ ID NO: 3439526 - DNA, 25 bp, Homo sapien
tgactttcagaacaagccaggagtt

SEQ ID NO: 3439527 - DNA, 25 bp, Homo sapien
gattaccaaatgctggatccctgca

SEQ ID NO: 3439528 - DNA, 25 bp, Homo sapien
tgagaggcctgtccgttcctgggtt

SEQ ID NO: 3439529 - DNA, 25 bp, Homo sapien
ctgcgggagccttatatttgagagc

SEQ ID NO: 3439530 - DNA, 25 bp, Homo sapien
tagtgttctacacaaagggcctccc

SEQ ID NO: 3439531 - DNA, 25 bp, Homo sapien
cctgacgggcgttctctgattgtca

SEQ ID NO: 3439532 - DNA, 25 bp, Homo sapien
gctgccatcattatcatcccctccc

SEQ ID NO: 3439533 - DNA, 25 bp, Homo sapien
gaggaggagtcattgctgccatcat

SEQ ID NO: 3439534 - DNA, 25 bp, Homo sapien
attgctgccatcattatcatcccct

SEQ ID NO: 3439535 - DNA, 25 bp, Homo sapien
cctgcccactaaggaggaggagtca

SEQ ID NO: 3439536 - DNA, 25 bp, Homo sapien
tgaaggtcttaatggagagcagcat

SEQ ID NO: 3439537 - DNA, 25 bp, Homo sapien
agcagcataaaggagggtcaaggaa

SEQ ID NO: 3439538 - DNA, 25 bp, Homo sapien
agccatttgtatgaaggtcttaatg

SEQ ID NO: 3439539 - DNA, 25 bp, Homo sapien
tacaccttgagacccacctactcgg

SEQ ID NO: 3439540 - DNA, 25 bp, Homo sapien
tgcagtccagccaatccctggtctt

SEQ ID NO: 3439541 - DNA, 25 bp, Homo sapien
tccctcctgtgcccttgactgccct

SEQ ID NO: 3439542 - DNA, 25 bp, Homo sapien
tggtcttcctggaggctgatcactt

SEQ ID NO: 3439543 - DNA, 25 bp, Homo sapien
gatgcctggaggcacctcaggaaga

SEQ ID NO: 3439544 - DNA, 25 bp, Homo sapien
cgacacccgcctgatggacatgggc

SEQ ID NO: 3439545 - DNA, 25 bp, Homo sapien
tgcccaccactacagaggatgaggg

SEQ ID NO: 3439546 - DNA, 25 bp, Homo sapien
gcattgcacctggagcagtacacgg

SEQ ID NO: 3439547 - DNA, 25 bp, Homo sapien
tgctaagcggcatttggcagagctg

SEQ ID NO: 3439548 - DNA, 25 bp, Homo sapien
catatgcctctttagtgtctgtgga

SEQ ID NO: 3439549 - DNA, 25 bp, Homo sapien
gatctgctaatcacctcttttggtc

SEQ ID NO: 3439550 - DNA, 25 bp, Homo sapien
gtagagcctgagtccccattgccta

SEQ ID NO: 3439551 - DNA, 25 bp, Homo sapien
caggagctcttgattacagggtgca

SEQ ID NO: 3439552 - DNA, 25 bp, Homo sapien
ggaggacccgggcgtccttggcagc

SEQ ID NO: 3439553 - DNA, 25 bp, Homo sapien
ccgcctcaggccgagatgaggagcc

SEQ ID NO: 3439554 - DNA, 25 bp, Homo sapien
gctgctgtctctgggaggacccggg

SEQ ID NO: 3439555 - DNA, 25 bp, Homo sapien
ctcccgcctcaggccgagatgagga

SEQ ID NO: 3439556 - DNA, 25 bp, Homo sapien
gggctgttttcactggttgatggta

SEQ ID NO: 3439557 - DNA, 25 bp, Homo sapien
gatggtatctgatcccttccagcct

SEQ ID NO: 3439558 - DNA, 25 bp, Homo sapien
ggagggccagtccaggtctgaggtc

SEQ ID NO: 3439559 - DNA, 25 bp, Homo sapien
tccagcctgaggttcctggagggcc

SEQ ID NO: 3439560 - DNA, 25 bp, Homo sapien
agaggactaggagcttgagggggca

SEQ ID NO: 3439561 - DNA, 25 bp, Homo sapien
gaggactaggagcttgagggggcag

SEQ ID NO: 3439562 - DNA, 25 bp, Homo sapien
ggactgggactgagtgcacctgtga

SEQ ID NO: 3439563 - DNA, 25 bp, Homo sapien
actgggactgagtgcacctgtgagc

SEQ ID NO: 3439564 - DNA, 25 bp, Homo sapien
tgggactgagtgcacctgtgagccc

SEQ ID NO: 3439565 - DNA, 25 bp, Homo sapien
ctgggactgagtgcacctgtgagcc

SEQ ID NO: 3439566 - DNA, 25 bp, Homo sapien
gtccccgcgtggagtctttactcaa

SEQ ID NO: 3439567 - DNA, 25 bp, Homo sapien
cgccggtacgcctggtccccgcgtg

SEQ ID NO: 3439568 - DNA, 25 bp, Homo sapien
ggtccccgcgtggagtctttactca

SEQ ID NO: 3439569 - DNA, 25 bp, Homo sapien
tccccgcgtggagtctttactcaaa

SEQ ID NO: 3439570 - DNA, 25 bp, Homo sapien
tgcggcatcccaccaccattagtgg

SEQ ID NO: 3439571 - DNA, 25 bp, Homo sapien
cagcccctttgtttacgttgaccag

SEQ ID NO: 3439572 - DNA, 25 bp, Homo sapien
aatagctagcaggtgtcggtgtgtc

SEQ ID NO: 3439573 - DNA, 25 bp, Homo sapien
ccaggagtcccgtggaatgattcac

SEQ ID NO: 3439574 - DNA, 25 bp, Homo sapien
gttcgatctgtaacttactgtgaat

SEQ ID NO: 3439575 - DNA, 25 bp, Homo sapien
tcaattgagatcactcactacattt

SEQ ID NO: 3439576 - DNA, 25 bp, Homo sapien
tcgatctgtaacttactgtgaataa

SEQ ID NO: 3439577 - DNA, 25 bp, Homo sapien
tgtgaataatcaattgagatcactc

SEQ ID NO: 3439578 - DNA, 25 bp, Homo sapien
cagcttccggtcagagtgtgaggct

SEQ ID NO: 3439579 - DNA, 25 bp, Homo sapien
agatggatcggacgctgcacaagat

SEQ ID NO: 3439580 - DNA, 25 bp, Homo sapien
tgaccaagactttcgcagcttccgg

SEQ ID NO: 3439581 - DNA, 25 bp, Homo sapien
tgagagtgtccaggtgcccgatgac

SEQ ID NO: 3439582 - DNA, 25 bp, Homo sapien
tctcgtacacagtctcaccttctat

SEQ ID NO: 3439583 - DNA, 25 bp, Homo sapien
ccacgccgcttctcagtttgtcaag

SEQ ID NO: 3439584 - DNA, 25 bp, Homo sapien
tcagtttgtcaagcgccttctcgta

SEQ ID NO: 3439585 - DNA, 25 bp, Homo sapien
aagcgccttctcgtacacagtctca

SEQ ID NO: 3439586 - DNA, 25 bp, Homo sapien
agtggttggcaggagtccccagata

SEQ ID NO: 3439587 - DNA, 25 bp, Homo sapien
ggagcagtggttggcaggagtcccc

SEQ ID NO: 3439588 - DNA, 25 bp, Homo sapien
cagggagcagtggttggcaggagtc

SEQ ID NO: 3439589 - DNA, 25 bp, Homo sapien
ggttggcaggagtccccagatagca

SEQ ID NO: 3439590 - DNA, 25 bp, Homo sapien
gctgacccagaacaccagggactca

SEQ ID NO: 3439591 - DNA, 25 bp, Homo sapien
tgctgacccagaacaccagggactc

SEQ ID NO: 3439592 - DNA, 25 bp, Homo sapien
ctgacccagaacaccagggactcac

SEQ ID NO: 3439593 - DNA, 25 bp, Homo sapien
ctgctgacccagaacaccagggact

SEQ ID NO: 3439594 - DNA, 25 bp, Homo sapien
gatgcagatcctgtgggagcacatt

SEQ ID NO: 3439595 - DNA, 25 bp, Homo sapien
gcgagtggggccgagagctctcctt

SEQ ID NO: 3439596 - DNA, 25 bp, Homo sapien
gattgtggggccttcatcagtctga

SEQ ID NO: 3439597 - DNA, 25 bp, Homo sapien
agctctccttggtgtgcgtgtggct

SEQ ID NO: 3439598 - DNA, 25 bp, Homo sapien
aagtgatgcgcattgagctgaggtc

SEQ ID NO: 3439599 - DNA, 25 bp, Homo sapien
tgagctgaggtctaggagccactcc

SEQ ID NO: 3439600 - DNA, 25 bp, Homo sapien
gcgaggtggcacctaggcacaccat

SEQ ID NO: 3439601 - DNA, 25 bp, Homo sapien
gaagcgaggtggcacctaggcacac

SEQ ID NO: 3439602 - DNA, 25 bp, Homo sapien
cctgctgtgttgagatgagcaccag

SEQ ID NO: 3439603 - DNA, 25 bp, Homo sapien
agatgagcaccagagccaagaagct

SEQ ID NO: 3439604 - DNA, 25 bp, Homo sapien
gagatgagcaccagagccaagaagc

SEQ ID NO: 3439605 - DNA, 25 bp, Homo sapien
gcgggaagcgcacgcgcaaacgcgg

SEQ ID NO: 3439606 - DNA, 25 bp, Homo sapien
gcgcctgcgcaagccgagagtctcg

SEQ ID NO: 3439607 - DNA, 25 bp, Homo sapien
gagagtctcgggatcgacacgtggg

SEQ ID NO: 3439608 - DNA, 25 bp, Homo sapien
gcttcgcggccgctgtaaacaccaa

SEQ ID NO: 3439609 - DNA, 25 bp, Homo sapien
cagatcgccgccgttgttgggctgt

SEQ ID NO: 3439610 - DNA, 25 bp, Homo sapien
atgatggatgccagaacctgcacgt

SEQ ID NO: 3439611 - DNA, 25 bp, Homo sapien
tggagtccccggtcagaaggacgat

SEQ ID NO: 3439612 - DNA, 25 bp, Homo sapien
ggacgatgccgagcgcgccgtattt

SEQ ID NO: 3439613 - DNA, 25 bp, Homo sapien
ccatgtggcaatgcgcgcgccattc

SEQ ID NO: 3439614 - DNA, 25 bp, Homo sapien
gttcccatgtggcaatgcgcgcgcc

SEQ ID NO: 3439615 - DNA, 25 bp, Homo sapien
caatgcgcgcgccattccggtggaa

SEQ ID NO: 3439616 - DNA, 25 bp, Homo sapien
gcgcgcgccattccggtggaattca

SEQ ID NO: 3439617 - DNA, 25 bp, Homo sapien
tctactaggaaggttgagaaatgta

SEQ ID NO: 3439618 - DNA, 25 bp, Homo sapien
ttctgcccaattccgactggtgaca

SEQ ID NO: 3439619 - DNA, 25 bp, Homo sapien
cttaattgccttggactgaagtgat

SEQ ID NO: 3439620 - DNA, 25 bp, Homo sapien
gccttggactgaagtgatacattct

SEQ ID NO: 3439621 - DNA, 25 bp, Homo sapien
acaatgatggtgtgctgttctcccc

SEQ ID NO: 3439622 - DNA, 25 bp, Homo sapien
ggcttatttcttactcatcccacat

SEQ ID NO: 3439623 - DNA, 25 bp, Homo sapien
ccagcagggacttaaatccttctga

SEQ ID NO: 3439624 - DNA, 25 bp, Homo sapien
tttgattccaactgctcagattggg

SEQ ID NO: 3439625 - DNA, 25 bp, Homo sapien
ctagagggtcggagctgcaaaccaa

SEQ ID NO: 3439626 - DNA, 25 bp, Homo sapien
tgcaaaccaaagcacctacatgtgg

SEQ ID NO: 3439627 - DNA, 25 bp, Homo sapien
gctcactcatttggctggcaggaga

SEQ ID NO: 3439628 - DNA, 25 bp, Homo sapien
caggttactgttgatggctcactca

SEQ ID NO: 3439629 - DNA, 25 bp, Homo sapien
gaaagccaggaccaagtcaatcttg

SEQ ID NO: 3439630 - DNA, 25 bp, Homo sapien
tcttcagcatctagaaccaggcttg

SEQ ID NO: 3439631 - DNA, 25 bp, Homo sapien
cttgatctaggctctgtcttcagca

SEQ ID NO: 3439632 - DNA, 25 bp, Homo sapien
caccaactgagtaggtaatccgtaa

SEQ ID NO: 3439633 - DNA, 25 bp, Homo sapien
cctggggcatgccagcaggccctgc

SEQ ID NO: 3439634 - DNA, 25 bp, Homo sapien
aggccctgccctctgagtgttggca

SEQ ID NO: 3439635 - DNA, 25 bp, Homo sapien
tctgagtgttggcagacttgaacat

SEQ ID NO: 3439636 - DNA, 25 bp, Homo sapien
tgagtgttggcagacttgaacatcc

SEQ ID NO: 3439637 - DNA, 25 bp, Homo sapien
gctcctgtggctgcgagggtcataa

SEQ ID NO: 3439638 - DNA, 25 bp, Homo sapien
tgttcacctaagtgggggctcctgt

SEQ ID NO: 3439639 - DNA, 25 bp, Homo sapien
cccgtccgaaatgttcacctaagtg

SEQ ID NO: 3439640 - DNA, 25 bp, Homo sapien
gaggagccgcctccgggtctgaacc

SEQ ID NO: 3439641 - DNA, 25 bp, Homo sapien
gcgctctcccgcctagcggcgcgtt

SEQ ID NO: 3439642 - DNA, 25 bp, Homo sapien
ctctcccgcctagcggcgcgttcct

SEQ ID NO: 3439643 - DNA, 25 bp, Homo sapien
gggcctcgcggggactccgtgacgc

SEQ ID NO: 3439644 - DNA, 25 bp, Homo sapien
ttcctcccgcccaggacggcgccag

SEQ ID NO: 3439645 - DNA, 25 bp, Homo sapien
ttttgcgtacggtcccgaagccgca

SEQ ID NO: 3439646 - DNA, 25 bp, Homo sapien
ccgcagctgccgcacgatgtggcgt

SEQ ID NO: 3439647 - DNA, 25 bp, Homo sapien
ccagctccaggaaaagcgccttttg

SEQ ID NO: 3439648 - DNA, 25 bp, Homo sapien
gccgcacgatgtggcgtttccagcg

SEQ ID NO: 3439649 - DNA, 25 bp, Homo sapien
ggatgggcgtaacgcacaggctcaa

SEQ ID NO: 3439650 - DNA, 25 bp, Homo sapien
ggctcaaggcataaggcacagcgca

SEQ ID NO: 3439651 - DNA, 25 bp, Homo sapien
gcacagcgcactcgggtcacaggcg

SEQ ID NO: 3439652 - DNA, 25 bp, Homo sapien
gcggagtcctggcagtcgggatggg

SEQ ID NO: 3439653 - DNA, 25 bp, Homo sapien
gctcagccttctctaagagatggtt

SEQ ID NO: 3439654 - DNA, 25 bp, Homo sapien
ttctttgagaacttgtccagcagct

SEQ ID NO: 3439655 - DNA, 25 bp, Homo sapien
tgggtggtgggagtgacactgtttg

SEQ ID NO: 3439656 - DNA, 25 bp, Homo sapien
gacactgtttggctccggctgcagc

SEQ ID NO: 3439657 - DNA, 25 bp, Homo sapien
accagtgatgggacttggtctgagt

SEQ ID NO: 3439658 - DNA, 25 bp, Homo sapien
tggtctgagtcaagctctgactcct

SEQ ID NO: 3439659 - DNA, 25 bp, Homo sapien
gacttggtctgagtcaagctctgac

SEQ ID NO: 3439660 - DNA, 25 bp, Homo sapien
caccctcagtgcgaccagtgatggg

SEQ ID NO: 3439661 - DNA, 25 bp, Homo sapien
tcaaatgagtccgtacctatgcccg

SEQ ID NO: 3439662 - DNA, 25 bp, Homo sapien
tattgttgcactccccgtactttgg

SEQ ID NO: 3439663 - DNA, 25 bp, Homo sapien
taaattggacctacaacagcagctc

SEQ ID NO: 3439664 - DNA, 25 bp, Homo sapien
ggcaaacgaagacatcccagggctt

SEQ ID NO: 3439665 - DNA, 25 bp, Homo sapien
ctttgcagtggtgaaacagtgccat

SEQ ID NO: 3439666 - DNA, 25 bp, Homo sapien
gacaaaggacatatacacacttcat

SEQ ID NO: 3439667 - DNA, 25 bp, Homo sapien
caggaactctggactatccttccaa

SEQ ID NO: 3439668 - DNA, 25 bp, Homo sapien
cagtgccatatcttgatggttacac

SEQ ID NO: 3439669 - DNA, 25 bp, Homo sapien
ccactgagcaatctgatcaccacct

SEQ ID NO: 3439670 - DNA, 25 bp, Homo sapien
gctttcatttatgttgtgttgtacc

SEQ ID NO: 3439671 - DNA, 25 bp, Homo sapien
tattgtatgcctttcaaaattcaag

SEQ ID NO: 3439672 - DNA, 25 bp, Homo sapien
taattcttttcaccactgagcaatc

SEQ ID NO: 3439673 - DNA, 25 bp, Homo sapien
cctactaggaacctctctggcaaga

SEQ ID NO: 3439674 - DNA, 25 bp, Homo sapien
gccgtgccgcttcgtttctctgcga

SEQ ID NO: 3439675 - DNA, 25 bp, Homo sapien
ccttgcacagggacgcgctgctgtt

SEQ ID NO: 3439676 - DNA, 25 bp, Homo sapien
tgcctcgcctgaagagtgggaagcc

SEQ ID NO: 3439677 - DNA, 25 bp, Homo sapien
aaggcgctaagggagtcggctgctc

SEQ ID NO: 3439678 - DNA, 25 bp, Homo sapien
cgaaggcgctaagggagtcggctgc

SEQ ID NO: 3439679 - DNA, 25 bp, Homo sapien
cgctaagggagtcggctgctcacct

SEQ ID NO: 3439680 - DNA, 25 bp, Homo sapien
ggccgaaggcgctaagggagtcggc

SEQ ID NO: 3439681 - DNA, 25 bp, Homo sapien
cagcgtgcccagggccgcgcccttc

SEQ ID NO: 3439682 - DNA, 25 bp, Homo sapien
caaacgcggctagccgggtggctaa

SEQ ID NO: 3439683 - DNA, 25 bp, Homo sapien
aaagagcggatagcgggtcccaagc

SEQ ID NO: 3439684 - DNA, 25 bp, Homo sapien
tgcctcggagcagagacagacctgc

SEQ ID NO: 3439685 - DNA, 25 bp, Homo sapien
cccagtgggaatatgcctcggagca

SEQ ID NO: 3439686 - DNA, 25 bp, Homo sapien
agcaggtcgcgcgcctcttcctgga

SEQ ID NO: 3439687 - DNA, 25 bp, Homo sapien
gccttgcgctgcacgagcctctcca

SEQ ID NO: 3439688 - DNA, 25 bp, Homo sapien
gctcccggcgctcgttgcgcaggtt

SEQ ID NO: 3439689 - DNA, 25 bp, Homo sapien
gcagcgcctcgtaggctgcccgctg

SEQ ID NO: 3439690 - DNA, 25 bp, Homo sapien
ccagacaccggcgaggcccgactcc

SEQ ID NO: 3439691 - DNA, 25 bp, Homo sapien
cagacaccggcgaggcccgactcct

SEQ ID NO: 3439692 - DNA, 25 bp, Homo sapien
ttccagacaccggcgaggcccgact

SEQ ID NO: 3439693 - DNA, 25 bp, Homo sapien
tccagacaccggcgaggcccgactc

SEQ ID NO: 3439694 - DNA, 25 bp, Homo sapien
cacgcaggcggggctagacccggtc

SEQ ID NO: 3439695 - DNA, 25 bp, Homo sapien
cggcgcctcgcacgcaggcggggct

SEQ ID NO: 3439696 - DNA, 25 bp, Homo sapien
gcctcgcacgcaggcggggctagac

SEQ ID NO: 3439697 - DNA, 25 bp, Homo sapien
gcgcggcgcctcgcacgcaggcggg

SEQ ID NO: 3439698 - DNA, 25 bp, Homo sapien
ctgggacacccgcgcctgcttggcc

SEQ ID NO: 3439699 - DNA, 25 bp, Homo sapien
acggtccgcttggcagccttcttca

SEQ ID NO: 3439700 - DNA, 25 bp, Homo sapien
cggtccgcttggcagccttcttcag

SEQ ID NO: 3439701 - DNA, 25 bp, Homo sapien
tgtacacgtgcagcggtcacgcatg

SEQ ID NO: 3439702 - DNA, 25 bp, Homo sapien
tacgaccacacggtcctctgcaggt

SEQ ID NO: 3439703 - DNA, 25 bp, Homo sapien
cacaggatacgctgaagacaggaat

SEQ ID NO: 3439704 - DNA, 25 bp, Homo sapien
cacaagtacagtcggcagcctgggt

SEQ ID NO: 3439705 - DNA, 25 bp, Homo sapien
aagggcctcttccacttctcacaag

SEQ ID NO: 3439706 - DNA, 25 bp, Homo sapien
tccctcatcccatcgcctagggtgt

SEQ ID NO: 3439707 - DNA, 25 bp, Homo sapien
atcccatcgcctagggtgtccgggc

SEQ ID NO: 3439708 - DNA, 25 bp, Homo sapien
tgaagggcctcttccacttctcaca

SEQ ID NO: 3439709 - DNA, 25 bp, Homo sapien
tcctggtgacagctattcagaagcc

SEQ ID NO: 3439710 - DNA, 25 bp, Homo sapien
cagacaatggaggtcagactagccc

SEQ ID NO: 3439711 - DNA, 25 bp, Homo sapien
ctagccctgggagatctgagctttc

SEQ ID NO: 3439712 - DNA, 25 bp, Homo sapien
tggaactgaccccaagtggctccag

SEQ ID NO: 3439713 - DNA, 25 bp, Homo sapien
ggagcctaggctcactgggtgacct

SEQ ID NO: 3439714 - DNA, 25 bp, Homo sapien
atgacttggcccacaagggctccca

SEQ ID NO: 3439715 - DNA, 25 bp, Homo sapien
aggagagacgctgaaggttccccca

SEQ ID NO: 3439716 - DNA, 25 bp, Homo sapien
agagggtgtgtcctacaatgacttg

SEQ ID NO: 3439717 - DNA, 25 bp, Homo sapien
ccaagagagatatgctaagggactg

SEQ ID NO: 3439718 - DNA, 25 bp, Homo sapien
ggtgacccagatcagtcccaggaag

SEQ ID NO: 3439719 - DNA, 25 bp, Homo sapien
tcatgatgggaagaactgccttacc

SEQ ID NO: 3439720 - DNA, 25 bp, Homo sapien
gtaatgaaagtctcccaaggtctcc

SEQ ID NO: 3439721 - DNA, 25 bp, Homo sapien
tccacacagtgggacagcgtcaggg

SEQ ID NO: 3439722 - DNA, 25 bp, Homo sapien
accacatccacacagtgggacagcg

SEQ ID NO: 3439723 - DNA, 25 bp, Homo sapien
cacatccacacagtgggacagcgtc

SEQ ID NO: 3439724 - DNA, 25 bp, Homo sapien
cacagtgggacagcgtcagggaggt

SEQ ID NO: 3439725 - DNA, 25 bp, Homo sapien
tgggtgcaaagaaacctcagggccg

SEQ ID NO: 3439726 - DNA, 25 bp, Homo sapien
tcccaattgagtaggagctcctgcc

SEQ ID NO: 3439727 - DNA, 25 bp, Homo sapien
gatgaagacagacccttgtgaggac

SEQ ID NO: 3439728 - DNA, 25 bp, Homo sapien
tgaggcatcaaccataggaagcaga

SEQ ID NO: 3439729 - DNA, 25 bp, Homo sapien
gggctcccccaattgagtgacctct

SEQ ID NO: 3439730 - DNA, 25 bp, Homo sapien
gatgatctggtatcgctgctcaggg

SEQ ID NO: 3439731 - DNA, 25 bp, Homo sapien
ccgggtaggaagtcgggcagccaca

SEQ ID NO: 3439732 - DNA, 25 bp, Homo sapien
agcacatcctgagcccgggtaggaa

SEQ ID NO: 3439733 - DNA, 25 bp, Homo sapien
aaaacgaacagcattgacctcagag

SEQ ID NO: 3439734 - DNA, 25 bp, Homo sapien
acagcattgacctcagagaggtggg

SEQ ID NO: 3439735 - DNA, 25 bp, Homo sapien
cattgacctcagagaggtgggcatc

SEQ ID NO: 3439736 - DNA, 25 bp, Homo sapien
ctgttggggccaaaacgaacagcat

SEQ ID NO: 3439737 - DNA, 25 bp, Homo sapien
atcaggcggtcagcccctccagtgg

SEQ ID NO: 3439738 - DNA, 25 bp, Homo sapien
ggatcaggcggtcagcccctccagt

SEQ ID NO: 3439739 - DNA, 25 bp, Homo sapien
agaggtggatcaggcggtcagcccc

SEQ ID NO: 3439740 - DNA, 25 bp, Homo sapien
gtggatcaggcggtcagcccctcca

SEQ ID NO: 3439741 - DNA, 25 bp, Homo sapien
cgaggggtcaaagtccacactggtg

SEQ ID NO: 3439742 - DNA, 25 bp, Homo sapien
gaggggtcaaagtccacactggtga

SEQ ID NO: 3439743 - DNA, 25 bp, Homo sapien
ctgcccagtgtggagatcagagagg

SEQ ID NO: 3439744 - DNA, 25 bp, Homo sapien
gtggagatcagagagggcacaatcc

SEQ ID NO: 3439745 - DNA, 25 bp, Homo sapien
gtgtggagatcagagagggcacaat

SEQ ID NO: 3439746 - DNA, 25 bp, Homo sapien
ccagtgtggagatcagagagggcac

SEQ ID NO: 3439747 - DNA, 25 bp, Homo sapien
ggtgctaagccggaggcaacattct

SEQ ID NO: 3439748 - DNA, 25 bp, Homo sapien
tcttcgggccacagaatgaggctag

SEQ ID NO: 3439749 - DNA, 25 bp, Homo sapien
tcacagtttcccacggcccaggtca

SEQ ID NO: 3439750 - DNA, 25 bp, Homo sapien
gcaaaggagcctccggcccaaggag

SEQ ID NO: 3439751 - DNA, 25 bp, Homo sapien
cagcctggttgtaagttgctgctaa

SEQ ID NO: 3439752 - DNA, 25 bp, Homo sapien
ggttgtaagttgctgctaaaacctg

SEQ ID NO: 3439753 - DNA, 25 bp, Homo sapien
cctggttgtaagttgctgctaaaac

SEQ ID NO: 3439754 - DNA, 25 bp, Homo sapien
ggcagcctggttgtaagttgctgct

SEQ ID NO: 3439755 - DNA, 25 bp, Homo sapien
gtttggccaagaccccataacaggc

SEQ ID NO: 3439756 - DNA, 25 bp, Homo sapien
cctagtcctgaggtatgacctctga

SEQ ID NO: 3439757 - DNA, 25 bp, Homo sapien
cggccccaggtacggatcaagagtt

SEQ ID NO: 3439758 - DNA, 25 bp, Homo sapien
cccctagtcctgaggtatgacctct

SEQ ID NO: 3439759 - DNA, 25 bp, Homo sapien
actccttcactgtccggtcgcggct

SEQ ID NO: 3439760 - DNA, 25 bp, Homo sapien
ttagcttgaatttggcagctgtcac

SEQ ID NO: 3439761 - DNA, 25 bp, Homo sapien
actgcctggtgcctcgttagcttga

SEQ ID NO: 3439762 - DNA, 25 bp, Homo sapien
tcaccttatccttgtgtccagacag

SEQ ID NO: 3439763 - DNA, 25 bp, Homo sapien
cctcagaggagggttgtcgggagcc

SEQ ID NO: 3439764 - DNA, 25 bp, Homo sapien
ccttgagaggtttcacccccaaatg

SEQ ID NO: 3439765 - DNA, 25 bp, Homo sapien
gagccaccccacaggacatatggag

SEQ ID NO: 3439766 - DNA, 25 bp, Homo sapien
ccactgggggataccattagggaat

SEQ ID NO: 3439767 - DNA, 25 bp, Homo sapien
aatgatgatatggtccccacacacc

SEQ ID NO: 3439768 - DNA, 25 bp, Homo sapien
gaaccggatcttctggtcattgtgg

SEQ ID NO: 3439769 - DNA, 25 bp, Homo sapien
cacacaccacgtcattacagtagga

SEQ ID NO: 3439770 - DNA, 25 bp, Homo sapien
gaaaggacattgatggtcctggagc

SEQ ID NO: 3439771 - DNA, 25 bp, Homo sapien
catcttggttgcaaggtccaggcgg

SEQ ID NO: 3439772 - DNA, 25 bp, Homo sapien
caggcggagtccagcattggaccaa

SEQ ID NO: 3439773 - DNA, 25 bp, Homo sapien
agtggcacagcttcctgcgggagct

SEQ ID NO: 3439774 - DNA, 25 bp, Homo sapien
caagagccatgaagacagtggcaca

SEQ ID NO: 3439775 - DNA, 25 bp, Homo sapien
ttgctgacacgcaggtcgatgacct

SEQ ID NO: 3439776 - DNA, 25 bp, Homo sapien
gtgttgtctcgggaacagctgagca

SEQ ID NO: 3439777 - DNA, 25 bp, Homo sapien
tcgatgaccttgagtgtgttgtctc

SEQ ID NO: 3439778 - DNA, 25 bp, Homo sapien
tgcagttggtcgtggctgaggctca

SEQ ID NO: 3439779 - DNA, 25 bp, Homo sapien
agggctccaagagggtctattacag

SEQ ID NO: 3439780 - DNA, 25 bp, Homo sapien
tgtcgaggggtttggtacctcagca

SEQ ID NO: 3439781 - DNA, 25 bp, Homo sapien
gaacagaggtcatcactagtctctg

SEQ ID NO: 3439782 - DNA, 25 bp, Homo sapien
atcactagtctctgccctctgcagt

SEQ ID NO: 3439783 - DNA, 25 bp, Homo sapien
agtcagaaccacacttgaagccatc

SEQ ID NO: 3439784 - DNA, 25 bp, Homo sapien
tcagaaccacacttgaagccatcgg

SEQ ID NO: 3439785 - DNA, 25 bp, Homo sapien
acagctttggtccagtcagaaccac

SEQ ID NO: 3439786 - DNA, 25 bp, Homo sapien
cagaaccacacttgaagccatcggc

SEQ ID NO: 3439787 - DNA, 25 bp, Homo sapien
ggtccggcagggcacacttggacac

SEQ ID NO: 3439788 - DNA, 25 bp, Homo sapien
gtccggcagggcacacttggacaca

SEQ ID NO: 3439789 - DNA, 25 bp, Homo sapien
agggtccggcagggcacacttggac

SEQ ID NO: 3439790 - DNA, 25 bp, Homo sapien
caggcatatgctctcacggacatac

SEQ ID NO: 3439791 - DNA, 25 bp, Homo sapien
agtttcccggtgtccacatcccaga

SEQ ID NO: 3439792 - DNA, 25 bp, Homo sapien
ggagcctgccagtgcatagcttctg

SEQ ID NO: 3439793 - DNA, 25 bp, Homo sapien
cccagatgtaaagggccccatcaca

SEQ ID NO: 3439794 - DNA, 25 bp, Homo sapien
ctgctctccagtttcccggtgtcca

SEQ ID NO: 3439795 - DNA, 25 bp, Homo sapien
ggcttcaggaactgcgcctgcaacc

SEQ ID NO: 3439796 - DNA, 25 bp, Homo sapien
ttcaggaactgcgcctgcaacctgg

SEQ ID NO: 3439797 - DNA, 25 bp, Homo sapien
caggaactgcgcctgcaacctggct

SEQ ID NO: 3439798 - DNA, 25 bp, Homo sapien
gcttcaggaactgcgcctgcaacct

SEQ ID NO: 3439799 - DNA, 25 bp, Homo sapien
ctcaccatgtggctcccggagtagc

SEQ ID NO: 3439800 - DNA, 25 bp, Homo sapien
tagcaccaggccacggcgttgacgg

SEQ ID NO: 3439801 - DNA, 25 bp, Homo sapien
tgtggctcccggagtagcaccaggc

SEQ ID NO: 3439802 - DNA, 25 bp, Homo sapien
agagcacaaccttcctgccctggtc

SEQ ID NO: 3439803 - DNA, 25 bp, Homo sapien
caggcaggcaggtcgtggccctact

SEQ ID NO: 3439804 - DNA, 25 bp, Homo sapien
agcttcaggcttcgggcaagagctc

SEQ ID NO: 3439805 - DNA, 25 bp, Homo sapien
ttccccattaaatcccaaggccagc

SEQ ID NO: 3439806 - DNA, 25 bp, Homo sapien
caacccctgcatggcgccgaaggaa

SEQ ID NO: 3439807 - DNA, 25 bp, Homo sapien
agatagagataaaaatacaaagaaa

SEQ ID NO: 3439808 - DNA, 25 bp, Homo sapien
gatagagataaaaatacaaagaaaa

SEQ ID NO: 3439809 - DNA, 25 bp, Homo sapien
atatcatttttttctactttgggag

SEQ ID NO: 3439810 - DNA, 25 bp, Homo sapien
tatcatttttttctactttgggaga

SEQ ID NO: 3439811 - DNA, 25 bp, Homo sapien
tgaaatgctcgccaaatgtccccat

SEQ ID NO: 3439812 - DNA, 25 bp, Homo sapien
tacctagggactaagggatgttcgc

SEQ ID NO: 3439813 - DNA, 25 bp, Homo sapien
tgtccccatgggatttttgaccaaa

SEQ ID NO: 3439814 - DNA, 25 bp, Homo sapien
catccaggatatggaatccagcacc

SEQ ID NO: 3439815 - DNA, 25 bp, Homo sapien
gaaaggactgaaggattgcgcaccc

SEQ ID NO: 3439816 - DNA, 25 bp, Homo sapien
gctggtccagaccaactgctatggt

SEQ ID NO: 3439817 - DNA, 25 bp, Homo sapien
cattattttattcccaagccagcag

SEQ ID NO: 3439818 - DNA, 25 bp, Homo sapien
tctagataagttgaggacacatacc

SEQ ID NO: 3439819 - DNA, 25 bp, Homo sapien
ctccccaaggttagtccccagactg

SEQ ID NO: 3439820 - DNA, 25 bp, Homo sapien
actgccctgaatttagcaccaattg

SEQ ID NO: 3439821 - DNA, 25 bp, Homo sapien
cagactgagaaagtgaaaccttatt

SEQ ID NO: 3439822 - DNA, 25 bp, Homo sapien
tgcattaacgcacatctcttccaca

SEQ ID NO: 3439823 - DNA, 25 bp, Homo sapien
cttcaagtggcttttgctcatctga

SEQ ID NO: 3439824 - DNA, 25 bp, Homo sapien
ccacaaggatgtggcaaagattctc

SEQ ID NO: 3439825 - DNA, 25 bp, Homo sapien
agggcacagtccctaaattactgat

SEQ ID NO: 3439826 - DNA, 25 bp, Homo sapien
tgtgcactcgtacagtatattactg

SEQ ID NO: 3439827 - DNA, 25 bp, Homo sapien
catcaaggcatactcctgagacctc

SEQ ID NO: 3439828 - DNA, 25 bp, Homo sapien
tcatgctgagtcaccaggattctca

SEQ ID NO: 3439829 - DNA, 25 bp, Homo sapien
caggcatcaaggcatactcctgaga

SEQ ID NO: 3439830 - DNA, 25 bp, Homo sapien
aaggcatactcctgagacctcatat

SEQ ID NO: 3439831 - DNA, 25 bp, Homo sapien
gctcatagcaaccaattcctgggct

SEQ ID NO: 3439832 - DNA, 25 bp, Homo sapien
caccatgccagccttgcatcagcat

SEQ ID NO: 3439833 - DNA, 25 bp, Homo sapien
ctggacaaagggtattattctgtca

SEQ ID NO: 3439834 - DNA, 25 bp, Homo sapien
tcacggctcatagcaaccaattcct

SEQ ID NO: 3439835 - DNA, 25 bp, Homo sapien
gcctcaacggagatgccagtggtaa

SEQ ID NO: 3439836 - DNA, 25 bp, Homo sapien
gaagcagaactcgtttcaggcagcc

SEQ ID NO: 3439837 - DNA, 25 bp, Homo sapien
cactttatgattatgagggccagac

SEQ ID NO: 3439838 - DNA, 25 bp, Homo sapien
tgacctaaactgtattgccctggag

SEQ ID NO: 3439839 - DNA, 25 bp, Homo sapien
tgttgtgccctgtctaaattgtgtg

SEQ ID NO: 3439840 - DNA, 25 bp, Homo sapien
cagatgagttgaccattgaggaaca

SEQ ID NO: 3439841 - DNA, 25 bp, Homo sapien
tgtcttttacccaggctcgaaataa

SEQ ID NO: 3439842 - DNA, 25 bp, Homo sapien
tgtccatgaccatcctacactgcag

SEQ ID NO: 3439843 - DNA, 25 bp, Homo sapien
caagactgttaggaagcaaagccac

SEQ ID NO: 3439844 - DNA, 25 bp, Homo sapien
cctcagagcgtttacagatttggca

SEQ ID NO: 3439845 - DNA, 25 bp, Homo sapien
tgtctcagggagctatggcaacatc

SEQ ID NO: 3439846 - DNA, 25 bp, Homo sapien
tctcaagggcaacatgtgggtggct

SEQ ID NO: 3439847 - DNA, 25 bp, Homo sapien
tactgtgaacaatatatgccaataa

SEQ ID NO: 3439848 - DNA, 25 bp, Homo sapien
ttgcagcctggtcggcgcgctttat

SEQ ID NO: 3439849 - DNA, 25 bp, Homo sapien
cttgcagcctggtcggcgcgcttta

SEQ ID NO: 3439850 - DNA, 25 bp, Homo sapien
ccttgcagcctggtcggcgcgcttt

SEQ ID NO: 3439851 - DNA, 25 bp, Homo sapien
gccttgcagcctggtcggcgcgctt

SEQ ID NO: 3439852 - DNA, 25 bp, Homo sapien
ctgtgcttatagactgctttggtga

SEQ ID NO: 3439853 - DNA, 25 bp, Homo sapien
caccaatagcatggtggaacatacg

SEQ ID NO: 3439854 - DNA, 25 bp, Homo sapien
catctccctgtgcttatagactgct

SEQ ID NO: 3439855 - DNA, 25 bp, Homo sapien
gaacatacggtcctttccaagccca

SEQ ID NO: 3439856 - DNA, 25 bp, Homo sapien
catatatttgatcagcattgggtag

SEQ ID NO: 3439857 - DNA, 25 bp, Homo sapien
tgcatatatttgatcagcattgggt

SEQ ID NO: 3439858 - DNA, 25 bp, Homo sapien
tatttgatcagcattgggtaggtca

SEQ ID NO: 3439859 - DNA, 25 bp, Homo sapien
tatatttgatcagcattgggtaggt

SEQ ID NO: 3439860 - DNA, 25 bp, Homo sapien
aactttacttcatgaggcacagctg

SEQ ID NO: 3439861 - DNA, 25 bp, Homo sapien
ggctgcatatgtgttcatccctgaa

SEQ ID NO: 3439862 - DNA, 25 bp, Homo sapien
gctttgcaaagactaactgctccat

SEQ ID NO: 3439863 - DNA, 25 bp, Homo sapien
gctgccaacacatgtattgaattct

SEQ ID NO: 3439864 - DNA, 25 bp, Homo sapien
ttgtttttccttgccgatgggataa

SEQ ID NO: 3439865 - DNA, 25 bp, Homo sapien
tgctataatgacacaaactatatct

SEQ ID NO: 3439866 - DNA, 25 bp, Homo sapien
cctttctatgtaaatgcttctcaaa

SEQ ID NO: 3439867 - DNA, 25 bp, Homo sapien
aaaaccatgaagaaacctggcacca

SEQ ID NO: 3439868 - DNA, 25 bp, Homo sapien
aagtcattagctcaccatcatttgt

SEQ ID NO: 3439869 - DNA, 25 bp, Homo sapien
tagagttctaattatggctccacca

SEQ ID NO: 3439870 - DNA, 25 bp, Homo sapien
gcattttgatagtcctagacctaga

SEQ ID NO: 3439871 - DNA, 25 bp, Homo sapien
cccctctgcatattgggattaataa

SEQ ID NO: 3439872 - DNA, 25 bp, Homo sapien
tccttgtgattctttagcttctgtt

SEQ ID NO: 3439873 - DNA, 25 bp, Homo sapien
gggatgagaatccatgctttcagat

SEQ ID NO: 3439874 - DNA, 25 bp, Homo sapien
gccagaattctggaagtgttcacag

SEQ ID NO: 3439875 - DNA, 25 bp, Homo sapien
ctttcagattgccagaattctggaa

SEQ ID NO: 3439876 - DNA, 25 bp, Homo sapien
tgagaatccatgctttcagattgcc

SEQ ID NO: 3439877 - DNA, 25 bp, Homo sapien
ctatgaacctggctcctgatccctg

SEQ ID NO: 3439878 - DNA, 25 bp, Homo sapien
tccttcatgaacacgggaatctcac

SEQ ID NO: 3439879 - DNA, 25 bp, Homo sapien
caggagccaaactctccattgcctt

SEQ ID NO: 3439880 - DNA, 25 bp, Homo sapien
tgtcccactgtgagcccttttagtt

SEQ ID NO: 3439881 - DNA, 25 bp, Homo sapien
cttcctagccgtaagcatggaatat

SEQ ID NO: 3439882 - DNA, 25 bp, Homo sapien
cttcttgcccaggattgttttggca

SEQ ID NO: 3439883 - DNA, 25 bp, Homo sapien
tcctagccgtaagcatggaatattt

SEQ ID NO: 3439884 - DNA, 25 bp, Homo sapien
ttactgtagccctagtttgaagtca

SEQ ID NO: 3439885 - DNA, 25 bp, Homo sapien
gaggtgtgttatgcaatgttctgga

SEQ ID NO: 3439886 - DNA, 25 bp, Homo sapien
gctatcctaaagtccaccttgaggt

SEQ ID NO: 3439887 - DNA, 25 bp, Homo sapien
tagctttttatctgttaatggtttc

SEQ ID NO: 3439888 - DNA, 25 bp, Homo sapien
tctctttatgtcctacttaagggta

SEQ ID NO: 3439889 - DNA, 25 bp, Homo sapien
ccagaagcagttaatattcatacct

SEQ ID NO: 3439890 - DNA, 25 bp, Homo sapien
ccaagaacattatcagggccccaga

SEQ ID NO: 3439891 - DNA, 25 bp, Homo sapien
acctttcaatggcaaccagtacttt

SEQ ID NO: 3439892 - DNA, 25 bp, Homo sapien
gaagcagttaatattcatacctttc

SEQ ID NO: 3439893 - DNA, 25 bp, Homo sapien
aaagcgcttaggtcagtgccttcct

SEQ ID NO: 3439894 - DNA, 25 bp, Homo sapien
cacttaaatgctgtgagtgcttcta

SEQ ID NO: 3439895 - DNA, 25 bp, Homo sapien
gaagtgtcaagccaagaacacgcct

SEQ ID NO: 3439896 - DNA, 25 bp, Homo sapien
cagcggttgaagattagcacttaaa

SEQ ID NO: 3439897 - DNA, 25 bp, Homo sapien
aaaaacacataatggagctccaata

SEQ ID NO: 3439898 - DNA, 25 bp, Homo sapien
cacggggataacaacagagaacttc

SEQ ID NO: 3439899 - DNA, 25 bp, Homo sapien
ttttaccctagagtggtatgtctgg

SEQ ID NO: 3439900 - DNA, 25 bp, Homo sapien
ccaaacctagggaaagctatcagta

SEQ ID NO: 3439901 - DNA, 25 bp, Homo sapien
cttctggtagtctgagtctctaata

SEQ ID NO: 3439902 - DNA, 25 bp, Homo sapien
cttgtaagaggttggagtcagttat

SEQ ID NO: 3439903 - DNA, 25 bp, Homo sapien
tggtagtctgagtctctaatacggg

SEQ ID NO: 3439904 - DNA, 25 bp, Homo sapien
tgcagcagagtctatgtcttgatgt

SEQ ID NO: 3439905 - DNA, 25 bp, Homo sapien
tcaggccatttcttacaagtagcca

SEQ ID NO: 3439906 - DNA, 25 bp, Homo sapien
ttcttacaagtagccattcctgtgt

SEQ ID NO: 3439907 - DNA, 25 bp, Homo sapien
ttagccatgcatctctacttcaggc

SEQ ID NO: 3439908 - DNA, 25 bp, Homo sapien
tctacttcaggccatttcttacaag

SEQ ID NO: 3439909 - DNA, 25 bp, Homo sapien
aatctccaccttctgggatcaagca

SEQ ID NO: 3439910 - DNA, 25 bp, Homo sapien
gagtgcagggggcatggtcatggct

SEQ ID NO: 3439911 - DNA, 25 bp, Homo sapien
actggagtgcagggggcatggtcat

SEQ ID NO: 3439912 - DNA, 25 bp, Homo sapien
cagactggagtgcagggggcatggt

SEQ ID NO: 3439913 - DNA, 25 bp, Homo sapien
accaataactgcaagttctttgttc

SEQ ID NO: 3439914 - DNA, 25 bp, Homo sapien
ccaataactgcaagttctttgttct

SEQ ID NO: 3439915 - DNA, 25 bp, Homo sapien
aataactgcaagttctttgttctct

SEQ ID NO: 3439916 - DNA, 25 bp, Homo sapien
caataactgcaagttctttgttctc

SEQ ID NO: 3439917 - DNA, 25 bp, Homo sapien
tcttgggcttgtcaccgacttgccg

SEQ ID NO: 3439918 - DNA, 25 bp, Homo sapien
gcgcgcgtgtgagttgcctttccga

SEQ ID NO: 3439919 - DNA, 25 bp, Homo sapien
tcggagagatgcgtacgcggaacgc

SEQ ID NO: 3439920 - DNA, 25 bp, Homo sapien
tggtccttgctaacgctgccgtcgg

SEQ ID NO: 3439921 - DNA, 25 bp, Homo sapien
cgcaaagcgacttgtccttgctcgc

SEQ ID NO: 3439922 - DNA, 25 bp, Homo sapien
cagccgcaaagcgacttgtccttgc

SEQ ID NO: 3439923 - DNA, 25 bp, Homo sapien
tgcggccagccgcaaagcgacttgt

SEQ ID NO: 3439924 - DNA, 25 bp, Homo sapien
gccagccgcaaagcgacttgtcctt

SEQ ID NO: 3439925 - DNA, 25 bp, Homo sapien
tatcttattctgcaggccagcacca

SEQ ID NO: 3439926 - DNA, 25 bp, Homo sapien
ccagagaagacccactagatccatg

SEQ ID NO: 3439927 - DNA, 25 bp, Homo sapien
agaagacccactagatccatggtag

SEQ ID NO: 3439928 - DNA, 25 bp, Homo sapien
cccactagatccatggtagaggctg

SEQ ID NO: 3439929 - DNA, 25 bp, Homo sapien
ctgctcctttccgctggaagagctt

SEQ ID NO: 3439930 - DNA, 25 bp, Homo sapien
cacctgctcctttccgctggaagag

SEQ ID NO: 3439931 - DNA, 25 bp, Homo sapien
ctggaagagctttcctgagttgggg

SEQ ID NO: 3439932 - DNA, 25 bp, Homo sapien
acctgctcctttccgctggaagagc

SEQ ID NO: 3439933 - DNA, 25 bp, Homo sapien
ccagagagaacaggtgaagctttac

SEQ ID NO: 3439934 - DNA, 25 bp, Homo sapien
actttcagagtaattccggtaccat

SEQ ID NO: 3439935 - DNA, 25 bp, Homo sapien
taattccggtaccatctagaaagca

SEQ ID NO: 3439936 - DNA, 25 bp, Homo sapien
tgatcggtgctggtttggaggtttt

SEQ ID NO: 3439937 - DNA, 25 bp, Homo sapien
gatggaatatctggaagatgcctct

SEQ ID NO: 3439938 - DNA, 25 bp, Homo sapien
atatctggaagatgcctctggcctt

SEQ ID NO: 3439939 - DNA, 25 bp, Homo sapien
tctggaagatgcctctggccttgat

SEQ ID NO: 3439940 - DNA, 25 bp, Homo sapien
tggaagatgcctctggccttgatgc

SEQ ID NO: 3439941 - DNA, 25 bp, Homo sapien
cttctgaactaatgggtgatctgaa

SEQ ID NO: 3439942 - DNA, 25 bp, Homo sapien
aactaatgggtgatctgaatttagc

SEQ ID NO: 3439943 - DNA, 25 bp, Homo sapien
ttctgaactaatgggtgatctgaat

SEQ ID NO: 3439944 - DNA, 25 bp, Homo sapien
ctgaactaatgggtgatctgaattt

SEQ ID NO: 3439945 - DNA, 25 bp, Homo sapien
tcagtgcttgtctggtagccagccc

SEQ ID NO: 3439946 - DNA, 25 bp, Homo sapien
agtgcttgtctggtagccagccctg

SEQ ID NO: 3439947 - DNA, 25 bp, Homo sapien
cagtgcttgtctggtagccagccct

SEQ ID NO: 3439948 - DNA, 25 bp, Homo sapien
tgcttgtctggtagccagccctgca

SEQ ID NO: 3439949 - DNA, 25 bp, Homo sapien
tgaacatggttggtaaatgatctgg

SEQ ID NO: 3439950 - DNA, 25 bp, Homo sapien
gaacatggttggtaaatgatctggc

SEQ ID NO: 3439951 - DNA, 25 bp, Homo sapien
ctgaacatggttggtaaatgatctg

SEQ ID NO: 3439952 - DNA, 25 bp, Homo sapien
tctgtgatttcacccggctcccggg

SEQ ID NO: 3439953 - DNA, 25 bp, Homo sapien
tgctggagtctgtgatttcacccgg

SEQ ID NO: 3439954 - DNA, 25 bp, Homo sapien
tggagtctgtgatttcacccggctc

SEQ ID NO: 3439955 - DNA, 25 bp, Homo sapien
tcccggggggatgctgcatcaatca

SEQ ID NO: 3439956 - DNA, 25 bp, Homo sapien
caatatagatgtatgttcctgggaa

SEQ ID NO: 3439957 - DNA, 25 bp, Homo sapien
caatgaactggtggataacttctgg

SEQ ID NO: 3439958 - DNA, 25 bp, Homo sapien
gagctacgacttgctcattccctgg

SEQ ID NO: 3439959 - DNA, 25 bp, Homo sapien
gagtctgggacatttgagctacgac

SEQ ID NO: 3439960 - DNA, 25 bp, Homo sapien
caaacaggaaacagctcaaatgtcc

SEQ ID NO: 3439961 - DNA, 25 bp, Homo sapien
tcaaacaggaaacagctcaaatgtc

SEQ ID NO: 3439962 - DNA, 25 bp, Homo sapien
aagggttgctctgtcgcctccgtgt

SEQ ID NO: 3439963 - DNA, 25 bp, Homo sapien
tgctctgtcgcctccgtgtggcagc

SEQ ID NO: 3439964 - DNA, 25 bp, Homo sapien
catccacgttgctgatgggagaacg

SEQ ID NO: 3439965 - DNA, 25 bp, Homo sapien
cgttgctgatgggagaacgtccaga

SEQ ID NO: 3439966 - DNA, 25 bp, Homo sapien
atggaggcaccaatactcagtcttg

SEQ ID NO: 3439967 - DNA, 25 bp, Homo sapien
ctgtgtgcagagctttgtgttcccc

SEQ ID NO: 3439968 - DNA, 25 bp, Homo sapien
cctctgattacagcccagcctgggt

SEQ ID NO: 3439969 - DNA, 25 bp, Homo sapien
ttccagttccctcctctgattacag

SEQ ID NO: 3439970 - DNA, 25 bp, Homo sapien
tgagcatctcagcatctgccaggag

SEQ ID NO: 3439971 - DNA, 25 bp, Homo sapien
ctctcaacaacttgactggaacttg

SEQ ID NO: 3439972 - DNA, 25 bp, Homo sapien
tcaacaacttgactggaacttgggc

SEQ ID NO: 3439973 - DNA, 25 bp, Homo sapien
ggaacttgggccttcatgacagcag

SEQ ID NO: 3439974 - DNA, 25 bp, Homo sapien
acaacttgactggaacttgggcctt

SEQ ID NO: 3439975 - DNA, 25 bp, Homo sapien
caaatcaagaagttcatggataagg

SEQ ID NO: 3439976 - DNA, 25 bp, Homo sapien
tcaagaagttcatggataagggacc

SEQ ID NO: 3439977 - DNA, 25 bp, Homo sapien
ccaacaaatcaagaagttcatggat

SEQ ID NO: 3439978 - DNA, 25 bp, Homo sapien
cttccaacaaatcaagaagttcatg

SEQ ID NO: 3439979 - DNA, 25 bp, Homo sapien
gacatccttatagacaccaatatct

SEQ ID NO: 3439980 - DNA, 25 bp, Homo sapien
ctctttttgataggcccctgacttg

SEQ ID NO: 3439981 - DNA, 25 bp, Homo sapien
acttggggacatccttatagacacc

SEQ ID NO: 3439982 - DNA, 25 bp, Homo sapien
ctgcctctttttgataggcccctga

SEQ ID NO: 3439983 - DNA, 25 bp, Homo sapien
tgtttcttcctaggatagcacagtg

SEQ ID NO: 3439984 - DNA, 25 bp, Homo sapien
gggatttagctgtttcttcctagga

SEQ ID NO: 3439985 - DNA, 25 bp, Homo sapien
ttcctaggatagcacagtgctgggt

SEQ ID NO: 3439986 - DNA, 25 bp, Homo sapien
tagctgtttcttcctaggatagcac

SEQ ID NO: 3439987 - DNA, 25 bp, Homo sapien
gacagtcctgattcacacaggtaac

SEQ ID NO: 3439988 - DNA, 25 bp, Homo sapien
gactcttcaagcaagacgtcatgcg

SEQ ID NO: 3439989 - DNA, 25 bp, Homo sapien
tctgacgctagaaataacacctctt

SEQ ID NO: 3439990 - DNA, 25 bp, Homo sapien
gccctagaatcacttatttgtctga

SEQ ID NO: 3439991 - DNA, 25 bp, Homo sapien
ggcagcgccacaccgtttcttgaga

SEQ ID NO: 3439992 - DNA, 25 bp, Homo sapien
gcaatgggaactcaccttaacctgg

SEQ ID NO: 3439993 - DNA, 25 bp, Homo sapien
gacacagctgtacattggactctag

SEQ ID NO: 3439994 - DNA, 25 bp, Homo sapien
ttcttgagagcaggttccgaaaccc

SEQ ID NO: 3439995 - DNA, 25 bp, Homo sapien
cctgccggtgctgtgagatcttctc

SEQ ID NO: 3439996 - DNA, 25 bp, Homo sapien
ccattggacagccagtgtagacaca

SEQ ID NO: 3439997 - DNA, 25 bp, Homo sapien
ataaagccaggctaaggactgcccc

SEQ ID NO: 3439998 - DNA, 25 bp, Homo sapien
cttgatcaggcggaaataaagccag

SEQ ID NO: 3439999 - DNA, 25 bp, Homo sapien
gacccacgtgcctgggagcccggct

SEQ ID NO: 3440000 - DNA, 25 bp, Homo sapien
ctcgccactgcgctgcgcttctcct

SEQ ID NO: 3440001 - DNA, 25 bp, Homo sapien
cgccgctcccgggtgccagtgcccg

SEQ ID NO: 3440002 - DNA, 25 bp, Homo sapien
tctcctctcagggtgccgtcgccgc

SEQ ID NO: 3440003 - DNA, 25 bp, Homo sapien
cccgtggagacaaagttcaaccacg

SEQ ID NO: 3440004 - DNA, 25 bp, Homo sapien
ttatgcgctacacgccggctcgcaa

SEQ ID NO: 3440005 - DNA, 25 bp, Homo sapien
caggcgcgttcaagccgtccagtta

SEQ ID NO: 3440006 - DNA, 25 bp, Homo sapien
gagacaaagttcaaccacggaccca

SEQ ID NO: 3440007 - DNA, 25 bp, Homo sapien
cctggcagggcaggaactggtcatt

SEQ ID NO: 3440008 - DNA, 25 bp, Homo sapien
ttgttctggcctccttttagagcct

SEQ ID NO: 3440009 - DNA, 25 bp, Homo sapien
gcagggcaggaactggtcattcaac

SEQ ID NO: 3440010 - DNA, 25 bp, Homo sapien
gggcaggaactggtcattcaaccag

SEQ ID NO: 3440011 - DNA, 25 bp, Homo sapien
caggaagccaggtcgacacccagag

SEQ ID NO: 3440012 - DNA, 25 bp, Homo sapien
gttctcgcagtctaattccaagagg

SEQ ID NO: 3440013 - DNA, 25 bp, Homo sapien
tcgttgctcctgatagcctttggtt

SEQ ID NO: 3440014 - DNA, 25 bp, Homo sapien
caattctattactcgttgctcctga

SEQ ID NO: 3440015 - DNA, 25 bp, Homo sapien
ctctggttccgggtgtgaaggctgt

SEQ ID NO: 3440016 - DNA, 25 bp, Homo sapien
gcagggaactctgcgggaaacagga

SEQ ID NO: 3440017 - DNA, 25 bp, Homo sapien
gctgcagggaactctgcgggaaaca

SEQ ID NO: 3440018 - DNA, 25 bp, Homo sapien
gggctgcagggaactctgcgggaaa

SEQ ID NO: 3440019 - DNA, 25 bp, Homo sapien
ctgcagggaactctgcgggaaacag

SEQ ID NO: 3440020 - DNA, 25 bp, Homo sapien
atgctcagcgcctgcacgggttcct

SEQ ID NO: 3440021 - DNA, 25 bp, Homo sapien
tcaggatgctcagcgcctgcacggg

SEQ ID NO: 3440022 - DNA, 25 bp, Homo sapien
caggtcaggatgctcagcgcctgca

SEQ ID NO: 3440023 - DNA, 25 bp, Homo sapien
gatgctcagcgcctgcacgggttcc

SEQ ID NO: 3440024 - DNA, 25 bp, Homo sapien
ttctcagccagttggtaatttgtcc

SEQ ID NO: 3440025 - DNA, 25 bp, Homo sapien
ccctcaggacgtttctcagccagtt

SEQ ID NO: 3440026 - DNA, 25 bp, Homo sapien
cctcaggacgtttctcagccagttg

SEQ ID NO: 3440027 - DNA, 25 bp, Homo sapien
tctcagccagttggtaatttgtcct

SEQ ID NO: 3440028 - DNA, 25 bp, Homo sapien
ggagcgcccctaggggacctgacac

SEQ ID NO: 3440029 - DNA, 25 bp, Homo sapien
ggctttcattgccatctgacttgga

SEQ ID NO: 3440030 - DNA, 25 bp, Homo sapien
agggctttcattgccatctgacttg

SEQ ID NO: 3440031 - DNA, 25 bp, Homo sapien
atcagggttgtggccggagcgcccc

SEQ ID NO: 3440032 - DNA, 25 bp, Homo sapien
gagccatgagcacgtaacagacaag

SEQ ID NO: 3440033 - DNA, 25 bp, Homo sapien
tacttgaagtcctcgttgaagcggc

SEQ ID NO: 3440034 - DNA, 25 bp, Homo sapien
tcgccgcgggcgtagtaatagacca

SEQ ID NO: 3440035 - DNA, 25 bp, Homo sapien
ttagtgttctcgctaccagccggcg

SEQ ID NO: 3440036 - DNA, 25 bp, Homo sapien
gatatgagactactcctgagacagc

SEQ ID NO: 3440037 - DNA, 25 bp, Homo sapien
aaatctcaaggactgggactgcacc

SEQ ID NO: 3440038 - DNA, 25 bp, Homo sapien
tggcgtctgcacaagtcctggtcct

SEQ ID NO: 3440039 - DNA, 25 bp, Homo sapien
ttatacacacaaacgatgactaggg

SEQ ID NO: 3440040 - DNA, 25 bp, Homo sapien
tgtgcgtaataacgtagggaagccc

SEQ ID NO: 3440041 - DNA, 25 bp, Homo sapien
gagggtgcgagctctctagcctgaa

SEQ ID NO: 3440042 - DNA, 25 bp, Homo sapien
ccccagtcagggagaaatggctacc

SEQ ID NO: 3440043 - DNA, 25 bp, Homo sapien
tccctggagacgtatggcccactgt

SEQ ID NO: 3440044 - DNA, 25 bp, Homo sapien
tccaaggtcagagcatgagctgcac

SEQ ID NO: 3440045 - DNA, 25 bp, Homo sapien
ctgagactgacacctgagctggagc

SEQ ID NO: 3440046 - DNA, 25 bp, Homo sapien
tgcccatcccaggaagctcagtggt

SEQ ID NO: 3440047 - DNA, 25 bp, Homo sapien
ggcagagccaagtcctatcgaagat

SEQ ID NO: 3440048 - DNA, 25 bp, Homo sapien
cattgtctctgtctagtaaaccggg

SEQ ID NO: 3440049 - DNA, 25 bp, Homo sapien
tgagttcagtcacagtcagcgtggg

SEQ ID NO: 3440050 - DNA, 25 bp, Homo sapien
gaaaatcacacgtcactgagcaggg

SEQ ID NO: 3440051 - DNA, 25 bp, Homo sapien
acagtttaattccacgccagagagg

SEQ ID NO: 3440052 - DNA, 25 bp, Homo sapien
acacacagagacagcacacactgtg

SEQ ID NO: 3440053 - DNA, 25 bp, Homo sapien
cacacacagagacagcacacactgt

SEQ ID NO: 3440054 - DNA, 25 bp, Homo sapien
acacacacagagacagcacacactg

SEQ ID NO: 3440055 - DNA, 25 bp, Homo sapien
tgtgaagagtggtcttccacaggaa

SEQ ID NO: 3440056 - DNA, 25 bp, Homo sapien
tccacggctgccctaggcagatgtg

SEQ ID NO: 3440057 - DNA, 25 bp, Homo sapien
tttggaaagagcatggttacaccct

SEQ ID NO: 3440058 - DNA, 25 bp, Homo sapien
gaaaagggattgctcagcagggaat

SEQ ID NO: 3440059 - DNA, 25 bp, Homo sapien
cacacaaggaccccgaactcaggcc

SEQ ID NO: 3440060 - DNA, 25 bp, Homo sapien
tgcttctggatccacacaaggaccc

SEQ ID NO: 3440061 - DNA, 25 bp, Homo sapien
atccacacaaggaccccgaactcag

SEQ ID NO: 3440062 - DNA, 25 bp, Homo sapien
cacaaggaccccgaactcaggcctc

SEQ ID NO: 3440063 - DNA, 25 bp, Homo sapien
ttatgtggagtaaaagcttgtgggt

SEQ ID NO: 3440064 - DNA, 25 bp, Homo sapien
tgagaaaacaggtacccaaggtcgc

SEQ ID NO: 3440065 - DNA, 25 bp, Homo sapien
gattcaaacgcaagtccctctgact

SEQ ID NO: 3440066 - DNA, 25 bp, Homo sapien
caaggtcgcctgattgatgagtggc

SEQ ID NO: 3440067 - DNA, 25 bp, Homo sapien
taaacacaacgttagtagtgctgac

SEQ ID NO: 3440068 - DNA, 25 bp, Homo sapien
tacagaacagacctacacgtttgct

SEQ ID NO: 3440069 - DNA, 25 bp, Homo sapien
gataagctaccaacctacagaacag

SEQ ID NO: 3440070 - DNA, 25 bp, Homo sapien
catttcaaatgttcagtaggcactt

SEQ ID NO: 3440071 - DNA, 25 bp, Homo sapien
gatgtttttctttgatacaaaagtc

SEQ ID NO: 3440072 - DNA, 25 bp, Homo sapien
tttttctttgatacaaaagtcatga

SEQ ID NO: 3440073 - DNA, 25 bp, Homo sapien
aagatgtttttctttgatacaaaag

SEQ ID NO: 3440074 - DNA, 25 bp, Homo sapien
ctgacatagaagatgtttttctttg

SEQ ID NO: 3440075 - DNA, 25 bp, Homo sapien
gcaattcgcagactgggcttctggc

SEQ ID NO: 3440076 - DNA, 25 bp, Homo sapien
tgccacagggaggtcccacccaaaa

SEQ ID NO: 3440077 - DNA, 25 bp, Homo sapien
tgtcatcggttaaaggctgatcctc

SEQ ID NO: 3440078 - DNA, 25 bp, Homo sapien
acccgtgggagactgcgcagaacct

SEQ ID NO: 3440079 - DNA, 25 bp, Homo sapien
tcatttatttcagaggtgatccagg

SEQ ID NO: 3440080 - DNA, 25 bp, Homo sapien
ttggtagagataggcttttgccgtg

SEQ ID NO: 3440081 - DNA, 25 bp, Homo sapien
gctttttaaggaggtagaatcagca

SEQ ID NO: 3440082 - DNA, 25 bp, Homo sapien
ctggccttgagggctttttaaggag

SEQ ID NO: 3440083 - DNA, 25 bp, Homo sapien
cggcttcccagagtggtagcattac

SEQ ID NO: 3440084 - DNA, 25 bp, Homo sapien
ctaggaggcgaacccgtcaaatgag

SEQ ID NO: 3440085 - DNA, 25 bp, Homo sapien
caaatgaggggaccgtgtagacggc

SEQ ID NO: 3440086 - DNA, 25 bp, Homo sapien
ggaccgtgtagacggcggcagcagc

SEQ ID NO: 3440087 - DNA, 25 bp, Homo sapien
cccgtcaaatgaggggaccgtgtag

SEQ ID NO: 3440088 - DNA, 25 bp, Homo sapien
cagctggtccggcccagatgtcact

SEQ ID NO: 3440089 - DNA, 25 bp, Homo sapien
caccagctggtccggcccagatgtc

SEQ ID NO: 3440090 - DNA, 25 bp, Homo sapien
ccagctggtccggcccagatgtcac

SEQ ID NO: 3440091 - DNA, 25 bp, Homo sapien
accagctggtccggcccagatgtca

SEQ ID NO: 3440092 - DNA, 25 bp, Homo sapien
aatgcaaaatccacaggaattttgg

SEQ ID NO: 3440093 - DNA, 25 bp, Homo sapien
caactcattggatggtaatttatca

SEQ ID NO: 3440094 - DNA, 25 bp, Homo sapien
aagacttgagccaactcattggatg

SEQ ID NO: 3440095 - DNA, 25 bp, Homo sapien
gcctgggacctgtcatactttctcc

SEQ ID NO: 3440096 - DNA, 25 bp, Homo sapien
aactcatctgaaaaccagcccctca

SEQ ID NO: 3440097 - DNA, 25 bp, Homo sapien
ccttgatccttgatgggaaataagc

SEQ ID NO: 3440098 - DNA, 25 bp, Homo sapien
cagttcttccgaaaagacaaagcca

SEQ ID NO: 3440099 - DNA, 25 bp, Homo sapien
ctatccagatgacaggcaagcagaa

SEQ ID NO: 3440100 - DNA, 25 bp, Homo sapien
gaggaagtaacttgccacagcacag

SEQ ID NO: 3440101 - DNA, 25 bp, Homo sapien
tgctgccgcaggaaaccattaacct

SEQ ID NO: 3440102 - DNA, 25 bp, Homo sapien
tctcagcagtgcctggaaggtccgt

SEQ ID NO: 3440103 - DNA, 25 bp, Homo sapien
tgagaccccgagattaatggctctg

SEQ ID NO: 3440104 - DNA, 25 bp, Homo sapien
ctggagaggcagcagatgaggaaac

SEQ ID NO: 3440105 - DNA, 25 bp, Homo sapien
gcagcagatgaggaaaccgagagac

SEQ ID NO: 3440106 - DNA, 25 bp, Homo sapien
gaggcagcagatgaggaaaccgaga

SEQ ID NO: 3440107 - DNA, 25 bp, Homo sapien
tggagaggcagcagatgaggaaacc

SEQ ID NO: 3440108 - DNA, 25 bp, Homo sapien
gtcgcgtgcaatgttctggcagaag

SEQ ID NO: 3440109 - DNA, 25 bp, Homo sapien
tctgtgcctgaaactgtcgcgtgca

SEQ ID NO: 3440110 - DNA, 25 bp, Homo sapien
aagtgcctcgcttgcagtccgtgaa

SEQ ID NO: 3440111 - DNA, 25 bp, Homo sapien
gcaaattcccactcgtggagcagcc

SEQ ID NO: 3440112 - DNA, 25 bp, Homo sapien
tcccaaatatcttcaagaggccggg

SEQ ID NO: 3440113 - DNA, 25 bp, Homo sapien
agatgagagtcccaaatatcttcaa

SEQ ID NO: 3440114 - DNA, 25 bp, Homo sapien
gagagtcccaaatatcttcaagagg

SEQ ID NO: 3440115 - DNA, 25 bp, Homo sapien
gaggccggggctgaacgcatgggct

SEQ ID NO: 3440116 - DNA, 25 bp, Homo sapien
tctctttcagctcaattttgacgga

SEQ ID NO: 3440117 - DNA, 25 bp, Homo sapien
ggaatgatttattcacgttatttca

SEQ ID NO: 3440118 - DNA, 25 bp, Homo sapien
gacagaccttgctattattgcttaa

SEQ ID NO: 3440119 - DNA, 25 bp, Homo sapien
cttgacacattgtagttgctcagtc

SEQ ID NO: 3440120 - DNA, 25 bp, Homo sapien
tacgccatctccgtagaccaaatga

SEQ ID NO: 3440121 - DNA, 25 bp, Homo sapien
gaccaaatgactgcgtcttgctcag

SEQ ID NO: 3440122 - DNA, 25 bp, Homo sapien
atgactgcgtcttgctcagaccctg

SEQ ID NO: 3440123 - DNA, 25 bp, Homo sapien
tggagctattaatgacagggccagc

SEQ ID NO: 3440124 - DNA, 25 bp, Homo sapien
ggtttataggaatcttgccctggac

SEQ ID NO: 3440125 - DNA, 25 bp, Homo sapien
gaggaccaacattcatctcaagctt

SEQ ID NO: 3440126 - DNA, 25 bp, Homo sapien
ccctggacctaagcccctgaagagt

SEQ ID NO: 3440127 - DNA, 25 bp, Homo sapien
tatgatgcagtgatgcagtgggcca

SEQ ID NO: 3440128 - DNA, 25 bp, Homo sapien
ctggtggaaaaactgaggtcccact

SEQ ID NO: 3440129 - DNA, 25 bp, Homo sapien
gtggaaaaactgaggtcccacttca

SEQ ID NO: 3440130 - DNA, 25 bp, Homo sapien
ctgccagacccatgcaggccctcct

SEQ ID NO: 3440131 - DNA, 25 bp, Homo sapien
ggatgacttgctccaactgccagac

SEQ ID NO: 3440132 - DNA, 25 bp, Homo sapien
gaaggatgacttgctccaactgcca

SEQ ID NO: 3440133 - DNA, 25 bp, Homo sapien
gatgacttgctccaactgccagacc

SEQ ID NO: 3440134 - DNA, 25 bp, Homo sapien
gtcatcaagcctgatgctccagcca

SEQ ID NO: 3440135 - DNA, 25 bp, Homo sapien
gcctgatgctccagccaggggcagc

SEQ ID NO: 3440136 - DNA, 25 bp, Homo sapien
tcatcaagcctgatgctccagccag

SEQ ID NO: 3440137 - DNA, 25 bp, Homo sapien
taacaagccctgacagccagagtag

SEQ ID NO: 3440138 - DNA, 25 bp, Homo sapien
ctaacaagccctgacagccagagta

SEQ ID NO: 3440139 - DNA, 25 bp, Homo sapien
caagccctgacagccagagtagtgg

SEQ ID NO: 3440140 - DNA, 25 bp, Homo sapien
ccctgacagccagagtagtggaaag

SEQ ID NO: 3440141 - DNA, 25 bp, Homo sapien
tgactggttgggatgatacctttgc

SEQ ID NO: 3440142 - DNA, 25 bp, Homo sapien
gacactggtttgagaaaacatcaat

SEQ ID NO: 3440143 - DNA, 25 bp, Homo sapien
ccaggacatctgtgtagcaggggat

SEQ ID NO: 3440144 - DNA, 25 bp, Homo sapien
tgggtggggatcagggccggcaggg

SEQ ID NO: 3440145 - DNA, 25 bp, Homo sapien
ctggtcgatgtggtcacaggagcca

SEQ ID NO: 3440146 - DNA, 25 bp, Homo sapien
cctggtcgatgtggtcacaggagcc

SEQ ID NO: 3440147 - DNA, 25 bp, Homo sapien
cagatgagctgaagctctcgttctc

SEQ ID NO: 3440148 - DNA, 25 bp, Homo sapien
ctccccagatgagctgaagctctcg

SEQ ID NO: 3440149 - DNA, 25 bp, Homo sapien
gagctgaagctctcgttctcaggtc

SEQ ID NO: 3440150 - DNA, 25 bp, Homo sapien
gctgaagctctcgttctcaggtcct

SEQ ID NO: 3440151 - DNA, 25 bp, Homo sapien
tttccccctctctctctctgactct

SEQ ID NO: 3440152 - DNA, 25 bp, Homo sapien
tctttccccctctctctctctgact

SEQ ID NO: 3440153 - DNA, 25 bp, Homo sapien
ctttccccctctctctctctgactc

SEQ ID NO: 3440154 - DNA, 25 bp, Homo sapien
ttctttccccctctctctctctgac

SEQ ID NO: 3440155 - DNA, 25 bp, Homo sapien
gccagctgagtgtggacctcctggt

SEQ ID NO: 3440156 - DNA, 25 bp, Homo sapien
aggtcacttctgccagctgagtgtg

SEQ ID NO: 3440157 - DNA, 25 bp, Homo sapien
acttctgccagctgagtgtggacct

SEQ ID NO: 3440158 - DNA, 25 bp, Homo sapien
tcacttctgccagctgagtgtggac

SEQ ID NO: 3440159 - DNA, 25 bp, Homo sapien
tatgtgtcaccagatcctcccacat

SEQ ID NO: 3440160 - DNA, 25 bp, Homo sapien
agcgactgccccttccacacggcag

SEQ ID NO: 3440161 - DNA, 25 bp, Homo sapien
ggcaggcgcagagcgcatgaggagt

SEQ ID NO: 3440162 - DNA, 25 bp, Homo sapien
gcgcatgaggagtgatggacgtggg

SEQ ID NO: 3440163 - DNA, 25 bp, Homo sapien
cactgaggaccgcacccatctcctc

SEQ ID NO: 3440164 - DNA, 25 bp, Homo sapien
aggggctcactgaggaccgcaccca

SEQ ID NO: 3440165 - DNA, 25 bp, Homo sapien
ggctcactgaggaccgcacccatct

SEQ ID NO: 3440166 - DNA, 25 bp, Homo sapien
actgaggaccgcacccatctcctca

SEQ ID NO: 3440167 - DNA, 25 bp, Homo sapien
cagggagcaggcatatagcaggtca

SEQ ID NO: 3440168 - DNA, 25 bp, Homo sapien
ccagagcaaggtttagggtgtacac

SEQ ID NO: 3440169 - DNA, 25 bp, Homo sapien
caaagggccagtgatcaccttgggc

SEQ ID NO: 3440170 - DNA, 25 bp, Homo sapien
gaagttctcgcggtagacacaggtg

SEQ ID NO: 3440171 - DNA, 25 bp, Homo sapien
gaagccgatgacagtgagagccatg

SEQ ID NO: 3440172 - DNA, 25 bp, Homo sapien
ccatagggcatatagtgggtggcca

SEQ ID NO: 3440173 - DNA, 25 bp, Homo sapien
catagcagacagtgcggttacgctg

SEQ ID NO: 3440174 - DNA, 25 bp, Homo sapien
ttctgtaggagctcatgtggtcgcc

SEQ ID NO: 3440175 - DNA, 25 bp, Homo sapien
taggactggttcttctagggcccca

SEQ ID NO: 3440176 - DNA, 25 bp, Homo sapien
tacttccagcagttgggagcccgta

SEQ ID NO: 3440177 - DNA, 25 bp, Homo sapien
cattggtgactcaaagcatggagca

SEQ ID NO: 3440178 - DNA, 25 bp, Homo sapien
gatcttaactccatgcccagctgag

SEQ ID NO: 3440179 - DNA, 25 bp, Homo sapien
ttgagacaggttctcgctccatcgc

SEQ ID NO: 3440180 - DNA, 25 bp, Homo sapien
ctggaatgcagtgatgtgatctcgg

SEQ ID NO: 3440181 - DNA, 25 bp, Homo sapien
acaggttctcgctccatcgcccagg

SEQ ID NO: 3440182 - DNA, 25 bp, Homo sapien
agacaggttctcgctccatcgccca

SEQ ID NO: 3440183 - DNA, 25 bp, Homo sapien
agcccctcagatcatttctaactct

SEQ ID NO: 3440184 - DNA, 25 bp, Homo sapien
cctcagatcatttctaactctgggt

SEQ ID NO: 3440185 - DNA, 25 bp, Homo sapien
ggttttgcacacatcacgcccatgc

SEQ ID NO: 3440186 - DNA, 25 bp, Homo sapien
ttctaactctgggttttgcacacat

SEQ ID NO: 3440187 - DNA, 25 bp, Homo sapien
ccgcagctcacccccttttctctgg

SEQ ID NO: 3440188 - DNA, 25 bp, Homo sapien
ttccgcagctcacccccttttctct

SEQ ID NO: 3440189 - DNA, 25 bp, Homo sapien
cttccgcagctcacccccttttctc

SEQ ID NO: 3440190 - DNA, 25 bp, Homo sapien
gcagctcacccccttttctctgggc

SEQ ID NO: 3440191 - DNA, 25 bp, Homo sapien
acactcaggtgcacgcagacgcaca

SEQ ID NO: 3440192 - DNA, 25 bp, Homo sapien
tcaggtgcacgcagacgcacactct

SEQ ID NO: 3440193 - DNA, 25 bp, Homo sapien
acacactgacactcaggtgcacgca

SEQ ID NO: 3440194 - DNA, 25 bp, Homo sapien
actgacactcaggtgcacgcagacg

SEQ ID NO: 3440195 - DNA, 25 bp, Homo sapien
gccgcaacgtctccatcccgggcgg

SEQ ID NO: 3440196 - DNA, 25 bp, Homo sapien
tttctgtggccaccggccgcaacgt

SEQ ID NO: 3440197 - DNA, 25 bp, Homo sapien
tctctgccgcggctcaagtttctgt

SEQ ID NO: 3440198 - DNA, 25 bp, Homo sapien
cacgccgaaagcagcgcacgggagt

SEQ ID NO: 3440199 - DNA, 25 bp, Homo sapien
cagccgcggccaaccccccctgcgc

SEQ ID NO: 3440200 - DNA, 25 bp, Homo sapien
gcagccgcggccaaccccccctgcg

SEQ ID NO: 3440201 - DNA, 25 bp, Homo sapien
ggcagccgcggccaaccccccctgc

SEQ ID NO: 3440202 - DNA, 25 bp, Homo sapien
gaatgtaaaccatccgctggacgct

SEQ ID NO: 3440203 - DNA, 25 bp, Homo sapien
gctccagcagcttgaacgagacgct

SEQ ID NO: 3440204 - DNA, 25 bp, Homo sapien
tcggtcgtcgtcactgcccgaggag

SEQ ID NO: 3440205 - DNA, 25 bp, Homo sapien
gaagagcttgcgcatctcggtgacg

SEQ ID NO: 3440206 - DNA, 25 bp, Homo sapien
cagaaacccctgctgagttcatgct

SEQ ID NO: 3440207 - DNA, 25 bp, Homo sapien
gcttagatttaacccatcactgtca

SEQ ID NO: 3440208 - DNA, 25 bp, Homo sapien
gacgcagggcggagagccactaccc

SEQ ID NO: 3440209 - DNA, 25 bp, Homo sapien
tgatccaatagggagcttccaggcc

SEQ ID NO: 3440210 - DNA, 25 bp, Homo sapien
gagtcagacataggccgaagtccct

SEQ ID NO: 3440211 - DNA, 25 bp, Homo sapien
tggccaggtacgagggaaagctcac

SEQ ID NO: 3440212 - DNA, 25 bp, Homo sapien
tggaataacggctgctaccgcggga

SEQ ID NO: 3440213 - DNA, 25 bp, Homo sapien
caggtcctttggcacgggttcgagc

SEQ ID NO: 3440214 - DNA, 25 bp, Homo sapien
gctgctctacaaggatgggctcgct

SEQ ID NO: 3440215 - DNA, 25 bp, Homo sapien
catgtactgcttggtgacgtcctcg

SEQ ID NO: 3440216 - DNA, 25 bp, Homo sapien
tgttgggcacccatgcgctggatct

SEQ ID NO: 3440217 - DNA, 25 bp, Homo sapien
gcagcatgggctcaacttctcggat

SEQ ID NO: 3440218 - DNA, 25 bp, Homo sapien
agccagaggcaagcagggcatgtcc

SEQ ID NO: 3440219 - DNA, 25 bp, Homo sapien
ggtaggctcatctgcaggccgagct

SEQ ID NO: 3440220 - DNA, 25 bp, Homo sapien
agcacttgctggcaggggtaggctc

SEQ ID NO: 3440221 - DNA, 25 bp, Homo sapien
acctgtggcttgctgcagcacttgc

SEQ ID NO: 3440222 - DNA, 25 bp, Homo sapien
tcacaggaaagccacacgaagaagg

SEQ ID NO: 3440223 - DNA, 25 bp, Homo sapien
ggcaaacccatgtcaactgtggccc

SEQ ID NO: 3440224 - DNA, 25 bp, Homo sapien
gccacacgaagaagggcaaacccat

SEQ ID NO: 3440225 - DNA, 25 bp, Homo sapien
ctgagccaaacatcctatcaagggt

SEQ ID NO: 3440226 - DNA, 25 bp, Homo sapien
cccaggaacacatctatattctgac

SEQ ID NO: 3440227 - DNA, 25 bp, Homo sapien
caggcccaggaacacatctatattc

SEQ ID NO: 3440228 - DNA, 25 bp, Homo sapien
ggcccaggaacacatctatattctg

SEQ ID NO: 3440229 - DNA, 25 bp, Homo sapien
ctccccaattctcccaggcccagga

SEQ ID NO: 3440230 - DNA, 25 bp, Homo sapien
actggagcctcaggcttgaaacaag

SEQ ID NO: 3440231 - DNA, 25 bp, Homo sapien
catgactggagcctcaggcttgaaa

SEQ ID NO: 3440232 - DNA, 25 bp, Homo sapien
ccacccacggcccagggagcatgac

SEQ ID NO: 3440233 - DNA, 25 bp, Homo sapien
attgtctcctcaacagaggccacca

SEQ ID NO: 3440234 - DNA, 25 bp, Homo sapien
gccccacttcacaggccgcttccag

SEQ ID NO: 3440235 - DNA, 25 bp, Homo sapien
cacaggccgcttccagtgaggggca

SEQ ID NO: 3440236 - DNA, 25 bp, Homo sapien
ttcacaggccgcttccagtgagggg

SEQ ID NO: 3440237 - DNA, 25 bp, Homo sapien
ccacttcacaggccgcttccagtga

SEQ ID NO: 3440238 - DNA, 25 bp, Homo sapien
ccgccccaggcaacgcccccgctgg

SEQ ID NO: 3440239 - DNA, 25 bp, Homo sapien
ctcggaaattcctcacccgccccag

SEQ ID NO: 3440240 - DNA, 25 bp, Homo sapien
cgccccaggcaacgcccccgctggc

SEQ ID NO: 3440241 - DNA, 25 bp, Homo sapien
ggaactgttggtttcagtgtgctcc

SEQ ID NO: 3440242 - DNA, 25 bp, Homo sapien
gggaactgttggtttcagtgtgctc

SEQ ID NO: 3440243 - DNA, 25 bp, Homo sapien
actgttggtttcagtgtgctcccct

SEQ ID NO: 3440244 - DNA, 25 bp, Homo sapien
ctgttggtttcagtgtgctcccctc

SEQ ID NO: 3440245 - DNA, 25 bp, Homo sapien
tactccaactttgctgtcatcaaag

SEQ ID NO: 3440246 - DNA, 25 bp, Homo sapien
atctggctgccccaatctactccaa

SEQ ID NO: 3440247 - DNA, 25 bp, Homo sapien
tcaggctcggtcctcactcctgata

SEQ ID NO: 3440248 - DNA, 25 bp, Homo sapien
ggtcctcactcctgatatctgtaca

SEQ ID NO: 3440249 - DNA, 25 bp, Homo sapien
acatctctccagatggataatgcct

SEQ ID NO: 3440250 - DNA, 25 bp, Homo sapien
tcacatctctccagatggataatgc

SEQ ID NO: 3440251 - DNA, 25 bp, Homo sapien
ccagatggataatgcctgtttatgt

SEQ ID NO: 3440252 - DNA, 25 bp, Homo sapien
gatggataatgcctgtttatgttac

SEQ ID NO: 3440253 - DNA, 25 bp, Homo sapien
gctctgatgcttctgtggggtgatt

SEQ ID NO: 3440254 - DNA, 25 bp, Homo sapien
ggctctgatgcttctgtggggtgat

SEQ ID NO: 3440255 - DNA, 25 bp, Homo sapien
acctccagaagaccacatctgtgcc

SEQ ID NO: 3440256 - DNA, 25 bp, Homo sapien
cagagaccactctccactgatggct

SEQ ID NO: 3440257 - DNA, 25 bp, Homo sapien
aaagcctggagggaaatataccaga

SEQ ID NO: 3440258 - DNA, 25 bp, Homo sapien
ccactgatggcttcccgacctccag

SEQ ID NO: 3440259 - DNA, 25 bp, Homo sapien
cattatggataatagcgggaagcag

SEQ ID NO: 3440260 - DNA, 25 bp, Homo sapien
tctcattatggataatagcgggaag

SEQ ID NO: 3440261 - DNA, 25 bp, Homo sapien
ttatggataatagcgggaagcagga

SEQ ID NO: 3440262 - DNA, 25 bp, Homo sapien
agtttctcattatggataatagcgg

SEQ ID NO: 3440263 - DNA, 25 bp, Homo sapien
tgcttcaggggaaagtattcaggga

SEQ ID NO: 3440264 - DNA, 25 bp, Homo sapien
actgctgcttcaggggaaagtattc

SEQ ID NO: 3440265 - DNA, 25 bp, Homo sapien
gctgcttcaggggaaagtattcagg

SEQ ID NO: 3440266 - DNA, 25 bp, Homo sapien
tcactgctgcttcaggggaaagtat

SEQ ID NO: 3440267 - DNA, 25 bp, Homo sapien
agagtgacagcagaacctatcctag

SEQ ID NO: 3440268 - DNA, 25 bp, Homo sapien
gcaggatcctcataacgtgctgctt

SEQ ID NO: 3440269 - DNA, 25 bp, Homo sapien
cataacgtgctgcttgaaagcccag

SEQ ID NO: 3440270 - DNA, 25 bp, Homo sapien
tcctagactcaatctggactgaggg

SEQ ID NO: 3440271 - DNA, 25 bp, Homo sapien
cacggagcacgggacacacacaggg

SEQ ID NO: 3440272 - DNA, 25 bp, Homo sapien
acccagcgccggcacacgctgaacg

SEQ ID NO: 3440273 - DNA, 25 bp, Homo sapien
ggcacacgctgaacgcagcttccca

SEQ ID NO: 3440274 - DNA, 25 bp, Homo sapien
agcttcccaccgaggagccacggag

SEQ ID NO: 3440275 - DNA, 25 bp, Homo sapien
gtggacaaaggcgccgacatgtact

SEQ ID NO: 3440276 - DNA, 25 bp, Homo sapien
ggcgccgacatgtactttccgtccg

SEQ ID NO: 3440277 - DNA, 25 bp, Homo sapien
aaggcgccgacatgtactttccgtc

SEQ ID NO: 3440278 - DNA, 25 bp, Homo sapien
gacaaaggcgccgacatgtactttc

SEQ ID NO: 3440279 - DNA, 25 bp, Homo sapien
ccgccccaggacacaagtcggcgca

SEQ ID NO: 3440280 - DNA, 25 bp, Homo sapien
ccccaggacacaagtcggcgcacac

SEQ ID NO: 3440281 - DNA, 25 bp, Homo sapien
gccccaggacacaagtcggcgcaca

SEQ ID NO: 3440282 - DNA, 25 bp, Homo sapien
cgccccaggacacaagtcggcgcac

SEQ ID NO: 3440283 - DNA, 25 bp, Homo sapien
tcagcgcggagtcaggggccgcctc

SEQ ID NO: 3440284 - DNA, 25 bp, Homo sapien
gcctcccactctcgctccctaaggg

SEQ ID NO: 3440285 - DNA, 25 bp, Homo sapien
cactctcgctccctaagggctcagc

SEQ ID NO: 3440286 - DNA, 25 bp, Homo sapien
ctcgctccctaagggctcagcccgg

SEQ ID NO: 3440287 - DNA, 25 bp, Homo sapien
gtcttccagcgcgatggtgaactgg

SEQ ID NO: 3440288 - DNA, 25 bp, Homo sapien
gcgcatgtcttccagcgcgatggtg

SEQ ID NO: 3440289 - DNA, 25 bp, Homo sapien
catatcgcgcatgtcttccagcgcg

SEQ ID NO: 3440290 - DNA, 25 bp, Homo sapien
gcggctgggcccatatcgcgcatgt

SEQ ID NO: 3440291 - DNA, 25 bp, Homo sapien
aaaacgcagccaggtcacgcagctg

SEQ ID NO: 3440292 - DNA, 25 bp, Homo sapien
agagacgccataaaggcaagccgcc

SEQ ID NO: 3440293 - DNA, 25 bp, Homo sapien
caaagactgaaaccctgacgggcac

SEQ ID NO: 3440294 - DNA, 25 bp, Homo sapien
gcaagccgccccacacagaaataaa

SEQ ID NO: 3440295 - DNA, 25 bp, Homo sapien
tccacatacgactgctctgtgtcca

SEQ ID NO: 3440296 - DNA, 25 bp, Homo sapien
gtgcgcagcgactccacatacgact

SEQ ID NO: 3440297 - DNA, 25 bp, Homo sapien
ctgcatcagggtgcgcagcgactcc

SEQ ID NO: 3440298 - DNA, 25 bp, Homo sapien
agggtcatggccacgtgcttccgca

SEQ ID NO: 3440299 - DNA, 25 bp, Homo sapien
tctctgccatagaccgtgagctcca

SEQ ID NO: 3440300 - DNA, 25 bp, Homo sapien
gaacactacctggagcgcagaaggg

SEQ ID NO: 3440301 - DNA, 25 bp, Homo sapien
aacctcatgcaagtggaatcagaca

SEQ ID NO: 3440302 - DNA, 25 bp, Homo sapien
tctgagtctgactaccccaggaacc

SEQ ID NO: 3440303 - DNA, 25 bp, Homo sapien
tttaagtcttcttgatgggagatag

SEQ ID NO: 3440304 - DNA, 25 bp, Homo sapien
tcttcttgatgggagataggtagat

SEQ ID NO: 3440305 - DNA, 25 bp, Homo sapien
gatgggagataggtagattagctac

SEQ ID NO: 3440306 - DNA, 25 bp, Homo sapien
cttgatgggagataggtagattagc

SEQ ID NO: 3440307 - DNA, 25 bp, Homo sapien
gaaggacccacagggtcggtgcaca

SEQ ID NO: 3440308 - DNA, 25 bp, Homo sapien
cccacagggtcggtgcacactccct

SEQ ID NO: 3440309 - DNA, 25 bp, Homo sapien
ggacccacagggtcggtgcacactc

SEQ ID NO: 3440310 - DNA, 25 bp, Homo sapien
cacagggtcggtgcacactccctca

SEQ ID NO: 3440311 - DNA, 25 bp, Homo sapien
ggatctggtcgaagatctcgtccac

SEQ ID NO: 3440312 - DNA, 25 bp, Homo sapien
gtctgcatgcagtgccgaacctgct

SEQ ID NO: 3440313 - DNA, 25 bp, Homo sapien
tccaggaattgctcgtggtgctcca

SEQ ID NO: 3440314 - DNA, 25 bp, Homo sapien
tctcgtccaccagtgaagggtcaca

SEQ ID NO: 3440315 - DNA, 25 bp, Homo sapien
gtaccaatgtctagccaagttctat

SEQ ID NO: 3440316 - DNA, 25 bp, Homo sapien
aacagagtcagtatccaggtgggat

SEQ ID NO: 3440317 - DNA, 25 bp, Homo sapien
ctggaaacagagtcagtatccaggt

SEQ ID NO: 3440318 - DNA, 25 bp, Homo sapien
gggtaagtaccaatgtctagccaag

SEQ ID NO: 3440319 - DNA, 25 bp, Homo sapien
tagggtccaggatcagagtcagtgt

SEQ ID NO: 3440320 - DNA, 25 bp, Homo sapien
cagggcagttattttggttccagta

SEQ ID NO: 3440321 - DNA, 25 bp, Homo sapien
ggtcaggactagagtcacgtcagtg

SEQ ID NO: 3440322 - DNA, 25 bp, Homo sapien
gagtccgtgccagagtctggccaag

SEQ ID NO: 3440323 - DNA, 25 bp, Homo sapien
gatgggctggagacatcagcactca

SEQ ID NO: 3440324 - DNA, 25 bp, Homo sapien
gggctgagcttactgacactgagag

SEQ ID NO: 3440325 - DNA, 25 bp, Homo sapien
gccgtagtccatggtcagcatcaag

SEQ ID NO: 3440326 - DNA, 25 bp, Homo sapien
tgtccctctaaggtgccaagtgccc

SEQ ID NO: 3440327 - DNA, 25 bp, Homo sapien
tgcattgaggaagttatcgatatag

SEQ ID NO: 3440328 - DNA, 25 bp, Homo sapien
gccacacgcacagcatcctttgcat

SEQ ID NO: 3440329 - DNA, 25 bp, Homo sapien
gatgtttactaggacatccttggag

SEQ ID NO: 3440330 - DNA, 25 bp, Homo sapien
gttatcgatataggcagaatagatg

SEQ ID NO: 3440331 - DNA, 25 bp, Homo sapien
ttcaccagaagctcgtagcgtggga

SEQ ID NO: 3440332 - DNA, 25 bp, Homo sapien
tctccttgttctcacgcatgctttg

SEQ ID NO: 3440333 - DNA, 25 bp, Homo sapien
cgctgcacaggcttgatcatgaggt

SEQ ID NO: 3440334 - DNA, 25 bp, Homo sapien
tcatgaggtcagacagcgcctgctt

SEQ ID NO: 3440335 - DNA, 25 bp, Homo sapien
cgggtggtcctcaggtgtatgcttc

SEQ ID NO: 3440336 - DNA, 25 bp, Homo sapien
tccatgccctcgatgtgagcctcta

SEQ ID NO: 3440337 - DNA, 25 bp, Homo sapien
ttgttgatgcgctcagccacctgct

SEQ ID NO: 3440338 - DNA, 25 bp, Homo sapien
ggcactccgcacacccttgttgatg

SEQ ID NO: 3440339 - DNA, 25 bp, Homo sapien
cactccatgggctaggccaatggaa

SEQ ID NO: 3440340 - DNA, 25 bp, Homo sapien
agagacagacgtggaagaacagaca

SEQ ID NO: 3440341 - DNA, 25 bp, Homo sapien
gacaggagggacaaggcatctcgaa

SEQ ID NO: 3440342 - DNA, 25 bp, Homo sapien
ccaaaaatcccagtgatccctcggc

SEQ ID NO: 3440343 - DNA, 25 bp, Homo sapien
tctcctgtctcaggaaccgccgcag

SEQ ID NO: 3440344 - DNA, 25 bp, Homo sapien
tcctgtctcaggaaccgccgcagag

SEQ ID NO: 3440345 - DNA, 25 bp, Homo sapien
catctcctgtctcaggaaccgccgc

SEQ ID NO: 3440346 - DNA, 25 bp, Homo sapien
ctgtctcaggaaccgccgcagaggg

SEQ ID NO: 3440347 - DNA, 25 bp, Homo sapien
gtgcagacgatgaggtccgtgaaca

SEQ ID NO: 3440348 - DNA, 25 bp, Homo sapien
ctgactttcgcttcagagtggtgca

SEQ ID NO: 3440349 - DNA, 25 bp, Homo sapien
cagggagcctgactttcgcttcaga

SEQ ID NO: 3440350 - DNA, 25 bp, Homo sapien
cagacgatgaggtccgtgaacagga

SEQ ID NO: 3440351 - DNA, 25 bp, Homo sapien
tcttgtacttgctggctgtgtcaat

SEQ ID NO: 3440352 - DNA, 25 bp, Homo sapien
gatgtctgcgtcttccagcggcagc

SEQ ID NO: 3440353 - DNA, 25 bp, Homo sapien
tgtcaatgacactggctgccgtgta

SEQ ID NO: 3440354 - DNA, 25 bp, Homo sapien
ctttgatgatgtctgcgtcttccag

SEQ ID NO: 3440355 - DNA, 25 bp, Homo sapien
ctctcagagagcttgctcatttggc

SEQ ID NO: 3440356 - DNA, 25 bp, Homo sapien
tgaggtcctcatcaaggcggctgat

SEQ ID NO: 3440357 - DNA, 25 bp, Homo sapien
ctcccgattggtggcttgggatgcc

SEQ ID NO: 3440358 - DNA, 25 bp, Homo sapien
tctggatgttctcccgattggtggc

SEQ ID NO: 3440359 - DNA, 25 bp, Homo sapien
tctggctccccagtgtcaggcagag

SEQ ID NO: 3440360 - DNA, 25 bp, Homo sapien
ctggctccccagtgtcaggcagagg

SEQ ID NO: 3440361 - DNA, 25 bp, Homo sapien
cctctggctccccagtgtcaggcag

SEQ ID NO: 3440362 - DNA, 25 bp, Homo sapien
ggctccccagtgtcaggcagagggc

SEQ ID NO: 3440363 - DNA, 25 bp, Homo sapien
tcatcgaaggcctgttcaaaaccaa

SEQ ID NO: 3440364 - DNA, 25 bp, Homo sapien
tgagaggtcccgcagtgcatcgtcc

SEQ ID NO: 3440365 - DNA, 25 bp, Homo sapien
ctcaaaaatgtaggagtcggtgccc

SEQ ID NO: 3440366 - DNA, 25 bp, Homo sapien
acaggtcccggtgcatggcagctga

SEQ ID NO: 3440367 - DNA, 25 bp, Homo sapien
actcagggtctagacagcttttgct

SEQ ID NO: 3440368 - DNA, 25 bp, Homo sapien
ggaactcagggtctagacagctttt

SEQ ID NO: 3440369 - DNA, 25 bp, Homo sapien
caggaactcagggtctagacagctt

SEQ ID NO: 3440370 - DNA, 25 bp, Homo sapien
gaactcagggtctagacagcttttg

SEQ ID NO: 3440371 - DNA, 25 bp, Homo sapien
ccgatgcagaggatgcgggcggaac

SEQ ID NO: 3440372 - DNA, 25 bp, Homo sapien
cagacccatacctcaggcgagggct

SEQ ID NO: 3440373 - DNA, 25 bp, Homo sapien
ctggcccacgtagccgtcgctgttg

SEQ ID NO: 3440374 - DNA, 25 bp, Homo sapien
ggaacagacggcgatgcaggcctcc

SEQ ID NO: 3440375 - DNA, 25 bp, Homo sapien
ggctgggcgaagactcatcgtcaga

SEQ ID NO: 3440376 - DNA, 25 bp, Homo sapien
gcccgagcctgcaatggagatgtga

SEQ ID NO: 3440377 - DNA, 25 bp, Homo sapien
tctggaggactcctcagcgacggag

SEQ ID NO: 3440378 - DNA, 25 bp, Homo sapien
gctccggtgccgtctctggaggact

SEQ ID NO: 3440379 - DNA, 25 bp, Homo sapien
ccagccacacggagctctggtaggc

SEQ ID NO: 3440380 - DNA, 25 bp, Homo sapien
tgccgtggcctccttggaactcggg

SEQ ID NO: 3440381 - DNA, 25 bp, Homo sapien
ctggtaggcctcagggtcgacactc

SEQ ID NO: 3440382 - DNA, 25 bp, Homo sapien
gtcgacactcagcaggtcctcaagg

SEQ ID NO: 3440383 - DNA, 25 bp, Homo sapien
ttcctgcggtcacggatgctgtcgg

SEQ ID NO: 3440384 - DNA, 25 bp, Homo sapien
tcacggatgctgtcggaggactggt

SEQ ID NO: 3440385 - DNA, 25 bp, Homo sapien
atgctgtcggaggactggtacacgt

SEQ ID NO: 3440386 - DNA, 25 bp, Homo sapien
tgttcctgcggtcacggatgctgtc

SEQ ID NO: 3440387 - DNA, 25 bp, Homo sapien
ttccctttggtagaccacaagctct

SEQ ID NO: 3440388 - DNA, 25 bp, Homo sapien
gacacaaacacctggttattcagat

SEQ ID NO: 3440389 - DNA, 25 bp, Homo sapien
tagaccacaagctctccattggcca

SEQ ID NO: 3440390 - DNA, 25 bp, Homo sapien
cacaaacacctggttattcagatac

SEQ ID NO: 3440391 - DNA, 25 bp, Homo sapien
tcagggctcaggacaaggactcggt

SEQ ID NO: 3440392 - DNA, 25 bp, Homo sapien
acaaggactcggttctggcagccac

SEQ ID NO: 3440393 - DNA, 25 bp, Homo sapien
gatttgaagttctgggggtcccaga

SEQ ID NO: 3440394 - DNA, 25 bp, Homo sapien
ccacagataccatcttggtgatggg

SEQ ID NO: 3440395 - DNA, 25 bp, Homo sapien
atctccctgtcacacggacctagct

SEQ ID NO: 3440396 - DNA, 25 bp, Homo sapien
gtcacacggacctagctcatcccat

SEQ ID NO: 3440397 - DNA, 25 bp, Homo sapien
acggacctagctcatcccatggcac

SEQ ID NO: 3440398 - DNA, 25 bp, Homo sapien
agctcatcccatggcaccaattcca

SEQ ID NO: 3440399 - DNA, 25 bp, Homo sapien
aaggccctagccctctgctggatgc

SEQ ID NO: 3440400 - DNA, 25 bp, Homo sapien
aggaaggccctagccctctgctgga

SEQ ID NO: 3440401 - DNA, 25 bp, Homo sapien
ggtcagaggaaggccctagccctct

SEQ ID NO: 3440402 - DNA, 25 bp, Homo sapien
aatgaggatcgaaggaggacaggga

SEQ ID NO: 3440403 - DNA, 25 bp, Homo sapien
gttgcccctggatacttctgacatg

SEQ ID NO: 3440404 - DNA, 25 bp, Homo sapien
gccagagtctaatgctaatggatgt

SEQ ID NO: 3440405 - DNA, 25 bp, Homo sapien
tgaagcctagaagggaaaggtcaca

SEQ ID NO: 3440406 - DNA, 25 bp, Homo sapien
gaccctaaaacctgagttgagagat

SEQ ID NO: 3440407 - DNA, 25 bp, Homo sapien
gcgttggtccttggtctgattaacc

SEQ ID NO: 3440408 - DNA, 25 bp, Homo sapien
aagatgggtcattggcaggcctgcc

SEQ ID NO: 3440409 - DNA, 25 bp, Homo sapien
cctcacaactcacactagcgttggt

SEQ ID NO: 3440410 - DNA, 25 bp, Homo sapien
ccttggcccaccctagcctggagct

SEQ ID NO: 3440411 - DNA, 25 bp, Homo sapien
gaatcctgacccacgtaaaacatgt

SEQ ID NO: 3440412 - DNA, 25 bp, Homo sapien
tgcacgggaggagtgacgtctactt

SEQ ID NO: 3440413 - DNA, 25 bp, Homo sapien
tctgccagctgctcaaaggtgtctg

SEQ ID NO: 3440414 - DNA, 25 bp, Homo sapien
tagagacacacgtgggcactacctt

SEQ ID NO: 3440415 - DNA, 25 bp, Homo sapien
tgtgctgccggatgatggcatccga

SEQ ID NO: 3440416 - DNA, 25 bp, Homo sapien
tgctgccggatgatggcatccgagc

SEQ ID NO: 3440417 - DNA, 25 bp, Homo sapien
ttgtgctgccggatgatggcatccg

SEQ ID NO: 3440418 - DNA, 25 bp, Homo sapien
cttgtgctgccggatgatggcatcc

SEQ ID NO: 3440419 - DNA, 25 bp, Homo sapien
agcgctgtgattcgcagacaggcag

SEQ ID NO: 3440420 - DNA, 25 bp, Homo sapien
cagtaccgggcgaagtgggcatggt

SEQ ID NO: 3440421 - DNA, 25 bp, Homo sapien
tggactgcagccaagaagcggacgt

SEQ ID NO: 3440422 - DNA, 25 bp, Homo sapien
gtgcccgtgggcagctgacagtacc

SEQ ID NO: 3440423 - DNA, 25 bp, Homo sapien
cccactgctgagtcggaagtcctca

SEQ ID NO: 3440424 - DNA, 25 bp, Homo sapien
accagcattttaggcctggcagggg

SEQ ID NO: 3440425 - DNA, 25 bp, Homo sapien
tgccaaggggagtcccggtgctcca

SEQ ID NO: 3440426 - DNA, 25 bp, Homo sapien
tcacctccactgataaccagcattt

SEQ ID NO: 3440427 - DNA, 25 bp, Homo sapien
gtgctgtcgtctcgacccacagtct

SEQ ID NO: 3440428 - DNA, 25 bp, Homo sapien
ctgtcgtctcgacccacagtctcac

SEQ ID NO: 3440429 - DNA, 25 bp, Homo sapien
tttgtgctgtcgtctcgacccacag

SEQ ID NO: 3440430 - DNA, 25 bp, Homo sapien
tgtgctgtcgtctcgacccacagtc

SEQ ID NO: 3440431 - DNA, 25 bp, Homo sapien
aggcaggtgggcgggcgagtcctgg

SEQ ID NO: 3440432 - DNA, 25 bp, Homo sapien
cgggcgagtcctgggccacggcaga

SEQ ID NO: 3440433 - DNA, 25 bp, Homo sapien
gcgggcgagtcctgggccacggcag

SEQ ID NO: 3440434 - DNA, 25 bp, Homo sapien
ctgaaggcaggtgggcgggcgagtc

SEQ ID NO: 3440435 - DNA, 25 bp, Homo sapien
cagagcccacgcaggcacatgtgtg

SEQ ID NO: 3440436 - DNA, 25 bp, Homo sapien
agagggtcgggagaagccatggcct

SEQ ID NO: 3440437 - DNA, 25 bp, Homo sapien
tgcttccgcgaagacaaggcagagc

SEQ ID NO: 3440438 - DNA, 25 bp, Homo sapien
gggtgttccatcaggaatgcttccg

SEQ ID NO: 3440439 - DNA, 25 bp, Homo sapien
cgactgtgaggagatcatgggccca

SEQ ID NO: 3440440 - DNA, 25 bp, Homo sapien
caaggtgaccatatgtgccagtgca

SEQ ID NO: 3440441 - DNA, 25 bp, Homo sapien
tatgtcaacgggcaatgtttagggc

SEQ ID NO: 3440442 - DNA, 25 bp, Homo sapien
tctcctacctgagagaaagccctgt

SEQ ID NO: 3440443 - DNA, 25 bp, Homo sapien
taacacagcaaatcgtggcaacctc

SEQ ID NO: 3440444 - DNA, 25 bp, Homo sapien
taaccctggttacaaagcactgaac

SEQ ID NO: 3440445 - DNA, 25 bp, Homo sapien
ccctgaggttgctgacaggaggcca

SEQ ID NO: 3440446 - DNA, 25 bp, Homo sapien
tcttcccaagtgtgtggacgtcgga

SEQ ID NO: 3440447 - DNA, 25 bp, Homo sapien
tcagaccagaaatcagacagacttg

SEQ ID NO: 3440448 - DNA, 25 bp, Homo sapien
tgatggccacctctagttctgcagg

SEQ ID NO: 3440449 - DNA, 25 bp, Homo sapien
gccccagtaaaatgatgctgcacgg

SEQ ID NO: 3440450 - DNA, 25 bp, Homo sapien
catttaggctggaaacgttcgtgcg

SEQ ID NO: 3440451 - DNA, 25 bp, Homo sapien
ctgggccgggaaggtgcgcagaccc

SEQ ID NO: 3440452 - DNA, 25 bp, Homo sapien
gctcggctccccgttcgactcggcg

SEQ ID NO: 3440453 - DNA, 25 bp, Homo sapien
gcgcgccttttgaatgaatcgccgg

SEQ ID NO: 3440454 - DNA, 25 bp, Homo sapien
cgcagcctgcgcgccttttgaatga

SEQ ID NO: 3440455 - DNA, 25 bp, Homo sapien
gagcgcccggacagccgcgcagcct

SEQ ID NO: 3440456 - DNA, 25 bp, Homo sapien
caggtcacggggctcggagactggc

SEQ ID NO: 3440457 - DNA, 25 bp, Homo sapien
ggtggccggtgcgcggaaggcgccg

SEQ ID NO: 3440458 - DNA, 25 bp, Homo sapien
gacaggacgcgaggcgggaggagtg

SEQ ID NO: 3440459 - DNA, 25 bp, Homo sapien
ggctcggagactggcggtggccggt

SEQ ID NO: 3440460 - DNA, 25 bp, Homo sapien
cggcccctcacaccgcaagttccgc

SEQ ID NO: 3440461 - DNA, 25 bp, Homo sapien
caccacgcagggccggcccggagtc

SEQ ID NO: 3440462 - DNA, 25 bp, Homo sapien
ccgccggcccctcacaccgcaagtt

SEQ ID NO: 3440463 - DNA, 25 bp, Homo sapien
agttccgctgcttccccgcgcgccc

SEQ ID NO: 3440464 - DNA, 25 bp, Homo sapien
gggtgccctcgtggggacagtcctg

SEQ ID NO: 3440465 - DNA, 25 bp, Homo sapien
gaggggtgccctcgtggggacagtc

SEQ ID NO: 3440466 - DNA, 25 bp, Homo sapien
tggctccccaacttcctcatcgccc

SEQ ID NO: 3440467 - DNA, 25 bp, Homo sapien
cctggctccccaacttcctcatcgc

SEQ ID NO: 3440468 - DNA, 25 bp, Homo sapien
cctcaggcccctggtggtcgccggc

SEQ ID NO: 3440469 - DNA, 25 bp, Homo sapien
gggccggcacagcagacttggcttc

SEQ ID NO: 3440470 - DNA, 25 bp, Homo sapien
gacaggggccggcacagcagacttg

SEQ ID NO: 3440471 - DNA, 25 bp, Homo sapien
cataaggaagcaggacaggggccgg

SEQ ID NO: 3440472 - DNA, 25 bp, Homo sapien
gccggcacagcagacttggcttcat

SEQ ID NO: 3440473 - DNA, 25 bp, Homo sapien
ggctgagggtgcggcttttctcctt

SEQ ID NO: 3440474 - DNA, 25 bp, Homo sapien
gcagggctgagggtgcggcttttct

SEQ ID NO: 3440475 - DNA, 25 bp, Homo sapien
cagggctgagggtgcggcttttctc

SEQ ID NO: 3440476 - DNA, 25 bp, Homo sapien
agggctgagggtgcggcttttctcc

SEQ ID NO: 3440477 - DNA, 25 bp, Homo sapien
gggcactgccaaagggttgttgatg

SEQ ID NO: 3440478 - DNA, 25 bp, Homo sapien
gtgggcactgccaaagggttgttga

SEQ ID NO: 3440479 - DNA, 25 bp, Homo sapien
tgggcactgccaaagggttgttgat

SEQ ID NO: 3440480 - DNA, 25 bp, Homo sapien
gggcagggcctgcataatgtgccct

SEQ ID NO: 3440481 - DNA, 25 bp, Homo sapien
ctcctccaaaggctgcaacgggcat

SEQ ID NO: 3440482 - DNA, 25 bp, Homo sapien
ctccaaaggctgcaacgggcatggg

SEQ ID NO: 3440483 - DNA, 25 bp, Homo sapien
ggcagggcctgcataatgtgccctg

SEQ ID NO: 3440484 - DNA, 25 bp, Homo sapien
cacagagtgtatctcgagttgccat

SEQ ID NO: 3440485 - DNA, 25 bp, Homo sapien
tccacagagtgtatctcgagttgcc

SEQ ID NO: 3440486 - DNA, 25 bp, Homo sapien
agtctccacagagtgtatctcgagt

SEQ ID NO: 3440487 - DNA, 25 bp, Homo sapien
tctccacagagtgtatctcgagttg

SEQ ID NO: 3440488 - DNA, 25 bp, Homo sapien
catcacagccatgagtacccagagg

SEQ ID NO: 3440489 - DNA, 25 bp, Homo sapien
tcacagccatgagtacccagaggtg

SEQ ID NO: 3440490 - DNA, 25 bp, Homo sapien
tggttgacatggaacgcggggaacc

SEQ ID NO: 3440491 - DNA, 25 bp, Homo sapien
ggaacatggttgacatggaacgcgg

SEQ ID NO: 3440492 - DNA, 25 bp, Homo sapien
tctggccatcgaagcattgtcctga

SEQ ID NO: 3440493 - DNA, 25 bp, Homo sapien
ggctgcaggagagccaatgtgccca

SEQ ID NO: 3440494 - DNA, 25 bp, Homo sapien
ctgagcatcacagacgatggaggca

SEQ ID NO: 3440495 - DNA, 25 bp, Homo sapien
gacaaaagcagagtgacacaaacac

SEQ ID NO: 3440496 - DNA, 25 bp, Homo sapien
gctgccacctccacgccacgtcggg

SEQ ID NO: 3440497 - DNA, 25 bp, Homo sapien
ccaggctgccgtgtctcaccaccgc

SEQ ID NO: 3440498 - DNA, 25 bp, Homo sapien
gccgtgtctcaccaccgctgctggc

SEQ ID NO: 3440499 - DNA, 25 bp, Homo sapien
gccgttcccaggctgccgtgtctca

SEQ ID NO: 3440500 - DNA, 25 bp, Homo sapien
tgaccgcgtactgggcggctgtctc

SEQ ID NO: 3440501 - DNA, 25 bp, Homo sapien
gtgcgccgtgcagtggtagcccttc

SEQ ID NO: 3440502 - DNA, 25 bp, Homo sapien
cagaagacagggacgatggcgatga

SEQ ID NO: 3440503 - DNA, 25 bp, Homo sapien
tagcccttccgcttgaggaggttgc

SEQ ID NO: 3440504 - DNA, 25 bp, Homo sapien
aactgtggcctccaaagagtccaga

SEQ ID NO: 3440505 - DNA, 25 bp, Homo sapien
tgagaatgggccacgatgatcagcc

SEQ ID NO: 3440506 - DNA, 25 bp, Homo sapien
tgcatttaggtgacaagcctcccag

SEQ ID NO: 3440507 - DNA, 25 bp, Homo sapien
tcacccagggtaggatccactgaag

SEQ ID NO: 3440508 - DNA, 25 bp, Homo sapien
tggcatcctcagtccggtaggcagg

SEQ ID NO: 3440509 - DNA, 25 bp, Homo sapien
ttggcatcctcagtccggtaggcag

SEQ ID NO: 3440510 - DNA, 25 bp, Homo sapien
cattggcatcctcagtccggtaggc

SEQ ID NO: 3440511 - DNA, 25 bp, Homo sapien
ctcattggcatcctcagtccggtag

SEQ ID NO: 3440512 - DNA, 25 bp, Homo sapien
ttctctgtgatcaagcgcaccagga

SEQ ID NO: 3440513 - DNA, 25 bp, Homo sapien
tctgtgatcaagcgcaccaggaccc

SEQ ID NO: 3440514 - DNA, 25 bp, Homo sapien
tcttctctgtgatcaagcgcaccag

SEQ ID NO: 3440515 - DNA, 25 bp, Homo sapien
tctctgtgatcaagcgcaccaggac

SEQ ID NO: 3440516 - DNA, 25 bp, Homo sapien
actgtggccatatgggacacacctc

SEQ ID NO: 3440517 - DNA, 25 bp, Homo sapien
cccaccgcggctgcctcacaggctc

SEQ ID NO: 3440518 - DNA, 25 bp, Homo sapien
ctgcttgaggcaccctggcagggaa

SEQ ID NO: 3440519 - DNA, 25 bp, Homo sapien
tcccacttcatcaggcaagaatggg

SEQ ID NO: 3440520 - DNA, 25 bp, Homo sapien
tgtttgctgtggtactctttcagca

SEQ ID NO: 3440521 - DNA, 25 bp, Homo sapien
aggcaggctggttaatgtaggtttt

SEQ ID NO: 3440522 - DNA, 25 bp, Homo sapien
tgacttgagggagacccaagtggga

SEQ ID NO: 3440523 - DNA, 25 bp, Homo sapien
caggaggcaggctggttaatgtagg

SEQ ID NO: 3440524 - DNA, 25 bp, Homo sapien
agacccaagtgggagatccccagga

SEQ ID NO: 3440525 - DNA, 25 bp, Homo sapien
cgggcagatgtgtggcacgttcggg

SEQ ID NO: 3440526 - DNA, 25 bp, Homo sapien
aggggccagagagcgaggccaggcc

SEQ ID NO: 3440527 - DNA, 25 bp, Homo sapien
cggtgcgggcagatgtgtggcacgt

SEQ ID NO: 3440528 - DNA, 25 bp, Homo sapien
tcttctggctacagcgggagcagca

SEQ ID NO: 3440529 - DNA, 25 bp, Homo sapien
ggctgggaacaggagtagtggcggc

SEQ ID NO: 3440530 - DNA, 25 bp, Homo sapien
agtagtggcggctacagcctcaggg

SEQ ID NO: 3440531 - DNA, 25 bp, Homo sapien
gggaacaggagtagtggcggctaca

SEQ ID NO: 3440532 - DNA, 25 bp, Homo sapien
aacaggagtagtggcggctacagcc

SEQ ID NO: 3440533 - DNA, 25 bp, Homo sapien
atctcgccctgacgccctgccttgg

SEQ ID NO: 3440534 - DNA, 25 bp, Homo sapien
agatggtgatctcgccctgacgccc

SEQ ID NO: 3440535 - DNA, 25 bp, Homo sapien
agacaagatggtgatctcgccctga

SEQ ID NO: 3440536 - DNA, 25 bp, Homo sapien
caagatggtgatctcgccctgacgc

SEQ ID NO: 3440537 - DNA, 25 bp, Homo sapien
gcccctgctgcatctgtgcccatct

SEQ ID NO: 3440538 - DNA, 25 bp, Homo sapien
ccctgctgcatctgtgcccatctca

SEQ ID NO: 3440539 - DNA, 25 bp, Homo sapien
cctgctgcatctgtgcccatctcac

SEQ ID NO: 3440540 - DNA, 25 bp, Homo sapien
ctgcccctgctgcatctgtgcccat

SEQ ID NO: 3440541 - DNA, 25 bp, Homo sapien
cagagccttagcctgagaggcccgg

SEQ ID NO: 3440542 - DNA, 25 bp, Homo sapien
accggaaagtcctgatctctctggc

SEQ ID NO: 3440543 - DNA, 25 bp, Homo sapien
ctgccctagggatgcaagggctcca

SEQ ID NO: 3440544 - DNA, 25 bp, Homo sapien
gggctcccattgagcagggtgctca

SEQ ID NO: 3440545 - DNA, 25 bp, Homo sapien
ctgctcaggaattcgagccacgcgg

SEQ ID NO: 3440546 - DNA, 25 bp, Homo sapien
gctcaggaattcgagccacgcggaa

SEQ ID NO: 3440547 - DNA, 25 bp, Homo sapien
tgctcaggaattcgagccacgcgga

SEQ ID NO: 3440548 - DNA, 25 bp, Homo sapien
ctcaggaattcgagccacgcggaac

SEQ ID NO: 3440549 - DNA, 25 bp, Homo sapien
cagcctccgtgatggtcttcacctc

SEQ ID NO: 3440550 - DNA, 25 bp, Homo sapien
tcttcacctcagacaccattgaact

SEQ ID NO: 3440551 - DNA, 25 bp, Homo sapien
gggagatcaccccacgagggcccag

SEQ ID NO: 3440552 - DNA, 25 bp, Homo sapien
ggcccagcctccgtgatggtcttca

SEQ ID NO: 3440553 - DNA, 25 bp, Homo sapien
ttcagccactttgtacggcttccgc

SEQ ID NO: 3440554 - DNA, 25 bp, Homo sapien
gggcttcagccactttgtacggctt

SEQ ID NO: 3440555 - DNA, 25 bp, Homo sapien
cagggcctgctgctcaggggggagg

SEQ ID NO: 3440556 - DNA, 25 bp, Homo sapien
ctgggggcttcagccactttgtacg

SEQ ID NO: 3440557 - DNA, 25 bp, Homo sapien
tcagatgaccaggttgctctcactt

SEQ ID NO: 3440558 - DNA, 25 bp, Homo sapien
tcacttagccggaccacatagcggt

SEQ ID NO: 3440559 - DNA, 25 bp, Homo sapien
ttagccggaccacatagcggttctc

SEQ ID NO: 3440560 - DNA, 25 bp, Homo sapien
aggttgctctcacttagccggacca

SEQ ID NO: 3440561 - DNA, 25 bp, Homo sapien
tatcacagtcctgccgggatcaagt

SEQ ID NO: 3440562 - DNA, 25 bp, Homo sapien
gatacagagaatcccgtgggctcct

SEQ ID NO: 3440563 - DNA, 25 bp, Homo sapien
gcattaagccccttccgtaggcaga

SEQ ID NO: 3440564 - DNA, 25 bp, Homo sapien
tctagggccctgtacagaggcaagg

SEQ ID NO: 3440565 - DNA, 25 bp, Homo sapien
taaggcccaggtgaccactatgtgt

SEQ ID NO: 3440566 - DNA, 25 bp, Homo sapien
gaaccagatgagttgatgggtctcc

SEQ ID NO: 3440567 - DNA, 25 bp, Homo sapien
gccacgtggctatggagcccttgaa

SEQ ID NO: 3440568 - DNA, 25 bp, Homo sapien
acgctctgtcttgccgggtgtagca

SEQ ID NO: 3440569 - DNA, 25 bp, Homo sapien
ctggatggcatgggacatcctccat

SEQ ID NO: 3440570 - DNA, 25 bp, Homo sapien
tctggatggcatgggacatcctcca

SEQ ID NO: 3440571 - DNA, 25 bp, Homo sapien
atccccatagctatacctccaagaa

SEQ ID NO: 3440572 - DNA, 25 bp, Homo sapien
ccatagctatacctccaagaactca

SEQ ID NO: 3440573 - DNA, 25 bp, Homo sapien
acatccccatagctatacctccaag

SEQ ID NO: 3440574 - DNA, 25 bp, Homo sapien
atagctatacctccaagaactcagc

SEQ ID NO: 3440575 - DNA, 25 bp, Homo sapien
gagccatccgcgcaataaagctgac

SEQ ID NO: 3440576 - DNA, 25 bp, Homo sapien
cttaggtgactagactgagtggttc

SEQ ID NO: 3440577 - DNA, 25 bp, Homo sapien
cacagtgaggccattcagagttgaa

SEQ ID NO: 3440578 - DNA, 25 bp, Homo sapien
gagttgaaatccattgagccatccg

SEQ ID NO: 3440579 - DNA, 25 bp, Homo sapien
gtaccggcccataggaatcaaatgg

SEQ ID NO: 3440580 - DNA, 25 bp, Homo sapien
tcctaaggagaacagatgtaacagc

SEQ ID NO: 3440581 - DNA, 25 bp, Homo sapien
taacagctttgcaaagtaccggccc

SEQ ID NO: 3440582 - DNA, 25 bp, Homo sapien
tctcctcgggtcagccagatagtct

SEQ ID NO: 3440583 - DNA, 25 bp, Homo sapien
cagtctctccagtggatatcttctg

SEQ ID NO: 3440584 - DNA, 25 bp, Homo sapien
tctccagtggatatcttctgtggtg

SEQ ID NO: 3440585 - DNA, 25 bp, Homo sapien
tatcttctgtggtgcatgctgttga

SEQ ID NO: 3440586 - DNA, 25 bp, Homo sapien
tgagtccaacccaaaggccaaccga

SEQ ID NO: 3440587 - DNA, 25 bp, Homo sapien
tgtactttatagagctgggaagccc

SEQ ID NO: 3440588 - DNA, 25 bp, Homo sapien
tccagagcgtttttggtatgcaaag

SEQ ID NO: 3440589 - DNA, 25 bp, Homo sapien
gctgttctttcttacctggcaatga

SEQ ID NO: 3440590 - DNA, 25 bp, Homo sapien
gacattggttgccaaagtcctccat

SEQ ID NO: 3440591 - DNA, 25 bp, Homo sapien
tttgtcaggtgcatcacagaggtca

SEQ ID NO: 3440592 - DNA, 25 bp, Homo sapien
ccaggagggtaaagcccatcagcct

SEQ ID NO: 3440593 - DNA, 25 bp, Homo sapien
gcatgctggtatccgctaggcttcc

SEQ ID NO: 3440594 - DNA, 25 bp, Homo sapien
gctgtctagccattcccaggagggt

SEQ ID NO: 3440595 - DNA, 25 bp, Homo sapien
ggggcggatggcaggaacagaaatt

SEQ ID NO: 3440596 - DNA, 25 bp, Homo sapien
ctcttttcctccacggactccaaag

SEQ ID NO: 3440597 - DNA, 25 bp, Homo sapien
tgctcttttcctccacggactccaa

SEQ ID NO: 3440598 - DNA, 25 bp, Homo sapien
gggcggatggcaggaacagaaattg

SEQ ID NO: 3440599 - DNA, 25 bp, Homo sapien
tcatggaactgaagggaccttagca

SEQ ID NO: 3440600 - DNA, 25 bp, Homo sapien
tggcccaagtgaaggaaccacattc

SEQ ID NO: 3440601 - DNA, 25 bp, Homo sapien
tacctagtgggcaccttgcttacaa

SEQ ID NO: 3440602 - DNA, 25 bp, Homo sapien
tgtaaaaattaagtcggcagcgccc

SEQ ID NO: 3440603 - DNA, 25 bp, Homo sapien
ctctgctcttccctaagtgtcctgt

SEQ ID NO: 3440604 - DNA, 25 bp, Homo sapien
acctgaccaggccatgtcctctctg

SEQ ID NO: 3440605 - DNA, 25 bp, Homo sapien
tacctgaccaggccatgtcctctct

SEQ ID NO: 3440606 - DNA, 25 bp, Homo sapien
gtgtcctgtccctggggatcccagt

SEQ ID NO: 3440607 - DNA, 25 bp, Homo sapien
cctgttcacatgcttggtaactgat

SEQ ID NO: 3440608 - DNA, 25 bp, Homo sapien
ggagtagagctcttatcccattaga

SEQ ID NO: 3440609 - DNA, 25 bp, Homo sapien
tcccattagatcatcatagcagcct

SEQ ID NO: 3440610 - DNA, 25 bp, Homo sapien
tatgtgttctggagtttaccagccc

SEQ ID NO: 3440611 - DNA, 25 bp, Homo sapien
gaaatagctagttaagagacatcct

SEQ ID NO: 3440612 - DNA, 25 bp, Homo sapien
tggaaaatgctatccatgtatgcct

SEQ ID NO: 3440613 - DNA, 25 bp, Homo sapien
gaaaatgctatccatgtatgccttt

SEQ ID NO: 3440614 - DNA, 25 bp, Homo sapien
tagctagttaagagacatcctggaa

SEQ ID NO: 3440615 - DNA, 25 bp, Homo sapien
cctacaagtcagtgggccagtggat

SEQ ID NO: 3440616 - DNA, 25 bp, Homo sapien
caggaagcagccatgtgattcaggc

SEQ ID NO: 3440617 - DNA, 25 bp, Homo sapien
tgggagtcaccttggaccactgtct

SEQ ID NO: 3440618 - DNA, 25 bp, Homo sapien
tgtttacttcccctacaagtcagtg

SEQ ID NO: 3440619 - DNA, 25 bp, Homo sapien
aatgcagttggggttgactggccct

SEQ ID NO: 3440620 - DNA, 25 bp, Homo sapien
caagtaatgtataaacctgtgccat

SEQ ID NO: 3440621 - DNA, 25 bp, Homo sapien
tacctctgtttcaagcaagtaatgt

SEQ ID NO: 3440622 - DNA, 25 bp, Homo sapien
gactggccctcccatactcaaaaag

SEQ ID NO: 3440623 - DNA, 25 bp, Homo sapien
ccttcaggctaatgtcagacttttg

SEQ ID NO: 3440624 - DNA, 25 bp, Homo sapien
gttgcatccccagctagaccataag

SEQ ID NO: 3440625 - DNA, 25 bp, Homo sapien
tgtcttgttcactccctggttggcg

SEQ ID NO: 3440626 - DNA, 25 bp, Homo sapien
ccataagtaccttgtgtgcggtgac

SEQ ID NO: 3440627 - DNA, 25 bp, Homo sapien
ggccctgctcaccttccaagccggc

SEQ ID NO: 3440628 - DNA, 25 bp, Homo sapien
gcctggccctgctcaccttccaagc

SEQ ID NO: 3440629 - DNA, 25 bp, Homo sapien
cctgctcaccttccaagccggccca

SEQ ID NO: 3440630 - DNA, 25 bp, Homo sapien
gctcaccttccaagccggcccacat

SEQ ID NO: 3440631 - DNA, 25 bp, Homo sapien
ttgaatgtaaaggagtgggtgtggc

SEQ ID NO: 3440632 - DNA, 25 bp, Homo sapien
cttgaatgtaaaggagtgggtgtgg

SEQ ID NO: 3440633 - DNA, 25 bp, Homo sapien
atgtaaaggagtgggtgtggccaga

SEQ ID NO: 3440634 - DNA, 25 bp, Homo sapien
taaaggagtgggtgtggccagagag

SEQ ID NO: 3440635 - DNA, 25 bp, Homo sapien
taacttgggttgacaggataacttg

SEQ ID NO: 3440636 - DNA, 25 bp, Homo sapien
taatctcctggtggtcacagttcca

SEQ ID NO: 3440637 - DNA, 25 bp, Homo sapien
tgttagctcccttggtgaagcagag

SEQ ID NO: 3440638 - DNA, 25 bp, Homo sapien
gataacttgaggtttgccagaggga

SEQ ID NO: 3440639 - DNA, 25 bp, Homo sapien
taaaattgcaacaacctgcccttag

SEQ ID NO: 3440640 - DNA, 25 bp, Homo sapien
tactccacttcagctaaactggcct

SEQ ID NO: 3440641 - DNA, 25 bp, Homo sapien
caaagtttgtatagtggcctatgag

SEQ ID NO: 3440642 - DNA, 25 bp, Homo sapien
tatgaggccctgcatgatttggcct

SEQ ID NO: 3440643 - DNA, 25 bp, Homo sapien
tattattccagtttctcaagccttg

SEQ ID NO: 3440644 - DNA, 25 bp, Homo sapien
cagaaccaccaaagaggtaatgttt

SEQ ID NO: 3440645 - DNA, 25 bp, Homo sapien
taatgtttgtggtagtcctaatggc

SEQ ID NO: 3440646 - DNA, 25 bp, Homo sapien
taggcatctccaatctaagtccaaa

SEQ ID NO: 3440647 - DNA, 25 bp, Homo sapien
gataaataggaatagggtaattgga

SEQ ID NO: 3440648 - DNA, 25 bp, Homo sapien
tagggtaattggagtgaaggtataa

SEQ ID NO: 3440649 - DNA, 25 bp, Homo sapien
ggactgtaggcgaacaccccatgcc

SEQ ID NO: 3440650 - DNA, 25 bp, Homo sapien
ctgggactgtaggcgaacaccccat

SEQ ID NO: 3440651 - DNA, 25 bp, Homo sapien
tgtgaaccaggctcaaggtaaccaa

SEQ ID NO: 3440652 - DNA, 25 bp, Homo sapien
ggtaggaatttcttagctctagtgt

SEQ ID NO: 3440653 - DNA, 25 bp, Homo sapien
tcacagggttccttgaggtggacat

SEQ ID NO: 3440654 - DNA, 25 bp, Homo sapien
taaccaaggcatcacattcttccgg

SEQ ID NO: 3440655 - DNA, 25 bp, Homo sapien
agttttcctccataattaagagctc

SEQ ID NO: 3440656 - DNA, 25 bp, Homo sapien
ttcctccataattaagagctcctct

SEQ ID NO: 3440657 - DNA, 25 bp, Homo sapien
ctgccactggcttgtggaagttttc

SEQ ID NO: 3440658 - DNA, 25 bp, Homo sapien
ctccataattaagagctcctctctc

SEQ ID NO: 3440659 - DNA, 25 bp, Homo sapien
ggctcatcctgtgtaagtgtgtaca

SEQ ID NO: 3440660 - DNA, 25 bp, Homo sapien
cccaacaccaaatttggaggtctga

SEQ ID NO: 3440661 - DNA, 25 bp, Homo sapien
ttttcattggcaatcaagtgtagcc

SEQ ID NO: 3440662 - DNA, 25 bp, Homo sapien
agtgtgtacatatttcctgagttgc

SEQ ID NO: 3440663 - DNA, 25 bp, Homo sapien
agcgggacgtaggcactgggcgtgg

SEQ ID NO: 3440664 - DNA, 25 bp, Homo sapien
gcagcgggacgtaggcactgggcgt

SEQ ID NO: 3440665 - DNA, 25 bp, Homo sapien
cagcgggacgtaggcactgggcgtg

SEQ ID NO: 3440666 - DNA, 25 bp, Homo sapien
tctgtagggttatccccatcctggc

SEQ ID NO: 3440667 - DNA, 25 bp, Homo sapien
ttctgtagggttatccccatcctgg

SEQ ID NO: 3440668 - DNA, 25 bp, Homo sapien
ctgtagggttatccccatcctggcc

SEQ ID NO: 3440669 - DNA, 25 bp, Homo sapien
tttctgtagggttatccccatcctg

SEQ ID NO: 3440670 - DNA, 25 bp, Homo sapien
gtcaccagaagtacatggttattaa

SEQ ID NO: 3440671 - DNA, 25 bp, Homo sapien
tcaccagaagtacatggttattaaa

SEQ ID NO: 3440672 - DNA, 25 bp, Homo sapien
gattaggggtcaggtcccaacagat

SEQ ID NO: 3440673 - DNA, 25 bp, Homo sapien
caacagatgtctgggtttaagggag

SEQ ID NO: 3440674 - DNA, 25 bp, Homo sapien
tcccaacagatgtctgggtttaagg

SEQ ID NO: 3440675 - DNA, 25 bp, Homo sapien
ggtcccaacagatgtctgggtttaa

SEQ ID NO: 3440676 - DNA, 25 bp, Homo sapien
catcattgaggaggtacagtatttc

SEQ ID NO: 3440677 - DNA, 25 bp, Homo sapien
tcaatcatcattgaggaggtacagt

SEQ ID NO: 3440678 - DNA, 25 bp, Homo sapien
caatcatcattgaggaggtacagta

SEQ ID NO: 3440679 - DNA, 25 bp, Homo sapien
cattgaggaggtacagtatttctcc

SEQ ID NO: 3440680 - DNA, 25 bp, Homo sapien
caaaaggttggacgcccatgttaca

SEQ ID NO: 3440681 - DNA, 25 bp, Homo sapien
tgccttgtacagtctgaaccatatc

SEQ ID NO: 3440682 - DNA, 25 bp, Homo sapien
tatgtgaagcccaagtcaatttttc

SEQ ID NO: 3440683 - DNA, 25 bp, Homo sapien
gatactacaccagtcatgtccagcc

SEQ ID NO: 3440684 - DNA, 25 bp, Homo sapien
taaagccctagcttttgaaagccca

SEQ ID NO: 3440685 - DNA, 25 bp, Homo sapien
caaaatgggcagaatgatggaacgt

SEQ ID NO: 3440686 - DNA, 25 bp, Homo sapien
taaagatcaggtttgagcagttacc

SEQ ID NO: 3440687 - DNA, 25 bp, Homo sapien
aaagcccaaaatgaaaagtgcctgg

SEQ ID NO: 3440688 - DNA, 25 bp, Homo sapien
cgtagcctccggagaagacaagggc

SEQ ID NO: 3440689 - DNA, 25 bp, Homo sapien
tgcagaggattcagagccgagtcgc

SEQ ID NO: 3440690 - DNA, 25 bp, Homo sapien
ttgatggagaataacccaacctggg

SEQ ID NO: 3440691 - DNA, 25 bp, Homo sapien
tagggccctgcgtagtgttaattca

SEQ ID NO: 3440692 - DNA, 25 bp, Homo sapien
tgccacggcgttgattacgctggga

SEQ ID NO: 3440693 - DNA, 25 bp, Homo sapien
cggcgttgattacgctgggatgtaa

SEQ ID NO: 3440694 - DNA, 25 bp, Homo sapien
tcttctgccacggcgttgattacgc

SEQ ID NO: 3440695 - DNA, 25 bp, Homo sapien
attgtggagtttacagcagctggag

SEQ ID NO: 3440696 - DNA, 25 bp, Homo sapien
taaatggctaaacagactctgggac

SEQ ID NO: 3440697 - DNA, 25 bp, Homo sapien
tcttgtaaaactagacatgcactta

SEQ ID NO: 3440698 - DNA, 25 bp, Homo sapien
gatggaatactatccagtcatcaaa

SEQ ID NO: 3440699 - DNA, 25 bp, Homo sapien
tttcctaaatgacaaaaccagagag

SEQ ID NO: 3440700 - DNA, 25 bp, Homo sapien
taaggcttaggcctagaaccggcaa

SEQ ID NO: 3440701 - DNA, 25 bp, Homo sapien
accaggatggccaaaagctgtgacc

SEQ ID NO: 3440702 - DNA, 25 bp, Homo sapien
ataacatggcggctggatcccaaga

SEQ ID NO: 3440703 - DNA, 25 bp, Homo sapien
cttagcctgggcatcataacatggc

SEQ ID NO: 3440704 - DNA, 25 bp, Homo sapien
cctgattcagaagtggtcttggctc

SEQ ID NO: 3440705 - DNA, 25 bp, Homo sapien
tccaactgatggctctgaccctagg

SEQ ID NO: 3440706 - DNA, 25 bp, Homo sapien
tcttggctcagcatcgccgaggttc

SEQ ID NO: 3440707 - DNA, 25 bp, Homo sapien
tcttcattctttggcctggcaggac

SEQ ID NO: 3440708 - DNA, 25 bp, Homo sapien
ccccagcttccagtctagtgaggga

SEQ ID NO: 3440709 - DNA, 25 bp, Homo sapien
gcaaggagaagccaagctcctagtt

SEQ ID NO: 3440710 - DNA, 25 bp, Homo sapien
cccagcttccagtctagtgagggag

SEQ ID NO: 3440711 - DNA, 25 bp, Homo sapien
aaagtaaagttgcaaggagaagcca

SEQ ID NO: 3440712 - DNA, 25 bp, Homo sapien
cagccccgcctgcaattttactttt

SEQ ID NO: 3440713 - DNA, 25 bp, Homo sapien
ctttttcttaagaatcattgaactc

SEQ ID NO: 3440714 - DNA, 25 bp, Homo sapien
gacttgtagtctacccctgtagagc

SEQ ID NO: 3440715 - DNA, 25 bp, Homo sapien
ccgaggcgtactgggacttgtagtc

SEQ ID NO: 3440716 - DNA, 25 bp, Homo sapien
tgcgctttgtgtgccccggagagcc

SEQ ID NO: 3440717 - DNA, 25 bp, Homo sapien
gatgttgctgcctaagcggccgcta

SEQ ID NO: 3440718 - DNA, 25 bp, Homo sapien
aagcggccgctactcgatgctgctg

SEQ ID NO: 3440719 - DNA, 25 bp, Homo sapien
ttgtctacacttgttgcggatgttg

SEQ ID NO: 3440720 - DNA, 25 bp, Homo sapien
tgctgcgtaacaagggctggcacac

SEQ ID NO: 3440721 - DNA, 25 bp, Homo sapien
tgttgctgcgtaacaagggctggca

SEQ ID NO: 3440722 - DNA, 25 bp, Homo sapien
acacctgttgctgcgtaacaagggc

SEQ ID NO: 3440723 - DNA, 25 bp, Homo sapien
cctgttgctgcgtaacaagggctgg

SEQ ID NO: 3440724 - DNA, 25 bp, Homo sapien
catgtacatgatgtagcttgcactg

SEQ ID NO: 3440725 - DNA, 25 bp, Homo sapien
gggttagcaaatgactcatccatgt

SEQ ID NO: 3440726 - DNA, 25 bp, Homo sapien
tgcactggaatccaggtaggtgccc

SEQ ID NO: 3440727 - DNA, 25 bp, Homo sapien
agatggacaaactgagggttagcaa

SEQ ID NO: 3440728 - DNA, 25 bp, Homo sapien
ggaagagaatgggagcactgtcact

SEQ ID NO: 3440729 - DNA, 25 bp, Homo sapien
tgtcagaggagccacgggagacaca

SEQ ID NO: 3440730 - DNA, 25 bp, Homo sapien
ttccagcctcagcttggtaactttg

SEQ ID NO: 3440731 - DNA, 25 bp, Homo sapien
ggaccaggagcctggattccagcct

SEQ ID NO: 3440732 - DNA, 25 bp, Homo sapien
caaaaggactttccagagcggagtc

SEQ ID NO: 3440733 - DNA, 25 bp, Homo sapien
tcttcaaaaggactttccagagcgg

SEQ ID NO: 3440734 - DNA, 25 bp, Homo sapien
aggactttccagagcggagtcaggc

SEQ ID NO: 3440735 - DNA, 25 bp, Homo sapien
ttcaaaaggactttccagagcggag

SEQ ID NO: 3440736 - DNA, 25 bp, Homo sapien
tgtctccacagccagccgcccctca

SEQ ID NO: 3440737 - DNA, 25 bp, Homo sapien
tctgtctccacagccagccgcccct

SEQ ID NO: 3440738 - DNA, 25 bp, Homo sapien
gtctccacagccagccgcccctcac

SEQ ID NO: 3440739 - DNA, 25 bp, Homo sapien
ctgtctccacagccagccgcccctc

SEQ ID NO: 3440740 - DNA, 25 bp, Homo sapien
tacgatattccagatgcactaggca

SEQ ID NO: 3440741 - DNA, 25 bp, Homo sapien
tattccagatgcactaggcaggctg

SEQ ID NO: 3440742 - DNA, 25 bp, Homo sapien
gatattccagatgcactaggcaggc

SEQ ID NO: 3440743 - DNA, 25 bp, Homo sapien
ctgtacgatattccagatgcactag

SEQ ID NO: 3440744 - DNA, 25 bp, Homo sapien
tatgtcacggacattgaagtggatg

SEQ ID NO: 3440745 - DNA, 25 bp, Homo sapien
aaccagttccgcttccagcggcgga

SEQ ID NO: 3440746 - DNA, 25 bp, Homo sapien
tctgggccgatctttatgtcacgga

SEQ ID NO: 3440747 - DNA, 25 bp, Homo sapien
catcgtggtagtatcccagggtccc

SEQ ID NO: 3440748 - DNA, 25 bp, Homo sapien
aatgtggagatttgctgtgactctg

SEQ ID NO: 3440749 - DNA, 25 bp, Homo sapien
cctgttagaactgtggcctgggcct

SEQ ID NO: 3440750 - DNA, 25 bp, Homo sapien
cctgggccttggtggaggaatgtgg

SEQ ID NO: 3440751 - DNA, 25 bp, Homo sapien
gccttggtggaggaatgtggagatt

SEQ ID NO: 3440752 - DNA, 25 bp, Homo sapien
gccttcccgtaggttcacagtcagc

SEQ ID NO: 3440753 - DNA, 25 bp, Homo sapien
cacagaggtgcaggcggccgccttc

SEQ ID NO: 3440754 - DNA, 25 bp, Homo sapien
gcatcatccttggtctccgcacaga

SEQ ID NO: 3440755 - DNA, 25 bp, Homo sapien
gtcagcaggccatctcggctccggc

SEQ ID NO: 3440756 - DNA, 25 bp, Homo sapien
gacaatggggcctttgttggttgcc

SEQ ID NO: 3440757 - DNA, 25 bp, Homo sapien
aggcccagcagacacgggacaatgg

SEQ ID NO: 3440758 - DNA, 25 bp, Homo sapien
tgggttggacaaggcggctctgtgc

SEQ ID NO: 3440759 - DNA, 25 bp, Homo sapien
tgggtgttgtagcccagtccccctc

SEQ ID NO: 3440760 - DNA, 25 bp, Homo sapien
caccagaccatgaggagggagtttg

SEQ ID NO: 3440761 - DNA, 25 bp, Homo sapien
tcacatggatggagcactaagttag

SEQ ID NO: 3440762 - DNA, 25 bp, Homo sapien
tgcaaagcaaatcccaccagaccat

SEQ ID NO: 3440763 - DNA, 25 bp, Homo sapien
catctatacagtggacggttgggct

SEQ ID NO: 3440764 - DNA, 25 bp, Homo sapien
gtggagtttgcctccagcagtgctg

SEQ ID NO: 3440765 - DNA, 25 bp, Homo sapien
gggtggagtttgcctccagcagtgc

SEQ ID NO: 3440766 - DNA, 25 bp, Homo sapien
gcctccagcagtgctgtcttccatg

SEQ ID NO: 3440767 - DNA, 25 bp, Homo sapien
cggggtggagtttgcctccagcagt

SEQ ID NO: 3440768 - DNA, 25 bp, Homo sapien
tgaggagcagctggaatgatacctg

SEQ ID NO: 3440769 - DNA, 25 bp, Homo sapien
gaacaataaccccaacttcacagga

SEQ ID NO: 3440770 - DNA, 25 bp, Homo sapien
agctggaatgatacctgcaccacac

SEQ ID NO: 3440771 - DNA, 25 bp, Homo sapien
taaccccaacttcacaggactgttg

SEQ ID NO: 3440772 - DNA, 25 bp, Homo sapien
ggcttctcattaggctgagtccagg

SEQ ID NO: 3440773 - DNA, 25 bp, Homo sapien
ccttgcctgaactaccacctggatg

SEQ ID NO: 3440774 - DNA, 25 bp, Homo sapien
ttcagtcctcggtttaagccttgcc

SEQ ID NO: 3440775 - DNA, 25 bp, Homo sapien
tgggcagagcccatatctccttggt

SEQ ID NO: 3440776 - DNA, 25 bp, Homo sapien
gtatgaactccagcatgtcggagga

SEQ ID NO: 3440777 - DNA, 25 bp, Homo sapien
cagtaaagctggtgttaggggctcc

SEQ ID NO: 3440778 - DNA, 25 bp, Homo sapien
gcctccacctggagtgaggtatgaa

SEQ ID NO: 3440779 - DNA, 25 bp, Homo sapien
aaagggcaggtcattcccacacagg

SEQ ID NO: 3440780 - DNA, 25 bp, Homo sapien
ttccagaccctaccagagccctccg

SEQ ID NO: 3440781 - DNA, 25 bp, Homo sapien
tgtcagaggccctctacacctaaag

SEQ ID NO: 3440782 - DNA, 25 bp, Homo sapien
tcctcagctcatggtaacgggggag

SEQ ID NO: 3440783 - DNA, 25 bp, Homo sapien
ttctcctcagctcatggtaacgggg

SEQ ID NO: 3440784 - DNA, 25 bp, Homo sapien
ttggagcaaacccggcggctcctgg

SEQ ID NO: 3440785 - DNA, 25 bp, Homo sapien
agatccgcctctcaaccttacaggg

SEQ ID NO: 3440786 - DNA, 25 bp, Homo sapien
ccttacaggggctccacgagcgggt

SEQ ID NO: 3440787 - DNA, 25 bp, Homo sapien
tccacgagcgggtcacacacctgac

SEQ ID NO: 3440788 - DNA, 25 bp, Homo sapien
gctgcttgtagacaaggactctgat

SEQ ID NO: 3440789 - DNA, 25 bp, Homo sapien
ccaggaaccaagaactatgtgctga

SEQ ID NO: 3440790 - DNA, 25 bp, Homo sapien
taactgggattcacacctgaacagt

SEQ ID NO: 3440791 - DNA, 25 bp, Homo sapien
tccccttagaagtccaggtgtctca

SEQ ID NO: 3440792 - DNA, 25 bp, Homo sapien
taatgccacttgaaagacccagctc

SEQ ID NO: 3440793 - DNA, 25 bp, Homo sapien
gaatccaaccatgtcaggtgcccag

SEQ ID NO: 3440794 - DNA, 25 bp, Homo sapien
gcctctctgggatccatggagccac

SEQ ID NO: 3440795 - DNA, 25 bp, Homo sapien
gacccagctctactagtcacaagga

SEQ ID NO: 3440796 - DNA, 25 bp, Homo sapien
tcttggtacgggctgtagacgcgca

SEQ ID NO: 3440797 - DNA, 25 bp, Homo sapien
cacctcgtagtagtcttggtacggg

SEQ ID NO: 3440798 - DNA, 25 bp, Homo sapien
gcggtccgtagtagctgcggacata

SEQ ID NO: 3440799 - DNA, 25 bp, Homo sapien
catacgtggcctcgtgtgcattggg

SEQ ID NO: 3440800 - DNA, 25 bp, Homo sapien
tgggctgggcctggcgctgaatcgg

SEQ ID NO: 3440801 - DNA, 25 bp, Homo sapien
cgtgggctgggcctggcgctgaatc

SEQ ID NO: 3440802 - DNA, 25 bp, Homo sapien
ggaccgtgggctgggcctggcgctg

SEQ ID NO: 3440803 - DNA, 25 bp, Homo sapien
ggctgggcctggcgctgaatcggtg

SEQ ID NO: 3440804 - DNA, 25 bp, Homo sapien
gatgggcattcccaaccgccaggcc

SEQ ID NO: 3440805 - DNA, 25 bp, Homo sapien
caggaatgggtattgccgaccgcag

SEQ ID NO: 3440806 - DNA, 25 bp, Homo sapien
gccgctaccggctcaggaatgggta

SEQ ID NO: 3440807 - DNA, 25 bp, Homo sapien
gaggaggcagcattcccgcagtagc

SEQ ID NO: 3440808 - DNA, 25 bp, Homo sapien
tgtagcagggatcctcccgcactat

SEQ ID NO: 3440809 - DNA, 25 bp, Homo sapien
agggcgaccacatgagcgagcccag

SEQ ID NO: 3440810 - DNA, 25 bp, Homo sapien
tggcggctcccgcaagcatgcccat

SEQ ID NO: 3440811 - DNA, 25 bp, Homo sapien
actatcacgtgcgtcacgccagggc

SEQ ID NO: 3440812 - DNA, 25 bp, Homo sapien
cagagagcccgattcatgttgtgtc

SEQ ID NO: 3440813 - DNA, 25 bp, Homo sapien
caaacccggaaggagctaatggaga

SEQ ID NO: 3440814 - DNA, 25 bp, Homo sapien
tcaattgttatcatgggtaccagcc

SEQ ID NO: 3440815 - DNA, 25 bp, Homo sapien
gaggagtctagcaatccaagcgcag

SEQ ID NO: 3440816 - DNA, 25 bp, Homo sapien
aaagagagggccgagctcctggtgt

SEQ ID NO: 3440817 - DNA, 25 bp, Homo sapien
ctacaaagagagggccgagctcctg

SEQ ID NO: 3440818 - DNA, 25 bp, Homo sapien
gctttctagggctggaagtctcaaa

SEQ ID NO: 3440819 - DNA, 25 bp, Homo sapien
tctggacggaggcagctttctaggg

SEQ ID NO: 3440820 - DNA, 25 bp, Homo sapien
ggagaacactgccatcttattcaga

SEQ ID NO: 3440821 - DNA, 25 bp, Homo sapien
agcatttctattggtgattgggata

SEQ ID NO: 3440822 - DNA, 25 bp, Homo sapien
catttacaggggagctttagtgggc

SEQ ID NO: 3440823 - DNA, 25 bp, Homo sapien
ctggctaccaggcagggatgttagc

SEQ ID NO: 3440824 - DNA, 25 bp, Homo sapien
agagccaaccaaatctttattagtc

SEQ ID NO: 3440825 - DNA, 25 bp, Homo sapien
actcaggagggcattagcctggagc

SEQ ID NO: 3440826 - DNA, 25 bp, Homo sapien
ccccaagaagcctgatgcaggatga

SEQ ID NO: 3440827 - DNA, 25 bp, Homo sapien
ggagtttctatctgacagccccaag

SEQ ID NO: 3440828 - DNA, 25 bp, Homo sapien
accaggcccaggactttcagtcata

SEQ ID NO: 3440829 - DNA, 25 bp, Homo sapien
gccacaggccagaatactagtgcag

SEQ ID NO: 3440830 - DNA, 25 bp, Homo sapien
gttgaaatgaggaacacagccaggt

SEQ ID NO: 3440831 - DNA, 25 bp, Homo sapien
tacaaaagcactaataagccgatgg

SEQ ID NO: 3440832 - DNA, 25 bp, Homo sapien
catgtgggcttatagttcctagaac

SEQ ID NO: 3440833 - DNA, 25 bp, Homo sapien
aaacaaatatactaggagtgtgccc

SEQ ID NO: 3440834 - DNA, 25 bp, Homo sapien
taaatacattgtttgcaggacgaaa

SEQ ID NO: 3440835 - DNA, 25 bp, Homo sapien
tgtcaccttgtaatattcagagagc

SEQ ID NO: 3440836 - DNA, 25 bp, Homo sapien
agataatcattagcccacataccag

SEQ ID NO: 3440837 - DNA, 25 bp, Homo sapien
taacgagcggtatgttcacagccta

SEQ ID NO: 3440838 - DNA, 25 bp, Homo sapien
aaagcagcagttctaccaagcccat

SEQ ID NO: 3440839 - DNA, 25 bp, Homo sapien
gataccacttgctgtaggctacgga

SEQ ID NO: 3440840 - DNA, 25 bp, Homo sapien
gccatcatggtaggcagtgcttgaa

SEQ ID NO: 3440841 - DNA, 25 bp, Homo sapien
tcattgctgcctgtctcgtggagat

SEQ ID NO: 3440842 - DNA, 25 bp, Homo sapien
gtgaatattggcttgaaccttttcc

SEQ ID NO: 3440843 - DNA, 25 bp, Homo sapien
ttcagaagctcactgctttggcccc

SEQ ID NO: 3440844 - DNA, 25 bp, Homo sapien
tcccttcagtaataacgtattgcaa

SEQ ID NO: 3440845 - DNA, 25 bp, Homo sapien
ttgccgggaatggaaagcacacagg

SEQ ID NO: 3440846 - DNA, 25 bp, Homo sapien
ctttgccgggaatggaaagcacaca

SEQ ID NO: 3440847 - DNA, 25 bp, Homo sapien
tagcagcagctttgccgggaatgga

SEQ ID NO: 3440848 - DNA, 25 bp, Homo sapien
cagctttgccgggaatggaaagcac

SEQ ID NO: 3440849 - DNA, 25 bp, Homo sapien
gtttattatcaagttgacgttcatc

SEQ ID NO: 3440850 - DNA, 25 bp, Homo sapien
catctaatttagtcagagttttccc

SEQ ID NO: 3440851 - DNA, 25 bp, Homo sapien
gcatgtaagtttgaaatccctttta

SEQ ID NO: 3440852 - DNA, 25 bp, Homo sapien
ctgtaaccctcttatgcatgtaagt

SEQ ID NO: 3440853 - DNA, 25 bp, Homo sapien
taccattatattagccatatgccac

SEQ ID NO: 3440854 - DNA, 25 bp, Homo sapien
tatattagccatatgccactattct

SEQ ID NO: 3440855 - DNA, 25 bp, Homo sapien
tagtaagtgatacgtaactgaaccc

SEQ ID NO: 3440856 - DNA, 25 bp, Homo sapien
ctagcaatgtgtatggaacgtagta

SEQ ID NO: 3440857 - DNA, 25 bp, Homo sapien
ccgcagagtttgaagggaagccact

SEQ ID NO: 3440858 - DNA, 25 bp, Homo sapien
ccaaaatgagggactgggacctgta

SEQ ID NO: 3440859 - DNA, 25 bp, Homo sapien
catggtagaggtagaggatacagcc

SEQ ID NO: 3440860 - DNA, 25 bp, Homo sapien
cactgcttcagagataccaggtggt

SEQ ID NO: 3440861 - DNA, 25 bp, Homo sapien
tgatactaatgctatggcacaaaat

SEQ ID NO: 3440862 - DNA, 25 bp, Homo sapien
ggaacagacccagtttcatatggaa

SEQ ID NO: 3440863 - DNA, 25 bp, Homo sapien
aaataagtatgaaggtggtacctca

SEQ ID NO: 3440864 - DNA, 25 bp, Homo sapien
gcaaatggcaaactagggaaaagta

SEQ ID NO: 3440865 - DNA, 25 bp, Homo sapien
taagttaaaccctttcatggtctga

SEQ ID NO: 3440866 - DNA, 25 bp, Homo sapien
catggtctgacgtctaccttcgtat

SEQ ID NO: 3440867 - DNA, 25 bp, Homo sapien
tgtaattagaggtaagatctcacta

SEQ ID NO: 3440868 - DNA, 25 bp, Homo sapien
ctttacctgttattataaggcagat

SEQ ID NO: 3440869 - DNA, 25 bp, Homo sapien
ggtgccactggctcttcgccagtgg

SEQ ID NO: 3440870 - DNA, 25 bp, Homo sapien
cgccagtggccgagtttttaccctg

SEQ ID NO: 3440871 - DNA, 25 bp, Homo sapien
aaagcggtgagtgcgtggctcccct

SEQ ID NO: 3440872 - DNA, 25 bp, Homo sapien
agtccggccatctccggtcgatctg

SEQ ID NO: 3440873 - DNA, 25 bp, Homo sapien
tgtaagtgacgtaagggctccagcc

SEQ ID NO: 3440874 - DNA, 25 bp, Homo sapien
gctgtccaaaccaggaaggcgatgg

SEQ ID NO: 3440875 - DNA, 25 bp, Homo sapien
gctgagaggcgccacacttcttatg

SEQ ID NO: 3440876 - DNA, 25 bp, Homo sapien
ttgacgccagtggaaacctaacctg

SEQ ID NO: 3440877 - DNA, 25 bp, Homo sapien
ctatgtagcaagcactcttcaagca

SEQ ID NO: 3440878 - DNA, 25 bp, Homo sapien
caagatgagatctgacctcgtggag

SEQ ID NO: 3440879 - DNA, 25 bp, Homo sapien
gaggttacagtcaagtagggaacac

SEQ ID NO: 3440880 - DNA, 25 bp, Homo sapien
caggcaaaggtacttatactgttag

SEQ ID NO: 3440881 - DNA, 25 bp, Homo sapien
cctctggaaagactgcacactgtcc

SEQ ID NO: 3440882 - DNA, 25 bp, Homo sapien
gctacgatgtaggtgttcttgcaag

SEQ ID NO: 3440883 - DNA, 25 bp, Homo sapien
tattggactacagctacgatgtagg

SEQ ID NO: 3440884 - DNA, 25 bp, Homo sapien
tctttgttgtctgtattggactaca

SEQ ID NO: 3440885 - DNA, 25 bp, Homo sapien
ttttagaagatttctatcaccctaa

SEQ ID NO: 3440886 - DNA, 25 bp, Homo sapien
ttgtcccgatttgccccatttgcag

SEQ ID NO: 3440887 - DNA, 25 bp, Homo sapien
catttgcagtcactcacctttgata

SEQ ID NO: 3440888 - DNA, 25 bp, Homo sapien
gtgtgatcatcaacacagtataatt

SEQ ID NO: 3440889 - DNA, 25 bp, Homo sapien
tgcctctccccattggtctgctgaa

SEQ ID NO: 3440890 - DNA, 25 bp, Homo sapien
gctgaagctcgttcggttcccaggg

SEQ ID NO: 3440891 - DNA, 25 bp, Homo sapien
cctccacatggacgctggcggccat

SEQ ID NO: 3440892 - DNA, 25 bp, Homo sapien
ggctgcgagaggaggcgcgctccct

SEQ ID NO: 3440893 - DNA, 25 bp, Homo sapien
tttcattgttctgccgtacattgtt

SEQ ID NO: 3440894 - DNA, 25 bp, Homo sapien
ttcattgttctgccgtacattgtta

SEQ ID NO: 3440895 - DNA, 25 bp, Homo sapien
taccatctctgtgttaccccagtac

SEQ ID NO: 3440896 - DNA, 25 bp, Homo sapien
gattaattcctttcagcgtctagca

SEQ ID NO: 3440897 - DNA, 25 bp, Homo sapien
aagttcttaaaagactgagatcctg

SEQ ID NO: 3440898 - DNA, 25 bp, Homo sapien
tacactaatgatttgttaccacctc

SEQ ID NO: 3440899 - DNA, 25 bp, Homo sapien
tatcccaccgagactcactcaactt

SEQ ID NO: 3440900 - DNA, 25 bp, Homo sapien
caccgagactcactcaacttccaca

SEQ ID NO: 3440901 - DNA, 25 bp, Homo sapien
caatatcccaccgagactcactcaa

SEQ ID NO: 3440902 - DNA, 25 bp, Homo sapien
ggtgcagcagcaatatcccaccgag

SEQ ID NO: 3440903 - DNA, 25 bp, Homo sapien
gccgcgttcccagggcgtctgaaaa

SEQ ID NO: 3440904 - DNA, 25 bp, Homo sapien
tgtgcaaaccgaagaccggaccctg

SEQ ID NO: 3440905 - DNA, 25 bp, Homo sapien
tgcagccgcgttcccagggcgtctg

SEQ ID NO: 3440906 - DNA, 25 bp, Homo sapien
tgctgcgcggcctctagctgtgcaa

SEQ ID NO: 3440907 - DNA, 25 bp, Homo sapien
cgagaggccttatatacccatgtca

SEQ ID NO: 3440908 - DNA, 25 bp, Homo sapien
aacagtggcatcagacgtcgagagg

SEQ ID NO: 3440909 - DNA, 25 bp, Homo sapien
tcagatgctggccttaatgacagat

SEQ ID NO: 3440910 - DNA, 25 bp, Homo sapien
gacgaggttagctgactaaagcaac

SEQ ID NO: 3440911 - DNA, 25 bp, Homo sapien
agctctggccctgcaagtggaagag

SEQ ID NO: 3440912 - DNA, 25 bp, Homo sapien
gaggaggatggtgacgccagcgaat

SEQ ID NO: 3440913 - DNA, 25 bp, Homo sapien
gaggatggtgacgccagcgaatgaa

SEQ ID NO: 3440914 - DNA, 25 bp, Homo sapien
agaggaggatggtgacgccagcgaa

SEQ ID NO: 3440915 - DNA, 25 bp, Homo sapien
gagagaaaaggcttgcttaaaaatg

SEQ ID NO: 3440916 - DNA, 25 bp, Homo sapien
cttaagagagaaaaggcttgcttaa

SEQ ID NO: 3440917 - DNA, 25 bp, Homo sapien
cttaaaaatggtattgttcctcagg

SEQ ID NO: 3440918 - DNA, 25 bp, Homo sapien
aaaaatggtattgttcctcaggcac

SEQ ID NO: 3440919 - DNA, 25 bp, Homo sapien
ctacagaatagatgggcttctctcc

SEQ ID NO: 3440920 - DNA, 25 bp, Homo sapien
gatgggcttctctcctgaagttcta

SEQ ID NO: 3440921 - DNA, 25 bp, Homo sapien
agatgggcttctctcctgaagttct

SEQ ID NO: 3440922 - DNA, 25 bp, Homo sapien
gggcttctctcctgaagttctaaac

SEQ ID NO: 3440923 - DNA, 25 bp, Homo sapien
ctgggccacaagcaagaccgtctct

SEQ ID NO: 3440924 - DNA, 25 bp, Homo sapien
tcctggacggattctcagtttgtcc

SEQ ID NO: 3440925 - DNA, 25 bp, Homo sapien
tagaatatgcacgatccccactact

SEQ ID NO: 3440926 - DNA, 25 bp, Homo sapien
tttggctcctagaatatgcacgatc

SEQ ID NO: 3440927 - DNA, 25 bp, Homo sapien
gccatagatatttcttgatcctgga

SEQ ID NO: 3440928 - DNA, 25 bp, Homo sapien
ggtgggctttgtcttgtagggccga

SEQ ID NO: 3440929 - DNA, 25 bp, Homo sapien
taagtgcttgtactttccaatgccg

SEQ ID NO: 3440930 - DNA, 25 bp, Homo sapien
tttccaatgccgtgggtgggctttg

SEQ ID NO: 3440931 - DNA, 25 bp, Homo sapien
tgcttgtactttccaatgccgtggg

SEQ ID NO: 3440932 - DNA, 25 bp, Homo sapien
tgaaggtcaacctgtcaagagcagg

SEQ ID NO: 3440933 - DNA, 25 bp, Homo sapien
gatcatccagccgaaatgacccagc

SEQ ID NO: 3440934 - DNA, 25 bp, Homo sapien
taccttaagatcatggagacatcct

SEQ ID NO: 3440935 - DNA, 25 bp, Homo sapien
ggaatggttcccttacactgctgct

SEQ ID NO: 3440936 - DNA, 25 bp, Homo sapien
tatcattggctgtttgtgagggaac

SEQ ID NO: 3440937 - DNA, 25 bp, Homo sapien
taggttcataagattcaaccaggca

SEQ ID NO: 3440938 - DNA, 25 bp, Homo sapien
tcagtaccctagacaagaaacagaa

SEQ ID NO: 3440939 - DNA, 25 bp, Homo sapien
caaccaggcattatgtggaatggca

SEQ ID NO: 3440940 - DNA, 25 bp, Homo sapien
gaagaaagcacctcaaccgaaaata

SEQ ID NO: 3440941 - DNA, 25 bp, Homo sapien
cctaaatgcccataaagagagggac

SEQ ID NO: 3440942 - DNA, 25 bp, Homo sapien
aaagggttcaagagcagccctgaca

SEQ ID NO: 3440943 - DNA, 25 bp, Homo sapien
ccagaactttgaggccaagatagga

SEQ ID NO: 3440944 - DNA, 25 bp, Homo sapien
ctgggaggcgaggttgaagtgcgcc

SEQ ID NO: 3440945 - DNA, 25 bp, Homo sapien
gggaggcgaggttgaagtgcgccga

SEQ ID NO: 3440946 - DNA, 25 bp, Homo sapien
cctgggaggcgaggttgaagtgcgc

SEQ ID NO: 3440947 - DNA, 25 bp, Homo sapien
gaggcgaggttgaagtgcgccgaga

SEQ ID NO: 3440948 - DNA, 25 bp, Homo sapien
cagggtcatatcatatgcagtcaga

SEQ ID NO: 3440949 - DNA, 25 bp, Homo sapien
gtccccaaattaatggctctcactt

SEQ ID NO: 3440950 - DNA, 25 bp, Homo sapien
tccccaaattaatggctctcacttc

SEQ ID NO: 3440951 - DNA, 25 bp, Homo sapien
ggtcatatcatatgcagtcagatga

SEQ ID NO: 3440952 - DNA, 25 bp, Homo sapien
gaacatcccatacaaaagcatcctt

SEQ ID NO: 3440953 - DNA, 25 bp, Homo sapien
aagaacatcccatacaaaagcatcc

SEQ ID NO: 3440954 - DNA, 25 bp, Homo sapien
acatcccatacaaaagcatccttca

SEQ ID NO: 3440955 - DNA, 25 bp, Homo sapien
caagaacatcccatacaaaagcatc

SEQ ID NO: 3440956 - DNA, 25 bp, Homo sapien
ctgtatctcaaaagcctagtttaac

SEQ ID NO: 3440957 - DNA, 25 bp, Homo sapien
ttattgtagtacattatataactaa

SEQ ID NO: 3440958 - DNA, 25 bp, Homo sapien
aaaaaacagagcattctacccacac

SEQ ID NO: 3440959 - DNA, 25 bp, Homo sapien
cattatataactaaaaagagttaat

SEQ ID NO: 3440960 - DNA, 25 bp, Homo sapien
tagtccatagacaagctgccagtga

SEQ ID NO: 3440961 - DNA, 25 bp, Homo sapien
tgccagtgaacagcctaattgtcac

SEQ ID NO: 3440962 - DNA, 25 bp, Homo sapien
taaacaaaccgcttgattcagccaa

SEQ ID NO: 3440963 - DNA, 25 bp, Homo sapien
ggtccatgacagacaagaaatgtgc

SEQ ID NO: 3440964 - DNA, 25 bp, Homo sapien
taaacattgctttgatgatcagaca

SEQ ID NO: 3440965 - DNA, 25 bp, Homo sapien
gctgagtgatgcttttactcttagc

SEQ ID NO: 3440966 - DNA, 25 bp, Homo sapien
gaagagcagcctcatagtgagtgat

SEQ ID NO: 3440967 - DNA, 25 bp, Homo sapien
taatttcacgagtcaatctaacatg

SEQ ID NO: 3440968 - DNA, 25 bp, Homo sapien
taaagtgggaattgtccattcctgc

SEQ ID NO: 3440969 - DNA, 25 bp, Homo sapien
caaagaagtctatgcatgcggtggc

SEQ ID NO: 3440970 - DNA, 25 bp, Homo sapien
tctgttctaggcaccctgatgggca

SEQ ID NO: 3440971 - DNA, 25 bp, Homo sapien
tctgcagataggactgactaaagtg

SEQ ID NO: 3440972 - DNA, 25 bp, Homo sapien
ctgcaacacttctatggttttggtt

SEQ ID NO: 3440973 - DNA, 25 bp, Homo sapien
gcaactgcaacacttctatggtttt

SEQ ID NO: 3440974 - DNA, 25 bp, Homo sapien
aactgcaacacttctatggttttgg

SEQ ID NO: 3440975 - DNA, 25 bp, Homo sapien
caactgcaacacttctatggttttg

SEQ ID NO: 3440976 - DNA, 25 bp, Homo sapien
aaatgaaagaaggtgctctaagagg

SEQ ID NO: 3440977 - DNA, 25 bp, Homo sapien
aagaaggtgctctaagaggtgggag

SEQ ID NO: 3440978 - DNA, 25 bp, Homo sapien
gaaagaaggtgctctaagaggtggg

SEQ ID NO: 3440979 - DNA, 25 bp, Homo sapien
atgaaagaaggtgctctaagaggtg

SEQ ID NO: 3440980 - DNA, 25 bp, Homo sapien
caggaagactgctttggattatttc

SEQ ID NO: 3440981 - DNA, 25 bp, Homo sapien
ttcaggaagactgctttggattatt

SEQ ID NO: 3440982 - DNA, 25 bp, Homo sapien
aggaagactgctttggattatttcc

SEQ ID NO: 3440983 - DNA, 25 bp, Homo sapien
gctttgaatcgtcccttgaagtctt

SEQ ID NO: 3440984 - DNA, 25 bp, Homo sapien
ccagttctggtcgagctttgaatcg

SEQ ID NO: 3440985 - DNA, 25 bp, Homo sapien
ctggtcgagctttgaatcgtccctt

SEQ ID NO: 3440986 - DNA, 25 bp, Homo sapien
tcgagctttgaatcgtcccttgaag

SEQ ID NO: 3440987 - DNA, 25 bp, Homo sapien
tacctcataggtaagtggtaagaaa

SEQ ID NO: 3440988 - DNA, 25 bp, Homo sapien
gaggagtgaggacattactggctat

SEQ ID NO: 3440989 - DNA, 25 bp, Homo sapien
gatgaactctaactacccagtaagc

SEQ ID NO: 3440990 - DNA, 25 bp, Homo sapien
aatctaagggttgggtctcctgatg

SEQ ID NO: 3440991 - DNA, 25 bp, Homo sapien
gggaacatgcttctgtgctaaagca

SEQ ID NO: 3440992 - DNA, 25 bp, Homo sapien
taacatctgcctgaatactataagt

SEQ ID NO: 3440993 - DNA, 25 bp, Homo sapien
caatccagggaaacttaattagcag

SEQ ID NO: 3440994 - DNA, 25 bp, Homo sapien
tatttcacttatgggcagaatctgt

SEQ ID NO: 3440995 - DNA, 25 bp, Homo sapien
ggataattcatatgtcataagccaa

SEQ ID NO: 3440996 - DNA, 25 bp, Homo sapien
caaagaggactcttgccatccaagc

SEQ ID NO: 3440997 - DNA, 25 bp, Homo sapien
caagcctgttccctcagataaatgg

SEQ ID NO: 3440998 - DNA, 25 bp, Homo sapien
tcaggcaaagaggactcttgccatc

SEQ ID NO: 3440999 - DNA, 25 bp, Homo sapien
tgatctctgagcaggggtcgtcgtc

SEQ ID NO: 3441000 - DNA, 25 bp, Homo sapien
atctctgagcaggggtcgtcgtcat

SEQ ID NO: 3441001 - DNA, 25 bp, Homo sapien
cctgatctctgagcaggggtcgtcg

SEQ ID NO: 3441002 - DNA, 25 bp, Homo sapien
gatctctgagcaggggtcgtcgtca

SEQ ID NO: 3441003 - DNA, 25 bp, Homo sapien
tcaacaccaagaggccaccaatgaa

SEQ ID NO: 3441004 - DNA, 25 bp, Homo sapien
tccgtgtgcacgctccccacgaggg

SEQ ID NO: 3441005 - DNA, 25 bp, Homo sapien
gacagaggtgggctcaacaccaaga

SEQ ID NO: 3441006 - DNA, 25 bp, Homo sapien
ccggaagtgagtccccgagaagcgt

SEQ ID NO: 3441007 - DNA, 25 bp, Homo sapien
ggcttgcgcccagtcgctctgaatc

SEQ ID NO: 3441008 - DNA, 25 bp, Homo sapien
agggcttgcgcccagtcgctctgaa

SEQ ID NO: 3441009 - DNA, 25 bp, Homo sapien
tctgaatcctcaaaggcgccgccat

SEQ ID NO: 3441010 - DNA, 25 bp, Homo sapien
ctgagggcttgcgcccagtcgctct

SEQ ID NO: 3441011 - DNA, 25 bp, Homo sapien
cgacaattgacgaagtaacccctat

SEQ ID NO: 3441012 - DNA, 25 bp, Homo sapien
tccttgacgcaaagcaacatccact

SEQ ID NO: 3441013 - DNA, 25 bp, Homo sapien
tggaccaggcatggctctccttgac

SEQ ID NO: 3441014 - DNA, 25 bp, Homo sapien
taacccctattgatatcctggacca

SEQ ID NO: 3441015 - DNA, 25 bp, Homo sapien
ctcactgatactagttctgacgcgg

SEQ ID NO: 3441016 - DNA, 25 bp, Homo sapien
caaagtggtggtgagtacagagact

SEQ ID NO: 3441017 - DNA, 25 bp, Homo sapien
tatcgtccagtatgcctaatatagc

SEQ ID NO: 3441018 - DNA, 25 bp, Homo sapien
gacttctggaagtaactgacgacta

SEQ ID NO: 3441019 - DNA, 25 bp, Homo sapien
cagccaggcctccccttcatccttc

SEQ ID NO: 3441020 - DNA, 25 bp, Homo sapien
ctgggggatgacagctcagccaggc

SEQ ID NO: 3441021 - DNA, 25 bp, Homo sapien
ggggatgacagctcagccaggcctc

SEQ ID NO: 3441022 - DNA, 25 bp, Homo sapien
gctcagccaggcctccccttcatcc

SEQ ID NO: 3441023 - DNA, 25 bp, Homo sapien
ggtaggagaccacgcagcatgatca

SEQ ID NO: 3441024 - DNA, 25 bp, Homo sapien
atgatcacggctacccttgtccagg

SEQ ID NO: 3441025 - DNA, 25 bp, Homo sapien
tccagggtaggaggtccagtagcat

SEQ ID NO: 3441026 - DNA, 25 bp, Homo sapien
caagaaagtcccagttgaagctgca

SEQ ID NO: 3441027 - DNA, 25 bp, Homo sapien
gaatgcggtggcactatctggtctc

SEQ ID NO: 3441028 - DNA, 25 bp, Homo sapien
gctcagtcatccaagctggaatgcg

SEQ ID NO: 3441029 - DNA, 25 bp, Homo sapien
atgcggtggcactatctggtctcac

SEQ ID NO: 3441030 - DNA, 25 bp, Homo sapien
tggaatgcggtggcactatctggtc

SEQ ID NO: 3441031 - DNA, 25 bp, Homo sapien
tgacatcattaactccaattcataa

SEQ ID NO: 3441032 - DNA, 25 bp, Homo sapien
acatcattaactccaattcataaag

SEQ ID NO: 3441033 - DNA, 25 bp, Homo sapien
catcattaactccaattcataaaga

SEQ ID NO: 3441034 - DNA, 25 bp, Homo sapien
gacatcattaactccaattcataaa

SEQ ID NO: 3441035 - DNA, 25 bp, Homo sapien
gaacacaactgtgccgactgtcacc

SEQ ID NO: 3441036 - DNA, 25 bp, Homo sapien
ggttctcatgccatctatcctgcca

SEQ ID NO: 3441037 - DNA, 25 bp, Homo sapien
cagcagttttgtaatcctttcaccc

SEQ ID NO: 3441038 - DNA, 25 bp, Homo sapien
tacagggtgagttaccctgcccagc

SEQ ID NO: 3441039 - DNA, 25 bp, Homo sapien
cacgaccaggccgggagggctttct

SEQ ID NO: 3441040 - DNA, 25 bp, Homo sapien
gagagtataggagcctcaaagaaag

SEQ ID NO: 3441041 - DNA, 25 bp, Homo sapien
taggagctggctaggaagaaaatag

SEQ ID NO: 3441042 - DNA, 25 bp, Homo sapien
agggctttctagagagtataggagc

SEQ ID NO: 3441043 - DNA, 25 bp, Homo sapien
tgattttgcagagatatgggctaag

SEQ ID NO: 3441044 - DNA, 25 bp, Homo sapien
gaaaggtgaagatcagtatgcatac

SEQ ID NO: 3441045 - DNA, 25 bp, Homo sapien
tctcaacctgatgtaactggctgtg

SEQ ID NO: 3441046 - DNA, 25 bp, Homo sapien
tgatacagcatttgtagagagggct

SEQ ID NO: 3441047 - DNA, 25 bp, Homo sapien
agaacagagtgagaactcagtcact

SEQ ID NO: 3441048 - DNA, 25 bp, Homo sapien
tctcaggaaagaacagagtgagaac

SEQ ID NO: 3441049 - DNA, 25 bp, Homo sapien
ctttctcaggaaagaacagagtgag

SEQ ID NO: 3441050 - DNA, 25 bp, Homo sapien
aagaacagagtgagaactcagtcac

SEQ ID NO: 3441051 - DNA, 25 bp, Homo sapien
agagagaagggagatgccaggatct

SEQ ID NO: 3441052 - DNA, 25 bp, Homo sapien
aagggagatgccaggatctttttaa

SEQ ID NO: 3441053 - DNA, 25 bp, Homo sapien
agatgccaggatctttttaacaatc

SEQ ID NO: 3441054 - DNA, 25 bp, Homo sapien
gagaagggagatgccaggatctttt

SEQ ID NO: 3441055 - DNA, 25 bp, Homo sapien
acaagtcaggctgccatacaaagat

SEQ ID NO: 3441056 - DNA, 25 bp, Homo sapien
taaatccttctgaagctgtaacctc

SEQ ID NO: 3441057 - DNA, 25 bp, Homo sapien
tctgggatgccatctaggccaattc

SEQ ID NO: 3441058 - DNA, 25 bp, Homo sapien
aagtcaggctgccatacaaagatgg

SEQ ID NO: 3441059 - DNA, 25 bp, Homo sapien
gtagtatatggtgccaaaaacttag

SEQ ID NO: 3441060 - DNA, 25 bp, Homo sapien
tttgtatgaattctggaaaaagtag

SEQ ID NO: 3441061 - DNA, 25 bp, Homo sapien
ctctttgtatgaattctggaaaaag

SEQ ID NO: 3441062 - DNA, 25 bp, Homo sapien
tggaaaaagtagtatatggtgccaa

SEQ ID NO: 3441063 - DNA, 25 bp, Homo sapien
ccatctttgggagcaaaactttagc

SEQ ID NO: 3441064 - DNA, 25 bp, Homo sapien
gaataccatgcagctcttagaagga

SEQ ID NO: 3441065 - DNA, 25 bp, Homo sapien
tatacatcagttaagcggcaatgca

SEQ ID NO: 3441066 - DNA, 25 bp, Homo sapien
caacctaacggtatgttttacagag

SEQ ID NO: 3441067 - DNA, 25 bp, Homo sapien
tcagtactagaagacacaccaagac

SEQ ID NO: 3441068 - DNA, 25 bp, Homo sapien
ggtcccgtcagtactagaagacaca

SEQ ID NO: 3441069 - DNA, 25 bp, Homo sapien
tcccgtcagtactagaagacacacc

SEQ ID NO: 3441070 - DNA, 25 bp, Homo sapien
ccgtcagtactagaagacacaccaa

SEQ ID NO: 3441071 - DNA, 25 bp, Homo sapien
gagttctccattggaagcctgccag

SEQ ID NO: 3441072 - DNA, 25 bp, Homo sapien
tgagttctccattggaagcctgcca

SEQ ID NO: 3441073 - DNA, 25 bp, Homo sapien
tgggaaaaacctgcaacaattcaca

SEQ ID NO: 3441074 - DNA, 25 bp, Homo sapien
tcctttgtgacctttgaaggtcacc

SEQ ID NO: 3441075 - DNA, 25 bp, Homo sapien
caaacacatgtccttccaatactct

SEQ ID NO: 3441076 - DNA, 25 bp, Homo sapien
gtcaccacgcagctagcatcttcag

SEQ ID NO: 3441077 - DNA, 25 bp, Homo sapien
ctgctttcactgataattgattaaa

SEQ ID NO: 3441078 - DNA, 25 bp, Homo sapien
ttttggccaagaaagagtagtccca

SEQ ID NO: 3441079 - DNA, 25 bp, Homo sapien
tgataattgattaaaagggttagcc

SEQ ID NO: 3441080 - DNA, 25 bp, Homo sapien
caagaaagagtagtcccattgctcc

SEQ ID NO: 3441081 - DNA, 25 bp, Homo sapien
aaaaactccctaagatggaggatgg

SEQ ID NO: 3441082 - DNA, 25 bp, Homo sapien
gatggagtaaaggaactacaagggc

SEQ ID NO: 3441083 - DNA, 25 bp, Homo sapien
aagatggagctgcataaatgactcc

SEQ ID NO: 3441084 - DNA, 25 bp, Homo sapien
gtaaaggaactacaagggcagagaa

SEQ ID NO: 3441085 - DNA, 25 bp, Homo sapien
tctcgagaagcagacaccacattcc

SEQ ID NO: 3441086 - DNA, 25 bp, Homo sapien
aatctgcaaggactcccaagcaggc

SEQ ID NO: 3441087 - DNA, 25 bp, Homo sapien
aaagtcgtgctgtcccatctcgaga

SEQ ID NO: 3441088 - DNA, 25 bp, Homo sapien
cccgatcaacgatggctgtatccag

SEQ ID NO: 3441089 - DNA, 25 bp, Homo sapien
caggggagccaaggtttatggagtt

SEQ ID NO: 3441090 - DNA, 25 bp, Homo sapien
aggtttatggagttgtcagcagcac

SEQ ID NO: 3441091 - DNA, 25 bp, Homo sapien
ttatggagttgtcagcagcacccac

SEQ ID NO: 3441092 - DNA, 25 bp, Homo sapien
ggcatctgctcaggggagccaaggt

SEQ ID NO: 3441093 - DNA, 25 bp, Homo sapien
ttcgagctcctgaccttgtgaatcg

SEQ ID NO: 3441094 - DNA, 25 bp, Homo sapien
catgcacacactaccacacccaact

SEQ ID NO: 3441095 - DNA, 25 bp, Homo sapien
tacatgcacacactaccacacccaa

SEQ ID NO: 3441096 - DNA, 25 bp, Homo sapien
agactggtttcgagctcctgacctt

SEQ ID NO: 3441097 - DNA, 25 bp, Homo sapien
gcaggagtatattccagaccaaggg

SEQ ID NO: 3441098 - DNA, 25 bp, Homo sapien
cagtcatgtgaagacctgcaggagt

SEQ ID NO: 3441099 - DNA, 25 bp, Homo sapien
cacttttcaactgaatggcaagacc

SEQ ID NO: 3441100 - DNA, 25 bp, Homo sapien
aagcctctgtggaagtcacttttca

SEQ ID NO: 3441101 - DNA, 25 bp, Homo sapien
ttcttatcttcccgggccaagagca

SEQ ID NO: 3441102 - DNA, 25 bp, Homo sapien
gctctgtagtcccaagcactgaagt

SEQ ID NO: 3441103 - DNA, 25 bp, Homo sapien
tctgtagtcccaagcactgaagttt

SEQ ID NO: 3441104 - DNA, 25 bp, Homo sapien
tgtagtcccaagcactgaagtttct

SEQ ID NO: 3441105 - DNA, 25 bp, Homo sapien
agttcaaaggtcatataggaaccac

SEQ ID NO: 3441106 - DNA, 25 bp, Homo sapien
cactaaagttgtctggatgacgatc

SEQ ID NO: 3441107 - DNA, 25 bp, Homo sapien
gatgacgatcacaggagctagaagg

SEQ ID NO: 3441108 - DNA, 25 bp, Homo sapien
tagttaagaacataatctgcccagc

SEQ ID NO: 3441109 - DNA, 25 bp, Homo sapien
tccctctggaagtaaaagccagcat

SEQ ID NO: 3441110 - DNA, 25 bp, Homo sapien
tgacaactttctgagaaacacttgc

SEQ ID NO: 3441111 - DNA, 25 bp, Homo sapien
tttcatgacaactttctgagaaaca

SEQ ID NO: 3441112 - DNA, 25 bp, Homo sapien
caactttctgagaaacacttgcaat

SEQ ID NO: 3441113 - DNA, 25 bp, Homo sapien
gcaattcccacatgtaagttttgct

SEQ ID NO: 3441114 - DNA, 25 bp, Homo sapien
ctgggaacaagtaggaggcaaaaat

SEQ ID NO: 3441115 - DNA, 25 bp, Homo sapien
tgggaacaagtaggaggcaaaaatg

SEQ ID NO: 3441116 - DNA, 25 bp, Homo sapien
agagaaaagtacagcagttgaaagc

SEQ ID NO: 3441117 - DNA, 25 bp, Homo sapien
gagagaaaagtacagcagttgaaag

SEQ ID NO: 3441118 - DNA, 25 bp, Homo sapien
tttccatcttgagtcccagccaata

SEQ ID NO: 3441119 - DNA, 25 bp, Homo sapien
agagagaaaagtacagcagttgaaa

SEQ ID NO: 3441120 - DNA, 25 bp, Homo sapien
gcagggatagaactggtgctcctga

SEQ ID NO: 3441121 - DNA, 25 bp, Homo sapien
tctgtggatgacttgtaccggagcc

SEQ ID NO: 3441122 - DNA, 25 bp, Homo sapien
cttggctagcaatgaatccatctct

SEQ ID NO: 3441123 - DNA, 25 bp, Homo sapien
atagaactggtgctcctgatctgtg

SEQ ID NO: 3441124 - DNA, 25 bp, Homo sapien
tttccacttaatgcaatgtatccca

SEQ ID NO: 3441125 - DNA, 25 bp, Homo sapien
ccacttaatgcaatgtatcccaaac

SEQ ID NO: 3441126 - DNA, 25 bp, Homo sapien
tggttttccacttaatgcaatgtat

SEQ ID NO: 3441127 - DNA, 25 bp, Homo sapien
ggttttccacttaatgcaatgtatc

SEQ ID NO: 3441128 - DNA, 25 bp, Homo sapien
ctcagtgacatagtctaagtcttgc

SEQ ID NO: 3441129 - DNA, 25 bp, Homo sapien
cagtgacatagtctaagtcttgctg

SEQ ID NO: 3441130 - DNA, 25 bp, Homo sapien
agtcttgctggacaataaaacagct

SEQ ID NO: 3441131 - DNA, 25 bp, Homo sapien
gctggacaataaaacagcttccatc

SEQ ID NO: 3441132 - DNA, 25 bp, Homo sapien
gcatgtgtagatctgcttctcccat

SEQ ID NO: 3441133 - DNA, 25 bp, Homo sapien
tacaagaccgtctcgacagcatgtg

SEQ ID NO: 3441134 - DNA, 25 bp, Homo sapien
gtagcgtcgtacaagaccgtctcga

SEQ ID NO: 3441135 - DNA, 25 bp, Homo sapien
cagaaagctggtagcgtcgtacaag

SEQ ID NO: 3441136 - DNA, 25 bp, Homo sapien
gacattaaacgccatggtccttggg

SEQ ID NO: 3441137 - DNA, 25 bp, Homo sapien
tcttgggatgagagttccacacggc

SEQ ID NO: 3441138 - DNA, 25 bp, Homo sapien
aatgcagtgggcacaatgaccttct

SEQ ID NO: 3441139 - DNA, 25 bp, Homo sapien
ccttttcactaaccgggactgctct

SEQ ID NO: 3441140 - DNA, 25 bp, Homo sapien
tatggtatccatattctggacattg

SEQ ID NO: 3441141 - DNA, 25 bp, Homo sapien
tcttaatctgcatgtcccagctcaa

SEQ ID NO: 3441142 - DNA, 25 bp, Homo sapien
gctcaagtgttacatctttcaagaa

SEQ ID NO: 3441143 - DNA, 25 bp, Homo sapien
caacaacattattaccccagccaga

SEQ ID NO: 3441144 - DNA, 25 bp, Homo sapien
ttaaggcagaagctgtaatcatgcc

SEQ ID NO: 3441145 - DNA, 25 bp, Homo sapien
gaggttaaggcagaagctgtaatca

SEQ ID NO: 3441146 - DNA, 25 bp, Homo sapien
gtaatcatgccaacgcattccagcc

SEQ ID NO: 3441147 - DNA, 25 bp, Homo sapien
ctgtaatcatgccaacgcattccag

SEQ ID NO: 3441148 - DNA, 25 bp, Homo sapien
gtgctgtggcccgatctcagcttac

SEQ ID NO: 3441149 - DNA, 25 bp, Homo sapien
tgctgtggcccgatctcagcttact

SEQ ID NO: 3441150 - DNA, 25 bp, Homo sapien
gcaagctctgcctgccaggttcaca

SEQ ID NO: 3441151 - DNA, 25 bp, Homo sapien
gagtgctgtggcccgatctcagctt

SEQ ID NO: 3441152 - DNA, 25 bp, Homo sapien
cctcctgagactttgcaccctatga

SEQ ID NO: 3441153 - DNA, 25 bp, Homo sapien
tatgggccacaaagtcctattgtga

SEQ ID NO: 3441154 - DNA, 25 bp, Homo sapien
gcaatctaccatgctatgcaataga

SEQ ID NO: 3441155 - DNA, 25 bp, Homo sapien
aatgcttaacattttttgggttgag

SEQ ID NO: 3441156 - DNA, 25 bp, Homo sapien
ggtcactgcatatatcacaaccagg

SEQ ID NO: 3441157 - DNA, 25 bp, Homo sapien
ttcagagcagctgtcaagggtcact

SEQ ID NO: 3441158 - DNA, 25 bp, Homo sapien
cgtatgaaaaggagcggacgaatgt

SEQ ID NO: 3441159 - DNA, 25 bp, Homo sapien
caaccaggacatcgactctggagac

SEQ ID NO: 3441160 - DNA, 25 bp, Homo sapien
gaatgaatactatgctacaaacaga

SEQ ID NO: 3441161 - DNA, 25 bp, Homo sapien
ctgtaactgctgcaggattaatcac

SEQ ID NO: 3441162 - DNA, 25 bp, Homo sapien
ggattaatcacagcccccgataaaa

SEQ ID NO: 3441163 - DNA, 25 bp, Homo sapien
ggaatgaatactatgctacaaacag

SEQ ID NO: 3441164 - DNA, 25 bp, Homo sapien
taagctggacgcttggaagaaccag

SEQ ID NO: 3441165 - DNA, 25 bp, Homo sapien
cctgtgaaggaacgctagagcatgc

SEQ ID NO: 3441166 - DNA, 25 bp, Homo sapien
taggtcaaacgcttgatgcaccgct

SEQ ID NO: 3441167 - DNA, 25 bp, Homo sapien
catgcggaagcagaggacaattgtc

SEQ ID NO: 3441168 - DNA, 25 bp, Homo sapien
gctgattctgcgaccctgtgaaagg

SEQ ID NO: 3441169 - DNA, 25 bp, Homo sapien
tcaggccctggatagtcctcagact

SEQ ID NO: 3441170 - DNA, 25 bp, Homo sapien
gaaaggtcactcaactcggaaattg

SEQ ID NO: 3441171 - DNA, 25 bp, Homo sapien
gaaattgaagactcacagggctctg

SEQ ID NO: 3441172 - DNA, 25 bp, Homo sapien
cctctgaattgcgagtgatcccgag

SEQ ID NO: 3441173 - DNA, 25 bp, Homo sapien
cgagtgatcccgagcacagagtaat

SEQ ID NO: 3441174 - DNA, 25 bp, Homo sapien
tctgggcatcctctgaattgcgagt

SEQ ID NO: 3441175 - DNA, 25 bp, Homo sapien
gcacagagtaataatcctggcccat

SEQ ID NO: 3441176 - DNA, 25 bp, Homo sapien
tccagtgcttaagctgtgcttatct

SEQ ID NO: 3441177 - DNA, 25 bp, Homo sapien
ttccagtgcttaagctgtgcttatc

SEQ ID NO: 3441178 - DNA, 25 bp, Homo sapien
cactgagcccagacatatacttttt

SEQ ID NO: 3441179 - DNA, 25 bp, Homo sapien
tctcctggcataacccttcactggt

SEQ ID NO: 3441180 - DNA, 25 bp, Homo sapien
cattgtctccagcataaaactcgga

SEQ ID NO: 3441181 - DNA, 25 bp, Homo sapien
tgaaatactttctgaccaggtccct

SEQ ID NO: 3441182 - DNA, 25 bp, Homo sapien
aataaagggaccattcgcccaggtg

SEQ ID NO: 3441183 - DNA, 25 bp, Homo sapien
tgagaatatgtatcggcagtgaccc

SEQ ID NO: 3441184 - DNA, 25 bp, Homo sapien
tttctgaagggcagacatcgcagcg

SEQ ID NO: 3441185 - DNA, 25 bp, Homo sapien
gatacaagtcgtaccagctggcctg

SEQ ID NO: 3441186 - DNA, 25 bp, Homo sapien
ttaatacaagtcttatcagctggtc

SEQ ID NO: 3441187 - DNA, 25 bp, Homo sapien
tacaagtcttatcagctggtctgtt

SEQ ID NO: 3441188 - DNA, 25 bp, Homo sapien
tggaagagggagaattaatacaagt

SEQ ID NO: 3441189 - DNA, 25 bp, Homo sapien
gggagaattaatacaagtcttatca

SEQ ID NO: 3441190 - DNA, 25 bp, Homo sapien
gtgcttaagggcgagtctgcggtac

SEQ ID NO: 3441191 - DNA, 25 bp, Homo sapien
tgacttcaacgggtggtgcttaagg

SEQ ID NO: 3441192 - DNA, 25 bp, Homo sapien
tctctgctgaagacggctcatttga

SEQ ID NO: 3441193 - DNA, 25 bp, Homo sapien
cacgtcgtaggcctctgctatttgc

SEQ ID NO: 3441194 - DNA, 25 bp, Homo sapien
caccaaagaactcgtggaacacctt

SEQ ID NO: 3441195 - DNA, 25 bp, Homo sapien
gaacaccttttcaggtttgccatgg

SEQ ID NO: 3441196 - DNA, 25 bp, Homo sapien
caaacttgtcgtagatgcctctctt

SEQ ID NO: 3441197 - DNA, 25 bp, Homo sapien
gaagacgtaaccagttgtccatggg

SEQ ID NO: 3441198 - DNA, 25 bp, Homo sapien
catcacttatagcagtgtcctttct

SEQ ID NO: 3441199 - DNA, 25 bp, Homo sapien
aaactactcaacgaaaacatcactt

SEQ ID NO: 3441200 - DNA, 25 bp, Homo sapien
tcctttctctataaggcaaggtggg

SEQ ID NO: 3441201 - DNA, 25 bp, Homo sapien
tcaacgaaaacatcacttatagcag

SEQ ID NO: 3441202 - DNA, 25 bp, Homo sapien
ttggcaccgaattcctacactcaag

SEQ ID NO: 3441203 - DNA, 25 bp, Homo sapien
ggttggcaccgaattcctacactca

SEQ ID NO: 3441204 - DNA, 25 bp, Homo sapien
cccaggttggcaccgaattcctaca

SEQ ID NO: 3441205 - DNA, 25 bp, Homo sapien
caggttggcaccgaattcctacact

SEQ ID NO: 3441206 - DNA, 25 bp, Homo sapien
tgtgctctggaatgcaacggtgaca

SEQ ID NO: 3441207 - DNA, 25 bp, Homo sapien
gattccttctttgtgactgtggcag

SEQ ID NO: 3441208 - DNA, 25 bp, Homo sapien
tggaagatttcctacagggccagct

SEQ ID NO: 3441209 - DNA, 25 bp, Homo sapien
ggtccacccacgagtttcatgcctg

SEQ ID NO: 3441210 - DNA, 25 bp, Homo sapien
agaaactacccatcaataagacagt

SEQ ID NO: 3441211 - DNA, 25 bp, Homo sapien
ctacccatcaataagacagtaatta

SEQ ID NO: 3441212 - DNA, 25 bp, Homo sapien
gagacaagaggtatcttcccacaaa

SEQ ID NO: 3441213 - DNA, 25 bp, Homo sapien
cctggccagtcttgagtggaaaccc

SEQ ID NO: 3441214 - DNA, 25 bp, Homo sapien
gagcctgacctttcccaatgagcga

SEQ ID NO: 3441215 - DNA, 25 bp, Homo sapien
taaggtcccgtagctagtaagcagt

SEQ ID NO: 3441216 - DNA, 25 bp, Homo sapien
tatgtccctctaagatgcgatgggc

SEQ ID NO: 3441217 - DNA, 25 bp, Homo sapien
gcatcgctagatgtggaagcccctc

SEQ ID NO: 3441218 - DNA, 25 bp, Homo sapien
taatttttttggtgcagccaaagaa

SEQ ID NO: 3441219 - DNA, 25 bp, Homo sapien
acaggtagagatcccgttcgacttg

SEQ ID NO: 3441220 - DNA, 25 bp, Homo sapien
gtcctgcttcttgacccctcggccc

SEQ ID NO: 3441221 - DNA, 25 bp, Homo sapien
gcttcttgacccctcggccctggag

SEQ ID NO: 3441222 - DNA, 25 bp, Homo sapien
catctgtggaaagcatggccgcatc

SEQ ID NO: 3441223 - DNA, 25 bp, Homo sapien
tatgcacgaggcatgcaccctgatg

SEQ ID NO: 3441224 - DNA, 25 bp, Homo sapien
cagtcgcatgtccagatgggttcca

SEQ ID NO: 3441225 - DNA, 25 bp, Homo sapien
tgggctcaatcctctagcaatggga

SEQ ID NO: 3441226 - DNA, 25 bp, Homo sapien
tccaaccgggcttcacatcaatggt

SEQ ID NO: 3441227 - DNA, 25 bp, Homo sapien
aaaggtgatgcgtgtgccctgcctc

SEQ ID NO: 3441228 - DNA, 25 bp, Homo sapien
cttgatggtggaggagtacccatcc

SEQ ID NO: 3441229 - DNA, 25 bp, Homo sapien
gaggagtacccatcctcgttcagca

SEQ ID NO: 3441230 - DNA, 25 bp, Homo sapien
ggaccacaggcacacactaccatgc

SEQ ID NO: 3441231 - DNA, 25 bp, Homo sapien
tgacctcctcggctcaaaagatcct

SEQ ID NO: 3441232 - DNA, 25 bp, Homo sapien
cctgcctcagtctcctgagtatctg

SEQ ID NO: 3441233 - DNA, 25 bp, Homo sapien
ccttgacctcctcggctcaaaagat

SEQ ID NO: 3441234 - DNA, 25 bp, Homo sapien
aggcttcctcagacggcaggcaggt

SEQ ID NO: 3441235 - DNA, 25 bp, Homo sapien
tctgtcttgctagtaactccaggca

SEQ ID NO: 3441236 - DNA, 25 bp, Homo sapien
tgggcgtcaggcaactgcccgtatg

SEQ ID NO: 3441237 - DNA, 25 bp, Homo sapien
caggtggaacactaagctgggcgtc

SEQ ID NO: 3441238 - DNA, 25 bp, Homo sapien
tgagcatgcccaaaatagacacact

SEQ ID NO: 3441239 - DNA, 25 bp, Homo sapien
tctgtactgagcatgcccaaaatag

SEQ ID NO: 3441240 - DNA, 25 bp, Homo sapien
tgtactgagcatgcccaaaatagac

SEQ ID NO: 3441241 - DNA, 25 bp, Homo sapien
ccccagaattacttctgtactgagc

SEQ ID NO: 3441242 - DNA, 25 bp, Homo sapien
tacaatggggagatgagagcaggtt

SEQ ID NO: 3441243 - DNA, 25 bp, Homo sapien
ctgtacaatggggagatgagagcag

SEQ ID NO: 3441244 - DNA, 25 bp, Homo sapien
aatggggagatgagagcaggttttc

SEQ ID NO: 3441245 - DNA, 25 bp, Homo sapien
ggagatgagagcaggttttctggaa

SEQ ID NO: 3441246 - DNA, 25 bp, Homo sapien
cttggccaagttcctgcctctactt

SEQ ID NO: 3441247 - DNA, 25 bp, Homo sapien
gcaggggacgccaaaaggtgacaag

SEQ ID NO: 3441248 - DNA, 25 bp, Homo sapien
aaaggtgacaaggactagttggccg

SEQ ID NO: 3441249 - DNA, 25 bp, Homo sapien
caaggactagttggccgtgtgacct

SEQ ID NO: 3441250 - DNA, 25 bp, Homo sapien
tagcttctcctttacgatgaaaatg

SEQ ID NO: 3441251 - DNA, 25 bp, Homo sapien
tgccaagagggatggggttcacgaa

SEQ ID NO: 3441252 - DNA, 25 bp, Homo sapien
cggaagcgagggtgtagcttctcct

SEQ ID NO: 3441253 - DNA, 25 bp, Homo sapien
gaggttgtcattctccctgcggaag

SEQ ID NO: 3441254 - DNA, 25 bp, Homo sapien
ttgagcagacggtcatctagggtcc

SEQ ID NO: 3441255 - DNA, 25 bp, Homo sapien
agcagacggtcatctagggtcctca

SEQ ID NO: 3441256 - DNA, 25 bp, Homo sapien
gggatgttgagcagacggtcatcta

SEQ ID NO: 3441257 - DNA, 25 bp, Homo sapien
gacggtcatctagggtcctcacctc

SEQ ID NO: 3441258 - DNA, 25 bp, Homo sapien
aagatgaagagatcccctttcttag

SEQ ID NO: 3441259 - DNA, 25 bp, Homo sapien
tcagcaatgcctggcgcagcatctg

SEQ ID NO: 3441260 - DNA, 25 bp, Homo sapien
ggaactggatgtcgaagaagatgaa

SEQ ID NO: 3441261 - DNA, 25 bp, Homo sapien
cttagtggggtcctccggcaatggc

SEQ ID NO: 3441262 - DNA, 25 bp, Homo sapien
cacccttgtatcatatctgtgcagc

SEQ ID NO: 3441263 - DNA, 25 bp, Homo sapien
gggtgaggcccggctagcctcctct

SEQ ID NO: 3441264 - DNA, 25 bp, Homo sapien
tatgtcagtttaagccctgcgccat

SEQ ID NO: 3441265 - DNA, 25 bp, Homo sapien
catcccacccttgtatcatatctgt

SEQ ID NO: 3441266 - DNA, 25 bp, Homo sapien
tttcttccctgtgccccacaagaag

SEQ ID NO: 3441267 - DNA, 25 bp, Homo sapien
aagctcctctccaatgtactctcgt

SEQ ID NO: 3441268 - DNA, 25 bp, Homo sapien
gctcctctccaatgtactctcgtgg

SEQ ID NO: 3441269 - DNA, 25 bp, Homo sapien
cctgtgccccacaagaagggctaat

SEQ ID NO: 3441270 - DNA, 25 bp, Homo sapien
cggcctttctagtttttttgagatg

SEQ ID NO: 3441271 - DNA, 25 bp, Homo sapien
cataagccaccacacccggcctttc

SEQ ID NO: 3441272 - DNA, 25 bp, Homo sapien
agccaccacacccggcctttctagt

SEQ ID NO: 3441273 - DNA, 25 bp, Homo sapien
taagccaccacacccggcctttcta

SEQ ID NO: 3441274 - DNA, 25 bp, Homo sapien
aagttcagccagaatcttcgtcctg

SEQ ID NO: 3441275 - DNA, 25 bp, Homo sapien
tcgtaccagccaggatcccaagcgt

SEQ ID NO: 3441276 - DNA, 25 bp, Homo sapien
tggctttgtctctagccgggccatg

SEQ ID NO: 3441277 - DNA, 25 bp, Homo sapien
agtgtgggaggcctcgtaccagcca

SEQ ID NO: 3441278 - DNA, 25 bp, Homo sapien
tgccaggaccatgcgctcggcgtgt

SEQ ID NO: 3441279 - DNA, 25 bp, Homo sapien
tttccgctataattatccaggccca

SEQ ID NO: 3441280 - DNA, 25 bp, Homo sapien
gaaaacacatatggcgccggcctga

SEQ ID NO: 3441281 - DNA, 25 bp, Homo sapien
gacttctgtttccacgctgcttctg

SEQ ID NO: 3441282 - DNA, 25 bp, Homo sapien
cactggtagctaacgtgtccgaaac

SEQ ID NO: 3441283 - DNA, 25 bp, Homo sapien
taacctatgagcagctgaaacgggc

SEQ ID NO: 3441284 - DNA, 25 bp, Homo sapien
gaacaagacaagaaggccactggta

SEQ ID NO: 3441285 - DNA, 25 bp, Homo sapien
ccacaatggagtgggagatcagcca

SEQ ID NO: 3441286 - DNA, 25 bp, Homo sapien
agtgtccatgctaaagcctccaagt

SEQ ID NO: 3441287 - DNA, 25 bp, Homo sapien
tgcccacagatggagcctccagtag

SEQ ID NO: 3441288 - DNA, 25 bp, Homo sapien
tgtccatgctaaagcctccaagtgt

SEQ ID NO: 3441289 - DNA, 25 bp, Homo sapien
tccagtagcttctgtggggcaccct

SEQ ID NO: 3441290 - DNA, 25 bp, Homo sapien
cagcacagagcattcaaggcccagg

SEQ ID NO: 3441291 - DNA, 25 bp, Homo sapien
accagcacagagcattcaaggccca

SEQ ID NO: 3441292 - DNA, 25 bp, Homo sapien
cacagagcattcaaggcccagggcc

SEQ ID NO: 3441293 - DNA, 25 bp, Homo sapien
agcacagagcattcaaggcccaggg

SEQ ID NO: 3441294 - DNA, 25 bp, Homo sapien
ggtacagcagtcagatgtagacttg

SEQ ID NO: 3441295 - DNA, 25 bp, Homo sapien
aggttgtgcacacatcacatagttc

SEQ ID NO: 3441296 - DNA, 25 bp, Homo sapien
tacagcagtcagatgtagacttggt

SEQ ID NO: 3441297 - DNA, 25 bp, Homo sapien
aaatgggctactgaaggttgtgcac

SEQ ID NO: 3441298 - DNA, 25 bp, Homo sapien
agggacaggggggcgaatccagcag

SEQ ID NO: 3441299 - DNA, 25 bp, Homo sapien
acaggggggcgaatccagcagcata

SEQ ID NO: 3441300 - DNA, 25 bp, Homo sapien
gagggacaggggggcgaatccagca

SEQ ID NO: 3441301 - DNA, 25 bp, Homo sapien
ggacaggggggcgaatccagcagca

SEQ ID NO: 3441302 - DNA, 25 bp, Homo sapien
cagctgtacacaaggcatagatggc

SEQ ID NO: 3441303 - DNA, 25 bp, Homo sapien
tgatttgaggtgaagcagctgtaca

SEQ ID NO: 3441304 - DNA, 25 bp, Homo sapien
caatagccacattagcgtccagaag

SEQ ID NO: 3441305 - DNA, 25 bp, Homo sapien
taagaggagaattcgataactggca

SEQ ID NO: 3441306 - DNA, 25 bp, Homo sapien
ccccggagaggtattgtagcaaagc

SEQ ID NO: 3441307 - DNA, 25 bp, Homo sapien
tttcaccggaaggaggagcgctctt

SEQ ID NO: 3441308 - DNA, 25 bp, Homo sapien
tgcacgcacgtagtcaaacagtagg

SEQ ID NO: 3441309 - DNA, 25 bp, Homo sapien
caatggagtccacaaagggcgcatc

SEQ ID NO: 3441310 - DNA, 25 bp, Homo sapien
cgctgccgggtagaggtgggcgaga

SEQ ID NO: 3441311 - DNA, 25 bp, Homo sapien
cattcgcatcttggctccgctctga

SEQ ID NO: 3441312 - DNA, 25 bp, Homo sapien
gcatgctcttttcgagggccgacat

SEQ ID NO: 3441313 - DNA, 25 bp, Homo sapien
ggcggccgaggtgcatgctcttttc

SEQ ID NO: 3441314 - DNA, 25 bp, Homo sapien
gagataccattctccaacggctggg

SEQ ID NO: 3441315 - DNA, 25 bp, Homo sapien
aatttctattgacttggcgcctccc

SEQ ID NO: 3441316 - DNA, 25 bp, Homo sapien
agatcccttatgttagtctctcagc

SEQ ID NO: 3441317 - DNA, 25 bp, Homo sapien
tagtatctagttctcacagtgcaga

SEQ ID NO: 3441318 - DNA, 25 bp, Homo sapien
caaataatgttatgggtcagtttcc

SEQ ID NO: 3441319 - DNA, 25 bp, Homo sapien
gatgagaagctgagctctaattaag

SEQ ID NO: 3441320 - DNA, 25 bp, Homo sapien
tgtagccttctacctctattgtgcg

SEQ ID NO: 3441321 - DNA, 25 bp, Homo sapien
tagaagggtgctggtatactgaaaa

SEQ ID NO: 3441322 - DNA, 25 bp, Homo sapien
aatagggcacgagttcatttttgca

SEQ ID NO: 3441323 - DNA, 25 bp, Homo sapien
tatgagtagctccactcccaagcct

SEQ ID NO: 3441324 - DNA, 25 bp, Homo sapien
gaacaatggttcttatgcttaagga

SEQ ID NO: 3441325 - DNA, 25 bp, Homo sapien
aaaatgagttgatggtgggaatacc

SEQ ID NO: 3441326 - DNA, 25 bp, Homo sapien
caaccagcacagtaacatcacagaa

SEQ ID NO: 3441327 - DNA, 25 bp, Homo sapien
tagccacccatgtggaaaatctatg

SEQ ID NO: 3441328 - DNA, 25 bp, Homo sapien
gattgaacttacacgttactaataa

SEQ ID NO: 3441329 - DNA, 25 bp, Homo sapien
aacataatgtactcagggtaaccaa

SEQ ID NO: 3441330 - DNA, 25 bp, Homo sapien
agaaagattacttccagcttggaga

SEQ ID NO: 3441331 - DNA, 25 bp, Homo sapien
aataccctaagaagtacagctgaag

SEQ ID NO: 3441332 - DNA, 25 bp, Homo sapien
tctaacctggacaaaaccgtgagac

SEQ ID NO: 3441333 - DNA, 25 bp, Homo sapien
cctattacgtgtataaggctggaac

SEQ ID NO: 3441334 - DNA, 25 bp, Homo sapien
ttccatggactcaaaatactgactc

SEQ ID NO: 3441335 - DNA, 25 bp, Homo sapien
aaagaataagccattttgcaaagga

SEQ ID NO: 3441336 - DNA, 25 bp, Homo sapien
aagaataagccattttgcaaaggat

SEQ ID NO: 3441337 - DNA, 25 bp, Homo sapien
ctaaagaataagccattttgcaaag

SEQ ID NO: 3441338 - DNA, 25 bp, Homo sapien
taaagaataagccattttgcaaagg

SEQ ID NO: 3441339 - DNA, 25 bp, Homo sapien
tgtttttgctcactaaagtttttca

SEQ ID NO: 3441340 - DNA, 25 bp, Homo sapien
gataaaacatctatgtttttgctca

SEQ ID NO: 3441341 - DNA, 25 bp, Homo sapien
atctatgtttttgctcactaaagtt

SEQ ID NO: 3441342 - DNA, 25 bp, Homo sapien
gaatagttaaagataaaacatctat

SEQ ID NO: 3441343 - DNA, 25 bp, Homo sapien
ggaccctctgaaccactcttgtaga

SEQ ID NO: 3441344 - DNA, 25 bp, Homo sapien
aggactggaccctctgaaccactct

SEQ ID NO: 3441345 - DNA, 25 bp, Homo sapien
gactggaccctctgaaccactcttg

SEQ ID NO: 3441346 - DNA, 25 bp, Homo sapien
aggagcaggactggaccctctgaac

SEQ ID NO: 3441347 - DNA, 25 bp, Homo sapien
aataatccccgctgccaggaacaaa

SEQ ID NO: 3441348 - DNA, 25 bp, Homo sapien
tctggctccaggtacctagtgctgc

SEQ ID NO: 3441349 - DNA, 25 bp, Homo sapien
cactcagggcacataacattgctgc

SEQ ID NO: 3441350 - DNA, 25 bp, Homo sapien
gatgcatatctgcttgacacacaca

SEQ ID NO: 3441351 - DNA, 25 bp, Homo sapien
tagagtaagagaaaaaagtagcaaa

SEQ ID NO: 3441352 - DNA, 25 bp, Homo sapien
ctagagtaagagaaaaaagtagcaa

SEQ ID NO: 3441353 - DNA, 25 bp, Homo sapien
gagtaagagaaaaaagtagcaaaca

SEQ ID NO: 3441354 - DNA, 25 bp, Homo sapien
cagagcctggtacttatggacaagt

SEQ ID NO: 3441355 - DNA, 25 bp, Homo sapien
tgtggctagcccaaacggagatgtg

SEQ ID NO: 3441356 - DNA, 25 bp, Homo sapien
caatatgtgctaggcataataagcc

SEQ ID NO: 3441357 - DNA, 25 bp, Homo sapien
aaaatgacatacgtggtttgcactc

SEQ ID NO: 3441358 - DNA, 25 bp, Homo sapien
cctattgcctgaaacagtggtactc

SEQ ID NO: 3441359 - DNA, 25 bp, Homo sapien
gttttcctatattatcattgcctgg

SEQ ID NO: 3441360 - DNA, 25 bp, Homo sapien
cactatgccccacttctgtatctat

SEQ ID NO: 3441361 - DNA, 25 bp, Homo sapien
taactcaccagaactttacagtgtg

SEQ ID NO: 3441362 - DNA, 25 bp, Homo sapien
caagctgtataagaagtacggcacc

SEQ ID NO: 3441363 - DNA, 25 bp, Homo sapien
tcatctattcctagtggccaagagt

SEQ ID NO: 3441364 - DNA, 25 bp, Homo sapien
tttcaactgagatttagagtggcca

SEQ ID NO: 3441365 - DNA, 25 bp, Homo sapien
catcaagtgaggtaagaggtgaatc

SEQ ID NO: 3441366 - DNA, 25 bp, Homo sapien
cacgcaaccactgccagcagatggg

SEQ ID NO: 3441367 - DNA, 25 bp, Homo sapien
tttggctaagtttaagaaggcctgc

SEQ ID NO: 3441368 - DNA, 25 bp, Homo sapien
gctaattaatagtaaggtagtccca

SEQ ID NO: 3441369 - DNA, 25 bp, Homo sapien
aatctaggtactgtgatcattcacc

SEQ ID NO: 3441370 - DNA, 25 bp, Homo sapien
gaaagagtccttcctcatagccacc

SEQ ID NO: 3441371 - DNA, 25 bp, Homo sapien
cacggcaaatactgtctgaatactg

SEQ ID NO: 3441372 - DNA, 25 bp, Homo sapien
ccttctagctcagtatgtgtcatgc

SEQ ID NO: 3441373 - DNA, 25 bp, Homo sapien
tctgagtcttacctcaggaccacgg

SEQ ID NO: 3441374 - DNA, 25 bp, Homo sapien
ctagacagtcttgagtttgtgaata

SEQ ID NO: 3441375 - DNA, 25 bp, Homo sapien
tgtgaatattgatcagtgactgggc

SEQ ID NO: 3441376 - DNA, 25 bp, Homo sapien
aattcttacttctgcctcatcaaat

SEQ ID NO: 3441377 - DNA, 25 bp, Homo sapien
tgcttccagatgtactggagttcca

SEQ ID NO: 3441378 - DNA, 25 bp, Homo sapien
cacacaccactacacttagtcaatt

SEQ ID NO: 3441379 - DNA, 25 bp, Homo sapien
cacaccactacacttagtcaatttt

SEQ ID NO: 3441380 - DNA, 25 bp, Homo sapien
acacaccactacacttagtcaattt

SEQ ID NO: 3441381 - DNA, 25 bp, Homo sapien
tatcatccttttagtattatacaag

SEQ ID NO: 3441382 - DNA, 25 bp, Homo sapien
cagtgatgaaagtgagtatccttgc

SEQ ID NO: 3441383 - DNA, 25 bp, Homo sapien
agtgatgaaagtgagtatccttgcc

SEQ ID NO: 3441384 - DNA, 25 bp, Homo sapien
ttttagtattatacaagctgtgggt

SEQ ID NO: 3441385 - DNA, 25 bp, Homo sapien
gatccaaagctacaatcctacactg

SEQ ID NO: 3441386 - DNA, 25 bp, Homo sapien
caaagctacaatcctacactgaact

SEQ ID NO: 3441387 - DNA, 25 bp, Homo sapien
catgacttcgcagatccaaagctac

SEQ ID NO: 3441388 - DNA, 25 bp, Homo sapien
gctacaatcctacactgaactctac

SEQ ID NO: 3441389 - DNA, 25 bp, Homo sapien
tgtttctgcagacagatcttcagga

SEQ ID NO: 3441390 - DNA, 25 bp, Homo sapien
cattgtttctgcagacagatcttca

SEQ ID NO: 3441391 - DNA, 25 bp, Homo sapien
ttgccattgtttctgcagacagatc

SEQ ID NO: 3441392 - DNA, 25 bp, Homo sapien
tttctgcagacagatcttcaggatt

SEQ ID NO: 3441393 - DNA, 25 bp, Homo sapien
catcgtgtctgagcttaagaaaggc

SEQ ID NO: 3441394 - DNA, 25 bp, Homo sapien
tcatgcacaaaggtagagaggtctg

SEQ ID NO: 3441395 - DNA, 25 bp, Homo sapien
gaaaggcatatttacccaggtagaa

SEQ ID NO: 3441396 - DNA, 25 bp, Homo sapien
tcaagcagagcattcagtcaacaag

SEQ ID NO: 3441397 - DNA, 25 bp, Homo sapien
tcccagttcctttctttggtgtgta

SEQ ID NO: 3441398 - DNA, 25 bp, Homo sapien
cagttcctttctttggtgtgtaaca

SEQ ID NO: 3441399 - DNA, 25 bp, Homo sapien
agttcctttctttggtgtgtaacag

SEQ ID NO: 3441400 - DNA, 25 bp, Homo sapien
ttcctttctttggtgtgtaacagtg

SEQ ID NO: 3441401 - DNA, 25 bp, Homo sapien
ggactgcaatagcaccacccatgct

SEQ ID NO: 3441402 - DNA, 25 bp, Homo sapien
caagaggcttggtaccaggttggat

SEQ ID NO: 3441403 - DNA, 25 bp, Homo sapien
caacatcaatcatgcacagacccaa

SEQ ID NO: 3441404 - DNA, 25 bp, Homo sapien
gaggaaggtccccatacatggcttc

SEQ ID NO: 3441405 - DNA, 25 bp, Homo sapien
gtcaactactatatatctgctcttg

SEQ ID NO: 3441406 - DNA, 25 bp, Homo sapien
gagcatttacacttactgagtcaac

SEQ ID NO: 3441407 - DNA, 25 bp, Homo sapien
tatatatctgctcttgatgacagca

SEQ ID NO: 3441408 - DNA, 25 bp, Homo sapien
ttaacttattctgagcatttacact

SEQ ID NO: 3441409 - DNA, 25 bp, Homo sapien
ttcaatagcattctccagagacttg

SEQ ID NO: 3441410 - DNA, 25 bp, Homo sapien
cagagacttgaaggttttaggacga

SEQ ID NO: 3441411 - DNA, 25 bp, Homo sapien
ggacgaccccgtaagaaattctgca

SEQ ID NO: 3441412 - DNA, 25 bp, Homo sapien
ctattaagtgcatccatagctgtac

SEQ ID NO: 3441413 - DNA, 25 bp, Homo sapien
agatttcgaatctggccactcttca

SEQ ID NO: 3441414 - DNA, 25 bp, Homo sapien
gactccagatttcgaatctggccac

SEQ ID NO: 3441415 - DNA, 25 bp, Homo sapien
cgggcagactccagatttcgaatct

SEQ ID NO: 3441416 - DNA, 25 bp, Homo sapien
agacacgggcagactccagatttcg

SEQ ID NO: 3441417 - DNA, 25 bp, Homo sapien
catagaaagggagcaaccacttcct

SEQ ID NO: 3441418 - DNA, 25 bp, Homo sapien
tcagagatactcatacttacggcct

SEQ ID NO: 3441419 - DNA, 25 bp, Homo sapien
gggcagtctcacaggttattcaaag

SEQ ID NO: 3441420 - DNA, 25 bp, Homo sapien
gaaagttccagctatctatgtgaca

SEQ ID NO: 3441421 - DNA, 25 bp, Homo sapien
tttcctcttgcttatagactcactt

SEQ ID NO: 3441422 - DNA, 25 bp, Homo sapien
tccttccactatagattttgagcct

SEQ ID NO: 3441423 - DNA, 25 bp, Homo sapien
cctcttgcttatagactcacttcct

SEQ ID NO: 3441424 - DNA, 25 bp, Homo sapien
atgattccttccactatagattttg

SEQ ID NO: 3441425 - DNA, 25 bp, Homo sapien
caggattaaaaactagatccctggg

SEQ ID NO: 3441426 - DNA, 25 bp, Homo sapien
ttaaggacctactaagtcctagaca

SEQ ID NO: 3441427 - DNA, 25 bp, Homo sapien
tccaacagtcttgttgtatgggtca

SEQ ID NO: 3441428 - DNA, 25 bp, Homo sapien
gaaggaaactagcacttattaagga

SEQ ID NO: 3441429 - DNA, 25 bp, Homo sapien
ggaataagagcaagttctgagtctc

SEQ ID NO: 3441430 - DNA, 25 bp, Homo sapien
aagagcaagttctgagtctccgagg

SEQ ID NO: 3441431 - DNA, 25 bp, Homo sapien
aataagagcaagttctgagtctccg

SEQ ID NO: 3441432 - DNA, 25 bp, Homo sapien
agcaagttctgagtctccgagggca

SEQ ID NO: 3441433 - DNA, 25 bp, Homo sapien
caagagcagcaatttaggaatggga

SEQ ID NO: 3441434 - DNA, 25 bp, Homo sapien
aaccagccgtcccagtatttttctg

SEQ ID NO: 3441435 - DNA, 25 bp, Homo sapien
taagaaagagattggataagcctcg

SEQ ID NO: 3441436 - DNA, 25 bp, Homo sapien
tgccagttcaattctccaggtgtat

SEQ ID NO: 3441437 - DNA, 25 bp, Homo sapien
aatggtcagatctttatccaatcta

SEQ ID NO: 3441438 - DNA, 25 bp, Homo sapien
caatggtcagatctttatccaatct

SEQ ID NO: 3441439 - DNA, 25 bp, Homo sapien
gatcagctctgatgactagggacgc

SEQ ID NO: 3441440 - DNA, 25 bp, Homo sapien
tacataggctaggactggatctcag

SEQ ID NO: 3441441 - DNA, 25 bp, Homo sapien
tggttcttaccccagttacgcagga

SEQ ID NO: 3441442 - DNA, 25 bp, Homo sapien
ctaaaggatatgagacccagagccc

SEQ ID NO: 3441443 - DNA, 25 bp, Homo sapien
tggccacactggggtaggacctgca

SEQ ID NO: 3441444 - DNA, 25 bp, Homo sapien
ccacactggggtaggacctgcatct

SEQ ID NO: 3441445 - DNA, 25 bp, Homo sapien
tgtcaggggcatcctcatggactgc

SEQ ID NO: 3441446 - DNA, 25 bp, Homo sapien
catggccacactggggtaggacctg

SEQ ID NO: 3441447 - DNA, 25 bp, Homo sapien
cagggagaagttggagagctggtgg

SEQ ID NO: 3441448 - DNA, 25 bp, Homo sapien
acatccagggttattctcacagttg

SEQ ID NO: 3441449 - DNA, 25 bp, Homo sapien
gacatccagggttattctcacagtt

SEQ ID NO: 3441450 - DNA, 25 bp, Homo sapien
tgtgacatccagggttattctcaca

SEQ ID NO: 3441451 - DNA, 25 bp, Homo sapien
cagagtgtcagtagctcctcagcac

SEQ ID NO: 3441452 - DNA, 25 bp, Homo sapien
taagatcttaaccacagggccctgg

SEQ ID NO: 3441453 - DNA, 25 bp, Homo sapien
tagatggttaggctctacggtgccc

SEQ ID NO: 3441454 - DNA, 25 bp, Homo sapien
gaaatgggagagatattccaggcca

SEQ ID NO: 3441455 - DNA, 25 bp, Homo sapien
cggatcaggaaagtggcaacagctt

SEQ ID NO: 3441456 - DNA, 25 bp, Homo sapien
caggaaagtggcaacagcttcagct

SEQ ID NO: 3441457 - DNA, 25 bp, Homo sapien
ggaatccaccgatgggttctgcaaa

SEQ ID NO: 3441458 - DNA, 25 bp, Homo sapien
cactggaatccaccgatgggttctg

SEQ ID NO: 3441459 - DNA, 25 bp, Homo sapien
cagtacagactaggagctggctgag

SEQ ID NO: 3441460 - DNA, 25 bp, Homo sapien
tcctcatgagggttgtgggctctct

SEQ ID NO: 3441461 - DNA, 25 bp, Homo sapien
tctctgaggatcaaaggccttctgc

SEQ ID NO: 3441462 - DNA, 25 bp, Homo sapien
tacctaggatgagagacctggccct

SEQ ID NO: 3441463 - DNA, 25 bp, Homo sapien
tcaaggaatggaggtccctgagcct

SEQ ID NO: 3441464 - DNA, 25 bp, Homo sapien
gaggctttaccctaggcaacgcagg

SEQ ID NO: 3441465 - DNA, 25 bp, Homo sapien
tctaccgggagccagtgtcacatgg

SEQ ID NO: 3441466 - DNA, 25 bp, Homo sapien
caaacctggaagagtacgactggga

SEQ ID NO: 3441467 - DNA, 25 bp, Homo sapien
agaagctgtaggtttgaagaggcaa

SEQ ID NO: 3441468 - DNA, 25 bp, Homo sapien
ctgcccttggaaatggcgtgcctgg

SEQ ID NO: 3441469 - DNA, 25 bp, Homo sapien
cctgtggctttgtgcatgggctgta

SEQ ID NO: 3441470 - DNA, 25 bp, Homo sapien
cacctccaggaaccagttatgaaaa

SEQ ID NO: 3441471 - DNA, 25 bp, Homo sapien
ggctacacatcacctaagacagtca

SEQ ID NO: 3441472 - DNA, 25 bp, Homo sapien
ctccggaccatgcagcaggacaggg

SEQ ID NO: 3441473 - DNA, 25 bp, Homo sapien
ccagactccggaccatgcagcagga

SEQ ID NO: 3441474 - DNA, 25 bp, Homo sapien
atcacctaagacagtcacagaaaag

SEQ ID NO: 3441475 - DNA, 25 bp, Homo sapien
ggacgcaggcaggagttattgctta

SEQ ID NO: 3441476 - DNA, 25 bp, Homo sapien
aatggaacagaattttgatacacac

SEQ ID NO: 3441477 - DNA, 25 bp, Homo sapien
tattgtaggattccacctatgagct

SEQ ID NO: 3441478 - DNA, 25 bp, Homo sapien
tagtggtgtggtccacagccttgtg

SEQ ID NO: 3441479 - DNA, 25 bp, Homo sapien
tcacactgacaaggtgcatactcag

SEQ ID NO: 3441480 - DNA, 25 bp, Homo sapien
actgacaaggtgcatactcagtgcc

SEQ ID NO: 3441481 - DNA, 25 bp, Homo sapien
cacactgacaaggtgcatactcagt

SEQ ID NO: 3441482 - DNA, 25 bp, Homo sapien
cactgacaaggtgcatactcagtgc

SEQ ID NO: 3441483 - DNA, 25 bp, Homo sapien
tccccttaaatcaggtctcactctg

SEQ ID NO: 3441484 - DNA, 25 bp, Homo sapien
gagggagatgcttcctaactcaggt

SEQ ID NO: 3441485 - DNA, 25 bp, Homo sapien
tgcccagccagtaggtcacagaatt

SEQ ID NO: 3441486 - DNA, 25 bp, Homo sapien
taactcaggtatctgcttggaaatg

SEQ ID NO: 3441487 - DNA, 25 bp, Homo sapien
tctctcgggagtttcttctctacag

SEQ ID NO: 3441488 - DNA, 25 bp, Homo sapien
gatatcctcagtgaagttaatgctt

SEQ ID NO: 3441489 - DNA, 25 bp, Homo sapien
ctgttcctttcagtgagccttatta

SEQ ID NO: 3441490 - DNA, 25 bp, Homo sapien
ggaaatgtttcgtgtgccctcagcc

SEQ ID NO: 3441491 - DNA, 25 bp, Homo sapien
cacgacgagtgggagcgaccgaggg

SEQ ID NO: 3441492 - DNA, 25 bp, Homo sapien
gcgcggctgcgggacctgactaggt

SEQ ID NO: 3441493 - DNA, 25 bp, Homo sapien
tgagggcacgacgagtgggagcgac

SEQ ID NO: 3441494 - DNA, 25 bp, Homo sapien
actaggtgagggcacgacgagtggg

SEQ ID NO: 3441495 - DNA, 25 bp, Homo sapien
ccttcccagggtcgcgatttagtgg

SEQ ID NO: 3441496 - DNA, 25 bp, Homo sapien
caatttcccctagtgtgatgggcac

SEQ ID NO: 3441497 - DNA, 25 bp, Homo sapien
ggagactgatgttgcaggaagcccc

SEQ ID NO: 3441498 - DNA, 25 bp, Homo sapien
gatgggcacagtggaaacaccttcc

SEQ ID NO: 3441499 - DNA, 25 bp, Homo sapien
tcctgacacagtcctacttatcctt

SEQ ID NO: 3441500 - DNA, 25 bp, Homo sapien
cctacttatccttcagatggctcag

SEQ ID NO: 3441501 - DNA, 25 bp, Homo sapien
gtcctcttgccgctctttgcctgcg

SEQ ID NO: 3441502 - DNA, 25 bp, Homo sapien
tggctcagatgtcacgctctctgtg

SEQ ID NO: 3441503 - DNA, 25 bp, Homo sapien
ctggactatgcagttccttcctgtc

SEQ ID NO: 3441504 - DNA, 25 bp, Homo sapien
caagtctcactatcccaggagaggg

SEQ ID NO: 3441505 - DNA, 25 bp, Homo sapien
caagttgactgggtgctggctaatt

SEQ ID NO: 3441506 - DNA, 25 bp, Homo sapien
gcggctcttgactataccctttgga

SEQ ID NO: 3441507 - DNA, 25 bp, Homo sapien
gggcttctgtgggatctcactctta

SEQ ID NO: 3441508 - DNA, 25 bp, Homo sapien
tatgtgacattatggatgttgttct

SEQ ID NO: 3441509 - DNA, 25 bp, Homo sapien
caggtttgtatgtgacattatggat

SEQ ID NO: 3441510 - DNA, 25 bp, Homo sapien
tcttgcaattatgtcatcaggcttg

SEQ ID NO: 3441511 - DNA, 25 bp, Homo sapien
ggatcttgtggttcacatcaggttt

SEQ ID NO: 3441512 - DNA, 25 bp, Homo sapien
catttgtgctaagcccaggtgagtt

SEQ ID NO: 3441513 - DNA, 25 bp, Homo sapien
gagtttattcatgggtctgaggcca

SEQ ID NO: 3441514 - DNA, 25 bp, Homo sapien
gaataacttccgctgggatggctca

SEQ ID NO: 3441515 - DNA, 25 bp, Homo sapien
gcaggctagctcaggtcatttcata

SEQ ID NO: 3441516 - DNA, 25 bp, Homo sapien
gtagcagtagttcaaaattgtgccc

SEQ ID NO: 3441517 - DNA, 25 bp, Homo sapien
caccagggtgtattataagtactgc

SEQ ID NO: 3441518 - DNA, 25 bp, Homo sapien
aagagccactcaagcaagactctgc

SEQ ID NO: 3441519 - DNA, 25 bp, Homo sapien
gaggccttgttgttctaggctagaa

SEQ ID NO: 3441520 - DNA, 25 bp, Homo sapien
tcatatccataccacctagttcagt

SEQ ID NO: 3441521 - DNA, 25 bp, Homo sapien
ttgactaaaaaggaccacctgatgc

SEQ ID NO: 3441522 - DNA, 25 bp, Homo sapien
taatgccaaactaaactgacctgaa

SEQ ID NO: 3441523 - DNA, 25 bp, Homo sapien
tgctcagtcccgagagtaggaatcg

SEQ ID NO: 3441524 - DNA, 25 bp, Homo sapien
catgagtctgtctgagcatgatact

SEQ ID NO: 3441525 - DNA, 25 bp, Homo sapien
tcctgaagtgtatcgattgagggaa

SEQ ID NO: 3441526 - DNA, 25 bp, Homo sapien
caacggctcattcatagttactaaa

SEQ ID NO: 3441527 - DNA, 25 bp, Homo sapien
gatgtagtaggtgcacatttgccta

SEQ ID NO: 3441528 - DNA, 25 bp, Homo sapien
gggtctttcattaccacacagttcg

SEQ ID NO: 3441529 - DNA, 25 bp, Homo sapien
ttgggtctttcattaccacacagtt

SEQ ID NO: 3441530 - DNA, 25 bp, Homo sapien
gtctttcattaccacacagttcgtg

SEQ ID NO: 3441531 - DNA, 25 bp, Homo sapien
ttacagtcgcttcatttttttccca

SEQ ID NO: 3441532 - DNA, 25 bp, Homo sapien
tcctgccactgcctcggtcagtcat

SEQ ID NO: 3441533 - DNA, 25 bp, Homo sapien
agacaaagccccttttcctgccact

SEQ ID NO: 3441534 - DNA, 25 bp, Homo sapien
catggtcatcaaaggttacaaagac

SEQ ID NO: 3441535 - DNA, 25 bp, Homo sapien
agtcttatccacagagtcatggtca

SEQ ID NO: 3441536 - DNA, 25 bp, Homo sapien
ccaaagtttccagagccacttcgac

SEQ ID NO: 3441537 - DNA, 25 bp, Homo sapien
ccaccaaagtttccagagccacttc

SEQ ID NO: 3441538 - DNA, 25 bp, Homo sapien
tccacaaccaaagttgtccttccca

SEQ ID NO: 3441539 - DNA, 25 bp, Homo sapien
tcctccacaaccaaagttgtccttc

SEQ ID NO: 3441540 - DNA, 25 bp, Homo sapien
agagccgggcggcaacatctgcatc

SEQ ID NO: 3441541 - DNA, 25 bp, Homo sapien
gctccttcggactgccagagccggg

SEQ ID NO: 3441542 - DNA, 25 bp, Homo sapien
ctcaattgtaacctcccttcctctt

SEQ ID NO: 3441543 - DNA, 25 bp, Homo sapien
tatgcgtggggttgctccttcggac

SEQ ID NO: 3441544 - DNA, 25 bp, Homo sapien
tctgtaattccatagtattatctat

SEQ ID NO: 3441545 - DNA, 25 bp, Homo sapien
tatctatgaaaagcacttatcaggg

SEQ ID NO: 3441546 - DNA, 25 bp, Homo sapien
gtctggattaagtgcccctcctctg

SEQ ID NO: 3441547 - DNA, 25 bp, Homo sapien
tatgcccctcccagtctggattaag

SEQ ID NO: 3441548 - DNA, 25 bp, Homo sapien
agcagattcaatttccctttgtcta

SEQ ID NO: 3441549 - DNA, 25 bp, Homo sapien
gttccagcagattcaatttcccttt

SEQ ID NO: 3441550 - DNA, 25 bp, Homo sapien
ccagcagattcaatttccctttgtc

SEQ ID NO: 3441551 - DNA, 25 bp, Homo sapien
tccagcagattcaatttccctttgt

SEQ ID NO: 3441552 - DNA, 25 bp, Homo sapien
gaattgggactgatctaaggcactc

SEQ ID NO: 3441553 - DNA, 25 bp, Homo sapien
gtcacagtgcattcaggagcttagg

SEQ ID NO: 3441554 - DNA, 25 bp, Homo sapien
cttaggatagtgtgggctctctctc

SEQ ID NO: 3441555 - DNA, 25 bp, Homo sapien
taggtagaaagcgtccaaggacctc

SEQ ID NO: 3441556 - DNA, 25 bp, Homo sapien
gctactgccataggcaaacttcatc

SEQ ID NO: 3441557 - DNA, 25 bp, Homo sapien
tcaccagcatcaaacactgcctttg

SEQ ID NO: 3441558 - DNA, 25 bp, Homo sapien
ctgtgctactgccataggcaaactt

SEQ ID NO: 3441559 - DNA, 25 bp, Homo sapien
tgtgctactgccataggcaaacttc

SEQ ID NO: 3441560 - DNA, 25 bp, Homo sapien
atttatttctctcgttgagctcaga

SEQ ID NO: 3441561 - DNA, 25 bp, Homo sapien
ttatttctctcgttgagctcagaaa

SEQ ID NO: 3441562 - DNA, 25 bp, Homo sapien
tttatttctctcgttgagctcagaa

SEQ ID NO: 3441563 - DNA, 25 bp, Homo sapien
gtacccattgaaacatgcgtatttg

SEQ ID NO: 3441564 - DNA, 25 bp, Homo sapien
tatttgactgacttgaccgtaagta

SEQ ID NO: 3441565 - DNA, 25 bp, Homo sapien
cagttatctctgaggaattgggtta

SEQ ID NO: 3441566 - DNA, 25 bp, Homo sapien
tttgtgtatagcagaactctgaaat

SEQ ID NO: 3441567 - DNA, 25 bp, Homo sapien
gacaggtacatggtccagtaggaag

SEQ ID NO: 3441568 - DNA, 25 bp, Homo sapien
tatatggttccagctaatacatgca

SEQ ID NO: 3441569 - DNA, 25 bp, Homo sapien
tgatgtatgatcttaggctggacac

SEQ ID NO: 3441570 - DNA, 25 bp, Homo sapien
ctctaaggctctatcagttctgaca

SEQ ID NO: 3441571 - DNA, 25 bp, Homo sapien
cgctcccgtgaagaaagcagggcaa

SEQ ID NO: 3441572 - DNA, 25 bp, Homo sapien
gcccatttgggcctgcatagtgcca

SEQ ID NO: 3441573 - DNA, 25 bp, Homo sapien
catagtgccatgattggaacccagg

SEQ ID NO: 3441574 - DNA, 25 bp, Homo sapien
tgtgctacacaggagtggatccagg

SEQ ID NO: 3441575 - DNA, 25 bp, Homo sapien
agacactgaagacgctcattctgaa

SEQ ID NO: 3441576 - DNA, 25 bp, Homo sapien
gaagacgctcattctgaaagagtag

SEQ ID NO: 3441577 - DNA, 25 bp, Homo sapien
tccagacactgaagacgctcattct

SEQ ID NO: 3441578 - DNA, 25 bp, Homo sapien
cactgaagacgctcattctgaaaga

SEQ ID NO: 3441579 - DNA, 25 bp, Homo sapien
atttaattctctcttttgtcgctgg

SEQ ID NO: 3441580 - DNA, 25 bp, Homo sapien
tttaattctctcttttgtcgctggc

SEQ ID NO: 3441581 - DNA, 25 bp, Homo sapien
ttaattctctcttttgtcgctggcg

SEQ ID NO: 3441582 - DNA, 25 bp, Homo sapien
gcctttgttttccacggtgtagcac

SEQ ID NO: 3441583 - DNA, 25 bp, Homo sapien
acggtggagattaggcctcgttttg

SEQ ID NO: 3441584 - DNA, 25 bp, Homo sapien
gggcatacttctcagtacaaatcct

SEQ ID NO: 3441585 - DNA, 25 bp, Homo sapien
caatggcctggacggtggagattag

SEQ ID NO: 3441586 - DNA, 25 bp, Homo sapien
ctagggattctccaaatgctccatc

SEQ ID NO: 3441587 - DNA, 25 bp, Homo sapien
ttctccaaatgctccatcagggtat

SEQ ID NO: 3441588 - DNA, 25 bp, Homo sapien
ctctccccaggtgatgcgtttgttc

SEQ ID NO: 3441589 - DNA, 25 bp, Homo sapien
tgctccatcagggtatcctctcccc

SEQ ID NO: 3441590 - DNA, 25 bp, Homo sapien
agctagaaccaagtagaatctgttt

SEQ ID NO: 3441591 - DNA, 25 bp, Homo sapien
ttcagctagaaccaagtagaatctg

SEQ ID NO: 3441592 - DNA, 25 bp, Homo sapien
tcagctagaaccaagtagaatctgt

SEQ ID NO: 3441593 - DNA, 25 bp, Homo sapien
cttcagctagaaccaagtagaatct

SEQ ID NO: 3441594 - DNA, 25 bp, Homo sapien
acctcttgcaggcaaaggaaagcag

SEQ ID NO: 3441595 - DNA, 25 bp, Homo sapien
ttcaggacatcaaagaagtcaggca

SEQ ID NO: 3441596 - DNA, 25 bp, Homo sapien
aggcaaaactcatcttgacacctct

SEQ ID NO: 3441597 - DNA, 25 bp, Homo sapien
cagaaagttcaggacatcaaagaag

SEQ ID NO: 3441598 - DNA, 25 bp, Homo sapien
ccgcgcttttggtcctgggatcaca

SEQ ID NO: 3441599 - DNA, 25 bp, Homo sapien
tgaatgaaccgatgagtctggcccc

SEQ ID NO: 3441600 - DNA, 25 bp, Homo sapien
tgtatcaagcgcctatggcagggcc

SEQ ID NO: 3441601 - DNA, 25 bp, Homo sapien
ttttaacacgcacctgggagctgcg

SEQ ID NO: 3441602 - DNA, 25 bp, Homo sapien
tgttttgactgcaactcacataagg

SEQ ID NO: 3441603 - DNA, 25 bp, Homo sapien
gatttttatattacggatgctcagc

SEQ ID NO: 3441604 - DNA, 25 bp, Homo sapien
tgcatgaactgggtgttgtgcacct

SEQ ID NO: 3441605 - DNA, 25 bp, Homo sapien
cattgtgggaaacctgttgttggcg

SEQ ID NO: 3441606 - DNA, 25 bp, Homo sapien
accaagaagtgggtcctgtagagag

SEQ ID NO: 3441607 - DNA, 25 bp, Homo sapien
tctgttgcttcatgaccagcagatg

SEQ ID NO: 3441608 - DNA, 25 bp, Homo sapien
caccattggacaatgaatgaacaac

SEQ ID NO: 3441609 - DNA, 25 bp, Homo sapien
ttttaccatgtcgtctataggcact

SEQ ID NO: 3441610 - DNA, 25 bp, Homo sapien
ggtgttaacatctccgccacccatg

SEQ ID NO: 3441611 - DNA, 25 bp, Homo sapien
gccagcacagtagtgtcaccagaat

SEQ ID NO: 3441612 - DNA, 25 bp, Homo sapien
tattcaggttaagtaagccagcaca

SEQ ID NO: 3441613 - DNA, 25 bp, Homo sapien
cacaatgagatagcttgaggataag

SEQ ID NO: 3441614 - DNA, 25 bp, Homo sapien
tattccagctatgcaaagctagtca

SEQ ID NO: 3441615 - DNA, 25 bp, Homo sapien
aagttttagtcagtgctctaaggca

SEQ ID NO: 3441616 - DNA, 25 bp, Homo sapien
caggcaatatccctcataaacttag

SEQ ID NO: 3441617 - DNA, 25 bp, Homo sapien
tcccttctactcaaatcaggcaaag

SEQ ID NO: 3441618 - DNA, 25 bp, Homo sapien
actactgtaggtgtgaacattgcac

SEQ ID NO: 3441619 - DNA, 25 bp, Homo sapien
tgtgaaggcctaaaacattgttgca

SEQ ID NO: 3441620 - DNA, 25 bp, Homo sapien
ggtatatagggcacttaacatggct

SEQ ID NO: 3441621 - DNA, 25 bp, Homo sapien
taacatggctggaagttgtcgtgga

SEQ ID NO: 3441622 - DNA, 25 bp, Homo sapien
taatagtgcctacctattgtgtaat

SEQ ID NO: 3441623 - DNA, 25 bp, Homo sapien
acccttagaacttcctaagtagcag

SEQ ID NO: 3441624 - DNA, 25 bp, Homo sapien
ttgtccctggtttctggtaaagaga

SEQ ID NO: 3441625 - DNA, 25 bp, Homo sapien
taaataacttgactggcctttgtcc

SEQ ID NO: 3441626 - DNA, 25 bp, Homo sapien
caaaaacaccagtgtcatccctgac

SEQ ID NO: 3441627 - DNA, 25 bp, Homo sapien
cttcttcctttcaggcggggaggca

SEQ ID NO: 3441628 - DNA, 25 bp, Homo sapien
tcatggccaaaaacaccagtgtcat

SEQ ID NO: 3441629 - DNA, 25 bp, Homo sapien
ctctcatggccaaaaacaccagtgt

SEQ ID NO: 3441630 - DNA, 25 bp, Homo sapien
gcccggcccatgacttaactctagt

SEQ ID NO: 3441631 - DNA, 25 bp, Homo sapien
gaacatttgagcctctggcgcatcc

SEQ ID NO: 3441632 - DNA, 25 bp, Homo sapien
gaagtggccaaaccacagactcgtt

SEQ ID NO: 3441633 - DNA, 25 bp, Homo sapien
gaccctgtatggcaaacacacctga

SEQ ID NO: 3441634 - DNA, 25 bp, Homo sapien
tcccctggacatggacataggtttg

SEQ ID NO: 3441635 - DNA, 25 bp, Homo sapien
cagcccagagtttagcactgaaagt

SEQ ID NO: 3441636 - DNA, 25 bp, Homo sapien
gagagattatgcaacatgccccgaa

SEQ ID NO: 3441637 - DNA, 25 bp, Homo sapien
tataccctaaggtaaccagcccaga

SEQ ID NO: 3441638 - DNA, 25 bp, Homo sapien
cagggaagaagtattcccacttcac

SEQ ID NO: 3441639 - DNA, 25 bp, Homo sapien
cccacttcaccgtcaacacccaaag

SEQ ID NO: 3441640 - DNA, 25 bp, Homo sapien
gctgaaattctaattaaactactcc

SEQ ID NO: 3441641 - DNA, 25 bp, Homo sapien
aagctgaaattctaattaaactact

SEQ ID NO: 3441642 - DNA, 25 bp, Homo sapien
caatgtcttatcaagtcggattttc

SEQ ID NO: 3441643 - DNA, 25 bp, Homo sapien
tctctgaatccaatgtcttatcaag

SEQ ID NO: 3441644 - DNA, 25 bp, Homo sapien
tatcaagtcggattttcttgtactg

SEQ ID NO: 3441645 - DNA, 25 bp, Homo sapien
gaatccaatgtcttatcaagtcgga

SEQ ID NO: 3441646 - DNA, 25 bp, Homo sapien
ctacgaagattagttggtagcacaa

SEQ ID NO: 3441647 - DNA, 25 bp, Homo sapien
tacgaagattagttggtagcacaaa

SEQ ID NO: 3441648 - DNA, 25 bp, Homo sapien
cctgatttcagtaggaagccaaaat

SEQ ID NO: 3441649 - DNA, 25 bp, Homo sapien
gtcctgatttcagtaggaagccaaa

SEQ ID NO: 3441650 - DNA, 25 bp, Homo sapien
tccttgtgtcctgatttcagtagga

SEQ ID NO: 3441651 - DNA, 25 bp, Homo sapien
tttcagtaggaagccaaaataggct

SEQ ID NO: 3441652 - DNA, 25 bp, Homo sapien
ttcagcaatgtcaaactgcagtagc

SEQ ID NO: 3441653 - DNA, 25 bp, Homo sapien
ttatgtctggaagcttgagagcctc

SEQ ID NO: 3441654 - DNA, 25 bp, Homo sapien
tgctatcacagccacatgtcttcgc

SEQ ID NO: 3441655 - DNA, 25 bp, Homo sapien
aatgtcaaactgcagtagcgccagc

SEQ ID NO: 3441656 - DNA, 25 bp, Homo sapien
tcattcctcacttgttcactgagtt

SEQ ID NO: 3441657 - DNA, 25 bp, Homo sapien
ggttggagacagataagttaacaaa

SEQ ID NO: 3441658 - DNA, 25 bp, Homo sapien
ggtcctcttggacaagtgctcattc

SEQ ID NO: 3441659 - DNA, 25 bp, Homo sapien
tatatatgagatacaatagtataca

SEQ ID NO: 3441660 - DNA, 25 bp, Homo sapien
tttccccggcaacggaggcgacgca

SEQ ID NO: 3441661 - DNA, 25 bp, Homo sapien
cactacggcggccctcgaagggtca

SEQ ID NO: 3441662 - DNA, 25 bp, Homo sapien
cagctcccgccggcgggaaacgtct

SEQ ID NO: 3441663 - DNA, 25 bp, Homo sapien
tctaacccctctctcaatcacagcc

SEQ ID NO: 3441664 - DNA, 25 bp, Homo sapien
tgttttggtccgtgacgaactcgtc

SEQ ID NO: 3441665 - DNA, 25 bp, Homo sapien
tttccagataaagctggtccgccat

SEQ ID NO: 3441666 - DNA, 25 bp, Homo sapien
gatcttgttttggtccgtgacgaac

SEQ ID NO: 3441667 - DNA, 25 bp, Homo sapien
gacgaactcgtctatattttccaga

SEQ ID NO: 3441668 - DNA, 25 bp, Homo sapien
cacaagcagacagagggtcaaggct

SEQ ID NO: 3441669 - DNA, 25 bp, Homo sapien
tggtccccacgaagccacaagcaga

SEQ ID NO: 3441670 - DNA, 25 bp, Homo sapien
gtgtgtgctggaggaccttcccgac

SEQ ID NO: 3441671 - DNA, 25 bp, Homo sapien
ccaagggacgcggacttccgtgtgt

SEQ ID NO: 3441672 - DNA, 25 bp, Homo sapien
taacatgaacccctagtgtatagct

SEQ ID NO: 3441673 - DNA, 25 bp, Homo sapien
gcctggttaacatgaacccctagtg

SEQ ID NO: 3441674 - DNA, 25 bp, Homo sapien
tgtttggcctggttaacatgaaccc

SEQ ID NO: 3441675 - DNA, 25 bp, Homo sapien
cctagtgtatagctcagccatttgt

SEQ ID NO: 3441676 - DNA, 25 bp, Homo sapien
ctgccagacaccaagtaggtaacat

SEQ ID NO: 3441677 - DNA, 25 bp, Homo sapien
ttctgaatgagactgccagacacca

SEQ ID NO: 3441678 - DNA, 25 bp, Homo sapien
caagtaggtaacatgcagttgggct

SEQ ID NO: 3441679 - DNA, 25 bp, Homo sapien
catgcagttgggctcctgaattttc

SEQ ID NO: 3441680 - DNA, 25 bp, Homo sapien
tgttgccagatgaccagataccagg

SEQ ID NO: 3441681 - DNA, 25 bp, Homo sapien
tgccagatgaccagataccaggtgg

SEQ ID NO: 3441682 - DNA, 25 bp, Homo sapien
tgtgttgccagatgaccagatacca

SEQ ID NO: 3441683 - DNA, 25 bp, Homo sapien
ccagatgaccagataccaggtggga

SEQ ID NO: 3441684 - DNA, 25 bp, Homo sapien
agtcaggatgatgaaatccagcagt

SEQ ID NO: 3441685 - DNA, 25 bp, Homo sapien
tatcttctctcactactgcaacctt

SEQ ID NO: 3441686 - DNA, 25 bp, Homo sapien
ttatcttctctcactactgcaacct

SEQ ID NO: 3441687 - DNA, 25 bp, Homo sapien
cactgtcctttagcatggctttctg

SEQ ID NO: 3441688 - DNA, 25 bp, Homo sapien
gcagtcacagctagcttggacttca

SEQ ID NO: 3441689 - DNA, 25 bp, Homo sapien
tgtacacatggatgctggcagtcac

SEQ ID NO: 3441690 - DNA, 25 bp, Homo sapien
gatgtcatagtcagtattgaacaga

SEQ ID NO: 3441691 - DNA, 25 bp, Homo sapien
cagctgcacattgtatagcactaaa

SEQ ID NO: 3441692 - DNA, 25 bp, Homo sapien
ttttggaagacgaagaggattcagc

SEQ ID NO: 3441693 - DNA, 25 bp, Homo sapien
ggcttgtgtctcacttgacatgtga

SEQ ID NO: 3441694 - DNA, 25 bp, Homo sapien
aaacctgcttggatgcaggtgggcc

SEQ ID NO: 3441695 - DNA, 25 bp, Homo sapien
aaaaaagttgctcatcatattccct

SEQ ID NO: 3441696 - DNA, 25 bp, Homo sapien
caaaaaagttgctcatcatattccc

SEQ ID NO: 3441697 - DNA, 25 bp, Homo sapien
tcaaagtgaggtaagaacatgctta

SEQ ID NO: 3441698 - DNA, 25 bp, Homo sapien
caaagtgaggtaagaacatgcttac

SEQ ID NO: 3441699 - DNA, 25 bp, Homo sapien
aagtatagcagacgacatatgaccc

SEQ ID NO: 3441700 - DNA, 25 bp, Homo sapien
tatagcagacgacatatgaccccat

SEQ ID NO: 3441701 - DNA, 25 bp, Homo sapien
ataaagtatagcagacgacatatga

SEQ ID NO: 3441702 - DNA, 25 bp, Homo sapien
gtatagcagacgacatatgacccca

SEQ ID NO: 3441703 - DNA, 25 bp, Homo sapien
tgacagacactgtaggctgctccac

SEQ ID NO: 3441704 - DNA, 25 bp, Homo sapien
tgcagcaccttaacaggctctgctt

SEQ ID NO: 3441705 - DNA, 25 bp, Homo sapien
ggagttgccagctttggttccgtga

SEQ ID NO: 3441706 - DNA, 25 bp, Homo sapien
ggctctgcttttttgctggattttt

SEQ ID NO: 3441707 - DNA, 25 bp, Homo sapien
ttgaaagctaagacccaaacacaca

SEQ ID NO: 3441708 - DNA, 25 bp, Homo sapien
gttgaaagctaagacccaaacacac

SEQ ID NO: 3441709 - DNA, 25 bp, Homo sapien
tgttgaaagctaagacccaaacaca

SEQ ID NO: 3441710 - DNA, 25 bp, Homo sapien
tgaaagctaagacccaaacacacat

SEQ ID NO: 3441711 - DNA, 25 bp, Homo sapien
tcctcatgcaaccaacaagtaattt

SEQ ID NO: 3441712 - DNA, 25 bp, Homo sapien
caactgcggtcatggatcacttaat

SEQ ID NO: 3441713 - DNA, 25 bp, Homo sapien
gctcctctggatgaatggatactcc

SEQ ID NO: 3441714 - DNA, 25 bp, Homo sapien
agtacaggttctacaaactcgaaga

SEQ ID NO: 3441715 - DNA, 25 bp, Homo sapien
gactgctggaagctacaaccaggtt

SEQ ID NO: 3441716 - DNA, 25 bp, Homo sapien
taaggatactctgctaactgaccac

SEQ ID NO: 3441717 - DNA, 25 bp, Homo sapien
gaaataaattaagcgtgttacacag

SEQ ID NO: 3441718 - DNA, 25 bp, Homo sapien
gacggccaaatagtccaagaaggac

SEQ ID NO: 3441719 - DNA, 25 bp, Homo sapien
atcagataatgctactcgcttcccc

SEQ ID NO: 3441720 - DNA, 25 bp, Homo sapien
catcatcagataatgctactcgctt

SEQ ID NO: 3441721 - DNA, 25 bp, Homo sapien
ctcatcatcagataatgctactcgc

SEQ ID NO: 3441722 - DNA, 25 bp, Homo sapien
tcatcagataatgctactcgcttcc

SEQ ID NO: 3441723 - DNA, 25 bp, Homo sapien
cagaatcttacaagtttgtcctttg

SEQ ID NO: 3441724 - DNA, 25 bp, Homo sapien
gcagaatcttacaagtttcagaatc

SEQ ID NO: 3441725 - DNA, 25 bp, Homo sapien
ttcagaatcttacaagtttgtcctt

SEQ ID NO: 3441726 - DNA, 25 bp, Homo sapien
aaaagcagaatcttacaagtttcag

SEQ ID NO: 3441727 - DNA, 25 bp, Homo sapien
agttgagctaatatccttttttcgg

SEQ ID NO: 3441728 - DNA, 25 bp, Homo sapien
gagctaatatccttttttcggaagc

SEQ ID NO: 3441729 - DNA, 25 bp, Homo sapien
ttgtatagttgagctaatatccttt

SEQ ID NO: 3441730 - DNA, 25 bp, Homo sapien
tgtatagttgagctaatatcctttt

SEQ ID NO: 3441731 - DNA, 25 bp, Homo sapien
tctctgggatgctcacgtgtcttac

SEQ ID NO: 3441732 - DNA, 25 bp, Homo sapien
gagtgctcaaccaaccatagtcatt

SEQ ID NO: 3441733 - DNA, 25 bp, Homo sapien
gaagactgttccaattagcacctat

SEQ ID NO: 3441734 - DNA, 25 bp, Homo sapien
gaaggacattgtacctctcacagga

SEQ ID NO: 3441735 - DNA, 25 bp, Homo sapien
ctttggcactggttcaagaggtgga

SEQ ID NO: 3441736 - DNA, 25 bp, Homo sapien
gatggtgactcagcttcataagccc

SEQ ID NO: 3441737 - DNA, 25 bp, Homo sapien
gaggttcaggctcagtctttggcac

SEQ ID NO: 3441738 - DNA, 25 bp, Homo sapien
tcataagccccaggagagtctggaa

SEQ ID NO: 3441739 - DNA, 25 bp, Homo sapien
catccaggtaagttttagattttag

SEQ ID NO: 3441740 - DNA, 25 bp, Homo sapien
tattcgttcagcaattagaccccag

SEQ ID NO: 3441741 - DNA, 25 bp, Homo sapien
ctattcgttcagcaattagacccca

SEQ ID NO: 3441742 - DNA, 25 bp, Homo sapien
caattagaccccagaacaccacctc

SEQ ID NO: 3441743 - DNA, 25 bp, Homo sapien
ggtctgtgtactgaggatgtcttca

SEQ ID NO: 3441744 - DNA, 25 bp, Homo sapien
cttcatgttaagctcctcttcacta

SEQ ID NO: 3441745 - DNA, 25 bp, Homo sapien
tcttcactatctgtgcaggattcac

SEQ ID NO: 3441746 - DNA, 25 bp, Homo sapien
gattcactctcgtagactttttcag

SEQ ID NO: 3441747 - DNA, 25 bp, Homo sapien
ttatttcctctggaagaagccagta

SEQ ID NO: 3441748 - DNA, 25 bp, Homo sapien
tctggaagaagccagtaatggacac

SEQ ID NO: 3441749 - DNA, 25 bp, Homo sapien
cctctggaagaagccagtaatggac

SEQ ID NO: 3441750 - DNA, 25 bp, Homo sapien
ttcctctggaagaagccagtaatgg

SEQ ID NO: 3441751 - DNA, 25 bp, Homo sapien
aattcagttttagtcgagaccccag

SEQ ID NO: 3441752 - DNA, 25 bp, Homo sapien
gacttacagagaacagcctcaggag

SEQ ID NO: 3441753 - DNA, 25 bp, Homo sapien
gggatcaacaaaccgcaaagagcag

SEQ ID NO: 3441754 - DNA, 25 bp, Homo sapien
taattcctgtgccatatgcggacca

SEQ ID NO: 3441755 - DNA, 25 bp, Homo sapien
aacttgaggctgtgaaacttgccca

SEQ ID NO: 3441756 - DNA, 25 bp, Homo sapien
catacagctagcaagtgatgaagcc

SEQ ID NO: 3441757 - DNA, 25 bp, Homo sapien
catctcagactgtgggtatgcagtt

SEQ ID NO: 3441758 - DNA, 25 bp, Homo sapien
ggctgaaactaacatttccccagtg

SEQ ID NO: 3441759 - DNA, 25 bp, Homo sapien
gacaagggaaaacactcctatcagg

SEQ ID NO: 3441760 - DNA, 25 bp, Homo sapien
catatagaacacaactaagagggac

SEQ ID NO: 3441761 - DNA, 25 bp, Homo sapien
tctgcaaaatgtgggagagaccttg

SEQ ID NO: 3441762 - DNA, 25 bp, Homo sapien
gagatgctggccatactagctcaac

SEQ ID NO: 3441763 - DNA, 25 bp, Homo sapien
tctgactctactgagatgattgtgt

SEQ ID NO: 3441764 - DNA, 25 bp, Homo sapien
acccagctctttctgactctactga

SEQ ID NO: 3441765 - DNA, 25 bp, Homo sapien
gataaatccctcttgcttatggtgc

SEQ ID NO: 3441766 - DNA, 25 bp, Homo sapien
aaatccctcttgcttatggtgcaaa

SEQ ID NO: 3441767 - DNA, 25 bp, Homo sapien
gatagtaaggtcagctgcccaacgt

SEQ ID NO: 3441768 - DNA, 25 bp, Homo sapien
taaatctgtgcttccgaggcttgag

SEQ ID NO: 3441769 - DNA, 25 bp, Homo sapien
tagtgagtgggactgcatgtccagc

SEQ ID NO: 3441770 - DNA, 25 bp, Homo sapien
tccaaccgctggatgggcatttcca

SEQ ID NO: 3441771 - DNA, 25 bp, Homo sapien
tgtcctgatactaactcaccctggg

SEQ ID NO: 3441772 - DNA, 25 bp, Homo sapien
cagtttggctcaggctaagtgatcc

SEQ ID NO: 3441773 - DNA, 25 bp, Homo sapien
ggctggctgctctatgaatgctgtc

SEQ ID NO: 3441774 - DNA, 25 bp, Homo sapien
gaatgctgtccttcgtgcataagaa

SEQ ID NO: 3441775 - DNA, 25 bp, Homo sapien
caggcatgagcaccgcgcccatgtg

SEQ ID NO: 3441776 - DNA, 25 bp, Homo sapien
aggcatgagcaccgcgcccatgtgg

SEQ ID NO: 3441777 - DNA, 25 bp, Homo sapien
ggcatgagcaccgcgcccatgtggt

SEQ ID NO: 3441778 - DNA, 25 bp, Homo sapien
ttgcacatctcagagctcccagtgc

SEQ ID NO: 3441779 - DNA, 25 bp, Homo sapien
tcagagctcccagtgccccaagccc

SEQ ID NO: 3441780 - DNA, 25 bp, Homo sapien
gagctcccagtgccccaagccccat

SEQ ID NO: 3441781 - DNA, 25 bp, Homo sapien
ctcagagctcccagtgccccaagcc

SEQ ID NO: 3441782 - DNA, 25 bp, Homo sapien
cggtgaggacctgtgttcctttctc

SEQ ID NO: 3441783 - DNA, 25 bp, Homo sapien
cctcggtgaggacctgtgttccttt

SEQ ID NO: 3441784 - DNA, 25 bp, Homo sapien
gtgaggacctgtgttcctttctcct

SEQ ID NO: 3441785 - DNA, 25 bp, Homo sapien
gaggacctgtgttcctttctcctct

SEQ ID NO: 3441786 - DNA, 25 bp, Homo sapien
tggctgggagggcttcgacctggat

SEQ ID NO: 3441787 - DNA, 25 bp, Homo sapien
agggcttcgacctggataggagtcc

SEQ ID NO: 3441788 - DNA, 25 bp, Homo sapien
tgggagggcttcgacctggatagga

SEQ ID NO: 3441789 - DNA, 25 bp, Homo sapien
ggcttcgacctggataggagtcccc

SEQ ID NO: 3441790 - DNA, 25 bp, Homo sapien
cttgacagagggatggtcctcctgt

SEQ ID NO: 3441791 - DNA, 25 bp, Homo sapien
caaccctgtgatcattgaggtgaca

SEQ ID NO: 3441792 - DNA, 25 bp, Homo sapien
tctagtaggggagcatagctcctca

SEQ ID NO: 3441793 - DNA, 25 bp, Homo sapien
ggtcctcctgtatcaggaaggtcat

SEQ ID NO: 3441794 - DNA, 25 bp, Homo sapien
caagatgcaggaagatagtgagcct

SEQ ID NO: 3441795 - DNA, 25 bp, Homo sapien
cctcggacttggtggagatctacct

SEQ ID NO: 3441796 - DNA, 25 bp, Homo sapien
tcctgctaatgccaaggctcgatag

SEQ ID NO: 3441797 - DNA, 25 bp, Homo sapien
tgagatcagttctaccaggtgtccc

SEQ ID NO: 3441798 - DNA, 25 bp, Homo sapien
gcattataacaagaagcagagtggc

SEQ ID NO: 3441799 - DNA, 25 bp, Homo sapien
taaggatccactgtatgtccaggga

SEQ ID NO: 3441800 - DNA, 25 bp, Homo sapien
tgagccttgagtgcattgagcccaa

SEQ ID NO: 3441801 - DNA, 25 bp, Homo sapien
cgcagtacaagaagggtaaggatcc

SEQ ID NO: 3441802 - DNA, 25 bp, Homo sapien
gcacgtggaattcgcgaagctgcca

SEQ ID NO: 3441803 - DNA, 25 bp, Homo sapien
ctagcacgtggaattcgcgaagctg

SEQ ID NO: 3441804 - DNA, 25 bp, Homo sapien
cctagcacgtggaattcgcgaagct

SEQ ID NO: 3441805 - DNA, 25 bp, Homo sapien
agcctcggcaaagcgagtggccgca

SEQ ID NO: 3441806 - DNA, 25 bp, Homo sapien
gaagaggcccgagtactcggacctg

SEQ ID NO: 3441807 - DNA, 25 bp, Homo sapien
cagcgaaggtccagaagccgggcct

SEQ ID NO: 3441808 - DNA, 25 bp, Homo sapien
cggcgacaacaccaacagcgaaggt

SEQ ID NO: 3441809 - DNA, 25 bp, Homo sapien
tcctttgtgcctaaatgaatctagg

SEQ ID NO: 3441810 - DNA, 25 bp, Homo sapien
catatgtgtcgaaacttcctttgtg

SEQ ID NO: 3441811 - DNA, 25 bp, Homo sapien
tatactacggtcagataagatatct

SEQ ID NO: 3441812 - DNA, 25 bp, Homo sapien
gattaaccccattcgttgagacagg

SEQ ID NO: 3441813 - DNA, 25 bp, Homo sapien
taccccaggtctcagcaaatcgtaa

SEQ ID NO: 3441814 - DNA, 25 bp, Homo sapien
taccccaggtctcggcatttcagga

SEQ ID NO: 3441815 - DNA, 25 bp, Homo sapien
ccagatattgcagcaccatggaaat

SEQ ID NO: 3441816 - DNA, 25 bp, Homo sapien
ggacaaatctcctagtcaccaaaag

SEQ ID NO: 3441817 - DNA, 25 bp, Homo sapien
aatttgccaggtagataagagggaa

SEQ ID NO: 3441818 - DNA, 25 bp, Homo sapien
tcaaaaagcttacgatattccaaga

SEQ ID NO: 3441819 - DNA, 25 bp, Homo sapien
tccaggcagaataatcattggtgag

SEQ ID NO: 3441820 - DNA, 25 bp, Homo sapien
attccaagaactctgagtagtatgg

SEQ ID NO: 3441821 - DNA, 25 bp, Homo sapien
tgaacatcagttgtctttgggctta

SEQ ID NO: 3441822 - DNA, 25 bp, Homo sapien
gaattcgttttctgaaggtagctga

SEQ ID NO: 3441823 - DNA, 25 bp, Homo sapien
caccaaaattgaacatcagttgtct

SEQ ID NO: 3441824 - DNA, 25 bp, Homo sapien
tttaatagagtccaatcttttgagg

SEQ ID NO: 3441825 - DNA, 25 bp, Homo sapien
cgaagttccccaggcttgcttaatt

SEQ ID NO: 3441826 - DNA, 25 bp, Homo sapien
gctttcatattcctcacgaagttcc

SEQ ID NO: 3441827 - DNA, 25 bp, Homo sapien
ttctcaagctttcatattcctcacg

SEQ ID NO: 3441828 - DNA, 25 bp, Homo sapien
ttcctcacgaagttccccaggcttg

SEQ ID NO: 3441829 - DNA, 25 bp, Homo sapien
taccatttcccactttcacttctaa

SEQ ID NO: 3441830 - DNA, 25 bp, Homo sapien
ttaccatttcccactttcacttcta

SEQ ID NO: 3441831 - DNA, 25 bp, Homo sapien
cttaccatttcccactttcacttct

SEQ ID NO: 3441832 - DNA, 25 bp, Homo sapien
ctcttaccatttcccactttcactt

SEQ ID NO: 3441833 - DNA, 25 bp, Homo sapien
ctggtaacagcttgtggatttgatc

SEQ ID NO: 3441834 - DNA, 25 bp, Homo sapien
ttctgtatcctctggtaacagcttg

SEQ ID NO: 3441835 - DNA, 25 bp, Homo sapien
tgtatcctctggtaacagcttgtgg

SEQ ID NO: 3441836 - DNA, 25 bp, Homo sapien
ttcagtactaatggttcatctcttt

SEQ ID NO: 3441837 - DNA, 25 bp, Homo sapien
ccgagcgatgtgtctgtgtcatctg

SEQ ID NO: 3441838 - DNA, 25 bp, Homo sapien
gtgtcatctggcctcgagaaggttc

SEQ ID NO: 3441839 - DNA, 25 bp, Homo sapien
tcttggaaacaaatgccgagcgatg

SEQ ID NO: 3441840 - DNA, 25 bp, Homo sapien
catctggcctcgagaaggttcttca

SEQ ID NO: 3441841 - DNA, 25 bp, Homo sapien
catattaatcctatggaatctaatc

SEQ ID NO: 3441842 - DNA, 25 bp, Homo sapien
tttgacagtcagttctgacaaagcc

SEQ ID NO: 3441843 - DNA, 25 bp, Homo sapien
taatcctatggaatctaatctaaaa

SEQ ID NO: 3441844 - DNA, 25 bp, Homo sapien
tcagccaatctaagctcctagagcc

SEQ ID NO: 3441845 - DNA, 25 bp, Homo sapien
gcccatagttcctttagctcttgag

SEQ ID NO: 3441846 - DNA, 25 bp, Homo sapien
tcttgaggatatgatttaaagtccc

SEQ ID NO: 3441847 - DNA, 25 bp, Homo sapien
ggtgtttcacagatttcttaggctc

SEQ ID NO: 3441848 - DNA, 25 bp, Homo sapien
tactgatactgtctacttaggacac

SEQ ID NO: 3441849 - DNA, 25 bp, Homo sapien
tggctcactggttttaaagaacgtg

SEQ ID NO: 3441850 - DNA, 25 bp, Homo sapien
gtttctgtagaaatggcaccaactc

SEQ ID NO: 3441851 - DNA, 25 bp, Homo sapien
taaggtgtgtctcagcatatatctc

SEQ ID NO: 3441852 - DNA, 25 bp, Homo sapien
aactcatcatcgtccctgtggtaga

SEQ ID NO: 3441853 - DNA, 25 bp, Homo sapien
cagtaagttttgatgtacaggtttt

SEQ ID NO: 3441854 - DNA, 25 bp, Homo sapien
tcattacattcagtaagttttgatg

SEQ ID NO: 3441855 - DNA, 25 bp, Homo sapien
gctgctttcattacattcagtaagt

SEQ ID NO: 3441856 - DNA, 25 bp, Homo sapien
tttagtcttagatcttttataatgt

SEQ ID NO: 3441857 - DNA, 25 bp, Homo sapien
gagtttctaggaattggtgcatttc

SEQ ID NO: 3441858 - DNA, 25 bp, Homo sapien
tcattacattcactctaggaactgg

SEQ ID NO: 3441859 - DNA, 25 bp, Homo sapien
tcaacttcctcaggtactttacgag

SEQ ID NO: 3441860 - DNA, 25 bp, Homo sapien
cattctactgttttcctattctctg

SEQ ID NO: 3441861 - DNA, 25 bp, Homo sapien
ctaatccatgagcacaggaagtctt

SEQ ID NO: 3441862 - DNA, 25 bp, Homo sapien
aaacgacttcaagagtattgccatc

SEQ ID NO: 3441863 - DNA, 25 bp, Homo sapien
gatgttacactaaatctgtaaaacg

SEQ ID NO: 3441864 - DNA, 25 bp, Homo sapien
caggaagtcttttgcttagttagat

SEQ ID NO: 3441865 - DNA, 25 bp, Homo sapien
tatggccacatagtgttaataggag

SEQ ID NO: 3441866 - DNA, 25 bp, Homo sapien
catttgcatccctagaagtcacaga

SEQ ID NO: 3441867 - DNA, 25 bp, Homo sapien
gccagcctgtatcacgtgcttgcac

SEQ ID NO: 3441868 - DNA, 25 bp, Homo sapien
tgaaagttgtactatctagtgggaa

SEQ ID NO: 3441869 - DNA, 25 bp, Homo sapien
tcctgggctgtgtcactacagctct

SEQ ID NO: 3441870 - DNA, 25 bp, Homo sapien
cttggctttgttgcctggaactgct

SEQ ID NO: 3441871 - DNA, 25 bp, Homo sapien
gggctgtgtcactacagctctgact

SEQ ID NO: 3441872 - DNA, 25 bp, Homo sapien
tggctttgttgcctggaactgctct

SEQ ID NO: 3441873 - DNA, 25 bp, Homo sapien
tctcagggctgacagaacgctctgg

SEQ ID NO: 3441874 - DNA, 25 bp, Homo sapien
cgtggactggcctcataagaagtct

SEQ ID NO: 3441875 - DNA, 25 bp, Homo sapien
ttagcacacggccatcagggagtct

SEQ ID NO: 3441876 - DNA, 25 bp, Homo sapien
cagaggtgggtccagtatactcaga

SEQ ID NO: 3441877 - DNA, 25 bp, Homo sapien
ctccaaagaagtcccactgcctccc

SEQ ID NO: 3441878 - DNA, 25 bp, Homo sapien
gcatctggagttgaccctaacccct

SEQ ID NO: 3441879 - DNA, 25 bp, Homo sapien
cagtgggatctcagtgctactttta

SEQ ID NO: 3441880 - DNA, 25 bp, Homo sapien
ggctctgcttatacaggttttgtct

SEQ ID NO: 3441881 - DNA, 25 bp, Homo sapien
ttgaggactccacccaaaacactgt

SEQ ID NO: 3441882 - DNA, 25 bp, Homo sapien
cggcctcgacgcaaagaaggaagtg

SEQ ID NO: 3441883 - DNA, 25 bp, Homo sapien
tgcaactgcagagccaactgtcggt

SEQ ID NO: 3441884 - DNA, 25 bp, Homo sapien
tctcattgtcgaacatgcgctgcaa

SEQ ID NO: 3441885 - DNA, 25 bp, Homo sapien
aaaataggtaacacttcattaggtg

SEQ ID NO: 3441886 - DNA, 25 bp, Homo sapien
tatcagtttaagaaggtatcccctc

SEQ ID NO: 3441887 - DNA, 25 bp, Homo sapien
taactgtggccattatgctcctgag

SEQ ID NO: 3441888 - DNA, 25 bp, Homo sapien
gatattgactacaaaggccctggaa

SEQ ID NO: 3441889 - DNA, 25 bp, Homo sapien
cctgggtcacagagaaacggagatg

SEQ ID NO: 3441890 - DNA, 25 bp, Homo sapien
taacattctatgactgtgacccagc

SEQ ID NO: 3441891 - DNA, 25 bp, Homo sapien
catcagctacatgagtcaggcacgg

SEQ ID NO: 3441892 - DNA, 25 bp, Homo sapien
tatcagtgttcaatgcccagcctag

SEQ ID NO: 3441893 - DNA, 25 bp, Homo sapien
cataaattgttggtagggcccagaa

SEQ ID NO: 3441894 - DNA, 25 bp, Homo sapien
tgacagaaacatccccaacagggca

SEQ ID NO: 3441895 - DNA, 25 bp, Homo sapien
tgttcaccagagacaagactctgac

SEQ ID NO: 3441896 - DNA, 25 bp, Homo sapien
aacttgggccttgcttcaagcaggc

SEQ ID NO: 3441897 - DNA, 25 bp, Homo sapien
cagcccacttgattccatgccatgt

SEQ ID NO: 3441898 - DNA, 25 bp, Homo sapien
ggacactcgaggagcataatgcact

SEQ ID NO: 3441899 - DNA, 25 bp, Homo sapien
aaacatactgtggacactcgaggag

SEQ ID NO: 3441900 - DNA, 25 bp, Homo sapien
gacactcgaggagcataatgcacta

SEQ ID NO: 3441901 - DNA, 25 bp, Homo sapien
gccaaacatactgtggacactcgag

SEQ ID NO: 3441902 - DNA, 25 bp, Homo sapien
gaaaataccacacacatgacctgag

SEQ ID NO: 3441903 - DNA, 25 bp, Homo sapien
tgtcagccagaatcctaagcccata

SEQ ID NO: 3441904 - DNA, 25 bp, Homo sapien
gaacattcagctcacccgagagaga

SEQ ID NO: 3441905 - DNA, 25 bp, Homo sapien
catggccagatttccgcttgctgtg

SEQ ID NO: 3441906 - DNA, 25 bp, Homo sapien
gcagtgccccaagctgacagggttt

SEQ ID NO: 3441907 - DNA, 25 bp, Homo sapien
gagtgcctgcacctcagagaagttt

SEQ ID NO: 3441908 - DNA, 25 bp, Homo sapien
taggagacctctaatgtgctaggcc

SEQ ID NO: 3441909 - DNA, 25 bp, Homo sapien
ttttccctacccaagatgcagtgcc

SEQ ID NO: 3441910 - DNA, 25 bp, Homo sapien
tatccaggacctaatcgttgatgtc

SEQ ID NO: 3441911 - DNA, 25 bp, Homo sapien
ggcttagacccttgattttcatcag

SEQ ID NO: 3441912 - DNA, 25 bp, Homo sapien
agtccttgccagatacaccactatc

SEQ ID NO: 3441913 - DNA, 25 bp, Homo sapien
tggcagctgcctcaagtgataaaat

SEQ ID NO: 3441914 - DNA, 25 bp, Homo sapien
agtctttttgtgtaacaatcctcaa

SEQ ID NO: 3441915 - DNA, 25 bp, Homo sapien
tcctactttgttcattgcacaaagc

SEQ ID NO: 3441916 - DNA, 25 bp, Homo sapien
agcaggatgcgcgttcagacagcgt

SEQ ID NO: 3441917 - DNA, 25 bp, Homo sapien
tctagggttcattgcttagcactca

SEQ ID NO: 3441918 - DNA, 25 bp, Homo sapien
tggattgcctgatatgactgctaaa

SEQ ID NO: 3441919 - DNA, 25 bp, Homo sapien
agcttggttgattgtccagtgcatg

SEQ ID NO: 3441920 - DNA, 25 bp, Homo sapien
ctaaaagagcttggttgattgtcca

SEQ ID NO: 3441921 - DNA, 25 bp, Homo sapien
ttggattgcctgatatgactgctaa

SEQ ID NO: 3441922 - DNA, 25 bp, Homo sapien
agtaggatgaatagcccttactcat

SEQ ID NO: 3441923 - DNA, 25 bp, Homo sapien
tatctgataaggtaggagtgggact

SEQ ID NO: 3441924 - DNA, 25 bp, Homo sapien
cacagcgaatctcgagaggaaaagt

SEQ ID NO: 3441925 - DNA, 25 bp, Homo sapien
tcacatggatatccaggacattcct

SEQ ID NO: 3441926 - DNA, 25 bp, Homo sapien
gaaagaatagctccctgctagagag

SEQ ID NO: 3441927 - DNA, 25 bp, Homo sapien
catagggtatgaaaagctggtcacc

SEQ ID NO: 3441928 - DNA, 25 bp, Homo sapien
gacattcccctgtgcaagattccag

SEQ ID NO: 3441929 - DNA, 25 bp, Homo sapien
aaaactggttaggaatagctgtgcc

SEQ ID NO: 3441930 - DNA, 25 bp, Homo sapien
agagattctggtattgaagcagccc

SEQ ID NO: 3441931 - DNA, 25 bp, Homo sapien
gccctgttgtctagggtgataccta

SEQ ID NO: 3441932 - DNA, 25 bp, Homo sapien
ttgaagcagccctgttgtctagggt

SEQ ID NO: 3441933 - DNA, 25 bp, Homo sapien
gtgatacctaaggttcattgtctca

SEQ ID NO: 3441934 - DNA, 25 bp, Homo sapien
actgatgcattctttagtatatcaa

SEQ ID NO: 3441935 - DNA, 25 bp, Homo sapien
gactgatgcattctttagtatatca

SEQ ID NO: 3441936 - DNA, 25 bp, Homo sapien
cgcctggccgatgaatgatcttctt

SEQ ID NO: 3441937 - DNA, 25 bp, Homo sapien
gcctggccgatgaatgatcttctta

SEQ ID NO: 3441938 - DNA, 25 bp, Homo sapien
gcgcctggccgatgaatgatcttct

SEQ ID NO: 3441939 - DNA, 25 bp, Homo sapien
cctggccgatgaatgatcttcttaa

SEQ ID NO: 3441940 - DNA, 25 bp, Homo sapien
catatggatatcctcttatcccaga

SEQ ID NO: 3441941 - DNA, 25 bp, Homo sapien
gagatattactactcaagaaaattt

SEQ ID NO: 3441942 - DNA, 25 bp, Homo sapien
tgcatatggatatcctcttatccca

SEQ ID NO: 3441943 - DNA, 25 bp, Homo sapien
gcatatggatatcctcttatcccag

SEQ ID NO: 3441944 - DNA, 25 bp, Homo sapien
acgttcttgcaaatgatagaatctc

SEQ ID NO: 3441945 - DNA, 25 bp, Homo sapien
ccacgttcttgcaaatgatagaatc

SEQ ID NO: 3441946 - DNA, 25 bp, Homo sapien
cacgttcttgcaaatgatagaatct

SEQ ID NO: 3441947 - DNA, 25 bp, Homo sapien
tgtttacaatacaactcaggtccta

SEQ ID NO: 3441948 - DNA, 25 bp, Homo sapien
tgaagtgcggttacacgatcgtgct

SEQ ID NO: 3441949 - DNA, 25 bp, Homo sapien
tataacttaggagcagagacttctg

SEQ ID NO: 3441950 - DNA, 25 bp, Homo sapien
taatggtaatatggtcttgagctct

SEQ ID NO: 3441951 - DNA, 25 bp, Homo sapien
ttatcctcctgtttggtcccagtct

SEQ ID NO: 3441952 - DNA, 25 bp, Homo sapien
catcagagtagcagttgaaatcagc

SEQ ID NO: 3441953 - DNA, 25 bp, Homo sapien
gaaatcagcacgctttgaaagctgt

SEQ ID NO: 3441954 - DNA, 25 bp, Homo sapien
tcagtggaaagcctagttacataaa

SEQ ID NO: 3441955 - DNA, 25 bp, Homo sapien
aatgtattcctacctgcatcagagt

SEQ ID NO: 3441956 - DNA, 25 bp, Homo sapien
gctcgccaggtccagtcagtatgat

SEQ ID NO: 3441957 - DNA, 25 bp, Homo sapien
ggcatctagggtgtttgcaactttt

SEQ ID NO: 3441958 - DNA, 25 bp, Homo sapien
tttcctgctcgccaggtccagtcag

SEQ ID NO: 3441959 - DNA, 25 bp, Homo sapien
tttgcaacttttcctgctcgccagg

SEQ ID NO: 3441960 - DNA, 25 bp, Homo sapien
cactgtaattgtagacctgctgaag

SEQ ID NO: 3441961 - DNA, 25 bp, Homo sapien
tgatgcctcaaccaaggctggaatc

SEQ ID NO: 3441962 - DNA, 25 bp, Homo sapien
gaagctgcatcactgctaaactgaa

SEQ ID NO: 3441963 - DNA, 25 bp, Homo sapien
tgccaacgcagttaccatggttagt

SEQ ID NO: 3441964 - DNA, 25 bp, Homo sapien
ccggcttcattcttaggtaggcttt

SEQ ID NO: 3441965 - DNA, 25 bp, Homo sapien
gtcccggcttcattcttaggtaggc

SEQ ID NO: 3441966 - DNA, 25 bp, Homo sapien
ggcttcattcttaggtaggctttct

SEQ ID NO: 3441967 - DNA, 25 bp, Homo sapien
cttcattcttaggtaggctttctcc

SEQ ID NO: 3441968 - DNA, 25 bp, Homo sapien
tttcttcttgccacccttcttcaca

SEQ ID NO: 3441969 - DNA, 25 bp, Homo sapien
gcagaacggccctttttcttcttgc

SEQ ID NO: 3441970 - DNA, 25 bp, Homo sapien
ttcttgccacccttcttcacaggag

SEQ ID NO: 3441971 - DNA, 25 bp, Homo sapien
tcgggtcaccacctcattgatggca

SEQ ID NO: 3441972 - DNA, 25 bp, Homo sapien
aaggggcatgcttcttgaagcccac

SEQ ID NO: 3441973 - DNA, 25 bp, Homo sapien
tcaaggggcatgcttcttgaagccc

SEQ ID NO: 3441974 - DNA, 25 bp, Homo sapien
caaggggcatgcttcttgaagccca

SEQ ID NO: 3441975 - DNA, 25 bp, Homo sapien
gtatcagttgtgcacatctagagtt

SEQ ID NO: 3441976 - DNA, 25 bp, Homo sapien
cagttgtgcacatctagagttccca

SEQ ID NO: 3441977 - DNA, 25 bp, Homo sapien
tatcagttgtgcacatctagagttc

SEQ ID NO: 3441978 - DNA, 25 bp, Homo sapien
tcagttgtgcacatctagagttccc

SEQ ID NO: 3441979 - DNA, 25 bp, Homo sapien
caactgcacatggattcggcatggg

SEQ ID NO: 3441980 - DNA, 25 bp, Homo sapien
aactgcacatggattcggcatggga

SEQ ID NO: 3441981 - DNA, 25 bp, Homo sapien
actgcacatggattcggcatgggac

SEQ ID NO: 3441982 - DNA, 25 bp, Homo sapien
tcatgaggtcagtctgctggatgct

SEQ ID NO: 3441983 - DNA, 25 bp, Homo sapien
taggcgcacaggatgttgtcaggtc

SEQ ID NO: 3441984 - DNA, 25 bp, Homo sapien
gagcatgtgtgcagcttctgttagt

SEQ ID NO: 3441985 - DNA, 25 bp, Homo sapien
tgtcaggtctctgcgtgcatctcta

SEQ ID NO: 3441986 - DNA, 25 bp, Homo sapien
gcccaggtgtggagtttccaaagga

SEQ ID NO: 3441987 - DNA, 25 bp, Homo sapien
ctgaaacttagttttcgaattcgag

SEQ ID NO: 3441988 - DNA, 25 bp, Homo sapien
gaggcaggtgcgactgaaacttagt

SEQ ID NO: 3441989 - DNA, 25 bp, Homo sapien
tcgagtctttctccggcccaggtgt

SEQ ID NO: 3441990 - DNA, 25 bp, Homo sapien
ctccgacttgtctgaagccgattgg

SEQ ID NO: 3441991 - DNA, 25 bp, Homo sapien
tctccctcccctccgacttgtctga

SEQ ID NO: 3441992 - DNA, 25 bp, Homo sapien
tcccctccgacttgtctgaagccga

SEQ ID NO: 3441993 - DNA, 25 bp, Homo sapien
ccctcccctccgacttgtctgaagc

SEQ ID NO: 3441994 - DNA, 25 bp, Homo sapien
cttatccaacaagccgctacggcca

SEQ ID NO: 3441995 - DNA, 25 bp, Homo sapien
tacagcctccgctaccaccgcttct

SEQ ID NO: 3441996 - DNA, 25 bp, Homo sapien
ttctcccgccctgtacagctgccgc

SEQ ID NO: 3441997 - DNA, 25 bp, Homo sapien
ttcctgtcccgcagttggaagcacc

SEQ ID NO: 3441998 - DNA, 25 bp, Homo sapien
caggcctccccaggattcaactgtt

SEQ ID NO: 3441999 - DNA, 25 bp, Homo sapien
tgtgatagtggtcacacaagggctc

SEQ ID NO: 3442000 - DNA, 25 bp, Homo sapien
tccaagcgtgcgtagggttgtgata

SEQ ID NO: 3442001 - DNA, 25 bp, Homo sapien
ccaggaccagaacacttgcgagaaa

SEQ ID NO: 3442002 - DNA, 25 bp, Homo sapien
tctttccatgtgctatgggccattc

SEQ ID NO: 3442003 - DNA, 25 bp, Homo sapien
ttagtggacgtgaagtggtttctca

SEQ ID NO: 3442004 - DNA, 25 bp, Homo sapien
tcgtacgtcttctatggagaaatgt

SEQ ID NO: 3442005 - DNA, 25 bp, Homo sapien
gctatgggccattcgtacgtcttct

SEQ ID NO: 3442006 - DNA, 25 bp, Homo sapien
gagacagagatgaccacctactaga

SEQ ID NO: 3442007 - DNA, 25 bp, Homo sapien
gagtaacactggacatagagatgca

SEQ ID NO: 3442008 - DNA, 25 bp, Homo sapien
tgatgtaagtgcagagcctcaatgc

SEQ ID NO: 3442009 - DNA, 25 bp, Homo sapien
aactgatggcaaactcagaagctga

SEQ ID NO: 3442010 - DNA, 25 bp, Homo sapien
gcacagtggcaacatgtttataact

SEQ ID NO: 3442011 - DNA, 25 bp, Homo sapien
gagatgaagaattaccaagggtgag

SEQ ID NO: 3442012 - DNA, 25 bp, Homo sapien
ggtcattaggatatgtccagcaaaa

SEQ ID NO: 3442013 - DNA, 25 bp, Homo sapien
cactcaaagggatagggtgggatca

SEQ ID NO: 3442014 - DNA, 25 bp, Homo sapien
ggagctcgagtccagcctgggcaat

SEQ ID NO: 3442015 - DNA, 25 bp, Homo sapien
tgggcaatatagtgagagcttgtct

SEQ ID NO: 3442016 - DNA, 25 bp, Homo sapien
gaggtggcagaacagcttgagccca

SEQ ID NO: 3442017 - DNA, 25 bp, Homo sapien
ggctgaggtggcagaacagcttgag

SEQ ID NO: 3442018 - DNA, 25 bp, Homo sapien
ctttttggcagaatcatccaaagag

SEQ ID NO: 3442019 - DNA, 25 bp, Homo sapien
aagagtttttcacagctgatccatc

SEQ ID NO: 3442020 - DNA, 25 bp, Homo sapien
catccaaagagtttttcacagctga

SEQ ID NO: 3442021 - DNA, 25 bp, Homo sapien
tttttacaggcttatcatctatctt

SEQ ID NO: 3442022 - DNA, 25 bp, Homo sapien
agaaacaggagattgtacagatggt

SEQ ID NO: 3442023 - DNA, 25 bp, Homo sapien
aagaaacaggagattgtacagatgg

SEQ ID NO: 3442024 - DNA, 25 bp, Homo sapien
ggtttggactctggaaaggggtgca

SEQ ID NO: 3442025 - DNA, 25 bp, Homo sapien
gtttggactctggaaaggggtgcat

SEQ ID NO: 3442026 - DNA, 25 bp, Homo sapien
ttagtagtgacagatttctccaagt

SEQ ID NO: 3442027 - DNA, 25 bp, Homo sapien
agtgacagatttctccaagttgctc

SEQ ID NO: 3442028 - DNA, 25 bp, Homo sapien
agtagtgacagatttctccaagttg

SEQ ID NO: 3442029 - DNA, 25 bp, Homo sapien
tcactgtgacttccgccccctggat

SEQ ID NO: 3442030 - DNA, 25 bp, Homo sapien
gtataaatggtcagaatccccatca

SEQ ID NO: 3442031 - DNA, 25 bp, Homo sapien
taaatggtcagaatccccatcatca

SEQ ID NO: 3442032 - DNA, 25 bp, Homo sapien
cttatatgaggtataaatggtcaga

SEQ ID NO: 3442033 - DNA, 25 bp, Homo sapien
tgaggtataaatggtcagaatcccc

SEQ ID NO: 3442034 - DNA, 25 bp, Homo sapien
tgtgggccacgagaaagatgctctt

SEQ ID NO: 3442035 - DNA, 25 bp, Homo sapien
tgggccacgagaaagatgctcttct

SEQ ID NO: 3442036 - DNA, 25 bp, Homo sapien
gggccacgagaaagatgctcttctc

SEQ ID NO: 3442037 - DNA, 25 bp, Homo sapien
ctgtgggccacgagaaagatgctct

SEQ ID NO: 3442038 - DNA, 25 bp, Homo sapien
tgccaaatatcatcaggatccattc

SEQ ID NO: 3442039 - DNA, 25 bp, Homo sapien
gccaaatatcatcaggatccattcc

SEQ ID NO: 3442040 - DNA, 25 bp, Homo sapien
ccaaatatcatcaggatccattcct

SEQ ID NO: 3442041 - DNA, 25 bp, Homo sapien
ccctgtcaggagataagcaagaact

SEQ ID NO: 3442042 - DNA, 25 bp, Homo sapien
gaattctgcaactcagcttcagtgg

SEQ ID NO: 3442043 - DNA, 25 bp, Homo sapien
gatgcagattatgatggctgaggcc

SEQ ID NO: 3442044 - DNA, 25 bp, Homo sapien
taatgaaattataatgccgctaggt

SEQ ID NO: 3442045 - DNA, 25 bp, Homo sapien
gaaggccttagataggtacttggaa

SEQ ID NO: 3442046 - DNA, 25 bp, Homo sapien
gagatagaatcccatagacccaagg

SEQ ID NO: 3442047 - DNA, 25 bp, Homo sapien
gatggcttctatcttcccaacaaca

SEQ ID NO: 3442048 - DNA, 25 bp, Homo sapien
gtgatggtagacttatgatggcttc

SEQ ID NO: 3442049 - DNA, 25 bp, Homo sapien
ccaaggagatgagggtatgtttgca

SEQ ID NO: 3442050 - DNA, 25 bp, Homo sapien
ggcagaaaagccttcactaagcaga

SEQ ID NO: 3442051 - DNA, 25 bp, Homo sapien
tttactgagcctacctatatgtgac

SEQ ID NO: 3442052 - DNA, 25 bp, Homo sapien
tggtaaggatatacggcagtgaaca

SEQ ID NO: 3442053 - DNA, 25 bp, Homo sapien
tcctactttaattactgtgtacctc

SEQ ID NO: 3442054 - DNA, 25 bp, Homo sapien
tacggcaccaagtgtttccgaagaa

SEQ ID NO: 3442055 - DNA, 25 bp, Homo sapien
tctgattcttaggtgttgacatatc

SEQ ID NO: 3442056 - DNA, 25 bp, Homo sapien
ccagggctcctaacttttcaagata

SEQ ID NO: 3442057 - DNA, 25 bp, Homo sapien
tggactttgtgaactcggcttcccg

SEQ ID NO: 3442058 - DNA, 25 bp, Homo sapien
gctcatatgcatccatgaccagtgt

SEQ ID NO: 3442059 - DNA, 25 bp, Homo sapien
ctttctatggcaagactgtcatgga

SEQ ID NO: 3442060 - DNA, 25 bp, Homo sapien
agcctggatatttcaggctcatatg

SEQ ID NO: 3442061 - DNA, 25 bp, Homo sapien
taaaatgctacatggcccaaagcta

SEQ ID NO: 3442062 - DNA, 25 bp, Homo sapien
ggagactacagctagacatcagagc

SEQ ID NO: 3442063 - DNA, 25 bp, Homo sapien
caaatcaacagggatatactagtgg

SEQ ID NO: 3442064 - DNA, 25 bp, Homo sapien
caatcagcagatcaaggagactaca

SEQ ID NO: 3442065 - DNA, 25 bp, Homo sapien
ttatcactggaaagctaagagttcc

SEQ ID NO: 3442066 - DNA, 25 bp, Homo sapien
tctgaccatactgggaaaatactgg

SEQ ID NO: 3442067 - DNA, 25 bp, Homo sapien
gcctcttaggattgctgtgagcatt

SEQ ID NO: 3442068 - DNA, 25 bp, Homo sapien
gttccttagctacaggttctcaggg

SEQ ID NO: 3442069 - DNA, 25 bp, Homo sapien
caagcctcgagacccttgtgtctaa

SEQ ID NO: 3442070 - DNA, 25 bp, Homo sapien
tgtctaacagtacagttggccctct

SEQ ID NO: 3442071 - DNA, 25 bp, Homo sapien
tcatcatggagagggttattcagtc

SEQ ID NO: 3442072 - DNA, 25 bp, Homo sapien
tacccaaggtttacaggaatgaaga

SEQ ID NO: 3442073 - DNA, 25 bp, Homo sapien
cagttgttactaggaagtaatccca

SEQ ID NO: 3442074 - DNA, 25 bp, Homo sapien
tagatctgccccatggtatttggca

SEQ ID NO: 3442075 - DNA, 25 bp, Homo sapien
ggctagcctgcaggagacagttgtt

SEQ ID NO: 3442076 - DNA, 25 bp, Homo sapien
tccttgccccagaacagtgttgcct

SEQ ID NO: 3442077 - DNA, 25 bp, Homo sapien
gggcctgtatccaacaaggtaggaa

SEQ ID NO: 3442078 - DNA, 25 bp, Homo sapien
tgacttcagccatatccaagggcct

SEQ ID NO: 3442079 - DNA, 25 bp, Homo sapien
gactctcaggatagtgataactgcc

SEQ ID NO: 3442080 - DNA, 25 bp, Homo sapien
tgacttaagtgccatccagagctga

SEQ ID NO: 3442081 - DNA, 25 bp, Homo sapien
gatttgtcacatagcactgagtcca

SEQ ID NO: 3442082 - DNA, 25 bp, Homo sapien
tatctgggactaagtacaacgtaaa

SEQ ID NO: 3442083 - DNA, 25 bp, Homo sapien
ggaaaggactgatctaaggtcattt

SEQ ID NO: 3442084 - DNA, 25 bp, Homo sapien
gctactctccttgcaaaatatgaaa

SEQ ID NO: 3442085 - DNA, 25 bp, Homo sapien
gtatcaccgcctaaagcttccctgg

SEQ ID NO: 3442086 - DNA, 25 bp, Homo sapien
tgagcaaaggttcccggcctcagag

SEQ ID NO: 3442087 - DNA, 25 bp, Homo sapien
tgccacagccccgagctcttatatt

SEQ ID NO: 3442088 - DNA, 25 bp, Homo sapien
tattggtctgtagctcggtatcacc

SEQ ID NO: 3442089 - DNA, 25 bp, Homo sapien
ccgagaagcgaagagcgtgtcgact

SEQ ID NO: 3442090 - DNA, 25 bp, Homo sapien
gagaaacaactgagacggaggacac

SEQ ID NO: 3442091 - DNA, 25 bp, Homo sapien
caggtaacggcaacgaaaagaggcg

SEQ ID NO: 3442092 - DNA, 25 bp, Homo sapien
tgtcgactgccggaaacaggtaacg

SEQ ID NO: 3442093 - DNA, 25 bp, Homo sapien
gcaggtctcattcgccgaagcccgg

SEQ ID NO: 3442094 - DNA, 25 bp, Homo sapien
tccgcaggtctcattcgccgaagcc

SEQ ID NO: 3442095 - DNA, 25 bp, Homo sapien
tcattcgccgaagcccggaagaggc

SEQ ID NO: 3442096 - DNA, 25 bp, Homo sapien
gtctcattcgccgaagcccggaaga

SEQ ID NO: 3442097 - DNA, 25 bp, Homo sapien
tcctccgtctctgtcggggcagagc

SEQ ID NO: 3442098 - DNA, 25 bp, Homo sapien
gagctggacgccggggattcttcca

SEQ ID NO: 3442099 - DNA, 25 bp, Homo sapien
ctgcactggaccccggctcctccgt

SEQ ID NO: 3442100 - DNA, 25 bp, Homo sapien
ggcagagctggacgccggggattct

SEQ ID NO: 3442101 - DNA, 25 bp, Homo sapien
gggacaaagcttactgaacgccact

SEQ ID NO: 3442102 - DNA, 25 bp, Homo sapien
gccaggtcagatcctagccgactag

SEQ ID NO: 3442103 - DNA, 25 bp, Homo sapien
ccgactaggtggctctgtctcaata

SEQ ID NO: 3442104 - DNA, 25 bp, Homo sapien
taaaatctggaccaagacccaggtc

SEQ ID NO: 3442105 - DNA, 25 bp, Homo sapien
tattatcactataacaattagagcc

SEQ ID NO: 3442106 - DNA, 25 bp, Homo sapien
taattatgctgatcgtgttgatgac

SEQ ID NO: 3442107 - DNA, 25 bp, Homo sapien
tctggcattgccacccaaaacgttt

SEQ ID NO: 3442108 - DNA, 25 bp, Homo sapien
caaaacgtttcacacaaatcaggtg

SEQ ID NO: 3442109 - DNA, 25 bp, Homo sapien
tatcttggagcagagcggttttgca

SEQ ID NO: 3442110 - DNA, 25 bp, Homo sapien
gaccctgtgggaattctatgtggcc

SEQ ID NO: 3442111 - DNA, 25 bp, Homo sapien
gatactagtccaccctatcagaagg

SEQ ID NO: 3442112 - DNA, 25 bp, Homo sapien
tgatagggttataagggctctgtcc

SEQ ID NO: 3442113 - DNA, 25 bp, Homo sapien
gatccggtaggtaatccctctgtca

SEQ ID NO: 3442114 - DNA, 25 bp, Homo sapien
tcttcctgccggaacagagggctgt

SEQ ID NO: 3442115 - DNA, 25 bp, Homo sapien
tcgtagaacgcttctctgcaaaggc

SEQ ID NO: 3442116 - DNA, 25 bp, Homo sapien
gagcatcctcatctctcctcgtaga

SEQ ID NO: 3442117 - DNA, 25 bp, Homo sapien
ggcccagactcagatctgggatgaa

SEQ ID NO: 3442118 - DNA, 25 bp, Homo sapien
agtacctacgacacagaatggctgt

SEQ ID NO: 3442119 - DNA, 25 bp, Homo sapien
tattatagctgtataaccttgagca

SEQ ID NO: 3442120 - DNA, 25 bp, Homo sapien
gtgaggacccaatgtgcccctggca

SEQ ID NO: 3442121 - DNA, 25 bp, Homo sapien
cactccagcaaaaagattgactagc

SEQ ID NO: 3442122 - DNA, 25 bp, Homo sapien
aacatcagggcaagacccactccag

SEQ ID NO: 3442123 - DNA, 25 bp, Homo sapien
tatctatgtaagtaagaaatgcttc

SEQ ID NO: 3442124 - DNA, 25 bp, Homo sapien
ggtgtgtactttttgttagacataa

SEQ ID NO: 3442125 - DNA, 25 bp, Homo sapien
gaagagtcaagtatccaaggccaaa

SEQ ID NO: 3442126 - DNA, 25 bp, Homo sapien
gaatacaagataggagagctcacct

SEQ ID NO: 3442127 - DNA, 25 bp, Homo sapien
cctgaagagttgtgcaaggagaccc

SEQ ID NO: 3442128 - DNA, 25 bp, Homo sapien
cagaaaacagactactcagagggca

SEQ ID NO: 3442129 - DNA, 25 bp, Homo sapien
tgagttctatatatgagtccacaag

SEQ ID NO: 3442130 - DNA, 25 bp, Homo sapien
tccacaagtgttggctttgtcataa

SEQ ID NO: 3442131 - DNA, 25 bp, Homo sapien
gctttgctactgcatgaagcagcac

SEQ ID NO: 3442132 - DNA, 25 bp, Homo sapien
gcagcactgaagagataacaagaaa

SEQ ID NO: 3442133 - DNA, 25 bp, Homo sapien
tatacgcagggatgaccagtctccc

SEQ ID NO: 3442134 - DNA, 25 bp, Homo sapien
ggtgtccgggcactgcaatatagca

SEQ ID NO: 3442135 - DNA, 25 bp, Homo sapien
tgttgacgctctgtgacatggcccc

SEQ ID NO: 3442136 - DNA, 25 bp, Homo sapien
catggtgccatgtgacccctaggtc

SEQ ID NO: 3442137 - DNA, 25 bp, Homo sapien
gagccatgattctgacggtgttcca

SEQ ID NO: 3442138 - DNA, 25 bp, Homo sapien
catctttgctgctagagtcctggca

SEQ ID NO: 3442139 - DNA, 25 bp, Homo sapien
aggtcaaccctctgtttcctactgg

SEQ ID NO: 3442140 - DNA, 25 bp, Homo sapien
tggcacctatgtgggatctccaggg

SEQ ID NO: 3442141 - DNA, 25 bp, Homo sapien
tgcttggtcccacattcaaacaaac

SEQ ID NO: 3442142 - DNA, 25 bp, Homo sapien
ggatctcccggtgtgtaaacaggcg

SEQ ID NO: 3442143 - DNA, 25 bp, Homo sapien
taaacaggcggaaggcaatctgctc

SEQ ID NO: 3442144 - DNA, 25 bp, Homo sapien
agggcccacagtgcaagatccaggg

SEQ ID NO: 3442145 - DNA, 25 bp, Homo sapien
gcttttgaattggcttgggttccta

SEQ ID NO: 3442146 - DNA, 25 bp, Homo sapien
tgcttgtaacctcacactcggatga

SEQ ID NO: 3442147 - DNA, 25 bp, Homo sapien
tcatgtgaaaaggtaagtcccctgg

SEQ ID NO: 3442148 - DNA, 25 bp, Homo sapien
gttcaggtgacacatccaaggtcca

SEQ ID NO: 3442149 - DNA, 25 bp, Homo sapien
catcagagtcctttatgcagccagg

SEQ ID NO: 3442150 - DNA, 25 bp, Homo sapien
tcatcagggtaatgccaccagaagc

SEQ ID NO: 3442151 - DNA, 25 bp, Homo sapien
gacagacgactccaggcatattgaa

SEQ ID NO: 3442152 - DNA, 25 bp, Homo sapien
cacaagtagtgatttccatgggcct

SEQ ID NO: 3442153 - DNA, 25 bp, Homo sapien
ttctcacaggtaaaggagtagctgg

SEQ ID NO: 3442154 - DNA, 25 bp, Homo sapien
cttgagtagtcctaaagaagttgat

SEQ ID NO: 3442155 - DNA, 25 bp, Homo sapien
agaagttgatattctcggctgggcg

SEQ ID NO: 3442156 - DNA, 25 bp, Homo sapien
ttcttgagtagtcctaaagaagttg

SEQ ID NO: 3442157 - DNA, 25 bp, Homo sapien
agttgatattctcggctgggcgcag

SEQ ID NO: 3442158 - DNA, 25 bp, Homo sapien
gaaaagcctcttacccgtggctgaa

SEQ ID NO: 3442159 - DNA, 25 bp, Homo sapien
gcttgatgtcctgtgaatatcggag

SEQ ID NO: 3442160 - DNA, 25 bp, Homo sapien
gacctttgtgggtcctctgggctac

SEQ ID NO: 3442161 - DNA, 25 bp, Homo sapien
aagcacccagacaatggcctgaggt

SEQ ID NO: 3442162 - DNA, 25 bp, Homo sapien
gccagggacaaccaagcttaagcca

SEQ ID NO: 3442163 - DNA, 25 bp, Homo sapien
ccagaggccaaggatggttgactca

SEQ ID NO: 3442164 - DNA, 25 bp, Homo sapien
taactgaccttgaagcaggccagaa

SEQ ID NO: 3442165 - DNA, 25 bp, Homo sapien
catcccaggaagtagtgtaactgac

SEQ ID NO: 3442166 - DNA, 25 bp, Homo sapien
tgttcacgatcatgagagcagcatg

SEQ ID NO: 3442167 - DNA, 25 bp, Homo sapien
acagtgggagtacagtcattccaaa

SEQ ID NO: 3442168 - DNA, 25 bp, Homo sapien
gggaactctgccttataaagccatc

SEQ ID NO: 3442169 - DNA, 25 bp, Homo sapien
cgtggctaaggaagcctcacaataa

SEQ ID NO: 3442170 - DNA, 25 bp, Homo sapien
gtcttgttcccgcaggatatgagca

SEQ ID NO: 3442171 - DNA, 25 bp, Homo sapien
gggtcttgttcccgcaggatatgag

SEQ ID NO: 3442172 - DNA, 25 bp, Homo sapien
tcttgttcccgcaggatatgagcaa

SEQ ID NO: 3442173 - DNA, 25 bp, Homo sapien
cttgttcccgcaggatatgagcaag

SEQ ID NO: 3442174 - DNA, 25 bp, Homo sapien
gaaagaattcatagcccaccatggc

SEQ ID NO: 3442175 - DNA, 25 bp, Homo sapien
gaactactagagctgtgacatgtct

SEQ ID NO: 3442176 - DNA, 25 bp, Homo sapien
caaaacagaacagcgcaggtattgg

SEQ ID NO: 3442177 - DNA, 25 bp, Homo sapien
gaataaaaactgtgtggacgaagca

SEQ ID NO: 3442178 - DNA, 25 bp, Homo sapien
tgttcatgcagctctttatgtcctg

SEQ ID NO: 3442179 - DNA, 25 bp, Homo sapien
tcctcacaggcatctctgttcatgc

SEQ ID NO: 3442180 - DNA, 25 bp, Homo sapien
tctctgttcatgcagctctttatgt

SEQ ID NO: 3442181 - DNA, 25 bp, Homo sapien
tgcagctctttatgtcctgcagttc

SEQ ID NO: 3442182 - DNA, 25 bp, Homo sapien
ccttgaaggcatgatgattactgca

SEQ ID NO: 3442183 - DNA, 25 bp, Homo sapien
gacaggatagagagttactgcttga

SEQ ID NO: 3442184 - DNA, 25 bp, Homo sapien
tgaaacccttatacattgctgaggg

SEQ ID NO: 3442185 - DNA, 25 bp, Homo sapien
tgggattaccatataactcagcaaa

SEQ ID NO: 3442186 - DNA, 25 bp, Homo sapien
ctgctccccctttttttcaaagatg

SEQ ID NO: 3442187 - DNA, 25 bp, Homo sapien
cttcaacatgtctcaactttctgat

SEQ ID NO: 3442188 - DNA, 25 bp, Homo sapien
tcaacatgtctcaactttctgattt

SEQ ID NO: 3442189 - DNA, 25 bp, Homo sapien
aacatgtctcaactttctgatttat

SEQ ID NO: 3442190 - DNA, 25 bp, Homo sapien
tttatattagattcacagaggcccc

SEQ ID NO: 3442191 - DNA, 25 bp, Homo sapien
gcaataattcgtgttgtgcaccgaa

SEQ ID NO: 3442192 - DNA, 25 bp, Homo sapien
tatcaccccagaaagtatgctcttg

SEQ ID NO: 3442193 - DNA, 25 bp, Homo sapien
tgctaactcaggtaatgggatcatc

SEQ ID NO: 3442194 - DNA, 25 bp, Homo sapien
ggctgaaagtgaagtgcccaaagcc

SEQ ID NO: 3442195 - DNA, 25 bp, Homo sapien
gacctgcagaggtctcgggcatgaa

SEQ ID NO: 3442196 - DNA, 25 bp, Homo sapien
gttgacctgcagaggtctcgggcat

SEQ ID NO: 3442197 - DNA, 25 bp, Homo sapien
cactgacttcgggagaggaaggagc

SEQ ID NO: 3442198 - DNA, 25 bp, Homo sapien
tctgcatggtcggtaaggtggccca

SEQ ID NO: 3442199 - DNA, 25 bp, Homo sapien
ggacatattcataacctccctttgg

SEQ ID NO: 3442200 - DNA, 25 bp, Homo sapien
caggttctctctggacatattcata

SEQ ID NO: 3442201 - DNA, 25 bp, Homo sapien
tttccagcctctcgcgtctgtcgga

SEQ ID NO: 3442202 - DNA, 25 bp, Homo sapien
gagctcatggtagaaggtccatcaa

SEQ ID NO: 3442203 - DNA, 25 bp, Homo sapien
tagaaggtccatcaatttcagccat

SEQ ID NO: 3442204 - DNA, 25 bp, Homo sapien
tccctgagctccaaggatccacagc

SEQ ID NO: 3442205 - DNA, 25 bp, Homo sapien
gggctctgtccactaagtatccagt

SEQ ID NO: 3442206 - DNA, 25 bp, Homo sapien
ggtcagttcttcttgggccacacag

SEQ ID NO: 3442207 - DNA, 25 bp, Homo sapien
cctaatttaatctcaggacctggag

SEQ ID NO: 3442208 - DNA, 25 bp, Homo sapien
ggctccacggttgtatagaaggctg

SEQ ID NO: 3442209 - DNA, 25 bp, Homo sapien
tagggagtcttgctcaaactcagcc

SEQ ID NO: 3442210 - DNA, 25 bp, Homo sapien
catcctgacatcgccattcatccat

SEQ ID NO: 3442211 - DNA, 25 bp, Homo sapien
ctccatcctgacatcgccattcatc

SEQ ID NO: 3442212 - DNA, 25 bp, Homo sapien
ccatcctgacatcgccattcatcca

SEQ ID NO: 3442213 - DNA, 25 bp, Homo sapien
tccatcctgacatcgccattcatcc

SEQ ID NO: 3442214 - DNA, 25 bp, Homo sapien
cccttcatgggtagagtcagccttc

SEQ ID NO: 3442215 - DNA, 25 bp, Homo sapien
tgcccttcatgggtagagtcagcct

SEQ ID NO: 3442216 - DNA, 25 bp, Homo sapien
gcccttcatgggtagagtcagcctt

SEQ ID NO: 3442217 - DNA, 25 bp, Homo sapien
tctccctgaagcttcaatcccagcc

SEQ ID NO: 3442218 - DNA, 25 bp, Homo sapien
ccaaggctcaaagccttcctgggag

SEQ ID NO: 3442219 - DNA, 25 bp, Homo sapien
gccttttctgccaaggctcaaagcc

SEQ ID NO: 3442220 - DNA, 25 bp, Homo sapien
ctggctctccctgaagcttcaatcc

SEQ ID NO: 3442221 - DNA, 25 bp, Homo sapien
ctgcccactcatggagcctgctcac

SEQ ID NO: 3442222 - DNA, 25 bp, Homo sapien
tacctggggtacctcacccgctggc

SEQ ID NO: 3442223 - DNA, 25 bp, Homo sapien
ttggccgcacgtcctgagggtctgg

SEQ ID NO: 3442224 - DNA, 25 bp, Homo sapien
ggccgcacgtcctgagggtctgggc

SEQ ID NO: 3442225 - DNA, 25 bp, Homo sapien
tggccgcacgtcctgagggtctggg

SEQ ID NO: 3442226 - DNA, 25 bp, Homo sapien
ggagaggccgaagcgcttctccact

SEQ ID NO: 3442227 - DNA, 25 bp, Homo sapien
ttaggtagccggagatcatgagctg

SEQ ID NO: 3442228 - DNA, 25 bp, Homo sapien
agatggagctctttaggtagccgga

SEQ ID NO: 3442229 - DNA, 25 bp, Homo sapien
agcagccccgacgtctggctggaga

SEQ ID NO: 3442230 - DNA, 25 bp, Homo sapien
cactatccttgtctctatgtctaac

SEQ ID NO: 3442231 - DNA, 25 bp, Homo sapien
tgtctaacttccgtatgcccatctg

SEQ ID NO: 3442232 - DNA, 25 bp, Homo sapien
ctgaataatggactgaataaaaatc

SEQ ID NO: 3442233 - DNA, 25 bp, Homo sapien
gacgaggtgacccattaaggtggaa

SEQ ID NO: 3442234 - DNA, 25 bp, Homo sapien
ccggctgccaaaatagctcacaaac

SEQ ID NO: 3442235 - DNA, 25 bp, Homo sapien
ttgtcgtagcggtatggctccgaga

SEQ ID NO: 3442236 - DNA, 25 bp, Homo sapien
gatagccccatagccaatcattcgg

SEQ ID NO: 3442237 - DNA, 25 bp, Homo sapien
gtgcgggagagtcatgagcaggccc

SEQ ID NO: 3442238 - DNA, 25 bp, Homo sapien
ggggccgaggttgtgggcaggcaca

SEQ ID NO: 3442239 - DNA, 25 bp, Homo sapien
gggccgaggttgtgggcaggcacag

SEQ ID NO: 3442240 - DNA, 25 bp, Homo sapien
tggggccgaggttgtgggcaggcac

SEQ ID NO: 3442241 - DNA, 25 bp, Homo sapien
gggcgagttgctgttgtgggcaaag

SEQ ID NO: 3442242 - DNA, 25 bp, Homo sapien
tgggcaaagtcatcgatgtaggaga

SEQ ID NO: 3442243 - DNA, 25 bp, Homo sapien
ggtctgtgccacgaacatgatcccc

SEQ ID NO: 3442244 - DNA, 25 bp, Homo sapien
tgtagcttgagcagttgccattgga

SEQ ID NO: 3442245 - DNA, 25 bp, Homo sapien
cagaggccaagggatggcactggtc

SEQ ID NO: 3442246 - DNA, 25 bp, Homo sapien
cctcagaggccaagggatggcactg

SEQ ID NO: 3442247 - DNA, 25 bp, Homo sapien
ggccaagggatggcactggtcctca

SEQ ID NO: 3442248 - DNA, 25 bp, Homo sapien
gccaagggatggcactggtcctcac

SEQ ID NO: 3442249 - DNA, 25 bp, Homo sapien
tgtccacataaaggcgcagcatgag

SEQ ID NO: 3442250 - DNA, 25 bp, Homo sapien
ttctggcatctggttaatgtccaca

SEQ ID NO: 3442251 - DNA, 25 bp, Homo sapien
aatgtccacataaaggcgcagcatg

SEQ ID NO: 3442252 - DNA, 25 bp, Homo sapien
tctggcatctggttaatgtccacat

SEQ ID NO: 3442253 - DNA, 25 bp, Homo sapien
atttgaaccgaggtcccctggctca

SEQ ID NO: 3442254 - DNA, 25 bp, Homo sapien
tggactctgatcacagctttaggag

SEQ ID NO: 3442255 - DNA, 25 bp, Homo sapien
agtggcagtcagttagctagggtct

SEQ ID NO: 3442256 - DNA, 25 bp, Homo sapien
cagtggtgctgctaggatttgaacc

SEQ ID NO: 3442257 - DNA, 25 bp, Homo sapien
cttcctggcaggtgagtctgtgact

SEQ ID NO: 3442258 - DNA, 25 bp, Homo sapien
tttcgccgaaactgaagctcacgtt

SEQ ID NO: 3442259 - DNA, 25 bp, Homo sapien
tgtgactgctaagacctttcgccga

SEQ ID NO: 3442260 - DNA, 25 bp, Homo sapien
ggtcctttatggtcaggctgatacc

SEQ ID NO: 3442261 - DNA, 25 bp, Homo sapien
gctctgaggccgcagatacagggac

SEQ ID NO: 3442262 - DNA, 25 bp, Homo sapien
caggcagagaatcccataatcatgg

SEQ ID NO: 3442263 - DNA, 25 bp, Homo sapien
ctggctgattgtagacaggaagact

SEQ ID NO: 3442264 - DNA, 25 bp, Homo sapien
caagagaccatctttaccccacaga

SEQ ID NO: 3442265 - DNA, 25 bp, Homo sapien
ccatgaaacacaggctgtatgaagg

SEQ ID NO: 3442266 - DNA, 25 bp, Homo sapien
cacaggctgtatgaaggatcaaggc

SEQ ID NO: 3442267 - DNA, 25 bp, Homo sapien
tgaaacacaggctgtatgaaggatc

SEQ ID NO: 3442268 - DNA, 25 bp, Homo sapien
aacacaggctgtatgaaggatcaag

SEQ ID NO: 3442269 - DNA, 25 bp, Homo sapien
cagtaatggattgcaagatttccct

SEQ ID NO: 3442270 - DNA, 25 bp, Homo sapien
aatggattgcaagatttcccttcct

SEQ ID NO: 3442271 - DNA, 25 bp, Homo sapien
aaacagtaatggattgcaagatttc

SEQ ID NO: 3442272 - DNA, 25 bp, Homo sapien
cagggagcaggctctaggtttcctg

SEQ ID NO: 3442273 - DNA, 25 bp, Homo sapien
ctgagatcatcatgaggcaaatgct

SEQ ID NO: 3442274 - DNA, 25 bp, Homo sapien
tctgagatcatcatgaggcaaatgc

SEQ ID NO: 3442275 - DNA, 25 bp, Homo sapien
gaggcaaatgctggatttccccaca

SEQ ID NO: 3442276 - DNA, 25 bp, Homo sapien
gcctgtgaggttcctacaggactca

SEQ ID NO: 3442277 - DNA, 25 bp, Homo sapien
ccatagggaaggacctgctgggctg

SEQ ID NO: 3442278 - DNA, 25 bp, Homo sapien
tccctgtaactaggagtggtgcgca

SEQ ID NO: 3442279 - DNA, 25 bp, Homo sapien
ggctggagagcactcatttgggctt

SEQ ID NO: 3442280 - DNA, 25 bp, Homo sapien
gggctctgcttagagggagagtcct

SEQ ID NO: 3442281 - DNA, 25 bp, Homo sapien
ggctctgcttagagggagagtcctt

SEQ ID NO: 3442282 - DNA, 25 bp, Homo sapien
tctgcttagagggagagtccttgcc

SEQ ID NO: 3442283 - DNA, 25 bp, Homo sapien
gctctgcttagagggagagtccttg

SEQ ID NO: 3442284 - DNA, 25 bp, Homo sapien
taatgaactggatcacagtcaggtt

SEQ ID NO: 3442285 - DNA, 25 bp, Homo sapien
tttaatgaactggatcacagtcagg

SEQ ID NO: 3442286 - DNA, 25 bp, Homo sapien
tgaactggatcacagtcaggtttgg

SEQ ID NO: 3442287 - DNA, 25 bp, Homo sapien
ctttaatgaactggatcacagtcag

SEQ ID NO: 3442288 - DNA, 25 bp, Homo sapien
tgccccaacatcaaatcttaggaag

SEQ ID NO: 3442289 - DNA, 25 bp, Homo sapien
taggcctaattccttcctgttgcag

SEQ ID NO: 3442290 - DNA, 25 bp, Homo sapien
cctgccccaacatcaaatcttagga

SEQ ID NO: 3442291 - DNA, 25 bp, Homo sapien
ggaagctcttcccaagaataggcct

SEQ ID NO: 3442292 - DNA, 25 bp, Homo sapien
gaaaccaccagagacaatctggcct

SEQ ID NO: 3442293 - DNA, 25 bp, Homo sapien
tagaacacttgctctaggttccaat

SEQ ID NO: 3442294 - DNA, 25 bp, Homo sapien
aacacttgctctaggttccaatttc

SEQ ID NO: 3442295 - DNA, 25 bp, Homo sapien
ccagagacaatctggcctagaacac

SEQ ID NO: 3442296 - DNA, 25 bp, Homo sapien
cagccatggatgacaagcatacctg

SEQ ID NO: 3442297 - DNA, 25 bp, Homo sapien
aggcaaagggcaccgcatcccacag

SEQ ID NO: 3442298 - DNA, 25 bp, Homo sapien
gctgtgatggaaaactggcgctcca

SEQ ID NO: 3442299 - DNA, 25 bp, Homo sapien
acgatgaccgaagggaaggagaggc

SEQ ID NO: 3442300 - DNA, 25 bp, Homo sapien
tctggtgtgtgatgcccgcaatctg

SEQ ID NO: 3442301 - DNA, 25 bp, Homo sapien
atgcccgcaatctggtggctggagc

SEQ ID NO: 3442302 - DNA, 25 bp, Homo sapien
gctggagcagccgataaagaagagc

SEQ ID NO: 3442303 - DNA, 25 bp, Homo sapien
cgataaagaagagcggcaggctgaa

SEQ ID NO: 3442304 - DNA, 25 bp, Homo sapien
tgatgtattccacacgagtgctggg

SEQ ID NO: 3442305 - DNA, 25 bp, Homo sapien
accacccagcttgagcagcctgcgt

SEQ ID NO: 3442306 - DNA, 25 bp, Homo sapien
gtcgcagacagggttaaagccgtcc

SEQ ID NO: 3442307 - DNA, 25 bp, Homo sapien
taaagccgtccaatgggcaggagca

SEQ ID NO: 3442308 - DNA, 25 bp, Homo sapien
tctctggaagggctctcaggcccag

SEQ ID NO: 3442309 - DNA, 25 bp, Homo sapien
gaatcggttcccatatccacaggag

SEQ ID NO: 3442310 - DNA, 25 bp, Homo sapien
tgtcataaccaccagcctgatgctg

SEQ ID NO: 3442311 - DNA, 25 bp, Homo sapien
tagccctcctaagattcagaatgca

SEQ ID NO: 3442312 - DNA, 25 bp, Homo sapien
caaggactctgcgaagtgatctgga

SEQ ID NO: 3442313 - DNA, 25 bp, Homo sapien
gatcgtgacccgttggctgagcaaa

SEQ ID NO: 3442314 - DNA, 25 bp, Homo sapien
gaggcccaagttccacagccagttg

SEQ ID NO: 3442315 - DNA, 25 bp, Homo sapien
tggagtgtttgatcccagcctgcac

SEQ ID NO: 3442316 - DNA, 25 bp, Homo sapien
tgcacgttgagtcgcaggatcctgc

SEQ ID NO: 3442317 - DNA, 25 bp, Homo sapien
gagcatgaaggagggtgtgtgggtg

SEQ ID NO: 3442318 - DNA, 25 bp, Homo sapien
cagatggctgcacgttgagtcgcag

SEQ ID NO: 3442319 - DNA, 25 bp, Homo sapien
cacgcagctgcagttggtgtagaaa

SEQ ID NO: 3442320 - DNA, 25 bp, Homo sapien
tggtttcctagatgcacctcctgca

SEQ ID NO: 3442321 - DNA, 25 bp, Homo sapien
gcctcagtaggttgccatgggatga

SEQ ID NO: 3442322 - DNA, 25 bp, Homo sapien
catgggatgaacacagttaaggcca

SEQ ID NO: 3442323 - DNA, 25 bp, Homo sapien
gacagggccctaggtatgtcctcct

SEQ ID NO: 3442324 - DNA, 25 bp, Homo sapien
tgaactcaggtgacaatttgtcagg

SEQ ID NO: 3442325 - DNA, 25 bp, Homo sapien
tcttggcccaaaaggcagtgctcag

SEQ ID NO: 3442326 - DNA, 25 bp, Homo sapien
taggacgagggccacaaagatcttg

SEQ ID NO: 3442327 - DNA, 25 bp, Homo sapien
gggccagcaggcattcttaggacga

SEQ ID NO: 3442328 - DNA, 25 bp, Homo sapien
tgtggaaaccccagcatacggctgg

SEQ ID NO: 3442329 - DNA, 25 bp, Homo sapien
ggcatttatggagcgcttactacgg

SEQ ID NO: 3442330 - DNA, 25 bp, Homo sapien
tgagcgaggtgtacattagccccat

SEQ ID NO: 3442331 - DNA, 25 bp, Homo sapien
tactcctacagttggcaagacctgg

SEQ ID NO: 3442332 - DNA, 25 bp, Homo sapien
ggaacatgaactggatgcccacagc

SEQ ID NO: 3442333 - DNA, 25 bp, Homo sapien
cacagccaaagtcttgtcttctttc

SEQ ID NO: 3442334 - DNA, 25 bp, Homo sapien
atgcccacagccaaagtcttgtctt

SEQ ID NO: 3442335 - DNA, 25 bp, Homo sapien
aatcctcaggaacatgaactggatg

SEQ ID NO: 3442336 - DNA, 25 bp, Homo sapien
caatggtcccaagcaagatctttac

SEQ ID NO: 3442337 - DNA, 25 bp, Homo sapien
tcctgacgggctgtctagactctgc

SEQ ID NO: 3442338 - DNA, 25 bp, Homo sapien
ggtctgtcaccccatgagcttgtga

SEQ ID NO: 3442339 - DNA, 25 bp, Homo sapien
gattgaattccgctcatgcctgtgc

SEQ ID NO: 3442340 - DNA, 25 bp, Homo sapien
gtagtagcgacagacagctcgacgc

SEQ ID NO: 3442341 - DNA, 25 bp, Homo sapien
cggtttcggagcaggtcattattgt

SEQ ID NO: 3442342 - DNA, 25 bp, Homo sapien
tgcacacaggtggtgtcgatggcgc

SEQ ID NO: 3442343 - DNA, 25 bp, Homo sapien
tgtcgatggcgctgccgtggatcac

SEQ ID NO: 3442344 - DNA, 25 bp, Homo sapien
ccagggcatggacgtcagcagtcat

SEQ ID NO: 3442345 - DNA, 25 bp, Homo sapien
caagttcctgcatagactctgtggt

SEQ ID NO: 3442346 - DNA, 25 bp, Homo sapien
gacaagataagtcccatgatgaggg

SEQ ID NO: 3442347 - DNA, 25 bp, Homo sapien
caattttatattgcgccacctgcca

SEQ ID NO: 3442348 - DNA, 25 bp, Homo sapien
tggccccgacactagcaattgctgc

SEQ ID NO: 3442349 - DNA, 25 bp, Homo sapien
caattgctgctctacggcagggctg

SEQ ID NO: 3442350 - DNA, 25 bp, Homo sapien
tcaggacagccaaaactaaggcgaa

SEQ ID NO: 3442351 - DNA, 25 bp, Homo sapien
taaggcgaagcagatcacagaacct

SEQ ID NO: 3442352 - DNA, 25 bp, Homo sapien
tcatagctgaacgagcctgaaggct

SEQ ID NO: 3442353 - DNA, 25 bp, Homo sapien
tgagtctccccgcttcagctaagga

SEQ ID NO: 3442354 - DNA, 25 bp, Homo sapien
tatcatgtgggaaagtctcaaagcc

SEQ ID NO: 3442355 - DNA, 25 bp, Homo sapien
tggttcagactagcaagcaaaggct

SEQ ID NO: 3442356 - DNA, 25 bp, Homo sapien
ataataagctgtatctataattcca

SEQ ID NO: 3442357 - DNA, 25 bp, Homo sapien
aataagctgtatctataattccaga

SEQ ID NO: 3442358 - DNA, 25 bp, Homo sapien
cctaaaagcctcatattgttgaagg

SEQ ID NO: 3442359 - DNA, 25 bp, Homo sapien
taaaagcctcatattgttgaaggag

SEQ ID NO: 3442360 - DNA, 25 bp, Homo sapien
tggaaatgatgtggttgttgcaaac

SEQ ID NO: 3442361 - DNA, 25 bp, Homo sapien
tgaatccagtaaaacctaaatctaa

SEQ ID NO: 3442362 - DNA, 25 bp, Homo sapien
caaacctctaatgcagtttatgaag

SEQ ID NO: 3442363 - DNA, 25 bp, Homo sapien
tctaagttaatggaaatgatgtggt

SEQ ID NO: 3442364 - DNA, 25 bp, Homo sapien
agaggaaatccatcacccagaggct

SEQ ID NO: 3442365 - DNA, 25 bp, Homo sapien
agaagagaggaaatccatcacccag

SEQ ID NO: 3442366 - DNA, 25 bp, Homo sapien
ctccgcgtcctgtaatgggttgggc

SEQ ID NO: 3442367 - DNA, 25 bp, Homo sapien
ctgtaatgggttgggcgctgtccaa

SEQ ID NO: 3442368 - DNA, 25 bp, Homo sapien
tactgagattctatggtatgtcaaa

SEQ ID NO: 3442369 - DNA, 25 bp, Homo sapien
gattctatggtatgtcaaatcttgt

SEQ ID NO: 3442370 - DNA, 25 bp, Homo sapien
ggaataggagcagataaggcaaacg

SEQ ID NO: 3442371 - DNA, 25 bp, Homo sapien
ggcaaacggtgtgaaatactataaa

SEQ ID NO: 3442372 - DNA, 25 bp, Homo sapien
actggctgtggttggggccttagct

SEQ ID NO: 3442373 - DNA, 25 bp, Homo sapien
cctgttcttagcacaaggactggct

SEQ ID NO: 3442374 - DNA, 25 bp, Homo sapien
ggccttagctttgccctgccagtgt

SEQ ID NO: 3442375 - DNA, 25 bp, Homo sapien
gttcttagcacaaggactggctgtg

SEQ ID NO: 3442376 - DNA, 25 bp, Homo sapien
tctttgacacaagcttttctgacct

SEQ ID NO: 3442377 - DNA, 25 bp, Homo sapien
gtagtgacactctttttccaggaag

SEQ ID NO: 3442378 - DNA, 25 bp, Homo sapien
ttttctgacctttgtagtgacactc

SEQ ID NO: 3442379 - DNA, 25 bp, Homo sapien
tcacctcccgaatctttgacacaag

SEQ ID NO: 3442380 - DNA, 25 bp, Homo sapien
tccgtgcccctctcatctacaatgt

SEQ ID NO: 3442381 - DNA, 25 bp, Homo sapien
gcagtagtgcaccatggccttcacc

SEQ ID NO: 3442382 - DNA, 25 bp, Homo sapien
gatactgcagtagtgcaccatggcc

SEQ ID NO: 3442383 - DNA, 25 bp, Homo sapien
tacaatgtgatactgcagtagtgca

SEQ ID NO: 3442384 - DNA, 25 bp, Homo sapien
tgatgacgtccctgagatcacccag

SEQ ID NO: 3442385 - DNA, 25 bp, Homo sapien
gagatcacccagcaggtagcccctt

SEQ ID NO: 3442386 - DNA, 25 bp, Homo sapien
tgagatcacccagcaggtagcccct

SEQ ID NO: 3442387 - DNA, 25 bp, Homo sapien
gagcacagagtgtgatgacgtccct

SEQ ID NO: 3442388 - DNA, 25 bp, Homo sapien
ctgagcctctagtgccttcgctggg

SEQ ID NO: 3442389 - DNA, 25 bp, Homo sapien
ggccgccgaagcagtagcactggaa

SEQ ID NO: 3442390 - DNA, 25 bp, Homo sapien
tgtctcgaaagtctgaggagccgca

SEQ ID NO: 3442391 - DNA, 25 bp, Homo sapien
ggtcggtccgttcgctgtctcgaaa

SEQ ID NO: 3442392 - DNA, 25 bp, Homo sapien
gcaccgtcaggttggcgcctacgat

SEQ ID NO: 3442393 - DNA, 25 bp, Homo sapien
cgcaccagcgcgtggttgagctgca

SEQ ID NO: 3442394 - DNA, 25 bp, Homo sapien
ctaggcccagcaggcgaagctcggc

SEQ ID NO: 3442395 - DNA, 25 bp, Homo sapien
tcggccagcggtgccagcgcagcgt

SEQ ID NO: 3442396 - DNA, 25 bp, Homo sapien
acggctcagcgcgttgcccgctagg

SEQ ID NO: 3442397 - DNA, 25 bp, Homo sapien
tccaggcgcgccaggcgcagggcgg

SEQ ID NO: 3442398 - DNA, 25 bp, Homo sapien
ctccaggcgcgccaggcgcagggcg

SEQ ID NO: 3442399 - DNA, 25 bp, Homo sapien
tgctccaggcgcgccaggcgcaggg

SEQ ID NO: 3442400 - DNA, 25 bp, Homo sapien
agctgctccaggcgcgccaggcgca

SEQ ID NO: 3442401 - DNA, 25 bp, Homo sapien
gtggcgttgcgcagccaggccagca

SEQ ID NO: 3442402 - DNA, 25 bp, Homo sapien
cgcagggggttgtcggcgagcagca

SEQ ID NO: 3442403 - DNA, 25 bp, Homo sapien
gtccaggccggccagcgcgttgagg

SEQ ID NO: 3442404 - DNA, 25 bp, Homo sapien
aggcgccgcgagtcgggcacgcgct

SEQ ID NO: 3442405 - DNA, 25 bp, Homo sapien
aagatgaggccgatgagtgccagca

SEQ ID NO: 3442406 - DNA, 25 bp, Homo sapien
gcaggttgcgcatccagcgctggat

SEQ ID NO: 3442407 - DNA, 25 bp, Homo sapien
agcccgaagaacacgtaggaggctt

SEQ ID NO: 3442408 - DNA, 25 bp, Homo sapien
gatgccgcggcggtttaggtagagc

SEQ ID NO: 3442409 - DNA, 25 bp, Homo sapien
tcgtagcggtagtggtagccctcca

SEQ ID NO: 3442410 - DNA, 25 bp, Homo sapien
aacgagagggtacggcttagcgcct

SEQ ID NO: 3442411 - DNA, 25 bp, Homo sapien
aacggactttcagtggttcaggagg

SEQ ID NO: 3442412 - DNA, 25 bp, Homo sapien
tgggacaaagggctcaaaatccaca

SEQ ID NO: 3442413 - DNA, 25 bp, Homo sapien
gaccagcactgagtatcgggaggtc

SEQ ID NO: 3442414 - DNA, 25 bp, Homo sapien
cagcactgagtatcgggaggtcagc

SEQ ID NO: 3442415 - DNA, 25 bp, Homo sapien
ctgagtatcgggaggtcagcgccct

SEQ ID NO: 3442416 - DNA, 25 bp, Homo sapien
gcaggaggacgaaagtcagatcggg

SEQ ID NO: 3442417 - DNA, 25 bp, Homo sapien
tggaccttgactagtgaatggcagg

SEQ ID NO: 3442418 - DNA, 25 bp, Homo sapien
gacatcccagggacggattcctcac

SEQ ID NO: 3442419 - DNA, 25 bp, Homo sapien
atgaggacatcccagggacggattc

SEQ ID NO: 3442420 - DNA, 25 bp, Homo sapien
ggacggattcctcactggaccttga

SEQ ID NO: 3442421 - DNA, 25 bp, Homo sapien
caaggtgctgagcttctgaccctga

SEQ ID NO: 3442422 - DNA, 25 bp, Homo sapien
catagagaaatcgaagggcagcaac

SEQ ID NO: 3442423 - DNA, 25 bp, Homo sapien
tgacttcctgtgtgcagacgcagca

SEQ ID NO: 3442424 - DNA, 25 bp, Homo sapien
caaggaatccccaagggcgaagagc

SEQ ID NO: 3442425 - DNA, 25 bp, Homo sapien
ttaaagctgactcggctcccacacg

SEQ ID NO: 3442426 - DNA, 25 bp, Homo sapien
ggctcccacacggatcggccaatag

SEQ ID NO: 3442427 - DNA, 25 bp, Homo sapien
ggatcggccaatagatgtcgctgca

SEQ ID NO: 3442428 - DNA, 25 bp, Homo sapien
aagctgactcggctcccacacggat

SEQ ID NO: 3442429 - DNA, 25 bp, Homo sapien
tcatctttacacagcgccggatgga

SEQ ID NO: 3442430 - DNA, 25 bp, Homo sapien
ccggatggatggaaatcttggctca

SEQ ID NO: 3442431 - DNA, 25 bp, Homo sapien
cctcactgggacaattgcaagggtc

SEQ ID NO: 3442432 - DNA, 25 bp, Homo sapien
cattcggtccgagtgtgtccttagt

SEQ ID NO: 3442433 - DNA, 25 bp, Homo sapien
ggcctatggtttgtagacactgaca

SEQ ID NO: 3442434 - DNA, 25 bp, Homo sapien
ttttcaaaccaggtgctgcggaacc

SEQ ID NO: 3442435 - DNA, 25 bp, Homo sapien
gccttttgtcctgagagccgagcca

SEQ ID NO: 3442436 - DNA, 25 bp, Homo sapien
tacactcttatagggtctcatggac

SEQ ID NO: 3442437 - DNA, 25 bp, Homo sapien
tgaaagtcagcggtcagggctctgt

SEQ ID NO: 3442438 - DNA, 25 bp, Homo sapien
gagttcctgacaagctggttcctac

SEQ ID NO: 3442439 - DNA, 25 bp, Homo sapien
tgacgcaggaattgttatgaggccc

SEQ ID NO: 3442440 - DNA, 25 bp, Homo sapien
ctacatggtgcagtgaaaggaactc

SEQ ID NO: 3442441 - DNA, 25 bp, Homo sapien
gaagccgcaggtcatgtttccaagc

SEQ ID NO: 3442442 - DNA, 25 bp, Homo sapien
tacactagaacgcacagctttggga

SEQ ID NO: 3442443 - DNA, 25 bp, Homo sapien
aattagaagacggtgccctttccag

SEQ ID NO: 3442444 - DNA, 25 bp, Homo sapien
gactcagctctatgccaagtactgg

SEQ ID NO: 3442445 - DNA, 25 bp, Homo sapien
gactttcttaccagcagttacctag

SEQ ID NO: 3442446 - DNA, 25 bp, Homo sapien
gttacctagactgaggcaagctgtg

SEQ ID NO: 3442447 - DNA, 25 bp, Homo sapien
gctgtgtggactcacccaagtatat

SEQ ID NO: 3442448 - DNA, 25 bp, Homo sapien
tttcaagtgcatggccctgtctaga

SEQ ID NO: 3442449 - DNA, 25 bp, Homo sapien
tgggcttccagatcacggtgatgaa

SEQ ID NO: 3442450 - DNA, 25 bp, Homo sapien
tggccttggaattggacttgagatg

SEQ ID NO: 3442451 - DNA, 25 bp, Homo sapien
ggctccactctcgtgcactcggatg

SEQ ID NO: 3442452 - DNA, 25 bp, Homo sapien
gctcaacaacagatagacgggccgg

SEQ ID NO: 3442453 - DNA, 25 bp, Homo sapien
gagcacctggtggattcagttgccc

SEQ ID NO: 3442454 - DNA, 25 bp, Homo sapien
cagaggctcgctgtctcctgagcac

SEQ ID NO: 3442455 - DNA, 25 bp, Homo sapien
gaggctcgctgtctcctgagcacct

SEQ ID NO: 3442456 - DNA, 25 bp, Homo sapien
gcacctggtggattcagttgccctc

SEQ ID NO: 3442457 - DNA, 25 bp, Homo sapien
catcggtggcagctgaagtggtcag

SEQ ID NO: 3442458 - DNA, 25 bp, Homo sapien
agactcagctctggagtctcctgag

SEQ ID NO: 3442459 - DNA, 25 bp, Homo sapien
actcagctctggagtctcctgagag

SEQ ID NO: 3442460 - DNA, 25 bp, Homo sapien
tgcccagggaactccttttcatggg

SEQ ID NO: 3442461 - DNA, 25 bp, Homo sapien
gatgtgcattgagtgcttcctgcgc

SEQ ID NO: 3442462 - DNA, 25 bp, Homo sapien
tgcattgagtgcttcctgcgcacca

SEQ ID NO: 3442463 - DNA, 25 bp, Homo sapien
ttgagtgcttcctgcgcaccagcct

SEQ ID NO: 3442464 - DNA, 25 bp, Homo sapien
catgagatgtgcattgagtgcttcc

SEQ ID NO: 3442465 - DNA, 25 bp, Homo sapien
ggatggtgctatccatggccacggg

SEQ ID NO: 3442466 - DNA, 25 bp, Homo sapien
agtgggtgctgataaagtttgatga

SEQ ID NO: 3442467 - DNA, 25 bp, Homo sapien
cagagccaggtgtggatacccatct

SEQ ID NO: 3442468 - DNA, 25 bp, Homo sapien
ggtgtggatacccatctgggtcaca

SEQ ID NO: 3442469 - DNA, 25 bp, Homo sapien
gccactgcaagagatgggagaggag

SEQ ID NO: 3442470 - DNA, 25 bp, Homo sapien
agcagccactgcaagagatgggaga

SEQ ID NO: 3442471 - DNA, 25 bp, Homo sapien
cagccactgcaagagatgggagagg

SEQ ID NO: 3442472 - DNA, 25 bp, Homo sapien
cagcagccactgcaagagatgggag

SEQ ID NO: 3442473 - DNA, 25 bp, Homo sapien
gcagggcactcctgtctatacgcat

SEQ ID NO: 3442474 - DNA, 25 bp, Homo sapien
ggagcagggcactcctgtctatacg

SEQ ID NO: 3442475 - DNA, 25 bp, Homo sapien
agcagggcactcctgtctatacgca

SEQ ID NO: 3442476 - DNA, 25 bp, Homo sapien
gcaggagcagggcactcctgtctat

SEQ ID NO: 3442477 - DNA, 25 bp, Homo sapien
agtgttttctgacggccctctcagc

SEQ ID NO: 3442478 - DNA, 25 bp, Homo sapien
ccgttccactcaatggttttgctgt

SEQ ID NO: 3442479 - DNA, 25 bp, Homo sapien
agccgttcccgttccactcaatggt

SEQ ID NO: 3442480 - DNA, 25 bp, Homo sapien
tcagtgttttctgacggccctctca

SEQ ID NO: 3442481 - DNA, 25 bp, Homo sapien
ccccactctcttcagggctctgagt

SEQ ID NO: 3442482 - DNA, 25 bp, Homo sapien
tgccccactctcttcagggctctga

SEQ ID NO: 3442483 - DNA, 25 bp, Homo sapien
tggctgccccactctcttcagggct

SEQ ID NO: 3442484 - DNA, 25 bp, Homo sapien
gctgccccactctcttcagggctct

SEQ ID NO: 3442485 - DNA, 25 bp, Homo sapien
caagcaactctcctgccttgagtag

SEQ ID NO: 3442486 - DNA, 25 bp, Homo sapien
caactctcctgccttgagtagctgg

SEQ ID NO: 3442487 - DNA, 25 bp, Homo sapien
agcaactctcctgccttgagtagct

SEQ ID NO: 3442488 - DNA, 25 bp, Homo sapien
tggtgctatctcagcccgggttcaa

SEQ ID NO: 3442489 - DNA, 25 bp, Homo sapien
gggcaggttgacacacaatacacgc

SEQ ID NO: 3442490 - DNA, 25 bp, Homo sapien
gctgacacccagcattggccggcag

SEQ ID NO: 3442491 - DNA, 25 bp, Homo sapien
gcacactaacccgtggcacaggcat

SEQ ID NO: 3442492 - DNA, 25 bp, Homo sapien
ttgacacacaatacacgcacgggca

SEQ ID NO: 3442493 - DNA, 25 bp, Homo sapien
tcctgtgtggtctccccggcagggc

SEQ ID NO: 3442494 - DNA, 25 bp, Homo sapien
ggctccgattgcgtcctggttctgc

SEQ ID NO: 3442495 - DNA, 25 bp, Homo sapien
tgcgttcgcggccaccgcgggatct

SEQ ID NO: 3442496 - DNA, 25 bp, Homo sapien
gggatctagtaccagctctcctcca

SEQ ID NO: 3442497 - DNA, 25 bp, Homo sapien
catgatatcagctggtgacgtaacc

SEQ ID NO: 3442498 - DNA, 25 bp, Homo sapien
cattcaaggcaagagggctaattca

SEQ ID NO: 3442499 - DNA, 25 bp, Homo sapien
gacgtaaccctgatcacttcaagtg

SEQ ID NO: 3442500 - DNA, 25 bp, Homo sapien
ggctaattcaactccatctggaggg

SEQ ID NO: 3442501 - DNA, 25 bp, Homo sapien
caacgaagatgggatgtcgctgaag

SEQ ID NO: 3442502 - DNA, 25 bp, Homo sapien
tgtggttccgcagcaggagagaacc

SEQ ID NO: 3442503 - DNA, 25 bp, Homo sapien
ccaggaggacgcctctgatgccgag

SEQ ID NO: 3442504 - DNA, 25 bp, Homo sapien
ctgattggaagaggcgccgctaggg

SEQ ID NO: 3442505 - DNA, 25 bp, Homo sapien
ccattacaatttgtaacagaagtcc

SEQ ID NO: 3442506 - DNA, 25 bp, Homo sapien
cattacaatttgtaacagaagtccc

SEQ ID NO: 3442507 - DNA, 25 bp, Homo sapien
agtccattacaatttgtaacagaag

SEQ ID NO: 3442508 - DNA, 25 bp, Homo sapien
tccattacaatttgtaacagaagtc

SEQ ID NO: 3442509 - DNA, 25 bp, Homo sapien
tcctcttcttggatatttgcactgc

SEQ ID NO: 3442510 - DNA, 25 bp, Homo sapien
cctcttcttggatatttgcactgcc

SEQ ID NO: 3442511 - DNA, 25 bp, Homo sapien
cttcctcttcttggatatttgcact

SEQ ID NO: 3442512 - DNA, 25 bp, Homo sapien
tcttcttggatatttgcactgccat

SEQ ID NO: 3442513 - DNA, 25 bp, Homo sapien
gcgccgtcgttctccgaacccagtc

SEQ ID NO: 3442514 - DNA, 25 bp, Homo sapien
ccgcaggaacgccaggaagcctagg

SEQ ID NO: 3442515 - DNA, 25 bp, Homo sapien
tggctggggcctctcactcaatcca

SEQ ID NO: 3442516 - DNA, 25 bp, Homo sapien
aagcctaggccgcttccagggcagg

SEQ ID NO: 3442517 - DNA, 25 bp, Homo sapien
aaatgctcacaaacgccttctccgg

SEQ ID NO: 3442518 - DNA, 25 bp, Homo sapien
ggggcgcctggtgcccatctctctg

SEQ ID NO: 3442519 - DNA, 25 bp, Homo sapien
ctccgggacagaaggggcgcctggt

SEQ ID NO: 3442520 - DNA, 25 bp, Homo sapien
aatgctcacaaacgccttctccggg

SEQ ID NO: 3442521 - DNA, 25 bp, Homo sapien
atccccaagtcagactcgtcatcat

SEQ ID NO: 3442522 - DNA, 25 bp, Homo sapien
gtcagactcgtcatcatctcttcat

SEQ ID NO: 3442523 - DNA, 25 bp, Homo sapien
ccaagtcagactcgtcatcatctct

SEQ ID NO: 3442524 - DNA, 25 bp, Homo sapien
tctcagacaaatgcctctaagtcat

SEQ ID NO: 3442525 - DNA, 25 bp, Homo sapien
acccttgttccaacaggagtgcagc

SEQ ID NO: 3442526 - DNA, 25 bp, Homo sapien
cttgttccaacaggagtgcagcaac

SEQ ID NO: 3442527 - DNA, 25 bp, Homo sapien
ccaaacccttgttccaacaggagtg

SEQ ID NO: 3442528 - DNA, 25 bp, Homo sapien
caaacccttgttccaacaggagtgc

SEQ ID NO: 3442529 - DNA, 25 bp, Homo sapien
agctttgaagatgccatcagcgaca

SEQ ID NO: 3442530 - DNA, 25 bp, Homo sapien
tccagagtagccatcttcagccagc

SEQ ID NO: 3442531 - DNA, 25 bp, Homo sapien
aaactcattcagttcagctttgaag

SEQ ID NO: 3442532 - DNA, 25 bp, Homo sapien
gccagctcccgagtaagaaactcat

SEQ ID NO: 3442533 - DNA, 25 bp, Homo sapien
ctgtcctggttggtgtaactcgcac

SEQ ID NO: 3442534 - DNA, 25 bp, Homo sapien
tttctgtcctggttggtgtaactcg

SEQ ID NO: 3442535 - DNA, 25 bp, Homo sapien
ggctaagataatgatttctgtcctg

SEQ ID NO: 3442536 - DNA, 25 bp, Homo sapien
gctaagataatgatttctgtcctgg

SEQ ID NO: 3442537 - DNA, 25 bp, Homo sapien
aactacagcagtcagttcccgaatc

SEQ ID NO: 3442538 - DNA, 25 bp, Homo sapien
ctacagcagtcagttcccgaatccg

SEQ ID NO: 3442539 - DNA, 25 bp, Homo sapien
agcagtcagttcccgaatccgccgg

SEQ ID NO: 3442540 - DNA, 25 bp, Homo sapien
ctgaactacagcagtcagttcccga

SEQ ID NO: 3442541 - DNA, 25 bp, Homo sapien
ctacactgccctctggaaagccaaa

SEQ ID NO: 3442542 - DNA, 25 bp, Homo sapien
ctctacactgccctctggaaagcca

SEQ ID NO: 3442543 - DNA, 25 bp, Homo sapien
tacactgccctctggaaagccaaac

SEQ ID NO: 3442544 - DNA, 25 bp, Homo sapien
tctacactgccctctggaaagccaa

SEQ ID NO: 3442545 - DNA, 25 bp, Homo sapien
taaccatcagccattagcagaatag

SEQ ID NO: 3442546 - DNA, 25 bp, Homo sapien
ctacggaggccaaaagatcggacac

SEQ ID NO: 3442547 - DNA, 25 bp, Homo sapien
tcttcttccaacgtagcctacggag

SEQ ID NO: 3442548 - DNA, 25 bp, Homo sapien
taccagtagtagtgtggcccaagac

SEQ ID NO: 3442549 - DNA, 25 bp, Homo sapien
gcaagggatatcctgttaccatcac

SEQ ID NO: 3442550 - DNA, 25 bp, Homo sapien
gaagcaagggatatcctgttaccat

SEQ ID NO: 3442551 - DNA, 25 bp, Homo sapien
aagggatatcctgttaccatcacca

SEQ ID NO: 3442552 - DNA, 25 bp, Homo sapien
aaggaagcaagggatatcctgttac

SEQ ID NO: 3442553 - DNA, 25 bp, Homo sapien
tagtggccaccttttcagcataaag

SEQ ID NO: 3442554 - DNA, 25 bp, Homo sapien
ctctagtggccaccttttcagcata

SEQ ID NO: 3442555 - DNA, 25 bp, Homo sapien
tctagtggccaccttttcagcataa

SEQ ID NO: 3442556 - DNA, 25 bp, Homo sapien
ctagtggccaccttttcagcataaa

SEQ ID NO: 3442557 - DNA, 25 bp, Homo sapien
gccctcctaggagtttgtaacgcag

SEQ ID NO: 3442558 - DNA, 25 bp, Homo sapien
cacagcaagccctcctaggagtttg

SEQ ID NO: 3442559 - DNA, 25 bp, Homo sapien
cctaggagtttgtaacgcagagact

SEQ ID NO: 3442560 - DNA, 25 bp, Homo sapien
gagtttgtaacgcagagactctgcc

SEQ ID NO: 3442561 - DNA, 25 bp, Homo sapien
atgaaccgcagcacaccatagcagg

SEQ ID NO: 3442562 - DNA, 25 bp, Homo sapien
gaaccgcagcacaccatagcaggcc

SEQ ID NO: 3442563 - DNA, 25 bp, Homo sapien
gatgaaccgcagcacaccatagcag

SEQ ID NO: 3442564 - DNA, 25 bp, Homo sapien
tgaaccgcagcacaccatagcaggc

SEQ ID NO: 3442565 - DNA, 25 bp, Homo sapien
accacaacctcgcagcctttggccc

SEQ ID NO: 3442566 - DNA, 25 bp, Homo sapien
gtttcccagacaccacaacctcgca

SEQ ID NO: 3442567 - DNA, 25 bp, Homo sapien
tctgtcctcggagtttcccagacac

SEQ ID NO: 3442568 - DNA, 25 bp, Homo sapien
agacaccacaacctcgcagcctttg

SEQ ID NO: 3442569 - DNA, 25 bp, Homo sapien
cagcagtgtcaacgtagtagttaac

SEQ ID NO: 3442570 - DNA, 25 bp, Homo sapien
gtggcgcacagcagtgtcaacgtag

SEQ ID NO: 3442571 - DNA, 25 bp, Homo sapien
gcacagcagtgtcaacgtagtagtt

SEQ ID NO: 3442572 - DNA, 25 bp, Homo sapien
tgtcaacgtagtagttaacagggtc

SEQ ID NO: 3442573 - DNA, 25 bp, Homo sapien
gcaggacgtgacctttctgactcgt

SEQ ID NO: 3442574 - DNA, 25 bp, Homo sapien
accaagagcaggacgtgacctttct

SEQ ID NO: 3442575 - DNA, 25 bp, Homo sapien
ctcgtcatcgtgtcatcactgaagg

SEQ ID NO: 3442576 - DNA, 25 bp, Homo sapien
gtgacctttctgactcgtcatcgtg

SEQ ID NO: 3442577 - DNA, 25 bp, Homo sapien
aaatgcctctaaatcgatcaataaa

SEQ ID NO: 3442578 - DNA, 25 bp, Homo sapien
tgccaaaggaactcgtgcacagcac

SEQ ID NO: 3442579 - DNA, 25 bp, Homo sapien
ataaataggacacttctgccaaagg

SEQ ID NO: 3442580 - DNA, 25 bp, Homo sapien
taaatcgatcaataaataggacact

SEQ ID NO: 3442581 - DNA, 25 bp, Homo sapien
ccagggcagcatgatcttcaccttg

SEQ ID NO: 3442582 - DNA, 25 bp, Homo sapien
agggcagcatgatcttcaccttgat

SEQ ID NO: 3442583 - DNA, 25 bp, Homo sapien
cagggcagcatgatcttcaccttga

SEQ ID NO: 3442584 - DNA, 25 bp, Homo sapien
gggcagcatgatcttcaccttgatg

SEQ ID NO: 3442585 - DNA, 25 bp, Homo sapien
tagggccaatcttaccagttgggtc

SEQ ID NO: 3442586 - DNA, 25 bp, Homo sapien
tcttagggccaatcttaccagttgg

SEQ ID NO: 3442587 - DNA, 25 bp, Homo sapien
gcttcttagggccaatcttaccagt

SEQ ID NO: 3442588 - DNA, 25 bp, Homo sapien
ggcttcttagggccaatcttaccag

SEQ ID NO: 3442589 - DNA, 25 bp, Homo sapien
agtatctcatctttgggttccacaa

SEQ ID NO: 3442590 - DNA, 25 bp, Homo sapien
gatgggggtggtgggcagtatctca

SEQ ID NO: 3442591 - DNA, 25 bp, Homo sapien
ggggtggtgggcagtatctcatctt

SEQ ID NO: 3442592 - DNA, 25 bp, Homo sapien
tatctcatctttgggttccacaatg

SEQ ID NO: 3442593 - DNA, 25 bp, Homo sapien
gaaggaccctattatgccccaagag

SEQ ID NO: 3442594 - DNA, 25 bp, Homo sapien
caaacgcttaccagaatgtgggata

SEQ ID NO: 3442595 - DNA, 25 bp, Homo sapien
aaaccccaagtgttgaccacaggag

SEQ ID NO: 3442596 - DNA, 25 bp, Homo sapien
tattaacagaaagactcggaaggac

SEQ ID NO: 3442597 - DNA, 25 bp, Homo sapien
tgaaaccaaataaagcacaaaagta

SEQ ID NO: 3442598 - DNA, 25 bp, Homo sapien
ctgaaaccaaataaagcacaaaagt

SEQ ID NO: 3442599 - DNA, 25 bp, Homo sapien
atccagactccagaatacagctgcc

SEQ ID NO: 3442600 - DNA, 25 bp, Homo sapien
cagactccagaatacagctgccaag

SEQ ID NO: 3442601 - DNA, 25 bp, Homo sapien
tccagaatacagctgccaaggagac

SEQ ID NO: 3442602 - DNA, 25 bp, Homo sapien
ccagaatacagctgccaaggagacc

SEQ ID NO: 3442603 - DNA, 25 bp, Homo sapien
agccagggttatctcatcagccagg

SEQ ID NO: 3442604 - DNA, 25 bp, Homo sapien
actacaggacaacgaatcaaggtgc

SEQ ID NO: 3442605 - DNA, 25 bp, Homo sapien
ctttctatgtgcaacgtggatcgcc

SEQ ID NO: 3442606 - DNA, 25 bp, Homo sapien
ggtcttactgttctggcccttgcaa

SEQ ID NO: 3442607 - DNA, 25 bp, Homo sapien
gtcttcctgcagtaccaatgattgg

SEQ ID NO: 3442608 - DNA, 25 bp, Homo sapien
gttctggagattgatgcacaatgag

SEQ ID NO: 3442609 - DNA, 25 bp, Homo sapien
tgcacaatgagaatatagagcagtc

SEQ ID NO: 3442610 - DNA, 25 bp, Homo sapien
tataatcatcaaaggctctttcaaa

SEQ ID NO: 3442611 - DNA, 25 bp, Homo sapien
tatacttctcaaactctggttacca

SEQ ID NO: 3442612 - DNA, 25 bp, Homo sapien
tggagctgtgtttagagtggcatat

SEQ ID NO: 3442613 - DNA, 25 bp, Homo sapien
aaatcaaggtaacttatggagggtg

SEQ ID NO: 3442614 - DNA, 25 bp, Homo sapien
gagggagtcccagcataatttatac

SEQ ID NO: 3442615 - DNA, 25 bp, Homo sapien
ccagtgggttccaaggacaatttca

SEQ ID NO: 3442616 - DNA, 25 bp, Homo sapien
cccggccgacagtaacctttgatga

SEQ ID NO: 3442617 - DNA, 25 bp, Homo sapien
acaacatggttttggccacccagca

SEQ ID NO: 3442618 - DNA, 25 bp, Homo sapien
gaaaaatcgttcactgagggagtct

SEQ ID NO: 3442619 - DNA, 25 bp, Homo sapien
caatggcagaacaaagtaagaatta

SEQ ID NO: 3442620 - DNA, 25 bp, Homo sapien
tatttaccaccagactgccacaatg

SEQ ID NO: 3442621 - DNA, 25 bp, Homo sapien
ttaccaccagactgccacaatggca

SEQ ID NO: 3442622 - DNA, 25 bp, Homo sapien
taagaattaggacactgaaatgggt

SEQ ID NO: 3442623 - DNA, 25 bp, Homo sapien
tattgctgtgctatgcttccccgga

SEQ ID NO: 3442624 - DNA, 25 bp, Homo sapien
gttagcacagcactggaccaggcag

SEQ ID NO: 3442625 - DNA, 25 bp, Homo sapien
tcacagtggaactccctgctcggtg

SEQ ID NO: 3442626 - DNA, 25 bp, Homo sapien
tgaatttcagagctactagggctcc

SEQ ID NO: 3442627 - DNA, 25 bp, Homo sapien
cacctcttactacgatcgctttggg

SEQ ID NO: 3442628 - DNA, 25 bp, Homo sapien
tcaggactcactgctaggagctgga

SEQ ID NO: 3442629 - DNA, 25 bp, Homo sapien
gaaagtgccagatcaggtggccagc

SEQ ID NO: 3442630 - DNA, 25 bp, Homo sapien
gctttgggtattgggttctgacaca

SEQ ID NO: 3442631 - DNA, 25 bp, Homo sapien
cacactgggactcaaatgtttgggc

SEQ ID NO: 3442632 - DNA, 25 bp, Homo sapien
tgccaggcgcagaattgggcgtttc

SEQ ID NO: 3442633 - DNA, 25 bp, Homo sapien
agtcacctccatgtttcagggaagg

SEQ ID NO: 3442634 - DNA, 25 bp, Homo sapien
ggctggtgccatgtaagtttcatac

SEQ ID NO: 3442635 - DNA, 25 bp, Homo sapien
gagctggcgcctgacgaggtggtgg

SEQ ID NO: 3442636 - DNA, 25 bp, Homo sapien
agctgcgacgcctgctggagcacgt

SEQ ID NO: 3442637 - DNA, 25 bp, Homo sapien
gccgtgtttgaagcggccatgcgct

SEQ ID NO: 3442638 - DNA, 25 bp, Homo sapien
tactggcgcccgcttacttcctgga

SEQ ID NO: 3442639 - DNA, 25 bp, Homo sapien
tacagccccatgcacaaggcataag

SEQ ID NO: 3442640 - DNA, 25 bp, Homo sapien
catgcacaaggcataagcataagga

SEQ ID NO: 3442641 - DNA, 25 bp, Homo sapien
cacaaggcataagcataaggacctt

SEQ ID NO: 3442642 - DNA, 25 bp, Homo sapien
gaaatacagccccatgcacaaggca

SEQ ID NO: 3442643 - DNA, 25 bp, Homo sapien
aatagctatgggctacaggtcacca

SEQ ID NO: 3442644 - DNA, 25 bp, Homo sapien
acctgccttctagtggccaagccag

SEQ ID NO: 3442645 - DNA, 25 bp, Homo sapien
gctctttgtgaaacatgccaggaag

SEQ ID NO: 3442646 - DNA, 25 bp, Homo sapien
gacataggaagatgttgacctgcct

SEQ ID NO: 3442647 - DNA, 25 bp, Homo sapien
gtacagagagtatgtccagcccttg

SEQ ID NO: 3442648 - DNA, 25 bp, Homo sapien
gtattacaatagatgggccctcggc

SEQ ID NO: 3442649 - DNA, 25 bp, Homo sapien
cccttgtaaatgttgggcagtatta

SEQ ID NO: 3442650 - DNA, 25 bp, Homo sapien
gatagcgtacatagaaaccttggcc

SEQ ID NO: 3442651 - DNA, 25 bp, Homo sapien
tagcctcctttagctgaatctaagg

SEQ ID NO: 3442652 - DNA, 25 bp, Homo sapien
cttctttgttcaggcggagtgctgc

SEQ ID NO: 3442653 - DNA, 25 bp, Homo sapien
atggctataggacccacagctcacc

SEQ ID NO: 3442654 - DNA, 25 bp, Homo sapien
catgttgaaatgcttggcgtacagc

SEQ ID NO: 3442655 - DNA, 25 bp, Homo sapien
catttccggtggctgctgtatctag

SEQ ID NO: 3442656 - DNA, 25 bp, Homo sapien
taagactactttacaccaggcagcc

SEQ ID NO: 3442657 - DNA, 25 bp, Homo sapien
tgagaacccacaatttactaggcac

SEQ ID NO: 3442658 - DNA, 25 bp, Homo sapien
gttcccagtctcacgtagcaaagat

SEQ ID NO: 3442659 - DNA, 25 bp, Homo sapien
tgcccgtcccgagaaacttctggaa

SEQ ID NO: 3442660 - DNA, 25 bp, Homo sapien
ggatctatatatggcagtccccacc

SEQ ID NO: 3442661 - DNA, 25 bp, Homo sapien
ctagcgccgggacgtgactctcgct

SEQ ID NO: 3442662 - DNA, 25 bp, Homo sapien
tctcgagccgcgacacgattctact

SEQ ID NO: 3442663 - DNA, 25 bp, Homo sapien
ccccagattgctcggcgctcccccg

SEQ ID NO: 3442664 - DNA, 25 bp, Homo sapien
ccgcacgcacgcaggcgtctcccgc

SEQ ID NO: 3442665 - DNA, 25 bp, Homo sapien
gattgctcggcgctcccccgggccg

SEQ ID NO: 3442666 - DNA, 25 bp, Homo sapien
cagattgctcggcgctcccccgggc

SEQ ID NO: 3442667 - DNA, 25 bp, Homo sapien
gatcagaaattgagccactgtcgcc

SEQ ID NO: 3442668 - DNA, 25 bp, Homo sapien
gaccccaggagtcgagacgatttca

SEQ ID NO: 3442669 - DNA, 25 bp, Homo sapien
gaacggaagtgacctggaactgcga

SEQ ID NO: 3442670 - DNA, 25 bp, Homo sapien
aatttgtaggctctggctcggcacc

SEQ ID NO: 3442671 - DNA, 25 bp, Homo sapien
cagggaccttggagatcgaccacct

SEQ ID NO: 3442672 - DNA, 25 bp, Homo sapien
acaaccagtccccaatctacaggga

SEQ ID NO: 3442673 - DNA, 25 bp, Homo sapien
gcccctggcgcagagggcacaacca

SEQ ID NO: 3442674 - DNA, 25 bp, Homo sapien
cctcgggataaacaggggtctgcct

SEQ ID NO: 3442675 - DNA, 25 bp, Homo sapien
cctcagagggaggtcaatgcctgcc

SEQ ID NO: 3442676 - DNA, 25 bp, Homo sapien
cagagggaggtcaatgcctgccttt

SEQ ID NO: 3442677 - DNA, 25 bp, Homo sapien
ctcagagggaggtcaatgcctgcct

SEQ ID NO: 3442678 - DNA, 25 bp, Homo sapien
gagggaggtcaatgcctgccttttt

SEQ ID NO: 3442679 - DNA, 25 bp, Homo sapien
gtgcccacagctagctggactgagc

SEQ ID NO: 3442680 - DNA, 25 bp, Homo sapien
cccacagctagctggactgagcagg

SEQ ID NO: 3442681 - DNA, 25 bp, Homo sapien
tgcccacagctagctggactgagca

SEQ ID NO: 3442682 - DNA, 25 bp, Homo sapien
gcccacagctagctggactgagcag

SEQ ID NO: 3442683 - DNA, 25 bp, Homo sapien
caggaagtggtttgcgtgcaccacg

SEQ ID NO: 3442684 - DNA, 25 bp, Homo sapien
gaagtggtttgcgtgcaccacggtg

SEQ ID NO: 3442685 - DNA, 25 bp, Homo sapien
ggccaggaagtggtttgcgtgcacc

SEQ ID NO: 3442686 - DNA, 25 bp, Homo sapien
aagtggtttgcgtgcaccacggtgg

SEQ ID NO: 3442687 - DNA, 25 bp, Homo sapien
ggctcaacttctccgcagtgccagg

SEQ ID NO: 3442688 - DNA, 25 bp, Homo sapien
gccttggggctcaacttctccgcag

SEQ ID NO: 3442689 - DNA, 25 bp, Homo sapien
gcgctgcgctcggcaagcgtggccg

SEQ ID NO: 3442690 - DNA, 25 bp, Homo sapien
tgcgctcggcaagcgtggccgcctt

SEQ ID NO: 3442691 - DNA, 25 bp, Homo sapien
agtgagcgcagcagctcgcccaggc

SEQ ID NO: 3442692 - DNA, 25 bp, Homo sapien
gtgagcgcagcagctcgcccaggcc

SEQ ID NO: 3442693 - DNA, 25 bp, Homo sapien
gagtgagcgcagcagctcgcccagg

SEQ ID NO: 3442694 - DNA, 25 bp, Homo sapien
gactgcagcgcgctgcgcttgtcgc

SEQ ID NO: 3442695 - DNA, 25 bp, Homo sapien
ggtccgtacagtcggctgcccagct

SEQ ID NO: 3442696 - DNA, 25 bp, Homo sapien
cgcttgtcgcggaagttgatcttgg

SEQ ID NO: 3442697 - DNA, 25 bp, Homo sapien
agtcatcagcgaagctcactgagct

SEQ ID NO: 3442698 - DNA, 25 bp, Homo sapien
gtgcgctccacgtccttggtgacct

SEQ ID NO: 3442699 - DNA, 25 bp, Homo sapien
catggcgttgactagcagggcgccg

SEQ ID NO: 3442700 - DNA, 25 bp, Homo sapien
cgttgactagcagggcgccgtccgt

SEQ ID NO: 3442701 - DNA, 25 bp, Homo sapien
gccgtccgtgcgctccacgtccttg

SEQ ID NO: 3442702 - DNA, 25 bp, Homo sapien
gcactttgacgaaattcggtcggaa

SEQ ID NO: 3442703 - DNA, 25 bp, Homo sapien
aagatacacaaggacgagcactttg

SEQ ID NO: 3442704 - DNA, 25 bp, Homo sapien
gtcggaatacattccatggagtccc

SEQ ID NO: 3442705 - DNA, 25 bp, Homo sapien
gctccctgaaccattcctttacacg

SEQ ID NO: 3442706 - DNA, 25 bp, Homo sapien
gatgcggttccctacagtcagtgcc

SEQ ID NO: 3442707 - DNA, 25 bp, Homo sapien
caggtctttgctccattcttcaggg

SEQ ID NO: 3442708 - DNA, 25 bp, Homo sapien
aaatgtctgagagtggcctgaaccc

SEQ ID NO: 3442709 - DNA, 25 bp, Homo sapien
tcttcagggcccagctatagagcac

SEQ ID NO: 3442710 - DNA, 25 bp, Homo sapien
accgagtcaccatgaagccacggtt

SEQ ID NO: 3442711 - DNA, 25 bp, Homo sapien
cagcttttccttctcgtcgtcgtag

SEQ ID NO: 3442712 - DNA, 25 bp, Homo sapien
gagatggcaacagccttcttctgca

SEQ ID NO: 3442713 - DNA, 25 bp, Homo sapien
ttttcaaggcgctcgagaggctcca

SEQ ID NO: 3442714 - DNA, 25 bp, Homo sapien
ccttctcgtcgtcgtagtagttgta

SEQ ID NO: 3442715 - DNA, 25 bp, Homo sapien
gagacaggcattcgaggtaggccca

SEQ ID NO: 3442716 - DNA, 25 bp, Homo sapien
cagaacagcttatatcctggatggc

SEQ ID NO: 3442717 - DNA, 25 bp, Homo sapien
tctctcgattgacaaaaaggcggct

SEQ ID NO: 3442718 - DNA, 25 bp, Homo sapien
ttgtccctggtttggagcctaagcc

SEQ ID NO: 3442719 - DNA, 25 bp, Homo sapien
cttcttgcctgacatgcgtgacaag

SEQ ID NO: 3442720 - DNA, 25 bp, Homo sapien
tcctcgcgcccgtagatgtcctggt

SEQ ID NO: 3442721 - DNA, 25 bp, Homo sapien
tgacatgcgtgacaagtcggccttg

SEQ ID NO: 3442722 - DNA, 25 bp, Homo sapien
ctcgcgcccgtagatgtcctggtca

SEQ ID NO: 3442723 - DNA, 25 bp, Homo sapien
caatgaatagcagggagccgctttg

SEQ ID NO: 3442724 - DNA, 25 bp, Homo sapien
aggccggaccaggcgcccaatgaat

SEQ ID NO: 3442725 - DNA, 25 bp, Homo sapien
gcgcccaatgaatagcagggagccg

SEQ ID NO: 3442726 - DNA, 25 bp, Homo sapien
ggaccaggcgcccaatgaatagcag

SEQ ID NO: 3442727 - DNA, 25 bp, Homo sapien
cccatggagtatccaaggctggtac

SEQ ID NO: 3442728 - DNA, 25 bp, Homo sapien
caggcacacgggaaccccggtctgt

SEQ ID NO: 3442729 - DNA, 25 bp, Homo sapien
ggagcctttggatgcctcctgccat

SEQ ID NO: 3442730 - DNA, 25 bp, Homo sapien
ccaccccatggagtatccaaggctg

SEQ ID NO: 3442731 - DNA, 25 bp, Homo sapien
gtccaagtggagtgaattctagctg

SEQ ID NO: 3442732 - DNA, 25 bp, Homo sapien
caagtggagtgaattctagctggga

SEQ ID NO: 3442733 - DNA, 25 bp, Homo sapien
tccgggctcagcatcatggtatctg

SEQ ID NO: 3442734 - DNA, 25 bp, Homo sapien
ggtcccacaggatgtggagtttccg

SEQ ID NO: 3442735 - DNA, 25 bp, Homo sapien
tactgattgaggcaggcttgatctg

SEQ ID NO: 3442736 - DNA, 25 bp, Homo sapien
ctgattgaggcaggcttgatctggg

SEQ ID NO: 3442737 - DNA, 25 bp, Homo sapien
gattgaggcaggcttgatctgggac

SEQ ID NO: 3442738 - DNA, 25 bp, Homo sapien
attgaggcaggcttgatctgggact

SEQ ID NO: 3442739 - DNA, 25 bp, Homo sapien
gcagctgaggtgttttagtgtcaga

SEQ ID NO: 3442740 - DNA, 25 bp, Homo sapien
cagctgaggtgttttagtgtcagaa

SEQ ID NO: 3442741 - DNA, 25 bp, Homo sapien
tttggtctcacaggtgagaaggtac

SEQ ID NO: 3442742 - DNA, 25 bp, Homo sapien
gctgacccccctagctcaatttggt

SEQ ID NO: 3442743 - DNA, 25 bp, Homo sapien
ctgcagcacctagttttatagttgg

SEQ ID NO: 3442744 - DNA, 25 bp, Homo sapien
cagcacctagttttatagttgggag

SEQ ID NO: 3442745 - DNA, 25 bp, Homo sapien
gcagcacctagttttatagttggga

SEQ ID NO: 3442746 - DNA, 25 bp, Homo sapien
cacctagttttatagttgggagagg

SEQ ID NO: 3442747 - DNA, 25 bp, Homo sapien
gccagacacgatgcttcttgaccag

SEQ ID NO: 3442748 - DNA, 25 bp, Homo sapien
aaaagttcatccccacaacgccaga

SEQ ID NO: 3442749 - DNA, 25 bp, Homo sapien
aatgtacaaataagttcttggattg

SEQ ID NO: 3442750 - DNA, 25 bp, Homo sapien
tcttggattgatagcaacaaaggct

SEQ ID NO: 3442751 - DNA, 25 bp, Homo sapien
aggagcgtggcctcaagaccccctt

SEQ ID NO: 3442752 - DNA, 25 bp, Homo sapien
tggaggagcgtggcctcaagacccc

SEQ ID NO: 3442753 - DNA, 25 bp, Homo sapien
gagcgtggcctcaagaccccctttg

SEQ ID NO: 3442754 - DNA, 25 bp, Homo sapien
agcgtggcctcaagaccccctttgg

SEQ ID NO: 3442755 - DNA, 25 bp, Homo sapien
tgggtggccttgagctggtcacttc

SEQ ID NO: 3442756 - DNA, 25 bp, Homo sapien
gcatggagctcacacacgtcagtaa

SEQ ID NO: 3442757 - DNA, 25 bp, Homo sapien
acgtcagtaacttctccttcctcta

SEQ ID NO: 3442758 - DNA, 25 bp, Homo sapien
tgggttcccatgtgagccaagctct

SEQ ID NO: 3442759 - DNA, 25 bp, Homo sapien
tccctgagaaaagaacacactgtgt

SEQ ID NO: 3442760 - DNA, 25 bp, Homo sapien
tgagaccactgtcagctaagcccag

SEQ ID NO: 3442761 - DNA, 25 bp, Homo sapien
ccatcttgggatcggctgggctatc

SEQ ID NO: 3442762 - DNA, 25 bp, Homo sapien
tgccgcagacacttgagccatcttg

SEQ ID NO: 3442763 - DNA, 25 bp, Homo sapien
gatactattggcaagcagtcagagc

SEQ ID NO: 3442764 - DNA, 25 bp, Homo sapien
ccattctctgcaagatgagctgtgc

SEQ ID NO: 3442765 - DNA, 25 bp, Homo sapien
gggagacgcactggccaaaaaggta

SEQ ID NO: 3442766 - DNA, 25 bp, Homo sapien
taaatgctaaagacgaacaccactt

SEQ ID NO: 3442767 - DNA, 25 bp, Homo sapien
gcaccaggaagcgttgccgctggct

SEQ ID NO: 3442768 - DNA, 25 bp, Homo sapien
tcccggcagtgcttggaagtgtctg

SEQ ID NO: 3442769 - DNA, 25 bp, Homo sapien
gatccccaagatctgtgtcactggt

SEQ ID NO: 3442770 - DNA, 25 bp, Homo sapien
gcaggtctgagaggcgaaacgaatc

SEQ ID NO: 3442771 - DNA, 25 bp, Homo sapien
gaggcaagctctcgcttggacccgt

SEQ ID NO: 3442772 - DNA, 25 bp, Homo sapien
gaggaggcaagctctcgcttggacc

SEQ ID NO: 3442773 - DNA, 25 bp, Homo sapien
gcaagctctcgcttggacccgtgtg

SEQ ID NO: 3442774 - DNA, 25 bp, Homo sapien
tccagggttggtattcggggagcaa

SEQ ID NO: 3442775 - DNA, 25 bp, Homo sapien
gcaagtgcatttgtaccgtctcctg

SEQ ID NO: 3442776 - DNA, 25 bp, Homo sapien
agctgtgcaagtgcatttgtaccgt

SEQ ID NO: 3442777 - DNA, 25 bp, Homo sapien
ttagctgagacagccacttgacagc

SEQ ID NO: 3442778 - DNA, 25 bp, Homo sapien
gcatttgtaccgtctcctgctggcc

SEQ ID NO: 3442779 - DNA, 25 bp, Homo sapien
gcctaggtctgtggcgtacaatttt

SEQ ID NO: 3442780 - DNA, 25 bp, Homo sapien
taggtctgtggcgtacaatttttag

SEQ ID NO: 3442781 - DNA, 25 bp, Homo sapien
cctaggtctgtggcgtacaattttt

SEQ ID NO: 3442782 - DNA, 25 bp, Homo sapien
ctaggtctgtggcgtacaattttta

SEQ ID NO: 3442783 - DNA, 25 bp, Homo sapien
cagtgtgccggacattgtgaggatt

SEQ ID NO: 3442784 - DNA, 25 bp, Homo sapien
gataccttatgatcctacttcctag

SEQ ID NO: 3442785 - DNA, 25 bp, Homo sapien
cctagctgtgacatattgggcaagt

SEQ ID NO: 3442786 - DNA, 25 bp, Homo sapien
gataatcaggagaacagctcgtgcc

SEQ ID NO: 3442787 - DNA, 25 bp, Homo sapien
tttacaaaagaggagcctccgactc

SEQ ID NO: 3442788 - DNA, 25 bp, Homo sapien
acagaaagtcctcacgagcttggga

SEQ ID NO: 3442789 - DNA, 25 bp, Homo sapien
ttgaacccactacgtccccagattc

SEQ ID NO: 3442790 - DNA, 25 bp, Homo sapien
gatgaagcgacaagcacaaggacag

SEQ ID NO: 3442791 - DNA, 25 bp, Homo sapien
taggaaaggaacatccagggcacca

SEQ ID NO: 3442792 - DNA, 25 bp, Homo sapien
caaggcctgtgcgtaagactggcaa

SEQ ID NO: 3442793 - DNA, 25 bp, Homo sapien
ttccgacacatctgagcaaggcctg

SEQ ID NO: 3442794 - DNA, 25 bp, Homo sapien
gggatgactcaacttgcccaagtgg

SEQ ID NO: 3442795 - DNA, 25 bp, Homo sapien
gccattgccatatgccagatgttgt

SEQ ID NO: 3442796 - DNA, 25 bp, Homo sapien
ggccttttggatactaatagctacc

SEQ ID NO: 3442797 - DNA, 25 bp, Homo sapien
tcttaggacactccacttatgggtc

SEQ ID NO: 3442798 - DNA, 25 bp, Homo sapien
tgaaaactctgcctatattggaggg

SEQ ID NO: 3442799 - DNA, 25 bp, Homo sapien
gatctattcccaataggctccgctc

SEQ ID NO: 3442800 - DNA, 25 bp, Homo sapien
tcacttctaccgctagtacgtccag

SEQ ID NO: 3442801 - DNA, 25 bp, Homo sapien
taccgctagtacgtccagcgtgccg

SEQ ID NO: 3442802 - DNA, 25 bp, Homo sapien
ctgcctgacagacgtgttgatctat

SEQ ID NO: 3442803 - DNA, 25 bp, Homo sapien
agcctggctcccgcaggttctgtga

SEQ ID NO: 3442804 - DNA, 25 bp, Homo sapien
tcagcctggctcccgcaggttctgt

SEQ ID NO: 3442805 - DNA, 25 bp, Homo sapien
gcctggctcccgcaggttctgtgag

SEQ ID NO: 3442806 - DNA, 25 bp, Homo sapien
ctggctcccgcaggttctgtgagct

SEQ ID NO: 3442807 - DNA, 25 bp, Homo sapien
tcccacggcataaacaagggcgcga

SEQ ID NO: 3442808 - DNA, 25 bp, Homo sapien
tgcagcctgcgctcccacggcataa

SEQ ID NO: 3442809 - DNA, 25 bp, Homo sapien
cggcataaacaagggcgcgaactct

SEQ ID NO: 3442810 - DNA, 25 bp, Homo sapien
gcgctcccacggcataaacaagggc

SEQ ID NO: 3442811 - DNA, 25 bp, Homo sapien
gcacagtccaagtagctcagcctgg

SEQ ID NO: 3442812 - DNA, 25 bp, Homo sapien
tctccccaggagagttgtttgtact

SEQ ID NO: 3442813 - DNA, 25 bp, Homo sapien
gatctcagagcaaagggagaccctt

SEQ ID NO: 3442814 - DNA, 25 bp, Homo sapien
taggtaggcctaactccaaagctca

SEQ ID NO: 3442815 - DNA, 25 bp, Homo sapien
cagtgaggagccagaatcttgtaaa

SEQ ID NO: 3442816 - DNA, 25 bp, Homo sapien
ttgtctcggtccagataccaccagg

SEQ ID NO: 3442817 - DNA, 25 bp, Homo sapien
cctgccgtggcttgtctcggtccag

SEQ ID NO: 3442818 - DNA, 25 bp, Homo sapien
aggagggctatgaagcccacagtgc

SEQ ID NO: 3442819 - DNA, 25 bp, Homo sapien
tcatgtacttccatatagtccagca

SEQ ID NO: 3442820 - DNA, 25 bp, Homo sapien
ggggaaatagtccttcatgtacttc

SEQ ID NO: 3442821 - DNA, 25 bp, Homo sapien
ccttcatgtacttccatatagtcca

SEQ ID NO: 3442822 - DNA, 25 bp, Homo sapien
cgagatggggaaatagtccttcatg

SEQ ID NO: 3442823 - DNA, 25 bp, Homo sapien
atcaatccacatattggccccgcat

SEQ ID NO: 3442824 - DNA, 25 bp, Homo sapien
tataacccacagaactccttcaaat

SEQ ID NO: 3442825 - DNA, 25 bp, Homo sapien
gaactccttcaaatgctggacatcc

SEQ ID NO: 3442826 - DNA, 25 bp, Homo sapien
caaatgctggacatccatcaatcca

SEQ ID NO: 3442827 - DNA, 25 bp, Homo sapien
tcagagtcccactgccgaggtaaaa

SEQ ID NO: 3442828 - DNA, 25 bp, Homo sapien
ctgccgaggtaaaataatactagct

SEQ ID NO: 3442829 - DNA, 25 bp, Homo sapien
tactagctacctgtttactgaaaac

SEQ ID NO: 3442830 - DNA, 25 bp, Homo sapien
tgaaaacctacaaagtgctagccag

SEQ ID NO: 3442831 - DNA, 25 bp, Homo sapien
cctggcacagaagaggaagcccagg

SEQ ID NO: 3442832 - DNA, 25 bp, Homo sapien
cttcctggcacagaagaggaagccc

SEQ ID NO: 3442833 - DNA, 25 bp, Homo sapien
tcctggcacagaagaggaagcccag

SEQ ID NO: 3442834 - DNA, 25 bp, Homo sapien
ttcctggcacagaagaggaagccca

SEQ ID NO: 3442835 - DNA, 25 bp, Homo sapien
tgctgtcctttgaggccattgggct

SEQ ID NO: 3442836 - DNA, 25 bp, Homo sapien
atgctgtcctttgaggccattgggc

SEQ ID NO: 3442837 - DNA, 25 bp, Homo sapien
aggagcaggaaggacggacgttgat

SEQ ID NO: 3442838 - DNA, 25 bp, Homo sapien
cgttgatagggtaggcgcagagctg

SEQ ID NO: 3442839 - DNA, 25 bp, Homo sapien
aggacggacgttgatagggtaggcg

SEQ ID NO: 3442840 - DNA, 25 bp, Homo sapien
caggaaggacggacgttgatagggt

SEQ ID NO: 3442841 - DNA, 25 bp, Homo sapien
gtactaaggttgagatatcctcctc

SEQ ID NO: 3442842 - DNA, 25 bp, Homo sapien
caacagtactaaggttgagatatcc

SEQ ID NO: 3442843 - DNA, 25 bp, Homo sapien
tactaaggttgagatatcctcctca

SEQ ID NO: 3442844 - DNA, 25 bp, Homo sapien
cagtactaaggttgagatatcctcc

SEQ ID NO: 3442845 - DNA, 25 bp, Homo sapien
taccggggaagatcgaagagaagcc

SEQ ID NO: 3442846 - DNA, 25 bp, Homo sapien
gggcccggaaccacaaggtcagcat

SEQ ID NO: 3442847 - DNA, 25 bp, Homo sapien
cacaggttggcaaaggctccgactg

SEQ ID NO: 3442848 - DNA, 25 bp, Homo sapien
gaagcccgcaatgtagttccgagag

SEQ ID NO: 3442849 - DNA, 25 bp, Homo sapien
gcgtgaaggatccaggcctggcatc

SEQ ID NO: 3442850 - DNA, 25 bp, Homo sapien
tcagggcgagcctgacgaagccctt

SEQ ID NO: 3442851 - DNA, 25 bp, Homo sapien
ctttcggttccgcagtaacagcgtg

SEQ ID NO: 3442852 - DNA, 25 bp, Homo sapien
cccttcctgttcagaatgtgagcag

SEQ ID NO: 3442853 - DNA, 25 bp, Homo sapien
gaaggcacgagctgaaaggcccttt

SEQ ID NO: 3442854 - DNA, 25 bp, Homo sapien
aaggatgcttcaccccaaggaggga

SEQ ID NO: 3442855 - DNA, 25 bp, Homo sapien
tgccaattgccaactgaacccagag

SEQ ID NO: 3442856 - DNA, 25 bp, Homo sapien
tagaccagaatgcttcagagagtcc

SEQ ID NO: 3442857 - DNA, 25 bp, Homo sapien
tctccccgaaggagaagattggcac

SEQ ID NO: 3442858 - DNA, 25 bp, Homo sapien
caccacggccatgaaagagtgggag

SEQ ID NO: 3442859 - DNA, 25 bp, Homo sapien
tctggatatagcgtaaccaggagcc

SEQ ID NO: 3442860 - DNA, 25 bp, Homo sapien
gatcttctgcaaccgattctggata

SEQ ID NO: 3442861 - DNA, 25 bp, Homo sapien
tagggcaggaataaatctggctcat

SEQ ID NO: 3442862 - DNA, 25 bp, Homo sapien
catgtagggcagctagtgtagtgcc

SEQ ID NO: 3442863 - DNA, 25 bp, Homo sapien
tctagaatgtgagccccattagggc

SEQ ID NO: 3442864 - DNA, 25 bp, Homo sapien
caggtgctcagcaattagtcacaac

SEQ ID NO: 3442865 - DNA, 25 bp, Homo sapien
cagtggcctagggtaggcaagggac

SEQ ID NO: 3442866 - DNA, 25 bp, Homo sapien
gtgtgcagtggcctagggtaggcaa

SEQ ID NO: 3442867 - DNA, 25 bp, Homo sapien
agaaaagtgctcttactccattcct

SEQ ID NO: 3442868 - DNA, 25 bp, Homo sapien
tgcaaggcatagaggtgtgcagtgg

SEQ ID NO: 3442869 - DNA, 25 bp, Homo sapien
tgaacttaagtttgtgggcctcgaa

SEQ ID NO: 3442870 - DNA, 25 bp, Homo sapien
tctttgatataacgctggtgcagct

SEQ ID NO: 3442871 - DNA, 25 bp, Homo sapien
ggcctcgaagaggttgcacagctct

SEQ ID NO: 3442872 - DNA, 25 bp, Homo sapien
cagcgtcttctgtacctcgatgggc

SEQ ID NO: 3442873 - DNA, 25 bp, Homo sapien
tcctccccagggtgctaagggctgt

SEQ ID NO: 3442874 - DNA, 25 bp, Homo sapien
gactcgagtccgtgcagctttggct

SEQ ID NO: 3442875 - DNA, 25 bp, Homo sapien
gttcgtgccccttgaccagcaatgg

SEQ ID NO: 3442876 - DNA, 25 bp, Homo sapien
cctatcctaggagcaatggagggtc

SEQ ID NO: 3442877 - DNA, 25 bp, Homo sapien
ctaaatctttgccattactaccatt

SEQ ID NO: 3442878 - DNA, 25 bp, Homo sapien
gcctaaatctttgccattactacca

SEQ ID NO: 3442879 - DNA, 25 bp, Homo sapien
gtgcctaaatctttgccattactac

SEQ ID NO: 3442880 - DNA, 25 bp, Homo sapien
taaatctttgccattactaccatta

SEQ ID NO: 3442881 - DNA, 25 bp, Homo sapien
tgaacacacaattggtatagcacac

SEQ ID NO: 3442882 - DNA, 25 bp, Homo sapien
gatgctgaactgagtgtgaacacac

SEQ ID NO: 3442883 - DNA, 25 bp, Homo sapien
gggactaaggtgcatgacatcacac

SEQ ID NO: 3442884 - DNA, 25 bp, Homo sapien
aggtgcgaccccactaccaatcagc

SEQ ID NO: 3442885 - DNA, 25 bp, Homo sapien
gggaatgcgtgagaggagagcagct

SEQ ID NO: 3442886 - DNA, 25 bp, Homo sapien
ccagcagcctgctccgcgcggatcc

SEQ ID NO: 3442887 - DNA, 25 bp, Homo sapien
cggatccggggaatgcgtgagagga

SEQ ID NO: 3442888 - DNA, 25 bp, Homo sapien
tgctccgcgcggatccggggaatgc

SEQ ID NO: 3442889 - DNA, 25 bp, Homo sapien
ctggcgtcccggagcgcaacacttt

SEQ ID NO: 3442890 - DNA, 25 bp, Homo sapien
cgagagaaacagcctagaccccagc

SEQ ID NO: 3442891 - DNA, 25 bp, Homo sapien
gtcccggagcgcaacactttatcac

SEQ ID NO: 3442892 - DNA, 25 bp, Homo sapien
cggccggcggccagtggtggcgcga

SEQ ID NO: 3442893 - DNA, 25 bp, Homo sapien
ccgggacggcgtcgaggctgggcgg

SEQ ID NO: 3442894 - DNA, 25 bp, Homo sapien
cccgggacggcgtcgaggctgggcg

SEQ ID NO: 3442895 - DNA, 25 bp, Homo sapien
tcccgggacggcgtcgaggctgggc

SEQ ID NO: 3442896 - DNA, 25 bp, Homo sapien
gcgggaagccgcttcaccccgcgcc

SEQ ID NO: 3442897 - DNA, 25 bp, Homo sapien
gcgcccctggcccatgccccggccc

SEQ ID NO: 3442898 - DNA, 25 bp, Homo sapien
ccgcgcccctggcccatgccccggc

SEQ ID NO: 3442899 - DNA, 25 bp, Homo sapien
ccgcgggaagccgcttcaccccgcg

SEQ ID NO: 3442900 - DNA, 25 bp, Homo sapien
cgcaggaccccggagtaggcggcta

SEQ ID NO: 3442901 - DNA, 25 bp, Homo sapien
ctggctccggtcagcctcggcctga

SEQ ID NO: 3442902 - DNA, 25 bp, Homo sapien
tcggcctgacgctcgccgcgcagga

SEQ ID NO: 3442903 - DNA, 25 bp, Homo sapien
agtaggcggctatgagggtcttcat

SEQ ID NO: 3442904 - DNA, 25 bp, Homo sapien
gcaggtccataacccctgcgccgtg

SEQ ID NO: 3442905 - DNA, 25 bp, Homo sapien
gccctttccagaaaatcttctcgca

SEQ ID NO: 3442906 - DNA, 25 bp, Homo sapien
ccctttccagaaaatcttctcgcag

SEQ ID NO: 3442907 - DNA, 25 bp, Homo sapien
aaatcttctcgcaggtccataaccc

SEQ ID NO: 3442908 - DNA, 25 bp, Homo sapien
tctatcactgccaaagctcgctcta

SEQ ID NO: 3442909 - DNA, 25 bp, Homo sapien
gtctatcactgccaaagctcgctct

SEQ ID NO: 3442910 - DNA, 25 bp, Homo sapien
catcctgcccatccagtctatcact

SEQ ID NO: 3442911 - DNA, 25 bp, Homo sapien
ccagtctatcactgccaaagctcgc

SEQ ID NO: 3442912 - DNA, 25 bp, Homo sapien
aggaggggagcttctagactctgct

SEQ ID NO: 3442913 - DNA, 25 bp, Homo sapien
cagtgctttctaagtaccctttaca

SEQ ID NO: 3442914 - DNA, 25 bp, Homo sapien
ggaggggagcttctagactctgctt

SEQ ID NO: 3442915 - DNA, 25 bp, Homo sapien
ataccagtgctttctaagtaccctt

SEQ ID NO: 3442916 - DNA, 25 bp, Homo sapien
tcaggcgcagagaaggtgctcgatc

SEQ ID NO: 3442917 - DNA, 25 bp, Homo sapien
cacatgatgatgagaggccggtcat

SEQ ID NO: 3442918 - DNA, 25 bp, Homo sapien
tgctattagaatcccaggccagggc

SEQ ID NO: 3442919 - DNA, 25 bp, Homo sapien
caggcagacacctttcagcgggagt

SEQ ID NO: 3442920 - DNA, 25 bp, Homo sapien
atgcttatccttgagggtctcataa

SEQ ID NO: 3442921 - DNA, 25 bp, Homo sapien
gcttatccttgagggtctcataacc

SEQ ID NO: 3442922 - DNA, 25 bp, Homo sapien
ggccagatgagttcatcacatgctt

SEQ ID NO: 3442923 - DNA, 25 bp, Homo sapien
gagttcatcacatgcttatccttga

SEQ ID NO: 3442924 - DNA, 25 bp, Homo sapien
tgagggtctcatgacctttcaactg

SEQ ID NO: 3442925 - DNA, 25 bp, Homo sapien
gttagtcacaatcttgtccttgagg

SEQ ID NO: 3442926 - DNA, 25 bp, Homo sapien
agatgagttagtcacaatcttgtcc

SEQ ID NO: 3442927 - DNA, 25 bp, Homo sapien
gagttagtcacaatcttgtccttga

SEQ ID NO: 3442928 - DNA, 25 bp, Homo sapien
gggcggagaggatgctggatccagt

SEQ ID NO: 3442929 - DNA, 25 bp, Homo sapien
gagggcggagaggatgctggatcca

SEQ ID NO: 3442930 - DNA, 25 bp, Homo sapien
ctggagggcggagaggatgctggat

SEQ ID NO: 3442931 - DNA, 25 bp, Homo sapien
gcggagaggatgctggatccagtgc

SEQ ID NO: 3442932 - DNA, 25 bp, Homo sapien
gcttttccaccttggacctattgag

SEQ ID NO: 3442933 - DNA, 25 bp, Homo sapien
cactgagatgacctgtagctgcttt

SEQ ID NO: 3442934 - DNA, 25 bp, Homo sapien
tattgagccaggtgacagagaagag

SEQ ID NO: 3442935 - DNA, 25 bp, Homo sapien
tggagcactgagatgacctgtagct

SEQ ID NO: 3442936 - DNA, 25 bp, Homo sapien
ctccctcattggactcccactaaca

SEQ ID NO: 3442937 - DNA, 25 bp, Homo sapien
ctcattggactcccactaacagaca

SEQ ID NO: 3442938 - DNA, 25 bp, Homo sapien
attggactcccactaacagacagcc

SEQ ID NO: 3442939 - DNA, 25 bp, Homo sapien
ccctcattggactcccactaacaga

SEQ ID NO: 3442940 - DNA, 25 bp, Homo sapien
acaggaatgttcagcccaggtagga

SEQ ID NO: 3442941 - DNA, 25 bp, Homo sapien
ctgtcctggcatcgaggggcccatg

SEQ ID NO: 3442942 - DNA, 25 bp, Homo sapien
ccacaaaccctgagaaatagctaca

SEQ ID NO: 3442943 - DNA, 25 bp, Homo sapien
tcccagactctgatggactgtcctg

SEQ ID NO: 3442944 - DNA, 25 bp, Homo sapien
ttgggtgtgttccagtcaaacacca

SEQ ID NO: 3442945 - DNA, 25 bp, Homo sapien
agcacagcgatgagccagcaatcag

SEQ ID NO: 3442946 - DNA, 25 bp, Homo sapien
aatatgtacatgaggatggcactgc

SEQ ID NO: 3442947 - DNA, 25 bp, Homo sapien
caccagccaagtgaagtagagcaca

SEQ ID NO: 3442948 - DNA, 25 bp, Homo sapien
agcccagtttcggacccactgtgac

SEQ ID NO: 3442949 - DNA, 25 bp, Homo sapien
ctggatgggaaagtagtctcgaaag

SEQ ID NO: 3442950 - DNA, 25 bp, Homo sapien
tagtctcgaaagtagcgccacacag

SEQ ID NO: 3442951 - DNA, 25 bp, Homo sapien
acagcccagtttcggacccactgtg

SEQ ID NO: 3442952 - DNA, 25 bp, Homo sapien
agaactctttcacattcacgtgctg

SEQ ID NO: 3442953 - DNA, 25 bp, Homo sapien
ctttcacattcacgtgctgcctcca

SEQ ID NO: 3442954 - DNA, 25 bp, Homo sapien
gaactctttcacattcacgtgctgc

SEQ ID NO: 3442955 - DNA, 25 bp, Homo sapien
tcacattcacgtgctgcctccactc

SEQ ID NO: 3442956 - DNA, 25 bp, Homo sapien
ttctaagtggatggggctactggcc

SEQ ID NO: 3442957 - DNA, 25 bp, Homo sapien
aggtctgaccaacaatcatcaggtc

SEQ ID NO: 3442958 - DNA, 25 bp, Homo sapien
ggtcatcctgttctaagtggatggg

SEQ ID NO: 3442959 - DNA, 25 bp, Homo sapien
aatcatcaggtcatcctgttctaag

SEQ ID NO: 3442960 - DNA, 25 bp, Homo sapien
tcggtggctgttgctaacacaagaa

SEQ ID NO: 3442961 - DNA, 25 bp, Homo sapien
tgctcctcttccaggtggctggtgg

SEQ ID NO: 3442962 - DNA, 25 bp, Homo sapien
tggctggtggtctcggtggctgttg

SEQ ID NO: 3442963 - DNA, 25 bp, Homo sapien
gctgttgctaacacaagaaccccac

SEQ ID NO: 3442964 - DNA, 25 bp, Homo sapien
gcagccaataccaggtgggaaactt

SEQ ID NO: 3442965 - DNA, 25 bp, Homo sapien
tttgcctaacaagcaggtctgccca

SEQ ID NO: 3442966 - DNA, 25 bp, Homo sapien
tctaagccattccttggatgacggg

SEQ ID NO: 3442967 - DNA, 25 bp, Homo sapien
caggcctgggatagttaccctggca

SEQ ID NO: 3442968 - DNA, 25 bp, Homo sapien
gacactgggatgctctaaacgatga

SEQ ID NO: 3442969 - DNA, 25 bp, Homo sapien
caagttcctgagtttggcaaccggg

SEQ ID NO: 3442970 - DNA, 25 bp, Homo sapien
taaacgatgattggcttcctcaggg

SEQ ID NO: 3442971 - DNA, 25 bp, Homo sapien
tgtccctaaaccctgagtcatgaga

SEQ ID NO: 3442972 - DNA, 25 bp, Homo sapien
cggaagttgcctgccagtgtagcca

SEQ ID NO: 3442973 - DNA, 25 bp, Homo sapien
tggtcagcaggttgtgtgtcttcac

SEQ ID NO: 3442974 - DNA, 25 bp, Homo sapien
tgtagccaggtaaggccgtatgcct

SEQ ID NO: 3442975 - DNA, 25 bp, Homo sapien
ctgtgctgaagttgcagaaggcacc

SEQ ID NO: 3442976 - DNA, 25 bp, Homo sapien
ggatcccaatgcatcagtctggtgg

SEQ ID NO: 3442977 - DNA, 25 bp, Homo sapien
gacaattacagtgccatggacaaca

SEQ ID NO: 3442978 - DNA, 25 bp, Homo sapien
gaggctcaggccttgacaacagtgc

SEQ ID NO: 3442979 - DNA, 25 bp, Homo sapien
taattctgccaagtcggtgcgaggt

SEQ ID NO: 3442980 - DNA, 25 bp, Homo sapien
tcacaaagcccttgcggttccgcag

SEQ ID NO: 3442981 - DNA, 25 bp, Homo sapien
gaaagcaaatagtctatggtgtccc

SEQ ID NO: 3442982 - DNA, 25 bp, Homo sapien
accacgatgatgatagcattgccac

SEQ ID NO: 3442983 - DNA, 25 bp, Homo sapien
gtgtcccggctgacagggcagatac

SEQ ID NO: 3442984 - DNA, 25 bp, Homo sapien
agaagaggcctcgaccatggaagat

SEQ ID NO: 3442985 - DNA, 25 bp, Homo sapien
gcatggggcgaaaccaatgtatttc

SEQ ID NO: 3442986 - DNA, 25 bp, Homo sapien
tcctcgaagatcacctgcttgtaca

SEQ ID NO: 3442987 - DNA, 25 bp, Homo sapien
ttcttctggacccatcggccccagg

SEQ ID NO: 3442988 - DNA, 25 bp, Homo sapien
cagtctccgggaggccgaacttggt

SEQ ID NO: 3442989 - DNA, 25 bp, Homo sapien
atgtacatggtgtggtacaggtcga

SEQ ID NO: 3442990 - DNA, 25 bp, Homo sapien
gtacatggtgtggtacaggtcgatg

SEQ ID NO: 3442991 - DNA, 25 bp, Homo sapien
ctccgggaggccgaacttggtcttg

SEQ ID NO: 3442992 - DNA, 25 bp, Homo sapien
gagccacccagattaggcccagatt

SEQ ID NO: 3442993 - DNA, 25 bp, Homo sapien
tccaggctccgatatgagtgactag

SEQ ID NO: 3442994 - DNA, 25 bp, Homo sapien
tgcagtttcaggactagacgagcgt

SEQ ID NO: 3442995 - DNA, 25 bp, Homo sapien
gaagagaggttagctgagccaccca

SEQ ID NO: 3442996 - DNA, 25 bp, Homo sapien
gataaagcgtggattcatcaggaag

SEQ ID NO: 3442997 - DNA, 25 bp, Homo sapien
gaagcaagaactgacagaactggag

SEQ ID NO: 3442998 - DNA, 25 bp, Homo sapien
taaacacgcatgcaggtaacggcag

SEQ ID NO: 3442999 - DNA, 25 bp, Homo sapien
gaaactgttactacaaagagcagca

SEQ ID NO: 3443000 - DNA, 25 bp, Homo sapien
ctagaaacccgccacccgagaggca

SEQ ID NO: 3443001 - DNA, 25 bp, Homo sapien
ccgttgccgccgctggctaaggaag

SEQ ID NO: 3443002 - DNA, 25 bp, Homo sapien
aggcactactgctcagcccagacag

SEQ ID NO: 3443003 - DNA, 25 bp, Homo sapien
taaggaagagccatattaccgcagt

SEQ ID NO: 3443004 - DNA, 25 bp, Homo sapien
tgagacggcagctccacatgcaggg

SEQ ID NO: 3443005 - DNA, 25 bp, Homo sapien
acatgcagggcccgcgcggcagaac

SEQ ID NO: 3443006 - DNA, 25 bp, Homo sapien
ccgcgcggcagaaccgggaggcaga

SEQ ID NO: 3443007 - DNA, 25 bp, Homo sapien
ctgagacggcagctccacatgcagg

SEQ ID NO: 3443008 - DNA, 25 bp, Homo sapien
taaacccttaatcacaaaagctaca

SEQ ID NO: 3443009 - DNA, 25 bp, Homo sapien
aacccttaatcacaaaagctacact

SEQ ID NO: 3443010 - DNA, 25 bp, Homo sapien
cttaatcacaaaagctacactcatg

SEQ ID NO: 3443011 - DNA, 25 bp, Homo sapien
cccttaatcacaaaagctacactca

SEQ ID NO: 3443012 - DNA, 25 bp, Homo sapien
taatatgaacacacgaattacttgt

SEQ ID NO: 3443013 - DNA, 25 bp, Homo sapien
tatgaacacacgaattacttgtatt

SEQ ID NO: 3443014 - DNA, 25 bp, Homo sapien
gctaatatgaacacacgaattactt

SEQ ID NO: 3443015 - DNA, 25 bp, Homo sapien
gaacacacgaattacttgtattcac

SEQ ID NO: 3443016 - DNA, 25 bp, Homo sapien
taaaaggcttgatagaaaccacaac

SEQ ID NO: 3443017 - DNA, 25 bp, Homo sapien
ccctattaatctagcattaaaaggc

SEQ ID NO: 3443018 - DNA, 25 bp, Homo sapien
tctagcattaaaaggcttgatagaa

SEQ ID NO: 3443019 - DNA, 25 bp, Homo sapien
cgttatcttccctattaatctagca

SEQ ID NO: 3443020 - DNA, 25 bp, Homo sapien
gcatttgctgatggtagacctcaat

SEQ ID NO: 3443021 - DNA, 25 bp, Homo sapien
atacccaacccctcagtcacacatg

SEQ ID NO: 3443022 - DNA, 25 bp, Homo sapien
gaactttcctagctccatgcatttg

SEQ ID NO: 3443023 - DNA, 25 bp, Homo sapien
ttaaagtccatcaaaaagaccatga

SEQ ID NO: 3443024 - DNA, 25 bp, Homo sapien
aatgttccgaagatgtcgaagacgc

SEQ ID NO: 3443025 - DNA, 25 bp, Homo sapien
agtaggtatcaaggagctgatggcc

SEQ ID NO: 3443026 - DNA, 25 bp, Homo sapien
tctattaacaatgttccgggcagca

SEQ ID NO: 3443027 - DNA, 25 bp, Homo sapien
ttttcagtactacacaagtgaagtg

SEQ ID NO: 3443028 - DNA, 25 bp, Homo sapien
caatgtaaatgaagagagtttaaca

SEQ ID NO: 3443029 - DNA, 25 bp, Homo sapien
aagagagtttaacaaaggagccata

SEQ ID NO: 3443030 - DNA, 25 bp, Homo sapien
aaacaattcgccttctccagcagac

SEQ ID NO: 3443031 - DNA, 25 bp, Homo sapien
cctcaaaatgaacatgccaatgtaa

SEQ ID NO: 3443032 - DNA, 25 bp, Homo sapien
gaaagcgaattccttagcttaatct

SEQ ID NO: 3443033 - DNA, 25 bp, Homo sapien
tgagtggtatcattccttcttccaa

SEQ ID NO: 3443034 - DNA, 25 bp, Homo sapien
tctgcaaagtgtctaaattaaacag

SEQ ID NO: 3443035 - DNA, 25 bp, Homo sapien
gctctaagatgagtggtatcattcc

SEQ ID NO: 3443036 - DNA, 25 bp, Homo sapien
aaggaattcttaatcacttcacttc

SEQ ID NO: 3443037 - DNA, 25 bp, Homo sapien
ttaatcacttcacttctataaaatt

SEQ ID NO: 3443038 - DNA, 25 bp, Homo sapien
caaggaattcttaatcacttcactt

SEQ ID NO: 3443039 - DNA, 25 bp, Homo sapien
ttcttaatcacttcacttctataaa

SEQ ID NO: 3443040 - DNA, 25 bp, Homo sapien
acatagggtctattataacacaaat

SEQ ID NO: 3443041 - DNA, 25 bp, Homo sapien
tatgacatagggtctattataacac

SEQ ID NO: 3443042 - DNA, 25 bp, Homo sapien
tgacatagggtctattataacacaa

SEQ ID NO: 3443043 - DNA, 25 bp, Homo sapien
ttatgacatagggtctattataaca

SEQ ID NO: 3443044 - DNA, 25 bp, Homo sapien
tgcctagtccacctcaagttctgaa

SEQ ID NO: 3443045 - DNA, 25 bp, Homo sapien
caagcaagctgcgtacaacatagaa

SEQ ID NO: 3443046 - DNA, 25 bp, Homo sapien
tgcaacaagacctaatcactttggg

SEQ ID NO: 3443047 - DNA, 25 bp, Homo sapien
ctttcttacggcacctggcatgaca

SEQ ID NO: 3443048 - DNA, 25 bp, Homo sapien
caaaatcgagacttcgccacgtggg

SEQ ID NO: 3443049 - DNA, 25 bp, Homo sapien
tccaaaatcgagacttcgccacgtg

SEQ ID NO: 3443050 - DNA, 25 bp, Homo sapien
aaatcgagacttcgccacgtgggat

SEQ ID NO: 3443051 - DNA, 25 bp, Homo sapien
aattccaaaatcgagacttcgccac

SEQ ID NO: 3443052 - DNA, 25 bp, Homo sapien
tcaacagctggtagatgttctcctt

SEQ ID NO: 3443053 - DNA, 25 bp, Homo sapien
tcttcaccacgaaacaagacacaga

SEQ ID NO: 3443054 - DNA, 25 bp, Homo sapien
cagatgtatcaagacggtctggcat

SEQ ID NO: 3443055 - DNA, 25 bp, Homo sapien
gacccaagtatttcagcccatccaa

SEQ ID NO: 3443056 - DNA, 25 bp, Homo sapien
taaaggcaacaagtacctggtagca

SEQ ID NO: 3443057 - DNA, 25 bp, Homo sapien
gaacgttaagaagcaccatcctcca

SEQ ID NO: 3443058 - DNA, 25 bp, Homo sapien
tatataccccagtgcagggatctgg

SEQ ID NO: 3443059 - DNA, 25 bp, Homo sapien
aagctcagctgggtatggcaacaag

SEQ ID NO: 3443060 - DNA, 25 bp, Homo sapien
tatttcattttggtttcgggcatga

SEQ ID NO: 3443061 - DNA, 25 bp, Homo sapien
tttcattttggtttcgggcatgaat

SEQ ID NO: 3443062 - DNA, 25 bp, Homo sapien
atccatcattcagcccaaaaattat

SEQ ID NO: 3443063 - DNA, 25 bp, Homo sapien
attatttcattttggtttcgggcat

SEQ ID NO: 3443064 - DNA, 25 bp, Homo sapien
aattaccctcactcttgactgaaag

SEQ ID NO: 3443065 - DNA, 25 bp, Homo sapien
tgaagagcccatctttctgcctact

SEQ ID NO: 3443066 - DNA, 25 bp, Homo sapien
taattaacagcgcattgaagaccta

SEQ ID NO: 3443067 - DNA, 25 bp, Homo sapien
tctgctgtcagcctaatttgtgagt

SEQ ID NO: 3443068 - DNA, 25 bp, Homo sapien
gggcagggtgcctcagcctgtaatc

SEQ ID NO: 3443069 - DNA, 25 bp, Homo sapien
ggattatacagtctgggcagggtgc

SEQ ID NO: 3443070 - DNA, 25 bp, Homo sapien
gattatacagtctgggcagggtgcc

SEQ ID NO: 3443071 - DNA, 25 bp, Homo sapien
attatacagtctgggcagggtgcct

SEQ ID NO: 3443072 - DNA, 25 bp, Homo sapien
ggactgtgcattcataaaaagcagc

SEQ ID NO: 3443073 - DNA, 25 bp, Homo sapien
cacaaaagacgagtggtcaccaaaa

SEQ ID NO: 3443074 - DNA, 25 bp, Homo sapien
caatctgactccaatatccatattc

SEQ ID NO: 3443075 - DNA, 25 bp, Homo sapien
caatatccatattcctaacgactag

SEQ ID NO: 3443076 - DNA, 25 bp, Homo sapien
aagagaagacatcgtaagaattgcg

SEQ ID NO: 3443077 - DNA, 25 bp, Homo sapien
gaagaatagtcttctgagcatttga

SEQ ID NO: 3443078 - DNA, 25 bp, Homo sapien
acacagttctgatccacctgcagaa

SEQ ID NO: 3443079 - DNA, 25 bp, Homo sapien
catcgtaagaattgcgaacacagtt

SEQ ID NO: 3443080 - DNA, 25 bp, Homo sapien
tcaccaggtcagaagttaagacagc

SEQ ID NO: 3443081 - DNA, 25 bp, Homo sapien
ttccaaattacatccctggccaggt

SEQ ID NO: 3443082 - DNA, 25 bp, Homo sapien
tgcctttgccataatgcaaccttag

SEQ ID NO: 3443083 - DNA, 25 bp, Homo sapien
gcaaccttaggcaaatcaattcccc

SEQ ID NO: 3443084 - DNA, 25 bp, Homo sapien
cagtagacagtttccttatttaggt

SEQ ID NO: 3443085 - DNA, 25 bp, Homo sapien
gctctttcaggagtgaggttttgca

SEQ ID NO: 3443086 - DNA, 25 bp, Homo sapien
catgtcccagccatcaatatttgat

SEQ ID NO: 3443087 - DNA, 25 bp, Homo sapien
gaatgccttgagcaaaatctggaag

SEQ ID NO: 3443088 - DNA, 25 bp, Homo sapien
tagcctctgagatcagacaacatca

SEQ ID NO: 3443089 - DNA, 25 bp, Homo sapien
acaacatcaggcacattcaggatga

SEQ ID NO: 3443090 - DNA, 25 bp, Homo sapien
aacatcaggcacattcaggatgata

SEQ ID NO: 3443091 - DNA, 25 bp, Homo sapien
cctctgagatcagacaacatcaggc

SEQ ID NO: 3443092 - DNA, 25 bp, Homo sapien
tcattatgcccagtatcatacagcc

SEQ ID NO: 3443093 - DNA, 25 bp, Homo sapien
ctttttgtaaaggttgatgatcact

SEQ ID NO: 3443094 - DNA, 25 bp, Homo sapien
cagtatcatacagccctacatcata

SEQ ID NO: 3443095 - DNA, 25 bp, Homo sapien
gatcactagagcatcattatgccca

SEQ ID NO: 3443096 - DNA, 25 bp, Homo sapien
tcttaacagaaagcagtggtgttga

SEQ ID NO: 3443097 - DNA, 25 bp, Homo sapien
cttaacagaaagcagtggtgttgag

SEQ ID NO: 3443098 - DNA, 25 bp, Homo sapien
atcttaacagaaagcagtggtgttg

SEQ ID NO: 3443099 - DNA, 25 bp, Homo sapien
gtttcttgattttgcaaactatcaa

SEQ ID NO: 3443100 - DNA, 25 bp, Homo sapien
ctccaaactggttggccaatttcag

SEQ ID NO: 3443101 - DNA, 25 bp, Homo sapien
gccaatttcagagtaatgtttcttg

SEQ ID NO: 3443102 - DNA, 25 bp, Homo sapien
tgattttgcaaactatcaaaagaat

SEQ ID NO: 3443103 - DNA, 25 bp, Homo sapien
gcatgatacagagaatcattcacga

SEQ ID NO: 3443104 - DNA, 25 bp, Homo sapien
gtcacaatcactccaacctgcagta

SEQ ID NO: 3443105 - DNA, 25 bp, Homo sapien
tcattcacgaaagaagagtcaactg

SEQ ID NO: 3443106 - DNA, 25 bp, Homo sapien
tgcagtaaccaccaatctgatcagt

SEQ ID NO: 3443107 - DNA, 25 bp, Homo sapien
agttacctgagtctgtttaattgca

SEQ ID NO: 3443108 - DNA, 25 bp, Homo sapien
ctgagtctgtttaattgcacactgg

SEQ ID NO: 3443109 - DNA, 25 bp, Homo sapien
tccaattttctgaacagttacctga

SEQ ID NO: 3443110 - DNA, 25 bp, Homo sapien
tctgaacagttacctgagtctgttt

SEQ ID NO: 3443111 - DNA, 25 bp, Homo sapien
gcatcatttctcacccaagatgctt

SEQ ID NO: 3443112 - DNA, 25 bp, Homo sapien
atttctcacccaagatgctttctta

SEQ ID NO: 3443113 - DNA, 25 bp, Homo sapien
tcatttctcacccaagatgctttct

SEQ ID NO: 3443114 - DNA, 25 bp, Homo sapien
catcatttctcacccaagatgcttt

SEQ ID NO: 3443115 - DNA, 25 bp, Homo sapien
agcgtgggaactcagtgagatgcat

SEQ ID NO: 3443116 - DNA, 25 bp, Homo sapien
gaagcgtgggaactcagtgagatgc

SEQ ID NO: 3443117 - DNA, 25 bp, Homo sapien
aggaagcgtgggaactcagtgagat

SEQ ID NO: 3443118 - DNA, 25 bp, Homo sapien
aagcgtgggaactcagtgagatgca

SEQ ID NO: 3443119 - DNA, 25 bp, Homo sapien
aatcgcacccggaaaatcaggtcac

SEQ ID NO: 3443120 - DNA, 25 bp, Homo sapien
gcacctggaaaatcgcacccggaaa

SEQ ID NO: 3443121 - DNA, 25 bp, Homo sapien
agggaagccacgacagacggcacct

SEQ ID NO: 3443122 - DNA, 25 bp, Homo sapien
gcccacggaccgtgagccaaagcag

SEQ ID NO: 3443123 - DNA, 25 bp, Homo sapien
ctttgtcttgtaatgcaatttgttg

SEQ ID NO: 3443124 - DNA, 25 bp, Homo sapien
gttgcttatgcagtaatgccacctc

SEQ ID NO: 3443125 - DNA, 25 bp, Homo sapien
cctcccgtcccaaagctttcttctg

SEQ ID NO: 3443126 - DNA, 25 bp, Homo sapien
ttatgcagtaatgccacctcccgtc

SEQ ID NO: 3443127 - DNA, 25 bp, Homo sapien
caagtttacagccatatagcctagg

SEQ ID NO: 3443128 - DNA, 25 bp, Homo sapien
tagtagtttataccatctgagcttg

SEQ ID NO: 3443129 - DNA, 25 bp, Homo sapien
aatgactatttgagcttgtgaagaa

SEQ ID NO: 3443130 - DNA, 25 bp, Homo sapien
tataccatctgagcttgtgtaaaca

SEQ ID NO: 3443131 - DNA, 25 bp, Homo sapien
taagtgcgaagataagacgacatca

SEQ ID NO: 3443132 - DNA, 25 bp, Homo sapien
gcgaagataagacgacatcaaaaca

SEQ ID NO: 3443133 - DNA, 25 bp, Homo sapien
agtgcgaagataagacgacatcaaa

SEQ ID NO: 3443134 - DNA, 25 bp, Homo sapien
caaataagtgcgaagataagacgac

SEQ ID NO: 3443135 - DNA, 25 bp, Homo sapien
tgcccaggctatgctgcagtgtgca

SEQ ID NO: 3443136 - DNA, 25 bp, Homo sapien
ggtgcactccatcatgcctggtgaa

SEQ ID NO: 3443137 - DNA, 25 bp, Homo sapien
tgcactccatcatgcctggtgaatt

SEQ ID NO: 3443138 - DNA, 25 bp, Homo sapien
caggctatgctgcagtgtgcaatgg

SEQ ID NO: 3443139 - DNA, 25 bp, Homo sapien
ttgcagtgcactccttcctcagctc

SEQ ID NO: 3443140 - DNA, 25 bp, Homo sapien
agctcatttagggattccttctgga

SEQ ID NO: 3443141 - DNA, 25 bp, Homo sapien
ccttctggagttgaagtttgaggtg

SEQ ID NO: 3443142 - DNA, 25 bp, Homo sapien
gttgaagtttgaggtgctcagctga

SEQ ID NO: 3443143 - DNA, 25 bp, Homo sapien
tgagacaccttgcctggcaccagct

SEQ ID NO: 3443144 - DNA, 25 bp, Homo sapien
caggtatgcccaaccatgctgagct

SEQ ID NO: 3443145 - DNA, 25 bp, Homo sapien
tacaggtatgcccaaccatgctgag

SEQ ID NO: 3443146 - DNA, 25 bp, Homo sapien
ggtatgcccaaccatgctgagctaa

SEQ ID NO: 3443147 - DNA, 25 bp, Homo sapien
aaaatatatgcttgcatgctttgta

SEQ ID NO: 3443148 - DNA, 25 bp, Homo sapien
ttatactgtctgtaataggccacag

SEQ ID NO: 3443149 - DNA, 25 bp, Homo sapien
caaagaaagattatactgtctgtaa

SEQ ID NO: 3443150 - DNA, 25 bp, Homo sapien
gcttgcatgctttgtaacatttatt

SEQ ID NO: 3443151 - DNA, 25 bp, Homo sapien
tcagagagtaactgcctgcaacgaa

SEQ ID NO: 3443152 - DNA, 25 bp, Homo sapien
taactgcctgcaacgaattgtcaac

SEQ ID NO: 3443153 - DNA, 25 bp, Homo sapien
cgaattgtcaactgagcattagtct

SEQ ID NO: 3443154 - DNA, 25 bp, Homo sapien
tgcctgcaacgaattgtcaactgag

SEQ ID NO: 3443155 - DNA, 25 bp, Homo sapien
gattaagcctaaagcaatgagtttt

SEQ ID NO: 3443156 - DNA, 25 bp, Homo sapien
cattagctcctgaatgaatcatgac

SEQ ID NO: 3443157 - DNA, 25 bp, Homo sapien
taaatgaaatagtaggacctaaggc

SEQ ID NO: 3443158 - DNA, 25 bp, Homo sapien
gagtgcatcccaccaccaaagtgat

SEQ ID NO: 3443159 - DNA, 25 bp, Homo sapien
cttggaagtcctcagaattaggcaa

SEQ ID NO: 3443160 - DNA, 25 bp, Homo sapien
tcagaattaggcaacttgacaccgc

SEQ ID NO: 3443161 - DNA, 25 bp, Homo sapien
taggcaacttgacaccgcatacaaa

SEQ ID NO: 3443162 - DNA, 25 bp, Homo sapien
ttgacaccgcatacaaagtaatcct

SEQ ID NO: 3443163 - DNA, 25 bp, Homo sapien
taaagtgctaggcaaccagcatttc

SEQ ID NO: 3443164 - DNA, 25 bp, Homo sapien
catcaaggagtctgatatacatact

SEQ ID NO: 3443165 - DNA, 25 bp, Homo sapien
tacatacttgcaattgggaaaggac

SEQ ID NO: 3443166 - DNA, 25 bp, Homo sapien
gatcagacctaacattctatctccc

SEQ ID NO: 3443167 - DNA, 25 bp, Homo sapien
ggcatttcctacttcctcgagaata

SEQ ID NO: 3443168 - DNA, 25 bp, Homo sapien
tttttgagagatgccaagcccattc

SEQ ID NO: 3443169 - DNA, 25 bp, Homo sapien
tccttatagtgacctcaaggccctg

SEQ ID NO: 3443170 - DNA, 25 bp, Homo sapien
taaaagcctaactcagctcatgcca

SEQ ID NO: 3443171 - DNA, 25 bp, Homo sapien
gcttgttgggcattgtaagtgtaga

SEQ ID NO: 3443172 - DNA, 25 bp, Homo sapien
gagactgtattcagcttgttgggca

SEQ ID NO: 3443173 - DNA, 25 bp, Homo sapien
ggcattgtaagtgtagataactaca

SEQ ID NO: 3443174 - DNA, 25 bp, Homo sapien
ttgggcattgtaagtgtagataact

SEQ ID NO: 3443175 - DNA, 25 bp, Homo sapien
tcagtggaactcagatgaacaccct

SEQ ID NO: 3443176 - DNA, 25 bp, Homo sapien
gcacactaatgttggagcactacgg

SEQ ID NO: 3443177 - DNA, 25 bp, Homo sapien
gcataaagtctatcccagcaaagtc

SEQ ID NO: 3443178 - DNA, 25 bp, Homo sapien
gaatatcacagaataaccagcttgg

SEQ ID NO: 3443179 - DNA, 25 bp, Homo sapien
taagactctaatcactgccacagca

SEQ ID NO: 3443180 - DNA, 25 bp, Homo sapien
atttaagactctaatcactgccaca

SEQ ID NO: 3443181 - DNA, 25 bp, Homo sapien
tgttaaggaaccaagcacccactga

SEQ ID NO: 3443182 - DNA, 25 bp, Homo sapien
cttcccaatcactgaggcagctgat

SEQ ID NO: 3443183 - DNA, 25 bp, Homo sapien
tctccagtgggaaaatgtgagctca

SEQ ID NO: 3443184 - DNA, 25 bp, Homo sapien
gtccctaacacctaaggcagagcag

SEQ ID NO: 3443185 - DNA, 25 bp, Homo sapien
ttccagtaagcattaatgacgtccc

SEQ ID NO: 3443186 - DNA, 25 bp, Homo sapien
taattatggctattgcaggccatgc

SEQ ID NO: 3443187 - DNA, 25 bp, Homo sapien
ccactccacctattaaaaattctag

SEQ ID NO: 3443188 - DNA, 25 bp, Homo sapien
tcttccacgattaaccagtctactg

SEQ ID NO: 3443189 - DNA, 25 bp, Homo sapien
taaacaggttggcttgacacccaat

SEQ ID NO: 3443190 - DNA, 25 bp, Homo sapien
tccaaagtaatacagctagtaaaca

SEQ ID NO: 3443191 - DNA, 25 bp, Homo sapien
taaggctcagagattaaggaatcct

SEQ ID NO: 3443192 - DNA, 25 bp, Homo sapien
ccttttccgtcagtttgtcattgat

SEQ ID NO: 3443193 - DNA, 25 bp, Homo sapien
tctgaggggcacttgtaggaaaaag

SEQ ID NO: 3443194 - DNA, 25 bp, Homo sapien
tctttgattgttgatctagacccct

SEQ ID NO: 3443195 - DNA, 25 bp, Homo sapien
tctagaccccttatgaattatagga

SEQ ID NO: 3443196 - DNA, 25 bp, Homo sapien
aagatctctgagcactttaacccca

SEQ ID NO: 3443197 - DNA, 25 bp, Homo sapien
aatgtcactgcatcaccatctggct

SEQ ID NO: 3443198 - DNA, 25 bp, Homo sapien
aggtctgctgcgatatattttctca

SEQ ID NO: 3443199 - DNA, 25 bp, Homo sapien
ctttacagtggaagactaacaggac

SEQ ID NO: 3443200 - DNA, 25 bp, Homo sapien
ttcagtcctcagtgaaagaagtggg

SEQ ID NO: 3443201 - DNA, 25 bp, Homo sapien
caagtaatggtttagacaaggcatc

SEQ ID NO: 3443202 - DNA, 25 bp, Homo sapien
ggtctgagcctcacagtgaaacgca

SEQ ID NO: 3443203 - DNA, 25 bp, Homo sapien
ccctttacagtatgcaggtgcacaa

SEQ ID NO: 3443204 - DNA, 25 bp, Homo sapien
tgagcattagcttaaagttagcagc

SEQ ID NO: 3443205 - DNA, 25 bp, Homo sapien
taaaagtcatccatgggttgcggaa

SEQ ID NO: 3443206 - DNA, 25 bp, Homo sapien
cctttccagctatcgaagtcctaga

SEQ ID NO: 3443207 - DNA, 25 bp, Homo sapien
cagcacttgtgggtaaccaggtgtg

SEQ ID NO: 3443208 - DNA, 25 bp, Homo sapien
ggcaatagctattgactaatcaggg

SEQ ID NO: 3443209 - DNA, 25 bp, Homo sapien
caatagctattgactaatcagggtg

SEQ ID NO: 3443210 - DNA, 25 bp, Homo sapien
tgcctacttggcaatagctattgac

SEQ ID NO: 3443211 - DNA, 25 bp, Homo sapien
ggagggtcttgcctacttggcaata

SEQ ID NO: 3443212 - DNA, 25 bp, Homo sapien
gaactactggcacgctcactgatgt

SEQ ID NO: 3443213 - DNA, 25 bp, Homo sapien
tcactgatgtgttgggagtcctgtt

SEQ ID NO: 3443214 - DNA, 25 bp, Homo sapien
cagtattgaatgtgggacatacccc

SEQ ID NO: 3443215 - DNA, 25 bp, Homo sapien
cctgcaagcattacactggactcta

SEQ ID NO: 3443216 - DNA, 25 bp, Homo sapien
gaaagaagctaggtacagagaaaca

SEQ ID NO: 3443217 - DNA, 25 bp, Homo sapien
tgaaagggatagtacaagaggacac

SEQ ID NO: 3443218 - DNA, 25 bp, Homo sapien
gccagaactggtgtatgaaaatgac

SEQ ID NO: 3443219 - DNA, 25 bp, Homo sapien
ccaaggcgggataatcactttagcc

SEQ ID NO: 3443220 - DNA, 25 bp, Homo sapien
tacccctagggatacctaatgaatc

SEQ ID NO: 3443221 - DNA, 25 bp, Homo sapien
tttactcatgagacaagggcatgcc

SEQ ID NO: 3443222 - DNA, 25 bp, Homo sapien
tctttccagtcaattatcgagcctt

SEQ ID NO: 3443223 - DNA, 25 bp, Homo sapien
caaattgacacttgagacaggtccc

SEQ ID NO: 3443224 - DNA, 25 bp, Homo sapien
tatctatgctactatactctggaag

SEQ ID NO: 3443225 - DNA, 25 bp, Homo sapien
tgtttttctcaagcagtttcagtgt

SEQ ID NO: 3443226 - DNA, 25 bp, Homo sapien
tctattgcacaagttgaagtcgggt

SEQ ID NO: 3443227 - DNA, 25 bp, Homo sapien
tcagtgttggtcaagatatctatgc

SEQ ID NO: 3443228 - DNA, 25 bp, Homo sapien
gaatgtatgttcctaatcaaaacgt

SEQ ID NO: 3443229 - DNA, 25 bp, Homo sapien
actgcgccctgctgagaatgtatgt

SEQ ID NO: 3443230 - DNA, 25 bp, Homo sapien
gctttttaaatgctgagccattgac

SEQ ID NO: 3443231 - DNA, 25 bp, Homo sapien
atgtctttcatacaaaagtggcaac

SEQ ID NO: 3443232 - DNA, 25 bp, Homo sapien
tattgtaaagacaactggcatcctt

SEQ ID NO: 3443233 - DNA, 25 bp, Homo sapien
tacaatgagttcttataacaaccac

SEQ ID NO: 3443234 - DNA, 25 bp, Homo sapien
tattggccaacatttgatgctttac

SEQ ID NO: 3443235 - DNA, 25 bp, Homo sapien
ttagtggagtccttacaaagtttca

SEQ ID NO: 3443236 - DNA, 25 bp, Homo sapien
tctttctagggttgcagtaatgtgc

SEQ ID NO: 3443237 - DNA, 25 bp, Homo sapien
tctgctgattgttaccgtgttttct

SEQ ID NO: 3443238 - DNA, 25 bp, Homo sapien
gttaatcagtctttctagggttgca

SEQ ID NO: 3443239 - DNA, 25 bp, Homo sapien
gcagtaatgtgcatgatattcttct

SEQ ID NO: 3443240 - DNA, 25 bp, Homo sapien
tgacctacatactcactacgcagag

SEQ ID NO: 3443241 - DNA, 25 bp, Homo sapien
gaaatggctaactcagaaactttat

SEQ ID NO: 3443242 - DNA, 25 bp, Homo sapien
aagtgagccttctttgtttaccaat

SEQ ID NO: 3443243 - DNA, 25 bp, Homo sapien
gacagaaaaaccaaatcactgattc

SEQ ID NO: 3443244 - DNA, 25 bp, Homo sapien
acatttgttcagtcagaagtttgac

SEQ ID NO: 3443245 - DNA, 25 bp, Homo sapien
aaaagataagcacatttgttcagtc

SEQ ID NO: 3443246 - DNA, 25 bp, Homo sapien
ttttaatccgtatactgttatttca

SEQ ID NO: 3443247 - DNA, 25 bp, Homo sapien
gataagcacatttgttcagtcagaa

SEQ ID NO: 3443248 - DNA, 25 bp, Homo sapien
tatttagttctaagccagcctttcc

SEQ ID NO: 3443249 - DNA, 25 bp, Homo sapien
agaaaacaaatccagggcacaaaat

SEQ ID NO: 3443250 - DNA, 25 bp, Homo sapien
tgctatttagttctaagccagcctt

SEQ ID NO: 3443251 - DNA, 25 bp, Homo sapien
ttctgctatttagttctaagccagc

SEQ ID NO: 3443252 - DNA, 25 bp, Homo sapien
tctgcatcacacaacagcttaaata

SEQ ID NO: 3443253 - DNA, 25 bp, Homo sapien
cttaaatatttgaatggcccagcaa

SEQ ID NO: 3443254 - DNA, 25 bp, Homo sapien
atttgaatggcccagcaataaattt

SEQ ID NO: 3443255 - DNA, 25 bp, Homo sapien
tgcatcacacaacagcttaaatatt

SEQ ID NO: 3443256 - DNA, 25 bp, Homo sapien
aaagaactcaatatcaatttcctta

SEQ ID NO: 3443257 - DNA, 25 bp, Homo sapien
ctgtggaaattgttaaagaactcaa

SEQ ID NO: 3443258 - DNA, 25 bp, Homo sapien
gttaaagaactcaatatcaatttcc

SEQ ID NO: 3443259 - DNA, 25 bp, Homo sapien
gaactcaatatcaatttccttatag

SEQ ID NO: 3443260 - DNA, 25 bp, Homo sapien
caagagaagacagcggtttgaacca

SEQ ID NO: 3443261 - DNA, 25 bp, Homo sapien
tctgaatgacaggagaagcactgga

SEQ ID NO: 3443262 - DNA, 25 bp, Homo sapien
tgctctgtgaggataaactgcaggg

SEQ ID NO: 3443263 - DNA, 25 bp, Homo sapien
ggttggattctctcattttgaagac

SEQ ID NO: 3443264 - DNA, 25 bp, Homo sapien
caggcaggtgaaacgaaaagtgcaa

SEQ ID NO: 3443265 - DNA, 25 bp, Homo sapien
tccaggcaggtgaaacgaaaagtgc

SEQ ID NO: 3443266 - DNA, 25 bp, Homo sapien
ttccaggcaggtgaaacgaaaagtg

SEQ ID NO: 3443267 - DNA, 25 bp, Homo sapien
gtatagtcacattcaaggaagtgaa

SEQ ID NO: 3443268 - DNA, 25 bp, Homo sapien
cagaagatagacaccataatcaaac

SEQ ID NO: 3443269 - DNA, 25 bp, Homo sapien
tttgttcagaagatagacaccataa

SEQ ID NO: 3443270 - DNA, 25 bp, Homo sapien
tatttttgttcagaagatagacacc

SEQ ID NO: 3443271 - DNA, 25 bp, Homo sapien
gttcagaagatagacaccataatca

SEQ ID NO: 3443272 - DNA, 25 bp, Homo sapien
tgatggcagtaaggtcaaagacaaa

SEQ ID NO: 3443273 - DNA, 25 bp, Homo sapien
aaatcaaaacgtgaaaaagtgatgg

SEQ ID NO: 3443274 - DNA, 25 bp, Homo sapien
gtgatggcagtaaggtcaaagacaa

SEQ ID NO: 3443275 - DNA, 25 bp, Homo sapien
caaatcaaaacgtgaaaaagtgatg

SEQ ID NO: 3443276 - DNA, 25 bp, Homo sapien
gtcatttcctctaccaaaaaagtga

SEQ ID NO: 3443277 - DNA, 25 bp, Homo sapien
tcccaaatactgaagtaacaaatat

SEQ ID NO: 3443278 - DNA, 25 bp, Homo sapien
cttgaaggcctgtctctctaagctt

SEQ ID NO: 3443279 - DNA, 25 bp, Homo sapien
tggttgtgatgaaaggtcctattga

SEQ ID NO: 3443280 - DNA, 25 bp, Homo sapien
gatggaaatatatagaacagtgaag

SEQ ID NO: 3443281 - DNA, 25 bp, Homo sapien
aggatggaaatatatagaacagtga

SEQ ID NO: 3443282 - DNA, 25 bp, Homo sapien
ttaaggatggaaatatatagaacag

SEQ ID NO: 3443283 - DNA, 25 bp, Homo sapien
ggaaatatatagaacagtgaagtat

SEQ ID NO: 3443284 - DNA, 25 bp, Homo sapien
tctggcattgtgcttgctaatggaa

SEQ ID NO: 3443285 - DNA, 25 bp, Homo sapien
tctatctgggaatgtcgtcttcttt

SEQ ID NO: 3443286 - DNA, 25 bp, Homo sapien
tatctgggaatgtcgtcttctttga

SEQ ID NO: 3443287 - DNA, 25 bp, Homo sapien
ttctggcattgtgcttgctaatgga

SEQ ID NO: 3443288 - DNA, 25 bp, Homo sapien
tcttgtgtgatggtgctatatcacc

SEQ ID NO: 3443289 - DNA, 25 bp, Homo sapien
cttttctagatcttagtttcttgtg

SEQ ID NO: 3443290 - DNA, 25 bp, Homo sapien
ggtgctatatcaccattcattatta

SEQ ID NO: 3443291 - DNA, 25 bp, Homo sapien
ctagatcttagtttcttgtgtgatg

SEQ ID NO: 3443292 - DNA, 25 bp, Homo sapien
tcatcaccccaacggaaactgtaat

SEQ ID NO: 3443293 - DNA, 25 bp, Homo sapien
tgtctagcatattaacgaggcaggg

SEQ ID NO: 3443294 - DNA, 25 bp, Homo sapien
taactcagcgtacacagcacacagt

SEQ ID NO: 3443295 - DNA, 25 bp, Homo sapien
tatatccctagacttatgcagccta

SEQ ID NO: 3443296 - DNA, 25 bp, Homo sapien
cacagaattgtaggaaggcccaaat

SEQ ID NO: 3443297 - DNA, 25 bp, Homo sapien
tcccagctgttttggatggagaagc

SEQ ID NO: 3443298 - DNA, 25 bp, Homo sapien
taatagctttgtcatccccaggaaa

SEQ ID NO: 3443299 - DNA, 25 bp, Homo sapien
caggaaatcagcatagcagcagctc

SEQ ID NO: 3443300 - DNA, 25 bp, Homo sapien
ttaaacatagctaccatatggctca

SEQ ID NO: 3443301 - DNA, 25 bp, Homo sapien
aaacatagctaccatatggctcagc

SEQ ID NO: 3443302 - DNA, 25 bp, Homo sapien
acagtaaaattgcttctactttgcc

SEQ ID NO: 3443303 - DNA, 25 bp, Homo sapien
tgtaacacagtaaaattgcttctac

SEQ ID NO: 3443304 - DNA, 25 bp, Homo sapien
agccattagaaaaaattcaagtcaa

SEQ ID NO: 3443305 - DNA, 25 bp, Homo sapien
catttacaactagtaggatggctat

SEQ ID NO: 3443306 - DNA, 25 bp, Homo sapien
atggtcaaagggttggaatagttat

SEQ ID NO: 3443307 - DNA, 25 bp, Homo sapien
taaaagagtaatgacactcaacatc

SEQ ID NO: 3443308 - DNA, 25 bp, Homo sapien
cagcaatcaaagagtacagtaatca

SEQ ID NO: 3443309 - DNA, 25 bp, Homo sapien
tgttatccctttaaacacagaatag

SEQ ID NO: 3443310 - DNA, 25 bp, Homo sapien
cacattggttaatagctaatgatgg

SEQ ID NO: 3443311 - DNA, 25 bp, Homo sapien
taatacatgaacacttaaccaatca

SEQ ID NO: 3443312 - DNA, 25 bp, Homo sapien
ttcattcctttcattgcatctacct

SEQ ID NO: 3443313 - DNA, 25 bp, Homo sapien
cattcctttcattgcatctacctaa

SEQ ID NO: 3443314 - DNA, 25 bp, Homo sapien
attcctttcattgcatctacctaaa

SEQ ID NO: 3443315 - DNA, 25 bp, Homo sapien
ctttttgaaatctgtggatgacaaa

SEQ ID NO: 3443316 - DNA, 25 bp, Homo sapien
taaccacatatactgtctggaaaca

SEQ ID NO: 3443317 - DNA, 25 bp, Homo sapien
tagaagcaactctgaagctagaaca

SEQ ID NO: 3443318 - DNA, 25 bp, Homo sapien
caagtggcaacactgatcaggaagt

SEQ ID NO: 3443319 - DNA, 25 bp, Homo sapien
tcaggaagtgaatccatgtctgtct

SEQ ID NO: 3443320 - DNA, 25 bp, Homo sapien
aaaattagagactaacttggccagg

SEQ ID NO: 3443321 - DNA, 25 bp, Homo sapien
catcatgctggtgaaattcgtccct

SEQ ID NO: 3443322 - DNA, 25 bp, Homo sapien
gctgcacagtatttgattacataaa

SEQ ID NO: 3443323 - DNA, 25 bp, Homo sapien
gagccaaggcttagaaaaattagag

SEQ ID NO: 3443324 - DNA, 25 bp, Homo sapien
cactgacataagtaatgtgatttgc

SEQ ID NO: 3443325 - DNA, 25 bp, Homo sapien
gctaaatgtgccttccactgacata

SEQ ID NO: 3443326 - DNA, 25 bp, Homo sapien
caagacctaatgctgaaaaatgcta

SEQ ID NO: 3443327 - DNA, 25 bp, Homo sapien
cttgatcacaagacctaatgctgaa

SEQ ID NO: 3443328 - DNA, 25 bp, Homo sapien
aagttctcatttgtaaaccagggag

SEQ ID NO: 3443329 - DNA, 25 bp, Homo sapien
gacttgttctgtccaccttaaggaa

SEQ ID NO: 3443330 - DNA, 25 bp, Homo sapien
tcaggcccgctgtagtaaccatggg

SEQ ID NO: 3443331 - DNA, 25 bp, Homo sapien
caaatgccaagtagtatcagggttc

SEQ ID NO: 3443332 - DNA, 25 bp, Homo sapien
caatgagaacacttgtacataggaa

SEQ ID NO: 3443333 - DNA, 25 bp, Homo sapien
atgagaacacttgtacataggaagg

SEQ ID NO: 3443334 - DNA, 25 bp, Homo sapien
gggaatatcacacgccggggcctgt

SEQ ID NO: 3443335 - DNA, 25 bp, Homo sapien
tagacaaatgggatccagttaaact

SEQ ID NO: 3443336 - DNA, 25 bp, Homo sapien
ccaacatctctttaagccaataagt

SEQ ID NO: 3443337 - DNA, 25 bp, Homo sapien
tttaagccaataagtaactttagca

SEQ ID NO: 3443338 - DNA, 25 bp, Homo sapien
gccaataagtaactttagcaaagtc

SEQ ID NO: 3443339 - DNA, 25 bp, Homo sapien
acatctctttaagccaataagtaac

SEQ ID NO: 3443340 - DNA, 25 bp, Homo sapien
ttgaattgcaatagagtccaaaccc

SEQ ID NO: 3443341 - DNA, 25 bp, Homo sapien
gagtccaaacccatgagtccactgt

SEQ ID NO: 3443342 - DNA, 25 bp, Homo sapien
tagtctctctggttgatcataaata

SEQ ID NO: 3443343 - DNA, 25 bp, Homo sapien
ctctctggttgatcataaataaatg

SEQ ID NO: 3443344 - DNA, 25 bp, Homo sapien
taatagctacttcatgccttttaag

SEQ ID NO: 3443345 - DNA, 25 bp, Homo sapien
tgccttaaatggaacacagttttcc

SEQ ID NO: 3443346 - DNA, 25 bp, Homo sapien
tttctaagttaatccctacagcctc

SEQ ID NO: 3443347 - DNA, 25 bp, Homo sapien
taaagaatctggtaatgaggtgcct

SEQ ID NO: 3443348 - DNA, 25 bp, Homo sapien
ggtgtaattcccactctacatatga

SEQ ID NO: 3443349 - DNA, 25 bp, Homo sapien
atcttcatagtaaccctaaaggtag

SEQ ID NO: 3443350 - DNA, 25 bp, Homo sapien
gaaggagttgcctgaaattccccag

SEQ ID NO: 3443351 - DNA, 25 bp, Homo sapien
tcaactctgatagtttacactgcag

SEQ ID NO: 3443352 - DNA, 25 bp, Homo sapien
gccaaggctagaaccgcttaataac

SEQ ID NO: 3443353 - DNA, 25 bp, Homo sapien
ttttacagcttaaagagaccctgga

SEQ ID NO: 3443354 - DNA, 25 bp, Homo sapien
caaactctgagaacaccttttagct

SEQ ID NO: 3443355 - DNA, 25 bp, Homo sapien
cagggatgataagggacaaagccaa

SEQ ID NO: 3443356 - DNA, 25 bp, Homo sapien
agtctggagtccctagtccatgttg

SEQ ID NO: 3443357 - DNA, 25 bp, Homo sapien
aagggtttgccgcaagtctggagtc

SEQ ID NO: 3443358 - DNA, 25 bp, Homo sapien
ctgaccattagtccatgctccatga

SEQ ID NO: 3443359 - DNA, 25 bp, Homo sapien
ttgccgcaagtctggagtccctagt

SEQ ID NO: 3443360 - DNA, 25 bp, Homo sapien
tgctaatgcaggatatctaccccaa

SEQ ID NO: 3443361 - DNA, 25 bp, Homo sapien
gtagtgttacctcaacagattcaga

SEQ ID NO: 3443362 - DNA, 25 bp, Homo sapien
caactcttagtaacctgagaacaga

SEQ ID NO: 3443363 - DNA, 25 bp, Homo sapien
tgtaggccagtctcatttcagtttg

SEQ ID NO: 3443364 - DNA, 25 bp, Homo sapien
tttccagcgctctggatttgactct

SEQ ID NO: 3443365 - DNA, 25 bp, Homo sapien
tgtatctttccagcgctctggattt

SEQ ID NO: 3443366 - DNA, 25 bp, Homo sapien
atctttccagcgctctggatttgac

SEQ ID NO: 3443367 - DNA, 25 bp, Homo sapien
gtgtatctttccagcgctctggatt

SEQ ID NO: 3443368 - DNA, 25 bp, Homo sapien
caaatctagtgctccttcctctgtg

SEQ ID NO: 3443369 - DNA, 25 bp, Homo sapien
cactacgggcaaatatgctttaggc

SEQ ID NO: 3443370 - DNA, 25 bp, Homo sapien
ccttgcatgaagatgttacatagtt

SEQ ID NO: 3443371 - DNA, 25 bp, Homo sapien
gtgatagcgttgaaactggaaccca

SEQ ID NO: 3443372 - DNA, 25 bp, Homo sapien
gatgactcgtcaaggttcttctgaa

SEQ ID NO: 3443373 - DNA, 25 bp, Homo sapien
tttaaaaaccaacgtcagctagaca

SEQ ID NO: 3443374 - DNA, 25 bp, Homo sapien
caaaggcgagcctatctgatacagc

SEQ ID NO: 3443375 - DNA, 25 bp, Homo sapien
tatgccttgtgtgttcctgtctaga

SEQ ID NO: 3443376 - DNA, 25 bp, Homo sapien
tgtcaccagtggagggttagtgcac

SEQ ID NO: 3443377 - DNA, 25 bp, Homo sapien
cgccgggatacccaagtgcctttct

SEQ ID NO: 3443378 - DNA, 25 bp, Homo sapien
caatttggttcagagacttggttgc

SEQ ID NO: 3443379 - DNA, 25 bp, Homo sapien
tagtgcacaaaggatgttggccagc

SEQ ID NO: 3443380 - DNA, 25 bp, Homo sapien
ttagctttttaaaaatgtgactgcc

SEQ ID NO: 3443381 - DNA, 25 bp, Homo sapien
tttagctttttaaaaatgtgactgc

SEQ ID NO: 3443382 - DNA, 25 bp, Homo sapien
tagctttttaaaaatgtgactgcca

SEQ ID NO: 3443383 - DNA, 25 bp, Homo sapien
caagagtaaactggatttagaaggc

SEQ ID NO: 3443384 - DNA, 25 bp, Homo sapien
aaaaagctgtaaggactgtgctgtc

SEQ ID NO: 3443385 - DNA, 25 bp, Homo sapien
gacattacgttatacaaaaaagctg

SEQ ID NO: 3443386 - DNA, 25 bp, Homo sapien
ccatgaccactaggaactggttgct

SEQ ID NO: 3443387 - DNA, 25 bp, Homo sapien
gaagggaatcaagtaatcagtggga

SEQ ID NO: 3443388 - DNA, 25 bp, Homo sapien
ccttgaaggataagtggaagctaac

SEQ ID NO: 3443389 - DNA, 25 bp, Homo sapien
taaccatgccaatctaagtgatctc

SEQ ID NO: 3443390 - DNA, 25 bp, Homo sapien
caccatggtgctctgaatacaatac

SEQ ID NO: 3443391 - DNA, 25 bp, Homo sapien
ctggggacccctcggagtatctgga

SEQ ID NO: 3443392 - DNA, 25 bp, Homo sapien
gacccctcggagtatctggacaaca

SEQ ID NO: 3443393 - DNA, 25 bp, Homo sapien
cctcggagtatctggacaacacttg

SEQ ID NO: 3443394 - DNA, 25 bp, Homo sapien
cggagtatctggacaacacttgata

SEQ ID NO: 3443395 - DNA, 25 bp, Homo sapien
cattaccagataagtgtaagtactt

SEQ ID NO: 3443396 - DNA, 25 bp, Homo sapien
gaggtacattccaattgtccccaaa

SEQ ID NO: 3443397 - DNA, 25 bp, Homo sapien
tcctcttggttttactgcctgaagc

SEQ ID NO: 3443398 - DNA, 25 bp, Homo sapien
aaacccctgatgcatccttgttctg

SEQ ID NO: 3443399 - DNA, 25 bp, Homo sapien
tgcttagggactagaagaacttccc

SEQ ID NO: 3443400 - DNA, 25 bp, Homo sapien
ctccacttctgtacatcagggagct

SEQ ID NO: 3443401 - DNA, 25 bp, Homo sapien
tccacttctgtacatcagggagcta

SEQ ID NO: 3443402 - DNA, 25 bp, Homo sapien
ccacttctgtacatcagggagctag

SEQ ID NO: 3443403 - DNA, 25 bp, Homo sapien
tttatcaccacattttttccctcca

SEQ ID NO: 3443404 - DNA, 25 bp, Homo sapien
ttatcaccacattttttccctccat

SEQ ID NO: 3443405 - DNA, 25 bp, Homo sapien
tagtacacatcaagctaaatgcctt

SEQ ID NO: 3443406 - DNA, 25 bp, Homo sapien
catttgcccacaaactctaagatgg

SEQ ID NO: 3443407 - DNA, 25 bp, Homo sapien
gatggactccaaggctttgagaggt

SEQ ID NO: 3443408 - DNA, 25 bp, Homo sapien
tctattgtgtcccacaagggaacac

SEQ ID NO: 3443409 - DNA, 25 bp, Homo sapien
ccaactacaatgtgaagggaacgac

SEQ ID NO: 3443410 - DNA, 25 bp, Homo sapien
attttcccgactgtcaataatgttc

SEQ ID NO: 3443411 - DNA, 25 bp, Homo sapien
ggaacgaccattttcccgactgtca

SEQ ID NO: 3443412 - DNA, 25 bp, Homo sapien
cttgccaactacaatgtgaagggaa

SEQ ID NO: 3443413 - DNA, 25 bp, Homo sapien
tgaaacagcccggaacactgaaggt

SEQ ID NO: 3443414 - DNA, 25 bp, Homo sapien
cagaaaactaatgaggcgcgacaac

SEQ ID NO: 3443415 - DNA, 25 bp, Homo sapien
ggtgcttaacccctcatgctgtgac

SEQ ID NO: 3443416 - DNA, 25 bp, Homo sapien
gcttgccgcacaagaggaacagggt

SEQ ID NO: 3443417 - DNA, 25 bp, Homo sapien
tggaaatagagtatctacatcctgg

SEQ ID NO: 3443418 - DNA, 25 bp, Homo sapien
tgttatacactatgctagctctaga

SEQ ID NO: 3443419 - DNA, 25 bp, Homo sapien
tatctttgggccagcaataacaatc

SEQ ID NO: 3443420 - DNA, 25 bp, Homo sapien
cacacagatcatttgacttgcgtgc

SEQ ID NO: 3443421 - DNA, 25 bp, Homo sapien
gcatacttaggtctgagctaataaa

SEQ ID NO: 3443422 - DNA, 25 bp, Homo sapien
tatatttagagaagagggcccaagg

SEQ ID NO: 3443423 - DNA, 25 bp, Homo sapien
tggacaggctggatctagcaagaaa

SEQ ID NO: 3443424 - DNA, 25 bp, Homo sapien
tactttggacttcagaactcagtgt

SEQ ID NO: 3443425 - DNA, 25 bp, Homo sapien
cagggattgcactggaggtgtgatg

SEQ ID NO: 3443426 - DNA, 25 bp, Homo sapien
ggaacagggattgcactggaggtgt

SEQ ID NO: 3443427 - DNA, 25 bp, Homo sapien
tgcactggaggtgtgatgtctgtca

SEQ ID NO: 3443428 - DNA, 25 bp, Homo sapien
cttaggaacagggattgcactggag

SEQ ID NO: 3443429 - DNA, 25 bp, Homo sapien
ccggcggaagctggatacgttttca

SEQ ID NO: 3443430 - DNA, 25 bp, Homo sapien
cattcagtgcatagatccttcggga

SEQ ID NO: 3443431 - DNA, 25 bp, Homo sapien
tcacctgaggcgaaacctgtggctt

SEQ ID NO: 3443432 - DNA, 25 bp, Homo sapien
tcttggctagggtgcacattcgcgt

SEQ ID NO: 3443433 - DNA, 25 bp, Homo sapien
taaaaggtgactcgagctgtaagct

SEQ ID NO: 3443434 - DNA, 25 bp, Homo sapien
tttttcatctaatctgagggccgca

SEQ ID NO: 3443435 - DNA, 25 bp, Homo sapien
ggcatctgactgcagtaacctcgag

SEQ ID NO: 3443436 - DNA, 25 bp, Homo sapien
gagatggaacgtcacagctactggg

SEQ ID NO: 3443437 - DNA, 25 bp, Homo sapien
tttaaagagtttgcaaccctgaggc

SEQ ID NO: 3443438 - DNA, 25 bp, Homo sapien
aaatgaaatctgaatgcgggaatga

SEQ ID NO: 3443439 - DNA, 25 bp, Homo sapien
caatgtccttgggtacgtaacgtat

SEQ ID NO: 3443440 - DNA, 25 bp, Homo sapien
tgaaatctgaatgcgggaatgacaa

SEQ ID NO: 3443441 - DNA, 25 bp, Homo sapien
caaaataaagtgacggtgaggcctg

SEQ ID NO: 3443442 - DNA, 25 bp, Homo sapien
gttaaagctttcgactgcctgagag

SEQ ID NO: 3443443 - DNA, 25 bp, Homo sapien
acagcctccgcttagatagacatgg

SEQ ID NO: 3443444 - DNA, 25 bp, Homo sapien
tgttatgcaggacaaatgtggcgac

SEQ ID NO: 3443445 - DNA, 25 bp, Homo sapien
gaaagggttcttagcagttcagaaa

SEQ ID NO: 3443446 - DNA, 25 bp, Homo sapien
aatgggcaccattagaactgctaaa

SEQ ID NO: 3443447 - DNA, 25 bp, Homo sapien
gccactttaaacagaggccatacta

SEQ ID NO: 3443448 - DNA, 25 bp, Homo sapien
ggttaggtcaggataaatgggcacc

SEQ ID NO: 3443449 - DNA, 25 bp, Homo sapien
tggtttccccaaagcgccactccat

SEQ ID NO: 3443450 - DNA, 25 bp, Homo sapien
gtggtttccccaaagcgccactcca

SEQ ID NO: 3443451 - DNA, 25 bp, Homo sapien
gagatctttcctggtcgcccgtggt

SEQ ID NO: 3443452 - DNA, 25 bp, Homo sapien
agatctttcctggtcgcccgtggtt

SEQ ID NO: 3443453 - DNA, 25 bp, Homo sapien
gcactgggaccacgcgcagctttat

SEQ ID NO: 3443454 - DNA, 25 bp, Homo sapien
ctgtcatcctgctgtcgtcggagtt

SEQ ID NO: 3443455 - DNA, 25 bp, Homo sapien
tcgtcggagtttgcccattgacccc

SEQ ID NO: 3443456 - DNA, 25 bp, Homo sapien
cctcaggcacaagtggggcgcatgc

SEQ ID NO: 3443457 - DNA, 25 bp, Homo sapien
tccccagctgtgaatcaatgcttgg

SEQ ID NO: 3443458 - DNA, 25 bp, Homo sapien
atccagcagggtgacgggagcccac

SEQ ID NO: 3443459 - DNA, 25 bp, Homo sapien
acatctgcccaccaggtgctcccca

SEQ ID NO: 3443460 - DNA, 25 bp, Homo sapien
cccagctgtgaatcaatgcttggaa

SEQ ID NO: 3443461 - DNA, 25 bp, Homo sapien
tccaggtgacatctgggtcggtttg

SEQ ID NO: 3443462 - DNA, 25 bp, Homo sapien
tctcgcagcaaacagagactccatc

SEQ ID NO: 3443463 - DNA, 25 bp, Homo sapien
gattctccggaatgatgatcaacac

SEQ ID NO: 3443464 - DNA, 25 bp, Homo sapien
tgctgtcttgctgggtggacctgca

SEQ ID NO: 3443465 - DNA, 25 bp, Homo sapien
aaaataacttggcagcctgaggctc

SEQ ID NO: 3443466 - DNA, 25 bp, Homo sapien
cacatggaatcactagcttgggttg

SEQ ID NO: 3443467 - DNA, 25 bp, Homo sapien
cagacttgacctttcagggccacag

SEQ ID NO: 3443468 - DNA, 25 bp, Homo sapien
taccgtggagcgctatgtctgcaag

SEQ ID NO: 3443469 - DNA, 25 bp, Homo sapien
caacaagacatccaacggaagcgac

SEQ ID NO: 3443470 - DNA, 25 bp, Homo sapien
acggaagcgacagctgcgaccttat

SEQ ID NO: 3443471 - DNA, 25 bp, Homo sapien
acatccaacggaagcgacagctgcg

SEQ ID NO: 3443472 - DNA, 25 bp, Homo sapien
caagacatccaacggaagcgacagc

SEQ ID NO: 3443473 - DNA, 25 bp, Homo sapien
gactcggaactcgtctatctgcaga

SEQ ID NO: 3443474 - DNA, 25 bp, Homo sapien
gaaggactcggaactcgtctatctg

SEQ ID NO: 3443475 - DNA, 25 bp, Homo sapien
gtgaaggactcggaactcgtctatc

SEQ ID NO: 3443476 - DNA, 25 bp, Homo sapien
ggaactcgtctatctgcagagctca

SEQ ID NO: 3443477 - DNA, 25 bp, Homo sapien
cgcccgcgaggtcatgaaggcctgt

SEQ ID NO: 3443478 - DNA, 25 bp, Homo sapien
agctgtgccgcagcaacctggagct

SEQ ID NO: 3443479 - DNA, 25 bp, Homo sapien
ggtctggtgtctgcacaggtgcagc

SEQ ID NO: 3443480 - DNA, 25 bp, Homo sapien
gtcgccgggcctttgccgacatgcg

SEQ ID NO: 3443481 - DNA, 25 bp, Homo sapien
tccgagggggacgacgcttctcgca

SEQ ID NO: 3443482 - DNA, 25 bp, Homo sapien
ctcccgggtaagcaaaccaagcgct

SEQ ID NO: 3443483 - DNA, 25 bp, Homo sapien
gcagcactccgaagagttccccttt

SEQ ID NO: 3443484 - DNA, 25 bp, Homo sapien
ttctcgcgccgcttcacgaagaggg

SEQ ID NO: 3443485 - DNA, 25 bp, Homo sapien
cggccgcagcagttacttgagccag

SEQ ID NO: 3443486 - DNA, 25 bp, Homo sapien
ccaggaaggcctggtcatcgctgcc

SEQ ID NO: 3443487 - DNA, 25 bp, Homo sapien
ttgagccagatgatgggcctgcttg

SEQ ID NO: 3443488 - DNA, 25 bp, Homo sapien
gaaggcctggtcatcgctgcctgcg

SEQ ID NO: 3443489 - DNA, 25 bp, Homo sapien
ttctgtgcctccagacaggccttcc

SEQ ID NO: 3443490 - DNA, 25 bp, Homo sapien
tctgtgcctccagacaggccttccc

SEQ ID NO: 3443491 - DNA, 25 bp, Homo sapien
ctctgcccgggccttctgtgcctcc

SEQ ID NO: 3443492 - DNA, 25 bp, Homo sapien
gtgcctccagacaggccttccccat

SEQ ID NO: 3443493 - DNA, 25 bp, Homo sapien
gcctctgcgtccacggtccatgggt

SEQ ID NO: 3443494 - DNA, 25 bp, Homo sapien
ggtttcccgtgcttcgcctctgcgt

SEQ ID NO: 3443495 - DNA, 25 bp, Homo sapien
atgggttctaggctccccgagaagc

SEQ ID NO: 3443496 - DNA, 25 bp, Homo sapien
cgactctggttcaccgaatgggcct

SEQ ID NO: 3443497 - DNA, 25 bp, Homo sapien
taccaatccggtatccgcacagtgg

SEQ ID NO: 3443498 - DNA, 25 bp, Homo sapien
ttagggctcgcctcggattaccaat

SEQ ID NO: 3443499 - DNA, 25 bp, Homo sapien
gatctggacgcagcgagaacgcaat

SEQ ID NO: 3443500 - DNA, 25 bp, Homo sapien
cacgagtttacactggacctgggag

SEQ ID NO: 3443501 - DNA, 25 bp, Homo sapien
gggacctctcgcaccctaagcgaga

SEQ ID NO: 3443502 - DNA, 25 bp, Homo sapien
ggatttgaacccgggacctctcgca

SEQ ID NO: 3443503 - DNA, 25 bp, Homo sapien
atcatacccctagaccaacgagccg

SEQ ID NO: 3443504 - DNA, 25 bp, Homo sapien
ctcgcaccctaagcgagaatcatac

SEQ ID NO: 3443505 - DNA, 25 bp, Homo sapien
cagagaagaattggttcaaggggct

SEQ ID NO: 3443506 - DNA, 25 bp, Homo sapien
cacttagcttggcatagaggaccca

SEQ ID NO: 3443507 - DNA, 25 bp, Homo sapien
ctggagtgtccaaggaacaagtgca

SEQ ID NO: 3443508 - DNA, 25 bp, Homo sapien
aacaagtgcatgtgaaggagagcaa

SEQ ID NO: 3443509 - DNA, 25 bp, Homo sapien
gtcattcgccctcatgtggccagca

SEQ ID NO: 3443510 - DNA, 25 bp, Homo sapien
tcattcgccctcatgtggccagcag

SEQ ID NO: 3443511 - DNA, 25 bp, Homo sapien
tgcctgctccgtgtcattcgccctc

SEQ ID NO: 3443512 - DNA, 25 bp, Homo sapien
gcctgctccgtgtcattcgccctca

SEQ ID NO: 3443513 - DNA, 25 bp, Homo sapien
gactgcccgacagcgcctggcagag

SEQ ID NO: 3443514 - DNA, 25 bp, Homo sapien
gggactgcccgacagcgcctggcag

SEQ ID NO: 3443515 - DNA, 25 bp, Homo sapien
gggggactgcccgacagcgcctggc

SEQ ID NO: 3443516 - DNA, 25 bp, Homo sapien
ctgggggactgcccgacagcgcctg

SEQ ID NO: 3443517 - DNA, 25 bp, Homo sapien
gggcgggagatatccccagactctg

SEQ ID NO: 3443518 - DNA, 25 bp, Homo sapien
cactggctttcccatgtagggcatg

SEQ ID NO: 3443519 - DNA, 25 bp, Homo sapien
cagatccctatgtggaggaggacac

SEQ ID NO: 3443520 - DNA, 25 bp, Homo sapien
gcatgaagatgtctgcccctactga

SEQ ID NO: 3443521 - DNA, 25 bp, Homo sapien
caggccaaggaacttggacttaaat

SEQ ID NO: 3443522 - DNA, 25 bp, Homo sapien
actcatttggaacaggtggcaggcc

SEQ ID NO: 3443523 - DNA, 25 bp, Homo sapien
gccaggccaaggaacttggacttaa

SEQ ID NO: 3443524 - DNA, 25 bp, Homo sapien
gcagtcatgggggactcatttggaa

SEQ ID NO: 3443525 - DNA, 25 bp, Homo sapien
cccgtgtgggaggtctagaggagcc

SEQ ID NO: 3443526 - DNA, 25 bp, Homo sapien
aggtctagaggagcctgccctgtca

SEQ ID NO: 3443527 - DNA, 25 bp, Homo sapien
tcagtgcccgtgtgggaggtctaga

SEQ ID NO: 3443528 - DNA, 25 bp, Homo sapien
catgtgggcaaagtcaagacccctc

SEQ ID NO: 3443529 - DNA, 25 bp, Homo sapien
tttagagttgaagaactgacgttca

SEQ ID NO: 3443530 - DNA, 25 bp, Homo sapien
gagttgaagaactgacgttcacagg

SEQ ID NO: 3443531 - DNA, 25 bp, Homo sapien
tcttcgagataggtaagatttatcc

SEQ ID NO: 3443532 - DNA, 25 bp, Homo sapien
agctggtcccggcagctcttcgaga

SEQ ID NO: 3443533 - DNA, 25 bp, Homo sapien
gcattctgttgtgtgaagggatcac

SEQ ID NO: 3443534 - DNA, 25 bp, Homo sapien
tgggttgggactcctcagttccacc

SEQ ID NO: 3443535 - DNA, 25 bp, Homo sapien
gctgctatgagcatgccagaacctg

SEQ ID NO: 3443536 - DNA, 25 bp, Homo sapien
actaccaggtgagtccacaaacagg

SEQ ID NO: 3443537 - DNA, 25 bp, Homo sapien
gatatagagcttccgtccaccatct

SEQ ID NO: 3443538 - DNA, 25 bp, Homo sapien
tcttaaagcatatttgaggaacact

SEQ ID NO: 3443539 - DNA, 25 bp, Homo sapien
cactttgacagaccaaaggtcaagt

SEQ ID NO: 3443540 - DNA, 25 bp, Homo sapien
gaatgagcggtatgaaaatggacga

SEQ ID NO: 3443541 - DNA, 25 bp, Homo sapien
gacatgaggctgatgaaatcccaga

SEQ ID NO: 3443542 - DNA, 25 bp, Homo sapien
gagaaagcggtttgagacaacagca

SEQ ID NO: 3443543 - DNA, 25 bp, Homo sapien
tccagataactttcaggcactgctg

SEQ ID NO: 3443544 - DNA, 25 bp, Homo sapien
gagtattgtcgtggccaggcttaca

SEQ ID NO: 3443545 - DNA, 25 bp, Homo sapien
ccaggttgaccagcctgctgatgtt

SEQ ID NO: 3443546 - DNA, 25 bp, Homo sapien
catccttataaacgtgcagtccgta

SEQ ID NO: 3443547 - DNA, 25 bp, Homo sapien
aacgtgcagtccgtaggataaggag

SEQ ID NO: 3443548 - DNA, 25 bp, Homo sapien
tgatgtttcttgttatcagcaccat

SEQ ID NO: 3443549 - DNA, 25 bp, Homo sapien
aattaaaggcactattctttggact

SEQ ID NO: 3443550 - DNA, 25 bp, Homo sapien
ttgctttatttgcaaatagaaaatc

SEQ ID NO: 3443551 - DNA, 25 bp, Homo sapien
caagccgtctacccggccaaggcct

SEQ ID NO: 3443552 - DNA, 25 bp, Homo sapien
tggggtcaagccgtctacccggcca

SEQ ID NO: 3443553 - DNA, 25 bp, Homo sapien
tgctttatttgcaaatagaaaatca

SEQ ID NO: 3443554 - DNA, 25 bp, Homo sapien
cacatctggatcatgagggaaaaag

SEQ ID NO: 3443555 - DNA, 25 bp, Homo sapien
taggcttccctatgctccgtctttc

SEQ ID NO: 3443556 - DNA, 25 bp, Homo sapien
atttattgcattgtagtaaggatac

SEQ ID NO: 3443557 - DNA, 25 bp, Homo sapien
agacaggcacagtctgaaggaatcc

SEQ ID NO: 3443558 - DNA, 25 bp, Homo sapien
tgagggcacccctagtcagttctgg

SEQ ID NO: 3443559 - DNA, 25 bp, Homo sapien
tccgagacatgggaaagaactcgct

SEQ ID NO: 3443560 - DNA, 25 bp, Homo sapien
tcttagtctgacttggccttgcccc

SEQ ID NO: 3443561 - DNA, 25 bp, Homo sapien
gcattcccagtgttttaagttccga

SEQ ID NO: 3443562 - DNA, 25 bp, Homo sapien
tctttcatctcatcgcaactgcttt

SEQ ID NO: 3443563 - DNA, 25 bp, Homo sapien
tgtcattgcacggttcaggattcat

SEQ ID NO: 3443564 - DNA, 25 bp, Homo sapien
aactgctttctccttcggacttgtc

SEQ ID NO: 3443565 - DNA, 25 bp, Homo sapien
tttctccttcggacttgtcattgca

SEQ ID NO: 3443566 - DNA, 25 bp, Homo sapien
cggcgcgcggacgcgggatgctgtg

SEQ ID NO: 3443567 - DNA, 25 bp, Homo sapien
gcgcggacgcgggatgctgtgggtt

SEQ ID NO: 3443568 - DNA, 25 bp, Homo sapien
ctgcgcggaggacaccaccccaaac

SEQ ID NO: 3443569 - DNA, 25 bp, Homo sapien
ccaccccaaacgcgagggagctggg

SEQ ID NO: 3443570 - DNA, 25 bp, Homo sapien
tcggagcacgtgcgctggtgggggc

SEQ ID NO: 3443571 - DNA, 25 bp, Homo sapien
cggagcacgtgcgctggtgggggct

SEQ ID NO: 3443572 - DNA, 25 bp, Homo sapien
ctcggagcacgtgcgctggtggggg

SEQ ID NO: 3443573 - DNA, 25 bp, Homo sapien
ccgagatggggagccggccccgagc

SEQ ID NO: 3443574 - DNA, 25 bp, Homo sapien
cgggcgcagcgcactgccgtcgacc

SEQ ID NO: 3443575 - DNA, 25 bp, Homo sapien
gccgtcgaccccagcgttggaccga

SEQ ID NO: 3443576 - DNA, 25 bp, Homo sapien
cgaccccagcgttggaccgagatgg

SEQ ID NO: 3443577 - DNA, 25 bp, Homo sapien
agcacgcagtccgacttggccttct

SEQ ID NO: 3443578 - DNA, 25 bp, Homo sapien
caactgcacgcggaagagcacgcag

SEQ ID NO: 3443579 - DNA, 25 bp, Homo sapien
cgcggaagagcacgcagtccgactt

SEQ ID NO: 3443580 - DNA, 25 bp, Homo sapien
aagagcacgcagtccgacttggcct

SEQ ID NO: 3443581 - DNA, 25 bp, Homo sapien
aggcgcgcttccttgcgcgtgcccg

SEQ ID NO: 3443582 - DNA, 25 bp, Homo sapien
gcaggcgcgcttccttgcgcgtgcc

SEQ ID NO: 3443583 - DNA, 25 bp, Homo sapien
caggcgcgcttccttgcgcgtgccc

SEQ ID NO: 3443584 - DNA, 25 bp, Homo sapien
ggcggcgcgcgccaggtcccgcctc

SEQ ID NO: 3443585 - DNA, 25 bp, Homo sapien
cggcgcgcgccaggtcccgcctccg

SEQ ID NO: 3443586 - DNA, 25 bp, Homo sapien
tgcggcggcgcgcgccaggtcccgc

SEQ ID NO: 3443587 - DNA, 25 bp, Homo sapien
ctgcggcggcgcgcgccaggtcccg

SEQ ID NO: 3443588 - DNA, 25 bp, Homo sapien
gacaggcgcgcatgcgcaattctct

SEQ ID NO: 3443589 - DNA, 25 bp, Homo sapien
gcggattagactgtgcgcagtcgca

SEQ ID NO: 3443590 - DNA, 25 bp, Homo sapien
ctgctctagcgtcccgggagacagg

SEQ ID NO: 3443591 - DNA, 25 bp, Homo sapien
tctctccccgcggattagactgtgc

SEQ ID NO: 3443592 - DNA, 25 bp, Homo sapien
caacagtcgctgcaaagctgggaaa

SEQ ID NO: 3443593 - DNA, 25 bp, Homo sapien
tgatgtaacgtgcaagctcgcccta

SEQ ID NO: 3443594 - DNA, 25 bp, Homo sapien
gattccgcggcccttaaggagtata

SEQ ID NO: 3443595 - DNA, 25 bp, Homo sapien
ttctagaagcctcgccgggaaagag

SEQ ID NO: 3443596 - DNA, 25 bp, Homo sapien
cacaggaacgtttaacaggccacga

SEQ ID NO: 3443597 - DNA, 25 bp, Homo sapien
acacaggaacgtttaacaggccacg

SEQ ID NO: 3443598 - DNA, 25 bp, Homo sapien
tgaacaacacaggaacgtttaacag

SEQ ID NO: 3443599 - DNA, 25 bp, Homo sapien
taaatagcggtcactcattctggca

SEQ ID NO: 3443600 - DNA, 25 bp, Homo sapien
aactctggcccttgacatgacttca

SEQ ID NO: 3443601 - DNA, 25 bp, Homo sapien
aaagatggtgggtctcacttgcaga

SEQ ID NO: 3443602 - DNA, 25 bp, Homo sapien
tcatctgttcggtgggtgactggac

SEQ ID NO: 3443603 - DNA, 25 bp, Homo sapien
catcctcacggttaactgcctgttt

SEQ ID NO: 3443604 - DNA, 25 bp, Homo sapien
tgtctaaatttaactcttcagccat

SEQ ID NO: 3443605 - DNA, 25 bp, Homo sapien
tgcctgtttgaacaaaccaagtcct

SEQ ID NO: 3443606 - DNA, 25 bp, Homo sapien
gcagaaatcttcctcatgttcaagt

SEQ ID NO: 3443607 - DNA, 25 bp, Homo sapien
tcaagttttcgtggtttaggctcac

SEQ ID NO: 3443608 - DNA, 25 bp, Homo sapien
tgaaagatcggaccgaaagtcaagt

SEQ ID NO: 3443609 - DNA, 25 bp, Homo sapien
ctttgaaagatcggaccgaaagtca

SEQ ID NO: 3443610 - DNA, 25 bp, Homo sapien
gtcaagttttcgtggtttaggctca

SEQ ID NO: 3443611 - DNA, 25 bp, Homo sapien
gcttgttgaagatgacgcctgcaga

SEQ ID NO: 3443612 - DNA, 25 bp, Homo sapien
ttaattcagggactagagagccacc

SEQ ID NO: 3443613 - DNA, 25 bp, Homo sapien
tacgtgagcagccaaagaaggtgcc

SEQ ID NO: 3443614 - DNA, 25 bp, Homo sapien
cacaacaagctaaggtctgggcaga

SEQ ID NO: 3443615 - DNA, 25 bp, Homo sapien
gactcaggggaagcaatttaacaac

SEQ ID NO: 3443616 - DNA, 25 bp, Homo sapien
tttagccaatagtgtcatcattttc

SEQ ID NO: 3443617 - DNA, 25 bp, Homo sapien
tctgctgcaacaccattatcttcct

SEQ ID NO: 3443618 - DNA, 25 bp, Homo sapien
tacaaacctattcacagactcaggg

SEQ ID NO: 3443619 - DNA, 25 bp, Homo sapien
tgaaatgctattaccaaacccctgc

SEQ ID NO: 3443620 - DNA, 25 bp, Homo sapien
gaaagaacagcactaaaagtaactg

SEQ ID NO: 3443621 - DNA, 25 bp, Homo sapien
gagtgttgtgcctctactatcaagc

SEQ ID NO: 3443622 - DNA, 25 bp, Homo sapien
tctatgtggtattacttggaaccca

SEQ ID NO: 3443623 - DNA, 25 bp, Homo sapien
aaagtgcagtgtccctggtgccaag

SEQ ID NO: 3443624 - DNA, 25 bp, Homo sapien
ctaacaggtgttgacccggcgtggt

SEQ ID NO: 3443625 - DNA, 25 bp, Homo sapien
gggacaacgtctagctttcaaggtg

SEQ ID NO: 3443626 - DNA, 25 bp, Homo sapien
tgtgggcaacctagagccgcatctg

SEQ ID NO: 3443627 - DNA, 25 bp, Homo sapien
taacaggttagaaacaactcctgta

SEQ ID NO: 3443628 - DNA, 25 bp, Homo sapien
aactcctgtaggtatggttgtggga

SEQ ID NO: 3443629 - DNA, 25 bp, Homo sapien
aataacaggttagaaacaactcctg

SEQ ID NO: 3443630 - DNA, 25 bp, Homo sapien
tcctgtaggtatggttgtgggatcc

SEQ ID NO: 3443631 - DNA, 25 bp, Homo sapien
aatccagaagtaagttgtctcagga

SEQ ID NO: 3443632 - DNA, 25 bp, Homo sapien
taaaatccagaagtaagttgtctca

SEQ ID NO: 3443633 - DNA, 25 bp, Homo sapien
ccagaagtaagttgtctcaggacct

SEQ ID NO: 3443634 - DNA, 25 bp, Homo sapien
gaataaaatccagaagtaagttgtc

SEQ ID NO: 3443635 - DNA, 25 bp, Homo sapien
catgtctggaccaacatagcttctg

SEQ ID NO: 3443636 - DNA, 25 bp, Homo sapien
gggtcttggtccagcatcactggca

SEQ ID NO: 3443637 - DNA, 25 bp, Homo sapien
tacactccaccatgggtcttggtcc

SEQ ID NO: 3443638 - DNA, 25 bp, Homo sapien
caacatagcttctggtactctacac

SEQ ID NO: 3443639 - DNA, 25 bp, Homo sapien
gaagatagtcaaggacaagagcctg

SEQ ID NO: 3443640 - DNA, 25 bp, Homo sapien
ggccagggcaaaacgtgcatcagca

SEQ ID NO: 3443641 - DNA, 25 bp, Homo sapien
catagctggatgtgtgagactacgg

SEQ ID NO: 3443642 - DNA, 25 bp, Homo sapien
ccaaaggtcaatacaaggatcagca

SEQ ID NO: 3443643 - DNA, 25 bp, Homo sapien
gatcaacctgaaagccaaacggagt

SEQ ID NO: 3443644 - DNA, 25 bp, Homo sapien
tctttaagataggaaggcaacctgg

SEQ ID NO: 3443645 - DNA, 25 bp, Homo sapien
tattcctcttagacgctcagctgtg

SEQ ID NO: 3443646 - DNA, 25 bp, Homo sapien
cagtgttaggatgatctgccccaga

SEQ ID NO: 3443647 - DNA, 25 bp, Homo sapien
attctagtatccatttataaagttt

SEQ ID NO: 3443648 - DNA, 25 bp, Homo sapien
tctcggcacacaagatagcatctgg

SEQ ID NO: 3443649 - DNA, 25 bp, Homo sapien
tgcagctggagaggcatcaagacca

SEQ ID NO: 3443650 - DNA, 25 bp, Homo sapien
taacaatgggttagtgtgcacacac

SEQ ID NO: 3443651 - DNA, 25 bp, Homo sapien
gacagatctcagcaccagttgcaag

SEQ ID NO: 3443652 - DNA, 25 bp, Homo sapien
aatacactggttctagatgccaaca

SEQ ID NO: 3443653 - DNA, 25 bp, Homo sapien
tacgactacatcacaagagcatgcc

SEQ ID NO: 3443654 - DNA, 25 bp, Homo sapien
tcatggaccaaactagtgatctggc

SEQ ID NO: 3443655 - DNA, 25 bp, Homo sapien
gaggaggtagacttggcacatcgaa

SEQ ID NO: 3443656 - DNA, 25 bp, Homo sapien
tgaattaactgacaaccttagaggg

SEQ ID NO: 3443657 - DNA, 25 bp, Homo sapien
cactgaaatgtgtgctcacgaggag

SEQ ID NO: 3443658 - DNA, 25 bp, Homo sapien
ccttagagggtacaaatgaactgcc

SEQ ID NO: 3443659 - DNA, 25 bp, Homo sapien
catgagatagatggcattacttccc

SEQ ID NO: 3443660 - DNA, 25 bp, Homo sapien
actctaggagtggacttctggctgc

SEQ ID NO: 3443661 - DNA, 25 bp, Homo sapien
gagatgggtctgatgacagacccga

SEQ ID NO: 3443662 - DNA, 25 bp, Homo sapien
tgacagacccgaactctaggagtgg

SEQ ID NO: 3443663 - DNA, 25 bp, Homo sapien
tctgatgacagacccgaactctagg

SEQ ID NO: 3443664 - DNA, 25 bp, Homo sapien
tccttgtgtacagagctccaggctc

SEQ ID NO: 3443665 - DNA, 25 bp, Homo sapien
cacggactgagcgaagttcaaggtc

SEQ ID NO: 3443666 - DNA, 25 bp, Homo sapien
aaaacataacacactacttgggaag

SEQ ID NO: 3443667 - DNA, 25 bp, Homo sapien
ttatgaatacgcacctctggaagga

SEQ ID NO: 3443668 - DNA, 25 bp, Homo sapien
aggtgggtgaccacccctgtccagt

SEQ ID NO: 3443669 - DNA, 25 bp, Homo sapien
gagatgttagggaaatcacatggac

SEQ ID NO: 3443670 - DNA, 25 bp, Homo sapien
ccaagccaaatagcacaggagcagt

SEQ ID NO: 3443671 - DNA, 25 bp, Homo sapien
gaccacccctgtccagttgcagtag

SEQ ID NO: 3443672 - DNA, 25 bp, Homo sapien
tctggatgcagggaacatggaacaa

SEQ ID NO: 3443673 - DNA, 25 bp, Homo sapien
tcagatgtgggcttggcttttagga

SEQ ID NO: 3443674 - DNA, 25 bp, Homo sapien
attgagcagttccacgcaaggttta

SEQ ID NO: 3443675 - DNA, 25 bp, Homo sapien
tcctgggctagtagagaagaaaaac

SEQ ID NO: 3443676 - DNA, 25 bp, Homo sapien
gtacatcagcactcctcgctcttcg

SEQ ID NO: 3443677 - DNA, 25 bp, Homo sapien
aagatagaagggcaaatttgttctc

SEQ ID NO: 3443678 - DNA, 25 bp, Homo sapien
cttcggcctgtggactcagactgga

SEQ ID NO: 3443679 - DNA, 25 bp, Homo sapien
gaagggcaaatttgttctcgcttct

SEQ ID NO: 3443680 - DNA, 25 bp, Homo sapien
catggcagaccctgttgactggcta

SEQ ID NO: 3443681 - DNA, 25 bp, Homo sapien
gcctggcccggcatatttatttaaa

SEQ ID NO: 3443682 - DNA, 25 bp, Homo sapien
tcgttactctgtggatagccccagg

SEQ ID NO: 3443683 - DNA, 25 bp, Homo sapien
tagcatggcaatggaaagagccctc

SEQ ID NO: 3443684 - DNA, 25 bp, Homo sapien
acctcagttcacttgctggagcact

SEQ ID NO: 3443685 - DNA, 25 bp, Homo sapien
ccctgctcccagataattttatttc

SEQ ID NO: 3443686 - DNA, 25 bp, Homo sapien
ccttagttggatgcacctcagttca

SEQ ID NO: 3443687 - DNA, 25 bp, Homo sapien
ggatctgctccttagttggatgcac

SEQ ID NO: 3443688 - DNA, 25 bp, Homo sapien
gatgctcgttcgcaggttttaccat

SEQ ID NO: 3443689 - DNA, 25 bp, Homo sapien
tgccaatgtaaatcatagactgctg

SEQ ID NO: 3443690 - DNA, 25 bp, Homo sapien
agatggccccaaatctcagggtgga

SEQ ID NO: 3443691 - DNA, 25 bp, Homo sapien
gctgtgtgatgctcgttcgcaggtt

SEQ ID NO: 3443692 - DNA, 25 bp, Homo sapien
cgttgaaaatgcatcgaccgtgcag

SEQ ID NO: 3443693 - DNA, 25 bp, Homo sapien
taattggtgccagtgtagcagccag

SEQ ID NO: 3443694 - DNA, 25 bp, Homo sapien
cagccagagaacttatgggaaagca

SEQ ID NO: 3443695 - DNA, 25 bp, Homo sapien
aactactgtatgtggagcaggcagc

SEQ ID NO: 3443696 - DNA, 25 bp, Homo sapien
tcaacatgatggcagagcggtcgaa

SEQ ID NO: 3443697 - DNA, 25 bp, Homo sapien
ttttaaagcatagggtgagcggcac

SEQ ID NO: 3443698 - DNA, 25 bp, Homo sapien
taataactaacacgtgcagaggctc

SEQ ID NO: 3443699 - DNA, 25 bp, Homo sapien
agttcccagttccacaaaggttgag

SEQ ID NO: 3443700 - DNA, 25 bp, Homo sapien
cctgagactggtgccacctggctgc

SEQ ID NO: 3443701 - DNA, 25 bp, Homo sapien
tgcatgagaaccatcctgagactgg

SEQ ID NO: 3443702 - DNA, 25 bp, Homo sapien
gaaccatcctgagactggtgccacc

SEQ ID NO: 3443703 - DNA, 25 bp, Homo sapien
agccctgcatgagaaccatcctgag

SEQ ID NO: 3443704 - DNA, 25 bp, Homo sapien
ccttagtagagcatttcagcagcca

SEQ ID NO: 3443705 - DNA, 25 bp, Homo sapien
gaagtcatcgttgaattcaggccca

SEQ ID NO: 3443706 - DNA, 25 bp, Homo sapien
tgcatgccatggactacggtggaca

SEQ ID NO: 3443707 - DNA, 25 bp, Homo sapien
ttttgggagatgcagttcgccgacc

SEQ ID NO: 3443708 - DNA, 25 bp, Homo sapien
taattattgctagagtacttgggca

SEQ ID NO: 3443709 - DNA, 25 bp, Homo sapien
gcagcaggccgacatctccagcaaa

SEQ ID NO: 3443710 - DNA, 25 bp, Homo sapien
gtacttgggcagcaggccgacatct

SEQ ID NO: 3443711 - DNA, 25 bp, Homo sapien
tgctagagtacttgggcagcaggcc

SEQ ID NO: 3443712 - DNA, 25 bp, Homo sapien
gctgcaaggccagtagttcaaatac

SEQ ID NO: 3443713 - DNA, 25 bp, Homo sapien
cgctgcaaggccagtagttcaaata

SEQ ID NO: 3443714 - DNA, 25 bp, Homo sapien
gacatcgcagttgtccgtagccgat

SEQ ID NO: 3443715 - DNA, 25 bp, Homo sapien
gaaatccgagcgttctcgcgttgga

SEQ ID NO: 3443716 - DNA, 25 bp, Homo sapien
tgggaatggtagtgatatctcgtgc

SEQ ID NO: 3443717 - DNA, 25 bp, Homo sapien
ggatttcctccacgtgtgaagtggg

SEQ ID NO: 3443718 - DNA, 25 bp, Homo sapien
caagatggcgctagcggttggagca

SEQ ID NO: 3443719 - DNA, 25 bp, Homo sapien
ggcgtcacacgtagcggccaagatg

SEQ ID NO: 3443720 - DNA, 25 bp, Homo sapien
gggctctgctgcgacctttacggta

SEQ ID NO: 3443721 - DNA, 25 bp, Homo sapien
gctctctgctacgtgtggcgtcaca

SEQ ID NO: 3443722 - DNA, 25 bp, Homo sapien
ccagtcgggaggtgtagttcgcttt

SEQ ID NO: 3443723 - DNA, 25 bp, Homo sapien
caaaaggcctccattcatcttgtcc

SEQ ID NO: 3443724 - DNA, 25 bp, Homo sapien
gaattgggtttgtttgcggtgcctc

SEQ ID NO: 3443725 - DNA, 25 bp, Homo sapien
gcaagatggcgacaggtaacagggc

SEQ ID NO: 3443726 - DNA, 25 bp, Homo sapien
tcatctaaaaggctcctccgccaag

SEQ ID NO: 3443727 - DNA, 25 bp, Homo sapien
tgcccggcctttcggggctcatcta

SEQ ID NO: 3443728 - DNA, 25 bp, Homo sapien
gggctcatctaaaaggctcctccgc

SEQ ID NO: 3443729 - DNA, 25 bp, Homo sapien
tctaaaaggctcctccgccaagact

SEQ ID NO: 3443730 - DNA, 25 bp, Homo sapien
gcttctgtttggtagccccaaagag

SEQ ID NO: 3443731 - DNA, 25 bp, Homo sapien
ttctgtttggtagccccaaagagct

SEQ ID NO: 3443732 - DNA, 25 bp, Homo sapien
ctgtttggtagccccaaagagcttg

SEQ ID NO: 3443733 - DNA, 25 bp, Homo sapien
gtttggtagccccaaagagcttgtc

SEQ ID NO: 3443734 - DNA, 25 bp, Homo sapien
agatccagaagggttggccacacaa

SEQ ID NO: 3443735 - DNA, 25 bp, Homo sapien
tccagaagggttggccacacaacag

SEQ ID NO: 3443736 - DNA, 25 bp, Homo sapien
gaagggttggccacacaacaggcat

SEQ ID NO: 3443737 - DNA, 25 bp, Homo sapien
agaagggttggccacacaacaggca

SEQ ID NO: 3443738 - DNA, 25 bp, Homo sapien
ctccttcacatttgttgatgtccat

SEQ ID NO: 3443739 - DNA, 25 bp, Homo sapien
ctaagaacttttgatagttctccaa

SEQ ID NO: 3443740 - DNA, 25 bp, Homo sapien
tgcccgaagtgcactgataactcca

SEQ ID NO: 3443741 - DNA, 25 bp, Homo sapien
tttccttggtgagatccccctgtgc

SEQ ID NO: 3443742 - DNA, 25 bp, Homo sapien
cccctgtgcccgaagtgcactgata

SEQ ID NO: 3443743 - DNA, 25 bp, Homo sapien
cagcacggtggcgttctgttgagat

SEQ ID NO: 3443744 - DNA, 25 bp, Homo sapien
tactgctctccgaacttcagcacgg

SEQ ID NO: 3443745 - DNA, 25 bp, Homo sapien
tgttaaccgttcatcgtttactgct

SEQ ID NO: 3443746 - DNA, 25 bp, Homo sapien
tgcaattgttgttaaccgttcatcg

SEQ ID NO: 3443747 - DNA, 25 bp, Homo sapien
tactgctatgatcaggatccctgag

SEQ ID NO: 3443748 - DNA, 25 bp, Homo sapien
aatcagggatggtacgactaatggc

SEQ ID NO: 3443749 - DNA, 25 bp, Homo sapien
gacctgagtacttaaagcttgccta

SEQ ID NO: 3443750 - DNA, 25 bp, Homo sapien
gctacacaataggaagactgtttca

SEQ ID NO: 3443751 - DNA, 25 bp, Homo sapien
ggtctttcacccaaatataaggata

SEQ ID NO: 3443752 - DNA, 25 bp, Homo sapien
cttggtctttcacccaaatataagg

SEQ ID NO: 3443753 - DNA, 25 bp, Homo sapien
gtctttcacccaaatataaggataa

SEQ ID NO: 3443754 - DNA, 25 bp, Homo sapien
tggtctttcacccaaatataaggat

SEQ ID NO: 3443755 - DNA, 25 bp, Homo sapien
tgctggatagctgcattagcaacag

SEQ ID NO: 3443756 - DNA, 25 bp, Homo sapien
ccattctgaagagctattaggtcca

SEQ ID NO: 3443757 - DNA, 25 bp, Homo sapien
gggcatcagtggtaccaatcgacga

SEQ ID NO: 3443758 - DNA, 25 bp, Homo sapien
caatcgacgaccttcaatggaccat

SEQ ID NO: 3443759 - DNA, 25 bp, Homo sapien
tagatggaagaactcgatggaggcc

SEQ ID NO: 3443760 - DNA, 25 bp, Homo sapien
tcattcaacgaagggatacagctaa

SEQ ID NO: 3443761 - DNA, 25 bp, Homo sapien
ttcatgtgatcagaagtcagaggcc

SEQ ID NO: 3443762 - DNA, 25 bp, Homo sapien
gccagtactaggtattaggtccaca

SEQ ID NO: 3443763 - DNA, 25 bp, Homo sapien
gacttaaccgttgctatgctgccac

SEQ ID NO: 3443764 - DNA, 25 bp, Homo sapien
cagtacttccacttggcaagacaac

SEQ ID NO: 3443765 - DNA, 25 bp, Homo sapien
caagacaactacattggaggcagga

SEQ ID NO: 3443766 - DNA, 25 bp, Homo sapien
tgctgccacttggaacaggggtaga

SEQ ID NO: 3443767 - DNA, 25 bp, Homo sapien
aaaggcagattacccacagacaatg

SEQ ID NO: 3443768 - DNA, 25 bp, Homo sapien
gactgcagcatttagccaagaaggc

SEQ ID NO: 3443769 - DNA, 25 bp, Homo sapien
tactaacagctagtggaccaatgat

SEQ ID NO: 3443770 - DNA, 25 bp, Homo sapien
aagaaggccctgataacactgagaa

SEQ ID NO: 3443771 - DNA, 25 bp, Homo sapien
caggcacagtgatcgtctttgagac

SEQ ID NO: 3443772 - DNA, 25 bp, Homo sapien
tctttgagactggaacaacggcctt

SEQ ID NO: 3443773 - DNA, 25 bp, Homo sapien
tcttgggactaccactcacaggcac

SEQ ID NO: 3443774 - DNA, 25 bp, Homo sapien
tgctctgcatgatgttgctcatctt

SEQ ID NO: 3443775 - DNA, 25 bp, Homo sapien
gcaatgactgacgttggtacaagct

SEQ ID NO: 3443776 - DNA, 25 bp, Homo sapien
gccactgctgctattactgaccaga

SEQ ID NO: 3443777 - DNA, 25 bp, Homo sapien
tgtagaggacaccacagctgttact

SEQ ID NO: 3443778 - DNA, 25 bp, Homo sapien
aatgttgggcacgaaggttgagctt

SEQ ID NO: 3443779 - DNA, 25 bp, Homo sapien
ggtggctttctttatactctgaggg

SEQ ID NO: 3443780 - DNA, 25 bp, Homo sapien
gaggcatggaggtcaggaacccact

SEQ ID NO: 3443781 - DNA, 25 bp, Homo sapien
gcagagctcaaatgttgtgctggga

SEQ ID NO: 3443782 - DNA, 25 bp, Homo sapien
gcctaagtaatggtggatacccctc

SEQ ID NO: 3443783 - DNA, 25 bp, Homo sapien
aatggcgcaatctccactacctcca

SEQ ID NO: 3443784 - DNA, 25 bp, Homo sapien
gcgcaatctccactacctccacctc

SEQ ID NO: 3443785 - DNA, 25 bp, Homo sapien
actgcgcctggccttctagattttc

SEQ ID NO: 3443786 - DNA, 25 bp, Homo sapien
ctgcgcctggccttctagattttct

SEQ ID NO: 3443787 - DNA, 25 bp, Homo sapien
tgatataactgctgcttaggagact

SEQ ID NO: 3443788 - DNA, 25 bp, Homo sapien
gaactgtgcaagaatctgagttggg

SEQ ID NO: 3443789 - DNA, 25 bp, Homo sapien
gttggggcactcactaagcttttgg

SEQ ID NO: 3443790 - DNA, 25 bp, Homo sapien
actgttgatgttgtttagggaactg

SEQ ID NO: 3443791 - DNA, 25 bp, Homo sapien
gatctacacgtgaacccctctcgtg

SEQ ID NO: 3443792 - DNA, 25 bp, Homo sapien
caatcttccacggatactgagggat

SEQ ID NO: 3443793 - DNA, 25 bp, Homo sapien
ctgggaagtcagctcttacgtaact

SEQ ID NO: 3443794 - DNA, 25 bp, Homo sapien
tgagggatgaccatgcagtacctgg

SEQ ID NO: 3443795 - DNA, 25 bp, Homo sapien
actggtgggtagagttgctgtcact

SEQ ID NO: 3443796 - DNA, 25 bp, Homo sapien
cttggttgaacctgttgtgtgatga

SEQ ID NO: 3443797 - DNA, 25 bp, Homo sapien
agttgtcataattgcaccattactg

SEQ ID NO: 3443798 - DNA, 25 bp, Homo sapien
cagtaggagtggttaccagtttagt

SEQ ID NO: 3443799 - DNA, 25 bp, Homo sapien
gttttcacataggttgcagctccag

SEQ ID NO: 3443800 - DNA, 25 bp, Homo sapien
gggttgcagccatccgaccaatgga

SEQ ID NO: 3443801 - DNA, 25 bp, Homo sapien
actgttggccgggtataggttgctt

SEQ ID NO: 3443802 - DNA, 25 bp, Homo sapien
actgtaatgatgctaccactcgtag

SEQ ID NO: 3443803 - DNA, 25 bp, Homo sapien
tcctctcaatgaaggccacctatac

SEQ ID NO: 3443804 - DNA, 25 bp, Homo sapien
ttcagcacaatagcaaccacctcag

SEQ ID NO: 3443805 - DNA, 25 bp, Homo sapien
tctaactctaattggtcttggacag

SEQ ID NO: 3443806 - DNA, 25 bp, Homo sapien
gggtctgaataggttgacaaataga

SEQ ID NO: 3443807 - DNA, 25 bp, Homo sapien
tccagcatttagcaacgttgtgaca

SEQ ID NO: 3443808 - DNA, 25 bp, Homo sapien
tcacgttgggcttggaagtcattgg

SEQ ID NO: 3443809 - DNA, 25 bp, Homo sapien
tgacaacatttttgcccgggaggcc

SEQ ID NO: 3443810 - DNA, 25 bp, Homo sapien
tgtagtcttttgtacaacaatcacg

SEQ ID NO: 3443811 - DNA, 25 bp, Homo sapien
cattttggtgatgggtcttgtagca

SEQ ID NO: 3443812 - DNA, 25 bp, Homo sapien
tcttgtagcagtaaggatagctggc

SEQ ID NO: 3443813 - DNA, 25 bp, Homo sapien
tagctgctggttgaactgtagaacc

SEQ ID NO: 3443814 - DNA, 25 bp, Homo sapien
gaacctattccttttggctgcgtta

SEQ ID NO: 3443815 - DNA, 25 bp, Homo sapien
tatgattagatcctgagcctcaaat

SEQ ID NO: 3443816 - DNA, 25 bp, Homo sapien
gcttttgaaggccatggtagcttat

SEQ ID NO: 3443817 - DNA, 25 bp, Homo sapien
cataggcaatttggacttgtcacaa

SEQ ID NO: 3443818 - DNA, 25 bp, Homo sapien
tagtgcttccctcgatattctcaga

SEQ ID NO: 3443819 - DNA, 25 bp, Homo sapien
caactgtcgcttgaaaagtcactgg

SEQ ID NO: 3443820 - DNA, 25 bp, Homo sapien
gcctctgctaccctggatgcttgct

SEQ ID NO: 3443821 - DNA, 25 bp, Homo sapien
gaggactctgtagaagaggaactac

SEQ ID NO: 3443822 - DNA, 25 bp, Homo sapien
gaatagatgaattaccagcctctgc

SEQ ID NO: 3443823 - DNA, 25 bp, Homo sapien
ttgtgattcactggatacatcctga

SEQ ID NO: 3443824 - DNA, 25 bp, Homo sapien
tcctgacgccgggaagcaattacat

SEQ ID NO: 3443825 - DNA, 25 bp, Homo sapien
caattacatgaactacaggctggga

SEQ ID NO: 3443826 - DNA, 25 bp, Homo sapien
taaattatggtagggctagtctcca

SEQ ID NO: 3443827 - DNA, 25 bp, Homo sapien
gactcaggtcaatagtgggttgtct

SEQ ID NO: 3443828 - DNA, 25 bp, Homo sapien
cagcaattgatggactctcaggaga

SEQ ID NO: 3443829 - DNA, 25 bp, Homo sapien
tctgaataggcactgccatttgact

SEQ ID NO: 3443830 - DNA, 25 bp, Homo sapien
cacagcaattgatggactctcagga

SEQ ID NO: 3443831 - DNA, 25 bp, Homo sapien
agtgatgtattcagctactagttct

SEQ ID NO: 3443832 - DNA, 25 bp, Homo sapien
gatgtattcagctactagttctgac

SEQ ID NO: 3443833 - DNA, 25 bp, Homo sapien
cagtagtgatgtattcagctactag

SEQ ID NO: 3443834 - DNA, 25 bp, Homo sapien
tattcagctactagttctgactcta

SEQ ID NO: 3443835 - DNA, 25 bp, Homo sapien
gtaaatcccaaggatggtgtgaatt

SEQ ID NO: 3443836 - DNA, 25 bp, Homo sapien
ggtaaatcccaaggatggtgtgaat

SEQ ID NO: 3443837 - DNA, 25 bp, Homo sapien
ctagtcattaaagacagggtaaatc

SEQ ID NO: 3443838 - DNA, 25 bp, Homo sapien
tcattaaagacagggtaaatcccaa

SEQ ID NO: 3443839 - DNA, 25 bp, Homo sapien
tacaactgttgctgtatattcacag

SEQ ID NO: 3443840 - DNA, 25 bp, Homo sapien
tacctacaaacttcataacatccta

SEQ ID NO: 3443841 - DNA, 25 bp, Homo sapien
ggctgacttgtagttttatattacc

SEQ ID NO: 3443842 - DNA, 25 bp, Homo sapien
caaaactcattcttagacaaaagat

SEQ ID NO: 3443843 - DNA, 25 bp, Homo sapien
aataggagagaaacaatctatcttg

SEQ ID NO: 3443844 - DNA, 25 bp, Homo sapien
tccaccagaacttgtaagtatttaa

SEQ ID NO: 3443845 - DNA, 25 bp, Homo sapien
gaaagcagtattccaggtgtcatct

SEQ ID NO: 3443846 - DNA, 25 bp, Homo sapien
aaatctcagtgttttgctgccagac

SEQ ID NO: 3443847 - DNA, 25 bp, Homo sapien
acctctgtcccctcatcagtgcgtt

SEQ ID NO: 3443848 - DNA, 25 bp, Homo sapien
ctagaaggggaaaagcaacctctgt

SEQ ID NO: 3443849 - DNA, 25 bp, Homo sapien
ggaaaagcaacctctgtcccctcat

SEQ ID NO: 3443850 - DNA, 25 bp, Homo sapien
aacctctgtcccctcatcagtgcgt

SEQ ID NO: 3443851 - DNA, 25 bp, Homo sapien
ctacaaatggatgcacaccacttac

SEQ ID NO: 3443852 - DNA, 25 bp, Homo sapien
agcgcatccatttaagcggttcccc

SEQ ID NO: 3443853 - DNA, 25 bp, Homo sapien
agatgagagtagagcgcatccattt

SEQ ID NO: 3443854 - DNA, 25 bp, Homo sapien
gagagtagagcgcatccatttaagc

SEQ ID NO: 3443855 - DNA, 25 bp, Homo sapien
tagagcgcatccatttaagcggttc

SEQ ID NO: 3443856 - DNA, 25 bp, Homo sapien
gaatgatacaaagggcaggccaagc

SEQ ID NO: 3443857 - DNA, 25 bp, Homo sapien
tagagagaactagtacccactgcag

SEQ ID NO: 3443858 - DNA, 25 bp, Homo sapien
ggaacacttctaccacccatattaa

SEQ ID NO: 3443859 - DNA, 25 bp, Homo sapien
tcacagtatgctttgtatgcacatg

SEQ ID NO: 3443860 - DNA, 25 bp, Homo sapien
tgtgactgagccacatgctggagca

SEQ ID NO: 3443861 - DNA, 25 bp, Homo sapien
gtgttgcggtctgtgactgagccac

SEQ ID NO: 3443862 - DNA, 25 bp, Homo sapien
aatgtgggtgattgctccaggggaa

SEQ ID NO: 3443863 - DNA, 25 bp, Homo sapien
tgtgggtgattgctccaggggaaga

SEQ ID NO: 3443864 - DNA, 25 bp, Homo sapien
atgtgggtgattgctccaggggaag

SEQ ID NO: 3443865 - DNA, 25 bp, Homo sapien
tacacaaaaacagtgaccaattctg

SEQ ID NO: 3443866 - DNA, 25 bp, Homo sapien
caaaaacagtgaccaattctgatgt

SEQ ID NO: 3443867 - DNA, 25 bp, Homo sapien
acagtgaccaattctgatgtcatta

SEQ ID NO: 3443868 - DNA, 25 bp, Homo sapien
aatacacaaaaacagtgaccaattc

SEQ ID NO: 3443869 - DNA, 25 bp, Homo sapien
tgtctgagggtctaaagtgtccatc

SEQ ID NO: 3443870 - DNA, 25 bp, Homo sapien
tgtgtgctgtacatctggcttgggc

SEQ ID NO: 3443871 - DNA, 25 bp, Homo sapien
gagtcagggcagatcggtaaaacag

SEQ ID NO: 3443872 - DNA, 25 bp, Homo sapien
tgtgccattaaggtaggaagctgcc

SEQ ID NO: 3443873 - DNA, 25 bp, Homo sapien
gaagtttaactttgcatgctatcaa

SEQ ID NO: 3443874 - DNA, 25 bp, Homo sapien
taactttgcatgctatcaatattcc

SEQ ID NO: 3443875 - DNA, 25 bp, Homo sapien
gtttaactttgcatgctatcaatat

SEQ ID NO: 3443876 - DNA, 25 bp, Homo sapien
ctttgcatgctatcaatattccgtt

SEQ ID NO: 3443877 - DNA, 25 bp, Homo sapien
gggttgtgtgtgttatagctacatc

SEQ ID NO: 3443878 - DNA, 25 bp, Homo sapien
ggcaaaagaaacattcgtgcgctat

SEQ ID NO: 3443879 - DNA, 25 bp, Homo sapien
gttatagctacatctctttgagaaa

SEQ ID NO: 3443880 - DNA, 25 bp, Homo sapien
gaaaatctaatcaaacaccccagac

SEQ ID NO: 3443881 - DNA, 25 bp, Homo sapien
ggctggcgcccctcaaaagttatct

SEQ ID NO: 3443882 - DNA, 25 bp, Homo sapien
tccttgggttataattggctgctcc

SEQ ID NO: 3443883 - DNA, 25 bp, Homo sapien
tgatgtcagcttaggcacagaactg

SEQ ID NO: 3443884 - DNA, 25 bp, Homo sapien
tctttgtaacagaggatccttgggt

SEQ ID NO: 3443885 - DNA, 25 bp, Homo sapien
tttcaaaatgtcagacactgctgtc

SEQ ID NO: 3443886 - DNA, 25 bp, Homo sapien
caaaatgtcagacactgctgtcttc

SEQ ID NO: 3443887 - DNA, 25 bp, Homo sapien
tgtcagacactgctgtcttctcaga

SEQ ID NO: 3443888 - DNA, 25 bp, Homo sapien
aaatgtcagacactgctgtcttctc

SEQ ID NO: 3443889 - DNA, 25 bp, Homo sapien
aacagtggatggactcgaacaggac

SEQ ID NO: 3443890 - DNA, 25 bp, Homo sapien
tccttgtcgttagggaagagccaac

SEQ ID NO: 3443891 - DNA, 25 bp, Homo sapien
tctgaatacgcatgaactggcctgt

SEQ ID NO: 3443892 - DNA, 25 bp, Homo sapien
tcaccagtgagcatgctagtggcaa

SEQ ID NO: 3443893 - DNA, 25 bp, Homo sapien
gactcagtaattctttagtcttgac

SEQ ID NO: 3443894 - DNA, 25 bp, Homo sapien
ggactcagtaattctttagtcttga

SEQ ID NO: 3443895 - DNA, 25 bp, Homo sapien
caacttctaaggggtagcctggact

SEQ ID NO: 3443896 - DNA, 25 bp, Homo sapien
atacaacttctaaggggtagcctgg

SEQ ID NO: 3443897 - DNA, 25 bp, Homo sapien
ccttccaagctatatatctgtttag

SEQ ID NO: 3443898 - DNA, 25 bp, Homo sapien
tgtgctattctgataccttccaagc

SEQ ID NO: 3443899 - DNA, 25 bp, Homo sapien
tacttgcctttaagcacttcctcta

SEQ ID NO: 3443900 - DNA, 25 bp, Homo sapien
cccatagtttgggatcatggcaaag

SEQ ID NO: 3443901 - DNA, 25 bp, Homo sapien
tccatgaccaccaacccaaaagtag

SEQ ID NO: 3443902 - DNA, 25 bp, Homo sapien
gtaagctccaagagaacgtggacag

SEQ ID NO: 3443903 - DNA, 25 bp, Homo sapien
cgtggacagagcacagatcttgact

SEQ ID NO: 3443904 - DNA, 25 bp, Homo sapien
tagatgcccagagctttgaacaagg

SEQ ID NO: 3443905 - DNA, 25 bp, Homo sapien
gaagttgtttagctcaagaagccca

SEQ ID NO: 3443906 - DNA, 25 bp, Homo sapien
catcctccgtgctactgtctatgtc

SEQ ID NO: 3443907 - DNA, 25 bp, Homo sapien
gtgctactgtctatgtcctgctcca

SEQ ID NO: 3443908 - DNA, 25 bp, Homo sapien
tccagctgttgactagtgaagttgt

SEQ ID NO: 3443909 - DNA, 25 bp, Homo sapien
gaagaccaggtcttaagtcactgta

SEQ ID NO: 3443910 - DNA, 25 bp, Homo sapien
ggtccacagcctaagtacgggcaaa

SEQ ID NO: 3443911 - DNA, 25 bp, Homo sapien
ggaagtctctttccactgcaagaca

SEQ ID NO: 3443912 - DNA, 25 bp, Homo sapien
gacaaaactgtttcaccggccatga

SEQ ID NO: 3443913 - DNA, 25 bp, Homo sapien
gaatacatggataggcttagaggcc

SEQ ID NO: 3443914 - DNA, 25 bp, Homo sapien
tagtgacaaccaccagagatcagcg

SEQ ID NO: 3443915 - DNA, 25 bp, Homo sapien
gatcataacagagggcttaacctgg

SEQ ID NO: 3443916 - DNA, 25 bp, Homo sapien
gaaatttgtcagaaggagtacggcc

SEQ ID NO: 3443917 - DNA, 25 bp, Homo sapien
caagtttgctcttgttacttgatcc

SEQ ID NO: 3443918 - DNA, 25 bp, Homo sapien
aagtttgctcttgttacttgatcca

SEQ ID NO: 3443919 - DNA, 25 bp, Homo sapien
agtttgctcttgttacttgatccat

SEQ ID NO: 3443920 - DNA, 25 bp, Homo sapien
gtttgctcttgttacttgatccatg

SEQ ID NO: 3443921 - DNA, 25 bp, Homo sapien
tcaagggacacaggtatgctatgct

SEQ ID NO: 3443922 - DNA, 25 bp, Homo sapien
acttttatttgccattccaattgca

SEQ ID NO: 3443923 - DNA, 25 bp, Homo sapien
acacaggtatgctatgctgccaaaa

SEQ ID NO: 3443924 - DNA, 25 bp, Homo sapien
gccattccaattgcagaaacatatg

SEQ ID NO: 3443925 - DNA, 25 bp, Homo sapien
taaactgcatctgcaatactaggca

SEQ ID NO: 3443926 - DNA, 25 bp, Homo sapien
taatggcttgcccaactctgtggat

SEQ ID NO: 3443927 - DNA, 25 bp, Homo sapien
tcagtaaagggatgtctgaaaatcc

SEQ ID NO: 3443928 - DNA, 25 bp, Homo sapien
agaaagtagaggagtggccacccag

SEQ ID NO: 3443929 - DNA, 25 bp, Homo sapien
tgtatcctcaatgtctgcacacaga

SEQ ID NO: 3443930 - DNA, 25 bp, Homo sapien
tatgccttttagagctggtccaagc

SEQ ID NO: 3443931 - DNA, 25 bp, Homo sapien
aagcttacgaacctgcaagcagagg

SEQ ID NO: 3443932 - DNA, 25 bp, Homo sapien
gcagaggccgcagactttgttttca

SEQ ID NO: 3443933 - DNA, 25 bp, Homo sapien
caatccggaaaagtcgtcagtgcac

SEQ ID NO: 3443934 - DNA, 25 bp, Homo sapien
aagcagcttgcagggttcttctggc

SEQ ID NO: 3443935 - DNA, 25 bp, Homo sapien
tccagaatggatgacacacacgcgt

SEQ ID NO: 3443936 - DNA, 25 bp, Homo sapien
tgcactgcatgacgagggaagagcc

SEQ ID NO: 3443937 - DNA, 25 bp, Homo sapien
tccctccaccgtacagttagggctg

SEQ ID NO: 3443938 - DNA, 25 bp, Homo sapien
tagggctgtggtccggatctgctcc

SEQ ID NO: 3443939 - DNA, 25 bp, Homo sapien
caccgtacagttagggctgtggtcc

SEQ ID NO: 3443940 - DNA, 25 bp, Homo sapien
tacagttagggctgtggtccggatc

SEQ ID NO: 3443941 - DNA, 25 bp, Homo sapien
gacagccagcgagcatgtctgctgc

SEQ ID NO: 3443942 - DNA, 25 bp, Homo sapien
tgatgcttggatgcccacattcctg

SEQ ID NO: 3443943 - DNA, 25 bp, Homo sapien
tgctgctgatgcttggatgcccaca

SEQ ID NO: 3443944 - DNA, 25 bp, Homo sapien
ttcaggggccctggttcggctgaca

SEQ ID NO: 3443945 - DNA, 25 bp, Homo sapien
cctgctgtctcgcactggacattgc

SEQ ID NO: 3443946 - DNA, 25 bp, Homo sapien
cattggaagagaagtcctctcctgc

SEQ ID NO: 3443947 - DNA, 25 bp, Homo sapien
tgccatgcaagcatggattccccat

SEQ ID NO: 3443948 - DNA, 25 bp, Homo sapien
actggacattgccatgcaagcatgg

SEQ ID NO: 3443949 - DNA, 25 bp, Homo sapien
ctctctgtatgcaagaagtcaaggc

SEQ ID NO: 3443950 - DNA, 25 bp, Homo sapien
gaagtgtggcctcgcctcagtgaac

SEQ ID NO: 3443951 - DNA, 25 bp, Homo sapien
cagtgaacccctgaagaatggcccc

SEQ ID NO: 3443952 - DNA, 25 bp, Homo sapien
tgcaagaagtcaaggccttggcaac

SEQ ID NO: 3443953 - DNA, 25 bp, Homo sapien
ccgaaggattgactgaatccagtgg

SEQ ID NO: 3443954 - DNA, 25 bp, Homo sapien
tttcctctgtgagaaaggcagctgt

SEQ ID NO: 3443955 - DNA, 25 bp, Homo sapien
cctctgtgagaaaggcagctgtgtc

SEQ ID NO: 3443956 - DNA, 25 bp, Homo sapien
tcctctgtgagaaaggcagctgtgt

SEQ ID NO: 3443957 - DNA, 25 bp, Homo sapien
cattttcctctgtgagaaaggcagc

SEQ ID NO: 3443958 - DNA, 25 bp, Homo sapien
aagctgatgggagctatccctggtg

SEQ ID NO: 3443959 - DNA, 25 bp, Homo sapien
tgatgccctcatacaggctcagagc

SEQ ID NO: 3443960 - DNA, 25 bp, Homo sapien
aaaagcagcaccagacacaatccag

SEQ ID NO: 3443961 - DNA, 25 bp, Homo sapien
gcagattgtgatgccctcatacagg

SEQ ID NO: 3443962 - DNA, 25 bp, Homo sapien
caggacttgggcagattgtgatgcc

SEQ ID NO: 3443963 - DNA, 25 bp, Homo sapien
gttgtggatgcattcccagaattct

SEQ ID NO: 3443964 - DNA, 25 bp, Homo sapien
ggccctcccaagttgtggatgcatt

SEQ ID NO: 3443965 - DNA, 25 bp, Homo sapien
taggccctcccaagttgtggatgca

SEQ ID NO: 3443966 - DNA, 25 bp, Homo sapien
tgtggatgcattcccagaattctgc

SEQ ID NO: 3443967 - DNA, 25 bp, Homo sapien
ttgagacaagccctcagagagtgtg

SEQ ID NO: 3443968 - DNA, 25 bp, Homo sapien
tggagttgagacaagccctcagaga

SEQ ID NO: 3443969 - DNA, 25 bp, Homo sapien
gacaagccctcagagagtgtggtga

SEQ ID NO: 3443970 - DNA, 25 bp, Homo sapien
caacacagactaaagccagctcaga

SEQ ID NO: 3443971 - DNA, 25 bp, Homo sapien
gctgccctcagcattgggtgtctgc

SEQ ID NO: 3443972 - DNA, 25 bp, Homo sapien
ctaaacacctatttcatggggtagg

SEQ ID NO: 3443973 - DNA, 25 bp, Homo sapien
tccctgtttacgtcttcctctcaga

SEQ ID NO: 3443974 - DNA, 25 bp, Homo sapien
gactcaagtcttgtccgtcttaaaa

SEQ ID NO: 3443975 - DNA, 25 bp, Homo sapien
agcctctccctgtttacgtcttcct

SEQ ID NO: 3443976 - DNA, 25 bp, Homo sapien
gacttcagctggactcaagtcttgt

SEQ ID NO: 3443977 - DNA, 25 bp, Homo sapien
ctaaagaagccgggagacactctag

SEQ ID NO: 3443978 - DNA, 25 bp, Homo sapien
agaagccgggagacactctaggtca

SEQ ID NO: 3443979 - DNA, 25 bp, Homo sapien
taaagaagccgggagacactctagg

SEQ ID NO: 3443980 - DNA, 25 bp, Homo sapien
acactctaggtcagtgggggagcct

SEQ ID NO: 3443981 - DNA, 25 bp, Homo sapien
tgcgtccgccggcagaagtttaacc

SEQ ID NO: 3443982 - DNA, 25 bp, Homo sapien
tccgccggcagaagtttaaccaaca

SEQ ID NO: 3443983 - DNA, 25 bp, Homo sapien
ggcagaagtttaaccaacagtataa

SEQ ID NO: 3443984 - DNA, 25 bp, Homo sapien
atcctcctcaccacgctggccgcct

SEQ ID NO: 3443985 - DNA, 25 bp, Homo sapien
ccacgtgcgtcctgaggactgtgag

SEQ ID NO: 3443986 - DNA, 25 bp, Homo sapien
caggacctgatctgccgcttcagct

SEQ ID NO: 3443987 - DNA, 25 bp, Homo sapien
ctgctgcggcaatggctggctggca

SEQ ID NO: 3443988 - DNA, 25 bp, Homo sapien
tgtggacgtggacgccacccaggac

SEQ ID NO: 3443989 - DNA, 25 bp, Homo sapien
ttcttgagcacctgacctccctgtg

SEQ ID NO: 3443990 - DNA, 25 bp, Homo sapien
ctggtggataatgagatagagctgc

SEQ ID NO: 3443991 - DNA, 25 bp, Homo sapien
tgcttgcggacctttgaggcccggc

SEQ ID NO: 3443992 - DNA, 25 bp, Homo sapien
tcatccccgacagctttcttgagca

SEQ ID NO: 3443993 - DNA, 25 bp, Homo sapien
tgctttaagtaaggaatgccccagg

SEQ ID NO: 3443994 - DNA, 25 bp, Homo sapien
aagccaagctgcctcattgtcagag

SEQ ID NO: 3443995 - DNA, 25 bp, Homo sapien
caggtttcaggttcacacaggtgcc

SEQ ID NO: 3443996 - DNA, 25 bp, Homo sapien
gctagtcaggtccaaggcatgcaca

SEQ ID NO: 3443997 - DNA, 25 bp, Homo sapien
ctctctgggcctagaatctgtcata

SEQ ID NO: 3443998 - DNA, 25 bp, Homo sapien
tctgaaatttatggccacctctcct

SEQ ID NO: 3443999 - DNA, 25 bp, Homo sapien
catatttcttggcatgggattagag

SEQ ID NO: 3444000 - DNA, 25 bp, Homo sapien
aggctgggaagattctctgaaattt

SEQ ID NO: 3444001 - DNA, 25 bp, Homo sapien
cagtgcgtctcaaagggtggtctga

SEQ ID NO: 3444002 - DNA, 25 bp, Homo sapien
tcatcatcacggtacttccctggag

SEQ ID NO: 3444003 - DNA, 25 bp, Homo sapien
gcaatctatttagccagtcctcagg

SEQ ID NO: 3444004 - DNA, 25 bp, Homo sapien
ggcgttatctccacttcataggtga

SEQ ID NO: 3444005 - DNA, 25 bp, Homo sapien
atttgtcatcctgcgccccttcagc

SEQ ID NO: 3444006 - DNA, 25 bp, Homo sapien
cctgtctcagaacccggaacctgca

SEQ ID NO: 3444007 - DNA, 25 bp, Homo sapien
ggaacctgcagatccggcagccatt

SEQ ID NO: 3444008 - DNA, 25 bp, Homo sapien
ctgcagatccggcagccatttgtca

SEQ ID NO: 3444009 - DNA, 25 bp, Homo sapien
ccagcaggctagtccgggattgttt

SEQ ID NO: 3444010 - DNA, 25 bp, Homo sapien
gttcacaaacctatggggccaccag

SEQ ID NO: 3444011 - DNA, 25 bp, Homo sapien
tgctgatctcagttgggttctctca

SEQ ID NO: 3444012 - DNA, 25 bp, Homo sapien
tcagccatgggtgaggtagctgctc

SEQ ID NO: 3444013 - DNA, 25 bp, Homo sapien
taccaggaggctggcattccattcc

SEQ ID NO: 3444014 - DNA, 25 bp, Homo sapien
tcagccctgagtgaacccattgagg

SEQ ID NO: 3444015 - DNA, 25 bp, Homo sapien
tgggcagccatgacctgtataaggt

SEQ ID NO: 3444016 - DNA, 25 bp, Homo sapien
gggcttgctcaacgatctctacatg

SEQ ID NO: 3444017 - DNA, 25 bp, Homo sapien
agtgttgctgactccatgctgtggt

SEQ ID NO: 3444018 - DNA, 25 bp, Homo sapien
gctgctctgtcagatgattcccccg

SEQ ID NO: 3444019 - DNA, 25 bp, Homo sapien
ggctgctctgtcagatgattccccc

SEQ ID NO: 3444020 - DNA, 25 bp, Homo sapien
tgttgctgactccatgctgtggttg

SEQ ID NO: 3444021 - DNA, 25 bp, Homo sapien
ctggaaagataactaaccctggcct

SEQ ID NO: 3444022 - DNA, 25 bp, Homo sapien
agataggtgtgaccatccagtgaga

SEQ ID NO: 3444023 - DNA, 25 bp, Homo sapien
aagttaatggtcctcttgggcctca

SEQ ID NO: 3444024 - DNA, 25 bp, Homo sapien
tgagatgggcacacatgaattccac

SEQ ID NO: 3444025 - DNA, 25 bp, Homo sapien
gaaggcttccatgacaccttgaagg

SEQ ID NO: 3444026 - DNA, 25 bp, Homo sapien
tcagaaggcttccatgacaccttga

SEQ ID NO: 3444027 - DNA, 25 bp, Homo sapien
cttcagaaggcttccatgacacctt

SEQ ID NO: 3444028 - DNA, 25 bp, Homo sapien
catgacaccttgaaggagtacctca

SEQ ID NO: 3444029 - DNA, 25 bp, Homo sapien
cttgagtggagataccacagggacc

SEQ ID NO: 3444030 - DNA, 25 bp, Homo sapien
ctccttccacggtgaaggacttcca

SEQ ID NO: 3444031 - DNA, 25 bp, Homo sapien
tgtcctgtctcagtggtggcatgga

SEQ ID NO: 3444032 - DNA, 25 bp, Homo sapien
tccacggtgaaggacttccattttc

SEQ ID NO: 3444033 - DNA, 25 bp, Homo sapien
gggcgagctcatcaacctgcaccat

SEQ ID NO: 3444034 - DNA, 25 bp, Homo sapien
cgataaggtcgcagagggcgagctc

SEQ ID NO: 3444035 - DNA, 25 bp, Homo sapien
ccacgtagctggagattgcgataag

SEQ ID NO: 3444036 - DNA, 25 bp, Homo sapien
tagctggagattgcgataaggtcgc

SEQ ID NO: 3444037 - DNA, 25 bp, Homo sapien
aggaggctgaattgagggccagtga

SEQ ID NO: 3444038 - DNA, 25 bp, Homo sapien
agtgaaccaataggcctgaaagggt

SEQ ID NO: 3444039 - DNA, 25 bp, Homo sapien
aggctgaattgagggccagtgaacc

SEQ ID NO: 3444040 - DNA, 25 bp, Homo sapien
gggattgatggggaccagggcagag

SEQ ID NO: 3444041 - DNA, 25 bp, Homo sapien
taacttccttgtggaaccttgttca

SEQ ID NO: 3444042 - DNA, 25 bp, Homo sapien
tccaggtggcatctggatgccaaaa

SEQ ID NO: 3444043 - DNA, 25 bp, Homo sapien
ctgattgtttggtcggctgtgactc

SEQ ID NO: 3444044 - DNA, 25 bp, Homo sapien
tgccaaaaagatactctgattgttt

SEQ ID NO: 3444045 - DNA, 25 bp, Homo sapien
tcagagatgctggggccttcctgga

SEQ ID NO: 3444046 - DNA, 25 bp, Homo sapien
cagagatgctggggccttcctggac

SEQ ID NO: 3444047 - DNA, 25 bp, Homo sapien
gccatactgaagctgcgggtgatct

SEQ ID NO: 3444048 - DNA, 25 bp, Homo sapien
ccatactgaagctgcgggtgatctg

SEQ ID NO: 3444049 - DNA, 25 bp, Homo sapien
catactgaagctgcgggtgatctgt

SEQ ID NO: 3444050 - DNA, 25 bp, Homo sapien
tactgaagctgcgggtgatctgttg

SEQ ID NO: 3444051 - DNA, 25 bp, Homo sapien
gccgcgggccctccggccagcgctt

SEQ ID NO: 3444052 - DNA, 25 bp, Homo sapien
ctggaagcctgcgccacagccgcct

SEQ ID NO: 3444053 - DNA, 25 bp, Homo sapien
gccacagccgcctcggcacgctcac

SEQ ID NO: 3444054 - DNA, 25 bp, Homo sapien
ggccagcgcttttctccgcgcggcg

SEQ ID NO: 3444055 - DNA, 25 bp, Homo sapien
ggcgtagcctttgtctcccgcaaga

SEQ ID NO: 3444056 - DNA, 25 bp, Homo sapien
gcaaagccacggacacacaaaggca

SEQ ID NO: 3444057 - DNA, 25 bp, Homo sapien
aagacccacaaacgtgagatgcacg

SEQ ID NO: 3444058 - DNA, 25 bp, Homo sapien
agatgcacgtgtccgcacaaagacc

SEQ ID NO: 3444059 - DNA, 25 bp, Homo sapien
gcgcggggagggcaacgccagccgc

SEQ ID NO: 3444060 - DNA, 25 bp, Homo sapien
agcgcggggagggcaacgccagccg

SEQ ID NO: 3444061 - DNA, 25 bp, Homo sapien
tctttccaagaagcgcggggagggc

SEQ ID NO: 3444062 - DNA, 25 bp, Homo sapien
aggagctctccattgcctacaggct

SEQ ID NO: 3444063 - DNA, 25 bp, Homo sapien
ccacaagccagagacgggtttcata

SEQ ID NO: 3444064 - DNA, 25 bp, Homo sapien
gatcactcgccctccagattggtct

SEQ ID NO: 3444065 - DNA, 25 bp, Homo sapien
ttgactctaagaggctggatcactc

SEQ ID NO: 3444066 - DNA, 25 bp, Homo sapien
agtgcaggggccatgaatcatgcat

SEQ ID NO: 3444067 - DNA, 25 bp, Homo sapien
cagtgactctaagtttgctgatggc

SEQ ID NO: 3444068 - DNA, 25 bp, Homo sapien
ggccatgaatcatgcattgttgggc

SEQ ID NO: 3444069 - DNA, 25 bp, Homo sapien
caggtccacagtgactctaagtttg

SEQ ID NO: 3444070 - DNA, 25 bp, Homo sapien
ctgccattctgcggtctagaggatg

SEQ ID NO: 3444071 - DNA, 25 bp, Homo sapien
tgttccacatggaagaaattagcca

SEQ ID NO: 3444072 - DNA, 25 bp, Homo sapien
catgtcccgcatatctgagtcatgc

SEQ ID NO: 3444073 - DNA, 25 bp, Homo sapien
gctgtggaaggtctaacaatcatgg

SEQ ID NO: 3444074 - DNA, 25 bp, Homo sapien
tgaagctgtcgaaaaggccgaaggt

SEQ ID NO: 3444075 - DNA, 25 bp, Homo sapien
atccaggccagccaacgtcgtgtag

SEQ ID NO: 3444076 - DNA, 25 bp, Homo sapien
ttcaccatctccagccggttggagg

SEQ ID NO: 3444077 - DNA, 25 bp, Homo sapien
tccacccgagtcaggctgaagctgt

SEQ ID NO: 3444078 - DNA, 25 bp, Homo sapien
ggctgaggtcaagcgactccaggta

SEQ ID NO: 3444079 - DNA, 25 bp, Homo sapien
ccaggtagcgaaggcgggagaaggc

SEQ ID NO: 3444080 - DNA, 25 bp, Homo sapien
gcagggctgtcaggccattgtggct

SEQ ID NO: 3444081 - DNA, 25 bp, Homo sapien
gtcaagcgactccaggtagcgaagg

SEQ ID NO: 3444082 - DNA, 25 bp, Homo sapien
agaatcccgggtgtctacgcagtgc

SEQ ID NO: 3444083 - DNA, 25 bp, Homo sapien
cagagacaggtgtgtaaggcctccc

SEQ ID NO: 3444084 - DNA, 25 bp, Homo sapien
tggctaaggttcacgtcgctcaggg

SEQ ID NO: 3444085 - DNA, 25 bp, Homo sapien
caatgacagctagagggttcccatc

SEQ ID NO: 3444086 - DNA, 25 bp, Homo sapien
cagatgaggctccagaactgcagca

SEQ ID NO: 3444087 - DNA, 25 bp, Homo sapien
tctggtttggcatcgaagtccctct

SEQ ID NO: 3444088 - DNA, 25 bp, Homo sapien
tgttagaaaagaaactcgcccctga

SEQ ID NO: 3444089 - DNA, 25 bp, Homo sapien
caagaaagtgcattgggtccgggct

SEQ ID NO: 3444090 - DNA, 25 bp, Homo sapien
aaggacgagcccgcccagcgtgatg

SEQ ID NO: 3444091 - DNA, 25 bp, Homo sapien
gaaggacgagcccgcccagcgtgat

SEQ ID NO: 3444092 - DNA, 25 bp, Homo sapien
gggaaggacgagcccgcccagcgtg

SEQ ID NO: 3444093 - DNA, 25 bp, Homo sapien
ggacgagcccgcccagcgtgatggc

SEQ ID NO: 3444094 - DNA, 25 bp, Homo sapien
ctctccttatggctggcaggaggcc

SEQ ID NO: 3444095 - DNA, 25 bp, Homo sapien
tctccttatggctggcaggaggcca

SEQ ID NO: 3444096 - DNA, 25 bp, Homo sapien
ggcttccgctctccttatggctggc

SEQ ID NO: 3444097 - DNA, 25 bp, Homo sapien
tccgctctccttatggctggcagga

SEQ ID NO: 3444098 - DNA, 25 bp, Homo sapien
tgtgataacgacagagggacattcc

SEQ ID NO: 3444099 - DNA, 25 bp, Homo sapien
tcagattccccatccgtgaaaaggg

SEQ ID NO: 3444100 - DNA, 25 bp, Homo sapien
catgggaacttactcgtctctgggc

SEQ ID NO: 3444101 - DNA, 25 bp, Homo sapien
tagctggccgctgcattactgtgaa

SEQ ID NO: 3444102 - DNA, 25 bp, Homo sapien
ttgtcatagacagtgcccttggtgg

SEQ ID NO: 3444103 - DNA, 25 bp, Homo sapien
ggtatgagtgggctttagcgctggt

SEQ ID NO: 3444104 - DNA, 25 bp, Homo sapien
aggtatgagtgggctttagcgctgg

SEQ ID NO: 3444105 - DNA, 25 bp, Homo sapien
cccttggtggagattaggtatgagt

SEQ ID NO: 3444106 - DNA, 25 bp, Homo sapien
catttgctgtcgttagaagccgagc

SEQ ID NO: 3444107 - DNA, 25 bp, Homo sapien
tgcaccctggtgaacgttagccaac

SEQ ID NO: 3444108 - DNA, 25 bp, Homo sapien
tgcaattagctaccagtgaacactg

SEQ ID NO: 3444109 - DNA, 25 bp, Homo sapien
gaagccgagctatggactgacattg

SEQ ID NO: 3444110 - DNA, 25 bp, Homo sapien
gctactagttacactgccctaagga

SEQ ID NO: 3444111 - DNA, 25 bp, Homo sapien
tgccctgtgaggtagctactagacc

SEQ ID NO: 3444112 - DNA, 25 bp, Homo sapien
gacaatcatagcttacgccaaaggg

SEQ ID NO: 3444113 - DNA, 25 bp, Homo sapien
gctgatggccactaaagaaaccctg

SEQ ID NO: 3444114 - DNA, 25 bp, Homo sapien
aatgtaaggagatgcgctcagggca

SEQ ID NO: 3444115 - DNA, 25 bp, Homo sapien
acaccaggcagcgtgcttccttcaa

SEQ ID NO: 3444116 - DNA, 25 bp, Homo sapien
taagaaaccactccaaagcacgatg

SEQ ID NO: 3444117 - DNA, 25 bp, Homo sapien
gggcagcccctcatatgctttcaaa

SEQ ID NO: 3444118 - DNA, 25 bp, Homo sapien
gaagggacccatggagagtccagga

SEQ ID NO: 3444119 - DNA, 25 bp, Homo sapien
gtccgggaggagagtgcaaggttac

SEQ ID NO: 3444120 - DNA, 25 bp, Homo sapien
ggtggggagaagggacccatggaga

SEQ ID NO: 3444121 - DNA, 25 bp, Homo sapien
ggtccgggaggagagtgcaaggtta

SEQ ID NO: 3444122 - DNA, 25 bp, Homo sapien
caggcctgtctgtgcacatacctgc

SEQ ID NO: 3444123 - DNA, 25 bp, Homo sapien
tccaggcctgtctgtgcacatacct

SEQ ID NO: 3444124 - DNA, 25 bp, Homo sapien
gctccaggcctgtctgtgcacatac

SEQ ID NO: 3444125 - DNA, 25 bp, Homo sapien
ggcctgtctgtgcacatacctgctg

SEQ ID NO: 3444126 - DNA, 25 bp, Homo sapien
agaggcagaggtggagcctcacagg

SEQ ID NO: 3444127 - DNA, 25 bp, Homo sapien
ggtggagcctcacaggggactccta

SEQ ID NO: 3444128 - DNA, 25 bp, Homo sapien
ctggagaggcagaggtggagcctca

SEQ ID NO: 3444129 - DNA, 25 bp, Homo sapien
aggtggagcctcacaggggactcct

SEQ ID NO: 3444130 - DNA, 25 bp, Homo sapien
taatggccagcaagagttggagcag

SEQ ID NO: 3444131 - DNA, 25 bp, Homo sapien
gctgcggcgggctgagtgaggcggg

SEQ ID NO: 3444132 - DNA, 25 bp, Homo sapien
gcacagacttaatggccagcaagag

SEQ ID NO: 3444133 - DNA, 25 bp, Homo sapien
agcagaagtgggtcccggccaagga

SEQ ID NO: 3444134 - DNA, 25 bp, Homo sapien
ggtcttaccctgtgctgagcgggct

SEQ ID NO: 3444135 - DNA, 25 bp, Homo sapien
gatgttcttggtcttaccctgtgct

SEQ ID NO: 3444136 - DNA, 25 bp, Homo sapien
gagcagtggccacgtgatgttcttg

SEQ ID NO: 3444137 - DNA, 25 bp, Homo sapien
ctctcatctgacgtgagcagtggcc

SEQ ID NO: 3444138 - DNA, 25 bp, Homo sapien
cctgatatgttaagtgtgttgagca

SEQ ID NO: 3444139 - DNA, 25 bp, Homo sapien
caggaattaatggaacacaccggct

SEQ ID NO: 3444140 - DNA, 25 bp, Homo sapien
tacagttaagcagggccactagggc

SEQ ID NO: 3444141 - DNA, 25 bp, Homo sapien
cagcaatgtgtttgtctgcatacag

SEQ ID NO: 3444142 - DNA, 25 bp, Homo sapien
gccatgctattgatgaatctttaga

SEQ ID NO: 3444143 - DNA, 25 bp, Homo sapien
gcagctgaaatttaatggttgccaa

SEQ ID NO: 3444144 - DNA, 25 bp, Homo sapien
taagttacttaaacagccatgctat

SEQ ID NO: 3444145 - DNA, 25 bp, Homo sapien
gtcctgagacataagttacttaaac

SEQ ID NO: 3444146 - DNA, 25 bp, Homo sapien
catttccccctctgtccctaaggct

SEQ ID NO: 3444147 - DNA, 25 bp, Homo sapien
taaggctttcctgctctctgccact

SEQ ID NO: 3444148 - DNA, 25 bp, Homo sapien
tccctaaggctttcctgctctctgc

SEQ ID NO: 3444149 - DNA, 25 bp, Homo sapien
tgcatttccccctctgtccctaagg

SEQ ID NO: 3444150 - DNA, 25 bp, Homo sapien
gcgctccgctcactgtgccgggtta

SEQ ID NO: 3444151 - DNA, 25 bp, Homo sapien
gccgcccaggcgctccgctcactgt

SEQ ID NO: 3444152 - DNA, 25 bp, Homo sapien
aggcgctccgctcactgtgccgggt

SEQ ID NO: 3444153 - DNA, 25 bp, Homo sapien
gctccgctcactgtgccgggttagg

SEQ ID NO: 3444154 - DNA, 25 bp, Homo sapien
gtagccctctcggtccgcggccgga

SEQ ID NO: 3444155 - DNA, 25 bp, Homo sapien
gatgtaccaggtcacggagtagttc

SEQ ID NO: 3444156 - DNA, 25 bp, Homo sapien
agaactcggcgatgtaccaggtcac

SEQ ID NO: 3444157 - DNA, 25 bp, Homo sapien
cgcaccagtccagcgtggaggtcgt

SEQ ID NO: 3444158 - DNA, 25 bp, Homo sapien
acagaatggagcagggacttggtcc

SEQ ID NO: 3444159 - DNA, 25 bp, Homo sapien
gagcagatgacctctggtacttgaa

SEQ ID NO: 3444160 - DNA, 25 bp, Homo sapien
tgcaagatgccttcgactcctggtg

SEQ ID NO: 3444161 - DNA, 25 bp, Homo sapien
aaggtacaggctaggtgcaagatgc

SEQ ID NO: 3444162 - DNA, 25 bp, Homo sapien
gcagtcggtggaagtagtgtcctca

SEQ ID NO: 3444163 - DNA, 25 bp, Homo sapien
gaatgcttaaatcctcagaaggtgc

SEQ ID NO: 3444164 - DNA, 25 bp, Homo sapien
tcctagcctggcaggaaaaatcgtc

SEQ ID NO: 3444165 - DNA, 25 bp, Homo sapien
gtgcctgacagagcagccgctaaag

SEQ ID NO: 3444166 - DNA, 25 bp, Homo sapien
tgcactttgccagaagcaggtacct

SEQ ID NO: 3444167 - DNA, 25 bp, Homo sapien
gaaggatcaaatattgtgctctcaa

SEQ ID NO: 3444168 - DNA, 25 bp, Homo sapien
tgccagaagcaggtacctaaaagaa

SEQ ID NO: 3444169 - DNA, 25 bp, Homo sapien
taatcattagccaaaggatagtctt

SEQ ID NO: 3444170 - DNA, 25 bp, Homo sapien
ttcacgtcctgagaagtagatccaa

SEQ ID NO: 3444171 - DNA, 25 bp, Homo sapien
gggaccatttgtcatgatatgcttg

SEQ ID NO: 3444172 - DNA, 25 bp, Homo sapien
tgagaacaggactcaacaatgagaa

SEQ ID NO: 3444173 - DNA, 25 bp, Homo sapien
ctcaacaatgagaaggttagctaag

SEQ ID NO: 3444174 - DNA, 25 bp, Homo sapien
cttagccaattaccagaacagaata

SEQ ID NO: 3444175 - DNA, 25 bp, Homo sapien
agatagctgattaaagccccttttg

SEQ ID NO: 3444176 - DNA, 25 bp, Homo sapien
gatagctgattaaagccccttttgt

SEQ ID NO: 3444177 - DNA, 25 bp, Homo sapien
ttgaggttgctcttcagggaggatg

SEQ ID NO: 3444178 - DNA, 25 bp, Homo sapien
ttgctcttcagggaggatggtagga

SEQ ID NO: 3444179 - DNA, 25 bp, Homo sapien
gctcttcagggaggatggtaggaag

SEQ ID NO: 3444180 - DNA, 25 bp, Homo sapien
gaggttgctcttcagggaggatggt

SEQ ID NO: 3444181 - DNA, 25 bp, Homo sapien
tccaagtccaatggccagctgttcc

SEQ ID NO: 3444182 - DNA, 25 bp, Homo sapien
aatatctaggactttcatgcaacca

SEQ ID NO: 3444183 - DNA, 25 bp, Homo sapien
cattattggaaatagctggcaaagg

SEQ ID NO: 3444184 - DNA, 25 bp, Homo sapien
ttgccaggtacttcacagtgtgttt

SEQ ID NO: 3444185 - DNA, 25 bp, Homo sapien
tttgggaaaaggtctagcagtatct

SEQ ID NO: 3444186 - DNA, 25 bp, Homo sapien
gcacaatgagatacaaccacacatc

SEQ ID NO: 3444187 - DNA, 25 bp, Homo sapien
caatcctaagcatttacctatgaga

SEQ ID NO: 3444188 - DNA, 25 bp, Homo sapien
tagggcaaggaaacgaaagaagaca

SEQ ID NO: 3444189 - DNA, 25 bp, Homo sapien
tacttgctgttaaaagctgcatgct

SEQ ID NO: 3444190 - DNA, 25 bp, Homo sapien
ctacttgctgttaaaagctgcatgc

SEQ ID NO: 3444191 - DNA, 25 bp, Homo sapien
cacagagggtgctaaatgtttcttc

SEQ ID NO: 3444192 - DNA, 25 bp, Homo sapien
tgctcttaaccaaaggactgtcctc

SEQ ID NO: 3444193 - DNA, 25 bp, Homo sapien
gattgccctcatatctgcttaaaaa

SEQ ID NO: 3444194 - DNA, 25 bp, Homo sapien
tgatcaatgggatttcaggagacaa

SEQ ID NO: 3444195 - DNA, 25 bp, Homo sapien
tatctgcttgggaattctacttttt

SEQ ID NO: 3444196 - DNA, 25 bp, Homo sapien
taaagacatgtattgtaatccctag

SEQ ID NO: 3444197 - DNA, 25 bp, Homo sapien
taataaaatgatagacccaaaccaa

SEQ ID NO: 3444198 - DNA, 25 bp, Homo sapien
attgttatctgcttgggaattctac

SEQ ID NO: 3444199 - DNA, 25 bp, Homo sapien
catacatataacctaaaaaggctct

SEQ ID NO: 3444200 - DNA, 25 bp, Homo sapien
atacatataacctaaaaaggctctc

SEQ ID NO: 3444201 - DNA, 25 bp, Homo sapien
gaggcccatagacagaacatcatga

SEQ ID NO: 3444202 - DNA, 25 bp, Homo sapien
gacaatgttggacaatgcctctgcc

SEQ ID NO: 3444203 - DNA, 25 bp, Homo sapien
atgaaaatgagaccccttacctggc

SEQ ID NO: 3444204 - DNA, 25 bp, Homo sapien
cttacctggccagaagggttcctat

SEQ ID NO: 3444205 - DNA, 25 bp, Homo sapien
gcatgtccactaagaacaaatcagc

SEQ ID NO: 3444206 - DNA, 25 bp, Homo sapien
cctgaatttgtacctcattggaggg

SEQ ID NO: 3444207 - DNA, 25 bp, Homo sapien
taatgtgcccatgagtttaacagtc

SEQ ID NO: 3444208 - DNA, 25 bp, Homo sapien
tcctgggcctatcataaagaatgct

SEQ ID NO: 3444209 - DNA, 25 bp, Homo sapien
gctttcttctcttggaccttcaggt

SEQ ID NO: 3444210 - DNA, 25 bp, Homo sapien
tcttctcttggaccttcaggtctcc

SEQ ID NO: 3444211 - DNA, 25 bp, Homo sapien
tcctctctcactattccgattcaac

SEQ ID NO: 3444212 - DNA, 25 bp, Homo sapien
caggtctccttcaagcaaattttcc

SEQ ID NO: 3444213 - DNA, 25 bp, Homo sapien
gccctttatcagatgagtagactgc

SEQ ID NO: 3444214 - DNA, 25 bp, Homo sapien
cctttatcagatgagtagactgcaa

SEQ ID NO: 3444215 - DNA, 25 bp, Homo sapien
tttatcagatgagtagactgcaaaa

SEQ ID NO: 3444216 - DNA, 25 bp, Homo sapien
ccctttatcagatgagtagactgca

SEQ ID NO: 3444217 - DNA, 25 bp, Homo sapien
gatcatctactacaaaaggctctat

SEQ ID NO: 3444218 - DNA, 25 bp, Homo sapien
agggcagtggccttatattcattca

SEQ ID NO: 3444219 - DNA, 25 bp, Homo sapien
gaaaaccagacagactgccctcatg

SEQ ID NO: 3444220 - DNA, 25 bp, Homo sapien
caatagcaaatacccactgatcatc

SEQ ID NO: 3444221 - DNA, 25 bp, Homo sapien
ctgtgagtgctaaataagaagcaat

SEQ ID NO: 3444222 - DNA, 25 bp, Homo sapien
tccagaccgtctctaacactctgaa

SEQ ID NO: 3444223 - DNA, 25 bp, Homo sapien
gcaatgtaccgcttttccagaccgt

SEQ ID NO: 3444224 - DNA, 25 bp, Homo sapien
actctgaactgcaccgaacattgga

SEQ ID NO: 3444225 - DNA, 25 bp, Homo sapien
cctttctgtcaatgtggaaatactc

SEQ ID NO: 3444226 - DNA, 25 bp, Homo sapien
ccagctcctagccacaagtgatccg

SEQ ID NO: 3444227 - DNA, 25 bp, Homo sapien
ctggctgcccatcgtctaggacgtg

SEQ ID NO: 3444228 - DNA, 25 bp, Homo sapien
gcctggctgcccatcgtctaggacg

SEQ ID NO: 3444229 - DNA, 25 bp, Homo sapien
ggctgcccatcgtctaggacgtgag

SEQ ID NO: 3444230 - DNA, 25 bp, Homo sapien
tattaatgcggttaactttgattac

SEQ ID NO: 3444231 - DNA, 25 bp, Homo sapien
cattcagcacttttggcaataatac

SEQ ID NO: 3444232 - DNA, 25 bp, Homo sapien
taatactgtataatgatgtttcctt

SEQ ID NO: 3444233 - DNA, 25 bp, Homo sapien
tgcccaggctgaatgtaccattatt

SEQ ID NO: 3444234 - DNA, 25 bp, Homo sapien
aggatcgcgtaaacctgggaaatgg

SEQ ID NO: 3444235 - DNA, 25 bp, Homo sapien
aaggatcgcgtaaacctgggaaatg

SEQ ID NO: 3444236 - DNA, 25 bp, Homo sapien
ggatcgcgtaaacctgggaaatgga

SEQ ID NO: 3444237 - DNA, 25 bp, Homo sapien
atttcagagtcatgtggaagcacca

SEQ ID NO: 3444238 - DNA, 25 bp, Homo sapien
tcagagtcatgtggaagcaccagga

SEQ ID NO: 3444239 - DNA, 25 bp, Homo sapien
gagtcatgtggaagcaccaggatcc

SEQ ID NO: 3444240 - DNA, 25 bp, Homo sapien
catgtggaagcaccaggatcccatt

SEQ ID NO: 3444241 - DNA, 25 bp, Homo sapien
attaagagaaataagcatttgtcaa

SEQ ID NO: 3444242 - DNA, 25 bp, Homo sapien
tgctcttttctcaaatctgaagtac

SEQ ID NO: 3444243 - DNA, 25 bp, Homo sapien
gtgctcttttctcaaatctgaagta

SEQ ID NO: 3444244 - DNA, 25 bp, Homo sapien
cacttagtcagtttggatcctcaga

SEQ ID NO: 3444245 - DNA, 25 bp, Homo sapien
tacttcacttagtcagtttggatcc

SEQ ID NO: 3444246 - DNA, 25 bp, Homo sapien
cagtttggatcctcagacttgaagt

SEQ ID NO: 3444247 - DNA, 25 bp, Homo sapien
tcctcagacttgaagtaaaaaactc

SEQ ID NO: 3444248 - DNA, 25 bp, Homo sapien
aaaacatggcacaaagctgtcccca

SEQ ID NO: 3444249 - DNA, 25 bp, Homo sapien
gagttctgtgatggatggtccccac

SEQ ID NO: 3444250 - DNA, 25 bp, Homo sapien
gccactctgccatgtagaagtcact

SEQ ID NO: 3444251 - DNA, 25 bp, Homo sapien
taattaccctgtatgcaacatggct

SEQ ID NO: 3444252 - DNA, 25 bp, Homo sapien
tatatcattgggagttcatccaata

SEQ ID NO: 3444253 - DNA, 25 bp, Homo sapien
atatcattgggagttcatccaatag

SEQ ID NO: 3444254 - DNA, 25 bp, Homo sapien
gtatatcattgggagttcatccaat

SEQ ID NO: 3444255 - DNA, 25 bp, Homo sapien
ctgtatatcattgggagttcatcca

SEQ ID NO: 3444256 - DNA, 25 bp, Homo sapien
actaactggctgtgggaattggacc

SEQ ID NO: 3444257 - DNA, 25 bp, Homo sapien
gaacagacaattggccatcagtgag

SEQ ID NO: 3444258 - DNA, 25 bp, Homo sapien
gactgtgacttggtataggcagcaa

SEQ ID NO: 3444259 - DNA, 25 bp, Homo sapien
tgtatctacagagcctaggatcatg

SEQ ID NO: 3444260 - DNA, 25 bp, Homo sapien
ctgaatagaactaaggtaaaaagca

SEQ ID NO: 3444261 - DNA, 25 bp, Homo sapien
gagttcttgatcttgaaacattcaa

SEQ ID NO: 3444262 - DNA, 25 bp, Homo sapien
gaatagaactaaggtaaaaagcaga

SEQ ID NO: 3444263 - DNA, 25 bp, Homo sapien
aaaaagcagatggtagtttactgag

SEQ ID NO: 3444264 - DNA, 25 bp, Homo sapien
tgatggaatatcggctcttttacct

SEQ ID NO: 3444265 - DNA, 25 bp, Homo sapien
atggaatatcggctcttttacctta

SEQ ID NO: 3444266 - DNA, 25 bp, Homo sapien
tggaatatcggctcttttaccttaa

SEQ ID NO: 3444267 - DNA, 25 bp, Homo sapien
ctgatggaatatcggctcttttacc

SEQ ID NO: 3444268 - DNA, 25 bp, Homo sapien
acgcccggccgtgaggatgtctttt

SEQ ID NO: 3444269 - DNA, 25 bp, Homo sapien
ggcacatggcaacactcaaaggctt

SEQ ID NO: 3444270 - DNA, 25 bp, Homo sapien
tctaggttataatcctggctctccc

SEQ ID NO: 3444271 - DNA, 25 bp, Homo sapien
tctggcacttctgaaaagcgtgctt

SEQ ID NO: 3444272 - DNA, 25 bp, Homo sapien
cagccggggtgacagagtgagactc

SEQ ID NO: 3444273 - DNA, 25 bp, Homo sapien
tgtgccattgcacttcagccggggt

SEQ ID NO: 3444274 - DNA, 25 bp, Homo sapien
agattgtgccattgcacttcagccg

SEQ ID NO: 3444275 - DNA, 25 bp, Homo sapien
attgtgccattgcacttcagccggg

SEQ ID NO: 3444276 - DNA, 25 bp, Homo sapien
tctcagtggactagggcaacagaaa

SEQ ID NO: 3444277 - DNA, 25 bp, Homo sapien
tattcctgatggacagagacgggag

SEQ ID NO: 3444278 - DNA, 25 bp, Homo sapien
taaaaagtttaatcccagctgggca

SEQ ID NO: 3444279 - DNA, 25 bp, Homo sapien
gacgggagaggcacattgaaaacac

SEQ ID NO: 3444280 - DNA, 25 bp, Homo sapien
cgaagtactaatgtaaagaccaaca

SEQ ID NO: 3444281 - DNA, 25 bp, Homo sapien
tagatcgaagtactaatgtaaagac

SEQ ID NO: 3444282 - DNA, 25 bp, Homo sapien
taaatagatcgaagtactaatgtaa

SEQ ID NO: 3444283 - DNA, 25 bp, Homo sapien
taacaatataaatagatcgaagtac

SEQ ID NO: 3444284 - DNA, 25 bp, Homo sapien
gaggaagtggcatgacatttttcaa

SEQ ID NO: 3444285 - DNA, 25 bp, Homo sapien
aatcttgaagtagtgagagacaaac

SEQ ID NO: 3444286 - DNA, 25 bp, Homo sapien
ctaagagactacatttccaggagac

SEQ ID NO: 3444287 - DNA, 25 bp, Homo sapien
gacattcttaggtgaaggaaaccta

SEQ ID NO: 3444288 - DNA, 25 bp, Homo sapien
gtccatgcaaggctaaggggactta

SEQ ID NO: 3444289 - DNA, 25 bp, Homo sapien
ctgtggggtaaaatgaatgtctttg

SEQ ID NO: 3444290 - DNA, 25 bp, Homo sapien
ttatccaggtagcagggcgggaagg

SEQ ID NO: 3444291 - DNA, 25 bp, Homo sapien
gaacatcagcacatggtccatgcaa

SEQ ID NO: 3444292 - DNA, 25 bp, Homo sapien
tcaggggcagttcaaagcaatactc

SEQ ID NO: 3444293 - DNA, 25 bp, Homo sapien
ctcaggggcagttcaaagcaatact

SEQ ID NO: 3444294 - DNA, 25 bp, Homo sapien
cgcgcctggctctctaacggctttt

SEQ ID NO: 3444295 - DNA, 25 bp, Homo sapien
taagtattggcatataagtgaacgt

SEQ ID NO: 3444296 - DNA, 25 bp, Homo sapien
cagaatgctttagtctaaatcttga

SEQ ID NO: 3444297 - DNA, 25 bp, Homo sapien
aaaatacatgtcatgactaggtgtt

SEQ ID NO: 3444298 - DNA, 25 bp, Homo sapien
acccagtcctctaagccatggataa

SEQ ID NO: 3444299 - DNA, 25 bp, Homo sapien
tgatgtataacccagtcctctaagc

SEQ ID NO: 3444300 - DNA, 25 bp, Homo sapien
tcagtgactcacaaaatatgttatc

SEQ ID NO: 3444301 - DNA, 25 bp, Homo sapien
aaatatacccaatgatgtataaccc

SEQ ID NO: 3444302 - DNA, 25 bp, Homo sapien
ggatttagagttggaatgacccacc

SEQ ID NO: 3444303 - DNA, 25 bp, Homo sapien
tttgtcgaagagaccaggtcattca

SEQ ID NO: 3444304 - DNA, 25 bp, Homo sapien
tgttgattgccttcctgtagtactg

SEQ ID NO: 3444305 - DNA, 25 bp, Homo sapien
tgcaaaattgttagttcacaggatt

SEQ ID NO: 3444306 - DNA, 25 bp, Homo sapien
aaggatgtgaagataggaaccaagg

SEQ ID NO: 3444307 - DNA, 25 bp, Homo sapien
ggatgtgaagataggaaccaaggcc

SEQ ID NO: 3444308 - DNA, 25 bp, Homo sapien
aaatggatgtgctgtaatctaggct

SEQ ID NO: 3444309 - DNA, 25 bp, Homo sapien
gcaaactggcgtactgacaaacgta

SEQ ID NO: 3444310 - DNA, 25 bp, Homo sapien
gacaaacgtaaccatagtgcttctg

SEQ ID NO: 3444311 - DNA, 25 bp, Homo sapien
cagattcattttgaattcatgcaaa

SEQ ID NO: 3444312 - DNA, 25 bp, Homo sapien
tgaattcatgcaaactggcgtactg

SEQ ID NO: 3444313 - DNA, 25 bp, Homo sapien
tttggcctatatctcaggtaaagtg

SEQ ID NO: 3444314 - DNA, 25 bp, Homo sapien
acttttggcctatatctcaggtaaa

SEQ ID NO: 3444315 - DNA, 25 bp, Homo sapien
tggcctatatctcaggtaaagtgtt

SEQ ID NO: 3444316 - DNA, 25 bp, Homo sapien
gcctatatctcaggtaaagtgttct

SEQ ID NO: 3444317 - DNA, 25 bp, Homo sapien
cacctccatcctatactcccagtac

SEQ ID NO: 3444318 - DNA, 25 bp, Homo sapien
tccatcctatactcccagtaccata

SEQ ID NO: 3444319 - DNA, 25 bp, Homo sapien
tatactcccagtaccatacccccaa

SEQ ID NO: 3444320 - DNA, 25 bp, Homo sapien
ttccacctccatcctatactcccag

SEQ ID NO: 3444321 - DNA, 25 bp, Homo sapien
tcactggccagattccaaagagaaa

SEQ ID NO: 3444322 - DNA, 25 bp, Homo sapien
tgagaggctcaaacaggatcactgg

SEQ ID NO: 3444323 - DNA, 25 bp, Homo sapien
cctgagaggctcaaacaggatcact

SEQ ID NO: 3444324 - DNA, 25 bp, Homo sapien
gaggctcaaacaggatcactggcca

SEQ ID NO: 3444325 - DNA, 25 bp, Homo sapien
ctatggtaggtgcttgtttgttttc

SEQ ID NO: 3444326 - DNA, 25 bp, Homo sapien
gtttgttttcttggtggaatgattc

SEQ ID NO: 3444327 - DNA, 25 bp, Homo sapien
taaggatttccttatttattctgcc

SEQ ID NO: 3444328 - DNA, 25 bp, Homo sapien
tttattctgccaggtctatggtagg

SEQ ID NO: 3444329 - DNA, 25 bp, Homo sapien
agccatgagctaaacacccagcagg

SEQ ID NO: 3444330 - DNA, 25 bp, Homo sapien
gctggctcacagctaactatctgga

SEQ ID NO: 3444331 - DNA, 25 bp, Homo sapien
tacctttgagaaccatccatgagat

SEQ ID NO: 3444332 - DNA, 25 bp, Homo sapien
gaagaactacacagaatcccacagc

SEQ ID NO: 3444333 - DNA, 25 bp, Homo sapien
ggtctgagcttgcttatgatcctcc

SEQ ID NO: 3444334 - DNA, 25 bp, Homo sapien
taaatcctgggatgtggtcaagtac

SEQ ID NO: 3444335 - DNA, 25 bp, Homo sapien
cctgggatgtggtcaagtactgaac

SEQ ID NO: 3444336 - DNA, 25 bp, Homo sapien
cagacaccataaatcctgggatgtg

SEQ ID NO: 3444337 - DNA, 25 bp, Homo sapien
tgggcacaaccatgacctctctgag

SEQ ID NO: 3444338 - DNA, 25 bp, Homo sapien
tgtagatgactctccactgtggtgc

SEQ ID NO: 3444339 - DNA, 25 bp, Homo sapien
aaatcagatttttactccaggcagg

SEQ ID NO: 3444340 - DNA, 25 bp, Homo sapien
caaatcactattggctcagcaggaa

SEQ ID NO: 3444341 - DNA, 25 bp, Homo sapien
tcttgtcacgtaaacatggcgttgg

SEQ ID NO: 3444342 - DNA, 25 bp, Homo sapien
tcaagagtgaaaatggaggcacaag

SEQ ID NO: 3444343 - DNA, 25 bp, Homo sapien
gcacgtcataaaccacagggccaaa

SEQ ID NO: 3444344 - DNA, 25 bp, Homo sapien
tcaaactaattatagcactgacagg

SEQ ID NO: 3444345 - DNA, 25 bp, Homo sapien
ggctgatgctatactgactgatggc

SEQ ID NO: 3444346 - DNA, 25 bp, Homo sapien
tgaaaatgggtggtcagaacctgct

SEQ ID NO: 3444347 - DNA, 25 bp, Homo sapien
gatgattacagatctggcattgcca

SEQ ID NO: 3444348 - DNA, 25 bp, Homo sapien
taggtcacttgcagcctgtaactga

SEQ ID NO: 3444349 - DNA, 25 bp, Homo sapien
gaagtcaactcaaaagctgagggca

SEQ ID NO: 3444350 - DNA, 25 bp, Homo sapien
tgtaccacttgctgacagtctagag

SEQ ID NO: 3444351 - DNA, 25 bp, Homo sapien
acagcttgacaactaccatgtggca

SEQ ID NO: 3444352 - DNA, 25 bp, Homo sapien
ctagaatcaccttgcagagaagtgc

SEQ ID NO: 3444353 - DNA, 25 bp, Homo sapien
ccttggcagatacatctttcgggaa

SEQ ID NO: 3444354 - DNA, 25 bp, Homo sapien
ggaattaacgcacttctgacgcctt

SEQ ID NO: 3444355 - DNA, 25 bp, Homo sapien
tgccacaccctagtctgaaaaacag

SEQ ID NO: 3444356 - DNA, 25 bp, Homo sapien
ccagggaggaacttagtgagacata

SEQ ID NO: 3444357 - DNA, 25 bp, Homo sapien
gagggaccgagtgcaggtttctgat

SEQ ID NO: 3444358 - DNA, 25 bp, Homo sapien
gatggtgagatacagctagaggatt

SEQ ID NO: 3444359 - DNA, 25 bp, Homo sapien
gctcctcgtccctcttactaattta

SEQ ID NO: 3444360 - DNA, 25 bp, Homo sapien
gaggtgcctggatgagaagaatgaa

SEQ ID NO: 3444361 - DNA, 25 bp, Homo sapien
gaagaaatagacaggagccatcccc

SEQ ID NO: 3444362 - DNA, 25 bp, Homo sapien
aagaaatagacaggagccatcccca

SEQ ID NO: 3444363 - DNA, 25 bp, Homo sapien
gcctgagactagcctttaatccctt

SEQ ID NO: 3444364 - DNA, 25 bp, Homo sapien
tgagactagcctttaatccctttac

SEQ ID NO: 3444365 - DNA, 25 bp, Homo sapien
aacataacctgtctccttgttgatg

SEQ ID NO: 3444366 - DNA, 25 bp, Homo sapien
caggtcaacataacctgtctccttg

SEQ ID NO: 3444367 - DNA, 25 bp, Homo sapien
tcacggtaagtccaggtcaacataa

SEQ ID NO: 3444368 - DNA, 25 bp, Homo sapien
ctcacggtaagtccaggtcaacata

SEQ ID NO: 3444369 - DNA, 25 bp, Homo sapien
cctgcatgtagcctgcccaggtgca

SEQ ID NO: 3444370 - DNA, 25 bp, Homo sapien
caggacgaatcccaggtcagaacaa

SEQ ID NO: 3444371 - DNA, 25 bp, Homo sapien
tgtagcctgcccaggtgcacctcag

SEQ ID NO: 3444372 - DNA, 25 bp, Homo sapien
ccaggacgaatcccaggtcagaaca

SEQ ID NO: 3444373 - DNA, 25 bp, Homo sapien
ggcaggccagagtcttggcagtcag

SEQ ID NO: 3444374 - DNA, 25 bp, Homo sapien
gcaggccagagtcttggcagtcagg

SEQ ID NO: 3444375 - DNA, 25 bp, Homo sapien
actgctgcagtgctaagaaactcac

SEQ ID NO: 3444376 - DNA, 25 bp, Homo sapien
ccactgctgcagtgctaagaaactc

SEQ ID NO: 3444377 - DNA, 25 bp, Homo sapien
tggaggaaccactgctgcagtgcta

SEQ ID NO: 3444378 - DNA, 25 bp, Homo sapien
ggaaccactgctgcagtgctaagaa

SEQ ID NO: 3444379 - DNA, 25 bp, Homo sapien
tcagccgcgggagcgtcggtgggac

SEQ ID NO: 3444380 - DNA, 25 bp, Homo sapien
ctcgtcagccgcgggagcgtcggtg

SEQ ID NO: 3444381 - DNA, 25 bp, Homo sapien
gagcgtcggtgggaccctctggcgt

SEQ ID NO: 3444382 - DNA, 25 bp, Homo sapien
gcgggagcgtcggtgggaccctctg

SEQ ID NO: 3444383 - DNA, 25 bp, Homo sapien
tggcgttcgccgaggcgttcgccac

SEQ ID NO: 3444384 - DNA, 25 bp, Homo sapien
gaagtcggccgtggcgttcgccgag

SEQ ID NO: 3444385 - DNA, 25 bp, Homo sapien
cggccgtggcgttcgccgaggcgtt

SEQ ID NO: 3444386 - DNA, 25 bp, Homo sapien
ctcgaagtcggccgtggcgttcgcc

SEQ ID NO: 3444387 - DNA, 25 bp, Homo sapien
tacgttggcggtgtgcacgaacacg

SEQ ID NO: 3444388 - DNA, 25 bp, Homo sapien
cgcctgcaggaagcggactacgttg

SEQ ID NO: 3444389 - DNA, 25 bp, Homo sapien
gcccaatagaaagaggcggcgcact

SEQ ID NO: 3444390 - DNA, 25 bp, Homo sapien
cagccagtcgagcaagtgcaggtgc

SEQ ID NO: 3444391 - DNA, 25 bp, Homo sapien
ccggggaagagctgcggcggcacga

SEQ ID NO: 3444392 - DNA, 25 bp, Homo sapien
gaagagctgcggcggcacgaagtac

SEQ ID NO: 3444393 - DNA, 25 bp, Homo sapien
cggggaagagctgcggcggcacgaa

SEQ ID NO: 3444394 - DNA, 25 bp, Homo sapien
gggaagagctgcggcggcacgaagt

SEQ ID NO: 3444395 - DNA, 25 bp, Homo sapien
ggaagccgccgccgctgcagtacac

SEQ ID NO: 3444396 - DNA, 25 bp, Homo sapien
gaggaagccgccgccgctgcagtac

SEQ ID NO: 3444397 - DNA, 25 bp, Homo sapien
aggaagccgccgccgctgcagtaca

SEQ ID NO: 3444398 - DNA, 25 bp, Homo sapien
aggaggaagccgccgccgctgcagt

SEQ ID NO: 3444399 - DNA, 25 bp, Homo sapien
atgcccatgtaggcgtcgtcgatgg

SEQ ID NO: 3444400 - DNA, 25 bp, Homo sapien
tgcccatgtaggcgtcgtcgatggg

SEQ ID NO: 3444401 - DNA, 25 bp, Homo sapien
cccatgtaggcgtcgtcgatgggga

SEQ ID NO: 3444402 - DNA, 25 bp, Homo sapien
gcccatgtaggcgtcgtcgatgggg

SEQ ID NO: 3444403 - DNA, 25 bp, Homo sapien
ccctcgtggccgctgggcgccaggc

SEQ ID NO: 3444404 - DNA, 25 bp, Homo sapien
gcacgccgaagggccaggatgccct

SEQ ID NO: 3444405 - DNA, 25 bp, Homo sapien
cgccgaagggccaggatgccctcgt

SEQ ID NO: 3444406 - DNA, 25 bp, Homo sapien
ctgcacgccgaagggccaggatgcc

SEQ ID NO: 3444407 - DNA, 25 bp, Homo sapien
tgtgcagcgccttccacatgagcag

SEQ ID NO: 3444408 - DNA, 25 bp, Homo sapien
cgtagggcgcgaagcggtgcactag

SEQ ID NO: 3444409 - DNA, 25 bp, Homo sapien
gcactagcagcaactcgcggtacat

SEQ ID NO: 3444410 - DNA, 25 bp, Homo sapien
gcgaagcggtgcactagcagcaact

SEQ ID NO: 3444411 - DNA, 25 bp, Homo sapien
tcaggagacccggtgtccccggtca

SEQ ID NO: 3444412 - DNA, 25 bp, Homo sapien
gaactccctgctgggttgtccaagg

SEQ ID NO: 3444413 - DNA, 25 bp, Homo sapien
gattagtcactgtctgaccgggcct

SEQ ID NO: 3444414 - DNA, 25 bp, Homo sapien
gatagtctagccgagtggtcctcag

SEQ ID NO: 3444415 - DNA, 25 bp, Homo sapien
tcgaaacttcgggagatggagccag

SEQ ID NO: 3444416 - DNA, 25 bp, Homo sapien
gaaggtgagtccctcgtgtccatct

SEQ ID NO: 3444417 - DNA, 25 bp, Homo sapien
gacaggcgtcctaactggtgcaaga

SEQ ID NO: 3444418 - DNA, 25 bp, Homo sapien
caagagagagcctgacaaagcgcag

SEQ ID NO: 3444419 - DNA, 25 bp, Homo sapien
tagttgggaccttgctgacacacac

SEQ ID NO: 3444420 - DNA, 25 bp, Homo sapien
acttgggctgtgatactggtatcta

SEQ ID NO: 3444421 - DNA, 25 bp, Homo sapien
cgtctggagatactttgggtgtcat

SEQ ID NO: 3444422 - DNA, 25 bp, Homo sapien
gaatgttttacaatgcacgggactg

SEQ ID NO: 3444423 - DNA, 25 bp, Homo sapien
ttgggcctgaagcattgtcctcact

SEQ ID NO: 3444424 - DNA, 25 bp, Homo sapien
caccaatggaatctgggccgctgta

SEQ ID NO: 3444425 - DNA, 25 bp, Homo sapien
tctgggccgctgtaaaagaggccgt

SEQ ID NO: 3444426 - DNA, 25 bp, Homo sapien
gaatctgggccgctgtaaaagaggc

SEQ ID NO: 3444427 - DNA, 25 bp, Homo sapien
ggcagaaccctcaccaatggaatct

SEQ ID NO: 3444428 - DNA, 25 bp, Homo sapien
tcttatcagaaagagcggctcagag

SEQ ID NO: 3444429 - DNA, 25 bp, Homo sapien
gacaagaacgtgagggaatccgacc

SEQ ID NO: 3444430 - DNA, 25 bp, Homo sapien
cgagaatgaggaagtgccgcgcttt

SEQ ID NO: 3444431 - DNA, 25 bp, Homo sapien
tctgtgtaaatctgtgacagccctg

SEQ ID NO: 3444432 - DNA, 25 bp, Homo sapien
ggctggcgctcgcattccccgggtt

SEQ ID NO: 3444433 - DNA, 25 bp, Homo sapien
cattccccgggttcggccagctggg

SEQ ID NO: 3444434 - DNA, 25 bp, Homo sapien
gagccgccgcgggtccagccgggct

SEQ ID NO: 3444435 - DNA, 25 bp, Homo sapien
ctgggactggcctgcggcgggggct

SEQ ID NO: 3444436 - DNA, 25 bp, Homo sapien
caggtgggtcaagccaatgggctcc

SEQ ID NO: 3444437 - DNA, 25 bp, Homo sapien
tccaactggcagaagttacacagca

SEQ ID NO: 3444438 - DNA, 25 bp, Homo sapien
tggcagaagttacacagcagcaggg

SEQ ID NO: 3444439 - DNA, 25 bp, Homo sapien
aagccaatgggctcccagccttctg

SEQ ID NO: 3444440 - DNA, 25 bp, Homo sapien
gctcactccccaccggagagacaac

SEQ ID NO: 3444441 - DNA, 25 bp, Homo sapien
gaaagtgctgacagcaggtagatac

SEQ ID NO: 3444442 - DNA, 25 bp, Homo sapien
ggacattctctctcacccggggtgg

SEQ ID NO: 3444443 - DNA, 25 bp, Homo sapien
tgggcgtccctgtgcaggacattct

SEQ ID NO: 3444444 - DNA, 25 bp, Homo sapien
ttcatctggcaattgggtcccgccc

SEQ ID NO: 3444445 - DNA, 25 bp, Homo sapien
ctggcaattgggtcccgcccagggt

SEQ ID NO: 3444446 - DNA, 25 bp, Homo sapien
catctggcaattgggtcccgcccag

SEQ ID NO: 3444447 - DNA, 25 bp, Homo sapien
ttcttcatctggcaattgggtcccg

SEQ ID NO: 3444448 - DNA, 25 bp, Homo sapien
cctggggggaagctggcagaaccag

SEQ ID NO: 3444449 - DNA, 25 bp, Homo sapien
gggggaagctggcagaaccagctct

SEQ ID NO: 3444450 - DNA, 25 bp, Homo sapien
tgggcggagcctggggggaagctgg

SEQ ID NO: 3444451 - DNA, 25 bp, Homo sapien
ggaagctggcagaaccagctctgca

SEQ ID NO: 3444452 - DNA, 25 bp, Homo sapien
atctttgctggtgcccgatttgggc

SEQ ID NO: 3444453 - DNA, 25 bp, Homo sapien
gtcaactccaacttgcacatctttg

SEQ ID NO: 3444454 - DNA, 25 bp, Homo sapien
agaaggataggccagaagcagcaag

SEQ ID NO: 3444455 - DNA, 25 bp, Homo sapien
ccttccgagatggagcccgagcagg

SEQ ID NO: 3444456 - DNA, 25 bp, Homo sapien
tgggacatggttggtactcctcttc

SEQ ID NO: 3444457 - DNA, 25 bp, Homo sapien
gtgtggcctagtctgctgttccctg

SEQ ID NO: 3444458 - DNA, 25 bp, Homo sapien
catggttggtactcctcttccagga

SEQ ID NO: 3444459 - DNA, 25 bp, Homo sapien
tgtgtacaggatggaataaggcctc

SEQ ID NO: 3444460 - DNA, 25 bp, Homo sapien
gacagacaccgaccggcctgactcc

SEQ ID NO: 3444461 - DNA, 25 bp, Homo sapien
ggacagacaccgaccggcctgactc

SEQ ID NO: 3444462 - DNA, 25 bp, Homo sapien
acagacaccgaccggcctgactcca

SEQ ID NO: 3444463 - DNA, 25 bp, Homo sapien
tggctgctgccccagggaggggagg

SEQ ID NO: 3444464 - DNA, 25 bp, Homo sapien
gtggctgctgccccagggaggggag

SEQ ID NO: 3444465 - DNA, 25 bp, Homo sapien
gcctcagggctgagtagttctggtc

SEQ ID NO: 3444466 - DNA, 25 bp, Homo sapien
tagagtgagtcgtcagtggcgggga

SEQ ID NO: 3444467 - DNA, 25 bp, Homo sapien
ttgggtcgcttccacctgacggcgg

SEQ ID NO: 3444468 - DNA, 25 bp, Homo sapien
ggtcctcgaagagcaccttcctgcg

SEQ ID NO: 3444469 - DNA, 25 bp, Homo sapien
gctccagctgggaccagacactgac

SEQ ID NO: 3444470 - DNA, 25 bp, Homo sapien
cagctccagctgggaccagacactg

SEQ ID NO: 3444471 - DNA, 25 bp, Homo sapien
agctccagctgggaccagacactga

SEQ ID NO: 3444472 - DNA, 25 bp, Homo sapien
ccagctccagctgggaccagacact

SEQ ID NO: 3444473 - DNA, 25 bp, Homo sapien
gccaccatacgctctctgtcacctg

SEQ ID NO: 3444474 - DNA, 25 bp, Homo sapien
caccagccaccatacgctctctgtc

SEQ ID NO: 3444475 - DNA, 25 bp, Homo sapien
tctctgtcacctgcccccacatcca

SEQ ID NO: 3444476 - DNA, 25 bp, Homo sapien
ccagccaccatacgctctctgtcac

SEQ ID NO: 3444477 - DNA, 25 bp, Homo sapien
tggaaagaacaaaaacatagcgagc

SEQ ID NO: 3444478 - DNA, 25 bp, Homo sapien
ctggaaagaacaaaaacatagcgag

SEQ ID NO: 3444479 - DNA, 25 bp, Homo sapien
aggaggacggacaccctgagctccc

SEQ ID NO: 3444480 - DNA, 25 bp, Homo sapien
aggtcccgggccctgagcgaggagg

SEQ ID NO: 3444481 - DNA, 25 bp, Homo sapien
cccgggccctgagcgaggaggacgg

SEQ ID NO: 3444482 - DNA, 25 bp, Homo sapien
gggccctgagcgaggaggacggaca

SEQ ID NO: 3444483 - DNA, 25 bp, Homo sapien
caaactgactgttctgtggcacgaa

SEQ ID NO: 3444484 - DNA, 25 bp, Homo sapien
gactggatccatggcacctgggcta

SEQ ID NO: 3444485 - DNA, 25 bp, Homo sapien
tttctccaggcaacacagctctagg

SEQ ID NO: 3444486 - DNA, 25 bp, Homo sapien
gaaaaggccttatgttcagggagcc

SEQ ID NO: 3444487 - DNA, 25 bp, Homo sapien
agtctgctctggaatccaggggcca

SEQ ID NO: 3444488 - DNA, 25 bp, Homo sapien
tgctctggaatccaggggccacctt

SEQ ID NO: 3444489 - DNA, 25 bp, Homo sapien
ctctggaatccaggggccaccttgg

SEQ ID NO: 3444490 - DNA, 25 bp, Homo sapien
ctggagtctgctctggaatccaggg

SEQ ID NO: 3444491 - DNA, 25 bp, Homo sapien
agaccgaatttgaatgtctgctccc

SEQ ID NO: 3444492 - DNA, 25 bp, Homo sapien
gaccgaatttgaatgtctgctccct

SEQ ID NO: 3444493 - DNA, 25 bp, Homo sapien
cctgctgtgcaactttgggcctcac

SEQ ID NO: 3444494 - DNA, 25 bp, Homo sapien
tgatccatgagcaactggctgctct

SEQ ID NO: 3444495 - DNA, 25 bp, Homo sapien
atgatccatgagcaactggctgctc

SEQ ID NO: 3444496 - DNA, 25 bp, Homo sapien
gctcagcccttcctaatttctggaa

SEQ ID NO: 3444497 - DNA, 25 bp, Homo sapien
catgggacaaacacccatatcccag

SEQ ID NO: 3444498 - DNA, 25 bp, Homo sapien
gcccacaggggtacagcaggttcaa

SEQ ID NO: 3444499 - DNA, 25 bp, Homo sapien
gcgggcatgggacaaacacccatat

SEQ ID NO: 3444500 - DNA, 25 bp, Homo sapien
gggtgcgggcatgggacaaacaccc

SEQ ID NO: 3444501 - DNA, 25 bp, Homo sapien
caggtcgtgggagctgatgccatcc

SEQ ID NO: 3444502 - DNA, 25 bp, Homo sapien
ccatccacaaagaggcgggggtcct

SEQ ID NO: 3444503 - DNA, 25 bp, Homo sapien
actcccgggaggcaagtgacgagca

SEQ ID NO: 3444504 - DNA, 25 bp, Homo sapien
gcaggctgccacaaaccagcagttg

SEQ ID NO: 3444505 - DNA, 25 bp, Homo sapien
ctacaaacggccagacagatggcct

SEQ ID NO: 3444506 - DNA, 25 bp, Homo sapien
cctctcctggggagactggagtcag

SEQ ID NO: 3444507 - DNA, 25 bp, Homo sapien
ggagtcaggcccagcaccacaaggc

SEQ ID NO: 3444508 - DNA, 25 bp, Homo sapien
ccagcaccacaaggccctgggaggt

SEQ ID NO: 3444509 - DNA, 25 bp, Homo sapien
cccttccatggagaaaacaaggagg

SEQ ID NO: 3444510 - DNA, 25 bp, Homo sapien
tgcccttccatggagaaaacaagga

SEQ ID NO: 3444511 - DNA, 25 bp, Homo sapien
actgcccttccatggagaaaacaag

SEQ ID NO: 3444512 - DNA, 25 bp, Homo sapien
ccccactgcccttccatggagaaaa

SEQ ID NO: 3444513 - DNA, 25 bp, Homo sapien
tcaaactgcctgatcctcacagaac

SEQ ID NO: 3444514 - DNA, 25 bp, Homo sapien
aaactgcctgatcctcacagaacct

SEQ ID NO: 3444515 - DNA, 25 bp, Homo sapien
ctgcctgatcctcacagaacctttt

SEQ ID NO: 3444516 - DNA, 25 bp, Homo sapien
aactgcctgatcctcacagaacctt

SEQ ID NO: 3444517 - DNA, 25 bp, Homo sapien
gaaatgaaagaactggagtgtgagt

SEQ ID NO: 3444518 - DNA, 25 bp, Homo sapien
aatgaaagaactggagtgtgagtgg

SEQ ID NO: 3444519 - DNA, 25 bp, Homo sapien
tgaaagaactggagtgtgagtggag

SEQ ID NO: 3444520 - DNA, 25 bp, Homo sapien
gaaagaactggagtgtgagtggagc

SEQ ID NO: 3444521 - DNA, 25 bp, Homo sapien
ggccacaacaggacaaggcttcact

SEQ ID NO: 3444522 - DNA, 25 bp, Homo sapien
caaatgtttatatccccagggcccg

SEQ ID NO: 3444523 - DNA, 25 bp, Homo sapien
ttactgacccggatgacactgatgg

SEQ ID NO: 3444524 - DNA, 25 bp, Homo sapien
aggacttaacacacagattgctgga

SEQ ID NO: 3444525 - DNA, 25 bp, Homo sapien
ccaccaacgccaaggacccaagtgg

SEQ ID NO: 3444526 - DNA, 25 bp, Homo sapien
tgctgccaccaacgccaaggaccca

SEQ ID NO: 3444527 - DNA, 25 bp, Homo sapien
caccaacgccaaggacccaagtggg

SEQ ID NO: 3444528 - DNA, 25 bp, Homo sapien
tgccaccaacgccaaggacccaagt

SEQ ID NO: 3444529 - DNA, 25 bp, Homo sapien
gaagtacatgaccttgcggatcttg

SEQ ID NO: 3444530 - DNA, 25 bp, Homo sapien
cgccaaaggtgacgaggaagtacat

SEQ ID NO: 3444531 - DNA, 25 bp, Homo sapien
gtgatggtgaccttgcccggcttgt

SEQ ID NO: 3444532 - DNA, 25 bp, Homo sapien
cattccagcgctcgaactgtagccg

SEQ ID NO: 3444533 - DNA, 25 bp, Homo sapien
tatcgtctatagcaatgcagcagcc

SEQ ID NO: 3444534 - DNA, 25 bp, Homo sapien
aaaactgcacttgttcctagggtag

SEQ ID NO: 3444535 - DNA, 25 bp, Homo sapien
tcgacgtgttatgggaccagcagcc

SEQ ID NO: 3444536 - DNA, 25 bp, Homo sapien
gctgagcagcgagaataatggcccc

SEQ ID NO: 3444537 - DNA, 25 bp, Homo sapien
gaagaagcccaagaaatgccaacag

SEQ ID NO: 3444538 - DNA, 25 bp, Homo sapien
tgccaacagatgctatgtcaggacg

SEQ ID NO: 3444539 - DNA, 25 bp, Homo sapien
cacttgggactatcagccgtcgtaa

SEQ ID NO: 3444540 - DNA, 25 bp, Homo sapien
ctctctgggactgcgcaatgcgaag

SEQ ID NO: 3444541 - DNA, 25 bp, Homo sapien
gcagtcgggactaagagggtcccca

SEQ ID NO: 3444542 - DNA, 25 bp, Homo sapien
cagggccactgcacacggttctggc

SEQ ID NO: 3444543 - DNA, 25 bp, Homo sapien
caggcaatggccgagacttcttcaa

SEQ ID NO: 3444544 - DNA, 25 bp, Homo sapien
ctcaggccccgggacagataggctg

SEQ ID NO: 3444545 - DNA, 25 bp, Homo sapien
tccagggaaaatgggtcatttgcca

SEQ ID NO: 3444546 - DNA, 25 bp, Homo sapien
cacactagctgcctctctgggcaca

SEQ ID NO: 3444547 - DNA, 25 bp, Homo sapien
gcacagagctcagggaaaggcaggt

SEQ ID NO: 3444548 - DNA, 25 bp, Homo sapien
agctcagggaaaggcaggtttcttt

SEQ ID NO: 3444549 - DNA, 25 bp, Homo sapien
ataggccttctccactagggcgcac

SEQ ID NO: 3444550 - DNA, 25 bp, Homo sapien
tccccgaagcgccagaagtggaagt

SEQ ID NO: 3444551 - DNA, 25 bp, Homo sapien
agtggaagtggaagatgcccgcgta

SEQ ID NO: 3444552 - DNA, 25 bp, Homo sapien
tagggcgcaccaaaactcattgcgg

SEQ ID NO: 3444553 - DNA, 25 bp, Homo sapien
agagtggctcacctagagctggcga

SEQ ID NO: 3444554 - DNA, 25 bp, Homo sapien
gacagaatggacagtcagccaggca

SEQ ID NO: 3444555 - DNA, 25 bp, Homo sapien
tggtcctaaatgtgagtgctgcctc

SEQ ID NO: 3444556 - DNA, 25 bp, Homo sapien
gcatggcagcatgaaccttcgagaa

SEQ ID NO: 3444557 - DNA, 25 bp, Homo sapien
tcatcgttggcaaagtcaccctcgg

SEQ ID NO: 3444558 - DNA, 25 bp, Homo sapien
cggtcaggtcgatgggctcagaaac

SEQ ID NO: 3444559 - DNA, 25 bp, Homo sapien
gccccggctgtgcacctttaacatg

SEQ ID NO: 3444560 - DNA, 25 bp, Homo sapien
cgtgaagtccaccagtgcgtctgct

SEQ ID NO: 3444561 - DNA, 25 bp, Homo sapien
cacagggtctgctaaagttgggttt

SEQ ID NO: 3444562 - DNA, 25 bp, Homo sapien
gcacagacgttcataacccaagagg

SEQ ID NO: 3444563 - DNA, 25 bp, Homo sapien
ttttcacagcctagagggtctgggc

SEQ ID NO: 3444564 - DNA, 25 bp, Homo sapien
gcccggccaggaatattgttaatag

SEQ ID NO: 3444565 - DNA, 25 bp, Homo sapien
ggcggatcatgtccaacttctctga

SEQ ID NO: 3444566 - DNA, 25 bp, Homo sapien
ggcgcaccttgcgcacatcagtgac

SEQ ID NO: 3444567 - DNA, 25 bp, Homo sapien
cgcacatcagtgacggcgtatgcgt

SEQ ID NO: 3444568 - DNA, 25 bp, Homo sapien
tatgcgtggccctttaccaggccgc

SEQ ID NO: 3444569 - DNA, 25 bp, Homo sapien
cccagtgccaactcctccaagaagc

SEQ ID NO: 3444570 - DNA, 25 bp, Homo sapien
cttcttcgttcctagtgtcatcctc

SEQ ID NO: 3444571 - DNA, 25 bp, Homo sapien
tccttcaaggcccagccccagtgcc

SEQ ID NO: 3444572 - DNA, 25 bp, Homo sapien
ttcttcgttcctagtgtcatcctcc

SEQ ID NO: 3444573 - DNA, 25 bp, Homo sapien
ttgctcactttctgccactcctccg

SEQ ID NO: 3444574 - DNA, 25 bp, Homo sapien
cttgctcactttctgccactcctcc

SEQ ID NO: 3444575 - DNA, 25 bp, Homo sapien
ctcaggtgggatgtgttgatcacgc

SEQ ID NO: 3444576 - DNA, 25 bp, Homo sapien
tcccacgtcttgtggatgctcaggt

SEQ ID NO: 3444577 - DNA, 25 bp, Homo sapien
tgatgatgtccgtgaagtaccggca

SEQ ID NO: 3444578 - DNA, 25 bp, Homo sapien
tgatcacgcggcacttgatgatgtc

SEQ ID NO: 3444579 - DNA, 25 bp, Homo sapien
ctcccggcgcgtagaccgctttggc

SEQ ID NO: 3444580 - DNA, 25 bp, Homo sapien
aaagccaatggccaggttctcaccc

SEQ ID NO: 3444581 - DNA, 25 bp, Homo sapien
gatgcagatcaggacttcatcttct

SEQ ID NO: 3444582 - DNA, 25 bp, Homo sapien
ccgctttggccgctgctggatgcag

SEQ ID NO: 3444583 - DNA, 25 bp, Homo sapien
ccaagtatcaggatctgcagaggtc

SEQ ID NO: 3444584 - DNA, 25 bp, Homo sapien
ccaaggtgttctagagcgttcttcc

SEQ ID NO: 3444585 - DNA, 25 bp, Homo sapien
cattccgttctcaaggtctgacagg

SEQ ID NO: 3444586 - DNA, 25 bp, Homo sapien
aagcggattcgtgtttgcccagggc

SEQ ID NO: 3444587 - DNA, 25 bp, Homo sapien
tgcaggctgtgcatgcggtactggc

SEQ ID NO: 3444588 - DNA, 25 bp, Homo sapien
aactcgccagtgtggcctggctcga

SEQ ID NO: 3444589 - DNA, 25 bp, Homo sapien
gatgatgacatagcggccctcgggc

SEQ ID NO: 3444590 - DNA, 25 bp, Homo sapien
aagacgctgcgtgagttgatgtaga

SEQ ID NO: 3444591 - DNA, 25 bp, Homo sapien
ctggcctcaagccagcccccaagta

SEQ ID NO: 3444592 - DNA, 25 bp, Homo sapien
actggcctcaagccagcccccaagt

SEQ ID NO: 3444593 - DNA, 25 bp, Homo sapien
tggcctcaagccagcccccaagtac

SEQ ID NO: 3444594 - DNA, 25 bp, Homo sapien
gacatgtacctgggtcaccagctgg

SEQ ID NO: 3444595 - DNA, 25 bp, Homo sapien
acctgggtcaccagctgggggtagc

SEQ ID NO: 3444596 - DNA, 25 bp, Homo sapien
acatgtacctgggtcaccagctggg

SEQ ID NO: 3444597 - DNA, 25 bp, Homo sapien
cctgggtcaccagctgggggtagcc

SEQ ID NO: 3444598 - DNA, 25 bp, Homo sapien
gcggactttgtctccctcacacttg

SEQ ID NO: 3444599 - DNA, 25 bp, Homo sapien
ttctgcacagccgagcggactttgt

SEQ ID NO: 3444600 - DNA, 25 bp, Homo sapien
tctggtgtggaggtgcccttctgca

SEQ ID NO: 3444601 - DNA, 25 bp, Homo sapien
gaagatgcctttcacattgtactct

SEQ ID NO: 3444602 - DNA, 25 bp, Homo sapien
tgagaatgtgcacggccacagtgcc

SEQ ID NO: 3444603 - DNA, 25 bp, Homo sapien
ggctgccggctatttcggtcccgga

SEQ ID NO: 3444604 - DNA, 25 bp, Homo sapien
tccttcagcactcggtggttccaga

SEQ ID NO: 3444605 - DNA, 25 bp, Homo sapien
ttgtccgggtcagcctttaggtgca

SEQ ID NO: 3444606 - DNA, 25 bp, Homo sapien
gatagagtcccttagcagtggtgac

SEQ ID NO: 3444607 - DNA, 25 bp, Homo sapien
tcggaagctagaatgagcaggcagc

SEQ ID NO: 3444608 - DNA, 25 bp, Homo sapien
tcctttcaaggtgggagaacaccag

SEQ ID NO: 3444609 - DNA, 25 bp, Homo sapien
gtgacatcttcttggcgctcctcgg

SEQ ID NO: 3444610 - DNA, 25 bp, Homo sapien
aaacattgaggactaaaaggaacat

SEQ ID NO: 3444611 - DNA, 25 bp, Homo sapien
tgcattttgggggaatgttggtggg

SEQ ID NO: 3444612 - DNA, 25 bp, Homo sapien
cattgaggactaaaaggaacatttt

SEQ ID NO: 3444613 - DNA, 25 bp, Homo sapien
ggctgcattttgggggaatgttggt

SEQ ID NO: 3444614 - DNA, 25 bp, Homo sapien
gaggcaaaatcagagaatccagcac

SEQ ID NO: 3444615 - DNA, 25 bp, Homo sapien
tcattggccccactttgtagaaggg

SEQ ID NO: 3444616 - DNA, 25 bp, Homo sapien
cagtgctcacgaagagttctccaga

SEQ ID NO: 3444617 - DNA, 25 bp, Homo sapien
gcaaagtcctatgtgttagcctgag

SEQ ID NO: 3444618 - DNA, 25 bp, Homo sapien
cttcctgtcccctaaccctgtggtg

SEQ ID NO: 3444619 - DNA, 25 bp, Homo sapien
catacagtgaacaaagtaattgctc

SEQ ID NO: 3444620 - DNA, 25 bp, Homo sapien
tggaggccctacccacctgcaaatg

SEQ ID NO: 3444621 - DNA, 25 bp, Homo sapien
aggcccccgcgggtgcatacagtga

SEQ ID NO: 3444622 - DNA, 25 bp, Homo sapien
gaattttgtaagatttattgagaat

SEQ ID NO: 3444623 - DNA, 25 bp, Homo sapien
ggaattttgtaagatttattgagaa

SEQ ID NO: 3444624 - DNA, 25 bp, Homo sapien
ttgtaagatttattgagaatagaac

SEQ ID NO: 3444625 - DNA, 25 bp, Homo sapien
ttttgtaagatttattgagaataga

SEQ ID NO: 3444626 - DNA, 25 bp, Homo sapien
aagtcgtttttcattgagtcgtcca

SEQ ID NO: 3444627 - DNA, 25 bp, Homo sapien
gtttttcattgagtcgtccactctg

SEQ ID NO: 3444628 - DNA, 25 bp, Homo sapien
ttcattgagtcgtccactctgcttt

SEQ ID NO: 3444629 - DNA, 25 bp, Homo sapien
tctcccaagtcgtttttcattgagt

SEQ ID NO: 3444630 - DNA, 25 bp, Homo sapien
tctaggcgtccctctgggtctttcc

SEQ ID NO: 3444631 - DNA, 25 bp, Homo sapien
ccttcctcgccgtctctctgtgtgt

SEQ ID NO: 3444632 - DNA, 25 bp, Homo sapien
agtctgcaaacacacgtcccctctt

SEQ ID NO: 3444633 - DNA, 25 bp, Homo sapien
tggctccaagtctcgttctaggcgt

SEQ ID NO: 3444634 - DNA, 25 bp, Homo sapien
acctgccagcctggtacagctgcca

SEQ ID NO: 3444635 - DNA, 25 bp, Homo sapien
tgacctgccagcctggtacagctgc

SEQ ID NO: 3444636 - DNA, 25 bp, Homo sapien
tgcccactctcagtgacctgccagc

SEQ ID NO: 3444637 - DNA, 25 bp, Homo sapien
agctgcccactctcagtgacctgcc

SEQ ID NO: 3444638 - DNA, 25 bp, Homo sapien
gtggagatgtggattcaacagggcc

SEQ ID NO: 3444639 - DNA, 25 bp, Homo sapien
gagccgccggggcattcgatcctct

SEQ ID NO: 3444640 - DNA, 25 bp, Homo sapien
aggcagttgccaccgggcacttgtc

SEQ ID NO: 3444641 - DNA, 25 bp, Homo sapien
cagagacctgaactagtctggatgc

SEQ ID NO: 3444642 - DNA, 25 bp, Homo sapien
ggtcccaagtcaggagctcctgctg

SEQ ID NO: 3444643 - DNA, 25 bp, Homo sapien
cctgctgcccactgggccaggcaca

SEQ ID NO: 3444644 - DNA, 25 bp, Homo sapien
gctcctgctgcccactgggccaggc

SEQ ID NO: 3444645 - DNA, 25 bp, Homo sapien
gctgcccactgggccaggcacagtt

SEQ ID NO: 3444646 - DNA, 25 bp, Homo sapien
cggcaggacggcgtaggtcttgaac

SEQ ID NO: 3444647 - DNA, 25 bp, Homo sapien
accagcgcccacttgccgggctgcg

SEQ ID NO: 3444648 - DNA, 25 bp, Homo sapien
gcctggttcaggctgcgcaccagcg

SEQ ID NO: 3444649 - DNA, 25 bp, Homo sapien
tcttgaacgcctggttcaggctgcg

SEQ ID NO: 3444650 - DNA, 25 bp, Homo sapien
agagcttcaccaccgccccgatggg

SEQ ID NO: 3444651 - DNA, 25 bp, Homo sapien
tgcccagagtcgcagagcttcacca

SEQ ID NO: 3444652 - DNA, 25 bp, Homo sapien
ggcacgtcgaactcctgccccaatc

SEQ ID NO: 3444653 - DNA, 25 bp, Homo sapien
atgggcacgtcgaactcctgcccca

SEQ ID NO: 3444654 - DNA, 25 bp, Homo sapien
tccttctgggccacagataaagggt

SEQ ID NO: 3444655 - DNA, 25 bp, Homo sapien
tctgggccacagataaagggttaat

SEQ ID NO: 3444656 - DNA, 25 bp, Homo sapien
ttccttctgggccacagataaaggg

SEQ ID NO: 3444657 - DNA, 25 bp, Homo sapien
cttctgggccacagataaagggtta

SEQ ID NO: 3444658 - DNA, 25 bp, Homo sapien
tgcgttctgcggagagatccagtgt

SEQ ID NO: 3444659 - DNA, 25 bp, Homo sapien
tcccggtagcggataagcaggttgc

SEQ ID NO: 3444660 - DNA, 25 bp, Homo sapien
gttgcgcaagatgcccgcctcgttg

SEQ ID NO: 3444661 - DNA, 25 bp, Homo sapien
cataggcttgatgtgcgttgcgttc

SEQ ID NO: 3444662 - DNA, 25 bp, Homo sapien
gccaagaactggggtgtggacacca

SEQ ID NO: 3444663 - DNA, 25 bp, Homo sapien
ctgccaagaactggggtgtggacac

SEQ ID NO: 3444664 - DNA, 25 bp, Homo sapien
ccaagaactggggtgtggacaccag

SEQ ID NO: 3444665 - DNA, 25 bp, Homo sapien
gctgccaagaactggggtgtggaca

SEQ ID NO: 3444666 - DNA, 25 bp, Homo sapien
ggaaggtagcgaggggacaggcctg

SEQ ID NO: 3444667 - DNA, 25 bp, Homo sapien
ggacaggcctgtcagcagcattgag

SEQ ID NO: 3444668 - DNA, 25 bp, Homo sapien
tcagcagcattgaggcagccccagc

SEQ ID NO: 3444669 - DNA, 25 bp, Homo sapien
ctgcagggaaggtagcgaggggaca

SEQ ID NO: 3444670 - DNA, 25 bp, Homo sapien
ccaggctgttgtcccctgtggcagg

SEQ ID NO: 3444671 - DNA, 25 bp, Homo sapien
gggcctcaaggccacaacaggaagc

SEQ ID NO: 3444672 - DNA, 25 bp, Homo sapien
ctggtggcagaagggccaggctgtt

SEQ ID NO: 3444673 - DNA, 25 bp, Homo sapien
acaacaggaagccttgccactgcca

SEQ ID NO: 3444674 - DNA, 25 bp, Homo sapien
tactggcggatgtgctctggcgagt

SEQ ID NO: 3444675 - DNA, 25 bp, Homo sapien
tcggctgttgcgtttcatgttgaag

SEQ ID NO: 3444676 - DNA, 25 bp, Homo sapien
gaagtagcagttgtcagcaatggca

SEQ ID NO: 3444677 - DNA, 25 bp, Homo sapien
gcagcactggtctcggctgttgcgt

SEQ ID NO: 3444678 - DNA, 25 bp, Homo sapien
atcagctttgtgctctccgtcttcc

SEQ ID NO: 3444679 - DNA, 25 bp, Homo sapien
atgggggtggcctccaagacctgct

SEQ ID NO: 3444680 - DNA, 25 bp, Homo sapien
ccagaatgggggtggcctccaagac

SEQ ID NO: 3444681 - DNA, 25 bp, Homo sapien
agctttgtgctctccgtcttcccgg

SEQ ID NO: 3444682 - DNA, 25 bp, Homo sapien
aggtactgctcaatcttcgcgccct

SEQ ID NO: 3444683 - DNA, 25 bp, Homo sapien
gacagacacgtgacttttccagcag

SEQ ID NO: 3444684 - DNA, 25 bp, Homo sapien
gatgtactttccgaaacggcttgag

SEQ ID NO: 3444685 - DNA, 25 bp, Homo sapien
tggcgccccgcttgttgaagtggat

SEQ ID NO: 3444686 - DNA, 25 bp, Homo sapien
cagcatgcagtagaacacgtggtag

SEQ ID NO: 3444687 - DNA, 25 bp, Homo sapien
gaacacgtggtagttcctttcatcc

SEQ ID NO: 3444688 - DNA, 25 bp, Homo sapien
tgcagtagaacacgtggtagttcct

SEQ ID NO: 3444689 - DNA, 25 bp, Homo sapien
cctccagcatgcagtagaacacgtg

SEQ ID NO: 3444690 - DNA, 25 bp, Homo sapien
agcggatgttggcgtactcctggct

SEQ ID NO: 3444691 - DNA, 25 bp, Homo sapien
gcagccaggagcttcgagatctccc

SEQ ID NO: 3444692 - DNA, 25 bp, Homo sapien
tgagcaccttcatggcggagcggat

SEQ ID NO: 3444693 - DNA, 25 bp, Homo sapien
atctcccagttctcggtgtcagtga

SEQ ID NO: 3444694 - DNA, 25 bp, Homo sapien
cagctgtggccagcgatggggagaa

SEQ ID NO: 3444695 - DNA, 25 bp, Homo sapien
ctcaagcagggatgcagctgtggcc

SEQ ID NO: 3444696 - DNA, 25 bp, Homo sapien
gccagcgatggggagaagagaacct

SEQ ID NO: 3444697 - DNA, 25 bp, Homo sapien
gagaagagaacctcacaggcatcca

SEQ ID NO: 3444698 - DNA, 25 bp, Homo sapien
ctttacgaaggcgtcgcgcacgtcc

SEQ ID NO: 3444699 - DNA, 25 bp, Homo sapien
tggacaccgtctccccgcgggtgat

SEQ ID NO: 3444700 - DNA, 25 bp, Homo sapien
tgctcagtggggtggacaccgtctc

SEQ ID NO: 3444701 - DNA, 25 bp, Homo sapien
tagtcaggcagctcatcaggtctgg

SEQ ID NO: 3444702 - DNA, 25 bp, Homo sapien
gcaaagttctcaaacccaaagatgt

SEQ ID NO: 3444703 - DNA, 25 bp, Homo sapien
aaattgctgcgttgatcttgtccac

SEQ ID NO: 3444704 - DNA, 25 bp, Homo sapien
tcttgtccacaatccacacgaacag

SEQ ID NO: 3444705 - DNA, 25 bp, Homo sapien
tgcgagagttcttcacatcctggga

SEQ ID NO: 3444706 - DNA, 25 bp, Homo sapien
gaacttgctctcctcatcgatgagg

SEQ ID NO: 3444707 - DNA, 25 bp, Homo sapien
tgtcagtgaactcgatgtgcagcca

SEQ ID NO: 3444708 - DNA, 25 bp, Homo sapien
ggcaatcatgtccagggcatcctgg

SEQ ID NO: 3444709 - DNA, 25 bp, Homo sapien
tgtgcagccagtcaatgctctccag

SEQ ID NO: 3444710 - DNA, 25 bp, Homo sapien
gagttcagcttgtgtaacatggtgg

SEQ ID NO: 3444711 - DNA, 25 bp, Homo sapien
actgggtctcatggttgttcttggg

SEQ ID NO: 3444712 - DNA, 25 bp, Homo sapien
aatggttgatgccaaactgggtctc

SEQ ID NO: 3444713 - DNA, 25 bp, Homo sapien
tctcatagtagacgatgcctgcaaa

SEQ ID NO: 3444714 - DNA, 25 bp, Homo sapien
cccatgcagggtgtctcggttcttc

SEQ ID NO: 3444715 - DNA, 25 bp, Homo sapien
gtccccatgcagggtgtctcggttc

SEQ ID NO: 3444716 - DNA, 25 bp, Homo sapien
ccccatgcagggtgtctcggttctt

SEQ ID NO: 3444717 - DNA, 25 bp, Homo sapien
catggcgacatcggcctggaagatc

SEQ ID NO: 3444718 - DNA, 25 bp, Homo sapien
gcagagtacccgatgaataaccaca

SEQ ID NO: 3444719 - DNA, 25 bp, Homo sapien
ctgagtggcgcagagtacccgatga

SEQ ID NO: 3444720 - DNA, 25 bp, Homo sapien
tggcgcagagtacccgatgaataac

SEQ ID NO: 3444721 - DNA, 25 bp, Homo sapien
gagtggcgcagagtacccgatgaat

SEQ ID NO: 3444722 - DNA, 25 bp, Homo sapien
atcagcagctccagtgaccgcttga

SEQ ID NO: 3444723 - DNA, 25 bp, Homo sapien
cttgaactggctgctaagtgtgggc

SEQ ID NO: 3444724 - DNA, 25 bp, Homo sapien
aggcacccagcgtgcgcatcagcag

SEQ ID NO: 3444725 - DNA, 25 bp, Homo sapien
tgatgcatcgcacaaagaagggctg

SEQ ID NO: 3444726 - DNA, 25 bp, Homo sapien
aaggccaagtccacacggcatggga

SEQ ID NO: 3444727 - DNA, 25 bp, Homo sapien
gtgcacttgaccaacccagacaaag

SEQ ID NO: 3444728 - DNA, 25 bp, Homo sapien
gtccacacggcatgggaggagcaaa

SEQ ID NO: 3444729 - DNA, 25 bp, Homo sapien
aggcaccgggatctgcagctcaaat

SEQ ID NO: 3444730 - DNA, 25 bp, Homo sapien
tggtctccatcattcctgagtaccg

SEQ ID NO: 3444731 - DNA, 25 bp, Homo sapien
gctcggcggattcggatggtctcca

SEQ ID NO: 3444732 - DNA, 25 bp, Homo sapien
ggtaccgctccacaaactctacgaa

SEQ ID NO: 3444733 - DNA, 25 bp, Homo sapien
actctacgaagctgtagcggatggg

SEQ ID NO: 3444734 - DNA, 25 bp, Homo sapien
tgccagtcatcgtgggtgcccagca

SEQ ID NO: 3444735 - DNA, 25 bp, Homo sapien
tatctgccagtcatcgtgggtgccc

SEQ ID NO: 3444736 - DNA, 25 bp, Homo sapien
ccatgcgctggcaagtcccgcggag

SEQ ID NO: 3444737 - DNA, 25 bp, Homo sapien
cagaaagatcttggttttgcctatc

SEQ ID NO: 3444738 - DNA, 25 bp, Homo sapien
gtctttgaatccccggatgactttc

SEQ ID NO: 3444739 - DNA, 25 bp, Homo sapien
ctctgtcggtgatggctttgtcccg

SEQ ID NO: 3444740 - DNA, 25 bp, Homo sapien
aaggaggatgactctgtcggtgatg

SEQ ID NO: 3444741 - DNA, 25 bp, Homo sapien
ctttgtcccgctccacttccagcag

SEQ ID NO: 3444742 - DNA, 25 bp, Homo sapien
gatcagtgtggcagcgttcttcagc

SEQ ID NO: 3444743 - DNA, 25 bp, Homo sapien
tctggatcagtgtggcagcgttctt

SEQ ID NO: 3444744 - DNA, 25 bp, Homo sapien
agtgtggcagcgttcttcagcttca

SEQ ID NO: 3444745 - DNA, 25 bp, Homo sapien
gcctctggatcagtgtggcagcgtt

SEQ ID NO: 3444746 - DNA, 25 bp, Homo sapien
gaactggatgatgcgctggcgggcc

SEQ ID NO: 3444747 - DNA, 25 bp, Homo sapien
aggccttgcgcaccagataggcgcg

SEQ ID NO: 3444748 - DNA, 25 bp, Homo sapien
atgccccgggcataggcctgcacgg

SEQ ID NO: 3444749 - DNA, 25 bp, Homo sapien
cagccctgaggcgttggtgcagcct

SEQ ID NO: 3444750 - DNA, 25 bp, Homo sapien
ttggccttcttggcgctcatctcct

SEQ ID NO: 3444751 - DNA, 25 bp, Homo sapien
tcatctccttccgaagcttctcttc

SEQ ID NO: 3444752 - DNA, 25 bp, Homo sapien
ctccgccagccgcattttctcagcc

SEQ ID NO: 3444753 - DNA, 25 bp, Homo sapien
tctcagcctcgaggcgccacagata

SEQ ID NO: 3444754 - DNA, 25 bp, Homo sapien
aagccaaacatcttgtccaccatgt

SEQ ID NO: 3444755 - DNA, 25 bp, Homo sapien
tcagcgtcctcacgagccagctggg

SEQ ID NO: 3444756 - DNA, 25 bp, Homo sapien
ctcaaagccactaggtgcctggccc

SEQ ID NO: 3444757 - DNA, 25 bp, Homo sapien
ggagctccttcttccgccgagcggc

SEQ ID NO: 3444758 - DNA, 25 bp, Homo sapien
taggtggccgcgaacttggcaaatt

SEQ ID NO: 3444759 - DNA, 25 bp, Homo sapien
tcgtcgtcatggtagagcagtggct

SEQ ID NO: 3444760 - DNA, 25 bp, Homo sapien
tggcaaatttatactcagagaggtc

SEQ ID NO: 3444761 - DNA, 25 bp, Homo sapien
agctggtcaccctcgtcgtcatggt

SEQ ID NO: 3444762 - DNA, 25 bp, Homo sapien
ctcttgtacgtcttcttgcccaggg

SEQ ID NO: 3444763 - DNA, 25 bp, Homo sapien
atggtgatccagaccgccagggctg

SEQ ID NO: 3444764 - DNA, 25 bp, Homo sapien
cccatgaagcggaggatggtgatcc

SEQ ID NO: 3444765 - DNA, 25 bp, Homo sapien
aatcttggtcatcacagggatcttc

SEQ ID NO: 3444766 - DNA, 25 bp, Homo sapien
tcagagtcaaatgcaccagcttgtg

SEQ ID NO: 3444767 - DNA, 25 bp, Homo sapien
gagtcaaatgcaccagcttgtgcct

SEQ ID NO: 3444768 - DNA, 25 bp, Homo sapien
gcttgtgcctcacactgctcttctt

SEQ ID NO: 3444769 - DNA, 25 bp, Homo sapien
atgcaccagcttgtgcctcacactg

SEQ ID NO: 3444770 - DNA, 25 bp, Homo sapien
tgccattgccgatgatgaagtgcag

SEQ ID NO: 3444771 - DNA, 25 bp, Homo sapien
gcactgtggactccccgtcatgcag

SEQ ID NO: 3444772 - DNA, 25 bp, Homo sapien
gactccccgtcatgcagcctcttgg

SEQ ID NO: 3444773 - DNA, 25 bp, Homo sapien
tgctggccgcaggatgccattgccg

SEQ ID NO: 3444774 - DNA, 25 bp, Homo sapien
tgtggccttcaactgaacctgcaat

SEQ ID NO: 3444775 - DNA, 25 bp, Homo sapien
cccaggcctgcttggcttaatctct

SEQ ID NO: 3444776 - DNA, 25 bp, Homo sapien
ggtcctaactccaccaactagctag

SEQ ID NO: 3444777 - DNA, 25 bp, Homo sapien
caagggatgcctgttttaggattcc

SEQ ID NO: 3444778 - DNA, 25 bp, Homo sapien
tgttttgtgcaccatgaatcgtgcc

SEQ ID NO: 3444779 - DNA, 25 bp, Homo sapien
tttggcaatactagaaatatctcaa

SEQ ID NO: 3444780 - DNA, 25 bp, Homo sapien
gaaaggaagcgtcgcacatttttca

SEQ ID NO: 3444781 - DNA, 25 bp, Homo sapien
tacaaattggtttatgacgactctg

SEQ ID NO: 3444782 - DNA, 25 bp, Homo sapien
agagacacgagaatccagccccggg

SEQ ID NO: 3444783 - DNA, 25 bp, Homo sapien
tgacaaacttctcggagggggcgaa

SEQ ID NO: 3444784 - DNA, 25 bp, Homo sapien
cagccccgggcatagctgctcttgg

SEQ ID NO: 3444785 - DNA, 25 bp, Homo sapien
ggcgaaacagcccacgcagagagac

SEQ ID NO: 3444786 - DNA, 25 bp, Homo sapien
cctgccccaagacgagggtgcagag

SEQ ID NO: 3444787 - DNA, 25 bp, Homo sapien
ctgggacacgctcctgtcagactca

SEQ ID NO: 3444788 - DNA, 25 bp, Homo sapien
ggcctgccccaagacgagggtgcag

SEQ ID NO: 3444789 - DNA, 25 bp, Homo sapien
gggacacgctcctgtcagactcagc

SEQ ID NO: 3444790 - DNA, 25 bp, Homo sapien
ctcctcacagtacggggcgtagccg

SEQ ID NO: 3444791 - DNA, 25 bp, Homo sapien
gggcccccgtggatgaagttccgca

SEQ ID NO: 3444792 - DNA, 25 bp, Homo sapien
ccccgtggatgaagttccgcaggta

SEQ ID NO: 3444793 - DNA, 25 bp, Homo sapien
aggtccttctcaggcgctcctcaca

SEQ ID NO: 3444794 - DNA, 25 bp, Homo sapien
agagagatcttgtcggccagcgcgt

SEQ ID NO: 3444795 - DNA, 25 bp, Homo sapien
ccgaaccggtccttgagagagatct

SEQ ID NO: 3444796 - DNA, 25 bp, Homo sapien
ccatccatgaatgtcacgggcaaca

SEQ ID NO: 3444797 - DNA, 25 bp, Homo sapien
tgccgagtccgtcagcagggtcttg

SEQ ID NO: 3444798 - DNA, 25 bp, Homo sapien
tagccccggcaagtaggtggcagca

SEQ ID NO: 3444799 - DNA, 25 bp, Homo sapien
cgagttctcggcagtcctgaggagt

SEQ ID NO: 3444800 - DNA, 25 bp, Homo sapien
gaaaccgaggtgctcaagggtgaat

SEQ ID NO: 3444801 - DNA, 25 bp, Homo sapien
gaggaggtgcttccgggcggccata

SEQ ID NO: 3444802 - DNA, 25 bp, Homo sapien
gcacggtgacgtgggaattcccatt

SEQ ID NO: 3444803 - DNA, 25 bp, Homo sapien
cattttctagtggaagctttttggg

SEQ ID NO: 3444804 - DNA, 25 bp, Homo sapien
gccttcctagcctcagttctgggca

SEQ ID NO: 3444805 - DNA, 25 bp, Homo sapien
tagcctcagttctgggcacggtgac

SEQ ID NO: 3444806 - DNA, 25 bp, Homo sapien
gcgtgaagacctctttgcggaagaa

SEQ ID NO: 3444807 - DNA, 25 bp, Homo sapien
ctgtgccagggcgtgaagacctctt

SEQ ID NO: 3444808 - DNA, 25 bp, Homo sapien
caccacctgctggtagatgaggttg

SEQ ID NO: 3444809 - DNA, 25 bp, Homo sapien
tggcgtactgctcgcactgggagat

SEQ ID NO: 3444810 - DNA, 25 bp, Homo sapien
aagagtgcctggttgcagtcaggct

SEQ ID NO: 3444811 - DNA, 25 bp, Homo sapien
tgaagagtgcctggttgcagtcagg

SEQ ID NO: 3444812 - DNA, 25 bp, Homo sapien
ctgaagagtgcctggttgcagtcag

SEQ ID NO: 3444813 - DNA, 25 bp, Homo sapien
gagtgcctggttgcagtcaggctca

SEQ ID NO: 3444814 - DNA, 25 bp, Homo sapien
cgcacagtcactacagcagtgtggg

SEQ ID NO: 3444815 - DNA, 25 bp, Homo sapien
gcacgtcctctgtagcacgcacagt

SEQ ID NO: 3444816 - DNA, 25 bp, Homo sapien
tcagaagcccttgctcccgccatct

SEQ ID NO: 3444817 - DNA, 25 bp, Homo sapien
aggtcctgcggcacgtcctctgtag

SEQ ID NO: 3444818 - DNA, 25 bp, Homo sapien
caagccagcccatcgagcagccact

SEQ ID NO: 3444819 - DNA, 25 bp, Homo sapien
gcccatcgagcagccactgcacact

SEQ ID NO: 3444820 - DNA, 25 bp, Homo sapien
acatgaagtgatgcaaagaaacaag

SEQ ID NO: 3444821 - DNA, 25 bp, Homo sapien
agaaacaagccagcccatcgagcag

SEQ ID NO: 3444822 - DNA, 25 bp, Homo sapien
tcagagccatagtctacaaagtact

SEQ ID NO: 3444823 - DNA, 25 bp, Homo sapien
taggtgggcacgaggttcaggaggc

SEQ ID NO: 3444824 - DNA, 25 bp, Homo sapien
tccaggatcatctcagagccatagt

SEQ ID NO: 3444825 - DNA, 25 bp, Homo sapien
tctacaaagtactgctgggaggcca

SEQ ID NO: 3444826 - DNA, 25 bp, Homo sapien
cagggaggagacgctcctcctctga

SEQ ID NO: 3444827 - DNA, 25 bp, Homo sapien
gggaggagacgctcctcctctgaag

SEQ ID NO: 3444828 - DNA, 25 bp, Homo sapien
caggctggcgcagggagcactcagg

SEQ ID NO: 3444829 - DNA, 25 bp, Homo sapien
tcgggggaagcaggctggcgcaggg

SEQ ID NO: 3444830 - DNA, 25 bp, Homo sapien
gagtgagtttgctctaaaaatcagc

SEQ ID NO: 3444831 - DNA, 25 bp, Homo sapien
agtgagtttgctctaaaaatcagct

SEQ ID NO: 3444832 - DNA, 25 bp, Homo sapien
gctgctgctgccttctagccaggag

SEQ ID NO: 3444833 - DNA, 25 bp, Homo sapien
gctgctgccttctagccaggagcag

SEQ ID NO: 3444834 - DNA, 25 bp, Homo sapien
gggccacttgaagcgggcataactg

SEQ ID NO: 3444835 - DNA, 25 bp, Homo sapien
gcgggcataactgaccacatcctct

SEQ ID NO: 3444836 - DNA, 25 bp, Homo sapien
gaagcgggcataactgaccacatcc

SEQ ID NO: 3444837 - DNA, 25 bp, Homo sapien
acttgaagcgggcataactgaccac

SEQ ID NO: 3444838 - DNA, 25 bp, Homo sapien
gaaggacagctccagaagtacctgc

SEQ ID NO: 3444839 - DNA, 25 bp, Homo sapien
tgctggacacggccatgatctctgg

SEQ ID NO: 3444840 - DNA, 25 bp, Homo sapien
cacaaagtacacacccgtccagttg

SEQ ID NO: 3444841 - DNA, 25 bp, Homo sapien
gacggccacgatgacgtcgttcttg

SEQ ID NO: 3444842 - DNA, 25 bp, Homo sapien
cgcagcacagccaagatcagagcag

SEQ ID NO: 3444843 - DNA, 25 bp, Homo sapien
gcgcagcacagccaagatcagagca

SEQ ID NO: 3444844 - DNA, 25 bp, Homo sapien
aggcgcagcacagccaagatcagag

SEQ ID NO: 3444845 - DNA, 25 bp, Homo sapien
caacacggagaacagggccccgccg

SEQ ID NO: 3444846 - DNA, 25 bp, Homo sapien
gaccaccaggtcacgaatgtcctca

SEQ ID NO: 3444847 - DNA, 25 bp, Homo sapien
ccccttgatggtggccagcgtgaag

SEQ ID NO: 3444848 - DNA, 25 bp, Homo sapien
cagggccacaacatacttagatctc

SEQ ID NO: 3444849 - DNA, 25 bp, Homo sapien
gaaggtgtattcgtcccccttgatg

SEQ ID NO: 3444850 - DNA, 25 bp, Homo sapien
tgcttggtcctctcattgatgccgt

SEQ ID NO: 3444851 - DNA, 25 bp, Homo sapien
gctcgcccgtgtcatggtccaggat

SEQ ID NO: 3444852 - DNA, 25 bp, Homo sapien
aatctcccgcggtggcatggtgaca

SEQ ID NO: 3444853 - DNA, 25 bp, Homo sapien
gcatgacgtacacactgtcggtggg

SEQ ID NO: 3444854 - DNA, 25 bp, Homo sapien
gggctcaggtcagctctctacctgt

SEQ ID NO: 3444855 - DNA, 25 bp, Homo sapien
tctacctgtggccaccaggatcaac

SEQ ID NO: 3444856 - DNA, 25 bp, Homo sapien
tcaggtcagctctctacctgtggcc

SEQ ID NO: 3444857 - DNA, 25 bp, Homo sapien
accaggatcaacatggtataccctg

SEQ ID NO: 3444858 - DNA, 25 bp, Homo sapien
gcagctgcaagagccggacaacgtc

SEQ ID NO: 3444859 - DNA, 25 bp, Homo sapien
tagggcttggcacgcacctcgggct

SEQ ID NO: 3444860 - DNA, 25 bp, Homo sapien
actcctccagcgtgtagggcttggc

SEQ ID NO: 3444861 - DNA, 25 bp, Homo sapien
acaacgtcctgcctctgatcgggag

SEQ ID NO: 3444862 - DNA, 25 bp, Homo sapien
ttgcctcgggccttggacaccatga

SEQ ID NO: 3444863 - DNA, 25 bp, Homo sapien
ttggacaccatgacacggctcagcg

SEQ ID NO: 3444864 - DNA, 25 bp, Homo sapien
gccggtccttgcctcgggccttgga

SEQ ID NO: 3444865 - DNA, 25 bp, Homo sapien
catgacacggctcagcgtgtgcttg

SEQ ID NO: 3444866 - DNA, 25 bp, Homo sapien
agcttcttgagcagcgcctgcttga

SEQ ID NO: 3444867 - DNA, 25 bp, Homo sapien
cttgagcagcgcctgcttgagcggt

SEQ ID NO: 3444868 - DNA, 25 bp, Homo sapien
cctgcttgagcggttcccgcgtgtg

SEQ ID NO: 3444869 - DNA, 25 bp, Homo sapien
gagcagcgcctgcttgagcggttcc

SEQ ID NO: 3444870 - DNA, 25 bp, Homo sapien
caggcctcctgcgagagctcctcac

SEQ ID NO: 3444871 - DNA, 25 bp, Homo sapien
ggcaggcctcctgcgagagctcctc

SEQ ID NO: 3444872 - DNA, 25 bp, Homo sapien
atgtgtgcccgggtcgcagcaggcc

SEQ ID NO: 3444873 - DNA, 25 bp, Homo sapien
ggaaggcagtgtgcagacgaaggcc

SEQ ID NO: 3444874 - DNA, 25 bp, Homo sapien
tccccatgtgtgcccgggtcgcagc

SEQ ID NO: 3444875 - DNA, 25 bp, Homo sapien
aaggcagtgtgcagacgaaggccct

SEQ ID NO: 3444876 - DNA, 25 bp, Homo sapien
tgagctcgttgacggagcgtgtcct

SEQ ID NO: 3444877 - DNA, 25 bp, Homo sapien
cctcttggacgggtagtcgcccatg

SEQ ID NO: 3444878 - DNA, 25 bp, Homo sapien
gggaccctcaaagatctggtcggtg

SEQ ID NO: 3444879 - DNA, 25 bp, Homo sapien
tatgcctcgtccttcaggggctcgg

SEQ ID NO: 3444880 - DNA, 25 bp, Homo sapien
cagagcagctcccaaccccgctcct

SEQ ID NO: 3444881 - DNA, 25 bp, Homo sapien
agcagctcccaaccccgctcctcgc

SEQ ID NO: 3444882 - DNA, 25 bp, Homo sapien
agagcagctcccaaccccgctcctc

SEQ ID NO: 3444883 - DNA, 25 bp, Homo sapien
gagcagctcccaaccccgctcctcg

SEQ ID NO: 3444884 - DNA, 25 bp, Homo sapien
caggcagtcgatggcgagtgggcag

SEQ ID NO: 3444885 - DNA, 25 bp, Homo sapien
tcgatggcgagtgggcagtgctttc

SEQ ID NO: 3444886 - DNA, 25 bp, Homo sapien
cagtgctttcgggactgcaggaagc

SEQ ID NO: 3444887 - DNA, 25 bp, Homo sapien
gggctttctggagccgttgcaggca

SEQ ID NO: 3444888 - DNA, 25 bp, Homo sapien
ccaccaggtgcggagggtacttccg

SEQ ID NO: 3444889 - DNA, 25 bp, Homo sapien
tggaaaatctgggtggtcttgtgct

SEQ ID NO: 3444890 - DNA, 25 bp, Homo sapien
aaatctgggtggtcttgtgctggat

SEQ ID NO: 3444891 - DNA, 25 bp, Homo sapien
tcatcagggaagtagactttgtgga

SEQ ID NO: 3444892 - DNA, 25 bp, Homo sapien
tcccgggcccctctggctatgcctc

SEQ ID NO: 3444893 - DNA, 25 bp, Homo sapien
gaaagggctactcctgtctgggtct

SEQ ID NO: 3444894 - DNA, 25 bp, Homo sapien
gaaggtggccttggcgtccagagtc

SEQ ID NO: 3444895 - DNA, 25 bp, Homo sapien
tcctcccgactctccaagcagaagg

SEQ ID NO: 3444896 - DNA, 25 bp, Homo sapien
gacaaagaggctgaatccctctgag

SEQ ID NO: 3444897 - DNA, 25 bp, Homo sapien
ccctctgaggacttgaggagcagcc

SEQ ID NO: 3444898 - DNA, 25 bp, Homo sapien
tggtgctggactccacttcgaaggc

SEQ ID NO: 3444899 - DNA, 25 bp, Homo sapien
aatccctctgaggacttgaggagca

SEQ ID NO: 3444900 - DNA, 25 bp, Homo sapien
ttatccagtctgtcaagtgtcgaac

SEQ ID NO: 3444901 - DNA, 25 bp, Homo sapien
gatgggccgagctttctttatccag

SEQ ID NO: 3444902 - DNA, 25 bp, Homo sapien
caaagtcaaagaagaagtcattctc

SEQ ID NO: 3444903 - DNA, 25 bp, Homo sapien
gtccttgatgggccgagctttcttt

SEQ ID NO: 3444904 - DNA, 25 bp, Homo sapien
agcacagggcagtcggtcacccaga

SEQ ID NO: 3444905 - DNA, 25 bp, Homo sapien
gcacagggcagtcggtcacccagag

SEQ ID NO: 3444906 - DNA, 25 bp, Homo sapien
gggcagtcggtcacccagagggtcc

SEQ ID NO: 3444907 - DNA, 25 bp, Homo sapien
tgcagcacagggcagtcggtcaccc

SEQ ID NO: 3444908 - DNA, 25 bp, Homo sapien
tggaatcggccatgggatccttccc

SEQ ID NO: 3444909 - DNA, 25 bp, Homo sapien
aagatggaatcggccatgggatcct

SEQ ID NO: 3444910 - DNA, 25 bp, Homo sapien
tcttcatgaagaacacctggtaggt

SEQ ID NO: 3444911 - DNA, 25 bp, Homo sapien
tccttccctggcaccgtggtggtcc

SEQ ID NO: 3444912 - DNA, 25 bp, Homo sapien
caggaatccctttgaggccaggctg

SEQ ID NO: 3444913 - DNA, 25 bp, Homo sapien
gaaaatgtttgcacagaggccttgg

SEQ ID NO: 3444914 - DNA, 25 bp, Homo sapien
atctcgaagtcagaggatagccccg

SEQ ID NO: 3444915 - DNA, 25 bp, Homo sapien
caacgctagctgtgcacgaaggcaa

SEQ ID NO: 3444916 - DNA, 25 bp, Homo sapien
gaacttgaccctgtagatcagcgcc

SEQ ID NO: 3444917 - DNA, 25 bp, Homo sapien
tgagacctgccggataaggtcctgg

SEQ ID NO: 3444918 - DNA, 25 bp, Homo sapien
tagcctcggagatacttgggcaact

SEQ ID NO: 3444919 - DNA, 25 bp, Homo sapien
cgcgtgcacttgtggtagcctcgga

SEQ ID NO: 3444920 - DNA, 25 bp, Homo sapien
cgtgcttgttgaagtaggcgacgat

SEQ ID NO: 3444921 - DNA, 25 bp, Homo sapien
tgagccaaaggtgggccacttgaag

SEQ ID NO: 3444922 - DNA, 25 bp, Homo sapien
cttggacttccctgcgtgcttgttg

SEQ ID NO: 3444923 - DNA, 25 bp, Homo sapien
ctgcgtgcttgttgaagtaggcgac

SEQ ID NO: 3444924 - DNA, 25 bp, Homo sapien
ctgtgtgataagaccatacgtatcc

SEQ ID NO: 3444925 - DNA, 25 bp, Homo sapien
tgtgataagaccatacgtatcctct

SEQ ID NO: 3444926 - DNA, 25 bp, Homo sapien
taagaccatacgtatcctctcacac

SEQ ID NO: 3444927 - DNA, 25 bp, Homo sapien
gataagaccatacgtatcctctcac

SEQ ID NO: 3444928 - DNA, 25 bp, Homo sapien
ctgttctcctcgcacagccaagctc

SEQ ID NO: 3444929 - DNA, 25 bp, Homo sapien
tcgcacagccaagctcctcaaaagg

SEQ ID NO: 3444930 - DNA, 25 bp, Homo sapien
tcctcgcacagccaagctcctcaaa

SEQ ID NO: 3444931 - DNA, 25 bp, Homo sapien
gttctcctcgcacagccaagctcct

SEQ ID NO: 3444932 - DNA, 25 bp, Homo sapien
agcctctcctgttgcctatgtggta

SEQ ID NO: 3444933 - DNA, 25 bp, Homo sapien
gccctgccatgacctatggcttcca

SEQ ID NO: 3444934 - DNA, 25 bp, Homo sapien
atgtggtactgacggccctgccatg

SEQ ID NO: 3444935 - DNA, 25 bp, Homo sapien
ccccagctgggataaagtcagcctc

SEQ ID NO: 3444936 - DNA, 25 bp, Homo sapien
cgttttgggatcgatgaggctgacc

SEQ ID NO: 3444937 - DNA, 25 bp, Homo sapien
atggcaattaggaggatctcaggga

SEQ ID NO: 3444938 - DNA, 25 bp, Homo sapien
tcgttttgggatcgatgaggctgac

SEQ ID NO: 3444939 - DNA, 25 bp, Homo sapien
cttcgttttgggatcgatgaggctg

SEQ ID NO: 3444940 - DNA, 25 bp, Homo sapien
gtccagtcggaccctctgggtgtgc

SEQ ID NO: 3444941 - DNA, 25 bp, Homo sapien
tccagtcggaccctctgggtgtgca

SEQ ID NO: 3444942 - DNA, 25 bp, Homo sapien
tgtccagtcggaccctctgggtgtg

SEQ ID NO: 3444943 - DNA, 25 bp, Homo sapien
ctgtccagtcggaccctctgggtgt

SEQ ID NO: 3444944 - DNA, 25 bp, Homo sapien
ggaactgacaccgtggcctgaatga

SEQ ID NO: 3444945 - DNA, 25 bp, Homo sapien
tttggacacccaggaagtctaggag

SEQ ID NO: 3444946 - DNA, 25 bp, Homo sapien
ccagaactcggaaattgggagacct

SEQ ID NO: 3444947 - DNA, 25 bp, Homo sapien
tggaaagatggtggtcacgagccct

SEQ ID NO: 3444948 - DNA, 25 bp, Homo sapien
cgcgcaccaagttcccaatggtgat

SEQ ID NO: 3444949 - DNA, 25 bp, Homo sapien
gagcagtttgctcccgcgcaccaag

SEQ ID NO: 3444950 - DNA, 25 bp, Homo sapien
agtgacgtctcgcagagcagtttgc

SEQ ID NO: 3444951 - DNA, 25 bp, Homo sapien
tgacgtctcgcagagcagtttgctc

SEQ ID NO: 3444952 - DNA, 25 bp, Homo sapien
gagcatctggctaatgtaggaagtc

SEQ ID NO: 3444953 - DNA, 25 bp, Homo sapien
tgtaggaagtcaggaggtcatccat

SEQ ID NO: 3444954 - DNA, 25 bp, Homo sapien
ccccgctgtttgctcatggctgtga

SEQ ID NO: 3444955 - DNA, 25 bp, Homo sapien
cctggagccccgctgtttgctcatg

SEQ ID NO: 3444956 - DNA, 25 bp, Homo sapien
gagagatgcctcactggaagaacat

SEQ ID NO: 3444957 - DNA, 25 bp, Homo sapien
atcacaggctctcacaaccgggaag

SEQ ID NO: 3444958 - DNA, 25 bp, Homo sapien
gatccagtcccttcggtttcagagt

SEQ ID NO: 3444959 - DNA, 25 bp, Homo sapien
ggatggcataagtcttccccagctg

SEQ ID NO: 3444960 - DNA, 25 bp, Homo sapien
aacaaagggctaatacctggaatct

SEQ ID NO: 3444961 - DNA, 25 bp, Homo sapien
taacaaagggctaatacctggaatc

SEQ ID NO: 3444962 - DNA, 25 bp, Homo sapien
tctaacaaagggctaatacctggaa

SEQ ID NO: 3444963 - DNA, 25 bp, Homo sapien
ccatctaacaaagggctaatacctg

SEQ ID NO: 3444964 - DNA, 25 bp, Homo sapien
cccagtagaggccgactgacaggtc

SEQ ID NO: 3444965 - DNA, 25 bp, Homo sapien
gcccagtagaggccgactgacaggt

SEQ ID NO: 3444966 - DNA, 25 bp, Homo sapien
tagaggccgactgacaggtcataca

SEQ ID NO: 3444967 - DNA, 25 bp, Homo sapien
ccagtagaggccgactgacaggtca

SEQ ID NO: 3444968 - DNA, 25 bp, Homo sapien
aatttcttatggacaatggtgaagc

SEQ ID NO: 3444969 - DNA, 25 bp, Homo sapien
gatgagtggaactgatacaacactt

SEQ ID NO: 3444970 - DNA, 25 bp, Homo sapien
agctcctgatattccatgtaccagc

SEQ ID NO: 3444971 - DNA, 25 bp, Homo sapien
acaacacttagggttgcaggaatga

SEQ ID NO: 3444972 - DNA, 25 bp, Homo sapien
taacaagtacagttgacttaagcca

SEQ ID NO: 3444973 - DNA, 25 bp, Homo sapien
tctgaatgagcaatctacctagatc

SEQ ID NO: 3444974 - DNA, 25 bp, Homo sapien
tataatccctcaaacccttgtagtg

SEQ ID NO: 3444975 - DNA, 25 bp, Homo sapien
gctgatcgagttctatgttctctca

SEQ ID NO: 3444976 - DNA, 25 bp, Homo sapien
ccacctttgtagaggcatggcaaca

SEQ ID NO: 3444977 - DNA, 25 bp, Homo sapien
caacaattgacaacggcatggagag

SEQ ID NO: 3444978 - DNA, 25 bp, Homo sapien
gactccaaagtggaaactgtgtgcc

SEQ ID NO: 3444979 - DNA, 25 bp, Homo sapien
gaaaaccaagcgtacttgactccaa

SEQ ID NO: 3444980 - DNA, 25 bp, Homo sapien
gctttgggtaattttgacattgtaa

SEQ ID NO: 3444981 - DNA, 25 bp, Homo sapien
gcttttagaaatcattagtggtcat

SEQ ID NO: 3444982 - DNA, 25 bp, Homo sapien
tgttgaaattcaattaactataacg

SEQ ID NO: 3444983 - DNA, 25 bp, Homo sapien
ttgaaattagggaatgtgatgtgtc

SEQ ID NO: 3444984 - DNA, 25 bp, Homo sapien
acagacatccggtgaggcagaggct

SEQ ID NO: 3444985 - DNA, 25 bp, Homo sapien
tcagcagaacagatagcccattagc

SEQ ID NO: 3444986 - DNA, 25 bp, Homo sapien
tgagaacatacccaggccaacctgg

SEQ ID NO: 3444987 - DNA, 25 bp, Homo sapien
aatgtggaacatacgctctaggagg

SEQ ID NO: 3444988 - DNA, 25 bp, Homo sapien
gactaggtgattgggtactgttata

SEQ ID NO: 3444989 - DNA, 25 bp, Homo sapien
ttaaatctcctaccatgattatgca

SEQ ID NO: 3444990 - DNA, 25 bp, Homo sapien
tcccttagagactaggtgattgggt

SEQ ID NO: 3444991 - DNA, 25 bp, Homo sapien
gtactgttatagtttcggtgccgca

SEQ ID NO: 3444992 - DNA, 25 bp, Homo sapien
atcctcccatagagctttttgttca

SEQ ID NO: 3444993 - DNA, 25 bp, Homo sapien
tcctcccatagagctttttgttcat

SEQ ID NO: 3444994 - DNA, 25 bp, Homo sapien
catcctcccatagagctttttgttc

SEQ ID NO: 3444995 - DNA, 25 bp, Homo sapien
aacccttgggttttgatctcatgag

SEQ ID NO: 3444996 - DNA, 25 bp, Homo sapien
gcggtgacctttactgagatgggac

SEQ ID NO: 3444997 - DNA, 25 bp, Homo sapien
gaaacagtgtttctcgatctcccct

SEQ ID NO: 3444998 - DNA, 25 bp, Homo sapien
taaaaatcagcttcgactatgccaa

SEQ ID NO: 3444999 - DNA, 25 bp, Homo sapien
agtatctgacagtagcggcttcgtg

SEQ ID NO: 3445000 - DNA, 25 bp, Homo sapien
ggtcgtttgtgtcccctctcgagga

SEQ ID NO: 3445001 - DNA, 25 bp, Homo sapien
ttagtattattagtcggcggccaaa

SEQ ID NO: 3445002 - DNA, 25 bp, Homo sapien
tctcgaggattacgggcctggacct

SEQ ID NO: 3445003 - DNA, 25 bp, Homo sapien
tagtgtagctgatctatctgaggtc

SEQ ID NO: 3445004 - DNA, 25 bp, Homo sapien
gtcacactaacacctttatcctgca

SEQ ID NO: 3445005 - DNA, 25 bp, Homo sapien
ggctatctagtgtagctgatctatc

SEQ ID NO: 3445006 - DNA, 25 bp, Homo sapien
gatctatctgaggtcacactaacac

SEQ ID NO: 3445007 - DNA, 25 bp, Homo sapien
gcgaaggagcggtgggccacgaacc

SEQ ID NO: 3445008 - DNA, 25 bp, Homo sapien
aacgcagagcgtggacggtggcggc

SEQ ID NO: 3445009 - DNA, 25 bp, Homo sapien
acgcagagcgtggacggtggcggca

SEQ ID NO: 3445010 - DNA, 25 bp, Homo sapien
acaacgcagagcgtggacggtggcg

SEQ ID NO: 3445011 - DNA, 25 bp, Homo sapien
ctacaacgcagagcgtggacggtgg

SEQ ID NO: 3445012 - DNA, 25 bp, Homo sapien
tacctgataaaaagggccccacata

SEQ ID NO: 3445013 - DNA, 25 bp, Homo sapien
acatacactggcggcgatggcgctc

SEQ ID NO: 3445014 - DNA, 25 bp, Homo sapien
cttcagccaagctctaagcacttac

SEQ ID NO: 3445015 - DNA, 25 bp, Homo sapien
tcatcttcagccaagctctaagcac

SEQ ID NO: 3445016 - DNA, 25 bp, Homo sapien
acatcatcttcagccaagctctaag

SEQ ID NO: 3445017 - DNA, 25 bp, Homo sapien
cacatcatcttcagccaagctctaa

SEQ ID NO: 3445018 - DNA, 25 bp, Homo sapien
tgtaaagtttaactatgtttctgga

SEQ ID NO: 3445019 - DNA, 25 bp, Homo sapien
tggagctgctcaactaccaagaatt

SEQ ID NO: 3445020 - DNA, 25 bp, Homo sapien
tcagtaactcatagtgtatttataa

SEQ ID NO: 3445021 - DNA, 25 bp, Homo sapien
aatccataatatttcagtaactcat

SEQ ID NO: 3445022 - DNA, 25 bp, Homo sapien
tgctctgaggtactactgcctctgc

SEQ ID NO: 3445023 - DNA, 25 bp, Homo sapien
tggttctcccactatggtaggaccc

SEQ ID NO: 3445024 - DNA, 25 bp, Homo sapien
ttgactaccttctcatgctctgagg

SEQ ID NO: 3445025 - DNA, 25 bp, Homo sapien
cagcattgtggcttgtcatgtcagc

SEQ ID NO: 3445026 - DNA, 25 bp, Homo sapien
ctttcccaggagacgcttcatttag

SEQ ID NO: 3445027 - DNA, 25 bp, Homo sapien
tattacccagagttaattgtggcca

SEQ ID NO: 3445028 - DNA, 25 bp, Homo sapien
tcctttcctgctagaagagatcagt

SEQ ID NO: 3445029 - DNA, 25 bp, Homo sapien
tatgtttccggaccctatctgtgaa

SEQ ID NO: 3445030 - DNA, 25 bp, Homo sapien
caaagtagaggtcaattgtcagcat

SEQ ID NO: 3445031 - DNA, 25 bp, Homo sapien
ggtagtcttggcttatcagaaggct

SEQ ID NO: 3445032 - DNA, 25 bp, Homo sapien
ctctctgggaggtttagtagctctc

SEQ ID NO: 3445033 - DNA, 25 bp, Homo sapien
tcagatctggtaggactctctggga

SEQ ID NO: 3445034 - DNA, 25 bp, Homo sapien
tttgaagccacaagaaattagagcc

SEQ ID NO: 3445035 - DNA, 25 bp, Homo sapien
cattctgaaattctccgcagggccc

SEQ ID NO: 3445036 - DNA, 25 bp, Homo sapien
taaataagatatgctggcccacccc

SEQ ID NO: 3445037 - DNA, 25 bp, Homo sapien
aattagagccacgtgccaagggtga

SEQ ID NO: 3445038 - DNA, 25 bp, Homo sapien
tgcaaggcactatgaattcagagac

SEQ ID NO: 3445039 - DNA, 25 bp, Homo sapien
gaaccctgtttgtcctagtgctgag

SEQ ID NO: 3445040 - DNA, 25 bp, Homo sapien
caactctgcttttccggatgaaccc

SEQ ID NO: 3445041 - DNA, 25 bp, Homo sapien
catgtgagcgtcatagagtgaacac

SEQ ID NO: 3445042 - DNA, 25 bp, Homo sapien
agttgttctcaaccctgattacatg

SEQ ID NO: 3445043 - DNA, 25 bp, Homo sapien
gagctgagtatggaactaagtcttc

SEQ ID NO: 3445044 - DNA, 25 bp, Homo sapien
tcaaggtctcacaagtggaaagtgg

SEQ ID NO: 3445045 - DNA, 25 bp, Homo sapien
gattacatgttggactcacttatgg

SEQ ID NO: 3445046 - DNA, 25 bp, Homo sapien
ctccaaattctatcttccccaggac

SEQ ID NO: 3445047 - DNA, 25 bp, Homo sapien
tccaaattctatcttccccaggacc

SEQ ID NO: 3445048 - DNA, 25 bp, Homo sapien
ccaaattctatcttccccaggacca

SEQ ID NO: 3445049 - DNA, 25 bp, Homo sapien
caaattctatcttccccaggaccat

SEQ ID NO: 3445050 - DNA, 25 bp, Homo sapien
ccagcccagctgaatcgagcggagc

SEQ ID NO: 3445051 - DNA, 25 bp, Homo sapien
agcccagcccagctgaatcgagcgg

SEQ ID NO: 3445052 - DNA, 25 bp, Homo sapien
agcccagctgaatcgagcggagccg

SEQ ID NO: 3445053 - DNA, 25 bp, Homo sapien
gaatcgagcggagccggtggagcag

SEQ ID NO: 3445054 - DNA, 25 bp, Homo sapien
ttagaagggactcctctatactcat

SEQ ID NO: 3445055 - DNA, 25 bp, Homo sapien
cttagaagggactcctctatactca

SEQ ID NO: 3445056 - DNA, 25 bp, Homo sapien
tcttagaagggactcctctatactc

SEQ ID NO: 3445057 - DNA, 25 bp, Homo sapien
taattatgacccgaaagagacaccg

SEQ ID NO: 3445058 - DNA, 25 bp, Homo sapien
tagaggcactactagtctgggccgt

SEQ ID NO: 3445059 - DNA, 25 bp, Homo sapien
aggtaatactacctcctagggagca

SEQ ID NO: 3445060 - DNA, 25 bp, Homo sapien
aattgggaggcactactagaggcac

SEQ ID NO: 3445061 - DNA, 25 bp, Homo sapien
aggcaccaggatttaaatagtacct

SEQ ID NO: 3445062 - DNA, 25 bp, Homo sapien
caatggtaatagcttgaagaaaggc

SEQ ID NO: 3445063 - DNA, 25 bp, Homo sapien
taaatagtacctggtacttaaagca

SEQ ID NO: 3445064 - DNA, 25 bp, Homo sapien
tatgcaatggtaatagcttgaagaa

SEQ ID NO: 3445065 - DNA, 25 bp, Homo sapien
acaggctaggttccttgtagcatgt

SEQ ID NO: 3445066 - DNA, 25 bp, Homo sapien
cacaggctaggttccttgtagcatg

SEQ ID NO: 3445067 - DNA, 25 bp, Homo sapien
caggctaggttccttgtagcatgtg

SEQ ID NO: 3445068 - DNA, 25 bp, Homo sapien
tcacaggctaggttccttgtagcat

SEQ ID NO: 3445069 - DNA, 25 bp, Homo sapien
ttaaataccgatggctgcatctcct

SEQ ID NO: 3445070 - DNA, 25 bp, Homo sapien
gctgattgaagcttcttcaggaaca

SEQ ID NO: 3445071 - DNA, 25 bp, Homo sapien
tcaggaacaggatccaggtctgcag

SEQ ID NO: 3445072 - DNA, 25 bp, Homo sapien
catctcctgtctctaagctgattga

SEQ ID NO: 3445073 - DNA, 25 bp, Homo sapien
attacagttggataagggttgtagt

SEQ ID NO: 3445074 - DNA, 25 bp, Homo sapien
ttggataagggttgtagtagaggcc

SEQ ID NO: 3445075 - DNA, 25 bp, Homo sapien
agggttgtagtagaggcctttccat

SEQ ID NO: 3445076 - DNA, 25 bp, Homo sapien
acagttggataagggttgtagtaga

SEQ ID NO: 3445077 - DNA, 25 bp, Homo sapien
tagttaaagtcataagcctgatttg

SEQ ID NO: 3445078 - DNA, 25 bp, Homo sapien
ttagttaaagtcataagcctgattt

SEQ ID NO: 3445079 - DNA, 25 bp, Homo sapien
aaagtcataagcctgatttgctgtg

SEQ ID NO: 3445080 - DNA, 25 bp, Homo sapien
tcccgctacgaggaggcacagcaaa

SEQ ID NO: 3445081 - DNA, 25 bp, Homo sapien
gaggcacagcaaagcggcgcccagt

SEQ ID NO: 3445082 - DNA, 25 bp, Homo sapien
aggcacagcaaagcggcgcccagtt

SEQ ID NO: 3445083 - DNA, 25 bp, Homo sapien
cctgtcccgctacgaggaggcacag

SEQ ID NO: 3445084 - DNA, 25 bp, Homo sapien
ctcagacgccgggcgattcgagaga

SEQ ID NO: 3445085 - DNA, 25 bp, Homo sapien
tcagacgccgggcgattcgagagac

SEQ ID NO: 3445086 - DNA, 25 bp, Homo sapien
caggtaaggtgaggcgggcggcgcc

SEQ ID NO: 3445087 - DNA, 25 bp, Homo sapien
cgggaggaggcgccaggtaaggtga

SEQ ID NO: 3445088 - DNA, 25 bp, Homo sapien
ggaggaggcgccaggtaaggtgagg

SEQ ID NO: 3445089 - DNA, 25 bp, Homo sapien
ctgggcgggaggaggcgccaggtaa

SEQ ID NO: 3445090 - DNA, 25 bp, Homo sapien
tatttcgcgttgcggggccgggcgc

SEQ ID NO: 3445091 - DNA, 25 bp, Homo sapien
gacaacgagctcatagatgcggtgg

SEQ ID NO: 3445092 - DNA, 25 bp, Homo sapien
tgttggccagtcagctaagtaggga

SEQ ID NO: 3445093 - DNA, 25 bp, Homo sapien
gaaagtgaagcggtagctcgcgcac

SEQ ID NO: 3445094 - DNA, 25 bp, Homo sapien
tagtagaagacgacacaggcaagga

SEQ ID NO: 3445095 - DNA, 25 bp, Homo sapien
cagaggaccccgtgaaggagagaat

SEQ ID NO: 3445096 - DNA, 25 bp, Homo sapien
gaatcttaaggtgctctggttgctg

SEQ ID NO: 3445097 - DNA, 25 bp, Homo sapien
gttagagacgtagaccagaggaccc

SEQ ID NO: 3445098 - DNA, 25 bp, Homo sapien
caaaatctgagtgtccccttgctgg

SEQ ID NO: 3445099 - DNA, 25 bp, Homo sapien
gatgagtgttgggaagtattttctg

SEQ ID NO: 3445100 - DNA, 25 bp, Homo sapien
gtaagatgagtgttgggaagtattt

SEQ ID NO: 3445101 - DNA, 25 bp, Homo sapien
actctggtaagatgagtgttgggaa

SEQ ID NO: 3445102 - DNA, 25 bp, Homo sapien
aagatgagtgttgggaagtattttc

SEQ ID NO: 3445103 - DNA, 25 bp, Homo sapien
ccacagaagaggaagatggggagaa

SEQ ID NO: 3445104 - DNA, 25 bp, Homo sapien
gaccacagaagaggaagatggggag

SEQ ID NO: 3445105 - DNA, 25 bp, Homo sapien
acagaagaggaagatggggagaaat

SEQ ID NO: 3445106 - DNA, 25 bp, Homo sapien
catggaccacagaagaggaagatgg

SEQ ID NO: 3445107 - DNA, 25 bp, Homo sapien
ggcaggccttccttcaatacttcct

SEQ ID NO: 3445108 - DNA, 25 bp, Homo sapien
ctaaggaatagcaggcaggccttcc

SEQ ID NO: 3445109 - DNA, 25 bp, Homo sapien
actctgatctgggtagcctattgct

SEQ ID NO: 3445110 - DNA, 25 bp, Homo sapien
tttgtccgtgcacacagtctcttct

SEQ ID NO: 3445111 - DNA, 25 bp, Homo sapien
ccaccttgtttcgttttgatacgtg

SEQ ID NO: 3445112 - DNA, 25 bp, Homo sapien
tgaagccctgggacttcttcgaaaa

SEQ ID NO: 3445113 - DNA, 25 bp, Homo sapien
gtacgggacactcctctcggatgca

SEQ ID NO: 3445114 - DNA, 25 bp, Homo sapien
ctgtacccctttcaaatgtatcctg

SEQ ID NO: 3445115 - DNA, 25 bp, Homo sapien
gatggaggttgcagacacatagtac

SEQ ID NO: 3445116 - DNA, 25 bp, Homo sapien
gagaaactattagacttaagacact

SEQ ID NO: 3445117 - DNA, 25 bp, Homo sapien
tttaacattattctggaagtgctca

SEQ ID NO: 3445118 - DNA, 25 bp, Homo sapien
ccttccgctattgaaagggatggag

SEQ ID NO: 3445119 - DNA, 25 bp, Homo sapien
gggaccagtctcctgaaggaatccc

SEQ ID NO: 3445120 - DNA, 25 bp, Homo sapien
ggctgatttcaggacccaaggtcgt

SEQ ID NO: 3445121 - DNA, 25 bp, Homo sapien
cagcaccaaatgttacatgcgtccg

SEQ ID NO: 3445122 - DNA, 25 bp, Homo sapien
gttccttgggctgatttcaggaccc

SEQ ID NO: 3445123 - DNA, 25 bp, Homo sapien
gaatggctgctgggcaagttggaca

SEQ ID NO: 3445124 - DNA, 25 bp, Homo sapien
ggaatggctgctgggcaagttggac

SEQ ID NO: 3445125 - DNA, 25 bp, Homo sapien
gtagcagttacctgaagtgtctgtg

SEQ ID NO: 3445126 - DNA, 25 bp, Homo sapien
actgtagcagttacctgaagtgtct

SEQ ID NO: 3445127 - DNA, 25 bp, Homo sapien
atgcagttttgtacgaattgagaaa

SEQ ID NO: 3445128 - DNA, 25 bp, Homo sapien
tggatgcagttttgtacgaattgag

SEQ ID NO: 3445129 - DNA, 25 bp, Homo sapien
gtttctcagggttgctttgagtgag

SEQ ID NO: 3445130 - DNA, 25 bp, Homo sapien
ctcagggttgctttgagtgagattg

SEQ ID NO: 3445131 - DNA, 25 bp, Homo sapien
ttttgcctctgtatggcctctttga

SEQ ID NO: 3445132 - DNA, 25 bp, Homo sapien
ccatgccccgcagggaagtctaatt

SEQ ID NO: 3445133 - DNA, 25 bp, Homo sapien
tgtctacctactgcctattggtgtt

SEQ ID NO: 3445134 - DNA, 25 bp, Homo sapien
attcctcagattaggagttttagtc

SEQ ID NO: 3445135 - DNA, 25 bp, Homo sapien
tggagctgtgtcaaaagaaaatcaa

SEQ ID NO: 3445136 - DNA, 25 bp, Homo sapien
atcatatagtgcataacttgtggcc

SEQ ID NO: 3445137 - DNA, 25 bp, Homo sapien
gcagttaatcatatagtgcataact

SEQ ID NO: 3445138 - DNA, 25 bp, Homo sapien
ctggtggccttggagctgtgtcaaa

SEQ ID NO: 3445139 - DNA, 25 bp, Homo sapien
gaatggcgagaccaatatgagagta

SEQ ID NO: 3445140 - DNA, 25 bp, Homo sapien
gaaactgaggaatggcgagaccaat

SEQ ID NO: 3445141 - DNA, 25 bp, Homo sapien
ccaatatgagagtacaggaagatat

SEQ ID NO: 3445142 - DNA, 25 bp, Homo sapien
ctggcttgccaagaaatgttgcagg

SEQ ID NO: 3445143 - DNA, 25 bp, Homo sapien
cctgaagtgcgctgtttctagaatc

SEQ ID NO: 3445144 - DNA, 25 bp, Homo sapien
ctgggtcacggagagctgatttccc

SEQ ID NO: 3445145 - DNA, 25 bp, Homo sapien
ggtcacaggtctcccttggcccagg

SEQ ID NO: 3445146 - DNA, 25 bp, Homo sapien
tcaggatctgttgcgctgctgggta

SEQ ID NO: 3445147 - DNA, 25 bp, Homo sapien
tcgtcttcggcagcagtttggtccc

SEQ ID NO: 3445148 - DNA, 25 bp, Homo sapien
gacatttacatagagccattagctg

SEQ ID NO: 3445149 - DNA, 25 bp, Homo sapien
gtgatgatctcaagccctgcctgta

SEQ ID NO: 3445150 - DNA, 25 bp, Homo sapien
tatcttccacctaggtagctggcca

SEQ ID NO: 3445151 - DNA, 25 bp, Homo sapien
gcgaagggaggtagcctagggcgcc

SEQ ID NO: 3445152 - DNA, 25 bp, Homo sapien
cgggacgagcgggaggctcccgagc

SEQ ID NO: 3445153 - DNA, 25 bp, Homo sapien
ctcccgagcggcacacttaagaagt

SEQ ID NO: 3445154 - DNA, 25 bp, Homo sapien
aggcccgagtccgaagtccgcagcc

SEQ ID NO: 3445155 - DNA, 25 bp, Homo sapien
ctccgtcgccgcctgagcgggttgc

SEQ ID NO: 3445156 - DNA, 25 bp, Homo sapien
cctgagcgggttgcgggctccggct

SEQ ID NO: 3445157 - DNA, 25 bp, Homo sapien
ccgcctgagcgggttgcgggctccg

SEQ ID NO: 3445158 - DNA, 25 bp, Homo sapien
cgtcgccgcctgagcgggttgcggg

SEQ ID NO: 3445159 - DNA, 25 bp, Homo sapien
catgcacaagcgagaagaagtagac

SEQ ID NO: 3445160 - DNA, 25 bp, Homo sapien
gactcggatgggattcttgcaagcg

SEQ ID NO: 3445161 - DNA, 25 bp, Homo sapien
gaaggtggctagaaactccaggacg

SEQ ID NO: 3445162 - DNA, 25 bp, Homo sapien
tcctctcgctgacgtgatactgggt

SEQ ID NO: 3445163 - DNA, 25 bp, Homo sapien
gtgccaagtatttggtgagaatgac

SEQ ID NO: 3445164 - DNA, 25 bp, Homo sapien
aggctctggaagtgccaagtatttg

SEQ ID NO: 3445165 - DNA, 25 bp, Homo sapien
agcctcatgtcatagaggctctgga

SEQ ID NO: 3445166 - DNA, 25 bp, Homo sapien
cctcatgtcatagaggctctggaag

SEQ ID NO: 3445167 - DNA, 25 bp, Homo sapien
cagtaagagtatccgaaacgatcta

SEQ ID NO: 3445168 - DNA, 25 bp, Homo sapien
tcagtaagagtatccgaaacgatct

SEQ ID NO: 3445169 - DNA, 25 bp, Homo sapien
taagagtatccgaaacgatctatac

SEQ ID NO: 3445170 - DNA, 25 bp, Homo sapien
gagtatccgaaacgatctataccac

SEQ ID NO: 3445171 - DNA, 25 bp, Homo sapien
caacttcaggttaatcaagagaggg

SEQ ID NO: 3445172 - DNA, 25 bp, Homo sapien
gtattgaaaaatccaactgtagtta

SEQ ID NO: 3445173 - DNA, 25 bp, Homo sapien
tagcataactctttttgcagtgaca

SEQ ID NO: 3445174 - DNA, 25 bp, Homo sapien
taaagagctaaaccatagcataact

SEQ ID NO: 3445175 - DNA, 25 bp, Homo sapien
taaatacagctcctgttagacttcc

SEQ ID NO: 3445176 - DNA, 25 bp, Homo sapien
aaacacatgaaatgtagcgaaagtg

SEQ ID NO: 3445177 - DNA, 25 bp, Homo sapien
gaaatgtagcgaaagtgccaaagct

SEQ ID NO: 3445178 - DNA, 25 bp, Homo sapien
actgagggaatgcttcatcaaaaca

SEQ ID NO: 3445179 - DNA, 25 bp, Homo sapien
actcgttgcttttttggtgctcaga

SEQ ID NO: 3445180 - DNA, 25 bp, Homo sapien
tttatctggagctcacaaatgtgaa

SEQ ID NO: 3445181 - DNA, 25 bp, Homo sapien
tattatttcaggcatgttagctacc

SEQ ID NO: 3445182 - DNA, 25 bp, Homo sapien
tgaagggaagtaagcactcgttgct

SEQ ID NO: 3445183 - DNA, 25 bp, Homo sapien
cacctcctgagttcaggtgaatctc

SEQ ID NO: 3445184 - DNA, 25 bp, Homo sapien
acctcctgagttcaggtgaatctcc

SEQ ID NO: 3445185 - DNA, 25 bp, Homo sapien
ccacctcctgagttcaggtgaatct

SEQ ID NO: 3445186 - DNA, 25 bp, Homo sapien
tttattaattgtatggttgttatgc

SEQ ID NO: 3445187 - DNA, 25 bp, Homo sapien
tattaattgtatggttgttatgcag

SEQ ID NO: 3445188 - DNA, 25 bp, Homo sapien
attaattgtatggttgttatgcagc

SEQ ID NO: 3445189 - DNA, 25 bp, Homo sapien
ttattaattgtatggttgttatgca

SEQ ID NO: 3445190 - DNA, 25 bp, Homo sapien
ggactgtcctgtatgttagtctgag

SEQ ID NO: 3445191 - DNA, 25 bp, Homo sapien
taaaatctttatcacatccagctgg

SEQ ID NO: 3445192 - DNA, 25 bp, Homo sapien
gaatccagtgcagccggtgttttcc

SEQ ID NO: 3445193 - DNA, 25 bp, Homo sapien
tcttaactgagaagtacagaatacc

SEQ ID NO: 3445194 - DNA, 25 bp, Homo sapien
aggtggtggctgaaagtatcctctc

SEQ ID NO: 3445195 - DNA, 25 bp, Homo sapien
cagttctgtaagttgacgccttgta

SEQ ID NO: 3445196 - DNA, 25 bp, Homo sapien
tcatttgggtgacacttgatacaca

SEQ ID NO: 3445197 - DNA, 25 bp, Homo sapien
cttaaaatgtaggaaatcgcttgca

SEQ ID NO: 3445198 - DNA, 25 bp, Homo sapien
ccagtacaagagcttccccagtttc

SEQ ID NO: 3445199 - DNA, 25 bp, Homo sapien
tctgtactagccactgtcctgagtt

SEQ ID NO: 3445200 - DNA, 25 bp, Homo sapien
tgatgtttggtaccactcagcccag

SEQ ID NO: 3445201 - DNA, 25 bp, Homo sapien
tctgagtctgttaacaataggcaag

SEQ ID NO: 3445202 - DNA, 25 bp, Homo sapien
gagagagctcctttcgccatgtttt

SEQ ID NO: 3445203 - DNA, 25 bp, Homo sapien
ctgggtaccctctgagtaggcctat

SEQ ID NO: 3445204 - DNA, 25 bp, Homo sapien
tataattcctaccttgactgtgtgc

SEQ ID NO: 3445205 - DNA, 25 bp, Homo sapien
atgcacaggagcttggtagactgcg

SEQ ID NO: 3445206 - DNA, 25 bp, Homo sapien
tgcaatcggctcaccgaatcctccg

SEQ ID NO: 3445207 - DNA, 25 bp, Homo sapien
aataattaagagtagtttatgcaac

SEQ ID NO: 3445208 - DNA, 25 bp, Homo sapien
taaataattaagagtagtttatgca

SEQ ID NO: 3445209 - DNA, 25 bp, Homo sapien
ttaaaattgtacatgctttaaaaga

SEQ ID NO: 3445210 - DNA, 25 bp, Homo sapien
ccttgaactactggaccaaagctgt

SEQ ID NO: 3445211 - DNA, 25 bp, Homo sapien
gccttgaactactggaccaaagctg

SEQ ID NO: 3445212 - DNA, 25 bp, Homo sapien
aatactgtggcgttttgtgtaccca

SEQ ID NO: 3445213 - DNA, 25 bp, Homo sapien
gaggcaatgttcactgcaatgtgcg

SEQ ID NO: 3445214 - DNA, 25 bp, Homo sapien
caatgtgcgaatgccaggccttgca

SEQ ID NO: 3445215 - DNA, 25 bp, Homo sapien
ggaaaatcccacgagccatgaagag

SEQ ID NO: 3445216 - DNA, 25 bp, Homo sapien
gagccgactgtggaggacttttaaa

SEQ ID NO: 3445217 - DNA, 25 bp, Homo sapien
cgttgcccttaacgcacggtctggt

SEQ ID NO: 3445218 - DNA, 25 bp, Homo sapien
ggaacacccttaactcgacacagac

SEQ ID NO: 3445219 - DNA, 25 bp, Homo sapien
tgggatacgtagtttcagagccgac

SEQ ID NO: 3445220 - DNA, 25 bp, Homo sapien
gcagcttgcacgtcatgctcatgaa

SEQ ID NO: 3445221 - DNA, 25 bp, Homo sapien
ccggtacaagttagaaagtgtgcta

SEQ ID NO: 3445222 - DNA, 25 bp, Homo sapien
gaacagccagaacatagttattggg

SEQ ID NO: 3445223 - DNA, 25 bp, Homo sapien
taaggactgaatacttgcctcgtgc

SEQ ID NO: 3445224 - DNA, 25 bp, Homo sapien
ctttttccaggttcatggtccttgg

SEQ ID NO: 3445225 - DNA, 25 bp, Homo sapien
tgcattccgaatctgtgagggccca

SEQ ID NO: 3445226 - DNA, 25 bp, Homo sapien
caccagcgggccagttattaaaagc

SEQ ID NO: 3445227 - DNA, 25 bp, Homo sapien
gaagtgaccagttctgaactttgaa

SEQ ID NO: 3445228 - DNA, 25 bp, Homo sapien
caaacttgcttgaaaggaggtcaac

SEQ ID NO: 3445229 - DNA, 25 bp, Homo sapien
tattttgcaagtacacagcatgatc

SEQ ID NO: 3445230 - DNA, 25 bp, Homo sapien
tgttctgcataaggaataacctcta

SEQ ID NO: 3445231 - DNA, 25 bp, Homo sapien
tcttgccttccatctttagtcatag

SEQ ID NO: 3445232 - DNA, 25 bp, Homo sapien
aaggatagtcaagtgaagccctggg

SEQ ID NO: 3445233 - DNA, 25 bp, Homo sapien
gatagtcaagtgaagccctgggagt

SEQ ID NO: 3445234 - DNA, 25 bp, Homo sapien
agttgtaaataccacagcactcaca

SEQ ID NO: 3445235 - DNA, 25 bp, Homo sapien
aataccacagcactcacaccagccc

SEQ ID NO: 3445236 - DNA, 25 bp, Homo sapien
gacttttcttgataaggacgcacaa

SEQ ID NO: 3445237 - DNA, 25 bp, Homo sapien
caaaactaagaaggataagcgccca

SEQ ID NO: 3445238 - DNA, 25 bp, Homo sapien
tgagtccaataccagaagaagttcc

SEQ ID NO: 3445239 - DNA, 25 bp, Homo sapien
taagcgcccaccaatcctagaatgt

SEQ ID NO: 3445240 - DNA, 25 bp, Homo sapien
gcctctgggatagtcagccaacgtt

SEQ ID NO: 3445241 - DNA, 25 bp, Homo sapien
tagggacttggtactcaaccgagca

SEQ ID NO: 3445242 - DNA, 25 bp, Homo sapien
tacccactgggaactgctaatctac

SEQ ID NO: 3445243 - DNA, 25 bp, Homo sapien
gaaaaacgtaacactgtcagccaga

SEQ ID NO: 3445244 - DNA, 25 bp, Homo sapien
tcagacaccttgaccatggataatg

SEQ ID NO: 3445245 - DNA, 25 bp, Homo sapien
tctgccagtgaacctttacgcttcc

SEQ ID NO: 3445246 - DNA, 25 bp, Homo sapien
gacagccatgtgaagacctttaaaa

SEQ ID NO: 3445247 - DNA, 25 bp, Homo sapien
cacaaatttagtacctgcacctcta

SEQ ID NO: 3445248 - DNA, 25 bp, Homo sapien
tgttacatggctcttacagtgctct

SEQ ID NO: 3445249 - DNA, 25 bp, Homo sapien
cttccctgttacatggctcttacag

SEQ ID NO: 3445250 - DNA, 25 bp, Homo sapien
catggctcttacagtgctctcgtct

SEQ ID NO: 3445251 - DNA, 25 bp, Homo sapien
tcttacagtgctctcgtctttctcc

SEQ ID NO: 3445252 - DNA, 25 bp, Homo sapien
taagaaactaataaggctcagggat

SEQ ID NO: 3445253 - DNA, 25 bp, Homo sapien
tatttagtggttcccctagactctg

SEQ ID NO: 3445254 - DNA, 25 bp, Homo sapien
cacagaccaatagtggtcatcccca

SEQ ID NO: 3445255 - DNA, 25 bp, Homo sapien
tacttagtagcagtcttgagtcctg

SEQ ID NO: 3445256 - DNA, 25 bp, Homo sapien
gtccctcagagtgtttgtatcctac

SEQ ID NO: 3445257 - DNA, 25 bp, Homo sapien
gggcgaatgataagacaatggtcct

SEQ ID NO: 3445258 - DNA, 25 bp, Homo sapien
tttgatcattttaggcctggtgcag

SEQ ID NO: 3445259 - DNA, 25 bp, Homo sapien
tcaaatatgttagagaacgctgcag

SEQ ID NO: 3445260 - DNA, 25 bp, Homo sapien
gcaggagactatccatagctgtttt

SEQ ID NO: 3445261 - DNA, 25 bp, Homo sapien
tgatgcgagaaggtatagtcatgtc

SEQ ID NO: 3445262 - DNA, 25 bp, Homo sapien
ctttttggaagattggtttgattgc

SEQ ID NO: 3445263 - DNA, 25 bp, Homo sapien
tagctgtttttctgatgcgagaagg

SEQ ID NO: 3445264 - DNA, 25 bp, Homo sapien
tcctgacgcacaccattatgcctgg

SEQ ID NO: 3445265 - DNA, 25 bp, Homo sapien
taatcaagtgcttcactggtctgtg

SEQ ID NO: 3445266 - DNA, 25 bp, Homo sapien
agcagcctccataaagtgtatttga

SEQ ID NO: 3445267 - DNA, 25 bp, Homo sapien
tttgtcctttgccagaaagcagtga

SEQ ID NO: 3445268 - DNA, 25 bp, Homo sapien
tatagtcatagtcatataagaactt

SEQ ID NO: 3445269 - DNA, 25 bp, Homo sapien
ctttttctactgattctattaccag

SEQ ID NO: 3445270 - DNA, 25 bp, Homo sapien
tcccattcagtatcagactttagaa

SEQ ID NO: 3445271 - DNA, 25 bp, Homo sapien
tcttgaacatatggattatagtcat

SEQ ID NO: 3445272 - DNA, 25 bp, Homo sapien
ttgtcttcttcgaccaagtgcccag

SEQ ID NO: 3445273 - DNA, 25 bp, Homo sapien
ggttgtcttcttcgaccaagtgccc

SEQ ID NO: 3445274 - DNA, 25 bp, Homo sapien
gttgtcttcttcgaccaagtgccca

SEQ ID NO: 3445275 - DNA, 25 bp, Homo sapien
caccgaaattgaatcactctaacga

SEQ ID NO: 3445276 - DNA, 25 bp, Homo sapien
tcaccgaaattgaatcactctaacg

SEQ ID NO: 3445277 - DNA, 25 bp, Homo sapien
ggcttaggcgaagaagtcgtctccc

SEQ ID NO: 3445278 - DNA, 25 bp, Homo sapien
tattggtgttcgcaagtggtgctcc

SEQ ID NO: 3445279 - DNA, 25 bp, Homo sapien
ttcatcttggcagccgggcttaggc

SEQ ID NO: 3445280 - DNA, 25 bp, Homo sapien
aaataataggcgagcatctccccac

SEQ ID NO: 3445281 - DNA, 25 bp, Homo sapien
tgcctgagttgccgttccctgagct

SEQ ID NO: 3445282 - DNA, 25 bp, Homo sapien
tccctgagctggagcgggtgctgca

SEQ ID NO: 3445283 - DNA, 25 bp, Homo sapien
acgtcggcaacggagaaggtaagcg

SEQ ID NO: 3445284 - DNA, 25 bp, Homo sapien
tgctactctccgctcttcacaggcg

SEQ ID NO: 3445285 - DNA, 25 bp, Homo sapien
gtattgtgggatcgcggagccgtcc

SEQ ID NO: 3445286 - DNA, 25 bp, Homo sapien
agacgctgggatccgcagaggagcc

SEQ ID NO: 3445287 - DNA, 25 bp, Homo sapien
cagaggagcccacttgagagcgcct

SEQ ID NO: 3445288 - DNA, 25 bp, Homo sapien
tcggttctcgactgctccgggccgc

SEQ ID NO: 3445289 - DNA, 25 bp, Homo sapien
cctccgggaatacgccctgcagttg

SEQ ID NO: 3445290 - DNA, 25 bp, Homo sapien
ccctgcagttgaacagcgcccgagg

SEQ ID NO: 3445291 - DNA, 25 bp, Homo sapien
cattggccattgttctcgagaagtc

SEQ ID NO: 3445292 - DNA, 25 bp, Homo sapien
tcccagcgctgcttcgggatctgcg

SEQ ID NO: 3445293 - DNA, 25 bp, Homo sapien
ctcaaagttgcgttcccaaacggcg

SEQ ID NO: 3445294 - DNA, 25 bp, Homo sapien
aagttgcgttcccaaacggcgcagt

SEQ ID NO: 3445295 - DNA, 25 bp, Homo sapien
tctcctcaaagttgcgttcccaaac

SEQ ID NO: 3445296 - DNA, 25 bp, Homo sapien
tgcgttcccaaacggcgcagtgctc

SEQ ID NO: 3445297 - DNA, 25 bp, Homo sapien
agcctcccaaggattcccggctaat

SEQ ID NO: 3445298 - DNA, 25 bp, Homo sapien
catcagcctcccaaggattcccggc

SEQ ID NO: 3445299 - DNA, 25 bp, Homo sapien
tggaactgcagagctcaggtgatgc

SEQ ID NO: 3445300 - DNA, 25 bp, Homo sapien
tcagcctcccaaggattcccggcta

SEQ ID NO: 3445301 - DNA, 25 bp, Homo sapien
tttaagatagagcttgttttacttc

SEQ ID NO: 3445302 - DNA, 25 bp, Homo sapien
cagaataacacaggatttttgagta

SEQ ID NO: 3445303 - DNA, 25 bp, Homo sapien
tcattgctaatgtacagaataacac

SEQ ID NO: 3445304 - DNA, 25 bp, Homo sapien
gtgcttgcctatttgttctaatagc

SEQ ID NO: 3445305 - DNA, 25 bp, Homo sapien
tggaatctgtacttcaacttaaagg

SEQ ID NO: 3445306 - DNA, 25 bp, Homo sapien
taaaggtattggcatcttatcaata

SEQ ID NO: 3445307 - DNA, 25 bp, Homo sapien
gaatttccatattagtattaggatc

SEQ ID NO: 3445308 - DNA, 25 bp, Homo sapien
ttagtattaggatcaacttgtcaat

SEQ ID NO: 3445309 - DNA, 25 bp, Homo sapien
gaccagactggccaacatggtgaaa

SEQ ID NO: 3445310 - DNA, 25 bp, Homo sapien
cccagcacttctgagaggccgaagt

SEQ ID NO: 3445311 - DNA, 25 bp, Homo sapien
tggccaacatggtgaaacctcatct

SEQ ID NO: 3445312 - DNA, 25 bp, Homo sapien
ggatcacttgaggtcaggagttcaa

SEQ ID NO: 3445313 - DNA, 25 bp, Homo sapien
gcgagccaactggtcttggacttcc

SEQ ID NO: 3445314 - DNA, 25 bp, Homo sapien
tgcgagccaactggtcttggacttc

SEQ ID NO: 3445315 - DNA, 25 bp, Homo sapien
cagatgcgagccaactggtcttgga

SEQ ID NO: 3445316 - DNA, 25 bp, Homo sapien
gatgcgagccaactggtcttggact

SEQ ID NO: 3445317 - DNA, 25 bp, Homo sapien
cattataaaaggacaagtatggccc

SEQ ID NO: 3445318 - DNA, 25 bp, Homo sapien
tattgcaggagtagtaggttcatta

SEQ ID NO: 3445319 - DNA, 25 bp, Homo sapien
agtatggccctctcttggtgcttcc

SEQ ID NO: 3445320 - DNA, 25 bp, Homo sapien
gacttccactataggatgatgcagc

SEQ ID NO: 3445321 - DNA, 25 bp, Homo sapien
gcccccatgataaggaagcaatttc

SEQ ID NO: 3445322 - DNA, 25 bp, Homo sapien
tgcccccatgataaggaagcaattt

SEQ ID NO: 3445323 - DNA, 25 bp, Homo sapien
ttgcccccatgataaggaagcaatt

SEQ ID NO: 3445324 - DNA, 25 bp, Homo sapien
tataggttgtattagagccttttac

SEQ ID NO: 3445325 - DNA, 25 bp, Homo sapien
agtccttataggttgtattagagcc

SEQ ID NO: 3445326 - DNA, 25 bp, Homo sapien
tactttgcagtccttataggttgta

SEQ ID NO: 3445327 - DNA, 25 bp, Homo sapien
ccctggccatactttgcagtcctta

SEQ ID NO: 3445328 - DNA, 25 bp, Homo sapien
tctttccactatgtaaggatacaaa

SEQ ID NO: 3445329 - DNA, 25 bp, Homo sapien
ttgctgcaatggacttaatatgtgt

SEQ ID NO: 3445330 - DNA, 25 bp, Homo sapien
gaagttggctgtctgcaaactagaa

SEQ ID NO: 3445331 - DNA, 25 bp, Homo sapien
atatattgaaactctaatcccaatg

SEQ ID NO: 3445332 - DNA, 25 bp, Homo sapien
catagttcttgctaaccttagggag

SEQ ID NO: 3445333 - DNA, 25 bp, Homo sapien
gtttgaaccaacctaagcaacagag

SEQ ID NO: 3445334 - DNA, 25 bp, Homo sapien
gaagggagtaagcatctcattctca

SEQ ID NO: 3445335 - DNA, 25 bp, Homo sapien
ctgtgctaagtgctataatagaggc

SEQ ID NO: 3445336 - DNA, 25 bp, Homo sapien
gatagtgaacagcaagtgactgtca

SEQ ID NO: 3445337 - DNA, 25 bp, Homo sapien
ggcatgctaccttttgcgtatggaa

SEQ ID NO: 3445338 - DNA, 25 bp, Homo sapien
tcatggatgtggatatctctcttgc

SEQ ID NO: 3445339 - DNA, 25 bp, Homo sapien
taattacctacatggagtgaggtgg

SEQ ID NO: 3445340 - DNA, 25 bp, Homo sapien
tggggccagtatcccccttgctgtt

SEQ ID NO: 3445341 - DNA, 25 bp, Homo sapien
gaatggatcatggggccagtatccc

SEQ ID NO: 3445342 - DNA, 25 bp, Homo sapien
tgtatagcacctctctgcttgctct

SEQ ID NO: 3445343 - DNA, 25 bp, Homo sapien
agtgtatagcacctctctgcttgct

SEQ ID NO: 3445344 - DNA, 25 bp, Homo sapien
ccatattagctgcaataatgagagt

SEQ ID NO: 3445345 - DNA, 25 bp, Homo sapien
taatcccgtaataagattcaagtcc

SEQ ID NO: 3445346 - DNA, 25 bp, Homo sapien
gattcaagtccaccatattagctgc

SEQ ID NO: 3445347 - DNA, 25 bp, Homo sapien
tagctgcaataatgagagttatagg

SEQ ID NO: 3445348 - DNA, 25 bp, Homo sapien
gcctacaaccggttcctacaattca

SEQ ID NO: 3445349 - DNA, 25 bp, Homo sapien
gatttctattacaacaccttggcct

SEQ ID NO: 3445350 - DNA, 25 bp, Homo sapien
atgttctaggagatgatagagcaac

SEQ ID NO: 3445351 - DNA, 25 bp, Homo sapien
ccttggccttcacactaagtaatca

SEQ ID NO: 3445352 - DNA, 25 bp, Homo sapien
gagacgttatggagataggaatgaa

SEQ ID NO: 3445353 - DNA, 25 bp, Homo sapien
tatatttatgaaaggcatgggggcc

SEQ ID NO: 3445354 - DNA, 25 bp, Homo sapien
caggaagatgagacgttatggagat

SEQ ID NO: 3445355 - DNA, 25 bp, Homo sapien
cgttatggagataggaatgaaattt

SEQ ID NO: 3445356 - DNA, 25 bp, Homo sapien
cattaagcacactaagagccaatag

SEQ ID NO: 3445357 - DNA, 25 bp, Homo sapien
ggtattacccaacgtgctgttggca

SEQ ID NO: 3445358 - DNA, 25 bp, Homo sapien
agagtctacggtattacccaacgtg

SEQ ID NO: 3445359 - DNA, 25 bp, Homo sapien
caagagaattgtgcctattgagcac

SEQ ID NO: 3445360 - DNA, 25 bp, Homo sapien
tgcacccaatatatgtcctctaggc

SEQ ID NO: 3445361 - DNA, 25 bp, Homo sapien
aggagatgcacccaatatatgtcct

SEQ ID NO: 3445362 - DNA, 25 bp, Homo sapien
tttgccaaaatgacaaatacaaagg

SEQ ID NO: 3445363 - DNA, 25 bp, Homo sapien
ttcctttggccacatggtacatgtg

SEQ ID NO: 3445364 - DNA, 25 bp, Homo sapien
gattgcttgggcctgggaggtcgag

SEQ ID NO: 3445365 - DNA, 25 bp, Homo sapien
gctactcaggagagctgagttggga

SEQ ID NO: 3445366 - DNA, 25 bp, Homo sapien
agctactcaggagagctgagttggg

SEQ ID NO: 3445367 - DNA, 25 bp, Homo sapien
actcaggagagctgagttgggagga

SEQ ID NO: 3445368 - DNA, 25 bp, Homo sapien
tcactcatccctcggccaatcacaa

SEQ ID NO: 3445369 - DNA, 25 bp, Homo sapien
caagagtctgtacacccttctcaac

SEQ ID NO: 3445370 - DNA, 25 bp, Homo sapien
acaagagtctgtacacccttctcaa

SEQ ID NO: 3445371 - DNA, 25 bp, Homo sapien
cctcactcatccctcggccaatcac

SEQ ID NO: 3445372 - DNA, 25 bp, Homo sapien
gggcaaccaaggcattatactcctt

SEQ ID NO: 3445373 - DNA, 25 bp, Homo sapien
tggaggacccgcacatcaatgccat

SEQ ID NO: 3445374 - DNA, 25 bp, Homo sapien
tgctctgtctggaggacccgcacat

SEQ ID NO: 3445375 - DNA, 25 bp, Homo sapien
ggcaaccaaggcattatactccttc

SEQ ID NO: 3445376 - DNA, 25 bp, Homo sapien
agcaggtggaatggaagacacctcc

SEQ ID NO: 3445377 - DNA, 25 bp, Homo sapien
gcaggtggaatggaagacacctccc

SEQ ID NO: 3445378 - DNA, 25 bp, Homo sapien
gtgatttattctcctcttaaggctc

SEQ ID NO: 3445379 - DNA, 25 bp, Homo sapien
gcacttagtgatttattctcctctt

SEQ ID NO: 3445380 - DNA, 25 bp, Homo sapien
gatttattctcctcttaaggctcca

SEQ ID NO: 3445381 - DNA, 25 bp, Homo sapien
tagtgatttattctcctcttaaggc

SEQ ID NO: 3445382 - DNA, 25 bp, Homo sapien
tgtgaagcactcactcccgtctgct

SEQ ID NO: 3445383 - DNA, 25 bp, Homo sapien
gaaagggcaccaagcagatccttcc

SEQ ID NO: 3445384 - DNA, 25 bp, Homo sapien
cttcaatgctgggtgtcgggtctgt

SEQ ID NO: 3445385 - DNA, 25 bp, Homo sapien
aagcagatccttccgagacttcaat

SEQ ID NO: 3445386 - DNA, 25 bp, Homo sapien
tgagggctgttctacctacaaacta

SEQ ID NO: 3445387 - DNA, 25 bp, Homo sapien
cggccaacttcttgtcttaaccact

SEQ ID NO: 3445388 - DNA, 25 bp, Homo sapien
gctagaagaaatgacctgtgggcag

SEQ ID NO: 3445389 - DNA, 25 bp, Homo sapien
tctacctacaaactaactcagaggc

SEQ ID NO: 3445390 - DNA, 25 bp, Homo sapien
tataagtgtggacctagtggtgtca

SEQ ID NO: 3445391 - DNA, 25 bp, Homo sapien
ttcatttataagtgtggacctagtg

SEQ ID NO: 3445392 - DNA, 25 bp, Homo sapien
tggacctagtggtgtcagttcttcc

SEQ ID NO: 3445393 - DNA, 25 bp, Homo sapien
attccattccactcagttattttca

SEQ ID NO: 3445394 - DNA, 25 bp, Homo sapien
ctgacatgaacacctgatggcagct

SEQ ID NO: 3445395 - DNA, 25 bp, Homo sapien
cctgacatgaacacctgatggcagc

SEQ ID NO: 3445396 - DNA, 25 bp, Homo sapien
gccctgacatgaacacctgatggca

SEQ ID NO: 3445397 - DNA, 25 bp, Homo sapien
tcaaggatgtgccatgaagctgtag

SEQ ID NO: 3445398 - DNA, 25 bp, Homo sapien
ccagcctgggtggcagagtaagacc

SEQ ID NO: 3445399 - DNA, 25 bp, Homo sapien
cgcccaggagtttgaggcttcagtg

SEQ ID NO: 3445400 - DNA, 25 bp, Homo sapien
gaggctgaggcaggaagatcacttg

SEQ ID NO: 3445401 - DNA, 25 bp, Homo sapien
cgtgcctgtaatccccactcctcag

SEQ ID NO: 3445402 - DNA, 25 bp, Homo sapien
ctcccgccgtttacccgtgcttcat

SEQ ID NO: 3445403 - DNA, 25 bp, Homo sapien
gagtcatagttactcccgccgttta

SEQ ID NO: 3445404 - DNA, 25 bp, Homo sapien
aagagagtcatagttactcccgccg

SEQ ID NO: 3445405 - DNA, 25 bp, Homo sapien
cgccgtttacccgtgcttcattgaa

SEQ ID NO: 3445406 - DNA, 25 bp, Homo sapien
tccctgctgattccgccaagcccat

SEQ ID NO: 3445407 - DNA, 25 bp, Homo sapien
cgggcgcctcccacctattctacac

SEQ ID NO: 3445408 - DNA, 25 bp, Homo sapien
ttctttccctgctgattccgccaag

SEQ ID NO: 3445409 - DNA, 25 bp, Homo sapien
cgccgggcgcctcccacctattcta

SEQ ID NO: 3445410 - DNA, 25 bp, Homo sapien
gtaggagttcttagaggcctacttc

SEQ ID NO: 3445411 - DNA, 25 bp, Homo sapien
aagtaggagttcttagaggcctact

SEQ ID NO: 3445412 - DNA, 25 bp, Homo sapien
taacaataatatggctgggtgcggt

SEQ ID NO: 3445413 - DNA, 25 bp, Homo sapien
agtccagccaggagtttgaccccag

SEQ ID NO: 3445414 - DNA, 25 bp, Homo sapien
taataacaataatatggctgggtgc

SEQ ID NO: 3445415 - DNA, 25 bp, Homo sapien
agctggacatgggtggtgtgcacct

SEQ ID NO: 3445416 - DNA, 25 bp, Homo sapien
caaggtgatctaatagataaacatg

SEQ ID NO: 3445417 - DNA, 25 bp, Homo sapien
taaacatgatctaagatgaagatga

SEQ ID NO: 3445418 - DNA, 25 bp, Homo sapien
tcttactgcttaagtaatttgggcc

SEQ ID NO: 3445419 - DNA, 25 bp, Homo sapien
ttatggtcacctctctaagatcaag

SEQ ID NO: 3445420 - DNA, 25 bp, Homo sapien
tagaacatactggttaagagggctg

SEQ ID NO: 3445421 - DNA, 25 bp, Homo sapien
gtagtacctatctcttcctcacagg

SEQ ID NO: 3445422 - DNA, 25 bp, Homo sapien
gcaaactgagtaacccttggacaag

SEQ ID NO: 3445423 - DNA, 25 bp, Homo sapien
cacattgcttgggttcacatcttga

SEQ ID NO: 3445424 - DNA, 25 bp, Homo sapien
ggcatcatagatttgatacaaaaaa

SEQ ID NO: 3445425 - DNA, 25 bp, Homo sapien
gcatcttaagaatgatggcatcata

SEQ ID NO: 3445426 - DNA, 25 bp, Homo sapien
aaaataaaggtgcatcttaagaatg

SEQ ID NO: 3445427 - DNA, 25 bp, Homo sapien
acttctctgaaatcagatattttga

SEQ ID NO: 3445428 - DNA, 25 bp, Homo sapien
gcagaacccagagagtccgttttgc

SEQ ID NO: 3445429 - DNA, 25 bp, Homo sapien
ctcaggttactaatgacagttgggt

SEQ ID NO: 3445430 - DNA, 25 bp, Homo sapien
tggaaactgtgctgggtcaccactg

SEQ ID NO: 3445431 - DNA, 25 bp, Homo sapien
tcttttgacgagattgatggaaact

SEQ ID NO: 3445432 - DNA, 25 bp, Homo sapien
aaggtatcatctccaccctgtggtt

SEQ ID NO: 3445433 - DNA, 25 bp, Homo sapien
agagaaaggtatcatctccaccctg

SEQ ID NO: 3445434 - DNA, 25 bp, Homo sapien
gaaaggtatcatctccaccctgtgg

SEQ ID NO: 3445435 - DNA, 25 bp, Homo sapien
gagaaaggtatcatctccaccctgt

SEQ ID NO: 3445436 - DNA, 25 bp, Homo sapien
cagatctaactgtgccccctgtatt

SEQ ID NO: 3445437 - DNA, 25 bp, Homo sapien
attcagatctaactgtgccccctgt

SEQ ID NO: 3445438 - DNA, 25 bp, Homo sapien
ttcagatctaactgtgccccctgta

SEQ ID NO: 3445439 - DNA, 25 bp, Homo sapien
tcagatctaactgtgccccctgtat

SEQ ID NO: 3445440 - DNA, 25 bp, Homo sapien
ccggcctaggctcattctttcttct

SEQ ID NO: 3445441 - DNA, 25 bp, Homo sapien
tgtgcccggcctaggctcattcttt

SEQ ID NO: 3445442 - DNA, 25 bp, Homo sapien
catcttctgcatcaagcagcctctg

SEQ ID NO: 3445443 - DNA, 25 bp, Homo sapien
tcatcttctgcatcaagcagcctct

SEQ ID NO: 3445444 - DNA, 25 bp, Homo sapien
ttgagggcatgaaggatcacacagt

SEQ ID NO: 3445445 - DNA, 25 bp, Homo sapien
aacatgatccctttaggaacttagc

SEQ ID NO: 3445446 - DNA, 25 bp, Homo sapien
gaactgtactctatcccgtggagga

SEQ ID NO: 3445447 - DNA, 25 bp, Homo sapien
ggaacttagcttttagttgagggca

SEQ ID NO: 3445448 - DNA, 25 bp, Homo sapien
gaccttggatttactgacactaaca

SEQ ID NO: 3445449 - DNA, 25 bp, Homo sapien
tactgtactatagctatcagagcag

SEQ ID NO: 3445450 - DNA, 25 bp, Homo sapien
taaaggatggcagcttttgcaaaac

SEQ ID NO: 3445451 - DNA, 25 bp, Homo sapien
gacactaacatgtgcactacacctt

SEQ ID NO: 3445452 - DNA, 25 bp, Homo sapien
tcctgatcccctttgcgagatgctg

SEQ ID NO: 3445453 - DNA, 25 bp, Homo sapien
tctagagtggaggttttcaaagtgc

SEQ ID NO: 3445454 - DNA, 25 bp, Homo sapien
tgatttaccaaaccctccaagtgat

SEQ ID NO: 3445455 - DNA, 25 bp, Homo sapien
tgtagtctacatagccccagcttgg

SEQ ID NO: 3445456 - DNA, 25 bp, Homo sapien
tcgggctggtcgctctcttcaatct

SEQ ID NO: 3445457 - DNA, 25 bp, Homo sapien
tgctgggatcactctcctttcgcgc

SEQ ID NO: 3445458 - DNA, 25 bp, Homo sapien
gctggtcgctctcttcaatctttgc

SEQ ID NO: 3445459 - DNA, 25 bp, Homo sapien
gggctggtcgctctcttcaatcttt

SEQ ID NO: 3445460 - DNA, 25 bp, Homo sapien
taggaagaggcaagttgccgtggct

SEQ ID NO: 3445461 - DNA, 25 bp, Homo sapien
aggaagaggcaagttgccgtggctc

SEQ ID NO: 3445462 - DNA, 25 bp, Homo sapien
gcataatcacggcttgctgtagcct

SEQ ID NO: 3445463 - DNA, 25 bp, Homo sapien
ataatcacggcttgctgtagcctca

SEQ ID NO: 3445464 - DNA, 25 bp, Homo sapien
gactgcaggcgcctgttacattgct

SEQ ID NO: 3445465 - DNA, 25 bp, Homo sapien
gcgcctgttacattgctttggtgcc

SEQ ID NO: 3445466 - DNA, 25 bp, Homo sapien
catgacggtcagcaggcagttcttg

SEQ ID NO: 3445467 - DNA, 25 bp, Homo sapien
gccttgagcatggtgaagtaggtgt

SEQ ID NO: 3445468 - DNA, 25 bp, Homo sapien
tgctccatgttgtgcacctcggctg

SEQ ID NO: 3445469 - DNA, 25 bp, Homo sapien
gctgcataccggtccatgacggtca

SEQ ID NO: 3445470 - DNA, 25 bp, Homo sapien
gctctcctgaggcactctcgtcctc

SEQ ID NO: 3445471 - DNA, 25 bp, Homo sapien
tctgtctctgcggttccattctctt

SEQ ID NO: 3445472 - DNA, 25 bp, Homo sapien
tgaggcactctcgtcctcgacttcc

SEQ ID NO: 3445473 - DNA, 25 bp, Homo sapien
tcgtcctcgacttcctctgtctctg

SEQ ID NO: 3445474 - DNA, 25 bp, Homo sapien
caaacttgtcccgtcatttcctggt

SEQ ID NO: 3445475 - DNA, 25 bp, Homo sapien
ctcctgggctttctcggtgaggtgc

SEQ ID NO: 3445476 - DNA, 25 bp, Homo sapien
gtgaggtgcatgaggatgtgatgga

SEQ ID NO: 3445477 - DNA, 25 bp, Homo sapien
aacttgtcccgtcatttcctggtat

SEQ ID NO: 3445478 - DNA, 25 bp, Homo sapien
tactgaatgactgccatgaggaggg

SEQ ID NO: 3445479 - DNA, 25 bp, Homo sapien
tcaggaggtagagaagcatcccgga

SEQ ID NO: 3445480 - DNA, 25 bp, Homo sapien
aacagacattctaaaggtgagccag

SEQ ID NO: 3445481 - DNA, 25 bp, Homo sapien
tcgccaagtaagagggtgaatcact

SEQ ID NO: 3445482 - DNA, 25 bp, Homo sapien
cgcgcctggtctatatgtgatttca

SEQ ID NO: 3445483 - DNA, 25 bp, Homo sapien
ctattttcttgagtaccaattgtaa

SEQ ID NO: 3445484 - DNA, 25 bp, Homo sapien
actgaaattaggttgaggaaagtgc

SEQ ID NO: 3445485 - DNA, 25 bp, Homo sapien
ggccttataaatataagcagatggt

SEQ ID NO: 3445486 - DNA, 25 bp, Homo sapien
cagtttcactgatacctgctgtttc

SEQ ID NO: 3445487 - DNA, 25 bp, Homo sapien
tcttatgacagttgaagcttatgct

SEQ ID NO: 3445488 - DNA, 25 bp, Homo sapien
agcttatgctaatctgtatgttgac

SEQ ID NO: 3445489 - DNA, 25 bp, Homo sapien
catccaatacgttgaagtcttcaaa

SEQ ID NO: 3445490 - DNA, 25 bp, Homo sapien
taaaacgtgaagactacctgtatgc

SEQ ID NO: 3445491 - DNA, 25 bp, Homo sapien
ctgtatgctgtgagggaccgtgaaa

SEQ ID NO: 3445492 - DNA, 25 bp, Homo sapien
cgtgaagactacctgtatgctgtga

SEQ ID NO: 3445493 - DNA, 25 bp, Homo sapien
tattatcttgtaaaacgtgaagact

SEQ ID NO: 3445494 - DNA, 25 bp, Homo sapien
cttagtagcccggaacttcgcgtgc

SEQ ID NO: 3445495 - DNA, 25 bp, Homo sapien
cgggcggacgagcaaagtgaaactt

SEQ ID NO: 3445496 - DNA, 25 bp, Homo sapien
tcccaccagagaattagcgcgggcg

SEQ ID NO: 3445497 - DNA, 25 bp, Homo sapien
gcagcaacacgtaccgggaagcgtt

SEQ ID NO: 3445498 - DNA, 25 bp, Homo sapien
tactaacctcagtgtattgtgcagt

SEQ ID NO: 3445499 - DNA, 25 bp, Homo sapien
ggaaactttctacctgcttggcctg

SEQ ID NO: 3445500 - DNA, 25 bp, Homo sapien
gattgactctgctattggcaagaca

SEQ ID NO: 3445501 - DNA, 25 bp, Homo sapien
taggcatcacatatgcttggttcaa

SEQ ID NO: 3445502 - DNA, 25 bp, Homo sapien
gattataggtatgcatcactaccac

SEQ ID NO: 3445503 - DNA, 25 bp, Homo sapien
gagattataggtatgcatcactacc

SEQ ID NO: 3445504 - DNA, 25 bp, Homo sapien
ctgagattataggtatgcatcacta

SEQ ID NO: 3445505 - DNA, 25 bp, Homo sapien
ttataggtatgcatcactaccacac

SEQ ID NO: 3445506 - DNA, 25 bp, Homo sapien
tagtatttcgtcactgaagacttta

SEQ ID NO: 3445507 - DNA, 25 bp, Homo sapien
tcatgttactattcaccatatatag

SEQ ID NO: 3445508 - DNA, 25 bp, Homo sapien
cttactcatgttactattcaccata

SEQ ID NO: 3445509 - DNA, 25 bp, Homo sapien
tattcaccatatatagtatttcgtc

SEQ ID NO: 3445510 - DNA, 25 bp, Homo sapien
aagcaggagacgcttcgatttttct

SEQ ID NO: 3445511 - DNA, 25 bp, Homo sapien
caggagacgcttcgatttttctgat

SEQ ID NO: 3445512 - DNA, 25 bp, Homo sapien
ggaaaagcaggagacgcttcgattt

SEQ ID NO: 3445513 - DNA, 25 bp, Homo sapien
gaaaagcaggagacgcttcgatttt

SEQ ID NO: 3445514 - DNA, 25 bp, Homo sapien
tgtgccttgagctcctttatgtttg

SEQ ID NO: 3445515 - DNA, 25 bp, Homo sapien
cgatgtctaactctttgtgccttga

SEQ ID NO: 3445516 - DNA, 25 bp, Homo sapien
caagggcccagaggctttctccgat

SEQ ID NO: 3445517 - DNA, 25 bp, Homo sapien
ttctccgatgtctaactctttgtgc

SEQ ID NO: 3445518 - DNA, 25 bp, Homo sapien
gacctcgtaatcgacttgcatcagc

SEQ ID NO: 3445519 - DNA, 25 bp, Homo sapien
cctcgtaatcgacttgcatcagcct

SEQ ID NO: 3445520 - DNA, 25 bp, Homo sapien
ctgacctcgtaatcgacttgcatca

SEQ ID NO: 3445521 - DNA, 25 bp, Homo sapien
tcgtaatcgacttgcatcagcctcc

SEQ ID NO: 3445522 - DNA, 25 bp, Homo sapien
tactctttgtgtatgctgtccgtga

SEQ ID NO: 3445523 - DNA, 25 bp, Homo sapien
tgtgtatgctgtccgtgagtaagtc

SEQ ID NO: 3445524 - DNA, 25 bp, Homo sapien
gctgtccgtgagtaagtctggagca

SEQ ID NO: 3445525 - DNA, 25 bp, Homo sapien
ttatggatgtactctttgtgtatgc

SEQ ID NO: 3445526 - DNA, 25 bp, Homo sapien
agtaactgcagatgtcatgggaata

SEQ ID NO: 3445527 - DNA, 25 bp, Homo sapien
caactccaatggataactttgaggg

SEQ ID NO: 3445528 - DNA, 25 bp, Homo sapien
aagagtttggaagaattagattcca

SEQ ID NO: 3445529 - DNA, 25 bp, Homo sapien
caacttgagtggatgaggagttact

SEQ ID NO: 3445530 - DNA, 25 bp, Homo sapien
tgtgcccaaccttaatgttgttttc

SEQ ID NO: 3445531 - DNA, 25 bp, Homo sapien
tcatgcctgctgatgtaacatctat

SEQ ID NO: 3445532 - DNA, 25 bp, Homo sapien
ttttcatgcctgctgatgtaacatc

SEQ ID NO: 3445533 - DNA, 25 bp, Homo sapien
cctgctgatgtaacatctattctgc

SEQ ID NO: 3445534 - DNA, 25 bp, Homo sapien
ttctcatccccacatagtaagggac

SEQ ID NO: 3445535 - DNA, 25 bp, Homo sapien
atagtaagggactcgcacggccagg

SEQ ID NO: 3445536 - DNA, 25 bp, Homo sapien
cacgggtactggcaattggttttcg

SEQ ID NO: 3445537 - DNA, 25 bp, Homo sapien
ttggcgctcggggtgactcttctca

SEQ ID NO: 3445538 - DNA, 25 bp, Homo sapien
agtgatgacccagcgcaaacgacca

SEQ ID NO: 3445539 - DNA, 25 bp, Homo sapien
caaacgaccactctttcaacgcaag

SEQ ID NO: 3445540 - DNA, 25 bp, Homo sapien
tcaacgcaagcatgaactagctgat

SEQ ID NO: 3445541 - DNA, 25 bp, Homo sapien
taagtatccccaatactacacagtg

SEQ ID NO: 3445542 - DNA, 25 bp, Homo sapien
gccattctctagctggatttaatac

SEQ ID NO: 3445543 - DNA, 25 bp, Homo sapien
tggcttctccactagtgcgtgaacg

SEQ ID NO: 3445544 - DNA, 25 bp, Homo sapien
cccgcagttctctgaggtactttta

SEQ ID NO: 3445545 - DNA, 25 bp, Homo sapien
actccggtgcaagcgtccaggttgg

SEQ ID NO: 3445546 - DNA, 25 bp, Homo sapien
tccagaatgggttccgctcaagcag

SEQ ID NO: 3445547 - DNA, 25 bp, Homo sapien
gaaccgtaggctatttgtacactaa

SEQ ID NO: 3445548 - DNA, 25 bp, Homo sapien
caatctgcgagtttgttgggcctac

SEQ ID NO: 3445549 - DNA, 25 bp, Homo sapien
taagcgttaggactagcctctaccc

SEQ ID NO: 3445550 - DNA, 25 bp, Homo sapien
gcctctggaagcaaccaatccaaat

SEQ ID NO: 3445551 - DNA, 25 bp, Homo sapien
caaccaatccaaatgacaccttgac

SEQ ID NO: 3445552 - DNA, 25 bp, Homo sapien
gagcctctggaagcaaccaatccaa

SEQ ID NO: 3445553 - DNA, 25 bp, Homo sapien
ccaatccaaatgacaccttgacttt

SEQ ID NO: 3445554 - DNA, 25 bp, Homo sapien
gaaagtaatcgattgtaaggatgga

SEQ ID NO: 3445555 - DNA, 25 bp, Homo sapien
tcgattgtaaggatggaagttggtt

SEQ ID NO: 3445556 - DNA, 25 bp, Homo sapien
tacaggaaagtaatcgattgtaagg

SEQ ID NO: 3445557 - DNA, 25 bp, Homo sapien
ctattacaggaaagtaatcgattgt

SEQ ID NO: 3445558 - DNA, 25 bp, Homo sapien
cttctcggtgtcaagatcatcatca

SEQ ID NO: 3445559 - DNA, 25 bp, Homo sapien
ctggtcatcttcattggtcttctgc

SEQ ID NO: 3445560 - DNA, 25 bp, Homo sapien
tcttcagctgcccatttgactgtag

SEQ ID NO: 3445561 - DNA, 25 bp, Homo sapien
ttctgcttctcggtgtcaagatcat

SEQ ID NO: 3445562 - DNA, 25 bp, Homo sapien
gccgtgaatcacctcgccagatcta

SEQ ID NO: 3445563 - DNA, 25 bp, Homo sapien
tttcacacatacatcgaacaggctg

SEQ ID NO: 3445564 - DNA, 25 bp, Homo sapien
ctgagacagcaagtacgagtggcct

SEQ ID NO: 3445565 - DNA, 25 bp, Homo sapien
tcctgttgcagattcacgttacggt

SEQ ID NO: 3445566 - DNA, 25 bp, Homo sapien
tgagtctagctttatgcctcatgtt

SEQ ID NO: 3445567 - DNA, 25 bp, Homo sapien
gagtctagctttatgcctcatgttc

SEQ ID NO: 3445568 - DNA, 25 bp, Homo sapien
attgccggtgactggaaagctttcc

SEQ ID NO: 3445569 - DNA, 25 bp, Homo sapien
cattgccggtgactggaaagctttc

SEQ ID NO: 3445570 - DNA, 25 bp, Homo sapien
gccattgccggtgactggaaagctt

SEQ ID NO: 3445571 - DNA, 25 bp, Homo sapien
tggccattgccggtgactggaaagc

SEQ ID NO: 3445572 - DNA, 25 bp, Homo sapien
tttgctttcatccttctcctggttg

SEQ ID NO: 3445573 - DNA, 25 bp, Homo sapien
ataaaattgatattgatatgatctg

SEQ ID NO: 3445574 - DNA, 25 bp, Homo sapien
tcctggttgatattaatggtcttta

SEQ ID NO: 3445575 - DNA, 25 bp, Homo sapien
tcatccttctcctggttgatattaa

SEQ ID NO: 3445576 - DNA, 25 bp, Homo sapien
catatacctttcgaccattttctgc

SEQ ID NO: 3445577 - DNA, 25 bp, Homo sapien
tgtggctccatatacctttcgacca

SEQ ID NO: 3445578 - DNA, 25 bp, Homo sapien
catctgtggctccatatacctttcg

SEQ ID NO: 3445579 - DNA, 25 bp, Homo sapien
tttcgaccattttctgctggaagag

SEQ ID NO: 3445580 - DNA, 25 bp, Homo sapien
tggattttatgaacaataagattat

SEQ ID NO: 3445581 - DNA, 25 bp, Homo sapien
caactgcttcattgaccgtgacggc

SEQ ID NO: 3445582 - DNA, 25 bp, Homo sapien
tccaaggccgagaagaatgccatgc

SEQ ID NO: 3445583 - DNA, 25 bp, Homo sapien
ttccagcatggaggtcttcaacgcc

SEQ ID NO: 3445584 - DNA, 25 bp, Homo sapien
gacggtccacttcactgtgcgcgag

SEQ ID NO: 3445585 - DNA, 25 bp, Homo sapien
taaaatagaatgtcggcagcagagg

SEQ ID NO: 3445586 - DNA, 25 bp, Homo sapien
tcatttcgatcccaagggcataggc

SEQ ID NO: 3445587 - DNA, 25 bp, Homo sapien
tagctttcagtccaggcacgttttc

SEQ ID NO: 3445588 - DNA, 25 bp, Homo sapien
agtgcagttgttcagtcccggctca

SEQ ID NO: 3445589 - DNA, 25 bp, Homo sapien
cctggcacaagcctctatgtatcca

SEQ ID NO: 3445590 - DNA, 25 bp, Homo sapien
ctctatgtatccaggaagcccgact

SEQ ID NO: 3445591 - DNA, 25 bp, Homo sapien
aggtcccagacggaagagatgctgc

SEQ ID NO: 3445592 - DNA, 25 bp, Homo sapien
cccggctaggtcagggctggtcctc

SEQ ID NO: 3445593 - DNA, 25 bp, Homo sapien
agcctctgctcagtccgtagcctgg

SEQ ID NO: 3445594 - DNA, 25 bp, Homo sapien
gagctgctccatgagagctctgatc

SEQ ID NO: 3445595 - DNA, 25 bp, Homo sapien
taacaccacataagcctggcagctg

SEQ ID NO: 3445596 - DNA, 25 bp, Homo sapien
gctgacagttcaaatagagctgctc

SEQ ID NO: 3445597 - DNA, 25 bp, Homo sapien
gggtatgacgacgtcaccaccgcct

SEQ ID NO: 3445598 - DNA, 25 bp, Homo sapien
cacgctgaccgggtatgacgacgtc

SEQ ID NO: 3445599 - DNA, 25 bp, Homo sapien
accaccgcctccaagatcttgtcca

SEQ ID NO: 3445600 - DNA, 25 bp, Homo sapien
ctgcttcacgctgaccgggtatgac

SEQ ID NO: 3445601 - DNA, 25 bp, Homo sapien
gcgctgaagaactcggcgaagacgt

SEQ ID NO: 3445602 - DNA, 25 bp, Homo sapien
cgcccacgtagaggcgcgcgcccag

SEQ ID NO: 3445603 - DNA, 25 bp, Homo sapien
ctgaagaactcggcgaagacgtcgg

SEQ ID NO: 3445604 - DNA, 25 bp, Homo sapien
cgacgcgcgctgaagaactcggcga

SEQ ID NO: 3445605 - DNA, 25 bp, Homo sapien
gggccggcgccaccctgcagcaggc

SEQ ID NO: 3445606 - DNA, 25 bp, Homo sapien
gccggcgccaccctgcagcaggcgc

SEQ ID NO: 3445607 - DNA, 25 bp, Homo sapien
ccggggggccggcgccaccctgcag

SEQ ID NO: 3445608 - DNA, 25 bp, Homo sapien
ctgcacgcaggcgagcgcgcggggg

SEQ ID NO: 3445609 - DNA, 25 bp, Homo sapien
cggaagcggccgaggcaacgcacca

SEQ ID NO: 3445610 - DNA, 25 bp, Homo sapien
acacggtgcgcagcacctcgcgccg

SEQ ID NO: 3445611 - DNA, 25 bp, Homo sapien
ggtggcgagccagcagccgtgccac

SEQ ID NO: 3445612 - DNA, 25 bp, Homo sapien
ggtccgtcgggcacacagcgcgggt

SEQ ID NO: 3445613 - DNA, 25 bp, Homo sapien
tgcgcaggagatgactgcgaacagc

SEQ ID NO: 3445614 - DNA, 25 bp, Homo sapien
tgtgcgcgccacagctgcgccagga

SEQ ID NO: 3445615 - DNA, 25 bp, Homo sapien
tgctctaggaactccacggcgccct

SEQ ID NO: 3445616 - DNA, 25 bp, Homo sapien
agatgactgcgaacagctctttgag

SEQ ID NO: 3445617 - DNA, 25 bp, Homo sapien
catccatgagctccaatgggaggtg

SEQ ID NO: 3445618 - DNA, 25 bp, Homo sapien
ggttccggacaacaccatccatgag

SEQ ID NO: 3445619 - DNA, 25 bp, Homo sapien
ccagggcgctagatggtggctcctc

SEQ ID NO: 3445620 - DNA, 25 bp, Homo sapien
gtcacactgtcatcattgctgaggt

SEQ ID NO: 3445621 - DNA, 25 bp, Homo sapien
acacagctgccatgcagtcagtgct

SEQ ID NO: 3445622 - DNA, 25 bp, Homo sapien
aaaacagcctagactcagcagactg

SEQ ID NO: 3445623 - DNA, 25 bp, Homo sapien
taggtcgtattcaccattgagcagg

SEQ ID NO: 3445624 - DNA, 25 bp, Homo sapien
gcaatgccagaacaaggctttcagc

SEQ ID NO: 3445625 - DNA, 25 bp, Homo sapien
ggacaagggacacccaaaatgctgg

SEQ ID NO: 3445626 - DNA, 25 bp, Homo sapien
agggacaagggacacccaaaatgct

SEQ ID NO: 3445627 - DNA, 25 bp, Homo sapien
gggacaagggacacccaaaatgctg

SEQ ID NO: 3445628 - DNA, 25 bp, Homo sapien
ccttcagcagtgcaatgatccactt

SEQ ID NO: 3445629 - DNA, 25 bp, Homo sapien
tccacttgtcaatattcttccccag

SEQ ID NO: 3445630 - DNA, 25 bp, Homo sapien
acctcgatcaagatgctgaacttct

SEQ ID NO: 3445631 - DNA, 25 bp, Homo sapien
tcaattttggtgagcgaaacctcga

SEQ ID NO: 3445632 - DNA, 25 bp, Homo sapien
ggaaggcttcgtgggagtgctggaa

SEQ ID NO: 3445633 - DNA, 25 bp, Homo sapien
aggtcaggagcatgtacttgagcac

SEQ ID NO: 3445634 - DNA, 25 bp, Homo sapien
ttgagcacagacaaggcagctcccc

SEQ ID NO: 3445635 - DNA, 25 bp, Homo sapien
ccggacgatggggtacagcagctta

SEQ ID NO: 3445636 - DNA, 25 bp, Homo sapien
gacaggctcatacagatccgggaag

SEQ ID NO: 3445637 - DNA, 25 bp, Homo sapien
gggaaccggaacaccatgcagtgga

SEQ ID NO: 3445638 - DNA, 25 bp, Homo sapien
agctggtccccgagttcgagtcctc

SEQ ID NO: 3445639 - DNA, 25 bp, Homo sapien
gttcgagtcctccttgaccagagag

SEQ ID NO: 3445640 - DNA, 25 bp, Homo sapien
ttcgatgtagaaacccttgggcaac

SEQ ID NO: 3445641 - DNA, 25 bp, Homo sapien
gcacaaagatcaaaaggacagggtt

SEQ ID NO: 3445642 - DNA, 25 bp, Homo sapien
ttccaggatcttctcaaggcgcggg

SEQ ID NO: 3445643 - DNA, 25 bp, Homo sapien
tggtacaggtatgtgcagactcccc

SEQ ID NO: 3445644 - DNA, 25 bp, Homo sapien
tgcccaggttgatgagaccaatctt

SEQ ID NO: 3445645 - DNA, 25 bp, Homo sapien
tgcttgatgcggtcctcattgggaa

SEQ ID NO: 3445646 - DNA, 25 bp, Homo sapien
cagctcgctcttctgcgaagtccag

SEQ ID NO: 3445647 - DNA, 25 bp, Homo sapien
aatcttgcccgtgtctgacttggcc

SEQ ID NO: 3445648 - DNA, 25 bp, Homo sapien
gggctgtgagttgttctcagtcaag

SEQ ID NO: 3445649 - DNA, 25 bp, Homo sapien
ctcagtcaagcggagcacacaatgt

SEQ ID NO: 3445650 - DNA, 25 bp, Homo sapien
tgttctcagtcaagcggagcacaca

SEQ ID NO: 3445651 - DNA, 25 bp, Homo sapien
gagttgttctcagtcaagcggagca

SEQ ID NO: 3445652 - DNA, 25 bp, Homo sapien
ccagcaggtacttcagatactccga

SEQ ID NO: 3445653 - DNA, 25 bp, Homo sapien
tgccagggctgaaccagggcgtcca

SEQ ID NO: 3445654 - DNA, 25 bp, Homo sapien
ttcagatactccgagcagtcctgct

SEQ ID NO: 3445655 - DNA, 25 bp, Homo sapien
cagggcgtccaggatgcggagagga

SEQ ID NO: 3445656 - DNA, 25 bp, Homo sapien
gcgagagagaggtccgtgaaggcct

SEQ ID NO: 3445657 - DNA, 25 bp, Homo sapien
agtttctggcagatccttgtgcccg

SEQ ID NO: 3445658 - DNA, 25 bp, Homo sapien
cagcagatccgagtcactatcttgc

SEQ ID NO: 3445659 - DNA, 25 bp, Homo sapien
aactcccgggctgtgatgtcttctg

SEQ ID NO: 3445660 - DNA, 25 bp, Homo sapien
ggggtgtcctctgtgatgcagtgtt

SEQ ID NO: 3445661 - DNA, 25 bp, Homo sapien
aggccttcgatgtacaggctggtgg

SEQ ID NO: 3445662 - DNA, 25 bp, Homo sapien
caggccttcgatgtacaggctggtg

SEQ ID NO: 3445663 - DNA, 25 bp, Homo sapien
ccaggccttcgatgtacaggctggt

SEQ ID NO: 3445664 - DNA, 25 bp, Homo sapien
ccttcccctctggtgctttcctcct

SEQ ID NO: 3445665 - DNA, 25 bp, Homo sapien
tctctatcctttcctcctgactgct

SEQ ID NO: 3445666 - DNA, 25 bp, Homo sapien
cacttcttccttctccgttctctcc

SEQ ID NO: 3445667 - DNA, 25 bp, Homo sapien
ctgctcagcctccttttctgtctcc

SEQ ID NO: 3445668 - DNA, 25 bp, Homo sapien
gaggggatggcagcatccgggtggg

SEQ ID NO: 3445669 - DNA, 25 bp, Homo sapien
ctccccggaggggatggcagcatcc

SEQ ID NO: 3445670 - DNA, 25 bp, Homo sapien
ggggatggcagcatccgggtgggtc

SEQ ID NO: 3445671 - DNA, 25 bp, Homo sapien
ggatggcagcatccgggtgggtccc

SEQ ID NO: 3445672 - DNA, 25 bp, Homo sapien
gccctcacgggcatagcagtagtag

SEQ ID NO: 3445673 - DNA, 25 bp, Homo sapien
cccgagtgtcattgaacaggtacca

SEQ ID NO: 3445674 - DNA, 25 bp, Homo sapien
catcaagtccttgtgcagggtgggc

SEQ ID NO: 3445675 - DNA, 25 bp, Homo sapien
tagttaaccaggtccaggacggagc

SEQ ID NO: 3445676 - DNA, 25 bp, Homo sapien
tgagagcctgactcagcctcaggcc

SEQ ID NO: 3445677 - DNA, 25 bp, Homo sapien
catggcagaagctgtccctgagagc

SEQ ID NO: 3445678 - DNA, 25 bp, Homo sapien
gacagcatggcagaagctgtccctg

SEQ ID NO: 3445679 - DNA, 25 bp, Homo sapien
atctggacagcatggcagaagctgt

SEQ ID NO: 3445680 - DNA, 25 bp, Homo sapien
gggagtgcagagatgtaggccgccc

SEQ ID NO: 3445681 - DNA, 25 bp, Homo sapien
ccccagtgcggagatgtggggagtg

SEQ ID NO: 3445682 - DNA, 25 bp, Homo sapien
tgcagagatgtaggccgccctgctc

SEQ ID NO: 3445683 - DNA, 25 bp, Homo sapien
agtgcagagatgtaggccgccctgc

SEQ ID NO: 3445684 - DNA, 25 bp, Homo sapien
tagaagaccagtctgtggaagtcac

SEQ ID NO: 3445685 - DNA, 25 bp, Homo sapien
ttagaagaccagtctgtggaagtca

SEQ ID NO: 3445686 - DNA, 25 bp, Homo sapien
gctttataccgtacagcagtcggaa

SEQ ID NO: 3445687 - DNA, 25 bp, Homo sapien
caaaacattggagctgaggtctagc

SEQ ID NO: 3445688 - DNA, 25 bp, Homo sapien
aaaatcaggactctaaccacaaggg

SEQ ID NO: 3445689 - DNA, 25 bp, Homo sapien
tacaagtggtggcttctcaggccct

SEQ ID NO: 3445690 - DNA, 25 bp, Homo sapien
taaaggcttgagagctgcctcccag

SEQ ID NO: 3445691 - DNA, 25 bp, Homo sapien
gtaggtaaaggcttgagagctgcct

SEQ ID NO: 3445692 - DNA, 25 bp, Homo sapien
aggaggtaggtaaaggcttgagagc

SEQ ID NO: 3445693 - DNA, 25 bp, Homo sapien
ggtaaaggcttgagagctgcctccc

SEQ ID NO: 3445694 - DNA, 25 bp, Homo sapien
gagggtctgtgacattgggcccaaa

SEQ ID NO: 3445695 - DNA, 25 bp, Homo sapien
cctcagcgtctgttgtaaagtggaa

SEQ ID NO: 3445696 - DNA, 25 bp, Homo sapien
catccagctttcttaggcgtctaga

SEQ ID NO: 3445697 - DNA, 25 bp, Homo sapien
tctgggcgtgtctgtctgctgcttt

SEQ ID NO: 3445698 - DNA, 25 bp, Homo sapien
ggcttggtggtggaacccgttctca

SEQ ID NO: 3445699 - DNA, 25 bp, Homo sapien
tgacacatggtacaggcttggagct

SEQ ID NO: 3445700 - DNA, 25 bp, Homo sapien
tgccgtgtccatcttgtcttgaggg

SEQ ID NO: 3445701 - DNA, 25 bp, Homo sapien
aaagtccactagaaatgcaccccag

SEQ ID NO: 3445702 - DNA, 25 bp, Homo sapien
ggattagctgcgctgaggtcccatc

SEQ ID NO: 3445703 - DNA, 25 bp, Homo sapien
ggtcctttggcctatccatgggtca

SEQ ID NO: 3445704 - DNA, 25 bp, Homo sapien
cctggagaggactgagcctacggaa

SEQ ID NO: 3445705 - DNA, 25 bp, Homo sapien
ggtgtctccttaagtccttgatctg

SEQ ID NO: 3445706 - DNA, 25 bp, Homo sapien
tagcagacagatgtgaagcagtggt

SEQ ID NO: 3445707 - DNA, 25 bp, Homo sapien
aaagcagggcagaatgatgcctaga

SEQ ID NO: 3445708 - DNA, 25 bp, Homo sapien
aagcagtggtgaaggccatgtagca

SEQ ID NO: 3445709 - DNA, 25 bp, Homo sapien
tggtgtgacatgaggaccgttccta

SEQ ID NO: 3445710 - DNA, 25 bp, Homo sapien
cagggcttggagctcgggtggtgga

SEQ ID NO: 3445711 - DNA, 25 bp, Homo sapien
ggtggagatgacaaggacactgtgg

SEQ ID NO: 3445712 - DNA, 25 bp, Homo sapien
ctctaggcccaagggctagtcctct

SEQ ID NO: 3445713 - DNA, 25 bp, Homo sapien
gtccccagaactctggagctacagg

SEQ ID NO: 3445714 - DNA, 25 bp, Homo sapien
taagaactccttctgggtgttttgg

SEQ ID NO: 3445715 - DNA, 25 bp, Homo sapien
ccaaaacacccagaaggagttctta

SEQ ID NO: 3445716 - DNA, 25 bp, Homo sapien
cagtgaacaaataggcaatccatct

SEQ ID NO: 3445717 - DNA, 25 bp, Homo sapien
caatggagtcttattgtgttcccag

SEQ ID NO: 3445718 - DNA, 25 bp, Homo sapien
tgtgcatattctgcggtacttaaaa

SEQ ID NO: 3445719 - DNA, 25 bp, Homo sapien
ccatgggctagtttcacagtggcag

SEQ ID NO: 3445720 - DNA, 25 bp, Homo sapien
tttgtggtccatataaagaacttct

SEQ ID NO: 3445721 - DNA, 25 bp, Homo sapien
ttcaacgcgcatatctaacaaagga

SEQ ID NO: 3445722 - DNA, 25 bp, Homo sapien
gacaaatcacaaaatgcgagaaaat

SEQ ID NO: 3445723 - DNA, 25 bp, Homo sapien
catgaatagatgatcagtgatctgg

SEQ ID NO: 3445724 - DNA, 25 bp, Homo sapien
ggaggaggatacaactagaatttgg

SEQ ID NO: 3445725 - DNA, 25 bp, Homo sapien
ttgggaacctgagtcaataaggctc

SEQ ID NO: 3445726 - DNA, 25 bp, Homo sapien
gtcccagggattgatacaccatgta

SEQ ID NO: 3445727 - DNA, 25 bp, Homo sapien
caataaggctcaatggcaacttggg

SEQ ID NO: 3445728 - DNA, 25 bp, Homo sapien
tccgggccaggatctatgatatgac

SEQ ID NO: 3445729 - DNA, 25 bp, Homo sapien
tcaacaataactgggagtgcctcag

SEQ ID NO: 3445730 - DNA, 25 bp, Homo sapien
gagtctcatgaacctattgtggcag

SEQ ID NO: 3445731 - DNA, 25 bp, Homo sapien
catggttggatgtggactgccctcc

SEQ ID NO: 3445732 - DNA, 25 bp, Homo sapien
gtgacagttaccttccaagcatccg

SEQ ID NO: 3445733 - DNA, 25 bp, Homo sapien
catctgtacggcatataattgtgac

SEQ ID NO: 3445734 - DNA, 25 bp, Homo sapien
aagcatccgtcatgtcttggaaagc

SEQ ID NO: 3445735 - DNA, 25 bp, Homo sapien
taattccccgtataccatctgtacg

SEQ ID NO: 3445736 - DNA, 25 bp, Homo sapien
gttggttagcttcaaaatacagtga

SEQ ID NO: 3445737 - DNA, 25 bp, Homo sapien
ggttagcttcaaaatacagtgatgt

SEQ ID NO: 3445738 - DNA, 25 bp, Homo sapien
taaagttggttagcttcaaaataca

SEQ ID NO: 3445739 - DNA, 25 bp, Homo sapien
aaagttggttagcttcaaaatacag

SEQ ID NO: 3445740 - DNA, 25 bp, Homo sapien
caccaattgccagttgtctcagagt

SEQ ID NO: 3445741 - DNA, 25 bp, Homo sapien
agtctgacgcttctgttttacacca

SEQ ID NO: 3445742 - DNA, 25 bp, Homo sapien
cacaactgataagtctgacgcttct

SEQ ID NO: 3445743 - DNA, 25 bp, Homo sapien
ttattgccgctgatcacgattcttg

SEQ ID NO: 3445744 - DNA, 25 bp, Homo sapien
cgtagcaatagtagtgatgatttct

SEQ ID NO: 3445745 - DNA, 25 bp, Homo sapien
tggtcgtagcaatagtagtgatgat

SEQ ID NO: 3445746 - DNA, 25 bp, Homo sapien
ttgtagtggtcgtagcaatagtagt

SEQ ID NO: 3445747 - DNA, 25 bp, Homo sapien
tagtggtcgtagcaatagtagtgat

SEQ ID NO: 3445748 - DNA, 25 bp, Homo sapien
cattgtttgtgttcattgctccttc

SEQ ID NO: 3445749 - DNA, 25 bp, Homo sapien
tgtttgtgttcattgctccttctct

SEQ ID NO: 3445750 - DNA, 25 bp, Homo sapien
ttgtgttcattgctccttctctctc

SEQ ID NO: 3445751 - DNA, 25 bp, Homo sapien
tgttcattgctccttctctctcgtg

SEQ ID NO: 3445752 - DNA, 25 bp, Homo sapien
tctacatgcttgaagaccttgagat

SEQ ID NO: 3445753 - DNA, 25 bp, Homo sapien
cgtgagccaccacgcccagccttga

SEQ ID NO: 3445754 - DNA, 25 bp, Homo sapien
gagacggtttcaccgtattagccag

SEQ ID NO: 3445755 - DNA, 25 bp, Homo sapien
tagagacggtttcaccgtattagcc

SEQ ID NO: 3445756 - DNA, 25 bp, Homo sapien
gacgtgagccaccacgcccagcctt

SEQ ID NO: 3445757 - DNA, 25 bp, Homo sapien
ctggaataggcgtgtccttttaact

SEQ ID NO: 3445758 - DNA, 25 bp, Homo sapien
cttttgcgaaactcctggaataggc

SEQ ID NO: 3445759 - DNA, 25 bp, Homo sapien
gtgccttgtggctaaggttgtagaa

SEQ ID NO: 3445760 - DNA, 25 bp, Homo sapien
gaaggggcaagacattacttggaag

SEQ ID NO: 3445761 - DNA, 25 bp, Homo sapien
ctagtgcatgcactctgtaaggtgc

SEQ ID NO: 3445762 - DNA, 25 bp, Homo sapien
caggaccctgactagtgcatgcact

SEQ ID NO: 3445763 - DNA, 25 bp, Homo sapien
cttctctggactgttccaggaccct

SEQ ID NO: 3445764 - DNA, 25 bp, Homo sapien
ggctcccaccgcttctctggactgt

SEQ ID NO: 3445765 - DNA, 25 bp, Homo sapien
gctattttatacctcaattcttgag

SEQ ID NO: 3445766 - DNA, 25 bp, Homo sapien
ttttatacctcaattcttgagccat

SEQ ID NO: 3445767 - DNA, 25 bp, Homo sapien
ttgctattttatacctcaattcttg

SEQ ID NO: 3445768 - DNA, 25 bp, Homo sapien
agtttgctattttatacctcaattc

SEQ ID NO: 3445769 - DNA, 25 bp, Homo sapien
taaagagcataaatgggatctttgc

SEQ ID NO: 3445770 - DNA, 25 bp, Homo sapien
ttgctcaaataaatctccatccaat

SEQ ID NO: 3445771 - DNA, 25 bp, Homo sapien
tgctcaaataaatctccatccaatt

SEQ ID NO: 3445772 - DNA, 25 bp, Homo sapien
ctgctgtggttaaagagcataaatg

SEQ ID NO: 3445773 - DNA, 25 bp, Homo sapien
gctacctctgtgcactttaatgatg

SEQ ID NO: 3445774 - DNA, 25 bp, Homo sapien
ccctgtaggctctagaaacattcaa

SEQ ID NO: 3445775 - DNA, 25 bp, Homo sapien
cattcaatggtatgttgtttcccaa

SEQ ID NO: 3445776 - DNA, 25 bp, Homo sapien
ttcccaaacacttcatgaatattgc

SEQ ID NO: 3445777 - DNA, 25 bp, Homo sapien
cagtcttatatgaatgcaagtaatt

SEQ ID NO: 3445778 - DNA, 25 bp, Homo sapien
agtcttatatgaatgcaagtaattg

SEQ ID NO: 3445779 - DNA, 25 bp, Homo sapien
gtcttatatgaatgcaagtaattgg

SEQ ID NO: 3445780 - DNA, 25 bp, Homo sapien
tcatttacgaggtccggatggtgtc

SEQ ID NO: 3445781 - DNA, 25 bp, Homo sapien
gtcctctgggctataaacaatggca

SEQ ID NO: 3445782 - DNA, 25 bp, Homo sapien
tttctgtggtaaggatagcaactcc

SEQ ID NO: 3445783 - DNA, 25 bp, Homo sapien
ggtctgatctgagccagcctgggac

SEQ ID NO: 3445784 - DNA, 25 bp, Homo sapien
gaatcaagtcagcagttttggaggg

SEQ ID NO: 3445785 - DNA, 25 bp, Homo sapien
gtttgttctgttccccgccacaggc

SEQ ID NO: 3445786 - DNA, 25 bp, Homo sapien
ttcctcccgccttgtgtcagtttgg

SEQ ID NO: 3445787 - DNA, 25 bp, Homo sapien
cccactttgtagagtaccagaaagc

SEQ ID NO: 3445788 - DNA, 25 bp, Homo sapien
tggttaaaggctttgagagatacac

SEQ ID NO: 3445789 - DNA, 25 bp, Homo sapien
gctttgagagatacaccctttccta

SEQ ID NO: 3445790 - DNA, 25 bp, Homo sapien
gttaaaggctttgagagatacaccc

SEQ ID NO: 3445791 - DNA, 25 bp, Homo sapien
gagagatacaccctttcctagggtc

SEQ ID NO: 3445792 - DNA, 25 bp, Homo sapien
tcacttagcttcttaatcatactgt

SEQ ID NO: 3445793 - DNA, 25 bp, Homo sapien
taatcatactgtttgttataggaaa

SEQ ID NO: 3445794 - DNA, 25 bp, Homo sapien
gaaaatgactttcatcttgacacat

SEQ ID NO: 3445795 - DNA, 25 bp, Homo sapien
cttatgactaagatcacttagcttc

SEQ ID NO: 3445796 - DNA, 25 bp, Homo sapien
ctagcaggaatattttgtttctttt

SEQ ID NO: 3445797 - DNA, 25 bp, Homo sapien
tagcaggaatattttgtttcttttc

SEQ ID NO: 3445798 - DNA, 25 bp, Homo sapien
tgtggcaactcatggatgtggccag

SEQ ID NO: 3445799 - DNA, 25 bp, Homo sapien
caaagaaatacctcagcatgtggca

SEQ ID NO: 3445800 - DNA, 25 bp, Homo sapien
gatgcattggttgagttgctgttca

SEQ ID NO: 3445801 - DNA, 25 bp, Homo sapien
atcaaggcagatgcattggttgagt

SEQ ID NO: 3445802 - DNA, 25 bp, Homo sapien
gtggaaagcaatttcctccatgaga

SEQ ID NO: 3445803 - DNA, 25 bp, Homo sapien
gtgacagcttcgctcagaatcatgt

SEQ ID NO: 3445804 - DNA, 25 bp, Homo sapien
gaagcagtgctggatagtaaaacaa

SEQ ID NO: 3445805 - DNA, 25 bp, Homo sapien
tcatgtttgcatctcgtggaaagca

SEQ ID NO: 3445806 - DNA, 25 bp, Homo sapien
atttgctctaggaagagttttactc

SEQ ID NO: 3445807 - DNA, 25 bp, Homo sapien
catttgctctaggaagagttttact

SEQ ID NO: 3445808 - DNA, 25 bp, Homo sapien
tcatttgctctaggaagagttttac

SEQ ID NO: 3445809 - DNA, 25 bp, Homo sapien
tatcatttgctctaggaagagtttt

SEQ ID NO: 3445810 - DNA, 25 bp, Homo sapien
caggttctctctgcaagcgttccac

SEQ ID NO: 3445811 - DNA, 25 bp, Homo sapien
tcccaggactgagacactcgatttg

SEQ ID NO: 3445812 - DNA, 25 bp, Homo sapien
tcaggaagtgctctagtaccagcat

SEQ ID NO: 3445813 - DNA, 25 bp, Homo sapien
tgagagttcaagcatgcatctgcct

SEQ ID NO: 3445814 - DNA, 25 bp, Homo sapien
agacccattggttcgagctctgctg

SEQ ID NO: 3445815 - DNA, 25 bp, Homo sapien
gacccattggttcgagctctgctgg

SEQ ID NO: 3445816 - DNA, 25 bp, Homo sapien
aatctgttgaacatgcacagctctt

SEQ ID NO: 3445817 - DNA, 25 bp, Homo sapien
caggccagatgagcttaggtgccat

SEQ ID NO: 3445818 - DNA, 25 bp, Homo sapien
tataggatagtcatttccattgtca

SEQ ID NO: 3445819 - DNA, 25 bp, Homo sapien
tctcaagaggacctaataattgcca

SEQ ID NO: 3445820 - DNA, 25 bp, Homo sapien
gctgtttgtatttcaggtgcagaaa

SEQ ID NO: 3445821 - DNA, 25 bp, Homo sapien
gtgtatcaccatgattttccctgtc

SEQ ID NO: 3445822 - DNA, 25 bp, Homo sapien
ctgtgtgtatcaccatgattttccc

SEQ ID NO: 3445823 - DNA, 25 bp, Homo sapien
ttgttttctgggcaattttcattct

SEQ ID NO: 3445824 - DNA, 25 bp, Homo sapien
gtgtgtatcaccatgattttccctg

SEQ ID NO: 3445825 - DNA, 25 bp, Homo sapien
aagatccataagttttggaagctct

SEQ ID NO: 3445826 - DNA, 25 bp, Homo sapien
aaacctcctgtcacattgttgacat

SEQ ID NO: 3445827 - DNA, 25 bp, Homo sapien
cctgtcacattgttgacatttatag

SEQ ID NO: 3445828 - DNA, 25 bp, Homo sapien
tgaagatccataagttttggaagct

SEQ ID NO: 3445829 - DNA, 25 bp, Homo sapien
cattggacatgcttcccatcttctg

SEQ ID NO: 3445830 - DNA, 25 bp, Homo sapien
gacattggacatgcttcccatcttc

SEQ ID NO: 3445831 - DNA, 25 bp, Homo sapien
acattggacatgcttcccatcttct

SEQ ID NO: 3445832 - DNA, 25 bp, Homo sapien
ggacagggtatttaggaaaattgca

SEQ ID NO: 3445833 - DNA, 25 bp, Homo sapien
aagcaatcttcctctagtgcctggt

SEQ ID NO: 3445834 - DNA, 25 bp, Homo sapien
tatagagtactgtcctgtgcatttc

SEQ ID NO: 3445835 - DNA, 25 bp, Homo sapien
cattttgtggataagaaactaaagg

SEQ ID NO: 3445836 - DNA, 25 bp, Homo sapien
aggaaacagattgcagtgggccaag

SEQ ID NO: 3445837 - DNA, 25 bp, Homo sapien
cgcttgaagccaggaaacagattgc

SEQ ID NO: 3445838 - DNA, 25 bp, Homo sapien
agccaggaaacagattgcagtgggc

SEQ ID NO: 3445839 - DNA, 25 bp, Homo sapien
ttgaagccaggaaacagattgcagt

SEQ ID NO: 3445840 - DNA, 25 bp, Homo sapien
ctaactaggcttaggcaaagaaaat

SEQ ID NO: 3445841 - DNA, 25 bp, Homo sapien
tgatgggacagtggtttctttctaa

SEQ ID NO: 3445842 - DNA, 25 bp, Homo sapien
gataacaatcaaaagagttacagtt

SEQ ID NO: 3445843 - DNA, 25 bp, Homo sapien
cagtttatttagtcccttgtgatgg

SEQ ID NO: 3445844 - DNA, 25 bp, Homo sapien
ccatattccttttcgactgcactga

SEQ ID NO: 3445845 - DNA, 25 bp, Homo sapien
actgaaatgttttctattgtagcat

SEQ ID NO: 3445846 - DNA, 25 bp, Homo sapien
gattgttcctaacaactgaaatgtt

SEQ ID NO: 3445847 - DNA, 25 bp, Homo sapien
tttcgactgcactgattgttcctaa

SEQ ID NO: 3445848 - DNA, 25 bp, Homo sapien
tgggtgccttcacatccctttcaaa

SEQ ID NO: 3445849 - DNA, 25 bp, Homo sapien
ttattaacctattcataggaactct

SEQ ID NO: 3445850 - DNA, 25 bp, Homo sapien
actctgaacatgagcatgggtgcct

SEQ ID NO: 3445851 - DNA, 25 bp, Homo sapien
gaacatgagcatgggtgccttcaca

SEQ ID NO: 3445852 - DNA, 25 bp, Homo sapien
ccaagttgcgtgaaggcaaatgctc

SEQ ID NO: 3445853 - DNA, 25 bp, Homo sapien
tgtgaaacagaatgatgcccttata

SEQ ID NO: 3445854 - DNA, 25 bp, Homo sapien
caaatgctcttggtgtggaagaagt

SEQ ID NO: 3445855 - DNA, 25 bp, Homo sapien
agttatccaggcaccaagttgcgtg

SEQ ID NO: 3445856 - DNA, 25 bp, Homo sapien
taatgtcctccagtaccaaccgtgt

SEQ ID NO: 3445857 - DNA, 25 bp, Homo sapien
caaccgtgttgccacgaatggcagg

SEQ ID NO: 3445858 - DNA, 25 bp, Homo sapien
taatgtgtgcttaggatactcatca

SEQ ID NO: 3445859 - DNA, 25 bp, Homo sapien
gctctgttaccaagaggtgtagtgg

SEQ ID NO: 3445860 - DNA, 25 bp, Homo sapien
ttctccagattaaaccatctggatc

SEQ ID NO: 3445861 - DNA, 25 bp, Homo sapien
caccatgtctagccttctggaagag

SEQ ID NO: 3445862 - DNA, 25 bp, Homo sapien
aattctccagattaaaccatctgga

SEQ ID NO: 3445863 - DNA, 25 bp, Homo sapien
tagatacggggttcttcaaattatc

SEQ ID NO: 3445864 - DNA, 25 bp, Homo sapien
caaagtacaagatggtgccagttac

SEQ ID NO: 3445865 - DNA, 25 bp, Homo sapien
tgagatttggccgaaatggtcttgg

SEQ ID NO: 3445866 - DNA, 25 bp, Homo sapien
gtcaaagtacaagatggtgccagtt

SEQ ID NO: 3445867 - DNA, 25 bp, Homo sapien
gtgccagttactgagatttggccga

SEQ ID NO: 3445868 - DNA, 25 bp, Homo sapien
gcggctgcatcaccggcagcgtcag

SEQ ID NO: 3445869 - DNA, 25 bp, Homo sapien
ccaagccggtctgctcgtgaactaa

SEQ ID NO: 3445870 - DNA, 25 bp, Homo sapien
tgatggcttctggagaccgagagag

SEQ ID NO: 3445871 - DNA, 25 bp, Homo sapien
aactaaatacagtgtcgaagttttg

SEQ ID NO: 3445872 - DNA, 25 bp, Homo sapien
actcagttctgaaattaacctgtca

SEQ ID NO: 3445873 - DNA, 25 bp, Homo sapien
ctcagttctgaaattaacctgtcaa

SEQ ID NO: 3445874 - DNA, 25 bp, Homo sapien
cattggatcgtgagtgagtttgaaa

SEQ ID NO: 3445875 - DNA, 25 bp, Homo sapien
cgtgagtgagtttgaaatgagtatc

SEQ ID NO: 3445876 - DNA, 25 bp, Homo sapien
catctccattggatcgtgagtgagt

SEQ ID NO: 3445877 - DNA, 25 bp, Homo sapien
gatcgtgagtgagtttgaaatgagt

SEQ ID NO: 3445878 - DNA, 25 bp, Homo sapien
ggatagaaagatacatgaaagaaac

SEQ ID NO: 3445879 - DNA, 25 bp, Homo sapien
tcatctttgaattgtggatagaaag

SEQ ID NO: 3445880 - DNA, 25 bp, Homo sapien
gaaactttgataggaattattaata

SEQ ID NO: 3445881 - DNA, 25 bp, Homo sapien
tattaatatcttcctcgaagtcaca

SEQ ID NO: 3445882 - DNA, 25 bp, Homo sapien
tttcacgtaaggatgagctcccgca

SEQ ID NO: 3445883 - DNA, 25 bp, Homo sapien
tcagtacttcattaaacattgcaga

SEQ ID NO: 3445884 - DNA, 25 bp, Homo sapien
ttctcccttgccatatactttgtga

SEQ ID NO: 3445885 - DNA, 25 bp, Homo sapien
gagaaccatctagtagctcgaaata

SEQ ID NO: 3445886 - DNA, 25 bp, Homo sapien
tatagctggaagattggttaaggaa

SEQ ID NO: 3445887 - DNA, 25 bp, Homo sapien
tagctggaagattggttaaggaaaa

SEQ ID NO: 3445888 - DNA, 25 bp, Homo sapien
tggaagattggttaaggaaaagcac

SEQ ID NO: 3445889 - DNA, 25 bp, Homo sapien
gctggaagattggttaaggaaaagc

SEQ ID NO: 3445890 - DNA, 25 bp, Homo sapien
tcttgggtgttgacaatatcaaaga

SEQ ID NO: 3445891 - DNA, 25 bp, Homo sapien
agtgcatcttgggtgttgacaatat

SEQ ID NO: 3445892 - DNA, 25 bp, Homo sapien
gcatcttgggtgttgacaatatcaa

SEQ ID NO: 3445893 - DNA, 25 bp, Homo sapien
gggtgttgacaatatcaaagatgtt

SEQ ID NO: 3445894 - DNA, 25 bp, Homo sapien
ttattcagcttcttcctttccattg

SEQ ID NO: 3445895 - DNA, 25 bp, Homo sapien
tcagcttcttcctttccattgtctg

SEQ ID NO: 3445896 - DNA, 25 bp, Homo sapien
attcagcttcttcctttccattgtc

SEQ ID NO: 3445897 - DNA, 25 bp, Homo sapien
cagcttcttcctttccattgtctgt

SEQ ID NO: 3445898 - DNA, 25 bp, Homo sapien
tttcatagtaatctggaaaagccat

SEQ ID NO: 3445899 - DNA, 25 bp, Homo sapien
cattctctccagatagtactgggtt

SEQ ID NO: 3445900 - DNA, 25 bp, Homo sapien
tactgggtttcatagtaatctggaa

SEQ ID NO: 3445901 - DNA, 25 bp, Homo sapien
ccagatagtactgggtttcatagta

SEQ ID NO: 3445902 - DNA, 25 bp, Homo sapien
ctactttagtaaaagtactgccaga

SEQ ID NO: 3445903 - DNA, 25 bp, Homo sapien
cctactttagtaaaagtactgccag

SEQ ID NO: 3445904 - DNA, 25 bp, Homo sapien
tcctactttagtaaaagtactgcca

SEQ ID NO: 3445905 - DNA, 25 bp, Homo sapien
aggcgctcaaaggtggtcattgcat

SEQ ID NO: 3445906 - DNA, 25 bp, Homo sapien
acacaattgagaaattgagcataag

SEQ ID NO: 3445907 - DNA, 25 bp, Homo sapien
ataaggcgctcaaaggtggtcattg

SEQ ID NO: 3445908 - DNA, 25 bp, Homo sapien
aaattgagcataaggcgctcaaagg

SEQ ID NO: 3445909 - DNA, 25 bp, Homo sapien
tttcttagaggagcgcttagccagg

SEQ ID NO: 3445910 - DNA, 25 bp, Homo sapien
taccatttcttagaggagcgcttag

SEQ ID NO: 3445911 - DNA, 25 bp, Homo sapien
aagaacgataccatttcttagagga

SEQ ID NO: 3445912 - DNA, 25 bp, Homo sapien
cgataccatttcttagaggagcgct

SEQ ID NO: 3445913 - DNA, 25 bp, Homo sapien
tacacaaatggtgcaagagagagga

SEQ ID NO: 3445914 - DNA, 25 bp, Homo sapien
tgttaaaggtttacttgcttcagaa

SEQ ID NO: 3445915 - DNA, 25 bp, Homo sapien
tacatttgtgttcagtatactacac

SEQ ID NO: 3445916 - DNA, 25 bp, Homo sapien
cagtaagattctggtaggtagttaa

SEQ ID NO: 3445917 - DNA, 25 bp, Homo sapien
atctggtctacctccttccggttat

SEQ ID NO: 3445918 - DNA, 25 bp, Homo sapien
ctccttccggttattccatagtctc

SEQ ID NO: 3445919 - DNA, 25 bp, Homo sapien
cctccttccggttattccatagtct

SEQ ID NO: 3445920 - DNA, 25 bp, Homo sapien
ctcatctggtctacctccttccggt

SEQ ID NO: 3445921 - DNA, 25 bp, Homo sapien
agtactctaaaagcacactggaatt

SEQ ID NO: 3445922 - DNA, 25 bp, Homo sapien
agtcacctttgcagtactctaaaag

SEQ ID NO: 3445923 - DNA, 25 bp, Homo sapien
tggcatgcaacagccaaatgggcag

SEQ ID NO: 3445924 - DNA, 25 bp, Homo sapien
cagaaaatgggtattgacggttgct

SEQ ID NO: 3445925 - DNA, 25 bp, Homo sapien
aagatatggatacttcgtaacagga

SEQ ID NO: 3445926 - DNA, 25 bp, Homo sapien
gatacttcgtaacaggaagttcaaa

SEQ ID NO: 3445927 - DNA, 25 bp, Homo sapien
ccagcttgcttaagatgtgctctag

SEQ ID NO: 3445928 - DNA, 25 bp, Homo sapien
tctagagtccggctatttggagagc

SEQ ID NO: 3445929 - DNA, 25 bp, Homo sapien
gccaaaatcctttatgtcgcctaca

SEQ ID NO: 3445930 - DNA, 25 bp, Homo sapien
tacaatgcctagtagaatgtggctg

SEQ ID NO: 3445931 - DNA, 25 bp, Homo sapien
gctgtgtctccttctctagtctgtt

SEQ ID NO: 3445932 - DNA, 25 bp, Homo sapien
taacccaatcatgttgtcactcttc

SEQ ID NO: 3445933 - DNA, 25 bp, Homo sapien
caatgatataggtccagagagacca

SEQ ID NO: 3445934 - DNA, 25 bp, Homo sapien
gctagtctcgggcttctgtgctcaa

SEQ ID NO: 3445935 - DNA, 25 bp, Homo sapien
tatggtacctggaatttaataggca

SEQ ID NO: 3445936 - DNA, 25 bp, Homo sapien
ccggttcaatcccaattaagtcaga

SEQ ID NO: 3445937 - DNA, 25 bp, Homo sapien
agtaatagaatgtaagaaaataggc

SEQ ID NO: 3445938 - DNA, 25 bp, Homo sapien
gaccatagtaatagaatgtaagaaa

SEQ ID NO: 3445939 - DNA, 25 bp, Homo sapien
atagaatgtaagaaaataggctggg

SEQ ID NO: 3445940 - DNA, 25 bp, Homo sapien
aataaatgaccatagtaatagaatg

SEQ ID NO: 3445941 - DNA, 25 bp, Homo sapien
agtagagatcaatgccaagctgtcc

SEQ ID NO: 3445942 - DNA, 25 bp, Homo sapien
tctagagagctgtattttaacacgt

SEQ ID NO: 3445943 - DNA, 25 bp, Homo sapien
caagaatgattcttagtgccgagtg

SEQ ID NO: 3445944 - DNA, 25 bp, Homo sapien
agcaatactggcctttcacctggtt

SEQ ID NO: 3445945 - DNA, 25 bp, Homo sapien
gaaagaataaatggccaggcaatca

SEQ ID NO: 3445946 - DNA, 25 bp, Homo sapien
cactgtgaaatttcagggccagaaa

SEQ ID NO: 3445947 - DNA, 25 bp, Homo sapien
gcttcataaaactccatacacggga

SEQ ID NO: 3445948 - DNA, 25 bp, Homo sapien
tctgggagttcacttaaggtcaatg

SEQ ID NO: 3445949 - DNA, 25 bp, Homo sapien
ctgaatctcagtcaagccagggaga

SEQ ID NO: 3445950 - DNA, 25 bp, Homo sapien
gagtagtctgaccaagggcttctgc

SEQ ID NO: 3445951 - DNA, 25 bp, Homo sapien
tcaaccttgagagtagtctgaccaa

SEQ ID NO: 3445952 - DNA, 25 bp, Homo sapien
caagccagggagattcaaccttgag

SEQ ID NO: 3445953 - DNA, 25 bp, Homo sapien
attaatattaattgactacatgaca

SEQ ID NO: 3445954 - DNA, 25 bp, Homo sapien
ctggaggaaaagtggtgaacaaaga

SEQ ID NO: 3445955 - DNA, 25 bp, Homo sapien
gtgctggaggaaaagtggtgaacaa

SEQ ID NO: 3445956 - DNA, 25 bp, Homo sapien
ttaattgactacatgacatgtgctg

SEQ ID NO: 3445957 - DNA, 25 bp, Homo sapien
ggagggggaacttctcctcaactca

SEQ ID NO: 3445958 - DNA, 25 bp, Homo sapien
gggggaacttctcctcaactcattc

SEQ ID NO: 3445959 - DNA, 25 bp, Homo sapien
gctggtgccattccaacagtaactt

SEQ ID NO: 3445960 - DNA, 25 bp, Homo sapien
gagggggaacttctcctcaactcat

SEQ ID NO: 3445961 - DNA, 25 bp, Homo sapien
gtaactgctttctccggttcagtgc

SEQ ID NO: 3445962 - DNA, 25 bp, Homo sapien
gaatgataatcaaatgccgtcttca

SEQ ID NO: 3445963 - DNA, 25 bp, Homo sapien
aagttgtcctgataggttgaagtca

SEQ ID NO: 3445964 - DNA, 25 bp, Homo sapien
tgaacaaagtagtctctgggagaag

SEQ ID NO: 3445965 - DNA, 25 bp, Homo sapien
tcacattgataacgccacctagtgg

SEQ ID NO: 3445966 - DNA, 25 bp, Homo sapien
tgtacttcctagagttcagacgacc

SEQ ID NO: 3445967 - DNA, 25 bp, Homo sapien
tccactctactgtacaggacaggtg

SEQ ID NO: 3445968 - DNA, 25 bp, Homo sapien
ggtaagatcatgctcatcccttgtc

SEQ ID NO: 3445969 - DNA, 25 bp, Homo sapien
ccaaacagacattgctggagggcag

SEQ ID NO: 3445970 - DNA, 25 bp, Homo sapien
taataggctccaagcatcgactccc

SEQ ID NO: 3445971 - DNA, 25 bp, Homo sapien
tgtggcacaggcagtgttatgcgcc

SEQ ID NO: 3445972 - DNA, 25 bp, Homo sapien
cattcgatagagtgaccaggcctcc

SEQ ID NO: 3445973 - DNA, 25 bp, Homo sapien
tgtgccatatcaacccgctgtgcct

SEQ ID NO: 3445974 - DNA, 25 bp, Homo sapien
tatgaccgcatcaagttcctcgtgg

SEQ ID NO: 3445975 - DNA, 25 bp, Homo sapien
gaactgaatcactctagagcctctt

SEQ ID NO: 3445976 - DNA, 25 bp, Homo sapien
gaacccctttgatggagggtgagtc

SEQ ID NO: 3445977 - DNA, 25 bp, Homo sapien
ccagccagagcacatagatgaaaac

SEQ ID NO: 3445978 - DNA, 25 bp, Homo sapien
tcagtgagagtatggcagggccttc

SEQ ID NO: 3445979 - DNA, 25 bp, Homo sapien
aggcatcaaagagggatctcagtga

SEQ ID NO: 3445980 - DNA, 25 bp, Homo sapien
gaaaacgttagcagaagccagccct

SEQ ID NO: 3445981 - DNA, 25 bp, Homo sapien
gtgactcgatgactgccagtctcct

SEQ ID NO: 3445982 - DNA, 25 bp, Homo sapien
atgctctcaccttgggcactggctc

SEQ ID NO: 3445983 - DNA, 25 bp, Homo sapien
cctgatgctctcaccttgggcactg

SEQ ID NO: 3445984 - DNA, 25 bp, Homo sapien
tgatgctctcaccttgggcactggc

SEQ ID NO: 3445985 - DNA, 25 bp, Homo sapien
ttaaaaatggaaacaagatccctca

SEQ ID NO: 3445986 - DNA, 25 bp, Homo sapien
taaaaatggaaacaagatccctcac

SEQ ID NO: 3445987 - DNA, 25 bp, Homo sapien
ccctctcagttcagtgggctgtcca

SEQ ID NO: 3445988 - DNA, 25 bp, Homo sapien
tcagggccctctcagttcagtgggc

SEQ ID NO: 3445989 - DNA, 25 bp, Homo sapien
tctcagttcagtgggctgtccaccc

SEQ ID NO: 3445990 - DNA, 25 bp, Homo sapien
cagggccctctcagttcagtgggct

SEQ ID NO: 3445991 - DNA, 25 bp, Homo sapien
ctgaatggttggcactgcgtctgcc

SEQ ID NO: 3445992 - DNA, 25 bp, Homo sapien
tagacctgaatggttggcactgcgt

SEQ ID NO: 3445993 - DNA, 25 bp, Homo sapien
acctgaatggttggcactgcgtctg

SEQ ID NO: 3445994 - DNA, 25 bp, Homo sapien
ttagacctgaatggttggcactgcg

SEQ ID NO: 3445995 - DNA, 25 bp, Homo sapien
caagataccacatatacagaattat

SEQ ID NO: 3445996 - DNA, 25 bp, Homo sapien
gcttgactctaaagctgtgattgtt

SEQ ID NO: 3445997 - DNA, 25 bp, Homo sapien
gaattatttaccagacttcaggaga

SEQ ID NO: 3445998 - DNA, 25 bp, Homo sapien
aagaaaacacctgtagaaaatgcca

SEQ ID NO: 3445999 - DNA, 25 bp, Homo sapien
ccttggggatgcagataccttttcc

SEQ ID NO: 3446000 - DNA, 25 bp, Homo sapien
tcccctgtatgctctgttgtcgctc

SEQ ID NO: 3446001 - DNA, 25 bp, Homo sapien
tcgctcttctagaacagattccacc

SEQ ID NO: 3446002 - DNA, 25 bp, Homo sapien
catccacttctacctcccctgtatg

SEQ ID NO: 3446003 - DNA, 25 bp, Homo sapien
ccttttgaggtaatgtgcttggcag

SEQ ID NO: 3446004 - DNA, 25 bp, Homo sapien
gaatctgatgtgttactgcacgtaa

SEQ ID NO: 3446005 - DNA, 25 bp, Homo sapien
caggaaccgtagctcagtgaagtca

SEQ ID NO: 3446006 - DNA, 25 bp, Homo sapien
tggcataggatccaggtccctggct

SEQ ID NO: 3446007 - DNA, 25 bp, Homo sapien
gcaaggcagcatcatgcagctcaca

SEQ ID NO: 3446008 - DNA, 25 bp, Homo sapien
tgctgcaaggcagcatcatgcagct

SEQ ID NO: 3446009 - DNA, 25 bp, Homo sapien
aaggcagcatcatgcagctcacact

SEQ ID NO: 3446010 - DNA, 25 bp, Homo sapien
ggcagcatcatgcagctcacactct

SEQ ID NO: 3446011 - DNA, 25 bp, Homo sapien
taatcaccatgggatctccagtgcc

SEQ ID NO: 3446012 - DNA, 25 bp, Homo sapien
tgaaagtaattcctacagcagtcct

SEQ ID NO: 3446013 - DNA, 25 bp, Homo sapien
gttccccaagtacccacagctagga

SEQ ID NO: 3446014 - DNA, 25 bp, Homo sapien
gactaggagaggagctgtaacccac

SEQ ID NO: 3446015 - DNA, 25 bp, Homo sapien
cactgagatagagtcgcatcaaccg

SEQ ID NO: 3446016 - DNA, 25 bp, Homo sapien
taaattacagagttcacacacagag

SEQ ID NO: 3446017 - DNA, 25 bp, Homo sapien
taacctgtgtacaacgtggcactga

SEQ ID NO: 3446018 - DNA, 25 bp, Homo sapien
gccacacctggtgctagtgccaggg

SEQ ID NO: 3446019 - DNA, 25 bp, Homo sapien
ccctgtgaggttgggatgacaggta

SEQ ID NO: 3446020 - DNA, 25 bp, Homo sapien
tgacaggtacggtattgcccctgtt

SEQ ID NO: 3446021 - DNA, 25 bp, Homo sapien
gagtggccgtgacttgcatgagcca

SEQ ID NO: 3446022 - DNA, 25 bp, Homo sapien
gaggctagaggagtggccgtgactt

SEQ ID NO: 3446023 - DNA, 25 bp, Homo sapien
gctgtgacccaagctggactggaca

SEQ ID NO: 3446024 - DNA, 25 bp, Homo sapien
ttagaccagtgttcaggccacggaa

SEQ ID NO: 3446025 - DNA, 25 bp, Homo sapien
tgtctgcgtgagaggcgaatgccac

SEQ ID NO: 3446026 - DNA, 25 bp, Homo sapien
catggaccccacatgttcaggccgg

SEQ ID NO: 3446027 - DNA, 25 bp, Homo sapien
gtgtgcctgtcattacctcccattc

SEQ ID NO: 3446028 - DNA, 25 bp, Homo sapien
gaatttgccgtttgaaactgacgga

SEQ ID NO: 3446029 - DNA, 25 bp, Homo sapien
ttgaaactgacggatgatgctgtgt

SEQ ID NO: 3446030 - DNA, 25 bp, Homo sapien
aggctccaaggagagctgatcttct

SEQ ID NO: 3446031 - DNA, 25 bp, Homo sapien
gctacaagggcgagagctgtgagga

SEQ ID NO: 3446032 - DNA, 25 bp, Homo sapien
caaccagtgtatcgatgtggcctgc

SEQ ID NO: 3446033 - DNA, 25 bp, Homo sapien
accctggctacaagggcgagagctg

SEQ ID NO: 3446034 - DNA, 25 bp, Homo sapien
tacaagggcgagagctgtgaggaag

SEQ ID NO: 3446035 - DNA, 25 bp, Homo sapien
tactgttatctcaggaaccgcaggg

SEQ ID NO: 3446036 - DNA, 25 bp, Homo sapien
tcctgaaatgagcaaacgtctcccc

SEQ ID NO: 3446037 - DNA, 25 bp, Homo sapien
ccatcaagggatggatgataatgcg

SEQ ID NO: 3446038 - DNA, 25 bp, Homo sapien
aaaagttaaggtagctcctgaaatg

SEQ ID NO: 3446039 - DNA, 25 bp, Homo sapien
taagtacataattcacagatgccat

SEQ ID NO: 3446040 - DNA, 25 bp, Homo sapien
tttaagtacataattcacagatgcc

SEQ ID NO: 3446041 - DNA, 25 bp, Homo sapien
ttaagtacataattcacagatgcca

SEQ ID NO: 3446042 - DNA, 25 bp, Homo sapien
gctcaaagatatagacccaagttat

SEQ ID NO: 3446043 - DNA, 25 bp, Homo sapien
ttggcctctggctcaaagatataga

SEQ ID NO: 3446044 - DNA, 25 bp, Homo sapien
cccaagttattatgttgagtgttac

SEQ ID NO: 3446045 - DNA, 25 bp, Homo sapien
gaagaagtccaacttggcctctggc

SEQ ID NO: 3446046 - DNA, 25 bp, Homo sapien
tatcctgttgtcacaaagtacacgc

SEQ ID NO: 3446047 - DNA, 25 bp, Homo sapien
tgatataagccagtactgtgtggag

SEQ ID NO: 3446048 - DNA, 25 bp, Homo sapien
gtcacaaagtacacgcacctgcatg

SEQ ID NO: 3446049 - DNA, 25 bp, Homo sapien
gagatggtgttggagcattaattgc

SEQ ID NO: 3446050 - DNA, 25 bp, Homo sapien
tccccaagccttcggagagtcgtag

SEQ ID NO: 3446051 - DNA, 25 bp, Homo sapien
cggagagtcgtagcctggaaagcca

SEQ ID NO: 3446052 - DNA, 25 bp, Homo sapien
tggaaagccatcagatgacccgagc

SEQ ID NO: 3446053 - DNA, 25 bp, Homo sapien
gggatgtgcacctgcgtcctgctaa

SEQ ID NO: 3446054 - DNA, 25 bp, Homo sapien
tgcgttgtccgtgttgtgagtcctc

SEQ ID NO: 3446055 - DNA, 25 bp, Homo sapien
cactggcttagagacccctgacagg

SEQ ID NO: 3446056 - DNA, 25 bp, Homo sapien
cctgtttggcctaaactggcacctg

SEQ ID NO: 3446057 - DNA, 25 bp, Homo sapien
tgtatgagatcacggaggacacagc

SEQ ID NO: 3446058 - DNA, 25 bp, Homo sapien
agtcaaacgggtatgctgtgctcca

SEQ ID NO: 3446059 - DNA, 25 bp, Homo sapien
tgaagcagacttgtgtgtgttcccc

SEQ ID NO: 3446060 - DNA, 25 bp, Homo sapien
caggatcctgtgttactgcctaaaa

SEQ ID NO: 3446061 - DNA, 25 bp, Homo sapien
tgtgctccagtctcctcggtagttt

SEQ ID NO: 3446062 - DNA, 25 bp, Homo sapien
tggaagaacaagcaatgaggatggc

SEQ ID NO: 3446063 - DNA, 25 bp, Homo sapien
ggaagcagcgcctgatggaagaaca

SEQ ID NO: 3446064 - DNA, 25 bp, Homo sapien
aatgaggatggctgtcctgctctgg

SEQ ID NO: 3446065 - DNA, 25 bp, Homo sapien
cacctgggaagcagcgcctgatgga

SEQ ID NO: 3446066 - DNA, 25 bp, Homo sapien
tgctttcttcttcacccctttggac

SEQ ID NO: 3446067 - DNA, 25 bp, Homo sapien
ctgtctccttcctttccttgctttc

SEQ ID NO: 3446068 - DNA, 25 bp, Homo sapien
tctgtctccttcctttccttgcttt

SEQ ID NO: 3446069 - DNA, 25 bp, Homo sapien
ccttgctttcttcttcacccctttg

SEQ ID NO: 3446070 - DNA, 25 bp, Homo sapien
gaacttcatatctggcatcactgga

SEQ ID NO: 3446071 - DNA, 25 bp, Homo sapien
gatgaaatggaagcctgtcctgtgc

SEQ ID NO: 3446072 - DNA, 25 bp, Homo sapien
ttggcactgctatgttgaacggtac

SEQ ID NO: 3446073 - DNA, 25 bp, Homo sapien
tgaacggtacaattgtagacaattc

SEQ ID NO: 3446074 - DNA, 25 bp, Homo sapien
tgtgtatgtaaaacgcagacactgc

SEQ ID NO: 3446075 - DNA, 25 bp, Homo sapien
taaatgaagacctgagaggacactg

SEQ ID NO: 3446076 - DNA, 25 bp, Homo sapien
aatctaaaatgaggagcggctttac

SEQ ID NO: 3446077 - DNA, 25 bp, Homo sapien
tcaagcacctgtcttgccaggtagg

SEQ ID NO: 3446078 - DNA, 25 bp, Homo sapien
tggtctagtccgtagctctccttgt

SEQ ID NO: 3446079 - DNA, 25 bp, Homo sapien
gaagccctccaagtactgtaactgg

SEQ ID NO: 3446080 - DNA, 25 bp, Homo sapien
tgtggtgactctctctatccaggct

SEQ ID NO: 3446081 - DNA, 25 bp, Homo sapien
tgtgtgccctgttccatggtctagt

SEQ ID NO: 3446082 - DNA, 25 bp, Homo sapien
gtgcagttgcctgtctgtcccccga

SEQ ID NO: 3446083 - DNA, 25 bp, Homo sapien
cctcatgactaggctgtagggtgca

SEQ ID NO: 3446084 - DNA, 25 bp, Homo sapien
catggcataacttagtggtggtttc

SEQ ID NO: 3446085 - DNA, 25 bp, Homo sapien
aggcatttgctgccattggctgtgt

SEQ ID NO: 3446086 - DNA, 25 bp, Homo sapien
gacctgctcatgctgtagagagagt

SEQ ID NO: 3446087 - DNA, 25 bp, Homo sapien
tcttccttggacctgctcatgctgt

SEQ ID NO: 3446088 - DNA, 25 bp, Homo sapien
tgtagagagagtggacagttccctc

SEQ ID NO: 3446089 - DNA, 25 bp, Homo sapien
ccttggacctgctcatgctgtagag

SEQ ID NO: 3446090 - DNA, 25 bp, Homo sapien
tgacctttgtcacattcagcaaact

SEQ ID NO: 3446091 - DNA, 25 bp, Homo sapien
ttgcctggtaatctgcagtgtgacc

SEQ ID NO: 3446092 - DNA, 25 bp, Homo sapien
cattgagaacccgttgtggcccggg

SEQ ID NO: 3446093 - DNA, 25 bp, Homo sapien
aagatttcctgtcctttgcctggta

SEQ ID NO: 3446094 - DNA, 25 bp, Homo sapien
aatctcattggcatttaacgtggct

SEQ ID NO: 3446095 - DNA, 25 bp, Homo sapien
agtgttctccaggtttagatgttgc

SEQ ID NO: 3446096 - DNA, 25 bp, Homo sapien
cttggcctcctgaacgcttctgaga

SEQ ID NO: 3446097 - DNA, 25 bp, Homo sapien
gattgaaacttagcaaatctgcagc

SEQ ID NO: 3446098 - DNA, 25 bp, Homo sapien
ggctggctgccttccagtgcaacta

SEQ ID NO: 3446099 - DNA, 25 bp, Homo sapien
gctggctgccttccagtgcaactac

SEQ ID NO: 3446100 - DNA, 25 bp, Homo sapien
gtggctggctgccttccagtgcaac

SEQ ID NO: 3446101 - DNA, 25 bp, Homo sapien
acgtggctggctgccttccagtgca

SEQ ID NO: 3446102 - DNA, 25 bp, Homo sapien
caccagaagagagatttgggaattc

SEQ ID NO: 3446103 - DNA, 25 bp, Homo sapien
gagatttgggaattccaaatggact

SEQ ID NO: 3446104 - DNA, 25 bp, Homo sapien
caatttctgggcttcgttagtccaa

SEQ ID NO: 3446105 - DNA, 25 bp, Homo sapien
aaatggacttttggtcttgcatgca

SEQ ID NO: 3446106 - DNA, 25 bp, Homo sapien
tggcttgtcagaaagataatctccc

SEQ ID NO: 3446107 - DNA, 25 bp, Homo sapien
gattgggataagtgcttggcttgtc

SEQ ID NO: 3446108 - DNA, 25 bp, Homo sapien
gtcagaaagataatctccccacacc

SEQ ID NO: 3446109 - DNA, 25 bp, Homo sapien
ccaggccctgagatgcactttcatc

SEQ ID NO: 3446110 - DNA, 25 bp, Homo sapien
tggaacctgccaaatcctataggaa

SEQ ID NO: 3446111 - DNA, 25 bp, Homo sapien
tagagccccgctgaaccttaagatg

SEQ ID NO: 3446112 - DNA, 25 bp, Homo sapien
tgcaaataatcagccgctctctgtg

SEQ ID NO: 3446113 - DNA, 25 bp, Homo sapien
gtgactgtgaaccaagtgggctgct

SEQ ID NO: 3446114 - DNA, 25 bp, Homo sapien
tctgtcatttccccaatcccatgaa

SEQ ID NO: 3446115 - DNA, 25 bp, Homo sapien
tgtcatttccccaatcccatgaaat

SEQ ID NO: 3446116 - DNA, 25 bp, Homo sapien
catttccccaatcccatgaaatcca

SEQ ID NO: 3446117 - DNA, 25 bp, Homo sapien
gtcatttccccaatcccatgaaatc

SEQ ID NO: 3446118 - DNA, 25 bp, Homo sapien
tcacataccaccacaaatccagaag

SEQ ID NO: 3446119 - DNA, 25 bp, Homo sapien
gcaagtctgagtgcccgtgctcttt

SEQ ID NO: 3446120 - DNA, 25 bp, Homo sapien
tcttttaagccatggaatcctgaga

SEQ ID NO: 3446121 - DNA, 25 bp, Homo sapien
aatcctgagatgaatgagctatgtc

SEQ ID NO: 3446122 - DNA, 25 bp, Homo sapien
tgctgcatttgctacttttctgtat

SEQ ID NO: 3446123 - DNA, 25 bp, Homo sapien
cctgctgcatttgctacttttctgt

SEQ ID NO: 3446124 - DNA, 25 bp, Homo sapien
cctcctgctgcatttgctacttttc

SEQ ID NO: 3446125 - DNA, 25 bp, Homo sapien
ctgcatttgctacttttctgtatct

SEQ ID NO: 3446126 - DNA, 25 bp, Homo sapien
caaagctgcaaacccttaatcactg

SEQ ID NO: 3446127 - DNA, 25 bp, Homo sapien
tacagtgtaccataaacatgctgtt

SEQ ID NO: 3446128 - DNA, 25 bp, Homo sapien
tccacaagaccaccattcttctgcc

SEQ ID NO: 3446129 - DNA, 25 bp, Homo sapien
tcactgcactgtctacagtgtacca

SEQ ID NO: 3446130 - DNA, 25 bp, Homo sapien
tcactacttttacgacaatgccacc

SEQ ID NO: 3446131 - DNA, 25 bp, Homo sapien
cactacttttacgacaatgccacca

SEQ ID NO: 3446132 - DNA, 25 bp, Homo sapien
cactgaccaagagctgcgggtttga

SEQ ID NO: 3446133 - DNA, 25 bp, Homo sapien
gcaagactgattccagcggcctcat

SEQ ID NO: 3446134 - DNA, 25 bp, Homo sapien
tctctgacacctctgagtaccaggg

SEQ ID NO: 3446135 - DNA, 25 bp, Homo sapien
tttagcaccctgcatgcaagactga

SEQ ID NO: 3446136 - DNA, 25 bp, Homo sapien
aaatacttgcttgagtgtctgaagc

SEQ ID NO: 3446137 - DNA, 25 bp, Homo sapien
tccaggtaggctgcaagctcataaa

SEQ ID NO: 3446138 - DNA, 25 bp, Homo sapien
cgcaggtgtacttgttttatttcca

SEQ ID NO: 3446139 - DNA, 25 bp, Homo sapien
tgttttatttccaggtaggctgcaa

SEQ ID NO: 3446140 - DNA, 25 bp, Homo sapien
ccattccttggactctagtcgcagg

SEQ ID NO: 3446141 - DNA, 25 bp, Homo sapien
catgaagctggataggggctgccaa

SEQ ID NO: 3446142 - DNA, 25 bp, Homo sapien
tggggttccaaccagcagccagttc

SEQ ID NO: 3446143 - DNA, 25 bp, Homo sapien
tcaggccataagtttctcccagcag

SEQ ID NO: 3446144 - DNA, 25 bp, Homo sapien
gggctgccaagccagcgggggtgca

SEQ ID NO: 3446145 - DNA, 25 bp, Homo sapien
ggaaaggtcgtcctcgctgagcagc

SEQ ID NO: 3446146 - DNA, 25 bp, Homo sapien
gaaaggtcgtcctcgctgagcagcc

SEQ ID NO: 3446147 - DNA, 25 bp, Homo sapien
ctcgctgagcagccactttcagccc

SEQ ID NO: 3446148 - DNA, 25 bp, Homo sapien
ggactgtttactgcatagctgagac

SEQ ID NO: 3446149 - DNA, 25 bp, Homo sapien
tcctttgccgggactgtttactgca

SEQ ID NO: 3446150 - DNA, 25 bp, Homo sapien
acaaagatcctttgccgggactgtt

SEQ ID NO: 3446151 - DNA, 25 bp, Homo sapien
tgccgggactgtttactgcatagct

SEQ ID NO: 3446152 - DNA, 25 bp, Homo sapien
gaatgcatgagagtgcggactgctc

SEQ ID NO: 3446153 - DNA, 25 bp, Homo sapien
cactgccacactgaaaggtttccag

SEQ ID NO: 3446154 - DNA, 25 bp, Homo sapien
agagtgattgccacagccactgcca

SEQ ID NO: 3446155 - DNA, 25 bp, Homo sapien
tggtcctgggactcattatcttgtt

SEQ ID NO: 3446156 - DNA, 25 bp, Homo sapien
cgttgccctcgttggagcacagaga

SEQ ID NO: 3446157 - DNA, 25 bp, Homo sapien
gaatcctgctcacacatgctgtgat

SEQ ID NO: 3446158 - DNA, 25 bp, Homo sapien
gctgtgatcactgacatcgttgccc

SEQ ID NO: 3446159 - DNA, 25 bp, Homo sapien
cctgaatcctgctcacacatgctgt

SEQ ID NO: 3446160 - DNA, 25 bp, Homo sapien
ggaatgagactgagaaatgttgagg

SEQ ID NO: 3446161 - DNA, 25 bp, Homo sapien
ctgggaatgagactgagaaatgttg

SEQ ID NO: 3446162 - DNA, 25 bp, Homo sapien
gaatgagactgagaaatgttgaggc

SEQ ID NO: 3446163 - DNA, 25 bp, Homo sapien
tgggaatgagactgagaaatgttga

SEQ ID NO: 3446164 - DNA, 25 bp, Homo sapien
aaagctacttgtcacaaataccaag

SEQ ID NO: 3446165 - DNA, 25 bp, Homo sapien
gatagagaaagctacttgtcacaaa

SEQ ID NO: 3446166 - DNA, 25 bp, Homo sapien
tgaattaagattccaactgcgaagg

SEQ ID NO: 3446167 - DNA, 25 bp, Homo sapien
tttctgaattaagattccaactgcg

SEQ ID NO: 3446168 - DNA, 25 bp, Homo sapien
cagcacacggcttcactctgcttgg

SEQ ID NO: 3446169 - DNA, 25 bp, Homo sapien
cttggcatgcagctcgaggaaattt

SEQ ID NO: 3446170 - DNA, 25 bp, Homo sapien
gatacggggcccataaatcatccac

SEQ ID NO: 3446171 - DNA, 25 bp, Homo sapien
tgcctgagcagcacacggcttcact

SEQ ID NO: 3446172 - DNA, 25 bp, Homo sapien
ctgctcttagaggtccgtgcatatc

SEQ ID NO: 3446173 - DNA, 25 bp, Homo sapien
ggtccgtgcatatcatcatggtcca

SEQ ID NO: 3446174 - DNA, 25 bp, Homo sapien
tatcatcatggtccacgtatgccag

SEQ ID NO: 3446175 - DNA, 25 bp, Homo sapien
atggtccacgtatgccagtcccaca

SEQ ID NO: 3446176 - DNA, 25 bp, Homo sapien
caggtaagtttgagacccttcgctc

SEQ ID NO: 3446177 - DNA, 25 bp, Homo sapien
tccaggtaagtttgagacccttcgc

SEQ ID NO: 3446178 - DNA, 25 bp, Homo sapien
ggtaagtttgagacccttcgctcac

SEQ ID NO: 3446179 - DNA, 25 bp, Homo sapien
ccaggtaagtttgagacccttcgct

SEQ ID NO: 3446180 - DNA, 25 bp, Homo sapien
cccagccctctgtagctcctcagac

SEQ ID NO: 3446181 - DNA, 25 bp, Homo sapien
ggatgaggggaccttagccccagcc

SEQ ID NO: 3446182 - DNA, 25 bp, Homo sapien
tctgaaagttctatgaaaactagtt

SEQ ID NO: 3446183 - DNA, 25 bp, Homo sapien
tatgaaaactagttccccagatgtc

SEQ ID NO: 3446184 - DNA, 25 bp, Homo sapien
ttaagaactgtgctggatgaaactt

SEQ ID NO: 3446185 - DNA, 25 bp, Homo sapien
gcctcataggtgcagcagctgacag

SEQ ID NO: 3446186 - DNA, 25 bp, Homo sapien
tgcctcataggtgcagcagctgaca

SEQ ID NO: 3446187 - DNA, 25 bp, Homo sapien
tagtgcccagaggtcttggctttct

SEQ ID NO: 3446188 - DNA, 25 bp, Homo sapien
cagttagtgcccagaggtcttggct

SEQ ID NO: 3446189 - DNA, 25 bp, Homo sapien
ctgcagttagtgcccagaggtcttg

SEQ ID NO: 3446190 - DNA, 25 bp, Homo sapien
gttagtgcccagaggtcttggcttt

SEQ ID NO: 3446191 - DNA, 25 bp, Homo sapien
tgacagctgtgctgacgtacagcaa

SEQ ID NO: 3446192 - DNA, 25 bp, Homo sapien
cagctgtgctgacgtacagcaagtg

SEQ ID NO: 3446193 - DNA, 25 bp, Homo sapien
aggctgacagctgtgctgacgtaca

SEQ ID NO: 3446194 - DNA, 25 bp, Homo sapien
ctgtgctgacgtacagcaagtgtgg

SEQ ID NO: 3446195 - DNA, 25 bp, Homo sapien
ctttcacagtttataggaggtacta

SEQ ID NO: 3446196 - DNA, 25 bp, Homo sapien
caagcactgagtacatgtctgacac

SEQ ID NO: 3446197 - DNA, 25 bp, Homo sapien
ttagccgagaatatagtagtggtcc

SEQ ID NO: 3446198 - DNA, 25 bp, Homo sapien
tgaatgctttagatacgtttccatc

SEQ ID NO: 3446199 - DNA, 25 bp, Homo sapien
cttggctaaggacagttcctctgca

SEQ ID NO: 3446200 - DNA, 25 bp, Homo sapien
tggctaaggacagttcctctgcatc

SEQ ID NO: 3446201 - DNA, 25 bp, Homo sapien
aggacagttcctctgcatcctttgg

SEQ ID NO: 3446202 - DNA, 25 bp, Homo sapien
catcctttggctgaaggctctacca

SEQ ID NO: 3446203 - DNA, 25 bp, Homo sapien
tcactcattaactgtccgtggctgc

SEQ ID NO: 3446204 - DNA, 25 bp, Homo sapien
cactgcagacctgtcagtaaggggg

SEQ ID NO: 3446205 - DNA, 25 bp, Homo sapien
ctcattaactgtccgtggctgcctg

SEQ ID NO: 3446206 - DNA, 25 bp, Homo sapien
ttgttaattaggaacaggtcccaga

SEQ ID NO: 3446207 - DNA, 25 bp, Homo sapien
catgacatcatctccccagtccagg

SEQ ID NO: 3446208 - DNA, 25 bp, Homo sapien
acatttcataagtcatgacatcatc

SEQ ID NO: 3446209 - DNA, 25 bp, Homo sapien
atgacatcatctccccagtccaggg

SEQ ID NO: 3446210 - DNA, 25 bp, Homo sapien
ctgacatttcataagtcatgacatc

SEQ ID NO: 3446211 - DNA, 25 bp, Homo sapien
ggatctctccactgagcacaaaggc

SEQ ID NO: 3446212 - DNA, 25 bp, Homo sapien
tggatctctccactgagcacaaagg

SEQ ID NO: 3446213 - DNA, 25 bp, Homo sapien
cactgacggctactagctttgttgt

SEQ ID NO: 3446214 - DNA, 25 bp, Homo sapien
tagcacgaaattggctggaattgcc

SEQ ID NO: 3446215 - DNA, 25 bp, Homo sapien
agtcctggcccagattaaatgcacc

SEQ ID NO: 3446216 - DNA, 25 bp, Homo sapien
tgtgatctgggagccaacactgacg

SEQ ID NO: 3446217 - DNA, 25 bp, Homo sapien
cagcagcttttatgtcactgcttaa

SEQ ID NO: 3446218 - DNA, 25 bp, Homo sapien
caacagtattgatagcggtagaggc

SEQ ID NO: 3446219 - DNA, 25 bp, Homo sapien
cctgaaggttaatgtcagcagcttt

SEQ ID NO: 3446220 - DNA, 25 bp, Homo sapien
tatggggtccattaaagacaatttc

SEQ ID NO: 3446221 - DNA, 25 bp, Homo sapien
cagttctccagatcgtcacgttaag

SEQ ID NO: 3446222 - DNA, 25 bp, Homo sapien
cacgttaagtgggatctgaccctta

SEQ ID NO: 3446223 - DNA, 25 bp, Homo sapien
tgtgtctctcctacccgccagagag

SEQ ID NO: 3446224 - DNA, 25 bp, Homo sapien
ctgtatctcagtacaggcccagggc

SEQ ID NO: 3446225 - DNA, 25 bp, Homo sapien
taagatggcgtctctgctggctcgc

SEQ ID NO: 3446226 - DNA, 25 bp, Homo sapien
gcttgtcctattcagtcctggccga

SEQ ID NO: 3446227 - DNA, 25 bp, Homo sapien
cgaggaggcctttaaagcttggcca

SEQ ID NO: 3446228 - DNA, 25 bp, Homo sapien
ttacagggcacctactctgcagcag

SEQ ID NO: 3446229 - DNA, 25 bp, Homo sapien
ggcgtcagtggcaatgtgctcacct

SEQ ID NO: 3446230 - DNA, 25 bp, Homo sapien
cacagatggcgtcagtggcaatgtg

SEQ ID NO: 3446231 - DNA, 25 bp, Homo sapien
ctgccagggtcttacacatctcaca

SEQ ID NO: 3446232 - DNA, 25 bp, Homo sapien
ttagcctgaggcctacaatgactga

SEQ ID NO: 3446233 - DNA, 25 bp, Homo sapien
cagcactagactggtctgcaacagt

SEQ ID NO: 3446234 - DNA, 25 bp, Homo sapien
tgtggtactcaggttttgcttggag

SEQ ID NO: 3446235 - DNA, 25 bp, Homo sapien
gaattcttctctaaggcacctttgt

SEQ ID NO: 3446236 - DNA, 25 bp, Homo sapien
cccagcactagactggtctgcaaca

SEQ ID NO: 3446237 - DNA, 25 bp, Homo sapien
gtccctagggctgacaccccagaga

SEQ ID NO: 3446238 - DNA, 25 bp, Homo sapien
ccctagggctgacaccccagagaga

SEQ ID NO: 3446239 - DNA, 25 bp, Homo sapien
tggtccctagggctgacaccccaga

SEQ ID NO: 3446240 - DNA, 25 bp, Homo sapien
atggtccctagggctgacaccccag

SEQ ID NO: 3446241 - DNA, 25 bp, Homo sapien
tctgaactctcggaatataactggg

SEQ ID NO: 3446242 - DNA, 25 bp, Homo sapien
ctccccagagtctgaactctcggaa

SEQ ID NO: 3446243 - DNA, 25 bp, Homo sapien
atataactgggcctttgtctgtgcc

SEQ ID NO: 3446244 - DNA, 25 bp, Homo sapien
tctcggaatataactgggcctttgt

SEQ ID NO: 3446245 - DNA, 25 bp, Homo sapien
cccatttccctgcgggttttggcag

SEQ ID NO: 3446246 - DNA, 25 bp, Homo sapien
gtatctgaggctgcgaggtaacccg

SEQ ID NO: 3446247 - DNA, 25 bp, Homo sapien
gcagaggttttttcgagcactgtac

SEQ ID NO: 3446248 - DNA, 25 bp, Homo sapien
caatttcctggctcgtttctggctg

SEQ ID NO: 3446249 - DNA, 25 bp, Homo sapien
tgtctctgtcccgacagttctcttt

SEQ ID NO: 3446250 - DNA, 25 bp, Homo sapien
cagccgctgattagggatgtccctg

SEQ ID NO: 3446251 - DNA, 25 bp, Homo sapien
cacactccaccacgctcccaggaaa

SEQ ID NO: 3446252 - DNA, 25 bp, Homo sapien
ctgccagccgctgattagggatgtc

SEQ ID NO: 3446253 - DNA, 25 bp, Homo sapien
cccacatccattgggcagcagttct

SEQ ID NO: 3446254 - DNA, 25 bp, Homo sapien
tgtgtcagccacgagcactccgagc

SEQ ID NO: 3446255 - DNA, 25 bp, Homo sapien
cagttctgagcttgatccagttcca

SEQ ID NO: 3446256 - DNA, 25 bp, Homo sapien
cagcaaaattgaaacctgtgtcagc

SEQ ID NO: 3446257 - DNA, 25 bp, Homo sapien
tcaaaccgctattgtgtgggcttca

SEQ ID NO: 3446258 - DNA, 25 bp, Homo sapien
catcacgagttgagggacggcctga

SEQ ID NO: 3446259 - DNA, 25 bp, Homo sapien
ggcttcagtcatcacgagttgaggg

SEQ ID NO: 3446260 - DNA, 25 bp, Homo sapien
aaaccgctattgtgtgggcttcagt

SEQ ID NO: 3446261 - DNA, 25 bp, Homo sapien
ctttcttctgcacgggtgtctgcat

SEQ ID NO: 3446262 - DNA, 25 bp, Homo sapien
cctttcttctgcacgggtgtctgca

SEQ ID NO: 3446263 - DNA, 25 bp, Homo sapien
tgcctttcttctgcacgggtgtctg

SEQ ID NO: 3446264 - DNA, 25 bp, Homo sapien
gcctttcttctgcacgggtgtctgc

SEQ ID NO: 3446265 - DNA, 25 bp, Homo sapien
tttatggcaagaagaacaagtggca

SEQ ID NO: 3446266 - DNA, 25 bp, Homo sapien
ttttcatcttactggccagaagtgg

SEQ ID NO: 3446267 - DNA, 25 bp, Homo sapien
gtggcatcagcaaaagccctcccaa

SEQ ID NO: 3446268 - DNA, 25 bp, Homo sapien
catgattaccactagctgcaaggga

SEQ ID NO: 3446269 - DNA, 25 bp, Homo sapien
tgccatcacagtgaatcatcataca

SEQ ID NO: 3446270 - DNA, 25 bp, Homo sapien
tcatacagcagatgatcagaggctg

SEQ ID NO: 3446271 - DNA, 25 bp, Homo sapien
tcatcatacagcagatgatcagagg

SEQ ID NO: 3446272 - DNA, 25 bp, Homo sapien
cagtgaatcatcatacagcagatga

SEQ ID NO: 3446273 - DNA, 25 bp, Homo sapien
tgctttctttgccccaaggacttcc

SEQ ID NO: 3446274 - DNA, 25 bp, Homo sapien
tgtgtctagtgctttctttgcccca

SEQ ID NO: 3446275 - DNA, 25 bp, Homo sapien
ttctttgccccaaggacttcccaca

SEQ ID NO: 3446276 - DNA, 25 bp, Homo sapien
ctagtgctttctttgccccaaggac

SEQ ID NO: 3446277 - DNA, 25 bp, Homo sapien
ctggattgggcctccccctcctttg

SEQ ID NO: 3446278 - DNA, 25 bp, Homo sapien
tagtgtttattgagttgagagcaat

SEQ ID NO: 3446279 - DNA, 25 bp, Homo sapien
agacgtaagccctggaattgtcctg

SEQ ID NO: 3446280 - DNA, 25 bp, Homo sapien
tgtttattgagttgagagcaatgga

SEQ ID NO: 3446281 - DNA, 25 bp, Homo sapien
tccaggaggagaagacgtaagccct

SEQ ID NO: 3446282 - DNA, 25 bp, Homo sapien
gcattgatctgggacagcctggagc

SEQ ID NO: 3446283 - DNA, 25 bp, Homo sapien
ggcagcctcgtaaatcaggccccag

SEQ ID NO: 3446284 - DNA, 25 bp, Homo sapien
gaatcttccgcaaactccctgggag

SEQ ID NO: 3446285 - DNA, 25 bp, Homo sapien
cttgatcttcttgcagtaggagctc

SEQ ID NO: 3446286 - DNA, 25 bp, Homo sapien
tatcctgggccacgggtccatatgt

SEQ ID NO: 3446287 - DNA, 25 bp, Homo sapien
ttaagaagcagcattggaatccagg

SEQ ID NO: 3446288 - DNA, 25 bp, Homo sapien
tgtgtactcgatgtcagcctggtgc

SEQ ID NO: 3446289 - DNA, 25 bp, Homo sapien
gagcaaattgttcccttagcggtta

SEQ ID NO: 3446290 - DNA, 25 bp, Homo sapien
tgcgcgcgcgcgcgcatgtgcgtgc

SEQ ID NO: 3446291 - DNA, 25 bp, Homo sapien
acacaagaccacatgaagggtgtgt

SEQ ID NO: 3446292 - DNA, 25 bp, Homo sapien
ctacacaagaccacatgaagggtgt

SEQ ID NO: 3446293 - DNA, 25 bp, Homo sapien
cgcgcgcgcgcgcatgtgcgtgcat

SEQ ID NO: 3446294 - DNA, 25 bp, Homo sapien
aattagcaggcgatccatgttggaa

SEQ ID NO: 3446295 - DNA, 25 bp, Homo sapien
tgtgaaatgtggatagagcccctgt

SEQ ID NO: 3446296 - DNA, 25 bp, Homo sapien
cagcttgttctgtgaaaggcagccc

SEQ ID NO: 3446297 - DNA, 25 bp, Homo sapien
tgagacggattcacatgttcgctgt

SEQ ID NO: 3446298 - DNA, 25 bp, Homo sapien
tcagactcgtgctgagtggaggcca

SEQ ID NO: 3446299 - DNA, 25 bp, Homo sapien
tctagacagtcaccctttgagggag

SEQ ID NO: 3446300 - DNA, 25 bp, Homo sapien
ccggttactcgagtcatgggagcaa

SEQ ID NO: 3446301 - DNA, 25 bp, Homo sapien
caggtgtgcatgagctcccggttac

SEQ ID NO: 3446302 - DNA, 25 bp, Homo sapien
gcttccttgtaagtttattcctgga

SEQ ID NO: 3446303 - DNA, 25 bp, Homo sapien
taagtttattcctggagcaggttgc

SEQ ID NO: 3446304 - DNA, 25 bp, Homo sapien
caggttgccacttgtcacttggagc

SEQ ID NO: 3446305 - DNA, 25 bp, Homo sapien
tttgtccacttgaaaacacattggg

SEQ ID NO: 3446306 - DNA, 25 bp, Homo sapien
tgggaagtggaagggccttggtgga

SEQ ID NO: 3446307 - DNA, 25 bp, Homo sapien
cttgggaagtggaagggccttggtg

SEQ ID NO: 3446308 - DNA, 25 bp, Homo sapien
gtggaagggccttggtggaagtcca

SEQ ID NO: 3446309 - DNA, 25 bp, Homo sapien
tggtttagggcaatagctgccaaat

SEQ ID NO: 3446310 - DNA, 25 bp, Homo sapien
tagggcaatagctgccaaattgaag

SEQ ID NO: 3446311 - DNA, 25 bp, Homo sapien
ccctttagtcatctggtttagggca

SEQ ID NO: 3446312 - DNA, 25 bp, Homo sapien
tgctgctcagagtcagccctttagt

SEQ ID NO: 3446313 - DNA, 25 bp, Homo sapien
tggttctctcaaccagccagcaaca

SEQ ID NO: 3446314 - DNA, 25 bp, Homo sapien
ggttctctcaaccagccagcaacac

SEQ ID NO: 3446315 - DNA, 25 bp, Homo sapien
gttctctcaaccagccagcaacact

SEQ ID NO: 3446316 - DNA, 25 bp, Homo sapien
ccggcataagctggttctctcaacc

SEQ ID NO: 3446317 - DNA, 25 bp, Homo sapien
agagacttctttccctcctaggcca

SEQ ID NO: 3446318 - DNA, 25 bp, Homo sapien
gatccaggaactccagagacttctt

SEQ ID NO: 3446319 - DNA, 25 bp, Homo sapien
ttccctcctaggccagcactgtcac

SEQ ID NO: 3446320 - DNA, 25 bp, Homo sapien
agatccaggaactccagagacttct

SEQ ID NO: 3446321 - DNA, 25 bp, Homo sapien
aagtcatcaagctctagtttaccag

SEQ ID NO: 3446322 - DNA, 25 bp, Homo sapien
ccctgcaagtcatcaagctctagtt

SEQ ID NO: 3446323 - DNA, 25 bp, Homo sapien
catcaagctctagtttaccagagcc

SEQ ID NO: 3446324 - DNA, 25 bp, Homo sapien
caagctctagtttaccagagccttt

SEQ ID NO: 3446325 - DNA, 25 bp, Homo sapien
tcatccaacaatgagggctttgtgc

SEQ ID NO: 3446326 - DNA, 25 bp, Homo sapien
gcctcagctatctctatcttaggga

SEQ ID NO: 3446327 - DNA, 25 bp, Homo sapien
cagctgtcctgcgttgacaatagac

SEQ ID NO: 3446328 - DNA, 25 bp, Homo sapien
tctatgagcatttgcagagaaagcc

SEQ ID NO: 3446329 - DNA, 25 bp, Homo sapien
ccaaacatgggttttcagttcctgg

SEQ ID NO: 3446330 - DNA, 25 bp, Homo sapien
tttctgactaagcaaagtagaatgt

SEQ ID NO: 3446331 - DNA, 25 bp, Homo sapien
taagcaaagtagaatgtagccaaac

SEQ ID NO: 3446332 - DNA, 25 bp, Homo sapien
caaacatgggttttcagttcctggt

SEQ ID NO: 3446333 - DNA, 25 bp, Homo sapien
tctgtaaaagaaagtggttgtagcc

SEQ ID NO: 3446334 - DNA, 25 bp, Homo sapien
gacgatgaacctctccggttctcct

SEQ ID NO: 3446335 - DNA, 25 bp, Homo sapien
gttgtagccgttcactttgaaggtc

SEQ ID NO: 3446336 - DNA, 25 bp, Homo sapien
ctggagacgatgaacctctccggtt

SEQ ID NO: 3446337 - DNA, 25 bp, Homo sapien
ggtagcaaacagtacaggaaagggc

SEQ ID NO: 3446338 - DNA, 25 bp, Homo sapien
gtagcaaacagtacaggaaagggcc

SEQ ID NO: 3446339 - DNA, 25 bp, Homo sapien
ctggtagcaaacagtacaggaaagg

SEQ ID NO: 3446340 - DNA, 25 bp, Homo sapien
tggtagcaaacagtacaggaaaggg

SEQ ID NO: 3446341 - DNA, 25 bp, Homo sapien
tctgggtcccgctagggtttgcctc

SEQ ID NO: 3446342 - DNA, 25 bp, Homo sapien
gggagacaagctactcacttggata

SEQ ID NO: 3446343 - DNA, 25 bp, Homo sapien
tccattggcccagatactccggatc

SEQ ID NO: 3446344 - DNA, 25 bp, Homo sapien
tactcacttggataatggtgaggtc

SEQ ID NO: 3446345 - DNA, 25 bp, Homo sapien
gggttccacaggagcccctactgtg

SEQ ID NO: 3446346 - DNA, 25 bp, Homo sapien
ggttccacaggagcccctactgtgt

SEQ ID NO: 3446347 - DNA, 25 bp, Homo sapien
tcagagtaggtcaaatgtgggttcc

SEQ ID NO: 3446348 - DNA, 25 bp, Homo sapien
gagtaggtcaaatgtgggttccaca

SEQ ID NO: 3446349 - DNA, 25 bp, Homo sapien
ctctggtgcagagttagttgctcaa

SEQ ID NO: 3446350 - DNA, 25 bp, Homo sapien
ggttgaactcctgtcacaaagacca

SEQ ID NO: 3446351 - DNA, 25 bp, Homo sapien
tcttcccactgtgaactcagatatg

SEQ ID NO: 3446352 - DNA, 25 bp, Homo sapien
tctgtatctaggttgctctatggat

SEQ ID NO: 3446353 - DNA, 25 bp, Homo sapien
gcagagactgtcctcactttccaga

SEQ ID NO: 3446354 - DNA, 25 bp, Homo sapien
gtcgcggccgggacgaggcgctcct

SEQ ID NO: 3446355 - DNA, 25 bp, Homo sapien
cagacggggtcgcggccgggacgag

SEQ ID NO: 3446356 - DNA, 25 bp, Homo sapien
ggcagagactgtcctcactttccag

SEQ ID NO: 3446357 - DNA, 25 bp, Homo sapien
tcctgggcatcaatcagggcctctc

SEQ ID NO: 3446358 - DNA, 25 bp, Homo sapien
ctgtcctgggcatcaatcagggcct

SEQ ID NO: 3446359 - DNA, 25 bp, Homo sapien
tggtgggaaagcttgctgtcctggg

SEQ ID NO: 3446360 - DNA, 25 bp, Homo sapien
agggcctctcactgctcaggcaggg

SEQ ID NO: 3446361 - DNA, 25 bp, Homo sapien
ttcctgagagcacatgtgtggtgct

SEQ ID NO: 3446362 - DNA, 25 bp, Homo sapien
tcctgagagcacatgtgtggtgctg

SEQ ID NO: 3446363 - DNA, 25 bp, Homo sapien
cttgtgtggcacacttcttacagcc

SEQ ID NO: 3446364 - DNA, 25 bp, Homo sapien
ccttgtgtggcacacttcttacagc

SEQ ID NO: 3446365 - DNA, 25 bp, Homo sapien
ttgtgtggcacacttcttacagcca

SEQ ID NO: 3446366 - DNA, 25 bp, Homo sapien
ccttggttggtatggtgaggccact

SEQ ID NO: 3446367 - DNA, 25 bp, Homo sapien
cgtgaccttggttggtatggtgagg

SEQ ID NO: 3446368 - DNA, 25 bp, Homo sapien
tgaccttggttggtatggtgaggcc

SEQ ID NO: 3446369 - DNA, 25 bp, Homo sapien
accttggttggtatggtgaggccac

SEQ ID NO: 3446370 - DNA, 25 bp, Homo sapien
ccctctgcagcacgaactttttcaa

SEQ ID NO: 3446371 - DNA, 25 bp, Homo sapien
ctctgcagcacgaactttttcaata

SEQ ID NO: 3446372 - DNA, 25 bp, Homo sapien
agaccctctgcagcacgaacttttt

SEQ ID NO: 3446373 - DNA, 25 bp, Homo sapien
gaccctctgcagcacgaactttttc

SEQ ID NO: 3446374 - DNA, 25 bp, Homo sapien
tgccgatgacccgtgctctgagaga

SEQ ID NO: 3446375 - DNA, 25 bp, Homo sapien
tgccccactggaatgggtattctgg

SEQ ID NO: 3446376 - DNA, 25 bp, Homo sapien
gactcctgatagagactcctgctct

SEQ ID NO: 3446377 - DNA, 25 bp, Homo sapien
gctgttagcctctgctggccattga

SEQ ID NO: 3446378 - DNA, 25 bp, Homo sapien
ggctgtggacctctgtcgctgtact

SEQ ID NO: 3446379 - DNA, 25 bp, Homo sapien
tggcccgagggttgtttgcaaggct

SEQ ID NO: 3446380 - DNA, 25 bp, Homo sapien
tactgccttgacttacccgctgaga

SEQ ID NO: 3446381 - DNA, 25 bp, Homo sapien
gacttacccgctgagaaatgggtct

SEQ ID NO: 3446382 - DNA, 25 bp, Homo sapien
gcccaagagacttggctgctcatcc

SEQ ID NO: 3446383 - DNA, 25 bp, Homo sapien
ccacatgggggccttccacgtagtt

SEQ ID NO: 3446384 - DNA, 25 bp, Homo sapien
aaactcatctaaattggaggaggaa

SEQ ID NO: 3446385 - DNA, 25 bp, Homo sapien
ctggttccccaacgcccagcccaag

SEQ ID NO: 3446386 - DNA, 25 bp, Homo sapien
gcccagagtctggtggctatgtgtt

SEQ ID NO: 3446387 - DNA, 25 bp, Homo sapien
agagtctggtggctatgtgttgagc

SEQ ID NO: 3446388 - DNA, 25 bp, Homo sapien
cccagagtctggtggctatgtgttg

SEQ ID NO: 3446389 - DNA, 25 bp, Homo sapien
ccagagtctggtggctatgtgttga

SEQ ID NO: 3446390 - DNA, 25 bp, Homo sapien
aggcagcaatgccaatcaaggtcat

SEQ ID NO: 3446391 - DNA, 25 bp, Homo sapien
ggcagcaatgccaatcaaggtcatt

SEQ ID NO: 3446392 - DNA, 25 bp, Homo sapien
catagaaagtagaggagttctggcc

SEQ ID NO: 3446393 - DNA, 25 bp, Homo sapien
aaggtagccttctccgggaacagat

SEQ ID NO: 3446394 - DNA, 25 bp, Homo sapien
tggcaacggttgctggaaaccaagc

SEQ ID NO: 3446395 - DNA, 25 bp, Homo sapien
agttctggccagagtaaaggtagcc

SEQ ID NO: 3446396 - DNA, 25 bp, Homo sapien
tcttccatgatttgtcagccatggc

SEQ ID NO: 3446397 - DNA, 25 bp, Homo sapien
gatttgtcagccatggcgatctctc

SEQ ID NO: 3446398 - DNA, 25 bp, Homo sapien
tttgtcagccatggcgatctctcca

SEQ ID NO: 3446399 - DNA, 25 bp, Homo sapien
catgatttgtcagccatggcgatct

SEQ ID NO: 3446400 - DNA, 25 bp, Homo sapien
tcccgggtttctgtatccactgctc

SEQ ID NO: 3446401 - DNA, 25 bp, Homo sapien
cgggtttctgtatccactgctccgg

SEQ ID NO: 3446402 - DNA, 25 bp, Homo sapien
tttctgtatccactgctccgggtac

SEQ ID NO: 3446403 - DNA, 25 bp, Homo sapien
tctcccgggtttctgtatccactgc

SEQ ID NO: 3446404 - DNA, 25 bp, Homo sapien
aaacagggggtcagcccagggcaca

SEQ ID NO: 3446405 - DNA, 25 bp, Homo sapien
gcccagggcacaggaacgctgagtt

SEQ ID NO: 3446406 - DNA, 25 bp, Homo sapien
ctaaacagggggtcagcccagggca

SEQ ID NO: 3446407 - DNA, 25 bp, Homo sapien
ccagggcacaggaacgctgagtttc

SEQ ID NO: 3446408 - DNA, 25 bp, Homo sapien
ttaggagccctctgggctgccttcc

SEQ ID NO: 3446409 - DNA, 25 bp, Homo sapien
tgcaggtgcgatgatacagttctga

SEQ ID NO: 3446410 - DNA, 25 bp, Homo sapien
taatagcaggcgtcttgatggaagg

SEQ ID NO: 3446411 - DNA, 25 bp, Homo sapien
cgtcttgatggaaggtcatctcctc

SEQ ID NO: 3446412 - DNA, 25 bp, Homo sapien
gtgcgatgatacagttctgagtgca

SEQ ID NO: 3446413 - DNA, 25 bp, Homo sapien
ttaaaaggatgagacccattaagtg

SEQ ID NO: 3446414 - DNA, 25 bp, Homo sapien
ctccattcccacgtagcaattatgt

SEQ ID NO: 3446415 - DNA, 25 bp, Homo sapien
cccacgtagcaattatgtgcacaat

SEQ ID NO: 3446416 - DNA, 25 bp, Homo sapien
aaggatgagacccattaagtgttta

SEQ ID NO: 3446417 - DNA, 25 bp, Homo sapien
tacggtatcaggtaatggaggtttc

SEQ ID NO: 3446418 - DNA, 25 bp, Homo sapien
ttttccatacggtatcaggtaatgg

SEQ ID NO: 3446419 - DNA, 25 bp, Homo sapien
catacggtatcaggtaatggaggtt

SEQ ID NO: 3446420 - DNA, 25 bp, Homo sapien
ttccatacggtatcaggtaatggag

SEQ ID NO: 3446421 - DNA, 25 bp, Homo sapien
caaagggcatcagcgtaatagagca

SEQ ID NO: 3446422 - DNA, 25 bp, Homo sapien
gacagtcagggagaagatcacagcg

SEQ ID NO: 3446423 - DNA, 25 bp, Homo sapien
catagaacttgggtctcgccgcaag

SEQ ID NO: 3446424 - DNA, 25 bp, Homo sapien
gatcacagcgcgagaaagagagagc

SEQ ID NO: 3446425 - DNA, 25 bp, Homo sapien
catatgaggggcagttaatgagaaa

SEQ ID NO: 3446426 - DNA, 25 bp, Homo sapien
tttagcagctcggtggctgtagcga

SEQ ID NO: 3446427 - DNA, 25 bp, Homo sapien
tggctgtagcgaggaagtgttgggc

SEQ ID NO: 3446428 - DNA, 25 bp, Homo sapien
tcagaactgctgagatttagcagct

SEQ ID NO: 3446429 - DNA, 25 bp, Homo sapien
ccacgtgcaggatggcaacttggga

SEQ ID NO: 3446430 - DNA, 25 bp, Homo sapien
tgcaggatggcaacttgggagataa

SEQ ID NO: 3446431 - DNA, 25 bp, Homo sapien
acttgggagataaggtgtgcctgca

SEQ ID NO: 3446432 - DNA, 25 bp, Homo sapien
cgtgcaggatggcaacttgggagat

SEQ ID NO: 3446433 - DNA, 25 bp, Homo sapien
gcaggtatctcacctacttctgaag

SEQ ID NO: 3446434 - DNA, 25 bp, Homo sapien
tacttctgaaggtagtcgcagtctc

SEQ ID NO: 3446435 - DNA, 25 bp, Homo sapien
tgtggggagctttgcgcaggtatct

SEQ ID NO: 3446436 - DNA, 25 bp, Homo sapien
gaaggtagtcgcagtctcttcattc

SEQ ID NO: 3446437 - DNA, 25 bp, Homo sapien
taggtcaggctttccaagaggagtt

SEQ ID NO: 3446438 - DNA, 25 bp, Homo sapien
aatatcttctgccagccgactctag

SEQ ID NO: 3446439 - DNA, 25 bp, Homo sapien
tacctggctgcaggcttgcagggat

SEQ ID NO: 3446440 - DNA, 25 bp, Homo sapien
taggctctaaaggatacctggctgc

SEQ ID NO: 3446441 - DNA, 25 bp, Homo sapien
gaccatgcatatgacttgctttcat

SEQ ID NO: 3446442 - DNA, 25 bp, Homo sapien
atgcatatgacttgctttcatccat

SEQ ID NO: 3446443 - DNA, 25 bp, Homo sapien
ggaccatgcatatgacttgctttca

SEQ ID NO: 3446444 - DNA, 25 bp, Homo sapien
ccatgcatatgacttgctttcatcc

SEQ ID NO: 3446445 - DNA, 25 bp, Homo sapien
ggctgtgatctcatgttcctccgca

SEQ ID NO: 3446446 - DNA, 25 bp, Homo sapien
gctgtgatctcatgttcctccgcag

SEQ ID NO: 3446447 - DNA, 25 bp, Homo sapien
gggctgtgatctcatgttcctccgc

SEQ ID NO: 3446448 - DNA, 25 bp, Homo sapien
ttcaaagaagagtccagattggagt

SEQ ID NO: 3446449 - DNA, 25 bp, Homo sapien
tcaaagaagagtccagattggagtg

SEQ ID NO: 3446450 - DNA, 25 bp, Homo sapien
ctcagcagacattttctgtagtaac

SEQ ID NO: 3446451 - DNA, 25 bp, Homo sapien
caacaagtgtgaaggagttctcagc

SEQ ID NO: 3446452 - DNA, 25 bp, Homo sapien
tttctgtagtaacaacagctcacat

SEQ ID NO: 3446453 - DNA, 25 bp, Homo sapien
tctacatggactctttgcacctttc

SEQ ID NO: 3446454 - DNA, 25 bp, Homo sapien
gcagccgttgtcaatcagatctggg

SEQ ID NO: 3446455 - DNA, 25 bp, Homo sapien
ttccccagccccctgtaattggcat

SEQ ID NO: 3446456 - DNA, 25 bp, Homo sapien
ccagccccctgtaattggcatctgt

SEQ ID NO: 3446457 - DNA, 25 bp, Homo sapien
cagcagccgttgtcaatcagatctg

SEQ ID NO: 3446458 - DNA, 25 bp, Homo sapien
aatccagcaatcactgaggagtctt

SEQ ID NO: 3446459 - DNA, 25 bp, Homo sapien
caaatccagcaatcactgaggagtc

SEQ ID NO: 3446460 - DNA, 25 bp, Homo sapien
gcctgtgcttctctgcgaggccctg

SEQ ID NO: 3446461 - DNA, 25 bp, Homo sapien
ctgtgcttctctgcgaggccctgga

SEQ ID NO: 3446462 - DNA, 25 bp, Homo sapien
gcttgccctgctttgcctacaggca

SEQ ID NO: 3446463 - DNA, 25 bp, Homo sapien
cttgccctgctttgcctacaggcat

SEQ ID NO: 3446464 - DNA, 25 bp, Homo sapien
cagagtgcaaagcgcatttctgggc

SEQ ID NO: 3446465 - DNA, 25 bp, Homo sapien
tgcagagtgcaaagcgcatttctgg

SEQ ID NO: 3446466 - DNA, 25 bp, Homo sapien
gcagagtgcaaagcgcatttctggg

SEQ ID NO: 3446467 - DNA, 25 bp, Homo sapien
agagtgcaaagcgcatttctgggct

SEQ ID NO: 3446468 - DNA, 25 bp, Homo sapien
ggtggactgccccaaaggctgcatt

SEQ ID NO: 3446469 - DNA, 25 bp, Homo sapien
tccaggtgccaaaaattaagccagt

SEQ ID NO: 3446470 - DNA, 25 bp, Homo sapien
aaatcagtccatttgtccggccagt

SEQ ID NO: 3446471 - DNA, 25 bp, Homo sapien
taagccagtaggacagccgtcaaat

SEQ ID NO: 3446472 - DNA, 25 bp, Homo sapien
ctgagagactgccacgggccacttg

SEQ ID NO: 3446473 - DNA, 25 bp, Homo sapien
cacttgagtggctcactaatgggct

SEQ ID NO: 3446474 - DNA, 25 bp, Homo sapien
ctcactaatgggctagcttccttcc

SEQ ID NO: 3446475 - DNA, 25 bp, Homo sapien
gcaccacttgggagccgcaagctct

SEQ ID NO: 3446476 - DNA, 25 bp, Homo sapien
gtgacagtgtcattgcgcttgtctg

SEQ ID NO: 3446477 - DNA, 25 bp, Homo sapien
gtctgtccctcgtgcacatgtacac

SEQ ID NO: 3446478 - DNA, 25 bp, Homo sapien
cttgaaaacaatcctgttgtttgtg

SEQ ID NO: 3446479 - DNA, 25 bp, Homo sapien
aacaatcctgttgtttgtgatttcc

SEQ ID NO: 3446480 - DNA, 25 bp, Homo sapien
gccgtgcctgtgagatttcccttta

SEQ ID NO: 3446481 - DNA, 25 bp, Homo sapien
tgtgcacgtgcctgaaagcagacgt

SEQ ID NO: 3446482 - DNA, 25 bp, Homo sapien
tgtctgggtctggacacgtggccgt

SEQ ID NO: 3446483 - DNA, 25 bp, Homo sapien
tcatgggccctgtgcgcttgtctgg

SEQ ID NO: 3446484 - DNA, 25 bp, Homo sapien
ttcagcttgtagagaccaccctccg

SEQ ID NO: 3446485 - DNA, 25 bp, Homo sapien
tgaacatattgacactttagggagt

SEQ ID NO: 3446486 - DNA, 25 bp, Homo sapien
cagattggaaatcctccacagctgg

SEQ ID NO: 3446487 - DNA, 25 bp, Homo sapien
gccaaggagtccctaatgtggtaaa

SEQ ID NO: 3446488 - DNA, 25 bp, Homo sapien
gccaccagggcagagtgaaagtcat

SEQ ID NO: 3446489 - DNA, 25 bp, Homo sapien
ggcatgtaaccaagaatgttcagaa

SEQ ID NO: 3446490 - DNA, 25 bp, Homo sapien
tgtaaccaagaatgttcagaagagg

SEQ ID NO: 3446491 - DNA, 25 bp, Homo sapien
tctggtacttcacctattccatctt

SEQ ID NO: 3446492 - DNA, 25 bp, Homo sapien
ctgtttggttgtagctgatctccat

SEQ ID NO: 3446493 - DNA, 25 bp, Homo sapien
gctgtttggttgtagctgatctcca

SEQ ID NO: 3446494 - DNA, 25 bp, Homo sapien
ggcttccttgttgctagggtggatg

SEQ ID NO: 3446495 - DNA, 25 bp, Homo sapien
tagggtggatgtttggctggcacac

SEQ ID NO: 3446496 - DNA, 25 bp, Homo sapien
gcaatggcttttaaatcatgctctg

SEQ ID NO: 3446497 - DNA, 25 bp, Homo sapien
tccataggagataggcagattttct

SEQ ID NO: 3446498 - DNA, 25 bp, Homo sapien
gagtaataatactgcgcctggaagc

SEQ ID NO: 3446499 - DNA, 25 bp, Homo sapien
ccttcatggacttgtctttgggtgg

SEQ ID NO: 3446500 - DNA, 25 bp, Homo sapien
gaggctggccctgtacactggagta

SEQ ID NO: 3446501 - DNA, 25 bp, Homo sapien
ttgcccttttggaggctggccctgt

SEQ ID NO: 3446502 - DNA, 25 bp, Homo sapien
cttcatccagaaggtagcagcaaca

SEQ ID NO: 3446503 - DNA, 25 bp, Homo sapien
cagtatgccggtttcattgctgcaa

SEQ ID NO: 3446504 - DNA, 25 bp, Homo sapien
catgtgctcttagtgaaagatcagc

SEQ ID NO: 3446505 - DNA, 25 bp, Homo sapien
tgctgcaagataattgaccccttgt

SEQ ID NO: 3446506 - DNA, 25 bp, Homo sapien
gttcattcgcctaaacaggactggg

SEQ ID NO: 3446507 - DNA, 25 bp, Homo sapien
gggtatgggctcctgtctgcgtcat

SEQ ID NO: 3446508 - DNA, 25 bp, Homo sapien
tctcagaggcaatgcactccctggg

SEQ ID NO: 3446509 - DNA, 25 bp, Homo sapien
tgtgttctgagcaggagtacctctg

SEQ ID NO: 3446510 - DNA, 25 bp, Homo sapien
catttactttgtcccacaagcccag

SEQ ID NO: 3446511 - DNA, 25 bp, Homo sapien
gttaggtagtcaatgatgtttgcca

SEQ ID NO: 3446512 - DNA, 25 bp, Homo sapien
cacaagcccagttaggtagtcaatg

SEQ ID NO: 3446513 - DNA, 25 bp, Homo sapien
tgttggggctctcattccatttact

SEQ ID NO: 3446514 - DNA, 25 bp, Homo sapien
tacatcagaggtactctggtgtctt

SEQ ID NO: 3446515 - DNA, 25 bp, Homo sapien
tctggtctcagtgcttatagagtca

SEQ ID NO: 3446516 - DNA, 25 bp, Homo sapien
tagagtcactcccatacatcagagg

SEQ ID NO: 3446517 - DNA, 25 bp, Homo sapien
tctgagaaggatctgcagtcttcaa

SEQ ID NO: 3446518 - DNA, 25 bp, Homo sapien
gcttagtggtcagtaaatgctctct

SEQ ID NO: 3446519 - DNA, 25 bp, Homo sapien
tgtgcccaagctatccatgctaggg

SEQ ID NO: 3446520 - DNA, 25 bp, Homo sapien
tgtgaaaccgtaggccaagctgctt

SEQ ID NO: 3446521 - DNA, 25 bp, Homo sapien
gaaggcttactgatgctcagggtga

SEQ ID NO: 3446522 - DNA, 25 bp, Homo sapien
aattcccacagggactaatgcccag

SEQ ID NO: 3446523 - DNA, 25 bp, Homo sapien
gccaaagcagaactcccatgaagtg

SEQ ID NO: 3446524 - DNA, 25 bp, Homo sapien
tacacacattacaggctcactagga

SEQ ID NO: 3446525 - DNA, 25 bp, Homo sapien
taatccttattatgggctggacaaa

SEQ ID NO: 3446526 - DNA, 25 bp, Homo sapien
aattcggtccagagtttaatgaact

SEQ ID NO: 3446527 - DNA, 25 bp, Homo sapien
taatgaactcaattcggtcaacggg

SEQ ID NO: 3446528 - DNA, 25 bp, Homo sapien
caacgggttgaatgaacgcttgagt

SEQ ID NO: 3446529 - DNA, 25 bp, Homo sapien
gcaaacgttggggactcttgaaaca

SEQ ID NO: 3446530 - DNA, 25 bp, Homo sapien
gattctgccacataggaggcttcct

SEQ ID NO: 3446531 - DNA, 25 bp, Homo sapien
tgtttacaagatgctctggacttca

SEQ ID NO: 3446532 - DNA, 25 bp, Homo sapien
taagtaggaggctttcattccaccg

SEQ ID NO: 3446533 - DNA, 25 bp, Homo sapien
caggaagtattccaggattgctgcc

SEQ ID NO: 3446534 - DNA, 25 bp, Homo sapien
gaaacacaccgagtcccttcagtaa

SEQ ID NO: 3446535 - DNA, 25 bp, Homo sapien
cgagtcccttcagtaagacttggct

SEQ ID NO: 3446536 - DNA, 25 bp, Homo sapien
ttgtgtatgacacaaattgtgaaac

SEQ ID NO: 3446537 - DNA, 25 bp, Homo sapien
gacacaaattgtgaaacacaccgag

SEQ ID NO: 3446538 - DNA, 25 bp, Homo sapien
gtagcacgcactgcatcctctggca

SEQ ID NO: 3446539 - DNA, 25 bp, Homo sapien
tccaggcctgttcttactctgatgc

SEQ ID NO: 3446540 - DNA, 25 bp, Homo sapien
ggcaaagtccagactcctgctgact

SEQ ID NO: 3446541 - DNA, 25 bp, Homo sapien
ttcagagaacaagcctgaggcccct

SEQ ID NO: 3446542 - DNA, 25 bp, Homo sapien
gcggggagccagggttcaattctca

SEQ ID NO: 3446543 - DNA, 25 bp, Homo sapien
ctgcggggagccagggttcaattct

SEQ ID NO: 3446544 - DNA, 25 bp, Homo sapien
tgcggggagccagggttcaattctc

SEQ ID NO: 3446545 - DNA, 25 bp, Homo sapien
cggggagccagggttcaattctcac

SEQ ID NO: 3446546 - DNA, 25 bp, Homo sapien
gatcatttccagaggcgtcttgctg

SEQ ID NO: 3446547 - DNA, 25 bp, Homo sapien
ttccagaggcgtcttgctgacagca

SEQ ID NO: 3446548 - DNA, 25 bp, Homo sapien
gaggcgtcttgctgacagcaaggga

SEQ ID NO: 3446549 - DNA, 25 bp, Homo sapien
agatcatttccagaggcgtcttgct

SEQ ID NO: 3446550 - DNA, 25 bp, Homo sapien
caattttagataacgatggttggta

SEQ ID NO: 3446551 - DNA, 25 bp, Homo sapien
tgtcaattttagataacgatggttg

SEQ ID NO: 3446552 - DNA, 25 bp, Homo sapien
tcaattttagataacgatggttggt

SEQ ID NO: 3446553 - DNA, 25 bp, Homo sapien
gtcaattttagataacgatggttgg

SEQ ID NO: 3446554 - DNA, 25 bp, Homo sapien
tcacaggtaaattgagcctcttctt

SEQ ID NO: 3446555 - DNA, 25 bp, Homo sapien
tgaagattcacaggtaaattgagcc

SEQ ID NO: 3446556 - DNA, 25 bp, Homo sapien
aattgagcctcttcttattggattc

SEQ ID NO: 3446557 - DNA, 25 bp, Homo sapien
gctgctcctgaagattcacaggtaa

SEQ ID NO: 3446558 - DNA, 25 bp, Homo sapien
tgccagcatagaggagtttagcccc

SEQ ID NO: 3446559 - DNA, 25 bp, Homo sapien
gagtttagccccgaaggcacaaagc

SEQ ID NO: 3446560 - DNA, 25 bp, Homo sapien
ccaggtatgtgcattgtctgggaag

SEQ ID NO: 3446561 - DNA, 25 bp, Homo sapien
gaagttgtaggcaatttgttccagg

SEQ ID NO: 3446562 - DNA, 25 bp, Homo sapien
tatctccagttctctggagctgagt

SEQ ID NO: 3446563 - DNA, 25 bp, Homo sapien
gcttcttttaaagtggaacgatggc

SEQ ID NO: 3446564 - DNA, 25 bp, Homo sapien
tcttttaaagtggaacgatggcaaa

SEQ ID NO: 3446565 - DNA, 25 bp, Homo sapien
tggagctgagtgtaccttctggagc

SEQ ID NO: 3446566 - DNA, 25 bp, Homo sapien
gctttgcttctatgcatgaagtgct

SEQ ID NO: 3446567 - DNA, 25 bp, Homo sapien
aatgccatttctggtactgactcag

SEQ ID NO: 3446568 - DNA, 25 bp, Homo sapien
tgaagtgctgaatgccatttctggt

SEQ ID NO: 3446569 - DNA, 25 bp, Homo sapien
gccagtctgggtactgacttgtgga

SEQ ID NO: 3446570 - DNA, 25 bp, Homo sapien
gggccatcatgagggagctggccat

SEQ ID NO: 3446571 - DNA, 25 bp, Homo sapien
tgggccatcatgagggagctggcca

SEQ ID NO: 3446572 - DNA, 25 bp, Homo sapien
agggctgtcgctaaggctgtcctgg

SEQ ID NO: 3446573 - DNA, 25 bp, Homo sapien
gggctgtcgctaaggctgtcctggg

SEQ ID NO: 3446574 - DNA, 25 bp, Homo sapien
gagggctgtcgctaaggctgtcctg

SEQ ID NO: 3446575 - DNA, 25 bp, Homo sapien
tcacttggtaactggtggaccccaa

SEQ ID NO: 3446576 - DNA, 25 bp, Homo sapien
tggtaactggtggaccccaactgtc

SEQ ID NO: 3446577 - DNA, 25 bp, Homo sapien
cttggtaactggtggaccccaactg

SEQ ID NO: 3446578 - DNA, 25 bp, Homo sapien
atcacttggtaactggtggacccca

SEQ ID NO: 3446579 - DNA, 25 bp, Homo sapien
tatgtagtgactcatatctgtgtct

SEQ ID NO: 3446580 - DNA, 25 bp, Homo sapien
tgttatgtagtgactcatatctgtg

SEQ ID NO: 3446581 - DNA, 25 bp, Homo sapien
tagtgactcatatctgtgtctgcct

SEQ ID NO: 3446582 - DNA, 25 bp, Homo sapien
gcctttgttatgtagtgactcatat

SEQ ID NO: 3446583 - DNA, 25 bp, Homo sapien
tcagcataggcagtaataaggcata

SEQ ID NO: 3446584 - DNA, 25 bp, Homo sapien
tagaggcccaattccagaagactgg

SEQ ID NO: 3446585 - DNA, 25 bp, Homo sapien
ggttgatacccttctcgagtttgag

SEQ ID NO: 3446586 - DNA, 25 bp, Homo sapien
cagaagaagctttcggcagcaggtt

SEQ ID NO: 3446587 - DNA, 25 bp, Homo sapien
gggaatgaactggactcttatctgc

SEQ ID NO: 3446588 - DNA, 25 bp, Homo sapien
ccaccccgacaacaggagggaatga

SEQ ID NO: 3446589 - DNA, 25 bp, Homo sapien
ggtgatgattggcagctctaaacca

SEQ ID NO: 3446590 - DNA, 25 bp, Homo sapien
ggactcttatctgctgcctctcata

SEQ ID NO: 3446591 - DNA, 25 bp, Homo sapien
ttagaagagccaaaatagaagccca

SEQ ID NO: 3446592 - DNA, 25 bp, Homo sapien
aagaggagtgattagaagagccaaa

SEQ ID NO: 3446593 - DNA, 25 bp, Homo sapien
ctttgtacaaagaggagtgattaga

SEQ ID NO: 3446594 - DNA, 25 bp, Homo sapien
acaaagaggagtgattagaagagcc

SEQ ID NO: 3446595 - DNA, 25 bp, Homo sapien
ctgccacctcagatagataggccat

SEQ ID NO: 3446596 - DNA, 25 bp, Homo sapien
agcaggtcctgccacctcagataga

SEQ ID NO: 3446597 - DNA, 25 bp, Homo sapien
ccaaggccacgtgagcaggtcctgc

SEQ ID NO: 3446598 - DNA, 25 bp, Homo sapien
ggtcctgccacctcagatagatagg

SEQ ID NO: 3446599 - DNA, 25 bp, Homo sapien
tgtgtagggagtttcatcattccca

SEQ ID NO: 3446600 - DNA, 25 bp, Homo sapien
attcttgtgttgtgtagggagtttc

SEQ ID NO: 3446601 - DNA, 25 bp, Homo sapien
cccattttgtgtcaccagggtacca

SEQ ID NO: 3446602 - DNA, 25 bp, Homo sapien
tcattcccattttgtgtcaccaggg

SEQ ID NO: 3446603 - DNA, 25 bp, Homo sapien
tctctgtgaacctctagtaggagtc

SEQ ID NO: 3446604 - DNA, 25 bp, Homo sapien
tctagtaggagtcgcttcttccttc

SEQ ID NO: 3446605 - DNA, 25 bp, Homo sapien
caaatgcacttgcaatagtatttgc

SEQ ID NO: 3446606 - DNA, 25 bp, Homo sapien
cacttgcaatagtatttgctcatca

SEQ ID NO: 3446607 - DNA, 25 bp, Homo sapien
tgaacacactatgctgtgttcctgc

SEQ ID NO: 3446608 - DNA, 25 bp, Homo sapien
aagttaggaatgacacataaaaatg

SEQ ID NO: 3446609 - DNA, 25 bp, Homo sapien
aatgaacacactatgctgtgttcct

SEQ ID NO: 3446610 - DNA, 25 bp, Homo sapien
ctggaagttaggaatgacacataaa

SEQ ID NO: 3446611 - DNA, 25 bp, Homo sapien
tgccacattcagcataggtcgctgt

SEQ ID NO: 3446612 - DNA, 25 bp, Homo sapien
ttgctgccacattcagcataggtcg

SEQ ID NO: 3446613 - DNA, 25 bp, Homo sapien
ttcagcataggtcgctgtttcaaag

SEQ ID NO: 3446614 - DNA, 25 bp, Homo sapien
cacattcagcataggtcgctgtttc

SEQ ID NO: 3446615 - DNA, 25 bp, Homo sapien
tcaggattgtggcaaaccggtattt

SEQ ID NO: 3446616 - DNA, 25 bp, Homo sapien
tgtggcaaaccggtatttcaggtcc

SEQ ID NO: 3446617 - DNA, 25 bp, Homo sapien
tcctgaggattgagcttctaaggga

SEQ ID NO: 3446618 - DNA, 25 bp, Homo sapien
ccctgggagccgatttggtcaggat

SEQ ID NO: 3446619 - DNA, 25 bp, Homo sapien
cctacttcacagctggccctgatat

SEQ ID NO: 3446620 - DNA, 25 bp, Homo sapien
ttggccatcacttaatgggcatgtg

SEQ ID NO: 3446621 - DNA, 25 bp, Homo sapien
atatcctccggtcccagcaatggct

SEQ ID NO: 3446622 - DNA, 25 bp, Homo sapien
tccagacgcccctacttcacagctg

SEQ ID NO: 3446623 - DNA, 25 bp, Homo sapien
tatgggcggtgatcatcagcttcct

SEQ ID NO: 3446624 - DNA, 25 bp, Homo sapien
gcacagattatctcggcagaggctg

SEQ ID NO: 3446625 - DNA, 25 bp, Homo sapien
agcttccttctgactgccattggca

SEQ ID NO: 3446626 - DNA, 25 bp, Homo sapien
acagccagaggttggccagcatcct

SEQ ID NO: 3446627 - DNA, 25 bp, Homo sapien
gatgtgtgaggctcttcacatacat

SEQ ID NO: 3446628 - DNA, 25 bp, Homo sapien
gagacaggccgtgctaattctggct

SEQ ID NO: 3446629 - DNA, 25 bp, Homo sapien
ggaagaggggactgacatatgaggg

SEQ ID NO: 3446630 - DNA, 25 bp, Homo sapien
agagacaggccgtgctaattctggc

SEQ ID NO: 3446631 - DNA, 25 bp, Homo sapien
agacaggccgtgctaattctggctg

SEQ ID NO: 3446632 - DNA, 25 bp, Homo sapien
cttcagcatcaagtcggcttcctct

SEQ ID NO: 3446633 - DNA, 25 bp, Homo sapien
ctctgctccgcttccctcttcagca

SEQ ID NO: 3446634 - DNA, 25 bp, Homo sapien
gcatcaagtcggcttcctctttgcc

SEQ ID NO: 3446635 - DNA, 25 bp, Homo sapien
cagcaggaggtgttgacaccccctc

SEQ ID NO: 3446636 - DNA, 25 bp, Homo sapien
acgctacacttcctacactcaggga

SEQ ID NO: 3446637 - DNA, 25 bp, Homo sapien
gggagctgatcacgctacacttcct

SEQ ID NO: 3446638 - DNA, 25 bp, Homo sapien
tacactcagggaacctgttacccag

SEQ ID NO: 3446639 - DNA, 25 bp, Homo sapien
tgcagggagctgatcacgctacact

SEQ ID NO: 3446640 - DNA, 25 bp, Homo sapien
ggtccacttcattatgtgtttggct

SEQ ID NO: 3446641 - DNA, 25 bp, Homo sapien
cttagtcagggtccacttcattatg

SEQ ID NO: 3446642 - DNA, 25 bp, Homo sapien
cagggtccacttcattatgtgtttg

SEQ ID NO: 3446643 - DNA, 25 bp, Homo sapien
tagtcagggtccacttcattatgtg

SEQ ID NO: 3446644 - DNA, 25 bp, Homo sapien
atttaatgtgggcttgactctagca

SEQ ID NO: 3446645 - DNA, 25 bp, Homo sapien
ttgtggtggtatgcctttgcccaca

SEQ ID NO: 3446646 - DNA, 25 bp, Homo sapien
caatgggcctttgtggtggtatgcc

SEQ ID NO: 3446647 - DNA, 25 bp, Homo sapien
gggcttgactctagcatattctaga

SEQ ID NO: 3446648 - DNA, 25 bp, Homo sapien
gacatgtacaatagtagggtaaaca

SEQ ID NO: 3446649 - DNA, 25 bp, Homo sapien
caatagtagggtaaacaaatctaga

SEQ ID NO: 3446650 - DNA, 25 bp, Homo sapien
taaacaaatctagagaaaagaagaa

SEQ ID NO: 3446651 - DNA, 25 bp, Homo sapien
aaagaagaaaatgggcagggcacag

SEQ ID NO: 3446652 - DNA, 25 bp, Homo sapien
gaaggaggattgttcctctgaatta

SEQ ID NO: 3446653 - DNA, 25 bp, Homo sapien
ggattgttcctctgaattaatgatg

SEQ ID NO: 3446654 - DNA, 25 bp, Homo sapien
aatgaaggaggattgttcctctgaa

SEQ ID NO: 3446655 - DNA, 25 bp, Homo sapien
cagaaatgaaggaggattgttcctc

SEQ ID NO: 3446656 - DNA, 25 bp, Homo sapien
taatttcccgcaaatgtgagttccc

SEQ ID NO: 3446657 - DNA, 25 bp, Homo sapien
gtgagttcccgatacgtggccacag

SEQ ID NO: 3446658 - DNA, 25 bp, Homo sapien
actccgtacttgagtcgagcctggg

SEQ ID NO: 3446659 - DNA, 25 bp, Homo sapien
gcttcaggcaagacacatcgcactc

SEQ ID NO: 3446660 - DNA, 25 bp, Homo sapien
acgtgtaaggaaatagacacagatt

SEQ ID NO: 3446661 - DNA, 25 bp, Homo sapien
tattgggtttactgccttgtttgca

SEQ ID NO: 3446662 - DNA, 25 bp, Homo sapien
tgtttgcaaacaagacggttcgtaa

SEQ ID NO: 3446663 - DNA, 25 bp, Homo sapien
gacggttcgtaaacttagtgagtgc

SEQ ID NO: 3446664 - DNA, 25 bp, Homo sapien
ccatgacagctgaggcatggcagcc

SEQ ID NO: 3446665 - DNA, 25 bp, Homo sapien
gtatggtttatagaggacctgtttc

SEQ ID NO: 3446666 - DNA, 25 bp, Homo sapien
cactgatgtccagggttgttcgtat

SEQ ID NO: 3446667 - DNA, 25 bp, Homo sapien
atgatggacagggaccaccattctg

SEQ ID NO: 3446668 - DNA, 25 bp, Homo sapien
ctgcaggaaattggtcaccagggca

SEQ ID NO: 3446669 - DNA, 25 bp, Homo sapien
agggcagtgactggtgtaagaaatt

SEQ ID NO: 3446670 - DNA, 25 bp, Homo sapien
agcctgcaggaaattggtcaccagg

SEQ ID NO: 3446671 - DNA, 25 bp, Homo sapien
gtgactggtgtaagaaattgggccc

SEQ ID NO: 3446672 - DNA, 25 bp, Homo sapien
aaacttccacaagtggcatcccaaa

SEQ ID NO: 3446673 - DNA, 25 bp, Homo sapien
ggcatcccaaatgttgtcaggctct

SEQ ID NO: 3446674 - DNA, 25 bp, Homo sapien
gaagtcattccagcttcagtagcaa

SEQ ID NO: 3446675 - DNA, 25 bp, Homo sapien
ggctcttcatctgaagtcattccag

SEQ ID NO: 3446676 - DNA, 25 bp, Homo sapien
ttattgtgccagttgctgaacaaac

SEQ ID NO: 3446677 - DNA, 25 bp, Homo sapien
aaatagtcacatcttcagcagtctc

SEQ ID NO: 3446678 - DNA, 25 bp, Homo sapien
aacaaacatgccagctaaaatagtc

SEQ ID NO: 3446679 - DNA, 25 bp, Homo sapien
tagtcacatcttcagcagtctccat

SEQ ID NO: 3446680 - DNA, 25 bp, Homo sapien
aagctatcttccaggtcagagaaac

SEQ ID NO: 3446681 - DNA, 25 bp, Homo sapien
catcctctaaagctatcttccaggt

SEQ ID NO: 3446682 - DNA, 25 bp, Homo sapien
tcatcctctaaagctatcttccagg

SEQ ID NO: 3446683 - DNA, 25 bp, Homo sapien
tctaaagctatcttccaggtcagag

SEQ ID NO: 3446684 - DNA, 25 bp, Homo sapien
ctgtttcccactctgtgctggccat

SEQ ID NO: 3446685 - DNA, 25 bp, Homo sapien
gctgtcagtgcctgagcgagggtca

SEQ ID NO: 3446686 - DNA, 25 bp, Homo sapien
gcctgagcgagggtcagcttcacag

SEQ ID NO: 3446687 - DNA, 25 bp, Homo sapien
cagcttcacagcaaggttaaaagac

SEQ ID NO: 3446688 - DNA, 25 bp, Homo sapien
tctgttccaaaaaggctgtcagtgc

SEQ ID NO: 3446689 - DNA, 25 bp, Homo sapien
tatgctcctagaggccggggctgat

SEQ ID NO: 3446690 - DNA, 25 bp, Homo sapien
gggctgattcgaagattgattcaga

SEQ ID NO: 3446691 - DNA, 25 bp, Homo sapien
gagagggccgtttgtcataaatcgt

SEQ ID NO: 3446692 - DNA, 25 bp, Homo sapien
tgtcataaatcgttcctctcctcac

SEQ ID NO: 3446693 - DNA, 25 bp, Homo sapien
ccaatgcgaatgcaccagctctcca

SEQ ID NO: 3446694 - DNA, 25 bp, Homo sapien
tgctgcccaatgcgaatgcaccagc

SEQ ID NO: 3446695 - DNA, 25 bp, Homo sapien
tgcccaatgcgaatgcaccagctct

SEQ ID NO: 3446696 - DNA, 25 bp, Homo sapien
caggagcctgagccatgctcattct

SEQ ID NO: 3446697 - DNA, 25 bp, Homo sapien
ctgaaatgacccacgcaggcacata

SEQ ID NO: 3446698 - DNA, 25 bp, Homo sapien
gaaatgacccacgcaggcacataca

SEQ ID NO: 3446699 - DNA, 25 bp, Homo sapien
tgaaatgacccacgcaggcacatac

SEQ ID NO: 3446700 - DNA, 25 bp, Homo sapien
aatctcgttggcagcacagcccacc

SEQ ID NO: 3446701 - DNA, 25 bp, Homo sapien
cctcagcatcaatctcgttggcagc

SEQ ID NO: 3446702 - DNA, 25 bp, Homo sapien
caccctctgggcgagcccaaggcct

SEQ ID NO: 3446703 - DNA, 25 bp, Homo sapien
ccctctgggcgagcccaaggcctct

SEQ ID NO: 3446704 - DNA, 25 bp, Homo sapien
gggccagatcacatctgaaagtgtt

SEQ ID NO: 3446705 - DNA, 25 bp, Homo sapien
tgtgaaagtgccagtcaattaagcc

SEQ ID NO: 3446706 - DNA, 25 bp, Homo sapien
gggatgggcacatgtgaaagtgcca

SEQ ID NO: 3446707 - DNA, 25 bp, Homo sapien
tgccagtcaattaagcccttttggt

SEQ ID NO: 3446708 - DNA, 25 bp, Homo sapien
tgcaggaactaacataggtgcaggg

SEQ ID NO: 3446709 - DNA, 25 bp, Homo sapien
caactctgggtccattaggcccatg

SEQ ID NO: 3446710 - DNA, 25 bp, Homo sapien
ccatgaatgcaggaactaacatagg

SEQ ID NO: 3446711 - DNA, 25 bp, Homo sapien
ccattaggcccatgaatgcaggaac

SEQ ID NO: 3446712 - DNA, 25 bp, Homo sapien
tccctgtggccttgaactggaacct

SEQ ID NO: 3446713 - DNA, 25 bp, Homo sapien
tgaactggaacctctctctagattg

SEQ ID NO: 3446714 - DNA, 25 bp, Homo sapien
ttatgtcaaaggactgcccttccct

SEQ ID NO: 3446715 - DNA, 25 bp, Homo sapien
ggccttgaactggaacctctctcta

SEQ ID NO: 3446716 - DNA, 25 bp, Homo sapien
cctcacacgcagctgcagctgccct

SEQ ID NO: 3446717 - DNA, 25 bp, Homo sapien
cacacgcagctgcagctgcccttac

SEQ ID NO: 3446718 - DNA, 25 bp, Homo sapien
tcacacgcagctgcagctgccctta

SEQ ID NO: 3446719 - DNA, 25 bp, Homo sapien
ctcacacgcagctgcagctgccctt

SEQ ID NO: 3446720 - DNA, 25 bp, Homo sapien
tctgcatctccgttaaggcaaaggc

SEQ ID NO: 3446721 - DNA, 25 bp, Homo sapien
tagcagagctcaaacatagcctttg

SEQ ID NO: 3446722 - DNA, 25 bp, Homo sapien
taagtcttagtctcacaactggctt

SEQ ID NO: 3446723 - DNA, 25 bp, Homo sapien
caactggctttttaggcgcaaggtc

SEQ ID NO: 3446724 - DNA, 25 bp, Homo sapien
gaagcttccaaagggcctatcactg

SEQ ID NO: 3446725 - DNA, 25 bp, Homo sapien
cactcccattgtgaggagatgtgtc

SEQ ID NO: 3446726 - DNA, 25 bp, Homo sapien
tttcatattgagacctgaagcttcc

SEQ ID NO: 3446727 - DNA, 25 bp, Homo sapien
ggcctatcactggtgcctctctatt

SEQ ID NO: 3446728 - DNA, 25 bp, Homo sapien
tgagtttcagactcagcaaccagga

SEQ ID NO: 3446729 - DNA, 25 bp, Homo sapien
tttcagactcagcaaccaggattca

SEQ ID NO: 3446730 - DNA, 25 bp, Homo sapien
tcagactcagcaaccaggattcaag

SEQ ID NO: 3446731 - DNA, 25 bp, Homo sapien
gagtttcagactcagcaaccaggat

SEQ ID NO: 3446732 - DNA, 25 bp, Homo sapien
gggctacacagagctgtataacccg

SEQ ID NO: 3446733 - DNA, 25 bp, Homo sapien
ctggcaaggtgaactggtgctcagg

SEQ ID NO: 3446734 - DNA, 25 bp, Homo sapien
tgaactggtgctcaggggctacaca

SEQ ID NO: 3446735 - DNA, 25 bp, Homo sapien
tgtataacccgatggccttctaatt

SEQ ID NO: 3446736 - DNA, 25 bp, Homo sapien
tggtcaaggcagcaagctgtgttac

SEQ ID NO: 3446737 - DNA, 25 bp, Homo sapien
ctggttcagtatggtcaaggcagca

SEQ ID NO: 3446738 - DNA, 25 bp, Homo sapien
gtatggtcaaggcagcaagctgtgt

SEQ ID NO: 3446739 - DNA, 25 bp, Homo sapien
tggttcagtatggtcaaggcagcaa

SEQ ID NO: 3446740 - DNA, 25 bp, Homo sapien
tgctttcattgcgtgtcttttcact

SEQ ID NO: 3446741 - DNA, 25 bp, Homo sapien
tcattgcgtgtcttttcacttcccc

SEQ ID NO: 3446742 - DNA, 25 bp, Homo sapien
aaaactgctttcattgcgtgtcttt

SEQ ID NO: 3446743 - DNA, 25 bp, Homo sapien
aatgttgttttgctagacactgtac

SEQ ID NO: 3446744 - DNA, 25 bp, Homo sapien
tttatccataacacaaccagccaca

SEQ ID NO: 3446745 - DNA, 25 bp, Homo sapien
ttgttcatgaaaggccttcctgccc

SEQ ID NO: 3446746 - DNA, 25 bp, Homo sapien
tgttgccatgaccacaaacttccaa

SEQ ID NO: 3446747 - DNA, 25 bp, Homo sapien
tacagactgctggagatttctggtc

SEQ ID NO: 3446748 - DNA, 25 bp, Homo sapien
gaccaggagacgcagtgatactcca

SEQ ID NO: 3446749 - DNA, 25 bp, Homo sapien
agtgatactccagggcaatggtgcc

SEQ ID NO: 3446750 - DNA, 25 bp, Homo sapien
caggagacgcagtgatactccaggg

SEQ ID NO: 3446751 - DNA, 25 bp, Homo sapien
gacgcagtgatactccagggcaatg

SEQ ID NO: 3446752 - DNA, 25 bp, Homo sapien
tacttgaatggattctctatttctt

SEQ ID NO: 3446753 - DNA, 25 bp, Homo sapien
tggagcactcccatgactgtttgga

SEQ ID NO: 3446754 - DNA, 25 bp, Homo sapien
actcccatgactgtttggagcctgg

SEQ ID NO: 3446755 - DNA, 25 bp, Homo sapien
gagcactcccatgactgtttggagc

SEQ ID NO: 3446756 - DNA, 25 bp, Homo sapien
gcactcccatgactgtttggagcct

SEQ ID NO: 3446757 - DNA, 25 bp, Homo sapien
ctctactcctgaggcatttgtctgt

SEQ ID NO: 3446758 - DNA, 25 bp, Homo sapien
agtagcgctagcctcatccaactgc

SEQ ID NO: 3446759 - DNA, 25 bp, Homo sapien
actgccctctactcctgaggcattt

SEQ ID NO: 3446760 - DNA, 25 bp, Homo sapien
ctcctagatcagagccggtttttag

SEQ ID NO: 3446761 - DNA, 25 bp, Homo sapien
gcagctctatgaggaacaaggagtc

SEQ ID NO: 3446762 - DNA, 25 bp, Homo sapien
cagcaggttccatccctgggaatgg

SEQ ID NO: 3446763 - DNA, 25 bp, Homo sapien
tctaacccgtaaatgatccagcagg

SEQ ID NO: 3446764 - DNA, 25 bp, Homo sapien
caaggacccagcaaacaaatgagtt

SEQ ID NO: 3446765 - DNA, 25 bp, Homo sapien
tccacgctgaagccaaaaaggttaa

SEQ ID NO: 3446766 - DNA, 25 bp, Homo sapien
ccacgctgaagccaaaaaggttaag

SEQ ID NO: 3446767 - DNA, 25 bp, Homo sapien
cacgctgaagccaaaaaggttaaga

SEQ ID NO: 3446768 - DNA, 25 bp, Homo sapien
tggttctgggctgttgtgcaggatg

SEQ ID NO: 3446769 - DNA, 25 bp, Homo sapien
tgggctgttgtgcaggatgcccaca

SEQ ID NO: 3446770 - DNA, 25 bp, Homo sapien
gctctggttctgggctgttgtgcag

SEQ ID NO: 3446771 - DNA, 25 bp, Homo sapien
tctgggctgttgtgcaggatgccca

SEQ ID NO: 3446772 - DNA, 25 bp, Homo sapien
tcctttggagtcatcagtaccatcc

SEQ ID NO: 3446773 - DNA, 25 bp, Homo sapien
tctgacagacccaatcatcttttgt

SEQ ID NO: 3446774 - DNA, 25 bp, Homo sapien
gcaggacaattagcttagtgtgagt

SEQ ID NO: 3446775 - DNA, 25 bp, Homo sapien
agtaccatccgtagctgataatgtg

SEQ ID NO: 3446776 - DNA, 25 bp, Homo sapien
cttggggaagcccagtgttaagcct

SEQ ID NO: 3446777 - DNA, 25 bp, Homo sapien
ggaagcccagtgttaagcctggttc

SEQ ID NO: 3446778 - DNA, 25 bp, Homo sapien
ttaagcctggttcattgtgataatt

SEQ ID NO: 3446779 - DNA, 25 bp, Homo sapien
gcccagtgttaagcctggttcattg

SEQ ID NO: 3446780 - DNA, 25 bp, Homo sapien
cctcattggcccattgtaataactg

SEQ ID NO: 3446781 - DNA, 25 bp, Homo sapien
tcattggcccattgtaataactgac

SEQ ID NO: 3446782 - DNA, 25 bp, Homo sapien
ctcattggcccattgtaataactga

SEQ ID NO: 3446783 - DNA, 25 bp, Homo sapien
taccactgatggccttcacacaagg

SEQ ID NO: 3446784 - DNA, 25 bp, Homo sapien
gccttcacacaaggccacaagtggt

SEQ ID NO: 3446785 - DNA, 25 bp, Homo sapien
tcctgagtcctcacaaggatcagag

SEQ ID NO: 3446786 - DNA, 25 bp, Homo sapien
ccacaagtggtcctgagtcctcaca

SEQ ID NO: 3446787 - DNA, 25 bp, Homo sapien
aacttctttgctttcgctgaaatca

SEQ ID NO: 3446788 - DNA, 25 bp, Homo sapien
atggcagcgtagggtctgtgctgag

SEQ ID NO: 3446789 - DNA, 25 bp, Homo sapien
ggagagaggtgaacttctttgcttt

SEQ ID NO: 3446790 - DNA, 25 bp, Homo sapien
atgatggcagcgtagggtctgtgct

SEQ ID NO: 3446791 - DNA, 25 bp, Homo sapien
actatacgtaaaccaggcgggctgc

SEQ ID NO: 3446792 - DNA, 25 bp, Homo sapien
ttcaaacactatacgtaaaccaggc

SEQ ID NO: 3446793 - DNA, 25 bp, Homo sapien
aaatgaggccttatttgcatacctg

SEQ ID NO: 3446794 - DNA, 25 bp, Homo sapien
gacttttggcgccttcaaatgaggc

SEQ ID NO: 3446795 - DNA, 25 bp, Homo sapien
acaggcttctgatgataataattct

SEQ ID NO: 3446796 - DNA, 25 bp, Homo sapien
cacaggcttctgatgataataattc

SEQ ID NO: 3446797 - DNA, 25 bp, Homo sapien
aggcttctgatgataataattcttc

SEQ ID NO: 3446798 - DNA, 25 bp, Homo sapien
tcacaggcttctgatgataataatt

SEQ ID NO: 3446799 - DNA, 25 bp, Homo sapien
gaagacgggtatgtttcagtagttg

SEQ ID NO: 3446800 - DNA, 25 bp, Homo sapien
agacgggtatgtttcagtagttgga

SEQ ID NO: 3446801 - DNA, 25 bp, Homo sapien
cgggtatgtttcagtagttggaggt

SEQ ID NO: 3446802 - DNA, 25 bp, Homo sapien
ctgaagacgggtatgtttcagtagt

SEQ ID NO: 3446803 - DNA, 25 bp, Homo sapien
attctgcttggtcttgaacagacat

SEQ ID NO: 3446804 - DNA, 25 bp, Homo sapien
tcccagttgttttggcgttatccat

SEQ ID NO: 3446805 - DNA, 25 bp, Homo sapien
tatctgactgcttagtgccctggga

SEQ ID NO: 3446806 - DNA, 25 bp, Homo sapien
atcagtaacttaggcctgctcccag

SEQ ID NO: 3446807 - DNA, 25 bp, Homo sapien
gggtccaagcactcaatttctccat

SEQ ID NO: 3446808 - DNA, 25 bp, Homo sapien
ttccttcaagacagtagccccaaat

SEQ ID NO: 3446809 - DNA, 25 bp, Homo sapien
tcacaaaggttctgaagtaactgct

SEQ ID NO: 3446810 - DNA, 25 bp, Homo sapien
tttctttccttcaagacagtagccc

SEQ ID NO: 3446811 - DNA, 25 bp, Homo sapien
aaggttctgaagtaactgcttttct

SEQ ID NO: 3446812 - DNA, 25 bp, Homo sapien
gtctcgcctcccctgtgtctgtcca

SEQ ID NO: 3446813 - DNA, 25 bp, Homo sapien
tgtccagagactgtccagttgtcct

SEQ ID NO: 3446814 - DNA, 25 bp, Homo sapien
tcttttctctgggatggtctcgcct

SEQ ID NO: 3446815 - DNA, 25 bp, Homo sapien
gctgcacctctatgcaccccatttt

SEQ ID NO: 3446816 - DNA, 25 bp, Homo sapien
agcaatggggatggcaggagatttc

SEQ ID NO: 3446817 - DNA, 25 bp, Homo sapien
cagctgtaggtgactttagtaggcc

SEQ ID NO: 3446818 - DNA, 25 bp, Homo sapien
agctgtaggtgactttagtaggccc

SEQ ID NO: 3446819 - DNA, 25 bp, Homo sapien
cccagcaatggggatggcaggagat

SEQ ID NO: 3446820 - DNA, 25 bp, Homo sapien
tcaaattctttgaacgaacatagtc

SEQ ID NO: 3446821 - DNA, 25 bp, Homo sapien
catagtcttcaacctgttttctcag

SEQ ID NO: 3446822 - DNA, 25 bp, Homo sapien
ggttgcaaatcaaatttacccttga

SEQ ID NO: 3446823 - DNA, 25 bp, Homo sapien
gttttctcagctggagtggttgcaa

SEQ ID NO: 3446824 - DNA, 25 bp, Homo sapien
aatgcattttgtggtccactcagtc

SEQ ID NO: 3446825 - DNA, 25 bp, Homo sapien
cattttgtggtccactcagtccatt

SEQ ID NO: 3446826 - DNA, 25 bp, Homo sapien
tgaaatgcattttgtggtccactca

SEQ ID NO: 3446827 - DNA, 25 bp, Homo sapien
tgcattttgtggtccactcagtcca

SEQ ID NO: 3446828 - DNA, 25 bp, Homo sapien
aaacataggcctcttcgtacaaaga

SEQ ID NO: 3446829 - DNA, 25 bp, Homo sapien
gcctcttcgtacaaagataaagaaa

SEQ ID NO: 3446830 - DNA, 25 bp, Homo sapien
taggcctcttcgtacaaagataaag

SEQ ID NO: 3446831 - DNA, 25 bp, Homo sapien
cataggcctcttcgtacaaagataa

SEQ ID NO: 3446832 - DNA, 25 bp, Homo sapien
tgtggggcttcaagtgtgggatcct

SEQ ID NO: 3446833 - DNA, 25 bp, Homo sapien
gttgctttctgcaagtgtggggctt

SEQ ID NO: 3446834 - DNA, 25 bp, Homo sapien
tttctgcaagtgtggggcttcaagt

SEQ ID NO: 3446835 - DNA, 25 bp, Homo sapien
gaaatctagacaaacagttgttgct

SEQ ID NO: 3446836 - DNA, 25 bp, Homo sapien
tatgatgagggcttagaactgccag

SEQ ID NO: 3446837 - DNA, 25 bp, Homo sapien
ccaatctgcaactgtctatggccag

SEQ ID NO: 3446838 - DNA, 25 bp, Homo sapien
caaagaacctttcctaagctcgatt

SEQ ID NO: 3446839 - DNA, 25 bp, Homo sapien
gaactgccagcagagtcacttctcc

SEQ ID NO: 3446840 - DNA, 25 bp, Homo sapien
gcaaatgtgacccatatgccaatgc

SEQ ID NO: 3446841 - DNA, 25 bp, Homo sapien
tatgccaatgccatatatctggctg

SEQ ID NO: 3446842 - DNA, 25 bp, Homo sapien
aatgccatatatctggctgtgtaca

SEQ ID NO: 3446843 - DNA, 25 bp, Homo sapien
actgcctcaaataagccccaaatgc

SEQ ID NO: 3446844 - DNA, 25 bp, Homo sapien
tcctcctagcgagtagctcgatttc

SEQ ID NO: 3446845 - DNA, 25 bp, Homo sapien
ctcctagcgagtagctcgatttcat

SEQ ID NO: 3446846 - DNA, 25 bp, Homo sapien
cctcctagcgagtagctcgatttca

SEQ ID NO: 3446847 - DNA, 25 bp, Homo sapien
cacaagagctccatcgcccactcac

SEQ ID NO: 3446848 - DNA, 25 bp, Homo sapien
cctttacttgcctacttttcataca

SEQ ID NO: 3446849 - DNA, 25 bp, Homo sapien
ttttcatacacaagagctccatcgc

SEQ ID NO: 3446850 - DNA, 25 bp, Homo sapien
tgcctacttttcatacacaagagct

SEQ ID NO: 3446851 - DNA, 25 bp, Homo sapien
tcatccactgccaactgccctctcc

SEQ ID NO: 3446852 - DNA, 25 bp, Homo sapien
ctgccctctccaaacccagtgcaaa

SEQ ID NO: 3446853 - DNA, 25 bp, Homo sapien
gccaactgccctctccaaacccagt

SEQ ID NO: 3446854 - DNA, 25 bp, Homo sapien
caaacccagtgcaaaggcttcagca

SEQ ID NO: 3446855 - DNA, 25 bp, Homo sapien
atccaagaatgcatttgatttctgt

SEQ ID NO: 3446856 - DNA, 25 bp, Homo sapien
tccaagaatgcatttgatttctgtc

SEQ ID NO: 3446857 - DNA, 25 bp, Homo sapien
gatccaagaatgcatttgatttctg

SEQ ID NO: 3446858 - DNA, 25 bp, Homo sapien
tagatgtagacattagataatgcat

SEQ ID NO: 3446859 - DNA, 25 bp, Homo sapien
gcataatgtagcaattcggggcccc

SEQ ID NO: 3446860 - DNA, 25 bp, Homo sapien
ttgcataatgtagcaattcggggcc

SEQ ID NO: 3446861 - DNA, 25 bp, Homo sapien
cgttgcataatgtagcaattcgggg

SEQ ID NO: 3446862 - DNA, 25 bp, Homo sapien
tgcataatgtagcaattcggggccc

SEQ ID NO: 3446863 - DNA, 25 bp, Homo sapien
cactgaatcgttctgagttgagcgg

SEQ ID NO: 3446864 - DNA, 25 bp, Homo sapien
gttgagcggaatctccacagcagtt

SEQ ID NO: 3446865 - DNA, 25 bp, Homo sapien
ttcccttcttctagttcacattgct

SEQ ID NO: 3446866 - DNA, 25 bp, Homo sapien
taataatgtctatgcactgaatcgt

SEQ ID NO: 3446867 - DNA, 25 bp, Homo sapien
tagttaactggagtatcgatctgcc

SEQ ID NO: 3446868 - DNA, 25 bp, Homo sapien
gattagccagctgtttagttaactg

SEQ ID NO: 3446869 - DNA, 25 bp, Homo sapien
ggagtatcgatctgcctgtcacaca

SEQ ID NO: 3446870 - DNA, 25 bp, Homo sapien
ctttgtacgctgtcagttctgtgat

SEQ ID NO: 3446871 - DNA, 25 bp, Homo sapien
gttgaagcagaagtgtccactgaca

SEQ ID NO: 3446872 - DNA, 25 bp, Homo sapien
agagagttgaagcagaagtgtccac

SEQ ID NO: 3446873 - DNA, 25 bp, Homo sapien
tccagtgtgagagagagttgaagca

SEQ ID NO: 3446874 - DNA, 25 bp, Homo sapien
agagagagttgaagcagaagtgtcc

SEQ ID NO: 3446875 - DNA, 25 bp, Homo sapien
aatttgtgcctttggtatcccgagc

SEQ ID NO: 3446876 - DNA, 25 bp, Homo sapien
tgatactccgagacaaggacagcat

SEQ ID NO: 3446877 - DNA, 25 bp, Homo sapien
tgatgaccagcgtaggtcccctaac

SEQ ID NO: 3446878 - DNA, 25 bp, Homo sapien
tcataagctatggttgtaggtccct

SEQ ID NO: 3446879 - DNA, 25 bp, Homo sapien
gatgggcttgtgatacctggctgta

SEQ ID NO: 3446880 - DNA, 25 bp, Homo sapien
ctaaataagcatagaggaaccaccc

SEQ ID NO: 3446881 - DNA, 25 bp, Homo sapien
ggtagatacgacctccttggacaga

SEQ ID NO: 3446882 - DNA, 25 bp, Homo sapien
ggttcaggcccttgtttgatcacag

SEQ ID NO: 3446883 - DNA, 25 bp, Homo sapien
acattccctgggaccaaacttctgt

SEQ ID NO: 3446884 - DNA, 25 bp, Homo sapien
tgcacaatcccgaggggtactctca

SEQ ID NO: 3446885 - DNA, 25 bp, Homo sapien
tcatcctataatagctcagagcttg

SEQ ID NO: 3446886 - DNA, 25 bp, Homo sapien
tctgcttggtttcagcccatttgcc

SEQ ID NO: 3446887 - DNA, 25 bp, Homo sapien
tggagtttggcttaaaaacaaagca

SEQ ID NO: 3446888 - DNA, 25 bp, Homo sapien
catatcaactaagttccaaattgaa

SEQ ID NO: 3446889 - DNA, 25 bp, Homo sapien
cagcagttcattaattatgagacca

SEQ ID NO: 3446890 - DNA, 25 bp, Homo sapien
taattatgagaccaaattttgcaaa

SEQ ID NO: 3446891 - DNA, 25 bp, Homo sapien
tggattttagatgtacacagcagtt

SEQ ID NO: 3446892 - DNA, 25 bp, Homo sapien
ttttagatgtacacagcagttcatt

SEQ ID NO: 3446893 - DNA, 25 bp, Homo sapien
tctgggtgacctgaacgctttcccc

SEQ ID NO: 3446894 - DNA, 25 bp, Homo sapien
tatttctctgggtgacctgaacgct

SEQ ID NO: 3446895 - DNA, 25 bp, Homo sapien
catgtaccaactggaaagtgaatcc

SEQ ID NO: 3446896 - DNA, 25 bp, Homo sapien
gtgtgacagtcatgtaccaactgga

SEQ ID NO: 3446897 - DNA, 25 bp, Homo sapien
ttaaggtagccaaaacaggaggaga

SEQ ID NO: 3446898 - DNA, 25 bp, Homo sapien
ttccatatcctttaaggtagccaaa

SEQ ID NO: 3446899 - DNA, 25 bp, Homo sapien
tccatatcctttaaggtagccaaaa

SEQ ID NO: 3446900 - DNA, 25 bp, Homo sapien
aggtagccaaaacaggaggagactg

SEQ ID NO: 3446901 - DNA, 25 bp, Homo sapien
tggcgattcccacaatgagtattag

SEQ ID NO: 3446902 - DNA, 25 bp, Homo sapien
tctgatgctccttgcaagacaaaaa

SEQ ID NO: 3446903 - DNA, 25 bp, Homo sapien
cttattgagtaccatagtctgatgc

SEQ ID NO: 3446904 - DNA, 25 bp, Homo sapien
gaaacaatcggtggttgataataga

SEQ ID NO: 3446905 - DNA, 25 bp, Homo sapien
gcacaggacacttaagggctgggaa

SEQ ID NO: 3446906 - DNA, 25 bp, Homo sapien
agattacagcacaggacacttaagg

SEQ ID NO: 3446907 - DNA, 25 bp, Homo sapien
gaagattacagcacaggacacttaa

SEQ ID NO: 3446908 - DNA, 25 bp, Homo sapien
tggaagattacagcacaggacactt

SEQ ID NO: 3446909 - DNA, 25 bp, Homo sapien
ggtcaagagcgcaacttgcttttct

SEQ ID NO: 3446910 - DNA, 25 bp, Homo sapien
tggtcaagagcgcaacttgcttttc

SEQ ID NO: 3446911 - DNA, 25 bp, Homo sapien
gatgcgtactcctctgaattccgga

SEQ ID NO: 3446912 - DNA, 25 bp, Homo sapien
ctgatgcgtactcctctgaattccg

SEQ ID NO: 3446913 - DNA, 25 bp, Homo sapien
tgcgtactcctctgaattccggatg

SEQ ID NO: 3446914 - DNA, 25 bp, Homo sapien
tactcctctgaattccggatgttct

SEQ ID NO: 3446915 - DNA, 25 bp, Homo sapien
tctgaagatgatagaggtctgcctt

SEQ ID NO: 3446916 - DNA, 25 bp, Homo sapien
aagatgatagaggtctgccttctga

SEQ ID NO: 3446917 - DNA, 25 bp, Homo sapien
atgatagaggtctgccttctgaagc

SEQ ID NO: 3446918 - DNA, 25 bp, Homo sapien
ctgaagatgatagaggtctgccttc

SEQ ID NO: 3446919 - DNA, 25 bp, Homo sapien
aaaagcctgtgaatagtccacaagg

SEQ ID NO: 3446920 - DNA, 25 bp, Homo sapien
caaggttgattagcctgcgacactc

SEQ ID NO: 3446921 - DNA, 25 bp, Homo sapien
tgatatttggaatgcacccttcttc

SEQ ID NO: 3446922 - DNA, 25 bp, Homo sapien
gacactctaggtacaatttgtatgc

SEQ ID NO: 3446923 - DNA, 25 bp, Homo sapien
tagttcaaaaacagttctaatacac

SEQ ID NO: 3446924 - DNA, 25 bp, Homo sapien
ccatgttagccttgccacatggtca

SEQ ID NO: 3446925 - DNA, 25 bp, Homo sapien
tcagtcttctgtttggtaggtttta

SEQ ID NO: 3446926 - DNA, 25 bp, Homo sapien
tagcagcctccccatgttagccttg

SEQ ID NO: 3446927 - DNA, 25 bp, Homo sapien
ttgtatactataagttcaagaatga

SEQ ID NO: 3446928 - DNA, 25 bp, Homo sapien
gttggactctaaagtattccacagt

SEQ ID NO: 3446929 - DNA, 25 bp, Homo sapien
tggactctaaagtattccacagttg

SEQ ID NO: 3446930 - DNA, 25 bp, Homo sapien
ctctaaagtattccacagttgtttt

SEQ ID NO: 3446931 - DNA, 25 bp, Homo sapien
aatgaacacgacatagtaaataaca

SEQ ID NO: 3446932 - DNA, 25 bp, Homo sapien
gctgtccgtgcagtgatgataatca

SEQ ID NO: 3446933 - DNA, 25 bp, Homo sapien
tatcagcgataatagcactagtatt

SEQ ID NO: 3446934 - DNA, 25 bp, Homo sapien
catgctgagcacataaatgaacacg

SEQ ID NO: 3446935 - DNA, 25 bp, Homo sapien
tgatttggtgcatctagagccaagt

SEQ ID NO: 3446936 - DNA, 25 bp, Homo sapien
catctagagccaagtttaaagcata

SEQ ID NO: 3446937 - DNA, 25 bp, Homo sapien
ggtgcatctagagccaagtttaaag

SEQ ID NO: 3446938 - DNA, 25 bp, Homo sapien
tggtgcatctagagccaagtttaaa

SEQ ID NO: 3446939 - DNA, 25 bp, Homo sapien
catgcagacgatagaaccactcttt

SEQ ID NO: 3446940 - DNA, 25 bp, Homo sapien
gatgagttacaccaacatgcagacg

SEQ ID NO: 3446941 - DNA, 25 bp, Homo sapien
cacagtgtgcgctcaataagttttc

SEQ ID NO: 3446942 - DNA, 25 bp, Homo sapien
tcacctgtacggtaagtcaggagtc

SEQ ID NO: 3446943 - DNA, 25 bp, Homo sapien
tgtccagttgcagtaactactaacc

SEQ ID NO: 3446944 - DNA, 25 bp, Homo sapien
gcagtaactactaaccgatctataa

SEQ ID NO: 3446945 - DNA, 25 bp, Homo sapien
acttagacagcttttgtccagttgc

SEQ ID NO: 3446946 - DNA, 25 bp, Homo sapien
gacagcttttgtccagttgcagtaa

SEQ ID NO: 3446947 - DNA, 25 bp, Homo sapien
aaggaacagtgtccaaggttatatc

SEQ ID NO: 3446948 - DNA, 25 bp, Homo sapien
aggaatctggacagttaaaggaaca

SEQ ID NO: 3446949 - DNA, 25 bp, Homo sapien
gtgtccaaggttatatccagatgaa

SEQ ID NO: 3446950 - DNA, 25 bp, Homo sapien
tctggacagttaaaggaacagtgtc

SEQ ID NO: 3446951 - DNA, 25 bp, Homo sapien
gttaggttccaggaaatgtctgtgg

SEQ ID NO: 3446952 - DNA, 25 bp, Homo sapien
ctgtagggttaggttccaggaaatg

SEQ ID NO: 3446953 - DNA, 25 bp, Homo sapien
taggttccaggaaatgtctgtggcc

SEQ ID NO: 3446954 - DNA, 25 bp, Homo sapien
ggttccaggaaatgtctgtggccat

SEQ ID NO: 3446955 - DNA, 25 bp, Homo sapien
tgaaataaagctaaatgatgatgca

SEQ ID NO: 3446956 - DNA, 25 bp, Homo sapien
gaaataaagctaaatgatgatgcaa

SEQ ID NO: 3446957 - DNA, 25 bp, Homo sapien
gaagccaaatagacttgactgcctt

SEQ ID NO: 3446958 - DNA, 25 bp, Homo sapien
ctgcagaagccaaatagacttgact

SEQ ID NO: 3446959 - DNA, 25 bp, Homo sapien
taattgagaaatatgcatctgtgac

SEQ ID NO: 3446960 - DNA, 25 bp, Homo sapien
aatatgcatctgtgacaggtaatca

SEQ ID NO: 3446961 - DNA, 25 bp, Homo sapien
tgacatggttgagattttacaagcc

SEQ ID NO: 3446962 - DNA, 25 bp, Homo sapien
aatccactagttggtcttgacatgg

SEQ ID NO: 3446963 - DNA, 25 bp, Homo sapien
ccattggagcccatatcttttggag

SEQ ID NO: 3446964 - DNA, 25 bp, Homo sapien
acttcatttctatggcagcactcat

SEQ ID NO: 3446965 - DNA, 25 bp, Homo sapien
ggcagcactcataagcttctccatt

SEQ ID NO: 3446966 - DNA, 25 bp, Homo sapien
ggagcccatatcttttggagccaaa

SEQ ID NO: 3446967 - DNA, 25 bp, Homo sapien
tgttccccataggaatgtgactgct

SEQ ID NO: 3446968 - DNA, 25 bp, Homo sapien
aaatgctctctagagtccgaaagcc

SEQ ID NO: 3446969 - DNA, 25 bp, Homo sapien
aggatgcctcgggtgatgtatctac

SEQ ID NO: 3446970 - DNA, 25 bp, Homo sapien
gaacaaggcccatgcatgaaggcac

SEQ ID NO: 3446971 - DNA, 25 bp, Homo sapien
tagttgtgctgagcctggaggtttc

SEQ ID NO: 3446972 - DNA, 25 bp, Homo sapien
tacacgcttagcaagaattaccaag

SEQ ID NO: 3446973 - DNA, 25 bp, Homo sapien
gcagttatcataatgcctagcatcc

SEQ ID NO: 3446974 - DNA, 25 bp, Homo sapien
taggaaccgttgatcacagcagaca

SEQ ID NO: 3446975 - DNA, 25 bp, Homo sapien
tggatcctgcatctggaatcctgtg

SEQ ID NO: 3446976 - DNA, 25 bp, Homo sapien
gaatcctgtgactatgaatttgcaa

SEQ ID NO: 3446977 - DNA, 25 bp, Homo sapien
cctcttcagtagctctgctgccttt

SEQ ID NO: 3446978 - DNA, 25 bp, Homo sapien
tctgttacaatcagttggatcctgc

SEQ ID NO: 3446979 - DNA, 25 bp, Homo sapien
tggccacactggtctaaatgcattc

SEQ ID NO: 3446980 - DNA, 25 bp, Homo sapien
gacatcatgataataggccttaggc

SEQ ID NO: 3446981 - DNA, 25 bp, Homo sapien
gaacaaggatcagctacataggagt

SEQ ID NO: 3446982 - DNA, 25 bp, Homo sapien
tgagctgccgaactagaacaaggat

SEQ ID NO: 3446983 - DNA, 25 bp, Homo sapien
ccaatgggaattcaggccatgctga

SEQ ID NO: 3446984 - DNA, 25 bp, Homo sapien
ttgccaatgggaattcaggccatgc

SEQ ID NO: 3446985 - DNA, 25 bp, Homo sapien
aatgggaattcaggccatgctgatt

SEQ ID NO: 3446986 - DNA, 25 bp, Homo sapien
ggaattcaggccatgctgatttcaa

SEQ ID NO: 3446987 - DNA, 25 bp, Homo sapien
caagtgcctgagctcactagccagt

SEQ ID NO: 3446988 - DNA, 25 bp, Homo sapien
tctgaatgcagctagtaattgtcct

SEQ ID NO: 3446989 - DNA, 25 bp, Homo sapien
caccagggtcacaagtgcctgagct

SEQ ID NO: 3446990 - DNA, 25 bp, Homo sapien
ccagtggaatgtgcccctgttcttc

SEQ ID NO: 3446991 - DNA, 25 bp, Homo sapien
tgacccatgaatccaagagtcaggc

SEQ ID NO: 3446992 - DNA, 25 bp, Homo sapien
gacccatgaatccaagagtcaggca

SEQ ID NO: 3446993 - DNA, 25 bp, Homo sapien
tactgacccatgaatccaagagtca

SEQ ID NO: 3446994 - DNA, 25 bp, Homo sapien
aggtactgacccatgaatccaagag

SEQ ID NO: 3446995 - DNA, 25 bp, Homo sapien
catgtggcaactcactagaaaagca

SEQ ID NO: 3446996 - DNA, 25 bp, Homo sapien
tccattgagtcacatgggctgcagt

SEQ ID NO: 3446997 - DNA, 25 bp, Homo sapien
ccatggtttggcttaaagacttgca

SEQ ID NO: 3446998 - DNA, 25 bp, Homo sapien
tccagtctgggtgtgccactaacca

SEQ ID NO: 3446999 - DNA, 25 bp, Homo sapien
cagaagtcctcctttcacccgaagg

SEQ ID NO: 3447000 - DNA, 25 bp, Homo sapien
ctactgcaagtccaccaggggttct

SEQ ID NO: 3447001 - DNA, 25 bp, Homo sapien
caggggttctgttttgccctccaga

SEQ ID NO: 3447002 - DNA, 25 bp, Homo sapien
tccagaagtcctcctttcacccgaa

SEQ ID NO: 3447003 - DNA, 25 bp, Homo sapien
aattgccgagtgtctgccatgggtc

SEQ ID NO: 3447004 - DNA, 25 bp, Homo sapien
tgtaattgccgagtgtctgccatgg

SEQ ID NO: 3447005 - DNA, 25 bp, Homo sapien
agcatttgtaattgccgagtgtctg

SEQ ID NO: 3447006 - DNA, 25 bp, Homo sapien
tttgtaattgccgagtgtctgccat

SEQ ID NO: 3447007 - DNA, 25 bp, Homo sapien
gctttgttgttcaggtgccaaagtg

SEQ ID NO: 3447008 - DNA, 25 bp, Homo sapien
tgttcaggtgccaaagtgatttgct

SEQ ID NO: 3447009 - DNA, 25 bp, Homo sapien
tttgttgttcaggtgccaaagtgat

SEQ ID NO: 3447010 - DNA, 25 bp, Homo sapien
tgttgttcaggtgccaaagtgattt

SEQ ID NO: 3447011 - DNA, 25 bp, Homo sapien
tttcatctgtagtagggacagatct

SEQ ID NO: 3447012 - DNA, 25 bp, Homo sapien
gtgtcactagtgctggtttcatctg

SEQ ID NO: 3447013 - DNA, 25 bp, Homo sapien
tatcagtaagtgtcactagtgctgg

SEQ ID NO: 3447014 - DNA, 25 bp, Homo sapien
tctttccagatctatcagtaagtgt

SEQ ID NO: 3447015 - DNA, 25 bp, Homo sapien
tggcagagtgcagaagaccgacact

SEQ ID NO: 3447016 - DNA, 25 bp, Homo sapien
gcagaagaccgacacttcctttcac

SEQ ID NO: 3447017 - DNA, 25 bp, Homo sapien
gagtgcagaagaccgacacttcctt

SEQ ID NO: 3447018 - DNA, 25 bp, Homo sapien
cagagtgcagaagaccgacacttcc

SEQ ID NO: 3447019 - DNA, 25 bp, Homo sapien
tgtttcgggttaggctttgagtcag

SEQ ID NO: 3447020 - DNA, 25 bp, Homo sapien
catgagtgtacgtgatttctctgtg

SEQ ID NO: 3447021 - DNA, 25 bp, Homo sapien
cattgttgctgcgtcttttagcttc

SEQ ID NO: 3447022 - DNA, 25 bp, Homo sapien
ttcatgtagtcattgttgctgcgtc

SEQ ID NO: 3447023 - DNA, 25 bp, Homo sapien
attgtgcatgctagtttcaagcccc

SEQ ID NO: 3447024 - DNA, 25 bp, Homo sapien
ggtcttgccatattgtgcatgctag

SEQ ID NO: 3447025 - DNA, 25 bp, Homo sapien
tgcatgctagtttcaagcccctggg

SEQ ID NO: 3447026 - DNA, 25 bp, Homo sapien
gccatattgtgcatgctagtttcaa

SEQ ID NO: 3447027 - DNA, 25 bp, Homo sapien
ggagcaatctcccaattactcagac

SEQ ID NO: 3447028 - DNA, 25 bp, Homo sapien
ccctgggcaattccaatgcaagttc

SEQ ID NO: 3447029 - DNA, 25 bp, Homo sapien
caattactcagacttcccctgggca

SEQ ID NO: 3447030 - DNA, 25 bp, Homo sapien
tcagattctgctagacgaagaggga

SEQ ID NO: 3447031 - DNA, 25 bp, Homo sapien
gaacaagctttaacatctaagggcg

SEQ ID NO: 3447032 - DNA, 25 bp, Homo sapien
ggaaaccagtcccaatcctatgtga

SEQ ID NO: 3447033 - DNA, 25 bp, Homo sapien
taggccaagcctcagtgaagggctc

SEQ ID NO: 3447034 - DNA, 25 bp, Homo sapien
aaagtgacatcgctcaatgtggcag

SEQ ID NO: 3447035 - DNA, 25 bp, Homo sapien
catattattgagaagtgacccctgt

SEQ ID NO: 3447036 - DNA, 25 bp, Homo sapien
tgagttgaaccccaataagcctgac

SEQ ID NO: 3447037 - DNA, 25 bp, Homo sapien
tgtaactccttcctgcagtgtatga

SEQ ID NO: 3447038 - DNA, 25 bp, Homo sapien
taagcctgactcataagcctggctg

SEQ ID NO: 3447039 - DNA, 25 bp, Homo sapien
cacaaacaatgaagagtaagggaga

SEQ ID NO: 3447040 - DNA, 25 bp, Homo sapien
cagcccaagagaagcagttaccgct

SEQ ID NO: 3447041 - DNA, 25 bp, Homo sapien
cccaagagaagcagttaccgctctt

SEQ ID NO: 3447042 - DNA, 25 bp, Homo sapien
acacaaacaatgaagagtaagggag

SEQ ID NO: 3447043 - DNA, 25 bp, Homo sapien
gagagaaaaacgcacccataaatgc

SEQ ID NO: 3447044 - DNA, 25 bp, Homo sapien
caccatcactagagcaggtcagctg

SEQ ID NO: 3447045 - DNA, 25 bp, Homo sapien
tgctgacaccatcactagagcaggt

SEQ ID NO: 3447046 - DNA, 25 bp, Homo sapien
cagctgtttagcttgtagagagaaa

SEQ ID NO: 3447047 - DNA, 25 bp, Homo sapien
gacgtattgtcccatcaagaccaat

SEQ ID NO: 3447048 - DNA, 25 bp, Homo sapien
ctagagaaggattgttgtaggccta

SEQ ID NO: 3447049 - DNA, 25 bp, Homo sapien
caagaccaattacagaggtgtagag

SEQ ID NO: 3447050 - DNA, 25 bp, Homo sapien
taggcctatcatgttcttcatcacc

SEQ ID NO: 3447051 - DNA, 25 bp, Homo sapien
catgtccgagaaaaccagtatgctg

SEQ ID NO: 3447052 - DNA, 25 bp, Homo sapien
gaaaatcctttgttgatgcctccag

SEQ ID NO: 3447053 - DNA, 25 bp, Homo sapien
tcttcagctcgatcaagttgtgcag

SEQ ID NO: 3447054 - DNA, 25 bp, Homo sapien
tccagcaggtaactaattcttcagc

SEQ ID NO: 3447055 - DNA, 25 bp, Homo sapien
ttatgtttgagataatgaataccga

SEQ ID NO: 3447056 - DNA, 25 bp, Homo sapien
tatgtttgagataatgaataccgac

SEQ ID NO: 3447057 - DNA, 25 bp, Homo sapien
catgcagaacagttctgctctcctc

SEQ ID NO: 3447058 - DNA, 25 bp, Homo sapien
gcatgcagaacagttctgctctcct

SEQ ID NO: 3447059 - DNA, 25 bp, Homo sapien
tagcatgcagaacagttctgctctc

SEQ ID NO: 3447060 - DNA, 25 bp, Homo sapien
gtagcatgcagaacagttctgctct

SEQ ID NO: 3447061 - DNA, 25 bp, Homo sapien
cattctcttttctgttctttcctac

SEQ ID NO: 3447062 - DNA, 25 bp, Homo sapien
tgtgtattgctgcttcctccattct

SEQ ID NO: 3447063 - DNA, 25 bp, Homo sapien
tccattctcttttctgttctttcct

SEQ ID NO: 3447064 - DNA, 25 bp, Homo sapien
tgtattgctgcttcctccattctct

SEQ ID NO: 3447065 - DNA, 25 bp, Homo sapien
ttattcccctgtaggagcttttatc

SEQ ID NO: 3447066 - DNA, 25 bp, Homo sapien
ccatctcctttgcggccaaaagcct

SEQ ID NO: 3447067 - DNA, 25 bp, Homo sapien
tcatccatctcctttgcggccaaaa

SEQ ID NO: 3447068 - DNA, 25 bp, Homo sapien
atccatctcctttgcggccaaaagc

SEQ ID NO: 3447069 - DNA, 25 bp, Homo sapien
catccatctcctttgcggccaaaag

SEQ ID NO: 3447070 - DNA, 25 bp, Homo sapien
atgagctcctcactaacaaaggtca

SEQ ID NO: 3447071 - DNA, 25 bp, Homo sapien
ggttgactgcaagctccagagagct

SEQ ID NO: 3447072 - DNA, 25 bp, Homo sapien
gaggaggagcccctctatgcaggaa

SEQ ID NO: 3447073 - DNA, 25 bp, Homo sapien
gatgtcatactggtcttcactccca

SEQ ID NO: 3447074 - DNA, 25 bp, Homo sapien
tccactgcatagtcgtgtaaggagc

SEQ ID NO: 3447075 - DNA, 25 bp, Homo sapien
tctgtattcccacacttcagccact

SEQ ID NO: 3447076 - DNA, 25 bp, Homo sapien
tgccgctcctcttgttccttgtggg

SEQ ID NO: 3447077 - DNA, 25 bp, Homo sapien
gtattcccacacttcagccactctg

SEQ ID NO: 3447078 - DNA, 25 bp, Homo sapien
tcttgccgctcctcttgttccttgt

SEQ ID NO: 3447079 - DNA, 25 bp, Homo sapien
tataatgacttcgtgtgtgataaag

SEQ ID NO: 3447080 - DNA, 25 bp, Homo sapien
gacttcgtgtgtgataaagagcaga

SEQ ID NO: 3447081 - DNA, 25 bp, Homo sapien
ttcgtgtgtgataaagagcagagag

SEQ ID NO: 3447082 - DNA, 25 bp, Homo sapien
aatgacttcgtgtgtgataaagagc

SEQ ID NO: 3447083 - DNA, 25 bp, Homo sapien
cattgtgagaggaggcttacgcttc

SEQ ID NO: 3447084 - DNA, 25 bp, Homo sapien
agggctcccgaaccagacacatcat

SEQ ID NO: 3447085 - DNA, 25 bp, Homo sapien
cagcccccacacttaggcattgtga

SEQ ID NO: 3447086 - DNA, 25 bp, Homo sapien
tgacccacgcttttggatttaccaa

SEQ ID NO: 3447087 - DNA, 25 bp, Homo sapien
ctctaccaccctctcattgagtagc

SEQ ID NO: 3447088 - DNA, 25 bp, Homo sapien
ggtcgcttccaaccctcaatatttg

SEQ ID NO: 3447089 - DNA, 25 bp, Homo sapien
ctcaatatttgttccaaggagccca

SEQ ID NO: 3447090 - DNA, 25 bp, Homo sapien
tttgttccaaggagcccatacacat

SEQ ID NO: 3447091 - DNA, 25 bp, Homo sapien
caaccctcaatatttgttccaagga

SEQ ID NO: 3447092 - DNA, 25 bp, Homo sapien
gaataaggtcctctattaagaagaa

SEQ ID NO: 3447093 - DNA, 25 bp, Homo sapien
ccaagcttaggaataaggtcctcta

SEQ ID NO: 3447094 - DNA, 25 bp, Homo sapien
ggaataaggtcctctattaagaaga

SEQ ID NO: 3447095 - DNA, 25 bp, Homo sapien
aactgtccaagcttaggaataaggt

SEQ ID NO: 3447096 - DNA, 25 bp, Homo sapien
tattatgctcctgtatttccccttt

SEQ ID NO: 3447097 - DNA, 25 bp, Homo sapien
cgacattttcactggaccgattgga

SEQ ID NO: 3447098 - DNA, 25 bp, Homo sapien
tacttattatgctcctgtatttccc

SEQ ID NO: 3447099 - DNA, 25 bp, Homo sapien
ttttccagataagtcgacattttca

SEQ ID NO: 3447100 - DNA, 25 bp, Homo sapien
gctgtctggctcagatgcatggtct

SEQ ID NO: 3447101 - DNA, 25 bp, Homo sapien
gcctattgttgtggtgtgaatccca

SEQ ID NO: 3447102 - DNA, 25 bp, Homo sapien
caataaagggtcaagccctgcacct

SEQ ID NO: 3447103 - DNA, 25 bp, Homo sapien
gagaaggcgtctcgtcagctgtctg

SEQ ID NO: 3447104 - DNA, 25 bp, Homo sapien
gaaatataggacacggaagacttct

SEQ ID NO: 3447105 - DNA, 25 bp, Homo sapien
tgagaaatataggacacggaagact

SEQ ID NO: 3447106 - DNA, 25 bp, Homo sapien
cttctcaaacacattctggtgatag

SEQ ID NO: 3447107 - DNA, 25 bp, Homo sapien
cattctggtgatagcagtgatgaga

SEQ ID NO: 3447108 - DNA, 25 bp, Homo sapien
tctttgtaccgttccaatttcagta

SEQ ID NO: 3447109 - DNA, 25 bp, Homo sapien
atcatccttgcatgggggtcatgct

SEQ ID NO: 3447110 - DNA, 25 bp, Homo sapien
gcatatcatccttgcatgggggtca

SEQ ID NO: 3447111 - DNA, 25 bp, Homo sapien
atatcatccttgcatgggggtcatg

SEQ ID NO: 3447112 - DNA, 25 bp, Homo sapien
ccatatttgtggctccagcagtttc

SEQ ID NO: 3447113 - DNA, 25 bp, Homo sapien
ggccatatttgtggctccagcagtt

SEQ ID NO: 3447114 - DNA, 25 bp, Homo sapien
catatttgtggctccagcagtttct

SEQ ID NO: 3447115 - DNA, 25 bp, Homo sapien
gccatatttgtggctccagcagttt

SEQ ID NO: 3447116 - DNA, 25 bp, Homo sapien
tttgattttattaaggagctttctg

SEQ ID NO: 3447117 - DNA, 25 bp, Homo sapien
cactgaaggtacttaaacatttgat

SEQ ID NO: 3447118 - DNA, 25 bp, Homo sapien
cttcactgaaggtacttaaacattt

SEQ ID NO: 3447119 - DNA, 25 bp, Homo sapien
atttgattttattaaggagctttct

SEQ ID NO: 3447120 - DNA, 25 bp, Homo sapien
ccttattaatcttatcagtgctgtc

SEQ ID NO: 3447121 - DNA, 25 bp, Homo sapien
taatcttatcagtgctgtcatccat

SEQ ID NO: 3447122 - DNA, 25 bp, Homo sapien
tattaatcttatcagtgctgtcatc

SEQ ID NO: 3447123 - DNA, 25 bp, Homo sapien
ttaatcttatcagtgctgtcatcca

SEQ ID NO: 3447124 - DNA, 25 bp, Homo sapien
tgaaagccctgctatgaagttccat

SEQ ID NO: 3447125 - DNA, 25 bp, Homo sapien
tattaggtgtggaaatagctttggg

SEQ ID NO: 3447126 - DNA, 25 bp, Homo sapien
aatggtacatttgaaagccctgcta

SEQ ID NO: 3447127 - DNA, 25 bp, Homo sapien
catttgaaagccctgctatgaagtt

SEQ ID NO: 3447128 - DNA, 25 bp, Homo sapien
tggcacttttcagggcaactgcatc

SEQ ID NO: 3447129 - DNA, 25 bp, Homo sapien
gatatcattgagaagcaagcctcct

SEQ ID NO: 3447130 - DNA, 25 bp, Homo sapien
tcattccagcctgatatcattgaga

SEQ ID NO: 3447131 - DNA, 25 bp, Homo sapien
tctggcacttttcagggcaactgca

SEQ ID NO: 3447132 - DNA, 25 bp, Homo sapien
aggaccctggtcctcagactctggt

SEQ ID NO: 3447133 - DNA, 25 bp, Homo sapien
gagccccaggacatgacagagatct

SEQ ID NO: 3447134 - DNA, 25 bp, Homo sapien
acagagatctgtccactatcaggtg

SEQ ID NO: 3447135 - DNA, 25 bp, Homo sapien
tctgggcccttggttctccctccag

SEQ ID NO: 3447136 - DNA, 25 bp, Homo sapien
agccatgtgataagttgtcatttga

SEQ ID NO: 3447137 - DNA, 25 bp, Homo sapien
ggaatgactattcttctatagccca

SEQ ID NO: 3447138 - DNA, 25 bp, Homo sapien
gctgtggtcaccgtacagatctcgg

SEQ ID NO: 3447139 - DNA, 25 bp, Homo sapien
caccgtacagatctcggtaggaaga

SEQ ID NO: 3447140 - DNA, 25 bp, Homo sapien
ttctttctccaagcatgcaggatct

SEQ ID NO: 3447141 - DNA, 25 bp, Homo sapien
tctttctccaagcatgcaggatctt

SEQ ID NO: 3447142 - DNA, 25 bp, Homo sapien
aaatcaggcagagaggtgatccctg

SEQ ID NO: 3447143 - DNA, 25 bp, Homo sapien
gacactcattgtatggaattctcat

SEQ ID NO: 3447144 - DNA, 25 bp, Homo sapien
gatggatgtgacactcattgtatgg

SEQ ID NO: 3447145 - DNA, 25 bp, Homo sapien
cagagaggtgatccctgttcaccac

SEQ ID NO: 3447146 - DNA, 25 bp, Homo sapien
cgtgtaatgaatgtcccgatcccta

SEQ ID NO: 3447147 - DNA, 25 bp, Homo sapien
ttaacgtgtaatgaatgtcccgatc

SEQ ID NO: 3447148 - DNA, 25 bp, Homo sapien
aatgaatgtcccgatccctagtaag

SEQ ID NO: 3447149 - DNA, 25 bp, Homo sapien
gaatgtcccgatccctagtaagatc

SEQ ID NO: 3447150 - DNA, 25 bp, Homo sapien
ttatggcaaagacactgttagaaat

SEQ ID NO: 3447151 - DNA, 25 bp, Homo sapien
tatggcaaagacactgttagaaatt

SEQ ID NO: 3447152 - DNA, 25 bp, Homo sapien
ctcctctgtcccagtgcttatccca

SEQ ID NO: 3447153 - DNA, 25 bp, Homo sapien
gtgcttatcccagtggtccctcttt

SEQ ID NO: 3447154 - DNA, 25 bp, Homo sapien
tgtcccagtgcttatcccagtggtc

SEQ ID NO: 3447155 - DNA, 25 bp, Homo sapien
tccataagaggccaccaggctgaca

SEQ ID NO: 3447156 - DNA, 25 bp, Homo sapien
gattttgttccactaatggtcggtc

SEQ ID NO: 3447157 - DNA, 25 bp, Homo sapien
ctatcctttatgaaggtccttgaag

SEQ ID NO: 3447158 - DNA, 25 bp, Homo sapien
tgttccactaatggtcggtcaacca

SEQ ID NO: 3447159 - DNA, 25 bp, Homo sapien
gaagtgattttgttccactaatggt

SEQ ID NO: 3447160 - DNA, 25 bp, Homo sapien
cttttgagattacatctgcaagtac

SEQ ID NO: 3447161 - DNA, 25 bp, Homo sapien
tttgagattacatctgcaagtactc

SEQ ID NO: 3447162 - DNA, 25 bp, Homo sapien
tgagattacatctgcaagtactctc

SEQ ID NO: 3447163 - DNA, 25 bp, Homo sapien
gattacatctgcaagtactctctgc

SEQ ID NO: 3447164 - DNA, 25 bp, Homo sapien
cctttgaagaggtcctactgagtaa

SEQ ID NO: 3447165 - DNA, 25 bp, Homo sapien
tactgagtaatgatcttctttcacc

SEQ ID NO: 3447166 - DNA, 25 bp, Homo sapien
gaggtcctactgagtaatgatcttc

SEQ ID NO: 3447167 - DNA, 25 bp, Homo sapien
gaagaggtcctactgagtaatgatc

SEQ ID NO: 3447168 - DNA, 25 bp, Homo sapien
ggtaatgagtcttacaggactcaga

SEQ ID NO: 3447169 - DNA, 25 bp, Homo sapien
taagtgacagaagtgcagctggcgg

SEQ ID NO: 3447170 - DNA, 25 bp, Homo sapien
caagtcagcaaggtgagaggccaca

SEQ ID NO: 3447171 - DNA, 25 bp, Homo sapien
gctggcggagactgatggtgttcca

SEQ ID NO: 3447172 - DNA, 25 bp, Homo sapien
tcacaatgtagcccttcttctgccc

SEQ ID NO: 3447173 - DNA, 25 bp, Homo sapien
cctttagttcgaaatttcagcttat

SEQ ID NO: 3447174 - DNA, 25 bp, Homo sapien
cacaatgtagcccttcttctgccct

SEQ ID NO: 3447175 - DNA, 25 bp, Homo sapien
ctttagttcgaaatttcagcttatt

SEQ ID NO: 3447176 - DNA, 25 bp, Homo sapien
gctacaacaagttgttgtgtcaaag

SEQ ID NO: 3447177 - DNA, 25 bp, Homo sapien
cctcctctatcttttgacagtgatt

SEQ ID NO: 3447178 - DNA, 25 bp, Homo sapien
tatcttttgacagtgattgacagct

SEQ ID NO: 3447179 - DNA, 25 bp, Homo sapien
acaacaagttgttgtgtcaaagctc

SEQ ID NO: 3447180 - DNA, 25 bp, Homo sapien
tgtaaacaacttatcaagacttcca

SEQ ID NO: 3447181 - DNA, 25 bp, Homo sapien
caaattcagactgtcattaatagag

SEQ ID NO: 3447182 - DNA, 25 bp, Homo sapien
tgaacttccttgtaaacaacttatc

SEQ ID NO: 3447183 - DNA, 25 bp, Homo sapien
catttctagcgatgcatcctgagaa

SEQ ID NO: 3447184 - DNA, 25 bp, Homo sapien
cagtcagaaaaatctctattacttc

SEQ ID NO: 3447185 - DNA, 25 bp, Homo sapien
aatgtgtcctatgttaacttcagtc

SEQ ID NO: 3447186 - DNA, 25 bp, Homo sapien
tacttcataagtccacctgactggc

SEQ ID NO: 3447187 - DNA, 25 bp, Homo sapien
tactattgactcctgtgtgtctcca

SEQ ID NO: 3447188 - DNA, 25 bp, Homo sapien
tggctgtgtgtcagaaaactctccc

SEQ ID NO: 3447189 - DNA, 25 bp, Homo sapien
cagtctttgggatgtagatcttatc

SEQ ID NO: 3447190 - DNA, 25 bp, Homo sapien
tcaattcagagtggtatccctattc

SEQ ID NO: 3447191 - DNA, 25 bp, Homo sapien
gaccaagattgggttgtcaacttcc

SEQ ID NO: 3447192 - DNA, 25 bp, Homo sapien
aaagttatattctggagtcattcca

SEQ ID NO: 3447193 - DNA, 25 bp, Homo sapien
tcacaggcccttcaggatatgacat

SEQ ID NO: 3447194 - DNA, 25 bp, Homo sapien
gttatcattcacaggcccttcagga

SEQ ID NO: 3447195 - DNA, 25 bp, Homo sapien
tatcattcacaggcccttcaggata

SEQ ID NO: 3447196 - DNA, 25 bp, Homo sapien
attcacaggcccttcaggatatgac

SEQ ID NO: 3447197 - DNA, 25 bp, Homo sapien
agttcagcaacagccacatatcctt

SEQ ID NO: 3447198 - DNA, 25 bp, Homo sapien
ttcagcaacagccacatatccttga

SEQ ID NO: 3447199 - DNA, 25 bp, Homo sapien
gttcagcaacagccacatatccttg

SEQ ID NO: 3447200 - DNA, 25 bp, Homo sapien
aaccgtgaaaggatgttagtaggca

SEQ ID NO: 3447201 - DNA, 25 bp, Homo sapien
ttagctctaggtacctccataaccg

SEQ ID NO: 3447202 - DNA, 25 bp, Homo sapien
gattgacatcctctgaatcttgatc

SEQ ID NO: 3447203 - DNA, 25 bp, Homo sapien
catcttgtctgtgctttagctctag

SEQ ID NO: 3447204 - DNA, 25 bp, Homo sapien
ttttctcttgtagaaagcagttcat

SEQ ID NO: 3447205 - DNA, 25 bp, Homo sapien
ctttttctcttgtagaaagcagttc

SEQ ID NO: 3447206 - DNA, 25 bp, Homo sapien
ctgggatctccaaattcttcttttt

SEQ ID NO: 3447207 - DNA, 25 bp, Homo sapien
ttctttttctcttgtagaaagcagt

SEQ ID NO: 3447208 - DNA, 25 bp, Homo sapien
gcttgataaacctggattgaagcac

SEQ ID NO: 3447209 - DNA, 25 bp, Homo sapien
tatccccatgggtctgaacgcttga

SEQ ID NO: 3447210 - DNA, 25 bp, Homo sapien
ggtctgaacgcttgataaacctgga

SEQ ID NO: 3447211 - DNA, 25 bp, Homo sapien
tcctttatccccatgggtctgaacg

SEQ ID NO: 3447212 - DNA, 25 bp, Homo sapien
caaggctttagtgacagattggaat

SEQ ID NO: 3447213 - DNA, 25 bp, Homo sapien
aacaaggctttagtgacagattgga

SEQ ID NO: 3447214 - DNA, 25 bp, Homo sapien
aaggctttagtgacagattggaatt

SEQ ID NO: 3447215 - DNA, 25 bp, Homo sapien
ataacaaggctttagtgacagattg

SEQ ID NO: 3447216 - DNA, 25 bp, Homo sapien
ttttgttgtcgctgttctcagtaac

SEQ ID NO: 3447217 - DNA, 25 bp, Homo sapien
atccagctggtttttgttgtcgctg

SEQ ID NO: 3447218 - DNA, 25 bp, Homo sapien
tgtcgctgttctcagtaacatccag

SEQ ID NO: 3447219 - DNA, 25 bp, Homo sapien
tgttgtcgctgttctcagtaacatc

SEQ ID NO: 3447220 - DNA, 25 bp, Homo sapien
tctgtctgctgtgtcgcaggttctc

SEQ ID NO: 3447221 - DNA, 25 bp, Homo sapien
gtgtcgcaggttctctgaagcagca

SEQ ID NO: 3447222 - DNA, 25 bp, Homo sapien
ctgtctgctgtgtcgcaggttctct

SEQ ID NO: 3447223 - DNA, 25 bp, Homo sapien
tgctgtgtcgcaggttctctgaagc

SEQ ID NO: 3447224 - DNA, 25 bp, Homo sapien
aggtgagcttaaggttccctgtact

SEQ ID NO: 3447225 - DNA, 25 bp, Homo sapien
caaaccattgctttggtccccagtg

SEQ ID NO: 3447226 - DNA, 25 bp, Homo sapien
ccaaaagctaagagatggaagatca

SEQ ID NO: 3447227 - DNA, 25 bp, Homo sapien
agatcagcatagtagtcatcatttg

SEQ ID NO: 3447228 - DNA, 25 bp, Homo sapien
tatttcataaacgtctggaaagagg

SEQ ID NO: 3447229 - DNA, 25 bp, Homo sapien
ctgcatactaccttgttccttgcaa

SEQ ID NO: 3447230 - DNA, 25 bp, Homo sapien
cgtctggaaagaggcattcctgttc

SEQ ID NO: 3447231 - DNA, 25 bp, Homo sapien
ctttgtctatgggataggctcctaa

SEQ ID NO: 3447232 - DNA, 25 bp, Homo sapien
catttttccggagttcagtgattcc

SEQ ID NO: 3447233 - DNA, 25 bp, Homo sapien
ttccacagacatgtaagtgtagagg

SEQ ID NO: 3447234 - DNA, 25 bp, Homo sapien
caaacccgtagtctcctatgttcat

SEQ ID NO: 3447235 - DNA, 25 bp, Homo sapien
tgttgaaagactcaaacccgtagtc

SEQ ID NO: 3447236 - DNA, 25 bp, Homo sapien
tcccaatcaatgtactggattctag

SEQ ID NO: 3447237 - DNA, 25 bp, Homo sapien
ttaagccgtgtgtgactcccaatca

SEQ ID NO: 3447238 - DNA, 25 bp, Homo sapien
tgtactggattctagaatgtgtcag

SEQ ID NO: 3447239 - DNA, 25 bp, Homo sapien
gattctagaatgtgtcagattagca

SEQ ID NO: 3447240 - DNA, 25 bp, Homo sapien
gccctaaggatggtagagaagcact

SEQ ID NO: 3447241 - DNA, 25 bp, Homo sapien
tgtgggcaaacaaactagccctaag

SEQ ID NO: 3447242 - DNA, 25 bp, Homo sapien
caaccaatgggatctcccagaggaa

SEQ ID NO: 3447243 - DNA, 25 bp, Homo sapien
atccatcattgtgtcctggacagca

SEQ ID NO: 3447244 - DNA, 25 bp, Homo sapien
tcttccggttctgacattcagccat

SEQ ID NO: 3447245 - DNA, 25 bp, Homo sapien
ctgcgtttggcctaaaggtctcttc

SEQ ID NO: 3447246 - DNA, 25 bp, Homo sapien
ctcttccggttctgacattcagcca

SEQ ID NO: 3447247 - DNA, 25 bp, Homo sapien
tctcttccggttctgacattcagcc

SEQ ID NO: 3447248 - DNA, 25 bp, Homo sapien
ttgcataagaaaggacgacaagtct

SEQ ID NO: 3447249 - DNA, 25 bp, Homo sapien
taaattgatttgcataagaaaggac

SEQ ID NO: 3447250 - DNA, 25 bp, Homo sapien
ttaatgtggaggagatcccaaggaa

SEQ ID NO: 3447251 - DNA, 25 bp, Homo sapien
gatttgcataagaaaggacgacaag

SEQ ID NO: 3447252 - DNA, 25 bp, Homo sapien
taccgtgtcaggaggtttctttgta

SEQ ID NO: 3447253 - DNA, 25 bp, Homo sapien
gcttttaggccaatgtctgaggaaa

SEQ ID NO: 3447254 - DNA, 25 bp, Homo sapien
tctttgtaaaacagctccttcagct

SEQ ID NO: 3447255 - DNA, 25 bp, Homo sapien
gcttcttcaggcccttgttcaaaaa

SEQ ID NO: 3447256 - DNA, 25 bp, Homo sapien
tgctccttcaagttccaaccgtccc

SEQ ID NO: 3447257 - DNA, 25 bp, Homo sapien
ccttcaagttccaaccgtccctctg

SEQ ID NO: 3447258 - DNA, 25 bp, Homo sapien
ttcaagttccaaccgtccctctgtg

SEQ ID NO: 3447259 - DNA, 25 bp, Homo sapien
aagttccaaccgtccctctgtgagc

SEQ ID NO: 3447260 - DNA, 25 bp, Homo sapien
tctgggacacccctaccatgtagga

SEQ ID NO: 3447261 - DNA, 25 bp, Homo sapien
tctttctgggacacccctaccatgt

SEQ ID NO: 3447262 - DNA, 25 bp, Homo sapien
tgggacacccctaccatgtaggaca

SEQ ID NO: 3447263 - DNA, 25 bp, Homo sapien
gacacccctaccatgtaggacaact

SEQ ID NO: 3447264 - DNA, 25 bp, Homo sapien
ctgcaataagctttctcctcttccc

SEQ ID NO: 3447265 - DNA, 25 bp, Homo sapien
cttcaaaactatgaacacacatcac

SEQ ID NO: 3447266 - DNA, 25 bp, Homo sapien
ccctgactgatgaacttctgttaat

SEQ ID NO: 3447267 - DNA, 25 bp, Homo sapien
tgttaattcttcaaaactatgaaca

SEQ ID NO: 3447268 - DNA, 25 bp, Homo sapien
gagcagtgccaccaagtctatcctg

SEQ ID NO: 3447269 - DNA, 25 bp, Homo sapien
taagaacagcaattgtccatggcac

SEQ ID NO: 3447270 - DNA, 25 bp, Homo sapien
ttaacattgttgatcctcggagtag

SEQ ID NO: 3447271 - DNA, 25 bp, Homo sapien
cacaggtattttgcttgacagccca

SEQ ID NO: 3447272 - DNA, 25 bp, Homo sapien
ttcattatcatctgagttctggtga

SEQ ID NO: 3447273 - DNA, 25 bp, Homo sapien
tcatctgagttctggtgacagtgtt

SEQ ID NO: 3447274 - DNA, 25 bp, Homo sapien
tatcatctgagttctggtgacagtg

SEQ ID NO: 3447275 - DNA, 25 bp, Homo sapien
cattatcatctgagttctggtgaca

SEQ ID NO: 3447276 - DNA, 25 bp, Homo sapien
ctttgagagtataagacctgtaatc

SEQ ID NO: 3447277 - DNA, 25 bp, Homo sapien
gttctgagatatcacctgctttgag

SEQ ID NO: 3447278 - DNA, 25 bp, Homo sapien
tcacctgctttgagagtataagacc

SEQ ID NO: 3447279 - DNA, 25 bp, Homo sapien
ctgttctgagatatcacctgctttg

SEQ ID NO: 3447280 - DNA, 25 bp, Homo sapien
cagttatcgtttctggaaaaggcat

SEQ ID NO: 3447281 - DNA, 25 bp, Homo sapien
tcaaaatcatatttcgaatggtatc

SEQ ID NO: 3447282 - DNA, 25 bp, Homo sapien
tggtatctttaccaactcctgttgt

SEQ ID NO: 3447283 - DNA, 25 bp, Homo sapien
gttgtttcccgattcacattttcag

SEQ ID NO: 3447284 - DNA, 25 bp, Homo sapien
ctacgtagtctctcctttacggcag

SEQ ID NO: 3447285 - DNA, 25 bp, Homo sapien
cttttatggcatttcaaaataagag

SEQ ID NO: 3447286 - DNA, 25 bp, Homo sapien
tcctttacggcagttcaggatagca

SEQ ID NO: 3447287 - DNA, 25 bp, Homo sapien
tcaggatagcaagacttttatggca

SEQ ID NO: 3447288 - DNA, 25 bp, Homo sapien
gaatcgtgcacatctcagctgtatg

SEQ ID NO: 3447289 - DNA, 25 bp, Homo sapien
caaggcaaggtcatgcgagggcatc

SEQ ID NO: 3447290 - DNA, 25 bp, Homo sapien
ggttagaaccatgaatcccagatac

SEQ ID NO: 3447291 - DNA, 25 bp, Homo sapien
taaatgaagtgataaaagtgggccc

SEQ ID NO: 3447292 - DNA, 25 bp, Homo sapien
atatgaaacagcatggccacgtact

SEQ ID NO: 3447293 - DNA, 25 bp, Homo sapien
cagtggggaatttcctctgctctgc

SEQ ID NO: 3447294 - DNA, 25 bp, Homo sapien
ccctatcaccagcaaataggcagct

SEQ ID NO: 3447295 - DNA, 25 bp, Homo sapien
taggcagctattcgctttctcttct

SEQ ID NO: 3447296 - DNA, 25 bp, Homo sapien
ggagcacacatgtgtgatacatatc

SEQ ID NO: 3447297 - DNA, 25 bp, Homo sapien
tgctgtttaactttgcaccgctaaa

SEQ ID NO: 3447298 - DNA, 25 bp, Homo sapien
aactttgcaccgctaaaagtgcgga

SEQ ID NO: 3447299 - DNA, 25 bp, Homo sapien
gctaaaagtgcggactctaggagca

SEQ ID NO: 3447300 - DNA, 25 bp, Homo sapien
gacggattgcttttcacttcaccta

SEQ ID NO: 3447301 - DNA, 25 bp, Homo sapien
tgcttttcacttcacctacgtctgt

SEQ ID NO: 3447302 - DNA, 25 bp, Homo sapien
ctttcaaagacggattgcttttcac

SEQ ID NO: 3447303 - DNA, 25 bp, Homo sapien
tcacttcacctacgtctgtcttcat

SEQ ID NO: 3447304 - DNA, 25 bp, Homo sapien
tcagacctgcaagtcaaaatggcag

SEQ ID NO: 3447305 - DNA, 25 bp, Homo sapien
tttggtactcatgctaaccagtggg

SEQ ID NO: 3447306 - DNA, 25 bp, Homo sapien
tactgcattttcagacctgcaagtc

SEQ ID NO: 3447307 - DNA, 25 bp, Homo sapien
tttcatggtatgtataggttactgc

SEQ ID NO: 3447308 - DNA, 25 bp, Homo sapien
catttgtcaaggaaggtagttttct

SEQ ID NO: 3447309 - DNA, 25 bp, Homo sapien
atacatttgtcaaggaaggtagttt

SEQ ID NO: 3447310 - DNA, 25 bp, Homo sapien
tccagatacagagatgacctcaagt

SEQ ID NO: 3447311 - DNA, 25 bp, Homo sapien
cagatacagagatgacctcaagtga

SEQ ID NO: 3447312 - DNA, 25 bp, Homo sapien
ttccagatacagagatgacctcaag

SEQ ID NO: 3447313 - DNA, 25 bp, Homo sapien
cattccagatacagagatgacctca

SEQ ID NO: 3447314 - DNA, 25 bp, Homo sapien
tagtccgggcagatggacagtccat

SEQ ID NO: 3447315 - DNA, 25 bp, Homo sapien
atggcaggtcagaccaccgccaaga

SEQ ID NO: 3447316 - DNA, 25 bp, Homo sapien
ctcgctgtagtccgggcagatggac

SEQ ID NO: 3447317 - DNA, 25 bp, Homo sapien
gatggacagtccatggcaggtcaga

SEQ ID NO: 3447318 - DNA, 25 bp, Homo sapien
tcttgaaccatgctagttggtggtt

SEQ ID NO: 3447319 - DNA, 25 bp, Homo sapien
tgaaccatgctagttggtggtttct

SEQ ID NO: 3447320 - DNA, 25 bp, Homo sapien
tctttcttgaaccatgctagttggt

SEQ ID NO: 3447321 - DNA, 25 bp, Homo sapien
aaccatgctagttggtggtttctgg

SEQ ID NO: 3447322 - DNA, 25 bp, Homo sapien
cagctgagtgccaaaagaactggtc

SEQ ID NO: 3447323 - DNA, 25 bp, Homo sapien
gctgagtgccaaaagaactggtcct

SEQ ID NO: 3447324 - DNA, 25 bp, Homo sapien
acttcagctgagtgccaaaagaact

SEQ ID NO: 3447325 - DNA, 25 bp, Homo sapien
tcacttcagctgagtgccaaaagaa

SEQ ID NO: 3447326 - DNA, 25 bp, Homo sapien
ggtaagagggaaggggcgatgttgc

SEQ ID NO: 3447327 - DNA, 25 bp, Homo sapien
tttgagatgagtcagtggtaagagg

SEQ ID NO: 3447328 - DNA, 25 bp, Homo sapien
tgagatgagtcagtggtaagaggga

SEQ ID NO: 3447329 - DNA, 25 bp, Homo sapien
ggaaggggcgatgttgcaaatttga

SEQ ID NO: 3447330 - DNA, 25 bp, Homo sapien
tggatggagcttttatgtgtgagaa

SEQ ID NO: 3447331 - DNA, 25 bp, Homo sapien
gaaatatggatggagcttttatgtg

SEQ ID NO: 3447332 - DNA, 25 bp, Homo sapien
ttatgtgtgagaagggattctccag

SEQ ID NO: 3447333 - DNA, 25 bp, Homo sapien
tatggaaatatggatggagctttta

SEQ ID NO: 3447334 - DNA, 25 bp, Homo sapien
tctgcccctgaaggtgtagcagcac

SEQ ID NO: 3447335 - DNA, 25 bp, Homo sapien
ggactccagaatccacgctataatt

SEQ ID NO: 3447336 - DNA, 25 bp, Homo sapien
ccagaatccacgctataattgtctt

SEQ ID NO: 3447337 - DNA, 25 bp, Homo sapien
tgtagcagcaccgtacacatcccag

SEQ ID NO: 3447338 - DNA, 25 bp, Homo sapien
taacggttccatgagcacgaacaag

SEQ ID NO: 3447339 - DNA, 25 bp, Homo sapien
tgtttattcataacggttccatgag

SEQ ID NO: 3447340 - DNA, 25 bp, Homo sapien
tattcataacggttccatgagcacg

SEQ ID NO: 3447341 - DNA, 25 bp, Homo sapien
catgagcacgaacaaggtgctcaga

SEQ ID NO: 3447342 - DNA, 25 bp, Homo sapien
tagatagagacaaggaggcgactgc

SEQ ID NO: 3447343 - DNA, 25 bp, Homo sapien
gactgccctgaatagagaccttcat

SEQ ID NO: 3447344 - DNA, 25 bp, Homo sapien
catcaagccttcaactgctgaccgc

SEQ ID NO: 3447345 - DNA, 25 bp, Homo sapien
gcccacctccaactatgtccttgag

SEQ ID NO: 3447346 - DNA, 25 bp, Homo sapien
cacagtgattgggtcaggaaagggt

SEQ ID NO: 3447347 - DNA, 25 bp, Homo sapien
gaagtgcaatgatccagtaagactc

SEQ ID NO: 3447348 - DNA, 25 bp, Homo sapien
tttgtctctgagtacacgaaggtcc

SEQ ID NO: 3447349 - DNA, 25 bp, Homo sapien
taagactctcctatgccacatgtca

SEQ ID NO: 3447350 - DNA, 25 bp, Homo sapien
actagtgttgtaggacttgccattt

SEQ ID NO: 3447351 - DNA, 25 bp, Homo sapien
gctctcttaccctttgtactagtgt

SEQ ID NO: 3447352 - DNA, 25 bp, Homo sapien
tgtactagtgttgtaggacttgcca

SEQ ID NO: 3447353 - DNA, 25 bp, Homo sapien
tctcttaccctttgtactagtgttg

SEQ ID NO: 3447354 - DNA, 25 bp, Homo sapien
tgctgtgaggtgtagagtttctcag

SEQ ID NO: 3447355 - DNA, 25 bp, Homo sapien
agaaaagattgctgtgaggtgtaga

SEQ ID NO: 3447356 - DNA, 25 bp, Homo sapien
aaacttctctaaggccctgctgaca

SEQ ID NO: 3447357 - DNA, 25 bp, Homo sapien
taaacttctctaaggccctgctgac

SEQ ID NO: 3447358 - DNA, 25 bp, Homo sapien
gaagtttctcatgaatatttcggcg

SEQ ID NO: 3447359 - DNA, 25 bp, Homo sapien
tatttcggcgtagaaaattgcaaag

SEQ ID NO: 3447360 - DNA, 25 bp, Homo sapien
ctagtgaagatttaacgagtgagaa

SEQ ID NO: 3447361 - DNA, 25 bp, Homo sapien
tgagaatttggactcgtgtcatgaa

SEQ ID NO: 3447362 - DNA, 25 bp, Homo sapien
tgcgtggatagtggttgattgtttc

SEQ ID NO: 3447363 - DNA, 25 bp, Homo sapien
gactgttgtaaaatgtgcgtggata

SEQ ID NO: 3447364 - DNA, 25 bp, Homo sapien
cctttctatttaaccttcttgctag

SEQ ID NO: 3447365 - DNA, 25 bp, Homo sapien
agcattttacacttggaattgactg

SEQ ID NO: 3447366 - DNA, 25 bp, Homo sapien
tgcaaggacagaactagttctatta

SEQ ID NO: 3447367 - DNA, 25 bp, Homo sapien
gacagaactagttctattacaaaac

SEQ ID NO: 3447368 - DNA, 25 bp, Homo sapien
caattccagctttttgcaagatgca

SEQ ID NO: 3447369 - DNA, 25 bp, Homo sapien
tgtaatcggggccattcaccaattc

SEQ ID NO: 3447370 - DNA, 25 bp, Homo sapien
tattatagggaagtggttccttgac

SEQ ID NO: 3447371 - DNA, 25 bp, Homo sapien
tctgattgtccattgagttccttgg

SEQ ID NO: 3447372 - DNA, 25 bp, Homo sapien
tgtccacatgttctgttattatagg

SEQ ID NO: 3447373 - DNA, 25 bp, Homo sapien
ttccttggactgataaaaagtttca

SEQ ID NO: 3447374 - DNA, 25 bp, Homo sapien
aatggagtgatcgttacacagtgtc

SEQ ID NO: 3447375 - DNA, 25 bp, Homo sapien
catgctgtggagtacagagaacggt

SEQ ID NO: 3447376 - DNA, 25 bp, Homo sapien
gaaagttctcgtaaaatatgctgta

SEQ ID NO: 3447377 - DNA, 25 bp, Homo sapien
gcaatgaagtcctttccttggaact

SEQ ID NO: 3447378 - DNA, 25 bp, Homo sapien
caattgggctaacctactggacaga

SEQ ID NO: 3447379 - DNA, 25 bp, Homo sapien
gaagaagattttagtctcctcggca

SEQ ID NO: 3447380 - DNA, 25 bp, Homo sapien
tgtaggacagttaggagactctgcc

SEQ ID NO: 3447381 - DNA, 25 bp, Homo sapien
gaagcagtcacaatttacatggcca

SEQ ID NO: 3447382 - DNA, 25 bp, Homo sapien
tgtgtagcattcacaagctgctgct

SEQ ID NO: 3447383 - DNA, 25 bp, Homo sapien
gctgctgcttatcggtgaatttttg

SEQ ID NO: 3447384 - DNA, 25 bp, Homo sapien
tttttggagatctgaggactgtttt

SEQ ID NO: 3447385 - DNA, 25 bp, Homo sapien
aattccctgagacacttaatccgca

SEQ ID NO: 3447386 - DNA, 25 bp, Homo sapien
aagaaaggccactctacagacagag

SEQ ID NO: 3447387 - DNA, 25 bp, Homo sapien
ataccaatccagacccctagagagg

SEQ ID NO: 3447388 - DNA, 25 bp, Homo sapien
gaaatggataccaatccagacccct

SEQ ID NO: 3447389 - DNA, 25 bp, Homo sapien
taagtagtattgttactggaaatgg

SEQ ID NO: 3447390 - DNA, 25 bp, Homo sapien
gattggcatctgtcactagactttc

SEQ ID NO: 3447391 - DNA, 25 bp, Homo sapien
ctgattggcatctgtcactagactt

SEQ ID NO: 3447392 - DNA, 25 bp, Homo sapien
gcatctgtcactagactttctaaag

SEQ ID NO: 3447393 - DNA, 25 bp, Homo sapien
tctaaaggttctttacctatctcca

SEQ ID NO: 3447394 - DNA, 25 bp, Homo sapien
agtccatctactgagtatgcagtta

SEQ ID NO: 3447395 - DNA, 25 bp, Homo sapien
tactcaagatagaacctgtagagtc

SEQ ID NO: 3447396 - DNA, 25 bp, Homo sapien
tgggtactcaagatagaacctgtag

SEQ ID NO: 3447397 - DNA, 25 bp, Homo sapien
tacaatgggtactcaagatagaacc

SEQ ID NO: 3447398 - DNA, 25 bp, Homo sapien
ttccaggtatgaaaggtcatcgcat

SEQ ID NO: 3447399 - DNA, 25 bp, Homo sapien
ttttccaggtatgaaaggtcatcgc

SEQ ID NO: 3447400 - DNA, 25 bp, Homo sapien
ctaagcattttccaggtatgaaagg

SEQ ID NO: 3447401 - DNA, 25 bp, Homo sapien
ccaggtatgaaaggtcatcgcatat

SEQ ID NO: 3447402 - DNA, 25 bp, Homo sapien
tcaatggtgtctttaagtcattctg

SEQ ID NO: 3447403 - DNA, 25 bp, Homo sapien
ccatctctcaatggtgtctttaagt

SEQ ID NO: 3447404 - DNA, 25 bp, Homo sapien
tctgagaggtgatctttttcaccat

SEQ ID NO: 3447405 - DNA, 25 bp, Homo sapien
ttctgagaggtgatctttttcacca

SEQ ID NO: 3447406 - DNA, 25 bp, Homo sapien
tctcttttggatactattgaaacta

SEQ ID NO: 3447407 - DNA, 25 bp, Homo sapien
gaagtcaatggtactgtttatacta

SEQ ID NO: 3447408 - DNA, 25 bp, Homo sapien
tactctcttttggatactattgaaa

SEQ ID NO: 3447409 - DNA, 25 bp, Homo sapien
attgaaactaattgattggaagtca

SEQ ID NO: 3447410 - DNA, 25 bp, Homo sapien
ggtaaatatggtctatcataatcta

SEQ ID NO: 3447411 - DNA, 25 bp, Homo sapien
aaatatggtctatcataatctaatg

SEQ ID NO: 3447412 - DNA, 25 bp, Homo sapien
tggtaaatatggtctatcataatct

SEQ ID NO: 3447413 - DNA, 25 bp, Homo sapien
tatggtctatcataatctaatgagt

SEQ ID NO: 3447414 - DNA, 25 bp, Homo sapien
ggcttctattattaggttcacaatt

SEQ ID NO: 3447415 - DNA, 25 bp, Homo sapien
ggtagataagaagctgcaggcttct

SEQ ID NO: 3447416 - DNA, 25 bp, Homo sapien
gctgcaggcttctattattaggttc

SEQ ID NO: 3447417 - DNA, 25 bp, Homo sapien
tattattaggttcacaatttaatgt

SEQ ID NO: 3447418 - DNA, 25 bp, Homo sapien
gagttagcagttcttgcataatttc

SEQ ID NO: 3447419 - DNA, 25 bp, Homo sapien
catgttgttaggcatgggggcgtga

SEQ ID NO: 3447420 - DNA, 25 bp, Homo sapien
taggcatgggggcgtgagttagcag

SEQ ID NO: 3447421 - DNA, 25 bp, Homo sapien
gttagcagttcttgcataatttctt

SEQ ID NO: 3447422 - DNA, 25 bp, Homo sapien
taagaccaatggatacctctaattc

SEQ ID NO: 3447423 - DNA, 25 bp, Homo sapien
gagttacaccaatgtttttgcttcc

SEQ ID NO: 3447424 - DNA, 25 bp, Homo sapien
gaccaatggatacctctaattcttt

SEQ ID NO: 3447425 - DNA, 25 bp, Homo sapien
ccaatggatacctctaattctttaa

SEQ ID NO: 3447426 - DNA, 25 bp, Homo sapien
ctgtaagctttaggtggagcggtat

SEQ ID NO: 3447427 - DNA, 25 bp, Homo sapien
tggtcacatctagggctgtaagctt

SEQ ID NO: 3447428 - DNA, 25 bp, Homo sapien
tagttatgagattaagctctatggc

SEQ ID NO: 3447429 - DNA, 25 bp, Homo sapien
gctctatggctagtaagaggcctaa

SEQ ID NO: 3447430 - DNA, 25 bp, Homo sapien
caacagcattagaatacgtggtcag

SEQ ID NO: 3447431 - DNA, 25 bp, Homo sapien
aacagcattagaatacgtggtcagt

SEQ ID NO: 3447432 - DNA, 25 bp, Homo sapien
cagttggatgtctaatcctgccaag

SEQ ID NO: 3447433 - DNA, 25 bp, Homo sapien
ggacctaagcaatgtgtccctctga

SEQ ID NO: 3447434 - DNA, 25 bp, Homo sapien
gctattctgatcagagtcttcacgg

SEQ ID NO: 3447435 - DNA, 25 bp, Homo sapien
caatacttaggctccagttggatgt

SEQ ID NO: 3447436 - DNA, 25 bp, Homo sapien
taagtaggcttgtcgcattttcagt

SEQ ID NO: 3447437 - DNA, 25 bp, Homo sapien
aggcttgtcgcattttcagtttgta

SEQ ID NO: 3447438 - DNA, 25 bp, Homo sapien
tttgtaagtaggcttgtcgcatttt

SEQ ID NO: 3447439 - DNA, 25 bp, Homo sapien
gtaggcttgtcgcattttcagtttg

SEQ ID NO: 3447440 - DNA, 25 bp, Homo sapien
gctccttggaggcctgggataccat

SEQ ID NO: 3447441 - DNA, 25 bp, Homo sapien
caatgctccttggaggcctgggata

SEQ ID NO: 3447442 - DNA, 25 bp, Homo sapien
tatgtcaatgctccttggaggcctg

SEQ ID NO: 3447443 - DNA, 25 bp, Homo sapien
atgctccttggaggcctgggatacc

SEQ ID NO: 3447444 - DNA, 25 bp, Homo sapien
tccttacagggtggttctctttgct

SEQ ID NO: 3447445 - DNA, 25 bp, Homo sapien
gctgatgaatgcttgcctgccttct

SEQ ID NO: 3447446 - DNA, 25 bp, Homo sapien
tgttcttgatgcatgcaggccaagc

SEQ ID NO: 3447447 - DNA, 25 bp, Homo sapien
caggccaagcgagtcttagagtcca

SEQ ID NO: 3447448 - DNA, 25 bp, Homo sapien
cagacagttctttcctaactgaaag

SEQ ID NO: 3447449 - DNA, 25 bp, Homo sapien
gtgttctcaatggctgttttttcct

SEQ ID NO: 3447450 - DNA, 25 bp, Homo sapien
cggtgttagaaacaatgcccttcaa

SEQ ID NO: 3447451 - DNA, 25 bp, Homo sapien
ttcctaactgaaagtgtgttctcaa

SEQ ID NO: 3447452 - DNA, 25 bp, Homo sapien
tcctcataggaagacgtttactcta

SEQ ID NO: 3447453 - DNA, 25 bp, Homo sapien
tcaagctcttacaaattacctgcaa

SEQ ID NO: 3447454 - DNA, 25 bp, Homo sapien
gtagaaaggagattgataggccact

SEQ ID NO: 3447455 - DNA, 25 bp, Homo sapien
ggcttggaaagataatgacctgatc

SEQ ID NO: 3447456 - DNA, 25 bp, Homo sapien
actgcatctcccctctttcattatc

SEQ ID NO: 3447457 - DNA, 25 bp, Homo sapien
cactgcatctcccctctttcattat

SEQ ID NO: 3447458 - DNA, 25 bp, Homo sapien
gcatctcccctctttcattatcatc

SEQ ID NO: 3447459 - DNA, 25 bp, Homo sapien
tgcatctcccctctttcattatcat

SEQ ID NO: 3447460 - DNA, 25 bp, Homo sapien
aaattaggtacatcctccaaccata

SEQ ID NO: 3447461 - DNA, 25 bp, Homo sapien
attaggtacatcctccaaccatagc

SEQ ID NO: 3447462 - DNA, 25 bp, Homo sapien
cttttgtcggcaaattaggtacatc

SEQ ID NO: 3447463 - DNA, 25 bp, Homo sapien
ttcttttgtcggcaaattaggtaca

SEQ ID NO: 3447464 - DNA, 25 bp, Homo sapien
aggtatgggaaaaccttctcaatca

SEQ ID NO: 3447465 - DNA, 25 bp, Homo sapien
taggtatgggaaaaccttctcaatc

SEQ ID NO: 3447466 - DNA, 25 bp, Homo sapien
ggtatgggaaaaccttctcaatcat

SEQ ID NO: 3447467 - DNA, 25 bp, Homo sapien
tccactttcaggtaggctcttgcca

SEQ ID NO: 3447468 - DNA, 25 bp, Homo sapien
taagactgcttcctagtcgctttct

SEQ ID NO: 3447469 - DNA, 25 bp, Homo sapien
ggaggttgctccacactgaaggtaa

SEQ ID NO: 3447470 - DNA, 25 bp, Homo sapien
cttttctaatgtgccagctacctca

SEQ ID NO: 3447471 - DNA, 25 bp, Homo sapien
cagtatctgagggacccggcaacac

SEQ ID NO: 3447472 - DNA, 25 bp, Homo sapien
gctagtggcagacagccacttcttc

SEQ ID NO: 3447473 - DNA, 25 bp, Homo sapien
gggacccggcaacacgcagctgtca

SEQ ID NO: 3447474 - DNA, 25 bp, Homo sapien
gccctggcaagagggcacactcttc

SEQ ID NO: 3447475 - DNA, 25 bp, Homo sapien
gggcatcagtattctgcagcatgca

SEQ ID NO: 3447476 - DNA, 25 bp, Homo sapien
tgcaccgggcatcagtattctgcag

SEQ ID NO: 3447477 - DNA, 25 bp, Homo sapien
caccgggcatcagtattctgcagca

SEQ ID NO: 3447478 - DNA, 25 bp, Homo sapien
catgcaccgggcatcagtattctgc

SEQ ID NO: 3447479 - DNA, 25 bp, Homo sapien
taggacacagcaaatcctacatagt

SEQ ID NO: 3447480 - DNA, 25 bp, Homo sapien
aacccagtgtccactatgtaggaca

SEQ ID NO: 3447481 - DNA, 25 bp, Homo sapien
gtctttcaacccagtgtccactatg

SEQ ID NO: 3447482 - DNA, 25 bp, Homo sapien
cacagcaaatcctacatagtagaca

SEQ ID NO: 3447483 - DNA, 25 bp, Homo sapien
tttagatttggtcatggaacatcgt

SEQ ID NO: 3447484 - DNA, 25 bp, Homo sapien
tttggtcatggaacatcgtttcaag

SEQ ID NO: 3447485 - DNA, 25 bp, Homo sapien
ggtcatggaacatcgtttcaagttt

SEQ ID NO: 3447486 - DNA, 25 bp, Homo sapien
gatttggtcatggaacatcgtttca

SEQ ID NO: 3447487 - DNA, 25 bp, Homo sapien
tagcggatgctaagatataactcaa

SEQ ID NO: 3447488 - DNA, 25 bp, Homo sapien
tccttggatatatgctggatagcgg

SEQ ID NO: 3447489 - DNA, 25 bp, Homo sapien
aagatataactcaatctcctcttgg

SEQ ID NO: 3447490 - DNA, 25 bp, Homo sapien
gatatatgctggatagcggatgcta

SEQ ID NO: 3447491 - DNA, 25 bp, Homo sapien
tcttcaccctcaaagtagtatctat

SEQ ID NO: 3447492 - DNA, 25 bp, Homo sapien
cctcaaagtagtatctattcctggc

SEQ ID NO: 3447493 - DNA, 25 bp, Homo sapien
actcttcaccctcaaagtagtatct

SEQ ID NO: 3447494 - DNA, 25 bp, Homo sapien
tcaccctcaaagtagtatctattcc

SEQ ID NO: 3447495 - DNA, 25 bp, Homo sapien
tagcatcacctcttagcctgtgaaa

SEQ ID NO: 3447496 - DNA, 25 bp, Homo sapien
ggcaatgattagcagtgtattatac

SEQ ID NO: 3447497 - DNA, 25 bp, Homo sapien
ttaagttgttacaaacaggtagctg

SEQ ID NO: 3447498 - DNA, 25 bp, Homo sapien
tgaaagggccaaaaagtactcaggc

SEQ ID NO: 3447499 - DNA, 25 bp, Homo sapien
catgaagtatctccacattgaggaa

SEQ ID NO: 3447500 - DNA, 25 bp, Homo sapien
gaagtatctccacattgaggaagag

SEQ ID NO: 3447501 - DNA, 25 bp, Homo sapien
tcatgaagtatctccacattgagga

SEQ ID NO: 3447502 - DNA, 25 bp, Homo sapien
tgaagtatctccacattgaggaaga

SEQ ID NO: 3447503 - DNA, 25 bp, Homo sapien
cagcaacacttgaggttgggactga

SEQ ID NO: 3447504 - DNA, 25 bp, Homo sapien
tatttgggtccagtggcattgtaga

SEQ ID NO: 3447505 - DNA, 25 bp, Homo sapien
gaacagagactatggagggactgat

SEQ ID NO: 3447506 - DNA, 25 bp, Homo sapien
tcaggcacctcagactatttgcgta

SEQ ID NO: 3447507 - DNA, 25 bp, Homo sapien
gcctcgcctccatggaagcaggcat

SEQ ID NO: 3447508 - DNA, 25 bp, Homo sapien
agcctcgcctccatggaagcaggca

SEQ ID NO: 3447509 - DNA, 25 bp, Homo sapien
cagcctcgcctccatggaagcaggc

SEQ ID NO: 3447510 - DNA, 25 bp, Homo sapien
ctcgcctccatggaagcaggcatcc

SEQ ID NO: 3447511 - DNA, 25 bp, Homo sapien
gcttgccaaagactccacactccag

SEQ ID NO: 3447512 - DNA, 25 bp, Homo sapien
ttgccaaagactccacactccagta

SEQ ID NO: 3447513 - DNA, 25 bp, Homo sapien
tccatcacttgcaatcctgctccct

SEQ ID NO: 3447514 - DNA, 25 bp, Homo sapien
gtacatccatcacttgcaatcctgc

SEQ ID NO: 3447515 - DNA, 25 bp, Homo sapien
ttaaatgccactggattccattttc

SEQ ID NO: 3447516 - DNA, 25 bp, Homo sapien
tgccactggattccattttctcatt

SEQ ID NO: 3447517 - DNA, 25 bp, Homo sapien
taaatgccactggattccattttct

SEQ ID NO: 3447518 - DNA, 25 bp, Homo sapien
aatgccactggattccattttctca

SEQ ID NO: 3447519 - DNA, 25 bp, Homo sapien
tgcacctccaggataacttgtgaat

SEQ ID NO: 3447520 - DNA, 25 bp, Homo sapien
ctgaacagggctgtctttgtttcat

SEQ ID NO: 3447521 - DNA, 25 bp, Homo sapien
tcacatttcctggactatgttgtag

SEQ ID NO: 3447522 - DNA, 25 bp, Homo sapien
tatgttgtagcctccgttttgtagc

SEQ ID NO: 3447523 - DNA, 25 bp, Homo sapien
taaagccacttctagcagtcatctg

SEQ ID NO: 3447524 - DNA, 25 bp, Homo sapien
tcttctctgtcatgatcacaataaa

SEQ ID NO: 3447525 - DNA, 25 bp, Homo sapien
gtcatgatcacaataaagccacttc

SEQ ID NO: 3447526 - DNA, 25 bp, Homo sapien
cagtcatctggatgactctaaccat

SEQ ID NO: 3447527 - DNA, 25 bp, Homo sapien
gatatctgcaatgtttgtgaggctc

SEQ ID NO: 3447528 - DNA, 25 bp, Homo sapien
tcacatagggatatctgcaatgttt

SEQ ID NO: 3447529 - DNA, 25 bp, Homo sapien
ctaccgggtcaatctttgtcctgaa

SEQ ID NO: 3447530 - DNA, 25 bp, Homo sapien
tcccctctgttgtgcgtatcttctt

SEQ ID NO: 3447531 - DNA, 25 bp, Homo sapien
tcttagttttctgataggcccgcaa

SEQ ID NO: 3447532 - DNA, 25 bp, Homo sapien
gtggcaggcccctctaatactgaag

SEQ ID NO: 3447533 - DNA, 25 bp, Homo sapien
taactgtagataaaggccgtgaatg

SEQ ID NO: 3447534 - DNA, 25 bp, Homo sapien
tacaagggcatcttcactgtgagta

SEQ ID NO: 3447535 - DNA, 25 bp, Homo sapien
taaacatctaaccaggctaaccaag

SEQ ID NO: 3447536 - DNA, 25 bp, Homo sapien
ttcatctgtctgtttcaatgctctc

SEQ ID NO: 3447537 - DNA, 25 bp, Homo sapien
catctgtctgtttcaatgctctcca

SEQ ID NO: 3447538 - DNA, 25 bp, Homo sapien
gctctccagccatcagttcttttac

SEQ ID NO: 3447539 - DNA, 25 bp, Homo sapien
ctgtctgtttcaatgctctccagcc

SEQ ID NO: 3447540 - DNA, 25 bp, Homo sapien
tctctaagcagacaggaacaggtcc

SEQ ID NO: 3447541 - DNA, 25 bp, Homo sapien
tgcaaccagagcctcaagtggtggc

SEQ ID NO: 3447542 - DNA, 25 bp, Homo sapien
ccttaggtagccctctgaggaaaat

SEQ ID NO: 3447543 - DNA, 25 bp, Homo sapien
gaggtcatcaaactccaaacggtca

SEQ ID NO: 3447544 - DNA, 25 bp, Homo sapien
tccactgattgcatagaaatcttag

SEQ ID NO: 3447545 - DNA, 25 bp, Homo sapien
tgctaactcaagacagcttttatca

SEQ ID NO: 3447546 - DNA, 25 bp, Homo sapien
cctgcgctagtcaaagcctctgcta

SEQ ID NO: 3447547 - DNA, 25 bp, Homo sapien
tgttgctgactcaatacttgctcct

SEQ ID NO: 3447548 - DNA, 25 bp, Homo sapien
ttacgtgcaataaataggtgcatga

SEQ ID NO: 3447549 - DNA, 25 bp, Homo sapien
caccaccattacgtgcaataaatag

SEQ ID NO: 3447550 - DNA, 25 bp, Homo sapien
ccattacgtgcaataaataggtgca

SEQ ID NO: 3447551 - DNA, 25 bp, Homo sapien
tttcaccaccaccattacgtgcaat

SEQ ID NO: 3447552 - DNA, 25 bp, Homo sapien
gccaatcttaagtcttcctcactaa

SEQ ID NO: 3447553 - DNA, 25 bp, Homo sapien
aagatagaacgccaatcttaagtct

SEQ ID NO: 3447554 - DNA, 25 bp, Homo sapien
atcttaagatagaacgccaatctta

SEQ ID NO: 3447555 - DNA, 25 bp, Homo sapien
cctgttcccaacactagcactttct

SEQ ID NO: 3447556 - DNA, 25 bp, Homo sapien
tccaccaaacttcctattctgttca

SEQ ID NO: 3447557 - DNA, 25 bp, Homo sapien
actgaacagcatctgtgttgtatta

SEQ ID NO: 3447558 - DNA, 25 bp, Homo sapien
ctgaacagcatctgtgttgtattat

SEQ ID NO: 3447559 - DNA, 25 bp, Homo sapien
tatttccaccaaacttcctattctg

SEQ ID NO: 3447560 - DNA, 25 bp, Homo sapien
ttcaagatctgcaggtcagtcagct

SEQ ID NO: 3447561 - DNA, 25 bp, Homo sapien
gttttcagtaagcaagtccaagcct

SEQ ID NO: 3447562 - DNA, 25 bp, Homo sapien
ctgttttcagtaagcaagtccaagc

SEQ ID NO: 3447563 - DNA, 25 bp, Homo sapien
agatctgcaggtcagtcagctcccc

SEQ ID NO: 3447564 - DNA, 25 bp, Homo sapien
aagttttgtacttgagattagtgac

SEQ ID NO: 3447565 - DNA, 25 bp, Homo sapien
gaaatcacccttttttgctgaaaca

SEQ ID NO: 3447566 - DNA, 25 bp, Homo sapien
gaatttatgtagacagctttcttct

SEQ ID NO: 3447567 - DNA, 25 bp, Homo sapien
catgttgttgatgctatatgactta

SEQ ID NO: 3447568 - DNA, 25 bp, Homo sapien
ataaatggtactttccaagtttatg

SEQ ID NO: 3447569 - DNA, 25 bp, Homo sapien
tggtactttccaagtttatgccttg

SEQ ID NO: 3447570 - DNA, 25 bp, Homo sapien
gtttcaggatctggggctgactcat

SEQ ID NO: 3447571 - DNA, 25 bp, Homo sapien
ttatgccttgtttcaggatctgggg

SEQ ID NO: 3447572 - DNA, 25 bp, Homo sapien
gatcagcatctgtggtcgtctaggg

SEQ ID NO: 3447573 - DNA, 25 bp, Homo sapien
gaagatcagcatctgtggtcgtcta

SEQ ID NO: 3447574 - DNA, 25 bp, Homo sapien
catctgtggtcgtctagggggcttc

SEQ ID NO: 3447575 - DNA, 25 bp, Homo sapien
ctgaagatcagcatctgtggtcgtc

SEQ ID NO: 3447576 - DNA, 25 bp, Homo sapien
ggcgatgcgatggtttagcttcggc

SEQ ID NO: 3447577 - DNA, 25 bp, Homo sapien
caggcgatgcgatggtttagcttcg

SEQ ID NO: 3447578 - DNA, 25 bp, Homo sapien
cgatgcgatggtttagcttcggctc

SEQ ID NO: 3447579 - DNA, 25 bp, Homo sapien
acaggcgatgcgatggtttagcttc

SEQ ID NO: 3447580 - DNA, 25 bp, Homo sapien
catttttcagcagatcatatttgcc

SEQ ID NO: 3447581 - DNA, 25 bp, Homo sapien
tcagcaattctgagtctcttcaatg

SEQ ID NO: 3447582 - DNA, 25 bp, Homo sapien
agcaattctgagtctcttcaatgct

SEQ ID NO: 3447583 - DNA, 25 bp, Homo sapien
cagcaattctgagtctcttcaatgc

SEQ ID NO: 3447584 - DNA, 25 bp, Homo sapien
aaaagtcgacattggagttttattg

SEQ ID NO: 3447585 - DNA, 25 bp, Homo sapien
acattggagttttattggagccaac

SEQ ID NO: 3447586 - DNA, 25 bp, Homo sapien
gtcgacattggagttttattggagc

SEQ ID NO: 3447587 - DNA, 25 bp, Homo sapien
cgacattggagttttattggagcca

SEQ ID NO: 3447588 - DNA, 25 bp, Homo sapien
gaacttggctatacgagcctgagaa

SEQ ID NO: 3447589 - DNA, 25 bp, Homo sapien
ggcatctatctataatctgggacag

SEQ ID NO: 3447590 - DNA, 25 bp, Homo sapien
cagttaacaccgtatgcaaaggcac

SEQ ID NO: 3447591 - DNA, 25 bp, Homo sapien
gctgtgaaagaactgggccaattga

SEQ ID NO: 3447592 - DNA, 25 bp, Homo sapien
taattttgtagattataagatgccc

SEQ ID NO: 3447593 - DNA, 25 bp, Homo sapien
attttgtagattataagatgcccca

SEQ ID NO: 3447594 - DNA, 25 bp, Homo sapien
aattttgtagattataagatgcccc

SEQ ID NO: 3447595 - DNA, 25 bp, Homo sapien
gtaattttgtagattataagatgcc

SEQ ID NO: 3447596 - DNA, 25 bp, Homo sapien
gaacagcttgatggatccagtcacc

SEQ ID NO: 3447597 - DNA, 25 bp, Homo sapien
gcttgatggatccagtcaccaacaa

SEQ ID NO: 3447598 - DNA, 25 bp, Homo sapien
aacataggaacagcttgatggatcc

SEQ ID NO: 3447599 - DNA, 25 bp, Homo sapien
taggaacagcttgatggatccagtc

SEQ ID NO: 3447600 - DNA, 25 bp, Homo sapien
ctgaatttctcactcgaagtcaatt

SEQ ID NO: 3447601 - DNA, 25 bp, Homo sapien
gaatttctcactcgaagtcaattta

SEQ ID NO: 3447602 - DNA, 25 bp, Homo sapien
tgaatttctcactcgaagtcaattt

SEQ ID NO: 3447603 - DNA, 25 bp, Homo sapien
cttttgccgcattggttgctttttc

SEQ ID NO: 3447604 - DNA, 25 bp, Homo sapien
tattttggagtataagtatggttgc

SEQ ID NO: 3447605 - DNA, 25 bp, Homo sapien
tttgccgcattggttgctttttcca

SEQ ID NO: 3447606 - DNA, 25 bp, Homo sapien
ttctcttttgccgcattggttgctt

SEQ ID NO: 3447607 - DNA, 25 bp, Homo sapien
caattaaagcgttgggtcttgtgga

SEQ ID NO: 3447608 - DNA, 25 bp, Homo sapien
ttccacctttgagggcaattaaagc

SEQ ID NO: 3447609 - DNA, 25 bp, Homo sapien
aaagagtagaagtgtcagagaagga

SEQ ID NO: 3447610 - DNA, 25 bp, Homo sapien
tgtggattagatcataatatcttct

SEQ ID NO: 3447611 - DNA, 25 bp, Homo sapien
caagtacggttccaaaaatatgtct

SEQ ID NO: 3447612 - DNA, 25 bp, Homo sapien
cataattctgaaaggcttgtttact

SEQ ID NO: 3447613 - DNA, 25 bp, Homo sapien
ccgggggaccagattcttcttccat

SEQ ID NO: 3447614 - DNA, 25 bp, Homo sapien
agggagatgcagcaagtacggttcc

SEQ ID NO: 3447615 - DNA, 25 bp, Homo sapien
tcaacttccctgtacctcttaaatg

SEQ ID NO: 3447616 - DNA, 25 bp, Homo sapien
caagtttcatgggtcactatgtcta

SEQ ID NO: 3447617 - DNA, 25 bp, Homo sapien
ctggatctcccaagtttcatgggtc

SEQ ID NO: 3447618 - DNA, 25 bp, Homo sapien
gtcactatgtctacagcagcagaag

SEQ ID NO: 3447619 - DNA, 25 bp, Homo sapien
attaatcacatccaatggaattctt

SEQ ID NO: 3447620 - DNA, 25 bp, Homo sapien
atcattaatcacatccaatggaatt

SEQ ID NO: 3447621 - DNA, 25 bp, Homo sapien
ttaaattttcagaggcacatcatta

SEQ ID NO: 3447622 - DNA, 25 bp, Homo sapien
taatcacatccaatggaattctttt

SEQ ID NO: 3447623 - DNA, 25 bp, Homo sapien
tctgggctttgactgattgatggcc

SEQ ID NO: 3447624 - DNA, 25 bp, Homo sapien
gcctatctctgtagaagccataaga

SEQ ID NO: 3447625 - DNA, 25 bp, Homo sapien
gggtaagcccatgacagcctatctc

SEQ ID NO: 3447626 - DNA, 25 bp, Homo sapien
gacccattatggatgtgagctccct

SEQ ID NO: 3447627 - DNA, 25 bp, Homo sapien
cagttaggcttgttatgcttggtcc

SEQ ID NO: 3447628 - DNA, 25 bp, Homo sapien
ggtcctgtgccatggtataacccat

SEQ ID NO: 3447629 - DNA, 25 bp, Homo sapien
tatgcttggtccctgctaggtcctg

SEQ ID NO: 3447630 - DNA, 25 bp, Homo sapien
ttggtggccacagttaggcttgtta

SEQ ID NO: 3447631 - DNA, 25 bp, Homo sapien
tacacacactagaggcattatggcc

SEQ ID NO: 3447632 - DNA, 25 bp, Homo sapien
ctttctcagggttctttgggcaact

SEQ ID NO: 3447633 - DNA, 25 bp, Homo sapien
aaaacagggccttgtggtattgcat

SEQ ID NO: 3447634 - DNA, 25 bp, Homo sapien
tatagccaaatttgcctggcgccag

SEQ ID NO: 3447635 - DNA, 25 bp, Homo sapien
ccaggaatcttacaggtgggtggca

SEQ ID NO: 3447636 - DNA, 25 bp, Homo sapien
taaatatcgattggagagattctgg

SEQ ID NO: 3447637 - DNA, 25 bp, Homo sapien
ggaatcttacaggtgggtggcacct

SEQ ID NO: 3447638 - DNA, 25 bp, Homo sapien
tcaaacttaaatatcgattggagag

SEQ ID NO: 3447639 - DNA, 25 bp, Homo sapien
aaatcaacatgtgcccctctcttgg

SEQ ID NO: 3447640 - DNA, 25 bp, Homo sapien
ggcttccccttgcttgaagccagtg

SEQ ID NO: 3447641 - DNA, 25 bp, Homo sapien
tagaggttagtactttccaggcttc

SEQ ID NO: 3447642 - DNA, 25 bp, Homo sapien
gatcaaatcacagcataaccaagta

SEQ ID NO: 3447643 - DNA, 25 bp, Homo sapien
ttcagagccattatcccaaggaaca

SEQ ID NO: 3447644 - DNA, 25 bp, Homo sapien
ttttcttgatatgttgaagtaggtc

SEQ ID NO: 3447645 - DNA, 25 bp, Homo sapien
gagccattatcccaaggaacaaaga

SEQ ID NO: 3447646 - DNA, 25 bp, Homo sapien
tcataagctgactccggaagttcca

SEQ ID NO: 3447647 - DNA, 25 bp, Homo sapien
cacccttggaagtggtgattgtctc

SEQ ID NO: 3447648 - DNA, 25 bp, Homo sapien
ctcatttggcttgggtctttactgc

SEQ ID NO: 3447649 - DNA, 25 bp, Homo sapien
tactgtttgtcttcgctatgtggga

SEQ ID NO: 3447650 - DNA, 25 bp, Homo sapien
tgtctcttgattctcgtatttcctc

SEQ ID NO: 3447651 - DNA, 25 bp, Homo sapien
atttatcagatcttgttttgactga

SEQ ID NO: 3447652 - DNA, 25 bp, Homo sapien
atttgagttggcctgaatttttagg

SEQ ID NO: 3447653 - DNA, 25 bp, Homo sapien
catttgagttggcctgaatttttag

SEQ ID NO: 3447654 - DNA, 25 bp, Homo sapien
catttatcagatcttgttttgactg

SEQ ID NO: 3447655 - DNA, 25 bp, Homo sapien
gctgaatctgaggaaagtccttgtc

SEQ ID NO: 3447656 - DNA, 25 bp, Homo sapien
tacactgtaggcagtgcacagccat

SEQ ID NO: 3447657 - DNA, 25 bp, Homo sapien
catctggcaggaccagacgtcagct

SEQ ID NO: 3447658 - DNA, 25 bp, Homo sapien
ggctatgatgcatggaagctgaatc

SEQ ID NO: 3447659 - DNA, 25 bp, Homo sapien
tatgttccatatcattgacaatacc

SEQ ID NO: 3447660 - DNA, 25 bp, Homo sapien
aatctctttatgttccatatcattg

SEQ ID NO: 3447661 - DNA, 25 bp, Homo sapien
tctttatgttccatatcattgacaa

SEQ ID NO: 3447662 - DNA, 25 bp, Homo sapien
ttatgttccatatcattgacaatac

SEQ ID NO: 3447663 - DNA, 25 bp, Homo sapien
tgtgcttggtcccttagtatcatcc

SEQ ID NO: 3447664 - DNA, 25 bp, Homo sapien
gagtgttgccgaaacagctgcattc

SEQ ID NO: 3447665 - DNA, 25 bp, Homo sapien
tcctgcagttttgagtgttgccgaa

SEQ ID NO: 3447666 - DNA, 25 bp, Homo sapien
ggtcccttagtatcatcctgcagtt

SEQ ID NO: 3447667 - DNA, 25 bp, Homo sapien
tcctgtcctgagacgtctgcatgat

SEQ ID NO: 3447668 - DNA, 25 bp, Homo sapien
catgctctctaaaggccccagtcat

SEQ ID NO: 3447669 - DNA, 25 bp, Homo sapien
cagaatacatgctctctaaaggccc

SEQ ID NO: 3447670 - DNA, 25 bp, Homo sapien
gcattcctcctgtcctgagacgtct

SEQ ID NO: 3447671 - DNA, 25 bp, Homo sapien
gaaatgggtatagcttttcacattc

SEQ ID NO: 3447672 - DNA, 25 bp, Homo sapien
gtttagaaatgggtatagcttttca

SEQ ID NO: 3447673 - DNA, 25 bp, Homo sapien
aaatgggtatagcttttcacattca

SEQ ID NO: 3447674 - DNA, 25 bp, Homo sapien
tagaaatgggtatagcttttcacat

SEQ ID NO: 3447675 - DNA, 25 bp, Homo sapien
gcaagcatctctgtatataccagag

SEQ ID NO: 3447676 - DNA, 25 bp, Homo sapien
caagtggagcagttcaatgtcaggg

SEQ ID NO: 3447677 - DNA, 25 bp, Homo sapien
tgtcagggtggactttatgaccatc

SEQ ID NO: 3447678 - DNA, 25 bp, Homo sapien
catcaccggatgcaaatgcaagcat

SEQ ID NO: 3447679 - DNA, 25 bp, Homo sapien
ttctggtgagttaccagttgtgttt

SEQ ID NO: 3447680 - DNA, 25 bp, Homo sapien
ttttatctctgtaccaatttttgct

SEQ ID NO: 3447681 - DNA, 25 bp, Homo sapien
ctctgtaccaatttttgctgtcatt

SEQ ID NO: 3447682 - DNA, 25 bp, Homo sapien
tttgctgtcattctggataaactgc

SEQ ID NO: 3447683 - DNA, 25 bp, Homo sapien
tgtaccaatttttgctgtcattctg

SEQ ID NO: 3447684 - DNA, 25 bp, Homo sapien
tgcctgtgtagcaccctatacctgg

SEQ ID NO: 3447685 - DNA, 25 bp, Homo sapien
tttctggatggtgtacaagccctct

SEQ ID NO: 3447686 - DNA, 25 bp, Homo sapien
caagccctcttgtgatttgctccca

SEQ ID NO: 3447687 - DNA, 25 bp, Homo sapien
gtttgcctgaagtaccactcctttg

SEQ ID NO: 3447688 - DNA, 25 bp, Homo sapien
cagggactgacaaggctccaggtga

SEQ ID NO: 3447689 - DNA, 25 bp, Homo sapien
catcagggactgacaaggctccagg

SEQ ID NO: 3447690 - DNA, 25 bp, Homo sapien
atgaaatatgtcagctcgttcatca

SEQ ID NO: 3447691 - DNA, 25 bp, Homo sapien
aatgaaatatgtcagctcgttcatc

SEQ ID NO: 3447692 - DNA, 25 bp, Homo sapien
gtggggtgaggcagttggagactga

SEQ ID NO: 3447693 - DNA, 25 bp, Homo sapien
tggggtgaggcagttggagactgac

SEQ ID NO: 3447694 - DNA, 25 bp, Homo sapien
gtgaggcagttggagactgactgac

SEQ ID NO: 3447695 - DNA, 25 bp, Homo sapien
gggtgaggcagttggagactgactg

SEQ ID NO: 3447696 - DNA, 25 bp, Homo sapien
agcaagcagtcgctctttgttagtt

SEQ ID NO: 3447697 - DNA, 25 bp, Homo sapien
cagcaagcagtcgctctttgttagt

SEQ ID NO: 3447698 - DNA, 25 bp, Homo sapien
gcaagcagtcgctctttgttagttt

SEQ ID NO: 3447699 - DNA, 25 bp, Homo sapien
caagcagtcgctctttgttagttta

SEQ ID NO: 3447700 - DNA, 25 bp, Homo sapien
tattttgagactgtctttcatcatc

SEQ ID NO: 3447701 - DNA, 25 bp, Homo sapien
agctattttgagactgtctttcatc

SEQ ID NO: 3447702 - DNA, 25 bp, Homo sapien
caaagctattttgagactgtctttc

SEQ ID NO: 3447703 - DNA, 25 bp, Homo sapien
tttgagactgtctttcatcatccat

SEQ ID NO: 3447704 - DNA, 25 bp, Homo sapien
ttttcacagggatcaccacctggta

SEQ ID NO: 3447705 - DNA, 25 bp, Homo sapien
ttcacagggatcaccacctggtact

SEQ ID NO: 3447706 - DNA, 25 bp, Homo sapien
tttcacagggatcaccacctggtac

SEQ ID NO: 3447707 - DNA, 25 bp, Homo sapien
tcacagggatcaccacctggtactc

SEQ ID NO: 3447708 - DNA, 25 bp, Homo sapien
gaggtgctgctggaattaataattc

SEQ ID NO: 3447709 - DNA, 25 bp, Homo sapien
agatccaaacgtgcacttgtcaaag

SEQ ID NO: 3447710 - DNA, 25 bp, Homo sapien
gtaaaggaagcagatccaaacgtgc

SEQ ID NO: 3447711 - DNA, 25 bp, Homo sapien
gtcaaagaaacatccgcttcaggct

SEQ ID NO: 3447712 - DNA, 25 bp, Homo sapien
gtgtttcaatccctttgggtaatgc

SEQ ID NO: 3447713 - DNA, 25 bp, Homo sapien
gacattacggctgatggctgatgct

SEQ ID NO: 3447714 - DNA, 25 bp, Homo sapien
gataatagctttttgggtgtttcaa

SEQ ID NO: 3447715 - DNA, 25 bp, Homo sapien
tcaaaagttccacgtcatttggaag

SEQ ID NO: 3447716 - DNA, 25 bp, Homo sapien
tttattttgcacagccattaacctg

SEQ ID NO: 3447717 - DNA, 25 bp, Homo sapien
cacagccattaacctgttttgggcc

SEQ ID NO: 3447718 - DNA, 25 bp, Homo sapien
tgcacagccattaacctgttttggg

SEQ ID NO: 3447719 - DNA, 25 bp, Homo sapien
cagccattaacctgttttgggccat

SEQ ID NO: 3447720 - DNA, 25 bp, Homo sapien
catccaagatggtgtggagccattc

SEQ ID NO: 3447721 - DNA, 25 bp, Homo sapien
cgtttgggagcatccaagatggtgt

SEQ ID NO: 3447722 - DNA, 25 bp, Homo sapien
agcatccaagatggtgtggagccat

SEQ ID NO: 3447723 - DNA, 25 bp, Homo sapien
gggagcatccaagatggtgtggagc

SEQ ID NO: 3447724 - DNA, 25 bp, Homo sapien
tagccaaagtctgtaaaaatcttac

SEQ ID NO: 3447725 - DNA, 25 bp, Homo sapien
taaaaatcttacaatagcgttggat

SEQ ID NO: 3447726 - DNA, 25 bp, Homo sapien
aaaatcttacaatagcgttggataa

SEQ ID NO: 3447727 - DNA, 25 bp, Homo sapien
tttagggctatagccaaagtctgta

SEQ ID NO: 3447728 - DNA, 25 bp, Homo sapien
caggggctataatctcagagtttcc

SEQ ID NO: 3447729 - DNA, 25 bp, Homo sapien
gagtttcctgaataacttggggtga

SEQ ID NO: 3447730 - DNA, 25 bp, Homo sapien
tggggtgatgtttcgaatagcaatg

SEQ ID NO: 3447731 - DNA, 25 bp, Homo sapien
tacacatcaacaggggctataatct

SEQ ID NO: 3447732 - DNA, 25 bp, Homo sapien
tggttttacagttttcagggccaga

SEQ ID NO: 3447733 - DNA, 25 bp, Homo sapien
attctcatttcagaagaattctctt

SEQ ID NO: 3447734 - DNA, 25 bp, Homo sapien
gaagaattctctttcttaatttgat

SEQ ID NO: 3447735 - DNA, 25 bp, Homo sapien
tttacagttttcagggccagaattc

SEQ ID NO: 3447736 - DNA, 25 bp, Homo sapien
tagggcttatgatattggcctccat

SEQ ID NO: 3447737 - DNA, 25 bp, Homo sapien
agggcttatgatattggcctccata

SEQ ID NO: 3447738 - DNA, 25 bp, Homo sapien
aatttagtcattggtggtccagaat

SEQ ID NO: 3447739 - DNA, 25 bp, Homo sapien
gaaatttagtcattggtggtccaga

SEQ ID NO: 3447740 - DNA, 25 bp, Homo sapien
agaaatttagtcattggtggtccag

SEQ ID NO: 3447741 - DNA, 25 bp, Homo sapien
aaatttagtcattggtggtccagaa

SEQ ID NO: 3447742 - DNA, 25 bp, Homo sapien
gaagcatcacctttgcaagggcagg

SEQ ID NO: 3447743 - DNA, 25 bp, Homo sapien
catcacctttgcaagggcaggttca

SEQ ID NO: 3447744 - DNA, 25 bp, Homo sapien
agcatcacctttgcaagggcaggtt

SEQ ID NO: 3447745 - DNA, 25 bp, Homo sapien
tggaagcatcacctttgcaagggca

SEQ ID NO: 3447746 - DNA, 25 bp, Homo sapien
tcactggactggctttaataagact

SEQ ID NO: 3447747 - DNA, 25 bp, Homo sapien
tggtccctgagatgcttgagaagat

SEQ ID NO: 3447748 - DNA, 25 bp, Homo sapien
cacataggtgatagatggtccctga

SEQ ID NO: 3447749 - DNA, 25 bp, Homo sapien
catacgcggtttcttaagcacataa

SEQ ID NO: 3447750 - DNA, 25 bp, Homo sapien
ttttagttatgacacaggaacaggg

SEQ ID NO: 3447751 - DNA, 25 bp, Homo sapien
tcaagcctatgttgtgaccgaagtc

SEQ ID NO: 3447752 - DNA, 25 bp, Homo sapien
cacattgaggtcaagcctatgttgt

SEQ ID NO: 3447753 - DNA, 25 bp, Homo sapien
tgtgaccgaagtcttttagttatga

SEQ ID NO: 3447754 - DNA, 25 bp, Homo sapien
tagccaaatcttactcccctgaggg

SEQ ID NO: 3447755 - DNA, 25 bp, Homo sapien
tatgttcacatggattaccttagcc

SEQ ID NO: 3447756 - DNA, 25 bp, Homo sapien
taaattcccagtcgagttggtgcct

SEQ ID NO: 3447757 - DNA, 25 bp, Homo sapien
gagggattcagattcaaaaagcgtt

SEQ ID NO: 3447758 - DNA, 25 bp, Homo sapien
agaagagggaagctccggacagtta

SEQ ID NO: 3447759 - DNA, 25 bp, Homo sapien
tatcaaacgatcacatcttatgaga

SEQ ID NO: 3447760 - DNA, 25 bp, Homo sapien
gaagctccggacagttatcaaacga

SEQ ID NO: 3447761 - DNA, 25 bp, Homo sapien
cacatacagggattgcaattggaga

SEQ ID NO: 3447762 - DNA, 25 bp, Homo sapien
ggcgcggcggcggtctggcggagcg

SEQ ID NO: 3447763 - DNA, 25 bp, Homo sapien
atggcggcgcggcggcggtctggcg

SEQ ID NO: 3447764 - DNA, 25 bp, Homo sapien
gcggcgcggcggcggtctggcggag

SEQ ID NO: 3447765 - DNA, 25 bp, Homo sapien
gatggcggcgcggcggcggtctggc

SEQ ID NO: 3447766 - DNA, 25 bp, Homo sapien
gataggctgcacacggctggtgtcc

SEQ ID NO: 3447767 - DNA, 25 bp, Homo sapien
accggtcctgcccaggaccttggtg

SEQ ID NO: 3447768 - DNA, 25 bp, Homo sapien
ctgcgtgcactgtccctgagaaccg

SEQ ID NO: 3447769 - DNA, 25 bp, Homo sapien
tgagaaccggtcctgcccaggacct

SEQ ID NO: 3447770 - DNA, 25 bp, Homo sapien
aaagggtgagcacgtcgccctcgcg

SEQ ID NO: 3447771 - DNA, 25 bp, Homo sapien
ttctcgctctgactccaaaagggtg

SEQ ID NO: 3447772 - DNA, 25 bp, Homo sapien
aagggtgagcacgtcgccctcgcgc

SEQ ID NO: 3447773 - DNA, 25 bp, Homo sapien
cattcccatcggccaagtggtcgaa

SEQ ID NO: 3447774 - DNA, 25 bp, Homo sapien
ttcccatcggccaagtggtcgaacc

SEQ ID NO: 3447775 - DNA, 25 bp, Homo sapien
attcccatcggccaagtggtcgaac

SEQ ID NO: 3447776 - DNA, 25 bp, Homo sapien
tcattctgtcttgtattacgatcaa

SEQ ID NO: 3447777 - DNA, 25 bp, Homo sapien
tatcagatgtgaagtgtagaaaatg

SEQ ID NO: 3447778 - DNA, 25 bp, Homo sapien
tgacctaaacctctgccgagcattt

SEQ ID NO: 3447779 - DNA, 25 bp, Homo sapien
tcttcatctgtggtcttctaagcac

SEQ ID NO: 3447780 - DNA, 25 bp, Homo sapien
tctttcagtttgtctcctcatgtag

SEQ ID NO: 3447781 - DNA, 25 bp, Homo sapien
ggaggacttggtagtgtcttctctt

SEQ ID NO: 3447782 - DNA, 25 bp, Homo sapien
ctttcagtttgtctcctcatgtagt

SEQ ID NO: 3447783 - DNA, 25 bp, Homo sapien
tctctttcagtttgtctcctcatgt

SEQ ID NO: 3447784 - DNA, 25 bp, Homo sapien
tgctgccagaacatcgtaagaaaag

SEQ ID NO: 3447785 - DNA, 25 bp, Homo sapien
atttgaacagtagcccagaacttgg

SEQ ID NO: 3447786 - DNA, 25 bp, Homo sapien
aggaactcaggacatatttgaacag

SEQ ID NO: 3447787 - DNA, 25 bp, Homo sapien
gaacttggacggtatctgaatcaca

SEQ ID NO: 3447788 - DNA, 25 bp, Homo sapien
tcagcttcattgactcggcgtccag

SEQ ID NO: 3447789 - DNA, 25 bp, Homo sapien
caagtcgaagcggaaggtgaaccac

SEQ ID NO: 3447790 - DNA, 25 bp, Homo sapien
tgctgtttcgaggacgatgagaccg

SEQ ID NO: 3447791 - DNA, 25 bp, Homo sapien
ttgcaaagccgaagtctggccgcgc

SEQ ID NO: 3447792 - DNA, 25 bp, Homo sapien
acctaatgagctcccccgggaggca

SEQ ID NO: 3447793 - DNA, 25 bp, Homo sapien
ccggaactagtaggctgcgccgcgc

SEQ ID NO: 3447794 - DNA, 25 bp, Homo sapien
gcagcgagccaggcccggaactagt

SEQ ID NO: 3447795 - DNA, 25 bp, Homo sapien
caggcccggaactagtaggctgcgc

SEQ ID NO: 3447796 - DNA, 25 bp, Homo sapien
gcaattatgcggtgttggccctccc

SEQ ID NO: 3447797 - DNA, 25 bp, Homo sapien
gatgtgctaggcaactccagctggc

SEQ ID NO: 3447798 - DNA, 25 bp, Homo sapien
aagcatttctgtctggtgcaccgga

SEQ ID NO: 3447799 - DNA, 25 bp, Homo sapien
gccattgttttagcactccgcagag

SEQ ID NO: 3447800 - DNA, 25 bp, Homo sapien
ggttgatgattatttatgtaggcat

SEQ ID NO: 3447801 - DNA, 25 bp, Homo sapien
ttataaggctaaatgtcttttgaat

SEQ ID NO: 3447802 - DNA, 25 bp, Homo sapien
tatgaccgtagaccaatcagtgcag

SEQ ID NO: 3447803 - DNA, 25 bp, Homo sapien
caacaatctccttaacttgtggtat

SEQ ID NO: 3447804 - DNA, 25 bp, Homo sapien
gtcgtttttctctatacaagctata

SEQ ID NO: 3447805 - DNA, 25 bp, Homo sapien
agtcgtttttctctatacaagctat

SEQ ID NO: 3447806 - DNA, 25 bp, Homo sapien
tcgtttttctctatacaagctataa

SEQ ID NO: 3447807 - DNA, 25 bp, Homo sapien
ttactcctaaggtttcctctgtggc

SEQ ID NO: 3447808 - DNA, 25 bp, Homo sapien
atttactcctaaggtttcctctgtg

SEQ ID NO: 3447809 - DNA, 25 bp, Homo sapien
tactcctaaggtttcctctgtggca

SEQ ID NO: 3447810 - DNA, 25 bp, Homo sapien
ccatttactcctaaggtttcctctg

SEQ ID NO: 3447811 - DNA, 25 bp, Homo sapien
ttatgtttagtgctttatagttcac

SEQ ID NO: 3447812 - DNA, 25 bp, Homo sapien
gtgctttatagttcacaaaccttgt

SEQ ID NO: 3447813 - DNA, 25 bp, Homo sapien
tatagttcacaaaccttgtcacatt

SEQ ID NO: 3447814 - DNA, 25 bp, Homo sapien
tttagtgctttatagttcacaaacc

SEQ ID NO: 3447815 - DNA, 25 bp, Homo sapien
aatgaagagctttcctgggcgatct

SEQ ID NO: 3447816 - DNA, 25 bp, Homo sapien
ttcgtccatatttgccaaatactac

SEQ ID NO: 3447817 - DNA, 25 bp, Homo sapien
tgccaaatactacttcaagactttt

SEQ ID NO: 3447818 - DNA, 25 bp, Homo sapien
atttgccaaatactacttcaagact

SEQ ID NO: 3447819 - DNA, 25 bp, Homo sapien
caaatactacttcaagacttttctc

SEQ ID NO: 3447820 - DNA, 25 bp, Homo sapien
tatctgttcgtttcatcaagagtac

SEQ ID NO: 3447821 - DNA, 25 bp, Homo sapien
ttatctgttcgtttcatcaagagta

SEQ ID NO: 3447822 - DNA, 25 bp, Homo sapien
ctttatctgttcgtttcatcaagag

SEQ ID NO: 3447823 - DNA, 25 bp, Homo sapien
tttatctgttcgtttcatcaagagt

SEQ ID NO: 3447824 - DNA, 25 bp, Homo sapien
atcaaaggtgacaaaagcaaatcct

SEQ ID NO: 3447825 - DNA, 25 bp, Homo sapien
tatcaaaggtgacaaaagcaaatcc

SEQ ID NO: 3447826 - DNA, 25 bp, Homo sapien
ctatcaaaggtgacaaaagcaaatc

SEQ ID NO: 3447827 - DNA, 25 bp, Homo sapien
cgtctctggctgcatccttatcgtc

SEQ ID NO: 3447828 - DNA, 25 bp, Homo sapien
tctctggctgcatccttatcgtctc

SEQ ID NO: 3447829 - DNA, 25 bp, Homo sapien
gtctctggctgcatccttatcgtct

SEQ ID NO: 3447830 - DNA, 25 bp, Homo sapien
acgtctctggctgcatccttatcgt

SEQ ID NO: 3447831 - DNA, 25 bp, Homo sapien
tggtggtttgttccaccttaatggc

SEQ ID NO: 3447832 - DNA, 25 bp, Homo sapien
caaatgatggtttggtggtttgttc

SEQ ID NO: 3447833 - DNA, 25 bp, Homo sapien
ttttccatctagtgactttccatac

SEQ ID NO: 3447834 - DNA, 25 bp, Homo sapien
cttttccatctagtgactttccata

SEQ ID NO: 3447835 - DNA, 25 bp, Homo sapien
tgtgtcctccccgtgagggaggtct

SEQ ID NO: 3447836 - DNA, 25 bp, Homo sapien
cttggagggcctctacttcttggag

SEQ ID NO: 3447837 - DNA, 25 bp, Homo sapien
tgtcctccccgtgagggaggtctcc

SEQ ID NO: 3447838 - DNA, 25 bp, Homo sapien
tcttccacctctaagacctcttgga

SEQ ID NO: 3447839 - DNA, 25 bp, Homo sapien
aggaggacccgcacttcttaatggg

SEQ ID NO: 3447840 - DNA, 25 bp, Homo sapien
gaggaggacccgcacttcttaatgg

SEQ ID NO: 3447841 - DNA, 25 bp, Homo sapien
actgcttccgccgtaagctggcagg

SEQ ID NO: 3447842 - DNA, 25 bp, Homo sapien
atatctctgtgagagggcagcggtt

SEQ ID NO: 3447843 - DNA, 25 bp, Homo sapien
gggccctcgtgtatgtccagcacta

SEQ ID NO: 3447844 - DNA, 25 bp, Homo sapien
tatgtccagcactacttgagttacc

SEQ ID NO: 3447845 - DNA, 25 bp, Homo sapien
cttcagctgctgagtaactgtctga

SEQ ID NO: 3447846 - DNA, 25 bp, Homo sapien
ttcttccaatacagagaggttgaca

SEQ ID NO: 3447847 - DNA, 25 bp, Homo sapien
tacttggcttagaggtgaactagac

SEQ ID NO: 3447848 - DNA, 25 bp, Homo sapien
tgaactagactcctcagcgatggga

SEQ ID NO: 3447849 - DNA, 25 bp, Homo sapien
gctagatagatgtttcttggccagt

SEQ ID NO: 3447850 - DNA, 25 bp, Homo sapien
gaggagccagtgtctaagccagcat

SEQ ID NO: 3447851 - DNA, 25 bp, Homo sapien
ggaacttatctacggcctcacagct

SEQ ID NO: 3447852 - DNA, 25 bp, Homo sapien
taactgcctggagtcaatgggtaga

SEQ ID NO: 3447853 - DNA, 25 bp, Homo sapien
taaggaatctgtagcgccaagaggt

SEQ ID NO: 3447854 - DNA, 25 bp, Homo sapien
cagctggtaggatgtctggtgccaa

SEQ ID NO: 3447855 - DNA, 25 bp, Homo sapien
tttgaggttgaagtgtctttggccc

SEQ ID NO: 3447856 - DNA, 25 bp, Homo sapien
tctttggcccatttgtaagtcccca

SEQ ID NO: 3447857 - DNA, 25 bp, Homo sapien
caatccaggaagtgagagccatttc

SEQ ID NO: 3447858 - DNA, 25 bp, Homo sapien
aacttcttcagctttatcagcatca

SEQ ID NO: 3447859 - DNA, 25 bp, Homo sapien
ttcagctttatcagcatcaaatgtc

SEQ ID NO: 3447860 - DNA, 25 bp, Homo sapien
caaggtcctcctctggttcatctgg

SEQ ID NO: 3447861 - DNA, 25 bp, Homo sapien
ctggttcttgaacatcactttcaat

SEQ ID NO: 3447862 - DNA, 25 bp, Homo sapien
ttacagatatccataaagttgatga

SEQ ID NO: 3447863 - DNA, 25 bp, Homo sapien
tggacgacctgtagaggtttcatgg

SEQ ID NO: 3447864 - DNA, 25 bp, Homo sapien
cctgtagaggtttcatggtgaattt

SEQ ID NO: 3447865 - DNA, 25 bp, Homo sapien
cataaagttgatgaaaggagttttc

SEQ ID NO: 3447866 - DNA, 25 bp, Homo sapien
gaaacctgctgagtttcgaaaggtg

SEQ ID NO: 3447867 - DNA, 25 bp, Homo sapien
ttcaagaatctcatgggaaggcatc

SEQ ID NO: 3447868 - DNA, 25 bp, Homo sapien
tcttgttagagagccatgagcttcc

SEQ ID NO: 3447869 - DNA, 25 bp, Homo sapien
taaaggctacggcaatatctcagtt

SEQ ID NO: 3447870 - DNA, 25 bp, Homo sapien
tctggatgcgaactttattcttgag

SEQ ID NO: 3447871 - DNA, 25 bp, Homo sapien
gaactgctgtgcatgactagagagg

SEQ ID NO: 3447872 - DNA, 25 bp, Homo sapien
catacggtgttgtctttaccatgct

SEQ ID NO: 3447873 - DNA, 25 bp, Homo sapien
tgaaatttctaggaccacgtgctag

SEQ ID NO: 3447874 - DNA, 25 bp, Homo sapien
cagggcaggccattgcctcacctgg

SEQ ID NO: 3447875 - DNA, 25 bp, Homo sapien
tcttgcataatagcagggcttgttg

SEQ ID NO: 3447876 - DNA, 25 bp, Homo sapien
tgcataatagcagggcttgttgagc

SEQ ID NO: 3447877 - DNA, 25 bp, Homo sapien
gctcttgcataatagcagggcttgt

SEQ ID NO: 3447878 - DNA, 25 bp, Homo sapien
taaaactgtcggaaatctctgcctc

SEQ ID NO: 3447879 - DNA, 25 bp, Homo sapien
tcctgagcactgatggcctcttcct

SEQ ID NO: 3447880 - DNA, 25 bp, Homo sapien
gggagcagctcatacaacaattttg

SEQ ID NO: 3447881 - DNA, 25 bp, Homo sapien
ttttggaaagcagcggtgatgactc

SEQ ID NO: 3447882 - DNA, 25 bp, Homo sapien
ctcggaccggccgaactcagtagca

SEQ ID NO: 3447883 - DNA, 25 bp, Homo sapien
gagaagaccaggaacgggcccaggc

SEQ ID NO: 3447884 - DNA, 25 bp, Homo sapien
ggcagccttccaatcgaatctcccg

SEQ ID NO: 3447885 - DNA, 25 bp, Homo sapien
aggcgacgcacagtgactcggaccg

SEQ ID NO: 3447886 - DNA, 25 bp, Homo sapien
tgttcaataaacgttcgttaggtga

SEQ ID NO: 3447887 - DNA, 25 bp, Homo sapien
ccgagtctagctcgatggcactgta

SEQ ID NO: 3447888 - DNA, 25 bp, Homo sapien
gtctagctcgatggcactgtaagtg

SEQ ID NO: 3447889 - DNA, 25 bp, Homo sapien
cgttaggtgattgcaaaagcactga

SEQ ID NO: 3447890 - DNA, 25 bp, Homo sapien
gaggatcaaggccatagtgagctat

SEQ ID NO: 3447891 - DNA, 25 bp, Homo sapien
caggaggatcaaggccatagtgagc

SEQ ID NO: 3447892 - DNA, 25 bp, Homo sapien
aggcaggaggatcaaggccatagtg

SEQ ID NO: 3447893 - DNA, 25 bp, Homo sapien
ggaggatcaaggccatagtgagcta

SEQ ID NO: 3447894 - DNA, 25 bp, Homo sapien
atcactttattagatttcagtgtgc

SEQ ID NO: 3447895 - DNA, 25 bp, Homo sapien
tatcactttattagatttcagtgtg

SEQ ID NO: 3447896 - DNA, 25 bp, Homo sapien
atatcactttattagatttcagtgt

SEQ ID NO: 3447897 - DNA, 25 bp, Homo sapien
tcactttattagatttcagtgtgct

SEQ ID NO: 3447898 - DNA, 25 bp, Homo sapien
gccgagattgcaccatggcacttca

SEQ ID NO: 3447899 - DNA, 25 bp, Homo sapien
aagtagctgagcatggtggggggtg

SEQ ID NO: 3447900 - DNA, 25 bp, Homo sapien
aaaagtagctgagcatggtgggggg

SEQ ID NO: 3447901 - DNA, 25 bp, Homo sapien
cctgtaatcccagctactcaggagg

SEQ ID NO: 3447902 - DNA, 25 bp, Homo sapien
acaaaatagccattgggatgactgg

SEQ ID NO: 3447903 - DNA, 25 bp, Homo sapien
aacaaaatagccattgggatgactg

SEQ ID NO: 3447904 - DNA, 25 bp, Homo sapien
cttgaattctggagagcaagtactg

SEQ ID NO: 3447905 - DNA, 25 bp, Homo sapien
caggattatcctagagaagcacttc

SEQ ID NO: 3447906 - DNA, 25 bp, Homo sapien
gctagaagaaattttcgtcttctgt

SEQ ID NO: 3447907 - DNA, 25 bp, Homo sapien
caagtactgaggctagaagaaattt

SEQ ID NO: 3447908 - DNA, 25 bp, Homo sapien
tctcttcgatgcagagagacagtgt

SEQ ID NO: 3447909 - DNA, 25 bp, Homo sapien
ctctcttcgatgcagagagacagtg

SEQ ID NO: 3447910 - DNA, 25 bp, Homo sapien
agtgaacaatagtggggaaaggaca

SEQ ID NO: 3447911 - DNA, 25 bp, Homo sapien
atttccagattcaccagtagagcca

SEQ ID NO: 3447912 - DNA, 25 bp, Homo sapien
agtggcagtaagaccaaaaaatgta

SEQ ID NO: 3447913 - DNA, 25 bp, Homo sapien
tgtatctaagcaacttccaaataca

SEQ ID NO: 3447914 - DNA, 25 bp, Homo sapien
tggcatttccagattcaccagtaga

SEQ ID NO: 3447915 - DNA, 25 bp, Homo sapien
aattttattaggatcctgaatgtac

SEQ ID NO: 3447916 - DNA, 25 bp, Homo sapien
ggaattttattaggatcctgaatgt

SEQ ID NO: 3447917 - DNA, 25 bp, Homo sapien
ctggaattttattaggatcctgaat

SEQ ID NO: 3447918 - DNA, 25 bp, Homo sapien
tggaattttattaggatcctgaatg

SEQ ID NO: 3447919 - DNA, 25 bp, Homo sapien
gcaagtttcaactgctttagttaat

SEQ ID NO: 3447920 - DNA, 25 bp, Homo sapien
aacaaagcaagtttcaactgcttta

SEQ ID NO: 3447921 - DNA, 25 bp, Homo sapien
caactgctttagttaatagattctg

SEQ ID NO: 3447922 - DNA, 25 bp, Homo sapien
tagttaatagattctgagttgtatc

SEQ ID NO: 3447923 - DNA, 25 bp, Homo sapien
gtctggtagaacaatctggcaagcc

SEQ ID NO: 3447924 - DNA, 25 bp, Homo sapien
catctgaaccttgtccaggttggtt

SEQ ID NO: 3447925 - DNA, 25 bp, Homo sapien
tgctgtaagaagttactggcatctg

SEQ ID NO: 3447926 - DNA, 25 bp, Homo sapien
ggtagaacaatctggcaagccacta

SEQ ID NO: 3447927 - DNA, 25 bp, Homo sapien
gaaccagtggcctctgcaatggaga

SEQ ID NO: 3447928 - DNA, 25 bp, Homo sapien
tgagtaacgaaggtggacaacatgc

SEQ ID NO: 3447929 - DNA, 25 bp, Homo sapien
caagtgaattcaagtgatggctgcc

SEQ ID NO: 3447930 - DNA, 25 bp, Homo sapien
ttctgctgaagagtaccaaaggcct

SEQ ID NO: 3447931 - DNA, 25 bp, Homo sapien
cagaaacttgttcaggctttcagag

SEQ ID NO: 3447932 - DNA, 25 bp, Homo sapien
tcatcccaaatttgagggtcaccat

SEQ ID NO: 3447933 - DNA, 25 bp, Homo sapien
aatttgagggtcaccatcctgggaa

SEQ ID NO: 3447934 - DNA, 25 bp, Homo sapien
tcagagaatggcagatcatcccaaa

SEQ ID NO: 3447935 - DNA, 25 bp, Homo sapien
tagactagaatggtcactctccctg

SEQ ID NO: 3447936 - DNA, 25 bp, Homo sapien
cagagctgacaggtaaggattcggt

SEQ ID NO: 3447937 - DNA, 25 bp, Homo sapien
catgaattcttgtttggtggaaccc

SEQ ID NO: 3447938 - DNA, 25 bp, Homo sapien
tcaggtccaagaatagggtgcagct

SEQ ID NO: 3447939 - DNA, 25 bp, Homo sapien
taaacagtataagataaagtgctca

SEQ ID NO: 3447940 - DNA, 25 bp, Homo sapien
gaatgctttccgtacccctgaaggc

SEQ ID NO: 3447941 - DNA, 25 bp, Homo sapien
aaagtgctcaactacctaatcatag

SEQ ID NO: 3447942 - DNA, 25 bp, Homo sapien
agttcaggaattgggttcaggtgac

SEQ ID NO: 3447943 - DNA, 25 bp, Homo sapien
ctttcttggcttcttgcttcttcat

SEQ ID NO: 3447944 - DNA, 25 bp, Homo sapien
catcttcttccccttggtcttattt

SEQ ID NO: 3447945 - DNA, 25 bp, Homo sapien
cttggcttcttgcttcttcatgaca

SEQ ID NO: 3447946 - DNA, 25 bp, Homo sapien
ccttggtcttattttgttttagcat

SEQ ID NO: 3447947 - DNA, 25 bp, Homo sapien
ctttggggtggatgtcctgtccagt

SEQ ID NO: 3447948 - DNA, 25 bp, Homo sapien
cttttctcaaacaggggagattcac

SEQ ID NO: 3447949 - DNA, 25 bp, Homo sapien
gtggatgtcctgtccagtgctaaaa

SEQ ID NO: 3447950 - DNA, 25 bp, Homo sapien
ccttttctcaaacaggggagattca

SEQ ID NO: 3447951 - DNA, 25 bp, Homo sapien
atataatgaggccatttgacaaagt

SEQ ID NO: 3447952 - DNA, 25 bp, Homo sapien
ggccatttgacaaagtgagtgagat

SEQ ID NO: 3447953 - DNA, 25 bp, Homo sapien
taatgaggccatttgacaaagtgag

SEQ ID NO: 3447954 - DNA, 25 bp, Homo sapien
ccatttgacaaagtgagtgagatcc

SEQ ID NO: 3447955 - DNA, 25 bp, Homo sapien
aatcacaagaggcacttccagtgac

SEQ ID NO: 3447956 - DNA, 25 bp, Homo sapien
ctggttaatcacaagaggcacttcc

SEQ ID NO: 3447957 - DNA, 25 bp, Homo sapien
ttaatcacaagaggcacttccagtg

SEQ ID NO: 3447958 - DNA, 25 bp, Homo sapien
gttaatcacaagaggcacttccagt

SEQ ID NO: 3447959 - DNA, 25 bp, Homo sapien
tggcagcattcctgtcagcatgggc

SEQ ID NO: 3447960 - DNA, 25 bp, Homo sapien
catgggccaacaattcctgcttctt

SEQ ID NO: 3447961 - DNA, 25 bp, Homo sapien
tcctgtcagcatgggccaacaattc

SEQ ID NO: 3447962 - DNA, 25 bp, Homo sapien
cagcattcctgtcagcatgggccaa

SEQ ID NO: 3447963 - DNA, 25 bp, Homo sapien
ggatccatatcttgtgcagtcagca

SEQ ID NO: 3447964 - DNA, 25 bp, Homo sapien
gcttgatgggatccatatcttgtgc

SEQ ID NO: 3447965 - DNA, 25 bp, Homo sapien
ttgatgggatccatatcttgtgcag

SEQ ID NO: 3447966 - DNA, 25 bp, Homo sapien
tgggatccatatcttgtgcagtcag

SEQ ID NO: 3447967 - DNA, 25 bp, Homo sapien
caaagtttagctaaagctccttgtt

SEQ ID NO: 3447968 - DNA, 25 bp, Homo sapien
cccaaagtttagctaaagctccttg

SEQ ID NO: 3447969 - DNA, 25 bp, Homo sapien
ccaaagtttagctaaagctccttgt

SEQ ID NO: 3447970 - DNA, 25 bp, Homo sapien
cattgatggtggatctcattatatc

SEQ ID NO: 3447971 - DNA, 25 bp, Homo sapien
ttgatggtggatctcattatatctg

SEQ ID NO: 3447972 - DNA, 25 bp, Homo sapien
cccattgatggtggatctcattata

SEQ ID NO: 3447973 - DNA, 25 bp, Homo sapien
ctccccattgatggtggatctcatt

SEQ ID NO: 3447974 - DNA, 25 bp, Homo sapien
ttctggcttggcattgtaagccaca

SEQ ID NO: 3447975 - DNA, 25 bp, Homo sapien
tttctggcttggcattgtaagccac

SEQ ID NO: 3447976 - DNA, 25 bp, Homo sapien
aattgagttgccatcacatagagga

SEQ ID NO: 3447977 - DNA, 25 bp, Homo sapien
ggagacctctgaataaagactaact

SEQ ID NO: 3447978 - DNA, 25 bp, Homo sapien
tcatgctggataagagtactcattc

SEQ ID NO: 3447979 - DNA, 25 bp, Homo sapien
ggagagtgcaacttacgatcttagt

SEQ ID NO: 3447980 - DNA, 25 bp, Homo sapien
tttgatagtatataagggagctaca

SEQ ID NO: 3447981 - DNA, 25 bp, Homo sapien
aaatgtatttgaactaactcgtgag

SEQ ID NO: 3447982 - DNA, 25 bp, Homo sapien
aaagtgtgccccatatatcttgtac

SEQ ID NO: 3447983 - DNA, 25 bp, Homo sapien
ctaactcgtgagcaaaatttctgtt

SEQ ID NO: 3447984 - DNA, 25 bp, Homo sapien
gaatgctagtggaactttcttgtag

SEQ ID NO: 3447985 - DNA, 25 bp, Homo sapien
ctacgtgtgcactaaattctaaaac

SEQ ID NO: 3447986 - DNA, 25 bp, Homo sapien
ataattaccaacatccaaaagcgtt

SEQ ID NO: 3447987 - DNA, 25 bp, Homo sapien
tcactagctggttgaataatgcaca

SEQ ID NO: 3447988 - DNA, 25 bp, Homo sapien
tgtgaacttagaggaaatggctgtg

SEQ ID NO: 3447989 - DNA, 25 bp, Homo sapien
caatccctgacaatattgtaggtgc

SEQ ID NO: 3447990 - DNA, 25 bp, Homo sapien
ccttctctatatacccttggccaga

SEQ ID NO: 3447991 - DNA, 25 bp, Homo sapien
tatgaattccagattaggccttatg

SEQ ID NO: 3447992 - DNA, 25 bp, Homo sapien
aacgtcctttaagctctggatgggc

SEQ ID NO: 3447993 - DNA, 25 bp, Homo sapien
gactaccatttgtaagaccctaaga

SEQ ID NO: 3447994 - DNA, 25 bp, Homo sapien
gaattgctggcattggaccttcaag

SEQ ID NO: 3447995 - DNA, 25 bp, Homo sapien
tggcacataccaaagcccagaggag

SEQ ID NO: 3447996 - DNA, 25 bp, Homo sapien
tgagtgtgtgtcaaacaatctaggc

SEQ ID NO: 3447997 - DNA, 25 bp, Homo sapien
ggtgcataatttgggcaccgttaac

SEQ ID NO: 3447998 - DNA, 25 bp, Homo sapien
ctttttctaaaggtgcataatttgg

SEQ ID NO: 3447999 - DNA, 25 bp, Homo sapien
gatttcctgctttggttctttgacc

SEQ ID NO: 3448000 - DNA, 25 bp, Homo sapien
tgatctccggggcagaggaccatca

SEQ ID NO: 3448001 - DNA, 25 bp, Homo sapien
gagcccagttctgagccgtggccct

SEQ ID NO: 3448002 - DNA, 25 bp, Homo sapien
ctgctttgtgtgttcagcccggtgg

SEQ ID NO: 3448003 - DNA, 25 bp, Homo sapien
tctgttcctggtaggcctctgatct

SEQ ID NO: 3448004 - DNA, 25 bp, Homo sapien
tttctgaacatgaaagggcaaccat

SEQ ID NO: 3448005 - DNA, 25 bp, Homo sapien
ctttctgaacatgaaagggcaacca

SEQ ID NO: 3448006 - DNA, 25 bp, Homo sapien
agagatgagggaggacttcgtgggg

SEQ ID NO: 3448007 - DNA, 25 bp, Homo sapien
tcgtgggggagatggcatgtctgct

SEQ ID NO: 3448008 - DNA, 25 bp, Homo sapien
gacttcgtgggggagatggcatgtc

SEQ ID NO: 3448009 - DNA, 25 bp, Homo sapien
tgagggaggacttcgtgggggagat

SEQ ID NO: 3448010 - DNA, 25 bp, Homo sapien
ggggagcagaaatcttgctgcaact

SEQ ID NO: 3448011 - DNA, 25 bp, Homo sapien
gaaatcttgctgcaacttgcgtgct

SEQ ID NO: 3448012 - DNA, 25 bp, Homo sapien
ttgctgcaacttgcgtgcttggcat

SEQ ID NO: 3448013 - DNA, 25 bp, Homo sapien
gcagaaatcttgctgcaacttgcgt

SEQ ID NO: 3448014 - DNA, 25 bp, Homo sapien
tgtcgggacaactgagtccatggtg

SEQ ID NO: 3448015 - DNA, 25 bp, Homo sapien
gatactgtgcctccactgaagattg

SEQ ID NO: 3448016 - DNA, 25 bp, Homo sapien
ggaaggtagagacatagctatcacc

SEQ ID NO: 3448017 - DNA, 25 bp, Homo sapien
cagagccagtgatactgtgcctcca

SEQ ID NO: 3448018 - DNA, 25 bp, Homo sapien
tctaagaagggtggagtacagccac

SEQ ID NO: 3448019 - DNA, 25 bp, Homo sapien
cagagcatctaagaagggtggagta

SEQ ID NO: 3448020 - DNA, 25 bp, Homo sapien
agggcagagcatctaagaagggtgg

SEQ ID NO: 3448021 - DNA, 25 bp, Homo sapien
catctaagaagggtggagtacagcc

SEQ ID NO: 3448022 - DNA, 25 bp, Homo sapien
catgtggttctttttcgagcttgag

SEQ ID NO: 3448023 - DNA, 25 bp, Homo sapien
tcgagcttgagtggatgctccagct

SEQ ID NO: 3448024 - DNA, 25 bp, Homo sapien
tctttttcgagcttgagtggatgct

SEQ ID NO: 3448025 - DNA, 25 bp, Homo sapien
tgtggttctttttcgagcttgagtg

SEQ ID NO: 3448026 - DNA, 25 bp, Homo sapien
acttcagctcatttgctccagattc

SEQ ID NO: 3448027 - DNA, 25 bp, Homo sapien
tcaactggttcttagaggccttgaa

SEQ ID NO: 3448028 - DNA, 25 bp, Homo sapien
tgcagttctgagagaccttgtcaac

SEQ ID NO: 3448029 - DNA, 25 bp, Homo sapien
tcagctaggtttgtagtggatccct

SEQ ID NO: 3448030 - DNA, 25 bp, Homo sapien
aaaattatggtcaggaagcaaaatg

SEQ ID NO: 3448031 - DNA, 25 bp, Homo sapien
aaattatggtcaggaagcaaaatgg

SEQ ID NO: 3448032 - DNA, 25 bp, Homo sapien
aattatggtcaggaagcaaaatggc

SEQ ID NO: 3448033 - DNA, 25 bp, Homo sapien
ccacttgggctgaactcttttacta

SEQ ID NO: 3448034 - DNA, 25 bp, Homo sapien
tgagtccaagggcactagcattgcc

SEQ ID NO: 3448035 - DNA, 25 bp, Homo sapien
tcttgtcagcaatgttgagagggct

SEQ ID NO: 3448036 - DNA, 25 bp, Homo sapien
gagggctaactctacatacctttgc

SEQ ID NO: 3448037 - DNA, 25 bp, Homo sapien
gtgactcattcgcacatccatttct

SEQ ID NO: 3448038 - DNA, 25 bp, Homo sapien
cttgcgtgcgtgactcattcgcaca

SEQ ID NO: 3448039 - DNA, 25 bp, Homo sapien
cttcccttgcgtgcgtgactcattc

SEQ ID NO: 3448040 - DNA, 25 bp, Homo sapien
cgtgcgtgactcattcgcacatcca

SEQ ID NO: 3448041 - DNA, 25 bp, Homo sapien
tgactccagcccttggactcaggac

SEQ ID NO: 3448042 - DNA, 25 bp, Homo sapien
gctgctgggcttgcgattgccgctc

SEQ ID NO: 3448043 - DNA, 25 bp, Homo sapien
tgagctaagtgtagcagcagcacca

SEQ ID NO: 3448044 - DNA, 25 bp, Homo sapien
gcattcattgtgctacggtctctcc

SEQ ID NO: 3448045 - DNA, 25 bp, Homo sapien
cccggctccgcggaatcgtcccagt

SEQ ID NO: 3448046 - DNA, 25 bp, Homo sapien
ggctccgcggaatcgtcccagtact

SEQ ID NO: 3448047 - DNA, 25 bp, Homo sapien
gcggaatcgtcccagtactcctaac

SEQ ID NO: 3448048 - DNA, 25 bp, Homo sapien
cgcggaatcgtcccagtactcctaa

SEQ ID NO: 3448049 - DNA, 25 bp, Homo sapien
tgaaccaccacttgactcctgcgca

SEQ ID NO: 3448050 - DNA, 25 bp, Homo sapien
actgaaccaccacttgactcctgcg

SEQ ID NO: 3448051 - DNA, 25 bp, Homo sapien
cactgaaccaccacttgactcctgc

SEQ ID NO: 3448052 - DNA, 25 bp, Homo sapien
aatgcatttcggaggactaccccaa

SEQ ID NO: 3448053 - DNA, 25 bp, Homo sapien
gacaccaactctctcaactgtactg

SEQ ID NO: 3448054 - DNA, 25 bp, Homo sapien
tctccgaataaaggcgagggtcgcc

SEQ ID NO: 3448055 - DNA, 25 bp, Homo sapien
tgagaccgaggctcactgggcctct

SEQ ID NO: 3448056 - DNA, 25 bp, Homo sapien
ttgcagggccaaagcaacgtctctt

SEQ ID NO: 3448057 - DNA, 25 bp, Homo sapien
cttcggacgcctttgttaatcattc

SEQ ID NO: 3448058 - DNA, 25 bp, Homo sapien
aagcaacgtctctttccaccttggt

SEQ ID NO: 3448059 - DNA, 25 bp, Homo sapien
tggtcaccttccaacaacgatttct

SEQ ID NO: 3448060 - DNA, 25 bp, Homo sapien
aatttagtgttactccttcaggcta

SEQ ID NO: 3448061 - DNA, 25 bp, Homo sapien
tgaacatctgctttcgctggttggt

SEQ ID NO: 3448062 - DNA, 25 bp, Homo sapien
tctgctttcgctggttggtaaaaaa

SEQ ID NO: 3448063 - DNA, 25 bp, Homo sapien
gccaatatcccctttgaacatctgc

SEQ ID NO: 3448064 - DNA, 25 bp, Homo sapien
tctattgccagacgtcagaaggcct

SEQ ID NO: 3448065 - DNA, 25 bp, Homo sapien
cacagcactgtttcagtgacacaag

SEQ ID NO: 3448066 - DNA, 25 bp, Homo sapien
tatccatgaccgatgttactctgga

SEQ ID NO: 3448067 - DNA, 25 bp, Homo sapien
ccgccttttctgagacacgggcttg

SEQ ID NO: 3448068 - DNA, 25 bp, Homo sapien
ccttcaatgacgcaaagtaactagt

SEQ ID NO: 3448069 - DNA, 25 bp, Homo sapien
gaggtatcacttctcaaacacaagc

SEQ ID NO: 3448070 - DNA, 25 bp, Homo sapien
tacacctgaatcaccaaccgggaaa

SEQ ID NO: 3448071 - DNA, 25 bp, Homo sapien
taattaccatctgcatacacctgag

SEQ ID NO: 3448072 - DNA, 25 bp, Homo sapien
agttttgctgttattgcccgggcta

SEQ ID NO: 3448073 - DNA, 25 bp, Homo sapien
tttgctgttattgcccgggctagag

SEQ ID NO: 3448074 - DNA, 25 bp, Homo sapien
ccgggctagagtgcattagcacaat

SEQ ID NO: 3448075 - DNA, 25 bp, Homo sapien
gcccgggctagagtgcattagcaca

SEQ ID NO: 3448076 - DNA, 25 bp, Homo sapien
taggaacttaagctcctctattaaa

SEQ ID NO: 3448077 - DNA, 25 bp, Homo sapien
gcaaagtttattaataccactctga

SEQ ID NO: 3448078 - DNA, 25 bp, Homo sapien
attgagagtccaacattaaaattaa

SEQ ID NO: 3448079 - DNA, 25 bp, Homo sapien
gtactactgtcttaaaaattgagag

SEQ ID NO: 3448080 - DNA, 25 bp, Homo sapien
gcaagtttatgtataggcagcaccc

SEQ ID NO: 3448081 - DNA, 25 bp, Homo sapien
catgaacatatttacgctcggcaag

SEQ ID NO: 3448082 - DNA, 25 bp, Homo sapien
caaagaaacattttcggctgggcac

SEQ ID NO: 3448083 - DNA, 25 bp, Homo sapien
tagaagccccagtatacgcctgtag

SEQ ID NO: 3448084 - DNA, 25 bp, Homo sapien
tatgaaaaacctggcaaacaggagc

SEQ ID NO: 3448085 - DNA, 25 bp, Homo sapien
gataaacatagctgggcaacaacac

SEQ ID NO: 3448086 - DNA, 25 bp, Homo sapien
gtacagtatgattttggcccttaag

SEQ ID NO: 3448087 - DNA, 25 bp, Homo sapien
taacattctggttcaactgagcatc

SEQ ID NO: 3448088 - DNA, 25 bp, Homo sapien
gacaccatgcttgttcaactgctcc

SEQ ID NO: 3448089 - DNA, 25 bp, Homo sapien
tctcaagacataaagcagcttattt

SEQ ID NO: 3448090 - DNA, 25 bp, Homo sapien
atttctcaagacataaagcagctta

SEQ ID NO: 3448091 - DNA, 25 bp, Homo sapien
tgtgagacaccatgcttgttcaact

SEQ ID NO: 3448092 - DNA, 25 bp, Homo sapien
cagagtaacagaactagcaggtcac

SEQ ID NO: 3448093 - DNA, 25 bp, Homo sapien
gaagttgcatctcttacctgactga

SEQ ID NO: 3448094 - DNA, 25 bp, Homo sapien
cacactggatgtatgggactctgca

SEQ ID NO: 3448095 - DNA, 25 bp, Homo sapien
gacataccaggttacagtgccaggc

SEQ ID NO: 3448096 - DNA, 25 bp, Homo sapien
tataaataccgtgtgataggctgta

SEQ ID NO: 3448097 - DNA, 25 bp, Homo sapien
ccctaccagggttctaagatgaatg

SEQ ID NO: 3448098 - DNA, 25 bp, Homo sapien
tcatggagtaacgaccttaggtggc

SEQ ID NO: 3448099 - DNA, 25 bp, Homo sapien
tgctaaacccgaactcttaatgact

SEQ ID NO: 3448100 - DNA, 25 bp, Homo sapien
gttgagtaactatgtacatgcaaac

SEQ ID NO: 3448101 - DNA, 25 bp, Homo sapien
aggagatcaatactatcccgtctaa

SEQ ID NO: 3448102 - DNA, 25 bp, Homo sapien
ggtcaggagatcaatactatcccgt

SEQ ID NO: 3448103 - DNA, 25 bp, Homo sapien
acctggcctctttgttgagtaacta

SEQ ID NO: 3448104 - DNA, 25 bp, Homo sapien
atgaaacatagaatggatcatagtt

SEQ ID NO: 3448105 - DNA, 25 bp, Homo sapien
tattatacgtctttctagataagca

SEQ ID NO: 3448106 - DNA, 25 bp, Homo sapien
tcatagtttatctccccaaaagaac

SEQ ID NO: 3448107 - DNA, 25 bp, Homo sapien
gattggctgcccctgatttacatga

SEQ ID NO: 3448108 - DNA, 25 bp, Homo sapien
ttatgctcaccacgctactgtgttg

SEQ ID NO: 3448109 - DNA, 25 bp, Homo sapien
tgttgaaattatagtaaggccactg

SEQ ID NO: 3448110 - DNA, 25 bp, Homo sapien
gccagtcaatcacagtagttagcag

SEQ ID NO: 3448111 - DNA, 25 bp, Homo sapien
aaagcggtccatagacttcactaga

SEQ ID NO: 3448112 - DNA, 25 bp, Homo sapien
tctgttgtgtaccaagtgtagtgga

SEQ ID NO: 3448113 - DNA, 25 bp, Homo sapien
atttattgtcgagataaggtctccc

SEQ ID NO: 3448114 - DNA, 25 bp, Homo sapien
tatcttagtcttcaccatgagaaaa

SEQ ID NO: 3448115 - DNA, 25 bp, Homo sapien
tagtggatatagtcaagcttggata

SEQ ID NO: 3448116 - DNA, 25 bp, Homo sapien
ccagtcattttgcagcattgtgcta

SEQ ID NO: 3448117 - DNA, 25 bp, Homo sapien
taacaataacaagtggctgccaagg

SEQ ID NO: 3448118 - DNA, 25 bp, Homo sapien
cagcttagtggtttatgagccagtc

SEQ ID NO: 3448119 - DNA, 25 bp, Homo sapien
taaaggactaagcaatccatcagag

SEQ ID NO: 3448120 - DNA, 25 bp, Homo sapien
tcaatataattagtaggccacatgc

SEQ ID NO: 3448121 - DNA, 25 bp, Homo sapien
tgctagggtatgtaacaggagaccc

SEQ ID NO: 3448122 - DNA, 25 bp, Homo sapien
aatacaaatatggttgagctcctgc

SEQ ID NO: 3448123 - DNA, 25 bp, Homo sapien
gatgaaacagccattgacaagactg

SEQ ID NO: 3448124 - DNA, 25 bp, Homo sapien
ttttaacattcagggactagagcca

SEQ ID NO: 3448125 - DNA, 25 bp, Homo sapien
aacatcctgcttggtagcctacctg

SEQ ID NO: 3448126 - DNA, 25 bp, Homo sapien
gacacctagtggataccgaatgaat

SEQ ID NO: 3448127 - DNA, 25 bp, Homo sapien
tcactgaggcagacttattggacag

SEQ ID NO: 3448128 - DNA, 25 bp, Homo sapien
ttccatgcgcattgttccatctcag

SEQ ID NO: 3448129 - DNA, 25 bp, Homo sapien
gaatcccaggtctgtagctcccaat

SEQ ID NO: 3448130 - DNA, 25 bp, Homo sapien
tacatgaaggtcacccctctacagg

SEQ ID NO: 3448131 - DNA, 25 bp, Homo sapien
tgccctctatctttgagaatctagg

SEQ ID NO: 3448132 - DNA, 25 bp, Homo sapien
gcagctgcagactcaaaggaagtat

SEQ ID NO: 3448133 - DNA, 25 bp, Homo sapien
taactttgctatgcagcttctgaca

SEQ ID NO: 3448134 - DNA, 25 bp, Homo sapien
tatgcacctataaagtacagcagca

SEQ ID NO: 3448135 - DNA, 25 bp, Homo sapien
gaagactgagggtcatacagctcta

SEQ ID NO: 3448136 - DNA, 25 bp, Homo sapien
ttctaacatcacaaacctaggtgag

SEQ ID NO: 3448137 - DNA, 25 bp, Homo sapien
cctaggtgagagtcagttttgcagt

SEQ ID NO: 3448138 - DNA, 25 bp, Homo sapien
ggaaaccagtattgaagattaggca

SEQ ID NO: 3448139 - DNA, 25 bp, Homo sapien
gattaggcaagcatccaaatagctg

SEQ ID NO: 3448140 - DNA, 25 bp, Homo sapien
caagactgtgccttcggaaaagcaa

SEQ ID NO: 3448141 - DNA, 25 bp, Homo sapien
cagaggctcagatgtaatcagttcc

SEQ ID NO: 3448142 - DNA, 25 bp, Homo sapien
tgaaatcaacctgcctggactttgg

SEQ ID NO: 3448143 - DNA, 25 bp, Homo sapien
cttagtagcaccaggaatcagatcc

SEQ ID NO: 3448144 - DNA, 25 bp, Homo sapien
gaatgtgctcactctagaggtatac

SEQ ID NO: 3448145 - DNA, 25 bp, Homo sapien
tcactcataagtgaatctgggccaa

SEQ ID NO: 3448146 - DNA, 25 bp, Homo sapien
caggccatactctcaaaggttcaga

SEQ ID NO: 3448147 - DNA, 25 bp, Homo sapien
gagactactgatctccaaagtggaa

SEQ ID NO: 3448148 - DNA, 25 bp, Homo sapien
gaagagctctgtgcacctaatggtt

SEQ ID NO: 3448149 - DNA, 25 bp, Homo sapien
caatggctagaacacagtaatgtgg

SEQ ID NO: 3448150 - DNA, 25 bp, Homo sapien
aaactgcttagcctctagtcactgg

SEQ ID NO: 3448151 - DNA, 25 bp, Homo sapien
tgcacctaactgcaaaggaggccag

SEQ ID NO: 3448152 - DNA, 25 bp, Homo sapien
agcacaggacttgggttccaggtag

SEQ ID NO: 3448153 - DNA, 25 bp, Homo sapien
tgatcctccacgtggaagaactgga

SEQ ID NO: 3448154 - DNA, 25 bp, Homo sapien
caggtagggtactatatccagagca

SEQ ID NO: 3448155 - DNA, 25 bp, Homo sapien
gagtgagccaccgagttcttccttc

SEQ ID NO: 3448156 - DNA, 25 bp, Homo sapien
aaggtcatcgataacttccccatgg

SEQ ID NO: 3448157 - DNA, 25 bp, Homo sapien
caggtttcatctccactatagcagt

SEQ ID NO: 3448158 - DNA, 25 bp, Homo sapien
tgttgtctacactctgaatctccag

SEQ ID NO: 3448159 - DNA, 25 bp, Homo sapien
cctgtggccggtgacccatttcaaa

SEQ ID NO: 3448160 - DNA, 25 bp, Homo sapien
catggattggaagacccagttacac

SEQ ID NO: 3448161 - DNA, 25 bp, Homo sapien
gagcaaggtaggagtaattgtccca

SEQ ID NO: 3448162 - DNA, 25 bp, Homo sapien
gaggacttggtttataagactccat

SEQ ID NO: 3448163 - DNA, 25 bp, Homo sapien
agactccataaggtgattctcaaat

SEQ ID NO: 3448164 - DNA, 25 bp, Homo sapien
aaagactagacattgaattggctcc

SEQ ID NO: 3448165 - DNA, 25 bp, Homo sapien
gcactaaattgctcaaaatgcgctg

SEQ ID NO: 3448166 - DNA, 25 bp, Homo sapien
ttactatctggtgccccgccagttg

SEQ ID NO: 3448167 - DNA, 25 bp, Homo sapien
cagttgacccactgagactctgcac

SEQ ID NO: 3448168 - DNA, 25 bp, Homo sapien
tgtctggactggagatgtaggtcat

SEQ ID NO: 3448169 - DNA, 25 bp, Homo sapien
tagaatacactactccaaaaggaag

SEQ ID NO: 3448170 - DNA, 25 bp, Homo sapien
tgtaggtcataatggctgcatgaaa

SEQ ID NO: 3448171 - DNA, 25 bp, Homo sapien
aaaaggaagcttctggcaccaaaga

SEQ ID NO: 3448172 - DNA, 25 bp, Homo sapien
tctacataccaacaataaacagtta

SEQ ID NO: 3448173 - DNA, 25 bp, Homo sapien
gcttgtcgtgagcatatggctttga

SEQ ID NO: 3448174 - DNA, 25 bp, Homo sapien
ggctttgaggttatgccacagagtt

SEQ ID NO: 3448175 - DNA, 25 bp, Homo sapien
taaaggaccagtatgcaaatcagat

SEQ ID NO: 3448176 - DNA, 25 bp, Homo sapien
actctccggttacttaataagctag

SEQ ID NO: 3448177 - DNA, 25 bp, Homo sapien
acagaaaaaggctggcaagctggac

SEQ ID NO: 3448178 - DNA, 25 bp, Homo sapien
gctggacagaggtacatcttcaaca

SEQ ID NO: 3448179 - DNA, 25 bp, Homo sapien
ctgggaactgaaacctaaaaatgca

SEQ ID NO: 3448180 - DNA, 25 bp, Homo sapien
gatctgccataacttgcttaaccat

SEQ ID NO: 3448181 - DNA, 25 bp, Homo sapien
aaggtgatctgccataacttgctta

SEQ ID NO: 3448182 - DNA, 25 bp, Homo sapien
gactcatatcatcaaggtgatctgc

SEQ ID NO: 3448183 - DNA, 25 bp, Homo sapien
cagactcatatcatcaaggtgatct

SEQ ID NO: 3448184 - DNA, 25 bp, Homo sapien
ttcttaaattgcttcgtgtgatgag

SEQ ID NO: 3448185 - DNA, 25 bp, Homo sapien
gcttcgtgtgatgaggacacaaatc

SEQ ID NO: 3448186 - DNA, 25 bp, Homo sapien
taaattgcttcgtgtgatgaggaca

SEQ ID NO: 3448187 - DNA, 25 bp, Homo sapien
cgtgtgatgaggacacaaatcaaaa

SEQ ID NO: 3448188 - DNA, 25 bp, Homo sapien
gctctggaaagtctctcaataccgg

SEQ ID NO: 3448189 - DNA, 25 bp, Homo sapien
attcccagtaactttagagtgtcct

SEQ ID NO: 3448190 - DNA, 25 bp, Homo sapien
ctttaagagctcttaatgctctgga

SEQ ID NO: 3448191 - DNA, 25 bp, Homo sapien
gctggacgctttgccgttgagtgta

SEQ ID NO: 3448192 - DNA, 25 bp, Homo sapien
tcaaaataaggcaacgcctccacca

SEQ ID NO: 3448193 - DNA, 25 bp, Homo sapien
ttgatcaaaataaggcaacgcctcc

SEQ ID NO: 3448194 - DNA, 25 bp, Homo sapien
tgatcaaaataaggcaacgcctcca

SEQ ID NO: 3448195 - DNA, 25 bp, Homo sapien
aaaataaggcaacgcctccaccaca

SEQ ID NO: 3448196 - DNA, 25 bp, Homo sapien
tcaggtagctcttagtaggtgagtt

SEQ ID NO: 3448197 - DNA, 25 bp, Homo sapien
tagtaggtgagtttgctcttccacc

SEQ ID NO: 3448198 - DNA, 25 bp, Homo sapien
ctcttagtaggtgagtttgctcttc

SEQ ID NO: 3448199 - DNA, 25 bp, Homo sapien
caggtagctcttagtaggtgagttt

SEQ ID NO: 3448200 - DNA, 25 bp, Homo sapien
gctgtgacattagttccagagtctc

SEQ ID NO: 3448201 - DNA, 25 bp, Homo sapien
gagtctcagttctaactgcttgctg

SEQ ID NO: 3448202 - DNA, 25 bp, Homo sapien
taggcattatatccatgctgtgaca

SEQ ID NO: 3448203 - DNA, 25 bp, Homo sapien
tcagttctaactgcttgctgcttta

SEQ ID NO: 3448204 - DNA, 25 bp, Homo sapien
aaagacggcccttctcattggccga

SEQ ID NO: 3448205 - DNA, 25 bp, Homo sapien
gactttcgcaacatctactgctcgg

SEQ ID NO: 3448206 - DNA, 25 bp, Homo sapien
atctactgctcggaggcgcactgga

SEQ ID NO: 3448207 - DNA, 25 bp, Homo sapien
cattggccgattcataagggactgt

SEQ ID NO: 3448208 - DNA, 25 bp, Homo sapien
aaaccaggcgtgattggctgtcccg

SEQ ID NO: 3448209 - DNA, 25 bp, Homo sapien
agggcggggccactgataaaaccag

SEQ ID NO: 3448210 - DNA, 25 bp, Homo sapien
actgataaaaccaggcgtgattggc

SEQ ID NO: 3448211 - DNA, 25 bp, Homo sapien
tggctgtcccggcaacgtcacgagc

SEQ ID NO: 3448212 - DNA, 25 bp, Homo sapien
tctcgcgggtgatctccgtccactt

SEQ ID NO: 3448213 - DNA, 25 bp, Homo sapien
cctcgggtatgaaacgccgccgtct

SEQ ID NO: 3448214 - DNA, 25 bp, Homo sapien
tgtctgtgttcccaaccgctgcgtc

SEQ ID NO: 3448215 - DNA, 25 bp, Homo sapien
caaccgctgcgtcgtgcgaaatgaa

SEQ ID NO: 3448216 - DNA, 25 bp, Homo sapien
ctgaagccgctctggataccccgcc

SEQ ID NO: 3448217 - DNA, 25 bp, Homo sapien
aagccgctctggataccccgcctcc

SEQ ID NO: 3448218 - DNA, 25 bp, Homo sapien
ccgctctggataccccgcctccctt

SEQ ID NO: 3448219 - DNA, 25 bp, Homo sapien
tgaagccgctctggataccccgcct

SEQ ID NO: 3448220 - DNA, 25 bp, Homo sapien
cctccgaggtccgctgcagctgaag

SEQ ID NO: 3448221 - DNA, 25 bp, Homo sapien
tgcgccgcggcccccctccgaggtc

SEQ ID NO: 3448222 - DNA, 25 bp, Homo sapien
cgcggcccccctccgaggtccgctg

SEQ ID NO: 3448223 - DNA, 25 bp, Homo sapien
ggcccccctccgaggtccgctgcag

SEQ ID NO: 3448224 - DNA, 25 bp, Homo sapien
tttgggcctcgatgagagagacgat

SEQ ID NO: 3448225 - DNA, 25 bp, Homo sapien
tctcctcggctagaatggtcagcat

SEQ ID NO: 3448226 - DNA, 25 bp, Homo sapien
gatgactgataatcccgacaggcgt

SEQ ID NO: 3448227 - DNA, 25 bp, Homo sapien
gaaggtcaggtcttcgagcgatgac

SEQ ID NO: 3448228 - DNA, 25 bp, Homo sapien
taataggaggctgcggggtgtataa

SEQ ID NO: 3448229 - DNA, 25 bp, Homo sapien
agtaataggaggctgcggggtgtat

SEQ ID NO: 3448230 - DNA, 25 bp, Homo sapien
gaagtaataggaggctgcggggtgt

SEQ ID NO: 3448231 - DNA, 25 bp, Homo sapien
ttagaagtaataggaggctgcgggg

SEQ ID NO: 3448232 - DNA, 25 bp, Homo sapien
gaaaaacactccttcgctatcaggg

SEQ ID NO: 3448233 - DNA, 25 bp, Homo sapien
catgctcgaagcctgggccaaagac

SEQ ID NO: 3448234 - DNA, 25 bp, Homo sapien
catgttgggctcctaacaggcggct

SEQ ID NO: 3448235 - DNA, 25 bp, Homo sapien
tgtcgggatatacaatgcggtggcc

SEQ ID NO: 3448236 - DNA, 25 bp, Homo sapien
gttgaggagcattaagacacaccat

SEQ ID NO: 3448237 - DNA, 25 bp, Homo sapien
taagtgttcaatcaagctctcaact

SEQ ID NO: 3448238 - DNA, 25 bp, Homo sapien
ctttatgaaacttaagtgttcaatc

SEQ ID NO: 3448239 - DNA, 25 bp, Homo sapien
atgagtttttaaacctacaatacag

SEQ ID NO: 3448240 - DNA, 25 bp, Homo sapien
agtttagtataatgaattaccacca

SEQ ID NO: 3448241 - DNA, 25 bp, Homo sapien
gagatactctcttccaacgtttttc

SEQ ID NO: 3448242 - DNA, 25 bp, Homo sapien
taaggtacataacaggaagcttctc

SEQ ID NO: 3448243 - DNA, 25 bp, Homo sapien
ccaacgtttttcacaatagaatcca

SEQ ID NO: 3448244 - DNA, 25 bp, Homo sapien
taaaggcagtgagatactctcttcc

SEQ ID NO: 3448245 - DNA, 25 bp, Homo sapien
ctcaacataatactgctttaaccaa

SEQ ID NO: 3448246 - DNA, 25 bp, Homo sapien
ctcagcaaatcccttgtcctcctca

SEQ ID NO: 3448247 - DNA, 25 bp, Homo sapien
cctcctcaacataatactgctttaa

SEQ ID NO: 3448248 - DNA, 25 bp, Homo sapien
tcagcaaatcccttgtcctcctcaa

SEQ ID NO: 3448249 - DNA, 25 bp, Homo sapien
tgaacatactgaaaccgaaaccaag

SEQ ID NO: 3448250 - DNA, 25 bp, Homo sapien
taatgcccagttagattcagtaaag

SEQ ID NO: 3448251 - DNA, 25 bp, Homo sapien
taagactacagcctctggttagcag

SEQ ID NO: 3448252 - DNA, 25 bp, Homo sapien
ccaagaggttggttaagcttctcct

SEQ ID NO: 3448253 - DNA, 25 bp, Homo sapien
ggaatatttcatcccatgtagaacg

SEQ ID NO: 3448254 - DNA, 25 bp, Homo sapien
ggtagaggtttaataggccaagcag

SEQ ID NO: 3448255 - DNA, 25 bp, Homo sapien
tctaatgaattgactctgacatcca

SEQ ID NO: 3448256 - DNA, 25 bp, Homo sapien
ggatgctagacgtattcacattggg

SEQ ID NO: 3448257 - DNA, 25 bp, Homo sapien
cactaccgagtattctattttgact

SEQ ID NO: 3448258 - DNA, 25 bp, Homo sapien
tgaaccaattcactaccgagtattc

SEQ ID NO: 3448259 - DNA, 25 bp, Homo sapien
ttcactaccgagtattctattttga

SEQ ID NO: 3448260 - DNA, 25 bp, Homo sapien
aattgaaccaattcactaccgagta

SEQ ID NO: 3448261 - DNA, 25 bp, Homo sapien
tgaccactgtaccaggtgttgaagg

SEQ ID NO: 3448262 - DNA, 25 bp, Homo sapien
caactgtgccttagcttgctctagc

SEQ ID NO: 3448263 - DNA, 25 bp, Homo sapien
ctgctgaagttctaacaactgtttt

SEQ ID NO: 3448264 - DNA, 25 bp, Homo sapien
aacaattggaggagtggagatgcta

SEQ ID NO: 3448265 - DNA, 25 bp, Homo sapien
aacctgatgaggagctttaactgcc

SEQ ID NO: 3448266 - DNA, 25 bp, Homo sapien
gacggcttttctcagattgcacagg

SEQ ID NO: 3448267 - DNA, 25 bp, Homo sapien
tgttcagacgaggatcccggttagt

SEQ ID NO: 3448268 - DNA, 25 bp, Homo sapien
ttgccttcgtttgggtgaccgccta

SEQ ID NO: 3448269 - DNA, 25 bp, Homo sapien
gaaaccataaaagcagtatgttaca

SEQ ID NO: 3448270 - DNA, 25 bp, Homo sapien
ctgaaaccataaaagcagtatgtta

SEQ ID NO: 3448271 - DNA, 25 bp, Homo sapien
accataaaagcagtatgttacattg

SEQ ID NO: 3448272 - DNA, 25 bp, Homo sapien
ccataaaagcagtatgttacattga

SEQ ID NO: 3448273 - DNA, 25 bp, Homo sapien
tacacttaatcgatgctgttgctgc

SEQ ID NO: 3448274 - DNA, 25 bp, Homo sapien
tcagatgaggaggtttactatgttc

SEQ ID NO: 3448275 - DNA, 25 bp, Homo sapien
ggaatctgaagattggcatctacac

SEQ ID NO: 3448276 - DNA, 25 bp, Homo sapien
tagtgcttgaccagctctccctatg

SEQ ID NO: 3448277 - DNA, 25 bp, Homo sapien
gaatttgatgcacaacaacaaggaa

SEQ ID NO: 3448278 - DNA, 25 bp, Homo sapien
tcttgatactgaaatagctgtcgaa

SEQ ID NO: 3448279 - DNA, 25 bp, Homo sapien
tgtaatttcaccagatgctaaacgt

SEQ ID NO: 3448280 - DNA, 25 bp, Homo sapien
gaaatagctgtcgaatttgatgcac

SEQ ID NO: 3448281 - DNA, 25 bp, Homo sapien
tcatagtaggttaattcagcatcag

SEQ ID NO: 3448282 - DNA, 25 bp, Homo sapien
ttctcagcataagtacgactcccag

SEQ ID NO: 3448283 - DNA, 25 bp, Homo sapien
taggactatcccgtacattgcatct

SEQ ID NO: 3448284 - DNA, 25 bp, Homo sapien
tctattccagacaacaaggcatcag

SEQ ID NO: 3448285 - DNA, 25 bp, Homo sapien
aatcttggcaagagtgacggctgac

SEQ ID NO: 3448286 - DNA, 25 bp, Homo sapien
tgggaggtccatcaattcgagggct

SEQ ID NO: 3448287 - DNA, 25 bp, Homo sapien
tatcgaggtcgcttaagtggaaaac

SEQ ID NO: 3448288 - DNA, 25 bp, Homo sapien
tactaggtccatcaaataacggtct

SEQ ID NO: 3448289 - DNA, 25 bp, Homo sapien
tctgaacaaatccaggattttgtgg

SEQ ID NO: 3448290 - DNA, 25 bp, Homo sapien
tgttgtccttgaccaaaagctactg

SEQ ID NO: 3448291 - DNA, 25 bp, Homo sapien
aaagctactggctgagcaacaccac

SEQ ID NO: 3448292 - DNA, 25 bp, Homo sapien
gatgaactggtaaaaactgttgtcc

SEQ ID NO: 3448293 - DNA, 25 bp, Homo sapien
attaaattcatcctagcatactgcc

SEQ ID NO: 3448294 - DNA, 25 bp, Homo sapien
tctaaggaactgaggtgtttggcat

SEQ ID NO: 3448295 - DNA, 25 bp, Homo sapien
ggctacatagtgagcaccctcttta

SEQ ID NO: 3448296 - DNA, 25 bp, Homo sapien
gaacatgggtatatttcctactaga

SEQ ID NO: 3448297 - DNA, 25 bp, Homo sapien
aatgctccctgacgtaacaggaaaa

SEQ ID NO: 3448298 - DNA, 25 bp, Homo sapien
caatgctccctgacgtaacaggaaa

SEQ ID NO: 3448299 - DNA, 25 bp, Homo sapien
tcaatgctccctgacgtaacaggaa

SEQ ID NO: 3448300 - DNA, 25 bp, Homo sapien
ctcaatgctccctgacgtaacagga

SEQ ID NO: 3448301 - DNA, 25 bp, Homo sapien
aatctctcttcctcatcttctaagt

SEQ ID NO: 3448302 - DNA, 25 bp, Homo sapien
ctctcttcctcatcttctaagtaca

SEQ ID NO: 3448303 - DNA, 25 bp, Homo sapien
taatctctcttcctcatcttctaag

SEQ ID NO: 3448304 - DNA, 25 bp, Homo sapien
ctttctaatctctcttcctcatctt

SEQ ID NO: 3448305 - DNA, 25 bp, Homo sapien
gtgaatgtagaacttaaagatgcaa

SEQ ID NO: 3448306 - DNA, 25 bp, Homo sapien
gaatgtagaacttaaagatgcaaat

SEQ ID NO: 3448307 - DNA, 25 bp, Homo sapien
agtgaatgtagaacttaaagatgca

SEQ ID NO: 3448308 - DNA, 25 bp, Homo sapien
gaagtgaatgtagaacttaaagatg

SEQ ID NO: 3448309 - DNA, 25 bp, Homo sapien
ttgaaaacaattcatttacatccac

SEQ ID NO: 3448310 - DNA, 25 bp, Homo sapien
gactgagatgattatcaggatatgc

SEQ ID NO: 3448311 - DNA, 25 bp, Homo sapien
gctgaatcagtttgggacaatttga

SEQ ID NO: 3448312 - DNA, 25 bp, Homo sapien
tagctgaatcagtttgggacaattt

SEQ ID NO: 3448313 - DNA, 25 bp, Homo sapien
cttcaattaagaagagacatacaaa

SEQ ID NO: 3448314 - DNA, 25 bp, Homo sapien
gacatacaaatttcttaataccatt

SEQ ID NO: 3448315 - DNA, 25 bp, Homo sapien
agagacatacaaatttcttaatacc

SEQ ID NO: 3448316 - DNA, 25 bp, Homo sapien
caaatttcttaataccattctccat

SEQ ID NO: 3448317 - DNA, 25 bp, Homo sapien
aattagtaagatctggaacatcttg

SEQ ID NO: 3448318 - DNA, 25 bp, Homo sapien
attagtaagatctggaacatcttga

SEQ ID NO: 3448319 - DNA, 25 bp, Homo sapien
taaaattagtaagatctggaacatc

SEQ ID NO: 3448320 - DNA, 25 bp, Homo sapien
taaatgctgaactatgaaaatctca

SEQ ID NO: 3448321 - DNA, 25 bp, Homo sapien
tttaattgtaaatgctgaactatga

SEQ ID NO: 3448322 - DNA, 25 bp, Homo sapien
tgtaaatgctgaactatgaaaatct

SEQ ID NO: 3448323 - DNA, 25 bp, Homo sapien
tgctgaactatgaaaatctcatttc

SEQ ID NO: 3448324 - DNA, 25 bp, Homo sapien
gagctggctgaaacagttaataccc

SEQ ID NO: 3448325 - DNA, 25 bp, Homo sapien
gatcctgtgctagctaacaaggcaa

SEQ ID NO: 3448326 - DNA, 25 bp, Homo sapien
ggagcctgtcttcttattgatagcc

SEQ ID NO: 3448327 - DNA, 25 bp, Homo sapien
caatggtgaaaccaagagctggctg

SEQ ID NO: 3448328 - DNA, 25 bp, Homo sapien
tgagtgacttttcggctaacatcct

SEQ ID NO: 3448329 - DNA, 25 bp, Homo sapien
tattttgccgataatgccagtccaa

SEQ ID NO: 3448330 - DNA, 25 bp, Homo sapien
gttgtaaacctcattccacaagagt

SEQ ID NO: 3448331 - DNA, 25 bp, Homo sapien
taccagtgtacagtcgatttataac

SEQ ID NO: 3448332 - DNA, 25 bp, Homo sapien
caatgttagattccagcagttatta

SEQ ID NO: 3448333 - DNA, 25 bp, Homo sapien
ttagagctagaacaagcctgtaggc

SEQ ID NO: 3448334 - DNA, 25 bp, Homo sapien
gtaggctacactctaatcttaatta

SEQ ID NO: 3448335 - DNA, 25 bp, Homo sapien
ttagagctagaacaagcctgtatgc

SEQ ID NO: 3448336 - DNA, 25 bp, Homo sapien
cttgagttttgagcacaacttcttc

SEQ ID NO: 3448337 - DNA, 25 bp, Homo sapien
ctttagcagcctcttgagttttgag

SEQ ID NO: 3448338 - DNA, 25 bp, Homo sapien
ttcttccagatcagctatctcctca

SEQ ID NO: 3448339 - DNA, 25 bp, Homo sapien
tccagatcagctatctcctcaaatt

SEQ ID NO: 3448340 - DNA, 25 bp, Homo sapien
aattgttcttgacagatttcacaac

SEQ ID NO: 3448341 - DNA, 25 bp, Homo sapien
cttcatcccagtattgttcaaattg

SEQ ID NO: 3448342 - DNA, 25 bp, Homo sapien
tccatctactctaatagcatttttc

SEQ ID NO: 3448343 - DNA, 25 bp, Homo sapien
tcttcttcatcccagtattgttcaa

SEQ ID NO: 3448344 - DNA, 25 bp, Homo sapien
tagtgtgggtcgacagaaaaacgac

SEQ ID NO: 3448345 - DNA, 25 bp, Homo sapien
tatgaaccgcctcctttcaaagtaa

SEQ ID NO: 3448346 - DNA, 25 bp, Homo sapien
taatagtgcaacctcctgtgtaaag

SEQ ID NO: 3448347 - DNA, 25 bp, Homo sapien
taaagtgtacagaaccgggtgactg

SEQ ID NO: 3448348 - DNA, 25 bp, Homo sapien
gataatcttcataacatgatggatg

SEQ ID NO: 3448349 - DNA, 25 bp, Homo sapien
aatcttcataacatgatggatgata

SEQ ID NO: 3448350 - DNA, 25 bp, Homo sapien
tgataatcttcataacatgatggat

SEQ ID NO: 3448351 - DNA, 25 bp, Homo sapien
taatcttcataacatgatggatgat

SEQ ID NO: 3448352 - DNA, 25 bp, Homo sapien
aataacaatattgctctgatgcaaa

SEQ ID NO: 3448353 - DNA, 25 bp, Homo sapien
taacaatattgctctgatgcaaaaa

SEQ ID NO: 3448354 - DNA, 25 bp, Homo sapien
gtcaatctggcaccagtttttactg

SEQ ID NO: 3448355 - DNA, 25 bp, Homo sapien
tactgaacaacctaaatgctatatc

SEQ ID NO: 3448356 - DNA, 25 bp, Homo sapien
gaaaggccctatgagtactgatgaa

SEQ ID NO: 3448357 - DNA, 25 bp, Homo sapien
tatatcctgggacttgttactaccc

SEQ ID NO: 3448358 - DNA, 25 bp, Homo sapien
gcacgttcaatatgtactcagcagt

SEQ ID NO: 3448359 - DNA, 25 bp, Homo sapien
acagagctcactcttgtcgcacagg

SEQ ID NO: 3448360 - DNA, 25 bp, Homo sapien
gggttcctgcaattcgtttttgaca

SEQ ID NO: 3448361 - DNA, 25 bp, Homo sapien
caagctggtggtgtatcaattcgtt

SEQ ID NO: 3448362 - DNA, 25 bp, Homo sapien
tcttccttaactttgggactgtcac

SEQ ID NO: 3448363 - DNA, 25 bp, Homo sapien
ggtgttgctatgctttcctctgtac

SEQ ID NO: 3448364 - DNA, 25 bp, Homo sapien
attcttcaccttctagatccaacag

SEQ ID NO: 3448365 - DNA, 25 bp, Homo sapien
taaccaaatgatagctgaaggccct

SEQ ID NO: 3448366 - DNA, 25 bp, Homo sapien
cagccagacaatttatatagatatg

SEQ ID NO: 3448367 - DNA, 25 bp, Homo sapien
gaactttcacacaacaagcacctga

SEQ ID NO: 3448368 - DNA, 25 bp, Homo sapien
ggatggttctctatacctggagatg

SEQ ID NO: 3448369 - DNA, 25 bp, Homo sapien
tacagaaactatttgatggtgtgca

SEQ ID NO: 3448370 - DNA, 25 bp, Homo sapien
aaaagccctacggtgctctctcgga

SEQ ID NO: 3448371 - DNA, 25 bp, Homo sapien
cttctttaatcagtgggaggctact

SEQ ID NO: 3448372 - DNA, 25 bp, Homo sapien
gactaacctgtctcagagtgcctgg

SEQ ID NO: 3448373 - DNA, 25 bp, Homo sapien
tatatgcctatctccaataaatggc

SEQ ID NO: 3448374 - DNA, 25 bp, Homo sapien
gtgcctggctcatagcaagtaccat

SEQ ID NO: 3448375 - DNA, 25 bp, Homo sapien
gaaaagactaacctgtctcagagtg

SEQ ID NO: 3448376 - DNA, 25 bp, Homo sapien
cttggaaacgagtacacttccgacg

SEQ ID NO: 3448377 - DNA, 25 bp, Homo sapien
tggaaacgagtacacttccgacgtg

SEQ ID NO: 3448378 - DNA, 25 bp, Homo sapien
ctcggagtctctttccagcctcccg

SEQ ID NO: 3448379 - DNA, 25 bp, Homo sapien
tcggagtctctttccagcctcccga

SEQ ID NO: 3448380 - DNA, 25 bp, Homo sapien
cagcctcccgactccagccacttgg

SEQ ID NO: 3448381 - DNA, 25 bp, Homo sapien
ttccagcctcccgactccagccact

SEQ ID NO: 3448382 - DNA, 25 bp, Homo sapien
cgtttatcctccacacgtggtggct

SEQ ID NO: 3448383 - DNA, 25 bp, Homo sapien
gaatggccgtgtagaccgtttatcc

SEQ ID NO: 3448384 - DNA, 25 bp, Homo sapien
tactccctgcgaatcgccgtagcgg

SEQ ID NO: 3448385 - DNA, 25 bp, Homo sapien
agtgcggcggccaccgtcttcgtct

SEQ ID NO: 3448386 - DNA, 25 bp, Homo sapien
agaagccggcgtctgcacttaggct

SEQ ID NO: 3448387 - DNA, 25 bp, Homo sapien
tctcaagtcactgcgggagaagccg

SEQ ID NO: 3448388 - DNA, 25 bp, Homo sapien
tgactgtggccactatctcccctaa

SEQ ID NO: 3448389 - DNA, 25 bp, Homo sapien
taactctctccctagagacgctgcg

SEQ ID NO: 3448390 - DNA, 25 bp, Homo sapien
actgaagcggcgactgcgatcgtca

SEQ ID NO: 3448391 - DNA, 25 bp, Homo sapien
cactaaaattcacgtcgctgctgca

SEQ ID NO: 3448392 - DNA, 25 bp, Homo sapien
tcccaaaagccactgaagcggtagc

SEQ ID NO: 3448393 - DNA, 25 bp, Homo sapien
tcgcgggtcccgaatgtcactgact

SEQ ID NO: 3448394 - DNA, 25 bp, Homo sapien
ggcctgaattggccaccccgggcat

SEQ ID NO: 3448395 - DNA, 25 bp, Homo sapien
tttgcagtctccctagaggaagtgg

SEQ ID NO: 3448396 - DNA, 25 bp, Homo sapien
gggtttgcagtctccctagaggaag

SEQ ID NO: 3448397 - DNA, 25 bp, Homo sapien
tgcagtctccctagaggaagtggag

SEQ ID NO: 3448398 - DNA, 25 bp, Homo sapien
gctttacatctccagctcgtactgc

SEQ ID NO: 3448399 - DNA, 25 bp, Homo sapien
catcatgtatgctgccaaaatgcac

SEQ ID NO: 3448400 - DNA, 25 bp, Homo sapien
tgtatgctgccaaaatgcaccttct

SEQ ID NO: 3448401 - DNA, 25 bp, Homo sapien
ctcgtactgcatcatgtatgctgcc

SEQ ID NO: 3448402 - DNA, 25 bp, Homo sapien
acttatggagaacatcaagttcatt

SEQ ID NO: 3448403 - DNA, 25 bp, Homo sapien
gggtaaacttatggagaacatcaag

SEQ ID NO: 3448404 - DNA, 25 bp, Homo sapien
agttcattaatgctggctccacgta

SEQ ID NO: 3448405 - DNA, 25 bp, Homo sapien
ttccagaatgtgctgcccaatgtaa

SEQ ID NO: 3448406 - DNA, 25 bp, Homo sapien
gagggtacatgtgccaagttcgttc

SEQ ID NO: 3448407 - DNA, 25 bp, Homo sapien
acccatctcccaaatagtgaccagg

SEQ ID NO: 3448408 - DNA, 25 bp, Homo sapien
tagtgaccaggttaccaaacaggta

SEQ ID NO: 3448409 - DNA, 25 bp, Homo sapien
gccaagttcgttcgtttcatggata

SEQ ID NO: 3448410 - DNA, 25 bp, Homo sapien
gctgtccaacctctcgttgttacgt

SEQ ID NO: 3448411 - DNA, 25 bp, Homo sapien
tcgttgttacgtgtgtgatatcagc

SEQ ID NO: 3448412 - DNA, 25 bp, Homo sapien
tgatatcagctccatgccagagcag

SEQ ID NO: 3448413 - DNA, 25 bp, Homo sapien
cgtgtgtgatatcagctccatgcca

SEQ ID NO: 3448414 - DNA, 25 bp, Homo sapien
cagccccgcgctgccaacctccaag

SEQ ID NO: 3448415 - DNA, 25 bp, Homo sapien
gatcgctcggtttgctagcctgcag

SEQ ID NO: 3448416 - DNA, 25 bp, Homo sapien
aacctccaagcaactcccagcagca

SEQ ID NO: 3448417 - DNA, 25 bp, Homo sapien
agcacgcactcccacccactttggc

SEQ ID NO: 3448418 - DNA, 25 bp, Homo sapien
ttggctatgtccttgggcagcacga

SEQ ID NO: 3448419 - DNA, 25 bp, Homo sapien
aaactcctcgtcgtcgtatttgtct

SEQ ID NO: 3448420 - DNA, 25 bp, Homo sapien
cacgacatgtcgatactcaaactcc

SEQ ID NO: 3448421 - DNA, 25 bp, Homo sapien
cgtcgtcgtatttgtctgaatagta

SEQ ID NO: 3448422 - DNA, 25 bp, Homo sapien
ggttcatggatcatataatagaccc

SEQ ID NO: 3448423 - DNA, 25 bp, Homo sapien
caatatgtgaggttctggttcatgg

SEQ ID NO: 3448424 - DNA, 25 bp, Homo sapien
ttgggtagtgggcaccggaacagca

SEQ ID NO: 3448425 - DNA, 25 bp, Homo sapien
agtgggcaccggaacagcaatatgt

SEQ ID NO: 3448426 - DNA, 25 bp, Homo sapien
caagtgtattctggatacagacaac

SEQ ID NO: 3448427 - DNA, 25 bp, Homo sapien
ttctcaagttgccatacatacaaca

SEQ ID NO: 3448428 - DNA, 25 bp, Homo sapien
cagtacattgaacatcttctaaata

SEQ ID NO: 3448429 - DNA, 25 bp, Homo sapien
tctcaagttgccatacatacaacac

SEQ ID NO: 3448430 - DNA, 25 bp, Homo sapien
tgaaagaatgtccatgagttgcagc

SEQ ID NO: 3448431 - DNA, 25 bp, Homo sapien
atccccggtcatcctgggctgtcag

SEQ ID NO: 3448432 - DNA, 25 bp, Homo sapien
ctccacttcggagcattatttgtaa

SEQ ID NO: 3448433 - DNA, 25 bp, Homo sapien
gagttgcagcaagatgtaaaggagt

SEQ ID NO: 3448434 - DNA, 25 bp, Homo sapien
ccccatttaacaagaagttgcaagc

SEQ ID NO: 3448435 - DNA, 25 bp, Homo sapien
attgtagtccacatcttctatgcta

SEQ ID NO: 3448436 - DNA, 25 bp, Homo sapien
tcttctatgctacaaccccatttaa

SEQ ID NO: 3448437 - DNA, 25 bp, Homo sapien
agccaagccgcccatgaaaagctgc

SEQ ID NO: 3448438 - DNA, 25 bp, Homo sapien
gcagcgccgagagaggggctttttg

SEQ ID NO: 3448439 - DNA, 25 bp, Homo sapien
agcgccgagagaggggctttttgtt

SEQ ID NO: 3448440 - DNA, 25 bp, Homo sapien
cagcgccgagagaggggctttttgt

SEQ ID NO: 3448441 - DNA, 25 bp, Homo sapien
gcatcaagattggtccttgaacctt

SEQ ID NO: 3448442 - DNA, 25 bp, Homo sapien
ttggggttggtgtgactccgatgga

SEQ ID NO: 3448443 - DNA, 25 bp, Homo sapien
gtgtgactccgatggacagctgggc

SEQ ID NO: 3448444 - DNA, 25 bp, Homo sapien
tgtgactccgatggacagctgggca

SEQ ID NO: 3448445 - DNA, 25 bp, Homo sapien
gttggtgtgactccgatggacagct

SEQ ID NO: 3448446 - DNA, 25 bp, Homo sapien
ataaacgtaactgacaaagggcttg

SEQ ID NO: 3448447 - DNA, 25 bp, Homo sapien
gagcaagccatgaagtagaaagatt

SEQ ID NO: 3448448 - DNA, 25 bp, Homo sapien
tagcctttaaacgtacgaaatgatg

SEQ ID NO: 3448449 - DNA, 25 bp, Homo sapien
tgaaaaagcgaaggaagcctaacac

SEQ ID NO: 3448450 - DNA, 25 bp, Homo sapien
gttgcagcaagccgagactgcacca

SEQ ID NO: 3448451 - DNA, 25 bp, Homo sapien
ccagcctgtgcgacagagcaagact

SEQ ID NO: 3448452 - DNA, 25 bp, Homo sapien
gaggttgcagcaagccgagactgca

SEQ ID NO: 3448453 - DNA, 25 bp, Homo sapien
ctgcactccagcctgtgcgacagag

SEQ ID NO: 3448454 - DNA, 25 bp, Homo sapien
tactgtcagtgccacaagatggatg

SEQ ID NO: 3448455 - DNA, 25 bp, Homo sapien
aattaaaacctctggccaagcgcgg

SEQ ID NO: 3448456 - DNA, 25 bp, Homo sapien
gattgattggcgattaccaaaggcc

SEQ ID NO: 3448457 - DNA, 25 bp, Homo sapien
ttatgagagcgatttgaacacaagc

SEQ ID NO: 3448458 - DNA, 25 bp, Homo sapien
gcttttaaaacttgcgtcgcactgc

SEQ ID NO: 3448459 - DNA, 25 bp, Homo sapien
ttctgcttgaagaacctctgggcca

SEQ ID NO: 3448460 - DNA, 25 bp, Homo sapien
tctactgactaggaatttgaaacag

SEQ ID NO: 3448461 - DNA, 25 bp, Homo sapien
tttgaaacagtgaaggtggccttcc

SEQ ID NO: 3448462 - DNA, 25 bp, Homo sapien
aatattgattactccatcttccact

SEQ ID NO: 3448463 - DNA, 25 bp, Homo sapien
ctttatgcataggagttgatccatt

SEQ ID NO: 3448464 - DNA, 25 bp, Homo sapien
gatccattatcagcacgctcattaa

SEQ ID NO: 3448465 - DNA, 25 bp, Homo sapien
cagcacgctcattaatattgattac

SEQ ID NO: 3448466 - DNA, 25 bp, Homo sapien
aacactctatgtggccttgtccagc

SEQ ID NO: 3448467 - DNA, 25 bp, Homo sapien
ctttgccacatcactgggtctctcc

SEQ ID NO: 3448468 - DNA, 25 bp, Homo sapien
ttttaattaaccactgcaaacactc

SEQ ID NO: 3448469 - DNA, 25 bp, Homo sapien
ggtaatattactgtctgctcccatt

SEQ ID NO: 3448470 - DNA, 25 bp, Homo sapien
tccttggcatcagtgcttccctcaa

SEQ ID NO: 3448471 - DNA, 25 bp, Homo sapien
ttctggcatctgttttatccaagtc

SEQ ID NO: 3448472 - DNA, 25 bp, Homo sapien
taacagcttcactgctgccaaatgg

SEQ ID NO: 3448473 - DNA, 25 bp, Homo sapien
gtcactcagacataaatcatccttg

SEQ ID NO: 3448474 - DNA, 25 bp, Homo sapien
ttttcagactcaagctgttctttct

SEQ ID NO: 3448475 - DNA, 25 bp, Homo sapien
gcctcccaagtgtttatagttgctc

SEQ ID NO: 3448476 - DNA, 25 bp, Homo sapien
tccaggaggtgtctcaattctacaa

SEQ ID NO: 3448477 - DNA, 25 bp, Homo sapien
atcttcttctgttatgcctcccaag

SEQ ID NO: 3448478 - DNA, 25 bp, Homo sapien
aatttttctctacgtagtcgttcat

SEQ ID NO: 3448479 - DNA, 25 bp, Homo sapien
gtcgttcatactccagctggccctg

SEQ ID NO: 3448480 - DNA, 25 bp, Homo sapien
tctctacgtagtcgttcatactcca

SEQ ID NO: 3448481 - DNA, 25 bp, Homo sapien
tacgtagtcgttcatactccagctg

SEQ ID NO: 3448482 - DNA, 25 bp, Homo sapien
gctcgatattcatcaagctgacatt

SEQ ID NO: 3448483 - DNA, 25 bp, Homo sapien
tgagttgatcaacttctgctcgata

SEQ ID NO: 3448484 - DNA, 25 bp, Homo sapien
agccacaaagtttgggacttgaatt

SEQ ID NO: 3448485 - DNA, 25 bp, Homo sapien
tgctcgatattcatcaagctgacat

SEQ ID NO: 3448486 - DNA, 25 bp, Homo sapien
gaaagtataagttatcatctccagt

SEQ ID NO: 3448487 - DNA, 25 bp, Homo sapien
caaagcttgtactcttggccactct

SEQ ID NO: 3448488 - DNA, 25 bp, Homo sapien
ggattcaagtccaaagagccccagc

SEQ ID NO: 3448489 - DNA, 25 bp, Homo sapien
taatcctgtcatcagctctagaaag

SEQ ID NO: 3448490 - DNA, 25 bp, Homo sapien
tggtgagacaccaaaacccagagaa

SEQ ID NO: 3448491 - DNA, 25 bp, Homo sapien
gatcagatttgaggtgacacaagcc

SEQ ID NO: 3448492 - DNA, 25 bp, Homo sapien
tcttggaaaatcaaccactggtgag

SEQ ID NO: 3448493 - DNA, 25 bp, Homo sapien
taatacttatgaactaggctgctgt

SEQ ID NO: 3448494 - DNA, 25 bp, Homo sapien
ttgactcacaagaagcgctgtcttc

SEQ ID NO: 3448495 - DNA, 25 bp, Homo sapien
gtttgactcacaagaagcgctgtct

SEQ ID NO: 3448496 - DNA, 25 bp, Homo sapien
ttgtttgactcacaagaagcgctgt

SEQ ID NO: 3448497 - DNA, 25 bp, Homo sapien
tgtttgactcacaagaagcgctgtc

SEQ ID NO: 3448498 - DNA, 25 bp, Homo sapien
gagaaaaatctagcaggtcaattta

SEQ ID NO: 3448499 - DNA, 25 bp, Homo sapien
aatctagcaggtcaatttagttatt

SEQ ID NO: 3448500 - DNA, 25 bp, Homo sapien
gaaaaatctagcaggtcaatttagt

SEQ ID NO: 3448501 - DNA, 25 bp, Homo sapien
aagagaaaaatctagcaggtcaatt

SEQ ID NO: 3448502 - DNA, 25 bp, Homo sapien
tataacatttctgccatcagaattg

SEQ ID NO: 3448503 - DNA, 25 bp, Homo sapien
tcagaattggaacagaagcatatca

SEQ ID NO: 3448504 - DNA, 25 bp, Homo sapien
gatagtttgtatagactcacattta

SEQ ID NO: 3448505 - DNA, 25 bp, Homo sapien
gaacagaagcatatcagagtaattc

SEQ ID NO: 3448506 - DNA, 25 bp, Homo sapien
gattactataccagctaatatttta

SEQ ID NO: 3448507 - DNA, 25 bp, Homo sapien
aatataattctattgtggaaccata

SEQ ID NO: 3448508 - DNA, 25 bp, Homo sapien
cataaatctcttgacttgcctgtgt

SEQ ID NO: 3448509 - DNA, 25 bp, Homo sapien
attttaaagcttatgtgaatacttg

SEQ ID NO: 3448510 - DNA, 25 bp, Homo sapien
tagggctaatatgtcagctccatgg

SEQ ID NO: 3448511 - DNA, 25 bp, Homo sapien
gaacctctgccacagggtgtgtatg

SEQ ID NO: 3448512 - DNA, 25 bp, Homo sapien
ggcattatagccatgaccctaaggt

SEQ ID NO: 3448513 - DNA, 25 bp, Homo sapien
aagttagttcttatcctgcgcggcc

SEQ ID NO: 3448514 - DNA, 25 bp, Homo sapien
cagcatgctagtccctgtgtgcaca

SEQ ID NO: 3448515 - DNA, 25 bp, Homo sapien
gaaggaagctccagtagcataacac

SEQ ID NO: 3448516 - DNA, 25 bp, Homo sapien
tcagttaaccaatatgactgcctgc

SEQ ID NO: 3448517 - DNA, 25 bp, Homo sapien
tgtgcacagagatgaacatggtttc

SEQ ID NO: 3448518 - DNA, 25 bp, Homo sapien
aatatttgatactcaaaaaccagtt

SEQ ID NO: 3448519 - DNA, 25 bp, Homo sapien
tgtgtgctttagtgcaaattacaac

SEQ ID NO: 3448520 - DNA, 25 bp, Homo sapien
accagtttatccctgcttcttaatg

SEQ ID NO: 3448521 - DNA, 25 bp, Homo sapien
tgtagagttgctaaatattgagctc

SEQ ID NO: 3448522 - DNA, 25 bp, Homo sapien
tgaacagttgtgtaaatcatacagg

SEQ ID NO: 3448523 - DNA, 25 bp, Homo sapien
taactttcctgataaccattgcata

SEQ ID NO: 3448524 - DNA, 25 bp, Homo sapien
taccatatagttggagattgatttc

SEQ ID NO: 3448525 - DNA, 25 bp, Homo sapien
gtaaaccattccctagcctacatat

SEQ ID NO: 3448526 - DNA, 25 bp, Homo sapien
tcttagaacaccaaaccgggagaga

SEQ ID NO: 3448527 - DNA, 25 bp, Homo sapien
actacacaagattattcgaagtgta

SEQ ID NO: 3448528 - DNA, 25 bp, Homo sapien
gagatttactttgaacattgtcagt

SEQ ID NO: 3448529 - DNA, 25 bp, Homo sapien
caagattattcgaagtgtatacgga

SEQ ID NO: 3448530 - DNA, 25 bp, Homo sapien
tgccaggtacgctgagccattcggt

SEQ ID NO: 3448531 - DNA, 25 bp, Homo sapien
cacaaaataggcgaataggcacctc

SEQ ID NO: 3448532 - DNA, 25 bp, Homo sapien
tcgtcaggagccaacgtaaggtaat

SEQ ID NO: 3448533 - DNA, 25 bp, Homo sapien
caagaggctagtaatctcgtcagga

SEQ ID NO: 3448534 - DNA, 25 bp, Homo sapien
tgctgtgcggctaaatgcgactcca

SEQ ID NO: 3448535 - DNA, 25 bp, Homo sapien
gagccagctgttggactatgcccca

SEQ ID NO: 3448536 - DNA, 25 bp, Homo sapien
caggcgccggaaggttctctgacaa

SEQ ID NO: 3448537 - DNA, 25 bp, Homo sapien
gacaagatctcgctttcctagggcg

SEQ ID NO: 3448538 - DNA, 25 bp, Homo sapien
gactgaaatagttggtcctcccgtg

SEQ ID NO: 3448539 - DNA, 25 bp, Homo sapien
aaaagtgagcggcttgctggactac

SEQ ID NO: 3448540 - DNA, 25 bp, Homo sapien
tcccgtgcaccagagggtgaagcag

SEQ ID NO: 3448541 - DNA, 25 bp, Homo sapien
gaagcagcaggatgtgacgcctcac

SEQ ID NO: 3448542 - DNA, 25 bp, Homo sapien
gtctaaaggcacatttctgccccat

SEQ ID NO: 3448543 - DNA, 25 bp, Homo sapien
tatgtctaaaggcacatttctgccc

SEQ ID NO: 3448544 - DNA, 25 bp, Homo sapien
tcaggtatgtctaaaggcacatttc

SEQ ID NO: 3448545 - DNA, 25 bp, Homo sapien
cttcaggtatgtctaaaggcacatt

SEQ ID NO: 3448546 - DNA, 25 bp, Homo sapien
actgactctagcctgttccttcata

SEQ ID NO: 3448547 - DNA, 25 bp, Homo sapien
ctgactctagcctgttccttcataa

SEQ ID NO: 3448548 - DNA, 25 bp, Homo sapien
cacattcaggctgacttccacgagc

SEQ ID NO: 3448549 - DNA, 25 bp, Homo sapien
attcaggctgacttccacgagcaca

SEQ ID NO: 3448550 - DNA, 25 bp, Homo sapien
gttttgggaaggcagctcatctctg

SEQ ID NO: 3448551 - DNA, 25 bp, Homo sapien
ctggagaggaaggaaagtcagacat

SEQ ID NO: 3448552 - DNA, 25 bp, Homo sapien
cagggacaatggtagttaactgagt

SEQ ID NO: 3448553 - DNA, 25 bp, Homo sapien
gacaatggtagttaactgagtcagt

SEQ ID NO: 3448554 - DNA, 25 bp, Homo sapien
cccagggacaatggtagttaactga

SEQ ID NO: 3448555 - DNA, 25 bp, Homo sapien
ctgagtcagtccatctgattccctc

SEQ ID NO: 3448556 - DNA, 25 bp, Homo sapien
ggctaaagtcaaggtctgtgtttct

SEQ ID NO: 3448557 - DNA, 25 bp, Homo sapien
tcctcgggtccacatggataatcca

SEQ ID NO: 3448558 - DNA, 25 bp, Homo sapien
aggtaatctcctcatatcaagagtc

SEQ ID NO: 3448559 - DNA, 25 bp, Homo sapien
tctttccctcatagatatcctcggg

SEQ ID NO: 3448560 - DNA, 25 bp, Homo sapien
ctgtaggaggcagatagggacacag

SEQ ID NO: 3448561 - DNA, 25 bp, Homo sapien
ccagtgacatcaatccagtgatcct

SEQ ID NO: 3448562 - DNA, 25 bp, Homo sapien
ccagcagtagagagttctgcagaca

SEQ ID NO: 3448563 - DNA, 25 bp, Homo sapien
cttccagtgacatcaatccagtgat

SEQ ID NO: 3448564 - DNA, 25 bp, Homo sapien
agggtcccccagcagtagagagttc

SEQ ID NO: 3448565 - DNA, 25 bp, Homo sapien
taagaatggtacacaaatccaccac

SEQ ID NO: 3448566 - DNA, 25 bp, Homo sapien
gaatggtacacaaatccaccaccat

SEQ ID NO: 3448567 - DNA, 25 bp, Homo sapien
tgtgaataagaatggtacacaaatc

SEQ ID NO: 3448568 - DNA, 25 bp, Homo sapien
tggtacacaaatccaccaccatgag

SEQ ID NO: 3448569 - DNA, 25 bp, Homo sapien
catcattgacaatcatgtcgatgtc

SEQ ID NO: 3448570 - DNA, 25 bp, Homo sapien
caatcatgtcgatgtcactcaacaa

SEQ ID NO: 3448571 - DNA, 25 bp, Homo sapien
tcatcatcattgacaatcatgtcga

SEQ ID NO: 3448572 - DNA, 25 bp, Homo sapien
tgacaatcatgtcgatgtcactcaa

SEQ ID NO: 3448573 - DNA, 25 bp, Homo sapien
ctaaagaagagatacatgcaccttg

SEQ ID NO: 3448574 - DNA, 25 bp, Homo sapien
aagaagagatacatgcaccttgggg

SEQ ID NO: 3448575 - DNA, 25 bp, Homo sapien
taaagaagagatacatgcaccttgg

SEQ ID NO: 3448576 - DNA, 25 bp, Homo sapien
aaagaagagatacatgcaccttggg

SEQ ID NO: 3448577 - DNA, 25 bp, Homo sapien
catcttgatgatcagatgaaggatg

SEQ ID NO: 3448578 - DNA, 25 bp, Homo sapien
tcatcttgatgatcagatgaaggat

SEQ ID NO: 3448579 - DNA, 25 bp, Homo sapien
tcttgatgatcagatgaaggatgag

SEQ ID NO: 3448580 - DNA, 25 bp, Homo sapien
atcttgatgatcagatgaaggatga

SEQ ID NO: 3448581 - DNA, 25 bp, Homo sapien
aaggcatgcactcatactctccagg

SEQ ID NO: 3448582 - DNA, 25 bp, Homo sapien
gaaggcatgcactcatactctccag

SEQ ID NO: 3448583 - DNA, 25 bp, Homo sapien
gaatccagcatcctgatctgtcttc

SEQ ID NO: 3448584 - DNA, 25 bp, Homo sapien
aagatttgacgcagtcttgtgctag

SEQ ID NO: 3448585 - DNA, 25 bp, Homo sapien
aagataccgtgaagatttgacgcag

SEQ ID NO: 3448586 - DNA, 25 bp, Homo sapien
tcttcttaatgctggtgaagctcat

SEQ ID NO: 3448587 - DNA, 25 bp, Homo sapien
gatttgagtcgtcagcataactaga

SEQ ID NO: 3448588 - DNA, 25 bp, Homo sapien
ctgatttgagtcgtcagcataacta

SEQ ID NO: 3448589 - DNA, 25 bp, Homo sapien
cagaacatcatgaccttcaagttat

SEQ ID NO: 3448590 - DNA, 25 bp, Homo sapien
agtcgtcagcataactagaaaacag

SEQ ID NO: 3448591 - DNA, 25 bp, Homo sapien
tagggccacccagaagtttcagaat

SEQ ID NO: 3448592 - DNA, 25 bp, Homo sapien
cagttattaaatgcacccgttcctt

SEQ ID NO: 3448593 - DNA, 25 bp, Homo sapien
cagtatatgcgctttcagtgctcac

SEQ ID NO: 3448594 - DNA, 25 bp, Homo sapien
tgcaaggatgaatgatagggccacc

SEQ ID NO: 3448595 - DNA, 25 bp, Homo sapien
taggtggctgggttattgtcaccca

SEQ ID NO: 3448596 - DNA, 25 bp, Homo sapien
ggcagcatcaggataccaggtaact

SEQ ID NO: 3448597 - DNA, 25 bp, Homo sapien
agtaacatggttgctggaaagatcc

SEQ ID NO: 3448598 - DNA, 25 bp, Homo sapien
tctgggaagtagacaactctatccc

SEQ ID NO: 3448599 - DNA, 25 bp, Homo sapien
cagtggctggtagcattttttcatt

SEQ ID NO: 3448600 - DNA, 25 bp, Homo sapien
cctttgtttatgcagcttagtttgg

SEQ ID NO: 3448601 - DNA, 25 bp, Homo sapien
gcctgttggtgacaaaaatccctca

SEQ ID NO: 3448602 - DNA, 25 bp, Homo sapien
ggcaggcctgttggtgacaaaaatc

SEQ ID NO: 3448603 - DNA, 25 bp, Homo sapien
tcagttcctctctgaccttaattat

SEQ ID NO: 3448604 - DNA, 25 bp, Homo sapien
ttcagttcctctctgaccttaatta

SEQ ID NO: 3448605 - DNA, 25 bp, Homo sapien
cctatggaagtatatgaggctctgt

SEQ ID NO: 3448606 - DNA, 25 bp, Homo sapien
tcatcaccccagatgcatacttcag

SEQ ID NO: 3448607 - DNA, 25 bp, Homo sapien
gattgggcaattcctgaggcttttg

SEQ ID NO: 3448608 - DNA, 25 bp, Homo sapien
gaggcttttgctctcatgatccagc

SEQ ID NO: 3448609 - DNA, 25 bp, Homo sapien
tcagccactgtttttggccctggta

SEQ ID NO: 3448610 - DNA, 25 bp, Homo sapien
cagccactgtttttggccctggtag

SEQ ID NO: 3448611 - DNA, 25 bp, Homo sapien
cgtcttgtttagcatacagagcctc

SEQ ID NO: 3448612 - DNA, 25 bp, Homo sapien
tgtttggatactgatactgacagag

SEQ ID NO: 3448613 - DNA, 25 bp, Homo sapien
tgtttagcatacagagcctctctct

SEQ ID NO: 3448614 - DNA, 25 bp, Homo sapien
gatactgatactgacagagaaggaa

SEQ ID NO: 3448615 - DNA, 25 bp, Homo sapien
gaaggttcggagagtttctactaca

SEQ ID NO: 3448616 - DNA, 25 bp, Homo sapien
catgaaggttcggagagtttctact

SEQ ID NO: 3448617 - DNA, 25 bp, Homo sapien
aggcagtaacatgaaggttcggaga

SEQ ID NO: 3448618 - DNA, 25 bp, Homo sapien
taacatgaaggttcggagagtttct

SEQ ID NO: 3448619 - DNA, 25 bp, Homo sapien
agaaaggatttgattggtgtagtta

SEQ ID NO: 3448620 - DNA, 25 bp, Homo sapien
cagaaaggatttgattggtgtagtt

SEQ ID NO: 3448621 - DNA, 25 bp, Homo sapien
acagaaaggatttgattggtgtagt

SEQ ID NO: 3448622 - DNA, 25 bp, Homo sapien
tctggacaccaggtggttacccaat

SEQ ID NO: 3448623 - DNA, 25 bp, Homo sapien
tgagagcaagaaattgtcatccaaa

SEQ ID NO: 3448624 - DNA, 25 bp, Homo sapien
gagcaagaaattgtcatccaaatgg

SEQ ID NO: 3448625 - DNA, 25 bp, Homo sapien
ccaatgggtaggcatgggttgttac

SEQ ID NO: 3448626 - DNA, 25 bp, Homo sapien
agtcatggcaccaaatttcactcgt

SEQ ID NO: 3448627 - DNA, 25 bp, Homo sapien
tcatggcaccaaatttcactcgtgt

SEQ ID NO: 3448628 - DNA, 25 bp, Homo sapien
aagtcccccgatctgagtcatggca

SEQ ID NO: 3448629 - DNA, 25 bp, Homo sapien
gggaagtcccccgatctgagtcatg

SEQ ID NO: 3448630 - DNA, 25 bp, Homo sapien
gaagcttctgaggtgatcggggagc

SEQ ID NO: 3448631 - DNA, 25 bp, Homo sapien
cctctgtaatgattaagaaggggat

SEQ ID NO: 3448632 - DNA, 25 bp, Homo sapien
aagcttctgaggtgatcggggagca

SEQ ID NO: 3448633 - DNA, 25 bp, Homo sapien
tgtaatgattaagaaggggatggac

SEQ ID NO: 3448634 - DNA, 25 bp, Homo sapien
cctgggtgggatcgccaaattggtt

SEQ ID NO: 3448635 - DNA, 25 bp, Homo sapien
gattcagactcctacagccagaggc

SEQ ID NO: 3448636 - DNA, 25 bp, Homo sapien
taaggcctagaaaagtgggagtgct

SEQ ID NO: 3448637 - DNA, 25 bp, Homo sapien
taaggataagttggcaggtaaggcc

SEQ ID NO: 3448638 - DNA, 25 bp, Homo sapien
agcagtgtgaggaatgactttgagg

SEQ ID NO: 3448639 - DNA, 25 bp, Homo sapien
tgaggaatgactttgaggaggaaga

SEQ ID NO: 3448640 - DNA, 25 bp, Homo sapien
tatgtgcgttttagaacgctcactg

SEQ ID NO: 3448641 - DNA, 25 bp, Homo sapien
aaaatcatatgtgcgttttagaacg

SEQ ID NO: 3448642 - DNA, 25 bp, Homo sapien
gagatgatcttgacattgaaaccca

SEQ ID NO: 3448643 - DNA, 25 bp, Homo sapien
tcagaaatgtggctcagcactttcc

SEQ ID NO: 3448644 - DNA, 25 bp, Homo sapien
gtccagcatttcagacaaaggtcaa

SEQ ID NO: 3448645 - DNA, 25 bp, Homo sapien
gatcaatgcacagggataagttact

SEQ ID NO: 3448646 - DNA, 25 bp, Homo sapien
tctgatcatcttctcccgtacatcc

SEQ ID NO: 3448647 - DNA, 25 bp, Homo sapien
tccttcccaccatctctgagttgtt

SEQ ID NO: 3448648 - DNA, 25 bp, Homo sapien
gattcagacagcaagtccatgcact

SEQ ID NO: 3448649 - DNA, 25 bp, Homo sapien
ttctcctataatccttctctattcc

SEQ ID NO: 3448650 - DNA, 25 bp, Homo sapien
gatgaacctctgacgggctttctgc

SEQ ID NO: 3448651 - DNA, 25 bp, Homo sapien
caaagtgccaggtgtagggatgaac

SEQ ID NO: 3448652 - DNA, 25 bp, Homo sapien
cacaaactgtatgaagccatgaagg

SEQ ID NO: 3448653 - DNA, 25 bp, Homo sapien
ggctttctgcccaagagatgagatg

SEQ ID NO: 3448654 - DNA, 25 bp, Homo sapien
ggaggatattaggtccctgcagaac

SEQ ID NO: 3448655 - DNA, 25 bp, Homo sapien
ggcttcaatccaatgtgggaccaag

SEQ ID NO: 3448656 - DNA, 25 bp, Homo sapien
aacagggaccagtgactacaaatca

SEQ ID NO: 3448657 - DNA, 25 bp, Homo sapien
atatcctagggcctaccatggagga

SEQ ID NO: 3448658 - DNA, 25 bp, Homo sapien
catccccggattaggtgacgacggt

SEQ ID NO: 3448659 - DNA, 25 bp, Homo sapien
gcacggtctgtcatggtagtattca

SEQ ID NO: 3448660 - DNA, 25 bp, Homo sapien
tctctggggacttccatgcaggaca

SEQ ID NO: 3448661 - DNA, 25 bp, Homo sapien
tgacgacggttatggaacaaagact

SEQ ID NO: 3448662 - DNA, 25 bp, Homo sapien
tagatagagctgaaaatgtgacact

SEQ ID NO: 3448663 - DNA, 25 bp, Homo sapien
gtcatacagccaaattccaaagtct

SEQ ID NO: 3448664 - DNA, 25 bp, Homo sapien
ctgagataactgcagagaaatgcaa

SEQ ID NO: 3448665 - DNA, 25 bp, Homo sapien
tacaagcaaatagctaagccacctc

SEQ ID NO: 3448666 - DNA, 25 bp, Homo sapien
atcccagcttgccttccactggatg

SEQ ID NO: 3448667 - DNA, 25 bp, Homo sapien
tccactggatgctgacttttgtagc

SEQ ID NO: 3448668 - DNA, 25 bp, Homo sapien
ccactggatgctgacttttgtagca

SEQ ID NO: 3448669 - DNA, 25 bp, Homo sapien
tcccagcttgccttccactggatgc

SEQ ID NO: 3448670 - DNA, 25 bp, Homo sapien
cctctgagtcctggatgggtgggtt

SEQ ID NO: 3448671 - DNA, 25 bp, Homo sapien
ggtccatgggatgcagcatgcacag

SEQ ID NO: 3448672 - DNA, 25 bp, Homo sapien
cacaggtagagcacaagagacaggg

SEQ ID NO: 3448673 - DNA, 25 bp, Homo sapien
gagcaggcactaaatagctcaccac

SEQ ID NO: 3448674 - DNA, 25 bp, Homo sapien
ttttttatgtccagcaccccaccac

SEQ ID NO: 3448675 - DNA, 25 bp, Homo sapien
cttttttatgtccagcaccccacca

SEQ ID NO: 3448676 - DNA, 25 bp, Homo sapien
tttgatcccataccaatctctggca

SEQ ID NO: 3448677 - DNA, 25 bp, Homo sapien
gatcccataccaatctctggcatct

SEQ ID NO: 3448678 - DNA, 25 bp, Homo sapien
tttctgactataatcagctttccat

SEQ ID NO: 3448679 - DNA, 25 bp, Homo sapien
tctttctgactataatcagctttcc

SEQ ID NO: 3448680 - DNA, 25 bp, Homo sapien
caagagtggttctcagcatatttcc

SEQ ID NO: 3448681 - DNA, 25 bp, Homo sapien
tatttgactaaatgccagacatggt

SEQ ID NO: 3448682 - DNA, 25 bp, Homo sapien
gtagtttcttcatgcacacagatgc

SEQ ID NO: 3448683 - DNA, 25 bp, Homo sapien
gatctcagccctttacaaatgccaa

SEQ ID NO: 3448684 - DNA, 25 bp, Homo sapien
cccttctccattctcacccttctcc

SEQ ID NO: 3448685 - DNA, 25 bp, Homo sapien
agctgctggcccaggacagaacaca

SEQ ID NO: 3448686 - DNA, 25 bp, Homo sapien
ccattctcacccttctccatcagct

SEQ ID NO: 3448687 - DNA, 25 bp, Homo sapien
gctgctggcccaggacagaacacat

SEQ ID NO: 3448688 - DNA, 25 bp, Homo sapien
gaatgagtagacgatgataacttct

SEQ ID NO: 3448689 - DNA, 25 bp, Homo sapien
gggaatgagtagacgatgataactt

SEQ ID NO: 3448690 - DNA, 25 bp, Homo sapien
tgggaatgagtagacgatgataact

SEQ ID NO: 3448691 - DNA, 25 bp, Homo sapien
ggaatgagtagacgatgataacttc

SEQ ID NO: 3448692 - DNA, 25 bp, Homo sapien
tagcttctggctgcacccatctaag

SEQ ID NO: 3448693 - DNA, 25 bp, Homo sapien
atactgactaccttttaacctctgg

SEQ ID NO: 3448694 - DNA, 25 bp, Homo sapien
caactgtatgggctgacgttcctaa

SEQ ID NO: 3448695 - DNA, 25 bp, Homo sapien
actagtggagatgttaaaggctttc

SEQ ID NO: 3448696 - DNA, 25 bp, Homo sapien
ttcccctaaaagccctggatggagc

SEQ ID NO: 3448697 - DNA, 25 bp, Homo sapien
cttcccctaaaagccctggatggag

SEQ ID NO: 3448698 - DNA, 25 bp, Homo sapien
gcttcccctaaaagccctggatgga

SEQ ID NO: 3448699 - DNA, 25 bp, Homo sapien
aggaagaaggatagactttctgatg

SEQ ID NO: 3448700 - DNA, 25 bp, Homo sapien
caaaggaagaaggatagactttctg

SEQ ID NO: 3448701 - DNA, 25 bp, Homo sapien
gaaggatagactttctgatgacttt

SEQ ID NO: 3448702 - DNA, 25 bp, Homo sapien
gaagaaggatagactttctgatgac

SEQ ID NO: 3448703 - DNA, 25 bp, Homo sapien
ttgccccgaggaagtcagaacctgg

SEQ ID NO: 3448704 - DNA, 25 bp, Homo sapien
gcaaggatcaccagacacctgagaa

SEQ ID NO: 3448705 - DNA, 25 bp, Homo sapien
cacagttctaggagcgaaggaacca

SEQ ID NO: 3448706 - DNA, 25 bp, Homo sapien
tccagagaatcaagaggtaatccac

SEQ ID NO: 3448707 - DNA, 25 bp, Homo sapien
aatatgaagctaatgagatgtgcag

SEQ ID NO: 3448708 - DNA, 25 bp, Homo sapien
tatgaagctaatgagatgtgcagaa

SEQ ID NO: 3448709 - DNA, 25 bp, Homo sapien
atatgaagctaatgagatgtgcaga

SEQ ID NO: 3448710 - DNA, 25 bp, Homo sapien
gagctgggtccatatgaacttttca

SEQ ID NO: 3448711 - DNA, 25 bp, Homo sapien
aattctagcttatcttctcttgagg

SEQ ID NO: 3448712 - DNA, 25 bp, Homo sapien
gatatagaacatgtgatgatgacag

SEQ ID NO: 3448713 - DNA, 25 bp, Homo sapien
acagagctgggtccatatgaacttt

SEQ ID NO: 3448714 - DNA, 25 bp, Homo sapien
gctgagtcattagtgatggcactat

SEQ ID NO: 3448715 - DNA, 25 bp, Homo sapien
tacaagctgagtcattagtgatggc

SEQ ID NO: 3448716 - DNA, 25 bp, Homo sapien
caagctgagtcattagtgatggcac

SEQ ID NO: 3448717 - DNA, 25 bp, Homo sapien
aagctgagtcattagtgatggcact

SEQ ID NO: 3448718 - DNA, 25 bp, Homo sapien
cttcttctagccagaagacatgtcc

SEQ ID NO: 3448719 - DNA, 25 bp, Homo sapien
cagggcttcttctagccagaagaca

SEQ ID NO: 3448720 - DNA, 25 bp, Homo sapien
tgcaaaggtgccgatatcacataag

SEQ ID NO: 3448721 - DNA, 25 bp, Homo sapien
gatatcacataagatttcaccaggg

SEQ ID NO: 3448722 - DNA, 25 bp, Homo sapien
tgtcaggacttggattagcacaact

SEQ ID NO: 3448723 - DNA, 25 bp, Homo sapien
tcagggttgtgttctgcatgccatc

SEQ ID NO: 3448724 - DNA, 25 bp, Homo sapien
caagtgctgcaagatgttccctgac

SEQ ID NO: 3448725 - DNA, 25 bp, Homo sapien
taatctcagacatgttatggccaga

SEQ ID NO: 3448726 - DNA, 25 bp, Homo sapien
ccaataggaggtcactatgtcttga

SEQ ID NO: 3448727 - DNA, 25 bp, Homo sapien
agcattgagggagccttgcagtgcc

SEQ ID NO: 3448728 - DNA, 25 bp, Homo sapien
gatttacttgaatccagcattgagg

SEQ ID NO: 3448729 - DNA, 25 bp, Homo sapien
gatgctttgtcagtcaccttcatat

SEQ ID NO: 3448730 - DNA, 25 bp, Homo sapien
gctgtttcaagaggtaaccacgtag

SEQ ID NO: 3448731 - DNA, 25 bp, Homo sapien
cagatcatcagtcatcgggcattag

SEQ ID NO: 3448732 - DNA, 25 bp, Homo sapien
gggacctctcttgggtatcagttct

SEQ ID NO: 3448733 - DNA, 25 bp, Homo sapien
catggtggagtcttgtgcttggtac

SEQ ID NO: 3448734 - DNA, 25 bp, Homo sapien
tccatgaacatcagcctgagtgccc

SEQ ID NO: 3448735 - DNA, 25 bp, Homo sapien
ccatgaacatcagcctgagtgccct

SEQ ID NO: 3448736 - DNA, 25 bp, Homo sapien
tgcttccatgaacatcagcctgagt

SEQ ID NO: 3448737 - DNA, 25 bp, Homo sapien
cttccatgaacatcagcctgagtgc

SEQ ID NO: 3448738 - DNA, 25 bp, Homo sapien
aatatccaccacgtctgtgatgcca

SEQ ID NO: 3448739 - DNA, 25 bp, Homo sapien
ccatagcacaaaccagataaaatct

SEQ ID NO: 3448740 - DNA, 25 bp, Homo sapien
catttccccatagcacaaaccagat

SEQ ID NO: 3448741 - DNA, 25 bp, Homo sapien
tccccatagcacaaaccagataaaa

SEQ ID NO: 3448742 - DNA, 25 bp, Homo sapien
ttcatttccccatagcacaaaccag

SEQ ID NO: 3448743 - DNA, 25 bp, Homo sapien
ccgcaggacggacaaatgcagaagg

SEQ ID NO: 3448744 - DNA, 25 bp, Homo sapien
ataattggcattgtggcgattattg

SEQ ID NO: 3448745 - DNA, 25 bp, Homo sapien
attgtgaaactcagtatggtggtag

SEQ ID NO: 3448746 - DNA, 25 bp, Homo sapien
attgtggcgattattgtgaaactca

SEQ ID NO: 3448747 - DNA, 25 bp, Homo sapien
tgtgaaactcagtatggtggtagtc

SEQ ID NO: 3448748 - DNA, 25 bp, Homo sapien
gtttctcaggtttcattctatcagt

SEQ ID NO: 3448749 - DNA, 25 bp, Homo sapien
gccaaaaggaggtatgtacagggtg

SEQ ID NO: 3448750 - DNA, 25 bp, Homo sapien
aaaacaagtctctttgtcacgaaat

SEQ ID NO: 3448751 - DNA, 25 bp, Homo sapien
tcatttgttgggtgagctttgaaaa

SEQ ID NO: 3448752 - DNA, 25 bp, Homo sapien
taagcttggcaaacgtacccatagt

SEQ ID NO: 3448753 - DNA, 25 bp, Homo sapien
caggttccgctagtgagttctgtca

SEQ ID NO: 3448754 - DNA, 25 bp, Homo sapien
taattttgtgctcggtaagttcctg

SEQ ID NO: 3448755 - DNA, 25 bp, Homo sapien
cagtgtttgggctcctgacaaattc

SEQ ID NO: 3448756 - DNA, 25 bp, Homo sapien
gggccctttagacgtcttctctaga

SEQ ID NO: 3448757 - DNA, 25 bp, Homo sapien
taagctttggaaacctagggcatga

SEQ ID NO: 3448758 - DNA, 25 bp, Homo sapien
tcttacaagtgtggagtagcccaat

SEQ ID NO: 3448759 - DNA, 25 bp, Homo sapien
tatgctcctatctgcctttattggg

SEQ ID NO: 3448760 - DNA, 25 bp, Homo sapien
ttcccgcggtgagaggaatcagcat

SEQ ID NO: 3448761 - DNA, 25 bp, Homo sapien
cagattagttgattcacccccagat

SEQ ID NO: 3448762 - DNA, 25 bp, Homo sapien
ctctgaaaacaattaatcagattag

SEQ ID NO: 3448763 - DNA, 25 bp, Homo sapien
tcaaagagctctcaggctccccagg

SEQ ID NO: 3448764 - DNA, 25 bp, Homo sapien
aaagaagataccagactaccacttc

SEQ ID NO: 3448765 - DNA, 25 bp, Homo sapien
tggaatttcaaacaccagcagctag

SEQ ID NO: 3448766 - DNA, 25 bp, Homo sapien
taccagactaccacttcagagttgg

SEQ ID NO: 3448767 - DNA, 25 bp, Homo sapien
caaacaccagcagctagctgggagg

SEQ ID NO: 3448768 - DNA, 25 bp, Homo sapien
tcttcagtatcaaaactgatgtgga

SEQ ID NO: 3448769 - DNA, 25 bp, Homo sapien
aaactgatgtggagataacgccctg

SEQ ID NO: 3448770 - DNA, 25 bp, Homo sapien
atgtggagataacgccctgtgtgga

SEQ ID NO: 3448771 - DNA, 25 bp, Homo sapien
tgtgtggaagtttcaaataaactgt

SEQ ID NO: 3448772 - DNA, 25 bp, Homo sapien
tgcaccatacttagaactatccctg

SEQ ID NO: 3448773 - DNA, 25 bp, Homo sapien
ggaagcagcagtagttaagaatttc

SEQ ID NO: 3448774 - DNA, 25 bp, Homo sapien
ctttgcaccatacttagaactatcc

SEQ ID NO: 3448775 - DNA, 25 bp, Homo sapien
tcagccctttgcaccatacttagaa

SEQ ID NO: 3448776 - DNA, 25 bp, Homo sapien
ttaattgctattgtttctgtatcac

SEQ ID NO: 3448777 - DNA, 25 bp, Homo sapien
ctagcatgttactgttgttaattgc

SEQ ID NO: 3448778 - DNA, 25 bp, Homo sapien
cactttctcgggcatactgcatcac

SEQ ID NO: 3448779 - DNA, 25 bp, Homo sapien
gcatcactttcatttctagcatgtt

SEQ ID NO: 3448780 - DNA, 25 bp, Homo sapien
ggagagactgccaggatttcagaat

SEQ ID NO: 3448781 - DNA, 25 bp, Homo sapien
ttggagagactgccaggatttcaga

SEQ ID NO: 3448782 - DNA, 25 bp, Homo sapien
agagactgccaggatttcagaatgg

SEQ ID NO: 3448783 - DNA, 25 bp, Homo sapien
tcaggacattgttggagagactgcc

SEQ ID NO: 3448784 - DNA, 25 bp, Homo sapien
tcctcaatcttattcagtgtctggt

SEQ ID NO: 3448785 - DNA, 25 bp, Homo sapien
tgctatatccatcctcaatcttatt

SEQ ID NO: 3448786 - DNA, 25 bp, Homo sapien
atgagcttgtctccagttgtccaca

SEQ ID NO: 3448787 - DNA, 25 bp, Homo sapien
ccagttgtccacattgctatatcca

SEQ ID NO: 3448788 - DNA, 25 bp, Homo sapien
cgttcaacccttaagacaatgctgg

SEQ ID NO: 3448789 - DNA, 25 bp, Homo sapien
ggcatacttttagtatggtcaagaa

SEQ ID NO: 3448790 - DNA, 25 bp, Homo sapien
ctggcagatgattttattggcatac

SEQ ID NO: 3448791 - DNA, 25 bp, Homo sapien
gcacccatattgtaagtcgttcaac

SEQ ID NO: 3448792 - DNA, 25 bp, Homo sapien
attgctcatacatgagctgcttctc

SEQ ID NO: 3448793 - DNA, 25 bp, Homo sapien
cataagtggagagtcgatgagcgtc

SEQ ID NO: 3448794 - DNA, 25 bp, Homo sapien
tgagcgtcctctaacagcaaattgc

SEQ ID NO: 3448795 - DNA, 25 bp, Homo sapien
gctctcaacagctgacataagtgga

SEQ ID NO: 3448796 - DNA, 25 bp, Homo sapien
tcacccttgacatctaagagaacca

SEQ ID NO: 3448797 - DNA, 25 bp, Homo sapien
ctgtcacccttgacatctaagagaa

SEQ ID NO: 3448798 - DNA, 25 bp, Homo sapien
gtcacccttgacatctaagagaacc

SEQ ID NO: 3448799 - DNA, 25 bp, Homo sapien
cacccttgacatctaagagaaccat

SEQ ID NO: 3448800 - DNA, 25 bp, Homo sapien
gattctctgtggcaatgtcagcatt

SEQ ID NO: 3448801 - DNA, 25 bp, Homo sapien
gactctgcagcctgtagtttgattc

SEQ ID NO: 3448802 - DNA, 25 bp, Homo sapien
caaggttctgaatgaaagactctgc

SEQ ID NO: 3448803 - DNA, 25 bp, Homo sapien
agtttgattctctgtggcaatgtca

SEQ ID NO: 3448804 - DNA, 25 bp, Homo sapien
caaattgacttgtaaggccagaaac

SEQ ID NO: 3448805 - DNA, 25 bp, Homo sapien
atggtgttatttccaatgtctaaat

SEQ ID NO: 3448806 - DNA, 25 bp, Homo sapien
gatggtgttatttccaatgtctaaa

SEQ ID NO: 3448807 - DNA, 25 bp, Homo sapien
agtatactacaagtttgaagtcagg

SEQ ID NO: 3448808 - DNA, 25 bp, Homo sapien
tagtatactacaagtttgaagtcag

SEQ ID NO: 3448809 - DNA, 25 bp, Homo sapien
gtagtatactacaagtttgaagtca

SEQ ID NO: 3448810 - DNA, 25 bp, Homo sapien
ttgtagtatactacaagtttgaagt

SEQ ID NO: 3448811 - DNA, 25 bp, Homo sapien
taactctacagtgaccactgtaagg

SEQ ID NO: 3448812 - DNA, 25 bp, Homo sapien
cagattgcagatgtcaagtgaaaca

SEQ ID NO: 3448813 - DNA, 25 bp, Homo sapien
attgtaaggaagattcagattgcag

SEQ ID NO: 3448814 - DNA, 25 bp, Homo sapien
ctattggtacaatgagggtgataac

SEQ ID NO: 3448815 - DNA, 25 bp, Homo sapien
agagggaactgaacaattggccttt

SEQ ID NO: 3448816 - DNA, 25 bp, Homo sapien
tttggagtataaatagtagggcaga

SEQ ID NO: 3448817 - DNA, 25 bp, Homo sapien
cagagggaactgaacaattggcctt

SEQ ID NO: 3448818 - DNA, 25 bp, Homo sapien
gcagagggaactgaacaattggcct

SEQ ID NO: 3448819 - DNA, 25 bp, Homo sapien
ttttcttcttttcaatactagagct

SEQ ID NO: 3448820 - DNA, 25 bp, Homo sapien
tttttcttcttttcaatactagagc

SEQ ID NO: 3448821 - DNA, 25 bp, Homo sapien
tcacactggtgaaaaagagacatac

SEQ ID NO: 3448822 - DNA, 25 bp, Homo sapien
tgtattagtaccgtcagatggaaac

SEQ ID NO: 3448823 - DNA, 25 bp, Homo sapien
tacactatgacaacagcagatggaa

SEQ ID NO: 3448824 - DNA, 25 bp, Homo sapien
ttacatagtgccagacaagagaaga

SEQ ID NO: 3448825 - DNA, 25 bp, Homo sapien
tgttttcccaaattcgagtccatag

SEQ ID NO: 3448826 - DNA, 25 bp, Homo sapien
aattcgagtccatagagttgagctg

SEQ ID NO: 3448827 - DNA, 25 bp, Homo sapien
cccaaattcgagtccatagagttga

SEQ ID NO: 3448828 - DNA, 25 bp, Homo sapien
tcgagtccatagagttgagctgatt

SEQ ID NO: 3448829 - DNA, 25 bp, Homo sapien
gatgttatgttggatatgcatctcc

SEQ ID NO: 3448830 - DNA, 25 bp, Homo sapien
ttgagtgatgttatgttggatatgc

SEQ ID NO: 3448831 - DNA, 25 bp, Homo sapien
tgttatgttggatatgcatctcctt

SEQ ID NO: 3448832 - DNA, 25 bp, Homo sapien
agtgatgttatgttggatatgcatc

SEQ ID NO: 3448833 - DNA, 25 bp, Homo sapien
tctcagaagatttagggaccactgg

SEQ ID NO: 3448834 - DNA, 25 bp, Homo sapien
tataaggttagcacttctgaggata

SEQ ID NO: 3448835 - DNA, 25 bp, Homo sapien
tagcacttctgaggatatgcaatcc

SEQ ID NO: 3448836 - DNA, 25 bp, Homo sapien
tagagagtttcttttgtggatatag

SEQ ID NO: 3448837 - DNA, 25 bp, Homo sapien
aaatttgagccttgttcacacgatt

SEQ ID NO: 3448838 - DNA, 25 bp, Homo sapien
atttgagccttgttcacacgattca

SEQ ID NO: 3448839 - DNA, 25 bp, Homo sapien
aatttgagccttgttcacacgattc

SEQ ID NO: 3448840 - DNA, 25 bp, Homo sapien
ttgagccttgttcacacgattcaat

SEQ ID NO: 3448841 - DNA, 25 bp, Homo sapien
ccactctgccacgaatctgtagatt

SEQ ID NO: 3448842 - DNA, 25 bp, Homo sapien
cacatccactctgccacgaatctgt

SEQ ID NO: 3448843 - DNA, 25 bp, Homo sapien
catccactctgccacgaatctgtag

SEQ ID NO: 3448844 - DNA, 25 bp, Homo sapien
ttcccacatccactctgccacgaat

SEQ ID NO: 3448845 - DNA, 25 bp, Homo sapien
taaatgggtagaatccgcctctgct

SEQ ID NO: 3448846 - DNA, 25 bp, Homo sapien
gtactgcatgcgcttcctcacttca

SEQ ID NO: 3448847 - DNA, 25 bp, Homo sapien
ggtagaatccgcctctgctcacttc

SEQ ID NO: 3448848 - DNA, 25 bp, Homo sapien
tctgagatgaccaggtactgcatgc

SEQ ID NO: 3448849 - DNA, 25 bp, Homo sapien
tttcctattagcaaacacacagcca

SEQ ID NO: 3448850 - DNA, 25 bp, Homo sapien
cagagagcacttcaatcaaattcac

SEQ ID NO: 3448851 - DNA, 25 bp, Homo sapien
tctgtttgagagaatgagtcatctc

SEQ ID NO: 3448852 - DNA, 25 bp, Homo sapien
tatgtccccgtctgtgtggtgcacc

SEQ ID NO: 3448853 - DNA, 25 bp, Homo sapien
ggtgaaagagatgaagtatgtatta

SEQ ID NO: 3448854 - DNA, 25 bp, Homo sapien
catagtgcactaggtgaaagagatg

SEQ ID NO: 3448855 - DNA, 25 bp, Homo sapien
tcatagtgcactaggtgaaagagat

SEQ ID NO: 3448856 - DNA, 25 bp, Homo sapien
gaaagagatgaagtatgtattaaaa

SEQ ID NO: 3448857 - DNA, 25 bp, Homo sapien
taccatcatggtaaatgctatgtgc

SEQ ID NO: 3448858 - DNA, 25 bp, Homo sapien
aattctgtcaaaggattttccaggc

SEQ ID NO: 3448859 - DNA, 25 bp, Homo sapien
catccactgctattgtaccatcatg

SEQ ID NO: 3448860 - DNA, 25 bp, Homo sapien
gaccgtttcgttctcaagtaatgac

SEQ ID NO: 3448861 - DNA, 25 bp, Homo sapien
gctcttcttgtagctaagaccgtgg

SEQ ID NO: 3448862 - DNA, 25 bp, Homo sapien
ttctacagctcttcttgtagctaag

SEQ ID NO: 3448863 - DNA, 25 bp, Homo sapien
tcttgtagctaagaccgtggcattt

SEQ ID NO: 3448864 - DNA, 25 bp, Homo sapien
tacagctcttcttgtagctaagacc

SEQ ID NO: 3448865 - DNA, 25 bp, Homo sapien
gaattctgttgctggatagtggatg

SEQ ID NO: 3448866 - DNA, 25 bp, Homo sapien
aatctttttatgaacagagactgaa

SEQ ID NO: 3448867 - DNA, 25 bp, Homo sapien
aacagagactgaattctgttgctgg

SEQ ID NO: 3448868 - DNA, 25 bp, Homo sapien
tgtcaaaaagactaagtgttgttga

SEQ ID NO: 3448869 - DNA, 25 bp, Homo sapien
cttcccagaaccacattgctcatcc

SEQ ID NO: 3448870 - DNA, 25 bp, Homo sapien
gcctttagatgaaagaacttcccag

SEQ ID NO: 3448871 - DNA, 25 bp, Homo sapien
ttcagcctttagatgaaagaacttc

SEQ ID NO: 3448872 - DNA, 25 bp, Homo sapien
cagcctttagatgaaagaacttccc

SEQ ID NO: 3448873 - DNA, 25 bp, Homo sapien
ccagacaggcttgttattgtatcta

SEQ ID NO: 3448874 - DNA, 25 bp, Homo sapien
ctacttgctgtctcctatcagatga

SEQ ID NO: 3448875 - DNA, 25 bp, Homo sapien
ggatatagtccactggatgcaaatt

SEQ ID NO: 3448876 - DNA, 25 bp, Homo sapien
ctcttgctgcactctggctacttgc

SEQ ID NO: 3448877 - DNA, 25 bp, Homo sapien
ggaactcagttactcttatctcaga

SEQ ID NO: 3448878 - DNA, 25 bp, Homo sapien
tcagttactcttatctcagagggcg

SEQ ID NO: 3448879 - DNA, 25 bp, Homo sapien
cgtaggaactcagttactcttatct

SEQ ID NO: 3448880 - DNA, 25 bp, Homo sapien
tcttatctcagagggcgaagtattc

SEQ ID NO: 3448881 - DNA, 25 bp, Homo sapien
gtttctccattcttcaacatgctca

SEQ ID NO: 3448882 - DNA, 25 bp, Homo sapien
ctgtttctccattcttcaacatgct

SEQ ID NO: 3448883 - DNA, 25 bp, Homo sapien
tgtttctctggacagctgtttctcc

SEQ ID NO: 3448884 - DNA, 25 bp, Homo sapien
ttccctgtttctctggacagctgtt

SEQ ID NO: 3448885 - DNA, 25 bp, Homo sapien
tatcttaggcgtcaataatctaagc

SEQ ID NO: 3448886 - DNA, 25 bp, Homo sapien
tagaagatgctatggcatatttacc

SEQ ID NO: 3448887 - DNA, 25 bp, Homo sapien
tagaacattggaactttatcttagg

SEQ ID NO: 3448888 - DNA, 25 bp, Homo sapien
atctaagctgactcatttgccactt

SEQ ID NO: 3448889 - DNA, 25 bp, Homo sapien
ccgtttggactaaagctaaagccag

SEQ ID NO: 3448890 - DNA, 25 bp, Homo sapien
tccagctgtttaaccgtttggacta

SEQ ID NO: 3448891 - DNA, 25 bp, Homo sapien
ggactaaagctaaagccagaacaaa

SEQ ID NO: 3448892 - DNA, 25 bp, Homo sapien
aaacaggtcatgccctgcttttgat

SEQ ID NO: 3448893 - DNA, 25 bp, Homo sapien
gtcatctgaaataatgagccttcct

SEQ ID NO: 3448894 - DNA, 25 bp, Homo sapien
tatgtggtctttttgccatatgaag

SEQ ID NO: 3448895 - DNA, 25 bp, Homo sapien
gccatatgaagtaatgtcatctgaa

SEQ ID NO: 3448896 - DNA, 25 bp, Homo sapien
gaaataatgagccttcctgcagaga

SEQ ID NO: 3448897 - DNA, 25 bp, Homo sapien
taaaattcccatgttacatacctta

SEQ ID NO: 3448898 - DNA, 25 bp, Homo sapien
aattcccatgttacataccttatat

SEQ ID NO: 3448899 - DNA, 25 bp, Homo sapien
cataccttatatcctaaacttgttt

SEQ ID NO: 3448900 - DNA, 25 bp, Homo sapien
acataccttatatcctaaacttgtt

SEQ ID NO: 3448901 - DNA, 25 bp, Homo sapien
caatccctggtactgggtataaatt

SEQ ID NO: 3448902 - DNA, 25 bp, Homo sapien
tgggccttgcctgcatagaactctc

SEQ ID NO: 3448903 - DNA, 25 bp, Homo sapien
tcattcactatcttttccctcatta

SEQ ID NO: 3448904 - DNA, 25 bp, Homo sapien
gcatagaactctcaatccctggtac

SEQ ID NO: 3448905 - DNA, 25 bp, Homo sapien
ttcagagtttttactggtgccttat

SEQ ID NO: 3448906 - DNA, 25 bp, Homo sapien
cagagtttttactggtgccttatct

SEQ ID NO: 3448907 - DNA, 25 bp, Homo sapien
tagtatgatatttcagagtttttac

SEQ ID NO: 3448908 - DNA, 25 bp, Homo sapien
gagtttttactggtgccttatcttc

SEQ ID NO: 3448909 - DNA, 25 bp, Homo sapien
ctgcaatccgggactcagccacagg

SEQ ID NO: 3448910 - DNA, 25 bp, Homo sapien
ctgagcaggttctgcaatccgggac

SEQ ID NO: 3448911 - DNA, 25 bp, Homo sapien
caggttctgcaatccgggactcagc

SEQ ID NO: 3448912 - DNA, 25 bp, Homo sapien
ctcaaaagaactggcggtcctgagc

SEQ ID NO: 3448913 - DNA, 25 bp, Homo sapien
cattatggaggtccaacaaggcttt

SEQ ID NO: 3448914 - DNA, 25 bp, Homo sapien
gattggagaccagctataggccaca

SEQ ID NO: 3448915 - DNA, 25 bp, Homo sapien
ctataggccacaatgtgggtgagtg

SEQ ID NO: 3448916 - DNA, 25 bp, Homo sapien
aagttcttgaagatagagtctggct

SEQ ID NO: 3448917 - DNA, 25 bp, Homo sapien
caggtagtgataattgtaggttcca

SEQ ID NO: 3448918 - DNA, 25 bp, Homo sapien
aataggagtagggtcctactagcac

SEQ ID NO: 3448919 - DNA, 25 bp, Homo sapien
atcctccaaataggagtagggtcct

SEQ ID NO: 3448920 - DNA, 25 bp, Homo sapien
cttcaggtagtgataattgtaggtt

SEQ ID NO: 3448921 - DNA, 25 bp, Homo sapien
taagtccagcggtcttatgtctccg

SEQ ID NO: 3448922 - DNA, 25 bp, Homo sapien
gcggtcttatgtctccgtagagcag

SEQ ID NO: 3448923 - DNA, 25 bp, Homo sapien
tgttcgtgtctcagtaagtccagcg

SEQ ID NO: 3448924 - DNA, 25 bp, Homo sapien
tagtttattcagcactgttcgtgtc

SEQ ID NO: 3448925 - DNA, 25 bp, Homo sapien
ttgcttcctttagacatcctgacac

SEQ ID NO: 3448926 - DNA, 25 bp, Homo sapien
tcctgacacagtctgcaggatgaac

SEQ ID NO: 3448927 - DNA, 25 bp, Homo sapien
gatgaactagccacgccctcaggca

SEQ ID NO: 3448928 - DNA, 25 bp, Homo sapien
cagtctgcaggatgaactagccacg

SEQ ID NO: 3448929 - DNA, 25 bp, Homo sapien
ctctgcaaatccagcttcagtgaca

SEQ ID NO: 3448930 - DNA, 25 bp, Homo sapien
cacatatgtcgttactctgagcctg

SEQ ID NO: 3448931 - DNA, 25 bp, Homo sapien
atatgtcgttactctgagcctggaa

SEQ ID NO: 3448932 - DNA, 25 bp, Homo sapien
tctgcaaatccagcttcagtgacat

SEQ ID NO: 3448933 - DNA, 25 bp, Homo sapien
gttctatccaaaggacagattggtg

SEQ ID NO: 3448934 - DNA, 25 bp, Homo sapien
taccgcagttctatccaaaggacag

SEQ ID NO: 3448935 - DNA, 25 bp, Homo sapien
tgtggctaccgcagttctatccaaa

SEQ ID NO: 3448936 - DNA, 25 bp, Homo sapien
agagcccagtgtggctaccgcagtt

SEQ ID NO: 3448937 - DNA, 25 bp, Homo sapien
cagcagtctggtttctagtagaaga

SEQ ID NO: 3448938 - DNA, 25 bp, Homo sapien
gaaaacaacatacctgcagcatgac

SEQ ID NO: 3448939 - DNA, 25 bp, Homo sapien
aagtgaaaacaacatacctgcagca

SEQ ID NO: 3448940 - DNA, 25 bp, Homo sapien
caacatacctgcagcatgacagcag

SEQ ID NO: 3448941 - DNA, 25 bp, Homo sapien
agtgtgcggaaaagcccccacaaga

SEQ ID NO: 3448942 - DNA, 25 bp, Homo sapien
cccacaagacgagcaccaagggcaa

SEQ ID NO: 3448943 - DNA, 25 bp, Homo sapien
ttgtgggacagtgtgcggaaaagcc

SEQ ID NO: 3448944 - DNA, 25 bp, Homo sapien
caccaagggcaaagggacttgtggg

SEQ ID NO: 3448945 - DNA, 25 bp, Homo sapien
atggatgccgtcaggagtgcgccca

SEQ ID NO: 3448946 - DNA, 25 bp, Homo sapien
ggtacagttctcagaccatgccctc

SEQ ID NO: 3448947 - DNA, 25 bp, Homo sapien
gtggctggcagaggaactgtcaggg

SEQ ID NO: 3448948 - DNA, 25 bp, Homo sapien
cctgatcagggatgcccactgtgct

SEQ ID NO: 3448949 - DNA, 25 bp, Homo sapien
agtaggcatcagtgcagtatgaatg

SEQ ID NO: 3448950 - DNA, 25 bp, Homo sapien
gaaagagtaggcatcagtgcagtat

SEQ ID NO: 3448951 - DNA, 25 bp, Homo sapien
accaaaggaaagagtaggcatcagt

SEQ ID NO: 3448952 - DNA, 25 bp, Homo sapien
aaggaaagagtaggcatcagtgcag

SEQ ID NO: 3448953 - DNA, 25 bp, Homo sapien
gatgcactgcttatagcagctgtca

SEQ ID NO: 3448954 - DNA, 25 bp, Homo sapien
cagcccgcagataatgctgtgcgga

SEQ ID NO: 3448955 - DNA, 25 bp, Homo sapien
aagatactgaggaatccacggtgga

SEQ ID NO: 3448956 - DNA, 25 bp, Homo sapien
taatgctgtgcggagctgctgtcgc

SEQ ID NO: 3448957 - DNA, 25 bp, Homo sapien
caccccgatgtaattgacaactgca

SEQ ID NO: 3448958 - DNA, 25 bp, Homo sapien
tggtgaaaaactccaccccgatgta

SEQ ID NO: 3448959 - DNA, 25 bp, Homo sapien
accccgatgtaattgacaactgcat

SEQ ID NO: 3448960 - DNA, 25 bp, Homo sapien
gttcagcaaacatactagtccccat

SEQ ID NO: 3448961 - DNA, 25 bp, Homo sapien
ctttctgtaattgggttcaaacagt

SEQ ID NO: 3448962 - DNA, 25 bp, Homo sapien
gactttctgtaattgggttcaaaca

SEQ ID NO: 3448963 - DNA, 25 bp, Homo sapien
gtgactttctgtaattgggttcaaa

SEQ ID NO: 3448964 - DNA, 25 bp, Homo sapien
tctgcaaatataccggtttcaaaat

SEQ ID NO: 3448965 - DNA, 25 bp, Homo sapien
cattctgcaaatataccggtttcaa

SEQ ID NO: 3448966 - DNA, 25 bp, Homo sapien
tccaaaatgttactttcacattctg

SEQ ID NO: 3448967 - DNA, 25 bp, Homo sapien
ccaaaatgttactttcacattctgc

SEQ ID NO: 3448968 - DNA, 25 bp, Homo sapien
tgatagtggcttcaaacaatgccaa

SEQ ID NO: 3448969 - DNA, 25 bp, Homo sapien
tagtggcttcaaacaatgccaagtc

SEQ ID NO: 3448970 - DNA, 25 bp, Homo sapien
gccaagtcttaatgagggctgcatt

SEQ ID NO: 3448971 - DNA, 25 bp, Homo sapien
caaacaatgccaagtcttaatgagg

SEQ ID NO: 3448972 - DNA, 25 bp, Homo sapien
caataatttcttgaacgcctataac

SEQ ID NO: 3448973 - DNA, 25 bp, Homo sapien
tggtaaagagtcagacactgctttc

SEQ ID NO: 3448974 - DNA, 25 bp, Homo sapien
taacgaacctataacgcagagacct

SEQ ID NO: 3448975 - DNA, 25 bp, Homo sapien
gagacctaataggtggtaaagagtc

SEQ ID NO: 3448976 - DNA, 25 bp, Homo sapien
gttggaatttaatcattctagcagc

SEQ ID NO: 3448977 - DNA, 25 bp, Homo sapien
tcagttggaatttaatcattctagc

SEQ ID NO: 3448978 - DNA, 25 bp, Homo sapien
gacaatctaagttcagttggaattt

SEQ ID NO: 3448979 - DNA, 25 bp, Homo sapien
agatagacaatctaagttcagttgg

SEQ ID NO: 3448980 - DNA, 25 bp, Homo sapien
ctggcacatggaaacagatggaaga

SEQ ID NO: 3448981 - DNA, 25 bp, Homo sapien
ctttgaatgtatcatgaactcctgt

SEQ ID NO: 3448982 - DNA, 25 bp, Homo sapien
taccaacactctgccaccttgtggc

SEQ ID NO: 3448983 - DNA, 25 bp, Homo sapien
ccaacactctgccaccttgtggctt

SEQ ID NO: 3448984 - DNA, 25 bp, Homo sapien
gatgggcttctctaaaacatgacat

SEQ ID NO: 3448985 - DNA, 25 bp, Homo sapien
tttgctgcttcatctcgtagccaga

SEQ ID NO: 3448986 - DNA, 25 bp, Homo sapien
tatcacatgctcctctcttttgagg

SEQ ID NO: 3448987 - DNA, 25 bp, Homo sapien
tcatctcgtagccagagatgggctt

SEQ ID NO: 3448988 - DNA, 25 bp, Homo sapien
cttgcattttactagtctgtttatt

SEQ ID NO: 3448989 - DNA, 25 bp, Homo sapien
tgcattttactagtctgtttatttc

SEQ ID NO: 3448990 - DNA, 25 bp, Homo sapien
tgtttatttctacattctttccttc

SEQ ID NO: 3448991 - DNA, 25 bp, Homo sapien
tttctacattctttccttccttcat

SEQ ID NO: 3448992 - DNA, 25 bp, Homo sapien
gcaggtggtcatccaaacagtcaga

SEQ ID NO: 3448993 - DNA, 25 bp, Homo sapien
aagtttaggattccactcttgctgc

SEQ ID NO: 3448994 - DNA, 25 bp, Homo sapien
agccttcaaacaaagagccacacaa

SEQ ID NO: 3448995 - DNA, 25 bp, Homo sapien
ggttgcatgctgttggtaggagatc

SEQ ID NO: 3448996 - DNA, 25 bp, Homo sapien
aaagagccacacaaaagtttaggat

SEQ ID NO: 3448997 - DNA, 25 bp, Homo sapien
catttccctgctgacaataccactc

SEQ ID NO: 3448998 - DNA, 25 bp, Homo sapien
tcatttccctgctgacaataccact

SEQ ID NO: 3448999 - DNA, 25 bp, Homo sapien
tgaatcaagcagcaaaatggacagt

SEQ ID NO: 3449000 - DNA, 25 bp, Homo sapien
gcagcatgactcagcgccagtgtct

SEQ ID NO: 3449001 - DNA, 25 bp, Homo sapien
tgtttgtccatgctgaacgcagccc

SEQ ID NO: 3449002 - DNA, 25 bp, Homo sapien
cagcagcatgactcagcgccagtgt

SEQ ID NO: 3449003 - DNA, 25 bp, Homo sapien
tttgtccatgctgaacgcagccctg

SEQ ID NO: 3449004 - DNA, 25 bp, Homo sapien
tttccggtttgccaactgcctgctc

SEQ ID NO: 3449005 - DNA, 25 bp, Homo sapien
ctttccggtttgccaactgcctgct

SEQ ID NO: 3449006 - DNA, 25 bp, Homo sapien
gattctgttcgtctctgagccgagg

SEQ ID NO: 3449007 - DNA, 25 bp, Homo sapien
tatgctaagaagctgggtcgcaggt

SEQ ID NO: 3449008 - DNA, 25 bp, Homo sapien
tcgcaggttcgtgcacaatgccagg

SEQ ID NO: 3449009 - DNA, 25 bp, Homo sapien
ctgcaagtgacagctccagcctgat

SEQ ID NO: 3449010 - DNA, 25 bp, Homo sapien
cctgatagtcctcttagtcctcttg

SEQ ID NO: 3449011 - DNA, 25 bp, Homo sapien
tacctgcgaggctgtatgtggatct

SEQ ID NO: 3449012 - DNA, 25 bp, Homo sapien
cagtcaccctaacagccctgatagt

SEQ ID NO: 3449013 - DNA, 25 bp, Homo sapien
cttgtaagttgtggataaggctggc

SEQ ID NO: 3449014 - DNA, 25 bp, Homo sapien
actccagcttagatgcctggtggta

SEQ ID NO: 3449015 - DNA, 25 bp, Homo sapien
tgcctggtggtactcaagaagacag

SEQ ID NO: 3449016 - DNA, 25 bp, Homo sapien
gagtcccacgtggaaactcagccct

SEQ ID NO: 3449017 - DNA, 25 bp, Homo sapien
ttacctgagtcccacgtggaaactc

SEQ ID NO: 3449018 - DNA, 25 bp, Homo sapien
aactggaaggtcttcattggagggt

SEQ ID NO: 3449019 - DNA, 25 bp, Homo sapien
cccatgagagtctgaagagccattg

SEQ ID NO: 3449020 - DNA, 25 bp, Homo sapien
ccattgtgagcaattgggagcactc

SEQ ID NO: 3449021 - DNA, 25 bp, Homo sapien
tgaaagagcccgaataactggaagg

SEQ ID NO: 3449022 - DNA, 25 bp, Homo sapien
ctgtgccattttgccctgtgctctg

SEQ ID NO: 3449023 - DNA, 25 bp, Homo sapien
tgctgcttgcagccaaaatgccagg

SEQ ID NO: 3449024 - DNA, 25 bp, Homo sapien
cattttggctctttcagtgagctcc

SEQ ID NO: 3449025 - DNA, 25 bp, Homo sapien
aaaaaaagcatgattccttccagcc

SEQ ID NO: 3449026 - DNA, 25 bp, Homo sapien
taaaacacagacagcatctgaacct

SEQ ID NO: 3449027 - DNA, 25 bp, Homo sapien
aaacacagacagcatctgaacctca

SEQ ID NO: 3449028 - DNA, 25 bp, Homo sapien
aacacagacagcatctgaacctcac

SEQ ID NO: 3449029 - DNA, 25 bp, Homo sapien
ctaaaacacagacagcatctgaacc

SEQ ID NO: 3449030 - DNA, 25 bp, Homo sapien
tttgaggtagagcatcaaagcctgt

SEQ ID NO: 3449031 - DNA, 25 bp, Homo sapien
tgaggtagagcatcaaagcctgtcc

SEQ ID NO: 3449032 - DNA, 25 bp, Homo sapien
aatttgaggtagagcatcaaagcct

SEQ ID NO: 3449033 - DNA, 25 bp, Homo sapien
ttgaggtagagcatcaaagcctgtc

SEQ ID NO: 3449034 - DNA, 25 bp, Homo sapien
tcttttcatcagaagttctcccaca

SEQ ID NO: 3449035 - DNA, 25 bp, Homo sapien
tcatcagaagttctcccacaaaata

SEQ ID NO: 3449036 - DNA, 25 bp, Homo sapien
ttttcatcagaagttctcccacaaa

SEQ ID NO: 3449037 - DNA, 25 bp, Homo sapien
ttcatcagaagttctcccacaaaat

SEQ ID NO: 3449038 - DNA, 25 bp, Homo sapien
gaggaacttctggattgaccctgta

SEQ ID NO: 3449039 - DNA, 25 bp, Homo sapien
cttgttgaccttgaggatgtccggt

SEQ ID NO: 3449040 - DNA, 25 bp, Homo sapien
gatgtccggtatttcccactttgtg

SEQ ID NO: 3449041 - DNA, 25 bp, Homo sapien
gctctttgcagaggcccctgttgtc

SEQ ID NO: 3449042 - DNA, 25 bp, Homo sapien
tagcaaagagcattatattagtttc

SEQ ID NO: 3449043 - DNA, 25 bp, Homo sapien
tttgaattaagacttacataatgag

SEQ ID NO: 3449044 - DNA, 25 bp, Homo sapien
gaagtttgtcaggtgtgcattccag

SEQ ID NO: 3449045 - DNA, 25 bp, Homo sapien
gacttacataatgagtagaagtttg

SEQ ID NO: 3449046 - DNA, 25 bp, Homo sapien
gtctgttaacctgtccattaaagag

SEQ ID NO: 3449047 - DNA, 25 bp, Homo sapien
cacacttcacataatggtctgttaa

SEQ ID NO: 3449048 - DNA, 25 bp, Homo sapien
tcacataatggtctgttaacctgtc

SEQ ID NO: 3449049 - DNA, 25 bp, Homo sapien
acataatggtctgttaacctgtcca

SEQ ID NO: 3449050 - DNA, 25 bp, Homo sapien
gacatcgctttctttggacacttac

SEQ ID NO: 3449051 - DNA, 25 bp, Homo sapien
ctgcaaagcccactggacatcgctt

SEQ ID NO: 3449052 - DNA, 25 bp, Homo sapien
gcccactggacatcgctttctttgg

SEQ ID NO: 3449053 - DNA, 25 bp, Homo sapien
cactggacatcgctttctttggaca

SEQ ID NO: 3449054 - DNA, 25 bp, Homo sapien
gttttgaagagactgcatcgcactg

SEQ ID NO: 3449055 - DNA, 25 bp, Homo sapien
gagactgcatcgcactgtaaaccaa

SEQ ID NO: 3449056 - DNA, 25 bp, Homo sapien
gtaaaccaaaagctccacactaaga

SEQ ID NO: 3449057 - DNA, 25 bp, Homo sapien
tgtaaaccaaaagctccacactaag

SEQ ID NO: 3449058 - DNA, 25 bp, Homo sapien
ttcttgccatagatgtggcaaagag

SEQ ID NO: 3449059 - DNA, 25 bp, Homo sapien
gtaatggaagcccactgttaacacc

SEQ ID NO: 3449060 - DNA, 25 bp, Homo sapien
gtgcatgactacaaagagtacagac

SEQ ID NO: 3449061 - DNA, 25 bp, Homo sapien
gacagtagccaggtcttttctgttt

SEQ ID NO: 3449062 - DNA, 25 bp, Homo sapien
tggaagcccactgttaacacccttg

SEQ ID NO: 3449063 - DNA, 25 bp, Homo sapien
ttgtttccttcaaagattaattcat

SEQ ID NO: 3449064 - DNA, 25 bp, Homo sapien
gaaataagctcaatgttgtttcctt

SEQ ID NO: 3449065 - DNA, 25 bp, Homo sapien
ccaaaagttttctgatatctttgtt

SEQ ID NO: 3449066 - DNA, 25 bp, Homo sapien
catcatcctgcagaactgttccttt

SEQ ID NO: 3449067 - DNA, 25 bp, Homo sapien
ggtggtcaaaccctgtggtgtcaag

SEQ ID NO: 3449068 - DNA, 25 bp, Homo sapien
cagccacggaggtggtcaaaccctg

SEQ ID NO: 3449069 - DNA, 25 bp, Homo sapien
tgattcaaattcttcgaaaagtcct

SEQ ID NO: 3449070 - DNA, 25 bp, Homo sapien
tcttttcatttacagccacggaggt

SEQ ID NO: 3449071 - DNA, 25 bp, Homo sapien
tattcaagagctctaaggtttgtgg

SEQ ID NO: 3449072 - DNA, 25 bp, Homo sapien
tgagtgcatggcagtactcaagatc

SEQ ID NO: 3449073 - DNA, 25 bp, Homo sapien
gctctaaggtttgtggaacttctga

SEQ ID NO: 3449074 - DNA, 25 bp, Homo sapien
catcagagaatccttaatggtcata

SEQ ID NO: 3449075 - DNA, 25 bp, Homo sapien
cctagagcaaactgaaaggagtctt

SEQ ID NO: 3449076 - DNA, 25 bp, Homo sapien
gatgacattccagtctagacctaga

SEQ ID NO: 3449077 - DNA, 25 bp, Homo sapien
tagcatctctagatatctggaaaac

SEQ ID NO: 3449078 - DNA, 25 bp, Homo sapien
gtcatgccccaaagagatagtagag

SEQ ID NO: 3449079 - DNA, 25 bp, Homo sapien
tactatttccattggtagtggtctt

SEQ ID NO: 3449080 - DNA, 25 bp, Homo sapien
aaagacaattgttaagtgttcgttg

SEQ ID NO: 3449081 - DNA, 25 bp, Homo sapien
ccattggtagtggtcttatttgaaa

SEQ ID NO: 3449082 - DNA, 25 bp, Homo sapien
caattgttaagtgttcgttgaagga

SEQ ID NO: 3449083 - DNA, 25 bp, Homo sapien
gccgtgtgactggtcttgtctatgg

SEQ ID NO: 3449084 - DNA, 25 bp, Homo sapien
cagccgtgtgactggtcttgtctat

SEQ ID NO: 3449085 - DNA, 25 bp, Homo sapien
cccagccgtgtgactggtcttgtct

SEQ ID NO: 3449086 - DNA, 25 bp, Homo sapien
tcacccagccgtgtgactggtcttg

SEQ ID NO: 3449087 - DNA, 25 bp, Homo sapien
attggagtggctattcctagaccta

SEQ ID NO: 3449088 - DNA, 25 bp, Homo sapien
tcaactgtgattgggagtggatcca

SEQ ID NO: 3449089 - DNA, 25 bp, Homo sapien
ggatggtctcattggagtggctatt

SEQ ID NO: 3449090 - DNA, 25 bp, Homo sapien
ggtctcattggagtggctattccta

SEQ ID NO: 3449091 - DNA, 25 bp, Homo sapien
tatctaagggtaggagacttcgatt

SEQ ID NO: 3449092 - DNA, 25 bp, Homo sapien
cagttggcttattatctaagggtag

SEQ ID NO: 3449093 - DNA, 25 bp, Homo sapien
ggcttattatctaagggtaggagac

SEQ ID NO: 3449094 - DNA, 25 bp, Homo sapien
tgtcagttggcttattatctaaggg

SEQ ID NO: 3449095 - DNA, 25 bp, Homo sapien
gcagtatgttttcttcttcttcttc

SEQ ID NO: 3449096 - DNA, 25 bp, Homo sapien
gctgcagtatgttttcttcttcttc

SEQ ID NO: 3449097 - DNA, 25 bp, Homo sapien
ttcttcttcttcttcagagggaata

SEQ ID NO: 3449098 - DNA, 25 bp, Homo sapien
tcttcttcttcttcagagggaataa

SEQ ID NO: 3449099 - DNA, 25 bp, Homo sapien
tgtatttgtatccagctgtgggaga

SEQ ID NO: 3449100 - DNA, 25 bp, Homo sapien
ccctaattagtgcagtcagaactga

SEQ ID NO: 3449101 - DNA, 25 bp, Homo sapien
aatgcaggtgggctttacagcttcc

SEQ ID NO: 3449102 - DNA, 25 bp, Homo sapien
aatgttcaaacattacctcaggtgg

SEQ ID NO: 3449103 - DNA, 25 bp, Homo sapien
aaggttgcatatgatgaaggcccca

SEQ ID NO: 3449104 - DNA, 25 bp, Homo sapien
ctaaaatatgaaggttgcatatgat

SEQ ID NO: 3449105 - DNA, 25 bp, Homo sapien
tatgaaggttgcatatgatgaaggc

SEQ ID NO: 3449106 - DNA, 25 bp, Homo sapien
ttgcatatgatgaaggccccacctt

SEQ ID NO: 3449107 - DNA, 25 bp, Homo sapien
tagcatgaagagtccggtttatgtc

SEQ ID NO: 3449108 - DNA, 25 bp, Homo sapien
ttccagcctgattagcatgaagagt

SEQ ID NO: 3449109 - DNA, 25 bp, Homo sapien
gaagagtccggtttatgtcaaggaa

SEQ ID NO: 3449110 - DNA, 25 bp, Homo sapien
gatacacttccagcctgattagcat

SEQ ID NO: 3449111 - DNA, 25 bp, Homo sapien
cttggtgtgatattaggtcattaac

SEQ ID NO: 3449112 - DNA, 25 bp, Homo sapien
gatgtaggactttagtactgtaaac

SEQ ID NO: 3449113 - DNA, 25 bp, Homo sapien
gatattaggtcattaactttagatc

SEQ ID NO: 3449114 - DNA, 25 bp, Homo sapien
tagctttggggatagtttattctca

SEQ ID NO: 3449115 - DNA, 25 bp, Homo sapien
gtcaaaactcaagtctagtgccatt

SEQ ID NO: 3449116 - DNA, 25 bp, Homo sapien
tagtgccatttccacaacctaggat

SEQ ID NO: 3449117 - DNA, 25 bp, Homo sapien
tatgatagagccatccctatcccac

SEQ ID NO: 3449118 - DNA, 25 bp, Homo sapien
tttattcaagttctcataggtggca

SEQ ID NO: 3449119 - DNA, 25 bp, Homo sapien
gatcagttgcattagagttgagaca

SEQ ID NO: 3449120 - DNA, 25 bp, Homo sapien
caagcacccatgctagaaaactcca

SEQ ID NO: 3449121 - DNA, 25 bp, Homo sapien
taagctcattgttaagggttaccag

SEQ ID NO: 3449122 - DNA, 25 bp, Homo sapien
tatataggtgaaacatacagatacc

SEQ ID NO: 3449123 - DNA, 25 bp, Homo sapien
aagacatggtttctagatgccttgg

SEQ ID NO: 3449124 - DNA, 25 bp, Homo sapien
ttatgccttatcaaaggtgatagaa

SEQ ID NO: 3449125 - DNA, 25 bp, Homo sapien
atggtttctagatgccttggccttc

SEQ ID NO: 3449126 - DNA, 25 bp, Homo sapien
aatatgatcaactgtgaatcagaag

SEQ ID NO: 3449127 - DNA, 25 bp, Homo sapien
cacagcagggctagcattggaagag

SEQ ID NO: 3449128 - DNA, 25 bp, Homo sapien
tgcacagcagggctagcattggaag

SEQ ID NO: 3449129 - DNA, 25 bp, Homo sapien
ttctcctactcccctactgtgtgtg

SEQ ID NO: 3449130 - DNA, 25 bp, Homo sapien
tgaggtccttattgcactttctcct

SEQ ID NO: 3449131 - DNA, 25 bp, Homo sapien
tgtatcttcctgtgatactctgttc

SEQ ID NO: 3449132 - DNA, 25 bp, Homo sapien
gtatcttcctgtgatactctgttca

SEQ ID NO: 3449133 - DNA, 25 bp, Homo sapien
tatcttcctgtgatactctgttcat

SEQ ID NO: 3449134 - DNA, 25 bp, Homo sapien
gaccaggcatcaatccacacagtat

SEQ ID NO: 3449135 - DNA, 25 bp, Homo sapien
catctctgaccaggcatcaatccac

SEQ ID NO: 3449136 - DNA, 25 bp, Homo sapien
tttacattgtaagttagttgttgac

SEQ ID NO: 3449137 - DNA, 25 bp, Homo sapien
gtaagttagttgttgactcatctct

SEQ ID NO: 3449138 - DNA, 25 bp, Homo sapien
ggctgatctcagcaatgatgataat

SEQ ID NO: 3449139 - DNA, 25 bp, Homo sapien
ctgtgaaacagatggctgatctcag

SEQ ID NO: 3449140 - DNA, 25 bp, Homo sapien
aattatgaacatgacagtctcatcc

SEQ ID NO: 3449141 - DNA, 25 bp, Homo sapien
atggactgcctggaaattatgaaca

SEQ ID NO: 3449142 - DNA, 25 bp, Homo sapien
gaagaggccctacatctagtatgag

SEQ ID NO: 3449143 - DNA, 25 bp, Homo sapien
tctccaggtaagactatgtggacac

SEQ ID NO: 3449144 - DNA, 25 bp, Homo sapien
ggaaatcctacctctttgtagcaga

SEQ ID NO: 3449145 - DNA, 25 bp, Homo sapien
gcttgagccctgataatggttctga

SEQ ID NO: 3449146 - DNA, 25 bp, Homo sapien
taatgacaaggtagaacagttacga

SEQ ID NO: 3449147 - DNA, 25 bp, Homo sapien
aggagctaaatctggcccaccacct

SEQ ID NO: 3449148 - DNA, 25 bp, Homo sapien
gttacgatggagacatagggcccag

SEQ ID NO: 3449149 - DNA, 25 bp, Homo sapien
tgtacactctgtaggctagacatgt

SEQ ID NO: 3449150 - DNA, 25 bp, Homo sapien
taggcattgtgcctagccactttac

SEQ ID NO: 3449151 - DNA, 25 bp, Homo sapien
cattaaatacattttgggcactacc

SEQ ID NO: 3449152 - DNA, 25 bp, Homo sapien
tattccctagtatgtacaaagcaca

SEQ ID NO: 3449153 - DNA, 25 bp, Homo sapien
atctttatgtatcaagatccctgca

SEQ ID NO: 3449154 - DNA, 25 bp, Homo sapien
ggaaagacagtagagattaccagta

SEQ ID NO: 3449155 - DNA, 25 bp, Homo sapien
gacaaatgcacaatttcagagccat

SEQ ID NO: 3449156 - DNA, 25 bp, Homo sapien
gaagagagctctggtaaggtcctca

SEQ ID NO: 3449157 - DNA, 25 bp, Homo sapien
tctttcaagcaacaggtactcctat

SEQ ID NO: 3449158 - DNA, 25 bp, Homo sapien
ggctcattctctgcaacaagctaaa

SEQ ID NO: 3449159 - DNA, 25 bp, Homo sapien
gaaaacaactgtctctgttcaccat

SEQ ID NO: 3449160 - DNA, 25 bp, Homo sapien
gaaccgaaaacaactgtctctgttc

SEQ ID NO: 3449161 - DNA, 25 bp, Homo sapien
tgggaaccgaaaacaactgtctctg

SEQ ID NO: 3449162 - DNA, 25 bp, Homo sapien
accgaaaacaactgtctctgttcac

SEQ ID NO: 3449163 - DNA, 25 bp, Homo sapien
ttaagcttgaagaataacaggatct

SEQ ID NO: 3449164 - DNA, 25 bp, Homo sapien
aaaaccagttggaatatcttagtct

SEQ ID NO: 3449165 - DNA, 25 bp, Homo sapien
tcaaaaaaccagttggaatatctta

SEQ ID NO: 3449166 - DNA, 25 bp, Homo sapien
gtcttttcttcctctaggtcacttg

SEQ ID NO: 3449167 - DNA, 25 bp, Homo sapien
ccagttggaatatcttagtcttttc

SEQ ID NO: 3449168 - DNA, 25 bp, Homo sapien
ctccttcagggctaaacaaagccat

SEQ ID NO: 3449169 - DNA, 25 bp, Homo sapien
ttccctcattatcccctccttcagg

SEQ ID NO: 3449170 - DNA, 25 bp, Homo sapien
ctcattatcccctccttcagggcta

SEQ ID NO: 3449171 - DNA, 25 bp, Homo sapien
ctcttccctcattatcccctccttc

SEQ ID NO: 3449172 - DNA, 25 bp, Homo sapien
cacgaacagggcattattattgaga

SEQ ID NO: 3449173 - DNA, 25 bp, Homo sapien
taatgagcctctgaagttgagccca

SEQ ID NO: 3449174 - DNA, 25 bp, Homo sapien
tatacaaatcgtcagctctgggtgg

SEQ ID NO: 3449175 - DNA, 25 bp, Homo sapien
gagatttaccccttgtcacgaacag

SEQ ID NO: 3449176 - DNA, 25 bp, Homo sapien
acccctggcgaaaattagaaagcat

SEQ ID NO: 3449177 - DNA, 25 bp, Homo sapien
ttagacacccctggcgaaaattaga

SEQ ID NO: 3449178 - DNA, 25 bp, Homo sapien
tagacacccctggcgaaaattagaa

SEQ ID NO: 3449179 - DNA, 25 bp, Homo sapien
cacccctggcgaaaattagaaagca

SEQ ID NO: 3449180 - DNA, 25 bp, Homo sapien
tagtctgctatgggaaggccttcca

SEQ ID NO: 3449181 - DNA, 25 bp, Homo sapien
ttagtctgctatgggaaggccttcc

SEQ ID NO: 3449182 - DNA, 25 bp, Homo sapien
ctgccacttgctggccatgtaatct

SEQ ID NO: 3449183 - DNA, 25 bp, Homo sapien
tttgtccacatgtatcatagtcttg

SEQ ID NO: 3449184 - DNA, 25 bp, Homo sapien
gttacttaatctatcttggccaaag

SEQ ID NO: 3449185 - DNA, 25 bp, Homo sapien
catgttgcatgaagtctaaaatcct

SEQ ID NO: 3449186 - DNA, 25 bp, Homo sapien
gaggcagtctatagagtgggcaaat

SEQ ID NO: 3449187 - DNA, 25 bp, Homo sapien
tagagtgggcaaatgggttattctc

SEQ ID NO: 3449188 - DNA, 25 bp, Homo sapien
tattgaaacagccaggaggcagtct

SEQ ID NO: 3449189 - DNA, 25 bp, Homo sapien
gggcaaatgggttattctcaggaat

SEQ ID NO: 3449190 - DNA, 25 bp, Homo sapien
actcagatgtaggaaagattgtaat

SEQ ID NO: 3449191 - DNA, 25 bp, Homo sapien
cagagtaagcaactcagatgtagga

SEQ ID NO: 3449192 - DNA, 25 bp, Homo sapien
tcttggatcaccatagcatcagata

SEQ ID NO: 3449193 - DNA, 25 bp, Homo sapien
cttggatcaccatagcatcagatac

SEQ ID NO: 3449194 - DNA, 25 bp, Homo sapien
gtcttggatcaccatagcatcagat

SEQ ID NO: 3449195 - DNA, 25 bp, Homo sapien
ggtcttggatcaccatagcatcaga

SEQ ID NO: 3449196 - DNA, 25 bp, Homo sapien
atattttatatccataacagtaacc

SEQ ID NO: 3449197 - DNA, 25 bp, Homo sapien
tcattatttgtattaccactgtaat

SEQ ID NO: 3449198 - DNA, 25 bp, Homo sapien
tttatatccataacagtaaccccaa

SEQ ID NO: 3449199 - DNA, 25 bp, Homo sapien
attatttgtattaccactgtaatgg

SEQ ID NO: 3449200 - DNA, 25 bp, Homo sapien
cttcactttaagagataactgagaa

SEQ ID NO: 3449201 - DNA, 25 bp, Homo sapien
gaaagccttgcactccaacgtgtct

SEQ ID NO: 3449202 - DNA, 25 bp, Homo sapien
gcatctctaaaagggtatctcacat

SEQ ID NO: 3449203 - DNA, 25 bp, Homo sapien
tatcattagtccatagggatatcag

SEQ ID NO: 3449204 - DNA, 25 bp, Homo sapien
cctttgttaggctctcccccagatg

SEQ ID NO: 3449205 - DNA, 25 bp, Homo sapien
ttgttaggctctcccccagatggtg

SEQ ID NO: 3449206 - DNA, 25 bp, Homo sapien
taggctctcccccagatggtgttct

SEQ ID NO: 3449207 - DNA, 25 bp, Homo sapien
tctcccccagatggtgttctctcca

SEQ ID NO: 3449208 - DNA, 25 bp, Homo sapien
cactggaatagtgtacgttgtaccc

SEQ ID NO: 3449209 - DNA, 25 bp, Homo sapien
gggcttttagtatacctgtcactgg

SEQ ID NO: 3449210 - DNA, 25 bp, Homo sapien
ccatgttagtgaatggtacctccat

SEQ ID NO: 3449211 - DNA, 25 bp, Homo sapien
tctgctcatagagagctgctcatct

SEQ ID NO: 3449212 - DNA, 25 bp, Homo sapien
tacatctagctgacatatagatctc

SEQ ID NO: 3449213 - DNA, 25 bp, Homo sapien
tatagatctcttttgcgcttcaaac

SEQ ID NO: 3449214 - DNA, 25 bp, Homo sapien
gctgtgcctttggataccttattta

SEQ ID NO: 3449215 - DNA, 25 bp, Homo sapien
gccaacaattctcaaacgtatacat

SEQ ID NO: 3449216 - DNA, 25 bp, Homo sapien
tcttcatggtgcactggcgcttggc

SEQ ID NO: 3449217 - DNA, 25 bp, Homo sapien
ggcattaatgatgccactagtggct

SEQ ID NO: 3449218 - DNA, 25 bp, Homo sapien
ggctgtctcgcttaatcattgtggc

SEQ ID NO: 3449219 - DNA, 25 bp, Homo sapien
tgacaatgcttcagacttgatgact

SEQ ID NO: 3449220 - DNA, 25 bp, Homo sapien
gtagtccacgcagcgaaagctgttc

SEQ ID NO: 3449221 - DNA, 25 bp, Homo sapien
agtccacgcagcgaaagctgttcca

SEQ ID NO: 3449222 - DNA, 25 bp, Homo sapien
aggtagtccacgcagcgaaagctgt

SEQ ID NO: 3449223 - DNA, 25 bp, Homo sapien
ctcaggtagtccacgcagcgaaagc

SEQ ID NO: 3449224 - DNA, 25 bp, Homo sapien
gttctcttttatctggtattgttag

SEQ ID NO: 3449225 - DNA, 25 bp, Homo sapien
tcttttatctggtattgttagacca

SEQ ID NO: 3449226 - DNA, 25 bp, Homo sapien
ctcttttatctggtattgttagacc

SEQ ID NO: 3449227 - DNA, 25 bp, Homo sapien
tctcttttatctggtattgttagac

SEQ ID NO: 3449228 - DNA, 25 bp, Homo sapien
cacaaacactcgttattacctatct

SEQ ID NO: 3449229 - DNA, 25 bp, Homo sapien
tgagtccctgtcaaactgtttccca

SEQ ID NO: 3449230 - DNA, 25 bp, Homo sapien
taacaatcctaataggtgtgaggta

SEQ ID NO: 3449231 - DNA, 25 bp, Homo sapien
aactttttgagtccctgtcaaactg

SEQ ID NO: 3449232 - DNA, 25 bp, Homo sapien
gaaatggaggatgcaagccctaagg

SEQ ID NO: 3449233 - DNA, 25 bp, Homo sapien
caaagtttatgctcagtgtccccag

SEQ ID NO: 3449234 - DNA, 25 bp, Homo sapien
ccctaaggttgctggcaagatctga

SEQ ID NO: 3449235 - DNA, 25 bp, Homo sapien
caacttgactgatttgtggacctca

SEQ ID NO: 3449236 - DNA, 25 bp, Homo sapien
aagtgttgaggatgactcagcacca

SEQ ID NO: 3449237 - DNA, 25 bp, Homo sapien
tcactgcccactgaaaaacgcttgt

SEQ ID NO: 3449238 - DNA, 25 bp, Homo sapien
tcctttggagaataggtcagcagca

SEQ ID NO: 3449239 - DNA, 25 bp, Homo sapien
taacctgggcaaatgtctgcctgaa

SEQ ID NO: 3449240 - DNA, 25 bp, Homo sapien
ccatgttctccgcacattgtctgca

SEQ ID NO: 3449241 - DNA, 25 bp, Homo sapien
gttgtgtagttagcttttccatgtg

SEQ ID NO: 3449242 - DNA, 25 bp, Homo sapien
catctttgttatagtctttatctgg

SEQ ID NO: 3449243 - DNA, 25 bp, Homo sapien
agcctccatgttctccgcacattgt

SEQ ID NO: 3449244 - DNA, 25 bp, Homo sapien
tatgaaaataacctttgcccctcat

SEQ ID NO: 3449245 - DNA, 25 bp, Homo sapien
ctatgaaaataacctttgcccctca

SEQ ID NO: 3449246 - DNA, 25 bp, Homo sapien
ccatttgtgcgttcaaagatagtac

SEQ ID NO: 3449247 - DNA, 25 bp, Homo sapien
tcttccatttgtgcgttcaaagata

SEQ ID NO: 3449248 - DNA, 25 bp, Homo sapien
caaagatagtaccagattcaaaagc

SEQ ID NO: 3449249 - DNA, 25 bp, Homo sapien
tgtgcgttcaaagatagtaccagat

SEQ ID NO: 3449250 - DNA, 25 bp, Homo sapien
ttctatttgtgtagtcatggtgatg

SEQ ID NO: 3449251 - DNA, 25 bp, Homo sapien
tactttgcaggtttatagcctctta

SEQ ID NO: 3449252 - DNA, 25 bp, Homo sapien
ataatactttgcaggtttatagcct

SEQ ID NO: 3449253 - DNA, 25 bp, Homo sapien
aatactttgcaggtttatagcctct

SEQ ID NO: 3449254 - DNA, 25 bp, Homo sapien
gctggcttcccgccgttctttgaag

SEQ ID NO: 3449255 - DNA, 25 bp, Homo sapien
gccgttctttgaaggtgtcaaccat

SEQ ID NO: 3449256 - DNA, 25 bp, Homo sapien
ttcccgccgttctttgaaggtgtca

SEQ ID NO: 3449257 - DNA, 25 bp, Homo sapien
ccttgctggcttcccgccgttcttt

SEQ ID NO: 3449258 - DNA, 25 bp, Homo sapien
agaatcctgcttgccttgagctgta

SEQ ID NO: 3449259 - DNA, 25 bp, Homo sapien
ccccttggaaaagccgtctgtacag

SEQ ID NO: 3449260 - DNA, 25 bp, Homo sapien
ccatgtactgagtcctgtgtaggga

SEQ ID NO: 3449261 - DNA, 25 bp, Homo sapien
gctgatttgctggtgtgatttccat

SEQ ID NO: 3449262 - DNA, 25 bp, Homo sapien
caaaggccgtctatgtagtagcagc

SEQ ID NO: 3449263 - DNA, 25 bp, Homo sapien
caaggaatccgctaaaagaccatgc

SEQ ID NO: 3449264 - DNA, 25 bp, Homo sapien
tgctgcagaaggcaacacaaagctc

SEQ ID NO: 3449265 - DNA, 25 bp, Homo sapien
tattctggcactggaacgacagcca

SEQ ID NO: 3449266 - DNA, 25 bp, Homo sapien
tatttcaatggtccagttgactatg

SEQ ID NO: 3449267 - DNA, 25 bp, Homo sapien
ggaaatggtcctgccagtatcctga

SEQ ID NO: 3449268 - DNA, 25 bp, Homo sapien
ctgaggagataaagtgtatgggtcc

SEQ ID NO: 3449269 - DNA, 25 bp, Homo sapien
tccagttgactatgtattttcttcc

SEQ ID NO: 3449270 - DNA, 25 bp, Homo sapien
tacgcacccttagataagcttagga

SEQ ID NO: 3449271 - DNA, 25 bp, Homo sapien
caactttaaggtgctatagggacac

SEQ ID NO: 3449272 - DNA, 25 bp, Homo sapien
gggaaacacgctggtacataaagat

SEQ ID NO: 3449273 - DNA, 25 bp, Homo sapien
tagatgttagttgtgccagggaaac

SEQ ID NO: 3449274 - DNA, 25 bp, Homo sapien
taatgttgctattgaaagttactag

SEQ ID NO: 3449275 - DNA, 25 bp, Homo sapien
gctattgaaagttactaggctttta

SEQ ID NO: 3449276 - DNA, 25 bp, Homo sapien
gttgctattgaaagttactaggctt

SEQ ID NO: 3449277 - DNA, 25 bp, Homo sapien
ctttaatgttgctattgaaagttac

SEQ ID NO: 3449278 - DNA, 25 bp, Homo sapien
tgcgggagggtagataggggagtac

SEQ ID NO: 3449279 - DNA, 25 bp, Homo sapien
atattgcgggagggtagatagggga

SEQ ID NO: 3449280 - DNA, 25 bp, Homo sapien
tattgcgggagggtagataggggag

SEQ ID NO: 3449281 - DNA, 25 bp, Homo sapien
agataggggagtacggttgaacttg

SEQ ID NO: 3449282 - DNA, 25 bp, Homo sapien
caagacgagagctaaaaaggagttg

SEQ ID NO: 3449283 - DNA, 25 bp, Homo sapien
ctaataatcaagacgagagctaaaa

SEQ ID NO: 3449284 - DNA, 25 bp, Homo sapien
ataatcaagacgagagctaaaaagg

SEQ ID NO: 3449285 - DNA, 25 bp, Homo sapien
atcaagacgagagctaaaaaggagt

SEQ ID NO: 3449286 - DNA, 25 bp, Homo sapien
gttcatgtcataaggccatccctgg

SEQ ID NO: 3449287 - DNA, 25 bp, Homo sapien
gacagatctgtgctatactaacaca

SEQ ID NO: 3449288 - DNA, 25 bp, Homo sapien
tgctccaggcatcatagcacatgtt

SEQ ID NO: 3449289 - DNA, 25 bp, Homo sapien
taattcccacagatgagagtttcca

SEQ ID NO: 3449290 - DNA, 25 bp, Homo sapien
ccctgatagcccaaccttgatgtca

SEQ ID NO: 3449291 - DNA, 25 bp, Homo sapien
gatgtcacttttaagggccgcctcc

SEQ ID NO: 3449292 - DNA, 25 bp, Homo sapien
taagggccgcctccttatcagggac

SEQ ID NO: 3449293 - DNA, 25 bp, Homo sapien
accttgatgtcacttttaagggccg

SEQ ID NO: 3449294 - DNA, 25 bp, Homo sapien
agatgaggtagatccaatctgcatt

SEQ ID NO: 3449295 - DNA, 25 bp, Homo sapien
aagtagatgaggtagatccaatctg

SEQ ID NO: 3449296 - DNA, 25 bp, Homo sapien
gtagatgaggtagatccaatctgca

SEQ ID NO: 3449297 - DNA, 25 bp, Homo sapien
ggaagtagatgaggtagatccaatc

SEQ ID NO: 3449298 - DNA, 25 bp, Homo sapien
tctgatgggccaagatccaagccag

SEQ ID NO: 3449299 - DNA, 25 bp, Homo sapien
ccaaatgttttctgatgggccaaga

SEQ ID NO: 3449300 - DNA, 25 bp, Homo sapien
aatgttttctgatgggccaagatcc

SEQ ID NO: 3449301 - DNA, 25 bp, Homo sapien
tttctgatgggccaagatccaagcc

SEQ ID NO: 3449302 - DNA, 25 bp, Homo sapien
tttgtatatttgctctggcaaattg

SEQ ID NO: 3449303 - DNA, 25 bp, Homo sapien
tctggcaaattgtccgttcaaatat

SEQ ID NO: 3449304 - DNA, 25 bp, Homo sapien
tatatttgctctggcaaattgtccg

SEQ ID NO: 3449305 - DNA, 25 bp, Homo sapien
aattgtccgttcaaatatttgccca

SEQ ID NO: 3449306 - DNA, 25 bp, Homo sapien
tcaaacattgacgagtaggtatagt

SEQ ID NO: 3449307 - DNA, 25 bp, Homo sapien
gagaagggcactccaaataggtgga

SEQ ID NO: 3449308 - DNA, 25 bp, Homo sapien
aagcctgaggtgttttcaaggcaca

SEQ ID NO: 3449309 - DNA, 25 bp, Homo sapien
taggtggagcacatttaagaaagcc

SEQ ID NO: 3449310 - DNA, 25 bp, Homo sapien
catcatactgtttgttgcctgagta

SEQ ID NO: 3449311 - DNA, 25 bp, Homo sapien
gcctgtgtgatgctctttttgcaat

SEQ ID NO: 3449312 - DNA, 25 bp, Homo sapien
gagattcatgccttaaggagatcct

SEQ ID NO: 3449313 - DNA, 25 bp, Homo sapien
tttgtggaggctaaagatatgaccc

SEQ ID NO: 3449314 - DNA, 25 bp, Homo sapien
gaaagtataatgtgataggcagatt

SEQ ID NO: 3449315 - DNA, 25 bp, Homo sapien
gtctttgatcaggtgtacttgaatc

SEQ ID NO: 3449316 - DNA, 25 bp, Homo sapien
tcttgtagatgactgaattaaactg

SEQ ID NO: 3449317 - DNA, 25 bp, Homo sapien
gatcaggtgtacttgaatctgagcc

SEQ ID NO: 3449318 - DNA, 25 bp, Homo sapien
cgaagtagatcactggtctgtcaca

SEQ ID NO: 3449319 - DNA, 25 bp, Homo sapien
taactgaaggatgccaacgtggtgg

SEQ ID NO: 3449320 - DNA, 25 bp, Homo sapien
gcttaaaagccctacaatccaatgg

SEQ ID NO: 3449321 - DNA, 25 bp, Homo sapien
caaaccttgtatgcgaatccactga

SEQ ID NO: 3449322 - DNA, 25 bp, Homo sapien
ttgcatctttttatattgtatatac

SEQ ID NO: 3449323 - DNA, 25 bp, Homo sapien
aatttgcatctttttatattgtata

SEQ ID NO: 3449324 - DNA, 25 bp, Homo sapien
gagtttaccacccgctttgggctgc

SEQ ID NO: 3449325 - DNA, 25 bp, Homo sapien
gcggacctgacccatttacctctta

SEQ ID NO: 3449326 - DNA, 25 bp, Homo sapien
gaaagatccgccaccgggttgaatc

SEQ ID NO: 3449327 - DNA, 25 bp, Homo sapien
tctcgtgccggtatttagccttaaa

SEQ ID NO: 3449328 - DNA, 25 bp, Homo sapien
ttagatctcagcacaatcatttctt

SEQ ID NO: 3449329 - DNA, 25 bp, Homo sapien
ttttagatctcagcacaatcatttc

SEQ ID NO: 3449330 - DNA, 25 bp, Homo sapien
tagatctcagcacaatcatttcttc

SEQ ID NO: 3449331 - DNA, 25 bp, Homo sapien
aaaaacatggggcactccatgaatt

SEQ ID NO: 3449332 - DNA, 25 bp, Homo sapien
ttaggttgaattcacaagaattgta

SEQ ID NO: 3449333 - DNA, 25 bp, Homo sapien
gaattgtaactaaaatctcattgaa

SEQ ID NO: 3449334 - DNA, 25 bp, Homo sapien
caactatattaccaccataattgtt

SEQ ID NO: 3449335 - DNA, 25 bp, Homo sapien
attttagatatgtaacacaaatgtt

SEQ ID NO: 3449336 - DNA, 25 bp, Homo sapien
tgtgttattctttagtcattactta

SEQ ID NO: 3449337 - DNA, 25 bp, Homo sapien
tataaagtatggaaataactataga

SEQ ID NO: 3449338 - DNA, 25 bp, Homo sapien
cagtgtgaagaaatctgcttcgcca

SEQ ID NO: 3449339 - DNA, 25 bp, Homo sapien
gaagaaatctgcttcgccaactcat

SEQ ID NO: 3449340 - DNA, 25 bp, Homo sapien
tgtgaatgactccagtgtgaagaaa

SEQ ID NO: 3449341 - DNA, 25 bp, Homo sapien
gatgtgaatgactccagtgtgaaga

SEQ ID NO: 3449342 - DNA, 25 bp, Homo sapien
gagctgcttgaatgcgaagagatgg

SEQ ID NO: 3449343 - DNA, 25 bp, Homo sapien
cctcgccggatagggagctgcttga

SEQ ID NO: 3449344 - DNA, 25 bp, Homo sapien
tgggggaaggtttggcttctctcga

SEQ ID NO: 3449345 - DNA, 25 bp, Homo sapien
tctctcgaagtctcagtgtttttcc

SEQ ID NO: 3449346 - DNA, 25 bp, Homo sapien
tactactacggcgtctctgaaaaca

SEQ ID NO: 3449347 - DNA, 25 bp, Homo sapien
atgtctaatactactacggcgtctc

SEQ ID NO: 3449348 - DNA, 25 bp, Homo sapien
ctaatactactacggcgtctctgaa

SEQ ID NO: 3449349 - DNA, 25 bp, Homo sapien
actactacggcgtctctgaaaacac

SEQ ID NO: 3449350 - DNA, 25 bp, Homo sapien
cctgaatcccttggcttagtcccag

SEQ ID NO: 3449351 - DNA, 25 bp, Homo sapien
gttcccaccggcaccacacctgaat

SEQ ID NO: 3449352 - DNA, 25 bp, Homo sapien
ttagtcccagcctcatacccgaaca

SEQ ID NO: 3449353 - DNA, 25 bp, Homo sapien
accacacctgaatcccttggcttag

SEQ ID NO: 3449354 - DNA, 25 bp, Homo sapien
gaatgagagagtgacataaacgaaa

SEQ ID NO: 3449355 - DNA, 25 bp, Homo sapien
aaatcaataaccgaaagagaacagt

SEQ ID NO: 3449356 - DNA, 25 bp, Homo sapien
cggatagaagcagggaaatactcca

SEQ ID NO: 3449357 - DNA, 25 bp, Homo sapien
ctggcaatttaaacacagaatgaga

SEQ ID NO: 3449358 - DNA, 25 bp, Homo sapien
tatatgccagacctccgggtaatca

SEQ ID NO: 3449359 - DNA, 25 bp, Homo sapien
caacattcgctcataatttagggag

SEQ ID NO: 3449360 - DNA, 25 bp, Homo sapien
tcaagatacagtcatcccatcctca

SEQ ID NO: 3449361 - DNA, 25 bp, Homo sapien
tcaggaatccacaacgcagtgggag

SEQ ID NO: 3449362 - DNA, 25 bp, Homo sapien
tacacaatgagtaataatggaccag

SEQ ID NO: 3449363 - DNA, 25 bp, Homo sapien
cacagttcctggcatcaacatacag

SEQ ID NO: 3449364 - DNA, 25 bp, Homo sapien
aaccttcttatggtgttacacaatg

SEQ ID NO: 3449365 - DNA, 25 bp, Homo sapien
ctatagaaggccagttcattataca

SEQ ID NO: 3449366 - DNA, 25 bp, Homo sapien
catttgctgaatgagcggtatgtac

SEQ ID NO: 3449367 - DNA, 25 bp, Homo sapien
caggagtaggatgaggcctagaatc

SEQ ID NO: 3449368 - DNA, 25 bp, Homo sapien
taatagcacttagtgcttctgatgc

SEQ ID NO: 3449369 - DNA, 25 bp, Homo sapien
cacatgttgaatatcactgtaatac

SEQ ID NO: 3449370 - DNA, 25 bp, Homo sapien
gttcattttggaaatcgtgtttcat

SEQ ID NO: 3449371 - DNA, 25 bp, Homo sapien
tcattccgagaaggcagtcaggctc

SEQ ID NO: 3449372 - DNA, 25 bp, Homo sapien
tgaaagattaagttcattttggaaa

SEQ ID NO: 3449373 - DNA, 25 bp, Homo sapien
tattgacatctctatcctcagtttc

SEQ ID NO: 3449374 - DNA, 25 bp, Homo sapien
tgaccattggtcttctgagttttgc

SEQ ID NO: 3449375 - DNA, 25 bp, Homo sapien
ttctatgaccattggtcttctgagt

SEQ ID NO: 3449376 - DNA, 25 bp, Homo sapien
gctgaccatgcatagatgctgccat

SEQ ID NO: 3449377 - DNA, 25 bp, Homo sapien
tctagagaaggactgggctgaccat

SEQ ID NO: 3449378 - DNA, 25 bp, Homo sapien
gctgtactaagtactgtggctgaga

SEQ ID NO: 3449379 - DNA, 25 bp, Homo sapien
taagacccatatgtaaatccaggaa

SEQ ID NO: 3449380 - DNA, 25 bp, Homo sapien
ggctgagataatcaatcctaaactg

SEQ ID NO: 3449381 - DNA, 25 bp, Homo sapien
taaaagtcaaaatggccagtctggc

SEQ ID NO: 3449382 - DNA, 25 bp, Homo sapien
gaagcagcgtctgaacaggaagttt

SEQ ID NO: 3449383 - DNA, 25 bp, Homo sapien
agcagcgtctgaacaggaagtttga

SEQ ID NO: 3449384 - DNA, 25 bp, Homo sapien
tgaagcagcgtctgaacaggaagtt

SEQ ID NO: 3449385 - DNA, 25 bp, Homo sapien
cttgaagcagcgtctgaacaggaag

SEQ ID NO: 3449386 - DNA, 25 bp, Homo sapien
gacaaaaatggaagtgtagccaatg

SEQ ID NO: 3449387 - DNA, 25 bp, Homo sapien
agcttgtcagtaacaacagtagaca

SEQ ID NO: 3449388 - DNA, 25 bp, Homo sapien
aattacaaaaagcttgtcagtaaca

SEQ ID NO: 3449389 - DNA, 25 bp, Homo sapien
aatggaagtgtagccaatgatgcat

SEQ ID NO: 3449390 - DNA, 25 bp, Homo sapien
ttatacattagtgaatttaaattca

SEQ ID NO: 3449391 - DNA, 25 bp, Homo sapien
tatacattagtgaatttaaattcac

SEQ ID NO: 3449392 - DNA, 25 bp, Homo sapien
tatagataagacaacggaggctcag

SEQ ID NO: 3449393 - DNA, 25 bp, Homo sapien
tattagcgtacttgaacatgcctca

SEQ ID NO: 3449394 - DNA, 25 bp, Homo sapien
tacaatgaggcaatcagaggtctcc

SEQ ID NO: 3449395 - DNA, 25 bp, Homo sapien
ctaggagctaggaatacggtggtac

SEQ ID NO: 3449396 - DNA, 25 bp, Homo sapien
tgacaatactaaactagcaaaccag

SEQ ID NO: 3449397 - DNA, 25 bp, Homo sapien
tactttatcacatagagaattacct

SEQ ID NO: 3449398 - DNA, 25 bp, Homo sapien
aacgtatgtggttgttgtagaagca

SEQ ID NO: 3449399 - DNA, 25 bp, Homo sapien
atactaaactagcaaaccagacctg

SEQ ID NO: 3449400 - DNA, 25 bp, Homo sapien
ctatgccaatcagtgagcttctgaa

SEQ ID NO: 3449401 - DNA, 25 bp, Homo sapien
caaactatgccaatcagtgagcttc

SEQ ID NO: 3449402 - DNA, 25 bp, Homo sapien
tggttgccaggcgtccatttttagt

SEQ ID NO: 3449403 - DNA, 25 bp, Homo sapien
gccaaagaactgggatagaaaacac

SEQ ID NO: 3449404 - DNA, 25 bp, Homo sapien
tatatcatagacagctaaagaagaa

SEQ ID NO: 3449405 - DNA, 25 bp, Homo sapien
aaaagttagctatctgaaataccaa

SEQ ID NO: 3449406 - DNA, 25 bp, Homo sapien
ccaaactaccacattttgattcaaa

SEQ ID NO: 3449407 - DNA, 25 bp, Homo sapien
aatatatcatagacagctaaagaag

SEQ ID NO: 3449408 - DNA, 25 bp, Homo sapien
cacctctcctggatatgaatgctat

SEQ ID NO: 3449409 - DNA, 25 bp, Homo sapien
tctcctggatatgaatgctattaga

SEQ ID NO: 3449410 - DNA, 25 bp, Homo sapien
cctggatatgaatgctattagaagt

SEQ ID NO: 3449411 - DNA, 25 bp, Homo sapien
aatcacctctcctggatatgaatgc

SEQ ID NO: 3449412 - DNA, 25 bp, Homo sapien
taatctgaaagactagaggaatcgc

SEQ ID NO: 3449413 - DNA, 25 bp, Homo sapien
aaatactgcataatggtatagacca

SEQ ID NO: 3449414 - DNA, 25 bp, Homo sapien
tggtggcagtggaacggtatgatac

SEQ ID NO: 3449415 - DNA, 25 bp, Homo sapien
tgacaaagcgtcatccaatggatta

SEQ ID NO: 3449416 - DNA, 25 bp, Homo sapien
tctttcagcaatgcctgagtcctct

SEQ ID NO: 3449417 - DNA, 25 bp, Homo sapien
cctctttatagaaacttcattttgc

SEQ ID NO: 3449418 - DNA, 25 bp, Homo sapien
tttgagtatttgctatataccaggc

SEQ ID NO: 3449419 - DNA, 25 bp, Homo sapien
ttgctaagttagcaaccattcattt

SEQ ID NO: 3449420 - DNA, 25 bp, Homo sapien
atggacacaccatcaggagataaga

SEQ ID NO: 3449421 - DNA, 25 bp, Homo sapien
aatggacacaccatcaggagataag

SEQ ID NO: 3449422 - DNA, 25 bp, Homo sapien
aaatggacacaccatcaggagataa

SEQ ID NO: 3449423 - DNA, 25 bp, Homo sapien
gatgagaccttaaagcccaaaccca

SEQ ID NO: 3449424 - DNA, 25 bp, Homo sapien
actgcacagatgagaccttaaagcc

SEQ ID NO: 3449425 - DNA, 25 bp, Homo sapien
tgcacagatgagaccttaaagccca

SEQ ID NO: 3449426 - DNA, 25 bp, Homo sapien
cacagatgagaccttaaagcccaaa

SEQ ID NO: 3449427 - DNA, 25 bp, Homo sapien
ccaagtggactaagatagcagctaa

SEQ ID NO: 3449428 - DNA, 25 bp, Homo sapien
gcagaggccccgtgaatgaggttat

SEQ ID NO: 3449429 - DNA, 25 bp, Homo sapien
caatacaaccaaagcaatgcagtgc

SEQ ID NO: 3449430 - DNA, 25 bp, Homo sapien
caacttctacatgccaggtgtggta

SEQ ID NO: 3449431 - DNA, 25 bp, Homo sapien
cgtatactctgctgttgtgccaaga

SEQ ID NO: 3449432 - DNA, 25 bp, Homo sapien
gcacaagttggctaatggtcattat

SEQ ID NO: 3449433 - DNA, 25 bp, Homo sapien
tggtccatgtgtgcttgtaaagaac

SEQ ID NO: 3449434 - DNA, 25 bp, Homo sapien
tactggtccatcttggtaagtggtc

SEQ ID NO: 3449435 - DNA, 25 bp, Homo sapien
tgcttatctggagagttacaattta

SEQ ID NO: 3449436 - DNA, 25 bp, Homo sapien
tacattttataacctacaaccttgc

SEQ ID NO: 3449437 - DNA, 25 bp, Homo sapien
tggctagactctcccatacaatgtt

SEQ ID NO: 3449438 - DNA, 25 bp, Homo sapien
cctacaaccttgctaaatcaaatag

SEQ ID NO: 3449439 - DNA, 25 bp, Homo sapien
tttgcctggcgtagagtgtgctcgt

SEQ ID NO: 3449440 - DNA, 25 bp, Homo sapien
ccgggtcgcggctgctaattggact

SEQ ID NO: 3449441 - DNA, 25 bp, Homo sapien
tttgctcaaattacctgggcgcagc

SEQ ID NO: 3449442 - DNA, 25 bp, Homo sapien
atctttggctgactcgtgacgcggc

SEQ ID NO: 3449443 - DNA, 25 bp, Homo sapien
aatttttctggatatatcaacaatt

SEQ ID NO: 3449444 - DNA, 25 bp, Homo sapien
tttccctatcttgctggcctggaaa

SEQ ID NO: 3449445 - DNA, 25 bp, Homo sapien
tggaaacatggacatagttcctttt

SEQ ID NO: 3449446 - DNA, 25 bp, Homo sapien
gcctggaaacatggacatagttcct

SEQ ID NO: 3449447 - DNA, 25 bp, Homo sapien
ccagcctactactcttttattagtc

SEQ ID NO: 3449448 - DNA, 25 bp, Homo sapien
cctagtttagatgccaatgattgaa

SEQ ID NO: 3449449 - DNA, 25 bp, Homo sapien
cactgaaggacatgccaagtaacca

SEQ ID NO: 3449450 - DNA, 25 bp, Homo sapien
gatattaagaaagctccatacactg

SEQ ID NO: 3449451 - DNA, 25 bp, Homo sapien
catgactttttgataagacatacac

SEQ ID NO: 3449452 - DNA, 25 bp, Homo sapien
tgagctttcccgatcttgacatgtg

SEQ ID NO: 3449453 - DNA, 25 bp, Homo sapien
ctttggcattattgtgtgtgtgagc

SEQ ID NO: 3449454 - DNA, 25 bp, Homo sapien
cttgacatgtgttataggactttgg

SEQ ID NO: 3449455 - DNA, 25 bp, Homo sapien
aggactttgggaatacactaactgg

SEQ ID NO: 3449456 - DNA, 25 bp, Homo sapien
gcctttgtcacattcaagatgcgtc

SEQ ID NO: 3449457 - DNA, 25 bp, Homo sapien
taagccagcagctatgcgagccttt

SEQ ID NO: 3449458 - DNA, 25 bp, Homo sapien
tatccctgccattggtaagccagca

SEQ ID NO: 3449459 - DNA, 25 bp, Homo sapien
tgttgtaagaaaaggtatccctgcc

SEQ ID NO: 3449460 - DNA, 25 bp, Homo sapien
tttagaactgctgtgtatgtgcatc

SEQ ID NO: 3449461 - DNA, 25 bp, Homo sapien
ttaataagtatggactaaagctgca

SEQ ID NO: 3449462 - DNA, 25 bp, Homo sapien
tgcattacagcatacagctacttga

SEQ ID NO: 3449463 - DNA, 25 bp, Homo sapien
tgccacattatataggctagcaaga

SEQ ID NO: 3449464 - DNA, 25 bp, Homo sapien
tgtgtatcacaggtatttttcaggt

SEQ ID NO: 3449465 - DNA, 25 bp, Homo sapien
aaagaatgtaagatcctcttttgtg

SEQ ID NO: 3449466 - DNA, 25 bp, Homo sapien
tgtacaaagcctgttaaaaggtata

SEQ ID NO: 3449467 - DNA, 25 bp, Homo sapien
tgaaggtcatgatagtcaagcaaac

SEQ ID NO: 3449468 - DNA, 25 bp, Homo sapien
gaccaccaataacaagaccagtcag

SEQ ID NO: 3449469 - DNA, 25 bp, Homo sapien
gaccagtcagtccactccgtgttat

SEQ ID NO: 3449470 - DNA, 25 bp, Homo sapien
gccaagaaaacagggtatagaccac

SEQ ID NO: 3449471 - DNA, 25 bp, Homo sapien
tatggtacaggtttcacaatccaaa

SEQ ID NO: 3449472 - DNA, 25 bp, Homo sapien
ggcaaacccatctgtgatacatatt

SEQ ID NO: 3449473 - DNA, 25 bp, Homo sapien
tcctagaagtcttaagataaaactg

SEQ ID NO: 3449474 - DNA, 25 bp, Homo sapien
catattagtcctagaagtcttaaga

SEQ ID NO: 3449475 - DNA, 25 bp, Homo sapien
agaaaacattgagatagttcaatag

SEQ ID NO: 3449476 - DNA, 25 bp, Homo sapien
gttctaatccagtaacttaagatgt

SEQ ID NO: 3449477 - DNA, 25 bp, Homo sapien
gttcagacccaaggtatgctgaaaa

SEQ ID NO: 3449478 - DNA, 25 bp, Homo sapien
tgtgtggtaacagagctgattgata

SEQ ID NO: 3449479 - DNA, 25 bp, Homo sapien
agtttatattgttcagacccaaggt

SEQ ID NO: 3449480 - DNA, 25 bp, Homo sapien
tgtggccagcacagtatttttcaga

SEQ ID NO: 3449481 - DNA, 25 bp, Homo sapien
ctaagctgcggatcaaaaagggaat

SEQ ID NO: 3449482 - DNA, 25 bp, Homo sapien
gtagcctcagtactctcaacaccag

SEQ ID NO: 3449483 - DNA, 25 bp, Homo sapien
aaatttgtagtgttgtgtggccagc

SEQ ID NO: 3449484 - DNA, 25 bp, Homo sapien
gaattacataagcaggccatcagtg

SEQ ID NO: 3449485 - DNA, 25 bp, Homo sapien
gacaccctgctgagtagaatataaa

SEQ ID NO: 3449486 - DNA, 25 bp, Homo sapien
cctggaacatgagagctaatttgga

SEQ ID NO: 3449487 - DNA, 25 bp, Homo sapien
ctaatttggagtacagacagacacc

SEQ ID NO: 3449488 - DNA, 25 bp, Homo sapien
agtaattgtgagaaccatgtcggtc

SEQ ID NO: 3449489 - DNA, 25 bp, Homo sapien
ctacaacctgttaactgactggact

SEQ ID NO: 3449490 - DNA, 25 bp, Homo sapien
tgttaaaatgtagtcacacctctga

SEQ ID NO: 3449491 - DNA, 25 bp, Homo sapien
cttctctttgaacagcttagcagtg

SEQ ID NO: 3449492 - DNA, 25 bp, Homo sapien
gacatcggttccaactgtacactga

SEQ ID NO: 3449493 - DNA, 25 bp, Homo sapien
gatgaacctgcttatacctaagggc

SEQ ID NO: 3449494 - DNA, 25 bp, Homo sapien
tactactgcacttgagcatgaatgg

SEQ ID NO: 3449495 - DNA, 25 bp, Homo sapien
cactgaaacctgcttatagagagac

SEQ ID NO: 3449496 - DNA, 25 bp, Homo sapien
gccaggctccgttgtaggggttaca

SEQ ID NO: 3449497 - DNA, 25 bp, Homo sapien
caggctccgttgtaggggttacaga

SEQ ID NO: 3449498 - DNA, 25 bp, Homo sapien
cttcctgccaggctccgttgtaggg

SEQ ID NO: 3449499 - DNA, 25 bp, Homo sapien
ctgccaggctccgttgtaggggtta

SEQ ID NO: 3449500 - DNA, 25 bp, Homo sapien
tgggacatcttcaccggacacattt

SEQ ID NO: 3449501 - DNA, 25 bp, Homo sapien
ataaggtgtcggtggagttctgctc

SEQ ID NO: 3449502 - DNA, 25 bp, Homo sapien
gagtcgctacctacgggcagtctta

SEQ ID NO: 3449503 - DNA, 25 bp, Homo sapien
tcttagccaacgagactggactggc

SEQ ID NO: 3449504 - DNA, 25 bp, Homo sapien
atgaggccgcggctgctgaaatgca

SEQ ID NO: 3449505 - DNA, 25 bp, Homo sapien
gttaaacggtatcggaggctgcagc

SEQ ID NO: 3449506 - DNA, 25 bp, Homo sapien
tgctgcaaaggctgttaaacggtat

SEQ ID NO: 3449507 - DNA, 25 bp, Homo sapien
agtgacagtggcagcgccgaaaaga

SEQ ID NO: 3449508 - DNA, 25 bp, Homo sapien
tgctacatagtggacgggactacct

SEQ ID NO: 3449509 - DNA, 25 bp, Homo sapien
gagatatcacctcttggtccacaaa

SEQ ID NO: 3449510 - DNA, 25 bp, Homo sapien
ccagagccttatcaggcagggagcc

SEQ ID NO: 3449511 - DNA, 25 bp, Homo sapien
tttccactgtgacaagaccagcaga

SEQ ID NO: 3449512 - DNA, 25 bp, Homo sapien
tccctcagataccttgtgctgtggt

SEQ ID NO: 3449513 - DNA, 25 bp, Homo sapien
gagcaatatcttaccacagtggtgg

SEQ ID NO: 3449514 - DNA, 25 bp, Homo sapien
tggctaaatgctagggacaaaatac

SEQ ID NO: 3449515 - DNA, 25 bp, Homo sapien
gatttgtcgcaaagatgtgccacag

SEQ ID NO: 3449516 - DNA, 25 bp, Homo sapien
tttagttttatgcacaatggtttcg

SEQ ID NO: 3449517 - DNA, 25 bp, Homo sapien
caaagagtctctgattgtcacattc

SEQ ID NO: 3449518 - DNA, 25 bp, Homo sapien
ctttgatgctgctgtgatcctagga

SEQ ID NO: 3449519 - DNA, 25 bp, Homo sapien
gagccttcttgttgatcagggcctt

SEQ ID NO: 3449520 - DNA, 25 bp, Homo sapien
agggtttttatccttctgtgaggca

SEQ ID NO: 3449521 - DNA, 25 bp, Homo sapien
ttatgaaatttgctcattagggttt

SEQ ID NO: 3449522 - DNA, 25 bp, Homo sapien
aattcctaaggttagctccagctgt

SEQ ID NO: 3449523 - DNA, 25 bp, Homo sapien
catcactagcaagaaatgctctttg

SEQ ID NO: 3449524 - DNA, 25 bp, Homo sapien
actgccaagggaaaagtagggcttg

SEQ ID NO: 3449525 - DNA, 25 bp, Homo sapien
ctgccaagggaaaagtagggcttgg

SEQ ID NO: 3449526 - DNA, 25 bp, Homo sapien
tattctccttgatctcctttgatgt

SEQ ID NO: 3449527 - DNA, 25 bp, Homo sapien
cctttgatgtttacttccacttgtt

SEQ ID NO: 3449528 - DNA, 25 bp, Homo sapien
tgatctcctttgatgtttacttcca

SEQ ID NO: 3449529 - DNA, 25 bp, Homo sapien
ctattctccttgatctcctttgatg

SEQ ID NO: 3449530 - DNA, 25 bp, Homo sapien
gcttgagctcatcctgaaactctgt

SEQ ID NO: 3449531 - DNA, 25 bp, Homo sapien
ctgacgggggttcatttctggctgt

SEQ ID NO: 3449532 - DNA, 25 bp, Homo sapien
tcccagttatcctgaacagacaagc

SEQ ID NO: 3449533 - DNA, 25 bp, Homo sapien
tgggaggacctgccagcaccatagg

SEQ ID NO: 3449534 - DNA, 25 bp, Homo sapien
caagcgagaatcttcaagtttgttc

SEQ ID NO: 3449535 - DNA, 25 bp, Homo sapien
gcaccatagggcacatcccagttat

SEQ ID NO: 3449536 - DNA, 25 bp, Homo sapien
gcttggaaacacaaaccgttgctcc

SEQ ID NO: 3449537 - DNA, 25 bp, Homo sapien
ttggaaacacaaaccgttgctccat

SEQ ID NO: 3449538 - DNA, 25 bp, Homo sapien
ctgtggggtcttcctatagatagtc

SEQ ID NO: 3449539 - DNA, 25 bp, Homo sapien
gggtcttcctatagatagtccagtt

SEQ ID NO: 3449540 - DNA, 25 bp, Homo sapien
actcccctggacttgatttcttgcc

SEQ ID NO: 3449541 - DNA, 25 bp, Homo sapien
tgactcccctggacttgatttcttg

SEQ ID NO: 3449542 - DNA, 25 bp, Homo sapien
cccctggacttgatttcttgcctcc

SEQ ID NO: 3449543 - DNA, 25 bp, Homo sapien
tcccctggacttgatttcttgcctc

SEQ ID NO: 3449544 - DNA, 25 bp, Homo sapien
accagcacagcctgttttagcttct

SEQ ID NO: 3449545 - DNA, 25 bp, Homo sapien
ctggctccctagaccagcacagcct

SEQ ID NO: 3449546 - DNA, 25 bp, Homo sapien
gacgctggctccctagaccagcaca

SEQ ID NO: 3449547 - DNA, 25 bp, Homo sapien
gaccagcacagcctgttttagcttc

SEQ ID NO: 3449548 - DNA, 25 bp, Homo sapien
catacctgccttcacgaggagtgaa

SEQ ID NO: 3449549 - DNA, 25 bp, Homo sapien
tatgttgtgatgctgagtccctgcc

SEQ ID NO: 3449550 - DNA, 25 bp, Homo sapien
gagagaagacctttcggcaggattc

SEQ ID NO: 3449551 - DNA, 25 bp, Homo sapien
tccctgccgactgtgaactagagct

SEQ ID NO: 3449552 - DNA, 25 bp, Homo sapien
tggtggtcagtgtgaagccagataa

SEQ ID NO: 3449553 - DNA, 25 bp, Homo sapien
aaaaaccatttgctgagtttcctca

SEQ ID NO: 3449554 - DNA, 25 bp, Homo sapien
tcatttgaccttgattttctgttag

SEQ ID NO: 3449555 - DNA, 25 bp, Homo sapien
ccagataaaaaccatttgctgagtt

SEQ ID NO: 3449556 - DNA, 25 bp, Homo sapien
aacttcctgctgtataagtccttga

SEQ ID NO: 3449557 - DNA, 25 bp, Homo sapien
agggcaacttcctgctgtataagtc

SEQ ID NO: 3449558 - DNA, 25 bp, Homo sapien
cctgctgtataagtccttgattctg

SEQ ID NO: 3449559 - DNA, 25 bp, Homo sapien
tgtataagtccttgattctgttttt

SEQ ID NO: 3449560 - DNA, 25 bp, Homo sapien
aagaacggcgcttcgtggacaagac

SEQ ID NO: 3449561 - DNA, 25 bp, Homo sapien
tgggcggacagctcgcacttccttt

SEQ ID NO: 3449562 - DNA, 25 bp, Homo sapien
gaggagtgggcctatcagagccctt

SEQ ID NO: 3449563 - DNA, 25 bp, Homo sapien
tctgatcagattaaaaaggcctgcc

SEQ ID NO: 3449564 - DNA, 25 bp, Homo sapien
ttcgagagggcaaataatgtatcca

SEQ ID NO: 3449565 - DNA, 25 bp, Homo sapien
ttcagagcctgcctttcgagagggc

SEQ ID NO: 3449566 - DNA, 25 bp, Homo sapien
ctttcgagagggcaaataatgtatc

SEQ ID NO: 3449567 - DNA, 25 bp, Homo sapien
gagagggcaaataatgtatccaggg

SEQ ID NO: 3449568 - DNA, 25 bp, Homo sapien
tgtgtgagggcaccgtgaaggttac

SEQ ID NO: 3449569 - DNA, 25 bp, Homo sapien
tgagggcaccgtgaaggttacaaac

SEQ ID NO: 3449570 - DNA, 25 bp, Homo sapien
gggctgtgtgagggcaccgtgaagg

SEQ ID NO: 3449571 - DNA, 25 bp, Homo sapien
tgtgagggcaccgtgaaggttacaa

SEQ ID NO: 3449572 - DNA, 25 bp, Homo sapien
tgctggtggtgcttgtgatagacat

SEQ ID NO: 3449573 - DNA, 25 bp, Homo sapien
agtttgtcagacatgctggtggtgc

SEQ ID NO: 3449574 - DNA, 25 bp, Homo sapien
caatgtcagtgactttgtagggcag

SEQ ID NO: 3449575 - DNA, 25 bp, Homo sapien
ccagaagtccaggccaatgtcagtg

SEQ ID NO: 3449576 - DNA, 25 bp, Homo sapien
cacgtcaggcccggcatctggttct

SEQ ID NO: 3449577 - DNA, 25 bp, Homo sapien
atgcacgtcaggcccggcatctggt

SEQ ID NO: 3449578 - DNA, 25 bp, Homo sapien
tgcacgtcaggcccggcatctggtt

SEQ ID NO: 3449579 - DNA, 25 bp, Homo sapien
gcacgtcaggcccggcatctggttc

SEQ ID NO: 3449580 - DNA, 25 bp, Homo sapien
cgtgcccttcgagggcttggagggt

SEQ ID NO: 3449581 - DNA, 25 bp, Homo sapien
tggccatctccatgggtcctatgga

SEQ ID NO: 3449582 - DNA, 25 bp, Homo sapien
gcaactggtgatgcgcgtgcccttc

SEQ ID NO: 3449583 - DNA, 25 bp, Homo sapien
gggcttggagggttgagtacagctc

SEQ ID NO: 3449584 - DNA, 25 bp, Homo sapien
tcgcccttccaggcgtacaactgga

SEQ ID NO: 3449585 - DNA, 25 bp, Homo sapien
ttcgcccttccaggcgtacaactgg

SEQ ID NO: 3449586 - DNA, 25 bp, Homo sapien
cgcccttccaggcgtacaactggaa

SEQ ID NO: 3449587 - DNA, 25 bp, Homo sapien
gtgggggcccaagcgacatccagaa

SEQ ID NO: 3449588 - DNA, 25 bp, Homo sapien
ggtgggggcccaagcgacatccaga

SEQ ID NO: 3449589 - DNA, 25 bp, Homo sapien
gggggcccaagcgacatccagaatc

SEQ ID NO: 3449590 - DNA, 25 bp, Homo sapien
gggcccaagcgacatccagaatcac

SEQ ID NO: 3449591 - DNA, 25 bp, Homo sapien
agcttgtggaccccaatcatggtct

SEQ ID NO: 3449592 - DNA, 25 bp, Homo sapien
gcttgtggaccccaatcatggtctc

SEQ ID NO: 3449593 - DNA, 25 bp, Homo sapien
gcaatcatcacgtctgtggcccact

SEQ ID NO: 3449594 - DNA, 25 bp, Homo sapien
cttgctcttggtgacggagttgttg

SEQ ID NO: 3449595 - DNA, 25 bp, Homo sapien
tggcagccggagaggttgtcaaact

SEQ ID NO: 3449596 - DNA, 25 bp, Homo sapien
gatgctatctatgagggactcctgg

SEQ ID NO: 3449597 - DNA, 25 bp, Homo sapien
catgtcgccacagcctgctaccact

SEQ ID NO: 3449598 - DNA, 25 bp, Homo sapien
atgtcgccacagcctgctaccactg

SEQ ID NO: 3449599 - DNA, 25 bp, Homo sapien
ccatgtcgccacagcctgctaccac

SEQ ID NO: 3449600 - DNA, 25 bp, Homo sapien
gtgtccagtgttacaaatgatggca

SEQ ID NO: 3449601 - DNA, 25 bp, Homo sapien
caatctccatgtcaaagtgtccagt

SEQ ID NO: 3449602 - DNA, 25 bp, Homo sapien
catctgcttaaagtgccagccaagg

SEQ ID NO: 3449603 - DNA, 25 bp, Homo sapien
cctgacaggcctcgtctatggtggc

SEQ ID NO: 3449604 - DNA, 25 bp, Homo sapien
taatgggcttgcagctcagtcagct

SEQ ID NO: 3449605 - DNA, 25 bp, Homo sapien
gaaccataacctggtacttgtctgg

SEQ ID NO: 3449606 - DNA, 25 bp, Homo sapien
gatgtggtgtgcattcttcagctga

SEQ ID NO: 3449607 - DNA, 25 bp, Homo sapien
ctcagtctgcgccatcacttggttg

SEQ ID NO: 3449608 - DNA, 25 bp, Homo sapien
ttcctgcactatctcagcatcctgg

SEQ ID NO: 3449609 - DNA, 25 bp, Homo sapien
tgtagttatcccatactgctttggc

SEQ ID NO: 3449610 - DNA, 25 bp, Homo sapien
tactaaaaatggacatatcacaatc

SEQ ID NO: 3449611 - DNA, 25 bp, Homo sapien
ttggctctgcaaagttacctataga

SEQ ID NO: 3449612 - DNA, 25 bp, Homo sapien
gctggttagctatgaagaaatatac

SEQ ID NO: 3449613 - DNA, 25 bp, Homo sapien
gtgctggttagctatgaagaaatat

SEQ ID NO: 3449614 - DNA, 25 bp, Homo sapien
tgctggttagctatgaagaaatata

SEQ ID NO: 3449615 - DNA, 25 bp, Homo sapien
tgtgctggttagctatgaagaaata

SEQ ID NO: 3449616 - DNA, 25 bp, Homo sapien
taatttcttttggtggcccgtcatg

SEQ ID NO: 3449617 - DNA, 25 bp, Homo sapien
cttttggtggcccgtcatgtgtatc

SEQ ID NO: 3449618 - DNA, 25 bp, Homo sapien
tgatagtctagaagtgcttcactgg

SEQ ID NO: 3449619 - DNA, 25 bp, Homo sapien
ttggtggcccgtcatgtgtatcctt

SEQ ID NO: 3449620 - DNA, 25 bp, Homo sapien
aattgctccacggcatcttccttta

SEQ ID NO: 3449621 - DNA, 25 bp, Homo sapien
gaattgctccacggcatcttccttt

SEQ ID NO: 3449622 - DNA, 25 bp, Homo sapien
catgatatttttggttctttttcct

SEQ ID NO: 3449623 - DNA, 25 bp, Homo sapien
ttcatgatatttttggttctttttc

SEQ ID NO: 3449624 - DNA, 25 bp, Homo sapien
tctttcatgatatttttggttcttt

SEQ ID NO: 3449625 - DNA, 25 bp, Homo sapien
ttcctaagtgtctttatttgaaaca

SEQ ID NO: 3449626 - DNA, 25 bp, Homo sapien
tagatgccgtatgtgccaaatctgt

SEQ ID NO: 3449627 - DNA, 25 bp, Homo sapien
cactcagttcctttagtagatgccg

SEQ ID NO: 3449628 - DNA, 25 bp, Homo sapien
acaactggcaatccctctgccttct

SEQ ID NO: 3449629 - DNA, 25 bp, Homo sapien
cctttagtagatgccgtatgtgcca

SEQ ID NO: 3449630 - DNA, 25 bp, Homo sapien
tccttcatcgcttcttcaacatcct

SEQ ID NO: 3449631 - DNA, 25 bp, Homo sapien
taatgagtttagcatgtcgttcact

SEQ ID NO: 3449632 - DNA, 25 bp, Homo sapien
gtactcctcccaatattccttttca

SEQ ID NO: 3449633 - DNA, 25 bp, Homo sapien
gtcgttcactccctacattcttgta

SEQ ID NO: 3449634 - DNA, 25 bp, Homo sapien
caagaaatagtttctcagcattact

SEQ ID NO: 3449635 - DNA, 25 bp, Homo sapien
caaattggtccacaagcagagagcc

SEQ ID NO: 3449636 - DNA, 25 bp, Homo sapien
atacaaattggtccacaagcagaga

SEQ ID NO: 3449637 - DNA, 25 bp, Homo sapien
acaaattggtccacaagcagagagc

SEQ ID NO: 3449638 - DNA, 25 bp, Homo sapien
tacaaattggtccacaagcagagag

SEQ ID NO: 3449639 - DNA, 25 bp, Homo sapien
tgagcttccatgattcctctctcag

SEQ ID NO: 3449640 - DNA, 25 bp, Homo sapien
ttgagcttccatgattcctctctca

SEQ ID NO: 3449641 - DNA, 25 bp, Homo sapien
cttgagcttccatgattcctctctc

SEQ ID NO: 3449642 - DNA, 25 bp, Homo sapien
gagcttccatgattcctctctcagt

SEQ ID NO: 3449643 - DNA, 25 bp, Homo sapien
caggtgaccgaggaacagtttgtgc

SEQ ID NO: 3449644 - DNA, 25 bp, Homo sapien
tgatggcaccagatgtctttagaaa

SEQ ID NO: 3449645 - DNA, 25 bp, Homo sapien
tggtatggacaaaggccattggtca

SEQ ID NO: 3449646 - DNA, 25 bp, Homo sapien
tgggctggagaatactgcaaggact

SEQ ID NO: 3449647 - DNA, 25 bp, Homo sapien
ccagttgcaacaaagtttccttgat

SEQ ID NO: 3449648 - DNA, 25 bp, Homo sapien
ttggtccagttgcaacaaagtttcc

SEQ ID NO: 3449649 - DNA, 25 bp, Homo sapien
ttcttttggtccagttgcaacaaag

SEQ ID NO: 3449650 - DNA, 25 bp, Homo sapien
gtccagttgcaacaaagtttccttg

SEQ ID NO: 3449651 - DNA, 25 bp, Homo sapien
gatctctagataactgcccttgtca

SEQ ID NO: 3449652 - DNA, 25 bp, Homo sapien
cccttgtcaatgagctttacagcat

SEQ ID NO: 3449653 - DNA, 25 bp, Homo sapien
cattctcccagatctctagataact

SEQ ID NO: 3449654 - DNA, 25 bp, Homo sapien
tagataactgcccttgtcaatgagc

SEQ ID NO: 3449655 - DNA, 25 bp, Homo sapien
aatgtactcaaatgcctggtggtcc

SEQ ID NO: 3449656 - DNA, 25 bp, Homo sapien
ggagtggcatggattttccccacca

SEQ ID NO: 3449657 - DNA, 25 bp, Homo sapien
cccaccactgtgtaaataggactgt

SEQ ID NO: 3449658 - DNA, 25 bp, Homo sapien
tactaacaaaagaccttcacagttc

SEQ ID NO: 3449659 - DNA, 25 bp, Homo sapien
gttcttaaagcatcttgttttataa

SEQ ID NO: 3449660 - DNA, 25 bp, Homo sapien
tcttaaagcatcttgttttataaat

SEQ ID NO: 3449661 - DNA, 25 bp, Homo sapien
ttgttcttaaagcatcttgttttat

SEQ ID NO: 3449662 - DNA, 25 bp, Homo sapien
tgttcttaaagcatcttgttttata

SEQ ID NO: 3449663 - DNA, 25 bp, Homo sapien
ctgttttgagatttgttctctgttc

SEQ ID NO: 3449664 - DNA, 25 bp, Homo sapien
cctgttttgagatttgttctctgtt

SEQ ID NO: 3449665 - DNA, 25 bp, Homo sapien
ttacattagtactctatgtctctta

SEQ ID NO: 3449666 - DNA, 25 bp, Homo sapien
actgtgtatttgtattagttggata

SEQ ID NO: 3449667 - DNA, 25 bp, Homo sapien
gtgtatttgtattagttggatattg

SEQ ID NO: 3449668 - DNA, 25 bp, Homo sapien
ctgtgtatttgtattagttggatat

SEQ ID NO: 3449669 - DNA, 25 bp, Homo sapien
gcttctgccagaatcttttaggatt

SEQ ID NO: 3449670 - DNA, 25 bp, Homo sapien
tgcttctgccagaatcttttaggat

SEQ ID NO: 3449671 - DNA, 25 bp, Homo sapien
cctgcttctgccagaatcttttagg

SEQ ID NO: 3449672 - DNA, 25 bp, Homo sapien
ccacctgcttctgccagaatctttt

SEQ ID NO: 3449673 - DNA, 25 bp, Homo sapien
gctgactatagaactccaagttaaa

SEQ ID NO: 3449674 - DNA, 25 bp, Homo sapien
ctgaactttgctattgaaaaatcaa

SEQ ID NO: 3449675 - DNA, 25 bp, Homo sapien
tcatctgaactttgctattgaaaaa

SEQ ID NO: 3449676 - DNA, 25 bp, Homo sapien
taatctactttagctgactatagaa

SEQ ID NO: 3449677 - DNA, 25 bp, Homo sapien
tagttgatcaataagcaccaaattt

SEQ ID NO: 3449678 - DNA, 25 bp, Homo sapien
ccagttcatgaatagcattttttaa

SEQ ID NO: 3449679 - DNA, 25 bp, Homo sapien
ctacagttggatagttgatcaataa

SEQ ID NO: 3449680 - DNA, 25 bp, Homo sapien
tctgcttccagttcatgaatagcat

SEQ ID NO: 3449681 - DNA, 25 bp, Homo sapien
cagcagatgacgaggattagaggtg

SEQ ID NO: 3449682 - DNA, 25 bp, Homo sapien
tgacgaggattagaggtgggacagg

SEQ ID NO: 3449683 - DNA, 25 bp, Homo sapien
gcctggcagagattagacatgattc

SEQ ID NO: 3449684 - DNA, 25 bp, Homo sapien
cagagattagacatgattccaaagg

SEQ ID NO: 3449685 - DNA, 25 bp, Homo sapien
ggcacttctagtccagcagcttggg

SEQ ID NO: 3449686 - DNA, 25 bp, Homo sapien
agcagcttgggtaagatatagtcgc

SEQ ID NO: 3449687 - DNA, 25 bp, Homo sapien
ccaaagacatttcttcaggtggcac

SEQ ID NO: 3449688 - DNA, 25 bp, Homo sapien
ctatatgtgtttctggcaattccaa

SEQ ID NO: 3449689 - DNA, 25 bp, Homo sapien
tacttctgtgggttgcaattctgac

SEQ ID NO: 3449690 - DNA, 25 bp, Homo sapien
ctacttctgtgggttgcaattctga

SEQ ID NO: 3449691 - DNA, 25 bp, Homo sapien
ctgatgaggacatcaagtctctact

SEQ ID NO: 3449692 - DNA, 25 bp, Homo sapien
aagtctctactttctacttctgtgg

SEQ ID NO: 3449693 - DNA, 25 bp, Homo sapien
cacatactggagatcttcgatgcta

SEQ ID NO: 3449694 - DNA, 25 bp, Homo sapien
tgaaatccttctcatcctcatatag

SEQ ID NO: 3449695 - DNA, 25 bp, Homo sapien
tcgatgctattttcatgactaagat

SEQ ID NO: 3449696 - DNA, 25 bp, Homo sapien
tagtaagtacttcatatcagtgtcc

SEQ ID NO: 3449697 - DNA, 25 bp, Homo sapien
ccacactcataagcttcactcccag

SEQ ID NO: 3449698 - DNA, 25 bp, Homo sapien
atgaatgggcattttcttgctctcc

SEQ ID NO: 3449699 - DNA, 25 bp, Homo sapien
tccttctcttgaaaatgaatgggca

SEQ ID NO: 3449700 - DNA, 25 bp, Homo sapien
tttatagagtttgactggaatttcc

SEQ ID NO: 3449701 - DNA, 25 bp, Homo sapien
tcatcttatatgtgatgtggctttc

SEQ ID NO: 3449702 - DNA, 25 bp, Homo sapien
atcatcttatatgtgatgtggcttt

SEQ ID NO: 3449703 - DNA, 25 bp, Homo sapien
catcatcttatatgtgatgtggctt

SEQ ID NO: 3449704 - DNA, 25 bp, Homo sapien
catcttatatgtgatgtggctttct

SEQ ID NO: 3449705 - DNA, 25 bp, Homo sapien
cctcagagggaaagatgtgtagaca

SEQ ID NO: 3449706 - DNA, 25 bp, Homo sapien
tgtagaaatacaaagcgtgcttccg

SEQ ID NO: 3449707 - DNA, 25 bp, Homo sapien
gactggctgtctatcacattgagca

SEQ ID NO: 3449708 - DNA, 25 bp, Homo sapien
ttaaactacggagaattggcttgca

SEQ ID NO: 3449709 - DNA, 25 bp, Homo sapien
tttcaattatgtctttattagcagc

SEQ ID NO: 3449710 - DNA, 25 bp, Homo sapien
tcaattatgtctttattagcagcat

SEQ ID NO: 3449711 - DNA, 25 bp, Homo sapien
aattatgtctttattagcagcatga

SEQ ID NO: 3449712 - DNA, 25 bp, Homo sapien
cccagtttcaattatgtctttatta

SEQ ID NO: 3449713 - DNA, 25 bp, Homo sapien
aggtgatgtagatctcaatgccgcc

SEQ ID NO: 3449714 - DNA, 25 bp, Homo sapien
gtagatctcaatgccgcccgccagg

SEQ ID NO: 3449715 - DNA, 25 bp, Homo sapien
tgatgtagatctcaatgccgcccgc

SEQ ID NO: 3449716 - DNA, 25 bp, Homo sapien
gaaggtgatgtagatctcaatgccg

SEQ ID NO: 3449717 - DNA, 25 bp, Homo sapien
aatcccgcaggtggttgccgaggaa

SEQ ID NO: 3449718 - DNA, 25 bp, Homo sapien
ggaatcccgcaggtggttgccgagg

SEQ ID NO: 3449719 - DNA, 25 bp, Homo sapien
cctgggaatcccgcaggtggttgcc

SEQ ID NO: 3449720 - DNA, 25 bp, Homo sapien
tgggaatcccgcaggtggttgccga

SEQ ID NO: 3449721 - DNA, 25 bp, Homo sapien
cgcacaatcttcctaacccgtagaa

SEQ ID NO: 3449722 - DNA, 25 bp, Homo sapien
caatcttcctaacccgtagaagaat

SEQ ID NO: 3449723 - DNA, 25 bp, Homo sapien
cacaatcttcctaacccgtagaaga

SEQ ID NO: 3449724 - DNA, 25 bp, Homo sapien
ccgcacaatcttcctaacccgtaga

SEQ ID NO: 3449725 - DNA, 25 bp, Homo sapien
ttccaaagacgctggctgtgcacac

SEQ ID NO: 3449726 - DNA, 25 bp, Homo sapien
tgtgcacacgatggctccgaagccc

SEQ ID NO: 3449727 - DNA, 25 bp, Homo sapien
tgtttccaaagacgctggctgtgca

SEQ ID NO: 3449728 - DNA, 25 bp, Homo sapien
gctgtgcacacgatggctccgaagc

SEQ ID NO: 3449729 - DNA, 25 bp, Homo sapien
accacaggggagacacggcgctata

SEQ ID NO: 3449730 - DNA, 25 bp, Homo sapien
gacacggcgctataggacacatgga

SEQ ID NO: 3449731 - DNA, 25 bp, Homo sapien
cggcgctataggacacatggacttg

SEQ ID NO: 3449732 - DNA, 25 bp, Homo sapien
ggagacacggcgctataggacacat

SEQ ID NO: 3449733 - DNA, 25 bp, Homo sapien
tagtagtgcatagggttcagagtac

SEQ ID NO: 3449734 - DNA, 25 bp, Homo sapien
gaaggacagttcattgtaggaaagc

SEQ ID NO: 3449735 - DNA, 25 bp, Homo sapien
gagaaaaaatgtagtcgtagccaat

SEQ ID NO: 3449736 - DNA, 25 bp, Homo sapien
catctttaacatttgggtggagagg

SEQ ID NO: 3449737 - DNA, 25 bp, Homo sapien
caattctgtgcctaggattttgcca

SEQ ID NO: 3449738 - DNA, 25 bp, Homo sapien
tcttaagaattctcggcctctgtgg

SEQ ID NO: 3449739 - DNA, 25 bp, Homo sapien
ttttctcagctgacatacagagcac

SEQ ID NO: 3449740 - DNA, 25 bp, Homo sapien
cagcattagtgcattgggaaggatc

SEQ ID NO: 3449741 - DNA, 25 bp, Homo sapien
taagcttttaattccactagcctca

SEQ ID NO: 3449742 - DNA, 25 bp, Homo sapien
tccaaccatttagtctttcataagc

SEQ ID NO: 3449743 - DNA, 25 bp, Homo sapien
ttctttaagctaggtgtgtttgtcc

SEQ ID NO: 3449744 - DNA, 25 bp, Homo sapien
gatatgtcacaagttttttcctaaa

SEQ ID NO: 3449745 - DNA, 25 bp, Homo sapien
gctttttgccttgtaagcaatgtgt

SEQ ID NO: 3449746 - DNA, 25 bp, Homo sapien
tctgtcagccgatctctccagctgg

SEQ ID NO: 3449747 - DNA, 25 bp, Homo sapien
ccttgtaagcaatgtgttgtgctca

SEQ ID NO: 3449748 - DNA, 25 bp, Homo sapien
ccagctggatttctgtgaagaaggc

SEQ ID NO: 3449749 - DNA, 25 bp, Homo sapien
ggccaatacggtagcaccatcttct

SEQ ID NO: 3449750 - DNA, 25 bp, Homo sapien
tggccaatacggtagcaccatcttc

SEQ ID NO: 3449751 - DNA, 25 bp, Homo sapien
ggctctgctcgtactgttttgacat

SEQ ID NO: 3449752 - DNA, 25 bp, Homo sapien
gataggatggtttatccttctgtgt

SEQ ID NO: 3449753 - DNA, 25 bp, Homo sapien
tcacttctctggtggcatactctgg

SEQ ID NO: 3449754 - DNA, 25 bp, Homo sapien
tactctgggatgaggctcttgtgaa

SEQ ID NO: 3449755 - DNA, 25 bp, Homo sapien
cacaatacgtaagtgaccaaaaacg

SEQ ID NO: 3449756 - DNA, 25 bp, Homo sapien
gctattaaccactgctgtagcagaa

SEQ ID NO: 3449757 - DNA, 25 bp, Homo sapien
cattagatactggaaatacaaggga

SEQ ID NO: 3449758 - DNA, 25 bp, Homo sapien
agatgaggccaaagactacaattcc

SEQ ID NO: 3449759 - DNA, 25 bp, Homo sapien
tgaaaaccctaatagattctagaat

SEQ ID NO: 3449760 - DNA, 25 bp, Homo sapien
gaccttgggtacattatgtaatctc

SEQ ID NO: 3449761 - DNA, 25 bp, Homo sapien
gatgcttactaaatctttgaccttg

SEQ ID NO: 3449762 - DNA, 25 bp, Homo sapien
tctagaatcaaacaaatgggggttc

SEQ ID NO: 3449763 - DNA, 25 bp, Homo sapien
caagaattggacaggactaaatgta

SEQ ID NO: 3449764 - DNA, 25 bp, Homo sapien
gacacaactaaagaattgaggctct

SEQ ID NO: 3449765 - DNA, 25 bp, Homo sapien
caaggccagtgtggtagcaataaaa

SEQ ID NO: 3449766 - DNA, 25 bp, Homo sapien
gcttggagcctagtgaacttaggtt

SEQ ID NO: 3449767 - DNA, 25 bp, Homo sapien
gactaaagctcttagatagacattc

SEQ ID NO: 3449768 - DNA, 25 bp, Homo sapien
tctagtaggcaaacaacacttttgt

SEQ ID NO: 3449769 - DNA, 25 bp, Homo sapien
gatagacattcaaaggtgttcgcag

SEQ ID NO: 3449770 - DNA, 25 bp, Homo sapien
tcgcagtctattaagtggacattct

SEQ ID NO: 3449771 - DNA, 25 bp, Homo sapien
taattgcaatactttaggagaccaa

SEQ ID NO: 3449772 - DNA, 25 bp, Homo sapien
gcgataatatgactgtggtgccatt

SEQ ID NO: 3449773 - DNA, 25 bp, Homo sapien
aattaaacttttgcgccaggtgtgt

SEQ ID NO: 3449774 - DNA, 25 bp, Homo sapien
actctagtgtagcataaaattaaac

SEQ ID NO: 3449775 - DNA, 25 bp, Homo sapien
tgcatttgcttcacttagagcggac

SEQ ID NO: 3449776 - DNA, 25 bp, Homo sapien
tagtctgcacactgaaaaggtttcc

SEQ ID NO: 3449777 - DNA, 25 bp, Homo sapien
tagagcggacagttcttagtctgca

SEQ ID NO: 3449778 - DNA, 25 bp, Homo sapien
tttctactgtgtctcccttgggcta

SEQ ID NO: 3449779 - DNA, 25 bp, Homo sapien
tgtcttactaatcataacttggtag

SEQ ID NO: 3449780 - DNA, 25 bp, Homo sapien
gggcgcattgacaaaatcatgggtc

SEQ ID NO: 3449781 - DNA, 25 bp, Homo sapien
gtaagccacagcttaaacccttcag

SEQ ID NO: 3449782 - DNA, 25 bp, Homo sapien
cactctttgtcgtgtggatttgact

SEQ ID NO: 3449783 - DNA, 25 bp, Homo sapien
cctcccgcctcttagcctccctgag

SEQ ID NO: 3449784 - DNA, 25 bp, Homo sapien
gctatcctcccgcctcttagcctcc

SEQ ID NO: 3449785 - DNA, 25 bp, Homo sapien
tcaagctatcctcccgcctcttagc

SEQ ID NO: 3449786 - DNA, 25 bp, Homo sapien
tcccgcctcttagcctccctgagag

SEQ ID NO: 3449787 - DNA, 25 bp, Homo sapien
catggcatggtctcgtctcgctgca

SEQ ID NO: 3449788 - DNA, 25 bp, Homo sapien
gccatggcatggtctcgtctcgctg

SEQ ID NO: 3449789 - DNA, 25 bp, Homo sapien
tgccatggcatggtctcgtctcgct

SEQ ID NO: 3449790 - DNA, 25 bp, Homo sapien
agtgccatggcatggtctcgtctcg

SEQ ID NO: 3449791 - DNA, 25 bp, Homo sapien
aacctgtgaagccttattacttgcc

SEQ ID NO: 3449792 - DNA, 25 bp, Homo sapien
ccatttcaggttaccgcttatgacc

SEQ ID NO: 3449793 - DNA, 25 bp, Homo sapien
ttaccgcttatgacccaaaatggga

SEQ ID NO: 3449794 - DNA, 25 bp, Homo sapien
tatgacccaaaatgggaacctgtga

SEQ ID NO: 3449795 - DNA, 25 bp, Homo sapien
tgtgatatttaggactaagatggca

SEQ ID NO: 3449796 - DNA, 25 bp, Homo sapien
gattgaagtgtgccttcttcagcag

SEQ ID NO: 3449797 - DNA, 25 bp, Homo sapien
tttgctgagagggactgattgaagt

SEQ ID NO: 3449798 - DNA, 25 bp, Homo sapien
agagggactgattgaagtgtgcctt

SEQ ID NO: 3449799 - DNA, 25 bp, Homo sapien
gatggtcagttccataggcctccag

SEQ ID NO: 3449800 - DNA, 25 bp, Homo sapien
tctaactcctaagacactattggcg

SEQ ID NO: 3449801 - DNA, 25 bp, Homo sapien
aatgggaggccttcacacttactca

SEQ ID NO: 3449802 - DNA, 25 bp, Homo sapien
tcttactgaggtttgcaaagcttca

SEQ ID NO: 3449803 - DNA, 25 bp, Homo sapien
gagaaccattgcttcgcatcaggag

SEQ ID NO: 3449804 - DNA, 25 bp, Homo sapien
tagctatagaattgcaactggcagc

SEQ ID NO: 3449805 - DNA, 25 bp, Homo sapien
cctgacatagctgagtggcaatgaa

SEQ ID NO: 3449806 - DNA, 25 bp, Homo sapien
gacttggtgacctagagtggatcaa

SEQ ID NO: 3449807 - DNA, 25 bp, Homo sapien
tattatctggatatacccgggttta

SEQ ID NO: 3449808 - DNA, 25 bp, Homo sapien
ggtaaatagcaaggaacacagttgc

SEQ ID NO: 3449809 - DNA, 25 bp, Homo sapien
gaggtgtccgttaaggtcattgtcc

SEQ ID NO: 3449810 - DNA, 25 bp, Homo sapien
ccaccagtaatgaatgggagtttct

SEQ ID NO: 3449811 - DNA, 25 bp, Homo sapien
tggacctacattcagacatctttac

SEQ ID NO: 3449812 - DNA, 25 bp, Homo sapien
taccaggaagaagtagccttagact

SEQ ID NO: 3449813 - DNA, 25 bp, Homo sapien
gaatcttgatgaacctaagcctttg

SEQ ID NO: 3449814 - DNA, 25 bp, Homo sapien
tttggtagctaaagtggcatttccg

SEQ ID NO: 3449815 - DNA, 25 bp, Homo sapien
gcaatgtgacaacggtgtaacaagg

SEQ ID NO: 3449816 - DNA, 25 bp, Homo sapien
tcaaacgggcaatgtgacaacggtg

SEQ ID NO: 3449817 - DNA, 25 bp, Homo sapien
aacgggcaatgtgacaacggtgtaa

SEQ ID NO: 3449818 - DNA, 25 bp, Homo sapien
cgggcaatgtgacaacggtgtaaca

SEQ ID NO: 3449819 - DNA, 25 bp, Homo sapien
cagagttggagtcccacttatgcaa

SEQ ID NO: 3449820 - DNA, 25 bp, Homo sapien
gacagctcactcacagtcgttctga

SEQ ID NO: 3449821 - DNA, 25 bp, Homo sapien
ccagctctgacactgtgcaattata

SEQ ID NO: 3449822 - DNA, 25 bp, Homo sapien
gcatccctaatcttggacagctcac

SEQ ID NO: 3449823 - DNA, 25 bp, Homo sapien
gctggtggtgagcaggtgatatggt

SEQ ID NO: 3449824 - DNA, 25 bp, Homo sapien
gaacaagggagcgaaacgaacaaga

SEQ ID NO: 3449825 - DNA, 25 bp, Homo sapien
agcaaacgaacaagggagcgaaacg

SEQ ID NO: 3449826 - DNA, 25 bp, Homo sapien
aacgaacaagagagcgacgtgctgg

SEQ ID NO: 3449827 - DNA, 25 bp, Homo sapien
taattacactgatctgatcgctata

SEQ ID NO: 3449828 - DNA, 25 bp, Homo sapien
gagaggatggccatgctaattacac

SEQ ID NO: 3449829 - DNA, 25 bp, Homo sapien
tattttgtctattcaggctcactga

SEQ ID NO: 3449830 - DNA, 25 bp, Homo sapien
gaaagagatatgcaaacttatatgc

SEQ ID NO: 3449831 - DNA, 25 bp, Homo sapien
ggccataatccaccagctgtatgac

SEQ ID NO: 3449832 - DNA, 25 bp, Homo sapien
ttggccataatccaccagctgtatg

SEQ ID NO: 3449833 - DNA, 25 bp, Homo sapien
aatccaccagctgtatgaccacagc

SEQ ID NO: 3449834 - DNA, 25 bp, Homo sapien
cataatccaccagctgtatgaccac

SEQ ID NO: 3449835 - DNA, 25 bp, Homo sapien
aagggaatatgtaagtccattgacc

SEQ ID NO: 3449836 - DNA, 25 bp, Homo sapien
tttccctctgaggaacgcgaccttg

SEQ ID NO: 3449837 - DNA, 25 bp, Homo sapien
gcgaccttgtgtttaagtagccttg

SEQ ID NO: 3449838 - DNA, 25 bp, Homo sapien
tccattgaccattaggtgaaatgct

SEQ ID NO: 3449839 - DNA, 25 bp, Homo sapien
aacgagacaacaagatgccttggtc

SEQ ID NO: 3449840 - DNA, 25 bp, Homo sapien
tcaagatgcgaatgctttccacctc

SEQ ID NO: 3449841 - DNA, 25 bp, Homo sapien
acaagtgccccaactacatcctttt

SEQ ID NO: 3449842 - DNA, 25 bp, Homo sapien
cagagcctgtgtgttcagtgggcaa

SEQ ID NO: 3449843 - DNA, 25 bp, Homo sapien
cagccatgtcggtgccactaggcct

SEQ ID NO: 3449844 - DNA, 25 bp, Homo sapien
catgtcggtgccactaggccttggt

SEQ ID NO: 3449845 - DNA, 25 bp, Homo sapien
tcctgcagccatgtcggtgccacta

SEQ ID NO: 3449846 - DNA, 25 bp, Homo sapien
tcggtgccactaggccttggtgccg

SEQ ID NO: 3449847 - DNA, 25 bp, Homo sapien
actatgttaatctggttctgccttt

SEQ ID NO: 3449848 - DNA, 25 bp, Homo sapien
ttactatgttaatctggttctgcct

SEQ ID NO: 3449849 - DNA, 25 bp, Homo sapien
ccaaatgcgtaaccttctaccacct

SEQ ID NO: 3449850 - DNA, 25 bp, Homo sapien
tgcgtaaccttctaccacctccctc

SEQ ID NO: 3449851 - DNA, 25 bp, Homo sapien
catgaatttgtgtgtcattcttgtg

SEQ ID NO: 3449852 - DNA, 25 bp, Homo sapien
cacttcatgaatttgtgtgtcattc

SEQ ID NO: 3449853 - DNA, 25 bp, Homo sapien
gtgtgtcattcttgtgcaggggcca

SEQ ID NO: 3449854 - DNA, 25 bp, Homo sapien
tgctaatcttctccgtatcattcca

SEQ ID NO: 3449855 - DNA, 25 bp, Homo sapien
tctgggactgtctgtgctaacctca

SEQ ID NO: 3449856 - DNA, 25 bp, Homo sapien
agcaggattggtatcagaagcccag

SEQ ID NO: 3449857 - DNA, 25 bp, Homo sapien
gtctgtgctaacctcagcaggattg

SEQ ID NO: 3449858 - DNA, 25 bp, Homo sapien
caggattggtatcagaagcccaggc

SEQ ID NO: 3449859 - DNA, 25 bp, Homo sapien
ttacccgatcaggttggaagagccc

SEQ ID NO: 3449860 - DNA, 25 bp, Homo sapien
tcacctccttgcaggaaggctcatg

SEQ ID NO: 3449861 - DNA, 25 bp, Homo sapien
tgtctcttgactagatcgaaaattc

SEQ ID NO: 3449862 - DNA, 25 bp, Homo sapien
ttttgtcttgcatatcgtaggaggt

SEQ ID NO: 3449863 - DNA, 25 bp, Homo sapien
tccatacactgagaaagctggacta

SEQ ID NO: 3449864 - DNA, 25 bp, Homo sapien
tctcaggttcatgggtttcttctcc

SEQ ID NO: 3449865 - DNA, 25 bp, Homo sapien
gaaagctggactacttcccaaagga

SEQ ID NO: 3449866 - DNA, 25 bp, Homo sapien
gtatctcaggttcatgggtttcttc

SEQ ID NO: 3449867 - DNA, 25 bp, Homo sapien
gtctgagactccatgatattttgca

SEQ ID NO: 3449868 - DNA, 25 bp, Homo sapien
gacagagtctgctcattgtctgaga

SEQ ID NO: 3449869 - DNA, 25 bp, Homo sapien
ttttcctgctggaatcagggattag

SEQ ID NO: 3449870 - DNA, 25 bp, Homo sapien
cagggattagatctggagcccaaat

SEQ ID NO: 3449871 - DNA, 25 bp, Homo sapien
catgactcatccatgaaagcccaga

SEQ ID NO: 3449872 - DNA, 25 bp, Homo sapien
ttctagcacatggaaccagcactcc

SEQ ID NO: 3449873 - DNA, 25 bp, Homo sapien
tctgaatgctggcacacatggagat

SEQ ID NO: 3449874 - DNA, 25 bp, Homo sapien
cctctttctggcaggaagctgtgtc

SEQ ID NO: 3449875 - DNA, 25 bp, Homo sapien
cttgagttcctctaggccaggggcc

SEQ ID NO: 3449876 - DNA, 25 bp, Homo sapien
catccatctatctcagttgcaaaac

SEQ ID NO: 3449877 - DNA, 25 bp, Homo sapien
gggccattattagttgccagcactg

SEQ ID NO: 3449878 - DNA, 25 bp, Homo sapien
cactgagaaggttctacaatatatg

SEQ ID NO: 3449879 - DNA, 25 bp, Homo sapien
tgtttggtgttcctacttctagagt

SEQ ID NO: 3449880 - DNA, 25 bp, Homo sapien
tattccacagacttttgtccattcc

SEQ ID NO: 3449881 - DNA, 25 bp, Homo sapien
ttagtagtgccactatgtgcaggaa

SEQ ID NO: 3449882 - DNA, 25 bp, Homo sapien
ttccattggcaggagtttattccac

SEQ ID NO: 3449883 - DNA, 25 bp, Homo sapien
caccttctagtaggccccagggtgt

SEQ ID NO: 3449884 - DNA, 25 bp, Homo sapien
accttctagtaggccccagggtgtg

SEQ ID NO: 3449885 - DNA, 25 bp, Homo sapien
ccaccttctagtaggccccagggtg

SEQ ID NO: 3449886 - DNA, 25 bp, Homo sapien
tcaggtcaagtagaatatcagctcc

SEQ ID NO: 3449887 - DNA, 25 bp, Homo sapien
taatagtacgtagttcatgaataag

SEQ ID NO: 3449888 - DNA, 25 bp, Homo sapien
agctcctggtgtgtcattaatagta

SEQ ID NO: 3449889 - DNA, 25 bp, Homo sapien
gtagcacaggtccacagaaatgggc

SEQ ID NO: 3449890 - DNA, 25 bp, Homo sapien
ccctgctggtccacacaagtttctg

SEQ ID NO: 3449891 - DNA, 25 bp, Homo sapien
agcactagcacttcctagcgtaggg

SEQ ID NO: 3449892 - DNA, 25 bp, Homo sapien
tgctggtccacacaagtttctgctc

SEQ ID NO: 3449893 - DNA, 25 bp, Homo sapien
agcatgctgagtcagcactagcact

SEQ ID NO: 3449894 - DNA, 25 bp, Homo sapien
cagctccctccagcttcaggctgga

SEQ ID NO: 3449895 - DNA, 25 bp, Homo sapien
cctccagcttcaggctggaaccttc

SEQ ID NO: 3449896 - DNA, 25 bp, Homo sapien
ctccctccagcttcaggctggaacc

SEQ ID NO: 3449897 - DNA, 25 bp, Homo sapien
agctccctccagcttcaggctggaa

SEQ ID NO: 3449898 - DNA, 25 bp, Homo sapien
ggctgcccagcgtctgagccccctt

SEQ ID NO: 3449899 - DNA, 25 bp, Homo sapien
tggctgcccagcgtctgagccccct

SEQ ID NO: 3449900 - DNA, 25 bp, Homo sapien
cattcttgtgggattggaaagcctc

SEQ ID NO: 3449901 - DNA, 25 bp, Homo sapien
ggcttcatgaatgtgctgtcctcca

SEQ ID NO: 3449902 - DNA, 25 bp, Homo sapien
cttgatcttgctagagaatggagcc

SEQ ID NO: 3449903 - DNA, 25 bp, Homo sapien
tcccaccacggagtcaggctttgaa

SEQ ID NO: 3449904 - DNA, 25 bp, Homo sapien
ggggctcaccgccttgcgcagcctc

SEQ ID NO: 3449905 - DNA, 25 bp, Homo sapien
tggggcagcggtgggtgcggctggg

SEQ ID NO: 3449906 - DNA, 25 bp, Homo sapien
tgctccagctgccggggctcaccgc

SEQ ID NO: 3449907 - DNA, 25 bp, Homo sapien
accgccttgcgcagcctccccgacc

SEQ ID NO: 3449908 - DNA, 25 bp, Homo sapien
atgggggacgccacggcttccccag

SEQ ID NO: 3449909 - DNA, 25 bp, Homo sapien
catgggggacgccacggcttcccca

SEQ ID NO: 3449910 - DNA, 25 bp, Homo sapien
cgtcgtccatgggggacgccacggc

SEQ ID NO: 3449911 - DNA, 25 bp, Homo sapien
gtccatgggggacgccacggcttcc

SEQ ID NO: 3449912 - DNA, 25 bp, Homo sapien
ctgtacgggacataggagggcgaat

SEQ ID NO: 3449913 - DNA, 25 bp, Homo sapien
cataggagggcgaatccaggctcag

SEQ ID NO: 3449914 - DNA, 25 bp, Homo sapien
tacgggacataggagggcgaatcca

SEQ ID NO: 3449915 - DNA, 25 bp, Homo sapien
gacataggagggcgaatccaggctc

SEQ ID NO: 3449916 - DNA, 25 bp, Homo sapien
taaatgatctggaccacgggattgg

SEQ ID NO: 3449917 - DNA, 25 bp, Homo sapien
ttctgcggcactggatctgtatcag

SEQ ID NO: 3449918 - DNA, 25 bp, Homo sapien
gggccatcattctgcggcactggat

SEQ ID NO: 3449919 - DNA, 25 bp, Homo sapien
tggatctgtatcagcccattctgtt

SEQ ID NO: 3449920 - DNA, 25 bp, Homo sapien
ctcggaagtaatcaaacatctctaa

SEQ ID NO: 3449921 - DNA, 25 bp, Homo sapien
aatcaaacatctctaaatttgtcac

SEQ ID NO: 3449922 - DNA, 25 bp, Homo sapien
cggaagtaatcaaacatctctaaat

SEQ ID NO: 3449923 - DNA, 25 bp, Homo sapien
gtaatcaaacatctctaaatttgtc

SEQ ID NO: 3449924 - DNA, 25 bp, Homo sapien
aacctcgttcgcttctttcttcatg

SEQ ID NO: 3449925 - DNA, 25 bp, Homo sapien
aaacctcgttcgcttctttcttcat

SEQ ID NO: 3449926 - DNA, 25 bp, Homo sapien
acctcgttcgcttctttcttcatgc

SEQ ID NO: 3449927 - DNA, 25 bp, Homo sapien
tccatgaactattatgtggtactag

SEQ ID NO: 3449928 - DNA, 25 bp, Homo sapien
tattatcaataaattcaggctcctg

SEQ ID NO: 3449929 - DNA, 25 bp, Homo sapien
tcgcctattgtgacaaactagatag

SEQ ID NO: 3449930 - DNA, 25 bp, Homo sapien
aaaatatcttcggttccagacagag

SEQ ID NO: 3449931 - DNA, 25 bp, Homo sapien
ttccctgcttactgaaccaaacttc

SEQ ID NO: 3449932 - DNA, 25 bp, Homo sapien
tgtattccctgcttactgaaccaaa

SEQ ID NO: 3449933 - DNA, 25 bp, Homo sapien
gtattccctgcttactgaaccaaac

SEQ ID NO: 3449934 - DNA, 25 bp, Homo sapien
tattccctgcttactgaaccaaact

SEQ ID NO: 3449935 - DNA, 25 bp, Homo sapien
ctccaactctgcaagtgctctcact

SEQ ID NO: 3449936 - DNA, 25 bp, Homo sapien
tatcatacaatcctttcattcccga

SEQ ID NO: 3449937 - DNA, 25 bp, Homo sapien
gaacactaactagttctccatccca

SEQ ID NO: 3449938 - DNA, 25 bp, Homo sapien
tttcattcccgacaagggaacacta

SEQ ID NO: 3449939 - DNA, 25 bp, Homo sapien
cctgtagagaatagtgtatatcata

SEQ ID NO: 3449940 - DNA, 25 bp, Homo sapien
ggaccttccgccgcttccagcatat

SEQ ID NO: 3449941 - DNA, 25 bp, Homo sapien
gcatatcttgccatggactccccaa

SEQ ID NO: 3449942 - DNA, 25 bp, Homo sapien
ctagaggttagaggcagagtcactg

SEQ ID NO: 3449943 - DNA, 25 bp, Homo sapien
gagggacagtcaagatttcatgcac

SEQ ID NO: 3449944 - DNA, 25 bp, Homo sapien
tctggttttggggttcaacactgcc

SEQ ID NO: 3449945 - DNA, 25 bp, Homo sapien
tactgttgctcccagtggtattctc

SEQ ID NO: 3449946 - DNA, 25 bp, Homo sapien
tggcttcttttcttcgaccgcatcg

SEQ ID NO: 3449947 - DNA, 25 bp, Homo sapien
actgccccattgagttctggcttct

SEQ ID NO: 3449948 - DNA, 25 bp, Homo sapien
gaacagtgtgtataatgtgccctta

SEQ ID NO: 3449949 - DNA, 25 bp, Homo sapien
gagatgtttatgtttgcaagccctg

SEQ ID NO: 3449950 - DNA, 25 bp, Homo sapien
gctgagaagcaatcctgacctaatt

SEQ ID NO: 3449951 - DNA, 25 bp, Homo sapien
ttcgcaagaccaaaagaactaagag

SEQ ID NO: 3449952 - DNA, 25 bp, Homo sapien
tatactgggagatatggcagagact

SEQ ID NO: 3449953 - DNA, 25 bp, Homo sapien
aacctacttacacatggccacttgg

SEQ ID NO: 3449954 - DNA, 25 bp, Homo sapien
aaactctgggatattactcaaggcc

SEQ ID NO: 3449955 - DNA, 25 bp, Homo sapien
ccagatagagcccattttgccagtc

SEQ ID NO: 3449956 - DNA, 25 bp, Homo sapien
tcccggcagtctacacgatgtaagg

SEQ ID NO: 3449957 - DNA, 25 bp, Homo sapien
aattggcccgttccttcgatctccg

SEQ ID NO: 3449958 - DNA, 25 bp, Homo sapien
ggcgaaactcaaagggatgctccct

SEQ ID NO: 3449959 - DNA, 25 bp, Homo sapien
caaagacgtttcagccgcaattggc

SEQ ID NO: 3449960 - DNA, 25 bp, Homo sapien
actgtcgcaaatcgcgcccagccgc

SEQ ID NO: 3449961 - DNA, 25 bp, Homo sapien
gccgaggcgggcgtgcgtgcgaccc

SEQ ID NO: 3449962 - DNA, 25 bp, Homo sapien
gtcaagcaagcccggcccgagcttg

SEQ ID NO: 3449963 - DNA, 25 bp, Homo sapien
gcttgccgcaaagttgccgctgccg

SEQ ID NO: 3449964 - DNA, 25 bp, Homo sapien
gtctgttcccgccggcgcagtcgac

SEQ ID NO: 3449965 - DNA, 25 bp, Homo sapien
gccggcgcagtcgacacttccctct

SEQ ID NO: 3449966 - DNA, 25 bp, Homo sapien
gcgcagtcgacacttccctctcgga

SEQ ID NO: 3449967 - DNA, 25 bp, Homo sapien
ttcccgccggcgcagtcgacacttc

SEQ ID NO: 3449968 - DNA, 25 bp, Homo sapien
aggtctggattgctgttctcgtcac

SEQ ID NO: 3449969 - DNA, 25 bp, Homo sapien
tctggattgctgttctcgtcactgc

SEQ ID NO: 3449970 - DNA, 25 bp, Homo sapien
tccagagaggtctggattgctgttc

SEQ ID NO: 3449971 - DNA, 25 bp, Homo sapien
tggattgctgttctcgtcactgctc

SEQ ID NO: 3449972 - DNA, 25 bp, Homo sapien
tgattgcaaaacatcgcgcacttgg

SEQ ID NO: 3449973 - DNA, 25 bp, Homo sapien
caagatacttcgttgaccttactgg

SEQ ID NO: 3449974 - DNA, 25 bp, Homo sapien
tgttagatcccaatgtacagtgaga

SEQ ID NO: 3449975 - DNA, 25 bp, Homo sapien
caattcggctcttactggcgagtca

SEQ ID NO: 3449976 - DNA, 25 bp, Homo sapien
tgcatttggcgtgtttgtaggtgta

SEQ ID NO: 3449977 - DNA, 25 bp, Homo sapien
cactttctatactgacagcgtcatc

SEQ ID NO: 3449978 - DNA, 25 bp, Homo sapien
tatcagggcgttcagtgtttgtacc

SEQ ID NO: 3449979 - DNA, 25 bp, Homo sapien
tttgtaggtgtatcagggcgttcag

SEQ ID NO: 3449980 - DNA, 25 bp, Homo sapien
aactgaactccaaacaatggttggt

SEQ ID NO: 3449981 - DNA, 25 bp, Homo sapien
tactgtgccagttaaactgaactcc

SEQ ID NO: 3449982 - DNA, 25 bp, Homo sapien
tctttactgtgccagttaaactgaa

SEQ ID NO: 3449983 - DNA, 25 bp, Homo sapien
tgccagttaaactgaactccaaaca

SEQ ID NO: 3449984 - DNA, 25 bp, Homo sapien
taagattgcaacaaccggatttctc

SEQ ID NO: 3449985 - DNA, 25 bp, Homo sapien
gtgaatgacattcatacaaggtaac

SEQ ID NO: 3449986 - DNA, 25 bp, Homo sapien
acaaccggatttctccttgtgaatg

SEQ ID NO: 3449987 - DNA, 25 bp, Homo sapien
catccacgtaagattgcaacaaccg

SEQ ID NO: 3449988 - DNA, 25 bp, Homo sapien
ggatttattatcctaattatgcctc

SEQ ID NO: 3449989 - DNA, 25 bp, Homo sapien
gctatcataggtccatgcacaagtg

SEQ ID NO: 3449990 - DNA, 25 bp, Homo sapien
gccagcagaggatggctcgtattgc

SEQ ID NO: 3449991 - DNA, 25 bp, Homo sapien
tgcctctagatccagctacagccag

SEQ ID NO: 3449992 - DNA, 25 bp, Homo sapien
cttggatggaatttcagctcattga

SEQ ID NO: 3449993 - DNA, 25 bp, Homo sapien
agctcattgatagcatttccatggc

SEQ ID NO: 3449994 - DNA, 25 bp, Homo sapien
taaactatgtgtgttctccgagacg

SEQ ID NO: 3449995 - DNA, 25 bp, Homo sapien
taatgcactgcaatgagaatgtaca

SEQ ID NO: 3449996 - DNA, 25 bp, Homo sapien
gaacactatctgtccatacactggg

SEQ ID NO: 3449997 - DNA, 25 bp, Homo sapien
caggacctgtcaacctaagtaacag

SEQ ID NO: 3449998 - DNA, 25 bp, Homo sapien
aagaccagggttaaaagttgtgatg

SEQ ID NO: 3449999 - DNA, 25 bp, Homo sapien
cttgatagtatcacttggagcaaaa

SEQ ID NO: 3450000 - DNA, 25 bp, Homo sapien
ttactgacacaatagaggaagacca

SEQ ID NO: 3450001 - DNA, 25 bp, Homo sapien
aaatgctcttactgacacaatagag

SEQ ID NO: 3450002 - DNA, 25 bp, Homo sapien
tgtaagttatgcacagtaaagccta

SEQ ID NO: 3450003 - DNA, 25 bp, Homo sapien
tagaattagctaggtaagtgctata

SEQ ID NO: 3450004 - DNA, 25 bp, Homo sapien
ccccaatgcaatagtggtgtgagct

SEQ ID NO: 3450005 - DNA, 25 bp, Homo sapien
aatggaatccatattacatagcaac

SEQ ID NO: 3450006 - DNA, 25 bp, Homo sapien
gagtgtccgtctggatattccataa

SEQ ID NO: 3450007 - DNA, 25 bp, Homo sapien
tgtgcccttctacgcctccaaatat

SEQ ID NO: 3450008 - DNA, 25 bp, Homo sapien
gatattccataatcgtaaagcatga

SEQ ID NO: 3450009 - DNA, 25 bp, Homo sapien
gcctccaaatattgccaccagagtg

SEQ ID NO: 3450010 - DNA, 25 bp, Homo sapien
taagattccttaattgcattcatca

SEQ ID NO: 3450011 - DNA, 25 bp, Homo sapien
tatttggattataatcataagattc

SEQ ID NO: 3450012 - DNA, 25 bp, Homo sapien
taagagaatgatccataccacagga

SEQ ID NO: 3450013 - DNA, 25 bp, Homo sapien
cattctctttgaattgatcctccaa

SEQ ID NO: 3450014 - DNA, 25 bp, Homo sapien
taattgtatggccaaacctctctca

SEQ ID NO: 3450015 - DNA, 25 bp, Homo sapien
tcttagaggacacttaggtctgatg

SEQ ID NO: 3450016 - DNA, 25 bp, Homo sapien
ttaacattgtcctactagctcctgg

SEQ ID NO: 3450017 - DNA, 25 bp, Homo sapien
aaagcactttggattggagcaactc

SEQ ID NO: 3450018 - DNA, 25 bp, Homo sapien
tcaaatcgcctaaccatcgcacaca

SEQ ID NO: 3450019 - DNA, 25 bp, Homo sapien
ctaaccatcgcacacaatcaacata

SEQ ID NO: 3450020 - DNA, 25 bp, Homo sapien
aaatcgcctaaccatcgcacacaat

SEQ ID NO: 3450021 - DNA, 25 bp, Homo sapien
aaccatcgcacacaatcaacataat

SEQ ID NO: 3450022 - DNA, 25 bp, Homo sapien
ggcgaagattcggagacactggatc

SEQ ID NO: 3450023 - DNA, 25 bp, Homo sapien
agattcggagacactggatctctca

SEQ ID NO: 3450024 - DNA, 25 bp, Homo sapien
tgctggcgaagattcggagacactg

SEQ ID NO: 3450025 - DNA, 25 bp, Homo sapien
caaatgctggcgaagattcggagac

SEQ ID NO: 3450026 - DNA, 25 bp, Homo sapien
tcaaatggcttgtgcccataatccc

SEQ ID NO: 3450027 - DNA, 25 bp, Homo sapien
cactcaaatggcttgtgcccataat

SEQ ID NO: 3450028 - DNA, 25 bp, Homo sapien
aatttcactcaaatggcttgtgccc

SEQ ID NO: 3450029 - DNA, 25 bp, Homo sapien
atccccacctccacacattaaagaa

SEQ ID NO: 3450030 - DNA, 25 bp, Homo sapien
ttaactattattccttcatccagta

SEQ ID NO: 3450031 - DNA, 25 bp, Homo sapien
cttattaactattattccttcatcc

SEQ ID NO: 3450032 - DNA, 25 bp, Homo sapien
taactattattccttcatccagtat

SEQ ID NO: 3450033 - DNA, 25 bp, Homo sapien
tattaactattattccttcatccag

SEQ ID NO: 3450034 - DNA, 25 bp, Homo sapien
gagagagaaatgagaaaaagaaatg

SEQ ID NO: 3450035 - DNA, 25 bp, Homo sapien
ctaaaacagagagagaaatgagaaa

SEQ ID NO: 3450036 - DNA, 25 bp, Homo sapien
cagagagagaaatgagaaaaagaaa

SEQ ID NO: 3450037 - DNA, 25 bp, Homo sapien
gagagaaatgagaaaaagaaatgtt

SEQ ID NO: 3450038 - DNA, 25 bp, Homo sapien
cattagattcactgggtttaatttt

SEQ ID NO: 3450039 - DNA, 25 bp, Homo sapien
ttgccaggtttccagcacacaatgg

SEQ ID NO: 3450040 - DNA, 25 bp, Homo sapien
taatcaaatcgcccaagaatagtca

SEQ ID NO: 3450041 - DNA, 25 bp, Homo sapien
ccaaatgtcacactggctgtaatca

SEQ ID NO: 3450042 - DNA, 25 bp, Homo sapien
catcaaagggcaaagtaatcaatac

SEQ ID NO: 3450043 - DNA, 25 bp, Homo sapien
taatttaaagtaagcactgcagatc

SEQ ID NO: 3450044 - DNA, 25 bp, Homo sapien
caatggtctttcataagtcagatca

SEQ ID NO: 3450045 - DNA, 25 bp, Homo sapien
cacaagtgtcttgagcaagtaagaa

SEQ ID NO: 3450046 - DNA, 25 bp, Homo sapien
tctaaatcccaaacataaagtttgc

SEQ ID NO: 3450047 - DNA, 25 bp, Homo sapien
tgttccaagtcatacgaaaagcact

SEQ ID NO: 3450048 - DNA, 25 bp, Homo sapien
gacttgtcaccaaggtacttaggaa

SEQ ID NO: 3450049 - DNA, 25 bp, Homo sapien
tacattggcatacaagtgtggagaa

SEQ ID NO: 3450050 - DNA, 25 bp, Homo sapien
taacgttgtcagtgtctaccctaaa

SEQ ID NO: 3450051 - DNA, 25 bp, Homo sapien
ccacatttatgatgagtcagtgttg

SEQ ID NO: 3450052 - DNA, 25 bp, Homo sapien
cgatcccagcgccaaatactggcat

SEQ ID NO: 3450053 - DNA, 25 bp, Homo sapien
gaagtcgatcccagcgccaaatact

SEQ ID NO: 3450054 - DNA, 25 bp, Homo sapien
tgtcgaatagcagcaccacatttat

SEQ ID NO: 3450055 - DNA, 25 bp, Homo sapien
gacaacaaacacactctaattttga

SEQ ID NO: 3450056 - DNA, 25 bp, Homo sapien
ttttcaccacaatgaaagtaactaa

SEQ ID NO: 3450057 - DNA, 25 bp, Homo sapien
tcaccacaatgaaagtaactaaaca

SEQ ID NO: 3450058 - DNA, 25 bp, Homo sapien
ttcaccacaatgaaagtaactaaac

SEQ ID NO: 3450059 - DNA, 25 bp, Homo sapien
accacaatgaaagtaactaaacaca

SEQ ID NO: 3450060 - DNA, 25 bp, Homo sapien
aaatacatcccatcactaaaagcaa

SEQ ID NO: 3450061 - DNA, 25 bp, Homo sapien
gacttgtgtactggcctgttattca

SEQ ID NO: 3450062 - DNA, 25 bp, Homo sapien
ctgttaagaattactgggaatctga

SEQ ID NO: 3450063 - DNA, 25 bp, Homo sapien
tataaaatgagcctgagagttacac

SEQ ID NO: 3450064 - DNA, 25 bp, Homo sapien
tatgacgagactgtatggcaaggcc

SEQ ID NO: 3450065 - DNA, 25 bp, Homo sapien
ttgtggacagaatctagccaactgc

SEQ ID NO: 3450066 - DNA, 25 bp, Homo sapien
tacggctgctttcgccctacagcag

SEQ ID NO: 3450067 - DNA, 25 bp, Homo sapien
ccatacccagttgtctacggctgct

SEQ ID NO: 3450068 - DNA, 25 bp, Homo sapien
gatgagcgccttgtctcaccacaaa

SEQ ID NO: 3450069 - DNA, 25 bp, Homo sapien
tcagtggtcacgactgcagtcaaag

SEQ ID NO: 3450070 - DNA, 25 bp, Homo sapien
gacacgatggtaaggaagatgccag

SEQ ID NO: 3450071 - DNA, 25 bp, Homo sapien
gagtttacatcgtgtcaggccctac

SEQ ID NO: 3450072 - DNA, 25 bp, Homo sapien
taacacctctgaacaggtcttgtcc

SEQ ID NO: 3450073 - DNA, 25 bp, Homo sapien
ttggcctgaatggacattgagtgtg

SEQ ID NO: 3450074 - DNA, 25 bp, Homo sapien
caagctctggcatatgtcatcatga

SEQ ID NO: 3450075 - DNA, 25 bp, Homo sapien
aagagccctcactgtccaaggtgca

SEQ ID NO: 3450076 - DNA, 25 bp, Homo sapien
aagtacagggggctccaggaatact

SEQ ID NO: 3450077 - DNA, 25 bp, Homo sapien
caagctggacataggcttcatgaag

SEQ ID NO: 3450078 - DNA, 25 bp, Homo sapien
gacataggcttcatgaagtacaggg

SEQ ID NO: 3450079 - DNA, 25 bp, Homo sapien
ttgacaacaagctggacataggctt

SEQ ID NO: 3450080 - DNA, 25 bp, Homo sapien
ctaggaaaaggaccgatagaatcct

SEQ ID NO: 3450081 - DNA, 25 bp, Homo sapien
tgaccttgtcttcaggactaggaaa

SEQ ID NO: 3450082 - DNA, 25 bp, Homo sapien
gaaaaggaccgatagaatcctgtgt

SEQ ID NO: 3450083 - DNA, 25 bp, Homo sapien
gcactgggccctggatattacatag

SEQ ID NO: 3450084 - DNA, 25 bp, Homo sapien
gcacatgccatcatgcctagctaac

SEQ ID NO: 3450085 - DNA, 25 bp, Homo sapien
aagtgctgggactacaggcatgaac

SEQ ID NO: 3450086 - DNA, 25 bp, Homo sapien
cacatgccatcatgcctagctaact

SEQ ID NO: 3450087 - DNA, 25 bp, Homo sapien
tgctgggactacaggcatgaaccac

SEQ ID NO: 3450088 - DNA, 25 bp, Homo sapien
cttagaatggcattaagtagcaaaa

SEQ ID NO: 3450089 - DNA, 25 bp, Homo sapien
aaaaccacgaccagttgagaaattg

SEQ ID NO: 3450090 - DNA, 25 bp, Homo sapien
tgcagagtttccactcccctggtaa

SEQ ID NO: 3450091 - DNA, 25 bp, Homo sapien
taaaatgatcattacaccaggcctg

SEQ ID NO: 3450092 - DNA, 25 bp, Homo sapien
tgtatttctcacaatgtgggcccca

SEQ ID NO: 3450093 - DNA, 25 bp, Homo sapien
tgtggtctctggttaaagagaggcc

SEQ ID NO: 3450094 - DNA, 25 bp, Homo sapien
gactcattttccctaggttactgtg

SEQ ID NO: 3450095 - DNA, 25 bp, Homo sapien
tggtaaaagccatctagactcattt

SEQ ID NO: 3450096 - DNA, 25 bp, Homo sapien
tagcaaacattctagggccataagg

SEQ ID NO: 3450097 - DNA, 25 bp, Homo sapien
taacacaagaactgctgagccaagc

SEQ ID NO: 3450098 - DNA, 25 bp, Homo sapien
tctcttaggtcagggttaagcaaac

SEQ ID NO: 3450099 - DNA, 25 bp, Homo sapien
gaaactcagtgtctgtcctatccca

SEQ ID NO: 3450100 - DNA, 25 bp, Homo sapien
tgtcacaagttctttccctacctgg

SEQ ID NO: 3450101 - DNA, 25 bp, Homo sapien
gaaggcagatctaggtagctttccc

SEQ ID NO: 3450102 - DNA, 25 bp, Homo sapien
gccatgttgtgtggaaatgccaaaa

SEQ ID NO: 3450103 - DNA, 25 bp, Homo sapien
taccacctgtgataaattgcaaaag

SEQ ID NO: 3450104 - DNA, 25 bp, Homo sapien
ttccagcctcaaggcagaaggtgct

SEQ ID NO: 3450105 - DNA, 25 bp, Homo sapien
tccagcctcaaggcagaaggtgctc

SEQ ID NO: 3450106 - DNA, 25 bp, Homo sapien
ccagcctcaaggcagaaggtgctct

SEQ ID NO: 3450107 - DNA, 25 bp, Homo sapien
tctcctcattggcttattaagtcta

SEQ ID NO: 3450108 - DNA, 25 bp, Homo sapien
acagttggccgagtttgttatattt

SEQ ID NO: 3450109 - DNA, 25 bp, Homo sapien
caaagtctcctcattggcttattaa

SEQ ID NO: 3450110 - DNA, 25 bp, Homo sapien
ctgaaaaaacagttggccgagtttg

SEQ ID NO: 3450111 - DNA, 25 bp, Homo sapien
tgtcacttcaacactggttaaatac

SEQ ID NO: 3450112 - DNA, 25 bp, Homo sapien
ggttaaatacggcagtgcctcttca

SEQ ID NO: 3450113 - DNA, 25 bp, Homo sapien
actggttaaatacggcagtgcctct

SEQ ID NO: 3450114 - DNA, 25 bp, Homo sapien
cttcaacactggttaaatacggcag

SEQ ID NO: 3450115 - DNA, 25 bp, Homo sapien
ttccatttgattttagtgagtttga

SEQ ID NO: 3450116 - DNA, 25 bp, Homo sapien
gtgagtttgaagatggagcaccact

SEQ ID NO: 3450117 - DNA, 25 bp, Homo sapien
ttttagtgagtttgaagatggagca

SEQ ID NO: 3450118 - DNA, 25 bp, Homo sapien
atttgattttagtgagtttgaagat

SEQ ID NO: 3450119 - DNA, 25 bp, Homo sapien
aatggccagtaagccaggtgaagaa

SEQ ID NO: 3450120 - DNA, 25 bp, Homo sapien
cagaatggccagtaagccaggtgaa

SEQ ID NO: 3450121 - DNA, 25 bp, Homo sapien
atcagaatggccagtaagccaggtg

SEQ ID NO: 3450122 - DNA, 25 bp, Homo sapien
ccagtaagccaggtgaagaagctct

SEQ ID NO: 3450123 - DNA, 25 bp, Homo sapien
atcctcatccctgtcttcatcttct

SEQ ID NO: 3450124 - DNA, 25 bp, Homo sapien
tcatcctcatccctgtcttcatctt

SEQ ID NO: 3450125 - DNA, 25 bp, Homo sapien
tctccttctccttcctcatcatcca

SEQ ID NO: 3450126 - DNA, 25 bp, Homo sapien
cttcatcctcatccctgtcttcatc

SEQ ID NO: 3450127 - DNA, 25 bp, Homo sapien
gcaaaaggccactggtatgaaatct

SEQ ID NO: 3450128 - DNA, 25 bp, Homo sapien
cttccagaatttgcgggagggtgtc

SEQ ID NO: 3450129 - DNA, 25 bp, Homo sapien
ctgaagccggcgactaggagtcctg

SEQ ID NO: 3450130 - DNA, 25 bp, Homo sapien
gggctactgccctagtcgagactaa

SEQ ID NO: 3450131 - DNA, 25 bp, Homo sapien
tagtgactgggccagcggcaagaat

SEQ ID NO: 3450132 - DNA, 25 bp, Homo sapien
gcgacggcagctccgttcagccggc

SEQ ID NO: 3450133 - DNA, 25 bp, Homo sapien
acggcagctccgttcagccggcagt

SEQ ID NO: 3450134 - DNA, 25 bp, Homo sapien
ggcagctccgttcagccggcagtga

SEQ ID NO: 3450135 - DNA, 25 bp, Homo sapien
gcagctccgttcagccggcagtgac

SEQ ID NO: 3450136 - DNA, 25 bp, Homo sapien
gcctccccgccaccaagcagccaaa

SEQ ID NO: 3450137 - DNA, 25 bp, Homo sapien
cagcctccccgccaccaagcagcca

SEQ ID NO: 3450138 - DNA, 25 bp, Homo sapien
ctccccgccaccaagcagccaaaca

SEQ ID NO: 3450139 - DNA, 25 bp, Homo sapien
tccccgccaccaagcagccaaacat

SEQ ID NO: 3450140 - DNA, 25 bp, Homo sapien
cctccctgccgtagggcttcgccct

SEQ ID NO: 3450141 - DNA, 25 bp, Homo sapien
tagggcttcgccctcggtatcctga

SEQ ID NO: 3450142 - DNA, 25 bp, Homo sapien
tgaccccttcctgatatcacccggt

SEQ ID NO: 3450143 - DNA, 25 bp, Homo sapien
ccttcctgatatcacccggtcccat

SEQ ID NO: 3450144 - DNA, 25 bp, Homo sapien
ctgtatatgtacagaatacaataca

SEQ ID NO: 3450145 - DNA, 25 bp, Homo sapien
aatacattatcaaaacttgatggga

SEQ ID NO: 3450146 - DNA, 25 bp, Homo sapien
aatacaatacattatcaaaacttga

SEQ ID NO: 3450147 - DNA, 25 bp, Homo sapien
tgtacagaatacaatacattatcaa

SEQ ID NO: 3450148 - DNA, 25 bp, Homo sapien
gagtcacacaatcattccaggtttg

SEQ ID NO: 3450149 - DNA, 25 bp, Homo sapien
ttaagagcagggcaaaattatctca

SEQ ID NO: 3450150 - DNA, 25 bp, Homo sapien
ctttatgaggctagtcatctccaac

SEQ ID NO: 3450151 - DNA, 25 bp, Homo sapien
cattcaagagacaaactttatgagg

SEQ ID NO: 3450152 - DNA, 25 bp, Homo sapien
ttttaatgtcattcattaataacac

SEQ ID NO: 3450153 - DNA, 25 bp, Homo sapien
tggattccaaataggctttttattc

SEQ ID NO: 3450154 - DNA, 25 bp, Homo sapien
ttaatgtcattcattaataacactc

SEQ ID NO: 3450155 - DNA, 25 bp, Homo sapien
aatgtcattcattaataacactcac

SEQ ID NO: 3450156 - DNA, 25 bp, Homo sapien
aaaccacaacatggttgatactttc

SEQ ID NO: 3450157 - DNA, 25 bp, Homo sapien
aaccacaacatggttgatactttca

SEQ ID NO: 3450158 - DNA, 25 bp, Homo sapien
caaatttatcctctgccacttgctg

SEQ ID NO: 3450159 - DNA, 25 bp, Homo sapien
acaaatttatcctctgccacttgct

SEQ ID NO: 3450160 - DNA, 25 bp, Homo sapien
ccgaagactcgtcgtgtaccttatg

SEQ ID NO: 3450161 - DNA, 25 bp, Homo sapien
cataaggtacacgacgagtcttcgg

SEQ ID NO: 3450162 - DNA, 25 bp, Homo sapien
atagtgagctataatgtggacattg

SEQ ID NO: 3450163 - DNA, 25 bp, Homo sapien
agtgagctataatgtggacattgca

SEQ ID NO: 3450164 - DNA, 25 bp, Homo sapien
tagtgagctataatgtggacattgc

SEQ ID NO: 3450165 - DNA, 25 bp, Homo sapien
tctccctaaccctgatgtgctagtt

SEQ ID NO: 3450166 - DNA, 25 bp, Homo sapien
cagttcaatcaagtgcctgaagtta

SEQ ID NO: 3450167 - DNA, 25 bp, Homo sapien
tgctagttagcaaggttttcccaat

SEQ ID NO: 3450168 - DNA, 25 bp, Homo sapien
agttactttagcaagcctctcccta

SEQ ID NO: 3450169 - DNA, 25 bp, Homo sapien
gcagatgttgaaagtaggcagcaag

SEQ ID NO: 3450170 - DNA, 25 bp, Homo sapien
ccagtctaatcttccatagagagat

SEQ ID NO: 3450171 - DNA, 25 bp, Homo sapien
ttcatgctccagtctaatcttccat

SEQ ID NO: 3450172 - DNA, 25 bp, Homo sapien
cacacacatgcagatgttgaaagta

SEQ ID NO: 3450173 - DNA, 25 bp, Homo sapien
tatcatgccacccttaaaagtctcc

SEQ ID NO: 3450174 - DNA, 25 bp, Homo sapien
ccaagtgtgattcccatccacccac

SEQ ID NO: 3450175 - DNA, 25 bp, Homo sapien
aacctatcatgccacccttaaaagt

SEQ ID NO: 3450176 - DNA, 25 bp, Homo sapien
aggaacctatcatgccacccttaaa

SEQ ID NO: 3450177 - DNA, 25 bp, Homo sapien
ctataaatgttagatgaagcagact

SEQ ID NO: 3450178 - DNA, 25 bp, Homo sapien
ggcagcaccaaactacatgctattt

SEQ ID NO: 3450179 - DNA, 25 bp, Homo sapien
agatttatgggctaaaaacacaatc

SEQ ID NO: 3450180 - DNA, 25 bp, Homo sapien
tgaaggcctagacaataccataagg

SEQ ID NO: 3450181 - DNA, 25 bp, Homo sapien
atcttagcaaggatccttgcatgtg

SEQ ID NO: 3450182 - DNA, 25 bp, Homo sapien
tcgtgtgtcttggtgtagtttatcc

SEQ ID NO: 3450183 - DNA, 25 bp, Homo sapien
cttagcaaggatccttgcatgtgat

SEQ ID NO: 3450184 - DNA, 25 bp, Homo sapien
tgatgagttacttctcttgatgctt

SEQ ID NO: 3450185 - DNA, 25 bp, Homo sapien
ctccaaaaggatgttggcttccttc

SEQ ID NO: 3450186 - DNA, 25 bp, Homo sapien
ggctccaaaaggatgttggcttcct

SEQ ID NO: 3450187 - DNA, 25 bp, Homo sapien
gctccaaaaggatgttggcttcctt

SEQ ID NO: 3450188 - DNA, 25 bp, Homo sapien
ccaaaaggatgttggcttccttctc

SEQ ID NO: 3450189 - DNA, 25 bp, Homo sapien
tgaaattccaatctgagcaacagat

SEQ ID NO: 3450190 - DNA, 25 bp, Homo sapien
ggagtctgctgagccatactgtcta

SEQ ID NO: 3450191 - DNA, 25 bp, Homo sapien
tactgtctaataattccactgaaat

SEQ ID NO: 3450192 - DNA, 25 bp, Homo sapien
acagatggagttcggacaatattca

SEQ ID NO: 3450193 - DNA, 25 bp, Homo sapien
tgaatgagtcaactgaggatacagc

SEQ ID NO: 3450194 - DNA, 25 bp, Homo sapien
gagtgaatgagtcaactgaggatac

SEQ ID NO: 3450195 - DNA, 25 bp, Homo sapien
ctgagtgaatgagtcaactgaggat

SEQ ID NO: 3450196 - DNA, 25 bp, Homo sapien
gaatgagtcaactgaggatacagca

SEQ ID NO: 3450197 - DNA, 25 bp, Homo sapien
catctcaaaaaaactatttgactaa

SEQ ID NO: 3450198 - DNA, 25 bp, Homo sapien
aaaaactatttgactaatatccaga

SEQ ID NO: 3450199 - DNA, 25 bp, Homo sapien
tcaaaaaaactatttgactaatatc

SEQ ID NO: 3450200 - DNA, 25 bp, Homo sapien
aaaaaactatttgactaatatccag

SEQ ID NO: 3450201 - DNA, 25 bp, Homo sapien
caaacacagccaaaagtgtgcaaag

SEQ ID NO: 3450202 - DNA, 25 bp, Homo sapien
tctgtatgtaaaagtcactataagc

SEQ ID NO: 3450203 - DNA, 25 bp, Homo sapien
gatgctcaatatcaccagtaatcaa

SEQ ID NO: 3450204 - DNA, 25 bp, Homo sapien
caagcaccatgctagaaggagaaaa

SEQ ID NO: 3450205 - DNA, 25 bp, Homo sapien
gttcagtaaagtcactaacagtttc

SEQ ID NO: 3450206 - DNA, 25 bp, Homo sapien
gcgaaggcacctgattaatatcaaa

SEQ ID NO: 3450207 - DNA, 25 bp, Homo sapien
taatccaagagactctgctgcgaag

SEQ ID NO: 3450208 - DNA, 25 bp, Homo sapien
aagtcactaacagtttcttcgtttg

SEQ ID NO: 3450209 - DNA, 25 bp, Homo sapien
tatcactctcctcaaatcaacctat

SEQ ID NO: 3450210 - DNA, 25 bp, Homo sapien
tatgtccctcctcaattatcactct

SEQ ID NO: 3450211 - DNA, 25 bp, Homo sapien
tacctgccagaaagataagagttta

SEQ ID NO: 3450212 - DNA, 25 bp, Homo sapien
tataaaggagcaactggttatttcc

SEQ ID NO: 3450213 - DNA, 25 bp, Homo sapien
catacaatgacactgtgaaatatgc

SEQ ID NO: 3450214 - DNA, 25 bp, Homo sapien
taaaaaagaatgttaagagtaatca

SEQ ID NO: 3450215 - DNA, 25 bp, Homo sapien
tgacactgtgaaatatgctactcac

SEQ ID NO: 3450216 - DNA, 25 bp, Homo sapien
gaatgttaagagtaatcatacatac

SEQ ID NO: 3450217 - DNA, 25 bp, Homo sapien
taacttgtttatagggagtgtcagt

SEQ ID NO: 3450218 - DNA, 25 bp, Homo sapien
attaacttgtttatagggagtgtca

SEQ ID NO: 3450219 - DNA, 25 bp, Homo sapien
cttgtttatagggagtgtcagttct

SEQ ID NO: 3450220 - DNA, 25 bp, Homo sapien
ttatagggagtgtcagttctaagag

SEQ ID NO: 3450221 - DNA, 25 bp, Homo sapien
aaattgtagaaattgtccaacatct

SEQ ID NO: 3450222 - DNA, 25 bp, Homo sapien
attgtagaaattgtccaacatcttt

SEQ ID NO: 3450223 - DNA, 25 bp, Homo sapien
aattgtagaaattgtccaacatctt

SEQ ID NO: 3450224 - DNA, 25 bp, Homo sapien
acatttgccggaatgaacatttcag

SEQ ID NO: 3450225 - DNA, 25 bp, Homo sapien
tcagaaccacatttgccggaatgaa

SEQ ID NO: 3450226 - DNA, 25 bp, Homo sapien
agaaccacatttgccggaatgaaca

SEQ ID NO: 3450227 - DNA, 25 bp, Homo sapien
ccacatttgccggaatgaacatttc

SEQ ID NO: 3450228 - DNA, 25 bp, Homo sapien
tataaaaagccttaatattggagac

SEQ ID NO: 3450229 - DNA, 25 bp, Homo sapien
aaaaagccttaatattggagacaga

SEQ ID NO: 3450230 - DNA, 25 bp, Homo sapien
aagccttaatattggagacagaaaa

SEQ ID NO: 3450231 - DNA, 25 bp, Homo sapien
aaaagccttaatattggagacagaa

SEQ ID NO: 3450232 - DNA, 25 bp, Homo sapien
tataagctttaatagtggtccctaa

SEQ ID NO: 3450233 - DNA, 25 bp, Homo sapien
ggtccctaaaacataggcaactata

SEQ ID NO: 3450234 - DNA, 25 bp, Homo sapien
tactttaatggcatgcagtgctgat

SEQ ID NO: 3450235 - DNA, 25 bp, Homo sapien
tataaactactctcatagatggtac

SEQ ID NO: 3450236 - DNA, 25 bp, Homo sapien
tcaacaaactcttcctaggcatcct

SEQ ID NO: 3450237 - DNA, 25 bp, Homo sapien
tggtaccacttctcaacaaactctt

SEQ ID NO: 3450238 - DNA, 25 bp, Homo sapien
catgctacaccatggtaccacttct

SEQ ID NO: 3450239 - DNA, 25 bp, Homo sapien
aatgctctccatgctacaccatggt

SEQ ID NO: 3450240 - DNA, 25 bp, Homo sapien
cagagagcacaaatcataagaaatt

SEQ ID NO: 3450241 - DNA, 25 bp, Homo sapien
aaagacagcaagcataggaatttaa

SEQ ID NO: 3450242 - DNA, 25 bp, Homo sapien
tatcggggcagttttgattagcttt

SEQ ID NO: 3450243 - DNA, 25 bp, Homo sapien
aaaataggatctttcattaactgcc

SEQ ID NO: 3450244 - DNA, 25 bp, Homo sapien
gctagtcgtctttgaaagttttcat

SEQ ID NO: 3450245 - DNA, 25 bp, Homo sapien
gagggttctgtgctagtcgtctttg

SEQ ID NO: 3450246 - DNA, 25 bp, Homo sapien
gttctgtgctagtcgtctttgaaag

SEQ ID NO: 3450247 - DNA, 25 bp, Homo sapien
aagagagggttctgtgctagtcgtc

SEQ ID NO: 3450248 - DNA, 25 bp, Homo sapien
ttagatggagtcagttatcttcaaa

SEQ ID NO: 3450249 - DNA, 25 bp, Homo sapien
ttcgtgatcctttgacctcatactt

SEQ ID NO: 3450250 - DNA, 25 bp, Homo sapien
ttcagtctctaagcagtttttaaac

SEQ ID NO: 3450251 - DNA, 25 bp, Homo sapien
taattaagcttcagtctctaagcag

SEQ ID NO: 3450252 - DNA, 25 bp, Homo sapien
tgtcttgcctttgaatggtatttta

SEQ ID NO: 3450253 - DNA, 25 bp, Homo sapien
gcctttgaatggtattttaagctta

SEQ ID NO: 3450254 - DNA, 25 bp, Homo sapien
aaatgtcttgcctttgaatggtatt

SEQ ID NO: 3450255 - DNA, 25 bp, Homo sapien
cttgcctttgaatggtattttaagc

SEQ ID NO: 3450256 - DNA, 25 bp, Homo sapien
agtggactccccctgttcttcagtc

SEQ ID NO: 3450257 - DNA, 25 bp, Homo sapien
cagctggaaagcactcagtggactc

SEQ ID NO: 3450258 - DNA, 25 bp, Homo sapien
ttaatcctcataatggcacattgat

SEQ ID NO: 3450259 - DNA, 25 bp, Homo sapien
taatcctcataatggcacattgatt

SEQ ID NO: 3450260 - DNA, 25 bp, Homo sapien
aggcacctgccatcacagcctgcta

SEQ ID NO: 3450261 - DNA, 25 bp, Homo sapien
caaagcgctgagattacaggcatga

SEQ ID NO: 3450262 - DNA, 25 bp, Homo sapien
gcacctgccatcacagcctgctaat

SEQ ID NO: 3450263 - DNA, 25 bp, Homo sapien
cccaaagcgctgagattacaggcat

SEQ ID NO: 3450264 - DNA, 25 bp, Homo sapien
ccacggagctttggatgtgccttaa

SEQ ID NO: 3450265 - DNA, 25 bp, Homo sapien
aggaactgatgtccggcaccgagtg

SEQ ID NO: 3450266 - DNA, 25 bp, Homo sapien
caccgagtgagagtgtgcagacccg

SEQ ID NO: 3450267 - DNA, 25 bp, Homo sapien
caatttccaggtgactccgtactga

SEQ ID NO: 3450268 - DNA, 25 bp, Homo sapien
cagggcacgggcgatcgtatccaac

SEQ ID NO: 3450269 - DNA, 25 bp, Homo sapien
agggcacgggcgatcgtatccaaca

SEQ ID NO: 3450270 - DNA, 25 bp, Homo sapien
gggcacgggcgatcgtatccaacat

SEQ ID NO: 3450271 - DNA, 25 bp, Homo sapien
tgcagggcacgggcgatcgtatcca

SEQ ID NO: 3450272 - DNA, 25 bp, Homo sapien
cctcctggctcagcgagggcagagt

SEQ ID NO: 3450273 - DNA, 25 bp, Homo sapien
ctggctcagcgagggcagagtgggc

SEQ ID NO: 3450274 - DNA, 25 bp, Homo sapien
cagagtgggcagcacctgcctgccc

SEQ ID NO: 3450275 - DNA, 25 bp, Homo sapien
gtgggcagcacctgcctgcccaggt

SEQ ID NO: 3450276 - DNA, 25 bp, Homo sapien
tggatatagttgatatctacagact

SEQ ID NO: 3450277 - DNA, 25 bp, Homo sapien
ttagtaaaggcatagttgaactcaa

SEQ ID NO: 3450278 - DNA, 25 bp, Homo sapien
gcagaaaattagtaaaggcatagtt

SEQ ID NO: 3450279 - DNA, 25 bp, Homo sapien
gactagttcatccaacagcagtaga

SEQ ID NO: 3450280 - DNA, 25 bp, Homo sapien
gatacattcccccagataatagaga

SEQ ID NO: 3450281 - DNA, 25 bp, Homo sapien
cttgtgcagggttaactgccgtctc

SEQ ID NO: 3450282 - DNA, 25 bp, Homo sapien
gttaactgccgtctcacaaattctg

SEQ ID NO: 3450283 - DNA, 25 bp, Homo sapien
gcagggttaactgccgtctcacaaa

SEQ ID NO: 3450284 - DNA, 25 bp, Homo sapien
tctccaccatgataaacacaggcct

SEQ ID NO: 3450285 - DNA, 25 bp, Homo sapien
aatttgttgtttcccacctcaagct

SEQ ID NO: 3450286 - DNA, 25 bp, Homo sapien
tttgagtccatgaatctgcactagc

SEQ ID NO: 3450287 - DNA, 25 bp, Homo sapien
tctgcactagcttctccaccatgat

SEQ ID NO: 3450288 - DNA, 25 bp, Homo sapien
aatcaggaagtatgcacccaaaggc

SEQ ID NO: 3450289 - DNA, 25 bp, Homo sapien
cacagccaggaatcaggaagtatgc

SEQ ID NO: 3450290 - DNA, 25 bp, Homo sapien
cagccaggaatcaggaagtatgcac

SEQ ID NO: 3450291 - DNA, 25 bp, Homo sapien
caggaatcaggaagtatgcacccaa

SEQ ID NO: 3450292 - DNA, 25 bp, Homo sapien
cggagatagattgtctccatttatc

SEQ ID NO: 3450293 - DNA, 25 bp, Homo sapien
tgttgccatcggagatagattgtct

SEQ ID NO: 3450294 - DNA, 25 bp, Homo sapien
ccatcggagatagattgtctccatt

SEQ ID NO: 3450295 - DNA, 25 bp, Homo sapien
gagatagattgtctccatttatcca

SEQ ID NO: 3450296 - DNA, 25 bp, Homo sapien
gctgtctctgatcatgaggacccca

SEQ ID NO: 3450297 - DNA, 25 bp, Homo sapien
ggaccctccagggatatcatgacaa

SEQ ID NO: 3450298 - DNA, 25 bp, Homo sapien
catggaaatggaacgcgataaaaaa

SEQ ID NO: 3450299 - DNA, 25 bp, Homo sapien
aaaaaagcaacgtctccttcacaca

SEQ ID NO: 3450300 - DNA, 25 bp, Homo sapien
atttgctagggcctttgccaaagcc

SEQ ID NO: 3450301 - DNA, 25 bp, Homo sapien
aggaagtctttataaaacctcatct

SEQ ID NO: 3450302 - DNA, 25 bp, Homo sapien
ccacttccatccatggtacaaagga

SEQ ID NO: 3450303 - DNA, 25 bp, Homo sapien
agtctttataaaacctcatcttcac

SEQ ID NO: 3450304 - DNA, 25 bp, Homo sapien
tgaggtccaggactcagacaaatta

SEQ ID NO: 3450305 - DNA, 25 bp, Homo sapien
ggctcataggcaaggctaccacgat

SEQ ID NO: 3450306 - DNA, 25 bp, Homo sapien
caaggttacatctaggctgaggtcc

SEQ ID NO: 3450307 - DNA, 25 bp, Homo sapien
tgttaagcgcttataagtccagagc

SEQ ID NO: 3450308 - DNA, 25 bp, Homo sapien
tctctgctagacaacaccgagtcca

SEQ ID NO: 3450309 - DNA, 25 bp, Homo sapien
tctgctagacaacaccgagtccaca

SEQ ID NO: 3450310 - DNA, 25 bp, Homo sapien
ggcctctctgctagacaacaccgag

SEQ ID NO: 3450311 - DNA, 25 bp, Homo sapien
gcctctctgctagacaacaccgagt

SEQ ID NO: 3450312 - DNA, 25 bp, Homo sapien
ttctacaagggtctccataggcagt

SEQ ID NO: 3450313 - DNA, 25 bp, Homo sapien
ttctttgtctgactggtcttttaac

SEQ ID NO: 3450314 - DNA, 25 bp, Homo sapien
gactggtcttttaacttgcacttcc

SEQ ID NO: 3450315 - DNA, 25 bp, Homo sapien
tctacaagggtctccataggcagtt

SEQ ID NO: 3450316 - DNA, 25 bp, Homo sapien
gaacaaagcttgtctatctcgaagt

SEQ ID NO: 3450317 - DNA, 25 bp, Homo sapien
caaagcttgtctatctcgaagtctt

SEQ ID NO: 3450318 - DNA, 25 bp, Homo sapien
tgtctatctcgaagtcttttgggtg

SEQ ID NO: 3450319 - DNA, 25 bp, Homo sapien
tctcgaagtcttttgggtgatgaga

SEQ ID NO: 3450320 - DNA, 25 bp, Homo sapien
tcccaccactctcacttcgttcaaa

SEQ ID NO: 3450321 - DNA, 25 bp, Homo sapien
cactctcacttcgttcaaacttttc

SEQ ID NO: 3450322 - DNA, 25 bp, Homo sapien
ctctcacttcgttcaaacttttcca

SEQ ID NO: 3450323 - DNA, 25 bp, Homo sapien
accactctcacttcgttcaaacttt

SEQ ID NO: 3450324 - DNA, 25 bp, Homo sapien
cactagatggtgaaccttggtcacc

SEQ ID NO: 3450325 - DNA, 25 bp, Homo sapien
atttatccctctgcatatgtctggc

SEQ ID NO: 3450326 - DNA, 25 bp, Homo sapien
ggtcacctttattattcccatcatg

SEQ ID NO: 3450327 - DNA, 25 bp, Homo sapien
gtttccgcctgtgtcataacatcta

SEQ ID NO: 3450328 - DNA, 25 bp, Homo sapien
ctcactgtcgtgtttcagacaactt

SEQ ID NO: 3450329 - DNA, 25 bp, Homo sapien
cttgttatgatcctggcaagctgga

SEQ ID NO: 3450330 - DNA, 25 bp, Homo sapien
ttgttatgatcctggcaagctggag

SEQ ID NO: 3450331 - DNA, 25 bp, Homo sapien
cttcatctcactgtcgtgtttcaga

SEQ ID NO: 3450332 - DNA, 25 bp, Homo sapien
tgtgctcgttgcaaacatacatagc

SEQ ID NO: 3450333 - DNA, 25 bp, Homo sapien
tacaacagggaatttcgttgtgctc

SEQ ID NO: 3450334 - DNA, 25 bp, Homo sapien
cgttgcaaacatacatagcacattt

SEQ ID NO: 3450335 - DNA, 25 bp, Homo sapien
gaatttcgttgtgctcgttgcaaac

SEQ ID NO: 3450336 - DNA, 25 bp, Homo sapien
tcctttaacatctgatactgctgta

SEQ ID NO: 3450337 - DNA, 25 bp, Homo sapien
ttaacatctgatactgctgtatgag

SEQ ID NO: 3450338 - DNA, 25 bp, Homo sapien
ctttaacatctgatactgctgtatg

SEQ ID NO: 3450339 - DNA, 25 bp, Homo sapien
acatctgatactgctgtatgagtct

SEQ ID NO: 3450340 - DNA, 25 bp, Homo sapien
tcagcaactccaagattataggcag

SEQ ID NO: 3450341 - DNA, 25 bp, Homo sapien
gttctctagtagccagacttttcat

SEQ ID NO: 3450342 - DNA, 25 bp, Homo sapien
cagcaactccaagattataggcagc

SEQ ID NO: 3450343 - DNA, 25 bp, Homo sapien
gcaggactgagtggccgtttgtcaa

SEQ ID NO: 3450344 - DNA, 25 bp, Homo sapien
cttaagagcattaagcgcaggactg

SEQ ID NO: 3450345 - DNA, 25 bp, Homo sapien
ggagactccgggaatattcctcttg

SEQ ID NO: 3450346 - DNA, 25 bp, Homo sapien
gcacttgttccaggcggtccatcaa

SEQ ID NO: 3450347 - DNA, 25 bp, Homo sapien
caaagctctcttgtaacactgtgtt

SEQ ID NO: 3450348 - DNA, 25 bp, Homo sapien
ccaaagctctcttgtaacactgtgt

SEQ ID NO: 3450349 - DNA, 25 bp, Homo sapien
ttttaaaaatttcgctctttgcgca

SEQ ID NO: 3450350 - DNA, 25 bp, Homo sapien
aaatttcgctctttgcgcagcaagt

SEQ ID NO: 3450351 - DNA, 25 bp, Homo sapien
cactagttgatgcaggatggctttc

SEQ ID NO: 3450352 - DNA, 25 bp, Homo sapien
cattcttaccaaagatgggctcaga

SEQ ID NO: 3450353 - DNA, 25 bp, Homo sapien
agcatttgcaaatcccgcctctggt

SEQ ID NO: 3450354 - DNA, 25 bp, Homo sapien
gcagccgagagggtttgttctttat

SEQ ID NO: 3450355 - DNA, 25 bp, Homo sapien
cagcctggctccataatacttggaa

SEQ ID NO: 3450356 - DNA, 25 bp, Homo sapien
tgcaccaaatttgggagccccattc

SEQ ID NO: 3450357 - DNA, 25 bp, Homo sapien
tccataatacttggaagagcatgca

SEQ ID NO: 3450358 - DNA, 25 bp, Homo sapien
tggaagagcatgcaccaaatttggg

SEQ ID NO: 3450359 - DNA, 25 bp, Homo sapien
ggttgactctatttactcgctccag

SEQ ID NO: 3450360 - DNA, 25 bp, Homo sapien
ttcatcgcagcactcctttcccagt

SEQ ID NO: 3450361 - DNA, 25 bp, Homo sapien
gctcagcggttctgtctgccaagtg

SEQ ID NO: 3450362 - DNA, 25 bp, Homo sapien
cctcctgtaagcattggttgactct

SEQ ID NO: 3450363 - DNA, 25 bp, Homo sapien
ccacgtggattacacctctacctgt

SEQ ID NO: 3450364 - DNA, 25 bp, Homo sapien
ggattacacctctacctgttgagct

SEQ ID NO: 3450365 - DNA, 25 bp, Homo sapien
tgactgctttcccacgtggattaca

SEQ ID NO: 3450366 - DNA, 25 bp, Homo sapien
ggctccaaagcctctctgttgactg

SEQ ID NO: 3450367 - DNA, 25 bp, Homo sapien
agagcaaatgccgatcagcaggttc

SEQ ID NO: 3450368 - DNA, 25 bp, Homo sapien
gaggagagcaaatgccgatcagcag

SEQ ID NO: 3450369 - DNA, 25 bp, Homo sapien
aggagaggagagcaaatgccgatca

SEQ ID NO: 3450370 - DNA, 25 bp, Homo sapien
gcaaatgccgatcagcaggttcctg

SEQ ID NO: 3450371 - DNA, 25 bp, Homo sapien
tggcattgcttgcagcgccgatact

SEQ ID NO: 3450372 - DNA, 25 bp, Homo sapien
gagccaggcaggaacttgttcaggg

SEQ ID NO: 3450373 - DNA, 25 bp, Homo sapien
gccgatacttctcacactggtctag

SEQ ID NO: 3450374 - DNA, 25 bp, Homo sapien
ttggaggtgcgcctctggcattgct

SEQ ID NO: 3450375 - DNA, 25 bp, Homo sapien
ccataatgaagctggatcccattcc

SEQ ID NO: 3450376 - DNA, 25 bp, Homo sapien
cagcccctgtgcagcaggttctagc

SEQ ID NO: 3450377 - DNA, 25 bp, Homo sapien
tctctgaggtaaaaatacgcagttt

SEQ ID NO: 3450378 - DNA, 25 bp, Homo sapien
taacaagcaatctaatgaaagcacc

SEQ ID NO: 3450379 - DNA, 25 bp, Homo sapien
ttcccgttggtcattaaaattcagc

SEQ ID NO: 3450380 - DNA, 25 bp, Homo sapien
tcccgttggtcattaaaattcagct

SEQ ID NO: 3450381 - DNA, 25 bp, Homo sapien
ccgtatgtgacttccactggagctg

SEQ ID NO: 3450382 - DNA, 25 bp, Homo sapien
gagctgggtgattcattggagccat

SEQ ID NO: 3450383 - DNA, 25 bp, Homo sapien
atcaaaagcccaatccagaaactgg

SEQ ID NO: 3450384 - DNA, 25 bp, Homo sapien
gtcgaattggttgggttgtgtataa

SEQ ID NO: 3450385 - DNA, 25 bp, Homo sapien
gcgccgtgccgtttatctctaataa

SEQ ID NO: 3450386 - DNA, 25 bp, Homo sapien
gcgaagccgcatttgagaatgatat

SEQ ID NO: 3450387 - DNA, 25 bp, Homo sapien
taataaaccgtactgcatcttcgtt

SEQ ID NO: 3450388 - DNA, 25 bp, Homo sapien
attccggacacaaagcgaagccgca

SEQ ID NO: 3450389 - DNA, 25 bp, Homo sapien
gtaagtgggagcttctcgcaggaca

SEQ ID NO: 3450390 - DNA, 25 bp, Homo sapien
tagggagctgagagcacggcttctt

SEQ ID NO: 3450391 - DNA, 25 bp, Homo sapien
tgttccacagtatgacctggagggt

SEQ ID NO: 3450392 - DNA, 25 bp, Homo sapien
tgctgccagcactagaatcgggaag

SEQ ID NO: 3450393 - DNA, 25 bp, Homo sapien
aattccaacttgacccctaggagtg

SEQ ID NO: 3450394 - DNA, 25 bp, Homo sapien
gaacaccgggagtaggctcagtcaa

SEQ ID NO: 3450395 - DNA, 25 bp, Homo sapien
ggacttttaagagatgccgtgacta

SEQ ID NO: 3450396 - DNA, 25 bp, Homo sapien
cacgggaaggcatacgatgacttgc

SEQ ID NO: 3450397 - DNA, 25 bp, Homo sapien
cctgccccactttagtgcggtaaat

SEQ ID NO: 3450398 - DNA, 25 bp, Homo sapien
tgcactccccaagtcttaaagtctg

SEQ ID NO: 3450399 - DNA, 25 bp, Homo sapien
tgccccactttagtgcggtaaatgg

SEQ ID NO: 3450400 - DNA, 25 bp, Homo sapien
ccctgcactccccaagtcttaaagt

SEQ ID NO: 3450401 - DNA, 25 bp, Homo sapien
acatgtcgacaggttggagctctga

SEQ ID NO: 3450402 - DNA, 25 bp, Homo sapien
agctctgattaaattggaactgagc

SEQ ID NO: 3450403 - DNA, 25 bp, Homo sapien
ctctgattaaattggaactgagcat

SEQ ID NO: 3450404 - DNA, 25 bp, Homo sapien
aacatgtcgacaggttggagctctg

SEQ ID NO: 3450405 - DNA, 25 bp, Homo sapien
ctgggctctaaagtcaggagcactc

SEQ ID NO: 3450406 - DNA, 25 bp, Homo sapien
ggagcactccacatccactggttat

SEQ ID NO: 3450407 - DNA, 25 bp, Homo sapien
gtcaggagcactccacatccactgg

SEQ ID NO: 3450408 - DNA, 25 bp, Homo sapien
gctctaaagtcaggagcactccaca

SEQ ID NO: 3450409 - DNA, 25 bp, Homo sapien
ggaatagaccatctatgcagaaatc

SEQ ID NO: 3450410 - DNA, 25 bp, Homo sapien
taaacactatgtttgcagggctgca

SEQ ID NO: 3450411 - DNA, 25 bp, Homo sapien
cagggctgcattaggggacccatgc

SEQ ID NO: 3450412 - DNA, 25 bp, Homo sapien
tggaagtggaggatacagttcctgc

SEQ ID NO: 3450413 - DNA, 25 bp, Homo sapien
aaattacttcaggataggactcaga

SEQ ID NO: 3450414 - DNA, 25 bp, Homo sapien
taaatgctagcataaaatggattcg

SEQ ID NO: 3450415 - DNA, 25 bp, Homo sapien
agatgcctgcccatagaactgcctc

SEQ ID NO: 3450416 - DNA, 25 bp, Homo sapien
aatggattcgagcttttacaatttc

SEQ ID NO: 3450417 - DNA, 25 bp, Homo sapien
gaatttgggtctaagtctgtctgac

SEQ ID NO: 3450418 - DNA, 25 bp, Homo sapien
tggaacttatccctgaccagagaca

SEQ ID NO: 3450419 - DNA, 25 bp, Homo sapien
ttttgcaagttggagtgggtctcac

SEQ ID NO: 3450420 - DNA, 25 bp, Homo sapien
tgtcaaggtcactactaaccagatg

SEQ ID NO: 3450421 - DNA, 25 bp, Homo sapien
aatcatacgtcttctctgttgctca

SEQ ID NO: 3450422 - DNA, 25 bp, Homo sapien
gcagaaatcatacgtcttctctgtt

SEQ ID NO: 3450423 - DNA, 25 bp, Homo sapien
tcatacgtcttctctgttgctcacg

SEQ ID NO: 3450424 - DNA, 25 bp, Homo sapien
gaaatcatacgtcttctctgttgct

SEQ ID NO: 3450425 - DNA, 25 bp, Homo sapien
aacagatgaaggtagggtgaacctc

SEQ ID NO: 3450426 - DNA, 25 bp, Homo sapien
gaagaacagatgaaggtagggtgaa

SEQ ID NO: 3450427 - DNA, 25 bp, Homo sapien
agaacagatgaaggtagggtgaacc

SEQ ID NO: 3450428 - DNA, 25 bp, Homo sapien
ctggaagaacagatgaaggtagggt

SEQ ID NO: 3450429 - DNA, 25 bp, Homo sapien
gaaccctggataagccaatctgtgc

SEQ ID NO: 3450430 - DNA, 25 bp, Homo sapien
atgaggttccatagattgccctggc

SEQ ID NO: 3450431 - DNA, 25 bp, Homo sapien
atgtccagtcctcatcacaaatgag

SEQ ID NO: 3450432 - DNA, 25 bp, Homo sapien
gcagccaagtggacgacatagatgt

SEQ ID NO: 3450433 - DNA, 25 bp, Homo sapien
ttatgtcctacacttccagaatcct

SEQ ID NO: 3450434 - DNA, 25 bp, Homo sapien
gtcctacacttccagaatccttggt

SEQ ID NO: 3450435 - DNA, 25 bp, Homo sapien
ttccagaatccttggttctggaaaa

SEQ ID NO: 3450436 - DNA, 25 bp, Homo sapien
tgtcctacacttccagaatccttgg

SEQ ID NO: 3450437 - DNA, 25 bp, Homo sapien
tgggaagatggcccatcagaatctc

SEQ ID NO: 3450438 - DNA, 25 bp, Homo sapien
gagaaactgcataggcaaggctata

SEQ ID NO: 3450439 - DNA, 25 bp, Homo sapien
atctaaaccttgagagaaggatttt

SEQ ID NO: 3450440 - DNA, 25 bp, Homo sapien
ccaagcaggagaaactgcataggca

SEQ ID NO: 3450441 - DNA, 25 bp, Homo sapien
tcaaaaggataggtgtggggagaat

SEQ ID NO: 3450442 - DNA, 25 bp, Homo sapien
caaaaggataggtgtggggagaatt

SEQ ID NO: 3450443 - DNA, 25 bp, Homo sapien
taggtgtggggagaatttcctagcc

SEQ ID NO: 3450444 - DNA, 25 bp, Homo sapien
ggataggtgtggggagaatttccta

SEQ ID NO: 3450445 - DNA, 25 bp, Homo sapien
tcttttttatctggctctgtccttt

SEQ ID NO: 3450446 - DNA, 25 bp, Homo sapien
ctttgtccctggcaatcacagccat

SEQ ID NO: 3450447 - DNA, 25 bp, Homo sapien
tttcctcctttgtccctggcaatca

SEQ ID NO: 3450448 - DNA, 25 bp, Homo sapien
cctcctttgtccctggcaatcacag

SEQ ID NO: 3450449 - DNA, 25 bp, Homo sapien
aatttgtgcttaaatgcatgtggcc

SEQ ID NO: 3450450 - DNA, 25 bp, Homo sapien
taggactttagcatccagaaggagc

SEQ ID NO: 3450451 - DNA, 25 bp, Homo sapien
tagcatccagaaggagcagcttgct

SEQ ID NO: 3450452 - DNA, 25 bp, Homo sapien
gcctgcctaggactttagcatccag

SEQ ID NO: 3450453 - DNA, 25 bp, Homo sapien
acttttagggagttgataatctgca

SEQ ID NO: 3450454 - DNA, 25 bp, Homo sapien
tctgtgacttttagggagttgataa

SEQ ID NO: 3450455 - DNA, 25 bp, Homo sapien
tctttacagcttggatcttctgtga

SEQ ID NO: 3450456 - DNA, 25 bp, Homo sapien
tgaaattctttacagcttggatctt

SEQ ID NO: 3450457 - DNA, 25 bp, Homo sapien
tctgcatgcgcctccatgagcctgg

SEQ ID NO: 3450458 - DNA, 25 bp, Homo sapien
gggcagataggcaccacagaaggtt

SEQ ID NO: 3450459 - DNA, 25 bp, Homo sapien
ctcacttgacactcctctgcatgcg

SEQ ID NO: 3450460 - DNA, 25 bp, Homo sapien
ctggcttgagggaacgccccatgaa

SEQ ID NO: 3450461 - DNA, 25 bp, Homo sapien
gggattgctagataccacttctaga

SEQ ID NO: 3450462 - DNA, 25 bp, Homo sapien
tcaggtggggattgctagataccac

SEQ ID NO: 3450463 - DNA, 25 bp, Homo sapien
ttgctagataccacttctagagctc

SEQ ID NO: 3450464 - DNA, 25 bp, Homo sapien
tctcaggtggggattgctagatacc

SEQ ID NO: 3450465 - DNA, 25 bp, Homo sapien
tcaaacctcatcctgatggtggtgt

SEQ ID NO: 3450466 - DNA, 25 bp, Homo sapien
tcggttgaatattacaagatggtca

SEQ ID NO: 3450467 - DNA, 25 bp, Homo sapien
ccgttggcaaaggatagcacatcaa

SEQ ID NO: 3450468 - DNA, 25 bp, Homo sapien
tctagttttgtagccagcatttcgg

SEQ ID NO: 3450469 - DNA, 25 bp, Homo sapien
caacagtgtcggaccagtgctatca

SEQ ID NO: 3450470 - DNA, 25 bp, Homo sapien
ccagtagcaggactcccgtggggtt

SEQ ID NO: 3450471 - DNA, 25 bp, Homo sapien
tctagggggaaagagatctcactac

SEQ ID NO: 3450472 - DNA, 25 bp, Homo sapien
gatctcactacaacagtgtcggacc

SEQ ID NO: 3450473 - DNA, 25 bp, Homo sapien
ggtgaggtaataacacattgtggtt

SEQ ID NO: 3450474 - DNA, 25 bp, Homo sapien
ggcattttagtttgatacagtccca

SEQ ID NO: 3450475 - DNA, 25 bp, Homo sapien
aggcattttagtttgatacagtccc

SEQ ID NO: 3450476 - DNA, 25 bp, Homo sapien
acctgttggatatttgtgtcttttc

SEQ ID NO: 3450477 - DNA, 25 bp, Homo sapien
ccacaccccatcactgtgatgtgga

SEQ ID NO: 3450478 - DNA, 25 bp, Homo sapien
ggacatgcaggtgccaagtagcagc

SEQ ID NO: 3450479 - DNA, 25 bp, Homo sapien
cactgtgatgtggaacagcacacac

SEQ ID NO: 3450480 - DNA, 25 bp, Homo sapien
acatgcaggtgccaagtagcagcag

SEQ ID NO: 3450481 - DNA, 25 bp, Homo sapien
tcagaggcatttccactcttgccat

SEQ ID NO: 3450482 - DNA, 25 bp, Homo sapien
gtatcagaggcatttccactcttgc

SEQ ID NO: 3450483 - DNA, 25 bp, Homo sapien
gcaaagtatcagaggcatttccact

SEQ ID NO: 3450484 - DNA, 25 bp, Homo sapien
caaagtatcagaggcatttccactc

SEQ ID NO: 3450485 - DNA, 25 bp, Homo sapien
tctccacaacctggtccactttggt

SEQ ID NO: 3450486 - DNA, 25 bp, Homo sapien
ccacaacctggtccactttggtttg

SEQ ID NO: 3450487 - DNA, 25 bp, Homo sapien
gttctccacaacctggtccactttg

SEQ ID NO: 3450488 - DNA, 25 bp, Homo sapien
ctgttctccacaacctggtccactt

SEQ ID NO: 3450489 - DNA, 25 bp, Homo sapien
ttttccagctgcctgttgtcagagg

SEQ ID NO: 3450490 - DNA, 25 bp, Homo sapien
cagctgcctgttgtcagaggcttcc

SEQ ID NO: 3450491 - DNA, 25 bp, Homo sapien
tgttgtcagaggcttccctctatga

SEQ ID NO: 3450492 - DNA, 25 bp, Homo sapien
gcctgttgtcagaggcttccctcta

SEQ ID NO: 3450493 - DNA, 25 bp, Homo sapien
ttctaattgtgaacagcatgtgcag

SEQ ID NO: 3450494 - DNA, 25 bp, Homo sapien
ggttcttaagtcaaagtccccatga

SEQ ID NO: 3450495 - DNA, 25 bp, Homo sapien
catgactcagaagcacatccagcct

SEQ ID NO: 3450496 - DNA, 25 bp, Homo sapien
agtcaaagtccccatgactcagaag

SEQ ID NO: 3450497 - DNA, 25 bp, Homo sapien
aagcaagcgtgcgtggactcaagag

SEQ ID NO: 3450498 - DNA, 25 bp, Homo sapien
tacacggcagtatttcttggctgct

SEQ ID NO: 3450499 - DNA, 25 bp, Homo sapien
ctaaattaagcaagcgtgcgtggac

SEQ ID NO: 3450500 - DNA, 25 bp, Homo sapien
gactcaagaggtacacggcagtatt

SEQ ID NO: 3450501 - DNA, 25 bp, Homo sapien
cagacagaggtgaactcttattagc

SEQ ID NO: 3450502 - DNA, 25 bp, Homo sapien
aagcaaggtgcagactcagacagag

SEQ ID NO: 3450503 - DNA, 25 bp, Homo sapien
actcagacagaggtgaactcttatt

SEQ ID NO: 3450504 - DNA, 25 bp, Homo sapien
agcaaggtgcagactcagacagagg

SEQ ID NO: 3450505 - DNA, 25 bp, Homo sapien
tatggggtaaatagtaatgaagtac

SEQ ID NO: 3450506 - DNA, 25 bp, Homo sapien
ccccatgtgtatggggtaaatagta

SEQ ID NO: 3450507 - DNA, 25 bp, Homo sapien
aatagtaatgaagtacttcctcaat

SEQ ID NO: 3450508 - DNA, 25 bp, Homo sapien
ccaacacccccatgtgtatggggta

SEQ ID NO: 3450509 - DNA, 25 bp, Homo sapien
aagacaatcttgatggatgaactca

SEQ ID NO: 3450510 - DNA, 25 bp, Homo sapien
aactctttcatcagccaacgatggc

SEQ ID NO: 3450511 - DNA, 25 bp, Homo sapien
cagccagagtcaggaataagagaag

SEQ ID NO: 3450512 - DNA, 25 bp, Homo sapien
ttcaaagacaaagcttcgaagacaa

SEQ ID NO: 3450513 - DNA, 25 bp, Homo sapien
cagctagagggaaggggtcacgttg

SEQ ID NO: 3450514 - DNA, 25 bp, Homo sapien
gaaggggtcacgttgtacgtcaagc

SEQ ID NO: 3450515 - DNA, 25 bp, Homo sapien
ggggtcacgttgtacgtcaagcctg

SEQ ID NO: 3450516 - DNA, 25 bp, Homo sapien
tcagcagctagagggaaggggtcac

SEQ ID NO: 3450517 - DNA, 25 bp, Homo sapien
cttgtgtaggcattattcagactca

SEQ ID NO: 3450518 - DNA, 25 bp, Homo sapien
aacaagtgcttgtgtaggcattatt

SEQ ID NO: 3450519 - DNA, 25 bp, Homo sapien
caagtgcttgtgtaggcattattca

SEQ ID NO: 3450520 - DNA, 25 bp, Homo sapien
taggcattattcagactcagtttcc

SEQ ID NO: 3450521 - DNA, 25 bp, Homo sapien
cattcccggtgctctgtttcatgga

SEQ ID NO: 3450522 - DNA, 25 bp, Homo sapien
gagacagcacaatccataacatcat

SEQ ID NO: 3450523 - DNA, 25 bp, Homo sapien
gcttggaagcttgcgtgtaaagcac

SEQ ID NO: 3450524 - DNA, 25 bp, Homo sapien
acatcatgaaggatacaggagaggc

SEQ ID NO: 3450525 - DNA, 25 bp, Homo sapien
taactgcttgttaagagggattttg

SEQ ID NO: 3450526 - DNA, 25 bp, Homo sapien
tttgttcaacctaacatctgcaatt

SEQ ID NO: 3450527 - DNA, 25 bp, Homo sapien
acctaacatctgcaattcggtacat

SEQ ID NO: 3450528 - DNA, 25 bp, Homo sapien
gttcaacctaacatctgcaattcgg

SEQ ID NO: 3450529 - DNA, 25 bp, Homo sapien
ggctcccatggaggaccagtgccca

SEQ ID NO: 3450530 - DNA, 25 bp, Homo sapien
cagtgcccaggagagattcgtgtga

SEQ ID NO: 3450531 - DNA, 25 bp, Homo sapien
gctcccatggaggaccagtgcccag

SEQ ID NO: 3450532 - DNA, 25 bp, Homo sapien
gagagattcgtgtgactgcagagca

SEQ ID NO: 3450533 - DNA, 25 bp, Homo sapien
tcatgcatgaggactgaaggatgtg

SEQ ID NO: 3450534 - DNA, 25 bp, Homo sapien
gtggattctgaaagcccttcctcac

SEQ ID NO: 3450535 - DNA, 25 bp, Homo sapien
tgaaggatgtggattctgaaagccc

SEQ ID NO: 3450536 - DNA, 25 bp, Homo sapien
aggatgtggattctgaaagcccttc

SEQ ID NO: 3450537 - DNA, 25 bp, Homo sapien
ctctagcacggtcctctgttgccct

SEQ ID NO: 3450538 - DNA, 25 bp, Homo sapien
ccctctagcacggtcctctgttgcc

SEQ ID NO: 3450539 - DNA, 25 bp, Homo sapien
ctccccaaatgaccccatgaggccc

SEQ ID NO: 3450540 - DNA, 25 bp, Homo sapien
ccatggtagatgcttctgtctgtga

SEQ ID NO: 3450541 - DNA, 25 bp, Homo sapien
tgaccattagctgacatgctactca

SEQ ID NO: 3450542 - DNA, 25 bp, Homo sapien
ttaaaaagctgtcccacgggcatgc

SEQ ID NO: 3450543 - DNA, 25 bp, Homo sapien
gctactcacaaccaggatgtcagga

SEQ ID NO: 3450544 - DNA, 25 bp, Homo sapien
gggaggttgggaacatcatagcagt

SEQ ID NO: 3450545 - DNA, 25 bp, Homo sapien
gacagctctagaccaaatatgggct

SEQ ID NO: 3450546 - DNA, 25 bp, Homo sapien
tccctgacagctctagaccaaatat

SEQ ID NO: 3450547 - DNA, 25 bp, Homo sapien
cctgacagctctagaccaaatatgg

SEQ ID NO: 3450548 - DNA, 25 bp, Homo sapien
cttccctgacagctctagaccaaat

SEQ ID NO: 3450549 - DNA, 25 bp, Homo sapien
tgtagttgataacccaaggctcctt

SEQ ID NO: 3450550 - DNA, 25 bp, Homo sapien
tattgtagttgataacccaaggctc

SEQ ID NO: 3450551 - DNA, 25 bp, Homo sapien
agttgataacccaaggctccttcca

SEQ ID NO: 3450552 - DNA, 25 bp, Homo sapien
ggtattgtagttgataacccaaggc

SEQ ID NO: 3450553 - DNA, 25 bp, Homo sapien
ttctcatctgagagagaattagctt

SEQ ID NO: 3450554 - DNA, 25 bp, Homo sapien
gctccagatatcatcaagatcaaca

SEQ ID NO: 3450555 - DNA, 25 bp, Homo sapien
cccaatagaaagctcagatccagga

SEQ ID NO: 3450556 - DNA, 25 bp, Homo sapien
gagaattagctttgaatccagaccc

SEQ ID NO: 3450557 - DNA, 25 bp, Homo sapien
tactttttgatacgtttttgcagtg

SEQ ID NO: 3450558 - DNA, 25 bp, Homo sapien
cttctcatggattatcttagttttg

SEQ ID NO: 3450559 - DNA, 25 bp, Homo sapien
actttttgatacgtttttgcagtgg

SEQ ID NO: 3450560 - DNA, 25 bp, Homo sapien
tctgtaggacccctataaaagtcaa

SEQ ID NO: 3450561 - DNA, 25 bp, Homo sapien
tccctgctcggaatttctgtatttc

SEQ ID NO: 3450562 - DNA, 25 bp, Homo sapien
acttcatccctgctcggaatttctg

SEQ ID NO: 3450563 - DNA, 25 bp, Homo sapien
ttccactgttctgtaggacccctat

SEQ ID NO: 3450564 - DNA, 25 bp, Homo sapien
tgtcagcatctccactggaactccc

SEQ ID NO: 3450565 - DNA, 25 bp, Homo sapien
aggagaccccagcatctgtcagcat

SEQ ID NO: 3450566 - DNA, 25 bp, Homo sapien
ttaggagaccccagcatctgtcagc

SEQ ID NO: 3450567 - DNA, 25 bp, Homo sapien
tcagcatctccactggaactcccac

SEQ ID NO: 3450568 - DNA, 25 bp, Homo sapien
tttgcatcagccaggtgggaagata

SEQ ID NO: 3450569 - DNA, 25 bp, Homo sapien
ctcagagagtctccatggaaggctt

SEQ ID NO: 3450570 - DNA, 25 bp, Homo sapien
tggaaggcttgagccttggtacttt

SEQ ID NO: 3450571 - DNA, 25 bp, Homo sapien
gagccttggtactttgcatcagcca

SEQ ID NO: 3450572 - DNA, 25 bp, Homo sapien
tcaacaaggtaatgggccagagggc

SEQ ID NO: 3450573 - DNA, 25 bp, Homo sapien
ggatacgatgtcaccaggaaccctc

SEQ ID NO: 3450574 - DNA, 25 bp, Homo sapien
ctgtgcccctgaagaagcgcggata

SEQ ID NO: 3450575 - DNA, 25 bp, Homo sapien
gcaccggatctgcttccagggcttg

SEQ ID NO: 3450576 - DNA, 25 bp, Homo sapien
ctgctccgcagcgggaccgcgtaga

SEQ ID NO: 3450577 - DNA, 25 bp, Homo sapien
accgaggcaagccaccacgcgggat

SEQ ID NO: 3450578 - DNA, 25 bp, Homo sapien
aggcaagccaccacgcgggattagg

SEQ ID NO: 3450579 - DNA, 25 bp, Homo sapien
agcgggaccgcgtagacctcagctc

SEQ ID NO: 3450580 - DNA, 25 bp, Homo sapien
tgagaacaaaggttgtgggaccgct

SEQ ID NO: 3450581 - DNA, 25 bp, Homo sapien
tgggaccgctctttgaggaactcac

SEQ ID NO: 3450582 - DNA, 25 bp, Homo sapien
gggaaaaccacgtgcacgcagtgct

SEQ ID NO: 3450583 - DNA, 25 bp, Homo sapien
ggagaggactcacagaccgcagctc

SEQ ID NO: 3450584 - DNA, 25 bp, Homo sapien
aatcctgaaggcacgcccttccccg

SEQ ID NO: 3450585 - DNA, 25 bp, Homo sapien
gagagtgcgaggatatgctgacccc

SEQ ID NO: 3450586 - DNA, 25 bp, Homo sapien
aaggcacgcccttccccgaatgttg

SEQ ID NO: 3450587 - DNA, 25 bp, Homo sapien
ccttccccgaatgttgggagagtgc

SEQ ID NO: 3450588 - DNA, 25 bp, Homo sapien
cacgtggcgaatggctattatattg

SEQ ID NO: 3450589 - DNA, 25 bp, Homo sapien
tatatagccacacgtggcgaatggc

SEQ ID NO: 3450590 - DNA, 25 bp, Homo sapien
tacgtttatatagccacacgtggcg

SEQ ID NO: 3450591 - DNA, 25 bp, Homo sapien
taatttatttacgtttatatagcca

SEQ ID NO: 3450592 - DNA, 25 bp, Homo sapien
taagagctggccaggctaggaacat

SEQ ID NO: 3450593 - DNA, 25 bp, Homo sapien
cctggtcactgaggataacacttcc

SEQ ID NO: 3450594 - DNA, 25 bp, Homo sapien
taaattgtgactaaagcagccatga

SEQ ID NO: 3450595 - DNA, 25 bp, Homo sapien
cgtggaccacctctcttaggaatgt

SEQ ID NO: 3450596 - DNA, 25 bp, Homo sapien
cactgccggcttgctgagccacgct

SEQ ID NO: 3450597 - DNA, 25 bp, Homo sapien
gggagcaaagtttctattcttggca

SEQ ID NO: 3450598 - DNA, 25 bp, Homo sapien
gcaaagtttctattcttggcagcat

SEQ ID NO: 3450599 - DNA, 25 bp, Homo sapien
ctgccggcttgctgagccacgctgc

SEQ ID NO: 3450600 - DNA, 25 bp, Homo sapien
tgctattgtatccttccctttagat

SEQ ID NO: 3450601 - DNA, 25 bp, Homo sapien
tccttccctttagatggccaggtct

SEQ ID NO: 3450602 - DNA, 25 bp, Homo sapien
acactgatcccagcacaagggcaaa

SEQ ID NO: 3450603 - DNA, 25 bp, Homo sapien
ctccacactgatcccagcacaaggg

SEQ ID NO: 3450604 - DNA, 25 bp, Homo sapien
tagtagctagtagaacaatattcac

SEQ ID NO: 3450605 - DNA, 25 bp, Homo sapien
catttgttggtaggtctctgtttaa

SEQ ID NO: 3450606 - DNA, 25 bp, Homo sapien
ggacttaatctaagaatcctacact

SEQ ID NO: 3450607 - DNA, 25 bp, Homo sapien
tgattaaaaacgtataccacctgtg

SEQ ID NO: 3450608 - DNA, 25 bp, Homo sapien
gagcttaattcctctccgcttgaga

SEQ ID NO: 3450609 - DNA, 25 bp, Homo sapien
atgtggcagacaccaacttagccaa

SEQ ID NO: 3450610 - DNA, 25 bp, Homo sapien
tatgaagccatttccctctcaaggg

SEQ ID NO: 3450611 - DNA, 25 bp, Homo sapien
gtgactcacatccaaagactaggtt

SEQ ID NO: 3450612 - DNA, 25 bp, Homo sapien
ccaagcctgtcaagtctatatgttc

SEQ ID NO: 3450613 - DNA, 25 bp, Homo sapien
tatgttccagccataagcagtgact

SEQ ID NO: 3450614 - DNA, 25 bp, Homo sapien
cctgtcaagtctatatgttccagcc

SEQ ID NO: 3450615 - DNA, 25 bp, Homo sapien
cagccataagcagtgacttgcagtg

SEQ ID NO: 3450616 - DNA, 25 bp, Homo sapien
aacttcatcttgtacaatgcaacat

SEQ ID NO: 3450617 - DNA, 25 bp, Homo sapien
cttcatcttgtacaatgcaacatac

SEQ ID NO: 3450618 - DNA, 25 bp, Homo sapien
taacttcatcttgtacaatgcaaca

SEQ ID NO: 3450619 - DNA, 25 bp, Homo sapien
ctaacttcatcttgtacaatgcaac

SEQ ID NO: 3450620 - DNA, 25 bp, Homo sapien
gctttggatgttggagctctccaga

SEQ ID NO: 3450621 - DNA, 25 bp, Homo sapien
ggaattgcaacgatgtcaccctgag

SEQ ID NO: 3450622 - DNA, 25 bp, Homo sapien
tctccagagtagagagctctagatg

SEQ ID NO: 3450623 - DNA, 25 bp, Homo sapien
caacatcttcgtgcttagtgaccgt

SEQ ID NO: 3450624 - DNA, 25 bp, Homo sapien
gggttaaattgtgcccatctgaagc

SEQ ID NO: 3450625 - DNA, 25 bp, Homo sapien
gctgtttgggttaaattgtgcccat

SEQ ID NO: 3450626 - DNA, 25 bp, Homo sapien
gtttgggttaaattgtgcccatctg

SEQ ID NO: 3450627 - DNA, 25 bp, Homo sapien
agctgtttgggttaaattgtgccca

SEQ ID NO: 3450628 - DNA, 25 bp, Homo sapien
gattcccatagggcctcaacagtct

SEQ ID NO: 3450629 - DNA, 25 bp, Homo sapien
cacatttgaaagtgtgatgtttcct

SEQ ID NO: 3450630 - DNA, 25 bp, Homo sapien
gggcctcaacagtctccatatctgt

SEQ ID NO: 3450631 - DNA, 25 bp, Homo sapien
ttccctcctgattcccatagggcct

SEQ ID NO: 3450632 - DNA, 25 bp, Homo sapien
catgagatcttacggttttgtgagg

SEQ ID NO: 3450633 - DNA, 25 bp, Homo sapien
ctcatagtggcatgttaaaatttcc

SEQ ID NO: 3450634 - DNA, 25 bp, Homo sapien
gaaaatctgttattaggtggaatcc

SEQ ID NO: 3450635 - DNA, 25 bp, Homo sapien
tcatggcggcagttccccatggtgt

SEQ ID NO: 3450636 - DNA, 25 bp, Homo sapien
gaaaagagtgtgtactctggaatta

SEQ ID NO: 3450637 - DNA, 25 bp, Homo sapien
ttcctgtcctattgaaaagagtgtg

SEQ ID NO: 3450638 - DNA, 25 bp, Homo sapien
gtcctattgaaaagagtgtgtactc

SEQ ID NO: 3450639 - DNA, 25 bp, Homo sapien
tggtgaatttcctgtcctattgaaa

SEQ ID NO: 3450640 - DNA, 25 bp, Homo sapien
ggctcaataagcactttgttccatg

SEQ ID NO: 3450641 - DNA, 25 bp, Homo sapien
gagttgctcaagattggcgacgcct

SEQ ID NO: 3450642 - DNA, 25 bp, Homo sapien
gaagattagcttctcgtacaccctc

SEQ ID NO: 3450643 - DNA, 25 bp, Homo sapien
ggttgtaagagacaattctacctcc

SEQ ID NO: 3450644 - DNA, 25 bp, Homo sapien
caaagcctggtatcattaatggtgt

SEQ ID NO: 3450645 - DNA, 25 bp, Homo sapien
aaatcaaacacattgcaaagcctgg

SEQ ID NO: 3450646 - DNA, 25 bp, Homo sapien
ttgaacttcacagtaaccctatgag

SEQ ID NO: 3450647 - DNA, 25 bp, Homo sapien
gctccagatagcataacttcaggtc

SEQ ID NO: 3450648 - DNA, 25 bp, Homo sapien
aactctccatatgttgtggccccaa

SEQ ID NO: 3450649 - DNA, 25 bp, Homo sapien
gacagacctaggaaaaggatgcaca

SEQ ID NO: 3450650 - DNA, 25 bp, Homo sapien
tgtgacagaaatagattcaatgcgt

SEQ ID NO: 3450651 - DNA, 25 bp, Homo sapien
tgcgtacattcaatttattcatgcc

SEQ ID NO: 3450652 - DNA, 25 bp, Homo sapien
gggtagattcgcagagccttttgcc

SEQ ID NO: 3450653 - DNA, 25 bp, Homo sapien
gtatggctactttgattgagaactc

SEQ ID NO: 3450654 - DNA, 25 bp, Homo sapien
catgttcaaagttcaggcccagggt

SEQ ID NO: 3450655 - DNA, 25 bp, Homo sapien
gagccttttgccaactggtgccatg

SEQ ID NO: 3450656 - DNA, 25 bp, Homo sapien
gagagatgactcagtgtggctgcct

SEQ ID NO: 3450657 - DNA, 25 bp, Homo sapien
ttatggaagttagtatgacacagcc

SEQ ID NO: 3450658 - DNA, 25 bp, Homo sapien
cagctaataagacaagtggatctca

SEQ ID NO: 3450659 - DNA, 25 bp, Homo sapien
ccctctgagcagacgaaaagctaca

SEQ ID NO: 3450660 - DNA, 25 bp, Homo sapien
gcaatattccacaaactttcatatg

SEQ ID NO: 3450661 - DNA, 25 bp, Homo sapien
tttggcaatattccacaaactttca

SEQ ID NO: 3450662 - DNA, 25 bp, Homo sapien
ttgctttggcaatattccacaaact

SEQ ID NO: 3450663 - DNA, 25 bp, Homo sapien
gctttggcaatattccacaaacttt

SEQ ID NO: 3450664 - DNA, 25 bp, Homo sapien
ccccgatcctccactcatggctgta

SEQ ID NO: 3450665 - DNA, 25 bp, Homo sapien
ccagaccccgatcctccactcatgg

SEQ ID NO: 3450666 - DNA, 25 bp, Homo sapien
agaccccgatcctccactcatggct

SEQ ID NO: 3450667 - DNA, 25 bp, Homo sapien
gacccagaccccgatcctccactca

SEQ ID NO: 3450668 - DNA, 25 bp, Homo sapien
ccactgctcaggctcttagtgctta

SEQ ID NO: 3450669 - DNA, 25 bp, Homo sapien
ggcctctggcttcattggagcactg

SEQ ID NO: 3450670 - DNA, 25 bp, Homo sapien
gcttcattggagcactggcccactg

SEQ ID NO: 3450671 - DNA, 25 bp, Homo sapien
cactgctcaggctcttagtgcttac

SEQ ID NO: 3450672 - DNA, 25 bp, Homo sapien
ccatgtctacttctttccacacaga

SEQ ID NO: 3450673 - DNA, 25 bp, Homo sapien
catgtctacttctttccacacagac

SEQ ID NO: 3450674 - DNA, 25 bp, Homo sapien
agtggtgatgactctgccttcaagc

SEQ ID NO: 3450675 - DNA, 25 bp, Homo sapien
ggtgatgactctgccttcaagcatc

SEQ ID NO: 3450676 - DNA, 25 bp, Homo sapien
gagataggccataggaggaaaggtg

SEQ ID NO: 3450677 - DNA, 25 bp, Homo sapien
ggagataggccataggaggaaaggt

SEQ ID NO: 3450678 - DNA, 25 bp, Homo sapien
tggagataggccataggaggaaagg

SEQ ID NO: 3450679 - DNA, 25 bp, Homo sapien
ctggagataggccataggaggaaag

SEQ ID NO: 3450680 - DNA, 25 bp, Homo sapien
tgttgcacccatgaaggcaagagac

SEQ ID NO: 3450681 - DNA, 25 bp, Homo sapien
acctgagaaggtggttgttgcaccc

SEQ ID NO: 3450682 - DNA, 25 bp, Homo sapien
tccttggtatcccttgagctgcagt

SEQ ID NO: 3450683 - DNA, 25 bp, Homo sapien
ctgcagtctggtgacctgagaaggt

SEQ ID NO: 3450684 - DNA, 25 bp, Homo sapien
ggagggatggaaacattgagaacac

SEQ ID NO: 3450685 - DNA, 25 bp, Homo sapien
ctgaggagggatggaaacattgaga

SEQ ID NO: 3450686 - DNA, 25 bp, Homo sapien
gaaacattgagaacacgctctccat

SEQ ID NO: 3450687 - DNA, 25 bp, Homo sapien
gatggaaacattgagaacacgctct

SEQ ID NO: 3450688 - DNA, 25 bp, Homo sapien
tttggatttgttgaggggaatccca

SEQ ID NO: 3450689 - DNA, 25 bp, Homo sapien
ggaatcccaattatactcattagac

SEQ ID NO: 3450690 - DNA, 25 bp, Homo sapien
gttccattcacattccctaaagacc

SEQ ID NO: 3450691 - DNA, 25 bp, Homo sapien
gtagttccattcacattccctaaag

SEQ ID NO: 3450692 - DNA, 25 bp, Homo sapien
tctcctgcccatggctttaactgtg

SEQ ID NO: 3450693 - DNA, 25 bp, Homo sapien
ttctcctgcccatggctttaactgt

SEQ ID NO: 3450694 - DNA, 25 bp, Homo sapien
tctgctgatgctatgtaatactgag

SEQ ID NO: 3450695 - DNA, 25 bp, Homo sapien
cgggctgtcagagtggaccagtact

SEQ ID NO: 3450696 - DNA, 25 bp, Homo sapien
aatactgagtgtggatcctctgctc

SEQ ID NO: 3450697 - DNA, 25 bp, Homo sapien
tgctctgtggcaacgggctgtcaga

SEQ ID NO: 3450698 - DNA, 25 bp, Homo sapien
tatgccactgggaaggaaactgttc

SEQ ID NO: 3450699 - DNA, 25 bp, Homo sapien
ccaagatctcgttttcacattcctg

SEQ ID NO: 3450700 - DNA, 25 bp, Homo sapien
catctccacagcagtaagcgcttgg

SEQ ID NO: 3450701 - DNA, 25 bp, Homo sapien
ttgttttcgtcctgtggccacccga

SEQ ID NO: 3450702 - DNA, 25 bp, Homo sapien
agttgtggcgacatgtgtgacggca

SEQ ID NO: 3450703 - DNA, 25 bp, Homo sapien
ggcagttgtggcgacatgtgtgacg

SEQ ID NO: 3450704 - DNA, 25 bp, Homo sapien
caggcagttgtggcgacatgtgtga

SEQ ID NO: 3450705 - DNA, 25 bp, Homo sapien
gtggcgacatgtgtgacggcagcag

SEQ ID NO: 3450706 - DNA, 25 bp, Homo sapien
gctgagcagccatgagtttcgtttg

SEQ ID NO: 3450707 - DNA, 25 bp, Homo sapien
catgcttgcactgttggagagacac

SEQ ID NO: 3450708 - DNA, 25 bp, Homo sapien
ggtacatctgaacaacagctgtagc

SEQ ID NO: 3450709 - DNA, 25 bp, Homo sapien
ggcccacagacagaaattgccctgg

SEQ ID NO: 3450710 - DNA, 25 bp, Homo sapien
agttgtccagcttcggtttgcaggc

SEQ ID NO: 3450711 - DNA, 25 bp, Homo sapien
acaggccatcctttcttctcatacg

SEQ ID NO: 3450712 - DNA, 25 bp, Homo sapien
tgagtccttccagatttatatcaag

SEQ ID NO: 3450713 - DNA, 25 bp, Homo sapien
tctcatacgtctccctagcttcctg

SEQ ID NO: 3450714 - DNA, 25 bp, Homo sapien
ctcttttgaataccccagtcatctg

SEQ ID NO: 3450715 - DNA, 25 bp, Homo sapien
tttccttcaagtgggacttggtgtg

SEQ ID NO: 3450716 - DNA, 25 bp, Homo sapien
tccttcaagtgggacttggtgtgga

SEQ ID NO: 3450717 - DNA, 25 bp, Homo sapien
tctcctacgatctaaacctcttttg

SEQ ID NO: 3450718 - DNA, 25 bp, Homo sapien
tctgtaaagcgatctcgtgaggtcc

SEQ ID NO: 3450719 - DNA, 25 bp, Homo sapien
ggtctgtaaagcgatctcgtgaggt

SEQ ID NO: 3450720 - DNA, 25 bp, Homo sapien
gatctcgtgaggtcccttgttgtgt

SEQ ID NO: 3450721 - DNA, 25 bp, Homo sapien
taaagcgatctcgtgaggtcccttg

SEQ ID NO: 3450722 - DNA, 25 bp, Homo sapien
actgaaatcttccttgccaatccct

SEQ ID NO: 3450723 - DNA, 25 bp, Homo sapien
tgcagaagaaatgtgcctccggacc

SEQ ID NO: 3450724 - DNA, 25 bp, Homo sapien
gaaatcttccttgccaatccctgca

SEQ ID NO: 3450725 - DNA, 25 bp, Homo sapien
cagaagaaatgtgcctccggaccaa

SEQ ID NO: 3450726 - DNA, 25 bp, Homo sapien
gcaatggctggaattcaatagtcat

SEQ ID NO: 3450727 - DNA, 25 bp, Homo sapien
tgcaatggctggaattcaatagtca

SEQ ID NO: 3450728 - DNA, 25 bp, Homo sapien
ttgcaatggctggaattcaatagtc

SEQ ID NO: 3450729 - DNA, 25 bp, Homo sapien
aagttgctgaaaaactcaacatcta

SEQ ID NO: 3450730 - DNA, 25 bp, Homo sapien
ccgagagcagtcattgaagctgaac

SEQ ID NO: 3450731 - DNA, 25 bp, Homo sapien
agcatagtgactggccgtcggaagt

SEQ ID NO: 3450732 - DNA, 25 bp, Homo sapien
tacccactcataggtgcctcatgag

SEQ ID NO: 3450733 - DNA, 25 bp, Homo sapien
gccccttgatcctgtgggatctgta

SEQ ID NO: 3450734 - DNA, 25 bp, Homo sapien
tgatcctgtgggatctgtaagtagt

SEQ ID NO: 3450735 - DNA, 25 bp, Homo sapien
tctgtaagtagttgctcacattgtt

SEQ ID NO: 3450736 - DNA, 25 bp, Homo sapien
gaaaaagccccttgatcctgtggga

SEQ ID NO: 3450737 - DNA, 25 bp, Homo sapien
tgagattccagtactgacaccagca

SEQ ID NO: 3450738 - DNA, 25 bp, Homo sapien
caatgaaggtcacactgggatgaga

SEQ ID NO: 3450739 - DNA, 25 bp, Homo sapien
tccactgcagctctgcgcctgtgct

SEQ ID NO: 3450740 - DNA, 25 bp, Homo sapien
caggtagggacttccttcaaggagg

SEQ ID NO: 3450741 - DNA, 25 bp, Homo sapien
taatcatccatgtgttcttttcact

SEQ ID NO: 3450742 - DNA, 25 bp, Homo sapien
cagaatgccacaagggctggttctc

SEQ ID NO: 3450743 - DNA, 25 bp, Homo sapien
tgggacttaccagatgaaggcaaat

SEQ ID NO: 3450744 - DNA, 25 bp, Homo sapien
cttttcacttcaaagccctgcagaa

SEQ ID NO: 3450745 - DNA, 25 bp, Homo sapien
atggatgccatcaggtgtgccacgg

SEQ ID NO: 3450746 - DNA, 25 bp, Homo sapien
tgaatggatgccatcaggtgtgcca

SEQ ID NO: 3450747 - DNA, 25 bp, Homo sapien
tctgagcagtaggaccatgaatgga

SEQ ID NO: 3450748 - DNA, 25 bp, Homo sapien
ccctctgagcagtaggaccatgaat

SEQ ID NO: 3450749 - DNA, 25 bp, Homo sapien
tatagattcaaatgagagccatggt

SEQ ID NO: 3450750 - DNA, 25 bp, Homo sapien
caatctcctctatggtaccatcagt

SEQ ID NO: 3450751 - DNA, 25 bp, Homo sapien
aatgtatcccaggactcccgttgac

SEQ ID NO: 3450752 - DNA, 25 bp, Homo sapien
tcagtctggtctacaggcaagagag

SEQ ID NO: 3450753 - DNA, 25 bp, Homo sapien
gagcgcgcggctcccatgcctgccc

SEQ ID NO: 3450754 - DNA, 25 bp, Homo sapien
cgcacagccgagtgcgagcaagctg

SEQ ID NO: 3450755 - DNA, 25 bp, Homo sapien
tgcgagcaagctggcgagcagcgca

SEQ ID NO: 3450756 - DNA, 25 bp, Homo sapien
cagacaggtgtgggcgccgggagag

SEQ ID NO: 3450757 - DNA, 25 bp, Homo sapien
cttgatggaatccggtatatgcaaa

SEQ ID NO: 3450758 - DNA, 25 bp, Homo sapien
aacttgatggaatccggtatatgca

SEQ ID NO: 3450759 - DNA, 25 bp, Homo sapien
cagaacttgatggaatccggtatat

SEQ ID NO: 3450760 - DNA, 25 bp, Homo sapien
gaacttgatggaatccggtatatgc

SEQ ID NO: 3450761 - DNA, 25 bp, Homo sapien
gggcaagacgacagggaggcggtat

SEQ ID NO: 3450762 - DNA, 25 bp, Homo sapien
taagggctcacttgcccaacagcac

SEQ ID NO: 3450763 - DNA, 25 bp, Homo sapien
tgtaagggctcacttgcccaacagc

SEQ ID NO: 3450764 - DNA, 25 bp, Homo sapien
tgcaggccaagtgggtttccagggg

SEQ ID NO: 3450765 - DNA, 25 bp, Homo sapien
taaccagagaagtgaattctgcccc

SEQ ID NO: 3450766 - DNA, 25 bp, Homo sapien
tccatcgtgtatgcagtgggcagct

SEQ ID NO: 3450767 - DNA, 25 bp, Homo sapien
gaggatgtagatgcccacctgcgtc

SEQ ID NO: 3450768 - DNA, 25 bp, Homo sapien
tgagaggagtgattctgacagccac

SEQ ID NO: 3450769 - DNA, 25 bp, Homo sapien
acgtgtgcacgccaatgacaaaaaa

SEQ ID NO: 3450770 - DNA, 25 bp, Homo sapien
gcaaaagtatgccttcaaactgctt

SEQ ID NO: 3450771 - DNA, 25 bp, Homo sapien
aatagtaaagccagtcatcttgcaa

SEQ ID NO: 3450772 - DNA, 25 bp, Homo sapien
tgacaaaaaacaatttggcctctcc

SEQ ID NO: 3450773 - DNA, 25 bp, Homo sapien
tgcaaaaacgtgaagattaacttaa

SEQ ID NO: 3450774 - DNA, 25 bp, Homo sapien
tctttgaaacaagttcagatgaaat

SEQ ID NO: 3450775 - DNA, 25 bp, Homo sapien
caaagtttgcaaaaacgtgaagatt

SEQ ID NO: 3450776 - DNA, 25 bp, Homo sapien
taaatctttgaaacaagttcagatg

SEQ ID NO: 3450777 - DNA, 25 bp, Homo sapien
gaaagaagtgcttaggccgagagcc

SEQ ID NO: 3450778 - DNA, 25 bp, Homo sapien
gggttgggataaacactcttggcca

SEQ ID NO: 3450779 - DNA, 25 bp, Homo sapien
tgggagggccatatgcaaagacttc

SEQ ID NO: 3450780 - DNA, 25 bp, Homo sapien
ctagagcattccagcaaaagcggcc

SEQ ID NO: 3450781 - DNA, 25 bp, Homo sapien
taatgtgcagacaggcatgtgaacc

SEQ ID NO: 3450782 - DNA, 25 bp, Homo sapien
tgggaaatgtggttctactagcctt

SEQ ID NO: 3450783 - DNA, 25 bp, Homo sapien
tactagccttactaggcaaatatgc

SEQ ID NO: 3450784 - DNA, 25 bp, Homo sapien
tttacaacaggtcttcccagagctt

SEQ ID NO: 3450785 - DNA, 25 bp, Homo sapien
agtgaagagtcaccctgcactttct

SEQ ID NO: 3450786 - DNA, 25 bp, Homo sapien
tacacacatagacaaataccacagt

SEQ ID NO: 3450787 - DNA, 25 bp, Homo sapien
ccctggaggattcagttaatcaatc

SEQ ID NO: 3450788 - DNA, 25 bp, Homo sapien
tgcaccaccccattgatgcctgggt

SEQ ID NO: 3450789 - DNA, 25 bp, Homo sapien
ggtctcattctactcattagggagc

SEQ ID NO: 3450790 - DNA, 25 bp, Homo sapien
aattgaattcgaaactgttgagccc

SEQ ID NO: 3450791 - DNA, 25 bp, Homo sapien
cagggttggcacacaggtctcattc

SEQ ID NO: 3450792 - DNA, 25 bp, Homo sapien
ggtcctggaacctagttggtattca

SEQ ID NO: 3450793 - DNA, 25 bp, Homo sapien
caatgatgtacacggtgatcacccc

SEQ ID NO: 3450794 - DNA, 25 bp, Homo sapien
ccagaaagggtgcagtggcctcaat

SEQ ID NO: 3450795 - DNA, 25 bp, Homo sapien
tggcctcaatgatgtacacggtgat

SEQ ID NO: 3450796 - DNA, 25 bp, Homo sapien
cccagaaagggtgcagtggcctcaa

SEQ ID NO: 3450797 - DNA, 25 bp, Homo sapien
ttttggaggcatggaagaaagacat

SEQ ID NO: 3450798 - DNA, 25 bp, Homo sapien
ctgtttttggaggcatggaagaaag

SEQ ID NO: 3450799 - DNA, 25 bp, Homo sapien
gtttttggaggcatggaagaaagac

SEQ ID NO: 3450800 - DNA, 25 bp, Homo sapien
tttttggaggcatggaagaaagaca

SEQ ID NO: 3450801 - DNA, 25 bp, Homo sapien
agaatctgctcattatcctggccgt

SEQ ID NO: 3450802 - DNA, 25 bp, Homo sapien
tggagaatctgctcattatcctggc

SEQ ID NO: 3450803 - DNA, 25 bp, Homo sapien
tgctggagaatctgctcattatcct

SEQ ID NO: 3450804 - DNA, 25 bp, Homo sapien
gagaatctgctcattatcctggccg

SEQ ID NO: 3450805 - DNA, 25 bp, Homo sapien
tcaggcccctcagttgcaggtctct

SEQ ID NO: 3450806 - DNA, 25 bp, Homo sapien
tactggaggtcgattccagaacctg

SEQ ID NO: 3450807 - DNA, 25 bp, Homo sapien
tttactggaggtcgattccagaacc

SEQ ID NO: 3450808 - DNA, 25 bp, Homo sapien
agtttactggaggtcgattccagaa

SEQ ID NO: 3450809 - DNA, 25 bp, Homo sapien
tcatctcccaggaatggagtggtgg

SEQ ID NO: 3450810 - DNA, 25 bp, Homo sapien
catctcccaggaatggagtggtggc

SEQ ID NO: 3450811 - DNA, 25 bp, Homo sapien
atcatctcccaggaatggagtggtg

SEQ ID NO: 3450812 - DNA, 25 bp, Homo sapien
gtattttagatatccctatatttgg

SEQ ID NO: 3450813 - DNA, 25 bp, Homo sapien
tcttcccatttcagggatccttttg

SEQ ID NO: 3450814 - DNA, 25 bp, Homo sapien
ccatcgtcagatgggaagtataaag

SEQ ID NO: 3450815 - DNA, 25 bp, Homo sapien
ggattgtgttacacaactcaccttc

SEQ ID NO: 3450816 - DNA, 25 bp, Homo sapien
atgaccgatttgtggccatctgccc

SEQ ID NO: 3450817 - DNA, 25 bp, Homo sapien
tgaccgatttgtggccatctgccca

SEQ ID NO: 3450818 - DNA, 25 bp, Homo sapien
tgtacacccgctgtcacatgaggag

SEQ ID NO: 3450819 - DNA, 25 bp, Homo sapien
agagtgtacacccacagcgacatta

SEQ ID NO: 3450820 - DNA, 25 bp, Homo sapien
caataatatcccagggtgaacaccc

SEQ ID NO: 3450821 - DNA, 25 bp, Homo sapien
cactgcctgtgacattacggtaaca

SEQ ID NO: 3450822 - DNA, 25 bp, Homo sapien
tggcagcactgtccacggagtcctc

SEQ ID NO: 3450823 - DNA, 25 bp, Homo sapien
actgtccacggagtcctcagtggga

SEQ ID NO: 3450824 - DNA, 25 bp, Homo sapien
tgtccacggagtcctcagtgggacc

SEQ ID NO: 3450825 - DNA, 25 bp, Homo sapien
cagcactgtccacggagtcctcagt

SEQ ID NO: 3450826 - DNA, 25 bp, Homo sapien
gatgtttccaaggagcatgagaaca

SEQ ID NO: 3450827 - DNA, 25 bp, Homo sapien
ttggcagcagtaatgttgggtttac

SEQ ID NO: 3450828 - DNA, 25 bp, Homo sapien
tggtcgtattggcagcagtaatgtt

SEQ ID NO: 3450829 - DNA, 25 bp, Homo sapien
ggtggtggtcgtattggcagcagta

SEQ ID NO: 3450830 - DNA, 25 bp, Homo sapien
tggcagcagtaatgttgggtttact

SEQ ID NO: 3450831 - DNA, 25 bp, Homo sapien
tcccttaccttccagtgtatataaa

SEQ ID NO: 3450832 - DNA, 25 bp, Homo sapien
gttatcaagactgtatggcactggc

SEQ ID NO: 3450833 - DNA, 25 bp, Homo sapien
tggaatagaactgaggcagtttcat

SEQ ID NO: 3450834 - DNA, 25 bp, Homo sapien
ggcagtttcatatacagtaaattga

SEQ ID NO: 3450835 - DNA, 25 bp, Homo sapien
tctcaatcctttccccgcctttctc

SEQ ID NO: 3450836 - DNA, 25 bp, Homo sapien
gtaaatgtctcacaggctcagtctg

SEQ ID NO: 3450837 - DNA, 25 bp, Homo sapien
gctcagtctgattacagaaaacagg

SEQ ID NO: 3450838 - DNA, 25 bp, Homo sapien
gagagccggctgtaaatgtctcaca

SEQ ID NO: 3450839 - DNA, 25 bp, Homo sapien
tccagtggtggagagccggctgtaa

SEQ ID NO: 3450840 - DNA, 25 bp, Homo sapien
agtgagtacacttcacagaaagatg

SEQ ID NO: 3450841 - DNA, 25 bp, Homo sapien
tgatactgtaccttaaggctcaaca

SEQ ID NO: 3450842 - DNA, 25 bp, Homo sapien
cctccaaactggtaggaatgagcag

SEQ ID NO: 3450843 - DNA, 25 bp, Homo sapien
tcaaagttgtacagctactgccata

SEQ ID NO: 3450844 - DNA, 25 bp, Homo sapien
tcgtgacaaagacgaatgactgggt

SEQ ID NO: 3450845 - DNA, 25 bp, Homo sapien
aaaagggtttctatcatgcaggatc

SEQ ID NO: 3450846 - DNA, 25 bp, Homo sapien
tcctggctgatgctgaaagagagct

SEQ ID NO: 3450847 - DNA, 25 bp, Homo sapien
caaaactatttggtggatcgtgaca

SEQ ID NO: 3450848 - DNA, 25 bp, Homo sapien
tacgtttgaatggtgccttatcact

SEQ ID NO: 3450849 - DNA, 25 bp, Homo sapien
caatgatgtgccgtaggaagagcac

SEQ ID NO: 3450850 - DNA, 25 bp, Homo sapien
gtaggaagagcaccatacgtttgaa

SEQ ID NO: 3450851 - DNA, 25 bp, Homo sapien
caccatacgtttgaatggtgcctta

SEQ ID NO: 3450852 - DNA, 25 bp, Homo sapien
tatttagaatgccaaaagcgggcac

SEQ ID NO: 3450853 - DNA, 25 bp, Homo sapien
tatacaccatgattagagaggaagt

SEQ ID NO: 3450854 - DNA, 25 bp, Homo sapien
taaaacatattctacctacgtgcaa

SEQ ID NO: 3450855 - DNA, 25 bp, Homo sapien
tgtcatagaaccaacgatactgctt

SEQ ID NO: 3450856 - DNA, 25 bp, Homo sapien
tgtaagacagacgtcaagcagccca

SEQ ID NO: 3450857 - DNA, 25 bp, Homo sapien
cccagtgagtactaagcagggcagc

SEQ ID NO: 3450858 - DNA, 25 bp, Homo sapien
gaagcattcagggtaactatagcag

SEQ ID NO: 3450859 - DNA, 25 bp, Homo sapien
cagctgtaaattgggatcaagggca

SEQ ID NO: 3450860 - DNA, 25 bp, Homo sapien
tctctgacttttcttagctaccctg

SEQ ID NO: 3450861 - DNA, 25 bp, Homo sapien
gtgtttcaccacattcgtcaggccg

SEQ ID NO: 3450862 - DNA, 25 bp, Homo sapien
cataggaaaataccactcaagatca

SEQ ID NO: 3450863 - DNA, 25 bp, Homo sapien
aggcataagctaccgggtctggcca

SEQ ID NO: 3450864 - DNA, 25 bp, Homo sapien
cccaactgctgtgccatgtgctctg

SEQ ID NO: 3450865 - DNA, 25 bp, Homo sapien
actgatgcgattgatggttcccaac

SEQ ID NO: 3450866 - DNA, 25 bp, Homo sapien
ctgatgcgattgatggttcccaact

SEQ ID NO: 3450867 - DNA, 25 bp, Homo sapien
atatctatgtcactatgggacacag

SEQ ID NO: 3450868 - DNA, 25 bp, Homo sapien
tcaatcatctgccctaatgtggtcc

SEQ ID NO: 3450869 - DNA, 25 bp, Homo sapien
gaaatatctatgtcactatgggaca

SEQ ID NO: 3450870 - DNA, 25 bp, Homo sapien
ttgaaatatctatgtcactatggga

SEQ ID NO: 3450871 - DNA, 25 bp, Homo sapien
tttctgaatctagggggagaccagg

SEQ ID NO: 3450872 - DNA, 25 bp, Homo sapien
gagaccaggttagagccatgctaag

SEQ ID NO: 3450873 - DNA, 25 bp, Homo sapien
agaagcacaggccttcacgctggcg

SEQ ID NO: 3450874 - DNA, 25 bp, Homo sapien
tggcgtctgcagtctacttgtagtt

SEQ ID NO: 3450875 - DNA, 25 bp, Homo sapien
tcatatgatcatagaatactggaac

SEQ ID NO: 3450876 - DNA, 25 bp, Homo sapien
tggtggcctatagtctagttctgct

SEQ ID NO: 3450877 - DNA, 25 bp, Homo sapien
gtgttaatgtgtgcttgtagttcca

SEQ ID NO: 3450878 - DNA, 25 bp, Homo sapien
tacatattcaatgacctttcagcca

SEQ ID NO: 3450879 - DNA, 25 bp, Homo sapien
aggaactgacagtctgcttcctttt

SEQ ID NO: 3450880 - DNA, 25 bp, Homo sapien
taagatagccggacaaatgcctagc

SEQ ID NO: 3450881 - DNA, 25 bp, Homo sapien
caggagtagtttggtcagcgtgccc

SEQ ID NO: 3450882 - DNA, 25 bp, Homo sapien
gagtccgacctcacatcgagagaag

SEQ ID NO: 3450883 - DNA, 25 bp, Homo sapien
tcttcaaggaggtcagagaatccac

SEQ ID NO: 3450884 - DNA, 25 bp, Homo sapien
tctgctgggtcagtaggagctaaca

SEQ ID NO: 3450885 - DNA, 25 bp, Homo sapien
catttgtaaggaaccagcttgggaa

SEQ ID NO: 3450886 - DNA, 25 bp, Homo sapien
ctagggctaaggcagagagtctaca

SEQ ID NO: 3450887 - DNA, 25 bp, Homo sapien
gagaggttcgtaatccagcagctgc

SEQ ID NO: 3450888 - DNA, 25 bp, Homo sapien
cctagggctaaactggctcaatttt

SEQ ID NO: 3450889 - DNA, 25 bp, Homo sapien
tgattgatgattcctcagagcctgc

SEQ ID NO: 3450890 - DNA, 25 bp, Homo sapien
tctggcgatgttctcttctcttgat

SEQ ID NO: 3450891 - DNA, 25 bp, Homo sapien
cacctcctagggctaaactggctca

SEQ ID NO: 3450892 - DNA, 25 bp, Homo sapien
caaagagattgctctatagaagtta

SEQ ID NO: 3450893 - DNA, 25 bp, Homo sapien
ttgtataaatacaaagagattgctc

SEQ ID NO: 3450894 - DNA, 25 bp, Homo sapien
gttaaaagaagtacagtacatggtc

SEQ ID NO: 3450895 - DNA, 25 bp, Homo sapien
aagtacagtacatggtcagtcctcc

SEQ ID NO: 3450896 - DNA, 25 bp, Homo sapien
gccactctgcgccacaaaggttggg

SEQ ID NO: 3450897 - DNA, 25 bp, Homo sapien
tgaccactgtcatcctagaaggctt

SEQ ID NO: 3450898 - DNA, 25 bp, Homo sapien
gatgtttgacaaagaggtaccaggc

SEQ ID NO: 3450899 - DNA, 25 bp, Homo sapien
tgatggccccttgagctctttgtaa

SEQ ID NO: 3450900 - DNA, 25 bp, Homo sapien
tattatgtctggcaaatgacctggg

SEQ ID NO: 3450901 - DNA, 25 bp, Homo sapien
gctattccagtcaatcatgtcgagt

SEQ ID NO: 3450902 - DNA, 25 bp, Homo sapien
ttcctccagggttagatcatagatc

SEQ ID NO: 3450903 - DNA, 25 bp, Homo sapien
tacacacttgacagtaccaggagac

SEQ ID NO: 3450904 - DNA, 25 bp, Homo sapien
caaacctcagggcaagggaacatgg

SEQ ID NO: 3450905 - DNA, 25 bp, Homo sapien
gctttgccggcaattcagggcttgg

SEQ ID NO: 3450906 - DNA, 25 bp, Homo sapien
ttgagtgccgactgtagtaaagccc

SEQ ID NO: 3450907 - DNA, 25 bp, Homo sapien
gactatgagagtaggccacaaggac

SEQ ID NO: 3450908 - DNA, 25 bp, Homo sapien
gagcacttgggtgaatctgggcacc

SEQ ID NO: 3450909 - DNA, 25 bp, Homo sapien
tccaggagcatgagaattgatcccc

SEQ ID NO: 3450910 - DNA, 25 bp, Homo sapien
gtgaccaaggcagcatctagcagaa

SEQ ID NO: 3450911 - DNA, 25 bp, Homo sapien
ccaggcatggagtaggtgatcgata

SEQ ID NO: 3450912 - DNA, 25 bp, Homo sapien
ttatagaatttttgtactgcagcat

SEQ ID NO: 3450913 - DNA, 25 bp, Homo sapien
tatagaatttttgtactgcagcatg

SEQ ID NO: 3450914 - DNA, 25 bp, Homo sapien
caggcgcccttgtttgaggtcagag

SEQ ID NO: 3450915 - DNA, 25 bp, Homo sapien
gtaaacagacagactcccgataggt

SEQ ID NO: 3450916 - DNA, 25 bp, Homo sapien
ccaggtgatgaagaggtgcccttac

SEQ ID NO: 3450917 - DNA, 25 bp, Homo sapien
tagatacctagattgcctggaagca

SEQ ID NO: 3450918 - DNA, 25 bp, Homo sapien
aataaaccacctaaatgagtcatat

SEQ ID NO: 3450919 - DNA, 25 bp, Homo sapien
aaaataaaccacctaaatgagtcat

SEQ ID NO: 3450920 - DNA, 25 bp, Homo sapien
taaaccacctaaatgagtcatatta

SEQ ID NO: 3450921 - DNA, 25 bp, Homo sapien
aaccacctaaatgagtcatattagt

SEQ ID NO: 3450922 - DNA, 25 bp, Homo sapien
gtagacgttagttgtccaggcttca

SEQ ID NO: 3450923 - DNA, 25 bp, Homo sapien
tagacgttagttgtccaggcttcag

SEQ ID NO: 3450924 - DNA, 25 bp, Homo sapien
ctgcgcgcctagatccgggtgggag

SEQ ID NO: 3450925 - DNA, 25 bp, Homo sapien
ggcccctgcgcgcctagatccgggt

SEQ ID NO: 3450926 - DNA, 25 bp, Homo sapien
cccctgcgcgcctagatccgggtgg

SEQ ID NO: 3450927 - DNA, 25 bp, Homo sapien
cctgcgcgcctagatccgggtggga

SEQ ID NO: 3450928 - DNA, 25 bp, Homo sapien
tgtgtaatcttgggcaaactgcttg

SEQ ID NO: 3450929 - DNA, 25 bp, Homo sapien
gggcaaactgcttggcctctcagag

SEQ ID NO: 3450930 - DNA, 25 bp, Homo sapien
ttgggcaaactgcttggcctctcag

SEQ ID NO: 3450931 - DNA, 25 bp, Homo sapien
tcttgggcaaactgcttggcctctc

SEQ ID NO: 3450932 - DNA, 25 bp, Homo sapien
tactggtgatgagttccacgactag

SEQ ID NO: 3450933 - DNA, 25 bp, Homo sapien
gactgtgtaaaccactccaggagag

SEQ ID NO: 3450934 - DNA, 25 bp, Homo sapien
tgccaggtctaggaataagaggtcc

SEQ ID NO: 3450935 - DNA, 25 bp, Homo sapien
tcaccggagttaataagaacccagc

SEQ ID NO: 3450936 - DNA, 25 bp, Homo sapien
tggctaattcgaatatccagtgaag

SEQ ID NO: 3450937 - DNA, 25 bp, Homo sapien
aattcgaatatccagtgaagagaag

SEQ ID NO: 3450938 - DNA, 25 bp, Homo sapien
tctgcaggatacaacctagcaagac

SEQ ID NO: 3450939 - DNA, 25 bp, Homo sapien
tactccaaaggaacataactccttg

SEQ ID NO: 3450940 - DNA, 25 bp, Homo sapien
gaaccctgtggtcagatattggcca

SEQ ID NO: 3450941 - DNA, 25 bp, Homo sapien
acttgaaaatggtgactgccggact

SEQ ID NO: 3450942 - DNA, 25 bp, Homo sapien
tattggccagggcaatccttgaaca

SEQ ID NO: 3450943 - DNA, 25 bp, Homo sapien
tgttttggaggcagtatccttgact

SEQ ID NO: 3450944 - DNA, 25 bp, Homo sapien
gaaaagttacatagattgcccagag

SEQ ID NO: 3450945 - DNA, 25 bp, Homo sapien
aagtgcctaggcatgtaaccgctac

SEQ ID NO: 3450946 - DNA, 25 bp, Homo sapien
cacatggtaaggtagcactcaggcc

SEQ ID NO: 3450947 - DNA, 25 bp, Homo sapien
gccttgatgagaagccacgtctatc

SEQ ID NO: 3450948 - DNA, 25 bp, Homo sapien
agagttcacttttgagcctgataga

SEQ ID NO: 3450949 - DNA, 25 bp, Homo sapien
tctgttctagcaaaacaaagtggaa

SEQ ID NO: 3450950 - DNA, 25 bp, Homo sapien
gcctgatagaatctgttctagcaaa

SEQ ID NO: 3450951 - DNA, 25 bp, Homo sapien
ttcctgggtaaagagtggtgctggg

SEQ ID NO: 3450952 - DNA, 25 bp, Homo sapien
tccactgtcatagcaagttgagtag

SEQ ID NO: 3450953 - DNA, 25 bp, Homo sapien
gagtcaacaaactatgacccaccgg

SEQ ID NO: 3450954 - DNA, 25 bp, Homo sapien
gatggccagatctgaatcatttgcc

SEQ ID NO: 3450955 - DNA, 25 bp, Homo sapien
gttaccgagcacttaccacgcatga

SEQ ID NO: 3450956 - DNA, 25 bp, Homo sapien
tatcagaactccactgtaggtgacc

SEQ ID NO: 3450957 - DNA, 25 bp, Homo sapien
tatgtcgtgtaaggaaaacaagccc

SEQ ID NO: 3450958 - DNA, 25 bp, Homo sapien
taggcatggctagatcttgacgctc

SEQ ID NO: 3450959 - DNA, 25 bp, Homo sapien
aatctactggcatcaaatgtgtctg

SEQ ID NO: 3450960 - DNA, 25 bp, Homo sapien
gaacagtccacttgccctaatccct

SEQ ID NO: 3450961 - DNA, 25 bp, Homo sapien
cctgaacagtccacttgccctaatc

SEQ ID NO: 3450962 - DNA, 25 bp, Homo sapien
cttagggagcgaggtgggtgagaaa

SEQ ID NO: 3450963 - DNA, 25 bp, Homo sapien
gccctgaacagtccacttgccctaa

SEQ ID NO: 3450964 - DNA, 25 bp, Homo sapien
ccagaaaagggattaagtgtgccct

SEQ ID NO: 3450965 - DNA, 25 bp, Homo sapien
ttaagtgtgccctgacagtatactc

SEQ ID NO: 3450966 - DNA, 25 bp, Homo sapien
aaaagggattaagtgtgccctgaca

SEQ ID NO: 3450967 - DNA, 25 bp, Homo sapien
tgtgccctgacagtatactctgcca

SEQ ID NO: 3450968 - DNA, 25 bp, Homo sapien
gcaagctgcagcctggattaaccca

SEQ ID NO: 3450969 - DNA, 25 bp, Homo sapien
ttggcaaagtcaagccagccagctg

SEQ ID NO: 3450970 - DNA, 25 bp, Homo sapien
gattaacccaggctgttcgtcagtg

SEQ ID NO: 3450971 - DNA, 25 bp, Homo sapien
tctgaaggaaatcctggatgggtcc

SEQ ID NO: 3450972 - DNA, 25 bp, Homo sapien
tcatcctctattgtgcaagccctgt

SEQ ID NO: 3450973 - DNA, 25 bp, Homo sapien
tctgttctatcctaaggaggtcagg

SEQ ID NO: 3450974 - DNA, 25 bp, Homo sapien
tgtcttcaatccacaactcaaaggg

SEQ ID NO: 3450975 - DNA, 25 bp, Homo sapien
tggaggattattttccctggccgct

SEQ ID NO: 3450976 - DNA, 25 bp, Homo sapien
tactaaaaggtaaggtagatgccca

SEQ ID NO: 3450977 - DNA, 25 bp, Homo sapien
gacagaccaggtgcaaattcccctt

SEQ ID NO: 3450978 - DNA, 25 bp, Homo sapien
cagtggcttgacctgtcctgtccaa

SEQ ID NO: 3450979 - DNA, 25 bp, Homo sapien
ccatctcacatggtagtgggtggaa

SEQ ID NO: 3450980 - DNA, 25 bp, Homo sapien
aatctctgttggctcgcacttggga

SEQ ID NO: 3450981 - DNA, 25 bp, Homo sapien
tcgcacttgggatatgttctgtctt

SEQ ID NO: 3450982 - DNA, 25 bp, Homo sapien
tggctcgcacttgggatatgttctg

SEQ ID NO: 3450983 - DNA, 25 bp, Homo sapien
tgttggctcgcacttgggatatgtt

SEQ ID NO: 3450984 - DNA, 25 bp, Homo sapien
ggcgggccaaaggtggcccattcat

SEQ ID NO: 3450985 - DNA, 25 bp, Homo sapien
aggcgggccaaaggtggcccattca

SEQ ID NO: 3450986 - DNA, 25 bp, Homo sapien
catagaaggaaacttagagggccac

SEQ ID NO: 3450987 - DNA, 25 bp, Homo sapien
cactggctggtctacatcaggagag

SEQ ID NO: 3450988 - DNA, 25 bp, Homo sapien
tttgcactctatccaggcagacagg

SEQ ID NO: 3450989 - DNA, 25 bp, Homo sapien
cagggaatcacatgcaggtaggaaa

SEQ ID NO: 3450990 - DNA, 25 bp, Homo sapien
tggagataagccctcagctgacctg

SEQ ID NO: 3450991 - DNA, 25 bp, Homo sapien
cccaggggagtcgtgtgcatgtatc

SEQ ID NO: 3450992 - DNA, 25 bp, Homo sapien
tctctttgaagctccagccctggag

SEQ ID NO: 3450993 - DNA, 25 bp, Homo sapien
gccctggagataagccctcagctga

SEQ ID NO: 3450994 - DNA, 25 bp, Homo sapien
gatataacatagtaaaagattaagg

SEQ ID NO: 3450995 - DNA, 25 bp, Homo sapien
tatgtgtgttatgttgactgatccc

SEQ ID NO: 3450996 - DNA, 25 bp, Homo sapien
ggattaaggatgaatatatcaaata

SEQ ID NO: 3450997 - DNA, 25 bp, Homo sapien
tctataatgagcattgatgactttc

SEQ ID NO: 3450998 - DNA, 25 bp, Homo sapien
ctccataacacttcacagagcccat

SEQ ID NO: 3450999 - DNA, 25 bp, Homo sapien
tggaagtccaaaagccggctgtttc

SEQ ID NO: 3451000 - DNA, 25 bp, Homo sapien
tctggagtttatgggagcttggctt

SEQ ID NO: 3451001 - DNA, 25 bp, Homo sapien
attctggagtttatgggagcttggc

SEQ ID NO: 3451002 - DNA, 25 bp, Homo sapien
atattctggagtttatgggagcttg

SEQ ID NO: 3451003 - DNA, 25 bp, Homo sapien
ctcttgtggctttagcactccaaaa

SEQ ID NO: 3451004 - DNA, 25 bp, Homo sapien
tcttgtggctttagcactccaaaac

SEQ ID NO: 3451005 - DNA, 25 bp, Homo sapien
gtggctttagcactccaaaaccaag

SEQ ID NO: 3451006 - DNA, 25 bp, Homo sapien
ttgtggctttagcactccaaaacca

SEQ ID NO: 3451007 - DNA, 25 bp, Homo sapien
gcatcaataagatctccctgtgaca

SEQ ID NO: 3451008 - DNA, 25 bp, Homo sapien
caggcactgggaattgggctgcatt

SEQ ID NO: 3451009 - DNA, 25 bp, Homo sapien
tgggaattgggctgcattagagaaa

SEQ ID NO: 3451010 - DNA, 25 bp, Homo sapien
tagagaaagaggtgcatcaataaga

SEQ ID NO: 3451011 - DNA, 25 bp, Homo sapien
gttaatattacaagccatagcctag

SEQ ID NO: 3451012 - DNA, 25 bp, Homo sapien
taacagggatgggactagaatgcaa

SEQ ID NO: 3451013 - DNA, 25 bp, Homo sapien
tacccacacggaacttatagtcagt

SEQ ID NO: 3451014 - DNA, 25 bp, Homo sapien
aactacaggtggtataagctaagca

SEQ ID NO: 3451015 - DNA, 25 bp, Homo sapien
gttaagattcccaaagaacacacag

SEQ ID NO: 3451016 - DNA, 25 bp, Homo sapien
tgttaagattcccaaagaacacaca

SEQ ID NO: 3451017 - DNA, 25 bp, Homo sapien
caggagttcatggagcaaggatctt

SEQ ID NO: 3451018 - DNA, 25 bp, Homo sapien
caaggatctttcttgttggtaacat

SEQ ID NO: 3451019 - DNA, 25 bp, Homo sapien
agttcttatgaaccgagcaactcac

SEQ ID NO: 3451020 - DNA, 25 bp, Homo sapien
aaggcaaagttcttatgaaccgagc

SEQ ID NO: 3451021 - DNA, 25 bp, Homo sapien
aaagttcttatgaaccgagcaactc

SEQ ID NO: 3451022 - DNA, 25 bp, Homo sapien
gcaaagttcttatgaaccgagcaac

SEQ ID NO: 3451023 - DNA, 25 bp, Homo sapien
ccaggttatccaggagataatccaa

SEQ ID NO: 3451024 - DNA, 25 bp, Homo sapien
tcatctctcttcatggagctgatgc

SEQ ID NO: 3451025 - DNA, 25 bp, Homo sapien
catctctcttcatggagctgatgct

SEQ ID NO: 3451026 - DNA, 25 bp, Homo sapien
ccaggagataatccaacttttgttt

SEQ ID NO: 3451027 - DNA, 25 bp, Homo sapien
cttgatcaacttcatctggtcatcc

SEQ ID NO: 3451028 - DNA, 25 bp, Homo sapien
gatcaacttcatctggtcatccccc

SEQ ID NO: 3451029 - DNA, 25 bp, Homo sapien
tcaacttcatctggtcatcccccat

SEQ ID NO: 3451030 - DNA, 25 bp, Homo sapien
tgatcaacttcatctggtcatcccc

SEQ ID NO: 3451031 - DNA, 25 bp, Homo sapien
cattggcgctgtctctgtcatcctc

SEQ ID NO: 3451032 - DNA, 25 bp, Homo sapien
tctccttcctcagcctctttttcat

SEQ ID NO: 3451033 - DNA, 25 bp, Homo sapien
cttcctcagcctctttttcatcatc

SEQ ID NO: 3451034 - DNA, 25 bp, Homo sapien
tccttcctcagcctctttttcatca

SEQ ID NO: 3451035 - DNA, 25 bp, Homo sapien
ttaatgaacataacaaggacaagga

SEQ ID NO: 3451036 - DNA, 25 bp, Homo sapien
aattccatagtctcttaaagcagaa

SEQ ID NO: 3451037 - DNA, 25 bp, Homo sapien
ctttggatttctaaattccatagtc

SEQ ID NO: 3451038 - DNA, 25 bp, Homo sapien
gcagaaacgaactacctttagaaga

SEQ ID NO: 3451039 - DNA, 25 bp, Homo sapien
cctttagaagaattccattcgaatc

SEQ ID NO: 3451040 - DNA, 25 bp, Homo sapien
tgtacgcgagggagcgcagctcggg

SEQ ID NO: 3451041 - DNA, 25 bp, Homo sapien
gaggctgtacgcgagggagcgcagc

SEQ ID NO: 3451042 - DNA, 25 bp, Homo sapien
ccagagccgaggctgtacgcgaggg

SEQ ID NO: 3451043 - DNA, 25 bp, Homo sapien
cccgcgacgccgtgcccggctccgg

SEQ ID NO: 3451044 - DNA, 25 bp, Homo sapien
aaggtcacgagagcggggttactct

SEQ ID NO: 3451045 - DNA, 25 bp, Homo sapien
cagcactcggaggtgcggaatggag

SEQ ID NO: 3451046 - DNA, 25 bp, Homo sapien
actctgggccaaagtcctcggatgt

SEQ ID NO: 3451047 - DNA, 25 bp, Homo sapien
agtcctcggatgttgagcgctcggc

SEQ ID NO: 3451048 - DNA, 25 bp, Homo sapien
gacgaggaacagcgcggagaagaca

SEQ ID NO: 3451049 - DNA, 25 bp, Homo sapien
gaagacaggagggggagagcctgag

SEQ ID NO: 3451050 - DNA, 25 bp, Homo sapien
agacaggagggggagagcctgagcc

SEQ ID NO: 3451051 - DNA, 25 bp, Homo sapien
gaggaacagcgcggagaagacagga

SEQ ID NO: 3451052 - DNA, 25 bp, Homo sapien
tagcagttatgagggatggacttgc

SEQ ID NO: 3451053 - DNA, 25 bp, Homo sapien
tctcatagcagttatgagggatgga

SEQ ID NO: 3451054 - DNA, 25 bp, Homo sapien
cgatctcatagcagttatgagggat

SEQ ID NO: 3451055 - DNA, 25 bp, Homo sapien
cagttatgagggatggacttgctga

SEQ ID NO: 3451056 - DNA, 25 bp, Homo sapien
cagaggagcatagatcttcagggac

SEQ ID NO: 3451057 - DNA, 25 bp, Homo sapien
aggagcatagatcttcagggactcc

SEQ ID NO: 3451058 - DNA, 25 bp, Homo sapien
tacagaggagcatagatcttcaggg

SEQ ID NO: 3451059 - DNA, 25 bp, Homo sapien
caagtacagaggagcatagatcttc

SEQ ID NO: 3451060 - DNA, 25 bp, Homo sapien
ctgcgggacgggtgacgggtctcac

SEQ ID NO: 3451061 - DNA, 25 bp, Homo sapien
gagagcccgacacaaggcaagtccc

SEQ ID NO: 3451062 - DNA, 25 bp, Homo sapien
tccaaaagagagcccgacacaaggc

SEQ ID NO: 3451063 - DNA, 25 bp, Homo sapien
aagagagcccgacacaaggcaagtc

SEQ ID NO: 3451064 - DNA, 25 bp, Homo sapien
aaaagagagcccgacacaaggcaag

SEQ ID NO: 3451065 - DNA, 25 bp, Homo sapien
taattctaaaagttgggagccatcc

SEQ ID NO: 3451066 - DNA, 25 bp, Homo sapien
ctagatgaggaaagattgcaggtcc

SEQ ID NO: 3451067 - DNA, 25 bp, Homo sapien
aataaggctggtctttgaattaacg

SEQ ID NO: 3451068 - DNA, 25 bp, Homo sapien
tagcctcgctgacctacaaatacct

SEQ ID NO: 3451069 - DNA, 25 bp, Homo sapien
gccccattagcagttagaaatgaag

SEQ ID NO: 3451070 - DNA, 25 bp, Homo sapien
aagccatatacaaggccccattagc

SEQ ID NO: 3451071 - DNA, 25 bp, Homo sapien
taggatctcagggagtagtttgtgt

SEQ ID NO: 3451072 - DNA, 25 bp, Homo sapien
agaaatgaagcggattgtaggatct

SEQ ID NO: 3451073 - DNA, 25 bp, Homo sapien
tggcagagcggcaccaaagccagga

SEQ ID NO: 3451074 - DNA, 25 bp, Homo sapien
agatgctggcagagcggcaccaaag

SEQ ID NO: 3451075 - DNA, 25 bp, Homo sapien
gaatggccacataagatgctggcag

SEQ ID NO: 3451076 - DNA, 25 bp, Homo sapien
aatggccacataagatgctggcaga

SEQ ID NO: 3451077 - DNA, 25 bp, Homo sapien
taccgtaccccgctgacaaatgcat

SEQ ID NO: 3451078 - DNA, 25 bp, Homo sapien
gaaatgagctaaagctgagtatccc

SEQ ID NO: 3451079 - DNA, 25 bp, Homo sapien
gacacagtctcgctatgctgtccaa

SEQ ID NO: 3451080 - DNA, 25 bp, Homo sapien
agtttctggatttaggccatcctcc

SEQ ID NO: 3451081 - DNA, 25 bp, Homo sapien
caagttggccatataaattgtgagc

SEQ ID NO: 3451082 - DNA, 25 bp, Homo sapien
tatatagatacatcctagggtgcca

SEQ ID NO: 3451083 - DNA, 25 bp, Homo sapien
atatatagatacatcctagggtgcc

SEQ ID NO: 3451084 - DNA, 25 bp, Homo sapien
atatagatacatcctagggtgccaa

SEQ ID NO: 3451085 - DNA, 25 bp, Homo sapien
tgaggaatttcgacactgccacaac

SEQ ID NO: 3451086 - DNA, 25 bp, Homo sapien
gggtacactgccactcaggtcataa

SEQ ID NO: 3451087 - DNA, 25 bp, Homo sapien
taggtctacagatgcaagccgccat

SEQ ID NO: 3451088 - DNA, 25 bp, Homo sapien
gagtaacataaaaaagccaggcagt

SEQ ID NO: 3451089 - DNA, 25 bp, Homo sapien
gacaaattgcttggaagacacaaac

SEQ ID NO: 3451090 - DNA, 25 bp, Homo sapien
tagcctaaatagcactaatgtcttc

SEQ ID NO: 3451091 - DNA, 25 bp, Homo sapien
aaactaccacagctctcacaagaag

SEQ ID NO: 3451092 - DNA, 25 bp, Homo sapien
caggaatgaggtgacacaaactaca

SEQ ID NO: 3451093 - DNA, 25 bp, Homo sapien
aaaccagcaagttggcaaacaagca

SEQ ID NO: 3451094 - DNA, 25 bp, Homo sapien
gcatgtcatactcgtaggtacgctg

SEQ ID NO: 3451095 - DNA, 25 bp, Homo sapien
cacctttacttgcagatgagtgctc

SEQ ID NO: 3451096 - DNA, 25 bp, Homo sapien
tgagtgctcttgcacctgtgttccc

SEQ ID NO: 3451097 - DNA, 25 bp, Homo sapien
agtactctatccatgccctcaagcg

SEQ ID NO: 3451098 - DNA, 25 bp, Homo sapien
taccaacactaccaagacagcaggc

SEQ ID NO: 3451099 - DNA, 25 bp, Homo sapien
agatgatttccacagtagcttcagc

SEQ ID NO: 3451100 - DNA, 25 bp, Homo sapien
tcaagcgaggctctcctaaactagt

SEQ ID NO: 3451101 - DNA, 25 bp, Homo sapien
catcaaagtggttacatgtcaaagt

SEQ ID NO: 3451102 - DNA, 25 bp, Homo sapien
aaaggtcacatcattcgtctcacag

SEQ ID NO: 3451103 - DNA, 25 bp, Homo sapien
caggaacatctaataatggtgaggt

SEQ ID NO: 3451104 - DNA, 25 bp, Homo sapien
actccccagcggttctgacagcaga

SEQ ID NO: 3451105 - DNA, 25 bp, Homo sapien
tcaaaaaagcaacgcctgcaggcaa

SEQ ID NO: 3451106 - DNA, 25 bp, Homo sapien
tgataatagagtacagcacatttcc

SEQ ID NO: 3451107 - DNA, 25 bp, Homo sapien
tccaaagtatgttcccaactagaag

SEQ ID NO: 3451108 - DNA, 25 bp, Homo sapien
gaaaaattgacacttggagtaatcc

SEQ ID NO: 3451109 - DNA, 25 bp, Homo sapien
tgttgtgatggttcctcttgctaca

SEQ ID NO: 3451110 - DNA, 25 bp, Homo sapien
tgtgatggttcctcttgctacaccc

SEQ ID NO: 3451111 - DNA, 25 bp, Homo sapien
taatgttgtgatggttcctcttgct

SEQ ID NO: 3451112 - DNA, 25 bp, Homo sapien
tctccatttcttaatgttgtgatgg

SEQ ID NO: 3451113 - DNA, 25 bp, Homo sapien
ggctgcagggagctgaaatcactcc

SEQ ID NO: 3451114 - DNA, 25 bp, Homo sapien
ctgcagggagctgaaatcactccag

SEQ ID NO: 3451115 - DNA, 25 bp, Homo sapien
cagggagctgaaatcactccagcct

SEQ ID NO: 3451116 - DNA, 25 bp, Homo sapien
gggagctgaaatcactccagcctgg

SEQ ID NO: 3451117 - DNA, 25 bp, Homo sapien
tgttggcaaggatgctgacaaactg

SEQ ID NO: 3451118 - DNA, 25 bp, Homo sapien
gcactatgaaaagaagtccaacatc

SEQ ID NO: 3451119 - DNA, 25 bp, Homo sapien
tctacatttaggtatcaagccaaga

SEQ ID NO: 3451120 - DNA, 25 bp, Homo sapien
tggacccctcatacactgccaagtg

SEQ ID NO: 3451121 - DNA, 25 bp, Homo sapien
tcaaaatgtgggatatcacagagta

SEQ ID NO: 3451122 - DNA, 25 bp, Homo sapien
aaatcccacactactaacttcatag

SEQ ID NO: 3451123 - DNA, 25 bp, Homo sapien
aattaggccataaatcaggtgactc

SEQ ID NO: 3451124 - DNA, 25 bp, Homo sapien
gaattattcaaatctcctgtgagaa

SEQ ID NO: 3451125 - DNA, 25 bp, Homo sapien
catgcgtgcttaaaggagtggtctt

SEQ ID NO: 3451126 - DNA, 25 bp, Homo sapien
ctattctaccatcagtgcttccaat

SEQ ID NO: 3451127 - DNA, 25 bp, Homo sapien
ggttatgtagtcttcaaatcttgga

SEQ ID NO: 3451128 - DNA, 25 bp, Homo sapien
ttgtcttacatagtatctcacaggg

SEQ ID NO: 3451129 - DNA, 25 bp, Homo sapien
tctgtctacaggcaaaaccataatt

SEQ ID NO: 3451130 - DNA, 25 bp, Homo sapien
taaaacacaacaggcaatcagtgtc

SEQ ID NO: 3451131 - DNA, 25 bp, Homo sapien
gaccagacgttacctctatcatgga

SEQ ID NO: 3451132 - DNA, 25 bp, Homo sapien
tcaatatccagtgagtctagagcaa

SEQ ID NO: 3451133 - DNA, 25 bp, Homo sapien
aacttaggcctagactcttacttgc

SEQ ID NO: 3451134 - DNA, 25 bp, Homo sapien
atatgccagaaacttaggcctagac

SEQ ID NO: 3451135 - DNA, 25 bp, Homo sapien
gactcttacttgcactattggccat

SEQ ID NO: 3451136 - DNA, 25 bp, Homo sapien
ggcctagactcttacttgcactatt

SEQ ID NO: 3451137 - DNA, 25 bp, Homo sapien
gaacatgtacatggcagctgtgatg

SEQ ID NO: 3451138 - DNA, 25 bp, Homo sapien
tgtacatggcagctgtgatgcaaaa

SEQ ID NO: 3451139 - DNA, 25 bp, Homo sapien
aagaacatgtacatggcagctgtga

SEQ ID NO: 3451140 - DNA, 25 bp, Homo sapien
catgtacatggcagctgtgatgcaa

SEQ ID NO: 3451141 - DNA, 25 bp, Homo sapien
gaaatttctctagcagcttaccact

SEQ ID NO: 3451142 - DNA, 25 bp, Homo sapien
taactctgcgtttgctaagtgatca

SEQ ID NO: 3451143 - DNA, 25 bp, Homo sapien
taatcctctagcaaatggccctatc

SEQ ID NO: 3451144 - DNA, 25 bp, Homo sapien
cacttactggatacatctagagcaa

SEQ ID NO: 3451145 - DNA, 25 bp, Homo sapien
actgaactctagctccaaatatggg

SEQ ID NO: 3451146 - DNA, 25 bp, Homo sapien
caagtatcttattgaaggccacaga

SEQ ID NO: 3451147 - DNA, 25 bp, Homo sapien
gctttagtgctaacatgctggacat

SEQ ID NO: 3451148 - DNA, 25 bp, Homo sapien
cacagagtttgtaagtggtagagcc

SEQ ID NO: 3451149 - DNA, 25 bp, Homo sapien
aaattggataccttgtttggcttca

SEQ ID NO: 3451150 - DNA, 25 bp, Homo sapien
tcacaggcacaatcgtagcgcacta

SEQ ID NO: 3451151 - DNA, 25 bp, Homo sapien
caactagttcagagtaaggctggca

SEQ ID NO: 3451152 - DNA, 25 bp, Homo sapien
tactttaagagtcacctgtggcttt

SEQ ID NO: 3451153 - DNA, 25 bp, Homo sapien
tacatatggtataggaagtacgtgc

SEQ ID NO: 3451154 - DNA, 25 bp, Homo sapien
tacaactgtggtgtaatgtggccac

SEQ ID NO: 3451155 - DNA, 25 bp, Homo sapien
tgtggtcagtttgtatctggcaatc

SEQ ID NO: 3451156 - DNA, 25 bp, Homo sapien
gaaagggacttagacgtacatatgg

SEQ ID NO: 3451157 - DNA, 25 bp, Homo sapien
tgtttccgaagagggtccggtctgc

SEQ ID NO: 3451158 - DNA, 25 bp, Homo sapien
caaaaggcgacgtggagaagactaa

SEQ ID NO: 3451159 - DNA, 25 bp, Homo sapien
agaagctagatgagacctggtcgga

SEQ ID NO: 3451160 - DNA, 25 bp, Homo sapien
cagccgtgtggattgggaccacttc

SEQ ID NO: 3451161 - DNA, 25 bp, Homo sapien
gatgcttactattaacttccgtgga

SEQ ID NO: 3451162 - DNA, 25 bp, Homo sapien
gaaatcagatacagcaagttttcca

SEQ ID NO: 3451163 - DNA, 25 bp, Homo sapien
tagtgtatcacaaaaaacaatcacg

SEQ ID NO: 3451164 - DNA, 25 bp, Homo sapien
agagaaggttggctagaatgcttat

SEQ ID NO: 3451165 - DNA, 25 bp, Homo sapien
tgaagcaggccgcagttatgggtaa

SEQ ID NO: 3451166 - DNA, 25 bp, Homo sapien
tatttcatacagaatggaacactga

SEQ ID NO: 3451167 - DNA, 25 bp, Homo sapien
ctttaaatagtgaaattccccagtg

SEQ ID NO: 3451168 - DNA, 25 bp, Homo sapien
tatggcacttagtatgagaaaactc

SEQ ID NO: 3451169 - DNA, 25 bp, Homo sapien
aaaatatttcttcgcaatctacaga

SEQ ID NO: 3451170 - DNA, 25 bp, Homo sapien
tatttacaaactatacatcctaggg

SEQ ID NO: 3451171 - DNA, 25 bp, Homo sapien
ggatggactggaagacattatactc

SEQ ID NO: 3451172 - DNA, 25 bp, Homo sapien
gaaaatactcaaggctggaaacagt

SEQ ID NO: 3451173 - DNA, 25 bp, Homo sapien
tgtaaatcctttcaagccatccttg

SEQ ID NO: 3451174 - DNA, 25 bp, Homo sapien
cagaaaatgtaaatcctttcaagcc

SEQ ID NO: 3451175 - DNA, 25 bp, Homo sapien
ctaagtgcagaaaatgtaaatcctt

SEQ ID NO: 3451176 - DNA, 25 bp, Homo sapien
aaaatgtaaatcctttcaagccatc

SEQ ID NO: 3451177 - DNA, 25 bp, Homo sapien
caaactagccctctgttaaaagtgg

SEQ ID NO: 3451178 - DNA, 25 bp, Homo sapien
tgcttagtggaaggagatgcacaaa

SEQ ID NO: 3451179 - DNA, 25 bp, Homo sapien
cacactgcagattgattacgaaact

SEQ ID NO: 3451180 - DNA, 25 bp, Homo sapien
aattcatgtgcaatgtggtgagtcc

SEQ ID NO: 3451181 - DNA, 25 bp, Homo sapien
caaatgtatcaagctctgagtatcc

SEQ ID NO: 3451182 - DNA, 25 bp, Homo sapien
tacaataaaaatcacgaccgccagg

SEQ ID NO: 3451183 - DNA, 25 bp, Homo sapien
gtcaggagctcatattaaattgtgc

SEQ ID NO: 3451184 - DNA, 25 bp, Homo sapien
tgatctgtatgagataagcacttcc

SEQ ID NO: 3451185 - DNA, 25 bp, Homo sapien
gaattagttctcaggagagctaatg

SEQ ID NO: 3451186 - DNA, 25 bp, Homo sapien
acactaaccagtcttgagtagtatc

SEQ ID NO: 3451187 - DNA, 25 bp, Homo sapien
tttatacactaaccagtcttgagta

SEQ ID NO: 3451188 - DNA, 25 bp, Homo sapien
atagtgaattagttctcaggagagc

SEQ ID NO: 3451189 - DNA, 25 bp, Homo sapien
tcattcttccgggtttttcctcatg

SEQ ID NO: 3451190 - DNA, 25 bp, Homo sapien
ccacaaatttcctgactagaccaat

SEQ ID NO: 3451191 - DNA, 25 bp, Homo sapien
aagaatgtgtgggaatttcttcctt

SEQ ID NO: 3451192 - DNA, 25 bp, Homo sapien
gcatatgctgcctctggtgaaaaag

SEQ ID NO: 3451193 - DNA, 25 bp, Homo sapien
ttaaagtgtgtatatccatgtgttt

SEQ ID NO: 3451194 - DNA, 25 bp, Homo sapien
tgcaacatctatgccttggtccatg

SEQ ID NO: 3451195 - DNA, 25 bp, Homo sapien
gatgcaattatcttcataatgtttg

SEQ ID NO: 3451196 - DNA, 25 bp, Homo sapien
tgtttgcaacatctatgccttggtc

SEQ ID NO: 3451197 - DNA, 25 bp, Homo sapien
taagagatgcaattatcttcataat

SEQ ID NO: 3451198 - DNA, 25 bp, Homo sapien
gcactaatgtgggacagttcctcct

SEQ ID NO: 3451199 - DNA, 25 bp, Homo sapien
gggtgctgcacaactctgttcttct

SEQ ID NO: 3451200 - DNA, 25 bp, Homo sapien
cttctcatcatcaactgagtagaga

SEQ ID NO: 3451201 - DNA, 25 bp, Homo sapien
ctcctttctagagtaaccaccaagg

SEQ ID NO: 3451202 - DNA, 25 bp, Homo sapien
gtcaacactgggccatagatgttta

SEQ ID NO: 3451203 - DNA, 25 bp, Homo sapien
tgtcaacactgggccatagatgttt

SEQ ID NO: 3451204 - DNA, 25 bp, Homo sapien
tcaacactgggccatagatgtttac

SEQ ID NO: 3451205 - DNA, 25 bp, Homo sapien
gtatacataaattgccaagtttaca

SEQ ID NO: 3451206 - DNA, 25 bp, Homo sapien
tatacataaattgccaagtttacag

SEQ ID NO: 3451207 - DNA, 25 bp, Homo sapien
tttacattcatggatataatacggc

SEQ ID NO: 3451208 - DNA, 25 bp, Homo sapien
ttcatggatataatacggcattcca

SEQ ID NO: 3451209 - DNA, 25 bp, Homo sapien
tgaatgcctgttatctgccaaacat

SEQ ID NO: 3451210 - DNA, 25 bp, Homo sapien
gaaatggtcacactttcatcttgcc

SEQ ID NO: 3451211 - DNA, 25 bp, Homo sapien
tggaaaatatctacactcatagcag

SEQ ID NO: 3451212 - DNA, 25 bp, Homo sapien
gcagtgtatgcccaaaagttaggtt

SEQ ID NO: 3451213 - DNA, 25 bp, Homo sapien
gtaccccacgctaaacattctgatg

SEQ ID NO: 3451214 - DNA, 25 bp, Homo sapien
ggcagcactggatcaagtaccccac

SEQ ID NO: 3451215 - DNA, 25 bp, Homo sapien
gccaagaaaagctccaagctggaag

SEQ ID NO: 3451216 - DNA, 25 bp, Homo sapien
aacagatgcctaaatgcagaaggga

SEQ ID NO: 3451217 - DNA, 25 bp, Homo sapien
gaagggacctaagtcattgcttata

SEQ ID NO: 3451218 - DNA, 25 bp, Homo sapien
tagtgattccattatgcaaaaggcc

SEQ ID NO: 3451219 - DNA, 25 bp, Homo sapien
tctacatatatgtttaggcgtgggc

SEQ ID NO: 3451220 - DNA, 25 bp, Homo sapien
ggtatgattgatcccaatacccagg

SEQ ID NO: 3451221 - DNA, 25 bp, Homo sapien
tatgagtaaatttttacagaaaaca

SEQ ID NO: 3451222 - DNA, 25 bp, Homo sapien
ttttacagaaaacaacactgtccat

SEQ ID NO: 3451223 - DNA, 25 bp, Homo sapien
tttttacagaaaacaacactgtcca

SEQ ID NO: 3451224 - DNA, 25 bp, Homo sapien
tccagcgcaggaagcaactagtacc

SEQ ID NO: 3451225 - DNA, 25 bp, Homo sapien
cagctataatagcatgtagttcatc

SEQ ID NO: 3451226 - DNA, 25 bp, Homo sapien
aatagcatgtagttcatcatctaag

SEQ ID NO: 3451227 - DNA, 25 bp, Homo sapien
tcatctaagtttctgatccagcgca

SEQ ID NO: 3451228 - DNA, 25 bp, Homo sapien
ccaatttggacgctaaatacatgga

SEQ ID NO: 3451229 - DNA, 25 bp, Homo sapien
caatttggacgctaaatacatggaa

SEQ ID NO: 3451230 - DNA, 25 bp, Homo sapien
ctctaccaatttggacgctaaatac

SEQ ID NO: 3451231 - DNA, 25 bp, Homo sapien
taccaatttggacgctaaatacatg

SEQ ID NO: 3451232 - DNA, 25 bp, Homo sapien
tgccattgggatatacatttgctgc

SEQ ID NO: 3451233 - DNA, 25 bp, Homo sapien
gtcagcagctaaaagctttatgttc

SEQ ID NO: 3451234 - DNA, 25 bp, Homo sapien
tttgctgctaaaacagtcagcagct

SEQ ID NO: 3451235 - DNA, 25 bp, Homo sapien
attcttgcacaaaaatttcgcttac

SEQ ID NO: 3451236 - DNA, 25 bp, Homo sapien
gctgtagagatggaatagatgatag

SEQ ID NO: 3451237 - DNA, 25 bp, Homo sapien
atagatgatagtatctgcatgagga

SEQ ID NO: 3451238 - DNA, 25 bp, Homo sapien
gaatagatgatagtatctgcatgag

SEQ ID NO: 3451239 - DNA, 25 bp, Homo sapien
ctgtagagatggaatagatgatagt

SEQ ID NO: 3451240 - DNA, 25 bp, Homo sapien
agaattcttttagtaaatataaatg

SEQ ID NO: 3451241 - DNA, 25 bp, Homo sapien
ttgagaattcttttagtaaatataa

SEQ ID NO: 3451242 - DNA, 25 bp, Homo sapien
gaattcttttagtaaatataaatga

SEQ ID NO: 3451243 - DNA, 25 bp, Homo sapien
ggtctcaaagtctgaacttccatga

SEQ ID NO: 3451244 - DNA, 25 bp, Homo sapien
tgcccttggtgagtcttaaaaggaa

SEQ ID NO: 3451245 - DNA, 25 bp, Homo sapien
ggaacttccagtaagatggtctcaa

SEQ ID NO: 3451246 - DNA, 25 bp, Homo sapien
aaaggaacttccagtaagatggtct

SEQ ID NO: 3451247 - DNA, 25 bp, Homo sapien
tgaaagtgtttagatgcaccagtac

SEQ ID NO: 3451248 - DNA, 25 bp, Homo sapien
acatcaaggacttttcggttcatga

SEQ ID NO: 3451249 - DNA, 25 bp, Homo sapien
ttagatgcaccagtaccaaaaacat

SEQ ID NO: 3451250 - DNA, 25 bp, Homo sapien
ggacttttcggttcatgacagcaaa

SEQ ID NO: 3451251 - DNA, 25 bp, Homo sapien
ctctgtgggcaactctggtgttaca

SEQ ID NO: 3451252 - DNA, 25 bp, Homo sapien
ctggtgttacagttgtgtatcttgg

SEQ ID NO: 3451253 - DNA, 25 bp, Homo sapien
ggaaaactctgtgggcaactctggt

SEQ ID NO: 3451254 - DNA, 25 bp, Homo sapien
tacagttgtgtatcttggatccaac

SEQ ID NO: 3451255 - DNA, 25 bp, Homo sapien
taacactgaagttcgagcttgggcc

SEQ ID NO: 3451256 - DNA, 25 bp, Homo sapien
gcatccctgaagtaagaatggccac

SEQ ID NO: 3451257 - DNA, 25 bp, Homo sapien
gaaagcagcactgtccgtggagagt

SEQ ID NO: 3451258 - DNA, 25 bp, Homo sapien
tgaagtctgaaaccgaaatgatcct

SEQ ID NO: 3451259 - DNA, 25 bp, Homo sapien
cagtaaacacagtaccaaccatcgt

SEQ ID NO: 3451260 - DNA, 25 bp, Homo sapien
tcacagtcttttaatgtcaatgaaa

SEQ ID NO: 3451261 - DNA, 25 bp, Homo sapien
agttctcagggctttagtacttcat

SEQ ID NO: 3451262 - DNA, 25 bp, Homo sapien
aacacagtaccaaccatcgttttga

SEQ ID NO: 3451263 - DNA, 25 bp, Homo sapien
gcagtctgtcccaatgaaatcaaac

SEQ ID NO: 3451264 - DNA, 25 bp, Homo sapien
gccaaaaagttgtcaatcaatacct

SEQ ID NO: 3451265 - DNA, 25 bp, Homo sapien
cactgcaaattggttattcactcaa

SEQ ID NO: 3451266 - DNA, 25 bp, Homo sapien
tcaaacaactacactttgcagtctg

SEQ ID NO: 3451267 - DNA, 25 bp, Homo sapien
tactcggttgctactagttctagga

SEQ ID NO: 3451268 - DNA, 25 bp, Homo sapien
cagaaaatagcaacgaaatgaccat

SEQ ID NO: 3451269 - DNA, 25 bp, Homo sapien
gaaatgaccataataccactgcccc

SEQ ID NO: 3451270 - DNA, 25 bp, Homo sapien
cccaaatgcacggtttttcaatctc

SEQ ID NO: 3451271 - DNA, 25 bp, Homo sapien
caccaagggagaggttgtgacacag

SEQ ID NO: 3451272 - DNA, 25 bp, Homo sapien
aggcaagtggacgaagctccctgag

SEQ ID NO: 3451273 - DNA, 25 bp, Homo sapien
gacgaacactcgagcacaacaagaa

SEQ ID NO: 3451274 - DNA, 25 bp, Homo sapien
cagtggtcagttcccttcagtccca

SEQ ID NO: 3451275 - DNA, 25 bp, Homo sapien
aaagtagtaatgcagggtgacctca

SEQ ID NO: 3451276 - DNA, 25 bp, Homo sapien
tcagccaacataggtctacaggtct

SEQ ID NO: 3451277 - DNA, 25 bp, Homo sapien
taaaacatattcgtaggagggacag

SEQ ID NO: 3451278 - DNA, 25 bp, Homo sapien
gccaagaccagggaacatcctatta

SEQ ID NO: 3451279 - DNA, 25 bp, Homo sapien
cagaattcttgggtaatagagccat

SEQ ID NO: 3451280 - DNA, 25 bp, Homo sapien
tgcagcagggatacactcttctcca

SEQ ID NO: 3451281 - DNA, 25 bp, Homo sapien
gagaattacaccatcagtttccctg

SEQ ID NO: 3451282 - DNA, 25 bp, Homo sapien
ccaaagtgcccatagaccaatgagt

SEQ ID NO: 3451283 - DNA, 25 bp, Homo sapien
tctgagatgcaagaatacaccgagt

SEQ ID NO: 3451284 - DNA, 25 bp, Homo sapien
tagtggcatgggtgcagattacaga

SEQ ID NO: 3451285 - DNA, 25 bp, Homo sapien
cattcccacaactcagctggtagag

SEQ ID NO: 3451286 - DNA, 25 bp, Homo sapien
caccgagtctggtggtatttgtcca

SEQ ID NO: 3451287 - DNA, 25 bp, Homo sapien
gataaagctctttactggactgcga

SEQ ID NO: 3451288 - DNA, 25 bp, Homo sapien
gaatgtgtcagcagaactcctcatg

SEQ ID NO: 3451289 - DNA, 25 bp, Homo sapien
ccctgactttggagctggagagtaa

SEQ ID NO: 3451290 - DNA, 25 bp, Homo sapien
tttgggtatgcctacagtcactggg

SEQ ID NO: 3451291 - DNA, 25 bp, Homo sapien
ccccaggtaggagctgcatgctata

SEQ ID NO: 3451292 - DNA, 25 bp, Homo sapien
aaaggtcacaagctcctcaagagaa

SEQ ID NO: 3451293 - DNA, 25 bp, Homo sapien
tgctatagatactctttagcttggc

SEQ ID NO: 3451294 - DNA, 25 bp, Homo sapien
gttatctgtgcaaaggtcacaagct

SEQ ID NO: 3451295 - DNA, 25 bp, Homo sapien
tatgaataacgagctagagtcccct

SEQ ID NO: 3451296 - DNA, 25 bp, Homo sapien
tacgtcatggagtcccaaggctgga

SEQ ID NO: 3451297 - DNA, 25 bp, Homo sapien
ggtaacagttccacctaacagagtg

SEQ ID NO: 3451298 - DNA, 25 bp, Homo sapien
tcactgtagcaggaccagaataccc

SEQ ID NO: 3451299 - DNA, 25 bp, Homo sapien
cacatagcgtagtgaattggcaata

SEQ ID NO: 3451300 - DNA, 25 bp, Homo sapien
caaagtccatagttgtgcaagcata

SEQ ID NO: 3451301 - DNA, 25 bp, Homo sapien
gaaggtctggttactgcttggccat

SEQ ID NO: 3451302 - DNA, 25 bp, Homo sapien
caagtttaatccaaaaccgcgatgg

SEQ ID NO: 3451303 - DNA, 25 bp, Homo sapien
acagagcctaggtgtcgaggacgaa

SEQ ID NO: 3451304 - DNA, 25 bp, Homo sapien
ggtgtcgaggacgaaggaagcctct

SEQ ID NO: 3451305 - DNA, 25 bp, Homo sapien
ttagggacaaggtctgggtgcccac

SEQ ID NO: 3451306 - DNA, 25 bp, Homo sapien
tcgaggacgaaggaagcctctgctg

SEQ ID NO: 3451307 - DNA, 25 bp, Homo sapien
aagacagtgccaagagctgtgttac

SEQ ID NO: 3451308 - DNA, 25 bp, Homo sapien
gaggggtgatttgtctaaagtgcca

SEQ ID NO: 3451309 - DNA, 25 bp, Homo sapien
tcagcaccatgagacggggaaggtg

SEQ ID NO: 3451310 - DNA, 25 bp, Homo sapien
tctgctaaacctggaagatcagcac

SEQ ID NO: 3451311 - DNA, 25 bp, Homo sapien
gagtaggaaccagaaagcttgttct

SEQ ID NO: 3451312 - DNA, 25 bp, Homo sapien
ggaaccttagcacaaagccactggc

SEQ ID NO: 3451313 - DNA, 25 bp, Homo sapien
aggaaccttagcacaaagccactgg

SEQ ID NO: 3451314 - DNA, 25 bp, Homo sapien
tagcacaaagccactggcaataatg

SEQ ID NO: 3451315 - DNA, 25 bp, Homo sapien
cacaaagccactggcaataatgaac

SEQ ID NO: 3451316 - DNA, 25 bp, Homo sapien
ctttgtgtaccaggtacacagcaat

SEQ ID NO: 3451317 - DNA, 25 bp, Homo sapien
gctgtctgctggcacaaagctgcag

SEQ ID NO: 3451318 - DNA, 25 bp, Homo sapien
ttgtgtaccaggtacacagcaataa

SEQ ID NO: 3451319 - DNA, 25 bp, Homo sapien
cagcaataaaccacctgctgtctgc

SEQ ID NO: 3451320 - DNA, 25 bp, Homo sapien
tcagtcattctctccttccttcttt

SEQ ID NO: 3451321 - DNA, 25 bp, Homo sapien
ccttctttccacattcattatatac

SEQ ID NO: 3451322 - DNA, 25 bp, Homo sapien
cttccttctttccacattcattata

SEQ ID NO: 3451323 - DNA, 25 bp, Homo sapien
ccttccttctttccacattcattat

SEQ ID NO: 3451324 - DNA, 25 bp, Homo sapien
tctctgccaccaacatagactggcg

SEQ ID NO: 3451325 - DNA, 25 bp, Homo sapien
gaggcattcattgtgggcttcagta

SEQ ID NO: 3451326 - DNA, 25 bp, Homo sapien
ggcattcattgtgggcttcagtaaa

SEQ ID NO: 3451327 - DNA, 25 bp, Homo sapien
gcgggattggtgtaagagaggcttt

SEQ ID NO: 3451328 - DNA, 25 bp, Homo sapien
agtccatgatcaaaggcttgccaga

SEQ ID NO: 3451329 - DNA, 25 bp, Homo sapien
ccagactgactcatgaagaagaaaa

SEQ ID NO: 3451330 - DNA, 25 bp, Homo sapien
agtgtctcagacagctggggctttc

SEQ ID NO: 3451331 - DNA, 25 bp, Homo sapien
acagctggggctttctagaaggcat

SEQ ID NO: 3451332 - DNA, 25 bp, Homo sapien
taaccagaaaggttgtcacactggc

SEQ ID NO: 3451333 - DNA, 25 bp, Homo sapien
gatccaccaactgagggtaaccaga

SEQ ID NO: 3451334 - DNA, 25 bp, Homo sapien
tagacagagagagacgacctgagtt

SEQ ID NO: 3451335 - DNA, 25 bp, Homo sapien
tggacaccggacaaaagctcaggat

SEQ ID NO: 3451336 - DNA, 25 bp, Homo sapien
tcattagcagccttgtatggcaaag

SEQ ID NO: 3451337 - DNA, 25 bp, Homo sapien
ccacaaattcaggttgaccttctct

SEQ ID NO: 3451338 - DNA, 25 bp, Homo sapien
ttagcctgataaccccaaacaactc

SEQ ID NO: 3451339 - DNA, 25 bp, Homo sapien
tatggcaaaggacctgatctttagc

SEQ ID NO: 3451340 - DNA, 25 bp, Homo sapien
caaagtctgggcacttagctgtcat

SEQ ID NO: 3451341 - DNA, 25 bp, Homo sapien
gaggcccacacaagatgactgaaca

SEQ ID NO: 3451342 - DNA, 25 bp, Homo sapien
tatcagcgtatctaatggtaaaccc

SEQ ID NO: 3451343 - DNA, 25 bp, Homo sapien
gattatacggtcttgtcccctccac

SEQ ID NO: 3451344 - DNA, 25 bp, Homo sapien
ggctgataagaaggcccatgacctc

SEQ ID NO: 3451345 - DNA, 25 bp, Homo sapien
gattgtaacggagagtcagacttca

SEQ ID NO: 3451346 - DNA, 25 bp, Homo sapien
aatggtatgaaagtgctggctaccc

SEQ ID NO: 3451347 - DNA, 25 bp, Homo sapien
tttttggccccgcatctgggcaggc

SEQ ID NO: 3451348 - DNA, 25 bp, Homo sapien
ctgtgttcagaaaatgccagggacc

SEQ ID NO: 3451349 - DNA, 25 bp, Homo sapien
tgagcttccaaggaagtatacaaag

SEQ ID NO: 3451350 - DNA, 25 bp, Homo sapien
tatacaaaggacctccatagccatc

SEQ ID NO: 3451351 - DNA, 25 bp, Homo sapien
gtgttcagaaaatgccagggaccca

SEQ ID NO: 3451352 - DNA, 25 bp, Homo sapien
caggcggcatgaagaggcagagagg

SEQ ID NO: 3451353 - DNA, 25 bp, Homo sapien
tgccaggcggcatgaagaggcagag

SEQ ID NO: 3451354 - DNA, 25 bp, Homo sapien
acacaggtgccaggcggcatgaaga

SEQ ID NO: 3451355 - DNA, 25 bp, Homo sapien
ggcggcatgaagaggcagagaggct

SEQ ID NO: 3451356 - DNA, 25 bp, Homo sapien
taggcacccactggtatcaccaagg

SEQ ID NO: 3451357 - DNA, 25 bp, Homo sapien
accacggcgtcctgtaggagcctga

SEQ ID NO: 3451358 - DNA, 25 bp, Homo sapien
tgagacagcacacttctttctctag

SEQ ID NO: 3451359 - DNA, 25 bp, Homo sapien
gcaaaccacggcgtcctgtaggagc

SEQ ID NO: 3451360 - DNA, 25 bp, Homo sapien
agcaccgtggctgcccaaagcaggg

SEQ ID NO: 3451361 - DNA, 25 bp, Homo sapien
tgacaggcttctcccacggggcagc

SEQ ID NO: 3451362 - DNA, 25 bp, Homo sapien
caggatgacaggcttctcccacggg

SEQ ID NO: 3451363 - DNA, 25 bp, Homo sapien
gcacagcaccgtggctgcccaaagc

SEQ ID NO: 3451364 - DNA, 25 bp, Homo sapien
tctccattgtactcctacatccacg

SEQ ID NO: 3451365 - DNA, 25 bp, Homo sapien
gatacagttggctgtctgagaattc

SEQ ID NO: 3451366 - DNA, 25 bp, Homo sapien
gccctcactgagcactctccattgt

SEQ ID NO: 3451367 - DNA, 25 bp, Homo sapien
tccccagtagttttggccctcactg

SEQ ID NO: 3451368 - DNA, 25 bp, Homo sapien
cataaagtgataacctttctccctg

SEQ ID NO: 3451369 - DNA, 25 bp, Homo sapien
attggcctccatcactttatcagta

SEQ ID NO: 3451370 - DNA, 25 bp, Homo sapien
ggtccgtaaaattcataaagtgata

SEQ ID NO: 3451371 - DNA, 25 bp, Homo sapien
gatctgagtgccagctgcgtgtcat

SEQ ID NO: 3451372 - DNA, 25 bp, Homo sapien
ctgtagttgcaacacgactgtacat

SEQ ID NO: 3451373 - DNA, 25 bp, Homo sapien
ctctgcccattaccatctgacaata

SEQ ID NO: 3451374 - DNA, 25 bp, Homo sapien
tagttgcaacacgactgtacatctc

SEQ ID NO: 3451375 - DNA, 25 bp, Homo sapien
aatatctggagctctttgttcaagt

SEQ ID NO: 3451376 - DNA, 25 bp, Homo sapien
actctgcagtgcatctatttagctt

SEQ ID NO: 3451377 - DNA, 25 bp, Homo sapien
ttggacaaagcggggtcagctgaca

SEQ ID NO: 3451378 - DNA, 25 bp, Homo sapien
gactctgcagtgcatctatttagct

SEQ ID NO: 3451379 - DNA, 25 bp, Homo sapien
attcttagctttggacaaagcgggg

SEQ ID NO: 3451380 - DNA, 25 bp, Homo sapien
gtgaaactgcacaagagttgtacat

SEQ ID NO: 3451381 - DNA, 25 bp, Homo sapien
tggccacgggtgtctggagcactgt

SEQ ID NO: 3451382 - DNA, 25 bp, Homo sapien
gttatgagcgagaaacactgagtta

SEQ ID NO: 3451383 - DNA, 25 bp, Homo sapien
tgcaaggtggtgttaattatatggt

SEQ ID NO: 3451384 - DNA, 25 bp, Homo sapien
ccgtggctctgctttgatgatccat

SEQ ID NO: 3451385 - DNA, 25 bp, Homo sapien
gatgatccatctaggttccagtttc

SEQ ID NO: 3451386 - DNA, 25 bp, Homo sapien
taaatttcctatccccgtggctctg

SEQ ID NO: 3451387 - DNA, 25 bp, Homo sapien
caactcaacgtctgagtcacatttc

SEQ ID NO: 3451388 - DNA, 25 bp, Homo sapien
gggtagaaacctagacattctcttc

SEQ ID NO: 3451389 - DNA, 25 bp, Homo sapien
gccctgatctctcatatccaaggtg

SEQ ID NO: 3451390 - DNA, 25 bp, Homo sapien
cagctgctttgggtagaaacctaga

SEQ ID NO: 3451391 - DNA, 25 bp, Homo sapien
catatccaaggtgggttctatctcc

SEQ ID NO: 3451392 - DNA, 25 bp, Homo sapien
gggttcaaactattgtcctgcctca

SEQ ID NO: 3451393 - DNA, 25 bp, Homo sapien
caaactattgtcctgcctcagcctc

SEQ ID NO: 3451394 - DNA, 25 bp, Homo sapien
tggagtgcaatagagtgcaatggca

SEQ ID NO: 3451395 - DNA, 25 bp, Homo sapien
tgatctcagctcacctccgcctcct

SEQ ID NO: 3451396 - DNA, 25 bp, Homo sapien
acatcttatattggtagcaggcgag

SEQ ID NO: 3451397 - DNA, 25 bp, Homo sapien
cacatcttatattggtagcaggcga

SEQ ID NO: 3451398 - DNA, 25 bp, Homo sapien
catcttatattggtagcaggcgaga

SEQ ID NO: 3451399 - DNA, 25 bp, Homo sapien
gcacatcttatattggtagcaggcg

SEQ ID NO: 3451400 - DNA, 25 bp, Homo sapien
gtggctactgttccttgtaagtatt

SEQ ID NO: 3451401 - DNA, 25 bp, Homo sapien
gaaaggagcaccaaacctcaccttg

SEQ ID NO: 3451402 - DNA, 25 bp, Homo sapien
aacctcaccttggacccaggaccat

SEQ ID NO: 3451403 - DNA, 25 bp, Homo sapien
ggctactgttccttgtaagtattgc

SEQ ID NO: 3451404 - DNA, 25 bp, Homo sapien
cagtgaccagcagaagtggtatgtc

SEQ ID NO: 3451405 - DNA, 25 bp, Homo sapien
ggagtactgggtaagtatccagtga

SEQ ID NO: 3451406 - DNA, 25 bp, Homo sapien
agtactgggtaagtatccagtgacc

SEQ ID NO: 3451407 - DNA, 25 bp, Homo sapien
gtgaccagcagaagtggtatgtcat

SEQ ID NO: 3451408 - DNA, 25 bp, Homo sapien
ttgtcagaagtggagccaaagccat

SEQ ID NO: 3451409 - DNA, 25 bp, Homo sapien
ctttgtgcaggttccatgctagtct

SEQ ID NO: 3451410 - DNA, 25 bp, Homo sapien
tgtgcaggttccatgctagtctctg

SEQ ID NO: 3451411 - DNA, 25 bp, Homo sapien
atatatgtgatgccaaaatgagcac

SEQ ID NO: 3451412 - DNA, 25 bp, Homo sapien
gtgcaggttccatgctagtctctgt

SEQ ID NO: 3451413 - DNA, 25 bp, Homo sapien
aagtgcaatccaagtgttccctagg

SEQ ID NO: 3451414 - DNA, 25 bp, Homo sapien
tgcaatccaagtgttccctaggtcc

SEQ ID NO: 3451415 - DNA, 25 bp, Homo sapien
tccaagtgttccctaggtcccaaca

SEQ ID NO: 3451416 - DNA, 25 bp, Homo sapien
caatccaagtgttccctaggtccca

SEQ ID NO: 3451417 - DNA, 25 bp, Homo sapien
aaagtaggaagcagtgtaaagcata

SEQ ID NO: 3451418 - DNA, 25 bp, Homo sapien
gcagtgtaaagcatataaagtcttc

SEQ ID NO: 3451419 - DNA, 25 bp, Homo sapien
gtgtaaagcatataaagtcttctct

SEQ ID NO: 3451420 - DNA, 25 bp, Homo sapien
taggaagcagtgtaaagcatataaa

SEQ ID NO: 3451421 - DNA, 25 bp, Homo sapien
gataacaggcacagcatgtacttgc

SEQ ID NO: 3451422 - DNA, 25 bp, Homo sapien
cccatttggataacaggcacagcat

SEQ ID NO: 3451423 - DNA, 25 bp, Homo sapien
caggatattgcagctataaggatct

SEQ ID NO: 3451424 - DNA, 25 bp, Homo sapien
gctgatgcccatttggataacaggc

SEQ ID NO: 3451425 - DNA, 25 bp, Homo sapien
tgtggggtccctgacctccaagttc

SEQ ID NO: 3451426 - DNA, 25 bp, Homo sapien
ggttctccaagtgaaagccagcaat

SEQ ID NO: 3451427 - DNA, 25 bp, Homo sapien
gatactgcaagttctttctagcagc

SEQ ID NO: 3451428 - DNA, 25 bp, Homo sapien
gcaatgtatgtctgccactcagaca

SEQ ID NO: 3451429 - DNA, 25 bp, Homo sapien
tagcaccagttaaacgacatattct

SEQ ID NO: 3451430 - DNA, 25 bp, Homo sapien
gaaaatttaaatgcactgttgacat

SEQ ID NO: 3451431 - DNA, 25 bp, Homo sapien
atttcctctctgcaggaaaatttaa

SEQ ID NO: 3451432 - DNA, 25 bp, Homo sapien
caggaaaatttaaatgcactgttga

SEQ ID NO: 3451433 - DNA, 25 bp, Homo sapien
ttcctctctgcaggaaaatttaaat

SEQ ID NO: 3451434 - DNA, 25 bp, Homo sapien
ctccttgaaaacagcttcctgagca

SEQ ID NO: 3451435 - DNA, 25 bp, Homo sapien
ctagtcctggatctccttgaaaaca

SEQ ID NO: 3451436 - DNA, 25 bp, Homo sapien
ttgaaaacagcttcctgagcattgc

SEQ ID NO: 3451437 - DNA, 25 bp, Homo sapien
ccttgaaaacagcttcctgagcatt

SEQ ID NO: 3451438 - DNA, 25 bp, Homo sapien
attccatttctttgacaccttgcac

SEQ ID NO: 3451439 - DNA, 25 bp, Homo sapien
atgattccatttctttgacaccttg

SEQ ID NO: 3451440 - DNA, 25 bp, Homo sapien
ctatgattccatttctttgacacct

SEQ ID NO: 3451441 - DNA, 25 bp, Homo sapien
gattccatttctttgacaccttgca

SEQ ID NO: 3451442 - DNA, 25 bp, Homo sapien
caatagttattgagaactttgtact

SEQ ID NO: 3451443 - DNA, 25 bp, Homo sapien
aatagttattgagaactttgtactt

SEQ ID NO: 3451444 - DNA, 25 bp, Homo sapien
atagttattgagaactttgtacttt

SEQ ID NO: 3451445 - DNA, 25 bp, Homo sapien
cctcataaattcctttatcatgtaa

SEQ ID NO: 3451446 - DNA, 25 bp, Homo sapien
gacataaatcacctcaacagaactg

SEQ ID NO: 3451447 - DNA, 25 bp, Homo sapien
tgtatcctcctcttataacgacata

SEQ ID NO: 3451448 - DNA, 25 bp, Homo sapien
gccaccatgctcctcataaattcct

SEQ ID NO: 3451449 - DNA, 25 bp, Homo sapien
ctagtgcagcatttcacaggacaag

SEQ ID NO: 3451450 - DNA, 25 bp, Homo sapien
gcatttcacaggacaagggctttct

SEQ ID NO: 3451451 - DNA, 25 bp, Homo sapien
taaacacaggatgtccaaactcagt

SEQ ID NO: 3451452 - DNA, 25 bp, Homo sapien
gcttaaacacaggatgtccaaactc

SEQ ID NO: 3451453 - DNA, 25 bp, Homo sapien
cacttgatggcttcgtgagcggaag

SEQ ID NO: 3451454 - DNA, 25 bp, Homo sapien
gatgtaggtttatgtatggatggca

SEQ ID NO: 3451455 - DNA, 25 bp, Homo sapien
catccaccataagagttcaaagaag

SEQ ID NO: 3451456 - DNA, 25 bp, Homo sapien
tcaaagaagatagtatgggaaaata

SEQ ID NO: 3451457 - DNA, 25 bp, Homo sapien
tatacccctgtaatgtctttaaagc

SEQ ID NO: 3451458 - DNA, 25 bp, Homo sapien
caaggtgccaggtatttacaatcgc

SEQ ID NO: 3451459 - DNA, 25 bp, Homo sapien
aacttaaatcagtctacctccattc

SEQ ID NO: 3451460 - DNA, 25 bp, Homo sapien
tacaatcgcaacctagaaatattat

SEQ ID NO: 3451461 - DNA, 25 bp, Homo sapien
gcttcaccatcaacacccaaagctg

SEQ ID NO: 3451462 - DNA, 25 bp, Homo sapien
gctgaaattctatttaaactattcc

SEQ ID NO: 3451463 - DNA, 25 bp, Homo sapien
tcagggaaaaagcattcctgcttca

SEQ ID NO: 3451464 - DNA, 25 bp, Homo sapien
ggaaaaagcattcctgcttcaccat

SEQ ID NO: 3451465 - DNA, 25 bp, Homo sapien
aaaaccatcattgtacttcaagaac

SEQ ID NO: 3451466 - DNA, 25 bp, Homo sapien
aaccatcattgtacttcaagaacac

SEQ ID NO: 3451467 - DNA, 25 bp, Homo sapien
tattgctacatggactataaccatg

SEQ ID NO: 3451468 - DNA, 25 bp, Homo sapien
atcattgtacttcaagaacactaat

SEQ ID NO: 3451469 - DNA, 25 bp, Homo sapien
gctcctgatttgaacagttggaaaa

SEQ ID NO: 3451470 - DNA, 25 bp, Homo sapien
caggagtctttctggagtggaacca

SEQ ID NO: 3451471 - DNA, 25 bp, Homo sapien
agcaaggtcttgtgggaacactacc

SEQ ID NO: 3451472 - DNA, 25 bp, Homo sapien
taccttatagcagttccaggaagct

SEQ ID NO: 3451473 - DNA, 25 bp, Homo sapien
cattatactttataagcagtgcttg

SEQ ID NO: 3451474 - DNA, 25 bp, Homo sapien
tcagacatacttctaatgagtgtag

SEQ ID NO: 3451475 - DNA, 25 bp, Homo sapien
tttgctttggcttcttgcagttaca

SEQ ID NO: 3451476 - DNA, 25 bp, Homo sapien
cagtgcttgtttagacttagtcaca

SEQ ID NO: 3451477 - DNA, 25 bp, Homo sapien
gaccagaggcttgttgatagaagtc

SEQ ID NO: 3451478 - DNA, 25 bp, Homo sapien
tatggatgtccctgtttgacgacca

SEQ ID NO: 3451479 - DNA, 25 bp, Homo sapien
cattgatgttcatcactggtatgga

SEQ ID NO: 3451480 - DNA, 25 bp, Homo sapien
tgtttgacgaccagaggcttgttga

SEQ ID NO: 3451481 - DNA, 25 bp, Homo sapien
gaggaatccatagtactgtttcaac

SEQ ID NO: 3451482 - DNA, 25 bp, Homo sapien
gccctttggtttgctgggaggaatc

SEQ ID NO: 3451483 - DNA, 25 bp, Homo sapien
caacgctctatggtggcgaaagtca

SEQ ID NO: 3451484 - DNA, 25 bp, Homo sapien
cgaaagtcatgtttatcagggccct

SEQ ID NO: 3451485 - DNA, 25 bp, Homo sapien
ctatagcacttcctgtggtgcaaag

SEQ ID NO: 3451486 - DNA, 25 bp, Homo sapien
ttacatcgccactgttctgagttga

SEQ ID NO: 3451487 - DNA, 25 bp, Homo sapien
tgttctgagttgatatacaacctca

SEQ ID NO: 3451488 - DNA, 25 bp, Homo sapien
agtaagccaatagaggtccacaggg

SEQ ID NO: 3451489 - DNA, 25 bp, Homo sapien
tcagtaagccaatagaggtccacag

SEQ ID NO: 3451490 - DNA, 25 bp, Homo sapien
aaatgtaaggtgggcgtaactatgg

SEQ ID NO: 3451491 - DNA, 25 bp, Homo sapien
taactatggaggcaccattactaag

SEQ ID NO: 3451492 - DNA, 25 bp, Homo sapien
gtgggcgtaactatggaggcaccat

SEQ ID NO: 3451493 - DNA, 25 bp, Homo sapien
ggaggcaccattactaagaggaagg

SEQ ID NO: 3451494 - DNA, 25 bp, Homo sapien
ttattgctcctcatcccctaagagc

SEQ ID NO: 3451495 - DNA, 25 bp, Homo sapien
tgtttccagcagtgtggaaggagca

SEQ ID NO: 3451496 - DNA, 25 bp, Homo sapien
cccctaagagcagcgctaaacctgg

SEQ ID NO: 3451497 - DNA, 25 bp, Homo sapien
tcttgaacgtttaccagaagagcag

SEQ ID NO: 3451498 - DNA, 25 bp, Homo sapien
aatttcatcctcagaagcagcacca

SEQ ID NO: 3451499 - DNA, 25 bp, Homo sapien
agcagcaccaaaatcctggatcatg

SEQ ID NO: 3451500 - DNA, 25 bp, Homo sapien
ctggaactgggacatggagagagca

SEQ ID NO: 3451501 - DNA, 25 bp, Homo sapien
ggagagagcaaacaatttcatcctc

SEQ ID NO: 3451502 - DNA, 25 bp, Homo sapien
ggtaatgaggcactcccttcaggga

SEQ ID NO: 3451503 - DNA, 25 bp, Homo sapien
gatgatcctgagaggagagcttctt

SEQ ID NO: 3451504 - DNA, 25 bp, Homo sapien
catcaccaaatacccagacaaggag

SEQ ID NO: 3451505 - DNA, 25 bp, Homo sapien
cattttcttgtgagaaagttacagg

SEQ ID NO: 3451506 - DNA, 25 bp, Homo sapien
aagtgactctaccagtgactggacc

SEQ ID NO: 3451507 - DNA, 25 bp, Homo sapien
agtgactctaccagtgactggaccc

SEQ ID NO: 3451508 - DNA, 25 bp, Homo sapien
cggtgccatgactcttggtgaccag

SEQ ID NO: 3451509 - DNA, 25 bp, Homo sapien
gactcttggtgaccagattgaaaat

SEQ ID NO: 3451510 - DNA, 25 bp, Homo sapien
catgactcttggtgaccagattgaa

SEQ ID NO: 3451511 - DNA, 25 bp, Homo sapien
tgccatgactcttggtgaccagatt

SEQ ID NO: 3451512 - DNA, 25 bp, Homo sapien
ttctggtggctgtgtgatcgtcagc

SEQ ID NO: 3451513 - DNA, 25 bp, Homo sapien
ggtcacagtctaaacatttctcctc

SEQ ID NO: 3451514 - DNA, 25 bp, Homo sapien
agcttcattaatcagtaggtcacag

SEQ ID NO: 3451515 - DNA, 25 bp, Homo sapien
ggctgtgtgatcgtcagcttcatta

SEQ ID NO: 3451516 - DNA, 25 bp, Homo sapien
tgctgctggccttatgtcctgacac

SEQ ID NO: 3451517 - DNA, 25 bp, Homo sapien
tccagtgtggtgtcttttcctgctg

SEQ ID NO: 3451518 - DNA, 25 bp, Homo sapien
cacaaatgctgaaagttacttcctc

SEQ ID NO: 3451519 - DNA, 25 bp, Homo sapien
tatgtcctgacacaaatgctgaaag

SEQ ID NO: 3451520 - DNA, 25 bp, Homo sapien
tcaacattgcaattgcgatgtggtc

SEQ ID NO: 3451521 - DNA, 25 bp, Homo sapien
gatgtggtctggaaccaactgctcc

SEQ ID NO: 3451522 - DNA, 25 bp, Homo sapien
tgcaattgcgatgtggtctggaacc

SEQ ID NO: 3451523 - DNA, 25 bp, Homo sapien
taaaaatcaacattgcaattgcgat

SEQ ID NO: 3451524 - DNA, 25 bp, Homo sapien
aggtaggtcaagttcggtgctggca

SEQ ID NO: 3451525 - DNA, 25 bp, Homo sapien
ggtcaagttcggtgctggcattcct

SEQ ID NO: 3451526 - DNA, 25 bp, Homo sapien
tgttataagcaaggtaggtcaagtt

SEQ ID NO: 3451527 - DNA, 25 bp, Homo sapien
ttgttataagcaaggtaggtcaagt

SEQ ID NO: 3451528 - DNA, 25 bp, Homo sapien
tctctccagtggtacagtgaagttt

SEQ ID NO: 3451529 - DNA, 25 bp, Homo sapien
gttcctcttagtgtaagtgtctctc

SEQ ID NO: 3451530 - DNA, 25 bp, Homo sapien
ttctaacttttgatcagtgttcctc

SEQ ID NO: 3451531 - DNA, 25 bp, Homo sapien
cagggaagaaaacgtctccacttct

SEQ ID NO: 3451532 - DNA, 25 bp, Homo sapien
ctgtgagttgatcacaagaggaaat

SEQ ID NO: 3451533 - DNA, 25 bp, Homo sapien
tgtgagttgatcacaagaggaaatc

SEQ ID NO: 3451534 - DNA, 25 bp, Homo sapien
agccatatgaagacaacagcaaagt

SEQ ID NO: 3451535 - DNA, 25 bp, Homo sapien
cattttcttgtagtgacacctccgc

SEQ ID NO: 3451536 - DNA, 25 bp, Homo sapien
catagtgacagatgggctcccagag

SEQ ID NO: 3451537 - DNA, 25 bp, Homo sapien
caaagtgaccctgaccattttcttg

SEQ ID NO: 3451538 - DNA, 25 bp, Homo sapien
ctgaatcaagtcttcttgcactcac

SEQ ID NO: 3451539 - DNA, 25 bp, Homo sapien
tagactgaatcaagtcttcttgcac

SEQ ID NO: 3451540 - DNA, 25 bp, Homo sapien
tcagggtagactgaatcaagtcttc

SEQ ID NO: 3451541 - DNA, 25 bp, Homo sapien
aagaccctatttcagggtagactga

SEQ ID NO: 3451542 - DNA, 25 bp, Homo sapien
tggccctgacagaggtctgcccata

SEQ ID NO: 3451543 - DNA, 25 bp, Homo sapien
tgctgcaagcctgttaaatgctggc

SEQ ID NO: 3451544 - DNA, 25 bp, Homo sapien
cacacatggagctagaagatgaaca

SEQ ID NO: 3451545 - DNA, 25 bp, Homo sapien
tatttggatctgtgagggaaatgct

SEQ ID NO: 3451546 - DNA, 25 bp, Homo sapien
aatgtttagctagggtgatgagacc

SEQ ID NO: 3451547 - DNA, 25 bp, Homo sapien
tattctatccttggaaccactgtgc

SEQ ID NO: 3451548 - DNA, 25 bp, Homo sapien
gacaattgaccaaatcgaagggaga

SEQ ID NO: 3451549 - DNA, 25 bp, Homo sapien
gccatgcaatgaaccaccaaggagt

SEQ ID NO: 3451550 - DNA, 25 bp, Homo sapien
gtttcactgattgagtctcagaggt

SEQ ID NO: 3451551 - DNA, 25 bp, Homo sapien
ttctgtaaggctttagtaaaataga

SEQ ID NO: 3451552 - DNA, 25 bp, Homo sapien
actgattgagtctcagaggtgcttc

SEQ ID NO: 3451553 - DNA, 25 bp, Homo sapien
cgtggccttgggtttgtttcactga

SEQ ID NO: 3451554 - DNA, 25 bp, Homo sapien
cactagtgagaagggaggagagtaa

SEQ ID NO: 3451555 - DNA, 25 bp, Homo sapien
aagatgagtcaagtgcactagtgag

SEQ ID NO: 3451556 - DNA, 25 bp, Homo sapien
gtgagaagggaggagagtaaaacaa

SEQ ID NO: 3451557 - DNA, 25 bp, Homo sapien
acaatcagttaagataactcattac

SEQ ID NO: 3451558 - DNA, 25 bp, Homo sapien
aggtcttccaccctcactgacgaca

SEQ ID NO: 3451559 - DNA, 25 bp, Homo sapien
tgtggaccgctaggtcttccaccct

SEQ ID NO: 3451560 - DNA, 25 bp, Homo sapien
ctcactgacgacaccttctggcaag

SEQ ID NO: 3451561 - DNA, 25 bp, Homo sapien
ggttgtggaccgctaggtcttccac

SEQ ID NO: 3451562 - DNA, 25 bp, Homo sapien
gaggcctggggatgtgaacaacctg

SEQ ID NO: 3451563 - DNA, 25 bp, Homo sapien
ctgctcacagtcctcatttactgga

SEQ ID NO: 3451564 - DNA, 25 bp, Homo sapien
taaggacgccttgatgctttcttca

SEQ ID NO: 3451565 - DNA, 25 bp, Homo sapien
gaactttttctctgttaattcctgg

SEQ ID NO: 3451566 - DNA, 25 bp, Homo sapien
ttgttactgctactacactttgctc

SEQ ID NO: 3451567 - DNA, 25 bp, Homo sapien
agctgttctcaggatcactgggctc

SEQ ID NO: 3451568 - DNA, 25 bp, Homo sapien
ggatgtctggcttgcctgaagggag

SEQ ID NO: 3451569 - DNA, 25 bp, Homo sapien
tagactgcagtggacagtccccacc

SEQ ID NO: 3451570 - DNA, 25 bp, Homo sapien
gaactggaatgccttggggcgtgga

SEQ ID NO: 3451571 - DNA, 25 bp, Homo sapien
aaagtcctgtggttaacgccttcat

SEQ ID NO: 3451572 - DNA, 25 bp, Homo sapien
gggagtggctctgtaaggacgcctt

SEQ ID NO: 3451573 - DNA, 25 bp, Homo sapien
caggttgttcacatccccaggcctc

SEQ ID NO: 3451574 - DNA, 25 bp, Homo sapien
gagcccagtgatcctgagaacagct

SEQ ID NO: 3451575 - DNA, 25 bp, Homo sapien
ccaggaattaacagagaaaaagttc

SEQ ID NO: 3451576 - DNA, 25 bp, Homo sapien
ggtggggactgtccactgcagtcta

SEQ ID NO: 3451577 - DNA, 25 bp, Homo sapien
aaggcgtccttacagagccactccc

SEQ ID NO: 3451578 - DNA, 25 bp, Homo sapien
gagcaaagtgtagtagcagtaacaa

SEQ ID NO: 3451579 - DNA, 25 bp, Homo sapien
ctcccttcaggcaagccagacatcc

SEQ ID NO: 3451580 - DNA, 25 bp, Homo sapien
tgaagaaagcatcaaggcgtcctta

SEQ ID NO: 3451581 - DNA, 25 bp, Homo sapien
tccagtaaatgaggactgtgagcag

SEQ ID NO: 3451582 - DNA, 25 bp, Homo sapien
atgaaggcgttaaccacaggacttt

SEQ ID NO: 3451583 - DNA, 25 bp, Homo sapien
tccacgccccaaggcattccagttc

SEQ ID NO: 3451584 - DNA, 25 bp, Homo sapien
taagctttcatagctggtgaactca

SEQ ID NO: 3451585 - DNA, 25 bp, Homo sapien
cttaagctttcatagctggtgaact

SEQ ID NO: 3451586 - DNA, 25 bp, Homo sapien
ctttcatagctggtgaactcagttt

SEQ ID NO: 3451587 - DNA, 25 bp, Homo sapien
aagctttcatagctggtgaactcag

SEQ ID NO: 3451588 - DNA, 25 bp, Homo sapien
tattgaagtccctagcaagttcaca

SEQ ID NO: 3451589 - DNA, 25 bp, Homo sapien
tactattgaagtccctagcaagttc

SEQ ID NO: 3451590 - DNA, 25 bp, Homo sapien
ttactattgaagtccctagcaagtt

SEQ ID NO: 3451591 - DNA, 25 bp, Homo sapien
tgaagtccctagcaagttcacattg

SEQ ID NO: 3451592 - DNA, 25 bp, Homo sapien
ccagtccagtagaggatacacaaac

SEQ ID NO: 3451593 - DNA, 25 bp, Homo sapien
gaaagctgaactggtcactcttcca

SEQ ID NO: 3451594 - DNA, 25 bp, Homo sapien
tcccatgggaggtgatcactgaaga

SEQ ID NO: 3451595 - DNA, 25 bp, Homo sapien
catactgaccagtgggtaagtgcca

SEQ ID NO: 3451596 - DNA, 25 bp, Homo sapien
ggccacatttgaagcgcccttagat

SEQ ID NO: 3451597 - DNA, 25 bp, Homo sapien
taccgaggtattgatttcttgagaa

SEQ ID NO: 3451598 - DNA, 25 bp, Homo sapien
cccttagatttgtggatgacagtcc

SEQ ID NO: 3451599 - DNA, 25 bp, Homo sapien
tccatctacttcactgctaccgagg

SEQ ID NO: 3451600 - DNA, 25 bp, Homo sapien
acttggggtgtaaatgtctgactgc

SEQ ID NO: 3451601 - DNA, 25 bp, Homo sapien
aggggtatgctagttggtgtctctt

SEQ ID NO: 3451602 - DNA, 25 bp, Homo sapien
tatgctagttggtgtctcttgagtc

SEQ ID NO: 3451603 - DNA, 25 bp, Homo sapien
ttgacttggggtgtaaatgtctgac

SEQ ID NO: 3451604 - DNA, 25 bp, Homo sapien
tacttgtaggcctgtttccatgagt

SEQ ID NO: 3451605 - DNA, 25 bp, Homo sapien
tctgccttgattctatctgagaaaa

SEQ ID NO: 3451606 - DNA, 25 bp, Homo sapien
tgtcttgtgcccagttggttctgct

SEQ ID NO: 3451607 - DNA, 25 bp, Homo sapien
tcaaaaaatatgtcttgtgcccagt

SEQ ID NO: 3451608 - DNA, 25 bp, Homo sapien
agcttccctgccaatcagtttgtaa

SEQ ID NO: 3451609 - DNA, 25 bp, Homo sapien
gaactgttgcagcagttgcctcctg

SEQ ID NO: 3451610 - DNA, 25 bp, Homo sapien
cagtttgtaatcgacagtggtgata

SEQ ID NO: 3451611 - DNA, 25 bp, Homo sapien
cggaactgttgcagcagttgcctcc

SEQ ID NO: 3451612 - DNA, 25 bp, Homo sapien
gatgagaagacatcatgcgggcttc

SEQ ID NO: 3451613 - DNA, 25 bp, Homo sapien
cataacatggagatgagaagacatc

SEQ ID NO: 3451614 - DNA, 25 bp, Homo sapien
catagccataacatggagatgagaa

SEQ ID NO: 3451615 - DNA, 25 bp, Homo sapien
tgcgggcttcagtaatctgacctag

SEQ ID NO: 3451616 - DNA, 25 bp, Homo sapien
cagtgaattgggtgaaagctaggcc

SEQ ID NO: 3451617 - DNA, 25 bp, Homo sapien
tctaatgctcagtggtaacctgtct

SEQ ID NO: 3451618 - DNA, 25 bp, Homo sapien
cccaaaggccctgttagctgaatta

SEQ ID NO: 3451619 - DNA, 25 bp, Homo sapien
gaattatagattggacagcaggcac

SEQ ID NO: 3451620 - DNA, 25 bp, Homo sapien
gtatagcaacttggagcagcagaag

SEQ ID NO: 3451621 - DNA, 25 bp, Homo sapien
ggagactgtatagcaacttggagca

SEQ ID NO: 3451622 - DNA, 25 bp, Homo sapien
gactgtatagcaacttggagcagca

SEQ ID NO: 3451623 - DNA, 25 bp, Homo sapien
gcagcagaagttggaggaccatggc

SEQ ID NO: 3451624 - DNA, 25 bp, Homo sapien
actaattcatatgcctggtaggtgg

SEQ ID NO: 3451625 - DNA, 25 bp, Homo sapien
tgactaattcatatgcctggtaggt

SEQ ID NO: 3451626 - DNA, 25 bp, Homo sapien
taattcatatgcctggtaggtgggc

SEQ ID NO: 3451627 - DNA, 25 bp, Homo sapien
aattcatatgcctggtaggtgggca

SEQ ID NO: 3451628 - DNA, 25 bp, Homo sapien
tctggaagatggtcagctatgaagt

SEQ ID NO: 3451629 - DNA, 25 bp, Homo sapien
tatacctttcaatcggccactggcc

SEQ ID NO: 3451630 - DNA, 25 bp, Homo sapien
gaagcttacaaatagatttccatga

SEQ ID NO: 3451631 - DNA, 25 bp, Homo sapien
gaagtaatagagtttgcttaatcat

SEQ ID NO: 3451632 - DNA, 25 bp, Homo sapien
tgttgaatgactacaagtggtttgc

SEQ ID NO: 3451633 - DNA, 25 bp, Homo sapien
gaagatgaccggaattgacaccact

SEQ ID NO: 3451634 - DNA, 25 bp, Homo sapien
tcttcccaagagtagtagtagttgg

SEQ ID NO: 3451635 - DNA, 25 bp, Homo sapien
aagtagtggtgtaccttcagaagct

SEQ ID NO: 3451636 - DNA, 25 bp, Homo sapien
ccagactggaatgcatccaagtagc

SEQ ID NO: 3451637 - DNA, 25 bp, Homo sapien
tcatgtttcataggattgcttgaca

SEQ ID NO: 3451638 - DNA, 25 bp, Homo sapien
tctcatgttaagtggctgttcatat

SEQ ID NO: 3451639 - DNA, 25 bp, Homo sapien
gactacaggatccaacactgcagca

SEQ ID NO: 3451640 - DNA, 25 bp, Homo sapien
tctatgaggtagcagagcaaaacac

SEQ ID NO: 3451641 - DNA, 25 bp, Homo sapien
ttacactgaaattatatctccttta

SEQ ID NO: 3451642 - DNA, 25 bp, Homo sapien
ctgaaattatatctcctttatctgg

SEQ ID NO: 3451643 - DNA, 25 bp, Homo sapien
aattatatctcctttatctggcact

SEQ ID NO: 3451644 - DNA, 25 bp, Homo sapien
tatatctcctttatctggcactgag

SEQ ID NO: 3451645 - DNA, 25 bp, Homo sapien
tacagatggatgctactacactcag

SEQ ID NO: 3451646 - DNA, 25 bp, Homo sapien
caaggctggacaggctacaatgcag

SEQ ID NO: 3451647 - DNA, 25 bp, Homo sapien
gaaaccttagcatcttgcaatacag

SEQ ID NO: 3451648 - DNA, 25 bp, Homo sapien
tgtataggatactgtgaagcagagg

SEQ ID NO: 3451649 - DNA, 25 bp, Homo sapien
cacattcttggaagtaaaactctcc

SEQ ID NO: 3451650 - DNA, 25 bp, Homo sapien
cattcttggaagtaaaactctcctc

SEQ ID NO: 3451651 - DNA, 25 bp, Homo sapien
attcttggaagtaaaactctcctca

SEQ ID NO: 3451652 - DNA, 25 bp, Homo sapien
accacattcttggaagtaaaactct

SEQ ID NO: 3451653 - DNA, 25 bp, Homo sapien
aagcttgtcatcaagggaaatccca

SEQ ID NO: 3451654 - DNA, 25 bp, Homo sapien
tgggaagcttgtcatcaagggaaat

SEQ ID NO: 3451655 - DNA, 25 bp, Homo sapien
tcatcaagggaaatcccatcaccat

SEQ ID NO: 3451656 - DNA, 25 bp, Homo sapien
ttgtcatcaagggaaatcccatcac

SEQ ID NO: 3451657 - DNA, 25 bp, Homo sapien
taaatctggatgtcttaagcctcta

SEQ ID NO: 3451658 - DNA, 25 bp, Homo sapien
ccattactgtagagctatgcctcac

SEQ ID NO: 3451659 - DNA, 25 bp, Homo sapien
taagactcttttccccgtattgtga

SEQ ID NO: 3451660 - DNA, 25 bp, Homo sapien
gctcagagtctaaccaaatacaagt

SEQ ID NO: 3451661 - DNA, 25 bp, Homo sapien
tcactaaggcatgcaaaccaatttc

SEQ ID NO: 3451662 - DNA, 25 bp, Homo sapien
tagttttgatttacgcccagacttg

SEQ ID NO: 3451663 - DNA, 25 bp, Homo sapien
gctactgaaagtgtggccggtcgct

SEQ ID NO: 3451664 - DNA, 25 bp, Homo sapien
gatcttctggtttagtgacttcctc

SEQ ID NO: 3451665 - DNA, 25 bp, Homo sapien
tgaaaaccactagtttaggaggcaa

SEQ ID NO: 3451666 - DNA, 25 bp, Homo sapien
gagaccttcgtaaaatgccaaggca

SEQ ID NO: 3451667 - DNA, 25 bp, Homo sapien
taggaggcaattgtatcagcaggta

SEQ ID NO: 3451668 - DNA, 25 bp, Homo sapien
gagggtgctccttctagcatgtggc

SEQ ID NO: 3451669 - DNA, 25 bp, Homo sapien
cctcatggttgtgggactgtggtcc

SEQ ID NO: 3451670 - DNA, 25 bp, Homo sapien
gctaaaatccaggtagtatccaggg

SEQ ID NO: 3451671 - DNA, 25 bp, Homo sapien
tcatctgggacgtatggtcttcttc

SEQ ID NO: 3451672 - DNA, 25 bp, Homo sapien
aatggtgccttggtaatccttgtgc

SEQ ID NO: 3451673 - DNA, 25 bp, Homo sapien
cttgcagaagttagtccaaagacag

SEQ ID NO: 3451674 - DNA, 25 bp, Homo sapien
ggaatcctgtccccaactcattgct

SEQ ID NO: 3451675 - DNA, 25 bp, Homo sapien
tccaaagacagattgtgaaatcttc

SEQ ID NO: 3451676 - DNA, 25 bp, Homo sapien
ttctgagacagagggcagcaatttc

SEQ ID NO: 3451677 - DNA, 25 bp, Homo sapien
cccatgaacgggtaaagctgtactc

SEQ ID NO: 3451678 - DNA, 25 bp, Homo sapien
ctgcaacatatttcccatgaacggg

SEQ ID NO: 3451679 - DNA, 25 bp, Homo sapien
tttgctctgcaacatatttcccatg

SEQ ID NO: 3451680 - DNA, 25 bp, Homo sapien
gcaacatatttcccatgaacgggta

SEQ ID NO: 3451681 - DNA, 25 bp, Homo sapien
gcaatggtgttgaaaggtatggctt

SEQ ID NO: 3451682 - DNA, 25 bp, Homo sapien
tgatcatgctggcactctgttgttg

SEQ ID NO: 3451683 - DNA, 25 bp, Homo sapien
tctctttctaccattggaatataca

SEQ ID NO: 3451684 - DNA, 25 bp, Homo sapien
taattagattatgaggggaaacctc

SEQ ID NO: 3451685 - DNA, 25 bp, Homo sapien
tctatatcctaaagttgccacaggc

SEQ ID NO: 3451686 - DNA, 25 bp, Homo sapien
ccaattgtagatgctatagggcact

SEQ ID NO: 3451687 - DNA, 25 bp, Homo sapien
ccctttataggaggcagagtatgcc

SEQ ID NO: 3451688 - DNA, 25 bp, Homo sapien
ttacaattttggacaccgcactaag

SEQ ID NO: 3451689 - DNA, 25 bp, Homo sapien
atggtgatggtgatctgatggcttt

SEQ ID NO: 3451690 - DNA, 25 bp, Homo sapien
ccatgctcagcccaagatgactttt

SEQ ID NO: 3451691 - DNA, 25 bp, Homo sapien
cccaagatgactttttatggttgaa

SEQ ID NO: 3451692 - DNA, 25 bp, Homo sapien
tgtcaaaggtcaagaaagttccagg

SEQ ID NO: 3451693 - DNA, 25 bp, Homo sapien
gttagtgaaagagtgagcatacctg

SEQ ID NO: 3451694 - DNA, 25 bp, Homo sapien
tcccttatgcacatctgacaatgtc

SEQ ID NO: 3451695 - DNA, 25 bp, Homo sapien
cagtttatccgtcgtccttcatgtt

SEQ ID NO: 3451696 - DNA, 25 bp, Homo sapien
gacaatgtctctcaaggttagtgaa

SEQ ID NO: 3451697 - DNA, 25 bp, Homo sapien
ttaataatactcttctgtcttggga

SEQ ID NO: 3451698 - DNA, 25 bp, Homo sapien
ataaagccatgagggagtgtattgg

SEQ ID NO: 3451699 - DNA, 25 bp, Homo sapien
gagtacagagttgatttataactcc

SEQ ID NO: 3451700 - DNA, 25 bp, Homo sapien
gctttagtgatggtcttttctcttc

SEQ ID NO: 3451701 - DNA, 25 bp, Homo sapien
taggcaccagagtattaggaacgtc

SEQ ID NO: 3451702 - DNA, 25 bp, Homo sapien
gatggcttcttagatgttcatggac

SEQ ID NO: 3451703 - DNA, 25 bp, Homo sapien
tatcgaagtttgtgtgaaagttcca

SEQ ID NO: 3451704 - DNA, 25 bp, Homo sapien
taggaacgtccttgtatatcagccg

SEQ ID NO: 3451705 - DNA, 25 bp, Homo sapien
tacactccctatagaagttttagaa

SEQ ID NO: 3451706 - DNA, 25 bp, Homo sapien
aaactctttgaacacacagcctctg

SEQ ID NO: 3451707 - DNA, 25 bp, Homo sapien
aatgctttttgcttacactccctat

SEQ ID NO: 3451708 - DNA, 25 bp, Homo sapien
agtatccccaggcttccaaaagagg

SEQ ID NO: 3451709 - DNA, 25 bp, Homo sapien
gctctgctggtggttgctgactgca

SEQ ID NO: 3451710 - DNA, 25 bp, Homo sapien
ctggctctgctggtggttgctgact

SEQ ID NO: 3451711 - DNA, 25 bp, Homo sapien
ctctgctggtggttgctgactgcat

SEQ ID NO: 3451712 - DNA, 25 bp, Homo sapien
ggctctgctggtggttgctgactgc

SEQ ID NO: 3451713 - DNA, 25 bp, Homo sapien
gactggcattcgtcctaggtaactg

SEQ ID NO: 3451714 - DNA, 25 bp, Homo sapien
tcctaggtaactgtgcattgtcccc

SEQ ID NO: 3451715 - DNA, 25 bp, Homo sapien
ggcattcgtcctaggtaactgtgca

SEQ ID NO: 3451716 - DNA, 25 bp, Homo sapien
ggtaaaatgagactggcattcgtcc

SEQ ID NO: 3451717 - DNA, 25 bp, Homo sapien
cactcagttctagttccaaagtaag

SEQ ID NO: 3451718 - DNA, 25 bp, Homo sapien
gtctcactcagttctagttccaaag

SEQ ID NO: 3451719 - DNA, 25 bp, Homo sapien
gctgccttgggatgtcagtctcact

SEQ ID NO: 3451720 - DNA, 25 bp, Homo sapien
ggatgtcagtctcactcagttctag

SEQ ID NO: 3451721 - DNA, 25 bp, Homo sapien
gcttgaaaaccgtaaatggatagga

SEQ ID NO: 3451722 - DNA, 25 bp, Homo sapien
acaggtggcttgaaaaccgtaaatg

SEQ ID NO: 3451723 - DNA, 25 bp, Homo sapien
aaagcccacagagatatttacatct

SEQ ID NO: 3451724 - DNA, 25 bp, Homo sapien
atctaatttgccctcttgctgtagc

SEQ ID NO: 3451725 - DNA, 25 bp, Homo sapien
ttaaagttcagttgacccagcctta

SEQ ID NO: 3451726 - DNA, 25 bp, Homo sapien
gaaaaatatgtgctgtgaggcagaa

SEQ ID NO: 3451727 - DNA, 25 bp, Homo sapien
gaggcagaagtatattttggcagag

SEQ ID NO: 3451728 - DNA, 25 bp, Homo sapien
tagtaataaatggaggaggtgtcct

SEQ ID NO: 3451729 - DNA, 25 bp, Homo sapien
cctttattttgagaacctgatgcac

SEQ ID NO: 3451730 - DNA, 25 bp, Homo sapien
gagaacctgatgcacaaagagctcc

SEQ ID NO: 3451731 - DNA, 25 bp, Homo sapien
catggccactctttaggaatgctgt

SEQ ID NO: 3451732 - DNA, 25 bp, Homo sapien
tgttgcgtttgcattgccaactaaa

SEQ ID NO: 3451733 - DNA, 25 bp, Homo sapien
ggcaccccttaatggaaacacgaga

SEQ ID NO: 3451734 - DNA, 25 bp, Homo sapien
agcatagtcgcctggttacggccca

SEQ ID NO: 3451735 - DNA, 25 bp, Homo sapien
tagtgctatctcatgacaaccgacg

SEQ ID NO: 3451736 - DNA, 25 bp, Homo sapien
cgaccatgacgacctttgccgaaat

SEQ ID NO: 3451737 - DNA, 25 bp, Homo sapien
tcttatccttctgataggagaaagg

SEQ ID NO: 3451738 - DNA, 25 bp, Homo sapien
catcctcccaatcaaatctcgtaaa

SEQ ID NO: 3451739 - DNA, 25 bp, Homo sapien
tctcgtaaataaactggcccatttc

SEQ ID NO: 3451740 - DNA, 25 bp, Homo sapien
ggagaaagggtgtagttggcaacca

SEQ ID NO: 3451741 - DNA, 25 bp, Homo sapien
ttttgcaacatgctatcatgttttg

SEQ ID NO: 3451742 - DNA, 25 bp, Homo sapien
gttttgcaacatgctatcatgtttt

SEQ ID NO: 3451743 - DNA, 25 bp, Homo sapien
tggggcatggctacaggtgattcca

SEQ ID NO: 3451744 - DNA, 25 bp, Homo sapien
ctatcatgttttggggcatggctac

SEQ ID NO: 3451745 - DNA, 25 bp, Homo sapien
cgttattcagatggtctggtgctct

SEQ ID NO: 3451746 - DNA, 25 bp, Homo sapien
tcacgttattcagatggtctggtgc

SEQ ID NO: 3451747 - DNA, 25 bp, Homo sapien
actttcacgttattcagatggtctg

SEQ ID NO: 3451748 - DNA, 25 bp, Homo sapien
ttcagatggtctggtgctctttctc

SEQ ID NO: 3451749 - DNA, 25 bp, Homo sapien
aaaggtattcacttgatgtatctcc

SEQ ID NO: 3451750 - DNA, 25 bp, Homo sapien
ttcacttgatgtatctccagcaaga

SEQ ID NO: 3451751 - DNA, 25 bp, Homo sapien
tatctccagcaagaatggtctgagt

SEQ ID NO: 3451752 - DNA, 25 bp, Homo sapien
tccagatctacaaaggtattcactt

SEQ ID NO: 3451753 - DNA, 25 bp, Homo sapien
gaggaaacgtggacacccaatgtta

SEQ ID NO: 3451754 - DNA, 25 bp, Homo sapien
catgggtgcgaagtatttgaaaaca

SEQ ID NO: 3451755 - DNA, 25 bp, Homo sapien
tacatcccctcacagcaaaagtttg

SEQ ID NO: 3451756 - DNA, 25 bp, Homo sapien
taaagtttaagatgcgtggctgcca

SEQ ID NO: 3451757 - DNA, 25 bp, Homo sapien
gtgcagaggtactatggattcaaag

SEQ ID NO: 3451758 - DNA, 25 bp, Homo sapien
cagggacacgggtatagccttttct

SEQ ID NO: 3451759 - DNA, 25 bp, Homo sapien
tggattcaaagtcagggacacgggt

SEQ ID NO: 3451760 - DNA, 25 bp, Homo sapien
tgggccacctgtgatagagtgcaga

SEQ ID NO: 3451761 - DNA, 25 bp, Homo sapien
tgtgagtcaaagagtaagtcatgga

SEQ ID NO: 3451762 - DNA, 25 bp, Homo sapien
gaatgtgtgagtcaaagagtaagtc

SEQ ID NO: 3451763 - DNA, 25 bp, Homo sapien
tcactggaatgtgtgagtcaaagag

SEQ ID NO: 3451764 - DNA, 25 bp, Homo sapien
gagtcaaagagtaagtcatggaagt

SEQ ID NO: 3451765 - DNA, 25 bp, Homo sapien
tctccatattccttatgtaattctt

SEQ ID NO: 3451766 - DNA, 25 bp, Homo sapien
ggctttttagaccatcaggaaagcc

SEQ ID NO: 3451767 - DNA, 25 bp, Homo sapien
ctcattctcccctcatgctgctgct

SEQ ID NO: 3451768 - DNA, 25 bp, Homo sapien
tgctgctgctgcacagaatgcttca

SEQ ID NO: 3451769 - DNA, 25 bp, Homo sapien
ggtccatcccctcattctcccctca

SEQ ID NO: 3451770 - DNA, 25 bp, Homo sapien
atcccctcattctcccctcatgctg

SEQ ID NO: 3451771 - DNA, 25 bp, Homo sapien
ttttgctcctcagtgtagttgccta

SEQ ID NO: 3451772 - DNA, 25 bp, Homo sapien
agttgcctactttcttccatgccag

SEQ ID NO: 3451773 - DNA, 25 bp, Homo sapien
tcagagaggtgggttggattttgat

SEQ ID NO: 3451774 - DNA, 25 bp, Homo sapien
ttctgataagtctcttcctcatttt

SEQ ID NO: 3451775 - DNA, 25 bp, Homo sapien
tgtcaatattagacagatcaacaag

SEQ ID NO: 3451776 - DNA, 25 bp, Homo sapien
ctgtcaatattagacagatcaacaa

SEQ ID NO: 3451777 - DNA, 25 bp, Homo sapien
aatattagacagatcaacaagacag

SEQ ID NO: 3451778 - DNA, 25 bp, Homo sapien
tcaatattagacagatcaacaagac

SEQ ID NO: 3451779 - DNA, 25 bp, Homo sapien
attagctaaccacatggctgattcc

SEQ ID NO: 3451780 - DNA, 25 bp, Homo sapien
tagctaaccacatggctgattcctt

SEQ ID NO: 3451781 - DNA, 25 bp, Homo sapien
gctttgctttcattagctaaccaca

SEQ ID NO: 3451782 - DNA, 25 bp, Homo sapien
ctttcattagctaaccacatggctg

SEQ ID NO: 3451783 - DNA, 25 bp, Homo sapien
taatgttgatccatgagctctcatc

SEQ ID NO: 3451784 - DNA, 25 bp, Homo sapien
ctactctttaatgttgatccatgag

SEQ ID NO: 3451785 - DNA, 25 bp, Homo sapien
tgttgatccatgagctctcatcact

SEQ ID NO: 3451786 - DNA, 25 bp, Homo sapien
tctttaatgttgatccatgagctct

SEQ ID NO: 3451787 - DNA, 25 bp, Homo sapien
actgagctctgggtaagttggcgca

SEQ ID NO: 3451788 - DNA, 25 bp, Homo sapien
ttggcgcatggtacccctggaagag

SEQ ID NO: 3451789 - DNA, 25 bp, Homo sapien
tgctgtaaatttgtaccactgagct

SEQ ID NO: 3451790 - DNA, 25 bp, Homo sapien
actgataggtgctgtaaatttgtac

SEQ ID NO: 3451791 - DNA, 25 bp, Homo sapien
aataactggcgttcagatgtcctca

SEQ ID NO: 3451792 - DNA, 25 bp, Homo sapien
ataactggcgttcagatgtcctcat

SEQ ID NO: 3451793 - DNA, 25 bp, Homo sapien
tgtaaataactggcgttcagatgtc

SEQ ID NO: 3451794 - DNA, 25 bp, Homo sapien
taaataactggcgttcagatgtcct

SEQ ID NO: 3451795 - DNA, 25 bp, Homo sapien
tcatttagaatcctggaatcatctg

SEQ ID NO: 3451796 - DNA, 25 bp, Homo sapien
caaccaaccaagtgagtagttttat

SEQ ID NO: 3451797 - DNA, 25 bp, Homo sapien
gcagcaggattcaaacaaccaacca

SEQ ID NO: 3451798 - DNA, 25 bp, Homo sapien
ctcatttagaatcctggaatcatct

SEQ ID NO: 3451799 - DNA, 25 bp, Homo sapien
ggttagggtatttacagtatccatc

SEQ ID NO: 3451800 - DNA, 25 bp, Homo sapien
agtctttatgcttcaagatgattta

SEQ ID NO: 3451801 - DNA, 25 bp, Homo sapien
taatgatcatgttagggttagggta

SEQ ID NO: 3451802 - DNA, 25 bp, Homo sapien
tatagagattctctcaatttacctt

SEQ ID NO: 3451803 - DNA, 25 bp, Homo sapien
tgtgctttattgtactacggctgag

SEQ ID NO: 3451804 - DNA, 25 bp, Homo sapien
gagggatgacactccctttgctgct

SEQ ID NO: 3451805 - DNA, 25 bp, Homo sapien
tacggctgagctgttaccgaagttg

SEQ ID NO: 3451806 - DNA, 25 bp, Homo sapien
gtcatctgggagctatgtcctagta

SEQ ID NO: 3451807 - DNA, 25 bp, Homo sapien
gggagtttgcttattaaatctcctg

SEQ ID NO: 3451808 - DNA, 25 bp, Homo sapien
tgtattggtgctcctttgtatgttg

SEQ ID NO: 3451809 - DNA, 25 bp, Homo sapien
ctctcctggtgtgtaaggtcaagac

SEQ ID NO: 3451810 - DNA, 25 bp, Homo sapien
gtgtgtaaggtcaagactttaagtc

SEQ ID NO: 3451811 - DNA, 25 bp, Homo sapien
ggagatctaatgtactgcatgagaa

SEQ ID NO: 3451812 - DNA, 25 bp, Homo sapien
tattgttggcggtggttttgtcata

SEQ ID NO: 3451813 - DNA, 25 bp, Homo sapien
ttttataagctgcacacaactgtct

SEQ ID NO: 3451814 - DNA, 25 bp, Homo sapien
taagcatcctggtgaatttcagtgt

SEQ ID NO: 3451815 - DNA, 25 bp, Homo sapien
acctgcacacttgcaaggaggccca

SEQ ID NO: 3451816 - DNA, 25 bp, Homo sapien
tgttcttacctcatagttcttacag

SEQ ID NO: 3451817 - DNA, 25 bp, Homo sapien
gcttcccggtatgcgaaagttcttc

SEQ ID NO: 3451818 - DNA, 25 bp, Homo sapien
gcagacaggccatataacctgcaca

SEQ ID NO: 3451819 - DNA, 25 bp, Homo sapien
atttctgcttcgtgtaccttctttt

SEQ ID NO: 3451820 - DNA, 25 bp, Homo sapien
taagtatccaacataggcaatgttg

SEQ ID NO: 3451821 - DNA, 25 bp, Homo sapien
attaagtatccaacataggcaatgt

SEQ ID NO: 3451822 - DNA, 25 bp, Homo sapien
tttctgatagcgactggccacagcg

SEQ ID NO: 3451823 - DNA, 25 bp, Homo sapien
agatgtgcttttctgatagcgactg

SEQ ID NO: 3451824 - DNA, 25 bp, Homo sapien
tctagcctcagacaaatggcccata

SEQ ID NO: 3451825 - DNA, 25 bp, Homo sapien
ttttgctcttaggtgtagtcttcac

SEQ ID NO: 3451826 - DNA, 25 bp, Homo sapien
tgcctctagcctcagacaaatggcc

SEQ ID NO: 3451827 - DNA, 25 bp, Homo sapien
ccaatggatgaccttggtaggttag

SEQ ID NO: 3451828 - DNA, 25 bp, Homo sapien
cttgattctcttagtggatttgatc

SEQ ID NO: 3451829 - DNA, 25 bp, Homo sapien
tgtgcagcagttcttgattctctta

SEQ ID NO: 3451830 - DNA, 25 bp, Homo sapien
ggacattggctatcaaaggtttctg

SEQ ID NO: 3451831 - DNA, 25 bp, Homo sapien
acttcttcttcgtattaggacattg

SEQ ID NO: 3451832 - DNA, 25 bp, Homo sapien
tgaatcagccctagtgaaagatgga

SEQ ID NO: 3451833 - DNA, 25 bp, Homo sapien
tggttctaaatagggttctggccgc

SEQ ID NO: 3451834 - DNA, 25 bp, Homo sapien
caaccaggctaagtgacgagtccaa

SEQ ID NO: 3451835 - DNA, 25 bp, Homo sapien
gaagaagcccaataaaacagccagc

SEQ ID NO: 3451836 - DNA, 25 bp, Homo sapien
caagtccattcacggaatctgacat

SEQ ID NO: 3451837 - DNA, 25 bp, Homo sapien
aaccaagtccattcacggaatctga

SEQ ID NO: 3451838 - DNA, 25 bp, Homo sapien
ccaagtccattcacggaatctgaca

SEQ ID NO: 3451839 - DNA, 25 bp, Homo sapien
aaaccaagtccattcacggaatctg

SEQ ID NO: 3451840 - DNA, 25 bp, Homo sapien
ctgcaattaacccttcaaatccagg

SEQ ID NO: 3451841 - DNA, 25 bp, Homo sapien
tcttctggtggtagcctgtcactgc

SEQ ID NO: 3451842 - DNA, 25 bp, Homo sapien
caaatccaggtgaatctattctaag

SEQ ID NO: 3451843 - DNA, 25 bp, Homo sapien
ttctaagtgtggttggtaatggcca

SEQ ID NO: 3451844 - DNA, 25 bp, Homo sapien
cacagaggaggtattatatctggtt

SEQ ID NO: 3451845 - DNA, 25 bp, Homo sapien
tcacagaggaggtattatatctggt

SEQ ID NO: 3451846 - DNA, 25 bp, Homo sapien
acagaggaggtattatatctggttt

SEQ ID NO: 3451847 - DNA, 25 bp, Homo sapien
gagagatgccggcaaatctgctgca

SEQ ID NO: 3451848 - DNA, 25 bp, Homo sapien
ttagatggtaagaatattgtgtgac

SEQ ID NO: 3451849 - DNA, 25 bp, Homo sapien
tgccggcaaatctgctgcagttgac

SEQ ID NO: 3451850 - DNA, 25 bp, Homo sapien
gttttgagagagatgccggcaaatc

SEQ ID NO: 3451851 - DNA, 25 bp, Homo sapien
tttttgctagagtaccaaggaccat

SEQ ID NO: 3451852 - DNA, 25 bp, Homo sapien
caaatataatctattccacactttt

SEQ ID NO: 3451853 - DNA, 25 bp, Homo sapien
cacttttttgctagagtaccaagga

SEQ ID NO: 3451854 - DNA, 25 bp, Homo sapien
ccacacttttttgctagagtaccaa

SEQ ID NO: 3451855 - DNA, 25 bp, Homo sapien
ctggtatagccgaactgccaaggat

SEQ ID NO: 3451856 - DNA, 25 bp, Homo sapien
tctccagacagctggtatagccgaa

SEQ ID NO: 3451857 - DNA, 25 bp, Homo sapien
gacagctggtatagccgaactgcca

SEQ ID NO: 3451858 - DNA, 25 bp, Homo sapien
tccagacagctggtatagccgaact

SEQ ID NO: 3451859 - DNA, 25 bp, Homo sapien
tggactggtgagaacttgtcaatag

SEQ ID NO: 3451860 - DNA, 25 bp, Homo sapien
taattggactggtgagaacttgtca

SEQ ID NO: 3451861 - DNA, 25 bp, Homo sapien
actggtgagaacttgtcaataggcc

SEQ ID NO: 3451862 - DNA, 25 bp, Homo sapien
aaataattggactggtgagaacttg

SEQ ID NO: 3451863 - DNA, 25 bp, Homo sapien
ttctctatcaattccagtcacacga

SEQ ID NO: 3451864 - DNA, 25 bp, Homo sapien
ctcggcacactcacaggcatacacc

SEQ ID NO: 3451865 - DNA, 25 bp, Homo sapien
caattccagtcacacgaccattttc

SEQ ID NO: 3451866 - DNA, 25 bp, Homo sapien
tcacacgaccattttctgactgaat

SEQ ID NO: 3451867 - DNA, 25 bp, Homo sapien
tcttggctgagacctatataatacc

SEQ ID NO: 3451868 - DNA, 25 bp, Homo sapien
gaattggctcgtatcccaccagtgg

SEQ ID NO: 3451869 - DNA, 25 bp, Homo sapien
tcctctagtcctcacaaggtctgca

SEQ ID NO: 3451870 - DNA, 25 bp, Homo sapien
caggaactggctaattggagtcaca

SEQ ID NO: 3451871 - DNA, 25 bp, Homo sapien
caagtggtgcattggacagaaggat

SEQ ID NO: 3451872 - DNA, 25 bp, Homo sapien
tctggaaactccacagcaggcagta

SEQ ID NO: 3451873 - DNA, 25 bp, Homo sapien
aaatggccagcggaggtctggaaac

SEQ ID NO: 3451874 - DNA, 25 bp, Homo sapien
ggatattctgacaggaacctctgcc

SEQ ID NO: 3451875 - DNA, 25 bp, Homo sapien
caagcagtgcatccattgacacata

SEQ ID NO: 3451876 - DNA, 25 bp, Homo sapien
tcccgccagtcccaatatggaatag

SEQ ID NO: 3451877 - DNA, 25 bp, Homo sapien
tgttcccaccgcaacaagaagagtc

SEQ ID NO: 3451878 - DNA, 25 bp, Homo sapien
agctggtgcttcatgggcaaaatca

SEQ ID NO: 3451879 - DNA, 25 bp, Homo sapien
gcaaaattctacatcagctgaagag

SEQ ID NO: 3451880 - DNA, 25 bp, Homo sapien
gattcatattgggtcaaactcaggc

SEQ ID NO: 3451881 - DNA, 25 bp, Homo sapien
gtccctcgggcgttccattgcataa

SEQ ID NO: 3451882 - DNA, 25 bp, Homo sapien
tggcagctttatccatggaaccaga

SEQ ID NO: 3451883 - DNA, 25 bp, Homo sapien
tgatgggtcacatggtggtgttatc

SEQ ID NO: 3451884 - DNA, 25 bp, Homo sapien
ggatgtcggactgaatatactgaga

SEQ ID NO: 3451885 - DNA, 25 bp, Homo sapien
tcccaatgggcatcttagcatagtg

SEQ ID NO: 3451886 - DNA, 25 bp, Homo sapien
gagaagtctcctccaatagtaagtt

SEQ ID NO: 3451887 - DNA, 25 bp, Homo sapien
cagcccagccaatatggagaaatcc

SEQ ID NO: 3451888 - DNA, 25 bp, Homo sapien
gaggctaaggtggtggatctcttga

SEQ ID NO: 3451889 - DNA, 25 bp, Homo sapien
accagcccagccaatatggagaaat

SEQ ID NO: 3451890 - DNA, 25 bp, Homo sapien
gcccagccaatatggagaaatccca

SEQ ID NO: 3451891 - DNA, 25 bp, Homo sapien
taaaagctggcagaaatttttcata

SEQ ID NO: 3451892 - DNA, 25 bp, Homo sapien
tttgataccttgaagttaggccagg

SEQ ID NO: 3451893 - DNA, 25 bp, Homo sapien
gcagtcctatgtatgcatcagacat

SEQ ID NO: 3451894 - DNA, 25 bp, Homo sapien
aaaatagtacaaatcattagtgtag

SEQ ID NO: 3451895 - DNA, 25 bp, Homo sapien
cactttgtaagtgagggacctcagg

SEQ ID NO: 3451896 - DNA, 25 bp, Homo sapien
gaatttggcttctatatagggctag

SEQ ID NO: 3451897 - DNA, 25 bp, Homo sapien
aaaagtcactctgtcattctgctgc

SEQ ID NO: 3451898 - DNA, 25 bp, Homo sapien
tcttcacaatagcatatgaggtagg

SEQ ID NO: 3451899 - DNA, 25 bp, Homo sapien
gaggcatccgctatcccagtaagtg

SEQ ID NO: 3451900 - DNA, 25 bp, Homo sapien
ttgagaggcatccgctatcccagta

SEQ ID NO: 3451901 - DNA, 25 bp, Homo sapien
tccgctatcccagtaagtggactag

SEQ ID NO: 3451902 - DNA, 25 bp, Homo sapien
ctatcccagtaagtggactagcaaa

SEQ ID NO: 3451903 - DNA, 25 bp, Homo sapien
gttccattcatatagatgtgcaagg

SEQ ID NO: 3451904 - DNA, 25 bp, Homo sapien
cattcatatagatgtgcaaggcatt

SEQ ID NO: 3451905 - DNA, 25 bp, Homo sapien
gaagataggatcgttggcagatccc

SEQ ID NO: 3451906 - DNA, 25 bp, Homo sapien
ccctgtacctgggacattgttccat

SEQ ID NO: 3451907 - DNA, 25 bp, Homo sapien
tcctggataatggtcactttcttat

SEQ ID NO: 3451908 - DNA, 25 bp, Homo sapien
cttatttgattttatgtccatgttc

SEQ ID NO: 3451909 - DNA, 25 bp, Homo sapien
tttcctggataatggtcactttctt

SEQ ID NO: 3451910 - DNA, 25 bp, Homo sapien
ggataatggtcactttcttatttga

SEQ ID NO: 3451911 - DNA, 25 bp, Homo sapien
tatgatcaatgcagaactaatggtg

SEQ ID NO: 3451912 - DNA, 25 bp, Homo sapien
gactctttccatgctcttcactatg

SEQ ID NO: 3451913 - DNA, 25 bp, Homo sapien
tcttcagaagtgtatccaacctgac

SEQ ID NO: 3451914 - DNA, 25 bp, Homo sapien
gttaggtcctagcaataaaactatg

SEQ ID NO: 3451915 - DNA, 25 bp, Homo sapien
catatctcagtcgaggtctctctga

SEQ ID NO: 3451916 - DNA, 25 bp, Homo sapien
catgcccgctctggaataatgcaaa

SEQ ID NO: 3451917 - DNA, 25 bp, Homo sapien
tatcaactgattgggacctctaaac

SEQ ID NO: 3451918 - DNA, 25 bp, Homo sapien
aatacttccaacacgctgacaaagg

SEQ ID NO: 3451919 - DNA, 25 bp, Homo sapien
tcttggagactcaaaagactggagt

SEQ ID NO: 3451920 - DNA, 25 bp, Homo sapien
cagcagagagtatatttcaactaca

SEQ ID NO: 3451921 - DNA, 25 bp, Homo sapien
caagatcttgctaggtaaactggac

SEQ ID NO: 3451922 - DNA, 25 bp, Homo sapien
tgtgtgctgggaattaccctgagca

SEQ ID NO: 3451923 - DNA, 25 bp, Homo sapien
tatgtcaggaaaaatgcaggacctg

SEQ ID NO: 3451924 - DNA, 25 bp, Homo sapien
tgacatttatcgaaggtgcaccatc

SEQ ID NO: 3451925 - DNA, 25 bp, Homo sapien
tggttctcgccataagcaggccgtg

SEQ ID NO: 3451926 - DNA, 25 bp, Homo sapien
ggacctggagctcaactgcctagta

SEQ ID NO: 3451927 - DNA, 25 bp, Homo sapien
ctggttggactgtttctgggctgcc

SEQ ID NO: 3451928 - DNA, 25 bp, Homo sapien
agggaagcaatctgctgttcattcc

SEQ ID NO: 3451929 - DNA, 25 bp, Homo sapien
cagggaagcaatctgctgttcattc

SEQ ID NO: 3451930 - DNA, 25 bp, Homo sapien
ttctggttggactgtttctgggctg

SEQ ID NO: 3451931 - DNA, 25 bp, Homo sapien
ctgacgtacaggagctgtgctgctt

SEQ ID NO: 3451932 - DNA, 25 bp, Homo sapien
gctgcttctttttctcttgggaaag

SEQ ID NO: 3451933 - DNA, 25 bp, Homo sapien
cttctttttctcttgggaaagcact

SEQ ID NO: 3451934 - DNA, 25 bp, Homo sapien
tgcttctttttctcttgggaaagca

SEQ ID NO: 3451935 - DNA, 25 bp, Homo sapien
ttgcttatttctactcgagtcttta

SEQ ID NO: 3451936 - DNA, 25 bp, Homo sapien
tttaatgtagtcattaataaccata

SEQ ID NO: 3451937 - DNA, 25 bp, Homo sapien
ctaaggctggtggttatgttattaa

SEQ ID NO: 3451938 - DNA, 25 bp, Homo sapien
ttctactcgagtctttactatttct

SEQ ID NO: 3451939 - DNA, 25 bp, Homo sapien
tattcctagcttgatgcatgtttgt

SEQ ID NO: 3451940 - DNA, 25 bp, Homo sapien
aatccaatttggctttgacataaac

SEQ ID NO: 3451941 - DNA, 25 bp, Homo sapien
ggccccatagagtaagtcaggaaat

SEQ ID NO: 3451942 - DNA, 25 bp, Homo sapien
gaaaggtactatctttttctgcacc

SEQ ID NO: 3451943 - DNA, 25 bp, Homo sapien
caactgtggccgatctcaattaact

SEQ ID NO: 3451944 - DNA, 25 bp, Homo sapien
acttggagcatctacctgggtttga

SEQ ID NO: 3451945 - DNA, 25 bp, Homo sapien
ccacactttaagagtagagattgtc

SEQ ID NO: 3451946 - DNA, 25 bp, Homo sapien
gaaaatcctgttacatagctaagaa

SEQ ID NO: 3451947 - DNA, 25 bp, Homo sapien
caccgagtgctggaagtagaaagcc

SEQ ID NO: 3451948 - DNA, 25 bp, Homo sapien
ggtcaataattcagcacagtacagt

SEQ ID NO: 3451949 - DNA, 25 bp, Homo sapien
agtggtgtcggtcaaggtgcccctt

SEQ ID NO: 3451950 - DNA, 25 bp, Homo sapien
gaagggcccttcatgccttgggaaa

SEQ ID NO: 3451951 - DNA, 25 bp, Homo sapien
tgcagaggaaaaggttattcagact

SEQ ID NO: 3451952 - DNA, 25 bp, Homo sapien
cagaggaaaaggttattcagactaa

SEQ ID NO: 3451953 - DNA, 25 bp, Homo sapien
ctgcagaggaaaaggttattcagac

SEQ ID NO: 3451954 - DNA, 25 bp, Homo sapien
gaggaaaaggttattcagactaaga

SEQ ID NO: 3451955 - DNA, 25 bp, Homo sapien
gaatcttgtagatagctatagtcat

SEQ ID NO: 3451956 - DNA, 25 bp, Homo sapien
tatgtccaatgggtgcattggcttc

SEQ ID NO: 3451957 - DNA, 25 bp, Homo sapien
gaaccatgtaggattcccggttatg

SEQ ID NO: 3451958 - DNA, 25 bp, Homo sapien
catagcccagatctttggatgaaat

SEQ ID NO: 3451959 - DNA, 25 bp, Homo sapien
aacattgtcgaagcataaagttttg

SEQ ID NO: 3451960 - DNA, 25 bp, Homo sapien
tcaggaataacattgtcgaagcata

SEQ ID NO: 3451961 - DNA, 25 bp, Homo sapien
taaattggtaacactagattcagca

SEQ ID NO: 3451962 - DNA, 25 bp, Homo sapien
aataaattggtaacactagattcag

SEQ ID NO: 3451963 - DNA, 25 bp, Homo sapien
tagcattttgtgcattggctacagt

SEQ ID NO: 3451964 - DNA, 25 bp, Homo sapien
tgttcttagtgatcttaagattttc

SEQ ID NO: 3451965 - DNA, 25 bp, Homo sapien
tgtgttagcattttgtgcattggct

SEQ ID NO: 3451966 - DNA, 25 bp, Homo sapien
tgttagcattttgtgcattggctac

SEQ ID NO: 3451967 - DNA, 25 bp, Homo sapien
catccaggaaattttgttgcctttg

SEQ ID NO: 3451968 - DNA, 25 bp, Homo sapien
tgtagtaaaaagtatccattgggac

SEQ ID NO: 3451969 - DNA, 25 bp, Homo sapien
ttctcccctggctcatccaggaaat

SEQ ID NO: 3451970 - DNA, 25 bp, Homo sapien
ctaatatgactcattgagcctcttc

SEQ ID NO: 3451971 - DNA, 25 bp, Homo sapien
cacagccaaacagagctattgaaca

SEQ ID NO: 3451972 - DNA, 25 bp, Homo sapien
catcaaattccattggcagaatggg

SEQ ID NO: 3451973 - DNA, 25 bp, Homo sapien
ggagaaggaagctctcaacagagtt

SEQ ID NO: 3451974 - DNA, 25 bp, Homo sapien
tactgtgaacagtgtttccccttct

SEQ ID NO: 3451975 - DNA, 25 bp, Homo sapien
tgagccccaatagtgcacctttttg

SEQ ID NO: 3451976 - DNA, 25 bp, Homo sapien
tactgtcaccaagggactgtctttg

SEQ ID NO: 3451977 - DNA, 25 bp, Homo sapien
tgtaagccatctgcgtttgagcccc

SEQ ID NO: 3451978 - DNA, 25 bp, Homo sapien
tctgcctggagcgattaaactagac

SEQ ID NO: 3451979 - DNA, 25 bp, Homo sapien
gacagtacttgggaacccgcagaaa

SEQ ID NO: 3451980 - DNA, 25 bp, Homo sapien
gaggcttcaccagagatcttgatcc

SEQ ID NO: 3451981 - DNA, 25 bp, Homo sapien
ggaatattcacatcaggccgacttg

SEQ ID NO: 3451982 - DNA, 25 bp, Homo sapien
gctgctggcaaaagcggcaaatatg

SEQ ID NO: 3451983 - DNA, 25 bp, Homo sapien
tacaagctgtggtaatcctctttct

SEQ ID NO: 3451984 - DNA, 25 bp, Homo sapien
caaggagccatgaccagatccgact

SEQ ID NO: 3451985 - DNA, 25 bp, Homo sapien
taaatggctctgatacaagctgtgg

SEQ ID NO: 3451986 - DNA, 25 bp, Homo sapien
gttccaaataggacttaatgtagtc

SEQ ID NO: 3451987 - DNA, 25 bp, Homo sapien
tttccttagacatatgggcttaggg

SEQ ID NO: 3451988 - DNA, 25 bp, Homo sapien
ttggccctactctattgcctaagcc

SEQ ID NO: 3451989 - DNA, 25 bp, Homo sapien
ggacattactttgagttagagtgag

SEQ ID NO: 3451990 - DNA, 25 bp, Homo sapien
tagagtgaggtcaggctttttggcc

SEQ ID NO: 3451991 - DNA, 25 bp, Homo sapien
gatctttaaataatcagaaggcaaa

SEQ ID NO: 3451992 - DNA, 25 bp, Homo sapien
aagaaggggccaataaaacatatat

SEQ ID NO: 3451993 - DNA, 25 bp, Homo sapien
gccaataaaacatatatagatcttt

SEQ ID NO: 3451994 - DNA, 25 bp, Homo sapien
atagatctttaaataatcagaaggc

SEQ ID NO: 3451995 - DNA, 25 bp, Homo sapien
tatacaaatagacacctcaagcctc

SEQ ID NO: 3451996 - DNA, 25 bp, Homo sapien
tctgtgccatattgagaaaaccatg

SEQ ID NO: 3451997 - DNA, 25 bp, Homo sapien
tatggctccctctcagtaacaatga

SEQ ID NO: 3451998 - DNA, 25 bp, Homo sapien
aatgatgttctatattgaggtgcgg

SEQ ID NO: 3451999 - DNA, 25 bp, Homo sapien
aattagcctattatccttgattctg

SEQ ID NO: 3452000 - DNA, 25 bp, Homo sapien
gctcagaggagtcattgaggcactg

SEQ ID NO: 3452001 - DNA, 25 bp, Homo sapien
tcagcgcttgaattagcctattatc

SEQ ID NO: 3452002 - DNA, 25 bp, Homo sapien
ccaattcagcgcttgaattagccta

SEQ ID NO: 3452003 - DNA, 25 bp, Homo sapien
cagaagcctcaggagccgatgctat

SEQ ID NO: 3452004 - DNA, 25 bp, Homo sapien
aagcctcaggagccgatgctatcaa

SEQ ID NO: 3452005 - DNA, 25 bp, Homo sapien
tcgagaactacgtgaagaatgcaga

SEQ ID NO: 3452006 - DNA, 25 bp, Homo sapien
aaccaaggctcgagaactacgtgaa

SEQ ID NO: 3452007 - DNA, 25 bp, Homo sapien
tggattcaagaactccctagtgagg

SEQ ID NO: 3452008 - DNA, 25 bp, Homo sapien
gaaaactgttagatgcacactgttg

SEQ ID NO: 3452009 - DNA, 25 bp, Homo sapien
tgtggcaagatgaccgtcacattac

SEQ ID NO: 3452010 - DNA, 25 bp, Homo sapien
cctagtgaggagctgaacttgctca

SEQ ID NO: 3452011 - DNA, 25 bp, Homo sapien
ggcccggcaggccgcacaactgtaa

SEQ ID NO: 3452012 - DNA, 25 bp, Homo sapien
ctcggtcctcgctcagcggcccggc

SEQ ID NO: 3452013 - DNA, 25 bp, Homo sapien
cttctcggtccggcgggcacagagc

SEQ ID NO: 3452014 - DNA, 25 bp, Homo sapien
gcaggccgcacaactgtaaccgctg

SEQ ID NO: 3452015 - DNA, 25 bp, Homo sapien
ggccttaagcattagaactaagaac

SEQ ID NO: 3452016 - DNA, 25 bp, Homo sapien
gatgactggggaaagctgccaacca

SEQ ID NO: 3452017 - DNA, 25 bp, Homo sapien
catttgtggccttaagcattagaac

SEQ ID NO: 3452018 - DNA, 25 bp, Homo sapien
cattagaactaagaacaggtagaag

SEQ ID NO: 3452019 - DNA, 25 bp, Homo sapien
tgagctgactctgagggacaatcta

SEQ ID NO: 3452020 - DNA, 25 bp, Homo sapien
tgactctgagggacaatctaatatc

SEQ ID NO: 3452021 - DNA, 25 bp, Homo sapien
tctgagggacaatctaatatcatgc

SEQ ID NO: 3452022 - DNA, 25 bp, Homo sapien
gacaatctaatatcatgctcgttca

SEQ ID NO: 3452023 - DNA, 25 bp, Homo sapien
tccacatcagaaggtggcaagagtg

SEQ ID NO: 3452024 - DNA, 25 bp, Homo sapien
ctgtccacatcagaaggtggcaaga

SEQ ID NO: 3452025 - DNA, 25 bp, Homo sapien
acatcagaaggtggcaagagtgagt

SEQ ID NO: 3452026 - DNA, 25 bp, Homo sapien
ttttcttcgtccattgccccctgca

SEQ ID NO: 3452027 - DNA, 25 bp, Homo sapien
caggattctatttttgtcatcggaa

SEQ ID NO: 3452028 - DNA, 25 bp, Homo sapien
tgtaatcaggattctatttttgtca

SEQ ID NO: 3452029 - DNA, 25 bp, Homo sapien
ttctgttagcaattagacggtccat

SEQ ID NO: 3452030 - DNA, 25 bp, Homo sapien
tttgtcatcggaatttctgttagca

SEQ ID NO: 3452031 - DNA, 25 bp, Homo sapien
cttcagggcaataactgtagcgcat

SEQ ID NO: 3452032 - DNA, 25 bp, Homo sapien
gcctcttcagggcaataactgtagc

SEQ ID NO: 3452033 - DNA, 25 bp, Homo sapien
ctcttcagggcaataactgtagcgc

SEQ ID NO: 3452034 - DNA, 25 bp, Homo sapien
tttttttagcctcttcagggcaata

SEQ ID NO: 3452035 - DNA, 25 bp, Homo sapien
ggaaggatgtgggtagtggtgagca

SEQ ID NO: 3452036 - DNA, 25 bp, Homo sapien
atcaccatagtcgtctgtttcaggg

SEQ ID NO: 3452037 - DNA, 25 bp, Homo sapien
gtgggtagtggtgagcagagacaac

SEQ ID NO: 3452038 - DNA, 25 bp, Homo sapien
agcatcatcaccatagtcgtctgtt

SEQ ID NO: 3452039 - DNA, 25 bp, Homo sapien
gggctacaatgcctcaaccatattt

SEQ ID NO: 3452040 - DNA, 25 bp, Homo sapien
gataagatgaccttttgctgaaaaa

SEQ ID NO: 3452041 - DNA, 25 bp, Homo sapien
ttttcacaatcgtagtcaaagcaga

SEQ ID NO: 3452042 - DNA, 25 bp, Homo sapien
gaactaaatgcctagcatctgataa

SEQ ID NO: 3452043 - DNA, 25 bp, Homo sapien
acttctgcccagaccattgttgcag

SEQ ID NO: 3452044 - DNA, 25 bp, Homo sapien
catggtaatatgactgcacgtgtga

SEQ ID NO: 3452045 - DNA, 25 bp, Homo sapien
tgttcaggcataagcaagtcattac

SEQ ID NO: 3452046 - DNA, 25 bp, Homo sapien
cacgtgtgaagttagcattggcaac

SEQ ID NO: 3452047 - DNA, 25 bp, Homo sapien
atgacatcagggacttgggctttca

SEQ ID NO: 3452048 - DNA, 25 bp, Homo sapien
tgacatcagggacttgggctttcat

SEQ ID NO: 3452049 - DNA, 25 bp, Homo sapien
gcaggtagctcactggattgcaggc

SEQ ID NO: 3452050 - DNA, 25 bp, Homo sapien
tgaaggacacctgtcagcaggtagc

SEQ ID NO: 3452051 - DNA, 25 bp, Homo sapien
acctgtcagcaggtagctcactgga

SEQ ID NO: 3452052 - DNA, 25 bp, Homo sapien
tcagcaggtagctcactggattgca

SEQ ID NO: 3452053 - DNA, 25 bp, Homo sapien
aatacttggccctagggatatattt

SEQ ID NO: 3452054 - DNA, 25 bp, Homo sapien
taaatacttggccctagggatatat

SEQ ID NO: 3452055 - DNA, 25 bp, Homo sapien
tacttggccctagggatatatttgt

SEQ ID NO: 3452056 - DNA, 25 bp, Homo sapien
cttaaatacttggccctagggatat

SEQ ID NO: 3452057 - DNA, 25 bp, Homo sapien
ggcaagaatcaggtaaggctatcat

SEQ ID NO: 3452058 - DNA, 25 bp, Homo sapien
atttgcattttctgggcactagatt

SEQ ID NO: 3452059 - DNA, 25 bp, Homo sapien
ttggcaagaatcaggtaaggctatc

SEQ ID NO: 3452060 - DNA, 25 bp, Homo sapien
tgggcactagattcttggcaagaat

SEQ ID NO: 3452061 - DNA, 25 bp, Homo sapien
ggagtaatgttagtagcttcattgg

SEQ ID NO: 3452062 - DNA, 25 bp, Homo sapien
gctttggagtaatgttagtagcttc

SEQ ID NO: 3452063 - DNA, 25 bp, Homo sapien
tggagtaatgttagtagcttcattg

SEQ ID NO: 3452064 - DNA, 25 bp, Homo sapien
tttggagtaatgttagtagcttcat

SEQ ID NO: 3452065 - DNA, 25 bp, Homo sapien
tcagaatgaatctcttgcactccat

SEQ ID NO: 3452066 - DNA, 25 bp, Homo sapien
cttgcactccatctatcatacagag

SEQ ID NO: 3452067 - DNA, 25 bp, Homo sapien
cgatacaagttcagaatgaatctct

SEQ ID NO: 3452068 - DNA, 25 bp, Homo sapien
gaatctcttgcactccatctatcat

SEQ ID NO: 3452069 - DNA, 25 bp, Homo sapien
tttgcaagctgaaagttttgttctg

SEQ ID NO: 3452070 - DNA, 25 bp, Homo sapien
ctttgcaagctgaaagttttgttct

SEQ ID NO: 3452071 - DNA, 25 bp, Homo sapien
tcctgctaaatgtggtatctgtgta

SEQ ID NO: 3452072 - DNA, 25 bp, Homo sapien
ttctgttcctgctaaatgtggtatc

SEQ ID NO: 3452073 - DNA, 25 bp, Homo sapien
ttaattattgagatgtagttgggat

SEQ ID NO: 3452074 - DNA, 25 bp, Homo sapien
taattattgagatgtagttgggatg

SEQ ID NO: 3452075 - DNA, 25 bp, Homo sapien
tgggtcaaactgcatactggatccg

SEQ ID NO: 3452076 - DNA, 25 bp, Homo sapien
tgcctccaaacttgtcctctccaaa

SEQ ID NO: 3452077 - DNA, 25 bp, Homo sapien
caaactgcatactggatccgtgcat

SEQ ID NO: 3452078 - DNA, 25 bp, Homo sapien
ccacacacaaattcttcgcacagag

SEQ ID NO: 3452079 - DNA, 25 bp, Homo sapien
ggcattccttgaggagagaaagcac

SEQ ID NO: 3452080 - DNA, 25 bp, Homo sapien
tggtacaatatccgaaacattttca

SEQ ID NO: 3452081 - DNA, 25 bp, Homo sapien
cccatacaacatgtgtgctctttgt

SEQ ID NO: 3452082 - DNA, 25 bp, Homo sapien
caaacccatacaacatgtgtgctct

SEQ ID NO: 3452083 - DNA, 25 bp, Homo sapien
aaacagcaaacccatacaacatgtg

SEQ ID NO: 3452084 - DNA, 25 bp, Homo sapien
acataaacagcaaacccatacaaca

SEQ ID NO: 3452085 - DNA, 25 bp, Homo sapien
taaagaagtcttcagttcgtgcata

SEQ ID NO: 3452086 - DNA, 25 bp, Homo sapien
catgtcccgttccaatttaaagaag

SEQ ID NO: 3452087 - DNA, 25 bp, Homo sapien
gtcttcagttcgtgcatagttaaca

SEQ ID NO: 3452088 - DNA, 25 bp, Homo sapien
tcccagagcaattgattttcatgtc

SEQ ID NO: 3452089 - DNA, 25 bp, Homo sapien
tactataagctctaaaaatcctcag

SEQ ID NO: 3452090 - DNA, 25 bp, Homo sapien
aaaggacatctcagagagaatttcc

SEQ ID NO: 3452091 - DNA, 25 bp, Homo sapien
tcattaggcctacaaaaaaggacat

SEQ ID NO: 3452092 - DNA, 25 bp, Homo sapien
tatcttcaaccttttgtcattaggc

SEQ ID NO: 3452093 - DNA, 25 bp, Homo sapien
taacctggtgtgagagggtctcctg

SEQ ID NO: 3452094 - DNA, 25 bp, Homo sapien
tctggataggacttcaccccaggag

SEQ ID NO: 3452095 - DNA, 25 bp, Homo sapien
caccattcagatttaggatatttcc

SEQ ID NO: 3452096 - DNA, 25 bp, Homo sapien
gaatgactcctttggcccctgccag

SEQ ID NO: 3452097 - DNA, 25 bp, Homo sapien
gaatacttggaagaccaacagcctc

SEQ ID NO: 3452098 - DNA, 25 bp, Homo sapien
ggaatacttggaagaccaacagcct

SEQ ID NO: 3452099 - DNA, 25 bp, Homo sapien
acaggaatacttggaagaccaacag

SEQ ID NO: 3452100 - DNA, 25 bp, Homo sapien
atacttggaagaccaacagcctctg

SEQ ID NO: 3452101 - DNA, 25 bp, Homo sapien
caacattgtaggacactttgagact

SEQ ID NO: 3452102 - DNA, 25 bp, Homo sapien
aagccaggtccaacattgtaggaca

SEQ ID NO: 3452103 - DNA, 25 bp, Homo sapien
tgtagaaaagtttccagtaaagcca

SEQ ID NO: 3452104 - DNA, 25 bp, Homo sapien
tccagtaaagccaggtccaacattg

SEQ ID NO: 3452105 - DNA, 25 bp, Homo sapien
cttcattggtagagtggatgtgcat

SEQ ID NO: 3452106 - DNA, 25 bp, Homo sapien
ctgctcctctgagagtacctatcac

SEQ ID NO: 3452107 - DNA, 25 bp, Homo sapien
gtcacttcattggtagagtggatgt

SEQ ID NO: 3452108 - DNA, 25 bp, Homo sapien
tgagagtacctatcacattgtaaat

SEQ ID NO: 3452109 - DNA, 25 bp, Homo sapien
tccactctgagggtcaataccacca

SEQ ID NO: 3452110 - DNA, 25 bp, Homo sapien
ttttcagtgttccaaagctcctcac

SEQ ID NO: 3452111 - DNA, 25 bp, Homo sapien
accaaacacccatgagtcccggtga

SEQ ID NO: 3452112 - DNA, 25 bp, Homo sapien
acaacagctgctccactctgagggt

SEQ ID NO: 3452113 - DNA, 25 bp, Homo sapien
ctgcccactcagtagaaccaagaag

SEQ ID NO: 3452114 - DNA, 25 bp, Homo sapien
ccactcagtagaaccaagaagacca

SEQ ID NO: 3452115 - DNA, 25 bp, Homo sapien
gcccactcagtagaaccaagaagac

SEQ ID NO: 3452116 - DNA, 25 bp, Homo sapien
tgcccactcagtagaaccaagaaga

SEQ ID NO: 3452117 - DNA, 25 bp, Homo sapien
agccacgccacgctcttgaaggagt

SEQ ID NO: 3452118 - DNA, 25 bp, Homo sapien
gccacgctcttgaaggagtcttgaa

SEQ ID NO: 3452119 - DNA, 25 bp, Homo sapien
gtcagcattaatataagccacgcca

SEQ ID NO: 3452120 - DNA, 25 bp, Homo sapien
taatataagccacgccacgctcttg

SEQ ID NO: 3452121 - DNA, 25 bp, Homo sapien
ttcttatgagaccaacgatattcac

SEQ ID NO: 3452122 - DNA, 25 bp, Homo sapien
ttttcttatgagaccaacgatattc

SEQ ID NO: 3452123 - DNA, 25 bp, Homo sapien
tcttttcttatgagaccaacgatat

SEQ ID NO: 3452124 - DNA, 25 bp, Homo sapien
tttcttatgagaccaacgatattca

SEQ ID NO: 3452125 - DNA, 25 bp, Homo sapien
caatcaactctcagagtgtagtttc

SEQ ID NO: 3452126 - DNA, 25 bp, Homo sapien
tgtacaatcaactctcagagtgtag

SEQ ID NO: 3452127 - DNA, 25 bp, Homo sapien
ggtgtacaatcaactctcagagtgt

SEQ ID NO: 3452128 - DNA, 25 bp, Homo sapien
tacaatcaactctcagagtgtagtt

SEQ ID NO: 3452129 - DNA, 25 bp, Homo sapien
caactttcataaagagatttgcctt

SEQ ID NO: 3452130 - DNA, 25 bp, Homo sapien
ttttagtccaactttcataaagaga

SEQ ID NO: 3452131 - DNA, 25 bp, Homo sapien
tagtccaactttcataaagagattt

SEQ ID NO: 3452132 - DNA, 25 bp, Homo sapien
tccaactttcataaagagatttgcc

SEQ ID NO: 3452133 - DNA, 25 bp, Homo sapien
caatttttagtataccgtgctctgc

SEQ ID NO: 3452134 - DNA, 25 bp, Homo sapien
gtcgttggaagaacacctcaaaatc

SEQ ID NO: 3452135 - DNA, 25 bp, Homo sapien
tagtataccgtgctctgcctgaagc

SEQ ID NO: 3452136 - DNA, 25 bp, Homo sapien
caattccaagtcgttggaagaacac

SEQ ID NO: 3452137 - DNA, 25 bp, Homo sapien
taacttcctacctcacaaacaggag

SEQ ID NO: 3452138 - DNA, 25 bp, Homo sapien
gaatctaggcttcaggacttactac

SEQ ID NO: 3452139 - DNA, 25 bp, Homo sapien
tactgatgtgttgaagagactggga

SEQ ID NO: 3452140 - DNA, 25 bp, Homo sapien
ggattctgtaattaccctgccaggg

SEQ ID NO: 3452141 - DNA, 25 bp, Homo sapien
tgtgatacagtggatagccgctgaa

SEQ ID NO: 3452142 - DNA, 25 bp, Homo sapien
tccaccaactcatatgtttcataga

SEQ ID NO: 3452143 - DNA, 25 bp, Homo sapien
tatggaattggctagctcaaacacc

SEQ ID NO: 3452144 - DNA, 25 bp, Homo sapien
tcgacaatcaaaagggagcactatg

SEQ ID NO: 3452145 - DNA, 25 bp, Homo sapien
gagattaatagaaccatacagatga

SEQ ID NO: 3452146 - DNA, 25 bp, Homo sapien
taatagaaccatacagatgaggaat

SEQ ID NO: 3452147 - DNA, 25 bp, Homo sapien
aggagattaatagaaccatacagat

SEQ ID NO: 3452148 - DNA, 25 bp, Homo sapien
gattaatagaaccatacagatgagg

SEQ ID NO: 3452149 - DNA, 25 bp, Homo sapien
ggatcatcaaatgcttaaagaacat

SEQ ID NO: 3452150 - DNA, 25 bp, Homo sapien
taaagaacataatttctaatggcat

SEQ ID NO: 3452151 - DNA, 25 bp, Homo sapien
ctgaaatagaaattgggatcatcaa

SEQ ID NO: 3452152 - DNA, 25 bp, Homo sapien
attgggatcatcaaatgcttaaaga

SEQ ID NO: 3452153 - DNA, 25 bp, Homo sapien
aaagtcctggagtctctcgctgaac

SEQ ID NO: 3452154 - DNA, 25 bp, Homo sapien
tcctggagtctctcgctgaacttgg

SEQ ID NO: 3452155 - DNA, 25 bp, Homo sapien
caaagtcctggagtctctcgctgaa

SEQ ID NO: 3452156 - DNA, 25 bp, Homo sapien
ggagtctctcgctgaacttggaagc

SEQ ID NO: 3452157 - DNA, 25 bp, Homo sapien
tccagaaacatgagttgatcattca

SEQ ID NO: 3452158 - DNA, 25 bp, Homo sapien
tgtctggtaaccctaatggatcaat

SEQ ID NO: 3452159 - DNA, 25 bp, Homo sapien
catgagttgatcattcatcattctt

SEQ ID NO: 3452160 - DNA, 25 bp, Homo sapien
tggtaaccctaatggatcaataaat

SEQ ID NO: 3452161 - DNA, 25 bp, Homo sapien
tgctacaaacgaaaatacaaatatt

SEQ ID NO: 3452162 - DNA, 25 bp, Homo sapien
cctgttgctacaaacgaaaatacaa

SEQ ID NO: 3452163 - DNA, 25 bp, Homo sapien
ggagacagaataggaccctatctct

SEQ ID NO: 3452164 - DNA, 25 bp, Homo sapien
gaataggaccctatctcttagaaaa

SEQ ID NO: 3452165 - DNA, 25 bp, Homo sapien
ggtgcccaaatgatatacaagagaa

SEQ ID NO: 3452166 - DNA, 25 bp, Homo sapien
taggtgcccaaatgatatacaagag

SEQ ID NO: 3452167 - DNA, 25 bp, Homo sapien
ttaggtgcccaaatgatatacaaga

SEQ ID NO: 3452168 - DNA, 25 bp, Homo sapien
ttattaggtgcccaaatgatataca

SEQ ID NO: 3452169 - DNA, 25 bp, Homo sapien
gggaatgactcccctgcatacttgt

SEQ ID NO: 3452170 - DNA, 25 bp, Homo sapien
gaatgactcccctgcatacttgttg

SEQ ID NO: 3452171 - DNA, 25 bp, Homo sapien
ttaggctacttcactcaaagtctct

SEQ ID NO: 3452172 - DNA, 25 bp, Homo sapien
ggctacttcactcaaagtctctgca

SEQ ID NO: 3452173 - DNA, 25 bp, Homo sapien
gacataccacacaaattcaatacag

SEQ ID NO: 3452174 - DNA, 25 bp, Homo sapien
acaaattcaatacagagtctctaaa

SEQ ID NO: 3452175 - DNA, 25 bp, Homo sapien
caatatacccattattattctttga

SEQ ID NO: 3452176 - DNA, 25 bp, Homo sapien
tattattctttgagtgacataccac

SEQ ID NO: 3452177 - DNA, 25 bp, Homo sapien
ggcctctggcttgggataatcttgt

SEQ ID NO: 3452178 - DNA, 25 bp, Homo sapien
gggcatccaaagatattagaaatgt

SEQ ID NO: 3452179 - DNA, 25 bp, Homo sapien
tcccaaatagtgtgctgagatagtg

SEQ ID NO: 3452180 - DNA, 25 bp, Homo sapien
tcttgtgcatattccccagtgtgct

SEQ ID NO: 3452181 - DNA, 25 bp, Homo sapien
cgagcaggtgagctcactggtagaa

SEQ ID NO: 3452182 - DNA, 25 bp, Homo sapien
aggtgagctcactggtagaacactg

SEQ ID NO: 3452183 - DNA, 25 bp, Homo sapien
tgcagatcgagcaggtgagctcact

SEQ ID NO: 3452184 - DNA, 25 bp, Homo sapien
ctgtgcagatcgagcaggtgagctc

SEQ ID NO: 3452185 - DNA, 25 bp, Homo sapien
ttgtgagtagcatgccttggggatt

SEQ ID NO: 3452186 - DNA, 25 bp, Homo sapien
tctcttgtaggaataacttgtttct

SEQ ID NO: 3452187 - DNA, 25 bp, Homo sapien
taatgcgtttgaagtacatttgctg

SEQ ID NO: 3452188 - DNA, 25 bp, Homo sapien
tgtcatatagtgtttgtgagtagca

SEQ ID NO: 3452189 - DNA, 25 bp, Homo sapien
tattgacacaccttaggatattcag

SEQ ID NO: 3452190 - DNA, 25 bp, Homo sapien
tcacggaggtattgacacaccttag

SEQ ID NO: 3452191 - DNA, 25 bp, Homo sapien
ctcttcttcacggaggtattgacac

SEQ ID NO: 3452192 - DNA, 25 bp, Homo sapien
ggaggtattgacacaccttaggata

SEQ ID NO: 3452193 - DNA, 25 bp, Homo sapien
tacatttctctcaggagtataccca

SEQ ID NO: 3452194 - DNA, 25 bp, Homo sapien
cacatctgctttacagctcatttcc

SEQ ID NO: 3452195 - DNA, 25 bp, Homo sapien
tcatacatttctctcaggagtatac

SEQ ID NO: 3452196 - DNA, 25 bp, Homo sapien
ctgaggcaggttcacatctgcttta

SEQ ID NO: 3452197 - DNA, 25 bp, Homo sapien
catggccagcctcagaaactcattc

SEQ ID NO: 3452198 - DNA, 25 bp, Homo sapien
acattagtgcagttcacactcttac

SEQ ID NO: 3452199 - DNA, 25 bp, Homo sapien
gttggaaacattagtgcagttcaca

SEQ ID NO: 3452200 - DNA, 25 bp, Homo sapien
gaaacattagtgcagttcacactct

SEQ ID NO: 3452201 - DNA, 25 bp, Homo sapien
ggaaacattagtgcagttcacactc

SEQ ID NO: 3452202 - DNA, 25 bp, Homo sapien
ctgcatatcttacgatccaaggtga

SEQ ID NO: 3452203 - DNA, 25 bp, Homo sapien
gcatatcttacgatccaaggtgata

SEQ ID NO: 3452204 - DNA, 25 bp, Homo sapien
tatcttacgatccaaggtgatatac

SEQ ID NO: 3452205 - DNA, 25 bp, Homo sapien
atcttacgatccaaggtgatataca

SEQ ID NO: 3452206 - DNA, 25 bp, Homo sapien
cctcagagtcaagtcgcatgtcatt

SEQ ID NO: 3452207 - DNA, 25 bp, Homo sapien
agtcaagtcgcatgtcattcctctt

SEQ ID NO: 3452208 - DNA, 25 bp, Homo sapien
agagtcaagtcgcatgtcattcctc

SEQ ID NO: 3452209 - DNA, 25 bp, Homo sapien
tcagagtcaagtcgcatgtcattcc

SEQ ID NO: 3452210 - DNA, 25 bp, Homo sapien
gagaagagactgaaatggtcatcca

SEQ ID NO: 3452211 - DNA, 25 bp, Homo sapien
tgcgtgagaggaaactacaaatgag

SEQ ID NO: 3452212 - DNA, 25 bp, Homo sapien
ggtcatccactttgagacacaggag

SEQ ID NO: 3452213 - DNA, 25 bp, Homo sapien
ttgggcaacattaacaaagctcact

SEQ ID NO: 3452214 - DNA, 25 bp, Homo sapien
tcgtcttccctatctccgcaatgta

SEQ ID NO: 3452215 - DNA, 25 bp, Homo sapien
tcaatgtatctaaagattatgtcac

SEQ ID NO: 3452216 - DNA, 25 bp, Homo sapien
ccctatctccgcaatgtaacagaag

SEQ ID NO: 3452217 - DNA, 25 bp, Homo sapien
tctaaagattatgtcacacacaaag

SEQ ID NO: 3452218 - DNA, 25 bp, Homo sapien
ttggagatgagagattcttgaaatt

SEQ ID NO: 3452219 - DNA, 25 bp, Homo sapien
catggattttagcgcacacctcagc

SEQ ID NO: 3452220 - DNA, 25 bp, Homo sapien
ccatggattttagcgcacacctcag

SEQ ID NO: 3452221 - DNA, 25 bp, Homo sapien
atggattttagcgcacacctcagct

SEQ ID NO: 3452222 - DNA, 25 bp, Homo sapien
gggtcaatgctatctgtcgcaacat

SEQ ID NO: 3452223 - DNA, 25 bp, Homo sapien
atctgtcgcaacatgagaatataac

SEQ ID NO: 3452224 - DNA, 25 bp, Homo sapien
tcaatgctatctgtcgcaacatgag

SEQ ID NO: 3452225 - DNA, 25 bp, Homo sapien
aatgctatctgtcgcaacatgagaa

SEQ ID NO: 3452226 - DNA, 25 bp, Homo sapien
cttaactggacatgagctcaatcca

SEQ ID NO: 3452227 - DNA, 25 bp, Homo sapien
ttaactggacatgagctcaatccag

SEQ ID NO: 3452228 - DNA, 25 bp, Homo sapien
taactggacatgagctcaatccagt

SEQ ID NO: 3452229 - DNA, 25 bp, Homo sapien
aactggacatgagctcaatccagtt

SEQ ID NO: 3452230 - DNA, 25 bp, Homo sapien
cattaatggatagcccaccattcct

SEQ ID NO: 3452231 - DNA, 25 bp, Homo sapien
acacattaatggatagcccaccatt

SEQ ID NO: 3452232 - DNA, 25 bp, Homo sapien
acattaatggatagcccaccattcc

SEQ ID NO: 3452233 - DNA, 25 bp, Homo sapien
cacattaatggatagcccaccattc

SEQ ID NO: 3452234 - DNA, 25 bp, Homo sapien
ttgctactatcaagactttgtaaag

SEQ ID NO: 3452235 - DNA, 25 bp, Homo sapien
tgctactatcaagactttgtaaaga

SEQ ID NO: 3452236 - DNA, 25 bp, Homo sapien
ttcttgctactatcaagactttgta

SEQ ID NO: 3452237 - DNA, 25 bp, Homo sapien
tcttgctactatcaagactttgtaa

SEQ ID NO: 3452238 - DNA, 25 bp, Homo sapien
gatactcaagcctttaggatactca

SEQ ID NO: 3452239 - DNA, 25 bp, Homo sapien
tgaaccttctactacatccctcttg

SEQ ID NO: 3452240 - DNA, 25 bp, Homo sapien
tactttactctcgcagatcaccaca

SEQ ID NO: 3452241 - DNA, 25 bp, Homo sapien
ctgaagaattcagagggatactcaa

SEQ ID NO: 3452242 - DNA, 25 bp, Homo sapien
agaccgccttggctcaggaagcctt

SEQ ID NO: 3452243 - DNA, 25 bp, Homo sapien
ctgtgtgattagagctgacaatgtt

SEQ ID NO: 3452244 - DNA, 25 bp, Homo sapien
tctgtgtgattagagctgacaatgt

SEQ ID NO: 3452245 - DNA, 25 bp, Homo sapien
tgtgattagagctgacaatgtttct

SEQ ID NO: 3452246 - DNA, 25 bp, Homo sapien
gtgtgattagagctgacaatgtttc

SEQ ID NO: 3452247 - DNA, 25 bp, Homo sapien
actaaaggtatcagaaacaccagct

SEQ ID NO: 3452248 - DNA, 25 bp, Homo sapien
taaaggtatcagaaacaccagcttc

SEQ ID NO: 3452249 - DNA, 25 bp, Homo sapien
ctaaaggtatcagaaacaccagctt

SEQ ID NO: 3452250 - DNA, 25 bp, Homo sapien
cacagctccaggattaaagaaaact

SEQ ID NO: 3452251 - DNA, 25 bp, Homo sapien
atccacagctccaggattaaagaaa

SEQ ID NO: 3452252 - DNA, 25 bp, Homo sapien
cagctccaggattaaagaaaactct

SEQ ID NO: 3452253 - DNA, 25 bp, Homo sapien
ctccaggattaaagaaaactctgct

SEQ ID NO: 3452254 - DNA, 25 bp, Homo sapien
ctcctgaagaggttattgatccatt

SEQ ID NO: 3452255 - DNA, 25 bp, Homo sapien
cctgaagaggttattgatccatttg

SEQ ID NO: 3452256 - DNA, 25 bp, Homo sapien
gaagaggttattgatccatttgcct

SEQ ID NO: 3452257 - DNA, 25 bp, Homo sapien
tgaagaggttattgatccatttgcc

SEQ ID NO: 3452258 - DNA, 25 bp, Homo sapien
cttaggcattcaatcatgcgagaag

SEQ ID NO: 3452259 - DNA, 25 bp, Homo sapien
tttccatcaggagtgggatctgaga

SEQ ID NO: 3452260 - DNA, 25 bp, Homo sapien
tgaatacccatattcgactgatccc

SEQ ID NO: 3452261 - DNA, 25 bp, Homo sapien
tcaatcatgcgagaagcaattttct

SEQ ID NO: 3452262 - DNA, 25 bp, Homo sapien
ttataaaattatacaccagaaactg

SEQ ID NO: 3452263 - DNA, 25 bp, Homo sapien
tcagtttataaaattatacaccaga

SEQ ID NO: 3452264 - DNA, 25 bp, Homo sapien
cagtttataaaattatacaccagaa

SEQ ID NO: 3452265 - DNA, 25 bp, Homo sapien
ataaaattatacaccagaaactgac

SEQ ID NO: 3452266 - DNA, 25 bp, Homo sapien
ggaagactcgcagggcatcagaatc

SEQ ID NO: 3452267 - DNA, 25 bp, Homo sapien
acttgactgtcttgtagttgttgga

SEQ ID NO: 3452268 - DNA, 25 bp, Homo sapien
ctcacttgactgtcttgtagttgtt

SEQ ID NO: 3452269 - DNA, 25 bp, Homo sapien
cttgactgtcttgtagttgttggaa

SEQ ID NO: 3452270 - DNA, 25 bp, Homo sapien
cacttgactgtcttgtagttgttgg

SEQ ID NO: 3452271 - DNA, 25 bp, Homo sapien
tgttgagcatgtctaggactccagt

SEQ ID NO: 3452272 - DNA, 25 bp, Homo sapien
taggactccagttatgcaccatgaa

SEQ ID NO: 3452273 - DNA, 25 bp, Homo sapien
gttgagcatgtctaggactccagtt

SEQ ID NO: 3452274 - DNA, 25 bp, Homo sapien
ctaggactccagttatgcaccatga

SEQ ID NO: 3452275 - DNA, 25 bp, Homo sapien
ttggtggagagactatagtgattgc

SEQ ID NO: 3452276 - DNA, 25 bp, Homo sapien
tatcataatccagaaacaccccaac

SEQ ID NO: 3452277 - DNA, 25 bp, Homo sapien
ggtggagagactatagtgattgctc

SEQ ID NO: 3452278 - DNA, 25 bp, Homo sapien
agatccattatcataatccagaaac

SEQ ID NO: 3452279 - DNA, 25 bp, Homo sapien
ggaggaaaaccatagataagagaac

SEQ ID NO: 3452280 - DNA, 25 bp, Homo sapien
aggaaaaccatagataagagaacct

SEQ ID NO: 3452281 - DNA, 25 bp, Homo sapien
gaggaaaaccatagataagagaacc

SEQ ID NO: 3452282 - DNA, 25 bp, Homo sapien
tggcgggatcatgcagcgcgccccg

SEQ ID NO: 3452283 - DNA, 25 bp, Homo sapien
gccccgccaccctgcggccgagtcc

SEQ ID NO: 3452284 - DNA, 25 bp, Homo sapien
caccctgcggccgagtcccagccag

SEQ ID NO: 3452285 - DNA, 25 bp, Homo sapien
aggagtggggatggcggtggcggga

SEQ ID NO: 3452286 - DNA, 25 bp, Homo sapien
tttgaattcagtgcggtcctcctcg

SEQ ID NO: 3452287 - DNA, 25 bp, Homo sapien
tctttgaattcagtgcggtcctcct

SEQ ID NO: 3452288 - DNA, 25 bp, Homo sapien
cctggaactctttgaattcagtgcg

SEQ ID NO: 3452289 - DNA, 25 bp, Homo sapien
gaactctttgaattcagtgcggtcc

SEQ ID NO: 3452290 - DNA, 25 bp, Homo sapien
agaggcgacgctgcgagtgtcgggc

SEQ ID NO: 3452291 - DNA, 25 bp, Homo sapien
tcagaggcgacgctgcgagtgtcgg

SEQ ID NO: 3452292 - DNA, 25 bp, Homo sapien
agagtcgtcagaggcgacgctgcga

SEQ ID NO: 3452293 - DNA, 25 bp, Homo sapien
gtcgtcagaggcgacgctgcgagtg

SEQ ID NO: 3452294 - DNA, 25 bp, Homo sapien
cattaaggccggtccagccattgtg

SEQ ID NO: 3452295 - DNA, 25 bp, Homo sapien
gtctcccgcgccttcttaaagctca

SEQ ID NO: 3452296 - DNA, 25 bp, Homo sapien
tcaggcgacattaaggccggtccag

SEQ ID NO: 3452297 - DNA, 25 bp, Homo sapien
agccattgtggtcagtctcccgcgc

SEQ ID NO: 3452298 - DNA, 25 bp, Homo sapien
actagctcagggctccgatgtgatc

SEQ ID NO: 3452299 - DNA, 25 bp, Homo sapien
acggcagggaccctcgtgtggacac

SEQ ID NO: 3452300 - DNA, 25 bp, Homo sapien
ccctactagctcagggctccgatgt

SEQ ID NO: 3452301 - DNA, 25 bp, Homo sapien
cgatgtgatcggttcgaccctgcat

SEQ ID NO: 3452302 - DNA, 25 bp, Homo sapien
tctgcaggcagtttttggagccctc

SEQ ID NO: 3452303 - DNA, 25 bp, Homo sapien
agctcaagctggtacttttccccca

SEQ ID NO: 3452304 - DNA, 25 bp, Homo sapien
cagtttttggagccctcgggcttct

SEQ ID NO: 3452305 - DNA, 25 bp, Homo sapien
ttttggagccctcgggcttctgcgc

SEQ ID NO: 3452306 - DNA, 25 bp, Homo sapien
cgcccggcgtcagcgcggacagctc

SEQ ID NO: 3452307 - DNA, 25 bp, Homo sapien
gcgcggacagctcgcagtccctgac

SEQ ID NO: 3452308 - DNA, 25 bp, Homo sapien
ggcgcccggcgtcagcgcggacagc

SEQ ID NO: 3452309 - DNA, 25 bp, Homo sapien
cagcgcggacagctcgcagtccctg

SEQ ID NO: 3452310 - DNA, 25 bp, Homo sapien
tccagggcgccccggtcctctgggc

SEQ ID NO: 3452311 - DNA, 25 bp, Homo sapien
tatgtggtccagggcgccccggtcc

SEQ ID NO: 3452312 - DNA, 25 bp, Homo sapien
cagggcgccccggtcctctgggcca

SEQ ID NO: 3452313 - DNA, 25 bp, Homo sapien
tggtccagggcgccccggtcctctg

SEQ ID NO: 3452314 - DNA, 25 bp, Homo sapien
ctggcacgcgaaggccacggcgggg

SEQ ID NO: 3452315 - DNA, 25 bp, Homo sapien
acagggtcctctcggggcacacggt

SEQ ID NO: 3452316 - DNA, 25 bp, Homo sapien
acgcacagggtcctctcggggcaca

SEQ ID NO: 3452317 - DNA, 25 bp, Homo sapien
tccccacgcacagggtcctctcggg

SEQ ID NO: 3452318 - DNA, 25 bp, Homo sapien
tcttccccacgcacagggtcctctc

SEQ ID NO: 3452319 - DNA, 25 bp, Homo sapien
gccgccagaatttcctgagtcgcca

SEQ ID NO: 3452320 - DNA, 25 bp, Homo sapien
cgccgccagaatttcctgagtcgcc

SEQ ID NO: 3452321 - DNA, 25 bp, Homo sapien
ccgccagaatttcctgagtcgccag

SEQ ID NO: 3452322 - DNA, 25 bp, Homo sapien
gattcctcacgggagcccgccgcct

SEQ ID NO: 3452323 - DNA, 25 bp, Homo sapien
ccggctcttggggattcctcacggg

SEQ ID NO: 3452324 - DNA, 25 bp, Homo sapien
ttggggattcctcacgggagcccgc

SEQ ID NO: 3452325 - DNA, 25 bp, Homo sapien
ctgcgccctccgtttcgcccgccac

SEQ ID NO: 3452326 - DNA, 25 bp, Homo sapien
tgcctggccacaagctgctccgccg

SEQ ID NO: 3452327 - DNA, 25 bp, Homo sapien
ctggaaggtgggcgcgggtgccttg

SEQ ID NO: 3452328 - DNA, 25 bp, Homo sapien
ctccgcctcgggtttctcctccttg

SEQ ID NO: 3452329 - DNA, 25 bp, Homo sapien
tatgccacttgggtatccgcaggtg

SEQ ID NO: 3452330 - DNA, 25 bp, Homo sapien
tgcccttccgcgctgccctcttggg

SEQ ID NO: 3452331 - DNA, 25 bp, Homo sapien
tccttggccaccttgttatgccact

SEQ ID NO: 3452332 - DNA, 25 bp, Homo sapien
cttcttccagggcagcgggcgcttc

SEQ ID NO: 3452333 - DNA, 25 bp, Homo sapien
tcttccagggcagcgggcgcttctc

SEQ ID NO: 3452334 - DNA, 25 bp, Homo sapien
ctcttcttccagggcagcgggcgct

SEQ ID NO: 3452335 - DNA, 25 bp, Homo sapien
ttccagggcagcgggcgcttctcct

SEQ ID NO: 3452336 - DNA, 25 bp, Homo sapien
taagtgatggctctgaagatcgatt

SEQ ID NO: 3452337 - DNA, 25 bp, Homo sapien
cgggtaagtgatggctctgaagatc

SEQ ID NO: 3452338 - DNA, 25 bp, Homo sapien
gaacaccgggtaagtgatggctctg

SEQ ID NO: 3452339 - DNA, 25 bp, Homo sapien
ctgctgaggaacaccgggtaagtga

SEQ ID NO: 3452340 - DNA, 25 bp, Homo sapien
taagcagagaatgtccacaggatca

SEQ ID NO: 3452341 - DNA, 25 bp, Homo sapien
cttgtaatggagtaccagggccccg

SEQ ID NO: 3452342 - DNA, 25 bp, Homo sapien
caggatcaagtccatgacccagggt

SEQ ID NO: 3452343 - DNA, 25 bp, Homo sapien
cacggagctccagaatttaagcaga

SEQ ID NO: 3452344 - DNA, 25 bp, Homo sapien
cagataaagcaacagagctccctct

SEQ ID NO: 3452345 - DNA, 25 bp, Homo sapien
gctccctctggaaggtttgcagtgt

SEQ ID NO: 3452346 - DNA, 25 bp, Homo sapien
ctgttgatgttgtgaggtctgcgct

SEQ ID NO: 3452347 - DNA, 25 bp, Homo sapien
gaggtctgcgctgccttgcaagaga

SEQ ID NO: 3452348 - DNA, 25 bp, Homo sapien
ctcatgctcttgtgactcagagcag

SEQ ID NO: 3452349 - DNA, 25 bp, Homo sapien
gggcccacagaggagtctctcctct

SEQ ID NO: 3452350 - DNA, 25 bp, Homo sapien
ctgtggccataagcctcatgctctt

SEQ ID NO: 3452351 - DNA, 25 bp, Homo sapien
catcctattgggctgtggccataag

SEQ ID NO: 3452352 - DNA, 25 bp, Homo sapien
gatattgttatctgatcatcccttt

SEQ ID NO: 3452353 - DNA, 25 bp, Homo sapien
tgatattgttatctgatcatccctt

SEQ ID NO: 3452354 - DNA, 25 bp, Homo sapien
atattgttatctgatcatccctttc

SEQ ID NO: 3452355 - DNA, 25 bp, Homo sapien
ctgatattgttatctgatcatccct

SEQ ID NO: 3452356 - DNA, 25 bp, Homo sapien
cgtcttggagttgtcgaacaatctc

SEQ ID NO: 3452357 - DNA, 25 bp, Homo sapien
tgttgagcatatctagcactccggt

SEQ ID NO: 3452358 - DNA, 25 bp, Homo sapien
atatctagcactccggtgatgtgcc

SEQ ID NO: 3452359 - DNA, 25 bp, Homo sapien
gagcatatctagcactccggtgatg

SEQ ID NO: 3452360 - DNA, 25 bp, Homo sapien
ttgagcatatctagcactccggtga

SEQ ID NO: 3452361 - DNA, 25 bp, Homo sapien
gagaaggcctgagctccccatgctg

SEQ ID NO: 3452362 - DNA, 25 bp, Homo sapien
catgctgcaaagttctctgctctct

SEQ ID NO: 3452363 - DNA, 25 bp, Homo sapien
tccccgggtgcaccatcatggtcat

SEQ ID NO: 3452364 - DNA, 25 bp, Homo sapien
gggactccccgggtgcaccatcatg

SEQ ID NO: 3452365 - DNA, 25 bp, Homo sapien
gaaaaagctgtatatgagggaacct

SEQ ID NO: 3452366 - DNA, 25 bp, Homo sapien
agctgtatatgagggaaccttttga

SEQ ID NO: 3452367 - DNA, 25 bp, Homo sapien
agggaaaaagctgtatatgagggaa

SEQ ID NO: 3452368 - DNA, 25 bp, Homo sapien
tatatgagggaaccttttgaaacat

SEQ ID NO: 3452369 - DNA, 25 bp, Homo sapien
ttttccagagcagatgagccaatat

SEQ ID NO: 3452370 - DNA, 25 bp, Homo sapien
agcagatgagccaatattgctccat

SEQ ID NO: 3452371 - DNA, 25 bp, Homo sapien
tccagagcagatgagccaatattgc

SEQ ID NO: 3452372 - DNA, 25 bp, Homo sapien
agtttttccagagcagatgagccaa

SEQ ID NO: 3452373 - DNA, 25 bp, Homo sapien
tctcctaattcttcaacaccagtag

SEQ ID NO: 3452374 - DNA, 25 bp, Homo sapien
tcaagtcgcagaaatctcctaattc

SEQ ID NO: 3452375 - DNA, 25 bp, Homo sapien
caccagtagatagagccatccaaaa

SEQ ID NO: 3452376 - DNA, 25 bp, Homo sapien
tcctcaagtcgcagaaatctcctaa

SEQ ID NO: 3452377 - DNA, 25 bp, Homo sapien
tgccatgttgtcttcatgcattcaa

SEQ ID NO: 3452378 - DNA, 25 bp, Homo sapien
gccatgttgtcttcatgcattcaaa

SEQ ID NO: 3452379 - DNA, 25 bp, Homo sapien
cttccagtggctgattctggtggtt

SEQ ID NO: 3452380 - DNA, 25 bp, Homo sapien
caagctttttcccataaagactgca

SEQ ID NO: 3452381 - DNA, 25 bp, Homo sapien
acattcaggtttctctgattttcac

SEQ ID NO: 3452382 - DNA, 25 bp, Homo sapien
gtggtttccacattcaggtttctct

SEQ ID NO: 3452383 - DNA, 25 bp, Homo sapien
ttctgatactcagctctcatagctt

SEQ ID NO: 3452384 - DNA, 25 bp, Homo sapien
atcttctgatactcagctctcatag

SEQ ID NO: 3452385 - DNA, 25 bp, Homo sapien
tggctttacttaaatgaagttgatg

SEQ ID NO: 3452386 - DNA, 25 bp, Homo sapien
cttaaaatctccctcctatgagcca

SEQ ID NO: 3452387 - DNA, 25 bp, Homo sapien
aacctgaaaccacattgtgagtttg

SEQ ID NO: 3452388 - DNA, 25 bp, Homo sapien
caaaaacctgaaaccacattgtgag

SEQ ID NO: 3452389 - DNA, 25 bp, Homo sapien
tcaaaaacctgaaaccacattgtga

SEQ ID NO: 3452390 - DNA, 25 bp, Homo sapien
aaaacctgaaaccacattgtgagtt

SEQ ID NO: 3452391 - DNA, 25 bp, Homo sapien
gagcagcatgtcattttggggtctg

SEQ ID NO: 3452392 - DNA, 25 bp, Homo sapien
gaagagagagcagcatgtcattttg

SEQ ID NO: 3452393 - DNA, 25 bp, Homo sapien
agaagagagagcagcatgtcatttt

SEQ ID NO: 3452394 - DNA, 25 bp, Homo sapien
gcatgtcattttggggtctgggttg

SEQ ID NO: 3452395 - DNA, 25 bp, Homo sapien
ccaacagagccggctcttgttcact

SEQ ID NO: 3452396 - DNA, 25 bp, Homo sapien
agccaacagagccggctcttgttca

SEQ ID NO: 3452397 - DNA, 25 bp, Homo sapien
acagccaacagagccggctcttgtt

SEQ ID NO: 3452398 - DNA, 25 bp, Homo sapien
caacagagccggctcttgttcactt

SEQ ID NO: 3452399 - DNA, 25 bp, Homo sapien
gaatttcatgtgtcctgtatagaaa

SEQ ID NO: 3452400 - DNA, 25 bp, Homo sapien
tttcatgtgtcctgtatagaaatag

SEQ ID NO: 3452401 - DNA, 25 bp, Homo sapien
aagaatttcatgtgtcctgtataga

SEQ ID NO: 3452402 - DNA, 25 bp, Homo sapien
catgtgtcctgtatagaaatagatc

SEQ ID NO: 3452403 - DNA, 25 bp, Homo sapien
gccatgaattgaagcacaagtgagg

SEQ ID NO: 3452404 - DNA, 25 bp, Homo sapien
ctgcaaaagagccatgaattgaagc

SEQ ID NO: 3452405 - DNA, 25 bp, Homo sapien
gaggacaataaagtatcactcacac

SEQ ID NO: 3452406 - DNA, 25 bp, Homo sapien
agtgaggacaataaagtatcactca

SEQ ID NO: 3452407 - DNA, 25 bp, Homo sapien
gtttctgtgttcaggtttctgagat

SEQ ID NO: 3452408 - DNA, 25 bp, Homo sapien
ggtggtttctgtgttcaggtttctg

SEQ ID NO: 3452409 - DNA, 25 bp, Homo sapien
ctggtggtttctgtgttcaggtttc

SEQ ID NO: 3452410 - DNA, 25 bp, Homo sapien
tggtttctgtgttcaggtttctgag

SEQ ID NO: 3452411 - DNA, 25 bp, Homo sapien
tgaaaaatgtcctcgccctcctttc

SEQ ID NO: 3452412 - DNA, 25 bp, Homo sapien
cctgggatgttccattctggcttgg

SEQ ID NO: 3452413 - DNA, 25 bp, Homo sapien
ttcctcttaaaagctccctgggatg

SEQ ID NO: 3452414 - DNA, 25 bp, Homo sapien
ctctgattgcttctgtccttaaact

SEQ ID NO: 3452415 - DNA, 25 bp, Homo sapien
atctgctttatggtacatttgcttc

SEQ ID NO: 3452416 - DNA, 25 bp, Homo sapien
cacatctgctttatggtacatttgc

SEQ ID NO: 3452417 - DNA, 25 bp, Homo sapien
ccacatctgctttatggtacatttg

SEQ ID NO: 3452418 - DNA, 25 bp, Homo sapien
caggagtagctccacatctgcttta

SEQ ID NO: 3452419 - DNA, 25 bp, Homo sapien
tagccattctacaaagttttgttgc

SEQ ID NO: 3452420 - DNA, 25 bp, Homo sapien
tgttgctggtggataaggtaggagg

SEQ ID NO: 3452421 - DNA, 25 bp, Homo sapien
ctggtggataaggtaggagggacct

SEQ ID NO: 3452422 - DNA, 25 bp, Homo sapien
ttttgttgctggtggataaggtagg

SEQ ID NO: 3452423 - DNA, 25 bp, Homo sapien
cccctgtgtaatatgtctccaaaag

SEQ ID NO: 3452424 - DNA, 25 bp, Homo sapien
ccctgtgtaatatgtctccaaaagc

SEQ ID NO: 3452425 - DNA, 25 bp, Homo sapien
tcccctgtgtaatatgtctccaaaa

SEQ ID NO: 3452426 - DNA, 25 bp, Homo sapien
tgaaagcatctgctaaaatcttggt

SEQ ID NO: 3452427 - DNA, 25 bp, Homo sapien
aagcatctgctaaaatcttggtatg

SEQ ID NO: 3452428 - DNA, 25 bp, Homo sapien
gaaagcatctgctaaaatcttggta

SEQ ID NO: 3452429 - DNA, 25 bp, Homo sapien
catctgctaaaatcttggtatgcac

SEQ ID NO: 3452430 - DNA, 25 bp, Homo sapien
ctcagacacttgcagcagcggggac

SEQ ID NO: 3452431 - DNA, 25 bp, Homo sapien
actgagcctgtccagcagtccagtg

SEQ ID NO: 3452432 - DNA, 25 bp, Homo sapien
acaggctcagacacttgcagcagcg

SEQ ID NO: 3452433 - DNA, 25 bp, Homo sapien
ctctgaatccactgagcctgtccag

SEQ ID NO: 3452434 - DNA, 25 bp, Homo sapien
tgtgggaattctgccaatgggctga

SEQ ID NO: 3452435 - DNA, 25 bp, Homo sapien
aggaagatatgactattggttcttt

SEQ ID NO: 3452436 - DNA, 25 bp, Homo sapien
tacaggaagatatgactattggttc

SEQ ID NO: 3452437 - DNA, 25 bp, Homo sapien
agatatgactattggttctttcagg

SEQ ID NO: 3452438 - DNA, 25 bp, Homo sapien
ttctcaaatctccatacaggaagat

SEQ ID NO: 3452439 - DNA, 25 bp, Homo sapien
ttgccagatgtgaaagccggagccc

SEQ ID NO: 3452440 - DNA, 25 bp, Homo sapien
atcctactgtgctggtaggtcttgg

SEQ ID NO: 3452441 - DNA, 25 bp, Homo sapien
ttttgcagtgatatcgggatcatct

SEQ ID NO: 3452442 - DNA, 25 bp, Homo sapien
acgtgaacctcccaataatatttgc

SEQ ID NO: 3452443 - DNA, 25 bp, Homo sapien
tcagggaactttgatcaacaccaac

SEQ ID NO: 3452444 - DNA, 25 bp, Homo sapien
tatatcagggaactttgatcaacac

SEQ ID NO: 3452445 - DNA, 25 bp, Homo sapien
ttgatcaacaccaacaaagctcatg

SEQ ID NO: 3452446 - DNA, 25 bp, Homo sapien
acaccaacaaagctcatggttctac

SEQ ID NO: 3452447 - DNA, 25 bp, Homo sapien
ttgatgaggtgcgaaaaagagggct

SEQ ID NO: 3452448 - DNA, 25 bp, Homo sapien
tttgatgaggtgcgaaaaagagggc

SEQ ID NO: 3452449 - DNA, 25 bp, Homo sapien
gatgaggtgcgaaaaagagggcttt

SEQ ID NO: 3452450 - DNA, 25 bp, Homo sapien
tgaggtgcgaaaaagagggctttct

SEQ ID NO: 3452451 - DNA, 25 bp, Homo sapien
ggcggctcaggaaattctggcggcg

SEQ ID NO: 3452452 - DNA, 25 bp, Homo sapien
ggctcaggaaattctggcggcgcgg

SEQ ID NO: 3452453 - DNA, 25 bp, Homo sapien
cggctcaggaaattctggcggcgcg

SEQ ID NO: 3452454 - DNA, 25 bp, Homo sapien
ctggcggctcaggaaattctggcgg

SEQ ID NO: 3452455 - DNA, 25 bp, Homo sapien
ctgtgcgtggggaagaggcggctgg

SEQ ID NO: 3452456 - DNA, 25 bp, Homo sapien
gaggcggctggcggtgcaggaaatc

SEQ ID NO: 3452457 - DNA, 25 bp, Homo sapien
ggaagaggcggctggcggtgcagga

SEQ ID NO: 3452458 - DNA, 25 bp, Homo sapien
gaagaggcggctggcggtgcaggaa

SEQ ID NO: 3452459 - DNA, 25 bp, Homo sapien
cggggcgccctggaccacatggtca

SEQ ID NO: 3452460 - DNA, 25 bp, Homo sapien
gggcgccctggaccacatggtcagg

SEQ ID NO: 3452461 - DNA, 25 bp, Homo sapien
ggcgccctggaccacatggtcagga

SEQ ID NO: 3452462 - DNA, 25 bp, Homo sapien
accggggcgccctggaccacatggt

SEQ ID NO: 3452463 - DNA, 25 bp, Homo sapien
tggagcgcccctgccaggagcggct

SEQ ID NO: 3452464 - DNA, 25 bp, Homo sapien
gccaggagcggctggggaaaaagta

SEQ ID NO: 3452465 - DNA, 25 bp, Homo sapien
acgtccgtctcatgcagaggctcct

SEQ ID NO: 3452466 - DNA, 25 bp, Homo sapien
agaggctcctggagcgcccctgcca

SEQ ID NO: 3452467 - DNA, 25 bp, Homo sapien
cgttcgggttgaaagccgccatgca

SEQ ID NO: 3452468 - DNA, 25 bp, Homo sapien
ttcgggttgaaagccgccatgcagg

SEQ ID NO: 3452469 - DNA, 25 bp, Homo sapien
gacgcgttcgggttgaaagccgcca

SEQ ID NO: 3452470 - DNA, 25 bp, Homo sapien
cgcgttcgggttgaaagccgccatg

SEQ ID NO: 3452471 - DNA, 25 bp, Homo sapien
tcaccaactgcttgctgaactatgt

SEQ ID NO: 3452472 - DNA, 25 bp, Homo sapien
caactgcttgctgaactatgtcctg

SEQ ID NO: 3452473 - DNA, 25 bp, Homo sapien
ctgcttgctgaactatgtcctgggt

SEQ ID NO: 3452474 - DNA, 25 bp, Homo sapien
accaactgcttgctgaactatgtcc

SEQ ID NO: 3452475 - DNA, 25 bp, Homo sapien
tccctggggacgcagaagcaagaag

SEQ ID NO: 3452476 - DNA, 25 bp, Homo sapien
ttatcaatgtcctaaaaaattgaaa

SEQ ID NO: 3452477 - DNA, 25 bp, Homo sapien
tatcaatgtcctaaaaaattgaaat

SEQ ID NO: 3452478 - DNA, 25 bp, Homo sapien
gcctgtccaccggtcctgtgatgcg

SEQ ID NO: 3452479 - DNA, 25 bp, Homo sapien
tgcgccctgtagtgagctctggatt

SEQ ID NO: 3452480 - DNA, 25 bp, Homo sapien
ctgtgatgcgccctgtagtgagctc

SEQ ID NO: 3452481 - DNA, 25 bp, Homo sapien
tgatgcgccctgtagtgagctctgg

SEQ ID NO: 3452482 - DNA, 25 bp, Homo sapien
gaacgcaaagattcacgtctcaaca

SEQ ID NO: 3452483 - DNA, 25 bp, Homo sapien
tcagatctgtcagaacgcaaagatt

SEQ ID NO: 3452484 - DNA, 25 bp, Homo sapien
tgtcagaacgcaaagattcacgtct

SEQ ID NO: 3452485 - DNA, 25 bp, Homo sapien
gcaaagattcacgtctcaacatcaa

SEQ ID NO: 3452486 - DNA, 25 bp, Homo sapien
tgtccaagaatcattgcaaaatcca

SEQ ID NO: 3452487 - DNA, 25 bp, Homo sapien
gcaatgttgagataatcagaaccaa

SEQ ID NO: 3452488 - DNA, 25 bp, Homo sapien
cagggctcgccatcaagaaaacact

SEQ ID NO: 3452489 - DNA, 25 bp, Homo sapien
aacgtccacctctcagtaatatctt

SEQ ID NO: 3452490 - DNA, 25 bp, Homo sapien
ctgcggcgaatgagctcctgacctt

SEQ ID NO: 3452491 - DNA, 25 bp, Homo sapien
gaccttgaggagtacttaacagaat

SEQ ID NO: 3452492 - DNA, 25 bp, Homo sapien
taacagaattatttctcgaagaatc

SEQ ID NO: 3452493 - DNA, 25 bp, Homo sapien
ctgaaactcagtactgcggcgaatg

SEQ ID NO: 3452494 - DNA, 25 bp, Homo sapien
gggttcccacaatgattcttcgaga

SEQ ID NO: 3452495 - DNA, 25 bp, Homo sapien
gttctttgaagggttcccacaatga

SEQ ID NO: 3452496 - DNA, 25 bp, Homo sapien
tctgttaagtactcctcaaggtcag

SEQ ID NO: 3452497 - DNA, 25 bp, Homo sapien
aattctgttaagtactcctcaaggt

SEQ ID NO: 3452498 - DNA, 25 bp, Homo sapien
ctgaggaagaaagagcaacatgtca

SEQ ID NO: 3452499 - DNA, 25 bp, Homo sapien
gaggaagaaagagcaacatgtcatt

SEQ ID NO: 3452500 - DNA, 25 bp, Homo sapien
aagaaagagcaacatgtcattttgg

SEQ ID NO: 3452501 - DNA, 25 bp, Homo sapien
ggaagaaagagcaacatgtcatttt

SEQ ID NO: 3452502 - DNA, 25 bp, Homo sapien
tttctggcacgggaagccatcttct

SEQ ID NO: 3452503 - DNA, 25 bp, Homo sapien
gctgtgttgtctttaggcattcaaa

SEQ ID NO: 3452504 - DNA, 25 bp, Homo sapien
gccatcttcttcaatcgaatgttag

SEQ ID NO: 3452505 - DNA, 25 bp, Homo sapien
tctctgctgtgttgtctttaggcat

SEQ ID NO: 3452506 - DNA, 25 bp, Homo sapien
agaaatagatcttcagaggcatcac

SEQ ID NO: 3452507 - DNA, 25 bp, Homo sapien
gaaatagatcttcagaggcatcact

SEQ ID NO: 3452508 - DNA, 25 bp, Homo sapien
atagatcttcagaggcatcacttac

SEQ ID NO: 3452509 - DNA, 25 bp, Homo sapien
aaatagatcttcagaggcatcactt

SEQ ID NO: 3452510 - DNA, 25 bp, Homo sapien
cttccagtggctgattctggtggtt

SEQ ID NO: 3452511 - DNA, 25 bp, Homo sapien
actttttcccataaagactgcattt

SEQ ID NO: 3452512 - DNA, 25 bp, Homo sapien
tggtttccacgttcaggtttctctg

SEQ ID NO: 3452513 - DNA, 25 bp, Homo sapien
cacgttcaggtttctctgattttca

SEQ ID NO: 3452514 - DNA, 25 bp, Homo sapien
atcagctccgcatacgttcctctta

SEQ ID NO: 3452515 - DNA, 25 bp, Homo sapien
cattttcatcagctccgcatacgtt

SEQ ID NO: 3452516 - DNA, 25 bp, Homo sapien
ggcacattttcatcagctccgcata

SEQ ID NO: 3452517 - DNA, 25 bp, Homo sapien
ttttcatcagctccgcatacgttcc

SEQ ID NO: 3452518 - DNA, 25 bp, Homo sapien
ctgaaaccacattgtgagtttgtac

SEQ ID NO: 3452519 - DNA, 25 bp, Homo sapien
ccctgagctctagattcagaggctg

SEQ ID NO: 3452520 - DNA, 25 bp, Homo sapien
cctgccctgagctctagattcagag

SEQ ID NO: 3452521 - DNA, 25 bp, Homo sapien
ctcggaattggttgagcctgtccct

SEQ ID NO: 3452522 - DNA, 25 bp, Homo sapien
cggaattggttgagcctgtccctca

SEQ ID NO: 3452523 - DNA, 25 bp, Homo sapien
ctacatggttggtaggtcttgggac

SEQ ID NO: 3452524 - DNA, 25 bp, Homo sapien
catggttggtaggtcttgggacata

SEQ ID NO: 3452525 - DNA, 25 bp, Homo sapien
tacatggttggtaggtcttgggaca

SEQ ID NO: 3452526 - DNA, 25 bp, Homo sapien
tggttggtaggtcttgggacatact

SEQ ID NO: 3452527 - DNA, 25 bp, Homo sapien
tccgagtttattctaggccactctg

SEQ ID NO: 3452528 - DNA, 25 bp, Homo sapien
catcattgactctgccatccgagtt

SEQ ID NO: 3452529 - DNA, 25 bp, Homo sapien
tctgccatccgagtttattctaggc

SEQ ID NO: 3452530 - DNA, 25 bp, Homo sapien
atttccacagctaatctcatcattg

SEQ ID NO: 3452531 - DNA, 25 bp, Homo sapien
atgaagtaaccctagccattgtcct

SEQ ID NO: 3452532 - DNA, 25 bp, Homo sapien
cttcatatgaagtaaccctagccat

SEQ ID NO: 3452533 - DNA, 25 bp, Homo sapien
acaacttcatatgaagtaaccctag

SEQ ID NO: 3452534 - DNA, 25 bp, Homo sapien
actgtagcccaaacaacttcatatg

SEQ ID NO: 3452535 - DNA, 25 bp, Homo sapien
ctggacggcagagggtagctcaaaa

SEQ ID NO: 3452536 - DNA, 25 bp, Homo sapien
ccactaagtttctggacggcagagg

SEQ ID NO: 3452537 - DNA, 25 bp, Homo sapien
tcttaattcatgtgtggccggatta

SEQ ID NO: 3452538 - DNA, 25 bp, Homo sapien
catgtgtggccggattataagctgc

SEQ ID NO: 3452539 - DNA, 25 bp, Homo sapien
caactcttaattcatgtgtggccgg

SEQ ID NO: 3452540 - DNA, 25 bp, Homo sapien
taattcatgtgtggccggattataa

SEQ ID NO: 3452541 - DNA, 25 bp, Homo sapien
taggcagggtctaggtccaagattc

SEQ ID NO: 3452542 - DNA, 25 bp, Homo sapien
agattccaggtcttgataagtgtga

SEQ ID NO: 3452543 - DNA, 25 bp, Homo sapien
ggtctaggtccaagattccaggtct

SEQ ID NO: 3452544 - DNA, 25 bp, Homo sapien
tgatgaaataggcagggtctaggtc

SEQ ID NO: 3452545 - DNA, 25 bp, Homo sapien
cctgagtatggagagagctcaagcc

SEQ ID NO: 3452546 - DNA, 25 bp, Homo sapien
ctgagtatggagagagctcaagcca

SEQ ID NO: 3452547 - DNA, 25 bp, Homo sapien
agcctgagtatggagagagctcaag

SEQ ID NO: 3452548 - DNA, 25 bp, Homo sapien
gcctgagtatggagagagctcaagc

SEQ ID NO: 3452549 - DNA, 25 bp, Homo sapien
aaaaagtgcgactgtttctgctttt

SEQ ID NO: 3452550 - DNA, 25 bp, Homo sapien
caaaaagtgcgactgtttctgcttt

SEQ ID NO: 3452551 - DNA, 25 bp, Homo sapien
tcaaaaagtgcgactgtttctgctt

SEQ ID NO: 3452552 - DNA, 25 bp, Homo sapien
tccacacaaggttgtatgtatctgc

SEQ ID NO: 3452553 - DNA, 25 bp, Homo sapien
gggcagtccactttccttgcctgcc

SEQ ID NO: 3452554 - DNA, 25 bp, Homo sapien
cacacaaggttgtatgtatctgcta

SEQ ID NO: 3452555 - DNA, 25 bp, Homo sapien
tactccagattttgatacttcacaa

SEQ ID NO: 3452556 - DNA, 25 bp, Homo sapien
gctaaatgaagctcactttcacctc

SEQ ID NO: 3452557 - DNA, 25 bp, Homo sapien
ggctctatttcagctaaatgaagct

SEQ ID NO: 3452558 - DNA, 25 bp, Homo sapien
tttcagctaaatgaagctcactttc

SEQ ID NO: 3452559 - DNA, 25 bp, Homo sapien
tctatttcagctaaatgaagctcac

SEQ ID NO: 3452560 - DNA, 25 bp, Homo sapien
tgagacgctgaactctgaaaactct

SEQ ID NO: 3452561 - DNA, 25 bp, Homo sapien
tttgacctcgaaggcagggattgaa

SEQ ID NO: 3452562 - DNA, 25 bp, Homo sapien
caggtaaggatgagacgctgaactc

SEQ ID NO: 3452563 - DNA, 25 bp, Homo sapien
ggttctatactacaaacttccacag

SEQ ID NO: 3452564 - DNA, 25 bp, Homo sapien
tttaatgccataggaagtttctgac

SEQ ID NO: 3452565 - DNA, 25 bp, Homo sapien
ttctgacagcagatggccaatcatg

SEQ ID NO: 3452566 - DNA, 25 bp, Homo sapien
gatggccaatcatgtgccactcctt

SEQ ID NO: 3452567 - DNA, 25 bp, Homo sapien
tcctttgaaccttctgtaacatccc

SEQ ID NO: 3452568 - DNA, 25 bp, Homo sapien
ctccaggaacgcattttactttagt

SEQ ID NO: 3452569 - DNA, 25 bp, Homo sapien
ctgaggaattcagacgggtactcaa

SEQ ID NO: 3452570 - DNA, 25 bp, Homo sapien
ccaggaacgcattttactttagtct

SEQ ID NO: 3452571 - DNA, 25 bp, Homo sapien
gtactcaagtctttcggatactcag

SEQ ID NO: 3452572 - DNA, 25 bp, Homo sapien
agccaaggatcagatagaacaggtc

SEQ ID NO: 3452573 - DNA, 25 bp, Homo sapien
aggatcagatagaacaggtcactgc

SEQ ID NO: 3452574 - DNA, 25 bp, Homo sapien
ttgctggcctcacatttccttcact

SEQ ID NO: 3452575 - DNA, 25 bp, Homo sapien
ctgcttctgtcagggctggttgctg

SEQ ID NO: 3452576 - DNA, 25 bp, Homo sapien
ttcctccgcaggcacatttcaatga

SEQ ID NO: 3452577 - DNA, 25 bp, Homo sapien
tgaaaaccataagaatgaggcccaa

SEQ ID NO: 3452578 - DNA, 25 bp, Homo sapien
gtatcctggagggtcatatttctgt

SEQ ID NO: 3452579 - DNA, 25 bp, Homo sapien
taatatctgatccttgatagaggta

SEQ ID NO: 3452580 - DNA, 25 bp, Homo sapien
tgcaggtccaccatgtttctggacg

SEQ ID NO: 3452581 - DNA, 25 bp, Homo sapien
tctgcaggtccaccatgtttctgga

SEQ ID NO: 3452582 - DNA, 25 bp, Homo sapien
ggccactcaaaataataccaacgct

SEQ ID NO: 3452583 - DNA, 25 bp, Homo sapien
accaaaaactgccacggatactgtt

SEQ ID NO: 3452584 - DNA, 25 bp, Homo sapien
aaactgccacggatactgttacagg

SEQ ID NO: 3452585 - DNA, 25 bp, Homo sapien
taataccaacgctattgttggcaag

SEQ ID NO: 3452586 - DNA, 25 bp, Homo sapien
tgtgcgatcacagctgacatcgttt

SEQ ID NO: 3452587 - DNA, 25 bp, Homo sapien
tcacagctgacatcgtttctattat

SEQ ID NO: 3452588 - DNA, 25 bp, Homo sapien
tatcctgacagcacttttttcctcc

SEQ ID NO: 3452589 - DNA, 25 bp, Homo sapien
tggattttctgtgcgatcacagctg

SEQ ID NO: 3452590 - DNA, 25 bp, Homo sapien
tcccaggcctgttttgtgcagttgg

SEQ ID NO: 3452591 - DNA, 25 bp, Homo sapien
cctcttggtgggatcaacatgcaat

SEQ ID NO: 3452592 - DNA, 25 bp, Homo sapien
ttccttgcaggagtgagtccgtgct

SEQ ID NO: 3452593 - DNA, 25 bp, Homo sapien
tgaatccagagctcactacagggcg

SEQ ID NO: 3452594 - DNA, 25 bp, Homo sapien
gacaggctcaaccacttccaaggtg

SEQ ID NO: 3452595 - DNA, 25 bp, Homo sapien
tcagagtcaagctcatgtaatgagt

SEQ ID NO: 3452596 - DNA, 25 bp, Homo sapien
ggccacatctgaggtgctcagagtc

SEQ ID NO: 3452597 - DNA, 25 bp, Homo sapien
catgtaatgagtatcattctgtgaa

SEQ ID NO: 3452598 - DNA, 25 bp, Homo sapien
tcattagttctttattggccacatc

SEQ ID NO: 3452599 - DNA, 25 bp, Homo sapien
ccatcatgactctttctgagtgaca

SEQ ID NO: 3452600 - DNA, 25 bp, Homo sapien
ttagcctcgcatgggtccactttcc

SEQ ID NO: 3452601 - DNA, 25 bp, Homo sapien
atcaaacagagcgttagaaactcct

SEQ ID NO: 3452602 - DNA, 25 bp, Homo sapien
aaaatacatcaatatacccatcatg

SEQ ID NO: 3452603 - DNA, 25 bp, Homo sapien
gtcttccaaaacgtacttgatgtat

SEQ ID NO: 3452604 - DNA, 25 bp, Homo sapien
gtatttctttaacttgccacaatca

SEQ ID NO: 3452605 - DNA, 25 bp, Homo sapien
gaaagtagttacactcctctcgatg

SEQ ID NO: 3452606 - DNA, 25 bp, Homo sapien
aatgccttggtttctagtaagggtg

SEQ ID NO: 3452607 - DNA, 25 bp, Homo sapien
ttgaatagtaatatgtacactgtcc

SEQ ID NO: 3452608 - DNA, 25 bp, Homo sapien
caaagctttcaagtattgtgcaggt

SEQ ID NO: 3452609 - DNA, 25 bp, Homo sapien
gcatgctggccgaattgattgaacg

SEQ ID NO: 3452610 - DNA, 25 bp, Homo sapien
cactgtcctacatctaccatactgt

SEQ ID NO: 3452611 - DNA, 25 bp, Homo sapien
ctgtagatatccagattagaagtca

SEQ ID NO: 3452612 - DNA, 25 bp, Homo sapien
gaatggtctcagtctagaaactctg

SEQ ID NO: 3452613 - DNA, 25 bp, Homo sapien
ggctactatgaatggtctcagtcta

SEQ ID NO: 3452614 - DNA, 25 bp, Homo sapien
gaagtcactcctggctcttcaaagc

SEQ ID NO: 3452615 - DNA, 25 bp, Homo sapien
tctggaagacttgcaggtcgtctga

SEQ ID NO: 3452616 - DNA, 25 bp, Homo sapien
ggaagacttgcaggtcgtctgaatc

SEQ ID NO: 3452617 - DNA, 25 bp, Homo sapien
aagacttgcaggtcgtctgaatcca

SEQ ID NO: 3452618 - DNA, 25 bp, Homo sapien
ctggaagacttgcaggtcgtctgaa

SEQ ID NO: 3452619 - DNA, 25 bp, Homo sapien
gagcacacagatattgtctgagctg

SEQ ID NO: 3452620 - DNA, 25 bp, Homo sapien
ctgtgagccatgtgctctggtgact

SEQ ID NO: 3452621 - DNA, 25 bp, Homo sapien
ctgtggctgtgagccatgtgctctg

SEQ ID NO: 3452622 - DNA, 25 bp, Homo sapien
gcctcacagaagagctccttagtct

SEQ ID NO: 3452623 - DNA, 25 bp, Homo sapien
tctagtttcctgatttagattgttt

SEQ ID NO: 3452624 - DNA, 25 bp, Homo sapien
gattgatttcccataaatagtccat

SEQ ID NO: 3452625 - DNA, 25 bp, Homo sapien
ctttaacgaatgaaatgttctagtt

SEQ ID NO: 3452626 - DNA, 25 bp, Homo sapien
acgaatgaaatgttctagtttcctg

SEQ ID NO: 3452627 - DNA, 25 bp, Homo sapien
tactgagtcaattgtttcctctact

SEQ ID NO: 3452628 - DNA, 25 bp, Homo sapien
tgtttcctctactaatctctctttt

SEQ ID NO: 3452629 - DNA, 25 bp, Homo sapien
tttcctctactaatctctcttttag

SEQ ID NO: 3452630 - DNA, 25 bp, Homo sapien
gtttcctctactaatctctctttta

SEQ ID NO: 3452631 - DNA, 25 bp, Homo sapien
tggttaaaaggattacatgttctca

SEQ ID NO: 3452632 - DNA, 25 bp, Homo sapien
ctcacttgactgtcttgtagttgtt

SEQ ID NO: 3452633 - DNA, 25 bp, Homo sapien
acttgactgtcttgtagttgttgga

SEQ ID NO: 3452634 - DNA, 25 bp, Homo sapien
cttgactgtcttgtagttgttggaa

SEQ ID NO: 3452635 - DNA, 25 bp, Homo sapien
cacttgactgtcttgtagttgttgg

SEQ ID NO: 3452636 - DNA, 25 bp, Homo sapien
agtgacatacgcaggtgatatttgc

SEQ ID NO: 3452637 - DNA, 25 bp, Homo sapien
tagagcagtgacatacgcaggtgat

SEQ ID NO: 3452638 - DNA, 25 bp, Homo sapien
tacgcaggtgatatttgcatgtcct

SEQ ID NO: 3452639 - DNA, 25 bp, Homo sapien
gacatacgcaggtgatatttgcatg

SEQ ID NO: 3452640 - DNA, 25 bp, Homo sapien
aatggagaagtgtaatggtggaagt

SEQ ID NO: 3452641 - DNA, 25 bp, Homo sapien
tgaatggagaagtgtaatggtggaa

SEQ ID NO: 3452642 - DNA, 25 bp, Homo sapien
gaatggagaagtgtaatggtggaag

SEQ ID NO: 3452643 - DNA, 25 bp, Homo sapien
tgttgagcatgtctaggactccagt

SEQ ID NO: 3452644 - DNA, 25 bp, Homo sapien
taggactccagttatgcaccatgaa

SEQ ID NO: 3452645 - DNA, 25 bp, Homo sapien
gttgagcatgtctaggactccagtt

SEQ ID NO: 3452646 - DNA, 25 bp, Homo sapien
ctaggactccagttatgcaccatga

SEQ ID NO: 3452647 - DNA, 25 bp, Homo sapien
ggttaagccgtgttcacagatccct

SEQ ID NO: 3452648 - DNA, 25 bp, Homo sapien
gacctgctctctagaatgggcctaa

SEQ ID NO: 3452649 - DNA, 25 bp, Homo sapien
taagttatgcctgttatagtctcaa

SEQ ID NO: 3452650 - DNA, 25 bp, Homo sapien
gattcaatctactctgggttcctgc

SEQ ID NO: 3452651 - DNA, 25 bp, Homo sapien
atcaataacgaaattggcatctgca

SEQ ID NO: 3452652 - DNA, 25 bp, Homo sapien
ggaggaaaaccatagataagagaac

SEQ ID NO: 3452653 - DNA, 25 bp, Homo sapien
ttcataaccacatagtaattacatt

SEQ ID NO: 3452654 - DNA, 25 bp, Homo sapien
cataaccacatagtaattacattcc

SEQ ID NO: 3452655 - DNA, 25 bp, Homo sapien
acaaaagtacacattcaaggtggtt

SEQ ID NO: 3452656 - DNA, 25 bp, Homo sapien
cattcataaccacatagtaattaca

SEQ ID NO: 3452657 - DNA, 25 bp, Homo sapien
cggctgggtcccagccagcagcacc

SEQ ID NO: 3452658 - DNA, 25 bp, Homo sapien
tgcggctgggtcccagccagcagca

SEQ ID NO: 3452659 - DNA, 25 bp, Homo sapien
ctgcggctgggtcccagccagcagc

SEQ ID NO: 3452660 - DNA, 25 bp, Homo sapien
gctgggtcccagccagcagcaccac

SEQ ID NO: 3452661 - DNA, 25 bp, Homo sapien
cggtggcggggtcatgcagcgcgcc

SEQ ID NO: 3452662 - DNA, 25 bp, Homo sapien
ggcggtggcggggtcatgcagcgcg

SEQ ID NO: 3452663 - DNA, 25 bp, Homo sapien
ggtggcggggtcatgcagcgcgccc

SEQ ID NO: 3452664 - DNA, 25 bp, Homo sapien
tggcggggtcatgcagcgcgccccg

SEQ ID NO: 3452665 - DNA, 25 bp, Homo sapien
tcctggaactctttgtagtcagcgc

SEQ ID NO: 3452666 - DNA, 25 bp, Homo sapien
ctcctcctggaaagggtacaaagag

SEQ ID NO: 3452667 - DNA, 25 bp, Homo sapien
agggtacaaagagtcgtcccaggcg

SEQ ID NO: 3452668 - DNA, 25 bp, Homo sapien
acaaagagtcgtcccaggcgatgct

SEQ ID NO: 3452669 - DNA, 25 bp, Homo sapien
tgcagcagccccacgcctccaggac

SEQ ID NO: 3452670 - DNA, 25 bp, Homo sapien
caacgtctgcagcagccccacgcct

SEQ ID NO: 3452671 - DNA, 25 bp, Homo sapien
acgtctgcagcagccccacgcctcc

SEQ ID NO: 3452672 - DNA, 25 bp, Homo sapien
gtctgcagcagccccacgcctccag

SEQ ID NO: 3452673 - DNA, 25 bp, Homo sapien
aggcgacattaaggccgctctggcc

SEQ ID NO: 3452674 - DNA, 25 bp, Homo sapien
taaggccgctctggccattgtggtc

SEQ ID NO: 3452675 - DNA, 25 bp, Homo sapien
gacattaaggccgctctggccattg

SEQ ID NO: 3452676 - DNA, 25 bp, Homo sapien
gtggtcagtctcctgagccttctca

SEQ ID NO: 3452677 - DNA, 25 bp, Homo sapien
tatgattagggttgcgttcccctcc

SEQ ID NO: 3452678 - DNA, 25 bp, Homo sapien
cagctatgattagggttgcgttccc

SEQ ID NO: 3452679 - DNA, 25 bp, Homo sapien
ctcctgcctgtgcagctatgattag

SEQ ID NO: 3452680 - DNA, 25 bp, Homo sapien
cctgtgcagctatgattagggttgc

SEQ ID NO: 3452681 - DNA, 25 bp, Homo sapien
aaggctgagagccagcgtctaaggc

SEQ ID NO: 3452682 - DNA, 25 bp, Homo sapien
cgtctaaggcaactgtgcccatggg

SEQ ID NO: 3452683 - DNA, 25 bp, Homo sapien
gagccagcgtctaaggcaactgtgc

SEQ ID NO: 3452684 - DNA, 25 bp, Homo sapien
ctgacgcaggaagcgcaaggctgag

SEQ ID NO: 3452685 - DNA, 25 bp, Homo sapien
cagcaagtagttggtgatgatagcg

SEQ ID NO: 3452686 - DNA, 25 bp, Homo sapien
aagtagttggtgatgatagcgtgcc

SEQ ID NO: 3452687 - DNA, 25 bp, Homo sapien
caagtagttggtgatgatagcgtgc

SEQ ID NO: 3452688 - DNA, 25 bp, Homo sapien
agttcagcaagtagttggtgatgat

SEQ ID NO: 3452689 - DNA, 25 bp, Homo sapien
ctcctttggcgacctcccacggcgg

SEQ ID NO: 3452690 - DNA, 25 bp, Homo sapien
gatgcgatcggttcgaccctgcatg

SEQ ID NO: 3452691 - DNA, 25 bp, Homo sapien
gctagctcagggctcggatgcgatc

SEQ ID NO: 3452692 - DNA, 25 bp, Homo sapien
catgagacggacgtgtaagtggcca

SEQ ID NO: 3452693 - DNA, 25 bp, Homo sapien
tcctccgggccacgcacggagcgcg

SEQ ID NO: 3452694 - DNA, 25 bp, Homo sapien
tactttttccccagtcgctcctggc

SEQ ID NO: 3452695 - DNA, 25 bp, Homo sapien
ttccgcaccctctcgtggagcggag

SEQ ID NO: 3452696 - DNA, 25 bp, Homo sapien
ttcttcgagccctcgggcttccgca

SEQ ID NO: 3452697 - DNA, 25 bp, Homo sapien
tgttagaggctggtggtcatcctga

SEQ ID NO: 3452698 - DNA, 25 bp, Homo sapien
ctgttagaggctggtggtcatcctg

SEQ ID NO: 3452699 - DNA, 25 bp, Homo sapien
gttagaggctggtggtcatcctgac

SEQ ID NO: 3452700 - DNA, 25 bp, Homo sapien
ctggcacgcgagggccacggcgggg

SEQ ID NO: 3452701 - DNA, 25 bp, Homo sapien
gcctcttccccacgcacagggagct

SEQ ID NO: 3452702 - DNA, 25 bp, Homo sapien
gccagccgcctcttccccacgcaca

SEQ ID NO: 3452703 - DNA, 25 bp, Homo sapien
tcttccccacgcacagggagctctg

SEQ ID NO: 3452704 - DNA, 25 bp, Homo sapien
gccgcctcttccccacgcacaggga

SEQ ID NO: 3452705 - DNA, 25 bp, Homo sapien
tcctgagccgccaggatttcctgca

SEQ ID NO: 3452706 - DNA, 25 bp, Homo sapien
ccagccgcgccgccagaatttcctg

SEQ ID NO: 3452707 - DNA, 25 bp, Homo sapien
agccgcgccgccagaatttcctgag

SEQ ID NO: 3452708 - DNA, 25 bp, Homo sapien
ccccagccgcgccgccagaatttcc

SEQ ID NO: 3452709 - DNA, 25 bp, Homo sapien
gtgggaggccggctcttagggagcc

SEQ ID NO: 3452710 - DNA, 25 bp, Homo sapien
tgggcagggcggcttgtgctgctct

SEQ ID NO: 3452711 - DNA, 25 bp, Homo sapien
gaggccggctcttagggagccctcc

SEQ ID NO: 3452712 - DNA, 25 bp, Homo sapien
tgctctgcgctctccgcttcgcccg

SEQ ID NO: 3452713 - DNA, 25 bp, Homo sapien
cgggccgcaagctgctccgctgcag

SEQ ID NO: 3452714 - DNA, 25 bp, Homo sapien
cacgccgggccgcaagctgctccgc

SEQ ID NO: 3452715 - DNA, 25 bp, Homo sapien
cgccgggccgcaagctgctccgctg

SEQ ID NO: 3452716 - DNA, 25 bp, Homo sapien
accacgccgggccgcaagctgctcc

SEQ ID NO: 3452717 - DNA, 25 bp, Homo sapien
ggtgggcacgggcgccttgctgagg

SEQ ID NO: 3452718 - DNA, 25 bp, Homo sapien
gcacgggcgccttgctgaggcggac

SEQ ID NO: 3452719 - DNA, 25 bp, Homo sapien
ggaaggtgggcacgggcgccttgct

SEQ ID NO: 3452720 - DNA, 25 bp, Homo sapien
tggaaggtgggcacgggcgccttgc

SEQ ID NO: 3452721 - DNA, 25 bp, Homo sapien
cgtgggggactcttggaattgggct

SEQ ID NO: 3452722 - DNA, 25 bp, Homo sapien
cacgtgggggactcttggaattggg

SEQ ID NO: 3452723 - DNA, 25 bp, Homo sapien
tcacgtgggggactcttggaattgg

SEQ ID NO: 3452724 - DNA, 25 bp, Homo sapien
ttacaggaggtacaaataaagccag

SEQ ID NO: 3452725 - DNA, 25 bp, Homo sapien
tctgagtaaggaaaagacgagtcac

SEQ ID NO: 3452726 - DNA, 25 bp, Homo sapien
taaagccagtacctgggcagataac

SEQ ID NO: 3452727 - DNA, 25 bp, Homo sapien
tgtgctgtagaagtcataataaccc

SEQ ID NO: 3452728 - DNA, 25 bp, Homo sapien
tgagacaatacatcgcagattctgg

SEQ ID NO: 3452729 - DNA, 25 bp, Homo sapien
cagagaagtcagactgaattcgtgg

SEQ ID NO: 3452730 - DNA, 25 bp, Homo sapien
aaaaagcagagttgtccagggaaga

SEQ ID NO: 3452731 - DNA, 25 bp, Homo sapien
cacgaatcttctagacttgagacaa

SEQ ID NO: 3452732 - DNA, 25 bp, Homo sapien
gcattcagagcactggacaagaaat

SEQ ID NO: 3452733 - DNA, 25 bp, Homo sapien
ctgctctgttgactttgtgcattca

SEQ ID NO: 3452734 - DNA, 25 bp, Homo sapien
ggcagatgagttccccctgaaagac

SEQ ID NO: 3452735 - DNA, 25 bp, Homo sapien
aagtagttcatgcacagggggcaga

SEQ ID NO: 3452736 - DNA, 25 bp, Homo sapien
cagcatctggttctggtggtttcca

SEQ ID NO: 3452737 - DNA, 25 bp, Homo sapien
cattcaggtttctgtgattttcaca

SEQ ID NO: 3452738 - DNA, 25 bp, Homo sapien
tttcacaagctttttcccacaaaga

SEQ ID NO: 3452739 - DNA, 25 bp, Homo sapien
caaagactgcattttctgtaaaagc

SEQ ID NO: 3452740 - DNA, 25 bp, Homo sapien
cccagtcagttgtattgttattaat

SEQ ID NO: 3452741 - DNA, 25 bp, Homo sapien
ttaacgtcctgggaaagtctgagtc

SEQ ID NO: 3452742 - DNA, 25 bp, Homo sapien
aaacccagtcagttgtattgttatt

SEQ ID NO: 3452743 - DNA, 25 bp, Homo sapien
cttgaagacattctctaaagaagtg

SEQ ID NO: 3452744 - DNA, 25 bp, Homo sapien
tgcactgagctctggattcagaggc

SEQ ID NO: 3452745 - DNA, 25 bp, Homo sapien
ctcggaattggttgagcctgtccct

SEQ ID NO: 3452746 - DNA, 25 bp, Homo sapien
tcagtccagtgatgggccctgcact

SEQ ID NO: 3452747 - DNA, 25 bp, Homo sapien
cggaattggttgagcctgtccctca

SEQ ID NO: 3452748 - DNA, 25 bp, Homo sapien
ggcttcttcatgatgcagagtaata

SEQ ID NO: 3452749 - DNA, 25 bp, Homo sapien
tgcagtgaaatagggtacatcttga

SEQ ID NO: 3452750 - DNA, 25 bp, Homo sapien
tgaaatagggtacatcttgatggtc

SEQ ID NO: 3452751 - DNA, 25 bp, Homo sapien
gggtacatcttgatggtcacatcca

SEQ ID NO: 3452752 - DNA, 25 bp, Homo sapien
ctcggctggtaggttttgggatata

SEQ ID NO: 3452753 - DNA, 25 bp, Homo sapien
gactgcattgaatgtcattcttaat

SEQ ID NO: 3452754 - DNA, 25 bp, Homo sapien
tgtcattcttaatacacccaagaag

SEQ ID NO: 3452755 - DNA, 25 bp, Homo sapien
tctccttccgatacatattacagac

SEQ ID NO: 3452756 - DNA, 25 bp, Homo sapien
caattagggatggtgtatattaggg

SEQ ID NO: 3452757 - DNA, 25 bp, Homo sapien
tggtgtatattagggagctttgatt

SEQ ID NO: 3452758 - DNA, 25 bp, Homo sapien
agaaagagcaattagggatggtgta

SEQ ID NO: 3452759 - DNA, 25 bp, Homo sapien
atggtgtatattagggagctttgat

SEQ ID NO: 3452760 - DNA, 25 bp, Homo sapien
cagttatcattgagacttcactcca

SEQ ID NO: 3452761 - DNA, 25 bp, Homo sapien
tcactccaagttttttgcatgaagc

SEQ ID NO: 3452762 - DNA, 25 bp, Homo sapien
agaaccaatacgtatacttttagcg

SEQ ID NO: 3452763 - DNA, 25 bp, Homo sapien
gaatatactgtatgccatgatcatg

SEQ ID NO: 3452764 - DNA, 25 bp, Homo sapien
ctaattgtcgttggaatagccaggg

SEQ ID NO: 3452765 - DNA, 25 bp, Homo sapien
aattgtcgttggaatagccagggtt

SEQ ID NO: 3452766 - DNA, 25 bp, Homo sapien
gttggaatagccagggttaggcagc

SEQ ID NO: 3452767 - DNA, 25 bp, Homo sapien
ttgtcgttggaatagccagggttag

SEQ ID NO: 3452768 - DNA, 25 bp, Homo sapien
cgaaaattctcaaggcactggtcca

SEQ ID NO: 3452769 - DNA, 25 bp, Homo sapien
ttctccaagctggctatccctgctg

SEQ ID NO: 3452770 - DNA, 25 bp, Homo sapien
gtggttgagcctgtccaccggtcct

SEQ ID NO: 3452771 - DNA, 25 bp, Homo sapien
tccaccggtcctgtgatgggccctg

SEQ ID NO: 3452772 - DNA, 25 bp, Homo sapien
cggtcctgtgatgggccctgtaggg

SEQ ID NO: 3452773 - DNA, 25 bp, Homo sapien
gcctgtccaccggtcctgtgatggg

SEQ ID NO: 3452774 - DNA, 25 bp, Homo sapien
aagaaagagattctcactagaaaac

SEQ ID NO: 3452775 - DNA, 25 bp, Homo sapien
catcctcaaacagcccgatattgta

SEQ ID NO: 3452776 - DNA, 25 bp, Homo sapien
caaacagcccgatattgtaattggt

SEQ ID NO: 3452777 - DNA, 25 bp, Homo sapien
tcaaagatccacgtctaaacatcaa

SEQ ID NO: 3452778 - DNA, 25 bp, Homo sapien
tctgtcagaattcaaagatccacgt

SEQ ID NO: 3452779 - DNA, 25 bp, Homo sapien
ctacatagtgaggaaacattgggga

SEQ ID NO: 3452780 - DNA, 25 bp, Homo sapien
tatgtccttagagttaaacattgtg

SEQ ID NO: 3452781 - DNA, 25 bp, Homo sapien
gagttaaacattgtgctattcttcc

SEQ ID NO: 3452782 - DNA, 25 bp, Homo sapien
gactgaaatgattatccaccttcac

SEQ ID NO: 3452783 - DNA, 25 bp, Homo sapien
tcaaaattaagaaacacaccaactc

SEQ ID NO: 3452784 - DNA, 25 bp, Homo sapien
acaccaactcggaccagaggtttct

SEQ ID NO: 3452785 - DNA, 25 bp, Homo sapien
taagaaacacaccaactcggaccag

SEQ ID NO: 3452786 - DNA, 25 bp, Homo sapien
tccactttcaaaattaagaaacaca

SEQ ID NO: 3452787 - DNA, 25 bp, Homo sapien
gacaggaaaatttaaggagccagct

SEQ ID NO: 3452788 - DNA, 25 bp, Homo sapien
gctgggtaattccatatgagggaat

SEQ ID NO: 3452789 - DNA, 25 bp, Homo sapien
ggagccagctgggtaattccatatg

SEQ ID NO: 3452790 - DNA, 25 bp, Homo sapien
gtaattccatatgagggaattcttg

SEQ ID NO: 3452791 - DNA, 25 bp, Homo sapien
atctgtggccagtgtaaaagaaaga

SEQ ID NO: 3452792 - DNA, 25 bp, Homo sapien
catctgtggccagtgtaaaagaaag

SEQ ID NO: 3452793 - DNA, 25 bp, Homo sapien
tcatctgtggccagtgtaaaagaaa

SEQ ID NO: 3452794 - DNA, 25 bp, Homo sapien
tctgtggccagtgtaaaagaaagac

SEQ ID NO: 3452795 - DNA, 25 bp, Homo sapien
gcattccagtaacctcaagatgtct

SEQ ID NO: 3452796 - DNA, 25 bp, Homo sapien
agcgtctgccaatctctaccatgcg

SEQ ID NO: 3452797 - DNA, 25 bp, Homo sapien
aaagtcttgagccagagatccaatt

SEQ ID NO: 3452798 - DNA, 25 bp, Homo sapien
tcccagggtacatttgggagtactg

SEQ ID NO: 3452799 - DNA, 25 bp, Homo sapien
ccttagcataggtcgattctttgta

SEQ ID NO: 3452800 - DNA, 25 bp, Homo sapien
cagacatcaacttctatttcttctc

SEQ ID NO: 3452801 - DNA, 25 bp, Homo sapien
ggactgtggatctgcttgtttcaac

SEQ ID NO: 3452802 - DNA, 25 bp, Homo sapien
gggtccgggcctcctgtcatggcca

SEQ ID NO: 3452803 - DNA, 25 bp, Homo sapien
ccgggcctcctgtcatggccatatt

SEQ ID NO: 3452804 - DNA, 25 bp, Homo sapien
tcatagaccccatcactataggctg

SEQ ID NO: 3452805 - DNA, 25 bp, Homo sapien
ctcatagaccccatcactataggct

SEQ ID NO: 3452806 - DNA, 25 bp, Homo sapien
ctcatctgcctgaattacctcatag

SEQ ID NO: 3452807 - DNA, 25 bp, Homo sapien
gcctgaattacctcatagaccccat

SEQ ID NO: 3452808 - DNA, 25 bp, Homo sapien
gagtctgtcgctgaccacggcagcc

SEQ ID NO: 3452809 - DNA, 25 bp, Homo sapien
ctgagtctgtcgctgaccacggcag

SEQ ID NO: 3452810 - DNA, 25 bp, Homo sapien
agaacctgagtctgtcgctgaccac

SEQ ID NO: 3452811 - DNA, 25 bp, Homo sapien
aacctgagtctgtcgctgaccacgg

SEQ ID NO: 3452812 - DNA, 25 bp, Homo sapien
cagagacaagaatcagggagcacac

SEQ ID NO: 3452813 - DNA, 25 bp, Homo sapien
catctctctcctgacaatgttcctg

SEQ ID NO: 3452814 - DNA, 25 bp, Homo sapien
ctccttccagcagagacaagaatca

SEQ ID NO: 3452815 - DNA, 25 bp, Homo sapien
caatgttcctggcttgatttcctcc

SEQ ID NO: 3452816 - DNA, 25 bp, Homo sapien
tcgatgaaacatattgccatcattg

SEQ ID NO: 3452817 - DNA, 25 bp, Homo sapien
tgtcgatgaaacatattgccatcat

SEQ ID NO: 3452818 - DNA, 25 bp, Homo sapien
ctgtcgatgaaacatattgccatca

SEQ ID NO: 3452819 - DNA, 25 bp, Homo sapien
gtcgatgaaacatattgccatcatt

SEQ ID NO: 3452820 - DNA, 25 bp, Homo sapien
cacggtatcaacactcaatgggtga

SEQ ID NO: 3452821 - DNA, 25 bp, Homo sapien
gtatcaacactcaatgggtgaactg

SEQ ID NO: 3452822 - DNA, 25 bp, Homo sapien
gacccacggtatcaacactcaatgg

SEQ ID NO: 3452823 - DNA, 25 bp, Homo sapien
tcactcagacccacggtatcaacac

SEQ ID NO: 3452824 - DNA, 25 bp, Homo sapien
accctgtgtttcctccaccctcagc

SEQ ID NO: 3452825 - DNA, 25 bp, Homo sapien
caccctgtgtttcctccaccctcag

SEQ ID NO: 3452826 - DNA, 25 bp, Homo sapien
ccctgtgtttcctccaccctcagct

SEQ ID NO: 3452827 - DNA, 25 bp, Homo sapien
tcaccctgtgtttcctccaccctca

SEQ ID NO: 3452828 - DNA, 25 bp, Homo sapien
gcagtgattaaagtggccagtcaat

SEQ ID NO: 3452829 - DNA, 25 bp, Homo sapien
tggatggcaccccttgttttagaga

SEQ ID NO: 3452830 - DNA, 25 bp, Homo sapien
tctgagaccatgaagaatcacacag

SEQ ID NO: 3452831 - DNA, 25 bp, Homo sapien
tgtgcctgtgctctaccagggtcag

SEQ ID NO: 3452832 - DNA, 25 bp, Homo sapien
ttaaaaaatgctttggatacttgat

SEQ ID NO: 3452833 - DNA, 25 bp, Homo sapien
tccactttaaaaaatgctttggata

SEQ ID NO: 3452834 - DNA, 25 bp, Homo sapien
ctttaaaaaatgctttggatacttg

SEQ ID NO: 3452835 - DNA, 25 bp, Homo sapien
cactttaaaaaatgctttggatact

SEQ ID NO: 3452836 - DNA, 25 bp, Homo sapien
tgactgtcgtctctgtaggcggcat

SEQ ID NO: 3452837 - DNA, 25 bp, Homo sapien
tcaaatatgactgtcgtctctgtag

SEQ ID NO: 3452838 - DNA, 25 bp, Homo sapien
gtcgtctctgtaggcggcatctgca

SEQ ID NO: 3452839 - DNA, 25 bp, Homo sapien
ggcatctgcaatcttgaaaagccat

SEQ ID NO: 3452840 - DNA, 25 bp, Homo sapien
tcttcctgttggcgggcaacttcca

SEQ ID NO: 3452841 - DNA, 25 bp, Homo sapien
cttcctgttggcgggcaacttccat

SEQ ID NO: 3452842 - DNA, 25 bp, Homo sapien
gaaacagagagcgcgctggcaggag

SEQ ID NO: 3452843 - DNA, 25 bp, Homo sapien
gagaaacagagagcgcgctggcagg

SEQ ID NO: 3452844 - DNA, 25 bp, Homo sapien
ctgcagagaaacagagagcgcgctg

SEQ ID NO: 3452845 - DNA, 25 bp, Homo sapien
cagagaaacagagagcgcgctggca

SEQ ID NO: 3452846 - DNA, 25 bp, Homo sapien
cttggggcgcctgctacattcgcga

SEQ ID NO: 3452847 - DNA, 25 bp, Homo sapien
cgcctgctacattcgcgagcttcgg

SEQ ID NO: 3452848 - DNA, 25 bp, Homo sapien
gcctgctacattcgcgagcttcggg

SEQ ID NO: 3452849 - DNA, 25 bp, Homo sapien
gggcgcctgctacattcgcgagctt

SEQ ID NO: 3452850 - DNA, 25 bp, Homo sapien
aggtacagacggcccctggattccg

SEQ ID NO: 3452851 - DNA, 25 bp, Homo sapien
acagacggcccctggattccgccat

SEQ ID NO: 3452852 - DNA, 25 bp, Homo sapien
caaaggtacagacggcccctggatt

SEQ ID NO: 3452853 - DNA, 25 bp, Homo sapien
ccaaaggtacagacggcccctggat

SEQ ID NO: 3452854 - DNA, 25 bp, Homo sapien
aggaaagatgccagcgcagcagcca

SEQ ID NO: 3452855 - DNA, 25 bp, Homo sapien
cataaatcccatcaggaaagatgcc

SEQ ID NO: 3452856 - DNA, 25 bp, Homo sapien
ggaaagatgccagcgcagcagccaa

SEQ ID NO: 3452857 - DNA, 25 bp, Homo sapien
aaatcccatcaggaaagatgccagc

SEQ ID NO: 3452858 - DNA, 25 bp, Homo sapien
atgttgcttggaaataaaacgattt

SEQ ID NO: 3452859 - DNA, 25 bp, Homo sapien
cctgcagacagtgacagctgtaggt

SEQ ID NO: 3452860 - DNA, 25 bp, Homo sapien
aaacgattttttttcatccctgcag

SEQ ID NO: 3452861 - DNA, 25 bp, Homo sapien
ttttttcatccctgcagacagtgac

SEQ ID NO: 3452862 - DNA, 25 bp, Homo sapien
tccaccgtatactttgatgatagcg

SEQ ID NO: 3452863 - DNA, 25 bp, Homo sapien
tgatgatagcgcacagaagtggtcg

SEQ ID NO: 3452864 - DNA, 25 bp, Homo sapien
tttcagctttcatttcggataccag

SEQ ID NO: 3452865 - DNA, 25 bp, Homo sapien
agaagtggtcgtttctttgagaggc

SEQ ID NO: 3452866 - DNA, 25 bp, Homo sapien
tatagttggcatttgtctcattggg

SEQ ID NO: 3452867 - DNA, 25 bp, Homo sapien
catgttcatccacaatcgatatata

SEQ ID NO: 3452868 - DNA, 25 bp, Homo sapien
gaatctagtccaaatttcttccact

SEQ ID NO: 3452869 - DNA, 25 bp, Homo sapien
gaggacatcataatgaaccaacttg

SEQ ID NO: 3452870 - DNA, 25 bp, Homo sapien
gctgagaaagcattatatggtggca

SEQ ID NO: 3452871 - DNA, 25 bp, Homo sapien
ggttcaaggtatgatgttttgaaaa

SEQ ID NO: 3452872 - DNA, 25 bp, Homo sapien
ctcatagccatctggtggtggttca

SEQ ID NO: 3452873 - DNA, 25 bp, Homo sapien
ggtggtggttcaaggtatgatgttt

SEQ ID NO: 3452874 - DNA, 25 bp, Homo sapien
catatcttgcaataacaatcttccc

SEQ ID NO: 3452875 - DNA, 25 bp, Homo sapien
gaaaaagtcttcagtgcgagcatag

SEQ ID NO: 3452876 - DNA, 25 bp, Homo sapien
cttcagtgcgagcatagttcacata

SEQ ID NO: 3452877 - DNA, 25 bp, Homo sapien
tcccagtacagttgatgcccatctc

SEQ ID NO: 3452878 - DNA, 25 bp, Homo sapien
caccagcaccattcaaatttaacac

SEQ ID NO: 3452879 - DNA, 25 bp, Homo sapien
cttttgctggatagcctggagtgag

SEQ ID NO: 3452880 - DNA, 25 bp, Homo sapien
agttccaggaagattccatcctttg

SEQ ID NO: 3452881 - DNA, 25 bp, Homo sapien
cagctggatctgagtacaagatgat

SEQ ID NO: 3452882 - DNA, 25 bp, Homo sapien
ctgcatcattatatccaatgggatg

SEQ ID NO: 3452883 - DNA, 25 bp, Homo sapien
cattatatccaatgggatgtacagg

SEQ ID NO: 3452884 - DNA, 25 bp, Homo sapien
ccaatgggatgtacaggtattcggg

SEQ ID NO: 3452885 - DNA, 25 bp, Homo sapien
tatccaatgggatgtacaggtattc

SEQ ID NO: 3452886 - DNA, 25 bp, Homo sapien
tcaatgagaaaatagacaactagtg

SEQ ID NO: 3452887 - DNA, 25 bp, Homo sapien
atgagaaaatagacaactagtgcaa

SEQ ID NO: 3452888 - DNA, 25 bp, Homo sapien
aaatatcttaatctcatatccaaca

SEQ ID NO: 3452889 - DNA, 25 bp, Homo sapien
aaaatatcttaatctcatatccaac

SEQ ID NO: 3452890 - DNA, 25 bp, Homo sapien
aaggctaccacaatttctaaggaga

SEQ ID NO: 3452891 - DNA, 25 bp, Homo sapien
tcatttgtagcgaacagagcgatat

SEQ ID NO: 3452892 - DNA, 25 bp, Homo sapien
ttttctagcaagagagccatactga

SEQ ID NO: 3452893 - DNA, 25 bp, Homo sapien
caaggtcatacctctagtaagtggg

SEQ ID NO: 3452894 - DNA, 25 bp, Homo sapien
tccctgtaaagccaggtccgatact

SEQ ID NO: 3452895 - DNA, 25 bp, Homo sapien
ggtccgatactataactcacattaa

SEQ ID NO: 3452896 - DNA, 25 bp, Homo sapien
ctggtggagcaattcctcccaagta

SEQ ID NO: 3452897 - DNA, 25 bp, Homo sapien
ctgaaagaatcactccctgtaaagc

SEQ ID NO: 3452898 - DNA, 25 bp, Homo sapien
gcaccttcacctagtttttcacatg

SEQ ID NO: 3452899 - DNA, 25 bp, Homo sapien
taaaaaatagctgaagagagaattt

SEQ ID NO: 3452900 - DNA, 25 bp, Homo sapien
gagattctgtgaaactaatattgtg

SEQ ID NO: 3452901 - DNA, 25 bp, Homo sapien
cacatgtatatcattttgtaagtta

SEQ ID NO: 3452902 - DNA, 25 bp, Homo sapien
taaaaacagctatatgcactctgat

SEQ ID NO: 3452903 - DNA, 25 bp, Homo sapien
tcctttctctggagggcatacacaa

SEQ ID NO: 3452904 - DNA, 25 bp, Homo sapien
gagaatccaaattcacgtagttaag

SEQ ID NO: 3452905 - DNA, 25 bp, Homo sapien
acttcttgaagttctgatcatgcca

SEQ ID NO: 3452906 - DNA, 25 bp, Homo sapien
gatatatgattagtaagaaacccaa

SEQ ID NO: 3452907 - DNA, 25 bp, Homo sapien
gaaacccaaattcatcggtattgtg

SEQ ID NO: 3452908 - DNA, 25 bp, Homo sapien
tattcaactaaaagtacctcagagg

SEQ ID NO: 3452909 - DNA, 25 bp, Homo sapien
aaatatcaagctcagccagacagaa

SEQ ID NO: 3452910 - DNA, 25 bp, Homo sapien
ttatgaaaacgaagaagacagccca

SEQ ID NO: 3452911 - DNA, 25 bp, Homo sapien
gcaagtaaggtacagacattatgcc

SEQ ID NO: 3452912 - DNA, 25 bp, Homo sapien
gaaaagctgtgcaatagcataatgg

SEQ ID NO: 3452913 - DNA, 25 bp, Homo sapien
cctaagcatgcaccttgaagtcaaa

SEQ ID NO: 3452914 - DNA, 25 bp, Homo sapien
caggttccacagatcctctgatagt

SEQ ID NO: 3452915 - DNA, 25 bp, Homo sapien
tctgatagttccaactacattgtaa

SEQ ID NO: 3452916 - DNA, 25 bp, Homo sapien
ccaactacattgtaaatccttgtaa

SEQ ID NO: 3452917 - DNA, 25 bp, Homo sapien
tccacagatcctctgatagttccaa

SEQ ID NO: 3452918 - DNA, 25 bp, Homo sapien
ctctatagaagacaacactataaag

SEQ ID NO: 3452919 - DNA, 25 bp, Homo sapien
ccccacttcaattgttgactacaat

SEQ ID NO: 3452920 - DNA, 25 bp, Homo sapien
ttcctctatagaagacaacactata

SEQ ID NO: 3452921 - DNA, 25 bp, Homo sapien
tcttgcttgagtttcctctatagaa

SEQ ID NO: 3452922 - DNA, 25 bp, Homo sapien
ggttgggtcaatagctccaaatacc

SEQ ID NO: 3452923 - DNA, 25 bp, Homo sapien
tccaaaactccgggcaatttcttgc

SEQ ID NO: 3452924 - DNA, 25 bp, Homo sapien
cccactggttgggtcaatagctcca

SEQ ID NO: 3452925 - DNA, 25 bp, Homo sapien
caaaactccgggcaatttcttgcaa

SEQ ID NO: 3452926 - DNA, 25 bp, Homo sapien
aaaaatgatagttcttctaggtctc

SEQ ID NO: 3452927 - DNA, 25 bp, Homo sapien
tgtggaacccagaagtccaaattct

SEQ ID NO: 3452928 - DNA, 25 bp, Homo sapien
cagctggcaaaaatgatagttcttc

SEQ ID NO: 3452929 - DNA, 25 bp, Homo sapien
cagcccattctgtggaacccagaag

SEQ ID NO: 3452930 - DNA, 25 bp, Homo sapien
tgaagcacatatctgttgtaaatgc

SEQ ID NO: 3452931 - DNA, 25 bp, Homo sapien
tgtctgcagtctagtactaaaaggt

SEQ ID NO: 3452932 - DNA, 25 bp, Homo sapien
aattagctctaagcatctgtatcag

SEQ ID NO: 3452933 - DNA, 25 bp, Homo sapien
tgacaagaggcaataactctgtctg

SEQ ID NO: 3452934 - DNA, 25 bp, Homo sapien
cataggccaggtgatagttgactcc

SEQ ID NO: 3452935 - DNA, 25 bp, Homo sapien
aataaaaactgtcacctctttgcac

SEQ ID NO: 3452936 - DNA, 25 bp, Homo sapien
cagagaggaacatgctgagagagcc

SEQ ID NO: 3452937 - DNA, 25 bp, Homo sapien
taaagctgtgtgtggttatggcaca

SEQ ID NO: 3452938 - DNA, 25 bp, Homo sapien
gatataactggcaattgacacttac

SEQ ID NO: 3452939 - DNA, 25 bp, Homo sapien
caattgacacttacatacattgaag

SEQ ID NO: 3452940 - DNA, 25 bp, Homo sapien
catacattgaagtttgacatccatt

SEQ ID NO: 3452941 - DNA, 25 bp, Homo sapien
tcctaatagatataactggcaattg

SEQ ID NO: 3452942 - DNA, 25 bp, Homo sapien
ttactgccccgggcttgcaggctgg

SEQ ID NO: 3452943 - DNA, 25 bp, Homo sapien
cggcgcctccgagggcgggcccgct

SEQ ID NO: 3452944 - DNA, 25 bp, Homo sapien
agggcgggcccgctgagcccacgcc

SEQ ID NO: 3452945 - DNA, 25 bp, Homo sapien
aggtcggaagccctgccctgcgggg

SEQ ID NO: 3452946 - DNA, 25 bp, Homo sapien
gaatccgagttgatataagcaatgc

SEQ ID NO: 3452947 - DNA, 25 bp, Homo sapien
tagatgaatccgagttgatataagc

SEQ ID NO: 3452948 - DNA, 25 bp, Homo sapien
ttctatagatgaatccgagttgata

SEQ ID NO: 3452949 - DNA, 25 bp, Homo sapien
cgagttgatataagcaatgcttctc

SEQ ID NO: 3452950 - DNA, 25 bp, Homo sapien
gtcagggtctctctatggcttacac

SEQ ID NO: 3452951 - DNA, 25 bp, Homo sapien
caatgaaagcctagagacacgaatc

SEQ ID NO: 3452952 - DNA, 25 bp, Homo sapien
tggcgtagacaatccagatcagttt

SEQ ID NO: 3452953 - DNA, 25 bp, Homo sapien
gaaatcaagtcctgttggcgtagac

SEQ ID NO: 3452954 - DNA, 25 bp, Homo sapien
cagtttatacactaattggtaaaga

SEQ ID NO: 3452955 - DNA, 25 bp, Homo sapien
ttttgtcagtttatacactaattgg

SEQ ID NO: 3452956 - DNA, 25 bp, Homo sapien
cagtcaactctgagagtataattgc

SEQ ID NO: 3452957 - DNA, 25 bp, Homo sapien
taaagaaggggagtacagtcaactc

SEQ ID NO: 3452958 - DNA, 25 bp, Homo sapien
catacagtgatttactctcaaaccc

SEQ ID NO: 3452959 - DNA, 25 bp, Homo sapien
tattcttagtgtaacgggctctgcc

SEQ ID NO: 3452960 - DNA, 25 bp, Homo sapien
cttattcttagtgtaacgggctctg

SEQ ID NO: 3452961 - DNA, 25 bp, Homo sapien
aaataagcttcaaagtcacttccag

SEQ ID NO: 3452962 - DNA, 25 bp, Homo sapien
tgaaaataagcttcaaagtcacttc

SEQ ID NO: 3452963 - DNA, 25 bp, Homo sapien
tccaactgcatttatcctcatgaaa

SEQ ID NO: 3452964 - DNA, 25 bp, Homo sapien
tctccaactgcatttatcctcatga

SEQ ID NO: 3452965 - DNA, 25 bp, Homo sapien
ctccaactgcatttatcctcatgaa

SEQ ID NO: 3452966 - DNA, 25 bp, Homo sapien
atgctcctcttgaccaaaatatgtt

SEQ ID NO: 3452967 - DNA, 25 bp, Homo sapien
caaagcttctgcatagtcttgaata

SEQ ID NO: 3452968 - DNA, 25 bp, Homo sapien
aagctcatataccagtgctcctcgt

SEQ ID NO: 3452969 - DNA, 25 bp, Homo sapien
gctcctcgtaattgagccacagaaa

SEQ ID NO: 3452970 - DNA, 25 bp, Homo sapien
taaattgtgtggtacactgggtagc

SEQ ID NO: 3452971 - DNA, 25 bp, Homo sapien
gatcaacttgtataagtcgtttatg

SEQ ID NO: 3452972 - DNA, 25 bp, Homo sapien
caacttgtataagtcgtttatgaaa

SEQ ID NO: 3452973 - DNA, 25 bp, Homo sapien
tgtataagtcgtttatgaaaatctg

SEQ ID NO: 3452974 - DNA, 25 bp, Homo sapien
ttaagatcaacttgtataagtcgtt

SEQ ID NO: 3452975 - DNA, 25 bp, Homo sapien
ttccaggagcatcagttggtcattc

SEQ ID NO: 3452976 - DNA, 25 bp, Homo sapien
gatcgatgaatgctctttccaggag

SEQ ID NO: 3452977 - DNA, 25 bp, Homo sapien
tcagttggtcattcatcattctcac

SEQ ID NO: 3452978 - DNA, 25 bp, Homo sapien
cctggtaaaccaagaggatcgatga

SEQ ID NO: 3452979 - DNA, 25 bp, Homo sapien
caaacgagagttggctttattttca

SEQ ID NO: 3452980 - DNA, 25 bp, Homo sapien
caatatcaaagatagcatcatagat

SEQ ID NO: 3452981 - DNA, 25 bp, Homo sapien
tgttgtggctacttggagcaaatat

SEQ ID NO: 3452982 - DNA, 25 bp, Homo sapien
tacttctttccaggccaaacgagag

SEQ ID NO: 3452983 - DNA, 25 bp, Homo sapien
gacatgaaaagagtttagaacaccc

SEQ ID NO: 3452984 - DNA, 25 bp, Homo sapien
tatacattcgtctgtggatggacat

SEQ ID NO: 3452985 - DNA, 25 bp, Homo sapien
gcaacacctttaatggctagccact

SEQ ID NO: 3452986 - DNA, 25 bp, Homo sapien
caccctggcttcataagttatcaga

SEQ ID NO: 3452987 - DNA, 25 bp, Homo sapien
cacttcatggtgatttcacaagaga

SEQ ID NO: 3452988 - DNA, 25 bp, Homo sapien
cacacttcatggtgatttcacaaga

SEQ ID NO: 3452989 - DNA, 25 bp, Homo sapien
cattcacacttcatggtgatttcac

SEQ ID NO: 3452990 - DNA, 25 bp, Homo sapien
ctgaccattcacacttcatggtgat

SEQ ID NO: 3452991 - DNA, 25 bp, Homo sapien
tcatcacccatcagacttatatgtt

SEQ ID NO: 3452992 - DNA, 25 bp, Homo sapien
cttatatgtttattcagtagagctg

SEQ ID NO: 3452993 - DNA, 25 bp, Homo sapien
catagttgaacatgtaattgagtca

SEQ ID NO: 3452994 - DNA, 25 bp, Homo sapien
ttgtagtagctattttcatcaccca

SEQ ID NO: 3452995 - DNA, 25 bp, Homo sapien
cacctttgtgtcacatacattgtca

SEQ ID NO: 3452996 - DNA, 25 bp, Homo sapien
gtgtcacatacattgtcattctgtc

SEQ ID NO: 3452997 - DNA, 25 bp, Homo sapien
tatattagacaacttctgattaaac

SEQ ID NO: 3452998 - DNA, 25 bp, Homo sapien
aagtatatacatttcacgtgctttt

SEQ ID NO: 3452999 - DNA, 25 bp, Homo sapien
gaacctctaaaaggccaatgggcag

SEQ ID NO: 3453000 - DNA, 25 bp, Homo sapien
tcagttttcgcagtagttagttcag

SEQ ID NO: 3453001 - DNA, 25 bp, Homo sapien
ggcataacttgcctccagggtcaca

SEQ ID NO: 3453002 - DNA, 25 bp, Homo sapien
gcaaaacccagaatctaaatggcca

SEQ ID NO: 3453003 - DNA, 25 bp, Homo sapien
tagtctggttacattagtgaccatg

SEQ ID NO: 3453004 - DNA, 25 bp, Homo sapien
gacacagttatcgttaggtagcata

SEQ ID NO: 3453005 - DNA, 25 bp, Homo sapien
gaagcagtgagttattgtaacctca

SEQ ID NO: 3453006 - DNA, 25 bp, Homo sapien
cctcagattagttacattgatcaaa

SEQ ID NO: 3453007 - DNA, 25 bp, Homo sapien
tcattatagactgcctatgggtgga

SEQ ID NO: 3453008 - DNA, 25 bp, Homo sapien
tgtacttccctaatgatgactgctt

SEQ ID NO: 3453009 - DNA, 25 bp, Homo sapien
taaaatctgctagcttatgaggaag

SEQ ID NO: 3453010 - DNA, 25 bp, Homo sapien
taaatatgtaaatgacctggaactg

SEQ ID NO: 3453011 - DNA, 25 bp, Homo sapien
gaaaagtcgcacattgtagttaaga

SEQ ID NO: 3453012 - DNA, 25 bp, Homo sapien
tctttattcaaaacgagaacctata

SEQ ID NO: 3453013 - DNA, 25 bp, Homo sapien
gagagaatagtagtttactgcatat

SEQ ID NO: 3453014 - DNA, 25 bp, Homo sapien
tctggtacagttaagcagttatcca

SEQ ID NO: 3453015 - DNA, 25 bp, Homo sapien
gaaggtagagcgagtaataaaggaa

SEQ ID NO: 3453016 - DNA, 25 bp, Homo sapien
catgtggagattaggggagctagaa

SEQ ID NO: 3453017 - DNA, 25 bp, Homo sapien
ccactaggtctgtcacacaccatgt

SEQ ID NO: 3453018 - DNA, 25 bp, Homo sapien
acctcccactaggtctgtcacacac

SEQ ID NO: 3453019 - DNA, 25 bp, Homo sapien
cacaaacacacggagaggttcgtcc

SEQ ID NO: 3453020 - DNA, 25 bp, Homo sapien
ggtctattacattcacagccggtgc

SEQ ID NO: 3453021 - DNA, 25 bp, Homo sapien
gatgagggcactcgagacacaaaca

SEQ ID NO: 3453022 - DNA, 25 bp, Homo sapien
caggagatacccaaagccagttagc

SEQ ID NO: 3453023 - DNA, 25 bp, Homo sapien
ctcaggaaaaatattcgtggtggaa

SEQ ID NO: 3453024 - DNA, 25 bp, Homo sapien
caggaaaaatattcgtggtggaaag

SEQ ID NO: 3453025 - DNA, 25 bp, Homo sapien
tgctaccatagtatgctccatcata

SEQ ID NO: 3453026 - DNA, 25 bp, Homo sapien
cagacttgctaccatagtatgctcc

SEQ ID NO: 3453027 - DNA, 25 bp, Homo sapien
ctccatgccatcagacttgctacca

SEQ ID NO: 3453028 - DNA, 25 bp, Homo sapien
tatgctccatcatacaccccatagt

SEQ ID NO: 3453029 - DNA, 25 bp, Homo sapien
cgcaagagcttatgcacatgcagac

SEQ ID NO: 3453030 - DNA, 25 bp, Homo sapien
cacagtcctcgcaagagcttatgca

SEQ ID NO: 3453031 - DNA, 25 bp, Homo sapien
ttatatgcgcatacaccacagccac

SEQ ID NO: 3453032 - DNA, 25 bp, Homo sapien
ttttatatgcgcatacaccacagcc

SEQ ID NO: 3453033 - DNA, 25 bp, Homo sapien
cagctctgaccaatattgccaaccc

SEQ ID NO: 3453034 - DNA, 25 bp, Homo sapien
tctgaccaatattgccaaccctcac

SEQ ID NO: 3453035 - DNA, 25 bp, Homo sapien
gctctgaccaatattgccaaccctc

SEQ ID NO: 3453036 - DNA, 25 bp, Homo sapien
agctctgaccaatattgccaaccct

SEQ ID NO: 3453037 - DNA, 25 bp, Homo sapien
acagctgccacagacccctacatct

SEQ ID NO: 3453038 - DNA, 25 bp, Homo sapien
acatcttttgccacaaaggatcctg

SEQ ID NO: 3453039 - DNA, 25 bp, Homo sapien
agagccccgctacctgagctgctgt

SEQ ID NO: 3453040 - DNA, 25 bp, Homo sapien
cctgcagtttttcgcctctgcagag

SEQ ID NO: 3453041 - DNA, 25 bp, Homo sapien
caccatcaaagacctcacaatgtga

SEQ ID NO: 3453042 - DNA, 25 bp, Homo sapien
gacctcacaatgtgagctgtcaagg

SEQ ID NO: 3453043 - DNA, 25 bp, Homo sapien
tatgttcaccatcaaagacctcaca

SEQ ID NO: 3453044 - DNA, 25 bp, Homo sapien
tcaaagacctcacaatgtgagctgt

SEQ ID NO: 3453045 - DNA, 25 bp, Homo sapien
gtggctagggattaggaggcgaagg

SEQ ID NO: 3453046 - DNA, 25 bp, Homo sapien
agtggctagggattaggaggcgaag

SEQ ID NO: 3453047 - DNA, 25 bp, Homo sapien
ccagcacccgtctcactgaaggtgt

SEQ ID NO: 3453048 - DNA, 25 bp, Homo sapien
ttcatcaatgaccatgggttccaag

SEQ ID NO: 3453049 - DNA, 25 bp, Homo sapien
gtgcaaacttcatcaatgaccatgg

SEQ ID NO: 3453050 - DNA, 25 bp, Homo sapien
taggtgccagtgcaaacttcatcaa

SEQ ID NO: 3453051 - DNA, 25 bp, Homo sapien
ggtgccagtgcaaacttcatcaatg

SEQ ID NO: 3453052 - DNA, 25 bp, Homo sapien
accagtgcactggttagccagcttg

SEQ ID NO: 3453053 - DNA, 25 bp, Homo sapien
tgaggtttctacaacagatgtcaca

SEQ ID NO: 3453054 - DNA, 25 bp, Homo sapien
gttgggcgctcgatattgaggtttc

SEQ ID NO: 3453055 - DNA, 25 bp, Homo sapien
cagatggcctcattgtctaccatga

SEQ ID NO: 3453056 - DNA, 25 bp, Homo sapien
cacaatctggctaataaggtggtta

SEQ ID NO: 3453057 - DNA, 25 bp, Homo sapien
gatgtgggagtagggtaccaggttg

SEQ ID NO: 3453058 - DNA, 25 bp, Homo sapien
ggcatatgtcgccagagggaagtgg

SEQ ID NO: 3453059 - DNA, 25 bp, Homo sapien
ggttggctggctcaaaggaagcatt

SEQ ID NO: 3453060 - DNA, 25 bp, Homo sapien
ggaagtggatgtgggagtagggtac

SEQ ID NO: 3453061 - DNA, 25 bp, Homo sapien
ccacatcaccatggcacaataggca

SEQ ID NO: 3453062 - DNA, 25 bp, Homo sapien
ccatggcacaataggcagcaagcca

SEQ ID NO: 3453063 - DNA, 25 bp, Homo sapien
tcaccatggcacaataggcagcaag

SEQ ID NO: 3453064 - DNA, 25 bp, Homo sapien
catcaccatggcacaataggcagca

SEQ ID NO: 3453065 - DNA, 25 bp, Homo sapien
cagtgggagactggtagttgatgcc

SEQ ID NO: 3453066 - DNA, 25 bp, Homo sapien
ccacagtgggagactggtagttgat

SEQ ID NO: 3453067 - DNA, 25 bp, Homo sapien
caccacagtgggagactggtagttg

SEQ ID NO: 3453068 - DNA, 25 bp, Homo sapien
tgggagactggtagttgatgccaac

SEQ ID NO: 3453069 - DNA, 25 bp, Homo sapien
gcgagcccaggcctcagcaatggct

SEQ ID NO: 3453070 - DNA, 25 bp, Homo sapien
aggcctcagcaatggctgtggtgtt

SEQ ID NO: 3453071 - DNA, 25 bp, Homo sapien
tcaggtcaaacttgtggtccaggcg

SEQ ID NO: 3453072 - DNA, 25 bp, Homo sapien
agcaatggctgtggtgttgctcagc

SEQ ID NO: 3453073 - DNA, 25 bp, Homo sapien
cgggcctctgaaaactcgccttcct

SEQ ID NO: 3453074 - DNA, 25 bp, Homo sapien
ttagtattcctctctttcttcctca

SEQ ID NO: 3453075 - DNA, 25 bp, Homo sapien
tagtattcctctctttcttcctcac

SEQ ID NO: 3453076 - DNA, 25 bp, Homo sapien
tcaccaaatgaaaatctaaccagaa

SEQ ID NO: 3453077 - DNA, 25 bp, Homo sapien
agcatgaggtcatcttcaacgggca

SEQ ID NO: 3453078 - DNA, 25 bp, Homo sapien
atattacatcagcaagcatgaggtc

SEQ ID NO: 3453079 - DNA, 25 bp, Homo sapien
acaatcaatcactaatattacatca

SEQ ID NO: 3453080 - DNA, 25 bp, Homo sapien
gcatgaggtcatcttcaacgggcag

SEQ ID NO: 3453081 - DNA, 25 bp, Homo sapien
tgattctctgattcccctggctatt

SEQ ID NO: 3453082 - DNA, 25 bp, Homo sapien
cagtgatccttagttatttcaattc

SEQ ID NO: 3453083 - DNA, 25 bp, Homo sapien
tctctgattcccctggctattttag

SEQ ID NO: 3453084 - DNA, 25 bp, Homo sapien
tgattcccctggctattttagcaaa

SEQ ID NO: 3453085 - DNA, 25 bp, Homo sapien
tatcaaccaggacaaaaggtttcac

SEQ ID NO: 3453086 - DNA, 25 bp, Homo sapien
agcagagtccacttatcaaccagga

SEQ ID NO: 3453087 - DNA, 25 bp, Homo sapien
ggagcacaagcagagtccacttatc

SEQ ID NO: 3453088 - DNA, 25 bp, Homo sapien
gagtccacttatcaaccaggacaaa

SEQ ID NO: 3453089 - DNA, 25 bp, Homo sapien
aacctgggtagccaaggtatctgca

SEQ ID NO: 3453090 - DNA, 25 bp, Homo sapien
ggaaggctttcatgtccagggataa

SEQ ID NO: 3453091 - DNA, 25 bp, Homo sapien
cagggataattcctttgttgcagtg

SEQ ID NO: 3453092 - DNA, 25 bp, Homo sapien
taatcagaacggtcataaactacag

SEQ ID NO: 3453093 - DNA, 25 bp, Homo sapien
tgggggcagagtcatataaaacatc

SEQ ID NO: 3453094 - DNA, 25 bp, Homo sapien
catataaaacatcctgtgtaaatta

SEQ ID NO: 3453095 - DNA, 25 bp, Homo sapien
ctgagccaaatttgggggcagagtc

SEQ ID NO: 3453096 - DNA, 25 bp, Homo sapien
cctgtgtaaattagcaaaaggtgcc

SEQ ID NO: 3453097 - DNA, 25 bp, Homo sapien
gaaatttcaactcctgtgtacagta

SEQ ID NO: 3453098 - DNA, 25 bp, Homo sapien
gaaaaatgaccttccaactggttca

SEQ ID NO: 3453099 - DNA, 25 bp, Homo sapien
aactggttcacagaaatgactgaaa

SEQ ID NO: 3453100 - DNA, 25 bp, Homo sapien
gactgaaatttcaactcctgtgtac

SEQ ID NO: 3453101 - DNA, 25 bp, Homo sapien
ctacggccataagaaaagcatataa

SEQ ID NO: 3453102 - DNA, 25 bp, Homo sapien
cactcttcggtctgtgggctgaagg

SEQ ID NO: 3453103 - DNA, 25 bp, Homo sapien
caataagtagggttagctgccttgc

SEQ ID NO: 3453104 - DNA, 25 bp, Homo sapien
tgaaacactttgtgacagctttgct

SEQ ID NO: 3453105 - DNA, 25 bp, Homo sapien
gaaagaacgtttaatatctctggac

SEQ ID NO: 3453106 - DNA, 25 bp, Homo sapien
gaacgtttaatatctctggacacca

SEQ ID NO: 3453107 - DNA, 25 bp, Homo sapien
aagaacgtttaatatctctggacac

SEQ ID NO: 3453108 - DNA, 25 bp, Homo sapien
ctggaaagaacgtttaatatctctg

SEQ ID NO: 3453109 - DNA, 25 bp, Homo sapien
tggtagttttgttcgtgattgggaa

SEQ ID NO: 3453110 - DNA, 25 bp, Homo sapien
attcttgtttcctgcgtgaacctga

SEQ ID NO: 3453111 - DNA, 25 bp, Homo sapien
gcgtgaacctgattctctaacattc

SEQ ID NO: 3453112 - DNA, 25 bp, Homo sapien
tatgatcttcataacactctttcaa

SEQ ID NO: 3453113 - DNA, 25 bp, Homo sapien
tagggataatcatgacaacctgtct

SEQ ID NO: 3453114 - DNA, 25 bp, Homo sapien
tctgagagatttccagggacacttc

SEQ ID NO: 3453115 - DNA, 25 bp, Homo sapien
gacacttccaacagaaccgccttgt

SEQ ID NO: 3453116 - DNA, 25 bp, Homo sapien
caaagagaaggccaacccatgaaag

SEQ ID NO: 3453117 - DNA, 25 bp, Homo sapien
tttctccatggacacccctcagcca

SEQ ID NO: 3453118 - DNA, 25 bp, Homo sapien
ttactccaaataggtttctccatgg

SEQ ID NO: 3453119 - DNA, 25 bp, Homo sapien
ccacgcaccaagttctaatacattt

SEQ ID NO: 3453120 - DNA, 25 bp, Homo sapien
ccaagttctaatacatttggcttac

SEQ ID NO: 3453121 - DNA, 25 bp, Homo sapien
gcctttctccactattgtgattgtc

SEQ ID NO: 3453122 - DNA, 25 bp, Homo sapien
ctattgtgattgtcttagtctttcc

SEQ ID NO: 3453123 - DNA, 25 bp, Homo sapien
ttgatattgtctcatacgggttttg

SEQ ID NO: 3453124 - DNA, 25 bp, Homo sapien
ttctccactattgtgattgtcttag

SEQ ID NO: 3453125 - DNA, 25 bp, Homo sapien
ctgacggataggaataaagtcttca

SEQ ID NO: 3453126 - DNA, 25 bp, Homo sapien
tgacggataggaataaagtcttcat

SEQ ID NO: 3453127 - DNA, 25 bp, Homo sapien
gcctgtttccttaagttccatgtta

SEQ ID NO: 3453128 - DNA, 25 bp, Homo sapien
gctgttctctaggtaactgttagct

SEQ ID NO: 3453129 - DNA, 25 bp, Homo sapien
tacccatggctctttccttggtttg

SEQ ID NO: 3453130 - DNA, 25 bp, Homo sapien
tgactattgcttgtatgctgttctc

SEQ ID NO: 3453131 - DNA, 25 bp, Homo sapien
gcaccaaacttctatttagtcttcg

SEQ ID NO: 3453132 - DNA, 25 bp, Homo sapien
tcctgagcactcttatgcaccaaac

SEQ ID NO: 3453133 - DNA, 25 bp, Homo sapien
tctgaaggtcaatgcttgtggtagg

SEQ ID NO: 3453134 - DNA, 25 bp, Homo sapien
gtttttgttgacatcatcctgagca

SEQ ID NO: 3453135 - DNA, 25 bp, Homo sapien
gctctttcaaatatttgctgttctc

SEQ ID NO: 3453136 - DNA, 25 bp, Homo sapien
tgtgtgttggttttcaaccttgcct

SEQ ID NO: 3453137 - DNA, 25 bp, Homo sapien
cattgttggacagctcatgaaatcc

SEQ ID NO: 3453138 - DNA, 25 bp, Homo sapien
tctttaagtgagtcttttaattcca

SEQ ID NO: 3453139 - DNA, 25 bp, Homo sapien
atccatgcactgaattccttatttg

SEQ ID NO: 3453140 - DNA, 25 bp, Homo sapien
catatgctggacaacaaggatgacc

SEQ ID NO: 3453141 - DNA, 25 bp, Homo sapien
gcagcaaacatattcgacatgatga

SEQ ID NO: 3453142 - DNA, 25 bp, Homo sapien
tacagtccaagaaactattccgtgg

SEQ ID NO: 3453143 - DNA, 25 bp, Homo sapien
gaaactatagtgacatctagcagca

SEQ ID NO: 3453144 - DNA, 25 bp, Homo sapien
gatcattcattggactgcatttaca

SEQ ID NO: 3453145 - DNA, 25 bp, Homo sapien
ctgaggacctgcattgacatgcaca

SEQ ID NO: 3453146 - DNA, 25 bp, Homo sapien
catgcacatactgcctttctgtagc

SEQ ID NO: 3453147 - DNA, 25 bp, Homo sapien
tcagatcattcattggactgcattt

SEQ ID NO: 3453148 - DNA, 25 bp, Homo sapien
ttctagagctagtggccacagcagc

SEQ ID NO: 3453149 - DNA, 25 bp, Homo sapien
gaccacttctcaataaagcacttga

SEQ ID NO: 3453150 - DNA, 25 bp, Homo sapien
caattatggcagaggtggcttgttc

SEQ ID NO: 3453151 - DNA, 25 bp, Homo sapien
tgggtctgcaaatcctggtagaggt

SEQ ID NO: 3453152 - DNA, 25 bp, Homo sapien
agaaatgagaaagacgcaaaaggag

SEQ ID NO: 3453153 - DNA, 25 bp, Homo sapien
cttacacggtggcagcaaaagaaat

SEQ ID NO: 3453154 - DNA, 25 bp, Homo sapien
cacggtggcagcaaaagaaatgaga

SEQ ID NO: 3453155 - DNA, 25 bp, Homo sapien
tgagaaagacgcaaaaggagaaacc

SEQ ID NO: 3453156 - DNA, 25 bp, Homo sapien
gaactaccctgtaatgtgaatatga

SEQ ID NO: 3453157 - DNA, 25 bp, Homo sapien
cacgctgtcttgtatatggtaggta

SEQ ID NO: 3453158 - DNA, 25 bp, Homo sapien
gacttttgggaaaatgatggcaatc

SEQ ID NO: 3453159 - DNA, 25 bp, Homo sapien
tatgtaagccatcaacacgctgtct

SEQ ID NO: 3453160 - DNA, 25 bp, Homo sapien
ccaactccatcgagaattccatttc

SEQ ID NO: 3453161 - DNA, 25 bp, Homo sapien
caactccatcgagaattccatttcc

SEQ ID NO: 3453162 - DNA, 25 bp, Homo sapien
tgctggtacactctgaaattatgac

SEQ ID NO: 3453163 - DNA, 25 bp, Homo sapien
cattggatgtcttgttaaattggag

SEQ ID NO: 3453164 - DNA, 25 bp, Homo sapien
caatagggcattcctttgctacacc

SEQ ID NO: 3453165 - DNA, 25 bp, Homo sapien
aattatgacttgcaccaatagggca

SEQ ID NO: 3453166 - DNA, 25 bp, Homo sapien
acattccacatcagaaccttctgta

SEQ ID NO: 3453167 - DNA, 25 bp, Homo sapien
gcttccagtgtactttgcagaaatt

SEQ ID NO: 3453168 - DNA, 25 bp, Homo sapien
aaagtgttttgctgcactcatgatt

SEQ ID NO: 3453169 - DNA, 25 bp, Homo sapien
gaaccttctgtatggttttatgaaa

SEQ ID NO: 3453170 - DNA, 25 bp, Homo sapien
cttgagtaagtttgagaggtttctt

SEQ ID NO: 3453171 - DNA, 25 bp, Homo sapien
tcctcttcttgagtaagtttgagag

SEQ ID NO: 3453172 - DNA, 25 bp, Homo sapien
ttcttgagtaagtttgagaggtttc

SEQ ID NO: 3453173 - DNA, 25 bp, Homo sapien
tcttcttgagtaagtttgagaggtt

SEQ ID NO: 3453174 - DNA, 25 bp, Homo sapien
accgtaatactccgcttttctgacg

SEQ ID NO: 3453175 - DNA, 25 bp, Homo sapien
cgtaatactccgcttttctgacggg

SEQ ID NO: 3453176 - DNA, 25 bp, Homo sapien
ccgtaatactccgcttttctgacgg

SEQ ID NO: 3453177 - DNA, 25 bp, Homo sapien
caccgtaatactccgcttttctgac

SEQ ID NO: 3453178 - DNA, 25 bp, Homo sapien
catctgatgactggtccttgtgagg

SEQ ID NO: 3453179 - DNA, 25 bp, Homo sapien
tgtagctgtcatctgatgactggtc

SEQ ID NO: 3453180 - DNA, 25 bp, Homo sapien
agctaaagaaagctgcttcgctcag

SEQ ID NO: 3453181 - DNA, 25 bp, Homo sapien
gctgcttcgctcagattgtagctgt

SEQ ID NO: 3453182 - DNA, 25 bp, Homo sapien
tgtacattcctatcagggagactcc

SEQ ID NO: 3453183 - DNA, 25 bp, Homo sapien
caccaatgttgtacattcctatcag

SEQ ID NO: 3453184 - DNA, 25 bp, Homo sapien
tacattcctatcagggagactcctg

SEQ ID NO: 3453185 - DNA, 25 bp, Homo sapien
aatgttgtacattcctatcagggag

SEQ ID NO: 3453186 - DNA, 25 bp, Homo sapien
tgatgggaaggatactcatatgact

SEQ ID NO: 3453187 - DNA, 25 bp, Homo sapien
ttaaaatgcatagtaagtttctggg

SEQ ID NO: 3453188 - DNA, 25 bp, Homo sapien
catctatactactatgactaaaagg

SEQ ID NO: 3453189 - DNA, 25 bp, Homo sapien
gggcactgattaaactaaggcacaa

SEQ ID NO: 3453190 - DNA, 25 bp, Homo sapien
aaatctttataagctctatgctgca

SEQ ID NO: 3453191 - DNA, 25 bp, Homo sapien
tgtcaaaacactgctgccgagaacc

SEQ ID NO: 3453192 - DNA, 25 bp, Homo sapien
tatgctgcatagaaccaaatttttc

SEQ ID NO: 3453193 - DNA, 25 bp, Homo sapien
cccctgatatttctacatgtaccaa

SEQ ID NO: 3453194 - DNA, 25 bp, Homo sapien
gtattcctcttacctgaataataaa

SEQ ID NO: 3453195 - DNA, 25 bp, Homo sapien
ccttatgtcttgttctatattcact

SEQ ID NO: 3453196 - DNA, 25 bp, Homo sapien
cttccttatgtcttgttctatattc

SEQ ID NO: 3453197 - DNA, 25 bp, Homo sapien
tcctcttacctgaataataaatgct

SEQ ID NO: 3453198 - DNA, 25 bp, Homo sapien
ttatctgaggcctctgcgactggga

SEQ ID NO: 3453199 - DNA, 25 bp, Homo sapien
gaggcctctgcgactgggaatttta

SEQ ID NO: 3453200 - DNA, 25 bp, Homo sapien
tctgaggcctctgcgactgggaatt

SEQ ID NO: 3453201 - DNA, 25 bp, Homo sapien
gcctctgcgactgggaattttagaa

SEQ ID NO: 3453202 - DNA, 25 bp, Homo sapien
agatggaatcgaactggtagaagcc

SEQ ID NO: 3453203 - DNA, 25 bp, Homo sapien
tgaccaaagtaagcttctcaaggct

SEQ ID NO: 3453204 - DNA, 25 bp, Homo sapien
tttctgaccaaagtaagcttctcaa

SEQ ID NO: 3453205 - DNA, 25 bp, Homo sapien
aagcctgcagacaaaggcaaaattt

SEQ ID NO: 3453206 - DNA, 25 bp, Homo sapien
ttccttctgtcccagtcctcttagc

SEQ ID NO: 3453207 - DNA, 25 bp, Homo sapien
cttctgtcccagtcctcttagccat

SEQ ID NO: 3453208 - DNA, 25 bp, Homo sapien
cttttccttctgtcccagtcctctt

SEQ ID NO: 3453209 - DNA, 25 bp, Homo sapien
ttttccttctgtcccagtcctctta

SEQ ID NO: 3453210 - DNA, 25 bp, Homo sapien
ttaagctttctttgtactgtagccc

SEQ ID NO: 3453211 - DNA, 25 bp, Homo sapien
agctttctttgtactgtagcccagc

SEQ ID NO: 3453212 - DNA, 25 bp, Homo sapien
taagctttctttgtactgtagccca

SEQ ID NO: 3453213 - DNA, 25 bp, Homo sapien
ctttctttgtactgtagcccagctc

SEQ ID NO: 3453214 - DNA, 25 bp, Homo sapien
tgatcatcgacaacatctgtggcca

SEQ ID NO: 3453215 - DNA, 25 bp, Homo sapien
gattatccacatgacaatagaggac

SEQ ID NO: 3453216 - DNA, 25 bp, Homo sapien
tctgtggccatgagtgttagcagag

SEQ ID NO: 3453217 - DNA, 25 bp, Homo sapien
cagagagtgaccaactttgaatgtg

SEQ ID NO: 3453218 - DNA, 25 bp, Homo sapien
gtgtattggaccacatttgacttca

SEQ ID NO: 3453219 - DNA, 25 bp, Homo sapien
agtctgtgtattggaccacatttga

SEQ ID NO: 3453220 - DNA, 25 bp, Homo sapien
cacatttgacttcaggtaactgaaa

SEQ ID NO: 3453221 - DNA, 25 bp, Homo sapien
tctgtgtattggaccacatttgact

SEQ ID NO: 3453222 - DNA, 25 bp, Homo sapien
cagaaaagatatcttcaggcccagg

SEQ ID NO: 3453223 - DNA, 25 bp, Homo sapien
ggcccaggtagcttcttcatcacaa

SEQ ID NO: 3453224 - DNA, 25 bp, Homo sapien
tttaggagaaatatatcagtctacc

SEQ ID NO: 3453225 - DNA, 25 bp, Homo sapien
gaaatatatcagtctaccagaaaat

SEQ ID NO: 3453226 - DNA, 25 bp, Homo sapien
tcttcactttaatgcaaggcatcta

SEQ ID NO: 3453227 - DNA, 25 bp, Homo sapien
gaaacaagtctcacgattctggaga

SEQ ID NO: 3453228 - DNA, 25 bp, Homo sapien
cagatccggtgacaggtgggtatcc

SEQ ID NO: 3453229 - DNA, 25 bp, Homo sapien
tgaattctttcccacgcagatcaga

SEQ ID NO: 3453230 - DNA, 25 bp, Homo sapien
gagctttgggcactttattttggca

SEQ ID NO: 3453231 - DNA, 25 bp, Homo sapien
agcaccagttggtatcttgccagac

SEQ ID NO: 3453232 - DNA, 25 bp, Homo sapien
tcagtagggcctttagagctttggg

SEQ ID NO: 3453233 - DNA, 25 bp, Homo sapien
agactgctcagtagggcctttagag

SEQ ID NO: 3453234 - DNA, 25 bp, Homo sapien
gtaaatgtgcggtgtcatccttcca

SEQ ID NO: 3453235 - DNA, 25 bp, Homo sapien
gattagagccagtaaatgtgcggtg

SEQ ID NO: 3453236 - DNA, 25 bp, Homo sapien
gccagtaaatgtgcggtgtcatcct

SEQ ID NO: 3453237 - DNA, 25 bp, Homo sapien
tagagccagtaaatgtgcggtgtca

SEQ ID NO: 3453238 - DNA, 25 bp, Homo sapien
gatcatgctgtagtattaagggcag

SEQ ID NO: 3453239 - DNA, 25 bp, Homo sapien
tgctccatgagcattgaaacacgga

SEQ ID NO: 3453240 - DNA, 25 bp, Homo sapien
tcaatcttagaaagtcgttacaaac

SEQ ID NO: 3453241 - DNA, 25 bp, Homo sapien
gaaacacggaggctatcaatcttag

SEQ ID NO: 3453242 - DNA, 25 bp, Homo sapien
tctgagccctggtgagtagagcctg

SEQ ID NO: 3453243 - DNA, 25 bp, Homo sapien
tgattcatacttgactgaccagctc

SEQ ID NO: 3453244 - DNA, 25 bp, Homo sapien
cttgactgaccagctctagatttct

SEQ ID NO: 3453245 - DNA, 25 bp, Homo sapien
gtagagcctgaatggcagactgtga

SEQ ID NO: 3453246 - DNA, 25 bp, Homo sapien
gccagtaaacctgttaaggcatctc

SEQ ID NO: 3453247 - DNA, 25 bp, Homo sapien
tcaataggagccagtaaacctgtta

SEQ ID NO: 3453248 - DNA, 25 bp, Homo sapien
taggagccagtaaacctgttaaggc

SEQ ID NO: 3453249 - DNA, 25 bp, Homo sapien
gtaaacctgttaaggcatctctcat

SEQ ID NO: 3453250 - DNA, 25 bp, Homo sapien
caagaatcctgattatgggctcata

SEQ ID NO: 3453251 - DNA, 25 bp, Homo sapien
cccaagaatcctgattatgggctca

SEQ ID NO: 3453252 - DNA, 25 bp, Homo sapien
gaatcctgattatgggctcatatga

SEQ ID NO: 3453253 - DNA, 25 bp, Homo sapien
tccccaagaatcctgattatgggct

SEQ ID NO: 3453254 - DNA, 25 bp, Homo sapien
tcagccagatggtgtcagttgcccc

SEQ ID NO: 3453255 - DNA, 25 bp, Homo sapien
ccttctggcaacaccaaggagtgcc

SEQ ID NO: 3453256 - DNA, 25 bp, Homo sapien
tgcaaatggcataactcagagaaaa

SEQ ID NO: 3453257 - DNA, 25 bp, Homo sapien
tgcgacagctagacttccatgaagg

SEQ ID NO: 3453258 - DNA, 25 bp, Homo sapien
tataagttgtcacgttgggccgcag

SEQ ID NO: 3453259 - DNA, 25 bp, Homo sapien
catggacaatgactgatttagctaa

SEQ ID NO: 3453260 - DNA, 25 bp, Homo sapien
tctgcttgagggttggtttttcgcc

SEQ ID NO: 3453261 - DNA, 25 bp, Homo sapien
taattcctgccgacagtgggtgtag

SEQ ID NO: 3453262 - DNA, 25 bp, Homo sapien
tgatcacaatttcctgtaatagttc

SEQ ID NO: 3453263 - DNA, 25 bp, Homo sapien
gggaaattaatgtctgtttgtagca

SEQ ID NO: 3453264 - DNA, 25 bp, Homo sapien
aggggaaattaatgtctgtttgtag

SEQ ID NO: 3453265 - DNA, 25 bp, Homo sapien
atcacaatttcctgtaatagttctt

SEQ ID NO: 3453266 - DNA, 25 bp, Homo sapien
tatggtaactttataggagactgcc

SEQ ID NO: 3453267 - DNA, 25 bp, Homo sapien
ccttttccagaatagccgatacatg

SEQ ID NO: 3453268 - DNA, 25 bp, Homo sapien
cattcacctggtgtggacattttgg

SEQ ID NO: 3453269 - DNA, 25 bp, Homo sapien
taggaaaattctgctacgtatctgc

SEQ ID NO: 3453270 - DNA, 25 bp, Homo sapien
tccctgtggaattattttgcgtcca

SEQ ID NO: 3453271 - DNA, 25 bp, Homo sapien
ccttcccaaactgagaataggcttc

SEQ ID NO: 3453272 - DNA, 25 bp, Homo sapien
cttatgtagatcagattccagagaa

SEQ ID NO: 3453273 - DNA, 25 bp, Homo sapien
ttgaattgccggagaccttcccaaa

SEQ ID NO: 3453274 - DNA, 25 bp, Homo sapien
gaaaaccaagttggcctgtataata

SEQ ID NO: 3453275 - DNA, 25 bp, Homo sapien
gctttagtcgaataatcccacagga

SEQ ID NO: 3453276 - DNA, 25 bp, Homo sapien
agttggcctgtataataagattgcg

SEQ ID NO: 3453277 - DNA, 25 bp, Homo sapien
ctaggctttagtcgaataatcccac

SEQ ID NO: 3453278 - DNA, 25 bp, Homo sapien
cctttaaccattctgtttatattgc

SEQ ID NO: 3453279 - DNA, 25 bp, Homo sapien
ctgttgattttatttcccaaacact

SEQ ID NO: 3453280 - DNA, 25 bp, Homo sapien
cttcttaaatcctttaaccattctg

SEQ ID NO: 3453281 - DNA, 25 bp, Homo sapien
tcctgttgattttatttcccaaaca

SEQ ID NO: 3453282 - DNA, 25 bp, Homo sapien
taaaacaattgaagcctccaggaaa

SEQ ID NO: 3453283 - DNA, 25 bp, Homo sapien
ggaatctggaaagtgctaaaacaat

SEQ ID NO: 3453284 - DNA, 25 bp, Homo sapien
caattgaagcctccaggaaattgtc

SEQ ID NO: 3453285 - DNA, 25 bp, Homo sapien
gaatctggaaagtgctaaaacaatt

SEQ ID NO: 3453286 - DNA, 25 bp, Homo sapien
tcaattgcagctgagcattcaagat

SEQ ID NO: 3453287 - DNA, 25 bp, Homo sapien
gcttttcaattgcagctgagcattc

SEQ ID NO: 3453288 - DNA, 25 bp, Homo sapien
catagagtcttgtttcatactaggc

SEQ ID NO: 3453289 - DNA, 25 bp, Homo sapien
tgagcattcaagattgctcttgtaa

SEQ ID NO: 3453290 - DNA, 25 bp, Homo sapien
tctcaccgactaccgccacagcgct

SEQ ID NO: 3453291 - DNA, 25 bp, Homo sapien
gactaccgccacagcgcttattttt

SEQ ID NO: 3453292 - DNA, 25 bp, Homo sapien
accgactaccgccacagcgcttatt

SEQ ID NO: 3453293 - DNA, 25 bp, Homo sapien
ccgccacagcgcttatttttctcat

SEQ ID NO: 3453294 - DNA, 25 bp, Homo sapien
tgccacaataactttgttaaggctt

SEQ ID NO: 3453295 - DNA, 25 bp, Homo sapien
gaagcaaggatagtagtagggccac

SEQ ID NO: 3453296 - DNA, 25 bp, Homo sapien
cacaggaagtcgaaaattagatgca

SEQ ID NO: 3453297 - DNA, 25 bp, Homo sapien
gttaaggctttaaaatgacaagcca

SEQ ID NO: 3453298 - DNA, 25 bp, Homo sapien
tctaatgagctaaactcttgaccaa

SEQ ID NO: 3453299 - DNA, 25 bp, Homo sapien
tctctacatctaatgagctaaactc

SEQ ID NO: 3453300 - DNA, 25 bp, Homo sapien
gagctaaactcttgaccaattccca

SEQ ID NO: 3453301 - DNA, 25 bp, Homo sapien
ctacatctaatgagctaaactcttg

SEQ ID NO: 3453302 - DNA, 25 bp, Homo sapien
cagtactgagtaaccctctgtctgg

SEQ ID NO: 3453303 - DNA, 25 bp, Homo sapien
acatatctggctcaaggctgaagtc

SEQ ID NO: 3453304 - DNA, 25 bp, Homo sapien
ctttaaagccaaacaaggtcatgga

SEQ ID NO: 3453305 - DNA, 25 bp, Homo sapien
aggtcatggaaaagtcagactgttc

SEQ ID NO: 3453306 - DNA, 25 bp, Homo sapien
tgaagattttgaagtcaatgctaca

SEQ ID NO: 3453307 - DNA, 25 bp, Homo sapien
ttttgaagtcaatgctacagctggc

SEQ ID NO: 3453308 - DNA, 25 bp, Homo sapien
aagtcaatgctacagctggcctggt

SEQ ID NO: 3453309 - DNA, 25 bp, Homo sapien
gattttgaagtcaatgctacagctg

SEQ ID NO: 3453310 - DNA, 25 bp, Homo sapien
ctttcttgcagtgactcgttaatat

SEQ ID NO: 3453311 - DNA, 25 bp, Homo sapien
gcagtgactcgttaatattttgagt

SEQ ID NO: 3453312 - DNA, 25 bp, Homo sapien
ctccaggatctacatttggatagac

SEQ ID NO: 3453313 - DNA, 25 bp, Homo sapien
tacatttggatagacttcattgatt

SEQ ID NO: 3453314 - DNA, 25 bp, Homo sapien
tcacatgtaaagacttgtgatcctc

SEQ ID NO: 3453315 - DNA, 25 bp, Homo sapien
tcttgatgtaagagacacagattgt

SEQ ID NO: 3453316 - DNA, 25 bp, Homo sapien
tcttggagagtactaagtctttctt

SEQ ID NO: 3453317 - DNA, 25 bp, Homo sapien
ccagtttgaacttggtacaaaatgg

SEQ ID NO: 3453318 - DNA, 25 bp, Homo sapien
gaccatgtaggaagccatatttcca

SEQ ID NO: 3453319 - DNA, 25 bp, Homo sapien
ggagtcctaccttcacttagatttg

SEQ ID NO: 3453320 - DNA, 25 bp, Homo sapien
tgagattccccagcatcagtaagcc

SEQ ID NO: 3453321 - DNA, 25 bp, Homo sapien
ccatagccctctgacataggtgaac

SEQ ID NO: 3453322 - DNA, 25 bp, Homo sapien
ttctggacttcattactagtgggcc

SEQ ID NO: 3453323 - DNA, 25 bp, Homo sapien
ggacttcattactagtgggcctact

SEQ ID NO: 3453324 - DNA, 25 bp, Homo sapien
ccaagtttgacagtgccgtaacttg

SEQ ID NO: 3453325 - DNA, 25 bp, Homo sapien
acagtgccgtaacttggaaaacagc

SEQ ID NO: 3453326 - DNA, 25 bp, Homo sapien
cctcacactcagtaattgacacatt

SEQ ID NO: 3453327 - DNA, 25 bp, Homo sapien
tctactcttctgtccagtaattcta

SEQ ID NO: 3453328 - DNA, 25 bp, Homo sapien
gtaattctatagtttcctctccagt

SEQ ID NO: 3453329 - DNA, 25 bp, Homo sapien
acattactttctactcttctgtcca

SEQ ID NO: 3453330 - DNA, 25 bp, Homo sapien
tagaagaggttcaagagggactgtt

SEQ ID NO: 3453331 - DNA, 25 bp, Homo sapien
tgttgcccagcaggtattggtctga

SEQ ID NO: 3453332 - DNA, 25 bp, Homo sapien
gttacatgcgctatattcaaggaca

SEQ ID NO: 3453333 - DNA, 25 bp, Homo sapien
ggtggagaataacctgaaatcttgc

SEQ ID NO: 3453334 - DNA, 25 bp, Homo sapien
ctacaagagcagaattgttataacg

SEQ ID NO: 3453335 - DNA, 25 bp, Homo sapien
gcagaattgttataacgtgagtata

SEQ ID NO: 3453336 - DNA, 25 bp, Homo sapien
cttcgtatttcatgtcccgttcaag

SEQ ID NO: 3453337 - DNA, 25 bp, Homo sapien
gagtccttttccactactgacttcg

SEQ ID NO: 3453338 - DNA, 25 bp, Homo sapien
atcccatgtggggctatccttttta

SEQ ID NO: 3453339 - DNA, 25 bp, Homo sapien
ggcagggcgtcttcatcccatgtgg

SEQ ID NO: 3453340 - DNA, 25 bp, Homo sapien
gggcagggcgtcttcatcccatgtg

SEQ ID NO: 3453341 - DNA, 25 bp, Homo sapien
gcagggcgtcttcatcccatgtggg

SEQ ID NO: 3453342 - DNA, 25 bp, Homo sapien
agtctggcattgaatcaattctttg

SEQ ID NO: 3453343 - DNA, 25 bp, Homo sapien
acagtctggcattgaatcaattctt

SEQ ID NO: 3453344 - DNA, 25 bp, Homo sapien
cagtctggcattgaatcaattcttt

SEQ ID NO: 3453345 - DNA, 25 bp, Homo sapien
tccaactgctgtttagtgtacctgc

SEQ ID NO: 3453346 - DNA, 25 bp, Homo sapien
gaaattccagtgtggcctttgtgac

SEQ ID NO: 3453347 - DNA, 25 bp, Homo sapien
taatctgcacagctggcaattagaa

SEQ ID NO: 3453348 - DNA, 25 bp, Homo sapien
acctgctgatattttttagctgtac

SEQ ID NO: 3453349 - DNA, 25 bp, Homo sapien
agccccagccattgaagccacctcc

SEQ ID NO: 3453350 - DNA, 25 bp, Homo sapien
agccacctccaaatgacaccctaga

SEQ ID NO: 3453351 - DNA, 25 bp, Homo sapien
tgacaccctagaccttgtgatgccc

SEQ ID NO: 3453352 - DNA, 25 bp, Homo sapien
ccaccctcatgtccagccctgtagt

SEQ ID NO: 3453353 - DNA, 25 bp, Homo sapien
gcccatgcattctactcacattctt

SEQ ID NO: 3453354 - DNA, 25 bp, Homo sapien
cactgattggctcttttaatctcca

SEQ ID NO: 3453355 - DNA, 25 bp, Homo sapien
tcttcactattaccgcatgctgcaa

SEQ ID NO: 3453356 - DNA, 25 bp, Homo sapien
gactgtccactgattggctctttta

SEQ ID NO: 3453357 - DNA, 25 bp, Homo sapien
cttctgatagtttctggaaaaacca

SEQ ID NO: 3453358 - DNA, 25 bp, Homo sapien
taaagtttcaggctcacactctccc

SEQ ID NO: 3453359 - DNA, 25 bp, Homo sapien
ggcctgattcctaattgcttcttca

SEQ ID NO: 3453360 - DNA, 25 bp, Homo sapien
ttttaatggcctgattcctaattgc

SEQ ID NO: 3453361 - DNA, 25 bp, Homo sapien
gatgcccaagggcaacttgctgagc

SEQ ID NO: 3453362 - DNA, 25 bp, Homo sapien
gtcacatctatggaagggctggccc

SEQ ID NO: 3453363 - DNA, 25 bp, Homo sapien
ttagtccgtcagagactacagctgc

SEQ ID NO: 3453364 - DNA, 25 bp, Homo sapien
cttgctgagcttgtttgaattgccc

SEQ ID NO: 3453365 - DNA, 25 bp, Homo sapien
tttaactgcgctttggagttcttct

SEQ ID NO: 3453366 - DNA, 25 bp, Homo sapien
gcttcctgtttaactgcgctttgga

SEQ ID NO: 3453367 - DNA, 25 bp, Homo sapien
cagtaacaaccttaggagcagcagg

SEQ ID NO: 3453368 - DNA, 25 bp, Homo sapien
taggtctagtctgtcaacagtaaca

SEQ ID NO: 3453369 - DNA, 25 bp, Homo sapien
taacttctgttccatcagtactgcc

SEQ ID NO: 3453370 - DNA, 25 bp, Homo sapien
catcagtactgccttagtgccaaga

SEQ ID NO: 3453371 - DNA, 25 bp, Homo sapien
aatgctgaacaaattccaggaggtt

SEQ ID NO: 3453372 - DNA, 25 bp, Homo sapien
cggtaggtaacttctgttccatcag

SEQ ID NO: 3453373 - DNA, 25 bp, Homo sapien
ggataatggataaaggctgccatac

SEQ ID NO: 3453374 - DNA, 25 bp, Homo sapien
tggataatggataaaggctgccata

SEQ ID NO: 3453375 - DNA, 25 bp, Homo sapien
tccagttcatgctcagggaggacac

SEQ ID NO: 3453376 - DNA, 25 bp, Homo sapien
ttccagttcatgctcagggaggaca

SEQ ID NO: 3453377 - DNA, 25 bp, Homo sapien
taaatcattctgtagtccaactctg

SEQ ID NO: 3453378 - DNA, 25 bp, Homo sapien
taagtccttcaatagcgtcacagtc

SEQ ID NO: 3453379 - DNA, 25 bp, Homo sapien
ttttgccgtcaagcctccatgctgt

SEQ ID NO: 3453380 - DNA, 25 bp, Homo sapien
tcacagtctctatcacaaaaagtcc

SEQ ID NO: 3453381 - DNA, 25 bp, Homo sapien
gtgaatgttctttagtagcagcaat

SEQ ID NO: 3453382 - DNA, 25 bp, Homo sapien
gcagcaattaaatcagaagactttt

SEQ ID NO: 3453383 - DNA, 25 bp, Homo sapien
tctttagtagcagcaattaaatcag

SEQ ID NO: 3453384 - DNA, 25 bp, Homo sapien
gtagcagcaattaaatcagaagact

SEQ ID NO: 3453385 - DNA, 25 bp, Homo sapien
gtttctcggggctccaagatctctg

SEQ ID NO: 3453386 - DNA, 25 bp, Homo sapien
cctacactctctatgcctgagtttc

SEQ ID NO: 3453387 - DNA, 25 bp, Homo sapien
ccaagatctctgttccgatattacg

SEQ ID NO: 3453388 - DNA, 25 bp, Homo sapien
gatctctgttccgatattacgaccc

SEQ ID NO: 3453389 - DNA, 25 bp, Homo sapien
tcatccagatgaggagaaaggagtg

SEQ ID NO: 3453390 - DNA, 25 bp, Homo sapien
tctgctagtaagattggtcacgtta

SEQ ID NO: 3453391 - DNA, 25 bp, Homo sapien
tattgacaaagtacagtgcatagag

SEQ ID NO: 3453392 - DNA, 25 bp, Homo sapien
cagtgcatagagaagggattggcca

SEQ ID NO: 3453393 - DNA, 25 bp, Homo sapien
tcttcaatcactttcccttgaggca

SEQ ID NO: 3453394 - DNA, 25 bp, Homo sapien
ctcttcaatcactttcccttgaggc

SEQ ID NO: 3453395 - DNA, 25 bp, Homo sapien
cttcaatcactttcccttgaggcat

SEQ ID NO: 3453396 - DNA, 25 bp, Homo sapien
ggaacaaggtgtcattcagtttggg

SEQ ID NO: 3453397 - DNA, 25 bp, Homo sapien
gggcaaggaacaaggtgtcattcag

SEQ ID NO: 3453398 - DNA, 25 bp, Homo sapien
caaggaacaaggtgtcattcagttt

SEQ ID NO: 3453399 - DNA, 25 bp, Homo sapien
tcagtttgggggcaactgagtctgt

SEQ ID NO: 3453400 - DNA, 25 bp, Homo sapien
cgagtggcttggctctacagagata

SEQ ID NO: 3453401 - DNA, 25 bp, Homo sapien
ggcttggctctacagagataatctg

SEQ ID NO: 3453402 - DNA, 25 bp, Homo sapien
cagagataatctggagagtcagtaa

SEQ ID NO: 3453403 - DNA, 25 bp, Homo sapien
gtggcttggctctacagagataatc

SEQ ID NO: 3453404 - DNA, 25 bp, Homo sapien
cactagttttagtatgctgcacagg

SEQ ID NO: 3453405 - DNA, 25 bp, Homo sapien
caggaaactaatactgtctgagctt

SEQ ID NO: 3453406 - DNA, 25 bp, Homo sapien
gagaaactgccttcaagtcttgatt

SEQ ID NO: 3453407 - DNA, 25 bp, Homo sapien
tgtacaaggtcttgaaacagagaac

SEQ ID NO: 3453408 - DNA, 25 bp, Homo sapien
tgaagagaaaatactgttcgttaga

SEQ ID NO: 3453409 - DNA, 25 bp, Homo sapien
atactgttcgttagaatttttggag

SEQ ID NO: 3453410 - DNA, 25 bp, Homo sapien
ctgttcgttagaatttttggagttg

SEQ ID NO: 3453411 - DNA, 25 bp, Homo sapien
agagaaaatactgttcgttagaatt

SEQ ID NO: 3453412 - DNA, 25 bp, Homo sapien
agatggaagctctagctccagcctt

SEQ ID NO: 3453413 - DNA, 25 bp, Homo sapien
aagatggaagctctagctccagcct

SEQ ID NO: 3453414 - DNA, 25 bp, Homo sapien
ccacagtcctattaaccctgaatct

SEQ ID NO: 3453415 - DNA, 25 bp, Homo sapien
aattcccacagtcctattaaccctg

SEQ ID NO: 3453416 - DNA, 25 bp, Homo sapien
tgctctggacatatatcccttcctt

SEQ ID NO: 3453417 - DNA, 25 bp, Homo sapien
aactctggccccttctcatgctctg

SEQ ID NO: 3453418 - DNA, 25 bp, Homo sapien
tgtgtcctcacatgcagtcggcttt

SEQ ID NO: 3453419 - DNA, 25 bp, Homo sapien
atccttgtggcatacttctctcctc

SEQ ID NO: 3453420 - DNA, 25 bp, Homo sapien
ctaattgggccgcaactgtccctgt

SEQ ID NO: 3453421 - DNA, 25 bp, Homo sapien
acatgcagtcggctttctccttttt

SEQ ID NO: 3453422 - DNA, 25 bp, Homo sapien
gaactgagaggtctacacaacagag

SEQ ID NO: 3453423 - DNA, 25 bp, Homo sapien
caaatcccggtgtgatctaatggtg

SEQ ID NO: 3453424 - DNA, 25 bp, Homo sapien
gaacttatcctccagaattgcaggc

SEQ ID NO: 3453425 - DNA, 25 bp, Homo sapien
gtgccagtggacttgtgacttctca

SEQ ID NO: 3453426 - DNA, 25 bp, Homo sapien
gccagtggagaagcctcttgcagtg

SEQ ID NO: 3453427 - DNA, 25 bp, Homo sapien
cctgtggactctgacctaggcttgg

SEQ ID NO: 3453428 - DNA, 25 bp, Homo sapien
gcacccgcagcactctcagagtcag

SEQ ID NO: 3453429 - DNA, 25 bp, Homo sapien
tgacctaggcttggcccctttgtgg

SEQ ID NO: 3453430 - DNA, 25 bp, Homo sapien
ggctgttgtcctctgaagtagaaga

SEQ ID NO: 3453431 - DNA, 25 bp, Homo sapien
tatgccgatagagattggatgactg

SEQ ID NO: 3453432 - DNA, 25 bp, Homo sapien
tggatgactgataagatcatcttca

SEQ ID NO: 3453433 - DNA, 25 bp, Homo sapien
catcttcagcatgccatccattctt

SEQ ID NO: 3453434 - DNA, 25 bp, Homo sapien
gctgtcacatctgctaagtgtggtg

SEQ ID NO: 3453435 - DNA, 25 bp, Homo sapien
tgctgtcacatctgctaagtgtggt

SEQ ID NO: 3453436 - DNA, 25 bp, Homo sapien
tatactttctgaagcatagacacca

SEQ ID NO: 3453437 - DNA, 25 bp, Homo sapien
gacaccaaagagatgcgggatactt

SEQ ID NO: 3453438 - DNA, 25 bp, Homo sapien
tctgaagcatagacaccaaagagat

SEQ ID NO: 3453439 - DNA, 25 bp, Homo sapien
tgcgggatactttgcaaaatgagga

SEQ ID NO: 3453440 - DNA, 25 bp, Homo sapien
cccataacgatcattgcctttgcac

SEQ ID NO: 3453441 - DNA, 25 bp, Homo sapien
ttttcttatgcccatgtcagtttct

SEQ ID NO: 3453442 - DNA, 25 bp, Homo sapien
ctgtagtagtgaaatgtccactggg

SEQ ID NO: 3453443 - DNA, 25 bp, Homo sapien
ggatttctgtagtagtgaaatgtcc

SEQ ID NO: 3453444 - DNA, 25 bp, Homo sapien
gataggaatgcaggcctgtccttgc

SEQ ID NO: 3453445 - DNA, 25 bp, Homo sapien
ctttctcaaggaaggaccacccatt

SEQ ID NO: 3453446 - DNA, 25 bp, Homo sapien
gaaggaccacccattaatgatagga

SEQ ID NO: 3453447 - DNA, 25 bp, Homo sapien
attaatgataggaatgcaggcctgt

SEQ ID NO: 3453448 - DNA, 25 bp, Homo sapien
cttgttccacctttgtgagattgct

SEQ ID NO: 3453449 - DNA, 25 bp, Homo sapien
ttttcagttccttgtctgctgcatc

SEQ ID NO: 3453450 - DNA, 25 bp, Homo sapien
agatgtatcttctgccaccatattt

SEQ ID NO: 3453451 - DNA, 25 bp, Homo sapien
ttcagttccttgtctgctgcatcat

SEQ ID NO: 3453452 - DNA, 25 bp, Homo sapien
ggtagtctctacccagatgtatctt

SEQ ID NO: 3453453 - DNA, 25 bp, Homo sapien
taatcaatcatcctgctagacactt

SEQ ID NO: 3453454 - DNA, 25 bp, Homo sapien
aaaacatcttgttaatcaatcatcc

SEQ ID NO: 3453455 - DNA, 25 bp, Homo sapien
gacacttagccagattctctcctaa

SEQ ID NO: 3453456 - DNA, 25 bp, Homo sapien
tcatcctgctagacacttagccaga

SEQ ID NO: 3453457 - DNA, 25 bp, Homo sapien
ggcctcacatttatctctgctggaa

SEQ ID NO: 3453458 - DNA, 25 bp, Homo sapien
gaactggaagcatgacctaaaactc

SEQ ID NO: 3453459 - DNA, 25 bp, Homo sapien
tgttcagcccaagcatcctaattta

SEQ ID NO: 3453460 - DNA, 25 bp, Homo sapien
cattcatcatggctagctactgcta

SEQ ID NO: 3453461 - DNA, 25 bp, Homo sapien
ttatttggcatatcaattatacctc

SEQ ID NO: 3453462 - DNA, 25 bp, Homo sapien
gcacaagttgaatgtgtccagttat

SEQ ID NO: 3453463 - DNA, 25 bp, Homo sapien
gtccagttatttggcatatcaatta

SEQ ID NO: 3453464 - DNA, 25 bp, Homo sapien
aaactcatcaaattgcacaagttga

SEQ ID NO: 3453465 - DNA, 25 bp, Homo sapien
taaatgttacgcagtcttgatgaca

SEQ ID NO: 3453466 - DNA, 25 bp, Homo sapien
gaccagatgtatttcaagcagcctc

SEQ ID NO: 3453467 - DNA, 25 bp, Homo sapien
ttgagtcttgctcgcacccactggg

SEQ ID NO: 3453468 - DNA, 25 bp, Homo sapien
gtgagtgagcacaggtctggcctct

SEQ ID NO: 3453469 - DNA, 25 bp, Homo sapien
tactatattctaagtggccttgcca

SEQ ID NO: 3453470 - DNA, 25 bp, Homo sapien
taaggacattcatgctttagacaga

SEQ ID NO: 3453471 - DNA, 25 bp, Homo sapien
gatagtttcagcttaatttaataaa

SEQ ID NO: 3453472 - DNA, 25 bp, Homo sapien
ggccttgccaaatagcactccctgg

SEQ ID NO: 3453473 - DNA, 25 bp, Homo sapien
cacttgtcatggctgcgtagccact

SEQ ID NO: 3453474 - DNA, 25 bp, Homo sapien
gccactttcagagtctatttggaag

SEQ ID NO: 3453475 - DNA, 25 bp, Homo sapien
gcctctactgccaagaaagcgctga

SEQ ID NO: 3453476 - DNA, 25 bp, Homo sapien
tagggcccatcgaagtcaggctttc

SEQ ID NO: 3453477 - DNA, 25 bp, Homo sapien
gacttgtccttccagaaaccatcca

SEQ ID NO: 3453478 - DNA, 25 bp, Homo sapien
aatgtgttatatctgccttgcacac

SEQ ID NO: 3453479 - DNA, 25 bp, Homo sapien
gcacacacattagcagaatacaatc

SEQ ID NO: 3453480 - DNA, 25 bp, Homo sapien
aatcctcagcaaccctaaggaatgc

SEQ ID NO: 3453481 - DNA, 25 bp, Homo sapien
gatggttacacctcttctggccctt

SEQ ID NO: 3453482 - DNA, 25 bp, Homo sapien
tcagggaataggattacagttagca

SEQ ID NO: 3453483 - DNA, 25 bp, Homo sapien
ttaagcatgtccacagagatcagag

SEQ ID NO: 3453484 - DNA, 25 bp, Homo sapien
taaatatttcgaaacctggtagcca

SEQ ID NO: 3453485 - DNA, 25 bp, Homo sapien
ccagagtgctttgtacacatgccag

SEQ ID NO: 3453486 - DNA, 25 bp, Homo sapien
tacacatgccagtccctgcagattt

SEQ ID NO: 3453487 - DNA, 25 bp, Homo sapien
catgccagtccctgcagatttttaa

SEQ ID NO: 3453488 - DNA, 25 bp, Homo sapien
tttagctttgtaagtccagagtgct

SEQ ID NO: 3453489 - DNA, 25 bp, Homo sapien
ttagagggtgaagcctgtactggta

SEQ ID NO: 3453490 - DNA, 25 bp, Homo sapien
tggtaaatactggtctctgaaaggg

SEQ ID NO: 3453491 - DNA, 25 bp, Homo sapien
cagcatggtaagagagctgcaaacc

SEQ ID NO: 3453492 - DNA, 25 bp, Homo sapien
cctgatggcagagtcatgtctgacc

SEQ ID NO: 3453493 - DNA, 25 bp, Homo sapien
tcctttgtggaatgctgctgcccat

SEQ ID NO: 3453494 - DNA, 25 bp, Homo sapien
cccaagtgatccttcaggcctgaga

SEQ ID NO: 3453495 - DNA, 25 bp, Homo sapien
ggcctgagatgtgcctgtggctttt

SEQ ID NO: 3453496 - DNA, 25 bp, Homo sapien
ccttcctttgtggaatgctgctgcc

SEQ ID NO: 3453497 - DNA, 25 bp, Homo sapien
gccactactggcagatctcctagag

SEQ ID NO: 3453498 - DNA, 25 bp, Homo sapien
gcctcgggagtgatttgaagccacc

SEQ ID NO: 3453499 - DNA, 25 bp, Homo sapien
ttatattcttctaaagcctcgggag

SEQ ID NO: 3453500 - DNA, 25 bp, Homo sapien
tctcctagaggcctcagattcttct

SEQ ID NO: 3453501 - DNA, 25 bp, Homo sapien
ctgctcatggttcttggttcccacg

SEQ ID NO: 3453502 - DNA, 25 bp, Homo sapien
accatagactggcactctgttcaga

SEQ ID NO: 3453503 - DNA, 25 bp, Homo sapien
tagactggcactctgttcagaagca

SEQ ID NO: 3453504 - DNA, 25 bp, Homo sapien
ctctgggcaccatagactggcactc

SEQ ID NO: 3453505 - DNA, 25 bp, Homo sapien
tgttcaagctctgggcattcttgtc

SEQ ID NO: 3453506 - DNA, 25 bp, Homo sapien
actctaaagtctgagctaagcaaag

SEQ ID NO: 3453507 - DNA, 25 bp, Homo sapien
taaagtctgagctaagcaaagacac

SEQ ID NO: 3453508 - DNA, 25 bp, Homo sapien
tctctgttcaagctctgggcattct

SEQ ID NO: 3453509 - DNA, 25 bp, Homo sapien
taagagcttggtatcacccagaatg

SEQ ID NO: 3453510 - DNA, 25 bp, Homo sapien
cattgtctgtccattgagggcctgc

SEQ ID NO: 3453511 - DNA, 25 bp, Homo sapien
tattgtgccacatgcttccagtttt

SEQ ID NO: 3453512 - DNA, 25 bp, Homo sapien
ttggatccccaagattagtgacagg

SEQ ID NO: 3453513 - DNA, 25 bp, Homo sapien
aagaagcccagtgttcacagactcg

SEQ ID NO: 3453514 - DNA, 25 bp, Homo sapien
gctgcaactttgtccactgctgaag

SEQ ID NO: 3453515 - DNA, 25 bp, Homo sapien
acagactcgtctacaagtgtggtgc

SEQ ID NO: 3453516 - DNA, 25 bp, Homo sapien
gttcagactcatgccaagaagccca

SEQ ID NO: 3453517 - DNA, 25 bp, Homo sapien
tttgacattcacagtctttgtgcat

SEQ ID NO: 3453518 - DNA, 25 bp, Homo sapien
ttaaggtaccacactttataagcca

SEQ ID NO: 3453519 - DNA, 25 bp, Homo sapien
cagccacttaatatggcagcaacag

SEQ ID NO: 3453520 - DNA, 25 bp, Homo sapien
taatatggcagcaacagatgtgtgt

SEQ ID NO: 3453521 - DNA, 25 bp, Homo sapien
agatgtgtgttgccttaaggtacca

SEQ ID NO: 3453522 - DNA, 25 bp, Homo sapien
tgccgggtccacatgtcaaaagcat

SEQ ID NO: 3453523 - DNA, 25 bp, Homo sapien
tcaaaagcatcaggtgtgatcaggc

SEQ ID NO: 3453524 - DNA, 25 bp, Homo sapien
gaaagactgtactggtttaatctcc

SEQ ID NO: 3453525 - DNA, 25 bp, Homo sapien
gaaagcaaggtctgatgttggcccg

SEQ ID NO: 3453526 - DNA, 25 bp, Homo sapien
ctgcagtgatcaagagaggaagaca

SEQ ID NO: 3453527 - DNA, 25 bp, Homo sapien
tgcagtgatcaagagaggaagacag

SEQ ID NO: 3453528 - DNA, 25 bp, Homo sapien
aggagaagtacttcctgtcttggaa

SEQ ID NO: 3453529 - DNA, 25 bp, Homo sapien
aaggagaagtacttcctgtcttgga

SEQ ID NO: 3453530 - DNA, 25 bp, Homo sapien
tcacatcagtaaaaacgttgtagga

SEQ ID NO: 3453531 - DNA, 25 bp, Homo sapien
aggttcactgcatgaaggtccatca

SEQ ID NO: 3453532 - DNA, 25 bp, Homo sapien
taggagagtgaatctcaaggttcac

SEQ ID NO: 3453533 - DNA, 25 bp, Homo sapien
caaggttcactgcatgaaggtccat

SEQ ID NO: 3453534 - DNA, 25 bp, Homo sapien
ccttaaagaggtcagcttgcagttc

SEQ ID NO: 3453535 - DNA, 25 bp, Homo sapien
gagctgccttaaagaggtcagcttg

SEQ ID NO: 3453536 - DNA, 25 bp, Homo sapien
tcctagagtgttattagtactccaa

SEQ ID NO: 3453537 - DNA, 25 bp, Homo sapien
ccaggcagttattagggagctgcct

SEQ ID NO: 3453538 - DNA, 25 bp, Homo sapien
ctttggcttggtagttcaggtaggc

SEQ ID NO: 3453539 - DNA, 25 bp, Homo sapien
tccagttggctctttctgttaggat

SEQ ID NO: 3453540 - DNA, 25 bp, Homo sapien
aaggtcactggcagatggagataag

SEQ ID NO: 3453541 - DNA, 25 bp, Homo sapien
taacttgagagtggtgtgctttggc

SEQ ID NO: 3453542 - DNA, 25 bp, Homo sapien
gaggtcacattgttcgctcagcaca

SEQ ID NO: 3453543 - DNA, 25 bp, Homo sapien
cactaaacgtgtagaatggccttga

SEQ ID NO: 3453544 - DNA, 25 bp, Homo sapien
gcttttggccctaacttctgagaca

SEQ ID NO: 3453545 - DNA, 25 bp, Homo sapien
tggttcattgcagtccacggcattg

SEQ ID NO: 3453546 - DNA, 25 bp, Homo sapien
ccttggaaggctccatccactgcca

SEQ ID NO: 3453547 - DNA, 25 bp, Homo sapien
tccttggaaggctccatccactgcc

SEQ ID NO: 3453548 - DNA, 25 bp, Homo sapien
cttggaaggctccatccactgccat

SEQ ID NO: 3453549 - DNA, 25 bp, Homo sapien
gcaggatgtgaaaaccggcagcagt

SEQ ID NO: 3453550 - DNA, 25 bp, Homo sapien
ggcaggatgtgaaaaccggcagcag

SEQ ID NO: 3453551 - DNA, 25 bp, Homo sapien
taggcaggatgtgaaaaccggcagc

SEQ ID NO: 3453552 - DNA, 25 bp, Homo sapien
aggcaggatgtgaaaaccggcagca

SEQ ID NO: 3453553 - DNA, 25 bp, Homo sapien
actggagattatctatgtgctcctc

SEQ ID NO: 3453554 - DNA, 25 bp, Homo sapien
tccaaatatcatactttgcatctgt

SEQ ID NO: 3453555 - DNA, 25 bp, Homo sapien
tgccaccaactggagattatctatg

SEQ ID NO: 3453556 - DNA, 25 bp, Homo sapien
gcatctgtttcctaaaatcctgatg

SEQ ID NO: 3453557 - DNA, 25 bp, Homo sapien
gattgcctgcatcaagtgtgctgct

SEQ ID NO: 3453558 - DNA, 25 bp, Homo sapien
tatcactgtgaagaccataatctaa

SEQ ID NO: 3453559 - DNA, 25 bp, Homo sapien
tgagtcgccccagaacttggaaatg

SEQ ID NO: 3453560 - DNA, 25 bp, Homo sapien
tgtctctctgagtcgccccagaact

SEQ ID NO: 3453561 - DNA, 25 bp, Homo sapien
gatccacttgtagacccattccgag

SEQ ID NO: 3453562 - DNA, 25 bp, Homo sapien
tgtcatggctttggagagttcaggc

SEQ ID NO: 3453563 - DNA, 25 bp, Homo sapien
catgaattaatagggtacctggaac

SEQ ID NO: 3453564 - DNA, 25 bp, Homo sapien
ctttctggtctatctgacacctggc

SEQ ID NO: 3453565 - DNA, 25 bp, Homo sapien
ctaagtggcacatttggcagaagca

SEQ ID NO: 3453566 - DNA, 25 bp, Homo sapien
gaagcatgatctagaatctcctgga

SEQ ID NO: 3453567 - DNA, 25 bp, Homo sapien
tcagtaggtttaccacgacagcaag

SEQ ID NO: 3453568 - DNA, 25 bp, Homo sapien
cctgaggaagaaagaccatcgggct

SEQ ID NO: 3453569 - DNA, 25 bp, Homo sapien
gccagaactgaactgtcacaacatg

SEQ ID NO: 3453570 - DNA, 25 bp, Homo sapien
gttaggccaatcaattctatgcatg

SEQ ID NO: 3453571 - DNA, 25 bp, Homo sapien
tctttctgtggatgacgctcatttc

SEQ ID NO: 3453572 - DNA, 25 bp, Homo sapien
gtcagaattgctggagttaggccaa

SEQ ID NO: 3453573 - DNA, 25 bp, Homo sapien
gagcaatgcagaagatgggtgattt

SEQ ID NO: 3453574 - DNA, 25 bp, Homo sapien
tctacagctcccagcatgagcaatg

SEQ ID NO: 3453575 - DNA, 25 bp, Homo sapien
ttctgcatttccacctgaggtactg

SEQ ID NO: 3453576 - DNA, 25 bp, Homo sapien
tacagctcccagcatgagcaatgca

SEQ ID NO: 3453577 - DNA, 25 bp, Homo sapien
tccactgtaaactgctagaaccttg

SEQ ID NO: 3453578 - DNA, 25 bp, Homo sapien
aaagtaagtctgaaacatctacaca

SEQ ID NO: 3453579 - DNA, 25 bp, Homo sapien
tactcattgtgtcttgattcaactg

SEQ ID NO: 3453580 - DNA, 25 bp, Homo sapien
tggagaaactaatatgacagttgcc

SEQ ID NO: 3453581 - DNA, 25 bp, Homo sapien
ttgtgaaaattttctgccattttgt

SEQ ID NO: 3453582 - DNA, 25 bp, Homo sapien
aggttgtgaaaattttctgccattt

SEQ ID NO: 3453583 - DNA, 25 bp, Homo sapien
gtgaaaattttctgccattttgtag

SEQ ID NO: 3453584 - DNA, 25 bp, Homo sapien
tgtgaaaattttctgccattttgta

SEQ ID NO: 3453585 - DNA, 25 bp, Homo sapien
catgataggagcctcacatgtgcct

SEQ ID NO: 3453586 - DNA, 25 bp, Homo sapien
tagccatgataggagcctcacatgt

SEQ ID NO: 3453587 - DNA, 25 bp, Homo sapien
cttagccatgataggagcctcacat

SEQ ID NO: 3453588 - DNA, 25 bp, Homo sapien
cacatgtgcctaaaaactggggatt

SEQ ID NO: 3453589 - DNA, 25 bp, Homo sapien
aaatccctgttgaaatactgaactc

SEQ ID NO: 3453590 - DNA, 25 bp, Homo sapien
tcctgtggccagtcatcaatcctta

SEQ ID NO: 3453591 - DNA, 25 bp, Homo sapien
tcttactttctgtggaaccacgtct

SEQ ID NO: 3453592 - DNA, 25 bp, Homo sapien
tctgtggaaccacgtcttcctggtt

SEQ ID NO: 3453593 - DNA, 25 bp, Homo sapien
tcatctcctatgaatacttcccttg

SEQ ID NO: 3453594 - DNA, 25 bp, Homo sapien
tgtttctctggttactgtgaagcct

SEQ ID NO: 3453595 - DNA, 25 bp, Homo sapien
ttttggtttgccaaagagagatgtc

SEQ ID NO: 3453596 - DNA, 25 bp, Homo sapien
gccttgttcacatcgttgctgctgc

SEQ ID NO: 3453597 - DNA, 25 bp, Homo sapien
ccacagcagcaatgttttgtgaatc

SEQ ID NO: 3453598 - DNA, 25 bp, Homo sapien
gaggggctgagcctccacccccaca

SEQ ID NO: 3453599 - DNA, 25 bp, Homo sapien
atgttcgtggaacccattgaggggc

SEQ ID NO: 3453600 - DNA, 25 bp, Homo sapien
tccatgttcgtggaacccattgagg

SEQ ID NO: 3453601 - DNA, 25 bp, Homo sapien
ctgggagagatgccaggatcgacat

SEQ ID NO: 3453602 - DNA, 25 bp, Homo sapien
cagtcacgtaggtcacctcactcac

SEQ ID NO: 3453603 - DNA, 25 bp, Homo sapien
agtctactccttcaccaatagcccc

SEQ ID NO: 3453604 - DNA, 25 bp, Homo sapien
tcagtctactccttcaccaatagcc

SEQ ID NO: 3453605 - DNA, 25 bp, Homo sapien
tagccccccagacatttcctacaag

SEQ ID NO: 3453606 - DNA, 25 bp, Homo sapien
atttcctacaagctctgtgcttgcc

SEQ ID NO: 3453607 - DNA, 25 bp, Homo sapien
atttgttaaatgttgcgggcttttg

SEQ ID NO: 3453608 - DNA, 25 bp, Homo sapien
ctttgtgaataatcttatctgaaac

SEQ ID NO: 3453609 - DNA, 25 bp, Homo sapien
tgcctgggtatctgtcagtgcctca

SEQ ID NO: 3453610 - DNA, 25 bp, Homo sapien
tgttgcgggcttttgtctttgtgaa

SEQ ID NO: 3453611 - DNA, 25 bp, Homo sapien
gcaatctattttccttgcccctggt

SEQ ID NO: 3453612 - DNA, 25 bp, Homo sapien
gaaccattgattaagttgacactgc

SEQ ID NO: 3453613 - DNA, 25 bp, Homo sapien
ttgacactgcaatctattttccttg

SEQ ID NO: 3453614 - DNA, 25 bp, Homo sapien
actgaaaaagtacagtgatgaacca

SEQ ID NO: 3453615 - DNA, 25 bp, Homo sapien
gttataaataatgctccatagatga

SEQ ID NO: 3453616 - DNA, 25 bp, Homo sapien
ctccttttagcactctggatgttat

SEQ ID NO: 3453617 - DNA, 25 bp, Homo sapien
ccttttagcactctggatgttataa

SEQ ID NO: 3453618 - DNA, 25 bp, Homo sapien
tataaataatgctccatagatgaga

SEQ ID NO: 3453619 - DNA, 25 bp, Homo sapien
ctacatagacttatgggcaatggta

SEQ ID NO: 3453620 - DNA, 25 bp, Homo sapien
cagacttgaaactttggaaggagca

SEQ ID NO: 3453621 - DNA, 25 bp, Homo sapien
gacttatgggcaatggtaaatggct

SEQ ID NO: 3453622 - DNA, 25 bp, Homo sapien
ttagttagttggtcagacttgaaac

SEQ ID NO: 3453623 - DNA, 25 bp, Homo sapien
ctccttttctctgaaggcccagcat

SEQ ID NO: 3453624 - DNA, 25 bp, Homo sapien
tgcttccttcctgtcctactgctcc

SEQ ID NO: 3453625 - DNA, 25 bp, Homo sapien
ttcctgtcctactgctccttttctc

SEQ ID NO: 3453626 - DNA, 25 bp, Homo sapien
ctgtgtactgctttctgcttccttc

SEQ ID NO: 3453627 - DNA, 25 bp, Homo sapien
cacaacagcaggggctaggccacct

SEQ ID NO: 3453628 - DNA, 25 bp, Homo sapien
ggattcacccctttctttgcctcat

SEQ ID NO: 3453629 - DNA, 25 bp, Homo sapien
ctttgcctcatgcttcttcacaaca

SEQ ID NO: 3453630 - DNA, 25 bp, Homo sapien
tctcaaacagggattcacccctttc

SEQ ID NO: 3453631 - DNA, 25 bp, Homo sapien
gctgcaatgtgatatagtgaggcca

SEQ ID NO: 3453632 - DNA, 25 bp, Homo sapien
gccagctgcaatgtgatatagtgag

SEQ ID NO: 3453633 - DNA, 25 bp, Homo sapien
atgtgatatagtgaggccatttgac

SEQ ID NO: 3453634 - DNA, 25 bp, Homo sapien
cttttgtgctggatgtcttgtccat

SEQ ID NO: 3453635 - DNA, 25 bp, Homo sapien
gacagtcaggaagacaatcagcttg

SEQ ID NO: 3453636 - DNA, 25 bp, Homo sapien
tcttcctgtgggctagtagacatcc

SEQ ID NO: 3453637 - DNA, 25 bp, Homo sapien
tgtcttcttccgaaggcaacagtgg

SEQ ID NO: 3453638 - DNA, 25 bp, Homo sapien
gagacttcttgttgtccaataaggt

SEQ ID NO: 3453639 - DNA, 25 bp, Homo sapien
caacctggcaatgctagccacagat

SEQ ID NO: 3453640 - DNA, 25 bp, Homo sapien
ttttcaacctggcaatgctagccac

SEQ ID NO: 3453641 - DNA, 25 bp, Homo sapien
ccccagtgaggatggttcttaacat

SEQ ID NO: 3453642 - DNA, 25 bp, Homo sapien
tggttcttaacatatctgtcattgt

SEQ ID NO: 3453643 - DNA, 25 bp, Homo sapien
ttctgtgttagccttggctttaagg

SEQ ID NO: 3453644 - DNA, 25 bp, Homo sapien
ctgtgttagccttggctttaaggga

SEQ ID NO: 3453645 - DNA, 25 bp, Homo sapien
tagccttggctttaagggagccctg

SEQ ID NO: 3453646 - DNA, 25 bp, Homo sapien
tgttagccttggctttaagggagcc

SEQ ID NO: 3453647 - DNA, 25 bp, Homo sapien
aagttcagagggagatggctcccaa

SEQ ID NO: 3453648 - DNA, 25 bp, Homo sapien
gtttgactgcaaagttcagagggag

SEQ ID NO: 3453649 - DNA, 25 bp, Homo sapien
tgtttgactgcaaagttcagaggga

SEQ ID NO: 3453650 - DNA, 25 bp, Homo sapien
gtgccattcagatcctcgtcttttt

SEQ ID NO: 3453651 - DNA, 25 bp, Homo sapien
ttatggccgataaagcacagtgcca

SEQ ID NO: 3453652 - DNA, 25 bp, Homo sapien
gcccagagatgggttcacacttcag

SEQ ID NO: 3453653 - DNA, 25 bp, Homo sapien
gatgggttcacacttcaggtctgtg

SEQ ID NO: 3453654 - DNA, 25 bp, Homo sapien
ccactgggatgctcaaggaaggagt

SEQ ID NO: 3453655 - DNA, 25 bp, Homo sapien
gctcctgcaaccaggcactttgggt

SEQ ID NO: 3453656 - DNA, 25 bp, Homo sapien
ctttgggtagagtcggctggtggtg

SEQ ID NO: 3453657 - DNA, 25 bp, Homo sapien
ttggccactgggatgctcaaggaag

SEQ ID NO: 3453658 - DNA, 25 bp, Homo sapien
ctatgctctctatcgggaactttct

SEQ ID NO: 3453659 - DNA, 25 bp, Homo sapien
tgctctctatcgggaactttctccc

SEQ ID NO: 3453660 - DNA, 25 bp, Homo sapien
tctctatcgggaactttctccccaa

SEQ ID NO: 3453661 - DNA, 25 bp, Homo sapien
tatgctctctatcgggaactttctc

SEQ ID NO: 3453662 - DNA, 25 bp, Homo sapien
cgttctcacactgccccggtggaga

SEQ ID NO: 3453663 - DNA, 25 bp, Homo sapien
gaagcagccttaaccctctccactc

SEQ ID NO: 3453664 - DNA, 25 bp, Homo sapien
tgactgcacgccctccgttctcaca

SEQ ID NO: 3453665 - DNA, 25 bp, Homo sapien
gggactccactcgttccctgctctg

SEQ ID NO: 3453666 - DNA, 25 bp, Homo sapien
ttcttcacccggtgctcggcgctct

SEQ ID NO: 3453667 - DNA, 25 bp, Homo sapien
tgctcggcgctcttgctccgggcga

SEQ ID NO: 3453668 - DNA, 25 bp, Homo sapien
ggcgatccacggctctacgaggcgc

SEQ ID NO: 3453669 - DNA, 25 bp, Homo sapien
ccttgcctccgctggcgatccacgg

SEQ ID NO: 3453670 - DNA, 25 bp, Homo sapien
tgcatcatccatcggcatctgaaca

SEQ ID NO: 3453671 - DNA, 25 bp, Homo sapien
tagcgatgacccaacttgcacctcg

SEQ ID NO: 3453672 - DNA, 25 bp, Homo sapien
cccgcaagcccgagtcaggcgtggg

SEQ ID NO: 3453673 - DNA, 25 bp, Homo sapien
cctttcctagcgaaagtggaggctg

SEQ ID NO: 3453674 - DNA, 25 bp, Homo sapien
gggatggtcagacccgcgctgcttt

SEQ ID NO: 3453675 - DNA, 25 bp, Homo sapien
taaaggatgtcgtccccagtcgaag

SEQ ID NO: 3453676 - DNA, 25 bp, Homo sapien
tctccttgtcaagatagcagggaca

SEQ ID NO: 3453677 - DNA, 25 bp, Homo sapien
tgcactctcgcaaagcattccggtt

SEQ ID NO: 3453678 - DNA, 25 bp, Homo sapien
gcctgtagaggggattcgtcccgaa

SEQ ID NO: 3453679 - DNA, 25 bp, Homo sapien
cgttctcgcccccaatccggagaca

SEQ ID NO: 3453680 - DNA, 25 bp, Homo sapien
gagctggtgcccctggcgttctcgc

SEQ ID NO: 3453681 - DNA, 25 bp, Homo sapien
tcagccccctacacttgccctgcac

SEQ ID NO: 3453682 - DNA, 25 bp, Homo sapien
taaaactgcatatcctaaggtcatt

SEQ ID NO: 3453683 - DNA, 25 bp, Homo sapien
ctacaagatttggtgattgattcca

SEQ ID NO: 3453684 - DNA, 25 bp, Homo sapien
gcacacagggcttataaagtcttag

SEQ ID NO: 3453685 - DNA, 25 bp, Homo sapien
gataattgagttaatacatgtgaag

SEQ ID NO: 3453686 - DNA, 25 bp, Homo sapien
actgagatcagctccatttcgcgct

SEQ ID NO: 3453687 - DNA, 25 bp, Homo sapien
cagcagtggccccatacctatggtt

SEQ ID NO: 3453688 - DNA, 25 bp, Homo sapien
ttcgcgctgagccttttcacagtgc

SEQ ID NO: 3453689 - DNA, 25 bp, Homo sapien
gttgaacttgacatgcacgtggcca

SEQ ID NO: 3453690 - DNA, 25 bp, Homo sapien
tggatgagatagaaaaggcaggcta

SEQ ID NO: 3453691 - DNA, 25 bp, Homo sapien
catggatgagatagaaaaggcaggc

SEQ ID NO: 3453692 - DNA, 25 bp, Homo sapien
gatgagatagaaaaggcaggctaac

SEQ ID NO: 3453693 - DNA, 25 bp, Homo sapien
tcatggatgagatagaaaaggcagg

SEQ ID NO: 3453694 - DNA, 25 bp, Homo sapien
gtctgaaagatcataatatccgtgt

SEQ ID NO: 3453695 - DNA, 25 bp, Homo sapien
taatatccgtgttaccaataaatac

SEQ ID NO: 3453696 - DNA, 25 bp, Homo sapien
gaaagatcataatatccgtgttacc

SEQ ID NO: 3453697 - DNA, 25 bp, Homo sapien
aatattcttaaaaggagtctgaaag

SEQ ID NO: 3453698 - DNA, 25 bp, Homo sapien
tcttcctgtgcttcaagataagtac

SEQ ID NO: 3453699 - DNA, 25 bp, Homo sapien
gtgccatgaatttccaattacccat

SEQ ID NO: 3453700 - DNA, 25 bp, Homo sapien
tttatgtgccatgaatttccaatta

SEQ ID NO: 3453701 - DNA, 25 bp, Homo sapien
taagtactgggagatttatgtgcca

SEQ ID NO: 3453702 - DNA, 25 bp, Homo sapien
gctagttccctggtatgatcaatat

SEQ ID NO: 3453703 - DNA, 25 bp, Homo sapien
ccctggtatgatcaatatgaaataa

SEQ ID NO: 3453704 - DNA, 25 bp, Homo sapien
tagttccctggtatgatcaatatga

SEQ ID NO: 3453705 - DNA, 25 bp, Homo sapien
gttccctggtatgatcaatatgaaa

SEQ ID NO: 3453706 - DNA, 25 bp, Homo sapien
tcactgtctgagataccagctacca

SEQ ID NO: 3453707 - DNA, 25 bp, Homo sapien
ctcacgaagtggcaatctcagtttc

SEQ ID NO: 3453708 - DNA, 25 bp, Homo sapien
cagctaccagggtaacaagaagggc

SEQ ID NO: 3453709 - DNA, 25 bp, Homo sapien
gaagggcctcacgaagtggcaatct

SEQ ID NO: 3453710 - DNA, 25 bp, Homo sapien
gctgctgctgactccgttttaaaca

SEQ ID NO: 3453711 - DNA, 25 bp, Homo sapien
gacccggagctttcagctactgaaa

SEQ ID NO: 3453712 - DNA, 25 bp, Homo sapien
tttcagctactgaaagggttgctgc

SEQ ID NO: 3453713 - DNA, 25 bp, Homo sapien
cagtggatgggacccggagctttca

SEQ ID NO: 3453714 - DNA, 25 bp, Homo sapien
gccagctgctgctttacttgaatcc

SEQ ID NO: 3453715 - DNA, 25 bp, Homo sapien
tacttgaatccttgactctcttata

SEQ ID NO: 3453716 - DNA, 25 bp, Homo sapien
gctgctgctttacttgaatccttga

SEQ ID NO: 3453717 - DNA, 25 bp, Homo sapien
tgctttacttgaatccttgactctc

SEQ ID NO: 3453718 - DNA, 25 bp, Homo sapien
tcttccataattgaggcagctatct

SEQ ID NO: 3453719 - DNA, 25 bp, Homo sapien
actggcatcttccataattgaggca

SEQ ID NO: 3453720 - DNA, 25 bp, Homo sapien
cataattgaggcagctatcttttct

SEQ ID NO: 3453721 - DNA, 25 bp, Homo sapien
tctcctccaggtagtgtttccacat

SEQ ID NO: 3453722 - DNA, 25 bp, Homo sapien
tctatgagaagaacccagactccca

SEQ ID NO: 3453723 - DNA, 25 bp, Homo sapien
tccattgtcccggtccttggcagca

SEQ ID NO: 3453724 - DNA, 25 bp, Homo sapien
attacaggatgcgagagtgggccca

SEQ ID NO: 3453725 - DNA, 25 bp, Homo sapien
tgaccgtacattggcaggaggaccc

SEQ ID NO: 3453726 - DNA, 25 bp, Homo sapien
gacacaggctcaagcaggtggtttt

SEQ ID NO: 3453727 - DNA, 25 bp, Homo sapien
gcttgtctatttggctaaacgtccc

SEQ ID NO: 3453728 - DNA, 25 bp, Homo sapien
cccaagaatgtaaggcagcaacact

SEQ ID NO: 3453729 - DNA, 25 bp, Homo sapien
cagttcttgccctagacaaagcaga

SEQ ID NO: 3453730 - DNA, 25 bp, Homo sapien
agagctaataccaaactgaaacacg

SEQ ID NO: 3453731 - DNA, 25 bp, Homo sapien
ggagccttaaagatcatctgttcca

SEQ ID NO: 3453732 - DNA, 25 bp, Homo sapien
caatctcctgagtttacagatgaag

SEQ ID NO: 3453733 - DNA, 25 bp, Homo sapien
gaagagattcccctaatgccaggac

SEQ ID NO: 3453734 - DNA, 25 bp, Homo sapien
aacaagcaggaggccgtgtgcccac

SEQ ID NO: 3453735 - DNA, 25 bp, Homo sapien
agcaggaggccgtgtgcccacacag

SEQ ID NO: 3453736 - DNA, 25 bp, Homo sapien
aggaggccgtgtgcccacacagtgt

SEQ ID NO: 3453737 - DNA, 25 bp, Homo sapien
acaagcaggaggccgtgtgcccaca

SEQ ID NO: 3453738 - DNA, 25 bp, Homo sapien
gctgtgatgtgaccaccaactggaa

SEQ ID NO: 3453739 - DNA, 25 bp, Homo sapien
ttactatagcaaccacgacaccagg

SEQ ID NO: 3453740 - DNA, 25 bp, Homo sapien
tcttaacagtattcagtggccgtgc

SEQ ID NO: 3453741 - DNA, 25 bp, Homo sapien
gtaacaatcagacccgaccgaggat

SEQ ID NO: 3453742 - DNA, 25 bp, Homo sapien
ggatcatgggtctcaagccaagcaa

SEQ ID NO: 3453743 - DNA, 25 bp, Homo sapien
caagctctttgctcaagcggatggc

SEQ ID NO: 3453744 - DNA, 25 bp, Homo sapien
gaaccttcacactatagctactggg

SEQ ID NO: 3453745 - DNA, 25 bp, Homo sapien
caatgacagtgccaacagggagatc

SEQ ID NO: 3453746 - DNA, 25 bp, Homo sapien
aagctaagttcatcactggagagcc

SEQ ID NO: 3453747 - DNA, 25 bp, Homo sapien
gctaagttcatcactggagagccat

SEQ ID NO: 3453748 - DNA, 25 bp, Homo sapien
ttcatcactggagagccatataaac

SEQ ID NO: 3453749 - DNA, 25 bp, Homo sapien
taagttcatcactggagagccatat

SEQ ID NO: 3453750 - DNA, 25 bp, Homo sapien
ggccactaataccaaattgttccaa

SEQ ID NO: 3453751 - DNA, 25 bp, Homo sapien
aggccactaataccaaattgttcca

SEQ ID NO: 3453752 - DNA, 25 bp, Homo sapien
tgtatcaggtaaaccaaaatgcaac

SEQ ID NO: 3453753 - DNA, 25 bp, Homo sapien
ttttcactgtatcaggtaaaccaaa

SEQ ID NO: 3453754 - DNA, 25 bp, Homo sapien
tccagatggtcactcctcatcagct

SEQ ID NO: 3453755 - DNA, 25 bp, Homo sapien
ccagatggtcactcctcatcagctc

SEQ ID NO: 3453756 - DNA, 25 bp, Homo sapien
gccaaacttctcttcagtgttagca

SEQ ID NO: 3453757 - DNA, 25 bp, Homo sapien
attgccaaacttctcttcagtgtta

SEQ ID NO: 3453758 - DNA, 25 bp, Homo sapien
aacttctcttcagtgttagcaccac

SEQ ID NO: 3453759 - DNA, 25 bp, Homo sapien
caaacttctcttcagtgttagcacc

SEQ ID NO: 3453760 - DNA, 25 bp, Homo sapien
agtagtaaaaattcagtggcaccaa

SEQ ID NO: 3453761 - DNA, 25 bp, Homo sapien
aacagtagtaaaaattcagtggcac

SEQ ID NO: 3453762 - DNA, 25 bp, Homo sapien
ggtgacaccttctcttattgaacat

SEQ ID NO: 3453763 - DNA, 25 bp, Homo sapien
cagtagtaaaaattcagtggcacca

SEQ ID NO: 3453764 - DNA, 25 bp, Homo sapien
tattctcaccagtatactgcttttt

SEQ ID NO: 3453765 - DNA, 25 bp, Homo sapien
actcagtattattctcaccagtata

SEQ ID NO: 3453766 - DNA, 25 bp, Homo sapien
tttaatcacaaagagtggcccagag

SEQ ID NO: 3453767 - DNA, 25 bp, Homo sapien
aatcacaaagagtggcccagaggag

SEQ ID NO: 3453768 - DNA, 25 bp, Homo sapien
agccattcttcacaccaatatggga

SEQ ID NO: 3453769 - DNA, 25 bp, Homo sapien
tcacaccaatatgggataagctcct

SEQ ID NO: 3453770 - DNA, 25 bp, Homo sapien
tcttcacaccaatatgggataagct

SEQ ID NO: 3453771 - DNA, 25 bp, Homo sapien
caccaatatgggataagctccttga

SEQ ID NO: 3453772 - DNA, 25 bp, Homo sapien
gctgaacctgtcaactggttattcc

SEQ ID NO: 3453773 - DNA, 25 bp, Homo sapien
atggagctgaacctgtcaactggtt

SEQ ID NO: 3453774 - DNA, 25 bp, Homo sapien
cttgggggatgatcggtaaagccat

SEQ ID NO: 3453775 - DNA, 25 bp, Homo sapien
cctgtcaactggttattcccattgt

SEQ ID NO: 3453776 - DNA, 25 bp, Homo sapien
gtatcattatctatgtttgagtcat

SEQ ID NO: 3453777 - DNA, 25 bp, Homo sapien
cattatctatgtttgagtcatgctg

SEQ ID NO: 3453778 - DNA, 25 bp, Homo sapien
atcattatctatgtttgagtcatgc

SEQ ID NO: 3453779 - DNA, 25 bp, Homo sapien
tatctatgtttgagtcatgctgtat

SEQ ID NO: 3453780 - DNA, 25 bp, Homo sapien
tcaaatttaaccttcctcacacaaa

SEQ ID NO: 3453781 - DNA, 25 bp, Homo sapien
tcaaaggtcaactgcaaatgggaat

SEQ ID NO: 3453782 - DNA, 25 bp, Homo sapien
tgaaggtgggagacactcagtcatg

SEQ ID NO: 3453783 - DNA, 25 bp, Homo sapien
cagtcatgtggtgagtacattcgca

SEQ ID NO: 3453784 - DNA, 25 bp, Homo sapien
taacccaaggtgttgagcactatca

SEQ ID NO: 3453785 - DNA, 25 bp, Homo sapien
gaggcatctcctctgaagactggac

SEQ ID NO: 3453786 - DNA, 25 bp, Homo sapien
cccctcagtgatagttgggagatca

SEQ ID NO: 3453787 - DNA, 25 bp, Homo sapien
caaatgaggaataagcactaccttc

SEQ ID NO: 3453788 - DNA, 25 bp, Homo sapien
cagaagagtctcaaagcatcaacag

SEQ ID NO: 3453789 - DNA, 25 bp, Homo sapien
gtttggcggcgaaatcctggcagaa

SEQ ID NO: 3453790 - DNA, 25 bp, Homo sapien
gtttcactgtgatgacagcaatgcc

SEQ ID NO: 3453791 - DNA, 25 bp, Homo sapien
catatggttcagatggtttggcggc

SEQ ID NO: 3453792 - DNA, 25 bp, Homo sapien
tctagagcaccatgagaaggcactg

SEQ ID NO: 3453793 - DNA, 25 bp, Homo sapien
catgatgcctgtgatcctctagagc

SEQ ID NO: 3453794 - DNA, 25 bp, Homo sapien
gaatttcatattgcagcagatgctg

SEQ ID NO: 3453795 - DNA, 25 bp, Homo sapien
ttgtaaggatgctcccaggtgcacc

SEQ ID NO: 3453796 - DNA, 25 bp, Homo sapien
ctgtaaaggatgctagaggagccat

SEQ ID NO: 3453797 - DNA, 25 bp, Homo sapien
tccaaagagtcccaccaatttctgt

SEQ ID NO: 3453798 - DNA, 25 bp, Homo sapien
tctgcgttcaccctcttaactggaa

SEQ ID NO: 3453799 - DNA, 25 bp, Homo sapien
tagaggagccatccaaagagtccca

SEQ ID NO: 3453800 - DNA, 25 bp, Homo sapien
ctgagcttaaggacaaccatcactt

SEQ ID NO: 3453801 - DNA, 25 bp, Homo sapien
gcttaaggacaaccatcacttggag

SEQ ID NO: 3453802 - DNA, 25 bp, Homo sapien
ggacaaccatcacttggagatccac

SEQ ID NO: 3453803 - DNA, 25 bp, Homo sapien
taaggacaaccatcacttggagatc

SEQ ID NO: 3453804 - DNA, 25 bp, Homo sapien
tctagtctggtcaacgtcccttgca

SEQ ID NO: 3453805 - DNA, 25 bp, Homo sapien
gacaactgatttgaccactagccat

SEQ ID NO: 3453806 - DNA, 25 bp, Homo sapien
tctactgatagactgtgccagccac

SEQ ID NO: 3453807 - DNA, 25 bp, Homo sapien
cactagccatgcaacgaatatctac

SEQ ID NO: 3453808 - DNA, 25 bp, Homo sapien
tgtatagggtcataactcagcttgc

SEQ ID NO: 3453809 - DNA, 25 bp, Homo sapien
tcatggcatgatccgtgtatagggt

SEQ ID NO: 3453810 - DNA, 25 bp, Homo sapien
tctttgcaaccgactaacttcatgg

SEQ ID NO: 3453811 - DNA, 25 bp, Homo sapien
tactgacttggaggaatccatggct

SEQ ID NO: 3453812 - DNA, 25 bp, Homo sapien
cagatccacctcctcaaaactaccc

SEQ ID NO: 3453813 - DNA, 25 bp, Homo sapien
ctcactcagatccacctcctcaaaa

SEQ ID NO: 3453814 - DNA, 25 bp, Homo sapien
ctctcactcagatccacctcctcaa

SEQ ID NO: 3453815 - DNA, 25 bp, Homo sapien
gatccacctcctcaaaactacccat

SEQ ID NO: 3453816 - DNA, 25 bp, Homo sapien
attaactgggtaactggattgagta

SEQ ID NO: 3453817 - DNA, 25 bp, Homo sapien
gattgagtaaatccccaatgagcat

SEQ ID NO: 3453818 - DNA, 25 bp, Homo sapien
ggtaactggattgagtaaatcccca

SEQ ID NO: 3453819 - DNA, 25 bp, Homo sapien
tgacttaacctctgggggctcagtc

SEQ ID NO: 3453820 - DNA, 25 bp, Homo sapien
gctcatctattggaggttcagcaaa

SEQ ID NO: 3453821 - DNA, 25 bp, Homo sapien
taaacagacttagggatttcatggc

SEQ ID NO: 3453822 - DNA, 25 bp, Homo sapien
gaaactaaatttcaagcctgaccag

SEQ ID NO: 3453823 - DNA, 25 bp, Homo sapien
tatcagtttagcatagccacaaagg

SEQ ID NO: 3453824 - DNA, 25 bp, Homo sapien
cgtaccatgctcacatgtgcccagg

SEQ ID NO: 3453825 - DNA, 25 bp, Homo sapien
gtaccatgctcacatgtgcccaggg

SEQ ID NO: 3453826 - DNA, 25 bp, Homo sapien
tgcaccattcaggcatccacccttc

SEQ ID NO: 3453827 - DNA, 25 bp, Homo sapien
gctgcaccattcaggcatccaccct

SEQ ID NO: 3453828 - DNA, 25 bp, Homo sapien
gcatcaagccctctaaatgtctgaa

SEQ ID NO: 3453829 - DNA, 25 bp, Homo sapien
caggtaagaggatgcatcaagccct

SEQ ID NO: 3453830 - DNA, 25 bp, Homo sapien
agctccaatggccaactggaactcc

SEQ ID NO: 3453831 - DNA, 25 bp, Homo sapien
tggaactccccgcaggtaagaggat

SEQ ID NO: 3453832 - DNA, 25 bp, Homo sapien
caggatactaataagctggataaag

SEQ ID NO: 3453833 - DNA, 25 bp, Homo sapien
gaagggtttaatcgcaggatactaa

SEQ ID NO: 3453834 - DNA, 25 bp, Homo sapien
ggatactaataagctggataaaggg

SEQ ID NO: 3453835 - DNA, 25 bp, Homo sapien
gtctccagaagggtttaatcgcagg

SEQ ID NO: 3453836 - DNA, 25 bp, Homo sapien
gttgtggtactgggagaaccttgat

SEQ ID NO: 3453837 - DNA, 25 bp, Homo sapien
accttgatgccaatgctttccttaa

SEQ ID NO: 3453838 - DNA, 25 bp, Homo sapien
ttgatgccaatgctttccttaattc

SEQ ID NO: 3453839 - DNA, 25 bp, Homo sapien
tgtggtactgggagaaccttgatgc

SEQ ID NO: 3453840 - DNA, 25 bp, Homo sapien
actgtattgggctgccagaactgca

SEQ ID NO: 3453841 - DNA, 25 bp, Homo sapien
aggttactgtattgggctgccagaa

SEQ ID NO: 3453842 - DNA, 25 bp, Homo sapien
tactgtattgggctgccagaactgc

SEQ ID NO: 3453843 - DNA, 25 bp, Homo sapien
tattgggctgccagaactgcagagc

SEQ ID NO: 3453844 - DNA, 25 bp, Homo sapien
gtagttgaggaagggtgtcggcaca

SEQ ID NO: 3453845 - DNA, 25 bp, Homo sapien
gaagggtgtcggcacaaaagagaga

SEQ ID NO: 3453846 - DNA, 25 bp, Homo sapien
tcaggaacggaggcgaatatgtagt

SEQ ID NO: 3453847 - DNA, 25 bp, Homo sapien
cggaggcgaatatgtagttgaggaa

SEQ ID NO: 3453848 - DNA, 25 bp, Homo sapien
catctttccgcattaataactttag

SEQ ID NO: 3453849 - DNA, 25 bp, Homo sapien
ggaacatctttccgcattaataact

SEQ ID NO: 3453850 - DNA, 25 bp, Homo sapien
aacatctttccgcattaataacttt

SEQ ID NO: 3453851 - DNA, 25 bp, Homo sapien
tggaacatctttccgcattaataac

SEQ ID NO: 3453852 - DNA, 25 bp, Homo sapien
gaactggagtcaggatcttcagcct

SEQ ID NO: 3453853 - DNA, 25 bp, Homo sapien
tgtctcccgatcaagaatgtctgcg

SEQ ID NO: 3453854 - DNA, 25 bp, Homo sapien
gaatgacagatacgtcctttggaga

SEQ ID NO: 3453855 - DNA, 25 bp, Homo sapien
agagtggaacaacgcccctgtctgt

SEQ ID NO: 3453856 - DNA, 25 bp, Homo sapien
tcaacccacagttgtgagctgatca

SEQ ID NO: 3453857 - DNA, 25 bp, Homo sapien
cacagttgtgagctgatcaagtggg

SEQ ID NO: 3453858 - DNA, 25 bp, Homo sapien
agctgatcaagtggggaactgcaca

SEQ ID NO: 3453859 - DNA, 25 bp, Homo sapien
cccacagttgtgagctgatcaagtg

SEQ ID NO: 3453860 - DNA, 25 bp, Homo sapien
cagcagctacaccatgcagctgagc

SEQ ID NO: 3453861 - DNA, 25 bp, Homo sapien
gccccagggtaaggctggctatagg

SEQ ID NO: 3453862 - DNA, 25 bp, Homo sapien
ccttttctcagtgggttagcaggac

SEQ ID NO: 3453863 - DNA, 25 bp, Homo sapien
tcactaccttttctcagtgggttag

SEQ ID NO: 3453864 - DNA, 25 bp, Homo sapien
tgagcataccaaaggcaggaagcct

SEQ ID NO: 3453865 - DNA, 25 bp, Homo sapien
gcaacacaccttagctagatgagta

SEQ ID NO: 3453866 - DNA, 25 bp, Homo sapien
taagtccatagtgtgtctcctctaa

SEQ ID NO: 3453867 - DNA, 25 bp, Homo sapien
ggaagcctgctctagtataaaacat

SEQ ID NO: 3453868 - DNA, 25 bp, Homo sapien
tggaggcattgtaggcactgagaca

SEQ ID NO: 3453869 - DNA, 25 bp, Homo sapien
gaaatgacttagatggaaatgaccc

SEQ ID NO: 3453870 - DNA, 25 bp, Homo sapien
cactgagacaaatggtgagggcaag

SEQ ID NO: 3453871 - DNA, 25 bp, Homo sapien
agaggatgacggcaagcaaggcaca

SEQ ID NO: 3453872 - DNA, 25 bp, Homo sapien
tcatttgggaccaggagatcaagac

SEQ ID NO: 3453873 - DNA, 25 bp, Homo sapien
taaacacggagtagtaaccatatgc

SEQ ID NO: 3453874 - DNA, 25 bp, Homo sapien
gacacgggtcttctatctagtacat

SEQ ID NO: 3453875 - DNA, 25 bp, Homo sapien
agccactttggaaaccagtagggag

SEQ ID NO: 3453876 - DNA, 25 bp, Homo sapien
gaaaactgaggcaatagtgtttttg

SEQ ID NO: 3453877 - DNA, 25 bp, Homo sapien
aaactgaggcaatagtgtttttgag

SEQ ID NO: 3453878 - DNA, 25 bp, Homo sapien
ctgaggcaatagtgtttttgaggcc

SEQ ID NO: 3453879 - DNA, 25 bp, Homo sapien
tgtttttgaggccttgttctcaact

SEQ ID NO: 3453880 - DNA, 25 bp, Homo sapien
agatggtggaggcttgcaattccca

SEQ ID NO: 3453881 - DNA, 25 bp, Homo sapien
tacatttctcatgaatacggtggga

SEQ ID NO: 3453882 - DNA, 25 bp, Homo sapien
gaagtgctcaaagtcatagctccag

SEQ ID NO: 3453883 - DNA, 25 bp, Homo sapien
tgaaggcagcaagcatcttagctct

SEQ ID NO: 3453884 - DNA, 25 bp, Homo sapien
ccagttggggctaacaggctgaact

SEQ ID NO: 3453885 - DNA, 25 bp, Homo sapien
tgcggtgatagctgctgcttgtcac

SEQ ID NO: 3453886 - DNA, 25 bp, Homo sapien
gactgttgggtgtgaggtgcaggtc

SEQ ID NO: 3453887 - DNA, 25 bp, Homo sapien
gctccactagggcagttaggatcct

SEQ ID NO: 3453888 - DNA, 25 bp, Homo sapien
taaagtaagaacagcatacacatcc

SEQ ID NO: 3453889 - DNA, 25 bp, Homo sapien
cacatcctgcttgggaatgaacacg

SEQ ID NO: 3453890 - DNA, 25 bp, Homo sapien
tgtcccaaagacctcattgcaagat

SEQ ID NO: 3453891 - DNA, 25 bp, Homo sapien
acttgtgatgtaatccacctgtttg

SEQ ID NO: 3453892 - DNA, 25 bp, Homo sapien
ccctagtaggatctggagtatgctg

SEQ ID NO: 3453893 - DNA, 25 bp, Homo sapien
ggagggccagacttgtatttggact

SEQ ID NO: 3453894 - DNA, 25 bp, Homo sapien
gccataattcctctccctttaagga

SEQ ID NO: 3453895 - DNA, 25 bp, Homo sapien
gggaagtacagccaagaaccagttc

SEQ ID NO: 3453896 - DNA, 25 bp, Homo sapien
cttacagtgactaggcttttggccc

SEQ ID NO: 3453897 - DNA, 25 bp, Homo sapien
gaatgccatgtcacagtatgcagca

SEQ ID NO: 3453898 - DNA, 25 bp, Homo sapien
taggacttttatcttaggagcagca

SEQ ID NO: 3453899 - DNA, 25 bp, Homo sapien
cagatctgaagatgacccagaggcc

SEQ ID NO: 3453900 - DNA, 25 bp, Homo sapien
gaggaacacgttccatattagccct

SEQ ID NO: 3453901 - DNA, 25 bp, Homo sapien
taattggcaggaaggaccaaacatt

SEQ ID NO: 3453902 - DNA, 25 bp, Homo sapien
gggacattttagtctgtgcaactac

SEQ ID NO: 3453903 - DNA, 25 bp, Homo sapien
tggtacagcctgaattcaataaact

SEQ ID NO: 3453904 - DNA, 25 bp, Homo sapien
gacccagcatcaactacaactacag

SEQ ID NO: 3453905 - DNA, 25 bp, Homo sapien
tatgccgctgcattttgggagtgtc

SEQ ID NO: 3453906 - DNA, 25 bp, Homo sapien
aattattcagaatagtgccacccaa

SEQ ID NO: 3453907 - DNA, 25 bp, Homo sapien
aaactgtctgtcttcattatgccgc

SEQ ID NO: 3453908 - DNA, 25 bp, Homo sapien
cagccaggtgctgttttcctaaact

SEQ ID NO: 3453909 - DNA, 25 bp, Homo sapien
agccaggtgctgttttcctaaactt

SEQ ID NO: 3453910 - DNA, 25 bp, Homo sapien
actctggttctggtgccacacctcc

SEQ ID NO: 3453911 - DNA, 25 bp, Homo sapien
cagccccttaagtcctgactctggt

SEQ ID NO: 3453912 - DNA, 25 bp, Homo sapien
agccccttaagtcctgactctggtt

SEQ ID NO: 3453913 - DNA, 25 bp, Homo sapien
tatgatagacggtgtctgccaaaat

SEQ ID NO: 3453914 - DNA, 25 bp, Homo sapien
ccagcacttggtggtactatgatag

SEQ ID NO: 3453915 - DNA, 25 bp, Homo sapien
cagaattccattggccttactgaga

SEQ ID NO: 3453916 - DNA, 25 bp, Homo sapien
cattggccttactgagagaagcagg

SEQ ID NO: 3453917 - DNA, 25 bp, Homo sapien
aagcccaggtactgtctaaagggtg

SEQ ID NO: 3453918 - DNA, 25 bp, Homo sapien
tctccattctcctagaaggtcatgc

SEQ ID NO: 3453919 - DNA, 25 bp, Homo sapien
cctagaaggtcatgcatgctgcact

SEQ ID NO: 3453920 - DNA, 25 bp, Homo sapien
gtactgtctaaagggtgccagctcc

SEQ ID NO: 3453921 - DNA, 25 bp, Homo sapien
ttgctaatcggtgagctggaaagac

SEQ ID NO: 3453922 - DNA, 25 bp, Homo sapien
gaagacatttgctaatcggtgagct

SEQ ID NO: 3453923 - DNA, 25 bp, Homo sapien
acatttgctaatcggtgagctggaa

SEQ ID NO: 3453924 - DNA, 25 bp, Homo sapien
ctaatcggtgagctggaaagacgag

SEQ ID NO: 3453925 - DNA, 25 bp, Homo sapien
gggctccctccatagcagaacaagc

SEQ ID NO: 3453926 - DNA, 25 bp, Homo sapien
taatagctggcagatccaatggagc

SEQ ID NO: 3453927 - DNA, 25 bp, Homo sapien
ccaatggagcggaggatatctgccc

SEQ ID NO: 3453928 - DNA, 25 bp, Homo sapien
gaacaagcaccatgcatagttcatg

SEQ ID NO: 3453929 - DNA, 25 bp, Homo sapien
ccttaaataatagctccccacacat

SEQ ID NO: 3453930 - DNA, 25 bp, Homo sapien
gaatgatattacaaacctgtctggg

SEQ ID NO: 3453931 - DNA, 25 bp, Homo sapien
gccaagtcatcaccttaaataatag

SEQ ID NO: 3453932 - DNA, 25 bp, Homo sapien
cataatagtctccacagcaactgtg

SEQ ID NO: 3453933 - DNA, 25 bp, Homo sapien
cattttgcctctcattagtgccttt

SEQ ID NO: 3453934 - DNA, 25 bp, Homo sapien
gccattttgcctctcattagtgcct

SEQ ID NO: 3453935 - DNA, 25 bp, Homo sapien
cttttccagtaacccgtctgcctct

SEQ ID NO: 3453936 - DNA, 25 bp, Homo sapien
acccgtctgcctctcggccattttg

SEQ ID NO: 3453937 - DNA, 25 bp, Homo sapien
gcctggaagacataaccatcacatt

SEQ ID NO: 3453938 - DNA, 25 bp, Homo sapien
tgacaacacatttggctgatgctgg

SEQ ID NO: 3453939 - DNA, 25 bp, Homo sapien
cctggaagacataaccatcacattt

SEQ ID NO: 3453940 - DNA, 25 bp, Homo sapien
cctcaatgctattgggctgaaaaat

SEQ ID NO: 3453941 - DNA, 25 bp, Homo sapien
agagttcagaatatccttgaaatat

SEQ ID NO: 3453942 - DNA, 25 bp, Homo sapien
ctgtttcctagatgaagaagagttc

SEQ ID NO: 3453943 - DNA, 25 bp, Homo sapien
tagaagctgctgttcatgttgagcc

SEQ ID NO: 3453944 - DNA, 25 bp, Homo sapien
ggacccactggcaacatgataagga

SEQ ID NO: 3453945 - DNA, 25 bp, Homo sapien
caaatcatgagtgatggacatccag

SEQ ID NO: 3453946 - DNA, 25 bp, Homo sapien
gagggtctggctaacaaagcgctga

SEQ ID NO: 3453947 - DNA, 25 bp, Homo sapien
attccatggcgatgtgtgtagccca

SEQ ID NO: 3453948 - DNA, 25 bp, Homo sapien
aatgagtaggagaagcctcatgttc

SEQ ID NO: 3453949 - DNA, 25 bp, Homo sapien
tccatgggaagaagatggtctctgg

SEQ ID NO: 3453950 - DNA, 25 bp, Homo sapien
tcatcctaggcaagctactgatttc

SEQ ID NO: 3453951 - DNA, 25 bp, Homo sapien
ccattcgccggtttctgaggagcag

SEQ ID NO: 3453952 - DNA, 25 bp, Homo sapien
gtcggcttcatgtgaccatctttaa

SEQ ID NO: 3453953 - DNA, 25 bp, Homo sapien
tctttaatcaaggttatcccctgaa

SEQ ID NO: 3453954 - DNA, 25 bp, Homo sapien
tatccttgcctcagatgtaattgtg

SEQ ID NO: 3453955 - DNA, 25 bp, Homo sapien
ctttctgtcggcttcatgtgaccat

SEQ ID NO: 3453956 - DNA, 25 bp, Homo sapien
ttcatgaaggcataaacgcaatgca

SEQ ID NO: 3453957 - DNA, 25 bp, Homo sapien
gcataaacgcaatgcacacaggctt

SEQ ID NO: 3453958 - DNA, 25 bp, Homo sapien
cagatctgggatcaagaggcataag

SEQ ID NO: 3453959 - DNA, 25 bp, Homo sapien
ctgcatattcatgaaggcataaacg

SEQ ID NO: 3453960 - DNA, 25 bp, Homo sapien
agcataaattctgggtaggacagac

SEQ ID NO: 3453961 - DNA, 25 bp, Homo sapien
ttaaagcataaattctgggtaggac

SEQ ID NO: 3453962 - DNA, 25 bp, Homo sapien
aaagcataaattctgggtaggacag

SEQ ID NO: 3453963 - DNA, 25 bp, Homo sapien
taaagcataaattctgggtaggaca

SEQ ID NO: 3453964 - DNA, 25 bp, Homo sapien
tggctttactggttcccttggtaga

SEQ ID NO: 3453965 - DNA, 25 bp, Homo sapien
ttgcttggctttactggttcccttg

SEQ ID NO: 3453966 - DNA, 25 bp, Homo sapien
tgcttggctttactggttcccttgg

SEQ ID NO: 3453967 - DNA, 25 bp, Homo sapien
tatttgcttggctttactggttccc

SEQ ID NO: 3453968 - DNA, 25 bp, Homo sapien
aatatcactcgtatggaaagctttg

SEQ ID NO: 3453969 - DNA, 25 bp, Homo sapien
tgcactccccttagaaatcatgtca

SEQ ID NO: 3453970 - DNA, 25 bp, Homo sapien
tactcagagaatgtgcaaagtcttg

SEQ ID NO: 3453971 - DNA, 25 bp, Homo sapien
tattgtatctggattgttcaacccc

SEQ ID NO: 3453972 - DNA, 25 bp, Homo sapien
ctgtgtagaaatgagaatatttgac

SEQ ID NO: 3453973 - DNA, 25 bp, Homo sapien
aaatgagaatatttgacttttaaat

SEQ ID NO: 3453974 - DNA, 25 bp, Homo sapien
gaaatgagaatatttgacttttaaa

SEQ ID NO: 3453975 - DNA, 25 bp, Homo sapien
tgtgtagaaatgagaatatttgact

SEQ ID NO: 3453976 - DNA, 25 bp, Homo sapien
ctgctgttctcgatccaatttcctt

SEQ ID NO: 3453977 - DNA, 25 bp, Homo sapien
ctgcctgctgttctcgatccaattt

SEQ ID NO: 3453978 - DNA, 25 bp, Homo sapien
tctcgatccaatttccttgaagttg

SEQ ID NO: 3453979 - DNA, 25 bp, Homo sapien
tgttctcgatccaatttccttgaag

SEQ ID NO: 3453980 - DNA, 25 bp, Homo sapien
tgaattactgacctacccagaccca

SEQ ID NO: 3453981 - DNA, 25 bp, Homo sapien
tctctgaattactgacctacccaga

SEQ ID NO: 3453982 - DNA, 25 bp, Homo sapien
tctgaattactgacctacccagacc

SEQ ID NO: 3453983 - DNA, 25 bp, Homo sapien
gaattactgacctacccagacccat

SEQ ID NO: 3453984 - DNA, 25 bp, Homo sapien
tccacatccccaccgctcccacaca

SEQ ID NO: 3453985 - DNA, 25 bp, Homo sapien
ggcaggtagaatccactgttcctcc

SEQ ID NO: 3453986 - DNA, 25 bp, Homo sapien
gggcaggtagaatccactgttcctc

SEQ ID NO: 3453987 - DNA, 25 bp, Homo sapien
ctccccgtccacatccccaccgctc

SEQ ID NO: 3453988 - DNA, 25 bp, Homo sapien
gtgccagaaacactgcagttgccat

SEQ ID NO: 3453989 - DNA, 25 bp, Homo sapien
ctgtgccagaaacactgcagttgcc

SEQ ID NO: 3453990 - DNA, 25 bp, Homo sapien
tgtgccagaaacactgcagttgcca

SEQ ID NO: 3453991 - DNA, 25 bp, Homo sapien
agctctaaactctgagatgcctgct

SEQ ID NO: 3453992 - DNA, 25 bp, Homo sapien
ctacagtttaacacaacagtttcct

SEQ ID NO: 3453993 - DNA, 25 bp, Homo sapien
gaggaaatgctaactggcccagctc

SEQ ID NO: 3453994 - DNA, 25 bp, Homo sapien
tataagttggctgaactcctcatct

SEQ ID NO: 3453995 - DNA, 25 bp, Homo sapien
ggaatatatacattgttcctttttc

SEQ ID NO: 3453996 - DNA, 25 bp, Homo sapien
ccctgactacctggcaaatgtctac

SEQ ID NO: 3453997 - DNA, 25 bp, Homo sapien
gactacctggcaaatgtctactttt

SEQ ID NO: 3453998 - DNA, 25 bp, Homo sapien
ctggaatatatacattgttcctttt

SEQ ID NO: 3453999 - DNA, 25 bp, Homo sapien
gtttggttgccaagaatgagacttc

SEQ ID NO: 3454000 - DNA, 25 bp, Homo sapien
tctgctggcgactctcaaatggcag

SEQ ID NO: 3454001 - DNA, 25 bp, Homo sapien
tctgggtcagcacaacagtttggtt

SEQ ID NO: 3454002 - DNA, 25 bp, Homo sapien
gaaccctctgctggcgactctcaaa

SEQ ID NO: 3454003 - DNA, 25 bp, Homo sapien
ggtgaggaattatggcttgctctga

SEQ ID NO: 3454004 - DNA, 25 bp, Homo sapien
ttatggcttgctctgaacaggtgca

SEQ ID NO: 3454005 - DNA, 25 bp, Homo sapien
tctgaggtgaggaattatggcttgc

SEQ ID NO: 3454006 - DNA, 25 bp, Homo sapien
ggaattatggcttgctctgaacagg

SEQ ID NO: 3454007 - DNA, 25 bp, Homo sapien
attagccatcacaggaaaataattc

SEQ ID NO: 3454008 - DNA, 25 bp, Homo sapien
aattagccatcacaggaaaataatt

SEQ ID NO: 3454009 - DNA, 25 bp, Homo sapien
ttaaccacgttccgttgtgtcttca

SEQ ID NO: 3454010 - DNA, 25 bp, Homo sapien
taaccacgttccgttgtgtcttcat

SEQ ID NO: 3454011 - DNA, 25 bp, Homo sapien
gattctcctgattgctgcgagctat

SEQ ID NO: 3454012 - DNA, 25 bp, Homo sapien
ccgacttcttccatagtactctgca

SEQ ID NO: 3454013 - DNA, 25 bp, Homo sapien
cactctgattctcctgattgctgcg

SEQ ID NO: 3454014 - DNA, 25 bp, Homo sapien
gattgctgcgagctattttagcact

SEQ ID NO: 3454015 - DNA, 25 bp, Homo sapien
taacattaaaccgaaatctaactgc

SEQ ID NO: 3454016 - DNA, 25 bp, Homo sapien
tatcctcccaacactttacacaaag

SEQ ID NO: 3454017 - DNA, 25 bp, Homo sapien
aatctaactgcctgtacttactatc

SEQ ID NO: 3454018 - DNA, 25 bp, Homo sapien
ggctgtcctaatttacactgggaaa

SEQ ID NO: 3454019 - DNA, 25 bp, Homo sapien
gctgctcactagaggatgctgctgc

SEQ ID NO: 3454020 - DNA, 25 bp, Homo sapien
ttggcaacagttcgctgctcactag

SEQ ID NO: 3454021 - DNA, 25 bp, Homo sapien
aattaatgccctgcaatgggctctg

SEQ ID NO: 3454022 - DNA, 25 bp, Homo sapien
aaggagcccctcttggcaacagttc

SEQ ID NO: 3454023 - DNA, 25 bp, Homo sapien
ttgactgttttggagagggaccacc

SEQ ID NO: 3454024 - DNA, 25 bp, Homo sapien
gatctggtagaccttctctgggaac

SEQ ID NO: 3454025 - DNA, 25 bp, Homo sapien
tttcggtcacgttctggcagcttga

SEQ ID NO: 3454026 - DNA, 25 bp, Homo sapien
tgcaaaagccctgtaaatcggttct

SEQ ID NO: 3454027 - DNA, 25 bp, Homo sapien
ccacgtctagaccacaggagagaaa

SEQ ID NO: 3454028 - DNA, 25 bp, Homo sapien
cacatcagagcttctaacagtagat

SEQ ID NO: 3454029 - DNA, 25 bp, Homo sapien
tgttctggacacataaccgagcaca

SEQ ID NO: 3454030 - DNA, 25 bp, Homo sapien
taaaggacagacctagcagagaagg

SEQ ID NO: 3454031 - DNA, 25 bp, Homo sapien
ctgtgggcgcccattgtccactgcc

SEQ ID NO: 3454032 - DNA, 25 bp, Homo sapien
tgggcgcccattgtccactgccttt

SEQ ID NO: 3454033 - DNA, 25 bp, Homo sapien
tgtgggcgcccattgtccactgcct

SEQ ID NO: 3454034 - DNA, 25 bp, Homo sapien
ggcgcccattgtccactgcctttat

SEQ ID NO: 3454035 - DNA, 25 bp, Homo sapien
tccattcaatgtggaggcgggccgt

SEQ ID NO: 3454036 - DNA, 25 bp, Homo sapien
tcaaaccacagaggggtgttagctg

SEQ ID NO: 3454037 - DNA, 25 bp, Homo sapien
gaagttataaaacggctcatcgaag

SEQ ID NO: 3454038 - DNA, 25 bp, Homo sapien
catcgaaggtcaatggtataggtga

SEQ ID NO: 3454039 - DNA, 25 bp, Homo sapien
actgctctgtaagactcgaacttac

SEQ ID NO: 3454040 - DNA, 25 bp, Homo sapien
tactgctctgtaagactcgaactta

SEQ ID NO: 3454041 - DNA, 25 bp, Homo sapien
cccacaagctgtctgtagaatatag

SEQ ID NO: 3454042 - DNA, 25 bp, Homo sapien
gaatatagaacatctctcgagcatg

SEQ ID NO: 3454043 - DNA, 25 bp, Homo sapien
tctgtagaatatagaacatctctcg

SEQ ID NO: 3454044 - DNA, 25 bp, Homo sapien
tagaacatctctcgagcatgcttgc

SEQ ID NO: 3454045 - DNA, 25 bp, Homo sapien
gaattcagggagttgtgcacaagct

SEQ ID NO: 3454046 - DNA, 25 bp, Homo sapien
caagctgttgattcaggttccgcat

SEQ ID NO: 3454047 - DNA, 25 bp, Homo sapien
cacaagctgttgattcaggttccgc

SEQ ID NO: 3454048 - DNA, 25 bp, Homo sapien
agctgccgaacctcaatgaattcag

SEQ ID NO: 3454049 - DNA, 25 bp, Homo sapien
tccaaaggttttgcgatgacaattg

SEQ ID NO: 3454050 - DNA, 25 bp, Homo sapien
aacagcaacatttgtcccatcggtg

SEQ ID NO: 3454051 - DNA, 25 bp, Homo sapien
ttctctgcatcaaaagcgctgtcaa

SEQ ID NO: 3454052 - DNA, 25 bp, Homo sapien
tattatagatggacctctgctctgc

SEQ ID NO: 3454053 - DNA, 25 bp, Homo sapien
ctgatgaagtggaagatccaacata

SEQ ID NO: 3454054 - DNA, 25 bp, Homo sapien
cacagcaacatgtgaggcaaacccc

SEQ ID NO: 3454055 - DNA, 25 bp, Homo sapien
acagcaacatgtgaggcaaacccca

SEQ ID NO: 3454056 - DNA, 25 bp, Homo sapien
aagatccaacatagactcatttctc

SEQ ID NO: 3454057 - DNA, 25 bp, Homo sapien
tccaccccaggataagtcagaaagt

SEQ ID NO: 3454058 - DNA, 25 bp, Homo sapien
tcagaaagtatccagaatagtcctc

SEQ ID NO: 3454059 - DNA, 25 bp, Homo sapien
tgccttaaggcactgtcttgcactt

SEQ ID NO: 3454060 - DNA, 25 bp, Homo sapien
ctcatgtgcaccgagggtgccttaa

SEQ ID NO: 3454061 - DNA, 25 bp, Homo sapien
ccttgtgattcctcaactcttttcc

SEQ ID NO: 3454062 - DNA, 25 bp, Homo sapien
tcataacagccaatgctccttgtga

SEQ ID NO: 3454063 - DNA, 25 bp, Homo sapien
ttttccaagcagatacagtaccgat

SEQ ID NO: 3454064 - DNA, 25 bp, Homo sapien
tattcctcccttgctcataacagcc

SEQ ID NO: 3454065 - DNA, 25 bp, Homo sapien
tcggcagtatagagcacgccagtgc

SEQ ID NO: 3454066 - DNA, 25 bp, Homo sapien
cgtgtctggaagcacatcctcggaa

SEQ ID NO: 3454067 - DNA, 25 bp, Homo sapien
tcacatcgtaattcggctgagagaa

SEQ ID NO: 3454068 - DNA, 25 bp, Homo sapien
ccagtgctagggtcaatccggaatt

SEQ ID NO: 3454069 - DNA, 25 bp, Homo sapien
tatttactactaggtccagtgccag

SEQ ID NO: 3454070 - DNA, 25 bp, Homo sapien
tgtgcaatgccgcagagattcttgg

SEQ ID NO: 3454071 - DNA, 25 bp, Homo sapien
tccaaggactgagcattgcataggc

SEQ ID NO: 3454072 - DNA, 25 bp, Homo sapien
catagtgatgactggaagacctcta

SEQ ID NO: 3454073 - DNA, 25 bp, Homo sapien
tagtcactagcacaaggtttctgcc

SEQ ID NO: 3454074 - DNA, 25 bp, Homo sapien
agactggtctgccatacccaaggac

SEQ ID NO: 3454075 - DNA, 25 bp, Homo sapien
tccaatttagtgtaagctcctaggg

SEQ ID NO: 3454076 - DNA, 25 bp, Homo sapien
gctcctagggtgcaggaactttgtc

SEQ ID NO: 3454077 - DNA, 25 bp, Homo sapien
gagccgtcacttgcagaacagctga

SEQ ID NO: 3454078 - DNA, 25 bp, Homo sapien
tcttcgataaggaaactcctgatct

SEQ ID NO: 3454079 - DNA, 25 bp, Homo sapien
aaacacagacgcttcatacagtggg

SEQ ID NO: 3454080 - DNA, 25 bp, Homo sapien
ttcacaatgactcgggccaagtttc

SEQ ID NO: 3454081 - DNA, 25 bp, Homo sapien
tgattgcacctgtactggagtccac

SEQ ID NO: 3454082 - DNA, 25 bp, Homo sapien
gatgtgcgctcataatccagggcct

SEQ ID NO: 3454083 - DNA, 25 bp, Homo sapien
tacacaagcagagcattccggttgc

SEQ ID NO: 3454084 - DNA, 25 bp, Homo sapien
tgataaatcagagtcccgggttccg

SEQ ID NO: 3454085 - DNA, 25 bp, Homo sapien
gatcgatttccaggaggtcggccac

SEQ ID NO: 3454086 - DNA, 25 bp, Homo sapien
cacattgagactgtacagaggctcc

SEQ ID NO: 3454087 - DNA, 25 bp, Homo sapien
catcatcgggatctatggcttgaac

SEQ ID NO: 3454088 - DNA, 25 bp, Homo sapien
gctgatctgcccataagtccctgga

SEQ ID NO: 3454089 - DNA, 25 bp, Homo sapien
cacttcctgcgcgaagactggtgca

SEQ ID NO: 3454090 - DNA, 25 bp, Homo sapien
cacttgtgtgagtttggtgccaaca

SEQ ID NO: 3454091 - DNA, 25 bp, Homo sapien
tcaaggtactgatccagcccgtgtt

SEQ ID NO: 3454092 - DNA, 25 bp, Homo sapien
tcactctgacagagaccaaggccgt

SEQ ID NO: 3454093 - DNA, 25 bp, Homo sapien
tctggccccatatgtcaatagcggt

SEQ ID NO: 3454094 - DNA, 25 bp, Homo sapien
ggtcctccctgggatatcactttcc

SEQ ID NO: 3454095 - DNA, 25 bp, Homo sapien
catttttgcttgtcacattggtggg

SEQ ID NO: 3454096 - DNA, 25 bp, Homo sapien
tgtggctgagcaaccctgctctagg

SEQ ID NO: 3454097 - DNA, 25 bp, Homo sapien
tccaccatggcctgtgtgacaaaaa

SEQ ID NO: 3454098 - DNA, 25 bp, Homo sapien
ccagagcaaaccttcctcgagggtt

SEQ ID NO: 3454099 - DNA, 25 bp, Homo sapien
gaggcctcttcacatagaccttcca

SEQ ID NO: 3454100 - DNA, 25 bp, Homo sapien
ttcacatcactgacgctcacttcca

SEQ ID NO: 3454101 - DNA, 25 bp, Homo sapien
cagatccatagagtgagtatcgtat

SEQ ID NO: 3454102 - DNA, 25 bp, Homo sapien
cattggatccaatatcagcatcctt

SEQ ID NO: 3454103 - DNA, 25 bp, Homo sapien
agtatcgtatatatccattggatcc

SEQ ID NO: 3454104 - DNA, 25 bp, Homo sapien
caggaagtaatgctgtatatgcaac

SEQ ID NO: 3454105 - DNA, 25 bp, Homo sapien
tctggtcaacagagccttggtggct

SEQ ID NO: 3454106 - DNA, 25 bp, Homo sapien
cacaggtgttgtagtggtcagaaga

SEQ ID NO: 3454107 - DNA, 25 bp, Homo sapien
ctcccggtccaacagagccaaggtt

SEQ ID NO: 3454108 - DNA, 25 bp, Homo sapien
ggtccacggcttgaactctggtcaa

SEQ ID NO: 3454109 - DNA, 25 bp, Homo sapien
ttcaacaacctggtaatcttagtgc

SEQ ID NO: 3454110 - DNA, 25 bp, Homo sapien
ttctaccttcaacaacctggtaatc

SEQ ID NO: 3454111 - DNA, 25 bp, Homo sapien
ggtaatcttagtgcacagctcacac

SEQ ID NO: 3454112 - DNA, 25 bp, Homo sapien
caacctggtaatcttagtgcacagc

SEQ ID NO: 3454113 - DNA, 25 bp, Homo sapien
tggaagatatattgttcctctcttc

SEQ ID NO: 3454114 - DNA, 25 bp, Homo sapien
gaggaactggaagatatattgttcc

SEQ ID NO: 3454115 - DNA, 25 bp, Homo sapien
gacaatatcttgggcattcacacca

SEQ ID NO: 3454116 - DNA, 25 bp, Homo sapien
aactggaagatatattgttcctctc

SEQ ID NO: 3454117 - DNA, 25 bp, Homo sapien
gagcagacatttaggggtgctttct

SEQ ID NO: 3454118 - DNA, 25 bp, Homo sapien
tattgatgctgggattaaaaataag

SEQ ID NO: 3454119 - DNA, 25 bp, Homo sapien
ggcttcagagcagacatttaggggt

SEQ ID NO: 3454120 - DNA, 25 bp, Homo sapien
tcagagcagacatttaggggtgctt

SEQ ID NO: 3454121 - DNA, 25 bp, Homo sapien
caatgtacaatttcccttaagccca

SEQ ID NO: 3454122 - DNA, 25 bp, Homo sapien
acaactgccctgtgatgtatacaca

SEQ ID NO: 3454123 - DNA, 25 bp, Homo sapien
tgtggctttaaccaaaaggtcaaca

SEQ ID NO: 3454124 - DNA, 25 bp, Homo sapien
cactgagagcctgttcttggttcca

SEQ ID NO: 3454125 - DNA, 25 bp, Homo sapien
gggagtacacgaccttcctattgat

SEQ ID NO: 3454126 - DNA, 25 bp, Homo sapien
ctgccagggagtacacgaccttcct

SEQ ID NO: 3454127 - DNA, 25 bp, Homo sapien
gccagggagtacacgaccttcctat

SEQ ID NO: 3454128 - DNA, 25 bp, Homo sapien
gagtacacgaccttcctattgatgc

SEQ ID NO: 3454129 - DNA, 25 bp, Homo sapien
cagtggcccgcacgctgatgttgta

SEQ ID NO: 3454130 - DNA, 25 bp, Homo sapien
tgttcgttcccagaccggatgagat

SEQ ID NO: 3454131 - DNA, 25 bp, Homo sapien
agctgtcaatggagaagaccccacc

SEQ ID NO: 3454132 - DNA, 25 bp, Homo sapien
gtggcaaaaacagcaaggacttggg

SEQ ID NO: 3454133 - DNA, 25 bp, Homo sapien
ttgacagtggccacagcgctgagag

SEQ ID NO: 3454134 - DNA, 25 bp, Homo sapien
aatgacagagtctcccaccaaggcg

SEQ ID NO: 3454135 - DNA, 25 bp, Homo sapien
gataaccgcactgtagacgtcttgg

SEQ ID NO: 3454136 - DNA, 25 bp, Homo sapien
caaggcgtcttcactgataaccgca

SEQ ID NO: 3454137 - DNA, 25 bp, Homo sapien
tcttaactttcacaagtcccaagac

SEQ ID NO: 3454138 - DNA, 25 bp, Homo sapien
aaaaatgaatctgtccgttgggctg

SEQ ID NO: 3454139 - DNA, 25 bp, Homo sapien
gatctacagtaaattcattgtcccg

SEQ ID NO: 3454140 - DNA, 25 bp, Homo sapien
attgtcccgatctccattcacaatg

SEQ ID NO: 3454141 - DNA, 25 bp, Homo sapien
ccaaggtacaaagaggtgacagtaa

SEQ ID NO: 3454142 - DNA, 25 bp, Homo sapien
taaagaggtgtagcgcttccttcct

SEQ ID NO: 3454143 - DNA, 25 bp, Homo sapien
ctgccaaggtacaaagaggtgacag

SEQ ID NO: 3454144 - DNA, 25 bp, Homo sapien
gtgacagtaaagaggtgtagcgctt

SEQ ID NO: 3454145 - DNA, 25 bp, Homo sapien
gaaatatcaatgttgacagttgcag

SEQ ID NO: 3454146 - DNA, 25 bp, Homo sapien
gaatcacagcagtatagttggcagg

SEQ ID NO: 3454147 - DNA, 25 bp, Homo sapien
agttggcaggtgtaaacaccgggct

SEQ ID NO: 3454148 - DNA, 25 bp, Homo sapien
aggaatgccactgtctacggcctgg

SEQ ID NO: 3454149 - DNA, 25 bp, Homo sapien
agaactaggttctttttcatacctg

SEQ ID NO: 3454150 - DNA, 25 bp, Homo sapien
gaactaggttctttttcatacctgc

SEQ ID NO: 3454151 - DNA, 25 bp, Homo sapien
ctctaaaggccgcttcctgcataga

SEQ ID NO: 3454152 - DNA, 25 bp, Homo sapien
gccgcttcctgcatagaagagaggg

SEQ ID NO: 3454153 - DNA, 25 bp, Homo sapien
ctgagaagaagggtataaggtaaca

SEQ ID NO: 3454154 - DNA, 25 bp, Homo sapien
agggagagagacaatgtggccctca

SEQ ID NO: 3454155 - DNA, 25 bp, Homo sapien
cctatgggacaatcctctactggtg

SEQ ID NO: 3454156 - DNA, 25 bp, Homo sapien
accacctatgggacaatcctctact

SEQ ID NO: 3454157 - DNA, 25 bp, Homo sapien
tatgggacaatcctctactggtgtg

SEQ ID NO: 3454158 - DNA, 25 bp, Homo sapien
gggacaatcctctactggtgtgaac

SEQ ID NO: 3454159 - DNA, 25 bp, Homo sapien
aggcccattgtgaaaggagtctctg

SEQ ID NO: 3454160 - DNA, 25 bp, Homo sapien
tcttcatttcccgacaaaatagaga

SEQ ID NO: 3454161 - DNA, 25 bp, Homo sapien
catttcccgacaaaatagagaatga

SEQ ID NO: 3454162 - DNA, 25 bp, Homo sapien
ggaggcccattgtgaaaggagtctc

SEQ ID NO: 3454163 - DNA, 25 bp, Homo sapien
cacgtattccagagactctgtgtgc

SEQ ID NO: 3454164 - DNA, 25 bp, Homo sapien
tggaagaccacagccgaccgcaaga

SEQ ID NO: 3454165 - DNA, 25 bp, Homo sapien
cacacaacacgtattccagagactc

SEQ ID NO: 3454166 - DNA, 25 bp, Homo sapien
tcccatgagggtccaacacaaactc

SEQ ID NO: 3454167 - DNA, 25 bp, Homo sapien
atacctgccacgtttgcctctttgg

SEQ ID NO: 3454168 - DNA, 25 bp, Homo sapien
cacaggccaatgaacatgaggaact

SEQ ID NO: 3454169 - DNA, 25 bp, Homo sapien
ttctatactctgcatacctgccacg

SEQ ID NO: 3454170 - DNA, 25 bp, Homo sapien
gcctctttggcccattttacgtcac

SEQ ID NO: 3454171 - DNA, 25 bp, Homo sapien
gactcgcacgcggatgtaagtgtga

SEQ ID NO: 3454172 - DNA, 25 bp, Homo sapien
catcaatgggtacctggaagcgacc

SEQ ID NO: 3454173 - DNA, 25 bp, Homo sapien
caaagctgatgcgagccgtgctgta

SEQ ID NO: 3454174 - DNA, 25 bp, Homo sapien
ggcttgtagaactcgctgctgtgca

SEQ ID NO: 3454175 - DNA, 25 bp, Homo sapien
gagagggaacactcaaaactgcact

SEQ ID NO: 3454176 - DNA, 25 bp, Homo sapien
gttgagagggaacactcaaaactgc

SEQ ID NO: 3454177 - DNA, 25 bp, Homo sapien
cctacaatctcaggagttgagaggg

SEQ ID NO: 3454178 - DNA, 25 bp, Homo sapien
tcattctactcctacaatctcagga

SEQ ID NO: 3454179 - DNA, 25 bp, Homo sapien
gacatgcttcattgcttccaatgtc

SEQ ID NO: 3454180 - DNA, 25 bp, Homo sapien
aagacctattgtgacatgcttcatt

SEQ ID NO: 3454181 - DNA, 25 bp, Homo sapien
ctccaagtagagctgataactccct

SEQ ID NO: 3454182 - DNA, 25 bp, Homo sapien
caagtagagctgataactccctcct

SEQ ID NO: 3454183 - DNA, 25 bp, Homo sapien
ctcaggtggaaatttaggtcacttt

SEQ ID NO: 3454184 - DNA, 25 bp, Homo sapien
gctcaggtggaaatttaggtcactt

SEQ ID NO: 3454185 - DNA, 25 bp, Homo sapien
tgtccaccaggagaaacacgcacac

SEQ ID NO: 3454186 - DNA, 25 bp, Homo sapien
ttgtccaccaggagaaacacgcaca

SEQ ID NO: 3454187 - DNA, 25 bp, Homo sapien
cagattcatgatttgtaagtccgca

SEQ ID NO: 3454188 - DNA, 25 bp, Homo sapien
gaacatgcacctgtgttgaccccat

SEQ ID NO: 3454189 - DNA, 25 bp, Homo sapien
gcttgttactcatccgcgtcacagg

SEQ ID NO: 3454190 - DNA, 25 bp, Homo sapien
gaaattctgtgtgcactgtaggcac

SEQ ID NO: 3454191 - DNA, 25 bp, Homo sapien
tccacacaaggatcgttggaccccg

SEQ ID NO: 3454192 - DNA, 25 bp, Homo sapien
ggcttctccacacaaggatcgttgg

SEQ ID NO: 3454193 - DNA, 25 bp, Homo sapien
ctggacacggcttctccacacaagg

SEQ ID NO: 3454194 - DNA, 25 bp, Homo sapien
caaggatcgttggaccccggacaca

SEQ ID NO: 3454195 - DNA, 25 bp, Homo sapien
tggacactggcagaggaacggtctc

SEQ ID NO: 3454196 - DNA, 25 bp, Homo sapien
cctgctggcttcataactgacacac

SEQ ID NO: 3454197 - DNA, 25 bp, Homo sapien
gaggaacggtctcctgctggcttca

SEQ ID NO: 3454198 - DNA, 25 bp, Homo sapien
gctggcttcataactgacacactgc

SEQ ID NO: 3454199 - DNA, 25 bp, Homo sapien
cagaaagccgatatttgatgtaact

SEQ ID NO: 3454200 - DNA, 25 bp, Homo sapien
cccattgctttgcagtgttcgaaga

SEQ ID NO: 3454201 - DNA, 25 bp, Homo sapien
gacgcagagctagtttgaaatcctc

SEQ ID NO: 3454202 - DNA, 25 bp, Homo sapien
cagggatttgctctggtgtacatta

SEQ ID NO: 3454203 - DNA, 25 bp, Homo sapien
tattcagtatcaccgagtccaggca

SEQ ID NO: 3454204 - DNA, 25 bp, Homo sapien
ccagggcgccgaagtagatgctact

SEQ ID NO: 3454205 - DNA, 25 bp, Homo sapien
ggatgttatccgcttgcaccagggc

SEQ ID NO: 3454206 - DNA, 25 bp, Homo sapien
tccagggacaggctcgtgaaattgc

SEQ ID NO: 3454207 - DNA, 25 bp, Homo sapien
gtgcccactgcgtagccacactcac

SEQ ID NO: 3454208 - DNA, 25 bp, Homo sapien
ccagtgcccactgcgtagccacact

SEQ ID NO: 3454209 - DNA, 25 bp, Homo sapien
cagtgcccactgcgtagccacactc

SEQ ID NO: 3454210 - DNA, 25 bp, Homo sapien
agtgcccactgcgtagccacactca

SEQ ID NO: 3454211 - DNA, 25 bp, Homo sapien
ccccatgtgggtcgtagccatttaa

SEQ ID NO: 3454212 - DNA, 25 bp, Homo sapien
taatccattgtggaagcccatagcc

SEQ ID NO: 3454213 - DNA, 25 bp, Homo sapien
tacaatttgtggctatgtacccagc

SEQ ID NO: 3454214 - DNA, 25 bp, Homo sapien
ccctagggagggcaagacaagttct

SEQ ID NO: 3454215 - DNA, 25 bp, Homo sapien
gggaagcaggctgtaatctcagatt

SEQ ID NO: 3454216 - DNA, 25 bp, Homo sapien
cgtaaactgtgagagacaggtacac

SEQ ID NO: 3454217 - DNA, 25 bp, Homo sapien
gaaagtgtttcctattggatcgcag

SEQ ID NO: 3454218 - DNA, 25 bp, Homo sapien
atcgcaggatcctccattccggcag

SEQ ID NO: 3454219 - DNA, 25 bp, Homo sapien
tggtatacgggaactcgagaaaaca

SEQ ID NO: 3454220 - DNA, 25 bp, Homo sapien
cacacgttggtatacgggaactcga

SEQ ID NO: 3454221 - DNA, 25 bp, Homo sapien
ccagtgcacacacgttggtatacgg

SEQ ID NO: 3454222 - DNA, 25 bp, Homo sapien
cgggaactcgagaaaacacagacat

SEQ ID NO: 3454223 - DNA, 25 bp, Homo sapien
cggaagaccttcttgcggaagacta

SEQ ID NO: 3454224 - DNA, 25 bp, Homo sapien
ttccccacgtaggagtggccagcct

SEQ ID NO: 3454225 - DNA, 25 bp, Homo sapien
aaggagccgaacacgttcacgcagg

SEQ ID NO: 3454226 - DNA, 25 bp, Homo sapien
cctggatattgggtaccaccacggg

SEQ ID NO: 3454227 - DNA, 25 bp, Homo sapien
cgcaggttccggaacgggatgccat

SEQ ID NO: 3454228 - DNA, 25 bp, Homo sapien
attgctcttgttaagcagggcggcg

SEQ ID NO: 3454229 - DNA, 25 bp, Homo sapien
ctggtagacgttgcggccgtcccca

SEQ ID NO: 3454230 - DNA, 25 bp, Homo sapien
acctcctggtagacgttgcggccgt

SEQ ID NO: 3454231 - DNA, 25 bp, Homo sapien
tatccaggttgctcctggagtcact

SEQ ID NO: 3454232 - DNA, 25 bp, Homo sapien
cattcttccggatggagtcgcagtc

SEQ ID NO: 3454233 - DNA, 25 bp, Homo sapien
gcccgtccacgatcttatccaggtt

SEQ ID NO: 3454234 - DNA, 25 bp, Homo sapien
gcgactcagggtgaaacgtggtcat

SEQ ID NO: 3454235 - DNA, 25 bp, Homo sapien
caggtcacttctcccgggtcatcaa

SEQ ID NO: 3454236 - DNA, 25 bp, Homo sapien
aagcaggtcacttctcccgggtcat

SEQ ID NO: 3454237 - DNA, 25 bp, Homo sapien
cacttctcccgggtcatcaacccct

SEQ ID NO: 3454238 - DNA, 25 bp, Homo sapien
tcacttctcccgggtcatcaacccc

SEQ ID NO: 3454239 - DNA, 25 bp, Homo sapien
gctgagggactgaacttcagagttg

SEQ ID NO: 3454240 - DNA, 25 bp, Homo sapien
caccagaatctgactggaaggagct

SEQ ID NO: 3454241 - DNA, 25 bp, Homo sapien
ctgagggactgaacttcagagttgc

SEQ ID NO: 3454242 - DNA, 25 bp, Homo sapien
cattgtcgtcaccagaatctgactg

SEQ ID NO: 3454243 - DNA, 25 bp, Homo sapien
tccgaacaaatctgatgacttctta

SEQ ID NO: 3454244 - DNA, 25 bp, Homo sapien
ccgctccgaacaaatctgatgactt

SEQ ID NO: 3454245 - DNA, 25 bp, Homo sapien
ccgaacaaatctgatgacttcttac

SEQ ID NO: 3454246 - DNA, 25 bp, Homo sapien
gctccgaacaaatctgatgacttct

SEQ ID NO: 3454247 - DNA, 25 bp, Homo sapien
gctgctctgaaccaaatgccagtga

SEQ ID NO: 3454248 - DNA, 25 bp, Homo sapien
gatggcttcacggtcacataatgcc

SEQ ID NO: 3454249 - DNA, 25 bp, Homo sapien
gaggataacctttgcagggttgatg

SEQ ID NO: 3454250 - DNA, 25 bp, Homo sapien
tgccagtgatagaggataacctttg

SEQ ID NO: 3454251 - DNA, 25 bp, Homo sapien
tcattctctatagtgtcaactacat

SEQ ID NO: 3454252 - DNA, 25 bp, Homo sapien
ctatagtgtcaactacattgttgac

SEQ ID NO: 3454253 - DNA, 25 bp, Homo sapien
acattgttgacaagctgaatgacag

SEQ ID NO: 3454254 - DNA, 25 bp, Homo sapien
ttctctatagtgtcaactacattgt

SEQ ID NO: 3454255 - DNA, 25 bp, Homo sapien
ctcggttgtagttctgtccttggtc

SEQ ID NO: 3454256 - DNA, 25 bp, Homo sapien
agcagggaagggacctgacatgcaa

SEQ ID NO: 3454257 - DNA, 25 bp, Homo sapien
ggaagggacctgacatgcaattttt

SEQ ID NO: 3454258 - DNA, 25 bp, Homo sapien
ttttagcatccaagaaaccctaaga

SEQ ID NO: 3454259 - DNA, 25 bp, Homo sapien
gaagcttattacaagggtctatggg

SEQ ID NO: 3454260 - DNA, 25 bp, Homo sapien
gcagttggcagacacatccgaggat

SEQ ID NO: 3454261 - DNA, 25 bp, Homo sapien
tgtcaatgtcataaccacccaggta

SEQ ID NO: 3454262 - DNA, 25 bp, Homo sapien
ggaatcgtcaaagccgcagttggca

SEQ ID NO: 3454263 - DNA, 25 bp, Homo sapien
catcctggttctcatagttgggcac

SEQ ID NO: 3454264 - DNA, 25 bp, Homo sapien
tagcaatacctgtgcactgggaagg

SEQ ID NO: 3454265 - DNA, 25 bp, Homo sapien
gaaaggtatgccatgctcgccggca

SEQ ID NO: 3454266 - DNA, 25 bp, Homo sapien
catttcatgaataggcaggccaagg

SEQ ID NO: 3454267 - DNA, 25 bp, Homo sapien
tataggtcacagcaaagggtgggca

SEQ ID NO: 3454268 - DNA, 25 bp, Homo sapien
tgctgctggcgcaggtagggacaca

SEQ ID NO: 3454269 - DNA, 25 bp, Homo sapien
tttccttgcttgtgcgcagactgca

SEQ ID NO: 3454270 - DNA, 25 bp, Homo sapien
cgaggtccatagaggggcctttcct

SEQ ID NO: 3454271 - DNA, 25 bp, Homo sapien
ggcggccagcgaggtccatagaggg

SEQ ID NO: 3454272 - DNA, 25 bp, Homo sapien
gggttctgctatctggctctcctct

SEQ ID NO: 3454273 - DNA, 25 bp, Homo sapien
tatccaaatgcacggcctgggagcc

SEQ ID NO: 3454274 - DNA, 25 bp, Homo sapien
gagaaggggttctgctatctggctc

SEQ ID NO: 3454275 - DNA, 25 bp, Homo sapien
cttcctatccaaatgcacggcctgg

SEQ ID NO: 3454276 - DNA, 25 bp, Homo sapien
cctgtattgtctctgccgcatttgt

SEQ ID NO: 3454277 - DNA, 25 bp, Homo sapien
ttgtctctgccgcatttgttttgtg

SEQ ID NO: 3454278 - DNA, 25 bp, Homo sapien
gtgagtaggataatggtgcataact

SEQ ID NO: 3454279 - DNA, 25 bp, Homo sapien
aatggtgcataactcaaacacaggg

SEQ ID NO: 3454280 - DNA, 25 bp, Homo sapien
cattttgcatgcaggtgtgaccgga

SEQ ID NO: 3454281 - DNA, 25 bp, Homo sapien
gaattagcaggtacaaaacaatcac

SEQ ID NO: 3454282 - DNA, 25 bp, Homo sapien
caatcctctggaaatggctctcagc

SEQ ID NO: 3454283 - DNA, 25 bp, Homo sapien
tgtggtttgaagtctcggcatccta

SEQ ID NO: 3454284 - DNA, 25 bp, Homo sapien
ggcagtaggtttactagaataactg

SEQ ID NO: 3454285 - DNA, 25 bp, Homo sapien
atgatgatgatattgataaaggcct

SEQ ID NO: 3454286 - DNA, 25 bp, Homo sapien
gatgatgatattgataaaggccttc

SEQ ID NO: 3454287 - DNA, 25 bp, Homo sapien
tgatgatgatattgataaaggcctt

SEQ ID NO: 3454288 - DNA, 25 bp, Homo sapien
atgatgatattgataaaggccttct

SEQ ID NO: 3454289 - DNA, 25 bp, Homo sapien
tgtgagaggcccagtggtggtggac

SEQ ID NO: 3454290 - DNA, 25 bp, Homo sapien
ttgtgagaggcccagtggtggtgga

SEQ ID NO: 3454291 - DNA, 25 bp, Homo sapien
tttgtgagaggcccagtggtggtgg

SEQ ID NO: 3454292 - DNA, 25 bp, Homo sapien
atttgtgagaggcccagtggtggtg

SEQ ID NO: 3454293 - DNA, 25 bp, Homo sapien
gctccttttcaaacttctcaatgat

SEQ ID NO: 3454294 - DNA, 25 bp, Homo sapien
ccttttcaaacttctcaatgattct

SEQ ID NO: 3454295 - DNA, 25 bp, Homo sapien
tctgccggctccttttcaaacttct

SEQ ID NO: 3454296 - DNA, 25 bp, Homo sapien
ctctgccggctccttttcaaacttc

SEQ ID NO: 3454297 - DNA, 25 bp, Homo sapien
caatggtgatcctgcgttctctttc

SEQ ID NO: 3454298 - DNA, 25 bp, Homo sapien
tatcaatggtgatcctgcgttctct

SEQ ID NO: 3454299 - DNA, 25 bp, Homo sapien
gtgatcctgcgttctctttctgccc

SEQ ID NO: 3454300 - DNA, 25 bp, Homo sapien
gatatcaatggtgatcctgcgttct

SEQ ID NO: 3454301 - DNA, 25 bp, Homo sapien
gcatcgatgataatgctgtagtatg

SEQ ID NO: 3454302 - DNA, 25 bp, Homo sapien
gaagtgcccctgatcatggtcatga

SEQ ID NO: 3454303 - DNA, 25 bp, Homo sapien
tctgtggcctggagcatcgatgata

SEQ ID NO: 3454304 - DNA, 25 bp, Homo sapien
tgggaagtgcccctgatcatggtca

SEQ ID NO: 3454305 - DNA, 25 bp, Homo sapien
tctgcgggttcttgaagatgccggc

SEQ ID NO: 3454306 - DNA, 25 bp, Homo sapien
tgagctgcgtgacgtcccgccagtt

SEQ ID NO: 3454307 - DNA, 25 bp, Homo sapien
ggctcggtggagtcaatttcgttga

SEQ ID NO: 3454308 - DNA, 25 bp, Homo sapien
cgttgaagatcacgatgagctgcgt

SEQ ID NO: 3454309 - DNA, 25 bp, Homo sapien
ttgtagccgatcttcttgatgcagg

SEQ ID NO: 3454310 - DNA, 25 bp, Homo sapien
gccaggcagccagttgtagccgatc

SEQ ID NO: 3454311 - DNA, 25 bp, Homo sapien
tgggctccagcatgctgtcgccgtg

SEQ ID NO: 3454312 - DNA, 25 bp, Homo sapien
tcgccgtgccagctcgagatggact

SEQ ID NO: 3454313 - DNA, 25 bp, Homo sapien
gtgtggtccgctcgcctccaccccg

SEQ ID NO: 3454314 - DNA, 25 bp, Homo sapien
agtccggggtgtggtccgctcgcct

SEQ ID NO: 3454315 - DNA, 25 bp, Homo sapien
ccggggtgtggtccgctcgcctcca

SEQ ID NO: 3454316 - DNA, 25 bp, Homo sapien
gggtgtggtccgctcgcctccaccc

SEQ ID NO: 3454317 - DNA, 25 bp, Homo sapien
ccctgcgcgttgttgggaggatgga

SEQ ID NO: 3454318 - DNA, 25 bp, Homo sapien
agagtcacccccatggcgttcccct

SEQ ID NO: 3454319 - DNA, 25 bp, Homo sapien
gcagcctcaggggattgtcgaccct

SEQ ID NO: 3454320 - DNA, 25 bp, Homo sapien
gattgtcgaccctgcgcgttgttgg

SEQ ID NO: 3454321 - DNA, 25 bp, Homo sapien
gcaaatgtgaccactatcccgaatt

SEQ ID NO: 3454322 - DNA, 25 bp, Homo sapien
aatgtgaccactatcccgaatttga

SEQ ID NO: 3454323 - DNA, 25 bp, Homo sapien
tgtgaccactatcccgaatttgaaa

SEQ ID NO: 3454324 - DNA, 25 bp, Homo sapien
cactatcccgaatttgaaaaagcca

SEQ ID NO: 3454325 - DNA, 25 bp, Homo sapien
caggacctcatggtgcatctccaca

SEQ ID NO: 3454326 - DNA, 25 bp, Homo sapien
agggcttccgccaggacctcatggt

SEQ ID NO: 3454327 - DNA, 25 bp, Homo sapien
ctacattgttaaccacagggcttcc

SEQ ID NO: 3454328 - DNA, 25 bp, Homo sapien
ttgttaaccacagggcttccgccag

SEQ ID NO: 3454329 - DNA, 25 bp, Homo sapien
cctcatcctgcttctttattctcct

SEQ ID NO: 3454330 - DNA, 25 bp, Homo sapien
attctccttctcttcaaaccagagg

SEQ ID NO: 3454331 - DNA, 25 bp, Homo sapien
gaaaggagtcctggttcttccttca

SEQ ID NO: 3454332 - DNA, 25 bp, Homo sapien
tcttcaaaccagaggaaaggagtcc

SEQ ID NO: 3454333 - DNA, 25 bp, Homo sapien
tgtagtcaactctgaatcattaaca

SEQ ID NO: 3454334 - DNA, 25 bp, Homo sapien
gtcaactctgaatcattaacatctg

SEQ ID NO: 3454335 - DNA, 25 bp, Homo sapien
tagtcaactctgaatcattaacatc

SEQ ID NO: 3454336 - DNA, 25 bp, Homo sapien
tgatgtagtcaactctgaatcatta

SEQ ID NO: 3454337 - DNA, 25 bp, Homo sapien
tgccgctctgtccttctgagaatgt

SEQ ID NO: 3454338 - DNA, 25 bp, Homo sapien
cactctgtcccaacaaaggctctgt

SEQ ID NO: 3454339 - DNA, 25 bp, Homo sapien
tgagaatgtgatccactgccttccc

SEQ ID NO: 3454340 - DNA, 25 bp, Homo sapien
tcccaacagggggtcacatgtgagc

SEQ ID NO: 3454341 - DNA, 25 bp, Homo sapien
gatattcccaatgattccaaagaag

SEQ ID NO: 3454342 - DNA, 25 bp, Homo sapien
ggatgtgtcccaaaccagagcaata

SEQ ID NO: 3454343 - DNA, 25 bp, Homo sapien
cagacttcaaacttgggatattccc

SEQ ID NO: 3454344 - DNA, 25 bp, Homo sapien
aatgcaggctttggcatcagttctc

SEQ ID NO: 3454345 - DNA, 25 bp, Homo sapien
ccactgttctaatattgttctgttg

SEQ ID NO: 3454346 - DNA, 25 bp, Homo sapien
caaggcttttaacgtgatgatactg

SEQ ID NO: 3454347 - DNA, 25 bp, Homo sapien
gtttcctcctatttccactgttcta

SEQ ID NO: 3454348 - DNA, 25 bp, Homo sapien
tttaacgtgatgatactgtttcctc

SEQ ID NO: 3454349 - DNA, 25 bp, Homo sapien
tggtgctgctggatatttggcaggt

SEQ ID NO: 3454350 - DNA, 25 bp, Homo sapien
ggcaggtatcctacaattcctgatg

SEQ ID NO: 3454351 - DNA, 25 bp, Homo sapien
caggtatcctacaattcctgatgaa

SEQ ID NO: 3454352 - DNA, 25 bp, Homo sapien
tatttggcaggtatcctacaattcc

SEQ ID NO: 3454353 - DNA, 25 bp, Homo sapien
caggtccctgtacgcattggcatgc

SEQ ID NO: 3454354 - DNA, 25 bp, Homo sapien
tacgcattggcatgcgagagcccat

SEQ ID NO: 3454355 - DNA, 25 bp, Homo sapien
cgccaggtccctgtacgcattggca

SEQ ID NO: 3454356 - DNA, 25 bp, Homo sapien
catgcgagagcccattttactgagt

SEQ ID NO: 3454357 - DNA, 25 bp, Homo sapien
cagatagtacttgaaacctttccca

SEQ ID NO: 3454358 - DNA, 25 bp, Homo sapien
gctcattgtcatgtatcccaacagt

SEQ ID NO: 3454359 - DNA, 25 bp, Homo sapien
tcttgggagatagcagtgattggcc

SEQ ID NO: 3454360 - DNA, 25 bp, Homo sapien
caccttttactccagatagtacttg

SEQ ID NO: 3454361 - DNA, 25 bp, Homo sapien
cgtatcccaagttcaaactcaaatg

SEQ ID NO: 3454362 - DNA, 25 bp, Homo sapien
tggttttctcaacacgtatcccaag

SEQ ID NO: 3454363 - DNA, 25 bp, Homo sapien
cgagtgtcctaggatttaaaaattg

SEQ ID NO: 3454364 - DNA, 25 bp, Homo sapien
aaaattgagcagaactggttttctc

SEQ ID NO: 3454365 - DNA, 25 bp, Homo sapien
ctgcacaccgatgtttacagcaatt

SEQ ID NO: 3454366 - DNA, 25 bp, Homo sapien
aagacctgcacaccgatgtttacag

SEQ ID NO: 3454367 - DNA, 25 bp, Homo sapien
cacaccgatgtttacagcaatttta

SEQ ID NO: 3454368 - DNA, 25 bp, Homo sapien
agaaagacctgcacaccgatgttta

SEQ ID NO: 3454369 - DNA, 25 bp, Homo sapien
aggcagtttggtgatgcactgcaaa

SEQ ID NO: 3454370 - DNA, 25 bp, Homo sapien
atacccttaccatcgcatcgagcaa

SEQ ID NO: 3454371 - DNA, 25 bp, Homo sapien
tgcactgcaaaacaacacataccct

SEQ ID NO: 3454372 - DNA, 25 bp, Homo sapien
cgcatcgagcaattgtattccttag

SEQ ID NO: 3454373 - DNA, 25 bp, Homo sapien
aagctgtgtctaggtagggacgtcc

SEQ ID NO: 3454374 - DNA, 25 bp, Homo sapien
acagcgtccccaagagaagctgtgt

SEQ ID NO: 3454375 - DNA, 25 bp, Homo sapien
gctgcggagcgcgtctagcttctgt

SEQ ID NO: 3454376 - DNA, 25 bp, Homo sapien
cctgagtatatagccacacccgaga

SEQ ID NO: 3454377 - DNA, 25 bp, Homo sapien
gtgctttggccaccgcgcggccccg

SEQ ID NO: 3454378 - DNA, 25 bp, Homo sapien
tgagccgggcgctctcttccctgcc

SEQ ID NO: 3454379 - DNA, 25 bp, Homo sapien
gcgcagtactgagccgggcgctctc

SEQ ID NO: 3454380 - DNA, 25 bp, Homo sapien
gcagggcgcgcgcagtactgagccg

SEQ ID NO: 3454381 - DNA, 25 bp, Homo sapien
cagcagttggcgaaggagccgttct

SEQ ID NO: 3454382 - DNA, 25 bp, Homo sapien
cctcgcagcagttggcgaaggagcc

SEQ ID NO: 3454383 - DNA, 25 bp, Homo sapien
gcccgcctcgcagcagttggcgaag

SEQ ID NO: 3454384 - DNA, 25 bp, Homo sapien
gttggcgaaggagccgttctctgac

SEQ ID NO: 3454385 - DNA, 25 bp, Homo sapien
tggagccacccagggaggtcgaggg

SEQ ID NO: 3454386 - DNA, 25 bp, Homo sapien
ctggagccacccagggaggtcgagg

SEQ ID NO: 3454387 - DNA, 25 bp, Homo sapien
cacggcggtggtgacgatgagcacc

SEQ ID NO: 3454388 - DNA, 25 bp, Homo sapien
tgcgttccggagcttgcggttcctg

SEQ ID NO: 3454389 - DNA, 25 bp, Homo sapien
aggaggttgcccacgacgtccacgg

SEQ ID NO: 3454390 - DNA, 25 bp, Homo sapien
cggttcctgagcacggagaggatca

SEQ ID NO: 3454391 - DNA, 25 bp, Homo sapien
tgaagtggtcatcatgccccatgac

SEQ ID NO: 3454392 - DNA, 25 bp, Homo sapien
catcatgccccatgacctgtgaggg

SEQ ID NO: 3454393 - DNA, 25 bp, Homo sapien
cctgtgagggctagagttcagatac

SEQ ID NO: 3454394 - DNA, 25 bp, Homo sapien
ccccatgacctgtgagggctagagt

SEQ ID NO: 3454395 - DNA, 25 bp, Homo sapien
ggcaagtaaaggatactggtgtctc

SEQ ID NO: 3454396 - DNA, 25 bp, Homo sapien
catcaggagcggcactgttaggaat

SEQ ID NO: 3454397 - DNA, 25 bp, Homo sapien
tgctccatagaggaactgggtttgt

SEQ ID NO: 3454398 - DNA, 25 bp, Homo sapien
tttgtgataggcaagtaaaggatac

SEQ ID NO: 3454399 - DNA, 25 bp, Homo sapien
caatgaggctgtaagttaggtgggc

SEQ ID NO: 3454400 - DNA, 25 bp, Homo sapien
tcagggagtgcagaccctttgggaa

SEQ ID NO: 3454401 - DNA, 25 bp, Homo sapien
ggccgtgggagctgtgctctggagt

SEQ ID NO: 3454402 - DNA, 25 bp, Homo sapien
ccagccgcaaatggccgtgggagct

SEQ ID NO: 3454403 - DNA, 25 bp, Homo sapien
acattgataatccttcaggggagtt

SEQ ID NO: 3454404 - DNA, 25 bp, Homo sapien
aacattgataatccttcaggggagt

SEQ ID NO: 3454405 - DNA, 25 bp, Homo sapien
ccccttcatggtattaataatcaac

SEQ ID NO: 3454406 - DNA, 25 bp, Homo sapien
cccttcatggtattaataatcaaca

SEQ ID NO: 3454407 - DNA, 25 bp, Homo sapien
agagacaaagaacaatagtacagtg

SEQ ID NO: 3454408 - DNA, 25 bp, Homo sapien
aactgaatgaaagtgtctgctctca

SEQ ID NO: 3454409 - DNA, 25 bp, Homo sapien
acaatagtacagtgagggggatgct

SEQ ID NO: 3454410 - DNA, 25 bp, Homo sapien
ctctcagcaggtacacggtccagcg

SEQ ID NO: 3454411 - DNA, 25 bp, Homo sapien
tttaaattgaaagagccagtaggag

SEQ ID NO: 3454412 - DNA, 25 bp, Homo sapien
tttgtggtatatcatatccgaatgc

SEQ ID NO: 3454413 - DNA, 25 bp, Homo sapien
catatccgaatgcagaatccagctt

SEQ ID NO: 3454414 - DNA, 25 bp, Homo sapien
ttaaattgaaagagccagtaggagc

SEQ ID NO: 3454415 - DNA, 25 bp, Homo sapien
ttagattcccaaatctcttgagagc

SEQ ID NO: 3454416 - DNA, 25 bp, Homo sapien
gatgggcatttgaaataattgacca

SEQ ID NO: 3454417 - DNA, 25 bp, Homo sapien
cttaggatgtgtggatgaatcatac

SEQ ID NO: 3454418 - DNA, 25 bp, Homo sapien
ttcaataaccatcaaaagagatcat

SEQ ID NO: 3454419 - DNA, 25 bp, Homo sapien
ttggttagacataaattctccttgg

SEQ ID NO: 3454420 - DNA, 25 bp, Homo sapien
tttggttagacataaattctccttg

SEQ ID NO: 3454421 - DNA, 25 bp, Homo sapien
aatttggttagacataaattctcct

SEQ ID NO: 3454422 - DNA, 25 bp, Homo sapien
ttgcagtagcggcacagagccccag

SEQ ID NO: 3454423 - DNA, 25 bp, Homo sapien
gagaaagggctgtcagcactcctaa

SEQ ID NO: 3454424 - DNA, 25 bp, Homo sapien
ggctgtcagcactcctaagctcaca

SEQ ID NO: 3454425 - DNA, 25 bp, Homo sapien
cagccctgtggggtgagaaagggct

SEQ ID NO: 3454426 - DNA, 25 bp, Homo sapien
tagtgacaaatagcccctcagggat

SEQ ID NO: 3454427 - DNA, 25 bp, Homo sapien
gaatagatgcgtgggtcgtactcca

SEQ ID NO: 3454428 - DNA, 25 bp, Homo sapien
cacaaagaagttgggcagcaaggcc

SEQ ID NO: 3454429 - DNA, 25 bp, Homo sapien
catggttagaaagctccgcaagtcg

SEQ ID NO: 3454430 - DNA, 25 bp, Homo sapien
gaagttttggttcaagagcccatag

SEQ ID NO: 3454431 - DNA, 25 bp, Homo sapien
tgccgtgggttccaaagggccaaga

SEQ ID NO: 3454432 - DNA, 25 bp, Homo sapien
tggctgcccttggaagcatcttgaa

SEQ ID NO: 3454433 - DNA, 25 bp, Homo sapien
tcctcttgtattccctgcggaagtt

SEQ ID NO: 3454434 - DNA, 25 bp, Homo sapien
gagagcatctgcctggtgctgcaca

SEQ ID NO: 3454435 - DNA, 25 bp, Homo sapien
ctagagagcatctgcctggtgctgc

SEQ ID NO: 3454436 - DNA, 25 bp, Homo sapien
tagagagcatctgcctggtgctgca

SEQ ID NO: 3454437 - DNA, 25 bp, Homo sapien
agagcatctgcctggtgctgcacac

SEQ ID NO: 3454438 - DNA, 25 bp, Homo sapien
caccatttcatgagtttgtcatgct

SEQ ID NO: 3454439 - DNA, 25 bp, Homo sapien
ctggtctcacccttgcagcagactc

SEQ ID NO: 3454440 - DNA, 25 bp, Homo sapien
gtctcacccttgcagcagactctct

SEQ ID NO: 3454441 - DNA, 25 bp, Homo sapien
ctcacccttgcagcagactctctcc

SEQ ID NO: 3454442 - DNA, 25 bp, Homo sapien
gaacccatggcgttgatgggctgct

SEQ ID NO: 3454443 - DNA, 25 bp, Homo sapien
ggtcttgtgtgcaccaaatccccaa

SEQ ID NO: 3454444 - DNA, 25 bp, Homo sapien
tctcctggatcagcctgaacccatg

SEQ ID NO: 3454445 - DNA, 25 bp, Homo sapien
ccaccaagagtgttttccaggtcct

SEQ ID NO: 3454446 - DNA, 25 bp, Homo sapien
gttaccaagttccagtcctactgac

SEQ ID NO: 3454447 - DNA, 25 bp, Homo sapien
tgcagttaccaagttccagtcctac

SEQ ID NO: 3454448 - DNA, 25 bp, Homo sapien
tgaggcccttgcagttaccaagttc

SEQ ID NO: 3454449 - DNA, 25 bp, Homo sapien
aagagatcctgccacgctgggggga

SEQ ID NO: 3454450 - DNA, 25 bp, Homo sapien
agacttttcagtcaaggaggtggaa

SEQ ID NO: 3454451 - DNA, 25 bp, Homo sapien
cagggcccacagcatgaggtcattc

SEQ ID NO: 3454452 - DNA, 25 bp, Homo sapien
gaggaagtagccaggtggcacctct

SEQ ID NO: 3454453 - DNA, 25 bp, Homo sapien
gcctgggctttaccattctttttga

SEQ ID NO: 3454454 - DNA, 25 bp, Homo sapien
ggagagagaaccatcaagactgatg

SEQ ID NO: 3454455 - DNA, 25 bp, Homo sapien
tgatgagctcagacctaatgtggag

SEQ ID NO: 3454456 - DNA, 25 bp, Homo sapien
gatattgccttcacgagagttcagg

SEQ ID NO: 3454457 - DNA, 25 bp, Homo sapien
gagtgtgtgcaaccatggctagtct

SEQ ID NO: 3454458 - DNA, 25 bp, Homo sapien
tttcatatccaatcataaggtggct

SEQ ID NO: 3454459 - DNA, 25 bp, Homo sapien
tctcattctttcgtggtgccattta

SEQ ID NO: 3454460 - DNA, 25 bp, Homo sapien
catactgtcgttctgtaccttctgc

SEQ ID NO: 3454461 - DNA, 25 bp, Homo sapien
ccatttattctggtgcaggactgca

SEQ ID NO: 3454462 - DNA, 25 bp, Homo sapien
tgaggcttatcttccacagctccac

SEQ ID NO: 3454463 - DNA, 25 bp, Homo sapien
ctccaaccgtttgaggcttatcttc

SEQ ID NO: 3454464 - DNA, 25 bp, Homo sapien
aaccgtttgaggcttatcttccaca

SEQ ID NO: 3454465 - DNA, 25 bp, Homo sapien
ccgtttgaggcttatcttccacagc

SEQ ID NO: 3454466 - DNA, 25 bp, Homo sapien
cccatcattactcttggctacttca

SEQ ID NO: 3454467 - DNA, 25 bp, Homo sapien
atcattactcttggctacttcagcc

SEQ ID NO: 3454468 - DNA, 25 bp, Homo sapien
cttccccatagctcctgtgtggtcc

SEQ ID NO: 3454469 - DNA, 25 bp, Homo sapien
tccccatcattactcttggctactt

SEQ ID NO: 3454470 - DNA, 25 bp, Homo sapien
tttaccgctatcaacctatgatcag

SEQ ID NO: 3454471 - DNA, 25 bp, Homo sapien
caacctatgatcagtatactttgaa

SEQ ID NO: 3454472 - DNA, 25 bp, Homo sapien
caattttatcctttaccgctatcaa

SEQ ID NO: 3454473 - DNA, 25 bp, Homo sapien
cttttcatgtacactcccaatttta

SEQ ID NO: 3454474 - DNA, 25 bp, Homo sapien
agggagaaacagtgtaggccacttt

SEQ ID NO: 3454475 - DNA, 25 bp, Homo sapien
gagggagaaacagtgtaggccactt

SEQ ID NO: 3454476 - DNA, 25 bp, Homo sapien
aaagctaatctctgtggtggtgttt

SEQ ID NO: 3454477 - DNA, 25 bp, Homo sapien
tgaaagctaatctctgtggtggtgt

SEQ ID NO: 3454478 - DNA, 25 bp, Homo sapien
aagctaatctctgtggtggtgtttt

SEQ ID NO: 3454479 - DNA, 25 bp, Homo sapien
gaaagctaatctctgtggtggtgtt

SEQ ID NO: 3454480 - DNA, 25 bp, Homo sapien
agtgaatacaatttggcctttccaa

SEQ ID NO: 3454481 - DNA, 25 bp, Homo sapien
agtgtctgcagaattaccattatta

SEQ ID NO: 3454482 - DNA, 25 bp, Homo sapien
tcagtgtctgcagaattaccattat

SEQ ID NO: 3454483 - DNA, 25 bp, Homo sapien
gtgaatacaatttggcctttccaag

SEQ ID NO: 3454484 - DNA, 25 bp, Homo sapien
ttggtgaacataatcaccaaaagct

SEQ ID NO: 3454485 - DNA, 25 bp, Homo sapien
tatcagccacttgcagactacattt

SEQ ID NO: 3454486 - DNA, 25 bp, Homo sapien
ctctgtgggaatgtctttaaaacgc

SEQ ID NO: 3454487 - DNA, 25 bp, Homo sapien
gttatcagccacttgcagactacat

SEQ ID NO: 3454488 - DNA, 25 bp, Homo sapien
cagatcaagtttggtgctcccagaa

SEQ ID NO: 3454489 - DNA, 25 bp, Homo sapien
ctgcagatgcagatcaagtttggtg

SEQ ID NO: 3454490 - DNA, 25 bp, Homo sapien
tagtatgggcaggtggtatacactg

SEQ ID NO: 3454491 - DNA, 25 bp, Homo sapien
ttggtgctcccagaatgtagtatgg

SEQ ID NO: 3454492 - DNA, 25 bp, Homo sapien
tatggctgcatcttgttcagtagca

SEQ ID NO: 3454493 - DNA, 25 bp, Homo sapien
tcttgttcagtagcagtcttgggtt

SEQ ID NO: 3454494 - DNA, 25 bp, Homo sapien
ggttgtatggctgcatcttgttcag

SEQ ID NO: 3454495 - DNA, 25 bp, Homo sapien
cagccatttggttgtatggctgcat

SEQ ID NO: 3454496 - DNA, 25 bp, Homo sapien
cacagacaccaagagagtgggaaga

SEQ ID NO: 3454497 - DNA, 25 bp, Homo sapien
aatgagagttcgtgtgagcctagga

SEQ ID NO: 3454498 - DNA, 25 bp, Homo sapien
gataagaagttgtgctcagttggga

SEQ ID NO: 3454499 - DNA, 25 bp, Homo sapien
ctgctagatgggcagaaagcggact

SEQ ID NO: 3454500 - DNA, 25 bp, Homo sapien
gcaaggcagcagttgattaggcaca

SEQ ID NO: 3454501 - DNA, 25 bp, Homo sapien
ggctgaatgcaaggcagcagttgat

SEQ ID NO: 3454502 - DNA, 25 bp, Homo sapien
gcagcagttgattaggcacaaggtc

SEQ ID NO: 3454503 - DNA, 25 bp, Homo sapien
aatgcaaggcagcagttgattaggc

SEQ ID NO: 3454504 - DNA, 25 bp, Homo sapien
acacacactggcctgcgcccactgt

SEQ ID NO: 3454505 - DNA, 25 bp, Homo sapien
tcttaagccggtctgaaaagcgcaa

SEQ ID NO: 3454506 - DNA, 25 bp, Homo sapien
cgcgcacggtgcgcacacacactgg

SEQ ID NO: 3454507 - DNA, 25 bp, Homo sapien
gattttccaggtgcgaccgtcaccc

SEQ ID NO: 3454508 - DNA, 25 bp, Homo sapien
tgaattcaacatgcttaacatctgg

SEQ ID NO: 3454509 - DNA, 25 bp, Homo sapien
tatctcagtaagaaataccttaacc

SEQ ID NO: 3454510 - DNA, 25 bp, Homo sapien
aatcataactctttaccagtagtgg

SEQ ID NO: 3454511 - DNA, 25 bp, Homo sapien
tggtaaacctatgaaaaatccttgc

SEQ ID NO: 3454512 - DNA, 25 bp, Homo sapien
tagatagcacacctattccttaata

SEQ ID NO: 3454513 - DNA, 25 bp, Homo sapien
tttctccactcataaatagatagca

SEQ ID NO: 3454514 - DNA, 25 bp, Homo sapien
ttttccagagctgcccaatttagta

SEQ ID NO: 3454515 - DNA, 25 bp, Homo sapien
aattacagcaaaacattgggcgaaa

SEQ ID NO: 3454516 - DNA, 25 bp, Homo sapien
atgctgcagccccattcggaatctc

SEQ ID NO: 3454517 - DNA, 25 bp, Homo sapien
ttttcccaatgatgctttaaggaag

SEQ ID NO: 3454518 - DNA, 25 bp, Homo sapien
ttttttcccaatgatgctttaagga

SEQ ID NO: 3454519 - DNA, 25 bp, Homo sapien
tcaaatgctgcagccccattcggaa

SEQ ID NO: 3454520 - DNA, 25 bp, Homo sapien
cgaggcgcgaggagctaggtcggtg

SEQ ID NO: 3454521 - DNA, 25 bp, Homo sapien
ccgcgagagatggaagcggcggcga

SEQ ID NO: 3454522 - DNA, 25 bp, Homo sapien
ctggagacccgcgagagatggaagc

SEQ ID NO: 3454523 - DNA, 25 bp, Homo sapien
ggtgttgtgcgtgggcagggagccg

SEQ ID NO: 3454524 - DNA, 25 bp, Homo sapien
gcctgggcctgacgccggccacgca

SEQ ID NO: 3454525 - DNA, 25 bp, Homo sapien
ccctcgccggcggtgcccgccgagc

SEQ ID NO: 3454526 - DNA, 25 bp, Homo sapien
cgcagcggcgggagagtgagcactc

SEQ ID NO: 3454527 - DNA, 25 bp, Homo sapien
aacccggcctcgcagcagtcctcgg

SEQ ID NO: 3454528 - DNA, 25 bp, Homo sapien
cagcaccacggtcaacgtcaaatat

SEQ ID NO: 3454529 - DNA, 25 bp, Homo sapien
ttctttcagcaccacggtcaacgtc

SEQ ID NO: 3454530 - DNA, 25 bp, Homo sapien
ctttcagcaccacggtcaacgtcaa

SEQ ID NO: 3454531 - DNA, 25 bp, Homo sapien
ttcagcaccacggtcaacgtcaaat

SEQ ID NO: 3454532 - DNA, 25 bp, Homo sapien
cacaggttagggaacattgctctag

SEQ ID NO: 3454533 - DNA, 25 bp, Homo sapien
tgctctagctatgttccagaataga

SEQ ID NO: 3454534 - DNA, 25 bp, Homo sapien
ggcaaactgtcattatcactagtta

SEQ ID NO: 3454535 - DNA, 25 bp, Homo sapien
cctgctgatctttaaccaggtgatc

SEQ ID NO: 3454536 - DNA, 25 bp, Homo sapien
cttccttagaactgatacaccctct

SEQ ID NO: 3454537 - DNA, 25 bp, Homo sapien
ccttccttagaactgatacaccctc

SEQ ID NO: 3454538 - DNA, 25 bp, Homo sapien
gttggtattctcaccgtcctccaat

SEQ ID NO: 3454539 - DNA, 25 bp, Homo sapien
tcgaggctcactgagcgaggaatgt

SEQ ID NO: 3454540 - DNA, 25 bp, Homo sapien
cttcgaggctcactgagcgaggaat

SEQ ID NO: 3454541 - DNA, 25 bp, Homo sapien
gaggctcactgagcgaggaatgtct

SEQ ID NO: 3454542 - DNA, 25 bp, Homo sapien
cctcagctattaaagcacagatcac

SEQ ID NO: 3454543 - DNA, 25 bp, Homo sapien
gctattaaagcacagatcacctcca

SEQ ID NO: 3454544 - DNA, 25 bp, Homo sapien
taaagcacagatcacctccacgctg

SEQ ID NO: 3454545 - DNA, 25 bp, Homo sapien
caggcaaactgggacctcagctatt

SEQ ID NO: 3454546 - DNA, 25 bp, Homo sapien
cccgaaaggagtgaatgccttgctt

SEQ ID NO: 3454547 - DNA, 25 bp, Homo sapien
gtgctagcccccgaaaggagtgaat

SEQ ID NO: 3454548 - DNA, 25 bp, Homo sapien
ttctccctggggtctagtgctagcc

SEQ ID NO: 3454549 - DNA, 25 bp, Homo sapien
ggtctagtgctagcccccgaaagga

SEQ ID NO: 3454550 - DNA, 25 bp, Homo sapien
cttgcaaactggttcctacaagttc

SEQ ID NO: 3454551 - DNA, 25 bp, Homo sapien
cacactccagtggaacttgcttctt

SEQ ID NO: 3454552 - DNA, 25 bp, Homo sapien
tgcaaactggttcctacaagttcca

SEQ ID NO: 3454553 - DNA, 25 bp, Homo sapien
caaactggttcctacaagttccaca

SEQ ID NO: 3454554 - DNA, 25 bp, Homo sapien
gattttgtagcctgttgatttcact

SEQ ID NO: 3454555 - DNA, 25 bp, Homo sapien
tctctaaagagtttttgtgtatctc

SEQ ID NO: 3454556 - DNA, 25 bp, Homo sapien
actgtttctccttgtgcaagcatct

SEQ ID NO: 3454557 - DNA, 25 bp, Homo sapien
cttttgcaagcccacaggccagttt

SEQ ID NO: 3454558 - DNA, 25 bp, Homo sapien
agaagtaaagctttgaaatctccgg

SEQ ID NO: 3454559 - DNA, 25 bp, Homo sapien
gtaaagctttgaaatctccggtgcc

SEQ ID NO: 3454560 - DNA, 25 bp, Homo sapien
aatctccggtgcctgctcacagtca

SEQ ID NO: 3454561 - DNA, 25 bp, Homo sapien
gctttgaaatctccggtgcctgctc

SEQ ID NO: 3454562 - DNA, 25 bp, Homo sapien
tctccagggagctttaaatgctggt

SEQ ID NO: 3454563 - DNA, 25 bp, Homo sapien
cacaggagggaaatgctttagctga

SEQ ID NO: 3454564 - DNA, 25 bp, Homo sapien
ttagtgaccctacttctctccaggg

SEQ ID NO: 3454565 - DNA, 25 bp, Homo sapien
ccctctttagtgaccctacttctct

SEQ ID NO: 3454566 - DNA, 25 bp, Homo sapien
ctcttgtgcgcttgctctcccctct

SEQ ID NO: 3454567 - DNA, 25 bp, Homo sapien
tcttgtgcgcttgctctcccctctc

SEQ ID NO: 3454568 - DNA, 25 bp, Homo sapien
tcccctctcttatctttgctttctt

SEQ ID NO: 3454569 - DNA, 25 bp, Homo sapien
ttatctttgctttcttctacgttag

SEQ ID NO: 3454570 - DNA, 25 bp, Homo sapien
agtaacatctctctcgatatcagtg

SEQ ID NO: 3454571 - DNA, 25 bp, Homo sapien
cagtgcagcacaggaggtaagagaa

SEQ ID NO: 3454572 - DNA, 25 bp, Homo sapien
gcattggacattgctctggttctca

SEQ ID NO: 3454573 - DNA, 25 bp, Homo sapien
taatcttttgcagacaagcatcagg

SEQ ID NO: 3454574 - DNA, 25 bp, Homo sapien
ttgccaatgctactgtccacaccag

SEQ ID NO: 3454575 - DNA, 25 bp, Homo sapien
tttgccaatgctactgtccacacca

SEQ ID NO: 3454576 - DNA, 25 bp, Homo sapien
tctttgccaatgctactgtccacac

SEQ ID NO: 3454577 - DNA, 25 bp, Homo sapien
tgccaatgctactgtccacaccagc

SEQ ID NO: 3454578 - DNA, 25 bp, Homo sapien
ggtgaatcagttcaaagtcatgtac

SEQ ID NO: 3454579 - DNA, 25 bp, Homo sapien
gtccctaaggtgaatcagttcaaag

SEQ ID NO: 3454580 - DNA, 25 bp, Homo sapien
ccctaaggtgaatcagttcaaagtc

SEQ ID NO: 3454581 - DNA, 25 bp, Homo sapien
taaggtgaatcagttcaaagtcatg

SEQ ID NO: 3454582 - DNA, 25 bp, Homo sapien
attttccctgtaagttttgcactga

SEQ ID NO: 3454583 - DNA, 25 bp, Homo sapien
tgatactcctctgttgatgctctga

SEQ ID NO: 3454584 - DNA, 25 bp, Homo sapien
agctctggaataaattggtcacata

SEQ ID NO: 3454585 - DNA, 25 bp, Homo sapien
gtctcctctcttgtactctccatgt

SEQ ID NO: 3454586 - DNA, 25 bp, Homo sapien
tgtaccctttatattgcctggagag

SEQ ID NO: 3454587 - DNA, 25 bp, Homo sapien
tttgtaccctttatattgcctggag

SEQ ID NO: 3454588 - DNA, 25 bp, Homo sapien
accctttatattgcctggagagtgg

SEQ ID NO: 3454589 - DNA, 25 bp, Homo sapien
taccctttatattgcctggagagtg

SEQ ID NO: 3454590 - DNA, 25 bp, Homo sapien
aaataaggacaatgattttccattc

SEQ ID NO: 3454591 - DNA, 25 bp, Homo sapien
ggatctggcagccacttgcacagac

SEQ ID NO: 3454592 - DNA, 25 bp, Homo sapien
cactcagagaactggcatgtcttcg

SEQ ID NO: 3454593 - DNA, 25 bp, Homo sapien
ggggtgtatcattttagaagtcaca

SEQ ID NO: 3454594 - DNA, 25 bp, Homo sapien
tactattataagttatccccagaca

SEQ ID NO: 3454595 - DNA, 25 bp, Homo sapien
taactgggaaagtctgtgatgggac

SEQ ID NO: 3454596 - DNA, 25 bp, Homo sapien
gtcatgtttaacctgcaaaatgagc

SEQ ID NO: 3454597 - DNA, 25 bp, Homo sapien
gaaaaagtctcaaagggcatatggc

SEQ ID NO: 3454598 - DNA, 25 bp, Homo sapien
ctatgaaagcacagctttttcaaag

SEQ ID NO: 3454599 - DNA, 25 bp, Homo sapien
tcaaagggttccatgagaatttctg

SEQ ID NO: 3454600 - DNA, 25 bp, Homo sapien
tgagaatttctgttccagtcacatc

SEQ ID NO: 3454601 - DNA, 25 bp, Homo sapien
tgaaagcacagctttttcaaagggt

SEQ ID NO: 3454602 - DNA, 25 bp, Homo sapien
actacctgggtatccctttgcccag

SEQ ID NO: 3454603 - DNA, 25 bp, Homo sapien
gataacgcctatctacagtagtgaa

SEQ ID NO: 3454604 - DNA, 25 bp, Homo sapien
tcccacacagggactggataacgcc

SEQ ID NO: 3454605 - DNA, 25 bp, Homo sapien
cagtcacatgacctaatcaaagcat

SEQ ID NO: 3454606 - DNA, 25 bp, Homo sapien
gctaagaagacagacttgttgccag

SEQ ID NO: 3454607 - DNA, 25 bp, Homo sapien
tcaatccgtttactttgctaagaag

SEQ ID NO: 3454608 - DNA, 25 bp, Homo sapien
tagtcactataccagttcaagagaa

SEQ ID NO: 3454609 - DNA, 25 bp, Homo sapien
tcattacatagagcattgaatgcac

SEQ ID NO: 3454610 - DNA, 25 bp, Homo sapien
ctctgggctgcgataggcattagac

SEQ ID NO: 3454611 - DNA, 25 bp, Homo sapien
cctgctctgggctgcgataggcatt

SEQ ID NO: 3454612 - DNA, 25 bp, Homo sapien
ctgggctgcgataggcattagacgt

SEQ ID NO: 3454613 - DNA, 25 bp, Homo sapien
gctctgggctgcgataggcattaga

SEQ ID NO: 3454614 - DNA, 25 bp, Homo sapien
gatgaattgtatacggtcacctggg

SEQ ID NO: 3454615 - DNA, 25 bp, Homo sapien
catgaagagagtgactgtgttatct

SEQ ID NO: 3454616 - DNA, 25 bp, Homo sapien
taacaggtgtttcatagctctcatg

SEQ ID NO: 3454617 - DNA, 25 bp, Homo sapien
tcacctgggatatcagttctaacag

SEQ ID NO: 3454618 - DNA, 25 bp, Homo sapien
caagcgcgatgggtccttaaaacac

SEQ ID NO: 3454619 - DNA, 25 bp, Homo sapien
ccagtcaggcgaacggacagtgttg

SEQ ID NO: 3454620 - DNA, 25 bp, Homo sapien
ccttaaaacactgccagtcaggcga

SEQ ID NO: 3454621 - DNA, 25 bp, Homo sapien
tgactttcccgtcaagcgcgatggg

SEQ ID NO: 3454622 - DNA, 25 bp, Homo sapien
ttatctccgttcaccctagcgtctt

SEQ ID NO: 3454623 - DNA, 25 bp, Homo sapien
cctggttcctgtggtgataacagca

SEQ ID NO: 3454624 - DNA, 25 bp, Homo sapien
actgcttttatctccgttcacccta

SEQ ID NO: 3454625 - DNA, 25 bp, Homo sapien
ggatttcaccgctcagcccctggtt

SEQ ID NO: 3454626 - DNA, 25 bp, Homo sapien
ggcgcaggaccgcgtatgtcacctc

SEQ ID NO: 3454627 - DNA, 25 bp, Homo sapien
gcaggaccgcgtatgtcacctcccg

SEQ ID NO: 3454628 - DNA, 25 bp, Homo sapien
aggcgagggcgcaggaccgcgtatg

SEQ ID NO: 3454629 - DNA, 25 bp, Homo sapien
gagggcgcaggaccgcgtatgtcac

SEQ ID NO: 3454630 - DNA, 25 bp, Homo sapien
ggttctccatgtcaagaaactgcta

SEQ ID NO: 3454631 - DNA, 25 bp, Homo sapien
tctccatgtcaagaaactgctacat

SEQ ID NO: 3454632 - DNA, 25 bp, Homo sapien
ttggttctccatgtcaagaaactgc

SEQ ID NO: 3454633 - DNA, 25 bp, Homo sapien
ggcttggttctccatgtcaagaaac

SEQ ID NO: 3454634 - DNA, 25 bp, Homo sapien
caagaacctggtaagtaaagttatg

SEQ ID NO: 3454635 - DNA, 25 bp, Homo sapien
agaacctggtaagtaaagttatgat

SEQ ID NO: 3454636 - DNA, 25 bp, Homo sapien
gtgtttaactcatcaagaacctggt

SEQ ID NO: 3454637 - DNA, 25 bp, Homo sapien
ctgtgtttaactcatcaagaacctg

SEQ ID NO: 3454638 - DNA, 25 bp, Homo sapien
tgaggcttctaatgtatttgtgtgg

SEQ ID NO: 3454639 - DNA, 25 bp, Homo sapien
gcaagttatttcagcatccatttca

SEQ ID NO: 3454640 - DNA, 25 bp, Homo sapien
catacaaacgtccagattagaaaag

SEQ ID NO: 3454641 - DNA, 25 bp, Homo sapien
tccatttcaatgatggtagtgaggc

SEQ ID NO: 3454642 - DNA, 25 bp, Homo sapien
gtcactcagactggataagcaggta

SEQ ID NO: 3454643 - DNA, 25 bp, Homo sapien
cagactggataagcaggtagttatt

SEQ ID NO: 3454644 - DNA, 25 bp, Homo sapien
cactcagactggataagcaggtagt

SEQ ID NO: 3454645 - DNA, 25 bp, Homo sapien
ggataagcaggtagttattgaggtc

SEQ ID NO: 3454646 - DNA, 25 bp, Homo sapien
aagacagattggtaagtgctctcac

SEQ ID NO: 3454647 - DNA, 25 bp, Homo sapien
tgcttagtataacagctaggactat

SEQ ID NO: 3454648 - DNA, 25 bp, Homo sapien
tgttaagacagattggtaagtgctc

SEQ ID NO: 3454649 - DNA, 25 bp, Homo sapien
tcaaacaaaatgcttagtataacag

SEQ ID NO: 3454650 - DNA, 25 bp, Homo sapien
tgaagctcagcctcacaaggagaag

SEQ ID NO: 3454651 - DNA, 25 bp, Homo sapien
aagctcagcctcacaaggagaagtt

SEQ ID NO: 3454652 - DNA, 25 bp, Homo sapien
gaagctcagcctcacaaggagaagt

SEQ ID NO: 3454653 - DNA, 25 bp, Homo sapien
ctgaagctcagcctcacaaggagaa

SEQ ID NO: 3454654 - DNA, 25 bp, Homo sapien
ccaatccattttcttgttgcttacc

SEQ ID NO: 3454655 - DNA, 25 bp, Homo sapien
aatccattttcttgttgcttaccat

SEQ ID NO: 3454656 - DNA, 25 bp, Homo sapien
ctttctttcccaatccattttcttg

SEQ ID NO: 3454657 - DNA, 25 bp, Homo sapien
tcccaatccattttcttgttgctta

SEQ ID NO: 3454658 - DNA, 25 bp, Homo sapien
ccaaacaagtttgtgcatttgccaa

SEQ ID NO: 3454659 - DNA, 25 bp, Homo sapien
catttgccaattcttgatcccgaag

SEQ ID NO: 3454660 - DNA, 25 bp, Homo sapien
gatctaatcgtgtctccaaagcccg

SEQ ID NO: 3454661 - DNA, 25 bp, Homo sapien
tcttgatcccgaagatctaatcgtg

SEQ ID NO: 3454662 - DNA, 25 bp, Homo sapien
gactgtccaatttctgtcgaagtaa

SEQ ID NO: 3454663 - DNA, 25 bp, Homo sapien
ttccagactgtccaatttctgtcga

SEQ ID NO: 3454664 - DNA, 25 bp, Homo sapien
tccaatttctgtcgaagtaacccta

SEQ ID NO: 3454665 - DNA, 25 bp, Homo sapien
tgtccaatttctgtcgaagtaaccc

SEQ ID NO: 3454666 - DNA, 25 bp, Homo sapien
gttgtccttcataattctgagtcat

SEQ ID NO: 3454667 - DNA, 25 bp, Homo sapien
tgtagttgtccttcataattctgag

SEQ ID NO: 3454668 - DNA, 25 bp, Homo sapien
tttgtagttgtccttcataattctg

SEQ ID NO: 3454669 - DNA, 25 bp, Homo sapien
tagttgtccttcataattctgagtc

SEQ ID NO: 3454670 - DNA, 25 bp, Homo sapien
taaagttaacacaactctacaggta

SEQ ID NO: 3454671 - DNA, 25 bp, Homo sapien
cagggaaagacatgaccaagcttat

SEQ ID NO: 3454672 - DNA, 25 bp, Homo sapien
tagcaagacaacaatctagtaagag

SEQ ID NO: 3454673 - DNA, 25 bp, Homo sapien
tctactactgtgctaacagaggcac

SEQ ID NO: 3454674 - DNA, 25 bp, Homo sapien
taaggaaagtctattgcatttcccc

SEQ ID NO: 3454675 - DNA, 25 bp, Homo sapien
ggtgtttgacatctttccagttcaa

SEQ ID NO: 3454676 - DNA, 25 bp, Homo sapien
tattgatatgtcaaggcttaagccc

SEQ ID NO: 3454677 - DNA, 25 bp, Homo sapien
tccagttcaagtgtagaaatcttac

SEQ ID NO: 3454678 - DNA, 25 bp, Homo sapien
gctcagttcaaagggtatttcttct

SEQ ID NO: 3454679 - DNA, 25 bp, Homo sapien
ctcagttcaaagggtatttcttctt

SEQ ID NO: 3454680 - DNA, 25 bp, Homo sapien
tgctcagttcaaagggtatttcttc

SEQ ID NO: 3454681 - DNA, 25 bp, Homo sapien
ttgctcagttcaaagggtatttctt

SEQ ID NO: 3454682 - DNA, 25 bp, Homo sapien
tatccaatagtatggaaccatgcag

SEQ ID NO: 3454683 - DNA, 25 bp, Homo sapien
gagttgtcacgataggcttcagagg

SEQ ID NO: 3454684 - DNA, 25 bp, Homo sapien
gcagggacctagagagcttcataag

SEQ ID NO: 3454685 - DNA, 25 bp, Homo sapien
tagatttgcctggacctccaacagt

SEQ ID NO: 3454686 - DNA, 25 bp, Homo sapien
cagatgagtctgatataatatctct

SEQ ID NO: 3454687 - DNA, 25 bp, Homo sapien
tttgttgagcatctaaagaaatcag

SEQ ID NO: 3454688 - DNA, 25 bp, Homo sapien
gcttgtcccattctcttgactttgc

SEQ ID NO: 3454689 - DNA, 25 bp, Homo sapien
gaaactgattacacttctcagataa

SEQ ID NO: 3454690 - DNA, 25 bp, Homo sapien
gagctgctgtcttctaagcactgtt

SEQ ID NO: 3454691 - DNA, 25 bp, Homo sapien
cattgatttcacaattgggatctgg

SEQ ID NO: 3454692 - DNA, 25 bp, Homo sapien
tagttgagtttggtaactttgtgcc

SEQ ID NO: 3454693 - DNA, 25 bp, Homo sapien
tctgggtcacatatcaaacgaggaa

SEQ ID NO: 3454694 - DNA, 25 bp, Homo sapien
tatgctaggtagacgagggaataga

SEQ ID NO: 3454695 - DNA, 25 bp, Homo sapien
catgtatgctaggtagacgagggaa

SEQ ID NO: 3454696 - DNA, 25 bp, Homo sapien
tgtatgctaggtagacgagggaata

SEQ ID NO: 3454697 - DNA, 25 bp, Homo sapien
ctaggtagacgagggaatagagtgg

SEQ ID NO: 3454698 - DNA, 25 bp, Homo sapien
ttttaacaagattctccattctact

SEQ ID NO: 3454699 - DNA, 25 bp, Homo sapien
tttaacaagattctccattctactt

SEQ ID NO: 3454700 - DNA, 25 bp, Homo sapien
cttttaacaagattctccattctac

SEQ ID NO: 3454701 - DNA, 25 bp, Homo sapien
tcttttaacaagattctccattcta

SEQ ID NO: 3454702 - DNA, 25 bp, Homo sapien
gtgtacaatccagcagttttcaatt

SEQ ID NO: 3454703 - DNA, 25 bp, Homo sapien
aagtgtacaatccagcagttttcaa

SEQ ID NO: 3454704 - DNA, 25 bp, Homo sapien
aaagtgtacaatccagcagttttca

SEQ ID NO: 3454705 - DNA, 25 bp, Homo sapien
taaagtgtacaatccagcagttttc

SEQ ID NO: 3454706 - DNA, 25 bp, Homo sapien
aaacatcaaaaaatttcatgctcat

SEQ ID NO: 3454707 - DNA, 25 bp, Homo sapien
taaaaacatcaaaaaatttcatgct

SEQ ID NO: 3454708 - DNA, 25 bp, Homo sapien
ataaaaacatcaaaaaatttcatgc

SEQ ID NO: 3454709 - DNA, 25 bp, Homo sapien
tgaataaaaacatcaaaaaatttca

SEQ ID NO: 3454710 - DNA, 25 bp, Homo sapien
actttttacctctgagagacctgct

SEQ ID NO: 3454711 - DNA, 25 bp, Homo sapien
aattgcaatcgttccatttctataa

SEQ ID NO: 3454712 - DNA, 25 bp, Homo sapien
taattctctgtgtaattgcaatcgt

SEQ ID NO: 3454713 - DNA, 25 bp, Homo sapien
gagatcatcacgtgactgtaactca

SEQ ID NO: 3454714 - DNA, 25 bp, Homo sapien
tttcatgatttggttgatcttgcat

SEQ ID NO: 3454715 - DNA, 25 bp, Homo sapien
tctttaatagaaggcaaataagatg

SEQ ID NO: 3454716 - DNA, 25 bp, Homo sapien
tcatgatttggttgatcttgcatca

SEQ ID NO: 3454717 - DNA, 25 bp, Homo sapien
tctggttctttaatagaaggcaaat

SEQ ID NO: 3454718 - DNA, 25 bp, Homo sapien
aatgacttttggtttattgaaaatg

SEQ ID NO: 3454719 - DNA, 25 bp, Homo sapien
gctcagagttatggtactcttccac

SEQ ID NO: 3454720 - DNA, 25 bp, Homo sapien
ctgctcagagttatggtactcttcc

SEQ ID NO: 3454721 - DNA, 25 bp, Homo sapien
tgctcagagttatggtactcttcca

SEQ ID NO: 3454722 - DNA, 25 bp, Homo sapien
tctgttaggtcagagatttcattcc

SEQ ID NO: 3454723 - DNA, 25 bp, Homo sapien
ttgtgacagttgctatagtgatctc

SEQ ID NO: 3454724 - DNA, 25 bp, Homo sapien
taggtcagagatttcattcctcatt

SEQ ID NO: 3454725 - DNA, 25 bp, Homo sapien
tgctatagtgatctccttctgatga

SEQ ID NO: 3454726 - DNA, 25 bp, Homo sapien
catgtattctccggggtctaaatct

SEQ ID NO: 3454727 - DNA, 25 bp, Homo sapien
tgtattctccggggtctaaatctcc

SEQ ID NO: 3454728 - DNA, 25 bp, Homo sapien
atgtattctccggggtctaaatctc

SEQ ID NO: 3454729 - DNA, 25 bp, Homo sapien
atgtgtgttttcagttctgacagct

SEQ ID NO: 3454730 - DNA, 25 bp, Homo sapien
caatttattgaatgatgtcagcata

SEQ ID NO: 3454731 - DNA, 25 bp, Homo sapien
gttcaatttattgaatgatgtcagc

SEQ ID NO: 3454732 - DNA, 25 bp, Homo sapien
ttattgaatgatgtcagcatattac

SEQ ID NO: 3454733 - DNA, 25 bp, Homo sapien
tttattgaatgatgtcagcatatta

SEQ ID NO: 3454734 - DNA, 25 bp, Homo sapien
gaacacttactttatgcctgagatg

SEQ ID NO: 3454735 - DNA, 25 bp, Homo sapien
gatgtaggatttcaaaggcaacagc

SEQ ID NO: 3454736 - DNA, 25 bp, Homo sapien
tgtgtaaacctatagagccattggt

SEQ ID NO: 3454737 - DNA, 25 bp, Homo sapien
gaatcaggccacataggatgtagga

SEQ ID NO: 3454738 - DNA, 25 bp, Homo sapien
tgtatgagggttccccttcgtccaa

SEQ ID NO: 3454739 - DNA, 25 bp, Homo sapien
ttaactggaatgtgatgatatctga

SEQ ID NO: 3454740 - DNA, 25 bp, Homo sapien
cattcgtccactgataagcacttaa

SEQ ID NO: 3454741 - DNA, 25 bp, Homo sapien
ttcttaatccattcgtccactgata

SEQ ID NO: 3454742 - DNA, 25 bp, Homo sapien
gcttctaaagctactgaccaaggtg

SEQ ID NO: 3454743 - DNA, 25 bp, Homo sapien
aaggccattgaaggtatttctctgc

SEQ ID NO: 3454744 - DNA, 25 bp, Homo sapien
aaaataaccatatgggcagacctgg

SEQ ID NO: 3454745 - DNA, 25 bp, Homo sapien
aacttttccacaaatcaatacaggg

SEQ ID NO: 3454746 - DNA, 25 bp, Homo sapien
gagtgggatcactgggttaaattgt

SEQ ID NO: 3454747 - DNA, 25 bp, Homo sapien
tattaaggagcctgtgttactacac

SEQ ID NO: 3454748 - DNA, 25 bp, Homo sapien
tagctagagtccaaggagtgggatc

SEQ ID NO: 3454749 - DNA, 25 bp, Homo sapien
taggtgtactaatcctaagttactg

SEQ ID NO: 3454750 - DNA, 25 bp, Homo sapien
ccaggttgattttccattgacatga

SEQ ID NO: 3454751 - DNA, 25 bp, Homo sapien
agatgtatgccttgactgttccctg

SEQ ID NO: 3454752 - DNA, 25 bp, Homo sapien
tcttcataggtgttttgattagtcc

SEQ ID NO: 3454753 - DNA, 25 bp, Homo sapien
tttggctttgataggcatatcttcc

SEQ ID NO: 3454754 - DNA, 25 bp, Homo sapien
cctgcatggggctacaatatatcct

SEQ ID NO: 3454755 - DNA, 25 bp, Homo sapien
gcaccccaccatgatgctttttagg

SEQ ID NO: 3454756 - DNA, 25 bp, Homo sapien
ttttagggatggcagtcagtcctcc

SEQ ID NO: 3454757 - DNA, 25 bp, Homo sapien
atttggtacttttgaatggttactg

SEQ ID NO: 3454758 - DNA, 25 bp, Homo sapien
taaactccctattccatgaactgct

SEQ ID NO: 3454759 - DNA, 25 bp, Homo sapien
aactccctattccatgaactgctca

SEQ ID NO: 3454760 - DNA, 25 bp, Homo sapien
ttccaacactccactaaactcccta

SEQ ID NO: 3454761 - DNA, 25 bp, Homo sapien
cactaaactccctattccatgaact

SEQ ID NO: 3454762 - DNA, 25 bp, Homo sapien
catcactaaccaaaggacttgtcat

SEQ ID NO: 3454763 - DNA, 25 bp, Homo sapien
tgaaatgtcgaaggtggcaagggag

SEQ ID NO: 3454764 - DNA, 25 bp, Homo sapien
tgtttggctcacagtcatgactaag

SEQ ID NO: 3454765 - DNA, 25 bp, Homo sapien
cttctgtttggctcacagtcatgac

SEQ ID NO: 3454766 - DNA, 25 bp, Homo sapien
agtgtaagagtaaagcaataaccca

SEQ ID NO: 3454767 - DNA, 25 bp, Homo sapien
ttattgacatcagtgtaagagtaaa

SEQ ID NO: 3454768 - DNA, 25 bp, Homo sapien
gagtaaagcaataacccattaaaga

SEQ ID NO: 3454769 - DNA, 25 bp, Homo sapien
tcagtttattgacatcagtgtaaga

SEQ ID NO: 3454770 - DNA, 25 bp, Homo sapien
cctgcctaaaacatgctgcaatcat

SEQ ID NO: 3454771 - DNA, 25 bp, Homo sapien
gcagggacaatgcactcaccatgga

SEQ ID NO: 3454772 - DNA, 25 bp, Homo sapien
tgacatactgtcaaacaccgcagct

SEQ ID NO: 3454773 - DNA, 25 bp, Homo sapien
cttaatgaaagaatacatcctgggc

SEQ ID NO: 3454774 - DNA, 25 bp, Homo sapien
tttagcttggagtatttattaagag

SEQ ID NO: 3454775 - DNA, 25 bp, Homo sapien
agccaaagatgctgggaaggacata

SEQ ID NO: 3454776 - DNA, 25 bp, Homo sapien
tgtctttgcagttcatcaatatgtg

SEQ ID NO: 3454777 - DNA, 25 bp, Homo sapien
ttcaagttcttttgctcgtttctct

SEQ ID NO: 3454778 - DNA, 25 bp, Homo sapien
tttatagtaactctacagcaggaca

SEQ ID NO: 3454779 - DNA, 25 bp, Homo sapien
tctagctgccttacggaaattattt

SEQ ID NO: 3454780 - DNA, 25 bp, Homo sapien
tgtatctggaatatagcacttccct

SEQ ID NO: 3454781 - DNA, 25 bp, Homo sapien
accagtacaactgagctgcctttga

SEQ ID NO: 3454782 - DNA, 25 bp, Homo sapien
aatcgataagtagctccacctgaag

SEQ ID NO: 3454783 - DNA, 25 bp, Homo sapien
gctgagctgtaagcaggagcaccct

SEQ ID NO: 3454784 - DNA, 25 bp, Homo sapien
cccggcagcagatcactacagtggt

SEQ ID NO: 3454785 - DNA, 25 bp, Homo sapien
gatggaacctctgggtcaggaaaca

SEQ ID NO: 3454786 - DNA, 25 bp, Homo sapien
tcagtgagatgccaaaggcctttaa

SEQ ID NO: 3454787 - DNA, 25 bp, Homo sapien
cagtgcccatgtccagtgctgacgg

SEQ ID NO: 3454788 - DNA, 25 bp, Homo sapien
tatggcagcacagcataatgtcctg

SEQ ID NO: 3454789 - DNA, 25 bp, Homo sapien
tgagttgggctccagttatggcagc

SEQ ID NO: 3454790 - DNA, 25 bp, Homo sapien
tgccatttgcagctttgaacaggaa

SEQ ID NO: 3454791 - DNA, 25 bp, Homo sapien
caaggaaatggccacgaatcagagt

SEQ ID NO: 3454792 - DNA, 25 bp, Homo sapien
cgacaggccattagctccacaagga

SEQ ID NO: 3454793 - DNA, 25 bp, Homo sapien
ccgtgtcggagagaataggctgcca

SEQ ID NO: 3454794 - DNA, 25 bp, Homo sapien
ggtgctgtttggcgtgctggcatgc

SEQ ID NO: 3454795 - DNA, 25 bp, Homo sapien
gcgtgctggcatgcagacccgtcat

SEQ ID NO: 3454796 - DNA, 25 bp, Homo sapien
ctggcatgcagacccgtcatcacaa

SEQ ID NO: 3454797 - DNA, 25 bp, Homo sapien
gtgctggcatgcagacccgtcatca

SEQ ID NO: 3454798 - DNA, 25 bp, Homo sapien
tttaggcaagcccacatttcagagg

SEQ ID NO: 3454799 - DNA, 25 bp, Homo sapien
tgaagtagaggccagttggcccagc

SEQ ID NO: 3454800 - DNA, 25 bp, Homo sapien
tgaggcgatccttagcccagaggga

SEQ ID NO: 3454801 - DNA, 25 bp, Homo sapien
caaagggtcctttgcctctcgaagg

SEQ ID NO: 3454802 - DNA, 25 bp, Homo sapien
ggctgcagcttccatcctgcctgag

SEQ ID NO: 3454803 - DNA, 25 bp, Homo sapien
cttttgtgtcagtggcagggccttg

SEQ ID NO: 3454804 - DNA, 25 bp, Homo sapien
ctgtccaggcttcagagtcacagat

SEQ ID NO: 3454805 - DNA, 25 bp, Homo sapien
gctgagcgtgtgagcttcatttatt

SEQ ID NO: 3454806 - DNA, 25 bp, Homo sapien
tcattagaattagtagaactcaggc

SEQ ID NO: 3454807 - DNA, 25 bp, Homo sapien
ttagaattagtagaactcaggcatt

SEQ ID NO: 3454808 - DNA, 25 bp, Homo sapien
attagaattagtagaactcaggcat

SEQ ID NO: 3454809 - DNA, 25 bp, Homo sapien
tttcattagaattagtagaactcag

SEQ ID NO: 3454810 - DNA, 25 bp, Homo sapien
gtccccatgctgaccggttgccgtg

SEQ ID NO: 3454811 - DNA, 25 bp, Homo sapien
tgctgaccggttgccgtgggtgtgt

SEQ ID NO: 3454812 - DNA, 25 bp, Homo sapien
gggaccatttggagtgtccccatgc

SEQ ID NO: 3454813 - DNA, 25 bp, Homo sapien
ggggaccatttggagtgtccccatg

SEQ ID NO: 3454814 - DNA, 25 bp, Homo sapien
ggtataaaccaagtcctgagatagc

SEQ ID NO: 3454815 - DNA, 25 bp, Homo sapien
ctggcaaaggccacatgtgatggtt

SEQ ID NO: 3454816 - DNA, 25 bp, Homo sapien
caaagatgagagactgcacaggcag

SEQ ID NO: 3454817 - DNA, 25 bp, Homo sapien
gaaaagcgcattccagcatagatgt

SEQ ID NO: 3454818 - DNA, 25 bp, Homo sapien
tgagacataccaagaaggcttgtgt

SEQ ID NO: 3454819 - DNA, 25 bp, Homo sapien
gaaggcttgtgttcctctcacaacc

SEQ ID NO: 3454820 - DNA, 25 bp, Homo sapien
cttccaaagctgatgagcgggaacc

SEQ ID NO: 3454821 - DNA, 25 bp, Homo sapien
tgagcgggaaccaggcttggactct

SEQ ID NO: 3454822 - DNA, 25 bp, Homo sapien
agggagctagtggagctggcacctg

SEQ ID NO: 3454823 - DNA, 25 bp, Homo sapien
ggccttcaggtcaagagctttcctg

SEQ ID NO: 3454824 - DNA, 25 bp, Homo sapien
tggccttcaggtcaagagctttcct

SEQ ID NO: 3454825 - DNA, 25 bp, Homo sapien
ggatgtggcttagttgaaagaacag

SEQ ID NO: 3454826 - DNA, 25 bp, Homo sapien
gagttgagagtctagcattgttttc

SEQ ID NO: 3454827 - DNA, 25 bp, Homo sapien
gcctggaagtattctcacaaacaag

SEQ ID NO: 3454828 - DNA, 25 bp, Homo sapien
gctttggtctctagactgccctgag

SEQ ID NO: 3454829 - DNA, 25 bp, Homo sapien
acaacttggtgtgagggatgtgaca

SEQ ID NO: 3454830 - DNA, 25 bp, Homo sapien
caaacaagagagtcaccttatcaca

SEQ ID NO: 3454831 - DNA, 25 bp, Homo sapien
tagggcctgtccttaaaaggcagcc

SEQ ID NO: 3454832 - DNA, 25 bp, Homo sapien
tttcgtgcaatcttagggcctgtcc

SEQ ID NO: 3454833 - DNA, 25 bp, Homo sapien
agaagctggttgtgagcacctagag

SEQ ID NO: 3454834 - DNA, 25 bp, Homo sapien
ggagcttttgaggacgagcctgcac

SEQ ID NO: 3454835 - DNA, 25 bp, Homo sapien
ccttcttgttctgtgccattgccga

SEQ ID NO: 3454836 - DNA, 25 bp, Homo sapien
tgccattgccgaaaccattctcatt

SEQ ID NO: 3454837 - DNA, 25 bp, Homo sapien
tgtgccattgccgaaaccattctca

SEQ ID NO: 3454838 - DNA, 25 bp, Homo sapien
tgttctgtgccattgccgaaaccat

SEQ ID NO: 3454839 - DNA, 25 bp, Homo sapien
gctggatgtttggtacactgtggcc

SEQ ID NO: 3454840 - DNA, 25 bp, Homo sapien
tgtggcctgatgagttacagcaaag

SEQ ID NO: 3454841 - DNA, 25 bp, Homo sapien
ggcatgatactctccattctcaggc

SEQ ID NO: 3454842 - DNA, 25 bp, Homo sapien
gtgatagagtttattacccagagtc

SEQ ID NO: 3454843 - DNA, 25 bp, Homo sapien
aggtcctgcgtgtgctgccgtgcac

SEQ ID NO: 3454844 - DNA, 25 bp, Homo sapien
tagtcttgagctttactcctgtgtg

SEQ ID NO: 3454845 - DNA, 25 bp, Homo sapien
tcctgtgtgtgtcggaggtcctgcg

SEQ ID NO: 3454846 - DNA, 25 bp, Homo sapien
tgctgccgtgcacacatctgaaaag

SEQ ID NO: 3454847 - DNA, 25 bp, Homo sapien
ttttgcaaggtgctttgacacacgt

SEQ ID NO: 3454848 - DNA, 25 bp, Homo sapien
tctgcctaacagtaaccagcaactg

SEQ ID NO: 3454849 - DNA, 25 bp, Homo sapien
gacacacgtcggcagattttcttct

SEQ ID NO: 3454850 - DNA, 25 bp, Homo sapien
aaggtgctttgacacacgtcggcag

SEQ ID NO: 3454851 - DNA, 25 bp, Homo sapien
cttaatctctggacttcaccaaaat

SEQ ID NO: 3454852 - DNA, 25 bp, Homo sapien
tctctggacttcaccaaaatcagtg

SEQ ID NO: 3454853 - DNA, 25 bp, Homo sapien
tctggacttcaccaaaatcagtgct

SEQ ID NO: 3454854 - DNA, 25 bp, Homo sapien
taatctctggacttcaccaaaatca

SEQ ID NO: 3454855 - DNA, 25 bp, Homo sapien
tcttggtggtgcccattgcagtctg

SEQ ID NO: 3454856 - DNA, 25 bp, Homo sapien
ttcttggtggtgcccattgcagtct

SEQ ID NO: 3454857 - DNA, 25 bp, Homo sapien
cttggtggtgcccattgcagtctgg

SEQ ID NO: 3454858 - DNA, 25 bp, Homo sapien
aagagaccaagggttgagtggagtc

SEQ ID NO: 3454859 - DNA, 25 bp, Homo sapien
ttcaagagaccaagggttgagtgga

SEQ ID NO: 3454860 - DNA, 25 bp, Homo sapien
ctttcaagagaccaagggttgagtg

SEQ ID NO: 3454861 - DNA, 25 bp, Homo sapien
gagaccaagggttgagtggagtcat

SEQ ID NO: 3454862 - DNA, 25 bp, Homo sapien
ttcaggttatcctcttcaaagaagc

SEQ ID NO: 3454863 - DNA, 25 bp, Homo sapien
ggttatcctcttcaaagaagcctga

SEQ ID NO: 3454864 - DNA, 25 bp, Homo sapien
ctgaaacttcttcagccacatcatc

SEQ ID NO: 3454865 - DNA, 25 bp, Homo sapien
ttttcaggttatcctcttcaaagaa

SEQ ID NO: 3454866 - DNA, 25 bp, Homo sapien
gaacttgaggcccaagagccttttc

SEQ ID NO: 3454867 - DNA, 25 bp, Homo sapien
atgggaacgtgaagctgcagtgacc

SEQ ID NO: 3454868 - DNA, 25 bp, Homo sapien
aattttgaacttgaggcccaagagc

SEQ ID NO: 3454869 - DNA, 25 bp, Homo sapien
aatgggaacgtgaagctgcagtgac

SEQ ID NO: 3454870 - DNA, 25 bp, Homo sapien
tgattttatgttcgtagtgtagctt

SEQ ID NO: 3454871 - DNA, 25 bp, Homo sapien
cttgattttatgttcgtagtgtagc

SEQ ID NO: 3454872 - DNA, 25 bp, Homo sapien
ttgcttgattttatgttcgtagtgt

SEQ ID NO: 3454873 - DNA, 25 bp, Homo sapien
tttatgttcgtagtgtagctttctt

SEQ ID NO: 3454874 - DNA, 25 bp, Homo sapien
cagtaaggacctatagtggctctgc

SEQ ID NO: 3454875 - DNA, 25 bp, Homo sapien
ttttccagtaaggacctatagtggc

SEQ ID NO: 3454876 - DNA, 25 bp, Homo sapien
tgtttctcatcaggcctgagcgatg

SEQ ID NO: 3454877 - DNA, 25 bp, Homo sapien
atgccatccgggctgcaagggtttg

SEQ ID NO: 3454878 - DNA, 25 bp, Homo sapien
ggaggccgatgtcattgtgacccct

SEQ ID NO: 3454879 - DNA, 25 bp, Homo sapien
ctgggaggccgatgtcattgtgacc

SEQ ID NO: 3454880 - DNA, 25 bp, Homo sapien
attgtgacccctctggggagcatcg

SEQ ID NO: 3454881 - DNA, 25 bp, Homo sapien
agcctgcttggggaggttatctggg

SEQ ID NO: 3454882 - DNA, 25 bp, Homo sapien
caaggtgatatgatgctgcctgatg

SEQ ID NO: 3454883 - DNA, 25 bp, Homo sapien
atggatttggttcgactgtcatact

SEQ ID NO: 3454884 - DNA, 25 bp, Homo sapien
aaggtgatatgatgctgcctgatgt

SEQ ID NO: 3454885 - DNA, 25 bp, Homo sapien
gaatggatttggttcgactgtcata

SEQ ID NO: 3454886 - DNA, 25 bp, Homo sapien
ctgtgggggaaccagaaacctagct

SEQ ID NO: 3454887 - DNA, 25 bp, Homo sapien
aattcagtggttaattggtgaaagc

SEQ ID NO: 3454888 - DNA, 25 bp, Homo sapien
gaccctaatcttatgtgaaaacacc

SEQ ID NO: 3454889 - DNA, 25 bp, Homo sapien
cttatgtgaaaacacctactgtggg

SEQ ID NO: 3454890 - DNA, 25 bp, Homo sapien
tgttggcaggaccatctgatttgta

SEQ ID NO: 3454891 - DNA, 25 bp, Homo sapien
gagggactcaaatgcgtgggcttca

SEQ ID NO: 3454892 - DNA, 25 bp, Homo sapien
tgtatactggttcagtttggatttc

SEQ ID NO: 3454893 - DNA, 25 bp, Homo sapien
ctgtttgccgaagtggagggactca

SEQ ID NO: 3454894 - DNA, 25 bp, Homo sapien
agatatttatcaaaggtttaaatct

SEQ ID NO: 3454895 - DNA, 25 bp, Homo sapien
tttatcaaaggtttaaatctatagc

SEQ ID NO: 3454896 - DNA, 25 bp, Homo sapien
aaggtttaaatctatagcagtgccc

SEQ ID NO: 3454897 - DNA, 25 bp, Homo sapien
tatcaaaggtttaaatctatagcag

SEQ ID NO: 3454898 - DNA, 25 bp, Homo sapien
aagaacccgtgccagacaggtacat

SEQ ID NO: 3454899 - DNA, 25 bp, Homo sapien
gagctgtcatgcctacctcttgaac

SEQ ID NO: 3454900 - DNA, 25 bp, Homo sapien
tctgcctgtggatatgagctgtcat

SEQ ID NO: 3454901 - DNA, 25 bp, Homo sapien
tcggcagtcccctagagtgtccagt

SEQ ID NO: 3454902 - DNA, 25 bp, Homo sapien
caggctccgagctgggtacgcctct

SEQ ID NO: 3454903 - DNA, 25 bp, Homo sapien
gctgggtacgcctctggcatctgaa

SEQ ID NO: 3454904 - DNA, 25 bp, Homo sapien
tccgagctgggtacgcctctggcat

SEQ ID NO: 3454905 - DNA, 25 bp, Homo sapien
agctgggtacgcctctggcatctga

SEQ ID NO: 3454906 - DNA, 25 bp, Homo sapien
gaacccaggtcgctcggaagcgaca

SEQ ID NO: 3454907 - DNA, 25 bp, Homo sapien
tcagggcgaacttcctggaggcagc

SEQ ID NO: 3454908 - DNA, 25 bp, Homo sapien
ggaggaagcgcgctgagcctgcaga

SEQ ID NO: 3454909 - DNA, 25 bp, Homo sapien
tcaacaagggggtgacttaagcacc

SEQ ID NO: 3454910 - DNA, 25 bp, Homo sapien
ctggagataggacacaacctgctca

SEQ ID NO: 3454911 - DNA, 25 bp, Homo sapien
ggacacaacctgctcattctctgaa

SEQ ID NO: 3454912 - DNA, 25 bp, Homo sapien
aagctccatacttcattgccatgac

SEQ ID NO: 3454913 - DNA, 25 bp, Homo sapien
ccatacttcattgccatgacttttc

SEQ ID NO: 3454914 - DNA, 25 bp, Homo sapien
gtagcttagtctacaggtgcacagc

SEQ ID NO: 3454915 - DNA, 25 bp, Homo sapien
ctggatcacccctccataggcatcc

SEQ ID NO: 3454916 - DNA, 25 bp, Homo sapien
tgccccaactcagggagctggtcag

SEQ ID NO: 3454917 - DNA, 25 bp, Homo sapien
ccccaactcagggagctggtcaggc

SEQ ID NO: 3454918 - DNA, 25 bp, Homo sapien
gccccaactcagggagctggtcagg

SEQ ID NO: 3454919 - DNA, 25 bp, Homo sapien
ttgccccaactcagggagctggtca

SEQ ID NO: 3454920 - DNA, 25 bp, Homo sapien
gagaacctgcagtggacgccactca

SEQ ID NO: 3454921 - DNA, 25 bp, Homo sapien
agggagaacctgcagtggacgccac

SEQ ID NO: 3454922 - DNA, 25 bp, Homo sapien
gaacctgcagtggacgccactcatc

SEQ ID NO: 3454923 - DNA, 25 bp, Homo sapien
gggagaacctgcagtggacgccact

SEQ ID NO: 3454924 - DNA, 25 bp, Homo sapien
gctttttcagagcactcctctgctt

SEQ ID NO: 3454925 - DNA, 25 bp, Homo sapien
gtcttgctgtttccattaggggctc

SEQ ID NO: 3454926 - DNA, 25 bp, Homo sapien
gccacatctccggttgtttcctctt

SEQ ID NO: 3454927 - DNA, 25 bp, Homo sapien
cattaggggctccttcaatgtcccc

SEQ ID NO: 3454928 - DNA, 25 bp, Homo sapien
ctccggttgtttcctcttgctggtc

SEQ ID NO: 3454929 - DNA, 25 bp, Homo sapien
cttggtgtgggtggagcttgggata

SEQ ID NO: 3454930 - DNA, 25 bp, Homo sapien
tggcagaagatgagactgaaggtta

SEQ ID NO: 3454931 - DNA, 25 bp, Homo sapien
tggaggaaggagtgatgagctgtct

SEQ ID NO: 3454932 - DNA, 25 bp, Homo sapien
agcttgggatagataggataaggat

SEQ ID NO: 3454933 - DNA, 25 bp, Homo sapien
cagagcttcgctgccaaaacgtggc

SEQ ID NO: 3454934 - DNA, 25 bp, Homo sapien
ccagctccatggtgcaggccaaaat

SEQ ID NO: 3454935 - DNA, 25 bp, Homo sapien
ctgaaattggcagtagtggacaccc

SEQ ID NO: 3454936 - DNA, 25 bp, Homo sapien
tcttggagatggttcagccacagcc

SEQ ID NO: 3454937 - DNA, 25 bp, Homo sapien
gggtatacccatctaactgcctggc

SEQ ID NO: 3454938 - DNA, 25 bp, Homo sapien
cttatcggaagggaacacaggttca

SEQ ID NO: 3454939 - DNA, 25 bp, Homo sapien
gaatggctcccgagcatctggaaag

SEQ ID NO: 3454940 - DNA, 25 bp, Homo sapien
tggcccttaggatcaggacatctgg

SEQ ID NO: 3454941 - DNA, 25 bp, Homo sapien
cttagtgtcagacactagaaaacct

SEQ ID NO: 3454942 - DNA, 25 bp, Homo sapien
tatgtttacttatgtctacatatat

SEQ ID NO: 3454943 - DNA, 25 bp, Homo sapien
tatatgtttacttatgtctacatat

SEQ ID NO: 3454944 - DNA, 25 bp, Homo sapien
tagaaaacctgttctcaggctgggc

SEQ ID NO: 3454945 - DNA, 25 bp, Homo sapien
gatgtggcaaatatcattgttatgt

SEQ ID NO: 3454946 - DNA, 25 bp, Homo sapien
ggtacaatgctacctaatagcatca

SEQ ID NO: 3454947 - DNA, 25 bp, Homo sapien
gtgccactgtgggtacaatgctacc

SEQ ID NO: 3454948 - DNA, 25 bp, Homo sapien
ctcagatgatcctttgcacttttta

SEQ ID NO: 3454949 - DNA, 25 bp, Homo sapien
taaaccagcatcagtcatgtctccc

SEQ ID NO: 3454950 - DNA, 25 bp, Homo sapien
ttacttaaggataaaccagcatcag

SEQ ID NO: 3454951 - DNA, 25 bp, Homo sapien
tgtgggagacattacttaaggataa

SEQ ID NO: 3454952 - DNA, 25 bp, Homo sapien
gaatgtgggagacattacttaagga

SEQ ID NO: 3454953 - DNA, 25 bp, Homo sapien
ccggggcctggacacagtaaccgca

SEQ ID NO: 3454954 - DNA, 25 bp, Homo sapien
tgcgggagagccatcgccgagccgc

SEQ ID NO: 3454955 - DNA, 25 bp, Homo sapien
ccagcagccgtttctgcgcctgcgg

SEQ ID NO: 3454956 - DNA, 25 bp, Homo sapien
tcagagcaagccagcctggtaagct

SEQ ID NO: 3454957 - DNA, 25 bp, Homo sapien
ggtctggtccggacactccttacag

SEQ ID NO: 3454958 - DNA, 25 bp, Homo sapien
cgttcgcaacaaggcgccttcctgg

SEQ ID NO: 3454959 - DNA, 25 bp, Homo sapien
cctgcggagcctgagaaacgcgagc

SEQ ID NO: 3454960 - DNA, 25 bp, Homo sapien
gcgagccgtacctgcgttcgcaaca

SEQ ID NO: 3454961 - DNA, 25 bp, Homo sapien
ctcattaggactcaatctcagcttg

SEQ ID NO: 3454962 - DNA, 25 bp, Homo sapien
tctcagcttgtgagtattcacgact

SEQ ID NO: 3454963 - DNA, 25 bp, Homo sapien
tgtagcaatcttagttttcgccttc

SEQ ID NO: 3454964 - DNA, 25 bp, Homo sapien
ttcaaaatgaaggcttcctcattag

SEQ ID NO: 3454965 - DNA, 25 bp, Homo sapien
tctgtaaggcgatatctctttcttg

SEQ ID NO: 3454966 - DNA, 25 bp, Homo sapien
acgtgtaaattgttgatttctcctc

SEQ ID NO: 3454967 - DNA, 25 bp, Homo sapien
tctttggcctgtcgatgtccctctc

SEQ ID NO: 3454968 - DNA, 25 bp, Homo sapien
cccattctgcccttagctcctctgc

SEQ ID NO: 3454969 - DNA, 25 bp, Homo sapien
ggttgaattcaccccaccaaatctg

SEQ ID NO: 3454970 - DNA, 25 bp, Homo sapien
ttctgctgcccgctgtgccaaagca

SEQ ID NO: 3454971 - DNA, 25 bp, Homo sapien
aaggcttctttatgcctcaaatctg

SEQ ID NO: 3454972 - DNA, 25 bp, Homo sapien
tctttatgcctcaaatctgcttttc

SEQ ID NO: 3454973 - DNA, 25 bp, Homo sapien
tgtgccaaagcatccaaatcaggtt

SEQ ID NO: 3454974 - DNA, 25 bp, Homo sapien
acaagagatgtcatcaattaatctc

SEQ ID NO: 3454975 - DNA, 25 bp, Homo sapien
caagagatgtcatcaattaatctct

SEQ ID NO: 3454976 - DNA, 25 bp, Homo sapien
aacaagagatgtcatcaattaatct

SEQ ID NO: 3454977 - DNA, 25 bp, Homo sapien
aagagatgtcatcaattaatctctc

SEQ ID NO: 3454978 - DNA, 25 bp, Homo sapien
aagcagtgcttcctttcgagctttt

SEQ ID NO: 3454979 - DNA, 25 bp, Homo sapien
cacaagcagtgcttcctttcgagct

SEQ ID NO: 3454980 - DNA, 25 bp, Homo sapien
ccacaagcagtgcttcctttcgagc

SEQ ID NO: 3454981 - DNA, 25 bp, Homo sapien
caagcagtgcttcctttcgagcttt

SEQ ID NO: 3454982 - DNA, 25 bp, Homo sapien
aggtagaactattggttttgactgc

SEQ ID NO: 3454983 - DNA, 25 bp, Homo sapien
gtctctctattcacaaaagtgtgaa

SEQ ID NO: 3454984 - DNA, 25 bp, Homo sapien
ctctattcacaaaagtgtgaagatg

SEQ ID NO: 3454985 - DNA, 25 bp, Homo sapien
gaagatgatggtaggtagaactatt

SEQ ID NO: 3454986 - DNA, 25 bp, Homo sapien
cttcagcagccaaacgagcatctgg

SEQ ID NO: 3454987 - DNA, 25 bp, Homo sapien
cattgcttggaatccccgtacatgt

SEQ ID NO: 3454988 - DNA, 25 bp, Homo sapien
ccattctctcttgtgctgcctgttt

SEQ ID NO: 3454989 - DNA, 25 bp, Homo sapien
tagttcttccaatcgtttagcttcc

SEQ ID NO: 3454990 - DNA, 25 bp, Homo sapien
gcaaattccaattctctctgccagt

SEQ ID NO: 3454991 - DNA, 25 bp, Homo sapien
gctacagtctgtctcctacgtgcca

SEQ ID NO: 3454992 - DNA, 25 bp, Homo sapien
caactagttgtggtggcatttgtgc

SEQ ID NO: 3454993 - DNA, 25 bp, Homo sapien
cactgcgtttgtatggaagttcaac

SEQ ID NO: 3454994 - DNA, 25 bp, Homo sapien
gtgcagaatcagattccctttcacc

SEQ ID NO: 3454995 - DNA, 25 bp, Homo sapien
ctcttcatcttggatctgattagtc

SEQ ID NO: 3454996 - DNA, 25 bp, Homo sapien
cttcatcttggatctgattagtcac

SEQ ID NO: 3454997 - DNA, 25 bp, Homo sapien
tcatcttggatctgattagtcacag

SEQ ID NO: 3454998 - DNA, 25 bp, Homo sapien
agaacatatttcagcttctgtcact

SEQ ID NO: 3454999 - DNA, 25 bp, Homo sapien
gaacatatttcagcttctgtcactg

SEQ ID NO: 3455000 - DNA, 25 bp, Homo sapien
tagaacatatttcagcttctgtcac

SEQ ID NO: 3455001 - DNA, 25 bp, Homo sapien
acttttgaaggaatctgttgggtct

SEQ ID NO: 3455002 - DNA, 25 bp, Homo sapien
tcctgcccagaggataacgttctct

SEQ ID NO: 3455003 - DNA, 25 bp, Homo sapien
tgttgggtcttcattaccaagggaa

SEQ ID NO: 3455004 - DNA, 25 bp, Homo sapien
tgctggcaattgttcctgactcaac

SEQ ID NO: 3455005 - DNA, 25 bp, Homo sapien
cacacgaaagtggtttatcttcact

SEQ ID NO: 3455006 - DNA, 25 bp, Homo sapien
ccagactcaattgttagtgtatcac

SEQ ID NO: 3455007 - DNA, 25 bp, Homo sapien
tatcttcactagcaagtggtccaga

SEQ ID NO: 3455008 - DNA, 25 bp, Homo sapien
tccagagtttgtaccacacgaaagt

SEQ ID NO: 3455009 - DNA, 25 bp, Homo sapien
ctgagctacagttgtgataggcaga

SEQ ID NO: 3455010 - DNA, 25 bp, Homo sapien
tgtgataggcagagtctcatttatt

SEQ ID NO: 3455011 - DNA, 25 bp, Homo sapien
ctgcttcttgaggatgaagtagaac

SEQ ID NO: 3455012 - DNA, 25 bp, Homo sapien
ctgccttgctgacattctaatcctg

SEQ ID NO: 3455013 - DNA, 25 bp, Homo sapien
ccttgctgacattctaatcctggct

SEQ ID NO: 3455014 - DNA, 25 bp, Homo sapien
tcttgaggatgaagtagaactgaac

SEQ ID NO: 3455015 - DNA, 25 bp, Homo sapien
tcttccagctgagccctgaagcagt

SEQ ID NO: 3455016 - DNA, 25 bp, Homo sapien
taatttctgctgttcaatttgttca

SEQ ID NO: 3455017 - DNA, 25 bp, Homo sapien
gcagtcagtttctaatcttaatttc

SEQ ID NO: 3455018 - DNA, 25 bp, Homo sapien
tctgctgttcaatttgttcaagtaa

SEQ ID NO: 3455019 - DNA, 25 bp, Homo sapien
tgatttatgtagtgatgagattttc

SEQ ID NO: 3455020 - DNA, 25 bp, Homo sapien
ttatgtagtgatgagattttctgca

SEQ ID NO: 3455021 - DNA, 25 bp, Homo sapien
caaatgatttatgtagtgatgagat

SEQ ID NO: 3455022 - DNA, 25 bp, Homo sapien
tgtagtgatgagattttctgcatcc

SEQ ID NO: 3455023 - DNA, 25 bp, Homo sapien
tctgcctatgactatcttcatcaga

SEQ ID NO: 3455024 - DNA, 25 bp, Homo sapien
aagctgatgttgatagttacgaatc

SEQ ID NO: 3455025 - DNA, 25 bp, Homo sapien
tgttgatagttacgaatcatctgcc

SEQ ID NO: 3455026 - DNA, 25 bp, Homo sapien
tacgaatcatctgcctatgactatc

SEQ ID NO: 3455027 - DNA, 25 bp, Homo sapien
gctgacaccgatgggcaccttcctt

SEQ ID NO: 3455028 - DNA, 25 bp, Homo sapien
taacagaatcagttatcaatgatgg

SEQ ID NO: 3455029 - DNA, 25 bp, Homo sapien
cagtcggtctctcagatttccatga

SEQ ID NO: 3455030 - DNA, 25 bp, Homo sapien
tgatcccaatgctctgatatagcag

SEQ ID NO: 3455031 - DNA, 25 bp, Homo sapien
gactcaactttaacaggcagagaac

SEQ ID NO: 3455032 - DNA, 25 bp, Homo sapien
gatattagctgcctgtcatgtgaca

SEQ ID NO: 3455033 - DNA, 25 bp, Homo sapien
aagtgattttgtctcgctacctgaa

SEQ ID NO: 3455034 - DNA, 25 bp, Homo sapien
tgacggcagcaaaggcctatcatgc

SEQ ID NO: 3455035 - DNA, 25 bp, Homo sapien
gagaggcccgtttgctgttccactt

SEQ ID NO: 3455036 - DNA, 25 bp, Homo sapien
gagggccttcatattaccttgctgg

SEQ ID NO: 3455037 - DNA, 25 bp, Homo sapien
tcttctgtaggtctaactgttcttg

SEQ ID NO: 3455038 - DNA, 25 bp, Homo sapien
ggaataccgagaggcccgtttgctg

SEQ ID NO: 3455039 - DNA, 25 bp, Homo sapien
cacatgatggtctgaggaaactgca

SEQ ID NO: 3455040 - DNA, 25 bp, Homo sapien
tatgtacatacaatacttcctgggc

SEQ ID NO: 3455041 - DNA, 25 bp, Homo sapien
actgctgtaggaaactcaaagaccc

SEQ ID NO: 3455042 - DNA, 25 bp, Homo sapien
catgcctagcctgaagagtatccct

SEQ ID NO: 3455043 - DNA, 25 bp, Homo sapien
tgaatgctgaacaaccactggtgag

SEQ ID NO: 3455044 - DNA, 25 bp, Homo sapien
gataaataaagctcctgaattctcc

SEQ ID NO: 3455045 - DNA, 25 bp, Homo sapien
tgaattctcctaggctcagctttag

SEQ ID NO: 3455046 - DNA, 25 bp, Homo sapien
tgacaggagggacctacattctcct

SEQ ID NO: 3455047 - DNA, 25 bp, Homo sapien
tctaactgctgttgaagtgcctgca

SEQ ID NO: 3455048 - DNA, 25 bp, Homo sapien
gcaatgttggtatctctgagtgacc

SEQ ID NO: 3455049 - DNA, 25 bp, Homo sapien
gaggtgtcaacctgctcgggagata

SEQ ID NO: 3455050 - DNA, 25 bp, Homo sapien
ggttccaggattgtgccagactcag

SEQ ID NO: 3455051 - DNA, 25 bp, Homo sapien
gtctctgtacaagcaatttttcctg

SEQ ID NO: 3455052 - DNA, 25 bp, Homo sapien
tgtttctgtatctgctgctgcaatg

SEQ ID NO: 3455053 - DNA, 25 bp, Homo sapien
tgtacaagcaatttttcctgggctt

SEQ ID NO: 3455054 - DNA, 25 bp, Homo sapien
tctgtacaagcaatttttcctgggc

SEQ ID NO: 3455055 - DNA, 25 bp, Homo sapien
tcttgtgtattaggaaaccagtctc

SEQ ID NO: 3455056 - DNA, 25 bp, Homo sapien
ttcctgctaggtcttgtgtattagg

SEQ ID NO: 3455057 - DNA, 25 bp, Homo sapien
cattttcaactgtgggcttacttat

SEQ ID NO: 3455058 - DNA, 25 bp, Homo sapien
catcagagttgttcctatctgcatg

SEQ ID NO: 3455059 - DNA, 25 bp, Homo sapien
gtatagaagttctgccaattgctgg

SEQ ID NO: 3455060 - DNA, 25 bp, Homo sapien
ccaattgctggtgactctacttctt

SEQ ID NO: 3455061 - DNA, 25 bp, Homo sapien
ctacaggtggctttgaggatcttct

SEQ ID NO: 3455062 - DNA, 25 bp, Homo sapien
taagttcatgctggtttaagtccaa

SEQ ID NO: 3455063 - DNA, 25 bp, Homo sapien
aactaaacggatcatgggccagtgg

SEQ ID NO: 3455064 - DNA, 25 bp, Homo sapien
cagtgggctcccaaagaaactttgt

SEQ ID NO: 3455065 - DNA, 25 bp, Homo sapien
ttgttctcggcttattgagactcgc

SEQ ID NO: 3455066 - DNA, 25 bp, Homo sapien
taaacggatcatgggccagtgggct

SEQ ID NO: 3455067 - DNA, 25 bp, Homo sapien
ttctcttggccaaccagttgaagac

SEQ ID NO: 3455068 - DNA, 25 bp, Homo sapien
acattctcttggccaaccagttgaa

SEQ ID NO: 3455069 - DNA, 25 bp, Homo sapien
acagacattctcttggccaaccagt

SEQ ID NO: 3455070 - DNA, 25 bp, Homo sapien
ctgcttcatcatagtcatcaccaca

SEQ ID NO: 3455071 - DNA, 25 bp, Homo sapien
cacaccactgtaagcttgcttcaag

SEQ ID NO: 3455072 - DNA, 25 bp, Homo sapien
tgttctgcgcccagtctttagacgt

SEQ ID NO: 3455073 - DNA, 25 bp, Homo sapien
ggtcctcctgattacacaacagcaa

SEQ ID NO: 3455074 - DNA, 25 bp, Homo sapien
tgcactcaataataaagataccctc

SEQ ID NO: 3455075 - DNA, 25 bp, Homo sapien
aaagaatagaacaaagagtccgatc

SEQ ID NO: 3455076 - DNA, 25 bp, Homo sapien
agaatagaacaaagagtccgatctg

SEQ ID NO: 3455077 - DNA, 25 bp, Homo sapien
gataactcattacattcggaccagg

SEQ ID NO: 3455078 - DNA, 25 bp, Homo sapien
gaaaagaatagaacaaagagtccga

SEQ ID NO: 3455079 - DNA, 25 bp, Homo sapien
ccttcttattccaagtgaccaactg

SEQ ID NO: 3455080 - DNA, 25 bp, Homo sapien
tctcagtgatattagaaggtatgca

SEQ ID NO: 3455081 - DNA, 25 bp, Homo sapien
tagtctatggctctgaaaaatacaa

SEQ ID NO: 3455082 - DNA, 25 bp, Homo sapien
agtgaccaactgacacttgtgagaa

SEQ ID NO: 3455083 - DNA, 25 bp, Homo sapien
acttaacactgcatgattttcaaca

SEQ ID NO: 3455084 - DNA, 25 bp, Homo sapien
ttggacccaaatatgcatgttcttc

SEQ ID NO: 3455085 - DNA, 25 bp, Homo sapien
tcttcctccacagcataacttaaca

SEQ ID NO: 3455086 - DNA, 25 bp, Homo sapien
tatcatctggcttcacagttggacc

SEQ ID NO: 3455087 - DNA, 25 bp, Homo sapien
tttcatagacatacatacgcacccc

SEQ ID NO: 3455088 - DNA, 25 bp, Homo sapien
cagacatatgcccttattgttttac

SEQ ID NO: 3455089 - DNA, 25 bp, Homo sapien
gatgctcagatttggctagtttcat

SEQ ID NO: 3455090 - DNA, 25 bp, Homo sapien
gagatcatgcatcaggtagactgga

SEQ ID NO: 3455091 - DNA, 25 bp, Homo sapien
atcatagttacaaagatcagtagta

SEQ ID NO: 3455092 - DNA, 25 bp, Homo sapien
aagatcagtagtaaaaccttttcat

SEQ ID NO: 3455093 - DNA, 25 bp, Homo sapien
caagtgtagaaaccatcatagttac

SEQ ID NO: 3455094 - DNA, 25 bp, Homo sapien
gagctcaggtcaagtgtagaaacca

SEQ ID NO: 3455095 - DNA, 25 bp, Homo sapien
gtagcaagtagtatgtaagaaaacc

SEQ ID NO: 3455096 - DNA, 25 bp, Homo sapien
gggaatatcataccacaatgtagca

SEQ ID NO: 3455097 - DNA, 25 bp, Homo sapien
cacaatgtagcaagtagtatgtaag

SEQ ID NO: 3455098 - DNA, 25 bp, Homo sapien
tatgtaagaaaaccccaaatcacca

SEQ ID NO: 3455099 - DNA, 25 bp, Homo sapien
ggctcccagtggaaacagttgctga

SEQ ID NO: 3455100 - DNA, 25 bp, Homo sapien
tcataacttaaaaggctcccagtgg

SEQ ID NO: 3455101 - DNA, 25 bp, Homo sapien
ggatctgtaaggctcaaatctgtgt

SEQ ID NO: 3455102 - DNA, 25 bp, Homo sapien
tgctgaagataatggttcataagac

SEQ ID NO: 3455103 - DNA, 25 bp, Homo sapien
gagcatccctgttacttccagtaat

SEQ ID NO: 3455104 - DNA, 25 bp, Homo sapien
gaaatttgctcggataggtttccac

SEQ ID NO: 3455105 - DNA, 25 bp, Homo sapien
taattgacagcgacactatattcct

SEQ ID NO: 3455106 - DNA, 25 bp, Homo sapien
tttagtggagaagcatggtaataca

SEQ ID NO: 3455107 - DNA, 25 bp, Homo sapien
tcttgcttgctatcatccatgtgct

SEQ ID NO: 3455108 - DNA, 25 bp, Homo sapien
tgtgtgaccacatgtagtttcatcc

SEQ ID NO: 3455109 - DNA, 25 bp, Homo sapien
gagttctgccgctgataaatatctt

SEQ ID NO: 3455110 - DNA, 25 bp, Homo sapien
tgcaggcaacagagatttatgaacg

SEQ ID NO: 3455111 - DNA, 25 bp, Homo sapien
tcctataaatgtgcctcagtgagtc

SEQ ID NO: 3455112 - DNA, 25 bp, Homo sapien
tgaggctaatgaggatcaacaggac

SEQ ID NO: 3455113 - DNA, 25 bp, Homo sapien
caaaatatggatcctctcagtgacc

SEQ ID NO: 3455114 - DNA, 25 bp, Homo sapien
tattcagtgttactatgggccagac

SEQ ID NO: 3455115 - DNA, 25 bp, Homo sapien
ctaagggtttaaacagctgatgatg

SEQ ID NO: 3455116 - DNA, 25 bp, Homo sapien
ggatgatgatgataagtcaaaatct

SEQ ID NO: 3455117 - DNA, 25 bp, Homo sapien
tggttctaagggtttaaacagctga

SEQ ID NO: 3455118 - DNA, 25 bp, Homo sapien
caaaatctggatgtggttctaaggg

SEQ ID NO: 3455119 - DNA, 25 bp, Homo sapien
gaaactctgctttaattggtctagg

SEQ ID NO: 3455120 - DNA, 25 bp, Homo sapien
ataattagtactatctgagcactcc

SEQ ID NO: 3455121 - DNA, 25 bp, Homo sapien
agaaactctgctttaattggtctag

SEQ ID NO: 3455122 - DNA, 25 bp, Homo sapien
caacatgagccaagttagtgtcagg

SEQ ID NO: 3455123 - DNA, 25 bp, Homo sapien
tggataatccagtagcacagtggct

SEQ ID NO: 3455124 - DNA, 25 bp, Homo sapien
tcaggttgttgattcggacttgtgt

SEQ ID NO: 3455125 - DNA, 25 bp, Homo sapien
taagagaagaatgcatgctggtcct

SEQ ID NO: 3455126 - DNA, 25 bp, Homo sapien
taaactgttaactatcacataatga

SEQ ID NO: 3455127 - DNA, 25 bp, Homo sapien
tttcataatgttcagtattgtttaa

SEQ ID NO: 3455128 - DNA, 25 bp, Homo sapien
aggtgctaggcttaatttctaagga

SEQ ID NO: 3455129 - DNA, 25 bp, Homo sapien
agaggtgctaggcttaatttctaag

SEQ ID NO: 3455130 - DNA, 25 bp, Homo sapien
tctcctcctgtgaagaatattctgg

SEQ ID NO: 3455131 - DNA, 25 bp, Homo sapien
ccttgggaagaatctcttgcttcaa

SEQ ID NO: 3455132 - DNA, 25 bp, Homo sapien
agcactcactagagttagaaccaca

SEQ ID NO: 3455133 - DNA, 25 bp, Homo sapien
ccacatggagtgctatgctgtacat

SEQ ID NO: 3455134 - DNA, 25 bp, Homo sapien
tatggtgcctgaattgaagttccca

SEQ ID NO: 3455135 - DNA, 25 bp, Homo sapien
ccagactggtatagagctctgtaat

SEQ ID NO: 3455136 - DNA, 25 bp, Homo sapien
tgagtagttaaggaatatggtgcct

SEQ ID NO: 3455137 - DNA, 25 bp, Homo sapien
tacacataatcgagagtcagtttcc

SEQ ID NO: 3455138 - DNA, 25 bp, Homo sapien
tctagtgatcacaagctggatagca

SEQ ID NO: 3455139 - DNA, 25 bp, Homo sapien
tgtggtgtgtccaaactacttcgga

SEQ ID NO: 3455140 - DNA, 25 bp, Homo sapien
cagttgactggtgttgaaagcaagc

SEQ ID NO: 3455141 - DNA, 25 bp, Homo sapien
tgaggctcaacactgaaagtgctga

SEQ ID NO: 3455142 - DNA, 25 bp, Homo sapien
gaaaagcaatgattggcaaagacca

SEQ ID NO: 3455143 - DNA, 25 bp, Homo sapien
actaatcgttttgtatataatgcac

SEQ ID NO: 3455144 - DNA, 25 bp, Homo sapien
ggcttccataactccagcattcagt

SEQ ID NO: 3455145 - DNA, 25 bp, Homo sapien
cattcagttgtagaaatactggagc

SEQ ID NO: 3455146 - DNA, 25 bp, Homo sapien
cagcaatactggtatcagtggtgct

SEQ ID NO: 3455147 - DNA, 25 bp, Homo sapien
gttcttccattataccatggccagt

SEQ ID NO: 3455148 - DNA, 25 bp, Homo sapien
tttcagcaatactggtatcagtggt

SEQ ID NO: 3455149 - DNA, 25 bp, Homo sapien
tggtgcttattaaagtaagttctgg

SEQ ID NO: 3455150 - DNA, 25 bp, Homo sapien
cttgtaatagaataaaatagaagga

SEQ ID NO: 3455151 - DNA, 25 bp, Homo sapien
tgtaatagaataaaatagaaggaaa

SEQ ID NO: 3455152 - DNA, 25 bp, Homo sapien
taatagaataaaatagaaggaaagc

SEQ ID NO: 3455153 - DNA, 25 bp, Homo sapien
tagaataaaatagaaggaaagctta

SEQ ID NO: 3455154 - DNA, 25 bp, Homo sapien
tacagctggataatctgaggcttct

SEQ ID NO: 3455155 - DNA, 25 bp, Homo sapien
ttctgttgctgatacaagaggcaga

SEQ ID NO: 3455156 - DNA, 25 bp, Homo sapien
ctatggaaagttctgatacagctgg

SEQ ID NO: 3455157 - DNA, 25 bp, Homo sapien
gatacaagaggcagaaactcactca

SEQ ID NO: 3455158 - DNA, 25 bp, Homo sapien
atgcttcttgtaagctccctggtac

SEQ ID NO: 3455159 - DNA, 25 bp, Homo sapien
ttttgatttgagaattttcagagac

SEQ ID NO: 3455160 - DNA, 25 bp, Homo sapien
ttcttgtaagctccctggtacaggt

SEQ ID NO: 3455161 - DNA, 25 bp, Homo sapien
tataaatgcttcttgtaagctccct

SEQ ID NO: 3455162 - DNA, 25 bp, Homo sapien
aggaaagaaaagtgaaatcaagttg

SEQ ID NO: 3455163 - DNA, 25 bp, Homo sapien
tgaggaaagaaaagtgaaatcaagt

SEQ ID NO: 3455164 - DNA, 25 bp, Homo sapien
ctgaggaaagaaaagtgaaatcaag

SEQ ID NO: 3455165 - DNA, 25 bp, Homo sapien
gaaagaaaagtgaaatcaagttgta

SEQ ID NO: 3455166 - DNA, 25 bp, Homo sapien
ctttggtgccttagagcctgtgtag

SEQ ID NO: 3455167 - DNA, 25 bp, Homo sapien
tgctctgactttattcacgcccttt

SEQ ID NO: 3455168 - DNA, 25 bp, Homo sapien
gccctttagacgactcacagatgaa

SEQ ID NO: 3455169 - DNA, 25 bp, Homo sapien
tggtgccttagagcctgtgtagtct

SEQ ID NO: 3455170 - DNA, 25 bp, Homo sapien
ctgtaaagaatttatatagaattag

SEQ ID NO: 3455171 - DNA, 25 bp, Homo sapien
cactgcaaaaagtgaatcactaaaa

SEQ ID NO: 3455172 - DNA, 25 bp, Homo sapien
agaattagagacaaacactgcaaaa

SEQ ID NO: 3455173 - DNA, 25 bp, Homo sapien
tttatatagaattagagacaaacac

SEQ ID NO: 3455174 - DNA, 25 bp, Homo sapien
cttttgttgtttcacttcagctagt

SEQ ID NO: 3455175 - DNA, 25 bp, Homo sapien
tgttttgggcataagcttcttgttt

SEQ ID NO: 3455176 - DNA, 25 bp, Homo sapien
tgttgtttcacttcagctagttgat

SEQ ID NO: 3455177 - DNA, 25 bp, Homo sapien
ttcacttcagctagttgattgtata

SEQ ID NO: 3455178 - DNA, 25 bp, Homo sapien
tttcagttgtgtacttcatgcttga

SEQ ID NO: 3455179 - DNA, 25 bp, Homo sapien
gtttcagttgtgtacttcatgcttg

SEQ ID NO: 3455180 - DNA, 25 bp, Homo sapien
ttcagttgtgtacttcatgcttgaa

SEQ ID NO: 3455181 - DNA, 25 bp, Homo sapien
agtttcagttgtgtacttcatgctt

SEQ ID NO: 3455182 - DNA, 25 bp, Homo sapien
gcatgtatttttggctcgaagtttc

SEQ ID NO: 3455183 - DNA, 25 bp, Homo sapien
tcagcatgtatttttggctcgaagt

SEQ ID NO: 3455184 - DNA, 25 bp, Homo sapien
atgtatttttggctcgaagtttctc

SEQ ID NO: 3455185 - DNA, 25 bp, Homo sapien
gtatttttggctcgaagtttctcta

SEQ ID NO: 3455186 - DNA, 25 bp, Homo sapien
ttttgtctaatgctacatatacaca

SEQ ID NO: 3455187 - DNA, 25 bp, Homo sapien
ataattttgtctaatgctacatata

SEQ ID NO: 3455188 - DNA, 25 bp, Homo sapien
aattttgtctaatgctacatataca

SEQ ID NO: 3455189 - DNA, 25 bp, Homo sapien
ttgtctaatgctacatatacacaat

SEQ ID NO: 3455190 - DNA, 25 bp, Homo sapien
acagtggaagaaatcacaacatgga

SEQ ID NO: 3455191 - DNA, 25 bp, Homo sapien
gacagtggaagaaatcacaacatgg

SEQ ID NO: 3455192 - DNA, 25 bp, Homo sapien
cagtggaagaaatcacaacatggaa

SEQ ID NO: 3455193 - DNA, 25 bp, Homo sapien
gctagcaatcagcttattgggaaca

SEQ ID NO: 3455194 - DNA, 25 bp, Homo sapien
ttatttgctcaagggtgtaatggtc

SEQ ID NO: 3455195 - DNA, 25 bp, Homo sapien
gatgacagaagccaaagtaattatg

SEQ ID NO: 3455196 - DNA, 25 bp, Homo sapien
tgcctttatattgtaacccttgtgg

SEQ ID NO: 3455197 - DNA, 25 bp, Homo sapien
ggagaaccagtcattaccccgatgt

SEQ ID NO: 3455198 - DNA, 25 bp, Homo sapien
ttttgatcaccacgatagagctgac

SEQ ID NO: 3455199 - DNA, 25 bp, Homo sapien
caaagacttacagataggtgcaaaa

SEQ ID NO: 3455200 - DNA, 25 bp, Homo sapien
tagagctgactactctgctatgtag

SEQ ID NO: 3455201 - DNA, 25 bp, Homo sapien
cttggtaaatgatttcgcctgaaat

SEQ ID NO: 3455202 - DNA, 25 bp, Homo sapien
tagtctgaccacgttcaacactgta

SEQ ID NO: 3455203 - DNA, 25 bp, Homo sapien
gttcaacactgtagtagatactgtc

SEQ ID NO: 3455204 - DNA, 25 bp, Homo sapien
gaaatcattggcatagtctgaccac

SEQ ID NO: 3455205 - DNA, 25 bp, Homo sapien
gttagctccgggtaaagcgccgctc

SEQ ID NO: 3455206 - DNA, 25 bp, Homo sapien
ttactcgcgccggttttctgcaggt

SEQ ID NO: 3455207 - DNA, 25 bp, Homo sapien
ttttctgcaggttaggcgctgccgg

SEQ ID NO: 3455208 - DNA, 25 bp, Homo sapien
gctggtggtcacagcgttagctccg

SEQ ID NO: 3455209 - DNA, 25 bp, Homo sapien
gatttcggcctgactattacttggg

SEQ ID NO: 3455210 - DNA, 25 bp, Homo sapien
gttgtatcgcgagatttcggcctga

SEQ ID NO: 3455211 - DNA, 25 bp, Homo sapien
ttcttccgcacggttggaggaggtc

SEQ ID NO: 3455212 - DNA, 25 bp, Homo sapien
ttcttcccggaagctaagttgtatc

SEQ ID NO: 3455213 - DNA, 25 bp, Homo sapien
agagctccgcccacgttagtcagtc

SEQ ID NO: 3455214 - DNA, 25 bp, Homo sapien
acggtcacggtagcaaaacacccag

SEQ ID NO: 3455215 - DNA, 25 bp, Homo sapien
agtccggatcttcgcctaggccaac

SEQ ID NO: 3455216 - DNA, 25 bp, Homo sapien
gcctcctcagaatacgcgagctaga

SEQ ID NO: 3455217 - DNA, 25 bp, Homo sapien
taatcttaactcaggaaccggtcaa

SEQ ID NO: 3455218 - DNA, 25 bp, Homo sapien
gagacctgggcgtgctatggaataa

SEQ ID NO: 3455219 - DNA, 25 bp, Homo sapien
tatggaataacactggcgtccagca

SEQ ID NO: 3455220 - DNA, 25 bp, Homo sapien
aagggtgagcttacgaaacaggtgc

SEQ ID NO: 3455221 - DNA, 25 bp, Homo sapien
aagcggaaaaatcaaaccagttcat

SEQ ID NO: 3455222 - DNA, 25 bp, Homo sapien
gcggaaaaatcaaaccagttcattc

SEQ ID NO: 3455223 - DNA, 25 bp, Homo sapien
gatttttgtggtttatcatatgaaa

SEQ ID NO: 3455224 - DNA, 25 bp, Homo sapien
aggcccgttcaatcctaaaatgtga

SEQ ID NO: 3455225 - DNA, 25 bp, Homo sapien
cagtcctggagcttcgtcattgccc

SEQ ID NO: 3455226 - DNA, 25 bp, Homo sapien
gagggacatgccataccagtcctgg

SEQ ID NO: 3455227 - DNA, 25 bp, Homo sapien
cagaccctgtggatcaaatgcagtg

SEQ ID NO: 3455228 - DNA, 25 bp, Homo sapien
gctaggcttgctgctgaatacggca

SEQ ID NO: 3455229 - DNA, 25 bp, Homo sapien
tgggcgacagagcgagactctgttt

SEQ ID NO: 3455230 - DNA, 25 bp, Homo sapien
ccagcctgggcgacagagcgagact

SEQ ID NO: 3455231 - DNA, 25 bp, Homo sapien
agtgagctgagatcgggccacactg

SEQ ID NO: 3455232 - DNA, 25 bp, Homo sapien
agctgagatcgggccacactgcact

SEQ ID NO: 3455233 - DNA, 25 bp, Homo sapien
gtgactggagttcgtggcttccagc

SEQ ID NO: 3455234 - DNA, 25 bp, Homo sapien
tcccataaagggtggagcgcagcag

SEQ ID NO: 3455235 - DNA, 25 bp, Homo sapien
gctaagtaagtgaggcaccgcagcc

SEQ ID NO: 3455236 - DNA, 25 bp, Homo sapien
gggtcagaggaatatcctgcttcaa

SEQ ID NO: 3455237 - DNA, 25 bp, Homo sapien
taaaatgatgtgaacttcaggcagg

SEQ ID NO: 3455238 - DNA, 25 bp, Homo sapien
gaaggcccgtccaattctaaaatga

SEQ ID NO: 3455239 - DNA, 25 bp, Homo sapien
gaaacaaagtccaatcttgggagga

SEQ ID NO: 3455240 - DNA, 25 bp, Homo sapien
taacagtgcatataggactctcaag

SEQ ID NO: 3455241 - DNA, 25 bp, Homo sapien
tttatgaacatgtcaaaatctgcac

SEQ ID NO: 3455242 - DNA, 25 bp, Homo sapien
ttcagattgacaaatattacataca

SEQ ID NO: 3455243 - DNA, 25 bp, Homo sapien
gaataagaacacaagttaaaatcca

SEQ ID NO: 3455244 - DNA, 25 bp, Homo sapien
cattctttatcaagcaaacattggg

SEQ ID NO: 3455245 - DNA, 25 bp, Homo sapien
cagggacatgatgcactgcagaaag

SEQ ID NO: 3455246 - DNA, 25 bp, Homo sapien
gggacatgatgcactgcagaaagct

SEQ ID NO: 3455247 - DNA, 25 bp, Homo sapien
gcccccaaatcttatataatcatac

SEQ ID NO: 3455248 - DNA, 25 bp, Homo sapien
gacatgatgcactgcagaaagctgc

SEQ ID NO: 3455249 - DNA, 25 bp, Homo sapien
gcctatttagcaagtggaacggtga

SEQ ID NO: 3455250 - DNA, 25 bp, Homo sapien
gacaggtatcctactccaagccaat

SEQ ID NO: 3455251 - DNA, 25 bp, Homo sapien
tcattaatctgagtggcctctgccc

SEQ ID NO: 3455252 - DNA, 25 bp, Homo sapien
cagtgatgaagtatgcaaccagagg

SEQ ID NO: 3455253 - DNA, 25 bp, Homo sapien
tatcatatagctggagtgaacatcc

SEQ ID NO: 3455254 - DNA, 25 bp, Homo sapien
gaaacttttatggaatgattagcct

SEQ ID NO: 3455255 - DNA, 25 bp, Homo sapien
caaaagggcatttaggtttctatct

SEQ ID NO: 3455256 - DNA, 25 bp, Homo sapien
tggtgggtctaaggaatataggtct

SEQ ID NO: 3455257 - DNA, 25 bp, Homo sapien
gagctactcttggttaattatcaca

SEQ ID NO: 3455258 - DNA, 25 bp, Homo sapien
ggttggacaaatagagctactcttg

SEQ ID NO: 3455259 - DNA, 25 bp, Homo sapien
caagagtccacagcgcaccaagtat

SEQ ID NO: 3455260 - DNA, 25 bp, Homo sapien
cttctttaggtgtgaggttggacaa

SEQ ID NO: 3455261 - DNA, 25 bp, Homo sapien
caagctcttcaagacttggtacatg

SEQ ID NO: 3455262 - DNA, 25 bp, Homo sapien
tatacataagtagtaagatatagat

SEQ ID NO: 3455263 - DNA, 25 bp, Homo sapien
cataagtagtaagatatagatagat

SEQ ID NO: 3455264 - DNA, 25 bp, Homo sapien
tatagatatacataagtagtaagat

SEQ ID NO: 3455265 - DNA, 25 bp, Homo sapien
taagtagtaagatatagatagatct

SEQ ID NO: 3455266 - DNA, 25 bp, Homo sapien
tcagaaacaggcaatggatcaaggc

SEQ ID NO: 3455267 - DNA, 25 bp, Homo sapien
cttggctaccacgtatcaaaagtgg

SEQ ID NO: 3455268 - DNA, 25 bp, Homo sapien
taaaaaagcataggtgtctcaaagt

SEQ ID NO: 3455269 - DNA, 25 bp, Homo sapien
tctgatagccttacctaccctgtcg

SEQ ID NO: 3455270 - DNA, 25 bp, Homo sapien
gtcaaatcagggcaatcaactacag

SEQ ID NO: 3455271 - DNA, 25 bp, Homo sapien
gggcaatcaactacagagacctgga

SEQ ID NO: 3455272 - DNA, 25 bp, Homo sapien
tcaactacagagacctggacatcag

SEQ ID NO: 3455273 - DNA, 25 bp, Homo sapien
agggttccttagtcaaatcagggca

SEQ ID NO: 3455274 - DNA, 25 bp, Homo sapien
gaggcaataagtaaggcacacctcc

SEQ ID NO: 3455275 - DNA, 25 bp, Homo sapien
ggcaataagtaaggcacacctccaa

SEQ ID NO: 3455276 - DNA, 25 bp, Homo sapien
tttggtttacaagaggcaataagta

SEQ ID NO: 3455277 - DNA, 25 bp, Homo sapien
ttacaagaggcaataagtaaggcac

SEQ ID NO: 3455278 - DNA, 25 bp, Homo sapien
aggcagcttgatttcttttgcaatt

SEQ ID NO: 3455279 - DNA, 25 bp, Homo sapien
gagtctgaaatggacctgctcctgc

SEQ ID NO: 3455280 - DNA, 25 bp, Homo sapien
ccaggcagcttgatttcttttgcaa

SEQ ID NO: 3455281 - DNA, 25 bp, Homo sapien
ctcagaattgaacccgagagtctga

SEQ ID NO: 3455282 - DNA, 25 bp, Homo sapien
aaaaagattagccagtaatgcacac

SEQ ID NO: 3455283 - DNA, 25 bp, Homo sapien
ggttcacatgggcaaagtaacttcc

SEQ ID NO: 3455284 - DNA, 25 bp, Homo sapien
tatttctccagtaggcaccctccat

SEQ ID NO: 3455285 - DNA, 25 bp, Homo sapien
gattagccagtaatgcacactgaaa

SEQ ID NO: 3455286 - DNA, 25 bp, Homo sapien
ctctgccttccgagtctgagcgatt

SEQ ID NO: 3455287 - DNA, 25 bp, Homo sapien
gccttccgagtctgagcgattctct

SEQ ID NO: 3455288 - DNA, 25 bp, Homo sapien
ccttccgagtctgagcgattctctc

SEQ ID NO: 3455289 - DNA, 25 bp, Homo sapien
ttccgagtctgagcgattctctcac

SEQ ID NO: 3455290 - DNA, 25 bp, Homo sapien
ttcccttctgaattatgaaagtacc

SEQ ID NO: 3455291 - DNA, 25 bp, Homo sapien
gtacctcccattcctataggcttat

SEQ ID NO: 3455292 - DNA, 25 bp, Homo sapien
gtcacaaagttaagtggtccagttc

SEQ ID NO: 3455293 - DNA, 25 bp, Homo sapien
ccagggtctctctcatacaagtcac

SEQ ID NO: 3455294 - DNA, 25 bp, Homo sapien
ctggtagacaaaccaaaggagcttt

SEQ ID NO: 3455295 - DNA, 25 bp, Homo sapien
ctggagacaaaaactggtagacaaa

SEQ ID NO: 3455296 - DNA, 25 bp, Homo sapien
tcatcagagttcaaggggcaggaag

SEQ ID NO: 3455297 - DNA, 25 bp, Homo sapien
actctgcaggtaagaagtatccaag

SEQ ID NO: 3455298 - DNA, 25 bp, Homo sapien
gatcaatgcgatagagaaactctgc

SEQ ID NO: 3455299 - DNA, 25 bp, Homo sapien
tagtgtcataatggtagtgtccacc

SEQ ID NO: 3455300 - DNA, 25 bp, Homo sapien
aaaaatgagtgtgctccagtcgcaa

SEQ ID NO: 3455301 - DNA, 25 bp, Homo sapien
cagaaacatctacttagcagttgtg

SEQ ID NO: 3455302 - DNA, 25 bp, Homo sapien
tgttcccaatctctttcagacagat

SEQ ID NO: 3455303 - DNA, 25 bp, Homo sapien
tgcctggcctgtgggatcatttcta

SEQ ID NO: 3455304 - DNA, 25 bp, Homo sapien
gactgatttcgctgatactacagaa

SEQ ID NO: 3455305 - DNA, 25 bp, Homo sapien
tatttcagcaacgatagtggtcatg

SEQ ID NO: 3455306 - DNA, 25 bp, Homo sapien
taactggcaatcgaaacaagggagg

SEQ ID NO: 3455307 - DNA, 25 bp, Homo sapien
gattgccattagcaccattagagag

SEQ ID NO: 3455308 - DNA, 25 bp, Homo sapien
caagggaggaattatggctagccaa

SEQ ID NO: 3455309 - DNA, 25 bp, Homo sapien
cacaagacatagctaacatccaaag

SEQ ID NO: 3455310 - DNA, 25 bp, Homo sapien
attggaatttatactcacaagacat

SEQ ID NO: 3455311 - DNA, 25 bp, Homo sapien
tggaatttatactcacaagacatag

SEQ ID NO: 3455312 - DNA, 25 bp, Homo sapien
gaatttatactcacaagacatagct

SEQ ID NO: 3455313 - DNA, 25 bp, Homo sapien
gtatctgtagtgtgaagaggcccag

SEQ ID NO: 3455314 - DNA, 25 bp, Homo sapien
tgctacagtcgtgaacaaggccctt

SEQ ID NO: 3455315 - DNA, 25 bp, Homo sapien
gacagatccccagctttagtaaagt

SEQ ID NO: 3455316 - DNA, 25 bp, Homo sapien
aaggcccttgcccacatgaagtgta

SEQ ID NO: 3455317 - DNA, 25 bp, Homo sapien
tcaattctgcctacataaggaagcc

SEQ ID NO: 3455318 - DNA, 25 bp, Homo sapien
gctgaacaggtggacatgcctagaa

SEQ ID NO: 3455319 - DNA, 25 bp, Homo sapien
tgcccaggaactaaccacgtgatta

SEQ ID NO: 3455320 - DNA, 25 bp, Homo sapien
cagaaacggtgtggaagctctggac

SEQ ID NO: 3455321 - DNA, 25 bp, Homo sapien
cacttttggcataagctggagactg

SEQ ID NO: 3455322 - DNA, 25 bp, Homo sapien
cctgtgaggcataaaaaccaatctg

SEQ ID NO: 3455323 - DNA, 25 bp, Homo sapien
tctattgtgtgatacaggccctgtg

SEQ ID NO: 3455324 - DNA, 25 bp, Homo sapien
cactatagctctgattggacaaagg

SEQ ID NO: 3455325 - DNA, 25 bp, Homo sapien
tggccctggcctgcacgtgtgatct

SEQ ID NO: 3455326 - DNA, 25 bp, Homo sapien
actcctgatagctggccctggcctg

SEQ ID NO: 3455327 - DNA, 25 bp, Homo sapien
ctgacactcctgatagctggccctg

SEQ ID NO: 3455328 - DNA, 25 bp, Homo sapien
gcctgcacgtgtgatctggtcccag

SEQ ID NO: 3455329 - DNA, 25 bp, Homo sapien
ccgctgatggctctgggttcctgca

SEQ ID NO: 3455330 - DNA, 25 bp, Homo sapien
cccgctgatggctctgggttcctgc

SEQ ID NO: 3455331 - DNA, 25 bp, Homo sapien
cgctgatggctctgggttcctgcac

SEQ ID NO: 3455332 - DNA, 25 bp, Homo sapien
cgaggtacgaagaggaggcttccct

SEQ ID NO: 3455333 - DNA, 25 bp, Homo sapien
ccgaacgcaacgctcagactggaaa

SEQ ID NO: 3455334 - DNA, 25 bp, Homo sapien
gagcgcttccggtgaatcacggtgc

SEQ ID NO: 3455335 - DNA, 25 bp, Homo sapien
taagtctttcggagcaaaactgggc

SEQ ID NO: 3455336 - DNA, 25 bp, Homo sapien
ctgcttctcgcaggccgattcgatg

SEQ ID NO: 3455337 - DNA, 25 bp, Homo sapien
gattcgatgctgatccgcactgcgc

SEQ ID NO: 3455338 - DNA, 25 bp, Homo sapien
gctgaagtctatccgctgggccaga

SEQ ID NO: 3455339 - DNA, 25 bp, Homo sapien
cagattctgcgacatggacagcggg

SEQ ID NO: 3455340 - DNA, 25 bp, Homo sapien
atactttgtaaggtaggtaggtgtg

SEQ ID NO: 3455341 - DNA, 25 bp, Homo sapien
ctgtcctgttatttccgaaattaag

SEQ ID NO: 3455342 - DNA, 25 bp, Homo sapien
taatttgtagaggcaggagctccct

SEQ ID NO: 3455343 - DNA, 25 bp, Homo sapien
gatctatccgactcccagaataata

SEQ ID NO: 3455344 - DNA, 25 bp, Homo sapien
caatttctgtcaattttgtgcatgg

SEQ ID NO: 3455345 - DNA, 25 bp, Homo sapien
aatgttggcacatattaaactgcca

SEQ ID NO: 3455346 - DNA, 25 bp, Homo sapien
cattcctaaccctgaatattaacaa

SEQ ID NO: 3455347 - DNA, 25 bp, Homo sapien
gaatcactaccagttcacattccta

SEQ ID NO: 3455348 - DNA, 25 bp, Homo sapien
actgagaacatcatagagaacacac

SEQ ID NO: 3455349 - DNA, 25 bp, Homo sapien
gagacaggatcaagagtcataaatt

SEQ ID NO: 3455350 - DNA, 25 bp, Homo sapien
cctcactgagtcccaaggccaaagg

SEQ ID NO: 3455351 - DNA, 25 bp, Homo sapien
ttttttatccctaacaatactgaga

SEQ ID NO: 3455352 - DNA, 25 bp, Homo sapien
gtaatatatcacagaccaaggaccc

SEQ ID NO: 3455353 - DNA, 25 bp, Homo sapien
cacagttaatgaaggcagaggcagg

SEQ ID NO: 3455354 - DNA, 25 bp, Homo sapien
taaggacccaagtagcctcaatgat

SEQ ID NO: 3455355 - DNA, 25 bp, Homo sapien
ggctccctaactactggcttgacag

SEQ ID NO: 3455356 - DNA, 25 bp, Homo sapien
cctcttaatgtactgccattcctct

SEQ ID NO: 3455357 - DNA, 25 bp, Homo sapien
cattgcatcaactctgtccagcctg

SEQ ID NO: 3455358 - DNA, 25 bp, Homo sapien
taatgtactgccattcctctcctta

SEQ ID NO: 3455359 - DNA, 25 bp, Homo sapien
gtactgccattcctctccttatata

SEQ ID NO: 3455360 - DNA, 25 bp, Homo sapien
caataagatttgtgctgctccagca

SEQ ID NO: 3455361 - DNA, 25 bp, Homo sapien
tagatatcaattgcaacgtctgagg

SEQ ID NO: 3455362 - DNA, 25 bp, Homo sapien
gaagtttccagtgttgccgtaatcg

SEQ ID NO: 3455363 - DNA, 25 bp, Homo sapien
gccgtaatcgcaaaagctcagaatt

SEQ ID NO: 3455364 - DNA, 25 bp, Homo sapien
cttcaaatgtaccatgatgaggaaa

SEQ ID NO: 3455365 - DNA, 25 bp, Homo sapien
ttcaaatgtaccatgatgaggaaag

SEQ ID NO: 3455366 - DNA, 25 bp, Homo sapien
ctaggaatttggacatcaagaggac

SEQ ID NO: 3455367 - DNA, 25 bp, Homo sapien
tgcagacccctctaaatcactagga

SEQ ID NO: 3455368 - DNA, 25 bp, Homo sapien
caggtatctttttatccagatcgag

SEQ ID NO: 3455369 - DNA, 25 bp, Homo sapien
gaggacagtaatcttcaggtatctt

SEQ ID NO: 3455370 - DNA, 25 bp, Homo sapien
aacttcaggctattcgtaagaaatt

SEQ ID NO: 3455371 - DNA, 25 bp, Homo sapien
ttaacttcaggctattcgtaagaaa

SEQ ID NO: 3455372 - DNA, 25 bp, Homo sapien
taacttcaggctattcgtaagaaat

SEQ ID NO: 3455373 - DNA, 25 bp, Homo sapien
tcgtttgaagaggttaactgtgccg

SEQ ID NO: 3455374 - DNA, 25 bp, Homo sapien
cctatatctggagcctgtttttgta

SEQ ID NO: 3455375 - DNA, 25 bp, Homo sapien
tgtgccgaggtcacctatatctgga

SEQ ID NO: 3455376 - DNA, 25 bp, Homo sapien
gatttgggcaaaggtcgtttgaaga

SEQ ID NO: 3455377 - DNA, 25 bp, Homo sapien
cttgaacctgggaggtagacgttgc

SEQ ID NO: 3455378 - DNA, 25 bp, Homo sapien
acctgggaggtagacgttgcggtga

SEQ ID NO: 3455379 - DNA, 25 bp, Homo sapien
tgaacctgggaggtagacgttgcgg

SEQ ID NO: 3455380 - DNA, 25 bp, Homo sapien
tgggaggtagacgttgcggtgagcc

SEQ ID NO: 3455381 - DNA, 25 bp, Homo sapien
ttacaaatcatcccggcagggtatt

SEQ ID NO: 3455382 - DNA, 25 bp, Homo sapien
ctgtgttacaaatcatcccggcagg

SEQ ID NO: 3455383 - DNA, 25 bp, Homo sapien
tgttacaaatcatcccggcagggta

SEQ ID NO: 3455384 - DNA, 25 bp, Homo sapien
tgtgttacaaatcatcccggcaggg

SEQ ID NO: 3455385 - DNA, 25 bp, Homo sapien
tttcaccacaatgtgagggacttgt

SEQ ID NO: 3455386 - DNA, 25 bp, Homo sapien
gatttaatttgaacagcttcccgag

SEQ ID NO: 3455387 - DNA, 25 bp, Homo sapien
tacataagagaacattctgtgccgc

SEQ ID NO: 3455388 - DNA, 25 bp, Homo sapien
gggctgagagataatctggtttttc

SEQ ID NO: 3455389 - DNA, 25 bp, Homo sapien
ataaagtcgaaaaagggctgctctt

SEQ ID NO: 3455390 - DNA, 25 bp, Homo sapien
tcataaagtcgaaaaagggctgctc

SEQ ID NO: 3455391 - DNA, 25 bp, Homo sapien
taaagtcgaaaaagggctgctctta

SEQ ID NO: 3455392 - DNA, 25 bp, Homo sapien
cataaagtcgaaaaagggctgctct

SEQ ID NO: 3455393 - DNA, 25 bp, Homo sapien
tcctccggacattgcttctcagtag

SEQ ID NO: 3455394 - DNA, 25 bp, Homo sapien
tatgctctaggacataaaggtggtc

SEQ ID NO: 3455395 - DNA, 25 bp, Homo sapien
tcttatcatttgaggaatggcacaa

SEQ ID NO: 3455396 - DNA, 25 bp, Homo sapien
ctcagtagcaaatttttgggatttc

SEQ ID NO: 3455397 - DNA, 25 bp, Homo sapien
ttgagggagtcacaactcatgcata

SEQ ID NO: 3455398 - DNA, 25 bp, Homo sapien
gagtcacaactcatgcataagcatg

SEQ ID NO: 3455399 - DNA, 25 bp, Homo sapien
taaggtttgagggagtcacaactca

SEQ ID NO: 3455400 - DNA, 25 bp, Homo sapien
taatgcgccgacatcctaataaggt

SEQ ID NO: 3455401 - DNA, 25 bp, Homo sapien
ggacccgaaagtctcattctcttgt

SEQ ID NO: 3455402 - DNA, 25 bp, Homo sapien
ttgaggacccgaaagtctcattctc

SEQ ID NO: 3455403 - DNA, 25 bp, Homo sapien
aaagcttgaggacccgaaagtctca

SEQ ID NO: 3455404 - DNA, 25 bp, Homo sapien
tcaaaagcttgaggacccgaaagtc

SEQ ID NO: 3455405 - DNA, 25 bp, Homo sapien
ctataaactgggatacaaaacctgg

SEQ ID NO: 3455406 - DNA, 25 bp, Homo sapien
caaaacctgggagtctaaatccaga

SEQ ID NO: 3455407 - DNA, 25 bp, Homo sapien
taaatccagagccaaaaacctggga

SEQ ID NO: 3455408 - DNA, 25 bp, Homo sapien
taaatgtcagtacttgatccctggt

SEQ ID NO: 3455409 - DNA, 25 bp, Homo sapien
gaggtagctctaagaaccctttcat

SEQ ID NO: 3455410 - DNA, 25 bp, Homo sapien
ccactatgtgtaggcagactttaaa

SEQ ID NO: 3455411 - DNA, 25 bp, Homo sapien
catcacacacccctgattatcatga

SEQ ID NO: 3455412 - DNA, 25 bp, Homo sapien
gaatgtgtaggttctcagcttgaca

SEQ ID NO: 3455413 - DNA, 25 bp, Homo sapien
gcttgctaagctgtcaatggttgca

SEQ ID NO: 3455414 - DNA, 25 bp, Homo sapien
gatatttgaccaatgagcctgtatc

SEQ ID NO: 3455415 - DNA, 25 bp, Homo sapien
tgttcatagccttgtgatgtgatta

SEQ ID NO: 3455416 - DNA, 25 bp, Homo sapien
tctgaggatcctcaattcggcttgc

SEQ ID NO: 3455417 - DNA, 25 bp, Homo sapien
atacttgtggcaaccactttgaaaa

SEQ ID NO: 3455418 - DNA, 25 bp, Homo sapien
tcactattggtgaatgcatacttgt

SEQ ID NO: 3455419 - DNA, 25 bp, Homo sapien
caatattcaattgcagttgaatgga

SEQ ID NO: 3455420 - DNA, 25 bp, Homo sapien
gaatctgctcaactccaatattcaa

SEQ ID NO: 3455421 - DNA, 25 bp, Homo sapien
tcttccatctctatgtacaactcga

SEQ ID NO: 3455422 - DNA, 25 bp, Homo sapien
gataagacagtgtaattactcttcc

SEQ ID NO: 3455423 - DNA, 25 bp, Homo sapien
acagtgggaccaattatagctcatt

SEQ ID NO: 3455424 - DNA, 25 bp, Homo sapien
tcactttctatactgccccttggac

SEQ ID NO: 3455425 - DNA, 25 bp, Homo sapien
ccaacctgaagtgatactctcgctt

SEQ ID NO: 3455426 - DNA, 25 bp, Homo sapien
caactctggagatgttgtaaaccct

SEQ ID NO: 3455427 - DNA, 25 bp, Homo sapien
gattctgggacctactcaatagtgt

SEQ ID NO: 3455428 - DNA, 25 bp, Homo sapien
gacagcatgagtgccattcctctgg

SEQ ID NO: 3455429 - DNA, 25 bp, Homo sapien
ggttacctggttactactactagca

SEQ ID NO: 3455430 - DNA, 25 bp, Homo sapien
gatccctatccatttgcaagccttg

SEQ ID NO: 3455431 - DNA, 25 bp, Homo sapien
tctgcagtgacttaacatcacgacc

SEQ ID NO: 3455432 - DNA, 25 bp, Homo sapien
ctgactactacagcaaccctatctt

SEQ ID NO: 3455433 - DNA, 25 bp, Homo sapien
taacatcacgaccatgaagtaaact

SEQ ID NO: 3455434 - DNA, 25 bp, Homo sapien
ggtgctcactgactactacagcaac

SEQ ID NO: 3455435 - DNA, 25 bp, Homo sapien
gaagctcagtacttgccagcccata

SEQ ID NO: 3455436 - DNA, 25 bp, Homo sapien
gtcccacatgattactgaagctcag

SEQ ID NO: 3455437 - DNA, 25 bp, Homo sapien
caatgctctctataggtccaagtcc

SEQ ID NO: 3455438 - DNA, 25 bp, Homo sapien
caccgtgatggcagatgcattacca

SEQ ID NO: 3455439 - DNA, 25 bp, Homo sapien
tgaacttctttgaatggcccacgaa

SEQ ID NO: 3455440 - DNA, 25 bp, Homo sapien
tacattggttacgaggaaactgaac

SEQ ID NO: 3455441 - DNA, 25 bp, Homo sapien
gaaactgaaccataatcttgctgcc

SEQ ID NO: 3455442 - DNA, 25 bp, Homo sapien
gacaagggctaagtgcagacataag

SEQ ID NO: 3455443 - DNA, 25 bp, Homo sapien
aaacagcactcttttggaagttatc

SEQ ID NO: 3455444 - DNA, 25 bp, Homo sapien
tatacaactgtacataaacttctgc

SEQ ID NO: 3455445 - DNA, 25 bp, Homo sapien
gttgatctgcaaacatttcaagtca

SEQ ID NO: 3455446 - DNA, 25 bp, Homo sapien
aagcacatagaaacccttaagttag

SEQ ID NO: 3455447 - DNA, 25 bp, Homo sapien
tgaggacgccctaaagagataatct

SEQ ID NO: 3455448 - DNA, 25 bp, Homo sapien
tatgtaggttagacccaggaaagct

SEQ ID NO: 3455449 - DNA, 25 bp, Homo sapien
taattggagaaagcaatccagggct

SEQ ID NO: 3455450 - DNA, 25 bp, Homo sapien
tacactaggtgtctcaactggtgag

SEQ ID NO: 3455451 - DNA, 25 bp, Homo sapien
agatgcaagatcttgatcagaaggg

SEQ ID NO: 3455452 - DNA, 25 bp, Homo sapien
tccatggatagaaagatgcaagatc

SEQ ID NO: 3455453 - DNA, 25 bp, Homo sapien
gttgttctatcgtggcccacaagct

SEQ ID NO: 3455454 - DNA, 25 bp, Homo sapien
ctatcgtggcccacaagctccattt

SEQ ID NO: 3455455 - DNA, 25 bp, Homo sapien
cactgaggttagtagaggaggcacc

SEQ ID NO: 3455456 - DNA, 25 bp, Homo sapien
gccaagttcatacagcaagccagta

SEQ ID NO: 3455457 - DNA, 25 bp, Homo sapien
gaggcacctctatcttcatttatat

SEQ ID NO: 3455458 - DNA, 25 bp, Homo sapien
tactgaaacttctcaatcaccactg

SEQ ID NO: 3455459 - DNA, 25 bp, Homo sapien
gaaagagcagaataaggggtttcat

SEQ ID NO: 3455460 - DNA, 25 bp, Homo sapien
gagaaagagcagaataaggggtttc

SEQ ID NO: 3455461 - DNA, 25 bp, Homo sapien
aaagagcagaataaggggtttcatc

SEQ ID NO: 3455462 - DNA, 25 bp, Homo sapien
agagcagaataaggggtttcatctg

SEQ ID NO: 3455463 - DNA, 25 bp, Homo sapien
aattaggactgttctcaaaaaggag

SEQ ID NO: 3455464 - DNA, 25 bp, Homo sapien
tgtgcagctgtcataaagctaggtc

SEQ ID NO: 3455465 - DNA, 25 bp, Homo sapien
tagcattcaacacaagttccccttg

SEQ ID NO: 3455466 - DNA, 25 bp, Homo sapien
cactaagaacttgtgagccatctga

SEQ ID NO: 3455467 - DNA, 25 bp, Homo sapien
taattcggaacccacccatctagaa

SEQ ID NO: 3455468 - DNA, 25 bp, Homo sapien
aaagtcacctatctgatcactgaga

SEQ ID NO: 3455469 - DNA, 25 bp, Homo sapien
gagaagctaatcaggaacccagaag

SEQ ID NO: 3455470 - DNA, 25 bp, Homo sapien
cagagtaatgtagtctatatggttt

SEQ ID NO: 3455471 - DNA, 25 bp, Homo sapien
caccacaggagcacctagcagaggc

SEQ ID NO: 3455472 - DNA, 25 bp, Homo sapien
cctagcagaggcactaagcttgtct

SEQ ID NO: 3455473 - DNA, 25 bp, Homo sapien
cttttgttcctgtcactcacaccac

SEQ ID NO: 3455474 - DNA, 25 bp, Homo sapien
tcttggaagcttcgggagaagagca

SEQ ID NO: 3455475 - DNA, 25 bp, Homo sapien
ctcctccctgtgatgagcatgcaca

SEQ ID NO: 3455476 - DNA, 25 bp, Homo sapien
agctcctccctgtgatgagcatgca

SEQ ID NO: 3455477 - DNA, 25 bp, Homo sapien
tcctccctgtgatgagcatgcacat

SEQ ID NO: 3455478 - DNA, 25 bp, Homo sapien
agcagctcctccctgtgatgagcat

SEQ ID NO: 3455479 - DNA, 25 bp, Homo sapien
ctttataaaagtggatacagctttc

SEQ ID NO: 3455480 - DNA, 25 bp, Homo sapien
aaaagtggatacagctttcttcagg

SEQ ID NO: 3455481 - DNA, 25 bp, Homo sapien
taaaagtggatacagctttcttcag

SEQ ID NO: 3455482 - DNA, 25 bp, Homo sapien
tataaaagtggatacagctttcttc

SEQ ID NO: 3455483 - DNA, 25 bp, Homo sapien
cagtctccacccccactaaattcca

SEQ ID NO: 3455484 - DNA, 25 bp, Homo sapien
attccatctcatcctcccaaatcat

SEQ ID NO: 3455485 - DNA, 25 bp, Homo sapien
ctccacccccactaaattccatctc

SEQ ID NO: 3455486 - DNA, 25 bp, Homo sapien
tctccacccccactaaattccatct

SEQ ID NO: 3455487 - DNA, 25 bp, Homo sapien
cccagacagacccaggaatgtgagg

SEQ ID NO: 3455488 - DNA, 25 bp, Homo sapien
caatcccaatgtagtacgttctggt

SEQ ID NO: 3455489 - DNA, 25 bp, Homo sapien
tggtaactgtgccaaccagcccaga

SEQ ID NO: 3455490 - DNA, 25 bp, Homo sapien
gggtacatagttccagtattcttcc

SEQ ID NO: 3455491 - DNA, 25 bp, Homo sapien
tgaaaccatctcactcaaatctgat

SEQ ID NO: 3455492 - DNA, 25 bp, Homo sapien
taagaacaaacgcactatcatatgg

SEQ ID NO: 3455493 - DNA, 25 bp, Homo sapien
tatgggaccatgcattttgaaacca

SEQ ID NO: 3455494 - DNA, 25 bp, Homo sapien
tcttctggttgaaatgatcaacaga

SEQ ID NO: 3455495 - DNA, 25 bp, Homo sapien
tatgacaccttagcatgccagctgc

SEQ ID NO: 3455496 - DNA, 25 bp, Homo sapien
tctgtcccttcgcataccagaaaga

SEQ ID NO: 3455497 - DNA, 25 bp, Homo sapien
gtcccttcgcataccagaaagaaat

SEQ ID NO: 3455498 - DNA, 25 bp, Homo sapien
gggaccttggcgttctaggtatgac

SEQ ID NO: 3455499 - DNA, 25 bp, Homo sapien
tgcccaagacctttctccatcacct

SEQ ID NO: 3455500 - DNA, 25 bp, Homo sapien
ctctgcccaagacctttctccatca

SEQ ID NO: 3455501 - DNA, 25 bp, Homo sapien
atcacctccacaagaccaggtctta

SEQ ID NO: 3455502 - DNA, 25 bp, Homo sapien
tccatcacctccacaagaccaggtc

SEQ ID NO: 3455503 - DNA, 25 bp, Homo sapien
aaagggtgttgttggattgagttct

SEQ ID NO: 3455504 - DNA, 25 bp, Homo sapien
aagaagacccatgctgtttggcctc

SEQ ID NO: 3455505 - DNA, 25 bp, Homo sapien
tcttgcatgccttctatttctaaaa

SEQ ID NO: 3455506 - DNA, 25 bp, Homo sapien
caaagctgccacaacaaagggtgtt

SEQ ID NO: 3455507 - DNA, 25 bp, Homo sapien
cattcctttgttgatggagtcacac

SEQ ID NO: 3455508 - DNA, 25 bp, Homo sapien
ccaggtctgatagcctttgtattaa

SEQ ID NO: 3455509 - DNA, 25 bp, Homo sapien
ttgttagcttcattaaggttgggaa

SEQ ID NO: 3455510 - DNA, 25 bp, Homo sapien
gggcagacctgctgacaaatagggt

SEQ ID NO: 3455511 - DNA, 25 bp, Homo sapien
gctccataaatactggcttctgctt

SEQ ID NO: 3455512 - DNA, 25 bp, Homo sapien
cttctgcttgagcaaaagctccacc

SEQ ID NO: 3455513 - DNA, 25 bp, Homo sapien
tgcttgagcaaaagctccaccactc

SEQ ID NO: 3455514 - DNA, 25 bp, Homo sapien
ccagctccataaatactggcttctg

SEQ ID NO: 3455515 - DNA, 25 bp, Homo sapien
tatttgcttggcttggagctcccat

SEQ ID NO: 3455516 - DNA, 25 bp, Homo sapien
gtctatttgcttggcttggagctcc

SEQ ID NO: 3455517 - DNA, 25 bp, Homo sapien
tctcggtctatttgcttggcttgga

SEQ ID NO: 3455518 - DNA, 25 bp, Homo sapien
tcggtctatttgcttggcttggagc

SEQ ID NO: 3455519 - DNA, 25 bp, Homo sapien
ttcctggggacctagacgtagggca

SEQ ID NO: 3455520 - DNA, 25 bp, Homo sapien
cttgggaggtgcctgacaatcttct

SEQ ID NO: 3455521 - DNA, 25 bp, Homo sapien
ctggaagcctgaaacaatagcacca

SEQ ID NO: 3455522 - DNA, 25 bp, Homo sapien
ctagacgtagggcagactcagtccc

SEQ ID NO: 3455523 - DNA, 25 bp, Homo sapien
taaatactgcctatcctgttgggcc

SEQ ID NO: 3455524 - DNA, 25 bp, Homo sapien
tagaaaacgccatgtggatgcagag

SEQ ID NO: 3455525 - DNA, 25 bp, Homo sapien
agagtaaggtcgagaagcaaagttc

SEQ ID NO: 3455526 - DNA, 25 bp, Homo sapien
tccgtgaagcgtctgtaaacagcct

SEQ ID NO: 3455527 - DNA, 25 bp, Homo sapien
atgaaatagagacaagaccccagta

SEQ ID NO: 3455528 - DNA, 25 bp, Homo sapien
aatagagacaagaccccagtaataa

SEQ ID NO: 3455529 - DNA, 25 bp, Homo sapien
gaccccagtaataaaggattgatat

SEQ ID NO: 3455530 - DNA, 25 bp, Homo sapien
gagacaagaccccagtaataaagga

SEQ ID NO: 3455531 - DNA, 25 bp, Homo sapien
ttatctagtgtgcaaatcaggcaca

SEQ ID NO: 3455532 - DNA, 25 bp, Homo sapien
tatctagtgtgcaaatcaggcacaa

SEQ ID NO: 3455533 - DNA, 25 bp, Homo sapien
agcaccaaaaacagccgcctgaagc

SEQ ID NO: 3455534 - DNA, 25 bp, Homo sapien
aactgccctaatgaaactcctaaca

SEQ ID NO: 3455535 - DNA, 25 bp, Homo sapien
aactcctaacatacacacaagaagg

SEQ ID NO: 3455536 - DNA, 25 bp, Homo sapien
tcaattagggaggaatccagaaact

SEQ ID NO: 3455537 - DNA, 25 bp, Homo sapien
gtacttcctcaagccaactgggcca

SEQ ID NO: 3455538 - DNA, 25 bp, Homo sapien
tgtacttcctcaagccaactgggcc

SEQ ID NO: 3455539 - DNA, 25 bp, Homo sapien
ccacagccccaatgagtaacagtgt

SEQ ID NO: 3455540 - DNA, 25 bp, Homo sapien
gccccaatgagtaacagtgtcttcc

SEQ ID NO: 3455541 - DNA, 25 bp, Homo sapien
gttagcaacgaccttgcagactaag

SEQ ID NO: 3455542 - DNA, 25 bp, Homo sapien
ccttgcagactaagtagccaccttt

SEQ ID NO: 3455543 - DNA, 25 bp, Homo sapien
ggcaggttagcaacgaccttgcaga

SEQ ID NO: 3455544 - DNA, 25 bp, Homo sapien
gcagactaagtagccacctttgagc

SEQ ID NO: 3455545 - DNA, 25 bp, Homo sapien
gagaactgatcacccagagagagct

SEQ ID NO: 3455546 - DNA, 25 bp, Homo sapien
ggagaactgatcacccagagagagc

SEQ ID NO: 3455547 - DNA, 25 bp, Homo sapien
tggagaactgatcacccagagagag

SEQ ID NO: 3455548 - DNA, 25 bp, Homo sapien
cagagctaaatctttggcagattcc

SEQ ID NO: 3455549 - DNA, 25 bp, Homo sapien
tgtggatgctgagcacagagctaaa

SEQ ID NO: 3455550 - DNA, 25 bp, Homo sapien
cattgcagtatggaaaggaactcat

SEQ ID NO: 3455551 - DNA, 25 bp, Homo sapien
ttccatggagtacaggacattgcag

SEQ ID NO: 3455552 - DNA, 25 bp, Homo sapien
caagatggcacatgatttttcaatt

SEQ ID NO: 3455553 - DNA, 25 bp, Homo sapien
taaggaaagccgactgctaaaaata

SEQ ID NO: 3455554 - DNA, 25 bp, Homo sapien
tttcaattaaggaaagccgactgct

SEQ ID NO: 3455555 - DNA, 25 bp, Homo sapien
gaaagccgactgctaaaaataggat

SEQ ID NO: 3455556 - DNA, 25 bp, Homo sapien
cttccagatgttccatctgggtata

SEQ ID NO: 3455557 - DNA, 25 bp, Homo sapien
ttccagatgttccatctgggtatag

SEQ ID NO: 3455558 - DNA, 25 bp, Homo sapien
tccagatgttccatctgggtatagg

SEQ ID NO: 3455559 - DNA, 25 bp, Homo sapien
cagacgtaggtgtagtttttcccag

SEQ ID NO: 3455560 - DNA, 25 bp, Homo sapien
caggtcaggcagttggcatcggctg

SEQ ID NO: 3455561 - DNA, 25 bp, Homo sapien
attcttctctcaccggccagacgta

SEQ ID NO: 3455562 - DNA, 25 bp, Homo sapien
tgcgaatggtacacccaggtcaggc

SEQ ID NO: 3455563 - DNA, 25 bp, Homo sapien
ggtgcagaaatgtttgatattttca

SEQ ID NO: 3455564 - DNA, 25 bp, Homo sapien
ttgatattttcattgaggtaccagc

SEQ ID NO: 3455565 - DNA, 25 bp, Homo sapien
cattgaggtaccagctttgattctc

SEQ ID NO: 3455566 - DNA, 25 bp, Homo sapien
aactgaatcagggttggtgcagaaa

SEQ ID NO: 3455567 - DNA, 25 bp, Homo sapien
tctgtcataatccttcactggcata

SEQ ID NO: 3455568 - DNA, 25 bp, Homo sapien
gctgtgggaacgcaatatgaggtca

SEQ ID NO: 3455569 - DNA, 25 bp, Homo sapien
ccagaaatgttggtaatacgggctt

SEQ ID NO: 3455570 - DNA, 25 bp, Homo sapien
gctgctcatatttacaggaggctca

SEQ ID NO: 3455571 - DNA, 25 bp, Homo sapien
ggaaacagaaacacgctagtggaag

SEQ ID NO: 3455572 - DNA, 25 bp, Homo sapien
acagaaacacgctagtggaagagac

SEQ ID NO: 3455573 - DNA, 25 bp, Homo sapien
gaaacacgctagtggaagagactcc

SEQ ID NO: 3455574 - DNA, 25 bp, Homo sapien
aaacacgctagtggaagagactccc

SEQ ID NO: 3455575 - DNA, 25 bp, Homo sapien
acatatcaggctccgggaagtttcc

SEQ ID NO: 3455576 - DNA, 25 bp, Homo sapien
gaagtttccgaagaggtatccattg

SEQ ID NO: 3455577 - DNA, 25 bp, Homo sapien
gacgacatcagtccgatgccctctg

SEQ ID NO: 3455578 - DNA, 25 bp, Homo sapien
ggctgggaacaggttgacgacatca

SEQ ID NO: 3455579 - DNA, 25 bp, Homo sapien
ctggcaggttatcatccacttccca

SEQ ID NO: 3455580 - DNA, 25 bp, Homo sapien
cagctggatctttgcacctattagt

SEQ ID NO: 3455581 - DNA, 25 bp, Homo sapien
gcagctggatctttgcacctattag

SEQ ID NO: 3455582 - DNA, 25 bp, Homo sapien
gagcagctggatctttgcacctatt

SEQ ID NO: 3455583 - DNA, 25 bp, Homo sapien
gctggatctttgcacctattagtga

SEQ ID NO: 3455584 - DNA, 25 bp, Homo sapien
tgccagaggcgtttagaggaagacc

SEQ ID NO: 3455585 - DNA, 25 bp, Homo sapien
gaatttgttatagccttgaggagca

SEQ ID NO: 3455586 - DNA, 25 bp, Homo sapien
aagtagcgcctctgttgacccttca

SEQ ID NO: 3455587 - DNA, 25 bp, Homo sapien
ttttcagctgctataaagtagcgcc

SEQ ID NO: 3455588 - DNA, 25 bp, Homo sapien
cagtataccgaaccttccagtattt

SEQ ID NO: 3455589 - DNA, 25 bp, Homo sapien
ttgtgtgaagtagagatcagagtca

SEQ ID NO: 3455590 - DNA, 25 bp, Homo sapien
caaattcagtataccgaaccttcca

SEQ ID NO: 3455591 - DNA, 25 bp, Homo sapien
tcctcctattctgttgtccccttgt

SEQ ID NO: 3455592 - DNA, 25 bp, Homo sapien
actaacagggtatcacccacctctg

SEQ ID NO: 3455593 - DNA, 25 bp, Homo sapien
tggcaaaggtcactaacagggtatc

SEQ ID NO: 3455594 - DNA, 25 bp, Homo sapien
gtaaaatgctatagaccttgtcggc

SEQ ID NO: 3455595 - DNA, 25 bp, Homo sapien
gccttgtcatagatcacaccatggg

SEQ ID NO: 3455596 - DNA, 25 bp, Homo sapien
caggcactgtccacttgtatgtgaa

SEQ ID NO: 3455597 - DNA, 25 bp, Homo sapien
tgaggacgccctttttacagactag

SEQ ID NO: 3455598 - DNA, 25 bp, Homo sapien
gaggatcaccagcagttgggcttac

SEQ ID NO: 3455599 - DNA, 25 bp, Homo sapien
ttgggcttacgctctcaggcactgt

SEQ ID NO: 3455600 - DNA, 25 bp, Homo sapien
gtcaatgctgaagggatgccagata

SEQ ID NO: 3455601 - DNA, 25 bp, Homo sapien
catgcattcggttggatttcacaaa

SEQ ID NO: 3455602 - DNA, 25 bp, Homo sapien
acagtaggtaaaactccttgtctat

SEQ ID NO: 3455603 - DNA, 25 bp, Homo sapien
tcatcaaagactgtgaacagtaggt

SEQ ID NO: 3455604 - DNA, 25 bp, Homo sapien
tttacacatgtttaagcctggctgg

SEQ ID NO: 3455605 - DNA, 25 bp, Homo sapien
gagtctcggtgagtccctcgtaggt

SEQ ID NO: 3455606 - DNA, 25 bp, Homo sapien
gctggttgccatacatgtagccgtt

SEQ ID NO: 3455607 - DNA, 25 bp, Homo sapien
cctcgtaggtggatggtgttccctt

SEQ ID NO: 3455608 - DNA, 25 bp, Homo sapien
cttgcgtccacgtgctgcttttcga

SEQ ID NO: 3455609 - DNA, 25 bp, Homo sapien
aagttcttatcatcccgtaccgctg

SEQ ID NO: 3455610 - DNA, 25 bp, Homo sapien
tctgacccatgcctctcgagaggtg

SEQ ID NO: 3455611 - DNA, 25 bp, Homo sapien
cagcggcgatgtaaaaagttcttat

SEQ ID NO: 3455612 - DNA, 25 bp, Homo sapien
ggtggtcgggctttgatctccacaa

SEQ ID NO: 3455613 - DNA, 25 bp, Homo sapien
taaaccaccttcttgtactgagagc

SEQ ID NO: 3455614 - DNA, 25 bp, Homo sapien
aattctccatccgtatattccctgt

SEQ ID NO: 3455615 - DNA, 25 bp, Homo sapien
taagtgctcctctcgtggtggtcgg

SEQ ID NO: 3455616 - DNA, 25 bp, Homo sapien
agaagtgcctgatccctatggctct

SEQ ID NO: 3455617 - DNA, 25 bp, Homo sapien
tgacttgtgcactgcttcatggtca

SEQ ID NO: 3455618 - DNA, 25 bp, Homo sapien
gcatgacttgtgcactgcttcatgg

SEQ ID NO: 3455619 - DNA, 25 bp, Homo sapien
gctctctcttgggtatctggtgcat

SEQ ID NO: 3455620 - DNA, 25 bp, Homo sapien
atatgatcaggacggtgttgcccac

SEQ ID NO: 3455621 - DNA, 25 bp, Homo sapien
ggctgagatggagtagggcctactg

SEQ ID NO: 3455622 - DNA, 25 bp, Homo sapien
gatcaggacggtgttgcccacctca

SEQ ID NO: 3455623 - DNA, 25 bp, Homo sapien
tcttaaatatgatcaggacggtgtt

SEQ ID NO: 3455624 - DNA, 25 bp, Homo sapien
cagaaggccctggaccggatctttt

SEQ ID NO: 3455625 - DNA, 25 bp, Homo sapien
ttactgttgaatagtaaacccatgg

SEQ ID NO: 3455626 - DNA, 25 bp, Homo sapien
ggatattccatctataagtttttac

SEQ ID NO: 3455627 - DNA, 25 bp, Homo sapien
catggaatacaattgggatcagaag

SEQ ID NO: 3455628 - DNA, 25 bp, Homo sapien
gagagcaaattcataatcaacgtca

SEQ ID NO: 3455629 - DNA, 25 bp, Homo sapien
tttcggcatgtaatcagaggaccca

SEQ ID NO: 3455630 - DNA, 25 bp, Homo sapien
cagtgcgcttaaaatctcgtggatc

SEQ ID NO: 3455631 - DNA, 25 bp, Homo sapien
gaggacccatcaaaccactatacgt

SEQ ID NO: 3455632 - DNA, 25 bp, Homo sapien
tagacccaaaattcagataactgag

SEQ ID NO: 3455633 - DNA, 25 bp, Homo sapien
ctagacccaaaattcagataactga

SEQ ID NO: 3455634 - DNA, 25 bp, Homo sapien
tctagacccaaaattcagataactg

SEQ ID NO: 3455635 - DNA, 25 bp, Homo sapien
agacccaaaattcagataactgaga

SEQ ID NO: 3455636 - DNA, 25 bp, Homo sapien
ttgtatcttcgttcattatgaggcc

SEQ ID NO: 3455637 - DNA, 25 bp, Homo sapien
gaaagctctcagcatgataatggat

SEQ ID NO: 3455638 - DNA, 25 bp, Homo sapien
gaggccatggagattcccaaaaatc

SEQ ID NO: 3455639 - DNA, 25 bp, Homo sapien
gtatgtatgtccacttcacttccta

SEQ ID NO: 3455640 - DNA, 25 bp, Homo sapien
cgtgtaggttgtctccatgccagca

SEQ ID NO: 3455641 - DNA, 25 bp, Homo sapien
tgtcccaggaaagagatcatacaca

SEQ ID NO: 3455642 - DNA, 25 bp, Homo sapien
catgtccctgggtgatctgcaaaca

SEQ ID NO: 3455643 - DNA, 25 bp, Homo sapien
tgacagtgtagcagccatgtccctg

SEQ ID NO: 3455644 - DNA, 25 bp, Homo sapien
gggtgagatgccactccaggagatg

SEQ ID NO: 3455645 - DNA, 25 bp, Homo sapien
gctgggtgagatgccactccaggag

SEQ ID NO: 3455646 - DNA, 25 bp, Homo sapien
actccaggagatgtggtggagtaag

SEQ ID NO: 3455647 - DNA, 25 bp, Homo sapien
cactccaggagatgtggtggagtaa

SEQ ID NO: 3455648 - DNA, 25 bp, Homo sapien
aaagaaatagagctgctctttgcca

SEQ ID NO: 3455649 - DNA, 25 bp, Homo sapien
gccaaagaaatagagctgctctttg

SEQ ID NO: 3455650 - DNA, 25 bp, Homo sapien
caaagaaatagagctgctctttgcc

SEQ ID NO: 3455651 - DNA, 25 bp, Homo sapien
aagaaatagagctgctctttgccag

SEQ ID NO: 3455652 - DNA, 25 bp, Homo sapien
agagtctgagggagagaatcaccgt

SEQ ID NO: 3455653 - DNA, 25 bp, Homo sapien
agagcacaggactggacttgctggt

SEQ ID NO: 3455654 - DNA, 25 bp, Homo sapien
gaaaaggatgaccaaggctgccttg

SEQ ID NO: 3455655 - DNA, 25 bp, Homo sapien
gcttcattgcagagcagagtctgag

SEQ ID NO: 3455656 - DNA, 25 bp, Homo sapien
tacctgaggattattcgcagcccat

SEQ ID NO: 3455657 - DNA, 25 bp, Homo sapien
gaaagcttgctctaaactctcaggg

SEQ ID NO: 3455658 - DNA, 25 bp, Homo sapien
gctaaggcaggcataccagtatcac

SEQ ID NO: 3455659 - DNA, 25 bp, Homo sapien
gctgatccaggatacagtgtcaacc

SEQ ID NO: 3455660 - DNA, 25 bp, Homo sapien
gcgcggaacaaagcgcttccctctg

SEQ ID NO: 3455661 - DNA, 25 bp, Homo sapien
tcgaccaggaggtccgggtacagcc

SEQ ID NO: 3455662 - DNA, 25 bp, Homo sapien
tgcctttgtgtctcggtgcctcagg

SEQ ID NO: 3455663 - DNA, 25 bp, Homo sapien
gcgcgcggctttcgctttccctttg

SEQ ID NO: 3455664 - DNA, 25 bp, Homo sapien
gaaatccgagaacacgtactccgtg

SEQ ID NO: 3455665 - DNA, 25 bp, Homo sapien
accgcaatgcacgtgaccatcttgt

SEQ ID NO: 3455666 - DNA, 25 bp, Homo sapien
caatcgagatctcctgcgcgaaggc

SEQ ID NO: 3455667 - DNA, 25 bp, Homo sapien
tccgtggccagttgagcgatggcca

SEQ ID NO: 3455668 - DNA, 25 bp, Homo sapien
ggccactcccctccgtcctgggcga

SEQ ID NO: 3455669 - DNA, 25 bp, Homo sapien
gcggccactcccctccgtcctgggc

SEQ ID NO: 3455670 - DNA, 25 bp, Homo sapien
cactcccctccgtcctgggcgaggc

SEQ ID NO: 3455671 - DNA, 25 bp, Homo sapien
tcccctccgtcctgggcgaggctta

SEQ ID NO: 3455672 - DNA, 25 bp, Homo sapien
ctgtgagccgtaaaatcgcagctca

SEQ ID NO: 3455673 - DNA, 25 bp, Homo sapien
tgtgagccgtaaaatcgcagctcac

SEQ ID NO: 3455674 - DNA, 25 bp, Homo sapien
agcagagtagaccagggtaccaatg

SEQ ID NO: 3455675 - DNA, 25 bp, Homo sapien
ggtaccaatgaaacacctgggcaaa

SEQ ID NO: 3455676 - DNA, 25 bp, Homo sapien
tgaggagtagggatgcgagcagagt

SEQ ID NO: 3455677 - DNA, 25 bp, Homo sapien
agaacgctttggaccataaaactgg

SEQ ID NO: 3455678 - DNA, 25 bp, Homo sapien
aatctggtggcaaggtgccagttct

SEQ ID NO: 3455679 - DNA, 25 bp, Homo sapien
tgtaaaattttaggcggctggacaa

SEQ ID NO: 3455680 - DNA, 25 bp, Homo sapien
ggacacagctattcttggcaaatct

SEQ ID NO: 3455681 - DNA, 25 bp, Homo sapien
tataagccacagtccgatcagaggg

SEQ ID NO: 3455682 - DNA, 25 bp, Homo sapien
ctatcatgacgatgtgcatccttta

SEQ ID NO: 3455683 - DNA, 25 bp, Homo sapien
tatcatgacgatgtgcatcctttac

SEQ ID NO: 3455684 - DNA, 25 bp, Homo sapien
atcatgacgatgtgcatcctttact

SEQ ID NO: 3455685 - DNA, 25 bp, Homo sapien
tcaggaggttcacgacattaaaact

SEQ ID NO: 3455686 - DNA, 25 bp, Homo sapien
tctctcatgagtgtatgcagtgcag

SEQ ID NO: 3455687 - DNA, 25 bp, Homo sapien
ggctactgatgtgggatattacaac

SEQ ID NO: 3455688 - DNA, 25 bp, Homo sapien
taaaactatgttcacgatactacgt

SEQ ID NO: 3455689 - DNA, 25 bp, Homo sapien
gcagtcaccagacaccgccaagtgt

SEQ ID NO: 3455690 - DNA, 25 bp, Homo sapien
gggcagtcaccagacaccgccaagt

SEQ ID NO: 3455691 - DNA, 25 bp, Homo sapien
ggcagtcaccagacaccgccaagtg

SEQ ID NO: 3455692 - DNA, 25 bp, Homo sapien
ccacagccaaagagagcaaatgacc

SEQ ID NO: 3455693 - DNA, 25 bp, Homo sapien
accccacagccaaagagagcaaatg

SEQ ID NO: 3455694 - DNA, 25 bp, Homo sapien
ctcaaccccacagccaaagagagca

SEQ ID NO: 3455695 - DNA, 25 bp, Homo sapien
cagccaaagagagcaaatgaccaca

SEQ ID NO: 3455696 - DNA, 25 bp, Homo sapien
ctggggaccagggctttgttggaat

SEQ ID NO: 3455697 - DNA, 25 bp, Homo sapien
ctttgttggaatgggtgtggtctaa

SEQ ID NO: 3455698 - DNA, 25 bp, Homo sapien
gtgtggtctaagtaggtggttcctc

SEQ ID NO: 3455699 - DNA, 25 bp, Homo sapien
tggttcctccaagtggccaggaagg

SEQ ID NO: 3455700 - DNA, 25 bp, Homo sapien
acaaaggcagcctgacgccaggaga

SEQ ID NO: 3455701 - DNA, 25 bp, Homo sapien
ggtttccagactcgctctgcagtga

SEQ ID NO: 3455702 - DNA, 25 bp, Homo sapien
agccacagtgggaggtttccagact

SEQ ID NO: 3455703 - DNA, 25 bp, Homo sapien
gcccagcaatatgaatccacaaagg

SEQ ID NO: 3455704 - DNA, 25 bp, Homo sapien
gcactgatcactctggccctcggag

SEQ ID NO: 3455705 - DNA, 25 bp, Homo sapien
tggctgtgcgacctcagaaaaggca

SEQ ID NO: 3455706 - DNA, 25 bp, Homo sapien
agaaaaggcactgatcactctggcc

SEQ ID NO: 3455707 - DNA, 25 bp, Homo sapien
ccatctggctgtgcgacctcagaaa

SEQ ID NO: 3455708 - DNA, 25 bp, Homo sapien
ggaggatgagcatgactgagtcctg

SEQ ID NO: 3455709 - DNA, 25 bp, Homo sapien
tgaatgaatgaggggtgactgggag

SEQ ID NO: 3455710 - DNA, 25 bp, Homo sapien
aaggaggatgagcatgactgagtcc

SEQ ID NO: 3455711 - DNA, 25 bp, Homo sapien
gaaggaggatgagcatgactgagtc

SEQ ID NO: 3455712 - DNA, 25 bp, Homo sapien
gagggccacaaattcccacaccata

SEQ ID NO: 3455713 - DNA, 25 bp, Homo sapien
actggtagagggcaaaatcaaatat

SEQ ID NO: 3455714 - DNA, 25 bp, Homo sapien
aaaaagtgtaagcagagactgaatt

SEQ ID NO: 3455715 - DNA, 25 bp, Homo sapien
ggtaccactggtagagggcaaaatc

SEQ ID NO: 3455716 - DNA, 25 bp, Homo sapien
taattcttgcccaatcagaagggtg

SEQ ID NO: 3455717 - DNA, 25 bp, Homo sapien
tccataaccacgaaagccaggcatt

SEQ ID NO: 3455718 - DNA, 25 bp, Homo sapien
acataagtgcatgacacagagtttc

SEQ ID NO: 3455719 - DNA, 25 bp, Homo sapien
cataattcatagctggctgtgggga

SEQ ID NO: 3455720 - DNA, 25 bp, Homo sapien
ttggcattctggcacgggatgaggt

SEQ ID NO: 3455721 - DNA, 25 bp, Homo sapien
agacagctgctttactttggcattc

SEQ ID NO: 3455722 - DNA, 25 bp, Homo sapien
cattctggcacgggatgaggtgttt

SEQ ID NO: 3455723 - DNA, 25 bp, Homo sapien
ctttggcattctggcacgggatgag

SEQ ID NO: 3455724 - DNA, 25 bp, Homo sapien
atgttgccaacctctctgaccccag

SEQ ID NO: 3455725 - DNA, 25 bp, Homo sapien
taagtgagagtcagactatgttgcc

SEQ ID NO: 3455726 - DNA, 25 bp, Homo sapien
gggactctatagatggctccattct

SEQ ID NO: 3455727 - DNA, 25 bp, Homo sapien
actctcaattactttactcctctgg

SEQ ID NO: 3455728 - DNA, 25 bp, Homo sapien
ttctcggtaacacctggaactgagc

SEQ ID NO: 3455729 - DNA, 25 bp, Homo sapien
caggtacaggaggatcgcaaagagc

SEQ ID NO: 3455730 - DNA, 25 bp, Homo sapien
catgtcaaggtcacgcgcactcttt

SEQ ID NO: 3455731 - DNA, 25 bp, Homo sapien
gcaggctccatctctcatgtcaagg

SEQ ID NO: 3455732 - DNA, 25 bp, Homo sapien
gaacatctgtcttctgtcggaatgg

SEQ ID NO: 3455733 - DNA, 25 bp, Homo sapien
taatgatgagtgtcagcaggcggca

SEQ ID NO: 3455734 - DNA, 25 bp, Homo sapien
gatgctgcacacaaactcgtctgag

SEQ ID NO: 3455735 - DNA, 25 bp, Homo sapien
caggagtagcattgggtcgatcccc

SEQ ID NO: 3455736 - DNA, 25 bp, Homo sapien
tctcggtagactcccgtagcctctg

SEQ ID NO: 3455737 - DNA, 25 bp, Homo sapien
ctgctgcaaaggctctcggtagact

SEQ ID NO: 3455738 - DNA, 25 bp, Homo sapien
gatgggcagggtaaagactgtcaat

SEQ ID NO: 3455739 - DNA, 25 bp, Homo sapien
ttaaatgatgggcagggtaaagact

SEQ ID NO: 3455740 - DNA, 25 bp, Homo sapien
ccagaagtctctgtcgggcattctt

SEQ ID NO: 3455741 - DNA, 25 bp, Homo sapien
gtctctgtcgggcattcttctctcc

SEQ ID NO: 3455742 - DNA, 25 bp, Homo sapien
agaagtctctgtcgggcattcttct

SEQ ID NO: 3455743 - DNA, 25 bp, Homo sapien
aagtctctgtcgggcattcttctct

SEQ ID NO: 3455744 - DNA, 25 bp, Homo sapien
ttagccaaattaaatcccatgtcgc

SEQ ID NO: 3455745 - DNA, 25 bp, Homo sapien
ccaacaggggtgctttagccaaatt

SEQ ID NO: 3455746 - DNA, 25 bp, Homo sapien
aattaaatcccatgtcgcagaagtc

SEQ ID NO: 3455747 - DNA, 25 bp, Homo sapien
tcccatgtcgcagaagtcacagatt

SEQ ID NO: 3455748 - DNA, 25 bp, Homo sapien
tacagaaaggtattgctccgaggct

SEQ ID NO: 3455749 - DNA, 25 bp, Homo sapien
gggatttccatcagccaaggttgac

SEQ ID NO: 3455750 - DNA, 25 bp, Homo sapien
tgggtcttgtctcaccacgggtaca

SEQ ID NO: 3455751 - DNA, 25 bp, Homo sapien
taaagagagctcgagtgtgggccaa

SEQ ID NO: 3455752 - DNA, 25 bp, Homo sapien
caaggatgggacctgcctatgcata

SEQ ID NO: 3455753 - DNA, 25 bp, Homo sapien
aatattccaaaaggcagacagcagc

SEQ ID NO: 3455754 - DNA, 25 bp, Homo sapien
tgggacatcacagaccctactggag

SEQ ID NO: 3455755 - DNA, 25 bp, Homo sapien
caacttggtactggtgcctgggaca

SEQ ID NO: 3455756 - DNA, 25 bp, Homo sapien
gaacctctatgttggaagtctctgc

SEQ ID NO: 3455757 - DNA, 25 bp, Homo sapien
gcaacaatgttgtttccagcctggt

SEQ ID NO: 3455758 - DNA, 25 bp, Homo sapien
tatgtccctcccagttgcaacaatg

SEQ ID NO: 3455759 - DNA, 25 bp, Homo sapien
ggaacgctgctttcacagtactcta

SEQ ID NO: 3455760 - DNA, 25 bp, Homo sapien
tcagaggcgtggactaaaatgacct

SEQ ID NO: 3455761 - DNA, 25 bp, Homo sapien
tacaagtttaaggtaggacgcagca

SEQ ID NO: 3455762 - DNA, 25 bp, Homo sapien
aaacctttgattgacccaggactga

SEQ ID NO: 3455763 - DNA, 25 bp, Homo sapien
cctgtgaggcggaacaagaacaatt

SEQ ID NO: 3455764 - DNA, 25 bp, Homo sapien
tagggaacacttgtaacactgcaga

SEQ ID NO: 3455765 - DNA, 25 bp, Homo sapien
cagtcttcttacaaaggatgcagca

SEQ ID NO: 3455766 - DNA, 25 bp, Homo sapien
ttctacaagggctttctcctctggt

SEQ ID NO: 3455767 - DNA, 25 bp, Homo sapien
gtgataaccaccaagggctttcaaa

SEQ ID NO: 3455768 - DNA, 25 bp, Homo sapien
gtttgacctttatctacagacacag

SEQ ID NO: 3455769 - DNA, 25 bp, Homo sapien
aagtcagcaggctcaaaatgcagag

SEQ ID NO: 3455770 - DNA, 25 bp, Homo sapien
tgaagaactcaaacatggtttgacc

SEQ ID NO: 3455771 - DNA, 25 bp, Homo sapien
taggtggacacaacagtgaagaact

SEQ ID NO: 3455772 - DNA, 25 bp, Homo sapien
gaggggtgaaacactacatcaccca

SEQ ID NO: 3455773 - DNA, 25 bp, Homo sapien
actacatcacccacacactgacttt

SEQ ID NO: 3455774 - DNA, 25 bp, Homo sapien
acatcacccacacactgactttcag

SEQ ID NO: 3455775 - DNA, 25 bp, Homo sapien
gctctcagaggggtgaaacactaca

SEQ ID NO: 3455776 - DNA, 25 bp, Homo sapien
attgcaggcttggaggaaggcacag

SEQ ID NO: 3455777 - DNA, 25 bp, Homo sapien
acagattgcaggcttggaggaaggc

SEQ ID NO: 3455778 - DNA, 25 bp, Homo sapien
cttctcagttgatgtgctgcacaaa

SEQ ID NO: 3455779 - DNA, 25 bp, Homo sapien
acctggcacagattgcaggcttgga

SEQ ID NO: 3455780 - DNA, 25 bp, Homo sapien
aattcgcctccattgggttctgagc

SEQ ID NO: 3455781 - DNA, 25 bp, Homo sapien
ttctgtcttagcaatagcctttcca

SEQ ID NO: 3455782 - DNA, 25 bp, Homo sapien
gaggtcgagtttttctgtcttagca

SEQ ID NO: 3455783 - DNA, 25 bp, Homo sapien
ggttctgagcagcagctcgaaatga

SEQ ID NO: 3455784 - DNA, 25 bp, Homo sapien
gcaggttggttgtcggcttgttctg

SEQ ID NO: 3455785 - DNA, 25 bp, Homo sapien
gagggcaggttggttgtcggcttgt

SEQ ID NO: 3455786 - DNA, 25 bp, Homo sapien
tctgagggcaggttggttgtcggct

SEQ ID NO: 3455787 - DNA, 25 bp, Homo sapien
ttatctgagggcaggttggttgtcg

SEQ ID NO: 3455788 - DNA, 25 bp, Homo sapien
tgccagtcatggagttagctctctc

SEQ ID NO: 3455789 - DNA, 25 bp, Homo sapien
tcctttgttcacagatgtcatgcca

SEQ ID NO: 3455790 - DNA, 25 bp, Homo sapien
ttccagagcgctgcctacttctgct

SEQ ID NO: 3455791 - DNA, 25 bp, Homo sapien
tagctctctccctgttagttttaag

SEQ ID NO: 3455792 - DNA, 25 bp, Homo sapien
taggcaatgggtaaagttctcagca

SEQ ID NO: 3455793 - DNA, 25 bp, Homo sapien
caatgggtaaagttctcagcaggga

SEQ ID NO: 3455794 - DNA, 25 bp, Homo sapien
ggcaatgggtaaagttctcagcagg

SEQ ID NO: 3455795 - DNA, 25 bp, Homo sapien
aatgggtaaagttctcagcagggaa

SEQ ID NO: 3455796 - DNA, 25 bp, Homo sapien
cagcattactacgatgcagctctga

SEQ ID NO: 3455797 - DNA, 25 bp, Homo sapien
gcattactacgatgcagctctgatg

SEQ ID NO: 3455798 - DNA, 25 bp, Homo sapien
agcattactacgatgcagctctgat

SEQ ID NO: 3455799 - DNA, 25 bp, Homo sapien
ctcctgacccagatggaggtggcaa

SEQ ID NO: 3455800 - DNA, 25 bp, Homo sapien
accaacattcccacctttctcttgg

SEQ ID NO: 3455801 - DNA, 25 bp, Homo sapien
taccaacattcccacctttctcttg

SEQ ID NO: 3455802 - DNA, 25 bp, Homo sapien
gttcatgattaggaagagccaaacc

SEQ ID NO: 3455803 - DNA, 25 bp, Homo sapien
gacgtgtcagcactgtgtctccggg

SEQ ID NO: 3455804 - DNA, 25 bp, Homo sapien
gccaaaccttcaccataacaggacg

SEQ ID NO: 3455805 - DNA, 25 bp, Homo sapien
ttctccagtgttcatgattaggaag

SEQ ID NO: 3455806 - DNA, 25 bp, Homo sapien
ctgctgggccctgactttatcttga

SEQ ID NO: 3455807 - DNA, 25 bp, Homo sapien
tgctgggccctgactttatcttgac

SEQ ID NO: 3455808 - DNA, 25 bp, Homo sapien
gactttatcttgacaaccactgctg

SEQ ID NO: 3455809 - DNA, 25 bp, Homo sapien
ccctgctgggccctgactttatctt

SEQ ID NO: 3455810 - DNA, 25 bp, Homo sapien
ctgaaagaggaaacaatgggagcag

SEQ ID NO: 3455811 - DNA, 25 bp, Homo sapien
aagaggaaacaatgggagcagaggc

SEQ ID NO: 3455812 - DNA, 25 bp, Homo sapien
tgaaagaggaaacaatgggagcaga

SEQ ID NO: 3455813 - DNA, 25 bp, Homo sapien
gaaagaggaaacaatgggagcagag

SEQ ID NO: 3455814 - DNA, 25 bp, Homo sapien
aatgtgctgatattggccaagcagt

SEQ ID NO: 3455815 - DNA, 25 bp, Homo sapien
aagcagtcagcgagcagacagccat

SEQ ID NO: 3455816 - DNA, 25 bp, Homo sapien
aagctgcgatttggaaaatgtgctg

SEQ ID NO: 3455817 - DNA, 25 bp, Homo sapien
aagaaaagctgcgatttggaaaatg

SEQ ID NO: 3455818 - DNA, 25 bp, Homo sapien
aaatagggtacaccagaggctgcag

SEQ ID NO: 3455819 - DNA, 25 bp, Homo sapien
gctgcaggagggtaggcattggtga

SEQ ID NO: 3455820 - DNA, 25 bp, Homo sapien
gcattggtgaggtcaactatgagaa

SEQ ID NO: 3455821 - DNA, 25 bp, Homo sapien
aggtcaactatgagaagtcgtgagc

SEQ ID NO: 3455822 - DNA, 25 bp, Homo sapien
cttaactccagggttctttgacagt

SEQ ID NO: 3455823 - DNA, 25 bp, Homo sapien
agagcctgcccttcttaactccagg

SEQ ID NO: 3455824 - DNA, 25 bp, Homo sapien
ctgcccttcttaactccagggttct

SEQ ID NO: 3455825 - DNA, 25 bp, Homo sapien
ttcttaactccagggttctttgaca

SEQ ID NO: 3455826 - DNA, 25 bp, Homo sapien
ggtctttggctctactgctttacag

SEQ ID NO: 3455827 - DNA, 25 bp, Homo sapien
tgggggctccaggtctttggctcta

SEQ ID NO: 3455828 - DNA, 25 bp, Homo sapien
ccaggtctttggctctactgcttta

SEQ ID NO: 3455829 - DNA, 25 bp, Homo sapien
ttggctctactgctttacagccctc

SEQ ID NO: 3455830 - DNA, 25 bp, Homo sapien
gagactgggcctcccatttgttttc

SEQ ID NO: 3455831 - DNA, 25 bp, Homo sapien
attgaggataagtccccaaggatga

SEQ ID NO: 3455832 - DNA, 25 bp, Homo sapien
ctgtcttccttgtgaagttgttctg

SEQ ID NO: 3455833 - DNA, 25 bp, Homo sapien
ccttgtgaagttgttctgtatatct

SEQ ID NO: 3455834 - DNA, 25 bp, Homo sapien
catttttaatgcagaagttttagtg

SEQ ID NO: 3455835 - DNA, 25 bp, Homo sapien
ttttaatgcagaagttttagtgggc

SEQ ID NO: 3455836 - DNA, 25 bp, Homo sapien
agtgaagttgtgagcttgacaatag

SEQ ID NO: 3455837 - DNA, 25 bp, Homo sapien
tgaatttacatttaggtgatcgcaa

SEQ ID NO: 3455838 - DNA, 25 bp, Homo sapien
tgatcgcaaaacctcaaagtgaagt

SEQ ID NO: 3455839 - DNA, 25 bp, Homo sapien
gtttatcgtgctatgcttaaccaag

SEQ ID NO: 3455840 - DNA, 25 bp, Homo sapien
tttactggggacaatattcttcctg

SEQ ID NO: 3455841 - DNA, 25 bp, Homo sapien
ctgacgtaggattttgacgcttggc

SEQ ID NO: 3455842 - DNA, 25 bp, Homo sapien
ccacaatattcttcctgatgtgact

SEQ ID NO: 3455843 - DNA, 25 bp, Homo sapien
gacgcttggccattgttcggcctat

SEQ ID NO: 3455844 - DNA, 25 bp, Homo sapien
aaaatagggttcttggcttccagct

SEQ ID NO: 3455845 - DNA, 25 bp, Homo sapien
caaaaatagggttcttggcttccag

SEQ ID NO: 3455846 - DNA, 25 bp, Homo sapien
taacagtttaatgggtcatgacagc

SEQ ID NO: 3455847 - DNA, 25 bp, Homo sapien
tatgagactatatcacacacagagg

SEQ ID NO: 3455848 - DNA, 25 bp, Homo sapien
cagcatcccagtgacagtgatgaat

SEQ ID NO: 3455849 - DNA, 25 bp, Homo sapien
tcttaggaatggttgtatgctcgag

SEQ ID NO: 3455850 - DNA, 25 bp, Homo sapien
gacaactttgacatcatgcaaacat

SEQ ID NO: 3455851 - DNA, 25 bp, Homo sapien
aaatatagtagtatagcctattgtt

SEQ ID NO: 3455852 - DNA, 25 bp, Homo sapien
acacctaggctaaatatagtagtat

SEQ ID NO: 3455853 - DNA, 25 bp, Homo sapien
gcatttttgcatctaaacatatcta

SEQ ID NO: 3455854 - DNA, 25 bp, Homo sapien
cattccatgaataaggggaaggcaa

SEQ ID NO: 3455855 - DNA, 25 bp, Homo sapien
tggctctgttccaggtcccgtatca

SEQ ID NO: 3455856 - DNA, 25 bp, Homo sapien
caggtcccgtatcaaattcttgaga

SEQ ID NO: 3455857 - DNA, 25 bp, Homo sapien
gcaactaagatttctcaagcactgg

SEQ ID NO: 3455858 - DNA, 25 bp, Homo sapien
aatgaggagaaatacccgagtagaa

SEQ ID NO: 3455859 - DNA, 25 bp, Homo sapien
ctgcaatgaggagaaatacccgagt

SEQ ID NO: 3455860 - DNA, 25 bp, Homo sapien
gcaatgaggagaaatacccgagtag

SEQ ID NO: 3455861 - DNA, 25 bp, Homo sapien
tgaggagaaatacccgagtagaata

SEQ ID NO: 3455862 - DNA, 25 bp, Homo sapien
cctgcagacaggctcgacattgcct

SEQ ID NO: 3455863 - DNA, 25 bp, Homo sapien
gagtgcatactctgcaatttgttgt

SEQ ID NO: 3455864 - DNA, 25 bp, Homo sapien
ctggcccagagtgcatactctgcaa

SEQ ID NO: 3455865 - DNA, 25 bp, Homo sapien
gacaggctcgacattgcctcttctg

SEQ ID NO: 3455866 - DNA, 25 bp, Homo sapien
atgctgctgcagtcattgcacatac

SEQ ID NO: 3455867 - DNA, 25 bp, Homo sapien
ttatgctgctgcagtcattgcacat

SEQ ID NO: 3455868 - DNA, 25 bp, Homo sapien
tatgctgctgcagtcattgcacata

SEQ ID NO: 3455869 - DNA, 25 bp, Homo sapien
caagatccggggctctacaataagt

SEQ ID NO: 3455870 - DNA, 25 bp, Homo sapien
gatccggggctctacaataagttac

SEQ ID NO: 3455871 - DNA, 25 bp, Homo sapien
agaaacagaccccatcgtaggcaag

SEQ ID NO: 3455872 - DNA, 25 bp, Homo sapien
agaccccatcgtaggcaagatccgg

SEQ ID NO: 3455873 - DNA, 25 bp, Homo sapien
gggagttccatgtcccgcccattta

SEQ ID NO: 3455874 - DNA, 25 bp, Homo sapien
tacccagtctgatttctactaggtc

SEQ ID NO: 3455875 - DNA, 25 bp, Homo sapien
atgtcccgcccatttattacccagt

SEQ ID NO: 3455876 - DNA, 25 bp, Homo sapien
ggtgcaggaggagaactccacgtgg

SEQ ID NO: 3455877 - DNA, 25 bp, Homo sapien
cagatgttgagcagctcgtccccag

SEQ ID NO: 3455878 - DNA, 25 bp, Homo sapien
agcaggagcggccaccagcatgcca

SEQ ID NO: 3455879 - DNA, 25 bp, Homo sapien
tctgggctgggcactctcttgtggt

SEQ ID NO: 3455880 - DNA, 25 bp, Homo sapien
tcatagagcttgtcttctgggctgg

SEQ ID NO: 3455881 - DNA, 25 bp, Homo sapien
cccagcttgtcgtgagggtgcagca

SEQ ID NO: 3455882 - DNA, 25 bp, Homo sapien
gatagcctggatgaagtgcttccga

SEQ ID NO: 3455883 - DNA, 25 bp, Homo sapien
gtccacagtgaaacaggctgaagtt

SEQ ID NO: 3455884 - DNA, 25 bp, Homo sapien
gccaggcatcagcagtccacagtga

SEQ ID NO: 3455885 - DNA, 25 bp, Homo sapien
gcggcacattcacaactcgctctcc

SEQ ID NO: 3455886 - DNA, 25 bp, Homo sapien
agcggcacattcacaactcgctctc

SEQ ID NO: 3455887 - DNA, 25 bp, Homo sapien
gccaccacgccagttggatttgcat

SEQ ID NO: 3455888 - DNA, 25 bp, Homo sapien
ccagttggatttgcatgtgtaagac

SEQ ID NO: 3455889 - DNA, 25 bp, Homo sapien
catgtgtaagacatgcgacagtctt

SEQ ID NO: 3455890 - DNA, 25 bp, Homo sapien
tgcatgtgtaagacatgcgacagtc

SEQ ID NO: 3455891 - DNA, 25 bp, Homo sapien
ctcttcccgaccaaggccttgtcag

SEQ ID NO: 3455892 - DNA, 25 bp, Homo sapien
tcttcccgaccaaggccttgtcagc

SEQ ID NO: 3455893 - DNA, 25 bp, Homo sapien
ttcccgaccaaggccttgtcagcac

SEQ ID NO: 3455894 - DNA, 25 bp, Homo sapien
gcctcttcccgaccaaggccttgtc

SEQ ID NO: 3455895 - DNA, 25 bp, Homo sapien
cactgggcccctttggggcagcggt

SEQ ID NO: 3455896 - DNA, 25 bp, Homo sapien
gaagtaatgggagaaagggaggcac

SEQ ID NO: 3455897 - DNA, 25 bp, Homo sapien
ggcactgggcccctttggggcagcg

SEQ ID NO: 3455898 - DNA, 25 bp, Homo sapien
ggaggcactgggcccctttggggca

SEQ ID NO: 3455899 - DNA, 25 bp, Homo sapien
acttctggagacaccgcccactgtt

SEQ ID NO: 3455900 - DNA, 25 bp, Homo sapien
cagggctggctttgaaggaattgct

SEQ ID NO: 3455901 - DNA, 25 bp, Homo sapien
ctgttccgtcgctcagggctggctt

SEQ ID NO: 3455902 - DNA, 25 bp, Homo sapien
ttgaaggaattgctccaagtcttct

SEQ ID NO: 3455903 - DNA, 25 bp, Homo sapien
tcaggaaaggaacggcaggaacagg

SEQ ID NO: 3455904 - DNA, 25 bp, Homo sapien
gggcagagctggcgaagaggcgggc

SEQ ID NO: 3455905 - DNA, 25 bp, Homo sapien
cagaccatgatggtgtaggacagtt

SEQ ID NO: 3455906 - DNA, 25 bp, Homo sapien
aggacagttcccaggatggggcaga

SEQ ID NO: 3455907 - DNA, 25 bp, Homo sapien
aggaggtaggccatggcctggcctg

SEQ ID NO: 3455908 - DNA, 25 bp, Homo sapien
ctgacccacagttggtggacatgca

SEQ ID NO: 3455909 - DNA, 25 bp, Homo sapien
cacagttggtggacatgcaggaatg

SEQ ID NO: 3455910 - DNA, 25 bp, Homo sapien
aaggaggtaggccatggcctggcct

SEQ ID NO: 3455911 - DNA, 25 bp, Homo sapien
ttgcaggcaccagccgctgaagcct

SEQ ID NO: 3455912 - DNA, 25 bp, Homo sapien
gcgtgcactggatgggaaagtcctt

SEQ ID NO: 3455913 - DNA, 25 bp, Homo sapien
tgcctcctaggccagctaagataga

SEQ ID NO: 3455914 - DNA, 25 bp, Homo sapien
ctctgtcacagaaaggggtaggcgt

SEQ ID NO: 3455915 - DNA, 25 bp, Homo sapien
gaaagtgagtccaggattcttatct

SEQ ID NO: 3455916 - DNA, 25 bp, Homo sapien
tccacacttctaggaaagtgagtcc

SEQ ID NO: 3455917 - DNA, 25 bp, Homo sapien
ctttcctgcactgtgggtcaattgg

SEQ ID NO: 3455918 - DNA, 25 bp, Homo sapien
gctgatggacaactcctcgctgaca

SEQ ID NO: 3455919 - DNA, 25 bp, Homo sapien
gatgttctcagagtagtcccagtga

SEQ ID NO: 3455920 - DNA, 25 bp, Homo sapien
ccagtgagaggcttcaagacatgaa

SEQ ID NO: 3455921 - DNA, 25 bp, Homo sapien
tgtgcccttgggcaactaaattaac

SEQ ID NO: 3455922 - DNA, 25 bp, Homo sapien
gctagggtcagactaactgggcctt

SEQ ID NO: 3455923 - DNA, 25 bp, Homo sapien
atctgagccctttttatatccttga

SEQ ID NO: 3455924 - DNA, 25 bp, Homo sapien
gagccctttttatatccttgattta

SEQ ID NO: 3455925 - DNA, 25 bp, Homo sapien
tttttctcctccaaatctgagccct

SEQ ID NO: 3455926 - DNA, 25 bp, Homo sapien
ttttctcctccaaatctgagccctt

SEQ ID NO: 3455927 - DNA, 25 bp, Homo sapien
gctcaaatgggctgtaccttgtagc

SEQ ID NO: 3455928 - DNA, 25 bp, Homo sapien
catctatacaggagctcaaatgggc

SEQ ID NO: 3455929 - DNA, 25 bp, Homo sapien
atctatacaggagctcaaatgggct

SEQ ID NO: 3455930 - DNA, 25 bp, Homo sapien
ggctgtaccttgtagcattctgagg

SEQ ID NO: 3455931 - DNA, 25 bp, Homo sapien
tactgctgagcatccctaagggaga

SEQ ID NO: 3455932 - DNA, 25 bp, Homo sapien
tggtgacccagatgcacagagctct

SEQ ID NO: 3455933 - DNA, 25 bp, Homo sapien
cagcagcctgtatctctgaggaaga

SEQ ID NO: 3455934 - DNA, 25 bp, Homo sapien
taaaaggcaccaccaactagacatg

SEQ ID NO: 3455935 - DNA, 25 bp, Homo sapien
tagctcttctatgcatctacagtga

SEQ ID NO: 3455936 - DNA, 25 bp, Homo sapien
cagtagctcttctatgcatctacag

SEQ ID NO: 3455937 - DNA, 25 bp, Homo sapien
tgcatctacagtgaccaagcagaga

SEQ ID NO: 3455938 - DNA, 25 bp, Homo sapien
catctacagtgaccaagcagagaat

SEQ ID NO: 3455939 - DNA, 25 bp, Homo sapien
aattactgttggcaagactaccaag

SEQ ID NO: 3455940 - DNA, 25 bp, Homo sapien
ttgctgtgtcaaataactggatctg

SEQ ID NO: 3455941 - DNA, 25 bp, Homo sapien
ttgaattagaatcccagcaccgggc

SEQ ID NO: 3455942 - DNA, 25 bp, Homo sapien
caccgacaattaggaacacgtttct

SEQ ID NO: 3455943 - DNA, 25 bp, Homo sapien
taaagtatcctgacaagttcctagg

SEQ ID NO: 3455944 - DNA, 25 bp, Homo sapien
tcagtctgagctgtgggccacatca

SEQ ID NO: 3455945 - DNA, 25 bp, Homo sapien
tctcatgcatcagttaggtgggtct

SEQ ID NO: 3455946 - DNA, 25 bp, Homo sapien
ggatgatgctgtgctacctacccct

SEQ ID NO: 3455947 - DNA, 25 bp, Homo sapien
gatgatagcatctcagcagcaacca

SEQ ID NO: 3455948 - DNA, 25 bp, Homo sapien
tctgcctttagtgctgatgacctta

SEQ ID NO: 3455949 - DNA, 25 bp, Homo sapien
tatgagtatagatttagcagaacag

SEQ ID NO: 3455950 - DNA, 25 bp, Homo sapien
gggccagagcactcagatctcagtc

SEQ ID NO: 3455951 - DNA, 25 bp, Homo sapien
tggccatctggagatatctaatcac

SEQ ID NO: 3455952 - DNA, 25 bp, Homo sapien
tcaggaccaagttataggaaggcag

SEQ ID NO: 3455953 - DNA, 25 bp, Homo sapien
taatctagtgctgtctccttgtaac

SEQ ID NO: 3455954 - DNA, 25 bp, Homo sapien
tgttcagctatgaagttggccatct

SEQ ID NO: 3455955 - DNA, 25 bp, Homo sapien
agatgaaaggctctatcgaatgttt

SEQ ID NO: 3455956 - DNA, 25 bp, Homo sapien
aaggctctatcgaatgtttgtcaat

SEQ ID NO: 3455957 - DNA, 25 bp, Homo sapien
cagatgaaaggctctatcgaatgtt

SEQ ID NO: 3455958 - DNA, 25 bp, Homo sapien
gatgaaaggctctatcgaatgtttg

SEQ ID NO: 3455959 - DNA, 25 bp, Homo sapien
gaagcacaaagattgcgctatatgg

SEQ ID NO: 3455960 - DNA, 25 bp, Homo sapien
tctgtggagaagatagacattagtc

SEQ ID NO: 3455961 - DNA, 25 bp, Homo sapien
cagatgcactttgtgccttggacat

SEQ ID NO: 3455962 - DNA, 25 bp, Homo sapien
gacattagtccggttttgcttcaaa

SEQ ID NO: 3455963 - DNA, 25 bp, Homo sapien
tattcatggcaatcatgacgatccc

SEQ ID NO: 3455964 - DNA, 25 bp, Homo sapien
gtgtttagtattcatggcaatcatg

SEQ ID NO: 3455965 - DNA, 25 bp, Homo sapien
tggcaatcatgacgatcccacaggg

SEQ ID NO: 3455966 - DNA, 25 bp, Homo sapien
tagtattcatggcaatcatgacgat

SEQ ID NO: 3455967 - DNA, 25 bp, Homo sapien
ttctgtatgatttccctccttcact

SEQ ID NO: 3455968 - DNA, 25 bp, Homo sapien
aagcctgtgttagactttttctgta

SEQ ID NO: 3455969 - DNA, 25 bp, Homo sapien
gcatcgtatacgtcttgaaagcctg

SEQ ID NO: 3455970 - DNA, 25 bp, Homo sapien
caatcatttatctttcctagtgcaa

SEQ ID NO: 3455971 - DNA, 25 bp, Homo sapien
gtcctggcgggctcagcgttctgat

SEQ ID NO: 3455972 - DNA, 25 bp, Homo sapien
ggcgggctcagcgttctgattccga

SEQ ID NO: 3455973 - DNA, 25 bp, Homo sapien
ctcagcgttctgattccgaggttcc

SEQ ID NO: 3455974 - DNA, 25 bp, Homo sapien
ggctcagcgttctgattccgaggtt

SEQ ID NO: 3455975 - DNA, 25 bp, Homo sapien
gcggaagcccagagttaactggaac

SEQ ID NO: 3455976 - DNA, 25 bp, Homo sapien
ggcggaagcccagagttaactggaa

SEQ ID NO: 3455977 - DNA, 25 bp, Homo sapien
aagtgtcgcgagagaaacggacgcc

SEQ ID NO: 3455978 - DNA, 25 bp, Homo sapien
cactgcgtgcggtagccaatgagag

SEQ ID NO: 3455979 - DNA, 25 bp, Homo sapien
caatgagagccgaactggacttgaa

SEQ ID NO: 3455980 - DNA, 25 bp, Homo sapien
tctacgttatccatgaagtgtcgcg

SEQ ID NO: 3455981 - DNA, 25 bp, Homo sapien
acagaagggaaaatcgccgccttgc

SEQ ID NO: 3455982 - DNA, 25 bp, Homo sapien
gaagggaaaatcgccgccttgcatc

SEQ ID NO: 3455983 - DNA, 25 bp, Homo sapien
cagaagggaaaatcgccgccttgca

SEQ ID NO: 3455984 - DNA, 25 bp, Homo sapien
agaagggaaaatcgccgccttgcat

SEQ ID NO: 3455985 - DNA, 25 bp, Homo sapien
ttctagagatgaattatgactgctt

SEQ ID NO: 3455986 - DNA, 25 bp, Homo sapien
gagatgaattatgactgctttgttc

SEQ ID NO: 3455987 - DNA, 25 bp, Homo sapien
tctagagatgaattatgactgcttt

SEQ ID NO: 3455988 - DNA, 25 bp, Homo sapien
tagagatgaattatgactgctttgt

SEQ ID NO: 3455989 - DNA, 25 bp, Homo sapien
ggtattccatcatcatttccttttt

SEQ ID NO: 3455990 - DNA, 25 bp, Homo sapien
tcatcatttcctttttctttttcca

SEQ ID NO: 3455991 - DNA, 25 bp, Homo sapien
catcatttcctttttctttttccat

SEQ ID NO: 3455992 - DNA, 25 bp, Homo sapien
gtattccatcatcatttcctttttc

SEQ ID NO: 3455993 - DNA, 25 bp, Homo sapien
cagtaggaataaggtgtccatgtgt

SEQ ID NO: 3455994 - DNA, 25 bp, Homo sapien
tttttcttgcaatcgataccactct

SEQ ID NO: 3455995 - DNA, 25 bp, Homo sapien
tcagcagcccaaagaagcaatctgc

SEQ ID NO: 3455996 - DNA, 25 bp, Homo sapien
catttttgtcatcttgctcctcatc

SEQ ID NO: 3455997 - DNA, 25 bp, Homo sapien
caatctgcttgggtctttttccatt

SEQ ID NO: 3455998 - DNA, 25 bp, Homo sapien
ggccataacagtaaaggcaggtctt

SEQ ID NO: 3455999 - DNA, 25 bp, Homo sapien
gtgcttttcctactgtcacacttcc

SEQ ID NO: 3456000 - DNA, 25 bp, Homo sapien
ggtatgatggccataacagtaaagg

SEQ ID NO: 3456001 - DNA, 25 bp, Homo sapien
tgatggccataacagtaaaggcagg

SEQ ID NO: 3456002 - DNA, 25 bp, Homo sapien
gcttaatatgtgctttcatgtacat

SEQ ID NO: 3456003 - DNA, 25 bp, Homo sapien
ctagcatgacactttgcagcttaat

SEQ ID NO: 3456004 - DNA, 25 bp, Homo sapien
taatatgtgctttcatgtacattgt

SEQ ID NO: 3456005 - DNA, 25 bp, Homo sapien
gacactttgcagcttaatatgtgct

SEQ ID NO: 3456006 - DNA, 25 bp, Homo sapien
tctagggattcaagagctcaattcc

SEQ ID NO: 3456007 - DNA, 25 bp, Homo sapien
ggttaaatgtggcatgctcttgggt

SEQ ID NO: 3456008 - DNA, 25 bp, Homo sapien
gcttcagtccaatgaataacatagg

SEQ ID NO: 3456009 - DNA, 25 bp, Homo sapien
catttactcctggtccaactaaggt

SEQ ID NO: 3456010 - DNA, 25 bp, Homo sapien
caaaattgtcttgtggtgttagatt

SEQ ID NO: 3456011 - DNA, 25 bp, Homo sapien
aaattgtcttgtggtgttagattta

SEQ ID NO: 3456012 - DNA, 25 bp, Homo sapien
gaaatctttcaactcaactcaaacc

SEQ ID NO: 3456013 - DNA, 25 bp, Homo sapien
aacaaaattgtcttgtggtgttaga

SEQ ID NO: 3456014 - DNA, 25 bp, Homo sapien
aaagaagccactctggtattattcc

SEQ ID NO: 3456015 - DNA, 25 bp, Homo sapien
gccccctgtgcaatgagctcctgaa

SEQ ID NO: 3456016 - DNA, 25 bp, Homo sapien
atccctagtgttcacgtgagtggcc

SEQ ID NO: 3456017 - DNA, 25 bp, Homo sapien
cacgtgagtggccttttcagaaagg

SEQ ID NO: 3456018 - DNA, 25 bp, Homo sapien
acagccttccacaatttcaaagagg

SEQ ID NO: 3456019 - DNA, 25 bp, Homo sapien
tgaccagggtgaggtaggactatcc

SEQ ID NO: 3456020 - DNA, 25 bp, Homo sapien
acaagcagtgcccaaatcagtagga

SEQ ID NO: 3456021 - DNA, 25 bp, Homo sapien
tctacaaggtcatcgtgattcgcca

SEQ ID NO: 3456022 - DNA, 25 bp, Homo sapien
tcagtaggattaggcaggtaaaacc

SEQ ID NO: 3456023 - DNA, 25 bp, Homo sapien
atgctttttgtcattatccacagtg

SEQ ID NO: 3456024 - DNA, 25 bp, Homo sapien
ttttgtcattatccacagtgttttt

SEQ ID NO: 3456025 - DNA, 25 bp, Homo sapien
gctttttgtcattatccacagtgtt

SEQ ID NO: 3456026 - DNA, 25 bp, Homo sapien
tatttttacttatgctttttgtcat

SEQ ID NO: 3456027 - DNA, 25 bp, Homo sapien
aattgctgctggagagactgagtga

SEQ ID NO: 3456028 - DNA, 25 bp, Homo sapien
actgggttacgtaggatggcttgaa

SEQ ID NO: 3456029 - DNA, 25 bp, Homo sapien
tgttaaataactaagtgcgtgctgg

SEQ ID NO: 3456030 - DNA, 25 bp, Homo sapien
aaagagataagccttggtggacatc

SEQ ID NO: 3456031 - DNA, 25 bp, Homo sapien
gccattagacaaacatagctgagaa

SEQ ID NO: 3456032 - DNA, 25 bp, Homo sapien
taatcctacagatggactggagcat

SEQ ID NO: 3456033 - DNA, 25 bp, Homo sapien
tatggctcttacgattttcaactgc

SEQ ID NO: 3456034 - DNA, 25 bp, Homo sapien
gatctgtgctttcaatggagtagcc

SEQ ID NO: 3456035 - DNA, 25 bp, Homo sapien
ccttctcagctcagtcgcaggcagc

SEQ ID NO: 3456036 - DNA, 25 bp, Homo sapien
gcagcccagcatgcgaggcgtctcg

SEQ ID NO: 3456037 - DNA, 25 bp, Homo sapien
agctcagtcgcaggcagcccagcat

SEQ ID NO: 3456038 - DNA, 25 bp, Homo sapien
catgcgaggcgtctcgggttgccat

SEQ ID NO: 3456039 - DNA, 25 bp, Homo sapien
ctcctcgcctgtcatgccgcagcgg

SEQ ID NO: 3456040 - DNA, 25 bp, Homo sapien
tcctcttcgcgacccgccttgggcg

SEQ ID NO: 3456041 - DNA, 25 bp, Homo sapien
cgcctcctcgcctgtcatgccgcag

SEQ ID NO: 3456042 - DNA, 25 bp, Homo sapien
ttgggcgccaccactgcggtcacca

SEQ ID NO: 3456043 - DNA, 25 bp, Homo sapien
gccgtgctctagggggccgcggccg

SEQ ID NO: 3456044 - DNA, 25 bp, Homo sapien
cccagtagcgtccgcggctggagct

SEQ ID NO: 3456045 - DNA, 25 bp, Homo sapien
gtcactcgttctccacgcccctcct

SEQ ID NO: 3456046 - DNA, 25 bp, Homo sapien
cagccagtcccactgcggtttcccc

SEQ ID NO: 3456047 - DNA, 25 bp, Homo sapien
ccaattgccctgtcactcgttctcc

SEQ ID NO: 3456048 - DNA, 25 bp, Homo sapien
ccacagtgccatcatctctggttct

SEQ ID NO: 3456049 - DNA, 25 bp, Homo sapien
tgccacagtgccatcatctctggtt

SEQ ID NO: 3456050 - DNA, 25 bp, Homo sapien
cacagtgccatcatctctggttctg

SEQ ID NO: 3456051 - DNA, 25 bp, Homo sapien
gccacagtgccatcatctctggttc

SEQ ID NO: 3456052 - DNA, 25 bp, Homo sapien
tcttaatatgacgttcttcttccag

SEQ ID NO: 3456053 - DNA, 25 bp, Homo sapien
cttaatatgacgttcttcttccagt

SEQ ID NO: 3456054 - DNA, 25 bp, Homo sapien
taatatgacgttcttcttccagtac

SEQ ID NO: 3456055 - DNA, 25 bp, Homo sapien
ttaatatgacgttcttcttccagta

SEQ ID NO: 3456056 - DNA, 25 bp, Homo sapien
taatgaacattggagcttgaaaatc

SEQ ID NO: 3456057 - DNA, 25 bp, Homo sapien
tatcgtctgtacttctcttgtgcaa

SEQ ID NO: 3456058 - DNA, 25 bp, Homo sapien
gaaaatccagtttagagccatatcg

SEQ ID NO: 3456059 - DNA, 25 bp, Homo sapien
tgaacattggagcttgaaaatccag

SEQ ID NO: 3456060 - DNA, 25 bp, Homo sapien
gggcatgtgcattccagaaggagga

SEQ ID NO: 3456061 - DNA, 25 bp, Homo sapien
aaggaggaaggcagacaaagcgggc

SEQ ID NO: 3456062 - DNA, 25 bp, Homo sapien
ggcacggagccagaaagacttcaag

SEQ ID NO: 3456063 - DNA, 25 bp, Homo sapien
gaaagacttcaagtgtcgactcctc

SEQ ID NO: 3456064 - DNA, 25 bp, Homo sapien
cccacaggcagattccttttaatgc

SEQ ID NO: 3456065 - DNA, 25 bp, Homo sapien
ggcagattccttttaatgctccaaa

SEQ ID NO: 3456066 - DNA, 25 bp, Homo sapien
attccttttaatgctccaaatccct

SEQ ID NO: 3456067 - DNA, 25 bp, Homo sapien
cacaggcagattccttttaatgctc

SEQ ID NO: 3456068 - DNA, 25 bp, Homo sapien
tcttaaatcctgaaacaagcttgag

SEQ ID NO: 3456069 - DNA, 25 bp, Homo sapien
taatttatagataggtattaatacc

SEQ ID NO: 3456070 - DNA, 25 bp, Homo sapien
tactgaacattaccaatagtctttc

SEQ ID NO: 3456071 - DNA, 25 bp, Homo sapien
gttcttcagacatcagcagaaagag

SEQ ID NO: 3456072 - DNA, 25 bp, Homo sapien
taacctgaattagaagccaaatgaa

SEQ ID NO: 3456073 - DNA, 25 bp, Homo sapien
ttagaagccaaatgaattataactg

SEQ ID NO: 3456074 - DNA, 25 bp, Homo sapien
aaataacctgaattagaagccaaat

SEQ ID NO: 3456075 - DNA, 25 bp, Homo sapien
tgaattataactgtgacaactaaaa

SEQ ID NO: 3456076 - DNA, 25 bp, Homo sapien
caattatgaacttgggaacagggaa

SEQ ID NO: 3456077 - DNA, 25 bp, Homo sapien
attatgaacttgggaacagggaact

SEQ ID NO: 3456078 - DNA, 25 bp, Homo sapien
atgaacttgggaacagggaactgaa

SEQ ID NO: 3456079 - DNA, 25 bp, Homo sapien
tgactagatttgttacattagaaac

SEQ ID NO: 3456080 - DNA, 25 bp, Homo sapien
gtagtattgcttgtaccaagacgca

SEQ ID NO: 3456081 - DNA, 25 bp, Homo sapien
cccaaggcccttgtcgtcaaggaat

SEQ ID NO: 3456082 - DNA, 25 bp, Homo sapien
gacgcacaggactcataaaccaaag

SEQ ID NO: 3456083 - DNA, 25 bp, Homo sapien
caaataagtctgacttgccggctca

SEQ ID NO: 3456084 - DNA, 25 bp, Homo sapien
gaaggtacaggaggctcgagacctt

SEQ ID NO: 3456085 - DNA, 25 bp, Homo sapien
tcactgtggcccgaaccctcgcctt

SEQ ID NO: 3456086 - DNA, 25 bp, Homo sapien
ttctaaagcagctgccgcgcaggag

SEQ ID NO: 3456087 - DNA, 25 bp, Homo sapien
ggaggctcgagaccttctaaagcag

SEQ ID NO: 3456088 - DNA, 25 bp, Homo sapien
tcaactgatccggtttccctctgcg

SEQ ID NO: 3456089 - DNA, 25 bp, Homo sapien
aactgatccggtttccctctgcgcg

SEQ ID NO: 3456090 - DNA, 25 bp, Homo sapien
ctctctcaactgatccggtttccct

SEQ ID NO: 3456091 - DNA, 25 bp, Homo sapien
tctcaactgatccggtttccctctg

SEQ ID NO: 3456092 - DNA, 25 bp, Homo sapien
caccgcccgtccctttcttccactg

SEQ ID NO: 3456093 - DNA, 25 bp, Homo sapien
ggcggtcccagaatgcaaaggccgc

SEQ ID NO: 3456094 - DNA, 25 bp, Homo sapien
ccagaatgcaaaggccgcgggccct

SEQ ID NO: 3456095 - DNA, 25 bp, Homo sapien
gggccgcgccccacaagcgcctcat

SEQ ID NO: 3456096 - DNA, 25 bp, Homo sapien
tgtagctgcggctccagccgtcgct

SEQ ID NO: 3456097 - DNA, 25 bp, Homo sapien
ctccagccgtcgctgccgctcgccg

SEQ ID NO: 3456098 - DNA, 25 bp, Homo sapien
cggctccagccgtcgctgccgctcg

SEQ ID NO: 3456099 - DNA, 25 bp, Homo sapien
ctgtagctgcggctccagccgtcgc

SEQ ID NO: 3456100 - DNA, 25 bp, Homo sapien
cacgcgtccgcaggcgtggaggagc

SEQ ID NO: 3456101 - DNA, 25 bp, Homo sapien
gctgcctccgctcgccacgcgtccg

SEQ ID NO: 3456102 - DNA, 25 bp, Homo sapien
tggaggagcggcaccggctctcatg

SEQ ID NO: 3456103 - DNA, 25 bp, Homo sapien
gtggaggagcggcaccggctctcat

SEQ ID NO: 3456104 - DNA, 25 bp, Homo sapien
gccagcacacagacggtccatggca

SEQ ID NO: 3456105 - DNA, 25 bp, Homo sapien
ccccagcaagcgtaggtgatcagcg

SEQ ID NO: 3456106 - DNA, 25 bp, Homo sapien
agcgccgtacacgtcaagccggcgg

SEQ ID NO: 3456107 - DNA, 25 bp, Homo sapien
agcacacagacggtccatggcagcc

SEQ ID NO: 3456108 - DNA, 25 bp, Homo sapien
cacagcagcacgcccaccggtcgcg

SEQ ID NO: 3456109 - DNA, 25 bp, Homo sapien
cagcacgcccaccggtcgcgacggg

SEQ ID NO: 3456110 - DNA, 25 bp, Homo sapien
agcagcacgcccaccggtcgcgacg

SEQ ID NO: 3456111 - DNA, 25 bp, Homo sapien
cagcagcacgcccaccggtcgcgac

SEQ ID NO: 3456112 - DNA, 25 bp, Homo sapien
ccagtggaagtagcggcgatagacc

SEQ ID NO: 3456113 - DNA, 25 bp, Homo sapien
aagaggttacttgccaggcttcgca

SEQ ID NO: 3456114 - DNA, 25 bp, Homo sapien
taaggcacaaagacgtccgagtccg

SEQ ID NO: 3456115 - DNA, 25 bp, Homo sapien
caaagcgctcgtagttggcacggtc

SEQ ID NO: 3456116 - DNA, 25 bp, Homo sapien
cttgtgaaagaagtcagcggcccct

SEQ ID NO: 3456117 - DNA, 25 bp, Homo sapien
ccagaaaaacgtgaatcgggaacag

SEQ ID NO: 3456118 - DNA, 25 bp, Homo sapien
catgatgcggcagtcaaggagatgc

SEQ ID NO: 3456119 - DNA, 25 bp, Homo sapien
caaagggagcccaattgctagctgt

SEQ ID NO: 3456120 - DNA, 25 bp, Homo sapien
gctgaggctcaggactactactaat

SEQ ID NO: 3456121 - DNA, 25 bp, Homo sapien
tagcacgtggaactaggaggtccca

SEQ ID NO: 3456122 - DNA, 25 bp, Homo sapien
tgtggaatcccggtaacaccaagat

SEQ ID NO: 3456123 - DNA, 25 bp, Homo sapien
caaccttagggtgccagttagtaga

SEQ ID NO: 3456124 - DNA, 25 bp, Homo sapien
tgcggacagctaccaaattcctttg

SEQ ID NO: 3456125 - DNA, 25 bp, Homo sapien
tacttaggccaaaatgttgcggaca

SEQ ID NO: 3456126 - DNA, 25 bp, Homo sapien
tatagatggcctaaacctgcaatca

SEQ ID NO: 3456127 - DNA, 25 bp, Homo sapien
gcaatcaccaatctgtgaacaggga

SEQ ID NO: 3456128 - DNA, 25 bp, Homo sapien
gggaagtactcagcttagatagcca

SEQ ID NO: 3456129 - DNA, 25 bp, Homo sapien
tctcaaggtggttcacagggaaaac

SEQ ID NO: 3456130 - DNA, 25 bp, Homo sapien
tgtgatccgaagtgagtagctccgc

SEQ ID NO: 3456131 - DNA, 25 bp, Homo sapien
ggaacttcttcgctaccccatggta

SEQ ID NO: 3456132 - DNA, 25 bp, Homo sapien
agtagtcccttctgtgtgagctgca

SEQ ID NO: 3456133 - DNA, 25 bp, Homo sapien
cctctaatgtcaatggccagggtag

SEQ ID NO: 3456134 - DNA, 25 bp, Homo sapien
ccctacagaagcgtgcagaaggtgg

SEQ ID NO: 3456135 - DNA, 25 bp, Homo sapien
acctgggtcctttgcagtagtccct

SEQ ID NO: 3456136 - DNA, 25 bp, Homo sapien
tgtgacggcgaaactgcctggaggc

SEQ ID NO: 3456137 - DNA, 25 bp, Homo sapien
caagagctgcaaagtctcagttagg

SEQ ID NO: 3456138 - DNA, 25 bp, Homo sapien
ctacagatggcgacggtgtgacggc

SEQ ID NO: 3456139 - DNA, 25 bp, Homo sapien
ctggaaatgcgtccgaggcccgtgc

SEQ ID NO: 3456140 - DNA, 25 bp, Homo sapien
ccttcactcgggctcttccactcat

SEQ ID NO: 3456141 - DNA, 25 bp, Homo sapien
ggccttcactcgggctcttccactc

SEQ ID NO: 3456142 - DNA, 25 bp, Homo sapien
ctggccttcactcgggctcttccac

SEQ ID NO: 3456143 - DNA, 25 bp, Homo sapien
ctctggccttcactcgggctcttcc

SEQ ID NO: 3456144 - DNA, 25 bp, Homo sapien
atggcgaggcttggatgcgccccac

SEQ ID NO: 3456145 - DNA, 25 bp, Homo sapien
aatggcgaggcttggatgcgcccca

SEQ ID NO: 3456146 - DNA, 25 bp, Homo sapien
caatggcgaggcttggatgcgcccc

SEQ ID NO: 3456147 - DNA, 25 bp, Homo sapien
tgcggcacagatgcacatggacctc

SEQ ID NO: 3456148 - DNA, 25 bp, Homo sapien
cggcacagatgcacatggacctcat

SEQ ID NO: 3456149 - DNA, 25 bp, Homo sapien
cagagggcatgcggcacagatgcac

SEQ ID NO: 3456150 - DNA, 25 bp, Homo sapien
gagggcatgcggcacagatgcacat

SEQ ID NO: 3456151 - DNA, 25 bp, Homo sapien
cgttggttgagatcctgcttgttcc

SEQ ID NO: 3456152 - DNA, 25 bp, Homo sapien
aagaagccattgctagaggatgctt

SEQ ID NO: 3456153 - DNA, 25 bp, Homo sapien
gagatcctgcttgttcccaagaagc

SEQ ID NO: 3456154 - DNA, 25 bp, Homo sapien
tgttactaagatcaacagatctagg

SEQ ID NO: 3456155 - DNA, 25 bp, Homo sapien
gttttacaatttctcacatgtgcca

SEQ ID NO: 3456156 - DNA, 25 bp, Homo sapien
tcaccagaagatatcccatatttat

SEQ ID NO: 3456157 - DNA, 25 bp, Homo sapien
ggtacagatactcaaatccataaag

SEQ ID NO: 3456158 - DNA, 25 bp, Homo sapien
tttccatgaaggtacttccagcatc

SEQ ID NO: 3456159 - DNA, 25 bp, Homo sapien
gatggcaccgtcgaatgcttttgct

SEQ ID NO: 3456160 - DNA, 25 bp, Homo sapien
cagtttcacaggtattccactggaa

SEQ ID NO: 3456161 - DNA, 25 bp, Homo sapien
tactggtatagctgccagtcttggg

SEQ ID NO: 3456162 - DNA, 25 bp, Homo sapien
tttgtgacagaaaaaggatggcacc

SEQ ID NO: 3456163 - DNA, 25 bp, Homo sapien
gatgcacacgggagaacttgatggc

SEQ ID NO: 3456164 - DNA, 25 bp, Homo sapien
ccctcttcagggtgatagtcatctt

SEQ ID NO: 3456165 - DNA, 25 bp, Homo sapien
aagatgatattgaagacctggatgc

SEQ ID NO: 3456166 - DNA, 25 bp, Homo sapien
tatagtctcacctctttgagtttca

SEQ ID NO: 3456167 - DNA, 25 bp, Homo sapien
ggcccagccgaggatcttatttcta

SEQ ID NO: 3456168 - DNA, 25 bp, Homo sapien
gccatgcctgcaggcctttttgacc

SEQ ID NO: 3456169 - DNA, 25 bp, Homo sapien
ggtcaattagccattatgggtagta

SEQ ID NO: 3456170 - DNA, 25 bp, Homo sapien
taacattctggttagcttggatggg

SEQ ID NO: 3456171 - DNA, 25 bp, Homo sapien
ccgtccaatttggtacatggacaac

SEQ ID NO: 3456172 - DNA, 25 bp, Homo sapien
ccaatttggtacatggacaactttt

SEQ ID NO: 3456173 - DNA, 25 bp, Homo sapien
tgaaggattatagaagttccgtcca

SEQ ID NO: 3456174 - DNA, 25 bp, Homo sapien
tagaagttccgtccaatttggtaca

SEQ ID NO: 3456175 - DNA, 25 bp, Homo sapien
cagaaatggcaaacccaggccaaag

SEQ ID NO: 3456176 - DNA, 25 bp, Homo sapien
atggcaaacccaggccaaagggata

SEQ ID NO: 3456177 - DNA, 25 bp, Homo sapien
tgacacagaaatggcaaacccaggc

SEQ ID NO: 3456178 - DNA, 25 bp, Homo sapien
tatgacacagaaatggcaaacccag

SEQ ID NO: 3456179 - DNA, 25 bp, Homo sapien
gagagcagtcatgaattccagaacc

SEQ ID NO: 3456180 - DNA, 25 bp, Homo sapien
tattagctgcttctcacacgtctgg

SEQ ID NO: 3456181 - DNA, 25 bp, Homo sapien
tccagaaccgtctcattccggagga

SEQ ID NO: 3456182 - DNA, 25 bp, Homo sapien
ggtgaaacaggacaagccagttctt

SEQ ID NO: 3456183 - DNA, 25 bp, Homo sapien
atctcggtgccatcccgcttctgaa

SEQ ID NO: 3456184 - DNA, 25 bp, Homo sapien
cacataggtgatctcggtgccatcc

SEQ ID NO: 3456185 - DNA, 25 bp, Homo sapien
tagtaatccacataggtgatctcgg

SEQ ID NO: 3456186 - DNA, 25 bp, Homo sapien
ctgcttgtagtaatccacataggtg

SEQ ID NO: 3456187 - DNA, 25 bp, Homo sapien
aaagcagagctcaggtatcaggtgg

SEQ ID NO: 3456188 - DNA, 25 bp, Homo sapien
ttcaggtccgatacagtaatatcat

SEQ ID NO: 3456189 - DNA, 25 bp, Homo sapien
ggctgattcaggtccgatacagtaa

SEQ ID NO: 3456190 - DNA, 25 bp, Homo sapien
taacagactaacaagcatgggctga

SEQ ID NO: 3456191 - DNA, 25 bp, Homo sapien
tgaaggactgagacgtgtcttttca

SEQ ID NO: 3456192 - DNA, 25 bp, Homo sapien
tgctgccggcctgaaggactgagac

SEQ ID NO: 3456193 - DNA, 25 bp, Homo sapien
ctgccggcctgaaggactgagacgt

SEQ ID NO: 3456194 - DNA, 25 bp, Homo sapien
cggcctgaaggactgagacgtgtct

SEQ ID NO: 3456195 - DNA, 25 bp, Homo sapien
caggtctctagttcaaagcgagcat

SEQ ID NO: 3456196 - DNA, 25 bp, Homo sapien
ttctgaaggcacaatccggccagtc

SEQ ID NO: 3456197 - DNA, 25 bp, Homo sapien
tccggccagtcagagatatctggct

SEQ ID NO: 3456198 - DNA, 25 bp, Homo sapien
tagttcaaagcgagcattggtattc

SEQ ID NO: 3456199 - DNA, 25 bp, Homo sapien
gcagttcagaaagctctcggcaaca

SEQ ID NO: 3456200 - DNA, 25 bp, Homo sapien
ttaaatcccatggaacctgcaactc

SEQ ID NO: 3456201 - DNA, 25 bp, Homo sapien
tcaaccaggtattcaaagactgtgc

SEQ ID NO: 3456202 - DNA, 25 bp, Homo sapien
caagttcgaatatccttggaccagt

SEQ ID NO: 3456203 - DNA, 25 bp, Homo sapien
tgctgtatagctctaacaaatgcag

SEQ ID NO: 3456204 - DNA, 25 bp, Homo sapien
ttgctgtatagctctaacaaatgca

SEQ ID NO: 3456205 - DNA, 25 bp, Homo sapien
attgctgtatagctctaacaaatgc

SEQ ID NO: 3456206 - DNA, 25 bp, Homo sapien
gctgtatagctctaacaaatgcagc

SEQ ID NO: 3456207 - DNA, 25 bp, Homo sapien
atggaatcataataggtcttctgat

SEQ ID NO: 3456208 - DNA, 25 bp, Homo sapien
tggaatcataataggtcttctgatt

SEQ ID NO: 3456209 - DNA, 25 bp, Homo sapien
catctgcatagcgatcttggtggcg

SEQ ID NO: 3456210 - DNA, 25 bp, Homo sapien
ttggtggcgatactcatcatcatgc

SEQ ID NO: 3456211 - DNA, 25 bp, Homo sapien
ccctgtttattcaaggtccgagcaa

SEQ ID NO: 3456212 - DNA, 25 bp, Homo sapien
gctcgcctccgagcttgcaagtcat

SEQ ID NO: 3456213 - DNA, 25 bp, Homo sapien
gttaacactggccacgcatccaaca

SEQ ID NO: 3456214 - DNA, 25 bp, Homo sapien
ctgagtgcatctttacagacatcaa

SEQ ID NO: 3456215 - DNA, 25 bp, Homo sapien
catcaataccgaccaccatcaggga

SEQ ID NO: 3456216 - DNA, 25 bp, Homo sapien
gcatccaacaaccatcacgtccttg

SEQ ID NO: 3456217 - DNA, 25 bp, Homo sapien
gaaagagtggctgcaaaccctactg

SEQ ID NO: 3456218 - DNA, 25 bp, Homo sapien
aatgagcatttcagggcaccaccct

SEQ ID NO: 3456219 - DNA, 25 bp, Homo sapien
ccctagggaaaacagatgagagcct

SEQ ID NO: 3456220 - DNA, 25 bp, Homo sapien
gataccttgcctatggagcacctca

SEQ ID NO: 3456221 - DNA, 25 bp, Homo sapien
ctgaaggatacagcgggaaaaccac

SEQ ID NO: 3456222 - DNA, 25 bp, Homo sapien
gaaaactttcaagcaatctgcaaca

SEQ ID NO: 3456223 - DNA, 25 bp, Homo sapien
atgaaaactttcaagcaatctgcaa

SEQ ID NO: 3456224 - DNA, 25 bp, Homo sapien
aagcaatctgcaacatcagtcattg

SEQ ID NO: 3456225 - DNA, 25 bp, Homo sapien
tttcaagcaatctgcaacatcagtc

SEQ ID NO: 3456226 - DNA, 25 bp, Homo sapien
ctatgtggtcttctataagcatgtg

SEQ ID NO: 3456227 - DNA, 25 bp, Homo sapien
tatgtggtcttctataagcatgtgg

SEQ ID NO: 3456228 - DNA, 25 bp, Homo sapien
tgtggtcttctataagcatgtggat

SEQ ID NO: 3456229 - DNA, 25 bp, Homo sapien
gtggtcttctataagcatgtggatt

SEQ ID NO: 3456230 - DNA, 25 bp, Homo sapien
tgcagaatttggtgtcagtaagaaa

SEQ ID NO: 3456231 - DNA, 25 bp, Homo sapien
tacaccagcacggtacacaattatc

SEQ ID NO: 3456232 - DNA, 25 bp, Homo sapien
cagctgtgggacttcatattcaata

SEQ ID NO: 3456233 - DNA, 25 bp, Homo sapien
ggcaaatcatgattgtacttgtacc

SEQ ID NO: 3456234 - DNA, 25 bp, Homo sapien
tacttgtaccatttgttgagtgctc

SEQ ID NO: 3456235 - DNA, 25 bp, Homo sapien
ttcgttacgtgttgcttctgaatcc

SEQ ID NO: 3456236 - DNA, 25 bp, Homo sapien
aagaatcgtggcatgcacttcttcc

SEQ ID NO: 3456237 - DNA, 25 bp, Homo sapien
ctgtacagtgcggttcatttcggta

SEQ ID NO: 3456238 - DNA, 25 bp, Homo sapien
ttcatttcggtaaagaatcgtggca

SEQ ID NO: 3456239 - DNA, 25 bp, Homo sapien
tagatgacattatagtaggtaggac

SEQ ID NO: 3456240 - DNA, 25 bp, Homo sapien
ggcttcaagccgttgtcatcataga

SEQ ID NO: 3456241 - DNA, 25 bp, Homo sapien
tgtaagtctctgcatatggtcgggc

SEQ ID NO: 3456242 - DNA, 25 bp, Homo sapien
taggactaacagttccccggcaggc

SEQ ID NO: 3456243 - DNA, 25 bp, Homo sapien
tgaatgctttgtgccaccagaaagg

SEQ ID NO: 3456244 - DNA, 25 bp, Homo sapien
gcttgtgagcatactgacatggtgc

SEQ ID NO: 3456245 - DNA, 25 bp, Homo sapien
tccagactgggttctttatgaatgc

SEQ ID NO: 3456246 - DNA, 25 bp, Homo sapien
gtagaagagatggttggctaattcc

SEQ ID NO: 3456247 - DNA, 25 bp, Homo sapien
ccttgagcttatggcagatttgcac

SEQ ID NO: 3456248 - DNA, 25 bp, Homo sapien
ccatctagtgatgccagtagttcat

SEQ ID NO: 3456249 - DNA, 25 bp, Homo sapien
tttcctagacatgaaaactaagctc

SEQ ID NO: 3456250 - DNA, 25 bp, Homo sapien
caatgaaaatttaccccaagcatac

SEQ ID NO: 3456251 - DNA, 25 bp, Homo sapien
tgaaggactctattcacacagcagt

SEQ ID NO: 3456252 - DNA, 25 bp, Homo sapien
aattgtttgttgaagcctatgacac

SEQ ID NO: 3456253 - DNA, 25 bp, Homo sapien
atgaaggactctattcacacagcag

SEQ ID NO: 3456254 - DNA, 25 bp, Homo sapien
tttgttgaagcctatgacactgcca

SEQ ID NO: 3456255 - DNA, 25 bp, Homo sapien
gctattgttcgatgagatcacaaag

SEQ ID NO: 3456256 - DNA, 25 bp, Homo sapien
tgttcgatgagatcacaaagatatg

SEQ ID NO: 3456257 - DNA, 25 bp, Homo sapien
tcgatgagatcacaaagatatgcaa

SEQ ID NO: 3456258 - DNA, 25 bp, Homo sapien
cagatgctattgttcgatgagatca

SEQ ID NO: 3456259 - DNA, 25 bp, Homo sapien
ggatagggttctttcagaaaacata

SEQ ID NO: 3456260 - DNA, 25 bp, Homo sapien
aggaacaactgcctgaggatagggt

SEQ ID NO: 3456261 - DNA, 25 bp, Homo sapien
tcttaggaacaactgcctgaggata

SEQ ID NO: 3456262 - DNA, 25 bp, Homo sapien
ctgaggatagggttctttcagaaaa

SEQ ID NO: 3456263 - DNA, 25 bp, Homo sapien
caaaggatcatttccagcgctgaca

SEQ ID NO: 3456264 - DNA, 25 bp, Homo sapien
catttccagcgctgacatatttgtg

SEQ ID NO: 3456265 - DNA, 25 bp, Homo sapien
caaagccaaaggatcatttccagcg

SEQ ID NO: 3456266 - DNA, 25 bp, Homo sapien
ggatcatttccagcgctgacatatt

SEQ ID NO: 3456267 - DNA, 25 bp, Homo sapien
ggctgctcatctgtattgtagttgt

SEQ ID NO: 3456268 - DNA, 25 bp, Homo sapien
attcttagagaaggaatcttgggtg

SEQ ID NO: 3456269 - DNA, 25 bp, Homo sapien
tatctgctgtccaatttgtgcttta

SEQ ID NO: 3456270 - DNA, 25 bp, Homo sapien
caaccatgctatctcatcccattgt

SEQ ID NO: 3456271 - DNA, 25 bp, Homo sapien
ttttaaggaaacgatgtcttgtgga

SEQ ID NO: 3456272 - DNA, 25 bp, Homo sapien
aacgatgtcttgtggacccaggata

SEQ ID NO: 3456273 - DNA, 25 bp, Homo sapien
gaaacgatgtcttgtggacccagga

SEQ ID NO: 3456274 - DNA, 25 bp, Homo sapien
taaggaaacgatgtcttgtggaccc

SEQ ID NO: 3456275 - DNA, 25 bp, Homo sapien
tcctccgtttgctgagctccatgtg

SEQ ID NO: 3456276 - DNA, 25 bp, Homo sapien
ccgtttgctgagctccatgtgtgtg

SEQ ID NO: 3456277 - DNA, 25 bp, Homo sapien
gggtccttgtcaaacatccatgaaa

SEQ ID NO: 3456278 - DNA, 25 bp, Homo sapien
tacatcctccgtttgctgagctcca

SEQ ID NO: 3456279 - DNA, 25 bp, Homo sapien
taaaacagctcccatagaccaggag

SEQ ID NO: 3456280 - DNA, 25 bp, Homo sapien
gagggtctagcgtcccatctgaggc

SEQ ID NO: 3456281 - DNA, 25 bp, Homo sapien
ccaggagtccaggttcagtgtctcg

SEQ ID NO: 3456282 - DNA, 25 bp, Homo sapien
tggtggtcttccaagcacacgtggt

SEQ ID NO: 3456283 - DNA, 25 bp, Homo sapien
gagtgattctcattagatttcaggg

SEQ ID NO: 3456284 - DNA, 25 bp, Homo sapien
aatgacaagccatcgagtccatgat

SEQ ID NO: 3456285 - DNA, 25 bp, Homo sapien
ctgcctgtggctgaggtattcttaa

SEQ ID NO: 3456286 - DNA, 25 bp, Homo sapien
tccatgataatcagctgaggagtga

SEQ ID NO: 3456287 - DNA, 25 bp, Homo sapien
ttctgaatagccacgggccggctgg

SEQ ID NO: 3456288 - DNA, 25 bp, Homo sapien
gacaacttggtgtattctggccaat

SEQ ID NO: 3456289 - DNA, 25 bp, Homo sapien
tttccccatgacagtcctacgtcca

SEQ ID NO: 3456290 - DNA, 25 bp, Homo sapien
ggagctgaacgaagggatgtgggca

SEQ ID NO: 3456291 - DNA, 25 bp, Homo sapien
tgtgtaatcttaggaaggtcgttta

SEQ ID NO: 3456292 - DNA, 25 bp, Homo sapien
ctgtgtaatcttaggaaggtcgttt

SEQ ID NO: 3456293 - DNA, 25 bp, Homo sapien
gctgtgtaatcttaggaaggtcgtt

SEQ ID NO: 3456294 - DNA, 25 bp, Homo sapien
gcctggcctgttcactcccatgtcc

SEQ ID NO: 3456295 - DNA, 25 bp, Homo sapien
tctgtggttgtctatttgatggttc

SEQ ID NO: 3456296 - DNA, 25 bp, Homo sapien
cgcatctggcacctagaaggtgctc

SEQ ID NO: 3456297 - DNA, 25 bp, Homo sapien
caggagccagcaccgcatctggcac

SEQ ID NO: 3456298 - DNA, 25 bp, Homo sapien
cactttccacccttatcttcgtcag

SEQ ID NO: 3456299 - DNA, 25 bp, Homo sapien
ttatcttcgtcagcctccagcatca

SEQ ID NO: 3456300 - DNA, 25 bp, Homo sapien
cagctcctgatttattgcccacttt

SEQ ID NO: 3456301 - DNA, 25 bp, Homo sapien
ttgctgggaatgttgcaacagctcc

SEQ ID NO: 3456302 - DNA, 25 bp, Homo sapien
cttcctttgtgttccagctactgtg

SEQ ID NO: 3456303 - DNA, 25 bp, Homo sapien
tccagctactgtgtggaagggcccg

SEQ ID NO: 3456304 - DNA, 25 bp, Homo sapien
aatttttatgagattatgttgaggc

SEQ ID NO: 3456305 - DNA, 25 bp, Homo sapien
ttatgttgaggcttggctgatcttc

SEQ ID NO: 3456306 - DNA, 25 bp, Homo sapien
atgttaccagtagaaggtgttcagg

SEQ ID NO: 3456307 - DNA, 25 bp, Homo sapien
aaatatatgttaccagtagaaggtg

SEQ ID NO: 3456308 - DNA, 25 bp, Homo sapien
aaaatatatgttaccagtagaaggt

SEQ ID NO: 3456309 - DNA, 25 bp, Homo sapien
tatatgttaccagtagaaggtgttc

SEQ ID NO: 3456310 - DNA, 25 bp, Homo sapien
tctttagattgttagggtcaaattc

SEQ ID NO: 3456311 - DNA, 25 bp, Homo sapien
catcccaatggtggaggatgtagcc

SEQ ID NO: 3456312 - DNA, 25 bp, Homo sapien
tagccaagcggtgaatcgggtggaa

SEQ ID NO: 3456313 - DNA, 25 bp, Homo sapien
cagtgacaccaggtagaatagacag

SEQ ID NO: 3456314 - DNA, 25 bp, Homo sapien
tggatgacgtctaactgccagtctt

SEQ ID NO: 3456315 - DNA, 25 bp, Homo sapien
gcaataagctaacccaagtttctga

SEQ ID NO: 3456316 - DNA, 25 bp, Homo sapien
aactcttgtaaacccgctggaattg

SEQ ID NO: 3456317 - DNA, 25 bp, Homo sapien
caagtaccctatctcctggcctgat

SEQ ID NO: 3456318 - DNA, 25 bp, Homo sapien
taaatgaggagaacgaagtgcagtc

SEQ ID NO: 3456319 - DNA, 25 bp, Homo sapien
cgacccgagtgtagacgctcaagag

SEQ ID NO: 3456320 - DNA, 25 bp, Homo sapien
tcggaatgcgccctactgtaaatgg

SEQ ID NO: 3456321 - DNA, 25 bp, Homo sapien
ccgtgaaagctgtgatccccataaa

SEQ ID NO: 3456322 - DNA, 25 bp, Homo sapien
ttctctcctggcatttcagagagct

SEQ ID NO: 3456323 - DNA, 25 bp, Homo sapien
gtttctctcctggcatttcagagag

SEQ ID NO: 3456324 - DNA, 25 bp, Homo sapien
tgtttctctcctggcatttcagaga

SEQ ID NO: 3456325 - DNA, 25 bp, Homo sapien
tttctctcctggcatttcagagagc

SEQ ID NO: 3456326 - DNA, 25 bp, Homo sapien
cgttccacgaatgccattctggggt

SEQ ID NO: 3456327 - DNA, 25 bp, Homo sapien
cattctggggtatgctgctcttatc

SEQ ID NO: 3456328 - DNA, 25 bp, Homo sapien
tatgctgctcttatcctggtaggtg

SEQ ID NO: 3456329 - DNA, 25 bp, Homo sapien
cacgaatgccattctggggtatgct

SEQ ID NO: 3456330 - DNA, 25 bp, Homo sapien
ggcccagggcatcacgatagaggaa

SEQ ID NO: 3456331 - DNA, 25 bp, Homo sapien
cacgatagaggaaagccttgcttgc

SEQ ID NO: 3456332 - DNA, 25 bp, Homo sapien
gaaagccttgcttgcaaatccatct

SEQ ID NO: 3456333 - DNA, 25 bp, Homo sapien
cagccatgagctttttatacaaaga

SEQ ID NO: 3456334 - DNA, 25 bp, Homo sapien
tctggtgctggcaaaatgatgaatt

SEQ ID NO: 3456335 - DNA, 25 bp, Homo sapien
cgctctggtgctggcaaaatgatga

SEQ ID NO: 3456336 - DNA, 25 bp, Homo sapien
ccgctctggtgctggcaaaatgatg

SEQ ID NO: 3456337 - DNA, 25 bp, Homo sapien
taccttctctttaggcaaacctaga

SEQ ID NO: 3456338 - DNA, 25 bp, Homo sapien
cagtaccttctctttaggcaaacct

SEQ ID NO: 3456339 - DNA, 25 bp, Homo sapien
ccttctctttaggcaaacctagaca

SEQ ID NO: 3456340 - DNA, 25 bp, Homo sapien
ttgtgtctgtgcttcacccactgac

SEQ ID NO: 3456341 - DNA, 25 bp, Homo sapien
gacagtgggtgactgtgcttcaccc

SEQ ID NO: 3456342 - DNA, 25 bp, Homo sapien
tgtgcttcacccactgacagtgggt

SEQ ID NO: 3456343 - DNA, 25 bp, Homo sapien
gccttcatatttgcaggatatagac

SEQ ID NO: 3456344 - DNA, 25 bp, Homo sapien
aaataaccagcaatacaagtttgta

SEQ ID NO: 3456345 - DNA, 25 bp, Homo sapien
ctgagatggctgtaggggagagccc

SEQ ID NO: 3456346 - DNA, 25 bp, Homo sapien
gtgacaagcaaataaccagcaatac

SEQ ID NO: 3456347 - DNA, 25 bp, Homo sapien
tttgtaaatggaccaccagagcctt

SEQ ID NO: 3456348 - DNA, 25 bp, Homo sapien
ctcccctaaagaggagcttaagcag

SEQ ID NO: 3456349 - DNA, 25 bp, Homo sapien
cccctaaagaggagcttaagcaggt

SEQ ID NO: 3456350 - DNA, 25 bp, Homo sapien
acgctgccaggccgtgtttcccaga

SEQ ID NO: 3456351 - DNA, 25 bp, Homo sapien
ctaaagaggagcttaagcaggttga

SEQ ID NO: 3456352 - DNA, 25 bp, Homo sapien
gcagagcggggaagcaatacccgct

SEQ ID NO: 3456353 - DNA, 25 bp, Homo sapien
catcttctctgcaggtagccttctc

SEQ ID NO: 3456354 - DNA, 25 bp, Homo sapien
ggccctctgctagttaacagcagag

SEQ ID NO: 3456355 - DNA, 25 bp, Homo sapien
cctggtattgccctttgatcatctt

SEQ ID NO: 3456356 - DNA, 25 bp, Homo sapien
taactcgtctgggctgtaggatgcg

SEQ ID NO: 3456357 - DNA, 25 bp, Homo sapien
gcgggcgaggcttccacaaactcac

SEQ ID NO: 3456358 - DNA, 25 bp, Homo sapien
tgggctgtaggatgcgggcgaggct

SEQ ID NO: 3456359 - DNA, 25 bp, Homo sapien
ggcgaggcttccacaaactcactgt

SEQ ID NO: 3456360 - DNA, 25 bp, Homo sapien
gatacataggcttctaaagggtgga

SEQ ID NO: 3456361 - DNA, 25 bp, Homo sapien
gcttgtgtcgcaatcaggaggacct

SEQ ID NO: 3456362 - DNA, 25 bp, Homo sapien
ttggaggccagctcaaggctacgca

SEQ ID NO: 3456363 - DNA, 25 bp, Homo sapien
gatctagggtacatcacgggagcaa

SEQ ID NO: 3456364 - DNA, 25 bp, Homo sapien
tatatggtgagcagaaaactcaact

SEQ ID NO: 3456365 - DNA, 25 bp, Homo sapien
aaaacttcactctgcgtcaaggtat

SEQ ID NO: 3456366 - DNA, 25 bp, Homo sapien
catcgctacaactggtagttctcca

SEQ ID NO: 3456367 - DNA, 25 bp, Homo sapien
ctgggaccatcgctacaactggtag

SEQ ID NO: 3456368 - DNA, 25 bp, Homo sapien
acaactggtagttctccattaatga

SEQ ID NO: 3456369 - DNA, 25 bp, Homo sapien
gaccatcgctacaactggtagttct

SEQ ID NO: 3456370 - DNA, 25 bp, Homo sapien
aggcgatcatggctagttcagtccc

SEQ ID NO: 3456371 - DNA, 25 bp, Homo sapien
cgacaaccgctgctgggtcctagag

SEQ ID NO: 3456372 - DNA, 25 bp, Homo sapien
ggtcctagagcttctcgcgcgctcc

SEQ ID NO: 3456373 - DNA, 25 bp, Homo sapien
gacaatcaaccccattcacacaggg

SEQ ID NO: 3456374 - DNA, 25 bp, Homo sapien
accgcaggctcacaagttccccggc

SEQ ID NO: 3456375 - DNA, 25 bp, Homo sapien
tcacaagttccccggcgcaactttg

SEQ ID NO: 3456376 - DNA, 25 bp, Homo sapien
ttccccggcgcaactttgccctcca

SEQ ID NO: 3456377 - DNA, 25 bp, Homo sapien
tttcaccgcaggctcacaagttccc

SEQ ID NO: 3456378 - DNA, 25 bp, Homo sapien
taccgtcagtcagagacactgctcc

SEQ ID NO: 3456379 - DNA, 25 bp, Homo sapien
ccatatacccagttgtggcatgtct

SEQ ID NO: 3456380 - DNA, 25 bp, Homo sapien
caaagggtaagcatctcagtccagg

SEQ ID NO: 3456381 - DNA, 25 bp, Homo sapien
aacatgtgtttccagtaccagcagc

SEQ ID NO: 3456382 - DNA, 25 bp, Homo sapien
gatcaactctaaaagtcagctaagg

SEQ ID NO: 3456383 - DNA, 25 bp, Homo sapien
cctcaactcagggttaagctaatat

SEQ ID NO: 3456384 - DNA, 25 bp, Homo sapien
taccactcatttttgatctgccagg

SEQ ID NO: 3456385 - DNA, 25 bp, Homo sapien
caggccagtcaataccacgggaaga

SEQ ID NO: 3456386 - DNA, 25 bp, Homo sapien
cctctagaacgcctctcaacaccat

SEQ ID NO: 3456387 - DNA, 25 bp, Homo sapien
agtttaccgcctctagaacgcctct

SEQ ID NO: 3456388 - DNA, 25 bp, Homo sapien
ttcagtttaccgcctctagaacgcc

SEQ ID NO: 3456389 - DNA, 25 bp, Homo sapien
tctagaacgcctctcaacaccatcc

SEQ ID NO: 3456390 - DNA, 25 bp, Homo sapien
gcagatgacaacagacccagcagat

SEQ ID NO: 3456391 - DNA, 25 bp, Homo sapien
acagacccagcagatggacatgccc

SEQ ID NO: 3456392 - DNA, 25 bp, Homo sapien
agatgacaacagacccagcagatgg

SEQ ID NO: 3456393 - DNA, 25 bp, Homo sapien
gacaacagacccagcagatggacat

SEQ ID NO: 3456394 - DNA, 25 bp, Homo sapien
cagggtcctgcacgtccactgagtt

SEQ ID NO: 3456395 - DNA, 25 bp, Homo sapien
cactgagttacactcccactgctgc

SEQ ID NO: 3456396 - DNA, 25 bp, Homo sapien
tcctgcacgtccactgagttacact

SEQ ID NO: 3456397 - DNA, 25 bp, Homo sapien
ggtcctgcacgtccactgagttaca

SEQ ID NO: 3456398 - DNA, 25 bp, Homo sapien
caaagttctgaatggtcaaggttga

SEQ ID NO: 3456399 - DNA, 25 bp, Homo sapien
tgcgggactgaatgtgtcacaaagt

SEQ ID NO: 3456400 - DNA, 25 bp, Homo sapien
agcgaaagtcaagtcctctgcggga

SEQ ID NO: 3456401 - DNA, 25 bp, Homo sapien
agcagcaccagcgaaagtcaagtcc

SEQ ID NO: 3456402 - DNA, 25 bp, Homo sapien
agtgaaggcgcaaatgctctaatgt

SEQ ID NO: 3456403 - DNA, 25 bp, Homo sapien
tgaaggcgcaaatgctctaatgttc

SEQ ID NO: 3456404 - DNA, 25 bp, Homo sapien
gaaggcgcaaatgctctaatgttct

SEQ ID NO: 3456405 - DNA, 25 bp, Homo sapien
gtgaaggcgcaaatgctctaatgtt

SEQ ID NO: 3456406 - DNA, 25 bp, Homo sapien
ggaaaagtaggtggagtcttctaga

SEQ ID NO: 3456407 - DNA, 25 bp, Homo sapien
tctagaacctggacaggactactgg

SEQ ID NO: 3456408 - DNA, 25 bp, Homo sapien
ctactggttgcctccaccgtcaaag

SEQ ID NO: 3456409 - DNA, 25 bp, Homo sapien
tccaccgtcaaagcagatgtttcat

SEQ ID NO: 3456410 - DNA, 25 bp, Homo sapien
gccgcatcctcggaacctctcattt

SEQ ID NO: 3456411 - DNA, 25 bp, Homo sapien
agccgctgcaatactgttccagctg

SEQ ID NO: 3456412 - DNA, 25 bp, Homo sapien
ggatcagccgctgcaatactgttcc

SEQ ID NO: 3456413 - DNA, 25 bp, Homo sapien
tgttccagctgccgcatcctcggaa

SEQ ID NO: 3456414 - DNA, 25 bp, Homo sapien
catttgtgggtcttcttgagtgagg

SEQ ID NO: 3456415 - DNA, 25 bp, Homo sapien
cagcaagttcatgttctcggttggg

SEQ ID NO: 3456416 - DNA, 25 bp, Homo sapien
cttggcgtgctgactggtagaccat

SEQ ID NO: 3456417 - DNA, 25 bp, Homo sapien
cctggtgctgaatggccagcaagtt

SEQ ID NO: 3456418 - DNA, 25 bp, Homo sapien
tgtttctccatcaccgtattgtcca

SEQ ID NO: 3456419 - DNA, 25 bp, Homo sapien
caccgtattgtccacctggtgttct

SEQ ID NO: 3456420 - DNA, 25 bp, Homo sapien
gtttctccatcaccgtattgtccac

SEQ ID NO: 3456421 - DNA, 25 bp, Homo sapien
tccatcaccgtattgtccacctggt

SEQ ID NO: 3456422 - DNA, 25 bp, Homo sapien
taagtgggcagttcctcgttgttct

SEQ ID NO: 3456423 - DNA, 25 bp, Homo sapien
ctcctcgtaagtgggcagttcctcg

SEQ ID NO: 3456424 - DNA, 25 bp, Homo sapien
tgtgctttggcctcctcgtaagtgg

SEQ ID NO: 3456425 - DNA, 25 bp, Homo sapien
gcagttcctcgttgttctgctgagg

SEQ ID NO: 3456426 - DNA, 25 bp, Homo sapien
catggcccaccgccccctgctgctg

SEQ ID NO: 3456427 - DNA, 25 bp, Homo sapien
gcccaccgccccctgctgctgttgc

SEQ ID NO: 3456428 - DNA, 25 bp, Homo sapien
atggcccaccgccccctgctgctgt

SEQ ID NO: 3456429 - DNA, 25 bp, Homo sapien
agtaaccatggcccaccgccccctg

SEQ ID NO: 3456430 - DNA, 25 bp, Homo sapien
ctgttggcacggttcacagtgggcc

SEQ ID NO: 3456431 - DNA, 25 bp, Homo sapien
cctcagttcgggacttctgactggt

SEQ ID NO: 3456432 - DNA, 25 bp, Homo sapien
ttggcacggttcacagtgggcctcc

SEQ ID NO: 3456433 - DNA, 25 bp, Homo sapien
cagtgggcctcccctcagttcggga

SEQ ID NO: 3456434 - DNA, 25 bp, Homo sapien
cagggtagggcttgaccatctcgtg

SEQ ID NO: 3456435 - DNA, 25 bp, Homo sapien
ttctctcgctgagcgagcggacgtg

SEQ ID NO: 3456436 - DNA, 25 bp, Homo sapien
aaggtgttgcttggccccattcctc

SEQ ID NO: 3456437 - DNA, 25 bp, Homo sapien
aaagtccgtgctcctgggtcttgct

SEQ ID NO: 3456438 - DNA, 25 bp, Homo sapien
tgaattttgaaaagccgcacgaaac

SEQ ID NO: 3456439 - DNA, 25 bp, Homo sapien
tgctaataacatgactattgaattt

SEQ ID NO: 3456440 - DNA, 25 bp, Homo sapien
aacatgactattgaattttgaaaag

SEQ ID NO: 3456441 - DNA, 25 bp, Homo sapien
cgcacgaaacgtctgcagttgataa

SEQ ID NO: 3456442 - DNA, 25 bp, Homo sapien
ggctgggccaaacactaccatgtca

SEQ ID NO: 3456443 - DNA, 25 bp, Homo sapien
gaataggtcataccacaggttccct

SEQ ID NO: 3456444 - DNA, 25 bp, Homo sapien
tttacgacaggaaatccacagctcc

SEQ ID NO: 3456445 - DNA, 25 bp, Homo sapien
caaaaaggcaatgtacaggctgaga

SEQ ID NO: 3456446 - DNA, 25 bp, Homo sapien
cataattcggcctaaataccggaga

SEQ ID NO: 3456447 - DNA, 25 bp, Homo sapien
caaaatcattgctatccagggtggc

SEQ ID NO: 3456448 - DNA, 25 bp, Homo sapien
aatttgctaccggaaggaagagcca

SEQ ID NO: 3456449 - DNA, 25 bp, Homo sapien
tgcagagccgtttgtcaggacacac

SEQ ID NO: 3456450 - DNA, 25 bp, Homo sapien
aaaagtgcactatgaaagcgtcacg

SEQ ID NO: 3456451 - DNA, 25 bp, Homo sapien
tggtttccttatacaattctatgat

SEQ ID NO: 3456452 - DNA, 25 bp, Homo sapien
cgtcacgtggtctagccccatacta

SEQ ID NO: 3456453 - DNA, 25 bp, Homo sapien
tgatttttcacaagagttggccctt

SEQ ID NO: 3456454 - DNA, 25 bp, Homo sapien
tattgtaggatttagccagcctgca

SEQ ID NO: 3456455 - DNA, 25 bp, Homo sapien
ttgggtccattcctgatcgaagctc

SEQ ID NO: 3456456 - DNA, 25 bp, Homo sapien
acagatgtgtagtgttttgggtcca

SEQ ID NO: 3456457 - DNA, 25 bp, Homo sapien
cattcctgatcgaagctcctgtgac

SEQ ID NO: 3456458 - DNA, 25 bp, Homo sapien
taatctgtggcattttggctcttac

SEQ ID NO: 3456459 - DNA, 25 bp, Homo sapien
cattcaaaagcagtggtgtaatctg

SEQ ID NO: 3456460 - DNA, 25 bp, Homo sapien
tcaaaagcagtggtgtaatctgtgg

SEQ ID NO: 3456461 - DNA, 25 bp, Homo sapien
tcattcaaaagcagtggtgtaatct

SEQ ID NO: 3456462 - DNA, 25 bp, Homo sapien
gatgtctagtaagcttcctctctga

SEQ ID NO: 3456463 - DNA, 25 bp, Homo sapien
cacaatctaatagggaaacaggctc

SEQ ID NO: 3456464 - DNA, 25 bp, Homo sapien
gcattatagtcccatgaaacggaga

SEQ ID NO: 3456465 - DNA, 25 bp, Homo sapien
gaaacggagatacaggatgtctagt

SEQ ID NO: 3456466 - DNA, 25 bp, Homo sapien
tcagtgtgcgtttggtattaatggt

SEQ ID NO: 3456467 - DNA, 25 bp, Homo sapien
tgtgttcatctgacacagaggctca

SEQ ID NO: 3456468 - DNA, 25 bp, Homo sapien
taaggagtgagttaatgctccaaaa

SEQ ID NO: 3456469 - DNA, 25 bp, Homo sapien
tagcccaaatgataactcaacgatt

SEQ ID NO: 3456470 - DNA, 25 bp, Homo sapien
tcaattaaaaacattactttggaga

SEQ ID NO: 3456471 - DNA, 25 bp, Homo sapien
tggagggaaaataggacaggaaaga

SEQ ID NO: 3456472 - DNA, 25 bp, Homo sapien
gcacagcttcatttttagggatttt

SEQ ID NO: 3456473 - DNA, 25 bp, Homo sapien
agaaagcacagcttcatttttaggg

SEQ ID NO: 3456474 - DNA, 25 bp, Homo sapien
cctgtggtgtgcacagaatgcagtg

SEQ ID NO: 3456475 - DNA, 25 bp, Homo sapien
tcctgtggtgtgcacagaatgcagt

SEQ ID NO: 3456476 - DNA, 25 bp, Homo sapien
ctgcaaggcaatggaaggcagcagt

SEQ ID NO: 3456477 - DNA, 25 bp, Homo sapien
ggcaatggaaggcagcagttagagc

SEQ ID NO: 3456478 - DNA, 25 bp, Homo sapien
aaggcaatggaaggcagcagttaga

SEQ ID NO: 3456479 - DNA, 25 bp, Homo sapien
gcaaggcaatggaaggcagcagtta

SEQ ID NO: 3456480 - DNA, 25 bp, Homo sapien
tgctgctgcatggttgatgggaacg

SEQ ID NO: 3456481 - DNA, 25 bp, Homo sapien
ctgctgcatggttgatgggaacgga

SEQ ID NO: 3456482 - DNA, 25 bp, Homo sapien
tgtgctgctgcatggttgatgggaa

SEQ ID NO: 3456483 - DNA, 25 bp, Homo sapien
gctgcatggttgatgggaacggaag

SEQ ID NO: 3456484 - DNA, 25 bp, Homo sapien
agtgcagtggcccgctggcggaaga

SEQ ID NO: 3456485 - DNA, 25 bp, Homo sapien
agagtgcagtggcccgctggcggaa

SEQ ID NO: 3456486 - DNA, 25 bp, Homo sapien
tgcagtggcccgctggcggaagagg

SEQ ID NO: 3456487 - DNA, 25 bp, Homo sapien
gcagtggcccgctggcggaagaggt

SEQ ID NO: 3456488 - DNA, 25 bp, Homo sapien
agggccatcgggagtggaagcggca

SEQ ID NO: 3456489 - DNA, 25 bp, Homo sapien
ccagggccatcgggagtggaagcgg

SEQ ID NO: 3456490 - DNA, 25 bp, Homo sapien
cagggccatcgggagtggaagcggc

SEQ ID NO: 3456491 - DNA, 25 bp, Homo sapien
cctctgttaatatctccaccatttg

SEQ ID NO: 3456492 - DNA, 25 bp, Homo sapien
tcctctgttaatatctccaccattt

SEQ ID NO: 3456493 - DNA, 25 bp, Homo sapien
ctctgttaatatctccaccatttgc

SEQ ID NO: 3456494 - DNA, 25 bp, Homo sapien
tgtcggcattgtcgtagtaaccctg

SEQ ID NO: 3456495 - DNA, 25 bp, Homo sapien
cattgtcgtagtaaccctgaagttc

SEQ ID NO: 3456496 - DNA, 25 bp, Homo sapien
cttgtggagcttgtcggcattgtcg

SEQ ID NO: 3456497 - DNA, 25 bp, Homo sapien
ggagcttgtcggcattgtcgtagta

SEQ ID NO: 3456498 - DNA, 25 bp, Homo sapien
ctatttactttggctctcagcataa

SEQ ID NO: 3456499 - DNA, 25 bp, Homo sapien
tatttactttggctctcagcataaa

SEQ ID NO: 3456500 - DNA, 25 bp, Homo sapien
atttactttggctctcagcataaat

SEQ ID NO: 3456501 - DNA, 25 bp, Homo sapien
caaaacattcccaatgctgcgagga

SEQ ID NO: 3456502 - DNA, 25 bp, Homo sapien
cattcccaatgctgcgaggaactca

SEQ ID NO: 3456503 - DNA, 25 bp, Homo sapien
caatgctgcgaggaactcagatgga

SEQ ID NO: 3456504 - DNA, 25 bp, Homo sapien
aagggccaaaacattcccaatgctg

SEQ ID NO: 3456505 - DNA, 25 bp, Homo sapien
agtctctgaatttaatcgttttctt

SEQ ID NO: 3456506 - DNA, 25 bp, Homo sapien
tagtctctgaatttaatcgttttct

SEQ ID NO: 3456507 - DNA, 25 bp, Homo sapien
ttagttctgcccttacaatgcatct

SEQ ID NO: 3456508 - DNA, 25 bp, Homo sapien
tttagttctgcccttacaatgcatc

SEQ ID NO: 3456509 - DNA, 25 bp, Homo sapien
cattccaacattaacagtgataatc

SEQ ID NO: 3456510 - DNA, 25 bp, Homo sapien
catcattccaacattaacagtgata

SEQ ID NO: 3456511 - DNA, 25 bp, Homo sapien
ccaacattaacagtgataatcacta

SEQ ID NO: 3456512 - DNA, 25 bp, Homo sapien
ccatcattccaacattaacagtgat

SEQ ID NO: 3456513 - DNA, 25 bp, Homo sapien
caatcaagacctgacataaggttat

SEQ ID NO: 3456514 - DNA, 25 bp, Homo sapien
aaaacaatcaagacctgacataagg

SEQ ID NO: 3456515 - DNA, 25 bp, Homo sapien
agacctgacataaggttatctgctt

SEQ ID NO: 3456516 - DNA, 25 bp, Homo sapien
cctaaaacaatcaagacctgacata

SEQ ID NO: 3456517 - DNA, 25 bp, Homo sapien
ttgaccagactttcataggcttccg

SEQ ID NO: 3456518 - DNA, 25 bp, Homo sapien
tctcgcttggtggtagacttgacca

SEQ ID NO: 3456519 - DNA, 25 bp, Homo sapien
tcggaggtctctgttgaaatcatga

SEQ ID NO: 3456520 - DNA, 25 bp, Homo sapien
atggccttgtccagcgattctcgct

SEQ ID NO: 3456521 - DNA, 25 bp, Homo sapien
gttgcctgttagcagtctctagtcg

SEQ ID NO: 3456522 - DNA, 25 bp, Homo sapien
tattccctgctggatagttgcctgt

SEQ ID NO: 3456523 - DNA, 25 bp, Homo sapien
agctttgtcttcatgcccttcgtat

SEQ ID NO: 3456524 - DNA, 25 bp, Homo sapien
tgggaagcataatgcccctctgcag

SEQ ID NO: 3456525 - DNA, 25 bp, Homo sapien
acatgaaatcctcggtcaatcccag

SEQ ID NO: 3456526 - DNA, 25 bp, Homo sapien
aaatcctcggtcaatcccagagccg

SEQ ID NO: 3456527 - DNA, 25 bp, Homo sapien
aaaacatgaaatcctcggtcaatcc

SEQ ID NO: 3456528 - DNA, 25 bp, Homo sapien
ggtcaatcccagagccgacaaaatt

SEQ ID NO: 3456529 - DNA, 25 bp, Homo sapien
aaaccacggtcaacagtggatacat

SEQ ID NO: 3456530 - DNA, 25 bp, Homo sapien
tatggaaggtaatggttttctcaaa

SEQ ID NO: 3456531 - DNA, 25 bp, Homo sapien
ttctcaaaaaccacggtcaacagtg

SEQ ID NO: 3456532 - DNA, 25 bp, Homo sapien
tggtatggaaggtaatggttttctc

SEQ ID NO: 3456533 - DNA, 25 bp, Homo sapien
aaagcatgcaaataatggaggactg

SEQ ID NO: 3456534 - DNA, 25 bp, Homo sapien
cgaacaaaactacctctatcagaaa

SEQ ID NO: 3456535 - DNA, 25 bp, Homo sapien
acctctatcagaaattgcacaccct

SEQ ID NO: 3456536 - DNA, 25 bp, Homo sapien
tctatcagaaattgcacaccctctg

SEQ ID NO: 3456537 - DNA, 25 bp, Homo sapien
aacacgaacaaaactacctctatca

SEQ ID NO: 3456538 - DNA, 25 bp, Homo sapien
tcttccagcttgatgaccctggcct

SEQ ID NO: 3456539 - DNA, 25 bp, Homo sapien
tggcctgggcgttgctcaaagcctg

SEQ ID NO: 3456540 - DNA, 25 bp, Homo sapien
tctcgatgtgtctccgatggtcctc

SEQ ID NO: 3456541 - DNA, 25 bp, Homo sapien
tggtcctcacttgcagtccgcactg

SEQ ID NO: 3456542 - DNA, 25 bp, Homo sapien
tcaacatatgcttgcttctctcgta

SEQ ID NO: 3456543 - DNA, 25 bp, Homo sapien
caacatatgcttgcttctctcgtaa

SEQ ID NO: 3456544 - DNA, 25 bp, Homo sapien
cgcttctcacatgcagactgcagct

SEQ ID NO: 3456545 - DNA, 25 bp, Homo sapien
gcagtctccgctccatctgttctcg

SEQ ID NO: 3456546 - DNA, 25 bp, Homo sapien
tccatctgttctcgcttctcacatg

SEQ ID NO: 3456547 - DNA, 25 bp, Homo sapien
agccaagtccgcagtctccgctcca

SEQ ID NO: 3456548 - DNA, 25 bp, Homo sapien
taattggagctgctcaagggctctg

SEQ ID NO: 3456549 - DNA, 25 bp, Homo sapien
ccttgtctgggctgttgattcaaca

SEQ ID NO: 3456550 - DNA, 25 bp, Homo sapien
tgtgtcccggcataagtcaaagggc

SEQ ID NO: 3456551 - DNA, 25 bp, Homo sapien
gattcaacaagaactctaagctgtg

SEQ ID NO: 3456552 - DNA, 25 bp, Homo sapien
agtgtcggatggtgctctcctccag

SEQ ID NO: 3456553 - DNA, 25 bp, Homo sapien
ttcatggcaaagtgtcggatggtgc

SEQ ID NO: 3456554 - DNA, 25 bp, Homo sapien
ttctcccgcacaagttccaggaggg

SEQ ID NO: 3456555 - DNA, 25 bp, Homo sapien
tgtattccggcatgttggctggctg

SEQ ID NO: 3456556 - DNA, 25 bp, Homo sapien
tgcagacaccaacgcccgaatggtg

SEQ ID NO: 3456557 - DNA, 25 bp, Homo sapien
cgaatggtggcaatgctttctccaa

SEQ ID NO: 3456558 - DNA, 25 bp, Homo sapien
gggattctcccctacgtcgataatg

SEQ ID NO: 3456559 - DNA, 25 bp, Homo sapien
ctccaattcctggtgctaacatctg

SEQ ID NO: 3456560 - DNA, 25 bp, Homo sapien
tcccaaacggtcattttccacatgg

SEQ ID NO: 3456561 - DNA, 25 bp, Homo sapien
gtgtagacccacataaacaacgtgg

SEQ ID NO: 3456562 - DNA, 25 bp, Homo sapien
ttccacatgggtctgtaggtctttc

SEQ ID NO: 3456563 - DNA, 25 bp, Homo sapien
tctcggtgcaagtgtgctgtggcac

SEQ ID NO: 3456564 - DNA, 25 bp, Homo sapien
cttcatacagggactgggtagggca

SEQ ID NO: 3456565 - DNA, 25 bp, Homo sapien
tagaggcccctttaatgacagctat

SEQ ID NO: 3456566 - DNA, 25 bp, Homo sapien
tagggcacggtacacatggtctctc

SEQ ID NO: 3456567 - DNA, 25 bp, Homo sapien
ccagggttaggtgacatttccaaga

SEQ ID NO: 3456568 - DNA, 25 bp, Homo sapien
agcgagctctctccgtagctgccat

SEQ ID NO: 3456569 - DNA, 25 bp, Homo sapien
tgagtggttgatgatcgtggtgtcc

SEQ ID NO: 3456570 - DNA, 25 bp, Homo sapien
tgtcctgacaccttctgttggcctg

SEQ ID NO: 3456571 - DNA, 25 bp, Homo sapien
cctcttgccagatgtgggcctccag

SEQ ID NO: 3456572 - DNA, 25 bp, Homo sapien
tagctgctgctatggatggaacgga

SEQ ID NO: 3456573 - DNA, 25 bp, Homo sapien
gcgagagtgtgtcccagtagctgct

SEQ ID NO: 3456574 - DNA, 25 bp, Homo sapien
ggagtctgtcttcccggcatcttta

SEQ ID NO: 3456575 - DNA, 25 bp, Homo sapien
tctttacgagatcgctgctgcagga

SEQ ID NO: 3456576 - DNA, 25 bp, Homo sapien
ccagctggctgctggtaagagaggt

SEQ ID NO: 3456577 - DNA, 25 bp, Homo sapien
ctatgctccccttccaggtcttctc

SEQ ID NO: 3456578 - DNA, 25 bp, Homo sapien
cttcttttcctcagccagctggctg

SEQ ID NO: 3456579 - DNA, 25 bp, Homo sapien
tatgctccccttccaggtcttctct

SEQ ID NO: 3456580 - DNA, 25 bp, Homo sapien
tacaactggtctagagcagagccaa

SEQ ID NO: 3456581 - DNA, 25 bp, Homo sapien
tgagaccaggaactattcagggaca

SEQ ID NO: 3456582 - DNA, 25 bp, Homo sapien
gaggtggagccgtcatacaactggt

SEQ ID NO: 3456583 - DNA, 25 bp, Homo sapien
tgatctgagtcaacccatggctaag

SEQ ID NO: 3456584 - DNA, 25 bp, Homo sapien
tggtatggacgaacagagaagtgcc

SEQ ID NO: 3456585 - DNA, 25 bp, Homo sapien
gagaagtgcctaattgccagcagga

SEQ ID NO: 3456586 - DNA, 25 bp, Homo sapien
gcttgctgttaccaacgtggcccag

SEQ ID NO: 3456587 - DNA, 25 bp, Homo sapien
tggaactgtagcctcccagaagcag

SEQ ID NO: 3456588 - DNA, 25 bp, Homo sapien
atgctcatggtgctccttccccagc

SEQ ID NO: 3456589 - DNA, 25 bp, Homo sapien
aggcatgctcatggtgctccttccc

SEQ ID NO: 3456590 - DNA, 25 bp, Homo sapien
cagaggcatgctcatggtgctcctt

SEQ ID NO: 3456591 - DNA, 25 bp, Homo sapien
gcagaggcatgctcatggtgctcct

SEQ ID NO: 3456592 - DNA, 25 bp, Homo sapien
tgctgcctgtcttggcgtgggcact

SEQ ID NO: 3456593 - DNA, 25 bp, Homo sapien
tctgcggtccctttggccgctgggt

SEQ ID NO: 3456594 - DNA, 25 bp, Homo sapien
gaagagctcggcactcttgtcagtc

SEQ ID NO: 3456595 - DNA, 25 bp, Homo sapien
catgctgggccagaagagctcggca

SEQ ID NO: 3456596 - DNA, 25 bp, Homo sapien
tgcttcctctctagctcaacaaaag

SEQ ID NO: 3456597 - DNA, 25 bp, Homo sapien
ttagaatagcatccccatagagtaa

SEQ ID NO: 3456598 - DNA, 25 bp, Homo sapien
tcttaggccagacagttccacagtt

SEQ ID NO: 3456599 - DNA, 25 bp, Homo sapien
gggcacacatatcctaagtgcatta

SEQ ID NO: 3456600 - DNA, 25 bp, Homo sapien
tacaaaccaggatggtgaagggaga

SEQ ID NO: 3456601 - DNA, 25 bp, Homo sapien
gagctaggcacttttgacaggttct

SEQ ID NO: 3456602 - DNA, 25 bp, Homo sapien
gacaacattgtatttacttgtctac

SEQ ID NO: 3456603 - DNA, 25 bp, Homo sapien
tcaggtgcatattctgagctaggca

SEQ ID NO: 3456604 - DNA, 25 bp, Homo sapien
tgacccggcctctgtggtcaggcga

SEQ ID NO: 3456605 - DNA, 25 bp, Homo sapien
tagatgaggacttccatcatctctc

SEQ ID NO: 3456606 - DNA, 25 bp, Homo sapien
tccatcagggaactcgggcttgtgc

SEQ ID NO: 3456607 - DNA, 25 bp, Homo sapien
tggtcaggcgacttcccatggccag

SEQ ID NO: 3456608 - DNA, 25 bp, Homo sapien
tgtactgaaattccacagggatggc

SEQ ID NO: 3456609 - DNA, 25 bp, Homo sapien
ccagctatgcaaaggtgaagcagcc

SEQ ID NO: 3456610 - DNA, 25 bp, Homo sapien
gaatgaggttcgcagctgcaaccca

SEQ ID NO: 3456611 - DNA, 25 bp, Homo sapien
caaagcttgcttagttcacagtcag

SEQ ID NO: 3456612 - DNA, 25 bp, Homo sapien
tatggccggacttcaggaaagctct

SEQ ID NO: 3456613 - DNA, 25 bp, Homo sapien
tattatccactgcttctgaggtccg

SEQ ID NO: 3456614 - DNA, 25 bp, Homo sapien
caatacaagaagctatacgggaggc

SEQ ID NO: 3456615 - DNA, 25 bp, Homo sapien
taacctatgtctaagggaggcagcc

SEQ ID NO: 3456616 - DNA, 25 bp, Homo sapien
aggacagctgaaatcgggtgcccat

SEQ ID NO: 3456617 - DNA, 25 bp, Homo sapien
acaacaccgggcatccagactttgg

SEQ ID NO: 3456618 - DNA, 25 bp, Homo sapien
caattctgtaagtgctcatggagga

SEQ ID NO: 3456619 - DNA, 25 bp, Homo sapien
tctatgtgaacagactcctaggcac

SEQ ID NO: 3456620 - DNA, 25 bp, Homo sapien
tattaaggcacaagtttaagcagca

SEQ ID NO: 3456621 - DNA, 25 bp, Homo sapien
gacgtcaaacgttacagccagatac

SEQ ID NO: 3456622 - DNA, 25 bp, Homo sapien
gtatggccatgtacatcacccctca

SEQ ID NO: 3456623 - DNA, 25 bp, Homo sapien
acagacccatttggctgtatggcca

SEQ ID NO: 3456624 - DNA, 25 bp, Homo sapien
aggaagaaaggagcaagcgagagaa

SEQ ID NO: 3456625 - DNA, 25 bp, Homo sapien
aagaaaggagcaagcgagagaaaag

SEQ ID NO: 3456626 - DNA, 25 bp, Homo sapien
gggctgcaagctgcgatggtctgga

SEQ ID NO: 3456627 - DNA, 25 bp, Homo sapien
ggcgggctgcaagctgcgatggtct

SEQ ID NO: 3456628 - DNA, 25 bp, Homo sapien
cgggctgcaagctgcgatggtctgg

SEQ ID NO: 3456629 - DNA, 25 bp, Homo sapien
tgggcgggctgcaagctgcgatggt

SEQ ID NO: 3456630 - DNA, 25 bp, Homo sapien
tcctggcctggatttcgcccattta

SEQ ID NO: 3456631 - DNA, 25 bp, Homo sapien
ggatttcgcccatttaccgtgtgac

SEQ ID NO: 3456632 - DNA, 25 bp, Homo sapien
ggctctgaactaaggaacctcaaaa

SEQ ID NO: 3456633 - DNA, 25 bp, Homo sapien
actcacatgtgatcaaagtggacac

SEQ ID NO: 3456634 - DNA, 25 bp, Homo sapien
atgtggagattctcatgagtcttac

SEQ ID NO: 3456635 - DNA, 25 bp, Homo sapien
catgtggagattctcatgagtctta

SEQ ID NO: 3456636 - DNA, 25 bp, Homo sapien
tcatgtggagattctcatgagtctt

SEQ ID NO: 3456637 - DNA, 25 bp, Homo sapien
tgagtcatatttgcacacgcacaca

SEQ ID NO: 3456638 - DNA, 25 bp, Homo sapien
gaataaacagcaggaaccactctct

SEQ ID NO: 3456639 - DNA, 25 bp, Homo sapien
tacacatgtgggatcagcgtgggaa

SEQ ID NO: 3456640 - DNA, 25 bp, Homo sapien
tgactctgcaacaggtagacctggg

SEQ ID NO: 3456641 - DNA, 25 bp, Homo sapien
tgtcagaatggaggccagtgttcct

SEQ ID NO: 3456642 - DNA, 25 bp, Homo sapien
gacgtgtaccacttggaatgactac

SEQ ID NO: 3456643 - DNA, 25 bp, Homo sapien
taattccttatcacgatgggcctgc

SEQ ID NO: 3456644 - DNA, 25 bp, Homo sapien
aactgctgggattgagaacttctct

SEQ ID NO: 3456645 - DNA, 25 bp, Homo sapien
aaggaatttcattgcttctgattta

SEQ ID NO: 3456646 - DNA, 25 bp, Homo sapien
aaaggaatttcattgcttctgattt

SEQ ID NO: 3456647 - DNA, 25 bp, Homo sapien
actcctgggccacaagttctgtggc

SEQ ID NO: 3456648 - DNA, 25 bp, Homo sapien
tcctgggccacaagttctgtggctt

SEQ ID NO: 3456649 - DNA, 25 bp, Homo sapien
cactcctgggccacaagttctgtgg

SEQ ID NO: 3456650 - DNA, 25 bp, Homo sapien
cagcactcctgggccacaagttctg

SEQ ID NO: 3456651 - DNA, 25 bp, Homo sapien
ttcaccatgaccttcggaaagcacc

SEQ ID NO: 3456652 - DNA, 25 bp, Homo sapien
aagagggcccgcctctaattggctc

SEQ ID NO: 3456653 - DNA, 25 bp, Homo sapien
ggaaagcacccaagctctctgtttg

SEQ ID NO: 3456654 - DNA, 25 bp, Homo sapien
tctgctggcctttcaccatgacctt

SEQ ID NO: 3456655 - DNA, 25 bp, Homo sapien
gaggaggtgagtggtgaaggaagta

SEQ ID NO: 3456656 - DNA, 25 bp, Homo sapien
ggtgagtggtgaaggaagtagcctg

SEQ ID NO: 3456657 - DNA, 25 bp, Homo sapien
gagtggtgaaggaagtagcctgagc

SEQ ID NO: 3456658 - DNA, 25 bp, Homo sapien
gaggtgagtggtgaaggaagtagcc

SEQ ID NO: 3456659 - DNA, 25 bp, Homo sapien
ggtccagcatagatacctgcgtcac

SEQ ID NO: 3456660 - DNA, 25 bp, Homo sapien
caagctgaacaattctgtatggagg

SEQ ID NO: 3456661 - DNA, 25 bp, Homo sapien
cctggttcaagctgaacaattctgt

SEQ ID NO: 3456662 - DNA, 25 bp, Homo sapien
ggactttctgcctaacaggtccagc

SEQ ID NO: 3456663 - DNA, 25 bp, Homo sapien
tcagacctgcttccataatgctggg

SEQ ID NO: 3456664 - DNA, 25 bp, Homo sapien
cagacctgcttccataatgctgggt

SEQ ID NO: 3456665 - DNA, 25 bp, Homo sapien
agacctgcttccataatgctgggta

SEQ ID NO: 3456666 - DNA, 25 bp, Homo sapien
gacctgcttccataatgctgggtac

SEQ ID NO: 3456667 - DNA, 25 bp, Homo sapien
cacggtgcttggcagacacagaaca

SEQ ID NO: 3456668 - DNA, 25 bp, Homo sapien
gcaatgggagctacagaagaacttc

SEQ ID NO: 3456669 - DNA, 25 bp, Homo sapien
gccacaagtagctactgagtgcttg

SEQ ID NO: 3456670 - DNA, 25 bp, Homo sapien
tcttcctagatttgcaaaccgctga

SEQ ID NO: 3456671 - DNA, 25 bp, Homo sapien
ctcagttagtcatggtatataatcc

SEQ ID NO: 3456672 - DNA, 25 bp, Homo sapien
tattccaaagcgatattgttctgcc

SEQ ID NO: 3456673 - DNA, 25 bp, Homo sapien
gaacaacctcgcattcctagaataa

SEQ ID NO: 3456674 - DNA, 25 bp, Homo sapien
ttgggaaatgttcccaccttattca

SEQ ID NO: 3456675 - DNA, 25 bp, Homo sapien
aatgaagacttggatgaggatgggc

SEQ ID NO: 3456676 - DNA, 25 bp, Homo sapien
agacttggatgaggatgggcctctt

SEQ ID NO: 3456677 - DNA, 25 bp, Homo sapien
cccagggaaatcttagcagtgacaa

SEQ ID NO: 3456678 - DNA, 25 bp, Homo sapien
atcttagcagtgacaaagcaatgaa

SEQ ID NO: 3456679 - DNA, 25 bp, Homo sapien
tgcttttcctcagtgtgcagaactc

SEQ ID NO: 3456680 - DNA, 25 bp, Homo sapien
agtgcttttcctcagtgtgcagaac

SEQ ID NO: 3456681 - DNA, 25 bp, Homo sapien
gcttttcctcagtgtgcagaactct

SEQ ID NO: 3456682 - DNA, 25 bp, Homo sapien
ttttcctcagtgtgcagaactctcg

SEQ ID NO: 3456683 - DNA, 25 bp, Homo sapien
ttgatgtttcgtatgcctttaagtc

SEQ ID NO: 3456684 - DNA, 25 bp, Homo sapien
cctccaccttcttgctttcaggttt

SEQ ID NO: 3456685 - DNA, 25 bp, Homo sapien
cttcctccaccttcttgctttcagg

SEQ ID NO: 3456686 - DNA, 25 bp, Homo sapien
tgagtagcaggtggtactttacccc

SEQ ID NO: 3456687 - DNA, 25 bp, Homo sapien
ggcttcaacagcagccagtttctta

SEQ ID NO: 3456688 - DNA, 25 bp, Homo sapien
cttcaacagcagccagtttcttatc

SEQ ID NO: 3456689 - DNA, 25 bp, Homo sapien
caacagcagccagtttcttatcatt

SEQ ID NO: 3456690 - DNA, 25 bp, Homo sapien
gggcttcaacagcagccagtttctt

SEQ ID NO: 3456691 - DNA, 25 bp, Homo sapien
cagctggcagtggaatgcgcaccat

SEQ ID NO: 3456692 - DNA, 25 bp, Homo sapien
tccaccaactctttcagccagaggg

SEQ ID NO: 3456693 - DNA, 25 bp, Homo sapien
ccaactctttcagccagagggcagc

SEQ ID NO: 3456694 - DNA, 25 bp, Homo sapien
caccaactctttcagccagagggca

SEQ ID NO: 3456695 - DNA, 25 bp, Homo sapien
ttcagccttgtgtagggctcacctc

SEQ ID NO: 3456696 - DNA, 25 bp, Homo sapien
ttcttcagccttgtgtagggctcac

SEQ ID NO: 3456697 - DNA, 25 bp, Homo sapien
agccttgtgtagggctcacctcctc

SEQ ID NO: 3456698 - DNA, 25 bp, Homo sapien
tcttcagccttgtgtagggctcacc

SEQ ID NO: 3456699 - DNA, 25 bp, Homo sapien
tggggccgttcccacactgacgtcc

SEQ ID NO: 3456700 - DNA, 25 bp, Homo sapien
ttcccacactgacgtcccacttcct

SEQ ID NO: 3456701 - DNA, 25 bp, Homo sapien
gcttctcatctccagactcaggaaa

SEQ ID NO: 3456702 - DNA, 25 bp, Homo sapien
gggccgttcccacactgacgtccca

SEQ ID NO: 3456703 - DNA, 25 bp, Homo sapien
ttccgtcaatgtaggctgtgagggc

SEQ ID NO: 3456704 - DNA, 25 bp, Homo sapien
tgataatcaggatctccaatcggcc

SEQ ID NO: 3456705 - DNA, 25 bp, Homo sapien
ttgtcaatatttccgtcaatgtagg

SEQ ID NO: 3456706 - DNA, 25 bp, Homo sapien
tccagctgataatcaggatctccaa

SEQ ID NO: 3456707 - DNA, 25 bp, Homo sapien
cgcatacagccaagaagcactggag

SEQ ID NO: 3456708 - DNA, 25 bp, Homo sapien
caccacgcatacagccaagaagcac

SEQ ID NO: 3456709 - DNA, 25 bp, Homo sapien
agccaagaagcactggaggtggcca

SEQ ID NO: 3456710 - DNA, 25 bp, Homo sapien
cacgcatacagccaagaagcactgg

SEQ ID NO: 3456711 - DNA, 25 bp, Homo sapien
gaggggcacatgcatagcaggttcc

SEQ ID NO: 3456712 - DNA, 25 bp, Homo sapien
cttctcctcctaccagggagcagct

SEQ ID NO: 3456713 - DNA, 25 bp, Homo sapien
ccctttacaactggggcagaacagg

SEQ ID NO: 3456714 - DNA, 25 bp, Homo sapien
acatgcatagcaggttcctgatttt

SEQ ID NO: 3456715 - DNA, 25 bp, Homo sapien
ggactgccacattcactttgatgga

SEQ ID NO: 3456716 - DNA, 25 bp, Homo sapien
gctctgagttccgggcctctccagg

SEQ ID NO: 3456717 - DNA, 25 bp, Homo sapien
aggactgccacattcactttgatgg

SEQ ID NO: 3456718 - DNA, 25 bp, Homo sapien
tctgagttccgggcctctccaggac

SEQ ID NO: 3456719 - DNA, 25 bp, Homo sapien
catgaaatagctgtgctcttagacc

SEQ ID NO: 3456720 - DNA, 25 bp, Homo sapien
tcttagaccaataagttggatgccc

SEQ ID NO: 3456721 - DNA, 25 bp, Homo sapien
cccaagggtaggcaattgttctcca

SEQ ID NO: 3456722 - DNA, 25 bp, Homo sapien
tccacactgcatacaacaaggtctt

SEQ ID NO: 3456723 - DNA, 25 bp, Homo sapien
gccaggggtctgacttaggtgcact

SEQ ID NO: 3456724 - DNA, 25 bp, Homo sapien
gggtccacttgtttcagattccctc

SEQ ID NO: 3456725 - DNA, 25 bp, Homo sapien
tccagggtccacttgtttcagattc

SEQ ID NO: 3456726 - DNA, 25 bp, Homo sapien
taggtgcactatttctccagggtcc

SEQ ID NO: 3456727 - DNA, 25 bp, Homo sapien
gaaagagattgaatatgcacctgac

SEQ ID NO: 3456728 - DNA, 25 bp, Homo sapien
tgtgttctggatactcaactgccat

SEQ ID NO: 3456729 - DNA, 25 bp, Homo sapien
ttgacagtaagcaccccaggcgtgt

SEQ ID NO: 3456730 - DNA, 25 bp, Homo sapien
cattgggtatcgctcacttctgcag

SEQ ID NO: 3456731 - DNA, 25 bp, Homo sapien
gataccttacttgataatggacttg

SEQ ID NO: 3456732 - DNA, 25 bp, Homo sapien
taatctaaataaccaaatctgggtg

SEQ ID NO: 3456733 - DNA, 25 bp, Homo sapien
taggtttaacccagtttgcattctc

SEQ ID NO: 3456734 - DNA, 25 bp, Homo sapien
ttcctgggaaaagcaaatctgcctg

SEQ ID NO: 3456735 - DNA, 25 bp, Homo sapien
catatgtactgtgttttggtagtgt

SEQ ID NO: 3456736 - DNA, 25 bp, Homo sapien
gggtgatacgttgtacatatgtact

SEQ ID NO: 3456737 - DNA, 25 bp, Homo sapien
ttcttctgagaatttagcacacttt

SEQ ID NO: 3456738 - DNA, 25 bp, Homo sapien
cacttttgagtatctttgctgctag

SEQ ID NO: 3456739 - DNA, 25 bp, Homo sapien
cctttttgaaagttgagagaattag

SEQ ID NO: 3456740 - DNA, 25 bp, Homo sapien
ttttgaaagttgagagaattagcat

SEQ ID NO: 3456741 - DNA, 25 bp, Homo sapien
ctttttgaaagttgagagaattagc

SEQ ID NO: 3456742 - DNA, 25 bp, Homo sapien
tctgtatgatcttcggagcctgctg

SEQ ID NO: 3456743 - DNA, 25 bp, Homo sapien
cacttcggccactgcggattggtcg

SEQ ID NO: 3456744 - DNA, 25 bp, Homo sapien
tttgcttccgggtcgtaggcgctag

SEQ ID NO: 3456745 - DNA, 25 bp, Homo sapien
tatctttcttatcgcgatgggacgg

SEQ ID NO: 3456746 - DNA, 25 bp, Homo sapien
cacgcagtaccggaatgaaggagtc

SEQ ID NO: 3456747 - DNA, 25 bp, Homo sapien
aagatcgtggttgccccgtacatat

SEQ ID NO: 3456748 - DNA, 25 bp, Homo sapien
tccgaagcccaactctctaggtttg

SEQ ID NO: 3456749 - DNA, 25 bp, Homo sapien
taaggcactgatttcaaacgcccgc

SEQ ID NO: 3456750 - DNA, 25 bp, Homo sapien
ctgttctatatgcagaggatacacc

SEQ ID NO: 3456751 - DNA, 25 bp, Homo sapien
aggatacacccagtgaacaagagag

SEQ ID NO: 3456752 - DNA, 25 bp, Homo sapien
cagaggatacacccagtgaacaaga

SEQ ID NO: 3456753 - DNA, 25 bp, Homo sapien
actgttctatatgcagaggatacac

SEQ ID NO: 3456754 - DNA, 25 bp, Homo sapien
taagagtggctctaaactttgacat

SEQ ID NO: 3456755 - DNA, 25 bp, Homo sapien
tagggaagtcttaagtaactagata

SEQ ID NO: 3456756 - DNA, 25 bp, Homo sapien
cctattagtactattagcttggcca

SEQ ID NO: 3456757 - DNA, 25 bp, Homo sapien
gatatgatctctagcaaaatgctga

SEQ ID NO: 3456758 - DNA, 25 bp, Homo sapien
gtctattgaattactcagacctggg

SEQ ID NO: 3456759 - DNA, 25 bp, Homo sapien
gagaatgtcctcagtgtttagaaca

SEQ ID NO: 3456760 - DNA, 25 bp, Homo sapien
cattgacgttagctgatcctgcaac

SEQ ID NO: 3456761 - DNA, 25 bp, Homo sapien
gcaggatctaccagcgtactttttt

SEQ ID NO: 3456762 - DNA, 25 bp, Homo sapien
ctgggcacagttggccttagacttc

SEQ ID NO: 3456763 - DNA, 25 bp, Homo sapien
tgttacaatttggattctgggcaca

SEQ ID NO: 3456764 - DNA, 25 bp, Homo sapien
tctgggcacagttggccttagactt

SEQ ID NO: 3456765 - DNA, 25 bp, Homo sapien
tgggcacagttggccttagacttca

SEQ ID NO: 3456766 - DNA, 25 bp, Homo sapien
tctttgggtggaattatcttagcca

SEQ ID NO: 3456767 - DNA, 25 bp, Homo sapien
tgtcagcaccataaatcggtgaatt

SEQ ID NO: 3456768 - DNA, 25 bp, Homo sapien
tgtgtgcaccttgggattccatgta

SEQ ID NO: 3456769 - DNA, 25 bp, Homo sapien
tcggtgaattatagatgcggttctt

SEQ ID NO: 3456770 - DNA, 25 bp, Homo sapien
ttccagcaggtcctgaattgttccc

SEQ ID NO: 3456771 - DNA, 25 bp, Homo sapien
cttttccagcaggtcctgaattgtt

SEQ ID NO: 3456772 - DNA, 25 bp, Homo sapien
tcctgaattgttcccaggtgcccaa

SEQ ID NO: 3456773 - DNA, 25 bp, Homo sapien
gcaggtcctgaattgttcccaggtg

SEQ ID NO: 3456774 - DNA, 25 bp, Homo sapien
aaagtacaagtagggtgtattgacg

SEQ ID NO: 3456775 - DNA, 25 bp, Homo sapien
caagtagggtgtattgacgccttct

SEQ ID NO: 3456776 - DNA, 25 bp, Homo sapien
tattgacgccttctatgacaacccc

SEQ ID NO: 3456777 - DNA, 25 bp, Homo sapien
agggtgtattgacgccttctatgac

SEQ ID NO: 3456778 - DNA, 25 bp, Homo sapien
gttccaggcgctggccatgttctgg

SEQ ID NO: 3456779 - DNA, 25 bp, Homo sapien
gagctccctggccaggcgttccagg

SEQ ID NO: 3456780 - DNA, 25 bp, Homo sapien
ccaggcgttccaggcgctggccatg

SEQ ID NO: 3456781 - DNA, 25 bp, Homo sapien
cctggccaggcgttccaggcgctgg

SEQ ID NO: 3456782 - DNA, 25 bp, Homo sapien
cggtcttgcccacgtttccacaggt

SEQ ID NO: 3456783 - DNA, 25 bp, Homo sapien
ctctgcgcagttgaaaccatggttg

SEQ ID NO: 3456784 - DNA, 25 bp, Homo sapien
atagcgttcaggttgcaggatgcgc

SEQ ID NO: 3456785 - DNA, 25 bp, Homo sapien
agttgaaaccatggttgaagccagc

SEQ ID NO: 3456786 - DNA, 25 bp, Homo sapien
cactaactgcagatcggcgtgggag

SEQ ID NO: 3456787 - DNA, 25 bp, Homo sapien
tgggctcagtggtacaggcttgtcc

SEQ ID NO: 3456788 - DNA, 25 bp, Homo sapien
catttgacgggtggataatctgtgc

SEQ ID NO: 3456789 - DNA, 25 bp, Homo sapien
gaagctgtgcatgttgtgcccgcca

SEQ ID NO: 3456790 - DNA, 25 bp, Homo sapien
cagggcagtgggatataaagacagc

SEQ ID NO: 3456791 - DNA, 25 bp, Homo sapien
cagcttccacagttggcccagagga

SEQ ID NO: 3456792 - DNA, 25 bp, Homo sapien
ccaaagacattccagggtccggtag

SEQ ID NO: 3456793 - DNA, 25 bp, Homo sapien
gaaaactaccatggacttggcagca

SEQ ID NO: 3456794 - DNA, 25 bp, Homo sapien
acccgaactgtgcttggctgggagc

SEQ ID NO: 3456795 - DNA, 25 bp, Homo sapien
catattcaacagtcatgggttcaga

SEQ ID NO: 3456796 - DNA, 25 bp, Homo sapien
gtcgaagaatctaatacacaggtcc

SEQ ID NO: 3456797 - DNA, 25 bp, Homo sapien
aatgtgtcagttcttgaaggtcgaa

SEQ ID NO: 3456798 - DNA, 25 bp, Homo sapien
tatgactcgtgttctggggactgga

SEQ ID NO: 3456799 - DNA, 25 bp, Homo sapien
gtatgactcgtgttctggggactgg

SEQ ID NO: 3456800 - DNA, 25 bp, Homo sapien
tggctattaagatgtcttcgatatc

SEQ ID NO: 3456801 - DNA, 25 bp, Homo sapien
agtggctattaagatgtcttcgata

SEQ ID NO: 3456802 - DNA, 25 bp, Homo sapien
ccttgggtggaattaccttggcaag

SEQ ID NO: 3456803 - DNA, 25 bp, Homo sapien
gctattaagatgtcttcgatatcat

SEQ ID NO: 3456804 - DNA, 25 bp, Homo sapien
tgcaaaattctggtgtggcggagtc

SEQ ID NO: 3456805 - DNA, 25 bp, Homo sapien
gcaaaattctggtgtggcggagtct

SEQ ID NO: 3456806 - DNA, 25 bp, Homo sapien
ctgcaaaattctggtgtggcggagt

SEQ ID NO: 3456807 - DNA, 25 bp, Homo sapien
caccataaattggtggattaccggg

SEQ ID NO: 3456808 - DNA, 25 bp, Homo sapien
ggctcttccagtatcgttgctccaa

SEQ ID NO: 3456809 - DNA, 25 bp, Homo sapien
ttcttcaaataaggagccgctgata

SEQ ID NO: 3456810 - DNA, 25 bp, Homo sapien
ggtgtgttgacaccctcgatgacaa

SEQ ID NO: 3456811 - DNA, 25 bp, Homo sapien
aggtgctgaccatgttctgggggca

SEQ ID NO: 3456812 - DNA, 25 bp, Homo sapien
ctggccaggcgttccaggtgctgac

SEQ ID NO: 3456813 - DNA, 25 bp, Homo sapien
tggccaggcgttccaggtgctgacc

SEQ ID NO: 3456814 - DNA, 25 bp, Homo sapien
tgctgaccatgttctgggggcacca

SEQ ID NO: 3456815 - DNA, 25 bp, Homo sapien
ggaaaaggtcactgtcgactcccca

SEQ ID NO: 3456816 - DNA, 25 bp, Homo sapien
ggaaggcctcacagccccgagaaat

SEQ ID NO: 3456817 - DNA, 25 bp, Homo sapien
cccgagaaatgtctgggaagagctc

SEQ ID NO: 3456818 - DNA, 25 bp, Homo sapien
tcgggttgcacaatgcgcacaaagg

SEQ ID NO: 3456819 - DNA, 25 bp, Homo sapien
tgggttgtaacagtgccctgaggac

SEQ ID NO: 3456820 - DNA, 25 bp, Homo sapien
tccacaatggccaagtcttgcctgt

SEQ ID NO: 3456821 - DNA, 25 bp, Homo sapien
tatgcagagctttggaatgcggatc

SEQ ID NO: 3456822 - DNA, 25 bp, Homo sapien
aatgcggatccaggcacagcatcag

SEQ ID NO: 3456823 - DNA, 25 bp, Homo sapien
gacaacatcagggagattactagta

SEQ ID NO: 3456824 - DNA, 25 bp, Homo sapien
ggagttgaagatcagggacacagca

SEQ ID NO: 3456825 - DNA, 25 bp, Homo sapien
cctggaaaacttaatcaaaggcaca

SEQ ID NO: 3456826 - DNA, 25 bp, Homo sapien
caggccagggtgcatggtttcatca

SEQ ID NO: 3456827 - DNA, 25 bp, Homo sapien
gggagcgctctagagcagcaattcc

SEQ ID NO: 3456828 - DNA, 25 bp, Homo sapien
agcgctctagagcagcaattcccaa

SEQ ID NO: 3456829 - DNA, 25 bp, Homo sapien
gcagggagcgctctagagcagcaat

SEQ ID NO: 3456830 - DNA, 25 bp, Homo sapien
cagggagcgctctagagcagcaatt

SEQ ID NO: 3456831 - DNA, 25 bp, Homo sapien
ccgggcctggaaactggcgcggcac

SEQ ID NO: 3456832 - DNA, 25 bp, Homo sapien
ctggtggggcgacctgcgttcctct

SEQ ID NO: 3456833 - DNA, 25 bp, Homo sapien
tctcttgcggttgcgccccgcgtgg

SEQ ID NO: 3456834 - DNA, 25 bp, Homo sapien
gggcctggaaactggcgcggcactg

SEQ ID NO: 3456835 - DNA, 25 bp, Homo sapien
gcgtcttgcgcgtcgctccggtcgt

SEQ ID NO: 3456836 - DNA, 25 bp, Homo sapien
cgctccggtcgtgaaagcggacgaa

SEQ ID NO: 3456837 - DNA, 25 bp, Homo sapien
cacgcgcctcaagctgtcgggagag

SEQ ID NO: 3456838 - DNA, 25 bp, Homo sapien
tgatcatgccatccacgtcgggagg

SEQ ID NO: 3456839 - DNA, 25 bp, Homo sapien
aggtcccggcggccatagcgcgcca

SEQ ID NO: 3456840 - DNA, 25 bp, Homo sapien
tccgccgtccgtagcggccgcccca

SEQ ID NO: 3456841 - DNA, 25 bp, Homo sapien
ccgccgtccgtagcggccgccccag

SEQ ID NO: 3456842 - DNA, 25 bp, Homo sapien
gtagatagacaggctatagcgagac

SEQ ID NO: 3456843 - DNA, 25 bp, Homo sapien
ctgtagatagacaggctatagcgag

SEQ ID NO: 3456844 - DNA, 25 bp, Homo sapien
tgtagatagacaggctatagcgaga

SEQ ID NO: 3456845 - DNA, 25 bp, Homo sapien
tagatagacaggctatagcgagacc

SEQ ID NO: 3456846 - DNA, 25 bp, Homo sapien
gctgtaagatcgactgtagggagat

SEQ ID NO: 3456847 - DNA, 25 bp, Homo sapien
tccctgtagggagatcggctgtagt

SEQ ID NO: 3456848 - DNA, 25 bp, Homo sapien
ggccgtagcgagatcccctgtaatg

SEQ ID NO: 3456849 - DNA, 25 bp, Homo sapien
tagggagacctcctgtagcgagatt

SEQ ID NO: 3456850 - DNA, 25 bp, Homo sapien
cttcgagtgagagcggcggtaggga

SEQ ID NO: 3456851 - DNA, 25 bp, Homo sapien
gaggactcccggacgtagatctaga

SEQ ID NO: 3456852 - DNA, 25 bp, Homo sapien
ggaggactcccggacgtagatctag

SEQ ID NO: 3456853 - DNA, 25 bp, Homo sapien
aggactcccggacgtagatctagac

SEQ ID NO: 3456854 - DNA, 25 bp, Homo sapien
gggaggactcccggacgtagatcta

SEQ ID NO: 3456855 - DNA, 25 bp, Homo sapien
tagggtgtgttgacactctcttcga

SEQ ID NO: 3456856 - DNA, 25 bp, Homo sapien
agtgatggtagttgatgtaaaggtc

SEQ ID NO: 3456857 - DNA, 25 bp, Homo sapien
ggctctctgaagtgatggtagttga

SEQ ID NO: 3456858 - DNA, 25 bp, Homo sapien
gctatggaaaggtggtcatccacat

SEQ ID NO: 3456859 - DNA, 25 bp, Homo sapien
ccattctgcatgagcacggtgggca

SEQ ID NO: 3456860 - DNA, 25 bp, Homo sapien
tttgcagttgaagcctgtgttgtag

SEQ ID NO: 3456861 - DNA, 25 bp, Homo sapien
ccatcctgggtggttaaattgatgg

SEQ ID NO: 3456862 - DNA, 25 bp, Homo sapien
tgtgttgtagtcatagggaaatgtc

SEQ ID NO: 3456863 - DNA, 25 bp, Homo sapien
gcttcagtccgggtacaatgtcctc

SEQ ID NO: 3456864 - DNA, 25 bp, Homo sapien
ctttgatccacaatggccccatctt

SEQ ID NO: 3456865 - DNA, 25 bp, Homo sapien
tcctgccaggtaatgagctcctggc

SEQ ID NO: 3456866 - DNA, 25 bp, Homo sapien
tccaggggagcttcagtccgggtac

SEQ ID NO: 3456867 - DNA, 25 bp, Homo sapien
tgcaactgtacatatgggctcagtg

SEQ ID NO: 3456868 - DNA, 25 bp, Homo sapien
tgacctttggatgggcatcagtttc

SEQ ID NO: 3456869 - DNA, 25 bp, Homo sapien
ccaagatagatggtgggccacggtg

SEQ ID NO: 3456870 - DNA, 25 bp, Homo sapien
ggccacggtgtgttcttgggagcct

SEQ ID NO: 3456871 - DNA, 25 bp, Homo sapien
tagtcagggtggttcagtgtcatgc

SEQ ID NO: 3456872 - DNA, 25 bp, Homo sapien
aaagcatcagatccaaagtctctcc

SEQ ID NO: 3456873 - DNA, 25 bp, Homo sapien
ggatacgcacacatcaaagcatcag

SEQ ID NO: 3456874 - DNA, 25 bp, Homo sapien
tgggaggaatcagtggaacatagtc

SEQ ID NO: 3456875 - DNA, 25 bp, Homo sapien
cttctggccctaagcctgcaccatg

SEQ ID NO: 3456876 - DNA, 25 bp, Homo sapien
tcaaccttctggccctaagcctgca

SEQ ID NO: 3456877 - DNA, 25 bp, Homo sapien
tctggccctaagcctgcaccatgtc

SEQ ID NO: 3456878 - DNA, 25 bp, Homo sapien
aaccttctggccctaagcctgcacc

SEQ ID NO: 3456879 - DNA, 25 bp, Homo sapien
ctggggactggagtgcacagacttc

SEQ ID NO: 3456880 - DNA, 25 bp, Homo sapien
ggggactggagtgcacagacttcat

SEQ ID NO: 3456881 - DNA, 25 bp, Homo sapien
tggggactggagtgcacagacttca

SEQ ID NO: 3456882 - DNA, 25 bp, Homo sapien
ttgggtggaattaccttggcgaggc

SEQ ID NO: 3456883 - DNA, 25 bp, Homo sapien
cttgggtggaattaccttggcgagg

SEQ ID NO: 3456884 - DNA, 25 bp, Homo sapien
ccttgggtggaattaccttggcgag

SEQ ID NO: 3456885 - DNA, 25 bp, Homo sapien
ctccaacaggtccagaattgttccc

SEQ ID NO: 3456886 - DNA, 25 bp, Homo sapien
aggtccagaattgttcccaggtgtc

SEQ ID NO: 3456887 - DNA, 25 bp, Homo sapien
ctgctccaacaggtccagaattgtt

SEQ ID NO: 3456888 - DNA, 25 bp, Homo sapien
aacaggtccagaattgttcccaggt

SEQ ID NO: 3456889 - DNA, 25 bp, Homo sapien
tgtgttgacaccctcgatgacaacc

SEQ ID NO: 3456890 - DNA, 25 bp, Homo sapien
tacaggtagggtgtgttgacaccct

SEQ ID NO: 3456891 - DNA, 25 bp, Homo sapien
tagggtgtgttgacaccctcgatga

SEQ ID NO: 3456892 - DNA, 25 bp, Homo sapien
aaagtacaggtagggtgtgttgaca

SEQ ID NO: 3456893 - DNA, 25 bp, Homo sapien
tcacagccccgggaattgcctggga

SEQ ID NO: 3456894 - DNA, 25 bp, Homo sapien
ctcacagccccgggaattgcctggg

SEQ ID NO: 3456895 - DNA, 25 bp, Homo sapien
tgtgaagccactttaccataatcaa

SEQ ID NO: 3456896 - DNA, 25 bp, Homo sapien
gctcatagctctcgggttgcaggat

SEQ ID NO: 3456897 - DNA, 25 bp, Homo sapien
gcctcgccacagctacactgtgaag

SEQ ID NO: 3456898 - DNA, 25 bp, Homo sapien
catggaaaaggtcactctcgcctcg

SEQ ID NO: 3456899 - DNA, 25 bp, Homo sapien
cacagtccgtgtgggacagctggtt

SEQ ID NO: 3456900 - DNA, 25 bp, Homo sapien
gcagctctcctaagtgctatgtcct

SEQ ID NO: 3456901 - DNA, 25 bp, Homo sapien
acagctggttatgtggttccggaga

SEQ ID NO: 3456902 - DNA, 25 bp, Homo sapien
tggttccggagatgcctcaggccca

SEQ ID NO: 3456903 - DNA, 25 bp, Homo sapien
ggcttggattgcagatccaggcaca

SEQ ID NO: 3456904 - DNA, 25 bp, Homo sapien
acgtctccagggcttggattgcaga

SEQ ID NO: 3456905 - DNA, 25 bp, Homo sapien
tctccagggcttggattgcagatcc

SEQ ID NO: 3456906 - DNA, 25 bp, Homo sapien
tgcagatccaggcacagcatcggta

SEQ ID NO: 3456907 - DNA, 25 bp, Homo sapien
agactgaacagttgtctcctcagtc

SEQ ID NO: 3456908 - DNA, 25 bp, Homo sapien
gcagactgaacagttgtctcctcag

SEQ ID NO: 3456909 - DNA, 25 bp, Homo sapien
cagactgaacagttgtctcctcagt

SEQ ID NO: 3456910 - DNA, 25 bp, Homo sapien
gcttcatcggcgaactggagctgag

SEQ ID NO: 3456911 - DNA, 25 bp, Homo sapien
tcaaaggtgcgggtttgtctgtcaa

SEQ ID NO: 3456912 - DNA, 25 bp, Homo sapien
gactactagcagtgctgtcgaggga

SEQ ID NO: 3456913 - DNA, 25 bp, Homo sapien
tgcggaaggccaccgctcaaaggtg

SEQ ID NO: 3456914 - DNA, 25 bp, Homo sapien
ttgggaccggaaccctagaggcata

SEQ ID NO: 3456915 - DNA, 25 bp, Homo sapien
attcagtggcgtatctctgtctggc

SEQ ID NO: 3456916 - DNA, 25 bp, Homo sapien
tgtccctggacaatgtaatcaaagg

SEQ ID NO: 3456917 - DNA, 25 bp, Homo sapien
gaatggtccattgctacaaccttgg

SEQ ID NO: 3456918 - DNA, 25 bp, Homo sapien
gaaaatcccagtatggaccttctta

SEQ ID NO: 3456919 - DNA, 25 bp, Homo sapien
gcaggtggaaaatcccagtatggac

SEQ ID NO: 3456920 - DNA, 25 bp, Homo sapien
agccttcctggaccagcggcttggc

SEQ ID NO: 3456921 - DNA, 25 bp, Homo sapien
gggccccagaagatctcctgttctc

SEQ ID NO: 3456922 - DNA, 25 bp, Homo sapien
gcttcaactttggagccttaataac

SEQ ID NO: 3456923 - DNA, 25 bp, Homo sapien
attgcctggtgcttcaactttggag

SEQ ID NO: 3456924 - DNA, 25 bp, Homo sapien
tcaactttggagccttaataacatt

SEQ ID NO: 3456925 - DNA, 25 bp, Homo sapien
ttgcctggtgcttcaactttggagc

SEQ ID NO: 3456926 - DNA, 25 bp, Homo sapien
tgtacctgggcaacatcctaaccta

SEQ ID NO: 3456927 - DNA, 25 bp, Homo sapien
tgacggtgcgacctgcgtttctttc

SEQ ID NO: 3456928 - DNA, 25 bp, Homo sapien
ggagcagcaacttccgagttcccaa

SEQ ID NO: 3456929 - DNA, 25 bp, Homo sapien
cactgggctggatttacattagacg

SEQ ID NO: 3456930 - DNA, 25 bp, Homo sapien
acacgcgcctcaagctgtcgggaga

SEQ ID NO: 3456931 - DNA, 25 bp, Homo sapien
gcgtcttgggcgtcgcgccggtcgt

SEQ ID NO: 3456932 - DNA, 25 bp, Homo sapien
cgtgaaagcggacgaaagcgaagcc

SEQ ID NO: 3456933 - DNA, 25 bp, Homo sapien
accttgagggtgatcatgccgtcca

SEQ ID NO: 3456934 - DNA, 25 bp, Homo sapien
aggtcccggcggccatagcgcgcca

SEQ ID NO: 3456935 - DNA, 25 bp, Homo sapien
ccgccgtccgtagccgccgcctctg

SEQ ID NO: 3456936 - DNA, 25 bp, Homo sapien
cgccgtccgtagccgccgcctctgg

SEQ ID NO: 3456937 - DNA, 25 bp, Homo sapien
tccgccgtccgtagccgccgcctct

SEQ ID NO: 3456938 - DNA, 25 bp, Homo sapien
ggagcagctgggaccccgggatcgg

SEQ ID NO: 3456939 - DNA, 25 bp, Homo sapien
atcggctgcggtgtcgccgcctggg

SEQ ID NO: 3456940 - DNA, 25 bp, Homo sapien
ccgggatcggctgcggtgtcgccgc

SEQ ID NO: 3456941 - DNA, 25 bp, Homo sapien
tgggaccccgggatcggctgcggtg

SEQ ID NO: 3456942 - DNA, 25 bp, Homo sapien
cagatgagctgtagtgagatccgcc

SEQ ID NO: 3456943 - DNA, 25 bp, Homo sapien
gagaacccctatagcgagatcggct

SEQ ID NO: 3456944 - DNA, 25 bp, Homo sapien
tccctgtagcgagatctgctgtagg

SEQ ID NO: 3456945 - DNA, 25 bp, Homo sapien
tagcgcgaccggctgtaaggagatc

SEQ ID NO: 3456946 - DNA, 25 bp, Homo sapien
tcgcgcagagctcgatttggaggtt

SEQ ID NO: 3456947 - DNA, 25 bp, Homo sapien
agagcgagagctagtggaggaccca

SEQ ID NO: 3456948 - DNA, 25 bp, Homo sapien
agcgagacctggagaccgaggagga

SEQ ID NO: 3456949 - DNA, 25 bp, Homo sapien
tgaagacctggaccgcgagcgagac

SEQ ID NO: 3456950 - DNA, 25 bp, Homo sapien
tcttcttccagggacgttgcttcca

SEQ ID NO: 3456951 - DNA, 25 bp, Homo sapien
tccatagactgagtatgtgatcctt

SEQ ID NO: 3456952 - DNA, 25 bp, Homo sapien
tcctccatcacgttgcttcctgatg

SEQ ID NO: 3456953 - DNA, 25 bp, Homo sapien
ttccagggacgttgcttccatagac

SEQ ID NO: 3456954 - DNA, 25 bp, Homo sapien
gaataacaacaaaacggcacataga

SEQ ID NO: 3456955 - DNA, 25 bp, Homo sapien
taggtcgttcacctcctaagttaca

SEQ ID NO: 3456956 - DNA, 25 bp, Homo sapien
gaattttgccacctgatgcaaagct

SEQ ID NO: 3456957 - DNA, 25 bp, Homo sapien
gaagcatgtcttgacagcgttaggc

SEQ ID NO: 3456958 - DNA, 25 bp, Homo sapien
agacctgtgtttgctaaaaccccag

SEQ ID NO: 3456959 - DNA, 25 bp, Homo sapien
agagattagacctgtgtttgctaaa

SEQ ID NO: 3456960 - DNA, 25 bp, Homo sapien
aaacacaaaagagattagacctgtg

SEQ ID NO: 3456961 - DNA, 25 bp, Homo sapien
gattagacctgtgtttgctaaaacc

SEQ ID NO: 3456962 - DNA, 25 bp, Homo sapien
gcatgctccattatttatctgcaag

SEQ ID NO: 3456963 - DNA, 25 bp, Homo sapien
atcactcaactgctacgcagccggg

SEQ ID NO: 3456964 - DNA, 25 bp, Homo sapien
acaaggcgtgttttccccaggagca

SEQ ID NO: 3456965 - DNA, 25 bp, Homo sapien
gaaaaggtgtgattatcgtcagcta

SEQ ID NO: 3456966 - DNA, 25 bp, Homo sapien
gataatgatgaaagccaaaaatgga

SEQ ID NO: 3456967 - DNA, 25 bp, Homo sapien
caataaagcacatagctaaaagcct

SEQ ID NO: 3456968 - DNA, 25 bp, Homo sapien
gaacacataacatctagtagggata

SEQ ID NO: 3456969 - DNA, 25 bp, Homo sapien
ccagatcattgacaccaaattgtta

SEQ ID NO: 3456970 - DNA, 25 bp, Homo sapien
catgggttcatgtcctctgtgggtc

SEQ ID NO: 3456971 - DNA, 25 bp, Homo sapien
ttgacaatgcttccctacccttagg

SEQ ID NO: 3456972 - DNA, 25 bp, Homo sapien
tactacgatgccatgggtgtcctga

SEQ ID NO: 3456973 - DNA, 25 bp, Homo sapien
gggatgtatatctacagaccacagc

SEQ ID NO: 3456974 - DNA, 25 bp, Homo sapien
gaaataccactatatacccatcaga

SEQ ID NO: 3456975 - DNA, 25 bp, Homo sapien
cacaaaggaggatatccaagtggct

SEQ ID NO: 3456976 - DNA, 25 bp, Homo sapien
agctacaaccttttggtaatcaggg

SEQ ID NO: 3456977 - DNA, 25 bp, Homo sapien
gaatatgtacttgatctataaccca

SEQ ID NO: 3456978 - DNA, 25 bp, Homo sapien
tgaaacatcaaccactccaactgct

SEQ ID NO: 3456979 - DNA, 25 bp, Homo sapien
accactccaactgctcaggggtttc

SEQ ID NO: 3456980 - DNA, 25 bp, Homo sapien
acatcaaccactccaactgctcagg

SEQ ID NO: 3456981 - DNA, 25 bp, Homo sapien
tcaaccactccaactgctcaggggt

SEQ ID NO: 3456982 - DNA, 25 bp, Homo sapien
gcttggatgctgtgaagtgcaacac

SEQ ID NO: 3456983 - DNA, 25 bp, Homo sapien
tgtcccagccttgtcatgtgtcctt

SEQ ID NO: 3456984 - DNA, 25 bp, Homo sapien
gaaacagaaacgttggccgacaagc

SEQ ID NO: 3456985 - DNA, 25 bp, Homo sapien
gaagaacaagcttctaccacagaaa

SEQ ID NO: 3456986 - DNA, 25 bp, Homo sapien
gcccgccacctctgataagcataaa

SEQ ID NO: 3456987 - DNA, 25 bp, Homo sapien
tggttggtggatcccagtggctacc

SEQ ID NO: 3456988 - DNA, 25 bp, Homo sapien
tatctctgccactcagtccctgtgg

SEQ ID NO: 3456989 - DNA, 25 bp, Homo sapien
aaattacaaatgttctcaccccaag

SEQ ID NO: 3456990 - DNA, 25 bp, Homo sapien
tgcggtcacaaagacagcctagtgg

SEQ ID NO: 3456991 - DNA, 25 bp, Homo sapien
gagataggcactggattaccacagg

SEQ ID NO: 3456992 - DNA, 25 bp, Homo sapien
tctgaatgcctaggtgccagcctga

SEQ ID NO: 3456993 - DNA, 25 bp, Homo sapien
aacgtcattggtcaacaggttggcc

SEQ ID NO: 3456994 - DNA, 25 bp, Homo sapien
tgccgcggcgcgagctctgcaggct

SEQ ID NO: 3456995 - DNA, 25 bp, Homo sapien
ggctgccgcggcgcgagctctgcag

SEQ ID NO: 3456996 - DNA, 25 bp, Homo sapien
gctgccgcggcgcgagctctgcagg

SEQ ID NO: 3456997 - DNA, 25 bp, Homo sapien
ccgcggcgcgagctctgcaggctgg

SEQ ID NO: 3456998 - DNA, 25 bp, Homo sapien
tgtcacattcgccaaagccggcttc

SEQ ID NO: 3456999 - DNA, 25 bp, Homo sapien
ggtcccggcgtagaagaacttgtca

SEQ ID NO: 3457000 - DNA, 25 bp, Homo sapien
agaacttgtcacattcgccaaagcc

SEQ ID NO: 3457001 - DNA, 25 bp, Homo sapien
tcctcctcgcccacgagccggcctt

SEQ ID NO: 3457002 - DNA, 25 bp, Homo sapien
gggtggcgaagcgctcagcaccctc

SEQ ID NO: 3457003 - DNA, 25 bp, Homo sapien
tcccgggtgctgtagagggtggcga

SEQ ID NO: 3457004 - DNA, 25 bp, Homo sapien
cctccgcgcgctgacagatcttcac

SEQ ID NO: 3457005 - DNA, 25 bp, Homo sapien
accctccgcgcgctgacagatcttc

SEQ ID NO: 3457006 - DNA, 25 bp, Homo sapien
cagccatcgctgctcggcgccgccg

SEQ ID NO: 3457007 - DNA, 25 bp, Homo sapien
ctgcggctccaccagccatcgctgc

SEQ ID NO: 3457008 - DNA, 25 bp, Homo sapien
accagccatcgctgctcggcgccgc

SEQ ID NO: 3457009 - DNA, 25 bp, Homo sapien
gcggctccaccagccatcgctgctc

SEQ ID NO: 3457010 - DNA, 25 bp, Homo sapien
gagagcgttgggtcagttcttcccc

SEQ ID NO: 3457011 - DNA, 25 bp, Homo sapien
tcaggaaagggagagcgttgggtca

SEQ ID NO: 3457012 - DNA, 25 bp, Homo sapien
gccgtcaggaaagggagagcgttgg

SEQ ID NO: 3457013 - DNA, 25 bp, Homo sapien
agggagagcgttgggtcagttcttc

SEQ ID NO: 3457014 - DNA, 25 bp, Homo sapien
catgatttcctcagacgtatgttct

SEQ ID NO: 3457015 - DNA, 25 bp, Homo sapien
ttgttccagaactgcactcagatct

SEQ ID NO: 3457016 - DNA, 25 bp, Homo sapien
ttgtttagcatccattcccatgatt

SEQ ID NO: 3457017 - DNA, 25 bp, Homo sapien
tcctcagacgtatgttctgtctccc

SEQ ID NO: 3457018 - DNA, 25 bp, Homo sapien
cagagatgcaagactctatccccta

SEQ ID NO: 3457019 - DNA, 25 bp, Homo sapien
agcaatgtctccatacgcccagaga

SEQ ID NO: 3457020 - DNA, 25 bp, Homo sapien
gagatgggctctcctcaggctcatg

SEQ ID NO: 3457021 - DNA, 25 bp, Homo sapien
tccaatccaacagcctgtctggcag

SEQ ID NO: 3457022 - DNA, 25 bp, Homo sapien
tgccacctctgctcaaggagcggag

SEQ ID NO: 3457023 - DNA, 25 bp, Homo sapien
tctgctcaaggagcggagctctgga

SEQ ID NO: 3457024 - DNA, 25 bp, Homo sapien
ggatgtgtgggtctgccacctctgc

SEQ ID NO: 3457025 - DNA, 25 bp, Homo sapien
ctagggctggatgatggatgtgtgg

SEQ ID NO: 3457026 - DNA, 25 bp, Homo sapien
ctgggacaagttgtcttgatcccgt

SEQ ID NO: 3457027 - DNA, 25 bp, Homo sapien
ggacaagttgtcttgatcccgtaag

SEQ ID NO: 3457028 - DNA, 25 bp, Homo sapien
gacaagttgtcttgatcccgtaagt

SEQ ID NO: 3457029 - DNA, 25 bp, Homo sapien
gggacaagttgtcttgatcccgtaa

SEQ ID NO: 3457030 - DNA, 25 bp, Homo sapien
tgtaagaaacgtagtgactgacaac

SEQ ID NO: 3457031 - DNA, 25 bp, Homo sapien
tgaaggctcctagatgcactttggg

SEQ ID NO: 3457032 - DNA, 25 bp, Homo sapien
tgacaacagccagtgaagggtgtga

SEQ ID NO: 3457033 - DNA, 25 bp, Homo sapien
aagggccacccaatctggccagcaa

SEQ ID NO: 3457034 - DNA, 25 bp, Homo sapien
gtgcacacccgtaggtgttggcaaa

SEQ ID NO: 3457035 - DNA, 25 bp, Homo sapien
ctgtgggaagaaggacgcatttcca

SEQ ID NO: 3457036 - DNA, 25 bp, Homo sapien
gcctgtgctgtgcacacccgtaggt

SEQ ID NO: 3457037 - DNA, 25 bp, Homo sapien
gaagaaggacgcatttccagctctg

SEQ ID NO: 3457038 - DNA, 25 bp, Homo sapien
gccatcatcaggtgggtcaaagagc

SEQ ID NO: 3457039 - DNA, 25 bp, Homo sapien
cacaagtgggcagccgagtttggca

SEQ ID NO: 3457040 - DNA, 25 bp, Homo sapien
cagcgcctcagagtgtgggacacaa

SEQ ID NO: 3457041 - DNA, 25 bp, Homo sapien
agacagcgcctcagagtgtgggaca

SEQ ID NO: 3457042 - DNA, 25 bp, Homo sapien
cgcctcagagtgtgggacacaagtg

SEQ ID NO: 3457043 - DNA, 25 bp, Homo sapien
caccgctgatgtgaagagactgagc

SEQ ID NO: 3457044 - DNA, 25 bp, Homo sapien
ccaaggttgcaggtgctaatggcac

SEQ ID NO: 3457045 - DNA, 25 bp, Homo sapien
aagggtggattctcgaaggagcagc

SEQ ID NO: 3457046 - DNA, 25 bp, Homo sapien
tgcaggtgcaggtaaagagcaagac

SEQ ID NO: 3457047 - DNA, 25 bp, Homo sapien
ctactctagagcatcccaaggggaa

SEQ ID NO: 3457048 - DNA, 25 bp, Homo sapien
gaatgctcagaaggcaatgggttgg

SEQ ID NO: 3457049 - DNA, 25 bp, Homo sapien
gcaggaaggcactgaacggactccc

SEQ ID NO: 3457050 - DNA, 25 bp, Homo sapien
actgaacggactcccatccctgagg

SEQ ID NO: 3457051 - DNA, 25 bp, Homo sapien
gtggtgagatgcatccctgcttaca

SEQ ID NO: 3457052 - DNA, 25 bp, Homo sapien
ggtgagatgcatccctgcttacagc

SEQ ID NO: 3457053 - DNA, 25 bp, Homo sapien
gatgcatccctgcttacagcacaga

SEQ ID NO: 3457054 - DNA, 25 bp, Homo sapien
gagatgcatccctgcttacagcaca

SEQ ID NO: 3457055 - DNA, 25 bp, Homo sapien
gaatagcgcccatggtgtacacagg

SEQ ID NO: 3457056 - DNA, 25 bp, Homo sapien
tatgatgtcactgtcccgggtgtgc

SEQ ID NO: 3457057 - DNA, 25 bp, Homo sapien
cctgatgactttggccacgaccttg

SEQ ID NO: 3457058 - DNA, 25 bp, Homo sapien
tgagcccaggcggtaaaggcaactt

SEQ ID NO: 3457059 - DNA, 25 bp, Homo sapien
ttataactccccagaattgtcaaaa

SEQ ID NO: 3457060 - DNA, 25 bp, Homo sapien
tggtcgtctgtgttagagtgcataa

SEQ ID NO: 3457061 - DNA, 25 bp, Homo sapien
ttactacacctaatctcaccctgag

SEQ ID NO: 3457062 - DNA, 25 bp, Homo sapien
cacatataactggaggtaaacagca

SEQ ID NO: 3457063 - DNA, 25 bp, Homo sapien
ccagtgcatttcaggtggtcgtctg

SEQ ID NO: 3457064 - DNA, 25 bp, Homo sapien
tccaccaaggtcagtcgagttgagg

SEQ ID NO: 3457065 - DNA, 25 bp, Homo sapien
caccggagaggactgtattatacca

SEQ ID NO: 3457066 - DNA, 25 bp, Homo sapien
tcaaccttgtcaggcagggatacac

SEQ ID NO: 3457067 - DNA, 25 bp, Homo sapien
tacacgtcaagttaatccaagctgg

SEQ ID NO: 3457068 - DNA, 25 bp, Homo sapien
gattccatcccaattgtgggaagca

SEQ ID NO: 3457069 - DNA, 25 bp, Homo sapien
gatcagtatttcatacttggctgtt

SEQ ID NO: 3457070 - DNA, 25 bp, Homo sapien
tctgattgatcctgggcggtagccc

SEQ ID NO: 3457071 - DNA, 25 bp, Homo sapien
tgggaccccgaatttttgcatataa

SEQ ID NO: 3457072 - DNA, 25 bp, Homo sapien
ggtgtgcctccgctatttttctgca

SEQ ID NO: 3457073 - DNA, 25 bp, Homo sapien
aatgtaactcttgctacgctcatgt

SEQ ID NO: 3457074 - DNA, 25 bp, Homo sapien
cacaaattgatcaggatggcagctt

SEQ ID NO: 3457075 - DNA, 25 bp, Homo sapien
gttctactctgggtgtgcctccgct

SEQ ID NO: 3457076 - DNA, 25 bp, Homo sapien
ccatgaaactaagggctagcctgtt

SEQ ID NO: 3457077 - DNA, 25 bp, Homo sapien
gacatgtgcaaacaacgttggctcc

SEQ ID NO: 3457078 - DNA, 25 bp, Homo sapien
tctcaggtgtgatgggacatgtgca

SEQ ID NO: 3457079 - DNA, 25 bp, Homo sapien
cactgctgaaataaagggacatcca

SEQ ID NO: 3457080 - DNA, 25 bp, Homo sapien
ttgatgaatgaggaaatcttgccat

SEQ ID NO: 3457081 - DNA, 25 bp, Homo sapien
gaatgaggaaatcttgccatggtcc

SEQ ID NO: 3457082 - DNA, 25 bp, Homo sapien
ggcctggagtctgtttgatgaatga

SEQ ID NO: 3457083 - DNA, 25 bp, Homo sapien
gcctggagtctgtttgatgaatgag

SEQ ID NO: 3457084 - DNA, 25 bp, Homo sapien
tggatgcccttttcggacctttcag

SEQ ID NO: 3457085 - DNA, 25 bp, Homo sapien
gatgctgtgctccttacatggtgct

SEQ ID NO: 3457086 - DNA, 25 bp, Homo sapien
agtgtccaaaggcatagctgatcca

SEQ ID NO: 3457087 - DNA, 25 bp, Homo sapien
cagcgtagctcattaggaacaggcc

SEQ ID NO: 3457088 - DNA, 25 bp, Homo sapien
actttattgagcatctgcaaggtgc

SEQ ID NO: 3457089 - DNA, 25 bp, Homo sapien
aattactttattgagcatctgcaag

SEQ ID NO: 3457090 - DNA, 25 bp, Homo sapien
attactttattgagcatctgcaagg

SEQ ID NO: 3457091 - DNA, 25 bp, Homo sapien
tactttattgagcatctgcaaggtg

SEQ ID NO: 3457092 - DNA, 25 bp, Homo sapien
gcagtccacactatatggcttgtag

SEQ ID NO: 3457093 - DNA, 25 bp, Homo sapien
gaaagccgaggtgagtaacttgctg

SEQ ID NO: 3457094 - DNA, 25 bp, Homo sapien
gaggatcaccctactaaaggccaca

SEQ ID NO: 3457095 - DNA, 25 bp, Homo sapien
cattttgactctagagcgtgggctc

SEQ ID NO: 3457096 - DNA, 25 bp, Homo sapien
caccactgatgaggttctggcttgc

SEQ ID NO: 3457097 - DNA, 25 bp, Homo sapien
cactgatgaggttctggcttgcttc

SEQ ID NO: 3457098 - DNA, 25 bp, Homo sapien
ctgatgaggttctggcttgcttcat

SEQ ID NO: 3457099 - DNA, 25 bp, Homo sapien
ccactgatgaggttctggcttgctt

SEQ ID NO: 3457100 - DNA, 25 bp, Homo sapien
cttcaaagcagatgctgacaatgtg

SEQ ID NO: 3457101 - DNA, 25 bp, Homo sapien
tggaggcttgattatgagataaaac

SEQ ID NO: 3457102 - DNA, 25 bp, Homo sapien
tgtgtttggattttggaggcttgat

SEQ ID NO: 3457103 - DNA, 25 bp, Homo sapien
taaaactgaatagtgctggacacat

SEQ ID NO: 3457104 - DNA, 25 bp, Homo sapien
tgcctcatcctacctgcaatgctta

SEQ ID NO: 3457105 - DNA, 25 bp, Homo sapien
gtgtcacaggacaactaaaactagt

SEQ ID NO: 3457106 - DNA, 25 bp, Homo sapien
cccaaggccctgtatcagaatgatc

SEQ ID NO: 3457107 - DNA, 25 bp, Homo sapien
ggaattaaatctcacaaaggtttga

SEQ ID NO: 3457108 - DNA, 25 bp, Homo sapien
tcccctttacataagcctgccactt

SEQ ID NO: 3457109 - DNA, 25 bp, Homo sapien
gccacttcctcacttgagacttcta

SEQ ID NO: 3457110 - DNA, 25 bp, Homo sapien
acagaatacatctggatatgccaaa

SEQ ID NO: 3457111 - DNA, 25 bp, Homo sapien
tccttccagacgcagtaaacagaat

SEQ ID NO: 3457112 - DNA, 25 bp, Homo sapien
ttgaaatctgtatgttcagcgtact

SEQ ID NO: 3457113 - DNA, 25 bp, Homo sapien
ggaccatagaggcaaaccaacatag

SEQ ID NO: 3457114 - DNA, 25 bp, Homo sapien
tgttcagcgtacttggaccatagag

SEQ ID NO: 3457115 - DNA, 25 bp, Homo sapien
accaacatagaaagccaggtcatga

SEQ ID NO: 3457116 - DNA, 25 bp, Homo sapien
gagagagtgcaggtttcctgtctgt

SEQ ID NO: 3457117 - DNA, 25 bp, Homo sapien
gagagtgcaggtttcctgtctgtac

SEQ ID NO: 3457118 - DNA, 25 bp, Homo sapien
agagtgcaggtttcctgtctgtacc

SEQ ID NO: 3457119 - DNA, 25 bp, Homo sapien
aagagagagtgcaggtttcctgtct

SEQ ID NO: 3457120 - DNA, 25 bp, Homo sapien
tctcaaaggaacattggacattaac

SEQ ID NO: 3457121 - DNA, 25 bp, Homo sapien
taaacagaccgaggatgacgggagc

SEQ ID NO: 3457122 - DNA, 25 bp, Homo sapien
ggctgccagtagacccagagtcctt

SEQ ID NO: 3457123 - DNA, 25 bp, Homo sapien
acattggacattaaccaggatcagc

SEQ ID NO: 3457124 - DNA, 25 bp, Homo sapien
actcatcagtaccagtgacaagtga

SEQ ID NO: 3457125 - DNA, 25 bp, Homo sapien
ctgccactggccctgccatgcttgc

SEQ ID NO: 3457126 - DNA, 25 bp, Homo sapien
catggtccacgcacatgatggtcca

SEQ ID NO: 3457127 - DNA, 25 bp, Homo sapien
gcttgctactgaatctgaagcactc

SEQ ID NO: 3457128 - DNA, 25 bp, Homo sapien
gagtagttttgctgatcactcctag

SEQ ID NO: 3457129 - DNA, 25 bp, Homo sapien
ggaggttcatagtggatgctcttca

SEQ ID NO: 3457130 - DNA, 25 bp, Homo sapien
gatcttggaaatcatgacagcattc

SEQ ID NO: 3457131 - DNA, 25 bp, Homo sapien
cactcctaggatgcgaaggatcttg

SEQ ID NO: 3457132 - DNA, 25 bp, Homo sapien
agtcattttatagcccaaagagatt

SEQ ID NO: 3457133 - DNA, 25 bp, Homo sapien
tgccattcgcctccaaatttctctg

SEQ ID NO: 3457134 - DNA, 25 bp, Homo sapien
cctgtcaacctctaaacagtcaatc

SEQ ID NO: 3457135 - DNA, 25 bp, Homo sapien
gaagcaatggcagggcatgatgccc

SEQ ID NO: 3457136 - DNA, 25 bp, Homo sapien
ggtgccaccctcttgaagtggaagt

SEQ ID NO: 3457137 - DNA, 25 bp, Homo sapien
tgtgtttgaaacttgcctggtcagc

SEQ ID NO: 3457138 - DNA, 25 bp, Homo sapien
caacggtacttttggcacctgtcca

SEQ ID NO: 3457139 - DNA, 25 bp, Homo sapien
gagactcattgcatgtcaacggtac

SEQ ID NO: 3457140 - DNA, 25 bp, Homo sapien
gaagtatccgatcaccttgcgagga

SEQ ID NO: 3457141 - DNA, 25 bp, Homo sapien
ccctactggaggtacgaacgcatcg

SEQ ID NO: 3457142 - DNA, 25 bp, Homo sapien
gccctctgcgggtgaaactgtgaaa

SEQ ID NO: 3457143 - DNA, 25 bp, Homo sapien
tctcgtgcaaattaacaggtggccc

SEQ ID NO: 3457144 - DNA, 25 bp, Homo sapien
ctctgctagagacaagaggagctgg

SEQ ID NO: 3457145 - DNA, 25 bp, Homo sapien
gaggctgtgaagctccttaatatat

SEQ ID NO: 3457146 - DNA, 25 bp, Homo sapien
ctgctggatcgactggaaatgccca

SEQ ID NO: 3457147 - DNA, 25 bp, Homo sapien
taacccttactgcatatgtgagaga

SEQ ID NO: 3457148 - DNA, 25 bp, Homo sapien
tttcaaaaaacatacccagagtctg

SEQ ID NO: 3457149 - DNA, 25 bp, Homo sapien
cagagtctgagtgtttctccttacc

SEQ ID NO: 3457150 - DNA, 25 bp, Homo sapien
cccgagctctgtttcacctggttct

SEQ ID NO: 3457151 - DNA, 25 bp, Homo sapien
ggatcgcggcctccaatttgcgcag

SEQ ID NO: 3457152 - DNA, 25 bp, Homo sapien
gggcctcatatagtctctttgaagt

SEQ ID NO: 3457153 - DNA, 25 bp, Homo sapien
ggccaaggggcctcatatagtctct

SEQ ID NO: 3457154 - DNA, 25 bp, Homo sapien
catatagtctctttgaagttgatga

SEQ ID NO: 3457155 - DNA, 25 bp, Homo sapien
ctttgaagttgatgaataacaatga

SEQ ID NO: 3457156 - DNA, 25 bp, Homo sapien
cacaaagtcaaggttcggggcgtag

SEQ ID NO: 3457157 - DNA, 25 bp, Homo sapien
gctctgccccctactggttcagtga

SEQ ID NO: 3457158 - DNA, 25 bp, Homo sapien
actggttcagtgatgttgagacgga

SEQ ID NO: 3457159 - DNA, 25 bp, Homo sapien
ctagaaataaacagtgaagtataat

SEQ ID NO: 3457160 - DNA, 25 bp, Homo sapien
caagtttcagtgtcaaatggcggtc

SEQ ID NO: 3457161 - DNA, 25 bp, Homo sapien
caatttaggattcacgcaagtttca

SEQ ID NO: 3457162 - DNA, 25 bp, Homo sapien
tacgaagcacgtgactggactaatg

SEQ ID NO: 3457163 - DNA, 25 bp, Homo sapien
tgactaaagctgacctaaatggatc

SEQ ID NO: 3457164 - DNA, 25 bp, Homo sapien
ttagtagcacaattcaacagcaggc

SEQ ID NO: 3457165 - DNA, 25 bp, Homo sapien
cagaatctattctaggtggccgtca

SEQ ID NO: 3457166 - DNA, 25 bp, Homo sapien
gatggtcttaacatggactaaacag

SEQ ID NO: 3457167 - DNA, 25 bp, Homo sapien
cagcaggctgaaagtcgtggctcct

SEQ ID NO: 3457168 - DNA, 25 bp, Homo sapien
aatatgctgatctacaccttgcgct

SEQ ID NO: 3457169 - DNA, 25 bp, Homo sapien
tacgcagcatgcacagcatttcagg

SEQ ID NO: 3457170 - DNA, 25 bp, Homo sapien
tgaaccagcctagaaaaattgactt

SEQ ID NO: 3457171 - DNA, 25 bp, Homo sapien
tgtgcaggcgaactgtataacagga

SEQ ID NO: 3457172 - DNA, 25 bp, Homo sapien
gctgcttacagttcatttagttggc

SEQ ID NO: 3457173 - DNA, 25 bp, Homo sapien
taaacctgtacccacacaagactga

SEQ ID NO: 3457174 - DNA, 25 bp, Homo sapien
tataacacaatcctatcactgacag

SEQ ID NO: 3457175 - DNA, 25 bp, Homo sapien
tgaaatgtgatacagctattgccca

SEQ ID NO: 3457176 - DNA, 25 bp, Homo sapien
aatgcttaacttcagcgcctttggg

SEQ ID NO: 3457177 - DNA, 25 bp, Homo sapien
gaaaagcatgcgctgttgaaccaag

SEQ ID NO: 3457178 - DNA, 25 bp, Homo sapien
gagtgacctctctggccattctaaa

SEQ ID NO: 3457179 - DNA, 25 bp, Homo sapien
ccccaggagattatttgtcaggcac

SEQ ID NO: 3457180 - DNA, 25 bp, Homo sapien
tatgctcttcgtgccataactcggc

SEQ ID NO: 3457181 - DNA, 25 bp, Homo sapien
ggaagcacgaatgcaagctgaactt

SEQ ID NO: 3457182 - DNA, 25 bp, Homo sapien
caatctacttttaatggaagcacga

SEQ ID NO: 3457183 - DNA, 25 bp, Homo sapien
tgacctgaagtatcacccaaggaaa

SEQ ID NO: 3457184 - DNA, 25 bp, Homo sapien
gagcctagaagagggcactgaaccc

SEQ ID NO: 3457185 - DNA, 25 bp, Homo sapien
cacaggaggacatggtaaacagcat

SEQ ID NO: 3457186 - DNA, 25 bp, Homo sapien
aaccagtctggaaatgtcttgcaca

SEQ ID NO: 3457187 - DNA, 25 bp, Homo sapien
caggcccaagcaaaggcacgatggt

SEQ ID NO: 3457188 - DNA, 25 bp, Homo sapien
gcttctggagtttgcttgaaaaaga

SEQ ID NO: 3457189 - DNA, 25 bp, Homo sapien
tgttgatatacaggagaggccttgc

SEQ ID NO: 3457190 - DNA, 25 bp, Homo sapien
tgagtgttggctgtcctttcaggtt

SEQ ID NO: 3457191 - DNA, 25 bp, Homo sapien
gagggcattgtaaattctaacagtc

SEQ ID NO: 3457192 - DNA, 25 bp, Homo sapien
tggtaaaagacagttacaggattta

SEQ ID NO: 3457193 - DNA, 25 bp, Homo sapien
aaatcttacaactgagtagggggtg

SEQ ID NO: 3457194 - DNA, 25 bp, Homo sapien
ttttatgcggtatcttctcaaagct

SEQ ID NO: 3457195 - DNA, 25 bp, Homo sapien
caatggggtaagctacagtctagaa

SEQ ID NO: 3457196 - DNA, 25 bp, Homo sapien
ctgcttcttagaagcctcatttacg

SEQ ID NO: 3457197 - DNA, 25 bp, Homo sapien
acgtatttctggcaataggctacca

SEQ ID NO: 3457198 - DNA, 25 bp, Homo sapien
catttacgtatttctggcaataggc

SEQ ID NO: 3457199 - DNA, 25 bp, Homo sapien
cttcttagaagcctcatttacgtat

SEQ ID NO: 3457200 - DNA, 25 bp, Homo sapien
gtcagctatcagcaggatccagtcg

SEQ ID NO: 3457201 - DNA, 25 bp, Homo sapien
tcagctatcagcaggatccagtcgt

SEQ ID NO: 3457202 - DNA, 25 bp, Homo sapien
cagctatcagcaggatccagtcgta

SEQ ID NO: 3457203 - DNA, 25 bp, Homo sapien
agctatcagcaggatccagtcgtac

SEQ ID NO: 3457204 - DNA, 25 bp, Homo sapien
taaaagactactctcaccatttaca

SEQ ID NO: 3457205 - DNA, 25 bp, Homo sapien
gttcactggatcatttatgaagaac

SEQ ID NO: 3457206 - DNA, 25 bp, Homo sapien
tcattgaataccataatcctgacaa

SEQ ID NO: 3457207 - DNA, 25 bp, Homo sapien
agtatggtatgctttgttcactgga

SEQ ID NO: 3457208 - DNA, 25 bp, Homo sapien
tgtaaagttgtttgccccttgacta

SEQ ID NO: 3457209 - DNA, 25 bp, Homo sapien
gccccttgactaaatcttatctcag

SEQ ID NO: 3457210 - DNA, 25 bp, Homo sapien
gactaaatcttatctcagtataggg

SEQ ID NO: 3457211 - DNA, 25 bp, Homo sapien
ctcagtataggggtcattttcaatt

SEQ ID NO: 3457212 - DNA, 25 bp, Homo sapien
ggcagaggagagcaaactgttccct

SEQ ID NO: 3457213 - DNA, 25 bp, Homo sapien
tatttgcatatgacacaccctcgtc

SEQ ID NO: 3457214 - DNA, 25 bp, Homo sapien
caccctcgtcctcttattggcagag

SEQ ID NO: 3457215 - DNA, 25 bp, Homo sapien
gtatatttgcatatgacacaccctc

SEQ ID NO: 3457216 - DNA, 25 bp, Homo sapien
caatcttagactctctagcgagctc

SEQ ID NO: 3457217 - DNA, 25 bp, Homo sapien
gaaggtgcttcacaaacaagaggaa

SEQ ID NO: 3457218 - DNA, 25 bp, Homo sapien
tggagagaaagcctaaccactgccc

SEQ ID NO: 3457219 - DNA, 25 bp, Homo sapien
aaagttctttgagatccctggatac

SEQ ID NO: 3457220 - DNA, 25 bp, Homo sapien
tgcatgtatccgaacagctgcctca

SEQ ID NO: 3457221 - DNA, 25 bp, Homo sapien
agaagaggtaggtttgtcccaatag

SEQ ID NO: 3457222 - DNA, 25 bp, Homo sapien
taaacgacaatttgttctctgaacc

SEQ ID NO: 3457223 - DNA, 25 bp, Homo sapien
tgtgctctgcatgtatccgaacagc

SEQ ID NO: 3457224 - DNA, 25 bp, Homo sapien
tccacatagatttcattctacgaac

SEQ ID NO: 3457225 - DNA, 25 bp, Homo sapien
acatagatttcattctacgaacttc

SEQ ID NO: 3457226 - DNA, 25 bp, Homo sapien
cagtgaaaccgttcttttaaatcat

SEQ ID NO: 3457227 - DNA, 25 bp, Homo sapien
catctccacatagatttcattctac

SEQ ID NO: 3457228 - DNA, 25 bp, Homo sapien
gagaatggcagttttaaccgcacaa

SEQ ID NO: 3457229 - DNA, 25 bp, Homo sapien
ccaagtgtacctttccgattttgca

SEQ ID NO: 3457230 - DNA, 25 bp, Homo sapien
tgctaaacttgctagctcctccaag

SEQ ID NO: 3457231 - DNA, 25 bp, Homo sapien
taacaccaccctgaatccctaagga

SEQ ID NO: 3457232 - DNA, 25 bp, Homo sapien
ctaaaaagggacagagaggagacag

SEQ ID NO: 3457233 - DNA, 25 bp, Homo sapien
gtgtagacttggtttatatgtgttg

SEQ ID NO: 3457234 - DNA, 25 bp, Homo sapien
agacttggtttatatgtgttggtct

SEQ ID NO: 3457235 - DNA, 25 bp, Homo sapien
tgtagacttggtttatatgtgttgg

SEQ ID NO: 3457236 - DNA, 25 bp, Homo sapien
tagacttggtttatatgtgttggtc

SEQ ID NO: 3457237 - DNA, 25 bp, Homo sapien
caagcgacctttagctaacactggc

SEQ ID NO: 3457238 - DNA, 25 bp, Homo sapien
taacactggctaaatagatcaacac

SEQ ID NO: 3457239 - DNA, 25 bp, Homo sapien
tctatttaaacctgatactagcaga

SEQ ID NO: 3457240 - DNA, 25 bp, Homo sapien
gctctttagttatgtatgtctacac

SEQ ID NO: 3457241 - DNA, 25 bp, Homo sapien
gccaggaatatagcccaagaaattt

SEQ ID NO: 3457242 - DNA, 25 bp, Homo sapien
taactgaatcttaagcaccttcccc

SEQ ID NO: 3457243 - DNA, 25 bp, Homo sapien
gcatttcttggttctctgcatcgaa

SEQ ID NO: 3457244 - DNA, 25 bp, Homo sapien
tctctgcatcgaagggcatgtggta

SEQ ID NO: 3457245 - DNA, 25 bp, Homo sapien
ttttcctcttaagtgcgatcctggg

SEQ ID NO: 3457246 - DNA, 25 bp, Homo sapien
tagttgagggcagaacataaacaca

SEQ ID NO: 3457247 - DNA, 25 bp, Homo sapien
gccatcatatggtcagatacatgta

SEQ ID NO: 3457248 - DNA, 25 bp, Homo sapien
gaatttggtgcagagagccatcata

SEQ ID NO: 3457249 - DNA, 25 bp, Homo sapien
ggagacaatgggttccactgtcatt

SEQ ID NO: 3457250 - DNA, 25 bp, Homo sapien
ctaggagacaatgggttccactgtc

SEQ ID NO: 3457251 - DNA, 25 bp, Homo sapien
acccagatggactgacattttaatt

SEQ ID NO: 3457252 - DNA, 25 bp, Homo sapien
tgctggcccacattgtgtacccaga

SEQ ID NO: 3457253 - DNA, 25 bp, Homo sapien
tcttgtgagggcctctgtgttgtat

SEQ ID NO: 3457254 - DNA, 25 bp, Homo sapien
ttgtgagggcctctgtgttgtatca

SEQ ID NO: 3457255 - DNA, 25 bp, Homo sapien
tgagggcctctgtgttgtatcatcc

SEQ ID NO: 3457256 - DNA, 25 bp, Homo sapien
gatcaaggggctgccatcttgtgag

SEQ ID NO: 3457257 - DNA, 25 bp, Homo sapien
agaaaagcagctgcgcccctttcat

SEQ ID NO: 3457258 - DNA, 25 bp, Homo sapien
tattcagcagggtgattagcttcat

SEQ ID NO: 3457259 - DNA, 25 bp, Homo sapien
tccatattcagcagggtgattagct

SEQ ID NO: 3457260 - DNA, 25 bp, Homo sapien
gagaaaagcagctgcgcccctttca

SEQ ID NO: 3457261 - DNA, 25 bp, Homo sapien
agctgagctgcagtatttacagaaa

SEQ ID NO: 3457262 - DNA, 25 bp, Homo sapien
tcagagctgagctgcagtatttaca

SEQ ID NO: 3457263 - DNA, 25 bp, Homo sapien
cagagctgagctgcagtatttacag

SEQ ID NO: 3457264 - DNA, 25 bp, Homo sapien
gctgcagtatttacagaaaaacatg

SEQ ID NO: 3457265 - DNA, 25 bp, Homo sapien
gaccacaacaggtacattgctgccc

SEQ ID NO: 3457266 - DNA, 25 bp, Homo sapien
tgagctcgagtgggcctgaccacag

SEQ ID NO: 3457267 - DNA, 25 bp, Homo sapien
ggttttagagttcttatgtgccaac

SEQ ID NO: 3457268 - DNA, 25 bp, Homo sapien
agtttcccatttgtgtccacgtgtg

SEQ ID NO: 3457269 - DNA, 25 bp, Homo sapien
aatctcagctttaacagcaggtctt

SEQ ID NO: 3457270 - DNA, 25 bp, Homo sapien
tctcagctttaacagcaggtcttcc

SEQ ID NO: 3457271 - DNA, 25 bp, Homo sapien
caatatttcactcctccctgtccct

SEQ ID NO: 3457272 - DNA, 25 bp, Homo sapien
tcaatctcagctttaacagcaggtc

SEQ ID NO: 3457273 - DNA, 25 bp, Homo sapien
tgcttcactgtgggcgtgcagtttc

SEQ ID NO: 3457274 - DNA, 25 bp, Homo sapien
gtgtcagtgcatccctcagacagca

SEQ ID NO: 3457275 - DNA, 25 bp, Homo sapien
tttgactccggtggcatccatcctg

SEQ ID NO: 3457276 - DNA, 25 bp, Homo sapien
ccagaacttcctttgactccggtgg

SEQ ID NO: 3457277 - DNA, 25 bp, Homo sapien
ccagcttgtgtcagtgcatccctca

SEQ ID NO: 3457278 - DNA, 25 bp, Homo sapien
gcaagattggacagcccactcacaa

SEQ ID NO: 3457279 - DNA, 25 bp, Homo sapien
ccaaggccaaattgccagagagagg

SEQ ID NO: 3457280 - DNA, 25 bp, Homo sapien
taggtaaactcctactagctgctgg

SEQ ID NO: 3457281 - DNA, 25 bp, Homo sapien
cacagccctcggtaagtagtgctcc

SEQ ID NO: 3457282 - DNA, 25 bp, Homo sapien
agcttcgggcctgcttcagggtcct

SEQ ID NO: 3457283 - DNA, 25 bp, Homo sapien
agggtcctgagctgcctcttgttca

SEQ ID NO: 3457284 - DNA, 25 bp, Homo sapien
cagcttcgggcctgcttcagggtcc

SEQ ID NO: 3457285 - DNA, 25 bp, Homo sapien
ttcagggtcctgagctgcctcttgt

SEQ ID NO: 3457286 - DNA, 25 bp, Homo sapien
gaaagttcttggctccggccagaaa

SEQ ID NO: 3457287 - DNA, 25 bp, Homo sapien
tgcagagaactgcactgtcagcagg

SEQ ID NO: 3457288 - DNA, 25 bp, Homo sapien
tcagcaggttaggaactgggcgctt

SEQ ID NO: 3457289 - DNA, 25 bp, Homo sapien
tatagggtgttgatccaaggatctg

SEQ ID NO: 3457290 - DNA, 25 bp, Homo sapien
agtcaatgtcggaagatgaagcaga

SEQ ID NO: 3457291 - DNA, 25 bp, Homo sapien
taaagtcaatgtcggaagatgaagc

SEQ ID NO: 3457292 - DNA, 25 bp, Homo sapien
ccctaaagtcaatgtcggaagatga

SEQ ID NO: 3457293 - DNA, 25 bp, Homo sapien
cctaaagtcaatgtcggaagatgaa

SEQ ID NO: 3457294 - DNA, 25 bp, Homo sapien
tcaaagctgaaggcctttgtaggag

SEQ ID NO: 3457295 - DNA, 25 bp, Homo sapien
caaagctgaaggcctttgtaggagc

SEQ ID NO: 3457296 - DNA, 25 bp, Homo sapien
ttaggctggttgaccatattgtggc

SEQ ID NO: 3457297 - DNA, 25 bp, Homo sapien
aggctggttgaccatattgtggcca

SEQ ID NO: 3457298 - DNA, 25 bp, Homo sapien
agtaccaattgtggtccagaaaagg

SEQ ID NO: 3457299 - DNA, 25 bp, Homo sapien
tggccagagggagagtaccaattgt

SEQ ID NO: 3457300 - DNA, 25 bp, Homo sapien
tgttcttggggctaaagtcagtggc

SEQ ID NO: 3457301 - DNA, 25 bp, Homo sapien
atgctaagatgtagaagtccttggt

SEQ ID NO: 3457302 - DNA, 25 bp, Homo sapien
aaagtcagtggcttctggattgcaa

SEQ ID NO: 3457303 - DNA, 25 bp, Homo sapien
gcttctggattgcaacacactaaca

SEQ ID NO: 3457304 - DNA, 25 bp, Homo sapien
tgggctcaggtctcaacaggtagga

SEQ ID NO: 3457305 - DNA, 25 bp, Homo sapien
ctgggctcaggtctcaacaggtagg

SEQ ID NO: 3457306 - DNA, 25 bp, Homo sapien
gggctcaggtctcaacaggtaggaa

SEQ ID NO: 3457307 - DNA, 25 bp, Homo sapien
tccagcatgtcaataacatatattg

SEQ ID NO: 3457308 - DNA, 25 bp, Homo sapien
tttccagcatgtcaataacatatat

SEQ ID NO: 3457309 - DNA, 25 bp, Homo sapien
ttttccagcatgtcaataacatata

SEQ ID NO: 3457310 - DNA, 25 bp, Homo sapien
ttccagcatgtcaataacatatatt

SEQ ID NO: 3457311 - DNA, 25 bp, Homo sapien
ccgcctttgtagatgaagtaagtaa

SEQ ID NO: 3457312 - DNA, 25 bp, Homo sapien
tgcatagccgcctttgtagatgaag

SEQ ID NO: 3457313 - DNA, 25 bp, Homo sapien
aacacatgcatagccgcctttgtag

SEQ ID NO: 3457314 - DNA, 25 bp, Homo sapien
acaaacacatgcatagccgcctttg

SEQ ID NO: 3457315 - DNA, 25 bp, Homo sapien
gcgccgtttcttaagccggtctgaa

SEQ ID NO: 3457316 - DNA, 25 bp, Homo sapien
cttaagccggtctgaaaagcgcaat

SEQ ID NO: 3457317 - DNA, 25 bp, Homo sapien
cgcacggtgcgcacacacactggcc

SEQ ID NO: 3457318 - DNA, 25 bp, Homo sapien
cgcgcacggtgcgcacacacactgg

SEQ ID NO: 3457319 - DNA, 25 bp, Homo sapien
acagggcggttgccaggcggagggt

SEQ ID NO: 3457320 - DNA, 25 bp, Homo sapien
tcagagtcgcgtaaatagggtttcc

SEQ ID NO: 3457321 - DNA, 25 bp, Homo sapien
cccaagcaccgtggacatgttcagt

SEQ ID NO: 3457322 - DNA, 25 bp, Homo sapien
acgatgaactccgtgcctgcaggtg

SEQ ID NO: 3457323 - DNA, 25 bp, Homo sapien
tgatcccatcggcacagagcttggc

SEQ ID NO: 3457324 - DNA, 25 bp, Homo sapien
tattctcttggtctccgagccctgt

SEQ ID NO: 3457325 - DNA, 25 bp, Homo sapien
tgtccacgtagacaatattctcttg

SEQ ID NO: 3457326 - DNA, 25 bp, Homo sapien
aatgatcttcccttcgtccctttga

SEQ ID NO: 3457327 - DNA, 25 bp, Homo sapien
aggagattcagagaagttgtccacg

SEQ ID NO: 3457328 - DNA, 25 bp, Homo sapien
tgtgtattccagaagcagtaacagc

SEQ ID NO: 3457329 - DNA, 25 bp, Homo sapien
agcccatgttgagtggccattgtgt

SEQ ID NO: 3457330 - DNA, 25 bp, Homo sapien
gcccatgttgagtggccattgtgtg

SEQ ID NO: 3457331 - DNA, 25 bp, Homo sapien
tggccattgtgtgtattccagaagc

SEQ ID NO: 3457332 - DNA, 25 bp, Homo sapien
ttccacactcatagcccgtcttgag

SEQ ID NO: 3457333 - DNA, 25 bp, Homo sapien
aatgccaatgtccacatctggacta

SEQ ID NO: 3457334 - DNA, 25 bp, Homo sapien
cacatctggactacttcctttacac

SEQ ID NO: 3457335 - DNA, 25 bp, Homo sapien
tacactctcccaaacctcctgatcc

SEQ ID NO: 3457336 - DNA, 25 bp, Homo sapien
gttggaataaattggttctatcttg

SEQ ID NO: 3457337 - DNA, 25 bp, Homo sapien
ggaataaattggttctatcttgctg

SEQ ID NO: 3457338 - DNA, 25 bp, Homo sapien
tcttgctgctaccataggtcattgt

SEQ ID NO: 3457339 - DNA, 25 bp, Homo sapien
gctaccataggtcattgtttctatt

SEQ ID NO: 3457340 - DNA, 25 bp, Homo sapien
cattgcacttaattaaccaacggaa

SEQ ID NO: 3457341 - DNA, 25 bp, Homo sapien
cttttcgtacccaggcgttggactg

SEQ ID NO: 3457342 - DNA, 25 bp, Homo sapien
tttctgatctgtgaccggccattgc

SEQ ID NO: 3457343 - DNA, 25 bp, Homo sapien
tacccaggcgttggactgagatgat

SEQ ID NO: 3457344 - DNA, 25 bp, Homo sapien
cagaccaaagaattgggccttgccg

SEQ ID NO: 3457345 - DNA, 25 bp, Homo sapien
tgtattcagaccaaagaattgggcc

SEQ ID NO: 3457346 - DNA, 25 bp, Homo sapien
ttcagaccaaagaattgggccttgc

SEQ ID NO: 3457347 - DNA, 25 bp, Homo sapien
gaccaaagaattgggccttgccggc

SEQ ID NO: 3457348 - DNA, 25 bp, Homo sapien
cgaggtctgagtgcgcacttgagca

SEQ ID NO: 3457349 - DNA, 25 bp, Homo sapien
tggaacctccaagtgccaacgtact

SEQ ID NO: 3457350 - DNA, 25 bp, Homo sapien
cacttgagcatgtgtagccctttga

SEQ ID NO: 3457351 - DNA, 25 bp, Homo sapien
cagaagtgacccaatgtcttcgagg

SEQ ID NO: 3457352 - DNA, 25 bp, Homo sapien
gatatagacttagaacattggacaa

SEQ ID NO: 3457353 - DNA, 25 bp, Homo sapien
taacactgacttggcaagacccaga

SEQ ID NO: 3457354 - DNA, 25 bp, Homo sapien
tcaactgccgtatagccaggtaaat

SEQ ID NO: 3457355 - DNA, 25 bp, Homo sapien
taaatccatgtgtcaggaggtgagt

SEQ ID NO: 3457356 - DNA, 25 bp, Homo sapien
tactggtatgcataactttttcaac

SEQ ID NO: 3457357 - DNA, 25 bp, Homo sapien
actggtatgcataactttttcaaca

SEQ ID NO: 3457358 - DNA, 25 bp, Homo sapien
cttactggtatgcataactttttca

SEQ ID NO: 3457359 - DNA, 25 bp, Homo sapien
ttactggtatgcataactttttcaa

SEQ ID NO: 3457360 - DNA, 25 bp, Homo sapien
tccttcactacttcatgaagggaag

SEQ ID NO: 3457361 - DNA, 25 bp, Homo sapien
ccttcactacttcatgaagggaaga

SEQ ID NO: 3457362 - DNA, 25 bp, Homo sapien
tgcagtcaccaatctgaatgtgcat

SEQ ID NO: 3457363 - DNA, 25 bp, Homo sapien
atgcagtcaccaatctgaatgtgca

SEQ ID NO: 3457364 - DNA, 25 bp, Homo sapien
tcggagtggatggtgtgggtctgaa

SEQ ID NO: 3457365 - DNA, 25 bp, Homo sapien
ggatggtgtgggtctgaattccaga

SEQ ID NO: 3457366 - DNA, 25 bp, Homo sapien
agtggatggtgtgggtctgaattcc

SEQ ID NO: 3457367 - DNA, 25 bp, Homo sapien
cggagtggatggtgtgggtctgaat

SEQ ID NO: 3457368 - DNA, 25 bp, Homo sapien
tcactctccgacaggctggttgggc

SEQ ID NO: 3457369 - DNA, 25 bp, Homo sapien
cactctccgacaggctggttgggca

SEQ ID NO: 3457370 - DNA, 25 bp, Homo sapien
actctccgacaggctggttgggcag

SEQ ID NO: 3457371 - DNA, 25 bp, Homo sapien
cctagtccttttttgcagacgccaa

SEQ ID NO: 3457372 - DNA, 25 bp, Homo sapien
ttgcagacgccaaaagctctcaggc

SEQ ID NO: 3457373 - DNA, 25 bp, Homo sapien
tccttttttgcagacgccaaaagct

SEQ ID NO: 3457374 - DNA, 25 bp, Homo sapien
tgtccctagtccttttttgcagacg

SEQ ID NO: 3457375 - DNA, 25 bp, Homo sapien
tttccgtcaagtctgacatgactct

SEQ ID NO: 3457376 - DNA, 25 bp, Homo sapien
tacatggtgccgagggatatattcc

SEQ ID NO: 3457377 - DNA, 25 bp, Homo sapien
gagtaattctttccgtcaagtctga

SEQ ID NO: 3457378 - DNA, 25 bp, Homo sapien
gacatgactctacatggtgccgagg

SEQ ID NO: 3457379 - DNA, 25 bp, Homo sapien
tagtggttgacatgcacagtcgcag

SEQ ID NO: 3457380 - DNA, 25 bp, Homo sapien
ctaggcttcagtatgagaagtagtg

SEQ ID NO: 3457381 - DNA, 25 bp, Homo sapien
tgcacagtcgcagtctttcttcaag

SEQ ID NO: 3457382 - DNA, 25 bp, Homo sapien
tatgagaagtagtggttgacatgca

SEQ ID NO: 3457383 - DNA, 25 bp, Homo sapien
taaaagcagactctatgccagaagc

SEQ ID NO: 3457384 - DNA, 25 bp, Homo sapien
tgtaggtaggttcaattccaatccg

SEQ ID NO: 3457385 - DNA, 25 bp, Homo sapien
ggttgcaagcaagttcccaaatcca

SEQ ID NO: 3457386 - DNA, 25 bp, Homo sapien
ccaattaatgttggctcagtgtgac

SEQ ID NO: 3457387 - DNA, 25 bp, Homo sapien
aatccagtaattactgtaggagcat

SEQ ID NO: 3457388 - DNA, 25 bp, Homo sapien
ttggggaacataatccagtaattac

SEQ ID NO: 3457389 - DNA, 25 bp, Homo sapien
gcatgagatgagagttattgaccca

SEQ ID NO: 3457390 - DNA, 25 bp, Homo sapien
attccctgtaaaagggctttctctg

SEQ ID NO: 3457391 - DNA, 25 bp, Homo sapien
ttgcataaattttatccatggaact

SEQ ID NO: 3457392 - DNA, 25 bp, Homo sapien
cataaattttatccatggaacttcc

SEQ ID NO: 3457393 - DNA, 25 bp, Homo sapien
cttccccttgagtctacttctgtga

SEQ ID NO: 3457394 - DNA, 25 bp, Homo sapien
ttccccttgagtctacttctgtgaa

SEQ ID NO: 3457395 - DNA, 25 bp, Homo sapien
tcttctagaagacctcacctcactc

SEQ ID NO: 3457396 - DNA, 25 bp, Homo sapien
cttctagaagacctcacctcactct

SEQ ID NO: 3457397 - DNA, 25 bp, Homo sapien
gcttgttcccatgtcggtacctttg

SEQ ID NO: 3457398 - DNA, 25 bp, Homo sapien
tctgcttgttcccatgtcggtacct

SEQ ID NO: 3457399 - DNA, 25 bp, Homo sapien
ggtagttaggagtgcttgttatagt

SEQ ID NO: 3457400 - DNA, 25 bp, Homo sapien
tccttgcagctttggtagttaggag

SEQ ID NO: 3457401 - DNA, 25 bp, Homo sapien
cagctttggtagttaggagtgcttg

SEQ ID NO: 3457402 - DNA, 25 bp, Homo sapien
ttggtagttaggagtgcttgttata

SEQ ID NO: 3457403 - DNA, 25 bp, Homo sapien
caggaagtgaccttctttactgtca

SEQ ID NO: 3457404 - DNA, 25 bp, Homo sapien
aggaagtgaccttctttactgtcag

SEQ ID NO: 3457405 - DNA, 25 bp, Homo sapien
ctggcaggaagtgaccttctttact

SEQ ID NO: 3457406 - DNA, 25 bp, Homo sapien
ggcaggaagtgaccttctttactgt

SEQ ID NO: 3457407 - DNA, 25 bp, Homo sapien
actgtaatgaactttgcctctgcaa

SEQ ID NO: 3457408 - DNA, 25 bp, Homo sapien
acctataactgtaatgaactttgcc

SEQ ID NO: 3457409 - DNA, 25 bp, Homo sapien
cccccagttcagtaagattcctggc

SEQ ID NO: 3457410 - DNA, 25 bp, Homo sapien
catcccccagttcagtaagattcct

SEQ ID NO: 3457411 - DNA, 25 bp, Homo sapien
tccagcggcaacgtctcataggcca

SEQ ID NO: 3457412 - DNA, 25 bp, Homo sapien
gtctcataggccatgcctgctctgt

SEQ ID NO: 3457413 - DNA, 25 bp, Homo sapien
gctctgtagggcagtagccctgact

SEQ ID NO: 3457414 - DNA, 25 bp, Homo sapien
aagtgtctctccagcggcaacgtct

SEQ ID NO: 3457415 - DNA, 25 bp, Homo sapien
taaatccttaacattactcccatta

SEQ ID NO: 3457416 - DNA, 25 bp, Homo sapien
ttggtaaagataggctcttgttttg

SEQ ID NO: 3457417 - DNA, 25 bp, Homo sapien
ttttgcctcatttaaatccttaaca

SEQ ID NO: 3457418 - DNA, 25 bp, Homo sapien
aaagataggctcttgttttgcctca

SEQ ID NO: 3457419 - DNA, 25 bp, Homo sapien
taatgtcaggaattatacaagcagc

SEQ ID NO: 3457420 - DNA, 25 bp, Homo sapien
gtgatcccacatagccaaccacagg

SEQ ID NO: 3457421 - DNA, 25 bp, Homo sapien
cctacgtttggcactgtaaggtcca

SEQ ID NO: 3457422 - DNA, 25 bp, Homo sapien
caagcagcacaatacagggaagtgt

SEQ ID NO: 3457423 - DNA, 25 bp, Homo sapien
gattgacagcaataggcagagtatc

SEQ ID NO: 3457424 - DNA, 25 bp, Homo sapien
catgcctaccctgttgctggaggta

SEQ ID NO: 3457425 - DNA, 25 bp, Homo sapien
tgacacctgcacatgagccacatga

SEQ ID NO: 3457426 - DNA, 25 bp, Homo sapien
agtgagagtcccacggagaaactgt

SEQ ID NO: 3457427 - DNA, 25 bp, Homo sapien
ctcagttcctgtatcacttgccact

SEQ ID NO: 3457428 - DNA, 25 bp, Homo sapien
gttcctgtatcacttgccactttca

SEQ ID NO: 3457429 - DNA, 25 bp, Homo sapien
tcctgtatcacttgccactttcact

SEQ ID NO: 3457430 - DNA, 25 bp, Homo sapien
gtatcacttgccactttcactttat

SEQ ID NO: 3457431 - DNA, 25 bp, Homo sapien
tgctcttaaatcaagccatgtctga

SEQ ID NO: 3457432 - DNA, 25 bp, Homo sapien
gaggtaaagaaattcgggtgataga

SEQ ID NO: 3457433 - DNA, 25 bp, Homo sapien
acttccttctgattgtctcttgttc

SEQ ID NO: 3457434 - DNA, 25 bp, Homo sapien
agaaattcgggtgatagattcttct

SEQ ID NO: 3457435 - DNA, 25 bp, Homo sapien
caattttttccttgggccagccctg

SEQ ID NO: 3457436 - DNA, 25 bp, Homo sapien
gccagccctggccagagacctttcc

SEQ ID NO: 3457437 - DNA, 25 bp, Homo sapien
ttgggccagccctggccagagacct

SEQ ID NO: 3457438 - DNA, 25 bp, Homo sapien
gccctggccagagacctttcctctt

SEQ ID NO: 3457439 - DNA, 25 bp, Homo sapien
gcgtgtgccaagaacaaaactcctg

SEQ ID NO: 3457440 - DNA, 25 bp, Homo sapien
gctgtggcatgagagctgtcagtaa

SEQ ID NO: 3457441 - DNA, 25 bp, Homo sapien
catgagagctgtcagtaaggtcggc

SEQ ID NO: 3457442 - DNA, 25 bp, Homo sapien
cagtaaggtcggcagcgtgtgccaa

SEQ ID NO: 3457443 - DNA, 25 bp, Homo sapien
taaattagtaattcagtcccagtcc

SEQ ID NO: 3457444 - DNA, 25 bp, Homo sapien
gatagttcttacaccttgttggaga

SEQ ID NO: 3457445 - DNA, 25 bp, Homo sapien
tcatagccatttgtcagtccacagt

SEQ ID NO: 3457446 - DNA, 25 bp, Homo sapien
taatagcctgtgaatattgcagtcc

SEQ ID NO: 3457447 - DNA, 25 bp, Homo sapien
taaactcgaaaaatggcgaacactg

SEQ ID NO: 3457448 - DNA, 25 bp, Homo sapien
tgtacagtatctaaggtaaaatgtg

SEQ ID NO: 3457449 - DNA, 25 bp, Homo sapien
ttacttacaagtgcctttttgccac

SEQ ID NO: 3457450 - DNA, 25 bp, Homo sapien
taggagaaaatcacggtgcttttat

SEQ ID NO: 3457451 - DNA, 25 bp, Homo sapien
gaacttgctcaaattcgaggtacag

SEQ ID NO: 3457452 - DNA, 25 bp, Homo sapien
tctgttctgagagattgcccgtatc

SEQ ID NO: 3457453 - DNA, 25 bp, Homo sapien
tatggaaatgcccatcagccctctg

SEQ ID NO: 3457454 - DNA, 25 bp, Homo sapien
tcagacttgggagagtacagcttca

SEQ ID NO: 3457455 - DNA, 25 bp, Homo sapien
tttcttgctaggaacccgaagccgc

SEQ ID NO: 3457456 - DNA, 25 bp, Homo sapien
gggtggagatgttttcatctcggtt

SEQ ID NO: 3457457 - DNA, 25 bp, Homo sapien
cccgaagccgcaaagctgatggcat

SEQ ID NO: 3457458 - DNA, 25 bp, Homo sapien
tctcggttttctgcctggtctgtcc

SEQ ID NO: 3457459 - DNA, 25 bp, Homo sapien
gtttgggagtctggagccctcgcct

SEQ ID NO: 3457460 - DNA, 25 bp, Homo sapien
gcagctctgcaaggtccgtgggctc

SEQ ID NO: 3457461 - DNA, 25 bp, Homo sapien
tcttcgccggcgcctcaggggtttg

SEQ ID NO: 3457462 - DNA, 25 bp, Homo sapien
aggcgggcgggatgggtgtcctcgg

SEQ ID NO: 3457463 - DNA, 25 bp, Homo sapien
tcctgcgtcgcggaagttgggagtt

SEQ ID NO: 3457464 - DNA, 25 bp, Homo sapien
ggaggagccatcgaatgacgcgata

SEQ ID NO: 3457465 - DNA, 25 bp, Homo sapien
aggagccatcgaatgacgcgatagc

SEQ ID NO: 3457466 - DNA, 25 bp, Homo sapien
ctccctttgtgggcgcttcctgcgt

SEQ ID NO: 3457467 - DNA, 25 bp, Homo sapien
agaaatagccgcgaccgcagacctt

SEQ ID NO: 3457468 - DNA, 25 bp, Homo sapien
ggcaggttcaaagcggatttcgcgc

SEQ ID NO: 3457469 - DNA, 25 bp, Homo sapien
ctgggactggctgttagaaatagcc

SEQ ID NO: 3457470 - DNA, 25 bp, Homo sapien
cgcgctgagagctccgggatgtcat

SEQ ID NO: 3457471 - DNA, 25 bp, Homo sapien
gacgtcacaaggtagcgcgtaacgg

SEQ ID NO: 3457472 - DNA, 25 bp, Homo sapien
gcttacacagaaagggcaacacgtc

SEQ ID NO: 3457473 - DNA, 25 bp, Homo sapien
tctgtagtaggagagaatccgcctc

SEQ ID NO: 3457474 - DNA, 25 bp, Homo sapien
aacggacgtctttcctagccaatca

SEQ ID NO: 3457475 - DNA, 25 bp, Homo sapien
gggcggtctaggttctcgtgctctt

SEQ ID NO: 3457476 - DNA, 25 bp, Homo sapien
ccaccagcggggaccctaggctgaa

SEQ ID NO: 3457477 - DNA, 25 bp, Homo sapien
gtctccgcacttcgggggcggtcta

SEQ ID NO: 3457478 - DNA, 25 bp, Homo sapien
tgggcttggaaacccctgcaacaca

SEQ ID NO: 3457479 - DNA, 25 bp, Homo sapien
gaagccgcagagacagacgccgccg

SEQ ID NO: 3457480 - DNA, 25 bp, Homo sapien
agtgagaaccagaagccgcagagac

SEQ ID NO: 3457481 - DNA, 25 bp, Homo sapien
gtgagaaccagaagccgcagagaca

SEQ ID NO: 3457482 - DNA, 25 bp, Homo sapien
aaccagaagccgcagagacagacgc

SEQ ID NO: 3457483 - DNA, 25 bp, Homo sapien
gacctccagaattgcgtcagaagct

SEQ ID NO: 3457484 - DNA, 25 bp, Homo sapien
cttcgacacagccacagtgaatgga

SEQ ID NO: 3457485 - DNA, 25 bp, Homo sapien
tcaaagaggcgcttagggccgacgt

SEQ ID NO: 3457486 - DNA, 25 bp, Homo sapien
gggcaatctaggcattcccgccgac

SEQ ID NO: 3457487 - DNA, 25 bp, Homo sapien
tgaacccacgtgaccaaaagagcta

SEQ ID NO: 3457488 - DNA, 25 bp, Homo sapien
gccggcccttgggaatgttaggcaa

SEQ ID NO: 3457489 - DNA, 25 bp, Homo sapien
tgctacgccaaaaggtgaataaggg

SEQ ID NO: 3457490 - DNA, 25 bp, Homo sapien
ctacatttttgcaggccagggagtg

SEQ ID NO: 3457491 - DNA, 25 bp, Homo sapien
ctaggtgacaggaagcgcgcgttct

SEQ ID NO: 3457492 - DNA, 25 bp, Homo sapien
cgagcatcacacaacgaagttaatg

SEQ ID NO: 3457493 - DNA, 25 bp, Homo sapien
aagttccagtaattctaggtgacag

SEQ ID NO: 3457494 - DNA, 25 bp, Homo sapien
gacatttgatgaggcgaaaacaata

SEQ ID NO: 3457495 - DNA, 25 bp, Homo sapien
gcaggacgttttcttacgcaccaag

SEQ ID NO: 3457496 - DNA, 25 bp, Homo sapien
tgatgggacatctaagcaggacgtt

SEQ ID NO: 3457497 - DNA, 25 bp, Homo sapien
taagctaagtgcttttccaacgctg

SEQ ID NO: 3457498 - DNA, 25 bp, Homo sapien
tgttgcctactgttaagatcagctg

SEQ ID NO: 3457499 - DNA, 25 bp, Homo sapien
aattaatatggagctactgtgcagc

SEQ ID NO: 3457500 - DNA, 25 bp, Homo sapien
ggaaattaatatggagctactgtgc

SEQ ID NO: 3457501 - DNA, 25 bp, Homo sapien
gaaattaatatggagctactgtgca

SEQ ID NO: 3457502 - DNA, 25 bp, Homo sapien
taatatggagctactgtgcagcttg

SEQ ID NO: 3457503 - DNA, 25 bp, Homo sapien
caattctggtcaacattgtacttca

SEQ ID NO: 3457504 - DNA, 25 bp, Homo sapien
caacattgtacttcatttccctagt

SEQ ID NO: 3457505 - DNA, 25 bp, Homo sapien
tcaattctggtcaacattgtacttc

SEQ ID NO: 3457506 - DNA, 25 bp, Homo sapien
tgtacttcatttccctagtctgcac

SEQ ID NO: 3457507 - DNA, 25 bp, Homo sapien
aggcttatccgaaggatatactaca

SEQ ID NO: 3457508 - DNA, 25 bp, Homo sapien
aaggaaaggcttatccgaaggatat

SEQ ID NO: 3457509 - DNA, 25 bp, Homo sapien
ggaaaggcttatccgaaggatatac

SEQ ID NO: 3457510 - DNA, 25 bp, Homo sapien
aggatatactacatatggagatgaa

SEQ ID NO: 3457511 - DNA, 25 bp, Homo sapien
tgttaccgtaggagacaataaggga

SEQ ID NO: 3457512 - DNA, 25 bp, Homo sapien
tacaaatgcctgtttagcctacgat

SEQ ID NO: 3457513 - DNA, 25 bp, Homo sapien
catgagagactacctactgttaccg

SEQ ID NO: 3457514 - DNA, 25 bp, Homo sapien
tctgagtgggcccaatctgataaca

SEQ ID NO: 3457515 - DNA, 25 bp, Homo sapien
gcttcggctcatactccatggactg

SEQ ID NO: 3457516 - DNA, 25 bp, Homo sapien
cttcggctcatactccatggactgc

SEQ ID NO: 3457517 - DNA, 25 bp, Homo sapien
cggctcatactccatggactgcact

SEQ ID NO: 3457518 - DNA, 25 bp, Homo sapien
ttcggctcatactccatggactgca

SEQ ID NO: 3457519 - DNA, 25 bp, Homo sapien
tttgcaatgggttcaaatatcttcc

SEQ ID NO: 3457520 - DNA, 25 bp, Homo sapien
gagaagtttgttatcaccgatcgtt

SEQ ID NO: 3457521 - DNA, 25 bp, Homo sapien
gagtcttgtgcatgcgtcatgtagt

SEQ ID NO: 3457522 - DNA, 25 bp, Homo sapien
ctactgagtcttgtgcatgcgtcat

SEQ ID NO: 3457523 - DNA, 25 bp, Homo sapien
ctgccaaatacaaacacaaacgtgg

SEQ ID NO: 3457524 - DNA, 25 bp, Homo sapien
tgccaaatacaaacacaaacgtgga

SEQ ID NO: 3457525 - DNA, 25 bp, Homo sapien
gccaaatacaaacacaaacgtggat

SEQ ID NO: 3457526 - DNA, 25 bp, Homo sapien
ccaaatacaaacacaaacgtggatg

SEQ ID NO: 3457527 - DNA, 25 bp, Homo sapien
caagttccaagcgtcgaatcttatc

SEQ ID NO: 3457528 - DNA, 25 bp, Homo sapien
gttccaagcgtcgaatcttatcttg

SEQ ID NO: 3457529 - DNA, 25 bp, Homo sapien
cctctcaagttccaagcgtcgaatc

SEQ ID NO: 3457530 - DNA, 25 bp, Homo sapien
caagcgtcgaatcttatcttgaaga

SEQ ID NO: 3457531 - DNA, 25 bp, Homo sapien
ggaattggatctattgtgtatacaa

SEQ ID NO: 3457532 - DNA, 25 bp, Homo sapien
ttaacaagctgttaacaggaattgg

SEQ ID NO: 3457533 - DNA, 25 bp, Homo sapien
tggacgccttttcagattacctaaa

SEQ ID NO: 3457534 - DNA, 25 bp, Homo sapien
tccacagacctggacgccttttcag

SEQ ID NO: 3457535 - DNA, 25 bp, Homo sapien
tcatatttcgcatgtattccaattg

SEQ ID NO: 3457536 - DNA, 25 bp, Homo sapien
tgtcctctccatttcggcatgcttt

SEQ ID NO: 3457537 - DNA, 25 bp, Homo sapien
ctccatttcggcatgctttatcata

SEQ ID NO: 3457538 - DNA, 25 bp, Homo sapien
gctttatcatatttcgcatgtattc

SEQ ID NO: 3457539 - DNA, 25 bp, Homo sapien
aaagcatacacggtaagccctctgt

SEQ ID NO: 3457540 - DNA, 25 bp, Homo sapien
gctgactgagggtagaaagcataca

SEQ ID NO: 3457541 - DNA, 25 bp, Homo sapien
taagagacctatcacacacaagaat

SEQ ID NO: 3457542 - DNA, 25 bp, Homo sapien
tccaatgagaactgaaagctgactg

SEQ ID NO: 3457543 - DNA, 25 bp, Homo sapien
ttctatgctgttatttggcccttca

SEQ ID NO: 3457544 - DNA, 25 bp, Homo sapien
tgactgatataagtggatactgttc

SEQ ID NO: 3457545 - DNA, 25 bp, Homo sapien
gatactgttcttagctcagttgcct

SEQ ID NO: 3457546 - DNA, 25 bp, Homo sapien
aacactgagcagtgtttttctatgc

SEQ ID NO: 3457547 - DNA, 25 bp, Homo sapien
gcaagggcctgcattgtggtaagtt

SEQ ID NO: 3457548 - DNA, 25 bp, Homo sapien
tgtggtaagtttgttatactcctgt

SEQ ID NO: 3457549 - DNA, 25 bp, Homo sapien
tgtttgatcatgttgtcgttctctt

SEQ ID NO: 3457550 - DNA, 25 bp, Homo sapien
catgtgtttgatcatgttgtcgttc

SEQ ID NO: 3457551 - DNA, 25 bp, Homo sapien
cattataagatcacttttaatgcta

SEQ ID NO: 3457552 - DNA, 25 bp, Homo sapien
tcttcattataagatcacttttaat

SEQ ID NO: 3457553 - DNA, 25 bp, Homo sapien
ttcattataagatcacttttaatgc

SEQ ID NO: 3457554 - DNA, 25 bp, Homo sapien
tcattataagatcacttttaatgct

SEQ ID NO: 3457555 - DNA, 25 bp, Homo sapien
gctgccttagcttgcatgcgtttcc

SEQ ID NO: 3457556 - DNA, 25 bp, Homo sapien
tcagctgccttagcttgcatgcgtt

SEQ ID NO: 3457557 - DNA, 25 bp, Homo sapien
ccttagcttgcatgcgtttcctttc

SEQ ID NO: 3457558 - DNA, 25 bp, Homo sapien
ctcagctgccttagcttgcatgcgt

SEQ ID NO: 3457559 - DNA, 25 bp, Homo sapien
aatttggtccctatgtgttgcctgc

SEQ ID NO: 3457560 - DNA, 25 bp, Homo sapien
tgttaactggtctgggtcaatagct

SEQ ID NO: 3457561 - DNA, 25 bp, Homo sapien
caagacattgtaggcctttggtcac

SEQ ID NO: 3457562 - DNA, 25 bp, Homo sapien
gccatgtggctatataactcagaaa

SEQ ID NO: 3457563 - DNA, 25 bp, Homo sapien
tgggaacacacggagttgccttatc

SEQ ID NO: 3457564 - DNA, 25 bp, Homo sapien
caaagataagtctatttgtttctag

SEQ ID NO: 3457565 - DNA, 25 bp, Homo sapien
tgcattgggaacacacggagttgcc

SEQ ID NO: 3457566 - DNA, 25 bp, Homo sapien
cacggagttgccttatcttcaaaga

SEQ ID NO: 3457567 - DNA, 25 bp, Homo sapien
tatagttggcattatgatcacaagc

SEQ ID NO: 3457568 - DNA, 25 bp, Homo sapien
tctcaaggttgtagtacaccacaca

SEQ ID NO: 3457569 - DNA, 25 bp, Homo sapien
gaaacttcagttaactactaggcta

SEQ ID NO: 3457570 - DNA, 25 bp, Homo sapien
tgttagcatatatcctagcctagga

SEQ ID NO: 3457571 - DNA, 25 bp, Homo sapien
aagcataatctataatgtggttgtg

SEQ ID NO: 3457572 - DNA, 25 bp, Homo sapien
cataatctataatgtggttgtgcac

SEQ ID NO: 3457573 - DNA, 25 bp, Homo sapien
taatctataatgtggttgtgcacca

SEQ ID NO: 3457574 - DNA, 25 bp, Homo sapien
tctataatgtggttgtgcaccaaaa

SEQ ID NO: 3457575 - DNA, 25 bp, Homo sapien
tgtacgtatgactgcttcttggaga

SEQ ID NO: 3457576 - DNA, 25 bp, Homo sapien
tgcagggacttaattcagggatcaa

SEQ ID NO: 3457577 - DNA, 25 bp, Homo sapien
tgtagacatacttgcagatgcaggg

SEQ ID NO: 3457578 - DNA, 25 bp, Homo sapien
gatgtgaggacaagcagaatgtgct

SEQ ID NO: 3457579 - DNA, 25 bp, Homo sapien
gaaaatatggaactgctagagaaca

SEQ ID NO: 3457580 - DNA, 25 bp, Homo sapien
tttgaaatggtggacaaccgcagct

SEQ ID NO: 3457581 - DNA, 25 bp, Homo sapien
tacaataggccttcagctggattca

SEQ ID NO: 3457582 - DNA, 25 bp, Homo sapien
taagtgaatactcccaacccttgag

SEQ ID NO: 3457583 - DNA, 25 bp, Homo sapien
taaacagtgtacatccaggtggtag

SEQ ID NO: 3457584 - DNA, 25 bp, Homo sapien
ttagccagatttggaaccaccatgc

SEQ ID NO: 3457585 - DNA, 25 bp, Homo sapien
tattacatcaatgcaaggctggtcc

SEQ ID NO: 3457586 - DNA, 25 bp, Homo sapien
ctatcacgtgtgtaagaaaaacctg

SEQ ID NO: 3457587 - DNA, 25 bp, Homo sapien
ccaaaggaatactgttgatgactcg

SEQ ID NO: 3457588 - DNA, 25 bp, Homo sapien
caagctgaacattggctaccacggc

SEQ ID NO: 3457589 - DNA, 25 bp, Homo sapien
tgaagatacttgctttgccaaagga

SEQ ID NO: 3457590 - DNA, 25 bp, Homo sapien
tgatgactcgatcattgcacaaagc

SEQ ID NO: 3457591 - DNA, 25 bp, Homo sapien
caacggttggcgactcctggataag

SEQ ID NO: 3457592 - DNA, 25 bp, Homo sapien
tgtctttcagttcaacggttggcga

SEQ ID NO: 3457593 - DNA, 25 bp, Homo sapien
tcctggataagttttgcaagctgct

SEQ ID NO: 3457594 - DNA, 25 bp, Homo sapien
taatgcctccaattcacactccaac

SEQ ID NO: 3457595 - DNA, 25 bp, Homo sapien
gtcttgctgaccacctctgatacat

SEQ ID NO: 3457596 - DNA, 25 bp, Homo sapien
tggttgaaaacccttgagtgtgatg

SEQ ID NO: 3457597 - DNA, 25 bp, Homo sapien
tgatacatctatagctgatctctca

SEQ ID NO: 3457598 - DNA, 25 bp, Homo sapien
actgcatctggtagtactacattgt

SEQ ID NO: 3457599 - DNA, 25 bp, Homo sapien
tcagtaatcccaacacaaactactg

SEQ ID NO: 3457600 - DNA, 25 bp, Homo sapien
cccaacacaaactactgctttgtaa

SEQ ID NO: 3457601 - DNA, 25 bp, Homo sapien
tgtccttcaataactgaagattttt

SEQ ID NO: 3457602 - DNA, 25 bp, Homo sapien
taatcccaacacaaactactgcttt

SEQ ID NO: 3457603 - DNA, 25 bp, Homo sapien
aaaagcctgtgtaatgaagcctggg

SEQ ID NO: 3457604 - DNA, 25 bp, Homo sapien
gcagcgtcagtacagcaaactcatc

SEQ ID NO: 3457605 - DNA, 25 bp, Homo sapien
gaagcctgggtcctttaacacctgc

SEQ ID NO: 3457606 - DNA, 25 bp, Homo sapien
tatgagacctgggaagtaaattgtc

SEQ ID NO: 3457607 - DNA, 25 bp, Homo sapien
cactgatcaaagtctgaaatgccaa

SEQ ID NO: 3457608 - DNA, 25 bp, Homo sapien
gaaggtatatgctcacaacatatcc

SEQ ID NO: 3457609 - DNA, 25 bp, Homo sapien
aaaaggttaacatgtcttgatctag

SEQ ID NO: 3457610 - DNA, 25 bp, Homo sapien
cataatgccttgactgaatatcatg

SEQ ID NO: 3457611 - DNA, 25 bp, Homo sapien
gtttacaatttcaggagagtcacaa

SEQ ID NO: 3457612 - DNA, 25 bp, Homo sapien
cgaacctactcattagaaaactgga

SEQ ID NO: 3457613 - DNA, 25 bp, Homo sapien
ctatgtaagcatgagtgtggcaact

SEQ ID NO: 3457614 - DNA, 25 bp, Homo sapien
taacaggctgttaaggaaagttgca

SEQ ID NO: 3457615 - DNA, 25 bp, Homo sapien
tttaatgacctgaaattcaaacaag

SEQ ID NO: 3457616 - DNA, 25 bp, Homo sapien
atggttatacaatttaatgacctga

SEQ ID NO: 3457617 - DNA, 25 bp, Homo sapien
tggttatacaatttaatgacctgaa

SEQ ID NO: 3457618 - DNA, 25 bp, Homo sapien
tcaaaagccagggaaatctaagtgc

SEQ ID NO: 3457619 - DNA, 25 bp, Homo sapien
gcatttaatatataccactggtgtg

SEQ ID NO: 3457620 - DNA, 25 bp, Homo sapien
accagtatgattaagttgaagctcc

SEQ ID NO: 3457621 - DNA, 25 bp, Homo sapien
ctccaatatggagtacatgcacttg

SEQ ID NO: 3457622 - DNA, 25 bp, Homo sapien
tgttcacctgctacaagtaagagtt

SEQ ID NO: 3457623 - DNA, 25 bp, Homo sapien
gcaagttgatccaaaatgggaggcc

SEQ ID NO: 3457624 - DNA, 25 bp, Homo sapien
gaattccatgcccttcagattagcc

SEQ ID NO: 3457625 - DNA, 25 bp, Homo sapien
tggtgctggtagaaacatttgactc

SEQ ID NO: 3457626 - DNA, 25 bp, Homo sapien
gattcacagtgggaacaagtttcta

SEQ ID NO: 3457627 - DNA, 25 bp, Homo sapien
gtgcagaggaacatcagttttcaaa

SEQ ID NO: 3457628 - DNA, 25 bp, Homo sapien
taagtgaagtaactccatatgtaat

SEQ ID NO: 3457629 - DNA, 25 bp, Homo sapien
gtttctattaaaaggcaaatgctgt

SEQ ID NO: 3457630 - DNA, 25 bp, Homo sapien
agtttagaactgtagcagtgcaggt

SEQ ID NO: 3457631 - DNA, 25 bp, Homo sapien
tgagtttagaactgtagcagtgcag

SEQ ID NO: 3457632 - DNA, 25 bp, Homo sapien
ttattttaaatctctctaggatgag

SEQ ID NO: 3457633 - DNA, 25 bp, Homo sapien
ttttaaatctctctaggatgagttt

SEQ ID NO: 3457634 - DNA, 25 bp, Homo sapien
gattcatcctgaaagtcaagccaca

SEQ ID NO: 3457635 - DNA, 25 bp, Homo sapien
aatctttatatttgatgcccggcca

SEQ ID NO: 3457636 - DNA, 25 bp, Homo sapien
tcaagccacaatcactcggtgtagc

SEQ ID NO: 3457637 - DNA, 25 bp, Homo sapien
tcggtgtagccagcccatggttgga

SEQ ID NO: 3457638 - DNA, 25 bp, Homo sapien
tgtagacccgtgatgccatgcctgc

SEQ ID NO: 3457639 - DNA, 25 bp, Homo sapien
tagctgagactgtagacccgtgatg

SEQ ID NO: 3457640 - DNA, 25 bp, Homo sapien
gctcaaggtagtcctctcatcacag

SEQ ID NO: 3457641 - DNA, 25 bp, Homo sapien
ggatgctgagagcataggctgagcc

SEQ ID NO: 3457642 - DNA, 25 bp, Homo sapien
taagcttaaatgtaaacaggctaaa

SEQ ID NO: 3457643 - DNA, 25 bp, Homo sapien
ccattgaggctaggaagaaaaagca

SEQ ID NO: 3457644 - DNA, 25 bp, Homo sapien
agaccattgaggctaggaagaaaaa

SEQ ID NO: 3457645 - DNA, 25 bp, Homo sapien
tgagagatttttgtcaccgccaggc

SEQ ID NO: 3457646 - DNA, 25 bp, Homo sapien
cctaatggaccagagtggctttggt

SEQ ID NO: 3457647 - DNA, 25 bp, Homo sapien
acaggttggctagccagttagtaac

SEQ ID NO: 3457648 - DNA, 25 bp, Homo sapien
gatgcatctcatagaaaacaggttg

SEQ ID NO: 3457649 - DNA, 25 bp, Homo sapien
tttaagaagataggttcggaagctc

SEQ ID NO: 3457650 - DNA, 25 bp, Homo sapien
tttttacctctggttctgatctctt

SEQ ID NO: 3457651 - DNA, 25 bp, Homo sapien
cttcttcgtggtttcagctgtcatc

SEQ ID NO: 3457652 - DNA, 25 bp, Homo sapien
tctttttggatgactcccacatttt

SEQ ID NO: 3457653 - DNA, 25 bp, Homo sapien
ccttcatatcccttgcttgcttggg

SEQ ID NO: 3457654 - DNA, 25 bp, Homo sapien
aatagacttatgtcttttggccggg

SEQ ID NO: 3457655 - DNA, 25 bp, Homo sapien
gcctgttgttttataccaatgtttg

SEQ ID NO: 3457656 - DNA, 25 bp, Homo sapien
ttaaatagacttatgtcttttggcc

SEQ ID NO: 3457657 - DNA, 25 bp, Homo sapien
tgtttgtcaacaattcagaattaaa

SEQ ID NO: 3457658 - DNA, 25 bp, Homo sapien
ccttagcactaggttacaaagggag

SEQ ID NO: 3457659 - DNA, 25 bp, Homo sapien
ggaaaacaatagctagccactaggt

SEQ ID NO: 3457660 - DNA, 25 bp, Homo sapien
taacaacttaggaagaccctcacag

SEQ ID NO: 3457661 - DNA, 25 bp, Homo sapien
taactgttctttccctaggagagtg

SEQ ID NO: 3457662 - DNA, 25 bp, Homo sapien
tccaaggagcattcccttattggtc

SEQ ID NO: 3457663 - DNA, 25 bp, Homo sapien
tcaactgaacttcatcctcatgcat

SEQ ID NO: 3457664 - DNA, 25 bp, Homo sapien
tccaaatccagttaagctttatctg

SEQ ID NO: 3457665 - DNA, 25 bp, Homo sapien
aatccagttaagctttatctgctcc

SEQ ID NO: 3457666 - DNA, 25 bp, Homo sapien
catcaggctctgaggatttaataga

SEQ ID NO: 3457667 - DNA, 25 bp, Homo sapien
ggctctgaggatttaatagacatta

SEQ ID NO: 3457668 - DNA, 25 bp, Homo sapien
acatatccatttctcttctcggcag

SEQ ID NO: 3457669 - DNA, 25 bp, Homo sapien
ctcggcagaattgcttttactgata

SEQ ID NO: 3457670 - DNA, 25 bp, Homo sapien
tttccccaagaccagatgtcgcgcg

SEQ ID NO: 3457671 - DNA, 25 bp, Homo sapien
cagccagcacggagagtcgatgccg

SEQ ID NO: 3457672 - DNA, 25 bp, Homo sapien
ccttccataagggtctggtccttca

SEQ ID NO: 3457673 - DNA, 25 bp, Homo sapien
cattcctcttacacctaggatttct

SEQ ID NO: 3457674 - DNA, 25 bp, Homo sapien
ccgggattccgatgaagatctgtct

SEQ ID NO: 3457675 - DNA, 25 bp, Homo sapien
agtgtagagacagaaccgggattcc

SEQ ID NO: 3457676 - DNA, 25 bp, Homo sapien
tggaaataaaaacaatcggtcgctg

SEQ ID NO: 3457677 - DNA, 25 bp, Homo sapien
taacaaagtgctacgaatgaactgg

SEQ ID NO: 3457678 - DNA, 25 bp, Homo sapien
cccctaatgaaggacctaatttgtg

SEQ ID NO: 3457679 - DNA, 25 bp, Homo sapien
caatctggtcccatttataatcctc

SEQ ID NO: 3457680 - DNA, 25 bp, Homo sapien
tattcttctagagttgtgggatgga

SEQ ID NO: 3457681 - DNA, 25 bp, Homo sapien
tcaaaagattgtgacggctccaatc

SEQ ID NO: 3457682 - DNA, 25 bp, Homo sapien
tgatggtgaataggagatggctgcc

SEQ ID NO: 3457683 - DNA, 25 bp, Homo sapien
ctatgatggtgaataggagatggct

SEQ ID NO: 3457684 - DNA, 25 bp, Homo sapien
atggtgaataggagatggctgccac

SEQ ID NO: 3457685 - DNA, 25 bp, Homo sapien
atgatggtgaataggagatggctgc

SEQ ID NO: 3457686 - DNA, 25 bp, Homo sapien
tctttatgacaatcttgggctccac

SEQ ID NO: 3457687 - DNA, 25 bp, Homo sapien
cccgatgatgaacttcttgatcctc

SEQ ID NO: 3457688 - DNA, 25 bp, Homo sapien
ttatgacaatcttgggctccacaag

SEQ ID NO: 3457689 - DNA, 25 bp, Homo sapien
aattttgacatatcgatctgtcccg

SEQ ID NO: 3457690 - DNA, 25 bp, Homo sapien
tcttctttgagaaaacattgtgagc

SEQ ID NO: 3457691 - DNA, 25 bp, Homo sapien
ggttcttctttgagaaaacattgtg

SEQ ID NO: 3457692 - DNA, 25 bp, Homo sapien
ctttgagaaaacattgtgagcattc

SEQ ID NO: 3457693 - DNA, 25 bp, Homo sapien
gtgtggttcttctttgagaaaacat

SEQ ID NO: 3457694 - DNA, 25 bp, Homo sapien
tctagcacctgatgaaatgcccagg

SEQ ID NO: 3457695 - DNA, 25 bp, Homo sapien
tgttaccctcctaataagactgccc

SEQ ID NO: 3457696 - DNA, 25 bp, Homo sapien
tctccttggaggtaaaagcgttgca

SEQ ID NO: 3457697 - DNA, 25 bp, Homo sapien
tgcctcaagctaaaagattcggtca

SEQ ID NO: 3457698 - DNA, 25 bp, Homo sapien
tgactgaatccaacgagtcttacta

SEQ ID NO: 3457699 - DNA, 25 bp, Homo sapien
tcaaagtaacacctagtagccaggc

SEQ ID NO: 3457700 - DNA, 25 bp, Homo sapien
agtgttcagcccacaaaactgcttt

SEQ ID NO: 3457701 - DNA, 25 bp, Homo sapien
aaagatctctcacatattgaccatg

SEQ ID NO: 3457702 - DNA, 25 bp, Homo sapien
ccaaatgttacaagtggagcttcaa

SEQ ID NO: 3457703 - DNA, 25 bp, Homo sapien
taatagggtggctagtacatagatg

SEQ ID NO: 3457704 - DNA, 25 bp, Homo sapien
gagaaagaggataagcagaccagtt

SEQ ID NO: 3457705 - DNA, 25 bp, Homo sapien
gatcgtgtataaagtgcccagtgta

SEQ ID NO: 3457706 - DNA, 25 bp, Homo sapien
ttcttttcggatattatggcagggc

SEQ ID NO: 3457707 - DNA, 25 bp, Homo sapien
aattaaaactcactgctaccctggg

SEQ ID NO: 3457708 - DNA, 25 bp, Homo sapien
tttaccaccactttagatcaagggc

SEQ ID NO: 3457709 - DNA, 25 bp, Homo sapien
taaaccataatggtcaaccagctgg

SEQ ID NO: 3457710 - DNA, 25 bp, Homo sapien
cagtatggtatgtgctcccttcaaa

SEQ ID NO: 3457711 - DNA, 25 bp, Homo sapien
aaaagtgttcctcctagaatctgaa

SEQ ID NO: 3457712 - DNA, 25 bp, Homo sapien
tatatgaacataggagcccttcttc

SEQ ID NO: 3457713 - DNA, 25 bp, Homo sapien
tggtaatctgatcaccaccagagag

SEQ ID NO: 3457714 - DNA, 25 bp, Homo sapien
cttcttcagatacagtatctttagc

SEQ ID NO: 3457715 - DNA, 25 bp, Homo sapien
tcagatacagtatctttagcagtca

SEQ ID NO: 3457716 - DNA, 25 bp, Homo sapien
tcttcagatacagtatctttagcag

SEQ ID NO: 3457717 - DNA, 25 bp, Homo sapien
ttcagatacagtatctttagcagtc

SEQ ID NO: 3457718 - DNA, 25 bp, Homo sapien
ctgcctggctaccgggcagtctgta

SEQ ID NO: 3457719 - DNA, 25 bp, Homo sapien
gcctggctaccgggcagtctgtaaa

SEQ ID NO: 3457720 - DNA, 25 bp, Homo sapien
cagtctgtaaagctttgacatgtgt

SEQ ID NO: 3457721 - DNA, 25 bp, Homo sapien
tcatggagtctgcctgcatttcccc

SEQ ID NO: 3457722 - DNA, 25 bp, Homo sapien
ggcctgctgcactccacaacatgaa

SEQ ID NO: 3457723 - DNA, 25 bp, Homo sapien
agcctcctagatcccacgcccacag

SEQ ID NO: 3457724 - DNA, 25 bp, Homo sapien
ccccatagcctcctagatcccacgc

SEQ ID NO: 3457725 - DNA, 25 bp, Homo sapien
gcgccactgaacatagaaagtcaga

SEQ ID NO: 3457726 - DNA, 25 bp, Homo sapien
tttttaaagcgccactgaacataga

SEQ ID NO: 3457727 - DNA, 25 bp, Homo sapien
agagctttaagccagtgaatgacaa

SEQ ID NO: 3457728 - DNA, 25 bp, Homo sapien
caaatggtgggagtttccagtccat

SEQ ID NO: 3457729 - DNA, 25 bp, Homo sapien
aactctctagagtgaacttaaagtg

SEQ ID NO: 3457730 - DNA, 25 bp, Homo sapien
ctgcagagagtagtgctaaaagagt

SEQ ID NO: 3457731 - DNA, 25 bp, Homo sapien
gagtgaacttaaagtgcccttctac

SEQ ID NO: 3457732 - DNA, 25 bp, Homo sapien
cagagagtagtgctaaaagagttta

SEQ ID NO: 3457733 - DNA, 25 bp, Homo sapien
gctctgagtcaggaatggtgatcat

SEQ ID NO: 3457734 - DNA, 25 bp, Homo sapien
aatggtgatcatgtgttctttccca

SEQ ID NO: 3457735 - DNA, 25 bp, Homo sapien
accgtccactgcaactgtgattgtg

SEQ ID NO: 3457736 - DNA, 25 bp, Homo sapien
gctttttcaccgtccactgcaactg

SEQ ID NO: 3457737 - DNA, 25 bp, Homo sapien
gatctagtttccctcatcatgggcc

SEQ ID NO: 3457738 - DNA, 25 bp, Homo sapien
caggaatttggatcgccacatctca

SEQ ID NO: 3457739 - DNA, 25 bp, Homo sapien
ttgtttaagttagccgcagcacacc

SEQ ID NO: 3457740 - DNA, 25 bp, Homo sapien
tatttgccatcctatcgtgagctcc

SEQ ID NO: 3457741 - DNA, 25 bp, Homo sapien
caagagcccaggtgcgttggctccc

SEQ ID NO: 3457742 - DNA, 25 bp, Homo sapien
ctcagactccgatcaaatttccaag

SEQ ID NO: 3457743 - DNA, 25 bp, Homo sapien
ggctcccgacggcagtgcaggaaca

SEQ ID NO: 3457744 - DNA, 25 bp, Homo sapien
caacctaggcggtattctcagactc

SEQ ID NO: 3457745 - DNA, 25 bp, Homo sapien
tagcttgtaaccttcatacaaggtg

SEQ ID NO: 3457746 - DNA, 25 bp, Homo sapien
cttagcttgtaaccttcatacaagg

SEQ ID NO: 3457747 - DNA, 25 bp, Homo sapien
cttcatacaaggtgtgatttccagg

SEQ ID NO: 3457748 - DNA, 25 bp, Homo sapien
ttcatacaaggtgtgatttccagga

SEQ ID NO: 3457749 - DNA, 25 bp, Homo sapien
tcttgcaattcatcacgtctcttgg

SEQ ID NO: 3457750 - DNA, 25 bp, Homo sapien
cctttagctgggctatttctgccag

SEQ ID NO: 3457751 - DNA, 25 bp, Homo sapien
cagctccccggctatgaacacaaca

SEQ ID NO: 3457752 - DNA, 25 bp, Homo sapien
aattcatcacgtctcttggctcgag

SEQ ID NO: 3457753 - DNA, 25 bp, Homo sapien
tgaaggtaactcgtatcttacagta

SEQ ID NO: 3457754 - DNA, 25 bp, Homo sapien
gaaggtaactcgtatcttacagtat

SEQ ID NO: 3457755 - DNA, 25 bp, Homo sapien
tttgaaggtaactcgtatcttacag

SEQ ID NO: 3457756 - DNA, 25 bp, Homo sapien
taatttgaaggtaactcgtatctta

SEQ ID NO: 3457757 - DNA, 25 bp, Homo sapien
gtaacaactccatagacatagtttg

SEQ ID NO: 3457758 - DNA, 25 bp, Homo sapien
tcccataggagtcagtaactcttgt

SEQ ID NO: 3457759 - DNA, 25 bp, Homo sapien
cccataggagtcagtaactcttgta

SEQ ID NO: 3457760 - DNA, 25 bp, Homo sapien
catagacatagtttgcaaggtcctc

SEQ ID NO: 3457761 - DNA, 25 bp, Homo sapien
tcaaaatggcggcacccaagttgtc

SEQ ID NO: 3457762 - DNA, 25 bp, Homo sapien
cctgccttggcctccttatttattt

SEQ ID NO: 3457763 - DNA, 25 bp, Homo sapien
tgccttggcctccttatttatttat

SEQ ID NO: 3457764 - DNA, 25 bp, Homo sapien
cacgcaccaccacacccagctaatt

SEQ ID NO: 3457765 - DNA, 25 bp, Homo sapien
acgcaccaccacacccagctaattt

SEQ ID NO: 3457766 - DNA, 25 bp, Homo sapien
cattgaccatggtagcagatgacac

SEQ ID NO: 3457767 - DNA, 25 bp, Homo sapien
tgataccagccacaaacctcactag

SEQ ID NO: 3457768 - DNA, 25 bp, Homo sapien
tacaatcaatatgcaaggcgctatc

SEQ ID NO: 3457769 - DNA, 25 bp, Homo sapien
gaatgtcacatagcaaggccaactg

SEQ ID NO: 3457770 - DNA, 25 bp, Homo sapien
cagacctccttcctggaattgcagc

SEQ ID NO: 3457771 - DNA, 25 bp, Homo sapien
cagatggtagttggacagcgtgtct

SEQ ID NO: 3457772 - DNA, 25 bp, Homo sapien
cagcgtgtctaagcaattctgcctt

SEQ ID NO: 3457773 - DNA, 25 bp, Homo sapien
gatgaggccagtaactggcgttcta

SEQ ID NO: 3457774 - DNA, 25 bp, Homo sapien
tgccttcgtgctttgatactgtaat

SEQ ID NO: 3457775 - DNA, 25 bp, Homo sapien
tcccaggtgctactgccgacaccac

SEQ ID NO: 3457776 - DNA, 25 bp, Homo sapien
cgtgctttgatactgtaattctcct

SEQ ID NO: 3457777 - DNA, 25 bp, Homo sapien
tgcatgaccatccacgtctctgcct

SEQ ID NO: 3457778 - DNA, 25 bp, Homo sapien
atgtagccgctggagttattattgg

SEQ ID NO: 3457779 - DNA, 25 bp, Homo sapien
tgtttcatcgcaggccttgaaaggt

SEQ ID NO: 3457780 - DNA, 25 bp, Homo sapien
ctgtttcatcgcaggccttgaaagg

SEQ ID NO: 3457781 - DNA, 25 bp, Homo sapien
ggagttattattggcaacagtggtg

SEQ ID NO: 3457782 - DNA, 25 bp, Homo sapien
agaagggcagtatgttgacttcttt

SEQ ID NO: 3457783 - DNA, 25 bp, Homo sapien
aagggcagtatgttgacttcttttc

SEQ ID NO: 3457784 - DNA, 25 bp, Homo sapien
cttcagaagggcagtatgttgactt

SEQ ID NO: 3457785 - DNA, 25 bp, Homo sapien
ttcagaagggcagtatgttgacttc

SEQ ID NO: 3457786 - DNA, 25 bp, Homo sapien
cgcgcttaaagcagaaggagcctga

SEQ ID NO: 3457787 - DNA, 25 bp, Homo sapien
agaaggagcctgaagaagaatgaag

SEQ ID NO: 3457788 - DNA, 25 bp, Homo sapien
gcgcttaaagcagaaggagcctgaa

SEQ ID NO: 3457789 - DNA, 25 bp, Homo sapien
gaaggagcctgaagaagaatgaaga

SEQ ID NO: 3457790 - DNA, 25 bp, Homo sapien
ttgccaaactaccttctaaatgctg

SEQ ID NO: 3457791 - DNA, 25 bp, Homo sapien
ctagatacagttgctataagaaaaa

SEQ ID NO: 3457792 - DNA, 25 bp, Homo sapien
actaccttctaaatgctgcttaaca

SEQ ID NO: 3457793 - DNA, 25 bp, Homo sapien
gcttaacattcctttgtaatggagt

SEQ ID NO: 3457794 - DNA, 25 bp, Homo sapien
ttctcagtctggaatatttttgccc

SEQ ID NO: 3457795 - DNA, 25 bp, Homo sapien
tctgaaccatcaaggaatggtcagg

SEQ ID NO: 3457796 - DNA, 25 bp, Homo sapien
tggtcaggatttccctcagaagaca

SEQ ID NO: 3457797 - DNA, 25 bp, Homo sapien
ttttgcccatagcaaagtctgaacc

SEQ ID NO: 3457798 - DNA, 25 bp, Homo sapien
tcattattgtggatccatctctcca

SEQ ID NO: 3457799 - DNA, 25 bp, Homo sapien
cttcattattgtggatccatctctc

SEQ ID NO: 3457800 - DNA, 25 bp, Homo sapien
cattattgtggatccatctctccat

SEQ ID NO: 3457801 - DNA, 25 bp, Homo sapien
ttcattattgtggatccatctctcc

SEQ ID NO: 3457802 - DNA, 25 bp, Homo sapien
tgctccacagaacccatatacagta

SEQ ID NO: 3457803 - DNA, 25 bp, Homo sapien
actgcagccttggagatagaatttc

SEQ ID NO: 3457804 - DNA, 25 bp, Homo sapien
cctacaggtgtgatagtttactgca

SEQ ID NO: 3457805 - DNA, 25 bp, Homo sapien
tatacagtagggcacttaagtaggc

SEQ ID NO: 3457806 - DNA, 25 bp, Homo sapien
cgagactgggcatgtaaagaatggt

SEQ ID NO: 3457807 - DNA, 25 bp, Homo sapien
aattgagcttttccctcttggctgg

SEQ ID NO: 3457808 - DNA, 25 bp, Homo sapien
gttgcattccctctaaaccacacag

SEQ ID NO: 3457809 - DNA, 25 bp, Homo sapien
tggctggaatctgtggttgcattcc

SEQ ID NO: 3457810 - DNA, 25 bp, Homo sapien
acggaagcaccgtagcctagttggg

SEQ ID NO: 3457811 - DNA, 25 bp, Homo sapien
gttgggggcactgcatgtgaccaca

SEQ ID NO: 3457812 - DNA, 25 bp, Homo sapien
tgtgaccacaaagctagacacgtgt

SEQ ID NO: 3457813 - DNA, 25 bp, Homo sapien
gcaggctctaaaaatgtcatcatat

SEQ ID NO: 3457814 - DNA, 25 bp, Homo sapien
tggactatgtctcggaggtgcttcc

SEQ ID NO: 3457815 - DNA, 25 bp, Homo sapien
ggtttacccggcaatcattattcac

SEQ ID NO: 3457816 - DNA, 25 bp, Homo sapien
ccttcctggactatgtctcggaggt

SEQ ID NO: 3457817 - DNA, 25 bp, Homo sapien
cctggtggtttacccggcaatcatt

SEQ ID NO: 3457818 - DNA, 25 bp, Homo sapien
cgcgtggaatagcagagcactgctc

SEQ ID NO: 3457819 - DNA, 25 bp, Homo sapien
cagagcactgctccctgccagcagg

SEQ ID NO: 3457820 - DNA, 25 bp, Homo sapien
aatagcagagcactgctccctgcca

SEQ ID NO: 3457821 - DNA, 25 bp, Homo sapien
tagcagagcactgctccctgccagc

SEQ ID NO: 3457822 - DNA, 25 bp, Homo sapien
taggcaatcgccttatcctgtcaag

SEQ ID NO: 3457823 - DNA, 25 bp, Homo sapien
ggggaactgacttcctcctcagtgt

SEQ ID NO: 3457824 - DNA, 25 bp, Homo sapien
cagtgtcttggagggagctcttgcc

SEQ ID NO: 3457825 - DNA, 25 bp, Homo sapien
aaggatggaagcatgagtggtcact

SEQ ID NO: 3457826 - DNA, 25 bp, Homo sapien
tcttgtagtgtctgcctttctggca

SEQ ID NO: 3457827 - DNA, 25 bp, Homo sapien
cttttgccttctgagtctgccttga

SEQ ID NO: 3457828 - DNA, 25 bp, Homo sapien
ccttgactgcctgaatgagacatgg

SEQ ID NO: 3457829 - DNA, 25 bp, Homo sapien
tcagcactgccagggaaacaatttg

SEQ ID NO: 3457830 - DNA, 25 bp, Homo sapien
tcactgcattctccgaatgtcagca

SEQ ID NO: 3457831 - DNA, 25 bp, Homo sapien
ctccgaatgtcagcattgagaaacc

SEQ ID NO: 3457832 - DNA, 25 bp, Homo sapien
cgaatgtcagcattgagaaacctac

SEQ ID NO: 3457833 - DNA, 25 bp, Homo sapien
cactgcattctccgaatgtcagcat

SEQ ID NO: 3457834 - DNA, 25 bp, Homo sapien
tctggggctggcaactgccaacttt

SEQ ID NO: 3457835 - DNA, 25 bp, Homo sapien
agggcactatgccatcttgaacagc

SEQ ID NO: 3457836 - DNA, 25 bp, Homo sapien
cttccatggaaggaccctgaggttc

SEQ ID NO: 3457837 - DNA, 25 bp, Homo sapien
cagccagcacaactttatgactcat

SEQ ID NO: 3457838 - DNA, 25 bp, Homo sapien
tttcctccctgatgttcttccatgg

SEQ ID NO: 3457839 - DNA, 25 bp, Homo sapien
gaaagtgctagatggaacaggtttg

SEQ ID NO: 3457840 - DNA, 25 bp, Homo sapien
tgcagcatttggagaaagtgctaga

SEQ ID NO: 3457841 - DNA, 25 bp, Homo sapien
ctgggagcaggaaaatgcagcattt

SEQ ID NO: 3457842 - DNA, 25 bp, Homo sapien
atttggagaaagtgctagatggaac

SEQ ID NO: 3457843 - DNA, 25 bp, Homo sapien
tggcttgcatggcattcaatgagct

SEQ ID NO: 3457844 - DNA, 25 bp, Homo sapien
ctctgccatcgctgagggtccactt

SEQ ID NO: 3457845 - DNA, 25 bp, Homo sapien
cttacgagttattctgcccctttca

SEQ ID NO: 3457846 - DNA, 25 bp, Homo sapien
gcattcaatgagcttgtgtacttcc

SEQ ID NO: 3457847 - DNA, 25 bp, Homo sapien
tgttttcatcaccgttttactccac

SEQ ID NO: 3457848 - DNA, 25 bp, Homo sapien
catgggggatatgccacaagtgttt

SEQ ID NO: 3457849 - DNA, 25 bp, Homo sapien
ttttcatcaccgttttactccactc

SEQ ID NO: 3457850 - DNA, 25 bp, Homo sapien
tcagtggttagcacatgggggatat

SEQ ID NO: 3457851 - DNA, 25 bp, Homo sapien
ccttaattaggagcccttgatgcca

SEQ ID NO: 3457852 - DNA, 25 bp, Homo sapien
gccaacacctatcctcctcatcaga

SEQ ID NO: 3457853 - DNA, 25 bp, Homo sapien
ctggtggccttaattaggagccctt

SEQ ID NO: 3457854 - DNA, 25 bp, Homo sapien
catttccataactgccaacacctat

SEQ ID NO: 3457855 - DNA, 25 bp, Homo sapien
gacatggtggattgaggcatagcca

SEQ ID NO: 3457856 - DNA, 25 bp, Homo sapien
tacacatgctttgcactattacaga

SEQ ID NO: 3457857 - DNA, 25 bp, Homo sapien
cagatgttaacttgtcaaagtccag

SEQ ID NO: 3457858 - DNA, 25 bp, Homo sapien
aagacatggtggattgaggcatagc

SEQ ID NO: 3457859 - DNA, 25 bp, Homo sapien
ttggttactccaataaaactgctga

SEQ ID NO: 3457860 - DNA, 25 bp, Homo sapien
agacttggttactccaataaaactg

SEQ ID NO: 3457861 - DNA, 25 bp, Homo sapien
tactccaataaaactgctgaaacat

SEQ ID NO: 3457862 - DNA, 25 bp, Homo sapien
ttactccaataaaactgctgaaaca

SEQ ID NO: 3457863 - DNA, 25 bp, Homo sapien
gattccataactggtgaccatgctt

SEQ ID NO: 3457864 - DNA, 25 bp, Homo sapien
tgggattccataactggtgaccatg

SEQ ID NO: 3457865 - DNA, 25 bp, Homo sapien
gggattccataactggtgaccatgc

SEQ ID NO: 3457866 - DNA, 25 bp, Homo sapien
ctgggattccataactggtgaccat

SEQ ID NO: 3457867 - DNA, 25 bp, Homo sapien
cattatcatgtttgaaggtgtccct

SEQ ID NO: 3457868 - DNA, 25 bp, Homo sapien
cttcacaagcctgctgttttaccac

SEQ ID NO: 3457869 - DNA, 25 bp, Homo sapien
tgctctcattatcatgtttgaaggt

SEQ ID NO: 3457870 - DNA, 25 bp, Homo sapien
gctgttttaccacacagtactggtc

SEQ ID NO: 3457871 - DNA, 25 bp, Homo sapien
tacgacaattattaagatcagagga

SEQ ID NO: 3457872 - DNA, 25 bp, Homo sapien
tatcacatcaagatgctaacagtgt

SEQ ID NO: 3457873 - DNA, 25 bp, Homo sapien
gaataattcacctaacaccccataa

SEQ ID NO: 3457874 - DNA, 25 bp, Homo sapien
aaagaccctatcacattggacaatg

SEQ ID NO: 3457875 - DNA, 25 bp, Homo sapien
atcttccctatactgtgcagaagca

SEQ ID NO: 3457876 - DNA, 25 bp, Homo sapien
ttccctatactgtgcagaagcaaag

SEQ ID NO: 3457877 - DNA, 25 bp, Homo sapien
gaagcaaagagctcaatactgattt

SEQ ID NO: 3457878 - DNA, 25 bp, Homo sapien
gcagaagcaaagagctcaatactga

SEQ ID NO: 3457879 - DNA, 25 bp, Homo sapien
ctggaaacattttctcgttggtctg

SEQ ID NO: 3457880 - DNA, 25 bp, Homo sapien
tggaaacattttctcgttggtctgg

SEQ ID NO: 3457881 - DNA, 25 bp, Homo sapien
caacagtgggattacctaccaggct

SEQ ID NO: 3457882 - DNA, 25 bp, Homo sapien
tgctgagcgccacattccatgggac

SEQ ID NO: 3457883 - DNA, 25 bp, Homo sapien
taagcctccagtctgcaacagtggg

SEQ ID NO: 3457884 - DNA, 25 bp, Homo sapien
tcagcgtgcgcttatggaactcatg

SEQ ID NO: 3457885 - DNA, 25 bp, Homo sapien
tgggctgtccagaagctcatcagag

SEQ ID NO: 3457886 - DNA, 25 bp, Homo sapien
gccaggcagcaaaaatgtctggaaa

SEQ ID NO: 3457887 - DNA, 25 bp, Homo sapien
catcagagatagactcaatcagtac

SEQ ID NO: 3457888 - DNA, 25 bp, Homo sapien
gaaacccgatgtggccaagactggg

SEQ ID NO: 3457889 - DNA, 25 bp, Homo sapien
cccccaggatacacagtaaagagag

SEQ ID NO: 3457890 - DNA, 25 bp, Homo sapien
ctcagggtcagtttgtctgtgattc

SEQ ID NO: 3457891 - DNA, 25 bp, Homo sapien
cacacacactacaatatttctggat

SEQ ID NO: 3457892 - DNA, 25 bp, Homo sapien
cttaaactgcaggtatcacattggc

SEQ ID NO: 3457893 - DNA, 25 bp, Homo sapien
tgatggctactcatttgatctgcct

SEQ ID NO: 3457894 - DNA, 25 bp, Homo sapien
gatgccagttctgattgtgactgtc

SEQ ID NO: 3457895 - DNA, 25 bp, Homo sapien
gccagttctgattgtgactgtcctc

SEQ ID NO: 3457896 - DNA, 25 bp, Homo sapien
tgccagttctgattgtgactgtcct

SEQ ID NO: 3457897 - DNA, 25 bp, Homo sapien
ctgattgtgactgtcctcttgtttc

SEQ ID NO: 3457898 - DNA, 25 bp, Homo sapien
gttcctggagcttggaagtaggacc

SEQ ID NO: 3457899 - DNA, 25 bp, Homo sapien
atgtaagttcctggagcttggaagt

SEQ ID NO: 3457900 - DNA, 25 bp, Homo sapien
tcctggagcttggaagtaggacctt

SEQ ID NO: 3457901 - DNA, 25 bp, Homo sapien
taagttcctggagcttggaagtagg

SEQ ID NO: 3457902 - DNA, 25 bp, Homo sapien
tagcagctaagctgttccccaggca

SEQ ID NO: 3457903 - DNA, 25 bp, Homo sapien
tcaggtttatataaagtggcgttcc

SEQ ID NO: 3457904 - DNA, 25 bp, Homo sapien
caagagctatctgtgatacggaata

SEQ ID NO: 3457905 - DNA, 25 bp, Homo sapien
tctcaaggtgtgcttccaagaacag

SEQ ID NO: 3457906 - DNA, 25 bp, Homo sapien
agtcatgcatgctgccaattccaga

SEQ ID NO: 3457907 - DNA, 25 bp, Homo sapien
gctgccaattccagattgtccaaac

SEQ ID NO: 3457908 - DNA, 25 bp, Homo sapien
cagtcatgcatgctgccaattccag

SEQ ID NO: 3457909 - DNA, 25 bp, Homo sapien
acagtcatgcatgctgccaattcca

SEQ ID NO: 3457910 - DNA, 25 bp, Homo sapien
tataaagtgctcagttcatccaggg

SEQ ID NO: 3457911 - DNA, 25 bp, Homo sapien
gggttataacacaccctcatctgca

SEQ ID NO: 3457912 - DNA, 25 bp, Homo sapien
tgcatggtgaggtacatgagtcagc

SEQ ID NO: 3457913 - DNA, 25 bp, Homo sapien
cagacacactgtgggttataacaca

SEQ ID NO: 3457914 - DNA, 25 bp, Homo sapien
gagaatgttaggcacaccaataaat

SEQ ID NO: 3457915 - DNA, 25 bp, Homo sapien
catattcccttaaaactgtcgcagg

SEQ ID NO: 3457916 - DNA, 25 bp, Homo sapien
ccagagcaagatgtttaatgattat

SEQ ID NO: 3457917 - DNA, 25 bp, Homo sapien
tattctacctacactttgtattgca

SEQ ID NO: 3457918 - DNA, 25 bp, Homo sapien
ataatgatagccatatagcaatgcc

SEQ ID NO: 3457919 - DNA, 25 bp, Homo sapien
cataatgatagccatatagcaatgc

SEQ ID NO: 3457920 - DNA, 25 bp, Homo sapien
agcactgaaggcaacttgatctccg

SEQ ID NO: 3457921 - DNA, 25 bp, Homo sapien
aggctggctgcaatgatatcctttg

SEQ ID NO: 3457922 - DNA, 25 bp, Homo sapien
gataatgagcacagttctaagaggc

SEQ ID NO: 3457923 - DNA, 25 bp, Homo sapien
gcttttggtctgactttaagctcag

SEQ ID NO: 3457924 - DNA, 25 bp, Homo sapien
tggtggctgcaacaccagcttcccg

SEQ ID NO: 3457925 - DNA, 25 bp, Homo sapien
ctgtcctctggcctagagtctggat

SEQ ID NO: 3457926 - DNA, 25 bp, Homo sapien
tctggcctagagtctggattgcagg

SEQ ID NO: 3457927 - DNA, 25 bp, Homo sapien
cttcccgttcagaatgctgactttg

SEQ ID NO: 3457928 - DNA, 25 bp, Homo sapien
gaatatgctctgcaaataagtcatc

SEQ ID NO: 3457929 - DNA, 25 bp, Homo sapien
ctgttgaatatgctctgcaaataag

SEQ ID NO: 3457930 - DNA, 25 bp, Homo sapien
tatgctctgcaaataagtcatctgt

SEQ ID NO: 3457931 - DNA, 25 bp, Homo sapien
gctgttcctgttgaatatgctctgc

SEQ ID NO: 3457932 - DNA, 25 bp, Homo sapien
caaggaggtacaggcataaatctaa

SEQ ID NO: 3457933 - DNA, 25 bp, Homo sapien
cacagtggtctttttggcccaggct

SEQ ID NO: 3457934 - DNA, 25 bp, Homo sapien
cccaggctgtgtgctactttggcca

SEQ ID NO: 3457935 - DNA, 25 bp, Homo sapien
tgttgattccgacatttccagggaa

SEQ ID NO: 3457936 - DNA, 25 bp, Homo sapien
ttggaataatcagcctcataaggtg

SEQ ID NO: 3457937 - DNA, 25 bp, Homo sapien
taacatgtagtttgaggtcggtctc

SEQ ID NO: 3457938 - DNA, 25 bp, Homo sapien
gatagctgtcagttcaatatatacc

SEQ ID NO: 3457939 - DNA, 25 bp, Homo sapien
tctgctttgccgtggaacttacttg

SEQ ID NO: 3457940 - DNA, 25 bp, Homo sapien
cggtaagattcccattgctcaaaaa

SEQ ID NO: 3457941 - DNA, 25 bp, Homo sapien
tccttataaccgagacaagtgaatg

SEQ ID NO: 3457942 - DNA, 25 bp, Homo sapien
gaattcgcagcacattttttgaaga

SEQ ID NO: 3457943 - DNA, 25 bp, Homo sapien
tgggtgttaaagtcactgtttggga

SEQ ID NO: 3457944 - DNA, 25 bp, Homo sapien
cagtgggcgcggtgcccgttatttc

SEQ ID NO: 3457945 - DNA, 25 bp, Homo sapien
ttggtgatttctcgggtttctggcc

SEQ ID NO: 3457946 - DNA, 25 bp, Homo sapien
taattgttttctcggtgcagagctc

SEQ ID NO: 3457947 - DNA, 25 bp, Homo sapien
gtttccgtcgtcctgcgcgcgtcat

SEQ ID NO: 3457948 - DNA, 25 bp, Homo sapien
tcttgcaaccaggacccgcacagct

SEQ ID NO: 3457949 - DNA, 25 bp, Homo sapien
gcggcagtcgctccgcccctagcca

SEQ ID NO: 3457950 - DNA, 25 bp, Homo sapien
agctccctgactatcgcgcggcagt

SEQ ID NO: 3457951 - DNA, 25 bp, Homo sapien
cgcacagctccctgactatcgcgcg

SEQ ID NO: 3457952 - DNA, 25 bp, Homo sapien
gcctaggagtcaaggactggcaccc

SEQ ID NO: 3457953 - DNA, 25 bp, Homo sapien
agtttcccgcgccagctttagccgg

SEQ ID NO: 3457954 - DNA, 25 bp, Homo sapien
ttacgacagagagccgaagagccta

SEQ ID NO: 3457955 - DNA, 25 bp, Homo sapien
gaacggatatattagattccttccc

SEQ ID NO: 3457956 - DNA, 25 bp, Homo sapien
gatcccgggtaaccgcgcgtcacta

SEQ ID NO: 3457957 - DNA, 25 bp, Homo sapien
tgcacgtccagatcccgggtaaccg

SEQ ID NO: 3457958 - DNA, 25 bp, Homo sapien
cagatcccgggtaaccgcgcgtcac

SEQ ID NO: 3457959 - DNA, 25 bp, Homo sapien
ctcctgcacgtccagatcccgggta

SEQ ID NO: 3457960 - DNA, 25 bp, Homo sapien
tggccctgatcccctcccgggctgg

SEQ ID NO: 3457961 - DNA, 25 bp, Homo sapien
caattcctcatacatggatggcttc

SEQ ID NO: 3457962 - DNA, 25 bp, Homo sapien
ttatatcccgaactgttgtttcacc

SEQ ID NO: 3457963 - DNA, 25 bp, Homo sapien
tcactgccagttgtttggaagaacc

SEQ ID NO: 3457964 - DNA, 25 bp, Homo sapien
tcctcttggccaaaagacttgtgga

SEQ ID NO: 3457965 - DNA, 25 bp, Homo sapien
tctgccctttttgcacaaattggtc

SEQ ID NO: 3457966 - DNA, 25 bp, Homo sapien
caaagcataaaagaagaactctgcc

SEQ ID NO: 3457967 - DNA, 25 bp, Homo sapien
ccagatatgggattcccttttgctc

SEQ ID NO: 3457968 - DNA, 25 bp, Homo sapien
cttttgctctttgctggttgaacca

SEQ ID NO: 3457969 - DNA, 25 bp, Homo sapien
gttattacaaaaatcttccaccgca

SEQ ID NO: 3457970 - DNA, 25 bp, Homo sapien
tgtgccgctgcttaaaacgagttag

SEQ ID NO: 3457971 - DNA, 25 bp, Homo sapien
agtctcatctccatttaatctttca

SEQ ID NO: 3457972 - DNA, 25 bp, Homo sapien
aggctgtaaattctctcgttcaata

SEQ ID NO: 3457973 - DNA, 25 bp, Homo sapien
caattgatttgtgcccagggacagt

SEQ ID NO: 3457974 - DNA, 25 bp, Homo sapien
gcccagggacagtgcatttaccttt

SEQ ID NO: 3457975 - DNA, 25 bp, Homo sapien
tctttcttcaattgatttgtgccca

SEQ ID NO: 3457976 - DNA, 25 bp, Homo sapien
cagggacagtgcatttacctttgat

SEQ ID NO: 3457977 - DNA, 25 bp, Homo sapien
tagcaaatatttggccatcatctga

SEQ ID NO: 3457978 - DNA, 25 bp, Homo sapien
ctatgactccctgatctgaaggctg

SEQ ID NO: 3457979 - DNA, 25 bp, Homo sapien
taaatactctcgaacttgcggcaca

SEQ ID NO: 3457980 - DNA, 25 bp, Homo sapien
gctgaatcaatgaggccacattagg

SEQ ID NO: 3457981 - DNA, 25 bp, Homo sapien
ccatgccattgctatttcataaagt

SEQ ID NO: 3457982 - DNA, 25 bp, Homo sapien
caggtcattaccttcttccaagttg

SEQ ID NO: 3457983 - DNA, 25 bp, Homo sapien
tgcatccaacagagttagcttcttc

SEQ ID NO: 3457984 - DNA, 25 bp, Homo sapien
cagaatgatttcaggtcattacctt

SEQ ID NO: 3457985 - DNA, 25 bp, Homo sapien
ttcactggattcatctgcctggcct

SEQ ID NO: 3457986 - DNA, 25 bp, Homo sapien
tatcagttaacacttcatagcctgg

SEQ ID NO: 3457987 - DNA, 25 bp, Homo sapien
catagcctggttcagtactgtctac

SEQ ID NO: 3457988 - DNA, 25 bp, Homo sapien
tcttcaacatcaaagtccaggctct

SEQ ID NO: 3457989 - DNA, 25 bp, Homo sapien
cagtctatcaggtagaatcatatca

SEQ ID NO: 3457990 - DNA, 25 bp, Homo sapien
ggtagaatcatatcaccttgttgtt

SEQ ID NO: 3457991 - DNA, 25 bp, Homo sapien
catatcaccttgttgttctagataa

SEQ ID NO: 3457992 - DNA, 25 bp, Homo sapien
tatcaggtagaatcatatcaccttg

SEQ ID NO: 3457993 - DNA, 25 bp, Homo sapien
ttctgatggtggctcgaagtttacg

SEQ ID NO: 3457994 - DNA, 25 bp, Homo sapien
ctgatggtggctcgaagtttacgta

SEQ ID NO: 3457995 - DNA, 25 bp, Homo sapien
tggtggctcgaagtttacgtattac

SEQ ID NO: 3457996 - DNA, 25 bp, Homo sapien
gatggtggctcgaagtttacgtatt

SEQ ID NO: 3457997 - DNA, 25 bp, Homo sapien
taaggtgggagctcatatcatcaca

SEQ ID NO: 3457998 - DNA, 25 bp, Homo sapien
gaaaagataactatggcagccttca

SEQ ID NO: 3457999 - DNA, 25 bp, Homo sapien
taagggaatgccactgttacagaag

SEQ ID NO: 3458000 - DNA, 25 bp, Homo sapien
gtatttcacaggaccaagtctgaga

SEQ ID NO: 3458001 - DNA, 25 bp, Homo sapien
taatattcatatgtgcaaagtagtt

SEQ ID NO: 3458002 - DNA, 25 bp, Homo sapien
gtttcaatgtcttgaataaacatac

SEQ ID NO: 3458003 - DNA, 25 bp, Homo sapien
tacattttagcagattaatcccttt

SEQ ID NO: 3458004 - DNA, 25 bp, Homo sapien
tgaaatagcatggaaacactttact

SEQ ID NO: 3458005 - DNA, 25 bp, Homo sapien
gaaaaatatagacatacacctatca

SEQ ID NO: 3458006 - DNA, 25 bp, Homo sapien
aaaaatatagacatacacctatcat

SEQ ID NO: 3458007 - DNA, 25 bp, Homo sapien
aaatatagacatacacctatcatga

SEQ ID NO: 3458008 - DNA, 25 bp, Homo sapien
aaaatatagacatacacctatcatg

SEQ ID NO: 3458009 - DNA, 25 bp, Homo sapien
tatgatgccctccattcctttaatc

SEQ ID NO: 3458010 - DNA, 25 bp, Homo sapien
gatgccctccattcctttaatcctt

SEQ ID NO: 3458011 - DNA, 25 bp, Homo sapien
cttcatgtttatgatgccctccatt

SEQ ID NO: 3458012 - DNA, 25 bp, Homo sapien
catgtttatgatgccctccattcct

SEQ ID NO: 3458013 - DNA, 25 bp, Homo sapien
aaaatgcaattttccccattaagat

SEQ ID NO: 3458014 - DNA, 25 bp, Homo sapien
aaaaggagatttgggaggagccaag

SEQ ID NO: 3458015 - DNA, 25 bp, Homo sapien
aatgcaattttccccattaagataa

SEQ ID NO: 3458016 - DNA, 25 bp, Homo sapien
gcaattttccccattaagataagaa

SEQ ID NO: 3458017 - DNA, 25 bp, Homo sapien
ggattgcaatcctccttctatccat

SEQ ID NO: 3458018 - DNA, 25 bp, Homo sapien
gtctggattgcaatcctccttctat

SEQ ID NO: 3458019 - DNA, 25 bp, Homo sapien
ttcatctttcttaagtctggattgc

SEQ ID NO: 3458020 - DNA, 25 bp, Homo sapien
ccttctatccatggaactctgctca

SEQ ID NO: 3458021 - DNA, 25 bp, Homo sapien
tgctgccattcctgctgctggaaag

SEQ ID NO: 3458022 - DNA, 25 bp, Homo sapien
gctgccattcctgctgctggaaagg

SEQ ID NO: 3458023 - DNA, 25 bp, Homo sapien
ataatttctgagtggtgggatgctg

SEQ ID NO: 3458024 - DNA, 25 bp, Homo sapien
ctgataatttctgagtggtgggatg

SEQ ID NO: 3458025 - DNA, 25 bp, Homo sapien
aatacaacctgcaggagagcaactt

SEQ ID NO: 3458026 - DNA, 25 bp, Homo sapien
gaccactactagggcaaagagatct

SEQ ID NO: 3458027 - DNA, 25 bp, Homo sapien
accactactagggcaaagagatctt

SEQ ID NO: 3458028 - DNA, 25 bp, Homo sapien
cactactagggcaaagagatctttg

SEQ ID NO: 3458029 - DNA, 25 bp, Homo sapien
ccactactagggcaaagagatcttt

SEQ ID NO: 3458030 - DNA, 25 bp, Homo sapien
tcttttccttctggaactgccagca

SEQ ID NO: 3458031 - DNA, 25 bp, Homo sapien
caatcctcagtcctagtctcttttc

SEQ ID NO: 3458032 - DNA, 25 bp, Homo sapien
gtctcttttccttctggaactgcca

SEQ ID NO: 3458033 - DNA, 25 bp, Homo sapien
cttttccttctggaactgccagcat

SEQ ID NO: 3458034 - DNA, 25 bp, Homo sapien
ggtgagggctctcatcttagtttgg

SEQ ID NO: 3458035 - DNA, 25 bp, Homo sapien
cttgttttcatacagggtcacactc

SEQ ID NO: 3458036 - DNA, 25 bp, Homo sapien
gtgagggctctcatcttagtttggt

SEQ ID NO: 3458037 - DNA, 25 bp, Homo sapien
tctcttgttttcatacagggtcaca

SEQ ID NO: 3458038 - DNA, 25 bp, Homo sapien
gctcagttttgtctggctcatcaac

SEQ ID NO: 3458039 - DNA, 25 bp, Homo sapien
tgaccatatgcccagtccattgctg

SEQ ID NO: 3458040 - DNA, 25 bp, Homo sapien
gatctcccttcgtgctgaccatatg

SEQ ID NO: 3458041 - DNA, 25 bp, Homo sapien
tgtaagatctagtggaaataagcac

SEQ ID NO: 3458042 - DNA, 25 bp, Homo sapien
gctcatgcttatcactagaaattcc

SEQ ID NO: 3458043 - DNA, 25 bp, Homo sapien
catgcttatcactagaaattccagg

SEQ ID NO: 3458044 - DNA, 25 bp, Homo sapien
tgcttatcactagaaattccaggct

SEQ ID NO: 3458045 - DNA, 25 bp, Homo sapien
ttctgctcatgcttatcactagaaa

SEQ ID NO: 3458046 - DNA, 25 bp, Homo sapien
aatcaaagcttttgacttgtaaaca

SEQ ID NO: 3458047 - DNA, 25 bp, Homo sapien
ttccgtttgaatgggagccctgctg

SEQ ID NO: 3458048 - DNA, 25 bp, Homo sapien
gataacagggtaatgagtgccctct

SEQ ID NO: 3458049 - DNA, 25 bp, Homo sapien
aatgttagtaaatgcagagattccg

SEQ ID NO: 3458050 - DNA, 25 bp, Homo sapien
tacttaatgggtctgagcggcagag

SEQ ID NO: 3458051 - DNA, 25 bp, Homo sapien
ccaactaacttagggccagacagag

SEQ ID NO: 3458052 - DNA, 25 bp, Homo sapien
caggtatattgcagacacctgcgga

SEQ ID NO: 3458053 - DNA, 25 bp, Homo sapien
catatagctggctgcccggcaggat

SEQ ID NO: 3458054 - DNA, 25 bp, Homo sapien
atgctgtccattgtttacctaggcc

SEQ ID NO: 3458055 - DNA, 25 bp, Homo sapien
gatgctgtccattgtttacctaggc

SEQ ID NO: 3458056 - DNA, 25 bp, Homo sapien
tccaggatgctgtccattgtttacc

SEQ ID NO: 3458057 - DNA, 25 bp, Homo sapien
tcatcatccaggatgctgtccattg

SEQ ID NO: 3458058 - DNA, 25 bp, Homo sapien
atctactttacaggtatgcttgcca

SEQ ID NO: 3458059 - DNA, 25 bp, Homo sapien
ctcatcagcagccttaccatctact

SEQ ID NO: 3458060 - DNA, 25 bp, Homo sapien
tatgcttgccaagattgaagaccaa

SEQ ID NO: 3458061 - DNA, 25 bp, Homo sapien
cttaccatctactttacaggtatgc

SEQ ID NO: 3458062 - DNA, 25 bp, Homo sapien
ggtcctctggtgcaattttctcatt

SEQ ID NO: 3458063 - DNA, 25 bp, Homo sapien
aaaagtcccaatgtgggtcctctgg

SEQ ID NO: 3458064 - DNA, 25 bp, Homo sapien
ttggtttcagttgcattaatgtgtt

SEQ ID NO: 3458065 - DNA, 25 bp, Homo sapien
ggttcactaaatatcctcaagttcc

SEQ ID NO: 3458066 - DNA, 25 bp, Homo sapien
agagttacctgaagctcggcatcca

SEQ ID NO: 3458067 - DNA, 25 bp, Homo sapien
agttacctgaagctcggcatccatg

SEQ ID NO: 3458068 - DNA, 25 bp, Homo sapien
tagggggcttccaaggtgatcgggc

SEQ ID NO: 3458069 - DNA, 25 bp, Homo sapien
tacctgaagctcggcatccatgatg

SEQ ID NO: 3458070 - DNA, 25 bp, Homo sapien
aaatctattttctacgtctatgatg

SEQ ID NO: 3458071 - DNA, 25 bp, Homo sapien
cgtctatgatgatattgatgtgcac

SEQ ID NO: 3458072 - DNA, 25 bp, Homo sapien
tgatgatattgatgtgcacagtcat

SEQ ID NO: 3458073 - DNA, 25 bp, Homo sapien
ttctacgtctatgatgatattgatg

SEQ ID NO: 3458074 - DNA, 25 bp, Homo sapien
gtaatacagttaaacgtacagccat

SEQ ID NO: 3458075 - DNA, 25 bp, Homo sapien
ttgtaatacagttaaacgtacagcc

SEQ ID NO: 3458076 - DNA, 25 bp, Homo sapien
tgtaatacagttaaacgtacagcca

SEQ ID NO: 3458077 - DNA, 25 bp, Homo sapien
cttgtaatacagttaaacgtacagc

SEQ ID NO: 3458078 - DNA, 25 bp, Homo sapien
gccaatcggctcctctgttccaaat

SEQ ID NO: 3458079 - DNA, 25 bp, Homo sapien
caaaacgttgctgtgttgaggcaga

SEQ ID NO: 3458080 - DNA, 25 bp, Homo sapien
tgtgttgaggcagagccaatcggct

SEQ ID NO: 3458081 - DNA, 25 bp, Homo sapien
cttccacaaaacgttgctgtgttga

SEQ ID NO: 3458082 - DNA, 25 bp, Homo sapien
cacattgttgaagagtttgatgtct

SEQ ID NO: 3458083 - DNA, 25 bp, Homo sapien
tgaagagtttgatgtctatgaacat

SEQ ID NO: 3458084 - DNA, 25 bp, Homo sapien
tctttcacattgttgaagagtttga

SEQ ID NO: 3458085 - DNA, 25 bp, Homo sapien
agtttctttcacattgttgaagagt

SEQ ID NO: 3458086 - DNA, 25 bp, Homo sapien
cactgacttttatagctcgaataca

SEQ ID NO: 3458087 - DNA, 25 bp, Homo sapien
ggcttcaagctgattgttcggttac

SEQ ID NO: 3458088 - DNA, 25 bp, Homo sapien
gttcggttacaaaatgatagtcttc

SEQ ID NO: 3458089 - DNA, 25 bp, Homo sapien
tgtcatgatgacttctgcggcccaa

SEQ ID NO: 3458090 - DNA, 25 bp, Homo sapien
cattctcttgtacgaactatttcag

SEQ ID NO: 3458091 - DNA, 25 bp, Homo sapien
tcaatgtagtcttgattgaagaact

SEQ ID NO: 3458092 - DNA, 25 bp, Homo sapien
tttcagcaccaacagtgttttctgc

SEQ ID NO: 3458093 - DNA, 25 bp, Homo sapien
tgcatcaccatccttgttcaatgta

SEQ ID NO: 3458094 - DNA, 25 bp, Homo sapien
acgtctattggtgtcttgtgatctc

SEQ ID NO: 3458095 - DNA, 25 bp, Homo sapien
tggacctggcctagaagtaagagga

SEQ ID NO: 3458096 - DNA, 25 bp, Homo sapien
caaagatgtactggaacgtctattg

SEQ ID NO: 3458097 - DNA, 25 bp, Homo sapien
tcatgttgctaaccatggacctggc

SEQ ID NO: 3458098 - DNA, 25 bp, Homo sapien
tctgtatctcatttcttgatccaga

SEQ ID NO: 3458099 - DNA, 25 bp, Homo sapien
taaacaacagtaaacgcacaggaag

SEQ ID NO: 3458100 - DNA, 25 bp, Homo sapien
ggccctaagatcctcactacatctg

SEQ ID NO: 3458101 - DNA, 25 bp, Homo sapien
tgatccagagctgcaatgccatagg

SEQ ID NO: 3458102 - DNA, 25 bp, Homo sapien
gtttccagccacatggagaaccaca

SEQ ID NO: 3458103 - DNA, 25 bp, Homo sapien
gattctatataccagctccagccag

SEQ ID NO: 3458104 - DNA, 25 bp, Homo sapien
caaccacccatctggctgattctat

SEQ ID NO: 3458105 - DNA, 25 bp, Homo sapien
accaactctggcctgtagtctctgg

SEQ ID NO: 3458106 - DNA, 25 bp, Homo sapien
acagatacagtattccatctgccag

SEQ ID NO: 3458107 - DNA, 25 bp, Homo sapien
tcacagatacagtattccatctgcc

SEQ ID NO: 3458108 - DNA, 25 bp, Homo sapien
tcagtcacagatacagtattccatc

SEQ ID NO: 3458109 - DNA, 25 bp, Homo sapien
agtcacagatacagtattccatctg

SEQ ID NO: 3458110 - DNA, 25 bp, Homo sapien
gatgcccagccatcaaggaagagca

SEQ ID NO: 3458111 - DNA, 25 bp, Homo sapien
taacaagcaacctgggaaatctgtg

SEQ ID NO: 3458112 - DNA, 25 bp, Homo sapien
catactggaggcaataattacaggc

SEQ ID NO: 3458113 - DNA, 25 bp, Homo sapien
tgcagaacgcttcagaaataacagg

SEQ ID NO: 3458114 - DNA, 25 bp, Homo sapien
gcttgggacaaaactcgctgggcag

SEQ ID NO: 3458115 - DNA, 25 bp, Homo sapien
agaagattgtgaggcgcaggttcct

SEQ ID NO: 3458116 - DNA, 25 bp, Homo sapien
taacaggccaacgatttgtgtgcag

SEQ ID NO: 3458117 - DNA, 25 bp, Homo sapien
ggagctgggcatgcatccctttaca

SEQ ID NO: 3458118 - DNA, 25 bp, Homo sapien
gtgaacgtgagccaaaagttgctga

SEQ ID NO: 3458119 - DNA, 25 bp, Homo sapien
taaaatgggtcacagccaaaaatat

SEQ ID NO: 3458120 - DNA, 25 bp, Homo sapien
gaacacatacaccatgtgaacgtga

SEQ ID NO: 3458121 - DNA, 25 bp, Homo sapien
tcatagtcagcgcaaaagaacacat

SEQ ID NO: 3458122 - DNA, 25 bp, Homo sapien
gttaaatcctaatctgccactttcg

SEQ ID NO: 3458123 - DNA, 25 bp, Homo sapien
tcttctcttgctaccacagagttta

SEQ ID NO: 3458124 - DNA, 25 bp, Homo sapien
tgccactttcgatagggaccctacc

SEQ ID NO: 3458125 - DNA, 25 bp, Homo sapien
ccactgatgtcaatggtggctgcag

SEQ ID NO: 3458126 - DNA, 25 bp, Homo sapien
ctactcacactcagccacccacttt

SEQ ID NO: 3458127 - DNA, 25 bp, Homo sapien
cacactcagccacccactttgatgg

SEQ ID NO: 3458128 - DNA, 25 bp, Homo sapien
ctcacactcagccacccactttgat

SEQ ID NO: 3458129 - DNA, 25 bp, Homo sapien
tactcacactcagccacccactttg

SEQ ID NO: 3458130 - DNA, 25 bp, Homo sapien
gtcttcaattgacctatatcgaagt

SEQ ID NO: 3458131 - DNA, 25 bp, Homo sapien
cgtcttcaattgacctatatcgaag

SEQ ID NO: 3458132 - DNA, 25 bp, Homo sapien
tcttcaattgacctatatcgaagtt

SEQ ID NO: 3458133 - DNA, 25 bp, Homo sapien
tgcacttgctaacattggtaccttg

SEQ ID NO: 3458134 - DNA, 25 bp, Homo sapien
cctggtgcacttgctaacattggta

SEQ ID NO: 3458135 - DNA, 25 bp, Homo sapien
ccagtcctggtgcacttgctaacat

SEQ ID NO: 3458136 - DNA, 25 bp, Homo sapien
ttacactgtccctttttgaatcatc

SEQ ID NO: 3458137 - DNA, 25 bp, Homo sapien
caatagctgattgttccaaaaactg

SEQ ID NO: 3458138 - DNA, 25 bp, Homo sapien
aatagattaactcccctaacatggg

SEQ ID NO: 3458139 - DNA, 25 bp, Homo sapien
gactcaattagagtcccactgataa

SEQ ID NO: 3458140 - DNA, 25 bp, Homo sapien
tcatgatacttaaaaactgagttca

SEQ ID NO: 3458141 - DNA, 25 bp, Homo sapien
catgatatgtagttgttcgtagcac

SEQ ID NO: 3458142 - DNA, 25 bp, Homo sapien
cagtgagtaggactgagagttcaag

SEQ ID NO: 3458143 - DNA, 25 bp, Homo sapien
ttcgtagcacgtagtttcttatcag

SEQ ID NO: 3458144 - DNA, 25 bp, Homo sapien
cagggaaaaatggattgtaggtgac

SEQ ID NO: 3458145 - DNA, 25 bp, Homo sapien
tctcttccttccaatgaatcacttg

SEQ ID NO: 3458146 - DNA, 25 bp, Homo sapien
tcttccttccaatgaatcacttgac

SEQ ID NO: 3458147 - DNA, 25 bp, Homo sapien
gaatcacttgactgtctaatattca

SEQ ID NO: 3458148 - DNA, 25 bp, Homo sapien
ttccttccaatgaatcacttgactg

SEQ ID NO: 3458149 - DNA, 25 bp, Homo sapien
cacagtgccctggtatgactctcaa

SEQ ID NO: 3458150 - DNA, 25 bp, Homo sapien
cagctaggccaataagaaatcacag

SEQ ID NO: 3458151 - DNA, 25 bp, Homo sapien
cacaggtgggttattcttgactaca

SEQ ID NO: 3458152 - DNA, 25 bp, Homo sapien
tacttctgttgggacttataccacg

SEQ ID NO: 3458153 - DNA, 25 bp, Homo sapien
tcttttaagacggctcctgatcttc

SEQ ID NO: 3458154 - DNA, 25 bp, Homo sapien
tctcttttaagacggctcctgatct

SEQ ID NO: 3458155 - DNA, 25 bp, Homo sapien
tttctcttttaagacggctcctgat

SEQ ID NO: 3458156 - DNA, 25 bp, Homo sapien
ttttaagacggctcctgatcttcat

SEQ ID NO: 3458157 - DNA, 25 bp, Homo sapien
tgagtgagggcacgaaagctggttc

SEQ ID NO: 3458158 - DNA, 25 bp, Homo sapien
ctactgagtgagggcacgaaagctg

SEQ ID NO: 3458159 - DNA, 25 bp, Homo sapien
gttctcagccccactttttcaaata

SEQ ID NO: 3458160 - DNA, 25 bp, Homo sapien
gagggcacgaaagctggttctcagc

SEQ ID NO: 3458161 - DNA, 25 bp, Homo sapien
tgattagatcattaaatgccatcca

SEQ ID NO: 3458162 - DNA, 25 bp, Homo sapien
cttagaggaacgtgcacaattgatt

SEQ ID NO: 3458163 - DNA, 25 bp, Homo sapien
ggaacgtgcacaattgattagatca

SEQ ID NO: 3458164 - DNA, 25 bp, Homo sapien
tagatcattaaatgccatccaatcc

SEQ ID NO: 3458165 - DNA, 25 bp, Homo sapien
agccaaagtcaccatacacagtcct

SEQ ID NO: 3458166 - DNA, 25 bp, Homo sapien
tgttttaaggctgcagaatgttgtc

SEQ ID NO: 3458167 - DNA, 25 bp, Homo sapien
tgcagaatgttgtctctaccatcac

SEQ ID NO: 3458168 - DNA, 25 bp, Homo sapien
accatcacatcactacctttacttg

SEQ ID NO: 3458169 - DNA, 25 bp, Homo sapien
actgcactttaattccatgaaacca

SEQ ID NO: 3458170 - DNA, 25 bp, Homo sapien
ttgagcgctgattccttcatattcc

SEQ ID NO: 3458171 - DNA, 25 bp, Homo sapien
gccttgagcgctgattccttcatat

SEQ ID NO: 3458172 - DNA, 25 bp, Homo sapien
tggccttgagcgctgattccttcat

SEQ ID NO: 3458173 - DNA, 25 bp, Homo sapien
cagctggccttgagcgctgattcct

SEQ ID NO: 3458174 - DNA, 25 bp, Homo sapien
gccagactgaatcttccagcacaga

SEQ ID NO: 3458175 - DNA, 25 bp, Homo sapien
cagtctttgtcccttcattacagga

SEQ ID NO: 3458176 - DNA, 25 bp, Homo sapien
gctagtgaaagtaggtatggactca

SEQ ID NO: 3458177 - DNA, 25 bp, Homo sapien
ccagcacagatgttctcggaataag

SEQ ID NO: 3458178 - DNA, 25 bp, Homo sapien
tatgtccaaacacaccaagtccaag

SEQ ID NO: 3458179 - DNA, 25 bp, Homo sapien
ggttatgggtatcaagcatcttgcc

SEQ ID NO: 3458180 - DNA, 25 bp, Homo sapien
aaaattgtcagggtgcactctcagc

SEQ ID NO: 3458181 - DNA, 25 bp, Homo sapien
ggaacactgagctacacccaagtga

SEQ ID NO: 3458182 - DNA, 25 bp, Homo sapien
cggcctcgcttaccttgttttcctg

SEQ ID NO: 3458183 - DNA, 25 bp, Homo sapien
agattctcctcttcggcctcgctta

SEQ ID NO: 3458184 - DNA, 25 bp, Homo sapien
tcctcttcggcctcgcttaccttgt

SEQ ID NO: 3458185 - DNA, 25 bp, Homo sapien
ctcgcttaccttgttttcctggagg

SEQ ID NO: 3458186 - DNA, 25 bp, Homo sapien
aaaacattcttctgtacctgtagaa

SEQ ID NO: 3458187 - DNA, 25 bp, Homo sapien
tacctgtagaactcacaggcacaaa

SEQ ID NO: 3458188 - DNA, 25 bp, Homo sapien
ccccttctcctaaaacattcttctg

SEQ ID NO: 3458189 - DNA, 25 bp, Homo sapien
caggcacaaatcaacataaccacct

SEQ ID NO: 3458190 - DNA, 25 bp, Homo sapien
gaataaacatcagctcaataggaga

SEQ ID NO: 3458191 - DNA, 25 bp, Homo sapien
tgaactgggaatgagaataaacatc

SEQ ID NO: 3458192 - DNA, 25 bp, Homo sapien
gagcaatgattggatgaactgggaa

SEQ ID NO: 3458193 - DNA, 25 bp, Homo sapien
tggatagtaagctttgagcaatgat

SEQ ID NO: 3458194 - DNA, 25 bp, Homo sapien
ggtagagtggctatactggtaccac

SEQ ID NO: 3458195 - DNA, 25 bp, Homo sapien
ggacactagatagcaacccaaagct

SEQ ID NO: 3458196 - DNA, 25 bp, Homo sapien
catcatccagttgtataccgtagga

SEQ ID NO: 3458197 - DNA, 25 bp, Homo sapien
taccgtaggagactcaccttagatc

SEQ ID NO: 3458198 - DNA, 25 bp, Homo sapien
tctctttaaagctccatcaacagaa

SEQ ID NO: 3458199 - DNA, 25 bp, Homo sapien
caacagaatattcattgcttatgtc

SEQ ID NO: 3458200 - DNA, 25 bp, Homo sapien
cctttttacttattagcagtctgta

SEQ ID NO: 3458201 - DNA, 25 bp, Homo sapien
gcttatgtcatctaagatttctttg

SEQ ID NO: 3458202 - DNA, 25 bp, Homo sapien
tccccatgtcagtttgaacatttct

SEQ ID NO: 3458203 - DNA, 25 bp, Homo sapien
cctaatccccatgtcagtttgaaca

SEQ ID NO: 3458204 - DNA, 25 bp, Homo sapien
ctaatccccatgtcagtttgaacat

SEQ ID NO: 3458205 - DNA, 25 bp, Homo sapien
aatccccatgtcagtttgaacattt

SEQ ID NO: 3458206 - DNA, 25 bp, Homo sapien
gaaaagtactctagatccatatgag

SEQ ID NO: 3458207 - DNA, 25 bp, Homo sapien
cagtcaggttgctcataagaaaagt

SEQ ID NO: 3458208 - DNA, 25 bp, Homo sapien
gttgctcataagaaaagtactctag

SEQ ID NO: 3458209 - DNA, 25 bp, Homo sapien
tcataagaaaagtactctagatcca

SEQ ID NO: 3458210 - DNA, 25 bp, Homo sapien
gtgtgtgaataccagcagtgggtcc

SEQ ID NO: 3458211 - DNA, 25 bp, Homo sapien
tatctcgatatctcaattcccttat

SEQ ID NO: 3458212 - DNA, 25 bp, Homo sapien
ttgttcttaggtttgcagcacaggt

SEQ ID NO: 3458213 - DNA, 25 bp, Homo sapien
gcagcacaggtgtcatgagaaagaa

SEQ ID NO: 3458214 - DNA, 25 bp, Homo sapien
gaggttgtcgcttgctatctcgata

SEQ ID NO: 3458215 - DNA, 25 bp, Homo sapien
cacaaagggaacttgtctgaagggc

SEQ ID NO: 3458216 - DNA, 25 bp, Homo sapien
atctgtgtacaagcccgataaacct

SEQ ID NO: 3458217 - DNA, 25 bp, Homo sapien
tgaagggcttcttttccagactgcc

SEQ ID NO: 3458218 - DNA, 25 bp, Homo sapien
gaagacctgattgtagcagccatcc

SEQ ID NO: 3458219 - DNA, 25 bp, Homo sapien
tgcacatccatacaaaccgtcagat

SEQ ID NO: 3458220 - DNA, 25 bp, Homo sapien
tccatacaaaccgtcagatatgcct

SEQ ID NO: 3458221 - DNA, 25 bp, Homo sapien
caaaccgtcagatatgcctactttt

SEQ ID NO: 3458222 - DNA, 25 bp, Homo sapien
atgcacatccatacaaaccgtcaga

SEQ ID NO: 3458223 - DNA, 25 bp, Homo sapien
tccaactgtgcttcacggaatagtc

SEQ ID NO: 3458224 - DNA, 25 bp, Homo sapien
ttaggtatactctctgtggatctcc

SEQ ID NO: 3458225 - DNA, 25 bp, Homo sapien
gcagcagattgttccagctcactgg

SEQ ID NO: 3458226 - DNA, 25 bp, Homo sapien
gtttgctaaaacatcagctgcagca

SEQ ID NO: 3458227 - DNA, 25 bp, Homo sapien
tttgacttttgtggctgctaccaat

SEQ ID NO: 3458228 - DNA, 25 bp, Homo sapien
ttctctccatctttcattattgatt

SEQ ID NO: 3458229 - DNA, 25 bp, Homo sapien
ttctttgacttttgtggctgctacc

SEQ ID NO: 3458230 - DNA, 25 bp, Homo sapien
tctctccatctttcattattgattc

SEQ ID NO: 3458231 - DNA, 25 bp, Homo sapien
attgggcacattcaatgtgttttgg

SEQ ID NO: 3458232 - DNA, 25 bp, Homo sapien
ctgcagcacccagtcttcacaagtg

SEQ ID NO: 3458233 - DNA, 25 bp, Homo sapien
tgcagcacccagtcttcacaagtgg

SEQ ID NO: 3458234 - DNA, 25 bp, Homo sapien
gcagcacccagtcttcacaagtggt

SEQ ID NO: 3458235 - DNA, 25 bp, Homo sapien
gcagaatgtgtgcttaatttgtgtg

SEQ ID NO: 3458236 - DNA, 25 bp, Homo sapien
acataacttgttctttgctcggtga

SEQ ID NO: 3458237 - DNA, 25 bp, Homo sapien
taatttgtgtgacataacttgttct

SEQ ID NO: 3458238 - DNA, 25 bp, Homo sapien
gaatgtgtgcttaatttgtgtgaca

SEQ ID NO: 3458239 - DNA, 25 bp, Homo sapien
tgccgtacattaattggattgaact

SEQ ID NO: 3458240 - DNA, 25 bp, Homo sapien
ttgtctggaaaatgccgtacattaa

SEQ ID NO: 3458241 - DNA, 25 bp, Homo sapien
ggattgaacttatcagaatttctac

SEQ ID NO: 3458242 - DNA, 25 bp, Homo sapien
cattaattggattgaacttatcaga

SEQ ID NO: 3458243 - DNA, 25 bp, Homo sapien
gcttcactatttcagggagatcatg

SEQ ID NO: 3458244 - DNA, 25 bp, Homo sapien
ggccacttcaacaggacatatcatg

SEQ ID NO: 3458245 - DNA, 25 bp, Homo sapien
ttgctcctgatgaactagcgctcca

SEQ ID NO: 3458246 - DNA, 25 bp, Homo sapien
ttgatggtttccttccttagcggcc

SEQ ID NO: 3458247 - DNA, 25 bp, Homo sapien
gctttgtacggttcccaaatatgac

SEQ ID NO: 3458248 - DNA, 25 bp, Homo sapien
ccgcacattgctttgtacggttccc

SEQ ID NO: 3458249 - DNA, 25 bp, Homo sapien
gcacattgctttgtacggttcccaa

SEQ ID NO: 3458250 - DNA, 25 bp, Homo sapien
tacggttcccaaatatgaccacatc

SEQ ID NO: 3458251 - DNA, 25 bp, Homo sapien
ggtgcatgctcaacatgtgaaacaa

SEQ ID NO: 3458252 - DNA, 25 bp, Homo sapien
agagtcctcatctgtctgggccaga

SEQ ID NO: 3458253 - DNA, 25 bp, Homo sapien
ccagaggtgcatgctcaacatgtga

SEQ ID NO: 3458254 - DNA, 25 bp, Homo sapien
tctgggccagaggtgcatgctcaac

SEQ ID NO: 3458255 - DNA, 25 bp, Homo sapien
tgatcagctcctaccctcttcatat

SEQ ID NO: 3458256 - DNA, 25 bp, Homo sapien
cagccttcaagaacctgatcagctc

SEQ ID NO: 3458257 - DNA, 25 bp, Homo sapien
cctcttcatatcctcaccctctgac

SEQ ID NO: 3458258 - DNA, 25 bp, Homo sapien
tcagccttcaagaacctgatcagct

SEQ ID NO: 3458259 - DNA, 25 bp, Homo sapien
gcttgaactgaatctgtggtctgaa

SEQ ID NO: 3458260 - DNA, 25 bp, Homo sapien
tcttagtaagtgtagtctctgacag

SEQ ID NO: 3458261 - DNA, 25 bp, Homo sapien
cggtaaataagttgtagcatggcat

SEQ ID NO: 3458262 - DNA, 25 bp, Homo sapien
tctgacagtgaagaataggaactcg

SEQ ID NO: 3458263 - DNA, 25 bp, Homo sapien
tgccctggcagctgacaatgttggt

SEQ ID NO: 3458264 - DNA, 25 bp, Homo sapien
ggcacagcaccgaggcagtcagaat

SEQ ID NO: 3458265 - DNA, 25 bp, Homo sapien
agcaccgaggcagtcagaatgccct

SEQ ID NO: 3458266 - DNA, 25 bp, Homo sapien
tctgaaaacggattttggctttcca

SEQ ID NO: 3458267 - DNA, 25 bp, Homo sapien
gatacacctgtggaggtcaggccaa

SEQ ID NO: 3458268 - DNA, 25 bp, Homo sapien
aagggaaagtgatacacctgtggag

SEQ ID NO: 3458269 - DNA, 25 bp, Homo sapien
ggaaagtgatacacctgtggaggtc

SEQ ID NO: 3458270 - DNA, 25 bp, Homo sapien
ctgtggaggtcaggccaaatgcctt

SEQ ID NO: 3458271 - DNA, 25 bp, Homo sapien
ctgccatttctctttaactgagaat

SEQ ID NO: 3458272 - DNA, 25 bp, Homo sapien
gccatttctctttaactgagaattt

SEQ ID NO: 3458273 - DNA, 25 bp, Homo sapien
tgccatttctctttaactgagaatt

SEQ ID NO: 3458274 - DNA, 25 bp, Homo sapien
catttctctttaactgagaatttcc

SEQ ID NO: 3458275 - DNA, 25 bp, Homo sapien
cactcatttttacaggacagagaaa

SEQ ID NO: 3458276 - DNA, 25 bp, Homo sapien
aggctcagagaatcaataggttcct

SEQ ID NO: 3458277 - DNA, 25 bp, Homo sapien
atgtttattaacaagagagctattg

SEQ ID NO: 3458278 - DNA, 25 bp, Homo sapien
aatgtttattaacaagagagctatt

SEQ ID NO: 3458279 - DNA, 25 bp, Homo sapien
tgaaggtttaccaccgttactgtca

SEQ ID NO: 3458280 - DNA, 25 bp, Homo sapien
ctgtcatcctccattttattcagta

SEQ ID NO: 3458281 - DNA, 25 bp, Homo sapien
caccgttactgtcatcctccatttt

SEQ ID NO: 3458282 - DNA, 25 bp, Homo sapien
gtttaccaccgttactgtcatcctc

SEQ ID NO: 3458283 - DNA, 25 bp, Homo sapien
gaagacggaagaagtggataaccag

SEQ ID NO: 3458284 - DNA, 25 bp, Homo sapien
ggaagacggaagaagtggataacca

SEQ ID NO: 3458285 - DNA, 25 bp, Homo sapien
tcagactaaaaagcgcaaaggggga

SEQ ID NO: 3458286 - DNA, 25 bp, Homo sapien
agacggaagaagtggataaccagga

SEQ ID NO: 3458287 - DNA, 25 bp, Homo sapien
cattttgtaacatgatcaaatccat

SEQ ID NO: 3458288 - DNA, 25 bp, Homo sapien
ttttgtaacatgatcaaatccattt

SEQ ID NO: 3458289 - DNA, 25 bp, Homo sapien
ccattttgtaacatgatcaaatcca

SEQ ID NO: 3458290 - DNA, 25 bp, Homo sapien
attttgtaacatgatcaaatccatt

SEQ ID NO: 3458291 - DNA, 25 bp, Homo sapien
caagatggttccatgtagaagattc

SEQ ID NO: 3458292 - DNA, 25 bp, Homo sapien
ctaaggtggaggcaagatggttcca

SEQ ID NO: 3458293 - DNA, 25 bp, Homo sapien
aagaagtttcacttgagatggtaca

SEQ ID NO: 3458294 - DNA, 25 bp, Homo sapien
cttgagatggtacatttgggtaatg

SEQ ID NO: 3458295 - DNA, 25 bp, Homo sapien
aaggatgaaccataatctctcaagg

SEQ ID NO: 3458296 - DNA, 25 bp, Homo sapien
tgtcagaaaggatgaaccataatct

SEQ ID NO: 3458297 - DNA, 25 bp, Homo sapien
gatgaaccataatctctcaagggca

SEQ ID NO: 3458298 - DNA, 25 bp, Homo sapien
cagaaaggatgaaccataatctctc

SEQ ID NO: 3458299 - DNA, 25 bp, Homo sapien
gaatatacccctctgaccttcgtag

SEQ ID NO: 3458300 - DNA, 25 bp, Homo sapien
caatctgcagattagggagacacaa

SEQ ID NO: 3458301 - DNA, 25 bp, Homo sapien
agtgaaagtgtgctctctaaggaac

SEQ ID NO: 3458302 - DNA, 25 bp, Homo sapien
ggagacacaacctctagtagaagtg

SEQ ID NO: 3458303 - DNA, 25 bp, Homo sapien
tctgattagcaaactggtgagtcat

SEQ ID NO: 3458304 - DNA, 25 bp, Homo sapien
ggctaatctgattagcaaactggtg

SEQ ID NO: 3458305 - DNA, 25 bp, Homo sapien
taaataaaatcactgggctaatctg

SEQ ID NO: 3458306 - DNA, 25 bp, Homo sapien
aaatcactgggctaatctgattagc

SEQ ID NO: 3458307 - DNA, 25 bp, Homo sapien
caattgatgatctggacggatgcag

SEQ ID NO: 3458308 - DNA, 25 bp, Homo sapien
aagactcatgagacattgacaaggc

SEQ ID NO: 3458309 - DNA, 25 bp, Homo sapien
cacctaaaactgaagaatacgcatt

SEQ ID NO: 3458310 - DNA, 25 bp, Homo sapien
tgagaggccgaagacgatagatcac

SEQ ID NO: 3458311 - DNA, 25 bp, Homo sapien
taccaagaagccaacggtctgttca

SEQ ID NO: 3458312 - DNA, 25 bp, Homo sapien
caagcatcagtatatcttggtacca

SEQ ID NO: 3458313 - DNA, 25 bp, Homo sapien
cttggtctttaggtcatcaagtgcc

SEQ ID NO: 3458314 - DNA, 25 bp, Homo sapien
tgccataacaagcatcagtatatct

SEQ ID NO: 3458315 - DNA, 25 bp, Homo sapien
ttttgggttttgcacattttgccat

SEQ ID NO: 3458316 - DNA, 25 bp, Homo sapien
agccttttgggttttgcacattttg

SEQ ID NO: 3458317 - DNA, 25 bp, Homo sapien
ttggtagccttttgggttttgcaca

SEQ ID NO: 3458318 - DNA, 25 bp, Homo sapien
tggtagccttttgggttttgcacat

SEQ ID NO: 3458319 - DNA, 25 bp, Homo sapien
ttaatttacgaagaccatcagatgc

SEQ ID NO: 3458320 - DNA, 25 bp, Homo sapien
ttacgaagaccatcagatgccttca

SEQ ID NO: 3458321 - DNA, 25 bp, Homo sapien
aatttacgaagaccatcagatgcct

SEQ ID NO: 3458322 - DNA, 25 bp, Homo sapien
aattaatttacgaagaccatcagat

SEQ ID NO: 3458323 - DNA, 25 bp, Homo sapien
ctacgtttccgttgtgtcctgtacg

SEQ ID NO: 3458324 - DNA, 25 bp, Homo sapien
aagtctaatgttctccagggctgaa

SEQ ID NO: 3458325 - DNA, 25 bp, Homo sapien
tcctgtacgttctttacccgatcaa

SEQ ID NO: 3458326 - DNA, 25 bp, Homo sapien
tacccgatcaagtctaatgttctcc

SEQ ID NO: 3458327 - DNA, 25 bp, Homo sapien
ggttgatggatcacacgcacaattt

SEQ ID NO: 3458328 - DNA, 25 bp, Homo sapien
atggatcacacgcacaatttcgaag

SEQ ID NO: 3458329 - DNA, 25 bp, Homo sapien
cgcacaatttcgaagagtttttaag

SEQ ID NO: 3458330 - DNA, 25 bp, Homo sapien
cacacgcacaatttcgaagagtttt

SEQ ID NO: 3458331 - DNA, 25 bp, Homo sapien
gacttcgaaattgaagcagatattt

SEQ ID NO: 3458332 - DNA, 25 bp, Homo sapien
tgaagcagatatttggcagtatcca

SEQ ID NO: 3458333 - DNA, 25 bp, Homo sapien
tacatgtatttttcgaattttatca

SEQ ID NO: 3458334 - DNA, 25 bp, Homo sapien
tttatttagacttcgaaattgaagc

SEQ ID NO: 3458335 - DNA, 25 bp, Homo sapien
tcaaacttaaacttctctcgataaa

SEQ ID NO: 3458336 - DNA, 25 bp, Homo sapien
caaacttaaacttctctcgataaat

SEQ ID NO: 3458337 - DNA, 25 bp, Homo sapien
tttcaaacttaaacttctctcgata

SEQ ID NO: 3458338 - DNA, 25 bp, Homo sapien
ttcaaacttaaacttctctcgataa

SEQ ID NO: 3458339 - DNA, 25 bp, Homo sapien
taccaagagcagatttggctgcaaa

SEQ ID NO: 3458340 - DNA, 25 bp, Homo sapien
gtgcagattcaatttggcatgaggg

SEQ ID NO: 3458341 - DNA, 25 bp, Homo sapien
attgtgaagaactacagttttacca

SEQ ID NO: 3458342 - DNA, 25 bp, Homo sapien
catgagggttgcaggcaaaagccca

SEQ ID NO: 3458343 - DNA, 25 bp, Homo sapien
ttcttatcatccttggaaagcaggt

SEQ ID NO: 3458344 - DNA, 25 bp, Homo sapien
tcttatcatccttggaaagcaggta

SEQ ID NO: 3458345 - DNA, 25 bp, Homo sapien
taagtctttcttatcatccttggaa

SEQ ID NO: 3458346 - DNA, 25 bp, Homo sapien
catttaagtctttcttatcatcctt

SEQ ID NO: 3458347 - DNA, 25 bp, Homo sapien
ggatcctcgtctcttaagtcagccc

SEQ ID NO: 3458348 - DNA, 25 bp, Homo sapien
tggatgtcagcgtctgtggatcctc

SEQ ID NO: 3458349 - DNA, 25 bp, Homo sapien
aagtcagccccctgcatctgcaggt

SEQ ID NO: 3458350 - DNA, 25 bp, Homo sapien
gcgtctgtggatcctcgtctcttaa

SEQ ID NO: 3458351 - DNA, 25 bp, Homo sapien
tcaccaggaatttgaaccaataccc

SEQ ID NO: 3458352 - DNA, 25 bp, Homo sapien
caccaggaatttgaaccaataccca

SEQ ID NO: 3458353 - DNA, 25 bp, Homo sapien
ggctttggcttctgtaacctctcat

SEQ ID NO: 3458354 - DNA, 25 bp, Homo sapien
gtaacctctcattgattcttaccat

SEQ ID NO: 3458355 - DNA, 25 bp, Homo sapien
attataattgatatcttgggctcta

SEQ ID NO: 3458356 - DNA, 25 bp, Homo sapien
cttgggctctaaacgaattatttct

SEQ ID NO: 3458357 - DNA, 25 bp, Homo sapien
agtaggtactcaccaaagatgtgct

SEQ ID NO: 3458358 - DNA, 25 bp, Homo sapien
cagtaggtactcaccaaagatgtgc

SEQ ID NO: 3458359 - DNA, 25 bp, Homo sapien
acagtaggtactcaccaaagatgtg

SEQ ID NO: 3458360 - DNA, 25 bp, Homo sapien
ccatctatgacaaacacagagacaa

SEQ ID NO: 3458361 - DNA, 25 bp, Homo sapien
aaaccaggagcaaggattgaccggg

SEQ ID NO: 3458362 - DNA, 25 bp, Homo sapien
tgaacccaactgactacacagaact

SEQ ID NO: 3458363 - DNA, 25 bp, Homo sapien
agatcttctacagggctttggccat

SEQ ID NO: 3458364 - DNA, 25 bp, Homo sapien
tcttaaagtatctggaaatgaaccc

SEQ ID NO: 3458365 - DNA, 25 bp, Homo sapien
ttattcaactttgtctccacaatgc

SEQ ID NO: 3458366 - DNA, 25 bp, Homo sapien
tgaataatcatctccaacagatgtt

SEQ ID NO: 3458367 - DNA, 25 bp, Homo sapien
gttgaataatcatctccaacagatg

SEQ ID NO: 3458368 - DNA, 25 bp, Homo sapien
tgttgtatttacgtaattttgatga

SEQ ID NO: 3458369 - DNA, 25 bp, Homo sapien
tatattgaagagacctgtattccca

SEQ ID NO: 3458370 - DNA, 25 bp, Homo sapien
gaaacataccaatgggacaggcata

SEQ ID NO: 3458371 - DNA, 25 bp, Homo sapien
ccttgtacactgttgccattacctg

SEQ ID NO: 3458372 - DNA, 25 bp, Homo sapien
tgtgggaacgtattagtactatcac

SEQ ID NO: 3458373 - DNA, 25 bp, Homo sapien
tcaaaaaaccttttgactcttgcca

SEQ ID NO: 3458374 - DNA, 25 bp, Homo sapien
caaaaaaccttttgactcttgccat

SEQ ID NO: 3458375 - DNA, 25 bp, Homo sapien
tgtaccgaaagagttgctatttcta

SEQ ID NO: 3458376 - DNA, 25 bp, Homo sapien
ccgaaagagttgctatttctaattt

SEQ ID NO: 3458377 - DNA, 25 bp, Homo sapien
cattgtaccgaaagagttgctattt

SEQ ID NO: 3458378 - DNA, 25 bp, Homo sapien
tagcattgtaccgaaagagttgcta

SEQ ID NO: 3458379 - DNA, 25 bp, Homo sapien
tgatattggtgcaggagcgtcctga

SEQ ID NO: 3458380 - DNA, 25 bp, Homo sapien
tgcaggagcgtcctgatgatctgct

SEQ ID NO: 3458381 - DNA, 25 bp, Homo sapien
ctttcctttcatgtgatattggtgc

SEQ ID NO: 3458382 - DNA, 25 bp, Homo sapien
tttcatgtgatattggtgcaggagc

SEQ ID NO: 3458383 - DNA, 25 bp, Homo sapien
acatcctcatccctatcctggtctt

SEQ ID NO: 3458384 - DNA, 25 bp, Homo sapien
tgtcagtttcgctaaatctataacc

SEQ ID NO: 3458385 - DNA, 25 bp, Homo sapien
gcttccattcgaatctacatcctca

SEQ ID NO: 3458386 - DNA, 25 bp, Homo sapien
atgctggctgtcagtttcgctaaat

SEQ ID NO: 3458387 - DNA, 25 bp, Homo sapien
taggaaggcagtgaattaacaccat

SEQ ID NO: 3458388 - DNA, 25 bp, Homo sapien
ttgttaggaaggcagtgaattaaca

SEQ ID NO: 3458389 - DNA, 25 bp, Homo sapien
gttaggaaggcagtgaattaacacc

SEQ ID NO: 3458390 - DNA, 25 bp, Homo sapien
ctttgttaggaaggcagtgaattaa

SEQ ID NO: 3458391 - DNA, 25 bp, Homo sapien
cagaggcgaattgcggagttcttaa

SEQ ID NO: 3458392 - DNA, 25 bp, Homo sapien
cacgccgtagttggttatattggga

SEQ ID NO: 3458393 - DNA, 25 bp, Homo sapien
tttaatggcactttggctgccgcct

SEQ ID NO: 3458394 - DNA, 25 bp, Homo sapien
acagttcagagagagcggttcctcg

SEQ ID NO: 3458395 - DNA, 25 bp, Homo sapien
tcagtacctgagaacggcatcctat

SEQ ID NO: 3458396 - DNA, 25 bp, Homo sapien
caagttattgcaatgccagatgccc

SEQ ID NO: 3458397 - DNA, 25 bp, Homo sapien
tcaggtcatcagagtaattctcagg

SEQ ID NO: 3458398 - DNA, 25 bp, Homo sapien
agtcactggcaaaggaatgtcagcc

SEQ ID NO: 3458399 - DNA, 25 bp, Homo sapien
gaagtactaactgctcaccttgaga

SEQ ID NO: 3458400 - DNA, 25 bp, Homo sapien
aaaagcaccttggtgtgcatgtgcc

SEQ ID NO: 3458401 - DNA, 25 bp, Homo sapien
tagagtcagagtaaacttatgcctg

SEQ ID NO: 3458402 - DNA, 25 bp, Homo sapien
caaagtccggcatttagttaatcta

SEQ ID NO: 3458403 - DNA, 25 bp, Homo sapien
tatttcatgggctttgcatagcacc

SEQ ID NO: 3458404 - DNA, 25 bp, Homo sapien
taacttgttcacaccctacatggga

SEQ ID NO: 3458405 - DNA, 25 bp, Homo sapien
ggatgcatcctgactgtatcaatca

SEQ ID NO: 3458406 - DNA, 25 bp, Homo sapien
taacattgatagtagagagaccgtg

SEQ ID NO: 3458407 - DNA, 25 bp, Homo sapien
tcagagctaactattcccattatgc

SEQ ID NO: 3458408 - DNA, 25 bp, Homo sapien
gcctgtccactacgagttctgaaag

SEQ ID NO: 3458409 - DNA, 25 bp, Homo sapien
gactacttctatcatggcttgcctg

SEQ ID NO: 3458410 - DNA, 25 bp, Homo sapien
tatgcttctctaacactcctagtga

SEQ ID NO: 3458411 - DNA, 25 bp, Homo sapien
gaaaagataatttgcttcaaaattg

SEQ ID NO: 3458412 - DNA, 25 bp, Homo sapien
gataatttgcttcaaaattgtcttg

SEQ ID NO: 3458413 - DNA, 25 bp, Homo sapien
aaagataatttgcttcaaaattgtc

SEQ ID NO: 3458414 - DNA, 25 bp, Homo sapien
aatttgcttcaaaattgtcttgggt

SEQ ID NO: 3458415 - DNA, 25 bp, Homo sapien
atttctttcattagaccatcttgcc

SEQ ID NO: 3458416 - DNA, 25 bp, Homo sapien
attctttagatttagttaggtctgc

SEQ ID NO: 3458417 - DNA, 25 bp, Homo sapien
ttgcctgttgtgctccaacattgct

SEQ ID NO: 3458418 - DNA, 25 bp, Homo sapien
ttagatttagttaggtctgctgaag

SEQ ID NO: 3458419 - DNA, 25 bp, Homo sapien
cagatttgcacatggtcatggtgaa

SEQ ID NO: 3458420 - DNA, 25 bp, Homo sapien
gaacagcatgctcctaatatggtca

SEQ ID NO: 3458421 - DNA, 25 bp, Homo sapien
aacacagactctaacaggcatttaa

SEQ ID NO: 3458422 - DNA, 25 bp, Homo sapien
tcatggtgaatctgaatatttccca

SEQ ID NO: 3458423 - DNA, 25 bp, Homo sapien
tccaggtctacctggattcaaggtg

SEQ ID NO: 3458424 - DNA, 25 bp, Homo sapien
caaggtgtgcagttgttccagtttt

SEQ ID NO: 3458425 - DNA, 25 bp, Homo sapien
gccccagtaatcaaatccaggtcta

SEQ ID NO: 3458426 - DNA, 25 bp, Homo sapien
tagccccagtaatcaaatccaggtc

SEQ ID NO: 3458427 - DNA, 25 bp, Homo sapien
tctttagaggaacgatcatgttaca

SEQ ID NO: 3458428 - DNA, 25 bp, Homo sapien
tacaatctcagtgctactgtgttct

SEQ ID NO: 3458429 - DNA, 25 bp, Homo sapien
tcagtgacttttggtctcgtaggat

SEQ ID NO: 3458430 - DNA, 25 bp, Homo sapien
taataccttttagcggacatctgtg

SEQ ID NO: 3458431 - DNA, 25 bp, Homo sapien
gttcttcagttgagttttatgaatt

SEQ ID NO: 3458432 - DNA, 25 bp, Homo sapien
tgttcttcagttgagttttatgaat

SEQ ID NO: 3458433 - DNA, 25 bp, Homo sapien
ttcttcagttgagttttatgaattt

SEQ ID NO: 3458434 - DNA, 25 bp, Homo sapien
gagttataagaagggcagggtaata

SEQ ID NO: 3458435 - DNA, 25 bp, Homo sapien
tagttttatgagttataagaagggc

SEQ ID NO: 3458436 - DNA, 25 bp, Homo sapien
ttacagctatcacttgtttgataac

SEQ ID NO: 3458437 - DNA, 25 bp, Homo sapien
cacttgtttgataacagatagcatt

SEQ ID NO: 3458438 - DNA, 25 bp, Homo sapien
cgcccagccgacactagtttaagat

SEQ ID NO: 3458439 - DNA, 25 bp, Homo sapien
tctgcaatgtaaactttaagctcat

SEQ ID NO: 3458440 - DNA, 25 bp, Homo sapien
taatatatcctatgatgactcaaga

SEQ ID NO: 3458441 - DNA, 25 bp, Homo sapien
gcctaatagctatagagaaataact

SEQ ID NO: 3458442 - DNA, 25 bp, Homo sapien
gcgagtggcaaatgcattatctcta

SEQ ID NO: 3458443 - DNA, 25 bp, Homo sapien
tcaaaacttaatatcattcatggat

SEQ ID NO: 3458444 - DNA, 25 bp, Homo sapien
ggcaaatgcattatctctataaata

SEQ ID NO: 3458445 - DNA, 25 bp, Homo sapien
gctttcaggcgagtggcaaatgcat

SEQ ID NO: 3458446 - DNA, 25 bp, Homo sapien
aacacgcaggttcagtagggacaca

SEQ ID NO: 3458447 - DNA, 25 bp, Homo sapien
gcaggcaagcacagccactcgtata

SEQ ID NO: 3458448 - DNA, 25 bp, Homo sapien
caaggatggctgttctcttcaacca

SEQ ID NO: 3458449 - DNA, 25 bp, Homo sapien
tatcctttattgaagactggtcctc

SEQ ID NO: 3458450 - DNA, 25 bp, Homo sapien
gtgatggcatctaaccaagggttgt

SEQ ID NO: 3458451 - DNA, 25 bp, Homo sapien
ttggcttgcacaactctcaactgga

SEQ ID NO: 3458452 - DNA, 25 bp, Homo sapien
cataacaatttgctgacacactgga

SEQ ID NO: 3458453 - DNA, 25 bp, Homo sapien
tcaagtagtgaggttatgcagacaa

SEQ ID NO: 3458454 - DNA, 25 bp, Homo sapien
aacttaatcctagctcccacactgg

SEQ ID NO: 3458455 - DNA, 25 bp, Homo sapien
tagctcccacactggaatcctgagt

SEQ ID NO: 3458456 - DNA, 25 bp, Homo sapien
aatcctgagtcgcatttgtcttttg

SEQ ID NO: 3458457 - DNA, 25 bp, Homo sapien
gtgacaccaacttaatcctagctcc

SEQ ID NO: 3458458 - DNA, 25 bp, Homo sapien
tcacgcacccaatgaccattcaggg

SEQ ID NO: 3458459 - DNA, 25 bp, Homo sapien
cagggaccaaatctggcagctaaca

SEQ ID NO: 3458460 - DNA, 25 bp, Homo sapien
gtaataagtatgaccctttgcaaag

SEQ ID NO: 3458461 - DNA, 25 bp, Homo sapien
tacctcagggcactttttatattgc

SEQ ID NO: 3458462 - DNA, 25 bp, Homo sapien
taacatgtgttccagtaagagcgat

SEQ ID NO: 3458463 - DNA, 25 bp, Homo sapien
taagtaatggtaggacaagttgctc

SEQ ID NO: 3458464 - DNA, 25 bp, Homo sapien
tacagtattaacgaatgcacagcac

SEQ ID NO: 3458465 - DNA, 25 bp, Homo sapien
cacttcatacgtggaagaacgacaa

SEQ ID NO: 3458466 - DNA, 25 bp, Homo sapien
aacaaaagcagtactatgaagaaag

SEQ ID NO: 3458467 - DNA, 25 bp, Homo sapien
ggtcacgtttgcaaacaagggcaca

SEQ ID NO: 3458468 - DNA, 25 bp, Homo sapien
gagttagtatactgcaccttcacta

SEQ ID NO: 3458469 - DNA, 25 bp, Homo sapien
tgctcctgtacaaccaatgaattaa

SEQ ID NO: 3458470 - DNA, 25 bp, Homo sapien
gcaatattcagaaatgtctcactca

SEQ ID NO: 3458471 - DNA, 25 bp, Homo sapien
ttcagaaatgtctcactcataatag

SEQ ID NO: 3458472 - DNA, 25 bp, Homo sapien
tttaaaggctatcattacacaacag

SEQ ID NO: 3458473 - DNA, 25 bp, Homo sapien
gtggcaatattcagaaatgtctcac

SEQ ID NO: 3458474 - DNA, 25 bp, Homo sapien
tgaagtctgctaacagttcttcctc

SEQ ID NO: 3458475 - DNA, 25 bp, Homo sapien
gaagtctgctaacagttcttcctct

SEQ ID NO: 3458476 - DNA, 25 bp, Homo sapien
tctggcaatggctgaagtctgctaa

SEQ ID NO: 3458477 - DNA, 25 bp, Homo sapien
aatggctgaagtctgctaacagttc

SEQ ID NO: 3458478 - DNA, 25 bp, Homo sapien
tcagaagtaggtgccaaatctggaa

SEQ ID NO: 3458479 - DNA, 25 bp, Homo sapien
ttttcttttccatctccaaagttca

SEQ ID NO: 3458480 - DNA, 25 bp, Homo sapien
ttcttttccatctccaaagttcaac

SEQ ID NO: 3458481 - DNA, 25 bp, Homo sapien
gaagtaggtgccaaatctggaattt

SEQ ID NO: 3458482 - DNA, 25 bp, Homo sapien
tggaaactgacagctggttcttcat

SEQ ID NO: 3458483 - DNA, 25 bp, Homo sapien
taccaaacctgctcagctgtggaaa

SEQ ID NO: 3458484 - DNA, 25 bp, Homo sapien
gctgtggaaactgacagctggttct

SEQ ID NO: 3458485 - DNA, 25 bp, Homo sapien
ctgctgccacctgtctggtaccaaa

SEQ ID NO: 3458486 - DNA, 25 bp, Homo sapien
ttagtagatcttgaatggcattaaa

SEQ ID NO: 3458487 - DNA, 25 bp, Homo sapien
gtagatcttgaatggcattaaatgg

SEQ ID NO: 3458488 - DNA, 25 bp, Homo sapien
aaacagggtccaaagtatgctcttg

SEQ ID NO: 3458489 - DNA, 25 bp, Homo sapien
atctgtaaagtaatccttttgcagt

SEQ ID NO: 3458490 - DNA, 25 bp, Homo sapien
cctgtgtgtatttctagaggcccat

SEQ ID NO: 3458491 - DNA, 25 bp, Homo sapien
ctagaggcccatctatcttctcaca

SEQ ID NO: 3458492 - DNA, 25 bp, Homo sapien
tccttagctgctactatggggctgt

SEQ ID NO: 3458493 - DNA, 25 bp, Homo sapien
caattctcaattcattgaatagtcc

SEQ ID NO: 3458494 - DNA, 25 bp, Homo sapien
aatccctgtcacaagggccaccagg

SEQ ID NO: 3458495 - DNA, 25 bp, Homo sapien
atccctgtcacaagggccaccaggc

SEQ ID NO: 3458496 - DNA, 25 bp, Homo sapien
ccagcagggtacaccttgtgggaga

SEQ ID NO: 3458497 - DNA, 25 bp, Homo sapien
tcctccaccacagtagtggagacct

SEQ ID NO: 3458498 - DNA, 25 bp, Homo sapien
accacagtagtggagacctcggtag

SEQ ID NO: 3458499 - DNA, 25 bp, Homo sapien
tggagctgtgactattgccagcagg

SEQ ID NO: 3458500 - DNA, 25 bp, Homo sapien
gaaatcaagtgccacgaataccctg

SEQ ID NO: 3458501 - DNA, 25 bp, Homo sapien
tgctggaaatcaagtgccacgaata

SEQ ID NO: 3458502 - DNA, 25 bp, Homo sapien
tattcccgatctggagcagcgccct

SEQ ID NO: 3458503 - DNA, 25 bp, Homo sapien
atcaagtgccacgaataccctggag

SEQ ID NO: 3458504 - DNA, 25 bp, Homo sapien
tttgcccatcaaaaccttcaccgtg

SEQ ID NO: 3458505 - DNA, 25 bp, Homo sapien
catgatgatctaagtctggaggtca

SEQ ID NO: 3458506 - DNA, 25 bp, Homo sapien
tttacctcaccgaccagacattaag

SEQ ID NO: 3458507 - DNA, 25 bp, Homo sapien
tcctgctagtatcgtggatgttcca

SEQ ID NO: 3458508 - DNA, 25 bp, Homo sapien
accatccccagctacaaacaatatt

SEQ ID NO: 3458509 - DNA, 25 bp, Homo sapien
catcagatgggctggatgaaaagtt

SEQ ID NO: 3458510 - DNA, 25 bp, Homo sapien
tagccttatctgtcaatactggaga

SEQ ID NO: 3458511 - DNA, 25 bp, Homo sapien
gcaatgcagatggtagtgaaagtca

SEQ ID NO: 3458512 - DNA, 25 bp, Homo sapien
tactggagatactccagcaggaaaa

SEQ ID NO: 3458513 - DNA, 25 bp, Homo sapien
cgcagctcaatatacgcaaataaat

SEQ ID NO: 3458514 - DNA, 25 bp, Homo sapien
taaaggagagtgcacaaaactgctg

SEQ ID NO: 3458515 - DNA, 25 bp, Homo sapien
tatgtacgcacaaaaccaattatgc

SEQ ID NO: 3458516 - DNA, 25 bp, Homo sapien
aatctctgtaaaatgcgcagctcaa

SEQ ID NO: 3458517 - DNA, 25 bp, Homo sapien
tacacaaggctatggacaaagtcat

SEQ ID NO: 3458518 - DNA, 25 bp, Homo sapien
gaatatgacttccaagcctggacat

SEQ ID NO: 3458519 - DNA, 25 bp, Homo sapien
ggagattgcaatcagttcaccgtaa

SEQ ID NO: 3458520 - DNA, 25 bp, Homo sapien
gaaagcacagtggattagacaacct

SEQ ID NO: 3458521 - DNA, 25 bp, Homo sapien
tactggttataatatcatctctgct

SEQ ID NO: 3458522 - DNA, 25 bp, Homo sapien
gtatcacttcgttcacagacttgga

SEQ ID NO: 3458523 - DNA, 25 bp, Homo sapien
aatttccaactattctcagtagtca

SEQ ID NO: 3458524 - DNA, 25 bp, Homo sapien
cttggaacaggccacagatttctca

SEQ ID NO: 3458525 - DNA, 25 bp, Homo sapien
cctaacaacttcacagagattgcta

SEQ ID NO: 3458526 - DNA, 25 bp, Homo sapien
attagtttacatcaaaactctacct

SEQ ID NO: 3458527 - DNA, 25 bp, Homo sapien
aactgaattgttagtgtgtctcaaa

SEQ ID NO: 3458528 - DNA, 25 bp, Homo sapien
caactgaattgttagtgtgtctcaa

SEQ ID NO: 3458529 - DNA, 25 bp, Homo sapien
acaactgaattgttagtgtgtctca

SEQ ID NO: 3458530 - DNA, 25 bp, Homo sapien
ctccttgctgattaggttcagaaaa

SEQ ID NO: 3458531 - DNA, 25 bp, Homo sapien
tccttgctgattaggttcagaaaat

SEQ ID NO: 3458532 - DNA, 25 bp, Homo sapien
ccttgctgattaggttcagaaaatt

SEQ ID NO: 3458533 - DNA, 25 bp, Homo sapien
taatcaaagaaatactctttcatgt

SEQ ID NO: 3458534 - DNA, 25 bp, Homo sapien
tgtcaatcacaattagtgcccattc

SEQ ID NO: 3458535 - DNA, 25 bp, Homo sapien
tcatgtcaatcacaattagtgccca

SEQ ID NO: 3458536 - DNA, 25 bp, Homo sapien
caatcacaattagtgcccattcatt

SEQ ID NO: 3458537 - DNA, 25 bp, Homo sapien
gcttgccaagaatttcggagtacat

SEQ ID NO: 3458538 - DNA, 25 bp, Homo sapien
ttaagtgatgagcagggaccagatt

SEQ ID NO: 3458539 - DNA, 25 bp, Homo sapien
tgtggagagtcttgtagagcttgcc

SEQ ID NO: 3458540 - DNA, 25 bp, Homo sapien
agagcttgccaagaatttcggagta

SEQ ID NO: 3458541 - DNA, 25 bp, Homo sapien
agttgtacgcatccgactgaacttg

SEQ ID NO: 3458542 - DNA, 25 bp, Homo sapien
aattcagttgtacgcatccgactga

SEQ ID NO: 3458543 - DNA, 25 bp, Homo sapien
cttgagcaaatcagatttaatatac

SEQ ID NO: 3458544 - DNA, 25 bp, Homo sapien
tctaattcagttgtacgcatccgac

SEQ ID NO: 3458545 - DNA, 25 bp, Homo sapien
tcaatgccacgtggaaactgcgaag

SEQ ID NO: 3458546 - DNA, 25 bp, Homo sapien
tccagaggagactagtgtgcgaacc

SEQ ID NO: 3458547 - DNA, 25 bp, Homo sapien
gatgcttacaggtgccaagttgaca

SEQ ID NO: 3458548 - DNA, 25 bp, Homo sapien
catgagaatggagaatgtagggccc

SEQ ID NO: 3458549 - DNA, 25 bp, Homo sapien
tagaatcttctgtgtctcaatgtgt

SEQ ID NO: 3458550 - DNA, 25 bp, Homo sapien
cttctgtgtctcaatgtgtttaaca

SEQ ID NO: 3458551 - DNA, 25 bp, Homo sapien
tcttctgtgtctcaatgtgtttaac

SEQ ID NO: 3458552 - DNA, 25 bp, Homo sapien
gaatcttctgtgtctcaatgtgttt

SEQ ID NO: 3458553 - DNA, 25 bp, Homo sapien
aacagcattagtttccaagaggaag

SEQ ID NO: 3458554 - DNA, 25 bp, Homo sapien
cacatggtgactgacagaaacagca

SEQ ID NO: 3458555 - DNA, 25 bp, Homo sapien
aaacagcattagtttccaagaggaa

SEQ ID NO: 3458556 - DNA, 25 bp, Homo sapien
acatggtgactgacagaaacagcat

SEQ ID NO: 3458557 - DNA, 25 bp, Homo sapien
gacattgagaagataaaagagaaac

SEQ ID NO: 3458558 - DNA, 25 bp, Homo sapien
tctccttcagttggcttataagttc

SEQ ID NO: 3458559 - DNA, 25 bp, Homo sapien
tgacattgagaagataaaagagaaa

SEQ ID NO: 3458560 - DNA, 25 bp, Homo sapien
tataagttcaagaggaaaatgacat

SEQ ID NO: 3458561 - DNA, 25 bp, Homo sapien
tctggtatgttgaaaagcgctgcta

SEQ ID NO: 3458562 - DNA, 25 bp, Homo sapien
tgttgaaaagcgctgctacaggaga

SEQ ID NO: 3458563 - DNA, 25 bp, Homo sapien
aaaagcgctgctacaggagacagtc

SEQ ID NO: 3458564 - DNA, 25 bp, Homo sapien
gtatgttgaaaagcgctgctacagg

SEQ ID NO: 3458565 - DNA, 25 bp, Homo sapien
ttccccagggacagatacaatgtgc

SEQ ID NO: 3458566 - DNA, 25 bp, Homo sapien
ggtttccacacagaggtagtctcca

SEQ ID NO: 3458567 - DNA, 25 bp, Homo sapien
ttacacgtctaataccgccagggca

SEQ ID NO: 3458568 - DNA, 25 bp, Homo sapien
cagctgataaaagtcaacttgggtt

SEQ ID NO: 3458569 - DNA, 25 bp, Homo sapien
ttcctcctctatacctgaagttcat

SEQ ID NO: 3458570 - DNA, 25 bp, Homo sapien
tgatccttcctcctctatacctgaa

SEQ ID NO: 3458571 - DNA, 25 bp, Homo sapien
gatccttcctcctctatacctgaag

SEQ ID NO: 3458572 - DNA, 25 bp, Homo sapien
tccttcctcctctatacctgaagtt

SEQ ID NO: 3458573 - DNA, 25 bp, Homo sapien
tactgatctaaagcagcaccattaa

SEQ ID NO: 3458574 - DNA, 25 bp, Homo sapien
cagcaccattaacagcggtgtggca

SEQ ID NO: 3458575 - DNA, 25 bp, Homo sapien
gcaccattaacagcggtgtggcaaa

SEQ ID NO: 3458576 - DNA, 25 bp, Homo sapien
agggttgtactgatctaaagcagca

SEQ ID NO: 3458577 - DNA, 25 bp, Homo sapien
gttttgtagacctgatcattcttgc

SEQ ID NO: 3458578 - DNA, 25 bp, Homo sapien
tgttttgtagacctgatcattcttg

SEQ ID NO: 3458579 - DNA, 25 bp, Homo sapien
tttgtagacctgatcattcttgctg

SEQ ID NO: 3458580 - DNA, 25 bp, Homo sapien
tgtagacctgatcattcttgctgac

SEQ ID NO: 3458581 - DNA, 25 bp, Homo sapien
ccagaattttgtcttagtgcattct

SEQ ID NO: 3458582 - DNA, 25 bp, Homo sapien
gtgcattctgaatctggcagagtgc

SEQ ID NO: 3458583 - DNA, 25 bp, Homo sapien
caacagtgttgacatctccaaggcc

SEQ ID NO: 3458584 - DNA, 25 bp, Homo sapien
tcacaacagtgttgacatctccaag

SEQ ID NO: 3458585 - DNA, 25 bp, Homo sapien
caccaacaattttcgctgcctgcaa

SEQ ID NO: 3458586 - DNA, 25 bp, Homo sapien
cacatggtcagtgacaaatcttggc

SEQ ID NO: 3458587 - DNA, 25 bp, Homo sapien
caatctcatggagtgtgggcaccaa

SEQ ID NO: 3458588 - DNA, 25 bp, Homo sapien
aacacgaacagcgagcctctcaggg

SEQ ID NO: 3458589 - DNA, 25 bp, Homo sapien
tttcaaatgggagctgattccccat

SEQ ID NO: 3458590 - DNA, 25 bp, Homo sapien
gtttcaaatgggagctgattcccca

SEQ ID NO: 3458591 - DNA, 25 bp, Homo sapien
gagggacattgatgacacgggtcac

SEQ ID NO: 3458592 - DNA, 25 bp, Homo sapien
gagagctgtcatcttgcctacttct

SEQ ID NO: 3458593 - DNA, 25 bp, Homo sapien
acaatagggtggaacaaacaggtgc

SEQ ID NO: 3458594 - DNA, 25 bp, Homo sapien
tgttccaatccatctccgttcttgc

SEQ ID NO: 3458595 - DNA, 25 bp, Homo sapien
tggttggcccttacattgaatattc

SEQ ID NO: 3458596 - DNA, 25 bp, Homo sapien
ttctgatagattgtagaaaaaagca

SEQ ID NO: 3458597 - DNA, 25 bp, Homo sapien
cattgaatattctgatagattgtag

SEQ ID NO: 3458598 - DNA, 25 bp, Homo sapien
ttttggttggcccttacattgaata

SEQ ID NO: 3458599 - DNA, 25 bp, Homo sapien
gaaacgatgagacaatttctcttat

SEQ ID NO: 3458600 - DNA, 25 bp, Homo sapien
gagaataaattagaaacgatgagac

SEQ ID NO: 3458601 - DNA, 25 bp, Homo sapien
gaataaattagaaacgatgagacaa

SEQ ID NO: 3458602 - DNA, 25 bp, Homo sapien
ttagaaacgatgagacaatttctct

SEQ ID NO: 3458603 - DNA, 25 bp, Homo sapien
tcttttgcattatcagaacctccaa

SEQ ID NO: 3458604 - DNA, 25 bp, Homo sapien
gtgatttctgaaggaccatttcata

SEQ ID NO: 3458605 - DNA, 25 bp, Homo sapien
gatttctgaaggaccatttcatatc

SEQ ID NO: 3458606 - DNA, 25 bp, Homo sapien
aattgaactccacctttgcctaatc

SEQ ID NO: 3458607 - DNA, 25 bp, Homo sapien
gataatgaaaggaagggcctttgct

SEQ ID NO: 3458608 - DNA, 25 bp, Homo sapien
ggcctttgctatccagtccactgtg

SEQ ID NO: 3458609 - DNA, 25 bp, Homo sapien
ggcttataagctgcctgataatgaa

SEQ ID NO: 3458610 - DNA, 25 bp, Homo sapien
tcagagaggcttataagctgcctga

SEQ ID NO: 3458611 - DNA, 25 bp, Homo sapien
atacgttctggtgggtattttggag

SEQ ID NO: 3458612 - DNA, 25 bp, Homo sapien
ccaggcaacatactttttggtccac

SEQ ID NO: 3458613 - DNA, 25 bp, Homo sapien
cttaactatgcaagaaacacatttt

SEQ ID NO: 3458614 - DNA, 25 bp, Homo sapien
cttctacaggggttttctacagaca

SEQ ID NO: 3458615 - DNA, 25 bp, Homo sapien
tcccttctgactggagctgaggcta

SEQ ID NO: 3458616 - DNA, 25 bp, Homo sapien
caccaaagagcatggagactctgta

SEQ ID NO: 3458617 - DNA, 25 bp, Homo sapien
ttctgatgacacatccatgccattg

SEQ ID NO: 3458618 - DNA, 25 bp, Homo sapien
gactctgtaagactgtttcggagct

SEQ ID NO: 3458619 - DNA, 25 bp, Homo sapien
ggatacgagaatcaccactccagga

SEQ ID NO: 3458620 - DNA, 25 bp, Homo sapien
tcttcccttatgatagacaagaagg

SEQ ID NO: 3458621 - DNA, 25 bp, Homo sapien
tgacatccactgagtccctctttgc

SEQ ID NO: 3458622 - DNA, 25 bp, Homo sapien
tcccatgggcgctggtcagcacttc

SEQ ID NO: 3458623 - DNA, 25 bp, Homo sapien
ggcattttctttctcgtataagtgc

SEQ ID NO: 3458624 - DNA, 25 bp, Homo sapien
ataagtgctgactttcttgattaca

SEQ ID NO: 3458625 - DNA, 25 bp, Homo sapien
ccattggagctctggtcaaagcact

SEQ ID NO: 3458626 - DNA, 25 bp, Homo sapien
gattacatatgtttcccgttcgcat

SEQ ID NO: 3458627 - DNA, 25 bp, Homo sapien
tgaatagagctcttcacgtagactg

SEQ ID NO: 3458628 - DNA, 25 bp, Homo sapien
tctacatctcctgagttaagtggtt

SEQ ID NO: 3458629 - DNA, 25 bp, Homo sapien
ctatgaggattctagagcctgaata

SEQ ID NO: 3458630 - DNA, 25 bp, Homo sapien
gacagtgtcagtatatctacatctc

SEQ ID NO: 3458631 - DNA, 25 bp, Homo sapien
taggaacacttaaaatacgcatttg

SEQ ID NO: 3458632 - DNA, 25 bp, Homo sapien
tcaatcaaaattggtgtcatatcag

SEQ ID NO: 3458633 - DNA, 25 bp, Homo sapien
acttaagtgtcccacaaatgtgtac

SEQ ID NO: 3458634 - DNA, 25 bp, Homo sapien
ggattctcctttactataggaacac

SEQ ID NO: 3458635 - DNA, 25 bp, Homo sapien
ctctctcatggaatatttccattcc

SEQ ID NO: 3458636 - DNA, 25 bp, Homo sapien
tctctcatggaatatttccattcca

SEQ ID NO: 3458637 - DNA, 25 bp, Homo sapien
tctcacctctctcatggaatatttc

SEQ ID NO: 3458638 - DNA, 25 bp, Homo sapien
cacctctctcatggaatatttccat

SEQ ID NO: 3458639 - DNA, 25 bp, Homo sapien
tcaggcgacacacagtttttatggg

SEQ ID NO: 3458640 - DNA, 25 bp, Homo sapien
caggcccttaacgactttatatgta

SEQ ID NO: 3458641 - DNA, 25 bp, Homo sapien
gggttaataacttgttcaggcgaca

SEQ ID NO: 3458642 - DNA, 25 bp, Homo sapien
tacttagctaatacatatcaggccc

SEQ ID NO: 3458643 - DNA, 25 bp, Homo sapien
gaagcactattctggtgatatggcc

SEQ ID NO: 3458644 - DNA, 25 bp, Homo sapien
agggcccagtcccaacattgtttag

SEQ ID NO: 3458645 - DNA, 25 bp, Homo sapien
ttgcccaatcggtcgctaactcctg

SEQ ID NO: 3458646 - DNA, 25 bp, Homo sapien
gatatggccttaatcaactcagagg

SEQ ID NO: 3458647 - DNA, 25 bp, Homo sapien
ccatcatgcctgaatgttgactgaa

SEQ ID NO: 3458648 - DNA, 25 bp, Homo sapien
acttgactggcctaagagatactca

SEQ ID NO: 3458649 - DNA, 25 bp, Homo sapien
aatgataagcaaggtgaattccacc

SEQ ID NO: 3458650 - DNA, 25 bp, Homo sapien
taggcatgtctgtaaggaagtttcc

SEQ ID NO: 3458651 - DNA, 25 bp, Homo sapien
tagtagcattcatatccccgtggcc

SEQ ID NO: 3458652 - DNA, 25 bp, Homo sapien
tgtggtggccaccaatcttaccttc

SEQ ID NO: 3458653 - DNA, 25 bp, Homo sapien
gagcaagaaagtcaacatcccattg

SEQ ID NO: 3458654 - DNA, 25 bp, Homo sapien
ccccgtggccaaagcatagttatgt

SEQ ID NO: 3458655 - DNA, 25 bp, Homo sapien
taaccacaccactagaagcagaaac

SEQ ID NO: 3458656 - DNA, 25 bp, Homo sapien
gatgctccaggctatagattgctca

SEQ ID NO: 3458657 - DNA, 25 bp, Homo sapien
gttcgtgtgataagtataaatgctc

SEQ ID NO: 3458658 - DNA, 25 bp, Homo sapien
gattgctcacaaaagattctaatga

SEQ ID NO: 3458659 - DNA, 25 bp, Homo sapien
atgagaatatgaataccgaattgtc

SEQ ID NO: 3458660 - DNA, 25 bp, Homo sapien
tccagctttgactgggtcacaaaat

SEQ ID NO: 3458661 - DNA, 25 bp, Homo sapien
cctttccagctttgactgggtcaca

SEQ ID NO: 3458662 - DNA, 25 bp, Homo sapien
gagaatatgaataccgaattgtcat

SEQ ID NO: 3458663 - DNA, 25 bp, Homo sapien
ttggctacgatgcatatatcctcct

SEQ ID NO: 3458664 - DNA, 25 bp, Homo sapien
cttggctacgatgcatatatcctcc

SEQ ID NO: 3458665 - DNA, 25 bp, Homo sapien
gcttggctacgatgcatatatcctc

SEQ ID NO: 3458666 - DNA, 25 bp, Homo sapien
cgctcagttcctgggaataaaagct

SEQ ID NO: 3458667 - DNA, 25 bp, Homo sapien
ctcagttcctgggaataaaagctcc

SEQ ID NO: 3458668 - DNA, 25 bp, Homo sapien
catcgctcagttcctgggaataaaa

SEQ ID NO: 3458669 - DNA, 25 bp, Homo sapien
cagttcctgggaataaaagctccac

SEQ ID NO: 3458670 - DNA, 25 bp, Homo sapien
cagcatatgaagtggagagaccagg

SEQ ID NO: 3458671 - DNA, 25 bp, Homo sapien
gcagcatatgaagtggagagaccag

SEQ ID NO: 3458672 - DNA, 25 bp, Homo sapien
agcatatgaagtggagagaccagga

SEQ ID NO: 3458673 - DNA, 25 bp, Homo sapien
gcatatgaagtggagagaccaggaa

SEQ ID NO: 3458674 - DNA, 25 bp, Homo sapien
catcttgtttgaaggcatctgagga

SEQ ID NO: 3458675 - DNA, 25 bp, Homo sapien
cctaatgaagggctgctgtatcgtg

SEQ ID NO: 3458676 - DNA, 25 bp, Homo sapien
taattctgagctgcccctagccagc

SEQ ID NO: 3458677 - DNA, 25 bp, Homo sapien
tgtatcgtggtctggttttggaacc

SEQ ID NO: 3458678 - DNA, 25 bp, Homo sapien
cgaacttcacaattcaatgctacct

SEQ ID NO: 3458679 - DNA, 25 bp, Homo sapien
atctggttcttgcacaaaaactggc

SEQ ID NO: 3458680 - DNA, 25 bp, Homo sapien
gggaactggattgccacgaacttca

SEQ ID NO: 3458681 - DNA, 25 bp, Homo sapien
tcatcagaatcagttggaaaaataa

SEQ ID NO: 3458682 - DNA, 25 bp, Homo sapien
aagaatactccccacagtgttggtt

SEQ ID NO: 3458683 - DNA, 25 bp, Homo sapien
gctaaacactgataatgaccagaat

SEQ ID NO: 3458684 - DNA, 25 bp, Homo sapien
ggtgccatctatcaaactgtagcga

SEQ ID NO: 3458685 - DNA, 25 bp, Homo sapien
tgtagcgataatcactttccagatc

SEQ ID NO: 3458686 - DNA, 25 bp, Homo sapien
tgcaaagtgtgagagtgacaaagtt

SEQ ID NO: 3458687 - DNA, 25 bp, Homo sapien
ttatatggtgtattcttgcttgtca

SEQ ID NO: 3458688 - DNA, 25 bp, Homo sapien
tgtggagaaactgctacgagctttg

SEQ ID NO: 3458689 - DNA, 25 bp, Homo sapien
gacaaagttttatatggtgtattct

SEQ ID NO: 3458690 - DNA, 25 bp, Homo sapien
gtgaatgtggcggaggagagcacat

SEQ ID NO: 3458691 - DNA, 25 bp, Homo sapien
tgcacttcttgtccggccactaaaa

SEQ ID NO: 3458692 - DNA, 25 bp, Homo sapien
ctgcacttcttgtccggccactaaa

SEQ ID NO: 3458693 - DNA, 25 bp, Homo sapien
tgtggcggaggagagcacatcagaa

SEQ ID NO: 3458694 - DNA, 25 bp, Homo sapien
tgaatgatccaccatgtctaacggc

SEQ ID NO: 3458695 - DNA, 25 bp, Homo sapien
ttgagcgaggtcagccagttttctc

SEQ ID NO: 3458696 - DNA, 25 bp, Homo sapien
gcctgcattcagactgtgctgattg

SEQ ID NO: 3458697 - DNA, 25 bp, Homo sapien
gaagaacggttccagtgaatgatcc

SEQ ID NO: 3458698 - DNA, 25 bp, Homo sapien
tcttgtacttcccattatgtgccat

SEQ ID NO: 3458699 - DNA, 25 bp, Homo sapien
attcagaactattaccggcttcttg

SEQ ID NO: 3458700 - DNA, 25 bp, Homo sapien
agaactattaccggcttcttgtact

SEQ ID NO: 3458701 - DNA, 25 bp, Homo sapien
tcagaactattaccggcttcttgta

SEQ ID NO: 3458702 - DNA, 25 bp, Homo sapien
catcttgtacctcgtacaattggat

SEQ ID NO: 3458703 - DNA, 25 bp, Homo sapien
tcatcttgtacctcgtacaattgga

SEQ ID NO: 3458704 - DNA, 25 bp, Homo sapien
tgtacctcgtacaattggatttaat

SEQ ID NO: 3458705 - DNA, 25 bp, Homo sapien
cttgtacctcgtacaattggattta

SEQ ID NO: 3458706 - DNA, 25 bp, Homo sapien
gaagggaactcattaaatacccagc

SEQ ID NO: 3458707 - DNA, 25 bp, Homo sapien
agggaactcattaaatacccagcta

SEQ ID NO: 3458708 - DNA, 25 bp, Homo sapien
cacaaaggaagggaactcattaaat

SEQ ID NO: 3458709 - DNA, 25 bp, Homo sapien
aagggaactcattaaatacccagct

SEQ ID NO: 3458710 - DNA, 25 bp, Homo sapien
ggactctagcattcgtcactgtgtt

SEQ ID NO: 3458711 - DNA, 25 bp, Homo sapien
catcattacgcagagtgagtggcgt

SEQ ID NO: 3458712 - DNA, 25 bp, Homo sapien
tcctgggagatgaaccgccggctgt

SEQ ID NO: 3458713 - DNA, 25 bp, Homo sapien
gaaatataaaggttgcctgtctcct

SEQ ID NO: 3458714 - DNA, 25 bp, Homo sapien
tgaccattttaacgggccaagcaac

SEQ ID NO: 3458715 - DNA, 25 bp, Homo sapien
gagttggctgaccattttaacgggc

SEQ ID NO: 3458716 - DNA, 25 bp, Homo sapien
tggctgaccattttaacgggccaag

SEQ ID NO: 3458717 - DNA, 25 bp, Homo sapien
ttagagttggctgaccattttaacg

SEQ ID NO: 3458718 - DNA, 25 bp, Homo sapien
ttgtgatcggcaatgtgtagaaaga

SEQ ID NO: 3458719 - DNA, 25 bp, Homo sapien
cttgtgatcggcaatgtgtagaaag

SEQ ID NO: 3458720 - DNA, 25 bp, Homo sapien
tgtgatcggcaatgtgtagaaagag

SEQ ID NO: 3458721 - DNA, 25 bp, Homo sapien
ttgcagaaacattcattgtaatgcc

SEQ ID NO: 3458722 - DNA, 25 bp, Homo sapien
tttgccacatttgcagaaacattca

SEQ ID NO: 3458723 - DNA, 25 bp, Homo sapien
gaaacattcattgtaatgcctatct

SEQ ID NO: 3458724 - DNA, 25 bp, Homo sapien
cacatttgcagaaacattcattgta

SEQ ID NO: 3458725 - DNA, 25 bp, Homo sapien
aattttacttatgtgggttgctcca

SEQ ID NO: 3458726 - DNA, 25 bp, Homo sapien
tatagatgaattctgtcattccgac

SEQ ID NO: 3458727 - DNA, 25 bp, Homo sapien
tattccaatgaaactgggcaggaac

SEQ ID NO: 3458728 - DNA, 25 bp, Homo sapien
taacacactatgtagcaggcaacct

SEQ ID NO: 3458729 - DNA, 25 bp, Homo sapien
ttgtgcgcgatcaaatgctttcaga

SEQ ID NO: 3458730 - DNA, 25 bp, Homo sapien
cctttgcaaatcgtcctagttctgt

SEQ ID NO: 3458731 - DNA, 25 bp, Homo sapien
cagggctgtacccacagtaagtatt

SEQ ID NO: 3458732 - DNA, 25 bp, Homo sapien
ttcagaagcatctcagaagcagggc

SEQ ID NO: 3458733 - DNA, 25 bp, Homo sapien
ccaagcataaccaatggtgacacaa

SEQ ID NO: 3458734 - DNA, 25 bp, Homo sapien
ttacgtcattgtgccaagcataacc

SEQ ID NO: 3458735 - DNA, 25 bp, Homo sapien
tggtgacacaatatcaggttctagc

SEQ ID NO: 3458736 - DNA, 25 bp, Homo sapien
ggttctagctcataacctatctgga

SEQ ID NO: 3458737 - DNA, 25 bp, Homo sapien
tctgacttggctacatggtttattt

SEQ ID NO: 3458738 - DNA, 25 bp, Homo sapien
ttagtatctcaaatcttgtgcagtt

SEQ ID NO: 3458739 - DNA, 25 bp, Homo sapien
tcttgtgcagtttagcttcaaattc

SEQ ID NO: 3458740 - DNA, 25 bp, Homo sapien
gctacatggtttatttcagttgcaa

SEQ ID NO: 3458741 - DNA, 25 bp, Homo sapien
tcttaacagttgttcctttagcagc

SEQ ID NO: 3458742 - DNA, 25 bp, Homo sapien
gctgtaaccgtgaaaggaaaatgga

SEQ ID NO: 3458743 - DNA, 25 bp, Homo sapien
tcaattttcggctcatattctccca

SEQ ID NO: 3458744 - DNA, 25 bp, Homo sapien
aaaatggacctcaattttcggctca

SEQ ID NO: 3458745 - DNA, 25 bp, Homo sapien
caagtgataaacagagaccttcttg

SEQ ID NO: 3458746 - DNA, 25 bp, Homo sapien
tttcttagaaaggacaccaagtgat

SEQ ID NO: 3458747 - DNA, 25 bp, Homo sapien
gagggtagacatcttcataagatgt

SEQ ID NO: 3458748 - DNA, 25 bp, Homo sapien
tcataagggtggcagattggtcttt

SEQ ID NO: 3458749 - DNA, 25 bp, Homo sapien
gcctgagtggtaagatcctgacgat

SEQ ID NO: 3458750 - DNA, 25 bp, Homo sapien
tgaagtttttgcaacagacaaaggc

SEQ ID NO: 3458751 - DNA, 25 bp, Homo sapien
caaaggcccacaagagcaccatgtg

SEQ ID NO: 3458752 - DNA, 25 bp, Homo sapien
gcttgctgaagtaagaagcagctca

SEQ ID NO: 3458753 - DNA, 25 bp, Homo sapien
gacaaattgtaggtctgtctaatgg

SEQ ID NO: 3458754 - DNA, 25 bp, Homo sapien
ccttgcataagtcacaagtgagata

SEQ ID NO: 3458755 - DNA, 25 bp, Homo sapien
ggtctgtctaatggagcttcctatt

SEQ ID NO: 3458756 - DNA, 25 bp, Homo sapien
ttttccttgcataagtcacaagtga

SEQ ID NO: 3458757 - DNA, 25 bp, Homo sapien
ctacgatagggaacaaaaatactgt

SEQ ID NO: 3458758 - DNA, 25 bp, Homo sapien
tgagatttccgcagacgtgccttac

SEQ ID NO: 3458759 - DNA, 25 bp, Homo sapien
cttgtaattgtccacgaaaggaatt

SEQ ID NO: 3458760 - DNA, 25 bp, Homo sapien
tcagctctgcactcataaatgcctg

SEQ ID NO: 3458761 - DNA, 25 bp, Homo sapien
ggtatttccagcaccgcctgagatt

SEQ ID NO: 3458762 - DNA, 25 bp, Homo sapien
agtatgtaagcagtaaacaaggatg

SEQ ID NO: 3458763 - DNA, 25 bp, Homo sapien
aagtatgtaagcagtaaacaaggat

SEQ ID NO: 3458764 - DNA, 25 bp, Homo sapien
gtaagtatgtaagcagtaaacaagg

SEQ ID NO: 3458765 - DNA, 25 bp, Homo sapien
taagtatgtaagcagtaaacaagga

SEQ ID NO: 3458766 - DNA, 25 bp, Homo sapien
cactgtctaactgagtatcattcag

SEQ ID NO: 3458767 - DNA, 25 bp, Homo sapien
attcccatcggagagggctcccact

SEQ ID NO: 3458768 - DNA, 25 bp, Homo sapien
cattcagtttttctacccagtgtgg

SEQ ID NO: 3458769 - DNA, 25 bp, Homo sapien
cattcttcagccaacgatacgtggg

SEQ ID NO: 3458770 - DNA, 25 bp, Homo sapien
gcagaacaggttaataactcccaac

SEQ ID NO: 3458771 - DNA, 25 bp, Homo sapien
agcagaacaggttaataactcccaa

SEQ ID NO: 3458772 - DNA, 25 bp, Homo sapien
cagaacaggttaataactcccaaca

SEQ ID NO: 3458773 - DNA, 25 bp, Homo sapien
agaacaggttaataactcccaacag

SEQ ID NO: 3458774 - DNA, 25 bp, Homo sapien
ggatcatcaatactccattaaccat

SEQ ID NO: 3458775 - DNA, 25 bp, Homo sapien
cattgtggatcatcaatactccatt

SEQ ID NO: 3458776 - DNA, 25 bp, Homo sapien
tagaatcttcagctcagcactagcg

SEQ ID NO: 3458777 - DNA, 25 bp, Homo sapien
gcgtaaatggctccatacttatttt

SEQ ID NO: 3458778 - DNA, 25 bp, Homo sapien
cttggggtttgcactctatgacaac

SEQ ID NO: 3458779 - DNA, 25 bp, Homo sapien
tttgcactctatgacaacttcttgg

SEQ ID NO: 3458780 - DNA, 25 bp, Homo sapien
tcttccaagagatggttggttttgg

SEQ ID NO: 3458781 - DNA, 25 bp, Homo sapien
tccaagagatggttggttttggaga

SEQ ID NO: 3458782 - DNA, 25 bp, Homo sapien
ctgggactatgggactacagcaaca

SEQ ID NO: 3458783 - DNA, 25 bp, Homo sapien
actacagcaacacgacaccatgcca

SEQ ID NO: 3458784 - DNA, 25 bp, Homo sapien
tacagcaacacgacaccatgccagg

SEQ ID NO: 3458785 - DNA, 25 bp, Homo sapien
actatgggactacagcaacacgaca

SEQ ID NO: 3458786 - DNA, 25 bp, Homo sapien
ccatgtgctggaaaggatagagtca

SEQ ID NO: 3458787 - DNA, 25 bp, Homo sapien
aacatggtaaagcagtctctggctg

SEQ ID NO: 3458788 - DNA, 25 bp, Homo sapien
gctaaagcacgtcatatggccacac

SEQ ID NO: 3458789 - DNA, 25 bp, Homo sapien
catgactagtactggaaaaattgca

SEQ ID NO: 3458790 - DNA, 25 bp, Homo sapien
tagttcctctgtggcactagctaca

SEQ ID NO: 3458791 - DNA, 25 bp, Homo sapien
tttcaggttacatggcgataccagc

SEQ ID NO: 3458792 - DNA, 25 bp, Homo sapien
gtctgatcacagcaatatctatccg

SEQ ID NO: 3458793 - DNA, 25 bp, Homo sapien
aacagtggctatggtgttggacagc

SEQ ID NO: 3458794 - DNA, 25 bp, Homo sapien
gatcctcactggtaagcacattatt

SEQ ID NO: 3458795 - DNA, 25 bp, Homo sapien
taaattcgaggtttttagatcctca

SEQ ID NO: 3458796 - DNA, 25 bp, Homo sapien
ggtttttagatcctcactggtaagc

SEQ ID NO: 3458797 - DNA, 25 bp, Homo sapien
ctgtaaggcagggatgtaaattcga

SEQ ID NO: 3458798 - DNA, 25 bp, Homo sapien
cctcagtgcccttccaagctgaatt

SEQ ID NO: 3458799 - DNA, 25 bp, Homo sapien
gaatactctgtacatgcttctatca

SEQ ID NO: 3458800 - DNA, 25 bp, Homo sapien
ccctagaatactctgtacatgcttc

SEQ ID NO: 3458801 - DNA, 25 bp, Homo sapien
tgcctcagtgcccttccaagctgaa

SEQ ID NO: 3458802 - DNA, 25 bp, Homo sapien
caggtaatggagttcacattaccat

SEQ ID NO: 3458803 - DNA, 25 bp, Homo sapien
tcacattaccatagacttttcttga

SEQ ID NO: 3458804 - DNA, 25 bp, Homo sapien
gttcacattaccatagacttttctt

SEQ ID NO: 3458805 - DNA, 25 bp, Homo sapien
gcaggtaatggagttcacattacca

SEQ ID NO: 3458806 - DNA, 25 bp, Homo sapien
taccattttgctcatggagcctaga

SEQ ID NO: 3458807 - DNA, 25 bp, Homo sapien
ttccctgacttagacgactcctctg

SEQ ID NO: 3458808 - DNA, 25 bp, Homo sapien
cacctctaccattttgctcatggag

SEQ ID NO: 3458809 - DNA, 25 bp, Homo sapien
agagttccctgacttagacgactcc

SEQ ID NO: 3458810 - DNA, 25 bp, Homo sapien
tgtgatgtctgtggaacctccttac

SEQ ID NO: 3458811 - DNA, 25 bp, Homo sapien
ctgtgatgtctgtggaacctcctta

SEQ ID NO: 3458812 - DNA, 25 bp, Homo sapien
taacttctgttgtggtcccttctgg

SEQ ID NO: 3458813 - DNA, 25 bp, Homo sapien
tcccttctgggacatagctgccact

SEQ ID NO: 3458814 - DNA, 25 bp, Homo sapien
caaaggctcgctcttgtaagcacac

SEQ ID NO: 3458815 - DNA, 25 bp, Homo sapien
gaaccatctgtgactgaggcaggcc

SEQ ID NO: 3458816 - DNA, 25 bp, Homo sapien
tctagttcagtattgacaatagagt

SEQ ID NO: 3458817 - DNA, 25 bp, Homo sapien
gttcagtattgacaatagagtggga

SEQ ID NO: 3458818 - DNA, 25 bp, Homo sapien
agttcagtattgacaatagagtggg

SEQ ID NO: 3458819 - DNA, 25 bp, Homo sapien
tagttcagtattgacaatagagtgg

SEQ ID NO: 3458820 - DNA, 25 bp, Homo sapien
agcatttaggatccgtagactcccg

SEQ ID NO: 3458821 - DNA, 25 bp, Homo sapien
cggcaaacgtactttccctcgtctg

SEQ ID NO: 3458822 - DNA, 25 bp, Homo sapien
acagatagcgaagctataatttcag

SEQ ID NO: 3458823 - DNA, 25 bp, Homo sapien
cgtactttccctcgtctgatttgga

SEQ ID NO: 3458824 - DNA, 25 bp, Homo sapien
cttttaggagtaagttctatccttg

SEQ ID NO: 3458825 - DNA, 25 bp, Homo sapien
aggagtaagttctatccttgtaggt

SEQ ID NO: 3458826 - DNA, 25 bp, Homo sapien
taggagtaagttctatccttgtagg

SEQ ID NO: 3458827 - DNA, 25 bp, Homo sapien
tttaggagtaagttctatccttgta

SEQ ID NO: 3458828 - DNA, 25 bp, Homo sapien
caccctcttcctcgaaatcaatagg

SEQ ID NO: 3458829 - DNA, 25 bp, Homo sapien
aaagtgacatccaaactagcatcgt

SEQ ID NO: 3458830 - DNA, 25 bp, Homo sapien
actagcatcgtgaattgctttgcaa

SEQ ID NO: 3458831 - DNA, 25 bp, Homo sapien
caataggctgtcctttcagagtcca

SEQ ID NO: 3458832 - DNA, 25 bp, Homo sapien
ttctaaagttatcattactaaaaga

SEQ ID NO: 3458833 - DNA, 25 bp, Homo sapien
cagatgtagttacccagctaaagag

SEQ ID NO: 3458834 - DNA, 25 bp, Homo sapien
gctgttgcgtaaatgggcctgtgtt

SEQ ID NO: 3458835 - DNA, 25 bp, Homo sapien
tgctcaggtcttcattagggaggac

SEQ ID NO: 3458836 - DNA, 25 bp, Homo sapien
ttcaaggaagcccaagtgatgatgg

SEQ ID NO: 3458837 - DNA, 25 bp, Homo sapien
tctagcattgtgttcacagatggaa

SEQ ID NO: 3458838 - DNA, 25 bp, Homo sapien
ttttctagcattgtgttcacagatg

SEQ ID NO: 3458839 - DNA, 25 bp, Homo sapien
gaaacaaattttctagcattgtgtt

SEQ ID NO: 3458840 - DNA, 25 bp, Homo sapien
agcattgtgttcacagatggaaaca

SEQ ID NO: 3458841 - DNA, 25 bp, Homo sapien
tcctgtgtgtagctgacaatacctc

SEQ ID NO: 3458842 - DNA, 25 bp, Homo sapien
aaggtccacgatgggcattcccaaa

SEQ ID NO: 3458843 - DNA, 25 bp, Homo sapien
cactagtgcagccaaggatcattaa

SEQ ID NO: 3458844 - DNA, 25 bp, Homo sapien
tcattaagcgagatgatgaatgcat

SEQ ID NO: 3458845 - DNA, 25 bp, Homo sapien
gttctgcctcatctgacacactgtc

SEQ ID NO: 3458846 - DNA, 25 bp, Homo sapien
gcctcatctgacacactgtctgctg

SEQ ID NO: 3458847 - DNA, 25 bp, Homo sapien
tcccagcatgcatcagaaggatgtt

SEQ ID NO: 3458848 - DNA, 25 bp, Homo sapien
tctgcctcatctgacacactgtctg

SEQ ID NO: 3458849 - DNA, 25 bp, Homo sapien
gaattatattctaaaccctgttgag

SEQ ID NO: 3458850 - DNA, 25 bp, Homo sapien
taaaacagatcatagcaagagaaag

SEQ ID NO: 3458851 - DNA, 25 bp, Homo sapien
tctaaattactaggcaagtgcagac

SEQ ID NO: 3458852 - DNA, 25 bp, Homo sapien
caaagcagaatgttagtttgccact

SEQ ID NO: 3458853 - DNA, 25 bp, Homo sapien
caacaattactatcccaggtgggcc

SEQ ID NO: 3458854 - DNA, 25 bp, Homo sapien
tttcctcaacaattactatcccagg

SEQ ID NO: 3458855 - DNA, 25 bp, Homo sapien
aaaatgggctgcgagcttgaaggtt

SEQ ID NO: 3458856 - DNA, 25 bp, Homo sapien
gacagtgtggccgtactttcggtta

SEQ ID NO: 3458857 - DNA, 25 bp, Homo sapien
tttaaggttactgcgtgcaaatatt

SEQ ID NO: 3458858 - DNA, 25 bp, Homo sapien
ggttactgcgtgcaaatattttact

SEQ ID NO: 3458859 - DNA, 25 bp, Homo sapien
ataatattctggttgagttttaagg

SEQ ID NO: 3458860 - DNA, 25 bp, Homo sapien
taaggttactgcgtgcaaatatttt

SEQ ID NO: 3458861 - DNA, 25 bp, Homo sapien
gatttaggtccacagccatggctga

SEQ ID NO: 3458862 - DNA, 25 bp, Homo sapien
tggatctcctgtcccaatagggttg

SEQ ID NO: 3458863 - DNA, 25 bp, Homo sapien
catattccacccagggatttaggtc

SEQ ID NO: 3458864 - DNA, 25 bp, Homo sapien
ggtggctaccactcgaaattcatat

SEQ ID NO: 3458865 - DNA, 25 bp, Homo sapien
gacgattagaagcataccaaatcca

SEQ ID NO: 3458866 - DNA, 25 bp, Homo sapien
gaagcataccaaatccaatctgact

SEQ ID NO: 3458867 - DNA, 25 bp, Homo sapien
taccaaatccaatctgactcttcca

SEQ ID NO: 3458868 - DNA, 25 bp, Homo sapien
tttcaagacgattagaagcatacca

SEQ ID NO: 3458869 - DNA, 25 bp, Homo sapien
gcaatgactaactcatgccttcttc

SEQ ID NO: 3458870 - DNA, 25 bp, Homo sapien
acattggtgggtgctgtcttcggaa

SEQ ID NO: 3458871 - DNA, 25 bp, Homo sapien
cttccacttcttccgcttacattgg

SEQ ID NO: 3458872 - DNA, 25 bp, Homo sapien
ccaggcaatgactaactcatgcctt

SEQ ID NO: 3458873 - DNA, 25 bp, Homo sapien
tttggaagcttcagaggatgtcacc

SEQ ID NO: 3458874 - DNA, 25 bp, Homo sapien
gttccattgggtctgaaagccacaa

SEQ ID NO: 3458875 - DNA, 25 bp, Homo sapien
gaggagggacactttcatctcgata

SEQ ID NO: 3458876 - DNA, 25 bp, Homo sapien
cagctgaacagatgaccacaatttg

SEQ ID NO: 3458877 - DNA, 25 bp, Homo sapien
taacataaattctggtagctgcatt

SEQ ID NO: 3458878 - DNA, 25 bp, Homo sapien
cccagcttggtgtcggctgtgaaaa

SEQ ID NO: 3458879 - DNA, 25 bp, Homo sapien
cagtgcttaaggcatgtatctggta

SEQ ID NO: 3458880 - DNA, 25 bp, Homo sapien
ccatgttccattgggaaataggttg

SEQ ID NO: 3458881 - DNA, 25 bp, Homo sapien
gagtcattaaggtttgcttctcttg

SEQ ID NO: 3458882 - DNA, 25 bp, Homo sapien
ttcaaaggcttacgggtgttagcag

SEQ ID NO: 3458883 - DNA, 25 bp, Homo sapien
ctgacagagtcattaaggtttgctt

SEQ ID NO: 3458884 - DNA, 25 bp, Homo sapien
ctcttgtggcaacattgaaaggttt

SEQ ID NO: 3458885 - DNA, 25 bp, Homo sapien
ctttaatgtgtttccatgcaacaag

SEQ ID NO: 3458886 - DNA, 25 bp, Homo sapien
cagacacacttgtcgccttgacatc

SEQ ID NO: 3458887 - DNA, 25 bp, Homo sapien
tgtggtcttcctagactctctttaa

SEQ ID NO: 3458888 - DNA, 25 bp, Homo sapien
cacagacacacttgtcgccttgaca

SEQ ID NO: 3458889 - DNA, 25 bp, Homo sapien
caaacatggtccctgaagcatggat

SEQ ID NO: 3458890 - DNA, 25 bp, Homo sapien
tccatgactggccaagcaaggcaag

SEQ ID NO: 3458891 - DNA, 25 bp, Homo sapien
catctttgcatagtgctacggaagc

SEQ ID NO: 3458892 - DNA, 25 bp, Homo sapien
cacaatctgctattctctgcggagg

SEQ ID NO: 3458893 - DNA, 25 bp, Homo sapien
cattgatcactttgtctggctgtca

SEQ ID NO: 3458894 - DNA, 25 bp, Homo sapien
attgatcactttgtctggctgtcat

SEQ ID NO: 3458895 - DNA, 25 bp, Homo sapien
tcaccggctgccctatgagttgctg

SEQ ID NO: 3458896 - DNA, 25 bp, Homo sapien
ccctatgagttgctgctatagcttt

SEQ ID NO: 3458897 - DNA, 25 bp, Homo sapien
tgtattcaccggctgccctatgagt

SEQ ID NO: 3458898 - DNA, 25 bp, Homo sapien
ggactgcatgtattcaccggctgcc

SEQ ID NO: 3458899 - DNA, 25 bp, Homo sapien
gcctaagaaggtgcccgcgatccaa

SEQ ID NO: 3458900 - DNA, 25 bp, Homo sapien
tctgcctaagaaggtgcccgcgatc

SEQ ID NO: 3458901 - DNA, 25 bp, Homo sapien
tttctgcctaagaaggtgcccgcga

SEQ ID NO: 3458902 - DNA, 25 bp, Homo sapien
ttttctgcctaagaaggtgcccgcg

SEQ ID NO: 3458903 - DNA, 25 bp, Homo sapien
agcattgccaattttgaacacttca

SEQ ID NO: 3458904 - DNA, 25 bp, Homo sapien
ctacaagagtgatttgtgaaatctc

SEQ ID NO: 3458905 - DNA, 25 bp, Homo sapien
gatttgtgaaatctcagcattgcca

SEQ ID NO: 3458906 - DNA, 25 bp, Homo sapien
tgaacacttcatcaatcaaagtggc

SEQ ID NO: 3458907 - DNA, 25 bp, Homo sapien
tcaacccactggtgaacattcatgg

SEQ ID NO: 3458908 - DNA, 25 bp, Homo sapien
tgtcaacccactggtgaacattcat

SEQ ID NO: 3458909 - DNA, 25 bp, Homo sapien
ggtgaacattcatgggtgcagctgt

SEQ ID NO: 3458910 - DNA, 25 bp, Homo sapien
ccactggtgaacattcatgggtgca

SEQ ID NO: 3458911 - DNA, 25 bp, Homo sapien
caggagcatgatttataaaggctac

SEQ ID NO: 3458912 - DNA, 25 bp, Homo sapien
tcttgggtaagacttaatcacattc

SEQ ID NO: 3458913 - DNA, 25 bp, Homo sapien
ctcaggtcttgggtaagacttaatc

SEQ ID NO: 3458914 - DNA, 25 bp, Homo sapien
ggggatacagacatgcgtttgagct

SEQ ID NO: 3458915 - DNA, 25 bp, Homo sapien
ggtaagacttaatcacattcaacac

SEQ ID NO: 3458916 - DNA, 25 bp, Homo sapien
catcctccacagtagaatagacgtg

SEQ ID NO: 3458917 - DNA, 25 bp, Homo sapien
tggatttaaaatgatcatcctccac

SEQ ID NO: 3458918 - DNA, 25 bp, Homo sapien
cacagtagaatagacgtgcccctca

SEQ ID NO: 3458919 - DNA, 25 bp, Homo sapien
gatttaaaatgatcatcctccacag

SEQ ID NO: 3458920 - DNA, 25 bp, Homo sapien
cattgtaagccctcactgtgaagtg

SEQ ID NO: 3458921 - DNA, 25 bp, Homo sapien
ggttgcactcacttcactgctaggt

SEQ ID NO: 3458922 - DNA, 25 bp, Homo sapien
tcctgttaggatgacgaaagactca

SEQ ID NO: 3458923 - DNA, 25 bp, Homo sapien
taggtggcccatatccagctccatt

SEQ ID NO: 3458924 - DNA, 25 bp, Homo sapien
ctaatggtatgacgggttcccagcc

SEQ ID NO: 3458925 - DNA, 25 bp, Homo sapien
cacctgaggttgctaggtgcttgac

SEQ ID NO: 3458926 - DNA, 25 bp, Homo sapien
gattcgttggctaatggtatgacgg

SEQ ID NO: 3458927 - DNA, 25 bp, Homo sapien
ccagcccagagaaacctgagagcct

SEQ ID NO: 3458928 - DNA, 25 bp, Homo sapien
tctgggagtggtactactgcttgaa

SEQ ID NO: 3458929 - DNA, 25 bp, Homo sapien
agcatctgggagtggtactactgct

SEQ ID NO: 3458930 - DNA, 25 bp, Homo sapien
tcaataatatagactccagcatctg

SEQ ID NO: 3458931 - DNA, 25 bp, Homo sapien
aataatatagactccagcatctggg

SEQ ID NO: 3458932 - DNA, 25 bp, Homo sapien
tgagaactagctgttccatctcctc

SEQ ID NO: 3458933 - DNA, 25 bp, Homo sapien
tctcctccttcactatatgctcgaa

SEQ ID NO: 3458934 - DNA, 25 bp, Homo sapien
tatgatggtaccctaatttgagaac

SEQ ID NO: 3458935 - DNA, 25 bp, Homo sapien
atctcctccttcactatatgctcga

SEQ ID NO: 3458936 - DNA, 25 bp, Homo sapien
gaaaggcgagatgacaaagactcac

SEQ ID NO: 3458937 - DNA, 25 bp, Homo sapien
caggaagtgggttgcactgcccaaa

SEQ ID NO: 3458938 - DNA, 25 bp, Homo sapien
gctaagtagggtctgtgtctcaaat

SEQ ID NO: 3458939 - DNA, 25 bp, Homo sapien
tgtgaagcacatagccacttgtgag

SEQ ID NO: 3458940 - DNA, 25 bp, Homo sapien
tatgtgtatgattgcccctgtagac

SEQ ID NO: 3458941 - DNA, 25 bp, Homo sapien
tgtagaccctctagtgagacaggat

SEQ ID NO: 3458942 - DNA, 25 bp, Homo sapien
cagaaggcggcattattatcacaag

SEQ ID NO: 3458943 - DNA, 25 bp, Homo sapien
gactaatgagtgcaagatcgctcct

SEQ ID NO: 3458944 - DNA, 25 bp, Homo sapien
tgacgaagatgtggagagagagtga

SEQ ID NO: 3458945 - DNA, 25 bp, Homo sapien
caaggtgactgatgacgaagatgtg

SEQ ID NO: 3458946 - DNA, 25 bp, Homo sapien
gtcgactgtgcacttgtgatttttc

SEQ ID NO: 3458947 - DNA, 25 bp, Homo sapien
agagtgaagggtcgactgtgcactt

SEQ ID NO: 3458948 - DNA, 25 bp, Homo sapien
tttttaagttagcacccatgccagc

SEQ ID NO: 3458949 - DNA, 25 bp, Homo sapien
tcaaacagtgcatagctggctagac

SEQ ID NO: 3458950 - DNA, 25 bp, Homo sapien
taaactatacttgggagagctcatg

SEQ ID NO: 3458951 - DNA, 25 bp, Homo sapien
caaatggatggcacacactcggagt

SEQ ID NO: 3458952 - DNA, 25 bp, Homo sapien
acctacgtgtgctatctgatctttg

SEQ ID NO: 3458953 - DNA, 25 bp, Homo sapien
taaacctacgtgtgctatctgatct

SEQ ID NO: 3458954 - DNA, 25 bp, Homo sapien
cctacgtgtgctatctgatctttga

SEQ ID NO: 3458955 - DNA, 25 bp, Homo sapien
aacctacgtgtgctatctgatcttt

SEQ ID NO: 3458956 - DNA, 25 bp, Homo sapien
tctgcatggtctgagatgtaatggc

SEQ ID NO: 3458957 - DNA, 25 bp, Homo sapien
tgtctgcatggtctgagatgtaatg

SEQ ID NO: 3458958 - DNA, 25 bp, Homo sapien
tgagatgtaatggccataatcaatc

SEQ ID NO: 3458959 - DNA, 25 bp, Homo sapien
agatgtaatggccataatcaatcat

SEQ ID NO: 3458960 - DNA, 25 bp, Homo sapien
tttctctctgctactttcactttct

SEQ ID NO: 3458961 - DNA, 25 bp, Homo sapien
tttctctttctctctgctgcctcat

SEQ ID NO: 3458962 - DNA, 25 bp, Homo sapien
tctgctactttcactttctctctgc

SEQ ID NO: 3458963 - DNA, 25 bp, Homo sapien
gctactttcactttctctctgctac

SEQ ID NO: 3458964 - DNA, 25 bp, Homo sapien
ttgtgagtttggtttactggagtca

SEQ ID NO: 3458965 - DNA, 25 bp, Homo sapien
gtcattttccccacgcctaatcaat

SEQ ID NO: 3458966 - DNA, 25 bp, Homo sapien
aattgggtccctgtttgtacttcag

SEQ ID NO: 3458967 - DNA, 25 bp, Homo sapien
tgtttgtacttcagtcagttgtgag

SEQ ID NO: 3458968 - DNA, 25 bp, Homo sapien
tcgtgtgactgtaatttggtttccc

SEQ ID NO: 3458969 - DNA, 25 bp, Homo sapien
tgtgctcactaagcaatcgtgtgac

SEQ ID NO: 3458970 - DNA, 25 bp, Homo sapien
taactcggattctgtgctcactaag

SEQ ID NO: 3458971 - DNA, 25 bp, Homo sapien
caactcccttaactcggattctgtg

SEQ ID NO: 3458972 - DNA, 25 bp, Homo sapien
tgtaacgcaagaaagatccataagc

SEQ ID NO: 3458973 - DNA, 25 bp, Homo sapien
tctgtaacgcaagaaagatccataa

SEQ ID NO: 3458974 - DNA, 25 bp, Homo sapien
aaatctgtaacgcaagaaagatcca

SEQ ID NO: 3458975 - DNA, 25 bp, Homo sapien
tggcctccactcataaatactagcc

SEQ ID NO: 3458976 - DNA, 25 bp, Homo sapien
gtctgtgcttagagccatcctgctg

SEQ ID NO: 3458977 - DNA, 25 bp, Homo sapien
ccaaagtctgtgcttagagccatcc

SEQ ID NO: 3458978 - DNA, 25 bp, Homo sapien
tgtgcttagagccatcctgctgctg

SEQ ID NO: 3458979 - DNA, 25 bp, Homo sapien
tgctgctgtgcacaaatgctcacag

SEQ ID NO: 3458980 - DNA, 25 bp, Homo sapien
ttcacttcattaacaacatcactgt

SEQ ID NO: 3458981 - DNA, 25 bp, Homo sapien
gtttatggccaaatagagttgctgg

SEQ ID NO: 3458982 - DNA, 25 bp, Homo sapien
cactgaagtggtttatggccaaata

SEQ ID NO: 3458983 - DNA, 25 bp, Homo sapien
gtgttcttcatgtctagataaacca

SEQ ID NO: 3458984 - DNA, 25 bp, Homo sapien
gggtggtactgaatcaaatgtgttc

SEQ ID NO: 3458985 - DNA, 25 bp, Homo sapien
agccttccagattataaactccatg

SEQ ID NO: 3458986 - DNA, 25 bp, Homo sapien
gaagtctgtacttctgattggtcat

SEQ ID NO: 3458987 - DNA, 25 bp, Homo sapien
ctgtcaatggagccttccagattat

SEQ ID NO: 3458988 - DNA, 25 bp, Homo sapien
tataaactccatgaagtctgtactt

SEQ ID NO: 3458989 - DNA, 25 bp, Homo sapien
gcaggtgatggttcttgtttgcagt

SEQ ID NO: 3458990 - DNA, 25 bp, Homo sapien
tcttgaaggttgatatgggccatga

SEQ ID NO: 3458991 - DNA, 25 bp, Homo sapien
tttgcagttcaaggtacaaaagcag

SEQ ID NO: 3458992 - DNA, 25 bp, Homo sapien
tccacatatcttggcagacatttct

SEQ ID NO: 3458993 - DNA, 25 bp, Homo sapien
catctgctgtttagagccattggaa

SEQ ID NO: 3458994 - DNA, 25 bp, Homo sapien
aatccgcacctggtaatggccatga

SEQ ID NO: 3458995 - DNA, 25 bp, Homo sapien
cacagtgggaaatctatgctagcag

SEQ ID NO: 3458996 - DNA, 25 bp, Homo sapien
caagcatcccgattaagtgcctggg

SEQ ID NO: 3458997 - DNA, 25 bp, Homo sapien
tgctctgtgaaggctcatcttacac

SEQ ID NO: 3458998 - DNA, 25 bp, Homo sapien
tgtgtctcttctaaagctctctgtt

SEQ ID NO: 3458999 - DNA, 25 bp, Homo sapien
ggctcatcttacactgtttaagggt

SEQ ID NO: 3459000 - DNA, 25 bp, Homo sapien
gctctctgttcttggatctctataa

SEQ ID NO: 3459001 - DNA, 25 bp, Homo sapien
gattctctctggccagtgagtgttg

SEQ ID NO: 3459002 - DNA, 25 bp, Homo sapien
ttctctctggccagtgagtgttgca

SEQ ID NO: 3459003 - DNA, 25 bp, Homo sapien
cagctctgtcaggattctctctggc

SEQ ID NO: 3459004 - DNA, 25 bp, Homo sapien
tttttccccagctctgtcaggattc

SEQ ID NO: 3459005 - DNA, 25 bp, Homo sapien
accagcagccccatagtgaaggcag

SEQ ID NO: 3459006 - DNA, 25 bp, Homo sapien
aaaagccgggacaggaaatagtgca

SEQ ID NO: 3459007 - DNA, 25 bp, Homo sapien
tgaccagcagccccatagtgaaggc

SEQ ID NO: 3459008 - DNA, 25 bp, Homo sapien
ggctttctcaatgccagtcagagtg

SEQ ID NO: 3459009 - DNA, 25 bp, Homo sapien
aaccagtcagcaggtccggctggag

SEQ ID NO: 3459010 - DNA, 25 bp, Homo sapien
aagagtccaaccctttgcctctggg

SEQ ID NO: 3459011 - DNA, 25 bp, Homo sapien
gagttccacacaataccaggaatgg

SEQ ID NO: 3459012 - DNA, 25 bp, Homo sapien
tgtgcaaacccagtgcctctgtaag

SEQ ID NO: 3459013 - DNA, 25 bp, Homo sapien
cacatgtcccggcagtaagcaaaca

SEQ ID NO: 3459014 - DNA, 25 bp, Homo sapien
tgactggcaagtagttccacttttg

SEQ ID NO: 3459015 - DNA, 25 bp, Homo sapien
tttggttcataaggaggctgtgcaa

SEQ ID NO: 3459016 - DNA, 25 bp, Homo sapien
cactgtcctccgaaagctggaactg

SEQ ID NO: 3459017 - DNA, 25 bp, Homo sapien
gttgtaataacctggaagacatagg

SEQ ID NO: 3459018 - DNA, 25 bp, Homo sapien
cagagctggttgtaataacctggaa

SEQ ID NO: 3459019 - DNA, 25 bp, Homo sapien
caggtgctgaaggtgttttaggcat

SEQ ID NO: 3459020 - DNA, 25 bp, Homo sapien
ctggaagacataggtgtagcaggtg

SEQ ID NO: 3459021 - DNA, 25 bp, Homo sapien
tcaagcatgcttatgactgctccta

SEQ ID NO: 3459022 - DNA, 25 bp, Homo sapien
tttcaagcatgcttatgactgctcc

SEQ ID NO: 3459023 - DNA, 25 bp, Homo sapien
tgttgagctcatctattgtgtgtgt

SEQ ID NO: 3459024 - DNA, 25 bp, Homo sapien
gtttcaagcatgcttatgactgctc

SEQ ID NO: 3459025 - DNA, 25 bp, Homo sapien
ttcttctcgttctaactctctggcc

SEQ ID NO: 3459026 - DNA, 25 bp, Homo sapien
ttcctttcttctcgttctaactctc

SEQ ID NO: 3459027 - DNA, 25 bp, Homo sapien
tgagctgtcccgcatacctctctgt

SEQ ID NO: 3459028 - DNA, 25 bp, Homo sapien
ctctggcccttaactctgtctcagc

SEQ ID NO: 3459029 - DNA, 25 bp, Homo sapien
acggacatatctgagatcagagaac

SEQ ID NO: 3459030 - DNA, 25 bp, Homo sapien
gcccaggcagatgacggacatatct

SEQ ID NO: 3459031 - DNA, 25 bp, Homo sapien
ctgttagcaagctgaccagtgccca

SEQ ID NO: 3459032 - DNA, 25 bp, Homo sapien
gttagcaagctgaccagtgcccagg

SEQ ID NO: 3459033 - DNA, 25 bp, Homo sapien
ttgactttggggacatcatgaccac

SEQ ID NO: 3459034 - DNA, 25 bp, Homo sapien
aagatgtggctccagtgaaaattca

SEQ ID NO: 3459035 - DNA, 25 bp, Homo sapien
atagcaaagatgtggctccagtgaa

SEQ ID NO: 3459036 - DNA, 25 bp, Homo sapien
aaactttgactttggggacatcatg

SEQ ID NO: 3459037 - DNA, 25 bp, Homo sapien
taggcacccagacgtcatgtccatc

SEQ ID NO: 3459038 - DNA, 25 bp, Homo sapien
gcacccagacgtcatgtccatctga

SEQ ID NO: 3459039 - DNA, 25 bp, Homo sapien
aggtaggcacccagacgtcatgtcc

SEQ ID NO: 3459040 - DNA, 25 bp, Homo sapien
gtcagaggtaggcacccagacgtca

SEQ ID NO: 3459041 - DNA, 25 bp, Homo sapien
tgaacctggacattcctaaccagtg

SEQ ID NO: 3459042 - DNA, 25 bp, Homo sapien
gtagtagccctccattccctaaatg

SEQ ID NO: 3459043 - DNA, 25 bp, Homo sapien
tgtgttgcgcattcatggctctgct

SEQ ID NO: 3459044 - DNA, 25 bp, Homo sapien
tccctaaatgctatgtgtgttgcgc

SEQ ID NO: 3459045 - DNA, 25 bp, Homo sapien
gagctctgttccttgacattgtgtt

SEQ ID NO: 3459046 - DNA, 25 bp, Homo sapien
agcctcctcagttggtgagctctgt

SEQ ID NO: 3459047 - DNA, 25 bp, Homo sapien
tcctcagttggtgagctctgttcct

SEQ ID NO: 3459048 - DNA, 25 bp, Homo sapien
tgagctctgttccttgacattgtgt

SEQ ID NO: 3459049 - DNA, 25 bp, Homo sapien
tgctgttgctctggcagtcttagga

SEQ ID NO: 3459050 - DNA, 25 bp, Homo sapien
ttcaggggtcctctgattgctaccc

SEQ ID NO: 3459051 - DNA, 25 bp, Homo sapien
tgattgctacccttattgctgttgc

SEQ ID NO: 3459052 - DNA, 25 bp, Homo sapien
gttgctctggcagtcttaggagacc

SEQ ID NO: 3459053 - DNA, 25 bp, Homo sapien
ttaaagggcagaggtccatagttca

SEQ ID NO: 3459054 - DNA, 25 bp, Homo sapien
cagaggtccatagttcagcagggct

SEQ ID NO: 3459055 - DNA, 25 bp, Homo sapien
cagcagggctcttaattacagggtc

SEQ ID NO: 3459056 - DNA, 25 bp, Homo sapien
attacagggtccctggatttgcaaa

SEQ ID NO: 3459057 - DNA, 25 bp, Homo sapien
ctgttaaatactgggagatcctcat

SEQ ID NO: 3459058 - DNA, 25 bp, Homo sapien
ttctctccagtgctcggagcatgaa

SEQ ID NO: 3459059 - DNA, 25 bp, Homo sapien
tgctcggagcatgaaagttttcttc

SEQ ID NO: 3459060 - DNA, 25 bp, Homo sapien
cagtgctcggagcatgaaagttttc

SEQ ID NO: 3459061 - DNA, 25 bp, Homo sapien
gcaggaagccttataaccaaatctt

SEQ ID NO: 3459062 - DNA, 25 bp, Homo sapien
tgccatgggcaagacgccaggacct

SEQ ID NO: 3459063 - DNA, 25 bp, Homo sapien
agcaatgctgatgatcttcttgctg

SEQ ID NO: 3459064 - DNA, 25 bp, Homo sapien
gtcagcaatgctgatgatcttcttg

SEQ ID NO: 3459065 - DNA, 25 bp, Homo sapien
ccacagtcagcaatgctgatgatct

SEQ ID NO: 3459066 - DNA, 25 bp, Homo sapien
caaagatgataggatactgtgagca

SEQ ID NO: 3459067 - DNA, 25 bp, Homo sapien
tgataggatactgtgagcaaacggg

SEQ ID NO: 3459068 - DNA, 25 bp, Homo sapien
agcacaaagatgataggatactgtg

SEQ ID NO: 3459069 - DNA, 25 bp, Homo sapien
agatgataggatactgtgagcaaac

SEQ ID NO: 3459070 - DNA, 25 bp, Homo sapien
agtgcttgctgtcctagaggacaga

SEQ ID NO: 3459071 - DNA, 25 bp, Homo sapien
tgcttgctgtcctagaggacagatt

SEQ ID NO: 3459072 - DNA, 25 bp, Homo sapien
ttgctgtcctagaggacagattctg

SEQ ID NO: 3459073 - DNA, 25 bp, Homo sapien
cagtgcttgctgtcctagaggacag

SEQ ID NO: 3459074 - DNA, 25 bp, Homo sapien
aggataaattccacagcgtgtagat

SEQ ID NO: 3459075 - DNA, 25 bp, Homo sapien
caattatggttacaccttcactggg

SEQ ID NO: 3459076 - DNA, 25 bp, Homo sapien
tcaatttcccagcattttggctctg

SEQ ID NO: 3459077 - DNA, 25 bp, Homo sapien
tttggctctgcctttcaattatggt

SEQ ID NO: 3459078 - DNA, 25 bp, Homo sapien
caactctcttgacagtcgtcggcgt

SEQ ID NO: 3459079 - DNA, 25 bp, Homo sapien
tggacgcatcgtcgttcggaacgcg

SEQ ID NO: 3459080 - DNA, 25 bp, Homo sapien
gcaggaaagtttctctcacggcgcg

SEQ ID NO: 3459081 - DNA, 25 bp, Homo sapien
ggcgcgagtcccctcaggttgttgt

SEQ ID NO: 3459082 - DNA, 25 bp, Homo sapien
tgggctgtccaagtaggaatcgctg

SEQ ID NO: 3459083 - DNA, 25 bp, Homo sapien
ccaatgagcagagagccgtccttaa

SEQ ID NO: 3459084 - DNA, 25 bp, Homo sapien
aatgagcagagagccgtccttaatg

SEQ ID NO: 3459085 - DNA, 25 bp, Homo sapien
ctgaaatctgggctgtccaagtagg

SEQ ID NO: 3459086 - DNA, 25 bp, Homo sapien
catcatcaacataatcggtgccatc

SEQ ID NO: 3459087 - DNA, 25 bp, Homo sapien
tcatcaacataatcggtgccatctt

SEQ ID NO: 3459088 - DNA, 25 bp, Homo sapien
ccacatcatcaacataatcggtgcc

SEQ ID NO: 3459089 - DNA, 25 bp, Homo sapien
catcaacataatcggtgccatcttc

SEQ ID NO: 3459090 - DNA, 25 bp, Homo sapien
acctgacctgagagttatctttcaa

SEQ ID NO: 3459091 - DNA, 25 bp, Homo sapien
tcaattgacatcttgcttctgcatc

SEQ ID NO: 3459092 - DNA, 25 bp, Homo sapien
gacctgagagttatctttcaattga

SEQ ID NO: 3459093 - DNA, 25 bp, Homo sapien
caattgacatcttgcttctgcatcc

SEQ ID NO: 3459094 - DNA, 25 bp, Homo sapien
gctcagttttgcacatacgccaagg

SEQ ID NO: 3459095 - DNA, 25 bp, Homo sapien
aaatgaatgcgtagggagatctccc

SEQ ID NO: 3459096 - DNA, 25 bp, Homo sapien
ggttaaaccattgcaggacatcctg

SEQ ID NO: 3459097 - DNA, 25 bp, Homo sapien
gatatctccctcgaagacacgctga

SEQ ID NO: 3459098 - DNA, 25 bp, Homo sapien
tcaggccagttcatgcagagtaaat

SEQ ID NO: 3459099 - DNA, 25 bp, Homo sapien
gtctaagctgttgaaatcccctatg

SEQ ID NO: 3459100 - DNA, 25 bp, Homo sapien
caagactgcttctccgtggtttcct

SEQ ID NO: 3459101 - DNA, 25 bp, Homo sapien
tgagagaacctgagtgccaggacag

SEQ ID NO: 3459102 - DNA, 25 bp, Homo sapien
tgaattaaggagtgacttactggat

SEQ ID NO: 3459103 - DNA, 25 bp, Homo sapien
ggagtgacttactggattttcccat

SEQ ID NO: 3459104 - DNA, 25 bp, Homo sapien
ctgctgaattgaattaaggagtgac

SEQ ID NO: 3459105 - DNA, 25 bp, Homo sapien
gcaatcagtaaaaggctgctgaatt

SEQ ID NO: 3459106 - DNA, 25 bp, Homo sapien
taaagtgacattattggagtcactt

SEQ ID NO: 3459107 - DNA, 25 bp, Homo sapien
gtgacattattggagtcacttttgg

SEQ ID NO: 3459108 - DNA, 25 bp, Homo sapien
gaaacataagggggattccactcac

SEQ ID NO: 3459109 - DNA, 25 bp, Homo sapien
ttcagaaacataagggggattccac

SEQ ID NO: 3459110 - DNA, 25 bp, Homo sapien
ctgtaatgtcagatcctttagatga

SEQ ID NO: 3459111 - DNA, 25 bp, Homo sapien
tcttttgtctgtaatgtcagatcct

SEQ ID NO: 3459112 - DNA, 25 bp, Homo sapien
ctctcttttgtctgtaatgtcagat

SEQ ID NO: 3459113 - DNA, 25 bp, Homo sapien
ttgtctgtaatgtcagatcctttag

SEQ ID NO: 3459114 - DNA, 25 bp, Homo sapien
tgttcatggcatgaatgatactgcc

SEQ ID NO: 3459115 - DNA, 25 bp, Homo sapien
ggaaccattctacatcaaactctgc

SEQ ID NO: 3459116 - DNA, 25 bp, Homo sapien
cagctgccaggagcaatgtacctac

SEQ ID NO: 3459117 - DNA, 25 bp, Homo sapien
gcactttagtatcagacagacaggt

SEQ ID NO: 3459118 - DNA, 25 bp, Homo sapien
tacaccctagcatttatcactaacc

SEQ ID NO: 3459119 - DNA, 25 bp, Homo sapien
tatttaactcactaatctgccaccc

SEQ ID NO: 3459120 - DNA, 25 bp, Homo sapien
cactaacccgtagcatatttaactc

SEQ ID NO: 3459121 - DNA, 25 bp, Homo sapien
cacactcttacaccctagcatttat

SEQ ID NO: 3459122 - DNA, 25 bp, Homo sapien
agggacccagcccattgtgattcaa

SEQ ID NO: 3459123 - DNA, 25 bp, Homo sapien
gacccagcccattgtgattcaaggt

SEQ ID NO: 3459124 - DNA, 25 bp, Homo sapien
aagtttgggaaccagttgctacgag

SEQ ID NO: 3459125 - DNA, 25 bp, Homo sapien
acattcagatgttgtgtagtgcagg

SEQ ID NO: 3459126 - DNA, 25 bp, Homo sapien
gacaatgagctgacaatggctacca

SEQ ID NO: 3459127 - DNA, 25 bp, Homo sapien
tcattcatgcacatctagggcctga

SEQ ID NO: 3459128 - DNA, 25 bp, Homo sapien
caaggactctccagataatgaacaa

SEQ ID NO: 3459129 - DNA, 25 bp, Homo sapien
tagggcctgataccttcaacctgat

SEQ ID NO: 3459130 - DNA, 25 bp, Homo sapien
ggaaaagcattatccctaacctcaa

SEQ ID NO: 3459131 - DNA, 25 bp, Homo sapien
aacttagattcagtgagtcatagtg

SEQ ID NO: 3459132 - DNA, 25 bp, Homo sapien
taatgacattatatagagcatgaca

SEQ ID NO: 3459133 - DNA, 25 bp, Homo sapien
gcctggccaaagacgatatattgta

SEQ ID NO: 3459134 - DNA, 25 bp, Homo sapien
tacgtctggctgtagagctttccaa

SEQ ID NO: 3459135 - DNA, 25 bp, Homo sapien
gaattccaactgtgtcaacttgtgc

SEQ ID NO: 3459136 - DNA, 25 bp, Homo sapien
tgatctgtacacagagagcaactgc

SEQ ID NO: 3459137 - DNA, 25 bp, Homo sapien
caaactttggaagacatgttatctc

SEQ ID NO: 3459138 - DNA, 25 bp, Homo sapien
cttctaggctagtgaaagatgtcat

SEQ ID NO: 3459139 - DNA, 25 bp, Homo sapien
ttcaaactggaaatcttgcaatgac

SEQ ID NO: 3459140 - DNA, 25 bp, Homo sapien
tggaaatcttgcaatgactgggaaa

SEQ ID NO: 3459141 - DNA, 25 bp, Homo sapien
tcagcatcaccaatacattcaaact

SEQ ID NO: 3459142 - DNA, 25 bp, Homo sapien
catcaccaatacattcaaactggaa

SEQ ID NO: 3459143 - DNA, 25 bp, Homo sapien
gctcatttatccttagagaagggag

SEQ ID NO: 3459144 - DNA, 25 bp, Homo sapien
ctgcagctcatttatccttagagaa

SEQ ID NO: 3459145 - DNA, 25 bp, Homo sapien
gggagggcaatggcctcttgatgct

SEQ ID NO: 3459146 - DNA, 25 bp, Homo sapien
catttatccttagagaagggagggc

SEQ ID NO: 3459147 - DNA, 25 bp, Homo sapien
tccttcacattccacaggctgaagc

SEQ ID NO: 3459148 - DNA, 25 bp, Homo sapien
tcccagcactccttcacattccaca

SEQ ID NO: 3459149 - DNA, 25 bp, Homo sapien
ccacaggctgaagcatcccattcat

SEQ ID NO: 3459150 - DNA, 25 bp, Homo sapien
cattccacaggctgaagcatcccat

SEQ ID NO: 3459151 - DNA, 25 bp, Homo sapien
tactgcaatgagtagtcttgcaaat

SEQ ID NO: 3459152 - DNA, 25 bp, Homo sapien
cagtcttcgcctttcttcttctact

SEQ ID NO: 3459153 - DNA, 25 bp, Homo sapien
cttcgcctttcttcttctactgcaa

SEQ ID NO: 3459154 - DNA, 25 bp, Homo sapien
tctactgcaatgagtagtcttgcaa

SEQ ID NO: 3459155 - DNA, 25 bp, Homo sapien
tctataactagagcccagacagggt

SEQ ID NO: 3459156 - DNA, 25 bp, Homo sapien
ctagatggcaacttcttccaaggga

SEQ ID NO: 3459157 - DNA, 25 bp, Homo sapien
acatgagagtcagcccatcctttga

SEQ ID NO: 3459158 - DNA, 25 bp, Homo sapien
tatgaaccaaccactactagctcca

SEQ ID NO: 3459159 - DNA, 25 bp, Homo sapien
tcatctccatggcttataagatact

SEQ ID NO: 3459160 - DNA, 25 bp, Homo sapien
tcctctccttggtcgctgtccttga

SEQ ID NO: 3459161 - DNA, 25 bp, Homo sapien
gcttataagatactctaacacattc

SEQ ID NO: 3459162 - DNA, 25 bp, Homo sapien
ggtcgctgtccttgactctgtcatc

SEQ ID NO: 3459163 - DNA, 25 bp, Homo sapien
tgtgggccctctcacagataaatga

SEQ ID NO: 3459164 - DNA, 25 bp, Homo sapien
aaatgagtatcctgggtgacacaca

SEQ ID NO: 3459165 - DNA, 25 bp, Homo sapien
gaatgaggccgataagcaaatgaga

SEQ ID NO: 3459166 - DNA, 25 bp, Homo sapien
gaagaagccagctaacagaatgagg

SEQ ID NO: 3459167 - DNA, 25 bp, Homo sapien
aagtgaccttagctgggccaatcag

SEQ ID NO: 3459168 - DNA, 25 bp, Homo sapien
ttggtcaagcgtctttaagtgacct

SEQ ID NO: 3459169 - DNA, 25 bp, Homo sapien
tctttaagtgaccttagctgggcca

SEQ ID NO: 3459170 - DNA, 25 bp, Homo sapien
ttaagtgaccttagctgggccaatc

SEQ ID NO: 3459171 - DNA, 25 bp, Homo sapien
caaatcctacagtttacagcttgtg

SEQ ID NO: 3459172 - DNA, 25 bp, Homo sapien
caaaagatataagcagaacctggct

SEQ ID NO: 3459173 - DNA, 25 bp, Homo sapien
ggagcaatatccagcccagagaaag

SEQ ID NO: 3459174 - DNA, 25 bp, Homo sapien
ttttgaccagagttgtattctcagc

SEQ ID NO: 3459175 - DNA, 25 bp, Homo sapien
gtggtgtgatctcgatcttggctca

SEQ ID NO: 3459176 - DNA, 25 bp, Homo sapien
agtggtgtgatctcgatcttggctc

SEQ ID NO: 3459177 - DNA, 25 bp, Homo sapien
gcctcccagattcaagtgattctcc

SEQ ID NO: 3459178 - DNA, 25 bp, Homo sapien
ctgcaacctctgcctcccagattca

SEQ ID NO: 3459179 - DNA, 25 bp, Homo sapien
gaaggctcctacatatctgtacata

SEQ ID NO: 3459180 - DNA, 25 bp, Homo sapien
gaatagcttagcactatctctttgg

SEQ ID NO: 3459181 - DNA, 25 bp, Homo sapien
tccctccagtttgtgccatgtaaga

SEQ ID NO: 3459182 - DNA, 25 bp, Homo sapien
gagaacggcctaatattagaaatgg

SEQ ID NO: 3459183 - DNA, 25 bp, Homo sapien
aacaacaccaagaagtttgccatgg

SEQ ID NO: 3459184 - DNA, 25 bp, Homo sapien
tcatttttatcgcctgctttttggg

SEQ ID NO: 3459185 - DNA, 25 bp, Homo sapien
ccatggaaatgtcaggctattctca

SEQ ID NO: 3459186 - DNA, 25 bp, Homo sapien
caagctccagttacaacaacaccaa

SEQ ID NO: 3459187 - DNA, 25 bp, Homo sapien
tttgtgaactgcaaaactttccact

SEQ ID NO: 3459188 - DNA, 25 bp, Homo sapien
ctttgtgaactgcaaaactttccac

SEQ ID NO: 3459189 - DNA, 25 bp, Homo sapien
caggtaaacatttccactgtgggtt

SEQ ID NO: 3459190 - DNA, 25 bp, Homo sapien
gcctccacaactatgactttgccaa

SEQ ID NO: 3459191 - DNA, 25 bp, Homo sapien
cctcagcttctataccccatggtat

SEQ ID NO: 3459192 - DNA, 25 bp, Homo sapien
gaaagttcttgcttgatacttaaag

SEQ ID NO: 3459193 - DNA, 25 bp, Homo sapien
gacccctggaatgttaagagccatg

SEQ ID NO: 3459194 - DNA, 25 bp, Homo sapien
cacttagcggcaagtgagaccactt

SEQ ID NO: 3459195 - DNA, 25 bp, Homo sapien
ccatgtggtgaaggagagaacctat

SEQ ID NO: 3459196 - DNA, 25 bp, Homo sapien
tgctcagtgataggcagcagtcctt

SEQ ID NO: 3459197 - DNA, 25 bp, Homo sapien
tgaacaatatggcagtcactggcca

SEQ ID NO: 3459198 - DNA, 25 bp, Homo sapien
aacaatatggcagtcactggccacc

SEQ ID NO: 3459199 - DNA, 25 bp, Homo sapien
tcactgaacaatatggcagtcactg

SEQ ID NO: 3459200 - DNA, 25 bp, Homo sapien
actgaacaatatggcagtcactggc

SEQ ID NO: 3459201 - DNA, 25 bp, Homo sapien
tatctaacaagcactcaggcgaggc

SEQ ID NO: 3459202 - DNA, 25 bp, Homo sapien
tgttcagtaggtccgcagcaagcct

SEQ ID NO: 3459203 - DNA, 25 bp, Homo sapien
tgaccttgcccgagctgacaaattg

SEQ ID NO: 3459204 - DNA, 25 bp, Homo sapien
gaaatagtaaccgtggtgcccacca

SEQ ID NO: 3459205 - DNA, 25 bp, Homo sapien
ggacgtgcatggagcagtgaggatg

SEQ ID NO: 3459206 - DNA, 25 bp, Homo sapien
gcagtgaggatggaacgggacacca

SEQ ID NO: 3459207 - DNA, 25 bp, Homo sapien
aggatggaacgggacaccagcctag

SEQ ID NO: 3459208 - DNA, 25 bp, Homo sapien
agggacgtgcatggagcagtgagga

SEQ ID NO: 3459209 - DNA, 25 bp, Homo sapien
taacccctagttagctccatgtatc

SEQ ID NO: 3459210 - DNA, 25 bp, Homo sapien
ccacacatctaaaagttgacagtat

SEQ ID NO: 3459211 - DNA, 25 bp, Homo sapien
ggtctctctgggtcacaccacacat

SEQ ID NO: 3459212 - DNA, 25 bp, Homo sapien
gacagtatggtctggcactacagtc

SEQ ID NO: 3459213 - DNA, 25 bp, Homo sapien
tttcatgaagactttgctccatgct

SEQ ID NO: 3459214 - DNA, 25 bp, Homo sapien
taccacactgtttggcctaccaaga

SEQ ID NO: 3459215 - DNA, 25 bp, Homo sapien
tagcgccgtctttgctgtatccaag

SEQ ID NO: 3459216 - DNA, 25 bp, Homo sapien
gatttctacgccttctttcatgaag

SEQ ID NO: 3459217 - DNA, 25 bp, Homo sapien
aatccttgcctaagacaatctctaa

SEQ ID NO: 3459218 - DNA, 25 bp, Homo sapien
tccttgcctaagacaatctctaaaa

SEQ ID NO: 3459219 - DNA, 25 bp, Homo sapien
atccttgcctaagacaatctctaaa

SEQ ID NO: 3459220 - DNA, 25 bp, Homo sapien
attttggaaatgaatcttgaagaag

SEQ ID NO: 3459221 - DNA, 25 bp, Homo sapien
ttttggaaatgaatcttgaagaagc

SEQ ID NO: 3459222 - DNA, 25 bp, Homo sapien
tttggaaatgaatcttgaagaagca

SEQ ID NO: 3459223 - DNA, 25 bp, Homo sapien
cattttggaaatgaatcttgaagaa

SEQ ID NO: 3459224 - DNA, 25 bp, Homo sapien
tctcaagtggtgcaattaatacatc

SEQ ID NO: 3459225 - DNA, 25 bp, Homo sapien
ttctcaagtggtgcaattaatacat

SEQ ID NO: 3459226 - DNA, 25 bp, Homo sapien
tttctcaagtggtgcaattaataca

SEQ ID NO: 3459227 - DNA, 25 bp, Homo sapien
ttatgtctaaaagaagtccagtctt

SEQ ID NO: 3459228 - DNA, 25 bp, Homo sapien
taattatcaggagaataactgaaga

SEQ ID NO: 3459229 - DNA, 25 bp, Homo sapien
tctactcagtagaataataacatct

SEQ ID NO: 3459230 - DNA, 25 bp, Homo sapien
tttataacatgcttcttatctactc

SEQ ID NO: 3459231 - DNA, 25 bp, Homo sapien
ttggttataaacatcctgggtcctc

SEQ ID NO: 3459232 - DNA, 25 bp, Homo sapien
cctgaaatccagagggacattcccg

SEQ ID NO: 3459233 - DNA, 25 bp, Homo sapien
taagcacctagaagatagaattccc

SEQ ID NO: 3459234 - DNA, 25 bp, Homo sapien
tatatcagtaggtggttcaacaacc

SEQ ID NO: 3459235 - DNA, 25 bp, Homo sapien
caaggacgttgtaaagatagagaaa

SEQ ID NO: 3459236 - DNA, 25 bp, Homo sapien
taaggcaaactaatctacatgcatg

SEQ ID NO: 3459237 - DNA, 25 bp, Homo sapien
tagatgccttcttgctaggtacccc

SEQ ID NO: 3459238 - DNA, 25 bp, Homo sapien
gatgcagggatagtatagtgcccag

SEQ ID NO: 3459239 - DNA, 25 bp, Homo sapien
gactactggaaacccaatgaccctg

SEQ ID NO: 3459240 - DNA, 25 bp, Homo sapien
tgtcagggccaaactaggtatcatg

SEQ ID NO: 3459241 - DNA, 25 bp, Homo sapien
cctatggagacgtttcaagcagagc

SEQ ID NO: 3459242 - DNA, 25 bp, Homo sapien
taatgcgtatagcaatgtcagggcc

SEQ ID NO: 3459243 - DNA, 25 bp, Homo sapien
ttaactgcagggtagaaaactcatc

SEQ ID NO: 3459244 - DNA, 25 bp, Homo sapien
cttaactgcagggtagaaaactcat

SEQ ID NO: 3459245 - DNA, 25 bp, Homo sapien
ccttaactgcagggtagaaaactca

SEQ ID NO: 3459246 - DNA, 25 bp, Homo sapien
gaatggtgggtctcatccttcccgt

SEQ ID NO: 3459247 - DNA, 25 bp, Homo sapien
gctgggcaccgggttactaactcca

SEQ ID NO: 3459248 - DNA, 25 bp, Homo sapien
gaacaggacctgataaagcggatgg

SEQ ID NO: 3459249 - DNA, 25 bp, Homo sapien
ggccaccaaccgtgttcttcatgtg

SEQ ID NO: 3459250 - DNA, 25 bp, Homo sapien
gtgaacaaggagcactgccaaaagt

SEQ ID NO: 3459251 - DNA, 25 bp, Homo sapien
ctctaaagaatggtccagcttggga

SEQ ID NO: 3459252 - DNA, 25 bp, Homo sapien
tgaacaaggtgggtcaagagttaag

SEQ ID NO: 3459253 - DNA, 25 bp, Homo sapien
gatataagaaaaccagcacgagccc

SEQ ID NO: 3459254 - DNA, 25 bp, Homo sapien
ggtgattccacccaacaactcctaa

SEQ ID NO: 3459255 - DNA, 25 bp, Homo sapien
ccaagggatcttggcatccagaagc

SEQ ID NO: 3459256 - DNA, 25 bp, Homo sapien
gcttctttctggagggttgtaccat

SEQ ID NO: 3459257 - DNA, 25 bp, Homo sapien
aaaatattggtgtggcttgcacagc

SEQ ID NO: 3459258 - DNA, 25 bp, Homo sapien
tctgatggtgggatgtactccttgc

SEQ ID NO: 3459259 - DNA, 25 bp, Homo sapien
gatgtactccttgcctagagtggca

SEQ ID NO: 3459260 - DNA, 25 bp, Homo sapien
tcccagaagggccagttgctagcac

SEQ ID NO: 3459261 - DNA, 25 bp, Homo sapien
cacagtccatcccacgttgtttagg

SEQ ID NO: 3459262 - DNA, 25 bp, Homo sapien
gaatggctggtcagaaaaccacaga

SEQ ID NO: 3459263 - DNA, 25 bp, Homo sapien
ggaatgattataccctgctggtgga

SEQ ID NO: 3459264 - DNA, 25 bp, Homo sapien
cattagatcaaaaagttacctgcac

SEQ ID NO: 3459265 - DNA, 25 bp, Homo sapien
tacaagatgggattacccaaaggga

SEQ ID NO: 3459266 - DNA, 25 bp, Homo sapien
gcttttcaaggatagagtaatattt

SEQ ID NO: 3459267 - DNA, 25 bp, Homo sapien
aaatgagactcctttttctttgcgg

SEQ ID NO: 3459268 - DNA, 25 bp, Homo sapien
taaatgcttttcaaggatagagtaa

SEQ ID NO: 3459269 - DNA, 25 bp, Homo sapien
tctttgcggacaaatttaaatgctt

SEQ ID NO: 3459270 - DNA, 25 bp, Homo sapien
ttctgatgttctcggtcaatttgtg

SEQ ID NO: 3459271 - DNA, 25 bp, Homo sapien
gatgttctcggtcaatttgtgtatc

SEQ ID NO: 3459272 - DNA, 25 bp, Homo sapien
aagttctgatgttctcggtcaattt

SEQ ID NO: 3459273 - DNA, 25 bp, Homo sapien
aaagacatattctaatgatgcttca

SEQ ID NO: 3459274 - DNA, 25 bp, Homo sapien
cacaaagcaccataaggcactataa

SEQ ID NO: 3459275 - DNA, 25 bp, Homo sapien
aggcactataagaaatcaaaatgtt

SEQ ID NO: 3459276 - DNA, 25 bp, Homo sapien
caaagcaccataaggcactataaga

SEQ ID NO: 3459277 - DNA, 25 bp, Homo sapien
aacacaaagcaccataaggcactat

SEQ ID NO: 3459278 - DNA, 25 bp, Homo sapien
tcatatccctcatggtaaaaagtaa

SEQ ID NO: 3459279 - DNA, 25 bp, Homo sapien
ggttagacgggtaatatgctgagat

SEQ ID NO: 3459280 - DNA, 25 bp, Homo sapien
cgggtaatatgctgagattgtaaca

SEQ ID NO: 3459281 - DNA, 25 bp, Homo sapien
tagacgggtaatatgctgagattgt

SEQ ID NO: 3459282 - DNA, 25 bp, Homo sapien
gacgggtaatatgctgagattgtaa

SEQ ID NO: 3459283 - DNA, 25 bp, Homo sapien
tagccttccatcgtccactggctgg

SEQ ID NO: 3459284 - DNA, 25 bp, Homo sapien
gatagccttccatcgtccactggct

SEQ ID NO: 3459285 - DNA, 25 bp, Homo sapien
gccttccatcgtccactggctgggt

SEQ ID NO: 3459286 - DNA, 25 bp, Homo sapien
ccttccatcgtccactggctgggtg

SEQ ID NO: 3459287 - DNA, 25 bp, Homo sapien
tcataagagacgtgaaattatgtct

SEQ ID NO: 3459288 - DNA, 25 bp, Homo sapien
cgtgaaattatgtctttgtgactca

SEQ ID NO: 3459289 - DNA, 25 bp, Homo sapien
ctaagtcataagagacgtgaaatta

SEQ ID NO: 3459290 - DNA, 25 bp, Homo sapien
agagacgtgaaattatgtctttgtg

SEQ ID NO: 3459291 - DNA, 25 bp, Homo sapien
tttcacattggtccacgatgggctg

SEQ ID NO: 3459292 - DNA, 25 bp, Homo sapien
tggaaactcacacacaactgtttct

SEQ ID NO: 3459293 - DNA, 25 bp, Homo sapien
tcaccaaaaacagcacgagaatgat

SEQ ID NO: 3459294 - DNA, 25 bp, Homo sapien
accaaaaacagcacgagaatgatgc

SEQ ID NO: 3459295 - DNA, 25 bp, Homo sapien
tgaaacactcattgtaaatgtttta

SEQ ID NO: 3459296 - DNA, 25 bp, Homo sapien
ctgaaacactcattgtaaatgtttt

SEQ ID NO: 3459297 - DNA, 25 bp, Homo sapien
catttccggtgagctagtaacaagg

SEQ ID NO: 3459298 - DNA, 25 bp, Homo sapien
acatttccggtgagctagtaacaag

SEQ ID NO: 3459299 - DNA, 25 bp, Homo sapien
aacatttccggtgagctagtaacaa

SEQ ID NO: 3459300 - DNA, 25 bp, Homo sapien
ggcctgtaacgtgatgatcccatgc

SEQ ID NO: 3459301 - DNA, 25 bp, Homo sapien
caagccagagtttcctattagcttc

SEQ ID NO: 3459302 - DNA, 25 bp, Homo sapien
gaaggcctgtaacgtgatgatccca

SEQ ID NO: 3459303 - DNA, 25 bp, Homo sapien
ctgagaaggcctgtaacgtgatgat

SEQ ID NO: 3459304 - DNA, 25 bp, Homo sapien
cttgcttataatggcaggcagagta

SEQ ID NO: 3459305 - DNA, 25 bp, Homo sapien
ctttcttgcttataatggcaggcag

SEQ ID NO: 3459306 - DNA, 25 bp, Homo sapien
cttctttcttgcttataatggcagg

SEQ ID NO: 3459307 - DNA, 25 bp, Homo sapien
gcttataatggcaggcagagtataa

SEQ ID NO: 3459308 - DNA, 25 bp, Homo sapien
ccacagcttgaatgcattttctcac

SEQ ID NO: 3459309 - DNA, 25 bp, Homo sapien
tccacagcttgaatgcattttctca

SEQ ID NO: 3459310 - DNA, 25 bp, Homo sapien
attttctcacaaagttgaaccctgc

SEQ ID NO: 3459311 - DNA, 25 bp, Homo sapien
cacaaagttgaaccctgcttcattc

SEQ ID NO: 3459312 - DNA, 25 bp, Homo sapien
aggaaaatcacaagaaaacggcttg

SEQ ID NO: 3459313 - DNA, 25 bp, Homo sapien
ctaataggaaggaaaatcacaagaa

SEQ ID NO: 3459314 - DNA, 25 bp, Homo sapien
atcacaagaaaacggcttgagatac

SEQ ID NO: 3459315 - DNA, 25 bp, Homo sapien
aaatcacaagaaaacggcttgagat

SEQ ID NO: 3459316 - DNA, 25 bp, Homo sapien
tgtggtattcatgagtttttgaact

SEQ ID NO: 3459317 - DNA, 25 bp, Homo sapien
ttcggtagagtcctaaaatggtgat

SEQ ID NO: 3459318 - DNA, 25 bp, Homo sapien
gagttcactcctcctattcggtaga

SEQ ID NO: 3459319 - DNA, 25 bp, Homo sapien
tcctcctattcggtagagtcctaaa

SEQ ID NO: 3459320 - DNA, 25 bp, Homo sapien
tttttcagcccacttgttatcgtct

SEQ ID NO: 3459321 - DNA, 25 bp, Homo sapien
tgcaacttgtaagtcatcagtggtt

SEQ ID NO: 3459322 - DNA, 25 bp, Homo sapien
tgtaagtcatcagtggttctgcaag

SEQ ID NO: 3459323 - DNA, 25 bp, Homo sapien
caacttgtaagtcatcagtggttct

SEQ ID NO: 3459324 - DNA, 25 bp, Homo sapien
agtcatcagtggttctgcaaggcac

SEQ ID NO: 3459325 - DNA, 25 bp, Homo sapien
tctccggcaatttgtgcaccaatgc

SEQ ID NO: 3459326 - DNA, 25 bp, Homo sapien
gcaatttgtgcaccaatgcatgtac

SEQ ID NO: 3459327 - DNA, 25 bp, Homo sapien
gtttttctccggcaatttgtgcacc

SEQ ID NO: 3459328 - DNA, 25 bp, Homo sapien
tccggcaatttgtgcaccaatgcat

SEQ ID NO: 3459329 - DNA, 25 bp, Homo sapien
taaatgaacaatgtaagttagagaa

SEQ ID NO: 3459330 - DNA, 25 bp, Homo sapien
caataagttaaatgaacaatgtaag

SEQ ID NO: 3459331 - DNA, 25 bp, Homo sapien
gacatgaacaaacttaacaatgaac

SEQ ID NO: 3459332 - DNA, 25 bp, Homo sapien
caatgaacaataagttaaatgaaca

SEQ ID NO: 3459333 - DNA, 25 bp, Homo sapien
tgtgctctcattagagttgggccaa

SEQ ID NO: 3459334 - DNA, 25 bp, Homo sapien
agagttgggccaaatatgacaccaa

SEQ ID NO: 3459335 - DNA, 25 bp, Homo sapien
ttagagttgggccaaatatgacacc

SEQ ID NO: 3459336 - DNA, 25 bp, Homo sapien
gtgctctcattagagttgggccaaa

SEQ ID NO: 3459337 - DNA, 25 bp, Homo sapien
aagaggaatgcttgggtctggagca

SEQ ID NO: 3459338 - DNA, 25 bp, Homo sapien
aggaagaggaatgcttgggtctgga

SEQ ID NO: 3459339 - DNA, 25 bp, Homo sapien
gcttgggtctggagcagtatgaaaa

SEQ ID NO: 3459340 - DNA, 25 bp, Homo sapien
aatgcttgggtctggagcagtatga

SEQ ID NO: 3459341 - DNA, 25 bp, Homo sapien
aggttcggccaggcatggagtatac

SEQ ID NO: 3459342 - DNA, 25 bp, Homo sapien
caggttcggccaggcatggagtata

SEQ ID NO: 3459343 - DNA, 25 bp, Homo sapien
ggttcggccaggcatggagtatacc

SEQ ID NO: 3459344 - DNA, 25 bp, Homo sapien
ggaaacgtctcctgggctagtgact

SEQ ID NO: 3459345 - DNA, 25 bp, Homo sapien
gaggcagtgtctagtcttaatctcc

SEQ ID NO: 3459346 - DNA, 25 bp, Homo sapien
tgagccaggccgctgatagccattg

SEQ ID NO: 3459347 - DNA, 25 bp, Homo sapien
cttgaggcagtgtctagtcttaatc

SEQ ID NO: 3459348 - DNA, 25 bp, Homo sapien
ttgaatagatccactgtagctcttg

SEQ ID NO: 3459349 - DNA, 25 bp, Homo sapien
ggtaagactatcaggtatgactaaa

SEQ ID NO: 3459350 - DNA, 25 bp, Homo sapien
tatggccaataaacaaatctgtaga

SEQ ID NO: 3459351 - DNA, 25 bp, Homo sapien
ccacgagtgaagatgcaaagaatca

SEQ ID NO: 3459352 - DNA, 25 bp, Homo sapien
tattgactcctgtggagccacgagt

SEQ ID NO: 3459353 - DNA, 25 bp, Homo sapien
cgcccagaagaaactggtttaggtg

SEQ ID NO: 3459354 - DNA, 25 bp, Homo sapien
aacattttcaaacagttgagctttt

SEQ ID NO: 3459355 - DNA, 25 bp, Homo sapien
tggtttaggtgaaccaacattttca

SEQ ID NO: 3459356 - DNA, 25 bp, Homo sapien
aaacagttgagcttttgctgccact

SEQ ID NO: 3459357 - DNA, 25 bp, Homo sapien
tcacagaggagtagttttcaaaagg

SEQ ID NO: 3459358 - DNA, 25 bp, Homo sapien
acagaggagtagttttcaaaaggtg

SEQ ID NO: 3459359 - DNA, 25 bp, Homo sapien
cagaggagtagttttcaaaaggtgg

SEQ ID NO: 3459360 - DNA, 25 bp, Homo sapien
cacagaggagtagttttcaaaaggt

SEQ ID NO: 3459361 - DNA, 25 bp, Homo sapien
gttaaagctgcttgtgtcaaagaca

SEQ ID NO: 3459362 - DNA, 25 bp, Homo sapien
tccacctgagcctgtagagttaaag

SEQ ID NO: 3459363 - DNA, 25 bp, Homo sapien
gtaatactgaatgcctcaatgctaa

SEQ ID NO: 3459364 - DNA, 25 bp, Homo sapien
cccagcctagttgcagatttcttaa

SEQ ID NO: 3459365 - DNA, 25 bp, Homo sapien
ccagtcttttcatcagaggtgagcc

SEQ ID NO: 3459366 - DNA, 25 bp, Homo sapien
gagcctcaggctgtactttcagaaa

SEQ ID NO: 3459367 - DNA, 25 bp, Homo sapien
tagagaggaaaattctggacctgcc

SEQ ID NO: 3459368 - DNA, 25 bp, Homo sapien
cagatttgggaatgaccctcagccc

SEQ ID NO: 3459369 - DNA, 25 bp, Homo sapien
tccacgaacgatgtctgatgcttag

SEQ ID NO: 3459370 - DNA, 25 bp, Homo sapien
ggccagctatgtccatgtcctgaga

SEQ ID NO: 3459371 - DNA, 25 bp, Homo sapien
tcttgatcttcacatggccatgtac

SEQ ID NO: 3459372 - DNA, 25 bp, Homo sapien
ggccatgtacttcaggttcatctta

SEQ ID NO: 3459373 - DNA, 25 bp, Homo sapien
tgaggctgctaatcaaggcaccagg

SEQ ID NO: 3459374 - DNA, 25 bp, Homo sapien
cattatctatagagcagccagaggg

SEQ ID NO: 3459375 - DNA, 25 bp, Homo sapien
actatatgcagtcaggtgccgggtg

SEQ ID NO: 3459376 - DNA, 25 bp, Homo sapien
cctgggtaagacttgcaactgatcc

SEQ ID NO: 3459377 - DNA, 25 bp, Homo sapien
cattagaaaatattgctccttgtgg

SEQ ID NO: 3459378 - DNA, 25 bp, Homo sapien
aaggaaagctcatgactgtgctctg

SEQ ID NO: 3459379 - DNA, 25 bp, Homo sapien
gaaagctcatgactgtgctctgctt

SEQ ID NO: 3459380 - DNA, 25 bp, Homo sapien
gggaaggaaagctcatgactgtgct

SEQ ID NO: 3459381 - DNA, 25 bp, Homo sapien
ttaaccatcctggttccactgatgg

SEQ ID NO: 3459382 - DNA, 25 bp, Homo sapien
aaccatcctggttccactgatgggt

SEQ ID NO: 3459383 - DNA, 25 bp, Homo sapien
taaccatcctggttccactgatggg

SEQ ID NO: 3459384 - DNA, 25 bp, Homo sapien
tgctacggaagcgacattgtggaga

SEQ ID NO: 3459385 - DNA, 25 bp, Homo sapien
gatgccactataatgctactggtag

SEQ ID NO: 3459386 - DNA, 25 bp, Homo sapien
caactaaggatagacttcagaaggc

SEQ ID NO: 3459387 - DNA, 25 bp, Homo sapien
gaaggcatagcttcccttgtaacgt

SEQ ID NO: 3459388 - DNA, 25 bp, Homo sapien
cactgaaattgctaataaagactgt

SEQ ID NO: 3459389 - DNA, 25 bp, Homo sapien
taatggttcgtgcatgaccagatgc

SEQ ID NO: 3459390 - DNA, 25 bp, Homo sapien
tgactctgcctaccgttattctctc

SEQ ID NO: 3459391 - DNA, 25 bp, Homo sapien
tataagtggacagtaaatacctatt

SEQ ID NO: 3459392 - DNA, 25 bp, Homo sapien
cataaacttggtagcattacggcaa

SEQ ID NO: 3459393 - DNA, 25 bp, Homo sapien
caagtgtgcttaaaccaagggtgct

SEQ ID NO: 3459394 - DNA, 25 bp, Homo sapien
tttcagcaaagggaccatagccagt

SEQ ID NO: 3459395 - DNA, 25 bp, Homo sapien
gattctagtctagcaggataccaga

SEQ ID NO: 3459396 - DNA, 25 bp, Homo sapien
gatacccttttcaacacagaccaga

SEQ ID NO: 3459397 - DNA, 25 bp, Homo sapien
cagaccagaagaacggtgctaggag

SEQ ID NO: 3459398 - DNA, 25 bp, Homo sapien
tgagggactcttctaaactgaaacc

SEQ ID NO: 3459399 - DNA, 25 bp, Homo sapien
gttctaaatgctaaagaaggcatcc

SEQ ID NO: 3459400 - DNA, 25 bp, Homo sapien
taaatagcaatgtgtaccctaaggg

SEQ ID NO: 3459401 - DNA, 25 bp, Homo sapien
gagatgtgatttccgggtcctacgc

SEQ ID NO: 3459402 - DNA, 25 bp, Homo sapien
ttctggacaatagtcaagcctgtgt

SEQ ID NO: 3459403 - DNA, 25 bp, Homo sapien
gtgttctttttcgtgacctgaccag

SEQ ID NO: 3459404 - DNA, 25 bp, Homo sapien
cggtgacaatgagggatacagtgaa

SEQ ID NO: 3459405 - DNA, 25 bp, Homo sapien
ggatacagtgaatgtgttcaggaaa

SEQ ID NO: 3459406 - DNA, 25 bp, Homo sapien
caacgttattaccaagtggaactgg

SEQ ID NO: 3459407 - DNA, 25 bp, Homo sapien
gagaccagttgatgaatactcgata

SEQ ID NO: 3459408 - DNA, 25 bp, Homo sapien
taagtttcccaaatagccgtgtaca

SEQ ID NO: 3459409 - DNA, 25 bp, Homo sapien
ggactcttcagtaagcacacagact

SEQ ID NO: 3459410 - DNA, 25 bp, Homo sapien
tgtcaactctggatgcaaaaacacc

SEQ ID NO: 3459411 - DNA, 25 bp, Homo sapien
cagttgagggtacacgggcagatat

SEQ ID NO: 3459412 - DNA, 25 bp, Homo sapien
catccgacttttatataaactacag

SEQ ID NO: 3459413 - DNA, 25 bp, Homo sapien
tgcagataaatacagaacactacaa

SEQ ID NO: 3459414 - DNA, 25 bp, Homo sapien
taaaacacagtgtaaccatacatta

SEQ ID NO: 3459415 - DNA, 25 bp, Homo sapien
tgttaatgactgcaaagaagctcct

SEQ ID NO: 3459416 - DNA, 25 bp, Homo sapien
ctgtcttggggtgggattgctcctt

SEQ ID NO: 3459417 - DNA, 25 bp, Homo sapien
cacttctgccaaaatttggttggct

SEQ ID NO: 3459418 - DNA, 25 bp, Homo sapien
taacaccatccacccaggtaaaatc

SEQ ID NO: 3459419 - DNA, 25 bp, Homo sapien
tttggttggctgataacaccatcca

SEQ ID NO: 3459420 - DNA, 25 bp, Homo sapien
gatccttccttagcacacttataga

SEQ ID NO: 3459421 - DNA, 25 bp, Homo sapien
ctgatccttccttagcacacttata

SEQ ID NO: 3459422 - DNA, 25 bp, Homo sapien
ccttccttagcacacttatagacat

SEQ ID NO: 3459423 - DNA, 25 bp, Homo sapien
tactgatccttccttagcacactta

SEQ ID NO: 3459424 - DNA, 25 bp, Homo sapien
ttctcagctgtgataacttcttcac

SEQ ID NO: 3459425 - DNA, 25 bp, Homo sapien
tcagctgtgataacttcttcactgc

SEQ ID NO: 3459426 - DNA, 25 bp, Homo sapien
cagctgtgataacttcttcactgca

SEQ ID NO: 3459427 - DNA, 25 bp, Homo sapien
tctcagctgtgataacttcttcact

SEQ ID NO: 3459428 - DNA, 25 bp, Homo sapien
tgaggatggactttaggcgaggggt

SEQ ID NO: 3459429 - DNA, 25 bp, Homo sapien
ctgaggatggactttaggcgagggg

SEQ ID NO: 3459430 - DNA, 25 bp, Homo sapien
tctgaggatggactttaggcgaggg

SEQ ID NO: 3459431 - DNA, 25 bp, Homo sapien
tttatggcccttgcatccctttttg

SEQ ID NO: 3459432 - DNA, 25 bp, Homo sapien
caagcaatccccttgacagctatct

SEQ ID NO: 3459433 - DNA, 25 bp, Homo sapien
tcaggaaagcccctcggtttatggc

SEQ ID NO: 3459434 - DNA, 25 bp, Homo sapien
gacagctatcttggctttatgtaaa

SEQ ID NO: 3459435 - DNA, 25 bp, Homo sapien
aaacagagattacagtcaaagggtt

SEQ ID NO: 3459436 - DNA, 25 bp, Homo sapien
aaaacagagattacagtcaaagggt

SEQ ID NO: 3459437 - DNA, 25 bp, Homo sapien
ctaaaaacagagattacagtcaaag

SEQ ID NO: 3459438 - DNA, 25 bp, Homo sapien
taaaaacagagattacagtcaaagg

SEQ ID NO: 3459439 - DNA, 25 bp, Homo sapien
ggagaaaactctcacggcccatgga

SEQ ID NO: 3459440 - DNA, 25 bp, Homo sapien
cagttccggaccatgacgaatttgg

SEQ ID NO: 3459441 - DNA, 25 bp, Homo sapien
tctctgctacaacaaagcagcagcg

SEQ ID NO: 3459442 - DNA, 25 bp, Homo sapien
cctactccaaaacaagcagttccgg

SEQ ID NO: 3459443 - DNA, 25 bp, Homo sapien
cagtgaggtccagatgggtccaagc

SEQ ID NO: 3459444 - DNA, 25 bp, Homo sapien
tgttcaacaatctagaagctccctg

SEQ ID NO: 3459445 - DNA, 25 bp, Homo sapien
aactgggtgtcctacgatgcaatca

SEQ ID NO: 3459446 - DNA, 25 bp, Homo sapien
cagacctcacttgttaagggccctg

SEQ ID NO: 3459447 - DNA, 25 bp, Homo sapien
taagtctttggcttgtgaatttatc

SEQ ID NO: 3459448 - DNA, 25 bp, Homo sapien
gtggagtcaccttgccccttcagga

SEQ ID NO: 3459449 - DNA, 25 bp, Homo sapien
ttagcacattcctcataggcccagc

SEQ ID NO: 3459450 - DNA, 25 bp, Homo sapien
agtgctgggactttgctaacttcca

SEQ ID NO: 3459451 - DNA, 25 bp, Homo sapien
ctttaatagagacttgcaagatgct

SEQ ID NO: 3459452 - DNA, 25 bp, Homo sapien
aaacatgactcaccgcaccccaccc

SEQ ID NO: 3459453 - DNA, 25 bp, Homo sapien
tacaaacatgactcaccgcacccca

SEQ ID NO: 3459454 - DNA, 25 bp, Homo sapien
ctcctgatgagctggtagctgggac

SEQ ID NO: 3459455 - DNA, 25 bp, Homo sapien
gaagtagcgagtggctcccactgca

SEQ ID NO: 3459456 - DNA, 25 bp, Homo sapien
ttaaaacgtgcagcgtcacactagg

SEQ ID NO: 3459457 - DNA, 25 bp, Homo sapien
gaagaaggacgtttaccaggagtgc

SEQ ID NO: 3459458 - DNA, 25 bp, Homo sapien
ttggagaggagttaaggcaccgttc

SEQ ID NO: 3459459 - DNA, 25 bp, Homo sapien
ggcgtgcctccctgaaagctgtttt

SEQ ID NO: 3459460 - DNA, 25 bp, Homo sapien
gatcttcggagatgactgtcgcccg

SEQ ID NO: 3459461 - DNA, 25 bp, Homo sapien
ttctgaagggcaaacctcgggctct

SEQ ID NO: 3459462 - DNA, 25 bp, Homo sapien
tgagtgaaatctacaacccgaggcg

SEQ ID NO: 3459463 - DNA, 25 bp, Homo sapien
ggagccgcgtgtcactaaattgccg

SEQ ID NO: 3459464 - DNA, 25 bp, Homo sapien
tcagtgctttcgaacgtcaaggcag

SEQ ID NO: 3459465 - DNA, 25 bp, Homo sapien
gtgctttcgaacgtcaaggcaggag

SEQ ID NO: 3459466 - DNA, 25 bp, Homo sapien
aatctcagtgctttcgaacgtcaag

SEQ ID NO: 3459467 - DNA, 25 bp, Homo sapien
gctttcgaacgtcaaggcaggagga

SEQ ID NO: 3459468 - DNA, 25 bp, Homo sapien
gggaggctgcaggaaaattacaatc

SEQ ID NO: 3459469 - DNA, 25 bp, Homo sapien
ggctgcaggaaaattacaatcacgg

SEQ ID NO: 3459470 - DNA, 25 bp, Homo sapien
cacatggcggcaggacagagaggaa

SEQ ID NO: 3459471 - DNA, 25 bp, Homo sapien
tgcaggaaaattacaatcacggtgg

SEQ ID NO: 3459472 - DNA, 25 bp, Homo sapien
aacaccagggatttatttgcagtgc

SEQ ID NO: 3459473 - DNA, 25 bp, Homo sapien
ataacaccagggatttatttgcagt

SEQ ID NO: 3459474 - DNA, 25 bp, Homo sapien
tttgcagtgctagatttgtgtttca

SEQ ID NO: 3459475 - DNA, 25 bp, Homo sapien
acggatgacacctaagttatccaaa

SEQ ID NO: 3459476 - DNA, 25 bp, Homo sapien
gctctaaccttctgccaacctgttg

SEQ ID NO: 3459477 - DNA, 25 bp, Homo sapien
ccaaccgaatcatgtcagggccatt

SEQ ID NO: 3459478 - DNA, 25 bp, Homo sapien
tcttcatggctgttgtctcgtgatc

SEQ ID NO: 3459479 - DNA, 25 bp, Homo sapien
gggccattcactcctaaagaagtga

SEQ ID NO: 3459480 - DNA, 25 bp, Homo sapien
ttaacgtgaatctcccaagactggg

SEQ ID NO: 3459481 - DNA, 25 bp, Homo sapien
tgtagacatctaggcccctacagag

SEQ ID NO: 3459482 - DNA, 25 bp, Homo sapien
ggagatgcttctaccaacataataa

SEQ ID NO: 3459483 - DNA, 25 bp, Homo sapien
ttctagggccagagttttggagatg

SEQ ID NO: 3459484 - DNA, 25 bp, Homo sapien
accttcttgaatatggtaccaggga

SEQ ID NO: 3459485 - DNA, 25 bp, Homo sapien
ctgtagccattgctgctccactgct

SEQ ID NO: 3459486 - DNA, 25 bp, Homo sapien
tatggtaccagggaaaatgtggaac

SEQ ID NO: 3459487 - DNA, 25 bp, Homo sapien
gagccatgctgtagccattgctgct

SEQ ID NO: 3459488 - DNA, 25 bp, Homo sapien
ttggagatcaggagaattaataagt

SEQ ID NO: 3459489 - DNA, 25 bp, Homo sapien
cttggagatcaggagaattaataag

SEQ ID NO: 3459490 - DNA, 25 bp, Homo sapien
tggagatcaggagaattaataagtt

SEQ ID NO: 3459491 - DNA, 25 bp, Homo sapien
caggcttgctaggccagctgtcata

SEQ ID NO: 3459492 - DNA, 25 bp, Homo sapien
ctgcccctcgataggcggtaacaac

SEQ ID NO: 3459493 - DNA, 25 bp, Homo sapien
gatttcctgcccctcgataggcggt

SEQ ID NO: 3459494 - DNA, 25 bp, Homo sapien
tctggaatccaacgcagagagcgct

SEQ ID NO: 3459495 - DNA, 25 bp, Homo sapien
acaagagtttgctcatactggccac

SEQ ID NO: 3459496 - DNA, 25 bp, Homo sapien
ttacaagagtttgctcatactggcc

SEQ ID NO: 3459497 - DNA, 25 bp, Homo sapien
tacaagagtttgctcatactggcca

SEQ ID NO: 3459498 - DNA, 25 bp, Homo sapien
gctgtggtgtctctcattgaccttc

SEQ ID NO: 3459499 - DNA, 25 bp, Homo sapien
tctctcattgaccttctcttgtaaa

SEQ ID NO: 3459500 - DNA, 25 bp, Homo sapien
ggtgtctctcattgaccttctcttg

SEQ ID NO: 3459501 - DNA, 25 bp, Homo sapien
gaaacaaagaggacaggtgggaaga

SEQ ID NO: 3459502 - DNA, 25 bp, Homo sapien
gtaagaccggcttagaggaatgtcg

SEQ ID NO: 3459503 - DNA, 25 bp, Homo sapien
tcagccactggtgggtaagaccggc

SEQ ID NO: 3459504 - DNA, 25 bp, Homo sapien
ggtaagaccggcttagaggaatgtc

SEQ ID NO: 3459505 - DNA, 25 bp, Homo sapien
cactggtgggtaagaccggcttaga

SEQ ID NO: 3459506 - DNA, 25 bp, Homo sapien
tcccctaggtccatgaactcatctt

SEQ ID NO: 3459507 - DNA, 25 bp, Homo sapien
catatcccctaggtccatgaactca

SEQ ID NO: 3459508 - DNA, 25 bp, Homo sapien
tcacatatcccctaggtccatgaac

SEQ ID NO: 3459509 - DNA, 25 bp, Homo sapien
cctaggtccatgaactcatcttctc

SEQ ID NO: 3459510 - DNA, 25 bp, Homo sapien
ccaacagagtgccaggctaaggatc

SEQ ID NO: 3459511 - DNA, 25 bp, Homo sapien
agagtgccaggctaaggatccagcc

SEQ ID NO: 3459512 - DNA, 25 bp, Homo sapien
gccagcattagctgcagcgtgacat

SEQ ID NO: 3459513 - DNA, 25 bp, Homo sapien
catgaatccggggatcagctgtccc

SEQ ID NO: 3459514 - DNA, 25 bp, Homo sapien
gctagcgctgaccttactctcctca

SEQ ID NO: 3459515 - DNA, 25 bp, Homo sapien
gaactgcccgctagcgctgacctta

SEQ ID NO: 3459516 - DNA, 25 bp, Homo sapien
agaactgcccgctagcgctgacctt

SEQ ID NO: 3459517 - DNA, 25 bp, Homo sapien
gcccgctagcgctgaccttactctc

SEQ ID NO: 3459518 - DNA, 25 bp, Homo sapien
gctttatctgcagaatatgcacctt

SEQ ID NO: 3459519 - DNA, 25 bp, Homo sapien
ttgctttatctgcagaatatgcacc

SEQ ID NO: 3459520 - DNA, 25 bp, Homo sapien
gcagaatatgcacctttatccacca

SEQ ID NO: 3459521 - DNA, 25 bp, Homo sapien
tatctgcagaatatgcacctttatc

SEQ ID NO: 3459522 - DNA, 25 bp, Homo sapien
gaataaatgatttgttgtcgtaggc

SEQ ID NO: 3459523 - DNA, 25 bp, Homo sapien
atagcattaggacaattacgtacgc

SEQ ID NO: 3459524 - DNA, 25 bp, Homo sapien
taggacaattacgtacgcaagtggg

SEQ ID NO: 3459525 - DNA, 25 bp, Homo sapien
tgatttgttgtcgtaggccattgaa

SEQ ID NO: 3459526 - DNA, 25 bp, Homo sapien
aaggccatctgaatagatgcttgac

SEQ ID NO: 3459527 - DNA, 25 bp, Homo sapien
caggaggcacttgagctatagatgt

SEQ ID NO: 3459528 - DNA, 25 bp, Homo sapien
ggaggcacttgagctatagatgtct

SEQ ID NO: 3459529 - DNA, 25 bp, Homo sapien
tagatgcttgactggcatctccata

SEQ ID NO: 3459530 - DNA, 25 bp, Homo sapien
attctctcagatattgtcataggtt

SEQ ID NO: 3459531 - DNA, 25 bp, Homo sapien
atcatgaggtagactggctttccag

SEQ ID NO: 3459532 - DNA, 25 bp, Homo sapien
atgaggtagactggctttccaggta

SEQ ID NO: 3459533 - DNA, 25 bp, Homo sapien
tcatgaggtagactggctttccagg

SEQ ID NO: 3459534 - DNA, 25 bp, Homo sapien
ctctggactactgtgtgtttgacac

SEQ ID NO: 3459535 - DNA, 25 bp, Homo sapien
gctaccatggacaccctcatcgaag

SEQ ID NO: 3459536 - DNA, 25 bp, Homo sapien
tctcctctattaaggctaccatgga

SEQ ID NO: 3459537 - DNA, 25 bp, Homo sapien
ctcatcgaagcccatgcatcttttc

SEQ ID NO: 3459538 - DNA, 25 bp, Homo sapien
caagtttgttaggtacaaagatctt

SEQ ID NO: 3459539 - DNA, 25 bp, Homo sapien
tctcttctattgcaacaagtttgtt

SEQ ID NO: 3459540 - DNA, 25 bp, Homo sapien
aaccatgggcattaatttcactgaa

SEQ ID NO: 3459541 - DNA, 25 bp, Homo sapien
cactgaatgttttgccattacatga

SEQ ID NO: 3459542 - DNA, 25 bp, Homo sapien
cagcttgaccagagagcatctattg

SEQ ID NO: 3459543 - DNA, 25 bp, Homo sapien
caatgtgtactttgggctctactcc

SEQ ID NO: 3459544 - DNA, 25 bp, Homo sapien
catttatcctcttcccaagtagagc

SEQ ID NO: 3459545 - DNA, 25 bp, Homo sapien
gctctactcccggacttgaaatctt

SEQ ID NO: 3459546 - DNA, 25 bp, Homo sapien
ctaagttagtacatgatatatgtct

SEQ ID NO: 3459547 - DNA, 25 bp, Homo sapien
tagtacatgatatatgtctacataa

SEQ ID NO: 3459548 - DNA, 25 bp, Homo sapien
tcttttacattgttcaaacttcata

SEQ ID NO: 3459549 - DNA, 25 bp, Homo sapien
aaactaagttagtacatgatatatg

SEQ ID NO: 3459550 - DNA, 25 bp, Homo sapien
tcagctagtttccacattcacacaa

SEQ ID NO: 3459551 - DNA, 25 bp, Homo sapien
ttcacacaacttattctacattcta

SEQ ID NO: 3459552 - DNA, 25 bp, Homo sapien
acaataccaacatccacactcaggg

SEQ ID NO: 3459553 - DNA, 25 bp, Homo sapien
tgccactgcctgtcagaacaatacc

SEQ ID NO: 3459554 - DNA, 25 bp, Homo sapien
gcgagaggtcccaaacttctcaggt

SEQ ID NO: 3459555 - DNA, 25 bp, Homo sapien
caggcgagaggtcccaaacttctca

SEQ ID NO: 3459556 - DNA, 25 bp, Homo sapien
caaacttctcaggtcataatgctcc

SEQ ID NO: 3459557 - DNA, 25 bp, Homo sapien
aggtccaggcgagaggtcccaaact

SEQ ID NO: 3459558 - DNA, 25 bp, Homo sapien
gtcatggagagagagcccattttgc

SEQ ID NO: 3459559 - DNA, 25 bp, Homo sapien
tttgcgcctagaaaaactgatgcta

SEQ ID NO: 3459560 - DNA, 25 bp, Homo sapien
cgtgggctcttttgcgcctagaaaa

SEQ ID NO: 3459561 - DNA, 25 bp, Homo sapien
ataatttccttcacgtgggctcttt

SEQ ID NO: 3459562 - DNA, 25 bp, Homo sapien
tagcttgtagctgaatctctcgcct

SEQ ID NO: 3459563 - DNA, 25 bp, Homo sapien
tgttcttgtctataactcttggtta

SEQ ID NO: 3459564 - DNA, 25 bp, Homo sapien
actcttggttaatctaggtgctaaa

SEQ ID NO: 3459565 - DNA, 25 bp, Homo sapien
ttaatctaggtgctaaattttgcct

SEQ ID NO: 3459566 - DNA, 25 bp, Homo sapien
gtctataactcttggttaatctagg

SEQ ID NO: 3459567 - DNA, 25 bp, Homo sapien
tgtacagctgactgctggccaaaat

SEQ ID NO: 3459568 - DNA, 25 bp, Homo sapien
aaatacacagtattccagattgaga

SEQ ID NO: 3459569 - DNA, 25 bp, Homo sapien
ggttctctttgtttcctgtacagct

SEQ ID NO: 3459570 - DNA, 25 bp, Homo sapien
ccagattgagaggtcacactgacac

SEQ ID NO: 3459571 - DNA, 25 bp, Homo sapien
aattcacgaagaaacgctcccaaga

SEQ ID NO: 3459572 - DNA, 25 bp, Homo sapien
tcacgaagaaacgctcccaagaaaa

SEQ ID NO: 3459573 - DNA, 25 bp, Homo sapien
ttcacgaagaaacgctcccaagaaa

SEQ ID NO: 3459574 - DNA, 25 bp, Homo sapien
tcaattcacgaagaaacgctcccaa

SEQ ID NO: 3459575 - DNA, 25 bp, Homo sapien
aactccattgttcagggtaaaggct

SEQ ID NO: 3459576 - DNA, 25 bp, Homo sapien
cctgaaaatgggtcccagcggacag

SEQ ID NO: 3459577 - DNA, 25 bp, Homo sapien
cccatgggcctttagaatgctttaa

SEQ ID NO: 3459578 - DNA, 25 bp, Homo sapien
acttgggccatcctatcatctggag

SEQ ID NO: 3459579 - DNA, 25 bp, Homo sapien
taaagatattactctatcacgaatt

SEQ ID NO: 3459580 - DNA, 25 bp, Homo sapien
tactctatcacgaattacataaata

SEQ ID NO: 3459581 - DNA, 25 bp, Homo sapien
tgaggaacgtgaacaaaattttgta

SEQ ID NO: 3459582 - DNA, 25 bp, Homo sapien
atgtaggtgaggaacgtgaacaaaa

SEQ ID NO: 3459583 - DNA, 25 bp, Homo sapien
tctatagaatagtgccgattaactt

SEQ ID NO: 3459584 - DNA, 25 bp, Homo sapien
tatagaatagtgccgattaactttt

SEQ ID NO: 3459585 - DNA, 25 bp, Homo sapien
tagaatagtgccgattaacttttat

SEQ ID NO: 3459586 - DNA, 25 bp, Homo sapien
agaatagtgccgattaacttttata

SEQ ID NO: 3459587 - DNA, 25 bp, Homo sapien
gcatgtgcacatggccctccagatg

SEQ ID NO: 3459588 - DNA, 25 bp, Homo sapien
ctagaggtctgctcatgcatgtgca

SEQ ID NO: 3459589 - DNA, 25 bp, Homo sapien
cctagaggtctgctcatgcatgtgc

SEQ ID NO: 3459590 - DNA, 25 bp, Homo sapien
tcctagaggtctgctcatgcatgtg

SEQ ID NO: 3459591 - DNA, 25 bp, Homo sapien
gatatcgacactgagagtttctgta

SEQ ID NO: 3459592 - DNA, 25 bp, Homo sapien
ttcgcatggatatcgacactgagag

SEQ ID NO: 3459593 - DNA, 25 bp, Homo sapien
catggatatcgacactgagagtttc

SEQ ID NO: 3459594 - DNA, 25 bp, Homo sapien
catttcgcatggatatcgacactga

SEQ ID NO: 3459595 - DNA, 25 bp, Homo sapien
taacttaatgttcagcatgtaatac

SEQ ID NO: 3459596 - DNA, 25 bp, Homo sapien
aaaatgtgccatatttaacttaatg

SEQ ID NO: 3459597 - DNA, 25 bp, Homo sapien
ttatagaaaagtttctgaggtcaga

SEQ ID NO: 3459598 - DNA, 25 bp, Homo sapien
tctgaggtcagaaaatgtgccatat

SEQ ID NO: 3459599 - DNA, 25 bp, Homo sapien
ttggctttatagcccctctgtgtgt

SEQ ID NO: 3459600 - DNA, 25 bp, Homo sapien
cttggctttatagcccctctgtgtg

SEQ ID NO: 3459601 - DNA, 25 bp, Homo sapien
tggctttatagcccctctgtgtgtt

SEQ ID NO: 3459602 - DNA, 25 bp, Homo sapien
tgtttctgtagcttcacgcagttaa

SEQ ID NO: 3459603 - DNA, 25 bp, Homo sapien
cacattggattctttactggggagg

SEQ ID NO: 3459604 - DNA, 25 bp, Homo sapien
cacgcagttaaacatataaccctgt

SEQ ID NO: 3459605 - DNA, 25 bp, Homo sapien
gtttgttaaatcctgcaatgcgtgc

SEQ ID NO: 3459606 - DNA, 25 bp, Homo sapien
ccctgcttcaccgtcgtcccctggg

SEQ ID NO: 3459607 - DNA, 25 bp, Homo sapien
ggccagtgggcgagccacttgcggc

SEQ ID NO: 3459608 - DNA, 25 bp, Homo sapien
tctttgcacccccttaagtggtgac

SEQ ID NO: 3459609 - DNA, 25 bp, Homo sapien
agttcggccgctgacgcgaaccctc

SEQ ID NO: 3459610 - DNA, 25 bp, Homo sapien
gagagtgcgggggatgaaggcggga

SEQ ID NO: 3459611 - DNA, 25 bp, Homo sapien
gagagtctctgttgacatagtaact

SEQ ID NO: 3459612 - DNA, 25 bp, Homo sapien
gcgggggatgaaggcgggagctgag

SEQ ID NO: 3459613 - DNA, 25 bp, Homo sapien
cttgacggagagtgcgggggatgaa

SEQ ID NO: 3459614 - DNA, 25 bp, Homo sapien
tttctagaacgtcgctcggatccct

SEQ ID NO: 3459615 - DNA, 25 bp, Homo sapien
cgtcgctcggatccctttaaaggtg

SEQ ID NO: 3459616 - DNA, 25 bp, Homo sapien
tttggctgctttctagaacgtcgct

SEQ ID NO: 3459617 - DNA, 25 bp, Homo sapien
gctgctttctagaacgtcgctcgga

SEQ ID NO: 3459618 - DNA, 25 bp, Homo sapien
ttctgccacgaaagctctatgaggg

SEQ ID NO: 3459619 - DNA, 25 bp, Homo sapien
cattcttgcattcgcagtgacggaa

SEQ ID NO: 3459620 - DNA, 25 bp, Homo sapien
tccacctgttcatgggaagcaaagg

SEQ ID NO: 3459621 - DNA, 25 bp, Homo sapien
tgtgtcaaatacgaagctggatcct

SEQ ID NO: 3459622 - DNA, 25 bp, Homo sapien
tgataaattgatgtcagaataagtt

SEQ ID NO: 3459623 - DNA, 25 bp, Homo sapien
taaattgatgtcagaataagtttac

SEQ ID NO: 3459624 - DNA, 25 bp, Homo sapien
cacatgataaattgatgtcagaata

SEQ ID NO: 3459625 - DNA, 25 bp, Homo sapien
catgataaattgatgtcagaataag

SEQ ID NO: 3459626 - DNA, 25 bp, Homo sapien
gcagcagtgacacggaaggtctcca

SEQ ID NO: 3459627 - DNA, 25 bp, Homo sapien
gatgcccaacggtatatcctggtgg

SEQ ID NO: 3459628 - DNA, 25 bp, Homo sapien
gacactgctcatgtccagtggagga

SEQ ID NO: 3459629 - DNA, 25 bp, Homo sapien
gaatctggcactaaagaggttccga

SEQ ID NO: 3459630 - DNA, 25 bp, Homo sapien
tgtcaatggccgatgacagggtcat

SEQ ID NO: 3459631 - DNA, 25 bp, Homo sapien
tgtccacactgtcaatggccgatga

SEQ ID NO: 3459632 - DNA, 25 bp, Homo sapien
cacactgtcaatggccgatgacagg

SEQ ID NO: 3459633 - DNA, 25 bp, Homo sapien
cttgtccacactgtcaatggccgat

SEQ ID NO: 3459634 - DNA, 25 bp, Homo sapien
atgatgacatgtgtagcttagcctt

SEQ ID NO: 3459635 - DNA, 25 bp, Homo sapien
gatgacatgtgtagcttagccttca

SEQ ID NO: 3459636 - DNA, 25 bp, Homo sapien
tgatgacatgtgtagcttagccttc

SEQ ID NO: 3459637 - DNA, 25 bp, Homo sapien
atgacatgtgtagcttagccttcac

SEQ ID NO: 3459638 - DNA, 25 bp, Homo sapien
ctgtggaagaaccagaagtgagcca

SEQ ID NO: 3459639 - DNA, 25 bp, Homo sapien
accagaagtgagccagcctctgggc

SEQ ID NO: 3459640 - DNA, 25 bp, Homo sapien
tgtggaagaaccagaagtgagccag

SEQ ID NO: 3459641 - DNA, 25 bp, Homo sapien
aagtgagccagcctctgggcttctg

SEQ ID NO: 3459642 - DNA, 25 bp, Homo sapien
gtgctaggatttgggccaggtaaag

SEQ ID NO: 3459643 - DNA, 25 bp, Homo sapien
ggtgctaggatttgggccaggtaaa

SEQ ID NO: 3459644 - DNA, 25 bp, Homo sapien
tgtctttatccccactttcagaatc

SEQ ID NO: 3459645 - DNA, 25 bp, Homo sapien
tctgtctttatccccactttcagaa

SEQ ID NO: 3459646 - DNA, 25 bp, Homo sapien
ctttatccccactttcagaatccat

SEQ ID NO: 3459647 - DNA, 25 bp, Homo sapien
gtttctgtctttatccccactttca

SEQ ID NO: 3459648 - DNA, 25 bp, Homo sapien
aatgtaaccttcctatgtcacagcc

SEQ ID NO: 3459649 - DNA, 25 bp, Homo sapien
tgtcacagccaaggtagagtcccta

SEQ ID NO: 3459650 - DNA, 25 bp, Homo sapien
aattatgtctccagtgctagtctca

SEQ ID NO: 3459651 - DNA, 25 bp, Homo sapien
caattccattggagaaggcttctag

SEQ ID NO: 3459652 - DNA, 25 bp, Homo sapien
tcagatgctgtgatatctcttccga

SEQ ID NO: 3459653 - DNA, 25 bp, Homo sapien
caaagtaagtctctaacccaagcac

SEQ ID NO: 3459654 - DNA, 25 bp, Homo sapien
actcctagggatatcagtctgttga

SEQ ID NO: 3459655 - DNA, 25 bp, Homo sapien
tcgtaggtgctatcacagcgcatcc

SEQ ID NO: 3459656 - DNA, 25 bp, Homo sapien
agtaagcatgagcctggttcccagg

SEQ ID NO: 3459657 - DNA, 25 bp, Homo sapien
tttagtaagcatgagcctggttccc

SEQ ID NO: 3459658 - DNA, 25 bp, Homo sapien
tagtaagcatgagcctggttcccag

SEQ ID NO: 3459659 - DNA, 25 bp, Homo sapien
ttagtaagcatgagcctggttccca

SEQ ID NO: 3459660 - DNA, 25 bp, Homo sapien
tccacggctaacaccagttcttttg

SEQ ID NO: 3459661 - DNA, 25 bp, Homo sapien
aagaatgtgcttgttctacgtcttt

SEQ ID NO: 3459662 - DNA, 25 bp, Homo sapien
ccacggctaacaccagttcttttgt

SEQ ID NO: 3459663 - DNA, 25 bp, Homo sapien
tgggcaccagatgtaggggtgggtt

SEQ ID NO: 3459664 - DNA, 25 bp, Homo sapien
ttgggcaccagatgtaggggtgggt

SEQ ID NO: 3459665 - DNA, 25 bp, Homo sapien
tataatattgatatcaaaatcttgt

SEQ ID NO: 3459666 - DNA, 25 bp, Homo sapien
ataatattgatatcaaaatcttgta

SEQ ID NO: 3459667 - DNA, 25 bp, Homo sapien
atataatattgatatcaaaatcttg

SEQ ID NO: 3459668 - DNA, 25 bp, Homo sapien
gatataatattgatatcaaaatctt

SEQ ID NO: 3459669 - DNA, 25 bp, Homo sapien
tctccgtctccgcggaggtgctttt

SEQ ID NO: 3459670 - DNA, 25 bp, Homo sapien
ctccgtctccgcggaggtgcttttc

SEQ ID NO: 3459671 - DNA, 25 bp, Homo sapien
gtctccgtctccgcggaggtgcttt

SEQ ID NO: 3459672 - DNA, 25 bp, Homo sapien
agtaggtatagttagctgcagctgc

SEQ ID NO: 3459673 - DNA, 25 bp, Homo sapien
gtaggtatagttagctgcagctgct

SEQ ID NO: 3459674 - DNA, 25 bp, Homo sapien
cacagtgacaatctgatctctcttg

SEQ ID NO: 3459675 - DNA, 25 bp, Homo sapien
cacagacacagtgacaatctgatct

SEQ ID NO: 3459676 - DNA, 25 bp, Homo sapien
agtgacaatctgatctctcttgctt

SEQ ID NO: 3459677 - DNA, 25 bp, Homo sapien
tctcttgcttttccccacatttccc

SEQ ID NO: 3459678 - DNA, 25 bp, Homo sapien
gatctgtgcatagggagccccaagg

SEQ ID NO: 3459679 - DNA, 25 bp, Homo sapien
ggtttcaggaaggagatctgtgcat

SEQ ID NO: 3459680 - DNA, 25 bp, Homo sapien
gagccccaaggccaacgtggagtga

SEQ ID NO: 3459681 - DNA, 25 bp, Homo sapien
ccaacgtggagtgaccacagcagag

SEQ ID NO: 3459682 - DNA, 25 bp, Homo sapien
tatagggaaggattctcagttgcac

SEQ ID NO: 3459683 - DNA, 25 bp, Homo sapien
tcagttgcaccaggcagaagtttaa

SEQ ID NO: 3459684 - DNA, 25 bp, Homo sapien
tgcaccaggcagaagtttaatttta

SEQ ID NO: 3459685 - DNA, 25 bp, Homo sapien
tagggaaggattctcagttgcacca

SEQ ID NO: 3459686 - DNA, 25 bp, Homo sapien
ctcgattgaccatccttagagtcac

SEQ ID NO: 3459687 - DNA, 25 bp, Homo sapien
cgattgaccatccttagagtcacca

SEQ ID NO: 3459688 - DNA, 25 bp, Homo sapien
gattgaccatccttagagtcaccat

SEQ ID NO: 3459689 - DNA, 25 bp, Homo sapien
tcgattgaccatccttagagtcacc

SEQ ID NO: 3459690 - DNA, 25 bp, Homo sapien
tagctgggagtttcacaccgtatgt

SEQ ID NO: 3459691 - DNA, 25 bp, Homo sapien
ctcatttgaactggcttctccctgg

SEQ ID NO: 3459692 - DNA, 25 bp, Homo sapien
cagagactgcaagtagtgttgcgta

SEQ ID NO: 3459693 - DNA, 25 bp, Homo sapien
ggaataacgagacaatcaacatgct

SEQ ID NO: 3459694 - DNA, 25 bp, Homo sapien
tccaaatagcaatatcctgcaatcg

SEQ ID NO: 3459695 - DNA, 25 bp, Homo sapien
gcaatatcctgcaatcgttttggca

SEQ ID NO: 3459696 - DNA, 25 bp, Homo sapien
cctgcaatcgttttggcagatgaat

SEQ ID NO: 3459697 - DNA, 25 bp, Homo sapien
tgctgattccaaatagcaatatcct

SEQ ID NO: 3459698 - DNA, 25 bp, Homo sapien
cattttccaatcgagtccggtacat

SEQ ID NO: 3459699 - DNA, 25 bp, Homo sapien
gctcggtctagcagcctcacatttt

SEQ ID NO: 3459700 - DNA, 25 bp, Homo sapien
ttgctcggtctagcagcctcacatt

SEQ ID NO: 3459701 - DNA, 25 bp, Homo sapien
gcctcacattttccaatcgagtccg

SEQ ID NO: 3459702 - DNA, 25 bp, Homo sapien
gcactacagtggacctgacagtctg

SEQ ID NO: 3459703 - DNA, 25 bp, Homo sapien
tatttagcacagatatcagtcacta

SEQ ID NO: 3459704 - DNA, 25 bp, Homo sapien
tgcatcacaagctggataacacttg

SEQ ID NO: 3459705 - DNA, 25 bp, Homo sapien
gagcctgttaagtgattccatccat

SEQ ID NO: 3459706 - DNA, 25 bp, Homo sapien
tcaggcatcattgagaaagttcttg

SEQ ID NO: 3459707 - DNA, 25 bp, Homo sapien
cttatcaggttgactaggccaccca

SEQ ID NO: 3459708 - DNA, 25 bp, Homo sapien
gacagctgctagagaagttgacaac

SEQ ID NO: 3459709 - DNA, 25 bp, Homo sapien
tcagaaatgagctcatatacaaggc

SEQ ID NO: 3459710 - DNA, 25 bp, Homo sapien
ggccacccattggtatgagttagat

SEQ ID NO: 3459711 - DNA, 25 bp, Homo sapien
ttgaaggctccatataccccaaaca

SEQ ID NO: 3459712 - DNA, 25 bp, Homo sapien
ttaacgagtgtggtctagcaaatct

SEQ ID NO: 3459713 - DNA, 25 bp, Homo sapien
aattgcttgcaactggaattcaatg

SEQ ID NO: 3459714 - DNA, 25 bp, Homo sapien
tggcattcatcacttctctggaaaa

SEQ ID NO: 3459715 - DNA, 25 bp, Homo sapien
gggcacgtggaccaaaaacaactca

SEQ ID NO: 3459716 - DNA, 25 bp, Homo sapien
aaaattcccagattggaagcagaaa

SEQ ID NO: 3459717 - DNA, 25 bp, Homo sapien
tgttggagcctaatgtaaatgcata

SEQ ID NO: 3459718 - DNA, 25 bp, Homo sapien
ctagtttattggctatgcaagtgac

SEQ ID NO: 3459719 - DNA, 25 bp, Homo sapien
aaaggctgaatcttattgttggagc

SEQ ID NO: 3459720 - DNA, 25 bp, Homo sapien
agggttggcctcgacagccctagct

SEQ ID NO: 3459721 - DNA, 25 bp, Homo sapien
gcagcggcgacctcgccgggcaata

SEQ ID NO: 3459722 - DNA, 25 bp, Homo sapien
tagctcccgcgcagcggcactggtg

SEQ ID NO: 3459723 - DNA, 25 bp, Homo sapien
cactggtgcctgtagcggcgatggc

SEQ ID NO: 3459724 - DNA, 25 bp, Homo sapien
cccgccagcatccttcacttcagcg

SEQ ID NO: 3459725 - DNA, 25 bp, Homo sapien
tccctcatggcagctccggcttcct

SEQ ID NO: 3459726 - DNA, 25 bp, Homo sapien
taagagccaggtcggtgatgcccgc

SEQ ID NO: 3459727 - DNA, 25 bp, Homo sapien
ggttgtccgatgattcagtgcccag

SEQ ID NO: 3459728 - DNA, 25 bp, Homo sapien
aatgatagcattaagttaagaacaa

SEQ ID NO: 3459729 - DNA, 25 bp, Homo sapien
atgatagcattaagttaagaacaat

SEQ ID NO: 3459730 - DNA, 25 bp, Homo sapien
taatgatagcattaagttaagaaca

SEQ ID NO: 3459731 - DNA, 25 bp, Homo sapien
ctaatgatagcattaagttaagaac

SEQ ID NO: 3459732 - DNA, 25 bp, Homo sapien
tcgatttcgacatattttttgttgc

SEQ ID NO: 3459733 - DNA, 25 bp, Homo sapien
ttttttctccgatttgactccacaa

SEQ ID NO: 3459734 - DNA, 25 bp, Homo sapien
caaaatatttacgtgctcgatttcg

SEQ ID NO: 3459735 - DNA, 25 bp, Homo sapien
ttgctgcagtaatatctggcgctct

SEQ ID NO: 3459736 - DNA, 25 bp, Homo sapien
gctttcctccgctgtgaaagaggaa

SEQ ID NO: 3459737 - DNA, 25 bp, Homo sapien
tgctttcctccgctgtgaaagagga

SEQ ID NO: 3459738 - DNA, 25 bp, Homo sapien
ctccagtttattgttggtctacggg

SEQ ID NO: 3459739 - DNA, 25 bp, Homo sapien
tccagtttattgttggtctacggga

SEQ ID NO: 3459740 - DNA, 25 bp, Homo sapien
tccaagagactgaatgatcccttgc

SEQ ID NO: 3459741 - DNA, 25 bp, Homo sapien
agtggcttacattcctctccctagg

SEQ ID NO: 3459742 - DNA, 25 bp, Homo sapien
taaaattggtctgacaaaagttgcc

SEQ ID NO: 3459743 - DNA, 25 bp, Homo sapien
cagcgtccttcttctacagtatagc

SEQ ID NO: 3459744 - DNA, 25 bp, Homo sapien
ggtttaggcagtaaggatctatccc

SEQ ID NO: 3459745 - DNA, 25 bp, Homo sapien
gaggatgctatcactccctgctgaa

SEQ ID NO: 3459746 - DNA, 25 bp, Homo sapien
tgtagtcccgacactctgaataagt

SEQ ID NO: 3459747 - DNA, 25 bp, Homo sapien
ggctccgcactggttacaggataaa

SEQ ID NO: 3459748 - DNA, 25 bp, Homo sapien
taatgtgatagtagtttatcaatgg

SEQ ID NO: 3459749 - DNA, 25 bp, Homo sapien
ttaggtttacattccactgaaaatg

SEQ ID NO: 3459750 - DNA, 25 bp, Homo sapien
tatcaatggtttcagcttaattaca

SEQ ID NO: 3459751 - DNA, 25 bp, Homo sapien
taacacatttaggtttacattccac

SEQ ID NO: 3459752 - DNA, 25 bp, Homo sapien
tatatctcactatttgctgaagcag

SEQ ID NO: 3459753 - DNA, 25 bp, Homo sapien
taaatgccctgcactttatcatata

SEQ ID NO: 3459754 - DNA, 25 bp, Homo sapien
tatattctctgatttatcttagggc

SEQ ID NO: 3459755 - DNA, 25 bp, Homo sapien
tcttagggcttaagcactaaatgcc

SEQ ID NO: 3459756 - DNA, 25 bp, Homo sapien
caactgccacactacagatacatgg

SEQ ID NO: 3459757 - DNA, 25 bp, Homo sapien
cagatacatggatattggagataga

SEQ ID NO: 3459758 - DNA, 25 bp, Homo sapien
tcagtgtagcacgtagttcaggatc

SEQ ID NO: 3459759 - DNA, 25 bp, Homo sapien
tggagatagatatctagcagtatca

SEQ ID NO: 3459760 - DNA, 25 bp, Homo sapien
tttaaagcatgagttcaaagggcaa

SEQ ID NO: 3459761 - DNA, 25 bp, Homo sapien
ggtttaaagcatgagttcaaagggc

SEQ ID NO: 3459762 - DNA, 25 bp, Homo sapien
ctggtttaaagcatgagttcaaagg

SEQ ID NO: 3459763 - DNA, 25 bp, Homo sapien
ttaaagcatgagttcaaagggcaaa

SEQ ID NO: 3459764 - DNA, 25 bp, Homo sapien
tgctggtagacgagggaaactgcta

SEQ ID NO: 3459765 - DNA, 25 bp, Homo sapien
tattttcttgtccatagggtccatg

SEQ ID NO: 3459766 - DNA, 25 bp, Homo sapien
gacccgtggaggagacagttgatca

SEQ ID NO: 3459767 - DNA, 25 bp, Homo sapien
tcaggaatgattggagaactctggg

SEQ ID NO: 3459768 - DNA, 25 bp, Homo sapien
gatgtgcaggcaacggagtgacata

SEQ ID NO: 3459769 - DNA, 25 bp, Homo sapien
caggaaggcttcaaaacagggagag

SEQ ID NO: 3459770 - DNA, 25 bp, Homo sapien
acaaccagtggagctggaagggaac

SEQ ID NO: 3459771 - DNA, 25 bp, Homo sapien
gaacgacgaacaagggtaggcatta

SEQ ID NO: 3459772 - DNA, 25 bp, Homo sapien
caatgctgtggcttgtggaacagat

SEQ ID NO: 3459773 - DNA, 25 bp, Homo sapien
gctaaataagttggaggcaaacctg

SEQ ID NO: 3459774 - DNA, 25 bp, Homo sapien
tggatgatctgcaaaggcctcgggc

SEQ ID NO: 3459775 - DNA, 25 bp, Homo sapien
ggcctcgggctgatttgacaatgct

SEQ ID NO: 3459776 - DNA, 25 bp, Homo sapien
tttttgctagtagccaaggttgccc

SEQ ID NO: 3459777 - DNA, 25 bp, Homo sapien
cattttttgataatgcggaaggcaa

SEQ ID NO: 3459778 - DNA, 25 bp, Homo sapien
ttctcacaattgattttggataaga

SEQ ID NO: 3459779 - DNA, 25 bp, Homo sapien
ttgataatgcggaaggcaaggcaga

SEQ ID NO: 3459780 - DNA, 25 bp, Homo sapien
tagatgttgatcttcgaggagtttc

SEQ ID NO: 3459781 - DNA, 25 bp, Homo sapien
agatgttgatcttcgaggagtttct

SEQ ID NO: 3459782 - DNA, 25 bp, Homo sapien
tatgttgagttttagagaatgccag

SEQ ID NO: 3459783 - DNA, 25 bp, Homo sapien
aagcagctgagattagttgattgca

SEQ ID NO: 3459784 - DNA, 25 bp, Homo sapien
tctgtagcctcaagactgtctatac

SEQ ID NO: 3459785 - DNA, 25 bp, Homo sapien
ggaaatggtattccgctggatggat

SEQ ID NO: 3459786 - DNA, 25 bp, Homo sapien
tgttgggctctcagtaactaatggt

SEQ ID NO: 3459787 - DNA, 25 bp, Homo sapien
ccagaagtggagtcagttgtcctca

SEQ ID NO: 3459788 - DNA, 25 bp, Homo sapien
tacaaacatgggtgggctagataca

SEQ ID NO: 3459789 - DNA, 25 bp, Homo sapien
taaaggcgttgccactggtacacat

SEQ ID NO: 3459790 - DNA, 25 bp, Homo sapien
aatataatgtcgcatcttgccgggc

SEQ ID NO: 3459791 - DNA, 25 bp, Homo sapien
cagactgtggttgaatgacagcgcc

SEQ ID NO: 3459792 - DNA, 25 bp, Homo sapien
tattttgatgcaggacattaggacc

SEQ ID NO: 3459793 - DNA, 25 bp, Homo sapien
cgaaagtttggcactctgaagaaca

SEQ ID NO: 3459794 - DNA, 25 bp, Homo sapien
caatattacaggaggtaagttactt

SEQ ID NO: 3459795 - DNA, 25 bp, Homo sapien
gtacttctgtcctacagatccaggg

SEQ ID NO: 3459796 - DNA, 25 bp, Homo sapien
cgttttcttctcataacagtagacc

SEQ ID NO: 3459797 - DNA, 25 bp, Homo sapien
tctccgcttagtttcagcaattcgt

SEQ ID NO: 3459798 - DNA, 25 bp, Homo sapien
tcctacagatccagggttttgtctt

SEQ ID NO: 3459799 - DNA, 25 bp, Homo sapien
caatataagaagtaccccttgtagt

SEQ ID NO: 3459800 - DNA, 25 bp, Homo sapien
gttttggctcacttgaacttagcag

SEQ ID NO: 3459801 - DNA, 25 bp, Homo sapien
ttgtagtttgttttggctcacttga

SEQ ID NO: 3459802 - DNA, 25 bp, Homo sapien
tcttcaatataagaagtaccccttg

SEQ ID NO: 3459803 - DNA, 25 bp, Homo sapien
tttaaaggtagatttgatttctgta

SEQ ID NO: 3459804 - DNA, 25 bp, Homo sapien
gctattcaagacagtcagaatctca

SEQ ID NO: 3459805 - DNA, 25 bp, Homo sapien
taagggactctaggatcttctgttc

SEQ ID NO: 3459806 - DNA, 25 bp, Homo sapien
cagtgtgcagatgttgaattgttga

SEQ ID NO: 3459807 - DNA, 25 bp, Homo sapien
taagtctgccaaagaagttgacatc

SEQ ID NO: 3459808 - DNA, 25 bp, Homo sapien
tatcctcaggacaagagctagctgc

SEQ ID NO: 3459809 - DNA, 25 bp, Homo sapien
gcaaagttcaatttcaccccatgag

SEQ ID NO: 3459810 - DNA, 25 bp, Homo sapien
tcctatgaggccatggaaagcaaag

SEQ ID NO: 3459811 - DNA, 25 bp, Homo sapien
gggtttttgcaaatggattcttgta

SEQ ID NO: 3459812 - DNA, 25 bp, Homo sapien
ggtttttgcaaatggattcttgtat

SEQ ID NO: 3459813 - DNA, 25 bp, Homo sapien
tttttgcaaatggattcttgtatat

SEQ ID NO: 3459814 - DNA, 25 bp, Homo sapien
gtttttgcaaatggattcttgtata

SEQ ID NO: 3459815 - DNA, 25 bp, Homo sapien
caagaaaaaaagagcttcttcaaat

SEQ ID NO: 3459816 - DNA, 25 bp, Homo sapien
attgatgtgtacataaaatcagaag

SEQ ID NO: 3459817 - DNA, 25 bp, Homo sapien
tgatgtgtacataaaatcagaagtt

SEQ ID NO: 3459818 - DNA, 25 bp, Homo sapien
gtattgatgtgtacataaaatcaga

SEQ ID NO: 3459819 - DNA, 25 bp, Homo sapien
ctgtattgatgtgtacataaaatca

SEQ ID NO: 3459820 - DNA, 25 bp, Homo sapien
ctaatgatgaaagggcctggaaccc

SEQ ID NO: 3459821 - DNA, 25 bp, Homo sapien
aaacctatgggaacattagcccctg

SEQ ID NO: 3459822 - DNA, 25 bp, Homo sapien
tggaacccacatagttaggcacgcc

SEQ ID NO: 3459823 - DNA, 25 bp, Homo sapien
taggcacgccagaaggaaacctatg

SEQ ID NO: 3459824 - DNA, 25 bp, Homo sapien
gcagctgctggttctatcttctctc

SEQ ID NO: 3459825 - DNA, 25 bp, Homo sapien
cacaaaacggtatgcatctagtcct

SEQ ID NO: 3459826 - DNA, 25 bp, Homo sapien
tataaattgcaaaggagcactgtga

SEQ ID NO: 3459827 - DNA, 25 bp, Homo sapien
tattcagagctaggttatgtcctgc

SEQ ID NO: 3459828 - DNA, 25 bp, Homo sapien
tcttcttagacggattctgctggaa

SEQ ID NO: 3459829 - DNA, 25 bp, Homo sapien
ttatcagtaagttagaggtttaata

SEQ ID NO: 3459830 - DNA, 25 bp, Homo sapien
tatcagtaagttagaggtttaataa

SEQ ID NO: 3459831 - DNA, 25 bp, Homo sapien
catttctactaacatggtgtggcag

SEQ ID NO: 3459832 - DNA, 25 bp, Homo sapien
gttttttcggtatgccaaagtgcca

SEQ ID NO: 3459833 - DNA, 25 bp, Homo sapien
taacggtgaagctactttggcatgc

SEQ ID NO: 3459834 - DNA, 25 bp, Homo sapien
ggtaacctttgctctattgctgcca

SEQ ID NO: 3459835 - DNA, 25 bp, Homo sapien
tattagttgccctgcctctcggaaa

SEQ ID NO: 3459836 - DNA, 25 bp, Homo sapien
gagttgggctcttgccatattaccc

SEQ ID NO: 3459837 - DNA, 25 bp, Homo sapien
tactaaaattctggaggagtcatgg

SEQ ID NO: 3459838 - DNA, 25 bp, Homo sapien
gcatgtccggcctgagattactctc

SEQ ID NO: 3459839 - DNA, 25 bp, Homo sapien
cactgagatcttgttggttcctgca

SEQ ID NO: 3459840 - DNA, 25 bp, Homo sapien
catcactgagatcttgttggttcct

SEQ ID NO: 3459841 - DNA, 25 bp, Homo sapien
agatcttgttggttcctgcagtctc

SEQ ID NO: 3459842 - DNA, 25 bp, Homo sapien
agcagcatcactgagatcttgttgg

SEQ ID NO: 3459843 - DNA, 25 bp, Homo sapien
ggtctgaaggatctgcaagaaggat

SEQ ID NO: 3459844 - DNA, 25 bp, Homo sapien
ccgtctgctgacaagcagataacta

SEQ ID NO: 3459845 - DNA, 25 bp, Homo sapien
ctagtgttaaatcccagcccaatac

SEQ ID NO: 3459846 - DNA, 25 bp, Homo sapien
tgctgacaagcagataactagtgtt

SEQ ID NO: 3459847 - DNA, 25 bp, Homo sapien
gcagataactagtgttaaatcccag

SEQ ID NO: 3459848 - DNA, 25 bp, Homo sapien
cggcggccgtcgtgtcggagcgacg

SEQ ID NO: 3459849 - DNA, 25 bp, Homo sapien
gagacgcggcggccgtcgtgtcgga

SEQ ID NO: 3459850 - DNA, 25 bp, Homo sapien
cgtgctctcggctgggtggatgcct

SEQ ID NO: 3459851 - DNA, 25 bp, Homo sapien
gtgctctcggctgggtggatgcctg

SEQ ID NO: 3459852 - DNA, 25 bp, Homo sapien
gcggagccggctggtgatctcctta

SEQ ID NO: 3459853 - DNA, 25 bp, Homo sapien
gctggtgatctccttagagctcaga

SEQ ID NO: 3459854 - DNA, 25 bp, Homo sapien
cctgaagtagtagccacccaagtcc

SEQ ID NO: 3459855 - DNA, 25 bp, Homo sapien
tgatctccttagagctcagagactg

SEQ ID NO: 3459856 - DNA, 25 bp, Homo sapien
ctctcagagcgcaccgataaccgat

SEQ ID NO: 3459857 - DNA, 25 bp, Homo sapien
gggttcactcagaatggcgccgacc

SEQ ID NO: 3459858 - DNA, 25 bp, Homo sapien
ctccacagccgcgaagaccaagggc

SEQ ID NO: 3459859 - DNA, 25 bp, Homo sapien
cagcatccgcccttcccgggtggtt

SEQ ID NO: 3459860 - DNA, 25 bp, Homo sapien
tccttccgataggactgaaaggtct

SEQ ID NO: 3459861 - DNA, 25 bp, Homo sapien
aatcatccttccgataggactgaaa

SEQ ID NO: 3459862 - DNA, 25 bp, Homo sapien
aggtctggtcaaagccgaacgcctg

SEQ ID NO: 3459863 - DNA, 25 bp, Homo sapien
gcctgcgccttgattctgcccagca

SEQ ID NO: 3459864 - DNA, 25 bp, Homo sapien
agtttaaaaatccgcagagacccag

SEQ ID NO: 3459865 - DNA, 25 bp, Homo sapien
cagggaactctccgacccccatact

SEQ ID NO: 3459866 - DNA, 25 bp, Homo sapien
ccttttcagcttgagtcagctgctg

SEQ ID NO: 3459867 - DNA, 25 bp, Homo sapien
cttttcagcttgagtcagctgctgg

SEQ ID NO: 3459868 - DNA, 25 bp, Homo sapien
gccttttcagcttgagtcagctgct

SEQ ID NO: 3459869 - DNA, 25 bp, Homo sapien
ctaatatgatccattgtccagaaga

SEQ ID NO: 3459870 - DNA, 25 bp, Homo sapien
attgggaataacatttgggtctttg

SEQ ID NO: 3459871 - DNA, 25 bp, Homo sapien
aagatccatcttagtcaccttgggc

SEQ ID NO: 3459872 - DNA, 25 bp, Homo sapien
tgtccgtatacatgcacctcaagct

SEQ ID NO: 3459873 - DNA, 25 bp, Homo sapien
tcaaggtccagatgattcagttgct

SEQ ID NO: 3459874 - DNA, 25 bp, Homo sapien
tccttgggcgctatcaccagaattg

SEQ ID NO: 3459875 - DNA, 25 bp, Homo sapien
ttccacagggccaatttagcccgta

SEQ ID NO: 3459876 - DNA, 25 bp, Homo sapien
ccaatttagcccgtatgttctgcag

SEQ ID NO: 3459877 - DNA, 25 bp, Homo sapien
ttagcccgtatgttctgcagggtgg

SEQ ID NO: 3459878 - DNA, 25 bp, Homo sapien
ctccgggtggcccaatctccaaggt

SEQ ID NO: 3459879 - DNA, 25 bp, Homo sapien
tcttttggctgtccacttgagagtc

SEQ ID NO: 3459880 - DNA, 25 bp, Homo sapien
ctgagaagtagcttgtgcttaagaa

SEQ ID NO: 3459881 - DNA, 25 bp, Homo sapien
gaagtagcttgtgcttaagaagagt

SEQ ID NO: 3459882 - DNA, 25 bp, Homo sapien
tgaatgtttacactagctcttttgg

SEQ ID NO: 3459883 - DNA, 25 bp, Homo sapien
gcaaggaacatttatagcttcaatt

SEQ ID NO: 3459884 - DNA, 25 bp, Homo sapien
ctgtgtgcaaggaacatttatagct

SEQ ID NO: 3459885 - DNA, 25 bp, Homo sapien
gcttcaatttttttcacttcagttc

SEQ ID NO: 3459886 - DNA, 25 bp, Homo sapien
aggaacatttatagcttcaattttt

SEQ ID NO: 3459887 - DNA, 25 bp, Homo sapien
tcagaaatgagaaatggatcacaaa

SEQ ID NO: 3459888 - DNA, 25 bp, Homo sapien
tcatataaccgatgaaaaaatgaca

SEQ ID NO: 3459889 - DNA, 25 bp, Homo sapien
aacatttaacaatatgtccactgtc

SEQ ID NO: 3459890 - DNA, 25 bp, Homo sapien
tgtctcgtacaatatcttcatcata

SEQ ID NO: 3459891 - DNA, 25 bp, Homo sapien
gcccagctccgggatgtttttaata

SEQ ID NO: 3459892 - DNA, 25 bp, Homo sapien
tcctgtgagttatatgacgtttcgc

SEQ ID NO: 3459893 - DNA, 25 bp, Homo sapien
gtttcgcagcatctctacccatcag

SEQ ID NO: 3459894 - DNA, 25 bp, Homo sapien
catttgataagttaaaaggcccaca

SEQ ID NO: 3459895 - DNA, 25 bp, Homo sapien
cgagcagctgggacttcagccttcc

SEQ ID NO: 3459896 - DNA, 25 bp, Homo sapien
gcagctgggacttcagccttccagg

SEQ ID NO: 3459897 - DNA, 25 bp, Homo sapien
ttcccagactcaatcttctcacttc

SEQ ID NO: 3459898 - DNA, 25 bp, Homo sapien
acttcccagactcaatcttctcact

SEQ ID NO: 3459899 - DNA, 25 bp, Homo sapien
aacggtcattttctaagctctctcc

SEQ ID NO: 3459900 - DNA, 25 bp, Homo sapien
tggagcctcatatccagctctcgct

SEQ ID NO: 3459901 - DNA, 25 bp, Homo sapien
tatggattttggatcacgattgttc

SEQ ID NO: 3459902 - DNA, 25 bp, Homo sapien
cccagagactaaacggtcattttct

SEQ ID NO: 3459903 - DNA, 25 bp, Homo sapien
tgttgtttccagatatgggctaatc

SEQ ID NO: 3459904 - DNA, 25 bp, Homo sapien
ctctatctggttggctgaatatttc

SEQ ID NO: 3459905 - DNA, 25 bp, Homo sapien
gggctaatcacatcctcatattgac

SEQ ID NO: 3459906 - DNA, 25 bp, Homo sapien
gggctccaccaaggcaaagatgttt

SEQ ID NO: 3459907 - DNA, 25 bp, Homo sapien
ctagagatttacatattgtgatcta

SEQ ID NO: 3459908 - DNA, 25 bp, Homo sapien
ttaactagagatttacatattgtga

SEQ ID NO: 3459909 - DNA, 25 bp, Homo sapien
tttattctattaactagagatttac

SEQ ID NO: 3459910 - DNA, 25 bp, Homo sapien
ctattaactagagatttacatattg

SEQ ID NO: 3459911 - DNA, 25 bp, Homo sapien
agcagaagagctagatgaagaatga

SEQ ID NO: 3459912 - DNA, 25 bp, Homo sapien
gaagaatgaggggactgagaactaa

SEQ ID NO: 3459913 - DNA, 25 bp, Homo sapien
aaaaagaaggcttggaagatggcag

SEQ ID NO: 3459914 - DNA, 25 bp, Homo sapien
aaaaaagaaggcttggaagatggca

SEQ ID NO: 3459915 - DNA, 25 bp, Homo sapien
ataagctgaaactttaaagacagaa

SEQ ID NO: 3459916 - DNA, 25 bp, Homo sapien
ggttgcaaaagttctctcacactta

SEQ ID NO: 3459917 - DNA, 25 bp, Homo sapien
cagttgtaacaactctattaataaa

SEQ ID NO: 3459918 - DNA, 25 bp, Homo sapien
ttttctcctaggcataacattgtcc

SEQ ID NO: 3459919 - DNA, 25 bp, Homo sapien
cctgattgttaactccagttgtaac

SEQ ID NO: 3459920 - DNA, 25 bp, Homo sapien
tgtttatcactgtgacttagcccag

SEQ ID NO: 3459921 - DNA, 25 bp, Homo sapien
ctggagtacagtattggtaccacca

SEQ ID NO: 3459922 - DNA, 25 bp, Homo sapien
cagtattggtaccaccacagctcac

SEQ ID NO: 3459923 - DNA, 25 bp, Homo sapien
ttagcccagtacaatagctgataca

SEQ ID NO: 3459924 - DNA, 25 bp, Homo sapien
gtggtataaaacatgaaggtgacgc

SEQ ID NO: 3459925 - DNA, 25 bp, Homo sapien
ctttgctgaaggatagcacatacca

SEQ ID NO: 3459926 - DNA, 25 bp, Homo sapien
gataggatccacaataaagtaagaa

SEQ ID NO: 3459927 - DNA, 25 bp, Homo sapien
gaaggatagcacataccagcagaat

SEQ ID NO: 3459928 - DNA, 25 bp, Homo sapien
tacaaaatagtagaggtacataatc

SEQ ID NO: 3459929 - DNA, 25 bp, Homo sapien
ataaatacaaaatagtagaggtaca

SEQ ID NO: 3459930 - DNA, 25 bp, Homo sapien
tagtagaggtacataatctgaaaga

SEQ ID NO: 3459931 - DNA, 25 bp, Homo sapien
aagtatatgtttatctataagttag

SEQ ID NO: 3459932 - DNA, 25 bp, Homo sapien
gtgccaggccccagaacgttacttc

SEQ ID NO: 3459933 - DNA, 25 bp, Homo sapien
gctcttgtattagccgtgggacagc

SEQ ID NO: 3459934 - DNA, 25 bp, Homo sapien
gaacgacttactaatgccatcaggc

SEQ ID NO: 3459935 - DNA, 25 bp, Homo sapien
cagatgtaaacgcttgtgcaatgaa

SEQ ID NO: 3459936 - DNA, 25 bp, Homo sapien
ttcctgggctgcatatctaatccca

SEQ ID NO: 3459937 - DNA, 25 bp, Homo sapien
gttcctgggctgcatatctaatccc

SEQ ID NO: 3459938 - DNA, 25 bp, Homo sapien
tcctgggctgcatatctaatcccat

SEQ ID NO: 3459939 - DNA, 25 bp, Homo sapien
tgcttttacaaagccggcttctaca

SEQ ID NO: 3459940 - DNA, 25 bp, Homo sapien
tctagggacaatttttgccacaggc

SEQ ID NO: 3459941 - DNA, 25 bp, Homo sapien
gctctctagggacaatttttgccac

SEQ ID NO: 3459942 - DNA, 25 bp, Homo sapien
gccggcttctacaggctgcggctgc

SEQ ID NO: 3459943 - DNA, 25 bp, Homo sapien
gaaagccattctgtggtcacttgtc

SEQ ID NO: 3459944 - DNA, 25 bp, Homo sapien
aaagccattctgtggtcacttgtca

SEQ ID NO: 3459945 - DNA, 25 bp, Homo sapien
tgtctcactccagacaacccctctt

SEQ ID NO: 3459946 - DNA, 25 bp, Homo sapien
tggccagttgtctcactccagacaa

SEQ ID NO: 3459947 - DNA, 25 bp, Homo sapien
tttccttaagaagcctccagtgagt

SEQ ID NO: 3459948 - DNA, 25 bp, Homo sapien
tgctggttgcagatgagttggaaca

SEQ ID NO: 3459949 - DNA, 25 bp, Homo sapien
tccagtgagtttctagaaccttcag

SEQ ID NO: 3459950 - DNA, 25 bp, Homo sapien
tcaaagttttaaggacgaatgctgg

SEQ ID NO: 3459951 - DNA, 25 bp, Homo sapien
agtgcagtggcaccatcttggctca

SEQ ID NO: 3459952 - DNA, 25 bp, Homo sapien
cggagtctcacactgttgcctgggc

SEQ ID NO: 3459953 - DNA, 25 bp, Homo sapien
catgttagacagaatggtctcgatc

SEQ ID NO: 3459954 - DNA, 25 bp, Homo sapien
tggagtgcagtggcaccatcttggc

SEQ ID NO: 3459955 - DNA, 25 bp, Homo sapien
tacaaaatgttttattctacaatat

SEQ ID NO: 3459956 - DNA, 25 bp, Homo sapien
aaatgttttattctacaatatgtta

SEQ ID NO: 3459957 - DNA, 25 bp, Homo sapien
atgttttattctacaatatgttaag

SEQ ID NO: 3459958 - DNA, 25 bp, Homo sapien
caaaatgttttattctacaatatgt

SEQ ID NO: 3459959 - DNA, 25 bp, Homo sapien
cagtttgggacgtgcagtgagttcc

SEQ ID NO: 3459960 - DNA, 25 bp, Homo sapien
tacagagttttgagttcaggtccca

SEQ ID NO: 3459961 - DNA, 25 bp, Homo sapien
tgctatgaacactaactaaagggct

SEQ ID NO: 3459962 - DNA, 25 bp, Homo sapien
tgcacaagcccattctaaggaaatc

SEQ ID NO: 3459963 - DNA, 25 bp, Homo sapien
ctgtgcctggcccaacggtggactc

SEQ ID NO: 3459964 - DNA, 25 bp, Homo sapien
ggagctgggtccctacccctgctat

SEQ ID NO: 3459965 - DNA, 25 bp, Homo sapien
caacggtggactccgttaatgtgga

SEQ ID NO: 3459966 - DNA, 25 bp, Homo sapien
ggtccctacccctgctatccctgtg

SEQ ID NO: 3459967 - DNA, 25 bp, Homo sapien
gttagtctgcaaaaactcacttgag

SEQ ID NO: 3459968 - DNA, 25 bp, Homo sapien
aattagtgcgtcttcaggtacaagc

SEQ ID NO: 3459969 - DNA, 25 bp, Homo sapien
taattgaagctttgagaccaggtct

SEQ ID NO: 3459970 - DNA, 25 bp, Homo sapien
tgcaatagtcactggaagccgcaac

SEQ ID NO: 3459971 - DNA, 25 bp, Homo sapien
ccgaactgtggtgtctgcggagaac

SEQ ID NO: 3459972 - DNA, 25 bp, Homo sapien
gcaggaagttcttccgctccgctcg

SEQ ID NO: 3459973 - DNA, 25 bp, Homo sapien
gcgaaccgcaaacgatgggtccaat

SEQ ID NO: 3459974 - DNA, 25 bp, Homo sapien
gaaaggcgcttccagttcgcctgga

SEQ ID NO: 3459975 - DNA, 25 bp, Homo sapien
tccaactcccttgacggaggccgga

SEQ ID NO: 3459976 - DNA, 25 bp, Homo sapien
ggaggccggacagctcgttgccttt

SEQ ID NO: 3459977 - DNA, 25 bp, Homo sapien
gctgcgcccgactgagacagaaact

SEQ ID NO: 3459978 - DNA, 25 bp, Homo sapien
cgccccggctccactggtctggcgg

SEQ ID NO: 3459979 - DNA, 25 bp, Homo sapien
gcgctgtcctcgctctcagggccgg

SEQ ID NO: 3459980 - DNA, 25 bp, Homo sapien
gaggtggagaagcggcgacggctgc

SEQ ID NO: 3459981 - DNA, 25 bp, Homo sapien
ggcgagcgagggctacgcccggacg

SEQ ID NO: 3459982 - DNA, 25 bp, Homo sapien
cggctccacgggccgaggtggagaa

SEQ ID NO: 3459983 - DNA, 25 bp, Homo sapien
aggcggcggctgctgcccgggatcc

SEQ ID NO: 3459984 - DNA, 25 bp, Homo sapien
gcggcggctgctgcccgggatccat

SEQ ID NO: 3459985 - DNA, 25 bp, Homo sapien
gggccggttgaggcggcggctgctg

SEQ ID NO: 3459986 - DNA, 25 bp, Homo sapien
gggggccggttgaggcggcggctgc

SEQ ID NO: 3459987 - DNA, 25 bp, Homo sapien
cctgcgggggctgcgaaggcggctg

SEQ ID NO: 3459988 - DNA, 25 bp, Homo sapien
gctgcgaaggcggctgcccttggcc

SEQ ID NO: 3459989 - DNA, 25 bp, Homo sapien
gggggctgcgaaggcggctgccctt

SEQ ID NO: 3459990 - DNA, 25 bp, Homo sapien
ggctgcgaaggcggctgcccttggc

SEQ ID NO: 3459991 - DNA, 25 bp, Homo sapien
cggtctggggcacgttggccgtctt

SEQ ID NO: 3459992 - DNA, 25 bp, Homo sapien
ggcggcttgaagaaggagtcgggca

SEQ ID NO: 3459993 - DNA, 25 bp, Homo sapien
ccaggtcggtctccgagtccccgcg

SEQ ID NO: 3459994 - DNA, 25 bp, Homo sapien
tgggatttgggctccggcggcttga

SEQ ID NO: 3459995 - DNA, 25 bp, Homo sapien
cctgagccgcgaggaaaataaatgc

SEQ ID NO: 3459996 - DNA, 25 bp, Homo sapien
caagttccaacacacaagggaagag

SEQ ID NO: 3459997 - DNA, 25 bp, Homo sapien
tgtattccgaaatcgcctgagccgc

SEQ ID NO: 3459998 - DNA, 25 bp, Homo sapien
tgataagagcaagccggcccaagtt

SEQ ID NO: 3459999 - DNA, 25 bp, Homo sapien
ctttccactcaagttacatcccgag

SEQ ID NO: 3460000 - DNA, 25 bp, Homo sapien
gacaaattgaagtgtttaggcaagc

SEQ ID NO: 3460001 - DNA, 25 bp, Homo sapien
caacaggcctgcaaataggagaggg

SEQ ID NO: 3460002 - DNA, 25 bp, Homo sapien
ctccgacaggagactatacaacagg

SEQ ID NO: 3460003 - DNA, 25 bp, Homo sapien
ctgcagtgcctgcatcagtactggc

SEQ ID NO: 3460004 - DNA, 25 bp, Homo sapien
tgctgggccagagactactccagtg

SEQ ID NO: 3460005 - DNA, 25 bp, Homo sapien
agctcgaacatgctgtggagtcagg

SEQ ID NO: 3460006 - DNA, 25 bp, Homo sapien
gaagactgtcgaagatgctgagctg

SEQ ID NO: 3460007 - DNA, 25 bp, Homo sapien
gcattcttctcccacatccaatgtt

SEQ ID NO: 3460008 - DNA, 25 bp, Homo sapien
atgtttaggggcctccatagaatcc

SEQ ID NO: 3460009 - DNA, 25 bp, Homo sapien
cttctcccacatccaatgtttaggg

SEQ ID NO: 3460010 - DNA, 25 bp, Homo sapien
attcttctcccacatccaatgttta

SEQ ID NO: 3460011 - DNA, 25 bp, Homo sapien
tggcaaacgaacagataggactacc

SEQ ID NO: 3460012 - DNA, 25 bp, Homo sapien
gctaaccactctcgtgtcacagctg

SEQ ID NO: 3460013 - DNA, 25 bp, Homo sapien
tctctattaaatgagcaccacctgc

SEQ ID NO: 3460014 - DNA, 25 bp, Homo sapien
caatggtctattagggactgaacac

SEQ ID NO: 3460015 - DNA, 25 bp, Homo sapien
tatagctcccagatacagatgcatg

SEQ ID NO: 3460016 - DNA, 25 bp, Homo sapien
tgagcccaactcgaatgacagaatt

SEQ ID NO: 3460017 - DNA, 25 bp, Homo sapien
gcatgagtgacttcaggcagtatca

SEQ ID NO: 3460018 - DNA, 25 bp, Homo sapien
ccaatgcaccaaagaacttagttcc

SEQ ID NO: 3460019 - DNA, 25 bp, Homo sapien
aatccttgtcccatacctctgagca

SEQ ID NO: 3460020 - DNA, 25 bp, Homo sapien
tcaatccttgtcccatacctctgag

SEQ ID NO: 3460021 - DNA, 25 bp, Homo sapien
atccttgtcccatacctctgagcat

SEQ ID NO: 3460022 - DNA, 25 bp, Homo sapien
ctctcaatccttgtcccatacctct

SEQ ID NO: 3460023 - DNA, 25 bp, Homo sapien
catctagtggaggagaataagcaat

SEQ ID NO: 3460024 - DNA, 25 bp, Homo sapien
cacatctagtggaggagaataagca

SEQ ID NO: 3460025 - DNA, 25 bp, Homo sapien
tagtggaggagaataagcaatcagg

SEQ ID NO: 3460026 - DNA, 25 bp, Homo sapien
tggaggagaataagcaatcaggcac

SEQ ID NO: 3460027 - DNA, 25 bp, Homo sapien
tttcacatatgaactccggtttaca

SEQ ID NO: 3460028 - DNA, 25 bp, Homo sapien
tcacatatgaactccggtttacaac

SEQ ID NO: 3460029 - DNA, 25 bp, Homo sapien
atttcacatatgaactccggtttac

SEQ ID NO: 3460030 - DNA, 25 bp, Homo sapien
acatatgaactccggtttacaactc

SEQ ID NO: 3460031 - DNA, 25 bp, Homo sapien
ggctgtgacgttcatctgggacagc

SEQ ID NO: 3460032 - DNA, 25 bp, Homo sapien
tgggggctgtgacgttcatctggga

SEQ ID NO: 3460033 - DNA, 25 bp, Homo sapien
ggggctgtgacgttcatctgggaca

SEQ ID NO: 3460034 - DNA, 25 bp, Homo sapien
ctgtgacgttcatctgggacagcat

SEQ ID NO: 3460035 - DNA, 25 bp, Homo sapien
aagtatcacttttcactccccaggg

SEQ ID NO: 3460036 - DNA, 25 bp, Homo sapien
tcaggtccatgggatttccagagcc

SEQ ID NO: 3460037 - DNA, 25 bp, Homo sapien
catggacaatagatgacgcctggga

SEQ ID NO: 3460038 - DNA, 25 bp, Homo sapien
cacatagagctaaggaagtatcact

SEQ ID NO: 3460039 - DNA, 25 bp, Homo sapien
cttttagaagaatcaggaaccaact

SEQ ID NO: 3460040 - DNA, 25 bp, Homo sapien
cccatatattgtgacttcagactga

SEQ ID NO: 3460041 - DNA, 25 bp, Homo sapien
tgctattaggtttcccgttagtata

SEQ ID NO: 3460042 - DNA, 25 bp, Homo sapien
caactacttggaagagccaatgacc

SEQ ID NO: 3460043 - DNA, 25 bp, Homo sapien
tcaagagcgatgattagaaagtgcc

SEQ ID NO: 3460044 - DNA, 25 bp, Homo sapien
tcccagtggagacgaagtgaaaggc

SEQ ID NO: 3460045 - DNA, 25 bp, Homo sapien
gaaaggctctcaccatcagagtaaa

SEQ ID NO: 3460046 - DNA, 25 bp, Homo sapien
cattagttgccctgacacgagtggc

SEQ ID NO: 3460047 - DNA, 25 bp, Homo sapien
gtaggtaacatatattttgcagggt

SEQ ID NO: 3460048 - DNA, 25 bp, Homo sapien
ggagtggcgtgatcagccaccacac

SEQ ID NO: 3460049 - DNA, 25 bp, Homo sapien
cacacccggcctgtaaataatagat

SEQ ID NO: 3460050 - DNA, 25 bp, Homo sapien
tatattaaataagagctcatgaaat

SEQ ID NO: 3460051 - DNA, 25 bp, Homo sapien
tctgtcccactagtaagactcttcc

SEQ ID NO: 3460052 - DNA, 25 bp, Homo sapien
ttctccaatctgtcccactagtaag

SEQ ID NO: 3460053 - DNA, 25 bp, Homo sapien
ccgtgcctgacccaattctactcta

SEQ ID NO: 3460054 - DNA, 25 bp, Homo sapien
ttcttatgccatatctttgtgaagc

SEQ ID NO: 3460055 - DNA, 25 bp, Homo sapien
gtttcaatcatctgtttgggctagg

SEQ ID NO: 3460056 - DNA, 25 bp, Homo sapien
gaaatgtaggattaccacaaaaata

SEQ ID NO: 3460057 - DNA, 25 bp, Homo sapien
aaataaatgtaagaggagaccacag

SEQ ID NO: 3460058 - DNA, 25 bp, Homo sapien
gaccacagtggctcgatcaaaatca

SEQ ID NO: 3460059 - DNA, 25 bp, Homo sapien
tttttgaccacttcctcagtaactg

SEQ ID NO: 3460060 - DNA, 25 bp, Homo sapien
cctgtttatcacatgtatatcaaac

SEQ ID NO: 3460061 - DNA, 25 bp, Homo sapien
tatcacatgtatatcaaaccttttc

SEQ ID NO: 3460062 - DNA, 25 bp, Homo sapien
tgtttatcacatgtatatcaaacct

SEQ ID NO: 3460063 - DNA, 25 bp, Homo sapien
cacatgtatatcaaaccttttctca

SEQ ID NO: 3460064 - DNA, 25 bp, Homo sapien
ggtagaatttgttgtacacatccca

SEQ ID NO: 3460065 - DNA, 25 bp, Homo sapien
tttgttgtacacatcccaagtttac

SEQ ID NO: 3460066 - DNA, 25 bp, Homo sapien
gaatttgttgtacacatcccaagtt

SEQ ID NO: 3460067 - DNA, 25 bp, Homo sapien
agaggtagaatttgttgtacacatc

SEQ ID NO: 3460068 - DNA, 25 bp, Homo sapien
catggtttttatttggtgcacctaa

SEQ ID NO: 3460069 - DNA, 25 bp, Homo sapien
gtcaagccttgggtctagccaagag

SEQ ID NO: 3460070 - DNA, 25 bp, Homo sapien
catggcttgttcccatccatcagga

SEQ ID NO: 3460071 - DNA, 25 bp, Homo sapien
tcaagccttgggtctagccaagagg

SEQ ID NO: 3460072 - DNA, 25 bp, Homo sapien
acaagtgattctggttagtcggcca

SEQ ID NO: 3460073 - DNA, 25 bp, Homo sapien
cctgaggagccctaaaaatctgatt

SEQ ID NO: 3460074 - DNA, 25 bp, Homo sapien
actactggtaaacattgggtgggca

SEQ ID NO: 3460075 - DNA, 25 bp, Homo sapien
tcaggtcactgacaaaagctggtac

SEQ ID NO: 3460076 - DNA, 25 bp, Homo sapien
ggtgacatgttcctccttaggatgg

SEQ ID NO: 3460077 - DNA, 25 bp, Homo sapien
ctacaacacccaggcataagatggt

SEQ ID NO: 3460078 - DNA, 25 bp, Homo sapien
cctccttaggatgggaaacactaca

SEQ ID NO: 3460079 - DNA, 25 bp, Homo sapien
taagatggtactcatcactctcaga

SEQ ID NO: 3460080 - DNA, 25 bp, Homo sapien
gagagacagaagagggggcaaaatg

SEQ ID NO: 3460081 - DNA, 25 bp, Homo sapien
gagacagaagagggggcaaaatgct

SEQ ID NO: 3460082 - DNA, 25 bp, Homo sapien
agacagaagagggggcaaaatgctt

SEQ ID NO: 3460083 - DNA, 25 bp, Homo sapien
agagacagaagagggggcaaaatgc

SEQ ID NO: 3460084 - DNA, 25 bp, Homo sapien
caaatactgacagcccaggataacc

SEQ ID NO: 3460085 - DNA, 25 bp, Homo sapien
tcttttcctctgtacgctaagtaat

SEQ ID NO: 3460086 - DNA, 25 bp, Homo sapien
aaccaggaaagacttgagttgataa

SEQ ID NO: 3460087 - DNA, 25 bp, Homo sapien
aataatttttagctcgcaatagctc

SEQ ID NO: 3460088 - DNA, 25 bp, Homo sapien
agaatgcagtgcaccatcttagctc

SEQ ID NO: 3460089 - DNA, 25 bp, Homo sapien
atccatcagcctcggcttttgagat

SEQ ID NO: 3460090 - DNA, 25 bp, Homo sapien
tgatccatcagcctcggcttttgag

SEQ ID NO: 3460091 - DNA, 25 bp, Homo sapien
ccatcagcctcggcttttgagatgg

SEQ ID NO: 3460092 - DNA, 25 bp, Homo sapien
ctttctaaacctaaagactctgact

SEQ ID NO: 3460093 - DNA, 25 bp, Homo sapien
gtgctccataaaccttagtcctctc

SEQ ID NO: 3460094 - DNA, 25 bp, Homo sapien
tcctacagacgaattccatattttg

SEQ ID NO: 3460095 - DNA, 25 bp, Homo sapien
tctgactcctacagacgaattccat

SEQ ID NO: 3460096 - DNA, 25 bp, Homo sapien
ttgtaaacattgtcctaggccaggg

SEQ ID NO: 3460097 - DNA, 25 bp, Homo sapien
ctaaaactggcaggcctctagcact

SEQ ID NO: 3460098 - DNA, 25 bp, Homo sapien
caatttgtgactctgtgacttgaca

SEQ ID NO: 3460099 - DNA, 25 bp, Homo sapien
cattgagcgtgttttgtgtgtcctc

SEQ ID NO: 3460100 - DNA, 25 bp, Homo sapien
acctgcatcccacatgttttgaaat

SEQ ID NO: 3460101 - DNA, 25 bp, Homo sapien
aactaacatcttttggctccagaga

SEQ ID NO: 3460102 - DNA, 25 bp, Homo sapien
tattattactgttgtcacaagatac

SEQ ID NO: 3460103 - DNA, 25 bp, Homo sapien
ttcgatgtaacttttttgggcagga

SEQ ID NO: 3460104 - DNA, 25 bp, Homo sapien
gaaacaagacgtagttttaacatgc

SEQ ID NO: 3460105 - DNA, 25 bp, Homo sapien
agttgctgcagtcgcatctgttgct

SEQ ID NO: 3460106 - DNA, 25 bp, Homo sapien
tgccacccatgacgcctccctgtgg

SEQ ID NO: 3460107 - DNA, 25 bp, Homo sapien
tgcagttgctgcagtcgcatctgtt

SEQ ID NO: 3460108 - DNA, 25 bp, Homo sapien
tgctgcagtcgcatctgttgctgct

SEQ ID NO: 3460109 - DNA, 25 bp, Homo sapien
cagggtttacctttgatgccaatca

SEQ ID NO: 3460110 - DNA, 25 bp, Homo sapien
caaagcacagtttcaacgtgagcct

SEQ ID NO: 3460111 - DNA, 25 bp, Homo sapien
cccaaatcagagttcaggtagtact

SEQ ID NO: 3460112 - DNA, 25 bp, Homo sapien
tatggacagattaccgacaaagcac

SEQ ID NO: 3460113 - DNA, 25 bp, Homo sapien
taagaaaagacgacacagtaggcag

SEQ ID NO: 3460114 - DNA, 25 bp, Homo sapien
tacccaagaagaagcagactgacga

SEQ ID NO: 3460115 - DNA, 25 bp, Homo sapien
gacaggagccaatggagtcaccaca

SEQ ID NO: 3460116 - DNA, 25 bp, Homo sapien
taacagcattgaggataggacagca

SEQ ID NO: 3460117 - DNA, 25 bp, Homo sapien
cattttggagaatttgctgtgctgg

SEQ ID NO: 3460118 - DNA, 25 bp, Homo sapien
gctgtgctgggattgatattccgca

SEQ ID NO: 3460119 - DNA, 25 bp, Homo sapien
tgctgggattgatattccgcattgc

SEQ ID NO: 3460120 - DNA, 25 bp, Homo sapien
ttgctgtgctgggattgatattccg

SEQ ID NO: 3460121 - DNA, 25 bp, Homo sapien
cacgagtcagacaagtgcctgtgtt

SEQ ID NO: 3460122 - DNA, 25 bp, Homo sapien
tcttcccacgagtcagacaagtgcc

SEQ ID NO: 3460123 - DNA, 25 bp, Homo sapien
gaacgagattcttcccacgagtcag

SEQ ID NO: 3460124 - DNA, 25 bp, Homo sapien
cagacaagtgcctgtgttagaagaa

SEQ ID NO: 3460125 - DNA, 25 bp, Homo sapien
acagtatccaaaatgagtagaattt

SEQ ID NO: 3460126 - DNA, 25 bp, Homo sapien
aactcctacttctacagcagattct

SEQ ID NO: 3460127 - DNA, 25 bp, Homo sapien
tcctacttctacagcagattctaaa

SEQ ID NO: 3460128 - DNA, 25 bp, Homo sapien
tcatggtgctccaacggacaactta

SEQ ID NO: 3460129 - DNA, 25 bp, Homo sapien
atttatcagattcagggtataagac

SEQ ID NO: 3460130 - DNA, 25 bp, Homo sapien
tatttatcagattcagggtataaga

SEQ ID NO: 3460131 - DNA, 25 bp, Homo sapien
ttatttatcagattcagggtataag

SEQ ID NO: 3460132 - DNA, 25 bp, Homo sapien
cgttagtgtacacgagcacagcacc

SEQ ID NO: 3460133 - DNA, 25 bp, Homo sapien
cccatactgacgttagtgtacacga

SEQ ID NO: 3460134 - DNA, 25 bp, Homo sapien
aacctcacccatactgacgttagtg

SEQ ID NO: 3460135 - DNA, 25 bp, Homo sapien
ttcattaacctcacccatactgacg

SEQ ID NO: 3460136 - DNA, 25 bp, Homo sapien
taaaacttactcacgatggaaacac

SEQ ID NO: 3460137 - DNA, 25 bp, Homo sapien
gaagcaggacaccttataggagaaa

SEQ ID NO: 3460138 - DNA, 25 bp, Homo sapien
gcatggagtaggatactttccgaaa

SEQ ID NO: 3460139 - DNA, 25 bp, Homo sapien
tgagtgtgttcacgctagcacgcgc

SEQ ID NO: 3460140 - DNA, 25 bp, Homo sapien
ttaggcattgtgttcaggataaaat

SEQ ID NO: 3460141 - DNA, 25 bp, Homo sapien
ctgaaatcagttttgtagacaatcc

SEQ ID NO: 3460142 - DNA, 25 bp, Homo sapien
gatagacgtaactttcaacatgaaa

SEQ ID NO: 3460143 - DNA, 25 bp, Homo sapien
tagtccagtattctaattttaggca

SEQ ID NO: 3460144 - DNA, 25 bp, Homo sapien
taaaacagtgatactacactcattg

SEQ ID NO: 3460145 - DNA, 25 bp, Homo sapien
ggacacatcctctcaataccatgcc

SEQ ID NO: 3460146 - DNA, 25 bp, Homo sapien
ctcatcttacaaagtgagaagtgac

SEQ ID NO: 3460147 - DNA, 25 bp, Homo sapien
tcttgcagtcttatggggatccctc

SEQ ID NO: 3460148 - DNA, 25 bp, Homo sapien
tctgagctattggtcgtcattgttc

SEQ ID NO: 3460149 - DNA, 25 bp, Homo sapien
tattggtcgtcattgttctcaattc

SEQ ID NO: 3460150 - DNA, 25 bp, Homo sapien
agctattggtcgtcattgttctcaa

SEQ ID NO: 3460151 - DNA, 25 bp, Homo sapien
gatctgagctattggtcgtcattgt

SEQ ID NO: 3460152 - DNA, 25 bp, Homo sapien
tcaactctgcatgtacttgccattt

SEQ ID NO: 3460153 - DNA, 25 bp, Homo sapien
caagcactaagcagaatgattttaa

SEQ ID NO: 3460154 - DNA, 25 bp, Homo sapien
cagatgttccaaatagcctattaca

SEQ ID NO: 3460155 - DNA, 25 bp, Homo sapien
ccttttcagatattcaccagtagca

SEQ ID NO: 3460156 - DNA, 25 bp, Homo sapien
tctgcccttagattagtaacactga

SEQ ID NO: 3460157 - DNA, 25 bp, Homo sapien
gccccttcaacaagacaggtactgg

SEQ ID NO: 3460158 - DNA, 25 bp, Homo sapien
tccctgggattaatatagccccttc

SEQ ID NO: 3460159 - DNA, 25 bp, Homo sapien
tgactgtcagaaggatatgcagcct

SEQ ID NO: 3460160 - DNA, 25 bp, Homo sapien
tattcggctgctaagcatgggacac

SEQ ID NO: 3460161 - DNA, 25 bp, Homo sapien
ccctgatctgggacaagagcctggt

SEQ ID NO: 3460162 - DNA, 25 bp, Homo sapien
tgagaggctcacaacttcaaggagg

SEQ ID NO: 3460163 - DNA, 25 bp, Homo sapien
tacagagttgcgcagagttcattcc

SEQ ID NO: 3460164 - DNA, 25 bp, Homo sapien
tgagccaaaataggtgagtcactgc

SEQ ID NO: 3460165 - DNA, 25 bp, Homo sapien
caaggcctcaattctccaggtggtg

SEQ ID NO: 3460166 - DNA, 25 bp, Homo sapien
tcagggccatagacagggcttgtgc

SEQ ID NO: 3460167 - DNA, 25 bp, Homo sapien
taatcctaattgaagctggcagctc

SEQ ID NO: 3460168 - DNA, 25 bp, Homo sapien
cacctgctgagcagcaacataattc

SEQ ID NO: 3460169 - DNA, 25 bp, Homo sapien
tgctgagcagcaacataattctcaa

SEQ ID NO: 3460170 - DNA, 25 bp, Homo sapien
cctgctgagcagcaacataattctc

SEQ ID NO: 3460171 - DNA, 25 bp, Homo sapien
ctgctgagcagcaacataattctca

SEQ ID NO: 3460172 - DNA, 25 bp, Homo sapien
ttcgagggacactgtagctgctcat

SEQ ID NO: 3460173 - DNA, 25 bp, Homo sapien
catctggggttcgagggacactgta

SEQ ID NO: 3460174 - DNA, 25 bp, Homo sapien
aagtcatctggggttcgagggacac

SEQ ID NO: 3460175 - DNA, 25 bp, Homo sapien
ggttcgagggacactgtagctgctc

SEQ ID NO: 3460176 - DNA, 25 bp, Homo sapien
ggtgataacatatcccactgttaag

SEQ ID NO: 3460177 - DNA, 25 bp, Homo sapien
caccgtatagagacaaagcaggatc

SEQ ID NO: 3460178 - DNA, 25 bp, Homo sapien
gcatgtaccatgacagctgacttat

SEQ ID NO: 3460179 - DNA, 25 bp, Homo sapien
caataccttatgagacctggtgata

SEQ ID NO: 3460180 - DNA, 25 bp, Homo sapien
acttatgacctcacgtgatctggct

SEQ ID NO: 3460181 - DNA, 25 bp, Homo sapien
gaacttatgacctcacgtgatctgg

SEQ ID NO: 3460182 - DNA, 25 bp, Homo sapien
ttatgacctcacgtgatctggctac

SEQ ID NO: 3460183 - DNA, 25 bp, Homo sapien
atgacctcacgtgatctggctacct

SEQ ID NO: 3460184 - DNA, 25 bp, Homo sapien
aacacacagagataacaaagtcctt

SEQ ID NO: 3460185 - DNA, 25 bp, Homo sapien
gtatcatatgagcacagagaaatgc

SEQ ID NO: 3460186 - DNA, 25 bp, Homo sapien
cagagataacaaagtcctttttgaa

SEQ ID NO: 3460187 - DNA, 25 bp, Homo sapien
tgaaaagctaacatcagggctgtat

SEQ ID NO: 3460188 - DNA, 25 bp, Homo sapien
tgtcattaaggatgtcagaactcaa

SEQ ID NO: 3460189 - DNA, 25 bp, Homo sapien
tagcttggtggcagccaaaacagac

SEQ ID NO: 3460190 - DNA, 25 bp, Homo sapien
caaaacagactccatgtcattaagg

SEQ ID NO: 3460191 - DNA, 25 bp, Homo sapien
ggaaacggttctgctgtgagggcag

SEQ ID NO: 3460192 - DNA, 25 bp, Homo sapien
tgcaactggcttatggaaatttccg

SEQ ID NO: 3460193 - DNA, 25 bp, Homo sapien
caggtcagtacagagggcatcgtaa

SEQ ID NO: 3460194 - DNA, 25 bp, Homo sapien
gaaatttccggtgcatgtgtctcct

SEQ ID NO: 3460195 - DNA, 25 bp, Homo sapien
taatatctaccgtatgcccagaggg

SEQ ID NO: 3460196 - DNA, 25 bp, Homo sapien
agtagatctaagaagccctgactga

SEQ ID NO: 3460197 - DNA, 25 bp, Homo sapien
ctattggaagaccagtaagaagcca

SEQ ID NO: 3460198 - DNA, 25 bp, Homo sapien
gatgtaccaacgctagaaaagtgtt

SEQ ID NO: 3460199 - DNA, 25 bp, Homo sapien
tgtaatcaccttttattgccagttc

SEQ ID NO: 3460200 - DNA, 25 bp, Homo sapien
tgcaaattgtagtacgttcacttta

SEQ ID NO: 3460201 - DNA, 25 bp, Homo sapien
tagtgcaaattgtagtacgttcact

SEQ ID NO: 3460202 - DNA, 25 bp, Homo sapien
gcaaattgtagtacgttcactttac

SEQ ID NO: 3460203 - DNA, 25 bp, Homo sapien
gtgcaaattgtagtacgttcacttt

SEQ ID NO: 3460204 - DNA, 25 bp, Homo sapien
tttgcattagcacatacgggattcc

SEQ ID NO: 3460205 - DNA, 25 bp, Homo sapien
ggtcgagtgaatctttgcattagca

SEQ ID NO: 3460206 - DNA, 25 bp, Homo sapien
gcagtgaagggtcgagtgaatcttt

SEQ ID NO: 3460207 - DNA, 25 bp, Homo sapien
catacgggattcctactgatccttg

SEQ ID NO: 3460208 - DNA, 25 bp, Homo sapien
agtgctaatcaaacacacgcgtggc

SEQ ID NO: 3460209 - DNA, 25 bp, Homo sapien
gaagtgctaatcaaacacacgcgtg

SEQ ID NO: 3460210 - DNA, 25 bp, Homo sapien
taatcaaacacacgcgtggcatttt

SEQ ID NO: 3460211 - DNA, 25 bp, Homo sapien
tgctaatcaaacacacgcgtggcat

SEQ ID NO: 3460212 - DNA, 25 bp, Homo sapien
agcctggcaactcatcaggaacagc

SEQ ID NO: 3460213 - DNA, 25 bp, Homo sapien
acagctggacggatgccaacaacag

SEQ ID NO: 3460214 - DNA, 25 bp, Homo sapien
caggaacagctggacggatgccaac

SEQ ID NO: 3460215 - DNA, 25 bp, Homo sapien
tcagcctggcaactcatcaggaaca

SEQ ID NO: 3460216 - DNA, 25 bp, Homo sapien
gagcctgaaatgggcgatctggacc

SEQ ID NO: 3460217 - DNA, 25 bp, Homo sapien
tgaaatgggcgatctggacctgctg

SEQ ID NO: 3460218 - DNA, 25 bp, Homo sapien
gcctgaaatgggcgatctggacctg

SEQ ID NO: 3460219 - DNA, 25 bp, Homo sapien
cctgaaatgggcgatctggacctgc

SEQ ID NO: 3460220 - DNA, 25 bp, Homo sapien
cacaacagcaggctgtgattcccat

SEQ ID NO: 3460221 - DNA, 25 bp, Homo sapien
gcacaacagcaggctgtgattccca

SEQ ID NO: 3460222 - DNA, 25 bp, Homo sapien
tgcacaacagcaggctgtgattccc

SEQ ID NO: 3460223 - DNA, 25 bp, Homo sapien
ctgcacaacagcaggctgtgattcc

SEQ ID NO: 3460224 - DNA, 25 bp, Homo sapien
cactaagaggctccagaggtggcag

SEQ ID NO: 3460225 - DNA, 25 bp, Homo sapien
tcttcaaagagggaggcaaccttgg

SEQ ID NO: 3460226 - DNA, 25 bp, Homo sapien
gctggctcttcaaagagggaggcaa

SEQ ID NO: 3460227 - DNA, 25 bp, Homo sapien
ggaggcaaccttgggaccactaaga

SEQ ID NO: 3460228 - DNA, 25 bp, Homo sapien
tccctccctagcacctgcagttact

SEQ ID NO: 3460229 - DNA, 25 bp, Homo sapien
cctccctagcacctgcagttacttc

SEQ ID NO: 3460230 - DNA, 25 bp, Homo sapien
tccctagcacctgcagttacttctt

SEQ ID NO: 3460231 - DNA, 25 bp, Homo sapien
ctccctagcacctgcagttacttct

SEQ ID NO: 3460232 - DNA, 25 bp, Homo sapien
cgccctgtgtggaggaagtcctctg

SEQ ID NO: 3460233 - DNA, 25 bp, Homo sapien
tctgtaggactctggagatccgacc

SEQ ID NO: 3460234 - DNA, 25 bp, Homo sapien
ttgcctttctggacaccctcttctg

SEQ ID NO: 3460235 - DNA, 25 bp, Homo sapien
cattttggaccccaacgccttgctt

SEQ ID NO: 3460236 - DNA, 25 bp, Homo sapien
cattccggaaatgccgtggaaaaca

SEQ ID NO: 3460237 - DNA, 25 bp, Homo sapien
atgccgtggaaaacagcgaaacttc

SEQ ID NO: 3460238 - DNA, 25 bp, Homo sapien
agggcatgccctggcattccggaaa

SEQ ID NO: 3460239 - DNA, 25 bp, Homo sapien
tgcaggattgacagggcatgccctg

SEQ ID NO: 3460240 - DNA, 25 bp, Homo sapien
catttgcattcaccctggcttaggc

SEQ ID NO: 3460241 - DNA, 25 bp, Homo sapien
tctactttgacaacggaaccattgg

SEQ ID NO: 3460242 - DNA, 25 bp, Homo sapien
gcatgttaatactcagggagccaac

SEQ ID NO: 3460243 - DNA, 25 bp, Homo sapien
gttatcttgaacatgcacagtctgc

SEQ ID NO: 3460244 - DNA, 25 bp, Homo sapien
acatacgataatggaggtagtccta

SEQ ID NO: 3460245 - DNA, 25 bp, Homo sapien
ggtagtcctatctgtttgcatgcca

SEQ ID NO: 3460246 - DNA, 25 bp, Homo sapien
ccataattgctattcttacatacga

SEQ ID NO: 3460247 - DNA, 25 bp, Homo sapien
ccatgtccggcccataattgctatt

SEQ ID NO: 3460248 - DNA, 25 bp, Homo sapien
ttagatgtaagtctagggaaggacc

SEQ ID NO: 3460249 - DNA, 25 bp, Homo sapien
gagtgaaacgtaaatattagatgta

SEQ ID NO: 3460250 - DNA, 25 bp, Homo sapien
agggaaggaccttctgggtctgcta

SEQ ID NO: 3460251 - DNA, 25 bp, Homo sapien
ggaaggaccttctgggtctgctaca

SEQ ID NO: 3460252 - DNA, 25 bp, Homo sapien
cactgacgttgttttaagcaggcca

SEQ ID NO: 3460253 - DNA, 25 bp, Homo sapien
tccctggagtaacttctgctggttc

SEQ ID NO: 3460254 - DNA, 25 bp, Homo sapien
ccaccaccactgacgttgttttaag

SEQ ID NO: 3460255 - DNA, 25 bp, Homo sapien
aaatcttgtgttaggttcactccct

SEQ ID NO: 3460256 - DNA, 25 bp, Homo sapien
tactattttgactagaacctgtcag

SEQ ID NO: 3460257 - DNA, 25 bp, Homo sapien
tattgaaccatcagggtcactacta

SEQ ID NO: 3460258 - DNA, 25 bp, Homo sapien
ctagaacctgtcagttccagtttac

SEQ ID NO: 3460259 - DNA, 25 bp, Homo sapien
agagtattgaaccatcagggtcact

SEQ ID NO: 3460260 - DNA, 25 bp, Homo sapien
accatgaaaaagagctgtagcctgc

SEQ ID NO: 3460261 - DNA, 25 bp, Homo sapien
aaaagtatgaagtttgtgttcattg

SEQ ID NO: 3460262 - DNA, 25 bp, Homo sapien
gtatgaagtttgtgttcattgtcca

SEQ ID NO: 3460263 - DNA, 25 bp, Homo sapien
aagtatgaagtttgtgttcattgtc

SEQ ID NO: 3460264 - DNA, 25 bp, Homo sapien
atgagtttctggcaggcagtggcca

SEQ ID NO: 3460265 - DNA, 25 bp, Homo sapien
ctgtaacaggcatgccttttattca

SEQ ID NO: 3460266 - DNA, 25 bp, Homo sapien
caggcatgccttttattcagcagca

SEQ ID NO: 3460267 - DNA, 25 bp, Homo sapien
aacaggcatgccttttattcagcag

SEQ ID NO: 3460268 - DNA, 25 bp, Homo sapien
gtaacaggcatgccttttattcagc

SEQ ID NO: 3460269 - DNA, 25 bp, Homo sapien
aacaagatacttagtcgtgggtgct

SEQ ID NO: 3460270 - DNA, 25 bp, Homo sapien
tcagagcaatatgccaccattcgtg

SEQ ID NO: 3460271 - DNA, 25 bp, Homo sapien
gggcccgagatgacaaggcaccata

SEQ ID NO: 3460272 - DNA, 25 bp, Homo sapien
tcttttgggcccgagatgacaaggc

SEQ ID NO: 3460273 - DNA, 25 bp, Homo sapien
tgctaatcttcttggtagggttcca

SEQ ID NO: 3460274 - DNA, 25 bp, Homo sapien
gcatgctaatcttcttggtagggtt

SEQ ID NO: 3460275 - DNA, 25 bp, Homo sapien
ctaatcttcttggtagggttccaat

SEQ ID NO: 3460276 - DNA, 25 bp, Homo sapien
catgctaatcttcttggtagggttc

SEQ ID NO: 3460277 - DNA, 25 bp, Homo sapien
tatttcagaaagactaagtgtattt

SEQ ID NO: 3460278 - DNA, 25 bp, Homo sapien
ttatttcagaaagactaagtgtatt

SEQ ID NO: 3460279 - DNA, 25 bp, Homo sapien
tcagaaagactaagtgtatttatca

SEQ ID NO: 3460280 - DNA, 25 bp, Homo sapien
tttcagaaagactaagtgtatttat

SEQ ID NO: 3460281 - DNA, 25 bp, Homo sapien
gagacttcatcgttctgtggaaaca

SEQ ID NO: 3460282 - DNA, 25 bp, Homo sapien
gatcaaagacaattaccaaccagag

SEQ ID NO: 3460283 - DNA, 25 bp, Homo sapien
tgtggaaacagcatccagtgcattc

SEQ ID NO: 3460284 - DNA, 25 bp, Homo sapien
gcattctgcacgcaattggactgag

SEQ ID NO: 3460285 - DNA, 25 bp, Homo sapien
taagcaactttatctgagagccatc

SEQ ID NO: 3460286 - DNA, 25 bp, Homo sapien
aactttatctgagagccatccgtac

SEQ ID NO: 3460287 - DNA, 25 bp, Homo sapien
ctaagcagtaaatttaagcaacttt

SEQ ID NO: 3460288 - DNA, 25 bp, Homo sapien
gtaaatttaagcaactttatctgag

SEQ ID NO: 3460289 - DNA, 25 bp, Homo sapien
tcctcccagtggtttgcatgtgcac

SEQ ID NO: 3460290 - DNA, 25 bp, Homo sapien
gagggcgcgagtctcacgctgtctt

SEQ ID NO: 3460291 - DNA, 25 bp, Homo sapien
ctatctgtaccaggcgttccgcact

SEQ ID NO: 3460292 - DNA, 25 bp, Homo sapien
cagtcttttcaagcgacacctgtcg

SEQ ID NO: 3460293 - DNA, 25 bp, Homo sapien
ctccagcaaggcatatatttgtgga

SEQ ID NO: 3460294 - DNA, 25 bp, Homo sapien
gcaaggcatatatttgtggaaattt

SEQ ID NO: 3460295 - DNA, 25 bp, Homo sapien
ccagcaaggcatatatttgtggaaa

SEQ ID NO: 3460296 - DNA, 25 bp, Homo sapien
cagcaaggcatatatttgtggaaat

SEQ ID NO: 3460297 - DNA, 25 bp, Homo sapien
tgcagtgtgagactgcataactgca

SEQ ID NO: 3460298 - DNA, 25 bp, Homo sapien
cttgcagtgtgagactgcataactg

SEQ ID NO: 3460299 - DNA, 25 bp, Homo sapien
ttgcagtgtgagactgcataactgc

SEQ ID NO: 3460300 - DNA, 25 bp, Homo sapien
tggaaaggaaggatattccttcata

SEQ ID NO: 3460301 - DNA, 25 bp, Homo sapien
tccttcatatcaaatacgtaaacag

SEQ ID NO: 3460302 - DNA, 25 bp, Homo sapien
catttaaaagagacaccccacaagg

SEQ ID NO: 3460303 - DNA, 25 bp, Homo sapien
caaactgggtgacttggcaaaacac

SEQ ID NO: 3460304 - DNA, 25 bp, Homo sapien
atctagaagaagtcgttttcctcct

SEQ ID NO: 3460305 - DNA, 25 bp, Homo sapien
gttttgatttatagaagaaactgaa

SEQ ID NO: 3460306 - DNA, 25 bp, Homo sapien
tgatttatagaagaaactgaaaaaa

SEQ ID NO: 3460307 - DNA, 25 bp, Homo sapien
tttgatttatagaagaaactgaaaa

SEQ ID NO: 3460308 - DNA, 25 bp, Homo sapien
gatctcacagacgttgggcttttca

SEQ ID NO: 3460309 - DNA, 25 bp, Homo sapien
gctttaacaatatgccccagctaga

SEQ ID NO: 3460310 - DNA, 25 bp, Homo sapien
tacctcccgagattagactaagtcc

SEQ ID NO: 3460311 - DNA, 25 bp, Homo sapien
aattatggtagacaacaggtgctgc

SEQ ID NO: 3460312 - DNA, 25 bp, Homo sapien
aagggactagcctttctctagggag

SEQ ID NO: 3460313 - DNA, 25 bp, Homo sapien
ggactagcctttctctagggaggta

SEQ ID NO: 3460314 - DNA, 25 bp, Homo sapien
agggactagcctttctctagggagg

SEQ ID NO: 3460315 - DNA, 25 bp, Homo sapien
gaataagagccacggaaatatccac

SEQ ID NO: 3460316 - DNA, 25 bp, Homo sapien
tatttcagttcaaacgtgttggcgc

SEQ ID NO: 3460317 - DNA, 25 bp, Homo sapien
cattgcacagtggtaggaacttctc

SEQ ID NO: 3460318 - DNA, 25 bp, Homo sapien
tttaaagcgggctgcatgtgtctgc

SEQ ID NO: 3460319 - DNA, 25 bp, Homo sapien
tttaattagcagattcagtttctta

SEQ ID NO: 3460320 - DNA, 25 bp, Homo sapien
ttaattagcagattcagtttcttac

SEQ ID NO: 3460321 - DNA, 25 bp, Homo sapien
ttttttaattagcagattcagtttc

SEQ ID NO: 3460322 - DNA, 25 bp, Homo sapien
ttttaattagcagattcagtttctt

SEQ ID NO: 3460323 - DNA, 25 bp, Homo sapien
aacacctgagtccaccatcacagca

SEQ ID NO: 3460324 - DNA, 25 bp, Homo sapien
ccaacacctgagtccaccatcacag

SEQ ID NO: 3460325 - DNA, 25 bp, Homo sapien
cccaacacctgagtccaccatcaca

SEQ ID NO: 3460326 - DNA, 25 bp, Homo sapien
acacctgagtccaccatcacagcaa

SEQ ID NO: 3460327 - DNA, 25 bp, Homo sapien
cacattaaaatgctgcgtggcgact

SEQ ID NO: 3460328 - DNA, 25 bp, Homo sapien
tactagcgaggctcgaggcatgaga

SEQ ID NO: 3460329 - DNA, 25 bp, Homo sapien
cgtggcgactaaaacagatgagatg

SEQ ID NO: 3460330 - DNA, 25 bp, Homo sapien
cactaggtggccagttaaacaatca

SEQ ID NO: 3460331 - DNA, 25 bp, Homo sapien
ctggcttgaacttgacggatgaact

SEQ ID NO: 3460332 - DNA, 25 bp, Homo sapien
gatgaactcctgtcctttaattctt

SEQ ID NO: 3460333 - DNA, 25 bp, Homo sapien
gcttgaacttgacggatgaactcct

SEQ ID NO: 3460334 - DNA, 25 bp, Homo sapien
aactcctgtcctttaattcttatca

SEQ ID NO: 3460335 - DNA, 25 bp, Homo sapien
ttttcatctcctgggctgtctgatg

SEQ ID NO: 3460336 - DNA, 25 bp, Homo sapien
tctcctgggctgtctgatgtggata

SEQ ID NO: 3460337 - DNA, 25 bp, Homo sapien
cctgggctgtctgatgtggatagca

SEQ ID NO: 3460338 - DNA, 25 bp, Homo sapien
tgcattttcatctcctgggctgtct

SEQ ID NO: 3460339 - DNA, 25 bp, Homo sapien
tgatggctctagtgtcaattctgcc

SEQ ID NO: 3460340 - DNA, 25 bp, Homo sapien
gcccagaagtcacaaactgatggct

SEQ ID NO: 3460341 - DNA, 25 bp, Homo sapien
gaatggcagggattacctcccacta

SEQ ID NO: 3460342 - DNA, 25 bp, Homo sapien
tctcaacagtgcaatcagagtgact

SEQ ID NO: 3460343 - DNA, 25 bp, Homo sapien
tcttctccaggttcaaaatggataa

SEQ ID NO: 3460344 - DNA, 25 bp, Homo sapien
tggtcttctccaggttcaaaatgga

SEQ ID NO: 3460345 - DNA, 25 bp, Homo sapien
gattgcatcttctgaatggtcttct

SEQ ID NO: 3460346 - DNA, 25 bp, Homo sapien
aatggtcttctccaggttcaaaatg

SEQ ID NO: 3460347 - DNA, 25 bp, Homo sapien
cacggcagcattaatcacaggagta

SEQ ID NO: 3460348 - DNA, 25 bp, Homo sapien
ttgactagtctataattctctccag

SEQ ID NO: 3460349 - DNA, 25 bp, Homo sapien
gctaggatttttctctgaactgtct

SEQ ID NO: 3460350 - DNA, 25 bp, Homo sapien
tctaacacaagatcattgactagtc

SEQ ID NO: 3460351 - DNA, 25 bp, Homo sapien
aaaaagaaaacaagcataaacatgt

SEQ ID NO: 3460352 - DNA, 25 bp, Homo sapien
aaagaaaacaagcataaacatgttc

SEQ ID NO: 3460353 - DNA, 25 bp, Homo sapien
aaaagaaaacaagcataaacatgtt

SEQ ID NO: 3460354 - DNA, 25 bp, Homo sapien
aaaaaagaaaacaagcataaacatg

SEQ ID NO: 3460355 - DNA, 25 bp, Homo sapien
tctattcttccggattaataataaa

SEQ ID NO: 3460356 - DNA, 25 bp, Homo sapien
ctattcttccggattaataataaat

SEQ ID NO: 3460357 - DNA, 25 bp, Homo sapien
tattcttccggattaataataaatc

SEQ ID NO: 3460358 - DNA, 25 bp, Homo sapien
ttcttccggattaataataaatcat

SEQ ID NO: 3460359 - DNA, 25 bp, Homo sapien
gagtttctgaatacagtggctgcaa

SEQ ID NO: 3460360 - DNA, 25 bp, Homo sapien
gactatccaggattggaattacaca

SEQ ID NO: 3460361 - DNA, 25 bp, Homo sapien
taataattccggcagttagtagact

SEQ ID NO: 3460362 - DNA, 25 bp, Homo sapien
aatgctcatataacacagcttcagc

SEQ ID NO: 3460363 - DNA, 25 bp, Homo sapien
taataagagcgtattttcaattgac

SEQ ID NO: 3460364 - DNA, 25 bp, Homo sapien
tcatgggagcctctatctctcaggc

SEQ ID NO: 3460365 - DNA, 25 bp, Homo sapien
tatagccaaatactcatttcaaggc

SEQ ID NO: 3460366 - DNA, 25 bp, Homo sapien
gcattactatgacaaataaggttaa

SEQ ID NO: 3460367 - DNA, 25 bp, Homo sapien
aacatcttctgtgggaatatatttt

SEQ ID NO: 3460368 - DNA, 25 bp, Homo sapien
gggaatatattttatgtcctgttgc

SEQ ID NO: 3460369 - DNA, 25 bp, Homo sapien
tgtgggaatatattttatgtcctgt

SEQ ID NO: 3460370 - DNA, 25 bp, Homo sapien
cttctgtgggaatatattttatgtc

SEQ ID NO: 3460371 - DNA, 25 bp, Homo sapien
ttcttgtagtctccgcaattgttct

SEQ ID NO: 3460372 - DNA, 25 bp, Homo sapien
tcttcttgtagtctccgcaattgtt

SEQ ID NO: 3460373 - DNA, 25 bp, Homo sapien
tgtagtctccgcaattgttcttcca

SEQ ID NO: 3460374 - DNA, 25 bp, Homo sapien
cttgtagtctccgcaattgttcttc

SEQ ID NO: 3460375 - DNA, 25 bp, Homo sapien
accacaaggaataaacactatggac

SEQ ID NO: 3460376 - DNA, 25 bp, Homo sapien
ggaataaacactatggacacttctt

SEQ ID NO: 3460377 - DNA, 25 bp, Homo sapien
taaacactatggacacttctttgtc

SEQ ID NO: 3460378 - DNA, 25 bp, Homo sapien
caaggaataaacactatggacactt

SEQ ID NO: 3460379 - DNA, 25 bp, Homo sapien
gtactcctacaaataggacactttc

SEQ ID NO: 3460380 - DNA, 25 bp, Homo sapien
taaagaaggagcacaatctttgcat

SEQ ID NO: 3460381 - DNA, 25 bp, Homo sapien
ccttgattgtactcctacaaatagg

SEQ ID NO: 3460382 - DNA, 25 bp, Homo sapien
tcttaaagaaggagcacaatctttg

SEQ ID NO: 3460383 - DNA, 25 bp, Homo sapien
tcatgaaagaaatgtacgaactgta

SEQ ID NO: 3460384 - DNA, 25 bp, Homo sapien
catgaaagaaatgtacgaactgtac

SEQ ID NO: 3460385 - DNA, 25 bp, Homo sapien
cctggcttcatgttcccggtattag

SEQ ID NO: 3460386 - DNA, 25 bp, Homo sapien
aaaagacagagaaatgtgtccctgg

SEQ ID NO: 3460387 - DNA, 25 bp, Homo sapien
tatgcacaccttcgatgtataggac

SEQ ID NO: 3460388 - DNA, 25 bp, Homo sapien
catgtccctaaaatgtcattcaaca

SEQ ID NO: 3460389 - DNA, 25 bp, Homo sapien
gattttatgatgtgttgaccccgtg

SEQ ID NO: 3460390 - DNA, 25 bp, Homo sapien
ccccgtgttctacaagtgtcaatga

SEQ ID NO: 3460391 - DNA, 25 bp, Homo sapien
ggtcccaagcattgctaaccagtgt

SEQ ID NO: 3460392 - DNA, 25 bp, Homo sapien
gggagtgactaaactatccaatgtc

SEQ ID NO: 3460393 - DNA, 25 bp, Homo sapien
tatgactcggacgtgttgagtacca

SEQ ID NO: 3460394 - DNA, 25 bp, Homo sapien
gttgagtaccaataacataatgcag

SEQ ID NO: 3460395 - DNA, 25 bp, Homo sapien
tcggacgtgttgagtaccaataaca

SEQ ID NO: 3460396 - DNA, 25 bp, Homo sapien
aggacagagttatgactcggacgtg

SEQ ID NO: 3460397 - DNA, 25 bp, Homo sapien
ttctgctcttgaagacctaatacct

SEQ ID NO: 3460398 - DNA, 25 bp, Homo sapien
gttataggattgtcagctgtgaccc

SEQ ID NO: 3460399 - DNA, 25 bp, Homo sapien
tagaactggtttagatgactagcct

SEQ ID NO: 3460400 - DNA, 25 bp, Homo sapien
gcccctatacagacatctagaactg

SEQ ID NO: 3460401 - DNA, 25 bp, Homo sapien
gccttcccctgagtattccctatta

SEQ ID NO: 3460402 - DNA, 25 bp, Homo sapien
aattcagcctagcacccatgcagga

SEQ ID NO: 3460403 - DNA, 25 bp, Homo sapien
caaggtaggtcatagaaactggaac

SEQ ID NO: 3460404 - DNA, 25 bp, Homo sapien
aaacacatggtgcaaaaagggtgcc

SEQ ID NO: 3460405 - DNA, 25 bp, Homo sapien
caggacactggctagtacatgggta

SEQ ID NO: 3460406 - DNA, 25 bp, Homo sapien
ataacacttagggaaataacatatt

SEQ ID NO: 3460407 - DNA, 25 bp, Homo sapien
caaaatgtcaaaataacacttaggg

SEQ ID NO: 3460408 - DNA, 25 bp, Homo sapien
gaaataacatatttgaataaatggg

SEQ ID NO: 3460409 - DNA, 25 bp, Homo sapien
tgtcaaaataacacttagggaaata

SEQ ID NO: 3460410 - DNA, 25 bp, Homo sapien
gccatcattatgaatccagggattt

SEQ ID NO: 3460411 - DNA, 25 bp, Homo sapien
ttaaaggaaggagatacagagcccc

SEQ ID NO: 3460412 - DNA, 25 bp, Homo sapien
gacagtcttgtattattaaacgccc

SEQ ID NO: 3460413 - DNA, 25 bp, Homo sapien
cgccctaagatggacaattaaagga

SEQ ID NO: 3460414 - DNA, 25 bp, Homo sapien
gcgccggtggttttgcgcgtcctac

SEQ ID NO: 3460415 - DNA, 25 bp, Homo sapien
cacctcagggttatgatctggcccc

SEQ ID NO: 3460416 - DNA, 25 bp, Homo sapien
gttttgcgcgtcctaccctgtgtca

SEQ ID NO: 3460417 - DNA, 25 bp, Homo sapien
tgcggaaacgccctggcgccggtgg

SEQ ID NO: 3460418 - DNA, 25 bp, Homo sapien
ggggacgtggcaaaccgtgagccgc

SEQ ID NO: 3460419 - DNA, 25 bp, Homo sapien
acgtggcaaaccgtgagccgctgcg

SEQ ID NO: 3460420 - DNA, 25 bp, Homo sapien
tgggggacgtggcaaaccgtgagcc

SEQ ID NO: 3460421 - DNA, 25 bp, Homo sapien
ggacgtggcaaaccgtgagccgctg

SEQ ID NO: 3460422 - DNA, 25 bp, Homo sapien
cttgcggtttgtgccctctccacat

SEQ ID NO: 3460423 - DNA, 25 bp, Homo sapien
gactatccgtatcaactcggtgttt

SEQ ID NO: 3460424 - DNA, 25 bp, Homo sapien
cgtatcaactcggtgtttgttcgtt

SEQ ID NO: 3460425 - DNA, 25 bp, Homo sapien
gaacggggactatccgtatcaactc

SEQ ID NO: 3460426 - DNA, 25 bp, Homo sapien
tcatcgggagtcacggggtcggccc

SEQ ID NO: 3460427 - DNA, 25 bp, Homo sapien
cgccgacaaggagatacggcccgct

SEQ ID NO: 3460428 - DNA, 25 bp, Homo sapien
tgcgggcgcagcaaacacggaagct

SEQ ID NO: 3460429 - DNA, 25 bp, Homo sapien
aagctgcgcggctgcctagaggcct

SEQ ID NO: 3460430 - DNA, 25 bp, Homo sapien
agccgggaatcagcggcgccgacaa

SEQ ID NO: 3460431 - DNA, 25 bp, Homo sapien
tacattaaaagaacgccgagggcta

SEQ ID NO: 3460432 - DNA, 25 bp, Homo sapien
gaaatatgaaatatcgccgccaccg

SEQ ID NO: 3460433 - DNA, 25 bp, Homo sapien
taaaaccttggcgagagtagaaagc

SEQ ID NO: 3460434 - DNA, 25 bp, Homo sapien
tgacagagcgcagtggcaactatga

SEQ ID NO: 3460435 - DNA, 25 bp, Homo sapien
tttacgcaaattgcagctgggcagg

SEQ ID NO: 3460436 - DNA, 25 bp, Homo sapien
aagatttttatctacgtgcaccgca

SEQ ID NO: 3460437 - DNA, 25 bp, Homo sapien
tctccacgactaggaaaactgcagt

SEQ ID NO: 3460438 - DNA, 25 bp, Homo sapien
tgaaacagtggctccggcactacga

SEQ ID NO: 3460439 - DNA, 25 bp, Homo sapien
tccccatagcactaactatacgtgt

SEQ ID NO: 3460440 - DNA, 25 bp, Homo sapien
tatacgtgtctttaaaacgcacaac

SEQ ID NO: 3460441 - DNA, 25 bp, Homo sapien
agacagatggaaattttcacacagg

SEQ ID NO: 3460442 - DNA, 25 bp, Homo sapien
ctggcctaaaggtaactctggcact

SEQ ID NO: 3460443 - DNA, 25 bp, Homo sapien
tattcaggtaggatgagtatctctc

SEQ ID NO: 3460444 - DNA, 25 bp, Homo sapien
gaagtcaatacccacaagctttgtt

SEQ ID NO: 3460445 - DNA, 25 bp, Homo sapien
gctatgaagcctgaataacagacca

SEQ ID NO: 3460446 - DNA, 25 bp, Homo sapien
cctgtgcctgctatagtgcttgatg

SEQ ID NO: 3460447 - DNA, 25 bp, Homo sapien
aatgttttgatacgagggacctggg

SEQ ID NO: 3460448 - DNA, 25 bp, Homo sapien
cttaatgttttgatacgagggacct

SEQ ID NO: 3460449 - DNA, 25 bp, Homo sapien
tgttttgatacgagggacctgggaa

SEQ ID NO: 3460450 - DNA, 25 bp, Homo sapien
taatgttttgatacgagggacctgg

SEQ ID NO: 3460451 - DNA, 25 bp, Homo sapien
ttgctgtttgtccaatctgacaaga

SEQ ID NO: 3460452 - DNA, 25 bp, Homo sapien
tttgttgctgtttgtccaatctgac

SEQ ID NO: 3460453 - DNA, 25 bp, Homo sapien
ccaatctgacaagatcgtgctatct

SEQ ID NO: 3460454 - DNA, 25 bp, Homo sapien
tctgacaagatcgtgctatcttcca

SEQ ID NO: 3460455 - DNA, 25 bp, Homo sapien
cggggaaagttgaatatgtagacat

SEQ ID NO: 3460456 - DNA, 25 bp, Homo sapien
tgagacaggcaccccggcggggaaa

SEQ ID NO: 3460457 - DNA, 25 bp, Homo sapien
cggcggggaaagttgaatatgtaga

SEQ ID NO: 3460458 - DNA, 25 bp, Homo sapien
ctgagacaggcaccccggcggggaa

SEQ ID NO: 3460459 - DNA, 25 bp, Homo sapien
ccttgtcattcacaccagtataata

SEQ ID NO: 3460460 - DNA, 25 bp, Homo sapien
gacgtattcttagaggtggatccca

SEQ ID NO: 3460461 - DNA, 25 bp, Homo sapien
gctactatgttccaaggtgggagat

SEQ ID NO: 3460462 - DNA, 25 bp, Homo sapien
catatggtaggtaagaaatctggct

SEQ ID NO: 3460463 - DNA, 25 bp, Homo sapien
ggatcccagactagctgaaaccaga

SEQ ID NO: 3460464 - DNA, 25 bp, Homo sapien
cctccggtgttctgacatagcatca

SEQ ID NO: 3460465 - DNA, 25 bp, Homo sapien
gctgaactggaacactagatggcca

SEQ ID NO: 3460466 - DNA, 25 bp, Homo sapien
gacagttgggaaaatgcctccggtg

SEQ ID NO: 3460467 - DNA, 25 bp, Homo sapien
taaatgttctcattcgagctgcatg

SEQ ID NO: 3460468 - DNA, 25 bp, Homo sapien
gactaaatattgaaaacacgtatgt

SEQ ID NO: 3460469 - DNA, 25 bp, Homo sapien
ctaaatattgaaaacacgtatgttc

SEQ ID NO: 3460470 - DNA, 25 bp, Homo sapien
cacgtatgttctaatatgtaaatta

SEQ ID NO: 3460471 - DNA, 25 bp, Homo sapien
tgaaaacacgtatgttctaatatgt

SEQ ID NO: 3460472 - DNA, 25 bp, Homo sapien
agattcccaacacctcaagccacca

SEQ ID NO: 3460473 - DNA, 25 bp, Homo sapien
acacctcaagccaccatcacaacaa

SEQ ID NO: 3460474 - DNA, 25 bp, Homo sapien
aagcatttgacatcatcattgcgac

SEQ ID NO: 3460475 - DNA, 25 bp, Homo sapien
ctccagattcccaacacctcaagcc

SEQ ID NO: 3460476 - DNA, 25 bp, Homo sapien
tgtacccaacatcagaccacctaaa

SEQ ID NO: 3460477 - DNA, 25 bp, Homo sapien
tgaagacattaatagatagtaacac

SEQ ID NO: 3460478 - DNA, 25 bp, Homo sapien
gggccaattccacaagaggatacag

SEQ ID NO: 3460479 - DNA, 25 bp, Homo sapien
ctttcaataatggatgggtcatcca

SEQ ID NO: 3460480 - DNA, 25 bp, Homo sapien
tcaaatctttcattgtactccatag

SEQ ID NO: 3460481 - DNA, 25 bp, Homo sapien
ttcattgtactccatagtaaaaaca

SEQ ID NO: 3460482 - DNA, 25 bp, Homo sapien
ttgtttcatatcaaatataacctga

SEQ ID NO: 3460483 - DNA, 25 bp, Homo sapien
attttacgtcacaacccagaacaca

SEQ ID NO: 3460484 - DNA, 25 bp, Homo sapien
actcttggcctttcattcgtatcaa

SEQ ID NO: 3460485 - DNA, 25 bp, Homo sapien
aagatgaggatatctaccttgaatc

SEQ ID NO: 3460486 - DNA, 25 bp, Homo sapien
cttgaatctcatcaacaaactcttg

SEQ ID NO: 3460487 - DNA, 25 bp, Homo sapien
aaactcttggcctttcattcgtatc

SEQ ID NO: 3460488 - DNA, 25 bp, Homo sapien
cagtggtatctgaagttgacaacag

SEQ ID NO: 3460489 - DNA, 25 bp, Homo sapien
ttggtgggtcagcattttcttctcc

SEQ ID NO: 3460490 - DNA, 25 bp, Homo sapien
ttctccagtggtatctgaagttgac

SEQ ID NO: 3460491 - DNA, 25 bp, Homo sapien
tccagtggtatctgaagttgacaac

SEQ ID NO: 3460492 - DNA, 25 bp, Homo sapien
tctaggtctattacacgggagatag

SEQ ID NO: 3460493 - DNA, 25 bp, Homo sapien
gagatagttgtcatgtacccaggta

SEQ ID NO: 3460494 - DNA, 25 bp, Homo sapien
tctctggtccagttaacaaatctgc

SEQ ID NO: 3460495 - DNA, 25 bp, Homo sapien
tgattggcacataaaacgggattac

SEQ ID NO: 3460496 - DNA, 25 bp, Homo sapien
tcaccaggtctctattaaagcccat

SEQ ID NO: 3460497 - DNA, 25 bp, Homo sapien
gcccatttccaaggcagatttaacc

SEQ ID NO: 3460498 - DNA, 25 bp, Homo sapien
gcagatttaaccacaggtgtattca

SEQ ID NO: 3460499 - DNA, 25 bp, Homo sapien
cattaactgttttatagttctctcc

SEQ ID NO: 3460500 - DNA, 25 bp, Homo sapien
ctgttcttccgaattaatgacaaat

SEQ ID NO: 3460501 - DNA, 25 bp, Homo sapien
tctgttcttccgaattaatgacaaa

SEQ ID NO: 3460502 - DNA, 25 bp, Homo sapien
atgtcaattgttgaaagagagccat

SEQ ID NO: 3460503 - DNA, 25 bp, Homo sapien
tctctcgcttgtaaaggtatctgtg

SEQ ID NO: 3460504 - DNA, 25 bp, Homo sapien
tcttatacaatgtagagtcaatttc

SEQ ID NO: 3460505 - DNA, 25 bp, Homo sapien
agtttttgaagatgttggccgcagc

SEQ ID NO: 3460506 - DNA, 25 bp, Homo sapien
agattatccaggataggaagcacac

SEQ ID NO: 3460507 - DNA, 25 bp, Homo sapien
ggaatatacttcatattcttatcca

SEQ ID NO: 3460508 - DNA, 25 bp, Homo sapien
tctgttggaatatacttcatattct

SEQ ID NO: 3460509 - DNA, 25 bp, Homo sapien
tggaatatacttcatattcttatcc

SEQ ID NO: 3460510 - DNA, 25 bp, Homo sapien
atcttctgttggaatatacttcata

SEQ ID NO: 3460511 - DNA, 25 bp, Homo sapien
gcacattcctggcatactaccagat

SEQ ID NO: 3460512 - DNA, 25 bp, Homo sapien
agtacccttgattatacccctgcaa

SEQ ID NO: 3460513 - DNA, 25 bp, Homo sapien
taagagagaaatgtacgaacagtac

SEQ ID NO: 3460514 - DNA, 25 bp, Homo sapien
ttacaagttcgttcttcttgcaacc

SEQ ID NO: 3460515 - DNA, 25 bp, Homo sapien
gcagtgacactactcccttaggtac

SEQ ID NO: 3460516 - DNA, 25 bp, Homo sapien
caagattattagtaccaaagcagac

SEQ ID NO: 3460517 - DNA, 25 bp, Homo sapien
tgaaaagcaccaaagacaattcggc

SEQ ID NO: 3460518 - DNA, 25 bp, Homo sapien
caaagcagactagaacatgaatgtt

SEQ ID NO: 3460519 - DNA, 25 bp, Homo sapien
cactttattgagatgtttctcacaa

SEQ ID NO: 3460520 - DNA, 25 bp, Homo sapien
taaagcactttattgagatgtttct

SEQ ID NO: 3460521 - DNA, 25 bp, Homo sapien
agcactttattgagatgtttctcac

SEQ ID NO: 3460522 - DNA, 25 bp, Homo sapien
tttaaagcactttattgagatgttt

SEQ ID NO: 3460523 - DNA, 25 bp, Homo sapien
tcaggaaagaaaaaatattctggta

SEQ ID NO: 3460524 - DNA, 25 bp, Homo sapien
atcaggaaagaaaaaatattctggt

SEQ ID NO: 3460525 - DNA, 25 bp, Homo sapien
aaatcaggaaagaaaaaatattctg

SEQ ID NO: 3460526 - DNA, 25 bp, Homo sapien
aatcaggaaagaaaaaatattctgg

SEQ ID NO: 3460527 - DNA, 25 bp, Homo sapien
ctcatgaatgcaattttttacttaa

SEQ ID NO: 3460528 - DNA, 25 bp, Homo sapien
caattttttacttaatagctggcat

SEQ ID NO: 3460529 - DNA, 25 bp, Homo sapien
atttctcatgaatgcaattttttac

SEQ ID NO: 3460530 - DNA, 25 bp, Homo sapien
ttctcatgaatgcaattttttactt

SEQ ID NO: 3460531 - DNA, 25 bp, Homo sapien
tatcatcattaagagggcaaaaaag

SEQ ID NO: 3460532 - DNA, 25 bp, Homo sapien
tatacaattcacactctaccacttg

SEQ ID NO: 3460533 - DNA, 25 bp, Homo sapien
aaagagataacatgtttcctacagt

SEQ ID NO: 3460534 - DNA, 25 bp, Homo sapien
aattacatggtttcactgggcctca

SEQ ID NO: 3460535 - DNA, 25 bp, Homo sapien
taacttggccctgactggttgtgca

SEQ ID NO: 3460536 - DNA, 25 bp, Homo sapien
gccctgttagggatccattggagca

SEQ ID NO: 3460537 - DNA, 25 bp, Homo sapien
tctcagagggccaaagtgaatcaca

SEQ ID NO: 3460538 - DNA, 25 bp, Homo sapien
agtcagaacttcgtagaccgacctg

SEQ ID NO: 3460539 - DNA, 25 bp, Homo sapien
tattaattctgttcacgagggttcc

SEQ ID NO: 3460540 - DNA, 25 bp, Homo sapien
tcttcaatgggagctaacactgtct

SEQ ID NO: 3460541 - DNA, 25 bp, Homo sapien
aacatactcatattgggtgacacaa

SEQ ID NO: 3460542 - DNA, 25 bp, Homo sapien
cagttcctatatcaaaaagtgtggg

SEQ ID NO: 3460543 - DNA, 25 bp, Homo sapien
caacaaagtatcatacagctgggtg

SEQ ID NO: 3460544 - DNA, 25 bp, Homo sapien
ccatggttgagttctagtaagggcc

SEQ ID NO: 3460545 - DNA, 25 bp, Homo sapien
gacatttagttctcacacttccgga

SEQ ID NO: 3460546 - DNA, 25 bp, Homo sapien
gatgtgcattatcaacaagacctaa

SEQ ID NO: 3460547 - DNA, 25 bp, Homo sapien
caagaagaggcattcggtatcgaac

SEQ ID NO: 3460548 - DNA, 25 bp, Homo sapien
caagccagtgctcatctcagggatg

SEQ ID NO: 3460549 - DNA, 25 bp, Homo sapien
gcatctaatacaacaacaccaggga

SEQ ID NO: 3460550 - DNA, 25 bp, Homo sapien
catgtaagttttgaatggccaggac

SEQ ID NO: 3460551 - DNA, 25 bp, Homo sapien
caagatctgtacctatatgtttctg

SEQ ID NO: 3460552 - DNA, 25 bp, Homo sapien
aaggagcattaacaagatctgtacc

SEQ ID NO: 3460553 - DNA, 25 bp, Homo sapien
cagttgcaggtatgagcaaaggtat

SEQ ID NO: 3460554 - DNA, 25 bp, Homo sapien
tagaactgtccttccaactatggga

SEQ ID NO: 3460555 - DNA, 25 bp, Homo sapien
tgcaaagatagaaaacccgaggagc

SEQ ID NO: 3460556 - DNA, 25 bp, Homo sapien
gaactgatccagttttgccagaatg

SEQ ID NO: 3460557 - DNA, 25 bp, Homo sapien
gtgccacaacatggccgagaaggtc

SEQ ID NO: 3460558 - DNA, 25 bp, Homo sapien
caagaccgccacattggagatcaaa

SEQ ID NO: 3460559 - DNA, 25 bp, Homo sapien
tcttccataagatgttactcggatg

SEQ ID NO: 3460560 - DNA, 25 bp, Homo sapien
gatgttactcggatggtagttacgg

SEQ ID NO: 3460561 - DNA, 25 bp, Homo sapien
ctcggatggtagttacggtaaccat

SEQ ID NO: 3460562 - DNA, 25 bp, Homo sapien
tgtgttcttccataagatgttactc

SEQ ID NO: 3460563 - DNA, 25 bp, Homo sapien
gtcacccaggctggggagcagtagc

SEQ ID NO: 3460564 - DNA, 25 bp, Homo sapien
ctgtcacccaggctggggagcagta

SEQ ID NO: 3460565 - DNA, 25 bp, Homo sapien
cacccaggctggggagcagtagcgt

SEQ ID NO: 3460566 - DNA, 25 bp, Homo sapien
acccaggctggggagcagtagcgtg

SEQ ID NO: 3460567 - DNA, 25 bp, Homo sapien
cggtggcccttgtcgtcgctagtaa

SEQ ID NO: 3460568 - DNA, 25 bp, Homo sapien
gtgtgccataaacacccggccgagg

SEQ ID NO: 3460569 - DNA, 25 bp, Homo sapien
cgctagtaaggtcgtaacaggatga

SEQ ID NO: 3460570 - DNA, 25 bp, Homo sapien
tcaactgttagagaagtcaggtccc

SEQ ID NO: 3460571 - DNA, 25 bp, Homo sapien
tcaaaggcttccttccgggcaccgc

SEQ ID NO: 3460572 - DNA, 25 bp, Homo sapien
agcgtgctcagcattcagggaggca

SEQ ID NO: 3460573 - DNA, 25 bp, Homo sapien
agcggcgctcgccttcatccaggac

SEQ ID NO: 3460574 - DNA, 25 bp, Homo sapien
gggcaccgcgaagccagcgtgctca

SEQ ID NO: 3460575 - DNA, 25 bp, Homo sapien
gaaactaacgtcactgctagtgctg

SEQ ID NO: 3460576 - DNA, 25 bp, Homo sapien
tatggatgagcctgactggcaaagc

SEQ ID NO: 3460577 - DNA, 25 bp, Homo sapien
tgttgcaaccactgagaaactaacg

SEQ ID NO: 3460578 - DNA, 25 bp, Homo sapien
tagggcaattcataccagcaaggca

SEQ ID NO: 3460579 - DNA, 25 bp, Homo sapien
tctcatcggtacaacgatgggtgta

SEQ ID NO: 3460580 - DNA, 25 bp, Homo sapien
ggtttctcatcggtacaacgatggg

SEQ ID NO: 3460581 - DNA, 25 bp, Homo sapien
tgctgaggtttctcatcggtacaac

SEQ ID NO: 3460582 - DNA, 25 bp, Homo sapien
tacaacgatgggtgtaatgagacat

SEQ ID NO: 3460583 - DNA, 25 bp, Homo sapien
ggagctggcaagctcagcctctcag

SEQ ID NO: 3460584 - DNA, 25 bp, Homo sapien
gctccatgagcagtcagaaatggag

SEQ ID NO: 3460585 - DNA, 25 bp, Homo sapien
ttctccttggtcactgattctgctc

SEQ ID NO: 3460586 - DNA, 25 bp, Homo sapien
ccttttctccttggtcactgattct

SEQ ID NO: 3460587 - DNA, 25 bp, Homo sapien
taataccctcagaatctccataggc

SEQ ID NO: 3460588 - DNA, 25 bp, Homo sapien
tatgtccatggctgacttaaagccc

SEQ ID NO: 3460589 - DNA, 25 bp, Homo sapien
cagggcccagtcttggcgactttca

SEQ ID NO: 3460590 - DNA, 25 bp, Homo sapien
tggtagtcttaaatcctccttggcc

SEQ ID NO: 3460591 - DNA, 25 bp, Homo sapien
ggtccttcccaacaaggctatgcag

SEQ ID NO: 3460592 - DNA, 25 bp, Homo sapien
tcccaacaaggctatgcaggaggac

SEQ ID NO: 3460593 - DNA, 25 bp, Homo sapien
ctcaggcaccagcaagccacctgtt

SEQ ID NO: 3460594 - DNA, 25 bp, Homo sapien
cacctgttggtccttcccaacaagg

SEQ ID NO: 3460595 - DNA, 25 bp, Homo sapien
cccattccggtaacagtactattat

SEQ ID NO: 3460596 - DNA, 25 bp, Homo sapien
ctggagtcttgatcaggaccccatt

SEQ ID NO: 3460597 - DNA, 25 bp, Homo sapien
aagaaccatctctggagtcttgatc

SEQ ID NO: 3460598 - DNA, 25 bp, Homo sapien
cactttgccgtatgaatttgccttg

SEQ ID NO: 3460599 - DNA, 25 bp, Homo sapien
ctagaagtccaatgcacttatccat

SEQ ID NO: 3460600 - DNA, 25 bp, Homo sapien
tttctttgaatctctttcgatttag

SEQ ID NO: 3460601 - DNA, 25 bp, Homo sapien
tgcacttatccatcgcaccacagag

SEQ ID NO: 3460602 - DNA, 25 bp, Homo sapien
aagtccaatgcacttatccatcgca

SEQ ID NO: 3460603 - DNA, 25 bp, Homo sapien
cattttgtgagagggcatactgagc

SEQ ID NO: 3460604 - DNA, 25 bp, Homo sapien
cacagggttgacaagcattgcatat

SEQ ID NO: 3460605 - DNA, 25 bp, Homo sapien
tgactgaaaacactcccacagggtt

SEQ ID NO: 3460606 - DNA, 25 bp, Homo sapien
ttttccaggcaataactacaggctc

SEQ ID NO: 3460607 - DNA, 25 bp, Homo sapien
ttcatacattaaaagctgagcaggt

SEQ ID NO: 3460608 - DNA, 25 bp, Homo sapien
tttgaggcagcatgtttttaactcc

SEQ ID NO: 3460609 - DNA, 25 bp, Homo sapien
gaaaaactgggttagtagctgagtg

SEQ ID NO: 3460610 - DNA, 25 bp, Homo sapien
tttatttcataatagtcaatatgcc

SEQ ID NO: 3460611 - DNA, 25 bp, Homo sapien
aagtgttacgacaagcctgcttagg

SEQ ID NO: 3460612 - DNA, 25 bp, Homo sapien
tacgacaagcctgcttaggatgcaa

SEQ ID NO: 3460613 - DNA, 25 bp, Homo sapien
gaacctcacaagtgttacgacaagc

SEQ ID NO: 3460614 - DNA, 25 bp, Homo sapien
tgctcttgccctgaacctcacaagt

SEQ ID NO: 3460615 - DNA, 25 bp, Homo sapien
gagctttgccgaatagtccagtgtc

SEQ ID NO: 3460616 - DNA, 25 bp, Homo sapien
caaagccctaggcaatgggttgcag

SEQ ID NO: 3460617 - DNA, 25 bp, Homo sapien
taaggaaggcctccggagccttggc

SEQ ID NO: 3460618 - DNA, 25 bp, Homo sapien
aatatgtcacggaaactgccagatg

SEQ ID NO: 3460619 - DNA, 25 bp, Homo sapien
ttatccactttgttcagcagcaaga

SEQ ID NO: 3460620 - DNA, 25 bp, Homo sapien
cagcaagaagggcacatgacacaga

SEQ ID NO: 3460621 - DNA, 25 bp, Homo sapien
gaagggcacatgacacagagtaagc

SEQ ID NO: 3460622 - DNA, 25 bp, Homo sapien
actttcaggcaaggaatttatccac

SEQ ID NO: 3460623 - DNA, 25 bp, Homo sapien
tggtgattacgctccactgctgaga

SEQ ID NO: 3460624 - DNA, 25 bp, Homo sapien
cattacatactggatgtaggtgtgg

SEQ ID NO: 3460625 - DNA, 25 bp, Homo sapien
aagagccaccctgtcacttgatgga

SEQ ID NO: 3460626 - DNA, 25 bp, Homo sapien
gagcctggctacatggagggccaaa

SEQ ID NO: 3460627 - DNA, 25 bp, Homo sapien
tcatctatacttgcagtgggtagat

SEQ ID NO: 3460628 - DNA, 25 bp, Homo sapien
tgtgtcttattcatctatacttgca

SEQ ID NO: 3460629 - DNA, 25 bp, Homo sapien
tattcatctatacttgcagtgggta

SEQ ID NO: 3460630 - DNA, 25 bp, Homo sapien
ctatacttgcagtgggtagatgtca

SEQ ID NO: 3460631 - DNA, 25 bp, Homo sapien
agccacattgactgctcgctctact

SEQ ID NO: 3460632 - DNA, 25 bp, Homo sapien
attgactgctcgctctactgtatcc

SEQ ID NO: 3460633 - DNA, 25 bp, Homo sapien
tgactgctcgctctactgtatccat

SEQ ID NO: 3460634 - DNA, 25 bp, Homo sapien
cacattgactgctcgctctactgta

SEQ ID NO: 3460635 - DNA, 25 bp, Homo sapien
tcaatctaattcgttttcaatatta

SEQ ID NO: 3460636 - DNA, 25 bp, Homo sapien
caatctaattcgttttcaatattaa

SEQ ID NO: 3460637 - DNA, 25 bp, Homo sapien
aatctaattcgttttcaatattaat

SEQ ID NO: 3460638 - DNA, 25 bp, Homo sapien
ttctctgcattgtgtacaccatctc

SEQ ID NO: 3460639 - DNA, 25 bp, Homo sapien
taagcctcgccttgcagacctaagg

SEQ ID NO: 3460640 - DNA, 25 bp, Homo sapien
aaatgccggcagtctctttgataag

SEQ ID NO: 3460641 - DNA, 25 bp, Homo sapien
actcctggaaggatgccctgaacct

SEQ ID NO: 3460642 - DNA, 25 bp, Homo sapien
tgtgtacagatcatcggttttcccc

SEQ ID NO: 3460643 - DNA, 25 bp, Homo sapien
taaacctgcctgatacccttaccat

SEQ ID NO: 3460644 - DNA, 25 bp, Homo sapien
tgtcctctgtacatactgccacggc

SEQ ID NO: 3460645 - DNA, 25 bp, Homo sapien
acagacaccacgtaaacctgcctga

SEQ ID NO: 3460646 - DNA, 25 bp, Homo sapien
tctcgttaggaagattcccctccat

SEQ ID NO: 3460647 - DNA, 25 bp, Homo sapien
taggaggtcaggtaaccaacaccac

SEQ ID NO: 3460648 - DNA, 25 bp, Homo sapien
tttgtgcccgtttgtagtcaattcc

SEQ ID NO: 3460649 - DNA, 25 bp, Homo sapien
tcagctttctctagtccgtggtaac

SEQ ID NO: 3460650 - DNA, 25 bp, Homo sapien
ccagaatgtcacgtaagtagaatca

SEQ ID NO: 3460651 - DNA, 25 bp, Homo sapien
tatgtgccaagcactctgctacctg

SEQ ID NO: 3460652 - DNA, 25 bp, Homo sapien
atgtgccaagcactctgctacctgc

SEQ ID NO: 3460653 - DNA, 25 bp, Homo sapien
cactctgctacctgctttacaggaa

SEQ ID NO: 3460654 - DNA, 25 bp, Homo sapien
ctgctacctgctttacaggaattat

SEQ ID NO: 3460655 - DNA, 25 bp, Homo sapien
gactcactgatagctctcgcaagat

SEQ ID NO: 3460656 - DNA, 25 bp, Homo sapien
gacacagtcctgagagatgcagagc

SEQ ID NO: 3460657 - DNA, 25 bp, Homo sapien
gacagtccaagctgtgcaggctcat

SEQ ID NO: 3460658 - DNA, 25 bp, Homo sapien
gttttccaagacgatccaccagaag

SEQ ID NO: 3460659 - DNA, 25 bp, Homo sapien
tgcctttggaggtccttgtgccctg

SEQ ID NO: 3460660 - DNA, 25 bp, Homo sapien
tcacctgaggcacaaaagacaaatt

SEQ ID NO: 3460661 - DNA, 25 bp, Homo sapien
tggaaagtcactgccttcggatggc

SEQ ID NO: 3460662 - DNA, 25 bp, Homo sapien
gaaaaatgccatgaatgtctccatg

SEQ ID NO: 3460663 - DNA, 25 bp, Homo sapien
ggagagagaagatcaatggaggaac

SEQ ID NO: 3460664 - DNA, 25 bp, Homo sapien
caggagagagaagatcaatggagga

SEQ ID NO: 3460665 - DNA, 25 bp, Homo sapien
gaagatcaatggaggaactttcaaa

SEQ ID NO: 3460666 - DNA, 25 bp, Homo sapien
agagaagatcaatggaggaactttc

SEQ ID NO: 3460667 - DNA, 25 bp, Homo sapien
gccatcataatgaattggaacagtg

SEQ ID NO: 3460668 - DNA, 25 bp, Homo sapien
ctttggggccatcataatgaattgg

SEQ ID NO: 3460669 - DNA, 25 bp, Homo sapien
ttggaacagtgtttaaaggagagaa

SEQ ID NO: 3460670 - DNA, 25 bp, Homo sapien
gaagaggatgaccagttgaagggaa

SEQ ID NO: 3460671 - DNA, 25 bp, Homo sapien
cttccactccaatgttcacttccat

SEQ ID NO: 3460672 - DNA, 25 bp, Homo sapien
tccttccactccaatgttcacttcc

SEQ ID NO: 3460673 - DNA, 25 bp, Homo sapien
gtcattccttccactccaatgttca

SEQ ID NO: 3460674 - DNA, 25 bp, Homo sapien
attccttccactccaatgttcactt

SEQ ID NO: 3460675 - DNA, 25 bp, Homo sapien
tctactggtgaaagacaataagcac

SEQ ID NO: 3460676 - DNA, 25 bp, Homo sapien
aacatacagtatgtcgacgtataca

SEQ ID NO: 3460677 - DNA, 25 bp, Homo sapien
tgttccatgcactagagacactgct

SEQ ID NO: 3460678 - DNA, 25 bp, Homo sapien
tgatagaaagaaagcagacctttgc

SEQ ID NO: 3460679 - DNA, 25 bp, Homo sapien
ttttaatagagtccttctggagaga

SEQ ID NO: 3460680 - DNA, 25 bp, Homo sapien
atgccttttaatagagtccttctgg

SEQ ID NO: 3460681 - DNA, 25 bp, Homo sapien
tgttcccaaaacccatcatctcttt

SEQ ID NO: 3460682 - DNA, 25 bp, Homo sapien
gtagtcttttatctacaccttcagg

SEQ ID NO: 3460683 - DNA, 25 bp, Homo sapien
gctttctcatcacactggtagtaac

SEQ ID NO: 3460684 - DNA, 25 bp, Homo sapien
catcacactggtagtaacttcctct

SEQ ID NO: 3460685 - DNA, 25 bp, Homo sapien
tcatcacactggtagtaacttcctc

SEQ ID NO: 3460686 - DNA, 25 bp, Homo sapien
ttctcatcacactggtagtaacttc

SEQ ID NO: 3460687 - DNA, 25 bp, Homo sapien
ttctcctgttcacccccaaacttgc

SEQ ID NO: 3460688 - DNA, 25 bp, Homo sapien
ctataagaacctgattctcctgttc

SEQ ID NO: 3460689 - DNA, 25 bp, Homo sapien
aagaacctgattctcctgttcaccc

SEQ ID NO: 3460690 - DNA, 25 bp, Homo sapien
attctcctgttcacccccaaacttg

SEQ ID NO: 3460691 - DNA, 25 bp, Homo sapien
ttaggaaaacatcctactttgcaga

SEQ ID NO: 3460692 - DNA, 25 bp, Homo sapien
tcattgcattcaaattaggaaaaca

SEQ ID NO: 3460693 - DNA, 25 bp, Homo sapien
ggaaaacatcctactttgcagactt

SEQ ID NO: 3460694 - DNA, 25 bp, Homo sapien
gtcattgcattcaaattaggaaaac

SEQ ID NO: 3460695 - DNA, 25 bp, Homo sapien
caggactcttaatccttctagtgga

SEQ ID NO: 3460696 - DNA, 25 bp, Homo sapien
tcttaatccttctagtggattttcc

SEQ ID NO: 3460697 - DNA, 25 bp, Homo sapien
taatccttctagtggattttccaaa

SEQ ID NO: 3460698 - DNA, 25 bp, Homo sapien
ggactcttaatccttctagtggatt

SEQ ID NO: 3460699 - DNA, 25 bp, Homo sapien
tgtggcgaggtgatatggatgcctt

SEQ ID NO: 3460700 - DNA, 25 bp, Homo sapien
tccctcctaggggattgtaggtgtg

SEQ ID NO: 3460701 - DNA, 25 bp, Homo sapien
cactgtggcgaggtgatatggatgc

SEQ ID NO: 3460702 - DNA, 25 bp, Homo sapien
actgtggcgaggtgatatggatgcc

SEQ ID NO: 3460703 - DNA, 25 bp, Homo sapien
ggtgcttccgcctatggtagagtgc

SEQ ID NO: 3460704 - DNA, 25 bp, Homo sapien
cctatggtagagtgcaagtctcagc

SEQ ID NO: 3460705 - DNA, 25 bp, Homo sapien
gggtggtgggtgcttccgcctatgg

SEQ ID NO: 3460706 - DNA, 25 bp, Homo sapien
agagtgcaagtctcagcatcagttc

SEQ ID NO: 3460707 - DNA, 25 bp, Homo sapien
ggatcttacattctagtcaagttag

SEQ ID NO: 3460708 - DNA, 25 bp, Homo sapien
tgtctgctgtaagttagactcaatg

SEQ ID NO: 3460709 - DNA, 25 bp, Homo sapien
tgagggaaaatcgagcagactgcca

SEQ ID NO: 3460710 - DNA, 25 bp, Homo sapien
tatggacatagtgaacaaaagagca

SEQ ID NO: 3460711 - DNA, 25 bp, Homo sapien
aatcataatgcccacatgtcaacgg

SEQ ID NO: 3460712 - DNA, 25 bp, Homo sapien
atgagagtgagtgtgttcccacgag

SEQ ID NO: 3460713 - DNA, 25 bp, Homo sapien
ggcggctttctccatgctattctca

SEQ ID NO: 3460714 - DNA, 25 bp, Homo sapien
tctcctgacaccttgtaaagacggt

SEQ ID NO: 3460715 - DNA, 25 bp, Homo sapien
ggtcacatgcgtcacttacaataag

SEQ ID NO: 3460716 - DNA, 25 bp, Homo sapien
taagggcctgcgattacgtctcaaa

SEQ ID NO: 3460717 - DNA, 25 bp, Homo sapien
agttaatgcgcagtaaatgtgagcc

SEQ ID NO: 3460718 - DNA, 25 bp, Homo sapien
tgcctgaggacaaagacagaaactc

SEQ ID NO: 3460719 - DNA, 25 bp, Homo sapien
gcggctgctcagcaggccttttaat

SEQ ID NO: 3460720 - DNA, 25 bp, Homo sapien
tgctcagcaggccttttaatcagcc

SEQ ID NO: 3460721 - DNA, 25 bp, Homo sapien
ggctgctcagcaggccttttaatca

SEQ ID NO: 3460722 - DNA, 25 bp, Homo sapien
gctgctcagcaggccttttaatcag

SEQ ID NO: 3460723 - DNA, 25 bp, Homo sapien
cagtcgttgactctcaatgggtcat

SEQ ID NO: 3460724 - DNA, 25 bp, Homo sapien
aactagtttctggacagtcgttgac

SEQ ID NO: 3460725 - DNA, 25 bp, Homo sapien
tctggacagtcgttgactctcaatg

SEQ ID NO: 3460726 - DNA, 25 bp, Homo sapien
tgtcaaactagtttctggacagtcg

SEQ ID NO: 3460727 - DNA, 25 bp, Homo sapien
tcaaattgcaaggcggcagcgaggc

SEQ ID NO: 3460728 - DNA, 25 bp, Homo sapien
tgagatcaaattgcaaggcggcagc

SEQ ID NO: 3460729 - DNA, 25 bp, Homo sapien
gagatcaaattgcaaggcggcagcg

SEQ ID NO: 3460730 - DNA, 25 bp, Homo sapien
gatcaaattgcaaggcggcagcgag

SEQ ID NO: 3460731 - DNA, 25 bp, Homo sapien
gatgaaaatatgcagtccgtggatg

SEQ ID NO: 3460732 - DNA, 25 bp, Homo sapien
tccgtggatgcaggttatcccaaaa

SEQ ID NO: 3460733 - DNA, 25 bp, Homo sapien
tagagtttgtctagtttgccccact

SEQ ID NO: 3460734 - DNA, 25 bp, Homo sapien
tcattgatgacctccccggaattag

SEQ ID NO: 3460735 - DNA, 25 bp, Homo sapien
tactagaatgtttaatatcatatca

SEQ ID NO: 3460736 - DNA, 25 bp, Homo sapien
tgtacatttgtcaactattcagtgc

SEQ ID NO: 3460737 - DNA, 25 bp, Homo sapien
tgtaaggacactagaccctatcaca

SEQ ID NO: 3460738 - DNA, 25 bp, Homo sapien
tagaccctatcacagtgcaaaataa

SEQ ID NO: 3460739 - DNA, 25 bp, Homo sapien
tactcatgtgcaataggtgagagaa

SEQ ID NO: 3460740 - DNA, 25 bp, Homo sapien
ccaatgccaggatggtgacacacat

SEQ ID NO: 3460741 - DNA, 25 bp, Homo sapien
taacagctggttacattgctaggcg

SEQ ID NO: 3460742 - DNA, 25 bp, Homo sapien
agtttgagtttgaccccaatgccag

SEQ ID NO: 3460743 - DNA, 25 bp, Homo sapien
taagaagagatttgttccccagcat

SEQ ID NO: 3460744 - DNA, 25 bp, Homo sapien
ctccagggcattaatttctaccagg

SEQ ID NO: 3460745 - DNA, 25 bp, Homo sapien
cattgtcacagatttgtcaggccaa

SEQ ID NO: 3460746 - DNA, 25 bp, Homo sapien
tgactcaagcgaaaatgggcatctc

SEQ ID NO: 3460747 - DNA, 25 bp, Homo sapien
tcactggtgtcaccctggataggca

SEQ ID NO: 3460748 - DNA, 25 bp, Homo sapien
gctaatagctggttcaactgcagga

SEQ ID NO: 3460749 - DNA, 25 bp, Homo sapien
aagcagctcaagaacacatgtgcag

SEQ ID NO: 3460750 - DNA, 25 bp, Homo sapien
catataggccagagttgcaaagatc

SEQ ID NO: 3460751 - DNA, 25 bp, Homo sapien
ccagcctgggtgagagagtgagact

SEQ ID NO: 3460752 - DNA, 25 bp, Homo sapien
gctctgagccaagattgtaccacta

SEQ ID NO: 3460753 - DNA, 25 bp, Homo sapien
aggttgctctgagccaagattgtac

SEQ ID NO: 3460754 - DNA, 25 bp, Homo sapien
cactccagcctgggtgagagagtga

SEQ ID NO: 3460755 - DNA, 25 bp, Homo sapien
ttaaagacaggtaagatgtcagttc

SEQ ID NO: 3460756 - DNA, 25 bp, Homo sapien
taaagacaggtaagatgtcagttct

SEQ ID NO: 3460757 - DNA, 25 bp, Homo sapien
ctacgattcggggagaagtgatgtt

SEQ ID NO: 3460758 - DNA, 25 bp, Homo sapien
ctttgatgctataactacgattcgg

SEQ ID NO: 3460759 - DNA, 25 bp, Homo sapien
ctataactacgattcggggagaagt

SEQ ID NO: 3460760 - DNA, 25 bp, Homo sapien
tttgatgctataactacgattcggg

SEQ ID NO: 3460761 - DNA, 25 bp, Homo sapien
ggccagtatgcacagctttcctcca

SEQ ID NO: 3460762 - DNA, 25 bp, Homo sapien
gacaaaggccagtatgcacagcttt

SEQ ID NO: 3460763 - DNA, 25 bp, Homo sapien
caaaggccagtatgcacagctttcc

SEQ ID NO: 3460764 - DNA, 25 bp, Homo sapien
cagtatgcacagctttcctccactg

SEQ ID NO: 3460765 - DNA, 25 bp, Homo sapien
gtgacaccggtcaccagtacccaag

SEQ ID NO: 3460766 - DNA, 25 bp, Homo sapien
ggaacataagtacaggaatacacat

SEQ ID NO: 3460767 - DNA, 25 bp, Homo sapien
gaatgctacagatagcactggtgac

SEQ ID NO: 3460768 - DNA, 25 bp, Homo sapien
atttaatgtggaacataagtacagg

SEQ ID NO: 3460769 - DNA, 25 bp, Homo sapien
tgaaacactatgagcatttagcatg

SEQ ID NO: 3460770 - DNA, 25 bp, Homo sapien
ccaatccacgtcagcaactatgaca

SEQ ID NO: 3460771 - DNA, 25 bp, Homo sapien
accagtttccaatccacgtcagcaa

SEQ ID NO: 3460772 - DNA, 25 bp, Homo sapien
tcaagcaaccagtttccaatccacg

SEQ ID NO: 3460773 - DNA, 25 bp, Homo sapien
cacagctatgttgtttagtgtccag

SEQ ID NO: 3460774 - DNA, 25 bp, Homo sapien
tagtgtccaggcaacgcaccttctt

SEQ ID NO: 3460775 - DNA, 25 bp, Homo sapien
ggcaacgcaccttcttaaatcacca

SEQ ID NO: 3460776 - DNA, 25 bp, Homo sapien
tgtttagtgtccaggcaacgcacct

SEQ ID NO: 3460777 - DNA, 25 bp, Homo sapien
tctgctagtcgcatcgcaaggacgt

SEQ ID NO: 3460778 - DNA, 25 bp, Homo sapien
tcttgaatccgaagagtcgcctccc

SEQ ID NO: 3460779 - DNA, 25 bp, Homo sapien
taccattgttgatcgggccacgctg

SEQ ID NO: 3460780 - DNA, 25 bp, Homo sapien
taaattcgggtaggacgcctcgcat

SEQ ID NO: 3460781 - DNA, 25 bp, Homo sapien
gttcacagtcttactggcaaaacca

SEQ ID NO: 3460782 - DNA, 25 bp, Homo sapien
accaatatgttgaaaagtcctcatt

SEQ ID NO: 3460783 - DNA, 25 bp, Homo sapien
tgatgaagttcacagtcttactggc

SEQ ID NO: 3460784 - DNA, 25 bp, Homo sapien
tcttactggcaaaaccaatatgttg

SEQ ID NO: 3460785 - DNA, 25 bp, Homo sapien
cagaggtaaccaagcagatctttct

SEQ ID NO: 3460786 - DNA, 25 bp, Homo sapien
cagagctattttacgcataccaagc

SEQ ID NO: 3460787 - DNA, 25 bp, Homo sapien
acatgcctgccgaatggaatgcgga

SEQ ID NO: 3460788 - DNA, 25 bp, Homo sapien
taatgctctttcagcacatgcctgc

SEQ ID NO: 3460789 - DNA, 25 bp, Homo sapien
taaccctgtaacctggaatctggct

SEQ ID NO: 3460790 - DNA, 25 bp, Homo sapien
tttgcagagcactaaagggtcccct

SEQ ID NO: 3460791 - DNA, 25 bp, Homo sapien
ccttgaggaagcatcgaaatctgtc

SEQ ID NO: 3460792 - DNA, 25 bp, Homo sapien
tctgatcggaagcagaataaccctg

SEQ ID NO: 3460793 - DNA, 25 bp, Homo sapien
aaggccaagaagcaattttcctcca

SEQ ID NO: 3460794 - DNA, 25 bp, Homo sapien
aggccaagaagcaattttcctccat

SEQ ID NO: 3460795 - DNA, 25 bp, Homo sapien
tgtatactctgttactgaattttcc

SEQ ID NO: 3460796 - DNA, 25 bp, Homo sapien
aactctttgacgttttccatataga

SEQ ID NO: 3460797 - DNA, 25 bp, Homo sapien
gcatacttgtatactctgttactga

SEQ ID NO: 3460798 - DNA, 25 bp, Homo sapien
gtaactctttgacgttttccatata

SEQ ID NO: 3460799 - DNA, 25 bp, Homo sapien
tcctaactgggtcacattcgggcag

SEQ ID NO: 3460800 - DNA, 25 bp, Homo sapien
tgggtcctaactgggtcacattcgg

SEQ ID NO: 3460801 - DNA, 25 bp, Homo sapien
catagacttgggtcctaactgggtc

SEQ ID NO: 3460802 - DNA, 25 bp, Homo sapien
ctgcacatagacttgggtcctaact

SEQ ID NO: 3460803 - DNA, 25 bp, Homo sapien
tattttgtaggataggtggacgtag

SEQ ID NO: 3460804 - DNA, 25 bp, Homo sapien
gctggattccgtttagaaagcactc

SEQ ID NO: 3460805 - DNA, 25 bp, Homo sapien
tatcattttgaaggtacatactctg

SEQ ID NO: 3460806 - DNA, 25 bp, Homo sapien
ggtggacgtagaggcttatttatca

SEQ ID NO: 3460807 - DNA, 25 bp, Homo sapien
gacatagcggatcccgcagagcaga

SEQ ID NO: 3460808 - DNA, 25 bp, Homo sapien
tgggaggcaaatatcctatggacat

SEQ ID NO: 3460809 - DNA, 25 bp, Homo sapien
gatcactgtagctcaaggaaacttt

SEQ ID NO: 3460810 - DNA, 25 bp, Homo sapien
tttgatcactgtagctcaaggaaac

SEQ ID NO: 3460811 - DNA, 25 bp, Homo sapien
atatctgtaatccatgcatcccttt

SEQ ID NO: 3460812 - DNA, 25 bp, Homo sapien
aaatatctgtaatccatgcatccct

SEQ ID NO: 3460813 - DNA, 25 bp, Homo sapien
aatatctgtaatccatgcatccctt

SEQ ID NO: 3460814 - DNA, 25 bp, Homo sapien
caagtggattacacatcttccataa

SEQ ID NO: 3460815 - DNA, 25 bp, Homo sapien
aatgtctagggaagaatggtgtcag

SEQ ID NO: 3460816 - DNA, 25 bp, Homo sapien
tcctttaattaacatgcaagtggat

SEQ ID NO: 3460817 - DNA, 25 bp, Homo sapien
tgaatgtctagggaagaatggtgtc

SEQ ID NO: 3460818 - DNA, 25 bp, Homo sapien
tgataatacaacgatgggcagctga

SEQ ID NO: 3460819 - DNA, 25 bp, Homo sapien
taattgaaacgcagccaaacactgc

SEQ ID NO: 3460820 - DNA, 25 bp, Homo sapien
ggtaccagtcttacaggaatgtttg

SEQ ID NO: 3460821 - DNA, 25 bp, Homo sapien
taatagggaaaatgcgaaagtatcc

SEQ ID NO: 3460822 - DNA, 25 bp, Homo sapien
gattggtgcttctagtatgtggaag

SEQ ID NO: 3460823 - DNA, 25 bp, Homo sapien
gataaatgttgattagaagaatcag

SEQ ID NO: 3460824 - DNA, 25 bp, Homo sapien
cacagggagctgtagatggttggag

SEQ ID NO: 3460825 - DNA, 25 bp, Homo sapien
attggtgaaaagcaagtgtgataaa

SEQ ID NO: 3460826 - DNA, 25 bp, Homo sapien
ctggagctgcttcaagctgccccat

SEQ ID NO: 3460827 - DNA, 25 bp, Homo sapien
tggtgtctgtctgcaacactgaaga

SEQ ID NO: 3460828 - DNA, 25 bp, Homo sapien
cactgaagattttctggagctgctt

SEQ ID NO: 3460829 - DNA, 25 bp, Homo sapien
ccctctggtgtctgtctgcaacact

SEQ ID NO: 3460830 - DNA, 25 bp, Homo sapien
gattccaatgtcaaagtcaagggtg

SEQ ID NO: 3460831 - DNA, 25 bp, Homo sapien
gccaacctgaggattccaatgtcaa

SEQ ID NO: 3460832 - DNA, 25 bp, Homo sapien
cctgaggattccaatgtcaaagtca

SEQ ID NO: 3460833 - DNA, 25 bp, Homo sapien
gaggattccaatgtcaaagtcaagg

SEQ ID NO: 3460834 - DNA, 25 bp, Homo sapien
tctctaaaatgacctatctcagtct

SEQ ID NO: 3460835 - DNA, 25 bp, Homo sapien
cctagttctacaaaatgtggatgtg

SEQ ID NO: 3460836 - DNA, 25 bp, Homo sapien
tatgggtcccaccttcctgaaccta

SEQ ID NO: 3460837 - DNA, 25 bp, Homo sapien
caggactcttttgagttatgggtcc

SEQ ID NO: 3460838 - DNA, 25 bp, Homo sapien
tatagggctgactagacttacagcc

SEQ ID NO: 3460839 - DNA, 25 bp, Homo sapien
gctgaaggccatcagccactcttgg

SEQ ID NO: 3460840 - DNA, 25 bp, Homo sapien
ggcagtatagggctgactagactta

SEQ ID NO: 3460841 - DNA, 25 bp, Homo sapien
tgaaggccatcagccactcttggtg

SEQ ID NO: 3460842 - DNA, 25 bp, Homo sapien
ttggctacaaagcttcccaggttca

SEQ ID NO: 3460843 - DNA, 25 bp, Homo sapien
gttggctacaaagcttcccaggttc

SEQ ID NO: 3460844 - DNA, 25 bp, Homo sapien
tggctacaaagcttcccaggttcat

SEQ ID NO: 3460845 - DNA, 25 bp, Homo sapien
agggctggctgtaggaccttgaatg

SEQ ID NO: 3460846 - DNA, 25 bp, Homo sapien
ggctggctgtaggaccttgaatgaa

SEQ ID NO: 3460847 - DNA, 25 bp, Homo sapien
gggctggctgtaggaccttgaatga

SEQ ID NO: 3460848 - DNA, 25 bp, Homo sapien
ggcagtccccgttgtgatggttcct

SEQ ID NO: 3460849 - DNA, 25 bp, Homo sapien
tgtgacaaaggatagcgactttggc

SEQ ID NO: 3460850 - DNA, 25 bp, Homo sapien
agcgactttggcatgccctcccagg

SEQ ID NO: 3460851 - DNA, 25 bp, Homo sapien
ctggcagtccccgttgtgatggttc

SEQ ID NO: 3460852 - DNA, 25 bp, Homo sapien
gccacttctcagtttagtcaaataa

SEQ ID NO: 3460853 - DNA, 25 bp, Homo sapien
cagtggtcctcaagtacttcctctg

SEQ ID NO: 3460854 - DNA, 25 bp, Homo sapien
tatctactgtgtatttttgaggaca

SEQ ID NO: 3460855 - DNA, 25 bp, Homo sapien
acttcctctgtctgtacaacctcag

SEQ ID NO: 3460856 - DNA, 25 bp, Homo sapien
ggaatgataccactagcctgatggc

SEQ ID NO: 3460857 - DNA, 25 bp, Homo sapien
attatcttggatgctcagcctttgc

SEQ ID NO: 3460858 - DNA, 25 bp, Homo sapien
tccatgtcccagagtcaagggaagc

SEQ ID NO: 3460859 - DNA, 25 bp, Homo sapien
ggccagggcacagattgtctatcag

SEQ ID NO: 3460860 - DNA, 25 bp, Homo sapien
gaccgttaaggtcttctacgtcaca

SEQ ID NO: 3460861 - DNA, 25 bp, Homo sapien
caacgctgaaatctactgggctgca

SEQ ID NO: 3460862 - DNA, 25 bp, Homo sapien
gctgagtttatagcaacagcatggc

SEQ ID NO: 3460863 - DNA, 25 bp, Homo sapien
tgaattgccaaaactgccagaggtg

SEQ ID NO: 3460864 - DNA, 25 bp, Homo sapien
tccagttccctgaagaggcgatatt

SEQ ID NO: 3460865 - DNA, 25 bp, Homo sapien
gttccctgaagaggcgatattgcta

SEQ ID NO: 3460866 - DNA, 25 bp, Homo sapien
ttttccagttccctgaagaggcgat

SEQ ID NO: 3460867 - DNA, 25 bp, Homo sapien
tgaagaggcgatattgctaatccat

SEQ ID NO: 3460868 - DNA, 25 bp, Homo sapien
gaatcaatgatggactctcggtggc

SEQ ID NO: 3460869 - DNA, 25 bp, Homo sapien
catcgtgccactgaggatggtatcc

SEQ ID NO: 3460870 - DNA, 25 bp, Homo sapien
ggtggctccaacatgcacccttagg

SEQ ID NO: 3460871 - DNA, 25 bp, Homo sapien
cattactgcctagcaactgaggagt

SEQ ID NO: 3460872 - DNA, 25 bp, Homo sapien
ctggacaacagacatccctgctccc

SEQ ID NO: 3460873 - DNA, 25 bp, Homo sapien
gggtaacctggacaacagacatccc

SEQ ID NO: 3460874 - DNA, 25 bp, Homo sapien
aacctggacaacagacatccctgct

SEQ ID NO: 3460875 - DNA, 25 bp, Homo sapien
accgggtaacctggacaacagacat

SEQ ID NO: 3460876 - DNA, 25 bp, Homo sapien
tccaacaaattttatagcgttcatc

SEQ ID NO: 3460877 - DNA, 25 bp, Homo sapien
cctcttggataaatatccccttcct

SEQ ID NO: 3460878 - DNA, 25 bp, Homo sapien
ttcctcttggataaatatccccttc

SEQ ID NO: 3460879 - DNA, 25 bp, Homo sapien
acaaattttatagcgttcatcaatt

SEQ ID NO: 3460880 - DNA, 25 bp, Homo sapien
cctccccatgggatgtacatttgtg

SEQ ID NO: 3460881 - DNA, 25 bp, Homo sapien
ccccatgggatgtacatttgtgcaa

SEQ ID NO: 3460882 - DNA, 25 bp, Homo sapien
catttgtgcaagtatctctcttcca

SEQ ID NO: 3460883 - DNA, 25 bp, Homo sapien
ttgtgcaagtatctctcttccatca

SEQ ID NO: 3460884 - DNA, 25 bp, Homo sapien
gcttgcatacaaaccaacaatcttt

SEQ ID NO: 3460885 - DNA, 25 bp, Homo sapien
aacaatctttggtaactcatgagcc

SEQ ID NO: 3460886 - DNA, 25 bp, Homo sapien
ctggtttccatatttggtgagcttg

SEQ ID NO: 3460887 - DNA, 25 bp, Homo sapien
ttggtgagcttgcatacaaaccaac

SEQ ID NO: 3460888 - DNA, 25 bp, Homo sapien
attataaatttctctatatctgaca

SEQ ID NO: 3460889 - DNA, 25 bp, Homo sapien
ataaatttctctatatctgacatct

SEQ ID NO: 3460890 - DNA, 25 bp, Homo sapien
tataaatttctctatatctgacatc

SEQ ID NO: 3460891 - DNA, 25 bp, Homo sapien
taaatttctctatatctgacatctt

SEQ ID NO: 3460892 - DNA, 25 bp, Homo sapien
tgcggaggaacactgggactcttcc

SEQ ID NO: 3460893 - DNA, 25 bp, Homo sapien
caacggcatgcggaggaacactggg

SEQ ID NO: 3460894 - DNA, 25 bp, Homo sapien
gcatgcggaggaacactgggactct

SEQ ID NO: 3460895 - DNA, 25 bp, Homo sapien
cggaggaacactgggactcttccgg

SEQ ID NO: 3460896 - DNA, 25 bp, Homo sapien
acctgaacccaggtacttctctctt

SEQ ID NO: 3460897 - DNA, 25 bp, Homo sapien
cacctgaacccaggtacttctctct

SEQ ID NO: 3460898 - DNA, 25 bp, Homo sapien
tagtgactatgtgaccttgagaaga

SEQ ID NO: 3460899 - DNA, 25 bp, Homo sapien
taaccgggcacagtgtcttctaaat

SEQ ID NO: 3460900 - DNA, 25 bp, Homo sapien
tactggagcagtctcacataaccgg

SEQ ID NO: 3460901 - DNA, 25 bp, Homo sapien
tttcagagcagatgagacgcgatga

SEQ ID NO: 3460902 - DNA, 25 bp, Homo sapien
acctttattgtatatgtatgccttt

SEQ ID NO: 3460903 - DNA, 25 bp, Homo sapien
aacacctttattgtatatgtatgcc

SEQ ID NO: 3460904 - DNA, 25 bp, Homo sapien
ttaacacctttattgtatatgtatg

SEQ ID NO: 3460905 - DNA, 25 bp, Homo sapien
cacctttattgtatatgtatgcctt

SEQ ID NO: 3460906 - DNA, 25 bp, Homo sapien
gttaggctgagcctcttgcttgctg

SEQ ID NO: 3460907 - DNA, 25 bp, Homo sapien
tccgggttaggctgagcctcttgct

SEQ ID NO: 3460908 - DNA, 25 bp, Homo sapien
attcgcctccgggttaggctgagcc

SEQ ID NO: 3460909 - DNA, 25 bp, Homo sapien
gggcctcagcgattcgcctccgggt

SEQ ID NO: 3460910 - DNA, 25 bp, Homo sapien
tgagaaaggtcaggataccctggac

SEQ ID NO: 3460911 - DNA, 25 bp, Homo sapien
ttggcggtgactgccagcatcagag

SEQ ID NO: 3460912 - DNA, 25 bp, Homo sapien
tgtttttaacgtcaactgcaaagta

SEQ ID NO: 3460913 - DNA, 25 bp, Homo sapien
catcagagcgcggtagaagcttcat

SEQ ID NO: 3460914 - DNA, 25 bp, Homo sapien
tgagggtagtttcacaggaaccact

SEQ ID NO: 3460915 - DNA, 25 bp, Homo sapien
gggtggctgatcacaggcccataaa

SEQ ID NO: 3460916 - DNA, 25 bp, Homo sapien
cacagggtgacaatgcatttacggg

SEQ ID NO: 3460917 - DNA, 25 bp, Homo sapien
agtcacctactgtctcttatcggag

SEQ ID NO: 3460918 - DNA, 25 bp, Homo sapien
aataagaactgcatactgaaaatga

SEQ ID NO: 3460919 - DNA, 25 bp, Homo sapien
tgccattgctataagtaagttttac

SEQ ID NO: 3460920 - DNA, 25 bp, Homo sapien
caaatatccagccagcattaacatc

SEQ ID NO: 3460921 - DNA, 25 bp, Homo sapien
caagtgtcactgatatgccattgct

SEQ ID NO: 3460922 - DNA, 25 bp, Homo sapien
tagacagtggctgcactaatgacaa

SEQ ID NO: 3460923 - DNA, 25 bp, Homo sapien
tagtagagaatacaccagtttcacc

SEQ ID NO: 3460924 - DNA, 25 bp, Homo sapien
cactaatttacatggtctaccaggc

SEQ ID NO: 3460925 - DNA, 25 bp, Homo sapien
gagtctccagctgacctttaacagg

SEQ ID NO: 3460926 - DNA, 25 bp, Homo sapien
ttaggagagctgggttccagtgctc

SEQ ID NO: 3460927 - DNA, 25 bp, Homo sapien
cagtctgtcagcgtcaaggtacaca

SEQ ID NO: 3460928 - DNA, 25 bp, Homo sapien
acagcagcgtgatctagatttagga

SEQ ID NO: 3460929 - DNA, 25 bp, Homo sapien
gctctccacgtgcacctggtagcaa

SEQ ID NO: 3460930 - DNA, 25 bp, Homo sapien
ggctccctgcggtcatcgattgtaa

SEQ ID NO: 3460931 - DNA, 25 bp, Homo sapien
tccctgcggtcatcgattgtaaggg

SEQ ID NO: 3460932 - DNA, 25 bp, Homo sapien
gctccctgcggtcatcgattgtaag

SEQ ID NO: 3460933 - DNA, 25 bp, Homo sapien
gcggctccctgcggtcatcgattgt

SEQ ID NO: 3460934 - DNA, 25 bp, Homo sapien
gaagagaggagctttgctcaaaccc

SEQ ID NO: 3460935 - DNA, 25 bp, Homo sapien
tcgctatggcgacggagcactacgg

SEQ ID NO: 3460936 - DNA, 25 bp, Homo sapien
agctttgctcaaacccgtagcccga

SEQ ID NO: 3460937 - DNA, 25 bp, Homo sapien
gaccgcagagcttcgcggttgccag

SEQ ID NO: 3460938 - DNA, 25 bp, Homo sapien
gagattcctgcgtcggatcgctgca

SEQ ID NO: 3460939 - DNA, 25 bp, Homo sapien
ggttgccgtcatccaagaagttgtt

SEQ ID NO: 3460940 - DNA, 25 bp, Homo sapien
agatgaagagcttccgaacgtccgc

SEQ ID NO: 3460941 - DNA, 25 bp, Homo sapien
gacatcaacccgaagtaattctggg

SEQ ID NO: 3460942 - DNA, 25 bp, Homo sapien
taagccaataatgcaggagaagtgg

SEQ ID NO: 3460943 - DNA, 25 bp, Homo sapien
taaagctaaagagtgtgacccgacg

SEQ ID NO: 3460944 - DNA, 25 bp, Homo sapien
tgcttaagcacgaggccaacgcatc

SEQ ID NO: 3460945 - DNA, 25 bp, Homo sapien
tgggttcctgaaaaggatctggttg

SEQ ID NO: 3460946 - DNA, 25 bp, Homo sapien
cagtaattacttcaggtcgcagctt

SEQ ID NO: 3460947 - DNA, 25 bp, Homo sapien
gcttggtaaagagaactaataggtg

SEQ ID NO: 3460948 - DNA, 25 bp, Homo sapien
gaatacttgccgtactgcttggtaa

SEQ ID NO: 3460949 - DNA, 25 bp, Homo sapien
taacaacattggtgcgaatacttgc

SEQ ID NO: 3460950 - DNA, 25 bp, Homo sapien
gaagtttgggatcaaagtttctgct

SEQ ID NO: 3460951 - DNA, 25 bp, Homo sapien
gaactatacccaacccagcttctag

SEQ ID NO: 3460952 - DNA, 25 bp, Homo sapien
gtttgggatcaaagtttctgctcca

SEQ ID NO: 3460953 - DNA, 25 bp, Homo sapien
taagttagtgtctgatcttcgtaga

SEQ ID NO: 3460954 - DNA, 25 bp, Homo sapien
aactcatcgcttggtgtaaggatac

SEQ ID NO: 3460955 - DNA, 25 bp, Homo sapien
ctgtttatttccacggtgagcttgt

SEQ ID NO: 3460956 - DNA, 25 bp, Homo sapien
ccacggtgagcttgttctatccaaa

SEQ ID NO: 3460957 - DNA, 25 bp, Homo sapien
tctatccaaaactggaactcatcgc

SEQ ID NO: 3460958 - DNA, 25 bp, Homo sapien
cagcctcccgagtaggcgctcacca

SEQ ID NO: 3460959 - DNA, 25 bp, Homo sapien
gcctcccgagtaggcgctcaccacc

SEQ ID NO: 3460960 - DNA, 25 bp, Homo sapien
caggtgattatcctgcctcagcctc

SEQ ID NO: 3460961 - DNA, 25 bp, Homo sapien
agcctcccgagtaggcgctcaccac

SEQ ID NO: 3460962 - DNA, 25 bp, Homo sapien
tgttcccaggccttttcaactgcca

SEQ ID NO: 3460963 - DNA, 25 bp, Homo sapien
gttcccaggccttttcaactgccac

SEQ ID NO: 3460964 - DNA, 25 bp, Homo sapien
atgttcccaggccttttcaactgcc

SEQ ID NO: 3460965 - DNA, 25 bp, Homo sapien
gatagactgtccaagttataaaact

SEQ ID NO: 3460966 - DNA, 25 bp, Homo sapien
taaggatagactgtccaagttataa

SEQ ID NO: 3460967 - DNA, 25 bp, Homo sapien
ctagtaaggatagactgtccaagtt

SEQ ID NO: 3460968 - DNA, 25 bp, Homo sapien
tagtaaggatagactgtccaagtta

SEQ ID NO: 3460969 - DNA, 25 bp, Homo sapien
cattcgtgactcaggataatgatca

SEQ ID NO: 3460970 - DNA, 25 bp, Homo sapien
ctgagtagtctccaccaagtcaaca

SEQ ID NO: 3460971 - DNA, 25 bp, Homo sapien
tctacaacatcctgagtagtctcca

SEQ ID NO: 3460972 - DNA, 25 bp, Homo sapien
tgtctaagagatgcaacattcgtga

SEQ ID NO: 3460973 - DNA, 25 bp, Homo sapien
ttcacaagataataaggatcttccc

SEQ ID NO: 3460974 - DNA, 25 bp, Homo sapien
tgttagatgattacagactatcacc

SEQ ID NO: 3460975 - DNA, 25 bp, Homo sapien
gataataaggatcttcccacaggtt

SEQ ID NO: 3460976 - DNA, 25 bp, Homo sapien
gatgattacagactatcacccactg

SEQ ID NO: 3460977 - DNA, 25 bp, Homo sapien
ctcttcaaggcgtttgccaagtttg

SEQ ID NO: 3460978 - DNA, 25 bp, Homo sapien
cttcaaggcgtttgccaagtttgtc

SEQ ID NO: 3460979 - DNA, 25 bp, Homo sapien
tcttcaaggcgtttgccaagtttgt

SEQ ID NO: 3460980 - DNA, 25 bp, Homo sapien
gaaaggatgtagaaactggcccaac

SEQ ID NO: 3460981 - DNA, 25 bp, Homo sapien
ctaatttccagcagatgtatagtgc

SEQ ID NO: 3460982 - DNA, 25 bp, Homo sapien
gaaagcttccatacatggtcaagtg

SEQ ID NO: 3460983 - DNA, 25 bp, Homo sapien
ttttgcctgtccctgtaagctgaat

SEQ ID NO: 3460984 - DNA, 25 bp, Homo sapien
caaccatttgcataaataggtctaa

SEQ ID NO: 3460985 - DNA, 25 bp, Homo sapien
tctagatatattgggcaagaatttc

SEQ ID NO: 3460986 - DNA, 25 bp, Homo sapien
aaatctagatatattgggcaagaat

SEQ ID NO: 3460987 - DNA, 25 bp, Homo sapien
gcataaataggtctaaaatctagat

SEQ ID NO: 3460988 - DNA, 25 bp, Homo sapien
cagtatatggattatattgcacagg

SEQ ID NO: 3460989 - DNA, 25 bp, Homo sapien
ttctcatgaattgttctaatagcca

SEQ ID NO: 3460990 - DNA, 25 bp, Homo sapien
gattcaggccagtaaaaggttcaaa

SEQ ID NO: 3460991 - DNA, 25 bp, Homo sapien
actcgagtgaggcatatgattttct

SEQ ID NO: 3460992 - DNA, 25 bp, Homo sapien
caggaaactgtacagacataaacaa

SEQ ID NO: 3460993 - DNA, 25 bp, Homo sapien
tttttgttccgcaggtgcaataatc

SEQ ID NO: 3460994 - DNA, 25 bp, Homo sapien
gagacaccgcagctttccacaaggg

SEQ ID NO: 3460995 - DNA, 25 bp, Homo sapien
tccgcaggtgcaataatcttttcat

SEQ ID NO: 3460996 - DNA, 25 bp, Homo sapien
gctattttttgttccgcaggtgcaa

SEQ ID NO: 3460997 - DNA, 25 bp, Homo sapien
taattgagtccacaagtcttgccag

SEQ ID NO: 3460998 - DNA, 25 bp, Homo sapien
tggacgctttaccaactctttatat

SEQ ID NO: 3460999 - DNA, 25 bp, Homo sapien
caattctttgcttatagttggacgc

SEQ ID NO: 3461000 - DNA, 25 bp, Homo sapien
tccacaagtcttgccagtaaagttt

SEQ ID NO: 3461001 - DNA, 25 bp, Homo sapien
gatgcatcaccaggaattcctcggc

SEQ ID NO: 3461002 - DNA, 25 bp, Homo sapien
ttcaattccaactggcgaacccaaa

SEQ ID NO: 3461003 - DNA, 25 bp, Homo sapien
tcggcaccgattctcaaagtctaat

SEQ ID NO: 3461004 - DNA, 25 bp, Homo sapien
ggcgaacccaaactatactgttgac

SEQ ID NO: 3461005 - DNA, 25 bp, Homo sapien
cctgttcatatagtttaagctggtc

SEQ ID NO: 3461006 - DNA, 25 bp, Homo sapien
tgatggaaacatcgaaatcctggca

SEQ ID NO: 3461007 - DNA, 25 bp, Homo sapien
agctggtctaagagatctttggcac

SEQ ID NO: 3461008 - DNA, 25 bp, Homo sapien
taaacctgattgaatatccctggac

SEQ ID NO: 3461009 - DNA, 25 bp, Homo sapien
tctcagaagaatcaccaaacgatct

SEQ ID NO: 3461010 - DNA, 25 bp, Homo sapien
tattttggcaggaataacaaagcca

SEQ ID NO: 3461011 - DNA, 25 bp, Homo sapien
tgtgcaatgtttgcaacttgctgta

SEQ ID NO: 3461012 - DNA, 25 bp, Homo sapien
gaataatgcacttttagtaatccat

SEQ ID NO: 3461013 - DNA, 25 bp, Homo sapien
taaggcagattgtaacatcattggc

SEQ ID NO: 3461014 - DNA, 25 bp, Homo sapien
attatctgttcaaatgctaaggcag

SEQ ID NO: 3461015 - DNA, 25 bp, Homo sapien
ggcctctgactttgaatcatttgtt

SEQ ID NO: 3461016 - DNA, 25 bp, Homo sapien
catttgttgatcaatagaattataa

SEQ ID NO: 3461017 - DNA, 25 bp, Homo sapien
taggattatcccaagttatctgtga

SEQ ID NO: 3461018 - DNA, 25 bp, Homo sapien
ggagtttttggatatagccttctaa

SEQ ID NO: 3461019 - DNA, 25 bp, Homo sapien
ttttcagtggcaagccgttcagcag

SEQ ID NO: 3461020 - DNA, 25 bp, Homo sapien
caaaatgtagtgtgccattttctca

SEQ ID NO: 3461021 - DNA, 25 bp, Homo sapien
tctacagttgctaagccagttctca

SEQ ID NO: 3461022 - DNA, 25 bp, Homo sapien
ttgtaatccatctttccagcgctgt

SEQ ID NO: 3461023 - DNA, 25 bp, Homo sapien
gttgctgccgaagcagatcaatatt

SEQ ID NO: 3461024 - DNA, 25 bp, Homo sapien
gatcaatattcataagaacaaccac

SEQ ID NO: 3461025 - DNA, 25 bp, Homo sapien
aaaggtcatatttcaaagtatacac

SEQ ID NO: 3461026 - DNA, 25 bp, Homo sapien
attctgaaaaggtcatatttcaaag

SEQ ID NO: 3461027 - DNA, 25 bp, Homo sapien
tctgaaaaggtcatatttcaaagta

SEQ ID NO: 3461028 - DNA, 25 bp, Homo sapien
gaaaaggtcatatttcaaagtatac

SEQ ID NO: 3461029 - DNA, 25 bp, Homo sapien
cagtgttgtttccatgcatgcatgt

SEQ ID NO: 3461030 - DNA, 25 bp, Homo sapien
ccatctggtactgatgctccagagc

SEQ ID NO: 3461031 - DNA, 25 bp, Homo sapien
cattaagtgcttctaagcccatctg

SEQ ID NO: 3461032 - DNA, 25 bp, Homo sapien
tacagttgatgattccagtgttgtt

SEQ ID NO: 3461033 - DNA, 25 bp, Homo sapien
ccttaaactgatttggaatgccgat

SEQ ID NO: 3461034 - DNA, 25 bp, Homo sapien
tgctgaaaatcgtcaaaaatccact

SEQ ID NO: 3461035 - DNA, 25 bp, Homo sapien
gggcctgaattgtaatcgtccctgt

SEQ ID NO: 3461036 - DNA, 25 bp, Homo sapien
aacagctgacaatcttctaaacaga

SEQ ID NO: 3461037 - DNA, 25 bp, Homo sapien
cttccatatcaacttgcccaattac

SEQ ID NO: 3461038 - DNA, 25 bp, Homo sapien
tctcccaatcatgtacagtaaaaag

SEQ ID NO: 3461039 - DNA, 25 bp, Homo sapien
ttttctcccaatcatgtacagtaaa

SEQ ID NO: 3461040 - DNA, 25 bp, Homo sapien
caacttgcccaattacaatccattc

SEQ ID NO: 3461041 - DNA, 25 bp, Homo sapien
atatttaaacaatctaccttgacag

SEQ ID NO: 3461042 - DNA, 25 bp, Homo sapien
tctggcttccgttcttgtaacttac

SEQ ID NO: 3461043 - DNA, 25 bp, Homo sapien
taattgttaagacttccatagcctc

SEQ ID NO: 3461044 - DNA, 25 bp, Homo sapien
tactatattgtagatttgcatcacc

SEQ ID NO: 3461045 - DNA, 25 bp, Homo sapien
ccatagcctcagtaacaaatgtatc

SEQ ID NO: 3461046 - DNA, 25 bp, Homo sapien
accagccacagttcgtaaaagtctg

SEQ ID NO: 3461047 - DNA, 25 bp, Homo sapien
tccatcattaactcaaatttatccc

SEQ ID NO: 3461048 - DNA, 25 bp, Homo sapien
attgtttctaaacctccaccagcca

SEQ ID NO: 3461049 - DNA, 25 bp, Homo sapien
tcataagttggtgactttccatcat

SEQ ID NO: 3461050 - DNA, 25 bp, Homo sapien
tcatcaccaggctttagttggtccc

SEQ ID NO: 3461051 - DNA, 25 bp, Homo sapien
cttgtgacttcaagatcatcaaact

SEQ ID NO: 3461052 - DNA, 25 bp, Homo sapien
tcttgataatagatctgaagacgtg

SEQ ID NO: 3461053 - DNA, 25 bp, Homo sapien
gatctgaagacgtgatttcacattt

SEQ ID NO: 3461054 - DNA, 25 bp, Homo sapien
gggcacagctctcgatatctttaga

SEQ ID NO: 3461055 - DNA, 25 bp, Homo sapien
ttcctgaaatccttgttgaaactct

SEQ ID NO: 3461056 - DNA, 25 bp, Homo sapien
gatatctttagagatactacttgcc

SEQ ID NO: 3461057 - DNA, 25 bp, Homo sapien
cagggagaaattaggctcttccagt

SEQ ID NO: 3461058 - DNA, 25 bp, Homo sapien
ttcctcaaacaggtatgtcttagtc

SEQ ID NO: 3461059 - DNA, 25 bp, Homo sapien
tgtcatgccagttcatcaaaaattc

SEQ ID NO: 3461060 - DNA, 25 bp, Homo sapien
aattcctcaaacaggtatgtcttag

SEQ ID NO: 3461061 - DNA, 25 bp, Homo sapien
cttcaaccttccttaatctgtcatg

SEQ ID NO: 3461062 - DNA, 25 bp, Homo sapien
gagaaagatgctcccctctcacata

SEQ ID NO: 3461063 - DNA, 25 bp, Homo sapien
ggcagctttggctacaattgtatca

SEQ ID NO: 3461064 - DNA, 25 bp, Homo sapien
cgaaaaaggtcaagccagtgatctg

SEQ ID NO: 3461065 - DNA, 25 bp, Homo sapien
tctgagcaaatcaccaaacagtagt

SEQ ID NO: 3461066 - DNA, 25 bp, Homo sapien
cccaaagatcaagttcacgtaaagc

SEQ ID NO: 3461067 - DNA, 25 bp, Homo sapien
gattgtaacttcaccttgtgcccga

SEQ ID NO: 3461068 - DNA, 25 bp, Homo sapien
gctccacggccgaaaatgggttcca

SEQ ID NO: 3461069 - DNA, 25 bp, Homo sapien
catagttcgactttggctgtcttca

SEQ ID NO: 3461070 - DNA, 25 bp, Homo sapien
tctttcttgatatcagtcattattg

SEQ ID NO: 3461071 - DNA, 25 bp, Homo sapien
tgtctttcttgatatcagtcattat

SEQ ID NO: 3461072 - DNA, 25 bp, Homo sapien
tttcttgatatcagtcattattgat

SEQ ID NO: 3461073 - DNA, 25 bp, Homo sapien
tctattgtctttcttgatatcagtc

SEQ ID NO: 3461074 - DNA, 25 bp, Homo sapien
cttattccagcatgagtagttaatg

SEQ ID NO: 3461075 - DNA, 25 bp, Homo sapien
aagctgatcaagtattgttagtaga

SEQ ID NO: 3461076 - DNA, 25 bp, Homo sapien
tattccagcatgagtagttaatgtt

SEQ ID NO: 3461077 - DNA, 25 bp, Homo sapien
tgaagctgatcaagtattgttagta

SEQ ID NO: 3461078 - DNA, 25 bp, Homo sapien
ccaaaaattcatttaatgatttctg

SEQ ID NO: 3461079 - DNA, 25 bp, Homo sapien
caaaaattcatttaatgatttctga

SEQ ID NO: 3461080 - DNA, 25 bp, Homo sapien
ctccaaaaattcatttaatgatttc

SEQ ID NO: 3461081 - DNA, 25 bp, Homo sapien
aaaaattcatttaatgatttctgac

SEQ ID NO: 3461082 - DNA, 25 bp, Homo sapien
aatcactgatgggttggtagactgg

SEQ ID NO: 3461083 - DNA, 25 bp, Homo sapien
aaaagcttcttcaggtgagactgaa

SEQ ID NO: 3461084 - DNA, 25 bp, Homo sapien
ggttggtagactggcccaatatttc

SEQ ID NO: 3461085 - DNA, 25 bp, Homo sapien
caggtgagactgaatcactgatggg

SEQ ID NO: 3461086 - DNA, 25 bp, Homo sapien
tatgttttgatttctcatcaaagca

SEQ ID NO: 3461087 - DNA, 25 bp, Homo sapien
cagttatatgttttgatttctcatc

SEQ ID NO: 3461088 - DNA, 25 bp, Homo sapien
gcagttatatgttttgatttctcat

SEQ ID NO: 3461089 - DNA, 25 bp, Homo sapien
gttttgatttctcatcaaagcaaac

SEQ ID NO: 3461090 - DNA, 25 bp, Homo sapien
ctctacattatttgatagaggaact

SEQ ID NO: 3461091 - DNA, 25 bp, Homo sapien
cattatttgatagaggaactttatt

SEQ ID NO: 3461092 - DNA, 25 bp, Homo sapien
tctacattatttgatagaggaactt

SEQ ID NO: 3461093 - DNA, 25 bp, Homo sapien
tacattatttgatagaggaacttta

SEQ ID NO: 3461094 - DNA, 25 bp, Homo sapien
tctaaggccaaatcattcaaccatg

SEQ ID NO: 3461095 - DNA, 25 bp, Homo sapien
ttctaaggccaaatcattcaaccat

SEQ ID NO: 3461096 - DNA, 25 bp, Homo sapien
ctaaggccaaatcattcaaccatgt

SEQ ID NO: 3461097 - DNA, 25 bp, Homo sapien
caccttgagaacttcgcccagtagt

SEQ ID NO: 3461098 - DNA, 25 bp, Homo sapien
ccttgagaacttcgcccagtagtaa

SEQ ID NO: 3461099 - DNA, 25 bp, Homo sapien
aactgcaccttgagaacttcgccca

SEQ ID NO: 3461100 - DNA, 25 bp, Homo sapien
tgcaccttgagaacttcgcccagta

SEQ ID NO: 3461101 - DNA, 25 bp, Homo sapien
tgctctaacttattcaccagttgtg

SEQ ID NO: 3461102 - DNA, 25 bp, Homo sapien
agtgaatttaatctgctccgccaag

SEQ ID NO: 3461103 - DNA, 25 bp, Homo sapien
ccagttgtgtttcaatctgatgaag

SEQ ID NO: 3461104 - DNA, 25 bp, Homo sapien
cctggatcctcagaacttgtatcaa

SEQ ID NO: 3461105 - DNA, 25 bp, Homo sapien
ggctttaagtttaagctccaggatg

SEQ ID NO: 3461106 - DNA, 25 bp, Homo sapien
ggtttaactgctttaccacatcaat

SEQ ID NO: 3461107 - DNA, 25 bp, Homo sapien
ccagtcttcagttgtatgaacctga

SEQ ID NO: 3461108 - DNA, 25 bp, Homo sapien
gataatgtcaagaattagggcttta

SEQ ID NO: 3461109 - DNA, 25 bp, Homo sapien
tatactgaaattcagaatccaccat

SEQ ID NO: 3461110 - DNA, 25 bp, Homo sapien
taagtatactgaaattcagaatcca

SEQ ID NO: 3461111 - DNA, 25 bp, Homo sapien
cataagtatactgaaattcagaatc

SEQ ID NO: 3461112 - DNA, 25 bp, Homo sapien
agtatactgaaattcagaatccacc

SEQ ID NO: 3461113 - DNA, 25 bp, Homo sapien
cacctaaagcctttactgattccgt

SEQ ID NO: 3461114 - DNA, 25 bp, Homo sapien
cttgtctgtcagtggagtataaacc

SEQ ID NO: 3461115 - DNA, 25 bp, Homo sapien
tactgattccgttttcccagttcca

SEQ ID NO: 3461116 - DNA, 25 bp, Homo sapien
ggcttgagtgagagttaagtagcac

SEQ ID NO: 3461117 - DNA, 25 bp, Homo sapien
gacagtacagattcttccagcctat

SEQ ID NO: 3461118 - DNA, 25 bp, Homo sapien
gtcccattgacttcacatcgatgcc

SEQ ID NO: 3461119 - DNA, 25 bp, Homo sapien
ttgtctggatttgcatagaaactgc

SEQ ID NO: 3461120 - DNA, 25 bp, Homo sapien
cagttcacatacagttctatgattc

SEQ ID NO: 3461121 - DNA, 25 bp, Homo sapien
aattccagaattagaatttacttct

SEQ ID NO: 3461122 - DNA, 25 bp, Homo sapien
gcaataagctcattgtctggatgag

SEQ ID NO: 3461123 - DNA, 25 bp, Homo sapien
taaagccttccgaatagagaataac

SEQ ID NO: 3461124 - DNA, 25 bp, Homo sapien
gctacgggcctgaaaagctgtttaa

SEQ ID NO: 3461125 - DNA, 25 bp, Homo sapien
tctggatgagacatagctacgggcc

SEQ ID NO: 3461126 - DNA, 25 bp, Homo sapien
atgttgctgaggtgtcaaaagttcc

SEQ ID NO: 3461127 - DNA, 25 bp, Homo sapien
cccaatcataatgttgctgaggtgt

SEQ ID NO: 3461128 - DNA, 25 bp, Homo sapien
agctgtctaaggagatttccacttc

SEQ ID NO: 3461129 - DNA, 25 bp, Homo sapien
cttttgtttagctgtctaaggagat

SEQ ID NO: 3461130 - DNA, 25 bp, Homo sapien
gaaagacatcttttatcagtgcatc

SEQ ID NO: 3461131 - DNA, 25 bp, Homo sapien
tcagtgcatcaaaccgggtgcaatc

SEQ ID NO: 3461132 - DNA, 25 bp, Homo sapien
cttcaaagacctgctttaatgcagc

SEQ ID NO: 3461133 - DNA, 25 bp, Homo sapien
gcttgtaccacaatatgactttcat

SEQ ID NO: 3461134 - DNA, 25 bp, Homo sapien
aacaataacaactcccatcctctgg

SEQ ID NO: 3461135 - DNA, 25 bp, Homo sapien
gaaccacttgacgagcactatttgt

SEQ ID NO: 3461136 - DNA, 25 bp, Homo sapien
tatggcctaataattgatatcgagg

SEQ ID NO: 3461137 - DNA, 25 bp, Homo sapien
aggcatagctttgggattcatagta

SEQ ID NO: 3461138 - DNA, 25 bp, Homo sapien
catttgggccaaactgaatcctttc

SEQ ID NO: 3461139 - DNA, 25 bp, Homo sapien
tagtcagcagtcgattatcatccag

SEQ ID NO: 3461140 - DNA, 25 bp, Homo sapien
cagagattctatccattcagggtca

SEQ ID NO: 3461141 - DNA, 25 bp, Homo sapien
tggctggtgatgcacaacttaaatc

SEQ ID NO: 3461142 - DNA, 25 bp, Homo sapien
ttatcagagaattaagatctgtctc

SEQ ID NO: 3461143 - DNA, 25 bp, Homo sapien
ctccaatccaattttcaagattatt

SEQ ID NO: 3461144 - DNA, 25 bp, Homo sapien
tgctttagaacccattgtaaagcct

SEQ ID NO: 3461145 - DNA, 25 bp, Homo sapien
caggctgattcctcaaccaagattt

SEQ ID NO: 3461146 - DNA, 25 bp, Homo sapien
taatgaattcgtcatgatctctgca

SEQ ID NO: 3461147 - DNA, 25 bp, Homo sapien
gcaaccatgtagatgtgacaaacca

SEQ ID NO: 3461148 - DNA, 25 bp, Homo sapien
cccttatgagattaataatgaattc

SEQ ID NO: 3461149 - DNA, 25 bp, Homo sapien
catcacagtcccaaccaaacttgtt

SEQ ID NO: 3461150 - DNA, 25 bp, Homo sapien
cctcgttgcatgtcaggagtctgaa

SEQ ID NO: 3461151 - DNA, 25 bp, Homo sapien
ggagattctcgtgcccaatgaaaaa

SEQ ID NO: 3461152 - DNA, 25 bp, Homo sapien
tgttgctaatcgacccctagtagag

SEQ ID NO: 3461153 - DNA, 25 bp, Homo sapien
tggtcctaccagaataaagggctgt

SEQ ID NO: 3461154 - DNA, 25 bp, Homo sapien
ggaataaatccacaacatatacctt

SEQ ID NO: 3461155 - DNA, 25 bp, Homo sapien
cagtagaaatcacacaacctggaaa

SEQ ID NO: 3461156 - DNA, 25 bp, Homo sapien
cacactattccccatagttcttatt

SEQ ID NO: 3461157 - DNA, 25 bp, Homo sapien
tgctgtattatatggacggataatt

SEQ ID NO: 3461158 - DNA, 25 bp, Homo sapien
ggtttgtgcactacagtgaactgta

SEQ ID NO: 3461159 - DNA, 25 bp, Homo sapien
tgtagcaatttgagtggaccggagt

SEQ ID NO: 3461160 - DNA, 25 bp, Homo sapien
tgtgaaaatgcgtacctgagcagca

SEQ ID NO: 3461161 - DNA, 25 bp, Homo sapien
gtactgattaccatgcaagtctggc

SEQ ID NO: 3461162 - DNA, 25 bp, Homo sapien
tatcaagtttaggtaggttgatatc

SEQ ID NO: 3461163 - DNA, 25 bp, Homo sapien
ctggtcccccatttatcaagtttag

SEQ ID NO: 3461164 - DNA, 25 bp, Homo sapien
tgctaccaaagtactggtcccccat

SEQ ID NO: 3461165 - DNA, 25 bp, Homo sapien
caaagtactggtcccccatttatca

SEQ ID NO: 3461166 - DNA, 25 bp, Homo sapien
tggtagtaagtttatgtcttcccag

SEQ ID NO: 3461167 - DNA, 25 bp, Homo sapien
cataaaatccttgatacgtcaatac

SEQ ID NO: 3461168 - DNA, 25 bp, Homo sapien
tattttctagaccaacccattccaa

SEQ ID NO: 3461169 - DNA, 25 bp, Homo sapien
cgaacgatggaagtaaatctggtag

SEQ ID NO: 3461170 - DNA, 25 bp, Homo sapien
gataaatttttgatgaagaacccca

SEQ ID NO: 3461171 - DNA, 25 bp, Homo sapien
tgctccataaatcgtttgtaactgc

SEQ ID NO: 3461172 - DNA, 25 bp, Homo sapien
agatttttatgtagaactggttcca

SEQ ID NO: 3461173 - DNA, 25 bp, Homo sapien
catacacttgtaccatagatcctgc

SEQ ID NO: 3461174 - DNA, 25 bp, Homo sapien
catcaactgtaaatttggctcgcac

SEQ ID NO: 3461175 - DNA, 25 bp, Homo sapien
gaaatagtgactataatcatcaact

SEQ ID NO: 3461176 - DNA, 25 bp, Homo sapien
taagaatgcaaggagtaaagaaata

SEQ ID NO: 3461177 - DNA, 25 bp, Homo sapien
ataagccaagaacccattgggtaag

SEQ ID NO: 3461178 - DNA, 25 bp, Homo sapien
tattgtctaatatgtctgagcccca

SEQ ID NO: 3461179 - DNA, 25 bp, Homo sapien
taagcgccgtgcctcatatgctaca

SEQ ID NO: 3461180 - DNA, 25 bp, Homo sapien
caattttgtcacgaaataagcgccg

SEQ ID NO: 3461181 - DNA, 25 bp, Homo sapien
tctaacacataatctagtggatggt

SEQ ID NO: 3461182 - DNA, 25 bp, Homo sapien
ccttgctcctgaattatgccgagct

SEQ ID NO: 3461183 - DNA, 25 bp, Homo sapien
gctccccatgtaacgtagaaactat

SEQ ID NO: 3461184 - DNA, 25 bp, Homo sapien
gagatcagtagagtttagttttcca

SEQ ID NO: 3461185 - DNA, 25 bp, Homo sapien
aataacatccttgagatcagtagag

SEQ ID NO: 3461186 - DNA, 25 bp, Homo sapien
tccagggaaactcagcactctatct

SEQ ID NO: 3461187 - DNA, 25 bp, Homo sapien
catatactccaagacttcgtggaaa

SEQ ID NO: 3461188 - DNA, 25 bp, Homo sapien
gcactctatctatcctagacatata

SEQ ID NO: 3461189 - DNA, 25 bp, Homo sapien
tagacatatactccaagacttcgtg

SEQ ID NO: 3461190 - DNA, 25 bp, Homo sapien
ttggagaaaacaggaccgctccatg

SEQ ID NO: 3461191 - DNA, 25 bp, Homo sapien
ctaaagaagtgatggtccgacgacc

SEQ ID NO: 3461192 - DNA, 25 bp, Homo sapien
aaaacaggaccgctccatgcatgtg

SEQ ID NO: 3461193 - DNA, 25 bp, Homo sapien
tgatggtccgacgacctacaccact

SEQ ID NO: 3461194 - DNA, 25 bp, Homo sapien
gaagtaaaactacctgttgtgcttc

SEQ ID NO: 3461195 - DNA, 25 bp, Homo sapien
ccaaaaatgtaggatgtacaaactg

SEQ ID NO: 3461196 - DNA, 25 bp, Homo sapien
taggatgtacaaactggtaatcctc

SEQ ID NO: 3461197 - DNA, 25 bp, Homo sapien
caaaaggctattgatcatctccaaa

SEQ ID NO: 3461198 - DNA, 25 bp, Homo sapien
tcttggaatgtatacttacagtcat

SEQ ID NO: 3461199 - DNA, 25 bp, Homo sapien
ttcttggaatgtatacttacagtca

SEQ ID NO: 3461200 - DNA, 25 bp, Homo sapien
cttcttggaatgtatacttacagtc

SEQ ID NO: 3461201 - DNA, 25 bp, Homo sapien
tgtactctagcctcaataaacttgt

SEQ ID NO: 3461202 - DNA, 25 bp, Homo sapien
cttcctccataagaccttgtactct

SEQ ID NO: 3461203 - DNA, 25 bp, Homo sapien
taagaccttgtactctagcctcaat

SEQ ID NO: 3461204 - DNA, 25 bp, Homo sapien
tagcctcaataaacttgtgttccat

SEQ ID NO: 3461205 - DNA, 25 bp, Homo sapien
ccttaagtggtaacagcaagggctc

SEQ ID NO: 3461206 - DNA, 25 bp, Homo sapien
caagagtatagagtccaggaacttc

SEQ ID NO: 3461207 - DNA, 25 bp, Homo sapien
tgaagcttgatccttaagtggtaac

SEQ ID NO: 3461208 - DNA, 25 bp, Homo sapien
tgtgaagtaattgaagactggtcca

SEQ ID NO: 3461209 - DNA, 25 bp, Homo sapien
ttggaccaaccctccatccacaaca

SEQ ID NO: 3461210 - DNA, 25 bp, Homo sapien
ttcttatgcaaagctggattactct

SEQ ID NO: 3461211 - DNA, 25 bp, Homo sapien
tttcttcatactgctattggaccaa

SEQ ID NO: 3461212 - DNA, 25 bp, Homo sapien
ttatgcaaagctggattactctcac

SEQ ID NO: 3461213 - DNA, 25 bp, Homo sapien
tctccaccacctgtttcactgaata

SEQ ID NO: 3461214 - DNA, 25 bp, Homo sapien
tttctccaccacctgtttcactgaa

SEQ ID NO: 3461215 - DNA, 25 bp, Homo sapien
ttttctccaccacctgtttcactga

SEQ ID NO: 3461216 - DNA, 25 bp, Homo sapien
ttctccaccacctgtttcactgaat

SEQ ID NO: 3461217 - DNA, 25 bp, Homo sapien
catgtatcggcttggtgtagcacca

SEQ ID NO: 3461218 - DNA, 25 bp, Homo sapien
ggcagaatacacatgtaaaaaggtc

SEQ ID NO: 3461219 - DNA, 25 bp, Homo sapien
ctttttcttgctactactaatggca

SEQ ID NO: 3461220 - DNA, 25 bp, Homo sapien
gcaccatatgctttacaagattcat

SEQ ID NO: 3461221 - DNA, 25 bp, Homo sapien
gaggctgacattctaatgtcacatt

SEQ ID NO: 3461222 - DNA, 25 bp, Homo sapien
agaggctgacattctaatgtcacat

SEQ ID NO: 3461223 - DNA, 25 bp, Homo sapien
acactgtgatcatttgaagggcagc

SEQ ID NO: 3461224 - DNA, 25 bp, Homo sapien
tcatcttgcttcgttttaagtaaca

SEQ ID NO: 3461225 - DNA, 25 bp, Homo sapien
cattgacactgtgatcatttgaagg

SEQ ID NO: 3461226 - DNA, 25 bp, Homo sapien
tcttgcttcgttttaagtaacacac

SEQ ID NO: 3461227 - DNA, 25 bp, Homo sapien
taaacacttaaacagcccaggcaca

SEQ ID NO: 3461228 - DNA, 25 bp, Homo sapien
gccattaacctagaattgcaagcct

SEQ ID NO: 3461229 - DNA, 25 bp, Homo sapien
atgtattgccatgcccagatcctga

SEQ ID NO: 3461230 - DNA, 25 bp, Homo sapien
cactatgttaattaggctcccagac

SEQ ID NO: 3461231 - DNA, 25 bp, Homo sapien
aacttcttctgctattctgtgcttc

SEQ ID NO: 3461232 - DNA, 25 bp, Homo sapien
caacttcttctgctattctgtgctt

SEQ ID NO: 3461233 - DNA, 25 bp, Homo sapien
aacaacttcttctgctattctgtgc

SEQ ID NO: 3461234 - DNA, 25 bp, Homo sapien
ttaacaacttcttctgctattctgt

SEQ ID NO: 3461235 - DNA, 25 bp, Homo sapien
catgcgtagtgagcgaatttctgaa

SEQ ID NO: 3461236 - DNA, 25 bp, Homo sapien
taattacatcaggtggcatgcgtag

SEQ ID NO: 3461237 - DNA, 25 bp, Homo sapien
tgattcgggcttaatgtttccaact

SEQ ID NO: 3461238 - DNA, 25 bp, Homo sapien
tcaaagatacccatcaaccttaaaa

SEQ ID NO: 3461239 - DNA, 25 bp, Homo sapien
taaatgaggctaaataaaatttgct

SEQ ID NO: 3461240 - DNA, 25 bp, Homo sapien
tgaggctaaataaaatttgctgttt

SEQ ID NO: 3461241 - DNA, 25 bp, Homo sapien
gcatatttccttaaatgaggctaaa

SEQ ID NO: 3461242 - DNA, 25 bp, Homo sapien
aatgaggctaaataaaatttgctgt

SEQ ID NO: 3461243 - DNA, 25 bp, Homo sapien
tatttcgggcatcaaaggttgctat

SEQ ID NO: 3461244 - DNA, 25 bp, Homo sapien
aaatatttcgggcatcaaaggttgc

SEQ ID NO: 3461245 - DNA, 25 bp, Homo sapien
ggttgctatgtcttctcttacacct

SEQ ID NO: 3461246 - DNA, 25 bp, Homo sapien
caaaggttgctatgtcttctcttac

SEQ ID NO: 3461247 - DNA, 25 bp, Homo sapien
gatgaattcgttccaagacatggga

SEQ ID NO: 3461248 - DNA, 25 bp, Homo sapien
taatcctgcctgttcagtttccaaa

SEQ ID NO: 3461249 - DNA, 25 bp, Homo sapien
gaatattggctttcacccaggcagc

SEQ ID NO: 3461250 - DNA, 25 bp, Homo sapien
tgcagctgcagtactggcacgctta

SEQ ID NO: 3461251 - DNA, 25 bp, Homo sapien
tgaccaacagaattaagaagctcct

SEQ ID NO: 3461252 - DNA, 25 bp, Homo sapien
gaccaacagaattaagaagctcctc

SEQ ID NO: 3461253 - DNA, 25 bp, Homo sapien
ttgaccaacagaattaagaagctcc

SEQ ID NO: 3461254 - DNA, 25 bp, Homo sapien
tttgaccaacagaattaagaagctc

SEQ ID NO: 3461255 - DNA, 25 bp, Homo sapien
taaggatcagtataagtaacagcat

SEQ ID NO: 3461256 - DNA, 25 bp, Homo sapien
taactgcatatgactattggctacc

SEQ ID NO: 3461257 - DNA, 25 bp, Homo sapien
caaataaccactagccactttacgg

SEQ ID NO: 3461258 - DNA, 25 bp, Homo sapien
acctggaaatggaaagctgcatctt

SEQ ID NO: 3461259 - DNA, 25 bp, Homo sapien
tctcttatgttctctgtcaagctga

SEQ ID NO: 3461260 - DNA, 25 bp, Homo sapien
ttgcttacttcagcctcaagtttgg

SEQ ID NO: 3461261 - DNA, 25 bp, Homo sapien
tcttgtgccttgcttacttcagcct

SEQ ID NO: 3461262 - DNA, 25 bp, Homo sapien
taagacttctgcagctttgattgtt

SEQ ID NO: 3461263 - DNA, 25 bp, Homo sapien
tcttttaggaagagtagctaattcc

SEQ ID NO: 3461264 - DNA, 25 bp, Homo sapien
taaatgcagcagcaagttgagctct

SEQ ID NO: 3461265 - DNA, 25 bp, Homo sapien
ggagcagcagaaagatatgtaataa

SEQ ID NO: 3461266 - DNA, 25 bp, Homo sapien
agctaattcctctgttatctctaca

SEQ ID NO: 3461267 - DNA, 25 bp, Homo sapien
actaaatacaaactctcaagatcag

SEQ ID NO: 3461268 - DNA, 25 bp, Homo sapien
taaatacaaactctcaagatcagga

SEQ ID NO: 3461269 - DNA, 25 bp, Homo sapien
ataactaaatacaaactctcaagat

SEQ ID NO: 3461270 - DNA, 25 bp, Homo sapien
taactaaatacaaactctcaagatc

SEQ ID NO: 3461271 - DNA, 25 bp, Homo sapien
cattcttccacatttaacacccaaa

SEQ ID NO: 3461272 - DNA, 25 bp, Homo sapien
gaaacccattcttccacatttaaca

SEQ ID NO: 3461273 - DNA, 25 bp, Homo sapien
ttgaaacccattcttccacatttaa

SEQ ID NO: 3461274 - DNA, 25 bp, Homo sapien
cccattcttccacatttaacaccca

SEQ ID NO: 3461275 - DNA, 25 bp, Homo sapien
ttccaaattaactgctcactttcag

SEQ ID NO: 3461276 - DNA, 25 bp, Homo sapien
gatggtaggccttcacttttccaaa

SEQ ID NO: 3461277 - DNA, 25 bp, Homo sapien
gcattttctatggaaaggtcatctg

SEQ ID NO: 3461278 - DNA, 25 bp, Homo sapien
tcagtacaaagaaatctcctcagat

SEQ ID NO: 3461279 - DNA, 25 bp, Homo sapien
catatattctagtctgtactcatga

SEQ ID NO: 3461280 - DNA, 25 bp, Homo sapien
ctttggaaaatgtgcactatgtgac

SEQ ID NO: 3461281 - DNA, 25 bp, Homo sapien
cactcactgataataaggttatgct

SEQ ID NO: 3461282 - DNA, 25 bp, Homo sapien
gaaactatataaccaatgaattggg

SEQ ID NO: 3461283 - DNA, 25 bp, Homo sapien
ggttagtaaatagcctgtgaagtgt

SEQ ID NO: 3461284 - DNA, 25 bp, Homo sapien
ccatcacgtaaatgtactactcgaa

SEQ ID NO: 3461285 - DNA, 25 bp, Homo sapien
cacaatgatgtggttagtaaatagc

SEQ ID NO: 3461286 - DNA, 25 bp, Homo sapien
actactcgaagcacaatgatgtggt

SEQ ID NO: 3461287 - DNA, 25 bp, Homo sapien
cttctaaacgtgagtctttcaaatg

SEQ ID NO: 3461288 - DNA, 25 bp, Homo sapien
gattgataacttctaaacgtgagtc

SEQ ID NO: 3461289 - DNA, 25 bp, Homo sapien
tttaaccactctgtagcttgggaag

SEQ ID NO: 3461290 - DNA, 25 bp, Homo sapien
gaagaaggatctataagaaatgggc

SEQ ID NO: 3461291 - DNA, 25 bp, Homo sapien
tttcccaaaacgtactgctaattca

SEQ ID NO: 3461292 - DNA, 25 bp, Homo sapien
tggataaagaacaggttctacacca

SEQ ID NO: 3461293 - DNA, 25 bp, Homo sapien
caagagctgtgataaagttactatc

SEQ ID NO: 3461294 - DNA, 25 bp, Homo sapien
gaacaggttctacaccatccatctc

SEQ ID NO: 3461295 - DNA, 25 bp, Homo sapien
cacctatttgtaccacataacgtgg

SEQ ID NO: 3461296 - DNA, 25 bp, Homo sapien
tgccctcgtaatccacttcttgttg

SEQ ID NO: 3461297 - DNA, 25 bp, Homo sapien
cagtaacaatggaagctgcatccgg

SEQ ID NO: 3461298 - DNA, 25 bp, Homo sapien
ttgttgacaaaaagaggcggaattc

SEQ ID NO: 3461299 - DNA, 25 bp, Homo sapien
aaatcaggtttctcatgctgaatgg

SEQ ID NO: 3461300 - DNA, 25 bp, Homo sapien
gaagagattcttcgagcttggctag

SEQ ID NO: 3461301 - DNA, 25 bp, Homo sapien
ttggctagctgtattttcttatctt

SEQ ID NO: 3461302 - DNA, 25 bp, Homo sapien
tctgttcttctaaatcaggtttctc

SEQ ID NO: 3461303 - DNA, 25 bp, Homo sapien
gatcaagggaaatttggagtttgta

SEQ ID NO: 3461304 - DNA, 25 bp, Homo sapien
gactcaatcaaatccttattttcca

SEQ ID NO: 3461305 - DNA, 25 bp, Homo sapien
ctcttgaataagtgcactgcttgct

SEQ ID NO: 3461306 - DNA, 25 bp, Homo sapien
ccaaaatattgccttgagatgtggc

SEQ ID NO: 3461307 - DNA, 25 bp, Homo sapien
aagtacatcttgctggcactctcag

SEQ ID NO: 3461308 - DNA, 25 bp, Homo sapien
tcgttggaaaagtcggagaaaagca

SEQ ID NO: 3461309 - DNA, 25 bp, Homo sapien
ccagggggagataggcatcccgttc

SEQ ID NO: 3461310 - DNA, 25 bp, Homo sapien
cagccaaactaaaacggtacatgtt

SEQ ID NO: 3461311 - DNA, 25 bp, Homo sapien
atataccatatgttgtaatgagctg

SEQ ID NO: 3461312 - DNA, 25 bp, Homo sapien
ttcatataccatatgttgtaatgag

SEQ ID NO: 3461313 - DNA, 25 bp, Homo sapien
aatagacaacgacatatatattcat

SEQ ID NO: 3461314 - DNA, 25 bp, Homo sapien
aaatagacaacgacatatatattca

SEQ ID NO: 3461315 - DNA, 25 bp, Homo sapien
atattacgttaaatcacagaacaag

SEQ ID NO: 3461316 - DNA, 25 bp, Homo sapien
ctataaatattacgttaaatcacag

SEQ ID NO: 3461317 - DNA, 25 bp, Homo sapien
ccagtagggaaagagttatactata

SEQ ID NO: 3461318 - DNA, 25 bp, Homo sapien
ccaagaatgctataaggcattccag

SEQ ID NO: 3461319 - DNA, 25 bp, Homo sapien
gatgctggttattttgcctgttagt

SEQ ID NO: 3461320 - DNA, 25 bp, Homo sapien
caccgatgggtgttgactctatcct

SEQ ID NO: 3461321 - DNA, 25 bp, Homo sapien
cgatgggtgttgactctatcctatt

SEQ ID NO: 3461322 - DNA, 25 bp, Homo sapien
tgggcctatgtgtatctctgcatgt

SEQ ID NO: 3461323 - DNA, 25 bp, Homo sapien
gcaaagaataacagatattatcttg

SEQ ID NO: 3461324 - DNA, 25 bp, Homo sapien
ctgcaaagaataacagatattatct

SEQ ID NO: 3461325 - DNA, 25 bp, Homo sapien
tgcaaagaataacagatattatctt

SEQ ID NO: 3461326 - DNA, 25 bp, Homo sapien
tgcatgcctcgaacaaaatgcaaag

SEQ ID NO: 3461327 - DNA, 25 bp, Homo sapien
tgcaaagcgaacatcaactgatcag

SEQ ID NO: 3461328 - DNA, 25 bp, Homo sapien
aaaaagttcaggatgcatgcctcga

SEQ ID NO: 3461329 - DNA, 25 bp, Homo sapien
aaaatgcaaagcgaacatcaactga

SEQ ID NO: 3461330 - DNA, 25 bp, Homo sapien
gctttccgtaacatgtctccaacaa

SEQ ID NO: 3461331 - DNA, 25 bp, Homo sapien
tccaacaaccacacctgtaaacgta

SEQ ID NO: 3461332 - DNA, 25 bp, Homo sapien
agctttccgtaacatgtctccaaca

SEQ ID NO: 3461333 - DNA, 25 bp, Homo sapien
accacacctgtaaacgtatcccatt

SEQ ID NO: 3461334 - DNA, 25 bp, Homo sapien
gaagctgatcacgtattttttgttg

SEQ ID NO: 3461335 - DNA, 25 bp, Homo sapien
acggcccagcttcgttcctgatcta

SEQ ID NO: 3461336 - DNA, 25 bp, Homo sapien
ctttaatgttgccacggcccagctt

SEQ ID NO: 3461337 - DNA, 25 bp, Homo sapien
ctgatctatccaagacggaagctga

SEQ ID NO: 3461338 - DNA, 25 bp, Homo sapien
cagagctgcatcttcaaagcagagg

SEQ ID NO: 3461339 - DNA, 25 bp, Homo sapien
cttcaaagcagagggtctgataaag

SEQ ID NO: 3461340 - DNA, 25 bp, Homo sapien
tattataataagtacgccacagagc

SEQ ID NO: 3461341 - DNA, 25 bp, Homo sapien
tctttgcaaggatagatggaaactc

SEQ ID NO: 3461342 - DNA, 25 bp, Homo sapien
ttttacatgcaaaaagagccatggc

SEQ ID NO: 3461343 - DNA, 25 bp, Homo sapien
ggtcttagcgcctgtactacaagaa

SEQ ID NO: 3461344 - DNA, 25 bp, Homo sapien
tggcactttgcaatctgtccggtct

SEQ ID NO: 3461345 - DNA, 25 bp, Homo sapien
gcaaaaagagccatggcactttgca

SEQ ID NO: 3461346 - DNA, 25 bp, Homo sapien
ctcaggctaacataaaatgaaaggt

SEQ ID NO: 3461347 - DNA, 25 bp, Homo sapien
aaacaaataattcaggtcagtggtc

SEQ ID NO: 3461348 - DNA, 25 bp, Homo sapien
taacatttctaaactcaggctaaca

SEQ ID NO: 3461349 - DNA, 25 bp, Homo sapien
caggtcagtggtctagttcttgaaa

SEQ ID NO: 3461350 - DNA, 25 bp, Homo sapien
catggaaggagcatatacagcagcc

SEQ ID NO: 3461351 - DNA, 25 bp, Homo sapien
tagctaattaaatggcctgagggcc

SEQ ID NO: 3461352 - DNA, 25 bp, Homo sapien
caatgcagcacatggacacgttcct

SEQ ID NO: 3461353 - DNA, 25 bp, Homo sapien
tgactgcagtccttgggcaagccct

SEQ ID NO: 3461354 - DNA, 25 bp, Homo sapien
ctttgtataaacgtttgagatttag

SEQ ID NO: 3461355 - DNA, 25 bp, Homo sapien
ttgtataaacgtttgagatttagag

SEQ ID NO: 3461356 - DNA, 25 bp, Homo sapien
tttgtataaacgtttgagatttaga

SEQ ID NO: 3461357 - DNA, 25 bp, Homo sapien
gaaataattatcaagatgggttcaa

SEQ ID NO: 3461358 - DNA, 25 bp, Homo sapien
tcagcacccggagaaataattatca

SEQ ID NO: 3461359 - DNA, 25 bp, Homo sapien
ctgagaaggatcagcacccggagaa

SEQ ID NO: 3461360 - DNA, 25 bp, Homo sapien
caagatgggttcaatttccagtgtc

SEQ ID NO: 3461361 - DNA, 25 bp, Homo sapien
cagcattagctagttcttgaagttc

SEQ ID NO: 3461362 - DNA, 25 bp, Homo sapien
tggtgataacactctccgcttcttt

SEQ ID NO: 3461363 - DNA, 25 bp, Homo sapien
ttcagcattagctagttcttgaagt

SEQ ID NO: 3461364 - DNA, 25 bp, Homo sapien
tcagcattagctagttcttgaagtt

SEQ ID NO: 3461365 - DNA, 25 bp, Homo sapien
taagttcttcaaacagagccagtct

SEQ ID NO: 3461366 - DNA, 25 bp, Homo sapien
ccattgcgggcacattcttttagca

SEQ ID NO: 3461367 - DNA, 25 bp, Homo sapien
gctaaatcagcttgaccttgaccca

SEQ ID NO: 3461368 - DNA, 25 bp, Homo sapien
cagagccagtctccattgcgggcac

SEQ ID NO: 3461369 - DNA, 25 bp, Homo sapien
ggtatctttaggttgaagagtattc

SEQ ID NO: 3461370 - DNA, 25 bp, Homo sapien
taaaataggagtaaagttgggatga

SEQ ID NO: 3461371 - DNA, 25 bp, Homo sapien
agtgagccaaagacgaaaggtatct

SEQ ID NO: 3461372 - DNA, 25 bp, Homo sapien
cagacttgactgtagtaaaatagga

SEQ ID NO: 3461373 - DNA, 25 bp, Homo sapien
catgcagcatgaaaccatgcaagac

SEQ ID NO: 3461374 - DNA, 25 bp, Homo sapien
tcaggagtccaagactcataagtac

SEQ ID NO: 3461375 - DNA, 25 bp, Homo sapien
gactcataagtacgcattaaattct

SEQ ID NO: 3461376 - DNA, 25 bp, Homo sapien
gcatgagctcgatgtgtattatctt

SEQ ID NO: 3461377 - DNA, 25 bp, Homo sapien
aaaagtctgtcaataatgttgtacc

SEQ ID NO: 3461378 - DNA, 25 bp, Homo sapien
tgtcaataatgttgtacccagcccg

SEQ ID NO: 3461379 - DNA, 25 bp, Homo sapien
aagtctgtcaataatgttgtaccca

SEQ ID NO: 3461380 - DNA, 25 bp, Homo sapien
taatgttgtacccagcccgaagatc

SEQ ID NO: 3461381 - DNA, 25 bp, Homo sapien
catgtacaaattcccattgtacatc

SEQ ID NO: 3461382 - DNA, 25 bp, Homo sapien
acaaattcccattgtacatctttgg

SEQ ID NO: 3461383 - DNA, 25 bp, Homo sapien
tgtacaaattcccattgtacatctt

SEQ ID NO: 3461384 - DNA, 25 bp, Homo sapien
aaaccatgtacaaattcccattgta

SEQ ID NO: 3461385 - DNA, 25 bp, Homo sapien
tctaaggtcaaaatagttgtctata

SEQ ID NO: 3461386 - DNA, 25 bp, Homo sapien
cctttggttgaatacatcaataact

SEQ ID NO: 3461387 - DNA, 25 bp, Homo sapien
gatacggaatatggaaaaatgcttt

SEQ ID NO: 3461388 - DNA, 25 bp, Homo sapien
gctgcaggattgtggtagagatacg

SEQ ID NO: 3461389 - DNA, 25 bp, Homo sapien
agcgagcgatattggcaggcagacc

SEQ ID NO: 3461390 - DNA, 25 bp, Homo sapien
ctgagaactgatcatgcgctgagat

SEQ ID NO: 3461391 - DNA, 25 bp, Homo sapien
gcaggcagaccaaagaaactaggtt

SEQ ID NO: 3461392 - DNA, 25 bp, Homo sapien
ctgagatgagcgagcgatattggca

SEQ ID NO: 3461393 - DNA, 25 bp, Homo sapien
ataggaacagagtttcctcatgttg

SEQ ID NO: 3461394 - DNA, 25 bp, Homo sapien
taataggaacagagtttcctcatgt

SEQ ID NO: 3461395 - DNA, 25 bp, Homo sapien
aataggaacagagtttcctcatgtt

SEQ ID NO: 3461396 - DNA, 25 bp, Homo sapien
gctgttatggatctgcccaaaatcc

SEQ ID NO: 3461397 - DNA, 25 bp, Homo sapien
ctatcaaatttggaaccagctgtta

SEQ ID NO: 3461398 - DNA, 25 bp, Homo sapien
caggagaaagttcattagaccagat

SEQ ID NO: 3461399 - DNA, 25 bp, Homo sapien
tttcttccagagattgaggacagga

SEQ ID NO: 3461400 - DNA, 25 bp, Homo sapien
caagtatctctgcatagtccctagc

SEQ ID NO: 3461401 - DNA, 25 bp, Homo sapien
ggtaggtaccatgactattctgtcc

SEQ ID NO: 3461402 - DNA, 25 bp, Homo sapien
ggcagaaatccaacatcagagaact

SEQ ID NO: 3461403 - DNA, 25 bp, Homo sapien
aagagagtgcttacatatgccagac

SEQ ID NO: 3461404 - DNA, 25 bp, Homo sapien
agaagcatattgctcctcccctgca

SEQ ID NO: 3461405 - DNA, 25 bp, Homo sapien
gtaagaagcatattgctcctcccct

SEQ ID NO: 3461406 - DNA, 25 bp, Homo sapien
aagcatattgctcctcccctgcagt

SEQ ID NO: 3461407 - DNA, 25 bp, Homo sapien
tgcagtgcctgtgggtggaattctg

SEQ ID NO: 3461408 - DNA, 25 bp, Homo sapien
taataggaaataaaattggacaaga

SEQ ID NO: 3461409 - DNA, 25 bp, Homo sapien
gattaataggaaataaaattggaca

SEQ ID NO: 3461410 - DNA, 25 bp, Homo sapien
ataggaaataaaattggacaagact

SEQ ID NO: 3461411 - DNA, 25 bp, Homo sapien
cttgattaataggaaataaaattgg

SEQ ID NO: 3461412 - DNA, 25 bp, Homo sapien
cagtaaagtagttcctctgatgact

SEQ ID NO: 3461413 - DNA, 25 bp, Homo sapien
gagatccttgtcgatcgttaggagg

SEQ ID NO: 3461414 - DNA, 25 bp, Homo sapien
caagagactggtggacactttgtac

SEQ ID NO: 3461415 - DNA, 25 bp, Homo sapien
tgaatgacagtattggagatccttg

SEQ ID NO: 3461416 - DNA, 25 bp, Homo sapien
tttaccacaaggcagacccatacca

SEQ ID NO: 3461417 - DNA, 25 bp, Homo sapien
tactaatacacttaatcagaggagc

SEQ ID NO: 3461418 - DNA, 25 bp, Homo sapien
cctgtattggtaatcattgagacta

SEQ ID NO: 3461419 - DNA, 25 bp, Homo sapien
ttcatccaaccaatagcactagttg

SEQ ID NO: 3461420 - DNA, 25 bp, Homo sapien
gaaggaatcgaacctcctgaaactg

SEQ ID NO: 3461421 - DNA, 25 bp, Homo sapien
gaacctcctgaaactggtttctagc

SEQ ID NO: 3461422 - DNA, 25 bp, Homo sapien
atcgaacctcctgaaactggtttct

SEQ ID NO: 3461423 - DNA, 25 bp, Homo sapien
aggaatcgaacctcctgaaactggt

SEQ ID NO: 3461424 - DNA, 25 bp, Homo sapien
ctaccaggcttcggaataatctccc

SEQ ID NO: 3461425 - DNA, 25 bp, Homo sapien
taccaggcttcggaataatctccca

SEQ ID NO: 3461426 - DNA, 25 bp, Homo sapien
caggcttcggaataatctcccatat

SEQ ID NO: 3461427 - DNA, 25 bp, Homo sapien
ccaggcttcggaataatctcccata

SEQ ID NO: 3461428 - DNA, 25 bp, Homo sapien
gtaaaaagaggccttgacctctgtc

SEQ ID NO: 3461429 - DNA, 25 bp, Homo sapien
ctctgtctttagatttatagtctaa

SEQ ID NO: 3461430 - DNA, 25 bp, Homo sapien
tgtctttagatttatagtctaatgc

SEQ ID NO: 3461431 - DNA, 25 bp, Homo sapien
ttagatttatagtctaatgcttact

SEQ ID NO: 3461432 - DNA, 25 bp, Homo sapien
gaagctgcccctttgaattcgcaat

SEQ ID NO: 3461433 - DNA, 25 bp, Homo sapien
ctgcccctttgaattcgcaattcaa

SEQ ID NO: 3461434 - DNA, 25 bp, Homo sapien
tgaattcgcaattcaacatgagaaa

SEQ ID NO: 3461435 - DNA, 25 bp, Homo sapien
ggcggattgaagctgcccctttgaa

SEQ ID NO: 3461436 - DNA, 25 bp, Homo sapien
gattggtggaattcaaacccaggat

SEQ ID NO: 3461437 - DNA, 25 bp, Homo sapien
tggaattcaaacccaggataattta

SEQ ID NO: 3461438 - DNA, 25 bp, Homo sapien
agattggtggaattcaaacccagga

SEQ ID NO: 3461439 - DNA, 25 bp, Homo sapien
tggtggaattcaaacccaggataat

SEQ ID NO: 3461440 - DNA, 25 bp, Homo sapien
ctgcatcaattgaatgcaaatcaat

SEQ ID NO: 3461441 - DNA, 25 bp, Homo sapien
taaggactgcaagactattctgcat

SEQ ID NO: 3461442 - DNA, 25 bp, Homo sapien
tcaatcactttaattaacctaagcc

SEQ ID NO: 3461443 - DNA, 25 bp, Homo sapien
caaatcaatcactttaattaaccta

SEQ ID NO: 3461444 - DNA, 25 bp, Homo sapien
tgctacctattacgcgatgtcctaa

SEQ ID NO: 3461445 - DNA, 25 bp, Homo sapien
gtgctacctattacgcgatgtccta

SEQ ID NO: 3461446 - DNA, 25 bp, Homo sapien
tgtgctacctattacgcgatgtcct

SEQ ID NO: 3461447 - DNA, 25 bp, Homo sapien
tatcctattatcagttctgataagt

SEQ ID NO: 3461448 - DNA, 25 bp, Homo sapien
cattatcctattatcagttctgata

SEQ ID NO: 3461449 - DNA, 25 bp, Homo sapien
attatcctattatcagttctgataa

SEQ ID NO: 3461450 - DNA, 25 bp, Homo sapien
ttatcctattatcagttctgataag

SEQ ID NO: 3461451 - DNA, 25 bp, Homo sapien
tgtttgaatttctgagtagcactcc

SEQ ID NO: 3461452 - DNA, 25 bp, Homo sapien
gtttctcttgggtcaatattcacga

SEQ ID NO: 3461453 - DNA, 25 bp, Homo sapien
tattcacgagtgatatagtgggcaa

SEQ ID NO: 3461454 - DNA, 25 bp, Homo sapien
tttgccagcagaacactgggtgtat

SEQ ID NO: 3461455 - DNA, 25 bp, Homo sapien
tccacattcattgaccttatattgg

SEQ ID NO: 3461456 - DNA, 25 bp, Homo sapien
cttgaaatcagtcatggcaggagca

SEQ ID NO: 3461457 - DNA, 25 bp, Homo sapien
gaagaaataccggatagaagacatg

SEQ ID NO: 3461458 - DNA, 25 bp, Homo sapien
taggcatctcttcttaactccacat

SEQ ID NO: 3461459 - DNA, 25 bp, Homo sapien
gagttctggaaattagctgtacagc

SEQ ID NO: 3461460 - DNA, 25 bp, Homo sapien
tccagagcctcgcatgatatagacc

SEQ ID NO: 3461461 - DNA, 25 bp, Homo sapien
ccttgaggacgttatacacagtgag

SEQ ID NO: 3461462 - DNA, 25 bp, Homo sapien
gatatagaccatggtaggtgggcaa

SEQ ID NO: 3461463 - DNA, 25 bp, Homo sapien
gtattgcaagggcacgggcaacaag

SEQ ID NO: 3461464 - DNA, 25 bp, Homo sapien
ctctcaggtattgtaagggatcttc

SEQ ID NO: 3461465 - DNA, 25 bp, Homo sapien
caagacctctcaggtattgtaaggg

SEQ ID NO: 3461466 - DNA, 25 bp, Homo sapien
cacgggcaacaagacctctcaggta

SEQ ID NO: 3461467 - DNA, 25 bp, Homo sapien
tacgtggttgagtgtaagacaattc

SEQ ID NO: 3461468 - DNA, 25 bp, Homo sapien
tgaaaactagatggcattgctgagc

SEQ ID NO: 3461469 - DNA, 25 bp, Homo sapien
ttttgaagatccaaaggcaagcaca

SEQ ID NO: 3461470 - DNA, 25 bp, Homo sapien
gacttggtatgaataacactcttgg

SEQ ID NO: 3461471 - DNA, 25 bp, Homo sapien
gctattagttcagctggtgcacaga

SEQ ID NO: 3461472 - DNA, 25 bp, Homo sapien
tctcttagccaggtctagaatagaa

SEQ ID NO: 3461473 - DNA, 25 bp, Homo sapien
gtgcacagagatggtactatagtaa

SEQ ID NO: 3461474 - DNA, 25 bp, Homo sapien
gtaatgtcagcgattaaaaacgtac

SEQ ID NO: 3461475 - DNA, 25 bp, Homo sapien
gacgaaatactgagcatccaggcct

SEQ ID NO: 3461476 - DNA, 25 bp, Homo sapien
taatgtacagcaccccattttgggc

SEQ ID NO: 3461477 - DNA, 25 bp, Homo sapien
cttacaacagtggagggcaatgtcc

SEQ ID NO: 3461478 - DNA, 25 bp, Homo sapien
cattttgggccagcacttgtagtgt

SEQ ID NO: 3461479 - DNA, 25 bp, Homo sapien
gagcattaagaaatgtgtctggatg

SEQ ID NO: 3461480 - DNA, 25 bp, Homo sapien
tttcctggcgaagagcattaagaaa

SEQ ID NO: 3461481 - DNA, 25 bp, Homo sapien
gtctggatggaaaagttctgatagg

SEQ ID NO: 3461482 - DNA, 25 bp, Homo sapien
aagttctgataggtcaagtgtttca

SEQ ID NO: 3461483 - DNA, 25 bp, Homo sapien
cgacctttccatgaggctacaaatt

SEQ ID NO: 3461484 - DNA, 25 bp, Homo sapien
aggctatccacagaacgacccactg

SEQ ID NO: 3461485 - DNA, 25 bp, Homo sapien
tccatgaggctacaaatttaaggct

SEQ ID NO: 3461486 - DNA, 25 bp, Homo sapien
aaatttaaggctatccacagaacga

SEQ ID NO: 3461487 - DNA, 25 bp, Homo sapien
tgaaatgctcgggaacaaagtgttt

SEQ ID NO: 3461488 - DNA, 25 bp, Homo sapien
tggagtttgaaagaatgcaagttgc

SEQ ID NO: 3461489 - DNA, 25 bp, Homo sapien
tcctatacctgttcagggcacttac

SEQ ID NO: 3461490 - DNA, 25 bp, Homo sapien
gcctaggacactactatatattact

SEQ ID NO: 3461491 - DNA, 25 bp, Homo sapien
gaatccagcccataaaacaagggag

SEQ ID NO: 3461492 - DNA, 25 bp, Homo sapien
gagcactgatgacacgctgggagaa

SEQ ID NO: 3461493 - DNA, 25 bp, Homo sapien
ttccatcaaaactacatccttctag

SEQ ID NO: 3461494 - DNA, 25 bp, Homo sapien
catccttctagtaacaagccactga

SEQ ID NO: 3461495 - DNA, 25 bp, Homo sapien
actgtggggctgataaactctcagg

SEQ ID NO: 3461496 - DNA, 25 bp, Homo sapien
tactgtggggctgataaactctcag

SEQ ID NO: 3461497 - DNA, 25 bp, Homo sapien
tgtggggctgataaactctcaggag

SEQ ID NO: 3461498 - DNA, 25 bp, Homo sapien
ttactgtggggctgataaactctca

SEQ ID NO: 3461499 - DNA, 25 bp, Homo sapien
caatatagtgataacatcattactt

SEQ ID NO: 3461500 - DNA, 25 bp, Homo sapien
acaatatagtgataacatcattact

SEQ ID NO: 3461501 - DNA, 25 bp, Homo sapien
taacctaacagtgattcatggagag

SEQ ID NO: 3461502 - DNA, 25 bp, Homo sapien
ggtaaagcctagtgcaagcattcct

SEQ ID NO: 3461503 - DNA, 25 bp, Homo sapien
taattatctgtttgcactgatgagc

SEQ ID NO: 3461504 - DNA, 25 bp, Homo sapien
tcaattctgcttagatggcaaagct

SEQ ID NO: 3461505 - DNA, 25 bp, Homo sapien
tattggtaaccacacgatccctttc

SEQ ID NO: 3461506 - DNA, 25 bp, Homo sapien
tcagcacttgtgtaaacaggcaaag

SEQ ID NO: 3461507 - DNA, 25 bp, Homo sapien
tgaatccactggtcttggttgcccc

SEQ ID NO: 3461508 - DNA, 25 bp, Homo sapien
tcatccggagaatatggaccacatg

SEQ ID NO: 3461509 - DNA, 25 bp, Homo sapien
taaagcttaaagaatcaatgttccc

SEQ ID NO: 3461510 - DNA, 25 bp, Homo sapien
tttcaaatgtagactgaccacatgt

SEQ ID NO: 3461511 - DNA, 25 bp, Homo sapien
tcagtgacatcaacaacataactat

SEQ ID NO: 3461512 - DNA, 25 bp, Homo sapien
aagatgcacagtgctgcttttacac

SEQ ID NO: 3461513 - DNA, 25 bp, Homo sapien
tattattggttaatataccacttaa

SEQ ID NO: 3461514 - DNA, 25 bp, Homo sapien
tttttgagccactggaaaagtgaac

SEQ ID NO: 3461515 - DNA, 25 bp, Homo sapien
aatttttgagccactggaaaagtga

SEQ ID NO: 3461516 - DNA, 25 bp, Homo sapien
gaactttctcacagaaatatttaat

SEQ ID NO: 3461517 - DNA, 25 bp, Homo sapien
cttttattaaataattatgacacaa

SEQ ID NO: 3461518 - DNA, 25 bp, Homo sapien
tgctcttttattaaataattatgac

SEQ ID NO: 3461519 - DNA, 25 bp, Homo sapien
gctcttttattaaataattatgaca

SEQ ID NO: 3461520 - DNA, 25 bp, Homo sapien
tgaatgctcttttattaaataatta

SEQ ID NO: 3461521 - DNA, 25 bp, Homo sapien
gcatagtataattatattcatgttg

SEQ ID NO: 3461522 - DNA, 25 bp, Homo sapien
attcttcagtatgtaaaaagagtca

SEQ ID NO: 3461523 - DNA, 25 bp, Homo sapien
taaaaagagtcatgggaagactgca

SEQ ID NO: 3461524 - DNA, 25 bp, Homo sapien
gtcacctgaattattcctatttgaa

SEQ ID NO: 3461525 - DNA, 25 bp, Homo sapien
tttccgctctttgagtctctaatgg

SEQ ID NO: 3461526 - DNA, 25 bp, Homo sapien
ggtggctttccgctctttgagtctc

SEQ ID NO: 3461527 - DNA, 25 bp, Homo sapien
tgtgataaagtttatggagccatcc

SEQ ID NO: 3461528 - DNA, 25 bp, Homo sapien
gtttatggagccatccatcttctct

SEQ ID NO: 3461529 - DNA, 25 bp, Homo sapien
gctgattagggttttgtttgggata

SEQ ID NO: 3461530 - DNA, 25 bp, Homo sapien
tactcctcaccccacaattggatat

SEQ ID NO: 3461531 - DNA, 25 bp, Homo sapien
aaggtcactgatgatactcctcacc

SEQ ID NO: 3461532 - DNA, 25 bp, Homo sapien
caccccacaattggatatgctgatt

SEQ ID NO: 3461533 - DNA, 25 bp, Homo sapien
cagtatcagccaagatgccaaggcc

SEQ ID NO: 3461534 - DNA, 25 bp, Homo sapien
tgccaaggccaaatttagccctagt

SEQ ID NO: 3461535 - DNA, 25 bp, Homo sapien
gccctagtgccctgaagaattttct

SEQ ID NO: 3461536 - DNA, 25 bp, Homo sapien
aagtctcctgtgatcgcagtatcag

SEQ ID NO: 3461537 - DNA, 25 bp, Homo sapien
tgagtgggcatgatcgatgtcaccc

SEQ ID NO: 3461538 - DNA, 25 bp, Homo sapien
gatgtcacccctgatggacgactgc

SEQ ID NO: 3461539 - DNA, 25 bp, Homo sapien
aaagatgtagctttccccgctccag

SEQ ID NO: 3461540 - DNA, 25 bp, Homo sapien
gacgactgccctgagacctttaaga

SEQ ID NO: 3461541 - DNA, 25 bp, Homo sapien
tccctctccactggtttaatggccc

SEQ ID NO: 3461542 - DNA, 25 bp, Homo sapien
ctctcagattggctgatcctccctg

SEQ ID NO: 3461543 - DNA, 25 bp, Homo sapien
gtcccctgtcctcagtagacctggt

SEQ ID NO: 3461544 - DNA, 25 bp, Homo sapien
tctcagattggctgatcctccctgg

SEQ ID NO: 3461545 - DNA, 25 bp, Homo sapien
cagtagacctggttctgccatctgg

SEQ ID NO: 3461546 - DNA, 25 bp, Homo sapien
cccgatcagcatgaatcacacattc

SEQ ID NO: 3461547 - DNA, 25 bp, Homo sapien
cgatcagcatgaatcacacattcca

SEQ ID NO: 3461548 - DNA, 25 bp, Homo sapien
tacccgatcagcatgaatcacacat

SEQ ID NO: 3461549 - DNA, 25 bp, Homo sapien
gatcagcatgaatcacacattccaa

SEQ ID NO: 3461550 - DNA, 25 bp, Homo sapien
tggatgggctattggcaaaaagctg

SEQ ID NO: 3461551 - DNA, 25 bp, Homo sapien
cagcttttggctcttggagtcttct

SEQ ID NO: 3461552 - DNA, 25 bp, Homo sapien
aataccactagagcgcaatcatcag

SEQ ID NO: 3461553 - DNA, 25 bp, Homo sapien
tcttgccccgaggtcagatctcttg

SEQ ID NO: 3461554 - DNA, 25 bp, Homo sapien
gccaaataaagccaagagtttgtat

SEQ ID NO: 3461555 - DNA, 25 bp, Homo sapien
caaataaagccaagagtttgtatac

SEQ ID NO: 3461556 - DNA, 25 bp, Homo sapien
taaagccaagagtttgtatacatct

SEQ ID NO: 3461557 - DNA, 25 bp, Homo sapien
ataaagccaagagtttgtatacatc

SEQ ID NO: 3461558 - DNA, 25 bp, Homo sapien
tgtgctgtgaaagagtttgtcgttt

SEQ ID NO: 3461559 - DNA, 25 bp, Homo sapien
cttttacaaaatgtgggattcacac

SEQ ID NO: 3461560 - DNA, 25 bp, Homo sapien
ctgtgaaagagtttgtcgttttctc

SEQ ID NO: 3461561 - DNA, 25 bp, Homo sapien
aatgtgggattcacactgcatgttc

SEQ ID NO: 3461562 - DNA, 25 bp, Homo sapien
ctttcctggctgtaggcattactcc

SEQ ID NO: 3461563 - DNA, 25 bp, Homo sapien
aagaccagtaatccaggaacccaga

SEQ ID NO: 3461564 - DNA, 25 bp, Homo sapien
tttcctggctgtaggcattactccc

SEQ ID NO: 3461565 - DNA, 25 bp, Homo sapien
cattactcccaagaccagtaatcca

SEQ ID NO: 3461566 - DNA, 25 bp, Homo sapien
cttccttcctttggatgactagcag

SEQ ID NO: 3461567 - DNA, 25 bp, Homo sapien
ccttcctttggatgactagcagatg

SEQ ID NO: 3461568 - DNA, 25 bp, Homo sapien
ggatgactagcagatggctgaactg

SEQ ID NO: 3461569 - DNA, 25 bp, Homo sapien
cctttggatgactagcagatggctg

SEQ ID NO: 3461570 - DNA, 25 bp, Homo sapien
gagggactttttagtttgaccatca

SEQ ID NO: 3461571 - DNA, 25 bp, Homo sapien
actttttagtttgaccatcagtgtg

SEQ ID NO: 3461572 - DNA, 25 bp, Homo sapien
cagagggactttttagtttgaccat

SEQ ID NO: 3461573 - DNA, 25 bp, Homo sapien
ggactttttagtttgaccatcagtg

SEQ ID NO: 3461574 - DNA, 25 bp, Homo sapien
ctcaataatatcgtatttgtttttc

SEQ ID NO: 3461575 - DNA, 25 bp, Homo sapien
caataatatcgtatttgtttttcat

SEQ ID NO: 3461576 - DNA, 25 bp, Homo sapien
tctcaataatatcgtatttgttttt

SEQ ID NO: 3461577 - DNA, 25 bp, Homo sapien
tcaataatatcgtatttgtttttca

SEQ ID NO: 3461578 - DNA, 25 bp, Homo sapien
ctttgatcatgatatttttcaaagt

SEQ ID NO: 3461579 - DNA, 25 bp, Homo sapien
ttgatcatgatatttttcaaagttg

SEQ ID NO: 3461580 - DNA, 25 bp, Homo sapien
tcatgatatttttcaaagttgacta

SEQ ID NO: 3461581 - DNA, 25 bp, Homo sapien
gatcatgatatttttcaaagttgac

SEQ ID NO: 3461582 - DNA, 25 bp, Homo sapien
aacagtcgggtttctggtgttggca

SEQ ID NO: 3461583 - DNA, 25 bp, Homo sapien
tggagtgccttcgtaatgtttcatc

SEQ ID NO: 3461584 - DNA, 25 bp, Homo sapien
caatccttactttagtcctctgtga

SEQ ID NO: 3461585 - DNA, 25 bp, Homo sapien
caggtatttgtaagtcagggctgcc

SEQ ID NO: 3461586 - DNA, 25 bp, Homo sapien
taatctaagtgttctagttctgtga

SEQ ID NO: 3461587 - DNA, 25 bp, Homo sapien
tatgagattgagttaggcagacaga

SEQ ID NO: 3461588 - DNA, 25 bp, Homo sapien
tggattctgaaactgtgaattgtgc

SEQ ID NO: 3461589 - DNA, 25 bp, Homo sapien
cagacagaggactggtgaactgtat

SEQ ID NO: 3461590 - DNA, 25 bp, Homo sapien
gcagaatgccaaaaacatagacccc

SEQ ID NO: 3461591 - DNA, 25 bp, Homo sapien
attctgaggcagaatgccaaaaaca

SEQ ID NO: 3461592 - DNA, 25 bp, Homo sapien
tgccaaaaacatagaccccagacgc

SEQ ID NO: 3461593 - DNA, 25 bp, Homo sapien
ctggtatcaacatcaggacactcat

SEQ ID NO: 3461594 - DNA, 25 bp, Homo sapien
ttaggccacaagctggtccatgatc

SEQ ID NO: 3461595 - DNA, 25 bp, Homo sapien
aagctggtccatgatcacccttctt

SEQ ID NO: 3461596 - DNA, 25 bp, Homo sapien
ggccacaagctggtccatgatcacc

SEQ ID NO: 3461597 - DNA, 25 bp, Homo sapien
cacaagctggtccatgatcaccctt

SEQ ID NO: 3461598 - DNA, 25 bp, Homo sapien
tccttataatagtctgggaccacac

SEQ ID NO: 3461599 - DNA, 25 bp, Homo sapien
tgcagggagctaggggaacaaaccc

SEQ ID NO: 3461600 - DNA, 25 bp, Homo sapien
caaatttaagggcaagacactttgc

SEQ ID NO: 3461601 - DNA, 25 bp, Homo sapien
caggattctgaactgactagcatgt

SEQ ID NO: 3461602 - DNA, 25 bp, Homo sapien
ggcccacactgtagcacctgctcag

SEQ ID NO: 3461603 - DNA, 25 bp, Homo sapien
gctgcaaatggtgcatctggcccac

SEQ ID NO: 3461604 - DNA, 25 bp, Homo sapien
atctggcccacactgtagcacctgc

SEQ ID NO: 3461605 - DNA, 25 bp, Homo sapien
acactgtagcacctgctcagcatca

SEQ ID NO: 3461606 - DNA, 25 bp, Homo sapien
gcaagctgtggcagtctgggtctgg

SEQ ID NO: 3461607 - DNA, 25 bp, Homo sapien
caagctgtggcagtctgggtctgga

SEQ ID NO: 3461608 - DNA, 25 bp, Homo sapien
tgcaagctgtggcagtctgggtctg

SEQ ID NO: 3461609 - DNA, 25 bp, Homo sapien
ggcatacctgggaactcttgagaag

SEQ ID NO: 3461610 - DNA, 25 bp, Homo sapien
tcttgagaagggtggaccaactgtc

SEQ ID NO: 3461611 - DNA, 25 bp, Homo sapien
ggaattatctacatcaacactcctg

SEQ ID NO: 3461612 - DNA, 25 bp, Homo sapien
tcctatctggatagtcacactgggt

SEQ ID NO: 3461613 - DNA, 25 bp, Homo sapien
gagactttcacacggccattttggg

SEQ ID NO: 3461614 - DNA, 25 bp, Homo sapien
caaggtgtaagggtgcctcttctca

SEQ ID NO: 3461615 - DNA, 25 bp, Homo sapien
catggctccaggattcaaggtgtaa

SEQ ID NO: 3461616 - DNA, 25 bp, Homo sapien
cacagtggactcttcggagtgcctc

SEQ ID NO: 3461617 - DNA, 25 bp, Homo sapien
tatgtgcagcctttgagtgaacaag

SEQ ID NO: 3461618 - DNA, 25 bp, Homo sapien
tcaccactggtagaggtcagtagca

SEQ ID NO: 3461619 - DNA, 25 bp, Homo sapien
gagctttcagtccttcggccagttt

SEQ ID NO: 3461620 - DNA, 25 bp, Homo sapien
tgaactgtctgctgccaacttccag

SEQ ID NO: 3461621 - DNA, 25 bp, Homo sapien
gagcatatatgcttgtaggccctgc

SEQ ID NO: 3461622 - DNA, 25 bp, Homo sapien
tatgccccactagacttaaggagac

SEQ ID NO: 3461623 - DNA, 25 bp, Homo sapien
caggcaatgcataactgtgaggcca

SEQ ID NO: 3461624 - DNA, 25 bp, Homo sapien
cctgctggtgctgagagatccaact

SEQ ID NO: 3461625 - DNA, 25 bp, Homo sapien
gccaggatagtgactggctaacgtt

SEQ ID NO: 3461626 - DNA, 25 bp, Homo sapien
ttactctgtaatgtcacgaagccag

SEQ ID NO: 3461627 - DNA, 25 bp, Homo sapien
gactggctaacgtttccagcaacca

SEQ ID NO: 3461628 - DNA, 25 bp, Homo sapien
tgtaatgtcacgaagccaggatagt

SEQ ID NO: 3461629 - DNA, 25 bp, Homo sapien
tacaccaaacagattataaccacct

SEQ ID NO: 3461630 - DNA, 25 bp, Homo sapien
caaccgtgtagtattaatgttttca

SEQ ID NO: 3461631 - DNA, 25 bp, Homo sapien
ccttgttcagagcaacaaccgtgta

SEQ ID NO: 3461632 - DNA, 25 bp, Homo sapien
aatgttttcattcgaacagtggcca

SEQ ID NO: 3461633 - DNA, 25 bp, Homo sapien
ttattgactagaaccaggtgctgtc

SEQ ID NO: 3461634 - DNA, 25 bp, Homo sapien
agaaccaggtgctgtcagaactgtc

SEQ ID NO: 3461635 - DNA, 25 bp, Homo sapien
taacaatcttgatcaccaaatctgt

SEQ ID NO: 3461636 - DNA, 25 bp, Homo sapien
caggatgccgcagaatgttcataac

SEQ ID NO: 3461637 - DNA, 25 bp, Homo sapien
gcctgcgtcgttggtgccgctgctc

SEQ ID NO: 3461638 - DNA, 25 bp, Homo sapien
agagaggcgcggacactcatctgtc

SEQ ID NO: 3461639 - DNA, 25 bp, Homo sapien
ccaggtggagccttgaggtagcacg

SEQ ID NO: 3461640 - DNA, 25 bp, Homo sapien
tcctcaggacttggtaggtagggac

SEQ ID NO: 3461641 - DNA, 25 bp, Homo sapien
ataatggtcatctgggcgcccgagt

SEQ ID NO: 3461642 - DNA, 25 bp, Homo sapien
gaaaaggtctcaaggcttccgctga

SEQ ID NO: 3461643 - DNA, 25 bp, Homo sapien
gaatctgagctagatgaacacggcc

SEQ ID NO: 3461644 - DNA, 25 bp, Homo sapien
tgtctccggagcatatctaggccta

SEQ ID NO: 3461645 - DNA, 25 bp, Homo sapien
cttgtccgaagactcatcttgccca

SEQ ID NO: 3461646 - DNA, 25 bp, Homo sapien
ttaatgctcttttcgtcctgaatcc

SEQ ID NO: 3461647 - DNA, 25 bp, Homo sapien
cgtcctgaatccatgactgaatgtg

SEQ ID NO: 3461648 - DNA, 25 bp, Homo sapien
tcttttcgtcctgaatccatgactg

SEQ ID NO: 3461649 - DNA, 25 bp, Homo sapien
ggacctgaggctccctcaaggtggt

SEQ ID NO: 3461650 - DNA, 25 bp, Homo sapien
gattacattgccagtaagctcttaa

SEQ ID NO: 3461651 - DNA, 25 bp, Homo sapien
taacttataattgccggggacctga

SEQ ID NO: 3461652 - DNA, 25 bp, Homo sapien
caaggtggtaacatatttataacgt

SEQ ID NO: 3461653 - DNA, 25 bp, Homo sapien
tgccttgtaaggtctgcagccatag

SEQ ID NO: 3461654 - DNA, 25 bp, Homo sapien
tgacgttagttacccatctgagaac

SEQ ID NO: 3461655 - DNA, 25 bp, Homo sapien
gataagccacctgtaatctgatagg

SEQ ID NO: 3461656 - DNA, 25 bp, Homo sapien
tctgagaacgtagtcccaaggccag

SEQ ID NO: 3461657 - DNA, 25 bp, Homo sapien
caatgactattagagaacctggacc

SEQ ID NO: 3461658 - DNA, 25 bp, Homo sapien
ggatcttccattacccactgtcagt

SEQ ID NO: 3461659 - DNA, 25 bp, Homo sapien
tcaaacaatactgatgtagcagcag

SEQ ID NO: 3461660 - DNA, 25 bp, Homo sapien
cctgcatctgatggcctcaggaagc

SEQ ID NO: 3461661 - DNA, 25 bp, Homo sapien
tgtgcagctcttgctaaggtctggg

SEQ ID NO: 3461662 - DNA, 25 bp, Homo sapien
gcaaaatagcaactgccctgttgag

SEQ ID NO: 3461663 - DNA, 25 bp, Homo sapien
tcatgttagcactgcgcaaaatagc

SEQ ID NO: 3461664 - DNA, 25 bp, Homo sapien
taatgtccagaagtactataaggcc

SEQ ID NO: 3461665 - DNA, 25 bp, Homo sapien
gtggagtgcagctttgctggagaag

SEQ ID NO: 3461666 - DNA, 25 bp, Homo sapien
cagctttgctggagaaggaaaccct

SEQ ID NO: 3461667 - DNA, 25 bp, Homo sapien
tgcagctttgctggagaaggaaacc

SEQ ID NO: 3461668 - DNA, 25 bp, Homo sapien
ctttgctggagaaggaaaccctcat

SEQ ID NO: 3461669 - DNA, 25 bp, Homo sapien
tcttgaatagtcacaaaagttattt

SEQ ID NO: 3461670 - DNA, 25 bp, Homo sapien
ttactgacttgtctggactctttaa

SEQ ID NO: 3461671 - DNA, 25 bp, Homo sapien
tattcttcttgaatagtcacaaaag

SEQ ID NO: 3461672 - DNA, 25 bp, Homo sapien
ctgacttgtctggactctttaaatt

SEQ ID NO: 3461673 - DNA, 25 bp, Homo sapien
ctgcaaagataaaaaaggttgaagt

SEQ ID NO: 3461674 - DNA, 25 bp, Homo sapien
ttaaatctttatgcggctgttatgt

SEQ ID NO: 3461675 - DNA, 25 bp, Homo sapien
gtgcctaaatagctgccacacagtg

SEQ ID NO: 3461676 - DNA, 25 bp, Homo sapien
gcggctgttatgtgtcagtgcttcc

SEQ ID NO: 3461677 - DNA, 25 bp, Homo sapien
aaccactctccagggtgcctaaata

SEQ ID NO: 3461678 - DNA, 25 bp, Homo sapien
taaggatatgtaggcaaagtctctc

SEQ ID NO: 3461679 - DNA, 25 bp, Homo sapien
aaggaaaactctgggacagtgtctc

SEQ ID NO: 3461680 - DNA, 25 bp, Homo sapien
tggtggcagcaaatcttcaaggtac

SEQ ID NO: 3461681 - DNA, 25 bp, Homo sapien
caattgctagaccagaaatgccact

SEQ ID NO: 3461682 - DNA, 25 bp, Homo sapien
atatattttatcattagctctccac

SEQ ID NO: 3461683 - DNA, 25 bp, Homo sapien
tttccaaagctcttggagctggtgt

SEQ ID NO: 3461684 - DNA, 25 bp, Homo sapien
ctttccaaagctcttggagctggtg

SEQ ID NO: 3461685 - DNA, 25 bp, Homo sapien
tattttatcattagctctccaccca

SEQ ID NO: 3461686 - DNA, 25 bp, Homo sapien
tctccttccagactccaatccgatg

SEQ ID NO: 3461687 - DNA, 25 bp, Homo sapien
cttccagactccaatccgatgtcat

SEQ ID NO: 3461688 - DNA, 25 bp, Homo sapien
tttctccttccagactccaatccga

SEQ ID NO: 3461689 - DNA, 25 bp, Homo sapien
tccttccagactccaatccgatgtc

SEQ ID NO: 3461690 - DNA, 25 bp, Homo sapien
agcttgatctgggtattaagtgggc

SEQ ID NO: 3461691 - DNA, 25 bp, Homo sapien
caggtgcctgtcagcaaaagttgca

SEQ ID NO: 3461692 - DNA, 25 bp, Homo sapien
cattacatataagggtgtgtctggg

SEQ ID NO: 3461693 - DNA, 25 bp, Homo sapien
tctgctgcagagatagccttgtaag

SEQ ID NO: 3461694 - DNA, 25 bp, Homo sapien
catgcctcttcctatggactgtgaa

SEQ ID NO: 3461695 - DNA, 25 bp, Homo sapien
tcatcttgctgcaccctagaaaagg

SEQ ID NO: 3461696 - DNA, 25 bp, Homo sapien
tctacagccctgtgtgataggtggt

SEQ ID NO: 3461697 - DNA, 25 bp, Homo sapien
gctagtgcatataaaaacgctcgtg

SEQ ID NO: 3461698 - DNA, 25 bp, Homo sapien
gagacgggtttcagtgtgttagcca

SEQ ID NO: 3461699 - DNA, 25 bp, Homo sapien
tagagacgggtttcagtgtgttagc

SEQ ID NO: 3461700 - DNA, 25 bp, Homo sapien
attgtcagatgaaatgagtgtttca

SEQ ID NO: 3461701 - DNA, 25 bp, Homo sapien
tattgtcagatgaaatgagtgtttc

SEQ ID NO: 3461702 - DNA, 25 bp, Homo sapien
ttgtcagatgaaatgagtgtttcaa

SEQ ID NO: 3461703 - DNA, 25 bp, Homo sapien
gatattgtcagatgaaatgagtgtt

SEQ ID NO: 3461704 - DNA, 25 bp, Homo sapien
aggctcagctagaggtcaatgtgct

SEQ ID NO: 3461705 - DNA, 25 bp, Homo sapien
gctcagctagaggtcaatgtgctat

SEQ ID NO: 3461706 - DNA, 25 bp, Homo sapien
cagctagaggtcaatgtgctatcca

SEQ ID NO: 3461707 - DNA, 25 bp, Homo sapien
tcagctagaggtcaatgtgctatcc

SEQ ID NO: 3461708 - DNA, 25 bp, Homo sapien
tccgagatcaaacgagatcgggtgc

SEQ ID NO: 3461709 - DNA, 25 bp, Homo sapien
ttccgagatcaaacgagatcgggtg

SEQ ID NO: 3461710 - DNA, 25 bp, Homo sapien
ccgagatcaaacgagatcgggtgca

SEQ ID NO: 3461711 - DNA, 25 bp, Homo sapien
taaatcattgtgttaacatcataaa

SEQ ID NO: 3461712 - DNA, 25 bp, Homo sapien
aaaaggaatataattaactcatgat

SEQ ID NO: 3461713 - DNA, 25 bp, Homo sapien
tatctggttggaacataaattctac

SEQ ID NO: 3461714 - DNA, 25 bp, Homo sapien
actcatcatgactgttatgactata

SEQ ID NO: 3461715 - DNA, 25 bp, Homo sapien
gtttgcttgcttgttttcttagtgc

SEQ ID NO: 3461716 - DNA, 25 bp, Homo sapien
ctggattttctgcttgtttgcttgc

SEQ ID NO: 3461717 - DNA, 25 bp, Homo sapien
tgtttgcttgcttgttttcttagtg

SEQ ID NO: 3461718 - DNA, 25 bp, Homo sapien
gcttgtttgcttgcttgttttctta

SEQ ID NO: 3461719 - DNA, 25 bp, Homo sapien
gaagatataatatccagtcctgtca

SEQ ID NO: 3461720 - DNA, 25 bp, Homo sapien
tgaagatataatatccagtcctgtc

SEQ ID NO: 3461721 - DNA, 25 bp, Homo sapien
aagatataatatccagtcctgtcac

SEQ ID NO: 3461722 - DNA, 25 bp, Homo sapien
ccagtaatgtgaacgtagttagacc

SEQ ID NO: 3461723 - DNA, 25 bp, Homo sapien
tgtgaacgtagttagaccctggttc

SEQ ID NO: 3461724 - DNA, 25 bp, Homo sapien
gaaagagccagtaatgtgaacgtag

SEQ ID NO: 3461725 - DNA, 25 bp, Homo sapien
ctcaaggaaagagccagtaatgtga

SEQ ID NO: 3461726 - DNA, 25 bp, Homo sapien
gacggtcaaacgttgaagatccacc

SEQ ID NO: 3461727 - DNA, 25 bp, Homo sapien
taagcacctagtggatactcgacgg

SEQ ID NO: 3461728 - DNA, 25 bp, Homo sapien
catcggtatgcctttagtaagagac

SEQ ID NO: 3461729 - DNA, 25 bp, Homo sapien
cacatggtcagtaggaagcgatacc

SEQ ID NO: 3461730 - DNA, 25 bp, Homo sapien
acactctggggactgctgtggggtg

SEQ ID NO: 3461731 - DNA, 25 bp, Homo sapien
cacactctggggactgctgtggggt

SEQ ID NO: 3461732 - DNA, 25 bp, Homo sapien
taggcgccctctcttcagttgctta

SEQ ID NO: 3461733 - DNA, 25 bp, Homo sapien
gacccttccgtgttggatataccat

SEQ ID NO: 3461734 - DNA, 25 bp, Homo sapien
tcagactcattgacaatatccagtt

SEQ ID NO: 3461735 - DNA, 25 bp, Homo sapien
caaacacatcatgcccttctaggcg

SEQ ID NO: 3461736 - DNA, 25 bp, Homo sapien
gtcttgaggtagagggctgctctct

SEQ ID NO: 3461737 - DNA, 25 bp, Homo sapien
atggactgagttggtcaagaatatt

SEQ ID NO: 3461738 - DNA, 25 bp, Homo sapien
tgactagatgccaccagtcttgagg

SEQ ID NO: 3461739 - DNA, 25 bp, Homo sapien
ggacagacttgagagttatgtatgg

SEQ ID NO: 3461740 - DNA, 25 bp, Homo sapien
tgcatcttcacagcttgatgatttc

SEQ ID NO: 3461741 - DNA, 25 bp, Homo sapien
cttctttatgttggtaagtcctggt

SEQ ID NO: 3461742 - DNA, 25 bp, Homo sapien
tgttggtaagtcctggtactaatgg

SEQ ID NO: 3461743 - DNA, 25 bp, Homo sapien
cctggtactaatggaaatatacaga

SEQ ID NO: 3461744 - DNA, 25 bp, Homo sapien
taagtctagatctgaaagctactgg

SEQ ID NO: 3461745 - DNA, 25 bp, Homo sapien
caagaaaggaatacgtggaagaaca

SEQ ID NO: 3461746 - DNA, 25 bp, Homo sapien
tgatacttgcaatcacataagtggg

SEQ ID NO: 3461747 - DNA, 25 bp, Homo sapien
ctactggaatgaaggtgatacttgc

SEQ ID NO: 3461748 - DNA, 25 bp, Homo sapien
tattgcggttgacacacaatcagta

SEQ ID NO: 3461749 - DNA, 25 bp, Homo sapien
cagctattgcggttgacacacaatc

SEQ ID NO: 3461750 - DNA, 25 bp, Homo sapien
cacaatcagtataagcaatacctgg

SEQ ID NO: 3461751 - DNA, 25 bp, Homo sapien
tgcggttgacacacaatcagtataa

SEQ ID NO: 3461752 - DNA, 25 bp, Homo sapien
ttacgtctagctgcagaaatgtttt

SEQ ID NO: 3461753 - DNA, 25 bp, Homo sapien
ttggagatcgtgcttaagaccttta

SEQ ID NO: 3461754 - DNA, 25 bp, Homo sapien
tcctctctttgctgatgaattacgt

SEQ ID NO: 3461755 - DNA, 25 bp, Homo sapien
ttcagtaaatggttggagatcgtgc

SEQ ID NO: 3461756 - DNA, 25 bp, Homo sapien
tctaattagaagttagctgttaata

SEQ ID NO: 3461757 - DNA, 25 bp, Homo sapien
tatcgattctaattagaagttagct

SEQ ID NO: 3461758 - DNA, 25 bp, Homo sapien
cctgtcctctatcgattctaattag

SEQ ID NO: 3461759 - DNA, 25 bp, Homo sapien
tagctgttaatattattggcattcc

SEQ ID NO: 3461760 - DNA, 25 bp, Homo sapien
agtcatgaccttatgactcatgcag

SEQ ID NO: 3461761 - DNA, 25 bp, Homo sapien
cagccagacacagcgatatgataaa

SEQ ID NO: 3461762 - DNA, 25 bp, Homo sapien
ataaagatttggcttgttagggtga

SEQ ID NO: 3461763 - DNA, 25 bp, Homo sapien
tagggtgatataattgtgacatctc

SEQ ID NO: 3461764 - DNA, 25 bp, Homo sapien
ctcaaactctcctggcggtaagtct

SEQ ID NO: 3461765 - DNA, 25 bp, Homo sapien
ctcctggcggtaagtctgccgcctt

SEQ ID NO: 3461766 - DNA, 25 bp, Homo sapien
actctcctggcggtaagtctgccgc

SEQ ID NO: 3461767 - DNA, 25 bp, Homo sapien
ttgcattccactgtacttgatttac

SEQ ID NO: 3461768 - DNA, 25 bp, Homo sapien
tgctgctcttgtacatccgttgaga

SEQ ID NO: 3461769 - DNA, 25 bp, Homo sapien
gaatgtaaaggttgctgcttgctgc

SEQ ID NO: 3461770 - DNA, 25 bp, Homo sapien
cgttgagaggcactattcaaagggc

SEQ ID NO: 3461771 - DNA, 25 bp, Homo sapien
tcttgtacatccgttgagaggcact

SEQ ID NO: 3461772 - DNA, 25 bp, Homo sapien
tcctctgagatagcagaattggggt

SEQ ID NO: 3461773 - DNA, 25 bp, Homo sapien
cacagttgtgtgaaactggcttgtc

SEQ ID NO: 3461774 - DNA, 25 bp, Homo sapien
tggggttatttagactgttctgacc

SEQ ID NO: 3461775 - DNA, 25 bp, Homo sapien
agtatgtcctctgcccaaatccctg

SEQ ID NO: 3461776 - DNA, 25 bp, Homo sapien
tttcaaatgctaagagaaatgcatc

SEQ ID NO: 3461777 - DNA, 25 bp, Homo sapien
aagtcgggatctggtttctctgagc

SEQ ID NO: 3461778 - DNA, 25 bp, Homo sapien
tctctgagctacgaatattacttgt

SEQ ID NO: 3461779 - DNA, 25 bp, Homo sapien
taaatagagtaaaagtcgggatctg

SEQ ID NO: 3461780 - DNA, 25 bp, Homo sapien
ggtttctctgagctacgaatattac

SEQ ID NO: 3461781 - DNA, 25 bp, Homo sapien
agtgaccacggtttcccatctctgt

SEQ ID NO: 3461782 - DNA, 25 bp, Homo sapien
taaagctagacctcacatgtactgg

SEQ ID NO: 3461783 - DNA, 25 bp, Homo sapien
ctttatctcaggtccagccatgtgg

SEQ ID NO: 3461784 - DNA, 25 bp, Homo sapien
aatccctgaggtagtcttcagctca

SEQ ID NO: 3461785 - DNA, 25 bp, Homo sapien
tcctcggtgccaacttgagaaaaac

SEQ ID NO: 3461786 - DNA, 25 bp, Homo sapien
aaactctcttgaagttgaccatggc

SEQ ID NO: 3461787 - DNA, 25 bp, Homo sapien
ctcttgaagttgaccatggcttttc

SEQ ID NO: 3461788 - DNA, 25 bp, Homo sapien
ctgatttctttcctcggtgccaact

SEQ ID NO: 3461789 - DNA, 25 bp, Homo sapien
atacagcaagtcctagagcaatggc

SEQ ID NO: 3461790 - DNA, 25 bp, Homo sapien
tctatatcttgccagaattaattga

SEQ ID NO: 3461791 - DNA, 25 bp, Homo sapien
tatatcttgccagaattaattgagt

SEQ ID NO: 3461792 - DNA, 25 bp, Homo sapien
ttgtatacagcaagtcctagagcaa

SEQ ID NO: 3461793 - DNA, 25 bp, Homo sapien
cacttccacttacaggtggctctgt

SEQ ID NO: 3461794 - DNA, 25 bp, Homo sapien
caattcttgctaaagtgggtcactt

SEQ ID NO: 3461795 - DNA, 25 bp, Homo sapien
tctgatctgaaagcaaccagtaaca

SEQ ID NO: 3461796 - DNA, 25 bp, Homo sapien
aagcaaccagtaacaaacaattctt

SEQ ID NO: 3461797 - DNA, 25 bp, Homo sapien
aataagagtatcattgagtttgacc

SEQ ID NO: 3461798 - DNA, 25 bp, Homo sapien
cctgagaataagagtatcattgagt

SEQ ID NO: 3461799 - DNA, 25 bp, Homo sapien
aacctgagaataagagtatcattga

SEQ ID NO: 3461800 - DNA, 25 bp, Homo sapien
gtatcattgagtttgaccctgatgc

SEQ ID NO: 3461801 - DNA, 25 bp, Homo sapien
tgactggtgagaatttcttgttaac

SEQ ID NO: 3461802 - DNA, 25 bp, Homo sapien
aaaaattgactggtgagaatttctt

SEQ ID NO: 3461803 - DNA, 25 bp, Homo sapien
ataaaaattgactggtgagaatttc

SEQ ID NO: 3461804 - DNA, 25 bp, Homo sapien
ttgactggtgagaatttcttgttaa

SEQ ID NO: 3461805 - DNA, 25 bp, Homo sapien
ttaatcagagttacaagaaagcggt

SEQ ID NO: 3461806 - DNA, 25 bp, Homo sapien
tacacacccaatttgagaaaagcat

SEQ ID NO: 3461807 - DNA, 25 bp, Homo sapien
gaaaagcattggtaaatctgttggg

SEQ ID NO: 3461808 - DNA, 25 bp, Homo sapien
aataacaaataacaggcctggtaca

SEQ ID NO: 3461809 - DNA, 25 bp, Homo sapien
ttaggtatgagatcccttttgagtt

SEQ ID NO: 3461810 - DNA, 25 bp, Homo sapien
tctctccattacattgcctttgatc

SEQ ID NO: 3461811 - DNA, 25 bp, Homo sapien
gattatatttgtgcagatctatttc

SEQ ID NO: 3461812 - DNA, 25 bp, Homo sapien
tgccaatgttacactgtttaattac

SEQ ID NO: 3461813 - DNA, 25 bp, Homo sapien
tctctctgatctcgtcacactcaat

SEQ ID NO: 3461814 - DNA, 25 bp, Homo sapien
tctttctctctgatctcgtcacact

SEQ ID NO: 3461815 - DNA, 25 bp, Homo sapien
tagagtctgtcatagtcaagccatg

SEQ ID NO: 3461816 - DNA, 25 bp, Homo sapien
tctcgtcacactcaatccccttcat

SEQ ID NO: 3461817 - DNA, 25 bp, Homo sapien
ctgaagctcccagatcttgaaagta

SEQ ID NO: 3461818 - DNA, 25 bp, Homo sapien
tgaagctcccagatcttgaaagtat

SEQ ID NO: 3461819 - DNA, 25 bp, Homo sapien
aggattggacaggaagttatcaacg

SEQ ID NO: 3461820 - DNA, 25 bp, Homo sapien
ctatggcctcgcttgatgatgatgc

SEQ ID NO: 3461821 - DNA, 25 bp, Homo sapien
tggcctcgcttgatgatgatgccat

SEQ ID NO: 3461822 - DNA, 25 bp, Homo sapien
ggaagttatcaacggcaaagccaag

SEQ ID NO: 3461823 - DNA, 25 bp, Homo sapien
aagtagctatgtttggacctggacc

SEQ ID NO: 3461824 - DNA, 25 bp, Homo sapien
aaacaataccatcacgaaattcttg

SEQ ID NO: 3461825 - DNA, 25 bp, Homo sapien
acggtttgaaagtagctatgtttgg

SEQ ID NO: 3461826 - DNA, 25 bp, Homo sapien
tggacctggaccattctccagctct

SEQ ID NO: 3461827 - DNA, 25 bp, Homo sapien
ctgtttcaatggtctatgtgaagct

SEQ ID NO: 3461828 - DNA, 25 bp, Homo sapien
cattcagaatttgatcagagaagca

SEQ ID NO: 3461829 - DNA, 25 bp, Homo sapien
tgcttctttgtctatgactggaacc

SEQ ID NO: 3461830 - DNA, 25 bp, Homo sapien
tttcaatggtctatgtgaagctgat

SEQ ID NO: 3461831 - DNA, 25 bp, Homo sapien
aaatgacagattccctagattctta

SEQ ID NO: 3461832 - DNA, 25 bp, Homo sapien
taaatatatatgtccgttttcacgc

SEQ ID NO: 3461833 - DNA, 25 bp, Homo sapien
tcaggatatacctagacattttgta

SEQ ID NO: 3461834 - DNA, 25 bp, Homo sapien
gacttacagttctagttctacatgg

SEQ ID NO: 3461835 - DNA, 25 bp, Homo sapien
catattgactggaacctgtaatccg

SEQ ID NO: 3461836 - DNA, 25 bp, Homo sapien
attgactggaacctgtaatccgagc

SEQ ID NO: 3461837 - DNA, 25 bp, Homo sapien
tccgagctacctgagagctgagatg

SEQ ID NO: 3461838 - DNA, 25 bp, Homo sapien
ccgagctacctgagagctgagatgg

SEQ ID NO: 3461839 - DNA, 25 bp, Homo sapien
tccataaagacatgtgagagggaac

SEQ ID NO: 3461840 - DNA, 25 bp, Homo sapien
aaatgaggcctacatgacgtaatcc

SEQ ID NO: 3461841 - DNA, 25 bp, Homo sapien
gcaattcaacaaacctggcacgtag

SEQ ID NO: 3461842 - DNA, 25 bp, Homo sapien
acatgcaaacttcgtgatggcaggg

SEQ ID NO: 3461843 - DNA, 25 bp, Homo sapien
tgcttaccaactgcaacttttgatc

SEQ ID NO: 3461844 - DNA, 25 bp, Homo sapien
cacaatctcttgcaatgcttaccaa

SEQ ID NO: 3461845 - DNA, 25 bp, Homo sapien
gagttttgtagtagaaagccaatcc

SEQ ID NO: 3461846 - DNA, 25 bp, Homo sapien
ttttttgttgcttactcactgtgtg

SEQ ID NO: 3461847 - DNA, 25 bp, Homo sapien
gtgccattgcatgccctgctagaac

SEQ ID NO: 3461848 - DNA, 25 bp, Homo sapien
catagtgtttttatggattccagga

SEQ ID NO: 3461849 - DNA, 25 bp, Homo sapien
gggctgattaggtctaatctcaggg

SEQ ID NO: 3461850 - DNA, 25 bp, Homo sapien
taggtaattatcttaaggagcgtac

SEQ ID NO: 3461851 - DNA, 25 bp, Homo sapien
tgtttatgaaagcaatgtttagtgc

SEQ ID NO: 3461852 - DNA, 25 bp, Homo sapien
tggtgtggaacttgtgatcaaataa

SEQ ID NO: 3461853 - DNA, 25 bp, Homo sapien
caatgtctaatgcttactatcatgt

SEQ ID NO: 3461854 - DNA, 25 bp, Homo sapien
cccatatagatatgtactgagaaga

SEQ ID NO: 3461855 - DNA, 25 bp, Homo sapien
gaactgtctccaatcaaagcgtaag

SEQ ID NO: 3461856 - DNA, 25 bp, Homo sapien
tactgtagacttctagcatagcttg

SEQ ID NO: 3461857 - DNA, 25 bp, Homo sapien
taagaggattccttcagaactgtct

SEQ ID NO: 3461858 - DNA, 25 bp, Homo sapien
tacaacctgagactacatctgtgat

SEQ ID NO: 3461859 - DNA, 25 bp, Homo sapien
tgttcactaagagtgggcactgttc

SEQ ID NO: 3461860 - DNA, 25 bp, Homo sapien
tcttagagctgttctcaacggagaa

SEQ ID NO: 3461861 - DNA, 25 bp, Homo sapien
gctcagaacacaaggttagagtggg

SEQ ID NO: 3461862 - DNA, 25 bp, Homo sapien
taggatcccaggtttatagaaacag

SEQ ID NO: 3461863 - DNA, 25 bp, Homo sapien
tcttcctgtgagattgccaaatgag

SEQ ID NO: 3461864 - DNA, 25 bp, Homo sapien
atgcatacccaggaaacaatgacaa

SEQ ID NO: 3461865 - DNA, 25 bp, Homo sapien
gaaacatacttgctggtgcttcaat

SEQ ID NO: 3461866 - DNA, 25 bp, Homo sapien
tagctctttggtaaagcctgtcccc

SEQ ID NO: 3461867 - DNA, 25 bp, Homo sapien
ctgttccaagatcctttgggggctc

SEQ ID NO: 3461868 - DNA, 25 bp, Homo sapien
tgttccaagatcctttgggggctca

SEQ ID NO: 3461869 - DNA, 25 bp, Homo sapien
gttccaagatcctttgggggctcat

SEQ ID NO: 3461870 - DNA, 25 bp, Homo sapien
agctttgcctcttgaccaggacgct

SEQ ID NO: 3461871 - DNA, 25 bp, Homo sapien
gcctcttgaccaggacgctctgcat

SEQ ID NO: 3461872 - DNA, 25 bp, Homo sapien
tggcggaagcttgtctgaccagctt

SEQ ID NO: 3461873 - DNA, 25 bp, Homo sapien
gcttgtctgaccagctttgcctctt

SEQ ID NO: 3461874 - DNA, 25 bp, Homo sapien
ctggatttttagaacgctggagtca

SEQ ID NO: 3461875 - DNA, 25 bp, Homo sapien
tttttagaacgctggagtcattgct

SEQ ID NO: 3461876 - DNA, 25 bp, Homo sapien
ggatttttagaacgctggagtcatt

SEQ ID NO: 3461877 - DNA, 25 bp, Homo sapien
cttctggatttttagaacgctggag

SEQ ID NO: 3461878 - DNA, 25 bp, Homo sapien
gattcattactatagcacttgggag

SEQ ID NO: 3461879 - DNA, 25 bp, Homo sapien
taacagtaagaattggtccagatgg

SEQ ID NO: 3461880 - DNA, 25 bp, Homo sapien
gtaatccccacatattgaaagaggg

SEQ ID NO: 3461881 - DNA, 25 bp, Homo sapien
agactctctgctaggaacatattcc

SEQ ID NO: 3461882 - DNA, 25 bp, Homo sapien
cctttcatcatgtgctcttgtctgt

SEQ ID NO: 3461883 - DNA, 25 bp, Homo sapien
cactacacctttcatcatgtgctct

SEQ ID NO: 3461884 - DNA, 25 bp, Homo sapien
tcatcatgtgctcttgtctgttcat

SEQ ID NO: 3461885 - DNA, 25 bp, Homo sapien
tgcacacactacacctttcatcatg

SEQ ID NO: 3461886 - DNA, 25 bp, Homo sapien
cactgaagagttgacttttctggat

SEQ ID NO: 3461887 - DNA, 25 bp, Homo sapien
agatgacttttgacagacatcccac

SEQ ID NO: 3461888 - DNA, 25 bp, Homo sapien
cttttgacagacatcccacacctgg

SEQ ID NO: 3461889 - DNA, 25 bp, Homo sapien
gctatgtaacacaaaaatagcagca

SEQ ID NO: 3461890 - DNA, 25 bp, Homo sapien
aattagggccaccaagagcagtagc

SEQ ID NO: 3461891 - DNA, 25 bp, Homo sapien
ctataagttcctgggagaaacctgg

SEQ ID NO: 3461892 - DNA, 25 bp, Homo sapien
aacctggagtctaggtgggttgatc

SEQ ID NO: 3461893 - DNA, 25 bp, Homo sapien
ccaagagcagtagcagggcactggc

SEQ ID NO: 3461894 - DNA, 25 bp, Homo sapien
ttttccagataaccactgtagataa

SEQ ID NO: 3461895 - DNA, 25 bp, Homo sapien
ctacttgcctttgagacttaggttc

SEQ ID NO: 3461896 - DNA, 25 bp, Homo sapien
taggttctccagtgcaccgaagttc

SEQ ID NO: 3461897 - DNA, 25 bp, Homo sapien
acttaggttctccagtgcaccgaag

SEQ ID NO: 3461898 - DNA, 25 bp, Homo sapien
tcatttgccgatatcttgtattgtc

SEQ ID NO: 3461899 - DNA, 25 bp, Homo sapien
taccttgacaaacactgtaactgtt

SEQ ID NO: 3461900 - DNA, 25 bp, Homo sapien
tcaggctatttgatatttactatca

SEQ ID NO: 3461901 - DNA, 25 bp, Homo sapien
cagtaccttgacaaacactgtaact

SEQ ID NO: 3461902 - DNA, 25 bp, Homo sapien
attgattatatcagtaccttgacaa

SEQ ID NO: 3461903 - DNA, 25 bp, Homo sapien
ttctccctgaatctagcctgagtca

SEQ ID NO: 3461904 - DNA, 25 bp, Homo sapien
tctccctgaatctagcctgagtcac

SEQ ID NO: 3461905 - DNA, 25 bp, Homo sapien
gttctccctgaatctagcctgagtc

SEQ ID NO: 3461906 - DNA, 25 bp, Homo sapien
tgctttttcttcagggtgaatactt

SEQ ID NO: 3461907 - DNA, 25 bp, Homo sapien
tttcttcagggtgaatactttgaat

SEQ ID NO: 3461908 - DNA, 25 bp, Homo sapien
ctttgtagcttgcatcatagtttgc

SEQ ID NO: 3461909 - DNA, 25 bp, Homo sapien
ttcagggtgaatactttgaatagta

SEQ ID NO: 3461910 - DNA, 25 bp, Homo sapien
tgtaggactggatatcggtggtaag

SEQ ID NO: 3461911 - DNA, 25 bp, Homo sapien
ctgtgataagtcacaagttctgtag

SEQ ID NO: 3461912 - DNA, 25 bp, Homo sapien
tcactgtgataagtcacaagttctg

SEQ ID NO: 3461913 - DNA, 25 bp, Homo sapien
ctggatatcggtggtaagagagtta

SEQ ID NO: 3461914 - DNA, 25 bp, Homo sapien
tttcatgacataagcataatacagt

SEQ ID NO: 3461915 - DNA, 25 bp, Homo sapien
ttcatgacataagcataatacagtt

SEQ ID NO: 3461916 - DNA, 25 bp, Homo sapien
tcatgacataagcataatacagttc

SEQ ID NO: 3461917 - DNA, 25 bp, Homo sapien
catgtagtttcatcagcaatcttca

SEQ ID NO: 3461918 - DNA, 25 bp, Homo sapien
tcatgtagtttcatcagcaatcttc

SEQ ID NO: 3461919 - DNA, 25 bp, Homo sapien
tagtttcatcagcaatcttcatctt

SEQ ID NO: 3461920 - DNA, 25 bp, Homo sapien
tgtagtttcatcagcaatcttcatc

SEQ ID NO: 3461921 - DNA, 25 bp, Homo sapien
aggcactagaatctgggactgaaac

SEQ ID NO: 3461922 - DNA, 25 bp, Homo sapien
acagctgtacaaaggttgtcttgaa

SEQ ID NO: 3461923 - DNA, 25 bp, Homo sapien
aacagctgtacaaaggttgtcttga

SEQ ID NO: 3461924 - DNA, 25 bp, Homo sapien
aaaactaaaggcactagaatctggg

SEQ ID NO: 3461925 - DNA, 25 bp, Homo sapien
aggaagtgggattgatatttgaagc

SEQ ID NO: 3461926 - DNA, 25 bp, Homo sapien
tgatttatttgcagaccgagactca

SEQ ID NO: 3461927 - DNA, 25 bp, Homo sapien
gactcaggaagtgggattgatattt

SEQ ID NO: 3461928 - DNA, 25 bp, Homo sapien
tttgcagaccgagactcaggaagtg

SEQ ID NO: 3461929 - DNA, 25 bp, Homo sapien
atgtcctcctcctgacattctatag

SEQ ID NO: 3461930 - DNA, 25 bp, Homo sapien
gtcctcctcctgacattctatagcc

SEQ ID NO: 3461931 - DNA, 25 bp, Homo sapien
tgtcctcctcctgacattctatagc

SEQ ID NO: 3461932 - DNA, 25 bp, Homo sapien
gcgtccgctgtctccagcatgctgt

SEQ ID NO: 3461933 - DNA, 25 bp, Homo sapien
acttattttcccatagctgggaaat

SEQ ID NO: 3461934 - DNA, 25 bp, Homo sapien
atctagactgcagccattgttccca

SEQ ID NO: 3461935 - DNA, 25 bp, Homo sapien
tctggcttatatttagcgtccgctg

SEQ ID NO: 3461936 - DNA, 25 bp, Homo sapien
agcctgtttatttcattcgtgcata

SEQ ID NO: 3461937 - DNA, 25 bp, Homo sapien
ctgagtagccatctgaaaatatggc

SEQ ID NO: 3461938 - DNA, 25 bp, Homo sapien
ttcattcgtgcatattttctctaca

SEQ ID NO: 3461939 - DNA, 25 bp, Homo sapien
ctctcctccatgtaagacaacttta

SEQ ID NO: 3461940 - DNA, 25 bp, Homo sapien
cggtggaaatccttatgaataccca

SEQ ID NO: 3461941 - DNA, 25 bp, Homo sapien
cttgatgtcagcgatgtctaaacta

SEQ ID NO: 3461942 - DNA, 25 bp, Homo sapien
taaattcattaaatcggtggaaatc

SEQ ID NO: 3461943 - DNA, 25 bp, Homo sapien
tagattagcgtagctgttttgtttg

SEQ ID NO: 3461944 - DNA, 25 bp, Homo sapien
cacatcaattgcaaagggacagagt

SEQ ID NO: 3461945 - DNA, 25 bp, Homo sapien
agcacatcaattgcaaagggacaga

SEQ ID NO: 3461946 - DNA, 25 bp, Homo sapien
aaagcacatcaattgcaaagggaca

SEQ ID NO: 3461947 - DNA, 25 bp, Homo sapien
catcaattgcaaagggacagagtat

SEQ ID NO: 3461948 - DNA, 25 bp, Homo sapien
ctgacgaagtttagggtactgaacg

SEQ ID NO: 3461949 - DNA, 25 bp, Homo sapien
cttggaaaggcatgaagcagggata

SEQ ID NO: 3461950 - DNA, 25 bp, Homo sapien
gagaagttgaaacatcctgggaagg

SEQ ID NO: 3461951 - DNA, 25 bp, Homo sapien
cagggataggaataagaactgcgtg

SEQ ID NO: 3461952 - DNA, 25 bp, Homo sapien
ccaggcccctgccgcatccttgcag

SEQ ID NO: 3461953 - DNA, 25 bp, Homo sapien
tgcaggttcgtgaggaggacgggct

SEQ ID NO: 3461954 - DNA, 25 bp, Homo sapien
ccgcatccttgcaggttcgtgagga

SEQ ID NO: 3461955 - DNA, 25 bp, Homo sapien
atccttgcaggttcgtgaggaggac

SEQ ID NO: 3461956 - DNA, 25 bp, Homo sapien
ctgcaagccccaatcgggggctccg

SEQ ID NO: 3461957 - DNA, 25 bp, Homo sapien
aggcagaaaatccgcccacgggcca

SEQ ID NO: 3461958 - DNA, 25 bp, Homo sapien
taggcagaaaatccgcccacgggcc

SEQ ID NO: 3461959 - DNA, 25 bp, Homo sapien
ctaggcagaaaatccgcccacgggc

SEQ ID NO: 3461960 - DNA, 25 bp, Homo sapien
tcggttcgcagagggaccgactctg

SEQ ID NO: 3461961 - DNA, 25 bp, Homo sapien
ccggacgctccggagccagtctggt

SEQ ID NO: 3461962 - DNA, 25 bp, Homo sapien
ttttcttcctcggttcgcagaggga

SEQ ID NO: 3461963 - DNA, 25 bp, Homo sapien
gtctggtgtcaggttttcccttctg

SEQ ID NO: 3461964 - DNA, 25 bp, Homo sapien
tttcggtggtttaagattatgacta

SEQ ID NO: 3461965 - DNA, 25 bp, Homo sapien
gagccgccagatttttcccgcagtc

SEQ ID NO: 3461966 - DNA, 25 bp, Homo sapien
tagttctccttagcaatccatcgcg

SEQ ID NO: 3461967 - DNA, 25 bp, Homo sapien
tctgtccggctgcaaatgttgcaca

SEQ ID NO: 3461968 - DNA, 25 bp, Homo sapien
tgttcagagaagcattgaagacgat

SEQ ID NO: 3461969 - DNA, 25 bp, Homo sapien
ttcagagaagcattgaagacgatgg

SEQ ID NO: 3461970 - DNA, 25 bp, Homo sapien
ctgttcagagaagcattgaagacga

SEQ ID NO: 3461971 - DNA, 25 bp, Homo sapien
cagagaagcattgaagacgatggcg

SEQ ID NO: 3461972 - DNA, 25 bp, Homo sapien
tctcctctccctggcgcgcgctctc

SEQ ID NO: 3461973 - DNA, 25 bp, Homo sapien
ctctttctctcgcactcttcctaaa

SEQ ID NO: 3461974 - DNA, 25 bp, Homo sapien
ttctcctctccctggcgcgcgctct

SEQ ID NO: 3461975 - DNA, 25 bp, Homo sapien
aacaagacaatctgtctggaaataa

SEQ ID NO: 3461976 - DNA, 25 bp, Homo sapien
gacaatctgtctggaaataatcctc

SEQ ID NO: 3461977 - DNA, 25 bp, Homo sapien
gcgagtccccaaaatccagaaaata

SEQ ID NO: 3461978 - DNA, 25 bp, Homo sapien
caatctgtctggaaataatcctcat

SEQ ID NO: 3461979 - DNA, 25 bp, Homo sapien
ctatttgcacgctgctcggaaaggc

SEQ ID NO: 3461980 - DNA, 25 bp, Homo sapien
gcacgctgctcggaaaggctcccat

SEQ ID NO: 3461981 - DNA, 25 bp, Homo sapien
atttgcacgctgctcggaaaggctc

SEQ ID NO: 3461982 - DNA, 25 bp, Homo sapien
ttgcacgctgctcggaaaggctccc

SEQ ID NO: 3461983 - DNA, 25 bp, Homo sapien
tctgtgtttcggatgaagagaccac

SEQ ID NO: 3461984 - DNA, 25 bp, Homo sapien
tccacatgaggtaccaaattaaaag

SEQ ID NO: 3461985 - DNA, 25 bp, Homo sapien
gaaaagcagtgtattcctgatctgt

SEQ ID NO: 3461986 - DNA, 25 bp, Homo sapien
taaaaggagcttccgacgcattggg

SEQ ID NO: 3461987 - DNA, 25 bp, Homo sapien
agaggaagaggactccattgcttgg

SEQ ID NO: 3461988 - DNA, 25 bp, Homo sapien
aagaggaagaggactccattgcttg

SEQ ID NO: 3461989 - DNA, 25 bp, Homo sapien
gcaagacctatgcttactcaagtga

SEQ ID NO: 3461990 - DNA, 25 bp, Homo sapien
tttacaccccagaatataagggcag

SEQ ID NO: 3461991 - DNA, 25 bp, Homo sapien
cctaatgtgatttggcatcgaggta

SEQ ID NO: 3461992 - DNA, 25 bp, Homo sapien
tcttacggcattaggtgaggtcacc

SEQ ID NO: 3461993 - DNA, 25 bp, Homo sapien
caaaagtgacatatgcttcaagctc

SEQ ID NO: 3461994 - DNA, 25 bp, Homo sapien
tgaaacagatgtcctccagacaaat

SEQ ID NO: 3461995 - DNA, 25 bp, Homo sapien
ctagttacagttatcccaaatgagg

SEQ ID NO: 3461996 - DNA, 25 bp, Homo sapien
tatagtttacattactggaagtcac

SEQ ID NO: 3461997 - DNA, 25 bp, Homo sapien
ttagagtatagcagaatctcatgcg

SEQ ID NO: 3461998 - DNA, 25 bp, Homo sapien
tgcgtctttcaaagactaagcagat

SEQ ID NO: 3461999 - DNA, 25 bp, Homo sapien
acaccttacactttttcctgtaatg

SEQ ID NO: 3462000 - DNA, 25 bp, Homo sapien
taagcagattgtcacataatttctg

SEQ ID NO: 3462001 - DNA, 25 bp, Homo sapien
tgagtaacatcaccaaagggccctt

SEQ ID NO: 3462002 - DNA, 25 bp, Homo sapien
gaccaaaactagtagtgacacagga

SEQ ID NO: 3462003 - DNA, 25 bp, Homo sapien
gctttgggcctagtaacacagtgtg

SEQ ID NO: 3462004 - DNA, 25 bp, Homo sapien
gccctggcaaactgatacagagcag

SEQ ID NO: 3462005 - DNA, 25 bp, Homo sapien
caacttaggagcaagggtcacctct

SEQ ID NO: 3462006 - DNA, 25 bp, Homo sapien
taacatgtgttctcagcttgcctac

SEQ ID NO: 3462007 - DNA, 25 bp, Homo sapien
gcaacagcacagcaagtcttgcaag

SEQ ID NO: 3462008 - DNA, 25 bp, Homo sapien
catgttgtgggataaattgtgtgcc

SEQ ID NO: 3462009 - DNA, 25 bp, Homo sapien
tactcagacctgtcacatccctgtg

SEQ ID NO: 3462010 - DNA, 25 bp, Homo sapien
taggtactcagacctgtcacatccc

SEQ ID NO: 3462011 - DNA, 25 bp, Homo sapien
gtactcagacctgtcacatccctgt

SEQ ID NO: 3462012 - DNA, 25 bp, Homo sapien
ggtactcagacctgtcacatccctg

SEQ ID NO: 3462013 - DNA, 25 bp, Homo sapien
tggcattgtagcttcttgtgacagc

SEQ ID NO: 3462014 - DNA, 25 bp, Homo sapien
gacagccatgctctgccaataagaa

SEQ ID NO: 3462015 - DNA, 25 bp, Homo sapien
tcataagtaagtacttggcattgta

SEQ ID NO: 3462016 - DNA, 25 bp, Homo sapien
catgctctgccaataagaacaagtt

SEQ ID NO: 3462017 - DNA, 25 bp, Homo sapien
ccacctcttctatacagtgctttga

SEQ ID NO: 3462018 - DNA, 25 bp, Homo sapien
aagccatggtaggtagaatggtccc

SEQ ID NO: 3462019 - DNA, 25 bp, Homo sapien
gaaactcatttgatctattatcaaa

SEQ ID NO: 3462020 - DNA, 25 bp, Homo sapien
catttgatctattatcaaagtcaaa

SEQ ID NO: 3462021 - DNA, 25 bp, Homo sapien
gtatcaatagtgcatttcttgactg

SEQ ID NO: 3462022 - DNA, 25 bp, Homo sapien
gtcagagagattgtgcaaacgtact

SEQ ID NO: 3462023 - DNA, 25 bp, Homo sapien
tctttaattgaccagagggcaaaac

SEQ ID NO: 3462024 - DNA, 25 bp, Homo sapien
catcaggaatgtttcctagttcagg

SEQ ID NO: 3462025 - DNA, 25 bp, Homo sapien
taatgtcgttgataatatttgtaag

SEQ ID NO: 3462026 - DNA, 25 bp, Homo sapien
tctgttacttgtcttcgcctgaaac

SEQ ID NO: 3462027 - DNA, 25 bp, Homo sapien
gtgttttccatctgtttaatgtcgt

SEQ ID NO: 3462028 - DNA, 25 bp, Homo sapien
ttgaagacagaaacacgatcatact

SEQ ID NO: 3462029 - DNA, 25 bp, Homo sapien
tcaatggagatggactaagcttcaa

SEQ ID NO: 3462030 - DNA, 25 bp, Homo sapien
tagagaggctggactctgaaccaca

SEQ ID NO: 3462031 - DNA, 25 bp, Homo sapien
ggttgactgcaccagaggcattgta

SEQ ID NO: 3462032 - DNA, 25 bp, Homo sapien
tgcaaaagccatttgctagagaggc

SEQ ID NO: 3462033 - DNA, 25 bp, Homo sapien
gaaaatggtgctactctccagtaac

SEQ ID NO: 3462034 - DNA, 25 bp, Homo sapien
tcacgcactgacttgtgaatgcaaa

SEQ ID NO: 3462035 - DNA, 25 bp, Homo sapien
taaagcaatagcatatgttccagtg

SEQ ID NO: 3462036 - DNA, 25 bp, Homo sapien
tatttttgcctgattgcgattcacg

SEQ ID NO: 3462037 - DNA, 25 bp, Homo sapien
atagaatataggtatcctggaattc

SEQ ID NO: 3462038 - DNA, 25 bp, Homo sapien
cacatctctgaccttttgacgtata

SEQ ID NO: 3462039 - DNA, 25 bp, Homo sapien
tagaaccttgatcaaacttaaggcc

SEQ ID NO: 3462040 - DNA, 25 bp, Homo sapien
ttttgacgtatataaagcatgggaa

SEQ ID NO: 3462041 - DNA, 25 bp, Homo sapien
aatcatcttcagtaattattaccaa

SEQ ID NO: 3462042 - DNA, 25 bp, Homo sapien
gggttctgactgctataatctgaag

SEQ ID NO: 3462043 - DNA, 25 bp, Homo sapien
tcagcaattgcaagggcaagtacaa

SEQ ID NO: 3462044 - DNA, 25 bp, Homo sapien
tttctgtgagcatcagcaattgcaa

SEQ ID NO: 3462045 - DNA, 25 bp, Homo sapien
gatcaaccacttgtacatcagccca

SEQ ID NO: 3462046 - DNA, 25 bp, Homo sapien
gatgctgtacccttctcagtgtgga

SEQ ID NO: 3462047 - DNA, 25 bp, Homo sapien
catgtggcagaaataccgcagaagt

SEQ ID NO: 3462048 - DNA, 25 bp, Homo sapien
gatatgctacatgcttgggattgca

SEQ ID NO: 3462049 - DNA, 25 bp, Homo sapien
cctttactaatcgaagtctctcaga

SEQ ID NO: 3462050 - DNA, 25 bp, Homo sapien
gaccctttactaatcgaagtctctc

SEQ ID NO: 3462051 - DNA, 25 bp, Homo sapien
ctagaccctttactaatcgaagtct

SEQ ID NO: 3462052 - DNA, 25 bp, Homo sapien
tactaatcgaagtctctcagagaca

SEQ ID NO: 3462053 - DNA, 25 bp, Homo sapien
tgcaaaccctgctagggcaggatct

SEQ ID NO: 3462054 - DNA, 25 bp, Homo sapien
gatttaccctgctgtgggaatagct

SEQ ID NO: 3462055 - DNA, 25 bp, Homo sapien
tttgagctaagaccaattgctgtcc

SEQ ID NO: 3462056 - DNA, 25 bp, Homo sapien
ggaagctcctcatgcccaatattga

SEQ ID NO: 3462057 - DNA, 25 bp, Homo sapien
caaaaaactagctcccagattcact

SEQ ID NO: 3462058 - DNA, 25 bp, Homo sapien
taatttcgttatttatccagcagtg

SEQ ID NO: 3462059 - DNA, 25 bp, Homo sapien
gtgtctctatctcctaaggttcagc

SEQ ID NO: 3462060 - DNA, 25 bp, Homo sapien
ctctatctcctaaggttcagctctg

SEQ ID NO: 3462061 - DNA, 25 bp, Homo sapien
cagagaaacaggtacacggcctcat

SEQ ID NO: 3462062 - DNA, 25 bp, Homo sapien
ccaaaacccaacagaagcaagccaa

SEQ ID NO: 3462063 - DNA, 25 bp, Homo sapien
tccaaaacccaacagaagcaagcca

SEQ ID NO: 3462064 - DNA, 25 bp, Homo sapien
cccagagaaacaggtacacggcctc

SEQ ID NO: 3462065 - DNA, 25 bp, Homo sapien
agaaaacaccacaaactattagcac

SEQ ID NO: 3462066 - DNA, 25 bp, Homo sapien
caccacaaactattagcacactcaa

SEQ ID NO: 3462067 - DNA, 25 bp, Homo sapien
aattgttgactttgaagtctacatt

SEQ ID NO: 3462068 - DNA, 25 bp, Homo sapien
ctattagcacactcaaattgttgac

SEQ ID NO: 3462069 - DNA, 25 bp, Homo sapien
ggtcaaggtatgtaccgacctctta

SEQ ID NO: 3462070 - DNA, 25 bp, Homo sapien
tatcatagagtccaaaaatggcaaa

SEQ ID NO: 3462071 - DNA, 25 bp, Homo sapien
tgtaccgacctcttatcatagagtc

SEQ ID NO: 3462072 - DNA, 25 bp, Homo sapien
atgaggtcaaggtatgtaccgacct

SEQ ID NO: 3462073 - DNA, 25 bp, Homo sapien
caaactcaagagtgctcctcgtaac

SEQ ID NO: 3462074 - DNA, 25 bp, Homo sapien
tcctcgtaacgaaggtcttagttgc

SEQ ID NO: 3462075 - DNA, 25 bp, Homo sapien
gacaaaacagttccattcgtagtga

SEQ ID NO: 3462076 - DNA, 25 bp, Homo sapien
tagtgatccagcaaactcaagagtg

SEQ ID NO: 3462077 - DNA, 25 bp, Homo sapien
ctaatagatgaagaaactggactta

SEQ ID NO: 3462078 - DNA, 25 bp, Homo sapien
taatagatgaagaaactggacttac

SEQ ID NO: 3462079 - DNA, 25 bp, Homo sapien
tggtccagcactgtcaggcgggctc

SEQ ID NO: 3462080 - DNA, 25 bp, Homo sapien
tctgtttcaacatctcctggtccag

SEQ ID NO: 3462081 - DNA, 25 bp, Homo sapien
ggtgttctaccagcagatgaaatct

SEQ ID NO: 3462082 - DNA, 25 bp, Homo sapien
ttgggtcactgactaaactgatgag

SEQ ID NO: 3462083 - DNA, 25 bp, Homo sapien
atgagagccactagattaccaatct

SEQ ID NO: 3462084 - DNA, 25 bp, Homo sapien
aaatgcagcatcaagcataagtagg

SEQ ID NO: 3462085 - DNA, 25 bp, Homo sapien
caaggctgccttatgtctactgtca

SEQ ID NO: 3462086 - DNA, 25 bp, Homo sapien
tctgtgcaggagtatacaacttaac

SEQ ID NO: 3462087 - DNA, 25 bp, Homo sapien
caattagtaataatcgtgcttcaga

SEQ ID NO: 3462088 - DNA, 25 bp, Homo sapien
attagtaataatcgtgcttcagata

SEQ ID NO: 3462089 - DNA, 25 bp, Homo sapien
ttcaattagtaataatcgtgcttca

SEQ ID NO: 3462090 - DNA, 25 bp, Homo sapien
tagtaataatcgtgcttcagataaa

SEQ ID NO: 3462091 - DNA, 25 bp, Homo sapien
cttttatcctcaaacattgtaagac

SEQ ID NO: 3462092 - DNA, 25 bp, Homo sapien
tttatcctcaaacattgtaagaccc

SEQ ID NO: 3462093 - DNA, 25 bp, Homo sapien
tatcctcaaacattgtaagaccctt

SEQ ID NO: 3462094 - DNA, 25 bp, Homo sapien
cctcaaacattgtaagacccttcat

SEQ ID NO: 3462095 - DNA, 25 bp, Homo sapien
gtgtgattttggactcaggtgctcc

SEQ ID NO: 3462096 - DNA, 25 bp, Homo sapien
gagaataagacaacctgtttaaatc

SEQ ID NO: 3462097 - DNA, 25 bp, Homo sapien
tatccgaactggagtgagatctcag

SEQ ID NO: 3462098 - DNA, 25 bp, Homo sapien
ttaaatcggaagactgcatatccga

SEQ ID NO: 3462099 - DNA, 25 bp, Homo sapien
attcttgagtccttcaccaattggt

SEQ ID NO: 3462100 - DNA, 25 bp, Homo sapien
cttccaggaacagatatgcagtaag

SEQ ID NO: 3462101 - DNA, 25 bp, Homo sapien
tcaccaattggttgatctcagcctc

SEQ ID NO: 3462102 - DNA, 25 bp, Homo sapien
cagatatgcagtaagaattcttgag

SEQ ID NO: 3462103 - DNA, 25 bp, Homo sapien
agtgtttgtgagatgttgaatccaa

SEQ ID NO: 3462104 - DNA, 25 bp, Homo sapien
ccgtggagagcaatcaaggctttcc

SEQ ID NO: 3462105 - DNA, 25 bp, Homo sapien
tggagagcaatcaaggctttcctgg

SEQ ID NO: 3462106 - DNA, 25 bp, Homo sapien
cgtggagagcaatcaaggctttcct

SEQ ID NO: 3462107 - DNA, 25 bp, Homo sapien
aatagattcttcctggtcccctagg

SEQ ID NO: 3462108 - DNA, 25 bp, Homo sapien
gtaacattgatgctcctcccactga

SEQ ID NO: 3462109 - DNA, 25 bp, Homo sapien
gacttccaaggctagatcataacgg

SEQ ID NO: 3462110 - DNA, 25 bp, Homo sapien
cacacctgagtgagaatcaagtagc

SEQ ID NO: 3462111 - DNA, 25 bp, Homo sapien
gctcaccagatagttacaaagtcca

SEQ ID NO: 3462112 - DNA, 25 bp, Homo sapien
cagaaccaaatattctatagggcca

SEQ ID NO: 3462113 - DNA, 25 bp, Homo sapien
tcaactagacgtggcctgaaaagca

SEQ ID NO: 3462114 - DNA, 25 bp, Homo sapien
gagtacaaaaaagtgctgcctgctg

SEQ ID NO: 3462115 - DNA, 25 bp, Homo sapien
tgctgtagacatttttttgatgaga

SEQ ID NO: 3462116 - DNA, 25 bp, Homo sapien
ttttgatgagacaaaccccaaacca

SEQ ID NO: 3462117 - DNA, 25 bp, Homo sapien
gtgctctcaaaatctctttactgga

SEQ ID NO: 3462118 - DNA, 25 bp, Homo sapien
aatctctttactggagaacattgca

SEQ ID NO: 3462119 - DNA, 25 bp, Homo sapien
tagaagttgcctatagctgacatca

SEQ ID NO: 3462120 - DNA, 25 bp, Homo sapien
tatagcgctgacatgccaaccattt

SEQ ID NO: 3462121 - DNA, 25 bp, Homo sapien
cataatagcttggagtatcgagtat

SEQ ID NO: 3462122 - DNA, 25 bp, Homo sapien
gttttgaagtctctctatctcacag

SEQ ID NO: 3462123 - DNA, 25 bp, Homo sapien
taaagtaagtgtgcctctaaaaatg

SEQ ID NO: 3462124 - DNA, 25 bp, Homo sapien
tattttcgaaaactggaggccaaga

SEQ ID NO: 3462125 - DNA, 25 bp, Homo sapien
gatttggtcctgaagatagtcatgg

SEQ ID NO: 3462126 - DNA, 25 bp, Homo sapien
tcacactccaaattaaaagctggga

SEQ ID NO: 3462127 - DNA, 25 bp, Homo sapien
tgaaaagcacttgtagagtatatcc

SEQ ID NO: 3462128 - DNA, 25 bp, Homo sapien
gaaaagcacttgtagagtatatcct

SEQ ID NO: 3462129 - DNA, 25 bp, Homo sapien
ttgaaaagcacttgtagagtatatc

SEQ ID NO: 3462130 - DNA, 25 bp, Homo sapien
tggtgatgctagaggcatcagtatc

SEQ ID NO: 3462131 - DNA, 25 bp, Homo sapien
tgatgctagaggcatcagtatctct

SEQ ID NO: 3462132 - DNA, 25 bp, Homo sapien
ggtgatgctagaggcatcagtatct

SEQ ID NO: 3462133 - DNA, 25 bp, Homo sapien
atgctagaggcatcagtatctctgc

SEQ ID NO: 3462134 - DNA, 25 bp, Homo sapien
taacatgctttccaacacttacaat

SEQ ID NO: 3462135 - DNA, 25 bp, Homo sapien
gatataatggtagcctttaacatgc

SEQ ID NO: 3462136 - DNA, 25 bp, Homo sapien
aatggtagcctttaacatgctttcc

SEQ ID NO: 3462137 - DNA, 25 bp, Homo sapien
tgcaatgatataatggtagccttta

SEQ ID NO: 3462138 - DNA, 25 bp, Homo sapien
aactggaatccagtaacattggctc

SEQ ID NO: 3462139 - DNA, 25 bp, Homo sapien
ggtgtattaaaatccaccaactgga

SEQ ID NO: 3462140 - DNA, 25 bp, Homo sapien
ccattagtttgattaccataggtgt

SEQ ID NO: 3462141 - DNA, 25 bp, Homo sapien
ggctccaccatgtataaacctctca

SEQ ID NO: 3462142 - DNA, 25 bp, Homo sapien
agatcctggatactctctctgatct

SEQ ID NO: 3462143 - DNA, 25 bp, Homo sapien
ctggatactctctctgatctagttt

SEQ ID NO: 3462144 - DNA, 25 bp, Homo sapien
tcctggatactctctctgatctagt

SEQ ID NO: 3462145 - DNA, 25 bp, Homo sapien
atcctggatactctctctgatctag

SEQ ID NO: 3462146 - DNA, 25 bp, Homo sapien
cacaaggactccatcataagtcaga

SEQ ID NO: 3462147 - DNA, 25 bp, Homo sapien
taagacttcggaaagtttcagccat

SEQ ID NO: 3462148 - DNA, 25 bp, Homo sapien
tctgcctcctaagacttcggaaagt

SEQ ID NO: 3462149 - DNA, 25 bp, Homo sapien
ctcctaagacttcggaaagtttcag

SEQ ID NO: 3462150 - DNA, 25 bp, Homo sapien
agcaggatttgccagacaatcccca

SEQ ID NO: 3462151 - DNA, 25 bp, Homo sapien
tggtcaaactgaacattccctgtca

SEQ ID NO: 3462152 - DNA, 25 bp, Homo sapien
tccctgtcagcccttgaattcgaac

SEQ ID NO: 3462153 - DNA, 25 bp, Homo sapien
tacgtccatagtggtcaaactgaac

SEQ ID NO: 3462154 - DNA, 25 bp, Homo sapien
tgtgtaattgactctacgtccatag

SEQ ID NO: 3462155 - DNA, 25 bp, Homo sapien
tcttgaatcaagactaacttatcca

SEQ ID NO: 3462156 - DNA, 25 bp, Homo sapien
ctgtgtcattgccaagagttggtac

SEQ ID NO: 3462157 - DNA, 25 bp, Homo sapien
ccaagagttggtacatcttgaatca

SEQ ID NO: 3462158 - DNA, 25 bp, Homo sapien
ttgtggttacaaccactgttctgtt

SEQ ID NO: 3462159 - DNA, 25 bp, Homo sapien
agaggaggactgtactgaagtatga

SEQ ID NO: 3462160 - DNA, 25 bp, Homo sapien
aagaggaggactgtactgaagtatg

SEQ ID NO: 3462161 - DNA, 25 bp, Homo sapien
tcaatttcttaaaataggattcttc

SEQ ID NO: 3462162 - DNA, 25 bp, Homo sapien
cttaaaataggattcttcatcagag

SEQ ID NO: 3462163 - DNA, 25 bp, Homo sapien
tttcttaaaataggattcttcatca

SEQ ID NO: 3462164 - DNA, 25 bp, Homo sapien
caatttcttaaaataggattcttca

SEQ ID NO: 3462165 - DNA, 25 bp, Homo sapien
cataggtcctggactaccgttttca

SEQ ID NO: 3462166 - DNA, 25 bp, Homo sapien
tgaagtggagggatatcataggtcc

SEQ ID NO: 3462167 - DNA, 25 bp, Homo sapien
gaacaagacttgagccttagttagg

SEQ ID NO: 3462168 - DNA, 25 bp, Homo sapien
tagttaggaatggtcgaacagcgcg

SEQ ID NO: 3462169 - DNA, 25 bp, Homo sapien
ggcaattttatacttgataccaata

SEQ ID NO: 3462170 - DNA, 25 bp, Homo sapien
agatgccaaatctacacagtatcct

SEQ ID NO: 3462171 - DNA, 25 bp, Homo sapien
ttttcttgtacataacatatgggga

SEQ ID NO: 3462172 - DNA, 25 bp, Homo sapien
tccatcagggacaatggcaatttta

SEQ ID NO: 3462173 - DNA, 25 bp, Homo sapien
cataggccagaggatccaagaagga

SEQ ID NO: 3462174 - DNA, 25 bp, Homo sapien
ccagaggctgttaaagatgccaaac

SEQ ID NO: 3462175 - DNA, 25 bp, Homo sapien
aaactcattgggaggctggtcgctg

SEQ ID NO: 3462176 - DNA, 25 bp, Homo sapien
taactaggaataagaccacgctgac

SEQ ID NO: 3462177 - DNA, 25 bp, Homo sapien
tccaacaattcgacctgagagggat

SEQ ID NO: 3462178 - DNA, 25 bp, Homo sapien
gagaccattcgctcaaccgtcagga

SEQ ID NO: 3462179 - DNA, 25 bp, Homo sapien
taatgatgagtgtaaagaaccacca

SEQ ID NO: 3462180 - DNA, 25 bp, Homo sapien
tgaatccagtgttccataggcaatt

SEQ ID NO: 3462181 - DNA, 25 bp, Homo sapien
ttcactgatgactgagacaggcaca

SEQ ID NO: 3462182 - DNA, 25 bp, Homo sapien
tcactgatgactgagacaggcacag

SEQ ID NO: 3462183 - DNA, 25 bp, Homo sapien
ttatgcattcacagtttcactgatg

SEQ ID NO: 3462184 - DNA, 25 bp, Homo sapien
gaagggaacaacatgttaatattcg

SEQ ID NO: 3462185 - DNA, 25 bp, Homo sapien
tttcatacactgctatttttgatct

SEQ ID NO: 3462186 - DNA, 25 bp, Homo sapien
cttttcatacactgctatttttgat

SEQ ID NO: 3462187 - DNA, 25 bp, Homo sapien
ttttcatacactgctatttttgatc

SEQ ID NO: 3462188 - DNA, 25 bp, Homo sapien
tactccctcagctgtagtcctagtg

SEQ ID NO: 3462189 - DNA, 25 bp, Homo sapien
gtcacatggctttcgctgctcaatg

SEQ ID NO: 3462190 - DNA, 25 bp, Homo sapien
aatttgcccttggatttgcggacac

SEQ ID NO: 3462191 - DNA, 25 bp, Homo sapien
gaacccttgggcgttgctactccat

SEQ ID NO: 3462192 - DNA, 25 bp, Homo sapien
agatcaggttcttggttaagtcctt

SEQ ID NO: 3462193 - DNA, 25 bp, Homo sapien
ttaagatcaggttcttggttaagtc

SEQ ID NO: 3462194 - DNA, 25 bp, Homo sapien
taagatcaggttcttggttaagtcc

SEQ ID NO: 3462195 - DNA, 25 bp, Homo sapien
atcaggttcttggttaagtcctttg

SEQ ID NO: 3462196 - DNA, 25 bp, Homo sapien
gaagtcatgatcctataacctgaga

SEQ ID NO: 3462197 - DNA, 25 bp, Homo sapien
gagccactcgtgaactgaatgtaag

SEQ ID NO: 3462198 - DNA, 25 bp, Homo sapien
tctgaagataaattgagagccactc

SEQ ID NO: 3462199 - DNA, 25 bp, Homo sapien
caacaatagcgaatatgtcacttga

SEQ ID NO: 3462200 - DNA, 25 bp, Homo sapien
ttctccgtcttattaagtgtctgca

SEQ ID NO: 3462201 - DNA, 25 bp, Homo sapien
tgagcttttatagaagttctgaggg

SEQ ID NO: 3462202 - DNA, 25 bp, Homo sapien
tctccgtcttattaagtgtctgcaa

SEQ ID NO: 3462203 - DNA, 25 bp, Homo sapien
caacatagtgagaggctcatgggct

SEQ ID NO: 3462204 - DNA, 25 bp, Homo sapien
gaatgagcctgaacccatacaagat

SEQ ID NO: 3462205 - DNA, 25 bp, Homo sapien
tagagtaggagttcacagaagggca

SEQ ID NO: 3462206 - DNA, 25 bp, Homo sapien
catgggcttgggacctaggcagtaa

SEQ ID NO: 3462207 - DNA, 25 bp, Homo sapien
ggagctggttagttctcctctgtcc

SEQ ID NO: 3462208 - DNA, 25 bp, Homo sapien
tggtcctggagctggttagttctcc

SEQ ID NO: 3462209 - DNA, 25 bp, Homo sapien
tggagctggttagttctcctctgtc

SEQ ID NO: 3462210 - DNA, 25 bp, Homo sapien
ttggtcctggagctggttagttctc

SEQ ID NO: 3462211 - DNA, 25 bp, Homo sapien
gctggtttccttatgctggtgggtt

SEQ ID NO: 3462212 - DNA, 25 bp, Homo sapien
acgcacaagtggcaagctggtttcc

SEQ ID NO: 3462213 - DNA, 25 bp, Homo sapien
tgttcaaataactattacgcacaag

SEQ ID NO: 3462214 - DNA, 25 bp, Homo sapien
taactattacgcacaagtggcaagc

SEQ ID NO: 3462215 - DNA, 25 bp, Homo sapien
gccttagcgaaaatctaggtgagaa

SEQ ID NO: 3462216 - DNA, 25 bp, Homo sapien
gcctttgccttgtatgccttagcga

SEQ ID NO: 3462217 - DNA, 25 bp, Homo sapien
aatgctcacttgatcaacttccagg

SEQ ID NO: 3462218 - DNA, 25 bp, Homo sapien
tgacagggaatttgattcgggccta

SEQ ID NO: 3462219 - DNA, 25 bp, Homo sapien
taaaccccaggatgtcatgctgcat

SEQ ID NO: 3462220 - DNA, 25 bp, Homo sapien
taggattacatatccaatttgacgg

SEQ ID NO: 3462221 - DNA, 25 bp, Homo sapien
aacccactagattagatttcctcca

SEQ ID NO: 3462222 - DNA, 25 bp, Homo sapien
gctgcatgtgatactgactttgcaa

SEQ ID NO: 3462223 - DNA, 25 bp, Homo sapien
tgaaacgataaaacatattttgtaa

SEQ ID NO: 3462224 - DNA, 25 bp, Homo sapien
cttgaaacgataaaacatattttgt

SEQ ID NO: 3462225 - DNA, 25 bp, Homo sapien
ataaaacatattttgtaagaaactg

SEQ ID NO: 3462226 - DNA, 25 bp, Homo sapien
ttgaaacgataaaacatattttgta

SEQ ID NO: 3462227 - DNA, 25 bp, Homo sapien
ttctcctttgtcgtaccaccatttg

SEQ ID NO: 3462228 - DNA, 25 bp, Homo sapien
caatttgtccaagaggccttgttca

SEQ ID NO: 3462229 - DNA, 25 bp, Homo sapien
aagaggccttgttcattcagtttta

SEQ ID NO: 3462230 - DNA, 25 bp, Homo sapien
tttcaatttgtccaagaggccttgt

SEQ ID NO: 3462231 - DNA, 25 bp, Homo sapien
ccgcttttggtgacattgaggctaa

SEQ ID NO: 3462232 - DNA, 25 bp, Homo sapien
cgcttttggtgacattgaggctaac

SEQ ID NO: 3462233 - DNA, 25 bp, Homo sapien
cttgcttccagagtccttgggtcca

SEQ ID NO: 3462234 - DNA, 25 bp, Homo sapien
tgggtccacattcacctttatcgta

SEQ ID NO: 3462235 - DNA, 25 bp, Homo sapien
cagcttgtctaagacgcctgcctca

SEQ ID NO: 3462236 - DNA, 25 bp, Homo sapien
tccagagtccttgggtccacattca

SEQ ID NO: 3462237 - DNA, 25 bp, Homo sapien
aagcccaagccgccaaccagaatgt

SEQ ID NO: 3462238 - DNA, 25 bp, Homo sapien
cccaagccgccaaccagaatgtaga

SEQ ID NO: 3462239 - DNA, 25 bp, Homo sapien
attgccaagcccaagccgccaacca

SEQ ID NO: 3462240 - DNA, 25 bp, Homo sapien
accagcattgccaagcccaagccgc

SEQ ID NO: 3462241 - DNA, 25 bp, Homo sapien
aatactttcggttccatatacgttg

SEQ ID NO: 3462242 - DNA, 25 bp, Homo sapien
tctctataggttgctaaattctggg

SEQ ID NO: 3462243 - DNA, 25 bp, Homo sapien
aattctgggtattctgcgaggaagt

SEQ ID NO: 3462244 - DNA, 25 bp, Homo sapien
gaagttgggttaaaagtctgtgcac

SEQ ID NO: 3462245 - DNA, 25 bp, Homo sapien
aagaacgcggagtgttaccatattt

SEQ ID NO: 3462246 - DNA, 25 bp, Homo sapien
gttccacaacaaacaccgaaatata

SEQ ID NO: 3462247 - DNA, 25 bp, Homo sapien
gaagcagaaagaacgcggagtgtta

SEQ ID NO: 3462248 - DNA, 25 bp, Homo sapien
agaaagaacgcggagtgttaccata

SEQ ID NO: 3462249 - DNA, 25 bp, Homo sapien
tgtacagcctttgggcagtcaggcg

SEQ ID NO: 3462250 - DNA, 25 bp, Homo sapien
gattgcagttccagtgtgtacagcc

SEQ ID NO: 3462251 - DNA, 25 bp, Homo sapien
tatggtaggtccgatgcaatgacag

SEQ ID NO: 3462252 - DNA, 25 bp, Homo sapien
tcaggcgtcaagacgcggccattct

SEQ ID NO: 3462253 - DNA, 25 bp, Homo sapien
gaagaaataagcaagcgccaggtca

SEQ ID NO: 3462254 - DNA, 25 bp, Homo sapien
tccggtgaagacaaaggcctttctg

SEQ ID NO: 3462255 - DNA, 25 bp, Homo sapien
tacaacgcagtatggtaagtgccgt

SEQ ID NO: 3462256 - DNA, 25 bp, Homo sapien
cactgatgtgcatggctttgggcca

SEQ ID NO: 3462257 - DNA, 25 bp, Homo sapien
ggccttgtgtatgttacttaacctc

SEQ ID NO: 3462258 - DNA, 25 bp, Homo sapien
gaactcagcttagatcccagagcca

SEQ ID NO: 3462259 - DNA, 25 bp, Homo sapien
taaaccatggagtaagaactcagct

SEQ ID NO: 3462260 - DNA, 25 bp, Homo sapien
cagtacatgtagatatgtacctcat

SEQ ID NO: 3462261 - DNA, 25 bp, Homo sapien
aatttccctctccttatgaagacac

SEQ ID NO: 3462262 - DNA, 25 bp, Homo sapien
tctgccgctgtcttcacatgtcttt

SEQ ID NO: 3462263 - DNA, 25 bp, Homo sapien
gatggttactggcaagagtgttctt

SEQ ID NO: 3462264 - DNA, 25 bp, Homo sapien
caccacttattggttaatccaggat

SEQ ID NO: 3462265 - DNA, 25 bp, Homo sapien
cacatgtagtccttagcatggaggc

SEQ ID NO: 3462266 - DNA, 25 bp, Homo sapien
cagaatagctttcccaaagtatcgg

SEQ ID NO: 3462267 - DNA, 25 bp, Homo sapien
gcatgtgtagcctgtattccagcaa

SEQ ID NO: 3462268 - DNA, 25 bp, Homo sapien
caccatttgtatcaggttgcttgga

SEQ ID NO: 3462269 - DNA, 25 bp, Homo sapien
tgaaatatagtcagtcaactcttaa

SEQ ID NO: 3462270 - DNA, 25 bp, Homo sapien
tcagtcaactcttaatgtcattttc

SEQ ID NO: 3462271 - DNA, 25 bp, Homo sapien
tgtttctttgatgtgacccattcat

SEQ ID NO: 3462272 - DNA, 25 bp, Homo sapien
tatagtcagtcaactcttaatgtca

SEQ ID NO: 3462273 - DNA, 25 bp, Homo sapien
ccttgtaagaatggctggaaactgt

SEQ ID NO: 3462274 - DNA, 25 bp, Homo sapien
tgacatttgaggatgggtatgcaag

SEQ ID NO: 3462275 - DNA, 25 bp, Homo sapien
ggttgatacgtagctttaatacagc

SEQ ID NO: 3462276 - DNA, 25 bp, Homo sapien
gatatttattctgagaccaagggct

SEQ ID NO: 3462277 - DNA, 25 bp, Homo sapien
gtaatgtactgaaatcttataagtg

SEQ ID NO: 3462278 - DNA, 25 bp, Homo sapien
agttgaagctagtaaaaatgatacc

SEQ ID NO: 3462279 - DNA, 25 bp, Homo sapien
tagtccatgagcttgaacccaatga

SEQ ID NO: 3462280 - DNA, 25 bp, Homo sapien
caaaaatgtcatttcagtaatgtac

SEQ ID NO: 3462281 - DNA, 25 bp, Homo sapien
tatcattttcttgttttgagttcat

SEQ ID NO: 3462282 - DNA, 25 bp, Homo sapien
tctgtttctctttctataccctttc

SEQ ID NO: 3462283 - DNA, 25 bp, Homo sapien
ttccttgaattagtttctgtttctc

SEQ ID NO: 3462284 - DNA, 25 bp, Homo sapien
tataccctttcccatccctttatca

SEQ ID NO: 3462285 - DNA, 25 bp, Homo sapien
cctatgttgacttgcttctgttttc

SEQ ID NO: 3462286 - DNA, 25 bp, Homo sapien
ggctaactgcttcttgcctatgttg

SEQ ID NO: 3462287 - DNA, 25 bp, Homo sapien
cttcttgcctatgttgacttgcttc

SEQ ID NO: 3462288 - DNA, 25 bp, Homo sapien
aggctaactgcttcttgcctatgtt

SEQ ID NO: 3462289 - DNA, 25 bp, Homo sapien
tggataccggcatataaaggagagg

SEQ ID NO: 3462290 - DNA, 25 bp, Homo sapien
ggataccggcatataaaggagagga

SEQ ID NO: 3462291 - DNA, 25 bp, Homo sapien
ttggataccggcatataaaggagag

SEQ ID NO: 3462292 - DNA, 25 bp, Homo sapien
ctgcacgctcgggagaagtgccacg

SEQ ID NO: 3462293 - DNA, 25 bp, Homo sapien
cacgcgcgtctgtcgcctgaccggg

SEQ ID NO: 3462294 - DNA, 25 bp, Homo sapien
ctcgggagaagtgccacgcgcgtct

SEQ ID NO: 3462295 - DNA, 25 bp, Homo sapien
cacgctcgggagaagtgccacgcgc

SEQ ID NO: 3462296 - DNA, 25 bp, Homo sapien
tgccctcgcagtgggtagggtcccg

SEQ ID NO: 3462297 - DNA, 25 bp, Homo sapien
gcaacgcttgctgccgggtttggtc

SEQ ID NO: 3462298 - DNA, 25 bp, Homo sapien
cgcaggtgagcggttctatgctgga

SEQ ID NO: 3462299 - DNA, 25 bp, Homo sapien
ggtcagcggcaattggcgcaacgct

SEQ ID NO: 3462300 - DNA, 25 bp, Homo sapien
tgcccttttaacaggtgagggtcaa

SEQ ID NO: 3462301 - DNA, 25 bp, Homo sapien
caaggacaagagacgagtttggaga

SEQ ID NO: 3462302 - DNA, 25 bp, Homo sapien
ccaatcagttggaacagcgcagcaa

SEQ ID NO: 3462303 - DNA, 25 bp, Homo sapien
cgactggagcagcacaagtttccta

SEQ ID NO: 3462304 - DNA, 25 bp, Homo sapien
tcattgttggtccatatccactcag

SEQ ID NO: 3462305 - DNA, 25 bp, Homo sapien
aattcttcattgttggtccatatcc

SEQ ID NO: 3462306 - DNA, 25 bp, Homo sapien
gttggtccatatccactcagacaag

SEQ ID NO: 3462307 - DNA, 25 bp, Homo sapien
ccatatccactcagacaagatgtag

SEQ ID NO: 3462308 - DNA, 25 bp, Homo sapien
gatggcaggaccttgttgcagtcac

SEQ ID NO: 3462309 - DNA, 25 bp, Homo sapien
aggatggcaggaccttgttgcagtc

SEQ ID NO: 3462310 - DNA, 25 bp, Homo sapien
tggcaggaccttgttgcagtcacca

SEQ ID NO: 3462311 - DNA, 25 bp, Homo sapien
atggcaggaccttgttgcagtcacc

SEQ ID NO: 3462312 - DNA, 25 bp, Homo sapien
gactggcttctattgctaacacttt

SEQ ID NO: 3462313 - DNA, 25 bp, Homo sapien
tttgactggcttctattgctaacac

SEQ ID NO: 3462314 - DNA, 25 bp, Homo sapien
cactttcaatttggccccatttttg

SEQ ID NO: 3462315 - DNA, 25 bp, Homo sapien
ggcttctattgctaacactttcaat

SEQ ID NO: 3462316 - DNA, 25 bp, Homo sapien
tcatttctctgttagtggaatgtgg

SEQ ID NO: 3462317 - DNA, 25 bp, Homo sapien
tttgatgatataggtgacaacttca

SEQ ID NO: 3462318 - DNA, 25 bp, Homo sapien
ttttgatgatataggtgacaacttc

SEQ ID NO: 3462319 - DNA, 25 bp, Homo sapien
cttttgatgatataggtgacaactt

SEQ ID NO: 3462320 - DNA, 25 bp, Homo sapien
ttgatgatataggtgacaacttcat

SEQ ID NO: 3462321 - DNA, 25 bp, Homo sapien
gggagcttacaatctggtaaggcaa

SEQ ID NO: 3462322 - DNA, 25 bp, Homo sapien
gcttacaatctggtaaggcaaataa

SEQ ID NO: 3462323 - DNA, 25 bp, Homo sapien
agcttacaatctggtaaggcaaata

SEQ ID NO: 3462324 - DNA, 25 bp, Homo sapien
ttacaatctggtaaggcaaataaat

SEQ ID NO: 3462325 - DNA, 25 bp, Homo sapien
aaagtgcggtactgcgggattcagc

SEQ ID NO: 3462326 - DNA, 25 bp, Homo sapien
tgttgttgactctcgtatgaaagcc

SEQ ID NO: 3462327 - DNA, 25 bp, Homo sapien
tatgaaagcccacgcgatccaagtg

SEQ ID NO: 3462328 - DNA, 25 bp, Homo sapien
gatgactgtaaatgactacctggag

SEQ ID NO: 3462329 - DNA, 25 bp, Homo sapien
tccctccgaaggccgagcagaggca

SEQ ID NO: 3462330 - DNA, 25 bp, Homo sapien
tgcgcaacactgaccccgcctggat

SEQ ID NO: 3462331 - DNA, 25 bp, Homo sapien
ttatttggggcgatgaagcgaccca

SEQ ID NO: 3462332 - DNA, 25 bp, Homo sapien
ggtgctgttttgctattgccaagcc

SEQ ID NO: 3462333 - DNA, 25 bp, Homo sapien
tatgacgtcaagtaggcgaggcttc

SEQ ID NO: 3462334 - DNA, 25 bp, Homo sapien
agacggagatcagccctgcgctttg

SEQ ID NO: 3462335 - DNA, 25 bp, Homo sapien
cacttgcggaagagttaacgggaca

SEQ ID NO: 3462336 - DNA, 25 bp, Homo sapien
agacttcggagactgcagttgcagg

SEQ ID NO: 3462337 - DNA, 25 bp, Homo sapien
caccgacagccctcccagcccgccc

SEQ ID NO: 3462338 - DNA, 25 bp, Homo sapien
ctggcccaccgacagccctcccagc

SEQ ID NO: 3462339 - DNA, 25 bp, Homo sapien
gacagccctcccagcccgcccccga

SEQ ID NO: 3462340 - DNA, 25 bp, Homo sapien
ggcccaccgacagccctcccagccc

SEQ ID NO: 3462341 - DNA, 25 bp, Homo sapien
ttcttcccggcgtccgtgcgcaggg

SEQ ID NO: 3462342 - DNA, 25 bp, Homo sapien
tccgtgcgcaggggacgggccgtcg

SEQ ID NO: 3462343 - DNA, 25 bp, Homo sapien
gcgtccgtgcgcaggggacgggccg

SEQ ID NO: 3462344 - DNA, 25 bp, Homo sapien
cttcttcccggcgtccgtgcgcagg

SEQ ID NO: 3462345 - DNA, 25 bp, Homo sapien
ctatctcgggcctgatggcgcggac

SEQ ID NO: 3462346 - DNA, 25 bp, Homo sapien
acactgaaagcggacctcgccgcta

SEQ ID NO: 3462347 - DNA, 25 bp, Homo sapien
atggcgcggacgcaaacgtggcccc

SEQ ID NO: 3462348 - DNA, 25 bp, Homo sapien
ctcgccgctatctcgggcctgatgg

SEQ ID NO: 3462349 - DNA, 25 bp, Homo sapien
agccaagtgccgcaggaaaaggccc

SEQ ID NO: 3462350 - DNA, 25 bp, Homo sapien
tctcctcgggctgaatcgatcgcac

SEQ ID NO: 3462351 - DNA, 25 bp, Homo sapien
attcggctcggctcggcagccaagt

SEQ ID NO: 3462352 - DNA, 25 bp, Homo sapien
caagcagaaccgtttggcagggaaa

SEQ ID NO: 3462353 - DNA, 25 bp, Homo sapien
catggctgccttagcgtcccgggca

SEQ ID NO: 3462354 - DNA, 25 bp, Homo sapien
atggctgccttagcgtcccgggcaa

SEQ ID NO: 3462355 - DNA, 25 bp, Homo sapien
ctgccttagcgtcccgggcaaagac

SEQ ID NO: 3462356 - DNA, 25 bp, Homo sapien
ggctgccttagcgtcccgggcaaag

SEQ ID NO: 3462357 - DNA, 25 bp, Homo sapien
tgcaaacgaatatgattccaaggga

SEQ ID NO: 3462358 - DNA, 25 bp, Homo sapien
acttgcagctcaggttcagcagcaa

SEQ ID NO: 3462359 - DNA, 25 bp, Homo sapien
gagtcctttgcaagaactggttttc

SEQ ID NO: 3462360 - DNA, 25 bp, Homo sapien
ttcgggtaaggattcgatgagtcct

SEQ ID NO: 3462361 - DNA, 25 bp, Homo sapien
tagtagggccttgttctgaacaaac

SEQ ID NO: 3462362 - DNA, 25 bp, Homo sapien
ctagtagggccttgttctgaacaaa

SEQ ID NO: 3462363 - DNA, 25 bp, Homo sapien
ttccaagcagataccaacccactgg

SEQ ID NO: 3462364 - DNA, 25 bp, Homo sapien
tagcattgaccatagccaacactgc

SEQ ID NO: 3462365 - DNA, 25 bp, Homo sapien
caacactgcccatcaagttaactgg

SEQ ID NO: 3462366 - DNA, 25 bp, Homo sapien
ttaccaggtagttgtgctgactgca

SEQ ID NO: 3462367 - DNA, 25 bp, Homo sapien
tacttacagcctaatgggcctatca

SEQ ID NO: 3462368 - DNA, 25 bp, Homo sapien
tcagagagcctgttccaaggtaagt

SEQ ID NO: 3462369 - DNA, 25 bp, Homo sapien
aaaattcatggtaggcctctggtac

SEQ ID NO: 3462370 - DNA, 25 bp, Homo sapien
caactcaaaggatctgattcccaga

SEQ ID NO: 3462371 - DNA, 25 bp, Homo sapien
caaaatctcggcaagtcaaagcaag

SEQ ID NO: 3462372 - DNA, 25 bp, Homo sapien
gagtaaacacactatgacaagcagt

SEQ ID NO: 3462373 - DNA, 25 bp, Homo sapien
gacaagcagtggttagcccagaaat

SEQ ID NO: 3462374 - DNA, 25 bp, Homo sapien
ttaagtaagcaggaaaaccatatgg

SEQ ID NO: 3462375 - DNA, 25 bp, Homo sapien
cactcatccttaaagcttctgattg

SEQ ID NO: 3462376 - DNA, 25 bp, Homo sapien
gagtccactcatccttaaagcttct

SEQ ID NO: 3462377 - DNA, 25 bp, Homo sapien
catccttaaagcttctgattgtttc

SEQ ID NO: 3462378 - DNA, 25 bp, Homo sapien
ccttaaagcttctgattgtttccca

SEQ ID NO: 3462379 - DNA, 25 bp, Homo sapien
gatagatcaaattcaagccgctgca

SEQ ID NO: 3462380 - DNA, 25 bp, Homo sapien
ctccatccaggaataaacgtgtttc

SEQ ID NO: 3462381 - DNA, 25 bp, Homo sapien
caaatcctagtccaacaccaatggc

SEQ ID NO: 3462382 - DNA, 25 bp, Homo sapien
tccaagtttaatggagatagatcaa

SEQ ID NO: 3462383 - DNA, 25 bp, Homo sapien
caggtacccaagtcagcataaagtg

SEQ ID NO: 3462384 - DNA, 25 bp, Homo sapien
tatagcccgtttgctggacacaagc

SEQ ID NO: 3462385 - DNA, 25 bp, Homo sapien
tatagatgctccacgactcacgatg

SEQ ID NO: 3462386 - DNA, 25 bp, Homo sapien
acttatatcagcctacagtgggcga

SEQ ID NO: 3462387 - DNA, 25 bp, Homo sapien
atcctgatgtctagatccatcgggt

SEQ ID NO: 3462388 - DNA, 25 bp, Homo sapien
ggtttcctaagagcaactgcaacaa

SEQ ID NO: 3462389 - DNA, 25 bp, Homo sapien
gatccatcgggtttcctaagagcaa

SEQ ID NO: 3462390 - DNA, 25 bp, Homo sapien
caaaatggtgctcatctattttgct

SEQ ID NO: 3462391 - DNA, 25 bp, Homo sapien
tgggaacggcagatgacattaaatc

SEQ ID NO: 3462392 - DNA, 25 bp, Homo sapien
gatcttcaggtgtcatgggaacggc

SEQ ID NO: 3462393 - DNA, 25 bp, Homo sapien
tcttctgtgaagcaaaaacagtccc

SEQ ID NO: 3462394 - DNA, 25 bp, Homo sapien
gaatagtaaattgcctctgggttgg

SEQ ID NO: 3462395 - DNA, 25 bp, Homo sapien
tcagtgaatacggaagatcacaaac

SEQ ID NO: 3462396 - DNA, 25 bp, Homo sapien
catttccctttgttactcagggaat

SEQ ID NO: 3462397 - DNA, 25 bp, Homo sapien
tttccctttgttactcagggaatca

SEQ ID NO: 3462398 - DNA, 25 bp, Homo sapien
tatttttcagtgaatacggaagatc

SEQ ID NO: 3462399 - DNA, 25 bp, Homo sapien
gttacctctggccaaaagcatccta

SEQ ID NO: 3462400 - DNA, 25 bp, Homo sapien
ttaatgacacccctgaaccctgtgt

SEQ ID NO: 3462401 - DNA, 25 bp, Homo sapien
gaacagacggttcacgttaagagga

SEQ ID NO: 3462402 - DNA, 25 bp, Homo sapien
aaacaaatgagagacgaaatggcct

SEQ ID NO: 3462403 - DNA, 25 bp, Homo sapien
tcaaatttatgggatttcacttgcc

SEQ ID NO: 3462404 - DNA, 25 bp, Homo sapien
tgctaagtaacaaccgaaaacactc

SEQ ID NO: 3462405 - DNA, 25 bp, Homo sapien
catgaagagctttaaagggtgctaa

SEQ ID NO: 3462406 - DNA, 25 bp, Homo sapien
gaaaacactcatggaactatcagga

SEQ ID NO: 3462407 - DNA, 25 bp, Homo sapien
ctgtggaggaagctggctctaaagg

SEQ ID NO: 3462408 - DNA, 25 bp, Homo sapien
tggtgactgggtagccagctgtgag

SEQ ID NO: 3462409 - DNA, 25 bp, Homo sapien
tcagaggatggtgactgggtagcca

SEQ ID NO: 3462410 - DNA, 25 bp, Homo sapien
actgggtagccagctgtgaggcaaa

SEQ ID NO: 3462411 - DNA, 25 bp, Homo sapien
tagccagctgtgaggcaaagccttt

SEQ ID NO: 3462412 - DNA, 25 bp, Homo sapien
tatgtgggactgcaaaattccctcc

SEQ ID NO: 3462413 - DNA, 25 bp, Homo sapien
cttcctccatgggtaagaccaaggg

SEQ ID NO: 3462414 - DNA, 25 bp, Homo sapien
gtagaccaccttccaggtatgtggg

SEQ ID NO: 3462415 - DNA, 25 bp, Homo sapien
gggacagatctcacacgttccctgt

SEQ ID NO: 3462416 - DNA, 25 bp, Homo sapien
cacaccttagaggatcagagctggt

SEQ ID NO: 3462417 - DNA, 25 bp, Homo sapien
cagagctggtttatgcccaatcata

SEQ ID NO: 3462418 - DNA, 25 bp, Homo sapien
tctccattctgttagtgcatgtgag

SEQ ID NO: 3462419 - DNA, 25 bp, Homo sapien
ggaactccagcagctatttgggatc

SEQ ID NO: 3462420 - DNA, 25 bp, Homo sapien
gtatcattgttagcaccttggtggg

SEQ ID NO: 3462421 - DNA, 25 bp, Homo sapien
tgtggctgtctctactgatctgtgt

SEQ ID NO: 3462422 - DNA, 25 bp, Homo sapien
aagaccattgacagctgcccctgtg

SEQ ID NO: 3462423 - DNA, 25 bp, Homo sapien
tcctgtcccaactgatagtatcatt

SEQ ID NO: 3462424 - DNA, 25 bp, Homo sapien
tatagagctttcagtatgtgactgt

SEQ ID NO: 3462425 - DNA, 25 bp, Homo sapien
atagagctttcagtatgtgactgtt

SEQ ID NO: 3462426 - DNA, 25 bp, Homo sapien
atatagagctttcagtatgtgactg

SEQ ID NO: 3462427 - DNA, 25 bp, Homo sapien
gcatttggaatcttggcgaaatctt

SEQ ID NO: 3462428 - DNA, 25 bp, Homo sapien
ggccccatctgctggcgataaagag

SEQ ID NO: 3462429 - DNA, 25 bp, Homo sapien
tcttggcgaaatcttttccctggcc

SEQ ID NO: 3462430 - DNA, 25 bp, Homo sapien
tgcttcaaagaaacgtcagcatttg

SEQ ID NO: 3462431 - DNA, 25 bp, Homo sapien
cgtttatgctctggtttccgttcac

SEQ ID NO: 3462432 - DNA, 25 bp, Homo sapien
cagtggcctcacgtttatgctctgg

SEQ ID NO: 3462433 - DNA, 25 bp, Homo sapien
tggtttccgttcactatcagtaaag

SEQ ID NO: 3462434 - DNA, 25 bp, Homo sapien
ggtgacagtggcctcacgtttatgc

SEQ ID NO: 3462435 - DNA, 25 bp, Homo sapien
catgactctgaaggttgtggcgttt

SEQ ID NO: 3462436 - DNA, 25 bp, Homo sapien
ctttgacttgggtatggtgagtcca

SEQ ID NO: 3462437 - DNA, 25 bp, Homo sapien
ctgttcagactgtagattcagtagt

SEQ ID NO: 3462438 - DNA, 25 bp, Homo sapien
tacggcttgatcttggaacaatggc

SEQ ID NO: 3462439 - DNA, 25 bp, Homo sapien
gctattttggtcagaggcttgcccc

SEQ ID NO: 3462440 - DNA, 25 bp, Homo sapien
tcttctaaagccacagactttatct

SEQ ID NO: 3462441 - DNA, 25 bp, Homo sapien
tgttttatgcgtcaagctcttgggt

SEQ ID NO: 3462442 - DNA, 25 bp, Homo sapien
tgggtatttactgtaactgcgtaac

SEQ ID NO: 3462443 - DNA, 25 bp, Homo sapien
aagatggtggtgggctgcttccaag

SEQ ID NO: 3462444 - DNA, 25 bp, Homo sapien
atggtggtgggctgcttccaagatg

SEQ ID NO: 3462445 - DNA, 25 bp, Homo sapien
agatggtggtgggctgcttccaaga

SEQ ID NO: 3462446 - DNA, 25 bp, Homo sapien
gatggtggtgggctgcttccaagat

SEQ ID NO: 3462447 - DNA, 25 bp, Homo sapien
ggctcactcagtatctatcccaatc

SEQ ID NO: 3462448 - DNA, 25 bp, Homo sapien
tatccagctgattttctgaggctca

SEQ ID NO: 3462449 - DNA, 25 bp, Homo sapien
ttctgaggctcactcagtatctatc

SEQ ID NO: 3462450 - DNA, 25 bp, Homo sapien
agtatctatcccaatcttcttatag

SEQ ID NO: 3462451 - DNA, 25 bp, Homo sapien
tcttgaaaaggcaaacatcagccat

SEQ ID NO: 3462452 - DNA, 25 bp, Homo sapien
ggctccatgagccatgatagttgca

SEQ ID NO: 3462453 - DNA, 25 bp, Homo sapien
ccttcggaaaaggttacagcttgca

SEQ ID NO: 3462454 - DNA, 25 bp, Homo sapien
ggctacgtaataaatcttctctgga

SEQ ID NO: 3462455 - DNA, 25 bp, Homo sapien
ttcagctactactcttcctttggtt

SEQ ID NO: 3462456 - DNA, 25 bp, Homo sapien
tcagctactactcttcctttggtta

SEQ ID NO: 3462457 - DNA, 25 bp, Homo sapien
ggtcttagaatcctgcttcagctac

SEQ ID NO: 3462458 - DNA, 25 bp, Homo sapien
cacaaaggaccatatattaagcatt

SEQ ID NO: 3462459 - DNA, 25 bp, Homo sapien
tatttaatgactaatctggcaaccg

SEQ ID NO: 3462460 - DNA, 25 bp, Homo sapien
tgggctaacagagagttcaatgaat

SEQ ID NO: 3462461 - DNA, 25 bp, Homo sapien
gaattttccagaacgcttttatctg

SEQ ID NO: 3462462 - DNA, 25 bp, Homo sapien
gagataatgccacgaccgaaacagc

SEQ ID NO: 3462463 - DNA, 25 bp, Homo sapien
tatgttccaggcacataaatactgg

SEQ ID NO: 3462464 - DNA, 25 bp, Homo sapien
cacgaccgaaacagcaaaaatctct

SEQ ID NO: 3462465 - DNA, 25 bp, Homo sapien
cataaatactggagataatgccacg

SEQ ID NO: 3462466 - DNA, 25 bp, Homo sapien
ggtgtgtctctgcttcaaagggcca

SEQ ID NO: 3462467 - DNA, 25 bp, Homo sapien
tttgcatatagttgcccctggtggc

SEQ ID NO: 3462468 - DNA, 25 bp, Homo sapien
gaaaataccgcattgataaccctga

SEQ ID NO: 3462469 - DNA, 25 bp, Homo sapien
taagaagtgctcaggtagcacccag

SEQ ID NO: 3462470 - DNA, 25 bp, Homo sapien
tttttatcctgccagcatgtggagg

SEQ ID NO: 3462471 - DNA, 25 bp, Homo sapien
gcttagcccgaagtagacacacaga

SEQ ID NO: 3462472 - DNA, 25 bp, Homo sapien
caatgatgggtagcacagattttcc

SEQ ID NO: 3462473 - DNA, 25 bp, Homo sapien
gatctctcttgtgcctaccctggtg

SEQ ID NO: 3462474 - DNA, 25 bp, Homo sapien
gtgtgctgagcctctgtaaagcagg

SEQ ID NO: 3462475 - DNA, 25 bp, Homo sapien
cagattctattgaagtgtgctgagc

SEQ ID NO: 3462476 - DNA, 25 bp, Homo sapien
tgatgagaaaaatcggcttttgacc

SEQ ID NO: 3462477 - DNA, 25 bp, Homo sapien
tctattgaagtgtgctgagcctctg

SEQ ID NO: 3462478 - DNA, 25 bp, Homo sapien
gatccaagcccagtgttttatatct

SEQ ID NO: 3462479 - DNA, 25 bp, Homo sapien
tagatccaagcccagtgttttatat

SEQ ID NO: 3462480 - DNA, 25 bp, Homo sapien
cacaagcactaatagatccaagccc

SEQ ID NO: 3462481 - DNA, 25 bp, Homo sapien
ttgaagaacccacaagcactaatag

SEQ ID NO: 3462482 - DNA, 25 bp, Homo sapien
tcatgcaaggtttgacatcttgtct

SEQ ID NO: 3462483 - DNA, 25 bp, Homo sapien
aaggtttgacatcttgtctgtctgt

SEQ ID NO: 3462484 - DNA, 25 bp, Homo sapien
gcaaggtttgacatcttgtctgtct

SEQ ID NO: 3462485 - DNA, 25 bp, Homo sapien
catgcaaggtttgacatcttgtctg

SEQ ID NO: 3462486 - DNA, 25 bp, Homo sapien
tcttgaaaacagttgcatggtctcc

SEQ ID NO: 3462487 - DNA, 25 bp, Homo sapien
gactctgtccaatgcaatcttccgg

SEQ ID NO: 3462488 - DNA, 25 bp, Homo sapien
tcaggcctcttacttaaacctcgag

SEQ ID NO: 3462489 - DNA, 25 bp, Homo sapien
tactctgagcaggatttcactgaga

SEQ ID NO: 3462490 - DNA, 25 bp, Homo sapien
ctgatctattgaagtctgacaaatt

SEQ ID NO: 3462491 - DNA, 25 bp, Homo sapien
gatctattgaagtctgacaaattac

SEQ ID NO: 3462492 - DNA, 25 bp, Homo sapien
tgatctattgaagtctgacaaatta

SEQ ID NO: 3462493 - DNA, 25 bp, Homo sapien
tcccaggacaacagtgcccatatcc

SEQ ID NO: 3462494 - DNA, 25 bp, Homo sapien
tttcccaggacaacagtgcccatat

SEQ ID NO: 3462495 - DNA, 25 bp, Homo sapien
ctttcccaggacaacagtgcccata

SEQ ID NO: 3462496 - DNA, 25 bp, Homo sapien
ccaggacaacagtgcccatatcctt

SEQ ID NO: 3462497 - DNA, 25 bp, Homo sapien
ttacaaacagaccgcctgattccag

SEQ ID NO: 3462498 - DNA, 25 bp, Homo sapien
tttacaaacagaccgcctgattcca

SEQ ID NO: 3462499 - DNA, 25 bp, Homo sapien
ctttacaaacagaccgcctgattcc

SEQ ID NO: 3462500 - DNA, 25 bp, Homo sapien
ctccagaatgaccacgattattaac

SEQ ID NO: 3462501 - DNA, 25 bp, Homo sapien
ctaagcaccgaatgtgcctccagaa

SEQ ID NO: 3462502 - DNA, 25 bp, Homo sapien
gagcttttcatctggggctacagta

SEQ ID NO: 3462503 - DNA, 25 bp, Homo sapien
gggctacagtatcagcttctacatc

SEQ ID NO: 3462504 - DNA, 25 bp, Homo sapien
tactggcatttccaccccaataggg

SEQ ID NO: 3462505 - DNA, 25 bp, Homo sapien
tggtccccaaatctctaaaggctcc

SEQ ID NO: 3462506 - DNA, 25 bp, Homo sapien
ttttactggcatttccaccccaata

SEQ ID NO: 3462507 - DNA, 25 bp, Homo sapien
gcatttccaccccaatagggcttgg

SEQ ID NO: 3462508 - DNA, 25 bp, Homo sapien
cacccaattgttactaccctggaca

SEQ ID NO: 3462509 - DNA, 25 bp, Homo sapien
ggactctagaagaaatcactccttc

SEQ ID NO: 3462510 - DNA, 25 bp, Homo sapien
gaagaaatcactccttcagcttttg

SEQ ID NO: 3462511 - DNA, 25 bp, Homo sapien
ttgcactgtggctacatgtctcatg

SEQ ID NO: 3462512 - DNA, 25 bp, Homo sapien
ttccctgtcctctgtagctatgcaa

SEQ ID NO: 3462513 - DNA, 25 bp, Homo sapien
gtagctatgcaaatagcaccagccc

SEQ ID NO: 3462514 - DNA, 25 bp, Homo sapien
tagaagagttgacaatttagtctcc

SEQ ID NO: 3462515 - DNA, 25 bp, Homo sapien
tgtcctctgtagctatgcaaatagc

SEQ ID NO: 3462516 - DNA, 25 bp, Homo sapien
caatagttggagaggtaaccgtctt

SEQ ID NO: 3462517 - DNA, 25 bp, Homo sapien
aaagcttgagcaatagttggagagg

SEQ ID NO: 3462518 - DNA, 25 bp, Homo sapien
agcaatagttggagaggtaaccgtc

SEQ ID NO: 3462519 - DNA, 25 bp, Homo sapien
cttgagcaatagttggagaggtaac

SEQ ID NO: 3462520 - DNA, 25 bp, Homo sapien
ttgatctggctagggtctctccttc

SEQ ID NO: 3462521 - DNA, 25 bp, Homo sapien
ccttcagctggttgctcttctatcc

SEQ ID NO: 3462522 - DNA, 25 bp, Homo sapien
cagctggttgctcttctatccactc

SEQ ID NO: 3462523 - DNA, 25 bp, Homo sapien
ctttgatctggctagggtctctcct

SEQ ID NO: 3462524 - DNA, 25 bp, Homo sapien
gattctggatctaccttacgacctt

SEQ ID NO: 3462525 - DNA, 25 bp, Homo sapien
gatctaccttacgaccttcctgggc

SEQ ID NO: 3462526 - DNA, 25 bp, Homo sapien
caataacgactgattctggatctac

SEQ ID NO: 3462527 - DNA, 25 bp, Homo sapien
tcaaaggcctgctgaccaataacga

SEQ ID NO: 3462528 - DNA, 25 bp, Homo sapien
caagcacagagactatgggagccct

SEQ ID NO: 3462529 - DNA, 25 bp, Homo sapien
tacccatagggaacatgcagtgcag

SEQ ID NO: 3462530 - DNA, 25 bp, Homo sapien
tcctggaggatgtatcggagaacaa

SEQ ID NO: 3462531 - DNA, 25 bp, Homo sapien
tgcagtgcagaggagatacagacaa

SEQ ID NO: 3462532 - DNA, 25 bp, Homo sapien
catagtcacatcctgacaatccttg

SEQ ID NO: 3462533 - DNA, 25 bp, Homo sapien
tcaagttcctggcttccatagtcac

SEQ ID NO: 3462534 - DNA, 25 bp, Homo sapien
attcaagttcctggcttccatagtc

SEQ ID NO: 3462535 - DNA, 25 bp, Homo sapien
tcattcaagttcctggcttccatag

SEQ ID NO: 3462536 - DNA, 25 bp, Homo sapien
gtagtgggggagaaataaatacatc

SEQ ID NO: 3462537 - DNA, 25 bp, Homo sapien
tggtagtgggggagaaataaataca

SEQ ID NO: 3462538 - DNA, 25 bp, Homo sapien
aaacagtatactcaaggaatggtag

SEQ ID NO: 3462539 - DNA, 25 bp, Homo sapien
cacttcatctgctagccttagtcca

SEQ ID NO: 3462540 - DNA, 25 bp, Homo sapien
tagccttagtccagttgtcttcttc

SEQ ID NO: 3462541 - DNA, 25 bp, Homo sapien
tcatctgctagccttagtccagttg

SEQ ID NO: 3462542 - DNA, 25 bp, Homo sapien
tctgctagccttagtccagttgtct

SEQ ID NO: 3462543 - DNA, 25 bp, Homo sapien
gcatcagcatcaaacacaatatctg

SEQ ID NO: 3462544 - DNA, 25 bp, Homo sapien
gtagcatcagcatcaaacacaatat

SEQ ID NO: 3462545 - DNA, 25 bp, Homo sapien
cagcatcaaacacaatatctggcat

SEQ ID NO: 3462546 - DNA, 25 bp, Homo sapien
atcagcatcaaacacaatatctggc

SEQ ID NO: 3462547 - DNA, 25 bp, Homo sapien
gaagaaaacctttgcccctgtgcac

SEQ ID NO: 3462548 - DNA, 25 bp, Homo sapien
cataggacgtaggacttgcagcaaa

SEQ ID NO: 3462549 - DNA, 25 bp, Homo sapien
ccctgtgcacaagaatgactccatt

SEQ ID NO: 3462550 - DNA, 25 bp, Homo sapien
ctttagataactgcccctgaggaat

SEQ ID NO: 3462551 - DNA, 25 bp, Homo sapien
taaagtagtccttggttgacgtcca

SEQ ID NO: 3462552 - DNA, 25 bp, Homo sapien
actgctggaattgctggaacttctt

SEQ ID NO: 3462553 - DNA, 25 bp, Homo sapien
cccctgattgacataggtcactgct

SEQ ID NO: 3462554 - DNA, 25 bp, Homo sapien
acttccatttgagggatgaggcccc

SEQ ID NO: 3462555 - DNA, 25 bp, Homo sapien
tgtcatcaactttgccgtggataaa

SEQ ID NO: 3462556 - DNA, 25 bp, Homo sapien
tgagattggggcacaatccctgcat

SEQ ID NO: 3462557 - DNA, 25 bp, Homo sapien
ccgtggataaagttgatgagattgg

SEQ ID NO: 3462558 - DNA, 25 bp, Homo sapien
actttgccgtggataaagttgatga

SEQ ID NO: 3462559 - DNA, 25 bp, Homo sapien
tttgtctcaatttcctcaccatcat

SEQ ID NO: 3462560 - DNA, 25 bp, Homo sapien
caaaagtttgtctcaatttcctcac

SEQ ID NO: 3462561 - DNA, 25 bp, Homo sapien
aagtttgtctcaatttcctcaccat

SEQ ID NO: 3462562 - DNA, 25 bp, Homo sapien
tcaaaagtttgtctcaatttcctca

SEQ ID NO: 3462563 - DNA, 25 bp, Homo sapien
tgagcaaggtgtaaacttaaataag

SEQ ID NO: 3462564 - DNA, 25 bp, Homo sapien
ctccttgagcaaggtgtaaacttaa

SEQ ID NO: 3462565 - DNA, 25 bp, Homo sapien
tcactccttgagcaaggtgtaaact

SEQ ID NO: 3462566 - DNA, 25 bp, Homo sapien
tatttcactccttgagcaaggtgta

SEQ ID NO: 3462567 - DNA, 25 bp, Homo sapien
aattttcccaataactgccttactg

SEQ ID NO: 3462568 - DNA, 25 bp, Homo sapien
gccttactgtgtttccatatcgcat

SEQ ID NO: 3462569 - DNA, 25 bp, Homo sapien
gatgtaaagcctgtataattttccc

SEQ ID NO: 3462570 - DNA, 25 bp, Homo sapien
caggtgcacatcaccttggatgtaa

SEQ ID NO: 3462571 - DNA, 25 bp, Homo sapien
caggtcagcacgtcaaaggttttga

SEQ ID NO: 3462572 - DNA, 25 bp, Homo sapien
cgtcaaaggttttgaaagccacact

SEQ ID NO: 3462573 - DNA, 25 bp, Homo sapien
cagcacgtcaaaggttttgaaagcc

SEQ ID NO: 3462574 - DNA, 25 bp, Homo sapien
gagccaggtcagcacgtcaaaggtt

SEQ ID NO: 3462575 - DNA, 25 bp, Homo sapien
ttaggggctaatgacctgatgcagt

SEQ ID NO: 3462576 - DNA, 25 bp, Homo sapien
gggctaatgacctgatgcagtttca

SEQ ID NO: 3462577 - DNA, 25 bp, Homo sapien
acctgatgcagtttcagtgcctctg

SEQ ID NO: 3462578 - DNA, 25 bp, Homo sapien
taatgacctgatgcagtttcagtgc

SEQ ID NO: 3462579 - DNA, 25 bp, Homo sapien
tttacagaggaacgctaaatctttc

SEQ ID NO: 3462580 - DNA, 25 bp, Homo sapien
cagaggaacgctaaatctttccttt

SEQ ID NO: 3462581 - DNA, 25 bp, Homo sapien
tacagaggaacgctaaatctttcct

SEQ ID NO: 3462582 - DNA, 25 bp, Homo sapien
tatttacagaggaacgctaaatctt

SEQ ID NO: 3462583 - DNA, 25 bp, Homo sapien
aacatcagtgatgaaatagcgcata

SEQ ID NO: 3462584 - DNA, 25 bp, Homo sapien
tatcctataagtcacatcacgtagg

SEQ ID NO: 3462585 - DNA, 25 bp, Homo sapien
tagtacccgtgtaaccaattcattg

SEQ ID NO: 3462586 - DNA, 25 bp, Homo sapien
ggctagttcctagtatcctataagt

SEQ ID NO: 3462587 - DNA, 25 bp, Homo sapien
tcctgaaatttctgcctcagataac

SEQ ID NO: 3462588 - DNA, 25 bp, Homo sapien
ctgtttgctatcatcaaatcctgaa

SEQ ID NO: 3462589 - DNA, 25 bp, Homo sapien
gaaatttctgcctcagataacttct

SEQ ID NO: 3462590 - DNA, 25 bp, Homo sapien
tgctatcatcaaatcctgaaatttc

SEQ ID NO: 3462591 - DNA, 25 bp, Homo sapien
tgttcattccataccatggctgcat

SEQ ID NO: 3462592 - DNA, 25 bp, Homo sapien
ctcgcctccattggctgggaagttc

SEQ ID NO: 3462593 - DNA, 25 bp, Homo sapien
ccttgttcattccataccatggctg

SEQ ID NO: 3462594 - DNA, 25 bp, Homo sapien
gtagcactcgcctccattggctggg

SEQ ID NO: 3462595 - DNA, 25 bp, Homo sapien
gccagaccaacatggtaaaactccg

SEQ ID NO: 3462596 - DNA, 25 bp, Homo sapien
cagaccaacatggtaaaactccgtc

SEQ ID NO: 3462597 - DNA, 25 bp, Homo sapien
cagccagaccaacatggtaaaactc

SEQ ID NO: 3462598 - DNA, 25 bp, Homo sapien
aatcacttgaacctgggaggcggag

SEQ ID NO: 3462599 - DNA, 25 bp, Homo sapien
ggaaaaaatgttagggacagctaga

SEQ ID NO: 3462600 - DNA, 25 bp, Homo sapien
aaatgttagggacagctagagagaa

SEQ ID NO: 3462601 - DNA, 25 bp, Homo sapien
atgttagggacagctagagagaaag

SEQ ID NO: 3462602 - DNA, 25 bp, Homo sapien
aaaaatgttagggacagctagagag

SEQ ID NO: 3462603 - DNA, 25 bp, Homo sapien
gagcttacaggattttttgagatta

SEQ ID NO: 3462604 - DNA, 25 bp, Homo sapien
tttaatgagcttacaggattttttg

SEQ ID NO: 3462605 - DNA, 25 bp, Homo sapien
taatgagcttacaggattttttgag

SEQ ID NO: 3462606 - DNA, 25 bp, Homo sapien
ttaatgagcttacaggattttttga

SEQ ID NO: 3462607 - DNA, 25 bp, Homo sapien
gtttttctgtagtgtaggcaatcaa

SEQ ID NO: 3462608 - DNA, 25 bp, Homo sapien
tatttctttgggcttatcgtctatg

SEQ ID NO: 3462609 - DNA, 25 bp, Homo sapien
ctgtagtgtaggcaatcaacaacat

SEQ ID NO: 3462610 - DNA, 25 bp, Homo sapien
gggcttatcgtctatgaattgtttt

SEQ ID NO: 3462611 - DNA, 25 bp, Homo sapien
atggtagcataagctgtaaaactgt

SEQ ID NO: 3462612 - DNA, 25 bp, Homo sapien
tggtagcataagctgtaaaactgta

SEQ ID NO: 3462613 - DNA, 25 bp, Homo sapien
agcatgtgcctcattgttcagaaga

SEQ ID NO: 3462614 - DNA, 25 bp, Homo sapien
cagaagattagctttaggtcctatt

SEQ ID NO: 3462615 - DNA, 25 bp, Homo sapien
aatgacaagtttgagacgattcagc

SEQ ID NO: 3462616 - DNA, 25 bp, Homo sapien
ggacatccctgatctacatatttaa

SEQ ID NO: 3462617 - DNA, 25 bp, Homo sapien
accagattgctgaagcatgtttgca

SEQ ID NO: 3462618 - DNA, 25 bp, Homo sapien
tgagcctctgtcagtataatattgc

SEQ ID NO: 3462619 - DNA, 25 bp, Homo sapien
tatgtttacttgtgatttagctttg

SEQ ID NO: 3462620 - DNA, 25 bp, Homo sapien
gtgatttagctttggagcaaattta

SEQ ID NO: 3462621 - DNA, 25 bp, Homo sapien
tagctttggagcaaatttaggtaag

SEQ ID NO: 3462622 - DNA, 25 bp, Homo sapien
taaatatgtttacttgtgatttagc

SEQ ID NO: 3462623 - DNA, 25 bp, Homo sapien
ctgagcagtggtatcttggccatgg

SEQ ID NO: 3462624 - DNA, 25 bp, Homo sapien
cttggccatggtcagagcgtcccat

SEQ ID NO: 3462625 - DNA, 25 bp, Homo sapien
atcttggccatggtcagagcgtccc

SEQ ID NO: 3462626 - DNA, 25 bp, Homo sapien
gagcagtggtatcttggccatggtc

SEQ ID NO: 3462627 - DNA, 25 bp, Homo sapien
tgagcaaggctctgacctcatcttt

SEQ ID NO: 3462628 - DNA, 25 bp, Homo sapien
gcaaggctctgacctcatctttcct

SEQ ID NO: 3462629 - DNA, 25 bp, Homo sapien
actactaatttgataattctaaggg

SEQ ID NO: 3462630 - DNA, 25 bp, Homo sapien
ggggaagagatgattcagtgggtct

SEQ ID NO: 3462631 - DNA, 25 bp, Homo sapien
ttaattccgagaggacagtgttacc

SEQ ID NO: 3462632 - DNA, 25 bp, Homo sapien
gagagctttagataacactttcctg

SEQ ID NO: 3462633 - DNA, 25 bp, Homo sapien
actttcctgtccactattactattg

SEQ ID NO: 3462634 - DNA, 25 bp, Homo sapien
tactattgttaggatcagaaatcct

SEQ ID NO: 3462635 - DNA, 25 bp, Homo sapien
catttagagggtggcatggaataaa

SEQ ID NO: 3462636 - DNA, 25 bp, Homo sapien
aggttgaagtttgcatttagagggt

SEQ ID NO: 3462637 - DNA, 25 bp, Homo sapien
tttgcatttagagggtggcatggaa

SEQ ID NO: 3462638 - DNA, 25 bp, Homo sapien
gaagtttgcatttagagggtggcat

SEQ ID NO: 3462639 - DNA, 25 bp, Homo sapien
ttgcagccaattatacagccgtaag

SEQ ID NO: 3462640 - DNA, 25 bp, Homo sapien
ccttgtcagtgaagcaggtcatctc

SEQ ID NO: 3462641 - DNA, 25 bp, Homo sapien
gctccaacatggctaaaaggtactg

SEQ ID NO: 3462642 - DNA, 25 bp, Homo sapien
aaggtactgttgtaaattgcagcca

SEQ ID NO: 3462643 - DNA, 25 bp, Homo sapien
ctccacctagaatgagcaagggggc

SEQ ID NO: 3462644 - DNA, 25 bp, Homo sapien
cacctagaatgagcaagggggcatt

SEQ ID NO: 3462645 - DNA, 25 bp, Homo sapien
ggagagcttcttgttcccatagcac

SEQ ID NO: 3462646 - DNA, 25 bp, Homo sapien
tgttcccatagcactgtctttcctc

SEQ ID NO: 3462647 - DNA, 25 bp, Homo sapien
gctccttggattcttatactggttg

SEQ ID NO: 3462648 - DNA, 25 bp, Homo sapien
tggttgcccatagaaactctctgag

SEQ ID NO: 3462649 - DNA, 25 bp, Homo sapien
gctttttgtgtctgccaagactgag

SEQ ID NO: 3462650 - DNA, 25 bp, Homo sapien
tatcagagctctaggattgtacggt

SEQ ID NO: 3462651 - DNA, 25 bp, Homo sapien
aattggtgtcaacttctcataatga

SEQ ID NO: 3462652 - DNA, 25 bp, Homo sapien
ttcgatgatgaagatcttgaaacat

SEQ ID NO: 3462653 - DNA, 25 bp, Homo sapien
ctcataatgagaagtatcggtagct

SEQ ID NO: 3462654 - DNA, 25 bp, Homo sapien
ggcctggctttagtactatcctcag

SEQ ID NO: 3462655 - DNA, 25 bp, Homo sapien
tatataatttgatccattggtgtct

SEQ ID NO: 3462656 - DNA, 25 bp, Homo sapien
gaagtaaactggttgtttgaaatga

SEQ ID NO: 3462657 - DNA, 25 bp, Homo sapien
agttatataatttgatccattggtg

SEQ ID NO: 3462658 - DNA, 25 bp, Homo sapien
agttttagtgataaagtcagttata

SEQ ID NO: 3462659 - DNA, 25 bp, Homo sapien
agtaagcacgttttatatccgtttg

SEQ ID NO: 3462660 - DNA, 25 bp, Homo sapien
tagtcaacactagatccaattatat

SEQ ID NO: 3462661 - DNA, 25 bp, Homo sapien
ccgtttggatcatcagattatagtc

SEQ ID NO: 3462662 - DNA, 25 bp, Homo sapien
gatccaattatattcagacccttac

SEQ ID NO: 3462663 - DNA, 25 bp, Homo sapien
cttcacactgtcaggtttccccaag

SEQ ID NO: 3462664 - DNA, 25 bp, Homo sapien
caggatgggcgccaaaatgttgccc

SEQ ID NO: 3462665 - DNA, 25 bp, Homo sapien
ggacagcaacgaagtgtcctcgttg

SEQ ID NO: 3462666 - DNA, 25 bp, Homo sapien
ccgagggccgaggataaggcgtttg

SEQ ID NO: 3462667 - DNA, 25 bp, Homo sapien
tgtcttgtcagagcagacgctgtcc

SEQ ID NO: 3462668 - DNA, 25 bp, Homo sapien
tcttgtcagagcagacgctgtcctc

SEQ ID NO: 3462669 - DNA, 25 bp, Homo sapien
tgctgtcttgtcagagcagacgctg

SEQ ID NO: 3462670 - DNA, 25 bp, Homo sapien
cttgtcagagcagacgctgtcctca

SEQ ID NO: 3462671 - DNA, 25 bp, Homo sapien
gcatatttggcgcaaagagccctga

SEQ ID NO: 3462672 - DNA, 25 bp, Homo sapien
aacagatcgcatatttggcgcaaag

SEQ ID NO: 3462673 - DNA, 25 bp, Homo sapien
tttggcgcaaagagccctgaggatg

SEQ ID NO: 3462674 - DNA, 25 bp, Homo sapien
ccgggccaggtgctaggtcgtttga

SEQ ID NO: 3462675 - DNA, 25 bp, Homo sapien
tgaagccgcacagctgaaaactcgc

SEQ ID NO: 3462676 - DNA, 25 bp, Homo sapien
cagctgaaaactcgcggcaagacat

SEQ ID NO: 3462677 - DNA, 25 bp, Homo sapien
tggtttgcaaagagataagctttgg

SEQ ID NO: 3462678 - DNA, 25 bp, Homo sapien
actggtttgcaaagagataagcttt

SEQ ID NO: 3462679 - DNA, 25 bp, Homo sapien
tatgctgattgatactgtgtagcag

SEQ ID NO: 3462680 - DNA, 25 bp, Homo sapien
tcagtaccaaagaagagaactagga

SEQ ID NO: 3462681 - DNA, 25 bp, Homo sapien
gaactaggaactccaatcctttatg

SEQ ID NO: 3462682 - DNA, 25 bp, Homo sapien
tgaagtttatttgccgttaccataa

SEQ ID NO: 3462683 - DNA, 25 bp, Homo sapien
ggaaggcacgcacaaacaatagtta

SEQ ID NO: 3462684 - DNA, 25 bp, Homo sapien
tatcaggatagagctctgctccagg

SEQ ID NO: 3462685 - DNA, 25 bp, Homo sapien
cagggaacgcttatgcaaatcttgc

SEQ ID NO: 3462686 - DNA, 25 bp, Homo sapien
gatttgaatttgacacacgtgactt

SEQ ID NO: 3462687 - DNA, 25 bp, Homo sapien
acggcagtcaagagtgcaaagaaga

SEQ ID NO: 3462688 - DNA, 25 bp, Homo sapien
ggagggtatgatgaaaaaatcgaga

SEQ ID NO: 3462689 - DNA, 25 bp, Homo sapien
aacggcagtcaagagtgcaaagaag

SEQ ID NO: 3462690 - DNA, 25 bp, Homo sapien
gatgaaaaaatcgagaacggcagtc

SEQ ID NO: 3462691 - DNA, 25 bp, Homo sapien
tctctactcctaatggaggagcctg

SEQ ID NO: 3462692 - DNA, 25 bp, Homo sapien
gaggagcctggttttcatcgtcagt

SEQ ID NO: 3462693 - DNA, 25 bp, Homo sapien
ctgttgggtgatctttctctactcc

SEQ ID NO: 3462694 - DNA, 25 bp, Homo sapien
tccactgtcgtcacttctaggcatt

SEQ ID NO: 3462695 - DNA, 25 bp, Homo sapien
acggtaatcatgtgagctgtcctga

SEQ ID NO: 3462696 - DNA, 25 bp, Homo sapien
tcttttggggagtaagcagagcatt

SEQ ID NO: 3462697 - DNA, 25 bp, Homo sapien
gagaccattcatgatctaagtgcct

SEQ ID NO: 3462698 - DNA, 25 bp, Homo sapien
taccctcacatccacggtaatcatg

SEQ ID NO: 3462699 - DNA, 25 bp, Homo sapien
ttgcctttaatgagatattcactta

SEQ ID NO: 3462700 - DNA, 25 bp, Homo sapien
tgcctttaatgagatattcacttag

SEQ ID NO: 3462701 - DNA, 25 bp, Homo sapien
catggccatggagcaatctgtttaa

SEQ ID NO: 3462702 - DNA, 25 bp, Homo sapien
ttaatttaccattgtccatgacaca

SEQ ID NO: 3462703 - DNA, 25 bp, Homo sapien
tcataggtatatagcttgcagtctt

SEQ ID NO: 3462704 - DNA, 25 bp, Homo sapien
taaattgtacttgccctcatgataa

SEQ ID NO: 3462705 - DNA, 25 bp, Homo sapien
gcacagcaaagcagtccgctaacat

SEQ ID NO: 3462706 - DNA, 25 bp, Homo sapien
gccagaaatactttaagcacagcaa

SEQ ID NO: 3462707 - DNA, 25 bp, Homo sapien
tattcacatggtcacctcttggcct

SEQ ID NO: 3462708 - DNA, 25 bp, Homo sapien
aaagcagtccgctaacatttgatgc

SEQ ID NO: 3462709 - DNA, 25 bp, Homo sapien
gtgtaaatggagataaccattcttc

SEQ ID NO: 3462710 - DNA, 25 bp, Homo sapien
actcagattggagataacctaacaa

SEQ ID NO: 3462711 - DNA, 25 bp, Homo sapien
cctaacaatctgagtgtaaatggag

SEQ ID NO: 3462712 - DNA, 25 bp, Homo sapien
tttccctttgtcaactcagattgga

SEQ ID NO: 3462713 - DNA, 25 bp, Homo sapien
gatagatcaaacatctgatccaaga

SEQ ID NO: 3462714 - DNA, 25 bp, Homo sapien
ggcagcaggagtcatgtgtccagat

SEQ ID NO: 3462715 - DNA, 25 bp, Homo sapien
gatactcccaggcactgttgtttag

SEQ ID NO: 3462716 - DNA, 25 bp, Homo sapien
tagaataagatagatcaaacatctg

SEQ ID NO: 3462717 - DNA, 25 bp, Homo sapien
tccacagtgcaatgaaccactcggg

SEQ ID NO: 3462718 - DNA, 25 bp, Homo sapien
agtgcaatgaaccactcgggctggg

SEQ ID NO: 3462719 - DNA, 25 bp, Homo sapien
cacagtgcaatgaaccactcgggct

SEQ ID NO: 3462720 - DNA, 25 bp, Homo sapien
gactccacagtgcaatgaaccactc

SEQ ID NO: 3462721 - DNA, 25 bp, Homo sapien
cagaactatagagcctttgctggac

SEQ ID NO: 3462722 - DNA, 25 bp, Homo sapien
gaactatagagcctttgctggacat

SEQ ID NO: 3462723 - DNA, 25 bp, Homo sapien
gcaggccagaactatagagcctttg

SEQ ID NO: 3462724 - DNA, 25 bp, Homo sapien
ctgcaggccagaactatagagcctt

SEQ ID NO: 3462725 - DNA, 25 bp, Homo sapien
ttcagccacacgaggatgcagaagg

SEQ ID NO: 3462726 - DNA, 25 bp, Homo sapien
gatgcagaaggtgtccaggctgcca

SEQ ID NO: 3462727 - DNA, 25 bp, Homo sapien
cttctggccaatgctggccaggtag

SEQ ID NO: 3462728 - DNA, 25 bp, Homo sapien
agccacacgaggatgcagaaggtgt

SEQ ID NO: 3462729 - DNA, 25 bp, Homo sapien
cctgttgacatcctcaattaacatc

SEQ ID NO: 3462730 - DNA, 25 bp, Homo sapien
ttgacatcctcaattaacatctttt

SEQ ID NO: 3462731 - DNA, 25 bp, Homo sapien
tgttgacatcctcaattaacatctt

SEQ ID NO: 3462732 - DNA, 25 bp, Homo sapien
ccctgttgacatcctcaattaacat

SEQ ID NO: 3462733 - DNA, 25 bp, Homo sapien
cccgtggtgccgtgggacacatatt

SEQ ID NO: 3462734 - DNA, 25 bp, Homo sapien
tatttggccccctcccgctgggcga

SEQ ID NO: 3462735 - DNA, 25 bp, Homo sapien
tgatcattcccctttcccgtggtgc

SEQ ID NO: 3462736 - DNA, 25 bp, Homo sapien
gtgccgtgggacacatatttggccc

SEQ ID NO: 3462737 - DNA, 25 bp, Homo sapien
agtagcaggtgagctcaaaccagac

SEQ ID NO: 3462738 - DNA, 25 bp, Homo sapien
gacctttatctgtgggggccagcga

SEQ ID NO: 3462739 - DNA, 25 bp, Homo sapien
acctttatctgtgggggccagcgag

SEQ ID NO: 3462740 - DNA, 25 bp, Homo sapien
aatgacctttatctgtgggggccag

SEQ ID NO: 3462741 - DNA, 25 bp, Homo sapien
ggtgggaatcccgcgttgctttgca

SEQ ID NO: 3462742 - DNA, 25 bp, Homo sapien
gaggcgcttggttctcgggattctc

SEQ ID NO: 3462743 - DNA, 25 bp, Homo sapien
gcgcttggttctcgggattctccag

SEQ ID NO: 3462744 - DNA, 25 bp, Homo sapien
gcatattccgtcaggtcactgtggc

SEQ ID NO: 3462745 - DNA, 25 bp, Homo sapien
tgggtggcactatccttgacgttgg

SEQ ID NO: 3462746 - DNA, 25 bp, Homo sapien
gggtggcactatccttgacgttggt

SEQ ID NO: 3462747 - DNA, 25 bp, Homo sapien
tggtgggtggcactatccttgacgt

SEQ ID NO: 3462748 - DNA, 25 bp, Homo sapien
actcagggctgtgccggaaagccag

SEQ ID NO: 3462749 - DNA, 25 bp, Homo sapien
ctcagggctgtgccggaaagccaga

SEQ ID NO: 3462750 - DNA, 25 bp, Homo sapien
agacacctgcactttcccttccact

SEQ ID NO: 3462751 - DNA, 25 bp, Homo sapien
cacctgcactttcccttccactcac

SEQ ID NO: 3462752 - DNA, 25 bp, Homo sapien
ctttaaggacagacacctgcacttt

SEQ ID NO: 3462753 - DNA, 25 bp, Homo sapien
cagacacctgcactttcccttccac

SEQ ID NO: 3462754 - DNA, 25 bp, Homo sapien
ccggctcctcgttgtagacagtggg

SEQ ID NO: 3462755 - DNA, 25 bp, Homo sapien
tcaccggctcctcgttgtagacagt

SEQ ID NO: 3462756 - DNA, 25 bp, Homo sapien
ctcgttgtagacagtggggcactcc

SEQ ID NO: 3462757 - DNA, 25 bp, Homo sapien
ggcactcccagccaaggatgtacac

SEQ ID NO: 3462758 - DNA, 25 bp, Homo sapien
tgatgaacccggtggcatcaattgg

SEQ ID NO: 3462759 - DNA, 25 bp, Homo sapien
cttgctctggagacgatgatattcc

SEQ ID NO: 3462760 - DNA, 25 bp, Homo sapien
aattggctcataatcaccctgcacg

SEQ ID NO: 3462761 - DNA, 25 bp, Homo sapien
gaacccggtggcatcaattggctca

SEQ ID NO: 3462762 - DNA, 25 bp, Homo sapien
gggagaactagtcacaagtacaaat

SEQ ID NO: 3462763 - DNA, 25 bp, Homo sapien
aacaattagcgcctttacttgggcg

SEQ ID NO: 3462764 - DNA, 25 bp, Homo sapien
tacttgggcgatctgcaaattgagg

SEQ ID NO: 3462765 - DNA, 25 bp, Homo sapien
cgatctgcaaattgaggaggcccca

SEQ ID NO: 3462766 - DNA, 25 bp, Homo sapien
tcattttacagctctccaccgcagc

SEQ ID NO: 3462767 - DNA, 25 bp, Homo sapien
cattttacagctctccaccgcagct

SEQ ID NO: 3462768 - DNA, 25 bp, Homo sapien
tcctttatacagagacttgctgccc

SEQ ID NO: 3462769 - DNA, 25 bp, Homo sapien
tgttgaaggcaaaactctgagggct

SEQ ID NO: 3462770 - DNA, 25 bp, Homo sapien
cttcttagaggccatgactgcagta

SEQ ID NO: 3462771 - DNA, 25 bp, Homo sapien
tatacaagtcccagtcaaaatgacc

SEQ ID NO: 3462772 - DNA, 25 bp, Homo sapien
cagaagagccattaggaacagtgac

SEQ ID NO: 3462773 - DNA, 25 bp, Homo sapien
tgagcatggagatacccctgctggg

SEQ ID NO: 3462774 - DNA, 25 bp, Homo sapien
gggcctaagccgctattctcataag

SEQ ID NO: 3462775 - DNA, 25 bp, Homo sapien
gctggttggctagagtttctcctga

SEQ ID NO: 3462776 - DNA, 25 bp, Homo sapien
cagggagctttgacagagttgttcc

SEQ ID NO: 3462777 - DNA, 25 bp, Homo sapien
ctcagggagctttgacagagttgtt

SEQ ID NO: 3462778 - DNA, 25 bp, Homo sapien
tcagggagctttgacagagttgttc

SEQ ID NO: 3462779 - DNA, 25 bp, Homo sapien
caaagagcacaagaactacttcaca

SEQ ID NO: 3462780 - DNA, 25 bp, Homo sapien
ttcccttgttccaaagagcacaaga

SEQ ID NO: 3462781 - DNA, 25 bp, Homo sapien
cacaatagaagcaccatggccaaga

SEQ ID NO: 3462782 - DNA, 25 bp, Homo sapien
ttttgtacagtccacaatagaagca

SEQ ID NO: 3462783 - DNA, 25 bp, Homo sapien
tgctttgaggatggccagactgcat

SEQ ID NO: 3462784 - DNA, 25 bp, Homo sapien
tgggctgtattctctgtggcttgct

SEQ ID NO: 3462785 - DNA, 25 bp, Homo sapien
ggtgggctgtattctctgtggcttg

SEQ ID NO: 3462786 - DNA, 25 bp, Homo sapien
gggctgtattctctgtggcttgctt

SEQ ID NO: 3462787 - DNA, 25 bp, Homo sapien
tgccctggccactgtgtgaattcct

SEQ ID NO: 3462788 - DNA, 25 bp, Homo sapien
tatcatcaggaatgccctggccact

SEQ ID NO: 3462789 - DNA, 25 bp, Homo sapien
tggtgacgtaatgctcaggatgcag

SEQ ID NO: 3462790 - DNA, 25 bp, Homo sapien
tgtgaattcctggtgacgtaatgct

SEQ ID NO: 3462791 - DNA, 25 bp, Homo sapien
tgttaaccaacttcatgctgcgatt

SEQ ID NO: 3462792 - DNA, 25 bp, Homo sapien
gtcttgcaggtgttgactgatcaaa

SEQ ID NO: 3462793 - DNA, 25 bp, Homo sapien
tcttgagagtcttgcaggtgttgac

SEQ ID NO: 3462794 - DNA, 25 bp, Homo sapien
ttcatgctgcgattggcttcttcac

SEQ ID NO: 3462795 - DNA, 25 bp, Homo sapien
acttctctcctacccctgaagtttg

SEQ ID NO: 3462796 - DNA, 25 bp, Homo sapien
tacccctgaagtttgctctttagga

SEQ ID NO: 3462797 - DNA, 25 bp, Homo sapien
cctgaagtttgctctttaggagagt

SEQ ID NO: 3462798 - DNA, 25 bp, Homo sapien
ctcctacccctgaagtttgctcttt

SEQ ID NO: 3462799 - DNA, 25 bp, Homo sapien
cactgtgtctggaggatgtgagctt

SEQ ID NO: 3462800 - DNA, 25 bp, Homo sapien
ggtgacaagtcggtttcccaggcaa

SEQ ID NO: 3462801 - DNA, 25 bp, Homo sapien
tagtgaagtagggataagaccagca

SEQ ID NO: 3462802 - DNA, 25 bp, Homo sapien
tttctagtcacgtttaaagcggcgc

SEQ ID NO: 3462803 - DNA, 25 bp, Homo sapien
agggagcttctcagctcccagccag

SEQ ID NO: 3462804 - DNA, 25 bp, Homo sapien
agaaatgattcggatgagtgttcct

SEQ ID NO: 3462805 - DNA, 25 bp, Homo sapien
tgagggagcttctcagctcccagcc

SEQ ID NO: 3462806 - DNA, 25 bp, Homo sapien
gattcggatgagtgttcctgataag

SEQ ID NO: 3462807 - DNA, 25 bp, Homo sapien
gcattgcttcctgtacttattgggt

SEQ ID NO: 3462808 - DNA, 25 bp, Homo sapien
gaactgtgctttagcttaggctgcc

SEQ ID NO: 3462809 - DNA, 25 bp, Homo sapien
gctagaagtctcatcaaggaaccag

SEQ ID NO: 3462810 - DNA, 25 bp, Homo sapien
acacgtgttattatctatccttttg

SEQ ID NO: 3462811 - DNA, 25 bp, Homo sapien
agtccttttgacttaatggtgcttc

SEQ ID NO: 3462812 - DNA, 25 bp, Homo sapien
gaagtccttttgacttaatggtgct

SEQ ID NO: 3462813 - DNA, 25 bp, Homo sapien
gtgaagtccttttgacttaatggtg

SEQ ID NO: 3462814 - DNA, 25 bp, Homo sapien
atgtgaagtccttttgacttaatgg

SEQ ID NO: 3462815 - DNA, 25 bp, Homo sapien
gaatgtgagtggaagccttttacct

SEQ ID NO: 3462816 - DNA, 25 bp, Homo sapien
tttccccttctgtggcatggtgcaa

SEQ ID NO: 3462817 - DNA, 25 bp, Homo sapien
ctgaaaaagcgtagcaaagactgac

SEQ ID NO: 3462818 - DNA, 25 bp, Homo sapien
aatggccgagtgactgggttctagc

SEQ ID NO: 3462819 - DNA, 25 bp, Homo sapien
ccctgaagctatcctgtaataagtg

SEQ ID NO: 3462820 - DNA, 25 bp, Homo sapien
tccagttgccaaaaggcaccttgcc

SEQ ID NO: 3462821 - DNA, 25 bp, Homo sapien
taggcctgccactagatccgttttt

SEQ ID NO: 3462822 - DNA, 25 bp, Homo sapien
cttgcttgctacaaaggcttatggt

SEQ ID NO: 3462823 - DNA, 25 bp, Homo sapien
tgtacatcgtatctccaggcttagt

SEQ ID NO: 3462824 - DNA, 25 bp, Homo sapien
tcagaattgctagtgatatgccctc

SEQ ID NO: 3462825 - DNA, 25 bp, Homo sapien
tcagagatctttgcccgaattcatt

SEQ ID NO: 3462826 - DNA, 25 bp, Homo sapien
cagttatttagacttgaccattgca

SEQ ID NO: 3462827 - DNA, 25 bp, Homo sapien
ggttgatgagcctgtgttcacttac

SEQ ID NO: 3462828 - DNA, 25 bp, Homo sapien
atgccttgggttgggtatattttat

SEQ ID NO: 3462829 - DNA, 25 bp, Homo sapien
gggtatattttattgctatgtcgtg

SEQ ID NO: 3462830 - DNA, 25 bp, Homo sapien
gctatgtcgtgagcttcaggtttac

SEQ ID NO: 3462831 - DNA, 25 bp, Homo sapien
tcttgggagtcaggatctcaacata

SEQ ID NO: 3462832 - DNA, 25 bp, Homo sapien
gagtgtagcatctgccttaggttca

SEQ ID NO: 3462833 - DNA, 25 bp, Homo sapien
tcgaggcgctggtagactttgtgtc

SEQ ID NO: 3462834 - DNA, 25 bp, Homo sapien
ggctgctataccaaaactaactggg

SEQ ID NO: 3462835 - DNA, 25 bp, Homo sapien
tgaaccaacaccatacaggcttgca

SEQ ID NO: 3462836 - DNA, 25 bp, Homo sapien
gcttgcagcactggcaccatggtgc

SEQ ID NO: 3462837 - DNA, 25 bp, Homo sapien
ccatggtgctttctggccgggtaga

SEQ ID NO: 3462838 - DNA, 25 bp, Homo sapien
tatacccacggcagtaagagcaatg

SEQ ID NO: 3462839 - DNA, 25 bp, Homo sapien
gaaattgccgctggcttcagaacaa

SEQ ID NO: 3462840 - DNA, 25 bp, Homo sapien
tttgatgccatagggcaccatcctg

SEQ ID NO: 3462841 - DNA, 25 bp, Homo sapien
tctacaccagagaggcaaacgatgt

SEQ ID NO: 3462842 - DNA, 25 bp, Homo sapien
cagctgaggcctagttttggaagtc

SEQ ID NO: 3462843 - DNA, 25 bp, Homo sapien
tcaaggagggcatgatgtacatact

SEQ ID NO: 3462844 - DNA, 25 bp, Homo sapien
gctgggtgctacagggtgaacaata

SEQ ID NO: 3462845 - DNA, 25 bp, Homo sapien
tattaccacgtagggcaatatctag

SEQ ID NO: 3462846 - DNA, 25 bp, Homo sapien
tttaggaggtaagacagcaaagtcg

SEQ ID NO: 3462847 - DNA, 25 bp, Homo sapien
cttccccaggcgctccggctacgcg

SEQ ID NO: 3462848 - DNA, 25 bp, Homo sapien
tctggcggcggtaggctcagcagct

SEQ ID NO: 3462849 - DNA, 25 bp, Homo sapien
gcgcggcggcgtggtcttcatctcc

SEQ ID NO: 3462850 - DNA, 25 bp, Homo sapien
aggcgctccggctacgcgctccgcg

SEQ ID NO: 3462851 - DNA, 25 bp, Homo sapien
gagaccgaagcccacaaggcaaggg

SEQ ID NO: 3462852 - DNA, 25 bp, Homo sapien
gatgctccaatattgaagtgcggag

SEQ ID NO: 3462853 - DNA, 25 bp, Homo sapien
tgaagtgcggagtttcccagcagtt

SEQ ID NO: 3462854 - DNA, 25 bp, Homo sapien
tccctggagaccgaagcccacaagg

SEQ ID NO: 3462855 - DNA, 25 bp, Homo sapien
tggatgcctgcccaaaattggtctc

SEQ ID NO: 3462856 - DNA, 25 bp, Homo sapien
gatgcagaacaatgcctggatgcct

SEQ ID NO: 3462857 - DNA, 25 bp, Homo sapien
gatagtaccaatctacggcccactg

SEQ ID NO: 3462858 - DNA, 25 bp, Homo sapien
caagccaccggcacaaaacgtatac

SEQ ID NO: 3462859 - DNA, 25 bp, Homo sapien
caccatattggcagcaccagttaag

SEQ ID NO: 3462860 - DNA, 25 bp, Homo sapien
ccaccatattggcagcaccagttaa

SEQ ID NO: 3462861 - DNA, 25 bp, Homo sapien
tccaccatattggcagcaccagtta

SEQ ID NO: 3462862 - DNA, 25 bp, Homo sapien
accatattggcagcaccagttaagg

SEQ ID NO: 3462863 - DNA, 25 bp, Homo sapien
ttactaacagccttgcagaagcagc

SEQ ID NO: 3462864 - DNA, 25 bp, Homo sapien
taggaagacgccctacaacctgttc

SEQ ID NO: 3462865 - DNA, 25 bp, Homo sapien
gaaccatttcgagtactgattgctg

SEQ ID NO: 3462866 - DNA, 25 bp, Homo sapien
tacgtatctatctcaccaaagctgg

SEQ ID NO: 3462867 - DNA, 25 bp, Homo sapien
tcgtggataagtgcctgggagctca

SEQ ID NO: 3462868 - DNA, 25 bp, Homo sapien
tatttttaggacttggacacaagcc

SEQ ID NO: 3462869 - DNA, 25 bp, Homo sapien
taatacaaccctcaacatggaaaag

SEQ ID NO: 3462870 - DNA, 25 bp, Homo sapien
gctagttacagagcagatgcaccta

SEQ ID NO: 3462871 - DNA, 25 bp, Homo sapien
tttctcttggaatggatgaaatgca

SEQ ID NO: 3462872 - DNA, 25 bp, Homo sapien
ggcacactctaacaatgcttcctaa

SEQ ID NO: 3462873 - DNA, 25 bp, Homo sapien
aaaatatggtagacgagttgagcag

SEQ ID NO: 3462874 - DNA, 25 bp, Homo sapien
agtatcctttcttatcccaacactt

SEQ ID NO: 3462875 - DNA, 25 bp, Homo sapien
gtaagtacatgcttggttgaaggca

SEQ ID NO: 3462876 - DNA, 25 bp, Homo sapien
cacaaagggtgggtgagtaagtaca

SEQ ID NO: 3462877 - DNA, 25 bp, Homo sapien
aaggcagcgtatgctctactccaag

SEQ ID NO: 3462878 - DNA, 25 bp, Homo sapien
cttggttgaaggcagcgtatgctct

SEQ ID NO: 3462879 - DNA, 25 bp, Homo sapien
ttccaaattccgggctgtgatgctt

SEQ ID NO: 3462880 - DNA, 25 bp, Homo sapien
tcaatatggttacatgtaagcctgg

SEQ ID NO: 3462881 - DNA, 25 bp, Homo sapien
gttcactcttcttctgcatagcatt

SEQ ID NO: 3462882 - DNA, 25 bp, Homo sapien
attctaacaatgaggcggccatgat

SEQ ID NO: 3462883 - DNA, 25 bp, Homo sapien
tagatagtgataggttgggttccaa

SEQ ID NO: 3462884 - DNA, 25 bp, Homo sapien
ttattttgggtattgttcctatatc

SEQ ID NO: 3462885 - DNA, 25 bp, Homo sapien
gatgctatatgaactgtcctcaagt

SEQ ID NO: 3462886 - DNA, 25 bp, Homo sapien
atatgaactgtcctcaagtaattgc

SEQ ID NO: 3462887 - DNA, 25 bp, Homo sapien
gactgtccagatgctatatgaactg

SEQ ID NO: 3462888 - DNA, 25 bp, Homo sapien
ggtgcccgtgttgactgtccagatg

SEQ ID NO: 3462889 - DNA, 25 bp, Homo sapien
gtacaatctgttatcctagctttag

SEQ ID NO: 3462890 - DNA, 25 bp, Homo sapien
agaacacataactaatagggatgtg

SEQ ID NO: 3462891 - DNA, 25 bp, Homo sapien
cacataactaatagggatgtgttgg

SEQ ID NO: 3462892 - DNA, 25 bp, Homo sapien
gttttaatgtacaatctgttatcct

SEQ ID NO: 3462893 - DNA, 25 bp, Homo sapien
cactagtgcttatggcaccagtcat

SEQ ID NO: 3462894 - DNA, 25 bp, Homo sapien
cagggtctacatctaacaaacttgg

SEQ ID NO: 3462895 - DNA, 25 bp, Homo sapien
tctaacaaacttggaccactagtgc

SEQ ID NO: 3462896 - DNA, 25 bp, Homo sapien
cccaaacagggtctacatctaacaa

SEQ ID NO: 3462897 - DNA, 25 bp, Homo sapien
aaacacagcacccttccaatagaac

SEQ ID NO: 3462898 - DNA, 25 bp, Homo sapien
aaacaaaacacagcacccttccaat

SEQ ID NO: 3462899 - DNA, 25 bp, Homo sapien
aacacagcacccttccaatagaact

SEQ ID NO: 3462900 - DNA, 25 bp, Homo sapien
caaaacacagcacccttccaataga

SEQ ID NO: 3462901 - DNA, 25 bp, Homo sapien
atacaggcatacctggatcaacatt

SEQ ID NO: 3462902 - DNA, 25 bp, Homo sapien
ggcagcgccacagaaatttacagta

SEQ ID NO: 3462903 - DNA, 25 bp, Homo sapien
aatacaggcatacctggatcaacat

SEQ ID NO: 3462904 - DNA, 25 bp, Homo sapien
agcgccacagaaatttacagtaaaa

SEQ ID NO: 3462905 - DNA, 25 bp, Homo sapien
ggttctagaagctcccggcttggta

SEQ ID NO: 3462906 - DNA, 25 bp, Homo sapien
gatccgttgtagttcacatcttcca

SEQ ID NO: 3462907 - DNA, 25 bp, Homo sapien
gctcccggcttggtattataacaga

SEQ ID NO: 3462908 - DNA, 25 bp, Homo sapien
gcttggtattataacagatccgttg

SEQ ID NO: 3462909 - DNA, 25 bp, Homo sapien
ttacttttagaatccctcagtgatg

SEQ ID NO: 3462910 - DNA, 25 bp, Homo sapien
cttacttttagaatccctcagtgat

SEQ ID NO: 3462911 - DNA, 25 bp, Homo sapien
tacttttagaatccctcagtgatgt

SEQ ID NO: 3462912 - DNA, 25 bp, Homo sapien
cttttagaatccctcagtgatgttt

SEQ ID NO: 3462913 - DNA, 25 bp, Homo sapien
gaacactcacagaagtctgcaacag

SEQ ID NO: 3462914 - DNA, 25 bp, Homo sapien
tagcgtcggggtgaacactcacaga

SEQ ID NO: 3462915 - DNA, 25 bp, Homo sapien
tgtggatttacgtcaggattaattt

SEQ ID NO: 3462916 - DNA, 25 bp, Homo sapien
ctatagttttttcaatagcgtcggg

SEQ ID NO: 3462917 - DNA, 25 bp, Homo sapien
tgactttcatcattacttgttacca

SEQ ID NO: 3462918 - DNA, 25 bp, Homo sapien
tgctccaaacgtacaggacagtcag

SEQ ID NO: 3462919 - DNA, 25 bp, Homo sapien
tacaggacagtcagacagcctagga

SEQ ID NO: 3462920 - DNA, 25 bp, Homo sapien
gtcagacagcctaggaatactgaac

SEQ ID NO: 3462921 - DNA, 25 bp, Homo sapien
ggcctctctacgcagtttttccaca

SEQ ID NO: 3462922 - DNA, 25 bp, Homo sapien
cacatctgcaataaggttcctgtac

SEQ ID NO: 3462923 - DNA, 25 bp, Homo sapien
gggattatcagaatcataggcctct

SEQ ID NO: 3462924 - DNA, 25 bp, Homo sapien
tgtacccaacgatttgcagaaggca

SEQ ID NO: 3462925 - DNA, 25 bp, Homo sapien
actgcttagaaatccgagattccag

SEQ ID NO: 3462926 - DNA, 25 bp, Homo sapien
ccgagattccagtggagtattgggc

SEQ ID NO: 3462927 - DNA, 25 bp, Homo sapien
gagtattgggcttcaagaatttcca

SEQ ID NO: 3462928 - DNA, 25 bp, Homo sapien
accaatttcacaccactgcttagaa

SEQ ID NO: 3462929 - DNA, 25 bp, Homo sapien
cagaagtcccattcctcgaaagtct

SEQ ID NO: 3462930 - DNA, 25 bp, Homo sapien
ccagaagtcccattcctcgaaagtc

SEQ ID NO: 3462931 - DNA, 25 bp, Homo sapien
tgcatttcggatgaagagagtcaga

SEQ ID NO: 3462932 - DNA, 25 bp, Homo sapien
gcatttcggatgaagagagtcagac

SEQ ID NO: 3462933 - DNA, 25 bp, Homo sapien
ctgcatttcggatgaagagagtcag

SEQ ID NO: 3462934 - DNA, 25 bp, Homo sapien
catttcggatgaagagagtcagaca

SEQ ID NO: 3462935 - DNA, 25 bp, Homo sapien
gatgtctgtagctcaattatccaac

SEQ ID NO: 3462936 - DNA, 25 bp, Homo sapien
tcattaatgatcaaacccctccttc

SEQ ID NO: 3462937 - DNA, 25 bp, Homo sapien
tttagtgaggtaactagatgtcgcc

SEQ ID NO: 3462938 - DNA, 25 bp, Homo sapien
cactttagtatagccatgggagaca

SEQ ID NO: 3462939 - DNA, 25 bp, Homo sapien
ccaattgccttatccatccttttct

SEQ ID NO: 3462940 - DNA, 25 bp, Homo sapien
ttcttctcccattctgctttgctga

SEQ ID NO: 3462941 - DNA, 25 bp, Homo sapien
aattgccttatccatccttttcttc

SEQ ID NO: 3462942 - DNA, 25 bp, Homo sapien
cttctcccattctgctttgctgaat

SEQ ID NO: 3462943 - DNA, 25 bp, Homo sapien
gggtttttagagctccgctgaccag

SEQ ID NO: 3462944 - DNA, 25 bp, Homo sapien
ggtcagttatattgatgcccacaat

SEQ ID NO: 3462945 - DNA, 25 bp, Homo sapien
gaccagtagattatatgccaggtca

SEQ ID NO: 3462946 - DNA, 25 bp, Homo sapien
gaaagtgagacaatgttggagcttc

SEQ ID NO: 3462947 - DNA, 25 bp, Homo sapien
catctgatgcttggattcccggagg

SEQ ID NO: 3462948 - DNA, 25 bp, Homo sapien
tttaggactagcctgcctttgggcc

SEQ ID NO: 3462949 - DNA, 25 bp, Homo sapien
cccaaatcgggaagtatcagtcacc

SEQ ID NO: 3462950 - DNA, 25 bp, Homo sapien
ccggaggcagcattcaggcttgaac

SEQ ID NO: 3462951 - DNA, 25 bp, Homo sapien
tctccctcacacgattaaattccat

SEQ ID NO: 3462952 - DNA, 25 bp, Homo sapien
cagctgtttgatgatcctcttgcgg

SEQ ID NO: 3462953 - DNA, 25 bp, Homo sapien
ggtcctcttcgatccaaaacttatg

SEQ ID NO: 3462954 - DNA, 25 bp, Homo sapien
tgggcacagcgccatgtctgggttc

SEQ ID NO: 3462955 - DNA, 25 bp, Homo sapien
tgtgtgcattcaatgcgtgagctgc

SEQ ID NO: 3462956 - DNA, 25 bp, Homo sapien
tatccattaaaaccggcgtgggcaa

SEQ ID NO: 3462957 - DNA, 25 bp, Homo sapien
caatgcgtgagctgcgacctaagca

SEQ ID NO: 3462958 - DNA, 25 bp, Homo sapien
gacctaagcagagatctaacaagac

SEQ ID NO: 3462959 - DNA, 25 bp, Homo sapien
taacactgcataatgccacaatatg

SEQ ID NO: 3462960 - DNA, 25 bp, Homo sapien
tgggtatcaaggcaagatgtaacac

SEQ ID NO: 3462961 - DNA, 25 bp, Homo sapien
gggatctcggaattatgaccaagag

SEQ ID NO: 3462962 - DNA, 25 bp, Homo sapien
tgagcagtcactggatgacagatac

SEQ ID NO: 3462963 - DNA, 25 bp, Homo sapien
tagtcagcacttagttccccaagca

SEQ ID NO: 3462964 - DNA, 25 bp, Homo sapien
ggtgtaacccagttccgcaagaggc

SEQ ID NO: 3462965 - DNA, 25 bp, Homo sapien
tatgcttggatcagaacagtgccag

SEQ ID NO: 3462966 - DNA, 25 bp, Homo sapien
gaatgaggtccaagcatgaacctgg

SEQ ID NO: 3462967 - DNA, 25 bp, Homo sapien
tagcttccggcctgagcttgccatc

SEQ ID NO: 3462968 - DNA, 25 bp, Homo sapien
taaatgccgtgtagcttccggcctg

SEQ ID NO: 3462969 - DNA, 25 bp, Homo sapien
gcttgccatcgcacaagtcctgcaa

SEQ ID NO: 3462970 - DNA, 25 bp, Homo sapien
ccttccacagagataaatgccgtgt

SEQ ID NO: 3462971 - DNA, 25 bp, Homo sapien
tggctactgtaggaagcgtcccatg

SEQ ID NO: 3462972 - DNA, 25 bp, Homo sapien
ggcaatgacaacagaacacgaagtc

SEQ ID NO: 3462973 - DNA, 25 bp, Homo sapien
tgcacctctgggcaatgacaacaga

SEQ ID NO: 3462974 - DNA, 25 bp, Homo sapien
gggtaggccaccctctgaggcccat

SEQ ID NO: 3462975 - DNA, 25 bp, Homo sapien
accatttttatcccatgctccctgc

SEQ ID NO: 3462976 - DNA, 25 bp, Homo sapien
tgtgctctttctcaccttagtgcct

SEQ ID NO: 3462977 - DNA, 25 bp, Homo sapien
caccatttttatcccatgctccctg

SEQ ID NO: 3462978 - DNA, 25 bp, Homo sapien
ttctgtgctctttctcaccttagtg

SEQ ID NO: 3462979 - DNA, 25 bp, Homo sapien
cacttagccatgtgttggtctccca

SEQ ID NO: 3462980 - DNA, 25 bp, Homo sapien
caaggactttggacccacttagcca

SEQ ID NO: 3462981 - DNA, 25 bp, Homo sapien
tgaccttggacaggacaccttttga

SEQ ID NO: 3462982 - DNA, 25 bp, Homo sapien
gatactgagaatggacacacctctg

SEQ ID NO: 3462983 - DNA, 25 bp, Homo sapien
tcatggcatatgatctggcgtttac

SEQ ID NO: 3462984 - DNA, 25 bp, Homo sapien
ttctcaacaggattccaaacgtggc

SEQ ID NO: 3462985 - DNA, 25 bp, Homo sapien
agttgagatatattcggacgtcgtc

SEQ ID NO: 3462986 - DNA, 25 bp, Homo sapien
ggacgtcgtcagctagaatctcaag

SEQ ID NO: 3462987 - DNA, 25 bp, Homo sapien
tcctgggattgactgagatgctccg

SEQ ID NO: 3462988 - DNA, 25 bp, Homo sapien
tcttatgtggctccttgtgaggtcc

SEQ ID NO: 3462989 - DNA, 25 bp, Homo sapien
aatggggataaacacccgggagctg

SEQ ID NO: 3462990 - DNA, 25 bp, Homo sapien
ctattgtcttgattacggttattct

SEQ ID NO: 3462991 - DNA, 25 bp, Homo sapien
gcacaagcccttgttgaaaccgaag

SEQ ID NO: 3462992 - DNA, 25 bp, Homo sapien
gagttagatgaagacctacagcagc

SEQ ID NO: 3462993 - DNA, 25 bp, Homo sapien
tcctggacctgactaaaaatagctg

SEQ ID NO: 3462994 - DNA, 25 bp, Homo sapien
tggttgatcccagtaggctatgtgc

SEQ ID NO: 3462995 - DNA, 25 bp, Homo sapien
tcatgctcgatactgtgaagtgctg

SEQ ID NO: 3462996 - DNA, 25 bp, Homo sapien
tgaagtgctgagagcttatcacctt

SEQ ID NO: 3462997 - DNA, 25 bp, Homo sapien
gtgagaaggccactgagacgatcat

SEQ ID NO: 3462998 - DNA, 25 bp, Homo sapien
aagtgctgagagcttatcaccttca

SEQ ID NO: 3462999 - DNA, 25 bp, Homo sapien
tcatttctctctgggcatgcgctca

SEQ ID NO: 3463000 - DNA, 25 bp, Homo sapien
catttctctctgggcatgcgctcac

SEQ ID NO: 3463001 - DNA, 25 bp, Homo sapien
gaagtgatggaggctcaacctccat

SEQ ID NO: 3463002 - DNA, 25 bp, Homo sapien
gatgtgaagtgatggaggctcaacc

SEQ ID NO: 3463003 - DNA, 25 bp, Homo sapien
tgtgaagtgatggaggctcaacctc

SEQ ID NO: 3463004 - DNA, 25 bp, Homo sapien
ctggacatcagcagggatgtgaagt

SEQ ID NO: 3463005 - DNA, 25 bp, Homo sapien
tcacatacggtctgtcattttcttg

SEQ ID NO: 3463006 - DNA, 25 bp, Homo sapien
ttttcttgctcttgagctctggcac

SEQ ID NO: 3463007 - DNA, 25 bp, Homo sapien
cttgctcttgagctctggcacttct

SEQ ID NO: 3463008 - DNA, 25 bp, Homo sapien
catacggtctgtcattttcttgctc

SEQ ID NO: 3463009 - DNA, 25 bp, Homo sapien
gagtagttcaagttactacagctct

SEQ ID NO: 3463010 - DNA, 25 bp, Homo sapien
cagtggtaggaagcctagcatgtac

SEQ ID NO: 3463011 - DNA, 25 bp, Homo sapien
gaacagctgtcagacttgctcagtg

SEQ ID NO: 3463012 - DNA, 25 bp, Homo sapien
cagagttgaacagttattaatgaac

SEQ ID NO: 3463013 - DNA, 25 bp, Homo sapien
catgggatttggttagcaaaatgca

SEQ ID NO: 3463014 - DNA, 25 bp, Homo sapien
gggatttggttagcaaaatgcagtt

SEQ ID NO: 3463015 - DNA, 25 bp, Homo sapien
tctcacatgggatttggttagcaaa

SEQ ID NO: 3463016 - DNA, 25 bp, Homo sapien
tggattttctcacatgggatttggt

SEQ ID NO: 3463017 - DNA, 25 bp, Homo sapien
ctggtgaagttgtaaaatatgaaat

SEQ ID NO: 3463018 - DNA, 25 bp, Homo sapien
agttgtaaaatatgaaatgacactc

SEQ ID NO: 3463019 - DNA, 25 bp, Homo sapien
gtgaagttgtaaaatatgaaatgac

SEQ ID NO: 3463020 - DNA, 25 bp, Homo sapien
ttgtaaaatatgaaatgacactcat

SEQ ID NO: 3463021 - DNA, 25 bp, Homo sapien
gaacagcggctacttccgattccga

SEQ ID NO: 3463022 - DNA, 25 bp, Homo sapien
ggctgtctcttctaactgaactgta

SEQ ID NO: 3463023 - DNA, 25 bp, Homo sapien
ctctggcatttgaagtactaacgca

SEQ ID NO: 3463024 - DNA, 25 bp, Homo sapien
ctgaactgtagagatgccacggaaa

SEQ ID NO: 3463025 - DNA, 25 bp, Homo sapien
gcaccacttccgttgcaacagagga

SEQ ID NO: 3463026 - DNA, 25 bp, Homo sapien
tcttctggatgcctgtatgagacac

SEQ ID NO: 3463027 - DNA, 25 bp, Homo sapien
ggaaactgtacactagatggcggtg

SEQ ID NO: 3463028 - DNA, 25 bp, Homo sapien
ttgccctctatgaataaaccgcttg

SEQ ID NO: 3463029 - DNA, 25 bp, Homo sapien
acttcttccattccacctacaccat

SEQ ID NO: 3463030 - DNA, 25 bp, Homo sapien
gtctggttgattgcttggacttctt

SEQ ID NO: 3463031 - DNA, 25 bp, Homo sapien
tctggttgattgcttggacttcttc

SEQ ID NO: 3463032 - DNA, 25 bp, Homo sapien
ctacaccatttgcttgtacccacat

SEQ ID NO: 3463033 - DNA, 25 bp, Homo sapien
caaccaacaaaatgccactttcaga

SEQ ID NO: 3463034 - DNA, 25 bp, Homo sapien
gacaatgctattactacttcttatc

SEQ ID NO: 3463035 - DNA, 25 bp, Homo sapien
ctgtaatgccctgtgatttttatga

SEQ ID NO: 3463036 - DNA, 25 bp, Homo sapien
caaagtgttaatatgtgtcatcagt

SEQ ID NO: 3463037 - DNA, 25 bp, Homo sapien
taaaaacttctcacgacctcctgga

SEQ ID NO: 3463038 - DNA, 25 bp, Homo sapien
tgctctcggagcctgtgacactggc

SEQ ID NO: 3463039 - DNA, 25 bp, Homo sapien
atgtgctccacagtttcagtcccag

SEQ ID NO: 3463040 - DNA, 25 bp, Homo sapien
tttctcaccaaagagtatgcctggg

SEQ ID NO: 3463041 - DNA, 25 bp, Homo sapien
gattacaaaagcatgtggccccacg

SEQ ID NO: 3463042 - DNA, 25 bp, Homo sapien
tggagtgcagtaaacctaggaacct

SEQ ID NO: 3463043 - DNA, 25 bp, Homo sapien
gtgggtcagcccttgaaaagtcctg

SEQ ID NO: 3463044 - DNA, 25 bp, Homo sapien
cctggattcaagtgttagtagctgg

SEQ ID NO: 3463045 - DNA, 25 bp, Homo sapien
taattatattgtgctgcctcggagc

SEQ ID NO: 3463046 - DNA, 25 bp, Homo sapien
tgtagtcaacatccacgtggcaagc

SEQ ID NO: 3463047 - DNA, 25 bp, Homo sapien
caagcggtgattaagagcaatggac

SEQ ID NO: 3463048 - DNA, 25 bp, Homo sapien
tgtcctggcagggtgcatagcaagc

SEQ ID NO: 3463049 - DNA, 25 bp, Homo sapien
aaaagaaggttcacatgactaaagg

SEQ ID NO: 3463050 - DNA, 25 bp, Homo sapien
gaagtcatggaatgttagagtcgga

SEQ ID NO: 3463051 - DNA, 25 bp, Homo sapien
tcccggccaccaagaatacattttg

SEQ ID NO: 3463052 - DNA, 25 bp, Homo sapien
tatattttgacttggagagtgactg

SEQ ID NO: 3463053 - DNA, 25 bp, Homo sapien
ggaatctaccctctgagaatctgat

SEQ ID NO: 3463054 - DNA, 25 bp, Homo sapien
aatttagtggtttgccgtcctgatc

SEQ ID NO: 3463055 - DNA, 25 bp, Homo sapien
gacaacatgcaacctagcagcacag

SEQ ID NO: 3463056 - DNA, 25 bp, Homo sapien
taatgcatcttatcggtcacttgga

SEQ ID NO: 3463057 - DNA, 25 bp, Homo sapien
cttttcagccctcctggagctcctc

SEQ ID NO: 3463058 - DNA, 25 bp, Homo sapien
cctctgtgtcttttggagtgtgtcc

SEQ ID NO: 3463059 - DNA, 25 bp, Homo sapien
ctcctggagctcctctgtgtctttt

SEQ ID NO: 3463060 - DNA, 25 bp, Homo sapien
tctgtgtcttttggagtgtgtccat

SEQ ID NO: 3463061 - DNA, 25 bp, Homo sapien
ttacagaatcatggagggttacgct

SEQ ID NO: 3463062 - DNA, 25 bp, Homo sapien
gttacgctgccaaaccacagagaga

SEQ ID NO: 3463063 - DNA, 25 bp, Homo sapien
aggagccaggagtccaaaccacagc

SEQ ID NO: 3463064 - DNA, 25 bp, Homo sapien
tctgtgtaagcctttgtgcattgcg

SEQ ID NO: 3463065 - DNA, 25 bp, Homo sapien
taaacagattgctctatacacattg

SEQ ID NO: 3463066 - DNA, 25 bp, Homo sapien
cacctgagactgacaaaattttggg

SEQ ID NO: 3463067 - DNA, 25 bp, Homo sapien
cggatttaaagatcccacctgagac

SEQ ID NO: 3463068 - DNA, 25 bp, Homo sapien
cccggccggccttagtgtacttctg

SEQ ID NO: 3463069 - DNA, 25 bp, Homo sapien
ggtgatctgcccacttcggcctccc

SEQ ID NO: 3463070 - DNA, 25 bp, Homo sapien
agtagctgggattagcccagctaat

SEQ ID NO: 3463071 - DNA, 25 bp, Homo sapien
tgatctgcccacttcggcctcccaa

SEQ ID NO: 3463072 - DNA, 25 bp, Homo sapien
atctgcccacttcggcctcccaaag

SEQ ID NO: 3463073 - DNA, 25 bp, Homo sapien
gtggtttgcaaaccggaggagctct

SEQ ID NO: 3463074 - DNA, 25 bp, Homo sapien
tagtggtttgcaaaccggaggagct

SEQ ID NO: 3463075 - DNA, 25 bp, Homo sapien
ctggaggttccttagggttcaccat

SEQ ID NO: 3463076 - DNA, 25 bp, Homo sapien
cctagtggtttgcaaaccggaggag

SEQ ID NO: 3463077 - DNA, 25 bp, Homo sapien
tcatgacaatcctacaaaaataggt

SEQ ID NO: 3463078 - DNA, 25 bp, Homo sapien
tgtttctaaaatccagagctgcttt

SEQ ID NO: 3463079 - DNA, 25 bp, Homo sapien
aatgagaattcgctgtgtatcaggc

SEQ ID NO: 3463080 - DNA, 25 bp, Homo sapien
gagtgatgcctaataaaacgaaaga

SEQ ID NO: 3463081 - DNA, 25 bp, Homo sapien
ccgtggtccatccaccagtgttaga

SEQ ID NO: 3463082 - DNA, 25 bp, Homo sapien
tattctgtggttccgtggtccatcc

SEQ ID NO: 3463083 - DNA, 25 bp, Homo sapien
agtgttagacaaccagacagcttcc

SEQ ID NO: 3463084 - DNA, 25 bp, Homo sapien
tgtgatgaccactctcatacatgtc

SEQ ID NO: 3463085 - DNA, 25 bp, Homo sapien
gctcaacacgcacaccaggtatggt

SEQ ID NO: 3463086 - DNA, 25 bp, Homo sapien
tatggtgcgcttcacctggcgtcgg

SEQ ID NO: 3463087 - DNA, 25 bp, Homo sapien
ggcactattaagtcggtcctctggg

SEQ ID NO: 3463088 - DNA, 25 bp, Homo sapien
tatgctctgtgcgaagtagggacaa

SEQ ID NO: 3463089 - DNA, 25 bp, Homo sapien
cggcggcggagaagcctcatgcgtg

SEQ ID NO: 3463090 - DNA, 25 bp, Homo sapien
cggagaagcctcatgcgtgcgacct

SEQ ID NO: 3463091 - DNA, 25 bp, Homo sapien
cggcggcggcggagaagcctcatgc

SEQ ID NO: 3463092 - DNA, 25 bp, Homo sapien
gcggagaagcctcatgcgtgcgacc

SEQ ID NO: 3463093 - DNA, 25 bp, Homo sapien
agccggtcgtaatcctcctcgatgc

SEQ ID NO: 3463094 - DNA, 25 bp, Homo sapien
tgttgagccggtcgtaatcctcctc

SEQ ID NO: 3463095 - DNA, 25 bp, Homo sapien
gagccggtcgtaatcctcctcgatg

SEQ ID NO: 3463096 - DNA, 25 bp, Homo sapien
ttgagccggtcgtaatcctcctcga

SEQ ID NO: 3463097 - DNA, 25 bp, Homo sapien
taggcaatgacgtcttcattgtttt

SEQ ID NO: 3463098 - DNA, 25 bp, Homo sapien
ggcaatgacgtcttcattgttttct

SEQ ID NO: 3463099 - DNA, 25 bp, Homo sapien
tcattgttttctccattcagctcac

SEQ ID NO: 3463100 - DNA, 25 bp, Homo sapien
tctaggcaatgacgtcttcattgtt

SEQ ID NO: 3463101 - DNA, 25 bp, Homo sapien
gatggccacagccacaccggcaggt

SEQ ID NO: 3463102 - DNA, 25 bp, Homo sapien
gagatggccacagccacaccggcag

SEQ ID NO: 3463103 - DNA, 25 bp, Homo sapien
ctggggcaacagagatggccacagc

SEQ ID NO: 3463104 - DNA, 25 bp, Homo sapien
ggggcaacagagatggccacagcca

SEQ ID NO: 3463105 - DNA, 25 bp, Homo sapien
tcatcgtccgactcctcagactcct

SEQ ID NO: 3463106 - DNA, 25 bp, Homo sapien
tgtcatcgtccgactcctcagactc

SEQ ID NO: 3463107 - DNA, 25 bp, Homo sapien
catgtcatcgtccgactcctcagac

SEQ ID NO: 3463108 - DNA, 25 bp, Homo sapien
tcccatgtcatcgtccgactcctca

SEQ ID NO: 3463109 - DNA, 25 bp, Homo sapien
tgtgtaaaaaggctttatttgcagg

SEQ ID NO: 3463110 - DNA, 25 bp, Homo sapien
gcggagggtctcctcacctcccaga

SEQ ID NO: 3463111 - DNA, 25 bp, Homo sapien
ggagggtctcctcacctcccagacg

SEQ ID NO: 3463112 - DNA, 25 bp, Homo sapien
caaacggggtggctgccgggcggag

SEQ ID NO: 3463113 - DNA, 25 bp, Homo sapien
gggcggagggtctcctcacctccca

SEQ ID NO: 3463114 - DNA, 25 bp, Homo sapien
ccacgttgtcctgttgtcgatggcc

SEQ ID NO: 3463115 - DNA, 25 bp, Homo sapien
ctggagttgcgccacctagcggctg

SEQ ID NO: 3463116 - DNA, 25 bp, Homo sapien
catccagccccttgtgtgtgtgcct

SEQ ID NO: 3463117 - DNA, 25 bp, Homo sapien
ttgtcgatggcctgtcagtgtctgc

SEQ ID NO: 3463118 - DNA, 25 bp, Homo sapien
ctcttcatgcagtcttccctctgag

SEQ ID NO: 3463119 - DNA, 25 bp, Homo sapien
tgttccatgccccttgcctggcttc

SEQ ID NO: 3463120 - DNA, 25 bp, Homo sapien
tgtatcactcaatcctctacctcca

SEQ ID NO: 3463121 - DNA, 25 bp, Homo sapien
ttcatgcagtcttccctctgagcat

SEQ ID NO: 3463122 - DNA, 25 bp, Homo sapien
tcacgtgccccgctggctcccgggc

SEQ ID NO: 3463123 - DNA, 25 bp, Homo sapien
ctcacgtgccccgctggctcccggg

SEQ ID NO: 3463124 - DNA, 25 bp, Homo sapien
tgccccgctggctcccgggccgccc

SEQ ID NO: 3463125 - DNA, 25 bp, Homo sapien
cacgtgccccgctggctcccgggcc

SEQ ID NO: 3463126 - DNA, 25 bp, Homo sapien
gtggagtccccgatcacgatgaggc

SEQ ID NO: 3463127 - DNA, 25 bp, Homo sapien
gaactggtagatccagatggtctcc

SEQ ID NO: 3463128 - DNA, 25 bp, Homo sapien
agaagaagtccacgccgacggtggg

SEQ ID NO: 3463129 - DNA, 25 bp, Homo sapien
tgtagcttgatcctcttgcccggct

SEQ ID NO: 3463130 - DNA, 25 bp, Homo sapien
gaaaaggggcgcctgcttggaggag

SEQ ID NO: 3463131 - DNA, 25 bp, Homo sapien
gcagccagggaagccgagtttggga

SEQ ID NO: 3463132 - DNA, 25 bp, Homo sapien
tcacgaatctgggaaccctccctcg

SEQ ID NO: 3463133 - DNA, 25 bp, Homo sapien
tggtcgggtcatgctgtgcgcagcc

SEQ ID NO: 3463134 - DNA, 25 bp, Homo sapien
taaaaatccaccaactgagttgcgg

SEQ ID NO: 3463135 - DNA, 25 bp, Homo sapien
gtcccactagcagaaatacaatccg

SEQ ID NO: 3463136 - DNA, 25 bp, Homo sapien
cacatgttcaaaagatcgtcggtta

SEQ ID NO: 3463137 - DNA, 25 bp, Homo sapien
cccttgtaacttgacgttgtgaagc

SEQ ID NO: 3463138 - DNA, 25 bp, Homo sapien
cagcagaagcattctttcctgggct

SEQ ID NO: 3463139 - DNA, 25 bp, Homo sapien
agaagcattctttcctgggctttac

SEQ ID NO: 3463140 - DNA, 25 bp, Homo sapien
gcagaagcattctttcctgggcttt

SEQ ID NO: 3463141 - DNA, 25 bp, Homo sapien
tcagcagaagcattctttcctgggc

SEQ ID NO: 3463142 - DNA, 25 bp, Homo sapien
taaggtcagcgtatgctaacaaagt

SEQ ID NO: 3463143 - DNA, 25 bp, Homo sapien
gacatatctggacactaaggtcagc

SEQ ID NO: 3463144 - DNA, 25 bp, Homo sapien
tatcctgaactgacacccaatctgt

SEQ ID NO: 3463145 - DNA, 25 bp, Homo sapien
tacgtcctagtcgatacttctgaga

SEQ ID NO: 3463146 - DNA, 25 bp, Homo sapien
ctgaggtaaggtactgacaatcacc

SEQ ID NO: 3463147 - DNA, 25 bp, Homo sapien
ttgtctaaatacgaacagtacaccg

SEQ ID NO: 3463148 - DNA, 25 bp, Homo sapien
tgctgatagtccaggcacggcagct

SEQ ID NO: 3463149 - DNA, 25 bp, Homo sapien
cgtaacagcaaaacatgtgctgctg

SEQ ID NO: 3463150 - DNA, 25 bp, Homo sapien
cattagtattataaagggtgtccac

SEQ ID NO: 3463151 - DNA, 25 bp, Homo sapien
gtatgagacctataccctgggcaac

SEQ ID NO: 3463152 - DNA, 25 bp, Homo sapien
gacttgtgccctggcgtatgagacc

SEQ ID NO: 3463153 - DNA, 25 bp, Homo sapien
ttaagtctgcaggaacgtccctctc

SEQ ID NO: 3463154 - DNA, 25 bp, Homo sapien
ctttagtcttgcgagttcttttcac

SEQ ID NO: 3463155 - DNA, 25 bp, Homo sapien
tgaggctcccacgacctatcactgt

SEQ ID NO: 3463156 - DNA, 25 bp, Homo sapien
tcctttgcatgtccaagtgaaatct

SEQ ID NO: 3463157 - DNA, 25 bp, Homo sapien
cttttcactgtgtgagacctaaaga

SEQ ID NO: 3463158 - DNA, 25 bp, Homo sapien
tgaaaccaagtatgtggaacccaca

SEQ ID NO: 3463159 - DNA, 25 bp, Homo sapien
cagcagttcattaaggttcagatca

SEQ ID NO: 3463160 - DNA, 25 bp, Homo sapien
gatcaagtgaagatcagtagctcag

SEQ ID NO: 3463161 - DNA, 25 bp, Homo sapien
tcattagcagtatagaaacaccagg

SEQ ID NO: 3463162 - DNA, 25 bp, Homo sapien
cacatcctcttgacctatttctgat

SEQ ID NO: 3463163 - DNA, 25 bp, Homo sapien
gctttcggtgttcagtcacatcctc

SEQ ID NO: 3463164 - DNA, 25 bp, Homo sapien
tgttcagtcacatcctcttgaccta

SEQ ID NO: 3463165 - DNA, 25 bp, Homo sapien
cagacgctttcggtgttcagtcaca

SEQ ID NO: 3463166 - DNA, 25 bp, Homo sapien
aatttagctcggcttaggccccgca

SEQ ID NO: 3463167 - DNA, 25 bp, Homo sapien
gccacgtcacgtgacgcgagggcgg

SEQ ID NO: 3463168 - DNA, 25 bp, Homo sapien
gaggccgggaccgtgccctctgctg

SEQ ID NO: 3463169 - DNA, 25 bp, Homo sapien
tgttaagggaggtgcattgtcctga

SEQ ID NO: 3463170 - DNA, 25 bp, Homo sapien
aagaggaagcatcgactccacgagc

SEQ ID NO: 3463171 - DNA, 25 bp, Homo sapien
gattagcctttgtggttgcacccgc

SEQ ID NO: 3463172 - DNA, 25 bp, Homo sapien
gagccgacctgacttggaagaggaa

SEQ ID NO: 3463173 - DNA, 25 bp, Homo sapien
tcaggaagaccggaacggcgaatgc

SEQ ID NO: 3463174 - DNA, 25 bp, Homo sapien
acgacgcgagaattcgtggcgctcc

SEQ ID NO: 3463175 - DNA, 25 bp, Homo sapien
cgtcggcccgcaccagggtgtggtg

SEQ ID NO: 3463176 - DNA, 25 bp, Homo sapien
gttctttaacttggactctcgcgag

SEQ ID NO: 3463177 - DNA, 25 bp, Homo sapien
gccaggccttgaccggaggccggag

SEQ ID NO: 3463178 - DNA, 25 bp, Homo sapien
aacctgagccgtgcctttcccaaag

SEQ ID NO: 3463179 - DNA, 25 bp, Homo sapien
gggagcgaccaccagagcctgtcga

SEQ ID NO: 3463180 - DNA, 25 bp, Homo sapien
acacttcgcagctgaacctgagccg

SEQ ID NO: 3463181 - DNA, 25 bp, Homo sapien
gcgttccggtactcgccggctgcca

SEQ ID NO: 3463182 - DNA, 25 bp, Homo sapien
acgaccattcatctcccgctcccgg

SEQ ID NO: 3463183 - DNA, 25 bp, Homo sapien
ttgaaagcatcgctcctcgccagcg

SEQ ID NO: 3463184 - DNA, 25 bp, Homo sapien
tcccttgaaagcatcgctcctcgcc

SEQ ID NO: 3463185 - DNA, 25 bp, Homo sapien
cgcacgaccattcatctcccgctcc

SEQ ID NO: 3463186 - DNA, 25 bp, Homo sapien
ttccttacagagcatatgaggcatc

SEQ ID NO: 3463187 - DNA, 25 bp, Homo sapien
gcaaatggctcttactgacaactgg

SEQ ID NO: 3463188 - DNA, 25 bp, Homo sapien
tggtgttgcacctgtgggaggatga

SEQ ID NO: 3463189 - DNA, 25 bp, Homo sapien
gacaactgggttcaccaggacacta

SEQ ID NO: 3463190 - DNA, 25 bp, Homo sapien
cactggaaagtcttcgggaacgcta

SEQ ID NO: 3463191 - DNA, 25 bp, Homo sapien
ggtggtggatccctcatgtacagat

SEQ ID NO: 3463192 - DNA, 25 bp, Homo sapien
ggatgtttgtccaccaagcctcatg

SEQ ID NO: 3463193 - DNA, 25 bp, Homo sapien
atccccaatgttgtaagtgggccta

SEQ ID NO: 3463194 - DNA, 25 bp, Homo sapien
ggcggaaacatcactacgtaaaaga

SEQ ID NO: 3463195 - DNA, 25 bp, Homo sapien
aacatcactacgtaaaagacatttc

SEQ ID NO: 3463196 - DNA, 25 bp, Homo sapien
aaacatcactacgtaaaagacattt

SEQ ID NO: 3463197 - DNA, 25 bp, Homo sapien
cggaaacatcactacgtaaaagaca

SEQ ID NO: 3463198 - DNA, 25 bp, Homo sapien
tctgactgttacatgttaggtgctg

SEQ ID NO: 3463199 - DNA, 25 bp, Homo sapien
cctatgtgttcagtgatattattcc

SEQ ID NO: 3463200 - DNA, 25 bp, Homo sapien
cagcgtagatgtgtaaatcactgaa

SEQ ID NO: 3463201 - DNA, 25 bp, Homo sapien
ttaggtgctgtactgttccaaacac

SEQ ID NO: 3463202 - DNA, 25 bp, Homo sapien
atttccacgaatggtttgaatatct

SEQ ID NO: 3463203 - DNA, 25 bp, Homo sapien
cactaattggggattataaaggcca

SEQ ID NO: 3463204 - DNA, 25 bp, Homo sapien
aaaggccaacaaattttgtaatgtg

SEQ ID NO: 3463205 - DNA, 25 bp, Homo sapien
aggccaacaaattttgtaatgtggt

SEQ ID NO: 3463206 - DNA, 25 bp, Homo sapien
aaggccaacaaattttgtaatgtgg

SEQ ID NO: 3463207 - DNA, 25 bp, Homo sapien
aatcccatttgtcttcaaactgaag

SEQ ID NO: 3463208 - DNA, 25 bp, Homo sapien
tgtaacagattcctggcgtaaaagc

SEQ ID NO: 3463209 - DNA, 25 bp, Homo sapien
taaaagcttcaaaacaatcgggcgc

SEQ ID NO: 3463210 - DNA, 25 bp, Homo sapien
caatcgggcgcataaaatcccattt

SEQ ID NO: 3463211 - DNA, 25 bp, Homo sapien
actgatgttttctaggctacccact

SEQ ID NO: 3463212 - DNA, 25 bp, Homo sapien
gctacccactagataaatgatcagg

SEQ ID NO: 3463213 - DNA, 25 bp, Homo sapien
catgcaggtctggatgattgagaag

SEQ ID NO: 3463214 - DNA, 25 bp, Homo sapien
cacacacctcagtaagtcagtctgg

SEQ ID NO: 3463215 - DNA, 25 bp, Homo sapien
gggactatccaaaatcaagctgctg

SEQ ID NO: 3463216 - DNA, 25 bp, Homo sapien
tcctcctgtggagccagaaactatg

SEQ ID NO: 3463217 - DNA, 25 bp, Homo sapien
tggtggttcctaccaaaagctgtag

SEQ ID NO: 3463218 - DNA, 25 bp, Homo sapien
catcatggattctggctggaccacc

SEQ ID NO: 3463219 - DNA, 25 bp, Homo sapien
cctgatgaatttttgctgggccttt

SEQ ID NO: 3463220 - DNA, 25 bp, Homo sapien
tttaaagcctgatgaatttttgctg

SEQ ID NO: 3463221 - DNA, 25 bp, Homo sapien
tttgctgggcctttatcatcccaaa

SEQ ID NO: 3463222 - DNA, 25 bp, Homo sapien
gctgggcctttatcatcccaaagac

SEQ ID NO: 3463223 - DNA, 25 bp, Homo sapien
gaaaacgtggtacatttcccaatgc

SEQ ID NO: 3463224 - DNA, 25 bp, Homo sapien
gaaactgtatctctaaattagttct

SEQ ID NO: 3463225 - DNA, 25 bp, Homo sapien
ttcccaatgcaagtagaaactgtat

SEQ ID NO: 3463226 - DNA, 25 bp, Homo sapien
ggtacatttcccaatgcaagtagaa

SEQ ID NO: 3463227 - DNA, 25 bp, Homo sapien
tgcatattgcctttcaaccatctgg

SEQ ID NO: 3463228 - DNA, 25 bp, Homo sapien
caactgaagattgcctaagtaaaat

SEQ ID NO: 3463229 - DNA, 25 bp, Homo sapien
cctaacaaggtatgttcaactgaag

SEQ ID NO: 3463230 - DNA, 25 bp, Homo sapien
gcctttcaaccatctgggagatttg

SEQ ID NO: 3463231 - DNA, 25 bp, Homo sapien
acggataaacaatatatgggccagg

SEQ ID NO: 3463232 - DNA, 25 bp, Homo sapien
agctgaaatacggataaacaatata

SEQ ID NO: 3463233 - DNA, 25 bp, Homo sapien
gaaatacggataaacaatatatggg

SEQ ID NO: 3463234 - DNA, 25 bp, Homo sapien
ttttaaattattgtacaagctctta

SEQ ID NO: 3463235 - DNA, 25 bp, Homo sapien
tatcatcttgatggctcagtactcg

SEQ ID NO: 3463236 - DNA, 25 bp, Homo sapien
gtgtaaagaactttcgccattcaac

SEQ ID NO: 3463237 - DNA, 25 bp, Homo sapien
tatatgcttttagcaaagccgtatc

SEQ ID NO: 3463238 - DNA, 25 bp, Homo sapien
aagtaatctctagttgacaaaaagg

SEQ ID NO: 3463239 - DNA, 25 bp, Homo sapien
cagcttcattgcactatcttggagt

SEQ ID NO: 3463240 - DNA, 25 bp, Homo sapien
tctcttactccaataaccagctgag

SEQ ID NO: 3463241 - DNA, 25 bp, Homo sapien
tcaaaagcttctcccaatctctcag

SEQ ID NO: 3463242 - DNA, 25 bp, Homo sapien
gactcattccatgtatcaagcataa

SEQ ID NO: 3463243 - DNA, 25 bp, Homo sapien
ttactccaattatgatcaaaatcag

SEQ ID NO: 3463244 - DNA, 25 bp, Homo sapien
ggagtcattatgtgcaaggtaacaa

SEQ ID NO: 3463245 - DNA, 25 bp, Homo sapien
taaatattgaggagtcattatgtgc

SEQ ID NO: 3463246 - DNA, 25 bp, Homo sapien
caatgctcaagagaacatataatta

SEQ ID NO: 3463247 - DNA, 25 bp, Homo sapien
aatacgagggtgcttgtgttctata

SEQ ID NO: 3463248 - DNA, 25 bp, Homo sapien
tctctgttgaatccaagtatgcctt

SEQ ID NO: 3463249 - DNA, 25 bp, Homo sapien
ccttctcaaaattgtccctataaat

SEQ ID NO: 3463250 - DNA, 25 bp, Homo sapien
ttgaagtttatcctcaggattagaa

SEQ ID NO: 3463251 - DNA, 25 bp, Homo sapien
tatcaagggaattgctcaaattatc

SEQ ID NO: 3463252 - DNA, 25 bp, Homo sapien
aattatcacatatactaagttctaa

SEQ ID NO: 3463253 - DNA, 25 bp, Homo sapien
aatatcaagggaattgctcaaatta

SEQ ID NO: 3463254 - DNA, 25 bp, Homo sapien
caagggaattgctcaaattatcaca

SEQ ID NO: 3463255 - DNA, 25 bp, Homo sapien
cattctcgtcttgtttctaaataac

SEQ ID NO: 3463256 - DNA, 25 bp, Homo sapien
tgtttctaaataacgtagtgctcgt

SEQ ID NO: 3463257 - DNA, 25 bp, Homo sapien
ataacgtagtgctcgtttttcttct

SEQ ID NO: 3463258 - DNA, 25 bp, Homo sapien
tgcttcaacggagttacattctcgt

SEQ ID NO: 3463259 - DNA, 25 bp, Homo sapien
aatagatttgatcttgcataccagc

SEQ ID NO: 3463260 - DNA, 25 bp, Homo sapien
tatttgccattcctatgcttccgta

SEQ ID NO: 3463261 - DNA, 25 bp, Homo sapien
tacaaagttgtgctatggctcatag

SEQ ID NO: 3463262 - DNA, 25 bp, Homo sapien
tctaaacaagatacctcctacaaag

SEQ ID NO: 3463263 - DNA, 25 bp, Homo sapien
ttatactgaagcaccctaaggtcag

SEQ ID NO: 3463264 - DNA, 25 bp, Homo sapien
taaggtcagtcctccacgtaaaaga

SEQ ID NO: 3463265 - DNA, 25 bp, Homo sapien
taaacacgactaccacttaagatgg

SEQ ID NO: 3463266 - DNA, 25 bp, Homo sapien
ggaaaagacatccaactcggtgtga

SEQ ID NO: 3463267 - DNA, 25 bp, Homo sapien
tataggcccagcgagtgataatcaa

SEQ ID NO: 3463268 - DNA, 25 bp, Homo sapien
gggtctaagtggctctcctataagt

SEQ ID NO: 3463269 - DNA, 25 bp, Homo sapien
taaaactgtaagagtagggcttcag

SEQ ID NO: 3463270 - DNA, 25 bp, Homo sapien
tttctgttcatctgctataggccca

SEQ ID NO: 3463271 - DNA, 25 bp, Homo sapien
caatggtgtgatctctccttactgc

SEQ ID NO: 3463272 - DNA, 25 bp, Homo sapien
aatggtgtgatctctccttactgca

SEQ ID NO: 3463273 - DNA, 25 bp, Homo sapien
ttgcctcagctacaacgtaagagtt

SEQ ID NO: 3463274 - DNA, 25 bp, Homo sapien
tatatagctctgtataaggaatagt

SEQ ID NO: 3463275 - DNA, 25 bp, Homo sapien
ttcttttagtggtattcaatttgca

SEQ ID NO: 3463276 - DNA, 25 bp, Homo sapien
tctacctcgctcaaatttcgtttaa

SEQ ID NO: 3463277 - DNA, 25 bp, Homo sapien
tttgctagattccgtgaagaaaaaa

SEQ ID NO: 3463278 - DNA, 25 bp, Homo sapien
cttttgctagattccgtgaagaaaa

SEQ ID NO: 3463279 - DNA, 25 bp, Homo sapien
ccttttgctagattccgtgaagaaa

SEQ ID NO: 3463280 - DNA, 25 bp, Homo sapien
tccttttgctagattccgtgaagaa

SEQ ID NO: 3463281 - DNA, 25 bp, Homo sapien
tctctttaaatgatgtcaccagggc

SEQ ID NO: 3463282 - DNA, 25 bp, Homo sapien
gatcatgccttggcactcagctaag

SEQ ID NO: 3463283 - DNA, 25 bp, Homo sapien
tcagctaagatagtctctttaaatg

SEQ ID NO: 3463284 - DNA, 25 bp, Homo sapien
gcactcagctaagatagtctcttta

SEQ ID NO: 3463285 - DNA, 25 bp, Homo sapien
gccaggccagcactaatgatatgtt

SEQ ID NO: 3463286 - DNA, 25 bp, Homo sapien
tagtaatagtttcagcagctgctac

SEQ ID NO: 3463287 - DNA, 25 bp, Homo sapien
agctgctaccatatctgccaggcca

SEQ ID NO: 3463288 - DNA, 25 bp, Homo sapien
ggctctataccattaggaactttgt

SEQ ID NO: 3463289 - DNA, 25 bp, Homo sapien
tattaaatagtgtaagtaactgctc

SEQ ID NO: 3463290 - DNA, 25 bp, Homo sapien
catcttgaaaagcttctttgacgag

SEQ ID NO: 3463291 - DNA, 25 bp, Homo sapien
tgcagtaagaaatcgtggatcatct

SEQ ID NO: 3463292 - DNA, 25 bp, Homo sapien
taactgctcaacgtatttctcagag

SEQ ID NO: 3463293 - DNA, 25 bp, Homo sapien
ttatcattatcctatactagtgagg

SEQ ID NO: 3463294 - DNA, 25 bp, Homo sapien
gtataacataactcccgaaggagtc

SEQ ID NO: 3463295 - DNA, 25 bp, Homo sapien
cgaaggagtcccatgaaaggacgga

SEQ ID NO: 3463296 - DNA, 25 bp, Homo sapien
gatacaatgctaaggacagtatggt

SEQ ID NO: 3463297 - DNA, 25 bp, Homo sapien
tgcttcaaaggtaattcaagtttaa

SEQ ID NO: 3463298 - DNA, 25 bp, Homo sapien
taaatatggtagcatcattaacaac

SEQ ID NO: 3463299 - DNA, 25 bp, Homo sapien
aagtttaaatatggtagcatcatta

SEQ ID NO: 3463300 - DNA, 25 bp, Homo sapien
catcattaacaactgctttatacgc

SEQ ID NO: 3463301 - DNA, 25 bp, Homo sapien
agaaggaacaactacatctgtaaat

SEQ ID NO: 3463302 - DNA, 25 bp, Homo sapien
ttcaggctgagtttttaatcccacc

SEQ ID NO: 3463303 - DNA, 25 bp, Homo sapien
cagggcattttgattcaggctgagt

SEQ ID NO: 3463304 - DNA, 25 bp, Homo sapien
tgtcacagtaattggcaagcagctc

SEQ ID NO: 3463305 - DNA, 25 bp, Homo sapien
tctcttcagaggttagttttttgct

SEQ ID NO: 3463306 - DNA, 25 bp, Homo sapien
gatgtctaatataagacgtcgtgtc

SEQ ID NO: 3463307 - DNA, 25 bp, Homo sapien
tgtcaaatgagctttatgatacctc

SEQ ID NO: 3463308 - DNA, 25 bp, Homo sapien
ttcaatttcactatcggcagagatg

SEQ ID NO: 3463309 - DNA, 25 bp, Homo sapien
tagccactctaccatgttttcttca

SEQ ID NO: 3463310 - DNA, 25 bp, Homo sapien
cgcccggcctaactgacgctatatt

SEQ ID NO: 3463311 - DNA, 25 bp, Homo sapien
ctccaaaatgtattacttaagcaca

SEQ ID NO: 3463312 - DNA, 25 bp, Homo sapien
gaattaccggagtgcaccagcacat

SEQ ID NO: 3463313 - DNA, 25 bp, Homo sapien
taaaatgtttcctacttctttgaca

SEQ ID NO: 3463314 - DNA, 25 bp, Homo sapien
gtcctgaaacattctagcaagcttg

SEQ ID NO: 3463315 - DNA, 25 bp, Homo sapien
gcttgtttacataatccgctggcat

SEQ ID NO: 3463316 - DNA, 25 bp, Homo sapien
ttaaaagcttggttcaaatcttcag

SEQ ID NO: 3463317 - DNA, 25 bp, Homo sapien
tcaaatcttcagatacttttatgtc

SEQ ID NO: 3463318 - DNA, 25 bp, Homo sapien
tgaccaggcgccagcattcagaatt

SEQ ID NO: 3463319 - DNA, 25 bp, Homo sapien
taggaagtgagacaaagactttctc

SEQ ID NO: 3463320 - DNA, 25 bp, Homo sapien
agtcctccagttcagtaggaagtga

SEQ ID NO: 3463321 - DNA, 25 bp, Homo sapien
tagaattcttctacttccggtatca

SEQ ID NO: 3463322 - DNA, 25 bp, Homo sapien
catcagggagttcagttgcaagctt

SEQ ID NO: 3463323 - DNA, 25 bp, Homo sapien
tctgggtctttggttccatgcaaac

SEQ ID NO: 3463324 - DNA, 25 bp, Homo sapien
tacagcgagctgaaacgtggttacc

SEQ ID NO: 3463325 - DNA, 25 bp, Homo sapien
taaagtcctcctaagttcagcatca

SEQ ID NO: 3463326 - DNA, 25 bp, Homo sapien
cggcctctatttttcttgataagac

SEQ ID NO: 3463327 - DNA, 25 bp, Homo sapien
tctatttttcttgataagacattct

SEQ ID NO: 3463328 - DNA, 25 bp, Homo sapien
ggcctctatttttcttgataagaca

SEQ ID NO: 3463329 - DNA, 25 bp, Homo sapien
atttttcttgataagacattctgaa

SEQ ID NO: 3463330 - DNA, 25 bp, Homo sapien
caagaaactgggattggtcacacag

SEQ ID NO: 3463331 - DNA, 25 bp, Homo sapien
gaccatagtaaacaccatctgccag

SEQ ID NO: 3463332 - DNA, 25 bp, Homo sapien
aattctcccacataatcaacatagg

SEQ ID NO: 3463333 - DNA, 25 bp, Homo sapien
gtacaatctacaagtcctcaaacag

SEQ ID NO: 3463334 - DNA, 25 bp, Homo sapien
catacaacaaaacttgccgtttgag

SEQ ID NO: 3463335 - DNA, 25 bp, Homo sapien
tgagttttgggaaagctactaaaga

SEQ ID NO: 3463336 - DNA, 25 bp, Homo sapien
ctgagaagagggtaccttctgtaaa

SEQ ID NO: 3463337 - DNA, 25 bp, Homo sapien
ctttgggtgagttgacttgaggttc

SEQ ID NO: 3463338 - DNA, 25 bp, Homo sapien
attttagatcaactaacgagcttac

SEQ ID NO: 3463339 - DNA, 25 bp, Homo sapien
tttattttagatcaactaacgagct

SEQ ID NO: 3463340 - DNA, 25 bp, Homo sapien
tattttagatcaactaacgagctta

SEQ ID NO: 3463341 - DNA, 25 bp, Homo sapien
ttattttagatcaactaacgagctt

SEQ ID NO: 3463342 - DNA, 25 bp, Homo sapien
ctgggttcttagtattcgtagttga

SEQ ID NO: 3463343 - DNA, 25 bp, Homo sapien
gagctgcaaacgtccaatcaagttg

SEQ ID NO: 3463344 - DNA, 25 bp, Homo sapien
ttctgtagtgagctgcaaacgtcca

SEQ ID NO: 3463345 - DNA, 25 bp, Homo sapien
tagtattcgtagttgaactattcct

SEQ ID NO: 3463346 - DNA, 25 bp, Homo sapien
tattcaacctttaatggaagaatat

SEQ ID NO: 3463347 - DNA, 25 bp, Homo sapien
aaaccaatcttttatgttattcagc

SEQ ID NO: 3463348 - DNA, 25 bp, Homo sapien
ttcagcctagctgccaggtgccgtg

SEQ ID NO: 3463349 - DNA, 25 bp, Homo sapien
tattcctagttgaattttcatgtga

SEQ ID NO: 3463350 - DNA, 25 bp, Homo sapien
ctcatgccccataaaagagaatctg

SEQ ID NO: 3463351 - DNA, 25 bp, Homo sapien
aacaatgtgtatataacctggtatc

SEQ ID NO: 3463352 - DNA, 25 bp, Homo sapien
tatgcatattcatcctctatccaac

SEQ ID NO: 3463353 - DNA, 25 bp, Homo sapien
tctatccaacatctacccaaatgaa

SEQ ID NO: 3463354 - DNA, 25 bp, Homo sapien
gccactctatttgctcttttatcat

SEQ ID NO: 3463355 - DNA, 25 bp, Homo sapien
tctgatgtatttgtgctctattagc

SEQ ID NO: 3463356 - DNA, 25 bp, Homo sapien
attcagtctgcagctgagcattact

SEQ ID NO: 3463357 - DNA, 25 bp, Homo sapien
ccatatatatgaaagtgttgatatc

SEQ ID NO: 3463358 - DNA, 25 bp, Homo sapien
tttatgtaatcaaagtccaaataaa

SEQ ID NO: 3463359 - DNA, 25 bp, Homo sapien
tctgcccaagcactccaaaatttgg

SEQ ID NO: 3463360 - DNA, 25 bp, Homo sapien
tttgtaaggtaaggcagagatttta

SEQ ID NO: 3463361 - DNA, 25 bp, Homo sapien
agcacaaactttacaactttctgcc

SEQ ID NO: 3463362 - DNA, 25 bp, Homo sapien
gataatgggctcttcatgaatgcaa

SEQ ID NO: 3463363 - DNA, 25 bp, Homo sapien
caaagagtgtgcaacatgaagggaa

SEQ ID NO: 3463364 - DNA, 25 bp, Homo sapien
ctcctggtgggtacaaatcaaattc

SEQ ID NO: 3463365 - DNA, 25 bp, Homo sapien
tgaagggaatgccatcatgctaact

SEQ ID NO: 3463366 - DNA, 25 bp, Homo sapien
aaaatccagttattatactgagcaa

SEQ ID NO: 3463367 - DNA, 25 bp, Homo sapien
taaaatccagttattatactgagca

SEQ ID NO: 3463368 - DNA, 25 bp, Homo sapien
aatccagttattatactgagcaatg

SEQ ID NO: 3463369 - DNA, 25 bp, Homo sapien
tccagttattatactgagcaatgtt

SEQ ID NO: 3463370 - DNA, 25 bp, Homo sapien
tacataactatatcagagcaggaga

SEQ ID NO: 3463371 - DNA, 25 bp, Homo sapien
tcaagttgttcacgtcctcaagtcc

SEQ ID NO: 3463372 - DNA, 25 bp, Homo sapien
ggtgactgattcaaacctgaggcta

SEQ ID NO: 3463373 - DNA, 25 bp, Homo sapien
gaggctacaaatccctaatcatgag

SEQ ID NO: 3463374 - DNA, 25 bp, Homo sapien
tcggatggggacagatcctacgaaa

SEQ ID NO: 3463375 - DNA, 25 bp, Homo sapien
cactgtaacataatactgtatgcct

SEQ ID NO: 3463376 - DNA, 25 bp, Homo sapien
ccactgtaacataatactgtatgcc

SEQ ID NO: 3463377 - DNA, 25 bp, Homo sapien
tcctacgaaatgctcttgaaagcac

SEQ ID NO: 3463378 - DNA, 25 bp, Homo sapien
tatgaacagtcacctaattagagaa

SEQ ID NO: 3463379 - DNA, 25 bp, Homo sapien
tttcctataagtttcagaacaggca

SEQ ID NO: 3463380 - DNA, 25 bp, Homo sapien
caaatatacccattatgaacagtca

SEQ ID NO: 3463381 - DNA, 25 bp, Homo sapien
taattcttcacaatatgctcggtct

SEQ ID NO: 3463382 - DNA, 25 bp, Homo sapien
tcttgtattgggacaagcaaatacg

SEQ ID NO: 3463383 - DNA, 25 bp, Homo sapien
gggacaagcaaatacgccaatgctg

SEQ ID NO: 3463384 - DNA, 25 bp, Homo sapien
gtattgggacaagcaaatacgccaa

SEQ ID NO: 3463385 - DNA, 25 bp, Homo sapien
aagcaaatacgccaatgctgaatta

SEQ ID NO: 3463386 - DNA, 25 bp, Homo sapien
gattccagacctttacaaactgctg

SEQ ID NO: 3463387 - DNA, 25 bp, Homo sapien
ggttatatccctgctcggcaccaat

SEQ ID NO: 3463388 - DNA, 25 bp, Homo sapien
tacttactccggcaacgagatggca

SEQ ID NO: 3463389 - DNA, 25 bp, Homo sapien
gagacctgaataaaggatgccaact

SEQ ID NO: 3463390 - DNA, 25 bp, Homo sapien
tcatctcagtatgtagtggcacaca

SEQ ID NO: 3463391 - DNA, 25 bp, Homo sapien
tgagcagtgctagagacatcttact

SEQ ID NO: 3463392 - DNA, 25 bp, Homo sapien
agcatcccagtcacttacatgagaa

SEQ ID NO: 3463393 - DNA, 25 bp, Homo sapien
caaaatcgtatagaccatatgagga

SEQ ID NO: 3463394 - DNA, 25 bp, Homo sapien
agccacatgctatcatcagtggaaa

SEQ ID NO: 3463395 - DNA, 25 bp, Homo sapien
catgctatcatcagtggaaaagcta

SEQ ID NO: 3463396 - DNA, 25 bp, Homo sapien
tatagtagaacatcaacattttctg

SEQ ID NO: 3463397 - DNA, 25 bp, Homo sapien
catatttctgattcctaaggctggc

SEQ ID NO: 3463398 - DNA, 25 bp, Homo sapien
tgggtaattaagtccctgtatgcaa

SEQ ID NO: 3463399 - DNA, 25 bp, Homo sapien
taagtccctgtatgcaattcaagtt

SEQ ID NO: 3463400 - DNA, 25 bp, Homo sapien
agtaggaacaagaaatgatccctca

SEQ ID NO: 3463401 - DNA, 25 bp, Homo sapien
tagtcaagagttttttcgattatta

SEQ ID NO: 3463402 - DNA, 25 bp, Homo sapien
gccgaagtacaattcacagggtggg

SEQ ID NO: 3463403 - DNA, 25 bp, Homo sapien
tagaggactccaattggccacagcc

SEQ ID NO: 3463404 - DNA, 25 bp, Homo sapien
cagttttgcctagacctggctgcac

SEQ ID NO: 3463405 - DNA, 25 bp, Homo sapien
gaggcttggcacacaatcagaggct

SEQ ID NO: 3463406 - DNA, 25 bp, Homo sapien
tgccggggccggtggtttatgtgta

SEQ ID NO: 3463407 - DNA, 25 bp, Homo sapien
ccgagatttttcgatttactgagca

SEQ ID NO: 3463408 - DNA, 25 bp, Homo sapien
aatccgagatttttcgatttactga

SEQ ID NO: 3463409 - DNA, 25 bp, Homo sapien
tggtttatgtgtaatccgagatttt

SEQ ID NO: 3463410 - DNA, 25 bp, Homo sapien
aatagtcgcctctcagtcggcggcg

SEQ ID NO: 3463411 - DNA, 25 bp, Homo sapien
tccacaggcgtagactagcggcctc

SEQ ID NO: 3463412 - DNA, 25 bp, Homo sapien
tcgcagagggctgagtatcggctcc

SEQ ID NO: 3463413 - DNA, 25 bp, Homo sapien
gggtcaacgagcacctgacacgctg

SEQ ID NO: 3463414 - DNA, 25 bp, Homo sapien
ggcgccgctgcgcagaagtgccgcc

SEQ ID NO: 3463415 - DNA, 25 bp, Homo sapien
ccgctgcgcagaagtgccgccagca

SEQ ID NO: 3463416 - DNA, 25 bp, Homo sapien
ctgcgggcgccgctgcgcagaagtg

SEQ ID NO: 3463417 - DNA, 25 bp, Homo sapien
gcgggcgccgctgcgcagaagtgcc

SEQ ID NO: 3463418 - DNA, 25 bp, Homo sapien
gcacttaggcggtttttggaccaga

SEQ ID NO: 3463419 - DNA, 25 bp, Homo sapien
gaacccgtcgcgtgactgtcctggg

SEQ ID NO: 3463420 - DNA, 25 bp, Homo sapien
ttttggaccagaacccgtcgcgtga

SEQ ID NO: 3463421 - DNA, 25 bp, Homo sapien
ctgggtgttatcggagcacttaggc

SEQ ID NO: 3463422 - DNA, 25 bp, Homo sapien
taacgctcattaagatgattacgcc

SEQ ID NO: 3463423 - DNA, 25 bp, Homo sapien
acgcgctgtaaaaataggcgagtcc

SEQ ID NO: 3463424 - DNA, 25 bp, Homo sapien
ccttggaagtagaaacgcgctgtaa

SEQ ID NO: 3463425 - DNA, 25 bp, Homo sapien
gatgattacgccgagaccttggaag

SEQ ID NO: 3463426 - DNA, 25 bp, Homo sapien
ccgggccagcgccaatcctggcggt

SEQ ID NO: 3463427 - DNA, 25 bp, Homo sapien
agcgccaatcctggcggtcctgccc

SEQ ID NO: 3463428 - DNA, 25 bp, Homo sapien
cagacacgtgcccttgtttgacaca

SEQ ID NO: 3463429 - DNA, 25 bp, Homo sapien
tgcccgcccagacacgtgcccttgt

SEQ ID NO: 3463430 - DNA, 25 bp, Homo sapien
taaacacaacggtcagaagagcgac

SEQ ID NO: 3463431 - DNA, 25 bp, Homo sapien
tgacaatctgtggtgcgtactccct

SEQ ID NO: 3463432 - DNA, 25 bp, Homo sapien
tagagtgacctaccattgcaacaaa

SEQ ID NO: 3463433 - DNA, 25 bp, Homo sapien
gaaggtctctacctattcctgaggc

SEQ ID NO: 3463434 - DNA, 25 bp, Homo sapien
gaggtcagcactcctatctcagctt

SEQ ID NO: 3463435 - DNA, 25 bp, Homo sapien
gtgcctagcgctccttcaatatcag

SEQ ID NO: 3463436 - DNA, 25 bp, Homo sapien
tacatccctatgacttagcacagtg

SEQ ID NO: 3463437 - DNA, 25 bp, Homo sapien
tcaaagcacctcttacactgtaagt

SEQ ID NO: 3463438 - DNA, 25 bp, Homo sapien
ttccttgtttactaagccacttctc

SEQ ID NO: 3463439 - DNA, 25 bp, Homo sapien
tctacttagctagtttgttccttgt

SEQ ID NO: 3463440 - DNA, 25 bp, Homo sapien
taattccataagcatacaaacagga

SEQ ID NO: 3463441 - DNA, 25 bp, Homo sapien
aatggaaacaccaaacagcttatgt

SEQ ID NO: 3463442 - DNA, 25 bp, Homo sapien
gactgggtcagttggatgacggtgg

SEQ ID NO: 3463443 - DNA, 25 bp, Homo sapien
actgggtcagttggatgacggtggg

SEQ ID NO: 3463444 - DNA, 25 bp, Homo sapien
tgggtcagttggatgacggtgggga

SEQ ID NO: 3463445 - DNA, 25 bp, Homo sapien
agactgggtcagttggatgacggtg

SEQ ID NO: 3463446 - DNA, 25 bp, Homo sapien
ttcaaagtgggttttgatacataac

SEQ ID NO: 3463447 - DNA, 25 bp, Homo sapien
aagtgggttttgatacataactccg

SEQ ID NO: 3463448 - DNA, 25 bp, Homo sapien
ggttttgatacataactccgttcca

SEQ ID NO: 3463449 - DNA, 25 bp, Homo sapien
tgatacataactccgttccacatat

SEQ ID NO: 3463450 - DNA, 25 bp, Homo sapien
gaaggtcctaggagatgctgtaatg

SEQ ID NO: 3463451 - DNA, 25 bp, Homo sapien
tcagaaggtcctaggagatgctgta

SEQ ID NO: 3463452 - DNA, 25 bp, Homo sapien
gctgtaatggccctccttgtctaat

SEQ ID NO: 3463453 - DNA, 25 bp, Homo sapien
tgtctaattcccaactggtccactc

SEQ ID NO: 3463454 - DNA, 25 bp, Homo sapien
tcttgtagcacttactatgaccact

SEQ ID NO: 3463455 - DNA, 25 bp, Homo sapien
tccctgaattgcaatggaaccaagc

SEQ ID NO: 3463456 - DNA, 25 bp, Homo sapien
aagatccaatgggtgttcttgtagc

SEQ ID NO: 3463457 - DNA, 25 bp, Homo sapien
caagcttagtggctggcagcaagga

SEQ ID NO: 3463458 - DNA, 25 bp, Homo sapien
tgtagaacattacccatgtatgctt

SEQ ID NO: 3463459 - DNA, 25 bp, Homo sapien
tgcctgccttgtaggagcttgtcct

SEQ ID NO: 3463460 - DNA, 25 bp, Homo sapien
gcacccaatactgcctgccttgtag

SEQ ID NO: 3463461 - DNA, 25 bp, Homo sapien
tcacctccttgtagaacattaccca

SEQ ID NO: 3463462 - DNA, 25 bp, Homo sapien
actttgtttatggtggtacatggag

SEQ ID NO: 3463463 - DNA, 25 bp, Homo sapien
tatggtggtacatggagtagaaata

SEQ ID NO: 3463464 - DNA, 25 bp, Homo sapien
gtacatggagtagaaataggtaagc

SEQ ID NO: 3463465 - DNA, 25 bp, Homo sapien
ctgaagcacaaactttgtttatggt

SEQ ID NO: 3463466 - DNA, 25 bp, Homo sapien
ttgagaggccatcatgatggctttc

SEQ ID NO: 3463467 - DNA, 25 bp, Homo sapien
tgtccacacataagactttgagagg

SEQ ID NO: 3463468 - DNA, 25 bp, Homo sapien
gatgtccacacataagactttgaga

SEQ ID NO: 3463469 - DNA, 25 bp, Homo sapien
ctgatgtccacacataagactttga

SEQ ID NO: 3463470 - DNA, 25 bp, Homo sapien
agcatatttttgctaaggagcctgt

SEQ ID NO: 3463471 - DNA, 25 bp, Homo sapien
gacagcatatttttgctaaggagcc

SEQ ID NO: 3463472 - DNA, 25 bp, Homo sapien
cagcatatttttgctaaggagcctg

SEQ ID NO: 3463473 - DNA, 25 bp, Homo sapien
tgacagcatatttttgctaaggagc

SEQ ID NO: 3463474 - DNA, 25 bp, Homo sapien
caaatggcatttgctagagaaccac

SEQ ID NO: 3463475 - DNA, 25 bp, Homo sapien
ccaagaatgcctataagtcactgta

SEQ ID NO: 3463476 - DNA, 25 bp, Homo sapien
ggtggtgcagatccagacaagtcac

SEQ ID NO: 3463477 - DNA, 25 bp, Homo sapien
taatcaggcatacagacaagcaagc

SEQ ID NO: 3463478 - DNA, 25 bp, Homo sapien
ggtgttgatcctctgttcattacat

SEQ ID NO: 3463479 - DNA, 25 bp, Homo sapien
cttcaagctttaccccaccatatgg

SEQ ID NO: 3463480 - DNA, 25 bp, Homo sapien
tacatatggaacattggacatgctc

SEQ ID NO: 3463481 - DNA, 25 bp, Homo sapien
tttattgtagacatcagttagcccg

SEQ ID NO: 3463482 - DNA, 25 bp, Homo sapien
agtttgtaaagtacatagagtaaga

SEQ ID NO: 3463483 - DNA, 25 bp, Homo sapien
gtttgtaaagtacatagagtaagaa

SEQ ID NO: 3463484 - DNA, 25 bp, Homo sapien
tacttctggtataagaattaatagc

SEQ ID NO: 3463485 - DNA, 25 bp, Homo sapien
gcttcccatgctgctttacttctgg

SEQ ID NO: 3463486 - DNA, 25 bp, Homo sapien
tcatttcgtgcaatattcagcttct

SEQ ID NO: 3463487 - DNA, 25 bp, Homo sapien
tagcataagcgtcctgttcatttcg

SEQ ID NO: 3463488 - DNA, 25 bp, Homo sapien
tatgtgaccctagaggtagaggcag

SEQ ID NO: 3463489 - DNA, 25 bp, Homo sapien
tgtgtggaggccaagtctcacttcg

SEQ ID NO: 3463490 - DNA, 25 bp, Homo sapien
aaaataccgtattgactgtcacagg

SEQ ID NO: 3463491 - DNA, 25 bp, Homo sapien
tcagttcttggaggcactcccggta

SEQ ID NO: 3463492 - DNA, 25 bp, Homo sapien
taaaatcaacacgtttatattcttc

SEQ ID NO: 3463493 - DNA, 25 bp, Homo sapien
tgctaaaatcaacacgtttatattc

SEQ ID NO: 3463494 - DNA, 25 bp, Homo sapien
actttgctaaaatcaacacgtttat

SEQ ID NO: 3463495 - DNA, 25 bp, Homo sapien
aaatcaacacgtttatattcttcat

SEQ ID NO: 3463496 - DNA, 25 bp, Homo sapien
ccagtggtgtaacattgagcctctt

SEQ ID NO: 3463497 - DNA, 25 bp, Homo sapien
tcttcgctgcatctgccgtcatgag

SEQ ID NO: 3463498 - DNA, 25 bp, Homo sapien
tcttgccagtggtgtaacattgagc

SEQ ID NO: 3463499 - DNA, 25 bp, Homo sapien
gcatctgccgtcatgagaaccagag

SEQ ID NO: 3463500 - DNA, 25 bp, Homo sapien
ggaacattggcaccacctagagatg

SEQ ID NO: 3463501 - DNA, 25 bp, Homo sapien
gaatatgcacaagccaagtttagcc

SEQ ID NO: 3463502 - DNA, 25 bp, Homo sapien
tctgcagctaaaaatcggcttaagg

SEQ ID NO: 3463503 - DNA, 25 bp, Homo sapien
gcttaaggacattgagaacttgccc

SEQ ID NO: 3463504 - DNA, 25 bp, Homo sapien
catatacaggagcaattggaaaatc

SEQ ID NO: 3463505 - DNA, 25 bp, Homo sapien
catagatgcagcatatacaggagca

SEQ ID NO: 3463506 - DNA, 25 bp, Homo sapien
cagcatatacaggagcaattggaaa

SEQ ID NO: 3463507 - DNA, 25 bp, Homo sapien
gatgcagcatatacaggagcaattg

SEQ ID NO: 3463508 - DNA, 25 bp, Homo sapien
ccagaagctagcataatggagtatc

SEQ ID NO: 3463509 - DNA, 25 bp, Homo sapien
caaaccagaagctagcataatggag

SEQ ID NO: 3463510 - DNA, 25 bp, Homo sapien
taaaaactgcaaccttggtataagc

SEQ ID NO: 3463511 - DNA, 25 bp, Homo sapien
agcataatggagtatcgcccctcac

SEQ ID NO: 3463512 - DNA, 25 bp, Homo sapien
gatgatgttcaaataattagcaatc

SEQ ID NO: 3463513 - DNA, 25 bp, Homo sapien
agatgatgttcaaataattagcaat

SEQ ID NO: 3463514 - DNA, 25 bp, Homo sapien
cagatgatgttcaaataattagcaa

SEQ ID NO: 3463515 - DNA, 25 bp, Homo sapien
ttcttttttcaatcccacatcttta

SEQ ID NO: 3463516 - DNA, 25 bp, Homo sapien
tgctagtacaaccagactaaaggct

SEQ ID NO: 3463517 - DNA, 25 bp, Homo sapien
cactttttggggatcaatctccaac

SEQ ID NO: 3463518 - DNA, 25 bp, Homo sapien
taaaggcttcatttacttcccacat

SEQ ID NO: 3463519 - DNA, 25 bp, Homo sapien
ctgaattagcatggcagaagcacct

SEQ ID NO: 3463520 - DNA, 25 bp, Homo sapien
cattgcaaatactggcaagaccgta

SEQ ID NO: 3463521 - DNA, 25 bp, Homo sapien
agaccgtattctccttgcttcaagg

SEQ ID NO: 3463522 - DNA, 25 bp, Homo sapien
ttcaaggcatgagtcaaatgaccaa

SEQ ID NO: 3463523 - DNA, 25 bp, Homo sapien
aaaaaatgaaacagcttatctgaat

SEQ ID NO: 3463524 - DNA, 25 bp, Homo sapien
ttatctgaatataagctgacccaca

SEQ ID NO: 3463525 - DNA, 25 bp, Homo sapien
agcaggccttctggtcacatagggt

SEQ ID NO: 3463526 - DNA, 25 bp, Homo sapien
cacatagggttgtctccttaaatag

SEQ ID NO: 3463527 - DNA, 25 bp, Homo sapien
gaacaggcattgtcgtgtattggaa

SEQ ID NO: 3463528 - DNA, 25 bp, Homo sapien
tattggaagtggtgatctgttccct

SEQ ID NO: 3463529 - DNA, 25 bp, Homo sapien
tgttgaggttataagaaattgcccc

SEQ ID NO: 3463530 - DNA, 25 bp, Homo sapien
gaagcactgctagtttgtccagaat

SEQ ID NO: 3463531 - DNA, 25 bp, Homo sapien
ttttcccagaattgtcagagcactt

SEQ ID NO: 3463532 - DNA, 25 bp, Homo sapien
catgggcttgcctaaacctttgtca

SEQ ID NO: 3463533 - DNA, 25 bp, Homo sapien
ggagattctccatagacgcagattt

SEQ ID NO: 3463534 - DNA, 25 bp, Homo sapien
tccggccaggtgtaggaactttata

SEQ ID NO: 3463535 - DNA, 25 bp, Homo sapien
ttacagaagtaatgtgagctcccag

SEQ ID NO: 3463536 - DNA, 25 bp, Homo sapien
tactaaattatctaggcctggagcc

SEQ ID NO: 3463537 - DNA, 25 bp, Homo sapien
tacgattttacatcagaagtacctg

SEQ ID NO: 3463538 - DNA, 25 bp, Homo sapien
gctgttcatgggcacagtcatagcc

SEQ ID NO: 3463539 - DNA, 25 bp, Homo sapien
tcaacagttgtataggagcctattc

SEQ ID NO: 3463540 - DNA, 25 bp, Homo sapien
cacagtttgttcagataagctttcc

SEQ ID NO: 3463541 - DNA, 25 bp, Homo sapien
gaaatgacacgaggctacttaacag

SEQ ID NO: 3463542 - DNA, 25 bp, Homo sapien
gaactcattctgtggcaaacctgac

SEQ ID NO: 3463543 - DNA, 25 bp, Homo sapien
gtctgctgttccagactcaactggg

SEQ ID NO: 3463544 - DNA, 25 bp, Homo sapien
tatatatggagtcatgtgaaatcag

SEQ ID NO: 3463545 - DNA, 25 bp, Homo sapien
gggtgggccactctaattcatacta

SEQ ID NO: 3463546 - DNA, 25 bp, Homo sapien
caacttggggattctgaagtattta

SEQ ID NO: 3463547 - DNA, 25 bp, Homo sapien
tgttggcatcttctttagaggtaca

SEQ ID NO: 3463548 - DNA, 25 bp, Homo sapien
tcaaagtagtatcaaccgcggcggt

SEQ ID NO: 3463549 - DNA, 25 bp, Homo sapien
gaagtgacgacagttccgaaggcga

SEQ ID NO: 3463550 - DNA, 25 bp, Homo sapien
caaattgccgcgagttcagtgccgc

SEQ ID NO: 3463551 - DNA, 25 bp, Homo sapien
ttctctggcggaagcgattggctgc

SEQ ID NO: 3463552 - DNA, 25 bp, Homo sapien
ttattggccaagtccgctaagcacc

SEQ ID NO: 3463553 - DNA, 25 bp, Homo sapien
aattccagccgtatgattccagagc

SEQ ID NO: 3463554 - DNA, 25 bp, Homo sapien
gcagggttcaattcagggcgtttaa

SEQ ID NO: 3463555 - DNA, 25 bp, Homo sapien
tacagcagctaacgctcacgagtgc

SEQ ID NO: 3463556 - DNA, 25 bp, Homo sapien
ctcagaggagtttataataaagcca

SEQ ID NO: 3463557 - DNA, 25 bp, Homo sapien
actgtagagagaatcattttagata

SEQ ID NO: 3463558 - DNA, 25 bp, Homo sapien
gtcagggaacatatatctcagagga

SEQ ID NO: 3463559 - DNA, 25 bp, Homo sapien
cattttagataaactgtcagggaac

SEQ ID NO: 3463560 - DNA, 25 bp, Homo sapien
gcagcagggtgacaataaacaagta

SEQ ID NO: 3463561 - DNA, 25 bp, Homo sapien
caagtaaattgataaaccaatgcat

SEQ ID NO: 3463562 - DNA, 25 bp, Homo sapien
aacaagtaaattgataaaccaatgc

SEQ ID NO: 3463563 - DNA, 25 bp, Homo sapien
catgaagtcatatctgggcagcagg

SEQ ID NO: 3463564 - DNA, 25 bp, Homo sapien
taaagatttgacacttcccggaaga

SEQ ID NO: 3463565 - DNA, 25 bp, Homo sapien
caaagaaccataaggtttggcacct

SEQ ID NO: 3463566 - DNA, 25 bp, Homo sapien
gaagaggcagccctaaacttgactt

SEQ ID NO: 3463567 - DNA, 25 bp, Homo sapien
tccccatggtgtgacttccttgaac

SEQ ID NO: 3463568 - DNA, 25 bp, Homo sapien
gcagtagtagcaggattaaaataaa

SEQ ID NO: 3463569 - DNA, 25 bp, Homo sapien
tctatacaagtaatgctgtaacaca

SEQ ID NO: 3463570 - DNA, 25 bp, Homo sapien
tactctgagaccaaagaaacatgac

SEQ ID NO: 3463571 - DNA, 25 bp, Homo sapien
gatttaactgtacaattagaggcac

SEQ ID NO: 3463572 - DNA, 25 bp, Homo sapien
ttcacaatttcagaacacacatcac

SEQ ID NO: 3463573 - DNA, 25 bp, Homo sapien
cacaatttcagaacacacatcactg

SEQ ID NO: 3463574 - DNA, 25 bp, Homo sapien
acaatttcagaacacacatcactgt

SEQ ID NO: 3463575 - DNA, 25 bp, Homo sapien
ggttcacaatttcagaacacacatc

SEQ ID NO: 3463576 - DNA, 25 bp, Homo sapien
tctgtagctctatcatgttctagtt

SEQ ID NO: 3463577 - DNA, 25 bp, Homo sapien
agataagcagatcattaagtactag

SEQ ID NO: 3463578 - DNA, 25 bp, Homo sapien
tagttgacggcagcagataagcaga

SEQ ID NO: 3463579 - DNA, 25 bp, Homo sapien
catgttctagttgacggcagcagat

SEQ ID NO: 3463580 - DNA, 25 bp, Homo sapien
gtttggaatctgaatgccgatctag

SEQ ID NO: 3463581 - DNA, 25 bp, Homo sapien
taattgtttcaggatctcgaatcag

SEQ ID NO: 3463582 - DNA, 25 bp, Homo sapien
gaatgccgatctagatgtttaattg

SEQ ID NO: 3463583 - DNA, 25 bp, Homo sapien
atcaggcgcttaaatttctcaactt

SEQ ID NO: 3463584 - DNA, 25 bp, Homo sapien
gttgaggctgatacatttggttttg

SEQ ID NO: 3463585 - DNA, 25 bp, Homo sapien
ggttttgctattctcagacattctg

SEQ ID NO: 3463586 - DNA, 25 bp, Homo sapien
ttggttttgctattctcagacattc

SEQ ID NO: 3463587 - DNA, 25 bp, Homo sapien
gtatttgaccaaactactgatttcc

SEQ ID NO: 3463588 - DNA, 25 bp, Homo sapien
agccatttatttataatttataaca

SEQ ID NO: 3463589 - DNA, 25 bp, Homo sapien
ttatgcaacagttaagtccttaaaa

SEQ ID NO: 3463590 - DNA, 25 bp, Homo sapien
taatactgttaatgctattcaaaga

SEQ ID NO: 3463591 - DNA, 25 bp, Homo sapien
tacctaaaggctagggacgtagaga

SEQ ID NO: 3463592 - DNA, 25 bp, Homo sapien
aatcatgaagactgcacttctacct

SEQ ID NO: 3463593 - DNA, 25 bp, Homo sapien
gatggaaaagaaagccttgaaagta

SEQ ID NO: 3463594 - DNA, 25 bp, Homo sapien
gacgtaaaagcccagtgactgccct

SEQ ID NO: 3463595 - DNA, 25 bp, Homo sapien
tgactgccctaatagcaaatgctca

SEQ ID NO: 3463596 - DNA, 25 bp, Homo sapien
aataaaatcctatcttcctatgtcc

SEQ ID NO: 3463597 - DNA, 25 bp, Homo sapien
gacttaagggatctacccatgtcag

SEQ ID NO: 3463598 - DNA, 25 bp, Homo sapien
gacagaatctctcacaatgttcccc

SEQ ID NO: 3463599 - DNA, 25 bp, Homo sapien
gctcatctcgaaaagcaatcattct

SEQ ID NO: 3463600 - DNA, 25 bp, Homo sapien
ggtgttagaccaaaaatgatcccaa

SEQ ID NO: 3463601 - DNA, 25 bp, Homo sapien
ggagaatatttaccttggaaagcaa

SEQ ID NO: 3463602 - DNA, 25 bp, Homo sapien
gaaattggcaaattatggccccaag

SEQ ID NO: 3463603 - DNA, 25 bp, Homo sapien
tacacagtaagtttgccaacgcctc

SEQ ID NO: 3463604 - DNA, 25 bp, Homo sapien
taattaagacagaggtgaccacatg

SEQ ID NO: 3463605 - DNA, 25 bp, Homo sapien
gacacttggaatggcaactatttaa

SEQ ID NO: 3463606 - DNA, 25 bp, Homo sapien
tcttgacattttagcctaggtgctc

SEQ ID NO: 3463607 - DNA, 25 bp, Homo sapien
gatgaatctttcactgtatccatga

SEQ ID NO: 3463608 - DNA, 25 bp, Homo sapien
gagtagtatgttgctacaatcagct

SEQ ID NO: 3463609 - DNA, 25 bp, Homo sapien
tcagctccgtaaatagcaccattag

SEQ ID NO: 3463610 - DNA, 25 bp, Homo sapien
tactaaagtactgttaaactgtcag

SEQ ID NO: 3463611 - DNA, 25 bp, Homo sapien
ctgttaaactgtcaggtcacttggg

SEQ ID NO: 3463612 - DNA, 25 bp, Homo sapien
aattaagggtcagttcgataaccat

SEQ ID NO: 3463613 - DNA, 25 bp, Homo sapien
gacagatacagacagagtgctttct

SEQ ID NO: 3463614 - DNA, 25 bp, Homo sapien
gacgatggagatggtatttttcaac

SEQ ID NO: 3463615 - DNA, 25 bp, Homo sapien
tgtaattccggctctgatatcaggc

SEQ ID NO: 3463616 - DNA, 25 bp, Homo sapien
caagcaagagccattacctccgcta

SEQ ID NO: 3463617 - DNA, 25 bp, Homo sapien
cactgtcaactccttgacgatggag

SEQ ID NO: 3463618 - DNA, 25 bp, Homo sapien
taaaactctatgaacatcttgtgaa

SEQ ID NO: 3463619 - DNA, 25 bp, Homo sapien
gagaacagcatcctttggtaacagc

SEQ ID NO: 3463620 - DNA, 25 bp, Homo sapien
gaatttaatccgtcagtctgagaac

SEQ ID NO: 3463621 - DNA, 25 bp, Homo sapien
agcatgaattattctagccactaaa

SEQ ID NO: 3463622 - DNA, 25 bp, Homo sapien
tcttgaggaagatagtaagagctgc

SEQ ID NO: 3463623 - DNA, 25 bp, Homo sapien
gatttagacctgaagagctcttttc

SEQ ID NO: 3463624 - DNA, 25 bp, Homo sapien
cactcgaattcgaaagttgacagcc

SEQ ID NO: 3463625 - DNA, 25 bp, Homo sapien
tcattaagcctatgttgagtccaaa

SEQ ID NO: 3463626 - DNA, 25 bp, Homo sapien
ctggtgacagatatctgccatcaat

SEQ ID NO: 3463627 - DNA, 25 bp, Homo sapien
caatcaaattttctttgacggcaat

SEQ ID NO: 3463628 - DNA, 25 bp, Homo sapien
ctcattcactagcagatcatataag

SEQ ID NO: 3463629 - DNA, 25 bp, Homo sapien
gacggcaatattacgaaatcctgaa

SEQ ID NO: 3463630 - DNA, 25 bp, Homo sapien
tgcaagggacactgtaatcactaga

SEQ ID NO: 3463631 - DNA, 25 bp, Homo sapien
caaggcacaagatcaaaatcattct

SEQ ID NO: 3463632 - DNA, 25 bp, Homo sapien
gatcttttattacttcccagcctag

SEQ ID NO: 3463633 - DNA, 25 bp, Homo sapien
gtagtgtaagattgagaaatctcca

SEQ ID NO: 3463634 - DNA, 25 bp, Homo sapien
tgacacaatgcaacttccgtaaggc

SEQ ID NO: 3463635 - DNA, 25 bp, Homo sapien
tcatcagtaatggagacagctcaca

SEQ ID NO: 3463636 - DNA, 25 bp, Homo sapien
taaactaccctgaattatggctcca

SEQ ID NO: 3463637 - DNA, 25 bp, Homo sapien
tgctcagaacttataccacgaaagg

SEQ ID NO: 3463638 - DNA, 25 bp, Homo sapien
ctggaactatactggtggtcagtgc

SEQ ID NO: 3463639 - DNA, 25 bp, Homo sapien
ggtcagtgccaaagtcaaacagcat

SEQ ID NO: 3463640 - DNA, 25 bp, Homo sapien
actggtggtcagtgccaaagtcaaa

SEQ ID NO: 3463641 - DNA, 25 bp, Homo sapien
ggtggtcagtgccaaagtcaaacag

SEQ ID NO: 3463642 - DNA, 25 bp, Homo sapien
taagagccatttcattattgattcc

SEQ ID NO: 3463643 - DNA, 25 bp, Homo sapien
taagtcaccctctaactgatagaat

SEQ ID NO: 3463644 - DNA, 25 bp, Homo sapien
ctgtgctattttctaagtcaccctc

SEQ ID NO: 3463645 - DNA, 25 bp, Homo sapien
taactgatagaataagagccatttc

SEQ ID NO: 3463646 - DNA, 25 bp, Homo sapien
tcacaagaattttctccagtacaag

SEQ ID NO: 3463647 - DNA, 25 bp, Homo sapien
gtttttcatagtgagactcacaaga

SEQ ID NO: 3463648 - DNA, 25 bp, Homo sapien
tgagattctggtggacagagaagcc

SEQ ID NO: 3463649 - DNA, 25 bp, Homo sapien
agccaatactggactggtgcttttc

SEQ ID NO: 3463650 - DNA, 25 bp, Homo sapien
ttctctcacaatggttaaaaagtcc

SEQ ID NO: 3463651 - DNA, 25 bp, Homo sapien
ccatcttgtcaaaagttgtctgaag

SEQ ID NO: 3463652 - DNA, 25 bp, Homo sapien
gcagccaaggacacccaccaaaaga

SEQ ID NO: 3463653 - DNA, 25 bp, Homo sapien
tgaacaccggacaagagtttctgaa

SEQ ID NO: 3463654 - DNA, 25 bp, Homo sapien
ggaataattctgacttatatgcttc

SEQ ID NO: 3463655 - DNA, 25 bp, Homo sapien
acacccatgtaacagtagcagccaa

SEQ ID NO: 3463656 - DNA, 25 bp, Homo sapien
cttggtacagttgctcaagcaacgt

SEQ ID NO: 3463657 - DNA, 25 bp, Homo sapien
catatttctcaaggaaccaattctg

SEQ ID NO: 3463658 - DNA, 25 bp, Homo sapien
cagagtgatactttctcctgcacat

SEQ ID NO: 3463659 - DNA, 25 bp, Homo sapien
caagcaacgtgtacatagctgcatc

SEQ ID NO: 3463660 - DNA, 25 bp, Homo sapien
tttgatgttaacaatcgcaggaaaa

SEQ ID NO: 3463661 - DNA, 25 bp, Homo sapien
tacaaatatctgcaatgtcattcat

SEQ ID NO: 3463662 - DNA, 25 bp, Homo sapien
ggaaaaagccagatgcaatcttatt

SEQ ID NO: 3463663 - DNA, 25 bp, Homo sapien
gcaatgtcattcattagctttgatg

SEQ ID NO: 3463664 - DNA, 25 bp, Homo sapien
ttctccacggtcaaatggctttttg

SEQ ID NO: 3463665 - DNA, 25 bp, Homo sapien
taaatagattcatggatgactgatc

SEQ ID NO: 3463666 - DNA, 25 bp, Homo sapien
tatcatcttccattgattctacttc

SEQ ID NO: 3463667 - DNA, 25 bp, Homo sapien
ctatcagggtaatcgttaaatagat

SEQ ID NO: 3463668 - DNA, 25 bp, Homo sapien
tccaggttcgtttgcatcactaaca

SEQ ID NO: 3463669 - DNA, 25 bp, Homo sapien
caggttcgtttgcatcactaacact

SEQ ID NO: 3463670 - DNA, 25 bp, Homo sapien
aggttcgtttgcatcactaacacta

SEQ ID NO: 3463671 - DNA, 25 bp, Homo sapien
ccaggttcgtttgcatcactaacac

SEQ ID NO: 3463672 - DNA, 25 bp, Homo sapien
tcatttcctgctttctattgaggaa

SEQ ID NO: 3463673 - DNA, 25 bp, Homo sapien
tgttgatgttgactacaattttgaa

SEQ ID NO: 3463674 - DNA, 25 bp, Homo sapien
aacaggcattcataacatgtgaatg

SEQ ID NO: 3463675 - DNA, 25 bp, Homo sapien
gcaactacctggaaaaatacttata

SEQ ID NO: 3463676 - DNA, 25 bp, Homo sapien
ctaagaaaagtagatcttgctttga

SEQ ID NO: 3463677 - DNA, 25 bp, Homo sapien
gaaaagtagatcttgctttgacaga

SEQ ID NO: 3463678 - DNA, 25 bp, Homo sapien
ttcttcagctaaaggattaatggca

SEQ ID NO: 3463679 - DNA, 25 bp, Homo sapien
tattcttcagctaaaggattaatgg

SEQ ID NO: 3463680 - DNA, 25 bp, Homo sapien
gccctaaaggacacagtattggtct

SEQ ID NO: 3463681 - DNA, 25 bp, Homo sapien
aatttcctccgaatatcagctgccc

SEQ ID NO: 3463682 - DNA, 25 bp, Homo sapien
catatgcaggtggagggatttggta

SEQ ID NO: 3463683 - DNA, 25 bp, Homo sapien
gatttggtaggttctagcgtgctag

SEQ ID NO: 3463684 - DNA, 25 bp, Homo sapien
cattggcaaggggtactcttctcca

SEQ ID NO: 3463685 - DNA, 25 bp, Homo sapien
gcaaggggtactcttctccaggaag

SEQ ID NO: 3463686 - DNA, 25 bp, Homo sapien
atcttccattggcaaggggtactct

SEQ ID NO: 3463687 - DNA, 25 bp, Homo sapien
cttccattggcaaggggtactcttc

SEQ ID NO: 3463688 - DNA, 25 bp, Homo sapien
caaacatcttggtcacgacgataca

SEQ ID NO: 3463689 - DNA, 25 bp, Homo sapien
cactacatgaaggacatggtttaaa

SEQ ID NO: 3463690 - DNA, 25 bp, Homo sapien
gagcatcccttgtgttctcagagtc

SEQ ID NO: 3463691 - DNA, 25 bp, Homo sapien
gagtccatattgctttgacctaggt

SEQ ID NO: 3463692 - DNA, 25 bp, Homo sapien
aaggcaatttactagggccattctt

SEQ ID NO: 3463693 - DNA, 25 bp, Homo sapien
aggcaatttactagggccattctta

SEQ ID NO: 3463694 - DNA, 25 bp, Homo sapien
taaggcaatttactagggccattct

SEQ ID NO: 3463695 - DNA, 25 bp, Homo sapien
ttaaggcaatttactagggccattc

SEQ ID NO: 3463696 - DNA, 25 bp, Homo sapien
taaatacttcatttacaggaaagtc

SEQ ID NO: 3463697 - DNA, 25 bp, Homo sapien
gaatggcccattttgaataaggatc

SEQ ID NO: 3463698 - DNA, 25 bp, Homo sapien
ctgcagccaacatgcgaacttggtg

SEQ ID NO: 3463699 - DNA, 25 bp, Homo sapien
cgaacttggtgatgattgtcagcaa

SEQ ID NO: 3463700 - DNA, 25 bp, Homo sapien
ggaagaatctcccttcgtgtcctgg

SEQ ID NO: 3463701 - DNA, 25 bp, Homo sapien
tggaagaatctcccttcgtgtcctg

SEQ ID NO: 3463702 - DNA, 25 bp, Homo sapien
ctggaagaatctcccttcgtgtcct

SEQ ID NO: 3463703 - DNA, 25 bp, Homo sapien
ctgaagcttcaaaggaagtgctttc

SEQ ID NO: 3463704 - DNA, 25 bp, Homo sapien
gctgaagcttcaaaggaagtgcttt

SEQ ID NO: 3463705 - DNA, 25 bp, Homo sapien
tgctgaagcttcaaaggaagtgctt

SEQ ID NO: 3463706 - DNA, 25 bp, Homo sapien
accacagctatcaacgtcagtaaaa

SEQ ID NO: 3463707 - DNA, 25 bp, Homo sapien
cagctatcaacgtcagtaaaacaga

SEQ ID NO: 3463708 - DNA, 25 bp, Homo sapien
aaccacagctatcaacgtcagtaaa

SEQ ID NO: 3463709 - DNA, 25 bp, Homo sapien
ctttttcacaaggtgaggttctaat

SEQ ID NO: 3463710 - DNA, 25 bp, Homo sapien
ggtgaggttctaatccattctcttt

SEQ ID NO: 3463711 - DNA, 25 bp, Homo sapien
acaaagcctgtttttcgcagatagg

SEQ ID NO: 3463712 - DNA, 25 bp, Homo sapien
caaagcctgtttttcgcagataggg

SEQ ID NO: 3463713 - DNA, 25 bp, Homo sapien
gaagatttagccattccaaaaccag

SEQ ID NO: 3463714 - DNA, 25 bp, Homo sapien
atagaaatcctcaatatttgtgtag

SEQ ID NO: 3463715 - DNA, 25 bp, Homo sapien
cagataatctaaatgagatgccata

SEQ ID NO: 3463716 - DNA, 25 bp, Homo sapien
aagtcttctaaacgtctatatccaa

SEQ ID NO: 3463717 - DNA, 25 bp, Homo sapien
caccagatgtggaatcaaaacctta

SEQ ID NO: 3463718 - DNA, 25 bp, Homo sapien
gcagtctgttagaagacttttccag

SEQ ID NO: 3463719 - DNA, 25 bp, Homo sapien
gtctctggtaccctcataggcaaaa

SEQ ID NO: 3463720 - DNA, 25 bp, Homo sapien
catatcatagaccttggtagcagtc

SEQ ID NO: 3463721 - DNA, 25 bp, Homo sapien
tgattacagaccactacttcattta

SEQ ID NO: 3463722 - DNA, 25 bp, Homo sapien
tcagtaaatctctggctttgttgct

SEQ ID NO: 3463723 - DNA, 25 bp, Homo sapien
ggcaagagtttcaatcgaagttgaa

SEQ ID NO: 3463724 - DNA, 25 bp, Homo sapien
cctattcaggctctaaaaattgctg

SEQ ID NO: 3463725 - DNA, 25 bp, Homo sapien
gtatgacctggtaatttttctgcca

SEQ ID NO: 3463726 - DNA, 25 bp, Homo sapien
tatctgtgaacgtcaagacagctca

SEQ ID NO: 3463727 - DNA, 25 bp, Homo sapien
tccaaaagtattcgatgactgtaaa

SEQ ID NO: 3463728 - DNA, 25 bp, Homo sapien
gcagccaacctgtagactaagagga

SEQ ID NO: 3463729 - DNA, 25 bp, Homo sapien
actccaccacaatctctggtaaatt

SEQ ID NO: 3463730 - DNA, 25 bp, Homo sapien
gaatttgctggctcatgtaacgtca

SEQ ID NO: 3463731 - DNA, 25 bp, Homo sapien
ctagaatttgctggctcatgtaacg

SEQ ID NO: 3463732 - DNA, 25 bp, Homo sapien
ctctgactggcactagaatttgctg

SEQ ID NO: 3463733 - DNA, 25 bp, Homo sapien
tggcactagaatttgctggctcatg

SEQ ID NO: 3463734 - DNA, 25 bp, Homo sapien
taatcacatgcgatggaaaatgagg

SEQ ID NO: 3463735 - DNA, 25 bp, Homo sapien
ttaatcacatgcgatggaaaatgag

SEQ ID NO: 3463736 - DNA, 25 bp, Homo sapien
atcacatgcgatggaaaatgaggtg

SEQ ID NO: 3463737 - DNA, 25 bp, Homo sapien
ctttaatcacatgcgatggaaaatg

SEQ ID NO: 3463738 - DNA, 25 bp, Homo sapien
agctcctcctaagccactttttata

SEQ ID NO: 3463739 - DNA, 25 bp, Homo sapien
gtaataaactaacaaacaggtgata

SEQ ID NO: 3463740 - DNA, 25 bp, Homo sapien
ttatttgtttcagctgcttgctcac

SEQ ID NO: 3463741 - DNA, 25 bp, Homo sapien
caaagtataaataacgtctcgaaga

SEQ ID NO: 3463742 - DNA, 25 bp, Homo sapien
ctgaggctgacagttcgcttgagcc

SEQ ID NO: 3463743 - DNA, 25 bp, Homo sapien
tgaggaggaaggataatctgaaccc

SEQ ID NO: 3463744 - DNA, 25 bp, Homo sapien
gtttcccaggcaagtagcgcaattt

SEQ ID NO: 3463745 - DNA, 25 bp, Homo sapien
gaaagcaacattctggtatctacct

SEQ ID NO: 3463746 - DNA, 25 bp, Homo sapien
taatgacacatccatgatacaagaa

SEQ ID NO: 3463747 - DNA, 25 bp, Homo sapien
cgtaatgacacatccatgatacaag

SEQ ID NO: 3463748 - DNA, 25 bp, Homo sapien
ctacgtaatgacacatccatgatac

SEQ ID NO: 3463749 - DNA, 25 bp, Homo sapien
tgacacatccatgatacaagaaggc

SEQ ID NO: 3463750 - DNA, 25 bp, Homo sapien
gcatccttacagtaagtcacggctg

SEQ ID NO: 3463751 - DNA, 25 bp, Homo sapien
ggctgtctggcaaacctgacttaat

SEQ ID NO: 3463752 - DNA, 25 bp, Homo sapien
taagtgtaccaacaataacatgaag

SEQ ID NO: 3463753 - DNA, 25 bp, Homo sapien
cttaataagtcacaacaaagggaga

SEQ ID NO: 3463754 - DNA, 25 bp, Homo sapien
caacatggtcaggaaaaggatctaa

SEQ ID NO: 3463755 - DNA, 25 bp, Homo sapien
tatcactaagtatttcaacaagtcc

SEQ ID NO: 3463756 - DNA, 25 bp, Homo sapien
gatatagaggttttcattatccttg

SEQ ID NO: 3463757 - DNA, 25 bp, Homo sapien
taaaagcttaatcgtgatatagagg

SEQ ID NO: 3463758 - DNA, 25 bp, Homo sapien
gagtgaaaagggtcctctactgtat

SEQ ID NO: 3463759 - DNA, 25 bp, Homo sapien
caagagtgaaaagggtcctctactg

SEQ ID NO: 3463760 - DNA, 25 bp, Homo sapien
tccaagagtgaaaagggtcctctac

SEQ ID NO: 3463761 - DNA, 25 bp, Homo sapien
gaaaagggtcctctactgtatttga

SEQ ID NO: 3463762 - DNA, 25 bp, Homo sapien
caagtcttgtcaatggaagtgcatc

SEQ ID NO: 3463763 - DNA, 25 bp, Homo sapien
ccatctgatctttatgtagttccag

SEQ ID NO: 3463764 - DNA, 25 bp, Homo sapien
tgagaagctctcataatgtccacca

SEQ ID NO: 3463765 - DNA, 25 bp, Homo sapien
agttgtcttcgaagatcctttagtc

SEQ ID NO: 3463766 - DNA, 25 bp, Homo sapien
aagagttcagggtgagaagaccagt

SEQ ID NO: 3463767 - DNA, 25 bp, Homo sapien
taagcatggctagatgccgtggctc

SEQ ID NO: 3463768 - DNA, 25 bp, Homo sapien
gagagtctgaactaagtctgtgaca

SEQ ID NO: 3463769 - DNA, 25 bp, Homo sapien
agaccagttaggaccagttttacag

SEQ ID NO: 3463770 - DNA, 25 bp, Homo sapien
aatatgtagggaatgaatctgaact

SEQ ID NO: 3463771 - DNA, 25 bp, Homo sapien
tttaaactagcatgaagacaacact

SEQ ID NO: 3463772 - DNA, 25 bp, Homo sapien
gaatcattcaacactaaagctagaa

SEQ ID NO: 3463773 - DNA, 25 bp, Homo sapien
caaattgtgcagataagtcaacacc

SEQ ID NO: 3463774 - DNA, 25 bp, Homo sapien
ttggataactgcaacaaattgacaa

SEQ ID NO: 3463775 - DNA, 25 bp, Homo sapien
caactagtttcaccataatcccatc

SEQ ID NO: 3463776 - DNA, 25 bp, Homo sapien
ttgacaactagtttcaccataatcc

SEQ ID NO: 3463777 - DNA, 25 bp, Homo sapien
aaattgacaactagtttcaccataa

SEQ ID NO: 3463778 - DNA, 25 bp, Homo sapien
gactgaaatgtcacgcagcgcatga

SEQ ID NO: 3463779 - DNA, 25 bp, Homo sapien
taaataggcatgtaacttagctagc

SEQ ID NO: 3463780 - DNA, 25 bp, Homo sapien
taggtttcccctcaaatggctgtag

SEQ ID NO: 3463781 - DNA, 25 bp, Homo sapien
cctatatgtgatccgcagttgactg

SEQ ID NO: 3463782 - DNA, 25 bp, Homo sapien
ctatggtagagaaatctataggacc

SEQ ID NO: 3463783 - DNA, 25 bp, Homo sapien
gaaatctataggacccacttctccc

SEQ ID NO: 3463784 - DNA, 25 bp, Homo sapien
tagagaaatctataggacccacttc

SEQ ID NO: 3463785 - DNA, 25 bp, Homo sapien
tataggacccacttctcccaagcag

SEQ ID NO: 3463786 - DNA, 25 bp, Homo sapien
acttaagggccttggtataagatgc

SEQ ID NO: 3463787 - DNA, 25 bp, Homo sapien
taagggccttggtataagatgcatc

SEQ ID NO: 3463788 - DNA, 25 bp, Homo sapien
cttctaccagtgtgttattcaggta

SEQ ID NO: 3463789 - DNA, 25 bp, Homo sapien
gttattcaggtaggtcagcattatg

SEQ ID NO: 3463790 - DNA, 25 bp, Homo sapien
gccagcattggatctgttgtcatct

SEQ ID NO: 3463791 - DNA, 25 bp, Homo sapien
agaaactatgtccagtctttgtggc

SEQ ID NO: 3463792 - DNA, 25 bp, Homo sapien
taaaaggctgtagataggccagcat

SEQ ID NO: 3463793 - DNA, 25 bp, Homo sapien
taacagctgctgatcgaactttgac

SEQ ID NO: 3463794 - DNA, 25 bp, Homo sapien
agtcagtgtctttatccaaatgtca

SEQ ID NO: 3463795 - DNA, 25 bp, Homo sapien
cagatttatatcatccaggccttca

SEQ ID NO: 3463796 - DNA, 25 bp, Homo sapien
gtgcctccactgtccaaaaaagcac

SEQ ID NO: 3463797 - DNA, 25 bp, Homo sapien
caaatgtcatgattttcacttagag

SEQ ID NO: 3463798 - DNA, 25 bp, Homo sapien
tgaaaaatccctgaacatgtgtaga

SEQ ID NO: 3463799 - DNA, 25 bp, Homo sapien
ttgtggatcggctcgtttgcgagaa

SEQ ID NO: 3463800 - DNA, 25 bp, Homo sapien
caagtatggaagtacagtctgacaa

SEQ ID NO: 3463801 - DNA, 25 bp, Homo sapien
tttgcgagaagtgtcgaagacagct

SEQ ID NO: 3463802 - DNA, 25 bp, Homo sapien
caactgtgctaaatcatggagctag

SEQ ID NO: 3463803 - DNA, 25 bp, Homo sapien
caggaaaggatagtgctacaggcaa

SEQ ID NO: 3463804 - DNA, 25 bp, Homo sapien
gaagagtaatagtcatcagagcagg

SEQ ID NO: 3463805 - DNA, 25 bp, Homo sapien
aagcagtaaggatgctaagggcaga

SEQ ID NO: 3463806 - DNA, 25 bp, Homo sapien
ccacaacagcaagcattgttctttg

SEQ ID NO: 3463807 - DNA, 25 bp, Homo sapien
tccaaacagcatcggaaaaagtgct

SEQ ID NO: 3463808 - DNA, 25 bp, Homo sapien
tagtccacaacagcaagcattgttc

SEQ ID NO: 3463809 - DNA, 25 bp, Homo sapien
aaacagcatcggaaaaagtgctctg

SEQ ID NO: 3463810 - DNA, 25 bp, Homo sapien
catgtaccacagactaagaatagga

SEQ ID NO: 3463811 - DNA, 25 bp, Homo sapien
gactatcacctgatacaaaattggg

SEQ ID NO: 3463812 - DNA, 25 bp, Homo sapien
ccactgtgttaataggtaggtcaag

SEQ ID NO: 3463813 - DNA, 25 bp, Homo sapien
tgggacatggtagtgcttaagagca

SEQ ID NO: 3463814 - DNA, 25 bp, Homo sapien
aatttaaatccagccagaaagcatc

SEQ ID NO: 3463815 - DNA, 25 bp, Homo sapien
cttggcaacttctagataatttaaa

SEQ ID NO: 3463816 - DNA, 25 bp, Homo sapien
gccagaaagcatcattaaaaattgt

SEQ ID NO: 3463817 - DNA, 25 bp, Homo sapien
cttctagataatttaaatccagcca

SEQ ID NO: 3463818 - DNA, 25 bp, Homo sapien
taaagtgagcagcacaagactgagc

SEQ ID NO: 3463819 - DNA, 25 bp, Homo sapien
agtgagcagcacaagactgagctac

SEQ ID NO: 3463820 - DNA, 25 bp, Homo sapien
aaagtgagcagcacaagactgagct

SEQ ID NO: 3463821 - DNA, 25 bp, Homo sapien
ctgtaaagtgagcagcacaagactg

SEQ ID NO: 3463822 - DNA, 25 bp, Homo sapien
ctcttgatcatccatacttttctta

SEQ ID NO: 3463823 - DNA, 25 bp, Homo sapien
cttgatcatccatacttttcttatc

SEQ ID NO: 3463824 - DNA, 25 bp, Homo sapien
ttctcttgatcatccatacttttct

SEQ ID NO: 3463825 - DNA, 25 bp, Homo sapien
gcatagatttctgcatagagtaaag

SEQ ID NO: 3463826 - DNA, 25 bp, Homo sapien
actgcttgaacgtaggagcttggga

SEQ ID NO: 3463827 - DNA, 25 bp, Homo sapien
ggactgcttgaacgtaggagcttgg

SEQ ID NO: 3463828 - DNA, 25 bp, Homo sapien
tgcttgaacgtaggagcttgggacc

SEQ ID NO: 3463829 - DNA, 25 bp, Homo sapien
gcttgaacgtaggagcttgggacca

SEQ ID NO: 3463830 - DNA, 25 bp, Homo sapien
tcagtctcctggtcacaagtaatcc

SEQ ID NO: 3463831 - DNA, 25 bp, Homo sapien
ggtctcagtctcctggtcacaagta

SEQ ID NO: 3463832 - DNA, 25 bp, Homo sapien
gtctcagtctcctggtcacaagtaa

SEQ ID NO: 3463833 - DNA, 25 bp, Homo sapien
ctacatgtgcaggccactatgccca

SEQ ID NO: 3463834 - DNA, 25 bp, Homo sapien
gaaatagttgtattctggcttcctt

SEQ ID NO: 3463835 - DNA, 25 bp, Homo sapien
aatagttgtattctggcttccttct

SEQ ID NO: 3463836 - DNA, 25 bp, Homo sapien
ctagaaatagttgtattctggcttc

SEQ ID NO: 3463837 - DNA, 25 bp, Homo sapien
ctgtaaacttattccagtttcttct

SEQ ID NO: 3463838 - DNA, 25 bp, Homo sapien
taagccttgattaacaccacagtgg

SEQ ID NO: 3463839 - DNA, 25 bp, Homo sapien
cctaaaactgtacatgggctgggtg

SEQ ID NO: 3463840 - DNA, 25 bp, Homo sapien
agttcagtacccatgcttagcacag

SEQ ID NO: 3463841 - DNA, 25 bp, Homo sapien
tgtagtctacccgagaagaattgcc

SEQ ID NO: 3463842 - DNA, 25 bp, Homo sapien
cctatacttctgtagatttctaaga

SEQ ID NO: 3463843 - DNA, 25 bp, Homo sapien
ctagtaatgggttgtaacatcttcc

SEQ ID NO: 3463844 - DNA, 25 bp, Homo sapien
tacaaactatctggctcccctatac

SEQ ID NO: 3463845 - DNA, 25 bp, Homo sapien
gggttgtaacatcttccctccacca

SEQ ID NO: 3463846 - DNA, 25 bp, Homo sapien
taactccttcataaacagaattact

SEQ ID NO: 3463847 - DNA, 25 bp, Homo sapien
aagattgtgaaaatagctttgggtt

SEQ ID NO: 3463848 - DNA, 25 bp, Homo sapien
cagaattactataccgttgtttaga

SEQ ID NO: 3463849 - DNA, 25 bp, Homo sapien
cacacataactccttcataaacaga

SEQ ID NO: 3463850 - DNA, 25 bp, Homo sapien
cattgcttcgtgttcatatgttcgt

SEQ ID NO: 3463851 - DNA, 25 bp, Homo sapien
ctgaatgattcctgcctggcgtgtt

SEQ ID NO: 3463852 - DNA, 25 bp, Homo sapien
gggattgctgtttcgaggtcatatg

SEQ ID NO: 3463853 - DNA, 25 bp, Homo sapien
tcatatgttactagggctttgcccc

SEQ ID NO: 3463854 - DNA, 25 bp, Homo sapien
gaagcagtaagtacactacctggca

SEQ ID NO: 3463855 - DNA, 25 bp, Homo sapien
caaagggctctaatatttcatggaa

SEQ ID NO: 3463856 - DNA, 25 bp, Homo sapien
ggagtatccctgaatgtttagccta

SEQ ID NO: 3463857 - DNA, 25 bp, Homo sapien
tagtgatggctttaccaaatctggg

SEQ ID NO: 3463858 - DNA, 25 bp, Homo sapien
ctagttcaggacaccagtctttatt

SEQ ID NO: 3463859 - DNA, 25 bp, Homo sapien
ggtaatgaagttcttctagttcagg

SEQ ID NO: 3463860 - DNA, 25 bp, Homo sapien
tttaaatagacggaaagaatatggc

SEQ ID NO: 3463861 - DNA, 25 bp, Homo sapien
tgacggaagtgcaatggtcccactg

SEQ ID NO: 3463862 - DNA, 25 bp, Homo sapien
tagagcattgtacaatgattcatgg

SEQ ID NO: 3463863 - DNA, 25 bp, Homo sapien
tgtagagaattctctgtctcttaga

SEQ ID NO: 3463864 - DNA, 25 bp, Homo sapien
tcatggtaactggttccttctactt

SEQ ID NO: 3463865 - DNA, 25 bp, Homo sapien
ttgagactttcataaaatgtagaga

SEQ ID NO: 3463866 - DNA, 25 bp, Homo sapien
cctgctaagtgtgggatagagcgaa

SEQ ID NO: 3463867 - DNA, 25 bp, Homo sapien
tccaatggcctgcaacctgctaagt

SEQ ID NO: 3463868 - DNA, 25 bp, Homo sapien
tagagcgaatacacagactcaaggc

SEQ ID NO: 3463869 - DNA, 25 bp, Homo sapien
cagactcaaggctgcgcttacacat

SEQ ID NO: 3463870 - DNA, 25 bp, Homo sapien
gccatgataggctcctgaaaactaa

SEQ ID NO: 3463871 - DNA, 25 bp, Homo sapien
tccaaaatgactgtgcgtagagcca

SEQ ID NO: 3463872 - DNA, 25 bp, Homo sapien
ctgagtgttcttgaaagttctggcc

SEQ ID NO: 3463873 - DNA, 25 bp, Homo sapien
tacaaggtgtttggtgagaatgtcc

SEQ ID NO: 3463874 - DNA, 25 bp, Homo sapien
atcatttgcttgagaatactcaggg

SEQ ID NO: 3463875 - DNA, 25 bp, Homo sapien
tccttttttgcccagaatacttgtg

SEQ ID NO: 3463876 - DNA, 25 bp, Homo sapien
gagactccacagctaactgaattgt

SEQ ID NO: 3463877 - DNA, 25 bp, Homo sapien
cactcagagactccacagctaactg

SEQ ID NO: 3463878 - DNA, 25 bp, Homo sapien
tgtgtatgtaagttttaggctggga

SEQ ID NO: 3463879 - DNA, 25 bp, Homo sapien
ctgtgtatgtaagttttaggctggg

SEQ ID NO: 3463880 - DNA, 25 bp, Homo sapien
tatgtaagttttaggctgggattgt

SEQ ID NO: 3463881 - DNA, 25 bp, Homo sapien
tgtatgtaagttttaggctgggatt

SEQ ID NO: 3463882 - DNA, 25 bp, Homo sapien
cttttctagataggtctgcatgatg

SEQ ID NO: 3463883 - DNA, 25 bp, Homo sapien
tttctgctaaccagttgccacaaac

SEQ ID NO: 3463884 - DNA, 25 bp, Homo sapien
gcatgatgaccgcaggattttctaa

SEQ ID NO: 3463885 - DNA, 25 bp, Homo sapien
caggattttctaagcacgtttctgc

SEQ ID NO: 3463886 - DNA, 25 bp, Homo sapien
tcaaattccgatgatttcatgtagt

SEQ ID NO: 3463887 - DNA, 25 bp, Homo sapien
cataatttccagcaacttctactgc

SEQ ID NO: 3463888 - DNA, 25 bp, Homo sapien
gtattgagtatctgaaaaccgggct

SEQ ID NO: 3463889 - DNA, 25 bp, Homo sapien
tttcaggagagcttgcttgttttca

SEQ ID NO: 3463890 - DNA, 25 bp, Homo sapien
ttaactggtgaacataaaattgtca

SEQ ID NO: 3463891 - DNA, 25 bp, Homo sapien
tcagttaactggtgaacataaaatt

SEQ ID NO: 3463892 - DNA, 25 bp, Homo sapien
ttgtcacttgtagaaacctagttac

SEQ ID NO: 3463893 - DNA, 25 bp, Homo sapien
cataaaattgtcacttgtagaaacc

SEQ ID NO: 3463894 - DNA, 25 bp, Homo sapien
ttcaactgctttacataagaagcgt

SEQ ID NO: 3463895 - DNA, 25 bp, Homo sapien
gcagggctaattcatccaactccag

SEQ ID NO: 3463896 - DNA, 25 bp, Homo sapien
cctctttcagtgcacgcagggctaa

SEQ ID NO: 3463897 - DNA, 25 bp, Homo sapien
gctctcgctgaacctttactgtgta

SEQ ID NO: 3463898 - DNA, 25 bp, Homo sapien
gccagagggaacaaagtcggaatac

SEQ ID NO: 3463899 - DNA, 25 bp, Homo sapien
agccagagggaacaaagtcggaata

SEQ ID NO: 3463900 - DNA, 25 bp, Homo sapien
cacagggtagaatattgggctgagt

SEQ ID NO: 3463901 - DNA, 25 bp, Homo sapien
agcacagggtagaatattgggctga

SEQ ID NO: 3463902 - DNA, 25 bp, Homo sapien
gggtagaatattgggctgagtaaca

SEQ ID NO: 3463903 - DNA, 25 bp, Homo sapien
tcaagcacagggtagaatattgggc

SEQ ID NO: 3463904 - DNA, 25 bp, Homo sapien
tggtacataagaggcaaaaatttat

SEQ ID NO: 3463905 - DNA, 25 bp, Homo sapien
tctagcagccaattggtacataaga

SEQ ID NO: 3463906 - DNA, 25 bp, Homo sapien
ccaattggtacataagaggcaaaaa

SEQ ID NO: 3463907 - DNA, 25 bp, Homo sapien
caaaaatttatatgttggaatcttc

SEQ ID NO: 3463908 - DNA, 25 bp, Homo sapien
catgaaatcctaggcctcccatcat

SEQ ID NO: 3463909 - DNA, 25 bp, Homo sapien
tgaggacttcatgaaatcctaggcc

SEQ ID NO: 3463910 - DNA, 25 bp, Homo sapien
ggacttcatgaaatcctaggcctcc

SEQ ID NO: 3463911 - DNA, 25 bp, Homo sapien
attattgaggacttcatgaaatcct

SEQ ID NO: 3463912 - DNA, 25 bp, Homo sapien
tttgctaaggccagtataataaaca

SEQ ID NO: 3463913 - DNA, 25 bp, Homo sapien
gagctttgtttaggcacatttttag

SEQ ID NO: 3463914 - DNA, 25 bp, Homo sapien
ggctacctctggtttagtcagaaat

SEQ ID NO: 3463915 - DNA, 25 bp, Homo sapien
tagtcagaaattcatctctgtttgc

SEQ ID NO: 3463916 - DNA, 25 bp, Homo sapien
cacacttctaaaaggtacgtatgtt

SEQ ID NO: 3463917 - DNA, 25 bp, Homo sapien
cagccttgaaccgattttagatggc

SEQ ID NO: 3463918 - DNA, 25 bp, Homo sapien
gactgaatatcacacttctaaaagg

SEQ ID NO: 3463919 - DNA, 25 bp, Homo sapien
caccgtgccagccttgaaccgattt

SEQ ID NO: 3463920 - DNA, 25 bp, Homo sapien
cttccactgagtggcatctaagttt

SEQ ID NO: 3463921 - DNA, 25 bp, Homo sapien
catattattctatttgcagcctctg

SEQ ID NO: 3463922 - DNA, 25 bp, Homo sapien
ctaagtttgctaatataatataagc

SEQ ID NO: 3463923 - DNA, 25 bp, Homo sapien
tgcctcaacacttctgaccatctga

SEQ ID NO: 3463924 - DNA, 25 bp, Homo sapien
gcagataccactggccccaacttgt

SEQ ID NO: 3463925 - DNA, 25 bp, Homo sapien
acttgttgctaatctgtggttcagg

SEQ ID NO: 3463926 - DNA, 25 bp, Homo sapien
gaaggtcaagcaggaatagtcagca

SEQ ID NO: 3463927 - DNA, 25 bp, Homo sapien
tgaggaacagcattgaaggtcaagc

SEQ ID NO: 3463928 - DNA, 25 bp, Homo sapien
ctgtatttaaaaatgaagagatttt

SEQ ID NO: 3463929 - DNA, 25 bp, Homo sapien
aaaatgaagagattttagtgacaaa

SEQ ID NO: 3463930 - DNA, 25 bp, Homo sapien
atttaaaaatgaagagattttagtg

SEQ ID NO: 3463931 - DNA, 25 bp, Homo sapien
taaaaatgaagagattttagtgaca

SEQ ID NO: 3463932 - DNA, 25 bp, Homo sapien
aattggctggtctgctggaatattt

SEQ ID NO: 3463933 - DNA, 25 bp, Homo sapien
ccatagtagggacaacaacatcttc

SEQ ID NO: 3463934 - DNA, 25 bp, Homo sapien
tggctggtctgctggaatatttatg

SEQ ID NO: 3463935 - DNA, 25 bp, Homo sapien
tccatagtagggacaacaacatctt

SEQ ID NO: 3463936 - DNA, 25 bp, Homo sapien
cctacacaatctattatttttggta

SEQ ID NO: 3463937 - DNA, 25 bp, Homo sapien
tttacacctcctgctaagcgaaatt

SEQ ID NO: 3463938 - DNA, 25 bp, Homo sapien
cctgctaagcgaaattctgctttaa

SEQ ID NO: 3463939 - DNA, 25 bp, Homo sapien
ttaaatgactgtatagtcaccagat

SEQ ID NO: 3463940 - DNA, 25 bp, Homo sapien
tattacacatctggaagacctgttg

SEQ ID NO: 3463941 - DNA, 25 bp, Homo sapien
agtttccgtgtttctctgcagtaat

SEQ ID NO: 3463942 - DNA, 25 bp, Homo sapien
catcttgtctcaggtcatcacggcc

SEQ ID NO: 3463943 - DNA, 25 bp, Homo sapien
taagtacagatagttaatttcctct

SEQ ID NO: 3463944 - DNA, 25 bp, Homo sapien
aaagcattatgaatatgggcatgag

SEQ ID NO: 3463945 - DNA, 25 bp, Homo sapien
tatgtttttggtgaactaacagaag

SEQ ID NO: 3463946 - DNA, 25 bp, Homo sapien
acttcacccaaccaaatggcatctt

SEQ ID NO: 3463947 - DNA, 25 bp, Homo sapien
agcattatgaatatgggcatgagcc

SEQ ID NO: 3463948 - DNA, 25 bp, Homo sapien
gactcctggtccaaataatggcatc

SEQ ID NO: 3463949 - DNA, 25 bp, Homo sapien
gaaaacatttgtagactcctggtcc

SEQ ID NO: 3463950 - DNA, 25 bp, Homo sapien
tctttattatttggtccttcacaga

SEQ ID NO: 3463951 - DNA, 25 bp, Homo sapien
cacagaaaacatttgtagactcctg

SEQ ID NO: 3463952 - DNA, 25 bp, Homo sapien
tcctcacgctttagcttcttgagta

SEQ ID NO: 3463953 - DNA, 25 bp, Homo sapien
aatcctcacgctttagcttcttgag

SEQ ID NO: 3463954 - DNA, 25 bp, Homo sapien
aagcaatcctcacgctttagcttct

SEQ ID NO: 3463955 - DNA, 25 bp, Homo sapien
gcaatcctcacgctttagcttcttg

SEQ ID NO: 3463956 - DNA, 25 bp, Homo sapien
acaaaattgtccatgagttggtaac

SEQ ID NO: 3463957 - DNA, 25 bp, Homo sapien
actgcagaagtagggtggtaatagc

SEQ ID NO: 3463958 - DNA, 25 bp, Homo sapien
ctgcctggaagttgaccaataggac

SEQ ID NO: 3463959 - DNA, 25 bp, Homo sapien
taaaatgactcccattacttggtga

SEQ ID NO: 3463960 - DNA, 25 bp, Homo sapien
atttggcctgtatcttttatgagca

SEQ ID NO: 3463961 - DNA, 25 bp, Homo sapien
aatcatttggcctgtatcttttatg

SEQ ID NO: 3463962 - DNA, 25 bp, Homo sapien
gcactgaaatcatttggcctgtatc

SEQ ID NO: 3463963 - DNA, 25 bp, Homo sapien
taacaagaaattcaccaatggggac

SEQ ID NO: 3463964 - DNA, 25 bp, Homo sapien
gaatttttccatgcagaagtaacgg

SEQ ID NO: 3463965 - DNA, 25 bp, Homo sapien
taagccaatcgcttctcaaaccaaa

SEQ ID NO: 3463966 - DNA, 25 bp, Homo sapien
gaagaagtagctacactgcgcgtat

SEQ ID NO: 3463967 - DNA, 25 bp, Homo sapien
accaaatagctggatccaagaattt

SEQ ID NO: 3463968 - DNA, 25 bp, Homo sapien
tcaaaacatacatgccctgccttcc

SEQ ID NO: 3463969 - DNA, 25 bp, Homo sapien
ttctgtacatgtctatcaccaagtc

SEQ ID NO: 3463970 - DNA, 25 bp, Homo sapien
tatatgtacaagttctgctgactgc

SEQ ID NO: 3463971 - DNA, 25 bp, Homo sapien
attctgtacatgtctatcaccaagt

SEQ ID NO: 3463972 - DNA, 25 bp, Homo sapien
atatgtacaagttctgctgactgct

SEQ ID NO: 3463973 - DNA, 25 bp, Homo sapien
tcacctagtgattaatactgtttaa

SEQ ID NO: 3463974 - DNA, 25 bp, Homo sapien
tagaagtttgtcattacattcacac

SEQ ID NO: 3463975 - DNA, 25 bp, Homo sapien
tagttagaagcttcagttatctggg

SEQ ID NO: 3463976 - DNA, 25 bp, Homo sapien
ctgtctattccacctagaaattcca

SEQ ID NO: 3463977 - DNA, 25 bp, Homo sapien
ctgtaatgtcctgcaaaactatact

SEQ ID NO: 3463978 - DNA, 25 bp, Homo sapien
tactactactgacatcgatgcagtc

SEQ ID NO: 3463979 - DNA, 25 bp, Homo sapien
gttcacttcgagttgtaagaaatca

SEQ ID NO: 3463980 - DNA, 25 bp, Homo sapien
catttcaccccaactgtaatgtcct

SEQ ID NO: 3463981 - DNA, 25 bp, Homo sapien
aaggaactgtctcaggagtaggaag

SEQ ID NO: 3463982 - DNA, 25 bp, Homo sapien
aagacaccttcaacacccgtaatgc

SEQ ID NO: 3463983 - DNA, 25 bp, Homo sapien
aacacccgtaatgcccatgccatcc

SEQ ID NO: 3463984 - DNA, 25 bp, Homo sapien
aatatctctggtgagtctaaaagga

SEQ ID NO: 3463985 - DNA, 25 bp, Homo sapien
acaatggttaacagagtttcctgag

SEQ ID NO: 3463986 - DNA, 25 bp, Homo sapien
cacttccatggttttctcacagcat

SEQ ID NO: 3463987 - DNA, 25 bp, Homo sapien
ctctacaatggttaacagagtttcc

SEQ ID NO: 3463988 - DNA, 25 bp, Homo sapien
ttcctgagagtttctcatcacttcc

SEQ ID NO: 3463989 - DNA, 25 bp, Homo sapien
tactgcagaaccaatggcaaactgt

SEQ ID NO: 3463990 - DNA, 25 bp, Homo sapien
cgtattattgggacctatttcagca

SEQ ID NO: 3463991 - DNA, 25 bp, Homo sapien
agatgcctcggttcataaaggtgca

SEQ ID NO: 3463992 - DNA, 25 bp, Homo sapien
tattgaggcatccatgttaccatgt

SEQ ID NO: 3463993 - DNA, 25 bp, Homo sapien
tccggcctctgctgtaaatacaaag

SEQ ID NO: 3463994 - DNA, 25 bp, Homo sapien
tcatggtccagtcaaagagtggatc

SEQ ID NO: 3463995 - DNA, 25 bp, Homo sapien
caaagagtggatcatatagaaggac

SEQ ID NO: 3463996 - DNA, 25 bp, Homo sapien
cagagtagggtgaagctcagtttca

SEQ ID NO: 3463997 - DNA, 25 bp, Homo sapien
tgtatgagcaaattcacttgtccac

SEQ ID NO: 3463998 - DNA, 25 bp, Homo sapien
ttccatcctgggaaaagtcggctga

SEQ ID NO: 3463999 - DNA, 25 bp, Homo sapien
gacacgttcagctactttgttgaaa

SEQ ID NO: 3464000 - DNA, 25 bp, Homo sapien
gggtctatggcctgctgtatgagca

SEQ ID NO: 3464001 - DNA, 25 bp, Homo sapien
tatttctaaagagtgaaagcagaga

SEQ ID NO: 3464002 - DNA, 25 bp, Homo sapien
gcgcccagcccgaatgaccattatt

SEQ ID NO: 3464003 - DNA, 25 bp, Homo sapien
tctaaaggctgaatgaaagggtaat

SEQ ID NO: 3464004 - DNA, 25 bp, Homo sapien
ccctacttaaagtatgttggcaggt

SEQ ID NO: 3464005 - DNA, 25 bp, Homo sapien
tgcccactagcacaaggagatgagg

SEQ ID NO: 3464006 - DNA, 25 bp, Homo sapien
gacacatggaagcttatactctcag

SEQ ID NO: 3464007 - DNA, 25 bp, Homo sapien
taagaatgggcttgtgtgcagcaac

SEQ ID NO: 3464008 - DNA, 25 bp, Homo sapien
catggacagtacagaagggcttaaa

SEQ ID NO: 3464009 - DNA, 25 bp, Homo sapien
ttaatctccgcagctgggatgaaca

SEQ ID NO: 3464010 - DNA, 25 bp, Homo sapien
taatctccgcagctgggatgaacat

SEQ ID NO: 3464011 - DNA, 25 bp, Homo sapien
atctccgcagctgggatgaacattt

SEQ ID NO: 3464012 - DNA, 25 bp, Homo sapien
ctccgcagctgggatgaacattttc

SEQ ID NO: 3464013 - DNA, 25 bp, Homo sapien
tacgaggagaaagctcaatcaccca

SEQ ID NO: 3464014 - DNA, 25 bp, Homo sapien
cctaggcttgtgatctgtatgtaaa

SEQ ID NO: 3464015 - DNA, 25 bp, Homo sapien
gaacaggagcctcatagcataccat

SEQ ID NO: 3464016 - DNA, 25 bp, Homo sapien
tctctggatgcaacaactagcaaga

SEQ ID NO: 3464017 - DNA, 25 bp, Homo sapien
tgatttctccagcagtgtattggga

SEQ ID NO: 3464018 - DNA, 25 bp, Homo sapien
tgaccaagagtttgtgaacctactg

SEQ ID NO: 3464019 - DNA, 25 bp, Homo sapien
gcagaaagagttccagcttgccaaa

SEQ ID NO: 3464020 - DNA, 25 bp, Homo sapien
ttgagcaactgactggcaaacccca

SEQ ID NO: 3464021 - DNA, 25 bp, Homo sapien
gccttcagtatctatttttatctat

SEQ ID NO: 3464022 - DNA, 25 bp, Homo sapien
ccagccttcagtatctatttttatc

SEQ ID NO: 3464023 - DNA, 25 bp, Homo sapien
cttcagtatctatttttatctatcc

SEQ ID NO: 3464024 - DNA, 25 bp, Homo sapien
acccagccttcagtatctattttta

SEQ ID NO: 3464025 - DNA, 25 bp, Homo sapien
gctgaccgggaagtacacattaatc

SEQ ID NO: 3464026 - DNA, 25 bp, Homo sapien
cccaatcctccgcaaagatattact

SEQ ID NO: 3464027 - DNA, 25 bp, Homo sapien
gcaaagatattactccgtccacctt

SEQ ID NO: 3464028 - DNA, 25 bp, Homo sapien
tgctcatactgcgccttcacagatc

SEQ ID NO: 3464029 - DNA, 25 bp, Homo sapien
taggtgaagggaatagtgtcccttc

SEQ ID NO: 3464030 - DNA, 25 bp, Homo sapien
tgcccactggtttgagccttcgttg

SEQ ID NO: 3464031 - DNA, 25 bp, Homo sapien
tactgttccggtagcctttgtgccc

SEQ ID NO: 3464032 - DNA, 25 bp, Homo sapien
tctctcagcgcgtactactgttccg

SEQ ID NO: 3464033 - DNA, 25 bp, Homo sapien
gaaagcgggcttctaacagaaccag

SEQ ID NO: 3464034 - DNA, 25 bp, Homo sapien
aagcggttggtctatatcccctgca

SEQ ID NO: 3464035 - DNA, 25 bp, Homo sapien
tatactaagcccaacttcgtagaca

SEQ ID NO: 3464036 - DNA, 25 bp, Homo sapien
aaagccactgacaatcgaaagcggg

SEQ ID NO: 3464037 - DNA, 25 bp, Homo sapien
tcaaaaaattctatagggagacagc

SEQ ID NO: 3464038 - DNA, 25 bp, Homo sapien
gcaagttgagacaaaccaggcagat

SEQ ID NO: 3464039 - DNA, 25 bp, Homo sapien
tgggaggagattcaccaatatctga

SEQ ID NO: 3464040 - DNA, 25 bp, Homo sapien
tactgtaagtatggatcaaattgca

SEQ ID NO: 3464041 - DNA, 25 bp, Homo sapien
atttatattgcctctgccaaacagg

SEQ ID NO: 3464042 - DNA, 25 bp, Homo sapien
gcctcaaattccaggtgctaaaggc

SEQ ID NO: 3464043 - DNA, 25 bp, Homo sapien
tgaggcttgtcaaaactgggattat

SEQ ID NO: 3464044 - DNA, 25 bp, Homo sapien
tatggcaagaaaggttgcctaactc

SEQ ID NO: 3464045 - DNA, 25 bp, Homo sapien
taaaatatgtactctggccggttgc

SEQ ID NO: 3464046 - DNA, 25 bp, Homo sapien
tattaaataagagcaagctgtcctg

SEQ ID NO: 3464047 - DNA, 25 bp, Homo sapien
ccaaggttcagttcactaaagtgca

SEQ ID NO: 3464048 - DNA, 25 bp, Homo sapien
tctaatcaatgccaagtatccaagg

SEQ ID NO: 3464049 - DNA, 25 bp, Homo sapien
gatgtctaggaaaatactctgtctc

SEQ ID NO: 3464050 - DNA, 25 bp, Homo sapien
tcgtttctctttaacggagatgtct

SEQ ID NO: 3464051 - DNA, 25 bp, Homo sapien
gggccaaacatgtgatcgtttctct

SEQ ID NO: 3464052 - DNA, 25 bp, Homo sapien
tagtactgtggaagaggggccaaac

SEQ ID NO: 3464053 - DNA, 25 bp, Homo sapien
tgattgaaataggtcttcactccta

SEQ ID NO: 3464054 - DNA, 25 bp, Homo sapien
gattgaaataggtcttcactcctat

SEQ ID NO: 3464055 - DNA, 25 bp, Homo sapien
ttgaaataggtcttcactcctattt

SEQ ID NO: 3464056 - DNA, 25 bp, Homo sapien
ttacagagacatgattgaaataggt

SEQ ID NO: 3464057 - DNA, 25 bp, Homo sapien
cgctctcccgcaggtagtgtccagc

SEQ ID NO: 3464058 - DNA, 25 bp, Homo sapien
ggtcaactcggagggccagaacctc

SEQ ID NO: 3464059 - DNA, 25 bp, Homo sapien
tctcccgcaggtagtgtccagccgc

SEQ ID NO: 3464060 - DNA, 25 bp, Homo sapien
aggcggtcaactcggagggccagaa

SEQ ID NO: 3464061 - DNA, 25 bp, Homo sapien
gtaaagctcgcacaagggctcaagg

SEQ ID NO: 3464062 - DNA, 25 bp, Homo sapien
ggcttggcccaaactccgtggatgt

SEQ ID NO: 3464063 - DNA, 25 bp, Homo sapien
aaggcaaggcctggtcttctgccac

SEQ ID NO: 3464064 - DNA, 25 bp, Homo sapien
cccacttcgattacagaggctttga

SEQ ID NO: 3464065 - DNA, 25 bp, Homo sapien
tctctgggcggtgtttgtagcaagc

SEQ ID NO: 3464066 - DNA, 25 bp, Homo sapien
gaaaccagagatagagacgctgctc

SEQ ID NO: 3464067 - DNA, 25 bp, Homo sapien
tactatgttggaaaaggctctctgc

SEQ ID NO: 3464068 - DNA, 25 bp, Homo sapien
cactgttaaccaggcggactgtgga

SEQ ID NO: 3464069 - DNA, 25 bp, Homo sapien
gatttacaaccctaatatcccaggc

SEQ ID NO: 3464070 - DNA, 25 bp, Homo sapien
taaaagatgatttgaggaaccctcc

SEQ ID NO: 3464071 - DNA, 25 bp, Homo sapien
gatggcttatctccaagtgaaccgc

SEQ ID NO: 3464072 - DNA, 25 bp, Homo sapien
tctatgaggatgacccagtggactc

SEQ ID NO: 3464073 - DNA, 25 bp, Homo sapien
cttcccttgatgctcctgtggttcc

SEQ ID NO: 3464074 - DNA, 25 bp, Homo sapien
ttcccttgatgctcctgtggttcca

SEQ ID NO: 3464075 - DNA, 25 bp, Homo sapien
tcccttgatgctcctgtggttccat

SEQ ID NO: 3464076 - DNA, 25 bp, Homo sapien
gttcatttctattatgatcccagga

SEQ ID NO: 3464077 - DNA, 25 bp, Homo sapien
tcccaggaggtatacacagctggaa

SEQ ID NO: 3464078 - DNA, 25 bp, Homo sapien
tattatgatcccaggaggtatacac

SEQ ID NO: 3464079 - DNA, 25 bp, Homo sapien
catttctattatgatcccaggaggt

SEQ ID NO: 3464080 - DNA, 25 bp, Homo sapien
ggttccaaaagcagtggcgttccaa

SEQ ID NO: 3464081 - DNA, 25 bp, Homo sapien
ggttattctatataagcccggccat

SEQ ID NO: 3464082 - DNA, 25 bp, Homo sapien
gacagtcagctggacagtcaacgta

SEQ ID NO: 3464083 - DNA, 25 bp, Homo sapien
cagcagtcgggtagagacagtcagc

SEQ ID NO: 3464084 - DNA, 25 bp, Homo sapien
cacgaaaccatttcactgcttggag

SEQ ID NO: 3464085 - DNA, 25 bp, Homo sapien
cacttgcacgaaaccatttcactgc

SEQ ID NO: 3464086 - DNA, 25 bp, Homo sapien
ctgattcccacttgcacgaaaccat

SEQ ID NO: 3464087 - DNA, 25 bp, Homo sapien
ttcccacttgcacgaaaccatttca

SEQ ID NO: 3464088 - DNA, 25 bp, Homo sapien
gggaagtattcagactgaccatcct

SEQ ID NO: 3464089 - DNA, 25 bp, Homo sapien
gcttctgtactctcggttttcctag

SEQ ID NO: 3464090 - DNA, 25 bp, Homo sapien
tcctctgccgtttgagagccacggg

SEQ ID NO: 3464091 - DNA, 25 bp, Homo sapien
tgaccatcctctgccgtttgagagc

SEQ ID NO: 3464092 - DNA, 25 bp, Homo sapien
taagcagtggactgaagtggcatga

SEQ ID NO: 3464093 - DNA, 25 bp, Homo sapien
aagcagtggactgaagtggcatgac

SEQ ID NO: 3464094 - DNA, 25 bp, Homo sapien
ctaagcagtggactgaagtggcatg

SEQ ID NO: 3464095 - DNA, 25 bp, Homo sapien
gtgagctggtgagtgtcggactgtg

SEQ ID NO: 3464096 - DNA, 25 bp, Homo sapien
tgtagcccagcaggattccagaaag

SEQ ID NO: 3464097 - DNA, 25 bp, Homo sapien
gggatgcaccatgagggctgtagcc

SEQ ID NO: 3464098 - DNA, 25 bp, Homo sapien
gagtgtcggactgtggggatgcacc

SEQ ID NO: 3464099 - DNA, 25 bp, Homo sapien
gaaatctggaaaggagacttcaaag

SEQ ID NO: 3464100 - DNA, 25 bp, Homo sapien
tttttcttcccggatgagcttcaga

SEQ ID NO: 3464101 - DNA, 25 bp, Homo sapien
cagatcgtcatttgcttccctgttc

SEQ ID NO: 3464102 - DNA, 25 bp, Homo sapien
aatctggaaaggagacttcaaagct

SEQ ID NO: 3464103 - DNA, 25 bp, Homo sapien
atttcccaatgatttggatgtgatg

SEQ ID NO: 3464104 - DNA, 25 bp, Homo sapien
gcttttctgaccatagattttagac

SEQ ID NO: 3464105 - DNA, 25 bp, Homo sapien
catagattttagactggaagatgtc

SEQ ID NO: 3464106 - DNA, 25 bp, Homo sapien
caatgatttggatgtgatgtaggaa

SEQ ID NO: 3464107 - DNA, 25 bp, Homo sapien
gatggctgaacttgtaggagatcaa

SEQ ID NO: 3464108 - DNA, 25 bp, Homo sapien
ctggaaggagaacgaggtgtaacaa

SEQ ID NO: 3464109 - DNA, 25 bp, Homo sapien
tatttggcaagatgtccttaaggag

SEQ ID NO: 3464110 - DNA, 25 bp, Homo sapien
aagacggtcaggtccgcgaagatca

SEQ ID NO: 3464111 - DNA, 25 bp, Homo sapien
tatcgcctttctaaagtaggagaac

SEQ ID NO: 3464112 - DNA, 25 bp, Homo sapien
gaagtatcgcctttctaaagtagga

SEQ ID NO: 3464113 - DNA, 25 bp, Homo sapien
tttccccagatggtgagtctcttgg

SEQ ID NO: 3464114 - DNA, 25 bp, Homo sapien
aagtatcgcctttctaaagtaggag

SEQ ID NO: 3464115 - DNA, 25 bp, Homo sapien
ccgggtatgataagctcctccattt

SEQ ID NO: 3464116 - DNA, 25 bp, Homo sapien
agaggtctaggcacctccgtgttcc

SEQ ID NO: 3464117 - DNA, 25 bp, Homo sapien
acagcatcaggagtcagaggtctag

SEQ ID NO: 3464118 - DNA, 25 bp, Homo sapien
tggagctgccgggtatgataagctc

SEQ ID NO: 3464119 - DNA, 25 bp, Homo sapien
cgtttcaggcaatgaaatgcggcgg

SEQ ID NO: 3464120 - DNA, 25 bp, Homo sapien
gcacctcacgggaggcgaaaggtcc

SEQ ID NO: 3464121 - DNA, 25 bp, Homo sapien
taggagctcgaggaatttgtcaaat

SEQ ID NO: 3464122 - DNA, 25 bp, Homo sapien
tgctcgcacgggtccgacagagctt

SEQ ID NO: 3464123 - DNA, 25 bp, Homo sapien
cctgctttctttactgatgagaagg

SEQ ID NO: 3464124 - DNA, 25 bp, Homo sapien
caggaagcccctgtatggtgaacag

SEQ ID NO: 3464125 - DNA, 25 bp, Homo sapien
tatggtgaacagttcttgccgatcc

SEQ ID NO: 3464126 - DNA, 25 bp, Homo sapien
tgcaggaagcccctgtatggtgaac

SEQ ID NO: 3464127 - DNA, 25 bp, Homo sapien
ttcttgccgatccatgggctctgct

SEQ ID NO: 3464128 - DNA, 25 bp, Homo sapien
ttaaatggttcccatgtcatcacag

SEQ ID NO: 3464129 - DNA, 25 bp, Homo sapien
taaatggttcccatgtcatcacagt

SEQ ID NO: 3464130 - DNA, 25 bp, Homo sapien
gcgtgtatgccatcaagagcattga

SEQ ID NO: 3464131 - DNA, 25 bp, Homo sapien
gatgcttagctcttacaagacaacc

SEQ ID NO: 3464132 - DNA, 25 bp, Homo sapien
cgatgctgctactttcatgccacaa

SEQ ID NO: 3464133 - DNA, 25 bp, Homo sapien
gattttcctccaagccatacttcga

SEQ ID NO: 3464134 - DNA, 25 bp, Homo sapien
tcaatggaagcagggatgttgagaa

SEQ ID NO: 3464135 - DNA, 25 bp, Homo sapien
tttgtcaatggaagcagggatgttg

SEQ ID NO: 3464136 - DNA, 25 bp, Homo sapien
ctttgtcaatggaagcagggatgtt

SEQ ID NO: 3464137 - DNA, 25 bp, Homo sapien
tgtcaatggaagcagggatgttgag

SEQ ID NO: 3464138 - DNA, 25 bp, Homo sapien
atcagagcacagcgtgaaattgctc

SEQ ID NO: 3464139 - DNA, 25 bp, Homo sapien
atctccagtgcttctaatcagagca

SEQ ID NO: 3464140 - DNA, 25 bp, Homo sapien
ccctgctttaaaggctcgttggaca

SEQ ID NO: 3464141 - DNA, 25 bp, Homo sapien
aaggctcgttggacatctccagtgc

SEQ ID NO: 3464142 - DNA, 25 bp, Homo sapien
agcattccattcacatgccttcttc

SEQ ID NO: 3464143 - DNA, 25 bp, Homo sapien
aattagagctgctaatcatttctga

SEQ ID NO: 3464144 - DNA, 25 bp, Homo sapien
tgtagaaacagaattagagctgcta

SEQ ID NO: 3464145 - DNA, 25 bp, Homo sapien
gacacgagacacctaaggccagact

SEQ ID NO: 3464146 - DNA, 25 bp, Homo sapien
gcggcggcgacagctcggatcaacc

SEQ ID NO: 3464147 - DNA, 25 bp, Homo sapien
agctcggatcaaccccagacacgag

SEQ ID NO: 3464148 - DNA, 25 bp, Homo sapien
gactcacggaaccagcatgggacaa

SEQ ID NO: 3464149 - DNA, 25 bp, Homo sapien
gttttttcttccagcgattgaagct

SEQ ID NO: 3464150 - DNA, 25 bp, Homo sapien
attgaagctccgcaccgggtcgggt

SEQ ID NO: 3464151 - DNA, 25 bp, Homo sapien
tcgcgctcgacctgccattcgggtt

SEQ ID NO: 3464152 - DNA, 25 bp, Homo sapien
tgccattcgggtttcttcagttgct

SEQ ID NO: 3464153 - DNA, 25 bp, Homo sapien
tggacaagggaaaatctgaaaatct

SEQ ID NO: 3464154 - DNA, 25 bp, Homo sapien
gaaaatcttgtgatttcatttacat

SEQ ID NO: 3464155 - DNA, 25 bp, Homo sapien
ttggacaagggaaaatctgaaaatc

SEQ ID NO: 3464156 - DNA, 25 bp, Homo sapien
tctgaaaatcttgtgatttcattta

SEQ ID NO: 3464157 - DNA, 25 bp, Homo sapien
ttggccgctccaagtacatctttac

SEQ ID NO: 3464158 - DNA, 25 bp, Homo sapien
tggccgctccaagtacatctttacc

SEQ ID NO: 3464159 - DNA, 25 bp, Homo sapien
gctgagaagtcatgattctttccta

SEQ ID NO: 3464160 - DNA, 25 bp, Homo sapien
agctgagaagtcatgattctttcct

SEQ ID NO: 3464161 - DNA, 25 bp, Homo sapien
caatgatgagaccagctgagaagtc

SEQ ID NO: 3464162 - DNA, 25 bp, Homo sapien
caccaatgatgagaccagctgagaa

SEQ ID NO: 3464163 - DNA, 25 bp, Homo sapien
aggtcggtagcatgaaaagatactg

SEQ ID NO: 3464164 - DNA, 25 bp, Homo sapien
tttggaggtcggtagcatgaaaaga

SEQ ID NO: 3464165 - DNA, 25 bp, Homo sapien
aacatttggaggtcggtagcatgaa

SEQ ID NO: 3464166 - DNA, 25 bp, Homo sapien
ctaacatttggaggtcggtagcatg

SEQ ID NO: 3464167 - DNA, 25 bp, Homo sapien
taaagtctgacgtttcttggggaga

SEQ ID NO: 3464168 - DNA, 25 bp, Homo sapien
aactcaagcgtgcaaggtcctttac

SEQ ID NO: 3464169 - DNA, 25 bp, Homo sapien
actcaagcgtgcaaggtcctttaca

SEQ ID NO: 3464170 - DNA, 25 bp, Homo sapien
caagcgtgcaaggtcctttacagat

SEQ ID NO: 3464171 - DNA, 25 bp, Homo sapien
ttgtgtccttcacaatttgagagta

SEQ ID NO: 3464172 - DNA, 25 bp, Homo sapien
ccttcacaatttgagagtagatact

SEQ ID NO: 3464173 - DNA, 25 bp, Homo sapien
tcacaatttgagagtagatactctc

SEQ ID NO: 3464174 - DNA, 25 bp, Homo sapien
tgagagtagatactctctaacacct

SEQ ID NO: 3464175 - DNA, 25 bp, Homo sapien
ctcacagactatgtagttctgttcc

SEQ ID NO: 3464176 - DNA, 25 bp, Homo sapien
gctcacagactatgtagttctgttc

SEQ ID NO: 3464177 - DNA, 25 bp, Homo sapien
agttctgttccaaagtggcaggggt

SEQ ID NO: 3464178 - DNA, 25 bp, Homo sapien
tcacagactatgtagttctgttcca

SEQ ID NO: 3464179 - DNA, 25 bp, Homo sapien
cagaaagcaaaataaacagccaata

SEQ ID NO: 3464180 - DNA, 25 bp, Homo sapien
tcagaaagcaaaataaacagccaat

SEQ ID NO: 3464181 - DNA, 25 bp, Homo sapien
agaaagcaaaataaacagccaatac

SEQ ID NO: 3464182 - DNA, 25 bp, Homo sapien
cacatgcacaaagaccgtagtccct

SEQ ID NO: 3464183 - DNA, 25 bp, Homo sapien
agtagacaacagcatcagatcacca

SEQ ID NO: 3464184 - DNA, 25 bp, Homo sapien
cccataagctagagagaaacccatc

SEQ ID NO: 3464185 - DNA, 25 bp, Homo sapien
aaatatagtacaggagaagaggcac

SEQ ID NO: 3464186 - DNA, 25 bp, Homo sapien
gctatacctcgaccaagaggctgca

SEQ ID NO: 3464187 - DNA, 25 bp, Homo sapien
ctgatggtgggtattgacaattgct

SEQ ID NO: 3464188 - DNA, 25 bp, Homo sapien
tattgacaattgctatacctcgacc

SEQ ID NO: 3464189 - DNA, 25 bp, Homo sapien
caattgctatacctcgaccaagagg

SEQ ID NO: 3464190 - DNA, 25 bp, Homo sapien
gctctccattgtccttgtgccaaga

SEQ ID NO: 3464191 - DNA, 25 bp, Homo sapien
actacaatggccacactgatacggg

SEQ ID NO: 3464192 - DNA, 25 bp, Homo sapien
aggagccattatcctggccaagctc

SEQ ID NO: 3464193 - DNA, 25 bp, Homo sapien
ccctctctgtgctggtgagacttat

SEQ ID NO: 3464194 - DNA, 25 bp, Homo sapien
tcatttgctgctgtcgaccatggag

SEQ ID NO: 3464195 - DNA, 25 bp, Homo sapien
gacgtagccggcaaaacactcggta

SEQ ID NO: 3464196 - DNA, 25 bp, Homo sapien
tgcaaggatagaaacaccaggacgt

SEQ ID NO: 3464197 - DNA, 25 bp, Homo sapien
aaaacactcggtacagatactggac

SEQ ID NO: 3464198 - DNA, 25 bp, Homo sapien
agacccctggctgcaatatcagtag

SEQ ID NO: 3464199 - DNA, 25 bp, Homo sapien
cagacccctggctgcaatatcagta

SEQ ID NO: 3464200 - DNA, 25 bp, Homo sapien
acccctggctgcaatatcagtagca

SEQ ID NO: 3464201 - DNA, 25 bp, Homo sapien
ccagacccctggctgcaatatcagt

SEQ ID NO: 3464202 - DNA, 25 bp, Homo sapien
ctgaagaacccaattcacggccggg

SEQ ID NO: 3464203 - DNA, 25 bp, Homo sapien
tgaagaacccaattcacggccggga

SEQ ID NO: 3464204 - DNA, 25 bp, Homo sapien
ctggcagttctacctgctctgtgaa

SEQ ID NO: 3464205 - DNA, 25 bp, Homo sapien
tatatgtgttggcatcctcaggaca

SEQ ID NO: 3464206 - DNA, 25 bp, Homo sapien
tgttggcatcctcaggacaatcaaa

SEQ ID NO: 3464207 - DNA, 25 bp, Homo sapien
tctgtgaatatatgtgttggcatcc

SEQ ID NO: 3464208 - DNA, 25 bp, Homo sapien
tctgagggtagcaaaattagcaaag

SEQ ID NO: 3464209 - DNA, 25 bp, Homo sapien
caaaattagcaaagcttcaccatcc

SEQ ID NO: 3464210 - DNA, 25 bp, Homo sapien
agctgctgcaccatagctttttctg

SEQ ID NO: 3464211 - DNA, 25 bp, Homo sapien
gatttccttcacaggtactttcttc

SEQ ID NO: 3464212 - DNA, 25 bp, Homo sapien
ccttctagtgggacgatgtgaaaat

SEQ ID NO: 3464213 - DNA, 25 bp, Homo sapien
agtgggacgatgtgaaaatgaaaga

SEQ ID NO: 3464214 - DNA, 25 bp, Homo sapien
ggccttctagtgggacgatgtgaaa

SEQ ID NO: 3464215 - DNA, 25 bp, Homo sapien
tctagtgggacgatgtgaaaatgaa

SEQ ID NO: 3464216 - DNA, 25 bp, Homo sapien
tgctggagcctcaatgtggacaagt

SEQ ID NO: 3464217 - DNA, 25 bp, Homo sapien
tctctgaaatggatagacaacccca

SEQ ID NO: 3464218 - DNA, 25 bp, Homo sapien
caggaggacccattcataaggcagc

SEQ ID NO: 3464219 - DNA, 25 bp, Homo sapien
ccctatggatggagcttgtaagtca

SEQ ID NO: 3464220 - DNA, 25 bp, Homo sapien
ggtgtttcaacagcgccaatacaag

SEQ ID NO: 3464221 - DNA, 25 bp, Homo sapien
tgtttcaacagcgccaatacaagta

SEQ ID NO: 3464222 - DNA, 25 bp, Homo sapien
gtgtttcaacagcgccaatacaagt

SEQ ID NO: 3464223 - DNA, 25 bp, Homo sapien
cttgatcttgagctaaaatagattc

SEQ ID NO: 3464224 - DNA, 25 bp, Homo sapien
gatcttgagctaaaatagattccaa

SEQ ID NO: 3464225 - DNA, 25 bp, Homo sapien
tgatcttgagctaaaatagattcca

SEQ ID NO: 3464226 - DNA, 25 bp, Homo sapien
atcttgatcttgagctaaaatagat

SEQ ID NO: 3464227 - DNA, 25 bp, Homo sapien
cagatcgtacataggagacgaaaca

SEQ ID NO: 3464228 - DNA, 25 bp, Homo sapien
agggcatattcaggtataggtaact

SEQ ID NO: 3464229 - DNA, 25 bp, Homo sapien
ggtaacttgctcacatcaaatactt

SEQ ID NO: 3464230 - DNA, 25 bp, Homo sapien
tatacagatcgtacataggagacga

SEQ ID NO: 3464231 - DNA, 25 bp, Homo sapien
caattactttatcggcttggctcct

SEQ ID NO: 3464232 - DNA, 25 bp, Homo sapien
tgtctgtgctctgtcccttcgagtc

SEQ ID NO: 3464233 - DNA, 25 bp, Homo sapien
ctgaagaaatcttacgcgtggtgcc

SEQ ID NO: 3464234 - DNA, 25 bp, Homo sapien
cagtatcattatcctgtctgtgctc

SEQ ID NO: 3464235 - DNA, 25 bp, Homo sapien
tcttcttcttcctgttcttcattac

SEQ ID NO: 3464236 - DNA, 25 bp, Homo sapien
tccatttcttcttcatcgtcttctt

SEQ ID NO: 3464237 - DNA, 25 bp, Homo sapien
cttccatttcttcttcatcgtcttc

SEQ ID NO: 3464238 - DNA, 25 bp, Homo sapien
cttcttcttcttcctgttcttcatt

SEQ ID NO: 3464239 - DNA, 25 bp, Homo sapien
caatccaaacacattatgccgcttc

SEQ ID NO: 3464240 - DNA, 25 bp, Homo sapien
taaggtccaatccaaacacattatg

SEQ ID NO: 3464241 - DNA, 25 bp, Homo sapien
caagaactgtgtaggaacttccttg

SEQ ID NO: 3464242 - DNA, 25 bp, Homo sapien
tttctcgtctttaaggtccaatcca

SEQ ID NO: 3464243 - DNA, 25 bp, Homo sapien
tgtgcacctacaaaagcatcctaga

SEQ ID NO: 3464244 - DNA, 25 bp, Homo sapien
tataatgagatagtagtaacgacct

SEQ ID NO: 3464245 - DNA, 25 bp, Homo sapien
tgttcctcctagaagatggctacgg

SEQ ID NO: 3464246 - DNA, 25 bp, Homo sapien
cataaacaaatgtcgcactaagagt

SEQ ID NO: 3464247 - DNA, 25 bp, Homo sapien
gatgtgagaaacactaagtctgagc

SEQ ID NO: 3464248 - DNA, 25 bp, Homo sapien
cctggatgtgagaaacactaagtct

SEQ ID NO: 3464249 - DNA, 25 bp, Homo sapien
accttggaagaacatcatctctggt

SEQ ID NO: 3464250 - DNA, 25 bp, Homo sapien
tggaagaacatcatctctggtgccc

SEQ ID NO: 3464251 - DNA, 25 bp, Homo sapien
ttactctgaattgccaaagtggaac

SEQ ID NO: 3464252 - DNA, 25 bp, Homo sapien
tactctgaattgccaaagtggaact

SEQ ID NO: 3464253 - DNA, 25 bp, Homo sapien
cttcatgcccacttgaattgatcca

SEQ ID NO: 3464254 - DNA, 25 bp, Homo sapien
catgcccacttgaattgatccatta

SEQ ID NO: 3464255 - DNA, 25 bp, Homo sapien
catcatgccaaaaccagctttaagc

SEQ ID NO: 3464256 - DNA, 25 bp, Homo sapien
tatataccaaactatttcagctggc

SEQ ID NO: 3464257 - DNA, 25 bp, Homo sapien
gctggcaacatctgagatcatgcta

SEQ ID NO: 3464258 - DNA, 25 bp, Homo sapien
gaaaatttacatcctcaggaagtca

SEQ ID NO: 3464259 - DNA, 25 bp, Homo sapien
tctatatcccccttacactgcttca

SEQ ID NO: 3464260 - DNA, 25 bp, Homo sapien
ggttctaagtagtccagcagaatct

SEQ ID NO: 3464261 - DNA, 25 bp, Homo sapien
tctcaacttacaatgagggagtcct

SEQ ID NO: 3464262 - DNA, 25 bp, Homo sapien
gaatcttccaacctgagaaacgagg

SEQ ID NO: 3464263 - DNA, 25 bp, Homo sapien
gaaatgcttcctatgacgagactac

SEQ ID NO: 3464264 - DNA, 25 bp, Homo sapien
taccatatcaaaagcccctacacag

SEQ ID NO: 3464265 - DNA, 25 bp, Homo sapien
tactgtacctaggaagacaaggatc

SEQ ID NO: 3464266 - DNA, 25 bp, Homo sapien
gatagggcactaatttaacaatcca

SEQ ID NO: 3464267 - DNA, 25 bp, Homo sapien
ttcatgaatcggtaactttagggtc

SEQ ID NO: 3464268 - DNA, 25 bp, Homo sapien
ggaagaaaatgcaccagacccttct

SEQ ID NO: 3464269 - DNA, 25 bp, Homo sapien
aatggcatcctgctccattagagga

SEQ ID NO: 3464270 - DNA, 25 bp, Homo sapien
tcaatattactgctacagcgcacag

SEQ ID NO: 3464271 - DNA, 25 bp, Homo sapien
tgtgatctggccaccaaggaattgc

SEQ ID NO: 3464272 - DNA, 25 bp, Homo sapien
gcagactatcatatctaccactcag

SEQ ID NO: 3464273 - DNA, 25 bp, Homo sapien
ttggatggttgagatcacaaaagcc

SEQ ID NO: 3464274 - DNA, 25 bp, Homo sapien
gacctaaccctttcagcagactatc

SEQ ID NO: 3464275 - DNA, 25 bp, Homo sapien
tttcatattgtctgggttatcagga

SEQ ID NO: 3464276 - DNA, 25 bp, Homo sapien
tactgaacatcaactctgtttcagg

SEQ ID NO: 3464277 - DNA, 25 bp, Homo sapien
ccaccgcgctcggtcaagatgttca

SEQ ID NO: 3464278 - DNA, 25 bp, Homo sapien
tagaactatgtcatgctgaactagt

SEQ ID NO: 3464279 - DNA, 25 bp, Homo sapien
agggaaatgaacaactagaactatg

SEQ ID NO: 3464280 - DNA, 25 bp, Homo sapien
actgcaagcccctacgctcaagcaa

SEQ ID NO: 3464281 - DNA, 25 bp, Homo sapien
aacatgcctggccttgtagtaactt

SEQ ID NO: 3464282 - DNA, 25 bp, Homo sapien
tatacaacaggttaccagtaagttg

SEQ ID NO: 3464283 - DNA, 25 bp, Homo sapien
tcccaaactaagtgggaccacacac

SEQ ID NO: 3464284 - DNA, 25 bp, Homo sapien
ccaccgcagccagctgatggcattt

SEQ ID NO: 3464285 - DNA, 25 bp, Homo sapien
gctaattcttgtagtttcagtaaaa

SEQ ID NO: 3464286 - DNA, 25 bp, Homo sapien
aaactctggacttcacgtgatccac

SEQ ID NO: 3464287 - DNA, 25 bp, Homo sapien
ccagctgatggcatttttttatggc

SEQ ID NO: 3464288 - DNA, 25 bp, Homo sapien
ttcttaagattgataaacactgttt

SEQ ID NO: 3464289 - DNA, 25 bp, Homo sapien
ccaaactctaatagaacttgtttat

SEQ ID NO: 3464290 - DNA, 25 bp, Homo sapien
tgcccagcccgataagagtatttct

SEQ ID NO: 3464291 - DNA, 25 bp, Homo sapien
actatacacatttctattggctaaa

SEQ ID NO: 3464292 - DNA, 25 bp, Homo sapien
cagagagtaactgagtaagctgtgc

SEQ ID NO: 3464293 - DNA, 25 bp, Homo sapien
gagtaagctgtgcggtggtaaaaca

SEQ ID NO: 3464294 - DNA, 25 bp, Homo sapien
tcttgatgctggatttagaaggttc

SEQ ID NO: 3464295 - DNA, 25 bp, Homo sapien
ttttcttgatgctggatttagaagg

SEQ ID NO: 3464296 - DNA, 25 bp, Homo sapien
ttttttcttgatgctggatttagaa

SEQ ID NO: 3464297 - DNA, 25 bp, Homo sapien
ttcttgatgctggatttagaaggtt

SEQ ID NO: 3464298 - DNA, 25 bp, Homo sapien
actttttttgcttctgcaactttgg

SEQ ID NO: 3464299 - DNA, 25 bp, Homo sapien
tttttttgcttctgcaactttggtc

SEQ ID NO: 3464300 - DNA, 25 bp, Homo sapien
tttttgcttctgcaactttggtcat

SEQ ID NO: 3464301 - DNA, 25 bp, Homo sapien
tactttttttgcttctgcaactttg

SEQ ID NO: 3464302 - DNA, 25 bp, Homo sapien
tgttatcttcttattcactttaaaa

SEQ ID NO: 3464303 - DNA, 25 bp, Homo sapien
ctccccttcatcagtaaatgttatc

SEQ ID NO: 3464304 - DNA, 25 bp, Homo sapien
aaatgttatcttcttattcacttta

SEQ ID NO: 3464305 - DNA, 25 bp, Homo sapien
tattcactttaaaatttctcttcat

SEQ ID NO: 3464306 - DNA, 25 bp, Homo sapien
caaatttgtcctcttcctgaagtct

SEQ ID NO: 3464307 - DNA, 25 bp, Homo sapien
tctttgtcaaatttgtcctcttcct

SEQ ID NO: 3464308 - DNA, 25 bp, Homo sapien
ctcagcatccttgatggcagatttc

SEQ ID NO: 3464309 - DNA, 25 bp, Homo sapien
tatgtaagttgataccacctgtgtc

SEQ ID NO: 3464310 - DNA, 25 bp, Homo sapien
gaaaatgactgatctcaaacccggg

SEQ ID NO: 3464311 - DNA, 25 bp, Homo sapien
tatttaccgagccacatggtaggct

SEQ ID NO: 3464312 - DNA, 25 bp, Homo sapien
gactactactatgggattggcacaa

SEQ ID NO: 3464313 - DNA, 25 bp, Homo sapien
gattataagagacgttctgccacga

SEQ ID NO: 3464314 - DNA, 25 bp, Homo sapien
ctttgcttgtctcttgttggcttct

SEQ ID NO: 3464315 - DNA, 25 bp, Homo sapien
ttgcttgtctcttgttggcttctct

SEQ ID NO: 3464316 - DNA, 25 bp, Homo sapien
ttctggcttccctttctttcagtct

SEQ ID NO: 3464317 - DNA, 25 bp, Homo sapien
ttctcttctggcttccctttctttc

SEQ ID NO: 3464318 - DNA, 25 bp, Homo sapien
cacatgggcttgaatccaattggaa

SEQ ID NO: 3464319 - DNA, 25 bp, Homo sapien
gaaagtgaatagaaggccacatggg

SEQ ID NO: 3464320 - DNA, 25 bp, Homo sapien
ccattctaccttaatagagcttgga

SEQ ID NO: 3464321 - DNA, 25 bp, Homo sapien
tcgtcctgcaccagaggaatacaag

SEQ ID NO: 3464322 - DNA, 25 bp, Homo sapien
tctgagatctagtggtggttctgcc

SEQ ID NO: 3464323 - DNA, 25 bp, Homo sapien
catggtgtttcacgcctgcacgtta

SEQ ID NO: 3464324 - DNA, 25 bp, Homo sapien
cctgttatgaggttgggttcacaca

SEQ ID NO: 3464325 - DNA, 25 bp, Homo sapien
ttttgggcacctttgaagacagagt

SEQ ID NO: 3464326 - DNA, 25 bp, Homo sapien
ctttaagatatggaggaaatggagc

SEQ ID NO: 3464327 - DNA, 25 bp, Homo sapien
tcctttaagatatggaggaaatgga

SEQ ID NO: 3464328 - DNA, 25 bp, Homo sapien
cctttaagatatggaggaaatggag

SEQ ID NO: 3464329 - DNA, 25 bp, Homo sapien
tttaagatatggaggaaatggagcc

SEQ ID NO: 3464330 - DNA, 25 bp, Homo sapien
atccagccatactgataatgttcct

SEQ ID NO: 3464331 - DNA, 25 bp, Homo sapien
ataatgttccttgcacccagaatgc

SEQ ID NO: 3464332 - DNA, 25 bp, Homo sapien
aatgttccttgcacccagaatgccc

SEQ ID NO: 3464333 - DNA, 25 bp, Homo sapien
tcatccagccatactgataatgttc

SEQ ID NO: 3464334 - DNA, 25 bp, Homo sapien
cttctggttcctaccaggatctgca

SEQ ID NO: 3464335 - DNA, 25 bp, Homo sapien
gactcattaagttctcaatagagat

SEQ ID NO: 3464336 - DNA, 25 bp, Homo sapien
ggatctgcactttcaaatcatgact

SEQ ID NO: 3464337 - DNA, 25 bp, Homo sapien
cacaagcttgtgacccatcaaacct

SEQ ID NO: 3464338 - DNA, 25 bp, Homo sapien
tgtcttaagtcccatccatagcggg

SEQ ID NO: 3464339 - DNA, 25 bp, Homo sapien
gttagtccagacaaaaaggctcgat

SEQ ID NO: 3464340 - DNA, 25 bp, Homo sapien
ttttcggtcatgtctggtggccagc

SEQ ID NO: 3464341 - DNA, 25 bp, Homo sapien
gaaagtccaatcctaggtgggccta

SEQ ID NO: 3464342 - DNA, 25 bp, Homo sapien
ggctaaaagctccaccctctaatca

SEQ ID NO: 3464343 - DNA, 25 bp, Homo sapien
tccaccctctaatcaactgtttggt

SEQ ID NO: 3464344 - DNA, 25 bp, Homo sapien
ctaccctgaagctatctagagatgc

SEQ ID NO: 3464345 - DNA, 25 bp, Homo sapien
aaaagctccaccctctaatcaactg

SEQ ID NO: 3464346 - DNA, 25 bp, Homo sapien
tcggacaccagtggccagtagacta

SEQ ID NO: 3464347 - DNA, 25 bp, Homo sapien
caatccaacaggtaccaacaggtgc

SEQ ID NO: 3464348 - DNA, 25 bp, Homo sapien
gactacaaattcacgggttcccaca

SEQ ID NO: 3464349 - DNA, 25 bp, Homo sapien
tatggaggcctaaactcagaaacag

SEQ ID NO: 3464350 - DNA, 25 bp, Homo sapien
aatggttaccatttccctgctcaga

SEQ ID NO: 3464351 - DNA, 25 bp, Homo sapien
tgacaatgccaaactgcttttgagc

SEQ ID NO: 3464352 - DNA, 25 bp, Homo sapien
ggacaatttctactgggtgttcagg

SEQ ID NO: 3464353 - DNA, 25 bp, Homo sapien
tctgagctaagtcagcttctactga

SEQ ID NO: 3464354 - DNA, 25 bp, Homo sapien
gaggcagcagtacacaatgatcacg

SEQ ID NO: 3464355 - DNA, 25 bp, Homo sapien
gccagagtacagtaacatttgtctg

SEQ ID NO: 3464356 - DNA, 25 bp, Homo sapien
gttttagtgatcctgtccacacatg

SEQ ID NO: 3464357 - DNA, 25 bp, Homo sapien
gaagatctcgtgtgccagacagctg

SEQ ID NO: 3464358 - DNA, 25 bp, Homo sapien
ctgggagtgtgcttggatcaaatcc

SEQ ID NO: 3464359 - DNA, 25 bp, Homo sapien
gtgtgcttggatcaaatccatcatc

SEQ ID NO: 3464360 - DNA, 25 bp, Homo sapien
tcatcactccaatccagaaaggctt

SEQ ID NO: 3464361 - DNA, 25 bp, Homo sapien
tcatcatcactccaatccagaaagg

SEQ ID NO: 3464362 - DNA, 25 bp, Homo sapien
cactatctgaatcttcagagcttct

SEQ ID NO: 3464363 - DNA, 25 bp, Homo sapien
tcactatctgaatcttcagagcttc

SEQ ID NO: 3464364 - DNA, 25 bp, Homo sapien
gccactgtatggactagactagcaa

SEQ ID NO: 3464365 - DNA, 25 bp, Homo sapien
gagaatttcaatgctggctcactcc

SEQ ID NO: 3464366 - DNA, 25 bp, Homo sapien
tcctttctaatgagttgccactgta

SEQ ID NO: 3464367 - DNA, 25 bp, Homo sapien
gagtactcagaccatctcaattcca

SEQ ID NO: 3464368 - DNA, 25 bp, Homo sapien
tgccccttaatacatcacctgactt

SEQ ID NO: 3464369 - DNA, 25 bp, Homo sapien
gccccttaatacatcacctgactta

SEQ ID NO: 3464370 - DNA, 25 bp, Homo sapien
ccccttaatacatcacctgacttac

SEQ ID NO: 3464371 - DNA, 25 bp, Homo sapien
aatctgcctattaaaagtgagctct

SEQ ID NO: 3464372 - DNA, 25 bp, Homo sapien
ccaattccttatctcccgtgaaagg

SEQ ID NO: 3464373 - DNA, 25 bp, Homo sapien
tacaaatctgcctattaaaagtgag

SEQ ID NO: 3464374 - DNA, 25 bp, Homo sapien
tcccgtgaaaggtacaaatctgcct

SEQ ID NO: 3464375 - DNA, 25 bp, Homo sapien
ggcatttccacggtgtttgctgtaa

SEQ ID NO: 3464376 - DNA, 25 bp, Homo sapien
gcgagatcggcagacacttgggcat

SEQ ID NO: 3464377 - DNA, 25 bp, Homo sapien
tcactcgcgagatcggcagacactt

SEQ ID NO: 3464378 - DNA, 25 bp, Homo sapien
cagacacttgggcatttccacggtg

SEQ ID NO: 3464379 - DNA, 25 bp, Homo sapien
agaagtgtccaatgctctgactcag

SEQ ID NO: 3464380 - DNA, 25 bp, Homo sapien
cagtcccacagggttatagtgccag

SEQ ID NO: 3464381 - DNA, 25 bp, Homo sapien
tctcaggtcagctcatcagaaatgg

SEQ ID NO: 3464382 - DNA, 25 bp, Homo sapien
aattagtgggctgtctattgcatcc

SEQ ID NO: 3464383 - DNA, 25 bp, Homo sapien
tctgttatgacttgttggtcccacg

SEQ ID NO: 3464384 - DNA, 25 bp, Homo sapien
tctgctaaagacaggccggtatcca

SEQ ID NO: 3464385 - DNA, 25 bp, Homo sapien
aaaggctctaaagtgtcccacctgg

SEQ ID NO: 3464386 - DNA, 25 bp, Homo sapien
tcttagcagatgtaacaccagctct

SEQ ID NO: 3464387 - DNA, 25 bp, Homo sapien
tcagtgatggcacaaagcatgtcct

SEQ ID NO: 3464388 - DNA, 25 bp, Homo sapien
ggaaatggtatcatccaccctcgat

SEQ ID NO: 3464389 - DNA, 25 bp, Homo sapien
caaaggcagtgtttccaatgacaag

SEQ ID NO: 3464390 - DNA, 25 bp, Homo sapien
tgcctacgcagtcataaccaaggtt

SEQ ID NO: 3464391 - DNA, 25 bp, Homo sapien
gacaggctgatgtttcaatgactca

SEQ ID NO: 3464392 - DNA, 25 bp, Homo sapien
cagtcattcaggataacagacaggc

SEQ ID NO: 3464393 - DNA, 25 bp, Homo sapien
tacatttacattaaggtccagcaca

SEQ ID NO: 3464394 - DNA, 25 bp, Homo sapien
catgtgttaccaagtggtgcctcca

SEQ ID NO: 3464395 - DNA, 25 bp, Homo sapien
tggtagtccaccaaaatccgctctt

SEQ ID NO: 3464396 - DNA, 25 bp, Homo sapien
tccacaggagtagaatcaaagccag

SEQ ID NO: 3464397 - DNA, 25 bp, Homo sapien
ttaaaacaccaacagtagaggatgc

SEQ ID NO: 3464398 - DNA, 25 bp, Homo sapien
ccctttttccacaggagtagaatca

SEQ ID NO: 3464399 - DNA, 25 bp, Homo sapien
aacaggtcaccctggttgaaagctg

SEQ ID NO: 3464400 - DNA, 25 bp, Homo sapien
ggtcaccctggttgaaagctgctaa

SEQ ID NO: 3464401 - DNA, 25 bp, Homo sapien
ctaacagtggctgccgttcttcacc

SEQ ID NO: 3464402 - DNA, 25 bp, Homo sapien
caggtcaccctggttgaaagctgct

SEQ ID NO: 3464403 - DNA, 25 bp, Homo sapien
gtgtatgtgctaacaaagcaagcaa

SEQ ID NO: 3464404 - DNA, 25 bp, Homo sapien
tttagtgtatgtgctaacaaagcaa

SEQ ID NO: 3464405 - DNA, 25 bp, Homo sapien
ggccatggtaatcttctctgcagca

SEQ ID NO: 3464406 - DNA, 25 bp, Homo sapien
tggtaatcttctctgcagcattcca

SEQ ID NO: 3464407 - DNA, 25 bp, Homo sapien
acattggaggctttggatacttatc

SEQ ID NO: 3464408 - DNA, 25 bp, Homo sapien
tacttatctgattgccgccaggatg

SEQ ID NO: 3464409 - DNA, 25 bp, Homo sapien
gctttggatacttatctgattgccg

SEQ ID NO: 3464410 - DNA, 25 bp, Homo sapien
cattggaggctttggatacttatct

SEQ ID NO: 3464411 - DNA, 25 bp, Homo sapien
tggctgcattgacctttcagttgca

SEQ ID NO: 3464412 - DNA, 25 bp, Homo sapien
gagtcagcttgtgaccctgtggaag

SEQ ID NO: 3464413 - DNA, 25 bp, Homo sapien
gttgcagttaggatcacacaggtag

SEQ ID NO: 3464414 - DNA, 25 bp, Homo sapien
gatcacacaggtagcatcctgcagc

SEQ ID NO: 3464415 - DNA, 25 bp, Homo sapien
ccacagactcgctgcaaaaaagcca

SEQ ID NO: 3464416 - DNA, 25 bp, Homo sapien
ccaattggctcaattttgctcaggc

SEQ ID NO: 3464417 - DNA, 25 bp, Homo sapien
tgtcactgctacggccagcacatgg

SEQ ID NO: 3464418 - DNA, 25 bp, Homo sapien
gctacggccagcacatggcttccaa

SEQ ID NO: 3464419 - DNA, 25 bp, Homo sapien
actgcacagcaatggaacaagcttt

SEQ ID NO: 3464420 - DNA, 25 bp, Homo sapien
ctgcacagcaatggaacaagcttta

SEQ ID NO: 3464421 - DNA, 25 bp, Homo sapien
gggcacaggagcctttgccaagtct

SEQ ID NO: 3464422 - DNA, 25 bp, Homo sapien
cctttgccaagtctgcgaccatctg

SEQ ID NO: 3464423 - DNA, 25 bp, Homo sapien
aagtctgcgaccatctgtggtctgg

SEQ ID NO: 3464424 - DNA, 25 bp, Homo sapien
tgtatctgtgctgtgtaaagggcac

SEQ ID NO: 3464425 - DNA, 25 bp, Homo sapien
ctaacacatccagtgtttgcccctg

SEQ ID NO: 3464426 - DNA, 25 bp, Homo sapien
tatgtatagttagtcatgtttcggg

SEQ ID NO: 3464427 - DNA, 25 bp, Homo sapien
ctagagcagtggcatatgtatagtt

SEQ ID NO: 3464428 - DNA, 25 bp, Homo sapien
gcagtggcatatgtatagttagtca

SEQ ID NO: 3464429 - DNA, 25 bp, Homo sapien
tagttagtcatgtttcgggtcatca

SEQ ID NO: 3464430 - DNA, 25 bp, Homo sapien
cccctgaagctggaacacattgtcc

SEQ ID NO: 3464431 - DNA, 25 bp, Homo sapien
gaacacattgtccttggctttgtca

SEQ ID NO: 3464432 - DNA, 25 bp, Homo sapien
ctcctaatgcacaacttgcttcccc

SEQ ID NO: 3464433 - DNA, 25 bp, Homo sapien
taatgcacaacttgcttccccctga

SEQ ID NO: 3464434 - DNA, 25 bp, Homo sapien
caggcattcactatggtctgcaaag

SEQ ID NO: 3464435 - DNA, 25 bp, Homo sapien
gatgaacaggcattcactatggtct

SEQ ID NO: 3464436 - DNA, 25 bp, Homo sapien
tatggtctgcaaagggctcgcattg

SEQ ID NO: 3464437 - DNA, 25 bp, Homo sapien
ggctcgcattgccaaagatcttctt

SEQ ID NO: 3464438 - DNA, 25 bp, Homo sapien
cagtccttgtgccaacaagcaaggg

SEQ ID NO: 3464439 - DNA, 25 bp, Homo sapien
tttcaacacaactgagtggcacagt

SEQ ID NO: 3464440 - DNA, 25 bp, Homo sapien
taacaaattgtagcagaagctctgg

SEQ ID NO: 3464441 - DNA, 25 bp, Homo sapien
tcccaaggcttgtctgcttcaggcc

SEQ ID NO: 3464442 - DNA, 25 bp, Homo sapien
taccagaaattccatggaaacgtgg

SEQ ID NO: 3464443 - DNA, 25 bp, Homo sapien
gctgatagcaaggttccagatgtct

SEQ ID NO: 3464444 - DNA, 25 bp, Homo sapien
gcttgtggcagactgctgatagcaa

SEQ ID NO: 3464445 - DNA, 25 bp, Homo sapien
agaaatagggaccagttgcttgtgg

SEQ ID NO: 3464446 - DNA, 25 bp, Homo sapien
ttctccatcaggggtcctctgtagc

SEQ ID NO: 3464447 - DNA, 25 bp, Homo sapien
tctccatcaggggtcctctgtagct

SEQ ID NO: 3464448 - DNA, 25 bp, Homo sapien
ctctaaataacccttctccatcagg

SEQ ID NO: 3464449 - DNA, 25 bp, Homo sapien
ttactgctctaaataacccttctcc

SEQ ID NO: 3464450 - DNA, 25 bp, Homo sapien
ccttcttcatggaactcacacagct

SEQ ID NO: 3464451 - DNA, 25 bp, Homo sapien
tccctaactattgtagaagtgtctt

SEQ ID NO: 3464452 - DNA, 25 bp, Homo sapien
ggccttcttcatggaactcacacag

SEQ ID NO: 3464453 - DNA, 25 bp, Homo sapien
tgtatccctaactattgtagaagtg

SEQ ID NO: 3464454 - DNA, 25 bp, Homo sapien
attagcaggattcaaacctgcacag

SEQ ID NO: 3464455 - DNA, 25 bp, Homo sapien
gagaaaccaacgaatttctagctcg

SEQ ID NO: 3464456 - DNA, 25 bp, Homo sapien
ttctagctcgttgccttaaccactc

SEQ ID NO: 3464457 - DNA, 25 bp, Homo sapien
ttcaaacctgcacagagagaaacca

SEQ ID NO: 3464458 - DNA, 25 bp, Homo sapien
cttgaacttggttcgtcaatgcctg

SEQ ID NO: 3464459 - DNA, 25 bp, Homo sapien
tcaatgcctgaccttttctccaact

SEQ ID NO: 3464460 - DNA, 25 bp, Homo sapien
ttctgtatgtactgccttcttgaac

SEQ ID NO: 3464461 - DNA, 25 bp, Homo sapien
gaacttggttcgtcaatgcctgacc

SEQ ID NO: 3464462 - DNA, 25 bp, Homo sapien
ttatcactgattataggctctctga

SEQ ID NO: 3464463 - DNA, 25 bp, Homo sapien
ataaggtcgaatagaaaggaggagt

SEQ ID NO: 3464464 - DNA, 25 bp, Homo sapien
tcttttggagaattgggataaggtc

SEQ ID NO: 3464465 - DNA, 25 bp, Homo sapien
tctgctccaagcagaatttgtttct

SEQ ID NO: 3464466 - DNA, 25 bp, Homo sapien
tcccagtgatgaagttgctgtaggg

SEQ ID NO: 3464467 - DNA, 25 bp, Homo sapien
gttgctgtagggggtatactgggtc

SEQ ID NO: 3464468 - DNA, 25 bp, Homo sapien
cctgtttcccagtgatgaagttgct

SEQ ID NO: 3464469 - DNA, 25 bp, Homo sapien
tgctgtagggggtatactgggtcat

SEQ ID NO: 3464470 - DNA, 25 bp, Homo sapien
caacccggctgcgttgtagccaatg

SEQ ID NO: 3464471 - DNA, 25 bp, Homo sapien
tcaaaatccacacgatagtgcctgc

SEQ ID NO: 3464472 - DNA, 25 bp, Homo sapien
gagaggtccttgatccagcacatct

SEQ ID NO: 3464473 - DNA, 25 bp, Homo sapien
tatgtcatgcagacaagcttgccca

SEQ ID NO: 3464474 - DNA, 25 bp, Homo sapien
tgctgctacatcttcagcaagggct

SEQ ID NO: 3464475 - DNA, 25 bp, Homo sapien
ttttgctgctacatcttcagcaagg

SEQ ID NO: 3464476 - DNA, 25 bp, Homo sapien
ttgctgctacatcttcagcaagggc

SEQ ID NO: 3464477 - DNA, 25 bp, Homo sapien
gctgctacatcttcagcaagggctt

SEQ ID NO: 3464478 - DNA, 25 bp, Homo sapien
tcttagcagcacttagagctctgtg

SEQ ID NO: 3464479 - DNA, 25 bp, Homo sapien
catccgaatggccagtttgggagag

SEQ ID NO: 3464480 - DNA, 25 bp, Homo sapien
tctttgggctgtccatccgaatggc

SEQ ID NO: 3464481 - DNA, 25 bp, Homo sapien
tatttctcagtacttagactcattt

SEQ ID NO: 3464482 - DNA, 25 bp, Homo sapien
ggaatccagtcgctcttctctaagt

SEQ ID NO: 3464483 - DNA, 25 bp, Homo sapien
tgctgccattccatgggaatccagt

SEQ ID NO: 3464484 - DNA, 25 bp, Homo sapien
agtcgctcttctctaagtccagctg

SEQ ID NO: 3464485 - DNA, 25 bp, Homo sapien
cattccatgggaatccagtcgctct

SEQ ID NO: 3464486 - DNA, 25 bp, Homo sapien
gttatatcttcccttctgctaactc

SEQ ID NO: 3464487 - DNA, 25 bp, Homo sapien
tttgttatatcttcccttctgctaa

SEQ ID NO: 3464488 - DNA, 25 bp, Homo sapien
gatctttgttatatcttcccttctg

SEQ ID NO: 3464489 - DNA, 25 bp, Homo sapien
tgttctgatctttgttatatcttcc

SEQ ID NO: 3464490 - DNA, 25 bp, Homo sapien
tgcatagaccctagctgatccagct

SEQ ID NO: 3464491 - DNA, 25 bp, Homo sapien
catctagtgaagaagcagagttcct

SEQ ID NO: 3464492 - DNA, 25 bp, Homo sapien
catcctgagtgcgtccacttggcca

SEQ ID NO: 3464493 - DNA, 25 bp, Homo sapien
tttgccatagctccagaaaagttct

SEQ ID NO: 3464494 - DNA, 25 bp, Homo sapien
aaaatgattcttgagatggtacttg

SEQ ID NO: 3464495 - DNA, 25 bp, Homo sapien
ctccagaagccaggggaagttctca

SEQ ID NO: 3464496 - DNA, 25 bp, Homo sapien
tctccagaagccaggggaagttctc

SEQ ID NO: 3464497 - DNA, 25 bp, Homo sapien
ccagaagccaggggaagttctcaca

SEQ ID NO: 3464498 - DNA, 25 bp, Homo sapien
gagtgaatggaccagagaccgagcc

SEQ ID NO: 3464499 - DNA, 25 bp, Homo sapien
tggagtgaatggaccagagaccgag

SEQ ID NO: 3464500 - DNA, 25 bp, Homo sapien
tgaatggaccagagaccgagccgcg

SEQ ID NO: 3464501 - DNA, 25 bp, Homo sapien
ggaccagagaccgagccgcgctgct

SEQ ID NO: 3464502 - DNA, 25 bp, Homo sapien
cccgccgcgcggctgcagtggcggc

SEQ ID NO: 3464503 - DNA, 25 bp, Homo sapien
ccccgccgcgcggctgcagtggcgg

SEQ ID NO: 3464504 - DNA, 25 bp, Homo sapien
ccccgaggcttttccggcatactgg

SEQ ID NO: 3464505 - DNA, 25 bp, Homo sapien
ctcccaagaggcagctgcaaactgt

SEQ ID NO: 3464506 - DNA, 25 bp, Homo sapien
atactggagccggtagacccgcagc

SEQ ID NO: 3464507 - DNA, 25 bp, Homo sapien
agacccgcagcgcacaggagagcct

SEQ ID NO: 3464508 - DNA, 25 bp, Homo sapien
gcgaccgcggctgacgcgcaggaac

SEQ ID NO: 3464509 - DNA, 25 bp, Homo sapien
gcgtcagatcccttgggtcccattc

SEQ ID NO: 3464510 - DNA, 25 bp, Homo sapien
tccctggacagcgtcagatcccttg

SEQ ID NO: 3464511 - DNA, 25 bp, Homo sapien
gcgggctccgggtacgcagtcctcc

SEQ ID NO: 3464512 - DNA, 25 bp, Homo sapien
tgctcatgccactcgacaggatggg

SEQ ID NO: 3464513 - DNA, 25 bp, Homo sapien
tgcctgtattttcggtcagcggacc

SEQ ID NO: 3464514 - DNA, 25 bp, Homo sapien
gtattttcggtcagcggaccccagc

SEQ ID NO: 3464515 - DNA, 25 bp, Homo sapien
ggcccgtggccgtgcaccagagcca

SEQ ID NO: 3464516 - DNA, 25 bp, Homo sapien
gccaaggactaagggagcaactgct

SEQ ID NO: 3464517 - DNA, 25 bp, Homo sapien
caagcaaggcgaccaaggagtgagc

SEQ ID NO: 3464518 - DNA, 25 bp, Homo sapien
ttcctaccagccaagaagaggacgg

SEQ ID NO: 3464519 - DNA, 25 bp, Homo sapien
aaaactgctccctgtagcgggaggg

SEQ ID NO: 3464520 - DNA, 25 bp, Homo sapien
agcaaaggtccggttgaggagacac

SEQ ID NO: 3464521 - DNA, 25 bp, Homo sapien
aggtgccgctgcctactgcgcctgg

SEQ ID NO: 3464522 - DNA, 25 bp, Homo sapien
cagaagatgagggtaaccaggacaa

SEQ ID NO: 3464523 - DNA, 25 bp, Homo sapien
gacaatcagcaccagcgtggaggag

SEQ ID NO: 3464524 - DNA, 25 bp, Homo sapien
acgaagaggacaacgacgaggcgtt

SEQ ID NO: 3464525 - DNA, 25 bp, Homo sapien
tctccagccgggtttcctttgcgtg

SEQ ID NO: 3464526 - DNA, 25 bp, Homo sapien
ttgcaaaaggccctcgccagctgtg

SEQ ID NO: 3464527 - DNA, 25 bp, Homo sapien
gccagctgtgtccaaacaggaggaa

SEQ ID NO: 3464528 - DNA, 25 bp, Homo sapien
ttaacgtacttatgctcggccagcg

SEQ ID NO: 3464529 - DNA, 25 bp, Homo sapien
taatatactattgcctgagcccggc

SEQ ID NO: 3464530 - DNA, 25 bp, Homo sapien
tgacagctatgtacattaccgggcc

SEQ ID NO: 3464531 - DNA, 25 bp, Homo sapien
tatttacaaataccgcacagtgcct

SEQ ID NO: 3464532 - DNA, 25 bp, Homo sapien
gaacatatgcgtagcttcagcacca

SEQ ID NO: 3464533 - DNA, 25 bp, Homo sapien
aattgagccctataagaagcagtgc

SEQ ID NO: 3464534 - DNA, 25 bp, Homo sapien
taaaagatgcaaactgagcttgggc

SEQ ID NO: 3464535 - DNA, 25 bp, Homo sapien
tattaaagagctaccactggatgag

SEQ ID NO: 3464536 - DNA, 25 bp, Homo sapien
ctgtctcttacaccctgtccaactg

SEQ ID NO: 3464537 - DNA, 25 bp, Homo sapien
tttctgtctcttacaccctgtccaa

SEQ ID NO: 3464538 - DNA, 25 bp, Homo sapien
tctcttacaccctgtccaactgcca

SEQ ID NO: 3464539 - DNA, 25 bp, Homo sapien
ctttctgtctcttacaccctgtcca

SEQ ID NO: 3464540 - DNA, 25 bp, Homo sapien
tagcatagcagccaccagtttggga

SEQ ID NO: 3464541 - DNA, 25 bp, Homo sapien
aaaattgtccaggatcctaggctcc

SEQ ID NO: 3464542 - DNA, 25 bp, Homo sapien
gctgaaccagcgaggattcctttaa

SEQ ID NO: 3464543 - DNA, 25 bp, Homo sapien
tctgcatagatctgaggaggctttt

SEQ ID NO: 3464544 - DNA, 25 bp, Homo sapien
cagcttcagagggttggttggtaaa

SEQ ID NO: 3464545 - DNA, 25 bp, Homo sapien
gccctcaaacccgaatgaaagtgtg

SEQ ID NO: 3464546 - DNA, 25 bp, Homo sapien
gcaatatcccttccttcgggctgag

SEQ ID NO: 3464547 - DNA, 25 bp, Homo sapien
tcttgcacagtagggaccacgttaa

SEQ ID NO: 3464548 - DNA, 25 bp, Homo sapien
gaacctgtctcataggacctcatgg

SEQ ID NO: 3464549 - DNA, 25 bp, Homo sapien
gctccactgggcatttaactggcat

SEQ ID NO: 3464550 - DNA, 25 bp, Homo sapien
gaggtgctcacacaaacgctcagct

SEQ ID NO: 3464551 - DNA, 25 bp, Homo sapien
tagctatcattgttgacgggaggaa

SEQ ID NO: 3464552 - DNA, 25 bp, Homo sapien
aatatattccttgataaccaattcc

SEQ ID NO: 3464553 - DNA, 25 bp, Homo sapien
tatcactttgtctgcaatatattcc

SEQ ID NO: 3464554 - DNA, 25 bp, Homo sapien
atattcaaccaaggtatcactttgt

SEQ ID NO: 3464555 - DNA, 25 bp, Homo sapien
cttataatattcaaccaaggtatca

SEQ ID NO: 3464556 - DNA, 25 bp, Homo sapien
catcatcttgcatcacatggaggac

SEQ ID NO: 3464557 - DNA, 25 bp, Homo sapien
tcacttctgactctttgggacctca

SEQ ID NO: 3464558 - DNA, 25 bp, Homo sapien
tgggacctcactccagcagttattt

SEQ ID NO: 3464559 - DNA, 25 bp, Homo sapien
caggaaaaactgtacgaaaatgagc

SEQ ID NO: 3464560 - DNA, 25 bp, Homo sapien
cttaggccctgtgacctgaggagtg

SEQ ID NO: 3464561 - DNA, 25 bp, Homo sapien
ggcaggtgctcatgtcattaactgc

SEQ ID NO: 3464562 - DNA, 25 bp, Homo sapien
tggggcaggtgctcatgtcattaac

SEQ ID NO: 3464563 - DNA, 25 bp, Homo sapien
agtggggcaggtgctcatgtcatta

SEQ ID NO: 3464564 - DNA, 25 bp, Homo sapien
ttagagctcatcctctttaggctct

SEQ ID NO: 3464565 - DNA, 25 bp, Homo sapien
tagagctcatcctctttaggctctg

SEQ ID NO: 3464566 - DNA, 25 bp, Homo sapien
agagctcatcctctttaggctctgc

SEQ ID NO: 3464567 - DNA, 25 bp, Homo sapien
cattctatcctctaaaggtcccttg

SEQ ID NO: 3464568 - DNA, 25 bp, Homo sapien
ccttgatgtccctgttagagatatt

SEQ ID NO: 3464569 - DNA, 25 bp, Homo sapien
tcagagagtttgacatcagaggaga

SEQ ID NO: 3464570 - DNA, 25 bp, Homo sapien
tgatgataagacaaggacaccgttg

SEQ ID NO: 3464571 - DNA, 25 bp, Homo sapien
ctggcaatggatttatgtcatgcag

SEQ ID NO: 3464572 - DNA, 25 bp, Homo sapien
gggagaataaagtgtagccaccact

SEQ ID NO: 3464573 - DNA, 25 bp, Homo sapien
tatgtcatgcagagaggtagacagc

SEQ ID NO: 3464574 - DNA, 25 bp, Homo sapien
gatttggggagaataaagtgtagcc

SEQ ID NO: 3464575 - DNA, 25 bp, Homo sapien
aaagcagcaagacatatgaacaaat

SEQ ID NO: 3464576 - DNA, 25 bp, Homo sapien
ctcactgggtattgtcaggaggaag

SEQ ID NO: 3464577 - DNA, 25 bp, Homo sapien
gaaagcagcaagacatatgaacaaa

SEQ ID NO: 3464578 - DNA, 25 bp, Homo sapien
gaattacagggatcctgaaggacag

SEQ ID NO: 3464579 - DNA, 25 bp, Homo sapien
cctgaaggacagaactatgccatca

SEQ ID NO: 3464580 - DNA, 25 bp, Homo sapien
cagaattacagggatcctgaaggac

SEQ ID NO: 3464581 - DNA, 25 bp, Homo sapien
ggacagaactatgccatcaggtcca

SEQ ID NO: 3464582 - DNA, 25 bp, Homo sapien
aagcagcataggaagtagtatagca

SEQ ID NO: 3464583 - DNA, 25 bp, Homo sapien
gaaagcagcataggaagtagtatag

SEQ ID NO: 3464584 - DNA, 25 bp, Homo sapien
aaagaaagcagcataggaagtagta

SEQ ID NO: 3464585 - DNA, 25 bp, Homo sapien
gcagcataggaagtagtatagcata

SEQ ID NO: 3464586 - DNA, 25 bp, Homo sapien
ggttttgcatagaaccgctgacaga

SEQ ID NO: 3464587 - DNA, 25 bp, Homo sapien
ccgctgacagatagggtttatgaga

SEQ ID NO: 3464588 - DNA, 25 bp, Homo sapien
ctgtgggtctgaaggttttgcatag

SEQ ID NO: 3464589 - DNA, 25 bp, Homo sapien
tatgagaagttagaaactccaggta

SEQ ID NO: 3464590 - DNA, 25 bp, Homo sapien
tcaagcagaccagtgccatttgcca

SEQ ID NO: 3464591 - DNA, 25 bp, Homo sapien
cctgaggagacgatacaggaagagg

SEQ ID NO: 3464592 - DNA, 25 bp, Homo sapien
ggctgtgactgggtgttgtcaattt

SEQ ID NO: 3464593 - DNA, 25 bp, Homo sapien
ctgattcaagcagaccagtgccatt

SEQ ID NO: 3464594 - DNA, 25 bp, Homo sapien
tcttcccaccccgagtgcggtgagg

SEQ ID NO: 3464595 - DNA, 25 bp, Homo sapien
cactagatgaagttatctgaatgag

SEQ ID NO: 3464596 - DNA, 25 bp, Homo sapien
taaaggcctttgaactaaatgaaca

SEQ ID NO: 3464597 - DNA, 25 bp, Homo sapien
ggccagtgccttacaaatttctcca

SEQ ID NO: 3464598 - DNA, 25 bp, Homo sapien
taaacattccaaaaggaatttctgc

SEQ ID NO: 3464599 - DNA, 25 bp, Homo sapien
tcaacagtagtgaatactagttgca

SEQ ID NO: 3464600 - DNA, 25 bp, Homo sapien
tgctagatgttccacaatttgaatg

SEQ ID NO: 3464601 - DNA, 25 bp, Homo sapien
cagtagttacttgattaaacattcc

SEQ ID NO: 3464602 - DNA, 25 bp, Homo sapien
aactccaggagcttgtacaccattg

SEQ ID NO: 3464603 - DNA, 25 bp, Homo sapien
tctcctacatctctcagactggctg

SEQ ID NO: 3464604 - DNA, 25 bp, Homo sapien
tggctgccccacaagctagatccat

SEQ ID NO: 3464605 - DNA, 25 bp, Homo sapien
gcttgtacaccattgggacattttt

SEQ ID NO: 3464606 - DNA, 25 bp, Homo sapien
gtggttctcgtgctttgagaacaga

SEQ ID NO: 3464607 - DNA, 25 bp, Homo sapien
gatgctagtggttctcgtgctttga

SEQ ID NO: 3464608 - DNA, 25 bp, Homo sapien
cctttcgtgatgctagtggttctcg

SEQ ID NO: 3464609 - DNA, 25 bp, Homo sapien
gataagagcctttcgtgatgctagt

SEQ ID NO: 3464610 - DNA, 25 bp, Homo sapien
cagagcccacaaccagctgcttaat

SEQ ID NO: 3464611 - DNA, 25 bp, Homo sapien
ctgcttaatgtgtctgtcttgagtc

SEQ ID NO: 3464612 - DNA, 25 bp, Homo sapien
agctgcttaatgtgtctgtcttgag

SEQ ID NO: 3464613 - DNA, 25 bp, Homo sapien
gagcccacaaccagctgcttaatgt

SEQ ID NO: 3464614 - DNA, 25 bp, Homo sapien
gcatgtgtctatgcccgggaggtaa

SEQ ID NO: 3464615 - DNA, 25 bp, Homo sapien
catgctgatgaagggaagaatccac

SEQ ID NO: 3464616 - DNA, 25 bp, Homo sapien
ttgatggaagctcgtagctgggacc

SEQ ID NO: 3464617 - DNA, 25 bp, Homo sapien
ggagtgaggcccattcatgtcagaa

SEQ ID NO: 3464618 - DNA, 25 bp, Homo sapien
caagttccttgatcatctacacttc

SEQ ID NO: 3464619 - DNA, 25 bp, Homo sapien
agttccttgatcatctacacttcca

SEQ ID NO: 3464620 - DNA, 25 bp, Homo sapien
gttccttgatcatctacacttccac

SEQ ID NO: 3464621 - DNA, 25 bp, Homo sapien
cttgatcatctacacttccaccctt

SEQ ID NO: 3464622 - DNA, 25 bp, Homo sapien
gcttgtgcttgggtaggaatgtgcc

SEQ ID NO: 3464623 - DNA, 25 bp, Homo sapien
tcagtgcttgtgcttgggtaggaat

SEQ ID NO: 3464624 - DNA, 25 bp, Homo sapien
tattcagtgcttgtgcttgggtagg

SEQ ID NO: 3464625 - DNA, 25 bp, Homo sapien
ttattcagtgcttgtgcttgggtag

SEQ ID NO: 3464626 - DNA, 25 bp, Homo sapien
tttaacaaacttggctttaccatca

SEQ ID NO: 3464627 - DNA, 25 bp, Homo sapien
tcatttaacaaacttggctttacca

SEQ ID NO: 3464628 - DNA, 25 bp, Homo sapien
ctgtcatttaacaaacttggcttta

SEQ ID NO: 3464629 - DNA, 25 bp, Homo sapien
ttaacaaacttggctttaccatcat

SEQ ID NO: 3464630 - DNA, 25 bp, Homo sapien
gaaaacctgctgatgcatctagcca

SEQ ID NO: 3464631 - DNA, 25 bp, Homo sapien
ctgaaaacctgctgatgcatctagc

SEQ ID NO: 3464632 - DNA, 25 bp, Homo sapien
aaacctgctgatgcatctagccaaa

SEQ ID NO: 3464633 - DNA, 25 bp, Homo sapien
cctgctgatgcatctagccaaaaac

SEQ ID NO: 3464634 - DNA, 25 bp, Homo sapien
cagtcaaacacttgccaaacaggcc

SEQ ID NO: 3464635 - DNA, 25 bp, Homo sapien
tttcctgggccaggttgttcctcac

SEQ ID NO: 3464636 - DNA, 25 bp, Homo sapien
tcagtcaaacacttgccaaacaggc

SEQ ID NO: 3464637 - DNA, 25 bp, Homo sapien
ttcctgggccaggttgttcctcact

SEQ ID NO: 3464638 - DNA, 25 bp, Homo sapien
gctttgcccaaacaggacaatcact

SEQ ID NO: 3464639 - DNA, 25 bp, Homo sapien
cattcctgtgtgaaactgtaactgg

SEQ ID NO: 3464640 - DNA, 25 bp, Homo sapien
cagacatggttagggtttaagggca

SEQ ID NO: 3464641 - DNA, 25 bp, Homo sapien
gagtaactgacccaaactgtgccca

SEQ ID NO: 3464642 - DNA, 25 bp, Homo sapien
gcatcatttcacgtgaagggtcact

SEQ ID NO: 3464643 - DNA, 25 bp, Homo sapien
cagaggcaggatccagttactttac

SEQ ID NO: 3464644 - DNA, 25 bp, Homo sapien
gttactttacacttggcatcagcca

SEQ ID NO: 3464645 - DNA, 25 bp, Homo sapien
caagcccaatatggttgagtaagcc

SEQ ID NO: 3464646 - DNA, 25 bp, Homo sapien
ctgtttggaacaagatgagagtgaa

SEQ ID NO: 3464647 - DNA, 25 bp, Homo sapien
tgtttggaacaagatgagagtgaat

SEQ ID NO: 3464648 - DNA, 25 bp, Homo sapien
taatacctcgatgggaacaagtgta

SEQ ID NO: 3464649 - DNA, 25 bp, Homo sapien
caataaataatacctcgatgggaac

SEQ ID NO: 3464650 - DNA, 25 bp, Homo sapien
gggaacaagtgtattagattcttct

SEQ ID NO: 3464651 - DNA, 25 bp, Homo sapien
cctcgatgggaacaagtgtattaga

SEQ ID NO: 3464652 - DNA, 25 bp, Homo sapien
tttttctggttgcttgcattgttgc

SEQ ID NO: 3464653 - DNA, 25 bp, Homo sapien
gttgcttgcattgttgctccttttc

SEQ ID NO: 3464654 - DNA, 25 bp, Homo sapien
tatggttttctagaccagcagaggc

SEQ ID NO: 3464655 - DNA, 25 bp, Homo sapien
tctcagtatggttttctagaccagc

SEQ ID NO: 3464656 - DNA, 25 bp, Homo sapien
cgctactcagagcttttgactgtga

SEQ ID NO: 3464657 - DNA, 25 bp, Homo sapien
tcttgccttctggttacgctactca

SEQ ID NO: 3464658 - DNA, 25 bp, Homo sapien
tgtttcaaaagaactacgagtcctc

SEQ ID NO: 3464659 - DNA, 25 bp, Homo sapien
ccagaccaggttagttgtgttctct

SEQ ID NO: 3464660 - DNA, 25 bp, Homo sapien
gcttcttagtgctgatgaatccctg

SEQ ID NO: 3464661 - DNA, 25 bp, Homo sapien
tcttgaatcacctgtttgtgggagc

SEQ ID NO: 3464662 - DNA, 25 bp, Homo sapien
cagacacaacagcttatatgccagg

SEQ ID NO: 3464663 - DNA, 25 bp, Homo sapien
gattgcatcctcctttaaaccttca

SEQ ID NO: 3464664 - DNA, 25 bp, Homo sapien
actgttgatgcagctattttggtcc

SEQ ID NO: 3464665 - DNA, 25 bp, Homo sapien
gttgatgcagctattttggtccaaa

SEQ ID NO: 3464666 - DNA, 25 bp, Homo sapien
gatttcaagatcatccagatcccta

SEQ ID NO: 3464667 - DNA, 25 bp, Homo sapien
caagatcatccagatccctaatcat

SEQ ID NO: 3464668 - DNA, 25 bp, Homo sapien
tctataaaacctctcgttcacacca

SEQ ID NO: 3464669 - DNA, 25 bp, Homo sapien
ctataaaacctctcgttcacaccag

SEQ ID NO: 3464670 - DNA, 25 bp, Homo sapien
cttttgacccccagaaaacatggct

SEQ ID NO: 3464671 - DNA, 25 bp, Homo sapien
gccatcctgcagctcatcatgggag

SEQ ID NO: 3464672 - DNA, 25 bp, Homo sapien
catcatgggagcctgcaaagtggtt

SEQ ID NO: 3464673 - DNA, 25 bp, Homo sapien
gctttgtctgccatcctgcagctca

SEQ ID NO: 3464674 - DNA, 25 bp, Homo sapien
tgaataatgatgtcatccattggca

SEQ ID NO: 3464675 - DNA, 25 bp, Homo sapien
ttgaggtcaataaagcgcccttggt

SEQ ID NO: 3464676 - DNA, 25 bp, Homo sapien
ccattggcagaaggtttgaggtcaa

SEQ ID NO: 3464677 - DNA, 25 bp, Homo sapien
aataaagcgcccttggtccctcgct

SEQ ID NO: 3464678 - DNA, 25 bp, Homo sapien
gctgcttggtgtcaggtgtttgcca

SEQ ID NO: 3464679 - DNA, 25 bp, Homo sapien
cttggtgactcagtgacagggttct

SEQ ID NO: 3464680 - DNA, 25 bp, Homo sapien
tctttctgataggtgaggaactacg

SEQ ID NO: 3464681 - DNA, 25 bp, Homo sapien
catctttctgtatcccagggtccat

SEQ ID NO: 3464682 - DNA, 25 bp, Homo sapien
ttagtaacggtttgagagcagaagc

SEQ ID NO: 3464683 - DNA, 25 bp, Homo sapien
tagagctgatactcaaccattttag

SEQ ID NO: 3464684 - DNA, 25 bp, Homo sapien
cacaaccaacaaatctgggtgagat

SEQ ID NO: 3464685 - DNA, 25 bp, Homo sapien
ccctctacagtcttgatgattcctt

SEQ ID NO: 3464686 - DNA, 25 bp, Homo sapien
taaagaccaggaatccaaagaccca

SEQ ID NO: 3464687 - DNA, 25 bp, Homo sapien
gaccaggaatccaaagacccatatg

SEQ ID NO: 3464688 - DNA, 25 bp, Homo sapien
tctgttaaagaccaggaatccaaag

SEQ ID NO: 3464689 - DNA, 25 bp, Homo sapien
caggaatccaaagacccatatgcat

SEQ ID NO: 3464690 - DNA, 25 bp, Homo sapien
tcttggagtaagatgtccaggtttg

SEQ ID NO: 3464691 - DNA, 25 bp, Homo sapien
tgaggaaatcttggagtaagatgtc

SEQ ID NO: 3464692 - DNA, 25 bp, Homo sapien
tgttcgaagcatttgtcattcatta

SEQ ID NO: 3464693 - DNA, 25 bp, Homo sapien
atgtccaggtttgaaaaaatatttg

SEQ ID NO: 3464694 - DNA, 25 bp, Homo sapien
tcaagattcatgtgagtcgcctctc

SEQ ID NO: 3464695 - DNA, 25 bp, Homo sapien
gctcaaacactactgaggcatcagg

SEQ ID NO: 3464696 - DNA, 25 bp, Homo sapien
tgtgggctgctcctcataaccctgc

SEQ ID NO: 3464697 - DNA, 25 bp, Homo sapien
tctctgggaataacaattgggcatc

SEQ ID NO: 3464698 - DNA, 25 bp, Homo sapien
tctgggttcccatagcgctgtacat

SEQ ID NO: 3464699 - DNA, 25 bp, Homo sapien
tcagaatcaatcttgtctcctctgg

SEQ ID NO: 3464700 - DNA, 25 bp, Homo sapien
gcgctgtacatgtaagcttgttacc

SEQ ID NO: 3464701 - DNA, 25 bp, Homo sapien
gagacgttcttgatatccagtcaga

SEQ ID NO: 3464702 - DNA, 25 bp, Homo sapien
tgccccaacctaatatataagacag

SEQ ID NO: 3464703 - DNA, 25 bp, Homo sapien
gattattctccaagtgtcaaagtgg

SEQ ID NO: 3464704 - DNA, 25 bp, Homo sapien
agcatgcccagtgctcctaaagata

SEQ ID NO: 3464705 - DNA, 25 bp, Homo sapien
tcaaagtggctatggcattaagatc

SEQ ID NO: 3464706 - DNA, 25 bp, Homo sapien
gctacgctgttatagtcttgatgaa

SEQ ID NO: 3464707 - DNA, 25 bp, Homo sapien
tttctcatctttactgctacgctgt

SEQ ID NO: 3464708 - DNA, 25 bp, Homo sapien
tttactgctacgctgttatagtctt

SEQ ID NO: 3464709 - DNA, 25 bp, Homo sapien
tcttgatgaacatctttatggttca

SEQ ID NO: 3464710 - DNA, 25 bp, Homo sapien
gggagtaatctgaccacagccatca

SEQ ID NO: 3464711 - DNA, 25 bp, Homo sapien
ggccttgccgtacctcttgctttgt

SEQ ID NO: 3464712 - DNA, 25 bp, Homo sapien
gaacagacaatgccgtctcctttca

SEQ ID NO: 3464713 - DNA, 25 bp, Homo sapien
tctcctttcagggagtaatctgacc

SEQ ID NO: 3464714 - DNA, 25 bp, Homo sapien
tggtatccatgcgaccatgaaatgg

SEQ ID NO: 3464715 - DNA, 25 bp, Homo sapien
ctgcttggtatccatgcgaccatga

SEQ ID NO: 3464716 - DNA, 25 bp, Homo sapien
catgcgaccatgaaatggaacagct

SEQ ID NO: 3464717 - DNA, 25 bp, Homo sapien
tatccatgcgaccatgaaatggaac

SEQ ID NO: 3464718 - DNA, 25 bp, Homo sapien
gagaactatagcctccctcattgtc

SEQ ID NO: 3464719 - DNA, 25 bp, Homo sapien
actatagcctccctcattgtcttct

SEQ ID NO: 3464720 - DNA, 25 bp, Homo sapien
gaactatagcctccctcattgtctt

SEQ ID NO: 3464721 - DNA, 25 bp, Homo sapien
ctagagaactatagcctccctcatt

SEQ ID NO: 3464722 - DNA, 25 bp, Homo sapien
gagcctgcgctaccgaatgaagcaa

SEQ ID NO: 3464723 - DNA, 25 bp, Homo sapien
ggagcagttccctctagtggtcgga

SEQ ID NO: 3464724 - DNA, 25 bp, Homo sapien
aattatccgtgagggtgcagtcagc

SEQ ID NO: 3464725 - DNA, 25 bp, Homo sapien
tatgattggtagacagccacccaga

SEQ ID NO: 3464726 - DNA, 25 bp, Homo sapien
cctactctgcacgtacttgagatta

SEQ ID NO: 3464727 - DNA, 25 bp, Homo sapien
cataaattacttcctactctgcacg

SEQ ID NO: 3464728 - DNA, 25 bp, Homo sapien
ttgagattagggtcttagttggcac

SEQ ID NO: 3464729 - DNA, 25 bp, Homo sapien
ttagggtcttagttggcacagggtc

SEQ ID NO: 3464730 - DNA, 25 bp, Homo sapien
cagatgggctggcttaatgaccaaa

SEQ ID NO: 3464731 - DNA, 25 bp, Homo sapien
aatgggccccactgtattagtttct

SEQ ID NO: 3464732 - DNA, 25 bp, Homo sapien
tattagtaagacattaatgggcccc

SEQ ID NO: 3464733 - DNA, 25 bp, Homo sapien
gacagtctgatgtgggcccctgtta

SEQ ID NO: 3464734 - DNA, 25 bp, Homo sapien
gaattgaaacttgcttggtcatcat

SEQ ID NO: 3464735 - DNA, 25 bp, Homo sapien
cctatcagcattgcgaattgaaact

SEQ ID NO: 3464736 - DNA, 25 bp, Homo sapien
tcagcattgcgaattgaaacttgct

SEQ ID NO: 3464737 - DNA, 25 bp, Homo sapien
cattgcgaattgaaacttgcttggt

SEQ ID NO: 3464738 - DNA, 25 bp, Homo sapien
attgtggctcgacagcatgtctcag

SEQ ID NO: 3464739 - DNA, 25 bp, Homo sapien
tctcttctgattgtggctcgacagc

SEQ ID NO: 3464740 - DNA, 25 bp, Homo sapien
tcaggactgtgatgcatcctggtgg

SEQ ID NO: 3464741 - DNA, 25 bp, Homo sapien
catgtctcagtccttggtgactttc

SEQ ID NO: 3464742 - DNA, 25 bp, Homo sapien
taaatggaggttttcacttctctgt

SEQ ID NO: 3464743 - DNA, 25 bp, Homo sapien
ttaaatggaggttttcacttctctg

SEQ ID NO: 3464744 - DNA, 25 bp, Homo sapien
tccttctccttcagttgcaggacat

SEQ ID NO: 3464745 - DNA, 25 bp, Homo sapien
gttggtgccacctaaatgagttcct

SEQ ID NO: 3464746 - DNA, 25 bp, Homo sapien
cctctggaaatcaaggttggtgcca

SEQ ID NO: 3464747 - DNA, 25 bp, Homo sapien
tttcctctggaaatcaaggttggtg

SEQ ID NO: 3464748 - DNA, 25 bp, Homo sapien
ggcaacaatagatgagctgtcagca

SEQ ID NO: 3464749 - DNA, 25 bp, Homo sapien
caatggcaacaatagatgagctgtc

SEQ ID NO: 3464750 - DNA, 25 bp, Homo sapien
tggcaacaatagatgagctgtcagc

SEQ ID NO: 3464751 - DNA, 25 bp, Homo sapien
ttcaatggcaacaatagatgagctg

SEQ ID NO: 3464752 - DNA, 25 bp, Homo sapien
tagcaataggatttgctccagtggc

SEQ ID NO: 3464753 - DNA, 25 bp, Homo sapien
aaatttgagcacaacccactggcca

SEQ ID NO: 3464754 - DNA, 25 bp, Homo sapien
ctctgtgaaaagctggtggttagcc

SEQ ID NO: 3464755 - DNA, 25 bp, Homo sapien
gcagtagcaaatttgagcacaaccc

SEQ ID NO: 3464756 - DNA, 25 bp, Homo sapien
tgggccagtctccaccacatcagac

SEQ ID NO: 3464757 - DNA, 25 bp, Homo sapien
ctgggccagtctccaccacatcaga

SEQ ID NO: 3464758 - DNA, 25 bp, Homo sapien
ccagtctccaccacatcagacccac

SEQ ID NO: 3464759 - DNA, 25 bp, Homo sapien
ttcctgggccagtctccaccacatc

SEQ ID NO: 3464760 - DNA, 25 bp, Homo sapien
cacaggagatggtgccacttgtgtg

SEQ ID NO: 3464761 - DNA, 25 bp, Homo sapien
gagatggtgccacttgtgtgcagaa

SEQ ID NO: 3464762 - DNA, 25 bp, Homo sapien
aggagatggtgccacttgtgtgcag

SEQ ID NO: 3464763 - DNA, 25 bp, Homo sapien
gttcacaggagatggtgccacttgt

SEQ ID NO: 3464764 - DNA, 25 bp, Homo sapien
ctccatggaagtagaaatcaggcat

SEQ ID NO: 3464765 - DNA, 25 bp, Homo sapien
aggagctagggtagtccattcactc

SEQ ID NO: 3464766 - DNA, 25 bp, Homo sapien
gctagggtagtccattcactctgaa

SEQ ID NO: 3464767 - DNA, 25 bp, Homo sapien
gagtcaggagctagggtagtccatt

SEQ ID NO: 3464768 - DNA, 25 bp, Homo sapien
tagggtagtccattcactctgaaat

SEQ ID NO: 3464769 - DNA, 25 bp, Homo sapien
accattcttccatagcaggttgaat

SEQ ID NO: 3464770 - DNA, 25 bp, Homo sapien
tgtagttttcagtcgaaacctgctg

SEQ ID NO: 3464771 - DNA, 25 bp, Homo sapien
agtcgaaacctgctgaatggccaca

SEQ ID NO: 3464772 - DNA, 25 bp, Homo sapien
ggttgaatgctgtagttttcagtcg

SEQ ID NO: 3464773 - DNA, 25 bp, Homo sapien
gttcctaccccttcagtggcctgag

SEQ ID NO: 3464774 - DNA, 25 bp, Homo sapien
tggtggttcctaccccttcagtggc

SEQ ID NO: 3464775 - DNA, 25 bp, Homo sapien
ggttcctaccccttcagtggcctga

SEQ ID NO: 3464776 - DNA, 25 bp, Homo sapien
tggttcctaccccttcagtggcctg

SEQ ID NO: 3464777 - DNA, 25 bp, Homo sapien
gcctcagagcaagatgggtctcttt

SEQ ID NO: 3464778 - DNA, 25 bp, Homo sapien
tcagagcaagatgggtctcttttca

SEQ ID NO: 3464779 - DNA, 25 bp, Homo sapien
gatgggtctcttttcaccaatctca

SEQ ID NO: 3464780 - DNA, 25 bp, Homo sapien
agcaagatgggtctcttttcaccaa

SEQ ID NO: 3464781 - DNA, 25 bp, Homo sapien
aattttgtgatgttcgaatttagga

SEQ ID NO: 3464782 - DNA, 25 bp, Homo sapien
ttttgtgatgttcgaatttaggata

SEQ ID NO: 3464783 - DNA, 25 bp, Homo sapien
tttgtgatgttcgaatttaggatat

SEQ ID NO: 3464784 - DNA, 25 bp, Homo sapien
caaattttgtgatgttcgaatttag

SEQ ID NO: 3464785 - DNA, 25 bp, Homo sapien
tgtgtaacacagtttttatgcctga

SEQ ID NO: 3464786 - DNA, 25 bp, Homo sapien
tgtgtgtaacacagtttttatgcct

SEQ ID NO: 3464787 - DNA, 25 bp, Homo sapien
gtgtgtaacacagtttttatgcctg

SEQ ID NO: 3464788 - DNA, 25 bp, Homo sapien
ttgtgtgtaacacagtttttatgcc

SEQ ID NO: 3464789 - DNA, 25 bp, Homo sapien
ccttggcaggtgcactgcggctctc

SEQ ID NO: 3464790 - DNA, 25 bp, Homo sapien
tctctcagcagagggtaggacttga

SEQ ID NO: 3464791 - DNA, 25 bp, Homo sapien
taggacttgaagctggcgtcctgtg

SEQ ID NO: 3464792 - DNA, 25 bp, Homo sapien
agcacctttctttcaccttggcagg

SEQ ID NO: 3464793 - DNA, 25 bp, Homo sapien
gagcccttcctgaagtatttcctta

SEQ ID NO: 3464794 - DNA, 25 bp, Homo sapien
catattttgctgtcctagagccctt

SEQ ID NO: 3464795 - DNA, 25 bp, Homo sapien
aatatggcggtgacataagcctcaa

SEQ ID NO: 3464796 - DNA, 25 bp, Homo sapien
tttccttacatggaatatggcggtg

SEQ ID NO: 3464797 - DNA, 25 bp, Homo sapien
cttttgtgaggcctattgcccaaaa

SEQ ID NO: 3464798 - DNA, 25 bp, Homo sapien
tagcttcctttggatttgtcccctg

SEQ ID NO: 3464799 - DNA, 25 bp, Homo sapien
tgtcccctgaatttgaagatgcttc

SEQ ID NO: 3464800 - DNA, 25 bp, Homo sapien
tattgcccaaaatgctctgaccaca

SEQ ID NO: 3464801 - DNA, 25 bp, Homo sapien
catctgcatttttatatgcaaactt

SEQ ID NO: 3464802 - DNA, 25 bp, Homo sapien
cttcatctgcatttttatatgcaaa

SEQ ID NO: 3464803 - DNA, 25 bp, Homo sapien
catttgccttcatctgcatttttat

SEQ ID NO: 3464804 - DNA, 25 bp, Homo sapien
gccttcatctgcatttttatatgca

SEQ ID NO: 3464805 - DNA, 25 bp, Homo sapien
catatgaaatgatgatggtcacgct

SEQ ID NO: 3464806 - DNA, 25 bp, Homo sapien
acagcatatgaaatgatgatggtca

SEQ ID NO: 3464807 - DNA, 25 bp, Homo sapien
tggggaggatactggccatctcaca

SEQ ID NO: 3464808 - DNA, 25 bp, Homo sapien
tgaaatgatgatggtcacgctgctg

SEQ ID NO: 3464809 - DNA, 25 bp, Homo sapien
gcagcaatgcagctgtcttctaggg

SEQ ID NO: 3464810 - DNA, 25 bp, Homo sapien
ccaatgacaacataggcaccgcctc

SEQ ID NO: 3464811 - DNA, 25 bp, Homo sapien
gggtgtacttagtgttcgacttgca

SEQ ID NO: 3464812 - DNA, 25 bp, Homo sapien
cagattcagattttggtaggaagag

SEQ ID NO: 3464813 - DNA, 25 bp, Homo sapien
ccagagtggaggtactgagaaagta

SEQ ID NO: 3464814 - DNA, 25 bp, Homo sapien
cattttaactaatggcttgggactt

SEQ ID NO: 3464815 - DNA, 25 bp, Homo sapien
gcttaacatggagtggagtcgctgc

SEQ ID NO: 3464816 - DNA, 25 bp, Homo sapien
tcctttatggctcaagtgtctcttg

SEQ ID NO: 3464817 - DNA, 25 bp, Homo sapien
ctgcatgatggtcttgcggattttc

SEQ ID NO: 3464818 - DNA, 25 bp, Homo sapien
gatggtcttgcggattttccagagc

SEQ ID NO: 3464819 - DNA, 25 bp, Homo sapien
catgatggtcttgcggattttccag

SEQ ID NO: 3464820 - DNA, 25 bp, Homo sapien
gcatgatggtcttgcggattttcca

SEQ ID NO: 3464821 - DNA, 25 bp, Homo sapien
ccccagactggactttgaactcctt

SEQ ID NO: 3464822 - DNA, 25 bp, Homo sapien
agaacacaaacatcttgtcggtggg

SEQ ID NO: 3464823 - DNA, 25 bp, Homo sapien
ccttcagtgtctggttaagctcgtc

SEQ ID NO: 3464824 - DNA, 25 bp, Homo sapien
ggtcatcgttgtgggccaccagcgc

SEQ ID NO: 3464825 - DNA, 25 bp, Homo sapien
tgctgcatgcgccggcagtacacgt

SEQ ID NO: 3464826 - DNA, 25 bp, Homo sapien
cgccggcagtacacgttgagggtct

SEQ ID NO: 3464827 - DNA, 25 bp, Homo sapien
cggcagtacacgttgagggtcttga

SEQ ID NO: 3464828 - DNA, 25 bp, Homo sapien
gcatgcgccggcagtacacgttgag

SEQ ID NO: 3464829 - DNA, 25 bp, Homo sapien
ttggcggagggcgtcatgccctgct

SEQ ID NO: 3464830 - DNA, 25 bp, Homo sapien
tacttggcggagggcgtcatgccct

SEQ ID NO: 3464831 - DNA, 25 bp, Homo sapien
gcggagggcgtcatgccctgctgca

SEQ ID NO: 3464832 - DNA, 25 bp, Homo sapien
cggagggcgtcatgccctgctgcac

SEQ ID NO: 3464833 - DNA, 25 bp, Homo sapien
gtactctgtgatgtcgatgagcaat

SEQ ID NO: 3464834 - DNA, 25 bp, Homo sapien
tactctgtgatgtcgatgagcaatt

SEQ ID NO: 3464835 - DNA, 25 bp, Homo sapien
cgtactctgtgatgtcgatgagcaa

SEQ ID NO: 3464836 - DNA, 25 bp, Homo sapien
tcgtactctgtgatgtcgatgagca

SEQ ID NO: 3464837 - DNA, 25 bp, Homo sapien
tcctccttggtcatgacaacgtact

SEQ ID NO: 3464838 - DNA, 25 bp, Homo sapien
cttggtcatgacaacgtactcaggg

SEQ ID NO: 3464839 - DNA, 25 bp, Homo sapien
ttggtcatgacaacgtactcaggga

SEQ ID NO: 3464840 - DNA, 25 bp, Homo sapien
tccttggtcatgacaacgtactcag

SEQ ID NO: 3464841 - DNA, 25 bp, Homo sapien
cggagcttatatagggccaacagca

SEQ ID NO: 3464842 - DNA, 25 bp, Homo sapien
ggagcttatatagggccaacagcac

SEQ ID NO: 3464843 - DNA, 25 bp, Homo sapien
gagcttatatagggccaacagcact

SEQ ID NO: 3464844 - DNA, 25 bp, Homo sapien
gcttatatagggccaacagcactgt

SEQ ID NO: 3464845 - DNA, 25 bp, Homo sapien
gctttatcccaaagtagcgcgccac

SEQ ID NO: 3464846 - DNA, 25 bp, Homo sapien
ctgcctgccatctcgctgggccgga

SEQ ID NO: 3464847 - DNA, 25 bp, Homo sapien
ctgccatctcgctgggccggatgat

SEQ ID NO: 3464848 - DNA, 25 bp, Homo sapien
cctgccatctcgctgggccggatga

SEQ ID NO: 3464849 - DNA, 25 bp, Homo sapien
tgcctgccatctcgctgggccggat

SEQ ID NO: 3464850 - DNA, 25 bp, Homo sapien
tactgcatgagccggtaggtgaggt

SEQ ID NO: 3464851 - DNA, 25 bp, Homo sapien
actgcatgagccggtaggtgaggta

SEQ ID NO: 3464852 - DNA, 25 bp, Homo sapien
ctgcatgagccggtaggtgaggtac

SEQ ID NO: 3464853 - DNA, 25 bp, Homo sapien
tggatctcgcataaatacacaggtg

SEQ ID NO: 3464854 - DNA, 25 bp, Homo sapien
tgggccatgggaagactcatcccag

SEQ ID NO: 3464855 - DNA, 25 bp, Homo sapien
tggggggctagactccggcagggca

SEQ ID NO: 3464856 - DNA, 25 bp, Homo sapien
cctgaggctggatctcgcataaata

SEQ ID NO: 3464857 - DNA, 25 bp, Homo sapien
tggcttgagagcctgcgcagttgtg

SEQ ID NO: 3464858 - DNA, 25 bp, Homo sapien
tgggggccaccacgcatcagggcca

SEQ ID NO: 3464859 - DNA, 25 bp, Homo sapien
gagtaaggagccaagactgggtggg

SEQ ID NO: 3464860 - DNA, 25 bp, Homo sapien
gcttgagagcctgcgcagttgtgaa

SEQ ID NO: 3464861 - DNA, 25 bp, Homo sapien
tgaaacgatccttgatgaatttatg

SEQ ID NO: 3464862 - DNA, 25 bp, Homo sapien
aacgatccttgatgaatttatggtc

SEQ ID NO: 3464863 - DNA, 25 bp, Homo sapien
ctgcttttggctctgaaacgatcct

SEQ ID NO: 3464864 - DNA, 25 bp, Homo sapien
gcttttggctctgaaacgatccttg

SEQ ID NO: 3464865 - DNA, 25 bp, Homo sapien
ccaagatgaggccacgggtaagtcc

SEQ ID NO: 3464866 - DNA, 25 bp, Homo sapien
atgaggccacgggtaagtccacaga

SEQ ID NO: 3464867 - DNA, 25 bp, Homo sapien
aagatgaggccacgggtaagtccac

SEQ ID NO: 3464868 - DNA, 25 bp, Homo sapien
gaggccacgggtaagtccacagaga

SEQ ID NO: 3464869 - DNA, 25 bp, Homo sapien
taaggaattgatgaataggaagcag

SEQ ID NO: 3464870 - DNA, 25 bp, Homo sapien
cattttggtaagaaacaggctgagc

SEQ ID NO: 3464871 - DNA, 25 bp, Homo sapien
gctgagctctaagccccaaaatgtt

SEQ ID NO: 3464872 - DNA, 25 bp, Homo sapien
cattgataatgttaaggaattgatg

SEQ ID NO: 3464873 - DNA, 25 bp, Homo sapien
agcaggcacgtaagagcctctatgc

SEQ ID NO: 3464874 - DNA, 25 bp, Homo sapien
taagagcctctatgcctcgagccag

SEQ ID NO: 3464875 - DNA, 25 bp, Homo sapien
gacaagcagttcagcaggcacgtaa

SEQ ID NO: 3464876 - DNA, 25 bp, Homo sapien
cagttcagcaggcacgtaagagcct

SEQ ID NO: 3464877 - DNA, 25 bp, Homo sapien
gctggttgaggatgggaatcagaac

SEQ ID NO: 3464878 - DNA, 25 bp, Homo sapien
cctgggcctgagtgtaagccttatg

SEQ ID NO: 3464879 - DNA, 25 bp, Homo sapien
aatcagaaccggctagctgtggttc

SEQ ID NO: 3464880 - DNA, 25 bp, Homo sapien
agcccagtgctgaatttgtctttca

SEQ ID NO: 3464881 - DNA, 25 bp, Homo sapien
tatcagattggaatacatgggcaca

SEQ ID NO: 3464882 - DNA, 25 bp, Homo sapien
cacaaagaaccatcagcactagagt

SEQ ID NO: 3464883 - DNA, 25 bp, Homo sapien
ggttgaactggcgtaggatgtccac

SEQ ID NO: 3464884 - DNA, 25 bp, Homo sapien
gaaacaagagcaaaggatatcagat

SEQ ID NO: 3464885 - DNA, 25 bp, Homo sapien
aggctgatagaagccgggtaggagg

SEQ ID NO: 3464886 - DNA, 25 bp, Homo sapien
tctgtggctggttgagatcgaacca

SEQ ID NO: 3464887 - DNA, 25 bp, Homo sapien
ctgcaccatccagggactgattcat

SEQ ID NO: 3464888 - DNA, 25 bp, Homo sapien
tccagggactgattcatcagtggtc

SEQ ID NO: 3464889 - DNA, 25 bp, Homo sapien
ggggactaactgagctgtacaaagc

SEQ ID NO: 3464890 - DNA, 25 bp, Homo sapien
tcagctccttgatgggcacgtaatg

SEQ ID NO: 3464891 - DNA, 25 bp, Homo sapien
ctctggaccaggaggaccaatactg

SEQ ID NO: 3464892 - DNA, 25 bp, Homo sapien
tccttgatgggcacgtaatgtctgc

SEQ ID NO: 3464893 - DNA, 25 bp, Homo sapien
tgcctggtgcttgtaaacatttacg

SEQ ID NO: 3464894 - DNA, 25 bp, Homo sapien
cctggtgcttgtaaacatttacgtt

SEQ ID NO: 3464895 - DNA, 25 bp, Homo sapien
ttgcctggtgcttgtaaacatttac

SEQ ID NO: 3464896 - DNA, 25 bp, Homo sapien
ggtgcttgtaaacatttacgttcat

SEQ ID NO: 3464897 - DNA, 25 bp, Homo sapien
ctgaaacagatagtgtgactgccct

SEQ ID NO: 3464898 - DNA, 25 bp, Homo sapien
gatagtgtgactgccctgctatagc

SEQ ID NO: 3464899 - DNA, 25 bp, Homo sapien
gaaacagatagtgtgactgccctgc

SEQ ID NO: 3464900 - DNA, 25 bp, Homo sapien
aacagatagtgtgactgccctgcta

SEQ ID NO: 3464901 - DNA, 25 bp, Homo sapien
tggcaaaccagcacctgctgctgga

SEQ ID NO: 3464902 - DNA, 25 bp, Homo sapien
gcaaaccagcacctgctgctggaga

SEQ ID NO: 3464903 - DNA, 25 bp, Homo sapien
caaaccagcacctgctgctggagaa

SEQ ID NO: 3464904 - DNA, 25 bp, Homo sapien
gttggcaaaccagcacctgctgctg

SEQ ID NO: 3464905 - DNA, 25 bp, Homo sapien
agctcggtgactcgacctccggagc

SEQ ID NO: 3464906 - DNA, 25 bp, Homo sapien
cctgagcgaccggagctcggtgact

SEQ ID NO: 3464907 - DNA, 25 bp, Homo sapien
ccacctgagcgaccggagctcggtg

SEQ ID NO: 3464908 - DNA, 25 bp, Homo sapien
gggaggatgcgctgggctttccgct

SEQ ID NO: 3464909 - DNA, 25 bp, Homo sapien
gggcagcgcagtgtgtccgtttcca

SEQ ID NO: 3464910 - DNA, 25 bp, Homo sapien
agcgcagtgtgtccgtttccatccg

SEQ ID NO: 3464911 - DNA, 25 bp, Homo sapien
agtgtgtccgtttccatccgcggcg

SEQ ID NO: 3464912 - DNA, 25 bp, Homo sapien
agcgcgcgcgagtctgagccgctgg

SEQ ID NO: 3464913 - DNA, 25 bp, Homo sapien
gtaaaagggatctggactggagcct

SEQ ID NO: 3464914 - DNA, 25 bp, Homo sapien
ctaaaatgaacgcagcgtgtaaaag

SEQ ID NO: 3464915 - DNA, 25 bp, Homo sapien
gggctttcgtgacgctcggcctggg

SEQ ID NO: 3464916 - DNA, 25 bp, Homo sapien
tgaacgcagcgtgtaaaagggatct

SEQ ID NO: 3464917 - DNA, 25 bp, Homo sapien
ttcacggaacttagtactttccaca

SEQ ID NO: 3464918 - DNA, 25 bp, Homo sapien
ctttgaggcactccccagtacctga

SEQ ID NO: 3464919 - DNA, 25 bp, Homo sapien
tccacatagcattatgttcgttcat

SEQ ID NO: 3464920 - DNA, 25 bp, Homo sapien
tgaggcactccccagtacctgaatt

SEQ ID NO: 3464921 - DNA, 25 bp, Homo sapien
ctcgtcttacatactcactatgcat

SEQ ID NO: 3464922 - DNA, 25 bp, Homo sapien
ggatttctgtattgtcctactactg

SEQ ID NO: 3464923 - DNA, 25 bp, Homo sapien
gaggaaaggcttctcgtcttacata

SEQ ID NO: 3464924 - DNA, 25 bp, Homo sapien
ctgtcgtactatgcagaggaaaggc

SEQ ID NO: 3464925 - DNA, 25 bp, Homo sapien
tcatccaggttcacaatccacagcg

SEQ ID NO: 3464926 - DNA, 25 bp, Homo sapien
ggttcacaatccacagcgtaagtct

SEQ ID NO: 3464927 - DNA, 25 bp, Homo sapien
tcacaatccacagcgtaagtctctc

SEQ ID NO: 3464928 - DNA, 25 bp, Homo sapien
tccaggttcacaatccacagcgtaa

SEQ ID NO: 3464929 - DNA, 25 bp, Homo sapien
aataatttactgtgggctgcttgac

SEQ ID NO: 3464930 - DNA, 25 bp, Homo sapien
ttgagattcaggcaaacatttgtgc

SEQ ID NO: 3464931 - DNA, 25 bp, Homo sapien
gatggcattaaactccagggtttag

SEQ ID NO: 3464932 - DNA, 25 bp, Homo sapien
gatatggccaaactgacagtcaaag

SEQ ID NO: 3464933 - DNA, 25 bp, Homo sapien
tgtcactcaggagttccaaagtgcc

SEQ ID NO: 3464934 - DNA, 25 bp, Homo sapien
ttatcgtgaggaatgctcaggccca

SEQ ID NO: 3464935 - DNA, 25 bp, Homo sapien
gggatgatctcgaagctaagctgca

SEQ ID NO: 3464936 - DNA, 25 bp, Homo sapien
cagcacctggtagcacacttgccaa

SEQ ID NO: 3464937 - DNA, 25 bp, Homo sapien
cctgagcgtagccaaaatgctgtcc

SEQ ID NO: 3464938 - DNA, 25 bp, Homo sapien
gctgcttaaaatggccctgagcgta

SEQ ID NO: 3464939 - DNA, 25 bp, Homo sapien
ttagcaaatgggcacctcctaggtg

SEQ ID NO: 3464940 - DNA, 25 bp, Homo sapien
cctaggtgccaaacactgaggctac

SEQ ID NO: 3464941 - DNA, 25 bp, Homo sapien
tcatctctccttcggatgccacgct

SEQ ID NO: 3464942 - DNA, 25 bp, Homo sapien
caaagcctggtcagacgtcatctca

SEQ ID NO: 3464943 - DNA, 25 bp, Homo sapien
ctggtcagacgtcatctcatctctc

SEQ ID NO: 3464944 - DNA, 25 bp, Homo sapien
cttcggatgccacgctctctgacat

SEQ ID NO: 3464945 - DNA, 25 bp, Homo sapien
tgggtaagtctgtaaggaccagtcc

SEQ ID NO: 3464946 - DNA, 25 bp, Homo sapien
ggcaaagttcttgtagccctgatac

SEQ ID NO: 3464947 - DNA, 25 bp, Homo sapien
tcaagactcccagtgatgacgggtc

SEQ ID NO: 3464948 - DNA, 25 bp, Homo sapien
tagagctgcaactgcggaagttcca

SEQ ID NO: 3464949 - DNA, 25 bp, Homo sapien
tactggaagaacacgaaggagctct

SEQ ID NO: 3464950 - DNA, 25 bp, Homo sapien
aaaatactaagcaactaccaatagg

SEQ ID NO: 3464951 - DNA, 25 bp, Homo sapien
ctaaaagaaattgtatcagaactca

SEQ ID NO: 3464952 - DNA, 25 bp, Homo sapien
tcagggtcagaaagagatctcaaca

SEQ ID NO: 3464953 - DNA, 25 bp, Homo sapien
gattatacgccatgcctaatgcctt

SEQ ID NO: 3464954 - DNA, 25 bp, Homo sapien
aaagtgtaaaaatctgcttcgcaga

SEQ ID NO: 3464955 - DNA, 25 bp, Homo sapien
cagaagctgtacatgaatactgaga

SEQ ID NO: 3464956 - DNA, 25 bp, Homo sapien
tatagcacctgggtacgacagtgac

SEQ ID NO: 3464957 - DNA, 25 bp, Homo sapien
tggtggcctgcccatcttcggaaaa

SEQ ID NO: 3464958 - DNA, 25 bp, Homo sapien
cagatgtctactggaactgcaggag

SEQ ID NO: 3464959 - DNA, 25 bp, Homo sapien
tagctaacaaaggagggatgtccct

SEQ ID NO: 3464960 - DNA, 25 bp, Homo sapien
tatgcatatgttcgcacaatagggc

SEQ ID NO: 3464961 - DNA, 25 bp, Homo sapien
gacatcattgttctataaaccccac

SEQ ID NO: 3464962 - DNA, 25 bp, Homo sapien
ccacaatctgctctgactgcaggaa

SEQ ID NO: 3464963 - DNA, 25 bp, Homo sapien
gaagctccgacatcattgttctata

SEQ ID NO: 3464964 - DNA, 25 bp, Homo sapien
tctggaagctccgacatcattgttc

SEQ ID NO: 3464965 - DNA, 25 bp, Homo sapien
cgaggaaaacctattggaagctggg

SEQ ID NO: 3464966 - DNA, 25 bp, Homo sapien
gttgctaagctgcacgcctttaaca

SEQ ID NO: 3464967 - DNA, 25 bp, Homo sapien
ttggcaaccagaagctggttgctaa

SEQ ID NO: 3464968 - DNA, 25 bp, Homo sapien
taagctgcacgcctttaacatgcca

SEQ ID NO: 3464969 - DNA, 25 bp, Homo sapien
agccagcgatagttgaatttcagac

SEQ ID NO: 3464970 - DNA, 25 bp, Homo sapien
aaggcaattctggtattctacgcag

SEQ ID NO: 3464971 - DNA, 25 bp, Homo sapien
gatacagcattagcaagccagcgat

SEQ ID NO: 3464972 - DNA, 25 bp, Homo sapien
gcctggcctcatgatttacttgtta

SEQ ID NO: 3464973 - DNA, 25 bp, Homo sapien
tagaaaggccatgtaattcctccaa

SEQ ID NO: 3464974 - DNA, 25 bp, Homo sapien
ccttgccaagagagtatcatctgcc

SEQ ID NO: 3464975 - DNA, 25 bp, Homo sapien
gacggcttataattctagagtgaca

SEQ ID NO: 3464976 - DNA, 25 bp, Homo sapien
taagagatgaacagggttttgccct

SEQ ID NO: 3464977 - DNA, 25 bp, Homo sapien
tgttacgtgtacttgactccacttt

SEQ ID NO: 3464978 - DNA, 25 bp, Homo sapien
gaagttgttacgtgtacttgactcc

SEQ ID NO: 3464979 - DNA, 25 bp, Homo sapien
cctgaatgcaaagcaccccgtattc

SEQ ID NO: 3464980 - DNA, 25 bp, Homo sapien
tcctgaatgcaaagcaccccgtatt

SEQ ID NO: 3464981 - DNA, 25 bp, Homo sapien
gccctaggtgatccttcaagcccat

SEQ ID NO: 3464982 - DNA, 25 bp, Homo sapien
gtcatgccctaggtgatccttcaag

SEQ ID NO: 3464983 - DNA, 25 bp, Homo sapien
tgccctaggtgatccttcaagccca

SEQ ID NO: 3464984 - DNA, 25 bp, Homo sapien
catgccctaggtgatccttcaagcc

SEQ ID NO: 3464985 - DNA, 25 bp, Homo sapien
tgaggctctaaacagggagacctgc

SEQ ID NO: 3464986 - DNA, 25 bp, Homo sapien
tacagctggacttaactgtgggtca

SEQ ID NO: 3464987 - DNA, 25 bp, Homo sapien
ggtattctcgcaccacatcaggtgg

SEQ ID NO: 3464988 - DNA, 25 bp, Homo sapien
tactgttgaccaaggtacagctgga

SEQ ID NO: 3464989 - DNA, 25 bp, Homo sapien
gatagacacggggagtaattgaaaa

SEQ ID NO: 3464990 - DNA, 25 bp, Homo sapien
caatgatagacacggggagtaattg

SEQ ID NO: 3464991 - DNA, 25 bp, Homo sapien
tccaatgatagacacggggagtaat

SEQ ID NO: 3464992 - DNA, 25 bp, Homo sapien
cttccaatgatagacacggggagta

SEQ ID NO: 3464993 - DNA, 25 bp, Homo sapien
ccaataggtcctgtgttcgaagaac

SEQ ID NO: 3464994 - DNA, 25 bp, Homo sapien
tctttttcgtctgagattcccgagc

SEQ ID NO: 3464995 - DNA, 25 bp, Homo sapien
gagccatcatattctgtacgctggg

SEQ ID NO: 3464996 - DNA, 25 bp, Homo sapien
cctgctgtgtaacctaagagccatc

SEQ ID NO: 3464997 - DNA, 25 bp, Homo sapien
cctcttgtaagggagtgccctggcc

SEQ ID NO: 3464998 - DNA, 25 bp, Homo sapien
ggaggcaaatgataacccctcttgt

SEQ ID NO: 3464999 - DNA, 25 bp, Homo sapien
ctgttgggtgagtctccattgattt

SEQ ID NO: 3465000 - DNA, 25 bp, Homo sapien
atgccttagaaacccaccgcgaggt

SEQ ID NO: 3465001 - DNA, 25 bp, Homo sapien
tcccagtgctctgaaaagatctgga

SEQ ID NO: 3465002 - DNA, 25 bp, Homo sapien
tgcatggagttgctctggccgactg

SEQ ID NO: 3465003 - DNA, 25 bp, Homo sapien
caggtacatcagacatggtaggagt

SEQ ID NO: 3465004 - DNA, 25 bp, Homo sapien
tctggaaacatttgccgaggtgctc

SEQ ID NO: 3465005 - DNA, 25 bp, Homo sapien
aaaaacaggtcatagctttggagag

SEQ ID NO: 3465006 - DNA, 25 bp, Homo sapien
caatcagaaggttagtactcagaac

SEQ ID NO: 3465007 - DNA, 25 bp, Homo sapien
tagcaaatggtactagggcaactgg

SEQ ID NO: 3465008 - DNA, 25 bp, Homo sapien
aaccaaaggccagcaataaggtgac

SEQ ID NO: 3465009 - DNA, 25 bp, Homo sapien
tgagagcatcaggtcgggattgctc

SEQ ID NO: 3465010 - DNA, 25 bp, Homo sapien
tcctctgcaggaaaatacttctttg

SEQ ID NO: 3465011 - DNA, 25 bp, Homo sapien
tccactgccaattttattcctctgc

SEQ ID NO: 3465012 - DNA, 25 bp, Homo sapien
ggtcgggattgctctttcctccaag

SEQ ID NO: 3465013 - DNA, 25 bp, Homo sapien
ctatcattttctcttcttctcttca

SEQ ID NO: 3465014 - DNA, 25 bp, Homo sapien
acagtgtactatcattttctcttct

SEQ ID NO: 3465015 - DNA, 25 bp, Homo sapien
gtactatcattttctcttcttctct

SEQ ID NO: 3465016 - DNA, 25 bp, Homo sapien
tatcattttctcttcttctcttcat

SEQ ID NO: 3465017 - DNA, 25 bp, Homo sapien
gatggcagaaagtaaatacatagat

SEQ ID NO: 3465018 - DNA, 25 bp, Homo sapien
agaataatgacggtaggatggcaga

SEQ ID NO: 3465019 - DNA, 25 bp, Homo sapien
ataatgacggtaggatggcagaaag

SEQ ID NO: 3465020 - DNA, 25 bp, Homo sapien
aggatggcagaaagtaaatacatag

SEQ ID NO: 3465021 - DNA, 25 bp, Homo sapien
actcgccgggatggcgtgaacacca

SEQ ID NO: 3465022 - DNA, 25 bp, Homo sapien
ccaagtccctgtagttatcattgga

SEQ ID NO: 3465023 - DNA, 25 bp, Homo sapien
cattaataatcgttcatctatgaac

SEQ ID NO: 3465024 - DNA, 25 bp, Homo sapien
gataccgtccgactcaaaagccagc

SEQ ID NO: 3465025 - DNA, 25 bp, Homo sapien
taggcgtgtagtaggctgttccagc

SEQ ID NO: 3465026 - DNA, 25 bp, Homo sapien
tatgtaccacatcgcctaggcgtgt

SEQ ID NO: 3465027 - DNA, 25 bp, Homo sapien
tccctgttgttaagccaagcatggc

SEQ ID NO: 3465028 - DNA, 25 bp, Homo sapien
tagaaacctgtgtgaagtctggaca

SEQ ID NO: 3465029 - DNA, 25 bp, Homo sapien
tcattttacatggctttaatcaaac

SEQ ID NO: 3465030 - DNA, 25 bp, Homo sapien
taaagtcactcaatcccacaatctt

SEQ ID NO: 3465031 - DNA, 25 bp, Homo sapien
tacaaaacaatatggtaacactaca

SEQ ID NO: 3465032 - DNA, 25 bp, Homo sapien
ttccaggtctgtgttagatttaagt

SEQ ID NO: 3465033 - DNA, 25 bp, Homo sapien
catatggacaaggctgctttttgtg

SEQ ID NO: 3465034 - DNA, 25 bp, Homo sapien
aaattatccagactggggccatgtc

SEQ ID NO: 3465035 - DNA, 25 bp, Homo sapien
gtgttcaggaacaataggtttcttc

SEQ ID NO: 3465036 - DNA, 25 bp, Homo sapien
ttatccagactggggccatgtctgc

SEQ ID NO: 3465037 - DNA, 25 bp, Homo sapien
caaggaataagtctgccggtaccca

SEQ ID NO: 3465038 - DNA, 25 bp, Homo sapien
tgtaacccacgtaggagtcactgct

SEQ ID NO: 3465039 - DNA, 25 bp, Homo sapien
ggagcacctcgtttgacatcagaag

SEQ ID NO: 3465040 - DNA, 25 bp, Homo sapien
tatttctagacatggcacggagttc

SEQ ID NO: 3465041 - DNA, 25 bp, Homo sapien
cgagtagggttgctttcagacagac

SEQ ID NO: 3465042 - DNA, 25 bp, Homo sapien
tacagctctgaacgcaacatcggtg

SEQ ID NO: 3465043 - DNA, 25 bp, Homo sapien
tgaaaacgtctgtatcccatgcaag

SEQ ID NO: 3465044 - DNA, 25 bp, Homo sapien
gaagaactgctttccatccaagtgg

SEQ ID NO: 3465045 - DNA, 25 bp, Homo sapien
tcagcagcgtgtacttccaacgaat

SEQ ID NO: 3465046 - DNA, 25 bp, Homo sapien
caataacctggtacacgtgcagtga

SEQ ID NO: 3465047 - DNA, 25 bp, Homo sapien
tgattactgatgcaacacccggtat

SEQ ID NO: 3465048 - DNA, 25 bp, Homo sapien
caaggacagtcccaaggcatctaaa

SEQ ID NO: 3465049 - DNA, 25 bp, Homo sapien
gtggagctgtggattttgtctttgc

SEQ ID NO: 3465050 - DNA, 25 bp, Homo sapien
gagtgcttgccaggcatactgtgag

SEQ ID NO: 3465051 - DNA, 25 bp, Homo sapien
ccaggcatactgtgagacgggccag

SEQ ID NO: 3465052 - DNA, 25 bp, Homo sapien
ggaaacagagtgcttgccaggcata

SEQ ID NO: 3465053 - DNA, 25 bp, Homo sapien
ttagacggtgatctccagggcagaa

SEQ ID NO: 3465054 - DNA, 25 bp, Homo sapien
gaagccaactgatgtaatagccacg

SEQ ID NO: 3465055 - DNA, 25 bp, Homo sapien
gatcattggttgcaagcatcataga

SEQ ID NO: 3465056 - DNA, 25 bp, Homo sapien
gcatcatagatgagtccctctgccc

SEQ ID NO: 3465057 - DNA, 25 bp, Homo sapien
agcactgcggcaaggaatctgtgga

SEQ ID NO: 3465058 - DNA, 25 bp, Homo sapien
tggagatgctgcacaatgagtggct

SEQ ID NO: 3465059 - DNA, 25 bp, Homo sapien
gaaagctgctaaagcagctgctggg

SEQ ID NO: 3465060 - DNA, 25 bp, Homo sapien
tcagtagtcctcactcgctgagagc

SEQ ID NO: 3465061 - DNA, 25 bp, Homo sapien
aaatgaagagacttggtacaagttc

SEQ ID NO: 3465062 - DNA, 25 bp, Homo sapien
agaaatgaagagacttggtacaagt

SEQ ID NO: 3465063 - DNA, 25 bp, Homo sapien
gcagaaatgaagagacttggtacaa

SEQ ID NO: 3465064 - DNA, 25 bp, Homo sapien
ctaaaggcagaaatgaagagacttg

SEQ ID NO: 3465065 - DNA, 25 bp, Homo sapien
tgagggatggttgtcaaaagtttcc

SEQ ID NO: 3465066 - DNA, 25 bp, Homo sapien
tggccttgagggatggttgtcaaaa

SEQ ID NO: 3465067 - DNA, 25 bp, Homo sapien
ctggccttgagggatggttgtcaaa

SEQ ID NO: 3465068 - DNA, 25 bp, Homo sapien
ccttgagggatggttgtcaaaagtt

SEQ ID NO: 3465069 - DNA, 25 bp, Homo sapien
caaatacatagaatccgtagacgct

SEQ ID NO: 3465070 - DNA, 25 bp, Homo sapien
tatgtcctgttaccccggacagcct

SEQ ID NO: 3465071 - DNA, 25 bp, Homo sapien
tccgtagacgctcagaactcatctt

SEQ ID NO: 3465072 - DNA, 25 bp, Homo sapien
gcagcaatgctattcatatgtcctg

SEQ ID NO: 3465073 - DNA, 25 bp, Homo sapien
tgttttttcattggtggttgaacca

SEQ ID NO: 3465074 - DNA, 25 bp, Homo sapien
tgaaccaaggtgcgggtaacccaca

SEQ ID NO: 3465075 - DNA, 25 bp, Homo sapien
gtgtgtacactcaggtctgctgcac

SEQ ID NO: 3465076 - DNA, 25 bp, Homo sapien
ggtgtgtacactcaggtctgctgca

SEQ ID NO: 3465077 - DNA, 25 bp, Homo sapien
tgtgtacactcaggtctgctgcacc

SEQ ID NO: 3465078 - DNA, 25 bp, Homo sapien
ctggtggtccactcatttgcttcca

SEQ ID NO: 3465079 - DNA, 25 bp, Homo sapien
gatgagttgcttgactggtaggttt

SEQ ID NO: 3465080 - DNA, 25 bp, Homo sapien
tttgtagcccagtcctgttcccgga

SEQ ID NO: 3465081 - DNA, 25 bp, Homo sapien
ggtgggatgagttgcttgactggta

SEQ ID NO: 3465082 - DNA, 25 bp, Homo sapien
aggctctgagctgattttagctgag

SEQ ID NO: 3465083 - DNA, 25 bp, Homo sapien
gctctgagctgattttagctgagga

SEQ ID NO: 3465084 - DNA, 25 bp, Homo sapien
ctctgagctgattttagctgaggag

SEQ ID NO: 3465085 - DNA, 25 bp, Homo sapien
gaggctctgagctgattttagctga

SEQ ID NO: 3465086 - DNA, 25 bp, Homo sapien
tcctccttgattttcatctgttaat

SEQ ID NO: 3465087 - DNA, 25 bp, Homo sapien
gctattgtcgtcagaagtaggaaaa

SEQ ID NO: 3465088 - DNA, 25 bp, Homo sapien
tattgtcgtcagaagtaggaaaaga

SEQ ID NO: 3465089 - DNA, 25 bp, Homo sapien
tgagctattgtcgtcagaagtagga

SEQ ID NO: 3465090 - DNA, 25 bp, Homo sapien
cattctaatcgtggagtttcaaagg

SEQ ID NO: 3465091 - DNA, 25 bp, Homo sapien
tttccacattctaatcgtggagttt

SEQ ID NO: 3465092 - DNA, 25 bp, Homo sapien
cacattctaatcgtggagtttcaaa

SEQ ID NO: 3465093 - DNA, 25 bp, Homo sapien
ctaatcgtggagtttcaaaggtgga

SEQ ID NO: 3465094 - DNA, 25 bp, Homo sapien
gttttatctctaagggatatatcgg

SEQ ID NO: 3465095 - DNA, 25 bp, Homo sapien
gactttgttttatctctaagggata

SEQ ID NO: 3465096 - DNA, 25 bp, Homo sapien
tctgactttgttttatctctaaggg

SEQ ID NO: 3465097 - DNA, 25 bp, Homo sapien
tctaagggatatatcggagaatggc

SEQ ID NO: 3465098 - DNA, 25 bp, Homo sapien
cttcatttgtgtaccagagagattc

SEQ ID NO: 3465099 - DNA, 25 bp, Homo sapien
cgctgccactgaggtctgatcctga

SEQ ID NO: 3465100 - DNA, 25 bp, Homo sapien
tttccccaagagtcacattacgttc

SEQ ID NO: 3465101 - DNA, 25 bp, Homo sapien
ggcttagcctgtaatggtcaccatc

SEQ ID NO: 3465102 - DNA, 25 bp, Homo sapien
gatttgaggacaactggtagctttg

SEQ ID NO: 3465103 - DNA, 25 bp, Homo sapien
taaagtatactagaaagtgcagagg

SEQ ID NO: 3465104 - DNA, 25 bp, Homo sapien
tattttccagccgacctcttttgag

SEQ ID NO: 3465105 - DNA, 25 bp, Homo sapien
tagttagcctaagaaaggccgtggc

SEQ ID NO: 3465106 - DNA, 25 bp, Homo sapien
gcggtgcacaaggttctaattttgc

SEQ ID NO: 3465107 - DNA, 25 bp, Homo sapien
tatattcacatagcggtgcacaagg

SEQ ID NO: 3465108 - DNA, 25 bp, Homo sapien
cacatagcggtgcacaaggttctaa

SEQ ID NO: 3465109 - DNA, 25 bp, Homo sapien
cattttatattcacatagcggtgca

SEQ ID NO: 3465110 - DNA, 25 bp, Homo sapien
tgctcctaaaaatagtgatactggt

SEQ ID NO: 3465111 - DNA, 25 bp, Homo sapien
gccaaatgtccatcttcctagtggt

SEQ ID NO: 3465112 - DNA, 25 bp, Homo sapien
tcctagtggtaatatgcgatcagaa

SEQ ID NO: 3465113 - DNA, 25 bp, Homo sapien
gcatgccatttagtttgctcctaaa

SEQ ID NO: 3465114 - DNA, 25 bp, Homo sapien
cagtcgcgagcacatgttcatatag

SEQ ID NO: 3465115 - DNA, 25 bp, Homo sapien
caaaggaatggatggtggaccctac

SEQ ID NO: 3465116 - DNA, 25 bp, Homo sapien
gactgttgtaccatggttgtgcaca

SEQ ID NO: 3465117 - DNA, 25 bp, Homo sapien
catagctggttaaccttgaagtgac

SEQ ID NO: 3465118 - DNA, 25 bp, Homo sapien
taaaattgtaagctcctcactggta

SEQ ID NO: 3465119 - DNA, 25 bp, Homo sapien
tataaaaacatcagtcccgaggagg

SEQ ID NO: 3465120 - DNA, 25 bp, Homo sapien
cagcagtagtagctccctaggagag

SEQ ID NO: 3465121 - DNA, 25 bp, Homo sapien
taaccatagcctcgatcatcaagaa

SEQ ID NO: 3465122 - DNA, 25 bp, Homo sapien
ggtgtaacctaaggagtggaattgc

SEQ ID NO: 3465123 - DNA, 25 bp, Homo sapien
tgtcctcatttcttttgggtgtaac

SEQ ID NO: 3465124 - DNA, 25 bp, Homo sapien
atgtcctcatttcttttgggtgtaa

SEQ ID NO: 3465125 - DNA, 25 bp, Homo sapien
tttcagtaggaagaccattccccac

SEQ ID NO: 3465126 - DNA, 25 bp, Homo sapien
cagaaagggccatatatgccagagc

SEQ ID NO: 3465127 - DNA, 25 bp, Homo sapien
tgaaaggctcttagttggtggaata

SEQ ID NO: 3465128 - DNA, 25 bp, Homo sapien
cctcccaacttgcatatggccagat

SEQ ID NO: 3465129 - DNA, 25 bp, Homo sapien
cttgaatggagacggaagttgcggt

SEQ ID NO: 3465130 - DNA, 25 bp, Homo sapien
cacttgaatggagacggaagttgcg

SEQ ID NO: 3465131 - DNA, 25 bp, Homo sapien
tcacttgaatggagacggaagttgc

SEQ ID NO: 3465132 - DNA, 25 bp, Homo sapien
aatcacttgaatggagacggaagtt

SEQ ID NO: 3465133 - DNA, 25 bp, Homo sapien
ggtaacttccttgattgctgcagcc

SEQ ID NO: 3465134 - DNA, 25 bp, Homo sapien
tggattgggttgctatggactctac

SEQ ID NO: 3465135 - DNA, 25 bp, Homo sapien
catggcattactgatccagctgaag

SEQ ID NO: 3465136 - DNA, 25 bp, Homo sapien
tgatagaggtgtccaatctggcccc

SEQ ID NO: 3465137 - DNA, 25 bp, Homo sapien
tgtttattggttcactgttcccaaa

SEQ ID NO: 3465138 - DNA, 25 bp, Homo sapien
ttaatccagttagcccatctcgctc

SEQ ID NO: 3465139 - DNA, 25 bp, Homo sapien
tggaactcctggacctccggcgttc

SEQ ID NO: 3465140 - DNA, 25 bp, Homo sapien
gagtctcattagtctccgggatggg

SEQ ID NO: 3465141 - DNA, 25 bp, Homo sapien
ctggccgggccaaagtcgaccttcg

SEQ ID NO: 3465142 - DNA, 25 bp, Homo sapien
aggccctgcccgagtcgtggctgag

SEQ ID NO: 3465143 - DNA, 25 bp, Homo sapien
agtctgccttcagcgccggtgtcgg

SEQ ID NO: 3465144 - DNA, 25 bp, Homo sapien
ttcctccggagacgctaaggtggcg

SEQ ID NO: 3465145 - DNA, 25 bp, Homo sapien
ggcaccagcgggagtttcaagtttc

SEQ ID NO: 3465146 - DNA, 25 bp, Homo sapien
ccgcttccctcgaccgcaggtttag

SEQ ID NO: 3465147 - DNA, 25 bp, Homo sapien
cacactccgagctttgggctgggcg

SEQ ID NO: 3465148 - DNA, 25 bp, Homo sapien
gacggcaacgccctcagtgagtttg

SEQ ID NO: 3465149 - DNA, 25 bp, Homo sapien
tctaaattccgctcaggtaggccct

SEQ ID NO: 3465150 - DNA, 25 bp, Homo sapien
tgtaaacgttctttgttgcaaatct

SEQ ID NO: 3465151 - DNA, 25 bp, Homo sapien
ctagttggctaaaacctgccaaaat

SEQ ID NO: 3465152 - DNA, 25 bp, Homo sapien
taacagccaagtctcacgcttcatt

SEQ ID NO: 3465153 - DNA, 25 bp, Homo sapien
ggattaggtctacaagaacttgcac

SEQ ID NO: 3465154 - DNA, 25 bp, Homo sapien
gcatatgcgttagcaattgcagtat

SEQ ID NO: 3465155 - DNA, 25 bp, Homo sapien
tatgtgcaagtatcttaaccctggt

SEQ ID NO: 3465156 - DNA, 25 bp, Homo sapien
caatgttagatcagctttcagtggg

SEQ ID NO: 3465157 - DNA, 25 bp, Homo sapien
gcagccattgggtctattgtgatca

SEQ ID NO: 3465158 - DNA, 25 bp, Homo sapien
tccacttccgtctccttagcagcag

SEQ ID NO: 3465159 - DNA, 25 bp, Homo sapien
cattgtctcgagtgccatcttctcc

SEQ ID NO: 3465160 - DNA, 25 bp, Homo sapien
tatctgccgtcatctccttagtcat

SEQ ID NO: 3465161 - DNA, 25 bp, Homo sapien
atggccccaaggttccattctttgg

SEQ ID NO: 3465162 - DNA, 25 bp, Homo sapien
gccaccttgggagccggccgccacc

SEQ ID NO: 3465163 - DNA, 25 bp, Homo sapien
tctttggaatccaggaggccaagaa

SEQ ID NO: 3465164 - DNA, 25 bp, Homo sapien
gtcagagaacaaaagtcttgctgcc

SEQ ID NO: 3465165 - DNA, 25 bp, Homo sapien
tcaggagacagtaatcacaccagta

SEQ ID NO: 3465166 - DNA, 25 bp, Homo sapien
gtcaggagacagtaatcacaccagt

SEQ ID NO: 3465167 - DNA, 25 bp, Homo sapien
tggggaggagaaataaagtgtcctc

SEQ ID NO: 3465168 - DNA, 25 bp, Homo sapien
ctggggaggagaaataaagtgtcct

SEQ ID NO: 3465169 - DNA, 25 bp, Homo sapien
tcctggaagttaaagcttccgcagt

SEQ ID NO: 3465170 - DNA, 25 bp, Homo sapien
ttctacatatcttcctccactcttg

SEQ ID NO: 3465171 - DNA, 25 bp, Homo sapien
gcccagccagagtcttatataggtc

SEQ ID NO: 3465172 - DNA, 25 bp, Homo sapien
tgtttctgctcacaaagtaactcat

SEQ ID NO: 3465173 - DNA, 25 bp, Homo sapien
agcagagcatggtaggccatgcctg

SEQ ID NO: 3465174 - DNA, 25 bp, Homo sapien
aaagcagagcatggtaggccatgcc

SEQ ID NO: 3465175 - DNA, 25 bp, Homo sapien
cagagcatggtaggccatgcctgta

SEQ ID NO: 3465176 - DNA, 25 bp, Homo sapien
agagcatggtaggccatgcctgtaa

SEQ ID NO: 3465177 - DNA, 25 bp, Homo sapien
ttcagtactattgctgtatgtcaca

SEQ ID NO: 3465178 - DNA, 25 bp, Homo sapien
gataatgaaggtttggaggagttca

SEQ ID NO: 3465179 - DNA, 25 bp, Homo sapien
tgggaggaaggtgcacgagcacacg

SEQ ID NO: 3465180 - DNA, 25 bp, Homo sapien
cgagcacacgagagtctttagtgca

SEQ ID NO: 3465181 - DNA, 25 bp, Homo sapien
gactccgaccctgtgttccatgagg

SEQ ID NO: 3465182 - DNA, 25 bp, Homo sapien
tttggttgccaaaggtagtcacttg

SEQ ID NO: 3465183 - DNA, 25 bp, Homo sapien
taagtaagacagctctttcagccag

SEQ ID NO: 3465184 - DNA, 25 bp, Homo sapien
tcacagattccatgtgccgggtcca

SEQ ID NO: 3465185 - DNA, 25 bp, Homo sapien
gaataaagaatgtacaagggagaca

SEQ ID NO: 3465186 - DNA, 25 bp, Homo sapien
tacagcactgtaatatcatgaataa

SEQ ID NO: 3465187 - DNA, 25 bp, Homo sapien
gggagacaaaccaatgtgactaaca

SEQ ID NO: 3465188 - DNA, 25 bp, Homo sapien
aaaaggaccacccagttacagcact

SEQ ID NO: 3465189 - DNA, 25 bp, Homo sapien
cctccttgaaaacatgcctcagcat

SEQ ID NO: 3465190 - DNA, 25 bp, Homo sapien
acagtgctacacttcaggttggctc

SEQ ID NO: 3465191 - DNA, 25 bp, Homo sapien
caccacagtgctacacttcaggttg

SEQ ID NO: 3465192 - DNA, 25 bp, Homo sapien
gactggagagcagatcccgccaggt

SEQ ID NO: 3465193 - DNA, 25 bp, Homo sapien
tttaagagacgaccaatgtatacac

SEQ ID NO: 3465194 - DNA, 25 bp, Homo sapien
cacccgcatcatttgtcatgtggca

SEQ ID NO: 3465195 - DNA, 25 bp, Homo sapien
tccttccgttgtcttggaggacagc

SEQ ID NO: 3465196 - DNA, 25 bp, Homo sapien
ttgtcttacttgatcccacccgcat

SEQ ID NO: 3465197 - DNA, 25 bp, Homo sapien
agaagatccctttaggcctggagtt

SEQ ID NO: 3465198 - DNA, 25 bp, Homo sapien
aagatccctttaggcctggagtttg

SEQ ID NO: 3465199 - DNA, 25 bp, Homo sapien
tcagaagatccctttaggcctggag

SEQ ID NO: 3465200 - DNA, 25 bp, Homo sapien
tgggaggccaaagtcagaagatccc

SEQ ID NO: 3465201 - DNA, 25 bp, Homo sapien
gggtttgcagatcaaattggtccca

SEQ ID NO: 3465202 - DNA, 25 bp, Homo sapien
ttcagggtttgcagatcaaattggt

SEQ ID NO: 3465203 - DNA, 25 bp, Homo sapien
ggtttgcagatcaaattggtcccaa

SEQ ID NO: 3465204 - DNA, 25 bp, Homo sapien
ctttttcagggtttgcagatcaaat

SEQ ID NO: 3465205 - DNA, 25 bp, Homo sapien
tgtctgaagtcgattgttcctcccc

SEQ ID NO: 3465206 - DNA, 25 bp, Homo sapien
taagggcttttgtgctgggtcataa

SEQ ID NO: 3465207 - DNA, 25 bp, Homo sapien
tgggtcataacacagagagaggtca

SEQ ID NO: 3465208 - DNA, 25 bp, Homo sapien
tgtaagaactaatccagaggaggcc

SEQ ID NO: 3465209 - DNA, 25 bp, Homo sapien
cgggtgacctataaagacattggca

SEQ ID NO: 3465210 - DNA, 25 bp, Homo sapien
gcggaaatcggttagctagaccact

SEQ ID NO: 3465211 - DNA, 25 bp, Homo sapien
tttgaggccgcgagagactccaaag

SEQ ID NO: 3465212 - DNA, 25 bp, Homo sapien
gaaagatagctggacgtctagcgga

SEQ ID NO: 3465213 - DNA, 25 bp, Homo sapien
cgccgaggacagcagaagcggcgcg

SEQ ID NO: 3465214 - DNA, 25 bp, Homo sapien
ccgaggacagcagaagcggcgcgca

SEQ ID NO: 3465215 - DNA, 25 bp, Homo sapien
gccgccgaggacagcagaagcggcg

SEQ ID NO: 3465216 - DNA, 25 bp, Homo sapien
gccgggccgccgaggacagcagaag

SEQ ID NO: 3465217 - DNA, 25 bp, Homo sapien
tccgggcccgcgccgacacgctcag

SEQ ID NO: 3465218 - DNA, 25 bp, Homo sapien
ctccgggcccgcgccgacacgctca

SEQ ID NO: 3465219 - DNA, 25 bp, Homo sapien
gctccgggcccgcgccgacacgctc

SEQ ID NO: 3465220 - DNA, 25 bp, Homo sapien
ctttggttgttaatgtttcaccatc

SEQ ID NO: 3465221 - DNA, 25 bp, Homo sapien
cctttggttgttaatgtttcaccat

SEQ ID NO: 3465222 - DNA, 25 bp, Homo sapien
gactccgtattcaataatggtgctg

SEQ ID NO: 3465223 - DNA, 25 bp, Homo sapien
gcgcccggacagcacttactctttt

SEQ ID NO: 3465224 - DNA, 25 bp, Homo sapien
tttttaagagactccgtattcaata

SEQ ID NO: 3465225 - DNA, 25 bp, Homo sapien
gatgcctggctagccataggcagaa

SEQ ID NO: 3465226 - DNA, 25 bp, Homo sapien
gcgggtcggtcgtgttaaatagcaa

SEQ ID NO: 3465227 - DNA, 25 bp, Homo sapien
gattcagggcgggtcggtcgtgtta

SEQ ID NO: 3465228 - DNA, 25 bp, Homo sapien
agctttgcccaggaaacgattcagg

SEQ ID NO: 3465229 - DNA, 25 bp, Homo sapien
atagaattgatgcagggtagacagg

SEQ ID NO: 3465230 - DNA, 25 bp, Homo sapien
gaaactaagtacttcggtcagccat

SEQ ID NO: 3465231 - DNA, 25 bp, Homo sapien
gatttaaggtcacagaacggatgag

SEQ ID NO: 3465232 - DNA, 25 bp, Homo sapien
caaatgcagtgtttagatgggctcc

SEQ ID NO: 3465233 - DNA, 25 bp, Homo sapien
gatcacccagggagaaactgtaaag

SEQ ID NO: 3465234 - DNA, 25 bp, Homo sapien
atcatgtcttacagcagtcccgagc

SEQ ID NO: 3465235 - DNA, 25 bp, Homo sapien
cataggatgagaaccctactgtgaa

SEQ ID NO: 3465236 - DNA, 25 bp, Homo sapien
gcatgtgctgttcaaaggctacaaa

SEQ ID NO: 3465237 - DNA, 25 bp, Homo sapien
caacggtagttaccagcagatggga

SEQ ID NO: 3465238 - DNA, 25 bp, Homo sapien
cattagtctcttgtgcctctaggag

SEQ ID NO: 3465239 - DNA, 25 bp, Homo sapien
tacatagccgggatacaagtccttt

SEQ ID NO: 3465240 - DNA, 25 bp, Homo sapien
gccacttgggagtatgacatcacca

SEQ ID NO: 3465241 - DNA, 25 bp, Homo sapien
taagaattctctgcctacctaccca

SEQ ID NO: 3465242 - DNA, 25 bp, Homo sapien
gtgacaggttgaacaagccagggtt

SEQ ID NO: 3465243 - DNA, 25 bp, Homo sapien
gaggtgacaggttgaacaagccagg

SEQ ID NO: 3465244 - DNA, 25 bp, Homo sapien
ggtgacaggttgaacaagccagggt

SEQ ID NO: 3465245 - DNA, 25 bp, Homo sapien
aggtgacaggttgaacaagccaggg

SEQ ID NO: 3465246 - DNA, 25 bp, Homo sapien
gacatggctgctcctttaatgggaa

SEQ ID NO: 3465247 - DNA, 25 bp, Homo sapien
gattacccatgcaaactggtggcag

SEQ ID NO: 3465248 - DNA, 25 bp, Homo sapien
tgatagtactgcctaaccctgaagg

SEQ ID NO: 3465249 - DNA, 25 bp, Homo sapien
tccgcaagcagttggtgacctctac

SEQ ID NO: 3465250 - DNA, 25 bp, Homo sapien
ctccacctcccaggccctggtgatc

SEQ ID NO: 3465251 - DNA, 25 bp, Homo sapien
gtagcggggactacaggcatgcacc

SEQ ID NO: 3465252 - DNA, 25 bp, Homo sapien
atgcaccaccatgcttgaataattt

SEQ ID NO: 3465253 - DNA, 25 bp, Homo sapien
tgatcctcccacctcagcctcctaa

SEQ ID NO: 3465254 - DNA, 25 bp, Homo sapien
gaactgaggttattagcaaggccaa

SEQ ID NO: 3465255 - DNA, 25 bp, Homo sapien
gctgacaagcaaggaaacaatcaga

SEQ ID NO: 3465256 - DNA, 25 bp, Homo sapien
tgtttcaccagaccactactttttg

SEQ ID NO: 3465257 - DNA, 25 bp, Homo sapien
ctttttggtcaaagagctgacaagc

SEQ ID NO: 3465258 - DNA, 25 bp, Homo sapien
tctggcatcagccactgtttcaggc

SEQ ID NO: 3465259 - DNA, 25 bp, Homo sapien
atcaatggattgtctggcatcagcc

SEQ ID NO: 3465260 - DNA, 25 bp, Homo sapien
tgtttcaggcactcgaacagtcata

SEQ ID NO: 3465261 - DNA, 25 bp, Homo sapien
tgtccatagattttgtcaaacagat

SEQ ID NO: 3465262 - DNA, 25 bp, Homo sapien
tgaaaatattcctatttgttctagt

SEQ ID NO: 3465263 - DNA, 25 bp, Homo sapien
tccactcatccatgttctcatttaa

SEQ ID NO: 3465264 - DNA, 25 bp, Homo sapien
tctcatttaatcactttaagaaata

SEQ ID NO: 3465265 - DNA, 25 bp, Homo sapien
aataggtaaaattccatgaaaatat

SEQ ID NO: 3465266 - DNA, 25 bp, Homo sapien
attaaaatagtaaagctagtcataa

SEQ ID NO: 3465267 - DNA, 25 bp, Homo sapien
taaaatagtaaagctagtcataata

SEQ ID NO: 3465268 - DNA, 25 bp, Homo sapien
ttaaaatagtaaagctagtcataat

SEQ ID NO: 3465269 - DNA, 25 bp, Homo sapien
aacaagccaggttagatctctgcct

SEQ ID NO: 3465270 - DNA, 25 bp, Homo sapien
gattttctaattagtggtatggccc

SEQ ID NO: 3465271 - DNA, 25 bp, Homo sapien
tataggaataagacacaggttctag

SEQ ID NO: 3465272 - DNA, 25 bp, Homo sapien
tttgaagttaagcagtttactgagc

SEQ ID NO: 3465273 - DNA, 25 bp, Homo sapien
cttctttgatagcattataatgtct

SEQ ID NO: 3465274 - DNA, 25 bp, Homo sapien
aaaacagagatcaaacttctttgat

SEQ ID NO: 3465275 - DNA, 25 bp, Homo sapien
gatagcattataatgtctacgtcca

SEQ ID NO: 3465276 - DNA, 25 bp, Homo sapien
tttcctctagtttagtcaaaacaga

SEQ ID NO: 3465277 - DNA, 25 bp, Homo sapien
tgtgcaacgtgtcagcctgctcatt

SEQ ID NO: 3465278 - DNA, 25 bp, Homo sapien
taatctgtggtgcttgccactccct

SEQ ID NO: 3465279 - DNA, 25 bp, Homo sapien
gcagccccatccttgcgtgagagaa

SEQ ID NO: 3465280 - DNA, 25 bp, Homo sapien
actcctgggactgacacactgcagc

SEQ ID NO: 3465281 - DNA, 25 bp, Homo sapien
taatgccgttatctcaggtgtgggt

SEQ ID NO: 3465282 - DNA, 25 bp, Homo sapien
taatcattaaagtagctctggaagg

SEQ ID NO: 3465283 - DNA, 25 bp, Homo sapien
tgtaatggcattgaaaggtgggtcc

SEQ ID NO: 3465284 - DNA, 25 bp, Homo sapien
ttcaatagttatggccaagcacggt

SEQ ID NO: 3465285 - DNA, 25 bp, Homo sapien
gatacaaaactggataacgcccttc

SEQ ID NO: 3465286 - DNA, 25 bp, Homo sapien
gacaatgggtggctcaaagcaggac

SEQ ID NO: 3465287 - DNA, 25 bp, Homo sapien
gcaaatattccaggccttataggcc

SEQ ID NO: 3465288 - DNA, 25 bp, Homo sapien
taaactgcgtagagccagacagcaa

SEQ ID NO: 3465289 - DNA, 25 bp, Homo sapien
ttatcagtagaatacttctctgaca

SEQ ID NO: 3465290 - DNA, 25 bp, Homo sapien
ttgctccctcttctgattacaacct

SEQ ID NO: 3465291 - DNA, 25 bp, Homo sapien
gctccctcttctgattacaacctag

SEQ ID NO: 3465292 - DNA, 25 bp, Homo sapien
ggttatcagtagaatacttctctga

SEQ ID NO: 3465293 - DNA, 25 bp, Homo sapien
taaacaggtttccatatggcagttt

SEQ ID NO: 3465294 - DNA, 25 bp, Homo sapien
ggagggtagagtgctattattcctt

SEQ ID NO: 3465295 - DNA, 25 bp, Homo sapien
acgtatgtttcaatttagtggctgg

SEQ ID NO: 3465296 - DNA, 25 bp, Homo sapien
ggaatattataaggaactgtatggg

SEQ ID NO: 3465297 - DNA, 25 bp, Homo sapien
ggttgtacagaacatagctcactga

SEQ ID NO: 3465298 - DNA, 25 bp, Homo sapien
tattagccacctactctacatcagg

SEQ ID NO: 3465299 - DNA, 25 bp, Homo sapien
tacatcaggtactcaaggcatttgg

SEQ ID NO: 3465300 - DNA, 25 bp, Homo sapien
cagatctgatcttaagtagactgca

SEQ ID NO: 3465301 - DNA, 25 bp, Homo sapien
ggtaggctgtagttgatccacaaaa

SEQ ID NO: 3465302 - DNA, 25 bp, Homo sapien
acaaagtatgttaacttcggcaggg

SEQ ID NO: 3465303 - DNA, 25 bp, Homo sapien
cattaggtgatgactgttggcttac

SEQ ID NO: 3465304 - DNA, 25 bp, Homo sapien
gagacagaagagtgccaacaggttg

SEQ ID NO: 3465305 - DNA, 25 bp, Homo sapien
tgttctatcataacacctctcagat

SEQ ID NO: 3465306 - DNA, 25 bp, Homo sapien
ctgttctatcataacacctctcaga

SEQ ID NO: 3465307 - DNA, 25 bp, Homo sapien
attgatgaagttcccacggtgtgca

SEQ ID NO: 3465308 - DNA, 25 bp, Homo sapien
gggattgatgaagttcccacggtgt

SEQ ID NO: 3465309 - DNA, 25 bp, Homo sapien
tctaggcctcttgacctagtaaggc

SEQ ID NO: 3465310 - DNA, 25 bp, Homo sapien
ggccagcagacttctaggcctcttg

SEQ ID NO: 3465311 - DNA, 25 bp, Homo sapien
cagcagacttctaggcctcttgacc

SEQ ID NO: 3465312 - DNA, 25 bp, Homo sapien
gacctagtaaggctgatgtaacctt

SEQ ID NO: 3465313 - DNA, 25 bp, Homo sapien
taattcttcctcactaagagcgctg

SEQ ID NO: 3465314 - DNA, 25 bp, Homo sapien
ctaagagcgctgagtggaccgaaac

SEQ ID NO: 3465315 - DNA, 25 bp, Homo sapien
tccctttcagggttgtatttgccta

SEQ ID NO: 3465316 - DNA, 25 bp, Homo sapien
ccattgtccagtctctatgtgtctg

SEQ ID NO: 3465317 - DNA, 25 bp, Homo sapien
atgattgcatcagggctagagtctt

SEQ ID NO: 3465318 - DNA, 25 bp, Homo sapien
gatgattgcatcagggctagagtct

SEQ ID NO: 3465319 - DNA, 25 bp, Homo sapien
tcagatgattgcatcagggctagag

SEQ ID NO: 3465320 - DNA, 25 bp, Homo sapien
ggctagagtcttcctcaagaggaac

SEQ ID NO: 3465321 - DNA, 25 bp, Homo sapien
agtaaaaatgtctatcaccccaaag

SEQ ID NO: 3465322 - DNA, 25 bp, Homo sapien
cacctgttttcattccactaggaac

SEQ ID NO: 3465323 - DNA, 25 bp, Homo sapien
actatatactccctttctgtctggt

SEQ ID NO: 3465324 - DNA, 25 bp, Homo sapien
gtgttccttgtaagctcccaatcca

SEQ ID NO: 3465325 - DNA, 25 bp, Homo sapien
gagagtgaatgttcctgaatccagg

SEQ ID NO: 3465326 - DNA, 25 bp, Homo sapien
tgaatccaggtgcaatgggaaagca

SEQ ID NO: 3465327 - DNA, 25 bp, Homo sapien
gcaacaggctggctggacatgtctt

SEQ ID NO: 3465328 - DNA, 25 bp, Homo sapien
tgtcttcgtgatgctgctgcaggag

SEQ ID NO: 3465329 - DNA, 25 bp, Homo sapien
tggcagcagagatcagccgcttgga

SEQ ID NO: 3465330 - DNA, 25 bp, Homo sapien
agatcagccgcttggaagggctcat

SEQ ID NO: 3465331 - DNA, 25 bp, Homo sapien
agagatcagccgcttggaagggctc

SEQ ID NO: 3465332 - DNA, 25 bp, Homo sapien
cagcagagatcagccgcttggaagg

SEQ ID NO: 3465333 - DNA, 25 bp, Homo sapien
aatggatgaaatggtccagcgaagg

SEQ ID NO: 3465334 - DNA, 25 bp, Homo sapien
agcactcggattgatggatctgtga

SEQ ID NO: 3465335 - DNA, 25 bp, Homo sapien
gagttaatctctttagagaacgcga

SEQ ID NO: 3465336 - DNA, 25 bp, Homo sapien
cgcgatgtgctcatcatgacagcat

SEQ ID NO: 3465337 - DNA, 25 bp, Homo sapien
cttggtcctcattggtaatttccat

SEQ ID NO: 3465338 - DNA, 25 bp, Homo sapien
tgtcaaagttttctggggatcccat

SEQ ID NO: 3465339 - DNA, 25 bp, Homo sapien
ttgtcaaagttttctggggatccca

SEQ ID NO: 3465340 - DNA, 25 bp, Homo sapien
tcgggctaactccagctcgaaggat

SEQ ID NO: 3465341 - DNA, 25 bp, Homo sapien
ctctgctcgccagcctgtgattgtg

SEQ ID NO: 3465342 - DNA, 25 bp, Homo sapien
cacaagggacagaaaccaattcggg

SEQ ID NO: 3465343 - DNA, 25 bp, Homo sapien
tgtgattgtgtcagccagggctcag

SEQ ID NO: 3465344 - DNA, 25 bp, Homo sapien
tcctcggcctttccagagtcccttc

SEQ ID NO: 3465345 - DNA, 25 bp, Homo sapien
gaagcaggggttcctgtcggtcaac

SEQ ID NO: 3465346 - DNA, 25 bp, Homo sapien
tctgtggtggctactgcccattggc

SEQ ID NO: 3465347 - DNA, 25 bp, Homo sapien
ctgtcggtcaactctcagtggactt

SEQ ID NO: 3465348 - DNA, 25 bp, Homo sapien
ccttccaggatagtagagttggcag

SEQ ID NO: 3465349 - DNA, 25 bp, Homo sapien
cacggctggtaccaggcccttctag

SEQ ID NO: 3465350 - DNA, 25 bp, Homo sapien
cgtggacggcaccacatcacagctt

SEQ ID NO: 3465351 - DNA, 25 bp, Homo sapien
ctgctgaccgtggacggcaccacat

SEQ ID NO: 3465352 - DNA, 25 bp, Homo sapien
agcttcctgaaacttcctatttctg

SEQ ID NO: 3465353 - DNA, 25 bp, Homo sapien
gcttcctgaaacttcctatttctgt

SEQ ID NO: 3465354 - DNA, 25 bp, Homo sapien
cagcttcctgaaacttcctatttct

SEQ ID NO: 3465355 - DNA, 25 bp, Homo sapien
gttgtcctgtggctctaaagcatag

SEQ ID NO: 3465356 - DNA, 25 bp, Homo sapien
aaagcatagttatatagcagagggc

SEQ ID NO: 3465357 - DNA, 25 bp, Homo sapien
atagttatatagcagagggcaggcc

SEQ ID NO: 3465358 - DNA, 25 bp, Homo sapien
ggaataagaacaaggttgtcctgtg

SEQ ID NO: 3465359 - DNA, 25 bp, Homo sapien
gtgtttgggaaagcactgccagtgc

SEQ ID NO: 3465360 - DNA, 25 bp, Homo sapien
ggatgacatgctgcaccgcagggct

SEQ ID NO: 3465361 - DNA, 25 bp, Homo sapien
tctgtggtcaccgaatcttgggtaa

SEQ ID NO: 3465362 - DNA, 25 bp, Homo sapien
tatccgttgtgggaaaatgggtctc

SEQ ID NO: 3465363 - DNA, 25 bp, Homo sapien
cccagggacctaaaggcttggtgag

SEQ ID NO: 3465364 - DNA, 25 bp, Homo sapien
taggcgtcaaggcatccgaagttac

SEQ ID NO: 3465365 - DNA, 25 bp, Homo sapien
ggcttggtgaggtggcacctcctct

SEQ ID NO: 3465366 - DNA, 25 bp, Homo sapien
tcacaggtcctcacgaggagcatcc

SEQ ID NO: 3465367 - DNA, 25 bp, Homo sapien
tctctcctgcagtccacatggctgt

SEQ ID NO: 3465368 - DNA, 25 bp, Homo sapien
tccacatggctgtggtggccaagga

SEQ ID NO: 3465369 - DNA, 25 bp, Homo sapien
ctaagcgaaggaaaaggcagactgg

SEQ ID NO: 3465370 - DNA, 25 bp, Homo sapien
aaggcagactggagaggcctctctc

SEQ ID NO: 3465371 - DNA, 25 bp, Homo sapien
catgccctattctgagggaagtcca

SEQ ID NO: 3465372 - DNA, 25 bp, Homo sapien
acaacagcgcatgccctattctgag

SEQ ID NO: 3465373 - DNA, 25 bp, Homo sapien
gacttcccacaacagcgcatgccct

SEQ ID NO: 3465374 - DNA, 25 bp, Homo sapien
cctattctgagggaagtccaaccag

SEQ ID NO: 3465375 - DNA, 25 bp, Homo sapien
gggagggagacaggaggagaggagg

SEQ ID NO: 3465376 - DNA, 25 bp, Homo sapien
ggggagggagacaggaggagaggag

SEQ ID NO: 3465377 - DNA, 25 bp, Homo sapien
ggagggagacaggaggagaggaggg

SEQ ID NO: 3465378 - DNA, 25 bp, Homo sapien
tgggggagggagacaggaggagagg

SEQ ID NO: 3465379 - DNA, 25 bp, Homo sapien
cccagcagatgccaggatgttcttc

SEQ ID NO: 3465380 - DNA, 25 bp, Homo sapien
agctcacgtctgtccccaaagcctt

SEQ ID NO: 3465381 - DNA, 25 bp, Homo sapien
aaagccttccgacccccagcagatg

SEQ ID NO: 3465382 - DNA, 25 bp, Homo sapien
tgttcttctggcctgaatgtctcag

SEQ ID NO: 3465383 - DNA, 25 bp, Homo sapien
ccactggattgggttacttgctgca

SEQ ID NO: 3465384 - DNA, 25 bp, Homo sapien
tcgttgccttctccttaagtgcggt

SEQ ID NO: 3465385 - DNA, 25 bp, Homo sapien
taagtgcggtctctcactcatggag

SEQ ID NO: 3465386 - DNA, 25 bp, Homo sapien
gcttccagctgtttcactcgttgcc

SEQ ID NO: 3465387 - DNA, 25 bp, Homo sapien
cttgcagaaaagctacatctggtgg

SEQ ID NO: 3465388 - DNA, 25 bp, Homo sapien
tgtggggatcttgatgagatcctgc

SEQ ID NO: 3465389 - DNA, 25 bp, Homo sapien
cagagctctcactacttgcctccac

SEQ ID NO: 3465390 - DNA, 25 bp, Homo sapien
ggattggtgtatgcccccatggcca

SEQ ID NO: 3465391 - DNA, 25 bp, Homo sapien
aaggttgcagcagtacatctcgtca

SEQ ID NO: 3465392 - DNA, 25 bp, Homo sapien
aaagagctacttcgtgacactggcc

SEQ ID NO: 3465393 - DNA, 25 bp, Homo sapien
ccaactagtatgcagggatggcact

SEQ ID NO: 3465394 - DNA, 25 bp, Homo sapien
gacatggccctgtttgcgctaacca

SEQ ID NO: 3465395 - DNA, 25 bp, Homo sapien
tcattatcagggaatgttgggaaca

SEQ ID NO: 3465396 - DNA, 25 bp, Homo sapien
tggtgtcataaggaacaatgccaca

SEQ ID NO: 3465397 - DNA, 25 bp, Homo sapien
taccaattatcgtgcactctcactg

SEQ ID NO: 3465398 - DNA, 25 bp, Homo sapien
caagccatgagtgggtactgcctag

SEQ ID NO: 3465399 - DNA, 25 bp, Homo sapien
catatatggatacctgctgaaggct

SEQ ID NO: 3465400 - DNA, 25 bp, Homo sapien
aaaccacatggagagtaggtgcaga

SEQ ID NO: 3465401 - DNA, 25 bp, Homo sapien
gcctttgagggctaattcatatcct

SEQ ID NO: 3465402 - DNA, 25 bp, Homo sapien
ccaaagagctttacatacctgtgtg

SEQ ID NO: 3465403 - DNA, 25 bp, Homo sapien
ttctgacatctcttccaagtgctgc

SEQ ID NO: 3465404 - DNA, 25 bp, Homo sapien
ctgacatctcttccaagtgctgcat

SEQ ID NO: 3465405 - DNA, 25 bp, Homo sapien
tctgacatctcttccaagtgctgca

SEQ ID NO: 3465406 - DNA, 25 bp, Homo sapien
ggcttggaaaaattggctctgtgct

SEQ ID NO: 3465407 - DNA, 25 bp, Homo sapien
tgcggagaggtcaggatatttgtcc

SEQ ID NO: 3465408 - DNA, 25 bp, Homo sapien
gattgtacttctgggaataccctgt

SEQ ID NO: 3465409 - DNA, 25 bp, Homo sapien
taccctgtcttggtataggaggcag

SEQ ID NO: 3465410 - DNA, 25 bp, Homo sapien
gtgactaggtgcattatcggtgagc

SEQ ID NO: 3465411 - DNA, 25 bp, Homo sapien
ctatggcagctataagacttgaaag

SEQ ID NO: 3465412 - DNA, 25 bp, Homo sapien
tacaaggagtagattccacgtcaag

SEQ ID NO: 3465413 - DNA, 25 bp, Homo sapien
tgccagagtggatattttgttagcc

SEQ ID NO: 3465414 - DNA, 25 bp, Homo sapien
aggattcgacttttctgggaatccg

SEQ ID NO: 3465415 - DNA, 25 bp, Homo sapien
caccagtgttggaaaggattcgact

SEQ ID NO: 3465416 - DNA, 25 bp, Homo sapien
tccgatgataactccgggctgtttc

SEQ ID NO: 3465417 - DNA, 25 bp, Homo sapien
tgttggaaaggattcgacttttctg

SEQ ID NO: 3465418 - DNA, 25 bp, Homo sapien
ggcttggatacgtctccacaagtaa

SEQ ID NO: 3465419 - DNA, 25 bp, Homo sapien
gatacgtctccacaagtaaatgcta

SEQ ID NO: 3465420 - DNA, 25 bp, Homo sapien
cagtggcttggatacgtctccacaa

SEQ ID NO: 3465421 - DNA, 25 bp, Homo sapien
attgttcagtggcttggatacgtct

SEQ ID NO: 3465422 - DNA, 25 bp, Homo sapien
attccgatccgggtcaggtttcgct

SEQ ID NO: 3465423 - DNA, 25 bp, Homo sapien
gcaggtgacaacttgtagcgttcca

SEQ ID NO: 3465424 - DNA, 25 bp, Homo sapien
tagcgttccattccgataaacacgg

SEQ ID NO: 3465425 - DNA, 25 bp, Homo sapien
aacggttccctgagcaagtgcacgt

SEQ ID NO: 3465426 - DNA, 25 bp, Homo sapien
gagcgcccgcttctccgtttctaga

SEQ ID NO: 3465427 - DNA, 25 bp, Homo sapien
aatttgacgctcgaggctcgcggcc

SEQ ID NO: 3465428 - DNA, 25 bp, Homo sapien
tgtagtgggcgatcgcctttccccg

SEQ ID NO: 3465429 - DNA, 25 bp, Homo sapien
gagccttagtctctcctcgagcgac

SEQ ID NO: 3465430 - DNA, 25 bp, Homo sapien
tgtccttggattcagtgtggatgat

SEQ ID NO: 3465431 - DNA, 25 bp, Homo sapien
gattcagtgtggatgatgcctaaca

SEQ ID NO: 3465432 - DNA, 25 bp, Homo sapien
ttggattcagtgtggatgatgccta

SEQ ID NO: 3465433 - DNA, 25 bp, Homo sapien
ccttggattcagtgtggatgatgcc

SEQ ID NO: 3465434 - DNA, 25 bp, Homo sapien
tatttagggccacaggtgggccact

SEQ ID NO: 3465435 - DNA, 25 bp, Homo sapien
gggcgatactcctccgctcaatttt

SEQ ID NO: 3465436 - DNA, 25 bp, Homo sapien
aatggacaagtactgcatccatagc

SEQ ID NO: 3465437 - DNA, 25 bp, Homo sapien
tcaattttgatagtaaatggacaag

SEQ ID NO: 3465438 - DNA, 25 bp, Homo sapien
gatgaggagcttcccctcataagca

SEQ ID NO: 3465439 - DNA, 25 bp, Homo sapien
ggcatctggatgtcaagaattttat

SEQ ID NO: 3465440 - DNA, 25 bp, Homo sapien
gaattttatgaacacggagattagc

SEQ ID NO: 3465441 - DNA, 25 bp, Homo sapien
tagagagatttagggaggtctctga

SEQ ID NO: 3465442 - DNA, 25 bp, Homo sapien
gataacgtattggaaagagctttta

SEQ ID NO: 3465443 - DNA, 25 bp, Homo sapien
ggattcaggtcttggagccagttcc

SEQ ID NO: 3465444 - DNA, 25 bp, Homo sapien
tctagcatggcatcatttgcctctg

SEQ ID NO: 3465445 - DNA, 25 bp, Homo sapien
aatgtcacagctgagtcagggggct

SEQ ID NO: 3465446 - DNA, 25 bp, Homo sapien
gatcaacacccttgtgattcctggc

SEQ ID NO: 3465447 - DNA, 25 bp, Homo sapien
taaagcctgatcaacacccttgtga

SEQ ID NO: 3465448 - DNA, 25 bp, Homo sapien
acataaagcctgatcaacacccttg

SEQ ID NO: 3465449 - DNA, 25 bp, Homo sapien
tggcctcctctcagtgccaacagga

SEQ ID NO: 3465450 - DNA, 25 bp, Homo sapien
ctctgggacacacgggcttcttcaa

SEQ ID NO: 3465451 - DNA, 25 bp, Homo sapien
actctgggacacacgggcttcttca

SEQ ID NO: 3465452 - DNA, 25 bp, Homo sapien
tgggggtaattgtccccacactctg

SEQ ID NO: 3465453 - DNA, 25 bp, Homo sapien
cacactctgggacacacgggcttct

SEQ ID NO: 3465454 - DNA, 25 bp, Homo sapien
ttgctgtccaaaacacgattatcca

SEQ ID NO: 3465455 - DNA, 25 bp, Homo sapien
tagtaaactgaacttgctgtccaaa

SEQ ID NO: 3465456 - DNA, 25 bp, Homo sapien
aacacgattatccacatgtcccatt

SEQ ID NO: 3465457 - DNA, 25 bp, Homo sapien
gggtagtaaactgaacttgctgtcc

SEQ ID NO: 3465458 - DNA, 25 bp, Homo sapien
tggctccagcccttactaggcacaa

SEQ ID NO: 3465459 - DNA, 25 bp, Homo sapien
tctcttaagggtagcttcatatggg

SEQ ID NO: 3465460 - DNA, 25 bp, Homo sapien
gatagctttccaagttcatctggct

SEQ ID NO: 3465461 - DNA, 25 bp, Homo sapien
tgaagacgttcatgtggaatgtgct

SEQ ID NO: 3465462 - DNA, 25 bp, Homo sapien
caacacagacaggataactgcccaa

SEQ ID NO: 3465463 - DNA, 25 bp, Homo sapien
tttctcccttaagttgagctgacct

SEQ ID NO: 3465464 - DNA, 25 bp, Homo sapien
tcttgctgaatgaggctccaacaca

SEQ ID NO: 3465465 - DNA, 25 bp, Homo sapien
gctgacctagcagtacatcatggcc

SEQ ID NO: 3465466 - DNA, 25 bp, Homo sapien
cctcactctcactccgaataaaatg

SEQ ID NO: 3465467 - DNA, 25 bp, Homo sapien
tgttggccaccatccaagctggagc

SEQ ID NO: 3465468 - DNA, 25 bp, Homo sapien
tccccctcactctcactccgaataa

SEQ ID NO: 3465469 - DNA, 25 bp, Homo sapien
tctcactccgaataaaatgttggcc

SEQ ID NO: 3465470 - DNA, 25 bp, Homo sapien
ctgtttagtaccaaaggctgaccta

SEQ ID NO: 3465471 - DNA, 25 bp, Homo sapien
gtaccaaaggctgacctagtccctc

SEQ ID NO: 3465472 - DNA, 25 bp, Homo sapien
tagtaccaaaggctgacctagtccc

SEQ ID NO: 3465473 - DNA, 25 bp, Homo sapien
tttagtaccaaaggctgacctagtc

SEQ ID NO: 3465474 - DNA, 25 bp, Homo sapien
tcttgagtaatggtgctaggcatgc

SEQ ID NO: 3465475 - DNA, 25 bp, Homo sapien
ccttggaagcaagatacggtgtgag

SEQ ID NO: 3465476 - DNA, 25 bp, Homo sapien
gctctggctaaacctgaggagttca

SEQ ID NO: 3465477 - DNA, 25 bp, Homo sapien
taaggctttgagatggctttctaca

SEQ ID NO: 3465478 - DNA, 25 bp, Homo sapien
aatgcaagctcctcaaataccagtg

SEQ ID NO: 3465479 - DNA, 25 bp, Homo sapien
tttctgacactctttcagacatcca

SEQ ID NO: 3465480 - DNA, 25 bp, Homo sapien
gccacccatgagagacaccttttct

SEQ ID NO: 3465481 - DNA, 25 bp, Homo sapien
tcagacatccatgatcccggagctt

SEQ ID NO: 3465482 - DNA, 25 bp, Homo sapien
tctggactgtcatccaaaataagcc

SEQ ID NO: 3465483 - DNA, 25 bp, Homo sapien
tgctaaggtccttaagtagggtcat

SEQ ID NO: 3465484 - DNA, 25 bp, Homo sapien
ccttcttgctaaggtccttaagtag

SEQ ID NO: 3465485 - DNA, 25 bp, Homo sapien
acccagtctcagacaacttctctgg

SEQ ID NO: 3465486 - DNA, 25 bp, Homo sapien
agctttaggtctctttagccgctct

SEQ ID NO: 3465487 - DNA, 25 bp, Homo sapien
acagctttaggtctctttagccgct

SEQ ID NO: 3465488 - DNA, 25 bp, Homo sapien
cagctttaggtctctttagccgctc

SEQ ID NO: 3465489 - DNA, 25 bp, Homo sapien
gctttaggtctctttagccgctctg

SEQ ID NO: 3465490 - DNA, 25 bp, Homo sapien
aatacttcaaactccagacaccatc

SEQ ID NO: 3465491 - DNA, 25 bp, Homo sapien
cagcaatacttcaaactccagacac

SEQ ID NO: 3465492 - DNA, 25 bp, Homo sapien
ccagcagaaggcatttgtcccccat

SEQ ID NO: 3465493 - DNA, 25 bp, Homo sapien
caacagcaatacttcaaactccaga

SEQ ID NO: 3465494 - DNA, 25 bp, Homo sapien
tgattaacgggtaagtgacttgact

SEQ ID NO: 3465495 - DNA, 25 bp, Homo sapien
gtgactggcagtttgattaacgggt

SEQ ID NO: 3465496 - DNA, 25 bp, Homo sapien
gactggcagtttgattaacgggtaa

SEQ ID NO: 3465497 - DNA, 25 bp, Homo sapien
gcagtttgattaacgggtaagtgac

SEQ ID NO: 3465498 - DNA, 25 bp, Homo sapien
gggaaaatacccaacagtgtgtctc

SEQ ID NO: 3465499 - DNA, 25 bp, Homo sapien
cacagaggaagacgtactccctgca

SEQ ID NO: 3465500 - DNA, 25 bp, Homo sapien
ctccagggaaaatacccaacagtgt

SEQ ID NO: 3465501 - DNA, 25 bp, Homo sapien
ggaagacgtactccctgcaatcctt

SEQ ID NO: 3465502 - DNA, 25 bp, Homo sapien
tcttcctgactttctctcagctggc

SEQ ID NO: 3465503 - DNA, 25 bp, Homo sapien
cctgactttctctcagctggccacc

SEQ ID NO: 3465504 - DNA, 25 bp, Homo sapien
ccatcttgaaggaatcgtctttctt

SEQ ID NO: 3465505 - DNA, 25 bp, Homo sapien
ttcctgactttctctcagctggcca

SEQ ID NO: 3465506 - DNA, 25 bp, Homo sapien
agcatctggatggtaccagtgagaa

SEQ ID NO: 3465507 - DNA, 25 bp, Homo sapien
agagatttgcctcctcatgaaggcc

SEQ ID NO: 3465508 - DNA, 25 bp, Homo sapien
aagcatctggatggtaccagtgaga

SEQ ID NO: 3465509 - DNA, 25 bp, Homo sapien
ggaggcagtcttcaagagatttgcc

SEQ ID NO: 3465510 - DNA, 25 bp, Homo sapien
tctgcaccttgttccatgacatcag

SEQ ID NO: 3465511 - DNA, 25 bp, Homo sapien
tgcaccttgttccatgacatcagag

SEQ ID NO: 3465512 - DNA, 25 bp, Homo sapien
gcaccttgttccatgacatcagagg

SEQ ID NO: 3465513 - DNA, 25 bp, Homo sapien
accttgttccatgacatcagaggag

SEQ ID NO: 3465514 - DNA, 25 bp, Homo sapien
catctctggataaccagactgccaa

SEQ ID NO: 3465515 - DNA, 25 bp, Homo sapien
actgccaagtgcttccacgtggcca

SEQ ID NO: 3465516 - DNA, 25 bp, Homo sapien
gataaccagactgccaagtgcttcc

SEQ ID NO: 3465517 - DNA, 25 bp, Homo sapien
acctgaaccgcctctcctctcagaa

SEQ ID NO: 3465518 - DNA, 25 bp, Homo sapien
tctctggagcgcattaatgggaccc

SEQ ID NO: 3465519 - DNA, 25 bp, Homo sapien
aaggcaaaccttccttgatctctgg

SEQ ID NO: 3465520 - DNA, 25 bp, Homo sapien
aactcagttgagttttctagaatca

SEQ ID NO: 3465521 - DNA, 25 bp, Homo sapien
aatctctcttctgttcaagttggca

SEQ ID NO: 3465522 - DNA, 25 bp, Homo sapien
tggtgacaatgctgcagctgcagat

SEQ ID NO: 3465523 - DNA, 25 bp, Homo sapien
gggcaggcagtggtgacaatgctgc

SEQ ID NO: 3465524 - DNA, 25 bp, Homo sapien
ggaggaaatgggcaggcagtggtga

SEQ ID NO: 3465525 - DNA, 25 bp, Homo sapien
aggcagtggtgacaatgctgcagct

SEQ ID NO: 3465526 - DNA, 25 bp, Homo sapien
taacatctggactaagcctgtggac

SEQ ID NO: 3465527 - DNA, 25 bp, Homo sapien
agctaaatagcctgcgaagcatggg

SEQ ID NO: 3465528 - DNA, 25 bp, Homo sapien
tatgagtggccctacagagaatgac

SEQ ID NO: 3465529 - DNA, 25 bp, Homo sapien
caccatggaaaattagcctttgacc

SEQ ID NO: 3465530 - DNA, 25 bp, Homo sapien
ggtctccaatgcttcttctaagatc

SEQ ID NO: 3465531 - DNA, 25 bp, Homo sapien
tgttcatttggtctccaatgcttct

SEQ ID NO: 3465532 - DNA, 25 bp, Homo sapien
taagatccatcacttgcatgcagtc

SEQ ID NO: 3465533 - DNA, 25 bp, Homo sapien
tgcttcttctaagatccatcacttg

SEQ ID NO: 3465534 - DNA, 25 bp, Homo sapien
aaaactttaagaataatgtaatcat

SEQ ID NO: 3465535 - DNA, 25 bp, Homo sapien
ccacattggtagagtactgaggagc

SEQ ID NO: 3465536 - DNA, 25 bp, Homo sapien
ctggacaaggcatttactgtggggt

SEQ ID NO: 3465537 - DNA, 25 bp, Homo sapien
acttggcccacattggtagagtact

SEQ ID NO: 3465538 - DNA, 25 bp, Homo sapien
gagtactgaggagcttttagctgga

SEQ ID NO: 3465539 - DNA, 25 bp, Homo sapien
gaattggcaggtcccagtgataatg

SEQ ID NO: 3465540 - DNA, 25 bp, Homo sapien
tggttggtgccatcagaagacaaga

SEQ ID NO: 3465541 - DNA, 25 bp, Homo sapien
tcccagtgataatgtggttgaagaa

SEQ ID NO: 3465542 - DNA, 25 bp, Homo sapien
acagcagcattggtagtttcttggt

SEQ ID NO: 3465543 - DNA, 25 bp, Homo sapien
tgtaagctattgcatcccttaaagt

SEQ ID NO: 3465544 - DNA, 25 bp, Homo sapien
gcatcccttaaagttaacagcctgg

SEQ ID NO: 3465545 - DNA, 25 bp, Homo sapien
gaccattttgtaagctattgcatcc

SEQ ID NO: 3465546 - DNA, 25 bp, Homo sapien
gactagtggtccgaagaccattttg

SEQ ID NO: 3465547 - DNA, 25 bp, Homo sapien
atttatttgaaagtttgctgtccag

SEQ ID NO: 3465548 - DNA, 25 bp, Homo sapien
ttatttgaaagtttgctgtccaggg

SEQ ID NO: 3465549 - DNA, 25 bp, Homo sapien
ctcctggcaatttatttgaaagttt

SEQ ID NO: 3465550 - DNA, 25 bp, Homo sapien
gcaatttatttgaaagtttgctgtc

SEQ ID NO: 3465551 - DNA, 25 bp, Homo sapien
caagggaacttcctctgtgattatc

SEQ ID NO: 3465552 - DNA, 25 bp, Homo sapien
gccaagggaacttcctctgtgatta

SEQ ID NO: 3465553 - DNA, 25 bp, Homo sapien
attgccaagggaacttcctctgtga

SEQ ID NO: 3465554 - DNA, 25 bp, Homo sapien
caacattgccaagggaacttcctct

SEQ ID NO: 3465555 - DNA, 25 bp, Homo sapien
tagtaagaggcatccgttcctggcc

SEQ ID NO: 3465556 - DNA, 25 bp, Homo sapien
catacatatttcaacaatccacgga

SEQ ID NO: 3465557 - DNA, 25 bp, Homo sapien
tggcctttgagaggaagggcacagc

SEQ ID NO: 3465558 - DNA, 25 bp, Homo sapien
tctgagcttctggtgccgatacaaa

SEQ ID NO: 3465559 - DNA, 25 bp, Homo sapien
tatttccaaatgagataatcttcga

SEQ ID NO: 3465560 - DNA, 25 bp, Homo sapien
gagattaccaactggcccaagacat

SEQ ID NO: 3465561 - DNA, 25 bp, Homo sapien
caagacatcatggtgaaaatattca

SEQ ID NO: 3465562 - DNA, 25 bp, Homo sapien
gaaaatattcagacagttggcaaac

SEQ ID NO: 3465563 - DNA, 25 bp, Homo sapien
tttgcctgtggaaaccaaaatgcac

SEQ ID NO: 3465564 - DNA, 25 bp, Homo sapien
caaataataattaagaccctggaat

SEQ ID NO: 3465565 - DNA, 25 bp, Homo sapien
taataattaagaccctggaatccca

SEQ ID NO: 3465566 - DNA, 25 bp, Homo sapien
aatgcacaaataataattaagaccc

SEQ ID NO: 3465567 - DNA, 25 bp, Homo sapien
aattctcttagcacccacatttgca

SEQ ID NO: 3465568 - DNA, 25 bp, Homo sapien
cattgtgatgtcaaatatgtttggc

SEQ ID NO: 3465569 - DNA, 25 bp, Homo sapien
ttagcggatagcttttccaagggca

SEQ ID NO: 3465570 - DNA, 25 bp, Homo sapien
tgtacatatatatccgggtttagcg

SEQ ID NO: 3465571 - DNA, 25 bp, Homo sapien
caaatggctgtatccagcactgcat

SEQ ID NO: 3465572 - DNA, 25 bp, Homo sapien
caagggttgcagcacttaaaatgga

SEQ ID NO: 3465573 - DNA, 25 bp, Homo sapien
caaaagcgacccaagtggagagaga

SEQ ID NO: 3465574 - DNA, 25 bp, Homo sapien
gctaatcatgggcttggcatctgat

SEQ ID NO: 3465575 - DNA, 25 bp, Homo sapien
tcaaagagccagctgcaactcagcc

SEQ ID NO: 3465576 - DNA, 25 bp, Homo sapien
cactcacagagatgcagcaagttac

SEQ ID NO: 3465577 - DNA, 25 bp, Homo sapien
cactgagctggccaaataaaacaca

SEQ ID NO: 3465578 - DNA, 25 bp, Homo sapien
ttacctaaatgggagaagtgagctg

SEQ ID NO: 3465579 - DNA, 25 bp, Homo sapien
gacacatcatgggagaaatcagaaa

SEQ ID NO: 3465580 - DNA, 25 bp, Homo sapien
cagcaataggacattgtccagtccg

SEQ ID NO: 3465581 - DNA, 25 bp, Homo sapien
tccagtccgatcacactggcagttt

SEQ ID NO: 3465582 - DNA, 25 bp, Homo sapien
gcagaaatcagtccggagtgctcct

SEQ ID NO: 3465583 - DNA, 25 bp, Homo sapien
gttggttttgatacccacactacca

SEQ ID NO: 3465584 - DNA, 25 bp, Homo sapien
tatcctcattctttggattgcacag

SEQ ID NO: 3465585 - DNA, 25 bp, Homo sapien
ttgggcagttatcctcattctttgg

SEQ ID NO: 3465586 - DNA, 25 bp, Homo sapien
tgcacagcacagacaaagggttggt

SEQ ID NO: 3465587 - DNA, 25 bp, Homo sapien
aaagtcaggcttggcatcccttgag

SEQ ID NO: 3465588 - DNA, 25 bp, Homo sapien
gacatcaggaatggggtgcttccct

SEQ ID NO: 3465589 - DNA, 25 bp, Homo sapien
ggctgtcaatgctgttcaaagtcag

SEQ ID NO: 3465590 - DNA, 25 bp, Homo sapien
cctgtggcagggattggctgtcaat

SEQ ID NO: 3465591 - DNA, 25 bp, Homo sapien
ccttctctgaactatgacgcttcat

SEQ ID NO: 3465592 - DNA, 25 bp, Homo sapien
cccttctctgaactatgacgcttca

SEQ ID NO: 3465593 - DNA, 25 bp, Homo sapien
atctgcatgactgggcagtctctcc

SEQ ID NO: 3465594 - DNA, 25 bp, Homo sapien
cccttgaatctgcatgactgggcag

SEQ ID NO: 3465595 - DNA, 25 bp, Homo sapien
cttgaatctgcatgactgggcagtc

SEQ ID NO: 3465596 - DNA, 25 bp, Homo sapien
cacccttgaatctgcatgactgggc

SEQ ID NO: 3465597 - DNA, 25 bp, Homo sapien
tgctcagaaacagcaacggtgaggt

SEQ ID NO: 3465598 - DNA, 25 bp, Homo sapien
tctgcaatagcgtgctcagaaacag

SEQ ID NO: 3465599 - DNA, 25 bp, Homo sapien
cagcaacggtgaggtcagaggaatc

SEQ ID NO: 3465600 - DNA, 25 bp, Homo sapien
caaagtagtcatctgcaatagcgtg

SEQ ID NO: 3465601 - DNA, 25 bp, Homo sapien
accactaggttagaacagtaagcct

SEQ ID NO: 3465602 - DNA, 25 bp, Homo sapien
taggttagaacagtaagcctaataa

SEQ ID NO: 3465603 - DNA, 25 bp, Homo sapien
taccactaggttagaacagtaagcc

SEQ ID NO: 3465604 - DNA, 25 bp, Homo sapien
cactaggttagaacagtaagcctaa

SEQ ID NO: 3465605 - DNA, 25 bp, Homo sapien
ttcacgccatttgcagcggggagga

SEQ ID NO: 3465606 - DNA, 25 bp, Homo sapien
tgggcttcaatctgtgaggcgggaa

SEQ ID NO: 3465607 - DNA, 25 bp, Homo sapien
tggggcctccagaagttcacgccat

SEQ ID NO: 3465608 - DNA, 25 bp, Homo sapien
ctgttcctgtgtggcgacctgggct

SEQ ID NO: 3465609 - DNA, 25 bp, Homo sapien
ctgaccacaggtaatgagatagaag

SEQ ID NO: 3465610 - DNA, 25 bp, Homo sapien
gaccacaggtaatgagatagaagaa

SEQ ID NO: 3465611 - DNA, 25 bp, Homo sapien
tgaccacaggtaatgagatagaaga

SEQ ID NO: 3465612 - DNA, 25 bp, Homo sapien
acagtgaagaaggtagcctgggtca

SEQ ID NO: 3465613 - DNA, 25 bp, Homo sapien
catgaacaagcaagtgggtgaagac

SEQ ID NO: 3465614 - DNA, 25 bp, Homo sapien
ggctgagtcacgcatctgaagaagc

SEQ ID NO: 3465615 - DNA, 25 bp, Homo sapien
ttaccaaggacctgccaagatgggc

SEQ ID NO: 3465616 - DNA, 25 bp, Homo sapien
gaagaagtggagactttccagcgaa

SEQ ID NO: 3465617 - DNA, 25 bp, Homo sapien
ttggatgggacaaaccaacagccgc

SEQ ID NO: 3465618 - DNA, 25 bp, Homo sapien
tcacattaggaccaaggaagtctag

SEQ ID NO: 3465619 - DNA, 25 bp, Homo sapien
gaagccttagtcatatccatcacat

SEQ ID NO: 3465620 - DNA, 25 bp, Homo sapien
gagacagctgtttgtggtctctgtt

SEQ ID NO: 3465621 - DNA, 25 bp, Homo sapien
agagacagctgtttgtggtctctgt

SEQ ID NO: 3465622 - DNA, 25 bp, Homo sapien
attgtgtatggtaaaatcaaccagg

SEQ ID NO: 3465623 - DNA, 25 bp, Homo sapien
ttgtgtatggtaaaatcaaccagga

SEQ ID NO: 3465624 - DNA, 25 bp, Homo sapien
gaaaagtaggctccgtctttgattg

SEQ ID NO: 3465625 - DNA, 25 bp, Homo sapien
gatagaaaagtaggctccgtctttg

SEQ ID NO: 3465626 - DNA, 25 bp, Homo sapien
aagtaggctccgtctttgattgcca

SEQ ID NO: 3465627 - DNA, 25 bp, Homo sapien
ggctccgtctttgattgccacaaaa

SEQ ID NO: 3465628 - DNA, 25 bp, Homo sapien
taatggctcgttttatcagctctat

SEQ ID NO: 3465629 - DNA, 25 bp, Homo sapien
ttaatggctcgttttatcagctcta

SEQ ID NO: 3465630 - DNA, 25 bp, Homo sapien
taacccaagtgagctggggtctccc

SEQ ID NO: 3465631 - DNA, 25 bp, Homo sapien
cctgtggaagtctggatcagcgaga

SEQ ID NO: 3465632 - DNA, 25 bp, Homo sapien
atgcccctgtggaagtctggatcag

SEQ ID NO: 3465633 - DNA, 25 bp, Homo sapien
cccctgtggaagtctggatcagcga

SEQ ID NO: 3465634 - DNA, 25 bp, Homo sapien
tggatctgggttttgacatagggtc

SEQ ID NO: 3465635 - DNA, 25 bp, Homo sapien
ttggatctgggttttgacatagggt

SEQ ID NO: 3465636 - DNA, 25 bp, Homo sapien
tagtgcctcggtcggcaccttcaca

SEQ ID NO: 3465637 - DNA, 25 bp, Homo sapien
acattgcctctccttagtgcctcgg

SEQ ID NO: 3465638 - DNA, 25 bp, Homo sapien
accttcacaaagaggctccctcatg

SEQ ID NO: 3465639 - DNA, 25 bp, Homo sapien
gggagaggtttattccacattgcct

SEQ ID NO: 3465640 - DNA, 25 bp, Homo sapien
acatcattatttgtgagcctgtttc

SEQ ID NO: 3465641 - DNA, 25 bp, Homo sapien
atctctttcatctgattggtcttta

SEQ ID NO: 3465642 - DNA, 25 bp, Homo sapien
tactacattgggtttcacatcatta

SEQ ID NO: 3465643 - DNA, 25 bp, Homo sapien
ctttaatgccacttactacattggg

SEQ ID NO: 3465644 - DNA, 25 bp, Homo sapien
aattcacctgcacagcatctctctg

SEQ ID NO: 3465645 - DNA, 25 bp, Homo sapien
tccttactgaattcacctgcacagc

SEQ ID NO: 3465646 - DNA, 25 bp, Homo sapien
atctggacttcggcatcatcacgca

SEQ ID NO: 3465647 - DNA, 25 bp, Homo sapien
agccaaccagtgcagcgtccttact

SEQ ID NO: 3465648 - DNA, 25 bp, Homo sapien
cagcagggcacagcgtgcttgattt

SEQ ID NO: 3465649 - DNA, 25 bp, Homo sapien
ctagaaaccattaggaatatgcagc

SEQ ID NO: 3465650 - DNA, 25 bp, Homo sapien
tagaaaccattaggaatatgcagca

SEQ ID NO: 3465651 - DNA, 25 bp, Homo sapien
agggcacagcgtgcttgatttctgg

SEQ ID NO: 3465652 - DNA, 25 bp, Homo sapien
cttgctaagacttctgttagaaatc

SEQ ID NO: 3465653 - DNA, 25 bp, Homo sapien
tgtctagagatgctgggctgcttgt

SEQ ID NO: 3465654 - DNA, 25 bp, Homo sapien
taagacttctgttagaaatccaaga

SEQ ID NO: 3465655 - DNA, 25 bp, Homo sapien
catgtctagagatgctgggctgctt

SEQ ID NO: 3465656 - DNA, 25 bp, Homo sapien
gtggtctcatggctaccttggccga

SEQ ID NO: 3465657 - DNA, 25 bp, Homo sapien
tggtctcatggctaccttggccgac

SEQ ID NO: 3465658 - DNA, 25 bp, Homo sapien
tctcatggctaccttggccgacctt

SEQ ID NO: 3465659 - DNA, 25 bp, Homo sapien
catggctaccttggccgaccttcat

SEQ ID NO: 3465660 - DNA, 25 bp, Homo sapien
taaattctcaagactgggaccttgt

SEQ ID NO: 3465661 - DNA, 25 bp, Homo sapien
aagacaattatgcaagtctgtgggc

SEQ ID NO: 3465662 - DNA, 25 bp, Homo sapien
aagttgaggcaacatctaaattctc

SEQ ID NO: 3465663 - DNA, 25 bp, Homo sapien
aatgtgaagcatatctcttcctgtg

SEQ ID NO: 3465664 - DNA, 25 bp, Homo sapien
aggctgctagacagcccctctacag

SEQ ID NO: 3465665 - DNA, 25 bp, Homo sapien
tgttgcactgcagctcctaagttga

SEQ ID NO: 3465666 - DNA, 25 bp, Homo sapien
gaagaccatcaattgtgccactctg

SEQ ID NO: 3465667 - DNA, 25 bp, Homo sapien
gctcctaagttgacagagacctggc

SEQ ID NO: 3465668 - DNA, 25 bp, Homo sapien
aggtatgtccgtggctatgctgcaa

SEQ ID NO: 3465669 - DNA, 25 bp, Homo sapien
tgcgtctttcatggcaaaccttgga

SEQ ID NO: 3465670 - DNA, 25 bp, Homo sapien
tgccctgtgaagttgccagcacgtg

SEQ ID NO: 3465671 - DNA, 25 bp, Homo sapien
aatagaactggctgtccgtgcgtct

SEQ ID NO: 3465672 - DNA, 25 bp, Homo sapien
tgagatgtccgaaccatagtactgg

SEQ ID NO: 3465673 - DNA, 25 bp, Homo sapien
taagcataggtcaccacctgaaact

SEQ ID NO: 3465674 - DNA, 25 bp, Homo sapien
gaaactctctctttgtgacctgcca

SEQ ID NO: 3465675 - DNA, 25 bp, Homo sapien
tcgatcatgaatatctgagatgtcc

SEQ ID NO: 3465676 - DNA, 25 bp, Homo sapien
tacataagtttagggagctcttcaa

SEQ ID NO: 3465677 - DNA, 25 bp, Homo sapien
ctcttcaatggcctgagcttttgca

SEQ ID NO: 3465678 - DNA, 25 bp, Homo sapien
ctacataagtttagggagctcttca

SEQ ID NO: 3465679 - DNA, 25 bp, Homo sapien
caatggcctgagcttttgcaataag

SEQ ID NO: 3465680 - DNA, 25 bp, Homo sapien
tgtctggatctttctacgtgtggtc

SEQ ID NO: 3465681 - DNA, 25 bp, Homo sapien
ctttctacgtgtggtcagttttgtg

SEQ ID NO: 3465682 - DNA, 25 bp, Homo sapien
ggatctttctacgtgtggtcagttt

SEQ ID NO: 3465683 - DNA, 25 bp, Homo sapien
gctgtcttgccaataccatggcatc

SEQ ID NO: 3465684 - DNA, 25 bp, Homo sapien
ccgcatgcttctttgaggggtgcac

SEQ ID NO: 3465685 - DNA, 25 bp, Homo sapien
caagtttctgggtctgctccgttga

SEQ ID NO: 3465686 - DNA, 25 bp, Homo sapien
agtgacctctggtgaaggatgagca

SEQ ID NO: 3465687 - DNA, 25 bp, Homo sapien
agaagtgaagatggcttgaggacag

SEQ ID NO: 3465688 - DNA, 25 bp, Homo sapien
gtaaggggtcctggtctgctagaaa

SEQ ID NO: 3465689 - DNA, 25 bp, Homo sapien
gggtcctggtctgctagaaagctca

SEQ ID NO: 3465690 - DNA, 25 bp, Homo sapien
aatggtgttcactccttggtaaggg

SEQ ID NO: 3465691 - DNA, 25 bp, Homo sapien
tgtgaatggtgttcactccttggta

SEQ ID NO: 3465692 - DNA, 25 bp, Homo sapien
gtaggaagacagcacgggcaaagtc

SEQ ID NO: 3465693 - DNA, 25 bp, Homo sapien
aggtaggaagacagcacgggcaaag

SEQ ID NO: 3465694 - DNA, 25 bp, Homo sapien
tgtggtgatggcaaaataggtagga

SEQ ID NO: 3465695 - DNA, 25 bp, Homo sapien
ggtgatggcaaaataggtaggaaga

SEQ ID NO: 3465696 - DNA, 25 bp, Homo sapien
gagaaacccagaacgcatcacttcc

SEQ ID NO: 3465697 - DNA, 25 bp, Homo sapien
cagagaaacccagaacgcatcactt

SEQ ID NO: 3465698 - DNA, 25 bp, Homo sapien
aacccagaacgcatcacttccttgt

SEQ ID NO: 3465699 - DNA, 25 bp, Homo sapien
aaacccagaacgcatcacttccttg

SEQ ID NO: 3465700 - DNA, 25 bp, Homo sapien
cccggatcgtttttctgccaggaga

SEQ ID NO: 3465701 - DNA, 25 bp, Homo sapien
tgatacactcgtttgctgtagtctc

SEQ ID NO: 3465702 - DNA, 25 bp, Homo sapien
tgagttacttgtctgcccggatcgt

SEQ ID NO: 3465703 - DNA, 25 bp, Homo sapien
tgccaggagatctttgactgtatgc

SEQ ID NO: 3465704 - DNA, 25 bp, Homo sapien
ccaacagtttcaattccaagctgat

SEQ ID NO: 3465705 - DNA, 25 bp, Homo sapien
atctccccaacagtttcaattccaa

SEQ ID NO: 3465706 - DNA, 25 bp, Homo sapien
cccaacagtttcaattccaagctga

SEQ ID NO: 3465707 - DNA, 25 bp, Homo sapien
tccccaacagtttcaattccaagct

SEQ ID NO: 3465708 - DNA, 25 bp, Homo sapien
tcatgtttactgatggtcacactca

SEQ ID NO: 3465709 - DNA, 25 bp, Homo sapien
acactcaactcttttggcacttgga

SEQ ID NO: 3465710 - DNA, 25 bp, Homo sapien
gatgtctgagtatcgtaggaaagga

SEQ ID NO: 3465711 - DNA, 25 bp, Homo sapien
atcatctcttgaacagtctacaggc

SEQ ID NO: 3465712 - DNA, 25 bp, Homo sapien
gggtccagtgtcttctaagatgtct

SEQ ID NO: 3465713 - DNA, 25 bp, Homo sapien
tggcatcatctcttgaacagtctac

SEQ ID NO: 3465714 - DNA, 25 bp, Homo sapien
ggtggagaatgaccaagagggactc

SEQ ID NO: 3465715 - DNA, 25 bp, Homo sapien
ggagaatgaccaagagggactctat

SEQ ID NO: 3465716 - DNA, 25 bp, Homo sapien
agtgttctccatatattccccccac

SEQ ID NO: 3465717 - DNA, 25 bp, Homo sapien
tgaccaagagggactctattcagtg

SEQ ID NO: 3465718 - DNA, 25 bp, Homo sapien
gaaatgggtcatgtgagtaggcccc

SEQ ID NO: 3465719 - DNA, 25 bp, Homo sapien
gacggcacactctgactccggttca

SEQ ID NO: 3465720 - DNA, 25 bp, Homo sapien
taacttgccgatattcagaaaagaa

SEQ ID NO: 3465721 - DNA, 25 bp, Homo sapien
gaagcgatttcctctcagacagaga

SEQ ID NO: 3465722 - DNA, 25 bp, Homo sapien
aaagagcagtagtatggtattagat

SEQ ID NO: 3465723 - DNA, 25 bp, Homo sapien
agagcagtagtatggtattagattt

SEQ ID NO: 3465724 - DNA, 25 bp, Homo sapien
atgccaaagagcagtagtatggtat

SEQ ID NO: 3465725 - DNA, 25 bp, Homo sapien
tgccaaagagcagtagtatggtatt

SEQ ID NO: 3465726 - DNA, 25 bp, Homo sapien
agatggacttgccacggctgttccg

SEQ ID NO: 3465727 - DNA, 25 bp, Homo sapien
tacatccctgccagatggacttgcc

SEQ ID NO: 3465728 - DNA, 25 bp, Homo sapien
gctgttccgctgcaaaaactgatta

SEQ ID NO: 3465729 - DNA, 25 bp, Homo sapien
aatctgcagaactacatccctgcca

SEQ ID NO: 3465730 - DNA, 25 bp, Homo sapien
caaccttactgctgatacctgtatg

SEQ ID NO: 3465731 - DNA, 25 bp, Homo sapien
tcaacaagggctgatactctcccat

SEQ ID NO: 3465732 - DNA, 25 bp, Homo sapien
atacctgtatgagaggcggctggca

SEQ ID NO: 3465733 - DNA, 25 bp, Homo sapien
tcccataggtgctgaggactgctgg

SEQ ID NO: 3465734 - DNA, 25 bp, Homo sapien
atgtgaggaactgcatgtcacatac

SEQ ID NO: 3465735 - DNA, 25 bp, Homo sapien
caaaatgtgaggaactgcatgtcac

SEQ ID NO: 3465736 - DNA, 25 bp, Homo sapien
aaatgtgaggaactgcatgtcacat

SEQ ID NO: 3465737 - DNA, 25 bp, Homo sapien
tcaaaatgtgaggaactgcatgtca

SEQ ID NO: 3465738 - DNA, 25 bp, Homo sapien
gcttcccttaaactgctctggccaa

SEQ ID NO: 3465739 - DNA, 25 bp, Homo sapien
ggatcaaggcccctgtgagacacag

SEQ ID NO: 3465740 - DNA, 25 bp, Homo sapien
gcatcagcaccctatttgccctcag

SEQ ID NO: 3465741 - DNA, 25 bp, Homo sapien
cacatgcccaatccgatgagcatca

SEQ ID NO: 3465742 - DNA, 25 bp, Homo sapien
gaactctcgggcatgtaatggtcag

SEQ ID NO: 3465743 - DNA, 25 bp, Homo sapien
taacacttttaagtggcagaaggga

SEQ ID NO: 3465744 - DNA, 25 bp, Homo sapien
gcagaagggaactctcgggcatgta

SEQ ID NO: 3465745 - DNA, 25 bp, Homo sapien
aatggtcagaagtaggtcccttaat

SEQ ID NO: 3465746 - DNA, 25 bp, Homo sapien
tcaaatctgtggtatatttctccaa

SEQ ID NO: 3465747 - DNA, 25 bp, Homo sapien
caaatctgtggtatatttctccaaa

SEQ ID NO: 3465748 - DNA, 25 bp, Homo sapien
aaatctgtggtatatttctccaaac

SEQ ID NO: 3465749 - DNA, 25 bp, Homo sapien
ttatgcatttgttggttccttcaaa

SEQ ID NO: 3465750 - DNA, 25 bp, Homo sapien
aatggagactgagaggaactgacgc

SEQ ID NO: 3465751 - DNA, 25 bp, Homo sapien
cccagggcggtcaaggcctcggttg

SEQ ID NO: 3465752 - DNA, 25 bp, Homo sapien
gaaaaacacatgggcagaaaattcc

SEQ ID NO: 3465753 - DNA, 25 bp, Homo sapien
cggtcaaggcctcggttgcagctga

SEQ ID NO: 3465754 - DNA, 25 bp, Homo sapien
gcctcggttgcagctgagtctctgc

SEQ ID NO: 3465755 - DNA, 25 bp, Homo sapien
tactgttgtggaagtctgagtcaga

SEQ ID NO: 3465756 - DNA, 25 bp, Homo sapien
acggcttccccacgctggaggtgta

SEQ ID NO: 3465757 - DNA, 25 bp, Homo sapien
ggaggtgtagacgtcatttgaaaac

SEQ ID NO: 3465758 - DNA, 25 bp, Homo sapien
gaaagatcttctgacaccgtagtaa

SEQ ID NO: 3465759 - DNA, 25 bp, Homo sapien
ggctccaggagagccgcatggctct

SEQ ID NO: 3465760 - DNA, 25 bp, Homo sapien
ccggtagtctccgtagggctcctgg

SEQ ID NO: 3465761 - DNA, 25 bp, Homo sapien
aaataggaagtgagctgggtctccg

SEQ ID NO: 3465762 - DNA, 25 bp, Homo sapien
aacagagagcccgcgttgggcgtca

SEQ ID NO: 3465763 - DNA, 25 bp, Homo sapien
catgcagcgagtatgactgagcccc

SEQ ID NO: 3465764 - DNA, 25 bp, Homo sapien
tggctgagaccgtcaggcaacgtct

SEQ ID NO: 3465765 - DNA, 25 bp, Homo sapien
taccccggagtgtggtgcagatctt

SEQ ID NO: 3465766 - DNA, 25 bp, Homo sapien
taagctctgcggcattcatatgacc

SEQ ID NO: 3465767 - DNA, 25 bp, Homo sapien
ttacagtggagaggattacaaataa

SEQ ID NO: 3465768 - DNA, 25 bp, Homo sapien
tggaatacacctcaagttaaagaaa

SEQ ID NO: 3465769 - DNA, 25 bp, Homo sapien
taaatgccctcgtccactaacaaag

SEQ ID NO: 3465770 - DNA, 25 bp, Homo sapien
cctgaatgggctgacacacctaaaa

SEQ ID NO: 3465771 - DNA, 25 bp, Homo sapien
tcagaacgtaatgggttacaacagt

SEQ ID NO: 3465772 - DNA, 25 bp, Homo sapien
tcttactagaatacggtctctgaca

SEQ ID NO: 3465773 - DNA, 25 bp, Homo sapien
gaaaaatcagtgccaaaaatgatac

SEQ ID NO: 3465774 - DNA, 25 bp, Homo sapien
aacagaagattcagaacgtaatggg

SEQ ID NO: 3465775 - DNA, 25 bp, Homo sapien
caaggtctggttgttgagctctctt

SEQ ID NO: 3465776 - DNA, 25 bp, Homo sapien
aggtctggttgttgagctctctttg

SEQ ID NO: 3465777 - DNA, 25 bp, Homo sapien
tccaaggtctggttgttgagctctc

SEQ ID NO: 3465778 - DNA, 25 bp, Homo sapien
gttccaaggtctggttgttgagctc

SEQ ID NO: 3465779 - DNA, 25 bp, Homo sapien
tgccacacctggtcagaggatactt

SEQ ID NO: 3465780 - DNA, 25 bp, Homo sapien
gatactaaacatggtgagaatcctc

SEQ ID NO: 3465781 - DNA, 25 bp, Homo sapien
tactggtttcagagagctgtcaccc

SEQ ID NO: 3465782 - DNA, 25 bp, Homo sapien
gctgtcacccatagaaccaagggct

SEQ ID NO: 3465783 - DNA, 25 bp, Homo sapien
gctccactgcttggctgagatcctg

SEQ ID NO: 3465784 - DNA, 25 bp, Homo sapien
tgggcaccaactatgcactaggcat

SEQ ID NO: 3465785 - DNA, 25 bp, Homo sapien
tctgtgtagaggaaacgagagctca

SEQ ID NO: 3465786 - DNA, 25 bp, Homo sapien
tgaggcagcctgttccactattgga

SEQ ID NO: 3465787 - DNA, 25 bp, Homo sapien
tgctggctagcgatttcagaaaact

SEQ ID NO: 3465788 - DNA, 25 bp, Homo sapien
tgacgatcagctaccctgtggagaa

SEQ ID NO: 3465789 - DNA, 25 bp, Homo sapien
tagatttttctaggcctgagccctg

SEQ ID NO: 3465790 - DNA, 25 bp, Homo sapien
tctgggatggccatctcagtgctgt

SEQ ID NO: 3465791 - DNA, 25 bp, Homo sapien
gcctcttccatgtgatttggaaggt

SEQ ID NO: 3465792 - DNA, 25 bp, Homo sapien
cttccatgtgatttggaaggtgagg

SEQ ID NO: 3465793 - DNA, 25 bp, Homo sapien
agagtgccaggccaagtcctctcat

SEQ ID NO: 3465794 - DNA, 25 bp, Homo sapien
ggaatggtccacagagggagagagt

SEQ ID NO: 3465795 - DNA, 25 bp, Homo sapien
ggagctgggtcggtggctggatgct

SEQ ID NO: 3465796 - DNA, 25 bp, Homo sapien
caggacacaacagtggatacgtggg

SEQ ID NO: 3465797 - DNA, 25 bp, Homo sapien
gcagggtccgcaccgcgtgtctcag

SEQ ID NO: 3465798 - DNA, 25 bp, Homo sapien
agcgtggctcgcgtcctctccggat

SEQ ID NO: 3465799 - DNA, 25 bp, Homo sapien
cccgtagcagcttctgggcgcgcag

SEQ ID NO: 3465800 - DNA, 25 bp, Homo sapien
ccccgatcggctccggactccgcgg

SEQ ID NO: 3465801 - DNA, 25 bp, Homo sapien
gatcggctccggactccgcgggcag

SEQ ID NO: 3465802 - DNA, 25 bp, Homo sapien
gctcagtgcagtcggtgcgctctgc

SEQ ID NO: 3465803 - DNA, 25 bp, Homo sapien
tcggggtccgcgcagggaccgccac

SEQ ID NO: 3465804 - DNA, 25 bp, Homo sapien
aagccagcccgggagcaagcggtga

SEQ ID NO: 3465805 - DNA, 25 bp, Homo sapien
ccagactgacctagtaaaggggcca

SEQ ID NO: 3465806 - DNA, 25 bp, Homo sapien
tcctgggccggcgaggtacctgcca

SEQ ID NO: 3465807 - DNA, 25 bp, Homo sapien
caagcggtgaggtttggccagcccc

SEQ ID NO: 3465808 - DNA, 25 bp, Homo sapien
aggctccgacctctgcgtgcccttg

SEQ ID NO: 3465809 - DNA, 25 bp, Homo sapien
gcaggctccgacctctgcgtgccct

SEQ ID NO: 3465810 - DNA, 25 bp, Homo sapien
ggctccgacctctgcgtgcccttgg

SEQ ID NO: 3465811 - DNA, 25 bp, Homo sapien
gctccgacctctgcgtgcccttggt

SEQ ID NO: 3465812 - DNA, 25 bp, Homo sapien
ccactagcatggaagtcccgagtcc

SEQ ID NO: 3465813 - DNA, 25 bp, Homo sapien
ctagcatggaagtcccgagtccctt

SEQ ID NO: 3465814 - DNA, 25 bp, Homo sapien
tgttcccactagcatggaagtcccg

SEQ ID NO: 3465815 - DNA, 25 bp, Homo sapien
gtgatgttcccactagcatggaagt

SEQ ID NO: 3465816 - DNA, 25 bp, Homo sapien
ctatggcacccaaagccaagtttct

SEQ ID NO: 3465817 - DNA, 25 bp, Homo sapien
taggctatggcacccaaagccaagt

SEQ ID NO: 3465818 - DNA, 25 bp, Homo sapien
gggccccttttataggctatggcac

SEQ ID NO: 3465819 - DNA, 25 bp, Homo sapien
ttttataggctatggcacccaaagc

SEQ ID NO: 3465820 - DNA, 25 bp, Homo sapien
ctgagtcagtggtcgagtccaaggt

SEQ ID NO: 3465821 - DNA, 25 bp, Homo sapien
aactgagtcagtggtcgagtccaag

SEQ ID NO: 3465822 - DNA, 25 bp, Homo sapien
gcaactgagtcagtggtcgagtcca

SEQ ID NO: 3465823 - DNA, 25 bp, Homo sapien
aggcaactgagtcagtggtcgagtc

SEQ ID NO: 3465824 - DNA, 25 bp, Homo sapien
tcggacaccttgatacaccttcggt

SEQ ID NO: 3465825 - DNA, 25 bp, Homo sapien
gctccttcactgtgatcttcactcg

SEQ ID NO: 3465826 - DNA, 25 bp, Homo sapien
aggccgcctggtgtgcccgtctttg

SEQ ID NO: 3465827 - DNA, 25 bp, Homo sapien
ggtgtgcccgtctttgctgcagcag

SEQ ID NO: 3465828 - DNA, 25 bp, Homo sapien
tggggaatgagggaagggcttatgc

SEQ ID NO: 3465829 - DNA, 25 bp, Homo sapien
gaatgagggaagggcttatgcttac

SEQ ID NO: 3465830 - DNA, 25 bp, Homo sapien
ctggggaatgagggaagggcttatg

SEQ ID NO: 3465831 - DNA, 25 bp, Homo sapien
gggaatgagggaagggcttatgctt

SEQ ID NO: 3465832 - DNA, 25 bp, Homo sapien
cctctgtagcttcccgattgggatg

SEQ ID NO: 3465833 - DNA, 25 bp, Homo sapien
agctgggtacagaagtcataggaac

SEQ ID NO: 3465834 - DNA, 25 bp, Homo sapien
ggatgcagctgggtacagaagtcat

SEQ ID NO: 3465835 - DNA, 25 bp, Homo sapien
tgtagcttcccgattgggatgcagc

SEQ ID NO: 3465836 - DNA, 25 bp, Homo sapien
tgcagaggaccaacgcactttttat

SEQ ID NO: 3465837 - DNA, 25 bp, Homo sapien
agaggaccaacgcactttttatact

SEQ ID NO: 3465838 - DNA, 25 bp, Homo sapien
ctgcagaggaccaacgcacttttta

SEQ ID NO: 3465839 - DNA, 25 bp, Homo sapien
gcagaggaccaacgcactttttata

SEQ ID NO: 3465840 - DNA, 25 bp, Homo sapien
gaagggaggatgttccacacagatg

SEQ ID NO: 3465841 - DNA, 25 bp, Homo sapien
taacagaggcaatatgagccccagc

SEQ ID NO: 3465842 - DNA, 25 bp, Homo sapien
gaagtcccgctgtcaaaggcctatt

SEQ ID NO: 3465843 - DNA, 25 bp, Homo sapien
gattttctatgggtctgcaagggct

SEQ ID NO: 3465844 - DNA, 25 bp, Homo sapien
acattaccaaatagctggctttcaa

SEQ ID NO: 3465845 - DNA, 25 bp, Homo sapien
attaccaaatagctggctttcaatc

SEQ ID NO: 3465846 - DNA, 25 bp, Homo sapien
aacattaccaaatagctggctttca

SEQ ID NO: 3465847 - DNA, 25 bp, Homo sapien
caaacattaccaaatagctggcttt

SEQ ID NO: 3465848 - DNA, 25 bp, Homo sapien
agctgcatgtgctgtatatgccaaa

SEQ ID NO: 3465849 - DNA, 25 bp, Homo sapien
tatgccaaattgcagctggctcgca

SEQ ID NO: 3465850 - DNA, 25 bp, Homo sapien
cagctggctcgcatctgaactctaa

SEQ ID NO: 3465851 - DNA, 25 bp, Homo sapien
catgtgctgtatatgccaaattgca

SEQ ID NO: 3465852 - DNA, 25 bp, Homo sapien
gaaattctgcacatggaggtcctta

SEQ ID NO: 3465853 - DNA, 25 bp, Homo sapien
aaattctgcacatggaggtccttac

SEQ ID NO: 3465854 - DNA, 25 bp, Homo sapien
taaaatcgagtgttccaatccggca

SEQ ID NO: 3465855 - DNA, 25 bp, Homo sapien
cctacttttagcgttgccatgagca

SEQ ID NO: 3465856 - DNA, 25 bp, Homo sapien
aacctgcttgcttgcgagggcatag

SEQ ID NO: 3465857 - DNA, 25 bp, Homo sapien
gagctaagaagggaacagtggccac

SEQ ID NO: 3465858 - DNA, 25 bp, Homo sapien
tgctgtaatgtcatgaaccaggaag

SEQ ID NO: 3465859 - DNA, 25 bp, Homo sapien
gaagctggaatcctttaccagctct

SEQ ID NO: 3465860 - DNA, 25 bp, Homo sapien
ttaattttgaaaacgatccatgctg

SEQ ID NO: 3465861 - DNA, 25 bp, Homo sapien
tttgaaaacgatccatgctgtaatg

SEQ ID NO: 3465862 - DNA, 25 bp, Homo sapien
cgagctcaccacacctcttttgggt

SEQ ID NO: 3465863 - DNA, 25 bp, Homo sapien
gtacccgtattgctctgtgattctg

SEQ ID NO: 3465864 - DNA, 25 bp, Homo sapien
gggaagccgagctcaccacacctct

SEQ ID NO: 3465865 - DNA, 25 bp, Homo sapien
ttaaaggtacccgtattgctctgtg

SEQ ID NO: 3465866 - DNA, 25 bp, Homo sapien
aaagacaggtgcatagaattgcggt

SEQ ID NO: 3465867 - DNA, 25 bp, Homo sapien
taagtccgtgtagaatttaaaatgc

SEQ ID NO: 3465868 - DNA, 25 bp, Homo sapien
gaattgcggtaggtgtattaagtcc

SEQ ID NO: 3465869 - DNA, 25 bp, Homo sapien
ctgtcaaagcaagaatatcaccgtg

SEQ ID NO: 3465870 - DNA, 25 bp, Homo sapien
cagaagatggtgcaactgggtctga

SEQ ID NO: 3465871 - DNA, 25 bp, Homo sapien
ctgggtctgaaaggtggacactgct

SEQ ID NO: 3465872 - DNA, 25 bp, Homo sapien
ctgcagaagatggtgcaactgggtc

SEQ ID NO: 3465873 - DNA, 25 bp, Homo sapien
gtctgaaaggtggacactgctgcct

SEQ ID NO: 3465874 - DNA, 25 bp, Homo sapien
gatggacttttgaaagagtgtttga

SEQ ID NO: 3465875 - DNA, 25 bp, Homo sapien
aactgttaatgctggctgtactgac

SEQ ID NO: 3465876 - DNA, 25 bp, Homo sapien
ccctgaatcaagactgaaagacttt

SEQ ID NO: 3465877 - DNA, 25 bp, Homo sapien
gagtgtttgagggaactgttaatgc

SEQ ID NO: 3465878 - DNA, 25 bp, Homo sapien
tctccccgttgcaaataattgggcg

SEQ ID NO: 3465879 - DNA, 25 bp, Homo sapien
gaatcaaagatctggtcgaggcagc

SEQ ID NO: 3465880 - DNA, 25 bp, Homo sapien
catctctgtctgaaggtaggaatca

SEQ ID NO: 3465881 - DNA, 25 bp, Homo sapien
tgtgtggaattgagcaaaggctccg

SEQ ID NO: 3465882 - DNA, 25 bp, Homo sapien
agagaatggaggaatttgaaggtga

SEQ ID NO: 3465883 - DNA, 25 bp, Homo sapien
gagagaatggaggaatttgaaggtg

SEQ ID NO: 3465884 - DNA, 25 bp, Homo sapien
caagtgttggtaggaatggtcttct

SEQ ID NO: 3465885 - DNA, 25 bp, Homo sapien
gggaattgtaattctctggagcata

SEQ ID NO: 3465886 - DNA, 25 bp, Homo sapien
tcttctggggggtagccacaggttc

SEQ ID NO: 3465887 - DNA, 25 bp, Homo sapien
aaggcagctgcactggcgagtaact

SEQ ID NO: 3465888 - DNA, 25 bp, Homo sapien
tcttatagaaatcactggtggcggc

SEQ ID NO: 3465889 - DNA, 25 bp, Homo sapien
gcctggagagcatccaagtcctctg

SEQ ID NO: 3465890 - DNA, 25 bp, Homo sapien
cacacagtctgtgctcgggtagaag

SEQ ID NO: 3465891 - DNA, 25 bp, Homo sapien
tagaagtactctgctgcctggagag

SEQ ID NO: 3465892 - DNA, 25 bp, Homo sapien
ccatgccatgttctgaattactgta

SEQ ID NO: 3465893 - DNA, 25 bp, Homo sapien
ccatgttctgaattactgtaatttc

SEQ ID NO: 3465894 - DNA, 25 bp, Homo sapien
tgccatgttctgaattactgtaatt

SEQ ID NO: 3465895 - DNA, 25 bp, Homo sapien
catgccatgttctgaattactgtaa

SEQ ID NO: 3465896 - DNA, 25 bp, Homo sapien
catattttgcagtgtcatctagacg

SEQ ID NO: 3465897 - DNA, 25 bp, Homo sapien
cagtgtcatctagacgtggtagaaa

SEQ ID NO: 3465898 - DNA, 25 bp, Homo sapien
catctagacgtggtagaaaaataga

SEQ ID NO: 3465899 - DNA, 25 bp, Homo sapien
ccaagttgcatattttgcagtgtca

SEQ ID NO: 3465900 - DNA, 25 bp, Homo sapien
tagtgacatgtaaactgtgcttggg

SEQ ID NO: 3465901 - DNA, 25 bp, Homo sapien
gctgtgaccgggtctgaggacttca

SEQ ID NO: 3465902 - DNA, 25 bp, Homo sapien
acaaagtaggagtggcgctgtgacc

SEQ ID NO: 3465903 - DNA, 25 bp, Homo sapien
gaatgcttagcatcagaaaattgga

SEQ ID NO: 3465904 - DNA, 25 bp, Homo sapien
gagtgacccaagctctagcctcttt

SEQ ID NO: 3465905 - DNA, 25 bp, Homo sapien
taaagttactccttctttgagtgac

SEQ ID NO: 3465906 - DNA, 25 bp, Homo sapien
cactcccaagcgttgttgtcctcta

SEQ ID NO: 3465907 - DNA, 25 bp, Homo sapien
ctctttcactcccaagcgttgttgt

SEQ ID NO: 3465908 - DNA, 25 bp, Homo sapien
caccggggtggcataaatggctgct

SEQ ID NO: 3465909 - DNA, 25 bp, Homo sapien
accaagcagaagttgtcctctggcc

SEQ ID NO: 3465910 - DNA, 25 bp, Homo sapien
caccaagcagaagttgtcctctggc

SEQ ID NO: 3465911 - DNA, 25 bp, Homo sapien
ggcataaatggctgctcaccaagca

SEQ ID NO: 3465912 - DNA, 25 bp, Homo sapien
ctgttccagaagtatccaggaactt

SEQ ID NO: 3465913 - DNA, 25 bp, Homo sapien
gttccagaagtatccaggaactttc

SEQ ID NO: 3465914 - DNA, 25 bp, Homo sapien
tgttccagaagtatccaggaacttt

SEQ ID NO: 3465915 - DNA, 25 bp, Homo sapien
agagactttctgagtcactccacag

SEQ ID NO: 3465916 - DNA, 25 bp, Homo sapien
tacctgggaacacttcaagcattgc

SEQ ID NO: 3465917 - DNA, 25 bp, Homo sapien
cactccacagaatgaggtactcata

SEQ ID NO: 3465918 - DNA, 25 bp, Homo sapien
caagcattgcgtgcactgaacatca

SEQ ID NO: 3465919 - DNA, 25 bp, Homo sapien
tggttctagaccctaagtgcttagg

SEQ ID NO: 3465920 - DNA, 25 bp, Homo sapien
tgtggttctagaccctaagtgctta

SEQ ID NO: 3465921 - DNA, 25 bp, Homo sapien
cgtctcgggatgtggttctagaccc

SEQ ID NO: 3465922 - DNA, 25 bp, Homo sapien
cgggatgtggttctagaccctaagt

SEQ ID NO: 3465923 - DNA, 25 bp, Homo sapien
gaggatttgaccttcctggtctgtg

SEQ ID NO: 3465924 - DNA, 25 bp, Homo sapien
aataaaattgtgggctccctgaggc

SEQ ID NO: 3465925 - DNA, 25 bp, Homo sapien
tccctgaggccagcgaccatgtcct

SEQ ID NO: 3465926 - DNA, 25 bp, Homo sapien
tccacatggttctcagcgaggattt

SEQ ID NO: 3465927 - DNA, 25 bp, Homo sapien
aagaagggtagagttcagaaaggca

SEQ ID NO: 3465928 - DNA, 25 bp, Homo sapien
cttggcttgcagctttatggggctg

SEQ ID NO: 3465929 - DNA, 25 bp, Homo sapien
gcagaagtaaaagggagctgcattc

SEQ ID NO: 3465930 - DNA, 25 bp, Homo sapien
ccaacttggaagacattaggactgt

SEQ ID NO: 3465931 - DNA, 25 bp, Homo sapien
tgacgaagcctagccaggttcccct

SEQ ID NO: 3465932 - DNA, 25 bp, Homo sapien
tggagtgactgacgaagcctagcca

SEQ ID NO: 3465933 - DNA, 25 bp, Homo sapien
ttgtctgattaagacattggttctg

SEQ ID NO: 3465934 - DNA, 25 bp, Homo sapien
gaattgctccttgtctgattaagac

SEQ ID NO: 3465935 - DNA, 25 bp, Homo sapien
ctggagagagataacagggcccagg

SEQ ID NO: 3465936 - DNA, 25 bp, Homo sapien
gagagagataacagggcccagggct

SEQ ID NO: 3465937 - DNA, 25 bp, Homo sapien
agagagataacagggcccagggctg

SEQ ID NO: 3465938 - DNA, 25 bp, Homo sapien
agagataacagggcccagggctgac

SEQ ID NO: 3465939 - DNA, 25 bp, Homo sapien
ggaagctgggcggccacctgcattc

SEQ ID NO: 3465940 - DNA, 25 bp, Homo sapien
ccagaccagacaggggccaagacct

SEQ ID NO: 3465941 - DNA, 25 bp, Homo sapien
ccaagacctaaacaggcttaggagc

SEQ ID NO: 3465942 - DNA, 25 bp, Homo sapien
gcctgtgctgtatgtgtttgtgatg

SEQ ID NO: 3465943 - DNA, 25 bp, Homo sapien
taaaccctgctgaaacccagcgcaa

SEQ ID NO: 3465944 - DNA, 25 bp, Homo sapien
tcatggtgagccttgtccacggctt

SEQ ID NO: 3465945 - DNA, 25 bp, Homo sapien
tgtcaaaggattgcccacggcctaa

SEQ ID NO: 3465946 - DNA, 25 bp, Homo sapien
ccagcgcaaaagttacccaggaggg

SEQ ID NO: 3465947 - DNA, 25 bp, Homo sapien
tcagagcagaacgataagccacaag

SEQ ID NO: 3465948 - DNA, 25 bp, Homo sapien
gaccttgagttatcttcagtccagc

SEQ ID NO: 3465949 - DNA, 25 bp, Homo sapien
ctcaggtgttatcctctggagggag

SEQ ID NO: 3465950 - DNA, 25 bp, Homo sapien
gctttgatacccagccaaattcaga

SEQ ID NO: 3465951 - DNA, 25 bp, Homo sapien
cttggattttgtcggcagcctcaga

SEQ ID NO: 3465952 - DNA, 25 bp, Homo sapien
tcaagcctgtcttttgctagaggcc

SEQ ID NO: 3465953 - DNA, 25 bp, Homo sapien
gggactcttagactccctctgacct

SEQ ID NO: 3465954 - DNA, 25 bp, Homo sapien
tggaagctgaggataacctttgccc

SEQ ID NO: 3465955 - DNA, 25 bp, Homo sapien
agttgacttataaccaatgtatagg

SEQ ID NO: 3465956 - DNA, 25 bp, Homo sapien
cttttgaactttgtccctcagttga

SEQ ID NO: 3465957 - DNA, 25 bp, Homo sapien
aaccaatgtataggtcagcagaggc

SEQ ID NO: 3465958 - DNA, 25 bp, Homo sapien
gaactttgtccctcagttgacttat

SEQ ID NO: 3465959 - DNA, 25 bp, Homo sapien
ggcatgaaaaacttgatctgcaact

SEQ ID NO: 3465960 - DNA, 25 bp, Homo sapien
tgttcagggataagttctaccacgg

SEQ ID NO: 3465961 - DNA, 25 bp, Homo sapien
taagttctaccacgggcatttccat

SEQ ID NO: 3465962 - DNA, 25 bp, Homo sapien
tccatcaatcaggatccaggagcat

SEQ ID NO: 3465963 - DNA, 25 bp, Homo sapien
tccaggagcatgtgacatcaggcag

SEQ ID NO: 3465964 - DNA, 25 bp, Homo sapien
gacatttcagttggtagaatccatg

SEQ ID NO: 3465965 - DNA, 25 bp, Homo sapien
taaaagcgtccataagccaccattc

SEQ ID NO: 3465966 - DNA, 25 bp, Homo sapien
agcaccatcgtcactattaagcaga

SEQ ID NO: 3465967 - DNA, 25 bp, Homo sapien
aacgtgtaccttgggaactggctca

SEQ ID NO: 3465968 - DNA, 25 bp, Homo sapien
tcgtcactcctcatgtgagaaggct

SEQ ID NO: 3465969 - DNA, 25 bp, Homo sapien
aaattggcaattgagggagactgga

SEQ ID NO: 3465970 - DNA, 25 bp, Homo sapien
tgctttctcaggtggacctgtccgc

SEQ ID NO: 3465971 - DNA, 25 bp, Homo sapien
caaggttctcgtggacagatctctc

SEQ ID NO: 3465972 - DNA, 25 bp, Homo sapien
tttccgtgggcatagccgacatcag

SEQ ID NO: 3465973 - DNA, 25 bp, Homo sapien
aagagcacgggcatgttctccttcc

SEQ ID NO: 3465974 - DNA, 25 bp, Homo sapien
aagcccagatccagtcaaagagcac

SEQ ID NO: 3465975 - DNA, 25 bp, Homo sapien
cttccttccttgagggttggcctct

SEQ ID NO: 3465976 - DNA, 25 bp, Homo sapien
aaggtcaaaggcagggaattgcatg

SEQ ID NO: 3465977 - DNA, 25 bp, Homo sapien
tccttccggcaagagaggacggcaa

SEQ ID NO: 3465978 - DNA, 25 bp, Homo sapien
tgtttggtggtgcttagagggcact

SEQ ID NO: 3465979 - DNA, 25 bp, Homo sapien
gacgaacaagtattctctgggctgg

SEQ ID NO: 3465980 - DNA, 25 bp, Homo sapien
tcaagtcttgattccaaagcatctg

SEQ ID NO: 3465981 - DNA, 25 bp, Homo sapien
catgagctgtgaggccataagaggt

SEQ ID NO: 3465982 - DNA, 25 bp, Homo sapien
aggtgatgggtttatcgctggccat

SEQ ID NO: 3465983 - DNA, 25 bp, Homo sapien
tatgcagggtatttgctggaagaaa

SEQ ID NO: 3465984 - DNA, 25 bp, Homo sapien
tggtaatatggaggcaaaactgtca

SEQ ID NO: 3465985 - DNA, 25 bp, Homo sapien
aaatatttcttaaaggtggccactg

SEQ ID NO: 3465986 - DNA, 25 bp, Homo sapien
aaataatgttggtaatatggaggca

SEQ ID NO: 3465987 - DNA, 25 bp, Homo sapien
tttcttaaaggtggccactgactgt

SEQ ID NO: 3465988 - DNA, 25 bp, Homo sapien
ttgttatccctaacattatttccag

SEQ ID NO: 3465989 - DNA, 25 bp, Homo sapien
cttgttatccctaacattatttcca

SEQ ID NO: 3465990 - DNA, 25 bp, Homo sapien
tgttatccctaacattatttccagc

SEQ ID NO: 3465991 - DNA, 25 bp, Homo sapien
caataacttgcttgagcatagggac

SEQ ID NO: 3465992 - DNA, 25 bp, Homo sapien
taggaattcttgtgggactttcagt

SEQ ID NO: 3465993 - DNA, 25 bp, Homo sapien
caaccaaccaactgagtcatggcca

SEQ ID NO: 3465994 - DNA, 25 bp, Homo sapien
tactgagtcaggttctctacaagtg

SEQ ID NO: 3465995 - DNA, 25 bp, Homo sapien
agcatccccgatatatgaattctgg

SEQ ID NO: 3465996 - DNA, 25 bp, Homo sapien
ctggccccttgtgggcttttaaatg

SEQ ID NO: 3465997 - DNA, 25 bp, Homo sapien
accagcatccccgatatatgaattc

SEQ ID NO: 3465998 - DNA, 25 bp, Homo sapien
gctctggccccttgtgggcttttaa

SEQ ID NO: 3465999 - DNA, 25 bp, Homo sapien
gtccctgctaccaggcttgaaggca

SEQ ID NO: 3466000 - DNA, 25 bp, Homo sapien
tattttggagaactgcttaataatt

SEQ ID NO: 3466001 - DNA, 25 bp, Homo sapien
gaaaaggatgctgctggtagaaacc

SEQ ID NO: 3466002 - DNA, 25 bp, Homo sapien
tcataacatactcttttggtccctg

SEQ ID NO: 3466003 - DNA, 25 bp, Homo sapien
aggaggcgtgcctctaagtttggct

SEQ ID NO: 3466004 - DNA, 25 bp, Homo sapien
cacagggactgaaactgtcctgcaa

SEQ ID NO: 3466005 - DNA, 25 bp, Homo sapien
ctgcgagatagctgcaccggctggt

SEQ ID NO: 3466006 - DNA, 25 bp, Homo sapien
gcaacagcagcgtcaggtctgggct

SEQ ID NO: 3466007 - DNA, 25 bp, Homo sapien
agtatcatttgctacttgatggcca

SEQ ID NO: 3466008 - DNA, 25 bp, Homo sapien
tcaagtatcatttgctacttgatgg

SEQ ID NO: 3466009 - DNA, 25 bp, Homo sapien
aagtatcatttgctacttgatggcc

SEQ ID NO: 3466010 - DNA, 25 bp, Homo sapien
gtatcatttgctacttgatggccac

SEQ ID NO: 3466011 - DNA, 25 bp, Homo sapien
agcacactagcttttgacaaaaaac

SEQ ID NO: 3466012 - DNA, 25 bp, Homo sapien
tttcagggaaggtcgactgaccctc

SEQ ID NO: 3466013 - DNA, 25 bp, Homo sapien
gaatgttcccatcgtaattagtggt

SEQ ID NO: 3466014 - DNA, 25 bp, Homo sapien
taggccttgtagttgcatccacatt

SEQ ID NO: 3466015 - DNA, 25 bp, Homo sapien
ctcagacttgcagatgatcagcagt

SEQ ID NO: 3466016 - DNA, 25 bp, Homo sapien
tttctttcggtaggaaagacagtga

SEQ ID NO: 3466017 - DNA, 25 bp, Homo sapien
cctccttctgaaatggcgttatccc

SEQ ID NO: 3466018 - DNA, 25 bp, Homo sapien
cacttcttcttttcaactcgactca

SEQ ID NO: 3466019 - DNA, 25 bp, Homo sapien
catctgcataaacacccattcccat

SEQ ID NO: 3466020 - DNA, 25 bp, Homo sapien
ttcaactcgactcagagtccactgc

SEQ ID NO: 3466021 - DNA, 25 bp, Homo sapien
gtggggcattgagggactgagggct

SEQ ID NO: 3466022 - DNA, 25 bp, Homo sapien
cattgagggactgagggctctggtt

SEQ ID NO: 3466023 - DNA, 25 bp, Homo sapien
cacctggaccgctctccctggtggg

SEQ ID NO: 3466024 - DNA, 25 bp, Homo sapien
tcaggactcatctcctccacctgga

SEQ ID NO: 3466025 - DNA, 25 bp, Homo sapien
cagggcttgctgaggattgcaggac

SEQ ID NO: 3466026 - DNA, 25 bp, Homo sapien
caaaaggaagaggtccctgactgga

SEQ ID NO: 3466027 - DNA, 25 bp, Homo sapien
gacgtcatcatagagaagggtgtag

SEQ ID NO: 3466028 - DNA, 25 bp, Homo sapien
tggaggctctgcacaactctgtagg

SEQ ID NO: 3466029 - DNA, 25 bp, Homo sapien
cagtcctcaagttgagcacagctct

SEQ ID NO: 3466030 - DNA, 25 bp, Homo sapien
gtcctcaagttgagcacagctcttg

SEQ ID NO: 3466031 - DNA, 25 bp, Homo sapien
ccagtcctcaagttgagcacagctc

SEQ ID NO: 3466032 - DNA, 25 bp, Homo sapien
caccagtcctcaagttgagcacagc

SEQ ID NO: 3466033 - DNA, 25 bp, Homo sapien
gcatcatcagcaagagttccagaac

SEQ ID NO: 3466034 - DNA, 25 bp, Homo sapien
caccgagagtacaggcagccttgag

SEQ ID NO: 3466035 - DNA, 25 bp, Homo sapien
cagccttgagctggtgtctggccaa

SEQ ID NO: 3466036 - DNA, 25 bp, Homo sapien
cctgtgctgccacaatgcgctgggc

SEQ ID NO: 3466037 - DNA, 25 bp, Homo sapien
cctccagatgatgaggcaaagtgtg

SEQ ID NO: 3466038 - DNA, 25 bp, Homo sapien
aatggcctccagatgatgaggcaaa

SEQ ID NO: 3466039 - DNA, 25 bp, Homo sapien
cagaaactgagagggggtgtgagtc

SEQ ID NO: 3466040 - DNA, 25 bp, Homo sapien
tggcctccagatgatgaggcaaagt

SEQ ID NO: 3466041 - DNA, 25 bp, Homo sapien
ccaaaacgtaaagtgctgagcatgt

SEQ ID NO: 3466042 - DNA, 25 bp, Homo sapien
ggctctttgcttgggatggctctat

SEQ ID NO: 3466043 - DNA, 25 bp, Homo sapien
cctataggtgaagtgctgaagtaaa

SEQ ID NO: 3466044 - DNA, 25 bp, Homo sapien
tttgaaagggtcttctagaggctct

SEQ ID NO: 3466045 - DNA, 25 bp, Homo sapien
tgggtctcgctcttcttttgcacga

SEQ ID NO: 3466046 - DNA, 25 bp, Homo sapien
gcacgaggcgtctcattcccgcagt

SEQ ID NO: 3466047 - DNA, 25 bp, Homo sapien
atcctggtgggtctcgctcttcttt

SEQ ID NO: 3466048 - DNA, 25 bp, Homo sapien
tcttcttttgcacgaggcgtctcat

SEQ ID NO: 3466049 - DNA, 25 bp, Homo sapien
gagcaggtggtgagttaggacagag

SEQ ID NO: 3466050 - DNA, 25 bp, Homo sapien
gacacacgtgtccttgcccttctct

SEQ ID NO: 3466051 - DNA, 25 bp, Homo sapien
gggagcaggtggtgagttaggacag

SEQ ID NO: 3466052 - DNA, 25 bp, Homo sapien
tggaacactcgcccaggcccccggc

SEQ ID NO: 3466053 - DNA, 25 bp, Homo sapien
ttgacttgagaccaaaacagtcctg

SEQ ID NO: 3466054 - DNA, 25 bp, Homo sapien
ctgagccgagtttgacttgagacca

SEQ ID NO: 3466055 - DNA, 25 bp, Homo sapien
ccgagtttgacttgagaccaaaaca

SEQ ID NO: 3466056 - DNA, 25 bp, Homo sapien
cagtcctggaaacgcagcctgtcct

SEQ ID NO: 3466057 - DNA, 25 bp, Homo sapien
cattccactgagccttggtcaaaca

SEQ ID NO: 3466058 - DNA, 25 bp, Homo sapien
attccactgagccttggtcaaacat

SEQ ID NO: 3466059 - DNA, 25 bp, Homo sapien
cagggcttgggtcatgtccatgggc

SEQ ID NO: 3466060 - DNA, 25 bp, Homo sapien
tgacagaaatctgtgggatgccatc

SEQ ID NO: 3466061 - DNA, 25 bp, Homo sapien
agagggctgcacattctgcttgact

SEQ ID NO: 3466062 - DNA, 25 bp, Homo sapien
atgccttcagtgacagaaatctgtg

SEQ ID NO: 3466063 - DNA, 25 bp, Homo sapien
ctggaaacgaaaagaggcagtgtca

SEQ ID NO: 3466064 - DNA, 25 bp, Homo sapien
ggcagtgtcagatcttccctcaaga

SEQ ID NO: 3466065 - DNA, 25 bp, Homo sapien
aagacacggagtcacacacttgccc

SEQ ID NO: 3466066 - DNA, 25 bp, Homo sapien
tgcccagtaggaagggagggcgaac

SEQ ID NO: 3466067 - DNA, 25 bp, Homo sapien
taagtccaagttgcagggatggccc

SEQ ID NO: 3466068 - DNA, 25 bp, Homo sapien
tctgccctaagtccaagttgcaggg

SEQ ID NO: 3466069 - DNA, 25 bp, Homo sapien
aagttgcagggatggcccacagcac

SEQ ID NO: 3466070 - DNA, 25 bp, Homo sapien
agacttctgccctaagtccaagttg

SEQ ID NO: 3466071 - DNA, 25 bp, Homo sapien
caagatgtgtggagttgaggctcag

SEQ ID NO: 3466072 - DNA, 25 bp, Homo sapien
tggagttgaggctcagtgaccaaga

SEQ ID NO: 3466073 - DNA, 25 bp, Homo sapien
gagttgaggctcagtgaccaagaag

SEQ ID NO: 3466074 - DNA, 25 bp, Homo sapien
tgtgtggagttgaggctcagtgacc

SEQ ID NO: 3466075 - DNA, 25 bp, Homo sapien
tactctgggtaatgctcatgagtca

SEQ ID NO: 3466076 - DNA, 25 bp, Homo sapien
cagggtatcattgacttggaggcag

SEQ ID NO: 3466077 - DNA, 25 bp, Homo sapien
aggtcatactctgggtaatgctcat

SEQ ID NO: 3466078 - DNA, 25 bp, Homo sapien
ggaaggccagggtatcattgacttg

SEQ ID NO: 3466079 - DNA, 25 bp, Homo sapien
catcttccgatgtcggttgctgctc

SEQ ID NO: 3466080 - DNA, 25 bp, Homo sapien
cggaagcgccgccagtcatattgct

SEQ ID NO: 3466081 - DNA, 25 bp, Homo sapien
gacgaaagacataaatgcccggctt

SEQ ID NO: 3466082 - DNA, 25 bp, Homo sapien
aaatgcccggcttttggaactgctg

SEQ ID NO: 3466083 - DNA, 25 bp, Homo sapien
cccagctcaggctgtgacactgcat

SEQ ID NO: 3466084 - DNA, 25 bp, Homo sapien
gtggggagcagccttccgagcccag

SEQ ID NO: 3466085 - DNA, 25 bp, Homo sapien
gagcagccttccgagcccagctcag

SEQ ID NO: 3466086 - DNA, 25 bp, Homo sapien
tggggtggggagcagccttccgagc

SEQ ID NO: 3466087 - DNA, 25 bp, Homo sapien
gtaggcatcgaggttgcattcttgc

SEQ ID NO: 3466088 - DNA, 25 bp, Homo sapien
cttattgacattatcccagttcttg

SEQ ID NO: 3466089 - DNA, 25 bp, Homo sapien
gatcggcctctccttattgacatta

SEQ ID NO: 3466090 - DNA, 25 bp, Homo sapien
cgtcagagtcttggtgagatcggcc

SEQ ID NO: 3466091 - DNA, 25 bp, Homo sapien
tgtcaaaccactccagatctacctg

SEQ ID NO: 3466092 - DNA, 25 bp, Homo sapien
ggcctctgtgtcaaaccactccaga

SEQ ID NO: 3466093 - DNA, 25 bp, Homo sapien
gagtttggctgtcactgacagagac

SEQ ID NO: 3466094 - DNA, 25 bp, Homo sapien
ctcttccttcgtgtggctgagtttg

SEQ ID NO: 3466095 - DNA, 25 bp, Homo sapien
gggaggcagcgccttgttccccaca

SEQ ID NO: 3466096 - DNA, 25 bp, Homo sapien
tcacccagaagtttaaggtagagga

SEQ ID NO: 3466097 - DNA, 25 bp, Homo sapien
aggctgggaggcagcgccttgttcc

SEQ ID NO: 3466098 - DNA, 25 bp, Homo sapien
ggagagaacgggcttcacccagaag

SEQ ID NO: 3466099 - DNA, 25 bp, Homo sapien
ggggagggagttgtgtttgggcaca

SEQ ID NO: 3466100 - DNA, 25 bp, Homo sapien
agaggaaggcgtgaaccaagcccac

SEQ ID NO: 3466101 - DNA, 25 bp, Homo sapien
gggagcctggacctcagtgagggga

SEQ ID NO: 3466102 - DNA, 25 bp, Homo sapien
cagagaggaaggcgtgaaccaagcc

SEQ ID NO: 3466103 - DNA, 25 bp, Homo sapien
catggcagcagcggcaaaggggatg

SEQ ID NO: 3466104 - DNA, 25 bp, Homo sapien
cagcagcggcaaaggggatgagaaa

SEQ ID NO: 3466105 - DNA, 25 bp, Homo sapien
tggtgggaactgtaggtaagagctt

SEQ ID NO: 3466106 - DNA, 25 bp, Homo sapien
gggatgagaaattcccagagatggt

SEQ ID NO: 3466107 - DNA, 25 bp, Homo sapien
tgcaggcgctacagccaccagggac

SEQ ID NO: 3466108 - DNA, 25 bp, Homo sapien
ggtcagagacaaccctgcctgctca

SEQ ID NO: 3466109 - DNA, 25 bp, Homo sapien
ctgggtcagagacaaccctgcctgc

SEQ ID NO: 3466110 - DNA, 25 bp, Homo sapien
gggacagcaagctcggggacacccc

SEQ ID NO: 3466111 - DNA, 25 bp, Homo sapien
tggctgcgtactcgcctgccaggtg

SEQ ID NO: 3466112 - DNA, 25 bp, Homo sapien
cctcagcgtcgagcagaaagaggcc

SEQ ID NO: 3466113 - DNA, 25 bp, Homo sapien
cgaaggagcttgagttggtgacgaa

SEQ ID NO: 3466114 - DNA, 25 bp, Homo sapien
gacgaaggctggctgcgtactcgcc

SEQ ID NO: 3466115 - DNA, 25 bp, Homo sapien
agtctgatccaggttggccagatcc

SEQ ID NO: 3466116 - DNA, 25 bp, Homo sapien
ccagatccacacttttctgggttct

SEQ ID NO: 3466117 - DNA, 25 bp, Homo sapien
ctgggttctgcccagccggagagga

SEQ ID NO: 3466118 - DNA, 25 bp, Homo sapien
tctgcccagccggagaggatttctc

SEQ ID NO: 3466119 - DNA, 25 bp, Homo sapien
ctccgccccagtgccggtgcccaga

SEQ ID NO: 3466120 - DNA, 25 bp, Homo sapien
gctccgccccagtgccggtgcccag

SEQ ID NO: 3466121 - DNA, 25 bp, Homo sapien
agctccgccccagtgccggtgccca

SEQ ID NO: 3466122 - DNA, 25 bp, Homo sapien
cccaggccttcaggcggtggccctc

SEQ ID NO: 3466123 - DNA, 25 bp, Homo sapien
gaagtgcctccggatctataaagct

SEQ ID NO: 3466124 - DNA, 25 bp, Homo sapien
aaacttggccgtttgccttcatctg

SEQ ID NO: 3466125 - DNA, 25 bp, Homo sapien
tatgacttgccatggctttgtttct

SEQ ID NO: 3466126 - DNA, 25 bp, Homo sapien
gagaccccaagacaggttcatcatt

SEQ ID NO: 3466127 - DNA, 25 bp, Homo sapien
tagctctcagcagatcatatcccag

SEQ ID NO: 3466128 - DNA, 25 bp, Homo sapien
gggtatggagcctgcgtggccgctg

SEQ ID NO: 3466129 - DNA, 25 bp, Homo sapien
cggcattggtgtccatagtgggcac

SEQ ID NO: 3466130 - DNA, 25 bp, Homo sapien
atcccaggtgtccagcctcgggcag

SEQ ID NO: 3466131 - DNA, 25 bp, Homo sapien
tgttggtaccctttaatgcaccagc

SEQ ID NO: 3466132 - DNA, 25 bp, Homo sapien
ctggacagggatacagggagctgtt

SEQ ID NO: 3466133 - DNA, 25 bp, Homo sapien
agggagctgttggtaccctttaatg

SEQ ID NO: 3466134 - DNA, 25 bp, Homo sapien
ggagctgttggtaccctttaatgca

SEQ ID NO: 3466135 - DNA, 25 bp, Homo sapien
gggtagggcacatagggcaggatgg

SEQ ID NO: 3466136 - DNA, 25 bp, Homo sapien
gtggtgggactggttgggtagggca

SEQ ID NO: 3466137 - DNA, 25 bp, Homo sapien
cttgatgcctgtgacggggtctgtc

SEQ ID NO: 3466138 - DNA, 25 bp, Homo sapien
gggtctgtcatgagagcccccagcg

SEQ ID NO: 3466139 - DNA, 25 bp, Homo sapien
ttgggggtgcagattcacagccagc

SEQ ID NO: 3466140 - DNA, 25 bp, Homo sapien
cctgtgactggatcctccatgggcc

SEQ ID NO: 3466141 - DNA, 25 bp, Homo sapien
gatgggcgagatgcctcctgtgact

SEQ ID NO: 3466142 - DNA, 25 bp, Homo sapien
ttgcagtatgtcctcccaagagtga

SEQ ID NO: 3466143 - DNA, 25 bp, Homo sapien
ccaaggtcttggtgagaggattgca

SEQ ID NO: 3466144 - DNA, 25 bp, Homo sapien
cactagcacattggtgtccagcagg

SEQ ID NO: 3466145 - DNA, 25 bp, Homo sapien
gccagtggctgtctcatgtccttaa

SEQ ID NO: 3466146 - DNA, 25 bp, Homo sapien
cagagtttcctgtacacccgactct

SEQ ID NO: 3466147 - DNA, 25 bp, Homo sapien
ctgtctcatgtccttaatggcagcc

SEQ ID NO: 3466148 - DNA, 25 bp, Homo sapien
agtttcctgtacacccgactctgga

SEQ ID NO: 3466149 - DNA, 25 bp, Homo sapien
caatgtcatctgctgtcaccagctg

SEQ ID NO: 3466150 - DNA, 25 bp, Homo sapien
gccaccactggcttcaatgtcatct

SEQ ID NO: 3466151 - DNA, 25 bp, Homo sapien
tcaatgtcatctgctgtcaccagct

SEQ ID NO: 3466152 - DNA, 25 bp, Homo sapien
tatcctgccaccactggcttcaatg

SEQ ID NO: 3466153 - DNA, 25 bp, Homo sapien
cttggtcacgcatgtgcatggccag

SEQ ID NO: 3466154 - DNA, 25 bp, Homo sapien
ccctgtccctgagcttatgggccta

SEQ ID NO: 3466155 - DNA, 25 bp, Homo sapien
ttaagacagggaggcagtcaagcac

SEQ ID NO: 3466156 - DNA, 25 bp, Homo sapien
tatgggcctaggagcatcaaagcac

SEQ ID NO: 3466157 - DNA, 25 bp, Homo sapien
gagccctcaggatctgggatctcca

SEQ ID NO: 3466158 - DNA, 25 bp, Homo sapien
gggatctccattccatacagggctg

SEQ ID NO: 3466159 - DNA, 25 bp, Homo sapien
ttccattgagcctgccagcggtgtg

SEQ ID NO: 3466160 - DNA, 25 bp, Homo sapien
tttgccatcagcgtcttccattgag

SEQ ID NO: 3466161 - DNA, 25 bp, Homo sapien
cactctggcagagagatccgtttga

SEQ ID NO: 3466162 - DNA, 25 bp, Homo sapien
gatccgtttgagctccaatgacagg

SEQ ID NO: 3466163 - DNA, 25 bp, Homo sapien
cagggtctctcactccccgaggtaa

SEQ ID NO: 3466164 - DNA, 25 bp, Homo sapien
tggcttgagccccaatcgagattgg

SEQ ID NO: 3466165 - DNA, 25 bp, Homo sapien
tttctgccgtggagtggagctcctg

SEQ ID NO: 3466166 - DNA, 25 bp, Homo sapien
tgctcagcgccactttctgccgtgg

SEQ ID NO: 3466167 - DNA, 25 bp, Homo sapien
ccccagctgttccagtagctgctcc

SEQ ID NO: 3466168 - DNA, 25 bp, Homo sapien
ttcctggtggcaccagtactgctcc

SEQ ID NO: 3466169 - DNA, 25 bp, Homo sapien
tcaagggcctggcaggcctcctctt

SEQ ID NO: 3466170 - DNA, 25 bp, Homo sapien
atctcctgcaggcagcgggactcaa

SEQ ID NO: 3466171 - DNA, 25 bp, Homo sapien
gctgctgtgtgtgctcagagccctg

SEQ ID NO: 3466172 - DNA, 25 bp, Homo sapien
cttgagagagcaggccccgctctgg

SEQ ID NO: 3466173 - DNA, 25 bp, Homo sapien
ctgcttgcctaagcttttctgctgc

SEQ ID NO: 3466174 - DNA, 25 bp, Homo sapien
tggaggcagctccactcccgtcggt

SEQ ID NO: 3466175 - DNA, 25 bp, Homo sapien
accacccactgaaactcatcagagg

SEQ ID NO: 3466176 - DNA, 25 bp, Homo sapien
tcccgtcggtactgcagctgaccca

SEQ ID NO: 3466177 - DNA, 25 bp, Homo sapien
actcatcagagggacgctgaaccac

SEQ ID NO: 3466178 - DNA, 25 bp, Homo sapien
ttctgaggccccctatcaaagatgg

SEQ ID NO: 3466179 - DNA, 25 bp, Homo sapien
aaatacagatctcctcagccaagtc

SEQ ID NO: 3466180 - DNA, 25 bp, Homo sapien
tgaggccccctatcaaagatggaaa

SEQ ID NO: 3466181 - DNA, 25 bp, Homo sapien
tgtcccacgtggttgccttgggagt

SEQ ID NO: 3466182 - DNA, 25 bp, Homo sapien
tcctactagcgctgcagtgagctgc

SEQ ID NO: 3466183 - DNA, 25 bp, Homo sapien
aggtagcagcccggtccctgagaga

SEQ ID NO: 3466184 - DNA, 25 bp, Homo sapien
cctggagctcctactagcgctgcag

SEQ ID NO: 3466185 - DNA, 25 bp, Homo sapien
aatatgtctccagggtaattctcca

SEQ ID NO: 3466186 - DNA, 25 bp, Homo sapien
gatacacttatttttgcaattcagc

SEQ ID NO: 3466187 - DNA, 25 bp, Homo sapien
tatttttgcaattcagcttcttcct

SEQ ID NO: 3466188 - DNA, 25 bp, Homo sapien
ttccttgtgggcttgggaccagatg

SEQ ID NO: 3466189 - DNA, 25 bp, Homo sapien
cttcttccttgtgggcttgggacca

SEQ ID NO: 3466190 - DNA, 25 bp, Homo sapien
cccccatgagaatcccaaacaggag

SEQ ID NO: 3466191 - DNA, 25 bp, Homo sapien
tggagaggccatactggtaaaccac

SEQ ID NO: 3466192 - DNA, 25 bp, Homo sapien
aaggtcagtgggttgcacagttatc

SEQ ID NO: 3466193 - DNA, 25 bp, Homo sapien
gaggttttagaagatcctgcagaga

SEQ ID NO: 3466194 - DNA, 25 bp, Homo sapien
cagtgtctgaggttttagaagatcc

SEQ ID NO: 3466195 - DNA, 25 bp, Homo sapien
ggtagaagaaggcaccttggaaggc

SEQ ID NO: 3466196 - DNA, 25 bp, Homo sapien
ttgggcttccatggcaggaagatga

SEQ ID NO: 3466197 - DNA, 25 bp, Homo sapien
tgggcttccatggcaggaagatgag

SEQ ID NO: 3466198 - DNA, 25 bp, Homo sapien
aagaaggcaccttggaaggcactgc

SEQ ID NO: 3466199 - DNA, 25 bp, Homo sapien
caaacattctctcccaatgaacagt

SEQ ID NO: 3466200 - DNA, 25 bp, Homo sapien
acagaggccaaacattctctcccaa

SEQ ID NO: 3466201 - DNA, 25 bp, Homo sapien
ttctctcccaatgaacagtgtgttt

SEQ ID NO: 3466202 - DNA, 25 bp, Homo sapien
gaggccaaacattctctcccaatga

SEQ ID NO: 3466203 - DNA, 25 bp, Homo sapien
tctagtgattctggctccaagggag

SEQ ID NO: 3466204 - DNA, 25 bp, Homo sapien
agtgattctggctccaagggagata

SEQ ID NO: 3466205 - DNA, 25 bp, Homo sapien
cctttctctgtcagagatgggctgc

SEQ ID NO: 3466206 - DNA, 25 bp, Homo sapien
aggatagcacttatgctttggtcaa

SEQ ID NO: 3466207 - DNA, 25 bp, Homo sapien
taggaaatgttccatactggtgaag

SEQ ID NO: 3466208 - DNA, 25 bp, Homo sapien
gttttcttaggatttgttgttctgc

SEQ ID NO: 3466209 - DNA, 25 bp, Homo sapien
cttatcttcactcccaaattgattt

SEQ ID NO: 3466210 - DNA, 25 bp, Homo sapien
ttgttgttctgcagcgaggatgctt

SEQ ID NO: 3466211 - DNA, 25 bp, Homo sapien
taggtgattctggatccaggaagct

SEQ ID NO: 3466212 - DNA, 25 bp, Homo sapien
gaagctggtagcattggagcagtca

SEQ ID NO: 3466213 - DNA, 25 bp, Homo sapien
tccagccgcttgtatcttctcccta

SEQ ID NO: 3466214 - DNA, 25 bp, Homo sapien
ggttctcttgtgagtagacttgtgc

SEQ ID NO: 3466215 - DNA, 25 bp, Homo sapien
catgaagatgcattgcctactgaaa

SEQ ID NO: 3466216 - DNA, 25 bp, Homo sapien
tatgtgtggcctagttctgttgaaa

SEQ ID NO: 3466217 - DNA, 25 bp, Homo sapien
tgagctggattgctgccatccaagg

SEQ ID NO: 3466218 - DNA, 25 bp, Homo sapien
gatgccttgaaaagtaggtttctac

SEQ ID NO: 3466219 - DNA, 25 bp, Homo sapien
ggcggcgctgccggggaggacccgc

SEQ ID NO: 3466220 - DNA, 25 bp, Homo sapien
tgggcgcaagcggcccccgaggaca

SEQ ID NO: 3466221 - DNA, 25 bp, Homo sapien
gggcgcaagcggcccccgaggacac

SEQ ID NO: 3466222 - DNA, 25 bp, Homo sapien
ggacggtccgcagcgccgacgcggg

SEQ ID NO: 3466223 - DNA, 25 bp, Homo sapien
tccgcagcgccgacgcggggtcggg

SEQ ID NO: 3466224 - DNA, 25 bp, Homo sapien
gtccgcagcgccgacgcggggtcgg

SEQ ID NO: 3466225 - DNA, 25 bp, Homo sapien
ctcccggacggtccgcagcgccgac

SEQ ID NO: 3466226 - DNA, 25 bp, Homo sapien
tcagctaatgacactgcctacaaac

SEQ ID NO: 3466227 - DNA, 25 bp, Homo sapien
gttagtgattgtaaccaccacagta

SEQ ID NO: 3466228 - DNA, 25 bp, Homo sapien
gagttagtgattgtaaccaccacag

SEQ ID NO: 3466229 - DNA, 25 bp, Homo sapien
tagtgattgtaaccaccacagtaca

SEQ ID NO: 3466230 - DNA, 25 bp, Homo sapien
tggagttagtgattgtaaccaccac

SEQ ID NO: 3466231 - DNA, 25 bp, Homo sapien
caacacgttgtgacaggcaggcaat

SEQ ID NO: 3466232 - DNA, 25 bp, Homo sapien
tagacgatggcaaatagacacagtg

SEQ ID NO: 3466233 - DNA, 25 bp, Homo sapien
catcttctctcgaaggctgcgggct

SEQ ID NO: 3466234 - DNA, 25 bp, Homo sapien
aactgtatctggagaaaccgcgggt

SEQ ID NO: 3466235 - DNA, 25 bp, Homo sapien
ttttacctggccgtgtggttagtga

SEQ ID NO: 3466236 - DNA, 25 bp, Homo sapien
ggttagtgattggtactattagcaa

SEQ ID NO: 3466237 - DNA, 25 bp, Homo sapien
tattagcaatcagctaactacactg

SEQ ID NO: 3466238 - DNA, 25 bp, Homo sapien
taactacactgcctagtaactagac

SEQ ID NO: 3466239 - DNA, 25 bp, Homo sapien
tcttccccacgcacattgatgatgc

SEQ ID NO: 3466240 - DNA, 25 bp, Homo sapien
cacgcacattgatgatgcacaggca

SEQ ID NO: 3466241 - DNA, 25 bp, Homo sapien
gagcaattaataggcaatggatgaa

SEQ ID NO: 3466242 - DNA, 25 bp, Homo sapien
ttggctgagcaattaataggcaatg

SEQ ID NO: 3466243 - DNA, 25 bp, Homo sapien
tctaaaattttggttaagagcctga

SEQ ID NO: 3466244 - DNA, 25 bp, Homo sapien
tattctttcgaaatattactaacaa

SEQ ID NO: 3466245 - DNA, 25 bp, Homo sapien
catacatcagtcagctaagaaaaaa

SEQ ID NO: 3466246 - DNA, 25 bp, Homo sapien
atagtctcaagaagttaataatcac

SEQ ID NO: 3466247 - DNA, 25 bp, Homo sapien
tccgagaaccgccaagttggtacca

SEQ ID NO: 3466248 - DNA, 25 bp, Homo sapien
actgaggacgcttctgcaagcgtcc

SEQ ID NO: 3466249 - DNA, 25 bp, Homo sapien
ggcaactgaggacgcttctgcaagc

SEQ ID NO: 3466250 - DNA, 25 bp, Homo sapien
aggacgcttctgcaagcgtcctctc

SEQ ID NO: 3466251 - DNA, 25 bp, Homo sapien
tcttttcggccgctaggttcttcgc

SEQ ID NO: 3466252 - DNA, 25 bp, Homo sapien
ctgggactcttttcggccgctaggt

SEQ ID NO: 3466253 - DNA, 25 bp, Homo sapien
tcggccgctaggttcttcgctgggt

SEQ ID NO: 3466254 - DNA, 25 bp, Homo sapien
cgctaggttcttcgctgggtcccgt

SEQ ID NO: 3466255 - DNA, 25 bp, Homo sapien
ccagaactgcttagccaagttggca

SEQ ID NO: 3466256 - DNA, 25 bp, Homo sapien
tgtctctgcgcagcaccagctgaga

SEQ ID NO: 3466257 - DNA, 25 bp, Homo sapien
ttccgaggagccagcaaataccagt

SEQ ID NO: 3466258 - DNA, 25 bp, Homo sapien
gggatacatcgacgccgagatccag

SEQ ID NO: 3466259 - DNA, 25 bp, Homo sapien
ctctgctcctcctgggccgcgccac

SEQ ID NO: 3466260 - DNA, 25 bp, Homo sapien
cctctgctcctcctgggccgcgcca

SEQ ID NO: 3466261 - DNA, 25 bp, Homo sapien
tcgcaaggtgaaaagactgcgagga

SEQ ID NO: 3466262 - DNA, 25 bp, Homo sapien
aaaagactgcgaggagtggctgttt

SEQ ID NO: 3466263 - DNA, 25 bp, Homo sapien
aaagactgcgaggagtggctgtttt

SEQ ID NO: 3466264 - DNA, 25 bp, Homo sapien
tgttactcgcaaggtgaaaagactg

SEQ ID NO: 3466265 - DNA, 25 bp, Homo sapien
ctagagggaataaagtcaaattcaa

SEQ ID NO: 3466266 - DNA, 25 bp, Homo sapien
tagagggaataaagtcaaattcaat

SEQ ID NO: 3466267 - DNA, 25 bp, Homo sapien
gattcctgtatctttagggcttcgg

SEQ ID NO: 3466268 - DNA, 25 bp, Homo sapien
gggcttcggcaaagatgtctctatt

SEQ ID NO: 3466269 - DNA, 25 bp, Homo sapien
cctgtatctttagggcttcggcaaa

SEQ ID NO: 3466270 - DNA, 25 bp, Homo sapien
tcctcagattcctgtatctttaggg

SEQ ID NO: 3466271 - DNA, 25 bp, Homo sapien
tctactacactatggtgcctgtaat

SEQ ID NO: 3466272 - DNA, 25 bp, Homo sapien
gcatcccaggagttaaaccacttgc

SEQ ID NO: 3466273 - DNA, 25 bp, Homo sapien
cttacatcactctatgaggaggata

SEQ ID NO: 3466274 - DNA, 25 bp, Homo sapien
ccaggagttaaaccacttgctcaag

SEQ ID NO: 3466275 - DNA, 25 bp, Homo sapien
ttcctttggagaacatgcaatgctc

SEQ ID NO: 3466276 - DNA, 25 bp, Homo sapien
caatgctctgctcatctactgtgac

SEQ ID NO: 3466277 - DNA, 25 bp, Homo sapien
cataatgtttttgaacgtctatcaa

SEQ ID NO: 3466278 - DNA, 25 bp, Homo sapien
tgctgttaaaccttggcataatgtt

SEQ ID NO: 3466279 - DNA, 25 bp, Homo sapien
ctgaatccgagaaagttgaggctgc

SEQ ID NO: 3466280 - DNA, 25 bp, Homo sapien
agtgagccatgatcatgccactgca

SEQ ID NO: 3466281 - DNA, 25 bp, Homo sapien
catgccactgcacttcattctgggt

SEQ ID NO: 3466282 - DNA, 25 bp, Homo sapien
attctgggtgacagagtgagacctt

SEQ ID NO: 3466283 - DNA, 25 bp, Homo sapien
gagttggagaatctcttctcttgtt

SEQ ID NO: 3466284 - DNA, 25 bp, Homo sapien
taagagttggagaatctcttctctt

SEQ ID NO: 3466285 - DNA, 25 bp, Homo sapien
tcttaagagttggagaatctcttct

SEQ ID NO: 3466286 - DNA, 25 bp, Homo sapien
ggagaatctcttctcttgttttagc

SEQ ID NO: 3466287 - DNA, 25 bp, Homo sapien
tttgctttgtgttctttggcttttg

SEQ ID NO: 3466288 - DNA, 25 bp, Homo sapien
tgtgttctttggcttttggtttata

SEQ ID NO: 3466289 - DNA, 25 bp, Homo sapien
ttgctttgtgttctttggcttttgg

SEQ ID NO: 3466290 - DNA, 25 bp, Homo sapien
tgctttgtgttctttggcttttggt

SEQ ID NO: 3466291 - DNA, 25 bp, Homo sapien
cagacagacaagttcgtacacaggc

SEQ ID NO: 3466292 - DNA, 25 bp, Homo sapien
tatgctggcactttgggtgacccaa

SEQ ID NO: 3466293 - DNA, 25 bp, Homo sapien
tcaaggcttcaggatgtaggacaaa

SEQ ID NO: 3466294 - DNA, 25 bp, Homo sapien
ggtgagccacaaacacgtgctgatt

SEQ ID NO: 3466295 - DNA, 25 bp, Homo sapien
tcctctttatctgactctgatacca

SEQ ID NO: 3466296 - DNA, 25 bp, Homo sapien
tttatctgactctgataccactttc

SEQ ID NO: 3466297 - DNA, 25 bp, Homo sapien
ttcttggtcctctttatctgactct

SEQ ID NO: 3466298 - DNA, 25 bp, Homo sapien
agtccaaagttttgacttcttcttg

SEQ ID NO: 3466299 - DNA, 25 bp, Homo sapien
cctgatctaagagaaggttgtttcc

SEQ ID NO: 3466300 - DNA, 25 bp, Homo sapien
tttaacacaagtactcactaactgg

SEQ ID NO: 3466301 - DNA, 25 bp, Homo sapien
tccaaagtgaaggtataagtgagcc

SEQ ID NO: 3466302 - DNA, 25 bp, Homo sapien
cactaactggtaaaattcctggaag

SEQ ID NO: 3466303 - DNA, 25 bp, Homo sapien
agagatgtatgttgtggtgtcaaac

SEQ ID NO: 3466304 - DNA, 25 bp, Homo sapien
aaattctggaaatacccttcaaatg

SEQ ID NO: 3466305 - DNA, 25 bp, Homo sapien
tgtcaaacagtagtacccagtaagt

SEQ ID NO: 3466306 - DNA, 25 bp, Homo sapien
tgagaatgtggtaagatgaaagaga

SEQ ID NO: 3466307 - DNA, 25 bp, Homo sapien
gcagcatctctaggccaccgacgga

SEQ ID NO: 3466308 - DNA, 25 bp, Homo sapien
ctcctccagcgaggttggcgccaga

SEQ ID NO: 3466309 - DNA, 25 bp, Homo sapien
agaggcgtgcgcgacaactgcaacc

SEQ ID NO: 3466310 - DNA, 25 bp, Homo sapien
ctgggacgtcactgcgaggagggca

SEQ ID NO: 3466311 - DNA, 25 bp, Homo sapien
agcaggcgacccgtcgcggcccgca

SEQ ID NO: 3466312 - DNA, 25 bp, Homo sapien
ctcagcaggcgacccgtcgcggccc

SEQ ID NO: 3466313 - DNA, 25 bp, Homo sapien
cacggcctgtagcgcggttcccggc

SEQ ID NO: 3466314 - DNA, 25 bp, Homo sapien
cactcagcaggcgacccgtcgcggc

SEQ ID NO: 3466315 - DNA, 25 bp, Homo sapien
ttctagtcccatacgtggcgaccca

SEQ ID NO: 3466316 - DNA, 25 bp, Homo sapien
gacggccttctagtcccatacgtgg

SEQ ID NO: 3466317 - DNA, 25 bp, Homo sapien
gcatgggacggccttctagtcccat

SEQ ID NO: 3466318 - DNA, 25 bp, Homo sapien
tacgtggcgacccagaagagggtca

SEQ ID NO: 3466319 - DNA, 25 bp, Homo sapien
cagctccgggaactggcgtgggtct

SEQ ID NO: 3466320 - DNA, 25 bp, Homo sapien
gaacgcaagagactccgaagggctg

SEQ ID NO: 3466321 - DNA, 25 bp, Homo sapien
ggcttcgagcgttccaggacgcgca

SEQ ID NO: 3466322 - DNA, 25 bp, Homo sapien
cataactctggactgggaacgggct

SEQ ID NO: 3466323 - DNA, 25 bp, Homo sapien
gggccagctggcaagcctgccccgc

SEQ ID NO: 3466324 - DNA, 25 bp, Homo sapien
gggtggtcccaaggactgattcgat

SEQ ID NO: 3466325 - DNA, 25 bp, Homo sapien
ctgattcgatgcgtgtaaaggagcg

SEQ ID NO: 3466326 - DNA, 25 bp, Homo sapien
caaggactgattcgatgcgtgtaaa

SEQ ID NO: 3466327 - DNA, 25 bp, Homo sapien
gggcgctcgacccagccatccaacc

SEQ ID NO: 3466328 - DNA, 25 bp, Homo sapien
cccgcagaagagacgaggagtaaca

SEQ ID NO: 3466329 - DNA, 25 bp, Homo sapien
catccaaccccgcagaagagacgag

SEQ ID NO: 3466330 - DNA, 25 bp, Homo sapien
aaccccgcagaagagacgaggagta

SEQ ID NO: 3466331 - DNA, 25 bp, Homo sapien
gagttctttcccgatctctaagcgc

SEQ ID NO: 3466332 - DNA, 25 bp, Homo sapien
gcagagagtcattccccggagtcag

SEQ ID NO: 3466333 - DNA, 25 bp, Homo sapien
agcagagagtcattccccggagtca

SEQ ID NO: 3466334 - DNA, 25 bp, Homo sapien
gggctcgtcccacactaactggagt

SEQ ID NO: 3466335 - DNA, 25 bp, Homo sapien
gagaaaagggcacggatgttctccc

SEQ ID NO: 3466336 - DNA, 25 bp, Homo sapien
ctgagaaaagggcacggatgttctc

SEQ ID NO: 3466337 - DNA, 25 bp, Homo sapien
ccccgacatgcagaacaactgaaag

SEQ ID NO: 3466338 - DNA, 25 bp, Homo sapien
gatgttctccccccgacatgcagaa

SEQ ID NO: 3466339 - DNA, 25 bp, Homo sapien
tcttcagactcgatgctgactagct

SEQ ID NO: 3466340 - DNA, 25 bp, Homo sapien
ccatcagtccaagcataaaggtcct

SEQ ID NO: 3466341 - DNA, 25 bp, Homo sapien
tcctcaaagttcagtcttcgagaag

SEQ ID NO: 3466342 - DNA, 25 bp, Homo sapien
aaattgtgatatgctgccatcagtc

SEQ ID NO: 3466343 - DNA, 25 bp, Homo sapien
acttgaaactaaatggtgctgccac

SEQ ID NO: 3466344 - DNA, 25 bp, Homo sapien
tccacttgataaggctgatgagccc

SEQ ID NO: 3466345 - DNA, 25 bp, Homo sapien
taaagccttggatcttatggagcgt

SEQ ID NO: 3466346 - DNA, 25 bp, Homo sapien
tgtagcgccacagtaaggctctgct

SEQ ID NO: 3466347 - DNA, 25 bp, Homo sapien
tcatcattccactggaacatgtagg

SEQ ID NO: 3466348 - DNA, 25 bp, Homo sapien
tcgctgccgcaggatggctcatcca

SEQ ID NO: 3466349 - DNA, 25 bp, Homo sapien
tgccgatggctgatggtacatgacc

SEQ ID NO: 3466350 - DNA, 25 bp, Homo sapien
tcttcatgttgcaccggtcatcatt

SEQ ID NO: 3466351 - DNA, 25 bp, Homo sapien
gggcttatttcctgacgttcttgta

SEQ ID NO: 3466352 - DNA, 25 bp, Homo sapien
tgagagaagttgagaattcagccgc

SEQ ID NO: 3466353 - DNA, 25 bp, Homo sapien
gcagcagctcatgaaatgagagaag

SEQ ID NO: 3466354 - DNA, 25 bp, Homo sapien
tcctcggtgaggaattgtcattaca

SEQ ID NO: 3466355 - DNA, 25 bp, Homo sapien
cagatgctctggtgttcgtagggac

SEQ ID NO: 3466356 - DNA, 25 bp, Homo sapien
gcaatgagtctcttatgccaatcag

SEQ ID NO: 3466357 - DNA, 25 bp, Homo sapien
tcttatgccaatcagatgctctggt

SEQ ID NO: 3466358 - DNA, 25 bp, Homo sapien
ctgttgtattggcaatgagtctctt

SEQ ID NO: 3466359 - DNA, 25 bp, Homo sapien
cttctctagaaggaactgctggttt

SEQ ID NO: 3466360 - DNA, 25 bp, Homo sapien
gcttctctagaaggaactgctggtt

SEQ ID NO: 3466361 - DNA, 25 bp, Homo sapien
cagcttctctagaaggaactgctgg

SEQ ID NO: 3466362 - DNA, 25 bp, Homo sapien
cttcagcttctctagaaggaactgc

SEQ ID NO: 3466363 - DNA, 25 bp, Homo sapien
aattgggatgcaaaaaagctgtaga

SEQ ID NO: 3466364 - DNA, 25 bp, Homo sapien
gagagagacacatggacttgtgaac

SEQ ID NO: 3466365 - DNA, 25 bp, Homo sapien
cttgtgaacttgaagaaaggcataa

SEQ ID NO: 3466366 - DNA, 25 bp, Homo sapien
gaggtcctaccatgttcaaattggg

SEQ ID NO: 3466367 - DNA, 25 bp, Homo sapien
gaagtacaggtgttgtcagctctgt

SEQ ID NO: 3466368 - DNA, 25 bp, Homo sapien
aagtacaggtgttgtcagctctgtt

SEQ ID NO: 3466369 - DNA, 25 bp, Homo sapien
tggaagtacaggtgttgtcagctct

SEQ ID NO: 3466370 - DNA, 25 bp, Homo sapien
ggaagtacaggtgttgtcagctctg

SEQ ID NO: 3466371 - DNA, 25 bp, Homo sapien
catcttaggatagttccatctgcat

SEQ ID NO: 3466372 - DNA, 25 bp, Homo sapien
atcttaggatagttccatctgcata

SEQ ID NO: 3466373 - DNA, 25 bp, Homo sapien
atttccccagtcatcttaggatagt

SEQ ID NO: 3466374 - DNA, 25 bp, Homo sapien
tcttaggatagttccatctgcatat

SEQ ID NO: 3466375 - DNA, 25 bp, Homo sapien
gaaagcacatgatcagcattggctg

SEQ ID NO: 3466376 - DNA, 25 bp, Homo sapien
agaaagaaagcacatgatcagcatt

SEQ ID NO: 3466377 - DNA, 25 bp, Homo sapien
gattaggatgtaggccagattcaag

SEQ ID NO: 3466378 - DNA, 25 bp, Homo sapien
aactgtggtgaccacaaggaggagg

SEQ ID NO: 3466379 - DNA, 25 bp, Homo sapien
gatgtaggccagattcaaggcagct

SEQ ID NO: 3466380 - DNA, 25 bp, Homo sapien
actgtggtgaccacaaggaggagga

SEQ ID NO: 3466381 - DNA, 25 bp, Homo sapien
ttctacagatccaaacccaacatac

SEQ ID NO: 3466382 - DNA, 25 bp, Homo sapien
tttttctacagatccaaacccaaca

SEQ ID NO: 3466383 - DNA, 25 bp, Homo sapien
ttttctacagatccaaacccaacat

SEQ ID NO: 3466384 - DNA, 25 bp, Homo sapien
tttctacagatccaaacccaacata

SEQ ID NO: 3466385 - DNA, 25 bp, Homo sapien
ggcaatatccaaatctcaaagagag

SEQ ID NO: 3466386 - DNA, 25 bp, Homo sapien
tgatactcttggtgctgccgtgggt

SEQ ID NO: 3466387 - DNA, 25 bp, Homo sapien
tctccaatctgcaatggtgatactc

SEQ ID NO: 3466388 - DNA, 25 bp, Homo sapien
taatgaagtaaacaaggcaatatcc

SEQ ID NO: 3466389 - DNA, 25 bp, Homo sapien
agcatttttgctgggtgacgtgtga

SEQ ID NO: 3466390 - DNA, 25 bp, Homo sapien
ccacgtacagacagtaaagcaagta

SEQ ID NO: 3466391 - DNA, 25 bp, Homo sapien
gtacttctgaatgccctgacctgtc

SEQ ID NO: 3466392 - DNA, 25 bp, Homo sapien
gggcatacattcatgagagcatttt

SEQ ID NO: 3466393 - DNA, 25 bp, Homo sapien
ggttccctagagtccctggagtgtc

SEQ ID NO: 3466394 - DNA, 25 bp, Homo sapien
ccaagtgtgggcagggttattatcc

SEQ ID NO: 3466395 - DNA, 25 bp, Homo sapien
ctggagtgtccagggatagaactga

SEQ ID NO: 3466396 - DNA, 25 bp, Homo sapien
ccaaacagggagatgttatgttcaa

SEQ ID NO: 3466397 - DNA, 25 bp, Homo sapien
gaccaggtgattgagaatacccttg

SEQ ID NO: 3466398 - DNA, 25 bp, Homo sapien
ttttagaccaggtgattgagaatac

SEQ ID NO: 3466399 - DNA, 25 bp, Homo sapien
gtgattgagaatacccttgtgcttc

SEQ ID NO: 3466400 - DNA, 25 bp, Homo sapien
caggtgattgagaatacccttgtgc

SEQ ID NO: 3466401 - DNA, 25 bp, Homo sapien
ttcttcaggtctggccgggtctcag

SEQ ID NO: 3466402 - DNA, 25 bp, Homo sapien
cacagccatgttgtcatagtcacaa

SEQ ID NO: 3466403 - DNA, 25 bp, Homo sapien
gacattgtagacctctaggtccggg

SEQ ID NO: 3466404 - DNA, 25 bp, Homo sapien
cacaagacatgtcatcgggagtggc

SEQ ID NO: 3466405 - DNA, 25 bp, Homo sapien
cattttccacccatccagactcctt

SEQ ID NO: 3466406 - DNA, 25 bp, Homo sapien
ttttccacccatccagactccttac

SEQ ID NO: 3466407 - DNA, 25 bp, Homo sapien
atttcattttccacccatccagact

SEQ ID NO: 3466408 - DNA, 25 bp, Homo sapien
ttcattttccacccatccagactcc

SEQ ID NO: 3466409 - DNA, 25 bp, Homo sapien
gataaaggatacagccaaaacgtgg

SEQ ID NO: 3466410 - DNA, 25 bp, Homo sapien
tccacaggacctgatctaagcttgt

SEQ ID NO: 3466411 - DNA, 25 bp, Homo sapien
taagcttgttcatagaccttctgtg

SEQ ID NO: 3466412 - DNA, 25 bp, Homo sapien
tcataaggtcgagctggatgactgg

SEQ ID NO: 3466413 - DNA, 25 bp, Homo sapien
agcccatctttatcactgccaggta

SEQ ID NO: 3466414 - DNA, 25 bp, Homo sapien
cctgtgctaccatatgtgggctttg

SEQ ID NO: 3466415 - DNA, 25 bp, Homo sapien
cagatatgagaattgccgatgcaca

SEQ ID NO: 3466416 - DNA, 25 bp, Homo sapien
caggtaaagctctgtcccttaaaag

SEQ ID NO: 3466417 - DNA, 25 bp, Homo sapien
tcgatactgctttgacccagactag

SEQ ID NO: 3466418 - DNA, 25 bp, Homo sapien
tatcagggatgggagtacataagcc

SEQ ID NO: 3466419 - DNA, 25 bp, Homo sapien
cacagtgcaggatacagggcagatg

SEQ ID NO: 3466420 - DNA, 25 bp, Homo sapien
tcaggaccatgtgctcagtttttgc

SEQ ID NO: 3466421 - DNA, 25 bp, Homo sapien
gactctctatagagtcctgaggcag

SEQ ID NO: 3466422 - DNA, 25 bp, Homo sapien
ggttgtcttcgtccatttcctattg

SEQ ID NO: 3466423 - DNA, 25 bp, Homo sapien
gctgcatgtgggagcgtctttttgc

SEQ ID NO: 3466424 - DNA, 25 bp, Homo sapien
ggatgtcacttgtcactccggctgg

SEQ ID NO: 3466425 - DNA, 25 bp, Homo sapien
cacattctcactttgggcatcccct

SEQ ID NO: 3466426 - DNA, 25 bp, Homo sapien
catgctgaactgtttgaaattctgc

SEQ ID NO: 3466427 - DNA, 25 bp, Homo sapien
aacactcccagctcaatcatgctga

SEQ ID NO: 3466428 - DNA, 25 bp, Homo sapien
ttctgcttaggtgccacattctcac

SEQ ID NO: 3466429 - DNA, 25 bp, Homo sapien
gttatgtagttcttgaggaaaagcg

SEQ ID NO: 3466430 - DNA, 25 bp, Homo sapien
cgtggtccgggcaaactggatgcct

SEQ ID NO: 3466431 - DNA, 25 bp, Homo sapien
tagttcttgaggaaaagcgtggtcc

SEQ ID NO: 3466432 - DNA, 25 bp, Homo sapien
aaagcgtggtccgggcaaactggat

SEQ ID NO: 3466433 - DNA, 25 bp, Homo sapien
gaaaaagcctctccttcgtctctgc

SEQ ID NO: 3466434 - DNA, 25 bp, Homo sapien
agaaaaagcctctccttcgtctctg

SEQ ID NO: 3466435 - DNA, 25 bp, Homo sapien
gaaaaagctgcaagtgttccagctg

SEQ ID NO: 3466436 - DNA, 25 bp, Homo sapien
agatgagatatggagggagccttac

SEQ ID NO: 3466437 - DNA, 25 bp, Homo sapien
tggagggagccttaccagggacaaa

SEQ ID NO: 3466438 - DNA, 25 bp, Homo sapien
caaaatttctgagtatcttgaggtc

SEQ ID NO: 3466439 - DNA, 25 bp, Homo sapien
ggccgctccgcttgctccttcgctc

SEQ ID NO: 3466440 - DNA, 25 bp, Homo sapien
ccgctgctagacacggcggacagga

SEQ ID NO: 3466441 - DNA, 25 bp, Homo sapien
cttggcttgggcgacggccgctccg

SEQ ID NO: 3466442 - DNA, 25 bp, Homo sapien
ttggcagcgcggcttggcttgggcg

SEQ ID NO: 3466443 - DNA, 25 bp, Homo sapien
gtgccctcgatgtcgtagaacccca

SEQ ID NO: 3466444 - DNA, 25 bp, Homo sapien
caagtgcctcgggccatccgccatg

SEQ ID NO: 3466445 - DNA, 25 bp, Homo sapien
ctccgtcttggtgatccggtgccgc

SEQ ID NO: 3466446 - DNA, 25 bp, Homo sapien
accggcccgcgctgcaagtgcctcg

SEQ ID NO: 3466447 - DNA, 25 bp, Homo sapien
tgccccaggcaagagatcaagctag

SEQ ID NO: 3466448 - DNA, 25 bp, Homo sapien
tctgggcgaaattccgggtggccac

SEQ ID NO: 3466449 - DNA, 25 bp, Homo sapien
tattacagccagaatgcacacctgg

SEQ ID NO: 3466450 - DNA, 25 bp, Homo sapien
acgatctgaccggtgcttgttccaa

SEQ ID NO: 3466451 - DNA, 25 bp, Homo sapien
tactatttgtctggggtgccaaaaa

SEQ ID NO: 3466452 - DNA, 25 bp, Homo sapien
gacaaatactatttgtctggggtgc

SEQ ID NO: 3466453 - DNA, 25 bp, Homo sapien
aatactatttgtctggggtgccaaa

SEQ ID NO: 3466454 - DNA, 25 bp, Homo sapien
caaatactatttgtctggggtgcca

SEQ ID NO: 3466455 - DNA, 25 bp, Homo sapien
aaagtttgattatgtgagggtggtc

SEQ ID NO: 3466456 - DNA, 25 bp, Homo sapien
catccagctgagacttatcgattat

SEQ ID NO: 3466457 - DNA, 25 bp, Homo sapien
tatttgtacttctcggtagattttc

SEQ ID NO: 3466458 - DNA, 25 bp, Homo sapien
cggtagattttctcaaggttcactg

SEQ ID NO: 3466459 - DNA, 25 bp, Homo sapien
tttttggcatattctgtcacaaggt

SEQ ID NO: 3466460 - DNA, 25 bp, Homo sapien
acaacatacttttggtctccattac

SEQ ID NO: 3466461 - DNA, 25 bp, Homo sapien
ggtacaacatacttttggtctccat

SEQ ID NO: 3466462 - DNA, 25 bp, Homo sapien
tattctgtcacaaggtacaacatac

SEQ ID NO: 3466463 - DNA, 25 bp, Homo sapien
tccacctgtcgagaagtcctactga

SEQ ID NO: 3466464 - DNA, 25 bp, Homo sapien
cagtcacttctgtgctgaaatccag

SEQ ID NO: 3466465 - DNA, 25 bp, Homo sapien
aagtctgtgctcaaatgccagcgag

SEQ ID NO: 3466466 - DNA, 25 bp, Homo sapien
gagtttgaccacttaggactacctg

SEQ ID NO: 3466467 - DNA, 25 bp, Homo sapien
tagaataggcaggattcaaaacctc

SEQ ID NO: 3466468 - DNA, 25 bp, Homo sapien
caaaacctcattcaggtaggaagga

SEQ ID NO: 3466469 - DNA, 25 bp, Homo sapien
ggaagagtgaggaccctaacctgag

SEQ ID NO: 3466470 - DNA, 25 bp, Homo sapien
tcaatactgacatcaaggtttccag

SEQ ID NO: 3466471 - DNA, 25 bp, Homo sapien
taattaccaggccagaatctgctaa

SEQ ID NO: 3466472 - DNA, 25 bp, Homo sapien
aaattgtctgacgaggtgatcaccc

SEQ ID NO: 3466473 - DNA, 25 bp, Homo sapien
aattgtttgaacagcgcccaaattg

SEQ ID NO: 3466474 - DNA, 25 bp, Homo sapien
gctaactgccggtttaattgtttga

SEQ ID NO: 3466475 - DNA, 25 bp, Homo sapien
gagtagagagtcatgggaattccca

SEQ ID NO: 3466476 - DNA, 25 bp, Homo sapien
cacatctgaggctagctctgcgtag

SEQ ID NO: 3466477 - DNA, 25 bp, Homo sapien
gaacagggcaaccaaactgacctga

SEQ ID NO: 3466478 - DNA, 25 bp, Homo sapien
gaattctaggacactcagttggtac

SEQ ID NO: 3466479 - DNA, 25 bp, Homo sapien
caaatcctactcatcatttagttac

SEQ ID NO: 3466480 - DNA, 25 bp, Homo sapien
tagttacttaatgcctaggatgtgc

SEQ ID NO: 3466481 - DNA, 25 bp, Homo sapien
aaggcctcttttaactagcggacag

SEQ ID NO: 3466482 - DNA, 25 bp, Homo sapien
cctgccctcaagaaaatcacagtgg

SEQ ID NO: 3466483 - DNA, 25 bp, Homo sapien
ctaaaacgcccaatgaacagttctt

SEQ ID NO: 3466484 - DNA, 25 bp, Homo sapien
tgcctagctaattctaaaacgccca

SEQ ID NO: 3466485 - DNA, 25 bp, Homo sapien
gctaattctaaaacgcccaatgaac

SEQ ID NO: 3466486 - DNA, 25 bp, Homo sapien
tagctaattctaaaacgcccaatga

SEQ ID NO: 3466487 - DNA, 25 bp, Homo sapien
gggactactggcacaagtcaccatg

SEQ ID NO: 3466488 - DNA, 25 bp, Homo sapien
gctgggactactggcacaagtcacc

SEQ ID NO: 3466489 - DNA, 25 bp, Homo sapien
gggattacaggtgttagccaccacg

SEQ ID NO: 3466490 - DNA, 25 bp, Homo sapien
ctactggcacaagtcaccatgcccg

SEQ ID NO: 3466491 - DNA, 25 bp, Homo sapien
tcaaattcctcatacaacgtggcag

SEQ ID NO: 3466492 - DNA, 25 bp, Homo sapien
aatgcttgacactcgacaggctctg

SEQ ID NO: 3466493 - DNA, 25 bp, Homo sapien
tcactcagaaaacgagatacgtgcc

SEQ ID NO: 3466494 - DNA, 25 bp, Homo sapien
taacttcagccaggagtttagcaga

SEQ ID NO: 3466495 - DNA, 25 bp, Homo sapien
gcccggccaagctgagtactttaaa

SEQ ID NO: 3466496 - DNA, 25 bp, Homo sapien
tattcccaagtattcaaccaagaga

SEQ ID NO: 3466497 - DNA, 25 bp, Homo sapien
cacagatacaagcatcaccatggat

SEQ ID NO: 3466498 - DNA, 25 bp, Homo sapien
tgcagtctcaatgccaacatgcctg

SEQ ID NO: 3466499 - DNA, 25 bp, Homo sapien
ttttgagactgcagacttattttca

SEQ ID NO: 3466500 - DNA, 25 bp, Homo sapien
ccatttttgagactgcagacttatt

SEQ ID NO: 3466501 - DNA, 25 bp, Homo sapien
ctccatttttgagactgcagactta

SEQ ID NO: 3466502 - DNA, 25 bp, Homo sapien
ttgagactgcagacttattttcatc

SEQ ID NO: 3466503 - DNA, 25 bp, Homo sapien
ttaatgcagaggttgaaattctccc

SEQ ID NO: 3466504 - DNA, 25 bp, Homo sapien
tgcaaatacttatgagagctcctag

SEQ ID NO: 3466505 - DNA, 25 bp, Homo sapien
ccctaggtcaacttctggatatgca

SEQ ID NO: 3466506 - DNA, 25 bp, Homo sapien
gttgaaatctagttgcccagagaag

SEQ ID NO: 3466507 - DNA, 25 bp, Homo sapien
cagatgtgctcctaaaagacagagg

SEQ ID NO: 3466508 - DNA, 25 bp, Homo sapien
aagacagaggtccattaaaagtggt

SEQ ID NO: 3466509 - DNA, 25 bp, Homo sapien
tttccaattcaaactcagagtctac

SEQ ID NO: 3466510 - DNA, 25 bp, Homo sapien
aactctaacgtgaagtcagatgtgc

SEQ ID NO: 3466511 - DNA, 25 bp, Homo sapien
gacagcaatcaaattcgagtctgaa

SEQ ID NO: 3466512 - DNA, 25 bp, Homo sapien
caaagctgaaggtcaagttactgag

SEQ ID NO: 3466513 - DNA, 25 bp, Homo sapien
aaagggaagttggtgccaaagctga

SEQ ID NO: 3466514 - DNA, 25 bp, Homo sapien
tctcaatctatggttccgagaacag

SEQ ID NO: 3466515 - DNA, 25 bp, Homo sapien
tgtatccaatctgatctccaccctg

SEQ ID NO: 3466516 - DNA, 25 bp, Homo sapien
caattttaggaacctctctctgaag

SEQ ID NO: 3466517 - DNA, 25 bp, Homo sapien
tctttgcaaggcaatatgcacgttc

SEQ ID NO: 3466518 - DNA, 25 bp, Homo sapien
tgaagtagtcctctttcctacgaaa

SEQ ID NO: 3466519 - DNA, 25 bp, Homo sapien
tggaattcaaaacacacatggcaag

SEQ ID NO: 3466520 - DNA, 25 bp, Homo sapien
cattggagcttttaagagttcttcc

SEQ ID NO: 3466521 - DNA, 25 bp, Homo sapien
gaaaaagctaatttacaccacagac

SEQ ID NO: 3466522 - DNA, 25 bp, Homo sapien
taaggattcacccaatcattggagc

SEQ ID NO: 3466523 - DNA, 25 bp, Homo sapien
cacagagttcagtctagtacatgac

SEQ ID NO: 3466524 - DNA, 25 bp, Homo sapien
tatgcattctgccatgtactagaga

SEQ ID NO: 3466525 - DNA, 25 bp, Homo sapien
tctaggaaggaccataacaagagac

SEQ ID NO: 3466526 - DNA, 25 bp, Homo sapien
aagcactgggagatatgcacaggcc

SEQ ID NO: 3466527 - DNA, 25 bp, Homo sapien
ctcactgcatccttgatcaccgggc

SEQ ID NO: 3466528 - DNA, 25 bp, Homo sapien
actgcatccttgatcaccgggctca

SEQ ID NO: 3466529 - DNA, 25 bp, Homo sapien
catccttgatcaccgggctcaggtg

SEQ ID NO: 3466530 - DNA, 25 bp, Homo sapien
tgcatccttgatcaccgggctcagg

SEQ ID NO: 3466531 - DNA, 25 bp, Homo sapien
aatattccaatagcttccaaacagg

SEQ ID NO: 3466532 - DNA, 25 bp, Homo sapien
cccagtgtgccctgcaagatgttaa

SEQ ID NO: 3466533 - DNA, 25 bp, Homo sapien
caaacaggatcttacgtttccaatc

SEQ ID NO: 3466534 - DNA, 25 bp, Homo sapien
tctgctcaagaacactcctctctga

SEQ ID NO: 3466535 - DNA, 25 bp, Homo sapien
ctagactaccggactcaggtgatcc

SEQ ID NO: 3466536 - DNA, 25 bp, Homo sapien
actgcagcctagactaccggactca

SEQ ID NO: 3466537 - DNA, 25 bp, Homo sapien
cagcctagactaccggactcaggtg

SEQ ID NO: 3466538 - DNA, 25 bp, Homo sapien
tgcagcctagactaccggactcagg

SEQ ID NO: 3466539 - DNA, 25 bp, Homo sapien
cctgagctcaaggtttagtagagac

SEQ ID NO: 3466540 - DNA, 25 bp, Homo sapien
acttgccccatagtatccctggtac

SEQ ID NO: 3466541 - DNA, 25 bp, Homo sapien
tacttggttagcttagagccactgt

SEQ ID NO: 3466542 - DNA, 25 bp, Homo sapien
caagtccactattttagaagcagag

SEQ ID NO: 3466543 - DNA, 25 bp, Homo sapien
cattgtaaagcgtctactgcctgga

SEQ ID NO: 3466544 - DNA, 25 bp, Homo sapien
cacatgagaggtctgcttcagcatc

SEQ ID NO: 3466545 - DNA, 25 bp, Homo sapien
agacctcaggagaaagcacagaacc

SEQ ID NO: 3466546 - DNA, 25 bp, Homo sapien
cgacaagggtagatttaggcaaact

SEQ ID NO: 3466547 - DNA, 25 bp, Homo sapien
tgatgtcccgtccaagtgaacagcc

SEQ ID NO: 3466548 - DNA, 25 bp, Homo sapien
gattaaaggcgcaaaagtggcagca

SEQ ID NO: 3466549 - DNA, 25 bp, Homo sapien
gattaagctatcagtaccaccacgg

SEQ ID NO: 3466550 - DNA, 25 bp, Homo sapien
tgcaatgggccaatcaggacatggt

SEQ ID NO: 3466551 - DNA, 25 bp, Homo sapien
caccaaggtctgtgcccagtatgag

SEQ ID NO: 3466552 - DNA, 25 bp, Homo sapien
accaaggtctgtgcccagtatgagg

SEQ ID NO: 3466553 - DNA, 25 bp, Homo sapien
tcaccaaggtctgtgcccagtatga

SEQ ID NO: 3466554 - DNA, 25 bp, Homo sapien
ttcctcaagcagctgtatgaaggag

SEQ ID NO: 3466555 - DNA, 25 bp, Homo sapien
ccagatcttggacacatctgtggtt

SEQ ID NO: 3466556 - DNA, 25 bp, Homo sapien
gctgctgtcccagatcttggacaca

SEQ ID NO: 3466557 - DNA, 25 bp, Homo sapien
aagcagctgtatgaaggagatccag

SEQ ID NO: 3466558 - DNA, 25 bp, Homo sapien
tggatgaagcttacatgaacaaagc

SEQ ID NO: 3466559 - DNA, 25 bp, Homo sapien
ggaaaacgaatttgtcttcatcaag

SEQ ID NO: 3466560 - DNA, 25 bp, Homo sapien
gagaaggaaaacgaatttgtcttca

SEQ ID NO: 3466561 - DNA, 25 bp, Homo sapien
gaacaaagcagagctggagtctcac

SEQ ID NO: 3466562 - DNA, 25 bp, Homo sapien
aaagtaggaggatgagatcaacaag

SEQ ID NO: 3466563 - DNA, 25 bp, Homo sapien
gaaaaagtaggaggatgagatcaac

SEQ ID NO: 3466564 - DNA, 25 bp, Homo sapien
tggtgatacgcaggggcagcttgag

SEQ ID NO: 3466565 - DNA, 25 bp, Homo sapien
ggaggtggagcttggtgatacgcag

SEQ ID NO: 3466566 - DNA, 25 bp, Homo sapien
gatgagatgttcgagagccacatca

SEQ ID NO: 3466567 - DNA, 25 bp, Homo sapien
gagccacatcaacaccctttggtgg

SEQ ID NO: 3466568 - DNA, 25 bp, Homo sapien
gcaacatggatgagatgttcgagag

SEQ ID NO: 3466569 - DNA, 25 bp, Homo sapien
ttcgagagccacatcaacacccttt

SEQ ID NO: 3466570 - DNA, 25 bp, Homo sapien
acaaggcacttgagaccaagtggag

SEQ ID NO: 3466571 - DNA, 25 bp, Homo sapien
ccttcatcaacaagttgtggttcct

SEQ ID NO: 3466572 - DNA, 25 bp, Homo sapien
ttcatcaacaagttgtggttcctgg

SEQ ID NO: 3466573 - DNA, 25 bp, Homo sapien
cagcagaacaaggcacttgagacca

SEQ ID NO: 3466574 - DNA, 25 bp, Homo sapien
cattatggtaaaccagagcctgcta

SEQ ID NO: 3466575 - DNA, 25 bp, Homo sapien
ccagcataggtctgagtggaggcta

SEQ ID NO: 3466576 - DNA, 25 bp, Homo sapien
ggggggcatcacagccattatggta

SEQ ID NO: 3466577 - DNA, 25 bp, Homo sapien
gctaagctcttttaagctggaagtg

SEQ ID NO: 3466578 - DNA, 25 bp, Homo sapien
ctgctcctccacgagcaggcctggt

SEQ ID NO: 3466579 - DNA, 25 bp, Homo sapien
tgctcctccacgagcaggcctggtg

SEQ ID NO: 3466580 - DNA, 25 bp, Homo sapien
tattcagggatctaacaaggcagga

SEQ ID NO: 3466581 - DNA, 25 bp, Homo sapien
gaaaatatctgattgctagacgcca

SEQ ID NO: 3466582 - DNA, 25 bp, Homo sapien
tgtgccaaaacaggagtactcagag

SEQ ID NO: 3466583 - DNA, 25 bp, Homo sapien
ccaagaggcccacaggaaagtcaaa

SEQ ID NO: 3466584 - DNA, 25 bp, Homo sapien
tgtgtaggcatggttctgaagaatc

SEQ ID NO: 3466585 - DNA, 25 bp, Homo sapien
gatccaataccagaaacatagggag

SEQ ID NO: 3466586 - DNA, 25 bp, Homo sapien
cctaaatcaagggagcaataaaaga

SEQ ID NO: 3466587 - DNA, 25 bp, Homo sapien
tctccaagttcaatactgggaaagg

SEQ ID NO: 3466588 - DNA, 25 bp, Homo sapien
aagtttcctctcagaaagaagtcac

SEQ ID NO: 3466589 - DNA, 25 bp, Homo sapien
gccccattaagtaagatgatgtaga

SEQ ID NO: 3466590 - DNA, 25 bp, Homo sapien
ggaactattcatgcggactacatta

SEQ ID NO: 3466591 - DNA, 25 bp, Homo sapien
gatgatgtagaaaagactagtctca

SEQ ID NO: 3466592 - DNA, 25 bp, Homo sapien
cttctcatttagtgcctgtctcagg

SEQ ID NO: 3466593 - DNA, 25 bp, Homo sapien
agataccttaacagtctggccttgg

SEQ ID NO: 3466594 - DNA, 25 bp, Homo sapien
tcatgtggctaacctttgatctgct

SEQ ID NO: 3466595 - DNA, 25 bp, Homo sapien
tcattaccccagtcaagagatacct

SEQ ID NO: 3466596 - DNA, 25 bp, Homo sapien
tcgaacgagcatgcagttttgggag

SEQ ID NO: 3466597 - DNA, 25 bp, Homo sapien
gtcctcttcgaacgagcatgcagtt

SEQ ID NO: 3466598 - DNA, 25 bp, Homo sapien
cctcttcgaacgagcatgcagtttt

SEQ ID NO: 3466599 - DNA, 25 bp, Homo sapien
tcttcgaacgagcatgcagttttgg

SEQ ID NO: 3466600 - DNA, 25 bp, Homo sapien
agacttgtgctctaaaccaaacatt

SEQ ID NO: 3466601 - DNA, 25 bp, Homo sapien
cttgtgctctaaaccaaacattgtc

SEQ ID NO: 3466602 - DNA, 25 bp, Homo sapien
gtgctctaaaccaaacattgtcatg

SEQ ID NO: 3466603 - DNA, 25 bp, Homo sapien
gctctaaaccaaacattgtcatgac

SEQ ID NO: 3466604 - DNA, 25 bp, Homo sapien
tgttcgaaagaattctcgtctaccc

SEQ ID NO: 3466605 - DNA, 25 bp, Homo sapien
ttcgaaagaattctcgtctacccaa

SEQ ID NO: 3466606 - DNA, 25 bp, Homo sapien
gctgttcgaaagaattctcgtctac

SEQ ID NO: 3466607 - DNA, 25 bp, Homo sapien
gtgctgttcgaaagaattctcgtct

SEQ ID NO: 3466608 - DNA, 25 bp, Homo sapien
gattttcagctttgaggtcacggtg

SEQ ID NO: 3466609 - DNA, 25 bp, Homo sapien
ggtgcacaatcttccgaccatgaca

SEQ ID NO: 3466610 - DNA, 25 bp, Homo sapien
taatcaacagcagacaggatttgcc

SEQ ID NO: 3466611 - DNA, 25 bp, Homo sapien
taaccggccatgattagcaagatag

SEQ ID NO: 3466612 - DNA, 25 bp, Homo sapien
tcttattagagccagttgtgtccca

SEQ ID NO: 3466613 - DNA, 25 bp, Homo sapien
ttcggatcttattagagccagttgt

SEQ ID NO: 3466614 - DNA, 25 bp, Homo sapien
ttagagccagttgtgtcccagttac

SEQ ID NO: 3466615 - DNA, 25 bp, Homo sapien
gatcttattagagccagttgtgtcc

SEQ ID NO: 3466616 - DNA, 25 bp, Homo sapien
acactcagataaatgtacctcttcc

SEQ ID NO: 3466617 - DNA, 25 bp, Homo sapien
cagcaaccagcattactcctccagc

SEQ ID NO: 3466618 - DNA, 25 bp, Homo sapien
ctgacactcagataaatgtacctct

SEQ ID NO: 3466619 - DNA, 25 bp, Homo sapien
agcaaccagcattactcctccagcc

SEQ ID NO: 3466620 - DNA, 25 bp, Homo sapien
cagtcataattaggagagcaggcca

SEQ ID NO: 3466621 - DNA, 25 bp, Homo sapien
gtcataattaggagagcaggccaga

SEQ ID NO: 3466622 - DNA, 25 bp, Homo sapien
agtcataattaggagagcaggccag

SEQ ID NO: 3466623 - DNA, 25 bp, Homo sapien
tcagtcataattaggagagcaggcc

SEQ ID NO: 3466624 - DNA, 25 bp, Homo sapien
cacagactatagaatggaaaatcca

SEQ ID NO: 3466625 - DNA, 25 bp, Homo sapien
caaacatgagggttttaccttatat

SEQ ID NO: 3466626 - DNA, 25 bp, Homo sapien
ttacaccatatacagcaaaccgagg

SEQ ID NO: 3466627 - DNA, 25 bp, Homo sapien
gccttcccctaattgcctaagacaa

SEQ ID NO: 3466628 - DNA, 25 bp, Homo sapien
cagtgagggcccaattaaatgtgag

SEQ ID NO: 3466629 - DNA, 25 bp, Homo sapien
tagacatactatagccaggcaaaac

SEQ ID NO: 3466630 - DNA, 25 bp, Homo sapien
taactggcaatagctaagcggctcc

SEQ ID NO: 3466631 - DNA, 25 bp, Homo sapien
gaaacactgatttgacccacgtata

SEQ ID NO: 3466632 - DNA, 25 bp, Homo sapien
tccatggctcattagtgtctcaagt

SEQ ID NO: 3466633 - DNA, 25 bp, Homo sapien
catggttgaggcaatgagtacacac

SEQ ID NO: 3466634 - DNA, 25 bp, Homo sapien
caatatacaagatggctaaagcagt

SEQ ID NO: 3466635 - DNA, 25 bp, Homo sapien
cactggtgtgggtgaatccatggct

SEQ ID NO: 3466636 - DNA, 25 bp, Homo sapien
gattccacattgcatttagcctcat

SEQ ID NO: 3466637 - DNA, 25 bp, Homo sapien
aaacatttatgccatgccacgtggc

SEQ ID NO: 3466638 - DNA, 25 bp, Homo sapien
gaaaacaatcacttgggcattcgtc

SEQ ID NO: 3466639 - DNA, 25 bp, Homo sapien
ggcattcgtctctctctctaccaga

SEQ ID NO: 3466640 - DNA, 25 bp, Homo sapien
tctattagctatgcaatcttggaca

SEQ ID NO: 3466641 - DNA, 25 bp, Homo sapien
tcagactaagttcctcgggagcagg

SEQ ID NO: 3466642 - DNA, 25 bp, Homo sapien
caacagctgctcgataaagatctgc

SEQ ID NO: 3466643 - DNA, 25 bp, Homo sapien
tattttgccagaggttatacagcta

SEQ ID NO: 3466644 - DNA, 25 bp, Homo sapien
caatattacatgtgctgaggtcttc

SEQ ID NO: 3466645 - DNA, 25 bp, Homo sapien
tctcatagtacacttcacaggcaag

SEQ ID NO: 3466646 - DNA, 25 bp, Homo sapien
caggagcccttatagagccacttca

SEQ ID NO: 3466647 - DNA, 25 bp, Homo sapien
tggacccgtggtagcccagtttcaa

SEQ ID NO: 3466648 - DNA, 25 bp, Homo sapien
ggatggaaataaatgttattttcat

SEQ ID NO: 3466649 - DNA, 25 bp, Homo sapien
attaggatggaaataaatgttattt

SEQ ID NO: 3466650 - DNA, 25 bp, Homo sapien
taggatggaaataaatgttattttc

SEQ ID NO: 3466651 - DNA, 25 bp, Homo sapien
ctattaggatggaaataaatgttat

SEQ ID NO: 3466652 - DNA, 25 bp, Homo sapien
gccagcagttcaccacttttaaaga

SEQ ID NO: 3466653 - DNA, 25 bp, Homo sapien
ggtccttcatactgctgcccttcaa

SEQ ID NO: 3466654 - DNA, 25 bp, Homo sapien
ccagctgtggtccttcatactgctg

SEQ ID NO: 3466655 - DNA, 25 bp, Homo sapien
aaggggggctgccacaccatgttgc

SEQ ID NO: 3466656 - DNA, 25 bp, Homo sapien
gaatccggaatcttccttccagaac

SEQ ID NO: 3466657 - DNA, 25 bp, Homo sapien
cttctgacatgaaatacggaatccg

SEQ ID NO: 3466658 - DNA, 25 bp, Homo sapien
agagtcggtccatcaaagggcagag

SEQ ID NO: 3466659 - DNA, 25 bp, Homo sapien
gaaccctctgcctcaaaattggaag

SEQ ID NO: 3466660 - DNA, 25 bp, Homo sapien
aagaatcaccttgcacttcagggtt

SEQ ID NO: 3466661 - DNA, 25 bp, Homo sapien
cacaatgttacaaaagtcacaagaa

SEQ ID NO: 3466662 - DNA, 25 bp, Homo sapien
tgcacttcagggttatttgcttgac

SEQ ID NO: 3466663 - DNA, 25 bp, Homo sapien
tgactcatgtgactttgtacaaggg

SEQ ID NO: 3466664 - DNA, 25 bp, Homo sapien
catccttcggataaggtgctcgcaa

SEQ ID NO: 3466665 - DNA, 25 bp, Homo sapien
tagccgtttggatgggtctaggacc

SEQ ID NO: 3466666 - DNA, 25 bp, Homo sapien
tgctcattaaactccccgatggatg

SEQ ID NO: 3466667 - DNA, 25 bp, Homo sapien
gctgtgcatcagtcgcagaacctgc

SEQ ID NO: 3466668 - DNA, 25 bp, Homo sapien
caggcgctccaccaacaagaaataa

SEQ ID NO: 3466669 - DNA, 25 bp, Homo sapien
gaaactgctccgatgtgatttcagg

SEQ ID NO: 3466670 - DNA, 25 bp, Homo sapien
gacgctggcggccatcaagtctctg

SEQ ID NO: 3466671 - DNA, 25 bp, Homo sapien
tcagcaatggtgctaggccgacgct

SEQ ID NO: 3466672 - DNA, 25 bp, Homo sapien
agtacgtataacaaaatataccatt

SEQ ID NO: 3466673 - DNA, 25 bp, Homo sapien
aagtacgtataacaaaatataccat

SEQ ID NO: 3466674 - DNA, 25 bp, Homo sapien
ggaaagagttccactacgtcttaca

SEQ ID NO: 3466675 - DNA, 25 bp, Homo sapien
ttctcggtcttgaaagcaataccat

SEQ ID NO: 3466676 - DNA, 25 bp, Homo sapien
ttcgaagatttccaagtgctcaaag

SEQ ID NO: 3466677 - DNA, 25 bp, Homo sapien
ttgtctagtggcatttgcaagaagg

SEQ ID NO: 3466678 - DNA, 25 bp, Homo sapien
aactaggctatgaacttcttaaggg

SEQ ID NO: 3466679 - DNA, 25 bp, Homo sapien
gcaactgtgccctgtcataatgggt

SEQ ID NO: 3466680 - DNA, 25 bp, Homo sapien
agcaactgtttccagggtacttctg

SEQ ID NO: 3466681 - DNA, 25 bp, Homo sapien
cataatgggtattttgtaactaggc

SEQ ID NO: 3466682 - DNA, 25 bp, Homo sapien
cagcctcatgttcggtgaatgcatg

SEQ ID NO: 3466683 - DNA, 25 bp, Homo sapien
gtgaatgcatggtcactgggagccc

SEQ ID NO: 3466684 - DNA, 25 bp, Homo sapien
agggcagatcgcagcagcctcatgt

SEQ ID NO: 3466685 - DNA, 25 bp, Homo sapien
catgttcggtgaatgcatggtcact

SEQ ID NO: 3466686 - DNA, 25 bp, Homo sapien
tttggagtgtccacacactcttctt

SEQ ID NO: 3466687 - DNA, 25 bp, Homo sapien
cacactcttcttccatgaatgcagc

SEQ ID NO: 3466688 - DNA, 25 bp, Homo sapien
atgcagcttccgcctgacagccaga

SEQ ID NO: 3466689 - DNA, 25 bp, Homo sapien
aaatgaaaaggcctccacgttggat

SEQ ID NO: 3466690 - DNA, 25 bp, Homo sapien
gacggcccatcattttgtacctgag

SEQ ID NO: 3466691 - DNA, 25 bp, Homo sapien
tacctgaggtacctatgcagaagag

SEQ ID NO: 3466692 - DNA, 25 bp, Homo sapien
taaacactgacaagagttgagcctg

SEQ ID NO: 3466693 - DNA, 25 bp, Homo sapien
gaaatctctcgccaaactgccagtt

SEQ ID NO: 3466694 - DNA, 25 bp, Homo sapien
agaggcagagttcatgtctcactca

SEQ ID NO: 3466695 - DNA, 25 bp, Homo sapien
ctaggctatagtggactctggagag

SEQ ID NO: 3466696 - DNA, 25 bp, Homo sapien
ctgctaggctatagtggactctgga

SEQ ID NO: 3466697 - DNA, 25 bp, Homo sapien
tggagaggcagagttcatgtctcac

SEQ ID NO: 3466698 - DNA, 25 bp, Homo sapien
cattttcagggtctaccctcacagt

SEQ ID NO: 3466699 - DNA, 25 bp, Homo sapien
tcagaccttgtgtgtactacctttg

SEQ ID NO: 3466700 - DNA, 25 bp, Homo sapien
gtagacacgaaacacctccactgtg

SEQ ID NO: 3466701 - DNA, 25 bp, Homo sapien
tccagctatgaagggggtaattcgg

SEQ ID NO: 3466702 - DNA, 25 bp, Homo sapien
gtcacttctgacagagtgtgccgtc

SEQ ID NO: 3466703 - DNA, 25 bp, Homo sapien
caggcatcacgaccagttgattggt

SEQ ID NO: 3466704 - DNA, 25 bp, Homo sapien
agcccttcgtcaatggaggtctcca

SEQ ID NO: 3466705 - DNA, 25 bp, Homo sapien
tgggcagtgactggcatcccttccg

SEQ ID NO: 3466706 - DNA, 25 bp, Homo sapien
acagaccccatatcatactcagagt

SEQ ID NO: 3466707 - DNA, 25 bp, Homo sapien
tcagagtccacactgtcaagggagg

SEQ ID NO: 3466708 - DNA, 25 bp, Homo sapien
gattggctaacatgatgtccttaag

SEQ ID NO: 3466709 - DNA, 25 bp, Homo sapien
ggtccctctgaacagaccccatatc

SEQ ID NO: 3466710 - DNA, 25 bp, Homo sapien
acctgttgtggacctctcgtttctg

SEQ ID NO: 3466711 - DNA, 25 bp, Homo sapien
gagacctgttgtggacctctcgttt

SEQ ID NO: 3466712 - DNA, 25 bp, Homo sapien
ctgggttggtaggtctcaggcttat

SEQ ID NO: 3466713 - DNA, 25 bp, Homo sapien
ctcaggcttatgaagggagatgtca

SEQ ID NO: 3466714 - DNA, 25 bp, Homo sapien
tgagggaggtatctgatgctctgcg

SEQ ID NO: 3466715 - DNA, 25 bp, Homo sapien
gggtgagggaggtatctgatgctct

SEQ ID NO: 3466716 - DNA, 25 bp, Homo sapien
ctgggtgagggaggtatctgatgct

SEQ ID NO: 3466717 - DNA, 25 bp, Homo sapien
ggaggtatctgatgctctgcggccc

SEQ ID NO: 3466718 - DNA, 25 bp, Homo sapien
gcctccggtcctatttgttcataca

SEQ ID NO: 3466719 - DNA, 25 bp, Homo sapien
caacaactgcactttgttcaactct

SEQ ID NO: 3466720 - DNA, 25 bp, Homo sapien
ccggcgccaggttagggtctgcctc

SEQ ID NO: 3466721 - DNA, 25 bp, Homo sapien
cctttggttctagccagattctgaa

SEQ ID NO: 3466722 - DNA, 25 bp, Homo sapien
gagagtggagacgctttcctgctgc

SEQ ID NO: 3466723 - DNA, 25 bp, Homo sapien
agagtggagacgctttcctgctgct

SEQ ID NO: 3466724 - DNA, 25 bp, Homo sapien
agggagagtggagacgctttcctgc

SEQ ID NO: 3466725 - DNA, 25 bp, Homo sapien
ggagagtggagacgctttcctgctg

SEQ ID NO: 3466726 - DNA, 25 bp, Homo sapien
agctgctgctcaaggctccgcggtg

SEQ ID NO: 3466727 - DNA, 25 bp, Homo sapien
tgttctgggcctttgacagaaggct

SEQ ID NO: 3466728 - DNA, 25 bp, Homo sapien
aaggctccgcggtggttctttgcaa

SEQ ID NO: 3466729 - DNA, 25 bp, Homo sapien
aataaagctgacaggtgttctgggc

SEQ ID NO: 3466730 - DNA, 25 bp, Homo sapien
ctagtcataccccaaagaggaaacg

SEQ ID NO: 3466731 - DNA, 25 bp, Homo sapien
tatctgcatctgattaaaataggcc

SEQ ID NO: 3466732 - DNA, 25 bp, Homo sapien
tctgctatctgcatctgattaaaat

SEQ ID NO: 3466733 - DNA, 25 bp, Homo sapien
cctgcagttgagactgcttctgaag

SEQ ID NO: 3466734 - DNA, 25 bp, Homo sapien
tctgaagaaagagtcgcttctgctg

SEQ ID NO: 3466735 - DNA, 25 bp, Homo sapien
gaaggcggtggagtctcctggcggg

SEQ ID NO: 3466736 - DNA, 25 bp, Homo sapien
caggctgaacggtggggcctgctga

SEQ ID NO: 3466737 - DNA, 25 bp, Homo sapien
gctgagaaggcggtggagtctcctg

SEQ ID NO: 3466738 - DNA, 25 bp, Homo sapien
tgggtcaggctgaacggtggggcct

SEQ ID NO: 3466739 - DNA, 25 bp, Homo sapien
tattgcatctgctcggaggaaggct

SEQ ID NO: 3466740 - DNA, 25 bp, Homo sapien
tgcatctgctcggaggaaggctcca

SEQ ID NO: 3466741 - DNA, 25 bp, Homo sapien
catctgctcggaggaaggctccagg

SEQ ID NO: 3466742 - DNA, 25 bp, Homo sapien
ctgtattgcatctgctcggaggaag

SEQ ID NO: 3466743 - DNA, 25 bp, Homo sapien
tgctgtagctgcgtgggcagaggag

SEQ ID NO: 3466744 - DNA, 25 bp, Homo sapien
gctgctgtagctgcgtgggcagagg

SEQ ID NO: 3466745 - DNA, 25 bp, Homo sapien
gctgtagctgcgtgggcagaggagg

SEQ ID NO: 3466746 - DNA, 25 bp, Homo sapien
ctgctgctgtagctgcgtgggcaga

SEQ ID NO: 3466747 - DNA, 25 bp, Homo sapien
gagggggtggtggcggtggcggctg

SEQ ID NO: 3466748 - DNA, 25 bp, Homo sapien
tggtggagggggtggtggcggtggc

SEQ ID NO: 3466749 - DNA, 25 bp, Homo sapien
ctcctggctgtcgtggtggtggagg

SEQ ID NO: 3466750 - DNA, 25 bp, Homo sapien
tcctggctgtcgtggtggtggaggg

SEQ ID NO: 3466751 - DNA, 25 bp, Homo sapien
gcttggcagctcacaagtctgatag

SEQ ID NO: 3466752 - DNA, 25 bp, Homo sapien
caagtctgataggagaactgtaagg

SEQ ID NO: 3466753 - DNA, 25 bp, Homo sapien
agcgcttggcagctcacaagtctga

SEQ ID NO: 3466754 - DNA, 25 bp, Homo sapien
gcagctcacaagtctgataggagaa

SEQ ID NO: 3466755 - DNA, 25 bp, Homo sapien
cgttaggtcgctctgctgggctcca

SEQ ID NO: 3466756 - DNA, 25 bp, Homo sapien
tcaaagagtccaggtagctcagaga

SEQ ID NO: 3466757 - DNA, 25 bp, Homo sapien
agtctggccccgttaggtcgctctg

SEQ ID NO: 3466758 - DNA, 25 bp, Homo sapien
cacagcgtctagcatttcacaatca

SEQ ID NO: 3466759 - DNA, 25 bp, Homo sapien
tggctcgatttctccccgttaggga

SEQ ID NO: 3466760 - DNA, 25 bp, Homo sapien
taggattcaatgacaaagcacagct

SEQ ID NO: 3466761 - DNA, 25 bp, Homo sapien
tatgcaatagcacacaccctttctg

SEQ ID NO: 3466762 - DNA, 25 bp, Homo sapien
tcagtgctgccctcgagagcttgct

SEQ ID NO: 3466763 - DNA, 25 bp, Homo sapien
ctgcttccgaatggagatgaaggcg

SEQ ID NO: 3466764 - DNA, 25 bp, Homo sapien
ttccgaatggagatgaaggcggttt

SEQ ID NO: 3466765 - DNA, 25 bp, Homo sapien
cttccgaatggagatgaaggcggtt

SEQ ID NO: 3466766 - DNA, 25 bp, Homo sapien
tgcttccgaatggagatgaaggcgg

SEQ ID NO: 3466767 - DNA, 25 bp, Homo sapien
cctctggagtcctgagtatattctg

SEQ ID NO: 3466768 - DNA, 25 bp, Homo sapien
gggtctcctgtcagttccacgtgtg

SEQ ID NO: 3466769 - DNA, 25 bp, Homo sapien
cagggctggtgctcttgatgcgttc

SEQ ID NO: 3466770 - DNA, 25 bp, Homo sapien
tatattctgacactcggcaacccag

SEQ ID NO: 3466771 - DNA, 25 bp, Homo sapien
cttcacatgggacagaaaagttcat

SEQ ID NO: 3466772 - DNA, 25 bp, Homo sapien
ttacatcggaaaagagacaacaggt

SEQ ID NO: 3466773 - DNA, 25 bp, Homo sapien
tctaagccctatatgaaactgtcca

SEQ ID NO: 3466774 - DNA, 25 bp, Homo sapien
cagatgatctgcttaaatggttaac

SEQ ID NO: 3466775 - DNA, 25 bp, Homo sapien
tcaagttaccgacgttggtaggagc

SEQ ID NO: 3466776 - DNA, 25 bp, Homo sapien
gatgcagcatcagttagtccctctc

SEQ ID NO: 3466777 - DNA, 25 bp, Homo sapien
ggctcgcatggccagaatggaaccc

SEQ ID NO: 3466778 - DNA, 25 bp, Homo sapien
ttaacactgactttgtaacacctgg

SEQ ID NO: 3466779 - DNA, 25 bp, Homo sapien
tgcgaagcatcctggcacccatggt

SEQ ID NO: 3466780 - DNA, 25 bp, Homo sapien
tgagcacagtgcctctgcgaagcat

SEQ ID NO: 3466781 - DNA, 25 bp, Homo sapien
gacaccaagtccaaccgtgagcaca

SEQ ID NO: 3466782 - DNA, 25 bp, Homo sapien
tcactgtgtgttattaaatcacaaa

SEQ ID NO: 3466783 - DNA, 25 bp, Homo sapien
aatcatcaatcttaagcacgagcag

SEQ ID NO: 3466784 - DNA, 25 bp, Homo sapien
cgagcaggaataaacaactcccaga

SEQ ID NO: 3466785 - DNA, 25 bp, Homo sapien
tctttatttcacgaaatcatcaatc

SEQ ID NO: 3466786 - DNA, 25 bp, Homo sapien
catcaatcttaagcacgagcaggaa

SEQ ID NO: 3466787 - DNA, 25 bp, Homo sapien
tccttcagtctaaacaaatcaagcc

SEQ ID NO: 3466788 - DNA, 25 bp, Homo sapien
gagtggcccccattttcaatctgca

SEQ ID NO: 3466789 - DNA, 25 bp, Homo sapien
tttaatatcgcaaatattgtagcac

SEQ ID NO: 3466790 - DNA, 25 bp, Homo sapien
ggcaggagtttatgtcgatctgtaa

SEQ ID NO: 3466791 - DNA, 25 bp, Homo sapien
tctgggtccttaaccttccagtagc

SEQ ID NO: 3466792 - DNA, 25 bp, Homo sapien
cgtgtgtgacggatcctgataggcc

SEQ ID NO: 3466793 - DNA, 25 bp, Homo sapien
gtccacgccgctgccgtgtgtgacg

SEQ ID NO: 3466794 - DNA, 25 bp, Homo sapien
tcatcggctggcctaaccgtcctgc

SEQ ID NO: 3466795 - DNA, 25 bp, Homo sapien
tctgcttgaaataaacaagataagc

SEQ ID NO: 3466796 - DNA, 25 bp, Homo sapien
ttctgcttgaaataaacaagataag

SEQ ID NO: 3466797 - DNA, 25 bp, Homo sapien
acaagataagcaaataggagcttac

SEQ ID NO: 3466798 - DNA, 25 bp, Homo sapien
ataaacaagataagcaaataggagc

SEQ ID NO: 3466799 - DNA, 25 bp, Homo sapien
tttcccacggtgacagaaggcagtg

SEQ ID NO: 3466800 - DNA, 25 bp, Homo sapien
tacttcagagtagccccgcagaaaa

SEQ ID NO: 3466801 - DNA, 25 bp, Homo sapien
tggagatactagagacacacttgcc

SEQ ID NO: 3466802 - DNA, 25 bp, Homo sapien
tcaccgggaatgtgaaagtgggccc

SEQ ID NO: 3466803 - DNA, 25 bp, Homo sapien
taaacacttgggagttcttgatatc

SEQ ID NO: 3466804 - DNA, 25 bp, Homo sapien
cactgactccagcatacggtttaaa

SEQ ID NO: 3466805 - DNA, 25 bp, Homo sapien
gggctcctgtctgtcccaaccactg

SEQ ID NO: 3466806 - DNA, 25 bp, Homo sapien
tcttgatatctgaggaagaaagggc

SEQ ID NO: 3466807 - DNA, 25 bp, Homo sapien
ccaatagggagcttaaatgtgactg

SEQ ID NO: 3466808 - DNA, 25 bp, Homo sapien
ctaacccgtgggcagaattctgtga

SEQ ID NO: 3466809 - DNA, 25 bp, Homo sapien
gatcacctaatcactctggagctga

SEQ ID NO: 3466810 - DNA, 25 bp, Homo sapien
tgcctttaggactgatgacactcgg

SEQ ID NO: 3466811 - DNA, 25 bp, Homo sapien
caacaaaatgatcaaagatccctgc

SEQ ID NO: 3466812 - DNA, 25 bp, Homo sapien
gaagcaacaaaatgatcaaagatcc

SEQ ID NO: 3466813 - DNA, 25 bp, Homo sapien
tccagaagcaacaaaatgatcaaag

SEQ ID NO: 3466814 - DNA, 25 bp, Homo sapien
attaaataaattccagaagcaacaa

SEQ ID NO: 3466815 - DNA, 25 bp, Homo sapien
gctactggaaggtgagaggctccac

SEQ ID NO: 3466816 - DNA, 25 bp, Homo sapien
gacaagggctctgacattacaggtg

SEQ ID NO: 3466817 - DNA, 25 bp, Homo sapien
cacgtaggatggctgtcttctagaa

SEQ ID NO: 3466818 - DNA, 25 bp, Homo sapien
gaccacactgtagaacctgtcagaa

SEQ ID NO: 3466819 - DNA, 25 bp, Homo sapien
tgctgccgcctggttctctatctgt

SEQ ID NO: 3466820 - DNA, 25 bp, Homo sapien
cctgggtgggtctgcgagcactgct

SEQ ID NO: 3466821 - DNA, 25 bp, Homo sapien
tgcctgagtctgctgataggttgaa

SEQ ID NO: 3466822 - DNA, 25 bp, Homo sapien
tgggtctgcgagcactgctgccgcc

SEQ ID NO: 3466823 - DNA, 25 bp, Homo sapien
gatgcggccccttggcaattgagga

SEQ ID NO: 3466824 - DNA, 25 bp, Homo sapien
tgaggtgagcctaaacttctgcagt

SEQ ID NO: 3466825 - DNA, 25 bp, Homo sapien
taaggacagtatctccccagctaat

SEQ ID NO: 3466826 - DNA, 25 bp, Homo sapien
tgttacgcccctcgttgagacaaag

SEQ ID NO: 3466827 - DNA, 25 bp, Homo sapien
agcagcagcccattatctgcactgg

SEQ ID NO: 3466828 - DNA, 25 bp, Homo sapien
cacccatggtggaaaggtctcacca

SEQ ID NO: 3466829 - DNA, 25 bp, Homo sapien
cccatggtggaaaggtctcaccact

SEQ ID NO: 3466830 - DNA, 25 bp, Homo sapien
aaggtctcaccacttgaatttcctt

SEQ ID NO: 3466831 - DNA, 25 bp, Homo sapien
aggtctcaccacttgaatttccttg

SEQ ID NO: 3466832 - DNA, 25 bp, Homo sapien
tttccccttcagagattttggtgaa

SEQ ID NO: 3466833 - DNA, 25 bp, Homo sapien
taataccaaagctactgaactcacc

SEQ ID NO: 3466834 - DNA, 25 bp, Homo sapien
gcagtccccgaagtgaagcaaacct

SEQ ID NO: 3466835 - DNA, 25 bp, Homo sapien
tctttcagaccaaacatccagcaaa

SEQ ID NO: 3466836 - DNA, 25 bp, Homo sapien
tgttattttgcctgcgtcctggggc

SEQ ID NO: 3466837 - DNA, 25 bp, Homo sapien
tttgcctgcgtcctggggcattgga

SEQ ID NO: 3466838 - DNA, 25 bp, Homo sapien
ggttggggcctagctggccactggt

SEQ ID NO: 3466839 - DNA, 25 bp, Homo sapien
ggagtgcggggttggggcctagctg

SEQ ID NO: 3466840 - DNA, 25 bp, Homo sapien
ggagccttcgactcacaaaggctgc

SEQ ID NO: 3466841 - DNA, 25 bp, Homo sapien
gctggagccttcgactcacaaaggc

SEQ ID NO: 3466842 - DNA, 25 bp, Homo sapien
cctgctggagccttcgactcacaaa

SEQ ID NO: 3466843 - DNA, 25 bp, Homo sapien
tgctggagccttcgactcacaaagg

SEQ ID NO: 3466844 - DNA, 25 bp, Homo sapien
gggatctctgagtcctcgatttaag

SEQ ID NO: 3466845 - DNA, 25 bp, Homo sapien
tcgccaggaacagaaccttgggccc

SEQ ID NO: 3466846 - DNA, 25 bp, Homo sapien
agtcctcgatttaagatctagtggg

SEQ ID NO: 3466847 - DNA, 25 bp, Homo sapien
gccaggaacagaaccttgggccctg

SEQ ID NO: 3466848 - DNA, 25 bp, Homo sapien
ggctcggctccaggggaagtccgct

SEQ ID NO: 3466849 - DNA, 25 bp, Homo sapien
gaagctcaatccctaatgcctcatt

SEQ ID NO: 3466850 - DNA, 25 bp, Homo sapien
ttgagaagctcaatccctaatgcct

SEQ ID NO: 3466851 - DNA, 25 bp, Homo sapien
cctttgagaagctcaatccctaatg

SEQ ID NO: 3466852 - DNA, 25 bp, Homo sapien
gaaggcagttctggcggatcccaga

SEQ ID NO: 3466853 - DNA, 25 bp, Homo sapien
tcctcagggtctgatttgtcagtca

SEQ ID NO: 3466854 - DNA, 25 bp, Homo sapien
ggcactgctaagcatttgggctctg

SEQ ID NO: 3466855 - DNA, 25 bp, Homo sapien
gctctgtagcgactggaaggcagtt

SEQ ID NO: 3466856 - DNA, 25 bp, Homo sapien
cactggagcttgacctaacagttgg

SEQ ID NO: 3466857 - DNA, 25 bp, Homo sapien
gcttgacctaacagttggagataaa

SEQ ID NO: 3466858 - DNA, 25 bp, Homo sapien
gagctgtccgcacaaaaagactccc

SEQ ID NO: 3466859 - DNA, 25 bp, Homo sapien
gcctaggggccgagctgtccgcaca

SEQ ID NO: 3466860 - DNA, 25 bp, Homo sapien
gatgtcacatgtgtccacccaggca

SEQ ID NO: 3466861 - DNA, 25 bp, Homo sapien
ccttgaagtctgtggaggtgcctct

SEQ ID NO: 3466862 - DNA, 25 bp, Homo sapien
actcctggacgggacacagggtgcc

SEQ ID NO: 3466863 - DNA, 25 bp, Homo sapien
agcgagggtcacctcccacaccttg

SEQ ID NO: 3466864 - DNA, 25 bp, Homo sapien
tggtcagggacagttacagcgccac

SEQ ID NO: 3466865 - DNA, 25 bp, Homo sapien
tcctgtgaaggacagtggagaaccc

SEQ ID NO: 3466866 - DNA, 25 bp, Homo sapien
cattgcgtcggaaagccaagccatt

SEQ ID NO: 3466867 - DNA, 25 bp, Homo sapien
tgcccagtgccccatatacttgtag

SEQ ID NO: 3466868 - DNA, 25 bp, Homo sapien
ccttctgacttaagcaatagagaga

SEQ ID NO: 3466869 - DNA, 25 bp, Homo sapien
tgcccttgtgtctcccagtgaggag

SEQ ID NO: 3466870 - DNA, 25 bp, Homo sapien
tgaggagccctaagcattgacttct

SEQ ID NO: 3466871 - DNA, 25 bp, Homo sapien
gcagatttgcactggaaccattgct

SEQ ID NO: 3466872 - DNA, 25 bp, Homo sapien
cacctatattcctgtggttgagtag

SEQ ID NO: 3466873 - DNA, 25 bp, Homo sapien
tagacagttttgatcagagggagga

SEQ ID NO: 3466874 - DNA, 25 bp, Homo sapien
tccagagaagtataaggaagaaagt

SEQ ID NO: 3466875 - DNA, 25 bp, Homo sapien
cactggatcagttagagtttttgaa

SEQ ID NO: 3466876 - DNA, 25 bp, Homo sapien
gcgtccgcccggagccttgcccttc

SEQ ID NO: 3466877 - DNA, 25 bp, Homo sapien
catccgggccgtgaggtggccgcgt

SEQ ID NO: 3466878 - DNA, 25 bp, Homo sapien
cccctgaggcgtccgcccggagcct

SEQ ID NO: 3466879 - DNA, 25 bp, Homo sapien
cccatccgggccgtgaggtggccgc

SEQ ID NO: 3466880 - DNA, 25 bp, Homo sapien
tacacatctatggatgccacaggaa

SEQ ID NO: 3466881 - DNA, 25 bp, Homo sapien
ggtacatatacaagcacgtgtgtgc

SEQ ID NO: 3466882 - DNA, 25 bp, Homo sapien
gtacaaatggatatgctgcacactg

SEQ ID NO: 3466883 - DNA, 25 bp, Homo sapien
agaaatctggactctaccctgtgga

SEQ ID NO: 3466884 - DNA, 25 bp, Homo sapien
gacacgagagcaaaggttaatctca

SEQ ID NO: 3466885 - DNA, 25 bp, Homo sapien
tcagacacgagagcaaaggttaatc

SEQ ID NO: 3466886 - DNA, 25 bp, Homo sapien
agacacgagagcaaaggttaatctc

SEQ ID NO: 3466887 - DNA, 25 bp, Homo sapien
cagacacgagagcaaaggttaatct

SEQ ID NO: 3466888 - DNA, 25 bp, Homo sapien
ctgtaaagcagcagttctccaatgg

SEQ ID NO: 3466889 - DNA, 25 bp, Homo sapien
gtaaagcagcagttctccaatggag

SEQ ID NO: 3466890 - DNA, 25 bp, Homo sapien
tgtaaagcagcagttctccaatgga

SEQ ID NO: 3466891 - DNA, 25 bp, Homo sapien
ttgccaaatgagaagggcgtgcgtt

SEQ ID NO: 3466892 - DNA, 25 bp, Homo sapien
gatcatcttaactcgggaattgcaa

SEQ ID NO: 3466893 - DNA, 25 bp, Homo sapien
aaactgtatttgacaagtggtgccc

SEQ ID NO: 3466894 - DNA, 25 bp, Homo sapien
tgcccttggcctttgactgatcatc

SEQ ID NO: 3466895 - DNA, 25 bp, Homo sapien
tcagcaggctgtctagggttccaga

SEQ ID NO: 3466896 - DNA, 25 bp, Homo sapien
gggcatgattttcacaaccacctgt

SEQ ID NO: 3466897 - DNA, 25 bp, Homo sapien
tgaatttaatcctggccacttgctg

SEQ ID NO: 3466898 - DNA, 25 bp, Homo sapien
gaatcatttgggtaaagagctgaag

SEQ ID NO: 3466899 - DNA, 25 bp, Homo sapien
tacattcccggacaaccactaatct

SEQ ID NO: 3466900 - DNA, 25 bp, Homo sapien
ggaagaccaagatcacgatgccagt

SEQ ID NO: 3466901 - DNA, 25 bp, Homo sapien
tggcatataatgtcatgtgtctccc

SEQ ID NO: 3466902 - DNA, 25 bp, Homo sapien
gcagacagctgacttgtatcctcac

SEQ ID NO: 3466903 - DNA, 25 bp, Homo sapien
aacttttatgcagttgagcctggcc

SEQ ID NO: 3466904 - DNA, 25 bp, Homo sapien
tgtacttgaagatactctagtcagc

SEQ ID NO: 3466905 - DNA, 25 bp, Homo sapien
gaaccactttcttcatagcggcaac

SEQ ID NO: 3466906 - DNA, 25 bp, Homo sapien
agcctggcctccagccggggctgtt

SEQ ID NO: 3466907 - DNA, 25 bp, Homo sapien
ctgatgaaactagaagttcgtatat

SEQ ID NO: 3466908 - DNA, 25 bp, Homo sapien
gatgttaaagactgatgaaactaga

SEQ ID NO: 3466909 - DNA, 25 bp, Homo sapien
tgaaactagaagttcgtatattaca

SEQ ID NO: 3466910 - DNA, 25 bp, Homo sapien
aaactagaagttcgtatattacagc

SEQ ID NO: 3466911 - DNA, 25 bp, Homo sapien
ttactgggcccatccaacccgccat

SEQ ID NO: 3466912 - DNA, 25 bp, Homo sapien
gctccttttattctccctcaagtcc

SEQ ID NO: 3466913 - DNA, 25 bp, Homo sapien
tttactgggcccatccaacccgcca

SEQ ID NO: 3466914 - DNA, 25 bp, Homo sapien
agctccttttattctccctcaagtc

SEQ ID NO: 3466915 - DNA, 25 bp, Homo sapien
cctgggccaggcctagagtgggcac

SEQ ID NO: 3466916 - DNA, 25 bp, Homo sapien
ccttggagtgcggatctgtgatgct

SEQ ID NO: 3466917 - DNA, 25 bp, Homo sapien
cactgcgctgtaaaactgccttgga

SEQ ID NO: 3466918 - DNA, 25 bp, Homo sapien
tagatccctccactgcgctgtaaaa

SEQ ID NO: 3466919 - DNA, 25 bp, Homo sapien
tcatagggtgccgaattcttttttc

SEQ ID NO: 3466920 - DNA, 25 bp, Homo sapien
cttttttccccaggcttgccatggc

SEQ ID NO: 3466921 - DNA, 25 bp, Homo sapien
ccaggcttgccatggctagtcgagg

SEQ ID NO: 3466922 - DNA, 25 bp, Homo sapien
ccatggctagtcgaggggctcggca

SEQ ID NO: 3466923 - DNA, 25 bp, Homo sapien
cagtgcctgcgcgagcgaggtagcg

SEQ ID NO: 3466924 - DNA, 25 bp, Homo sapien
ggctcgggatccactggcctgggag

SEQ ID NO: 3466925 - DNA, 25 bp, Homo sapien
cagcgcccggccgagttggctcggg

SEQ ID NO: 3466926 - DNA, 25 bp, Homo sapien
agtgcctgcgcgagcgaggtagcga

SEQ ID NO: 3466927 - DNA, 25 bp, Homo sapien
gaagtgacgtaaaacgagcgccaca

SEQ ID NO: 3466928 - DNA, 25 bp, Homo sapien
tgatgaagtcgctcaaggccatgct

SEQ ID NO: 3466929 - DNA, 25 bp, Homo sapien
tgagcgaaaccctggatcagagcac

SEQ ID NO: 3466930 - DNA, 25 bp, Homo sapien
cgtcaggagcatgcgagacacagtc

SEQ ID NO: 3466931 - DNA, 25 bp, Homo sapien
cagcagagacactgggaggcagcca

SEQ ID NO: 3466932 - DNA, 25 bp, Homo sapien
ctggaagagaaattttgagcagcag

SEQ ID NO: 3466933 - DNA, 25 bp, Homo sapien
gaagagaaattttgagcagcagaga

SEQ ID NO: 3466934 - DNA, 25 bp, Homo sapien
gcagcagagacactgggaggcagcc

SEQ ID NO: 3466935 - DNA, 25 bp, Homo sapien
tgccacaaagtccaatgggcctggt

SEQ ID NO: 3466936 - DNA, 25 bp, Homo sapien
aacaacatgatgaccagagtagctg

SEQ ID NO: 3466937 - DNA, 25 bp, Homo sapien
ggtgtaactgtctctagggctggaa

SEQ ID NO: 3466938 - DNA, 25 bp, Homo sapien
tgatttgggagtcaccacccacttg

SEQ ID NO: 3466939 - DNA, 25 bp, Homo sapien
tcctgaagaagagtaacttgatgct

SEQ ID NO: 3466940 - DNA, 25 bp, Homo sapien
gaaatccttacttggctgttccatg

SEQ ID NO: 3466941 - DNA, 25 bp, Homo sapien
gctgagtaggttgagctctttgaag

SEQ ID NO: 3466942 - DNA, 25 bp, Homo sapien
gaagatttcttatgagagtcacaga

SEQ ID NO: 3466943 - DNA, 25 bp, Homo sapien
tccagttgcccatcagggtacggtt

SEQ ID NO: 3466944 - DNA, 25 bp, Homo sapien
ggtgcatcgccatccatactggaaa

SEQ ID NO: 3466945 - DNA, 25 bp, Homo sapien
gccatctgcattaacaaggctgcca

SEQ ID NO: 3466946 - DNA, 25 bp, Homo sapien
tttgggctgcacgatattcctcagg

SEQ ID NO: 3466947 - DNA, 25 bp, Homo sapien
tgttgtagcttgtatcatatgttgt

SEQ ID NO: 3466948 - DNA, 25 bp, Homo sapien
tgtagcttgtatcatatgttgtttc

SEQ ID NO: 3466949 - DNA, 25 bp, Homo sapien
tagcttgtatcatatgttgtttcaa

SEQ ID NO: 3466950 - DNA, 25 bp, Homo sapien
gcttgtatcatatgttgtttcaaag

SEQ ID NO: 3466951 - DNA, 25 bp, Homo sapien
gaaccagtgaggctctcgcttaaat

SEQ ID NO: 3466952 - DNA, 25 bp, Homo sapien
cctgggaaccagtgaggctctcgct

SEQ ID NO: 3466953 - DNA, 25 bp, Homo sapien
tatcggggaggatccagttcaggtt

SEQ ID NO: 3466954 - DNA, 25 bp, Homo sapien
ttgatgtcctgggaaccagtgaggc

SEQ ID NO: 3466955 - DNA, 25 bp, Homo sapien
ttaaggctttgaatagctattcatg

SEQ ID NO: 3466956 - DNA, 25 bp, Homo sapien
ggctttgaatagctattcatgtaag

SEQ ID NO: 3466957 - DNA, 25 bp, Homo sapien
tgaatagctattcatgtaagttgac

SEQ ID NO: 3466958 - DNA, 25 bp, Homo sapien
ttgaatagctattcatgtaagttga

SEQ ID NO: 3466959 - DNA, 25 bp, Homo sapien
tcctacatttcactctggaaaagtg

SEQ ID NO: 3466960 - DNA, 25 bp, Homo sapien
tagctgtacttagaatgtgctccct

SEQ ID NO: 3466961 - DNA, 25 bp, Homo sapien
ttatacacatcctgagtgatgccca

SEQ ID NO: 3466962 - DNA, 25 bp, Homo sapien
tttcttagaaacctggatgtgaaac

SEQ ID NO: 3466963 - DNA, 25 bp, Homo sapien
ccaaatgtagaactgagttgctgta

SEQ ID NO: 3466964 - DNA, 25 bp, Homo sapien
caccccaaatgtagaactgagttgc

SEQ ID NO: 3466965 - DNA, 25 bp, Homo sapien
ctacaacaccccaaatgtagaactg

SEQ ID NO: 3466966 - DNA, 25 bp, Homo sapien
caacaccccaaatgtagaactgagt

SEQ ID NO: 3466967 - DNA, 25 bp, Homo sapien
gcttacgaggacaacatatgggcag

SEQ ID NO: 3466968 - DNA, 25 bp, Homo sapien
tctgaggtcttgctacgacagaagg

SEQ ID NO: 3466969 - DNA, 25 bp, Homo sapien
ctaatggtgggacaacttgatagcc

SEQ ID NO: 3466970 - DNA, 25 bp, Homo sapien
caaagttgcactatacgactctggc

SEQ ID NO: 3466971 - DNA, 25 bp, Homo sapien
agtaacatgttgtctttatccattc

SEQ ID NO: 3466972 - DNA, 25 bp, Homo sapien
aactgttatctatagtgttgtacta

SEQ ID NO: 3466973 - DNA, 25 bp, Homo sapien
ctccattgtgtgtaagtaacatgtt

SEQ ID NO: 3466974 - DNA, 25 bp, Homo sapien
ggctattgtgaacagagctaccaca

SEQ ID NO: 3466975 - DNA, 25 bp, Homo sapien
cctcactgtgaatggaccaaggaaa

SEQ ID NO: 3466976 - DNA, 25 bp, Homo sapien
ccccaccagtgaatgaaagtcttgt

SEQ ID NO: 3466977 - DNA, 25 bp, Homo sapien
cttattaatgctaagggcaggccca

SEQ ID NO: 3466978 - DNA, 25 bp, Homo sapien
gaaataccggatcccagctgatgta

SEQ ID NO: 3466979 - DNA, 25 bp, Homo sapien
ctgagagccacatagaacgaaagat

SEQ ID NO: 3466980 - DNA, 25 bp, Homo sapien
cgcacactcttcagctgtcgcaggg

SEQ ID NO: 3466981 - DNA, 25 bp, Homo sapien
cccagatgtgggatcctctcctaaa

SEQ ID NO: 3466982 - DNA, 25 bp, Homo sapien
tgagaccctcacaaacggtttgcac

SEQ ID NO: 3466983 - DNA, 25 bp, Homo sapien
ccaggcggctcgggttggcaaattc

SEQ ID NO: 3466984 - DNA, 25 bp, Homo sapien
catgtggcactgagcggcccgacat

SEQ ID NO: 3466985 - DNA, 25 bp, Homo sapien
tcgggttggcaaattcgtactcggc

SEQ ID NO: 3466986 - DNA, 25 bp, Homo sapien
caaattcgtactcggcggtggccgg

SEQ ID NO: 3466987 - DNA, 25 bp, Homo sapien
agaggagggattgggaagagcaaga

SEQ ID NO: 3466988 - DNA, 25 bp, Homo sapien
ggcacaggggcgaaatgggaaatct

SEQ ID NO: 3466989 - DNA, 25 bp, Homo sapien
ggaggccacactgtagctaggagga

SEQ ID NO: 3466990 - DNA, 25 bp, Homo sapien
gaggaggaggcaccaaacggcctgg

SEQ ID NO: 3466991 - DNA, 25 bp, Homo sapien
gaaatgcctggaacttgccctcact

SEQ ID NO: 3466992 - DNA, 25 bp, Homo sapien
gcccgaggccggacatagtagccat

SEQ ID NO: 3466993 - DNA, 25 bp, Homo sapien
catcagcaggcaggacataggtgcg

SEQ ID NO: 3466994 - DNA, 25 bp, Homo sapien
tgccatcatgggagagagcagctcg

SEQ ID NO: 3466995 - DNA, 25 bp, Homo sapien
cacccaaaactaaaccaaggctatg

SEQ ID NO: 3466996 - DNA, 25 bp, Homo sapien
tgggtttattcagctccacccaaaa

SEQ ID NO: 3466997 - DNA, 25 bp, Homo sapien
catgggaccaaaccatacattgtgg

SEQ ID NO: 3466998 - DNA, 25 bp, Homo sapien
aaggctatgacatgtcccatgggac

SEQ ID NO: 3466999 - DNA, 25 bp, Homo sapien
cctagcaggttggacttttgaagcc

SEQ ID NO: 3467000 - DNA, 25 bp, Homo sapien
cagtgtcagatttcaacctagcagg

SEQ ID NO: 3467001 - DNA, 25 bp, Homo sapien
caaagggtagaacaacacacgggct

SEQ ID NO: 3467002 - DNA, 25 bp, Homo sapien
gaagccacctgctggaatgattccc

SEQ ID NO: 3467003 - DNA, 25 bp, Homo sapien
cttcctccgcagcagacccggtttc

SEQ ID NO: 3467004 - DNA, 25 bp, Homo sapien
tcctccgcagcagacccggtttccc

SEQ ID NO: 3467005 - DNA, 25 bp, Homo sapien
ttcctccgcagcagacccggtttcc

SEQ ID NO: 3467006 - DNA, 25 bp, Homo sapien
ctccgcagcagacccggtttcccat

SEQ ID NO: 3467007 - DNA, 25 bp, Homo sapien
gtcttctaaggcctcctgaaaggag

SEQ ID NO: 3467008 - DNA, 25 bp, Homo sapien
aggtgctgctctggtgttggaacaa

SEQ ID NO: 3467009 - DNA, 25 bp, Homo sapien
cctctacatccaccaacagagatag

SEQ ID NO: 3467010 - DNA, 25 bp, Homo sapien
gaggctggcagacaactatctccag

SEQ ID NO: 3467011 - DNA, 25 bp, Homo sapien
tgcagtggttcaaaaggtggcctct

SEQ ID NO: 3467012 - DNA, 25 bp, Homo sapien
caatgccggttcaatattcctgccc

SEQ ID NO: 3467013 - DNA, 25 bp, Homo sapien
ggtttacttgcttaccagccatgtg

SEQ ID NO: 3467014 - DNA, 25 bp, Homo sapien
tattactctcatccaggaagaaagg

SEQ ID NO: 3467015 - DNA, 25 bp, Homo sapien
taagggacttattacctatggtcac

SEQ ID NO: 3467016 - DNA, 25 bp, Homo sapien
tttacatgtgaggatggatacagag

SEQ ID NO: 3467017 - DNA, 25 bp, Homo sapien
aaagtcatattcagatattccatgg

SEQ ID NO: 3467018 - DNA, 25 bp, Homo sapien
agcctgtgatctacacaatgtagga

SEQ ID NO: 3467019 - DNA, 25 bp, Homo sapien
atcacccatgtgcaagagccctggc

SEQ ID NO: 3467020 - DNA, 25 bp, Homo sapien
aaacagatcacccatgtgcaagagc

SEQ ID NO: 3467021 - DNA, 25 bp, Homo sapien
aacagatcacccatgtgcaagagcc

SEQ ID NO: 3467022 - DNA, 25 bp, Homo sapien
agatcacccatgtgcaagagccctg

SEQ ID NO: 3467023 - DNA, 25 bp, Homo sapien
ttcttctggaaagttgatgggcagc

SEQ ID NO: 3467024 - DNA, 25 bp, Homo sapien
agctgttgtggctgcggcttcagtg

SEQ ID NO: 3467025 - DNA, 25 bp, Homo sapien
ttgtggctgcggcttcagtgtccgt

SEQ ID NO: 3467026 - DNA, 25 bp, Homo sapien
ttcagtgtccgtcttgtttggcttc

SEQ ID NO: 3467027 - DNA, 25 bp, Homo sapien
tgcggcttcagtgtccgtcttgttt

SEQ ID NO: 3467028 - DNA, 25 bp, Homo sapien
gctgtcttccgacatgaggcctgga

SEQ ID NO: 3467029 - DNA, 25 bp, Homo sapien
aaatgcacgtgtttcacttcccggg

SEQ ID NO: 3467030 - DNA, 25 bp, Homo sapien
ggacggctgcacacttgaatgtcag

SEQ ID NO: 3467031 - DNA, 25 bp, Homo sapien
tctcttgagacccttgctgctgtaa

SEQ ID NO: 3467032 - DNA, 25 bp, Homo sapien
gaagggtcgcatactctgtagcgtt

SEQ ID NO: 3467033 - DNA, 25 bp, Homo sapien
ggaagcgaagggtcgcatactctgt

SEQ ID NO: 3467034 - DNA, 25 bp, Homo sapien
cttgctgtcatagcgaggtgtggcc

SEQ ID NO: 3467035 - DNA, 25 bp, Homo sapien
ccgttcttgctgtcatagcgaggtg

SEQ ID NO: 3467036 - DNA, 25 bp, Homo sapien
agagccaacagtccctccgagggaa

SEQ ID NO: 3467037 - DNA, 25 bp, Homo sapien
tcaggccgtttattgatcctagcgg

SEQ ID NO: 3467038 - DNA, 25 bp, Homo sapien
caattccccaaagcagtaggttctc

SEQ ID NO: 3467039 - DNA, 25 bp, Homo sapien
tagtggttaacgatggactgggcct

SEQ ID NO: 3467040 - DNA, 25 bp, Homo sapien
tctggctttgccgcggtttcccgct

SEQ ID NO: 3467041 - DNA, 25 bp, Homo sapien
ctcttaaatgatgggtccgtctggt

SEQ ID NO: 3467042 - DNA, 25 bp, Homo sapien
gtttcccgctgccatggtgatgcgg

SEQ ID NO: 3467043 - DNA, 25 bp, Homo sapien
aatgatgggtccgtctggttcagca

SEQ ID NO: 3467044 - DNA, 25 bp, Homo sapien
cagtattatcccggcctgaccctgc

SEQ ID NO: 3467045 - DNA, 25 bp, Homo sapien
ccagtattatcccggcctgaccctg

SEQ ID NO: 3467046 - DNA, 25 bp, Homo sapien
ccctgcttagcttccaagatcaaac

SEQ ID NO: 3467047 - DNA, 25 bp, Homo sapien
aagatcaaacgagatcgggcgtgtt

SEQ ID NO: 3467048 - DNA, 25 bp, Homo sapien
ggagttattgaatctcataaccact

SEQ ID NO: 3467049 - DNA, 25 bp, Homo sapien
ggcagcaaggagttattgaatctca

SEQ ID NO: 3467050 - DNA, 25 bp, Homo sapien
aggctctgttggcagcaaggagtta

SEQ ID NO: 3467051 - DNA, 25 bp, Homo sapien
aatctcataaccacttgggtcccca

SEQ ID NO: 3467052 - DNA, 25 bp, Homo sapien
gaaggtcagggccttgtccaaggac

SEQ ID NO: 3467053 - DNA, 25 bp, Homo sapien
gcagccaggctagcaatatcttgtc

SEQ ID NO: 3467054 - DNA, 25 bp, Homo sapien
cattccacctcgtgatcccagatgg

SEQ ID NO: 3467055 - DNA, 25 bp, Homo sapien
caaggacgcagccaatcagtgacag

SEQ ID NO: 3467056 - DNA, 25 bp, Homo sapien
caaactagcggcttgcactgggcat

SEQ ID NO: 3467057 - DNA, 25 bp, Homo sapien
tctcggctcagctcattgggatccc

SEQ ID NO: 3467058 - DNA, 25 bp, Homo sapien
gcgcggtcgcggttcctatggaaac

SEQ ID NO: 3467059 - DNA, 25 bp, Homo sapien
cacttactggaaacctagactggag

SEQ ID NO: 3467060 - DNA, 25 bp, Homo sapien
cggccgccgccgcctcctcctcctc

SEQ ID NO: 3467061 - DNA, 25 bp, Homo sapien
ccgccgccgcctcctcctcctccct

SEQ ID NO: 3467062 - DNA, 25 bp, Homo sapien
gcggggtctccagcccggcggccgc

SEQ ID NO: 3467063 - DNA, 25 bp, Homo sapien
tgttcctgctgggggctccccgggc

SEQ ID NO: 3467064 - DNA, 25 bp, Homo sapien
tcctgcaggacgtccagtaagttcc

SEQ ID NO: 3467065 - DNA, 25 bp, Homo sapien
aagttccctcgggtcaggcaggcta

SEQ ID NO: 3467066 - DNA, 25 bp, Homo sapien
ctgcaggacgtccagtaagttccct

SEQ ID NO: 3467067 - DNA, 25 bp, Homo sapien
ccagtaagttccctcgggtcaggca

SEQ ID NO: 3467068 - DNA, 25 bp, Homo sapien
tgtgacaccccttggccaaaggaaa

SEQ ID NO: 3467069 - DNA, 25 bp, Homo sapien
caactcggttaggttgggacagcat

SEQ ID NO: 3467070 - DNA, 25 bp, Homo sapien
atgaggtgccctgcagtgcagacag

SEQ ID NO: 3467071 - DNA, 25 bp, Homo sapien
aggatgcaagctccgcccttcagtg

SEQ ID NO: 3467072 - DNA, 25 bp, Homo sapien
cagggtgcatctgtttagctggcat

SEQ ID NO: 3467073 - DNA, 25 bp, Homo sapien
cataaagctgcctgatagcctgctg

SEQ ID NO: 3467074 - DNA, 25 bp, Homo sapien
ccagggtgcatctgtttagctggca

SEQ ID NO: 3467075 - DNA, 25 bp, Homo sapien
cacgaggaacataaagctgcctgat

SEQ ID NO: 3467076 - DNA, 25 bp, Homo sapien
cataccattgtaggcttttctgcaa

SEQ ID NO: 3467077 - DNA, 25 bp, Homo sapien
catttggcataccattgtaggcttt

SEQ ID NO: 3467078 - DNA, 25 bp, Homo sapien
gggacagtgtccataggcactcaga

SEQ ID NO: 3467079 - DNA, 25 bp, Homo sapien
tcccaaatccctgttcacagaactg

SEQ ID NO: 3467080 - DNA, 25 bp, Homo sapien
gattgaagaagccaacgaggagccc

SEQ ID NO: 3467081 - DNA, 25 bp, Homo sapien
gaaactgtgtgactggcatcttgga

SEQ ID NO: 3467082 - DNA, 25 bp, Homo sapien
tgttggacccgaatgactggctggc

SEQ ID NO: 3467083 - DNA, 25 bp, Homo sapien
catactatcttagaggaacagccag

SEQ ID NO: 3467084 - DNA, 25 bp, Homo sapien
tctcagaaacaattactcgtgccat

SEQ ID NO: 3467085 - DNA, 25 bp, Homo sapien
cagaaacaattactcgtgccatatg

SEQ ID NO: 3467086 - DNA, 25 bp, Homo sapien
ttctcagaaacaattactcgtgcca

SEQ ID NO: 3467087 - DNA, 25 bp, Homo sapien
gaaacaattactcgtgccatatgca

SEQ ID NO: 3467088 - DNA, 25 bp, Homo sapien
accctctgaggaagcgtttgtgact

SEQ ID NO: 3467089 - DNA, 25 bp, Homo sapien
tgtgactggggtataataaacaacc

SEQ ID NO: 3467090 - DNA, 25 bp, Homo sapien
cataccctctgaggaagcgtttgtg

SEQ ID NO: 3467091 - DNA, 25 bp, Homo sapien
ctcataccctctgaggaagcgtttg

SEQ ID NO: 3467092 - DNA, 25 bp, Homo sapien
aatctcgatgagatatgccaggatc

SEQ ID NO: 3467093 - DNA, 25 bp, Homo sapien
caacaatctcgatgagatatgccag

SEQ ID NO: 3467094 - DNA, 25 bp, Homo sapien
ggatcaccccatcccggagatcttg

SEQ ID NO: 3467095 - DNA, 25 bp, Homo sapien
tcacccaggccacataggcctgcag

SEQ ID NO: 3467096 - DNA, 25 bp, Homo sapien
ctttagccgaagtctggtgcatacg

SEQ ID NO: 3467097 - DNA, 25 bp, Homo sapien
tcctgttggttaccgggactcagct

SEQ ID NO: 3467098 - DNA, 25 bp, Homo sapien
ggccacaaactgtagcactttctcc

SEQ ID NO: 3467099 - DNA, 25 bp, Homo sapien
catacgaatctttttagaggccaca

SEQ ID NO: 3467100 - DNA, 25 bp, Homo sapien
agtatactcatgcaccaaggatgtg

SEQ ID NO: 3467101 - DNA, 25 bp, Homo sapien
ctcatgcaccaaggatgtgatgagg

SEQ ID NO: 3467102 - DNA, 25 bp, Homo sapien
atactcatgcaccaaggatgtgatg

SEQ ID NO: 3467103 - DNA, 25 bp, Homo sapien
tggttaaagtatactcatgcaccaa

SEQ ID NO: 3467104 - DNA, 25 bp, Homo sapien
ggaaccagatcagaggtatcgtgga

SEQ ID NO: 3467105 - DNA, 25 bp, Homo sapien
cagaggtatcgtggaactctaaatt

SEQ ID NO: 3467106 - DNA, 25 bp, Homo sapien
ccagatcagaggtatcgtggaactc

SEQ ID NO: 3467107 - DNA, 25 bp, Homo sapien
gtatcgtggaactctaaattttgcc

SEQ ID NO: 3467108 - DNA, 25 bp, Homo sapien
tctgtctatatcgaaagacatcccg

SEQ ID NO: 3467109 - DNA, 25 bp, Homo sapien
aatgagctgccaaggcaaggaccag

SEQ ID NO: 3467110 - DNA, 25 bp, Homo sapien
ggaccagcctcatgatagacttcag

SEQ ID NO: 3467111 - DNA, 25 bp, Homo sapien
cctgatcgggacatgtcatgacaca

SEQ ID NO: 3467112 - DNA, 25 bp, Homo sapien
gttgcccttcgtactgctgcactag

SEQ ID NO: 3467113 - DNA, 25 bp, Homo sapien
acctttgttgcccttcgtactgctg

SEQ ID NO: 3467114 - DNA, 25 bp, Homo sapien
gctggattcagacggggacctttgt

SEQ ID NO: 3467115 - DNA, 25 bp, Homo sapien
ctagggcccgcacactccagtatgg

SEQ ID NO: 3467116 - DNA, 25 bp, Homo sapien
tgagctttacacagacttttccggc

SEQ ID NO: 3467117 - DNA, 25 bp, Homo sapien
ttgttacttgaagccgagaactccg

SEQ ID NO: 3467118 - DNA, 25 bp, Homo sapien
tacacttaggctcaaggacagcaca

SEQ ID NO: 3467119 - DNA, 25 bp, Homo sapien
tggctatcataaacactggcacctc

SEQ ID NO: 3467120 - DNA, 25 bp, Homo sapien
ggctcagaatgtgcgggaacctgct

SEQ ID NO: 3467121 - DNA, 25 bp, Homo sapien
tgggttccagatagccacaagaagc

SEQ ID NO: 3467122 - DNA, 25 bp, Homo sapien
tatcaggctcagaagagtgaaaggc

SEQ ID NO: 3467123 - DNA, 25 bp, Homo sapien
tactaacccagcatgccaaagagct

SEQ ID NO: 3467124 - DNA, 25 bp, Homo sapien
cttggcctccgcggacgcacggtgc

SEQ ID NO: 3467125 - DNA, 25 bp, Homo sapien
cctggcgggggcatctcaacccatc

SEQ ID NO: 3467126 - DNA, 25 bp, Homo sapien
cggacgcacggtgccgggcatcccc

SEQ ID NO: 3467127 - DNA, 25 bp, Homo sapien
ccctggcgggggcatctcaacccat

SEQ ID NO: 3467128 - DNA, 25 bp, Homo sapien
aggctctgaagcgcgcagtcccggc

SEQ ID NO: 3467129 - DNA, 25 bp, Homo sapien
cagtcccggccgctcagactgtgca

SEQ ID NO: 3467130 - DNA, 25 bp, Homo sapien
ctcgcgggagaaagcgggaacggcg

SEQ ID NO: 3467131 - DNA, 25 bp, Homo sapien
cggcggcgtctcggccccagcgact

SEQ ID NO: 3467132 - DNA, 25 bp, Homo sapien
tcacatcgctcccaaattcaggcat

SEQ ID NO: 3467133 - DNA, 25 bp, Homo sapien
aattcaggcatgtctccccgcgctg

SEQ ID NO: 3467134 - DNA, 25 bp, Homo sapien
cgcgctggggctggaaaacgcctcc

SEQ ID NO: 3467135 - DNA, 25 bp, Homo sapien
gcctccacgggaaggccagcctagc

SEQ ID NO: 3467136 - DNA, 25 bp, Homo sapien
cagcaagcctgcgtccccgggtgaa

SEQ ID NO: 3467137 - DNA, 25 bp, Homo sapien
cctcctgtctcgggcttcagcaagc

SEQ ID NO: 3467138 - DNA, 25 bp, Homo sapien
cgtccccgggtgaagtgggaggctg

SEQ ID NO: 3467139 - DNA, 25 bp, Homo sapien
gcaagcctgcgtccccgggtgaagt

SEQ ID NO: 3467140 - DNA, 25 bp, Homo sapien
ggctaggattcactgacccacttaa

SEQ ID NO: 3467141 - DNA, 25 bp, Homo sapien
caggcacgtcaaaagcagtgaggca

SEQ ID NO: 3467142 - DNA, 25 bp, Homo sapien
tcacccagacaacagtgaaagtggc

SEQ ID NO: 3467143 - DNA, 25 bp, Homo sapien
ttaatgtgcccctgaagtctcccag

SEQ ID NO: 3467144 - DNA, 25 bp, Homo sapien
agcgggaataatcacaaaatctgcc

SEQ ID NO: 3467145 - DNA, 25 bp, Homo sapien
aatggactcgctctttgcactgtgg

SEQ ID NO: 3467146 - DNA, 25 bp, Homo sapien
cactgtggattggactgggtgaagt

SEQ ID NO: 3467147 - DNA, 25 bp, Homo sapien
ttctctattccttcagcgggaataa

SEQ ID NO: 3467148 - DNA, 25 bp, Homo sapien
gttctcatagcacagactggactct

SEQ ID NO: 3467149 - DNA, 25 bp, Homo sapien
tgttctcatagcacagactggactc

SEQ ID NO: 3467150 - DNA, 25 bp, Homo sapien
ctgttctcatagcacagactggact

SEQ ID NO: 3467151 - DNA, 25 bp, Homo sapien
aggttcaggtcacctgcgttctgaa

SEQ ID NO: 3467152 - DNA, 25 bp, Homo sapien
gttcacagggtagcgttcacaggtt

SEQ ID NO: 3467153 - DNA, 25 bp, Homo sapien
gaaaactgatttccagcagacagcg

SEQ ID NO: 3467154 - DNA, 25 bp, Homo sapien
ggtagcgttcacaggttcaggtcac

SEQ ID NO: 3467155 - DNA, 25 bp, Homo sapien
ccatgaggtctccagataggttcca

SEQ ID NO: 3467156 - DNA, 25 bp, Homo sapien
ctgtagtcctgatatcattttcttt

SEQ ID NO: 3467157 - DNA, 25 bp, Homo sapien
tcgagataatggagaatctgtccct

SEQ ID NO: 3467158 - DNA, 25 bp, Homo sapien
tccctggccgccagtctcgagataa

SEQ ID NO: 3467159 - DNA, 25 bp, Homo sapien
tatatgtgaggactcacaaaacttg

SEQ ID NO: 3467160 - DNA, 25 bp, Homo sapien
gcgttgcctatacctaattattata

SEQ ID NO: 3467161 - DNA, 25 bp, Homo sapien
gcaggtgagtatctatcaggtcagt

SEQ ID NO: 3467162 - DNA, 25 bp, Homo sapien
ggtgtggcccaccatgcgttgccta

SEQ ID NO: 3467163 - DNA, 25 bp, Homo sapien
ctgcatttttactccctaaagcaac

SEQ ID NO: 3467164 - DNA, 25 bp, Homo sapien
tgcatttttactccctaaagcaacc

SEQ ID NO: 3467165 - DNA, 25 bp, Homo sapien
gaaacttaactctccttcagatgac

SEQ ID NO: 3467166 - DNA, 25 bp, Homo sapien
gttgaacttggtaagctcaccccaa

SEQ ID NO: 3467167 - DNA, 25 bp, Homo sapien
cagatgacttagtccagagttgaac

SEQ ID NO: 3467168 - DNA, 25 bp, Homo sapien
ccagagttgaacttggtaagctcac

SEQ ID NO: 3467169 - DNA, 25 bp, Homo sapien
gggccaagggcctctcctgttcatc

SEQ ID NO: 3467170 - DNA, 25 bp, Homo sapien
gtaaggatccattgagcagtaaggc

SEQ ID NO: 3467171 - DNA, 25 bp, Homo sapien
caggtaaggatccattgagcagtaa

SEQ ID NO: 3467172 - DNA, 25 bp, Homo sapien
atcttcaggtaaggatccattgagc

SEQ ID NO: 3467173 - DNA, 25 bp, Homo sapien
gaaaaccagaactggtcaaggaaga

SEQ ID NO: 3467174 - DNA, 25 bp, Homo sapien
cagcatttcaagaaggcatgaacag

SEQ ID NO: 3467175 - DNA, 25 bp, Homo sapien
gcagtgtcaaatgctaaatacaagt

SEQ ID NO: 3467176 - DNA, 25 bp, Homo sapien
caatggtcaaaaatgtaggaggaaa

SEQ ID NO: 3467177 - DNA, 25 bp, Homo sapien
tctgatccagacgactttggattat

SEQ ID NO: 3467178 - DNA, 25 bp, Homo sapien
actctgatccagacgactttggatt

SEQ ID NO: 3467179 - DNA, 25 bp, Homo sapien
gatccagacgactttggattataat

SEQ ID NO: 3467180 - DNA, 25 bp, Homo sapien
tgatccagacgactttggattataa

SEQ ID NO: 3467181 - DNA, 25 bp, Homo sapien
cgaaattctattacctaccaccagg

SEQ ID NO: 3467182 - DNA, 25 bp, Homo sapien
ccctcttgaagttgtgtaatagtcc

SEQ ID NO: 3467183 - DNA, 25 bp, Homo sapien
catacatgcatacttctagggagag

SEQ ID NO: 3467184 - DNA, 25 bp, Homo sapien
cgaagtcagccgttcaagacaagcc

SEQ ID NO: 3467185 - DNA, 25 bp, Homo sapien
caaatatagttagatcagatggtga

SEQ ID NO: 3467186 - DNA, 25 bp, Homo sapien
aatatagttagatcagatggtgaca

SEQ ID NO: 3467187 - DNA, 25 bp, Homo sapien
tatagttagatcagatggtgacatc

SEQ ID NO: 3467188 - DNA, 25 bp, Homo sapien
atagttagatcagatggtgacatct

SEQ ID NO: 3467189 - DNA, 25 bp, Homo sapien
ttatcccctgtaagtttctggcttc

SEQ ID NO: 3467190 - DNA, 25 bp, Homo sapien
tatcccctgtaagtttctggcttct

SEQ ID NO: 3467191 - DNA, 25 bp, Homo sapien
aatggaactaatggactagggctgc

SEQ ID NO: 3467192 - DNA, 25 bp, Homo sapien
ctaacaaaaggtgagctggatatcc

SEQ ID NO: 3467193 - DNA, 25 bp, Homo sapien
tgctccatgggacattaatgtgcca

SEQ ID NO: 3467194 - DNA, 25 bp, Homo sapien
tgcccttggcatcagtagttcaaag

SEQ ID NO: 3467195 - DNA, 25 bp, Homo sapien
aacagatgtgtcctgctgagtcaat

SEQ ID NO: 3467196 - DNA, 25 bp, Homo sapien
acagatgtgtcctgctgagtcaatc

SEQ ID NO: 3467197 - DNA, 25 bp, Homo sapien
tttatattctcccaagagccggttc

SEQ ID NO: 3467198 - DNA, 25 bp, Homo sapien
ccaagagccggttcctctcatctag

SEQ ID NO: 3467199 - DNA, 25 bp, Homo sapien
gagccggttcctctcatctagcttc

SEQ ID NO: 3467200 - DNA, 25 bp, Homo sapien
tattctcccaagagccggttcctct

SEQ ID NO: 3467201 - DNA, 25 bp, Homo sapien
actgacatcagagagtttccggagt

SEQ ID NO: 3467202 - DNA, 25 bp, Homo sapien
catcagagagtttccggagtgcttc

SEQ ID NO: 3467203 - DNA, 25 bp, Homo sapien
gagagtttccggagtgcttcttcta

SEQ ID NO: 3467204 - DNA, 25 bp, Homo sapien
gagtttccggagtgcttcttctaac

SEQ ID NO: 3467205 - DNA, 25 bp, Homo sapien
ctgcaaaatagacactaaatcagaa

SEQ ID NO: 3467206 - DNA, 25 bp, Homo sapien
caaaatagacactaaatcagaaaat

SEQ ID NO: 3467207 - DNA, 25 bp, Homo sapien
aaaatagacactaaatcagaaaatg

SEQ ID NO: 3467208 - DNA, 25 bp, Homo sapien
aaatagacactaaatcagaaaatga

SEQ ID NO: 3467209 - DNA, 25 bp, Homo sapien
tttgtgttctagctctcgctctaga

SEQ ID NO: 3467210 - DNA, 25 bp, Homo sapien
tgtgttctagctctcgctctagatc

SEQ ID NO: 3467211 - DNA, 25 bp, Homo sapien
ctttgtgttctagctctcgctctag

SEQ ID NO: 3467212 - DNA, 25 bp, Homo sapien
tgttctagctctcgctctagatcca

SEQ ID NO: 3467213 - DNA, 25 bp, Homo sapien
gaaaaccattgctttgagagttgtg

SEQ ID NO: 3467214 - DNA, 25 bp, Homo sapien
ccattgctttgagagttgtgactgt

SEQ ID NO: 3467215 - DNA, 25 bp, Homo sapien
gaaggagaaaaccattgctttgaga

SEQ ID NO: 3467216 - DNA, 25 bp, Homo sapien
tgctgactgaagtagctccttttcc

SEQ ID NO: 3467217 - DNA, 25 bp, Homo sapien
tgcggagagcatctcgaacaagctg

SEQ ID NO: 3467218 - DNA, 25 bp, Homo sapien
catgcaggcgctccatgaggctaga

SEQ ID NO: 3467219 - DNA, 25 bp, Homo sapien
gaggctagaaatgccctgctccaag

SEQ ID NO: 3467220 - DNA, 25 bp, Homo sapien
gaggatcgtggccactgaagctgtt

SEQ ID NO: 3467221 - DNA, 25 bp, Homo sapien
gtattcactacctacttgagttctg

SEQ ID NO: 3467222 - DNA, 25 bp, Homo sapien
caggactcccggtattcactaccta

SEQ ID NO: 3467223 - DNA, 25 bp, Homo sapien
actcccggtattcactacctacttg

SEQ ID NO: 3467224 - DNA, 25 bp, Homo sapien
ccggtattcactacctacttgagtt

SEQ ID NO: 3467225 - DNA, 25 bp, Homo sapien
tcctgcctgcacgtggctaaatggc

SEQ ID NO: 3467226 - DNA, 25 bp, Homo sapien
cctactgagcaaaaatgggtactta

SEQ ID NO: 3467227 - DNA, 25 bp, Homo sapien
catccccaaaatgtagtgtgaaaaa

SEQ ID NO: 3467228 - DNA, 25 bp, Homo sapien
tctggtctaatatgctaggagtccc

SEQ ID NO: 3467229 - DNA, 25 bp, Homo sapien
ttgtctacttactttctcgatagtg

SEQ ID NO: 3467230 - DNA, 25 bp, Homo sapien
gttgtctacttactttctcgatagt

SEQ ID NO: 3467231 - DNA, 25 bp, Homo sapien
tttctcgatagtgttcttttataca

SEQ ID NO: 3467232 - DNA, 25 bp, Homo sapien
ctttctcgatagtgttcttttatac

SEQ ID NO: 3467233 - DNA, 25 bp, Homo sapien
taagcacctggtagtcatgaaaaag

SEQ ID NO: 3467234 - DNA, 25 bp, Homo sapien
tctgcaagtgggtgcaaattcctcg

SEQ ID NO: 3467235 - DNA, 25 bp, Homo sapien
aaattcctcgtgtctgtggctccca

SEQ ID NO: 3467236 - DNA, 25 bp, Homo sapien
tatactgtcttctcagcctttagca

SEQ ID NO: 3467237 - DNA, 25 bp, Homo sapien
aggtacttgccacccgcccgctaat

SEQ ID NO: 3467238 - DNA, 25 bp, Homo sapien
acgcccagcctagctatttcaaact

SEQ ID NO: 3467239 - DNA, 25 bp, Homo sapien
tagctcccacatactggtagagaac

SEQ ID NO: 3467240 - DNA, 25 bp, Homo sapien
cagcctagctatttcaaactataca

SEQ ID NO: 3467241 - DNA, 25 bp, Homo sapien
gatacatatcagttctacgtatttt

SEQ ID NO: 3467242 - DNA, 25 bp, Homo sapien
taaattgatacatatcagttctacg

SEQ ID NO: 3467243 - DNA, 25 bp, Homo sapien
cgtgttattttgatacgtgcataca

SEQ ID NO: 3467244 - DNA, 25 bp, Homo sapien
ggacacaagtaatactcccacatca

SEQ ID NO: 3467245 - DNA, 25 bp, Homo sapien
tattgtgtcaatttgatgcctctct

SEQ ID NO: 3467246 - DNA, 25 bp, Homo sapien
ttgtgtcaatttgatgcctctctct

SEQ ID NO: 3467247 - DNA, 25 bp, Homo sapien
attgtgtcaatttgatgcctctctc
